United States Patent Application Publication US 2011/0177960 A1 - sequence listing, part 17

SEQ ID NO: 288282 - DNA, 25 bp, Artificial
  probe
  misc_feature (1)..(25): SEQ ID NO: 1253; WAN024D3H; Start 183; Stop 207
tcaagtttacgaaagcagtctggag

SEQ ID NO: 288283 - DNA, 25 bp, Artificial
  probe
  misc_feature (1)..(25): SEQ ID NO: 1253; WAN024D3H; Start 265; Stop 289
aatgaagacctagtctatgaggagg

SEQ ID NO: 288284 - DNA, 25 bp, Artificial
  probe
  misc_feature (1)..(25): SEQ ID NO: 1253; WAN024D3H; Start 119; Stop 143
aagagttgacagagattgtgcgaga

SEQ ID NO: 288285 - DNA, 25 bp, Artificial
  probe
  misc_feature (1)..(25): SEQ ID NO: 1253; WAN024D3H; Start 268; Stop 292
gaagacctagtctatgaggaggaag

SEQ ID NO: 288286 - DNA, 25 bp, Artificial
  probe
  misc_feature (1)..(25): SEQ ID NO: 1253; WAN024D3H; Start 266; Stop 290
atgaagacctagtctatgaggagga

SEQ ID NO: 288287 - DNA, 25 bp, Artificial
  probe
  misc_feature (1)..(25): SEQ ID NO: 1253; WAN024D3H; Start 99; Stop 123
taagctcatgaagactcaggaagag

SEQ ID NO: 288288 - DNA, 25 bp, Artificial
  probe
  misc_feature (1)..(25): SEQ ID NO: 1253; WAN024D3H; Start 269; Stop 293
aagacctagtctatgaggaggaagt

SEQ ID NO: 288289 - DNA, 25 bp, Artificial
  probe
  misc_feature (1)..(25): SEQ ID NO: 1253; WAN024D3H; Start 267; Stop 291
tgaagacctagtctatgaggaggaa

SEQ ID NO: 288290 - DNA, 25 bp, Artificial
  probe
  misc_feature (1)..(25): SEQ ID NO: 1253; WAN024D3H; Start 98; Stop 122
gtaagctcatgaagactcaggaaga

SEQ ID NO: 288291 - DNA, 25 bp, Artificial
  probe
  misc_feature (1)..(25): SEQ ID NO: 1253; WAN024D3H; Start 111; Stop 135
gactcaggaagagttgacagagatt

SEQ ID NO: 288292 - DNA, 25 bp, Artificial
  probe
  misc_feature (1)..(25): SEQ ID NO: 1253; WAN024D3H; Start 270; Stop 294
agacctagtctatgaggaggaagtc

SEQ ID NO: 288293 - DNA, 25 bp, Artificial
  probe
  misc_feature (1)..(25): SEQ ID NO: 1253; WAN024D3H; Start 112; Stop 136
actcaggaagagttgacagagattg

SEQ ID NO: 288294 - DNA, 25 bp, Artificial
  probe
  misc_feature (1)..(25): SEQ ID NO: 1253; WAN024D3H; Start 106; Stop 130
atgaagactcaggaagagttgacag

SEQ ID NO: 288295 - DNA, 25 bp, Artificial
  probe
  misc_feature (1)..(25): SEQ ID NO: 1253; WAN024D3H; Start 124; Stop 148
ttgacagagattgtgcgagaccatt

SEQ ID NO: 288296 - DNA, 25 bp, Artificial
  probe
  misc_feature (1)..(25): SEQ ID NO: 1253; WAN024D3H; Start 105; Stop 129
catgaagactcaggaagagttgaca

SEQ ID NO: 288297 - DNA, 25 bp, Artificial
  probe
  misc_feature (1)..(25): SEQ ID NO: 1253; WAN024D3H; Start 108; Stop 132
gaagactcaggaagagttgacagag

SEQ ID NO: 288298 - DNA, 25 bp, Artificial
  probe
  misc_feature (1)..(25): SEQ ID NO: 1253; WAN024D3H; Start 120; Stop 144
agagttgacagagattgtgcgagac

SEQ ID NO: 288299 - DNA, 25 bp, Artificial
  probe
  misc_feature (1)..(25): SEQ ID NO: 1253; WAN024D3H; Start 110; Stop 134
agactcaggaagagttgacagagat

SEQ ID NO: 288300 - DNA, 25 bp, Artificial
  probe
  misc_feature (1)..(25): SEQ ID NO: 1253; WAN024D3H; Start 109; Stop 133
aagactcaggaagagttgacagaga

SEQ ID NO: 288301 - DNA, 25 bp, Artificial
  probe
  misc_feature (1)..(25): SEQ ID NO: 1254; WAN024D65; Start 570; Stop 594
tatgcctatgaccgagttaagtatg

SEQ ID NO: 288302 - DNA, 25 bp, Artificial
  probe
  misc_feature (1)..(25): SEQ ID NO: 1254; WAN024D65; Start 568; Stop 592
aatatgcctatgaccgagttaagta

SEQ ID NO: 288303 - DNA, 25 bp, Artificial
  probe
  misc_feature (1)..(25): SEQ ID NO: 1254; WAN024D65; Start 569; Stop 593
atatgcctatgaccgagttaagtat

SEQ ID NO: 288304 - DNA, 25 bp, Artificial
  probe
  misc_feature (1)..(25): SEQ ID NO: 1254; WAN024D65; Start 427; Stop 451
ccagagttagccagactagataaga

SEQ ID NO: 288305 - DNA, 25 bp, Artificial
  probe
  misc_feature (1)..(25): SEQ ID NO: 1254; WAN024D65; Start 571; Stop 595
atgcctatgaccgagttaagtatgg

SEQ ID NO: 288306 - DNA, 25 bp, Artificial
  probe
  misc_feature (1)..(25): SEQ ID NO: 1254; WAN024D65; Start 428; Stop 452
cagagttagccagactagataagat

SEQ ID NO: 288307 - DNA, 25 bp, Artificial
  probe
  misc_feature (1)..(25): SEQ ID NO: 1254; WAN024D65; Start 431; Stop 455
agttagccagactagataagattga

SEQ ID NO: 288308 - DNA, 25 bp, Artificial
  probe
  misc_feature (1)..(25): SEQ ID NO: 1254; WAN024D65; Start 432; Stop 456
gttagccagactagataagattgaa

SEQ ID NO: 288309 - DNA, 25 bp, Artificial
  probe
  misc_feature (1)..(25): SEQ ID NO: 1254; WAN024D65; Start 430; Stop 454
gagttagccagactagataagattg

SEQ ID NO: 288310 - DNA, 25 bp, Artificial
  probe
  misc_feature (1)..(25): SEQ ID NO: 1254; WAN024D65; Start 429; Stop 453
agagttagccagactagataagatt

SEQ ID NO: 288311 - DNA, 25 bp, Artificial
  probe
  misc_feature (1)..(25): SEQ ID NO: 1254; WAN024D65; Start 426; Stop 450
gccagagttagccagactagataag

SEQ ID NO: 288312 - DNA, 25 bp, Artificial
  probe
  misc_feature (1)..(25): SEQ ID NO: 1254; WAN024D65; Start 588; Stop 612
aagtatgggaatgagtcgtgattat

SEQ ID NO: 288313 - DNA, 25 bp, Artificial
  probe
  misc_feature (1)..(25): SEQ ID NO: 1254; WAN024D65; Start 576; Stop 600
tatgaccgagttaagtatgggaatg

SEQ ID NO: 288314 - DNA, 25 bp, Artificial
  probe
  misc_feature (1)..(25): SEQ ID NO: 1254; WAN024D65; Start 586; Stop 610
ttaagtatgggaatgagtcgtgatt

SEQ ID NO: 288315 - DNA, 25 bp, Artificial
  probe
  misc_feature (1)..(25): SEQ ID NO: 1254; WAN024D65; Start 575; Stop 599
ctatgaccgagttaagtatgggaat

SEQ ID NO: 288316 - DNA, 25 bp, Artificial
  probe
  misc_feature (1)..(25): SEQ ID NO: 1254; WAN024D65; Start 567; Stop 591
aaatatgcctatgaccgagttaagt

SEQ ID NO: 288317 - DNA, 25 bp, Artificial
  probe
  misc_feature (1)..(25): SEQ ID NO: 1254; WAN024D65; Start 455; Stop 479
aatatgttggtttaatgacgatggc

SEQ ID NO: 288318 - DNA, 25 bp, Artificial
  probe
  misc_feature (1)..(25): SEQ ID NO: 1254; WAN024D65; Start 585; Stop 609
gttaagtatgggaatgagtcgtgat

SEQ ID NO: 288319 - DNA, 25 bp, Artificial
  probe
  misc_feature (1)..(25): SEQ ID NO: 1254; WAN024D65; Start 566; Stop 590
caaatatgcctatgaccgagttaag

SEQ ID NO: 288320 - DNA, 25 bp, Artificial
  probe
  misc_feature (1)..(25): SEQ ID NO: 1254; WAN024D65; Start 587; Stop 611
taagtatgggaatgagtcgtgatta

SEQ ID NO: 288321 - DNA, 25 bp, Artificial
  probe
  misc_feature (1)..(25): SEQ ID NO: 1254; WAN024D65; Start 565; Stop 589
ccaaatatgcctatgaccgagttaa

SEQ ID NO: 288322 - DNA, 25 bp, Artificial
  probe
  misc_feature (1)..(25): SEQ ID NO: 1254; WAN024D65; Start 558; Stop 582
acaaattccaaatatgcctatgacc

SEQ ID NO: 288323 - DNA, 25 bp, Artificial
  probe
  misc_feature (1)..(25): SEQ ID NO: 1254; WAN024D65; Start 342; Stop 366
agtcatcaagtgtttccttcaagta

SEQ ID NO: 288324 - DNA, 25 bp, Artificial
  probe
  misc_feature (1)..(25): SEQ ID NO: 1254; WAN024D65; Start 560; Stop 584
aaattccaaatatgcctatgaccga

SEQ ID NO: 288325 - DNA, 25 bp, Artificial
  probe
  misc_feature (1)..(25): SEQ ID NO: 1254; WAN024D65; Start 559; Stop 583
caaattccaaatatgcctatgaccg

SEQ ID NO: 288326 - DNA, 25 bp, Artificial
  probe
  misc_feature (1)..(25): SEQ ID NO: 1254; WAN024D65; Start 343; Stop 367
gtcatcaagtgtttccttcaagtaa

SEQ ID NO: 288327 - DNA, 25 bp, Artificial
  probe
  misc_feature (1)..(25): SEQ ID NO: 1254; WAN024D65; Start 589; Stop 613
agtatgggaatgagtcgtgattata

SEQ ID NO: 288328 - DNA, 25 bp, Artificial
  probe
  misc_feature (1)..(25): SEQ ID NO: 1254; WAN024D65; Start 583; Stop 607
gagttaagtatgggaatgagtcgtg

SEQ ID NO: 288329 - DNA, 25 bp, Artificial
  probe
  misc_feature (1)..(25): SEQ ID NO: 1254; WAN024D65; Start 456; Stop 480
atatgttggtttaatgacgatggca

SEQ ID NO: 288330 - DNA, 25 bp, Artificial
  probe
  misc_feature (1)..(25): SEQ ID NO: 1254; WAN024D65; Start 561; Stop 585
aattccaaatatgcctatgaccgag

SEQ ID NO: 288331 - DNA, 25 bp, Artificial
  probe
  misc_feature (1)..(25): SEQ ID NO: 1254; WAN024D65; Start 584; Stop 608
agttaagtatgggaatgagtcgtga

SEQ ID NO: 288332 - DNA, 25 bp, Artificial
  probe
  misc_feature (1)..(25): SEQ ID NO: 1254; WAN024D65; Start 564; Stop 588
tccaaatatgcctatgaccgagtta

SEQ ID NO: 288333 - DNA, 25 bp, Artificial
  probe
  misc_feature (1)..(25): SEQ ID NO: 1254; WAN024D65; Start 425; Stop 449
tgccagagttagccagactagataa

SEQ ID NO: 288334 - DNA, 25 bp, Artificial
  probe
  misc_feature (1)..(25): SEQ ID NO: 1255; WAN024ESD; Start 41; Stop 65
atgttgatgtcagtattgaggaact

SEQ ID NO: 288335 - DNA, 25 bp, Artificial
  probe
  misc_feature (1)..(25): SEQ ID NO: 1255; WAN024ESD; Start 750; Stop 774
attcaatcagttatccttgccactt

SEQ ID NO: 288336 - DNA, 25 bp, Artificial
  probe
  misc_feature (1)..(25): SEQ ID NO: 1255; WAN024ESD; Start 749; Stop 773
aattcaatcagttatccttgccact

SEQ ID NO: 288337 - DNA, 25 bp, Artificial
  probe
  misc_feature (1)..(25): SEQ ID NO: 1255; WAN024ESD; Start 369; Stop 393
attaacacctagcgaacaattaacg

SEQ ID NO: 288338 - DNA, 25 bp, Artificial
  probe
  misc_feature (1)..(25): SEQ ID NO: 1255; WAN024ESD; Start 40; Stop 64
tatgttgatgtcagtattgaggaac

SEQ ID NO: 288339 - DNA, 25 bp, Artificial
  probe
  misc_feature (1)..(25): SEQ ID NO: 1255; WAN024ESD; Start 366; Stop 390
ggaattaacacctagcgaacaatta

SEQ ID NO: 288340 - DNA, 25 bp, Artificial
  probe
  misc_feature (1)..(25): SEQ ID NO: 1255; WAN024ESD; Start 363; Stop 387
taaggaattaacacctagcgaacaa

SEQ ID NO: 288341 - DNA, 25 bp, Artificial
  probe
  misc_feature (1)..(25): SEQ ID NO: 1255; WAN024ESD; Start 362; Stop 386
ctaaggaattaacacctagcgaaca

SEQ ID NO: 288342 - DNA, 25 bp, Artificial
  probe
  misc_feature (1)..(25): SEQ ID NO: 1255; WAN024ESD; Start 365; Stop 389
aggaattaacacctagcgaacaatt

SEQ ID NO: 288343 - DNA, 25 bp, Artificial
  probe
  misc_feature (1)..(25): SEQ ID NO: 1255; WAN024ESD; Start 364; Stop 388
aaggaattaacacctagcgaacaat

SEQ ID NO: 288344 - DNA, 25 bp, Artificial
  probe
  misc_feature (1)..(25): SEQ ID NO: 1255; WAN024ESD; Start 39; Stop 63
ttatgttgatgtcagtattgaggaa

SEQ ID NO: 288345 - DNA, 25 bp, Artificial
  probe
  misc_feature (1)..(25): SEQ ID NO: 1255; WAN024ESD; Start 361; Stop 385
cctaaggaattaacacctagcgaac

SEQ ID NO: 288346 - DNA, 25 bp, Artificial
  probe
  misc_feature (1)..(25): SEQ ID NO: 1255; WAN024ESD; Start 368; Stop 392
aattaacacctagcgaacaattaac

SEQ ID NO: 288347 - DNA, 25 bp, Artificial
  probe
  misc_feature (1)..(25): SEQ ID NO: 1255; WAN024ESD; Start 266; Stop 290
aattacttcaagctagagttccgtt

SEQ ID NO: 288348 - DNA, 25 bp, Artificial
  probe
  misc_feature (1)..(25): SEQ ID NO: 1255; WAN024ESD; Start 265; Stop 289
caattacttcaagctagagttccgt

SEQ ID NO: 288349 - DNA, 25 bp, Artificial
  probe
  misc_feature (1)..(25): SEQ ID NO: 1255; WAN024ESD; Start 367; Stop 391
gaattaacacctagcgaacaattaa

SEQ ID NO: 288350 - DNA, 25 bp, Artificial
  probe
  misc_feature (1)..(25): SEQ ID NO: 1255; WAN024ESD; Start 55; Stop 79
attgaggaactgactttgactttac

SEQ ID NO: 288351 - DNA, 25 bp, Artificial
  probe
  misc_feature (1)..(25): SEQ ID NO: 1255; WAN024ESD; Start 53; Stop 77
gtattgaggaactgactttgacttt

SEQ ID NO: 288352 - DNA, 25 bp, Artificial
  probe
  misc_feature (1)..(25): SEQ ID NO: 1255; WAN024ESD; Start 56; Stop 80
ttgaggaactgactttgactttacc

SEQ ID NO: 288353 - DNA, 25 bp, Artificial
  probe
  misc_feature (1)..(25): SEQ ID NO: 1255; WAN024ESD; Start 623; Stop 647
cagatggcgatataaagcagataaa

SEQ ID NO: 288354 - DNA, 25 bp, Artificial
  probe
  misc_feature (1)..(25): SEQ ID NO: 1255; WAN024ESD; Start 622; Stop 646
ccagatggcgatataaagcagataa

SEQ ID NO: 288355 - DNA, 25 bp, Artificial
  probe
  misc_feature (1)..(25): SEQ ID NO: 1255; WAN024ESD; Start 60; Stop 84
ggaactgactttgactttaccaatc

SEQ ID NO: 288356 - DNA, 25 bp, Artificial
  probe
  misc_feature (1)..(25): SEQ ID NO: 1255; WAN024ESD; Start 59; Stop 83
aggaactgactttgactttaccaat

SEQ ID NO: 288357 - DNA, 25 bp, Artificial
  probe
  misc_feature (1)..(25): SEQ ID NO: 1255; WAN024ESD; Start 748; Stop 772
aaattcaatcagttatccttgccac

SEQ ID NO: 288358 - DNA, 25 bp, Artificial
  probe
  misc_feature (1)..(25): SEQ ID NO: 1255; WAN024ESD; Start 370; Stop 394
ttaacacctagcgaacaattaacgt

SEQ ID NO: 288359 - DNA, 25 bp, Artificial
  probe
  misc_feature (1)..(25): SEQ ID NO: 1255; WAN024ESD; Start 52; Stop 76
agtattgaggaactgactttgactt

SEQ ID NO: 288360 - DNA, 25 bp, Artificial
  probe
  misc_feature (1)..(25): SEQ ID NO: 1255; WAN024ESD; Start 280; Stop 304
agagttccgtttgtagactttaagg

SEQ ID NO: 288361 - DNA, 25 bp, Artificial
  probe
  misc_feature (1)..(25): SEQ ID NO: 1255; WAN024ESD; Start 61; Stop 85
gaactgactttgactttaccaatca

SEQ ID NO: 288362 - DNA, 25 bp, Artificial
  probe
  misc_feature (1)..(25): SEQ ID NO: 1255; WAN024ESD; Start 58; Stop 82
gaggaactgactttgactttaccaa

SEQ ID NO: 288363 - DNA, 25 bp, Artificial
  probe
  misc_feature (1)..(25): SEQ ID NO: 1255; WAN024ESD; Start 57; Stop 81
tgaggaactgactttgactttacca

SEQ ID NO: 288364 - DNA, 25 bp, Artificial
  probe
  misc_feature (1)..(25): SEQ ID NO: 1255; WAN024ESD; Start 751; Stop 775
ttcaatcagttatccttgccacttt

SEQ ID NO: 288365 - DNA, 25 bp, Artificial
  probe
  misc_feature (1)..(25): SEQ ID NO: 1255; WAN024ESD; Start 754; Stop 778
aatcagttatccttgccactttctc

SEQ ID NO: 288366 - DNA, 25 bp, Artificial
  probe
  misc_feature (1)..(25): SEQ ID NO: 1255; WAN024ESD; Start 65; Stop 89
tgactttgactttaccaatcagttt

SEQ ID NO: 288367 - DNA, 25 bp, Artificial
  probe
  misc_feature (1)..(25): SEQ ID NO: 1256; WAN024AHL; Start 131; Stop 155
ctttcctgctgatatttcacacaaa

SEQ ID NO: 288368 - DNA, 25 bp, Artificial
  probe
  misc_feature (1)..(25): SEQ ID NO: 1256; WAN024AHL; Start 39; Stop 63
atagtcacttagaaagccctgattc

SEQ ID NO: 288369 - DNA, 25 bp, Artificial
  probe
  misc_feature (1)..(25): SEQ ID NO: 1256; WAN024AHL; Start 38; Stop 62
aatagtcacttagaaagccctgatt

SEQ ID NO: 288370 - DNA, 25 bp, Artificial
  probe
  misc_feature (1)..(25): SEQ ID NO: 1256; WAN024AHL; Start 37; Stop 61
aaatagtcacttagaaagccctgat

SEQ ID NO: 288371 - DNA, 25 bp, Artificial
  probe
  misc_feature (1)..(25): SEQ ID NO: 1256; WAN024AHL; Start 36; Stop 60
gaaatagtcacttagaaagccctga

SEQ ID NO: 288372 - DNA, 25 bp, Artificial
  probe
  misc_feature (1)..(25): SEQ ID NO: 1256; WAN024AHL; Start 35; Stop 59
ggaaatagtcacttagaaagccctg

SEQ ID NO: 288373 - DNA, 25 bp, Artificial
  probe
  misc_feature (1)..(25): SEQ ID NO: 1256; WAN024AHL; Start 34; Stop 58
tggaaatagtcacttagaaagccct

SEQ ID NO: 288374 - DNA, 25 bp, Artificial
  probe
  misc_feature (1)..(25): SEQ ID NO: 1256; WAN024AHL; Start 29; Stop 53
ttcggtggaaatagtcacttagaaa

SEQ ID NO: 288375 - DNA, 25 bp, Artificial
  probe
  misc_feature (1)..(25): SEQ ID NO: 1256; WAN024AHL; Start 30; Stop 54
tcggtggaaatagtcacttagaaag

SEQ ID NO: 288376 - DNA, 25 bp, Artificial
  probe
  misc_feature (1)..(25): SEQ ID NO: 1256; WAN024AHL; Start 124; Stop 148
cttcatgctttcctgctgatatttc

SEQ ID NO: 288377 - DNA, 25 bp, Artificial
  probe
  misc_feature (1)..(25): SEQ ID NO: 1256; WAN024AHL; Start 167; Stop 191
catgaatagctggatttgtaaaggg

SEQ ID NO: 288378 - DNA, 25 bp, Artificial
  probe
  misc_feature (1)..(25): SEQ ID NO: 1256; WAN024AHL; Start 128; Stop 152
atgctttcctgctgatatttcacac

SEQ ID NO: 288379 - DNA, 25 bp, Artificial
  probe
  misc_feature (1)..(25): SEQ ID NO: 1256; WAN024AHL; Start 125; Stop 149
ttcatgctttcctgctgatatttca

SEQ ID NO: 288380 - DNA, 25 bp, Artificial
  probe
  misc_feature (1)..(25): SEQ ID NO: 1256; WAN024AHL; Start 130; Stop 154
gctttcctgctgatatttcacacaa

SEQ ID NO: 288381 - DNA, 25 bp, Artificial
  probe
  misc_feature (1)..(25): SEQ ID NO: 1256; WAN024AHL; Start 40; Stop 64
tagtcacttagaaagccctgattcg

SEQ ID NO: 288382 - DNA, 25 bp, Artificial
  probe
  misc_feature (1)..(25): SEQ ID NO: 1256; WAN024AHL; Start 33; Stop 57
gtggaaatagtcacttagaaagccc

SEQ ID NO: 288383 - DNA, 25 bp, Artificial
  probe
  misc_feature (1)..(25): SEQ ID NO: 1256; WAN024AHL; Start 32; Stop 56
ggtggaaatagtcacttagaaagcc

SEQ ID NO: 288384 - DNA, 25 bp, Artificial
  probe
  misc_feature (1)..(25): SEQ ID NO: 1256; WAN024AHL; Start 126; Stop 150
tcatgctttcctgctgatatttcac

SEQ ID NO: 288385 - DNA, 25 bp, Artificial
  probe
  misc_feature (1)..(25): SEQ ID NO: 1256; WAN024AHL; Start 31; Stop 55
cggtggaaatagtcacttagaaagc

SEQ ID NO: 288386 - DNA, 25 bp, Artificial
  probe
  misc_feature (1)..(25): SEQ ID NO: 1256; WAN024AHL; Start 127; Stop 151
catgctttcctgctgatatttcaca

SEQ ID NO: 288387 - DNA, 25 bp, Artificial
  probe
  misc_feature (1)..(25): SEQ ID NO: 1256; WAN024AHL; Start 28; Stop 52
tttcggtggaaatagtcacttagaa

SEQ ID NO: 288388 - DNA, 25 bp, Artificial
  probe
  misc_feature (1)..(25): SEQ ID NO: 1256; WAN024AHL; Start 123; Stop 147
gcttcatgctttcctgctgatattt

SEQ ID NO: 288389 - DNA, 25 bp, Artificial
  probe
  misc_feature (1)..(25): SEQ ID NO: 1256; WAN024AHL; Start 84; Stop 108
aacagccaaggttacttgtcataag

SEQ ID NO: 288390 - DNA, 25 bp, Artificial
  probe
  misc_feature (1)..(25): SEQ ID NO: 1256; WAN024AHL; Start 129; Stop 153
tgctttcctgctgatatttcacaca

SEQ ID NO: 288391 - DNA, 25 bp, Artificial
  probe
  misc_feature (1)..(25): SEQ ID NO: 1256; WAN024AHL; Start 166; Stop 190
ccatgaatagctggatttgtaaagg

SEQ ID NO: 288392 - DNA, 25 bp, Artificial
  probe
  misc_feature (1)..(25): SEQ ID NO: 1256; WAN024AHL; Start 161; Stop 185
ttctaccatgaatagctggatttgt

SEQ ID NO: 288393 - DNA, 25 bp, Artificial
  probe
  misc_feature (1)..(25): SEQ ID NO: 1256; WAN024AHL; Start 86; Stop 110
cagccaaggttacttgtcataagac

SEQ ID NO: 288394 - DNA, 25 bp, Artificial
  probe
  misc_feature (1)..(25): SEQ ID NO: 1256; WAN024AHL; Start 103; Stop 127
cataagacacctgttgacgagcttc

SEQ ID NO: 288395 - DNA, 25 bp, Artificial
  probe
  misc_feature (1)..(25): SEQ ID NO: 1256; WAN024AHL; Start 165; Stop 189
accatgaatagctggatttgtaaag

SEQ ID NO: 288396 - DNA, 25 bp, Artificial
  probe
  misc_feature (1)..(25): SEQ ID NO: 1256; WAN024AHL; Start 162; Stop 186
tctaccatgaatagctggatttgta

SEQ ID NO: 288397 - DNA, 25 bp, Artificial
  probe
  misc_feature (1)..(25): SEQ ID NO: 1256; WAN024AHL; Start 160; Stop 184
attctaccatgaatagctggatttg

SEQ ID NO: 288398 - DNA, 25 bp, Artificial
  probe
  misc_feature (1)..(25): SEQ ID NO: 1256; WAN024AHL; Start 85; Stop 109
acagccaaggttacttgtcataaga

SEQ ID NO: 288399 - DNA, 25 bp, Artificial
  probe
  misc_feature (1)..(25): SEQ ID NO: 1256; WAN024AHL; Start 163; Stop 187
ctaccatgaatagctggatttgtaa

SEQ ID NO: 288400 - DNA, 25 bp, Artificial
  probe
  misc_feature (1)..(25): SEQ ID NO: 1257; WAN024FJ3; Start 235; Stop 259
caagatagcatgattcagagttgtt

SEQ ID NO: 288401 - DNA, 25 bp, Artificial
  probe
  misc_feature (1)..(25): SEQ ID NO: 1257; WAN024FJ3; Start 234; Stop 258
tcaagatagcatgattcagagttgt

SEQ ID NO: 288402 - DNA, 25 bp, Artificial
  probe
  misc_feature (1)..(25): SEQ ID NO: 1257; WAN024FJ3; Start 58; Stop 82
cttcccaccgataatgtagagattc

SEQ ID NO: 288403 - DNA, 25 bp, Artificial
  probe
  misc_feature (1)..(25): SEQ ID NO: 1257; WAN024FJ3; Start 61; Stop 85
cccaccgataatgtagagattcttt

SEQ ID NO: 288404 - DNA, 25 bp, Artificial
  probe
  misc_feature (1)..(25): SEQ ID NO: 1257; WAN024FJ3; Start 488; Stop 512
cttatttcttacaaaccaggtgctt

SEQ ID NO: 288405 - DNA, 25 bp, Artificial
  probe
  misc_feature (1)..(25): SEQ ID NO: 1257; WAN024FJ3; Start 60; Stop 84
tcccaccgataatgtagagattctt

SEQ ID NO: 288406 - DNA, 25 bp, Artificial
  probe
  misc_feature (1)..(25): SEQ ID NO: 1257; WAN024FJ3; Start 59; Stop 83
ttcccaccgataatgtagagattct

SEQ ID NO: 288407 - DNA, 25 bp, Artificial
  probe
  misc_feature (1)..(25): SEQ ID NO: 1257; WAN024FJ3; Start 52; Stop 76
aatttgcttcccaccgataatgtag

SEQ ID NO: 288408 - DNA, 25 bp, Artificial
  probe
  misc_feature (1)..(25): SEQ ID NO: 1257; WAN024FJ3; Start 489; Stop 513
ttatttcttacaaaccaggtgcttg

SEQ ID NO: 288409 - DNA, 25 bp, Artificial
  probe
  misc_feature (1)..(25): SEQ ID NO: 1257; WAN024FJ3; Start 237; Stop 261
agatagcatgattcagagttgtttc

SEQ ID NO: 288410 - DNA, 25 bp, Artificial
  probe
  misc_feature (1)..(25): SEQ ID NO: 1257; WAN024FJ3; Start 53; Stop 77
atttgcttcccaccgataatgtaga

SEQ ID NO: 288411 - DNA, 25 bp, Artificial
  probe
  misc_feature (1)..(25): SEQ ID NO: 1257; WAN024FJ3; Start 600; Stop 624
cttcatcagtgacatccaaaccttt

SEQ ID NO: 288412 - DNA, 25 bp, Artificial
  probe
  misc_feature (1)..(25): SEQ ID NO: 1257; WAN024FJ3; Start 355; Stop 379
tttcttagtcatgcttccatccttt

SEQ ID NO: 288413 - DNA, 25 bp, Artificial
  probe
  misc_feature (1)..(25): SEQ ID NO: 1257; WAN024FJ3; Start 594; Stop 618
caccttcttcatcagtgacatccaa

SEQ ID NO: 288414 - DNA, 25 bp, Artificial
  probe
  misc_feature (1)..(25): SEQ ID NO: 1257; WAN024FJ3; Start 231; Stop 255
ccatcaagatagcatgattcagagt

SEQ ID NO: 288415 - DNA, 25 bp, Artificial
  probe
  misc_feature (1)..(25): SEQ ID NO: 1257; WAN024FJ3; Start 57; Stop 81
gcttcccaccgataatgtagagatt

SEQ ID NO: 288416 - DNA, 25 bp, Artificial
  probe
  misc_feature (1)..(25): SEQ ID NO: 1257; WAN024FJ3; Start 238; Stop 262
gatagcatgattcagagttgtttct

SEQ ID NO: 288417 - DNA, 25 bp, Artificial
  probe
  misc_feature (1)..(25): SEQ ID NO: 1257; WAN024FJ3; Start 236; Stop 260
aagatagcatgattcagagttgttt

SEQ ID NO: 288418 - DNA, 25 bp, Artificial
  probe
  misc_feature (1)..(25): SEQ ID NO: 1257; WAN024FJ3; Start 597; Stop 621
cttcttcatcagtgacatccaaacc

SEQ ID NO: 288419 - DNA, 25 bp, Artificial
  probe
  misc_feature (1)..(25): SEQ ID NO: 1257; WAN024FJ3; Start 596; Stop 620
ccttcttcatcagtgacatccaaac

SEQ ID NO: 288420 - DNA, 25 bp, Artificial
  probe
  misc_feature (1)..(25): SEQ ID NO: 1257; WAN024FJ3; Start 233; Stop 257
atcaagatagcatgattcagagttg

SEQ ID NO: 288421 - DNA, 25 bp, Artificial
  probe
  misc_feature (1)..(25): SEQ ID NO: 1257; WAN024FJ3; Start 232; Stop 256
catcaagatagcatgattcagagtt

SEQ ID NO: 288422 - DNA, 25 bp, Artificial
  probe
  misc_feature (1)..(25): SEQ ID NO: 1257; WAN024FJ3; Start 241; Stop 265
agcatgattcagagttgtttcttta

SEQ ID NO: 288423 - DNA, 25 bp, Artificial
  probe
  misc_feature (1)..(25): SEQ ID NO: 1257; WAN024FJ3; Start 240; Stop 264
tagcatgattcagagttgtttcttt

SEQ ID NO: 288424 - DNA, 25 bp, Artificial
  probe
  misc_feature (1)..(25): SEQ ID NO: 1257; WAN024FJ3; Start 485; Stop 509
ttccttatttcttacaaaccaggtg

SEQ ID NO: 288425 - DNA, 25 bp, Artificial
  probe
  misc_feature (1)..(25): SEQ ID NO: 1257; WAN024FJ3; Start 239; Stop 263
atagcatgattcagagttgtttctt

SEQ ID NO: 288426 - DNA, 25 bp, Artificial
  probe
  misc_feature (1)..(25): SEQ ID NO: 1257; WAN024FJ3; Start 599; Stop 623
tcttcatcagtgacatccaaacctt

SEQ ID NO: 288427 - DNA, 25 bp, Artificial
  probe
  misc_feature (1)..(25): SEQ ID NO: 1257; WAN024FJ3; Start 598; Stop 622
ttcttcatcagtgacatccaaacct

SEQ ID NO: 288428 - DNA, 25 bp, Artificial
  probe
  misc_feature (1)..(25): SEQ ID NO: 1257; WAN024FJ3; Start 595; Stop 619
accttcttcatcagtgacatccaaa

SEQ ID NO: 288429 - DNA, 25 bp, Artificial
  probe
  misc_feature (1)..(25): SEQ ID NO: 1257; WAN024FJ3; Start 415; Stop 439
aaagactggtttggaatagcttaca

SEQ ID NO: 288430 - DNA, 25 bp, Artificial
  probe
  misc_feature (1)..(25): SEQ ID NO: 1257; WAN024FJ3; Start 487; Stop 511
ccttatttcttacaaaccaggtgct

SEQ ID NO: 288431 - DNA, 25 bp, Artificial
  probe
  misc_feature (1)..(25): SEQ ID NO: 1257; WAN024FJ3; Start 486; Stop 510
tccttatttcttacaaaccaggtgc

SEQ ID NO: 288432 - DNA, 25 bp, Artificial
  probe
  misc_feature (1)..(25): SEQ ID NO: 1257; WAN024FJ3; Start 54; Stop 78
tttgcttcccaccgataatgtagag

SEQ ID NO: 288433 - DNA, 25 bp, Artificial
  probe
  misc_feature (1)..(25): SEQ ID NO: 1258; WAN024DJZ; Start 372; Stop 396
cgttagtcgttcaacattatctcat

SEQ ID NO: 288434 - DNA, 25 bp, Artificial
  probe
  misc_feature (1)..(25): SEQ ID NO: 1258; WAN024DJZ; Start 1306; Stop 1330
gtagaagttgttgatgtaataggct

SEQ ID NO: 288435 - DNA, 25 bp, Artificial
  probe
  misc_feature (1)..(25): SEQ ID NO: 1258; WAN024DJZ; Start 1305; Stop 1329
agtagaagttgttgatgtaataggc

SEQ ID NO: 288436 - DNA, 25 bp, Artificial
  probe
  misc_feature (1)..(25): SEQ ID NO: 1258; WAN024DJZ; Start 106; Stop 130
gatagaactgtccgtaatgtactga

SEQ ID NO: 288437 - DNA, 25 bp, Artificial
  probe
  misc_feature (1)..(25): SEQ ID NO: 1258; WAN024DJZ; Start 105; Stop 129
agatagaactgtccgtaatgtactg

SEQ ID NO: 288438 - DNA, 25 bp, Artificial
  probe
  misc_feature (1)..(25): SEQ ID NO: 1258; WAN024DJZ; Start 107; Stop 131
atagaactgtccgtaatgtactgaa

SEQ ID NO: 288439 - DNA, 25 bp, Artificial
  probe
  misc_feature (1)..(25): SEQ ID NO: 1258; WAN024DJZ; Start 668; Stop 692
tagtagttcacatagcattgtctgt

SEQ ID NO: 288440 - DNA, 25 bp, Artificial
  probe
  misc_feature (1)..(25): SEQ ID NO: 1258; WAN024DJZ; Start 143; Stop 167
agacaatgattattcaaggagtccg

SEQ ID NO: 288441 - DNA, 25 bp, Artificial
  probe
  misc_feature (1)..(25): SEQ ID NO: 1258; WAN024DJZ; Start 667; Stop 691
ttagtagttcacatagcattgtctg

SEQ ID NO: 288442 - DNA, 25 bp, Artificial
  probe
  misc_feature (1)..(25): SEQ ID NO: 1258; WAN024DJZ; Start 102; Stop 126
ttcagatagaactgtccgtaatgta

SEQ ID NO: 288443 - DNA, 25 bp, Artificial
  probe
  misc_feature (1)..(25): SEQ ID NO: 1258; WAN024DJZ; Start 142; Stop 166
aagacaatgattattcaaggagtcc

SEQ ID NO: 288444 - DNA, 25 bp, Artificial
  probe
  misc_feature (1)..(25): SEQ ID NO: 1258; WAN024DJZ; Start 104; Stop 128
cagatagaactgtccgtaatgtact

SEQ ID NO: 288445 - DNA, 25 bp, Artificial
  probe
  misc_feature (1)..(25): SEQ ID NO: 1258; WAN024DJZ; Start 103; Stop 127
tcagatagaactgtccgtaatgtac

SEQ ID NO: 288446 - DNA, 25 bp, Artificial
  probe
  misc_feature (1)..(25): SEQ ID NO: 1258; WAN024DJZ; Start 140; Stop 164
agaagacaatgattattcaaggagt

SEQ ID NO: 288447 - DNA, 25 bp, Artificial
  probe
  misc_feature (1)..(25): SEQ ID NO: 1258; WAN024DJZ; Start 138; Stop 162
tgagaagacaatgattattcaagga

SEQ ID NO: 288448 - DNA, 25 bp, Artificial
  probe
  misc_feature (1)..(25): SEQ ID NO: 1258; WAN024DJZ; Start 1303; Stop 1327
cgagtagaagttgttgatgtaatag

SEQ ID NO: 288449 - DNA, 25 bp, Artificial
  probe
  misc_feature (1)..(25): SEQ ID NO: 1258; WAN024DJZ; Start 373; Stop 397
gttagtcgttcaacattatctcatg

SEQ ID NO: 288450 - DNA, 25 bp, Artificial
  probe
  misc_feature (1)..(25): SEQ ID NO: 1258; WAN024DJZ; Start 1307; Stop 1331
tagaagttgttgatgtaataggcta

SEQ ID NO: 288451 - DNA, 25 bp, Artificial
  probe
  misc_feature (1)..(25): SEQ ID NO: 1258; WAN024DJZ; Start 678; Stop 702
catagcattgtctgtgattcgttta

SEQ ID NO: 288452 - DNA, 25 bp, Artificial
  probe
  misc_feature (1)..(25): SEQ ID NO: 1258; WAN024DJZ; Start 139; Stop 163
gagaagacaatgattattcaaggag

SEQ ID NO: 288453 - DNA, 25 bp, Artificial
  probe
  misc_feature (1)..(25): SEQ ID NO: 1258; WAN024DJZ; Start 1259; Stop 1283
cagcccaaatgttaagaaatcgttt

SEQ ID NO: 288454 - DNA, 25 bp, Artificial
  probe
  misc_feature (1)..(25): SEQ ID NO: 1258; WAN024DJZ; Start 431; Stop 455
ataatttgtccattgagagtagggc

SEQ ID NO: 288455 - DNA, 25 bp, Artificial
  probe
  misc_feature (1)..(25): SEQ ID NO: 1258; WAN024DJZ; Start 1304; Stop 1328
gagtagaagttgttgatgtaatagg

SEQ ID NO: 288456 - DNA, 25 bp, Artificial
  probe
  misc_feature (1)..(25): SEQ ID NO: 1258; WAN024DJZ; Start 679; Stop 703
atagcattgtctgtgattcgtttaa

SEQ ID NO: 288457 - DNA, 25 bp, Artificial
  probe
  misc_feature (1)..(25): SEQ ID NO: 1258; WAN024DJZ; Start 141; Stop 165
gaagacaatgattattcaaggagtc

SEQ ID NO: 288458 - DNA, 25 bp, Artificial
  probe
  misc_feature (1)..(25): SEQ ID NO: 1258; WAN024DJZ; Start 322; Stop 346
ttatttgagcaagttccagttcttt

SEQ ID NO: 288459 - DNA, 25 bp, Artificial
  probe
  misc_feature (1)..(25): SEQ ID NO: 1258; WAN024DJZ; Start 1784; Stop 1808
attcgttactctgggataatcaaag

SEQ ID NO: 288460 - DNA, 25 bp, Artificial
  probe
  misc_feature (1)..(25): SEQ ID NO: 1258; WAN024DJZ; Start 321; Stop 345
attatttgagcaagttccagttctt

SEQ ID NO: 288461 - DNA, 25 bp, Artificial
  probe
  misc_feature (1)..(25): SEQ ID NO: 1258; WAN024DJZ; Start 1626; Stop 1650
atctgttggtgaatcaaatgagttt

SEQ ID NO: 288462 - DNA, 25 bp, Artificial
  probe
  misc_feature (1)..(25): SEQ ID NO: 1258; WAN024DJZ; Start 579; Stop 603
aactgttccattagaagaatttgct

SEQ ID NO: 288463 - DNA, 25 bp, Artificial
  probe
  misc_feature (1)..(25): SEQ ID NO: 1258; WAN024DJZ; Start 1786; Stop 1810
tcgttactctgggataatcaaagtt

SEQ ID NO: 288464 - DNA, 25 bp, Artificial
  probe
  misc_feature (1)..(25): SEQ ID NO: 1258; WAN024DJZ; Start 1785; Stop 1809
ttcgttactctgggataatcaaagt

SEQ ID NO: 288465 - DNA, 25 bp, Artificial
  probe
  misc_feature (1)..(25): SEQ ID NO: 1258; WAN024DJZ; Start 1787; Stop 1811
cgttactctgggataatcaaagttc

SEQ ID NO: 288466 - DNA, 25 bp, Artificial
  probe
  misc_feature (1)..(25): SEQ ID NO: 1259; WAN024FOD; Start 114; Stop 138
ccaacaacttccaacaacaattatg

SEQ ID NO: 288467 - DNA, 25 bp, Artificial
  probe
  misc_feature (1)..(25): SEQ ID NO: 1259; WAN024FOD; Start 112; Stop 136
gtccaacaacttccaacaacaatta

SEQ ID NO: 288468 - DNA, 25 bp, Artificial
  probe
  misc_feature (1)..(25): SEQ ID NO: 1259; WAN024FOD; Start 113; Stop 137
tccaacaacttccaacaacaattat

SEQ ID NO: 288469 - DNA, 25 bp, Artificial
  probe
  misc_feature (1)..(25): SEQ ID NO: 1259; WAN024FOD; Start 336; Stop 360
aactggtctcaatatcaatgcgatt

SEQ ID NO: 288470 - DNA, 25 bp, Artificial
  probe
  misc_feature (1)..(25): SEQ ID NO: 1259; WAN024FOD; Start 337; Stop 361
actggtctcaatatcaatgcgattc

SEQ ID NO: 288471 - DNA, 25 bp, Artificial
  probe
  misc_feature (1)..(25): SEQ ID NO: 1259; WAN024FOD; Start 335; Stop 359
gaactggtctcaatatcaatgcgat

SEQ ID NO: 288472 - DNA, 25 bp, Artificial
  probe
  misc_feature (1)..(25): SEQ ID NO: 1259; WAN024FOD; Start 340; Stop 364
ggtctcaatatcaatgcgattccag

SEQ ID NO: 288473 - DNA, 25 bp, Artificial
  probe
  misc_feature (1)..(25): SEQ ID NO: 1259; WAN024FOD; Start 338; Stop 362
ctggtctcaatatcaatgcgattcc

SEQ ID NO: 288474 - DNA, 25 bp, Artificial
  probe
  misc_feature (1)..(25): SEQ ID NO: 1259; WAN024FOD; Start 115; Stop 139
caacaacttccaacaacaattatgt

SEQ ID NO: 288475 - DNA, 25 bp, Artificial
  probe
  misc_feature (1)..(25): SEQ ID NO: 1259; WAN024FOD; Start 191; Stop 215
ttgtgaagatcaatcgtgtcaagat

SEQ ID NO: 288476 - DNA, 25 bp, Artificial
  probe
  misc_feature (1)..(25): SEQ ID NO: 1259; WAN024FOD; Start 537; Stop 561
agctactccaaccttgattaattcc

SEQ ID NO: 288477 - DNA, 25 bp, Artificial
  probe
  misc_feature (1)..(25): SEQ ID NO: 1259; WAN024FOD; Start 341; Stop 365
gtctcaatatcaatgcgattccagc

SEQ ID NO: 288478 - DNA, 25 bp, Artificial
  probe
  misc_feature (1)..(25): SEQ ID NO: 1259; WAN024FOD; Start 111; Stop 135
tgtccaacaacttccaacaacaatt

SEQ ID NO: 288479 - DNA, 25 bp, Artificial
  probe
  misc_feature (1)..(25): SEQ ID NO: 1259; WAN024FOD; Start 275; Stop 299
aactcatgttgacctactacggaat

SEQ ID NO: 288480 - DNA, 25 bp, Artificial
  probe
  misc_feature (1)..(25): SEQ ID NO: 1259; WAN024FOD; Start 503; Stop 527
atcgacgagtgattattcctaatgc

SEQ ID NO: 288481 - DNA, 25 bp, Artificial
  probe
  misc_feature (1)..(25): SEQ ID NO: 1259; WAN024FOD; Start 334; Stop 358
ggaactggtctcaatatcaatgcga

SEQ ID NO: 288482 - DNA, 25 bp, Artificial
  probe
  misc_feature (1)..(25): SEQ ID NO: 1259; WAN024FOD; Start 192; Stop 216
tgtgaagatcaatcgtgtcaagatt

SEQ ID NO: 288483 - DNA, 25 bp, Artificial
  probe
  misc_feature (1)..(25): SEQ ID NO: 1259; WAN024FOD; Start 276; Stop 300
actcatgttgacctactacggaatc

SEQ ID NO: 288484 - DNA, 25 bp, Artificial
  probe
  misc_feature (1)..(25): SEQ ID NO: 1259; WAN024FOD; Start 442; Stop 466
tcagttaatcctggtgagattgagg

SEQ ID NO: 288485 - DNA, 25 bp, Artificial
  probe
  misc_feature (1)..(25): SEQ ID NO: 1259; WAN024FOD; Start 434; Stop 458
ccattctctcagttaatcctggtga

SEQ ID NO: 288486 - DNA, 25 bp, Artificial
  probe
  misc_feature (1)..(25): SEQ ID NO: 1259; WAN024FOD; Start 90; Stop 114
ctttgatggaatccctagaattgtc

SEQ ID NO: 288487 - DNA, 25 bp, Artificial
  probe
  misc_feature (1)..(25): SEQ ID NO: 1259; WAN024FOD; Start 190; Stop 214
attgtgaagatcaatcgtgtcaaga

SEQ ID NO: 288488 - DNA, 25 bp, Artificial
  probe
  misc_feature (1)..(25): SEQ ID NO: 1259; WAN024FOD; Start 189; Stop 213
cattgtgaagatcaatcgtgtcaag

SEQ ID NO: 288489 - DNA, 25 bp, Artificial
  probe
  misc_feature (1)..(25): SEQ ID NO: 1259; WAN024FOD; Start 87; Stop 111
ggtctttgatggaatccctagaatt

SEQ ID NO: 288490 - DNA, 25 bp, Artificial
  probe
  misc_feature (1)..(25): SEQ ID NO: 1259; WAN024FOD; Start 502; Stop 526
tatcgacgagtgattattcctaatg

SEQ ID NO: 288491 - DNA, 25 bp, Artificial
  probe
  misc_feature (1)..(25): SEQ ID NO: 1259; WAN024FOD; Start 89; Stop 113
tctttgatggaatccctagaattgt

SEQ ID NO: 288492 - DNA, 25 bp, Artificial
  probe
  misc_feature (1)..(25): SEQ ID NO: 1259; WAN024FOD; Start 88; Stop 112
gtctttgatggaatccctagaattg

SEQ ID NO: 288493 - DNA, 25 bp, Artificial
  probe
  misc_feature (1)..(25): SEQ ID NO: 1259; WAN024FOD; Start 277; Stop 301
ctcatgttgacctactacggaatcc

SEQ ID NO: 288494 - DNA, 25 bp, Artificial
  probe
  misc_feature (1)..(25): SEQ ID NO: 1259; WAN024FOD; Start 505; Stop 529
cgacgagtgattattcctaatgcag

SEQ ID NO: 288495 - DNA, 25 bp, Artificial
  probe
  misc_feature (1)..(25): SEQ ID NO: 1259; WAN024FOD; Start 342; Stop 366
tctcaatatcaatgcgattccagct

SEQ ID NO: 288496 - DNA, 25 bp, Artificial
  probe
  misc_feature (1)..(25): SEQ ID NO: 1259; WAN024FOD; Start 339; Stop 363
tggtctcaatatcaatgcgattcca

SEQ ID NO: 288497 - DNA, 25 bp, Artificial
  probe
  misc_feature (1)..(25): SEQ ID NO: 1259; WAN024FOD; Start 506; Stop 530
gacgagtgattattcctaatgcagc

SEQ ID NO: 288498 - DNA, 25 bp, Artificial
  probe
  misc_feature (1)..(25): SEQ ID NO: 1259; WAN024FOD; Start 504; Stop 528
tcgacgagtgattattcctaatgca

SEQ ID NO: 288499 - DNA, 25 bp, Artificial
  probe
  misc_feature (1)..(25): SEQ ID NO: 1260; WAN024DR2; Start 77; Stop 101
tccttcattaatcttattccacact

SEQ ID NO: 288500 - DNA, 25 bp, Artificial
  probe
  misc_feature (1)..(25): SEQ ID NO: 1260; WAN024DR2; Start 76; Stop 100
gtccttcattaatcttattccacac

SEQ ID NO: 288501 - DNA, 25 bp, Artificial
  probe
  misc_feature (1)..(25): SEQ ID NO: 1260; WAN024DR2; Start 75; Stop 99
agtccttcattaatcttattccaca

SEQ ID NO: 288502 - DNA, 25 bp, Artificial
  probe
  misc_feature (1)..(25): SEQ ID NO: 1260; WAN024DR2; Start 74; Stop 98
cagtccttcattaatcttattccac

SEQ ID NO: 288503 - DNA, 25 bp, Artificial
  probe
  misc_feature (1)..(25): SEQ ID NO: 1260; WAN024DR2; Start 73; Stop 97
tcagtccttcattaatcttattcca

SEQ ID NO: 288504 - DNA, 25 bp, Artificial
  probe
  misc_feature (1)..(25): SEQ ID NO: 1260; WAN024DR2; Start 72; Stop 96
ctcagtccttcattaatcttattcc

SEQ ID NO: 288505 - DNA, 25 bp, Artificial
  probe
  misc_feature (1)..(25): SEQ ID NO: 1260; WAN024DR2; Start 78; Stop 102
ccttcattaatcttattccacacta

SEQ ID NO: 288506 - DNA, 25 bp, Artificial
  probe
  misc_feature (1)..(25): SEQ ID NO: 1260; WAN024DR2; Start 71; Stop 95
tctcagtccttcattaatcttattc

SEQ ID NO: 288507 - DNA, 25 bp, Artificial
  probe
  misc_feature (1)..(25): SEQ ID NO: 1260; WAN024DR2; Start 70; Stop 94
ttctcagtccttcattaatcttatt

SEQ ID NO: 288508 - DNA, 25 bp, Artificial
  probe
  misc_feature (1)..(25): SEQ ID NO: 1260; WAN024DR2; Start 66; Stop 90
tgatttctcagtccttcattaatct

SEQ ID NO: 288509 - DNA, 25 bp, Artificial
  probe
  misc_feature (1)..(25): SEQ ID NO: 1260; WAN024DR2; Start 67; Stop 91
gatttctcagtccttcattaatctt

SEQ ID NO: 288510 - DNA, 25 bp, Artificial
  probe
  misc_feature (1)..(25): SEQ ID NO: 1260; WAN024DR2; Start 69; Stop 93
tttctcagtccttcattaatcttat

SEQ ID NO: 288511 - DNA, 25 bp, Artificial
  probe
  misc_feature (1)..(25): SEQ ID NO: 1260; WAN024DR2; Start 68; Stop 92
atttctcagtccttcattaatctta

SEQ ID NO: 288512 - DNA, 25 bp, Artificial
  probe
  misc_feature (1)..(25): SEQ ID NO: 1260; WAN024DR2; Start 65; Stop 89
ctgatttctcagtccttcattaatc

SEQ ID NO: 288513 - DNA, 25 bp, Artificial
  probe
  misc_feature (1)..(25): SEQ ID NO: 1261; WAN024FQS; Start 1373; Stop 1397
ggatgtatattagcggagagtatcg

SEQ ID NO: 288514 - DNA, 25 bp, Artificial
  probe
  misc_feature (1)..(25): SEQ ID NO: 1261; WAN024FQS; Start 1102; Stop 1126
gctattgttattggtgtaatgttgc

SEQ ID NO: 288515 - DNA, 25 bp, Artificial
  probe
  misc_feature (1)..(25): SEQ ID NO: 1261; WAN024FQS; Start 166; Stop 190
atgttagcagattcaggaataggac

SEQ ID NO: 288516 - DNA, 25 bp, Artificial
  probe
  misc_feature (1)..(25): SEQ ID NO: 1261; WAN024FQS; Start 165; Stop 189
aatgttagcagattcaggaatagga

SEQ ID NO: 288517 - DNA, 25 bp, Artificial
  probe
  misc_feature (1)..(25): SEQ ID NO: 1261; WAN024FQS; Start 114; Stop 138
tgtagaatatggtatcgtagcagta

SEQ ID NO: 288518 - DNA, 25 bp, Artificial
  probe
  misc_feature (1)..(25): SEQ ID NO: 1261; WAN024FQS; Start 76; Stop 100
ttacttgtaacagcaattcttagcc

SEQ ID NO: 288519 - DNA, 25 bp, Artificial
  probe
  misc_feature (1)..(25): SEQ ID NO: 1261; WAN024FQS; Start 117; Stop 141
agaatatggtatcgtagcagtagta

SEQ ID NO: 288520 - DNA, 25 bp, Artificial
  probe
  misc_feature (1)..(25): SEQ ID NO: 1261; WAN024FQS; Start 116; Stop 140
tagaatatggtatcgtagcagtagt

SEQ ID NO: 288521 - DNA, 25 bp, Artificial
  probe
  misc_feature (1)..(25): SEQ ID NO: 1261; WAN024FQS; Start 77; Stop 101
tacttgtaacagcaattcttagccg

SEQ ID NO: 288522 - DNA, 25 bp, Artificial
  probe
  misc_feature (1)..(25): SEQ ID NO: 1261; WAN024FQS; Start 115; Stop 139
gtagaatatggtatcgtagcagtag

SEQ ID NO: 288523 - DNA, 25 bp, Artificial
  probe
  misc_feature (1)..(25): SEQ ID NO: 1261; WAN024FQS; Start 112; Stop 136
cctgtagaatatggtatcgtagcag

SEQ ID NO: 288524 - DNA, 25 bp, Artificial
  probe
  misc_feature (1)..(25): SEQ ID NO: 1261; WAN024FQS; Start 113; Stop 137
ctgtagaatatggtatcgtagcagt

SEQ ID NO: 288525 - DNA, 25 bp, Artificial
  probe
  misc_feature (1)..(25): SEQ ID NO: 1261; WAN024FQS; Start 167; Stop 191
tgttagcagattcaggaataggacc

SEQ ID NO: 288526 - DNA, 25 bp, Artificial
  probe
  misc_feature (1)..(25): SEQ ID NO: 1261; WAN024FQS; Start 118; Stop 142
gaatatggtatcgtagcagtagtaa

SEQ ID NO: 288527 - DNA, 25 bp, Artificial
  probe
  misc_feature (1)..(25): SEQ ID NO: 1261; WAN024FQS; Start 1375; Stop 1399
atgtatattagcggagagtatcgac

SEQ ID NO: 288528 - DNA, 25 bp, Artificial
  probe
  misc_feature (1)..(25): SEQ ID NO: 1261; WAN024FQS; Start 106; Stop 130
ctctcacctgtagaatatggtatcg

SEQ ID NO: 288529 - DNA, 25 bp, Artificial
  probe
  misc_feature (1)..(25): SEQ ID NO: 1261; WAN024FQS; Start 107; Stop 131
tctcacctgtagaatatggtatcgt

SEQ ID NO: 288530 - DNA, 25 bp, Artificial
  probe
  misc_feature (1)..(25): SEQ ID NO: 1261; WAN024FQS; Start 110; Stop 134
cacctgtagaatatggtatcgtagc

SEQ ID NO: 288531 - DNA, 25 bp, Artificial
  probe
  misc_feature (1)..(25): SEQ ID NO: 1261; WAN024FQS; Start 75; Stop 99
attacttgtaacagcaattcttagc

SEQ ID NO: 288532 - DNA, 25 bp, Artificial
  probe
  misc_feature (1)..(25): SEQ ID NO: 1261; WAN024FQS; Start 1374; Stop 1398
gatgtatattagcggagagtatcga

SEQ ID NO: 288533 - DNA, 25 bp, Artificial
  probe
  misc_feature (1)..(25): SEQ ID NO: 1261; WAN024FQS; Start 111; Stop 135
acctgtagaatatggtatcgtagca

SEQ ID NO: 288534 - DNA, 25 bp, Artificial
  probe
  misc_feature (1)..(25): SEQ ID NO: 1261; WAN024FQS; Start 1378; Stop 1402
tatattagcggagagtatcgacgag

SEQ ID NO: 288535 - DNA, 25 bp, Artificial
  probe
  misc_feature (1)..(25): SEQ ID NO: 1261; WAN024FQS; Start 384; Stop 408
aattgtaccgcaagctattctaatg

SEQ ID NO: 288536 - DNA, 25 bp, Artificial
  probe
  misc_feature (1)..(25): SEQ ID NO: 1261; WAN024FQS; Start 385; Stop 409
attgtaccgcaagctattctaatga

SEQ ID NO: 288537 - DNA, 25 bp, Artificial
  probe
  misc_feature (1)..(25): SEQ ID NO: 1261; WAN024FQS; Start 386; Stop 410
ttgtaccgcaagctattctaatgaa

SEQ ID NO: 288538 - DNA, 25 bp, Artificial
  probe
  misc_feature (1)..(25): SEQ ID NO: 1261; WAN024FQS; Start 1377; Stop 1401
gtatattagcggagagtatcgacga

SEQ ID NO: 288539 - DNA, 25 bp, Artificial
  probe
  misc_feature (1)..(25): SEQ ID NO: 1261; WAN024FQS; Start 882; Stop 906
tggcatacctatttcggcttattta

SEQ ID NO: 288540 - DNA, 25 bp, Artificial
  probe
  misc_feature (1)..(25): SEQ ID NO: 1261; WAN024FQS; Start 109; Stop 133
tcacctgtagaatatggtatcgtag

SEQ ID NO: 288541 - DNA, 25 bp, Artificial
  probe
  misc_feature (1)..(25): SEQ ID NO: 1261; WAN024FQS; Start 108; Stop 132
ctcacctgtagaatatggtatcgta

SEQ ID NO: 288542 - DNA, 25 bp, Artificial
  probe
  misc_feature (1)..(25): SEQ ID NO: 1261; WAN024FQS; Start 168; Stop 192
gttagcagattcaggaataggacct

SEQ ID NO: 288543 - DNA, 25 bp, Artificial
  probe
  misc_feature (1)..(25): SEQ ID NO: 1261; WAN024FQS; Start 1371; Stop 1395
tgggatgtatattagcggagagtat

SEQ ID NO: 288544 - DNA, 25 bp, Artificial
  probe
  misc_feature (1)..(25): SEQ ID NO: 1261; WAN024FQS; Start 1370; Stop 1394
ttgggatgtatattagcggagagta

SEQ ID NO: 288545 - DNA, 25 bp, Artificial
  probe
  misc_feature (1)..(25): SEQ ID NO: 1261; WAN024FQS; Start 122; Stop 146
atggtatcgtagcagtagtaaatgt

SEQ ID NO: 288546 - DNA, 25 bp, Artificial
  probe
  misc_feature (1)..(25): SEQ ID NO: 1262; WAN024F2E; Start 87; Stop 111
ttctccagtccttgtatgacatctt

SEQ ID NO: 288547 - DNA, 25 bp, Artificial
  probe
  misc_feature (1)..(25): SEQ ID NO: 1262; WAN024F2E; Start 88; Stop 112
tctccagtccttgtatgacatcttc

SEQ ID NO: 288548 - DNA, 25 bp, Artificial
  probe
  misc_feature (1)..(25): SEQ ID NO: 1262; WAN024F2E; Start 86; Stop 110
cttctccagtccttgtatgacatct

SEQ ID NO: 288549 - DNA, 25 bp, Artificial
  probe
  misc_feature (1)..(25): SEQ ID NO: 1262; WAN024F2E; Start 91; Stop 115
ccagtccttgtatgacatcttccaa

SEQ ID NO: 288550 - DNA, 25 bp, Artificial
  probe
  misc_feature (1)..(25): SEQ ID NO: 1262; WAN024F2E; Start 89; Stop 113
ctccagtccttgtatgacatcttcc

SEQ ID NO: 288551 - DNA, 25 bp, Artificial
  probe
  misc_feature (1)..(25): SEQ ID NO: 1262; WAN024F2E; Start 85; Stop 109
ccttctccagtccttgtatgacatc

SEQ ID NO: 288552 - DNA, 25 bp, Artificial
  probe
  misc_feature (1)..(25): SEQ ID NO: 1262; WAN024F2E; Start 84; Stop 108
tccttctccagtccttgtatgacat

SEQ ID NO: 288553 - DNA, 25 bp, Artificial
  probe
  misc_feature (1)..(25): SEQ ID NO: 1262; WAN024F2E; Start 96; Stop 120
ccttgtatgacatcttccaaagttc

SEQ ID NO: 288554 - DNA, 25 bp, Artificial
  probe
  misc_feature (1)..(25): SEQ ID NO: 1262; WAN024F2E; Start 95; Stop 119
tccttgtatgacatcttccaaagtt

SEQ ID NO: 288555 - DNA, 25 bp, Artificial
  probe
  misc_feature (1)..(25): SEQ ID NO: 1262; WAN024F2E; Start 97; Stop 121
cttgtatgacatcttccaaagttcg

SEQ ID NO: 288556 - DNA, 25 bp, Artificial
  probe
  misc_feature (1)..(25): SEQ ID NO: 1262; WAN024F2E; Start 93; Stop 117
agtccttgtatgacatcttccaaag

SEQ ID NO: 288557 - DNA, 25 bp, Artificial
  probe
  misc_feature (1)..(25): SEQ ID NO: 1262; WAN024F2E; Start 121; Stop 145
gaaaggctttattcttaaatccacg

SEQ ID NO: 288558 - DNA, 25 bp, Artificial
  probe
  misc_feature (1)..(25): SEQ ID NO: 1262; WAN024F2E; Start 120; Stop 144
cgaaaggctttattcttaaatccac

SEQ ID NO: 288559 - DNA, 25 bp, Artificial
  probe
  misc_feature (1)..(25): SEQ ID NO: 1262; WAN024F2E; Start 94; Stop 118
gtccttgtatgacatcttccaaagt

SEQ ID NO: 288560 - DNA, 25 bp, Artificial
  probe
  misc_feature (1)..(25): SEQ ID NO: 1262; WAN024F2E; Start 92; Stop 116
cagtccttgtatgacatcttccaaa

SEQ ID NO: 288561 - DNA, 25 bp, Artificial
  probe
  misc_feature (1)..(25): SEQ ID NO: 1262; WAN024F2E; Start 90; Stop 114
tccagtccttgtatgacatcttcca

SEQ ID NO: 288562 - DNA, 25 bp, Artificial
  probe
  misc_feature (1)..(25): SEQ ID NO: 1262; WAN024F2E; Start 83; Stop 107
ctccttctccagtccttgtatgaca

SEQ ID NO: 288563 - DNA, 25 bp, Artificial
  probe
  misc_feature (1)..(25): SEQ ID NO: 1262; WAN024F2E; Start 119; Stop 143
tcgaaaggctttattcttaaatcca

SEQ ID NO: 288564 - DNA, 25 bp, Artificial
  probe
  misc_feature (1)..(25): SEQ ID NO: 1262; WAN024F2E; Start 98; Stop 122
ttgtatgacatcttccaaagttcga

SEQ ID NO: 288565 - DNA, 25 bp, Artificial
  probe
  misc_feature (1)..(25): SEQ ID NO: 1262; WAN024F2E; Start 100; Stop 124
gtatgacatcttccaaagttcgaaa

SEQ ID NO: 288566 - DNA, 25 bp, Artificial
  probe
  misc_feature (1)..(25): SEQ ID NO: 1262; WAN024F2E; Start 101; Stop 125
tatgacatcttccaaagttcgaaag

SEQ ID NO: 288567 - DNA, 25 bp, Artificial
  probe
  misc_feature (1)..(25): SEQ ID NO: 1262; WAN024F2E; Start 102; Stop 126
atgacatcttccaaagttcgaaagg

SEQ ID NO: 288568 - DNA, 25 bp, Artificial
  probe
  misc_feature (1)..(25): SEQ ID NO: 1262; WAN024F2E; Start 99; Stop 123
tgtatgacatcttccaaagttcgaa

SEQ ID NO: 288569 - DNA, 25 bp, Artificial
  probe
  misc_feature (1)..(25): SEQ ID NO: 1262; WAN024F2E; Start 118; Stop 142
ttcgaaaggctttattcttaaatcc

SEQ ID NO: 288570 - DNA, 25 bp, Artificial
  probe
  misc_feature (1)..(25): SEQ ID NO: 1262; WAN024F2E; Start 112; Stop 136
ccaaagttcgaaaggctttattctt

SEQ ID NO: 288571 - DNA, 25 bp, Artificial
  probe
  misc_feature (1)..(25): SEQ ID NO: 1262; WAN024F2E; Start 110; Stop 134
ttccaaagttcgaaaggctttattc

SEQ ID NO: 288572 - DNA, 25 bp, Artificial
  probe
  misc_feature (1)..(25): SEQ ID NO: 1262; WAN024F2E; Start 109; Stop 133
cttccaaagttcgaaaggctttatt

SEQ ID NO: 288573 - DNA, 25 bp, Artificial
  probe
  misc_feature (1)..(25): SEQ ID NO: 1262; WAN024F2E; Start 115; Stop 139
aagttcgaaaggctttattcttaaa

SEQ ID NO: 288574 - DNA, 25 bp, Artificial
  probe
  misc_feature (1)..(25): SEQ ID NO: 1262; WAN024F2E; Start 111; Stop 135
tccaaagttcgaaaggctttattct

SEQ ID NO: 288575 - DNA, 25 bp, Artificial
  probe
  misc_feature (1)..(25): SEQ ID NO: 1262; WAN024F2E; Start 108; Stop 132
tcttccaaagttcgaaaggctttat

SEQ ID NO: 288576 - DNA, 25 bp, Artificial
  probe
  misc_feature (1)..(25): SEQ ID NO: 1262; WAN024F2E; Start 107; Stop 131
atcttccaaagttcgaaaggcttta

SEQ ID NO: 288577 - DNA, 25 bp, Artificial
  probe
  misc_feature (1)..(25): SEQ ID NO: 1262; WAN024F2E; Start 116; Stop 140
agttcgaaaggctttattcttaaat

SEQ ID NO: 288578 - DNA, 25 bp, Artificial
  probe
  misc_feature (1)..(25): SEQ ID NO: 1262; WAN024F2E; Start 117; Stop 141
gttcgaaaggctttattcttaaatc

SEQ ID NO: 288579 - DNA, 25 bp, Artificial
  probe
  misc_feature (1)..(25): SEQ ID NO: 1263; WAN024GA8; Start 1025; Stop 1049
aatatagccagcagttcaaggttaa

SEQ ID NO: 288580 - DNA, 25 bp, Artificial
  probe
  misc_feature (1)..(25): SEQ ID NO: 1263; WAN024GA8; Start 513; Stop 537
tatcaatcacttcaagcaagaatgg

SEQ ID NO: 288581 - DNA, 25 bp, Artificial
  probe
  misc_feature (1)..(25): SEQ ID NO: 1263; WAN024GA8; Start 271; Stop 295
gcaacactcagagaacaattcaatg

SEQ ID NO: 288582 - DNA, 25 bp, Artificial
  probe
  misc_feature (1)..(25): SEQ ID NO: 1263; WAN024GA8; Start 272; Stop 296
caacactcagagaacaattcaatgt

SEQ ID NO: 288583 - DNA, 25 bp, Artificial
  probe
  misc_feature (1)..(25): SEQ ID NO: 1263; WAN024GA8; Start 695; Stop 719
cttattatgtgctcaaggatatgga

SEQ ID NO: 288584 - DNA, 25 bp, Artificial
  probe
  misc_feature (1)..(25): SEQ ID NO: 1263; WAN024GA8; Start 694; Stop 718
tcttattatgtgctcaaggatatgg

SEQ ID NO: 288585 - DNA, 25 bp, Artificial
  probe
  misc_feature (1)..(25): SEQ ID NO: 1263; WAN024GA8; Start 512; Stop 536
atatcaatcacttcaagcaagaatg

SEQ ID NO: 288586 - DNA, 25 bp, Artificial
  probe
  misc_feature (1)..(25): SEQ ID NO: 1263; WAN024GA8; Start 686; Stop 710
tggacaattcttattatgtgctcaa

SEQ ID NO: 288587 - DNA, 25 bp, Artificial
  probe
  misc_feature (1)..(25): SEQ ID NO: 1263; WAN024GA8; Start 238; Stop 262
gagtctcacaatgaatactggcttg

SEQ ID NO: 288588 - DNA, 25 bp, Artificial
  probe
  misc_feature (1)..(25): SEQ ID NO: 1263; WAN024GA8; Start 781; Stop 805
ttccatattgagttcttccgtgagg

SEQ ID NO: 288589 - DNA, 25 bp, Artificial
  probe
  misc_feature (1)..(25): SEQ ID NO: 1263; WAN024GA8; Start 689; Stop 713
acaattcttattatgtgctcaagga

SEQ ID NO: 288590 - DNA, 25 bp, Artificial
  probe
  misc_feature (1)..(25): SEQ ID NO: 1263; WAN024GA8; Start 685; Stop 709
atggacaattcttattatgtgctca

SEQ ID NO: 288591 - DNA, 25 bp, Artificial
  probe
  misc_feature (1)..(25): SEQ ID NO: 1263; WAN024GA8; Start 239; Stop 263
agtctcacaatgaatactggcttga

SEQ ID NO: 288592 - DNA, 25 bp, Artificial
  probe
  misc_feature (1)..(25): SEQ ID NO: 1263; WAN024GA8; Start 696; Stop 720
ttattatgtgctcaaggatatggat

SEQ ID NO: 288593 - DNA, 25 bp, Artificial
  probe
  misc_feature (1)..(25): SEQ ID NO: 1263; WAN024GA8; Start 688; Stop 712
gacaattcttattatgtgctcaagg

SEQ ID NO: 288594 - DNA, 25 bp, Artificial
  probe
  misc_feature (1)..(25): SEQ ID NO: 1263; WAN024GA8; Start 687; Stop 711
ggacaattcttattatgtgctcaag

SEQ ID NO: 288595 - DNA, 25 bp, Artificial
  probe
  misc_feature (1)..(25): SEQ ID NO: 1263; WAN024GA8; Start 683; Stop 707
agatggacaattcttattatgtgct

SEQ ID NO: 288596 - DNA, 25 bp, Artificial
  probe
  misc_feature (1)..(25): SEQ ID NO: 1263; WAN024GA8; Start 266; Stop 290
tagacgcaacactcagagaacaatt

SEQ ID NO: 288597 - DNA, 25 bp, Artificial
  probe
  misc_feature (1)..(25): SEQ ID NO: 1263; WAN024GA8; Start 394; Stop 418
gttatcaagacggaagcagatgttg

SEQ ID NO: 288598 - DNA, 25 bp, Artificial
  probe
  misc_feature (1)..(25): SEQ ID NO: 1263; WAN024GA8; Start 393; Stop 417
tgttatcaagacggaagcagatgtt

SEQ ID NO: 288599 - DNA, 25 bp, Artificial
  probe
  misc_feature (1)..(25): SEQ ID NO: 1263; WAN024GA8; Start 270; Stop 294
cgcaacactcagagaacaattcaat

SEQ ID NO: 288600 - DNA, 25 bp, Artificial
  probe
  misc_feature (1)..(25): SEQ ID NO: 1263; WAN024GA8; Start 697; Stop 721
tattatgtgctcaaggatatggatc

SEQ ID NO: 288601 - DNA, 25 bp, Artificial
  probe
  misc_feature (1)..(25): SEQ ID NO: 1263; WAN024GA8; Start 684; Stop 708
gatggacaattcttattatgtgctc

SEQ ID NO: 288602 - DNA, 25 bp, Artificial
  probe
  misc_feature (1)..(25): SEQ ID NO: 1263; WAN024GA8; Start 816; Stop 840
tattaccatcgagtacaataaccgc

SEQ ID NO: 288603 - DNA, 25 bp, Artificial
  probe
  misc_feature (1)..(25): SEQ ID NO: 1263; WAN024GA8; Start 537; Stop 561
ggaccattcaaccctttatttcttt

SEQ ID NO: 288604 - DNA, 25 bp, Artificial
  probe
  misc_feature (1)..(25): SEQ ID NO: 1263; WAN024GA8; Start 1024; Stop 1048
aaatatagccagcagttcaaggtta

SEQ ID NO: 288605 - DNA, 25 bp, Artificial
  probe
  misc_feature (1)..(25): SEQ ID NO: 1263; WAN024GA8; Start 690; Stop 714
caattcttattatgtgctcaaggat

SEQ ID NO: 288606 - DNA, 25 bp, Artificial
  probe
  misc_feature (1)..(25): SEQ ID NO: 1263; WAN024GA8; Start 1026; Stop 1050
atatagccagcagttcaaggttaaa

SEQ ID NO: 288607 - DNA, 25 bp, Artificial
  probe
  misc_feature (1)..(25): SEQ ID NO: 1263; WAN024GA8; Start 9; Stop 33
ccttgttatttctccctactatcca

SEQ ID NO: 288608 - DNA, 25 bp, Artificial
  probe
  misc_feature (1)..(25): SEQ ID NO: 1263; WAN024GA8; Start 8; Stop 32
accttgttatttctccctactatcc

SEQ ID NO: 288609 - DNA, 25 bp, Artificial
  probe
  misc_feature (1)..(25): SEQ ID NO: 1263; WAN024GA8; Start 780; Stop 804
tttccatattgagttcttccgtgag

SEQ ID NO: 288610 - DNA, 25 bp, Artificial
  probe
  misc_feature (1)..(25): SEQ ID NO: 1263; WAN024GA8; Start 998; Stop 1022
tttattcagaagaggatttgcttgc

SEQ ID NO: 288611 - DNA, 25 bp, Artificial
  probe
  misc_feature (1)..(25): SEQ ID NO: 1263; WAN024GA8; Start 499; Stop 523
gagacagaagacgatatcaatcact

SEQ ID NO: 288612 - DNA, 25 bp, Artificial
  probe
  misc_feature (1)..(25): SEQ ID NO: 1264; WAN024CT2; Start 859; Stop 883
aatatggttagtggctcgtatgatt

SEQ ID NO: 288613 - DNA, 25 bp, Artificial
  probe
  misc_feature (1)..(25): SEQ ID NO: 1264; WAN024CT2; Start 860; Stop 884
atatggttagtggctcgtatgattg

SEQ ID NO: 288614 - DNA, 25 bp, Artificial
  probe
  misc_feature (1)..(25): SEQ ID NO: 1264; WAN024CT2; Start 849; Stop 873
aagcgagtataatatggttagtggc

SEQ ID NO: 288615 - DNA, 25 bp, Artificial
  probe
  misc_feature (1)..(25): SEQ ID NO: 1264; WAN024CT2; Start 858; Stop 882
taatatggttagtggctcgtatgat

SEQ ID NO: 288616 - DNA, 25 bp, Artificial
  probe
  misc_feature (1)..(25): SEQ ID NO: 1264; WAN024CT2; Start 857; Stop 881
ataatatggttagtggctcgtatga

SEQ ID NO: 288617 - DNA, 25 bp, Artificial
  probe
  misc_feature (1)..(25): SEQ ID NO: 1264; WAN024CT2; Start 854; Stop 878
agtataatatggttagtggctcgta

SEQ ID NO: 288618 - DNA, 25 bp, Artificial
  probe
  misc_feature (1)..(25): SEQ ID NO: 1264; WAN024CT2; Start 853; Stop 877
gagtataatatggttagtggctcgt

SEQ ID NO: 288619 - DNA, 25 bp, Artificial
  probe
  misc_feature (1)..(25): SEQ ID NO: 1264; WAN024CT2; Start 851; Stop 875
gcgagtataatatggttagtggctc

SEQ ID NO: 288620 - DNA, 25 bp, Artificial
  probe
  misc_feature (1)..(25): SEQ ID NO: 1264; WAN024CT2; Start 856; Stop 880
tataatatggttagtggctcgtatg

SEQ ID NO: 288621 - DNA, 25 bp, Artificial
  probe
  misc_feature (1)..(25): SEQ ID NO: 1264; WAN024CT2; Start 855; Stop 879
gtataatatggttagtggctcgtat

SEQ ID NO: 288622 - DNA, 25 bp, Artificial
  probe
  misc_feature (1)..(25): SEQ ID NO: 1264; WAN024CT2; Start 861; Stop 885
tatggttagtggctcgtatgattgg

SEQ ID NO: 288623 - DNA, 25 bp, Artificial
  probe
  misc_feature (1)..(25): SEQ ID NO: 1264; WAN024CT2; Start 848; Stop 872
taagcgagtataatatggttagtgg

SEQ ID NO: 288624 - DNA, 25 bp, Artificial
  probe
  misc_feature (1)..(25): SEQ ID NO: 1264; WAN024CT2; Start 293; Stop 317
ggcttaatggttattcacaagtcgg

SEQ ID NO: 288625 - DNA, 25 bp, Artificial
  probe
  misc_feature (1)..(25): SEQ ID NO: 1264; WAN024CT2; Start 37; Stop 61
gaaactgaaatagaagacgcatacc

SEQ ID NO: 288626 - DNA, 25 bp, Artificial
  probe
  misc_feature (1)..(25): SEQ ID NO: 1264; WAN024CT2; Start 421; Stop 445
gatttcagatttcaacttagcgagg

SEQ ID NO: 288627 - DNA, 25 bp, Artificial
  probe
  misc_feature (1)..(25): SEQ ID NO: 1264; WAN024CT2; Start 419; Stop 443
cagatttcagatttcaacttagcga

SEQ ID NO: 288628 - DNA, 25 bp, Artificial
  probe
  misc_feature (1)..(25): SEQ ID NO: 1264; WAN024CT2; Start 418; Stop 442
tcagatttcagatttcaacttagcg

SEQ ID NO: 288629 - DNA, 25 bp, Artificial
  probe
  misc_feature (1)..(25): SEQ ID NO: 1264; WAN024CT2; Start 39; Stop 63
aactgaaatagaagacgcataccat

SEQ ID NO: 288630 - DNA, 25 bp, Artificial
  probe
  misc_feature (1)..(25): SEQ ID NO: 1264; WAN024CT2; Start 127; Stop 151
ccgtctaatatcacccaatctaagg

SEQ ID NO: 288631 - DNA, 25 bp, Artificial
  probe
  misc_feature (1)..(25): SEQ ID NO: 1264; WAN024CT2; Start 40; Stop 64
actgaaatagaagacgcataccata

SEQ ID NO: 288632 - DNA, 25 bp, Artificial
  probe
  misc_feature (1)..(25): SEQ ID NO: 1264; WAN024CT2; Start 38; Stop 62
aaactgaaatagaagacgcatacca

SEQ ID NO: 288633 - DNA, 25 bp, Artificial
  probe
  misc_feature (1)..(25): SEQ ID NO: 1264; WAN024CT2; Start 36; Stop 60
tgaaactgaaatagaagacgcatac

SEQ ID NO: 288634 - DNA, 25 bp, Artificial
  probe
  misc_feature (1)..(25): SEQ ID NO: 1264; WAN024CT2; Start 420; Stop 444
agatttcagatttcaacttagcgag

SEQ ID NO: 288635 - DNA, 25 bp, Artificial
  probe
  misc_feature (1)..(25): SEQ ID NO: 1264; WAN024CT2; Start 287; Stop 311
atacagggcttaatggttattcaca

SEQ ID NO: 288636 - DNA, 25 bp, Artificial
  probe
  misc_feature (1)..(25): SEQ ID NO: 1264; WAN024CT2; Start 288; Stop 312
tacagggcttaatggttattcacaa

SEQ ID NO: 288637 - DNA, 25 bp, Artificial
  probe
  misc_feature (1)..(25): SEQ ID NO: 1264; WAN024CT2; Start 422; Stop 446
atttcagatttcaacttagcgaggt

SEQ ID NO: 288638 - DNA, 25 bp, Artificial
  probe
  misc_feature (1)..(25): SEQ ID NO: 1264; WAN024CT2; Start 308; Stop 332
cacaagtcgggaaattcattacaat

SEQ ID NO: 288639 - DNA, 25 bp, Artificial
  probe
  misc_feature (1)..(25): SEQ ID NO: 1264; WAN024CT2; Start 126; Stop 150
gccgtctaatatcacccaatctaag

SEQ ID NO: 288640 - DNA, 25 bp, Artificial
  probe
  misc_feature (1)..(25): SEQ ID NO: 1264; WAN024CT2; Start 119; Stop 143
ataatttgccgtctaatatcaccca

SEQ ID NO: 288641 - DNA, 25 bp, Artificial
  probe
  misc_feature (1)..(25): SEQ ID NO: 1264; WAN024CT2; Start 297; Stop 321
taatggttattcacaagtcgggaaa

SEQ ID NO: 288642 - DNA, 25 bp, Artificial
  probe
  misc_feature (1)..(25): SEQ ID NO: 1264; WAN024CT2; Start 296; Stop 320
ttaatggttattcacaagtcgggaa

SEQ ID NO: 288643 - DNA, 25 bp, Artificial
  probe
  misc_feature (1)..(25): SEQ ID NO: 1264; WAN024CT2; Start 1012; Stop 1036
gccctaaggaaagaaactcaaattg

SEQ ID NO: 288644 - DNA, 25 bp, Artificial
  probe
  misc_feature (1)..(25): SEQ ID NO: 1264; WAN024CT2; Start 1010; Stop 1034
atgccctaaggaaagaaactcaaat

SEQ ID NO: 288645 - DNA, 25 bp, Artificial
  probe
  misc_feature (1)..(25): SEQ ID NO: 1265; WAN024CFL; Start 71; Stop 95
gactctatgaagaaggtaagcaact

SEQ ID NO: 288646 - DNA, 25 bp, Artificial
  probe
  misc_feature (1)..(25): SEQ ID NO: 1265; WAN024CFL; Start 121; Stop 145
ggaactcgcctaatatcacatatcg

SEQ ID NO: 288647 - DNA, 25 bp, Artificial
  probe
  misc_feature (1)..(25): SEQ ID NO: 1265; WAN024CFL; Start 70; Stop 94
ggactctatgaagaaggtaagcaac

SEQ ID NO: 288648 - DNA, 25 bp, Artificial
  probe
  misc_feature (1)..(25): SEQ ID NO: 1265; WAN024CFL; Start 72; Stop 96
actctatgaagaaggtaagcaacta

SEQ ID NO: 288649 - DNA, 25 bp, Artificial
  probe
  misc_feature (1)..(25): SEQ ID NO: 1265; WAN024CFL; Start 73; Stop 97
ctctatgaagaaggtaagcaactac

SEQ ID NO: 288650 - DNA, 25 bp, Artificial
  probe
  misc_feature (1)..(25): SEQ ID NO: 1265; WAN024CFL; Start 67; Stop 91
tacggactctatgaagaaggtaagc

SEQ ID NO: 288651 - DNA, 25 bp, Artificial
  probe
  misc_feature (1)..(25): SEQ ID NO: 1265; WAN024CFL; Start 69; Stop 93
cggactctatgaagaaggtaagcaa

SEQ ID NO: 288652 - DNA, 25 bp, Artificial
  probe
  misc_feature (1)..(25): SEQ ID NO: 1265; WAN024CFL; Start 66; Stop 90
ttacggactctatgaagaaggtaag

SEQ ID NO: 288653 - DNA, 25 bp, Artificial
  probe
  misc_feature (1)..(25): SEQ ID NO: 1265; WAN024CFL; Start 120; Stop 144
gggaactcgcctaatatcacatatc

SEQ ID NO: 288654 - DNA, 25 bp, Artificial
  probe
  misc_feature (1)..(25): SEQ ID NO: 1265; WAN024CFL; Start 102; Stop 126
ctatattggtaaaggagagggaact

SEQ ID NO: 288655 - DNA, 25 bp, Artificial
  probe
  misc_feature (1)..(25): SEQ ID NO: 1265; WAN024CFL; Start 62; Stop 86
atgtttacggactctatgaagaagg

SEQ ID NO: 288656 - DNA, 25 bp, Artificial
  probe
  misc_feature (1)..(25): SEQ ID NO: 1265; WAN024CFL; Start 64; Stop 88
gtttacggactctatgaagaaggta

SEQ ID NO: 288657 - DNA, 25 bp, Artificial
  probe
  misc_feature (1)..(25): SEQ ID NO: 1265; WAN024CFL; Start 101; Stop 125
tctatattggtaaaggagagggaac

SEQ ID NO: 288658 - DNA, 25 bp, Artificial
  probe
  misc_feature (1)..(25): SEQ ID NO: 1265; WAN024CFL; Start 68; Stop 92
acggactctatgaagaaggtaagca

SEQ ID NO: 288659 - DNA, 25 bp, Artificial
  probe
  misc_feature (1)..(25): SEQ ID NO: 1265; WAN024CFL; Start 152; Stop 176
cgcttacagagataaatcaagaaga

SEQ ID NO: 288660 - DNA, 25 bp, Artificial
  probe
  misc_feature (1)..(25): SEQ ID NO: 1265; WAN024CFL; Start 63; Stop 87
tgtttacggactctatgaagaaggt

SEQ ID NO: 288661 - DNA, 25 bp, Artificial
  probe
  misc_feature (1)..(25): SEQ ID NO: 1265; WAN024CFL; Start 59; Stop 83
actatgtttacggactctatgaaga

SEQ ID NO: 288662 - DNA, 25 bp, Artificial
  probe
  misc_feature (1)..(25): SEQ ID NO: 1265; WAN024CFL; Start 103; Stop 127
tatattggtaaaggagagggaactc

SEQ ID NO: 288663 - DNA, 25 bp, Artificial
  probe
  misc_feature (1)..(25): SEQ ID NO: 1265; WAN024CFL; Start 100; Stop 124
ttctatattggtaaaggagagggaa

SEQ ID NO: 288664 - DNA, 25 bp, Artificial
  probe
  misc_feature (1)..(25): SEQ ID NO: 1265; WAN024CFL; Start 99; Stop 123
tttctatattggtaaaggagaggga

SEQ ID NO: 288665 - DNA, 25 bp, Artificial
  probe
  misc_feature (1)..(25): SEQ ID NO: 1265; WAN024CFL; Start 61; Stop 85
tatgtttacggactctatgaagaag

SEQ ID NO: 288666 - DNA, 25 bp, Artificial
  probe
  misc_feature (1)..(25): SEQ ID NO: 1265; WAN024CFL; Start 60; Stop 84
ctatgtttacggactctatgaagaa

SEQ ID NO: 288667 - DNA, 25 bp, Artificial
  probe
  misc_feature (1)..(25): SEQ ID NO: 1265; WAN024CFL; Start 104; Stop 128
atattggtaaaggagagggaactcg

SEQ ID NO: 288668 - DNA, 25 bp, Artificial
  probe
  misc_feature (1)..(25): SEQ ID NO: 1265; WAN024CFL; Start 119; Stop 143
agggaactcgcctaatatcacatat

SEQ ID NO: 288669 - DNA, 25 bp, Artificial
  probe
  misc_feature (1)..(25): SEQ ID NO: 1265; WAN024CFL; Start 58; Stop 82
tactatgtttacggactctatgaag

SEQ ID NO: 288670 - DNA, 25 bp, Artificial
  probe
  misc_feature (1)..(25): SEQ ID NO: 1265; WAN024CFL; Start 122; Stop 146
gaactcgcctaatatcacatatcga

SEQ ID NO: 288671 - DNA, 25 bp, Artificial
  probe
  misc_feature (1)..(25): SEQ ID NO: 1265; WAN024CFL; Start 65; Stop 89
tttacggactctatgaagaaggtaa

SEQ ID NO: 288672 - DNA, 25 bp, Artificial
  probe
  misc_feature (1)..(25): SEQ ID NO: 1265; WAN024CFL; Start 118; Stop 142
gagggaactcgcctaatatcacata

SEQ ID NO: 288673 - DNA, 25 bp, Artificial
  probe
  misc_feature (1)..(25): SEQ ID NO: 1265; WAN024CFL; Start 74; Stop 98
tctatgaagaaggtaagcaactacc

SEQ ID NO: 288674 - DNA, 25 bp, Artificial
  probe
  misc_feature (1)..(25): SEQ ID NO: 1265; WAN024CFL; Start 86; Stop 110
gtaagcaactacctttctatattgg

SEQ ID NO: 288675 - DNA, 25 bp, Artificial
  probe
  misc_feature (1)..(25): SEQ ID NO: 1265; WAN024CFL; Start 57; Stop 81
atactatgtttacggactctatgaa

SEQ ID NO: 288676 - DNA, 25 bp, Artificial
  probe
  misc_feature (1)..(25): SEQ ID NO: 1265; WAN024CFL; Start 56; Stop 80
aatactatgtttacggactctatga

SEQ ID NO: 288677 - DNA, 25 bp, Artificial
  probe
  misc_feature (1)..(25): SEQ ID NO: 1265; WAN024CFL; Start 111; Stop 135
taaaggagagggaactcgcctaata

SEQ ID NO: 288678 - DNA, 25 bp, Artificial
  probe
  misc_feature (1)..(25): SEQ ID NO: 1266; WAN024D7I; Start 864; Stop 888
agaagataacagtcaagcaagatac

SEQ ID NO: 288679 - DNA, 25 bp, Artificial
  probe
  misc_feature (1)..(25): SEQ ID NO: 1266; WAN024D7I; Start 867; Stop 891
agataacagtcaagcaagatactct

SEQ ID NO: 288680 - DNA, 25 bp, Artificial
  probe
  misc_feature (1)..(25): SEQ ID NO: 1266; WAN024D7I; Start 862; Stop 886
ttagaagataacagtcaagcaagat

SEQ ID NO: 288681 - DNA, 25 bp, Artificial
  probe
  misc_feature (1)..(25): SEQ ID NO: 1266; WAN024D7I; Start 866; Stop 890
aagataacagtcaagcaagatactc

SEQ ID NO: 288682 - DNA, 25 bp, Artificial
  probe
  misc_feature (1)..(25): SEQ ID NO: 1266; WAN024D7I; Start 865; Stop 889
gaagataacagtcaagcaagatact

SEQ ID NO: 288683 - DNA, 25 bp, Artificial
  probe
  misc_feature (1)..(25): SEQ ID NO: 1266; WAN024D7I; Start 1145; Stop 1169
ctgaacagttggaacacttgatgta

SEQ ID NO: 288684 - DNA, 25 bp, Artificial
  probe
  misc_feature (1)..(25): SEQ ID NO: 1266; WAN024D7I; Start 777; Stop 801
aatgactccagatacaatcgctcaa

SEQ ID NO: 288685 - DNA, 25 bp, Artificial
  probe
  misc_feature (1)..(25): SEQ ID NO: 1266; WAN024D7I; Start 1146; Stop 1170
tgaacagttggaacacttgatgtac

SEQ ID NO: 288686 - DNA, 25 bp, Artificial
  probe
  misc_feature (1)..(25): SEQ ID NO: 1266; WAN024D7I; Start 863; Stop 887
tagaagataacagtcaagcaagata

SEQ ID NO: 288687 - DNA, 25 bp, Artificial
  probe
  misc_feature (1)..(25): SEQ ID NO: 1266; WAN024D7I; Start 184; Stop 208
ccatctattaacatccaatcttctg

SEQ ID NO: 288688 - DNA, 25 bp, Artificial
  probe
  misc_feature (1)..(25): SEQ ID NO: 1266; WAN024D7I; Start 1269; Stop 1293
ccttacctttgttgatatgctttcc

SEQ ID NO: 288689 - DNA, 25 bp, Artificial
  probe
  misc_feature (1)..(25): SEQ ID NO: 1266; WAN024D7I; Start 1268; Stop 1292
cccttacctttgttgatatgctttc

SEQ ID NO: 288690 - DNA, 25 bp, Artificial
  probe
  misc_feature (1)..(25): SEQ ID NO: 1266; WAN024D7I; Start 1267; Stop 1291
tcccttacctttgttgatatgcttt

SEQ ID NO: 288691 - DNA, 25 bp, Artificial
  probe
  misc_feature (1)..(25): SEQ ID NO: 1266; WAN024D7I; Start 1259; Stop 1283
atgctatatcccttacctttgttga

SEQ ID NO: 288692 - DNA, 25 bp, Artificial
  probe
  misc_feature (1)..(25): SEQ ID NO: 1266; WAN024D7I; Start 183; Stop 207
tccatctattaacatccaatcttct

SEQ ID NO: 288693 - DNA, 25 bp, Artificial
  probe
  misc_feature (1)..(25): SEQ ID NO: 1266; WAN024D7I; Start 1266; Stop 1290
atcccttacctttgttgatatgctt

SEQ ID NO: 288694 - DNA, 25 bp, Artificial
  probe
  misc_feature (1)..(25): SEQ ID NO: 1266; WAN024D7I; Start 177; Stop 201
tgcctttccatctattaacatccaa

SEQ ID NO: 288695 - DNA, 25 bp, Artificial
  probe
  misc_feature (1)..(25): SEQ ID NO: 1266; WAN024D7I; Start 176; Stop 200
ttgcctttccatctattaacatcca

SEQ ID NO: 288696 - DNA, 25 bp, Artificial
  probe
  misc_feature (1)..(25): SEQ ID NO: 1266; WAN024D7I; Start 1270; Stop 1294
cttacctttgttgatatgctttcct

SEQ ID NO: 288697 - DNA, 25 bp, Artificial
  probe
  misc_feature (1)..(25): SEQ ID NO: 1266; WAN024D7I; Start 1260; Stop 1284
tgctatatcccttacctttgttgat

SEQ ID NO: 288698 - DNA, 25 bp, Artificial
  probe
  misc_feature (1)..(25): SEQ ID NO: 1266; WAN024D7I; Start 78; Stop 102
cctaattcagaatcgtaattggatg

SEQ ID NO: 288699 - DNA, 25 bp, Artificial
  probe
  misc_feature (1)..(25): SEQ ID NO: 1266; WAN024D7I; Start 172; Stop 196
cgtattgcctttccatctattaaca

SEQ ID NO: 288700 - DNA, 25 bp, Artificial
  probe
  misc_feature (1)..(25): SEQ ID NO: 1266; WAN024D7I; Start 5; Stop 29
attatggaggaaatacccgtatgag

SEQ ID NO: 288701 - DNA, 25 bp, Artificial
  probe
  misc_feature (1)..(25): SEQ ID NO: 1266; WAN024D7I; Start 178; Stop 202
gcctttccatctattaacatccaat

SEQ ID NO: 288702 - DNA, 25 bp, Artificial
  probe
  misc_feature (1)..(25): SEQ ID NO: 1266; WAN024D7I; Start 175; Stop 199
attgcctttccatctattaacatcc

SEQ ID NO: 288703 - DNA, 25 bp, Artificial
  probe
  misc_feature (1)..(25): SEQ ID NO: 1266; WAN024D7I; Start 1; Stop 25
atgaattatggaggaaatacccgta

SEQ ID NO: 288704 - DNA, 25 bp, Artificial
  probe
  misc_feature (1)..(25): SEQ ID NO: 1266; WAN024D7I; Start 7; Stop 31
tatggaggaaatacccgtatgagaa

SEQ ID NO: 288705 - DNA, 25 bp, Artificial
  probe
  misc_feature (1)..(25): SEQ ID NO: 1266; WAN024D7I; Start 6; Stop 30
ttatggaggaaatacccgtatgaga

SEQ ID NO: 288706 - DNA, 25 bp, Artificial
  probe
  misc_feature (1)..(25): SEQ ID NO: 1266; WAN024D7I; Start 62; Stop 86
tacgcttaatggaaaccctaattca

SEQ ID NO: 288707 - DNA, 25 bp, Artificial
  probe
  misc_feature (1)..(25): SEQ ID NO: 1266; WAN024D7I; Start 543; Stop 567
tgaggaagatttaacagagtttgct

SEQ ID NO: 288708 - DNA, 25 bp, Artificial
  probe
  misc_feature (1)..(25): SEQ ID NO: 1266; WAN024D7I; Start 401; Stop 425
aggttctttcatctcagtttcaaat

SEQ ID NO: 288709 - DNA, 25 bp, Artificial
  probe
  misc_feature (1)..(25): SEQ ID NO: 1266; WAN024D7I; Start 4; Stop 28
aattatggaggaaatacccgtatga

SEQ ID NO: 288710 - DNA, 25 bp, Artificial
  probe
  misc_feature (1)..(25): SEQ ID NO: 1266; WAN024D7I; Start 2; Stop 26
tgaattatggaggaaatacccgtat

SEQ ID NO: 288711 - DNA, 25 bp, Artificial
  probe
  misc_feature (1)..(25): SEQ ID NO: 1267; WAN024FWB; Start 393; Stop 417
attgttgttcatcgtctctctaagt

SEQ ID NO: 288712 - DNA, 25 bp, Artificial
  probe
  misc_feature (1)..(25): SEQ ID NO: 1267; WAN024FWB; Start 394; Stop 418
ttgttgttcatcgtctctctaagtt

SEQ ID NO: 288713 - DNA, 25 bp, Artificial
  probe
  misc_feature (1)..(25): SEQ ID NO: 1267; WAN024FWB; Start 78; Stop 102
tgtcttgctctcaggaattattgta

SEQ ID NO: 288714 - DNA, 25 bp, Artificial
  probe
  misc_feature (1)..(25): SEQ ID NO: 1267; WAN024FWB; Start 206; Stop 230
tagaagtaacggaagcatcaataac

SEQ ID NO: 288715 - DNA, 25 bp, Artificial
  probe
  misc_feature (1)..(25): SEQ ID NO: 1267; WAN024FWB; Start 1172; Stop 1196
agagttcagattcaataccaacagt

SEQ ID NO: 288716 - DNA, 25 bp, Artificial
  probe
  misc_feature (1)..(25): SEQ ID NO: 1267; WAN024FWB; Start 1173; Stop 1197
gagttcagattcaataccaacagtt

SEQ ID NO: 288717 - DNA, 25 bp, Artificial
  probe
  misc_feature (1)..(25): SEQ ID NO: 1267; WAN024FWB; Start 77; Stop 101
gtgtcttgctctcaggaattattgt

SEQ ID NO: 288718 - DNA, 25 bp, Artificial
  probe
  misc_feature (1)..(25): SEQ ID NO: 1267; WAN024FWB; Start 83; Stop 107
tgctctcaggaattattgtatatgc

SEQ ID NO: 288719 - DNA, 25 bp, Artificial
  probe
  misc_feature (1)..(25): SEQ ID NO: 1267; WAN024FWB; Start 1171; Stop 1195
aagagttcagattcaataccaacag

SEQ ID NO: 288720 - DNA, 25 bp, Artificial
  probe
  misc_feature (1)..(25): SEQ ID NO: 1267; WAN024FWB; Start 392; Stop 416
tattgttgttcatcgtctctctaag

SEQ ID NO: 288721 - DNA, 25 bp, Artificial
  probe
  misc_feature (1)..(25): SEQ ID NO: 1267; WAN024FWB; Start 79; Stop 103
gtcttgctctcaggaattattgtat

SEQ ID NO: 288722 - DNA, 25 bp, Artificial
  probe
  misc_feature (1)..(25): SEQ ID NO: 1267; WAN024FWB; Start 470; Stop 494
cattgccgattatagtacctgtctt

SEQ ID NO: 288723 - DNA, 25 bp, Artificial
  probe
  misc_feature (1)..(25): SEQ ID NO: 1267; WAN024FWB; Start 464; Stop 488
tatcagcattgccgattatagtacc

SEQ ID NO: 288724 - DNA, 25 bp, Artificial
  probe
  misc_feature (1)..(25): SEQ ID NO: 1267; WAN024FWB; Start 205; Stop 229
ttagaagtaacggaagcatcaataa

SEQ ID NO: 288725 - DNA, 25 bp, Artificial
  probe
  misc_feature (1)..(25): SEQ ID NO: 1267; WAN024FWB; Start 76; Stop 100
ggtgtcttgctctcaggaattattg

SEQ ID NO: 288726 - DNA, 25 bp, Artificial
  probe
  misc_feature (1)..(25): SEQ ID NO: 1267; WAN024FWB; Start 74; Stop 98
atggtgtcttgctctcaggaattat

SEQ ID NO: 288727 - DNA, 25 bp, Artificial
  probe
  misc_feature (1)..(25): SEQ ID NO: 1267; WAN024FWB; Start 458; Stop 482
ttgtattatcagcattgccgattat

SEQ ID NO: 288728 - DNA, 25 bp, Artificial
  probe
  misc_feature (1)..(25): SEQ ID NO: 1267; WAN024FWB; Start 457; Stop 481
attgtattatcagcattgccgatta

SEQ ID NO: 288729 - DNA, 25 bp, Artificial
  probe
  misc_feature (1)..(25): SEQ ID NO: 1267; WAN024FWB; Start 456; Stop 480
tattgtattatcagcattgccgatt

SEQ ID NO: 288730 - DNA, 25 bp, Artificial
  probe
  misc_feature (1)..(25): SEQ ID NO: 1267; WAN024FWB; Start 455; Stop 479
ttattgtattatcagcattgccgat

SEQ ID NO: 288731 - DNA, 25 bp, Artificial
  probe
  misc_feature (1)..(25): SEQ ID NO: 1267; WAN024FWB; Start 463; Stop 487
ttatcagcattgccgattatagtac

SEQ ID NO: 288732 - DNA, 25 bp, Artificial
  probe
  misc_feature (1)..(25): SEQ ID NO: 1267; WAN024FWB; Start 71; Stop 95
ttaatggtgtcttgctctcaggaat

SEQ ID NO: 288733 - DNA, 25 bp, Artificial
  probe
  misc_feature (1)..(25): SEQ ID NO: 1267; WAN024FWB; Start 75; Stop 99
tggtgtcttgctctcaggaattatt

SEQ ID NO: 288734 - DNA, 25 bp, Artificial
  probe
  misc_feature (1)..(25): SEQ ID NO: 1267; WAN024FWB; Start 73; Stop 97
aatggtgtcttgctctcaggaatta

SEQ ID NO: 288735 - DNA, 25 bp, Artificial
  probe
  misc_feature (1)..(25): SEQ ID NO: 1267; WAN024FWB; Start 72; Stop 96
taatggtgtcttgctctcaggaatt

SEQ ID NO: 288736 - DNA, 25 bp, Artificial
  probe
  misc_feature (1)..(25): SEQ ID NO: 1267; WAN024FWB; Start 391; Stop 415
atattgttgttcatcgtctctctaa

SEQ ID NO: 288737 - DNA, 25 bp, Artificial
  probe
  misc_feature (1)..(25): SEQ ID NO: 1267; WAN024FWB; Start 1174; Stop 1198
agttcagattcaataccaacagttg

SEQ ID NO: 288738 - DNA, 25 bp, Artificial
  probe
  misc_feature (1)..(25): SEQ ID NO: 1267; WAN024FWB; Start 465; Stop 489
atcagcattgccgattatagtacct

SEQ ID NO: 288739 - DNA, 25 bp, Artificial
  probe
  misc_feature (1)..(25): SEQ ID NO: 1267; WAN024FWB; Start 459; Stop 483
tgtattatcagcattgccgattata

SEQ ID NO: 288740 - DNA, 25 bp, Artificial
  probe
  misc_feature (1)..(25): SEQ ID NO: 1267; WAN024FWB; Start 462; Stop 486
attatcagcattgccgattatagta

SEQ ID NO: 288741 - DNA, 25 bp, Artificial
  probe
  misc_feature (1)..(25): SEQ ID NO: 1267; WAN024FWB; Start 461; Stop 485
tattatcagcattgccgattatagt

SEQ ID NO: 288742 - DNA, 25 bp, Artificial
  probe
  misc_feature (1)..(25): SEQ ID NO: 1267; WAN024FWB; Start 172; Stop 196
ggttggtcagcaatctatatatcaa

SEQ ID NO: 288743 - DNA, 25 bp, Artificial
  probe
  misc_feature (1)..(25): SEQ ID NO: 1267; WAN024FWB; Start 460; Stop 484
gtattatcagcattgccgattatag

SEQ ID NO: 288744 - DNA, 25 bp, Artificial
  probe
  misc_feature (1)..(25): SEQ ID NO: 1268; WAN024G4F; Start 219; Stop 243
aaactatggtctgaaactctttggt

SEQ ID NO: 288745 - DNA, 25 bp, Artificial
  probe
  misc_feature (1)..(25): SEQ ID NO: 1268; WAN024G4F; Start 29; Stop 53
gacaagcgaaatctaatagtggaat

SEQ ID NO: 288746 - DNA, 25 bp, Artificial
  probe
  misc_feature (1)..(25): SEQ ID NO: 1268; WAN024G4F; Start 28; Stop 52
agacaagcgaaatctaatagtggaa

SEQ ID NO: 288747 - DNA, 25 bp, Artificial
  probe
  misc_feature (1)..(25): SEQ ID NO: 1268; WAN024G4F; Start 24; Stop 48
ggagagacaagcgaaatctaatagt

SEQ ID NO: 288748 - DNA, 25 bp, Artificial
  probe
  misc_feature (1)..(25): SEQ ID NO: 1268; WAN024G4F; Start 220; Stop 244
aactatggtctgaaactctttggtt

SEQ ID NO: 288749 - DNA, 25 bp, Artificial
  probe
  misc_feature (1)..(25): SEQ ID NO: 1268; WAN024G4F; Start 27; Stop 51
gagacaagcgaaatctaatagtgga

SEQ ID NO: 288750 - DNA, 25 bp, Artificial
  probe
  misc_feature (1)..(25): SEQ ID NO: 1268; WAN024G4F; Start 26; Stop 50
agagacaagcgaaatctaatagtgg

SEQ ID NO: 288751 - DNA, 25 bp, Artificial
  probe
  misc_feature (1)..(25): SEQ ID NO: 1268; WAN024G4F; Start 25; Stop 49
gagagacaagcgaaatctaatagtg

SEQ ID NO: 288752 - DNA, 25 bp, Artificial
  probe
  misc_feature (1)..(25): SEQ ID NO: 1268; WAN024G4F; Start 112; Stop 136
catgcggttcaatatgataacggag

SEQ ID NO: 288753 - DNA, 25 bp, Artificial
  probe
  misc_feature (1)..(25): SEQ ID NO: 1268; WAN024G4F; Start 23; Stop 47
gggagagacaagcgaaatctaatag

SEQ ID NO: 288754 - DNA, 25 bp, Artificial
  probe
  misc_feature (1)..(25): SEQ ID NO: 1268; WAN024G4F; Start 30; Stop 54
acaagcgaaatctaatagtggaatt

SEQ ID NO: 288755 - DNA, 25 bp, Artificial
  probe
  misc_feature (1)..(25): SEQ ID NO: 1268; WAN024G4F; Start 22; Stop 46
agggagagacaagcgaaatctaata

SEQ ID NO: 288756 - DNA, 25 bp, Artificial
  probe
  misc_feature (1)..(25): SEQ ID NO: 1268; WAN024G4F; Start 21; Stop 45
tagggagagacaagcgaaatctaat

SEQ ID NO: 288757 - DNA, 25 bp, Artificial
  probe
  misc_feature (1)..(25): SEQ ID NO: 1268; WAN024G4F; Start 107; Stop 131
ctgaccatgcggttcaatatgataa

SEQ ID NO: 288758 - DNA, 25 bp, Artificial
  probe
  misc_feature (1)..(25): SEQ ID NO: 1268; WAN024G4F; Start 108; Stop 132
tgaccatgcggttcaatatgataac

SEQ ID NO: 288759 - DNA, 25 bp, Artificial
  probe
  misc_feature (1)..(25): SEQ ID NO: 1268; WAN024G4F; Start 113; Stop 137
atgcggttcaatatgataacggagg

SEQ ID NO: 288760 - DNA, 25 bp, Artificial
  probe
  misc_feature (1)..(25): SEQ ID NO: 1268; WAN024G4F; Start 116; Stop 140
cggttcaatatgataacggaggttt

SEQ ID NO: 288761 - DNA, 25 bp, Artificial
  probe
  misc_feature (1)..(25): SEQ ID NO: 1268; WAN024G4F; Start 117; Stop 141
ggttcaatatgataacggaggttta

SEQ ID NO: 288762 - DNA, 25 bp, Artificial
  probe
  misc_feature (1)..(25): SEQ ID NO: 1268; WAN024G4F; Start 190; Stop 214
aaatctaataaacctccgctaagtt

SEQ ID NO: 288763 - DNA, 25 bp, Artificial
  probe
  misc_feature (1)..(25): SEQ ID NO: 1268; WAN024G4F; Start 115; Stop 139
gcggttcaatatgataacggaggtt

SEQ ID NO: 288764 - DNA, 25 bp, Artificial
  probe
  misc_feature (1)..(25): SEQ ID NO: 1268; WAN024G4F; Start 20; Stop 44
gtagggagagacaagcgaaatctaa

SEQ ID NO: 288765 - DNA, 25 bp, Artificial
  probe
  misc_feature (1)..(25): SEQ ID NO: 1268; WAN024G4F; Start 126; Stop 150
tgataacggaggtttagttagaagc

SEQ ID NO: 288766 - DNA, 25 bp, Artificial
  probe
  misc_feature (1)..(25): SEQ ID NO: 1268; WAN024G4F; Start 141; Stop 165
agttagaagctattattgtcgtaca

SEQ ID NO: 288767 - DNA, 25 bp, Artificial
  probe
  misc_feature (1)..(25): SEQ ID NO: 1268; WAN024G4F; Start 109; Stop 133
gaccatgcggttcaatatgataacg

SEQ ID NO: 288768 - DNA, 25 bp, Artificial
  probe
  misc_feature (1)..(25): SEQ ID NO: 1268; WAN024G4F; Start 131; Stop 155
acggaggtttagttagaagctatta

SEQ ID NO: 288769 - DNA, 25 bp, Artificial
  probe
  misc_feature (1)..(25): SEQ ID NO: 1268; WAN024G4F; Start 130; Stop 154
aacggaggtttagttagaagctatt

SEQ ID NO: 288770 - DNA, 25 bp, Artificial
  probe
  misc_feature (1)..(25): SEQ ID NO: 1268; WAN024G4F; Start 120; Stop 144
tcaatatgataacggaggtttagtt

SEQ ID NO: 288771 - DNA, 25 bp, Artificial
  probe
  misc_feature (1)..(25): SEQ ID NO: 1268; WAN024G4F; Start 119; Stop 143
ttcaatatgataacggaggtttagt

SEQ ID NO: 288772 - DNA, 25 bp, Artificial
  probe
  misc_feature (1)..(25): SEQ ID NO: 1268; WAN024G4F; Start 31; Stop 55
caagcgaaatctaatagtggaattt

SEQ ID NO: 288773 - DNA, 25 bp, Artificial
  probe
  misc_feature (1)..(25): SEQ ID NO: 1268; WAN024G4F; Start 111; Stop 135
ccatgcggttcaatatgataacgga

SEQ ID NO: 288774 - DNA, 25 bp, Artificial
  probe
  misc_feature (1)..(25): SEQ ID NO: 1268; WAN024G4F; Start 118; Stop 142
gttcaatatgataacggaggtttag

SEQ ID NO: 288775 - DNA, 25 bp, Artificial
  probe
  misc_feature (1)..(25): SEQ ID NO: 1268; WAN024G4F; Start 125; Stop 149
atgataacggaggtttagttagaag

SEQ ID NO: 288776 - DNA, 25 bp, Artificial
  probe
  misc_feature (1)..(25): SEQ ID NO: 1268; WAN024G4F; Start 132; Stop 156
cggaggtttagttagaagctattat

SEQ ID NO: 288777 - DNA, 25 bp, Artificial
  probe
  misc_feature (1)..(25): SEQ ID NO: 1269; WAN024GMA; Start 149; Stop 173
cttcactcacttctcgaatatcctt

SEQ ID NO: 288778 - DNA, 25 bp, Artificial
  probe
  misc_feature (1)..(25): SEQ ID NO: 1269; WAN024GMA; Start 146; Stop 170
ttccttcactcacttctcgaatatc

SEQ ID NO: 288779 - DNA, 25 bp, Artificial
  probe
  misc_feature (1)..(25): SEQ ID NO: 1269; WAN024GMA; Start 150; Stop 174
ttcactcacttctcgaatatccttg

SEQ ID NO: 288780 - DNA, 25 bp, Artificial
  probe
  misc_feature (1)..(25): SEQ ID NO: 1269; WAN024GMA; Start 145; Stop 169
gttccttcactcacttctcgaatat

SEQ ID NO: 288781 - DNA, 25 bp, Artificial
  probe
  misc_feature (1)..(25): SEQ ID NO: 1269; WAN024GMA; Start 38; Stop 62
ccatttcaaatagagtagcattccc

SEQ ID NO: 288782 - DNA, 25 bp, Artificial
  probe
  misc_feature (1)..(25): SEQ ID NO: 1269; WAN024GMA; Start 148; Stop 172
ccttcactcacttctcgaatatcct

SEQ ID NO: 288783 - DNA, 25 bp, Artificial
  probe
  misc_feature (1)..(25): SEQ ID NO: 1269; WAN024GMA; Start 147; Stop 171
tccttcactcacttctcgaatatcc

SEQ ID NO: 288784 - DNA, 25 bp, Artificial
  probe
  misc_feature (1)..(25): SEQ ID NO: 1269; WAN024GMA; Start 70; Stop 94
tgtctcaagttatctgcaatcgttc

SEQ ID NO: 288785 - DNA, 25 bp, Artificial
  probe
  misc_feature (1)..(25): SEQ ID NO: 1269; WAN024GMA; Start 69; Stop 93
ctgtctcaagttatctgcaatcgtt

SEQ ID NO: 288786 - DNA, 25 bp, Artificial
  probe
  misc_feature (1)..(25): SEQ ID NO: 1269; WAN024GMA; Start 76; Stop 100
aagttatctgcaatcgttccactaa

SEQ ID NO: 288787 - DNA, 25 bp, Artificial
  probe
  misc_feature (1)..(25): SEQ ID NO: 1269; WAN024GMA; Start 37; Stop 61
tccatttcaaatagagtagcattcc

SEQ ID NO: 288788 - DNA, 25 bp, Artificial
  probe
  misc_feature (1)..(25): SEQ ID NO: 1269; WAN024GMA; Start 75; Stop 99
caagttatctgcaatcgttccacta

SEQ ID NO: 288789 - DNA, 25 bp, Artificial
  probe
  misc_feature (1)..(25): SEQ ID NO: 1269; WAN024GMA; Start 144; Stop 168
ggttccttcactcacttctcgaata

SEQ ID NO: 288790 - DNA, 25 bp, Artificial
  probe
  misc_feature (1)..(25): SEQ ID NO: 1269; WAN024GMA; Start 71; Stop 95
gtctcaagttatctgcaatcgttcc

SEQ ID NO: 288791 - DNA, 25 bp, Artificial
  probe
  misc_feature (1)..(25): SEQ ID NO: 1269; WAN024GMA; Start 151; Stop 175
tcactcacttctcgaatatccttgc

SEQ ID NO: 288792 - DNA, 25 bp, Artificial
  probe
  misc_feature (1)..(25): SEQ ID NO: 1269; WAN024GMA; Start 73; Stop 97
ctcaagttatctgcaatcgttccac

SEQ ID NO: 288793 - DNA, 25 bp, Artificial
  probe
  misc_feature (1)..(25): SEQ ID NO: 1269; WAN024GMA; Start 72; Stop 96
tctcaagttatctgcaatcgttcca

SEQ ID NO: 288794 - DNA, 25 bp, Artificial
  probe
  misc_feature (1)..(25): SEQ ID NO: 1269; WAN024GMA; Start 68; Stop 92
cctgtctcaagttatctgcaatcgt

SEQ ID NO: 288795 - DNA, 25 bp, Artificial
  probe
  misc_feature (1)..(25): SEQ ID NO: 1269; WAN024GMA; Start 74; Stop 98
tcaagttatctgcaatcgttccact

SEQ ID NO: 288796 - DNA, 25 bp, Artificial
  probe
  misc_feature (1)..(25): SEQ ID NO: 1269; WAN024GMA; Start 36; Stop 60
ctccatttcaaatagagtagcattc

SEQ ID NO: 288797 - DNA, 25 bp, Artificial
  probe
  misc_feature (1)..(25): SEQ ID NO: 1269; WAN024GMA; Start 154; Stop 178
ctcacttctcgaatatccttgccac

SEQ ID NO: 288798 - DNA, 25 bp, Artificial
  probe
  misc_feature (1)..(25): SEQ ID NO: 1269; WAN024GMA; Start 152; Stop 176
cactcacttctcgaatatccttgcc

SEQ ID NO: 288799 - DNA, 25 bp, Artificial
  probe
  misc_feature (1)..(25): SEQ ID NO: 1269; WAN024GMA; Start 202; Stop 226
ggatcaaagagacgtggaatcaatt

SEQ ID NO: 288800 - DNA, 25 bp, Artificial
  probe
  misc_feature (1)..(25): SEQ ID NO: 1269; WAN024GMA; Start 77; Stop 101
agttatctgcaatcgttccactaaa

SEQ ID NO: 288801 - DNA, 25 bp, Artificial
  probe
  misc_feature (1)..(25): SEQ ID NO: 1269; WAN024GMA; Start 35; Stop 59
gctccatttcaaatagagtagcatt

SEQ ID NO: 288802 - DNA, 25 bp, Artificial
  probe
  misc_feature (1)..(25): SEQ ID NO: 1269; WAN024GMA; Start 153; Stop 177
actcacttctcgaatatccttgcca

SEQ ID NO: 288803 - DNA, 25 bp, Artificial
  probe
  misc_feature (1)..(25): SEQ ID NO: 1269; WAN024GMA; Start 42; Stop 66
ttcaaatagagtagcattccccttc

SEQ ID NO: 288804 - DNA, 25 bp, Artificial
  probe
  misc_feature (1)..(25): SEQ ID NO: 1269; WAN024GMA; Start 41; Stop 65
tttcaaatagagtagcattcccctt

SEQ ID NO: 288805 - DNA, 25 bp, Artificial
  probe
  misc_feature (1)..(25): SEQ ID NO: 1269; WAN024GMA; Start 165; Stop 189
aatatccttgccaccgattttaatg

SEQ ID NO: 288806 - DNA, 25 bp, Artificial
  probe
  misc_feature (1)..(25): SEQ ID NO: 1269; WAN024GMA; Start 34; Stop 58
cgctccatttcaaatagagtagcat

SEQ ID NO: 288807 - DNA, 25 bp, Artificial
  probe
  misc_feature (1)..(25): SEQ ID NO: 1269; WAN024GMA; Start 164; Stop 188
gaatatccttgccaccgattttaat

SEQ ID NO: 288808 - DNA, 25 bp, Artificial
  probe
  misc_feature (1)..(25): SEQ ID NO: 1269; WAN024GMA; Start 40; Stop 64
atttcaaatagagtagcattcccct

SEQ ID NO: 288809 - DNA, 25 bp, Artificial
  probe
  misc_feature (1)..(25): SEQ ID NO: 1269; WAN024GMA; Start 39; Stop 63
catttcaaatagagtagcattcccc

SEQ ID NO: 288810 - DNA, 25 bp, Artificial
  probe
  misc_feature (1)..(25): SEQ ID NO: 1270; WAN024CNO; Start 54; Stop 78
ttcattagttacattccaaacgaaa

SEQ ID NO: 288811 - DNA, 25 bp, Artificial
  probe
  misc_feature (1)..(25): SEQ ID NO: 1270; WAN024CNO; Start 53; Stop 77
tttcattagttacattccaaacgaa

SEQ ID NO: 288812 - DNA, 25 bp, Artificial
  probe
  misc_feature (1)..(25): SEQ ID NO: 1270; WAN024CNO; Start 4; Stop 28
aattcacttccctttgccctaaaac

SEQ ID NO: 288813 - DNA, 25 bp, Artificial
  probe
  misc_feature (1)..(25): SEQ ID NO: 1270; WAN024CNO; Start 59; Stop 83
tagttacattccaaacgaaaagatg

SEQ ID NO: 288814 - DNA, 25 bp, Artificial
  probe
  misc_feature (1)..(25): SEQ ID NO: 1270; WAN024CNO; Start 66; Stop 90
attccaaacgaaaagatggttgaat

SEQ ID NO: 288815 - DNA, 25 bp, Artificial
  probe
  misc_feature (1)..(25): SEQ ID NO: 1270; WAN024CNO; Start 60; Stop 84
agttacattccaaacgaaaagatgg

SEQ ID NO: 288816 - DNA, 25 bp, Artificial
  probe
  misc_feature (1)..(25): SEQ ID NO: 1270; WAN024CNO; Start 63; Stop 87
tacattccaaacgaaaagatggttg

SEQ ID NO: 288817 - DNA, 25 bp, Artificial
  probe
  misc_feature (1)..(25): SEQ ID NO: 1270; WAN024CNO; Start 61; Stop 85
gttacattccaaacgaaaagatggt

SEQ ID NO: 288818 - DNA, 25 bp, Artificial
  probe
  misc_feature (1)..(25): SEQ ID NO: 1270; WAN024CNO; Start 62; Stop 86
ttacattccaaacgaaaagatggtt

SEQ ID NO: 288819 - DNA, 25 bp, Artificial
  probe
  misc_feature (1)..(25): SEQ ID NO: 1270; WAN024CNO; Start 67; Stop 91
ttccaaacgaaaagatggttgaatc

SEQ ID NO: 288820 - DNA, 25 bp, Artificial
  probe
  misc_feature (1)..(25): SEQ ID NO: 1270; WAN024CNO; Start 65; Stop 89
cattccaaacgaaaagatggttgaa

SEQ ID NO: 288821 - DNA, 25 bp, Artificial
  probe
  misc_feature (1)..(25): SEQ ID NO: 1270; WAN024CNO; Start 55; Stop 79
tcattagttacattccaaacgaaaa

SEQ ID NO: 288822 - DNA, 25 bp, Artificial
  probe
  misc_feature (1)..(25): SEQ ID NO: 1270; WAN024CNO; Start 52; Stop 76
ttttcattagttacattccaaacga

SEQ ID NO: 288823 - DNA, 25 bp, Artificial
  probe
  misc_feature (1)..(25): SEQ ID NO: 1270; WAN024CNO; Start 5; Stop 29
attcacttccctttgccctaaaaca

SEQ ID NO: 288824 - DNA, 25 bp, Artificial
  probe
  misc_feature (1)..(25): SEQ ID NO: 1270; WAN024CNO; Start 56; Stop 80
cattagttacattccaaacgaaaag

SEQ ID NO: 288825 - DNA, 25 bp, Artificial
  probe
  misc_feature (1)..(25): SEQ ID NO: 1270; WAN024CNO; Start 78; Stop 102
aagatggttgaatctaaatcattga

SEQ ID NO: 288826 - DNA, 25 bp, Artificial
  probe
  misc_feature (1)..(25): SEQ ID NO: 1270; WAN024CNO; Start 69; Stop 93
ccaaacgaaaagatggttgaatcta

SEQ ID NO: 288827 - DNA, 25 bp, Artificial
  probe
  misc_feature (1)..(25): SEQ ID NO: 1270; WAN024CNO; Start 58; Stop 82
ttagttacattccaaacgaaaagat

SEQ ID NO: 288828 - DNA, 25 bp, Artificial
  probe
  misc_feature (1)..(25): SEQ ID NO: 1270; WAN024CNO; Start 57; Stop 81
attagttacattccaaacgaaaaga

SEQ ID NO: 288829 - DNA, 25 bp, Artificial
  probe
  misc_feature (1)..(25): SEQ ID NO: 1270; WAN024CNO; Start 64; Stop 88
acattccaaacgaaaagatggttga

SEQ ID NO: 288830 - DNA, 25 bp, Artificial
  probe
  misc_feature (1)..(25): SEQ ID NO: 1270; WAN024CNO; Start 68; Stop 92
tccaaacgaaaagatggttgaatct

SEQ ID NO: 288831 - DNA, 25 bp, Artificial
  probe
  misc_feature (1)..(25): SEQ ID NO: 1270; WAN024CNO; Start 6; Stop 30
ttcacttccctttgccctaaaacag

SEQ ID NO: 288832 - DNA, 25 bp, Artificial
  probe
  misc_feature (1)..(25): SEQ ID NO: 1270; WAN024CNO; Start 70; Stop 94
caaacgaaaagatggttgaatctaa

SEQ ID NO: 288833 - DNA, 25 bp, Artificial
  probe
  misc_feature (1)..(25): SEQ ID NO: 1270; WAN024CNO; Start 77; Stop 101
aaagatggttgaatctaaatcattg

SEQ ID NO: 288834 - DNA, 25 bp, Artificial
  probe
  misc_feature (1)..(25): SEQ ID NO: 1270; WAN024CNO; Start 74; Stop 98
cgaaaagatggttgaatctaaatca

SEQ ID NO: 288835 - DNA, 25 bp, Artificial
  probe
  misc_feature (1)..(25): SEQ ID NO: 1270; WAN024CNO; Start 73; Stop 97
acgaaaagatggttgaatctaaatc

SEQ ID NO: 288836 - DNA, 25 bp, Artificial
  probe
  misc_feature (1)..(25): SEQ ID NO: 1270; WAN024CNO; Start 71; Stop 95
aaacgaaaagatggttgaatctaaa

SEQ ID NO: 288837 - DNA, 25 bp, Artificial
  probe
  misc_feature (1)..(25): SEQ ID NO: 1270; WAN024CNO; Start 3; Stop 27
gaattcacttccctttgccctaaaa

SEQ ID NO: 288838 - DNA, 25 bp, Artificial
  probe
  misc_feature (1)..(25): SEQ ID NO: 1270; WAN024CNO; Start 72; Stop 96
aacgaaaagatggttgaatctaaat

SEQ ID NO: 288839 - DNA, 25 bp, Artificial
  probe
  misc_feature (1)..(25): SEQ ID NO: 1270; WAN024CNO; Start 51; Stop 75
gttttcattagttacattccaaacg

SEQ ID NO: 288840 - DNA, 25 bp, Artificial
  probe
  misc_feature (1)..(25): SEQ ID NO: 1270; WAN024CNO; Start 50; Stop 74
tgttttcattagttacattccaaac

SEQ ID NO: 288841 - DNA, 25 bp, Artificial
  probe
  misc_feature (1)..(25): SEQ ID NO: 1270; WAN024CNO; Start 75; Stop 99
gaaaagatggttgaatctaaatcat

SEQ ID NO: 288842 - DNA, 25 bp, Artificial
  probe
  misc_feature (1)..(25): SEQ ID NO: 1270; WAN024CNO; Start 7; Stop 31
tcacttccctttgccctaaaacagg

SEQ ID NO: 288843 - DNA, 25 bp, Artificial
  probe
  misc_feature (1)..(25): SEQ ID NO: 1271; WAN024FIL; Start 170; Stop 194
accaattctgttgtcaattccttag

SEQ ID NO: 288844 - DNA, 25 bp, Artificial
  probe
  misc_feature (1)..(25): SEQ ID NO: 1271; WAN024FIL; Start 172; Stop 196
caattctgttgtcaattccttagcc

SEQ ID NO: 288845 - DNA, 25 bp, Artificial
  probe
  misc_feature (1)..(25): SEQ ID NO: 1271; WAN024FIL; Start 171; Stop 195
ccaattctgttgtcaattccttagc

SEQ ID NO: 288846 - DNA, 25 bp, Artificial
  probe
  misc_feature (1)..(25): SEQ ID NO: 1271; WAN024FIL; Start 169; Stop 193
aaccaattctgttgtcaattcctta

SEQ ID NO: 288847 - DNA, 25 bp, Artificial
  probe
  misc_feature (1)..(25): SEQ ID NO: 1271; WAN024FIL; Start 173; Stop 197
aattctgttgtcaattccttagccg

SEQ ID NO: 288848 - DNA, 25 bp, Artificial
  probe
  misc_feature (1)..(25): SEQ ID NO: 1271; WAN024FIL; Start 69; Stop 93
tacgaccaaatacaatagcgagttc

SEQ ID NO: 288849 - DNA, 25 bp, Artificial
  probe
  misc_feature (1)..(25): SEQ ID NO: 1271; WAN024FIL; Start 185; Stop 209
aattccttagccgcaatcttgacat

SEQ ID NO: 288850 - DNA, 25 bp, Artificial
  probe
  misc_feature (1)..(25): SEQ ID NO: 1271; WAN024FIL; Start 75; Stop 99
caaatacaatagcgagttctggttg

SEQ ID NO: 288851 - DNA, 25 bp, Artificial
  probe
  misc_feature (1)..(25): SEQ ID NO: 1271; WAN024FIL; Start 68; Stop 92
gtacgaccaaatacaatagcgagtt

SEQ ID NO: 288852 - DNA, 25 bp, Artificial
  probe
  misc_feature (1)..(25): SEQ ID NO: 1271; WAN024FIL; Start 71; Stop 95
cgaccaaatacaatagcgagttctg

SEQ ID NO: 288853 - DNA, 25 bp, Artificial
  probe
  misc_feature (1)..(25): SEQ ID NO: 1271; WAN024FIL; Start 180; Stop 204
ttgtcaattccttagccgcaatctt

SEQ ID NO: 288854 - DNA, 25 bp, Artificial
  probe
  misc_feature (1)..(25): SEQ ID NO: 1271; WAN024FIL; Start 31; Stop 55
tttcaaaccacgagtcaattcatcc

SEQ ID NO: 288855 - DNA, 25 bp, Artificial
  probe
  misc_feature (1)..(25): SEQ ID NO: 1271; WAN024FIL; Start 144; Stop 168
ccttaacacggatatagtactggtc

SEQ ID NO: 288856 - DNA, 25 bp, Artificial
  probe
  misc_feature (1)..(25): SEQ ID NO: 1271; WAN024FIL; Start 147; Stop 171
taacacggatatagtactggtcaac

SEQ ID NO: 288857 - DNA, 25 bp, Artificial
  probe
  misc_feature (1)..(25): SEQ ID NO: 1271; WAN024FIL; Start 70; Stop 94
acgaccaaatacaatagcgagttct

SEQ ID NO: 288858 - DNA, 25 bp, Artificial
  probe
  misc_feature (1)..(25): SEQ ID NO: 1271; WAN024FIL; Start 145; Stop 169
cttaacacggatatagtactggtca

SEQ ID NO: 288859 - DNA, 25 bp, Artificial
  probe
  misc_feature (1)..(25): SEQ ID NO: 1271; WAN024FIL; Start 146; Stop 170
ttaacacggatatagtactggtcaa

SEQ ID NO: 288860 - DNA, 25 bp, Artificial
  probe
  misc_feature (1)..(25): SEQ ID NO: 1271; WAN024FIL; Start 174; Stop 198
attctgttgtcaattccttagccgc

SEQ ID NO: 288861 - DNA, 25 bp, Artificial
  probe
  misc_feature (1)..(25): SEQ ID NO: 1271; WAN024FIL; Start 137; Stop 161
tcttgttccttaacacggatatagt

SEQ ID NO: 288862 - DNA, 25 bp, Artificial
  probe
  misc_feature (1)..(25): SEQ ID NO: 1271; WAN024FIL; Start 148; Stop 172
aacacggatatagtactggtcaacc

SEQ ID NO: 288863 - DNA, 25 bp, Artificial
  probe
  misc_feature (1)..(25): SEQ ID NO: 1271; WAN024FIL; Start 74; Stop 98
ccaaatacaatagcgagttctggtt

SEQ ID NO: 288864 - DNA, 25 bp, Artificial
  probe
  misc_feature (1)..(25): SEQ ID NO: 1271; WAN024FIL; Start 186; Stop 210
attccttagccgcaatcttgacatg

SEQ ID NO: 288865 - DNA, 25 bp, Artificial
  probe
  misc_feature (1)..(25): SEQ ID NO: 1271; WAN024FIL; Start 184; Stop 208
caattccttagccgcaatcttgaca

SEQ ID NO: 288866 - DNA, 25 bp, Artificial
  probe
  misc_feature (1)..(25): SEQ ID NO: 1271; WAN024FIL; Start 181; Stop 205
tgtcaattccttagccgcaatcttg

SEQ ID NO: 288867 - DNA, 25 bp, Artificial
  probe
  misc_feature (1)..(25): SEQ ID NO: 1271; WAN024FIL; Start 179; Stop 203
gttgtcaattccttagccgcaatct

SEQ ID NO: 288868 - DNA, 25 bp, Artificial
  probe
  misc_feature (1)..(25): SEQ ID NO: 1271; WAN024FIL; Start 32; Stop 56
ttcaaaccacgagtcaattcatcca

SEQ ID NO: 288869 - DNA, 25 bp, Artificial
  probe
  misc_feature (1)..(25): SEQ ID NO: 1271; WAN024FIL; Start 77; Stop 101
aatacaatagcgagttctggttgtg

SEQ ID NO: 288870 - DNA, 25 bp, Artificial
  probe
  misc_feature (1)..(25): SEQ ID NO: 1271; WAN024FIL; Start 72; Stop 96
gaccaaatacaatagcgagttctgg

SEQ ID NO: 288871 - DNA, 25 bp, Artificial
  probe
  misc_feature (1)..(25): SEQ ID NO: 1271; WAN024FIL; Start 143; Stop 167
tccttaacacggatatagtactggt

SEQ ID NO: 288872 - DNA, 25 bp, Artificial
  probe
  misc_feature (1)..(25): SEQ ID NO: 1271; WAN024FIL; Start 142; Stop 166
ttccttaacacggatatagtactgg

SEQ ID NO: 288873 - DNA, 25 bp, Artificial
  probe
  misc_feature (1)..(25): SEQ ID NO: 1271; WAN024FIL; Start 136; Stop 160
ttcttgttccttaacacggatatag

SEQ ID NO: 288874 - DNA, 25 bp, Artificial
  probe
  misc_feature (1)..(25): SEQ ID NO: 1271; WAN024FIL; Start 178; Stop 202
tgttgtcaattccttagccgcaatc

SEQ ID NO: 288875 - DNA, 25 bp, Artificial
  probe
  misc_feature (1)..(25): SEQ ID NO: 1271; WAN024FIL; Start 177; Stop 201
ctgttgtcaattccttagccgcaat

SEQ ID NO: 288876 - DNA, 25 bp, Artificial
  probe
  misc_feature (1)..(25): SEQ ID NO: 1272; WAN024DBN; Start 160; Stop 184
gatggcaagaaggaagttattcagt

SEQ ID NO: 288877 - DNA, 25 bp, Artificial
  probe
  misc_feature (1)..(25): SEQ ID NO: 1272; WAN024DBN; Start 157; Stop 181
attgatggcaagaaggaagttattc

SEQ ID NO: 288878 - DNA, 25 bp, Artificial
  probe
  misc_feature (1)..(25): SEQ ID NO: 1272; WAN024DBN; Start 165; Stop 189
caagaaggaagttattcagtgttgc

SEQ ID NO: 288879 - DNA, 25 bp, Artificial
  probe
  misc_feature (1)..(25): SEQ ID NO: 1272; WAN024DBN; Start 164; Stop 188
gcaagaaggaagttattcagtgttg

SEQ ID NO: 288880 - DNA, 25 bp, Artificial
  probe
  misc_feature (1)..(25): SEQ ID NO: 1272; WAN024DBN; Start 161; Stop 185
atggcaagaaggaagttattcagtg

SEQ ID NO: 288881 - DNA, 25 bp, Artificial
  probe
  misc_feature (1)..(25): SEQ ID NO: 1272; WAN024DBN; Start 158; Stop 182
ttgatggcaagaaggaagttattca

SEQ ID NO: 288882 - DNA, 25 bp, Artificial
  probe
  misc_feature (1)..(25): SEQ ID NO: 1272; WAN024DBN; Start 156; Stop 180
aattgatggcaagaaggaagttatt

SEQ ID NO: 288883 - DNA, 25 bp, Artificial
  probe
  misc_feature (1)..(25): SEQ ID NO: 1272; WAN024DBN; Start 163; Stop 187
ggcaagaaggaagttattcagtgtt

SEQ ID NO: 288884 - DNA, 25 bp, Artificial
  probe
  misc_feature (1)..(25): SEQ ID NO: 1272; WAN024DBN; Start 159; Stop 183
tgatggcaagaaggaagttattcag

SEQ ID NO: 288885 - DNA, 25 bp, Artificial
  probe
  misc_feature (1)..(25): SEQ ID NO: 1272; WAN024DBN; Start 107; Stop 131
caggagcaactattgaagatgaata

SEQ ID NO: 288886 - DNA, 25 bp, Artificial
  probe
  misc_feature (1)..(25): SEQ ID NO: 1272; WAN024DBN; Start 106; Stop 130
gcaggagcaactattgaagatgaat

SEQ ID NO: 288887 - DNA, 25 bp, Artificial
  probe
  misc_feature (1)..(25): SEQ ID NO: 1272; WAN024DBN; Start 162; Stop 186
tggcaagaaggaagttattcagtgt

SEQ ID NO: 288888 - DNA, 25 bp, Artificial
  probe
  misc_feature (1)..(25): SEQ ID NO: 1272; WAN024DBN; Start 108; Stop 132
aggagcaactattgaagatgaatat

SEQ ID NO: 288889 - DNA, 25 bp, Artificial
  probe
  misc_feature (1)..(25): SEQ ID NO: 1272; WAN024DBN; Start 286; Stop 310
gaatatgacaatacagggagtggaa

SEQ ID NO: 288890 - DNA, 25 bp, Artificial
  probe
  misc_feature (1)..(25): SEQ ID NO: 1272; WAN024DBN; Start 284; Stop 308
aagaatatgacaatacagggagtgg

SEQ ID NO: 288891 - DNA, 25 bp, Artificial
  probe
  misc_feature (1)..(25): SEQ ID NO: 1272; WAN024DBN; Start 287; Stop 311
aatatgacaatacagggagtggaaa

SEQ ID NO: 288892 - DNA, 25 bp, Artificial
  probe
  misc_feature (1)..(25): SEQ ID NO: 1272; WAN024DBN; Start 288; Stop 312
atatgacaatacagggagtggaaat

SEQ ID NO: 288893 - DNA, 25 bp, Artificial
  probe
  misc_feature (1)..(25): SEQ ID NO: 1272; WAN024DBN; Start 282; Stop 306
acaagaatatgacaatacagggagt

SEQ ID NO: 288894 - DNA, 25 bp, Artificial
  probe
  misc_feature (1)..(25): SEQ ID NO: 1272; WAN024DBN; Start 285; Stop 309
agaatatgacaatacagggagtgga

SEQ ID NO: 288895 - DNA, 25 bp, Artificial
  probe
  misc_feature (1)..(25): SEQ ID NO: 1272; WAN024DBN; Start 283; Stop 307
caagaatatgacaatacagggagtg

SEQ ID NO: 288896 - DNA, 25 bp, Artificial
  probe
  misc_feature (1)..(25): SEQ ID NO: 1272; WAN024DBN; Start 280; Stop 304
agacaagaatatgacaatacaggga

SEQ ID NO: 288897 - DNA, 25 bp, Artificial
  probe
  misc_feature (1)..(25): SEQ ID NO: 1272; WAN024DBN; Start 289; Stop 313
tatgacaatacagggagtggaaatt

SEQ ID NO: 288898 - DNA, 25 bp, Artificial
  probe
  misc_feature (1)..(25): SEQ ID NO: 1272; WAN024DBN; Start 167; Stop 191
agaaggaagttattcagtgttgcat

SEQ ID NO: 288899 - DNA, 25 bp, Artificial
  probe
  misc_feature (1)..(25): SEQ ID NO: 1272; WAN024DBN; Start 168; Stop 192
gaaggaagttattcagtgttgcatg

SEQ ID NO: 288900 - DNA, 25 bp, Artificial
  probe
  misc_feature (1)..(25): SEQ ID NO: 1272; WAN024DBN; Start 281; Stop 305
gacaagaatatgacaatacagggag

SEQ ID NO: 288901 - DNA, 25 bp, Artificial
  probe
  misc_feature (1)..(25): SEQ ID NO: 1272; WAN024DBN; Start 166; Stop 190
aagaaggaagttattcagtgttgca

SEQ ID NO: 288902 - DNA, 25 bp, Artificial
  probe
  misc_feature (1)..(25): SEQ ID NO: 1272; WAN024DBN; Start 246; Stop 270
taatccgcttgtaggtgattctcat

SEQ ID NO: 288903 - DNA, 25 bp, Artificial
  probe
  misc_feature (1)..(25): SEQ ID NO: 1272; WAN024DBN; Start 245; Stop 269
ttaatccgcttgtaggtgattctca

SEQ ID NO: 288904 - DNA, 25 bp, Artificial
  probe
  misc_feature (1)..(25): SEQ ID NO: 1272; WAN024DBN; Start 155; Stop 179
aaattgatggcaagaaggaagttat

SEQ ID NO: 288905 - DNA, 25 bp, Artificial
  probe
  misc_feature (1)..(25): SEQ ID NO: 1272; WAN024DBN; Start 169; Stop 193
aaggaagttattcagtgttgcatgg

SEQ ID NO: 288906 - DNA, 25 bp, Artificial
  probe
  misc_feature (1)..(25): SEQ ID NO: 1272; WAN024DBN; Start 9; Stop 33
tagaggacatgaaacaagacaaaga

SEQ ID NO: 288907 - DNA, 25 bp, Artificial
  probe
  misc_feature (1)..(25): SEQ ID NO: 1272; WAN024DBN; Start 8; Stop 32
gtagaggacatgaaacaagacaaag

SEQ ID NO: 288908 - DNA, 25 bp, Artificial
  probe
  misc_feature (1)..(25): SEQ ID NO: 1272; WAN024DBN; Start 11; Stop 35
gaggacatgaaacaagacaaagaat

SEQ ID NO: 288909 - DNA, 25 bp, Artificial
  probe
  misc_feature (1)..(25): SEQ ID NO: 1273; WAN024D87; Start 513; Stop 537
taactgactatattcgtgcgattga

SEQ ID NO: 288910 - DNA, 25 bp, Artificial
  probe
  misc_feature (1)..(25): SEQ ID NO: 1273; WAN024D87; Start 173; Stop 197
ttaatatctatgtggtgcgtcaagc

SEQ ID NO: 288911 - DNA, 25 bp, Artificial
  probe
  misc_feature (1)..(25): SEQ ID NO: 1273; WAN024D87; Start 518; Stop 542
gactatattcgtgcgattgataacc

SEQ ID NO: 288912 - DNA, 25 bp, Artificial
  probe
  misc_feature (1)..(25): SEQ ID NO: 1273; WAN024D87; Start 515; Stop 539
actgactatattcgtgcgattgata

SEQ ID NO: 288913 - DNA, 25 bp, Artificial
  probe
  misc_feature (1)..(25): SEQ ID NO: 1273; WAN024D87; Start 514; Stop 538
aactgactatattcgtgcgattgat

SEQ ID NO: 288914 - DNA, 25 bp, Artificial
  probe
  misc_feature (1)..(25): SEQ ID NO: 1273; WAN024D87; Start 512; Stop 536
ttaactgactatattcgtgcgattg

SEQ ID NO: 288915 - DNA, 25 bp, Artificial
  probe
  misc_feature (1)..(25): SEQ ID NO: 1273; WAN024D87; Start 517; Stop 541
tgactatattcgtgcgattgataac

SEQ ID NO: 288916 - DNA, 25 bp, Artificial
  probe
  misc_feature (1)..(25): SEQ ID NO: 1273; WAN024D87; Start 585; Stop 609
ctggtcttattgaagtaattggtga

SEQ ID NO: 288917 - DNA, 25 bp, Artificial
  probe
  misc_feature (1)..(25): SEQ ID NO: 1273; WAN024D87; Start 516; Stop 540
ctgactatattcgtgcgattgataa

SEQ ID NO: 288918 - DNA, 25 bp, Artificial
  probe
  misc_feature (1)..(25): SEQ ID NO: 1273; WAN024D87; Start 584; Stop 608
actggtcttattgaagtaattggtg

SEQ ID NO: 288919 - DNA, 25 bp, Artificial
  probe
  misc_feature (1)..(25): SEQ ID NO: 1273; WAN024D87; Start 586; Stop 610
tggtcttattgaagtaattggtgaa

SEQ ID NO: 288920 - DNA, 25 bp, Artificial
  probe
  misc_feature (1)..(25): SEQ ID NO: 1273; WAN024D87; Start 583; Stop 607
aactggtcttattgaagtaattggt

SEQ ID NO: 288921 - DNA, 25 bp, Artificial
  probe
  misc_feature (1)..(25): SEQ ID NO: 1273; WAN024D87; Start 172; Stop 196
attaatatctatgtggtgcgtcaag

SEQ ID NO: 288922 - DNA, 25 bp, Artificial
  probe
  misc_feature (1)..(25): SEQ ID NO: 1273; WAN024D87; Start 582; Stop 606
caactggtcttattgaagtaattgg

SEQ ID NO: 288923 - DNA, 25 bp, Artificial
  probe
  misc_feature (1)..(25): SEQ ID NO: 1273; WAN024D87; Start 532; Stop 556
gattgataacccatttgctgtagtc

SEQ ID NO: 288924 - DNA, 25 bp, Artificial
  probe
  misc_feature (1)..(25): SEQ ID NO: 1273; WAN024D87; Start 414; Stop 438
gtattatggtaaccgccagtcatac

SEQ ID NO: 288925 - DNA, 25 bp, Artificial
  probe
  misc_feature (1)..(25): SEQ ID NO: 1273; WAN024D87; Start 499; Stop 523
tgatgctgatgctttaactgactat

SEQ ID NO: 288926 - DNA, 25 bp, Artificial
  probe
  misc_feature (1)..(25): SEQ ID NO: 1273; WAN024D87; Start 507; Stop 531
atgctttaactgactatattcgtgc

SEQ ID NO: 288927 - DNA, 25 bp, Artificial
  probe
  misc_feature (1)..(25): SEQ ID NO: 1273; WAN024D87; Start 876; Stop 900
gtcaagtcgatgctgatgtattagt

SEQ ID NO: 288928 - DNA, 25 bp, Artificial
  probe
  misc_feature (1)..(25): SEQ ID NO: 1273; WAN024D87; Start 877; Stop 901
tcaagtcgatgctgatgtattagtg

SEQ ID NO: 288929 - DNA, 25 bp, Artificial
  probe
  misc_feature (1)..(25): SEQ ID NO: 1273; WAN024D87; Start 878; Stop 902
caagtcgatgctgatgtattagtgg

SEQ ID NO: 288930 - DNA, 25 bp, Artificial
  probe
  misc_feature (1)..(25): SEQ ID NO: 1273; WAN024D87; Start 533; Stop 557
attgataacccatttgctgtagtcc

SEQ ID NO: 288931 - DNA, 25 bp, Artificial
  probe
  misc_feature (1)..(25): SEQ ID NO: 1273; WAN024D87; Start 498; Stop 522
ctgatgctgatgctttaactgacta

SEQ ID NO: 288932 - DNA, 25 bp, Artificial
  probe
  misc_feature (1)..(25): SEQ ID NO: 1273; WAN024D87; Start 459; Stop 483
ataaagtttacggttctgatggtgg

SEQ ID NO: 288933 - DNA, 25 bp, Artificial
  probe
  misc_feature (1)..(25): SEQ ID NO: 1273; WAN024D87; Start 1068; Stop 1092
tagtatcaactgaattagtcaccaa

SEQ ID NO: 288934 - DNA, 25 bp, Artificial
  probe
  misc_feature (1)..(25): SEQ ID NO: 1273; WAN024D87; Start 458; Stop 482
tataaagtttacggttctgatggtg

SEQ ID NO: 288935 - DNA, 25 bp, Artificial
  probe
  misc_feature (1)..(25): SEQ ID NO: 1273; WAN024D87; Start 500; Stop 524
gatgctgatgctttaactgactata

SEQ ID NO: 288936 - DNA, 25 bp, Artificial
  probe
  misc_feature (1)..(25): SEQ ID NO: 1273; WAN024D87; Start 531; Stop 555
cgattgataacccatttgctgtagt

SEQ ID NO: 288937 - DNA, 25 bp, Artificial
  probe
  misc_feature (1)..(25): SEQ ID NO: 1273; WAN024D87; Start 521; Stop 545
tatattcgtgcgattgataacccat

SEQ ID NO: 288938 - DNA, 25 bp, Artificial
  probe
  misc_feature (1)..(25): SEQ ID NO: 1273; WAN024D87; Start 695; Stop 719
attgtctacacacctcttcatggta

SEQ ID NO: 288939 - DNA, 25 bp, Artificial
  probe
  misc_feature (1)..(25): SEQ ID NO: 1273; WAN024D87; Start 1067; Stop 1091
atagtatcaactgaattagtcacca

SEQ ID NO: 288940 - DNA, 25 bp, Artificial
  probe
  misc_feature (1)..(25): SEQ ID NO: 1273; WAN024D87; Start 536; Stop 560
gataacccatttgctgtagtccttg

SEQ ID NO: 288941 - DNA, 25 bp, Artificial
  probe
  misc_feature (1)..(25): SEQ ID NO: 1273; WAN024D87; Start 593; Stop 617
attgaagtaattggtgaaactctcg

SEQ ID NO: 288942 - DNA, 25 bp, Artificial
  probe
  misc_feature (1)..(25): SEQ ID NO: 1274; WAN024CJF; Start 24; Stop 48
taatgtaagtgttcgttatgatgac

SEQ ID NO: 288943 - DNA, 25 bp, Artificial
  probe
  misc_feature (1)..(25): SEQ ID NO: 1274; WAN024CJF; Start 810; Stop 834
cttagatgttatcaatgaggtagga

SEQ ID NO: 288944 - DNA, 25 bp, Artificial
  probe
  misc_feature (1)..(25): SEQ ID NO: 1274; WAN024CJF; Start 809; Stop 833
tcttagatgttatcaatgaggtagg

SEQ ID NO: 288945 - DNA, 25 bp, Artificial
  probe
  misc_feature (1)..(25): SEQ ID NO: 1274; WAN024CJF; Start 86; Stop 110
agggagatttcattggcttattagg

SEQ ID NO: 288946 - DNA, 25 bp, Artificial
  probe
  misc_feature (1)..(25): SEQ ID NO: 1274; WAN024CJF; Start 646; Stop 670
ggtgatatgcgtgactttgtagata

SEQ ID NO: 288947 - DNA, 25 bp, Artificial
  probe
  misc_feature (1)..(25): SEQ ID NO: 1274; WAN024CJF; Start 87; Stop 111
gggagatttcattggcttattaggt

SEQ ID NO: 288948 - DNA, 25 bp, Artificial
  probe
  misc_feature (1)..(25): SEQ ID NO: 1274; WAN024CJF; Start 388; Stop 412
aatttggtagaaacattgtcaggtg

SEQ ID NO: 288949 - DNA, 25 bp, Artificial
  probe
  misc_feature (1)..(25): SEQ ID NO: 1274; WAN024CJF; Start 88; Stop 112
ggagatttcattggcttattaggtt

SEQ ID NO: 288950 - DNA, 25 bp, Artificial
  probe
  misc_feature (1)..(25): SEQ ID NO: 1274; WAN024CJF; Start 647; Stop 671
gtgatatgcgtgactttgtagataa

SEQ ID NO: 288951 - DNA, 25 bp, Artificial
  probe
  misc_feature (1)..(25): SEQ ID NO: 1274; WAN024CJF; Start 347; Stop 371
aaatagccttagaaattgttgggtt

SEQ ID NO: 288952 - DNA, 25 bp, Artificial
  probe
  misc_feature (1)..(25): SEQ ID NO: 1274; WAN024CJF; Start 350; Stop 374
tagccttagaaattgttgggttagc

SEQ ID NO: 288953 - DNA, 25 bp, Artificial
  probe
  misc_feature (1)..(25): SEQ ID NO: 1274; WAN024CJF; Start 335; Stop 359
agaagttgtgtcaaatagccttaga

SEQ ID NO: 288954 - DNA, 25 bp, Artificial
  probe
  misc_feature (1)..(25): SEQ ID NO: 1274; WAN024CJF; Start 97; Stop 121
attggcttattaggttcaaatggtg

SEQ ID NO: 288955 - DNA, 25 bp, Artificial
  probe
  misc_feature (1)..(25): SEQ ID NO: 1274; WAN024CJF; Start 334; Stop 358
gagaagttgtgtcaaatagccttag

SEQ ID NO: 288956 - DNA, 25 bp, Artificial
  probe
  misc_feature (1)..(25): SEQ ID NO: 1274; WAN024CJF; Start 811; Stop 835
ttagatgttatcaatgaggtaggaa

SEQ ID NO: 288957 - DNA, 25 bp, Artificial
  probe
  misc_feature (1)..(25): SEQ ID NO: 1274; WAN024CJF; Start 271; Stop 295
actactgtgaaggacaatgtaatat

SEQ ID NO: 288958 - DNA, 25 bp, Artificial
  probe
  misc_feature (1)..(25): SEQ ID NO: 1274; WAN024CJF; Start 269; Stop 293
atactactgtgaaggacaatgtaat

SEQ ID NO: 288959 - DNA, 25 bp, Artificial
  probe
  misc_feature (1)..(25): SEQ ID NO: 1274; WAN024CJF; Start 349; Stop 373
atagccttagaaattgttgggttag

SEQ ID NO: 288960 - DNA, 25 bp, Artificial
  probe
  misc_feature (1)..(25): SEQ ID NO: 1274; WAN024CJF; Start 346; Stop 370
caaatagccttagaaattgttgggt

SEQ ID NO: 288961 - DNA, 25 bp, Artificial
  probe
  misc_feature (1)..(25): SEQ ID NO: 1274; WAN024CJF; Start 336; Stop 360
gaagttgtgtcaaatagccttagaa

SEQ ID NO: 288962 - DNA, 25 bp, Artificial
  probe
  misc_feature (1)..(25): SEQ ID NO: 1274; WAN024CJF; Start 333; Stop 357
tgagaagttgtgtcaaatagcctta

SEQ ID NO: 288963 - DNA, 25 bp, Artificial
  probe
  misc_feature (1)..(25): SEQ ID NO: 1274; WAN024CJF; Start 90; Stop 114
agatttcattggcttattaggttca

SEQ ID NO: 288964 - DNA, 25 bp, Artificial
  probe
  misc_feature (1)..(25): SEQ ID NO: 1274; WAN024CJF; Start 345; Stop 369
tcaaatagccttagaaattgttggg

SEQ ID NO: 288965 - DNA, 25 bp, Artificial
  probe
  misc_feature (1)..(25): SEQ ID NO: 1274; WAN024CJF; Start 328; Stop 352
aatgctgagaagttgtgtcaaatag

SEQ ID NO: 288966 - DNA, 25 bp, Artificial
  probe
  misc_feature (1)..(25): SEQ ID NO: 1274; WAN024CJF; Start 85; Stop 109
aagggagatttcattggcttattag

SEQ ID NO: 288967 - DNA, 25 bp, Artificial
  probe
  misc_feature (1)..(25): SEQ ID NO: 1274; WAN024CJF; Start 653; Stop 677
tgcgtgactttgtagataattcaac

SEQ ID NO: 288968 - DNA, 25 bp, Artificial
  probe
  misc_feature (1)..(25): SEQ ID NO: 1274; WAN024CJF; Start 654; Stop 678
gcgtgactttgtagataattcaact

SEQ ID NO: 288969 - DNA, 25 bp, Artificial
  probe
  misc_feature (1)..(25): SEQ ID NO: 1274; WAN024CJF; Start 327; Stop 351
aaatgctgagaagttgtgtcaaata

SEQ ID NO: 288970 - DNA, 25 bp, Artificial
  probe
  misc_feature (1)..(25): SEQ ID NO: 1274; WAN024CJF; Start 643; Stop 667
tttggtgatatgcgtgactttgtag

SEQ ID NO: 288971 - DNA, 25 bp, Artificial
  probe
  misc_feature (1)..(25): SEQ ID NO: 1274; WAN024CJF; Start 389; Stop 413
atttggtagaaacattgtcaggtgg

SEQ ID NO: 288972 - DNA, 25 bp, Artificial
  probe
  misc_feature (1)..(25): SEQ ID NO: 1274; WAN024CJF; Start 387; Stop 411
taatttggtagaaacattgtcaggt

SEQ ID NO: 288973 - DNA, 25 bp, Artificial
  probe
  misc_feature (1)..(25): SEQ ID NO: 1274; WAN024CJF; Start 337; Stop 361
aagttgtgtcaaatagccttagaaa

SEQ ID NO: 288974 - DNA, 25 bp, Artificial
  probe
  misc_feature (1)..(25): SEQ ID NO: 1274; WAN024CJF; Start 652; Stop 676
atgcgtgactttgtagataattcaa

SEQ ID NO: 288975 - DNA, 25 bp, Artificial
  probe
  misc_feature (1)..(25): SEQ ID NO: 1275; WAN024CZN; Start 120; Stop 144
gccagagtattacgatgctatcatt

SEQ ID NO: 288976 - DNA, 25 bp, Artificial
  probe
  misc_feature (1)..(25): SEQ ID NO: 1275; WAN024CZN; Start 121; Stop 145
ccagagtattacgatgctatcattg

SEQ ID NO: 288977 - DNA, 25 bp, Artificial
  probe
  misc_feature (1)..(25): SEQ ID NO: 1275; WAN024CZN; Start 415; Stop 439
gaagatgtcttggctatgattgaag

SEQ ID NO: 288978 - DNA, 25 bp, Artificial
  probe
  misc_feature (1)..(25): SEQ ID NO: 1275; WAN024CZN; Start 414; Stop 438
agaagatgtcttggctatgattgaa

SEQ ID NO: 288979 - DNA, 25 bp, Artificial
  probe
  misc_feature (1)..(25): SEQ ID NO: 1275; WAN024CZN; Start 119; Stop 143
tgccagagtattacgatgctatcat

SEQ ID NO: 288980 - DNA, 25 bp, Artificial
  probe
  misc_feature (1)..(25): SEQ ID NO: 1275; WAN024CZN; Start 118; Stop 142
ttgccagagtattacgatgctatca

SEQ ID NO: 288981 - DNA, 25 bp, Artificial
  probe
  misc_feature (1)..(25): SEQ ID NO: 1275; WAN024CZN; Start 122; Stop 146
cagagtattacgatgctatcattga

SEQ ID NO: 288982 - DNA, 25 bp, Artificial
  probe
  misc_feature (1)..(25): SEQ ID NO: 1275; WAN024CZN; Start 168; Stop 192
ttactatatcttgatgccaggtatg

SEQ ID NO: 288983 - DNA, 25 bp, Artificial
  probe
  misc_feature (1)..(25): SEQ ID NO: 1275; WAN024CZN; Start 166; Stop 190
ccttactatatcttgatgccaggta

SEQ ID NO: 288984 - DNA, 25 bp, Artificial
  probe
  misc_feature (1)..(25): SEQ ID NO: 1275; WAN024CZN; Start 167; Stop 191
cttactatatcttgatgccaggtat

SEQ ID NO: 288985 - DNA, 25 bp, Artificial
  probe
  misc_feature (1)..(25): SEQ ID NO: 1275; WAN024CZN; Start 123; Stop 147
agagtattacgatgctatcattgaa

SEQ ID NO: 288986 - DNA, 25 bp, Artificial
  probe
  misc_feature (1)..(25): SEQ ID NO: 1275; WAN024CZN; Start 425; Stop 449
tggctatgattgaagaatctaagga

SEQ ID NO: 288987 - DNA, 25 bp, Artificial
  probe
  misc_feature (1)..(25): SEQ ID NO: 1275; WAN024CZN; Start 169; Stop 193
tactatatcttgatgccaggtatgg

SEQ ID NO: 288988 - DNA, 25 bp, Artificial
  probe
  misc_feature (1)..(25): SEQ ID NO: 1275; WAN024CZN; Start 134; Stop 158
atgctatcattgaatcgactgaaga

SEQ ID NO: 288989 - DNA, 25 bp, Artificial
  probe
  misc_feature (1)..(25): SEQ ID NO: 1275; WAN024CZN; Start 133; Stop 157
gatgctatcattgaatcgactgaag

SEQ ID NO: 288990 - DNA, 25 bp, Artificial
  probe
  misc_feature (1)..(25): SEQ ID NO: 1275; WAN024CZN; Start 140; Stop 164
tcattgaatcgactgaagagtatgg

SEQ ID NO: 288991 - DNA, 25 bp, Artificial
  probe
  misc_feature (1)..(25): SEQ ID NO: 1275; WAN024CZN; Start 136; Stop 160
gctatcattgaatcgactgaagagt

SEQ ID NO: 288992 - DNA, 25 bp, Artificial
  probe
  misc_feature (1)..(25): SEQ ID NO: 1275; WAN024CZN; Start 135; Stop 159
tgctatcattgaatcgactgaagag

SEQ ID NO: 288993 - DNA, 25 bp, Artificial
  probe
  misc_feature (1)..(25): SEQ ID NO: 1275; WAN024CZN; Start 165; Stop 189
gccttactatatcttgatgccaggt

SEQ ID NO: 288994 - DNA, 25 bp, Artificial
  probe
  misc_feature (1)..(25): SEQ ID NO: 1275; WAN024CZN; Start 424; Stop 448
ttggctatgattgaagaatctaagg

SEQ ID NO: 288995 - DNA, 25 bp, Artificial
  probe
  misc_feature (1)..(25): SEQ ID NO: 1275; WAN024CZN; Start 117; Stop 141
tttgccagagtattacgatgctatc

SEQ ID NO: 288996 - DNA, 25 bp, Artificial
  probe
  misc_feature (1)..(25): SEQ ID NO: 1275; WAN024CZN; Start 69; Stop 93
agaagcagtcaaggtagcagtagat

SEQ ID NO: 288997 - DNA, 25 bp, Artificial
  probe
  misc_feature (1)..(25): SEQ ID NO: 1275; WAN024CZN; Start 139; Stop 163
atcattgaatcgactgaagagtatg

SEQ ID NO: 288998 - DNA, 25 bp, Artificial
  probe
  misc_feature (1)..(25): SEQ ID NO: 1275; WAN024CZN; Start 68; Stop 92
aagaagcagtcaaggtagcagtaga

SEQ ID NO: 288999 - DNA, 25 bp, Artificial
  probe
  misc_feature (1)..(25): SEQ ID NO: 1275; WAN024CZN; Start 70; Stop 94
gaagcagtcaaggtagcagtagatc

SEQ ID NO: 289000 - DNA, 25 bp, Artificial
  probe
  misc_feature (1)..(25): SEQ ID NO: 1275; WAN024CZN; Start 426; Stop 450
ggctatgattgaagaatctaaggat

SEQ ID NO: 289001 - DNA, 25 bp, Artificial
  probe
  misc_feature (1)..(25): SEQ ID NO: 1275; WAN024CZN; Start 420; Stop 444
tgtcttggctatgattgaagaatct

SEQ ID NO: 289002 - DNA, 25 bp, Artificial
  probe
  misc_feature (1)..(25): SEQ ID NO: 1275; WAN024CZN; Start 417; Stop 441
agatgtcttggctatgattgaagaa

SEQ ID NO: 289003 - DNA, 25 bp, Artificial
  probe
  misc_feature (1)..(25): SEQ ID NO: 1275; WAN024CZN; Start 416; Stop 440
aagatgtcttggctatgattgaaga

SEQ ID NO: 289004 - DNA, 25 bp, Artificial
  probe
  misc_feature (1)..(25): SEQ ID NO: 1275; WAN024CZN; Start 413; Stop 437
aagaagatgtcttggctatgattga

SEQ ID NO: 289005 - DNA, 25 bp, Artificial
  probe
  misc_feature (1)..(25): SEQ ID NO: 1275; WAN024CZN; Start 125; Stop 149
agtattacgatgctatcattgaatc

SEQ ID NO: 289006 - DNA, 25 bp, Artificial
  probe
  misc_feature (1)..(25): SEQ ID NO: 1275; WAN024CZN; Start 124; Stop 148
gagtattacgatgctatcattgaat

SEQ ID NO: 289007 - DNA, 25 bp, Artificial
  probe
  misc_feature (1)..(25): SEQ ID NO: 1275; WAN024CZN; Start 419; Stop 443
atgtcttggctatgattgaagaatc

SEQ ID NO: 289008 - DNA, 25 bp, Artificial
  probe
  misc_feature (1)..(25): SEQ ID NO: 1276; WAN024DIR; Start 256; Stop 280
aatcttgtagagagtccacttgttg

SEQ ID NO: 289009 - DNA, 25 bp, Artificial
  probe
  misc_feature (1)..(25): SEQ ID NO: 1276; WAN024DIR; Start 318; Stop 342
cttcgttacagttggtgatagtgtc

SEQ ID NO: 289010 - DNA, 25 bp, Artificial
  probe
  misc_feature (1)..(25): SEQ ID NO: 1276; WAN024DIR; Start 320; Stop 344
tcgttacagttggtgatagtgtcaa

SEQ ID NO: 289011 - DNA, 25 bp, Artificial
  probe
  misc_feature (1)..(25): SEQ ID NO: 1276; WAN024DIR; Start 319; Stop 343
ttcgttacagttggtgatagtgtca

SEQ ID NO: 289012 - DNA, 25 bp, Artificial
  probe
  misc_feature (1)..(25): SEQ ID NO: 1276; WAN024DIR; Start 447; Stop 471
aatggttgagtttggtaaaggattg

SEQ ID NO: 289013 - DNA, 25 bp, Artificial
  probe
  misc_feature (1)..(25): SEQ ID NO: 1276; WAN024DIR; Start 443; Stop 467
aagaaatggttgagtttggtaaagg

SEQ ID NO: 289014 - DNA, 25 bp, Artificial
  probe
  misc_feature (1)..(25): SEQ ID NO: 1276; WAN024DIR; Start 445; Stop 469
gaaatggttgagtttggtaaaggat

SEQ ID NO: 289015 - DNA, 25 bp, Artificial
  probe
  misc_feature (1)..(25): SEQ ID NO: 1276; WAN024DIR; Start 441; Stop 465
cgaagaaatggttgagtttggtaaa

SEQ ID NO: 289016 - DNA, 25 bp, Artificial
  probe
  misc_feature (1)..(25): SEQ ID NO: 1276; WAN024DIR; Start 444; Stop 468
agaaatggttgagtttggtaaagga

SEQ ID NO: 289017 - DNA, 25 bp, Artificial
  probe
  misc_feature (1)..(25): SEQ ID NO: 1276; WAN024DIR; Start 446; Stop 470
aaatggttgagtttggtaaaggatt

SEQ ID NO: 289018 - DNA, 25 bp, Artificial
  probe
  misc_feature (1)..(25): SEQ ID NO: 1276; WAN024DIR; Start 450; Stop 474
ggttgagtttggtaaaggattggta

SEQ ID NO: 289019 - DNA, 25 bp, Artificial
  probe
  misc_feature (1)..(25): SEQ ID NO: 1276; WAN024DIR; Start 440; Stop 464
acgaagaaatggttgagtttggtaa

SEQ ID NO: 289020 - DNA, 25 bp, Artificial
  probe
  misc_feature (1)..(25): SEQ ID NO: 1276; WAN024DIR; Start 436; Stop 460
tctaacgaagaaatggttgagtttg

SEQ ID NO: 289021 - DNA, 25 bp, Artificial
  probe
  misc_feature (1)..(25): SEQ ID NO: 1276; WAN024DIR; Start 442; Stop 466
gaagaaatggttgagtttggtaaag

SEQ ID NO: 289022 - DNA, 25 bp, Artificial
  probe
  misc_feature (1)..(25): SEQ ID NO: 1276; WAN024DIR; Start 255; Stop 279
aaatcttgtagagagtccacttgtt

SEQ ID NO: 289023 - DNA, 25 bp, Artificial
  probe
  misc_feature (1)..(25): SEQ ID NO: 1276; WAN024DIR; Start 254; Stop 278
gaaatcttgtagagagtccacttgt

SEQ ID NO: 289024 - DNA, 25 bp, Artificial
  probe
  misc_feature (1)..(25): SEQ ID NO: 1276; WAN024DIR; Start 437; Stop 461
ctaacgaagaaatggttgagtttgg

SEQ ID NO: 289025 - DNA, 25 bp, Artificial
  probe
  misc_feature (1)..(25): SEQ ID NO: 1276; WAN024DIR; Start 317; Stop 341
ccttcgttacagttggtgatagtgt

SEQ ID NO: 289026 - DNA, 25 bp, Artificial
  probe
  misc_feature (1)..(25): SEQ ID NO: 1276; WAN024DIR; Start 448; Stop 472
atggttgagtttggtaaaggattgg

SEQ ID NO: 289027 - DNA, 25 bp, Artificial
  probe
  misc_feature (1)..(25): SEQ ID NO: 1276; WAN024DIR; Start 439; Stop 463
aacgaagaaatggttgagtttggta

SEQ ID NO: 289028 - DNA, 25 bp, Artificial
  probe
  misc_feature (1)..(25): SEQ ID NO: 1276; WAN024DIR; Start 438; Stop 462
taacgaagaaatggttgagtttggt

SEQ ID NO: 289029 - DNA, 25 bp, Artificial
  probe
  misc_feature (1)..(25): SEQ ID NO: 1276; WAN024DIR; Start 451; Stop 475
gttgagtttggtaaaggattggtac

SEQ ID NO: 289030 - DNA, 25 bp, Artificial
  probe
  misc_feature (1)..(25): SEQ ID NO: 1276; WAN024DIR; Start 257; Stop 281
atcttgtagagagtccacttgttgg

SEQ ID NO: 289031 - DNA, 25 bp, Artificial
  probe
  misc_feature (1)..(25): SEQ ID NO: 1276; WAN024DIR; Start 434; Stop 458
tctctaacgaagaaatggttgagtt

SEQ ID NO: 289032 - DNA, 25 bp, Artificial
  probe
  misc_feature (1)..(25): SEQ ID NO: 1276; WAN024DIR; Start 435; Stop 459
ctctaacgaagaaatggttgagttt

SEQ ID NO: 289033 - DNA, 25 bp, Artificial
  probe
  misc_feature (1)..(25): SEQ ID NO: 1276; WAN024DIR; Start 199; Stop 223
gagactgtagcagaagaagttccag

SEQ ID NO: 289034 - DNA, 25 bp, Artificial
  probe
  misc_feature (1)..(25): SEQ ID NO: 1276; WAN024DIR; Start 197; Stop 221
cagagactgtagcagaagaagttcc

SEQ ID NO: 289035 - DNA, 25 bp, Artificial
  probe
  misc_feature (1)..(25): SEQ ID NO: 1276; WAN024DIR; Start 433; Stop 457
gtctctaacgaagaaatggttgagt

SEQ ID NO: 289036 - DNA, 25 bp, Artificial
  probe
  misc_feature (1)..(25): SEQ ID NO: 1276; WAN024DIR; Start 354; Stop 378
aacattggtaattatcgaagccatg

SEQ ID NO: 289037 - DNA, 25 bp, Artificial
  probe
  misc_feature (1)..(25): SEQ ID NO: 1276; WAN024DIR; Start 356; Stop 380
cattggtaattatcgaagccatgaa

SEQ ID NO: 289038 - DNA, 25 bp, Artificial
  probe
  misc_feature (1)..(25): SEQ ID NO: 1276; WAN024DIR; Start 452; Stop 476
ttgagtttggtaaaggattggtacg

SEQ ID NO: 289039 - DNA, 25 bp, Artificial
  probe
  misc_feature (1)..(25): SEQ ID NO: 1276; WAN024DIR; Start 355; Stop 379
acattggtaattatcgaagccatga

SEQ ID NO: 289040 - DNA, 25 bp, Artificial
  probe
  misc_feature (1)..(25): SEQ ID NO: 1276; WAN024DIR; Start 198; Stop 222
agagactgtagcagaagaagttcca

SEQ ID NO: 289041 - DNA, 25 bp, Artificial
  probe
  misc_feature (1)..(25): SEQ ID NO: 1277; WAN024DFP; Start 113; Stop 137
ttacgattggtagtcactgccttat

SEQ ID NO: 289042 - DNA, 25 bp, Artificial
  probe
  misc_feature (1)..(25): SEQ ID NO: 1277; WAN024DFP; Start 117; Stop 141
gattggtagtcactgccttatgttg

SEQ ID NO: 289043 - DNA, 25 bp, Artificial
  probe
  misc_feature (1)..(25): SEQ ID NO: 1277; WAN024DFP; Start 118; Stop 142
attggtagtcactgccttatgttgt

SEQ ID NO: 289044 - DNA, 25 bp, Artificial
  probe
  misc_feature (1)..(25): SEQ ID NO: 1277; WAN024DFP; Start 114; Stop 138
tacgattggtagtcactgccttatg

SEQ ID NO: 289045 - DNA, 25 bp, Artificial
  probe
  misc_feature (1)..(25): SEQ ID NO: 1277; WAN024DFP; Start 119; Stop 143
ttggtagtcactgccttatgttgtc

SEQ ID NO: 289046 - DNA, 25 bp, Artificial
  probe
  misc_feature (1)..(25): SEQ ID NO: 1277; WAN024DFP; Start 190; Stop 214
attcatatcgaggttgaggatgtag

SEQ ID NO: 289047 - DNA, 25 bp, Artificial
  probe
  misc_feature (1)..(25): SEQ ID NO: 1277; WAN024DFP; Start 116; Stop 140
cgattggtagtcactgccttatgtt

SEQ ID NO: 289048 - DNA, 25 bp, Artificial
  probe
  misc_feature (1)..(25): SEQ ID NO: 1277; WAN024DFP; Start 191; Stop 215
ttcatatcgaggttgaggatgtaga

SEQ ID NO: 289049 - DNA, 25 bp, Artificial
  probe
  misc_feature (1)..(25): SEQ ID NO: 1277; WAN024DFP; Start 188; Stop 212
ttattcatatcgaggttgaggatgt

SEQ ID NO: 289050 - DNA, 25 bp, Artificial
  probe
  misc_feature (1)..(25): SEQ ID NO: 1277; WAN024DFP; Start 185; Stop 209
tcattattcatatcgaggttgagga

SEQ ID NO: 289051 - DNA, 25 bp, Artificial
  probe
  misc_feature (1)..(25): SEQ ID NO: 1277; WAN024DFP; Start 192; Stop 216
tcatatcgaggttgaggatgtagac

SEQ ID NO: 289052 - DNA, 25 bp, Artificial
  probe
  misc_feature (1)..(25): SEQ ID NO: 1277; WAN024DFP; Start 103; Stop 127
tttgctcagtttacgattggtagtc

SEQ ID NO: 289053 - DNA, 25 bp, Artificial
  probe
  misc_feature (1)..(25): SEQ ID NO: 1277; WAN024DFP; Start 189; Stop 213
tattcatatcgaggttgaggatgta

SEQ ID NO: 289054 - DNA, 25 bp, Artificial
  probe
  misc_feature (1)..(25): SEQ ID NO: 1277; WAN024DFP; Start 123; Stop 147
tagtcactgccttatgttgtcacaa

SEQ ID NO: 289055 - DNA, 25 bp, Artificial
  probe
  misc_feature (1)..(25): SEQ ID NO: 1277; WAN024DFP; Start 122; Stop 146
gtagtcactgccttatgttgtcaca

SEQ ID NO: 289056 - DNA, 25 bp, Artificial
  probe
  misc_feature (1)..(25): SEQ ID NO: 1277; WAN024DFP; Start 187; Stop 211
attattcatatcgaggttgaggatg

SEQ ID NO: 289057 - DNA, 25 bp, Artificial
  probe
  misc_feature (1)..(25): SEQ ID NO: 1277; WAN024DFP; Start 186; Stop 210
cattattcatatcgaggttgaggat

SEQ ID NO: 289058 - DNA, 25 bp, Artificial
  probe
  misc_feature (1)..(25): SEQ ID NO: 1277; WAN024DFP; Start 184; Stop 208
atcattattcatatcgaggttgagg

SEQ ID NO: 289059 - DNA, 25 bp, Artificial
  probe
  misc_feature (1)..(25): SEQ ID NO: 1277; WAN024DFP; Start 200; Stop 224
aggttgaggatgtagaccagaacta

SEQ ID NO: 289060 - DNA, 25 bp, Artificial
  probe
  misc_feature (1)..(25): SEQ ID NO: 1277; WAN024DFP; Start 112; Stop 136
tttacgattggtagtcactgcctta

SEQ ID NO: 289061 - DNA, 25 bp, Artificial
  probe
  misc_feature (1)..(25): SEQ ID NO: 1277; WAN024DFP; Start 121; Stop 145
ggtagtcactgccttatgttgtcac

SEQ ID NO: 289062 - DNA, 25 bp, Artificial
  probe
  misc_feature (1)..(25): SEQ ID NO: 1277; WAN024DFP; Start 294; Stop 318
cttattagttcaaggacctgctggt

SEQ ID NO: 289063 - DNA, 25 bp, Artificial
  probe
  misc_feature (1)..(25): SEQ ID NO: 1277; WAN024DFP; Start 104; Stop 128
ttgctcagtttacgattggtagtca

SEQ ID NO: 289064 - DNA, 25 bp, Artificial
  probe
  misc_feature (1)..(25): SEQ ID NO: 1277; WAN024DFP; Start 175; Stop 199
cagtcaggaatcattattcatatcg

SEQ ID NO: 289065 - DNA, 25 bp, Artificial
  probe
  misc_feature (1)..(25): SEQ ID NO: 1277; WAN024DFP; Start 120; Stop 144
tggtagtcactgccttatgttgtca

SEQ ID NO: 289066 - DNA, 25 bp, Artificial
  probe
  misc_feature (1)..(25): SEQ ID NO: 1277; WAN024DFP; Start 115; Stop 139
acgattggtagtcactgccttatgt

SEQ ID NO: 289067 - DNA, 25 bp, Artificial
  probe
  misc_feature (1)..(25): SEQ ID NO: 1277; WAN024DFP; Start 201; Stop 225
ggttgaggatgtagaccagaactac

SEQ ID NO: 289068 - DNA, 25 bp, Artificial
  probe
  misc_feature (1)..(25): SEQ ID NO: 1277; WAN024DFP; Start 179; Stop 203
caggaatcattattcatatcgaggt

SEQ ID NO: 289069 - DNA, 25 bp, Artificial
  probe
  misc_feature (1)..(25): SEQ ID NO: 1277; WAN024DFP; Start 18; Stop 42
agatattatcgtttcaaatgttccc

SEQ ID NO: 289070 - DNA, 25 bp, Artificial
  probe
  misc_feature (1)..(25): SEQ ID NO: 1277; WAN024DFP; Start 178; Stop 202
tcaggaatcattattcatatcgagg

SEQ ID NO: 289071 - DNA, 25 bp, Artificial
  probe
  misc_feature (1)..(25): SEQ ID NO: 1277; WAN024DFP; Start 193; Stop 217
catatcgaggttgaggatgtagacc

SEQ ID NO: 289072 - DNA, 25 bp, Artificial
  probe
  misc_feature (1)..(25): SEQ ID NO: 1277; WAN024DFP; Start 105; Stop 129
tgctcagtttacgattggtagtcac

SEQ ID NO: 289073 - DNA, 25 bp, Artificial
  probe
  misc_feature (1)..(25): SEQ ID NO: 1277; WAN024DFP; Start 106; Stop 130
gctcagtttacgattggtagtcact

SEQ ID NO: 289074 - DNA, 25 bp, Artificial
  probe
  misc_feature (1)..(25): SEQ ID NO: 1278; WAN024AUY; Start 105; Stop 129
tatgctttctgagtttcgtagtttg

SEQ ID NO: 289075 - DNA, 25 bp, Artificial
  probe
  misc_feature (1)..(25): SEQ ID NO: 1278; WAN024AUY; Start 103; Stop 127
gatatgctttctgagtttcgtagtt

SEQ ID NO: 289076 - DNA, 25 bp, Artificial
  probe
  misc_feature (1)..(25): SEQ ID NO: 1278; WAN024AUY; Start 102; Stop 126
agatatgctttctgagtttcgtagt

SEQ ID NO: 289077 - DNA, 25 bp, Artificial
  probe
  misc_feature (1)..(25): SEQ ID NO: 1278; WAN024AUY; Start 104; Stop 128
atatgctttctgagtttcgtagttt

SEQ ID NO: 289078 - DNA, 25 bp, Artificial
  probe
  misc_feature (1)..(25): SEQ ID NO: 1278; WAN024AUY; Start 83; Stop 107
aatcagtagcacgccaaccagatat

SEQ ID NO: 289079 - DNA, 25 bp, Artificial
  probe
  misc_feature (1)..(25): SEQ ID NO: 1278; WAN024AUY; Start 84; Stop 108
atcagtagcacgccaaccagatatg

SEQ ID NO: 289080 - DNA, 25 bp, Artificial
  probe
  misc_feature (1)..(25): SEQ ID NO: 1278; WAN024AUY; Start 76; Stop 100
ctgtttaaatcagtagcacgccaac

SEQ ID NO: 289081 - DNA, 25 bp, Artificial
  probe
  misc_feature (1)..(25): SEQ ID NO: 1278; WAN024AUY; Start 82; Stop 106
aaatcagtagcacgccaaccagata

SEQ ID NO: 289082 - DNA, 25 bp, Artificial
  probe
  misc_feature (1)..(25): SEQ ID NO: 1278; WAN024AUY; Start 81; Stop 105
taaatcagtagcacgccaaccagat

SEQ ID NO: 289083 - DNA, 25 bp, Artificial
  probe
  misc_feature (1)..(25): SEQ ID NO: 1278; WAN024AUY; Start 97; Stop 121
caaccagatatgctttctgagtttc

SEQ ID NO: 289084 - DNA, 25 bp, Artificial
  probe
  misc_feature (1)..(25): SEQ ID NO: 1278; WAN024AUY; Start 172; Stop 196
actcttgtcttctcatttattatca

SEQ ID NO: 289085 - DNA, 25 bp, Artificial
  probe
  misc_feature (1)..(25): SEQ ID NO: 1278; WAN024AUY; Start 101; Stop 125
cagatatgctttctgagtttcgtag

SEQ ID NO: 289086 - DNA, 25 bp, Artificial
  probe
  misc_feature (1)..(25): SEQ ID NO: 1278; WAN024AUY; Start 100; Stop 124
ccagatatgctttctgagtttcgta

SEQ ID NO: 289087 - DNA, 25 bp, Artificial
  probe
  misc_feature (1)..(25): SEQ ID NO: 1278; WAN024AUY; Start 80; Stop 104
ttaaatcagtagcacgccaaccaga

SEQ ID NO: 289088 - DNA, 25 bp, Artificial
  probe
  misc_feature (1)..(25): SEQ ID NO: 1278; WAN024AUY; Start 96; Stop 120
ccaaccagatatgctttctgagttt

SEQ ID NO: 289089 - DNA, 25 bp, Artificial
  probe
  misc_feature (1)..(25): SEQ ID NO: 1278; WAN024AUY; Start 79; Stop 103
tttaaatcagtagcacgccaaccag

SEQ ID NO: 289090 - DNA, 25 bp, Artificial
  probe
  misc_feature (1)..(25): SEQ ID NO: 1278; WAN024AUY; Start 98; Stop 122
aaccagatatgctttctgagtttcg

SEQ ID NO: 289091 - DNA, 25 bp, Artificial
  probe
  misc_feature (1)..(25): SEQ ID NO: 1278; WAN024AUY; Start 78; Stop 102
gtttaaatcagtagcacgccaacca

SEQ ID NO: 289092 - DNA, 25 bp, Artificial
  probe
  misc_feature (1)..(25): SEQ ID NO: 1278; WAN024AUY; Start 77; Stop 101
tgtttaaatcagtagcacgccaacc

SEQ ID NO: 289093 - DNA, 25 bp, Artificial
  probe
  misc_feature (1)..(25): SEQ ID NO: 1278; WAN024AUY; Start 99; Stop 123
accagatatgctttctgagtttcgt

SEQ ID NO: 289094 - DNA, 25 bp, Artificial
  probe
  misc_feature (1)..(25): SEQ ID NO: 1278; WAN024AUY; Start 95; Stop 119
gccaaccagatatgctttctgagtt

SEQ ID NO: 289095 - DNA, 25 bp, Artificial
  probe
  misc_feature (1)..(25): SEQ ID NO: 1278; WAN024AUY; Start 75; Stop 99
actgtttaaatcagtagcacgccaa

SEQ ID NO: 289096 - DNA, 25 bp, Artificial
  probe
  misc_feature (1)..(25): SEQ ID NO: 1278; WAN024AUY; Start 74; Stop 98
gactgtttaaatcagtagcacgcca

SEQ ID NO: 289097 - DNA, 25 bp, Artificial
  probe
  misc_feature (1)..(25): SEQ ID NO: 1278; WAN024AUY; Start 72; Stop 96
tggactgtttaaatcagtagcacgc

SEQ ID NO: 289098 - DNA, 25 bp, Artificial
  probe
  misc_feature (1)..(25): SEQ ID NO: 1278; WAN024AUY; Start 73; Stop 97
ggactgtttaaatcagtagcacgcc

SEQ ID NO: 289099 - DNA, 25 bp, Artificial
  probe
  misc_feature (1)..(25): SEQ ID NO: 1279; WAN024FL6; Start 617; Stop 641
ttgttgttggtccgtatgagaatat

SEQ ID NO: 289100 - DNA, 25 bp, Artificial
  probe
  misc_feature (1)..(25): SEQ ID NO: 1279; WAN024FL6; Start 616; Stop 640
gttgttgttggtccgtatgagaata

SEQ ID NO: 289101 - DNA, 25 bp, Artificial
  probe
  misc_feature (1)..(25): SEQ ID NO: 1279; WAN024FL6; Start 212; Stop 236
ataagattgctaagattgttccagg

SEQ ID NO: 289102 - DNA, 25 bp, Artificial
  probe
  misc_feature (1)..(25): SEQ ID NO: 1279; WAN024FL6; Start 640; Stop 664
attaagattacaacgcctgatgatt

SEQ ID NO: 289103 - DNA, 25 bp, Artificial
  probe
  misc_feature (1)..(25): SEQ ID NO: 1279; WAN024FL6; Start 131; Stop 155
cagagattgatggaattatcgttgt

SEQ ID NO: 289104 - DNA, 25 bp, Artificial
  probe
  misc_feature (1)..(25): SEQ ID NO: 1279; WAN024FL6; Start 132; Stop 156
agagattgatggaattatcgttgtt

SEQ ID NO: 289105 - DNA, 25 bp, Artificial
  probe
  misc_feature (1)..(25): SEQ ID NO: 1279; WAN024FL6; Start 639; Stop 663
tattaagattacaacgcctgatgat

SEQ ID NO: 289106 - DNA, 25 bp, Artificial
  probe
  misc_feature (1)..(25): SEQ ID NO: 1279; WAN024FL6; Start 638; Stop 662
atattaagattacaacgcctgatga

SEQ ID NO: 289107 - DNA, 25 bp, Artificial
  probe
  misc_feature (1)..(25): SEQ ID NO: 1279; WAN024FL6; Start 85; Stop 109
ggtaagccaattattgttcacacta

SEQ ID NO: 289108 - DNA, 25 bp, Artificial
  probe
  misc_feature (1)..(25): SEQ ID NO: 1279; WAN024FL6; Start 293; Stop 317
atggaatagaggataatgttgtgtt

SEQ ID NO: 289109 - DNA, 25 bp, Artificial
  probe
  misc_feature (1)..(25): SEQ ID NO: 1279; WAN024FL6; Start 210; Stop 234
agataagattgctaagattgttcca

SEQ ID NO: 289110 - DNA, 25 bp, Artificial
  probe
  misc_feature (1)..(25): SEQ ID NO: 1279; WAN024FL6; Start 618; Stop 642
tgttgttggtccgtatgagaatatt

SEQ ID NO: 289111 - DNA, 25 bp, Artificial
  probe
  misc_feature (1)..(25): SEQ ID NO: 1279; WAN024FL6; Start 211; Stop 235
gataagattgctaagattgttccag

SEQ ID NO: 289112 - DNA, 25 bp, Artificial
  probe
  misc_feature (1)..(25): SEQ ID NO: 1279; WAN024FL6; Start 167; Stop 191
attggattccgtatatggaggagat

SEQ ID NO: 289113 - DNA, 25 bp, Artificial
  probe
  misc_feature (1)..(25): SEQ ID NO: 1279; WAN024FL6; Start 619; Stop 643
gttgttggtccgtatgagaatatta

SEQ ID NO: 289114 - DNA, 25 bp, Artificial
  probe
  misc_feature (1)..(25): SEQ ID NO: 1279; WAN024FL6; Start 615; Stop 639
tgttgttgttggtccgtatgagaat

SEQ ID NO: 289115 - DNA, 25 bp, Artificial
  probe
  misc_feature (1)..(25): SEQ ID NO: 1279; WAN024FL6; Start 614; Stop 638
atgttgttgttggtccgtatgagaa

SEQ ID NO: 289116 - DNA, 25 bp, Artificial
  probe
  misc_feature (1)..(25): SEQ ID NO: 1279; WAN024FL6; Start 294; Stop 318
tggaatagaggataatgttgtgtta

SEQ ID NO: 289117 - DNA, 25 bp, Artificial
  probe
  misc_feature (1)..(25): SEQ ID NO: 1279; WAN024FL6; Start 130; Stop 154
ccagagattgatggaattatcgttg

SEQ ID NO: 289118 - DNA, 25 bp, Artificial
  probe
  misc_feature (1)..(25): SEQ ID NO: 1279; WAN024FL6; Start 621; Stop 645
tgttggtccgtatgagaatattaag

SEQ ID NO: 289119 - DNA, 25 bp, Artificial
  probe
  misc_feature (1)..(25): SEQ ID NO: 1279; WAN024FL6; Start 83; Stop 107
atggtaagccaattattgttcacac

SEQ ID NO: 289120 - DNA, 25 bp, Artificial
  probe
  misc_feature (1)..(25): SEQ ID NO: 1279; WAN024FL6; Start 170; Stop 194
ggattccgtatatggaggagatgaa

SEQ ID NO: 289121 - DNA, 25 bp, Artificial
  probe
  misc_feature (1)..(25): SEQ ID NO: 1279; WAN024FL6; Start 166; Stop 190
gattggattccgtatatggaggaga

SEQ ID NO: 289122 - DNA, 25 bp, Artificial
  probe
  misc_feature (1)..(25): SEQ ID NO: 1279; WAN024FL6; Start 346; Stop 370
acagcagacactatttcagataaca

SEQ ID NO: 289123 - DNA, 25 bp, Artificial
  probe
  misc_feature (1)..(25): SEQ ID NO: 1279; WAN024FL6; Start 292; Stop 316
tatggaatagaggataatgttgtgt

SEQ ID NO: 289124 - DNA, 25 bp, Artificial
  probe
  misc_feature (1)..(25): SEQ ID NO: 1279; WAN024FL6; Start 622; Stop 646
gttggtccgtatgagaatattaaga

SEQ ID NO: 289125 - DNA, 25 bp, Artificial
  probe
  misc_feature (1)..(25): SEQ ID NO: 1279; WAN024FL6; Start 213; Stop 237
taagattgctaagattgttccaggg

SEQ ID NO: 289126 - DNA, 25 bp, Artificial
  probe
  misc_feature (1)..(25): SEQ ID NO: 1279; WAN024FL6; Start 84; Stop 108
tggtaagccaattattgttcacact

SEQ ID NO: 289127 - DNA, 25 bp, Artificial
  probe
  misc_feature (1)..(25): SEQ ID NO: 1279; WAN024FL6; Start 168; Stop 192
ttggattccgtatatggaggagatg

SEQ ID NO: 289128 - DNA, 25 bp, Artificial
  probe
  misc_feature (1)..(25): SEQ ID NO: 1279; WAN024FL6; Start 117; Stop 141
atttgagaaccatccagagattgat

SEQ ID NO: 289129 - DNA, 25 bp, Artificial
  probe
  misc_feature (1)..(25): SEQ ID NO: 1279; WAN024FL6; Start 635; Stop 659
agaatattaagattacaacgcctga

SEQ ID NO: 289130 - DNA, 25 bp, Artificial
  probe
  misc_feature (1)..(25): SEQ ID NO: 1279; WAN024FL6; Start 633; Stop 657
tgagaatattaagattacaacgcct

SEQ ID NO: 289131 - DNA, 25 bp, Artificial
  probe
  misc_feature (1)..(25): SEQ ID NO: 1279; WAN024FL6; Start 349; Stop 373
gcagacactatttcagataacatcc

SEQ ID NO: 289132 - DNA, 25 bp, Artificial
  probe
  misc_feature (1)..(25): SEQ ID NO: 1280; WAN024DI7; Start 442; Stop 466
tatgattctcaatacgatgcttggt

SEQ ID NO: 289133 - DNA, 25 bp, Artificial
  probe
  misc_feature (1)..(25): SEQ ID NO: 1280; WAN024DI7; Start 441; Stop 465
ctatgattctcaatacgatgcttgg

SEQ ID NO: 289134 - DNA, 25 bp, Artificial
  probe
  misc_feature (1)..(25): SEQ ID NO: 1280; WAN024DI7; Start 443; Stop 467
atgattctcaatacgatgcttggtt

SEQ ID NO: 289135 - DNA, 25 bp, Artificial
  probe
  misc_feature (1)..(25): SEQ ID NO: 1280; WAN024DI7; Start 440; Stop 464
tctatgattctcaatacgatgcttg

SEQ ID NO: 289136 - DNA, 25 bp, Artificial
  probe
  misc_feature (1)..(25): SEQ ID NO: 1280; WAN024DI7; Start 312; Stop 336
caaatcagaatgggtagaagacaag

SEQ ID NO: 289137 - DNA, 25 bp, Artificial
  probe
  misc_feature (1)..(25): SEQ ID NO: 1280; WAN024DI7; Start 313; Stop 337
aaatcagaatgggtagaagacaagg

SEQ ID NO: 289138 - DNA, 25 bp, Artificial
  probe
  misc_feature (1)..(25): SEQ ID NO: 1280; WAN024DI7; Start 467; Stop 491
tttatatcaaagcagatggacagca

SEQ ID NO: 289139 - DNA, 25 bp, Artificial
  probe
  misc_feature (1)..(25): SEQ ID NO: 1280; WAN024DI7; Start 666; Stop 690
tggaaactatgctgataaagaatgg

SEQ ID NO: 289140 - DNA, 25 bp, Artificial
  probe
  misc_feature (1)..(25): SEQ ID NO: 1280; WAN024DI7; Start 411; Stop 435
aacaggtgccaaagtaatagaagac

SEQ ID NO: 289141 - DNA, 25 bp, Artificial
  probe
  misc_feature (1)..(25): SEQ ID NO: 1280; WAN024DI7; Start 410; Stop 434
caacaggtgccaaagtaatagaaga

SEQ ID NO: 289142 - DNA, 25 bp, Artificial
  probe
  misc_feature (1)..(25): SEQ ID NO: 1280; WAN024DI7; Start 667; Stop 691
ggaaactatgctgataaagaatgga

SEQ ID NO: 289143 - DNA, 25 bp, Artificial
  probe
  misc_feature (1)..(25): SEQ ID NO: 1280; WAN024DI7; Start 497; Stop 521
agaaagaatggctccaaattaaagg

SEQ ID NO: 289144 - DNA, 25 bp, Artificial
  probe
  misc_feature (1)..(25): SEQ ID NO: 1280; WAN024DI7; Start 498; Stop 522
gaaagaatggctccaaattaaaggg

SEQ ID NO: 289145 - DNA, 25 bp, Artificial
  probe
  misc_feature (1)..(25): SEQ ID NO: 1280; WAN024DI7; Start 468; Stop 492
ttatatcaaagcagatggacagcac

SEQ ID NO: 289146 - DNA, 25 bp, Artificial
  probe
  misc_feature (1)..(25): SEQ ID NO: 1280; WAN024DI7; Start 444; Stop 468
tgattctcaatacgatgcttggttt

SEQ ID NO: 289147 - DNA, 25 bp, Artificial
  probe
  misc_feature (1)..(25): SEQ ID NO: 1280; WAN024DI7; Start 494; Stop 518
cagagaaagaatggctccaaattaa

SEQ ID NO: 289148 - DNA, 25 bp, Artificial
  probe
  misc_feature (1)..(25): SEQ ID NO: 1280; WAN024DI7; Start 314; Stop 338
aatcagaatgggtagaagacaaggg

SEQ ID NO: 289149 - DNA, 25 bp, Artificial
  probe
  misc_feature (1)..(25): SEQ ID NO: 1280; WAN024DI7; Start 581; Stop 605
cttatgtgaatgctagtggtgccaa

SEQ ID NO: 289150 - DNA, 25 bp, Artificial
  probe
  misc_feature (1)..(25): SEQ ID NO: 1280; WAN024DI7; Start 495; Stop 519
agagaaagaatggctccaaattaaa

SEQ ID NO: 289151 - DNA, 25 bp, Artificial
  probe
  misc_feature (1)..(25): SEQ ID NO: 1280; WAN024DI7; Start 412; Stop 436
acaggtgccaaagtaatagaagact

SEQ ID NO: 289152 - DNA, 25 bp, Artificial
  probe
  misc_feature (1)..(25): SEQ ID NO: 1280; WAN024DI7; Start 496; Stop 520
gagaaagaatggctccaaattaaag

SEQ ID NO: 289153 - DNA, 25 bp, Artificial
  probe
  misc_feature (1)..(25): SEQ ID NO: 1280; WAN024DI7; Start 520; Stop 544
gggaaggactattatttcaaatccg

SEQ ID NO: 289154 - DNA, 25 bp, Artificial
  probe
  misc_feature (1)..(25): SEQ ID NO: 1280; WAN024DI7; Start 507; Stop 531
gctccaaattaaagggaaggactat

SEQ ID NO: 289155 - DNA, 25 bp, Artificial
  probe
  misc_feature (1)..(25): SEQ ID NO: 1280; WAN024DI7; Start 493; Stop 517
gcagagaaagaatggctccaaatta

SEQ ID NO: 289156 - DNA, 25 bp, Artificial
  probe
  misc_feature (1)..(25): SEQ ID NO: 1280; WAN024DI7; Start 413; Stop 437
caggtgccaaagtaatagaagactg

SEQ ID NO: 289157 - DNA, 25 bp, Artificial
  probe
  misc_feature (1)..(25): SEQ ID NO: 1280; WAN024DI7; Start 500; Stop 524
aagaatggctccaaattaaagggaa

SEQ ID NO: 289158 - DNA, 25 bp, Artificial
  probe
  misc_feature (1)..(25): SEQ ID NO: 1280; WAN024DI7; Start 499; Stop 523
aaagaatggctccaaattaaaggga

SEQ ID NO: 289159 - DNA, 25 bp, Artificial
  probe
  misc_feature (1)..(25): SEQ ID NO: 1280; WAN024DI7; Start 665; Stop 689
atggaaactatgctgataaagaatg

SEQ ID NO: 289160 - DNA, 25 bp, Artificial
  probe
  misc_feature (1)..(25): SEQ ID NO: 1280; WAN024DI7; Start 315; Stop 339
atcagaatgggtagaagacaaggga

SEQ ID NO: 289161 - DNA, 25 bp, Artificial
  probe
  misc_feature (1)..(25): SEQ ID NO: 1280; WAN024DI7; Start 285; Stop 309
ttacctcaaatctggtggctatatg

SEQ ID NO: 289162 - DNA, 25 bp, Artificial
  probe
  misc_feature (1)..(25): SEQ ID NO: 1280; WAN024DI7; Start 31; Stop 55
ataaataagaacagaggaagaaggt

SEQ ID NO: 289163 - DNA, 25 bp, Artificial
  probe
  misc_feature (1)..(25): SEQ ID NO: 1280; WAN024DI7; Start 284; Stop 308
tttacctcaaatctggtggctatat

SEQ ID NO: 289164 - DNA, 25 bp, Artificial
  probe
  misc_feature (1)..(25): SEQ ID NO: 1280; WAN024DI7; Start 32; Stop 56
taaataagaacagaggaagaaggtt

SEQ ID NO: 289165 - DNA, 25 bp, Artificial
  probe
  misc_feature (1)..(25): SEQ ID NO: 1281; WAN024D64; Start 368; Stop 392
ttccacatatcaccattctatcctt

SEQ ID NO: 289166 - DNA, 25 bp, Artificial
  probe
  misc_feature (1)..(25): SEQ ID NO: 1281; WAN024D64; Start 159; Stop 183
gcagactgttcagttaatccttctt

SEQ ID NO: 289167 - DNA, 25 bp, Artificial
  probe
  misc_feature (1)..(25): SEQ ID NO: 1281; WAN024D64; Start 305; Stop 329
cattattgggaacatttgggacatt

SEQ ID NO: 289168 - DNA, 25 bp, Artificial
  probe
  misc_feature (1)..(25): SEQ ID NO: 1281; WAN024D64; Start 389; Stop 413
cctttatctttggtcatttagcact

SEQ ID NO: 289169 - DNA, 25 bp, Artificial
  probe
  misc_feature (1)..(25): SEQ ID NO: 1281; WAN024D64; Start 388; Stop 412
tcctttatctttggtcatttagcac

SEQ ID NO: 289170 - DNA, 25 bp, Artificial
  probe
  misc_feature (1)..(25): SEQ ID NO: 1281; WAN024D64; Start 307; Stop 331
ttattgggaacatttgggacattag

SEQ ID NO: 289171 - DNA, 25 bp, Artificial
  probe
  misc_feature (1)..(25): SEQ ID NO: 1281; WAN024D64; Start 369; Stop 393
tccacatatcaccattctatccttt

SEQ ID NO: 289172 - DNA, 25 bp, Artificial
  probe
  misc_feature (1)..(25): SEQ ID NO: 1281; WAN024D64; Start 367; Stop 391
tttccacatatcaccattctatcct

SEQ ID NO: 289173 - DNA, 25 bp, Artificial
  probe
  misc_feature (1)..(25): SEQ ID NO: 1281; WAN024D64; Start 393; Stop 417
tatctttggtcatttagcactcttg

SEQ ID NO: 289174 - DNA, 25 bp, Artificial
  probe
  misc_feature (1)..(25): SEQ ID NO: 1281; WAN024D64; Start 169; Stop 193
cagttaatccttctttatggttggt

SEQ ID NO: 289175 - DNA, 25 bp, Artificial
  probe
  misc_feature (1)..(25): SEQ ID NO: 1281; WAN024D64; Start 394; Stop 418
atctttggtcatttagcactcttgg

SEQ ID NO: 289176 - DNA, 25 bp, Artificial
  probe
  misc_feature (1)..(25): SEQ ID NO: 1281; WAN024D64; Start 308; Stop 332
tattgggaacatttgggacattagc

SEQ ID NO: 289177 - DNA, 25 bp, Artificial
  probe
  misc_feature (1)..(25): SEQ ID NO: 1281; WAN024D64; Start 153; Stop 177
aatcttgcagactgttcagttaatc

SEQ ID NO: 289178 - DNA, 25 bp, Artificial
  probe
  misc_feature (1)..(25): SEQ ID NO: 1281; WAN024D64; Start 306; Stop 330
attattgggaacatttgggacatta

SEQ ID NO: 289179 - DNA, 25 bp, Artificial
  probe
  misc_feature (1)..(25): SEQ ID NO: 1281; WAN024D64; Start 168; Stop 192
tcagttaatccttctttatggttgg

SEQ ID NO: 289180 - DNA, 25 bp, Artificial
  probe
  misc_feature (1)..(25): SEQ ID NO: 1281; WAN024D64; Start 387; Stop 411
atcctttatctttggtcatttagca

SEQ ID NO: 289181 - DNA, 25 bp, Artificial
  probe
  misc_feature (1)..(25): SEQ ID NO: 1281; WAN024D64; Start 392; Stop 416
ttatctttggtcatttagcactctt

SEQ ID NO: 289182 - DNA, 25 bp, Artificial
  probe
  misc_feature (1)..(25): SEQ ID NO: 1281; WAN024D64; Start 391; Stop 415
tttatctttggtcatttagcactct

SEQ ID NO: 289183 - DNA, 25 bp, Artificial
  probe
  misc_feature (1)..(25): SEQ ID NO: 1281; WAN024D64; Start 327; Stop 351
attagcagcctttgtttatccagtg

SEQ ID NO: 289184 - DNA, 25 bp, Artificial
  probe
  misc_feature (1)..(25): SEQ ID NO: 1281; WAN024D64; Start 326; Stop 350
cattagcagcctttgtttatccagt

SEQ ID NO: 289185 - DNA, 25 bp, Artificial
  probe
  misc_feature (1)..(25): SEQ ID NO: 1281; WAN024D64; Start 154; Stop 178
atcttgcagactgttcagttaatcc

SEQ ID NO: 289186 - DNA, 25 bp, Artificial
  probe
  misc_feature (1)..(25): SEQ ID NO: 1281; WAN024D64; Start 174; Stop 198
aatccttctttatggttggtactgg

SEQ ID NO: 289187 - DNA, 25 bp, Artificial
  probe
  misc_feature (1)..(25): SEQ ID NO: 1281; WAN024D64; Start 246; Stop 270
tatggctatgtttgtggtactcttg

SEQ ID NO: 289188 - DNA, 25 bp, Artificial
  probe
  misc_feature (1)..(25): SEQ ID NO: 1281; WAN024D64; Start 245; Stop 269
gtatggctatgtttgtggtactctt

SEQ ID NO: 289189 - DNA, 25 bp, Artificial
  probe
  misc_feature (1)..(25): SEQ ID NO: 1281; WAN024D64; Start 157; Stop 181
ttgcagactgttcagttaatccttc

SEQ ID NO: 289190 - DNA, 25 bp, Artificial
  probe
  misc_feature (1)..(25): SEQ ID NO: 1281; WAN024D64; Start 156; Stop 180
cttgcagactgttcagttaatcctt

SEQ ID NO: 289191 - DNA, 25 bp, Artificial
  probe
  misc_feature (1)..(25): SEQ ID NO: 1281; WAN024D64; Start 390; Stop 414
ctttatctttggtcatttagcactc

SEQ ID NO: 289192 - DNA, 25 bp, Artificial
  probe
  misc_feature (1)..(25): SEQ ID NO: 1281; WAN024D64; Start 165; Stop 189
tgttcagttaatccttctttatggt

SEQ ID NO: 289193 - DNA, 25 bp, Artificial
  probe
  misc_feature (1)..(25): SEQ ID NO: 1281; WAN024D64; Start 304; Stop 328
gcattattgggaacatttgggacat

SEQ ID NO: 289194 - DNA, 25 bp, Artificial
  probe
  misc_feature (1)..(25): SEQ ID NO: 1281; WAN024D64; Start 370; Stop 394
ccacatatcaccattctatccttta

SEQ ID NO: 289195 - DNA, 25 bp, Artificial
  probe
  misc_feature (1)..(25): SEQ ID NO: 1281; WAN024D64; Start 251; Stop 275
ctatgtttgtggtactcttgcttcc

SEQ ID NO: 289196 - DNA, 25 bp, Artificial
  probe
  misc_feature (1)..(25): SEQ ID NO: 1281; WAN024D64; Start 158; Stop 182
tgcagactgttcagttaatccttct

SEQ ID NO: 289197 - DNA, 25 bp, Artificial
  probe
  misc_feature (1)..(25): SEQ ID NO: 1281; WAN024D64; Start 155; Stop 179
tcttgcagactgttcagttaatcct

SEQ ID NO: 289198 - DNA, 25 bp, Artificial
  probe
  misc_feature (1)..(25): SEQ ID NO: 1282; WAN024FYW; Start 79; Stop 103
ctgctggactatattgatgagactt

SEQ ID NO: 289199 - DNA, 25 bp, Artificial
  probe
  misc_feature (1)..(25): SEQ ID NO: 1282; WAN024FYW; Start 81; Stop 105
gctggactatattgatgagacttgt

SEQ ID NO: 289200 - DNA, 25 bp, Artificial
  probe
  misc_feature (1)..(25): SEQ ID NO: 1282; WAN024FYW; Start 80; Stop 104
tgctggactatattgatgagacttg

SEQ ID NO: 289201 - DNA, 25 bp, Artificial
  probe
  misc_feature (1)..(25): SEQ ID NO: 1282; WAN024FYW; Start 78; Stop 102
cctgctggactatattgatgagact

SEQ ID NO: 289202 - DNA, 25 bp, Artificial
  probe
  misc_feature (1)..(25): SEQ ID NO: 1282; WAN024FYW; Start 604; Stop 628
gtaaccaacactcctcaatatgaag

SEQ ID NO: 289203 - DNA, 25 bp, Artificial
  probe
  misc_feature (1)..(25): SEQ ID NO: 1282; WAN024FYW; Start 280; Stop 304
tacgatacatcttcttggtacttcc

SEQ ID NO: 289204 - DNA, 25 bp, Artificial
  probe
  misc_feature (1)..(25): SEQ ID NO: 1282; WAN024FYW; Start 278; Stop 302
cctacgatacatcttcttggtactt

SEQ ID NO: 289205 - DNA, 25 bp, Artificial
  probe
  misc_feature (1)..(25): SEQ ID NO: 1282; WAN024FYW; Start 277; Stop 301
tcctacgatacatcttcttggtact

SEQ ID NO: 289206 - DNA, 25 bp, Artificial
  probe
  misc_feature (1)..(25): SEQ ID NO: 1282; WAN024FYW; Start 276; Stop 300
ttcctacgatacatcttcttggtac

SEQ ID NO: 289207 - DNA, 25 bp, Artificial
  probe
  misc_feature (1)..(25): SEQ ID NO: 1282; WAN024FYW; Start 603; Stop 627
tgtaaccaacactcctcaatatgaa

SEQ ID NO: 289208 - DNA, 25 bp, Artificial
  probe
  misc_feature (1)..(25): SEQ ID NO: 1282; WAN024FYW; Start 602; Stop 626
ctgtaaccaacactcctcaatatga

SEQ ID NO: 289209 - DNA, 25 bp, Artificial
  probe
  misc_feature (1)..(25): SEQ ID NO: 1282; WAN024FYW; Start 758; Stop 782
agatgtatggcgattatatgacacc

SEQ ID NO: 289210 - DNA, 25 bp, Artificial
  probe
  misc_feature (1)..(25): SEQ ID NO: 1282; WAN024FYW; Start 757; Stop 781
cagatgtatggcgattatatgacac

SEQ ID NO: 289211 - DNA, 25 bp, Artificial
  probe
  misc_feature (1)..(25): SEQ ID NO: 1282; WAN024FYW; Start 279; Stop 303
ctacgatacatcttcttggtacttc

SEQ ID NO: 289212 - DNA, 25 bp, Artificial
  probe
  misc_feature (1)..(25): SEQ ID NO: 1282; WAN024FYW; Start 605; Stop 629
taaccaacactcctcaatatgaagg

SEQ ID NO: 289213 - DNA, 25 bp, Artificial
  probe
  misc_feature (1)..(25): SEQ ID NO: 1282; WAN024FYW; Start 518; Stop 542
ttcttagattatgtagctggtacgc

SEQ ID NO: 289214 - DNA, 25 bp, Artificial
  probe
  misc_feature (1)..(25): SEQ ID NO: 1282; WAN024FYW; Start 601; Stop 625
gctgtaaccaacactcctcaatatg

SEQ ID NO: 289215 - DNA, 25 bp, Artificial
  probe
  misc_feature (1)..(25): SEQ ID NO: 1282; WAN024FYW; Start 341; Stop 365
tagaagaccatgttaagtacaagcg

SEQ ID NO: 289216 - DNA, 25 bp, Artificial
  probe
  misc_feature (1)..(25): SEQ ID NO: 1282; WAN024FYW; Start 82; Stop 106
ctggactatattgatgagacttgta

SEQ ID NO: 289217 - DNA, 25 bp, Artificial
  probe
  misc_feature (1)..(25): SEQ ID NO: 1282; WAN024FYW; Start 756; Stop 780
ccagatgtatggcgattatatgaca

SEQ ID NO: 289218 - DNA, 25 bp, Artificial
  probe
  misc_feature (1)..(25): SEQ ID NO: 1282; WAN024FYW; Start 600; Stop 624
tgctgtaaccaacactcctcaatat

SEQ ID NO: 289219 - DNA, 25 bp, Artificial
  probe
  misc_feature (1)..(25): SEQ ID NO: 1282; WAN024FYW; Start 599; Stop 623
atgctgtaaccaacactcctcaata

SEQ ID NO: 289220 - DNA, 25 bp, Artificial
  probe
  misc_feature (1)..(25): SEQ ID NO: 1282; WAN024FYW; Start 759; Stop 783
gatgtatggcgattatatgacacca

SEQ ID NO: 289221 - DNA, 25 bp, Artificial
  probe
  misc_feature (1)..(25): SEQ ID NO: 1282; WAN024FYW; Start 760; Stop 784
atgtatggcgattatatgacaccac

SEQ ID NO: 289222 - DNA, 25 bp, Artificial
  probe
  misc_feature (1)..(25): SEQ ID NO: 1282; WAN024FYW; Start 215; Stop 239
aggattatgagcgtttactgaagat

SEQ ID NO: 289223 - DNA, 25 bp, Artificial
  probe
  misc_feature (1)..(25): SEQ ID NO: 1282; WAN024FYW; Start 274; Stop 298
ctttcctacgatacatcttcttggt

SEQ ID NO: 289224 - DNA, 25 bp, Artificial
  probe
  misc_feature (1)..(25): SEQ ID NO: 1282; WAN024FYW; Start 273; Stop 297
tctttcctacgatacatcttcttgg

SEQ ID NO: 289225 - DNA, 25 bp, Artificial
  probe
  misc_feature (1)..(25): SEQ ID NO: 1282; WAN024FYW; Start 282; Stop 306
cgatacatcttcttggtacttccat

SEQ ID NO: 289226 - DNA, 25 bp, Artificial
  probe
  misc_feature (1)..(25): SEQ ID NO: 1282; WAN024FYW; Start 214; Stop 238
gaggattatgagcgtttactgaaga

SEQ ID NO: 289227 - DNA, 25 bp, Artificial
  probe
  misc_feature (1)..(25): SEQ ID NO: 1282; WAN024FYW; Start 340; Stop 364
atagaagaccatgttaagtacaagc

SEQ ID NO: 289228 - DNA, 25 bp, Artificial
  probe
  misc_feature (1)..(25): SEQ ID NO: 1282; WAN024FYW; Start 207; Stop 231
ttatcgtgaggattatgagcgttta

SEQ ID NO: 289229 - DNA, 25 bp, Artificial
  probe
  misc_feature (1)..(25): SEQ ID NO: 1282; WAN024FYW; Start 213; Stop 237
tgaggattatgagcgtttactgaag

SEQ ID NO: 289230 - DNA, 25 bp, Artificial
  probe
  misc_feature (1)..(25): SEQ ID NO: 1282; WAN024FYW; Start 643; Stop 667
ggtaaggaagggatgaaagaaatct

SEQ ID NO: 289231 - DNA, 25 bp, Artificial
  probe
  misc_feature (1)..(25): SEQ ID NO: 1283; WAN0249E9; Start 61; Stop 85
aattattctaatcgagtgagactgg

SEQ ID NO: 289232 - DNA, 25 bp, Artificial
  probe
  misc_feature (1)..(25): SEQ ID NO: 1283; WAN0249E9; Start 62; Stop 86
attattctaatcgagtgagactggg

SEQ ID NO: 289233 - DNA, 25 bp, Artificial
  probe
  misc_feature (1)..(25): SEQ ID NO: 1283; WAN0249E9; Start 7; Stop 31
ttgaagtatagtctcctaaatgcac

SEQ ID NO: 289234 - DNA, 25 bp, Artificial
  probe
  misc_feature (1)..(25): SEQ ID NO: 1283; WAN0249E9; Start 8; Stop 32
tgaagtatagtctcctaaatgcact

SEQ ID NO: 289235 - DNA, 25 bp, Artificial
  probe
  misc_feature (1)..(25): SEQ ID NO: 1283; WAN0249E9; Start 13; Stop 37
tatagtctcctaaatgcacttagcc

SEQ ID NO: 289236 - DNA, 25 bp, Artificial
  probe
  misc_feature (1)..(25): SEQ ID NO: 1283; WAN0249E9; Start 20; Stop 44
tcctaaatgcacttagcccttatta

SEQ ID NO: 289237 - DNA, 25 bp, Artificial
  probe
  misc_feature (1)..(25): SEQ ID NO: 1283; WAN0249E9; Start 19; Stop 43
ctcctaaatgcacttagcccttatt

SEQ ID NO: 289238 - DNA, 25 bp, Artificial
  probe
  misc_feature (1)..(25): SEQ ID NO: 1283; WAN0249E9; Start 12; Stop 36
gtatagtctcctaaatgcacttagc

SEQ ID NO: 289239 - DNA, 25 bp, Artificial
  probe
  misc_feature (1)..(25): SEQ ID NO: 1283; WAN0249E9; Start 18; Stop 42
tctcctaaatgcacttagcccttat

SEQ ID NO: 289240 - DNA, 25 bp, Artificial
  probe
  misc_feature (1)..(25): SEQ ID NO: 1283; WAN0249E9; Start 21; Stop 45
cctaaatgcacttagcccttattat

SEQ ID NO: 289241 - DNA, 25 bp, Artificial
  probe
  misc_feature (1)..(25): SEQ ID NO: 1283; WAN0249E9; Start 6; Stop 30
tttgaagtatagtctcctaaatgca

SEQ ID NO: 289242 - DNA, 25 bp, Artificial
  probe
  misc_feature (1)..(25): SEQ ID NO: 1283; WAN0249E9; Start 24; Stop 48
aaatgcacttagcccttattatagg

SEQ ID NO: 289243 - DNA, 25 bp, Artificial
  probe
  misc_feature (1)..(25): SEQ ID NO: 1283; WAN0249E9; Start 5; Stop 29
atttgaagtatagtctcctaaatgc

SEQ ID NO: 289244 - DNA, 25 bp, Artificial
  probe
  misc_feature (1)..(25): SEQ ID NO: 1283; WAN0249E9; Start 14; Stop 38
atagtctcctaaatgcacttagccc

SEQ ID NO: 289245 - DNA, 25 bp, Artificial
  probe
  misc_feature (1)..(25): SEQ ID NO: 1283; WAN0249E9; Start 17; Stop 41
gtctcctaaatgcacttagccctta

SEQ ID NO: 289246 - DNA, 25 bp, Artificial
  probe
  misc_feature (1)..(25): SEQ ID NO: 1283; WAN0249E9; Start 60; Stop 84
taattattctaatcgagtgagactg

SEQ ID NO: 289247 - DNA, 25 bp, Artificial
  probe
  misc_feature (1)..(25): SEQ ID NO: 1283; WAN0249E9; Start 11; Stop 35
agtatagtctcctaaatgcacttag

SEQ ID NO: 289248 - DNA, 25 bp, Artificial
  probe
  misc_feature (1)..(25): SEQ ID NO: 1283; WAN0249E9; Start 15; Stop 39
tagtctcctaaatgcacttagccct

SEQ ID NO: 289249 - DNA, 25 bp, Artificial
  probe
  misc_feature (1)..(25): SEQ ID NO: 1283; WAN0249E9; Start 23; Stop 47
taaatgcacttagcccttattatag

SEQ ID NO: 289250 - DNA, 25 bp, Artificial
  probe
  misc_feature (1)..(25): SEQ ID NO: 1283; WAN0249E9; Start 63; Stop 87
ttattctaatcgagtgagactgggg

SEQ ID NO: 289251 - DNA, 25 bp, Artificial
  probe
  misc_feature (1)..(25): SEQ ID NO: 1283; WAN0249E9; Start 9; Stop 33
gaagtatagtctcctaaatgcactt

SEQ ID NO: 289252 - DNA, 25 bp, Artificial
  probe
  misc_feature (1)..(25): SEQ ID NO: 1283; WAN0249E9; Start 59; Stop 83
ttaattattctaatcgagtgagact

SEQ ID NO: 289253 - DNA, 25 bp, Artificial
  probe
  misc_feature (1)..(25): SEQ ID NO: 1283; WAN0249E9; Start 2; Stop 26
tgaatttgaagtatagtctcctaaa

SEQ ID NO: 289254 - DNA, 25 bp, Artificial
  probe
  misc_feature (1)..(25): SEQ ID NO: 1283; WAN0249E9; Start 16; Stop 40
agtctcctaaatgcacttagccctt

SEQ ID NO: 289255 - DNA, 25 bp, Artificial
  probe
  misc_feature (1)..(25): SEQ ID NO: 1283; WAN0249E9; Start 22; Stop 46
ctaaatgcacttagcccttattata

SEQ ID NO: 289256 - DNA, 25 bp, Artificial
  probe
  misc_feature (1)..(25): SEQ ID NO: 1283; WAN0249E9; Start 1; Stop 25
atgaatttgaagtatagtctcctaa

SEQ ID NO: 289257 - DNA, 25 bp, Artificial
  probe
  misc_feature (1)..(25): SEQ ID NO: 1283; WAN0249E9; Start 10; Stop 34
aagtatagtctcctaaatgcactta

SEQ ID NO: 289258 - DNA, 25 bp, Artificial
  probe
  misc_feature (1)..(25): SEQ ID NO: 1284; WAN024C9J; Start 139; Stop 163
gaaggtgttaaagttgccaatgtta

SEQ ID NO: 289259 - DNA, 25 bp, Artificial
  probe
  misc_feature (1)..(25): SEQ ID NO: 1284; WAN024C9J; Start 140; Stop 164
aaggtgttaaagttgccaatgttaa

SEQ ID NO: 289260 - DNA, 25 bp, Artificial
  probe
  misc_feature (1)..(25): SEQ ID NO: 1284; WAN024C9J; Start 73; Stop 97
tatgtatttgaagttgacactcgtg

SEQ ID NO: 289261 - DNA, 25 bp, Artificial
  probe
  misc_feature (1)..(25): SEQ ID NO: 1284; WAN024C9J; Start 72; Stop 96
atatgtatttgaagttgacactcgt

SEQ ID NO: 289262 - DNA, 25 bp, Artificial
  probe
  misc_feature (1)..(25): SEQ ID NO: 1284; WAN024C9J; Start 278; Stop 302
ttgctgctgaagctgaataactaat

SEQ ID NO: 289263 - DNA, 25 bp, Artificial
  probe
  misc_feature (1)..(25): SEQ ID NO: 1284; WAN024C9J; Start 138; Stop 162
cgaaggtgttaaagttgccaatgtt

SEQ ID NO: 289264 - DNA, 25 bp, Artificial
  probe
  misc_feature (1)..(25): SEQ ID NO: 1284; WAN024C9J; Start 74; Stop 98
atgtatttgaagttgacactcgtgc

SEQ ID NO: 289265 - DNA, 25 bp, Artificial
  probe
  misc_feature (1)..(25): SEQ ID NO: 1284; WAN024C9J; Start 71; Stop 95
aatatgtatttgaagttgacactcg

SEQ ID NO: 289266 - DNA, 25 bp, Artificial
  probe
  misc_feature (1)..(25): SEQ ID NO: 1284; WAN024C9J; Start 254; Stop 278
ctgattctaaagcaatcgagttgtt

SEQ ID NO: 289267 - DNA, 25 bp, Artificial
  probe
  misc_feature (1)..(25): SEQ ID NO: 1284; WAN024C9J; Start 255; Stop 279
tgattctaaagcaatcgagttgttt

SEQ ID NO: 289268 - DNA, 25 bp, Artificial
  probe
  misc_feature (1)..(25): SEQ ID NO: 1284; WAN024C9J; Start 256; Stop 280
gattctaaagcaatcgagttgtttg

SEQ ID NO: 289269 - DNA, 25 bp, Artificial
  probe
  misc_feature (1)..(25): SEQ ID NO: 1284; WAN024C9J; Start 26; Stop 50
aacctgtcatcactgaaagctcaat

SEQ ID NO: 289270 - DNA, 25 bp, Artificial
  probe
  misc_feature (1)..(25): SEQ ID NO: 1284; WAN024C9J; Start 277; Stop 301
tttgctgctgaagctgaataactaa

SEQ ID NO: 289271 - DNA, 25 bp, Artificial
  probe
  misc_feature (1)..(25): SEQ ID NO: 1284; WAN024C9J; Start 25; Stop 49
aaacctgtcatcactgaaagctcaa

SEQ ID NO: 289272 - DNA, 25 bp, Artificial
  probe
  misc_feature (1)..(25): SEQ ID NO: 1284; WAN024C9J; Start 276; Stop 300
gtttgctgctgaagctgaataacta

SEQ ID NO: 289273 - DNA, 25 bp, Artificial
  probe
  misc_feature (1)..(25): SEQ ID NO: 1284; WAN024C9J; Start 252; Stop 276
agctgattctaaagcaatcgagttg

SEQ ID NO: 289274 - DNA, 25 bp, Artificial
  probe
  misc_feature (1)..(25): SEQ ID NO: 1284; WAN024C9J; Start 137; Stop 161
tcgaaggtgttaaagttgccaatgt

SEQ ID NO: 289275 - DNA, 25 bp, Artificial
  probe
  misc_feature (1)..(25): SEQ ID NO: 1284; WAN024C9J; Start 27; Stop 51
acctgtcatcactgaaagctcaatg

SEQ ID NO: 289276 - DNA, 25 bp, Artificial
  probe
  misc_feature (1)..(25): SEQ ID NO: 1284; WAN024C9J; Start 253; Stop 277
gctgattctaaagcaatcgagttgt

SEQ ID NO: 289277 - DNA, 25 bp, Artificial
  probe
  misc_feature (1)..(25): SEQ ID NO: 1284; WAN024C9J; Start 166; Stop 190
acaatcaacgtaaaaccaaaagcta

SEQ ID NO: 289278 - DNA, 25 bp, Artificial
  probe
  misc_feature (1)..(25): SEQ ID NO: 1284; WAN024C9J; Start 197; Stop 221
ttggacgttacactggttttactaa

SEQ ID NO: 289279 - DNA, 25 bp, Artificial
  probe
  misc_feature (1)..(25): SEQ ID NO: 1284; WAN024C9J; Start 163; Stop 187
aacacaatcaacgtaaaaccaaaag

SEQ ID NO: 289280 - DNA, 25 bp, Artificial
  probe
  misc_feature (1)..(25): SEQ ID NO: 1284; WAN024C9J; Start 169; Stop 193
atcaacgtaaaaccaaaagctaaac

SEQ ID NO: 289281 - DNA, 25 bp, Artificial
  probe
  misc_feature (1)..(25): SEQ ID NO: 1284; WAN024C9J; Start 167; Stop 191
caatcaacgtaaaaccaaaagctaa

SEQ ID NO: 289282 - DNA, 25 bp, Artificial
  probe
  misc_feature (1)..(25): SEQ ID NO: 1284; WAN024C9J; Start 196; Stop 220
gttggacgttacactggttttacta

SEQ ID NO: 289283 - DNA, 25 bp, Artificial
  probe
  misc_feature (1)..(25): SEQ ID NO: 1284; WAN024C9J; Start 202; Stop 226
cgttacactggttttactaacaaaa

SEQ ID NO: 289284 - DNA, 25 bp, Artificial
  probe
  misc_feature (1)..(25): SEQ ID NO: 1284; WAN024C9J; Start 175; Stop 199
gtaaaaccaaaagctaaacgtgttg

SEQ ID NO: 289285 - DNA, 25 bp, Artificial
  probe
  misc_feature (1)..(25): SEQ ID NO: 1284; WAN024C9J; Start 165; Stop 189
cacaatcaacgtaaaaccaaaagct

SEQ ID NO: 289286 - DNA, 25 bp, Artificial
  probe
  misc_feature (1)..(25): SEQ ID NO: 1284; WAN024C9J; Start 75; Stop 99
tgtatttgaagttgacactcgtgca

SEQ ID NO: 289287 - DNA, 25 bp, Artificial
  probe
  misc_feature (1)..(25): SEQ ID NO: 1284; WAN024C9J; Start 164; Stop 188
acacaatcaacgtaaaaccaaaagc

SEQ ID NO: 289288 - DNA, 25 bp, Artificial
  probe
  misc_feature (1)..(25): SEQ ID NO: 1284; WAN024C9J; Start 168; Stop 192
aatcaacgtaaaaccaaaagctaaa

SEQ ID NO: 289289 - DNA, 25 bp, Artificial
  probe
  misc_feature (1)..(25): SEQ ID NO: 1284; WAN024C9J; Start 162; Stop 186
taacacaatcaacgtaaaaccaaaa

SEQ ID NO: 289290 - DNA, 25 bp, Artificial
  probe
  misc_feature (1)..(25): SEQ ID NO: 1284; WAN024C9J; Start 161; Stop 185
ttaacacaatcaacgtaaaaccaaa

SEQ ID NO: 289291 - DNA, 25 bp, Artificial
  probe
  misc_feature (1)..(25): SEQ ID NO: 1285; WAN024CF5; Start 67; Stop 91
atcgttgtgattggcttgtatcttg

SEQ ID NO: 289292 - DNA, 25 bp, Artificial
  probe
  misc_feature (1)..(25): SEQ ID NO: 1285; WAN024CF5; Start 138; Stop 162
gattattgcggttggcttagtcttc

SEQ ID NO: 289293 - DNA, 25 bp, Artificial
  probe
  misc_feature (1)..(25): SEQ ID NO: 1285; WAN024CF5; Start 128; Stop 152
taattattgcgattattgcggttgg

SEQ ID NO: 289294 - DNA, 25 bp, Artificial
  probe
  misc_feature (1)..(25): SEQ ID NO: 1285; WAN024CF5; Start 127; Stop 151
ttaattattgcgattattgcggttg

SEQ ID NO: 289295 - DNA, 25 bp, Artificial
  probe
  misc_feature (1)..(25): SEQ ID NO: 1285; WAN024CF5; Start 139; Stop 163
attattgcggttggcttagtcttca

SEQ ID NO: 289296 - DNA, 25 bp, Artificial
  probe
  misc_feature (1)..(25): SEQ ID NO: 1285; WAN024CF5; Start 66; Stop 90
aatcgttgtgattggcttgtatctt

SEQ ID NO: 289297 - DNA, 25 bp, Artificial
  probe
  misc_feature (1)..(25): SEQ ID NO: 1285; WAN024CF5; Start 189; Stop 213
actagagctattcaatcgcattatt

SEQ ID NO: 289298 - DNA, 25 bp, Artificial
  probe
  misc_feature (1)..(25): SEQ ID NO: 1285; WAN024CF5; Start 71; Stop 95
ttgtgattggcttgtatcttggctt

SEQ ID NO: 289299 - DNA, 25 bp, Artificial
  probe
  misc_feature (1)..(25): SEQ ID NO: 1285; WAN024CF5; Start 140; Stop 164
ttattgcggttggcttagtcttcaa

SEQ ID NO: 289300 - DNA, 25 bp, Artificial
  probe
  misc_feature (1)..(25): SEQ ID NO: 1285; WAN024CF5; Start 31; Stop 55
tttctatcaaacgctcaatcactgg

SEQ ID NO: 289301 - DNA, 25 bp, Artificial
  probe
  misc_feature (1)..(25): SEQ ID NO: 1285; WAN024CF5; Start 74; Stop 98
tgattggcttgtatcttggcttcaa

SEQ ID NO: 289302 - DNA, 25 bp, Artificial
  probe
  misc_feature (1)..(25): SEQ ID NO: 1285; WAN024CF5; Start 187; Stop 211
ttactagagctattcaatcgcatta

SEQ ID NO: 289303 - DNA, 25 bp, Artificial
  probe
  misc_feature (1)..(25): SEQ ID NO: 1285; WAN024CF5; Start 132; Stop 156
tattgcgattattgcggttggctta

SEQ ID NO: 289304 - DNA, 25 bp, Artificial
  probe
  misc_feature (1)..(25): SEQ ID NO: 1285; WAN024CF5; Start 129; Stop 153
aattattgcgattattgcggttggc

SEQ ID NO: 289305 - DNA, 25 bp, Artificial
  probe
  misc_feature (1)..(25): SEQ ID NO: 1285; WAN024CF5; Start 188; Stop 212
tactagagctattcaatcgcattat

SEQ ID NO: 289306 - DNA, 25 bp, Artificial
  probe
  misc_feature (1)..(25): SEQ ID NO: 1285; WAN024CF5; Start 72; Stop 96
tgtgattggcttgtatcttggcttc

SEQ ID NO: 289307 - DNA, 25 bp, Artificial
  probe
  misc_feature (1)..(25): SEQ ID NO: 1285; WAN024CF5; Start 68; Stop 92
tcgttgtgattggcttgtatcttgg

SEQ ID NO: 289308 - DNA, 25 bp, Artificial
  probe
  misc_feature (1)..(25): SEQ ID NO: 1285; WAN024CF5; Start 137; Stop 161
cgattattgcggttggcttagtctt

SEQ ID NO: 289309 - DNA, 25 bp, Artificial
  probe
  misc_feature (1)..(25): SEQ ID NO: 1285; WAN024CF5; Start 193; Stop 217
gagctattcaatcgcattattggtg

SEQ ID NO: 289310 - DNA, 25 bp, Artificial
  probe
  misc_feature (1)..(25): SEQ ID NO: 1285; WAN024CF5; Start 192; Stop 216
agagctattcaatcgcattattggt

SEQ ID NO: 289311 - DNA, 25 bp, Artificial
  probe
  misc_feature (1)..(25): SEQ ID NO: 1285; WAN024CF5; Start 191; Stop 215
tagagctattcaatcgcattattgg

SEQ ID NO: 289312 - DNA, 25 bp, Artificial
  probe
  misc_feature (1)..(25): SEQ ID NO: 1285; WAN024CF5; Start 70; Stop 94
gttgtgattggcttgtatcttggct

SEQ ID NO: 289313 - DNA, 25 bp, Artificial
  probe
  misc_feature (1)..(25): SEQ ID NO: 1285; WAN024CF5; Start 32; Stop 56
ttctatcaaacgctcaatcactggt

SEQ ID NO: 289314 - DNA, 25 bp, Artificial
  probe
  misc_feature (1)..(25): SEQ ID NO: 1285; WAN024CF5; Start 73; Stop 97
gtgattggcttgtatcttggcttca

SEQ ID NO: 289315 - DNA, 25 bp, Artificial
  probe
  misc_feature (1)..(25): SEQ ID NO: 1285; WAN024CF5; Start 126; Stop 150
tttaattattgcgattattgcggtt

SEQ ID NO: 289316 - DNA, 25 bp, Artificial
  probe
  misc_feature (1)..(25): SEQ ID NO: 1285; WAN024CF5; Start 154; Stop 178
ttagtcttcaacgctgctggagtaa

SEQ ID NO: 289317 - DNA, 25 bp, Artificial
  probe
  misc_feature (1)..(25): SEQ ID NO: 1285; WAN024CF5; Start 130; Stop 154
attattgcgattattgcggttggct

SEQ ID NO: 289318 - DNA, 25 bp, Artificial
  probe
  misc_feature (1)..(25): SEQ ID NO: 1285; WAN024CF5; Start 186; Stop 210
tttactagagctattcaatcgcatt

SEQ ID NO: 289319 - DNA, 25 bp, Artificial
  probe
  misc_feature (1)..(25): SEQ ID NO: 1285; WAN024CF5; Start 190; Stop 214
ctagagctattcaatcgcattattg

SEQ ID NO: 289320 - DNA, 25 bp, Artificial
  probe
  misc_feature (1)..(25): SEQ ID NO: 1285; WAN024CF5; Start 131; Stop 155
ttattgcgattattgcggttggctt

SEQ ID NO: 289321 - DNA, 25 bp, Artificial
  probe
  misc_feature (1)..(25): SEQ ID NO: 1285; WAN024CF5; Start 195; Stop 219
gctattcaatcgcattattggtgct

SEQ ID NO: 289322 - DNA, 25 bp, Artificial
  probe
  misc_feature (1)..(25): SEQ ID NO: 1285; WAN024CF5; Start 23; Stop 47
ataactggtttctatcaaacgctca

SEQ ID NO: 289323 - DNA, 25 bp, Artificial
  probe
  misc_feature (1)..(25): SEQ ID NO: 1285; WAN024CF5; Start 24; Stop 48
taactggtttctatcaaacgctcaa

SEQ ID NO: 289324 - DNA, 25 bp, Artificial
  probe
  misc_feature (1)..(25): SEQ ID NO: 1286; WAN024FNN; Start 363; Stop 387
cattgtctctcttgtagatggtcat

SEQ ID NO: 289325 - DNA, 25 bp, Artificial
  probe
  misc_feature (1)..(25): SEQ ID NO: 1286; WAN024FNN; Start 26; Stop 50
attatcgtaccagcaatgacactat

SEQ ID NO: 289326 - DNA, 25 bp, Artificial
  probe
  misc_feature (1)..(25): SEQ ID NO: 1286; WAN024FNN; Start 27; Stop 51
ttatcgtaccagcaatgacactata

SEQ ID NO: 289327 - DNA, 25 bp, Artificial
  probe
  misc_feature (1)..(25): SEQ ID NO: 1286; WAN024FNN; Start 95; Stop 119
ttgtaattgttgataacgcttctca

SEQ ID NO: 289328 - DNA, 25 bp, Artificial
  probe
  misc_feature (1)..(25): SEQ ID NO: 1286; WAN024FNN; Start 364; Stop 388
attgtctctcttgtagatggtcatc

SEQ ID NO: 289329 - DNA, 25 bp, Artificial
  probe
  misc_feature (1)..(25): SEQ ID NO: 1286; WAN024FNN; Start 641; Stop 665
cgttcatgtatatggaagagcctat

SEQ ID NO: 289330 - DNA, 25 bp, Artificial
  probe
  misc_feature (1)..(25): SEQ ID NO: 1286; WAN024FNN; Start 366; Stop 390
tgtctctcttgtagatggtcatcat

SEQ ID NO: 289331 - DNA, 25 bp, Artificial
  probe
  misc_feature (1)..(25): SEQ ID NO: 1286; WAN024FNN; Start 365; Stop 389
ttgtctctcttgtagatggtcatca

SEQ ID NO: 289332 - DNA, 25 bp, Artificial
  probe
  misc_feature (1)..(25): SEQ ID NO: 1286; WAN024FNN; Start 94; Stop 118
attgtaattgttgataacgcttctc

SEQ ID NO: 289333 - DNA, 25 bp, Artificial
  probe
  misc_feature (1)..(25): SEQ ID NO: 1286; WAN024FNN; Start 362; Stop 386
acattgtctctcttgtagatggtca

SEQ ID NO: 289334 - DNA, 25 bp, Artificial
  probe
  misc_feature (1)..(25): SEQ ID NO: 1286; WAN024FNN; Start 215; Stop 239
ataatattggatacgcctatgctcg

SEQ ID NO: 289335 - DNA, 25 bp, Artificial
  probe
  misc_feature (1)..(25): SEQ ID NO: 1286; WAN024FNN; Start 644; Stop 668
tcatgtatatggaagagcctattct

SEQ ID NO: 289336 - DNA, 25 bp, Artificial
  probe
  misc_feature (1)..(25): SEQ ID NO: 1286; WAN024FNN; Start 214; Stop 238
aataatattggatacgcctatgctc

SEQ ID NO: 289337 - DNA, 25 bp, Artificial
  probe
  misc_feature (1)..(25): SEQ ID NO: 1286; WAN024FNN; Start 93; Stop 117
aattgtaattgttgataacgcttct

SEQ ID NO: 289338 - DNA, 25 bp, Artificial
  probe
  misc_feature (1)..(25): SEQ ID NO: 1286; WAN024FNN; Start 28; Stop 52
tatcgtaccagcaatgacactatag

SEQ ID NO: 289339 - DNA, 25 bp, Artificial
  probe
  misc_feature (1)..(25): SEQ ID NO: 1286; WAN024FNN; Start 642; Stop 666
gttcatgtatatggaagagcctatt

SEQ ID NO: 289340 - DNA, 25 bp, Artificial
  probe
  misc_feature (1)..(25): SEQ ID NO: 1286; WAN024FNN; Start 121; Stop 145
aatggcagtatagaaagggtagaag

SEQ ID NO: 289341 - DNA, 25 bp, Artificial
  probe
  misc_feature (1)..(25): SEQ ID NO: 1286; WAN024FNN; Start 602; Stop 626
tatatgtttcagaggaggagtttgc

SEQ ID NO: 289342 - DNA, 25 bp, Artificial
  probe
  misc_feature (1)..(25): SEQ ID NO: 1286; WAN024FNN; Start 643; Stop 667
ttcatgtatatggaagagcctattc

SEQ ID NO: 289343 - DNA, 25 bp, Artificial
  probe
  misc_feature (1)..(25): SEQ ID NO: 1286; WAN024FNN; Start 120; Stop 144
aaatggcagtatagaaagggtagaa

SEQ ID NO: 289344 - DNA, 25 bp, Artificial
  probe
  misc_feature (1)..(25): SEQ ID NO: 1286; WAN024FNN; Start 361; Stop 385
gacattgtctctcttgtagatggtc

SEQ ID NO: 289345 - DNA, 25 bp, Artificial
  probe
  misc_feature (1)..(25): SEQ ID NO: 1286; WAN024FNN; Start 29; Stop 53
atcgtaccagcaatgacactataga

SEQ ID NO: 289346 - DNA, 25 bp, Artificial
  probe
  misc_feature (1)..(25): SEQ ID NO: 1286; WAN024FNN; Start 596; Stop 620
caccattatatgtttcagaggagga

SEQ ID NO: 289347 - DNA, 25 bp, Artificial
  probe
  misc_feature (1)..(25): SEQ ID NO: 1286; WAN024FNN; Start 595; Stop 619
tcaccattatatgtttcagaggagg

SEQ ID NO: 289348 - DNA, 25 bp, Artificial
  probe
  misc_feature (1)..(25): SEQ ID NO: 1286; WAN024FNN; Start 732; Stop 756
taaagaggactcatcaacaaattcg

SEQ ID NO: 289349 - DNA, 25 bp, Artificial
  probe
  misc_feature (1)..(25): SEQ ID NO: 1286; WAN024FNN; Start 598; Stop 622
ccattatatgtttcagaggaggagt

SEQ ID NO: 289350 - DNA, 25 bp, Artificial
  probe
  misc_feature (1)..(25): SEQ ID NO: 1286; WAN024FNN; Start 597; Stop 621
accattatatgtttcagaggaggag

SEQ ID NO: 289351 - DNA, 25 bp, Artificial
  probe
  misc_feature (1)..(25): SEQ ID NO: 1286; WAN024FNN; Start 481; Stop 505
ggattatatgagctgatgactagac

SEQ ID NO: 289352 - DNA, 25 bp, Artificial
  probe
  misc_feature (1)..(25): SEQ ID NO: 1286; WAN024FNN; Start 216; Stop 240
taatattggatacgcctatgctcgg

SEQ ID NO: 289353 - DNA, 25 bp, Artificial
  probe
  misc_feature (1)..(25): SEQ ID NO: 1286; WAN024FNN; Start 733; Stop 757
aaagaggactcatcaacaaattcgt

SEQ ID NO: 289354 - DNA, 25 bp, Artificial
  probe
  misc_feature (1)..(25): SEQ ID NO: 1286; WAN024FNN; Start 640; Stop 664
acgttcatgtatatggaagagccta

SEQ ID NO: 289355 - DNA, 25 bp, Artificial
  probe
  misc_feature (1)..(25): SEQ ID NO: 1286; WAN024FNN; Start 639; Stop 663
tacgttcatgtatatggaagagcct

SEQ ID NO: 289356 - DNA, 25 bp, Artificial
  probe
  misc_feature (1)..(25): SEQ ID NO: 1286; WAN024FNN; Start 480; Stop 504
aggattatatgagctgatgactaga

SEQ ID NO: 289357 - DNA, 25 bp, Artificial
  probe
  misc_feature (1)..(25): SEQ ID NO: 1287; WAN024CJ5; Start 116; Stop 140
aactcatactcatagattggactca

SEQ ID NO: 289358 - DNA, 25 bp, Artificial
  probe
  misc_feature (1)..(25): SEQ ID NO: 1287; WAN024CJ5; Start 114; Stop 138
gcaactcatactcatagattggact

SEQ ID NO: 289359 - DNA, 25 bp, Artificial
  probe
  misc_feature (1)..(25): SEQ ID NO: 1287; WAN024CJ5; Start 113; Stop 137
ggcaactcatactcatagattggac

SEQ ID NO: 289360 - DNA, 25 bp, Artificial
  probe
  misc_feature (1)..(25): SEQ ID NO: 1287; WAN024CJ5; Start 117; Stop 141
actcatactcatagattggactcaa

SEQ ID NO: 289361 - DNA, 25 bp, Artificial
  probe
  misc_feature (1)..(25): SEQ ID NO: 1287; WAN024CJ5; Start 115; Stop 139
caactcatactcatagattggactc

SEQ ID NO: 289362 - DNA, 25 bp, Artificial
  probe
  misc_feature (1)..(25): SEQ ID NO: 1287; WAN024CJ5; Start 556; Stop 580
gctcataggaatactgtatcaggag

SEQ ID NO: 289363 - DNA, 25 bp, Artificial
  probe
  misc_feature (1)..(25): SEQ ID NO: 1287; WAN024CJ5; Start 557; Stop 581
ctcataggaatactgtatcaggaga

SEQ ID NO: 289364 - DNA, 25 bp, Artificial
  probe
  misc_feature (1)..(25): SEQ ID NO: 1287; WAN024CJ5; Start 742; Stop 766
gattcgatacctgactactcactaa

SEQ ID NO: 289365 - DNA, 25 bp, Artificial
  probe
  misc_feature (1)..(25): SEQ ID NO: 1287; WAN024CJ5; Start 584; Stop 608
ttggatgcttatctaacacacgaaa

SEQ ID NO: 289366 - DNA, 25 bp, Artificial
  probe
  misc_feature (1)..(25): SEQ ID NO: 1287; WAN024CJ5; Start 583; Stop 607
tttggatgcttatctaacacacgaa

SEQ ID NO: 289367 - DNA, 25 bp, Artificial
  probe
  misc_feature (1)..(25): SEQ ID NO: 1287; WAN024CJ5; Start 913; Stop 937
tccactgctgaagaaataaacaatt

SEQ ID NO: 289368 - DNA, 25 bp, Artificial
  probe
  misc_feature (1)..(25): SEQ ID NO: 1287; WAN024CJ5; Start 741; Stop 765
cgattcgatacctgactactcacta

SEQ ID NO: 289369 - DNA, 25 bp, Artificial
  probe
  misc_feature (1)..(25): SEQ ID NO: 1287; WAN024CJ5; Start 912; Stop 936
ttccactgctgaagaaataaacaat

SEQ ID NO: 289370 - DNA, 25 bp, Artificial
  probe
  misc_feature (1)..(25): SEQ ID NO: 1287; WAN024CJ5; Start 911; Stop 935
gttccactgctgaagaaataaacaa

SEQ ID NO: 289371 - DNA, 25 bp, Artificial
  probe
  misc_feature (1)..(25): SEQ ID NO: 1287; WAN024CJ5; Start 558; Stop 582
tcataggaatactgtatcaggagat

SEQ ID NO: 289372 - DNA, 25 bp, Artificial
  probe
  misc_feature (1)..(25): SEQ ID NO: 1287; WAN024CJ5; Start 555; Stop 579
agctcataggaatactgtatcagga

SEQ ID NO: 289373 - DNA, 25 bp, Artificial
  probe
  misc_feature (1)..(25): SEQ ID NO: 1287; WAN024CJ5; Start 554; Stop 578
aagctcataggaatactgtatcagg

SEQ ID NO: 289374 - DNA, 25 bp, Artificial
  probe
  misc_feature (1)..(25): SEQ ID NO: 1287; WAN024CJ5; Start 552; Stop 576
acaagctcataggaatactgtatca

SEQ ID NO: 289375 - DNA, 25 bp, Artificial
  probe
  misc_feature (1)..(25): SEQ ID NO: 1287; WAN024CJ5; Start 617; Stop 641
gaagacatttggaacaagaaggtaa

SEQ ID NO: 289376 - DNA, 25 bp, Artificial
  probe
  misc_feature (1)..(25): SEQ ID NO: 1287; WAN024CJ5; Start 585; Stop 609
tggatgcttatctaacacacgaaag

SEQ ID NO: 289377 - DNA, 25 bp, Artificial
  probe
  misc_feature (1)..(25): SEQ ID NO: 1287; WAN024CJ5; Start 190; Stop 214
caaattgaccctgaatctacacaca

SEQ ID NO: 289378 - DNA, 25 bp, Artificial
  probe
  misc_feature (1)..(25): SEQ ID NO: 1287; WAN024CJ5; Start 191; Stop 215
aaattgaccctgaatctacacacaa

SEQ ID NO: 289379 - DNA, 25 bp, Artificial
  probe
  misc_feature (1)..(25): SEQ ID NO: 1287; WAN024CJ5; Start 616; Stop 640
ggaagacatttggaacaagaaggta

SEQ ID NO: 289380 - DNA, 25 bp, Artificial
  probe
  misc_feature (1)..(25): SEQ ID NO: 1287; WAN024CJ5; Start 199; Stop 223
cctgaatctacacacaatcaattat

SEQ ID NO: 289381 - DNA, 25 bp, Artificial
  probe
  misc_feature (1)..(25): SEQ ID NO: 1287; WAN024CJ5; Start 197; Stop 221
accctgaatctacacacaatcaatt

SEQ ID NO: 289382 - DNA, 25 bp, Artificial
  probe
  misc_feature (1)..(25): SEQ ID NO: 1287; WAN024CJ5; Start 110; Stop 134
ctgggcaactcatactcatagattg

SEQ ID NO: 289383 - DNA, 25 bp, Artificial
  probe
  misc_feature (1)..(25): SEQ ID NO: 1287; WAN024CJ5; Start 196; Stop 220
gaccctgaatctacacacaatcaat

SEQ ID NO: 289384 - DNA, 25 bp, Artificial
  probe
  misc_feature (1)..(25): SEQ ID NO: 1287; WAN024CJ5; Start 894; Stop 918
aagagttaatttacctcgttccact

SEQ ID NO: 289385 - DNA, 25 bp, Artificial
  probe
  misc_feature (1)..(25): SEQ ID NO: 1287; WAN024CJ5; Start 908; Stop 932
ctcgttccactgctgaagaaataaa

SEQ ID NO: 289386 - DNA, 25 bp, Artificial
  probe
  misc_feature (1)..(25): SEQ ID NO: 1287; WAN024CJ5; Start 618; Stop 642
aagacatttggaacaagaaggtaat

SEQ ID NO: 289387 - DNA, 25 bp, Artificial
  probe
  misc_feature (1)..(25): SEQ ID NO: 1287; WAN024CJ5; Start 591; Stop 615
cttatctaacacacgaaaggctcag

SEQ ID NO: 289388 - DNA, 25 bp, Artificial
  probe
  misc_feature (1)..(25): SEQ ID NO: 1287; WAN024CJ5; Start 895; Stop 919
agagttaatttacctcgttccactg

SEQ ID NO: 289389 - DNA, 25 bp, Artificial
  probe
  misc_feature (1)..(25): SEQ ID NO: 1287; WAN024CJ5; Start 553; Stop 577
caagctcataggaatactgtatcag

SEQ ID NO: 289390 - DNA, 25 bp, Artificial
  probe
  misc_feature (1)..(25): SEQ ID NO: 1288; WAN024B2H; Start 308; Stop 332
cttatctagcagactatatcaaacg

SEQ ID NO: 289391 - DNA, 25 bp, Artificial
  probe
  misc_feature (1)..(25): SEQ ID NO: 1288; WAN024B2H; Start 307; Stop 331
ccttatctagcagactatatcaaac

SEQ ID NO: 289392 - DNA, 25 bp, Artificial
  probe
  misc_feature (1)..(25): SEQ ID NO: 1288; WAN024B2H; Start 554; Stop 578
aagatatcacaggggaagctaaatt

SEQ ID NO: 289393 - DNA, 25 bp, Artificial
  probe
  misc_feature (1)..(25): SEQ ID NO: 1288; WAN024B2H; Start 555; Stop 579
agatatcacaggggaagctaaattc

SEQ ID NO: 289394 - DNA, 25 bp, Artificial
  probe
  misc_feature (1)..(25): SEQ ID NO: 1288; WAN024B2H; Start 595; Stop 619
acccgtatcggaacattttaactaa

SEQ ID NO: 289395 - DNA, 25 bp, Artificial
  probe
  misc_feature (1)..(25): SEQ ID NO: 1288; WAN024B2H; Start 596; Stop 620
cccgtatcggaacattttaactaat

SEQ ID NO: 289396 - DNA, 25 bp, Artificial
  probe
  misc_feature (1)..(25): SEQ ID NO: 1288; WAN024B2H; Start 591; Stop 615
aatcacccgtatcggaacattttaa

SEQ ID NO: 289397 - DNA, 25 bp, Artificial
  probe
  misc_feature (1)..(25): SEQ ID NO: 1288; WAN024B2H; Start 594; Stop 618
cacccgtatcggaacattttaacta

SEQ ID NO: 289398 - DNA, 25 bp, Artificial
  probe
  misc_feature (1)..(25): SEQ ID NO: 1288; WAN024B2H; Start 592; Stop 616
atcacccgtatcggaacattttaac

SEQ ID NO: 289399 - DNA, 25 bp, Artificial
  probe
  misc_feature (1)..(25): SEQ ID NO: 1288; WAN024B2H; Start 590; Stop 614
caatcacccgtatcggaacatttta

SEQ ID NO: 289400 - DNA, 25 bp, Artificial
  probe
  misc_feature (1)..(25): SEQ ID NO: 1288; WAN024B2H; Start 593; Stop 617
tcacccgtatcggaacattttaact

SEQ ID NO: 289401 - DNA, 25 bp, Artificial
  probe
  misc_feature (1)..(25): SEQ ID NO: 1288; WAN024B2H; Start 556; Stop 580
gatatcacaggggaagctaaattcc

SEQ ID NO: 289402 - DNA, 25 bp, Artificial
  probe
  misc_feature (1)..(25): SEQ ID NO: 1288; WAN024B2H; Start 557; Stop 581
atatcacaggggaagctaaattccg

SEQ ID NO: 289403 - DNA, 25 bp, Artificial
  probe
  misc_feature (1)..(25): SEQ ID NO: 1288; WAN024B2H; Start 92; Stop 116
atgttcgcgtagaaggacattccat

SEQ ID NO: 289404 - DNA, 25 bp, Artificial
  probe
  misc_feature (1)..(25): SEQ ID NO: 1288; WAN024B2H; Start 589; Stop 613
ccaatcacccgtatcggaacatttt

SEQ ID NO: 289405 - DNA, 25 bp, Artificial
  probe
  misc_feature (1)..(25): SEQ ID NO: 1288; WAN024B2H; Start 82; Stop 106
ttttggagcaatgttcgcgtagaag

SEQ ID NO: 289406 - DNA, 25 bp, Artificial
  probe
  misc_feature (1)..(25): SEQ ID NO: 1288; WAN024B2H; Start 90; Stop 114
caatgttcgcgtagaaggacattcc

SEQ ID NO: 289407 - DNA, 25 bp, Artificial
  probe
  misc_feature (1)..(25): SEQ ID NO: 1288; WAN024B2H; Start 558; Stop 582
tatcacaggggaagctaaattccgc

SEQ ID NO: 289408 - DNA, 25 bp, Artificial
  probe
  misc_feature (1)..(25): SEQ ID NO: 1288; WAN024B2H; Start 91; Stop 115
aatgttcgcgtagaaggacattcca

SEQ ID NO: 289409 - DNA, 25 bp, Artificial
  probe
  misc_feature (1)..(25): SEQ ID NO: 1288; WAN024B2H; Start 89; Stop 113
gcaatgttcgcgtagaaggacattc

SEQ ID NO: 289410 - DNA, 25 bp, Artificial
  probe
  misc_feature (1)..(25): SEQ ID NO: 1288; WAN024B2H; Start 88; Stop 112
agcaatgttcgcgtagaaggacatt

SEQ ID NO: 289411 - DNA, 25 bp, Artificial
  probe
  misc_feature (1)..(25): SEQ ID NO: 1289; WAN024G3O; Start 100; Stop 124
ggtatgcctgttattctcttctcaa

SEQ ID NO: 289412 - DNA, 25 bp, Artificial
  probe
  misc_feature (1)..(25): SEQ ID NO: 1289; WAN024G3O; Start 62; Stop 86
atatctatcttcgtgctattcgtga

SEQ ID NO: 289413 - DNA, 25 bp, Artificial
  probe
  misc_feature (1)..(25): SEQ ID NO: 1289; WAN024G3O; Start 64; Stop 88
atctatcttcgtgctattcgtgatg

SEQ ID NO: 289414 - DNA, 25 bp, Artificial
  probe
  misc_feature (1)..(25): SEQ ID NO: 1289; WAN024G3O; Start 63; Stop 87
tatctatcttcgtgctattcgtgat

SEQ ID NO: 289415 - DNA, 25 bp, Artificial
  probe
  misc_feature (1)..(25): SEQ ID NO: 1289; WAN024G3O; Start 54; Stop 78
atctcgtaatatctatcttcgtgct

SEQ ID NO: 289416 - DNA, 25 bp, Artificial
  probe
  misc_feature (1)..(25): SEQ ID NO: 1289; WAN024G3O; Start 437; Stop 461
ttgttactgtagccatctataaggt

SEQ ID NO: 289417 - DNA, 25 bp, Artificial
  probe
  misc_feature (1)..(25): SEQ ID NO: 1289; WAN024G3O; Start 104; Stop 128
tgcctgttattctcttctcaagtat

SEQ ID NO: 289418 - DNA, 25 bp, Artificial
  probe
  misc_feature (1)..(25): SEQ ID NO: 1289; WAN024G3O; Start 103; Stop 127
atgcctgttattctcttctcaagta

SEQ ID NO: 289419 - DNA, 25 bp, Artificial
  probe
  misc_feature (1)..(25): SEQ ID NO: 1289; WAN024G3O; Start 102; Stop 126
tatgcctgttattctcttctcaagt

SEQ ID NO: 289420 - DNA, 25 bp, Artificial
  probe
  misc_feature (1)..(25): SEQ ID NO: 1289; WAN024G3O; Start 1155; Stop 1179
cttccaagtgctatcattcattctt

SEQ ID NO: 289421 - DNA, 25 bp, Artificial
  probe
  misc_feature (1)..(25): SEQ ID NO: 1289; WAN024G3O; Start 101; Stop 125
gtatgcctgttattctcttctcaag

SEQ ID NO: 289422 - DNA, 25 bp, Artificial
  probe
  misc_feature (1)..(25): SEQ ID NO: 1289; WAN024G3O; Start 105; Stop 129
gcctgttattctcttctcaagtatc

SEQ ID NO: 289423 - DNA, 25 bp, Artificial
  probe
  misc_feature (1)..(25): SEQ ID NO: 1289; WAN024G3O; Start 55; Stop 79
tctcgtaatatctatcttcgtgcta

SEQ ID NO: 289424 - DNA, 25 bp, Artificial
  probe
  misc_feature (1)..(25): SEQ ID NO: 1289; WAN024G3O; Start 61; Stop 85
aatatctatcttcgtgctattcgtg

SEQ ID NO: 289425 - DNA, 25 bp, Artificial
  probe
  misc_feature (1)..(25): SEQ ID NO: 1289; WAN024G3O; Start 1150; Stop 1174
actaacttccaagtgctatcattca

SEQ ID NO: 289426 - DNA, 25 bp, Artificial
  probe
  misc_feature (1)..(25): SEQ ID NO: 1289; WAN024G3O; Start 1154; Stop 1178
acttccaagtgctatcattcattct

SEQ ID NO: 289427 - DNA, 25 bp, Artificial
  probe
  misc_feature (1)..(25): SEQ ID NO: 1289; WAN024G3O; Start 1153; Stop 1177
aacttccaagtgctatcattcattc

SEQ ID NO: 289428 - DNA, 25 bp, Artificial
  probe
  misc_feature (1)..(25): SEQ ID NO: 1289; WAN024G3O; Start 67; Stop 91
tatcttcgtgctattcgtgatggtt

SEQ ID NO: 289429 - DNA, 25 bp, Artificial
  probe
  misc_feature (1)..(25): SEQ ID NO: 1289; WAN024G3O; Start 56; Stop 80
ctcgtaatatctatcttcgtgctat

SEQ ID NO: 289430 - DNA, 25 bp, Artificial
  probe
  misc_feature (1)..(25): SEQ ID NO: 1289; WAN024G3O; Start 53; Stop 77
tatctcgtaatatctatcttcgtgc

SEQ ID NO: 289431 - DNA, 25 bp, Artificial
  probe
  misc_feature (1)..(25): SEQ ID NO: 1289; WAN024G3O; Start 1149; Stop 1173
aactaacttccaagtgctatcattc

SEQ ID NO: 289432 - DNA, 25 bp, Artificial
  probe
  misc_feature (1)..(25): SEQ ID NO: 1289; WAN024G3O; Start 1148; Stop 1172
gaactaacttccaagtgctatcatt

SEQ ID NO: 289433 - DNA, 25 bp, Artificial
  probe
  misc_feature (1)..(25): SEQ ID NO: 1289; WAN024G3O; Start 170; Stop 194
aatggtctgatgaagttgtagcctt

SEQ ID NO: 289434 - DNA, 25 bp, Artificial
  probe
  misc_feature (1)..(25): SEQ ID NO: 1289; WAN024G3O; Start 1151; Stop 1175
ctaacttccaagtgctatcattcat

SEQ ID NO: 289435 - DNA, 25 bp, Artificial
  probe
  misc_feature (1)..(25): SEQ ID NO: 1289; WAN024G3O; Start 65; Stop 89
tctatcttcgtgctattcgtgatgg

SEQ ID NO: 289436 - DNA, 25 bp, Artificial
  probe
  misc_feature (1)..(25): SEQ ID NO: 1289; WAN024G3O; Start 1160; Stop 1184
aagtgctatcattcattcttgctgc

SEQ ID NO: 289437 - DNA, 25 bp, Artificial
  probe
  misc_feature (1)..(25): SEQ ID NO: 1289; WAN024G3O; Start 99; Stop 123
aggtatgcctgttattctcttctca

SEQ ID NO: 289438 - DNA, 25 bp, Artificial
  probe
  misc_feature (1)..(25): SEQ ID NO: 1289; WAN024G3O; Start 1152; Stop 1176
taacttccaagtgctatcattcatt

SEQ ID NO: 289439 - DNA, 25 bp, Artificial
  probe
  misc_feature (1)..(25): SEQ ID NO: 1289; WAN024G3O; Start 66; Stop 90
ctatcttcgtgctattcgtgatggt

SEQ ID NO: 289440 - DNA, 25 bp, Artificial
  probe
  misc_feature (1)..(25): SEQ ID NO: 1289; WAN024G3O; Start 106; Stop 130
cctgttattctcttctcaagtatct

SEQ ID NO: 289441 - DNA, 25 bp, Artificial
  probe
  misc_feature (1)..(25): SEQ ID NO: 1289; WAN024G3O; Start 214; Stop 238
tattctatgggtattctggctctct

SEQ ID NO: 289442 - DNA, 25 bp, Artificial
  probe
  misc_feature (1)..(25): SEQ ID NO: 1289; WAN024G3O; Start 213; Stop 237
ctattctatgggtattctggctctc

SEQ ID NO: 289443 - DNA, 25 bp, Artificial
  probe
  misc_feature (1)..(25): SEQ ID NO: 1289; WAN024G3O; Start 433; Stop 457
gcctttgttactgtagccatctata

SEQ ID NO: 289444 - DNA, 25 bp, Artificial
  probe
  misc_feature (1)..(25): SEQ ID NO: 1290; WAN024C5D; Start 1546; Stop 1570
cgcaatccatactctatcattctct

SEQ ID NO: 289445 - DNA, 25 bp, Artificial
  probe
  misc_feature (1)..(25): SEQ ID NO: 1290; WAN024C5D; Start 1545; Stop 1569
tcgcaatccatactctatcattctc

SEQ ID NO: 289446 - DNA, 25 bp, Artificial
  probe
  misc_feature (1)..(25): SEQ ID NO: 1290; WAN024C5D; Start 1544; Stop 1568
gtcgcaatccatactctatcattct

SEQ ID NO: 289447 - DNA, 25 bp, Artificial
  probe
  misc_feature (1)..(25): SEQ ID NO: 1290; WAN024C5D; Start 1514; Stop 1538
acaatagcaataccttaacagaacg

SEQ ID NO: 289448 - DNA, 25 bp, Artificial
  probe
  misc_feature (1)..(25): SEQ ID NO: 1290; WAN024C5D; Start 1713; Stop 1737
ctatgaagccaacttgacagaagat

SEQ ID NO: 289449 - DNA, 25 bp, Artificial
  probe
  misc_feature (1)..(25): SEQ ID NO: 1290; WAN024C5D; Start 2004; Stop 2028
aattcgtgataaggtgacagacttc

SEQ ID NO: 289450 - DNA, 25 bp, Artificial
  probe
  misc_feature (1)..(25): SEQ ID NO: 1290; WAN024C5D; Start 1714; Stop 1738
tatgaagccaacttgacagaagatg

SEQ ID NO: 289451 - DNA, 25 bp, Artificial
  probe
  misc_feature (1)..(25): SEQ ID NO: 1290; WAN024C5D; Start 1667; Stop 1691
acttcaagaacactgtcattattgc

SEQ ID NO: 289452 - DNA, 25 bp, Artificial
  probe
  misc_feature (1)..(25): SEQ ID NO: 1290; WAN024C5D; Start 1543; Stop 1567
cgtcgcaatccatactctatcattc

SEQ ID NO: 289453 - DNA, 25 bp, Artificial
  probe
  misc_feature (1)..(25): SEQ ID NO: 1290; WAN024C5D; Start 867; Stop 891
agcggtggattattctgttcaatac

SEQ ID NO: 289454 - DNA, 25 bp, Artificial
  probe
  misc_feature (1)..(25): SEQ ID NO: 1290; WAN024C5D; Start 1542; Stop 1566
tcgtcgcaatccatactctatcatt

SEQ ID NO: 289455 - DNA, 25 bp, Artificial
  probe
  misc_feature (1)..(25): SEQ ID NO: 1290; WAN024C5D; Start 1541; Stop 1565
ttcgtcgcaatccatactctatcat

SEQ ID NO: 289456 - DNA, 25 bp, Artificial
  probe
  misc_feature (1)..(25): SEQ ID NO: 1290; WAN024C5D; Start 705; Stop 729
ataccgtaacaccatcttgaagaat

SEQ ID NO: 289457 - DNA, 25 bp, Artificial
  probe
  misc_feature (1)..(25): SEQ ID NO: 1290; WAN024C5D; Start 1668; Stop 1692
cttcaagaacactgtcattattgcg

SEQ ID NO: 289458 - DNA, 25 bp, Artificial
  probe
  misc_feature (1)..(25): SEQ ID NO: 1290; WAN024C5D; Start 704; Stop 728
aataccgtaacaccatcttgaagaa

SEQ ID NO: 289459 - DNA, 25 bp, Artificial
  probe
  misc_feature (1)..(25): SEQ ID NO: 1290; WAN024C5D; Start 1547; Stop 1571
gcaatccatactctatcattctctt

SEQ ID NO: 289460 - DNA, 25 bp, Artificial
  probe
  misc_feature (1)..(25): SEQ ID NO: 1290; WAN024C5D; Start 1509; Stop 1533
tgatgacaatagcaataccttaaca

SEQ ID NO: 289461 - DNA, 25 bp, Artificial
  probe
  misc_feature (1)..(25): SEQ ID NO: 1290; WAN024C5D; Start 703; Stop 727
gaataccgtaacaccatcttgaaga

SEQ ID NO: 289462 - DNA, 25 bp, Artificial
  probe
  misc_feature (1)..(25): SEQ ID NO: 1290; WAN024C5D; Start 702; Stop 726
cgaataccgtaacaccatcttgaag

SEQ ID NO: 289463 - DNA, 25 bp, Artificial
  probe
  misc_feature (1)..(25): SEQ ID NO: 1290; WAN024C5D; Start 1669; Stop 1693
ttcaagaacactgtcattattgcga

SEQ ID NO: 289464 - DNA, 25 bp, Artificial
  probe
  misc_feature (1)..(25): SEQ ID NO: 1290; WAN024C5D; Start 1512; Stop 1536
tgacaatagcaataccttaacagaa

SEQ ID NO: 289465 - DNA, 25 bp, Artificial
  probe
  misc_feature (1)..(25): SEQ ID NO: 1290; WAN024C5D; Start 878; Stop 902
attctgttcaatacattcctcaacg

SEQ ID NO: 289466 - DNA, 25 bp, Artificial
  probe
  misc_feature (1)..(25): SEQ ID NO: 1290; WAN024C5D; Start 819; Stop 843
ctatcaacaacaccacaatgtcatc

SEQ ID NO: 289467 - DNA, 25 bp, Artificial
  probe
  misc_feature (1)..(25): SEQ ID NO: 1290; WAN024C5D; Start 706; Stop 730
taccgtaacaccatcttgaagaatg

SEQ ID NO: 289468 - DNA, 25 bp, Artificial
  probe
  misc_feature (1)..(25): SEQ ID NO: 1290; WAN024C5D; Start 820; Stop 844
tatcaacaacaccacaatgtcatct

SEQ ID NO: 289469 - DNA, 25 bp, Artificial
  probe
  misc_feature (1)..(25): SEQ ID NO: 1290; WAN024C5D; Start 818; Stop 842
tctatcaacaacaccacaatgtcat

SEQ ID NO: 289470 - DNA, 25 bp, Artificial
  probe
  misc_feature (1)..(25): SEQ ID NO: 1290; WAN024C5D; Start 869; Stop 893
cggtggattattctgttcaatacat

SEQ ID NO: 289471 - DNA, 25 bp, Artificial
  probe
  misc_feature (1)..(25): SEQ ID NO: 1290; WAN024C5D; Start 1513; Stop 1537
gacaatagcaataccttaacagaac

SEQ ID NO: 289472 - DNA, 25 bp, Artificial
  probe
  misc_feature (1)..(25): SEQ ID NO: 1290; WAN024C5D; Start 1511; Stop 1535
atgacaatagcaataccttaacaga

SEQ ID NO: 289473 - DNA, 25 bp, Artificial
  probe
  misc_feature (1)..(25): SEQ ID NO: 1290; WAN024C5D; Start 817; Stop 841
ctctatcaacaacaccacaatgtca

SEQ ID NO: 289474 - DNA, 25 bp, Artificial
  probe
  misc_feature (1)..(25): SEQ ID NO: 1290; WAN024C5D; Start 1510; Stop 1534
gatgacaatagcaataccttaacag

SEQ ID NO: 289475 - DNA, 25 bp, Artificial
  probe
  misc_feature (1)..(25): SEQ ID NO: 1290; WAN024C5D; Start 868; Stop 892
gcggtggattattctgttcaataca

SEQ ID NO: 289476 - DNA, 25 bp, Artificial
  probe
  misc_feature (1)..(25): SEQ ID NO: 1290; WAN024C5D; Start 821; Stop 845
atcaacaacaccacaatgtcatctt

SEQ ID NO: 289477 - DNA, 25 bp, Artificial
  probe
  misc_feature (1)..(25): SEQ ID NO: 1291; WAN024G33; Start 142; Stop 166
gaaactcacatcaatactggcaaag

SEQ ID NO: 289478 - DNA, 25 bp, Artificial
  probe
  misc_feature (1)..(25): SEQ ID NO: 1291; WAN024G33; Start 138; Stop 162
aaatgaaactcacatcaatactggc

SEQ ID NO: 289479 - DNA, 25 bp, Artificial
  probe
  misc_feature (1)..(25): SEQ ID NO: 1291; WAN024G33; Start 130; Stop 154
actaagggaaatgaaactcacatca

SEQ ID NO: 289480 - DNA, 25 bp, Artificial
  probe
  misc_feature (1)..(25): SEQ ID NO: 1291; WAN024G33; Start 128; Stop 152
agactaagggaaatgaaactcacat

SEQ ID NO: 289481 - DNA, 25 bp, Artificial
  probe
  misc_feature (1)..(25): SEQ ID NO: 1291; WAN024G33; Start 129; Stop 153
gactaagggaaatgaaactcacatc

SEQ ID NO: 289482 - DNA, 25 bp, Artificial
  probe
  misc_feature (1)..(25): SEQ ID NO: 1291; WAN024G33; Start 126; Stop 150
tcagactaagggaaatgaaactcac

SEQ ID NO: 289483 - DNA, 25 bp, Artificial
  probe
  misc_feature (1)..(25): SEQ ID NO: 1291; WAN024G33; Start 125; Stop 149
atcagactaagggaaatgaaactca

SEQ ID NO: 289484 - DNA, 25 bp, Artificial
  probe
  misc_feature (1)..(25): SEQ ID NO: 1291; WAN024G33; Start 135; Stop 159
gggaaatgaaactcacatcaatact

SEQ ID NO: 289485 - DNA, 25 bp, Artificial
  probe
  misc_feature (1)..(25): SEQ ID NO: 1291; WAN024G33; Start 134; Stop 158
agggaaatgaaactcacatcaatac

SEQ ID NO: 289486 - DNA, 25 bp, Artificial
  probe
  misc_feature (1)..(25): SEQ ID NO: 1291; WAN024G33; Start 127; Stop 151
cagactaagggaaatgaaactcaca

SEQ ID NO: 289487 - DNA, 25 bp, Artificial
  probe
  misc_feature (1)..(25): SEQ ID NO: 1291; WAN024G33; Start 131; Stop 155
ctaagggaaatgaaactcacatcaa

SEQ ID NO: 289488 - DNA, 25 bp, Artificial
  probe
  misc_feature (1)..(25): SEQ ID NO: 1291; WAN024G33; Start 140; Stop 164
atgaaactcacatcaatactggcaa

SEQ ID NO: 289489 - DNA, 25 bp, Artificial
  probe
  misc_feature (1)..(25): SEQ ID NO: 1291; WAN024G33; Start 139; Stop 163
aatgaaactcacatcaatactggca

SEQ ID NO: 289490 - DNA, 25 bp, Artificial
  probe
  misc_feature (1)..(25): SEQ ID NO: 1291; WAN024G33; Start 141; Stop 165
tgaaactcacatcaatactggcaaa

SEQ ID NO: 289491 - DNA, 25 bp, Artificial
  probe
  misc_feature (1)..(25): SEQ ID NO: 1291; WAN024G33; Start 124; Stop 148
aatcagactaagggaaatgaaactc

SEQ ID NO: 289492 - DNA, 25 bp, Artificial
  probe
  misc_feature (1)..(25): SEQ ID NO: 1291; WAN024G33; Start 133; Stop 157
aagggaaatgaaactcacatcaata

SEQ ID NO: 289493 - DNA, 25 bp, Artificial
  probe
  misc_feature (1)..(25): SEQ ID NO: 1291; WAN024G33; Start 132; Stop 156
taagggaaatgaaactcacatcaat

SEQ ID NO: 289494 - DNA, 25 bp, Artificial
  probe
  misc_feature (1)..(25): SEQ ID NO: 1291; WAN024G33; Start 137; Stop 161
gaaatgaaactcacatcaatactgg

SEQ ID NO: 289495 - DNA, 25 bp, Artificial
  probe
  misc_feature (1)..(25): SEQ ID NO: 1291; WAN024G33; Start 136; Stop 160
ggaaatgaaactcacatcaatactg

SEQ ID NO: 289496 - DNA, 25 bp, Artificial
  probe
  misc_feature (1)..(25): SEQ ID NO: 1291; WAN024G33; Start 123; Stop 147
aaatcagactaagggaaatgaaact

SEQ ID NO: 289497 - DNA, 25 bp, Artificial
  probe
  misc_feature (1)..(25): SEQ ID NO: 1291; WAN024G33; Start 143; Stop 167
aaactcacatcaatactggcaaagc

SEQ ID NO: 289498 - DNA, 25 bp, Artificial
  probe
  misc_feature (1)..(25): SEQ ID NO: 1291; WAN024G33; Start 7; Stop 31
cttagcatctcgaataattccattt

SEQ ID NO: 289499 - DNA, 25 bp, Artificial
  probe
  misc_feature (1)..(25): SEQ ID NO: 1291; WAN024G33; Start 118; Stop 142
tggcaaaatcagactaagggaaatg

SEQ ID NO: 289500 - DNA, 25 bp, Artificial
  probe
  misc_feature (1)..(25): SEQ ID NO: 1291; WAN024G33; Start 120; Stop 144
gcaaaatcagactaagggaaatgaa

SEQ ID NO: 289501 - DNA, 25 bp, Artificial
  probe
  misc_feature (1)..(25): SEQ ID NO: 1291; WAN024G33; Start 144; Stop 168
aactcacatcaatactggcaaagct

SEQ ID NO: 289502 - DNA, 25 bp, Artificial
  probe
  misc_feature (1)..(25): SEQ ID NO: 1291; WAN024G33; Start 207; Stop 231
aattgaactgctccatgctgacaac

SEQ ID NO: 289503 - DNA, 25 bp, Artificial
  probe
  misc_feature (1)..(25): SEQ ID NO: 1291; WAN024G33; Start 119; Stop 143
ggcaaaatcagactaagggaaatga

SEQ ID NO: 289504 - DNA, 25 bp, Artificial
  probe
  misc_feature (1)..(25): SEQ ID NO: 1291; WAN024G33; Start 117; Stop 141
ctggcaaaatcagactaagggaaat

SEQ ID NO: 289505 - DNA, 25 bp, Artificial
  probe
  misc_feature (1)..(25): SEQ ID NO: 1291; WAN024G33; Start 145; Stop 169
actcacatcaatactggcaaagctc

SEQ ID NO: 289506 - DNA, 25 bp, Artificial
  probe
  misc_feature (1)..(25): SEQ ID NO: 1291; WAN024G33; Start 206; Stop 230
aaattgaactgctccatgctgacaa

SEQ ID NO: 289507 - DNA, 25 bp, Artificial
  probe
  misc_feature (1)..(25): SEQ ID NO: 1291; WAN024G33; Start 122; Stop 146
aaaatcagactaagggaaatgaaac

SEQ ID NO: 289508 - DNA, 25 bp, Artificial
  probe
  misc_feature (1)..(25): SEQ ID NO: 1291; WAN024G33; Start 121; Stop 145
caaaatcagactaagggaaatgaaa

SEQ ID NO: 289509 - DNA, 25 bp, Artificial
  probe
  misc_feature (1)..(25): SEQ ID NO: 1291; WAN024G33; Start 208; Stop 232
attgaactgctccatgctgacaact

SEQ ID NO: 289510 - DNA, 25 bp, Artificial
  probe
  misc_feature (1)..(25): SEQ ID NO: 1292; WAN024B3J; Start 640; Stop 664
tttgaaacgatgggaattgatgtaa

SEQ ID NO: 289511 - DNA, 25 bp, Artificial
  probe
  misc_feature (1)..(25): SEQ ID NO: 1292; WAN024B3J; Start 639; Stop 663
gtttgaaacgatgggaattgatgta

SEQ ID NO: 289512 - DNA, 25 bp, Artificial
  probe
  misc_feature (1)..(25): SEQ ID NO: 1292; WAN024B3J; Start 279; Stop 303
tatttccagacgaggcatgatttac

SEQ ID NO: 289513 - DNA, 25 bp, Artificial
  probe
  misc_feature (1)..(25): SEQ ID NO: 1292; WAN024B3J; Start 637; Stop 661
cagtttgaaacgatgggaattgatg

SEQ ID NO: 289514 - DNA, 25 bp, Artificial
  probe
  misc_feature (1)..(25): SEQ ID NO: 1292; WAN024B3J; Start 638; Stop 662
agtttgaaacgatgggaattgatgt

SEQ ID NO: 289515 - DNA, 25 bp, Artificial
  probe
  misc_feature (1)..(25): SEQ ID NO: 1292; WAN024B3J; Start 636; Stop 660
tcagtttgaaacgatgggaattgat

SEQ ID NO: 289516 - DNA, 25 bp, Artificial
  probe
  misc_feature (1)..(25): SEQ ID NO: 1292; WAN024B3J; Start 635; Stop 659
ctcagtttgaaacgatgggaattga

SEQ ID NO: 289517 - DNA, 25 bp, Artificial
  probe
  misc_feature (1)..(25): SEQ ID NO: 1292; WAN024B3J; Start 634; Stop 658
tctcagtttgaaacgatgggaattg

SEQ ID NO: 289518 - DNA, 25 bp, Artificial
  probe
  misc_feature (1)..(25): SEQ ID NO: 1292; WAN024B3J; Start 219; Stop 243
tatcctattctttgcactagcgatt

SEQ ID NO: 289519 - DNA, 25 bp, Artificial
  probe
  misc_feature (1)..(25): SEQ ID NO: 1292; WAN024B3J; Start 218; Stop 242
atatcctattctttgcactagcgat

SEQ ID NO: 289520 - DNA, 25 bp, Artificial
  probe
  misc_feature (1)..(25): SEQ ID NO: 1292; WAN024B3J; Start 217; Stop 241
tatatcctattctttgcactagcga

SEQ ID NO: 289521 - DNA, 25 bp, Artificial
  probe
  misc_feature (1)..(25): SEQ ID NO: 1292; WAN024B3J; Start 280; Stop 304
atttccagacgaggcatgatttact

SEQ ID NO: 289522 - DNA, 25 bp, Artificial
  probe
  misc_feature (1)..(25): SEQ ID NO: 1292; WAN024B3J; Start 281; Stop 305
tttccagacgaggcatgatttactt

SEQ ID NO: 289523 - DNA, 25 bp, Artificial
  probe
  misc_feature (1)..(25): SEQ ID NO: 1292; WAN024B3J; Start 216; Stop 240
atatatcctattctttgcactagcg

SEQ ID NO: 289524 - DNA, 25 bp, Artificial
  probe
  misc_feature (1)..(25): SEQ ID NO: 1292; WAN024B3J; Start 282; Stop 306
ttccagacgaggcatgatttacttc

SEQ ID NO: 289525 - DNA, 25 bp, Artificial
  probe
  misc_feature (1)..(25): SEQ ID NO: 1292; WAN024B3J; Start 215; Stop 239
aatatatcctattctttgcactagc

SEQ ID NO: 289526 - DNA, 25 bp, Artificial
  probe
  misc_feature (1)..(25): SEQ ID NO: 1292; WAN024B3J; Start 283; Stop 307
tccagacgaggcatgatttacttcc

SEQ ID NO: 289527 - DNA, 25 bp, Artificial
  probe
  misc_feature (1)..(25): SEQ ID NO: 1292; WAN024B3J; Start 212; Stop 236
tgaaatatatcctattctttgcact

SEQ ID NO: 289528 - DNA, 25 bp, Artificial
  probe
  misc_feature (1)..(25): SEQ ID NO: 1292; WAN024B3J; Start 284; Stop 308
ccagacgaggcatgatttacttcct

SEQ ID NO: 289529 - DNA, 25 bp, Artificial
  probe
  misc_feature (1)..(25): SEQ ID NO: 1292; WAN024B3J; Start 211; Stop 235
ttgaaatatatcctattctttgcac

SEQ ID NO: 289530 - DNA, 25 bp, Artificial
  probe
  misc_feature (1)..(25): SEQ ID NO: 1293; WAN024C3X; Start 21; Stop 45
cggtcaggcacatagtaagataatt

SEQ ID NO: 289531 - DNA, 25 bp, Artificial
  probe
  misc_feature (1)..(25): SEQ ID NO: 1293; WAN024C3X; Start 20; Stop 44
tcggtcaggcacatagtaagataat

SEQ ID NO: 289532 - DNA, 25 bp, Artificial
  probe
  misc_feature (1)..(25): SEQ ID NO: 1293; WAN024C3X; Start 19; Stop 43
gtcggtcaggcacatagtaagataa

SEQ ID NO: 289533 - DNA, 25 bp, Artificial
  probe
  misc_feature (1)..(25): SEQ ID NO: 1293; WAN024C3X; Start 776; Stop 800
gaggttgtatcatagccttggtaac

SEQ ID NO: 289534 - DNA, 25 bp, Artificial
  probe
  misc_feature (1)..(25): SEQ ID NO: 1293; WAN024C3X; Start 825; Stop 849
agcagaaagattagaagagaaagga

SEQ ID NO: 289535 - DNA, 25 bp, Artificial
  probe
  misc_feature (1)..(25): SEQ ID NO: 1293; WAN024C3X; Start 453; Stop 477
aggatttacagaacttgagatggat

SEQ ID NO: 289536 - DNA, 25 bp, Artificial
  probe
  misc_feature (1)..(25): SEQ ID NO: 1293; WAN024C3X; Start 775; Stop 799
ggaggttgtatcatagccttggtaa

SEQ ID NO: 289537 - DNA, 25 bp, Artificial
  probe
  misc_feature (1)..(25): SEQ ID NO: 1293; WAN024C3X; Start 475; Stop 499
gatttatccgcctatttggtgattg

SEQ ID NO: 289538 - DNA, 25 bp, Artificial
  probe
  misc_feature (1)..(25): SEQ ID NO: 1293; WAN024C3X; Start 827; Stop 851
cagaaagattagaagagaaaggagc

SEQ ID NO: 289539 - DNA, 25 bp, Artificial
  probe
  misc_feature (1)..(25): SEQ ID NO: 1293; WAN024C3X; Start 826; Stop 850
gcagaaagattagaagagaaaggag

SEQ ID NO: 289540 - DNA, 25 bp, Artificial
  probe
  misc_feature (1)..(25): SEQ ID NO: 1293; WAN024C3X; Start 450; Stop 474
cgtaggatttacagaacttgagatg

SEQ ID NO: 289541 - DNA, 25 bp, Artificial
  probe
  misc_feature (1)..(25): SEQ ID NO: 1293; WAN024C3X; Start 426; Stop 450
ccaacctattcgctttatcaagaac

SEQ ID NO: 289542 - DNA, 25 bp, Artificial
  probe
  misc_feature (1)..(25): SEQ ID NO: 1293; WAN024C3X; Start 425; Stop 449
accaacctattcgctttatcaagaa

SEQ ID NO: 289543 - DNA, 25 bp, Artificial
  probe
  misc_feature (1)..(25): SEQ ID NO: 1293; WAN024C3X; Start 452; Stop 476
taggatttacagaacttgagatgga

SEQ ID NO: 289544 - DNA, 25 bp, Artificial
  probe
  misc_feature (1)..(25): SEQ ID NO: 1293; WAN024C3X; Start 427; Stop 451
caacctattcgctttatcaagaacg

SEQ ID NO: 289545 - DNA, 25 bp, Artificial
  probe
  misc_feature (1)..(25): SEQ ID NO: 1293; WAN024C3X; Start 772; Stop 796
ctaggaggttgtatcatagccttgg

SEQ ID NO: 289546 - DNA, 25 bp, Artificial
  probe
  misc_feature (1)..(25): SEQ ID NO: 1293; WAN024C3X; Start 451; Stop 475
gtaggatttacagaacttgagatgg

SEQ ID NO: 289547 - DNA, 25 bp, Artificial
  probe
  misc_feature (1)..(25): SEQ ID NO: 1293; WAN024C3X; Start 454; Stop 478
ggatttacagaacttgagatggatt

SEQ ID NO: 289548 - DNA, 25 bp, Artificial
  probe
  misc_feature (1)..(25): SEQ ID NO: 1293; WAN024C3X; Start 814; Stop 838
gcacaagaactagcagaaagattag

SEQ ID NO: 289549 - DNA, 25 bp, Artificial
  probe
  misc_feature (1)..(25): SEQ ID NO: 1293; WAN024C3X; Start 502; Stop 526
gatacgggtgtttatggtcatactc

SEQ ID NO: 289550 - DNA, 25 bp, Artificial
  probe
  misc_feature (1)..(25): SEQ ID NO: 1293; WAN024C3X; Start 424; Stop 448
gaccaacctattcgctttatcaaga

SEQ ID NO: 289551 - DNA, 25 bp, Artificial
  probe
  misc_feature (1)..(25): SEQ ID NO: 1293; WAN024C3X; Start 153; Stop 177
ttatgaggaggataccttgtccatg

SEQ ID NO: 289552 - DNA, 25 bp, Artificial
  probe
  misc_feature (1)..(25): SEQ ID NO: 1293; WAN024C3X; Start 22; Stop 46
ggtcaggcacatagtaagataattt

SEQ ID NO: 289553 - DNA, 25 bp, Artificial
  probe
  misc_feature (1)..(25): SEQ ID NO: 1293; WAN024C3X; Start 774; Stop 798
aggaggttgtatcatagccttggta

SEQ ID NO: 289554 - DNA, 25 bp, Artificial
  probe
  misc_feature (1)..(25): SEQ ID NO: 1293; WAN024C3X; Start 773; Stop 797
taggaggttgtatcatagccttggt

SEQ ID NO: 289555 - DNA, 25 bp, Artificial
  probe
  misc_feature (1)..(25): SEQ ID NO: 1293; WAN024C3X; Start 423; Stop 447
tgaccaacctattcgctttatcaag

SEQ ID NO: 289556 - DNA, 25 bp, Artificial
  probe
  misc_feature (1)..(25): SEQ ID NO: 1293; WAN024C3X; Start 815; Stop 839
cacaagaactagcagaaagattaga

SEQ ID NO: 289557 - DNA, 25 bp, Artificial
  probe
  misc_feature (1)..(25): SEQ ID NO: 1293; WAN024C3X; Start 813; Stop 837
cgcacaagaactagcagaaagatta

SEQ ID NO: 289558 - DNA, 25 bp, Artificial
  probe
  misc_feature (1)..(25): SEQ ID NO: 1293; WAN024C3X; Start 18; Stop 42
tgtcggtcaggcacatagtaagata

SEQ ID NO: 289559 - DNA, 25 bp, Artificial
  probe
  misc_feature (1)..(25): SEQ ID NO: 1293; WAN024C3X; Start 824; Stop 848
tagcagaaagattagaagagaaagg

SEQ ID NO: 289560 - DNA, 25 bp, Artificial
  probe
  misc_feature (1)..(25): SEQ ID NO: 1293; WAN024C3X; Start 422; Stop 446
gtgaccaacctattcgctttatcaa

SEQ ID NO: 289561 - DNA, 25 bp, Artificial
  probe
  misc_feature (1)..(25): SEQ ID NO: 1293; WAN024C3X; Start 476; Stop 500
atttatccgcctatttggtgattgc

SEQ ID NO: 289562 - DNA, 25 bp, Artificial
  probe
  misc_feature (1)..(25): SEQ ID NO: 1293; WAN024C3X; Start 508; Stop 532
ggtgtttatggtcatactcgtgaag

SEQ ID NO: 289563 - DNA, 25 bp, Artificial
  probe
  misc_feature (1)..(25): SEQ ID NO: 1294; WAN024E2F; Start 250; Stop 274
gactggatgacttgtatctgttgtg

SEQ ID NO: 289564 - DNA, 25 bp, Artificial
  probe
  misc_feature (1)..(25): SEQ ID NO: 1294; WAN024E2F; Start 79; Stop 103
gttggtcaggaagtagatattatcg

SEQ ID NO: 289565 - DNA, 25 bp, Artificial
  probe
  misc_feature (1)..(25): SEQ ID NO: 1294; WAN024E2F; Start 249; Stop 273
agactggatgacttgtatctgttgt

SEQ ID NO: 289566 - DNA, 25 bp, Artificial
  probe
  misc_feature (1)..(25): SEQ ID NO: 1294; WAN024E2F; Start 75; Stop 99
ttctgttggtcaggaagtagatatt

SEQ ID NO: 289567 - DNA, 25 bp, Artificial
  probe
  misc_feature (1)..(25): SEQ ID NO: 1294; WAN024E2F; Start 170; Stop 194
cagataagattattgtggcagacac

SEQ ID NO: 289568 - DNA, 25 bp, Artificial
  probe
  misc_feature (1)..(25): SEQ ID NO: 1294; WAN024E2F; Start 93; Stop 117
agatattatcgaagctggaactgtt

SEQ ID NO: 289569 - DNA, 25 bp, Artificial
  probe
  misc_feature (1)..(25): SEQ ID NO: 1294; WAN024E2F; Start 87; Stop 111
ggaagtagatattatcgaagctgga

SEQ ID NO: 289570 - DNA, 25 bp, Artificial
  probe
  misc_feature (1)..(25): SEQ ID NO: 1294; WAN024E2F; Start 86; Stop 110
aggaagtagatattatcgaagctgg

SEQ ID NO: 289571 - DNA, 25 bp, Artificial
  probe
  misc_feature (1)..(25): SEQ ID NO: 1294; WAN024E2F; Start 78; Stop 102
tgttggtcaggaagtagatattatc

SEQ ID NO: 289572 - DNA, 25 bp, Artificial
  probe
  misc_feature (1)..(25): SEQ ID NO: 1294; WAN024E2F; Start 76; Stop 100
tctgttggtcaggaagtagatatta

SEQ ID NO: 289573 - DNA, 25 bp, Artificial
  probe
  misc_feature (1)..(25): SEQ ID NO: 1294; WAN024E2F; Start 169; Stop 193
ccagataagattattgtggcagaca

SEQ ID NO: 289574 - DNA, 25 bp, Artificial
  probe
  misc_feature (1)..(25): SEQ ID NO: 1294; WAN024E2F; Start 92; Stop 116
tagatattatcgaagctggaactgt

SEQ ID NO: 289575 - DNA, 25 bp, Artificial
  probe
  misc_feature (1)..(25): SEQ ID NO: 1294; WAN024E2F; Start 23; Stop 47
tacaagttgcattagaccattcaga

SEQ ID NO: 289576 - DNA, 25 bp, Artificial
  probe
  misc_feature (1)..(25): SEQ ID NO: 1294; WAN024E2F; Start 91; Stop 115
gtagatattatcgaagctggaactg

SEQ ID NO: 289577 - DNA, 25 bp, Artificial
  probe
  misc_feature (1)..(25): SEQ ID NO: 1294; WAN024E2F; Start 22; Stop 46
ttacaagttgcattagaccattcag

SEQ ID NO: 289578 - DNA, 25 bp, Artificial
  probe
  misc_feature (1)..(25): SEQ ID NO: 1294; WAN024E2F; Start 84; Stop 108
tcaggaagtagatattatcgaagct

SEQ ID NO: 289579 - DNA, 25 bp, Artificial
  probe
  misc_feature (1)..(25): SEQ ID NO: 1294; WAN024E2F; Start 83; Stop 107
gtcaggaagtagatattatcgaagc

SEQ ID NO: 289580 - DNA, 25 bp, Artificial
  probe
  misc_feature (1)..(25): SEQ ID NO: 1294; WAN024E2F; Start 81; Stop 105
tggtcaggaagtagatattatcgaa

SEQ ID NO: 289581 - DNA, 25 bp, Artificial
  probe
  misc_feature (1)..(25): SEQ ID NO: 1294; WAN024E2F; Start 80; Stop 104
ttggtcaggaagtagatattatcga

SEQ ID NO: 289582 - DNA, 25 bp, Artificial
  probe
  misc_feature (1)..(25): SEQ ID NO: 1294; WAN024E2F; Start 90; Stop 114
agtagatattatcgaagctggaact

SEQ ID NO: 289583 - DNA, 25 bp, Artificial
  probe
  misc_feature (1)..(25): SEQ ID NO: 1294; WAN024E2F; Start 251; Stop 275
actggatgacttgtatctgttgtgc

SEQ ID NO: 289584 - DNA, 25 bp, Artificial
  probe
  misc_feature (1)..(25): SEQ ID NO: 1294; WAN024E2F; Start 89; Stop 113
aagtagatattatcgaagctggaac

SEQ ID NO: 289585 - DNA, 25 bp, Artificial
  probe
  misc_feature (1)..(25): SEQ ID NO: 1294; WAN024E2F; Start 308; Stop 332
ctatcaagactgaacgaggagaacg

SEQ ID NO: 289586 - DNA, 25 bp, Artificial
  probe
  misc_feature (1)..(25): SEQ ID NO: 1294; WAN024E2F; Start 82; Stop 106
ggtcaggaagtagatattatcgaag

SEQ ID NO: 289587 - DNA, 25 bp, Artificial
  probe
  misc_feature (1)..(25): SEQ ID NO: 1294; WAN024E2F; Start 24; Stop 48
acaagttgcattagaccattcagac

SEQ ID NO: 289588 - DNA, 25 bp, Artificial
  probe
  misc_feature (1)..(25): SEQ ID NO: 1294; WAN024E2F; Start 77; Stop 101
ctgttggtcaggaagtagatattat

SEQ ID NO: 289589 - DNA, 25 bp, Artificial
  probe
  misc_feature (1)..(25): SEQ ID NO: 1294; WAN024E2F; Start 88; Stop 112
gaagtagatattatcgaagctggaa

SEQ ID NO: 289590 - DNA, 25 bp, Artificial
  probe
  misc_feature (1)..(25): SEQ ID NO: 1294; WAN024E2F; Start 307; Stop 331
gctatcaagactgaacgaggagaac

SEQ ID NO: 289591 - DNA, 25 bp, Artificial
  probe
  misc_feature (1)..(25): SEQ ID NO: 1294; WAN024E2F; Start 301; Stop 325
ctaaaggctatcaagactgaacgag

SEQ ID NO: 289592 - DNA, 25 bp, Artificial
  probe
  misc_feature (1)..(25): SEQ ID NO: 1294; WAN024E2F; Start 299; Stop 323
ctctaaaggctatcaagactgaacg

SEQ ID NO: 289593 - DNA, 25 bp, Artificial
  probe
  misc_feature (1)..(25): SEQ ID NO: 1294; WAN024E2F; Start 27; Stop 51
agttgcattagaccattcagacttg

SEQ ID NO: 289594 - DNA, 25 bp, Artificial
  probe
  misc_feature (1)..(25): SEQ ID NO: 1294; WAN024E2F; Start 25; Stop 49
caagttgcattagaccattcagact

SEQ ID NO: 289595 - DNA, 25 bp, Artificial
  probe
  misc_feature (1)..(25): SEQ ID NO: 1294; WAN024E2F; Start 309; Stop 333
tatcaagactgaacgaggagaacga

SEQ ID NO: 289596 - DNA, 25 bp, Artificial
  probe
  misc_feature (1)..(25): SEQ ID NO: 1295; WAN024FY6; Start 111; Stop 135
ctaccaagaatccattacagaccag

SEQ ID NO: 289597 - DNA, 25 bp, Artificial
  probe
  misc_feature (1)..(25): SEQ ID NO: 1295; WAN024FY6; Start 55; Stop 79
ttcggagcagatattgatgtaacag

SEQ ID NO: 289598 - DNA, 25 bp, Artificial
  probe
  misc_feature (1)..(25): SEQ ID NO: 1295; WAN024FY6; Start 54; Stop 78
cttcggagcagatattgatgtaaca

SEQ ID NO: 289599 - DNA, 25 bp, Artificial
  probe
  misc_feature (1)..(25): SEQ ID NO: 1295; WAN024FY6; Start 112; Stop 136
taccaagaatccattacagaccagt

SEQ ID NO: 289600 - DNA, 25 bp, Artificial
  probe
  misc_feature (1)..(25): SEQ ID NO: 1295; WAN024FY6; Start 53; Stop 77
ccttcggagcagatattgatgtaac

SEQ ID NO: 289601 - DNA, 25 bp, Artificial
  probe
  misc_feature (1)..(25): SEQ ID NO: 1295; WAN024FY6; Start 354; Stop 378
caagattatccgtaagcatggtact

SEQ ID NO: 289602 - DNA, 25 bp, Artificial
  probe
  misc_feature (1)..(25): SEQ ID NO: 1295; WAN024FY6; Start 355; Stop 379
aagattatccgtaagcatggtacta

SEQ ID NO: 289603 - DNA, 25 bp, Artificial
  probe
  misc_feature (1)..(25): SEQ ID NO: 1295; WAN024FY6; Start 356; Stop 380
agattatccgtaagcatggtactat

SEQ ID NO: 289604 - DNA, 25 bp, Artificial
  probe
  misc_feature (1)..(25): SEQ ID NO: 1295; WAN024FY6; Start 357; Stop 381
gattatccgtaagcatggtactatg

SEQ ID NO: 289605 - DNA, 25 bp, Artificial
  probe
  misc_feature (1)..(25): SEQ ID NO: 1295; WAN024FY6; Start 110; Stop 134
gctaccaagaatccattacagacca

SEQ ID NO: 289606 - DNA, 25 bp, Artificial
  probe
  misc_feature (1)..(25): SEQ ID NO: 1295; WAN024FY6; Start 56; Stop 80
tcggagcagatattgatgtaacagg

SEQ ID NO: 289607 - DNA, 25 bp, Artificial
  probe
  misc_feature (1)..(25): SEQ ID NO: 1295; WAN024FY6; Start 113; Stop 137
accaagaatccattacagaccagtc

SEQ ID NO: 289608 - DNA, 25 bp, Artificial
  probe
  misc_feature (1)..(25): SEQ ID NO: 1295; WAN024FY6; Start 117; Stop 141
agaatccattacagaccagtcttat

SEQ ID NO: 289609 - DNA, 25 bp, Artificial
  probe
  misc_feature (1)..(25): SEQ ID NO: 1295; WAN024FY6; Start 60; Stop 84
agcagatattgatgtaacaggcgaa

SEQ ID NO: 289610 - DNA, 25 bp, Artificial
  probe
  misc_feature (1)..(25): SEQ ID NO: 1295; WAN024FY6; Start 15; Stop 39
tctagtattagaagatggcacagtt

SEQ ID NO: 289611 - DNA, 25 bp, Artificial
  probe
  misc_feature (1)..(25): SEQ ID NO: 1295; WAN024FY6; Start 52; Stop 76
gccttcggagcagatattgatgtaa

SEQ ID NO: 289612 - DNA, 25 bp, Artificial
  probe
  misc_feature (1)..(25): SEQ ID NO: 1295; WAN024FY6; Start 773; Stop 797
gggctaagacctataagatgaagtt

SEQ ID NO: 289613 - DNA, 25 bp, Artificial
  probe
  misc_feature (1)..(25): SEQ ID NO: 1295; WAN024FY6; Start 59; Stop 83
gagcagatattgatgtaacaggcga

SEQ ID NO: 289614 - DNA, 25 bp, Artificial
  probe
  misc_feature (1)..(25): SEQ ID NO: 1295; WAN024FY6; Start 558; Stop 582
tgaactttctaaacgcaactgtaac

SEQ ID NO: 289615 - DNA, 25 bp, Artificial
  probe
  misc_feature (1)..(25): SEQ ID NO: 1295; WAN024FY6; Start 557; Stop 581
gtgaactttctaaacgcaactgtaa

SEQ ID NO: 289616 - DNA, 25 bp, Artificial
  probe
  misc_feature (1)..(25): SEQ ID NO: 1295; WAN024FY6; Start 447; Stop 471
tttaccgacagacaatatcaaacag

SEQ ID NO: 289617 - DNA, 25 bp, Artificial
  probe
  misc_feature (1)..(25): SEQ ID NO: 1295; WAN024FY6; Start 109; Stop 133
ggctaccaagaatccattacagacc

SEQ ID NO: 289618 - DNA, 25 bp, Artificial
  probe
  misc_feature (1)..(25): SEQ ID NO: 1295; WAN024FY6; Start 448; Stop 472
ttaccgacagacaatatcaaacagg

SEQ ID NO: 289619 - DNA, 25 bp, Artificial
  probe
  misc_feature (1)..(25): SEQ ID NO: 1295; WAN024FY6; Start 578; Stop 602
gtaacgtgacagttgttccttattc

SEQ ID NO: 289620 - DNA, 25 bp, Artificial
  probe
  misc_feature (1)..(25): SEQ ID NO: 1295; WAN024FY6; Start 114; Stop 138
ccaagaatccattacagaccagtct

SEQ ID NO: 289621 - DNA, 25 bp, Artificial
  probe
  misc_feature (1)..(25): SEQ ID NO: 1295; WAN024FY6; Start 913; Stop 937
attacccacgaagaaatcaatgaca

SEQ ID NO: 289622 - DNA, 25 bp, Artificial
  probe
  misc_feature (1)..(25): SEQ ID NO: 1295; WAN024FY6; Start 62; Stop 86
cagatattgatgtaacaggcgaaat

SEQ ID NO: 289623 - DNA, 25 bp, Artificial
  probe
  misc_feature (1)..(25): SEQ ID NO: 1295; WAN024FY6; Start 912; Stop 936
tattacccacgaagaaatcaatgac

SEQ ID NO: 289624 - DNA, 25 bp, Artificial
  probe
  misc_feature (1)..(25): SEQ ID NO: 1295; WAN024FY6; Start 914; Stop 938
ttacccacgaagaaatcaatgacaa

SEQ ID NO: 289625 - DNA, 25 bp, Artificial
  probe
  misc_feature (1)..(25): SEQ ID NO: 1295; WAN024FY6; Start 904; Stop 928
cacttgattattacccacgaagaaa

SEQ ID NO: 289626 - DNA, 25 bp, Artificial
  probe
  misc_feature (1)..(25): SEQ ID NO: 1295; WAN024FY6; Start 209; Stop 233
aatccattattccaacttgtaaggg

SEQ ID NO: 289627 - DNA, 25 bp, Artificial
  probe
  misc_feature (1)..(25): SEQ ID NO: 1295; WAN024FY6; Start 63; Stop 87
agatattgatgtaacaggcgaaatc

SEQ ID NO: 289628 - DNA, 25 bp, Artificial
  probe
  misc_feature (1)..(25): SEQ ID NO: 1295; WAN024FY6; Start 350; Stop 374
ttaccaagattatccgtaagcatgg

SEQ ID NO: 289629 - DNA, 25 bp, Artificial
  probe
  misc_feature (1)..(25): SEQ ID NO: 1296; WAN024B7Q; Start 830; Stop 854
gtatctatatcctccatgcaccaat

SEQ ID NO: 289630 - DNA, 25 bp, Artificial
  probe
  misc_feature (1)..(25): SEQ ID NO: 1296; WAN024B7Q; Start 743; Stop 767
tagttgcgtttgtaatcttccctaa

SEQ ID NO: 289631 - DNA, 25 bp, Artificial
  probe
  misc_feature (1)..(25): SEQ ID NO: 1296; WAN024B7Q; Start 742; Stop 766
ttagttgcgtttgtaatcttcccta

SEQ ID NO: 289632 - DNA, 25 bp, Artificial
  probe
  misc_feature (1)..(25): SEQ ID NO: 1296; WAN024B7Q; Start 924; Stop 948
gattgtcttgggttggtatttatcc

SEQ ID NO: 289633 - DNA, 25 bp, Artificial
  probe
  misc_feature (1)..(25): SEQ ID NO: 1296; WAN024B7Q; Start 923; Stop 947
ggattgtcttgggttggtatttatc

SEQ ID NO: 289634 - DNA, 25 bp, Artificial
  probe
  misc_feature (1)..(25): SEQ ID NO: 1296; WAN024B7Q; Start 922; Stop 946
gggattgtcttgggttggtatttat

SEQ ID NO: 289635 - DNA, 25 bp, Artificial
  probe
  misc_feature (1)..(25): SEQ ID NO: 1296; WAN024B7Q; Start 105; Stop 129
tcccacagcaaataacatactatcg

SEQ ID NO: 289636 - DNA, 25 bp, Artificial
  probe
  misc_feature (1)..(25): SEQ ID NO: 1296; WAN024B7Q; Start 831; Stop 855
tatctatatcctccatgcaccaatt

SEQ ID NO: 289637 - DNA, 25 bp, Artificial
  probe
  misc_feature (1)..(25): SEQ ID NO: 1296; WAN024B7Q; Start 106; Stop 130
cccacagcaaataacatactatcgt

SEQ ID NO: 289638 - DNA, 25 bp, Artificial
  probe
  misc_feature (1)..(25): SEQ ID NO: 1296; WAN024B7Q; Start 744; Stop 768
agttgcgtttgtaatcttccctaaa

SEQ ID NO: 289639 - DNA, 25 bp, Artificial
  probe
  misc_feature (1)..(25): SEQ ID NO: 1296; WAN024B7Q; Start 731; Stop 755
ttgtctgtatattagttgcgtttgt

SEQ ID NO: 289640 - DNA, 25 bp, Artificial
  probe
  misc_feature (1)..(25): SEQ ID NO: 1296; WAN024B7Q; Start 552; Stop 576
ctttcttggaagtgtattgaacgaa

SEQ ID NO: 289641 - DNA, 25 bp, Artificial
  probe
  misc_feature (1)..(25): SEQ ID NO: 1296; WAN024B7Q; Start 550; Stop 574
ttctttcttggaagtgtattgaacg

SEQ ID NO: 289642 - DNA, 25 bp, Artificial
  probe
  misc_feature (1)..(25): SEQ ID NO: 1296; WAN024B7Q; Start 551; Stop 575
tctttcttggaagtgtattgaacga

SEQ ID NO: 289643 - DNA, 25 bp, Artificial
  probe
  misc_feature (1)..(25): SEQ ID NO: 1296; WAN024B7Q; Start 540; Stop 564
gggtatttgtttctttcttggaagt

SEQ ID NO: 289644 - DNA, 25 bp, Artificial
  probe
  misc_feature (1)..(25): SEQ ID NO: 1296; WAN024B7Q; Start 104; Stop 128
ttcccacagcaaataacatactatc

SEQ ID NO: 289645 - DNA, 25 bp, Artificial
  probe
  misc_feature (1)..(25): SEQ ID NO: 1296; WAN024B7Q; Start 364; Stop 388
aatcctattggagtctcatggtatt

SEQ ID NO: 289646 - DNA, 25 bp, Artificial
  probe
  misc_feature (1)..(25): SEQ ID NO: 1296; WAN024B7Q; Start 555; Stop 579
tcttggaagtgtattgaacgaaatt

SEQ ID NO: 289647 - DNA, 25 bp, Artificial
  probe
  misc_feature (1)..(25): SEQ ID NO: 1296; WAN024B7Q; Start 554; Stop 578
ttcttggaagtgtattgaacgaaat

SEQ ID NO: 289648 - DNA, 25 bp, Artificial
  probe
  misc_feature (1)..(25): SEQ ID NO: 1296; WAN024B7Q; Start 107; Stop 131
ccacagcaaataacatactatcgtt

SEQ ID NO: 289649 - DNA, 25 bp, Artificial
  probe
  misc_feature (1)..(25): SEQ ID NO: 1296; WAN024B7Q; Start 740; Stop 764
tattagttgcgtttgtaatcttccc

SEQ ID NO: 289650 - DNA, 25 bp, Artificial
  probe
  misc_feature (1)..(25): SEQ ID NO: 1296; WAN024B7Q; Start 741; Stop 765
attagttgcgtttgtaatcttccct

SEQ ID NO: 289651 - DNA, 25 bp, Artificial
  probe
  misc_feature (1)..(25): SEQ ID NO: 1296; WAN024B7Q; Start 547; Stop 571
tgtttctttcttggaagtgtattga

SEQ ID NO: 289652 - DNA, 25 bp, Artificial
  probe
  misc_feature (1)..(25): SEQ ID NO: 1296; WAN024B7Q; Start 541; Stop 565
ggtatttgtttctttcttggaagtg

SEQ ID NO: 289653 - DNA, 25 bp, Artificial
  probe
  misc_feature (1)..(25): SEQ ID NO: 1296; WAN024B7Q; Start 103; Stop 127
tttcccacagcaaataacatactat

SEQ ID NO: 289654 - DNA, 25 bp, Artificial
  probe
  misc_feature (1)..(25): SEQ ID NO: 1296; WAN024B7Q; Start 556; Stop 580
cttggaagtgtattgaacgaaattc

SEQ ID NO: 289655 - DNA, 25 bp, Artificial
  probe
  misc_feature (1)..(25): SEQ ID NO: 1296; WAN024B7Q; Start 732; Stop 756
tgtctgtatattagttgcgtttgta

SEQ ID NO: 289656 - DNA, 25 bp, Artificial
  probe
  misc_feature (1)..(25): SEQ ID NO: 1296; WAN024B7Q; Start 728; Stop 752
ttattgtctgtatattagttgcgtt

SEQ ID NO: 289657 - DNA, 25 bp, Artificial
  probe
  misc_feature (1)..(25): SEQ ID NO: 1296; WAN024B7Q; Start 921; Stop 945
tgggattgtcttgggttggtattta

SEQ ID NO: 289658 - DNA, 25 bp, Artificial
  probe
  misc_feature (1)..(25): SEQ ID NO: 1296; WAN024B7Q; Start 1024; Stop 1048
aaatggctctttgtcaactgtagtg

SEQ ID NO: 289659 - DNA, 25 bp, Artificial
  probe
  misc_feature (1)..(25): SEQ ID NO: 1296; WAN024B7Q; Start 108; Stop 132
cacagcaaataacatactatcgttg

SEQ ID NO: 289660 - DNA, 25 bp, Artificial
  probe
  misc_feature (1)..(25): SEQ ID NO: 1296; WAN024B7Q; Start 730; Stop 754
attgtctgtatattagttgcgtttg

SEQ ID NO: 289661 - DNA, 25 bp, Artificial
  probe
  misc_feature (1)..(25): SEQ ID NO: 1296; WAN024B7Q; Start 546; Stop 570
ttgtttctttcttggaagtgtattg

SEQ ID NO: 289662 - DNA, 25 bp, Artificial
  probe
  misc_feature (1)..(25): SEQ ID NO: 1297; WAN024B7Y; Start 672; Stop 696
agggtctaagaaggattatgtaagc

SEQ ID NO: 289663 - DNA, 25 bp, Artificial
  probe
  misc_feature (1)..(25): SEQ ID NO: 1297; WAN024B7Y; Start 668; Stop 692
aagtagggtctaagaaggattatgt

SEQ ID NO: 289664 - DNA, 25 bp, Artificial
  probe
  misc_feature (1)..(25): SEQ ID NO: 1297; WAN024B7Y; Start 662; Stop 686
tttatgaagtagggtctaagaagga

SEQ ID NO: 289665 - DNA, 25 bp, Artificial
  probe
  misc_feature (1)..(25): SEQ ID NO: 1297; WAN024B7Y; Start 666; Stop 690
tgaagtagggtctaagaaggattat

SEQ ID NO: 289666 - DNA, 25 bp, Artificial
  probe
  misc_feature (1)..(25): SEQ ID NO: 1297; WAN024B7Y; Start 665; Stop 689
atgaagtagggtctaagaaggatta

SEQ ID NO: 289667 - DNA, 25 bp, Artificial
  probe
  misc_feature (1)..(25): SEQ ID NO: 1297; WAN024B7Y; Start 664; Stop 688
tatgaagtagggtctaagaaggatt

SEQ ID NO: 289668 - DNA, 25 bp, Artificial
  probe
  misc_feature (1)..(25): SEQ ID NO: 1297; WAN024B7Y; Start 663; Stop 687
ttatgaagtagggtctaagaaggat

SEQ ID NO: 289669 - DNA, 25 bp, Artificial
  probe
  misc_feature (1)..(25): SEQ ID NO: 1297; WAN024B7Y; Start 667; Stop 691
gaagtagggtctaagaaggattatg

SEQ ID NO: 289670 - DNA, 25 bp, Artificial
  probe
  misc_feature (1)..(25): SEQ ID NO: 1297; WAN024B7Y; Start 674; Stop 698
ggtctaagaaggattatgtaagcta

SEQ ID NO: 289671 - DNA, 25 bp, Artificial
  probe
  misc_feature (1)..(25): SEQ ID NO: 1297; WAN024B7Y; Start 669; Stop 693
agtagggtctaagaaggattatgta

SEQ ID NO: 289672 - DNA, 25 bp, Artificial
  probe
  misc_feature (1)..(25): SEQ ID NO: 1297; WAN024B7Y; Start 673; Stop 697
gggtctaagaaggattatgtaagct

SEQ ID NO: 289673 - DNA, 25 bp, Artificial
  probe
  misc_feature (1)..(25): SEQ ID NO: 1297; WAN024B7Y; Start 670; Stop 694
gtagggtctaagaaggattatgtaa

SEQ ID NO: 289674 - DNA, 25 bp, Artificial
  probe
  misc_feature (1)..(25): SEQ ID NO: 1297; WAN024B7Y; Start 671; Stop 695
tagggtctaagaaggattatgtaag

SEQ ID NO: 289675 - DNA, 25 bp, Artificial
  probe
  misc_feature (1)..(25): SEQ ID NO: 1297; WAN024B7Y; Start 652; Stop 676
tggttcttgttttatgaagtagggt

SEQ ID NO: 289676 - DNA, 25 bp, Artificial
  probe
  misc_feature (1)..(25): SEQ ID NO: 1297; WAN024B7Y; Start 653; Stop 677
ggttcttgttttatgaagtagggtc

SEQ ID NO: 289677 - DNA, 25 bp, Artificial
  probe
  misc_feature (1)..(25): SEQ ID NO: 1297; WAN024B7Y; Start 651; Stop 675
ttggttcttgttttatgaagtaggg

SEQ ID NO: 289678 - DNA, 25 bp, Artificial
  probe
  misc_feature (1)..(25): SEQ ID NO: 1297; WAN024B7Y; Start 654; Stop 678
gttcttgttttatgaagtagggtct

SEQ ID NO: 289679 - DNA, 25 bp, Artificial
  probe
  misc_feature (1)..(25): SEQ ID NO: 1297; WAN024B7Y; Start 650; Stop 674
cttggttcttgttttatgaagtagg

SEQ ID NO: 289680 - DNA, 25 bp, Artificial
  probe
  misc_feature (1)..(25): SEQ ID NO: 1297; WAN024B7Y; Start 331; Stop 355
acaaccatatctgatttgctaaata

SEQ ID NO: 289681 - DNA, 25 bp, Artificial
  probe
  misc_feature (1)..(25): SEQ ID NO: 1297; WAN024B7Y; Start 330; Stop 354
tacaaccatatctgatttgctaaat

SEQ ID NO: 289682 - DNA, 25 bp, Artificial
  probe
  misc_feature (1)..(25): SEQ ID NO: 1297; WAN024B7Y; Start 661; Stop 685
ttttatgaagtagggtctaagaagg

SEQ ID NO: 289683 - DNA, 25 bp, Artificial
  probe
  misc_feature (1)..(25): SEQ ID NO: 1297; WAN024B7Y; Start 1024; Stop 1048
aaaggctctttgtcaactgtagtgg

SEQ ID NO: 289684 - DNA, 25 bp, Artificial
  probe
  misc_feature (1)..(25): SEQ ID NO: 1297; WAN024B7Y; Start 659; Stop 683
tgttttatgaagtagggtctaagaa

SEQ ID NO: 289685 - DNA, 25 bp, Artificial
  probe
  misc_feature (1)..(25): SEQ ID NO: 1297; WAN024B7Y; Start 658; Stop 682
ttgttttatgaagtagggtctaaga

SEQ ID NO: 289686 - DNA, 25 bp, Artificial
  probe
  misc_feature (1)..(25): SEQ ID NO: 1297; WAN024B7Y; Start 656; Stop 680
tcttgttttatgaagtagggtctaa

SEQ ID NO: 289687 - DNA, 25 bp, Artificial
  probe
  misc_feature (1)..(25): SEQ ID NO: 1297; WAN024B7Y; Start 655; Stop 679
ttcttgttttatgaagtagggtcta

SEQ ID NO: 289688 - DNA, 25 bp, Artificial
  probe
  misc_feature (1)..(25): SEQ ID NO: 1297; WAN024B7Y; Start 657; Stop 681
cttgttttatgaagtagggtctaag

SEQ ID NO: 289689 - DNA, 25 bp, Artificial
  probe
  misc_feature (1)..(25): SEQ ID NO: 1297; WAN024B7Y; Start 1022; Stop 1046
taaaaggctctttgtcaactgtagt

SEQ ID NO: 289690 - DNA, 25 bp, Artificial
  probe
  misc_feature (1)..(25): SEQ ID NO: 1297; WAN024B7Y; Start 1019; Stop 1043
aattaaaaggctctttgtcaactgt

SEQ ID NO: 289691 - DNA, 25 bp, Artificial
  probe
  misc_feature (1)..(25): SEQ ID NO: 1297; WAN024B7Y; Start 1021; Stop 1045
ttaaaaggctctttgtcaactgtag

SEQ ID NO: 289692 - DNA, 25 bp, Artificial
  probe
  misc_feature (1)..(25): SEQ ID NO: 1297; WAN024B7Y; Start 660; Stop 684
gttttatgaagtagggtctaagaag

SEQ ID NO: 289693 - DNA, 25 bp, Artificial
  probe
  misc_feature (1)..(25): SEQ ID NO: 1297; WAN024B7Y; Start 1020; Stop 1044
attaaaaggctctttgtcaactgta

SEQ ID NO: 289694 - DNA, 25 bp, Artificial
  probe
  misc_feature (1)..(25): SEQ ID NO: 1297; WAN024B7Y; Start 334; Stop 358
accatatctgatttgctaaatatct

SEQ ID NO: 289695 - DNA, 25 bp, Artificial
  probe
  misc_feature (1)..(25): SEQ ID NO: 1298; WAN024DJK; Start 906; Stop 930
aatgttgtctggagcgttagttatt

SEQ ID NO: 289696 - DNA, 25 bp, Artificial
  probe
  misc_feature (1)..(25): SEQ ID NO: 1298; WAN024DJK; Start 905; Stop 929
gaatgttgtctggagcgttagttat

SEQ ID NO: 289697 - DNA, 25 bp, Artificial
  probe
  misc_feature (1)..(25): SEQ ID NO: 1298; WAN024DJK; Start 416; Stop 440
tggaagaggacttaggaattgaatt

SEQ ID NO: 289698 - DNA, 25 bp, Artificial
  probe
  misc_feature (1)..(25): SEQ ID NO: 1298; WAN024DJK; Start 1071; Stop 1095
gagaggacaagagaaggctacatta

SEQ ID NO: 289699 - DNA, 25 bp, Artificial
  probe
  misc_feature (1)..(25): SEQ ID NO: 1298; WAN024DJK; Start 415; Stop 439
atggaagaggacttaggaattgaat

SEQ ID NO: 289700 - DNA, 25 bp, Artificial
  probe
  misc_feature (1)..(25): SEQ ID NO: 1298; WAN024DJK; Start 907; Stop 931
atgttgtctggagcgttagttattg

SEQ ID NO: 289701 - DNA, 25 bp, Artificial
  probe
  misc_feature (1)..(25): SEQ ID NO: 1298; WAN024DJK; Start 1072; Stop 1096
agaggacaagagaaggctacattac

SEQ ID NO: 289702 - DNA, 25 bp, Artificial
  probe
  misc_feature (1)..(25): SEQ ID NO: 1298; WAN024DJK; Start 414; Stop 438
tatggaagaggacttaggaattgaa

SEQ ID NO: 289703 - DNA, 25 bp, Artificial
  probe
  misc_feature (1)..(25): SEQ ID NO: 1298; WAN024DJK; Start 413; Stop 437
ttatggaagaggacttaggaattga

SEQ ID NO: 289704 - DNA, 25 bp, Artificial
  probe
  misc_feature (1)..(25): SEQ ID NO: 1298; WAN024DJK; Start 985; Stop 1009
ctgtatgaaccaggagattatatgc

SEQ ID NO: 289705 - DNA, 25 bp, Artificial
  probe
  misc_feature (1)..(25): SEQ ID NO: 1298; WAN024DJK; Start 1073; Stop 1097
gaggacaagagaaggctacattacg

SEQ ID NO: 289706 - DNA, 25 bp, Artificial
  probe
  misc_feature (1)..(25): SEQ ID NO: 1298; WAN024DJK; Start 995; Stop 1019
caggagattatatgcagcttagtga

SEQ ID NO: 289707 - DNA, 25 bp, Artificial
  probe
  misc_feature (1)..(25): SEQ ID NO: 1298; WAN024DJK; Start 992; Stop 1016
aaccaggagattatatgcagcttag

SEQ ID NO: 289708 - DNA, 25 bp, Artificial
  probe
  misc_feature (1)..(25): SEQ ID NO: 1298; WAN024DJK; Start 991; Stop 1015
gaaccaggagattatatgcagctta

SEQ ID NO: 289709 - DNA, 25 bp, Artificial
  probe
  misc_feature (1)..(25): SEQ ID NO: 1298; WAN024DJK; Start 988; Stop 1012
tatgaaccaggagattatatgcagc

SEQ ID NO: 289710 - DNA, 25 bp, Artificial
  probe
  misc_feature (1)..(25): SEQ ID NO: 1298; WAN024DJK; Start 904; Stop 928
ggaatgttgtctggagcgttagtta

SEQ ID NO: 289711 - DNA, 25 bp, Artificial
  probe
  misc_feature (1)..(25): SEQ ID NO: 1298; WAN024DJK; Start 996; Stop 1020
aggagattatatgcagcttagtgaa

SEQ ID NO: 289712 - DNA, 25 bp, Artificial
  probe
  misc_feature (1)..(25): SEQ ID NO: 1298; WAN024DJK; Start 986; Stop 1010
tgtatgaaccaggagattatatgca

SEQ ID NO: 289713 - DNA, 25 bp, Artificial
  probe
  misc_feature (1)..(25): SEQ ID NO: 1298; WAN024DJK; Start 659; Stop 683
aggttgatttagttagagcgatagc

SEQ ID NO: 289714 - DNA, 25 bp, Artificial
  probe
  misc_feature (1)..(25): SEQ ID NO: 1298; WAN024DJK; Start 587; Stop 611
tagataaagtcgcatttcagaacca

SEQ ID NO: 289715 - DNA, 25 bp, Artificial
  probe
  misc_feature (1)..(25): SEQ ID NO: 1298; WAN024DJK; Start 589; Stop 613
gataaagtcgcatttcagaaccaaa

SEQ ID NO: 289716 - DNA, 25 bp, Artificial
  probe
  misc_feature (1)..(25): SEQ ID NO: 1298; WAN024DJK; Start 994; Stop 1018
ccaggagattatatgcagcttagtg

SEQ ID NO: 289717 - DNA, 25 bp, Artificial
  probe
  misc_feature (1)..(25): SEQ ID NO: 1298; WAN024DJK; Start 657; Stop 681
gcaggttgatttagttagagcgata

SEQ ID NO: 289718 - DNA, 25 bp, Artificial
  probe
  misc_feature (1)..(25): SEQ ID NO: 1298; WAN024DJK; Start 652; Stop 676
aaagggcaggttgatttagttagag

SEQ ID NO: 289719 - DNA, 25 bp, Artificial
  probe
  misc_feature (1)..(25): SEQ ID NO: 1298; WAN024DJK; Start 1070; Stop 1094
tgagaggacaagagaaggctacatt

SEQ ID NO: 289720 - DNA, 25 bp, Artificial
  probe
  misc_feature (1)..(25): SEQ ID NO: 1298; WAN024DJK; Start 658; Stop 682
caggttgatttagttagagcgatag

SEQ ID NO: 289721 - DNA, 25 bp, Artificial
  probe
  misc_feature (1)..(25): SEQ ID NO: 1298; WAN024DJK; Start 586; Stop 610
atagataaagtcgcatttcagaacc

SEQ ID NO: 289722 - DNA, 25 bp, Artificial
  probe
  misc_feature (1)..(25): SEQ ID NO: 1298; WAN024DJK; Start 993; Stop 1017
accaggagattatatgcagcttagt

SEQ ID NO: 289723 - DNA, 25 bp, Artificial
  probe
  misc_feature (1)..(25): SEQ ID NO: 1298; WAN024DJK; Start 987; Stop 1011
gtatgaaccaggagattatatgcag

SEQ ID NO: 289724 - DNA, 25 bp, Artificial
  probe
  misc_feature (1)..(25): SEQ ID NO: 1298; WAN024DJK; Start 845; Stop 869
aatgtgatatcgtatgtgtgtgttc

SEQ ID NO: 289725 - DNA, 25 bp, Artificial
  probe
  misc_feature (1)..(25): SEQ ID NO: 1298; WAN024DJK; Start 908; Stop 932
tgttgtctggagcgttagttattgg

SEQ ID NO: 289726 - DNA, 25 bp, Artificial
  probe
  misc_feature (1)..(25): SEQ ID NO: 1298; WAN024DJK; Start 588; Stop 612
agataaagtcgcatttcagaaccaa

SEQ ID NO: 289727 - DNA, 25 bp, Artificial
  probe
  misc_feature (1)..(25): SEQ ID NO: 1298; WAN024DJK; Start 846; Stop 870
atgtgatatcgtatgtgtgtgttcc

SEQ ID NO: 289728 - DNA, 25 bp, Artificial
  probe
  misc_feature (1)..(25): SEQ ID NO: 1299; WAN024DGP; Start 336; Stop 360
tgttgttgatagttccttcactgac

SEQ ID NO: 289729 - DNA, 25 bp, Artificial
  probe
  misc_feature (1)..(25): SEQ ID NO: 1299; WAN024DGP; Start 29; Stop 53
catctgttactattgaacctgaact

SEQ ID NO: 289730 - DNA, 25 bp, Artificial
  probe
  misc_feature (1)..(25): SEQ ID NO: 1299; WAN024DGP; Start 340; Stop 364
gttgatagttccttcactgaccaag

SEQ ID NO: 289731 - DNA, 25 bp, Artificial
  probe
  misc_feature (1)..(25): SEQ ID NO: 1299; WAN024DGP; Start 28; Stop 52
tcatctgttactattgaacctgaac

SEQ ID NO: 289732 - DNA, 25 bp, Artificial
  probe
  misc_feature (1)..(25): SEQ ID NO: 1299; WAN024DGP; Start 337; Stop 361
gttgttgatagttccttcactgacc

SEQ ID NO: 289733 - DNA, 25 bp, Artificial
  probe
  misc_feature (1)..(25): SEQ ID NO: 1299; WAN024DGP; Start 339; Stop 363
tgttgatagttccttcactgaccaa

SEQ ID NO: 289734 - DNA, 25 bp, Artificial
  probe
  misc_feature (1)..(25): SEQ ID NO: 1299; WAN024DGP; Start 338; Stop 362
ttgttgatagttccttcactgacca

SEQ ID NO: 289735 - DNA, 25 bp, Artificial
  probe
  misc_feature (1)..(25): SEQ ID NO: 1299; WAN024DGP; Start 31; Stop 55
tctgttactattgaacctgaactag

SEQ ID NO: 289736 - DNA, 25 bp, Artificial
  probe
  misc_feature (1)..(25): SEQ ID NO: 1299; WAN024DGP; Start 104; Stop 128
atgttgtttattctgatgcggattt

SEQ ID NO: 289737 - DNA, 25 bp, Artificial
  probe
  misc_feature (1)..(25): SEQ ID NO: 1299; WAN024DGP; Start 103; Stop 127
aatgttgtttattctgatgcggatt

SEQ ID NO: 289738 - DNA, 25 bp, Artificial
  probe
  misc_feature (1)..(25): SEQ ID NO: 1299; WAN024DGP; Start 404; Stop 428
aagaaggtaaagatatggaggcaat

SEQ ID NO: 289739 - DNA, 25 bp, Artificial
  probe
  misc_feature (1)..(25): SEQ ID NO: 1299; WAN024DGP; Start 106; Stop 130
gttgtttattctgatgcggatttga

SEQ ID NO: 289740 - DNA, 25 bp, Artificial
  probe
  misc_feature (1)..(25): SEQ ID NO: 1299; WAN024DGP; Start 403; Stop 427
caagaaggtaaagatatggaggcaa

SEQ ID NO: 289741 - DNA, 25 bp, Artificial
  probe
  misc_feature (1)..(25): SEQ ID NO: 1299; WAN024DGP; Start 105; Stop 129
tgttgtttattctgatgcggatttg

SEQ ID NO: 289742 - DNA, 25 bp, Artificial
  probe
  misc_feature (1)..(25): SEQ ID NO: 1299; WAN024DGP; Start 405; Stop 429
agaaggtaaagatatggaggcaatt

SEQ ID NO: 289743 - DNA, 25 bp, Artificial
  probe
  misc_feature (1)..(25): SEQ ID NO: 1299; WAN024DGP; Start 102; Stop 126
taatgttgtttattctgatgcggat

SEQ ID NO: 289744 - DNA, 25 bp, Artificial
  probe
  misc_feature (1)..(25): SEQ ID NO: 1299; WAN024DGP; Start 108; Stop 132
tgtttattctgatgcggatttgaaa

SEQ ID NO: 289745 - DNA, 25 bp, Artificial
  probe
  misc_feature (1)..(25): SEQ ID NO: 1299; WAN024DGP; Start 107; Stop 131
ttgtttattctgatgcggatttgaa

SEQ ID NO: 289746 - DNA, 25 bp, Artificial
  probe
  misc_feature (1)..(25): SEQ ID NO: 1299; WAN024DGP; Start 119; Stop 143
atgcggatttgaaagaagaaggtaa

SEQ ID NO: 289747 - DNA, 25 bp, Artificial
  probe
  misc_feature (1)..(25): SEQ ID NO: 1299; WAN024DGP; Start 120; Stop 144
tgcggatttgaaagaagaaggtaaa

SEQ ID NO: 289748 - DNA, 25 bp, Artificial
  probe
  misc_feature (1)..(25): SEQ ID NO: 1299; WAN024DGP; Start 30; Stop 54
atctgttactattgaacctgaacta

SEQ ID NO: 289749 - DNA, 25 bp, Artificial
  probe
  misc_feature (1)..(25): SEQ ID NO: 1299; WAN024DGP; Start 109; Stop 133
gtttattctgatgcggatttgaaag

SEQ ID NO: 289750 - DNA, 25 bp, Artificial
  probe
  misc_feature (1)..(25): SEQ ID NO: 1299; WAN024DGP; Start 640; Stop 664
gagttgataacatcgctttctgaac

SEQ ID NO: 289751 - DNA, 25 bp, Artificial
  probe
  misc_feature (1)..(25): SEQ ID NO: 1299; WAN024DGP; Start 769; Stop 793
gaaacgggttccattattcaaactc

SEQ ID NO: 289752 - DNA, 25 bp, Artificial
  probe
  misc_feature (1)..(25): SEQ ID NO: 1299; WAN024DGP; Start 638; Stop 662
atgagttgataacatcgctttctga

SEQ ID NO: 289753 - DNA, 25 bp, Artificial
  probe
  misc_feature (1)..(25): SEQ ID NO: 1299; WAN024DGP; Start 406; Stop 430
gaaggtaaagatatggaggcaattt

SEQ ID NO: 289754 - DNA, 25 bp, Artificial
  probe
  misc_feature (1)..(25): SEQ ID NO: 1299; WAN024DGP; Start 402; Stop 426
tcaagaaggtaaagatatggaggca

SEQ ID NO: 289755 - DNA, 25 bp, Artificial
  probe
  misc_feature (1)..(25): SEQ ID NO: 1299; WAN024DGP; Start 594; Stop 618
aatggttaaaggtcgtggaactaaa

SEQ ID NO: 289756 - DNA, 25 bp, Artificial
  probe
  misc_feature (1)..(25): SEQ ID NO: 1299; WAN024DGP; Start 341; Stop 365
ttgatagttccttcactgaccaagc

SEQ ID NO: 289757 - DNA, 25 bp, Artificial
  probe
  misc_feature (1)..(25): SEQ ID NO: 1299; WAN024DGP; Start 118; Stop 142
gatgcggatttgaaagaagaaggta

SEQ ID NO: 289758 - DNA, 25 bp, Artificial
  probe
  misc_feature (1)..(25): SEQ ID NO: 1299; WAN024DGP; Start 110; Stop 134
tttattctgatgcggatttgaaaga

SEQ ID NO: 289759 - DNA, 25 bp, Artificial
  probe
  misc_feature (1)..(25): SEQ ID NO: 1299; WAN024DGP; Start 639; Stop 663
tgagttgataacatcgctttctgaa

SEQ ID NO: 289760 - DNA, 25 bp, Artificial
  probe
  misc_feature (1)..(25): SEQ ID NO: 1299; WAN024DGP; Start 101; Stop 125
ataatgttgtttattctgatgcgga

SEQ ID NO: 289761 - DNA, 25 bp, Artificial
  probe
  misc_feature (1)..(25): SEQ ID NO: 1300; WAN024B7T; Start 9; Stop 33
acaagtcttattagtggatgatgaa

SEQ ID NO: 289762 - DNA, 25 bp, Artificial
  probe
  misc_feature (1)..(25): SEQ ID NO: 1300; WAN024B7T; Start 8; Stop 32
aacaagtcttattagtggatgatga

SEQ ID NO: 289763 - DNA, 25 bp, Artificial
  probe
  misc_feature (1)..(25): SEQ ID NO: 1300; WAN024B7T; Start 19; Stop 43
ttagtggatgatgaagaacacattc

SEQ ID NO: 289764 - DNA, 25 bp, Artificial
  probe
  misc_feature (1)..(25): SEQ ID NO: 1300; WAN024B7T; Start 18; Stop 42
attagtggatgatgaagaacacatt

SEQ ID NO: 289765 - DNA, 25 bp, Artificial
  probe
  misc_feature (1)..(25): SEQ ID NO: 1300; WAN024B7T; Start 10; Stop 34
caagtcttattagtggatgatgaag

SEQ ID NO: 289766 - DNA, 25 bp, Artificial
  probe
  misc_feature (1)..(25): SEQ ID NO: 1300; WAN024B7T; Start 39; Stop 63
cattctgaaattgcttgactaccat

SEQ ID NO: 289767 - DNA, 25 bp, Artificial
  probe
  misc_feature (1)..(25): SEQ ID NO: 1300; WAN024B7T; Start 36; Stop 60
acacattctgaaattgcttgactac

SEQ ID NO: 289768 - DNA, 25 bp, Artificial
  probe
  misc_feature (1)..(25): SEQ ID NO: 1300; WAN024B7T; Start 35; Stop 59
aacacattctgaaattgcttgacta

SEQ ID NO: 289769 - DNA, 25 bp, Artificial
  probe
  misc_feature (1)..(25): SEQ ID NO: 1300; WAN024B7T; Start 37; Stop 61
cacattctgaaattgcttgactacc

SEQ ID NO: 289770 - DNA, 25 bp, Artificial
  probe
  misc_feature (1)..(25): SEQ ID NO: 1300; WAN024B7T; Start 16; Stop 40
ttattagtggatgatgaagaacaca

SEQ ID NO: 289771 - DNA, 25 bp, Artificial
  probe
  misc_feature (1)..(25): SEQ ID NO: 1300; WAN024B7T; Start 40; Stop 64
attctgaaattgcttgactaccatt

SEQ ID NO: 289772 - DNA, 25 bp, Artificial
  probe
  misc_feature (1)..(25): SEQ ID NO: 1300; WAN024B7T; Start 38; Stop 62
acattctgaaattgcttgactacca

SEQ ID NO: 289773 - DNA, 25 bp, Artificial
  probe
  misc_feature (1)..(25): SEQ ID NO: 1300; WAN024B7T; Start 34; Stop 58
gaacacattctgaaattgcttgact

SEQ ID NO: 289774 - DNA, 25 bp, Artificial
  probe
  misc_feature (1)..(25): SEQ ID NO: 1300; WAN024B7T; Start 17; Stop 41
tattagtggatgatgaagaacacat

SEQ ID NO: 289775 - DNA, 25 bp, Artificial
  probe
  misc_feature (1)..(25): SEQ ID NO: 1300; WAN024B7T; Start 20; Stop 44
tagtggatgatgaagaacacattct

SEQ ID NO: 289776 - DNA, 25 bp, Artificial
  probe
  misc_feature (1)..(25): SEQ ID NO: 1300; WAN024B7T; Start 23; Stop 47
tggatgatgaagaacacattctgaa

SEQ ID NO: 289777 - DNA, 25 bp, Artificial
  probe
  misc_feature (1)..(25): SEQ ID NO: 1300; WAN024B7T; Start 22; Stop 46
gtggatgatgaagaacacattctga

SEQ ID NO: 289778 - DNA, 25 bp, Artificial
  probe
  misc_feature (1)..(25): SEQ ID NO: 1300; WAN024B7T; Start 21; Stop 45
agtggatgatgaagaacacattctg

SEQ ID NO: 289779 - DNA, 25 bp, Artificial
  probe
  misc_feature (1)..(25): SEQ ID NO: 1300; WAN024B7T; Start 15; Stop 39
cttattagtggatgatgaagaacac

SEQ ID NO: 289780 - DNA, 25 bp, Artificial
  probe
  misc_feature (1)..(25): SEQ ID NO: 1300; WAN024B7T; Start 41; Stop 65
ttctgaaattgcttgactaccattt

SEQ ID NO: 289781 - DNA, 25 bp, Artificial
  probe
  misc_feature (1)..(25): SEQ ID NO: 1300; WAN024B7T; Start 42; Stop 66
tctgaaattgcttgactaccattta

SEQ ID NO: 289782 - DNA, 25 bp, Artificial
  probe
  misc_feature (1)..(25): SEQ ID NO: 1300; WAN024B7T; Start 45; Stop 69
gaaattgcttgactaccatttaagt

SEQ ID NO: 289783 - DNA, 25 bp, Artificial
  probe
  misc_feature (1)..(25): SEQ ID NO: 1300; WAN024B7T; Start 44; Stop 68
tgaaattgcttgactaccatttaag

SEQ ID NO: 289784 - DNA, 25 bp, Artificial
  probe
  misc_feature (1)..(25): SEQ ID NO: 1300; WAN024B7T; Start 43; Stop 67
ctgaaattgcttgactaccatttaa

SEQ ID NO: 289785 - DNA, 25 bp, Artificial
  probe
  misc_feature (1)..(25): SEQ ID NO: 1300; WAN024B7T; Start 14; Stop 38
tcttattagtggatgatgaagaaca

SEQ ID NO: 289786 - DNA, 25 bp, Artificial
  probe
  misc_feature (1)..(25): SEQ ID NO: 1300; WAN024B7T; Start 7; Stop 31
aaacaagtcttattagtggatgatg

SEQ ID NO: 289787 - DNA, 25 bp, Artificial
  probe
  misc_feature (1)..(25): SEQ ID NO: 1300; WAN024B7T; Start 48; Stop 72
attgcttgactaccatttaagtaag

SEQ ID NO: 289788 - DNA, 25 bp, Artificial
  probe
  misc_feature (1)..(25): SEQ ID NO: 1300; WAN024B7T; Start 13; Stop 37
gtcttattagtggatgatgaagaac

SEQ ID NO: 289789 - DNA, 25 bp, Artificial
  probe
  misc_feature (1)..(25): SEQ ID NO: 1300; WAN024B7T; Start 32; Stop 56
aagaacacattctgaaattgcttga

SEQ ID NO: 289790 - DNA, 25 bp, Artificial
  probe
  misc_feature (1)..(25): SEQ ID NO: 1300; WAN024B7T; Start 31; Stop 55
gaagaacacattctgaaattgcttg

SEQ ID NO: 289791 - DNA, 25 bp, Artificial
  probe
  misc_feature (1)..(25): SEQ ID NO: 1300; WAN024B7T; Start 30; Stop 54
tgaagaacacattctgaaattgctt

SEQ ID NO: 289792 - DNA, 25 bp, Artificial
  probe
  misc_feature (1)..(25): SEQ ID NO: 1300; WAN024B7T; Start 29; Stop 53
atgaagaacacattctgaaattgct

SEQ ID NO: 289793 - DNA, 25 bp, Artificial
  probe
  misc_feature (1)..(25): SEQ ID NO: 1300; WAN024B7T; Start 12; Stop 36
agtcttattagtggatgatgaagaa

SEQ ID NO: 289794 - DNA, 25 bp, Artificial
  probe
  misc_feature (1)..(25): SEQ ID NO: 1301; WAN024DIC; Start 82; Stop 106
aagatgtacgaccacactgttgtaa

SEQ ID NO: 289795 - DNA, 25 bp, Artificial
  probe
  misc_feature (1)..(25): SEQ ID NO: 1301; WAN024DIC; Start 20; Stop 44
aatttactaaagacactgctcaact

SEQ ID NO: 289796 - DNA, 25 bp, Artificial
  probe
  misc_feature (1)..(25): SEQ ID NO: 1301; WAN024DIC; Start 21; Stop 45
atttactaaagacactgctcaactt

SEQ ID NO: 289797 - DNA, 25 bp, Artificial
  probe
  misc_feature (1)..(25): SEQ ID NO: 1301; WAN024DIC; Start 88; Stop 112
tacgaccacactgttgtaaatcata

SEQ ID NO: 289798 - DNA, 25 bp, Artificial
  probe
  misc_feature (1)..(25): SEQ ID NO: 1301; WAN024DIC; Start 90; Stop 114
cgaccacactgttgtaaatcatagt

SEQ ID NO: 289799 - DNA, 25 bp, Artificial
  probe
  misc_feature (1)..(25): SEQ ID NO: 1301; WAN024DIC; Start 89; Stop 113
acgaccacactgttgtaaatcatag

SEQ ID NO: 289800 - DNA, 25 bp, Artificial
  probe
  misc_feature (1)..(25): SEQ ID NO: 1301; WAN024DIC; Start 87; Stop 111
gtacgaccacactgttgtaaatcat

SEQ ID NO: 289801 - DNA, 25 bp, Artificial
  probe
  misc_feature (1)..(25): SEQ ID NO: 1301; WAN024DIC; Start 85; Stop 109
atgtacgaccacactgttgtaaatc

SEQ ID NO: 289802 - DNA, 25 bp, Artificial
  probe
  misc_feature (1)..(25): SEQ ID NO: 1301; WAN024DIC; Start 84; Stop 108
gatgtacgaccacactgttgtaaat

SEQ ID NO: 289803 - DNA, 25 bp, Artificial
  probe
  misc_feature (1)..(25): SEQ ID NO: 1301; WAN024DIC; Start 47; Stop 71
acacctgtaaatggttgttgtataa

SEQ ID NO: 289804 - DNA, 25 bp, Artificial
  probe
  misc_feature (1)..(25): SEQ ID NO: 1301; WAN024DIC; Start 83; Stop 107
agatgtacgaccacactgttgtaaa

SEQ ID NO: 289805 - DNA, 25 bp, Artificial
  probe
  misc_feature (1)..(25): SEQ ID NO: 1301; WAN024DIC; Start 81; Stop 105
aaagatgtacgaccacactgttgta

SEQ ID NO: 289806 - DNA, 25 bp, Artificial
  probe
  misc_feature (1)..(25): SEQ ID NO: 1301; WAN024DIC; Start 73; Stop 97
aaagttacaaagatgtacgaccaca

SEQ ID NO: 289807 - DNA, 25 bp, Artificial
  probe
  misc_feature (1)..(25): SEQ ID NO: 1301; WAN024DIC; Start 22; Stop 46
tttactaaagacactgctcaacttt

SEQ ID NO: 289808 - DNA, 25 bp, Artificial
  probe
  misc_feature (1)..(25): SEQ ID NO: 1301; WAN024DIC; Start 72; Stop 96
taaagttacaaagatgtacgaccac

SEQ ID NO: 289809 - DNA, 25 bp, Artificial
  probe
  misc_feature (1)..(25): SEQ ID NO: 1301; WAN024DIC; Start 29; Stop 53
aagacactgctcaactttacacctg

SEQ ID NO: 289810 - DNA, 25 bp, Artificial
  probe
  misc_feature (1)..(25): SEQ ID NO: 1301; WAN024DIC; Start 86; Stop 110
tgtacgaccacactgttgtaaatca

SEQ ID NO: 289811 - DNA, 25 bp, Artificial
  probe
  misc_feature (1)..(25): SEQ ID NO: 1301; WAN024DIC; Start 19; Stop 43
aaatttactaaagacactgctcaac

SEQ ID NO: 289812 - DNA, 25 bp, Artificial
  probe
  misc_feature (1)..(25): SEQ ID NO: 1301; WAN024DIC; Start 74; Stop 98
aagttacaaagatgtacgaccacac

SEQ ID NO: 289813 - DNA, 25 bp, Artificial
  probe
  misc_feature (1)..(25): SEQ ID NO: 1301; WAN024DIC; Start 31; Stop 55
gacactgctcaactttacacctgta

SEQ ID NO: 289814 - DNA, 25 bp, Artificial
  probe
  misc_feature (1)..(25): SEQ ID NO: 1301; WAN024DIC; Start 71; Stop 95
ataaagttacaaagatgtacgacca

SEQ ID NO: 289815 - DNA, 25 bp, Artificial
  probe
  misc_feature (1)..(25): SEQ ID NO: 1301; WAN024DIC; Start 48; Stop 72
cacctgtaaatggttgttgtataat

SEQ ID NO: 289816 - DNA, 25 bp, Artificial
  probe
  misc_feature (1)..(25): SEQ ID NO: 1301; WAN024DIC; Start 76; Stop 100
gttacaaagatgtacgaccacactg

SEQ ID NO: 289817 - DNA, 25 bp, Artificial
  probe
  misc_feature (1)..(25): SEQ ID NO: 1301; WAN024DIC; Start 75; Stop 99
agttacaaagatgtacgaccacact

SEQ ID NO: 289818 - DNA, 25 bp, Artificial
  probe
  misc_feature (1)..(25): SEQ ID NO: 1301; WAN024DIC; Start 46; Stop 70
tacacctgtaaatggttgttgtata

SEQ ID NO: 289819 - DNA, 25 bp, Artificial
  probe
  misc_feature (1)..(25): SEQ ID NO: 1301; WAN024DIC; Start 78; Stop 102
tacaaagatgtacgaccacactgtt

SEQ ID NO: 289820 - DNA, 25 bp, Artificial
  probe
  misc_feature (1)..(25): SEQ ID NO: 1301; WAN024DIC; Start 77; Stop 101
ttacaaagatgtacgaccacactgt

SEQ ID NO: 289821 - DNA, 25 bp, Artificial
  probe
  misc_feature (1)..(25): SEQ ID NO: 1301; WAN024DIC; Start 45; Stop 69
ttacacctgtaaatggttgttgtat

SEQ ID NO: 289822 - DNA, 25 bp, Artificial
  probe
  misc_feature (1)..(25): SEQ ID NO: 1301; WAN024DIC; Start 32; Stop 56
acactgctcaactttacacctgtaa

SEQ ID NO: 289823 - DNA, 25 bp, Artificial
  probe
  misc_feature (1)..(25): SEQ ID NO: 1301; WAN024DIC; Start 28; Stop 52
aaagacactgctcaactttacacct

SEQ ID NO: 289824 - DNA, 25 bp, Artificial
  probe
  misc_feature (1)..(25): SEQ ID NO: 1301; WAN024DIC; Start 130; Stop 154
actgatagcatttctacaaatacaa

SEQ ID NO: 289825 - DNA, 25 bp, Artificial
  probe
  misc_feature (1)..(25): SEQ ID NO: 1301; WAN024DIC; Start 15; Stop 39
ccctaaatttactaaagacactgct

SEQ ID NO: 289826 - DNA, 25 bp, Artificial
  probe
  misc_feature (1)..(25): SEQ ID NO: 1301; WAN024DIC; Start 14; Stop 38
tccctaaatttactaaagacactgc

SEQ ID NO: 289827 - DNA, 25 bp, Artificial
  probe
  misc_feature (1)..(25): SEQ ID NO: 1302; WAN024EYK; Start 282; Stop 306
ctatgagttggacatcacagacatc

SEQ ID NO: 289828 - DNA, 25 bp, Artificial
  probe
  misc_feature (1)..(25): SEQ ID NO: 1302; WAN024EYK; Start 1175; Stop 1199
gcatggatcgtacagaatatgaatt

SEQ ID NO: 289829 - DNA, 25 bp, Artificial
  probe
  misc_feature (1)..(25): SEQ ID NO: 1302; WAN024EYK; Start 675; Stop 699
cttgactgagttctggatgatggat

SEQ ID NO: 289830 - DNA, 25 bp, Artificial
  probe
  misc_feature (1)..(25): SEQ ID NO: 1302; WAN024EYK; Start 1174; Stop 1198
ggcatggatcgtacagaatatgaat

SEQ ID NO: 289831 - DNA, 25 bp, Artificial
  probe
  misc_feature (1)..(25): SEQ ID NO: 1302; WAN024EYK; Start 1150; Stop 1174
cttgtcgctaagatggatgaacttg

SEQ ID NO: 289832 - DNA, 25 bp, Artificial
  probe
  misc_feature (1)..(25): SEQ ID NO: 1302; WAN024EYK; Start 676; Stop 700
ttgactgagttctggatgatggatg

SEQ ID NO: 289833 - DNA, 25 bp, Artificial
  probe
  misc_feature (1)..(25): SEQ ID NO: 1302; WAN024EYK; Start 1171; Stop 1195
cttggcatggatcgtacagaatatg

SEQ ID NO: 289834 - DNA, 25 bp, Artificial
  probe
  misc_feature (1)..(25): SEQ ID NO: 1302; WAN024EYK; Start 1170; Stop 1194
acttggcatggatcgtacagaatat

SEQ ID NO: 289835 - DNA, 25 bp, Artificial
  probe
  misc_feature (1)..(25): SEQ ID NO: 1302; WAN024EYK; Start 672; Stop 696
tcacttgactgagttctggatgatg

SEQ ID NO: 289836 - DNA, 25 bp, Artificial
  probe
  misc_feature (1)..(25): SEQ ID NO: 1302; WAN024EYK; Start 1173; Stop 1197
tggcatggatcgtacagaatatgaa

SEQ ID NO: 289837 - DNA, 25 bp, Artificial
  probe
  misc_feature (1)..(25): SEQ ID NO: 1302; WAN024EYK; Start 1172; Stop 1196
ttggcatggatcgtacagaatatga

SEQ ID NO: 289838 - DNA, 25 bp, Artificial
  probe
  misc_feature (1)..(25): SEQ ID NO: 1302; WAN024EYK; Start 1169; Stop 1193
aacttggcatggatcgtacagaata

SEQ ID NO: 289839 - DNA, 25 bp, Artificial
  probe
  misc_feature (1)..(25): SEQ ID NO: 1302; WAN024EYK; Start 283; Stop 307
tatgagttggacatcacagacatcg

SEQ ID NO: 289840 - DNA, 25 bp, Artificial
  probe
  misc_feature (1)..(25): SEQ ID NO: 1302; WAN024EYK; Start 1158; Stop 1182
taagatggatgaacttggcatggat

SEQ ID NO: 289841 - DNA, 25 bp, Artificial
  probe
  misc_feature (1)..(25): SEQ ID NO: 1302; WAN024EYK; Start 818; Stop 842
atacagaactcttgaaacgctacat

SEQ ID NO: 289842 - DNA, 25 bp, Artificial
  probe
  misc_feature (1)..(25): SEQ ID NO: 1302; WAN024EYK; Start 819; Stop 843
tacagaactcttgaaacgctacatt

SEQ ID NO: 289843 - DNA, 25 bp, Artificial
  probe
  misc_feature (1)..(25): SEQ ID NO: 1302; WAN024EYK; Start 1149; Stop 1173
ccttgtcgctaagatggatgaactt

SEQ ID NO: 289844 - DNA, 25 bp, Artificial
  probe
  misc_feature (1)..(25): SEQ ID NO: 1302; WAN024EYK; Start 529; Stop 553
gaactctttgaaactgactacttcg

SEQ ID NO: 289845 - DNA, 25 bp, Artificial
  probe
  misc_feature (1)..(25): SEQ ID NO: 1302; WAN024EYK; Start 903; Stop 927
aaatgatgaagatgctgactacgag

SEQ ID NO: 289846 - DNA, 25 bp, Artificial
  probe
  misc_feature (1)..(25): SEQ ID NO: 1302; WAN024EYK; Start 817; Stop 841
gatacagaactcttgaaacgctaca

SEQ ID NO: 289847 - DNA, 25 bp, Artificial
  probe
  misc_feature (1)..(25): SEQ ID NO: 1302; WAN024EYK; Start 816; Stop 840
tgatacagaactcttgaaacgctac

SEQ ID NO: 289848 - DNA, 25 bp, Artificial
  probe
  misc_feature (1)..(25): SEQ ID NO: 1302; WAN024EYK; Start 815; Stop 839
gtgatacagaactcttgaaacgcta

SEQ ID NO: 289849 - DNA, 25 bp, Artificial
  probe
  misc_feature (1)..(25): SEQ ID NO: 1302; WAN024EYK; Start 683; Stop 707
agttctggatgatggatgctgagta

SEQ ID NO: 289850 - DNA, 25 bp, Artificial
  probe
  misc_feature (1)..(25): SEQ ID NO: 1302; WAN024EYK; Start 281; Stop 305
gctatgagttggacatcacagacat

SEQ ID NO: 289851 - DNA, 25 bp, Artificial
  probe
  misc_feature (1)..(25): SEQ ID NO: 1302; WAN024EYK; Start 532; Stop 556
ctctttgaaactgactacttcggaa

SEQ ID NO: 289852 - DNA, 25 bp, Artificial
  probe
  misc_feature (1)..(25): SEQ ID NO: 1302; WAN024EYK; Start 1094; Stop 1118
cagaaggctatggagaaattatcgg

SEQ ID NO: 289853 - DNA, 25 bp, Artificial
  probe
  misc_feature (1)..(25): SEQ ID NO: 1302; WAN024EYK; Start 533; Stop 557
tctttgaaactgactacttcggaac

SEQ ID NO: 289854 - DNA, 25 bp, Artificial
  probe
  misc_feature (1)..(25): SEQ ID NO: 1302; WAN024EYK; Start 530; Stop 554
aactctttgaaactgactacttcgg

SEQ ID NO: 289855 - DNA, 25 bp, Artificial
  probe
  misc_feature (1)..(25): SEQ ID NO: 1302; WAN024EYK; Start 1102; Stop 1126
tatggagaaattatcggtgggtcta

SEQ ID NO: 289856 - DNA, 25 bp, Artificial
  probe
  misc_feature (1)..(25): SEQ ID NO: 1302; WAN024EYK; Start 475; Stop 499
tttatgaagtttgacagcccaattc

SEQ ID NO: 289857 - DNA, 25 bp, Artificial
  probe
  misc_feature (1)..(25): SEQ ID NO: 1302; WAN024EYK; Start 807; Stop 831
cttggaacgtgatacagaactcttg

SEQ ID NO: 289858 - DNA, 25 bp, Artificial
  probe
  misc_feature (1)..(25): SEQ ID NO: 1302; WAN024EYK; Start 1096; Stop 1120
gaaggctatggagaaattatcggtg

SEQ ID NO: 289859 - DNA, 25 bp, Artificial
  probe
  misc_feature (1)..(25): SEQ ID NO: 1302; WAN024EYK; Start 1095; Stop 1119
agaaggctatggagaaattatcggt

SEQ ID NO: 289860 - DNA, 25 bp, Artificial
  probe
  misc_feature (1)..(25): SEQ ID NO: 1303; WAN024F52; Start 518; Stop 542
tagttgatgaccacgagaatgattg

SEQ ID NO: 289861 - DNA, 25 bp, Artificial
  probe
  misc_feature (1)..(25): SEQ ID NO: 1303; WAN024F52; Start 517; Stop 541
ctagttgatgaccacgagaatgatt

SEQ ID NO: 289862 - DNA, 25 bp, Artificial
  probe
  misc_feature (1)..(25): SEQ ID NO: 1303; WAN024F52; Start 519; Stop 543
agttgatgaccacgagaatgattgt

SEQ ID NO: 289863 - DNA, 25 bp, Artificial
  probe
  misc_feature (1)..(25): SEQ ID NO: 1303; WAN024F52; Start 97; Stop 121
ttgtttgagttgttgtgtatggaaa

SEQ ID NO: 289864 - DNA, 25 bp, Artificial
  probe
  misc_feature (1)..(25): SEQ ID NO: 1303; WAN024F52; Start 423; Stop 447
acccttatctgagaaattagccaaa

SEQ ID NO: 289865 - DNA, 25 bp, Artificial
  probe
  misc_feature (1)..(25): SEQ ID NO: 1303; WAN024F52; Start 422; Stop 446
cacccttatctgagaaattagccaa

SEQ ID NO: 289866 - DNA, 25 bp, Artificial
  probe
  misc_feature (1)..(25): SEQ ID NO: 1303; WAN024F52; Start 420; Stop 444
aacacccttatctgagaaattagcc

SEQ ID NO: 289867 - DNA, 25 bp, Artificial
  probe
  misc_feature (1)..(25): SEQ ID NO: 1303; WAN024F52; Start 516; Stop 540
gctagttgatgaccacgagaatgat

SEQ ID NO: 289868 - DNA, 25 bp, Artificial
  probe
  misc_feature (1)..(25): SEQ ID NO: 1303; WAN024F52; Start 105; Stop 129
gttgttgtgtatggaaacctatcag

SEQ ID NO: 289869 - DNA, 25 bp, Artificial
  probe
  misc_feature (1)..(25): SEQ ID NO: 1303; WAN024F52; Start 104; Stop 128
agttgttgtgtatggaaacctatca

SEQ ID NO: 289870 - DNA, 25 bp, Artificial
  probe
  misc_feature (1)..(25): SEQ ID NO: 1303; WAN024F52; Start 102; Stop 126
tgagttgttgtgtatggaaacctat

SEQ ID NO: 289871 - DNA, 25 bp, Artificial
  probe
  misc_feature (1)..(25): SEQ ID NO: 1303; WAN024F52; Start 103; Stop 127
gagttgttgtgtatggaaacctatc

SEQ ID NO: 289872 - DNA, 25 bp, Artificial
  probe
  misc_feature (1)..(25): SEQ ID NO: 1303; WAN024F52; Start 101; Stop 125
ttgagttgttgtgtatggaaaccta

SEQ ID NO: 289873 - DNA, 25 bp, Artificial
  probe
  misc_feature (1)..(25): SEQ ID NO: 1303; WAN024F52; Start 419; Stop 443
aaacacccttatctgagaaattagc

SEQ ID NO: 289874 - DNA, 25 bp, Artificial
  probe
  misc_feature (1)..(25): SEQ ID NO: 1303; WAN024F52; Start 424; Stop 448
cccttatctgagaaattagccaaag

SEQ ID NO: 289875 - DNA, 25 bp, Artificial
  probe
  misc_feature (1)..(25): SEQ ID NO: 1303; WAN024F52; Start 100; Stop 124
tttgagttgttgtgtatggaaacct

SEQ ID NO: 289876 - DNA, 25 bp, Artificial
  probe
  misc_feature (1)..(25): SEQ ID NO: 1303; WAN024F52; Start 421; Stop 445
acacccttatctgagaaattagcca

SEQ ID NO: 289877 - DNA, 25 bp, Artificial
  probe
  misc_feature (1)..(25): SEQ ID NO: 1303; WAN024F52; Start 520; Stop 544
gttgatgaccacgagaatgattgtg

SEQ ID NO: 289878 - DNA, 25 bp, Artificial
  probe
  misc_feature (1)..(25): SEQ ID NO: 1303; WAN024F52; Start 521; Stop 545
ttgatgaccacgagaatgattgtga

SEQ ID NO: 289879 - DNA, 25 bp, Artificial
  probe
  misc_feature (1)..(25): SEQ ID NO: 1303; WAN024F52; Start 425; Stop 449
ccttatctgagaaattagccaaaga

SEQ ID NO: 289880 - DNA, 25 bp, Artificial
  probe
  misc_feature (1)..(25): SEQ ID NO: 1303; WAN024F52; Start 523; Stop 547
gatgaccacgagaatgattgtgagt

SEQ ID NO: 289881 - DNA, 25 bp, Artificial
  probe
  misc_feature (1)..(25): SEQ ID NO: 1303; WAN024F52; Start 522; Stop 546
tgatgaccacgagaatgattgtgag

SEQ ID NO: 289882 - DNA, 25 bp, Artificial
  probe
  misc_feature (1)..(25): SEQ ID NO: 1303; WAN024F52; Start 106; Stop 130
ttgttgtgtatggaaacctatcagg

SEQ ID NO: 289883 - DNA, 25 bp, Artificial
  probe
  misc_feature (1)..(25): SEQ ID NO: 1303; WAN024F52; Start 524; Stop 548
atgaccacgagaatgattgtgagtg

SEQ ID NO: 289884 - DNA, 25 bp, Artificial
  probe
  misc_feature (1)..(25): SEQ ID NO: 1303; WAN024F52; Start 98; Stop 122
tgtttgagttgttgtgtatggaaac

SEQ ID NO: 289885 - DNA, 25 bp, Artificial
  probe
  misc_feature (1)..(25): SEQ ID NO: 1303; WAN024F52; Start 99; Stop 123
gtttgagttgttgtgtatggaaacc

SEQ ID NO: 289886 - DNA, 25 bp, Artificial
  probe
  misc_feature (1)..(25): SEQ ID NO: 1303; WAN024F52; Start 340; Stop 364
tttgatgcctatctttggtcttttg

SEQ ID NO: 289887 - DNA, 25 bp, Artificial
  probe
  misc_feature (1)..(25): SEQ ID NO: 1303; WAN024F52; Start 338; Stop 362
cttttgatgcctatctttggtcttt

SEQ ID NO: 289888 - DNA, 25 bp, Artificial
  probe
  misc_feature (1)..(25): SEQ ID NO: 1303; WAN024F52; Start 109; Stop 133
ttgtgtatggaaacctatcaggcag

SEQ ID NO: 289889 - DNA, 25 bp, Artificial
  probe
  misc_feature (1)..(25): SEQ ID NO: 1303; WAN024F52; Start 337; Stop 361
tcttttgatgcctatctttggtctt

SEQ ID NO: 289890 - DNA, 25 bp, Artificial
  probe
  misc_feature (1)..(25): SEQ ID NO: 1303; WAN024F52; Start 343; Stop 367
gatgcctatctttggtcttttgttg

SEQ ID NO: 289891 - DNA, 25 bp, Artificial
  probe
  misc_feature (1)..(25): SEQ ID NO: 1303; WAN024F52; Start 339; Stop 363
ttttgatgcctatctttggtctttt

SEQ ID NO: 289892 - DNA, 25 bp, Artificial
  probe
  misc_feature (1)..(25): SEQ ID NO: 1303; WAN024F52; Start 344; Stop 368
atgcctatctttggtcttttgttga

SEQ ID NO: 289893 - DNA, 25 bp, Artificial
  probe
  misc_feature (1)..(25): SEQ ID NO: 1304; WAN024D5G; Start 357; Stop 381
gcctatccattatgccttgattcaa

SEQ ID NO: 289894 - DNA, 25 bp, Artificial
  probe
  misc_feature (1)..(25): SEQ ID NO: 1304; WAN024D5G; Start 916; Stop 940
ggagaacgatttggtgactaactaa

SEQ ID NO: 289895 - DNA, 25 bp, Artificial
  probe
  misc_feature (1)..(25): SEQ ID NO: 1304; WAN024D5G; Start 650; Stop 674
ccaatcgtcaactctttaaccaaat

SEQ ID NO: 289896 - DNA, 25 bp, Artificial
  probe
  misc_feature (1)..(25): SEQ ID NO: 1304; WAN024D5G; Start 409; Stop 433
atggaaatggttaaggaaatggatg

SEQ ID NO: 289897 - DNA, 25 bp, Artificial
  probe
  misc_feature (1)..(25): SEQ ID NO: 1304; WAN024D5G; Start 728; Stop 752
ttaagatttatgaagccctaccagt

SEQ ID NO: 289898 - DNA, 25 bp, Artificial
  probe
  misc_feature (1)..(25): SEQ ID NO: 1304; WAN024D5G; Start 653; Stop 677
atcgtcaactctttaaccaaattcg

SEQ ID NO: 289899 - DNA, 25 bp, Artificial
  probe
  misc_feature (1)..(25): SEQ ID NO: 1304; WAN024D5G; Start 917; Stop 941
gagaacgatttggtgactaactaat

SEQ ID NO: 289900 - DNA, 25 bp, Artificial
  probe
  misc_feature (1)..(25): SEQ ID NO: 1304; WAN024D5G; Start 915; Stop 939
aggagaacgatttggtgactaacta

SEQ ID NO: 289901 - DNA, 25 bp, Artificial
  probe
  misc_feature (1)..(25): SEQ ID NO: 1304; WAN024D5G; Start 914; Stop 938
taggagaacgatttggtgactaact

SEQ ID NO: 289902 - DNA, 25 bp, Artificial
  probe
  misc_feature (1)..(25): SEQ ID NO: 1304; WAN024D5G; Start 913; Stop 937
gtaggagaacgatttggtgactaac

SEQ ID NO: 289903 - DNA, 25 bp, Artificial
  probe
  misc_feature (1)..(25): SEQ ID NO: 1304; WAN024D5G; Start 649; Stop 673
accaatcgtcaactctttaaccaaa

SEQ ID NO: 289904 - DNA, 25 bp, Artificial
  probe
  misc_feature (1)..(25): SEQ ID NO: 1304; WAN024D5G; Start 648; Stop 672
aaccaatcgtcaactctttaaccaa

SEQ ID NO: 289905 - DNA, 25 bp, Artificial
  probe
  misc_feature (1)..(25): SEQ ID NO: 1304; WAN024D5G; Start 647; Stop 671
aaaccaatcgtcaactctttaacca

SEQ ID NO: 289906 - DNA, 25 bp, Artificial
  probe
  misc_feature (1)..(25): SEQ ID NO: 1304; WAN024D5G; Start 729; Stop 753
taagatttatgaagccctaccagta

SEQ ID NO: 289907 - DNA, 25 bp, Artificial
  probe
  misc_feature (1)..(25): SEQ ID NO: 1304; WAN024D5G; Start 356; Stop 380
cgcctatccattatgccttgattca

SEQ ID NO: 289908 - DNA, 25 bp, Artificial
  probe
  misc_feature (1)..(25): SEQ ID NO: 1304; WAN024D5G; Start 912; Stop 936
tgtaggagaacgatttggtgactaa

SEQ ID NO: 289909 - DNA, 25 bp, Artificial
  probe
  misc_feature (1)..(25): SEQ ID NO: 1304; WAN024D5G; Start 902; Stop 926
gtacattgactgtaggagaacgatt

SEQ ID NO: 289910 - DNA, 25 bp, Artificial
  probe
  misc_feature (1)..(25): SEQ ID NO: 1304; WAN024D5G; Start 733; Stop 757
atttatgaagccctaccagtagaag

SEQ ID NO: 289911 - DNA, 25 bp, Artificial
  probe
  misc_feature (1)..(25): SEQ ID NO: 1304; WAN024D5G; Start 732; Stop 756
gatttatgaagccctaccagtagaa

SEQ ID NO: 289912 - DNA, 25 bp, Artificial
  probe
  misc_feature (1)..(25): SEQ ID NO: 1304; WAN024D5G; Start 730; Stop 754
aagatttatgaagccctaccagtag

SEQ ID NO: 289913 - DNA, 25 bp, Artificial
  probe
  misc_feature (1)..(25): SEQ ID NO: 1304; WAN024D5G; Start 655; Stop 679
cgtcaactctttaaccaaattcgtg

SEQ ID NO: 289914 - DNA, 25 bp, Artificial
  probe
  misc_feature (1)..(25): SEQ ID NO: 1304; WAN024D5G; Start 654; Stop 678
tcgtcaactctttaaccaaattcgt

SEQ ID NO: 289915 - DNA, 25 bp, Artificial
  probe
  misc_feature (1)..(25): SEQ ID NO: 1304; WAN024D5G; Start 731; Stop 755
agatttatgaagccctaccagtaga

SEQ ID NO: 289916 - DNA, 25 bp, Artificial
  probe
  misc_feature (1)..(25): SEQ ID NO: 1304; WAN024D5G; Start 727; Stop 751
tttaagatttatgaagccctaccag

SEQ ID NO: 289917 - DNA, 25 bp, Artificial
  probe
  misc_feature (1)..(25): SEQ ID NO: 1304; WAN024D5G; Start 651; Stop 675
caatcgtcaactctttaaccaaatt

SEQ ID NO: 289918 - DNA, 25 bp, Artificial
  probe
  misc_feature (1)..(25): SEQ ID NO: 1304; WAN024D5G; Start 905; Stop 929
cattgactgtaggagaacgatttgg

SEQ ID NO: 289919 - DNA, 25 bp, Artificial
  probe
  misc_feature (1)..(25): SEQ ID NO: 1304; WAN024D5G; Start 726; Stop 750
ctttaagatttatgaagccctacca

SEQ ID NO: 289920 - DNA, 25 bp, Artificial
  probe
  misc_feature (1)..(25): SEQ ID NO: 1304; WAN024D5G; Start 911; Stop 935
ctgtaggagaacgatttggtgacta

SEQ ID NO: 289921 - DNA, 25 bp, Artificial
  probe
  misc_feature (1)..(25): SEQ ID NO: 1304; WAN024D5G; Start 864; Stop 888
taagatggacattgcttccttcctc

SEQ ID NO: 289922 - DNA, 25 bp, Artificial
  probe
  misc_feature (1)..(25): SEQ ID NO: 1304; WAN024D5G; Start 863; Stop 887
ctaagatggacattgcttccttcct

SEQ ID NO: 289923 - DNA, 25 bp, Artificial
  probe
  misc_feature (1)..(25): SEQ ID NO: 1304; WAN024D5G; Start 906; Stop 930
attgactgtaggagaacgatttggt

SEQ ID NO: 289924 - DNA, 25 bp, Artificial
  probe
  misc_feature (1)..(25): SEQ ID NO: 1304; WAN024D5G; Start 652; Stop 676
aatcgtcaactctttaaccaaattc

SEQ ID NO: 289925 - DNA, 25 bp, Artificial
  probe
  misc_feature (1)..(25): SEQ ID NO: 1304; WAN024D5G; Start 410; Stop 434
tggaaatggttaaggaaatggatgc

SEQ ID NO: 289926 - DNA, 25 bp, Artificial
  probe
  misc_feature (1)..(25): SEQ ID NO: 1305; WAN024EWI; Start 561; Stop 585
aactgccttggatgtaactattcaa

SEQ ID NO: 289927 - DNA, 25 bp, Artificial
  probe
  misc_feature (1)..(25): SEQ ID NO: 1305; WAN024EWI; Start 560; Stop 584
caactgccttggatgtaactattca

SEQ ID NO: 289928 - DNA, 25 bp, Artificial
  probe
  misc_feature (1)..(25): SEQ ID NO: 1305; WAN024EWI; Start 412; Stop 436
attgactacatgaataaggttggca

SEQ ID NO: 289929 - DNA, 25 bp, Artificial
  probe
  misc_feature (1)..(25): SEQ ID NO: 1305; WAN024EWI; Start 558; Stop 582
aacaactgccttggatgtaactatt

SEQ ID NO: 289930 - DNA, 25 bp, Artificial
  probe
  misc_feature (1)..(25): SEQ ID NO: 1305; WAN024EWI; Start 411; Stop 435
cattgactacatgaataaggttggc

SEQ ID NO: 289931 - DNA, 25 bp, Artificial
  probe
  misc_feature (1)..(25): SEQ ID NO: 1305; WAN024EWI; Start 409; Stop 433
gccattgactacatgaataaggttg

SEQ ID NO: 289932 - DNA, 25 bp, Artificial
  probe
  misc_feature (1)..(25): SEQ ID NO: 1305; WAN024EWI; Start 414; Stop 438
tgactacatgaataaggttggcatt

SEQ ID NO: 289933 - DNA, 25 bp, Artificial
  probe
  misc_feature (1)..(25): SEQ ID NO: 1305; WAN024EWI; Start 413; Stop 437
ttgactacatgaataaggttggcat

SEQ ID NO: 289934 - DNA, 25 bp, Artificial
  probe
  misc_feature (1)..(25): SEQ ID NO: 1305; WAN024EWI; Start 559; Stop 583
acaactgccttggatgtaactattc

SEQ ID NO: 289935 - DNA, 25 bp, Artificial
  probe
  misc_feature (1)..(25): SEQ ID NO: 1305; WAN024EWI; Start 557; Stop 581
caacaactgccttggatgtaactat

SEQ ID NO: 289936 - DNA, 25 bp, Artificial
  probe
  misc_feature (1)..(25): SEQ ID NO: 1305; WAN024EWI; Start 339; Stop 363
aattggtagtcagattacagaagtt

SEQ ID NO: 289937 - DNA, 25 bp, Artificial
  probe
  misc_feature (1)..(25): SEQ ID NO: 1305; WAN024EWI; Start 569; Stop 593
tggatgtaactattcaagctcagat

SEQ ID NO: 289938 - DNA, 25 bp, Artificial
  probe
  misc_feature (1)..(25): SEQ ID NO: 1305; WAN024EWI; Start 114; Stop 138
agaagtattagccttggtaggtgag

SEQ ID NO: 289939 - DNA, 25 bp, Artificial
  probe
  misc_feature (1)..(25): SEQ ID NO: 1305; WAN024EWI; Start 113; Stop 137
gagaagtattagccttggtaggtga

SEQ ID NO: 289940 - DNA, 25 bp, Artificial
  probe
  misc_feature (1)..(25): SEQ ID NO: 1305; WAN024EWI; Start 531; Stop 555
acctgatgtcttgatctgtgatgag

SEQ ID NO: 289941 - DNA, 25 bp, Artificial
  probe
  misc_feature (1)..(25): SEQ ID NO: 1305; WAN024EWI; Start 116; Stop 140
aagtattagccttggtaggtgagtc

SEQ ID NO: 289942 - DNA, 25 bp, Artificial
  probe
  misc_feature (1)..(25): SEQ ID NO: 1305; WAN024EWI; Start 115; Stop 139
gaagtattagccttggtaggtgagt

SEQ ID NO: 289943 - DNA, 25 bp, Artificial
  probe
  misc_feature (1)..(25): SEQ ID NO: 1305; WAN024EWI; Start 568; Stop 592
ttggatgtaactattcaagctcaga

SEQ ID NO: 289944 - DNA, 25 bp, Artificial
  probe
  misc_feature (1)..(25): SEQ ID NO: 1305; WAN024EWI; Start 725; Stop 749
gaacggttgaggaagtcttctatga

SEQ ID NO: 289945 - DNA, 25 bp, Artificial
  probe
  misc_feature (1)..(25): SEQ ID NO: 1305; WAN024EWI; Start 570; Stop 594
ggatgtaactattcaagctcagatt

SEQ ID NO: 289946 - DNA, 25 bp, Artificial
  probe
  misc_feature (1)..(25): SEQ ID NO: 1305; WAN024EWI; Start 920; Stop 944
aagctcctcaattctcagtatcaga

SEQ ID NO: 289947 - DNA, 25 bp, Artificial
  probe
  misc_feature (1)..(25): SEQ ID NO: 1305; WAN024EWI; Start 631; Stop 655
ttcacaacaatctttattacccacg

SEQ ID NO: 289948 - DNA, 25 bp, Artificial
  probe
  misc_feature (1)..(25): SEQ ID NO: 1305; WAN024EWI; Start 675; Stop 699
tattgcggataaggtagcggttatg

SEQ ID NO: 289949 - DNA, 25 bp, Artificial
  probe
  misc_feature (1)..(25): SEQ ID NO: 1305; WAN024EWI; Start 674; Stop 698
gtattgcggataaggtagcggttat

SEQ ID NO: 289950 - DNA, 25 bp, Artificial
  probe
  misc_feature (1)..(25): SEQ ID NO: 1305; WAN024EWI; Start 636; Stop 660
aacaatctttattacccacgacctt

SEQ ID NO: 289951 - DNA, 25 bp, Artificial
  probe
  misc_feature (1)..(25): SEQ ID NO: 1305; WAN024EWI; Start 633; Stop 657
cacaacaatctttattacccacgac

SEQ ID NO: 289952 - DNA, 25 bp, Artificial
  probe
  misc_feature (1)..(25): SEQ ID NO: 1305; WAN024EWI; Start 632; Stop 656
tcacaacaatctttattacccacga

SEQ ID NO: 289953 - DNA, 25 bp, Artificial
  probe
  misc_feature (1)..(25): SEQ ID NO: 1305; WAN024EWI; Start 342; Stop 366
tggtagtcagattacagaagttatt

SEQ ID NO: 289954 - DNA, 25 bp, Artificial
  probe
  misc_feature (1)..(25): SEQ ID NO: 1305; WAN024EWI; Start 341; Stop 365
ttggtagtcagattacagaagttat

SEQ ID NO: 289955 - DNA, 25 bp, Artificial
  probe
  misc_feature (1)..(25): SEQ ID NO: 1305; WAN024EWI; Start 340; Stop 364
attggtagtcagattacagaagtta

SEQ ID NO: 289956 - DNA, 25 bp, Artificial
  probe
  misc_feature (1)..(25): SEQ ID NO: 1305; WAN024EWI; Start 635; Stop 659
caacaatctttattacccacgacct

SEQ ID NO: 289957 - DNA, 25 bp, Artificial
  probe
  misc_feature (1)..(25): SEQ ID NO: 1305; WAN024EWI; Start 620; Stop 644
acgagtatcatttcacaacaatctt

SEQ ID NO: 289958 - DNA, 25 bp, Artificial
  probe
  misc_feature (1)..(25): SEQ ID NO: 1305; WAN024EWI; Start 619; Stop 643
aacgagtatcatttcacaacaatct

SEQ ID NO: 289959 - DNA, 25 bp, Artificial
  probe
  misc_feature (1)..(25): SEQ ID NO: 1306; WAN024F4N; Start 560; Stop 584
tagcagagattatcaagttggtcaa

SEQ ID NO: 289960 - DNA, 25 bp, Artificial
  probe
  misc_feature (1)..(25): SEQ ID NO: 1306; WAN024F4N; Start 559; Stop 583
ttagcagagattatcaagttggtca

SEQ ID NO: 289961 - DNA, 25 bp, Artificial
  probe
  misc_feature (1)..(25): SEQ ID NO: 1306; WAN024F4N; Start 557; Stop 581
agttagcagagattatcaagttggt

SEQ ID NO: 289962 - DNA, 25 bp, Artificial
  probe
  misc_feature (1)..(25): SEQ ID NO: 1306; WAN024F4N; Start 558; Stop 582
gttagcagagattatcaagttggtc

SEQ ID NO: 289963 - DNA, 25 bp, Artificial
  probe
  misc_feature (1)..(25): SEQ ID NO: 1306; WAN024F4N; Start 556; Stop 580
gagttagcagagattatcaagttgg

SEQ ID NO: 289964 - DNA, 25 bp, Artificial
  probe
  misc_feature (1)..(25): SEQ ID NO: 1306; WAN024F4N; Start 701; Stop 725
atatgttggctctggatggtagaat

SEQ ID NO: 289965 - DNA, 25 bp, Artificial
  probe
  misc_feature (1)..(25): SEQ ID NO: 1306; WAN024F4N; Start 702; Stop 726
tatgttggctctggatggtagaatt

SEQ ID NO: 289966 - DNA, 25 bp, Artificial
  probe
  misc_feature (1)..(25): SEQ ID NO: 1306; WAN024F4N; Start 555; Stop 579
tgagttagcagagattatcaagttg

SEQ ID NO: 289967 - DNA, 25 bp, Artificial
  probe
  misc_feature (1)..(25): SEQ ID NO: 1306; WAN024F4N; Start 551; Stop 575
cgactgagttagcagagattatcaa

SEQ ID NO: 289968 - DNA, 25 bp, Artificial
  probe
  misc_feature (1)..(25): SEQ ID NO: 1306; WAN024F4N; Start 549; Stop 573
aacgactgagttagcagagattatc

SEQ ID NO: 289969 - DNA, 25 bp, Artificial
  probe
  misc_feature (1)..(25): SEQ ID NO: 1306; WAN024F4N; Start 548; Stop 572
caacgactgagttagcagagattat

SEQ ID NO: 289970 - DNA, 25 bp, Artificial
  probe
  misc_feature (1)..(25): SEQ ID NO: 1306; WAN024F4N; Start 700; Stop 724
gatatgttggctctggatggtagaa

SEQ ID NO: 289971 - DNA, 25 bp, Artificial
  probe
  misc_feature (1)..(25): SEQ ID NO: 1306; WAN024F4N; Start 553; Stop 577
actgagttagcagagattatcaagt

SEQ ID NO: 289972 - DNA, 25 bp, Artificial
  probe
  misc_feature (1)..(25): SEQ ID NO: 1306; WAN024F4N; Start 550; Stop 574
acgactgagttagcagagattatca

SEQ ID NO: 289973 - DNA, 25 bp, Artificial
  probe
  misc_feature (1)..(25): SEQ ID NO: 1306; WAN024F4N; Start 552; Stop 576
gactgagttagcagagattatcaag

SEQ ID NO: 289974 - DNA, 25 bp, Artificial
  probe
  misc_feature (1)..(25): SEQ ID NO: 1306; WAN024F4N; Start 695; Stop 719
ctatggatatgttggctctggatgg

SEQ ID NO: 289975 - DNA, 25 bp, Artificial
  probe
  misc_feature (1)..(25): SEQ ID NO: 1306; WAN024F4N; Start 547; Stop 571
acaacgactgagttagcagagatta

SEQ ID NO: 289976 - DNA, 25 bp, Artificial
  probe
  misc_feature (1)..(25): SEQ ID NO: 1306; WAN024F4N; Start 554; Stop 578
ctgagttagcagagattatcaagtt

SEQ ID NO: 289977 - DNA, 25 bp, Artificial
  probe
  misc_feature (1)..(25): SEQ ID NO: 1306; WAN024F4N; Start 30; Stop 54
cttactccacgaaacgattgatatg

SEQ ID NO: 289978 - DNA, 25 bp, Artificial
  probe
  misc_feature (1)..(25): SEQ ID NO: 1306; WAN024F4N; Start 29; Stop 53
tcttactccacgaaacgattgatat

SEQ ID NO: 289979 - DNA, 25 bp, Artificial
  probe
  misc_feature (1)..(25): SEQ ID NO: 1306; WAN024F4N; Start 561; Stop 585
agcagagattatcaagttggtcaaa

SEQ ID NO: 289980 - DNA, 25 bp, Artificial
  probe
  misc_feature (1)..(25): SEQ ID NO: 1306; WAN024F4N; Start 28; Stop 52
gtcttactccacgaaacgattgata

SEQ ID NO: 289981 - DNA, 25 bp, Artificial
  probe
  misc_feature (1)..(25): SEQ ID NO: 1306; WAN024F4N; Start 298; Stop 322
gatggaatttgttatgacttgggag

SEQ ID NO: 289982 - DNA, 25 bp, Artificial
  probe
  misc_feature (1)..(25): SEQ ID NO: 1306; WAN024F4N; Start 296; Stop 320
ttgatggaatttgttatgacttggg

SEQ ID NO: 289983 - DNA, 25 bp, Artificial
  probe
  misc_feature (1)..(25): SEQ ID NO: 1306; WAN024F4N; Start 297; Stop 321
tgatggaatttgttatgacttggga

SEQ ID NO: 289984 - DNA, 25 bp, Artificial
  probe
  misc_feature (1)..(25): SEQ ID NO: 1306; WAN024F4N; Start 734; Stop 758
ttacctttcattccttagaagaccg

SEQ ID NO: 289985 - DNA, 25 bp, Artificial
  probe
  misc_feature (1)..(25): SEQ ID NO: 1306; WAN024F4N; Start 697; Stop 721
atggatatgttggctctggatggta

SEQ ID NO: 289986 - DNA, 25 bp, Artificial
  probe
  misc_feature (1)..(25): SEQ ID NO: 1306; WAN024F4N; Start 696; Stop 720
tatggatatgttggctctggatggt

SEQ ID NO: 289987 - DNA, 25 bp, Artificial
  probe
  misc_feature (1)..(25): SEQ ID NO: 1306; WAN024F4N; Start 562; Stop 586
gcagagattatcaagttggtcaaac

SEQ ID NO: 289988 - DNA, 25 bp, Artificial
  probe
  misc_feature (1)..(25): SEQ ID NO: 1306; WAN024F4N; Start 878; Stop 902
gtgcggaagagttagaagccaataa

SEQ ID NO: 289989 - DNA, 25 bp, Artificial
  probe
  misc_feature (1)..(25): SEQ ID NO: 1306; WAN024F4N; Start 540; Stop 564
gattgagacaacgactgagttagca

SEQ ID NO: 289990 - DNA, 25 bp, Artificial
  probe
  misc_feature (1)..(25): SEQ ID NO: 1306; WAN024F4N; Start 694; Stop 718
gctatggatatgttggctctggatg

SEQ ID NO: 289991 - DNA, 25 bp, Artificial
  probe
  misc_feature (1)..(25): SEQ ID NO: 1306; WAN024F4N; Start 740; Stop 764
ttcattccttagaagaccgcttgac

SEQ ID NO: 289992 - DNA, 25 bp, Artificial
  probe
  misc_feature (1)..(25): SEQ ID NO: 1307; WAN024DA2; Start 450; Stop 474
gacacaacaagacctccactatatc

SEQ ID NO: 289993 - DNA, 25 bp, Artificial
  probe
  misc_feature (1)..(25): SEQ ID NO: 1307; WAN024DA2; Start 142; Stop 166
tctccaattctatctaccaatcgtg

SEQ ID NO: 289994 - DNA, 25 bp, Artificial
  probe
  misc_feature (1)..(25): SEQ ID NO: 1307; WAN024DA2; Start 449; Stop 473
agacacaacaagacctccactatat

SEQ ID NO: 289995 - DNA, 25 bp, Artificial
  probe
  misc_feature (1)..(25): SEQ ID NO: 1307; WAN024DA2; Start 141; Stop 165
atctccaattctatctaccaatcgt

SEQ ID NO: 289996 - DNA, 25 bp, Artificial
  probe
  misc_feature (1)..(25): SEQ ID NO: 1307; WAN024DA2; Start 254; Stop 278
tacttgctatcgtagataatggtgg

SEQ ID NO: 289997 - DNA, 25 bp, Artificial
  probe
  misc_feature (1)..(25): SEQ ID NO: 1307; WAN024DA2; Start 240; Stop 264
aattggacgagaattacttgctatc

SEQ ID NO: 289998 - DNA, 25 bp, Artificial
  probe
  misc_feature (1)..(25): SEQ ID NO: 1307; WAN024DA2; Start 256; Stop 280
cttgctatcgtagataatggtggtc

SEQ ID NO: 289999 - DNA, 25 bp, Artificial
  probe
  misc_feature (1)..(25): SEQ ID NO: 1307; WAN024DA2; Start 140; Stop 164
gatctccaattctatctaccaatcg

SEQ ID NO: 290000 - DNA, 25 bp, Artificial
  probe
  misc_feature (1)..(25): SEQ ID NO: 1307; WAN024DA2; Start 448; Stop 472
gagacacaacaagacctccactata

SEQ ID NO: 290001 - DNA, 25 bp, Artificial
  probe
  misc_feature (1)..(25): SEQ ID NO: 1307; WAN024DA2; Start 255; Stop 279
acttgctatcgtagataatggtggt

SEQ ID NO: 290002 - DNA, 25 bp, Artificial
  probe
  misc_feature (1)..(25): SEQ ID NO: 1307; WAN024DA2; Start 139; Stop 163
ggatctccaattctatctaccaatc

SEQ ID NO: 290003 - DNA, 25 bp, Artificial
  probe
  misc_feature (1)..(25): SEQ ID NO: 1307; WAN024DA2; Start 253; Stop 277
ttacttgctatcgtagataatggtg

SEQ ID NO: 290004 - DNA, 25 bp, Artificial
  probe
  misc_feature (1)..(25): SEQ ID NO: 1307; WAN024DA2; Start 143; Stop 167
ctccaattctatctaccaatcgtgg

SEQ ID NO: 290005 - DNA, 25 bp, Artificial
  probe
  misc_feature (1)..(25): SEQ ID NO: 1307; WAN024DA2; Start 428; Stop 452
attatcacctagttgaagccgagac

SEQ ID NO: 290006 - DNA, 25 bp, Artificial
  probe
  misc_feature (1)..(25): SEQ ID NO: 1307; WAN024DA2; Start 427; Stop 451
cattatcacctagttgaagccgaga

SEQ ID NO: 290007 - DNA, 25 bp, Artificial
  probe
  misc_feature (1)..(25): SEQ ID NO: 1307; WAN024DA2; Start 426; Stop 450
tcattatcacctagttgaagccgag

SEQ ID NO: 290008 - DNA, 25 bp, Artificial
  probe
  misc_feature (1)..(25): SEQ ID NO: 1307; WAN024DA2; Start 229; Stop 253
gaagttgaagaaattggacgagaat

SEQ ID NO: 290009 - DNA, 25 bp, Artificial
  probe
  misc_feature (1)..(25): SEQ ID NO: 1307; WAN024DA2; Start 386; Stop 410
gttctgactttaagccaatttctga

SEQ ID NO: 290010 - DNA, 25 bp, Artificial
  probe
  misc_feature (1)..(25): SEQ ID NO: 1307; WAN024DA2; Start 387; Stop 411
ttctgactttaagccaatttctgag

SEQ ID NO: 290011 - DNA, 25 bp, Artificial
  probe
  misc_feature (1)..(25): SEQ ID NO: 1307; WAN024DA2; Start 257; Stop 281
ttgctatcgtagataatggtggtcg

SEQ ID NO: 290012 - DNA, 25 bp, Artificial
  probe
  misc_feature (1)..(25): SEQ ID NO: 1307; WAN024DA2; Start 227; Stop 251
atgaagttgaagaaattggacgaga

SEQ ID NO: 290013 - DNA, 25 bp, Artificial
  probe
  misc_feature (1)..(25): SEQ ID NO: 1307; WAN024DA2; Start 385; Stop 409
cgttctgactttaagccaatttctg

SEQ ID NO: 290014 - DNA, 25 bp, Artificial
  probe
  misc_feature (1)..(25): SEQ ID NO: 1307; WAN024DA2; Start 228; Stop 252
tgaagttgaagaaattggacgagaa

SEQ ID NO: 290015 - DNA, 25 bp, Artificial
  probe
  misc_feature (1)..(25): SEQ ID NO: 1307; WAN024DA2; Start 252; Stop 276
attacttgctatcgtagataatggt

SEQ ID NO: 290016 - DNA, 25 bp, Artificial
  probe
  misc_feature (1)..(25): SEQ ID NO: 1307; WAN024DA2; Start 389; Stop 413
ctgactttaagccaatttctgagtt

SEQ ID NO: 290017 - DNA, 25 bp, Artificial
  probe
  misc_feature (1)..(25): SEQ ID NO: 1307; WAN024DA2; Start 388; Stop 412
tctgactttaagccaatttctgagt

SEQ ID NO: 290018 - DNA, 25 bp, Artificial
  probe
  misc_feature (1)..(25): SEQ ID NO: 1307; WAN024DA2; Start 133; Stop 157
gctgatggatctccaattctatcta

SEQ ID NO: 290019 - DNA, 25 bp, Artificial
  probe
  misc_feature (1)..(25): SEQ ID NO: 1307; WAN024DA2; Start 241; Stop 265
attggacgagaattacttgctatcg

SEQ ID NO: 290020 - DNA, 25 bp, Artificial
  probe
  misc_feature (1)..(25): SEQ ID NO: 1307; WAN024DA2; Start 136; Stop 160
gatggatctccaattctatctacca

SEQ ID NO: 290021 - DNA, 25 bp, Artificial
  probe
  misc_feature (1)..(25): SEQ ID NO: 1307; WAN024DA2; Start 135; Stop 159
tgatggatctccaattctatctacc

SEQ ID NO: 290022 - DNA, 25 bp, Artificial
  probe
  misc_feature (1)..(25): SEQ ID NO: 1307; WAN024DA2; Start 236; Stop 260
aagaaattggacgagaattacttgc

SEQ ID NO: 290023 - DNA, 25 bp, Artificial
  probe
  misc_feature (1)..(25): SEQ ID NO: 1307; WAN024DA2; Start 223; Stop 247
aagcatgaagttgaagaaattggac

SEQ ID NO: 290024 - DNA, 25 bp, Artificial
  probe
  misc_feature (1)..(25): SEQ ID NO: 1307; WAN024DA2; Start 127; Stop 151
ttaagagctgatggatctccaattc

SEQ ID NO: 290025 - DNA, 25 bp, Artificial
  probe
  misc_feature (1)..(25): SEQ ID NO: 1308; WAN024DA3; Start 450; Stop 474
aacacaacaagacctccactatatc

SEQ ID NO: 290026 - DNA, 25 bp, Artificial
  probe
  misc_feature (1)..(25): SEQ ID NO: 1308; WAN024DA3; Start 284; Stop 308
tccagaataccttgattgaccatcc

SEQ ID NO: 290027 - DNA, 25 bp, Artificial
  probe
  misc_feature (1)..(25): SEQ ID NO: 1308; WAN024DA3; Start 185; Stop 209
ttgataccaatccttatgttcacaa

SEQ ID NO: 290028 - DNA, 25 bp, Artificial
  probe
  misc_feature (1)..(25): SEQ ID NO: 1308; WAN024DA3; Start 283; Stop 307
gtccagaataccttgattgaccatc

SEQ ID NO: 290029 - DNA, 25 bp, Artificial
  probe
  misc_feature (1)..(25): SEQ ID NO: 1308; WAN024DA3; Start 250; Stop 274
gaactccttgctattgtcgataatg

SEQ ID NO: 290030 - DNA, 25 bp, Artificial
  probe
  misc_feature (1)..(25): SEQ ID NO: 1308; WAN024DA3; Start 249; Stop 273
ggaactccttgctattgtcgataat

SEQ ID NO: 290031 - DNA, 25 bp, Artificial
  probe
  misc_feature (1)..(25): SEQ ID NO: 1308; WAN024DA3; Start 251; Stop 275
aactccttgctattgtcgataatgg

SEQ ID NO: 290032 - DNA, 25 bp, Artificial
  probe
  misc_feature (1)..(25): SEQ ID NO: 1308; WAN024DA3; Start 282; Stop 306
tgtccagaataccttgattgaccat

SEQ ID NO: 290033 - DNA, 25 bp, Artificial
  probe
  misc_feature (1)..(25): SEQ ID NO: 1308; WAN024DA3; Start 281; Stop 305
atgtccagaataccttgattgacca

SEQ ID NO: 290034 - DNA, 25 bp, Artificial
  probe
  misc_feature (1)..(25): SEQ ID NO: 1308; WAN024DA3; Start 449; Stop 473
aaacacaacaagacctccactatat

SEQ ID NO: 290035 - DNA, 25 bp, Artificial
  probe
  misc_feature (1)..(25): SEQ ID NO: 1308; WAN024DA3; Start 156; Stop 180
caccaatcgtggctacatctataag

SEQ ID NO: 290036 - DNA, 25 bp, Artificial
  probe
  misc_feature (1)..(25): SEQ ID NO: 1308; WAN024DA3; Start 448; Stop 472
gaaacacaacaagacctccactata

SEQ ID NO: 290037 - DNA, 25 bp, Artificial
  probe
  misc_feature (1)..(25): SEQ ID NO: 1308; WAN024DA3; Start 323; Stop 347
ttgaaaccttgcttaaactgtcttg

SEQ ID NO: 290038 - DNA, 25 bp, Artificial
  probe
  misc_feature (1)..(25): SEQ ID NO: 1308; WAN024DA3; Start 322; Stop 346
attgaaaccttgcttaaactgtctt

SEQ ID NO: 290039 - DNA, 25 bp, Artificial
  probe
  misc_feature (1)..(25): SEQ ID NO: 1308; WAN024DA3; Start 321; Stop 345
aattgaaaccttgcttaaactgtct

SEQ ID NO: 290040 - DNA, 25 bp, Artificial
  probe
  misc_feature (1)..(25): SEQ ID NO: 1308; WAN024DA3; Start 280; Stop 304
catgtccagaataccttgattgacc

SEQ ID NO: 290041 - DNA, 25 bp, Artificial
  probe
  misc_feature (1)..(25): SEQ ID NO: 1308; WAN024DA3; Start 325; Stop 349
gaaaccttgcttaaactgtcttgtc

SEQ ID NO: 290042 - DNA, 25 bp, Artificial
  probe
  misc_feature (1)..(25): SEQ ID NO: 1308; WAN024DA3; Start 315; Stop 339
tggagaaattgaaaccttgcttaaa

SEQ ID NO: 290043 - DNA, 25 bp, Artificial
  probe
  misc_feature (1)..(25): SEQ ID NO: 1308; WAN024DA3; Start 314; Stop 338
atggagaaattgaaaccttgcttaa

SEQ ID NO: 290044 - DNA, 25 bp, Artificial
  probe
  misc_feature (1)..(25): SEQ ID NO: 1308; WAN024DA3; Start 312; Stop 336
ttatggagaaattgaaaccttgctt

SEQ ID NO: 290045 - DNA, 25 bp, Artificial
  probe
  misc_feature (1)..(25): SEQ ID NO: 1308; WAN024DA3; Start 253; Stop 277
ctccttgctattgtcgataatggtg

SEQ ID NO: 290046 - DNA, 25 bp, Artificial
  probe
  misc_feature (1)..(25): SEQ ID NO: 1308; WAN024DA3; Start 311; Stop 335
tttatggagaaattgaaaccttgct

SEQ ID NO: 290047 - DNA, 25 bp, Artificial
  probe
  misc_feature (1)..(25): SEQ ID NO: 1308; WAN024DA3; Start 316; Stop 340
ggagaaattgaaaccttgcttaaac

SEQ ID NO: 290048 - DNA, 25 bp, Artificial
  probe
  misc_feature (1)..(25): SEQ ID NO: 1308; WAN024DA3; Start 252; Stop 276
actccttgctattgtcgataatggt

SEQ ID NO: 290049 - DNA, 25 bp, Artificial
  probe
  misc_feature (1)..(25): SEQ ID NO: 1308; WAN024DA3; Start 320; Stop 344
aaattgaaaccttgcttaaactgtc

SEQ ID NO: 290050 - DNA, 25 bp, Artificial
  probe
  misc_feature (1)..(25): SEQ ID NO: 1308; WAN024DA3; Start 319; Stop 343
gaaattgaaaccttgcttaaactgt

SEQ ID NO: 290051 - DNA, 25 bp, Artificial
  probe
  misc_feature (1)..(25): SEQ ID NO: 1308; WAN024DA3; Start 324; Stop 348
tgaaaccttgcttaaactgtcttgt

SEQ ID NO: 290052 - DNA, 25 bp, Artificial
  probe
  misc_feature (1)..(25): SEQ ID NO: 1308; WAN024DA3; Start 190; Stop 214
accaatccttatgttcacaaacttt

SEQ ID NO: 290053 - DNA, 25 bp, Artificial
  probe
  misc_feature (1)..(25): SEQ ID NO: 1308; WAN024DA3; Start 384; Stop 408
gcattctgactttagacctctatct

SEQ ID NO: 290054 - DNA, 25 bp, Artificial
  probe
  misc_feature (1)..(25): SEQ ID NO: 1308; WAN024DA3; Start 383; Stop 407
agcattctgactttagacctctatc

SEQ ID NO: 290055 - DNA, 25 bp, Artificial
  probe
  misc_feature (1)..(25): SEQ ID NO: 1308; WAN024DA3; Start 318; Stop 342
agaaattgaaaccttgcttaaactg

SEQ ID NO: 290056 - DNA, 25 bp, Artificial
  probe
  misc_feature (1)..(25): SEQ ID NO: 1308; WAN024DA3; Start 279; Stop 303
gcatgtccagaataccttgattgac

SEQ ID NO: 290057 - DNA, 25 bp, Artificial
  probe
  misc_feature (1)..(25): SEQ ID NO: 1308; WAN024DA3; Start 313; Stop 337
tatggagaaattgaaaccttgctta

SEQ ID NO: 290058 - DNA, 25 bp, Artificial
  probe
  misc_feature (1)..(25): SEQ ID NO: 1309; WAN024BHE; Start 218; Stop 242
tcactacaagttatcagcaacatct

SEQ ID NO: 290059 - DNA, 25 bp, Artificial
  probe
  misc_feature (1)..(25): SEQ ID NO: 1309; WAN024BHE; Start 219; Stop 243
cactacaagttatcagcaacatctt

SEQ ID NO: 290060 - DNA, 25 bp, Artificial
  probe
  misc_feature (1)..(25): SEQ ID NO: 1309; WAN024BHE; Start 217; Stop 241
atcactacaagttatcagcaacatc

SEQ ID NO: 290061 - DNA, 25 bp, Artificial
  probe
  misc_feature (1)..(25): SEQ ID NO: 1309; WAN024BHE; Start 216; Stop 240
tatcactacaagttatcagcaacat

SEQ ID NO: 290062 - DNA, 25 bp, Artificial
  probe
  misc_feature (1)..(25): SEQ ID NO: 1309; WAN024BHE; Start 215; Stop 239
atatcactacaagttatcagcaaca

SEQ ID NO: 290063 - DNA, 25 bp, Artificial
  probe
  misc_feature (1)..(25): SEQ ID NO: 1309; WAN024BHE; Start 220; Stop 244
actacaagttatcagcaacatctta

SEQ ID NO: 290064 - DNA, 25 bp, Artificial
  probe
  misc_feature (1)..(25): SEQ ID NO: 1309; WAN024BHE; Start 221; Stop 245
ctacaagttatcagcaacatcttaa

SEQ ID NO: 290065 - DNA, 25 bp, Artificial
  probe
  misc_feature (1)..(25): SEQ ID NO: 1309; WAN024BHE; Start 182; Stop 206
aagttacagaggttagaacaggaaa

SEQ ID NO: 290066 - DNA, 25 bp, Artificial
  probe
  misc_feature (1)..(25): SEQ ID NO: 1309; WAN024BHE; Start 181; Stop 205
aaagttacagaggttagaacaggaa

SEQ ID NO: 290067 - DNA, 25 bp, Artificial
  probe
  misc_feature (1)..(25): SEQ ID NO: 1309; WAN024BHE; Start 212; Stop 236
cagatatcactacaagttatcagca

SEQ ID NO: 290068 - DNA, 25 bp, Artificial
  probe
  misc_feature (1)..(25): SEQ ID NO: 1309; WAN024BHE; Start 211; Stop 235
acagatatcactacaagttatcagc

SEQ ID NO: 290069 - DNA, 25 bp, Artificial
  probe
  misc_feature (1)..(25): SEQ ID NO: 1309; WAN024BHE; Start 214; Stop 238
gatatcactacaagttatcagcaac

SEQ ID NO: 290070 - DNA, 25 bp, Artificial
  probe
  misc_feature (1)..(25): SEQ ID NO: 1309; WAN024BHE; Start 213; Stop 237
agatatcactacaagttatcagcaa

SEQ ID NO: 290071 - DNA, 25 bp, Artificial
  probe
  misc_feature (1)..(25): SEQ ID NO: 1309; WAN024BHE; Start 192; Stop 216
ggttagaacaggaaaagagacagat

SEQ ID NO: 290072 - DNA, 25 bp, Artificial
  probe
  misc_feature (1)..(25): SEQ ID NO: 1309; WAN024BHE; Start 186; Stop 210
tacagaggttagaacaggaaaagag

SEQ ID NO: 290073 - DNA, 25 bp, Artificial
  probe
  misc_feature (1)..(25): SEQ ID NO: 1309; WAN024BHE; Start 185; Stop 209
ttacagaggttagaacaggaaaaga

SEQ ID NO: 290074 - DNA, 25 bp, Artificial
  probe
  misc_feature (1)..(25): SEQ ID NO: 1309; WAN024BHE; Start 190; Stop 214
gaggttagaacaggaaaagagacag

SEQ ID NO: 290075 - DNA, 25 bp, Artificial
  probe
  misc_feature (1)..(25): SEQ ID NO: 1309; WAN024BHE; Start 188; Stop 212
cagaggttagaacaggaaaagagac

SEQ ID NO: 290076 - DNA, 25 bp, Artificial
  probe
  misc_feature (1)..(25): SEQ ID NO: 1309; WAN024BHE; Start 222; Stop 246
tacaagttatcagcaacatcttaaa

SEQ ID NO: 290077 - DNA, 25 bp, Artificial
  probe
  misc_feature (1)..(25): SEQ ID NO: 1309; WAN024BHE; Start 191; Stop 215
aggttagaacaggaaaagagacaga

SEQ ID NO: 290078 - DNA, 25 bp, Artificial
  probe
  misc_feature (1)..(25): SEQ ID NO: 1309; WAN024BHE; Start 189; Stop 213
agaggttagaacaggaaaagagaca

SEQ ID NO: 290079 - DNA, 25 bp, Artificial
  probe
  misc_feature (1)..(25): SEQ ID NO: 1309; WAN024BHE; Start 187; Stop 211
acagaggttagaacaggaaaagaga

SEQ ID NO: 290080 - DNA, 25 bp, Artificial
  probe
  misc_feature (1)..(25): SEQ ID NO: 1309; WAN024BHE; Start 183; Stop 207
agttacagaggttagaacaggaaaa

SEQ ID NO: 290081 - DNA, 25 bp, Artificial
  probe
  misc_feature (1)..(25): SEQ ID NO: 1309; WAN024BHE; Start 184; Stop 208
gttacagaggttagaacaggaaaag

SEQ ID NO: 290082 - DNA, 25 bp, Artificial
  probe
  misc_feature (1)..(25): SEQ ID NO: 1309; WAN024BHE; Start 206; Stop 230
aagagacagatatcactacaagtta

SEQ ID NO: 290083 - DNA, 25 bp, Artificial
  probe
  misc_feature (1)..(25): SEQ ID NO: 1309; WAN024BHE; Start 209; Stop 233
agacagatatcactacaagttatca

SEQ ID NO: 290084 - DNA, 25 bp, Artificial
  probe
  misc_feature (1)..(25): SEQ ID NO: 1309; WAN024BHE; Start 207; Stop 231
agagacagatatcactacaagttat

SEQ ID NO: 290085 - DNA, 25 bp, Artificial
  probe
  misc_feature (1)..(25): SEQ ID NO: 1309; WAN024BHE; Start 210; Stop 234
gacagatatcactacaagttatcag

SEQ ID NO: 290086 - DNA, 25 bp, Artificial
  probe
  misc_feature (1)..(25): SEQ ID NO: 1309; WAN024BHE; Start 193; Stop 217
gttagaacaggaaaagagacagata

SEQ ID NO: 290087 - DNA, 25 bp, Artificial
  probe
  misc_feature (1)..(25): SEQ ID NO: 1309; WAN024BHE; Start 208; Stop 232
gagacagatatcactacaagttatc

SEQ ID NO: 290088 - DNA, 25 bp, Artificial
  probe
  misc_feature (1)..(25): SEQ ID NO: 1309; WAN024BHE; Start 205; Stop 229
aaagagacagatatcactacaagtt

SEQ ID NO: 290089 - DNA, 25 bp, Artificial
  probe
  misc_feature (1)..(25): SEQ ID NO: 1309; WAN024BHE; Start 194; Stop 218
ttagaacaggaaaagagacagatat

SEQ ID NO: 290090 - DNA, 25 bp, Artificial
  probe
  misc_feature (1)..(25): SEQ ID NO: 1309; WAN024BHE; Start 223; Stop 247
acaagttatcagcaacatcttaaaa

SEQ ID NO: 290091 - DNA, 25 bp, Artificial
  probe
  misc_feature (1)..(25): SEQ ID NO: 1310; WAN024GF4; Start 631; Stop 655
ttcttctacttcatcaacaacctcc

SEQ ID NO: 290092 - DNA, 25 bp, Artificial
  probe
  misc_feature (1)..(25): SEQ ID NO: 1310; WAN024GF4; Start 633; Stop 657
cttctacttcatcaacaacctccat

SEQ ID NO: 290093 - DNA, 25 bp, Artificial
  probe
  misc_feature (1)..(25): SEQ ID NO: 1310; WAN024GF4; Start 634; Stop 658
ttctacttcatcaacaacctccata

SEQ ID NO: 290094 - DNA, 25 bp, Artificial
  probe
  misc_feature (1)..(25): SEQ ID NO: 1310; WAN024GF4; Start 638; Stop 662
acttcatcaacaacctccatatcta

SEQ ID NO: 290095 - DNA, 25 bp, Artificial
  probe
  misc_feature (1)..(25): SEQ ID NO: 1310; WAN024GF4; Start 637; Stop 661
tacttcatcaacaacctccatatct

SEQ ID NO: 290096 - DNA, 25 bp, Artificial
  probe
  misc_feature (1)..(25): SEQ ID NO: 1310; WAN024GF4; Start 635; Stop 659
tctacttcatcaacaacctccatat

SEQ ID NO: 290097 - DNA, 25 bp, Artificial
  probe
  misc_feature (1)..(25): SEQ ID NO: 1310; WAN024GF4; Start 636; Stop 660
ctacttcatcaacaacctccatatc

SEQ ID NO: 290098 - DNA, 25 bp, Artificial
  probe
  misc_feature (1)..(25): SEQ ID NO: 1310; WAN024GF4; Start 630; Stop 654
gttcttctacttcatcaacaacctc

SEQ ID NO: 290099 - DNA, 25 bp, Artificial
  probe
  misc_feature (1)..(25): SEQ ID NO: 1310; WAN024GF4; Start 632; Stop 656
tcttctacttcatcaacaacctcca

SEQ ID NO: 290100 - DNA, 25 bp, Artificial
  probe
  misc_feature (1)..(25): SEQ ID NO: 1310; WAN024GF4; Start 629; Stop 653
agttcttctacttcatcaacaacct

SEQ ID NO: 290101 - DNA, 25 bp, Artificial
  probe
  misc_feature (1)..(25): SEQ ID NO: 1310; WAN024GF4; Start 265; Stop 289
tacaatgttcactactggaatgact

SEQ ID NO: 290102 - DNA, 25 bp, Artificial
  probe
  misc_feature (1)..(25): SEQ ID NO: 1310; WAN024GF4; Start 266; Stop 290
acaatgttcactactggaatgactg

SEQ ID NO: 290103 - DNA, 25 bp, Artificial
  probe
  misc_feature (1)..(25): SEQ ID NO: 1310; WAN024GF4; Start 639; Stop 663
cttcatcaacaacctccatatctat

SEQ ID NO: 290104 - DNA, 25 bp, Artificial
  probe
  misc_feature (1)..(25): SEQ ID NO: 1310; WAN024GF4; Start 96; Stop 120
gactgttgctaattccaagtatgta

SEQ ID NO: 290105 - DNA, 25 bp, Artificial
  probe
  misc_feature (1)..(25): SEQ ID NO: 1310; WAN024GF4; Start 640; Stop 664
ttcatcaacaacctccatatctatg

SEQ ID NO: 290106 - DNA, 25 bp, Artificial
  probe
  misc_feature (1)..(25): SEQ ID NO: 1310; WAN024GF4; Start 264; Stop 288
gtacaatgttcactactggaatgac

SEQ ID NO: 290107 - DNA, 25 bp, Artificial
  probe
  misc_feature (1)..(25): SEQ ID NO: 1310; WAN024GF4; Start 267; Stop 291
caatgttcactactggaatgactgg

SEQ ID NO: 290108 - DNA, 25 bp, Artificial
  probe
  misc_feature (1)..(25): SEQ ID NO: 1310; WAN024GF4; Start 98; Stop 122
ctgttgctaattccaagtatgtaac

SEQ ID NO: 290109 - DNA, 25 bp, Artificial
  probe
  misc_feature (1)..(25): SEQ ID NO: 1310; WAN024GF4; Start 99; Stop 123
tgttgctaattccaagtatgtaact

SEQ ID NO: 290110 - DNA, 25 bp, Artificial
  probe
  misc_feature (1)..(25): SEQ ID NO: 1310; WAN024GF4; Start 97; Stop 121
actgttgctaattccaagtatgtaa

SEQ ID NO: 290111 - DNA, 25 bp, Artificial
  probe
  misc_feature (1)..(25): SEQ ID NO: 1310; WAN024GF4; Start 100; Stop 124
gttgctaattccaagtatgtaactg

SEQ ID NO: 290112 - DNA, 25 bp, Artificial
  probe
  misc_feature (1)..(25): SEQ ID NO: 1310; WAN024GF4; Start 102; Stop 126
tgctaattccaagtatgtaactggt

SEQ ID NO: 290113 - DNA, 25 bp, Artificial
  probe
  misc_feature (1)..(25): SEQ ID NO: 1310; WAN024GF4; Start 104; Stop 128
ctaattccaagtatgtaactggtgc

SEQ ID NO: 290114 - DNA, 25 bp, Artificial
  probe
  misc_feature (1)..(25): SEQ ID NO: 1310; WAN024GF4; Start 103; Stop 127
gctaattccaagtatgtaactggtg

SEQ ID NO: 290115 - DNA, 25 bp, Artificial
  probe
  misc_feature (1)..(25): SEQ ID NO: 1310; WAN024GF4; Start 95; Stop 119
ggactgttgctaattccaagtatgt

SEQ ID NO: 290116 - DNA, 25 bp, Artificial
  probe
  misc_feature (1)..(25): SEQ ID NO: 1310; WAN024GF4; Start 105; Stop 129
taattccaagtatgtaactggtgcc

SEQ ID NO: 290117 - DNA, 25 bp, Artificial
  probe
  misc_feature (1)..(25): SEQ ID NO: 1310; WAN024GF4; Start 101; Stop 125
ttgctaattccaagtatgtaactgg

SEQ ID NO: 290118 - DNA, 25 bp, Artificial
  probe
  misc_feature (1)..(25): SEQ ID NO: 1310; WAN024GF4; Start 263; Stop 287
agtacaatgttcactactggaatga

SEQ ID NO: 290119 - DNA, 25 bp, Artificial
  probe
  misc_feature (1)..(25): SEQ ID NO: 1310; WAN024GF4; Start 262; Stop 286
aagtacaatgttcactactggaatg

SEQ ID NO: 290120 - DNA, 25 bp, Artificial
  probe
  misc_feature (1)..(25): SEQ ID NO: 1310; WAN024GF4; Start 107; Stop 131
attccaagtatgtaactggtgcctt

SEQ ID NO: 290121 - DNA, 25 bp, Artificial
  probe
  misc_feature (1)..(25): SEQ ID NO: 1310; WAN024GF4; Start 106; Stop 130
aattccaagtatgtaactggtgcct

SEQ ID NO: 290122 - DNA, 25 bp, Artificial
  probe
  misc_feature (1)..(25): SEQ ID NO: 1310; WAN024GF4; Start 219; Stop 243
gatttaccaagaccagtcaaatagc

SEQ ID NO: 290123 - DNA, 25 bp, Artificial
  probe
  misc_feature (1)..(25): SEQ ID NO: 1310; WAN024GF4; Start 218; Stop 242
ggatttaccaagaccagtcaaatag

SEQ ID NO: 290124 - DNA, 25 bp, Artificial
  probe
  misc_feature (1)..(25): SEQ ID NO: 1311; WAN024C4B; Start 319; Stop 343
gataccatccgtcgtaatgaagaat

SEQ ID NO: 290125 - DNA, 25 bp, Artificial
  probe
  misc_feature (1)..(25): SEQ ID NO: 1311; WAN024C4B; Start 320; Stop 344
ataccatccgtcgtaatgaagaatt

SEQ ID NO: 290126 - DNA, 25 bp, Artificial
  probe
  misc_feature (1)..(25): SEQ ID NO: 1311; WAN024C4B; Start 833; Stop 857
taccattgtcactgattactgagtc

SEQ ID NO: 290127 - DNA, 25 bp, Artificial
  probe
  misc_feature (1)..(25): SEQ ID NO: 1311; WAN024C4B; Start 321; Stop 345
taccatccgtcgtaatgaagaattg

SEQ ID NO: 290128 - DNA, 25 bp, Artificial
  probe
  misc_feature (1)..(25): SEQ ID NO: 1311; WAN024C4B; Start 318; Stop 342
agataccatccgtcgtaatgaagaa

SEQ ID NO: 290129 - DNA, 25 bp, Artificial
  probe
  misc_feature (1)..(25): SEQ ID NO: 1311; WAN024C4B; Start 317; Stop 341
aagataccatccgtcgtaatgaaga

SEQ ID NO: 290130 - DNA, 25 bp, Artificial
  probe
  misc_feature (1)..(25): SEQ ID NO: 1311; WAN024C4B; Start 743; Stop 767
aagatggaccaatcgtagactacat

SEQ ID NO: 290131 - DNA, 25 bp, Artificial
  probe
  misc_feature (1)..(25): SEQ ID NO: 1311; WAN024C4B; Start 832; Stop 856
gtaccattgtcactgattactgagt

SEQ ID NO: 290132 - DNA, 25 bp, Artificial
  probe
  misc_feature (1)..(25): SEQ ID NO: 1311; WAN024C4B; Start 831; Stop 855
tgtaccattgtcactgattactgag

SEQ ID NO: 290133 - DNA, 25 bp, Artificial
  probe
  misc_feature (1)..(25): SEQ ID NO: 1311; WAN024C4B; Start 750; Stop 774
accaatcgtagactacatccttgat

SEQ ID NO: 290134 - DNA, 25 bp, Artificial
  probe
  misc_feature (1)..(25): SEQ ID NO: 1311; WAN024C4B; Start 74; Stop 98
gtggttacacagttgctatctacaa

SEQ ID NO: 290135 - DNA, 25 bp, Artificial
  probe
  misc_feature (1)..(25): SEQ ID NO: 1311; WAN024C4B; Start 742; Stop 766
caagatggaccaatcgtagactaca

SEQ ID NO: 290136 - DNA, 25 bp, Artificial
  probe
  misc_feature (1)..(25): SEQ ID NO: 1311; WAN024C4B; Start 749; Stop 773
gaccaatcgtagactacatccttga

SEQ ID NO: 290137 - DNA, 25 bp, Artificial
  probe
  misc_feature (1)..(25): SEQ ID NO: 1311; WAN024C4B; Start 811; Stop 835
caatcatctcttgaccttggtgtac

SEQ ID NO: 290138 - DNA, 25 bp, Artificial
  probe
  misc_feature (1)..(25): SEQ ID NO: 1311; WAN024C4B; Start 943; Stop 967
gaaggagacaaggctgaattgattg

SEQ ID NO: 290139 - DNA, 25 bp, Artificial
  probe
  misc_feature (1)..(25): SEQ ID NO: 1311; WAN024C4B; Start 830; Stop 854
gtgtaccattgtcactgattactga

SEQ ID NO: 290140 - DNA, 25 bp, Artificial
  probe
  misc_feature (1)..(25): SEQ ID NO: 1311; WAN024C4B; Start 945; Stop 969
aggagacaaggctgaattgattgaa

SEQ ID NO: 290141 - DNA, 25 bp, Artificial
  probe
  misc_feature (1)..(25): SEQ ID NO: 1311; WAN024C4B; Start 944; Stop 968
aaggagacaaggctgaattgattga

SEQ ID NO: 290142 - DNA, 25 bp, Artificial
  probe
  misc_feature (1)..(25): SEQ ID NO: 1311; WAN024C4B; Start 942; Stop 966
tgaaggagacaaggctgaattgatt

SEQ ID NO: 290143 - DNA, 25 bp, Artificial
  probe
  misc_feature (1)..(25): SEQ ID NO: 1311; WAN024C4B; Start 941; Stop 965
ttgaaggagacaaggctgaattgat

SEQ ID NO: 290144 - DNA, 25 bp, Artificial
  probe
  misc_feature (1)..(25): SEQ ID NO: 1311; WAN024C4B; Start 312; Stop 336
ctacaaagataccatccgtcgtaat

SEQ ID NO: 290145 - DNA, 25 bp, Artificial
  probe
  misc_feature (1)..(25): SEQ ID NO: 1311; WAN024C4B; Start 829; Stop 853
ggtgtaccattgtcactgattactg

SEQ ID NO: 290146 - DNA, 25 bp, Artificial
  probe
  misc_feature (1)..(25): SEQ ID NO: 1311; WAN024C4B; Start 645; Stop 669
tatggctgaaatctttactgagtgg

SEQ ID NO: 290147 - DNA, 25 bp, Artificial
  probe
  misc_feature (1)..(25): SEQ ID NO: 1311; WAN024C4B; Start 650; Stop 674
ctgaaatctttactgagtggaacaa

SEQ ID NO: 290148 - DNA, 25 bp, Artificial
  probe
  misc_feature (1)..(25): SEQ ID NO: 1311; WAN024C4B; Start 313; Stop 337
tacaaagataccatccgtcgtaatg

SEQ ID NO: 290149 - DNA, 25 bp, Artificial
  probe
  misc_feature (1)..(25): SEQ ID NO: 1311; WAN024C4B; Start 652; Stop 676
gaaatctttactgagtggaacaagg

SEQ ID NO: 290150 - DNA, 25 bp, Artificial
  probe
  misc_feature (1)..(25): SEQ ID NO: 1311; WAN024C4B; Start 1391; Stop 1415
gaaccttccactactcttggtatga

SEQ ID NO: 290151 - DNA, 25 bp, Artificial
  probe
  misc_feature (1)..(25): SEQ ID NO: 1311; WAN024C4B; Start 812; Stop 836
aatcatctcttgaccttggtgtacc

SEQ ID NO: 290152 - DNA, 25 bp, Artificial
  probe
  misc_feature (1)..(25): SEQ ID NO: 1311; WAN024C4B; Start 316; Stop 340
aaagataccatccgtcgtaatgaag

SEQ ID NO: 290153 - DNA, 25 bp, Artificial
  probe
  misc_feature (1)..(25): SEQ ID NO: 1311; WAN024C4B; Start 644; Stop 668
atatggctgaaatctttactgagtg

SEQ ID NO: 290154 - DNA, 25 bp, Artificial
  probe
  misc_feature (1)..(25): SEQ ID NO: 1311; WAN024C4B; Start 329; Stop 353
gtcgtaatgaagaattggcaaactc

SEQ ID NO: 290155 - DNA, 25 bp, Artificial
  probe
  misc_feature (1)..(25): SEQ ID NO: 1311; WAN024C4B; Start 651; Stop 675
tgaaatctttactgagtggaacaag

SEQ ID NO: 290156 - DNA, 25 bp, Artificial
  probe
  misc_feature (1)..(25): SEQ ID NO: 1311; WAN024C4B; Start 1392; Stop 1416
aaccttccactactcttggtatgac

SEQ ID NO: 290157 - DNA, 25 bp, Artificial
  probe
  misc_feature (1)..(25): SEQ ID NO: 1312; WAN024C9Q; Start 338; Stop 362
aaggtaaaggtttccaaggtgttat

SEQ ID NO: 290158 - DNA, 25 bp, Artificial
  probe
  misc_feature (1)..(25): SEQ ID NO: 1312; WAN024C9Q; Start 333; Stop 357
ttctaaaggtaaaggtttccaaggt

SEQ ID NO: 290159 - DNA, 25 bp, Artificial
  probe
  misc_feature (1)..(25): SEQ ID NO: 1312; WAN024C9Q; Start 337; Stop 361
aaaggtaaaggtttccaaggtgtta

SEQ ID NO: 290160 - DNA, 25 bp, Artificial
  probe
  misc_feature (1)..(25): SEQ ID NO: 1312; WAN024C9Q; Start 336; Stop 360
taaaggtaaaggtttccaaggtgtt

SEQ ID NO: 290161 - DNA, 25 bp, Artificial
  probe
  misc_feature (1)..(25): SEQ ID NO: 1312; WAN024C9Q; Start 341; Stop 365
gtaaaggtttccaaggtgttatcaa

SEQ ID NO: 290162 - DNA, 25 bp, Artificial
  probe
  misc_feature (1)..(25): SEQ ID NO: 1312; WAN024C9Q; Start 339; Stop 363
aggtaaaggtttccaaggtgttatc

SEQ ID NO: 290163 - DNA, 25 bp, Artificial
  probe
  misc_feature (1)..(25): SEQ ID NO: 1312; WAN024C9Q; Start 334; Stop 358
tctaaaggtaaaggtttccaaggtg

SEQ ID NO: 290164 - DNA, 25 bp, Artificial
  probe
  misc_feature (1)..(25): SEQ ID NO: 1312; WAN024C9Q; Start 335; Stop 359
ctaaaggtaaaggtttccaaggtgt

SEQ ID NO: 290165 - DNA, 25 bp, Artificial
  probe
  misc_feature (1)..(25): SEQ ID NO: 1312; WAN024C9Q; Start 340; Stop 364
ggtaaaggtttccaaggtgttatca

SEQ ID NO: 290166 - DNA, 25 bp, Artificial
  probe
  misc_feature (1)..(25): SEQ ID NO: 1312; WAN024C9Q; Start 332; Stop 356
cttctaaaggtaaaggtttccaagg

SEQ ID NO: 290167 - DNA, 25 bp, Artificial
  probe
  misc_feature (1)..(25): SEQ ID NO: 1312; WAN024C9Q; Start 331; Stop 355
acttctaaaggtaaaggtttccaag

SEQ ID NO: 290168 - DNA, 25 bp, Artificial
  probe
  misc_feature (1)..(25): SEQ ID NO: 1312; WAN024C9Q; Start 593; Stop 617
tcactatcaaatcagcagttaaagc

SEQ ID NO: 290169 - DNA, 25 bp, Artificial
  probe
  misc_feature (1)..(25): SEQ ID NO: 1312; WAN024C9Q; Start 25; Stop 49
aaagtgggaatgactcaaatcttca

SEQ ID NO: 290170 - DNA, 25 bp, Artificial
  probe
  misc_feature (1)..(25): SEQ ID NO: 1312; WAN024C9Q; Start 586; Stop 610
tctcttatcactatcaaatcagcag

SEQ ID NO: 290171 - DNA, 25 bp, Artificial
  probe
  misc_feature (1)..(25): SEQ ID NO: 1312; WAN024C9Q; Start 328; Stop 352
ggtacttctaaaggtaaaggtttcc

SEQ ID NO: 290172 - DNA, 25 bp, Artificial
  probe
  misc_feature (1)..(25): SEQ ID NO: 1312; WAN024C9Q; Start 587; Stop 611
ctcttatcactatcaaatcagcagt

SEQ ID NO: 290173 - DNA, 25 bp, Artificial
  probe
  misc_feature (1)..(25): SEQ ID NO: 1312; WAN024C9Q; Start 73; Stop 97
gtaacagttattgaagcaactccaa

SEQ ID NO: 290174 - DNA, 25 bp, Artificial
  probe
  misc_feature (1)..(25): SEQ ID NO: 1312; WAN024C9Q; Start 72; Stop 96
tgtaacagttattgaagcaactcca

SEQ ID NO: 290175 - DNA, 25 bp, Artificial
  probe
  misc_feature (1)..(25): SEQ ID NO: 1312; WAN024C9Q; Start 30; Stop 54
gggaatgactcaaatcttcactgaa

SEQ ID NO: 290176 - DNA, 25 bp, Artificial
  probe
  misc_feature (1)..(25): SEQ ID NO: 1312; WAN024C9Q; Start 585; Stop 609
atctcttatcactatcaaatcagca

SEQ ID NO: 290177 - DNA, 25 bp, Artificial
  probe
  misc_feature (1)..(25): SEQ ID NO: 1312; WAN024C9Q; Start 329; Stop 353
gtacttctaaaggtaaaggtttcca

SEQ ID NO: 290178 - DNA, 25 bp, Artificial
  probe
  misc_feature (1)..(25): SEQ ID NO: 1312; WAN024C9Q; Start 29; Stop 53
tgggaatgactcaaatcttcactga

SEQ ID NO: 290179 - DNA, 25 bp, Artificial
  probe
  misc_feature (1)..(25): SEQ ID NO: 1312; WAN024C9Q; Start 330; Stop 354
tacttctaaaggtaaaggtttccaa

SEQ ID NO: 290180 - DNA, 25 bp, Artificial
  probe
  misc_feature (1)..(25): SEQ ID NO: 1312; WAN024C9Q; Start 588; Stop 612
tcttatcactatcaaatcagcagtt

SEQ ID NO: 290181 - DNA, 25 bp, Artificial
  probe
  misc_feature (1)..(25): SEQ ID NO: 1312; WAN024C9Q; Start 26; Stop 50
aagtgggaatgactcaaatcttcac

SEQ ID NO: 290182 - DNA, 25 bp, Artificial
  probe
  misc_feature (1)..(25): SEQ ID NO: 1312; WAN024C9Q; Start 71; Stop 95
ctgtaacagttattgaagcaactcc

SEQ ID NO: 290183 - DNA, 25 bp, Artificial
  probe
  misc_feature (1)..(25): SEQ ID NO: 1312; WAN024C9Q; Start 70; Stop 94
cctgtaacagttattgaagcaactc

SEQ ID NO: 290184 - DNA, 25 bp, Artificial
  probe
  misc_feature (1)..(25): SEQ ID NO: 1312; WAN024C9Q; Start 67; Stop 91
atccctgtaacagttattgaagcaa

SEQ ID NO: 290185 - DNA, 25 bp, Artificial
  probe
  misc_feature (1)..(25): SEQ ID NO: 1312; WAN024C9Q; Start 28; Stop 52
gtgggaatgactcaaatcttcactg

SEQ ID NO: 290186 - DNA, 25 bp, Artificial
  probe
  misc_feature (1)..(25): SEQ ID NO: 1312; WAN024C9Q; Start 66; Stop 90
gatccctgtaacagttattgaagca

SEQ ID NO: 290187 - DNA, 25 bp, Artificial
  probe
  misc_feature (1)..(25): SEQ ID NO: 1312; WAN024C9Q; Start 65; Stop 89
tgatccctgtaacagttattgaagc

SEQ ID NO: 290188 - DNA, 25 bp, Artificial
  probe
  misc_feature (1)..(25): SEQ ID NO: 1312; WAN024C9Q; Start 60; Stop 84
cgaattgatccctgtaacagttatt

SEQ ID NO: 290189 - DNA, 25 bp, Artificial
  probe
  misc_feature (1)..(25): SEQ ID NO: 1312; WAN024C9Q; Start 122; Stop 146
ttgaaacagacggatacaacgctat

SEQ ID NO: 290190 - DNA, 25 bp, Artificial
  probe
  misc_feature (1)..(25): SEQ ID NO: 1313; WAN024FUZ; Start 214; Stop 238
taccatattcacactgctacaagag

SEQ ID NO: 290191 - DNA, 25 bp, Artificial
  probe
  misc_feature (1)..(25): SEQ ID NO: 1313; WAN024FUZ; Start 819; Stop 843
attagcaatcatatcaacgcctgta

SEQ ID NO: 290192 - DNA, 25 bp, Artificial
  probe
  misc_feature (1)..(25): SEQ ID NO: 1313; WAN024FUZ; Start 213; Stop 237
ataccatattcacactgctacaaga

SEQ ID NO: 290193 - DNA, 25 bp, Artificial
  probe
  misc_feature (1)..(25): SEQ ID NO: 1313; WAN024FUZ; Start 861; Stop 885
tatacacgaggataatggctggtta

SEQ ID NO: 290194 - DNA, 25 bp, Artificial
  probe
  misc_feature (1)..(25): SEQ ID NO: 1313; WAN024FUZ; Start 820; Stop 844
ttagcaatcatatcaacgcctgtag

SEQ ID NO: 290195 - DNA, 25 bp, Artificial
  probe
  misc_feature (1)..(25): SEQ ID NO: 1313; WAN024FUZ; Start 634; Stop 658
ggagatggagaacttgaagacatac

SEQ ID NO: 290196 - DNA, 25 bp, Artificial
  probe
  misc_feature (1)..(25): SEQ ID NO: 1313; WAN024FUZ; Start 633; Stop 657
tggagatggagaacttgaagacata

SEQ ID NO: 290197 - DNA, 25 bp, Artificial
  probe
  misc_feature (1)..(25): SEQ ID NO: 1313; WAN024FUZ; Start 868; Stop 892
gaggataatggctggttaattcaac

SEQ ID NO: 290198 - DNA, 25 bp, Artificial
  probe
  misc_feature (1)..(25): SEQ ID NO: 1313; WAN024FUZ; Start 635; Stop 659
gagatggagaacttgaagacatacg

SEQ ID NO: 290199 - DNA, 25 bp, Artificial
  probe
  misc_feature (1)..(25): SEQ ID NO: 1313; WAN024FUZ; Start 128; Stop 152
ttattgatggctctcttgtaacacg

SEQ ID NO: 290200 - DNA, 25 bp, Artificial
  probe
  misc_feature (1)..(25): SEQ ID NO: 1313; WAN024FUZ; Start 867; Stop 891
cgaggataatggctggttaattcaa

SEQ ID NO: 290201 - DNA, 25 bp, Artificial
  probe
  misc_feature (1)..(25): SEQ ID NO: 1313; WAN024FUZ; Start 207; Stop 231
tgacatataccatattcacactgct

SEQ ID NO: 290202 - DNA, 25 bp, Artificial
  probe
  misc_feature (1)..(25): SEQ ID NO: 1313; WAN024FUZ; Start 965; Stop 989
ggagcaataatcataagttggttga

SEQ ID NO: 290203 - DNA, 25 bp, Artificial
  probe
  misc_feature (1)..(25): SEQ ID NO: 1313; WAN024FUZ; Start 863; Stop 887
tacacgaggataatggctggttaat

SEQ ID NO: 290204 - DNA, 25 bp, Artificial
  probe
  misc_feature (1)..(25): SEQ ID NO: 1313; WAN024FUZ; Start 862; Stop 886
atacacgaggataatggctggttaa

SEQ ID NO: 290205 - DNA, 25 bp, Artificial
  probe
  misc_feature (1)..(25): SEQ ID NO: 1313; WAN024FUZ; Start 212; Stop 236
tataccatattcacactgctacaag

SEQ ID NO: 290206 - DNA, 25 bp, Artificial
  probe
  misc_feature (1)..(25): SEQ ID NO: 1313; WAN024FUZ; Start 210; Stop 234
catataccatattcacactgctaca

SEQ ID NO: 290207 - DNA, 25 bp, Artificial
  probe
  misc_feature (1)..(25): SEQ ID NO: 1313; WAN024FUZ; Start 209; Stop 233
acatataccatattcacactgctac

SEQ ID NO: 290208 - DNA, 25 bp, Artificial
  probe
  misc_feature (1)..(25): SEQ ID NO: 1313; WAN024FUZ; Start 206; Stop 230
atgacatataccatattcacactgc

SEQ ID NO: 290209 - DNA, 25 bp, Artificial
  probe
  misc_feature (1)..(25): SEQ ID NO: 1313; WAN024FUZ; Start 860; Stop 884
ttatacacgaggataatggctggtt

SEQ ID NO: 290210 - DNA, 25 bp, Artificial
  probe
  misc_feature (1)..(25): SEQ ID NO: 1313; WAN024FUZ; Start 865; Stop 889
cacgaggataatggctggttaattc

SEQ ID NO: 290211 - DNA, 25 bp, Artificial
  probe
  misc_feature (1)..(25): SEQ ID NO: 1313; WAN024FUZ; Start 208; Stop 232
gacatataccatattcacactgcta

SEQ ID NO: 290212 - DNA, 25 bp, Artificial
  probe
  misc_feature (1)..(25): SEQ ID NO: 1313; WAN024FUZ; Start 866; Stop 890
acgaggataatggctggttaattca

SEQ ID NO: 290213 - DNA, 25 bp, Artificial
  probe
  misc_feature (1)..(25): SEQ ID NO: 1313; WAN024FUZ; Start 973; Stop 997
aatcataagttggttgaagagaagt

SEQ ID NO: 290214 - DNA, 25 bp, Artificial
  probe
  misc_feature (1)..(25): SEQ ID NO: 1313; WAN024FUZ; Start 979; Stop 1003
aagttggttgaagagaagtatagtt

SEQ ID NO: 290215 - DNA, 25 bp, Artificial
  probe
  misc_feature (1)..(25): SEQ ID NO: 1313; WAN024FUZ; Start 632; Stop 656
ctggagatggagaacttgaagacat

SEQ ID NO: 290216 - DNA, 25 bp, Artificial
  probe
  misc_feature (1)..(25): SEQ ID NO: 1313; WAN024FUZ; Start 215; Stop 239
accatattcacactgctacaagagg

SEQ ID NO: 290217 - DNA, 25 bp, Artificial
  probe
  misc_feature (1)..(25): SEQ ID NO: 1313; WAN024FUZ; Start 864; Stop 888
acacgaggataatggctggttaatt

SEQ ID NO: 290218 - DNA, 25 bp, Artificial
  probe
  misc_feature (1)..(25): SEQ ID NO: 1313; WAN024FUZ; Start 211; Stop 235
atataccatattcacactgctacaa

SEQ ID NO: 290219 - DNA, 25 bp, Artificial
  probe
  misc_feature (1)..(25): SEQ ID NO: 1313; WAN024FUZ; Start 968; Stop 992
gcaataatcataagttggttgaaga

SEQ ID NO: 290220 - DNA, 25 bp, Artificial
  probe
  misc_feature (1)..(25): SEQ ID NO: 1313; WAN024FUZ; Start 967; Stop 991
agcaataatcataagttggttgaag

SEQ ID NO: 290221 - DNA, 25 bp, Artificial
  probe
  misc_feature (1)..(25): SEQ ID NO: 1313; WAN024FUZ; Start 966; Stop 990
gagcaataatcataagttggttgaa

SEQ ID NO: 290222 - DNA, 25 bp, Artificial
  probe
  misc_feature (1)..(25): SEQ ID NO: 1313; WAN024FUZ; Start 821; Stop 845
tagcaatcatatcaacgcctgtagg

SEQ ID NO: 290223 - DNA, 25 bp, Artificial
  probe
  misc_feature (1)..(25): SEQ ID NO: 1314; WAN024FF9; Start 390; Stop 414
ttactacacaatcggtacaggtatc

SEQ ID NO: 290224 - DNA, 25 bp, Artificial
  probe
  misc_feature (1)..(25): SEQ ID NO: 1314; WAN024FF9; Start 391; Stop 415
tactacacaatcggtacaggtatcg

SEQ ID NO: 290225 - DNA, 25 bp, Artificial
  probe
  misc_feature (1)..(25): SEQ ID NO: 1314; WAN024FF9; Start 794; Stop 818
cagatgtgcgtgactatatcgtgac

SEQ ID NO: 290226 - DNA, 25 bp, Artificial
  probe
  misc_feature (1)..(25): SEQ ID NO: 1314; WAN024FF9; Start 763; Stop 787
acatctcttcttaatggttacctac

SEQ ID NO: 290227 - DNA, 25 bp, Artificial
  probe
  misc_feature (1)..(25): SEQ ID NO: 1314; WAN024FF9; Start 789; Stop 813
agtaccagatgtgcgtgactatatc

SEQ ID NO: 290228 - DNA, 25 bp, Artificial
  probe
  misc_feature (1)..(25): SEQ ID NO: 1314; WAN024FF9; Start 788; Stop 812
cagtaccagatgtgcgtgactatat

SEQ ID NO: 290229 - DNA, 25 bp, Artificial
  probe
  misc_feature (1)..(25): SEQ ID NO: 1314; WAN024FF9; Start 90; Stop 114
acaatttccaacaacaactccaatc

SEQ ID NO: 290230 - DNA, 25 bp, Artificial
  probe
  misc_feature (1)..(25): SEQ ID NO: 1314; WAN024FF9; Start 89; Stop 113
cacaatttccaacaacaactccaat

SEQ ID NO: 290231 - DNA, 25 bp, Artificial
  probe
  misc_feature (1)..(25): SEQ ID NO: 1314; WAN024FF9; Start 764; Stop 788
catctcttcttaatggttacctacc

SEQ ID NO: 290232 - DNA, 25 bp, Artificial
  probe
  misc_feature (1)..(25): SEQ ID NO: 1314; WAN024FF9; Start 630; Stop 654
ttgggatgttcaagcctactatatc

SEQ ID NO: 290233 - DNA, 25 bp, Artificial
  probe
  misc_feature (1)..(25): SEQ ID NO: 1314; WAN024FF9; Start 382; Stop 406
aacttggtttactacacaatcggta

SEQ ID NO: 290234 - DNA, 25 bp, Artificial
  probe
  misc_feature (1)..(25): SEQ ID NO: 1314; WAN024FF9; Start 628; Stop 652
gtttgggatgttcaagcctactata

SEQ ID NO: 290235 - DNA, 25 bp, Artificial
  probe
  misc_feature (1)..(25): SEQ ID NO: 1314; WAN024FF9; Start 629; Stop 653
tttgggatgttcaagcctactatat

SEQ ID NO: 290236 - DNA, 25 bp, Artificial
  probe
  misc_feature (1)..(25): SEQ ID NO: 1314; WAN024FF9; Start 86; Stop 110
aaacacaatttccaacaacaactcc

SEQ ID NO: 290237 - DNA, 25 bp, Artificial
  probe
  misc_feature (1)..(25): SEQ ID NO: 1314; WAN024FF9; Start 761; Stop 785
ttacatctcttcttaatggttacct

SEQ ID NO: 290238 - DNA, 25 bp, Artificial
  probe
  misc_feature (1)..(25): SEQ ID NO: 1314; WAN024FF9; Start 388; Stop 412
gtttactacacaatcggtacaggta

SEQ ID NO: 290239 - DNA, 25 bp, Artificial
  probe
  misc_feature (1)..(25): SEQ ID NO: 1314; WAN024FF9; Start 791; Stop 815
taccagatgtgcgtgactatatcgt

SEQ ID NO: 290240 - DNA, 25 bp, Artificial
  probe
  misc_feature (1)..(25): SEQ ID NO: 1314; WAN024FF9; Start 215; Stop 239
aaacttatggctttatcacgacgac

SEQ ID NO: 290241 - DNA, 25 bp, Artificial
  probe
  misc_feature (1)..(25): SEQ ID NO: 1314; WAN024FF9; Start 634; Stop 658
gatgttcaagcctactatatcgctc

SEQ ID NO: 290242 - DNA, 25 bp, Artificial
  probe
  misc_feature (1)..(25): SEQ ID NO: 1314; WAN024FF9; Start 389; Stop 413
tttactacacaatcggtacaggtat

SEQ ID NO: 290243 - DNA, 25 bp, Artificial
  probe
  misc_feature (1)..(25): SEQ ID NO: 1314; WAN024FF9; Start 631; Stop 655
tgggatgttcaagcctactatatcg

SEQ ID NO: 290244 - DNA, 25 bp, Artificial
  probe
  misc_feature (1)..(25): SEQ ID NO: 1314; WAN024FF9; Start 91; Stop 115
caatttccaacaacaactccaatcg

SEQ ID NO: 290245 - DNA, 25 bp, Artificial
  probe
  misc_feature (1)..(25): SEQ ID NO: 1314; WAN024FF9; Start 790; Stop 814
gtaccagatgtgcgtgactatatcg

SEQ ID NO: 290246 - DNA, 25 bp, Artificial
  probe
  misc_feature (1)..(25): SEQ ID NO: 1314; WAN024FF9; Start 637; Stop 661
gttcaagcctactatatcgctcaag

SEQ ID NO: 290247 - DNA, 25 bp, Artificial
  probe
  misc_feature (1)..(25): SEQ ID NO: 1314; WAN024FF9; Start 635; Stop 659
atgttcaagcctactatatcgctca

SEQ ID NO: 290248 - DNA, 25 bp, Artificial
  probe
  misc_feature (1)..(25): SEQ ID NO: 1314; WAN024FF9; Start 88; Stop 112
acacaatttccaacaacaactccaa

SEQ ID NO: 290249 - DNA, 25 bp, Artificial
  probe
  misc_feature (1)..(25): SEQ ID NO: 1314; WAN024FF9; Start 87; Stop 111
aacacaatttccaacaacaactcca

SEQ ID NO: 290250 - DNA, 25 bp, Artificial
  probe
  misc_feature (1)..(25): SEQ ID NO: 1314; WAN024FF9; Start 385; Stop 409
ttggtttactacacaatcggtacag

SEQ ID NO: 290251 - DNA, 25 bp, Artificial
  probe
  misc_feature (1)..(25): SEQ ID NO: 1314; WAN024FF9; Start 384; Stop 408
cttggtttactacacaatcggtaca

SEQ ID NO: 290252 - DNA, 25 bp, Artificial
  probe
  misc_feature (1)..(25): SEQ ID NO: 1314; WAN024FF9; Start 383; Stop 407
acttggtttactacacaatcggtac

SEQ ID NO: 290253 - DNA, 25 bp, Artificial
  probe
  misc_feature (1)..(25): SEQ ID NO: 1314; WAN024FF9; Start 636; Stop 660
tgttcaagcctactatatcgctcaa

SEQ ID NO: 290254 - DNA, 25 bp, Artificial
  probe
  misc_feature (1)..(25): SEQ ID NO: 1314; WAN024FF9; Start 216; Stop 240
aacttatggctttatcacgacgact

SEQ ID NO: 290255 - DNA, 25 bp, Artificial
  probe
  misc_feature (1)..(25): SEQ ID NO: 1314; WAN024FF9; Start 627; Stop 651
tgtttgggatgttcaagcctactat

SEQ ID NO: 290256 - DNA, 25 bp, Artificial
  probe
  misc_feature (1)..(25): SEQ ID NO: 1315; WAN024CAK-3; Start 95; Stop 119
tggactttacatcatagatcagcac

SEQ ID NO: 290257 - DNA, 25 bp, Artificial
  probe
  misc_feature (1)..(25): SEQ ID NO: 1315; WAN024CAK-3; Start 514; Stop 538
ctcaatgtgacaatccctataactg

SEQ ID NO: 290258 - DNA, 25 bp, Artificial
  probe
  misc_feature (1)..(25): SEQ ID NO: 1315; WAN024CAK-3; Start 513; Stop 537
tctcaatgtgacaatccctataact

SEQ ID NO: 290259 - DNA, 25 bp, Artificial
  probe
  misc_feature (1)..(25): SEQ ID NO: 1315; WAN024CAK-3; Start 94; Stop 118
atggactttacatcatagatcagca

SEQ ID NO: 290260 - DNA, 25 bp, Artificial
  probe
  misc_feature (1)..(25): SEQ ID NO: 1315; WAN024CAK-3; Start 515; Stop 539
tcaatgtgacaatccctataactgt

SEQ ID NO: 290261 - DNA, 25 bp, Artificial
  probe
  misc_feature (1)..(25): SEQ ID NO: 1315; WAN024CAK-3; Start 96; Stop 120
ggactttacatcatagatcagcacg

SEQ ID NO: 290262 - DNA, 25 bp, Artificial
  probe
  misc_feature (1)..(25): SEQ ID NO: 1315; WAN024CAK-3; Start 97; Stop 121
gactttacatcatagatcagcacgc

SEQ ID NO: 290263 - DNA, 25 bp, Artificial
  probe
  misc_feature (1)..(25): SEQ ID NO: 1315; WAN024CAK-3; Start 98; Stop 122
actttacatcatagatcagcacgct

SEQ ID NO: 290264 - DNA, 25 bp, Artificial
  probe
  misc_feature (1)..(25): SEQ ID NO: 1315; WAN024CAK-3; Start 602; Stop 626
tattcaggaaaatcacaccagtctc

SEQ ID NO: 290265 - DNA, 25 bp, Artificial
  probe
  misc_feature (1)..(25): SEQ ID NO: 1315; WAN024CAK-3; Start 601; Stop 625
gtattcaggaaaatcacaccagtct

SEQ ID NO: 290266 - DNA, 25 bp, Artificial
  probe
  misc_feature (1)..(25): SEQ ID NO: 1315; WAN024CAK-3; Start 572; Stop 596
caagtcggatatggaaaagatgttc

SEQ ID NO: 290267 - DNA, 25 bp, Artificial
  probe
  misc_feature (1)..(25): SEQ ID NO: 1315; WAN024CAK-3; Start 89; Stop 113
gcgagatggactttacatcatagat

SEQ ID NO: 290268 - DNA, 25 bp, Artificial
  probe
  misc_feature (1)..(25): SEQ ID NO: 1315; WAN024CAK-3; Start 600; Stop 624
cgtattcaggaaaatcacaccagtc

SEQ ID NO: 290269 - DNA, 25 bp, Artificial
  probe
  misc_feature (1)..(25): SEQ ID NO: 1315; WAN024CAK-3; Start 93; Stop 117
gatggactttacatcatagatcagc

SEQ ID NO: 290270 - DNA, 25 bp, Artificial
  probe
  misc_feature (1)..(25): SEQ ID NO: 1315; WAN024CAK-3; Start 56; Stop 80
acaaatgcacgggacttatctcttt

SEQ ID NO: 290271 - DNA, 25 bp, Artificial
  probe
  misc_feature (1)..(25): SEQ ID NO: 1315; WAN024CAK-3; Start 99; Stop 123
ctttacatcatagatcagcacgctg

SEQ ID NO: 290272 - DNA, 25 bp, Artificial
  probe
  misc_feature (1)..(25): SEQ ID NO: 1315; WAN024CAK-3; Start 90; Stop 114
cgagatggactttacatcatagatc

SEQ ID NO: 290273 - DNA, 25 bp, Artificial
  probe
  misc_feature (1)..(25): SEQ ID NO: 1315; WAN024CAK-3; Start 523; Stop 547
acaatccctataactgtcctcacgg

SEQ ID NO: 290274 - DNA, 25 bp, Artificial
  probe
  misc_feature (1)..(25): SEQ ID NO: 1315; WAN024CAK-3; Start 524; Stop 548
caatccctataactgtcctcacgga

SEQ ID NO: 290275 - DNA, 25 bp, Artificial
  probe
  misc_feature (1)..(25): SEQ ID NO: 1315; WAN024CAK-3; Start 55; Stop 79
gacaaatgcacgggacttatctctt

SEQ ID NO: 290276 - DNA, 25 bp, Artificial
  probe
  misc_feature (1)..(25): SEQ ID NO: 1315; WAN024CAK-3; Start 567; Stop 591
tttaccaagtcggatatggaaaaga

SEQ ID NO: 290277 - DNA, 25 bp, Artificial
  probe
  misc_feature (1)..(25): SEQ ID NO: 1315; WAN024CAK-3; Start 568; Stop 592
ttaccaagtcggatatggaaaagat

SEQ ID NO: 290278 - DNA, 25 bp, Artificial
  probe
  misc_feature (1)..(25): SEQ ID NO: 1315; WAN024CAK-3; Start 569; Stop 593
taccaagtcggatatggaaaagatg

SEQ ID NO: 290279 - DNA, 25 bp, Artificial
  probe
  misc_feature (1)..(25): SEQ ID NO: 1315; WAN024CAK-3; Start 88; Stop 112
ggcgagatggactttacatcataga

SEQ ID NO: 290280 - DNA, 25 bp, Artificial
  probe
  misc_feature (1)..(25): SEQ ID NO: 1315; WAN024CAK-3; Start 564; Stop 588
cattttaccaagtcggatatggaaa

SEQ ID NO: 290281 - DNA, 25 bp, Artificial
  probe
  misc_feature (1)..(25): SEQ ID NO: 1315; WAN024CAK-3; Start 566; Stop 590
ttttaccaagtcggatatggaaaag

SEQ ID NO: 290282 - DNA, 25 bp, Artificial
  probe
  misc_feature (1)..(25): SEQ ID NO: 1315; WAN024CAK-3; Start 571; Stop 595
ccaagtcggatatggaaaagatgtt

SEQ ID NO: 290283 - DNA, 25 bp, Artificial
  probe
  misc_feature (1)..(25): SEQ ID NO: 1315; WAN024CAK-3; Start 92; Stop 116
agatggactttacatcatagatcag

SEQ ID NO: 290284 - DNA, 25 bp, Artificial
  probe
  misc_feature (1)..(25): SEQ ID NO: 1315; WAN024CAK-3; Start 91; Stop 115
gagatggactttacatcatagatca

SEQ ID NO: 290285 - DNA, 25 bp, Artificial
  probe
  misc_feature (1)..(25): SEQ ID NO: 1315; WAN024CAK-3; Start 565; Stop 589
attttaccaagtcggatatggaaaa

SEQ ID NO: 290286 - DNA, 25 bp, Artificial
  probe
  misc_feature (1)..(25): SEQ ID NO: 1315; WAN024CAK-3; Start 563; Stop 587
gcattttaccaagtcggatatggaa

SEQ ID NO: 290287 - DNA, 25 bp, Artificial
  probe
  misc_feature (1)..(25): SEQ ID NO: 1315; WAN024CAK-3; Start 570; Stop 594
accaagtcggatatggaaaagatgt

SEQ ID NO: 290288 - DNA, 25 bp, Artificial
  probe
  misc_feature (1)..(25): SEQ ID NO: 1315; WAN024CAK-3; Start 517; Stop 541
aatgtgacaatccctataactgtcc

SEQ ID NO: 290289 - DNA, 25 bp, Artificial
  probe
  misc_feature (1)..(25): SEQ ID NO: 1316; WAN024FJ7; Start 287; Stop 311
ctgataaggaattggtcgctcgtta

SEQ ID NO: 290290 - DNA, 25 bp, Artificial
  probe
  misc_feature (1)..(25): SEQ ID NO: 1316; WAN024FJ7; Start 290; Stop 314
ataaggaattggtcgctcgttacaa

SEQ ID NO: 290291 - DNA, 25 bp, Artificial
  probe
  misc_feature (1)..(25): SEQ ID NO: 1316; WAN024FJ7; Start 623; Stop 647
gtgtggatgaacctgtttatgatta

SEQ ID NO: 290292 - DNA, 25 bp, Artificial
  probe
  misc_feature (1)..(25): SEQ ID NO: 1316; WAN024FJ7; Start 289; Stop 313
gataaggaattggtcgctcgttaca

SEQ ID NO: 290293 - DNA, 25 bp, Artificial
  probe
  misc_feature (1)..(25): SEQ ID NO: 1316; WAN024FJ7; Start 288; Stop 312
tgataaggaattggtcgctcgttac

SEQ ID NO: 290294 - DNA, 25 bp, Artificial
  probe
  misc_feature (1)..(25): SEQ ID NO: 1316; WAN024FJ7; Start 358; Stop 382
ttagatggaatcaagttggaacgtg

SEQ ID NO: 290295 - DNA, 25 bp, Artificial
  probe
  misc_feature (1)..(25): SEQ ID NO: 1316; WAN024FJ7; Start 822; Stop 846
caagaattggtctgttaatgaaggg

SEQ ID NO: 290296 - DNA, 25 bp, Artificial
  probe
  misc_feature (1)..(25): SEQ ID NO: 1316; WAN024FJ7; Start 141; Stop 165
gctggttgaaattaaggaagacaat

SEQ ID NO: 290297 - DNA, 25 bp, Artificial
  probe
  misc_feature (1)..(25): SEQ ID NO: 1316; WAN024FJ7; Start 91; Stop 115
tatttcaccattgataatatgccgc

SEQ ID NO: 290298 - DNA, 25 bp, Artificial
  probe
  misc_feature (1)..(25): SEQ ID NO: 1316; WAN024FJ7; Start 573; Stop 597
ccgtttcttgccaaatccctattat

SEQ ID NO: 290299 - DNA, 25 bp, Artificial
  probe
  misc_feature (1)..(25): SEQ ID NO: 1316; WAN024FJ7; Start 1; Stop 25
atgacaaagaaacaacttcacttgg

SEQ ID NO: 290300 - DNA, 25 bp, Artificial
  probe
  misc_feature (1)..(25): SEQ ID NO: 1316; WAN024FJ7; Start 626; Stop 650
tggatgaacctgtttatgattatgt

SEQ ID NO: 290301 - DNA, 25 bp, Artificial
  probe
  misc_feature (1)..(25): SEQ ID NO: 1316; WAN024FJ7; Start 624; Stop 648
tgtggatgaacctgtttatgattat

SEQ ID NO: 290302 - DNA, 25 bp, Artificial
  probe
  misc_feature (1)..(25): SEQ ID NO: 1316; WAN024FJ7; Start 826; Stop 850
aattggtctgttaatgaagggcatc

SEQ ID NO: 290303 - DNA, 25 bp, Artificial
  probe
  misc_feature (1)..(25): SEQ ID NO: 1316; WAN024FJ7; Start 825; Stop 849
gaattggtctgttaatgaagggcat

SEQ ID NO: 290304 - DNA, 25 bp, Artificial
  probe
  misc_feature (1)..(25): SEQ ID NO: 1316; WAN024FJ7; Start 291; Stop 315
taaggaattggtcgctcgttacaag

SEQ ID NO: 290305 - DNA, 25 bp, Artificial
  probe
  misc_feature (1)..(25): SEQ ID NO: 1316; WAN024FJ7; Start 823; Stop 847
aagaattggtctgttaatgaagggc

SEQ ID NO: 290306 - DNA, 25 bp, Artificial
  probe
  misc_feature (1)..(25): SEQ ID NO: 1316; WAN024FJ7; Start 2; Stop 26
tgacaaagaaacaacttcacttggt

SEQ ID NO: 290307 - DNA, 25 bp, Artificial
  probe
  misc_feature (1)..(25): SEQ ID NO: 1316; WAN024FJ7; Start 625; Stop 649
gtggatgaacctgtttatgattatg

SEQ ID NO: 290308 - DNA, 25 bp, Artificial
  probe
  misc_feature (1)..(25): SEQ ID NO: 1316; WAN024FJ7; Start 142; Stop 166
ctggttgaaattaaggaagacaatc

SEQ ID NO: 290309 - DNA, 25 bp, Artificial
  probe
  misc_feature (1)..(25): SEQ ID NO: 1316; WAN024FJ7; Start 627; Stop 651
ggatgaacctgtttatgattatgtc

SEQ ID NO: 290310 - DNA, 25 bp, Artificial
  probe
  misc_feature (1)..(25): SEQ ID NO: 1316; WAN024FJ7; Start 359; Stop 383
tagatggaatcaagttggaacgtga

SEQ ID NO: 290311 - DNA, 25 bp, Artificial
  probe
  misc_feature (1)..(25): SEQ ID NO: 1316; WAN024FJ7; Start 572; Stop 596
tccgtttcttgccaaatccctatta

SEQ ID NO: 290312 - DNA, 25 bp, Artificial
  probe
  misc_feature (1)..(25): SEQ ID NO: 1316; WAN024FJ7; Start 143; Stop 167
tggttgaaattaaggaagacaatcc

SEQ ID NO: 290313 - DNA, 25 bp, Artificial
  probe
  misc_feature (1)..(25): SEQ ID NO: 1316; WAN024FJ7; Start 558; Stop 582
cttggtctttgatgtccgtttcttg

SEQ ID NO: 290314 - DNA, 25 bp, Artificial
  probe
  misc_feature (1)..(25): SEQ ID NO: 1316; WAN024FJ7; Start 92; Stop 116
atttcaccattgataatatgccgcc

SEQ ID NO: 290315 - DNA, 25 bp, Artificial
  probe
  misc_feature (1)..(25): SEQ ID NO: 1316; WAN024FJ7; Start 415; Stop 439
aatgtggtggatacgactgaactca

SEQ ID NO: 290316 - DNA, 25 bp, Artificial
  probe
  misc_feature (1)..(25): SEQ ID NO: 1316; WAN024FJ7; Start 3; Stop 27
gacaaagaaacaacttcacttggtg

SEQ ID NO: 290317 - DNA, 25 bp, Artificial
  probe
  misc_feature (1)..(25): SEQ ID NO: 1316; WAN024FJ7; Start 94; Stop 118
ttcaccattgataatatgccgccag

SEQ ID NO: 290318 - DNA, 25 bp, Artificial
  probe
  misc_feature (1)..(25): SEQ ID NO: 1316; WAN024FJ7; Start 651; Stop 675
catgaaccatcctgagtcagaagac

SEQ ID NO: 290319 - DNA, 25 bp, Artificial
  probe
  misc_feature (1)..(25): SEQ ID NO: 1316; WAN024FJ7; Start 90; Stop 114
ttatttcaccattgataatatgccg

SEQ ID NO: 290320 - DNA, 25 bp, Artificial
  probe
  misc_feature (1)..(25): SEQ ID NO: 1316; WAN024FJ7; Start 824; Stop 848
agaattggtctgttaatgaagggca

SEQ ID NO: 290321 - DNA, 25 bp, Artificial
  probe
  misc_feature (1)..(25): SEQ ID NO: 1316; WAN024FJ7; Start 557; Stop 581
acttggtctttgatgtccgtttctt

SEQ ID NO: 290322 - DNA, 25 bp, Artificial
  probe
  misc_feature (1)..(25): SEQ ID NO: 1317; WAN024CJ8; Start 92; Stop 116
ctaagtatagtgtccttgagcgtaa

SEQ ID NO: 290323 - DNA, 25 bp, Artificial
  probe
  misc_feature (1)..(25): SEQ ID NO: 1317; WAN024CJ8; Start 88; Stop 112
caacctaagtatagtgtccttgagc

SEQ ID NO: 290324 - DNA, 25 bp, Artificial
  probe
  misc_feature (1)..(25): SEQ ID NO: 1317; WAN024CJ8; Start 91; Stop 115
cctaagtatagtgtccttgagcgta

SEQ ID NO: 290325 - DNA, 25 bp, Artificial
  probe
  misc_feature (1)..(25): SEQ ID NO: 1317; WAN024CJ8; Start 162; Stop 186
atacgcaactatcaagcagataaca

SEQ ID NO: 290326 - DNA, 25 bp, Artificial
  probe
  misc_feature (1)..(25): SEQ ID NO: 1317; WAN024CJ8; Start 161; Stop 185
aatacgcaactatcaagcagataac

SEQ ID NO: 290327 - DNA, 25 bp, Artificial
  probe
  misc_feature (1)..(25): SEQ ID NO: 1317; WAN024CJ8; Start 87; Stop 111
acaacctaagtatagtgtccttgag

SEQ ID NO: 290328 - DNA, 25 bp, Artificial
  probe
  misc_feature (1)..(25): SEQ ID NO: 1317; WAN024CJ8; Start 86; Stop 110
aacaacctaagtatagtgtccttga

SEQ ID NO: 290329 - DNA, 25 bp, Artificial
  probe
  misc_feature (1)..(25): SEQ ID NO: 1317; WAN024CJ8; Start 163; Stop 187
tacgcaactatcaagcagataacag

SEQ ID NO: 290330 - DNA, 25 bp, Artificial
  probe
  misc_feature (1)..(25): SEQ ID NO: 1317; WAN024CJ8; Start 89; Stop 113
aacctaagtatagtgtccttgagcg

SEQ ID NO: 290331 - DNA, 25 bp, Artificial
  probe
  misc_feature (1)..(25): SEQ ID NO: 1317; WAN024CJ8; Start 85; Stop 109
gaacaacctaagtatagtgtccttg

SEQ ID NO: 290332 - DNA, 25 bp, Artificial
  probe
  misc_feature (1)..(25): SEQ ID NO: 1317; WAN024CJ8; Start 166; Stop 190
gcaactatcaagcagataacagata

SEQ ID NO: 290333 - DNA, 25 bp, Artificial
  probe
  misc_feature (1)..(25): SEQ ID NO: 1317; WAN024CJ8; Start 84; Stop 108
agaacaacctaagtatagtgtcctt

SEQ ID NO: 290334 - DNA, 25 bp, Artificial
  probe
  misc_feature (1)..(25): SEQ ID NO: 1317; WAN024CJ8; Start 83; Stop 107
aagaacaacctaagtatagtgtcct

SEQ ID NO: 290335 - DNA, 25 bp, Artificial
  probe
  misc_feature (1)..(25): SEQ ID NO: 1317; WAN024CJ8; Start 165; Stop 189
cgcaactatcaagcagataacagat

SEQ ID NO: 290336 - DNA, 25 bp, Artificial
  probe
  misc_feature (1)..(25): SEQ ID NO: 1317; WAN024CJ8; Start 246; Stop 270
gtacaatcacatgaatgttatcgga

SEQ ID NO: 290337 - DNA, 25 bp, Artificial
  probe
  misc_feature (1)..(25): SEQ ID NO: 1317; WAN024CJ8; Start 247; Stop 271
tacaatcacatgaatgttatcggag

SEQ ID NO: 290338 - DNA, 25 bp, Artificial
  probe
  misc_feature (1)..(25): SEQ ID NO: 1317; WAN024CJ8; Start 290; Stop 314
ttatcagtcaatcaccagcttatga

SEQ ID NO: 290339 - DNA, 25 bp, Artificial
  probe
  misc_feature (1)..(25): SEQ ID NO: 1317; WAN024CJ8; Start 74; Stop 98
tgcgagataaagaacaacctaagta

SEQ ID NO: 290340 - DNA, 25 bp, Artificial
  probe
  misc_feature (1)..(25): SEQ ID NO: 1317; WAN024CJ8; Start 73; Stop 97
atgcgagataaagaacaacctaagt

SEQ ID NO: 290341 - DNA, 25 bp, Artificial
  probe
  misc_feature (1)..(25): SEQ ID NO: 1317; WAN024CJ8; Start 90; Stop 114
acctaagtatagtgtccttgagcgt

SEQ ID NO: 290342 - DNA, 25 bp, Artificial
  probe
  misc_feature (1)..(25): SEQ ID NO: 1317; WAN024CJ8; Start 164; Stop 188
acgcaactatcaagcagataacaga

SEQ ID NO: 290343 - DNA, 25 bp, Artificial
  probe
  misc_feature (1)..(25): SEQ ID NO: 1317; WAN024CJ8; Start 173; Stop 197
tcaagcagataacagatattagggt

SEQ ID NO: 290344 - DNA, 25 bp, Artificial
  probe
  misc_feature (1)..(25): SEQ ID NO: 1317; WAN024CJ8; Start 248; Stop 272
acaatcacatgaatgttatcggagc

SEQ ID NO: 290345 - DNA, 25 bp, Artificial
  probe
  misc_feature (1)..(25): SEQ ID NO: 1317; WAN024CJ8; Start 93; Stop 117
taagtatagtgtccttgagcgtaaa

SEQ ID NO: 290346 - DNA, 25 bp, Artificial
  probe
  misc_feature (1)..(25): SEQ ID NO: 1317; WAN024CJ8; Start 250; Stop 274
aatcacatgaatgttatcggagctt

SEQ ID NO: 290347 - DNA, 25 bp, Artificial
  probe
  misc_feature (1)..(25): SEQ ID NO: 1317; WAN024CJ8; Start 75; Stop 99
gcgagataaagaacaacctaagtat

SEQ ID NO: 290348 - DNA, 25 bp, Artificial
  probe
  misc_feature (1)..(25): SEQ ID NO: 1317; WAN024CJ8; Start 188; Stop 212
atattagggtacaaacaagtgaggc

SEQ ID NO: 290349 - DNA, 25 bp, Artificial
  probe
  misc_feature (1)..(25): SEQ ID NO: 1317; WAN024CJ8; Start 251; Stop 275
atcacatgaatgttatcggagcttg

SEQ ID NO: 290350 - DNA, 25 bp, Artificial
  probe
  misc_feature (1)..(25): SEQ ID NO: 1317; WAN024CJ8; Start 249; Stop 273
caatcacatgaatgttatcggagct

SEQ ID NO: 290351 - DNA, 25 bp, Artificial
  probe
  misc_feature (1)..(25): SEQ ID NO: 1317; WAN024CJ8; Start 72; Stop 96
catgcgagataaagaacaacctaag

SEQ ID NO: 290352 - DNA, 25 bp, Artificial
  probe
  misc_feature (1)..(25): SEQ ID NO: 1317; WAN024CJ8; Start 62; Stop 86
agtggtatttcatgcgagataaaga

SEQ ID NO: 290353 - DNA, 25 bp, Artificial
  probe
  misc_feature (1)..(25): SEQ ID NO: 1317; WAN024CJ8; Start 71; Stop 95
tcatgcgagataaagaacaacctaa

SEQ ID NO: 290354 - DNA, 25 bp, Artificial
  probe
  misc_feature (1)..(25): SEQ ID NO: 1317; WAN024CJ8; Start 60; Stop 84
caagtggtatttcatgcgagataaa

SEQ ID NO: 290355 - DNA, 25 bp, Artificial
  probe
  misc_feature (1)..(25): SEQ ID NO: 1318; WAN024FSL; Start 393; Stop 417
gactatcaaagaaagacaggcaaag

SEQ ID NO: 290356 - DNA, 25 bp, Artificial
  probe
  misc_feature (1)..(25): SEQ ID NO: 1318; WAN024FSL; Start 221; Stop 245
ctgagagaatggtaacgataaagga

SEQ ID NO: 290357 - DNA, 25 bp, Artificial
  probe
  misc_feature (1)..(25): SEQ ID NO: 1318; WAN024FSL; Start 222; Stop 246
tgagagaatggtaacgataaaggaa

SEQ ID NO: 290358 - DNA, 25 bp, Artificial
  probe
  misc_feature (1)..(25): SEQ ID NO: 1318; WAN024FSL; Start 223; Stop 247
gagagaatggtaacgataaaggaac

SEQ ID NO: 290359 - DNA, 25 bp, Artificial
  probe
  misc_feature (1)..(25): SEQ ID NO: 1318; WAN024FSL; Start 395; Stop 419
ctatcaaagaaagacaggcaaaggt

SEQ ID NO: 290360 - DNA, 25 bp, Artificial
  probe
  misc_feature (1)..(25): SEQ ID NO: 1318; WAN024FSL; Start 394; Stop 418
actatcaaagaaagacaggcaaagg

SEQ ID NO: 290361 - DNA, 25 bp, Artificial
  probe
  misc_feature (1)..(25): SEQ ID NO: 1318; WAN024FSL; Start 220; Stop 244
gctgagagaatggtaacgataaagg

SEQ ID NO: 290362 - DNA, 25 bp, Artificial
  probe
  misc_feature (1)..(25): SEQ ID NO: 1318; WAN024FSL; Start 219; Stop 243
ggctgagagaatggtaacgataaag

SEQ ID NO: 290363 - DNA, 25 bp, Artificial
  probe
  misc_feature (1)..(25): SEQ ID NO: 1318; WAN024FSL; Start 388; Stop 412
aggatgactatcaaagaaagacagg

SEQ ID NO: 290364 - DNA, 25 bp, Artificial
  probe
  misc_feature (1)..(25): SEQ ID NO: 1318; WAN024FSL; Start 391; Stop 415
atgactatcaaagaaagacaggcaa

SEQ ID NO: 290365 - DNA, 25 bp, Artificial
  probe
  misc_feature (1)..(25): SEQ ID NO: 1318; WAN024FSL; Start 383; Stop 407
ccacaaggatgactatcaaagaaag

SEQ ID NO: 290366 - DNA, 25 bp, Artificial
  probe
  misc_feature (1)..(25): SEQ ID NO: 1318; WAN024FSL; Start 256; Stop 280
ataggaagggcaccaaattctttac

SEQ ID NO: 290367 - DNA, 25 bp, Artificial
  probe
  misc_feature (1)..(25): SEQ ID NO: 1318; WAN024FSL; Start 255; Stop 279
cataggaagggcaccaaattcttta

SEQ ID NO: 290368 - DNA, 25 bp, Artificial
  probe
  misc_feature (1)..(25): SEQ ID NO: 1318; WAN024FSL; Start 319; Stop 343
atattcacaccattgacaaagaagg

SEQ ID NO: 290369 - DNA, 25 bp, Artificial
  probe
  misc_feature (1)..(25): SEQ ID NO: 1318; WAN024FSL; Start 392; Stop 416
tgactatcaaagaaagacaggcaaa

SEQ ID NO: 290370 - DNA, 25 bp, Artificial
  probe
  misc_feature (1)..(25): SEQ ID NO: 1318; WAN024FSL; Start 94; Stop 118
aatccgtacactactgaaggaatcc

SEQ ID NO: 290371 - DNA, 25 bp, Artificial
  probe
  misc_feature (1)..(25): SEQ ID NO: 1318; WAN024FSL; Start 390; Stop 414
gatgactatcaaagaaagacaggca

SEQ ID NO: 290372 - DNA, 25 bp, Artificial
  probe
  misc_feature (1)..(25): SEQ ID NO: 1318; WAN024FSL; Start 306; Stop 330
aagaaagtcaaagatattcacacca

SEQ ID NO: 290373 - DNA, 25 bp, Artificial
  probe
  misc_feature (1)..(25): SEQ ID NO: 1318; WAN024FSL; Start 260; Stop 284
gaagggcaccaaattctttactaga

SEQ ID NO: 290374 - DNA, 25 bp, Artificial
  probe
  misc_feature (1)..(25): SEQ ID NO: 1318; WAN024FSL; Start 89; Stop 113
caataaatccgtacactactgaagg

SEQ ID NO: 290375 - DNA, 25 bp, Artificial
  probe
  misc_feature (1)..(25): SEQ ID NO: 1318; WAN024FSL; Start 88; Stop 112
ccaataaatccgtacactactgaag

SEQ ID NO: 290376 - DNA, 25 bp, Artificial
  probe
  misc_feature (1)..(25): SEQ ID NO: 1318; WAN024FSL; Start 307; Stop 331
agaaagtcaaagatattcacaccat

SEQ ID NO: 290377 - DNA, 25 bp, Artificial
  probe
  misc_feature (1)..(25): SEQ ID NO: 1318; WAN024FSL; Start 87; Stop 111
gccaataaatccgtacactactgaa

SEQ ID NO: 290378 - DNA, 25 bp, Artificial
  probe
  misc_feature (1)..(25): SEQ ID NO: 1318; WAN024FSL; Start 85; Stop 109
aagccaataaatccgtacactactg

SEQ ID NO: 290379 - DNA, 25 bp, Artificial
  probe
  misc_feature (1)..(25): SEQ ID NO: 1318; WAN024FSL; Start 84; Stop 108
caagccaataaatccgtacactact

SEQ ID NO: 290380 - DNA, 25 bp, Artificial
  probe
  misc_feature (1)..(25): SEQ ID NO: 1318; WAN024FSL; Start 251; Stop 275
aaatcataggaagggcaccaaattc

SEQ ID NO: 290381 - DNA, 25 bp, Artificial
  probe
  misc_feature (1)..(25): SEQ ID NO: 1318; WAN024FSL; Start 386; Stop 410
caaggatgactatcaaagaaagaca

SEQ ID NO: 290382 - DNA, 25 bp, Artificial
  probe
  misc_feature (1)..(25): SEQ ID NO: 1318; WAN024FSL; Start 385; Stop 409
acaaggatgactatcaaagaaagac

SEQ ID NO: 290383 - DNA, 25 bp, Artificial
  probe
  misc_feature (1)..(25): SEQ ID NO: 1318; WAN024FSL; Start 384; Stop 408
cacaaggatgactatcaaagaaaga

SEQ ID NO: 290384 - DNA, 25 bp, Artificial
  probe
  misc_feature (1)..(25): SEQ ID NO: 1318; WAN024FSL; Start 382; Stop 406
gccacaaggatgactatcaaagaaa

SEQ ID NO: 290385 - DNA, 25 bp, Artificial
  probe
  misc_feature (1)..(25): SEQ ID NO: 1318; WAN024FSL; Start 317; Stop 341
agatattcacaccattgacaaagaa

SEQ ID NO: 290386 - DNA, 25 bp, Artificial
  probe
  misc_feature (1)..(25): SEQ ID NO: 1318; WAN024FSL; Start 316; Stop 340
aagatattcacaccattgacaaaga

SEQ ID NO: 290387 - DNA, 25 bp, Artificial
  probe
  misc_feature (1)..(25): SEQ ID NO: 1318; WAN024FSL; Start 389; Stop 413
ggatgactatcaaagaaagacaggc

SEQ ID NO: 290388 - DNA, 25 bp, Artificial
  probe
  misc_feature (1)..(25): SEQ ID NO: 1319; WAN024D6X; Start 380; Stop 404
tcttaacaggtgtcttgacggatat

SEQ ID NO: 290389 - DNA, 25 bp, Artificial
  probe
  misc_feature (1)..(25): SEQ ID NO: 1319; WAN024D6X; Start 379; Stop 403
atcttaacaggtgtcttgacggata

SEQ ID NO: 290390 - DNA, 25 bp, Artificial
  probe
  misc_feature (1)..(25): SEQ ID NO: 1319; WAN024D6X; Start 378; Stop 402
tatcttaacaggtgtcttgacggat

SEQ ID NO: 290391 - DNA, 25 bp, Artificial
  probe
  misc_feature (1)..(25): SEQ ID NO: 1319; WAN024D6X; Start 377; Stop 401
ttatcttaacaggtgtcttgacgga

SEQ ID NO: 290392 - DNA, 25 bp, Artificial
  probe
  misc_feature (1)..(25): SEQ ID NO: 1319; WAN024D6X; Start 364; Stop 388
agagtgtctaccgttatcttaacag

SEQ ID NO: 290393 - DNA, 25 bp, Artificial
  probe
  misc_feature (1)..(25): SEQ ID NO: 1319; WAN024D6X; Start 365; Stop 389
gagtgtctaccgttatcttaacagg

SEQ ID NO: 290394 - DNA, 25 bp, Artificial
  probe
  misc_feature (1)..(25): SEQ ID NO: 1319; WAN024D6X; Start 371; Stop 395
ctaccgttatcttaacaggtgtctt

SEQ ID NO: 290395 - DNA, 25 bp, Artificial
  probe
  misc_feature (1)..(25): SEQ ID NO: 1319; WAN024D6X; Start 372; Stop 396
taccgttatcttaacaggtgtcttg

SEQ ID NO: 290396 - DNA, 25 bp, Artificial
  probe
  misc_feature (1)..(25): SEQ ID NO: 1319; WAN024D6X; Start 264; Stop 288
ttatcaagagcatggttcagacagt

SEQ ID NO: 290397 - DNA, 25 bp, Artificial
  probe
  misc_feature (1)..(25): SEQ ID NO: 1319; WAN024D6X; Start 370; Stop 394
tctaccgttatcttaacaggtgtct

SEQ ID NO: 290398 - DNA, 25 bp, Artificial
  probe
  misc_feature (1)..(25): SEQ ID NO: 1319; WAN024D6X; Start 369; Stop 393
gtctaccgttatcttaacaggtgtc

SEQ ID NO: 290399 - DNA, 25 bp, Artificial
  probe
  misc_feature (1)..(25): SEQ ID NO: 1319; WAN024D6X; Start 525; Stop 549
tacactcggagctaagttagtagat

SEQ ID NO: 290400 - DNA, 25 bp, Artificial
  probe
  misc_feature (1)..(25): SEQ ID NO: 1319; WAN024D6X; Start 524; Stop 548
atacactcggagctaagttagtaga

SEQ ID NO: 290401 - DNA, 25 bp, Artificial
  probe
  misc_feature (1)..(25): SEQ ID NO: 1319; WAN024D6X; Start 367; Stop 391
gtgtctaccgttatcttaacaggtg

SEQ ID NO: 290402 - DNA, 25 bp, Artificial
  probe
  misc_feature (1)..(25): SEQ ID NO: 1319; WAN024D6X; Start 366; Stop 390
agtgtctaccgttatcttaacaggt

SEQ ID NO: 290403 - DNA, 25 bp, Artificial
  probe
  misc_feature (1)..(25): SEQ ID NO: 1319; WAN024D6X; Start 528; Stop 552
actcggagctaagttagtagatgaa

SEQ ID NO: 290404 - DNA, 25 bp, Artificial
  probe
  misc_feature (1)..(25): SEQ ID NO: 1319; WAN024D6X; Start 376; Stop 400
gttatcttaacaggtgtcttgacgg

SEQ ID NO: 290405 - DNA, 25 bp, Artificial
  probe
  misc_feature (1)..(25): SEQ ID NO: 1319; WAN024D6X; Start 374; Stop 398
ccgttatcttaacaggtgtcttgac

SEQ ID NO: 290406 - DNA, 25 bp, Artificial
  probe
  misc_feature (1)..(25): SEQ ID NO: 1319; WAN024D6X; Start 410; Stop 434
tcctacatacagctatagatgccta

SEQ ID NO: 290407 - DNA, 25 bp, Artificial
  probe
  misc_feature (1)..(25): SEQ ID NO: 1319; WAN024D6X; Start 341; Stop 365
tagatattcgtttgagagagcgtag

SEQ ID NO: 290408 - DNA, 25 bp, Artificial
  probe
  misc_feature (1)..(25): SEQ ID NO: 1319; WAN024D6X; Start 523; Stop 547
aatacactcggagctaagttagtag

SEQ ID NO: 290409 - DNA, 25 bp, Artificial
  probe
  misc_feature (1)..(25): SEQ ID NO: 1319; WAN024D6X; Start 363; Stop 387
tagagtgtctaccgttatcttaaca

SEQ ID NO: 290410 - DNA, 25 bp, Artificial
  probe
  misc_feature (1)..(25): SEQ ID NO: 1319; WAN024D6X; Start 368; Stop 392
tgtctaccgttatcttaacaggtgt

SEQ ID NO: 290411 - DNA, 25 bp, Artificial
  probe
  misc_feature (1)..(25): SEQ ID NO: 1319; WAN024D6X; Start 228; Stop 252
gagtggacggaatttatatggagat

SEQ ID NO: 290412 - DNA, 25 bp, Artificial
  probe
  misc_feature (1)..(25): SEQ ID NO: 1319; WAN024D6X; Start 265; Stop 289
tatcaagagcatggttcagacagtc

SEQ ID NO: 290413 - DNA, 25 bp, Artificial
  probe
  misc_feature (1)..(25): SEQ ID NO: 1319; WAN024D6X; Start 233; Stop 257
gacggaatttatatggagatttggg

SEQ ID NO: 290414 - DNA, 25 bp, Artificial
  probe
  misc_feature (1)..(25): SEQ ID NO: 1319; WAN024D6X; Start 232; Stop 256
ggacggaatttatatggagatttgg

SEQ ID NO: 290415 - DNA, 25 bp, Artificial
  probe
  misc_feature (1)..(25): SEQ ID NO: 1319; WAN024D6X; Start 229; Stop 253
agtggacggaatttatatggagatt

SEQ ID NO: 290416 - DNA, 25 bp, Artificial
  probe
  misc_feature (1)..(25): SEQ ID NO: 1319; WAN024D6X; Start 343; Stop 367
gatattcgtttgagagagcgtagag

SEQ ID NO: 290417 - DNA, 25 bp, Artificial
  probe
  misc_feature (1)..(25): SEQ ID NO: 1319; WAN024D6X; Start 409; Stop 433
gtcctacatacagctatagatgcct

SEQ ID NO: 290418 - DNA, 25 bp, Artificial
  probe
  misc_feature (1)..(25): SEQ ID NO: 1319; WAN024D6X; Start 527; Stop 551
cactcggagctaagttagtagatga

SEQ ID NO: 290419 - DNA, 25 bp, Artificial
  probe
  misc_feature (1)..(25): SEQ ID NO: 1319; WAN024D6X; Start 373; Stop 397
accgttatcttaacaggtgtcttga

SEQ ID NO: 290420 - DNA, 25 bp, Artificial
  probe
  misc_feature (1)..(25): SEQ ID NO: 1319; WAN024D6X; Start 342; Stop 366
agatattcgtttgagagagcgtaga

SEQ ID NO: 290421 - DNA, 25 bp, Artificial
  probe
  misc_feature (1)..(25): SEQ ID NO: 1320; WAN024DU3; Start 524; Stop 548
ctgatatagttggaagtgaggagtc

SEQ ID NO: 290422 - DNA, 25 bp, Artificial
  probe
  misc_feature (1)..(25): SEQ ID NO: 1320; WAN024DU3; Start 416; Stop 440
cagagcaggatattattcagcaaga

SEQ ID NO: 290423 - DNA, 25 bp, Artificial
  probe
  misc_feature (1)..(25): SEQ ID NO: 1320; WAN024DU3; Start 415; Stop 439
acagagcaggatattattcagcaag

SEQ ID NO: 290424 - DNA, 25 bp, Artificial
  probe
  misc_feature (1)..(25): SEQ ID NO: 1320; WAN024DU3; Start 414; Stop 438
gacagagcaggatattattcagcaa

SEQ ID NO: 290425 - DNA, 25 bp, Artificial
  probe
  misc_feature (1)..(25): SEQ ID NO: 1320; WAN024DU3; Start 418; Stop 442
gagcaggatattattcagcaagaac

SEQ ID NO: 290426 - DNA, 25 bp, Artificial
  probe
  misc_feature (1)..(25): SEQ ID NO: 1320; WAN024DU3; Start 417; Stop 441
agagcaggatattattcagcaagaa

SEQ ID NO: 290427 - DNA, 25 bp, Artificial
  probe
  misc_feature (1)..(25): SEQ ID NO: 1320; WAN024DU3; Start 422; Stop 446
aggatattattcagcaagaacgaga

SEQ ID NO: 290428 - DNA, 25 bp, Artificial
  probe
  misc_feature (1)..(25): SEQ ID NO: 1320; WAN024DU3; Start 421; Stop 445
caggatattattcagcaagaacgag

SEQ ID NO: 290429 - DNA, 25 bp, Artificial
  probe
  misc_feature (1)..(25): SEQ ID NO: 1320; WAN024DU3; Start 423; Stop 447
ggatattattcagcaagaacgagaa

SEQ ID NO: 290430 - DNA, 25 bp, Artificial
  probe
  misc_feature (1)..(25): SEQ ID NO: 1320; WAN024DU3; Start 419; Stop 443
agcaggatattattcagcaagaacg

SEQ ID NO: 290431 - DNA, 25 bp, Artificial
  probe
  misc_feature (1)..(25): SEQ ID NO: 1320; WAN024DU3; Start 523; Stop 547
actgatatagttggaagtgaggagt

SEQ ID NO: 290432 - DNA, 25 bp, Artificial
  probe
  misc_feature (1)..(25): SEQ ID NO: 1320; WAN024DU3; Start 420; Stop 444
gcaggatattattcagcaagaacga

SEQ ID NO: 290433 - DNA, 25 bp, Artificial
  probe
  misc_feature (1)..(25): SEQ ID NO: 1320; WAN024DU3; Start 447; Stop 471
aatgtaccaagatgatccagattcg

SEQ ID NO: 290434 - DNA, 25 bp, Artificial
  probe
  misc_feature (1)..(25): SEQ ID NO: 1320; WAN024DU3; Start 784; Stop 808
attggagttagaggtaagcgagaag

SEQ ID NO: 290435 - DNA, 25 bp, Artificial
  probe
  misc_feature (1)..(25): SEQ ID NO: 1320; WAN024DU3; Start 783; Stop 807
gattggagttagaggtaagcgagaa

SEQ ID NO: 290436 - DNA, 25 bp, Artificial
  probe
  misc_feature (1)..(25): SEQ ID NO: 1320; WAN024DU3; Start 371; Stop 395
atgaattggtaacatcagcacactt

SEQ ID NO: 290437 - DNA, 25 bp, Artificial
  probe
  misc_feature (1)..(25): SEQ ID NO: 1320; WAN024DU3; Start 413; Stop 437
tgacagagcaggatattattcagca

SEQ ID NO: 290438 - DNA, 25 bp, Artificial
  probe
  misc_feature (1)..(25): SEQ ID NO: 1320; WAN024DU3; Start 448; Stop 472
atgtaccaagatgatccagattcgt

SEQ ID NO: 290439 - DNA, 25 bp, Artificial
  probe
  misc_feature (1)..(25): SEQ ID NO: 1320; WAN024DU3; Start 1106; Stop 1130
tcagtagcatgaactctcttgaatt

SEQ ID NO: 290440 - DNA, 25 bp, Artificial
  probe
  misc_feature (1)..(25): SEQ ID NO: 1320; WAN024DU3; Start 777; Stop 801
actagcgattggagttagaggtaag

SEQ ID NO: 290441 - DNA, 25 bp, Artificial
  probe
  misc_feature (1)..(25): SEQ ID NO: 1320; WAN024DU3; Start 451; Stop 475
taccaagatgatccagattcgtgtt

SEQ ID NO: 290442 - DNA, 25 bp, Artificial
  probe
  misc_feature (1)..(25): SEQ ID NO: 1320; WAN024DU3; Start 1240; Stop 1264
atagatgatggtgacatagttgatt

SEQ ID NO: 290443 - DNA, 25 bp, Artificial
  probe
  misc_feature (1)..(25): SEQ ID NO: 1320; WAN024DU3; Start 1239; Stop 1263
aatagatgatggtgacatagttgat

SEQ ID NO: 290444 - DNA, 25 bp, Artificial
  probe
  misc_feature (1)..(25): SEQ ID NO: 1320; WAN024DU3; Start 525; Stop 549
tgatatagttggaagtgaggagtcc

SEQ ID NO: 290445 - DNA, 25 bp, Artificial
  probe
  misc_feature (1)..(25): SEQ ID NO: 1320; WAN024DU3; Start 407; Stop 431
ccattctgacagagcaggatattat

SEQ ID NO: 290446 - DNA, 25 bp, Artificial
  probe
  misc_feature (1)..(25): SEQ ID NO: 1320; WAN024DU3; Start 410; Stop 434
ttctgacagagcaggatattattca

SEQ ID NO: 290447 - DNA, 25 bp, Artificial
  probe
  misc_feature (1)..(25): SEQ ID NO: 1320; WAN024DU3; Start 778; Stop 802
ctagcgattggagttagaggtaagc

SEQ ID NO: 290448 - DNA, 25 bp, Artificial
  probe
  misc_feature (1)..(25): SEQ ID NO: 1320; WAN024DU3; Start 450; Stop 474
gtaccaagatgatccagattcgtgt

SEQ ID NO: 290449 - DNA, 25 bp, Artificial
  probe
  misc_feature (1)..(25): SEQ ID NO: 1320; WAN024DU3; Start 449; Stop 473
tgtaccaagatgatccagattcgtg

SEQ ID NO: 290450 - DNA, 25 bp, Artificial
  probe
  misc_feature (1)..(25): SEQ ID NO: 1320; WAN024DU3; Start 786; Stop 810
tggagttagaggtaagcgagaagtt

SEQ ID NO: 290451 - DNA, 25 bp, Artificial
  probe
  misc_feature (1)..(25): SEQ ID NO: 1320; WAN024DU3; Start 785; Stop 809
ttggagttagaggtaagcgagaagt

SEQ ID NO: 290452 - DNA, 25 bp, Artificial
  probe
  misc_feature (1)..(25): SEQ ID NO: 1320; WAN024DU3; Start 487; Stop 511
actttagcgaatttgtatcctggta

SEQ ID NO: 290453 - DNA, 25 bp, Artificial
  probe
  misc_feature (1)..(25): SEQ ID NO: 1320; WAN024DU3; Start 373; Stop 397
gaattggtaacatcagcacacttta

SEQ ID NO: 290454 - DNA, 25 bp, Artificial
  probe
  misc_feature (1)..(25): SEQ ID NO: 1321; WAN024C43; Start 357; Stop 381
tcttccaatgctatctattcctcaa

SEQ ID NO: 290455 - DNA, 25 bp, Artificial
  probe
  misc_feature (1)..(25): SEQ ID NO: 1321; WAN024C43; Start 356; Stop 380
atcttccaatgctatctattcctca

SEQ ID NO: 290456 - DNA, 25 bp, Artificial
  probe
  misc_feature (1)..(25): SEQ ID NO: 1321; WAN024C43; Start 360; Stop 384
tccaatgctatctattcctcaagaa

SEQ ID NO: 290457 - DNA, 25 bp, Artificial
  probe
  misc_feature (1)..(25): SEQ ID NO: 1321; WAN024C43; Start 359; Stop 383
ttccaatgctatctattcctcaaga

SEQ ID NO: 290458 - DNA, 25 bp, Artificial
  probe
  misc_feature (1)..(25): SEQ ID NO: 1321; WAN024C43; Start 358; Stop 382
cttccaatgctatctattcctcaag

SEQ ID NO: 290459 - DNA, 25 bp, Artificial
  probe
  misc_feature (1)..(25): SEQ ID NO: 1321; WAN024C43; Start 355; Stop 379
aatcttccaatgctatctattcctc

SEQ ID NO: 290460 - DNA, 25 bp, Artificial
  probe
  misc_feature (1)..(25): SEQ ID NO: 1321; WAN024C43; Start 115; Stop 139
gtaacattacaagctgctgagtata

SEQ ID NO: 290461 - DNA, 25 bp, Artificial
  probe
  misc_feature (1)..(25): SEQ ID NO: 1321; WAN024C43; Start 169; Stop 193
gagatgatacaaaggagttacggaa

SEQ ID NO: 290462 - DNA, 25 bp, Artificial
  probe
  misc_feature (1)..(25): SEQ ID NO: 1321; WAN024C43; Start 166; Stop 190
agtgagatgatacaaaggagttacg

SEQ ID NO: 290463 - DNA, 25 bp, Artificial
  probe
  misc_feature (1)..(25): SEQ ID NO: 1321; WAN024C43; Start 32; Stop 56
gcagacctaatccatttacagagaa

SEQ ID NO: 290464 - DNA, 25 bp, Artificial
  probe
  misc_feature (1)..(25): SEQ ID NO: 1321; WAN024C43; Start 30; Stop 54
aagcagacctaatccatttacagag

SEQ ID NO: 290465 - DNA, 25 bp, Artificial
  probe
  misc_feature (1)..(25): SEQ ID NO: 1321; WAN024C43; Start 170; Stop 194
agatgatacaaaggagttacggaat

SEQ ID NO: 290466 - DNA, 25 bp, Artificial
  probe
  misc_feature (1)..(25): SEQ ID NO: 1321; WAN024C43; Start 29; Stop 53
taagcagacctaatccatttacaga

SEQ ID NO: 290467 - DNA, 25 bp, Artificial
  probe
  misc_feature (1)..(25): SEQ ID NO: 1321; WAN024C43; Start 168; Stop 192
tgagatgatacaaaggagttacgga

SEQ ID NO: 290468 - DNA, 25 bp, Artificial
  probe
  misc_feature (1)..(25): SEQ ID NO: 1321; WAN024C43; Start 167; Stop 191
gtgagatgatacaaaggagttacgg

SEQ ID NO: 290469 - DNA, 25 bp, Artificial
  probe
  misc_feature (1)..(25): SEQ ID NO: 1321; WAN024C43; Start 31; Stop 55
agcagacctaatccatttacagaga

SEQ ID NO: 290470 - DNA, 25 bp, Artificial
  probe
  misc_feature (1)..(25): SEQ ID NO: 1321; WAN024C43; Start 276; Stop 300
atccaaagagacccacttaaagaat

SEQ ID NO: 290471 - DNA, 25 bp, Artificial
  probe
  misc_feature (1)..(25): SEQ ID NO: 1321; WAN024C43; Start 354; Stop 378
taatcttccaatgctatctattcct

SEQ ID NO: 290472 - DNA, 25 bp, Artificial
  probe
  misc_feature (1)..(25): SEQ ID NO: 1321; WAN024C43; Start 164; Stop 188
tgagtgagatgatacaaaggagtta

SEQ ID NO: 290473 - DNA, 25 bp, Artificial
  probe
  misc_feature (1)..(25): SEQ ID NO: 1321; WAN024C43; Start 277; Stop 301
tccaaagagacccacttaaagaata

SEQ ID NO: 290474 - DNA, 25 bp, Artificial
  probe
  misc_feature (1)..(25): SEQ ID NO: 1321; WAN024C43; Start 275; Stop 299
catccaaagagacccacttaaagaa

SEQ ID NO: 290475 - DNA, 25 bp, Artificial
  probe
  misc_feature (1)..(25): SEQ ID NO: 1321; WAN024C43; Start 165; Stop 189
gagtgagatgatacaaaggagttac

SEQ ID NO: 290476 - DNA, 25 bp, Artificial
  probe
  misc_feature (1)..(25): SEQ ID NO: 1321; WAN024C43; Start 162; Stop 186
gttgagtgagatgatacaaaggagt

SEQ ID NO: 290477 - DNA, 25 bp, Artificial
  probe
  misc_feature (1)..(25): SEQ ID NO: 1321; WAN024C43; Start 171; Stop 195
gatgatacaaaggagttacggaatt

SEQ ID NO: 290478 - DNA, 25 bp, Artificial
  probe
  misc_feature (1)..(25): SEQ ID NO: 1321; WAN024C43; Start 163; Stop 187
ttgagtgagatgatacaaaggagtt

SEQ ID NO: 290479 - DNA, 25 bp, Artificial
  probe
  misc_feature (1)..(25): SEQ ID NO: 1321; WAN024C43; Start 295; Stop 319
aagaataagtgggttacaagtgttt

SEQ ID NO: 290480 - DNA, 25 bp, Artificial
  probe
  misc_feature (1)..(25): SEQ ID NO: 1321; WAN024C43; Start 294; Stop 318
aaagaataagtgggttacaagtgtt

SEQ ID NO: 290481 - DNA, 25 bp, Artificial
  probe
  misc_feature (1)..(25): SEQ ID NO: 1321; WAN024C43; Start 28; Stop 52
ttaagcagacctaatccatttacag

SEQ ID NO: 290482 - DNA, 25 bp, Artificial
  probe
  misc_feature (1)..(25): SEQ ID NO: 1321; WAN024C43; Start 159; Stop 183
ttcgttgagtgagatgatacaaagg

SEQ ID NO: 290483 - DNA, 25 bp, Artificial
  probe
  misc_feature (1)..(25): SEQ ID NO: 1321; WAN024C43; Start 158; Stop 182
attcgttgagtgagatgatacaaag

SEQ ID NO: 290484 - DNA, 25 bp, Artificial
  probe
  misc_feature (1)..(25): SEQ ID NO: 1321; WAN024C43; Start 116; Stop 140
taacattacaagctgctgagtatac

SEQ ID NO: 290485 - DNA, 25 bp, Artificial
  probe
  misc_feature (1)..(25): SEQ ID NO: 1321; WAN024C43; Start 278; Stop 302
ccaaagagacccacttaaagaataa

SEQ ID NO: 290486 - DNA, 25 bp, Artificial
  probe
  misc_feature (1)..(25): SEQ ID NO: 1321; WAN024C43; Start 210; Stop 234
tggtcagacatttatttctagtgga

SEQ ID NO: 290487 - DNA, 25 bp, Artificial
  probe
  misc_feature (1)..(25): SEQ ID NO: 1322; WAN024C64; Start 552; Stop 576
agccaatatccaatgtaacggaatt

SEQ ID NO: 290488 - DNA, 25 bp, Artificial
  probe
  misc_feature (1)..(25): SEQ ID NO: 1322; WAN024C64; Start 551; Stop 575
gagccaatatccaatgtaacggaat

SEQ ID NO: 290489 - DNA, 25 bp, Artificial
  probe
  misc_feature (1)..(25): SEQ ID NO: 1322; WAN024C64; Start 383; Stop 407
ttatcgtttcaaaggcagttattcc

SEQ ID NO: 290490 - DNA, 25 bp, Artificial
  probe
  misc_feature (1)..(25): SEQ ID NO: 1322; WAN024C64; Start 379; Stop 403
ccatttatcgtttcaaaggcagtta

SEQ ID NO: 290491 - DNA, 25 bp, Artificial
  probe
  misc_feature (1)..(25): SEQ ID NO: 1322; WAN024C64; Start 360; Stop 384
cgatattgacttaaacgcaccattt

SEQ ID NO: 290492 - DNA, 25 bp, Artificial
  probe
  misc_feature (1)..(25): SEQ ID NO: 1322; WAN024C64; Start 72; Stop 96
ttatggaattggatttgctattgcc

SEQ ID NO: 290493 - DNA, 25 bp, Artificial
  probe
  misc_feature (1)..(25): SEQ ID NO: 1322; WAN024C64; Start 289; Stop 313
gttaataacgctggtattatccgcc

SEQ ID NO: 290494 - DNA, 25 bp, Artificial
  probe
  misc_feature (1)..(25): SEQ ID NO: 1322; WAN024C64; Start 764; Stop 788
tcctatatgtagatggcggtatctt

SEQ ID NO: 290495 - DNA, 25 bp, Artificial
  probe
  misc_feature (1)..(25): SEQ ID NO: 1322; WAN024C64; Start 763; Stop 787
atcctatatgtagatggcggtatct

SEQ ID NO: 290496 - DNA, 25 bp, Artificial
  probe
  misc_feature (1)..(25): SEQ ID NO: 1322; WAN024C64; Start 767; Stop 791
tatatgtagatggcggtatcttagc

SEQ ID NO: 290497 - DNA, 25 bp, Artificial
  probe
  misc_feature (1)..(25): SEQ ID NO: 1322; WAN024C64; Start 71; Stop 95
cttatggaattggatttgctattgc

SEQ ID NO: 290498 - DNA, 25 bp, Artificial
  probe
  misc_feature (1)..(25): SEQ ID NO: 1322; WAN024C64; Start 67; Stop 91
gcttcttatggaattggatttgcta

SEQ ID NO: 290499 - DNA, 25 bp, Artificial
  probe
  misc_feature (1)..(25): SEQ ID NO: 1322; WAN024C64; Start 553; Stop 577
gccaatatccaatgtaacggaattg

SEQ ID NO: 290500 - DNA, 25 bp, Artificial
  probe
  misc_feature (1)..(25): SEQ ID NO: 1322; WAN024C64; Start 364; Stop 388
attgacttaaacgcaccatttatcg

SEQ ID NO: 290501 - DNA, 25 bp, Artificial
  probe
  misc_feature (1)..(25): SEQ ID NO: 1322; WAN024C64; Start 765; Stop 789
cctatatgtagatggcggtatctta

SEQ ID NO: 290502 - DNA, 25 bp, Artificial
  probe
  misc_feature (1)..(25): SEQ ID NO: 1322; WAN024C64; Start 380; Stop 404
catttatcgtttcaaaggcagttat

SEQ ID NO: 290503 - DNA, 25 bp, Artificial
  probe
  misc_feature (1)..(25): SEQ ID NO: 1322; WAN024C64; Start 537; Stop 561
gtctgaatacggtggagccaatatc

SEQ ID NO: 290504 - DNA, 25 bp, Artificial
  probe
  misc_feature (1)..(25): SEQ ID NO: 1322; WAN024C64; Start 382; Stop 406
tttatcgtttcaaaggcagttattc

SEQ ID NO: 290505 - DNA, 25 bp, Artificial
  probe
  misc_feature (1)..(25): SEQ ID NO: 1322; WAN024C64; Start 378; Stop 402
accatttatcgtttcaaaggcagtt

SEQ ID NO: 290506 - DNA, 25 bp, Artificial
  probe
  misc_feature (1)..(25): SEQ ID NO: 1322; WAN024C64; Start 420; Stop 444
gaaagggcatggaaagattatcaat

SEQ ID NO: 290507 - DNA, 25 bp, Artificial
  probe
  misc_feature (1)..(25): SEQ ID NO: 1322; WAN024C64; Start 419; Stop 443
agaaagggcatggaaagattatcaa

SEQ ID NO: 290508 - DNA, 25 bp, Artificial
  probe
  misc_feature (1)..(25): SEQ ID NO: 1322; WAN024C64; Start 418; Stop 442
aagaaagggcatggaaagattatca

SEQ ID NO: 290509 - DNA, 25 bp, Artificial
  probe
  misc_feature (1)..(25): SEQ ID NO: 1322; WAN024C64; Start 413; Stop 437
tgataaagaaagggcatggaaagat

SEQ ID NO: 290510 - DNA, 25 bp, Artificial
  probe
  misc_feature (1)..(25): SEQ ID NO: 1322; WAN024C64; Start 417; Stop 441
aaagaaagggcatggaaagattatc

SEQ ID NO: 290511 - DNA, 25 bp, Artificial
  probe
  misc_feature (1)..(25): SEQ ID NO: 1322; WAN024C64; Start 414; Stop 438
gataaagaaagggcatggaaagatt

SEQ ID NO: 290512 - DNA, 25 bp, Artificial
  probe
  misc_feature (1)..(25): SEQ ID NO: 1322; WAN024C64; Start 412; Stop 436
atgataaagaaagggcatggaaaga

SEQ ID NO: 290513 - DNA, 25 bp, Artificial
  probe
  misc_feature (1)..(25): SEQ ID NO: 1322; WAN024C64; Start 583; Stop 607
ggttatattgccactcctcaaacag

SEQ ID NO: 290514 - DNA, 25 bp, Artificial
  probe
  misc_feature (1)..(25): SEQ ID NO: 1322; WAN024C64; Start 409; Stop 433
tctatgataaagaaagggcatggaa

SEQ ID NO: 290515 - DNA, 25 bp, Artificial
  probe
  misc_feature (1)..(25): SEQ ID NO: 1322; WAN024C64; Start 411; Stop 435
tatgataaagaaagggcatggaaag

SEQ ID NO: 290516 - DNA, 25 bp, Artificial
  probe
  misc_feature (1)..(25): SEQ ID NO: 1322; WAN024C64; Start 410; Stop 434
ctatgataaagaaagggcatggaaa

SEQ ID NO: 290517 - DNA, 25 bp, Artificial
  probe
  misc_feature (1)..(25): SEQ ID NO: 1322; WAN024C64; Start 381; Stop 405
atttatcgtttcaaaggcagttatt

SEQ ID NO: 290518 - DNA, 25 bp, Artificial
  probe
  misc_feature (1)..(25): SEQ ID NO: 1322; WAN024C64; Start 384; Stop 408
tatcgtttcaaaggcagttattcct

SEQ ID NO: 290519 - DNA, 25 bp, Artificial
  probe
  misc_feature (1)..(25): SEQ ID NO: 1322; WAN024C64; Start 134; Stop 158
acgatatcaatcaagatctggtcaa

SEQ ID NO: 290520 - DNA, 25 bp, Artificial
  probe
  misc_feature (1)..(25): SEQ ID NO: 1323; WAN024D47; Start 745; Stop 769
aagattggagatggaaccttgattc

SEQ ID NO: 290521 - DNA, 25 bp, Artificial
  probe
  misc_feature (1)..(25): SEQ ID NO: 1323; WAN024D47; Start 748; Stop 772
attggagatggaaccttgattcgtt

SEQ ID NO: 290522 - DNA, 25 bp, Artificial
  probe
  misc_feature (1)..(25): SEQ ID NO: 1323; WAN024D47; Start 746; Stop 770
agattggagatggaaccttgattcg

SEQ ID NO: 290523 - DNA, 25 bp, Artificial
  probe
  misc_feature (1)..(25): SEQ ID NO: 1323; WAN024D47; Start 747; Stop 771
gattggagatggaaccttgattcgt

SEQ ID NO: 290524 - DNA, 25 bp, Artificial
  probe
  misc_feature (1)..(25): SEQ ID NO: 1323; WAN024D47; Start 756; Stop 780
tggaaccttgattcgtttctatgat

SEQ ID NO: 290525 - DNA, 25 bp, Artificial
  probe
  misc_feature (1)..(25): SEQ ID NO: 1323; WAN024D47; Start 755; Stop 779
atggaaccttgattcgtttctatga

SEQ ID NO: 290526 - DNA, 25 bp, Artificial
  probe
  misc_feature (1)..(25): SEQ ID NO: 1323; WAN024D47; Start 754; Stop 778
gatggaaccttgattcgtttctatg

SEQ ID NO: 290527 - DNA, 25 bp, Artificial
  probe
  misc_feature (1)..(25): SEQ ID NO: 1323; WAN024D47; Start 753; Stop 777
agatggaaccttgattcgtttctat

SEQ ID NO: 290528 - DNA, 25 bp, Artificial
  probe
  misc_feature (1)..(25): SEQ ID NO: 1323; WAN024D47; Start 752; Stop 776
gagatggaaccttgattcgtttcta

SEQ ID NO: 290529 - DNA, 25 bp, Artificial
  probe
  misc_feature (1)..(25): SEQ ID NO: 1323; WAN024D47; Start 772; Stop 796
ttctatgatccaggtcacttgcttc

SEQ ID NO: 290530 - DNA, 25 bp, Artificial
  probe
  misc_feature (1)..(25): SEQ ID NO: 1323; WAN024D47; Start 659; Stop 683
ctcatacctctacaaccaagtttga

SEQ ID NO: 290531 - DNA, 25 bp, Artificial
  probe
  misc_feature (1)..(25): SEQ ID NO: 1323; WAN024D47; Start 660; Stop 684
tcatacctctacaaccaagtttgac

SEQ ID NO: 290532 - DNA, 25 bp, Artificial
  probe
  misc_feature (1)..(25): SEQ ID NO: 1323; WAN024D47; Start 763; Stop 787
ttgattcgtttctatgatccaggtc

SEQ ID NO: 290533 - DNA, 25 bp, Artificial
  probe
  misc_feature (1)..(25): SEQ ID NO: 1323; WAN024D47; Start 762; Stop 786
cttgattcgtttctatgatccaggt

SEQ ID NO: 290534 - DNA, 25 bp, Artificial
  probe
  misc_feature (1)..(25): SEQ ID NO: 1323; WAN024D47; Start 760; Stop 784
accttgattcgtttctatgatccag

SEQ ID NO: 290535 - DNA, 25 bp, Artificial
  probe
  misc_feature (1)..(25): SEQ ID NO: 1323; WAN024D47; Start 661; Stop 685
catacctctacaaccaagtttgacc

SEQ ID NO: 290536 - DNA, 25 bp, Artificial
  probe
  misc_feature (1)..(25): SEQ ID NO: 1323; WAN024D47; Start 759; Stop 783
aaccttgattcgtttctatgatcca

SEQ ID NO: 290537 - DNA, 25 bp, Artificial
  probe
  misc_feature (1)..(25): SEQ ID NO: 1323; WAN024D47; Start 758; Stop 782
gaaccttgattcgtttctatgatcc

SEQ ID NO: 290538 - DNA, 25 bp, Artificial
  probe
  misc_feature (1)..(25): SEQ ID NO: 1323; WAN024D47; Start 757; Stop 781
ggaaccttgattcgtttctatgatc

SEQ ID NO: 290539 - DNA, 25 bp, Artificial
  probe
  misc_feature (1)..(25): SEQ ID NO: 1323; WAN024D47; Start 774; Stop 798
ctatgatccaggtcacttgcttctc

SEQ ID NO: 290540 - DNA, 25 bp, Artificial
  probe
  misc_feature (1)..(25): SEQ ID NO: 1323; WAN024D47; Start 658; Stop 682
gctcatacctctacaaccaagtttg

SEQ ID NO: 290541 - DNA, 25 bp, Artificial
  probe
  misc_feature (1)..(25): SEQ ID NO: 1323; WAN024D47; Start 969; Stop 993
ctatgcaatggatgacttcctagaa

SEQ ID NO: 290542 - DNA, 25 bp, Artificial
  probe
  misc_feature (1)..(25): SEQ ID NO: 1323; WAN024D47; Start 967; Stop 991
ctctatgcaatggatgacttcctag

SEQ ID NO: 290543 - DNA, 25 bp, Artificial
  probe
  misc_feature (1)..(25): SEQ ID NO: 1323; WAN024D47; Start 968; Stop 992
tctatgcaatggatgacttcctaga

SEQ ID NO: 290544 - DNA, 25 bp, Artificial
  probe
  misc_feature (1)..(25): SEQ ID NO: 1323; WAN024D47; Start 1005; Stop 1029
cttacaagccttggtgaagaaattg

SEQ ID NO: 290545 - DNA, 25 bp, Artificial
  probe
  misc_feature (1)..(25): SEQ ID NO: 1323; WAN024D47; Start 773; Stop 797
tctatgatccaggtcacttgcttct

SEQ ID NO: 290546 - DNA, 25 bp, Artificial
  probe
  misc_feature (1)..(25): SEQ ID NO: 1323; WAN024D47; Start 765; Stop 789
gattcgtttctatgatccaggtcac

SEQ ID NO: 290547 - DNA, 25 bp, Artificial
  probe
  misc_feature (1)..(25): SEQ ID NO: 1323; WAN024D47; Start 854; Stop 878
aatactactgtggtaaaggcggaac

SEQ ID NO: 290548 - DNA, 25 bp, Artificial
  probe
  misc_feature (1)..(25): SEQ ID NO: 1323; WAN024D47; Start 853; Stop 877
caatactactgtggtaaaggcggaa

SEQ ID NO: 290549 - DNA, 25 bp, Artificial
  probe
  misc_feature (1)..(25): SEQ ID NO: 1323; WAN024D47; Start 766; Stop 790
attcgtttctatgatccaggtcact

SEQ ID NO: 290550 - DNA, 25 bp, Artificial
  probe
  misc_feature (1)..(25): SEQ ID NO: 1323; WAN024D47; Start 764; Stop 788
tgattcgtttctatgatccaggtca

SEQ ID NO: 290551 - DNA, 25 bp, Artificial
  probe
  misc_feature (1)..(25): SEQ ID NO: 1323; WAN024D47; Start 662; Stop 686
atacctctacaaccaagtttgaccc

SEQ ID NO: 290552 - DNA, 25 bp, Artificial
  probe
  misc_feature (1)..(25): SEQ ID NO: 1323; WAN024D47; Start 966; Stop 990
cctctatgcaatggatgacttccta

SEQ ID NO: 290553 - DNA, 25 bp, Artificial
  probe
  misc_feature (1)..(25): SEQ ID NO: 1324; WAN024DIW; Start 14; Stop 38
ctatccatacagtagagtcagcacc

SEQ ID NO: 290554 - DNA, 25 bp, Artificial
  probe
  misc_feature (1)..(25): SEQ ID NO: 1324; WAN024DIW; Start 13; Stop 37
actatccatacagtagagtcagcac

SEQ ID NO: 290555 - DNA, 25 bp, Artificial
  probe
  misc_feature (1)..(25): SEQ ID NO: 1324; WAN024DIW; Start 483; Stop 507
cctctgtaactatgccaacaactta

SEQ ID NO: 290556 - DNA, 25 bp, Artificial
  probe
  misc_feature (1)..(25): SEQ ID NO: 1324; WAN024DIW; Start 484; Stop 508
ctctgtaactatgccaacaacttag

SEQ ID NO: 290557 - DNA, 25 bp, Artificial
  probe
  misc_feature (1)..(25): SEQ ID NO: 1324; WAN024DIW; Start 472; Stop 496
agcctagcaatcctctgtaactatg

SEQ ID NO: 290558 - DNA, 25 bp, Artificial
  probe
  misc_feature (1)..(25): SEQ ID NO: 1324; WAN024DIW; Start 480; Stop 504
aatcctctgtaactatgccaacaac

SEQ ID NO: 290559 - DNA, 25 bp, Artificial
  probe
  misc_feature (1)..(25): SEQ ID NO: 1324; WAN024DIW; Start 479; Stop 503
caatcctctgtaactatgccaacaa

SEQ ID NO: 290560 - DNA, 25 bp, Artificial
  probe
  misc_feature (1)..(25): SEQ ID NO: 1324; WAN024DIW; Start 485; Stop 509
tctgtaactatgccaacaacttagc

SEQ ID NO: 290561 - DNA, 25 bp, Artificial
  probe
  misc_feature (1)..(25): SEQ ID NO: 1324; WAN024DIW; Start 15; Stop 39
tatccatacagtagagtcagcacca

SEQ ID NO: 290562 - DNA, 25 bp, Artificial
  probe
  misc_feature (1)..(25): SEQ ID NO: 1324; WAN024DIW; Start 481; Stop 505
atcctctgtaactatgccaacaact

SEQ ID NO: 290563 - DNA, 25 bp, Artificial
  probe
  misc_feature (1)..(25): SEQ ID NO: 1324; WAN024DIW; Start 12; Stop 36
tactatccatacagtagagtcagca

SEQ ID NO: 290564 - DNA, 25 bp, Artificial
  probe
  misc_feature (1)..(25): SEQ ID NO: 1324; WAN024DIW; Start 482; Stop 506
tcctctgtaactatgccaacaactt

SEQ ID NO: 290565 - DNA, 25 bp, Artificial
  probe
  misc_feature (1)..(25): SEQ ID NO: 1324; WAN024DIW; Start 471; Stop 495
cagcctagcaatcctctgtaactat

SEQ ID NO: 290566 - DNA, 25 bp, Artificial
  probe
  misc_feature (1)..(25): SEQ ID NO: 1324; WAN024DIW; Start 277; Stop 301
atccagatgaatgatgacttgattc

SEQ ID NO: 290567 - DNA, 25 bp, Artificial
  probe
  misc_feature (1)..(25): SEQ ID NO: 1324; WAN024DIW; Start 11; Stop 35
ttactatccatacagtagagtcagc

SEQ ID NO: 290568 - DNA, 25 bp, Artificial
  probe
  misc_feature (1)..(25): SEQ ID NO: 1324; WAN024DIW; Start 142; Stop 166
taccaaattgtctcatctatccacc

SEQ ID NO: 290569 - DNA, 25 bp, Artificial
  probe
  misc_feature (1)..(25): SEQ ID NO: 1324; WAN024DIW; Start 140; Stop 164
cctaccaaattgtctcatctatcca

SEQ ID NO: 290570 - DNA, 25 bp, Artificial
  probe
  misc_feature (1)..(25): SEQ ID NO: 1324; WAN024DIW; Start 138; Stop 162
agcctaccaaattgtctcatctatc

SEQ ID NO: 290571 - DNA, 25 bp, Artificial
  probe
  misc_feature (1)..(25): SEQ ID NO: 1324; WAN024DIW; Start 137; Stop 161
aagcctaccaaattgtctcatctat

SEQ ID NO: 290572 - DNA, 25 bp, Artificial
  probe
  misc_feature (1)..(25): SEQ ID NO: 1324; WAN024DIW; Start 136; Stop 160
gaagcctaccaaattgtctcatcta

SEQ ID NO: 290573 - DNA, 25 bp, Artificial
  probe
  misc_feature (1)..(25): SEQ ID NO: 1324; WAN024DIW; Start 276; Stop 300
aatccagatgaatgatgacttgatt

SEQ ID NO: 290574 - DNA, 25 bp, Artificial
  probe
  misc_feature (1)..(25): SEQ ID NO: 1324; WAN024DIW; Start 270; Stop 294
caaacaaatccagatgaatgatgac

SEQ ID NO: 290575 - DNA, 25 bp, Artificial
  probe
  misc_feature (1)..(25): SEQ ID NO: 1324; WAN024DIW; Start 272; Stop 296
aacaaatccagatgaatgatgactt

SEQ ID NO: 290576 - DNA, 25 bp, Artificial
  probe
  misc_feature (1)..(25): SEQ ID NO: 1324; WAN024DIW; Start 271; Stop 295
aaacaaatccagatgaatgatgact

SEQ ID NO: 290577 - DNA, 25 bp, Artificial
  probe
  misc_feature (1)..(25): SEQ ID NO: 1324; WAN024DIW; Start 360; Stop 384
gtttaccttggcagttatcaatacc

SEQ ID NO: 290578 - DNA, 25 bp, Artificial
  probe
  misc_feature (1)..(25): SEQ ID NO: 1324; WAN024DIW; Start 141; Stop 165
ctaccaaattgtctcatctatccac

SEQ ID NO: 290579 - DNA, 25 bp, Artificial
  probe
  misc_feature (1)..(25): SEQ ID NO: 1324; WAN024DIW; Start 139; Stop 163
gcctaccaaattgtctcatctatcc

SEQ ID NO: 290580 - DNA, 25 bp, Artificial
  probe
  misc_feature (1)..(25): SEQ ID NO: 1324; WAN024DIW; Start 133; Stop 157
ttagaagcctaccaaattgtctcat

SEQ ID NO: 290581 - DNA, 25 bp, Artificial
  probe
  misc_feature (1)..(25): SEQ ID NO: 1324; WAN024DIW; Start 132; Stop 156
tttagaagcctaccaaattgtctca

SEQ ID NO: 290582 - DNA, 25 bp, Artificial
  probe
  misc_feature (1)..(25): SEQ ID NO: 1324; WAN024DIW; Start 134; Stop 158
tagaagcctaccaaattgtctcatc

SEQ ID NO: 290583 - DNA, 25 bp, Artificial
  probe
  misc_feature (1)..(25): SEQ ID NO: 1324; WAN024DIW; Start 355; Stop 379
gctaagtttaccttggcagttatca

SEQ ID NO: 290584 - DNA, 25 bp, Artificial
  probe
  misc_feature (1)..(25): SEQ ID NO: 1324; WAN024DIW; Start 273; Stop 297
acaaatccagatgaatgatgacttg

SEQ ID NO: 290585 - DNA, 25 bp, Artificial
  probe
  misc_feature (1)..(25): SEQ ID NO: 1324; WAN024DIW; Start 486; Stop 510
ctgtaactatgccaacaacttagct

SEQ ID NO: 290586 - DNA, 25 bp, Artificial
  probe
  misc_feature (1)..(25): SEQ ID NO: 1325; WAN024G3L; Start 98; Stop 122
atggtagattagcagtgaatgagtt

SEQ ID NO: 290587 - DNA, 25 bp, Artificial
  probe
  misc_feature (1)..(25): SEQ ID NO: 1325; WAN024G3L; Start 99; Stop 123
tggtagattagcagtgaatgagttc

SEQ ID NO: 290588 - DNA, 25 bp, Artificial
  probe
  misc_feature (1)..(25): SEQ ID NO: 1325; WAN024G3L; Start 33; Stop 57
aagaatgaatgatagcacttggaag

SEQ ID NO: 290589 - DNA, 25 bp, Artificial
  probe
  misc_feature (1)..(25): SEQ ID NO: 1325; WAN024G3L; Start 97; Stop 121
catggtagattagcagtgaatgagt

SEQ ID NO: 290590 - DNA, 25 bp, Artificial
  probe
  misc_feature (1)..(25): SEQ ID NO: 1325; WAN024G3L; Start 38; Stop 62
tgaatgatagcacttggaagttagt

SEQ ID NO: 290591 - DNA, 25 bp, Artificial
  probe
  misc_feature (1)..(25): SEQ ID NO: 1325; WAN024G3L; Start 34; Stop 58
agaatgaatgatagcacttggaagt

SEQ ID NO: 290592 - DNA, 25 bp, Artificial
  probe
  misc_feature (1)..(25): SEQ ID NO: 1325; WAN024G3L; Start 35; Stop 59
gaatgaatgatagcacttggaagtt

SEQ ID NO: 290593 - DNA, 25 bp, Artificial
  probe
  misc_feature (1)..(25): SEQ ID NO: 1325; WAN024G3L; Start 40; Stop 64
aatgatagcacttggaagttagttc

SEQ ID NO: 290594 - DNA, 25 bp, Artificial
  probe
  misc_feature (1)..(25): SEQ ID NO: 1325; WAN024G3L; Start 39; Stop 63
gaatgatagcacttggaagttagtt

SEQ ID NO: 290595 - DNA, 25 bp, Artificial
  probe
  misc_feature (1)..(25): SEQ ID NO: 1325; WAN024G3L; Start 37; Stop 61
atgaatgatagcacttggaagttag

SEQ ID NO: 290596 - DNA, 25 bp, Artificial
  probe
  misc_feature (1)..(25): SEQ ID NO: 1325; WAN024G3L; Start 28; Stop 52
gcagcaagaatgaatgatagcactt

SEQ ID NO: 290597 - DNA, 25 bp, Artificial
  probe
  misc_feature (1)..(25): SEQ ID NO: 1325; WAN024G3L; Start 36; Stop 60
aatgaatgatagcacttggaagtta

SEQ ID NO: 290598 - DNA, 25 bp, Artificial
  probe
  misc_feature (1)..(25): SEQ ID NO: 1325; WAN024G3L; Start 171; Stop 195
tggagcaaagataaatggaatgaag

SEQ ID NO: 290599 - DNA, 25 bp, Artificial
  probe
  misc_feature (1)..(25): SEQ ID NO: 1325; WAN024G3L; Start 172; Stop 196
ggagcaaagataaatggaatgaaga

SEQ ID NO: 290600 - DNA, 25 bp, Artificial
  probe
  misc_feature (1)..(25): SEQ ID NO: 1325; WAN024G3L; Start 18; Stop 42
gattagaagggcagcaagaatgaat

SEQ ID NO: 290601 - DNA, 25 bp, Artificial
  probe
  misc_feature (1)..(25): SEQ ID NO: 1325; WAN024G3L; Start 170; Stop 194
ttggagcaaagataaatggaatgaa

SEQ ID NO: 290602 - DNA, 25 bp, Artificial
  probe
  misc_feature (1)..(25): SEQ ID NO: 1325; WAN024G3L; Start 19; Stop 43
attagaagggcagcaagaatgaatg

SEQ ID NO: 290603 - DNA, 25 bp, Artificial
  probe
  misc_feature (1)..(25): SEQ ID NO: 1325; WAN024G3L; Start 169; Stop 193
attggagcaaagataaatggaatga

SEQ ID NO: 290604 - DNA, 25 bp, Artificial
  probe
  misc_feature (1)..(25): SEQ ID NO: 1325; WAN024G3L; Start 23; Stop 47
gaagggcagcaagaatgaatgatag

SEQ ID NO: 290605 - DNA, 25 bp, Artificial
  probe
  misc_feature (1)..(25): SEQ ID NO: 1325; WAN024G3L; Start 175; Stop 199
gcaaagataaatggaatgaagaaga

SEQ ID NO: 290606 - DNA, 25 bp, Artificial
  probe
  misc_feature (1)..(25): SEQ ID NO: 1325; WAN024G3L; Start 174; Stop 198
agcaaagataaatggaatgaagaag

SEQ ID NO: 290607 - DNA, 25 bp, Artificial
  probe
  misc_feature (1)..(25): SEQ ID NO: 1325; WAN024G3L; Start 173; Stop 197
gagcaaagataaatggaatgaagaa

SEQ ID NO: 290608 - DNA, 25 bp, Artificial
  probe
  misc_feature (1)..(25): SEQ ID NO: 1325; WAN024G3L; Start 117; Stop 141
tgagttcattccaagagtttcaata

SEQ ID NO: 290609 - DNA, 25 bp, Artificial
  probe
  misc_feature (1)..(25): SEQ ID NO: 1325; WAN024G3L; Start 100; Stop 124
ggtagattagcagtgaatgagttca

SEQ ID NO: 290610 - DNA, 25 bp, Artificial
  probe
  misc_feature (1)..(25): SEQ ID NO: 1325; WAN024G3L; Start 27; Stop 51
ggcagcaagaatgaatgatagcact

SEQ ID NO: 290611 - DNA, 25 bp, Artificial
  probe
  misc_feature (1)..(25): SEQ ID NO: 1325; WAN024G3L; Start 116; Stop 140
atgagttcattccaagagtttcaat

SEQ ID NO: 290612 - DNA, 25 bp, Artificial
  probe
  misc_feature (1)..(25): SEQ ID NO: 1325; WAN024G3L; Start 22; Stop 46
agaagggcagcaagaatgaatgata

SEQ ID NO: 290613 - DNA, 25 bp, Artificial
  probe
  misc_feature (1)..(25): SEQ ID NO: 1325; WAN024G3L; Start 21; Stop 45
tagaagggcagcaagaatgaatgat

SEQ ID NO: 290614 - DNA, 25 bp, Artificial
  probe
  misc_feature (1)..(25): SEQ ID NO: 1325; WAN024G3L; Start 20; Stop 44
ttagaagggcagcaagaatgaatga

SEQ ID NO: 290615 - DNA, 25 bp, Artificial
  probe
  misc_feature (1)..(25): SEQ ID NO: 1325; WAN024G3L; Start 118; Stop 142
gagttcattccaagagtttcaataa

SEQ ID NO: 290616 - DNA, 25 bp, Artificial
  probe
  misc_feature (1)..(25): SEQ ID NO: 1325; WAN024G3L; Start 101; Stop 125
gtagattagcagtgaatgagttcat

SEQ ID NO: 290617 - DNA, 25 bp, Artificial
  probe
  misc_feature (1)..(25): SEQ ID NO: 1325; WAN024G3L; Start 224; Stop 248
caaacaagattggttcatttacacc

SEQ ID NO: 290618 - DNA, 25 bp, Artificial
  probe
  misc_feature (1)..(25): SEQ ID NO: 1325; WAN024G3L; Start 180; Stop 204
gataaatggaatgaagaagattgga

SEQ ID NO: 290619 - DNA, 25 bp, Artificial
  probe
  misc_feature (1)..(25): SEQ ID NO: 1326; WAN024CDK; Start 115; Stop 139
gaaggagaagaagaactcatcgcta

SEQ ID NO: 290620 - DNA, 25 bp, Artificial
  probe
  misc_feature (1)..(25): SEQ ID NO: 1326; WAN024CDK; Start 520; Stop 544
ttcttcggtctactcattgttcgtc

SEQ ID NO: 290621 - DNA, 25 bp, Artificial
  probe
  misc_feature (1)..(25): SEQ ID NO: 1326; WAN024CDK; Start 519; Stop 543
cttcttcggtctactcattgttcgt

SEQ ID NO: 290622 - DNA, 25 bp, Artificial
  probe
  misc_feature (1)..(25): SEQ ID NO: 1326; WAN024CDK; Start 22; Stop 46
actcagctagaactctatctcaaga

SEQ ID NO: 290623 - DNA, 25 bp, Artificial
  probe
  misc_feature (1)..(25): SEQ ID NO: 1326; WAN024CDK; Start 21; Stop 45
gactcagctagaactctatctcaag

SEQ ID NO: 290624 - DNA, 25 bp, Artificial
  probe
  misc_feature (1)..(25): SEQ ID NO: 1326; WAN024CDK; Start 116; Stop 140
aaggagaagaagaactcatcgctag

SEQ ID NO: 290625 - DNA, 25 bp, Artificial
  probe
  misc_feature (1)..(25): SEQ ID NO: 1326; WAN024CDK; Start 23; Stop 47
ctcagctagaactctatctcaagaa

SEQ ID NO: 290626 - DNA, 25 bp, Artificial
  probe
  misc_feature (1)..(25): SEQ ID NO: 1326; WAN024CDK; Start 20; Stop 44
tgactcagctagaactctatctcaa

SEQ ID NO: 290627 - DNA, 25 bp, Artificial
  probe
  misc_feature (1)..(25): SEQ ID NO: 1326; WAN024CDK; Start 15; Stop 39
atacctgactcagctagaactctat

SEQ ID NO: 290628 - DNA, 25 bp, Artificial
  probe
  misc_feature (1)..(25): SEQ ID NO: 1326; WAN024CDK; Start 14; Stop 38
aatacctgactcagctagaactcta

SEQ ID NO: 290629 - DNA, 25 bp, Artificial
  probe
  misc_feature (1)..(25): SEQ ID NO: 1326; WAN024CDK; Start 527; Stop 551
gtctactcattgttcgtctggtaca

SEQ ID NO: 290630 - DNA, 25 bp, Artificial
  probe
  misc_feature (1)..(25): SEQ ID NO: 1326; WAN024CDK; Start 526; Stop 550
ggtctactcattgttcgtctggtac

SEQ ID NO: 290631 - DNA, 25 bp, Artificial
  probe
  misc_feature (1)..(25): SEQ ID NO: 1326; WAN024CDK; Start 16; Stop 40
tacctgactcagctagaactctatc

SEQ ID NO: 290632 - DNA, 25 bp, Artificial
  probe
  misc_feature (1)..(25): SEQ ID NO: 1326; WAN024CDK; Start 19; Stop 43
ctgactcagctagaactctatctca

SEQ ID NO: 290633 - DNA, 25 bp, Artificial
  probe
  misc_feature (1)..(25): SEQ ID NO: 1326; WAN024CDK; Start 522; Stop 546
cttcggtctactcattgttcgtctg

SEQ ID NO: 290634 - DNA, 25 bp, Artificial
  probe
  misc_feature (1)..(25): SEQ ID NO: 1326; WAN024CDK; Start 521; Stop 545
tcttcggtctactcattgttcgtct

SEQ ID NO: 290635 - DNA, 25 bp, Artificial
  probe
  misc_feature (1)..(25): SEQ ID NO: 1326; WAN024CDK; Start 13; Stop 37
gaatacctgactcagctagaactct

SEQ ID NO: 290636 - DNA, 25 bp, Artificial
  probe
  misc_feature (1)..(25): SEQ ID NO: 1326; WAN024CDK; Start 18; Stop 42
cctgactcagctagaactctatctc

SEQ ID NO: 290637 - DNA, 25 bp, Artificial
  probe
  misc_feature (1)..(25): SEQ ID NO: 1326; WAN024CDK; Start 12; Stop 36
tgaatacctgactcagctagaactc

SEQ ID NO: 290638 - DNA, 25 bp, Artificial
  probe
  misc_feature (1)..(25): SEQ ID NO: 1326; WAN024CDK; Start 117; Stop 141
aggagaagaagaactcatcgctagt

SEQ ID NO: 290639 - DNA, 25 bp, Artificial
  probe
  misc_feature (1)..(25): SEQ ID NO: 1326; WAN024CDK; Start 565; Stop 589
aaaggaaagagaggtaatcagcatg

SEQ ID NO: 290640 - DNA, 25 bp, Artificial
  probe
  misc_feature (1)..(25): SEQ ID NO: 1326; WAN024CDK; Start 17; Stop 41
acctgactcagctagaactctatct

SEQ ID NO: 290641 - DNA, 25 bp, Artificial
  probe
  misc_feature (1)..(25): SEQ ID NO: 1326; WAN024CDK; Start 518; Stop 542
gcttcttcggtctactcattgttcg

SEQ ID NO: 290642 - DNA, 25 bp, Artificial
  probe
  misc_feature (1)..(25): SEQ ID NO: 1326; WAN024CDK; Start 517; Stop 541
cgcttcttcggtctactcattgttc

SEQ ID NO: 290643 - DNA, 25 bp, Artificial
  probe
  misc_feature (1)..(25): SEQ ID NO: 1326; WAN024CDK; Start 538; Stop 562
gttcgtctggtacaatttgttctta

SEQ ID NO: 290644 - DNA, 25 bp, Artificial
  probe
  misc_feature (1)..(25): SEQ ID NO: 1326; WAN024CDK; Start 525; Stop 549
cggtctactcattgttcgtctggta

SEQ ID NO: 290645 - DNA, 25 bp, Artificial
  probe
  misc_feature (1)..(25): SEQ ID NO: 1326; WAN024CDK; Start 540; Stop 564
tcgtctggtacaatttgttcttaaa

SEQ ID NO: 290646 - DNA, 25 bp, Artificial
  probe
  misc_feature (1)..(25): SEQ ID NO: 1326; WAN024CDK; Start 539; Stop 563
ttcgtctggtacaatttgttcttaa

SEQ ID NO: 290647 - DNA, 25 bp, Artificial
  probe
  misc_feature (1)..(25): SEQ ID NO: 1326; WAN024CDK; Start 537; Stop 561
tgttcgtctggtacaatttgttctt

SEQ ID NO: 290648 - DNA, 25 bp, Artificial
  probe
  misc_feature (1)..(25): SEQ ID NO: 1326; WAN024CDK; Start 165; Stop 189
ccacgaagttctatccaatcttctc

SEQ ID NO: 290649 - DNA, 25 bp, Artificial
  probe
  misc_feature (1)..(25): SEQ ID NO: 1326; WAN024CDK; Start 333; Stop 357
tttgactgtcattctggctttcttt

SEQ ID NO: 290650 - DNA, 25 bp, Artificial
  probe
  misc_feature (1)..(25): SEQ ID NO: 1326; WAN024CDK; Start 166; Stop 190
cacgaagttctatccaatcttctcg

SEQ ID NO: 290651 - DNA, 25 bp, Artificial
  probe
  misc_feature (1)..(25): SEQ ID NO: 1326; WAN024CDK; Start 516; Stop 540
tcgcttcttcggtctactcattgtt

SEQ ID NO: 290652 - DNA, 25 bp, Artificial
  probe
  misc_feature (1)..(25): SEQ ID NO: 1327; WAN024FJR; Start 74; Stop 98
aagatacatggttggaacttgctaa

SEQ ID NO: 290653 - DNA, 25 bp, Artificial
  probe
  misc_feature (1)..(25): SEQ ID NO: 1327; WAN024FJR; Start 58; Stop 82
actgaaccatcaacagaagatacat

SEQ ID NO: 290654 - DNA, 25 bp, Artificial
  probe
  misc_feature (1)..(25): SEQ ID NO: 1327; WAN024FJR; Start 57; Stop 81
aactgaaccatcaacagaagataca

SEQ ID NO: 290655 - DNA, 25 bp, Artificial
  probe
  misc_feature (1)..(25): SEQ ID NO: 1327; WAN024FJR; Start 56; Stop 80
gaactgaaccatcaacagaagatac

SEQ ID NO: 290656 - DNA, 25 bp, Artificial
  probe
  misc_feature (1)..(25): SEQ ID NO: 1327; WAN024FJR; Start 69; Stop 93
aacagaagatacatggttggaactt

SEQ ID NO: 290657 - DNA, 25 bp, Artificial
  probe
  misc_feature (1)..(25): SEQ ID NO: 1327; WAN024FJR; Start 55; Stop 79
ggaactgaaccatcaacagaagata

SEQ ID NO: 290658 - DNA, 25 bp, Artificial
  probe
  misc_feature (1)..(25): SEQ ID NO: 1327; WAN024FJR; Start 73; Stop 97
gaagatacatggttggaacttgcta

SEQ ID NO: 290659 - DNA, 25 bp, Artificial
  probe
  misc_feature (1)..(25): SEQ ID NO: 1327; WAN024FJR; Start 70; Stop 94
acagaagatacatggttggaacttg

SEQ ID NO: 290660 - DNA, 25 bp, Artificial
  probe
  misc_feature (1)..(25): SEQ ID NO: 1327; WAN024FJR; Start 153; Stop 177
ctatgacggtgatggagttgaagaa

SEQ ID NO: 290661 - DNA, 25 bp, Artificial
  probe
  misc_feature (1)..(25): SEQ ID NO: 1327; WAN024FJR; Start 151; Stop 175
tactatgacggtgatggagttgaag

SEQ ID NO: 290662 - DNA, 25 bp, Artificial
  probe
  misc_feature (1)..(25): SEQ ID NO: 1327; WAN024FJR; Start 59; Stop 83
ctgaaccatcaacagaagatacatg

SEQ ID NO: 290663 - DNA, 25 bp, Artificial
  probe
  misc_feature (1)..(25): SEQ ID NO: 1327; WAN024FJR; Start 54; Stop 78
aggaactgaaccatcaacagaagat

SEQ ID NO: 290664 - DNA, 25 bp, Artificial
  probe
  misc_feature (1)..(25): SEQ ID NO: 1327; WAN024FJR; Start 72; Stop 96
agaagatacatggttggaacttgct

SEQ ID NO: 290665 - DNA, 25 bp, Artificial
  probe
  misc_feature (1)..(25): SEQ ID NO: 1327; WAN024FJR; Start 71; Stop 95
cagaagatacatggttggaacttgc

SEQ ID NO: 290666 - DNA, 25 bp, Artificial
  probe
  misc_feature (1)..(25): SEQ ID NO: 1327; WAN024FJR; Start 53; Stop 77
gaggaactgaaccatcaacagaaga

SEQ ID NO: 290667 - DNA, 25 bp, Artificial
  probe
  misc_feature (1)..(25): SEQ ID NO: 1327; WAN024FJR; Start 217; Stop 241
ggtacttacgatccagacgataaag

SEQ ID NO: 290668 - DNA, 25 bp, Artificial
  probe
  misc_feature (1)..(25): SEQ ID NO: 1327; WAN024FJR; Start 85; Stop 109
ttggaacttgctaaatggatctcag

SEQ ID NO: 290669 - DNA, 25 bp, Artificial
  probe
  misc_feature (1)..(25): SEQ ID NO: 1327; WAN024FJR; Start 76; Stop 100
gatacatggttggaacttgctaaat

SEQ ID NO: 290670 - DNA, 25 bp, Artificial
  probe
  misc_feature (1)..(25): SEQ ID NO: 1327; WAN024FJR; Start 75; Stop 99
agatacatggttggaacttgctaaa

SEQ ID NO: 290671 - DNA, 25 bp, Artificial
  probe
  misc_feature (1)..(25): SEQ ID NO: 1327; WAN024FJR; Start 154; Stop 178
tatgacggtgatggagttgaagaaa

SEQ ID NO: 290672 - DNA, 25 bp, Artificial
  probe
  misc_feature (1)..(25): SEQ ID NO: 1327; WAN024FJR; Start 77; Stop 101
atacatggttggaacttgctaaatg

SEQ ID NO: 290673 - DNA, 25 bp, Artificial
  probe
  misc_feature (1)..(25): SEQ ID NO: 1327; WAN024FJR; Start 250; Stop 274
cttattgctgggatgaagtacaaga

SEQ ID NO: 290674 - DNA, 25 bp, Artificial
  probe
  misc_feature (1)..(25): SEQ ID NO: 1327; WAN024FJR; Start 249; Stop 273
tcttattgctgggatgaagtacaag

SEQ ID NO: 290675 - DNA, 25 bp, Artificial
  probe
  misc_feature (1)..(25): SEQ ID NO: 1327; WAN024FJR; Start 248; Stop 272
ctcttattgctgggatgaagtacaa

SEQ ID NO: 290676 - DNA, 25 bp, Artificial
  probe
  misc_feature (1)..(25): SEQ ID NO: 1327; WAN024FJR; Start 84; Stop 108
gttggaacttgctaaatggatctca

SEQ ID NO: 290677 - DNA, 25 bp, Artificial
  probe
  misc_feature (1)..(25): SEQ ID NO: 1327; WAN024FJR; Start 218; Stop 242
gtacttacgatccagacgataaagc

SEQ ID NO: 290678 - DNA, 25 bp, Artificial
  probe
  misc_feature (1)..(25): SEQ ID NO: 1327; WAN024FJR; Start 87; Stop 111
ggaacttgctaaatggatctcagac

SEQ ID NO: 290679 - DNA, 25 bp, Artificial
  probe
  misc_feature (1)..(25): SEQ ID NO: 1327; WAN024FJR; Start 251; Stop 275
ttattgctgggatgaagtacaagac

SEQ ID NO: 290680 - DNA, 25 bp, Artificial
  probe
  misc_feature (1)..(25): SEQ ID NO: 1327; WAN024FJR; Start 152; Stop 176
actatgacggtgatggagttgaaga

SEQ ID NO: 290681 - DNA, 25 bp, Artificial
  probe
  misc_feature (1)..(25): SEQ ID NO: 1327; WAN024FJR; Start 81; Stop 105
atggttggaacttgctaaatggatc

SEQ ID NO: 290682 - DNA, 25 bp, Artificial
  probe
  misc_feature (1)..(25): SEQ ID NO: 1327; WAN024FJR; Start 219; Stop 243
tacttacgatccagacgataaagca

SEQ ID NO: 290683 - DNA, 25 bp, Artificial
  probe
  misc_feature (1)..(25): SEQ ID NO: 1327; WAN024FJR; Start 88; Stop 112
gaacttgctaaatggatctcagacg

SEQ ID NO: 290684 - DNA, 25 bp, Artificial
  probe
  misc_feature (1)..(25): SEQ ID NO: 1327; WAN024FJR; Start 86; Stop 110
tggaacttgctaaatggatctcaga

SEQ ID NO: 290685 - DNA, 25 bp, Artificial
  probe
  misc_feature (1)..(25): SEQ ID NO: 1328; WAN024DU4; Start 257; Stop 281
aggaagtagatgttgatgaagatga

SEQ ID NO: 290686 - DNA, 25 bp, Artificial
  probe
  misc_feature (1)..(25): SEQ ID NO: 1328; WAN024DU4; Start 255; Stop 279
tgaggaagtagatgttgatgaagat

SEQ ID NO: 290687 - DNA, 25 bp, Artificial
  probe
  misc_feature (1)..(25): SEQ ID NO: 1328; WAN024DU4; Start 254; Stop 278
atgaggaagtagatgttgatgaaga

SEQ ID NO: 290688 - DNA, 25 bp, Artificial
  probe
  misc_feature (1)..(25): SEQ ID NO: 1328; WAN024DU4; Start 258; Stop 282
ggaagtagatgttgatgaagatgag

SEQ ID NO: 290689 - DNA, 25 bp, Artificial
  probe
  misc_feature (1)..(25): SEQ ID NO: 1328; WAN024DU4; Start 256; Stop 280
gaggaagtagatgttgatgaagatg

SEQ ID NO: 290690 - DNA, 25 bp, Artificial
  probe
  misc_feature (1)..(25): SEQ ID NO: 1328; WAN024DU4; Start 101; Stop 125
agttagatatgttggaagcaatgga

SEQ ID NO: 290691 - DNA, 25 bp, Artificial
  probe
  misc_feature (1)..(25): SEQ ID NO: 1328; WAN024DU4; Start 100; Stop 124
cagttagatatgttggaagcaatgg

SEQ ID NO: 290692 - DNA, 25 bp, Artificial
  probe
  misc_feature (1)..(25): SEQ ID NO: 1328; WAN024DU4; Start 263; Stop 287
tagatgttgatgaagatgagttgac

SEQ ID NO: 290693 - DNA, 25 bp, Artificial
  probe
  misc_feature (1)..(25): SEQ ID NO: 1328; WAN024DU4; Start 262; Stop 286
gtagatgttgatgaagatgagttga

SEQ ID NO: 290694 - DNA, 25 bp, Artificial
  probe
  misc_feature (1)..(25): SEQ ID NO: 1328; WAN024DU4; Start 261; Stop 285
agtagatgttgatgaagatgagttg

SEQ ID NO: 290695 - DNA, 25 bp, Artificial
  probe
  misc_feature (1)..(25): SEQ ID NO: 1328; WAN024DU4; Start 102; Stop 126
gttagatatgttggaagcaatggaa

SEQ ID NO: 290696 - DNA, 25 bp, Artificial
  probe
  misc_feature (1)..(25): SEQ ID NO: 1328; WAN024DU4; Start 103; Stop 127
ttagatatgttggaagcaatggaag

SEQ ID NO: 290697 - DNA, 25 bp, Artificial
  probe
  misc_feature (1)..(25): SEQ ID NO: 1328; WAN024DU4; Start 259; Stop 283
gaagtagatgttgatgaagatgagt

SEQ ID NO: 290698 - DNA, 25 bp, Artificial
  probe
  misc_feature (1)..(25): SEQ ID NO: 1328; WAN024DU4; Start 104; Stop 128
tagatatgttggaagcaatggaagc

SEQ ID NO: 290699 - DNA, 25 bp, Artificial
  probe
  misc_feature (1)..(25): SEQ ID NO: 1328; WAN024DU4; Start 483; Stop 507
ccactcctcaagtagtagttcttct

SEQ ID NO: 290700 - DNA, 25 bp, Artificial
  probe
  misc_feature (1)..(25): SEQ ID NO: 1328; WAN024DU4; Start 268; Stop 292
gttgatgaagatgagttgacaggtc

SEQ ID NO: 290701 - DNA, 25 bp, Artificial
  probe
  misc_feature (1)..(25): SEQ ID NO: 1328; WAN024DU4; Start 440; Stop 464
attacagtgtggttcaatcaacaag

SEQ ID NO: 290702 - DNA, 25 bp, Artificial
  probe
  misc_feature (1)..(25): SEQ ID NO: 1328; WAN024DU4; Start 265; Stop 289
gatgttgatgaagatgagttgacag

SEQ ID NO: 290703 - DNA, 25 bp, Artificial
  probe
  misc_feature (1)..(25): SEQ ID NO: 1328; WAN024DU4; Start 264; Stop 288
agatgttgatgaagatgagttgaca

SEQ ID NO: 290704 - DNA, 25 bp, Artificial
  probe
  misc_feature (1)..(25): SEQ ID NO: 1328; WAN024DU4; Start 439; Stop 463
aattacagtgtggttcaatcaacaa

SEQ ID NO: 290705 - DNA, 25 bp, Artificial
  probe
  misc_feature (1)..(25): SEQ ID NO: 1328; WAN024DU4; Start 484; Stop 508
cactcctcaagtagtagttcttcta

SEQ ID NO: 290706 - DNA, 25 bp, Artificial
  probe
  misc_feature (1)..(25): SEQ ID NO: 1328; WAN024DU4; Start 260; Stop 284
aagtagatgttgatgaagatgagtt

SEQ ID NO: 290707 - DNA, 25 bp, Artificial
  probe
  misc_feature (1)..(25): SEQ ID NO: 1328; WAN024DU4; Start 448; Stop 472
gtggttcaatcaacaagttcaacta

SEQ ID NO: 290708 - DNA, 25 bp, Artificial
  probe
  misc_feature (1)..(25): SEQ ID NO: 1328; WAN024DU4; Start 449; Stop 473
tggttcaatcaacaagttcaactag

SEQ ID NO: 290709 - DNA, 25 bp, Artificial
  probe
  misc_feature (1)..(25): SEQ ID NO: 1328; WAN024DU4; Start 253; Stop 277
tatgaggaagtagatgttgatgaag

SEQ ID NO: 290710 - DNA, 25 bp, Artificial
  probe
  misc_feature (1)..(25): SEQ ID NO: 1328; WAN024DU4; Start 442; Stop 466
tacagtgtggttcaatcaacaagtt

SEQ ID NO: 290711 - DNA, 25 bp, Artificial
  probe
  misc_feature (1)..(25): SEQ ID NO: 1328; WAN024DU4; Start 441; Stop 465
ttacagtgtggttcaatcaacaagt

SEQ ID NO: 290712 - DNA, 25 bp, Artificial
  probe
  misc_feature (1)..(25): SEQ ID NO: 1328; WAN024DU4; Start 266; Stop 290
atgttgatgaagatgagttgacagg

SEQ ID NO: 290713 - DNA, 25 bp, Artificial
  probe
  misc_feature (1)..(25): SEQ ID NO: 1328; WAN024DU4; Start 486; Stop 510
ctcctcaagtagtagttcttctagt

SEQ ID NO: 290714 - DNA, 25 bp, Artificial
  probe
  misc_feature (1)..(25): SEQ ID NO: 1328; WAN024DU4; Start 520; Stop 544
gctataagtgtatcaggcgaaggaa

SEQ ID NO: 290715 - DNA, 25 bp, Artificial
  probe
  misc_feature (1)..(25): SEQ ID NO: 1328; WAN024DU4; Start 450; Stop 474
ggttcaatcaacaagttcaactagc

SEQ ID NO: 290716 - DNA, 25 bp, Artificial
  probe
  misc_feature (1)..(25): SEQ ID NO: 1328; WAN024DU4; Start 272; Stop 296
atgaagatgagttgacaggtcgtag

SEQ ID NO: 290717 - DNA, 25 bp, Artificial
  probe
  misc_feature (1)..(25): SEQ ID NO: 1328; WAN024DU4; Start 271; Stop 295
gatgaagatgagttgacaggtcgta

SEQ ID NO: 290718 - DNA, 25 bp, Artificial
  probe
  misc_feature (1)..(25): SEQ ID NO: 1329; WAN024A4G; Start 42; Stop 66
cccttcgtgatatgagcttgtcttt

SEQ ID NO: 290719 - DNA, 25 bp, Artificial
  probe
  misc_feature (1)..(25): SEQ ID NO: 1329; WAN024A4G; Start 47; Stop 71
cgtgatatgagcttgtcttttgatt

SEQ ID NO: 290720 - DNA, 25 bp, Artificial
  probe
  misc_feature (1)..(25): SEQ ID NO: 1329; WAN024A4G; Start 44; Stop 68
cttcgtgatatgagcttgtcttttg

SEQ ID NO: 290721 - DNA, 25 bp, Artificial
  probe
  misc_feature (1)..(25): SEQ ID NO: 1329; WAN024A4G; Start 46; Stop 70
tcgtgatatgagcttgtcttttgat

SEQ ID NO: 290722 - DNA, 25 bp, Artificial
  probe
  misc_feature (1)..(25): SEQ ID NO: 1329; WAN024A4G; Start 45; Stop 69
ttcgtgatatgagcttgtcttttga

SEQ ID NO: 290723 - DNA, 25 bp, Artificial
  probe
  misc_feature (1)..(25): SEQ ID NO: 1329; WAN024A4G; Start 43; Stop 67
ccttcgtgatatgagcttgtctttt

SEQ ID NO: 290724 - DNA, 25 bp, Artificial
  probe
  misc_feature (1)..(25): SEQ ID NO: 1329; WAN024A4G; Start 48; Stop 72
gtgatatgagcttgtcttttgattt

SEQ ID NO: 290725 - DNA, 25 bp, Artificial
  probe
  misc_feature (1)..(25): SEQ ID NO: 1329; WAN024A4G; Start 5; Stop 29
caagttcattgaatgaaggtggtac

SEQ ID NO: 290726 - DNA, 25 bp, Artificial
  probe
  misc_feature (1)..(25): SEQ ID NO: 1329; WAN024A4G; Start 1; Stop 25
atgacaagttcattgaatgaaggtg

SEQ ID NO: 290727 - DNA, 25 bp, Artificial
  probe
  misc_feature (1)..(25): SEQ ID NO: 1329; WAN024A4G; Start 4; Stop 28
acaagttcattgaatgaaggtggta

SEQ ID NO: 290728 - DNA, 25 bp, Artificial
  probe
  misc_feature (1)..(25): SEQ ID NO: 1329; WAN024A4G; Start 41; Stop 65
gcccttcgtgatatgagcttgtctt

SEQ ID NO: 290729 - DNA, 25 bp, Artificial
  probe
  misc_feature (1)..(25): SEQ ID NO: 1329; WAN024A4G; Start 3; Stop 27
gacaagttcattgaatgaaggtggt

SEQ ID NO: 290730 - DNA, 25 bp, Artificial
  probe
  misc_feature (1)..(25): SEQ ID NO: 1329; WAN024A4G; Start 2; Stop 26
tgacaagttcattgaatgaaggtgg

SEQ ID NO: 290731 - DNA, 25 bp, Artificial
  probe
  misc_feature (1)..(25): SEQ ID NO: 1329; WAN024A4G; Start 6; Stop 30
aagttcattgaatgaaggtggtacc

SEQ ID NO: 290732 - DNA, 25 bp, Artificial
  probe
  misc_feature (1)..(25): SEQ ID NO: 1329; WAN024A4G; Start 36; Stop 60
ttttcgcccttcgtgatatgagctt

SEQ ID NO: 290733 - DNA, 25 bp, Artificial
  probe
  misc_feature (1)..(25): SEQ ID NO: 1329; WAN024A4G; Start 7; Stop 31
agttcattgaatgaaggtggtaccg

SEQ ID NO: 290734 - DNA, 25 bp, Artificial
  probe
  misc_feature (1)..(25): SEQ ID NO: 1329; WAN024A4G; Start 8; Stop 32
gttcattgaatgaaggtggtaccgc

SEQ ID NO: 290735 - DNA, 25 bp, Artificial
  probe
  misc_feature (1)..(25): SEQ ID NO: 1330; WAN024C6R; Start 278; Stop 302
ccatcatcacaggacttaacttacc

SEQ ID NO: 290736 - DNA, 25 bp, Artificial
  probe
  misc_feature (1)..(25): SEQ ID NO: 1330; WAN024C6R; Start 288; Stop 312
aggacttaacttaccgatgttgatt

SEQ ID NO: 290737 - DNA, 25 bp, Artificial
  probe
  misc_feature (1)..(25): SEQ ID NO: 1330; WAN024C6R; Start 289; Stop 313
ggacttaacttaccgatgttgattc

SEQ ID NO: 290738 - DNA, 25 bp, Artificial
  probe
  misc_feature (1)..(25): SEQ ID NO: 1330; WAN024C6R; Start 287; Stop 311
caggacttaacttaccgatgttgat

SEQ ID NO: 290739 - DNA, 25 bp, Artificial
  probe
  misc_feature (1)..(25): SEQ ID NO: 1330; WAN024C6R; Start 280; Stop 304
atcatcacaggacttaacttaccga

SEQ ID NO: 290740 - DNA, 25 bp, Artificial
  probe
  misc_feature (1)..(25): SEQ ID NO: 1330; WAN024C6R; Start 279; Stop 303
catcatcacaggacttaacttaccg

SEQ ID NO: 290741 - DNA, 25 bp, Artificial
  probe
  misc_feature (1)..(25): SEQ ID NO: 1330; WAN024C6R; Start 281; Stop 305
tcatcacaggacttaacttaccgat

SEQ ID NO: 290742 - DNA, 25 bp, Artificial
  probe
  misc_feature (1)..(25): SEQ ID NO: 1330; WAN024C6R; Start 290; Stop 314
gacttaacttaccgatgttgattca

SEQ ID NO: 290743 - DNA, 25 bp, Artificial
  probe
  misc_feature (1)..(25): SEQ ID NO: 1330; WAN024C6R; Start 277; Stop 301
gccatcatcacaggacttaacttac

SEQ ID NO: 290744 - DNA, 25 bp, Artificial
  probe
  misc_feature (1)..(25): SEQ ID NO: 1330; WAN024C6R; Start 131; Stop 155
gtcctgatgatctatacgctaagtt

SEQ ID NO: 290745 - DNA, 25 bp, Artificial
  probe
  misc_feature (1)..(25): SEQ ID NO: 1330; WAN024C6R; Start 124; Stop 148
aatgaaggtcctgatgatctatacg

SEQ ID NO: 290746 - DNA, 25 bp, Artificial
  probe
  misc_feature (1)..(25): SEQ ID NO: 1330; WAN024C6R; Start 128; Stop 152
aaggtcctgatgatctatacgctaa

SEQ ID NO: 290747 - DNA, 25 bp, Artificial
  probe
  misc_feature (1)..(25): SEQ ID NO: 1330; WAN024C6R; Start 276; Stop 300
tgccatcatcacaggacttaactta

SEQ ID NO: 290748 - DNA, 25 bp, Artificial
  probe
  misc_feature (1)..(25): SEQ ID NO: 1330; WAN024C6R; Start 129; Stop 153
aggtcctgatgatctatacgctaag

SEQ ID NO: 290749 - DNA, 25 bp, Artificial
  probe
  misc_feature (1)..(25): SEQ ID NO: 1330; WAN024C6R; Start 127; Stop 151
gaaggtcctgatgatctatacgcta

SEQ ID NO: 290750 - DNA, 25 bp, Artificial
  probe
  misc_feature (1)..(25): SEQ ID NO: 1330; WAN024C6R; Start 293; Stop 317
ttaacttaccgatgttgattcaagc

SEQ ID NO: 290751 - DNA, 25 bp, Artificial
  probe
  misc_feature (1)..(25): SEQ ID NO: 1330; WAN024C6R; Start 130; Stop 154
ggtcctgatgatctatacgctaagt

SEQ ID NO: 290752 - DNA, 25 bp, Artificial
  probe
  misc_feature (1)..(25): SEQ ID NO: 1330; WAN024C6R; Start 291; Stop 315
acttaacttaccgatgttgattcaa

SEQ ID NO: 290753 - DNA, 25 bp, Artificial
  probe
  misc_feature (1)..(25): SEQ ID NO: 1330; WAN024C6R; Start 283; Stop 307
atcacaggacttaacttaccgatgt

SEQ ID NO: 290754 - DNA, 25 bp, Artificial
  probe
  misc_feature (1)..(25): SEQ ID NO: 1330; WAN024C6R; Start 125; Stop 149
atgaaggtcctgatgatctatacgc

SEQ ID NO: 290755 - DNA, 25 bp, Artificial
  probe
  misc_feature (1)..(25): SEQ ID NO: 1330; WAN024C6R; Start 294; Stop 318
taacttaccgatgttgattcaagcc

SEQ ID NO: 290756 - DNA, 25 bp, Artificial
  probe
  misc_feature (1)..(25): SEQ ID NO: 1330; WAN024C6R; Start 286; Stop 310
acaggacttaacttaccgatgttga

SEQ ID NO: 290757 - DNA, 25 bp, Artificial
  probe
  misc_feature (1)..(25): SEQ ID NO: 1330; WAN024C6R; Start 285; Stop 309
cacaggacttaacttaccgatgttg

SEQ ID NO: 290758 - DNA, 25 bp, Artificial
  probe
  misc_feature (1)..(25): SEQ ID NO: 1330; WAN024C6R; Start 284; Stop 308
tcacaggacttaacttaccgatgtt

SEQ ID NO: 290759 - DNA, 25 bp, Artificial
  probe
  misc_feature (1)..(25): SEQ ID NO: 1330; WAN024C6R; Start 821; Stop 845
gttctatggctcactcaacaggtaa

SEQ ID NO: 290760 - DNA, 25 bp, Artificial
  probe
  misc_feature (1)..(25): SEQ ID NO: 1330; WAN024C6R; Start 275; Stop 299
ttgccatcatcacaggacttaactt

SEQ ID NO: 290761 - DNA, 25 bp, Artificial
  probe
  misc_feature (1)..(25): SEQ ID NO: 1330; WAN024C6R; Start 1; Stop 25
atgacaataatgagtatcggaatca

SEQ ID NO: 290762 - DNA, 25 bp, Artificial
  probe
  misc_feature (1)..(25): SEQ ID NO: 1330; WAN024C6R; Start 297; Stop 321
cttaccgatgttgattcaagcctac

SEQ ID NO: 290763 - DNA, 25 bp, Artificial
  probe
  misc_feature (1)..(25): SEQ ID NO: 1330; WAN024C6R; Start 292; Stop 316
cttaacttaccgatgttgattcaag

SEQ ID NO: 290764 - DNA, 25 bp, Artificial
  probe
  misc_feature (1)..(25): SEQ ID NO: 1330; WAN024C6R; Start 296; Stop 320
acttaccgatgttgattcaagccta

SEQ ID NO: 290765 - DNA, 25 bp, Artificial
  probe
  misc_feature (1)..(25): SEQ ID NO: 1330; WAN024C6R; Start 303; Stop 327
gatgttgattcaagcctacacagag

SEQ ID NO: 290766 - DNA, 25 bp, Artificial
  probe
  misc_feature (1)..(25): SEQ ID NO: 1330; WAN024C6R; Start 917; Stop 941
gtgttgaatttgatgtccgtaaagt

SEQ ID NO: 290767 - DNA, 25 bp, Artificial
  probe
  misc_feature (1)..(25): SEQ ID NO: 1330; WAN024C6R; Start 489; Stop 513
tgttatcggagacggtaaattgaaa

SEQ ID NO: 290768 - DNA, 25 bp, Artificial
  probe
  misc_feature (1)..(25): SEQ ID NO: 1331; WAN024EX7; Start 340; Stop 364
ttgacagagaagaatccagatacgg

SEQ ID NO: 290769 - DNA, 25 bp, Artificial
  probe
  misc_feature (1)..(25): SEQ ID NO: 1331; WAN024EX7; Start 420; Stop 444
aattgatgaactggttgacatggtt

SEQ ID NO: 290770 - DNA, 25 bp, Artificial
  probe
  misc_feature (1)..(25): SEQ ID NO: 1331; WAN024EX7; Start 419; Stop 443
gaattgatgaactggttgacatggt

SEQ ID NO: 290771 - DNA, 25 bp, Artificial
  probe
  misc_feature (1)..(25): SEQ ID NO: 1331; WAN024EX7; Start 339; Stop 363
tttgacagagaagaatccagatacg

SEQ ID NO: 290772 - DNA, 25 bp, Artificial
  probe
  misc_feature (1)..(25): SEQ ID NO: 1331; WAN024EX7; Start 362; Stop 386
cggattattactttatcatcggtgc

SEQ ID NO: 290773 - DNA, 25 bp, Artificial
  probe
  misc_feature (1)..(25): SEQ ID NO: 1331; WAN024EX7; Start 363; Stop 387
ggattattactttatcatcggtgcc

SEQ ID NO: 290774 - DNA, 25 bp, Artificial
  probe
  misc_feature (1)..(25): SEQ ID NO: 1331; WAN024EX7; Start 118; Stop 142
catctcattgttgcggatcaagtac

SEQ ID NO: 290775 - DNA, 25 bp, Artificial
  probe
  misc_feature (1)..(25): SEQ ID NO: 1331; WAN024EX7; Start 392; Stop 416
tggttgactatctgcctaagtggta

SEQ ID NO: 290776 - DNA, 25 bp, Artificial
  probe
  misc_feature (1)..(25): SEQ ID NO: 1331; WAN024EX7; Start 388; Stop 412
gacatggttgactatctgcctaagt

SEQ ID NO: 290777 - DNA, 25 bp, Artificial
  probe
  misc_feature (1)..(25): SEQ ID NO: 1331; WAN024EX7; Start 361; Stop 385
acggattattactttatcatcggtg

SEQ ID NO: 290778 - DNA, 25 bp, Artificial
  probe
  misc_feature (1)..(25): SEQ ID NO: 1331; WAN024EX7; Start 393; Stop 417
ggttgactatctgcctaagtggtac

SEQ ID NO: 290779 - DNA, 25 bp, Artificial
  probe
  misc_feature (1)..(25): SEQ ID NO: 1331; WAN024EX7; Start 389; Stop 413
acatggttgactatctgcctaagtg

SEQ ID NO: 290780 - DNA, 25 bp, Artificial
  probe
  misc_feature (1)..(25): SEQ ID NO: 1331; WAN024EX7; Start 9; Stop 33
cgaactattgactccctttaccaag

SEQ ID NO: 290781 - DNA, 25 bp, Artificial
  probe
  misc_feature (1)..(25): SEQ ID NO: 1331; WAN024EX7; Start 418; Stop 442
cgaattgatgaactggttgacatgg

SEQ ID NO: 290782 - DNA, 25 bp, Artificial
  probe
  misc_feature (1)..(25): SEQ ID NO: 1331; WAN024EX7; Start 417; Stop 441
ccgaattgatgaactggttgacatg

SEQ ID NO: 290783 - DNA, 25 bp, Artificial
  probe
  misc_feature (1)..(25): SEQ ID NO: 1331; WAN024EX7; Start 273; Stop 297
cctagtcattgaaaccattgagttg

SEQ ID NO: 290784 - DNA, 25 bp, Artificial
  probe
  misc_feature (1)..(25): SEQ ID NO: 1331; WAN024EX7; Start 364; Stop 388
gattattactttatcatcggtgccg

SEQ ID NO: 290785 - DNA, 25 bp, Artificial
  probe
  misc_feature (1)..(25): SEQ ID NO: 1331; WAN024EX7; Start 341; Stop 365
tgacagagaagaatccagatacgga

SEQ ID NO: 290786 - DNA, 25 bp, Artificial
  probe
  misc_feature (1)..(25): SEQ ID NO: 1331; WAN024EX7; Start 414; Stop 438
gtaccgaattgatgaactggttgac

SEQ ID NO: 290787 - DNA, 25 bp, Artificial
  probe
  misc_feature (1)..(25): SEQ ID NO: 1331; WAN024EX7; Start 387; Stop 411
cgacatggttgactatctgcctaag

SEQ ID NO: 290788 - DNA, 25 bp, Artificial
  probe
  misc_feature (1)..(25): SEQ ID NO: 1331; WAN024EX7; Start 391; Stop 415
atggttgactatctgcctaagtggt

SEQ ID NO: 290789 - DNA, 25 bp, Artificial
  probe
  misc_feature (1)..(25): SEQ ID NO: 1331; WAN024EX7; Start 415; Stop 439
taccgaattgatgaactggttgaca

SEQ ID NO: 290790 - DNA, 25 bp, Artificial
  probe
  misc_feature (1)..(25): SEQ ID NO: 1331; WAN024EX7; Start 272; Stop 296
gcctagtcattgaaaccattgagtt

SEQ ID NO: 290791 - DNA, 25 bp, Artificial
  probe
  misc_feature (1)..(25): SEQ ID NO: 1331; WAN024EX7; Start 117; Stop 141
ccatctcattgttgcggatcaagta

SEQ ID NO: 290792 - DNA, 25 bp, Artificial
  probe
  misc_feature (1)..(25): SEQ ID NO: 1331; WAN024EX7; Start 390; Stop 414
catggttgactatctgcctaagtgg

SEQ ID NO: 290793 - DNA, 25 bp, Artificial
  probe
  misc_feature (1)..(25): SEQ ID NO: 1331; WAN024EX7; Start 6; Stop 30
aatcgaactattgactccctttacc

SEQ ID NO: 290794 - DNA, 25 bp, Artificial
  probe
  misc_feature (1)..(25): SEQ ID NO: 1331; WAN024EX7; Start 360; Stop 384
tacggattattactttatcatcggt

SEQ ID NO: 290795 - DNA, 25 bp, Artificial
  probe
  misc_feature (1)..(25): SEQ ID NO: 1331; WAN024EX7; Start 275; Stop 299
tagtcattgaaaccattgagttgga

SEQ ID NO: 290796 - DNA, 25 bp, Artificial
  probe
  misc_feature (1)..(25): SEQ ID NO: 1331; WAN024EX7; Start 274; Stop 298
ctagtcattgaaaccattgagttgg

SEQ ID NO: 290797 - DNA, 25 bp, Artificial
  probe
  misc_feature (1)..(25): SEQ ID NO: 1331; WAN024EX7; Start 416; Stop 440
accgaattgatgaactggttgacat

SEQ ID NO: 290798 - DNA, 25 bp, Artificial
  probe
  misc_feature (1)..(25): SEQ ID NO: 1331; WAN024EX7; Start 119; Stop 143
atctcattgttgcggatcaagtacg

SEQ ID NO: 290799 - DNA, 25 bp, Artificial
  probe
  misc_feature (1)..(25): SEQ ID NO: 1331; WAN024EX7; Start 7; Stop 31
atcgaactattgactccctttacca

SEQ ID NO: 290800 - DNA, 25 bp, Artificial
  probe
  misc_feature (1)..(25): SEQ ID NO: 1331; WAN024EX7; Start 276; Stop 300
agtcattgaaaccattgagttggag

SEQ ID NO: 290801 - DNA, 25 bp, Artificial
  probe
  misc_feature (1)..(25): SEQ ID NO: 1332; WAN024CJN; Start 46; Stop 70
ttagcaattcaacggtattctccaa

SEQ ID NO: 290802 - DNA, 25 bp, Artificial
  probe
  misc_feature (1)..(25): SEQ ID NO: 1332; WAN024CJN; Start 286; Stop 310
tctgtaacggtagaagaagcagtaa

SEQ ID NO: 290803 - DNA, 25 bp, Artificial
  probe
  misc_feature (1)..(25): SEQ ID NO: 1332; WAN024CJN; Start 107; Stop 131
atatgattgtgaacttaccagaaca

SEQ ID NO: 290804 - DNA, 25 bp, Artificial
  probe
  misc_feature (1)..(25): SEQ ID NO: 1332; WAN024CJN; Start 106; Stop 130
aatatgattgtgaacttaccagaac

SEQ ID NO: 290805 - DNA, 25 bp, Artificial
  probe
  misc_feature (1)..(25): SEQ ID NO: 1332; WAN024CJN; Start 312; Stop 336
aatgtgtgtaaccatcgcagtagaa

SEQ ID NO: 290806 - DNA, 25 bp, Artificial
  probe
  misc_feature (1)..(25): SEQ ID NO: 1332; WAN024CJN; Start 44; Stop 68
ctttagcaattcaacggtattctcc

SEQ ID NO: 290807 - DNA, 25 bp, Artificial
  probe
  misc_feature (1)..(25): SEQ ID NO: 1332; WAN024CJN; Start 313; Stop 337
atgtgtgtaaccatcgcagtagaag

SEQ ID NO: 290808 - DNA, 25 bp, Artificial
  probe
  misc_feature (1)..(25): SEQ ID NO: 1332; WAN024CJN; Start 47; Stop 71
tagcaattcaacggtattctccaaa

SEQ ID NO: 290809 - DNA, 25 bp, Artificial
  probe
  misc_feature (1)..(25): SEQ ID NO: 1332; WAN024CJN; Start 45; Stop 69
tttagcaattcaacggtattctcca

SEQ ID NO: 290810 - DNA, 25 bp, Artificial
  probe
  misc_feature (1)..(25): SEQ ID NO: 1332; WAN024CJN; Start 49; Stop 73
gcaattcaacggtattctccaaatg

SEQ ID NO: 290811 - DNA, 25 bp, Artificial
  probe
  misc_feature (1)..(25): SEQ ID NO: 1332; WAN024CJN; Start 48; Stop 72
agcaattcaacggtattctccaaat

SEQ ID NO: 290812 - DNA, 25 bp, Artificial
  probe
  misc_feature (1)..(25): SEQ ID NO: 1332; WAN024CJN; Start 172; Stop 196
aaagcaacgatactatttgtccaat

SEQ ID NO: 290813 - DNA, 25 bp, Artificial
  probe
  misc_feature (1)..(25): SEQ ID NO: 1332; WAN024CJN; Start 50; Stop 74
caattcaacggtattctccaaatga

SEQ ID NO: 290814 - DNA, 25 bp, Artificial
  probe
  misc_feature (1)..(25): SEQ ID NO: 1332; WAN024CJN; Start 173; Stop 197
aagcaacgatactatttgtccaatt

SEQ ID NO: 290815 - DNA, 25 bp, Artificial
  probe
  misc_feature (1)..(25): SEQ ID NO: 1332; WAN024CJN; Start 97; Stop 121
tctgccttaaatatgattgtgaact

SEQ ID NO: 290816 - DNA, 25 bp, Artificial
  probe
  misc_feature (1)..(25): SEQ ID NO: 1332; WAN024CJN; Start 43; Stop 67
gctttagcaattcaacggtattctc

SEQ ID NO: 290817 - DNA, 25 bp, Artificial
  probe
  misc_feature (1)..(25): SEQ ID NO: 1332; WAN024CJN; Start 171; Stop 195
taaagcaacgatactatttgtccaa

SEQ ID NO: 290818 - DNA, 25 bp, Artificial
  probe
  misc_feature (1)..(25): SEQ ID NO: 1332; WAN024CJN; Start 51; Stop 75
aattcaacggtattctccaaatgag

SEQ ID NO: 290819 - DNA, 25 bp, Artificial
  probe
  misc_feature (1)..(25): SEQ ID NO: 1332; WAN024CJN; Start 285; Stop 309
ttctgtaacggtagaagaagcagta

SEQ ID NO: 290820 - DNA, 25 bp, Artificial
  probe
  misc_feature (1)..(25): SEQ ID NO: 1332; WAN024CJN; Start 170; Stop 194
ataaagcaacgatactatttgtcca

SEQ ID NO: 290821 - DNA, 25 bp, Artificial
  probe
  misc_feature (1)..(25): SEQ ID NO: 1332; WAN024CJN; Start 287; Stop 311
ctgtaacggtagaagaagcagtaaa

SEQ ID NO: 290822 - DNA, 25 bp, Artificial
  probe
  misc_feature (1)..(25): SEQ ID NO: 1332; WAN024CJN; Start 98; Stop 122
ctgccttaaatatgattgtgaactt

SEQ ID NO: 290823 - DNA, 25 bp, Artificial
  probe
  misc_feature (1)..(25): SEQ ID NO: 1332; WAN024CJN; Start 169; Stop 193
gataaagcaacgatactatttgtcc

SEQ ID NO: 290824 - DNA, 25 bp, Artificial
  probe
  misc_feature (1)..(25): SEQ ID NO: 1332; WAN024CJN; Start 96; Stop 120
ttctgccttaaatatgattgtgaac

SEQ ID NO: 290825 - DNA, 25 bp, Artificial
  probe
  misc_feature (1)..(25): SEQ ID NO: 1332; WAN024CJN; Start 114; Stop 138
tgtgaacttaccagaacaatttgtc

SEQ ID NO: 290826 - DNA, 25 bp, Artificial
  probe
  misc_feature (1)..(25): SEQ ID NO: 1332; WAN024CJN; Start 115; Stop 139
gtgaacttaccagaacaatttgtct

SEQ ID NO: 290827 - DNA, 25 bp, Artificial
  probe
  misc_feature (1)..(25): SEQ ID NO: 1332; WAN024CJN; Start 95; Stop 119
cttctgccttaaatatgattgtgaa

SEQ ID NO: 290828 - DNA, 25 bp, Artificial
  probe
  misc_feature (1)..(25): SEQ ID NO: 1332; WAN024CJN; Start 116; Stop 140
tgaacttaccagaacaatttgtctt

SEQ ID NO: 290829 - DNA, 25 bp, Artificial
  probe
  misc_feature (1)..(25): SEQ ID NO: 1332; WAN024CJN; Start 311; Stop 335
aaatgtgtgtaaccatcgcagtaga

SEQ ID NO: 290830 - DNA, 25 bp, Artificial
  probe
  misc_feature (1)..(25): SEQ ID NO: 1332; WAN024CJN; Start 168; Stop 192
tgataaagcaacgatactatttgtc

SEQ ID NO: 290831 - DNA, 25 bp, Artificial
  probe
  misc_feature (1)..(25): SEQ ID NO: 1332; WAN024CJN; Start 118; Stop 142
aacttaccagaacaatttgtctttg

SEQ ID NO: 290832 - DNA, 25 bp, Artificial
  probe
  misc_feature (1)..(25): SEQ ID NO: 1332; WAN024CJN; Start 119; Stop 143
acttaccagaacaatttgtctttgg

SEQ ID NO: 290833 - DNA, 25 bp, Artificial
  probe
  misc_feature (1)..(25): SEQ ID NO: 1332; WAN024CJN; Start 120; Stop 144
cttaccagaacaatttgtctttggg

SEQ ID NO: 290834 - DNA, 25 bp, Artificial
  probe
  misc_feature (1)..(25): SEQ ID NO: 1333; WAN024DJR; Start 79; Stop 103
ctaggttgtaatacggtcattgttg

SEQ ID NO: 290835 - DNA, 25 bp, Artificial
  probe
  misc_feature (1)..(25): SEQ ID NO: 1333; WAN024DJR; Start 80; Stop 104
taggttgtaatacggtcattgttgc

SEQ ID NO: 290836 - DNA, 25 bp, Artificial
  probe
  misc_feature (1)..(25): SEQ ID NO: 1333; WAN024DJR; Start 206; Stop 230
atatcattcacaaggctaatcctgc

SEQ ID NO: 290837 - DNA, 25 bp, Artificial
  probe
  misc_feature (1)..(25): SEQ ID NO: 1333; WAN024DJR; Start 83; Stop 107
gttgtaatacggtcattgttgccaa

SEQ ID NO: 290838 - DNA, 25 bp, Artificial
  probe
  misc_feature (1)..(25): SEQ ID NO: 1333; WAN024DJR; Start 207; Stop 231
tatcattcacaaggctaatcctgct

SEQ ID NO: 290839 - DNA, 25 bp, Artificial
  probe
  misc_feature (1)..(25): SEQ ID NO: 1333; WAN024DJR; Start 84; Stop 108
ttgtaatacggtcattgttgccaat

SEQ ID NO: 290840 - DNA, 25 bp, Artificial
  probe
  misc_feature (1)..(25): SEQ ID NO: 1333; WAN024DJR; Start 222; Stop 246
taatcctgctcaaacgatctttatc

SEQ ID NO: 290841 - DNA, 25 bp, Artificial
  probe
  misc_feature (1)..(25): SEQ ID NO: 1333; WAN024DJR; Start 221; Stop 245
ctaatcctgctcaaacgatctttat

SEQ ID NO: 290842 - DNA, 25 bp, Artificial
  probe
  misc_feature (1)..(25): SEQ ID NO: 1333; WAN024DJR; Start 220; Stop 244
gctaatcctgctcaaacgatcttta

SEQ ID NO: 290843 - DNA, 25 bp, Artificial
  probe
  misc_feature (1)..(25): SEQ ID NO: 1333; WAN024DJR; Start 81; Stop 105
aggttgtaatacggtcattgttgcc

SEQ ID NO: 290844 - DNA, 25 bp, Artificial
  probe
  misc_feature (1)..(25): SEQ ID NO: 1333; WAN024DJR; Start 205; Stop 229
gatatcattcacaaggctaatcctg

SEQ ID NO: 290845 - DNA, 25 bp, Artificial
  probe
  misc_feature (1)..(25): SEQ ID NO: 1333; WAN024DJR; Start 208; Stop 232
atcattcacaaggctaatcctgctc

SEQ ID NO: 290846 - DNA, 25 bp, Artificial
  probe
  misc_feature (1)..(25): SEQ ID NO: 1333; WAN024DJR; Start 43; Stop 67
ttgattcatggacaaggacaacttt

SEQ ID NO: 290847 - DNA, 25 bp, Artificial
  probe
  misc_feature (1)..(25): SEQ ID NO: 1333; WAN024DJR; Start 82; Stop 106
ggttgtaatacggtcattgttgcca

SEQ ID NO: 290848 - DNA, 25 bp, Artificial
  probe
  misc_feature (1)..(25): SEQ ID NO: 1333; WAN024DJR; Start 6; Stop 30
aatgccaaatattattatgacccgt

SEQ ID NO: 290849 - DNA, 25 bp, Artificial
  probe
  misc_feature (1)..(25): SEQ ID NO: 1333; WAN024DJR; Start 5; Stop 29
caatgccaaatattattatgacccg

SEQ ID NO: 290850 - DNA, 25 bp, Artificial
  probe
  misc_feature (1)..(25): SEQ ID NO: 1333; WAN024DJR; Start 44; Stop 68
tgattcatggacaaggacaactttg

SEQ ID NO: 290851 - DNA, 25 bp, Artificial
  probe
  misc_feature (1)..(25): SEQ ID NO: 1333; WAN024DJR; Start 50; Stop 74
atggacaaggacaactttgggtaaa

SEQ ID NO: 290852 - DNA, 25 bp, Artificial
  probe
  misc_feature (1)..(25): SEQ ID NO: 1333; WAN024DJR; Start 8; Stop 32
tgccaaatattattatgacccgtat

SEQ ID NO: 290853 - DNA, 25 bp, Artificial
  probe
  misc_feature (1)..(25): SEQ ID NO: 1333; WAN024DJR; Start 7; Stop 31
atgccaaatattattatgacccgta

SEQ ID NO: 290854 - DNA, 25 bp, Artificial
  probe
  misc_feature (1)..(25): SEQ ID NO: 1333; WAN024DJR; Start 210; Stop 234
cattcacaaggctaatcctgctcaa

SEQ ID NO: 290855 - DNA, 25 bp, Artificial
  probe
  misc_feature (1)..(25): SEQ ID NO: 1333; WAN024DJR; Start 126; Stop 150
caagatgcaacaaactctgatgaaa

SEQ ID NO: 290856 - DNA, 25 bp, Artificial
  probe
  misc_feature (1)..(25): SEQ ID NO: 1333; WAN024DJR; Start 9; Stop 33
gccaaatattattatgacccgtatc

SEQ ID NO: 290857 - DNA, 25 bp, Artificial
  probe
  misc_feature (1)..(25): SEQ ID NO: 1333; WAN024DJR; Start 45; Stop 69
gattcatggacaaggacaactttgg

SEQ ID NO: 290858 - DNA, 25 bp, Artificial
  probe
  misc_feature (1)..(25): SEQ ID NO: 1333; WAN024DJR; Start 4; Stop 28
acaatgccaaatattattatgaccc

SEQ ID NO: 290859 - DNA, 25 bp, Artificial
  probe
  misc_feature (1)..(25): SEQ ID NO: 1333; WAN024DJR; Start 434; Stop 458
aaacaactccaacaggaaatgatgg

SEQ ID NO: 290860 - DNA, 25 bp, Artificial
  probe
  misc_feature (1)..(25): SEQ ID NO: 1333; WAN024DJR; Start 449; Stop 473
gaaatgatggagctgttcaagtcaa

SEQ ID NO: 290861 - DNA, 25 bp, Artificial
  probe
  misc_feature (1)..(25): SEQ ID NO: 1333; WAN024DJR; Start 125; Stop 149
acaagatgcaacaaactctgatgaa

SEQ ID NO: 290862 - DNA, 25 bp, Artificial
  probe
  misc_feature (1)..(25): SEQ ID NO: 1333; WAN024DJR; Start 10; Stop 34
ccaaatattattatgacccgtatcg

SEQ ID NO: 290863 - DNA, 25 bp, Artificial
  probe
  misc_feature (1)..(25): SEQ ID NO: 1333; WAN024DJR; Start 107; Stop 131
atgacgaagtaagcacggacaagat

SEQ ID NO: 290864 - DNA, 25 bp, Artificial
  probe
  misc_feature (1)..(25): SEQ ID NO: 1333; WAN024DJR; Start 105; Stop 129
caatgacgaagtaagcacggacaag

SEQ ID NO: 290865 - DNA, 25 bp, Artificial
  probe
  misc_feature (1)..(25): SEQ ID NO: 1333; WAN024DJR; Start 455; Stop 479
atggagctgttcaagtcaacattat

SEQ ID NO: 290866 - DNA, 25 bp, Artificial
  probe
  misc_feature (1)..(25): SEQ ID NO: 1333; WAN024DJR; Start 425; Stop 449
ttaatacgaaaacaactccaacagg

SEQ ID NO: 290867 - DNA, 25 bp, Artificial
  probe
  misc_feature (1)..(25): SEQ ID NO: 1334; WAN024D2F; Start 232; Stop 256
gacttgtatgaagcgactatgtctc

SEQ ID NO: 290868 - DNA, 25 bp, Artificial
  probe
  misc_feature (1)..(25): SEQ ID NO: 1334; WAN024D2F; Start 553; Stop 577
attgatattgttctggactatgtcg

SEQ ID NO: 290869 - DNA, 25 bp, Artificial
  probe
  misc_feature (1)..(25): SEQ ID NO: 1334; WAN024D2F; Start 644; Stop 668
ttggagacaatcttaatgacttaca

SEQ ID NO: 290870 - DNA, 25 bp, Artificial
  probe
  misc_feature (1)..(25): SEQ ID NO: 1334; WAN024D2F; Start 645; Stop 669
tggagacaatcttaatgacttacat

SEQ ID NO: 290871 - DNA, 25 bp, Artificial
  probe
  misc_feature (1)..(25): SEQ ID NO: 1334; WAN024D2F; Start 229; Stop 253
caggacttgtatgaagcgactatgt

SEQ ID NO: 290872 - DNA, 25 bp, Artificial
  probe
  misc_feature (1)..(25): SEQ ID NO: 1334; WAN024D2F; Start 228; Stop 252
tcaggacttgtatgaagcgactatg

SEQ ID NO: 290873 - DNA, 25 bp, Artificial
  probe
  misc_feature (1)..(25): SEQ ID NO: 1334; WAN024D2F; Start 212; Stop 236
tggtagagtatcaaggtcaggactt

SEQ ID NO: 290874 - DNA, 25 bp, Artificial
  probe
  misc_feature (1)..(25): SEQ ID NO: 1334; WAN024D2F; Start 211; Stop 235
ttggtagagtatcaaggtcaggact

SEQ ID NO: 290875 - DNA, 25 bp, Artificial
  probe
  misc_feature (1)..(25): SEQ ID NO: 1334; WAN024D2F; Start 352; Stop 376
ctagatacggttgatgagacctatt

SEQ ID NO: 290876 - DNA, 25 bp, Artificial
  probe
  misc_feature (1)..(25): SEQ ID NO: 1334; WAN024D2F; Start 363; Stop 387
tgatgagacctatttgaaagtgagt

SEQ ID NO: 290877 - DNA, 25 bp, Artificial
  probe
  misc_feature (1)..(25): SEQ ID NO: 1334; WAN024D2F; Start 361; Stop 385
gttgatgagacctatttgaaagtga

SEQ ID NO: 290878 - DNA, 25 bp, Artificial
  probe
  misc_feature (1)..(25): SEQ ID NO: 1334; WAN024D2F; Start 231; Stop 255
ggacttgtatgaagcgactatgtct

SEQ ID NO: 290879 - DNA, 25 bp, Artificial
  probe
  misc_feature (1)..(25): SEQ ID NO: 1334; WAN024D2F; Start 230; Stop 254
aggacttgtatgaagcgactatgtc

SEQ ID NO: 290880 - DNA, 25 bp, Artificial
  probe
  misc_feature (1)..(25): SEQ ID NO: 1334; WAN024D2F; Start 227; Stop 251
gtcaggacttgtatgaagcgactat

SEQ ID NO: 290881 - DNA, 25 bp, Artificial
  probe
  misc_feature (1)..(25): SEQ ID NO: 1334; WAN024D2F; Start 362; Stop 386
ttgatgagacctatttgaaagtgag

SEQ ID NO: 290882 - DNA, 25 bp, Artificial
  probe
  misc_feature (1)..(25): SEQ ID NO: 1334; WAN024D2F; Start 559; Stop 583
attgttctggactatgtcgataagg

SEQ ID NO: 290883 - DNA, 25 bp, Artificial
  probe
  misc_feature (1)..(25): SEQ ID NO: 1334; WAN024D2F; Start 201; Stop 225
aaatggcagtttggtagagtatcaa

SEQ ID NO: 290884 - DNA, 25 bp, Artificial
  probe
  misc_feature (1)..(25): SEQ ID NO: 1334; WAN024D2F; Start 554; Stop 578
ttgatattgttctggactatgtcga

SEQ ID NO: 290885 - DNA, 25 bp, Artificial
  probe
  misc_feature (1)..(25): SEQ ID NO: 1334; WAN024D2F; Start 207; Stop 231
cagtttggtagagtatcaaggtcag

SEQ ID NO: 290886 - DNA, 25 bp, Artificial
  probe
  misc_feature (1)..(25): SEQ ID NO: 1334; WAN024D2F; Start 555; Stop 579
tgatattgttctggactatgtcgat

SEQ ID NO: 290887 - DNA, 25 bp, Artificial
  probe
  misc_feature (1)..(25): SEQ ID NO: 1334; WAN024D2F; Start 202; Stop 226
aatggcagtttggtagagtatcaag

SEQ ID NO: 290888 - DNA, 25 bp, Artificial
  probe
  misc_feature (1)..(25): SEQ ID NO: 1334; WAN024D2F; Start 726; Stop 750
agaattagcaaagactgtgattggt

SEQ ID NO: 290889 - DNA, 25 bp, Artificial
  probe
  misc_feature (1)..(25): SEQ ID NO: 1334; WAN024D2F; Start 725; Stop 749
tagaattagcaaagactgtgattgg

SEQ ID NO: 290890 - DNA, 25 bp, Artificial
  probe
  misc_feature (1)..(25): SEQ ID NO: 1334; WAN024D2F; Start 658; Stop 682
aatgacttacatatgatgcaggttg

SEQ ID NO: 290891 - DNA, 25 bp, Artificial
  probe
  misc_feature (1)..(25): SEQ ID NO: 1334; WAN024D2F; Start 209; Stop 233
gtttggtagagtatcaaggtcagga

SEQ ID NO: 290892 - DNA, 25 bp, Artificial
  probe
  misc_feature (1)..(25): SEQ ID NO: 1334; WAN024D2F; Start 208; Stop 232
agtttggtagagtatcaaggtcagg

SEQ ID NO: 290893 - DNA, 25 bp, Artificial
  probe
  misc_feature (1)..(25): SEQ ID NO: 1334; WAN024D2F; Start 366; Stop 390
tgagacctatttgaaagtgagtcag

SEQ ID NO: 290894 - DNA, 25 bp, Artificial
  probe
  misc_feature (1)..(25): SEQ ID NO: 1334; WAN024D2F; Start 365; Stop 389
atgagacctatttgaaagtgagtca

SEQ ID NO: 290895 - DNA, 25 bp, Artificial
  probe
  misc_feature (1)..(25): SEQ ID NO: 1334; WAN024D2F; Start 210; Stop 234
tttggtagagtatcaaggtcaggac

SEQ ID NO: 290896 - DNA, 25 bp, Artificial
  probe
  misc_feature (1)..(25): SEQ ID NO: 1334; WAN024D2F; Start 340; Stop 364
ggttcatatgttctagatacggttg

SEQ ID NO: 290897 - DNA, 25 bp, Artificial
  probe
  misc_feature (1)..(25): SEQ ID NO: 1334; WAN024D2F; Start 364; Stop 388
gatgagacctatttgaaagtgagtc

SEQ ID NO: 290898 - DNA, 25 bp, Artificial
  probe
  misc_feature (1)..(25): SEQ ID NO: 1334; WAN024D2F; Start 347; Stop 371
atgttctagatacggttgatgagac

SEQ ID NO: 290899 - DNA, 25 bp, Artificial
  probe
  misc_feature (1)..(25): SEQ ID NO: 1334; WAN024D2F; Start 25; Stop 49
gatatggacggaaccttcctagatg

SEQ ID NO: 290900 - DNA, 25 bp, Artificial
  probe
  misc_feature (1)..(25): SEQ ID NO: 1335; WAN024AVP; Start 1; Stop 25
atgacaattcatctatctagcctag

SEQ ID NO: 290901 - DNA, 25 bp, Artificial
  probe
  misc_feature (1)..(25): SEQ ID NO: 1335; WAN024AVP; Start 2; Stop 26
tgacaattcatctatctagcctagg

SEQ ID NO: 290902 - DNA, 25 bp, Artificial
  probe
  misc_feature (1)..(25): SEQ ID NO: 1335; WAN024AVP; Start 3; Stop 27
gacaattcatctatctagcctaggg

SEQ ID NO: 290903 - DNA, 25 bp, Artificial
  probe
  misc_feature (1)..(25): SEQ ID NO: 1335; WAN024AVP; Start 328; Stop 352
atcagaaagtcgtgatttctattga

SEQ ID NO: 290904 - DNA, 25 bp, Artificial
  probe
  misc_feature (1)..(25): SEQ ID NO: 1337; WAN024ESH; Start 331; Stop 355
ctaaatgtcttcgaggcaaatcaaa

SEQ ID NO: 290905 - DNA, 25 bp, Artificial
  probe
  misc_feature (1)..(25): SEQ ID NO: 1337; WAN024ESH; Start 330; Stop 354
tctaaatgtcttcgaggcaaatcaa

SEQ ID NO: 290906 - DNA, 25 bp, Artificial
  probe
  misc_feature (1)..(25): SEQ ID NO: 1337; WAN024ESH; Start 332; Stop 356
taaatgtcttcgaggcaaatcaaag

SEQ ID NO: 290907 - DNA, 25 bp, Artificial
  probe
  misc_feature (1)..(25): SEQ ID NO: 1337; WAN024ESH; Start 327; Stop 351
ttctctaaatgtcttcgaggcaaat

SEQ ID NO: 290908 - DNA, 25 bp, Artificial
  probe
  misc_feature (1)..(25): SEQ ID NO: 1337; WAN024ESH; Start 326; Stop 350
tttctctaaatgtcttcgaggcaaa

SEQ ID NO: 290909 - DNA, 25 bp, Artificial
  probe
  misc_feature (1)..(25): SEQ ID NO: 1337; WAN024ESH; Start 324; Stop 348
tatttctctaaatgtcttcgaggca

SEQ ID NO: 290910 - DNA, 25 bp, Artificial
  probe
  misc_feature (1)..(25): SEQ ID NO: 1337; WAN024ESH; Start 323; Stop 347
gtatttctctaaatgtcttcgaggc

SEQ ID NO: 290911 - DNA, 25 bp, Artificial
  probe
  misc_feature (1)..(25): SEQ ID NO: 1337; WAN024ESH; Start 328; Stop 352
tctctaaatgtcttcgaggcaaatc

SEQ ID NO: 290912 - DNA, 25 bp, Artificial
  probe
  misc_feature (1)..(25): SEQ ID NO: 1337; WAN024ESH; Start 325; Stop 349
atttctctaaatgtcttcgaggcaa

SEQ ID NO: 290913 - DNA, 25 bp, Artificial
  probe
  misc_feature (1)..(25): SEQ ID NO: 1337; WAN024ESH; Start 329; Stop 353
ctctaaatgtcttcgaggcaaatca

SEQ ID NO: 290914 - DNA, 25 bp, Artificial
  probe
  misc_feature (1)..(25): SEQ ID NO: 1337; WAN024ESH; Start 322; Stop 346
agtatttctctaaatgtcttcgagg

SEQ ID NO: 290915 - DNA, 25 bp, Artificial
  probe
  misc_feature (1)..(25): SEQ ID NO: 1337; WAN024ESH; Start 272; Stop 296
aggctttaaggaaatttgttagttt

SEQ ID NO: 290916 - DNA, 25 bp, Artificial
  probe
  misc_feature (1)..(25): SEQ ID NO: 1337; WAN024ESH; Start 405; Stop 429
tgaagcacctgtacgaaaatatagt

SEQ ID NO: 290917 - DNA, 25 bp, Artificial
  probe
  misc_feature (1)..(25): SEQ ID NO: 1337; WAN024ESH; Start 403; Stop 427
gttgaagcacctgtacgaaaatata

SEQ ID NO: 290918 - DNA, 25 bp, Artificial
  probe
  misc_feature (1)..(25): SEQ ID NO: 1337; WAN024ESH; Start 404; Stop 428
ttgaagcacctgtacgaaaatatag

SEQ ID NO: 290919 - DNA, 25 bp, Artificial
  probe
  misc_feature (1)..(25): SEQ ID NO: 1337; WAN024ESH; Start 14; Stop 38
ttgaagaaaaggtgagcacagaaaa

SEQ ID NO: 290920 - DNA, 25 bp, Artificial
  probe
  misc_feature (1)..(25): SEQ ID NO: 1337; WAN024ESH; Start 13; Stop 37
tttgaagaaaaggtgagcacagaaa

SEQ ID NO: 290921 - DNA, 25 bp, Artificial
  probe
  misc_feature (1)..(25): SEQ ID NO: 1337; WAN024ESH; Start 41; Stop 65
ctcaatttgtatgccagtggtccaa

SEQ ID NO: 290922 - DNA, 25 bp, Artificial
  probe
  misc_feature (1)..(25): SEQ ID NO: 1337; WAN024ESH; Start 44; Stop 68
aatttgtatgccagtggtccaactc

SEQ ID NO: 290923 - DNA, 25 bp, Artificial
  probe
  misc_feature (1)..(25): SEQ ID NO: 1337; WAN024ESH; Start 406; Stop 430
gaagcacctgtacgaaaatatagta

SEQ ID NO: 290924 - DNA, 25 bp, Artificial
  probe
  misc_feature (1)..(25): SEQ ID NO: 1337; WAN024ESH; Start 4; Stop 28
acaattcgttttgaagaaaaggtga

SEQ ID NO: 290925 - DNA, 25 bp, Artificial
  probe
  misc_feature (1)..(25): SEQ ID NO: 1337; WAN024ESH; Start 3; Stop 27
gacaattcgttttgaagaaaaggtg

SEQ ID NO: 290926 - DNA, 25 bp, Artificial
  probe
  misc_feature (1)..(25): SEQ ID NO: 1337; WAN024ESH; Start 2; Stop 26
tgacaattcgttttgaagaaaaggt

SEQ ID NO: 290927 - DNA, 25 bp, Artificial
  probe
  misc_feature (1)..(25): SEQ ID NO: 1337; WAN024ESH; Start 5; Stop 29
caattcgttttgaagaaaaggtgag

SEQ ID NO: 290928 - DNA, 25 bp, Artificial
  probe
  misc_feature (1)..(25): SEQ ID NO: 1337; WAN024ESH; Start 333; Stop 357
aaatgtcttcgaggcaaatcaaaga

SEQ ID NO: 290929 - DNA, 25 bp, Artificial
  probe
  misc_feature (1)..(25): SEQ ID NO: 1337; WAN024ESH; Start 42; Stop 66
tcaatttgtatgccagtggtccaac

SEQ ID NO: 290930 - DNA, 25 bp, Artificial
  probe
  misc_feature (1)..(25): SEQ ID NO: 1337; WAN024ESH; Start 15; Stop 39
tgaagaaaaggtgagcacagaaaac

SEQ ID NO: 290931 - DNA, 25 bp, Artificial
  probe
  misc_feature (1)..(25): SEQ ID NO: 1337; WAN024ESH; Start 43; Stop 67
caatttgtatgccagtggtccaact

SEQ ID NO: 290932 - DNA, 25 bp, Artificial
  probe
  misc_feature (1)..(25): SEQ ID NO: 1337; WAN024ESH; Start 6; Stop 30
aattcgttttgaagaaaaggtgagc

SEQ ID NO: 290933 - DNA, 25 bp, Artificial
  probe
  misc_feature (1)..(25): SEQ ID NO: 1337; WAN024ESH; Start 1; Stop 25
atgacaattcgttttgaagaaaagg

SEQ ID NO: 290934 - DNA, 25 bp, Artificial
  probe
  misc_feature (1)..(25): SEQ ID NO: 1337; WAN024ESH; Start 334; Stop 358
aatgtcttcgaggcaaatcaaagag

SEQ ID NO: 290935 - DNA, 25 bp, Artificial
  probe
  misc_feature (1)..(25): SEQ ID NO: 1337; WAN024ESH; Start 12; Stop 36
ttttgaagaaaaggtgagcacagaa

SEQ ID NO: 290936 - DNA, 25 bp, Artificial
  probe
  misc_feature (1)..(25): SEQ ID NO: 1337; WAN024ESH; Start 33; Stop 57
agaaaacgctcaatttgtatgccag

SEQ ID NO: 290937 - DNA, 25 bp, Artificial
  probe
  misc_feature (1)..(25): SEQ ID NO: 1338; WAN024DC5; Start 432; Stop 456
atccgagaatgaagtagtagcaatc

SEQ ID NO: 290938 - DNA, 25 bp, Artificial
  probe
  misc_feature (1)..(25): SEQ ID NO: 1338; WAN024DC5; Start 431; Stop 455
tatccgagaatgaagtagtagcaat

SEQ ID NO: 290939 - DNA, 25 bp, Artificial
  probe
  misc_feature (1)..(25): SEQ ID NO: 1338; WAN024DC5; Start 430; Stop 454
atatccgagaatgaagtagtagcaa

SEQ ID NO: 290940 - DNA, 25 bp, Artificial
  probe
  misc_feature (1)..(25): SEQ ID NO: 1338; WAN024DC5; Start 429; Stop 453
aatatccgagaatgaagtagtagca

SEQ ID NO: 290941 - DNA, 25 bp, Artificial
  probe
  misc_feature (1)..(25): SEQ ID NO: 1338; WAN024DC5; Start 434; Stop 458
ccgagaatgaagtagtagcaatcta

SEQ ID NO: 290942 - DNA, 25 bp, Artificial
  probe
  misc_feature (1)..(25): SEQ ID NO: 1338; WAN024DC5; Start 433; Stop 457
tccgagaatgaagtagtagcaatct

SEQ ID NO: 290943 - DNA, 25 bp, Artificial
  probe
  misc_feature (1)..(25): SEQ ID NO: 1338; WAN024DC5; Start 435; Stop 459
cgagaatgaagtagtagcaatctat

SEQ ID NO: 290944 - DNA, 25 bp, Artificial
  probe
  misc_feature (1)..(25): SEQ ID NO: 1338; WAN024DC5; Start 9; Stop 33
tgaactaagagatgttacaatggaa

SEQ ID NO: 290945 - DNA, 25 bp, Artificial
  probe
  misc_feature (1)..(25): SEQ ID NO: 1338; WAN024DC5; Start 8; Stop 32
ttgaactaagagatgttacaatgga

SEQ ID NO: 290946 - DNA, 25 bp, Artificial
  probe
  misc_feature (1)..(25): SEQ ID NO: 1338; WAN024DC5; Start 107; Stop 131
tagctgaagcatacgtctacactaa

SEQ ID NO: 290947 - DNA, 25 bp, Artificial
  probe
  misc_feature (1)..(25): SEQ ID NO: 1338; WAN024DC5; Start 106; Stop 130
ttagctgaagcatacgtctacacta

SEQ ID NO: 290948 - DNA, 25 bp, Artificial
  probe
  misc_feature (1)..(25): SEQ ID NO: 1338; WAN024DC5; Start 437; Stop 461
agaatgaagtagtagcaatctatga

SEQ ID NO: 290949 - DNA, 25 bp, Artificial
  probe
  misc_feature (1)..(25): SEQ ID NO: 1338; WAN024DC5; Start 436; Stop 460
gagaatgaagtagtagcaatctatg

SEQ ID NO: 290950 - DNA, 25 bp, Artificial
  probe
  misc_feature (1)..(25): SEQ ID NO: 1338; WAN024DC5; Start 428; Stop 452
aaatatccgagaatgaagtagtagc

SEQ ID NO: 290951 - DNA, 25 bp, Artificial
  probe
  misc_feature (1)..(25): SEQ ID NO: 1338; WAN024DC5; Start 425; Stop 449
gggaaatatccgagaatgaagtagt

SEQ ID NO: 290952 - DNA, 25 bp, Artificial
  probe
  misc_feature (1)..(25): SEQ ID NO: 1338; WAN024DC5; Start 438; Stop 462
gaatgaagtagtagcaatctatgat

SEQ ID NO: 290953 - DNA, 25 bp, Artificial
  probe
  misc_feature (1)..(25): SEQ ID NO: 1338; WAN024DC5; Start 210; Stop 234
aaagatcggaattagtagtggaaat

SEQ ID NO: 290954 - DNA, 25 bp, Artificial
  probe
  misc_feature (1)..(25): SEQ ID NO: 1338; WAN024DC5; Start 146; Stop 170
tagctccattggcagtttatgataa

SEQ ID NO: 290955 - DNA, 25 bp, Artificial
  probe
  misc_feature (1)..(25): SEQ ID NO: 1338; WAN024DC5; Start 97; Stop 121
gcaattagtttagctgaagcatacg

SEQ ID NO: 290956 - DNA, 25 bp, Artificial
  probe
  misc_feature (1)..(25): SEQ ID NO: 1338; WAN024DC5; Start 96; Stop 120
cgcaattagtttagctgaagcatac

SEQ ID NO: 290957 - DNA, 25 bp, Artificial
  probe
  misc_feature (1)..(25): SEQ ID NO: 1338; WAN024DC5; Start 147; Stop 171
agctccattggcagtttatgataat

SEQ ID NO: 290958 - DNA, 25 bp, Artificial
  probe
  misc_feature (1)..(25): SEQ ID NO: 1338; WAN024DC5; Start 145; Stop 169
gtagctccattggcagtttatgata

SEQ ID NO: 290959 - DNA, 25 bp, Artificial
  probe
  misc_feature (1)..(25): SEQ ID NO: 1338; WAN024DC5; Start 95; Stop 119
acgcaattagtttagctgaagcata

SEQ ID NO: 290960 - DNA, 25 bp, Artificial
  probe
  misc_feature (1)..(25): SEQ ID NO: 1338; WAN024DC5; Start 102; Stop 126
tagtttagctgaagcatacgtctac

SEQ ID NO: 290961 - DNA, 25 bp, Artificial
  probe
  misc_feature (1)..(25): SEQ ID NO: 1338; WAN024DC5; Start 100; Stop 124
attagtttagctgaagcatacgtct

SEQ ID NO: 290962 - DNA, 25 bp, Artificial
  probe
  misc_feature (1)..(25): SEQ ID NO: 1338; WAN024DC5; Start 101; Stop 125
ttagtttagctgaagcatacgtcta

SEQ ID NO: 290963 - DNA, 25 bp, Artificial
  probe
  misc_feature (1)..(25): SEQ ID NO: 1338; WAN024DC5; Start 98; Stop 122
caattagtttagctgaagcatacgt

SEQ ID NO: 290964 - DNA, 25 bp, Artificial
  probe
  misc_feature (1)..(25): SEQ ID NO: 1338; WAN024DC5; Start 99; Stop 123
aattagtttagctgaagcatacgtc

SEQ ID NO: 290965 - DNA, 25 bp, Artificial
  probe
  misc_feature (1)..(25): SEQ ID NO: 1338; WAN024DC5; Start 148; Stop 172
gctccattggcagtttatgataatg

SEQ ID NO: 290966 - DNA, 25 bp, Artificial
  probe
  misc_feature (1)..(25): SEQ ID NO: 1338; WAN024DC5; Start 211; Stop 235
aagatcggaattagtagtggaaatt

SEQ ID NO: 290967 - DNA, 25 bp, Artificial
  probe
  misc_feature (1)..(25): SEQ ID NO: 1338; WAN024DC5; Start 149; Stop 173
ctccattggcagtttatgataatga

SEQ ID NO: 290968 - DNA, 25 bp, Artificial
  probe
  misc_feature (1)..(25): SEQ ID NO: 1338; WAN024DC5; Start 7; Stop 31
attgaactaagagatgttacaatgg

SEQ ID NO: 290969 - DNA, 25 bp, Artificial
  probe
  misc_feature (1)..(25): SEQ ID NO: 1338; WAN024DC5; Start 90; Stop 114
aaccaacgcaattagtttagctgaa

SEQ ID NO: 290970 - DNA, 25 bp, Artificial
  probe
  misc_feature (1)..(25): SEQ ID NO: 1339; WAN024CFU; Start 88; Stop 112
attatggttgtagacgacgaagttg

SEQ ID NO: 290971 - DNA, 25 bp, Artificial
  probe
  misc_feature (1)..(25): SEQ ID NO: 1339; WAN024CFU; Start 87; Stop 111
cattatggttgtagacgacgaagtt

SEQ ID NO: 290972 - DNA, 25 bp, Artificial
  probe
  misc_feature (1)..(25): SEQ ID NO: 1339; WAN024CFU; Start 365; Stop 389
tagtagacaaggatgtggaagactt

SEQ ID NO: 290973 - DNA, 25 bp, Artificial
  probe
  misc_feature (1)..(25): SEQ ID NO: 1339; WAN024CFU; Start 89; Stop 113
ttatggttgtagacgacgaagttgt

SEQ ID NO: 290974 - DNA, 25 bp, Artificial
  probe
  misc_feature (1)..(25): SEQ ID NO: 1339; WAN024CFU; Start 364; Stop 388
gtagtagacaaggatgtggaagact

SEQ ID NO: 290975 - DNA, 25 bp, Artificial
  probe
  misc_feature (1)..(25): SEQ ID NO: 1339; WAN024CFU; Start 6; Stop 30
aattgtaggatgccgtattgatgga

SEQ ID NO: 290976 - DNA, 25 bp, Artificial
  probe
  misc_feature (1)..(25): SEQ ID NO: 1339; WAN024CFU; Start 7; Stop 31
attgtaggatgccgtattgatggac

SEQ ID NO: 290977 - DNA, 25 bp, Artificial
  probe
  misc_feature (1)..(25): SEQ ID NO: 1339; WAN024CFU; Start 366; Stop 390
agtagacaaggatgtggaagacttc

SEQ ID NO: 290978 - DNA, 25 bp, Artificial
  probe
  misc_feature (1)..(25): SEQ ID NO: 1339; WAN024CFU; Start 363; Stop 387
cgtagtagacaaggatgtggaagac

SEQ ID NO: 290979 - DNA, 25 bp, Artificial
  probe
  misc_feature (1)..(25): SEQ ID NO: 1339; WAN024CFU; Start 408; Stop 432
aggtgttaaacttactgctcagatg

SEQ ID NO: 290980 - DNA, 25 bp, Artificial
  probe
  misc_feature (1)..(25): SEQ ID NO: 1339; WAN024CFU; Start 407; Stop 431
aaggtgttaaacttactgctcagat

SEQ ID NO: 290981 - DNA, 25 bp, Artificial
  probe
  misc_feature (1)..(25): SEQ ID NO: 1339; WAN024CFU; Start 406; Stop 430
aaaggtgttaaacttactgctcaga

SEQ ID NO: 290982 - DNA, 25 bp, Artificial
  probe
  misc_feature (1)..(25): SEQ ID NO: 1339; WAN024CFU; Start 410; Stop 434
gtgttaaacttactgctcagatggt

SEQ ID NO: 290983 - DNA, 25 bp, Artificial
  probe
  misc_feature (1)..(25): SEQ ID NO: 1339; WAN024CFU; Start 412; Stop 436
gttaaacttactgctcagatggttc

SEQ ID NO: 290984 - DNA, 25 bp, Artificial
  probe
  misc_feature (1)..(25): SEQ ID NO: 1339; WAN024CFU; Start 77; Stop 101
atgtttcacgcattatggttgtaga

SEQ ID NO: 290985 - DNA, 25 bp, Artificial
  probe
  misc_feature (1)..(25): SEQ ID NO: 1339; WAN024CFU; Start 411; Stop 435
tgttaaacttactgctcagatggtt

SEQ ID NO: 290986 - DNA, 25 bp, Artificial
  probe
  misc_feature (1)..(25): SEQ ID NO: 1339; WAN024CFU; Start 86; Stop 110
gcattatggttgtagacgacgaagt

SEQ ID NO: 290987 - DNA, 25 bp, Artificial
  probe
  misc_feature (1)..(25): SEQ ID NO: 1339; WAN024CFU; Start 413; Stop 437
ttaaacttactgctcagatggttcc

SEQ ID NO: 290988 - DNA, 25 bp, Artificial
  probe
  misc_feature (1)..(25): SEQ ID NO: 1339; WAN024CFU; Start 357; Stop 381
tatcaacgtagtagacaaggatgtg

SEQ ID NO: 290989 - DNA, 25 bp, Artificial
  probe
  misc_feature (1)..(25): SEQ ID NO: 1339; WAN024CFU; Start 356; Stop 380
ctatcaacgtagtagacaaggatgt

SEQ ID NO: 290990 - DNA, 25 bp, Artificial
  probe
  misc_feature (1)..(25): SEQ ID NO: 1339; WAN024CFU; Start 90; Stop 114
tatggttgtagacgacgaagttgtc

SEQ ID NO: 290991 - DNA, 25 bp, Artificial
  probe
  misc_feature (1)..(25): SEQ ID NO: 1339; WAN024CFU; Start 409; Stop 433
ggtgttaaacttactgctcagatgg

SEQ ID NO: 290992 - DNA, 25 bp, Artificial
  probe
  misc_feature (1)..(25): SEQ ID NO: 1339; WAN024CFU; Start 314; Stop 338
ggaatatgtctcaaacaccagaaac

SEQ ID NO: 290993 - DNA, 25 bp, Artificial
  probe
  misc_feature (1)..(25): SEQ ID NO: 1339; WAN024CFU; Start 78; Stop 102
tgtttcacgcattatggttgtagac

SEQ ID NO: 290994 - DNA, 25 bp, Artificial
  probe
  misc_feature (1)..(25): SEQ ID NO: 1339; WAN024CFU; Start 316; Stop 340
aatatgtctcaaacaccagaaactc

SEQ ID NO: 290995 - DNA, 25 bp, Artificial
  probe
  misc_feature (1)..(25): SEQ ID NO: 1339; WAN024CFU; Start 315; Stop 339
gaatatgtctcaaacaccagaaact

SEQ ID NO: 290996 - DNA, 25 bp, Artificial
  probe
  misc_feature (1)..(25): SEQ ID NO: 1339; WAN024CFU; Start 81; Stop 105
ttcacgcattatggttgtagacgac

SEQ ID NO: 290997 - DNA, 25 bp, Artificial
  probe
  misc_feature (1)..(25): SEQ ID NO: 1339; WAN024CFU; Start 313; Stop 337
gggaatatgtctcaaacaccagaaa

SEQ ID NO: 290998 - DNA, 25 bp, Artificial
  probe
  misc_feature (1)..(25): SEQ ID NO: 1339; WAN024CFU; Start 353; Stop 377
gttctatcaacgtagtagacaagga

SEQ ID NO: 290999 - DNA, 25 bp, Artificial
  probe
  misc_feature (1)..(25): SEQ ID NO: 1339; WAN024CFU; Start 355; Stop 379
tctatcaacgtagtagacaaggatg

SEQ ID NO: 291000 - DNA, 25 bp, Artificial
  probe
  misc_feature (1)..(25): SEQ ID NO: 1339; WAN024CFU; Start 317; Stop 341
atatgtctcaaacaccagaaactcg

SEQ ID NO: 291001 - DNA, 25 bp, Artificial
  probe
  misc_feature (1)..(25): SEQ ID NO: 1339; WAN024CFU; Start 414; Stop 438
taaacttactgctcagatggttcca

SEQ ID NO: 291002 - DNA, 25 bp, Artificial
  probe
  misc_feature (1)..(25): SEQ ID NO: 1339; WAN024CFU; Start 418; Stop 442
cttactgctcagatggttccaaatg

SEQ ID NO: 291003 - DNA, 25 bp, Artificial
  probe
  misc_feature (1)..(25): SEQ ID NO: 1340; WAN024COM; Start 917; Stop 941
gcagtattgattccttgacagattc

SEQ ID NO: 291004 - DNA, 25 bp, Artificial
  probe
  misc_feature (1)..(25): SEQ ID NO: 1340; WAN024COM; Start 1180; Stop 1204
tatgaggtctacttaacggcttcta

SEQ ID NO: 291005 - DNA, 25 bp, Artificial
  probe
  misc_feature (1)..(25): SEQ ID NO: 1340; WAN024COM; Start 916; Stop 940
ggcagtattgattccttgacagatt

SEQ ID NO: 291006 - DNA, 25 bp, Artificial
  probe
  misc_feature (1)..(25): SEQ ID NO: 1340; WAN024COM; Start 1064; Stop 1088
atatctatggtagtggtggagaaga

SEQ ID NO: 291007 - DNA, 25 bp, Artificial
  probe
  misc_feature (1)..(25): SEQ ID NO: 1340; WAN024COM; Start 1067; Stop 1091
tctatggtagtggtggagaagattc

SEQ ID NO: 291008 - DNA, 25 bp, Artificial
  probe
  misc_feature (1)..(25): SEQ ID NO: 1340; WAN024COM; Start 1181; Stop 1205
atgaggtctacttaacggcttctac

SEQ ID NO: 291009 - DNA, 25 bp, Artificial
  probe
  misc_feature (1)..(25): SEQ ID NO: 1340; WAN024COM; Start 1179; Stop 1203
gtatgaggtctacttaacggcttct

SEQ ID NO: 291010 - DNA, 25 bp, Artificial
  probe
  misc_feature (1)..(25): SEQ ID NO: 1340; WAN024COM; Start 918; Stop 942
cagtattgattccttgacagattca

SEQ ID NO: 291011 - DNA, 25 bp, Artificial
  probe
  misc_feature (1)..(25): SEQ ID NO: 1340; WAN024COM; Start 1068; Stop 1092
ctatggtagtggtggagaagattct

SEQ ID NO: 291012 - DNA, 25 bp, Artificial
  probe
  misc_feature (1)..(25): SEQ ID NO: 1340; WAN024COM; Start 1324; Stop 1348
attccaagttcatctgaccatgtag

SEQ ID NO: 291013 - DNA, 25 bp, Artificial
  probe
  misc_feature (1)..(25): SEQ ID NO: 1340; WAN024COM; Start 1323; Stop 1347
gattccaagttcatctgaccatgta

SEQ ID NO: 291014 - DNA, 25 bp, Artificial
  probe
  misc_feature (1)..(25): SEQ ID NO: 1340; WAN024COM; Start 1329; Stop 1353
aagttcatctgaccatgtagaagac

SEQ ID NO: 291015 - DNA, 25 bp, Artificial
  probe
  misc_feature (1)..(25): SEQ ID NO: 1340; WAN024COM; Start 1328; Stop 1352
caagttcatctgaccatgtagaaga

SEQ ID NO: 291016 - DNA, 25 bp, Artificial
  probe
  misc_feature (1)..(25): SEQ ID NO: 1340; WAN024COM; Start 895; Stop 919
aagattgttaccattcctgtaggca

SEQ ID NO: 291017 - DNA, 25 bp, Artificial
  probe
  misc_feature (1)..(25): SEQ ID NO: 1340; WAN024COM; Start 135; Stop 159
cgataatattcagcacttaacagcc

SEQ ID NO: 291018 - DNA, 25 bp, Artificial
  probe
  misc_feature (1)..(25): SEQ ID NO: 1340; WAN024COM; Start 134; Stop 158
ccgataatattcagcacttaacagc

SEQ ID NO: 291019 - DNA, 25 bp, Artificial
  probe
  misc_feature (1)..(25): SEQ ID NO: 1340; WAN024COM; Start 133; Stop 157
gccgataatattcagcacttaacag

SEQ ID NO: 291020 - DNA, 25 bp, Artificial
  probe
  misc_feature (1)..(25): SEQ ID NO: 1340; WAN024COM; Start 132; Stop 156
agccgataatattcagcacttaaca

SEQ ID NO: 291021 - DNA, 25 bp, Artificial
  probe
  misc_feature (1)..(25): SEQ ID NO: 1340; WAN024COM; Start 903; Stop 927
taccattcctgtaggcagtattgat

SEQ ID NO: 291022 - DNA, 25 bp, Artificial
  probe
  misc_feature (1)..(25): SEQ ID NO: 1340; WAN024COM; Start 136; Stop 160
gataatattcagcacttaacagcca

SEQ ID NO: 291023 - DNA, 25 bp, Artificial
  probe
  misc_feature (1)..(25): SEQ ID NO: 1340; WAN024COM; Start 1327; Stop 1351
ccaagttcatctgaccatgtagaag

SEQ ID NO: 291024 - DNA, 25 bp, Artificial
  probe
  misc_feature (1)..(25): SEQ ID NO: 1340; WAN024COM; Start 906; Stop 930
cattcctgtaggcagtattgattcc

SEQ ID NO: 291025 - DNA, 25 bp, Artificial
  probe
  misc_feature (1)..(25): SEQ ID NO: 1340; WAN024COM; Start 905; Stop 929
ccattcctgtaggcagtattgattc

SEQ ID NO: 291026 - DNA, 25 bp, Artificial
  probe
  misc_feature (1)..(25): SEQ ID NO: 1340; WAN024COM; Start 902; Stop 926
ttaccattcctgtaggcagtattga

SEQ ID NO: 291027 - DNA, 25 bp, Artificial
  probe
  misc_feature (1)..(25): SEQ ID NO: 1340; WAN024COM; Start 901; Stop 925
gttaccattcctgtaggcagtattg

SEQ ID NO: 291028 - DNA, 25 bp, Artificial
  probe
  misc_feature (1)..(25): SEQ ID NO: 1340; WAN024COM; Start 138; Stop 162
taatattcagcacttaacagccaat

SEQ ID NO: 291029 - DNA, 25 bp, Artificial
  probe
  misc_feature (1)..(25): SEQ ID NO: 1340; WAN024COM; Start 137; Stop 161
ataatattcagcacttaacagccaa

SEQ ID NO: 291030 - DNA, 25 bp, Artificial
  probe
  misc_feature (1)..(25): SEQ ID NO: 1340; WAN024COM; Start 131; Stop 155
tagccgataatattcagcacttaac

SEQ ID NO: 291031 - DNA, 25 bp, Artificial
  probe
  misc_feature (1)..(25): SEQ ID NO: 1340; WAN024COM; Start 1332; Stop 1356
ttcatctgaccatgtagaagaccaa

SEQ ID NO: 291032 - DNA, 25 bp, Artificial
  probe
  misc_feature (1)..(25): SEQ ID NO: 1340; WAN024COM; Start 1326; Stop 1350
tccaagttcatctgaccatgtagaa

SEQ ID NO: 291033 - DNA, 25 bp, Artificial
  probe
  misc_feature (1)..(25): SEQ ID NO: 1340; WAN024COM; Start 1325; Stop 1349
ttccaagttcatctgaccatgtaga

SEQ ID NO: 291034 - DNA, 25 bp, Artificial
  probe
  misc_feature (1)..(25): SEQ ID NO: 1340; WAN024COM; Start 900; Stop 924
tgttaccattcctgtaggcagtatt

SEQ ID NO: 291035 - DNA, 25 bp, Artificial
  probe
  misc_feature (1)..(25): SEQ ID NO: 1340; WAN024COM; Start 899; Stop 923
ttgttaccattcctgtaggcagtat

SEQ ID NO: 291036 - DNA, 25 bp, Artificial
  probe
  misc_feature (1)..(25): SEQ ID NO: 1341; WAN024DLX; Start 90; Stop 114
tatctttggagtagcagtatcttgg

SEQ ID NO: 291037 - DNA, 25 bp, Artificial
  probe
  misc_feature (1)..(25): SEQ ID NO: 1341; WAN024DLX; Start 91; Stop 115
atctttggagtagcagtatcttgga

SEQ ID NO: 291038 - DNA, 25 bp, Artificial
  probe
  misc_feature (1)..(25): SEQ ID NO: 1341; WAN024DLX; Start 92; Stop 116
tctttggagtagcagtatcttggaa

SEQ ID NO: 291039 - DNA, 25 bp, Artificial
  probe
  misc_feature (1)..(25): SEQ ID NO: 1341; WAN024DLX; Start 93; Stop 117
ctttggagtagcagtatcttggaag

SEQ ID NO: 291040 - DNA, 25 bp, Artificial
  probe
  misc_feature (1)..(25): SEQ ID NO: 1341; WAN024DLX; Start 89; Stop 113
ttatctttggagtagcagtatcttg

SEQ ID NO: 291041 - DNA, 25 bp, Artificial
  probe
  misc_feature (1)..(25): SEQ ID NO: 1341; WAN024DLX; Start 88; Stop 112
gttatctttggagtagcagtatctt

SEQ ID NO: 291042 - DNA, 25 bp, Artificial
  probe
  misc_feature (1)..(25): SEQ ID NO: 1341; WAN024DLX; Start 94; Stop 118
tttggagtagcagtatcttggaagg

SEQ ID NO: 291043 - DNA, 25 bp, Artificial
  probe
  misc_feature (1)..(25): SEQ ID NO: 1341; WAN024DLX; Start 132; Stop 156
aacagcacttataggttctggtttg

SEQ ID NO: 291044 - DNA, 25 bp, Artificial
  probe
  misc_feature (1)..(25): SEQ ID NO: 1341; WAN024DLX; Start 133; Stop 157
acagcacttataggttctggtttgg

SEQ ID NO: 291045 - DNA, 25 bp, Artificial
  probe
  misc_feature (1)..(25): SEQ ID NO: 1341; WAN024DLX; Start 120; Stop 144
tattgcaggtggaacagcacttata

SEQ ID NO: 291046 - DNA, 25 bp, Artificial
  probe
  misc_feature (1)..(25): SEQ ID NO: 1341; WAN024DLX; Start 130; Stop 154
ggaacagcacttataggttctggtt

SEQ ID NO: 291047 - DNA, 25 bp, Artificial
  probe
  misc_feature (1)..(25): SEQ ID NO: 1341; WAN024DLX; Start 135; Stop 159
agcacttataggttctggtttggca

SEQ ID NO: 291048 - DNA, 25 bp, Artificial
  probe
  misc_feature (1)..(25): SEQ ID NO: 1341; WAN024DLX; Start 131; Stop 155
gaacagcacttataggttctggttt

SEQ ID NO: 291049 - DNA, 25 bp, Artificial
  probe
  misc_feature (1)..(25): SEQ ID NO: 1341; WAN024DLX; Start 137; Stop 161
cacttataggttctggtttggcagc

SEQ ID NO: 291050 - DNA, 25 bp, Artificial
  probe
  misc_feature (1)..(25): SEQ ID NO: 1341; WAN024DLX; Start 136; Stop 160
gcacttataggttctggtttggcag

SEQ ID NO: 291051 - DNA, 25 bp, Artificial
  probe
  misc_feature (1)..(25): SEQ ID NO: 1341; WAN024DLX; Start 134; Stop 158
cagcacttataggttctggtttggc

SEQ ID NO: 291052 - DNA, 25 bp, Artificial
  probe
  misc_feature (1)..(25): SEQ ID NO: 1341; WAN024DLX; Start 128; Stop 152
gtggaacagcacttataggttctgg

SEQ ID NO: 291053 - DNA, 25 bp, Artificial
  probe
  misc_feature (1)..(25): SEQ ID NO: 1341; WAN024DLX; Start 127; Stop 151
ggtggaacagcacttataggttctg

SEQ ID NO: 291054 - DNA, 25 bp, Artificial
  probe
  misc_feature (1)..(25): SEQ ID NO: 1341; WAN024DLX; Start 126; Stop 150
aggtggaacagcacttataggttct

SEQ ID NO: 291055 - DNA, 25 bp, Artificial
  probe
  misc_feature (1)..(25): SEQ ID NO: 1341; WAN024DLX; Start 125; Stop 149
caggtggaacagcacttataggttc

SEQ ID NO: 291056 - DNA, 25 bp, Artificial
  probe
  misc_feature (1)..(25): SEQ ID NO: 1341; WAN024DLX; Start 121; Stop 145
attgcaggtggaacagcacttatag

SEQ ID NO: 291057 - DNA, 25 bp, Artificial
  probe
  misc_feature (1)..(25): SEQ ID NO: 1341; WAN024DLX; Start 124; Stop 148
gcaggtggaacagcacttataggtt

SEQ ID NO: 291058 - DNA, 25 bp, Artificial
  probe
  misc_feature (1)..(25): SEQ ID NO: 1341; WAN024DLX; Start 129; Stop 153
tggaacagcacttataggttctggt

SEQ ID NO: 291059 - DNA, 25 bp, Artificial
  probe
  misc_feature (1)..(25): SEQ ID NO: 1341; WAN024DLX; Start 138; Stop 162
acttataggttctggtttggcagct

SEQ ID NO: 291060 - DNA, 25 bp, Artificial
  probe
  misc_feature (1)..(25): SEQ ID NO: 1341; WAN024DLX; Start 122; Stop 146
ttgcaggtggaacagcacttatagg

SEQ ID NO: 291061 - DNA, 25 bp, Artificial
  probe
  misc_feature (1)..(25): SEQ ID NO: 1341; WAN024DLX; Start 10; Stop 34
tttgacattcttgacaatcaatttt

SEQ ID NO: 291062 - DNA, 25 bp, Artificial
  probe
  misc_feature (1)..(25): SEQ ID NO: 1341; WAN024DLX; Start 9; Stop 33
ttttgacattcttgacaatcaattt

SEQ ID NO: 291063 - DNA, 25 bp, Artificial
  probe
  misc_feature (1)..(25): SEQ ID NO: 1342; WAN024BFR; Start 138; Stop 162
cttcctacgctccattaacctactt

SEQ ID NO: 291064 - DNA, 25 bp, Artificial
  probe
  misc_feature (1)..(25): SEQ ID NO: 1342; WAN024BFR; Start 141; Stop 165
cctacgctccattaacctacttgaa

SEQ ID NO: 291065 - DNA, 25 bp, Artificial
  probe
  misc_feature (1)..(25): SEQ ID NO: 1342; WAN024BFR; Start 139; Stop 163
ttcctacgctccattaacctacttg

SEQ ID NO: 291066 - DNA, 25 bp, Artificial
  probe
  misc_feature (1)..(25): SEQ ID NO: 1342; WAN024BFR; Start 140; Stop 164
tcctacgctccattaacctacttga

SEQ ID NO: 291067 - DNA, 25 bp, Artificial
  probe
  misc_feature (1)..(25): SEQ ID NO: 1342; WAN024BFR; Start 142; Stop 166
ctacgctccattaacctacttgaaa

SEQ ID NO: 291068 - DNA, 25 bp, Artificial
  probe
  misc_feature (1)..(25): SEQ ID NO: 1342; WAN024BFR; Start 143; Stop 167
tacgctccattaacctacttgaaac

SEQ ID NO: 291069 - DNA, 25 bp, Artificial
  probe
  misc_feature (1)..(25): SEQ ID NO: 1342; WAN024BFR; Start 618; Stop 642
tgtctctcaccgtgttatctttatg

SEQ ID NO: 291070 - DNA, 25 bp, Artificial
  probe
  misc_feature (1)..(25): SEQ ID NO: 1342; WAN024BFR; Start 617; Stop 641
atgtctctcaccgtgttatctttat

SEQ ID NO: 291071 - DNA, 25 bp, Artificial
  probe
  misc_feature (1)..(25): SEQ ID NO: 1342; WAN024BFR; Start 621; Stop 645
ctctcaccgtgttatctttatggat

SEQ ID NO: 291072 - DNA, 25 bp, Artificial
  probe
  misc_feature (1)..(25): SEQ ID NO: 1342; WAN024BFR; Start 616; Stop 640
gatgtctctcaccgtgttatcttta

SEQ ID NO: 291073 - DNA, 25 bp, Artificial
  probe
  misc_feature (1)..(25): SEQ ID NO: 1342; WAN024BFR; Start 620; Stop 644
tctctcaccgtgttatctttatgga

SEQ ID NO: 291074 - DNA, 25 bp, Artificial
  probe
  misc_feature (1)..(25): SEQ ID NO: 1342; WAN024BFR; Start 619; Stop 643
gtctctcaccgtgttatctttatgg

SEQ ID NO: 291075 - DNA, 25 bp, Artificial
  probe
  misc_feature (1)..(25): SEQ ID NO: 1342; WAN024BFR; Start 9; Stop 33
agcaatccttgaaattaaacacctc

SEQ ID NO: 291076 - DNA, 25 bp, Artificial
  probe
  misc_feature (1)..(25): SEQ ID NO: 1342; WAN024BFR; Start 8; Stop 32
aagcaatccttgaaattaaacacct

SEQ ID NO: 291077 - DNA, 25 bp, Artificial
  probe
  misc_feature (1)..(25): SEQ ID NO: 1342; WAN024BFR; Start 10; Stop 34
gcaatccttgaaattaaacacctca

SEQ ID NO: 291078 - DNA, 25 bp, Artificial
  probe
  misc_feature (1)..(25): SEQ ID NO: 1342; WAN024BFR; Start 259; Stop 283
ttccaatcctttaacctctttgaaa

SEQ ID NO: 291079 - DNA, 25 bp, Artificial
  probe
  misc_feature (1)..(25): SEQ ID NO: 1342; WAN024BFR; Start 258; Stop 282
tttccaatcctttaacctctttgaa

SEQ ID NO: 291080 - DNA, 25 bp, Artificial
  probe
  misc_feature (1)..(25): SEQ ID NO: 1342; WAN024BFR; Start 137; Stop 161
ccttcctacgctccattaacctact

SEQ ID NO: 291081 - DNA, 25 bp, Artificial
  probe
  misc_feature (1)..(25): SEQ ID NO: 1342; WAN024BFR; Start 622; Stop 646
tctcaccgtgttatctttatggata

SEQ ID NO: 291082 - DNA, 25 bp, Artificial
  probe
  misc_feature (1)..(25): SEQ ID NO: 1342; WAN024BFR; Start 136; Stop 160
accttcctacgctccattaacctac

SEQ ID NO: 291083 - DNA, 25 bp, Artificial
  probe
  misc_feature (1)..(25): SEQ ID NO: 1342; WAN024BFR; Start 615; Stop 639
tgatgtctctcaccgtgttatcttt

SEQ ID NO: 291084 - DNA, 25 bp, Artificial
  probe
  misc_feature (1)..(25): SEQ ID NO: 1342; WAN024BFR; Start 169; Stop 193
ccaactgatggacaaatcctttatc

SEQ ID NO: 291085 - DNA, 25 bp, Artificial
  probe
  misc_feature (1)..(25): SEQ ID NO: 1342; WAN024BFR; Start 176; Stop 200
atggacaaatcctttatcatggaca

SEQ ID NO: 291086 - DNA, 25 bp, Artificial
  probe
  misc_feature (1)..(25): SEQ ID NO: 1342; WAN024BFR; Start 175; Stop 199
gatggacaaatcctttatcatggac

SEQ ID NO: 291087 - DNA, 25 bp, Artificial
  probe
  misc_feature (1)..(25): SEQ ID NO: 1342; WAN024BFR; Start 178; Stop 202
ggacaaatcctttatcatggacaaa

SEQ ID NO: 291088 - DNA, 25 bp, Artificial
  probe
  misc_feature (1)..(25): SEQ ID NO: 1342; WAN024BFR; Start 177; Stop 201
tggacaaatcctttatcatggacaa

SEQ ID NO: 291089 - DNA, 25 bp, Artificial
  probe
  misc_feature (1)..(25): SEQ ID NO: 1342; WAN024BFR; Start 568; Stop 592
gaaggcttgaccatgattgtcgtaa

SEQ ID NO: 291090 - DNA, 25 bp, Artificial
  probe
  misc_feature (1)..(25): SEQ ID NO: 1342; WAN024BFR; Start 48; Stop 72
acaaaacgaagtgctaaaagacatt

SEQ ID NO: 291091 - DNA, 25 bp, Artificial
  probe
  misc_feature (1)..(25): SEQ ID NO: 1342; WAN024BFR; Start 43; Stop 67
tatggacaaaacgaagtgctaaaag

SEQ ID NO: 291092 - DNA, 25 bp, Artificial
  probe
  misc_feature (1)..(25): SEQ ID NO: 1342; WAN024BFR; Start 42; Stop 66
ctatggacaaaacgaagtgctaaaa

SEQ ID NO: 291093 - DNA, 25 bp, Artificial
  probe
  misc_feature (1)..(25): SEQ ID NO: 1342; WAN024BFR; Start 569; Stop 593
aaggcttgaccatgattgtcgtaac

SEQ ID NO: 291094 - DNA, 25 bp, Artificial
  probe
  misc_feature (1)..(25): SEQ ID NO: 1342; WAN024BFR; Start 47; Stop 71
gacaaaacgaagtgctaaaagacat

SEQ ID NO: 291095 - DNA, 25 bp, Artificial
  probe
  misc_feature (1)..(25): SEQ ID NO: 1342; WAN024BFR; Start 49; Stop 73
caaaacgaagtgctaaaagacattt

SEQ ID NO: 291096 - DNA, 25 bp, Artificial
  probe
  misc_feature (1)..(25): SEQ ID NO: 1343; WAN024GKN; Start 1023; Stop 1047
ggaatgggtgaggttaaacgatata

SEQ ID NO: 291097 - DNA, 25 bp, Artificial
  probe
  misc_feature (1)..(25): SEQ ID NO: 1343; WAN024GKN; Start 1024; Stop 1048
gaatgggtgaggttaaacgatataa

SEQ ID NO: 291098 - DNA, 25 bp, Artificial
  probe
  misc_feature (1)..(25): SEQ ID NO: 1343; WAN024GKN; Start 1203; Stop 1227
actaagagatggtgatttaatgtgg

SEQ ID NO: 291099 - DNA, 25 bp, Artificial
  probe
  misc_feature (1)..(25): SEQ ID NO: 1343; WAN024GKN; Start 1206; Stop 1230
aagagatggtgatttaatgtggaat

SEQ ID NO: 291100 - DNA, 25 bp, Artificial
  probe
  misc_feature (1)..(25): SEQ ID NO: 1343; WAN024GKN; Start 1204; Stop 1228
ctaagagatggtgatttaatgtgga

SEQ ID NO: 291101 - DNA, 25 bp, Artificial
  probe
  misc_feature (1)..(25): SEQ ID NO: 1343; WAN024GKN; Start 1207; Stop 1231
agagatggtgatttaatgtggaatt

SEQ ID NO: 291102 - DNA, 25 bp, Artificial
  probe
  misc_feature (1)..(25): SEQ ID NO: 1343; WAN024GKN; Start 1205; Stop 1229
taagagatggtgatttaatgtggaa

SEQ ID NO: 291103 - DNA, 25 bp, Artificial
  probe
  misc_feature (1)..(25): SEQ ID NO: 1343; WAN024GKN; Start 1022; Stop 1046
gggaatgggtgaggttaaacgatat

SEQ ID NO: 291104 - DNA, 25 bp, Artificial
  probe
  misc_feature (1)..(25): SEQ ID NO: 1343; WAN024GKN; Start 1025; Stop 1049
aatgggtgaggttaaacgatataac

SEQ ID NO: 291105 - DNA, 25 bp, Artificial
  probe
  misc_feature (1)..(25): SEQ ID NO: 1343; WAN024GKN; Start 1193; Stop 1217
aagaaagattactaagagatggtga

SEQ ID NO: 291106 - DNA, 25 bp, Artificial
  probe
  misc_feature (1)..(25): SEQ ID NO: 1343; WAN024GKN; Start 1187; Stop 1211
accagaaagaaagattactaagaga

SEQ ID NO: 291107 - DNA, 25 bp, Artificial
  probe
  misc_feature (1)..(25): SEQ ID NO: 1343; WAN024GKN; Start 1194; Stop 1218
agaaagattactaagagatggtgat

SEQ ID NO: 291108 - DNA, 25 bp, Artificial
  probe
  misc_feature (1)..(25): SEQ ID NO: 1343; WAN024GKN; Start 257; Stop 281
atacttgggagtgggtgaggataaa

SEQ ID NO: 291109 - DNA, 25 bp, Artificial
  probe
  misc_feature (1)..(25): SEQ ID NO: 1343; WAN024GKN; Start 1527; Stop 1551
cgcccatattgacgcactaattcta

SEQ ID NO: 291110 - DNA, 25 bp, Artificial
  probe
  misc_feature (1)..(25): SEQ ID NO: 1343; WAN024GKN; Start 256; Stop 280
gatacttgggagtgggtgaggataa

SEQ ID NO: 291111 - DNA, 25 bp, Artificial
  probe
  misc_feature (1)..(25): SEQ ID NO: 1343; WAN024GKN; Start 1192; Stop 1216
aaagaaagattactaagagatggtg

SEQ ID NO: 291112 - DNA, 25 bp, Artificial
  probe
  misc_feature (1)..(25): SEQ ID NO: 1343; WAN024GKN; Start 1021; Stop 1045
tgggaatgggtgaggttaaacgata

SEQ ID NO: 291113 - DNA, 25 bp, Artificial
  probe
  misc_feature (1)..(25): SEQ ID NO: 1343; WAN024GKN; Start 1195; Stop 1219
gaaagattactaagagatggtgatt

SEQ ID NO: 291114 - DNA, 25 bp, Artificial
  probe
  misc_feature (1)..(25): SEQ ID NO: 1343; WAN024GKN; Start 1251; Stop 1275
aggacgattagctatttaccatgaa

SEQ ID NO: 291115 - DNA, 25 bp, Artificial
  probe
  misc_feature (1)..(25): SEQ ID NO: 1343; WAN024GKN; Start 1202; Stop 1226
tactaagagatggtgatttaatgtg

SEQ ID NO: 291116 - DNA, 25 bp, Artificial
  probe
  misc_feature (1)..(25): SEQ ID NO: 1343; WAN024GKN; Start 1191; Stop 1215
gaaagaaagattactaagagatggt

SEQ ID NO: 291117 - DNA, 25 bp, Artificial
  probe
  misc_feature (1)..(25): SEQ ID NO: 1343; WAN024GKN; Start 1252; Stop 1276
ggacgattagctatttaccatgaaa

SEQ ID NO: 291118 - DNA, 25 bp, Artificial
  probe
  misc_feature (1)..(25): SEQ ID NO: 1343; WAN024GKN; Start 265; Stop 289
gagtgggtgaggataaaatcaattt

SEQ ID NO: 291119 - DNA, 25 bp, Artificial
  probe
  misc_feature (1)..(25): SEQ ID NO: 1343; WAN024GKN; Start 264; Stop 288
ggagtgggtgaggataaaatcaatt

SEQ ID NO: 291120 - DNA, 25 bp, Artificial
  probe
  misc_feature (1)..(25): SEQ ID NO: 1343; WAN024GKN; Start 1250; Stop 1274
taggacgattagctatttaccatga

SEQ ID NO: 291121 - DNA, 25 bp, Artificial
  probe
  misc_feature (1)..(25): SEQ ID NO: 1343; WAN024GKN; Start 1525; Stop 1549
ttcgcccatattgacgcactaattc

SEQ ID NO: 291122 - DNA, 25 bp, Artificial
  probe
  misc_feature (1)..(25): SEQ ID NO: 1343; WAN024GKN; Start 1208; Stop 1232
gagatggtgatttaatgtggaattc

SEQ ID NO: 291123 - DNA, 25 bp, Artificial
  probe
  misc_feature (1)..(25): SEQ ID NO: 1343; WAN024GKN; Start 1209; Stop 1233
agatggtgatttaatgtggaattca

SEQ ID NO: 291124 - DNA, 25 bp, Artificial
  probe
  misc_feature (1)..(25): SEQ ID NO: 1343; WAN024GKN; Start 1190; Stop 1214
agaaagaaagattactaagagatgg

SEQ ID NO: 291125 - DNA, 25 bp, Artificial
  probe
  misc_feature (1)..(25): SEQ ID NO: 1343; WAN024GKN; Start 1188; Stop 1212
ccagaaagaaagattactaagagat

SEQ ID NO: 291126 - DNA, 25 bp, Artificial
  probe
  misc_feature (1)..(25): SEQ ID NO: 1343; WAN024GKN; Start 1249; Stop 1273
ttaggacgattagctatttaccatg

SEQ ID NO: 291127 - DNA, 25 bp, Artificial
  probe
  misc_feature (1)..(25): SEQ ID NO: 1343; WAN024GKN; Start 1196; Stop 1220
aaagattactaagagatggtgattt

SEQ ID NO: 291128 - DNA, 25 bp, Artificial
  probe
  misc_feature (1)..(25): SEQ ID NO: 1343; WAN024GKN; Start 266; Stop 290
agtgggtgaggataaaatcaattta

SEQ ID NO: 291129 - DNA, 25 bp, Artificial
  probe
  misc_feature (1)..(25): SEQ ID NO: 1345; WAN024CFV; Start 139; Stop 163
aatacggtagagacttatgttgctt

SEQ ID NO: 291130 - DNA, 25 bp, Artificial
  probe
  misc_feature (1)..(25): SEQ ID NO: 1345; WAN024CFV; Start 140; Stop 164
atacggtagagacttatgttgcttg

SEQ ID NO: 291131 - DNA, 25 bp, Artificial
  probe
  misc_feature (1)..(25): SEQ ID NO: 1345; WAN024CFV; Start 1024; Stop 1048
gagagtatggagttggatgctattc

SEQ ID NO: 291132 - DNA, 25 bp, Artificial
  probe
  misc_feature (1)..(25): SEQ ID NO: 1345; WAN024CFV; Start 144; Stop 168
ggtagagacttatgttgcttggaat

SEQ ID NO: 291133 - DNA, 25 bp, Artificial
  probe
  misc_feature (1)..(25): SEQ ID NO: 1345; WAN024CFV; Start 1023; Stop 1047
agagagtatggagttggatgctatt

SEQ ID NO: 291134 - DNA, 25 bp, Artificial
  probe
  misc_feature (1)..(25): SEQ ID NO: 1345; WAN024CFV; Start 1022; Stop 1046
aagagagtatggagttggatgctat

SEQ ID NO: 291135 - DNA, 25 bp, Artificial
  probe
  misc_feature (1)..(25): SEQ ID NO: 1345; WAN024CFV; Start 138; Stop 162
taatacggtagagacttatgttgct

SEQ ID NO: 291136 - DNA, 25 bp, Artificial
  probe
  misc_feature (1)..(25): SEQ ID NO: 1345; WAN024CFV; Start 96; Stop 120
ggattggtatcattcgctctataac

SEQ ID NO: 291137 - DNA, 25 bp, Artificial
  probe
  misc_feature (1)..(25): SEQ ID NO: 1345; WAN024CFV; Start 95; Stop 119
aggattggtatcattcgctctataa

SEQ ID NO: 291138 - DNA, 25 bp, Artificial
  probe
  misc_feature (1)..(25): SEQ ID NO: 1345; WAN024CFV; Start 112; Stop 136
ctctataacttgaaggctcttggtt

SEQ ID NO: 291139 - DNA, 25 bp, Artificial
  probe
  misc_feature (1)..(25): SEQ ID NO: 1345; WAN024CFV; Start 99; Stop 123
ttggtatcattcgctctataacttg

SEQ ID NO: 291140 - DNA, 25 bp, Artificial
  probe
  misc_feature (1)..(25): SEQ ID NO: 1345; WAN024CFV; Start 145; Stop 169
gtagagacttatgttgcttggaatt

SEQ ID NO: 291141 - DNA, 25 bp, Artificial
  probe
  misc_feature (1)..(25): SEQ ID NO: 1345; WAN024CFV; Start 137; Stop 161
ttaatacggtagagacttatgttgc

SEQ ID NO: 291142 - DNA, 25 bp, Artificial
  probe
  misc_feature (1)..(25): SEQ ID NO: 1345; WAN024CFV; Start 100; Stop 124
tggtatcattcgctctataacttga

SEQ ID NO: 291143 - DNA, 25 bp, Artificial
  probe
  misc_feature (1)..(25): SEQ ID NO: 1345; WAN024CFV; Start 97; Stop 121
gattggtatcattcgctctataact

SEQ ID NO: 291144 - DNA, 25 bp, Artificial
  probe
  misc_feature (1)..(25): SEQ ID NO: 1345; WAN024CFV; Start 94; Stop 118
gaggattggtatcattcgctctata

SEQ ID NO: 291145 - DNA, 25 bp, Artificial
  probe
  misc_feature (1)..(25): SEQ ID NO: 1345; WAN024CFV; Start 104; Stop 128
atcattcgctctataacttgaaggc

SEQ ID NO: 291146 - DNA, 25 bp, Artificial
  probe
  misc_feature (1)..(25): SEQ ID NO: 1345; WAN024CFV; Start 107; Stop 131
attcgctctataacttgaaggctct

SEQ ID NO: 291147 - DNA, 25 bp, Artificial
  probe
  misc_feature (1)..(25): SEQ ID NO: 1345; WAN024CFV; Start 106; Stop 130
cattcgctctataacttgaaggctc

SEQ ID NO: 291148 - DNA, 25 bp, Artificial
  probe
  misc_feature (1)..(25): SEQ ID NO: 1345; WAN024CFV; Start 108; Stop 132
ttcgctctataacttgaaggctctt

SEQ ID NO: 291149 - DNA, 25 bp, Artificial
  probe
  misc_feature (1)..(25): SEQ ID NO: 1345; WAN024CFV; Start 98; Stop 122
attggtatcattcgctctataactt

SEQ ID NO: 291150 - DNA, 25 bp, Artificial
  probe
  misc_feature (1)..(25): SEQ ID NO: 1345; WAN024CFV; Start 141; Stop 165
tacggtagagacttatgttgcttgg

SEQ ID NO: 291151 - DNA, 25 bp, Artificial
  probe
  misc_feature (1)..(25): SEQ ID NO: 1345; WAN024CFV; Start 101; Stop 125
ggtatcattcgctctataacttgaa

SEQ ID NO: 291152 - DNA, 25 bp, Artificial
  probe
  misc_feature (1)..(25): SEQ ID NO: 1345; WAN024CFV; Start 103; Stop 127
tatcattcgctctataacttgaagg

SEQ ID NO: 291153 - DNA, 25 bp, Artificial
  probe
  misc_feature (1)..(25): SEQ ID NO: 1345; WAN024CFV; Start 105; Stop 129
tcattcgctctataacttgaaggct

SEQ ID NO: 291154 - DNA, 25 bp, Artificial
  probe
  misc_feature (1)..(25): SEQ ID NO: 1345; WAN024CFV; Start 111; Stop 135
gctctataacttgaaggctcttggt

SEQ ID NO: 291155 - DNA, 25 bp, Artificial
  probe
  misc_feature (1)..(25): SEQ ID NO: 1345; WAN024CFV; Start 964; Stop 988
gtcaagaagatgatggcaacacatt

SEQ ID NO: 291156 - DNA, 25 bp, Artificial
  probe
  misc_feature (1)..(25): SEQ ID NO: 1345; WAN024CFV; Start 143; Stop 167
cggtagagacttatgttgcttggaa

SEQ ID NO: 291157 - DNA, 25 bp, Artificial
  probe
  misc_feature (1)..(25): SEQ ID NO: 1345; WAN024CFV; Start 1082; Stop 1106
tagatagcttgtcaagtcctgtaga

SEQ ID NO: 291158 - DNA, 25 bp, Artificial
  probe
  misc_feature (1)..(25): SEQ ID NO: 1345; WAN024CFV; Start 1557; Stop 1581
agatacttacctagacttgtctgag

SEQ ID NO: 291159 - DNA, 25 bp, Artificial
  probe
  misc_feature (1)..(25): SEQ ID NO: 1345; WAN024CFV; Start 1081; Stop 1105
ttagatagcttgtcaagtcctgtag

SEQ ID NO: 291160 - DNA, 25 bp, Artificial
  probe
  misc_feature (1)..(25): SEQ ID NO: 1345; WAN024CFV; Start 1080; Stop 1104
cttagatagcttgtcaagtcctgta

SEQ ID NO: 291161 - DNA, 25 bp, Artificial
  probe
  misc_feature (1)..(25): SEQ ID NO: 1345; WAN024CFV; Start 109; Stop 133
tcgctctataacttgaaggctcttg

SEQ ID NO: 291162 - DNA, 25 bp, Artificial
  probe
  misc_feature (1)..(25): SEQ ID NO: 1346; WAN024CE5; Start 5; Stop 29
cacggttaaagtctaaatcaacgag

SEQ ID NO: 291163 - DNA, 25 bp, Artificial
  probe
  misc_feature (1)..(25): SEQ ID NO: 1346; WAN024CE5; Start 4; Stop 28
acacggttaaagtctaaatcaacga

SEQ ID NO: 291164 - DNA, 25 bp, Artificial
  probe
  misc_feature (1)..(25): SEQ ID NO: 1346; WAN024CE5; Start 56; Stop 80
aaactttacgggcaagactagatac

SEQ ID NO: 291165 - DNA, 25 bp, Artificial
  probe
  misc_feature (1)..(25): SEQ ID NO: 1346; WAN024CE5; Start 65; Stop 89
gggcaagactagatacaacttcaaa

SEQ ID NO: 291166 - DNA, 25 bp, Artificial
  probe
  misc_feature (1)..(25): SEQ ID NO: 1346; WAN024CE5; Start 110; Stop 134
attctgtaggatcaaagaccaagag

SEQ ID NO: 291167 - DNA, 25 bp, Artificial
  probe
  misc_feature (1)..(25): SEQ ID NO: 1346; WAN024CE5; Start 109; Stop 133
aattctgtaggatcaaagaccaaga

SEQ ID NO: 291168 - DNA, 25 bp, Artificial
  probe
  misc_feature (1)..(25): SEQ ID NO: 1346; WAN024CE5; Start 59; Stop 83
ctttacgggcaagactagatacaac

SEQ ID NO: 291169 - DNA, 25 bp, Artificial
  probe
  misc_feature (1)..(25): SEQ ID NO: 1346; WAN024CE5; Start 60; Stop 84
tttacgggcaagactagatacaact

SEQ ID NO: 291170 - DNA, 25 bp, Artificial
  probe
  misc_feature (1)..(25): SEQ ID NO: 1346; WAN024CE5; Start 6; Stop 30
acggttaaagtctaaatcaacgagc

SEQ ID NO: 291171 - DNA, 25 bp, Artificial
  probe
  misc_feature (1)..(25): SEQ ID NO: 1346; WAN024CE5; Start 173; Stop 197
caaatccagcatcattagagacagc

SEQ ID NO: 291172 - DNA, 25 bp, Artificial
  probe
  misc_feature (1)..(25): SEQ ID NO: 1346; WAN024CE5; Start 172; Stop 196
gcaaatccagcatcattagagacag

SEQ ID NO: 291173 - DNA, 25 bp, Artificial
  probe
  misc_feature (1)..(25): SEQ ID NO: 1346; WAN024CE5; Start 111; Stop 135
ttctgtaggatcaaagaccaagaga

SEQ ID NO: 291174 - DNA, 25 bp, Artificial
  probe
  misc_feature (1)..(25): SEQ ID NO: 1346; WAN024CE5; Start 107; Stop 131
caaattctgtaggatcaaagaccaa

SEQ ID NO: 291175 - DNA, 25 bp, Artificial
  probe
  misc_feature (1)..(25): SEQ ID NO: 1346; WAN024CE5; Start 2; Stop 26
tgacacggttaaagtctaaatcaac

SEQ ID NO: 291176 - DNA, 25 bp, Artificial
  probe
  misc_feature (1)..(25): SEQ ID NO: 1346; WAN024CE5; Start 108; Stop 132
aaattctgtaggatcaaagaccaag

SEQ ID NO: 291177 - DNA, 25 bp, Artificial
  probe
  misc_feature (1)..(25): SEQ ID NO: 1346; WAN024CE5; Start 105; Stop 129
agcaaattctgtaggatcaaagacc

SEQ ID NO: 291178 - DNA, 25 bp, Artificial
  probe
  misc_feature (1)..(25): SEQ ID NO: 1346; WAN024CE5; Start 61; Stop 85
ttacgggcaagactagatacaactt

SEQ ID NO: 291179 - DNA, 25 bp, Artificial
  probe
  misc_feature (1)..(25): SEQ ID NO: 1346; WAN024CE5; Start 58; Stop 82
actttacgggcaagactagatacaa

SEQ ID NO: 291180 - DNA, 25 bp, Artificial
  probe
  misc_feature (1)..(25): SEQ ID NO: 1346; WAN024CE5; Start 57; Stop 81
aactttacgggcaagactagataca

SEQ ID NO: 291181 - DNA, 25 bp, Artificial
  probe
  misc_feature (1)..(25): SEQ ID NO: 1346; WAN024CE5; Start 3; Stop 27
gacacggttaaagtctaaatcaacg

SEQ ID NO: 291182 - DNA, 25 bp, Artificial
  probe
  misc_feature (1)..(25): SEQ ID NO: 1346; WAN024CE5; Start 112; Stop 136
tctgtaggatcaaagaccaagagag

SEQ ID NO: 291183 - DNA, 25 bp, Artificial
  probe
  misc_feature (1)..(25): SEQ ID NO: 1346; WAN024CE5; Start 106; Stop 130
gcaaattctgtaggatcaaagacca

SEQ ID NO: 291184 - DNA, 25 bp, Artificial
  probe
  misc_feature (1)..(25): SEQ ID NO: 1346; WAN024CE5; Start 104; Stop 128
cagcaaattctgtaggatcaaagac

SEQ ID NO: 291185 - DNA, 25 bp, Artificial
  probe
  misc_feature (1)..(25): SEQ ID NO: 1346; WAN024CE5; Start 62; Stop 86
tacgggcaagactagatacaacttc

SEQ ID NO: 291186 - DNA, 25 bp, Artificial
  probe
  misc_feature (1)..(25): SEQ ID NO: 1346; WAN024CE5; Start 1; Stop 25
atgacacggttaaagtctaaatcaa

SEQ ID NO: 291187 - DNA, 25 bp, Artificial
  probe
  misc_feature (1)..(25): SEQ ID NO: 1346; WAN024CE5; Start 154; Stop 178
gtaaagctagaagtcatggcaaatc

SEQ ID NO: 291188 - DNA, 25 bp, Artificial
  probe
  misc_feature (1)..(25): SEQ ID NO: 1346; WAN024CE5; Start 155; Stop 179
taaagctagaagtcatggcaaatcc

SEQ ID NO: 291189 - DNA, 25 bp, Artificial
  probe
  misc_feature (1)..(25): SEQ ID NO: 1346; WAN024CE5; Start 143; Stop 167
acatcatagacgtaaagctagaagt

SEQ ID NO: 291190 - DNA, 25 bp, Artificial
  probe
  misc_feature (1)..(25): SEQ ID NO: 1346; WAN024CE5; Start 140; Stop 164
tcaacatcatagacgtaaagctaga

SEQ ID NO: 291191 - DNA, 25 bp, Artificial
  probe
  misc_feature (1)..(25): SEQ ID NO: 1346; WAN024CE5; Start 64; Stop 88
cgggcaagactagatacaacttcaa

SEQ ID NO: 291192 - DNA, 25 bp, Artificial
  probe
  misc_feature (1)..(25): SEQ ID NO: 1346; WAN024CE5; Start 153; Stop 177
cgtaaagctagaagtcatggcaaat

SEQ ID NO: 291193 - DNA, 25 bp, Artificial
  probe
  misc_feature (1)..(25): SEQ ID NO: 1346; WAN024CE5; Start 7; Stop 31
cggttaaagtctaaatcaacgagct

SEQ ID NO: 291194 - DNA, 25 bp, Artificial
  probe
  misc_feature (1)..(25): SEQ ID NO: 1346; WAN024CE5; Start 141; Stop 165
caacatcatagacgtaaagctagaa

SEQ ID NO: 291195 - DNA, 25 bp, Artificial
  probe
  misc_feature (1)..(25): SEQ ID NO: 1347; WAN024FEV; Start 117; Stop 141
gactgtctggctaatctatctcttg

SEQ ID NO: 291196 - DNA, 25 bp, Artificial
  probe
  misc_feature (1)..(25): SEQ ID NO: 1347; WAN024FEV; Start 115; Stop 139
atgactgtctggctaatctatctct

SEQ ID NO: 291197 - DNA, 25 bp, Artificial
  probe
  misc_feature (1)..(25): SEQ ID NO: 1347; WAN024FEV; Start 116; Stop 140
tgactgtctggctaatctatctctt

SEQ ID NO: 291198 - DNA, 25 bp, Artificial
  probe
  misc_feature (1)..(25): SEQ ID NO: 1347; WAN024FEV; Start 122; Stop 146
tctggctaatctatctcttgctcaa

SEQ ID NO: 291199 - DNA, 25 bp, Artificial
  probe
  misc_feature (1)..(25): SEQ ID NO: 1347; WAN024FEV; Start 371; Stop 395
tggtaatctctattggaatggctag

SEQ ID NO: 291200 - DNA, 25 bp, Artificial
  probe
  misc_feature (1)..(25): SEQ ID NO: 1347; WAN024FEV; Start 121; Stop 145
gtctggctaatctatctcttgctca

SEQ ID NO: 291201 - DNA, 25 bp, Artificial
  probe
  misc_feature (1)..(25): SEQ ID NO: 1347; WAN024FEV; Start 120; Stop 144
tgtctggctaatctatctcttgctc

SEQ ID NO: 291202 - DNA, 25 bp, Artificial
  probe
  misc_feature (1)..(25): SEQ ID NO: 1347; WAN024FEV; Start 119; Stop 143
ctgtctggctaatctatctcttgct

SEQ ID NO: 291203 - DNA, 25 bp, Artificial
  probe
  misc_feature (1)..(25): SEQ ID NO: 1347; WAN024FEV; Start 114; Stop 138
catgactgtctggctaatctatctc

SEQ ID NO: 291204 - DNA, 25 bp, Artificial
  probe
  misc_feature (1)..(25): SEQ ID NO: 1347; WAN024FEV; Start 118; Stop 142
actgtctggctaatctatctcttgc

SEQ ID NO: 291205 - DNA, 25 bp, Artificial
  probe
  misc_feature (1)..(25): SEQ ID NO: 1347; WAN024FEV; Start 128; Stop 152
taatctatctcttgctcaaggaacc

SEQ ID NO: 291206 - DNA, 25 bp, Artificial
  probe
  misc_feature (1)..(25): SEQ ID NO: 1347; WAN024FEV; Start 126; Stop 150
gctaatctatctcttgctcaaggaa

SEQ ID NO: 291207 - DNA, 25 bp, Artificial
  probe
  misc_feature (1)..(25): SEQ ID NO: 1347; WAN024FEV; Start 123; Stop 147
ctggctaatctatctcttgctcaag

SEQ ID NO: 291208 - DNA, 25 bp, Artificial
  probe
  misc_feature (1)..(25): SEQ ID NO: 1347; WAN024FEV; Start 127; Stop 151
ctaatctatctcttgctcaaggaac

SEQ ID NO: 291209 - DNA, 25 bp, Artificial
  probe
  misc_feature (1)..(25): SEQ ID NO: 1347; WAN024FEV; Start 125; Stop 149
ggctaatctatctcttgctcaagga

SEQ ID NO: 291210 - DNA, 25 bp, Artificial
  probe
  misc_feature (1)..(25): SEQ ID NO: 1347; WAN024FEV; Start 113; Stop 137
gcatgactgtctggctaatctatct

SEQ ID NO: 291211 - DNA, 25 bp, Artificial
  probe
  misc_feature (1)..(25): SEQ ID NO: 1347; WAN024FEV; Start 124; Stop 148
tggctaatctatctcttgctcaagg

SEQ ID NO: 291212 - DNA, 25 bp, Artificial
  probe
  misc_feature (1)..(25): SEQ ID NO: 1347; WAN024FEV; Start 129; Stop 153
aatctatctcttgctcaaggaaccg

SEQ ID NO: 291213 - DNA, 25 bp, Artificial
  probe
  misc_feature (1)..(25): SEQ ID NO: 1347; WAN024FEV; Start 320; Stop 344
gggactataataaagcactggcaag

SEQ ID NO: 291214 - DNA, 25 bp, Artificial
  probe
  misc_feature (1)..(25): SEQ ID NO: 1347; WAN024FEV; Start 321; Stop 345
ggactataataaagcactggcaagt

SEQ ID NO: 291215 - DNA, 25 bp, Artificial
  probe
  misc_feature (1)..(25): SEQ ID NO: 1347; WAN024FEV; Start 112; Stop 136
ggcatgactgtctggctaatctatc

SEQ ID NO: 291216 - DNA, 25 bp, Artificial
  probe
  misc_feature (1)..(25): SEQ ID NO: 1347; WAN024FEV; Start 186; Stop 210
cattattggttcttgtgtcagccag

SEQ ID NO: 291217 - DNA, 25 bp, Artificial
  probe
  misc_feature (1)..(25): SEQ ID NO: 1347; WAN024FEV; Start 182; Stop 206
cagccattattggttcttgtgtcag

SEQ ID NO: 291218 - DNA, 25 bp, Artificial
  probe
  misc_feature (1)..(25): SEQ ID NO: 1347; WAN024FEV; Start 189; Stop 213
tattggttcttgtgtcagccagatt

SEQ ID NO: 291219 - DNA, 25 bp, Artificial
  probe
  misc_feature (1)..(25): SEQ ID NO: 1347; WAN024FEV; Start 188; Stop 212
ttattggttcttgtgtcagccagat

SEQ ID NO: 291220 - DNA, 25 bp, Artificial
  probe
  misc_feature (1)..(25): SEQ ID NO: 1347; WAN024FEV; Start 187; Stop 211
attattggttcttgtgtcagccaga

SEQ ID NO: 291221 - DNA, 25 bp, Artificial
  probe
  misc_feature (1)..(25): SEQ ID NO: 1347; WAN024FEV; Start 130; Stop 154
atctatctcttgctcaaggaaccga

SEQ ID NO: 291222 - DNA, 25 bp, Artificial
  probe
  misc_feature (1)..(25): SEQ ID NO: 1347; WAN024FEV; Start 175; Stop 199
ttcattgcagccattattggttctt

SEQ ID NO: 291223 - DNA, 25 bp, Artificial
  probe
  misc_feature (1)..(25): SEQ ID NO: 1347; WAN024FEV; Start 174; Stop 198
cttcattgcagccattattggttct

SEQ ID NO: 291224 - DNA, 25 bp, Artificial
  probe
  misc_feature (1)..(25): SEQ ID NO: 1347; WAN024FEV; Start 392; Stop 416
ctagcggaacagtgattctcagact

SEQ ID NO: 291225 - DNA, 25 bp, Artificial
  probe
  misc_feature (1)..(25): SEQ ID NO: 1347; WAN024FEV; Start 170; Stop 194
ctaccttcattgcagccattattgg

SEQ ID NO: 291226 - DNA, 25 bp, Artificial
  probe
  misc_feature (1)..(25): SEQ ID NO: 1347; WAN024FEV; Start 176; Stop 200
tcattgcagccattattggttcttg

SEQ ID NO: 291227 - DNA, 25 bp, Artificial
  probe
  misc_feature (1)..(25): SEQ ID NO: 1347; WAN024FEV; Start 185; Stop 209
ccattattggttcttgtgtcagcca

SEQ ID NO: 291228 - DNA, 25 bp, Artificial
  probe
  misc_feature (1)..(25): SEQ ID NO: 1348; WAN024CSM; Start 325; Stop 349
ttattgacggtggaacttgttagaa

SEQ ID NO: 291229 - DNA, 25 bp, Artificial
  probe
  misc_feature (1)..(25): SEQ ID NO: 1348; WAN024CSM; Start 130; Stop 154
atagacgacttgttgaatatgaagc

SEQ ID NO: 291230 - DNA, 25 bp, Artificial
  probe
  misc_feature (1)..(25): SEQ ID NO: 1348; WAN024CSM; Start 131; Stop 155
tagacgacttgttgaatatgaagcg

SEQ ID NO: 291231 - DNA, 25 bp, Artificial
  probe
  misc_feature (1)..(25): SEQ ID NO: 1348; WAN024CSM; Start 177; Stop 201
gtcaccgttacagattcaagaattg

SEQ ID NO: 291232 - DNA, 25 bp, Artificial
  probe
  misc_feature (1)..(25): SEQ ID NO: 1348; WAN024CSM; Start 174; Stop 198
attgtcaccgttacagattcaagaa

SEQ ID NO: 291233 - DNA, 25 bp, Artificial
  probe
  misc_feature (1)..(25): SEQ ID NO: 1348; WAN024CSM; Start 14; Stop 38
tagacaacatgacacaagcagaatt

SEQ ID NO: 291234 - DNA, 25 bp, Artificial
  probe
  misc_feature (1)..(25): SEQ ID NO: 1348; WAN024CSM; Start 13; Stop 37
ttagacaacatgacacaagcagaat

SEQ ID NO: 291235 - DNA, 25 bp, Artificial
  probe
  misc_feature (1)..(25): SEQ ID NO: 1348; WAN024CSM; Start 176; Stop 200
tgtcaccgttacagattcaagaatt

SEQ ID NO: 291236 - DNA, 25 bp, Artificial
  probe
  misc_feature (1)..(25): SEQ ID NO: 1348; WAN024CSM; Start 175; Stop 199
ttgtcaccgttacagattcaagaat

SEQ ID NO: 291237 - DNA, 25 bp, Artificial
  probe
  misc_feature (1)..(25): SEQ ID NO: 1348; WAN024CSM; Start 173; Stop 197
cattgtcaccgttacagattcaaga

SEQ ID NO: 291238 - DNA, 25 bp, Artificial
  probe
  misc_feature (1)..(25): SEQ ID NO: 1348; WAN024CSM; Start 178; Stop 202
tcaccgttacagattcaagaattgc

SEQ ID NO: 291239 - DNA, 25 bp, Artificial
  probe
  misc_feature (1)..(25): SEQ ID NO: 1348; WAN024CSM; Start 133; Stop 157
gacgacttgttgaatatgaagcgag

SEQ ID NO: 291240 - DNA, 25 bp, Artificial
  probe
  misc_feature (1)..(25): SEQ ID NO: 1348; WAN024CSM; Start 132; Stop 156
agacgacttgttgaatatgaagcga

SEQ ID NO: 291241 - DNA, 25 bp, Artificial
  probe
  misc_feature (1)..(25): SEQ ID NO: 1348; WAN024CSM; Start 129; Stop 153
aatagacgacttgttgaatatgaag

SEQ ID NO: 291242 - DNA, 25 bp, Artificial
  probe
  misc_feature (1)..(25): SEQ ID NO: 1348; WAN024CSM; Start 328; Stop 352
ttgacggtggaacttgttagaaata

SEQ ID NO: 291243 - DNA, 25 bp, Artificial
  probe
  misc_feature (1)..(25): SEQ ID NO: 1348; WAN024CSM; Start 326; Stop 350
tattgacggtggaacttgttagaaa

SEQ ID NO: 291244 - DNA, 25 bp, Artificial
  probe
  misc_feature (1)..(25): SEQ ID NO: 1348; WAN024CSM; Start 324; Stop 348
tttattgacggtggaacttgttaga

SEQ ID NO: 291245 - DNA, 25 bp, Artificial
  probe
  misc_feature (1)..(25): SEQ ID NO: 1348; WAN024CSM; Start 323; Stop 347
atttattgacggtggaacttgttag

SEQ ID NO: 291246 - DNA, 25 bp, Artificial
  probe
  misc_feature (1)..(25): SEQ ID NO: 1348; WAN024CSM; Start 123; Stop 147
tgtggaaatagacgacttgttgaat

SEQ ID NO: 291247 - DNA, 25 bp, Artificial
  probe
  misc_feature (1)..(25): SEQ ID NO: 1348; WAN024CSM; Start 124; Stop 148
gtggaaatagacgacttgttgaata

SEQ ID NO: 291248 - DNA, 25 bp, Artificial
  probe
  misc_feature (1)..(25): SEQ ID NO: 1348; WAN024CSM; Start 34; Stop 58
gaatttgatgaggtaatggctgaaa

SEQ ID NO: 291249 - DNA, 25 bp, Artificial
  probe
  misc_feature (1)..(25): SEQ ID NO: 1348; WAN024CSM; Start 329; Stop 353
tgacggtggaacttgttagaaatag

SEQ ID NO: 291250 - DNA, 25 bp, Artificial
  probe
  misc_feature (1)..(25): SEQ ID NO: 1348; WAN024CSM; Start 33; Stop 57
agaatttgatgaggtaatggctgaa

SEQ ID NO: 291251 - DNA, 25 bp, Artificial
  probe
  misc_feature (1)..(25): SEQ ID NO: 1348; WAN024CSM; Start 327; Stop 351
attgacggtggaacttgttagaaat

SEQ ID NO: 291252 - DNA, 25 bp, Artificial
  probe
  misc_feature (1)..(25): SEQ ID NO: 1348; WAN024CSM; Start 182; Stop 206
cgttacagattcaagaattgcagta

SEQ ID NO: 291253 - DNA, 25 bp, Artificial
  probe
  misc_feature (1)..(25): SEQ ID NO: 1348; WAN024CSM; Start 322; Stop 346
aatttattgacggtggaacttgtta

SEQ ID NO: 291254 - DNA, 25 bp, Artificial
  probe
  misc_feature (1)..(25): SEQ ID NO: 1348; WAN024CSM; Start 37; Stop 61
tttgatgaggtaatggctgaaatcc

SEQ ID NO: 291255 - DNA, 25 bp, Artificial
  probe
  misc_feature (1)..(25): SEQ ID NO: 1348; WAN024CSM; Start 27; Stop 51
acaagcagaatttgatgaggtaatg

SEQ ID NO: 291256 - DNA, 25 bp, Artificial
  probe
  misc_feature (1)..(25): SEQ ID NO: 1348; WAN024CSM; Start 26; Stop 50
cacaagcagaatttgatgaggtaat

SEQ ID NO: 291257 - DNA, 25 bp, Artificial
  probe
  misc_feature (1)..(25): SEQ ID NO: 1348; WAN024CSM; Start 122; Stop 146
gtgtggaaatagacgacttgttgaa

SEQ ID NO: 291258 - DNA, 25 bp, Artificial
  probe
  misc_feature (1)..(25): SEQ ID NO: 1348; WAN024CSM; Start 28; Stop 52
caagcagaatttgatgaggtaatgg

SEQ ID NO: 291259 - DNA, 25 bp, Artificial
  probe
  misc_feature (1)..(25): SEQ ID NO: 1348; WAN024CSM; Start 303; Stop 327
taaccgttggaaacaggacaattta

SEQ ID NO: 291260 - DNA, 25 bp, Artificial
  probe
  misc_feature (1)..(25): SEQ ID NO: 1348; WAN024CSM; Start 334; Stop 358
gtggaacttgttagaaatagcaggg

SEQ ID NO: 291261 - DNA, 25 bp, Artificial
  probe
  misc_feature (1)..(25): SEQ ID NO: 1349; WAN024DPR; Start 175; Stop 199
agtttatcatctataatcaggcaga

SEQ ID NO: 291262 - DNA, 25 bp, Artificial
  probe
  misc_feature (1)..(25): SEQ ID NO: 1349; WAN024DPR; Start 97; Stop 121
tttcttcaatctctttcaacactta

SEQ ID NO: 291263 - DNA, 25 bp, Artificial
  probe
  misc_feature (1)..(25): SEQ ID NO: 1349; WAN024DPR; Start 92; Stop 116
gccattttcttcaatctctttcaac

SEQ ID NO: 291264 - DNA, 25 bp, Artificial
  probe
  misc_feature (1)..(25): SEQ ID NO: 1349; WAN024DPR; Start 91; Stop 115
agccattttcttcaatctctttcaa

SEQ ID NO: 291265 - DNA, 25 bp, Artificial
  probe
  misc_feature (1)..(25): SEQ ID NO: 1349; WAN024DPR; Start 98; Stop 122
ttcttcaatctctttcaacacttat

SEQ ID NO: 291266 - DNA, 25 bp, Artificial
  probe
  misc_feature (1)..(25): SEQ ID NO: 1349; WAN024DPR; Start 90; Stop 114
aagccattttcttcaatctctttca

SEQ ID NO: 291267 - DNA, 25 bp, Artificial
  probe
  misc_feature (1)..(25): SEQ ID NO: 1349; WAN024DPR; Start 139; Stop 163
agaactataaatatcacagtccaga

SEQ ID NO: 291268 - DNA, 25 bp, Artificial
  probe
  misc_feature (1)..(25): SEQ ID NO: 1349; WAN024DPR; Start 174; Stop 198
aagtttatcatctataatcaggcag

SEQ ID NO: 291269 - DNA, 25 bp, Artificial
  probe
  misc_feature (1)..(25): SEQ ID NO: 1349; WAN024DPR; Start 93; Stop 117
ccattttcttcaatctctttcaaca

SEQ ID NO: 291270 - DNA, 25 bp, Artificial
  probe
  misc_feature (1)..(25): SEQ ID NO: 1349; WAN024DPR; Start 173; Stop 197
aaagtttatcatctataatcaggca

SEQ ID NO: 291271 - DNA, 25 bp, Artificial
  probe
  misc_feature (1)..(25): SEQ ID NO: 1349; WAN024DPR; Start 96; Stop 120
ttttcttcaatctctttcaacactt

SEQ ID NO: 291272 - DNA, 25 bp, Artificial
  probe
  misc_feature (1)..(25): SEQ ID NO: 1349; WAN024DPR; Start 99; Stop 123
tcttcaatctctttcaacacttata

SEQ ID NO: 291273 - DNA, 25 bp, Artificial
  probe
  misc_feature (1)..(25): SEQ ID NO: 1349; WAN024DPR; Start 95; Stop 119
attttcttcaatctctttcaacact

SEQ ID NO: 291274 - DNA, 25 bp, Artificial
  probe
  misc_feature (1)..(25): SEQ ID NO: 1349; WAN024DPR; Start 94; Stop 118
cattttcttcaatctctttcaacac

SEQ ID NO: 291275 - DNA, 25 bp, Artificial
  probe
  misc_feature (1)..(25): SEQ ID NO: 1349; WAN024DPR; Start 140; Stop 164
gaactataaatatcacagtccagat

SEQ ID NO: 291276 - DNA, 25 bp, Artificial
  probe
  misc_feature (1)..(25): SEQ ID NO: 1349; WAN024DPR; Start 192; Stop 216
caggcagattattatttctattgct

SEQ ID NO: 291277 - DNA, 25 bp, Artificial
  probe
  misc_feature (1)..(25): SEQ ID NO: 1349; WAN024DPR; Start 191; Stop 215
tcaggcagattattatttctattgc

SEQ ID NO: 291278 - DNA, 25 bp, Artificial
  probe
  misc_feature (1)..(25): SEQ ID NO: 1349; WAN024DPR; Start 176; Stop 200
gtttatcatctataatcaggcagat

SEQ ID NO: 291279 - DNA, 25 bp, Artificial
  probe
  misc_feature (1)..(25): SEQ ID NO: 1349; WAN024DPR; Start 138; Stop 162
tagaactataaatatcacagtccag

SEQ ID NO: 291280 - DNA, 25 bp, Artificial
  probe
  misc_feature (1)..(25): SEQ ID NO: 1349; WAN024DPR; Start 88; Stop 112
cgaagccattttcttcaatctcttt

SEQ ID NO: 291281 - DNA, 25 bp, Artificial
  probe
  misc_feature (1)..(25): SEQ ID NO: 1349; WAN024DPR; Start 100; Stop 124
cttcaatctctttcaacacttataa

SEQ ID NO: 291282 - DNA, 25 bp, Artificial
  probe
  misc_feature (1)..(25): SEQ ID NO: 1349; WAN024DPR; Start 89; Stop 113
gaagccattttcttcaatctctttc

SEQ ID NO: 291283 - DNA, 25 bp, Artificial
  probe
  misc_feature (1)..(25): SEQ ID NO: 1349; WAN024DPR; Start 190; Stop 214
atcaggcagattattatttctattg

SEQ ID NO: 291284 - DNA, 25 bp, Artificial
  probe
  misc_feature (1)..(25): SEQ ID NO: 1349; WAN024DPR; Start 87; Stop 111
acgaagccattttcttcaatctctt

SEQ ID NO: 291285 - DNA, 25 bp, Artificial
  probe
  misc_feature (1)..(25): SEQ ID NO: 1349; WAN024DPR; Start 137; Stop 161
ttagaactataaatatcacagtcca

SEQ ID NO: 291286 - DNA, 25 bp, Artificial
  probe
  misc_feature (1)..(25): SEQ ID NO: 1349; WAN024DPR; Start 86; Stop 110
cacgaagccattttcttcaatctct

SEQ ID NO: 291287 - DNA, 25 bp, Artificial
  probe
  misc_feature (1)..(25): SEQ ID NO: 1349; WAN024DPR; Start 85; Stop 109
tcacgaagccattttcttcaatctc

SEQ ID NO: 291288 - DNA, 25 bp, Artificial
  probe
  misc_feature (1)..(25): SEQ ID NO: 1349; WAN024DPR; Start 177; Stop 201
tttatcatctataatcaggcagatt

SEQ ID NO: 291289 - DNA, 25 bp, Artificial
  probe
  misc_feature (1)..(25): SEQ ID NO: 1349; WAN024DPR; Start 84; Stop 108
gtcacgaagccattttcttcaatct

SEQ ID NO: 291290 - DNA, 25 bp, Artificial
  probe
  misc_feature (1)..(25): SEQ ID NO: 1349; WAN024DPR; Start 83; Stop 107
agtcacgaagccattttcttcaatc

SEQ ID NO: 291291 - DNA, 25 bp, Artificial
  probe
  misc_feature (1)..(25): SEQ ID NO: 1349; WAN024DPR; Start 22; Stop 46
ttgactcaaattgtaaatcgtttac

SEQ ID NO: 291292 - DNA, 25 bp, Artificial
  probe
  misc_feature (1)..(25): SEQ ID NO: 1349; WAN024DPR; Start 2; Stop 26
tgacactattttaccataatttgac

SEQ ID NO: 291293 - DNA, 25 bp, Artificial
  probe
  misc_feature (1)..(25): SEQ ID NO: 1349; WAN024DPR; Start 21; Stop 45
tttgactcaaattgtaaatcgttta

SEQ ID NO: 291294 - DNA, 25 bp, Artificial
  probe
  misc_feature (1)..(25): SEQ ID NO: 1350; WAN024BFP; Start 302; Stop 326
acggtgtgattcaagtagatgtctt

SEQ ID NO: 291295 - DNA, 25 bp, Artificial
  probe
  misc_feature (1)..(25): SEQ ID NO: 1350; WAN024BFP; Start 297; Stop 321
gactgacggtgtgattcaagtagat

SEQ ID NO: 291296 - DNA, 25 bp, Artificial
  probe
  misc_feature (1)..(25): SEQ ID NO: 1350; WAN024BFP; Start 92; Stop 116
atggtaagccaactctccttatcaa

SEQ ID NO: 291297 - DNA, 25 bp, Artificial
  probe
  misc_feature (1)..(25): SEQ ID NO: 1350; WAN024BFP; Start 89; Stop 113
ttgatggtaagccaactctccttat

SEQ ID NO: 291298 - DNA, 25 bp, Artificial
  probe
  misc_feature (1)..(25): SEQ ID NO: 1350; WAN024BFP; Start 88; Stop 112
attgatggtaagccaactctcctta

SEQ ID NO: 291299 - DNA, 25 bp, Artificial
  probe
  misc_feature (1)..(25): SEQ ID NO: 1350; WAN024BFP; Start 299; Stop 323
ctgacggtgtgattcaagtagatgt

SEQ ID NO: 291300 - DNA, 25 bp, Artificial
  probe
  misc_feature (1)..(25): SEQ ID NO: 1350; WAN024BFP; Start 298; Stop 322
actgacggtgtgattcaagtagatg

SEQ ID NO: 291301 - DNA, 25 bp, Artificial
  probe
  misc_feature (1)..(25): SEQ ID NO: 1350; WAN024BFP; Start 301; Stop 325
gacggtgtgattcaagtagatgtct

SEQ ID NO: 291302 - DNA, 25 bp, Artificial
  probe
  misc_feature (1)..(25): SEQ ID NO: 1350; WAN024BFP; Start 403; Stop 427
tttattgctgaatatgacaagggtg

SEQ ID NO: 291303 - DNA, 25 bp, Artificial
  probe
  misc_feature (1)..(25): SEQ ID NO: 1350; WAN024BFP; Start 402; Stop 426
ctttattgctgaatatgacaagggt

SEQ ID NO: 291304 - DNA, 25 bp, Artificial
  probe
  misc_feature (1)..(25): SEQ ID NO: 1350; WAN024BFP; Start 91; Stop 115
gatggtaagccaactctccttatca

SEQ ID NO: 291305 - DNA, 25 bp, Artificial
  probe
  misc_feature (1)..(25): SEQ ID NO: 1350; WAN024BFP; Start 90; Stop 114
tgatggtaagccaactctccttatc

SEQ ID NO: 291306 - DNA, 25 bp, Artificial
  probe
  misc_feature (1)..(25): SEQ ID NO: 1350; WAN024BFP; Start 354; Stop 378
gttgcttgataacctcagtaaacaa

SEQ ID NO: 291307 - DNA, 25 bp, Artificial
  probe
  misc_feature (1)..(25): SEQ ID NO: 1350; WAN024BFP; Start 401; Stop 425
tctttattgctgaatatgacaaggg

SEQ ID NO: 291308 - DNA, 25 bp, Artificial
  probe
  misc_feature (1)..(25): SEQ ID NO: 1350; WAN024BFP; Start 276; Stop 300
aaatcctaagtatccagttgtgact

SEQ ID NO: 291309 - DNA, 25 bp, Artificial
  probe
  misc_feature (1)..(25): SEQ ID NO: 1350; WAN024BFP; Start 300; Stop 324
tgacggtgtgattcaagtagatgtc

SEQ ID NO: 291310 - DNA, 25 bp, Artificial
  probe
  misc_feature (1)..(25): SEQ ID NO: 1350; WAN024BFP; Start 381; Stop 405
gcatgacaatgtagccaatatcttt

SEQ ID NO: 291311 - DNA, 25 bp, Artificial
  probe
  misc_feature (1)..(25): SEQ ID NO: 1350; WAN024BFP; Start 42; Stop 66
gactctcaaatggctcaacaacaat

SEQ ID NO: 291312 - DNA, 25 bp, Artificial
  probe
  misc_feature (1)..(25): SEQ ID NO: 1350; WAN024BFP; Start 404; Stop 428
ttattgctgaatatgacaagggtgc

SEQ ID NO: 291313 - DNA, 25 bp, Artificial
  probe
  misc_feature (1)..(25): SEQ ID NO: 1350; WAN024BFP; Start 43; Stop 67
actctcaaatggctcaacaacaatg

SEQ ID NO: 291314 - DNA, 25 bp, Artificial
  probe
  misc_feature (1)..(25): SEQ ID NO: 1350; WAN024BFP; Start 87; Stop 111
gattgatggtaagccaactctcctt

SEQ ID NO: 291315 - DNA, 25 bp, Artificial
  probe
  misc_feature (1)..(25): SEQ ID NO: 1350; WAN024BFP; Start 295; Stop 319
gtgactgacggtgtgattcaagtag

SEQ ID NO: 291316 - DNA, 25 bp, Artificial
  probe
  misc_feature (1)..(25): SEQ ID NO: 1350; WAN024BFP; Start 296; Stop 320
tgactgacggtgtgattcaagtaga

SEQ ID NO: 291317 - DNA, 25 bp, Artificial
  probe
  misc_feature (1)..(25): SEQ ID NO: 1350; WAN024BFP; Start 410; Stop 434
ctgaatatgacaagggtgctgttac

SEQ ID NO: 291318 - DNA, 25 bp, Artificial
  probe
  misc_feature (1)..(25): SEQ ID NO: 1350; WAN024BFP; Start 85; Stop 109
ttgattgatggtaagccaactctcc

SEQ ID NO: 291319 - DNA, 25 bp, Artificial
  probe
  misc_feature (1)..(25): SEQ ID NO: 1350; WAN024BFP; Start 405; Stop 429
tattgctgaatatgacaagggtgct

SEQ ID NO: 291320 - DNA, 25 bp, Artificial
  probe
  misc_feature (1)..(25): SEQ ID NO: 1350; WAN024BFP; Start 370; Stop 394
agtaaacaagggcatgacaatgtag

SEQ ID NO: 291321 - DNA, 25 bp, Artificial
  probe
  misc_feature (1)..(25): SEQ ID NO: 1350; WAN024BFP; Start 411; Stop 435
tgaatatgacaagggtgctgttaca

SEQ ID NO: 291322 - DNA, 25 bp, Artificial
  probe
  misc_feature (1)..(25): SEQ ID NO: 1350; WAN024BFP; Start 369; Stop 393
cagtaaacaagggcatgacaatgta

SEQ ID NO: 291323 - DNA, 25 bp, Artificial
  probe
  misc_feature (1)..(25): SEQ ID NO: 1350; WAN024BFP; Start 44; Stop 68
ctctcaaatggctcaacaacaatgt

SEQ ID NO: 291324 - DNA, 25 bp, Artificial
  probe
  misc_feature (1)..(25): SEQ ID NO: 1350; WAN024BFP; Start 400; Stop 424
atctttattgctgaatatgacaagg

SEQ ID NO: 291325 - DNA, 25 bp, Artificial
  probe
  misc_feature (1)..(25): SEQ ID NO: 1350; WAN024BFP; Start 84; Stop 108
tttgattgatggtaagccaactctc

SEQ ID NO: 291326 - DNA, 25 bp, Artificial
  probe
  misc_feature (1)..(25): SEQ ID NO: 1350; WAN024BFP; Start 360; Stop 384
tgataacctcagtaaacaagggcat

SEQ ID NO: 291327 - DNA, 25 bp, Artificial
  probe
  misc_feature (1)..(25): SEQ ID NO: 1351; WAN024DE9; Start 692; Stop 716
cagagcgtgcttatcaagattactt

SEQ ID NO: 291328 - DNA, 25 bp, Artificial
  probe
  misc_feature (1)..(25): SEQ ID NO: 1351; WAN024DE9; Start 708; Stop 732
agattactttggctttacagagacc

SEQ ID NO: 291329 - DNA, 25 bp, Artificial
  probe
  misc_feature (1)..(25): SEQ ID NO: 1351; WAN024DE9; Start 153; Stop 177
atacgcttatgaactctttaacggt

SEQ ID NO: 291330 - DNA, 25 bp, Artificial
  probe
  misc_feature (1)..(25): SEQ ID NO: 1351; WAN024DE9; Start 1110; Stop 1134
acaaggaagctggatagaaggaatt

SEQ ID NO: 291331 - DNA, 25 bp, Artificial
  probe
  misc_feature (1)..(25): SEQ ID NO: 1351; WAN024DE9; Start 152; Stop 176
aatacgcttatgaactctttaacgg

SEQ ID NO: 291332 - DNA, 25 bp, Artificial
  probe
  misc_feature (1)..(25): SEQ ID NO: 1351; WAN024DE9; Start 709; Stop 733
gattactttggctttacagagaccc

SEQ ID NO: 291333 - DNA, 25 bp, Artificial
  probe
  misc_feature (1)..(25): SEQ ID NO: 1351; WAN024DE9; Start 621; Stop 645
gaaagaacgcaagaagagggataaa

SEQ ID NO: 291334 - DNA, 25 bp, Artificial
  probe
  misc_feature (1)..(25): SEQ ID NO: 1351; WAN024DE9; Start 1032; Stop 1056
ctttgaatttgaaatcgcaccagaa

SEQ ID NO: 291335 - DNA, 25 bp, Artificial
  probe
  misc_feature (1)..(25): SEQ ID NO: 1351; WAN024DE9; Start 698; Stop 722
gtgcttatcaagattactttggctt

SEQ ID NO: 291336 - DNA, 25 bp, Artificial
  probe
  misc_feature (1)..(25): SEQ ID NO: 1351; WAN024DE9; Start 154; Stop 178
tacgcttatgaactctttaacggtg

SEQ ID NO: 291337 - DNA, 25 bp, Artificial
  probe
  misc_feature (1)..(25): SEQ ID NO: 1351; WAN024DE9; Start 707; Stop 731
aagattactttggctttacagagac

SEQ ID NO: 291338 - DNA, 25 bp, Artificial
  probe
  misc_feature (1)..(25): SEQ ID NO: 1351; WAN024DE9; Start 139; Stop 163
ggaaatgccatcaaatacgcttatg

SEQ ID NO: 291339 - DNA, 25 bp, Artificial
  probe
  misc_feature (1)..(25): SEQ ID NO: 1351; WAN024DE9; Start 1024; Stop 1048
atgaaagcctttgaatttgaaatcg

SEQ ID NO: 291340 - DNA, 25 bp, Artificial
  probe
  misc_feature (1)..(25): SEQ ID NO: 1351; WAN024DE9; Start 141; Stop 165
aaatgccatcaaatacgcttatgaa

SEQ ID NO: 291341 - DNA, 25 bp, Artificial
  probe
  misc_feature (1)..(25): SEQ ID NO: 1351; WAN024DE9; Start 140; Stop 164
gaaatgccatcaaatacgcttatga

SEQ ID NO: 291342 - DNA, 25 bp, Artificial
  probe
  misc_feature (1)..(25): SEQ ID NO: 1351; WAN024DE9; Start 1033; Stop 1057
tttgaatttgaaatcgcaccagaac

SEQ ID NO: 291343 - DNA, 25 bp, Artificial
  probe
  misc_feature (1)..(25): SEQ ID NO: 1351; WAN024DE9; Start 699; Stop 723
tgcttatcaagattactttggcttt

SEQ ID NO: 291344 - DNA, 25 bp, Artificial
  probe
  misc_feature (1)..(25): SEQ ID NO: 1351; WAN024DE9; Start 146; Stop 170
ccatcaaatacgcttatgaactctt

SEQ ID NO: 291345 - DNA, 25 bp, Artificial
  probe
  misc_feature (1)..(25): SEQ ID NO: 1351; WAN024DE9; Start 142; Stop 166
aatgccatcaaatacgcttatgaac

SEQ ID NO: 291346 - DNA, 25 bp, Artificial
  probe
  misc_feature (1)..(25): SEQ ID NO: 1351; WAN024DE9; Start 710; Stop 734
attactttggctttacagagaccct

SEQ ID NO: 291347 - DNA, 25 bp, Artificial
  probe
  misc_feature (1)..(25): SEQ ID NO: 1351; WAN024DE9; Start 706; Stop 730
caagattactttggctttacagaga

SEQ ID NO: 291348 - DNA, 25 bp, Artificial
  probe
  misc_feature (1)..(25): SEQ ID NO: 1351; WAN024DE9; Start 705; Stop 729
tcaagattactttggctttacagag

SEQ ID NO: 291349 - DNA, 25 bp, Artificial
  probe
  misc_feature (1)..(25): SEQ ID NO: 1351; WAN024DE9; Start 158; Stop 182
cttatgaactctttaacggtgtcac

SEQ ID NO: 291350 - DNA, 25 bp, Artificial
  probe
  misc_feature (1)..(25): SEQ ID NO: 1351; WAN024DE9; Start 159; Stop 183
ttatgaactctttaacggtgtcaca

SEQ ID NO: 291351 - DNA, 25 bp, Artificial
  probe
  misc_feature (1)..(25): SEQ ID NO: 1351; WAN024DE9; Start 693; Stop 717
agagcgtgcttatcaagattacttt

SEQ ID NO: 291352 - DNA, 25 bp, Artificial
  probe
  misc_feature (1)..(25): SEQ ID NO: 1351; WAN024DE9; Start 1109; Stop 1133
cacaaggaagctggatagaaggaat

SEQ ID NO: 291353 - DNA, 25 bp, Artificial
  probe
  misc_feature (1)..(25): SEQ ID NO: 1351; WAN024DE9; Start 160; Stop 184
tatgaactctttaacggtgtcacag

SEQ ID NO: 291354 - DNA, 25 bp, Artificial
  probe
  misc_feature (1)..(25): SEQ ID NO: 1351; WAN024DE9; Start 143; Stop 167
atgccatcaaatacgcttatgaact

SEQ ID NO: 291355 - DNA, 25 bp, Artificial
  probe
  misc_feature (1)..(25): SEQ ID NO: 1351; WAN024DE9; Start 440; Stop 464
tagaagtctttcagggaggaagttg

SEQ ID NO: 291356 - DNA, 25 bp, Artificial
  probe
  misc_feature (1)..(25): SEQ ID NO: 1351; WAN024DE9; Start 620; Stop 644
agaaagaacgcaagaagagggataa

SEQ ID NO: 291357 - DNA, 25 bp, Artificial
  probe
  misc_feature (1)..(25): SEQ ID NO: 1351; WAN024DE9; Start 694; Stop 718
gagcgtgcttatcaagattactttg

SEQ ID NO: 291358 - DNA, 25 bp, Artificial
  probe
  misc_feature (1)..(25): SEQ ID NO: 1351; WAN024DE9; Start 157; Stop 181
gcttatgaactctttaacggtgtca

SEQ ID NO: 291359 - DNA, 25 bp, Artificial
  probe
  misc_feature (1)..(25): SEQ ID NO: 1351; WAN024DE9; Start 151; Stop 175
aaatacgcttatgaactctttaacg

SEQ ID NO: 291360 - DNA, 25 bp, Artificial
  probe
  misc_feature (1)..(25): SEQ ID NO: 1352; WAN024FB7; Start 1100; Stop 1124
attctatggctgattatgtggatgt

SEQ ID NO: 291361 - DNA, 25 bp, Artificial
  probe
  misc_feature (1)..(25): SEQ ID NO: 1352; WAN024FB7; Start 1101; Stop 1125
ttctatggctgattatgtggatgtc

SEQ ID NO: 291362 - DNA, 25 bp, Artificial
  probe
  misc_feature (1)..(25): SEQ ID NO: 1352; WAN024FB7; Start 1098; Stop 1122
tgattctatggctgattatgtggat

SEQ ID NO: 291363 - DNA, 25 bp, Artificial
  probe
  misc_feature (1)..(25): SEQ ID NO: 1352; WAN024FB7; Start 1097; Stop 1121
atgattctatggctgattatgtgga

SEQ ID NO: 291364 - DNA, 25 bp, Artificial
  probe
  misc_feature (1)..(25): SEQ ID NO: 1352; WAN024FB7; Start 1099; Stop 1123
gattctatggctgattatgtggatg

SEQ ID NO: 291365 - DNA, 25 bp, Artificial
  probe
  misc_feature (1)..(25): SEQ ID NO: 1352; WAN024FB7; Start 1135; Stop 1159
aatgcctatcagatgctcttagaag

SEQ ID NO: 291366 - DNA, 25 bp, Artificial
  probe
  misc_feature (1)..(25): SEQ ID NO: 1352; WAN024FB7; Start 1131; Stop 1155
gcttaatgcctatcagatgctctta

SEQ ID NO: 291367 - DNA, 25 bp, Artificial
  probe
  misc_feature (1)..(25): SEQ ID NO: 1352; WAN024FB7; Start 1134; Stop 1158
taatgcctatcagatgctcttagaa

SEQ ID NO: 291368 - DNA, 25 bp, Artificial
  probe
  misc_feature (1)..(25): SEQ ID NO: 1352; WAN024FB7; Start 1133; Stop 1157
ttaatgcctatcagatgctcttaga

SEQ ID NO: 291369 - DNA, 25 bp, Artificial
  probe
  misc_feature (1)..(25): SEQ ID NO: 1352; WAN024FB7; Start 1132; Stop 1156
cttaatgcctatcagatgctcttag

SEQ ID NO: 291370 - DNA, 25 bp, Artificial
  probe
  misc_feature (1)..(25): SEQ ID NO: 1352; WAN024FB7; Start 1096; Stop 1120
tatgattctatggctgattatgtgg

SEQ ID NO: 291371 - DNA, 25 bp, Artificial
  probe
  misc_feature (1)..(25): SEQ ID NO: 1352; WAN024FB7; Start 816; Stop 840
caaggtggactataaggatggacaa

SEQ ID NO: 291372 - DNA, 25 bp, Artificial
  probe
  misc_feature (1)..(25): SEQ ID NO: 1352; WAN024FB7; Start 1138; Stop 1162
gcctatcagatgctcttagaagaag

SEQ ID NO: 291373 - DNA, 25 bp, Artificial
  probe
  misc_feature (1)..(25): SEQ ID NO: 1352; WAN024FB7; Start 1174; Stop 1198
caagaagccttccagattattcaag

SEQ ID NO: 291374 - DNA, 25 bp, Artificial
  probe
  misc_feature (1)..(25): SEQ ID NO: 1352; WAN024FB7; Start 1140; Stop 1164
ctatcagatgctcttagaagaagga

SEQ ID NO: 291375 - DNA, 25 bp, Artificial
  probe
  misc_feature (1)..(25): SEQ ID NO: 1352; WAN024FB7; Start 814; Stop 838
ctcaaggtggactataaggatggac

SEQ ID NO: 291376 - DNA, 25 bp, Artificial
  probe
  misc_feature (1)..(25): SEQ ID NO: 1352; WAN024FB7; Start 1136; Stop 1160
atgcctatcagatgctcttagaaga

SEQ ID NO: 291377 - DNA, 25 bp, Artificial
  probe
  misc_feature (1)..(25): SEQ ID NO: 1352; WAN024FB7; Start 1137; Stop 1161
tgcctatcagatgctcttagaagaa

SEQ ID NO: 291378 - DNA, 25 bp, Artificial
  probe
  misc_feature (1)..(25): SEQ ID NO: 1352; WAN024FB7; Start 278; Stop 302
ttatgctggacatggtacttaatca

SEQ ID NO: 291379 - DNA, 25 bp, Artificial
  probe
  misc_feature (1)..(25): SEQ ID NO: 1352; WAN024FB7; Start 280; Stop 304
atgctggacatggtacttaatcatt

SEQ ID NO: 291380 - DNA, 25 bp, Artificial
  probe
  misc_feature (1)..(25): SEQ ID NO: 1352; WAN024FB7; Start 279; Stop 303
tatgctggacatggtacttaatcat

SEQ ID NO: 291381 - DNA, 25 bp, Artificial
  probe
  misc_feature (1)..(25): SEQ ID NO: 1352; WAN024FB7; Start 1141; Stop 1165
tatcagatgctcttagaagaaggaa

SEQ ID NO: 291382 - DNA, 25 bp, Artificial
  probe
  misc_feature (1)..(25): SEQ ID NO: 1352; WAN024FB7; Start 1175; Stop 1199
aagaagccttccagattattcaagc

SEQ ID NO: 291383 - DNA, 25 bp, Artificial
  probe
  misc_feature (1)..(25): SEQ ID NO: 1352; WAN024FB7; Start 1102; Stop 1126
tctatggctgattatgtggatgtcg

SEQ ID NO: 291384 - DNA, 25 bp, Artificial
  probe
  misc_feature (1)..(25): SEQ ID NO: 1352; WAN024FB7; Start 281; Stop 305
tgctggacatggtacttaatcattg

SEQ ID NO: 291385 - DNA, 25 bp, Artificial
  probe
  misc_feature (1)..(25): SEQ ID NO: 1352; WAN024FB7; Start 1126; Stop 1150
gaatcgcttaatgcctatcagatgc

SEQ ID NO: 291386 - DNA, 25 bp, Artificial
  probe
  misc_feature (1)..(25): SEQ ID NO: 1352; WAN024FB7; Start 815; Stop 839
tcaaggtggactataaggatggaca

SEQ ID NO: 291387 - DNA, 25 bp, Artificial
  probe
  misc_feature (1)..(25): SEQ ID NO: 1352; WAN024FB7; Start 1173; Stop 1197
gcaagaagccttccagattattcaa

SEQ ID NO: 291388 - DNA, 25 bp, Artificial
  probe
  misc_feature (1)..(25): SEQ ID NO: 1352; WAN024FB7; Start 1139; Stop 1163
cctatcagatgctcttagaagaagg

SEQ ID NO: 291389 - DNA, 25 bp, Artificial
  probe
  misc_feature (1)..(25): SEQ ID NO: 1352; WAN024FB7; Start 285; Stop 309
ggacatggtacttaatcattgttcg

SEQ ID NO: 291390 - DNA, 25 bp, Artificial
  probe
  misc_feature (1)..(25): SEQ ID NO: 1352; WAN024FB7; Start 1125; Stop 1149
cgaatcgcttaatgcctatcagatg

SEQ ID NO: 291391 - DNA, 25 bp, Artificial
  probe
  misc_feature (1)..(25): SEQ ID NO: 1352; WAN024FB7; Start 370; Stop 394
ttcatccaagaccaaccaacagatt

SEQ ID NO: 291392 - DNA, 25 bp, Artificial
  probe
  misc_feature (1)..(25): SEQ ID NO: 1352; WAN024FB7; Start 1182; Stop 1206
cttccagattattcaagctaagtcg

SEQ ID NO: 291393 - DNA, 25 bp, Artificial
  probe
  misc_feature (1)..(25): SEQ ID NO: 1353; WAN024DG3; Start 351; Stop 375
aatggtagtggttgaagaccttatt

SEQ ID NO: 291394 - DNA, 25 bp, Artificial
  probe
  misc_feature (1)..(25): SEQ ID NO: 1353; WAN024DG3; Start 112; Stop 136
gataatcgtgtgacactagcctatc

SEQ ID NO: 291395 - DNA, 25 bp, Artificial
  probe
  misc_feature (1)..(25): SEQ ID NO: 1353; WAN024DG3; Start 111; Stop 135
tgataatcgtgtgacactagcctat

SEQ ID NO: 291396 - DNA, 25 bp, Artificial
  probe
  misc_feature (1)..(25): SEQ ID NO: 1353; WAN024DG3; Start 92; Stop 116
tcaagtcaccgatttacactgataa

SEQ ID NO: 291397 - DNA, 25 bp, Artificial
  probe
  misc_feature (1)..(25): SEQ ID NO: 1353; WAN024DG3; Start 503; Stop 527
ttaaacttgtgacgctttcaaacta

SEQ ID NO: 291398 - DNA, 25 bp, Artificial
  probe
  misc_feature (1)..(25): SEQ ID NO: 1353; WAN024DG3; Start 505; Stop 529
aaacttgtgacgctttcaaactata

SEQ ID NO: 291399 - DNA, 25 bp, Artificial
  probe
  misc_feature (1)..(25): SEQ ID NO: 1353; WAN024DG3; Start 504; Stop 528
taaacttgtgacgctttcaaactat

SEQ ID NO: 291400 - DNA, 25 bp, Artificial
  probe
  misc_feature (1)..(25): SEQ ID NO: 1353; WAN024DG3; Start 133; Stop 157
tatccagaaactcgtaccctaattg

SEQ ID NO: 291401 - DNA, 25 bp, Artificial
  probe
  misc_feature (1)..(25): SEQ ID NO: 1353; WAN024DG3; Start 89; Stop 113
gtatcaagtcaccgatttacactga

SEQ ID NO: 291402 - DNA, 25 bp, Artificial
  probe
  misc_feature (1)..(25): SEQ ID NO: 1353; WAN024DG3; Start 132; Stop 156
ctatccagaaactcgtaccctaatt

SEQ ID NO: 291403 - DNA, 25 bp, Artificial
  probe
  misc_feature (1)..(25): SEQ ID NO: 1353; WAN024DG3; Start 535; Stop 559
cttatccatctagcccaagaagaag

SEQ ID NO: 291404 - DNA, 25 bp, Artificial
  probe
  misc_feature (1)..(25): SEQ ID NO: 1353; WAN024DG3; Start 93; Stop 117
caagtcaccgatttacactgataat

SEQ ID NO: 291405 - DNA, 25 bp, Artificial
  probe
  misc_feature (1)..(25): SEQ ID NO: 1353; WAN024DG3; Start 136; Stop 160
ccagaaactcgtaccctaattgaaa

SEQ ID NO: 291406 - DNA, 25 bp, Artificial
  probe
  misc_feature (1)..(25): SEQ ID NO: 1353; WAN024DG3; Start 502; Stop 526
gttaaacttgtgacgctttcaaact

SEQ ID NO: 291407 - DNA, 25 bp, Artificial
  probe
  misc_feature (1)..(25): SEQ ID NO: 1353; WAN024DG3; Start 188; Stop 212
cctttcctgaagtagaagtgattgc

SEQ ID NO: 291408 - DNA, 25 bp, Artificial
  probe
  misc_feature (1)..(25): SEQ ID NO: 1353; WAN024DG3; Start 187; Stop 211
gcctttcctgaagtagaagtgattg

SEQ ID NO: 291409 - DNA, 25 bp, Artificial
  probe
  misc_feature (1)..(25): SEQ ID NO: 1353; WAN024DG3; Start 186; Stop 210
agcctttcctgaagtagaagtgatt

SEQ ID NO: 291410 - DNA, 25 bp, Artificial
  probe
  misc_feature (1)..(25): SEQ ID NO: 1353; WAN024DG3; Start 185; Stop 209
aagcctttcctgaagtagaagtgat

SEQ ID NO: 291411 - DNA, 25 bp, Artificial
  probe
  misc_feature (1)..(25): SEQ ID NO: 1353; WAN024DG3; Start 182; Stop 206
aagaagcctttcctgaagtagaagt

SEQ ID NO: 291412 - DNA, 25 bp, Artificial
  probe
  misc_feature (1)..(25): SEQ ID NO: 1353; WAN024DG3; Start 501; Stop 525
tgttaaacttgtgacgctttcaaac

SEQ ID NO: 291413 - DNA, 25 bp, Artificial
  probe
  misc_feature (1)..(25): SEQ ID NO: 1353; WAN024DG3; Start 500; Stop 524
gtgttaaacttgtgacgctttcaaa

SEQ ID NO: 291414 - DNA, 25 bp, Artificial
  probe
  misc_feature (1)..(25): SEQ ID NO: 1353; WAN024DG3; Start 131; Stop 155
cctatccagaaactcgtaccctaat

SEQ ID NO: 291415 - DNA, 25 bp, Artificial
  probe
  misc_feature (1)..(25): SEQ ID NO: 1353; WAN024DG3; Start 113; Stop 137
ataatcgtgtgacactagcctatcc

SEQ ID NO: 291416 - DNA, 25 bp, Artificial
  probe
  misc_feature (1)..(25): SEQ ID NO: 1353; WAN024DG3; Start 110; Stop 134
ctgataatcgtgtgacactagccta

SEQ ID NO: 291417 - DNA, 25 bp, Artificial
  probe
  misc_feature (1)..(25): SEQ ID NO: 1353; WAN024DG3; Start 134; Stop 158
atccagaaactcgtaccctaattga

SEQ ID NO: 291418 - DNA, 25 bp, Artificial
  probe
  misc_feature (1)..(25): SEQ ID NO: 1353; WAN024DG3; Start 542; Stop 566
atctagcccaagaagaaggttacat

SEQ ID NO: 291419 - DNA, 25 bp, Artificial
  probe
  misc_feature (1)..(25): SEQ ID NO: 1353; WAN024DG3; Start 135; Stop 159
tccagaaactcgtaccctaattgaa

SEQ ID NO: 291420 - DNA, 25 bp, Artificial
  probe
  misc_feature (1)..(25): SEQ ID NO: 1353; WAN024DG3; Start 545; Stop 569
tagcccaagaagaaggttacatcac

SEQ ID NO: 291421 - DNA, 25 bp, Artificial
  probe
  misc_feature (1)..(25): SEQ ID NO: 1353; WAN024DG3; Start 536; Stop 560
ttatccatctagcccaagaagaagg

SEQ ID NO: 291422 - DNA, 25 bp, Artificial
  probe
  misc_feature (1)..(25): SEQ ID NO: 1353; WAN024DG3; Start 195; Stop 219
tgaagtagaagtgattgcaggaact

SEQ ID NO: 291423 - DNA, 25 bp, Artificial
  probe
  misc_feature (1)..(25): SEQ ID NO: 1353; WAN024DG3; Start 544; Stop 568
ctagcccaagaagaaggttacatca

SEQ ID NO: 291424 - DNA, 25 bp, Artificial
  probe
  misc_feature (1)..(25): SEQ ID NO: 1353; WAN024DG3; Start 196; Stop 220
gaagtagaagtgattgcaggaactg

SEQ ID NO: 291425 - DNA, 25 bp, Artificial
  probe
  misc_feature (1)..(25): SEQ ID NO: 1353; WAN024DG3; Start 194; Stop 218
ctgaagtagaagtgattgcaggaac

SEQ ID NO: 291426 - DNA, 25 bp, Artificial
  probe
  misc_feature (1)..(25): SEQ ID NO: 1354; WAN024CSN; Start 153; Stop 177
gattgaacttcctgaattgaatgaa

SEQ ID NO: 291427 - DNA, 25 bp, Artificial
  probe
  misc_feature (1)..(25): SEQ ID NO: 1354; WAN024CSN; Start 151; Stop 175
tggattgaacttcctgaattgaatg

SEQ ID NO: 291428 - DNA, 25 bp, Artificial
  probe
  misc_feature (1)..(25): SEQ ID NO: 1354; WAN024CSN; Start 152; Stop 176
ggattgaacttcctgaattgaatga

SEQ ID NO: 291429 - DNA, 25 bp, Artificial
  probe
  misc_feature (1)..(25): SEQ ID NO: 1354; WAN024CSN; Start 150; Stop 174
ttggattgaacttcctgaattgaat

SEQ ID NO: 291430 - DNA, 25 bp, Artificial
  probe
  misc_feature (1)..(25): SEQ ID NO: 1354; WAN024CSN; Start 28; Stop 52
actagacgtatagacagaattagcg

SEQ ID NO: 291431 - DNA, 25 bp, Artificial
  probe
  misc_feature (1)..(25): SEQ ID NO: 1354; WAN024CSN; Start 55; Stop 79
gaaatgcgagaaattagcgaagaaa

SEQ ID NO: 291432 - DNA, 25 bp, Artificial
  probe
  misc_feature (1)..(25): SEQ ID NO: 1354; WAN024CSN; Start 419; Stop 443
gtcttatagagaagtttgaggaggc

SEQ ID NO: 291433 - DNA, 25 bp, Artificial
  probe
  misc_feature (1)..(25): SEQ ID NO: 1354; WAN024CSN; Start 156; Stop 180
tgaacttcctgaattgaatgaaagc

SEQ ID NO: 291434 - DNA, 25 bp, Artificial
  probe
  misc_feature (1)..(25): SEQ ID NO: 1354; WAN024CSN; Start 160; Stop 184
cttcctgaattgaatgaaagccata

SEQ ID NO: 291435 - DNA, 25 bp, Artificial
  probe
  misc_feature (1)..(25): SEQ ID NO: 1354; WAN024CSN; Start 423; Stop 447
tatagagaagtttgaggaggcaatg

SEQ ID NO: 291436 - DNA, 25 bp, Artificial
  probe
  misc_feature (1)..(25): SEQ ID NO: 1354; WAN024CSN; Start 421; Stop 445
cttatagagaagtttgaggaggcaa

SEQ ID NO: 291437 - DNA, 25 bp, Artificial
  probe
  misc_feature (1)..(25): SEQ ID NO: 1354; WAN024CSN; Start 420; Stop 444
tcttatagagaagtttgaggaggca

SEQ ID NO: 291438 - DNA, 25 bp, Artificial
  probe
  misc_feature (1)..(25): SEQ ID NO: 1354; WAN024CSN; Start 418; Stop 442
tgtcttatagagaagtttgaggagg

SEQ ID NO: 291439 - DNA, 25 bp, Artificial
  probe
  misc_feature (1)..(25): SEQ ID NO: 1354; WAN024CSN; Start 422; Stop 446
ttatagagaagtttgaggaggcaat

SEQ ID NO: 291440 - DNA, 25 bp, Artificial
  probe
  misc_feature (1)..(25): SEQ ID NO: 1354; WAN024CSN; Start 162; Stop 186
tcctgaattgaatgaaagccataaa

SEQ ID NO: 291441 - DNA, 25 bp, Artificial
  probe
  misc_feature (1)..(25): SEQ ID NO: 1354; WAN024CSN; Start 161; Stop 185
ttcctgaattgaatgaaagccataa

SEQ ID NO: 291442 - DNA, 25 bp, Artificial
  probe
  misc_feature (1)..(25): SEQ ID NO: 1354; WAN024CSN; Start 157; Stop 181
gaacttcctgaattgaatgaaagcc

SEQ ID NO: 291443 - DNA, 25 bp, Artificial
  probe
  misc_feature (1)..(25): SEQ ID NO: 1354; WAN024CSN; Start 54; Stop 78
agaaatgcgagaaattagcgaagaa

SEQ ID NO: 291444 - DNA, 25 bp, Artificial
  probe
  misc_feature (1)..(25): SEQ ID NO: 1354; WAN024CSN; Start 159; Stop 183
acttcctgaattgaatgaaagccat

SEQ ID NO: 291445 - DNA, 25 bp, Artificial
  probe
  misc_feature (1)..(25): SEQ ID NO: 1354; WAN024CSN; Start 158; Stop 182
aacttcctgaattgaatgaaagcca

SEQ ID NO: 291446 - DNA, 25 bp, Artificial
  probe
  misc_feature (1)..(25): SEQ ID NO: 1354; WAN024CSN; Start 124; Stop 148
atcaaagatgagttgtcccgtttac

SEQ ID NO: 291447 - DNA, 25 bp, Artificial
  probe
  misc_feature (1)..(25): SEQ ID NO: 1354; WAN024CSN; Start 390; Stop 414
aaatggaactcagaaagcaaataaa

SEQ ID NO: 291448 - DNA, 25 bp, Artificial
  probe
  misc_feature (1)..(25): SEQ ID NO: 1354; WAN024CSN; Start 128; Stop 152
aagatgagttgtcccgtttactttg

SEQ ID NO: 291449 - DNA, 25 bp, Artificial
  probe
  misc_feature (1)..(25): SEQ ID NO: 1354; WAN024CSN; Start 126; Stop 150
caaagatgagttgtcccgtttactt

SEQ ID NO: 291450 - DNA, 25 bp, Artificial
  probe
  misc_feature (1)..(25): SEQ ID NO: 1354; WAN024CSN; Start 27; Stop 51
aactagacgtatagacagaattagc

SEQ ID NO: 291451 - DNA, 25 bp, Artificial
  probe
  misc_feature (1)..(25): SEQ ID NO: 1354; WAN024CSN; Start 155; Stop 179
ttgaacttcctgaattgaatgaaag

SEQ ID NO: 291452 - DNA, 25 bp, Artificial
  probe
  misc_feature (1)..(25): SEQ ID NO: 1354; WAN024CSN; Start 53; Stop 77
cagaaatgcgagaaattagcgaaga

SEQ ID NO: 291453 - DNA, 25 bp, Artificial
  probe
  misc_feature (1)..(25): SEQ ID NO: 1354; WAN024CSN; Start 416; Stop 440
gttgtcttatagagaagtttgagga

SEQ ID NO: 291454 - DNA, 25 bp, Artificial
  probe
  misc_feature (1)..(25): SEQ ID NO: 1354; WAN024CSN; Start 415; Stop 439
agttgtcttatagagaagtttgagg

SEQ ID NO: 291455 - DNA, 25 bp, Artificial
  probe
  misc_feature (1)..(25): SEQ ID NO: 1354; WAN024CSN; Start 301; Stop 325
gaagcagagcaacaggcgtatatag

SEQ ID NO: 291456 - DNA, 25 bp, Artificial
  probe
  misc_feature (1)..(25): SEQ ID NO: 1354; WAN024CSN; Start 147; Stop 171
actttggattgaacttcctgaattg

SEQ ID NO: 291457 - DNA, 25 bp, Artificial
  probe
  misc_feature (1)..(25): SEQ ID NO: 1354; WAN024CSN; Start 306; Stop 330
agagcaacaggcgtatatagagcat

SEQ ID NO: 291458 - DNA, 25 bp, Artificial
  probe
  misc_feature (1)..(25): SEQ ID NO: 1354; WAN024CSN; Start 148; Stop 172
ctttggattgaacttcctgaattga

SEQ ID NO: 291459 - DNA, 25 bp, Artificial
  probe
  misc_feature (1)..(25): SEQ ID NO: 1355; WAN024FFH; Start 541; Stop 565
gaggaagaataccaagaacagtcaa

SEQ ID NO: 291460 - DNA, 25 bp, Artificial
  probe
  misc_feature (1)..(25): SEQ ID NO: 1355; WAN024FFH; Start 542; Stop 566
aggaagaataccaagaacagtcaac

SEQ ID NO: 291461 - DNA, 25 bp, Artificial
  probe
  misc_feature (1)..(25): SEQ ID NO: 1355; WAN024FFH; Start 543; Stop 567
ggaagaataccaagaacagtcaact

SEQ ID NO: 291462 - DNA, 25 bp, Artificial
  probe
  misc_feature (1)..(25): SEQ ID NO: 1355; WAN024FFH; Start 539; Stop 563
ttgaggaagaataccaagaacagtc

SEQ ID NO: 291463 - DNA, 25 bp, Artificial
  probe
  misc_feature (1)..(25): SEQ ID NO: 1355; WAN024FFH; Start 540; Stop 564
tgaggaagaataccaagaacagtca

SEQ ID NO: 291464 - DNA, 25 bp, Artificial
  probe
  misc_feature (1)..(25): SEQ ID NO: 1355; WAN024FFH; Start 545; Stop 569
aagaataccaagaacagtcaactga

SEQ ID NO: 291465 - DNA, 25 bp, Artificial
  probe
  misc_feature (1)..(25): SEQ ID NO: 1355; WAN024FFH; Start 544; Stop 568
gaagaataccaagaacagtcaactg

SEQ ID NO: 291466 - DNA, 25 bp, Artificial
  probe
  misc_feature (1)..(25): SEQ ID NO: 1355; WAN024FFH; Start 546; Stop 570
agaataccaagaacagtcaactgag

SEQ ID NO: 291467 - DNA, 25 bp, Artificial
  probe
  misc_feature (1)..(25): SEQ ID NO: 1355; WAN024FFH; Start 162; Stop 186
agagaagaaagatgccttgtatgaa

SEQ ID NO: 291468 - DNA, 25 bp, Artificial
  probe
  misc_feature (1)..(25): SEQ ID NO: 1355; WAN024FFH; Start 161; Stop 185
aagagaagaaagatgccttgtatga

SEQ ID NO: 291469 - DNA, 25 bp, Artificial
  probe
  misc_feature (1)..(25): SEQ ID NO: 1355; WAN024FFH; Start 166; Stop 190
aagaaagatgccttgtatgaattgg

SEQ ID NO: 291470 - DNA, 25 bp, Artificial
  probe
  misc_feature (1)..(25): SEQ ID NO: 1355; WAN024FFH; Start 547; Stop 571
gaataccaagaacagtcaactgagg

SEQ ID NO: 291471 - DNA, 25 bp, Artificial
  probe
  misc_feature (1)..(25): SEQ ID NO: 1355; WAN024FFH; Start 134; Stop 158
cctactctgtgattgtggtacgaag

SEQ ID NO: 291472 - DNA, 25 bp, Artificial
  probe
  misc_feature (1)..(25): SEQ ID NO: 1355; WAN024FFH; Start 163; Stop 187
gagaagaaagatgccttgtatgaat

SEQ ID NO: 291473 - DNA, 25 bp, Artificial
  probe
  misc_feature (1)..(25): SEQ ID NO: 1355; WAN024FFH; Start 538; Stop 562
tttgaggaagaataccaagaacagt

SEQ ID NO: 291474 - DNA, 25 bp, Artificial
  probe
  misc_feature (1)..(25): SEQ ID NO: 1355; WAN024FFH; Start 168; Stop 192
gaaagatgccttgtatgaattggta

SEQ ID NO: 291475 - DNA, 25 bp, Artificial
  probe
  misc_feature (1)..(25): SEQ ID NO: 1355; WAN024FFH; Start 537; Stop 561
ctttgaggaagaataccaagaacag

SEQ ID NO: 291476 - DNA, 25 bp, Artificial
  probe
  misc_feature (1)..(25): SEQ ID NO: 1355; WAN024FFH; Start 167; Stop 191
agaaagatgccttgtatgaattggt

SEQ ID NO: 291477 - DNA, 25 bp, Artificial
  probe
  misc_feature (1)..(25): SEQ ID NO: 1355; WAN024FFH; Start 121; Stop 145
aagaatttccaatcctactctgtga

SEQ ID NO: 291478 - DNA, 25 bp, Artificial
  probe
  misc_feature (1)..(25): SEQ ID NO: 1355; WAN024FFH; Start 122; Stop 146
agaatttccaatcctactctgtgat

SEQ ID NO: 291479 - DNA, 25 bp, Artificial
  probe
  misc_feature (1)..(25): SEQ ID NO: 1355; WAN024FFH; Start 120; Stop 144
gaagaatttccaatcctactctgtg

SEQ ID NO: 291480 - DNA, 25 bp, Artificial
  probe
  misc_feature (1)..(25): SEQ ID NO: 1355; WAN024FFH; Start 6; Stop 30
agaaaccattaaattgatgaaggct

SEQ ID NO: 291481 - DNA, 25 bp, Artificial
  probe
  misc_feature (1)..(25): SEQ ID NO: 1355; WAN024FFH; Start 5; Stop 29
cagaaaccattaaattgatgaaggc

SEQ ID NO: 291482 - DNA, 25 bp, Artificial
  probe
  misc_feature (1)..(25): SEQ ID NO: 1355; WAN024FFH; Start 132; Stop 156
atcctactctgtgattgtggtacga

SEQ ID NO: 291483 - DNA, 25 bp, Artificial
  probe
  misc_feature (1)..(25): SEQ ID NO: 1355; WAN024FFH; Start 7; Stop 31
gaaaccattaaattgatgaaggctc

SEQ ID NO: 291484 - DNA, 25 bp, Artificial
  probe
  misc_feature (1)..(25): SEQ ID NO: 1355; WAN024FFH; Start 165; Stop 189
gaagaaagatgccttgtatgaattg

SEQ ID NO: 291485 - DNA, 25 bp, Artificial
  probe
  misc_feature (1)..(25): SEQ ID NO: 1355; WAN024FFH; Start 8; Stop 32
aaaccattaaattgatgaaggctca

SEQ ID NO: 291486 - DNA, 25 bp, Artificial
  probe
  misc_feature (1)..(25): SEQ ID NO: 1355; WAN024FFH; Start 164; Stop 188
agaagaaagatgccttgtatgaatt

SEQ ID NO: 291487 - DNA, 25 bp, Artificial
  probe
  misc_feature (1)..(25): SEQ ID NO: 1355; WAN024FFH; Start 133; Stop 157
tcctactctgtgattgtggtacgaa

SEQ ID NO: 291488 - DNA, 25 bp, Artificial
  probe
  misc_feature (1)..(25): SEQ ID NO: 1355; WAN024FFH; Start 169; Stop 193
aaagatgccttgtatgaattggtac

SEQ ID NO: 291489 - DNA, 25 bp, Artificial
  probe
  misc_feature (1)..(25): SEQ ID NO: 1355; WAN024FFH; Start 131; Stop 155
aatcctactctgtgattgtggtacg

SEQ ID NO: 291490 - DNA, 25 bp, Artificial
  probe
  misc_feature (1)..(25): SEQ ID NO: 1355; WAN024FFH; Start 4; Stop 28
acagaaaccattaaattgatgaagg

SEQ ID NO: 291491 - DNA, 25 bp, Artificial
  probe
  misc_feature (1)..(25): SEQ ID NO: 1355; WAN024FFH; Start 2; Stop 26
tgacagaaaccattaaattgatgaa

SEQ ID NO: 291492 - DNA, 25 bp, Artificial
  probe
  misc_feature (1)..(25): SEQ ID NO: 1356; WAN024ETM; Start 204; Stop 228
tattacggacaagaagaatgacctg

SEQ ID NO: 291493 - DNA, 25 bp, Artificial
  probe
  misc_feature (1)..(25): SEQ ID NO: 1356; WAN024ETM; Start 87; Stop 111
aagaggagaagttgtcgttatcatc

SEQ ID NO: 291494 - DNA, 25 bp, Artificial
  probe
  misc_feature (1)..(25): SEQ ID NO: 1356; WAN024ETM; Start 201; Stop 225
cgatattacggacaagaagaatgac

SEQ ID NO: 291495 - DNA, 25 bp, Artificial
  probe
  misc_feature (1)..(25): SEQ ID NO: 1356; WAN024ETM; Start 203; Stop 227
atattacggacaagaagaatgacct

SEQ ID NO: 291496 - DNA, 25 bp, Artificial
  probe
  misc_feature (1)..(25): SEQ ID NO: 1356; WAN024ETM; Start 202; Stop 226
gatattacggacaagaagaatgacc

SEQ ID NO: 291497 - DNA, 25 bp, Artificial
  probe
  misc_feature (1)..(25): SEQ ID NO: 1356; WAN024ETM; Start 132; Stop 156
atctaccttgcttcgctctatgaat

SEQ ID NO: 291498 - DNA, 25 bp, Artificial
  probe
  misc_feature (1)..(25): SEQ ID NO: 1356; WAN024ETM; Start 131; Stop 155
aatctaccttgcttcgctctatgaa

SEQ ID NO: 291499 - DNA, 25 bp, Artificial
  probe
  misc_feature (1)..(25): SEQ ID NO: 1356; WAN024ETM; Start 133; Stop 157
tctaccttgcttcgctctatgaatt

SEQ ID NO: 291500 - DNA, 25 bp, Artificial
  probe
  misc_feature (1)..(25): SEQ ID NO: 1356; WAN024ETM; Start 88; Stop 112
agaggagaagttgtcgttatcatcg

SEQ ID NO: 291501 - DNA, 25 bp, Artificial
  probe
  misc_feature (1)..(25): SEQ ID NO: 1356; WAN024ETM; Start 200; Stop 224
tcgatattacggacaagaagaatga

SEQ ID NO: 291502 - DNA, 25 bp, Artificial
  probe
  misc_feature (1)..(25): SEQ ID NO: 1356; WAN024ETM; Start 205; Stop 229
attacggacaagaagaatgacctgt

SEQ ID NO: 291503 - DNA, 25 bp, Artificial
  probe
  misc_feature (1)..(25): SEQ ID NO: 1356; WAN024ETM; Start 86; Stop 110
aaagaggagaagttgtcgttatcat

SEQ ID NO: 291504 - DNA, 25 bp, Artificial
  probe
  misc_feature (1)..(25): SEQ ID NO: 1356; WAN024ETM; Start 206; Stop 230
ttacggacaagaagaatgacctgtt

SEQ ID NO: 291505 - DNA, 25 bp, Artificial
  probe
  misc_feature (1)..(25): SEQ ID NO: 1356; WAN024ETM; Start 44; Stop 68
ttggaaagaatgaagtattgaaggg

SEQ ID NO: 291506 - DNA, 25 bp, Artificial
  probe
  misc_feature (1)..(25): SEQ ID NO: 1356; WAN024ETM; Start 577; Stop 601
atggttatcgtaacacatgagatgg

SEQ ID NO: 291507 - DNA, 25 bp, Artificial
  probe
  misc_feature (1)..(25): SEQ ID NO: 1356; WAN024ETM; Start 95; Stop 119
aagttgtcgttatcatcggtccttc

SEQ ID NO: 291508 - DNA, 25 bp, Artificial
  probe
  misc_feature (1)..(25): SEQ ID NO: 1356; WAN024ETM; Start 94; Stop 118
gaagttgtcgttatcatcggtcctt

SEQ ID NO: 291509 - DNA, 25 bp, Artificial
  probe
  misc_feature (1)..(25): SEQ ID NO: 1356; WAN024ETM; Start 48; Stop 72
aaagaatgaagtattgaagggcatc

SEQ ID NO: 291510 - DNA, 25 bp, Artificial
  probe
  misc_feature (1)..(25): SEQ ID NO: 1356; WAN024ETM; Start 47; Stop 71
gaaagaatgaagtattgaagggcat

SEQ ID NO: 291511 - DNA, 25 bp, Artificial
  probe
  misc_feature (1)..(25): SEQ ID NO: 1356; WAN024ETM; Start 89; Stop 113
gaggagaagttgtcgttatcatcgg

SEQ ID NO: 291512 - DNA, 25 bp, Artificial
  probe
  misc_feature (1)..(25): SEQ ID NO: 1356; WAN024ETM; Start 46; Stop 70
ggaaagaatgaagtattgaagggca

SEQ ID NO: 291513 - DNA, 25 bp, Artificial
  probe
  misc_feature (1)..(25): SEQ ID NO: 1356; WAN024ETM; Start 45; Stop 69
tggaaagaatgaagtattgaagggc

SEQ ID NO: 291514 - DNA, 25 bp, Artificial
  probe
  misc_feature (1)..(25): SEQ ID NO: 1356; WAN024ETM; Start 274; Stop 298
ctctttcctaatatgactgtgatgg

SEQ ID NO: 291515 - DNA, 25 bp, Artificial
  probe
  misc_feature (1)..(25): SEQ ID NO: 1356; WAN024ETM; Start 197; Stop 221
gagtcgatattacggacaagaagaa

SEQ ID NO: 291516 - DNA, 25 bp, Artificial
  probe
  misc_feature (1)..(25): SEQ ID NO: 1356; WAN024ETM; Start 199; Stop 223
gtcgatattacggacaagaagaatg

SEQ ID NO: 291517 - DNA, 25 bp, Artificial
  probe
  misc_feature (1)..(25): SEQ ID NO: 1356; WAN024ETM; Start 198; Stop 222
agtcgatattacggacaagaagaat

SEQ ID NO: 291518 - DNA, 25 bp, Artificial
  probe
  misc_feature (1)..(25): SEQ ID NO: 1356; WAN024ETM; Start 49; Stop 73
aagaatgaagtattgaagggcatca

SEQ ID NO: 291519 - DNA, 25 bp, Artificial
  probe
  misc_feature (1)..(25): SEQ ID NO: 1356; WAN024ETM; Start 92; Stop 116
gagaagttgtcgttatcatcggtcc

SEQ ID NO: 291520 - DNA, 25 bp, Artificial
  probe
  misc_feature (1)..(25): SEQ ID NO: 1356; WAN024ETM; Start 91; Stop 115
ggagaagttgtcgttatcatcggtc

SEQ ID NO: 291521 - DNA, 25 bp, Artificial
  probe
  misc_feature (1)..(25): SEQ ID NO: 1356; WAN024ETM; Start 134; Stop 158
ctaccttgcttcgctctatgaattt

SEQ ID NO: 291522 - DNA, 25 bp, Artificial
  probe
  misc_feature (1)..(25): SEQ ID NO: 1356; WAN024ETM; Start 138; Stop 162
cttgcttcgctctatgaatttgttg

SEQ ID NO: 291523 - DNA, 25 bp, Artificial
  probe
  misc_feature (1)..(25): SEQ ID NO: 1356; WAN024ETM; Start 130; Stop 154
aaatctaccttgcttcgctctatga

SEQ ID NO: 291524 - DNA, 25 bp, Artificial
  probe
  misc_feature (1)..(25): SEQ ID NO: 1356; WAN024ETM; Start 135; Stop 159
taccttgcttcgctctatgaatttg

SEQ ID NO: 291525 - DNA, 25 bp, Artificial
  probe
  misc_feature (1)..(25): SEQ ID NO: 1357; WAN024D6K; Start 2140; Stop 2164
ttaaccatcttcctatcaaccttgt

SEQ ID NO: 291526 - DNA, 25 bp, Artificial
  probe
  misc_feature (1)..(25): SEQ ID NO: 1357; WAN024D6K; Start 1678; Stop 1702
atccgtccaattatgattacaggtg

SEQ ID NO: 291527 - DNA, 25 bp, Artificial
  probe
  misc_feature (1)..(25): SEQ ID NO: 1357; WAN024D6K; Start 2141; Stop 2165
taaccatcttcctatcaaccttgtt

SEQ ID NO: 291528 - DNA, 25 bp, Artificial
  probe
  misc_feature (1)..(25): SEQ ID NO: 1357; WAN024D6K; Start 1683; Stop 1707
tccaattatgattacaggtgaccac

SEQ ID NO: 291529 - DNA, 25 bp, Artificial
  probe
  misc_feature (1)..(25): SEQ ID NO: 1357; WAN024D6K; Start 2487; Stop 2511
caatgtcaagtctgtctaccaatcc

SEQ ID NO: 291530 - DNA, 25 bp, Artificial
  probe
  misc_feature (1)..(25): SEQ ID NO: 1357; WAN024D6K; Start 2492; Stop 2516
tcaagtctgtctaccaatccatctt

SEQ ID NO: 291531 - DNA, 25 bp, Artificial
  probe
  misc_feature (1)..(25): SEQ ID NO: 1357; WAN024D6K; Start 1129; Stop 1153
gctgatgatattgaactaggtcttg

SEQ ID NO: 291532 - DNA, 25 bp, Artificial
  probe
  misc_feature (1)..(25): SEQ ID NO: 1357; WAN024D6K; Start 2488; Stop 2512
aatgtcaagtctgtctaccaatcca

SEQ ID NO: 291533 - DNA, 25 bp, Artificial
  probe
  misc_feature (1)..(25): SEQ ID NO: 1357; WAN024D6K; Start 2139; Stop 2163
attaaccatcttcctatcaaccttg

SEQ ID NO: 291534 - DNA, 25 bp, Artificial
  probe
  misc_feature (1)..(25): SEQ ID NO: 1357; WAN024D6K; Start 1791; Stop 1815
actcaatgaactgtcagatgaagaa

SEQ ID NO: 291535 - DNA, 25 bp, Artificial
  probe
  misc_feature (1)..(25): SEQ ID NO: 1357; WAN024D6K; Start 1790; Stop 1814
aactcaatgaactgtcagatgaaga

SEQ ID NO: 291536 - DNA, 25 bp, Artificial
  probe
  misc_feature (1)..(25): SEQ ID NO: 1357; WAN024D6K; Start 1789; Stop 1813
gaactcaatgaactgtcagatgaag

SEQ ID NO: 291537 - DNA, 25 bp, Artificial
  probe
  misc_feature (1)..(25): SEQ ID NO: 1357; WAN024D6K; Start 1788; Stop 1812
tgaactcaatgaactgtcagatgaa

SEQ ID NO: 291538 - DNA, 25 bp, Artificial
  probe
  misc_feature (1)..(25): SEQ ID NO: 1357; WAN024D6K; Start 2489; Stop 2513
atgtcaagtctgtctaccaatccat

SEQ ID NO: 291539 - DNA, 25 bp, Artificial
  probe
  misc_feature (1)..(25): SEQ ID NO: 1357; WAN024D6K; Start 2494; Stop 2518
aagtctgtctaccaatccatcttga

SEQ ID NO: 291540 - DNA, 25 bp, Artificial
  probe
  misc_feature (1)..(25): SEQ ID NO: 1357; WAN024D6K; Start 719; Stop 743
ctgaagttggtcatattgctggtat

SEQ ID NO: 291541 - DNA, 25 bp, Artificial
  probe
  misc_feature (1)..(25): SEQ ID NO: 1357; WAN024D6K; Start 1679; Stop 1703
tccgtccaattatgattacaggtga

SEQ ID NO: 291542 - DNA, 25 bp, Artificial
  probe
  misc_feature (1)..(25): SEQ ID NO: 1357; WAN024D6K; Start 2491; Stop 2515
gtcaagtctgtctaccaatccatct

SEQ ID NO: 291543 - DNA, 25 bp, Artificial
  probe
  misc_feature (1)..(25): SEQ ID NO: 1357; WAN024D6K; Start 1065; Stop 1089
tacgctgactatgaacaagatgaca

SEQ ID NO: 291544 - DNA, 25 bp, Artificial
  probe
  misc_feature (1)..(25): SEQ ID NO: 1357; WAN024D6K; Start 1777; Stop 1801
ttaactggtgctgaactcaatgaac

SEQ ID NO: 291545 - DNA, 25 bp, Artificial
  probe
  misc_feature (1)..(25): SEQ ID NO: 1357; WAN024D6K; Start 1792; Stop 1816
ctcaatgaactgtcagatgaagaat

SEQ ID NO: 291546 - DNA, 25 bp, Artificial
  probe
  misc_feature (1)..(25): SEQ ID NO: 1357; WAN024D6K; Start 2484; Stop 2508
ctacaatgtcaagtctgtctaccaa

SEQ ID NO: 291547 - DNA, 25 bp, Artificial
  probe
  misc_feature (1)..(25): SEQ ID NO: 1357; WAN024D6K; Start 2485; Stop 2509
tacaatgtcaagtctgtctaccaat

SEQ ID NO: 291548 - DNA, 25 bp, Artificial
  probe
  misc_feature (1)..(25): SEQ ID NO: 1357; WAN024D6K; Start 1055; Stop 1079
ataagactggtacgctgactatgaa

SEQ ID NO: 291549 - DNA, 25 bp, Artificial
  probe
  misc_feature (1)..(25): SEQ ID NO: 1357; WAN024D6K; Start 2490; Stop 2514
tgtcaagtctgtctaccaatccatc

SEQ ID NO: 291550 - DNA, 25 bp, Artificial
  probe
  misc_feature (1)..(25): SEQ ID NO: 1357; WAN024D6K; Start 2486; Stop 2510
acaatgtcaagtctgtctaccaatc

SEQ ID NO: 291551 - DNA, 25 bp, Artificial
  probe
  misc_feature (1)..(25): SEQ ID NO: 1357; WAN024D6K; Start 1201; Stop 1225
gatgtggaaggtaacttgattggtg

SEQ ID NO: 291552 - DNA, 25 bp, Artificial
  probe
  misc_feature (1)..(25): SEQ ID NO: 1357; WAN024D6K; Start 1793; Stop 1817
tcaatgaactgtcagatgaagaatt

SEQ ID NO: 291553 - DNA, 25 bp, Artificial
  probe
  misc_feature (1)..(25): SEQ ID NO: 1357; WAN024D6K; Start 731; Stop 755
atattgctggtatgcttcaagatgc

SEQ ID NO: 291554 - DNA, 25 bp, Artificial
  probe
  misc_feature (1)..(25): SEQ ID NO: 1357; WAN024D6K; Start 1064; Stop 1088
gtacgctgactatgaacaagatgac

SEQ ID NO: 291555 - DNA, 25 bp, Artificial
  probe
  misc_feature (1)..(25): SEQ ID NO: 1357; WAN024D6K; Start 1054; Stop 1078
gataagactggtacgctgactatga

SEQ ID NO: 291556 - DNA, 25 bp, Artificial
  probe
  misc_feature (1)..(25): SEQ ID NO: 1357; WAN024D6K; Start 1052; Stop 1076
ctgataagactggtacgctgactat

SEQ ID NO: 291557 - DNA, 25 bp, Artificial
  probe
  misc_feature (1)..(25): SEQ ID NO: 1357; WAN024D6K; Start 1444; Stop 1468
gatattgctccgattgatgagaagg

SEQ ID NO: 291558 - DNA, 25 bp, Artificial
  probe
  misc_feature (1)..(25): SEQ ID NO: 1358; WAN024G43; Start 1079; Stop 1103
gtgctcttcgtatctctatctctga

SEQ ID NO: 291559 - DNA, 25 bp, Artificial
  probe
  misc_feature (1)..(25): SEQ ID NO: 1358; WAN024G43; Start 1074; Stop 1098
attccgtgctcttcgtatctctatc

SEQ ID NO: 291560 - DNA, 25 bp, Artificial
  probe
  misc_feature (1)..(25): SEQ ID NO: 1358; WAN024G43; Start 1080; Stop 1104
tgctcttcgtatctctatctctgag

SEQ ID NO: 291561 - DNA, 25 bp, Artificial
  probe
  misc_feature (1)..(25): SEQ ID NO: 1358; WAN024G43; Start 1073; Stop 1097
gattccgtgctcttcgtatctctat

SEQ ID NO: 291562 - DNA, 25 bp, Artificial
  probe
  misc_feature (1)..(25): SEQ ID NO: 1358; WAN024G43; Start 1078; Stop 1102
cgtgctcttcgtatctctatctctg

SEQ ID NO: 291563 - DNA, 25 bp, Artificial
  probe
  misc_feature (1)..(25): SEQ ID NO: 1358; WAN024G43; Start 1570; Stop 1594
ttggatgagttctctatgtcagcaa

SEQ ID NO: 291564 - DNA, 25 bp, Artificial
  probe
  misc_feature (1)..(25): SEQ ID NO: 1358; WAN024G43; Start 932; Stop 956
ctgaagatgagcagtatgaagcata

SEQ ID NO: 291565 - DNA, 25 bp, Artificial
  probe
  misc_feature (1)..(25): SEQ ID NO: 1358; WAN024G43; Start 223; Stop 247
gatgctcacttaatggttcttgctg

SEQ ID NO: 291566 - DNA, 25 bp, Artificial
  probe
  misc_feature (1)..(25): SEQ ID NO: 1358; WAN024G43; Start 221; Stop 245
ttgatgctcacttaatggttcttgc

SEQ ID NO: 291567 - DNA, 25 bp, Artificial
  probe
  misc_feature (1)..(25): SEQ ID NO: 1358; WAN024G43; Start 1569; Stop 1593
cttggatgagttctctatgtcagca

SEQ ID NO: 291568 - DNA, 25 bp, Artificial
  probe
  misc_feature (1)..(25): SEQ ID NO: 1358; WAN024G43; Start 1075; Stop 1099
ttccgtgctcttcgtatctctatct

SEQ ID NO: 291569 - DNA, 25 bp, Artificial
  probe
  misc_feature (1)..(25): SEQ ID NO: 1358; WAN024G43; Start 1571; Stop 1595
tggatgagttctctatgtcagcaac

SEQ ID NO: 291570 - DNA, 25 bp, Artificial
  probe
  misc_feature (1)..(25): SEQ ID NO: 1358; WAN024G43; Start 1027; Stop 1051
gaacttccttacttcgatatgcctc

SEQ ID NO: 291571 - DNA, 25 bp, Artificial
  probe
  misc_feature (1)..(25): SEQ ID NO: 1358; WAN024G43; Start 1375; Stop 1399
gacttgatccaatatacaatggcag

SEQ ID NO: 291572 - DNA, 25 bp, Artificial
  probe
  misc_feature (1)..(25): SEQ ID NO: 1358; WAN024G43; Start 1423; Stop 1447
tcatacctttaccaaccatacaacc

SEQ ID NO: 291573 - DNA, 25 bp, Artificial
  probe
  misc_feature (1)..(25): SEQ ID NO: 1358; WAN024G43; Start 1430; Stop 1454
tttaccaaccatacaacccatcaat

SEQ ID NO: 291574 - DNA, 25 bp, Artificial
  probe
  misc_feature (1)..(25): SEQ ID NO: 1358; WAN024G43; Start 1; Stop 25
atgacagaaatgcttaaaggaatcg

SEQ ID NO: 291575 - DNA, 25 bp, Artificial
  probe
  misc_feature (1)..(25): SEQ ID NO: 1358; WAN024G43; Start 1028; Stop 1052
aacttccttacttcgatatgcctca

SEQ ID NO: 291576 - DNA, 25 bp, Artificial
  probe
  misc_feature (1)..(25): SEQ ID NO: 1358; WAN024G43; Start 1372; Stop 1396
aacgacttgatccaatatacaatgg

SEQ ID NO: 291577 - DNA, 25 bp, Artificial
  probe
  misc_feature (1)..(25): SEQ ID NO: 1358; WAN024G43; Start 1572; Stop 1596
ggatgagttctctatgtcagcaaca

SEQ ID NO: 291578 - DNA, 25 bp, Artificial
  probe
  misc_feature (1)..(25): SEQ ID NO: 1358; WAN024G43; Start 1431; Stop 1455
ttaccaaccatacaacccatcaatc

SEQ ID NO: 291579 - DNA, 25 bp, Artificial
  probe
  misc_feature (1)..(25): SEQ ID NO: 1358; WAN024G43; Start 1422; Stop 1446
ttcatacctttaccaaccatacaac

SEQ ID NO: 291580 - DNA, 25 bp, Artificial
  probe
  misc_feature (1)..(25): SEQ ID NO: 1358; WAN024G43; Start 1413; Stop 1437
cgaacaagtttcatacctttaccaa

SEQ ID NO: 291581 - DNA, 25 bp, Artificial
  probe
  misc_feature (1)..(25): SEQ ID NO: 1358; WAN024G43; Start 1077; Stop 1101
ccgtgctcttcgtatctctatctct

SEQ ID NO: 291582 - DNA, 25 bp, Artificial
  probe
  misc_feature (1)..(25): SEQ ID NO: 1358; WAN024G43; Start 1076; Stop 1100
tccgtgctcttcgtatctctatctc

SEQ ID NO: 291583 - DNA, 25 bp, Artificial
  probe
  misc_feature (1)..(25): SEQ ID NO: 1358; WAN024G43; Start 461; Stop 485
tcaatgaagaagtgattgtgattgc

SEQ ID NO: 291584 - DNA, 25 bp, Artificial
  probe
  misc_feature (1)..(25): SEQ ID NO: 1358; WAN024G43; Start 1411; Stop 1435
aacgaacaagtttcatacctttacc

SEQ ID NO: 291585 - DNA, 25 bp, Artificial
  probe
  misc_feature (1)..(25): SEQ ID NO: 1358; WAN024G43; Start 1412; Stop 1436
acgaacaagtttcatacctttacca

SEQ ID NO: 291586 - DNA, 25 bp, Artificial
  probe
  misc_feature (1)..(25): SEQ ID NO: 1358; WAN024G43; Start 1429; Stop 1453
ctttaccaaccatacaacccatcaa

SEQ ID NO: 291587 - DNA, 25 bp, Artificial
  probe
  misc_feature (1)..(25): SEQ ID NO: 1358; WAN024G43; Start 1415; Stop 1439
aacaagtttcatacctttaccaacc

SEQ ID NO: 291588 - DNA, 25 bp, Artificial
  probe
  misc_feature (1)..(25): SEQ ID NO: 1358; WAN024G43; Start 1384; Stop 1408
caatatacaatggcagcagaccgta

SEQ ID NO: 291589 - DNA, 25 bp, Artificial
  probe
  misc_feature (1)..(25): SEQ ID NO: 1358; WAN024G43; Start 1417; Stop 1441
caagtttcatacctttaccaaccat

SEQ ID NO: 291590 - DNA, 25 bp, Artificial
  probe
  misc_feature (1)..(25): SEQ ID NO: 1358; WAN024G43; Start 1416; Stop 1440
acaagtttcatacctttaccaacca

SEQ ID NO: 291591 - DNA, 25 bp, Artificial
  probe
  misc_feature (1)..(25): SEQ ID NO: 1359; WAN024CXX; Start 174; Stop 198
gagaattgtccttgatggtgaagaa

SEQ ID NO: 291592 - DNA, 25 bp, Artificial
  probe
  misc_feature (1)..(25): SEQ ID NO: 1359; WAN024CXX; Start 641; Stop 665
aactagattggtctgaagatgagga

SEQ ID NO: 291593 - DNA, 25 bp, Artificial
  probe
  misc_feature (1)..(25): SEQ ID NO: 1359; WAN024CXX; Start 644; Stop 668
tagattggtctgaagatgaggacaa

SEQ ID NO: 291594 - DNA, 25 bp, Artificial
  probe
  misc_feature (1)..(25): SEQ ID NO: 1359; WAN024CXX; Start 549; Stop 573
gatcatcacgcatagtattgaggag

SEQ ID NO: 291595 - DNA, 25 bp, Artificial
  probe
  misc_feature (1)..(25): SEQ ID NO: 1359; WAN024CXX; Start 550; Stop 574
atcatcacgcatagtattgaggagg

SEQ ID NO: 291596 - DNA, 25 bp, Artificial
  probe
  misc_feature (1)..(25): SEQ ID NO: 1359; WAN024CXX; Start 643; Stop 667
ctagattggtctgaagatgaggaca

SEQ ID NO: 291597 - DNA, 25 bp, Artificial
  probe
  misc_feature (1)..(25): SEQ ID NO: 1359; WAN024CXX; Start 642; Stop 666
actagattggtctgaagatgaggac

SEQ ID NO: 291598 - DNA, 25 bp, Artificial
  probe
  misc_feature (1)..(25): SEQ ID NO: 1359; WAN024CXX; Start 358; Stop 382
gctgtaagagacaagtatcctcatg

SEQ ID NO: 291599 - DNA, 25 bp, Artificial
  probe
  misc_feature (1)..(25): SEQ ID NO: 1359; WAN024CXX; Start 645; Stop 669
agattggtctgaagatgaggacaag

SEQ ID NO: 291600 - DNA, 25 bp, Artificial
  probe
  misc_feature (1)..(25): SEQ ID NO: 1359; WAN024CXX; Start 357; Stop 381
agctgtaagagacaagtatcctcat

SEQ ID NO: 291601 - DNA, 25 bp, Artificial
  probe
  misc_feature (1)..(25): SEQ ID NO: 1359; WAN024CXX; Start 157; Stop 181
ttagaagttcagtcagggagaattg

SEQ ID NO: 291602 - DNA, 25 bp, Artificial
  probe
  misc_feature (1)..(25): SEQ ID NO: 1359; WAN024CXX; Start 156; Stop 180
tttagaagttcagtcagggagaatt

SEQ ID NO: 291603 - DNA, 25 bp, Artificial
  probe
  misc_feature (1)..(25): SEQ ID NO: 1359; WAN024CXX; Start 175; Stop 199
agaattgtccttgatggtgaagaaa

SEQ ID NO: 291604 - DNA, 25 bp, Artificial
  probe
  misc_feature (1)..(25): SEQ ID NO: 1359; WAN024CXX; Start 1; Stop 25
atgacagaaattagactagagcacg

SEQ ID NO: 291605 - DNA, 25 bp, Artificial
  probe
  misc_feature (1)..(25): SEQ ID NO: 1359; WAN024CXX; Start 618; Stop 642
tgggcagattgtttcagaaattaaa

SEQ ID NO: 291606 - DNA, 25 bp, Artificial
  probe
  misc_feature (1)..(25): SEQ ID NO: 1359; WAN024CXX; Start 503; Stop 527
acgcttggtatcttgagattcacaa

SEQ ID NO: 291607 - DNA, 25 bp, Artificial
  probe
  misc_feature (1)..(25): SEQ ID NO: 1359; WAN024CXX; Start 474; Stop 498
cttggatgagatgacaaagatggaa

SEQ ID NO: 291608 - DNA, 25 bp, Artificial
  probe
  misc_feature (1)..(25): SEQ ID NO: 1359; WAN024CXX; Start 640; Stop 664
aaactagattggtctgaagatgagg

SEQ ID NO: 291609 - DNA, 25 bp, Artificial
  probe
  misc_feature (1)..(25): SEQ ID NO: 1359; WAN024CXX; Start 651; Stop 675
gtctgaagatgaggacaaggaagtc

SEQ ID NO: 291610 - DNA, 25 bp, Artificial
  probe
  misc_feature (1)..(25): SEQ ID NO: 1359; WAN024CXX; Start 158; Stop 182
tagaagttcagtcagggagaattgt

SEQ ID NO: 291611 - DNA, 25 bp, Artificial
  probe
  misc_feature (1)..(25): SEQ ID NO: 1359; WAN024CXX; Start 475; Stop 499
ttggatgagatgacaaagatggaac

SEQ ID NO: 291612 - DNA, 25 bp, Artificial
  probe
  misc_feature (1)..(25): SEQ ID NO: 1359; WAN024CXX; Start 476; Stop 500
tggatgagatgacaaagatggaact

SEQ ID NO: 291613 - DNA, 25 bp, Artificial
  probe
  misc_feature (1)..(25): SEQ ID NO: 1359; WAN024CXX; Start 10; Stop 34
attagactagagcacgtcagttatg

SEQ ID NO: 291614 - DNA, 25 bp, Artificial
  probe
  misc_feature (1)..(25): SEQ ID NO: 1359; WAN024CXX; Start 253; Stop 277
aagacggtgcttggaaatatcattc

SEQ ID NO: 291615 - DNA, 25 bp, Artificial
  probe
  misc_feature (1)..(25): SEQ ID NO: 1359; WAN024CXX; Start 30; Stop 54
ttatgcctatggtcaggagaggatt

SEQ ID NO: 291616 - DNA, 25 bp, Artificial
  probe
  misc_feature (1)..(25): SEQ ID NO: 1359; WAN024CXX; Start 9; Stop 33
aattagactagagcacgtcagttat

SEQ ID NO: 291617 - DNA, 25 bp, Artificial
  probe
  misc_feature (1)..(25): SEQ ID NO: 1359; WAN024CXX; Start 646; Stop 670
gattggtctgaagatgaggacaagg

SEQ ID NO: 291618 - DNA, 25 bp, Artificial
  probe
  misc_feature (1)..(25): SEQ ID NO: 1359; WAN024CXX; Start 477; Stop 501
ggatgagatgacaaagatggaactc

SEQ ID NO: 291619 - DNA, 25 bp, Artificial
  probe
  misc_feature (1)..(25): SEQ ID NO: 1359; WAN024CXX; Start 173; Stop 197
ggagaattgtccttgatggtgaaga

SEQ ID NO: 291620 - DNA, 25 bp, Artificial
  probe
  misc_feature (1)..(25): SEQ ID NO: 1359; WAN024CXX; Start 126; Stop 150
gaccaccctctttaatctaatcgct

SEQ ID NO: 291621 - DNA, 25 bp, Artificial
  probe
  misc_feature (1)..(25): SEQ ID NO: 1359; WAN024CXX; Start 478; Stop 502
gatgagatgacaaagatggaactcc

SEQ ID NO: 291622 - DNA, 25 bp, Artificial
  probe
  misc_feature (1)..(25): SEQ ID NO: 1359; WAN024CXX; Start 62; Stop 86
atatcaacctacaggtgacttcagg

SEQ ID NO: 291623 - DNA, 25 bp, Artificial
  probe
  misc_feature (1)..(25): SEQ ID NO: 1359; WAN024CXX; Start 617; Stop 641
ctgggcagattgtttcagaaattaa

SEQ ID NO: 291624 - DNA, 25 bp, Artificial
  probe
  misc_feature (1)..(25): SEQ ID NO: 1360; WAN024GI5; Start 739; Stop 763
tcggattatatggaattaccaccaa

SEQ ID NO: 291625 - DNA, 25 bp, Artificial
  probe
  misc_feature (1)..(25): SEQ ID NO: 1360; WAN024GI5; Start 320; Stop 344
ttgatgttgaatatgagaataacgg

SEQ ID NO: 291626 - DNA, 25 bp, Artificial
  probe
  misc_feature (1)..(25): SEQ ID NO: 1360; WAN024GI5; Start 146; Stop 170
gggatgatgatgttgatattgcttt

SEQ ID NO: 291627 - DNA, 25 bp, Artificial
  probe
  misc_feature (1)..(25): SEQ ID NO: 1360; WAN024GI5; Start 145; Stop 169
tgggatgatgatgttgatattgctt

SEQ ID NO: 291628 - DNA, 25 bp, Artificial
  probe
  misc_feature (1)..(25): SEQ ID NO: 1360; WAN024GI5; Start 740; Stop 764
cggattatatggaattaccaccaat

SEQ ID NO: 291629 - DNA, 25 bp, Artificial
  probe
  misc_feature (1)..(25): SEQ ID NO: 1360; WAN024GI5; Start 693; Stop 717
tagtgttcctgcgaaattagaagat

SEQ ID NO: 291630 - DNA, 25 bp, Artificial
  probe
  misc_feature (1)..(25): SEQ ID NO: 1360; WAN024GI5; Start 692; Stop 716
atagtgttcctgcgaaattagaaga

SEQ ID NO: 291631 - DNA, 25 bp, Artificial
  probe
  misc_feature (1)..(25): SEQ ID NO: 1360; WAN024GI5; Start 695; Stop 719
gtgttcctgcgaaattagaagatta

SEQ ID NO: 291632 - DNA, 25 bp, Artificial
  probe
  misc_feature (1)..(25): SEQ ID NO: 1360; WAN024GI5; Start 694; Stop 718
agtgttcctgcgaaattagaagatt

SEQ ID NO: 291633 - DNA, 25 bp, Artificial
  probe
  misc_feature (1)..(25): SEQ ID NO: 1360; WAN024GI5; Start 691; Stop 715
tatagtgttcctgcgaaattagaag

SEQ ID NO: 291634 - DNA, 25 bp, Artificial
  probe
  misc_feature (1)..(25): SEQ ID NO: 1360; WAN024GI5; Start 696; Stop 720
tgttcctgcgaaattagaagattat

SEQ ID NO: 291635 - DNA, 25 bp, Artificial
  probe
  misc_feature (1)..(25): SEQ ID NO: 1360; WAN024GI5; Start 319; Stop 343
cttgatgttgaatatgagaataacg

SEQ ID NO: 291636 - DNA, 25 bp, Artificial
  probe
  misc_feature (1)..(25): SEQ ID NO: 1360; WAN024GI5; Start 697; Stop 721
gttcctgcgaaattagaagattatt

SEQ ID NO: 291637 - DNA, 25 bp, Artificial
  probe
  misc_feature (1)..(25): SEQ ID NO: 1360; WAN024GI5; Start 362; Stop 386
ttccactagatttcgtagagaatcc

SEQ ID NO: 291638 - DNA, 25 bp, Artificial
  probe
  misc_feature (1)..(25): SEQ ID NO: 1360; WAN024GI5; Start 363; Stop 387
tccactagatttcgtagagaatccg

SEQ ID NO: 291639 - DNA, 25 bp, Artificial
  probe
  misc_feature (1)..(25): SEQ ID NO: 1360; WAN024GI5; Start 361; Stop 385
tttccactagatttcgtagagaatc

SEQ ID NO: 291640 - DNA, 25 bp, Artificial
  probe
  misc_feature (1)..(25): SEQ ID NO: 1360; WAN024GI5; Start 510; Stop 534
tattatgagtattcctaccctgttt

SEQ ID NO: 291641 - DNA, 25 bp, Artificial
  probe
  misc_feature (1)..(25): SEQ ID NO: 1360; WAN024GI5; Start 698; Stop 722
ttcctgcgaaattagaagattattt

SEQ ID NO: 291642 - DNA, 25 bp, Artificial
  probe
  misc_feature (1)..(25): SEQ ID NO: 1360; WAN024GI5; Start 509; Stop 533
atattatgagtattcctaccctgtt

SEQ ID NO: 291643 - DNA, 25 bp, Artificial
  probe
  misc_feature (1)..(25): SEQ ID NO: 1360; WAN024GI5; Start 313; Stop 337
aagattcttgatgttgaatatgaga

SEQ ID NO: 291644 - DNA, 25 bp, Artificial
  probe
  misc_feature (1)..(25): SEQ ID NO: 1360; WAN024GI5; Start 741; Stop 765
ggattatatggaattaccaccaata

SEQ ID NO: 291645 - DNA, 25 bp, Artificial
  probe
  misc_feature (1)..(25): SEQ ID NO: 1360; WAN024GI5; Start 18; Stop 42
acagttacatgaaacattaatcgaa

SEQ ID NO: 291646 - DNA, 25 bp, Artificial
  probe
  misc_feature (1)..(25): SEQ ID NO: 1360; WAN024GI5; Start 17; Stop 41
aacagttacatgaaacattaatcga

SEQ ID NO: 291647 - DNA, 25 bp, Artificial
  probe
  misc_feature (1)..(25): SEQ ID NO: 1360; WAN024GI5; Start 314; Stop 338
agattcttgatgttgaatatgagaa

SEQ ID NO: 291648 - DNA, 25 bp, Artificial
  probe
  misc_feature (1)..(25): SEQ ID NO: 1360; WAN024GI5; Start 699; Stop 723
tcctgcgaaattagaagattattta

SEQ ID NO: 291649 - DNA, 25 bp, Artificial
  probe
  misc_feature (1)..(25): SEQ ID NO: 1360; WAN024GI5; Start 318; Stop 342
tcttgatgttgaatatgagaataac

SEQ ID NO: 291650 - DNA, 25 bp, Artificial
  probe
  misc_feature (1)..(25): SEQ ID NO: 1360; WAN024GI5; Start 16; Stop 40
aaacagttacatgaaacattaatcg

SEQ ID NO: 291651 - DNA, 25 bp, Artificial
  probe
  misc_feature (1)..(25): SEQ ID NO: 1360; WAN024GI5; Start 511; Stop 535
attatgagtattcctaccctgtttt

SEQ ID NO: 291652 - DNA, 25 bp, Artificial
  probe
  misc_feature (1)..(25): SEQ ID NO: 1360; WAN024GI5; Start 508; Stop 532
aatattatgagtattcctaccctgt

SEQ ID NO: 291653 - DNA, 25 bp, Artificial
  probe
  misc_feature (1)..(25): SEQ ID NO: 1360; WAN024GI5; Start 360; Stop 384
ttttccactagatttcgtagagaat

SEQ ID NO: 291654 - DNA, 25 bp, Artificial
  probe
  misc_feature (1)..(25): SEQ ID NO: 1360; WAN024GI5; Start 769; Stop 793
aaaagagtcactcatcaaccaataa

SEQ ID NO: 291655 - DNA, 25 bp, Artificial
  probe
  misc_feature (1)..(25): SEQ ID NO: 1360; WAN024GI5; Start 19; Stop 43
cagttacatgaaacattaatcgaaa

SEQ ID NO: 291656 - DNA, 25 bp, Artificial
  probe
  misc_feature (1)..(25): SEQ ID NO: 1360; WAN024GI5; Start 744; Stop 768
ttatatggaattaccaccaatagaa

SEQ ID NO: 291657 - DNA, 25 bp, Artificial
  probe
  misc_feature (1)..(25): SEQ ID NO: 1361; WAN024F27; Start 751; Stop 775
tatacagacggtgagatggatgata

SEQ ID NO: 291658 - DNA, 25 bp, Artificial
  probe
  misc_feature (1)..(25): SEQ ID NO: 1361; WAN024F27; Start 752; Stop 776
atacagacggtgagatggatgatat

SEQ ID NO: 291659 - DNA, 25 bp, Artificial
  probe
  misc_feature (1)..(25): SEQ ID NO: 1361; WAN024F27; Start 750; Stop 774
ctatacagacggtgagatggatgat

SEQ ID NO: 291660 - DNA, 25 bp, Artificial
  probe
  misc_feature (1)..(25): SEQ ID NO: 1361; WAN024F27; Start 737; Stop 761
ttgatacaccaatctatacagacgg

SEQ ID NO: 291661 - DNA, 25 bp, Artificial
  probe
  misc_feature (1)..(25): SEQ ID NO: 1361; WAN024F27; Start 712; Stop 736
atcaacgagaacaaggatgtaatct

SEQ ID NO: 291662 - DNA, 25 bp, Artificial
  probe
  misc_feature (1)..(25): SEQ ID NO: 1361; WAN024F27; Start 713; Stop 737
tcaacgagaacaaggatgtaatctt

SEQ ID NO: 291663 - DNA, 25 bp, Artificial
  probe
  misc_feature (1)..(25): SEQ ID NO: 1361; WAN024F27; Start 1391; Stop 1415
aagcaagtatggataagattctagc

SEQ ID NO: 291664 - DNA, 25 bp, Artificial
  probe
  misc_feature (1)..(25): SEQ ID NO: 1361; WAN024F27; Start 1622; Stop 1646
caatctatggtgtcaaggttggaag

SEQ ID NO: 291665 - DNA, 25 bp, Artificial
  probe
  misc_feature (1)..(25): SEQ ID NO: 1361; WAN024F27; Start 1246; Stop 1270
ctagcagactgttcttctaataacc

SEQ ID NO: 291666 - DNA, 25 bp, Artificial
  probe
  misc_feature (1)..(25): SEQ ID NO: 1361; WAN024F27; Start 711; Stop 735
tatcaacgagaacaaggatgtaatc

SEQ ID NO: 291667 - DNA, 25 bp, Artificial
  probe
  misc_feature (1)..(25): SEQ ID NO: 1361; WAN024F27; Start 749; Stop 773
tctatacagacggtgagatggatga

SEQ ID NO: 291668 - DNA, 25 bp, Artificial
  probe
  misc_feature (1)..(25): SEQ ID NO: 1361; WAN024F27; Start 1245; Stop 1269
actagcagactgttcttctaataac

SEQ ID NO: 291669 - DNA, 25 bp, Artificial
  probe
  misc_feature (1)..(25): SEQ ID NO: 1361; WAN024F27; Start 220; Stop 244
gattcgattactgttgtggatgatg

SEQ ID NO: 291670 - DNA, 25 bp, Artificial
  probe
  misc_feature (1)..(25): SEQ ID NO: 1361; WAN024F27; Start 217; Stop 241
gatgattcgattactgttgtggatg

SEQ ID NO: 291671 - DNA, 25 bp, Artificial
  probe
  misc_feature (1)..(25): SEQ ID NO: 1361; WAN024F27; Start 216; Stop 240
agatgattcgattactgttgtggat

SEQ ID NO: 291672 - DNA, 25 bp, Artificial
  probe
  misc_feature (1)..(25): SEQ ID NO: 1361; WAN024F27; Start 219; Stop 243
tgattcgattactgttgtggatgat

SEQ ID NO: 291673 - DNA, 25 bp, Artificial
  probe
  misc_feature (1)..(25): SEQ ID NO: 1361; WAN024F27; Start 218; Stop 242
atgattcgattactgttgtggatga

SEQ ID NO: 291674 - DNA, 25 bp, Artificial
  probe
  misc_feature (1)..(25): SEQ ID NO: 1361; WAN024F27; Start 207; Stop 231
tattgagccagatgattcgattact

SEQ ID NO: 291675 - DNA, 25 bp, Artificial
  probe
  misc_feature (1)..(25): SEQ ID NO: 1361; WAN024F27; Start 206; Stop 230
ttattgagccagatgattcgattac

SEQ ID NO: 291676 - DNA, 25 bp, Artificial
  probe
  misc_feature (1)..(25): SEQ ID NO: 1361; WAN024F27; Start 710; Stop 734
atatcaacgagaacaaggatgtaat

SEQ ID NO: 291677 - DNA, 25 bp, Artificial
  probe
  misc_feature (1)..(25): SEQ ID NO: 1361; WAN024F27; Start 437; Stop 461
agattcattaccaagaataccgtcg

SEQ ID NO: 291678 - DNA, 25 bp, Artificial
  probe
  misc_feature (1)..(25): SEQ ID NO: 1361; WAN024F27; Start 738; Stop 762
tgatacaccaatctatacagacggt

SEQ ID NO: 291679 - DNA, 25 bp, Artificial
  probe
  misc_feature (1)..(25): SEQ ID NO: 1361; WAN024F27; Start 665; Stop 689
ccaagcattatcattatgaaggtgg

SEQ ID NO: 291680 - DNA, 25 bp, Artificial
  probe
  misc_feature (1)..(25): SEQ ID NO: 1361; WAN024F27; Start 221; Stop 245
attcgattactgttgtggatgatgg

SEQ ID NO: 291681 - DNA, 25 bp, Artificial
  probe
  misc_feature (1)..(25): SEQ ID NO: 1361; WAN024F27; Start 1679; Stop 1703
atcaagaaatcaaactccaagaagc

SEQ ID NO: 291682 - DNA, 25 bp, Artificial
  probe
  misc_feature (1)..(25): SEQ ID NO: 1361; WAN024F27; Start 1049; Stop 1073
gaaatagcgaagtggtcaagattac

SEQ ID NO: 291683 - DNA, 25 bp, Artificial
  probe
  misc_feature (1)..(25): SEQ ID NO: 1361; WAN024F27; Start 438; Stop 462
gattcattaccaagaataccgtcgt

SEQ ID NO: 291684 - DNA, 25 bp, Artificial
  probe
  misc_feature (1)..(25): SEQ ID NO: 1361; WAN024F27; Start 436; Stop 460
aagattcattaccaagaataccgtc

SEQ ID NO: 291685 - DNA, 25 bp, Artificial
  probe
  misc_feature (1)..(25): SEQ ID NO: 1361; WAN024F27; Start 664; Stop 688
accaagcattatcattatgaaggtg

SEQ ID NO: 291686 - DNA, 25 bp, Artificial
  probe
  misc_feature (1)..(25): SEQ ID NO: 1361; WAN024F27; Start 1637; Stop 1661
aggttggaagcgagattaaagaata

SEQ ID NO: 291687 - DNA, 25 bp, Artificial
  probe
  misc_feature (1)..(25): SEQ ID NO: 1361; WAN024F27; Start 993; Stop 1017
tatctcagttaaacacccaaatcca

SEQ ID NO: 291688 - DNA, 25 bp, Artificial
  probe
  misc_feature (1)..(25): SEQ ID NO: 1361; WAN024F27; Start 439; Stop 463
attcattaccaagaataccgtcgtg

SEQ ID NO: 291689 - DNA, 25 bp, Artificial
  probe
  misc_feature (1)..(25): SEQ ID NO: 1361; WAN024F27; Start 706; Stop 730
gaatatatcaacgagaacaaggatg

SEQ ID NO: 291690 - DNA, 25 bp, Artificial
  probe
  misc_feature (1)..(25): SEQ ID NO: 1362; WAN024EXI; Start 873; Stop 897
catcatctatctcctctgtgccaat

SEQ ID NO: 291691 - DNA, 25 bp, Artificial
  probe
  misc_feature (1)..(25): SEQ ID NO: 1362; WAN024EXI; Start 867; Stop 891
ttcagtcatcatctatctcctctgt

SEQ ID NO: 291692 - DNA, 25 bp, Artificial
  probe
  misc_feature (1)..(25): SEQ ID NO: 1362; WAN024EXI; Start 250; Stop 274
ggtcttgctatgactatcactatgg

SEQ ID NO: 291693 - DNA, 25 bp, Artificial
  probe
  misc_feature (1)..(25): SEQ ID NO: 1362; WAN024EXI; Start 874; Stop 898
atcatctatctcctctgtgccaatg

SEQ ID NO: 291694 - DNA, 25 bp, Artificial
  probe
  misc_feature (1)..(25): SEQ ID NO: 1362; WAN024EXI; Start 249; Stop 273
aggtcttgctatgactatcactatg

SEQ ID NO: 291695 - DNA, 25 bp, Artificial
  probe
  misc_feature (1)..(25): SEQ ID NO: 1362; WAN024EXI; Start 248; Stop 272
caggtcttgctatgactatcactat

SEQ ID NO: 291696 - DNA, 25 bp, Artificial
  probe
  misc_feature (1)..(25): SEQ ID NO: 1362; WAN024EXI; Start 866; Stop 890
attcagtcatcatctatctcctctg

SEQ ID NO: 291697 - DNA, 25 bp, Artificial
  probe
  misc_feature (1)..(25): SEQ ID NO: 1362; WAN024EXI; Start 865; Stop 889
tattcagtcatcatctatctcctct

SEQ ID NO: 291698 - DNA, 25 bp, Artificial
  probe
  misc_feature (1)..(25): SEQ ID NO: 1362; WAN024EXI; Start 868; Stop 892
tcagtcatcatctatctcctctgtg

SEQ ID NO: 291699 - DNA, 25 bp, Artificial
  probe
  misc_feature (1)..(25): SEQ ID NO: 1362; WAN024EXI; Start 2; Stop 26
tgacagagattaactggaaggataa

SEQ ID NO: 291700 - DNA, 25 bp, Artificial
  probe
  misc_feature (1)..(25): SEQ ID NO: 1362; WAN024EXI; Start 1; Stop 25
atgacagagattaactggaaggata

SEQ ID NO: 291701 - DNA, 25 bp, Artificial
  probe
  misc_feature (1)..(25): SEQ ID NO: 1362; WAN024EXI; Start 872; Stop 896
tcatcatctatctcctctgtgccaa

SEQ ID NO: 291702 - DNA, 25 bp, Artificial
  probe
  misc_feature (1)..(25): SEQ ID NO: 1362; WAN024EXI; Start 864; Stop 888
ttattcagtcatcatctatctcctc

SEQ ID NO: 291703 - DNA, 25 bp, Artificial
  probe
  misc_feature (1)..(25): SEQ ID NO: 1362; WAN024EXI; Start 1132; Stop 1156
tgtgttgcctttagttgtctcttta

SEQ ID NO: 291704 - DNA, 25 bp, Artificial
  probe
  misc_feature (1)..(25): SEQ ID NO: 1362; WAN024EXI; Start 1133; Stop 1157
gtgttgcctttagttgtctctttaa

SEQ ID NO: 291705 - DNA, 25 bp, Artificial
  probe
  misc_feature (1)..(25): SEQ ID NO: 1362; WAN024EXI; Start 3; Stop 27
gacagagattaactggaaggataat

SEQ ID NO: 291706 - DNA, 25 bp, Artificial
  probe
  misc_feature (1)..(25): SEQ ID NO: 1362; WAN024EXI; Start 459; Stop 483
tattggtggctttatcgcagaatta

SEQ ID NO: 291707 - DNA, 25 bp, Artificial
  probe
  misc_feature (1)..(25): SEQ ID NO: 1362; WAN024EXI; Start 467; Stop 491
gctttatcgcagaattatttggcat

SEQ ID NO: 291708 - DNA, 25 bp, Artificial
  probe
  misc_feature (1)..(25): SEQ ID NO: 1362; WAN024EXI; Start 1136; Stop 1160
ttgcctttagttgtctctttaacct

SEQ ID NO: 291709 - DNA, 25 bp, Artificial
  probe
  misc_feature (1)..(25): SEQ ID NO: 1362; WAN024EXI; Start 1135; Stop 1159
gttgcctttagttgtctctttaacc

SEQ ID NO: 291710 - DNA, 25 bp, Artificial
  probe
  misc_feature (1)..(25): SEQ ID NO: 1362; WAN024EXI; Start 1134; Stop 1158
tgttgcctttagttgtctctttaac

SEQ ID NO: 291711 - DNA, 25 bp, Artificial
  probe
  misc_feature (1)..(25): SEQ ID NO: 1362; WAN024EXI; Start 1131; Stop 1155
ttgtgttgcctttagttgtctcttt

SEQ ID NO: 291712 - DNA, 25 bp, Artificial
  probe
  misc_feature (1)..(25): SEQ ID NO: 1362; WAN024EXI; Start 1130; Stop 1154
tttgtgttgcctttagttgtctctt

SEQ ID NO: 291713 - DNA, 25 bp, Artificial
  probe
  misc_feature (1)..(25): SEQ ID NO: 1362; WAN024EXI; Start 869; Stop 893
cagtcatcatctatctcctctgtgc

SEQ ID NO: 291714 - DNA, 25 bp, Artificial
  probe
  misc_feature (1)..(25): SEQ ID NO: 1362; WAN024EXI; Start 457; Stop 481
tttattggtggctttatcgcagaat

SEQ ID NO: 291715 - DNA, 25 bp, Artificial
  probe
  misc_feature (1)..(25): SEQ ID NO: 1362; WAN024EXI; Start 1138; Stop 1162
gcctttagttgtctctttaacctga

SEQ ID NO: 291716 - DNA, 25 bp, Artificial
  probe
  misc_feature (1)..(25): SEQ ID NO: 1362; WAN024EXI; Start 870; Stop 894
agtcatcatctatctcctctgtgcc

SEQ ID NO: 291717 - DNA, 25 bp, Artificial
  probe
  misc_feature (1)..(25): SEQ ID NO: 1362; WAN024EXI; Start 464; Stop 488
gtggctttatcgcagaattatttgg

SEQ ID NO: 291718 - DNA, 25 bp, Artificial
  probe
  misc_feature (1)..(25): SEQ ID NO: 1362; WAN024EXI; Start 463; Stop 487
ggtggctttatcgcagaattatttg

SEQ ID NO: 291719 - DNA, 25 bp, Artificial
  probe
  misc_feature (1)..(25): SEQ ID NO: 1362; WAN024EXI; Start 460; Stop 484
attggtggctttatcgcagaattat

SEQ ID NO: 291720 - DNA, 25 bp, Artificial
  probe
  misc_feature (1)..(25): SEQ ID NO: 1362; WAN024EXI; Start 1137; Stop 1161
tgcctttagttgtctctttaacctg

SEQ ID NO: 291721 - DNA, 25 bp, Artificial
  probe
  misc_feature (1)..(25): SEQ ID NO: 1362; WAN024EXI; Start 468; Stop 492
ctttatcgcagaattatttggcatt

SEQ ID NO: 291722 - DNA, 25 bp, Artificial
  probe
  misc_feature (1)..(25): SEQ ID NO: 1362; WAN024EXI; Start 253; Stop 277
cttgctatgactatcactatgggag

SEQ ID NO: 291723 - DNA, 25 bp, Artificial
  probe
  misc_feature (1)..(25): SEQ ID NO: 1363; WAN024GAS; Start 569; Stop 593
ttagcggtattgttccttcagatag

SEQ ID NO: 291724 - DNA, 25 bp, Artificial
  probe
  misc_feature (1)..(25): SEQ ID NO: 1363; WAN024GAS; Start 568; Stop 592
attagcggtattgttccttcagata

SEQ ID NO: 291725 - DNA, 25 bp, Artificial
  probe
  misc_feature (1)..(25): SEQ ID NO: 1363; WAN024GAS; Start 575; Stop 599
gtattgttccttcagatagtcgctt

SEQ ID NO: 291726 - DNA, 25 bp, Artificial
  probe
  misc_feature (1)..(25): SEQ ID NO: 1363; WAN024GAS; Start 567; Stop 591
gattagcggtattgttccttcagat

SEQ ID NO: 291727 - DNA, 25 bp, Artificial
  probe
  misc_feature (1)..(25): SEQ ID NO: 1363; WAN024GAS; Start 563; Stop 587
atctgattagcggtattgttccttc

SEQ ID NO: 291728 - DNA, 25 bp, Artificial
  probe
  misc_feature (1)..(25): SEQ ID NO: 1363; WAN024GAS; Start 559; Stop 583
tctcatctgattagcggtattgttc

SEQ ID NO: 291729 - DNA, 25 bp, Artificial
  probe
  misc_feature (1)..(25): SEQ ID NO: 1363; WAN024GAS; Start 562; Stop 586
catctgattagcggtattgttcctt

SEQ ID NO: 291730 - DNA, 25 bp, Artificial
  probe
  misc_feature (1)..(25): SEQ ID NO: 1363; WAN024GAS; Start 613; Stop 637
gcctatgttcttggaatggttctat

SEQ ID NO: 291731 - DNA, 25 bp, Artificial
  probe
  misc_feature (1)..(25): SEQ ID NO: 1363; WAN024GAS; Start 570; Stop 594
tagcggtattgttccttcagatagt

SEQ ID NO: 291732 - DNA, 25 bp, Artificial
  probe
  misc_feature (1)..(25): SEQ ID NO: 1363; WAN024GAS; Start 864; Stop 888
aggtgttgctctagtaatgattgtt

SEQ ID NO: 291733 - DNA, 25 bp, Artificial
  probe
  misc_feature (1)..(25): SEQ ID NO: 1363; WAN024GAS; Start 560; Stop 584
ctcatctgattagcggtattgttcc

SEQ ID NO: 291734 - DNA, 25 bp, Artificial
  probe
  misc_feature (1)..(25): SEQ ID NO: 1363; WAN024GAS; Start 863; Stop 887
caggtgttgctctagtaatgattgt

SEQ ID NO: 291735 - DNA, 25 bp, Artificial
  probe
  misc_feature (1)..(25): SEQ ID NO: 1363; WAN024GAS; Start 865; Stop 889
ggtgttgctctagtaatgattgtta

SEQ ID NO: 291736 - DNA, 25 bp, Artificial
  probe
  misc_feature (1)..(25): SEQ ID NO: 1363; WAN024GAS; Start 561; Stop 585
tcatctgattagcggtattgttcct

SEQ ID NO: 291737 - DNA, 25 bp, Artificial
  probe
  misc_feature (1)..(25): SEQ ID NO: 1363; WAN024GAS; Start 614; Stop 638
cctatgttcttggaatggttctatt

SEQ ID NO: 291738 - DNA, 25 bp, Artificial
  probe
  misc_feature (1)..(25): SEQ ID NO: 1363; WAN024GAS; Start 410; Stop 434
ctgttcttgtgattaccaatagtca

SEQ ID NO: 291739 - DNA, 25 bp, Artificial
  probe
  misc_feature (1)..(25): SEQ ID NO: 1363; WAN024GAS; Start 409; Stop 433
tctgttcttgtgattaccaatagtc

SEQ ID NO: 291740 - DNA, 25 bp, Artificial
  probe
  misc_feature (1)..(25): SEQ ID NO: 1363; WAN024GAS; Start 574; Stop 598
ggtattgttccttcagatagtcgct

SEQ ID NO: 291741 - DNA, 25 bp, Artificial
  probe
  misc_feature (1)..(25): SEQ ID NO: 1363; WAN024GAS; Start 571; Stop 595
agcggtattgttccttcagatagtc

SEQ ID NO: 291742 - DNA, 25 bp, Artificial
  probe
  misc_feature (1)..(25): SEQ ID NO: 1363; WAN024GAS; Start 26; Stop 50
tagagttgacctatattgtgattgg

SEQ ID NO: 291743 - DNA, 25 bp, Artificial
  probe
  misc_feature (1)..(25): SEQ ID NO: 1363; WAN024GAS; Start 408; Stop 432
ttctgttcttgtgattaccaatagt

SEQ ID NO: 291744 - DNA, 25 bp, Artificial
  probe
  misc_feature (1)..(25): SEQ ID NO: 1363; WAN024GAS; Start 566; Stop 590
tgattagcggtattgttccttcaga

SEQ ID NO: 291745 - DNA, 25 bp, Artificial
  probe
  misc_feature (1)..(25): SEQ ID NO: 1363; WAN024GAS; Start 564; Stop 588
tctgattagcggtattgttccttca

SEQ ID NO: 291746 - DNA, 25 bp, Artificial
  probe
  misc_feature (1)..(25): SEQ ID NO: 1363; WAN024GAS; Start 676; Stop 700
gttattacagcaggtgttggagttc

SEQ ID NO: 291747 - DNA, 25 bp, Artificial
  probe
  misc_feature (1)..(25): SEQ ID NO: 1363; WAN024GAS; Start 618; Stop 642
tgttcttggaatggttctattcaca

SEQ ID NO: 291748 - DNA, 25 bp, Artificial
  probe
  misc_feature (1)..(25): SEQ ID NO: 1363; WAN024GAS; Start 619; Stop 643
gttcttggaatggttctattcacaa

SEQ ID NO: 291749 - DNA, 25 bp, Artificial
  probe
  misc_feature (1)..(25): SEQ ID NO: 1363; WAN024GAS; Start 27; Stop 51
agagttgacctatattgtgattggt

SEQ ID NO: 291750 - DNA, 25 bp, Artificial
  probe
  misc_feature (1)..(25): SEQ ID NO: 1363; WAN024GAS; Start 622; Stop 646
cttggaatggttctattcacaatga

SEQ ID NO: 291751 - DNA, 25 bp, Artificial
  probe
  misc_feature (1)..(25): SEQ ID NO: 1363; WAN024GAS; Start 621; Stop 645
tcttggaatggttctattcacaatg

SEQ ID NO: 291752 - DNA, 25 bp, Artificial
  probe
  misc_feature (1)..(25): SEQ ID NO: 1363; WAN024GAS; Start 617; Stop 641
atgttcttggaatggttctattcac

SEQ ID NO: 291753 - DNA, 25 bp, Artificial
  probe
  misc_feature (1)..(25): SEQ ID NO: 1363; WAN024GAS; Start 30; Stop 54
gttgacctatattgtgattggttgt

SEQ ID NO: 291754 - DNA, 25 bp, Artificial
  probe
  misc_feature (1)..(25): SEQ ID NO: 1363; WAN024GAS; Start 33; Stop 57
gacctatattgtgattggttgtcaa

SEQ ID NO: 291755 - DNA, 25 bp, Artificial
  probe
  misc_feature (1)..(25): SEQ ID NO: 1363; WAN024GAS; Start 31; Stop 55
ttgacctatattgtgattggttgtc

SEQ ID NO: 291756 - DNA, 25 bp, Artificial
  probe
  misc_feature (1)..(25): SEQ ID NO: 1364; WAN024AW9; Start 91; Stop 115
gataatcgtggctggtttaaagaaa

SEQ ID NO: 291757 - DNA, 25 bp, Artificial
  probe
  misc_feature (1)..(25): SEQ ID NO: 1364; WAN024AW9; Start 90; Stop 114
agataatcgtggctggtttaaagaa

SEQ ID NO: 291758 - DNA, 25 bp, Artificial
  probe
  misc_feature (1)..(25): SEQ ID NO: 1364; WAN024AW9; Start 89; Stop 113
gagataatcgtggctggtttaaaga

SEQ ID NO: 291759 - DNA, 25 bp, Artificial
  probe
  misc_feature (1)..(25): SEQ ID NO: 1364; WAN024AW9; Start 183; Stop 207
aaacaatgtatccttctcacgtaaa

SEQ ID NO: 291760 - DNA, 25 bp, Artificial
  probe
  misc_feature (1)..(25): SEQ ID NO: 1364; WAN024AW9; Start 94; Stop 118
aatcgtggctggtttaaagaaaatt

SEQ ID NO: 291761 - DNA, 25 bp, Artificial
  probe
  misc_feature (1)..(25): SEQ ID NO: 1364; WAN024AW9; Start 93; Stop 117
taatcgtggctggtttaaagaaaat

SEQ ID NO: 291762 - DNA, 25 bp, Artificial
  probe
  misc_feature (1)..(25): SEQ ID NO: 1364; WAN024AW9; Start 92; Stop 116
ataatcgtggctggtttaaagaaaa

SEQ ID NO: 291763 - DNA, 25 bp, Artificial
  probe
  misc_feature (1)..(25): SEQ ID NO: 1364; WAN024AW9; Start 95; Stop 119
atcgtggctggtttaaagaaaattt

SEQ ID NO: 291764 - DNA, 25 bp, Artificial
  probe
  misc_feature (1)..(25): SEQ ID NO: 1364; WAN024AW9; Start 181; Stop 205
caaaacaatgtatccttctcacgta

SEQ ID NO: 291765 - DNA, 25 bp, Artificial
  probe
  misc_feature (1)..(25): SEQ ID NO: 1364; WAN024AW9; Start 96; Stop 120
tcgtggctggtttaaagaaaatttc

SEQ ID NO: 291766 - DNA, 25 bp, Artificial
  probe
  misc_feature (1)..(25): SEQ ID NO: 1364; WAN024AW9; Start 184; Stop 208
aacaatgtatccttctcacgtaaaa

SEQ ID NO: 291767 - DNA, 25 bp, Artificial
  probe
  misc_feature (1)..(25): SEQ ID NO: 1364; WAN024AW9; Start 182; Stop 206
aaaacaatgtatccttctcacgtaa

SEQ ID NO: 291768 - DNA, 25 bp, Artificial
  probe
  misc_feature (1)..(25): SEQ ID NO: 1364; WAN024AW9; Start 97; Stop 121
cgtggctggtttaaagaaaatttcc

SEQ ID NO: 291769 - DNA, 25 bp, Artificial
  probe
  misc_feature (1)..(25): SEQ ID NO: 1364; WAN024AW9; Start 180; Stop 204
gcaaaacaatgtatccttctcacgt

SEQ ID NO: 291770 - DNA, 25 bp, Artificial
  probe
  misc_feature (1)..(25): SEQ ID NO: 1364; WAN024AW9; Start 179; Stop 203
tgcaaaacaatgtatccttctcacg

SEQ ID NO: 291771 - DNA, 25 bp, Artificial
  probe
  misc_feature (1)..(25): SEQ ID NO: 1364; WAN024AW9; Start 99; Stop 123
tggctggtttaaagaaaatttccaa

SEQ ID NO: 291772 - DNA, 25 bp, Artificial
  probe
  misc_feature (1)..(25): SEQ ID NO: 1364; WAN024AW9; Start 98; Stop 122
gtggctggtttaaagaaaatttcca

SEQ ID NO: 291773 - DNA, 25 bp, Artificial
  probe
  misc_feature (1)..(25): SEQ ID NO: 1364; WAN024AW9; Start 100; Stop 124
ggctggtttaaagaaaatttccaaa

SEQ ID NO: 291774 - DNA, 25 bp, Artificial
  probe
  misc_feature (1)..(25): SEQ ID NO: 1364; WAN024AW9; Start 101; Stop 125
gctggtttaaagaaaatttccaaaa

SEQ ID NO: 291775 - DNA, 25 bp, Artificial
  probe
  misc_feature (1)..(25): SEQ ID NO: 1364; WAN024AW9; Start 103; Stop 127
tggtttaaagaaaatttccaaaagg

SEQ ID NO: 291776 - DNA, 25 bp, Artificial
  probe
  misc_feature (1)..(25): SEQ ID NO: 1364; WAN024AW9; Start 104; Stop 128
ggtttaaagaaaatttccaaaagga

SEQ ID NO: 291777 - DNA, 25 bp, Artificial
  probe
  misc_feature (1)..(25): SEQ ID NO: 1364; WAN024AW9; Start 178; Stop 202
ttgcaaaacaatgtatccttctcac

SEQ ID NO: 291778 - DNA, 25 bp, Artificial
  probe
  misc_feature (1)..(25): SEQ ID NO: 1364; WAN024AW9; Start 102; Stop 126
ctggtttaaagaaaatttccaaaag

SEQ ID NO: 291779 - DNA, 25 bp, Artificial
  probe
  misc_feature (1)..(25): SEQ ID NO: 1364; WAN024AW9; Start 167; Stop 191
cagaaggaaaattgcaaaacaatgt

SEQ ID NO: 291780 - DNA, 25 bp, Artificial
  probe
  misc_feature (1)..(25): SEQ ID NO: 1364; WAN024AW9; Start 177; Stop 201
attgcaaaacaatgtatccttctca

SEQ ID NO: 291781 - DNA, 25 bp, Artificial
  probe
  misc_feature (1)..(25): SEQ ID NO: 1364; WAN024AW9; Start 172; Stop 196
ggaaaattgcaaaacaatgtatcct

SEQ ID NO: 291782 - DNA, 25 bp, Artificial
  probe
  misc_feature (1)..(25): SEQ ID NO: 1364; WAN024AW9; Start 171; Stop 195
aggaaaattgcaaaacaatgtatcc

SEQ ID NO: 291783 - DNA, 25 bp, Artificial
  probe
  misc_feature (1)..(25): SEQ ID NO: 1364; WAN024AW9; Start 176; Stop 200
aattgcaaaacaatgtatccttctc

SEQ ID NO: 291784 - DNA, 25 bp, Artificial
  probe
  misc_feature (1)..(25): SEQ ID NO: 1364; WAN024AW9; Start 168; Stop 192
agaaggaaaattgcaaaacaatgta

SEQ ID NO: 291785 - DNA, 25 bp, Artificial
  probe
  misc_feature (1)..(25): SEQ ID NO: 1364; WAN024AW9; Start 175; Stop 199
aaattgcaaaacaatgtatccttct

SEQ ID NO: 291786 - DNA, 25 bp, Artificial
  probe
  misc_feature (1)..(25): SEQ ID NO: 1364; WAN024AW9; Start 174; Stop 198
aaaattgcaaaacaatgtatccttc

SEQ ID NO: 291787 - DNA, 25 bp, Artificial
  probe
  misc_feature (1)..(25): SEQ ID NO: 1364; WAN024AW9; Start 173; Stop 197
gaaaattgcaaaacaatgtatcctt

SEQ ID NO: 291788 - DNA, 25 bp, Artificial
  probe
  misc_feature (1)..(25): SEQ ID NO: 1364; WAN024AW9; Start 170; Stop 194
aaggaaaattgcaaaacaatgtatc

SEQ ID NO: 291789 - DNA, 25 bp, Artificial
  probe
  misc_feature (1)..(25): SEQ ID NO: 1365; WAN024AW8; Start 43; Stop 67
attgatgccattccaggtatgttag

SEQ ID NO: 291790 - DNA, 25 bp, Artificial
  probe
  misc_feature (1)..(25): SEQ ID NO: 1365; WAN024AW8; Start 42; Stop 66
aattgatgccattccaggtatgtta

SEQ ID NO: 291791 - DNA, 25 bp, Artificial
  probe
  misc_feature (1)..(25): SEQ ID NO: 1365; WAN024AW8; Start 47; Stop 71
atgccattccaggtatgttagagtt

SEQ ID NO: 291792 - DNA, 25 bp, Artificial
  probe
  misc_feature (1)..(25): SEQ ID NO: 1365; WAN024AW8; Start 44; Stop 68
ttgatgccattccaggtatgttaga

SEQ ID NO: 291793 - DNA, 25 bp, Artificial
  probe
  misc_feature (1)..(25): SEQ ID NO: 1365; WAN024AW8; Start 46; Stop 70
gatgccattccaggtatgttagagt

SEQ ID NO: 291794 - DNA, 25 bp, Artificial
  probe
  misc_feature (1)..(25): SEQ ID NO: 1365; WAN024AW8; Start 45; Stop 69
tgatgccattccaggtatgttagag

SEQ ID NO: 291795 - DNA, 25 bp, Artificial
  probe
  misc_feature (1)..(25): SEQ ID NO: 1365; WAN024AW8; Start 308; Stop 332
aaacctttgggaatacctatcagac

SEQ ID NO: 291796 - DNA, 25 bp, Artificial
  probe
  misc_feature (1)..(25): SEQ ID NO: 1365; WAN024AW8; Start 307; Stop 331
gaaacctttgggaatacctatcaga

SEQ ID NO: 291797 - DNA, 25 bp, Artificial
  probe
  misc_feature (1)..(25): SEQ ID NO: 1365; WAN024AW8; Start 527; Stop 551
tttcagaagcagataaacatcatcc

SEQ ID NO: 291798 - DNA, 25 bp, Artificial
  probe
  misc_feature (1)..(25): SEQ ID NO: 1365; WAN024AW8; Start 50; Stop 74
ccattccaggtatgttagagtttga

SEQ ID NO: 291799 - DNA, 25 bp, Artificial
  probe
  misc_feature (1)..(25): SEQ ID NO: 1365; WAN024AW8; Start 528; Stop 552
ttcagaagcagataaacatcatccc

SEQ ID NO: 291800 - DNA, 25 bp, Artificial
  probe
  misc_feature (1)..(25): SEQ ID NO: 1365; WAN024AW8; Start 309; Stop 333
aacctttgggaatacctatcagaca

SEQ ID NO: 291801 - DNA, 25 bp, Artificial
  probe
  misc_feature (1)..(25): SEQ ID NO: 1365; WAN024AW8; Start 327; Stop 351
tcagacaataattgatgcaagcaag

SEQ ID NO: 291802 - DNA, 25 bp, Artificial
  probe
  misc_feature (1)..(25): SEQ ID NO: 1365; WAN024AW8; Start 311; Stop 335
cctttgggaatacctatcagacaat

SEQ ID NO: 291803 - DNA, 25 bp, Artificial
  probe
  misc_feature (1)..(25): SEQ ID NO: 1365; WAN024AW8; Start 306; Stop 330
tgaaacctttgggaatacctatcag

SEQ ID NO: 291804 - DNA, 25 bp, Artificial
  probe
  misc_feature (1)..(25): SEQ ID NO: 1365; WAN024AW8; Start 427; Stop 451
aatgattattgggctcttgaactca

SEQ ID NO: 291805 - DNA, 25 bp, Artificial
  probe
  misc_feature (1)..(25): SEQ ID NO: 1365; WAN024AW8; Start 305; Stop 329
gtgaaacctttgggaatacctatca

SEQ ID NO: 291806 - DNA, 25 bp, Artificial
  probe
  misc_feature (1)..(25): SEQ ID NO: 1365; WAN024AW8; Start 328; Stop 352
cagacaataattgatgcaagcaagg

SEQ ID NO: 291807 - DNA, 25 bp, Artificial
  probe
  misc_feature (1)..(25): SEQ ID NO: 1365; WAN024AW8; Start 51; Stop 75
cattccaggtatgttagagtttgat

SEQ ID NO: 291808 - DNA, 25 bp, Artificial
  probe
  misc_feature (1)..(25): SEQ ID NO: 1365; WAN024AW8; Start 41; Stop 65
aaattgatgccattccaggtatgtt

SEQ ID NO: 291809 - DNA, 25 bp, Artificial
  probe
  misc_feature (1)..(25): SEQ ID NO: 1365; WAN024AW8; Start 310; Stop 334
acctttgggaatacctatcagacaa

SEQ ID NO: 291810 - DNA, 25 bp, Artificial
  probe
  misc_feature (1)..(25): SEQ ID NO: 1365; WAN024AW8; Start 49; Stop 73
gccattccaggtatgttagagtttg

SEQ ID NO: 291811 - DNA, 25 bp, Artificial
  probe
  misc_feature (1)..(25): SEQ ID NO: 1365; WAN024AW8; Start 430; Stop 454
gattattgggctcttgaactcaaac

SEQ ID NO: 291812 - DNA, 25 bp, Artificial
  probe
  misc_feature (1)..(25): SEQ ID NO: 1365; WAN024AW8; Start 428; Stop 452
atgattattgggctcttgaactcaa

SEQ ID NO: 291813 - DNA, 25 bp, Artificial
  probe
  misc_feature (1)..(25): SEQ ID NO: 1365; WAN024AW8; Start 48; Stop 72
tgccattccaggtatgttagagttt

SEQ ID NO: 291814 - DNA, 25 bp, Artificial
  probe
  misc_feature (1)..(25): SEQ ID NO: 1365; WAN024AW8; Start 429; Stop 453
tgattattgggctcttgaactcaaa

SEQ ID NO: 291815 - DNA, 25 bp, Artificial
  probe
  misc_feature (1)..(25): SEQ ID NO: 1365; WAN024AW8; Start 431; Stop 455
attattgggctcttgaactcaaacc

SEQ ID NO: 291816 - DNA, 25 bp, Artificial
  probe
  misc_feature (1)..(25): SEQ ID NO: 1365; WAN024AW8; Start 312; Stop 336
ctttgggaatacctatcagacaata

SEQ ID NO: 291817 - DNA, 25 bp, Artificial
  probe
  misc_feature (1)..(25): SEQ ID NO: 1365; WAN024AW8; Start 52; Stop 76
attccaggtatgttagagtttgata

SEQ ID NO: 291818 - DNA, 25 bp, Artificial
  probe
  misc_feature (1)..(25): SEQ ID NO: 1365; WAN024AW8; Start 304; Stop 328
ggtgaaacctttgggaatacctatc

SEQ ID NO: 291819 - DNA, 25 bp, Artificial
  probe
  misc_feature (1)..(25): SEQ ID NO: 1365; WAN024AW8; Start 53; Stop 77
ttccaggtatgttagagtttgatat

SEQ ID NO: 291820 - DNA, 25 bp, Artificial
  probe
  misc_feature (1)..(25): SEQ ID NO: 1365; WAN024AW8; Start 313; Stop 337
tttgggaatacctatcagacaataa

SEQ ID NO: 291821 - DNA, 25 bp, Artificial
  probe
  misc_feature (1)..(25): SEQ ID NO: 1365; WAN024AW8; Start 315; Stop 339
tgggaatacctatcagacaataatt

SEQ ID NO: 291822 - DNA, 25 bp, Artificial
  probe
  misc_feature (1)..(25): SEQ ID NO: 1366; WAN024BF7; Start 281; Stop 305
accaagtcaagaccaagttaatact

SEQ ID NO: 291823 - DNA, 25 bp, Artificial
  probe
  misc_feature (1)..(25): SEQ ID NO: 1366; WAN024BF7; Start 282; Stop 306
ccaagtcaagaccaagttaatactc

SEQ ID NO: 291824 - DNA, 25 bp, Artificial
  probe
  misc_feature (1)..(25): SEQ ID NO: 1366; WAN024BF7; Start 283; Stop 307
caagtcaagaccaagttaatactca

SEQ ID NO: 291825 - DNA, 25 bp, Artificial
  probe
  misc_feature (1)..(25): SEQ ID NO: 1366; WAN024BF7; Start 280; Stop 304
gaccaagtcaagaccaagttaatac

SEQ ID NO: 291826 - DNA, 25 bp, Artificial
  probe
  misc_feature (1)..(25): SEQ ID NO: 1366; WAN024BF7; Start 284; Stop 308
aagtcaagaccaagttaatactcaa

SEQ ID NO: 291827 - DNA, 25 bp, Artificial
  probe
  misc_feature (1)..(25): SEQ ID NO: 1366; WAN024BF7; Start 286; Stop 310
gtcaagaccaagttaatactcaatg

SEQ ID NO: 291828 - DNA, 25 bp, Artificial
  probe
  misc_feature (1)..(25): SEQ ID NO: 1366; WAN024BF7; Start 287; Stop 311
tcaagaccaagttaatactcaatga

SEQ ID NO: 291829 - DNA, 25 bp, Artificial
  probe
  misc_feature (1)..(25): SEQ ID NO: 1366; WAN024BF7; Start 285; Stop 309
agtcaagaccaagttaatactcaat

SEQ ID NO: 291830 - DNA, 25 bp, Artificial
  probe
  misc_feature (1)..(25): SEQ ID NO: 1366; WAN024BF7; Start 42; Stop 66
tactgacttaaacaaagcctaccaa

SEQ ID NO: 291831 - DNA, 25 bp, Artificial
  probe
  misc_feature (1)..(25): SEQ ID NO: 1366; WAN024BF7; Start 41; Stop 65
ttactgacttaaacaaagcctacca

SEQ ID NO: 291832 - DNA, 25 bp, Artificial
  probe
  misc_feature (1)..(25): SEQ ID NO: 1366; WAN024BF7; Start 288; Stop 312
caagaccaagttaatactcaatgaa

SEQ ID NO: 291833 - DNA, 25 bp, Artificial
  probe
  misc_feature (1)..(25): SEQ ID NO: 1366; WAN024BF7; Start 40; Stop 64
attactgacttaaacaaagcctacc

SEQ ID NO: 291834 - DNA, 25 bp, Artificial
  probe
  misc_feature (1)..(25): SEQ ID NO: 1366; WAN024BF7; Start 43; Stop 67
actgacttaaacaaagcctaccaag

SEQ ID NO: 291835 - DNA, 25 bp, Artificial
  probe
  misc_feature (1)..(25): SEQ ID NO: 1366; WAN024BF7; Start 37; Stop 61
ttgattactgacttaaacaaagcct

SEQ ID NO: 291836 - DNA, 25 bp, Artificial
  probe
  misc_feature (1)..(25): SEQ ID NO: 1366; WAN024BF7; Start 105; Stop 129
ggagcaattaaactctattcttggt

SEQ ID NO: 291837 - DNA, 25 bp, Artificial
  probe
  misc_feature (1)..(25): SEQ ID NO: 1366; WAN024BF7; Start 46; Stop 70
gacttaaacaaagcctaccaagcat

SEQ ID NO: 291838 - DNA, 25 bp, Artificial
  probe
  misc_feature (1)..(25): SEQ ID NO: 1366; WAN024BF7; Start 38; Stop 62
tgattactgacttaaacaaagccta

SEQ ID NO: 291839 - DNA, 25 bp, Artificial
  probe
  misc_feature (1)..(25): SEQ ID NO: 1366; WAN024BF7; Start 104; Stop 128
aggagcaattaaactctattcttgg

SEQ ID NO: 291840 - DNA, 25 bp, Artificial
  probe
  misc_feature (1)..(25): SEQ ID NO: 1366; WAN024BF7; Start 39; Stop 63
gattactgacttaaacaaagcctac

SEQ ID NO: 291841 - DNA, 25 bp, Artificial
  probe
  misc_feature (1)..(25): SEQ ID NO: 1366; WAN024BF7; Start 44; Stop 68
ctgacttaaacaaagcctaccaagc

SEQ ID NO: 291842 - DNA, 25 bp, Artificial
  probe
  misc_feature (1)..(25): SEQ ID NO: 1366; WAN024BF7; Start 103; Stop 127
caggagcaattaaactctattcttg

SEQ ID NO: 291843 - DNA, 25 bp, Artificial
  probe
  misc_feature (1)..(25): SEQ ID NO: 1366; WAN024BF7; Start 102; Stop 126
tcaggagcaattaaactctattctt

SEQ ID NO: 291844 - DNA, 25 bp, Artificial
  probe
  misc_feature (1)..(25): SEQ ID NO: 1366; WAN024BF7; Start 101; Stop 125
ttcaggagcaattaaactctattct

SEQ ID NO: 291845 - DNA, 25 bp, Artificial
  probe
  misc_feature (1)..(25): SEQ ID NO: 1366; WAN024BF7; Start 47; Stop 71
acttaaacaaagcctaccaagcatg

SEQ ID NO: 291846 - DNA, 25 bp, Artificial
  probe
  misc_feature (1)..(25): SEQ ID NO: 1366; WAN024BF7; Start 106; Stop 130
gagcaattaaactctattcttggtt

SEQ ID NO: 291847 - DNA, 25 bp, Artificial
  probe
  misc_feature (1)..(25): SEQ ID NO: 1366; WAN024BF7; Start 45; Stop 69
tgacttaaacaaagcctaccaagca

SEQ ID NO: 291848 - DNA, 25 bp, Artificial
  probe
  misc_feature (1)..(25): SEQ ID NO: 1366; WAN024BF7; Start 100; Stop 124
tttcaggagcaattaaactctattc

SEQ ID NO: 291849 - DNA, 25 bp, Artificial
  probe
  misc_feature (1)..(25): SEQ ID NO: 1366; WAN024BF7; Start 99; Stop 123
ctttcaggagcaattaaactctatt

SEQ ID NO: 291850 - DNA, 25 bp, Artificial
  probe
  misc_feature (1)..(25): SEQ ID NO: 1366; WAN024BF7; Start 98; Stop 122
gctttcaggagcaattaaactctat

SEQ ID NO: 291851 - DNA, 25 bp, Artificial
  probe
  misc_feature (1)..(25): SEQ ID NO: 1366; WAN024BF7; Start 28; Stop 52
gctcatactttgattactgacttaa

SEQ ID NO: 291852 - DNA, 25 bp, Artificial
  probe
  misc_feature (1)..(25): SEQ ID NO: 1366; WAN024BF7; Start 97; Stop 121
cgctttcaggagcaattaaactcta

SEQ ID NO: 291853 - DNA, 25 bp, Artificial
  probe
  misc_feature (1)..(25): SEQ ID NO: 1366; WAN024BF7; Start 289; Stop 313
aagaccaagttaatactcaatgaaa

SEQ ID NO: 291854 - DNA, 25 bp, Artificial
  probe
  misc_feature (1)..(25): SEQ ID NO: 1366; WAN024BF7; Start 27; Stop 51
agctcatactttgattactgactta

SEQ ID NO: 291855 - DNA, 25 bp, Artificial
  probe
  misc_feature (1)..(25): SEQ ID NO: 1367; WAN024FOJ; Start 598; Stop 622
gtggttagtgatggtagttatggaa

SEQ ID NO: 291856 - DNA, 25 bp, Artificial
  probe
  misc_feature (1)..(25): SEQ ID NO: 1367; WAN024FOJ; Start 585; Stop 609
tgctgataatgtagtggttagtgat

SEQ ID NO: 291857 - DNA, 25 bp, Artificial
  probe
  misc_feature (1)..(25): SEQ ID NO: 1367; WAN024FOJ; Start 584; Stop 608
atgctgataatgtagtggttagtga

SEQ ID NO: 291858 - DNA, 25 bp, Artificial
  probe
  misc_feature (1)..(25): SEQ ID NO: 1367; WAN024FOJ; Start 592; Stop 616
aatgtagtggttagtgatggtagtt

SEQ ID NO: 291859 - DNA, 25 bp, Artificial
  probe
  misc_feature (1)..(25): SEQ ID NO: 1367; WAN024FOJ; Start 597; Stop 621
agtggttagtgatggtagttatgga

SEQ ID NO: 291860 - DNA, 25 bp, Artificial
  probe
  misc_feature (1)..(25): SEQ ID NO: 1367; WAN024FOJ; Start 596; Stop 620
tagtggttagtgatggtagttatgg

SEQ ID NO: 291861 - DNA, 25 bp, Artificial
  probe
  misc_feature (1)..(25): SEQ ID NO: 1367; WAN024FOJ; Start 586; Stop 610
gctgataatgtagtggttagtgatg

SEQ ID NO: 291862 - DNA, 25 bp, Artificial
  probe
  misc_feature (1)..(25): SEQ ID NO: 1367; WAN024FOJ; Start 599; Stop 623
tggttagtgatggtagttatggaat

SEQ ID NO: 291863 - DNA, 25 bp, Artificial
  probe
  misc_feature (1)..(25): SEQ ID NO: 1367; WAN024FOJ; Start 588; Stop 612
tgataatgtagtggttagtgatggt

SEQ ID NO: 291864 - DNA, 25 bp, Artificial
  probe
  misc_feature (1)..(25): SEQ ID NO: 1367; WAN024FOJ; Start 2; Stop 26
tgacagatgaattagaacggttaca

SEQ ID NO: 291865 - DNA, 25 bp, Artificial
  probe
  misc_feature (1)..(25): SEQ ID NO: 1367; WAN024FOJ; Start 583; Stop 607
aatgctgataatgtagtggttagtg

SEQ ID NO: 291866 - DNA, 25 bp, Artificial
  probe
  misc_feature (1)..(25): SEQ ID NO: 1367; WAN024FOJ; Start 582; Stop 606
caatgctgataatgtagtggttagt

SEQ ID NO: 291867 - DNA, 25 bp, Artificial
  probe
  misc_feature (1)..(25): SEQ ID NO: 1367; WAN024FOJ; Start 587; Stop 611
ctgataatgtagtggttagtgatgg

SEQ ID NO: 291868 - DNA, 25 bp, Artificial
  probe
  misc_feature (1)..(25): SEQ ID NO: 1367; WAN024FOJ; Start 594; Stop 618
tgtagtggttagtgatggtagttat

SEQ ID NO: 291869 - DNA, 25 bp, Artificial
  probe
  misc_feature (1)..(25): SEQ ID NO: 1367; WAN024FOJ; Start 593; Stop 617
atgtagtggttagtgatggtagtta

SEQ ID NO: 291870 - DNA, 25 bp, Artificial
  probe
  misc_feature (1)..(25): SEQ ID NO: 1367; WAN024FOJ; Start 591; Stop 615
taatgtagtggttagtgatggtagt

SEQ ID NO: 291871 - DNA, 25 bp, Artificial
  probe
  misc_feature (1)..(25): SEQ ID NO: 1367; WAN024FOJ; Start 1; Stop 25
atgacagatgaattagaacggttac

SEQ ID NO: 291872 - DNA, 25 bp, Artificial
  probe
  misc_feature (1)..(25): SEQ ID NO: 1367; WAN024FOJ; Start 595; Stop 619
gtagtggttagtgatggtagttatg

SEQ ID NO: 291873 - DNA, 25 bp, Artificial
  probe
  misc_feature (1)..(25): SEQ ID NO: 1367; WAN024FOJ; Start 3; Stop 27
gacagatgaattagaacggttacat

SEQ ID NO: 291874 - DNA, 25 bp, Artificial
  probe
  misc_feature (1)..(25): SEQ ID NO: 1367; WAN024FOJ; Start 576; Stop 600
gagtaccaatgctgataatgtagtg

SEQ ID NO: 291875 - DNA, 25 bp, Artificial
  probe
  misc_feature (1)..(25): SEQ ID NO: 1367; WAN024FOJ; Start 575; Stop 599
agagtaccaatgctgataatgtagt

SEQ ID NO: 291876 - DNA, 25 bp, Artificial
  probe
  misc_feature (1)..(25): SEQ ID NO: 1367; WAN024FOJ; Start 600; Stop 624
ggttagtgatggtagttatggaata

SEQ ID NO: 291877 - DNA, 25 bp, Artificial
  probe
  misc_feature (1)..(25): SEQ ID NO: 1367; WAN024FOJ; Start 590; Stop 614
ataatgtagtggttagtgatggtag

SEQ ID NO: 291878 - DNA, 25 bp, Artificial
  probe
  misc_feature (1)..(25): SEQ ID NO: 1367; WAN024FOJ; Start 589; Stop 613
gataatgtagtggttagtgatggta

SEQ ID NO: 291879 - DNA, 25 bp, Artificial
  probe
  misc_feature (1)..(25): SEQ ID NO: 1367; WAN024FOJ; Start 4; Stop 28
acagatgaattagaacggttacata

SEQ ID NO: 291880 - DNA, 25 bp, Artificial
  probe
  misc_feature (1)..(25): SEQ ID NO: 1367; WAN024FOJ; Start 15; Stop 39
agaacggttacataacttagaactt

SEQ ID NO: 291881 - DNA, 25 bp, Artificial
  probe
  misc_feature (1)..(25): SEQ ID NO: 1367; WAN024FOJ; Start 574; Stop 598
cagagtaccaatgctgataatgtag

SEQ ID NO: 291882 - DNA, 25 bp, Artificial
  probe
  misc_feature (1)..(25): SEQ ID NO: 1367; WAN024FOJ; Start 581; Stop 605
ccaatgctgataatgtagtggttag

SEQ ID NO: 291883 - DNA, 25 bp, Artificial
  probe
  misc_feature (1)..(25): SEQ ID NO: 1367; WAN024FOJ; Start 764; Stop 788
atcaacgaaatcatcacaaacgaat

SEQ ID NO: 291884 - DNA, 25 bp, Artificial
  probe
  misc_feature (1)..(25): SEQ ID NO: 1367; WAN024FOJ; Start 730; Stop 754
atgtatggtgactatatgcagcttc

SEQ ID NO: 291885 - DNA, 25 bp, Artificial
  probe
  misc_feature (1)..(25): SEQ ID NO: 1367; WAN024FOJ; Start 763; Stop 787
aatcaacgaaatcatcacaaacgaa

SEQ ID NO: 291886 - DNA, 25 bp, Artificial
  probe
  misc_feature (1)..(25): SEQ ID NO: 1367; WAN024FOJ; Start 729; Stop 753
tatgtatggtgactatatgcagctt

SEQ ID NO: 291887 - DNA, 25 bp, Artificial
  probe
  misc_feature (1)..(25): SEQ ID NO: 1367; WAN024FOJ; Start 647; Stop 671
tgtggttagacgaagttgaaagtta

SEQ ID NO: 291888 - DNA, 25 bp, Artificial
  probe
  misc_feature (1)..(25): SEQ ID NO: 1368; WAN024CS6; Start 683; Stop 707
ttaatgataccaagcagatgttcct

SEQ ID NO: 291889 - DNA, 25 bp, Artificial
  probe
  misc_feature (1)..(25): SEQ ID NO: 1368; WAN024CS6; Start 335; Stop 359
tcaatggaattaaggataagcaggt

SEQ ID NO: 291890 - DNA, 25 bp, Artificial
  probe
  misc_feature (1)..(25): SEQ ID NO: 1368; WAN024CS6; Start 684; Stop 708
taatgataccaagcagatgttcctt

SEQ ID NO: 291891 - DNA, 25 bp, Artificial
  probe
  misc_feature (1)..(25): SEQ ID NO: 1368; WAN024CS6; Start 336; Stop 360
caatggaattaaggataagcaggtt

SEQ ID NO: 291892 - DNA, 25 bp, Artificial
  probe
  misc_feature (1)..(25): SEQ ID NO: 1368; WAN024CS6; Start 338; Stop 362
atggaattaaggataagcaggttct

SEQ ID NO: 291893 - DNA, 25 bp, Artificial
  probe
  misc_feature (1)..(25): SEQ ID NO: 1368; WAN024CS6; Start 327; Stop 351
gcttcgtatcaatggaattaaggat

SEQ ID NO: 291894 - DNA, 25 bp, Artificial
  probe
  misc_feature (1)..(25): SEQ ID NO: 1368; WAN024CS6; Start 337; Stop 361
aatggaattaaggataagcaggttc

SEQ ID NO: 291895 - DNA, 25 bp, Artificial
  probe
  misc_feature (1)..(25): SEQ ID NO: 1368; WAN024CS6; Start 334; Stop 358
atcaatggaattaaggataagcagg

SEQ ID NO: 291896 - DNA, 25 bp, Artificial
  probe
  misc_feature (1)..(25): SEQ ID NO: 1368; WAN024CS6; Start 326; Stop 350
ggcttcgtatcaatggaattaagga

SEQ ID NO: 291897 - DNA, 25 bp, Artificial
  probe
  misc_feature (1)..(25): SEQ ID NO: 1368; WAN024CS6; Start 406; Stop 430
gatgaggtcaaggatcgtctatatg

SEQ ID NO: 291898 - DNA, 25 bp, Artificial
  probe
  misc_feature (1)..(25): SEQ ID NO: 1368; WAN024CS6; Start 405; Stop 429
ggatgaggtcaaggatcgtctatat

SEQ ID NO: 291899 - DNA, 25 bp, Artificial
  probe
  misc_feature (1)..(25): SEQ ID NO: 1368; WAN024CS6; Start 302; Stop 326
ctatctatgagaatgttgtctacgg

SEQ ID NO: 291900 - DNA, 25 bp, Artificial
  probe
  misc_feature (1)..(25): SEQ ID NO: 1368; WAN024CS6; Start 413; Stop 437
tcaaggatcgtctatatgattcagc

SEQ ID NO: 291901 - DNA, 25 bp, Artificial
  probe
  misc_feature (1)..(25): SEQ ID NO: 1368; WAN024CS6; Start 343; Stop 367
attaaggataagcaggttctggatg

SEQ ID NO: 291902 - DNA, 25 bp, Artificial
  probe
  misc_feature (1)..(25): SEQ ID NO: 1368; WAN024CS6; Start 342; Stop 366
aattaaggataagcaggttctggat

SEQ ID NO: 291903 - DNA, 25 bp, Artificial
  probe
  misc_feature (1)..(25): SEQ ID NO: 1368; WAN024CS6; Start 341; Stop 365
gaattaaggataagcaggttctgga

SEQ ID NO: 291904 - DNA, 25 bp, Artificial
  probe
  misc_feature (1)..(25): SEQ ID NO: 1368; WAN024CS6; Start 411; Stop 435
ggtcaaggatcgtctatatgattca

SEQ ID NO: 291905 - DNA, 25 bp, Artificial
  probe
  misc_feature (1)..(25): SEQ ID NO: 1368; WAN024CS6; Start 408; Stop 432
tgaggtcaaggatcgtctatatgat

SEQ ID NO: 291906 - DNA, 25 bp, Artificial
  probe
  misc_feature (1)..(25): SEQ ID NO: 1368; WAN024CS6; Start 407; Stop 431
atgaggtcaaggatcgtctatatga

SEQ ID NO: 291907 - DNA, 25 bp, Artificial
  probe
  misc_feature (1)..(25): SEQ ID NO: 1368; WAN024CS6; Start 339; Stop 363
tggaattaaggataagcaggttctg

SEQ ID NO: 291908 - DNA, 25 bp, Artificial
  probe
  misc_feature (1)..(25): SEQ ID NO: 1368; WAN024CS6; Start 410; Stop 434
aggtcaaggatcgtctatatgattc

SEQ ID NO: 291909 - DNA, 25 bp, Artificial
  probe
  misc_feature (1)..(25): SEQ ID NO: 1368; WAN024CS6; Start 409; Stop 433
gaggtcaaggatcgtctatatgatt

SEQ ID NO: 291910 - DNA, 25 bp, Artificial
  probe
  misc_feature (1)..(25): SEQ ID NO: 1368; WAN024CS6; Start 340; Stop 364
ggaattaaggataagcaggttctgg

SEQ ID NO: 291911 - DNA, 25 bp, Artificial
  probe
  misc_feature (1)..(25): SEQ ID NO: 1368; WAN024CS6; Start 345; Stop 369
taaggataagcaggttctggatgaa

SEQ ID NO: 291912 - DNA, 25 bp, Artificial
  probe
  misc_feature (1)..(25): SEQ ID NO: 1368; WAN024CS6; Start 344; Stop 368
ttaaggataagcaggttctggatga

SEQ ID NO: 291913 - DNA, 25 bp, Artificial
  probe
  misc_feature (1)..(25): SEQ ID NO: 1368; WAN024CS6; Start 412; Stop 436
gtcaaggatcgtctatatgattcag

SEQ ID NO: 291914 - DNA, 25 bp, Artificial
  probe
  misc_feature (1)..(25): SEQ ID NO: 1368; WAN024CS6; Start 414; Stop 438
caaggatcgtctatatgattcagct

SEQ ID NO: 291915 - DNA, 25 bp, Artificial
  probe
  misc_feature (1)..(25): SEQ ID NO: 1368; WAN024CS6; Start 301; Stop 325
actatctatgagaatgttgtctacg

SEQ ID NO: 291916 - DNA, 25 bp, Artificial
  probe
  misc_feature (1)..(25): SEQ ID NO: 1368; WAN024CS6; Start 96; Stop 120
aattacagccttgattggtccatct

SEQ ID NO: 291917 - DNA, 25 bp, Artificial
  probe
  misc_feature (1)..(25): SEQ ID NO: 1368; WAN024CS6; Start 420; Stop 444
tcgtctatatgattcagctattgga

SEQ ID NO: 291918 - DNA, 25 bp, Artificial
  probe
  misc_feature (1)..(25): SEQ ID NO: 1368; WAN024CS6; Start 331; Stop 355
cgtatcaatggaattaaggataagc

SEQ ID NO: 291919 - DNA, 25 bp, Artificial
  probe
  misc_feature (1)..(25): SEQ ID NO: 1368; WAN024CS6; Start 415; Stop 439
aaggatcgtctatatgattcagcta

SEQ ID NO: 291920 - DNA, 25 bp, Artificial
  probe
  misc_feature (1)..(25): SEQ ID NO: 1368; WAN024CS6; Start 278; Stop 302
aacaacctaatcctttccctatgac

SEQ ID NO: 291921 - DNA, 25 bp, Artificial
  probe
  misc_feature (1)..(25): SEQ ID NO: 1369; WAN024G39; Start 12; Stop 36
ttatgtaattggagatgttcacgga

SEQ ID NO: 291922 - DNA, 25 bp, Artificial
  probe
  misc_feature (1)..(25): SEQ ID NO: 1369; WAN024G39; Start 596; Stop 620
ctacagaagatggcaagattggaat

SEQ ID NO: 291923 - DNA, 25 bp, Artificial
  probe
  misc_feature (1)..(25): SEQ ID NO: 1369; WAN024G39; Start 11; Stop 35
attatgtaattggagatgttcacgg

SEQ ID NO: 291924 - DNA, 25 bp, Artificial
  probe
  misc_feature (1)..(25): SEQ ID NO: 1369; WAN024G39; Start 13; Stop 37
tatgtaattggagatgttcacggaa

SEQ ID NO: 291925 - DNA, 25 bp, Artificial
  probe
  misc_feature (1)..(25): SEQ ID NO: 1369; WAN024G39; Start 597; Stop 621
tacagaagatggcaagattggaatg

SEQ ID NO: 291926 - DNA, 25 bp, Artificial
  probe
  misc_feature (1)..(25): SEQ ID NO: 1369; WAN024G39; Start 665; Stop 689
ttacagaccaaggaatgacagaaca

SEQ ID NO: 291927 - DNA, 25 bp, Artificial
  probe
  misc_feature (1)..(25): SEQ ID NO: 1369; WAN024G39; Start 595; Stop 619
actacagaagatggcaagattggaa

SEQ ID NO: 291928 - DNA, 25 bp, Artificial
  probe
  misc_feature (1)..(25): SEQ ID NO: 1369; WAN024G39; Start 601; Stop 625
gaagatggcaagattggaatggatg

SEQ ID NO: 291929 - DNA, 25 bp, Artificial
  probe
  misc_feature (1)..(25): SEQ ID NO: 1369; WAN024G39; Start 600; Stop 624
agaagatggcaagattggaatggat

SEQ ID NO: 291930 - DNA, 25 bp, Artificial
  probe
  misc_feature (1)..(25): SEQ ID NO: 1369; WAN024G39; Start 591; Stop 615
ttggactacagaagatggcaagatt

SEQ ID NO: 291931 - DNA, 25 bp, Artificial
  probe
  misc_feature (1)..(25): SEQ ID NO: 1369; WAN024G39; Start 594; Stop 618
gactacagaagatggcaagattgga

SEQ ID NO: 291932 - DNA, 25 bp, Artificial
  probe
  misc_feature (1)..(25): SEQ ID NO: 1369; WAN024G39; Start 666; Stop 690
tacagaccaaggaatgacagaacac

SEQ ID NO: 291933 - DNA, 25 bp, Artificial
  probe
  misc_feature (1)..(25): SEQ ID NO: 1369; WAN024G39; Start 106; Stop 130
ttgattgacagaggtgaggatagtc

SEQ ID NO: 291934 - DNA, 25 bp, Artificial
  probe
  misc_feature (1)..(25): SEQ ID NO: 1369; WAN024G39; Start 592; Stop 616
tggactacagaagatggcaagattg

SEQ ID NO: 291935 - DNA, 25 bp, Artificial
  probe
  misc_feature (1)..(25): SEQ ID NO: 1369; WAN024G39; Start 262; Stop 286
ggtggagatacaaccattaactcta

SEQ ID NO: 291936 - DNA, 25 bp, Artificial
  probe
  misc_feature (1)..(25): SEQ ID NO: 1369; WAN024G39; Start 104; Stop 128
atttgattgacagaggtgaggatag

SEQ ID NO: 291937 - DNA, 25 bp, Artificial
  probe
  misc_feature (1)..(25): SEQ ID NO: 1369; WAN024G39; Start 103; Stop 127
gatttgattgacagaggtgaggata

SEQ ID NO: 291938 - DNA, 25 bp, Artificial
  probe
  misc_feature (1)..(25): SEQ ID NO: 1369; WAN024G39; Start 227; Stop 251
acccagaagaaagttatgaccatta

SEQ ID NO: 291939 - DNA, 25 bp, Artificial
  probe
  misc_feature (1)..(25): SEQ ID NO: 1369; WAN024G39; Start 675; Stop 699
aggaatgacagaacaccactttatc

SEQ ID NO: 291940 - DNA, 25 bp, Artificial
  probe
  misc_feature (1)..(25): SEQ ID NO: 1369; WAN024G39; Start 664; Stop 688
tttacagaccaaggaatgacagaac

SEQ ID NO: 291941 - DNA, 25 bp, Artificial
  probe
  misc_feature (1)..(25): SEQ ID NO: 1369; WAN024G39; Start 674; Stop 698
aaggaatgacagaacaccactttat

SEQ ID NO: 291942 - DNA, 25 bp, Artificial
  probe
  misc_feature (1)..(25): SEQ ID NO: 1369; WAN024G39; Start 265; Stop 289
ggagatacaaccattaactctatcc

SEQ ID NO: 291943 - DNA, 25 bp, Artificial
  probe
  misc_feature (1)..(25): SEQ ID NO: 1369; WAN024G39; Start 105; Stop 129
tttgattgacagaggtgaggatagt

SEQ ID NO: 291944 - DNA, 25 bp, Artificial
  probe
  misc_feature (1)..(25): SEQ ID NO: 1369; WAN024G39; Start 10; Stop 34
tattatgtaattggagatgttcacg

SEQ ID NO: 291945 - DNA, 25 bp, Artificial
  probe
  misc_feature (1)..(25): SEQ ID NO: 1369; WAN024G39; Start 663; Stop 687
ctttacagaccaaggaatgacagaa

SEQ ID NO: 291946 - DNA, 25 bp, Artificial
  probe
  misc_feature (1)..(25): SEQ ID NO: 1369; WAN024G39; Start 599; Stop 623
cagaagatggcaagattggaatgga

SEQ ID NO: 291947 - DNA, 25 bp, Artificial
  probe
  misc_feature (1)..(25): SEQ ID NO: 1369; WAN024G39; Start 90; Stop 114
gctctttctaggtgatttgattgac

SEQ ID NO: 291948 - DNA, 25 bp, Artificial
  probe
  misc_feature (1)..(25): SEQ ID NO: 1369; WAN024G39; Start 89; Stop 113
tgctctttctaggtgatttgattga

SEQ ID NO: 291949 - DNA, 25 bp, Artificial
  probe
  misc_feature (1)..(25): SEQ ID NO: 1369; WAN024G39; Start 86; Stop 110
agttgctctttctaggtgatttgat

SEQ ID NO: 291950 - DNA, 25 bp, Artificial
  probe
  misc_feature (1)..(25): SEQ ID NO: 1369; WAN024G39; Start 88; Stop 112
ttgctctttctaggtgatttgattg

SEQ ID NO: 291951 - DNA, 25 bp, Artificial
  probe
  misc_feature (1)..(25): SEQ ID NO: 1369; WAN024G39; Start 87; Stop 111
gttgctctttctaggtgatttgatt

SEQ ID NO: 291952 - DNA, 25 bp, Artificial
  probe
  misc_feature (1)..(25): SEQ ID NO: 1369; WAN024G39; Start 14; Stop 38
atgtaattggagatgttcacggaaa

SEQ ID NO: 291953 - DNA, 25 bp, Artificial
  probe
  misc_feature (1)..(25): SEQ ID NO: 1369; WAN024G39; Start 98; Stop 122
taggtgatttgattgacagaggtga

SEQ ID NO: 291954 - DNA, 25 bp, Artificial
  probe
  misc_feature (1)..(25): SEQ ID NO: 1370; WAN024DAR; Start 278; Stop 302
ccaccatagtatctgaagagcatat

SEQ ID NO: 291955 - DNA, 25 bp, Artificial
  probe
  misc_feature (1)..(25): SEQ ID NO: 1370; WAN024DAR; Start 269; Stop 293
atagtcaagccaccatagtatctga

SEQ ID NO: 291956 - DNA, 25 bp, Artificial
  probe
  misc_feature (1)..(25): SEQ ID NO: 1370; WAN024DAR; Start 270; Stop 294
tagtcaagccaccatagtatctgaa

SEQ ID NO: 291957 - DNA, 25 bp, Artificial
  probe
  misc_feature (1)..(25): SEQ ID NO: 1370; WAN024DAR; Start 265; Stop 289
actgatagtcaagccaccatagtat

SEQ ID NO: 291958 - DNA, 25 bp, Artificial
  probe
  misc_feature (1)..(25): SEQ ID NO: 1370; WAN024DAR; Start 277; Stop 301
gccaccatagtatctgaagagcata

SEQ ID NO: 291959 - DNA, 25 bp, Artificial
  probe
  misc_feature (1)..(25): SEQ ID NO: 1370; WAN024DAR; Start 264; Stop 288
aactgatagtcaagccaccatagta

SEQ ID NO: 291960 - DNA, 25 bp, Artificial
  probe
  misc_feature (1)..(25): SEQ ID NO: 1370; WAN024DAR; Start 268; Stop 292
gatagtcaagccaccatagtatctg

SEQ ID NO: 291961 - DNA, 25 bp, Artificial
  probe
  misc_feature (1)..(25): SEQ ID NO: 1370; WAN024DAR; Start 266; Stop 290
ctgatagtcaagccaccatagtatc

SEQ ID NO: 291962 - DNA, 25 bp, Artificial
  probe
  misc_feature (1)..(25): SEQ ID NO: 1370; WAN024DAR; Start 267; Stop 291
tgatagtcaagccaccatagtatct

SEQ ID NO: 291963 - DNA, 25 bp, Artificial
  probe
  misc_feature (1)..(25): SEQ ID NO: 1370; WAN024DAR; Start 105; Stop 129
tggatatgtagatattgacacagca

SEQ ID NO: 291964 - DNA, 25 bp, Artificial
  probe
  misc_feature (1)..(25): SEQ ID NO: 1370; WAN024DAR; Start 279; Stop 303
caccatagtatctgaagagcatatt

SEQ ID NO: 291965 - DNA, 25 bp, Artificial
  probe
  misc_feature (1)..(25): SEQ ID NO: 1370; WAN024DAR; Start 273; Stop 297
tcaagccaccatagtatctgaagag

SEQ ID NO: 291966 - DNA, 25 bp, Artificial
  probe
  misc_feature (1)..(25): SEQ ID NO: 1370; WAN024DAR; Start 272; Stop 296
gtcaagccaccatagtatctgaaga

SEQ ID NO: 291967 - DNA, 25 bp, Artificial
  probe
  misc_feature (1)..(25): SEQ ID NO: 1370; WAN024DAR; Start 271; Stop 295
agtcaagccaccatagtatctgaag

SEQ ID NO: 291968 - DNA, 25 bp, Artificial
  probe
  misc_feature (1)..(25): SEQ ID NO: 1370; WAN024DAR; Start 106; Stop 130
ggatatgtagatattgacacagcaa

SEQ ID NO: 291969 - DNA, 25 bp, Artificial
  probe
  misc_feature (1)..(25): SEQ ID NO: 1370; WAN024DAR; Start 104; Stop 128
ttggatatgtagatattgacacagc

SEQ ID NO: 291970 - DNA, 25 bp, Artificial
  probe
  misc_feature (1)..(25): SEQ ID NO: 1370; WAN024DAR; Start 322; Stop 346
gttattcatagcaatgcaccagttc

SEQ ID NO: 291971 - DNA, 25 bp, Artificial
  probe
  misc_feature (1)..(25): SEQ ID NO: 1370; WAN024DAR; Start 324; Stop 348
tattcatagcaatgcaccagttcaa

SEQ ID NO: 291972 - DNA, 25 bp, Artificial
  probe
  misc_feature (1)..(25): SEQ ID NO: 1370; WAN024DAR; Start 323; Stop 347
ttattcatagcaatgcaccagttca

SEQ ID NO: 291973 - DNA, 25 bp, Artificial
  probe
  misc_feature (1)..(25): SEQ ID NO: 1370; WAN024DAR; Start 274; Stop 298
caagccaccatagtatctgaagagc

SEQ ID NO: 291974 - DNA, 25 bp, Artificial
  probe
  misc_feature (1)..(25): SEQ ID NO: 1370; WAN024DAR; Start 112; Stop 136
gtagatattgacacagcaaatagcc

SEQ ID NO: 291975 - DNA, 25 bp, Artificial
  probe
  misc_feature (1)..(25): SEQ ID NO: 1370; WAN024DAR; Start 276; Stop 300
agccaccatagtatctgaagagcat

SEQ ID NO: 291976 - DNA, 25 bp, Artificial
  probe
  misc_feature (1)..(25): SEQ ID NO: 1370; WAN024DAR; Start 113; Stop 137
tagatattgacacagcaaatagccc

SEQ ID NO: 291977 - DNA, 25 bp, Artificial
  probe
  misc_feature (1)..(25): SEQ ID NO: 1370; WAN024DAR; Start 333; Stop 357
caatgcaccagttcaagtagaagaa

SEQ ID NO: 291978 - DNA, 25 bp, Artificial
  probe
  misc_feature (1)..(25): SEQ ID NO: 1370; WAN024DAR; Start 275; Stop 299
aagccaccatagtatctgaagagca

SEQ ID NO: 291979 - DNA, 25 bp, Artificial
  probe
  misc_feature (1)..(25): SEQ ID NO: 1370; WAN024DAR; Start 89; Stop 113
ttgaggaaagagttcttggatatgt

SEQ ID NO: 291980 - DNA, 25 bp, Artificial
  probe
  misc_feature (1)..(25): SEQ ID NO: 1370; WAN024DAR; Start 262; Stop 286
gaaactgatagtcaagccaccatag

SEQ ID NO: 291981 - DNA, 25 bp, Artificial
  probe
  misc_feature (1)..(25): SEQ ID NO: 1370; WAN024DAR; Start 90; Stop 114
tgaggaaagagttcttggatatgta

SEQ ID NO: 291982 - DNA, 25 bp, Artificial
  probe
  misc_feature (1)..(25): SEQ ID NO: 1370; WAN024DAR; Start 280; Stop 304
accatagtatctgaagagcatatta

SEQ ID NO: 291983 - DNA, 25 bp, Artificial
  probe
  misc_feature (1)..(25): SEQ ID NO: 1370; WAN024DAR; Start 102; Stop 126
tcttggatatgtagatattgacaca

SEQ ID NO: 291984 - DNA, 25 bp, Artificial
  probe
  misc_feature (1)..(25): SEQ ID NO: 1370; WAN024DAR; Start 111; Stop 135
tgtagatattgacacagcaaatagc

SEQ ID NO: 291985 - DNA, 25 bp, Artificial
  probe
  misc_feature (1)..(25): SEQ ID NO: 1370; WAN024DAR; Start 88; Stop 112
tttgaggaaagagttcttggatatg

SEQ ID NO: 291986 - DNA, 25 bp, Artificial
  probe
  misc_feature (1)..(25): SEQ ID NO: 1370; WAN024DAR; Start 261; Stop 285
agaaactgatagtcaagccaccata

SEQ ID NO: 291987 - DNA, 25 bp, Artificial
  probe
  misc_feature (1)..(25): SEQ ID NO: 1371; WAN024DH3; Start 317; Stop 341
cttatatcgctgaggttattcgttc

SEQ ID NO: 291988 - DNA, 25 bp, Artificial
  probe
  misc_feature (1)..(25): SEQ ID NO: 1371; WAN024DH3; Start 316; Stop 340
gcttatatcgctgaggttattcgtt

SEQ ID NO: 291989 - DNA, 25 bp, Artificial
  probe
  misc_feature (1)..(25): SEQ ID NO: 1371; WAN024DH3; Start 345; Stop 369
gattcagtctattcctagtggtcag

SEQ ID NO: 291990 - DNA, 25 bp, Artificial
  probe
  misc_feature (1)..(25): SEQ ID NO: 1371; WAN024DH3; Start 318; Stop 342
ttatatcgctgaggttattcgttca

SEQ ID NO: 291991 - DNA, 25 bp, Artificial
  probe
  misc_feature (1)..(25): SEQ ID NO: 1371; WAN024DH3; Start 347; Stop 371
ttcagtctattcctagtggtcagat

SEQ ID NO: 291992 - DNA, 25 bp, Artificial
  probe
  misc_feature (1)..(25): SEQ ID NO: 1371; WAN024DH3; Start 346; Stop 370
attcagtctattcctagtggtcaga

SEQ ID NO: 291993 - DNA, 25 bp, Artificial
  probe
  misc_feature (1)..(25): SEQ ID NO: 1371; WAN024DH3; Start 505; Stop 529
gctatcatctctggagtagacttga

SEQ ID NO: 291994 - DNA, 25 bp, Artificial
  probe
  misc_feature (1)..(25): SEQ ID NO: 1371; WAN024DH3; Start 348; Stop 372
tcagtctattcctagtggtcagatg

SEQ ID NO: 291995 - DNA, 25 bp, Artificial
  probe
  misc_feature (1)..(25): SEQ ID NO: 1371; WAN024DH3; Start 349; Stop 373
cagtctattcctagtggtcagatgg

SEQ ID NO: 291996 - DNA, 25 bp, Artificial
  probe
  misc_feature (1)..(25): SEQ ID NO: 1371; WAN024DH3; Start 344; Stop 368
ggattcagtctattcctagtggtca

SEQ ID NO: 291997 - DNA, 25 bp, Artificial
  probe
  misc_feature (1)..(25): SEQ ID NO: 1371; WAN024DH3; Start 504; Stop 528
agctatcatctctggagtagacttg

SEQ ID NO: 291998 - DNA, 25 bp, Artificial
  probe
  misc_feature (1)..(25): SEQ ID NO: 1371; WAN024DH3; Start 331; Stop 355
gttattcgttcagggattcagtcta

SEQ ID NO: 291999 - DNA, 25 bp, Artificial
  probe
  misc_feature (1)..(25): SEQ ID NO: 1371; WAN024DH3; Start 334; Stop 358
attcgttcagggattcagtctattc

SEQ ID NO: 292000 - DNA, 25 bp, Artificial
  probe
  misc_feature (1)..(25): SEQ ID NO: 1371; WAN024DH3; Start 351; Stop 375
gtctattcctagtggtcagatggag

SEQ ID NO: 292001 - DNA, 25 bp, Artificial
  probe
  misc_feature (1)..(25): SEQ ID NO: 1371; WAN024DH3; Start 333; Stop 357
tattcgttcagggattcagtctatt

SEQ ID NO: 292002 - DNA, 25 bp, Artificial
  probe
  misc_feature (1)..(25): SEQ ID NO: 1371; WAN024DH3; Start 332; Stop 356
ttattcgttcagggattcagtctat

SEQ ID NO: 292003 - DNA, 25 bp, Artificial
  probe
  misc_feature (1)..(25): SEQ ID NO: 1371; WAN024DH3; Start 315; Stop 339
cgcttatatcgctgaggttattcgt

SEQ ID NO: 292004 - DNA, 25 bp, Artificial
  probe
  misc_feature (1)..(25): SEQ ID NO: 1371; WAN024DH3; Start 350; Stop 374
agtctattcctagtggtcagatgga

SEQ ID NO: 292005 - DNA, 25 bp, Artificial
  probe
  misc_feature (1)..(25): SEQ ID NO: 1371; WAN024DH3; Start 511; Stop 535
atctctggagtagacttgatgtttg

SEQ ID NO: 292006 - DNA, 25 bp, Artificial
  probe
  misc_feature (1)..(25): SEQ ID NO: 1371; WAN024DH3; Start 7; Stop 31
gatttatcatcttggacagcctatt

SEQ ID NO: 292007 - DNA, 25 bp, Artificial
  probe
  misc_feature (1)..(25): SEQ ID NO: 1371; WAN024DH3; Start 515; Stop 539
ctggagtagacttgatgtttgtgac

SEQ ID NO: 292008 - DNA, 25 bp, Artificial
  probe
  misc_feature (1)..(25): SEQ ID NO: 1371; WAN024DH3; Start 455; Stop 479
ctccattgaccaaccaaattgttaa

SEQ ID NO: 292009 - DNA, 25 bp, Artificial
  probe
  misc_feature (1)..(25): SEQ ID NO: 1371; WAN024DH3; Start 517; Stop 541
ggagtagacttgatgtttgtgacta

SEQ ID NO: 292010 - DNA, 25 bp, Artificial
  probe
  misc_feature (1)..(25): SEQ ID NO: 1371; WAN024DH3; Start 582; Stop 606
tttaggtgctgctcttctctacttt

SEQ ID NO: 292011 - DNA, 25 bp, Artificial
  probe
  misc_feature (1)..(25): SEQ ID NO: 1371; WAN024DH3; Start 513; Stop 537
ctctggagtagacttgatgtttgtg

SEQ ID NO: 292012 - DNA, 25 bp, Artificial
  probe
  misc_feature (1)..(25): SEQ ID NO: 1371; WAN024DH3; Start 512; Stop 536
tctctggagtagacttgatgtttgt

SEQ ID NO: 292013 - DNA, 25 bp, Artificial
  probe
  misc_feature (1)..(25): SEQ ID NO: 1371; WAN024DH3; Start 8; Stop 32
atttatcatcttggacagcctattt

SEQ ID NO: 292014 - DNA, 25 bp, Artificial
  probe
  misc_feature (1)..(25): SEQ ID NO: 1371; WAN024DH3; Start 514; Stop 538
tctggagtagacttgatgtttgtga

SEQ ID NO: 292015 - DNA, 25 bp, Artificial
  probe
  misc_feature (1)..(25): SEQ ID NO: 1371; WAN024DH3; Start 352; Stop 376
tctattcctagtggtcagatggagg

SEQ ID NO: 292016 - DNA, 25 bp, Artificial
  probe
  misc_feature (1)..(25): SEQ ID NO: 1371; WAN024DH3; Start 519; Stop 543
agtagacttgatgtttgtgactaag

SEQ ID NO: 292017 - DNA, 25 bp, Artificial
  probe
  misc_feature (1)..(25): SEQ ID NO: 1371; WAN024DH3; Start 518; Stop 542
gagtagacttgatgtttgtgactaa

SEQ ID NO: 292018 - DNA, 25 bp, Artificial
  probe
  misc_feature (1)..(25): SEQ ID NO: 1371; WAN024DH3; Start 454; Stop 478
cctccattgaccaaccaaattgtta

SEQ ID NO: 292019 - DNA, 25 bp, Artificial
  probe
  misc_feature (1)..(25): SEQ ID NO: 1371; WAN024DH3; Start 516; Stop 540
tggagtagacttgatgtttgtgact

SEQ ID NO: 292020 - DNA, 25 bp, Artificial
  probe
  misc_feature (1)..(25): SEQ ID NO: 1372; WAN024G6K; Start 432; Stop 456
cttgaatacaccgattgagttctta

SEQ ID NO: 292021 - DNA, 25 bp, Artificial
  probe
  misc_feature (1)..(25): SEQ ID NO: 1372; WAN024G6K; Start 431; Stop 455
acttgaatacaccgattgagttctt

SEQ ID NO: 292022 - DNA, 25 bp, Artificial
  probe
  misc_feature (1)..(25): SEQ ID NO: 1372; WAN024G6K; Start 434; Stop 458
tgaatacaccgattgagttcttatc

SEQ ID NO: 292023 - DNA, 25 bp, Artificial
  probe
  misc_feature (1)..(25): SEQ ID NO: 1372; WAN024G6K; Start 428; Stop 452
aacacttgaatacaccgattgagtt

SEQ ID NO: 292024 - DNA, 25 bp, Artificial
  probe
  misc_feature (1)..(25): SEQ ID NO: 1372; WAN024G6K; Start 430; Stop 454
cacttgaatacaccgattgagttct

SEQ ID NO: 292025 - DNA, 25 bp, Artificial
  probe
  misc_feature (1)..(25): SEQ ID NO: 1372; WAN024G6K; Start 433; Stop 457
ttgaatacaccgattgagttcttat

SEQ ID NO: 292026 - DNA, 25 bp, Artificial
  probe
  misc_feature (1)..(25): SEQ ID NO: 1372; WAN024G6K; Start 429; Stop 453
acacttgaatacaccgattgagttc

SEQ ID NO: 292027 - DNA, 25 bp, Artificial
  probe
  misc_feature (1)..(25): SEQ ID NO: 1372; WAN024G6K; Start 426; Stop 450
gaaacacttgaatacaccgattgag

SEQ ID NO: 292028 - DNA, 25 bp, Artificial
  probe
  misc_feature (1)..(25): SEQ ID NO: 1372; WAN024G6K; Start 424; Stop 448
gagaaacacttgaatacaccgattg

SEQ ID NO: 292029 - DNA, 25 bp, Artificial
  probe
  misc_feature (1)..(25): SEQ ID NO: 1372; WAN024G6K; Start 419; Stop 443
gtcttgagaaacacttgaatacacc

SEQ ID NO: 292030 - DNA, 25 bp, Artificial
  probe
  misc_feature (1)..(25): SEQ ID NO: 1372; WAN024G6K; Start 418; Stop 442
ggtcttgagaaacacttgaatacac

SEQ ID NO: 292031 - DNA, 25 bp, Artificial
  probe
  misc_feature (1)..(25): SEQ ID NO: 1372; WAN024G6K; Start 425; Stop 449
agaaacacttgaatacaccgattga

SEQ ID NO: 292032 - DNA, 25 bp, Artificial
  probe
  misc_feature (1)..(25): SEQ ID NO: 1372; WAN024G6K; Start 423; Stop 447
tgagaaacacttgaatacaccgatt

SEQ ID NO: 292033 - DNA, 25 bp, Artificial
  probe
  misc_feature (1)..(25): SEQ ID NO: 1372; WAN024G6K; Start 422; Stop 446
ttgagaaacacttgaatacaccgat

SEQ ID NO: 292034 - DNA, 25 bp, Artificial
  probe
  misc_feature (1)..(25): SEQ ID NO: 1372; WAN024G6K; Start 421; Stop 445
cttgagaaacacttgaatacaccga

SEQ ID NO: 292035 - DNA, 25 bp, Artificial
  probe
  misc_feature (1)..(25): SEQ ID NO: 1372; WAN024G6K; Start 495; Stop 519
aaccttgaagcgacctgaattactc

SEQ ID NO: 292036 - DNA, 25 bp, Artificial
  probe
  misc_feature (1)..(25): SEQ ID NO: 1372; WAN024G6K; Start 420; Stop 444
tcttgagaaacacttgaatacaccg

SEQ ID NO: 292037 - DNA, 25 bp, Artificial
  probe
  misc_feature (1)..(25): SEQ ID NO: 1372; WAN024G6K; Start 427; Stop 451
aaacacttgaatacaccgattgagt

SEQ ID NO: 292038 - DNA, 25 bp, Artificial
  probe
  misc_feature (1)..(25): SEQ ID NO: 1372; WAN024G6K; Start 494; Stop 518
caaccttgaagcgacctgaattact

SEQ ID NO: 292039 - DNA, 25 bp, Artificial
  probe
  misc_feature (1)..(25): SEQ ID NO: 1372; WAN024G6K; Start 480; Stop 504
gagtctcttgatggcaaccttgaag

SEQ ID NO: 292040 - DNA, 25 bp, Artificial
  probe
  misc_feature (1)..(25): SEQ ID NO: 1372; WAN024G6K; Start 479; Stop 503
tgagtctcttgatggcaaccttgaa

SEQ ID NO: 292041 - DNA, 25 bp, Artificial
  probe
  misc_feature (1)..(25): SEQ ID NO: 1372; WAN024G6K; Start 478; Stop 502
ttgagtctcttgatggcaaccttga

SEQ ID NO: 292042 - DNA, 25 bp, Artificial
  probe
  misc_feature (1)..(25): SEQ ID NO: 1372; WAN024G6K; Start 476; Stop 500
ctttgagtctcttgatggcaacctt

SEQ ID NO: 292043 - DNA, 25 bp, Artificial
  probe
  misc_feature (1)..(25): SEQ ID NO: 1372; WAN024G6K; Start 578; Stop 602
tgacagatgaatttgttaagaaaga

SEQ ID NO: 292044 - DNA, 25 bp, Artificial
  probe
  misc_feature (1)..(25): SEQ ID NO: 1372; WAN024G6K; Start 477; Stop 501
tttgagtctcttgatggcaaccttg

SEQ ID NO: 292045 - DNA, 25 bp, Artificial
  probe
  misc_feature (1)..(25): SEQ ID NO: 1372; WAN024G6K; Start 493; Stop 517
gcaaccttgaagcgacctgaattac

SEQ ID NO: 292046 - DNA, 25 bp, Artificial
  probe
  misc_feature (1)..(25): SEQ ID NO: 1372; WAN024G6K; Start 629; Stop 653
atcatatggaagatgctctcaaata

SEQ ID NO: 292047 - DNA, 25 bp, Artificial
  probe
  misc_feature (1)..(25): SEQ ID NO: 1372; WAN024G6K; Start 188; Stop 212
gtggaactatccgtattttaggtga

SEQ ID NO: 292048 - DNA, 25 bp, Artificial
  probe
  misc_feature (1)..(25): SEQ ID NO: 1372; WAN024G6K; Start 187; Stop 211
agtggaactatccgtattttaggtg

SEQ ID NO: 292049 - DNA, 25 bp, Artificial
  probe
  misc_feature (1)..(25): SEQ ID NO: 1372; WAN024G6K; Start 577; Stop 601
ttgacagatgaatttgttaagaaag

SEQ ID NO: 292050 - DNA, 25 bp, Artificial
  probe
  misc_feature (1)..(25): SEQ ID NO: 1372; WAN024G6K; Start 579; Stop 603
gacagatgaatttgttaagaaagat

SEQ ID NO: 292051 - DNA, 25 bp, Artificial
  probe
  misc_feature (1)..(25): SEQ ID NO: 1372; WAN024G6K; Start 659; Stop 683
atcgcttgattgtcatgaaagaagg

SEQ ID NO: 292052 - DNA, 25 bp, Artificial
  probe
  misc_feature (1)..(25): SEQ ID NO: 1372; WAN024G6K; Start 658; Stop 682
aatcgcttgattgtcatgaaagaag

SEQ ID NO: 292053 - DNA, 25 bp, Artificial
  probe
  misc_feature (1)..(25): SEQ ID NO: 1373; WAN024FD3; Start 114; Stop 138
aggcatccgaacttatagtattgtt

SEQ ID NO: 292054 - DNA, 25 bp, Artificial
  probe
  misc_feature (1)..(25): SEQ ID NO: 1373; WAN024FD3; Start 113; Stop 137
caggcatccgaacttatagtattgt

SEQ ID NO: 292055 - DNA, 25 bp, Artificial
  probe
  misc_feature (1)..(25): SEQ ID NO: 1373; WAN024FD3; Start 112; Stop 136
gcaggcatccgaacttatagtattg

SEQ ID NO: 292056 - DNA, 25 bp, Artificial
  probe
  misc_feature (1)..(25): SEQ ID NO: 1373; WAN024FD3; Start 252; Stop 276
cgctggaacgattcttattacagat

SEQ ID NO: 292057 - DNA, 25 bp, Artificial
  probe
  misc_feature (1)..(25): SEQ ID NO: 1373; WAN024FD3; Start 154; Stop 178
ttgattatgatgacgaatgaatacg

SEQ ID NO: 292058 - DNA, 25 bp, Artificial
  probe
  misc_feature (1)..(25): SEQ ID NO: 1373; WAN024FD3; Start 253; Stop 277
gctggaacgattcttattacagata

SEQ ID NO: 292059 - DNA, 25 bp, Artificial
  probe
  misc_feature (1)..(25): SEQ ID NO: 1373; WAN024FD3; Start 522; Stop 546
tatcagaatgaccgattcaagaaca

SEQ ID NO: 292060 - DNA, 25 bp, Artificial
  probe
  misc_feature (1)..(25): SEQ ID NO: 1373; WAN024FD3; Start 521; Stop 545
gtatcagaatgaccgattcaagaac

SEQ ID NO: 292061 - DNA, 25 bp, Artificial
  probe
  misc_feature (1)..(25): SEQ ID NO: 1373; WAN024FD3; Start 517; Stop 541
aatggtatcagaatgaccgattcaa

SEQ ID NO: 292062 - DNA, 25 bp, Artificial
  probe
  misc_feature (1)..(25): SEQ ID NO: 1373; WAN024FD3; Start 520; Stop 544
ggtatcagaatgaccgattcaagaa

SEQ ID NO: 292063 - DNA, 25 bp, Artificial
  probe
  misc_feature (1)..(25): SEQ ID NO: 1373; WAN024FD3; Start 518; Stop 542
atggtatcagaatgaccgattcaag

SEQ ID NO: 292064 - DNA, 25 bp, Artificial
  probe
  misc_feature (1)..(25): SEQ ID NO: 1373; WAN024FD3; Start 523; Stop 547
atcagaatgaccgattcaagaacag

SEQ ID NO: 292065 - DNA, 25 bp, Artificial
  probe
  misc_feature (1)..(25): SEQ ID NO: 1373; WAN024FD3; Start 221; Stop 245
ctcaagttatatcaggtgtgggttt

SEQ ID NO: 292066 - DNA, 25 bp, Artificial
  probe
  misc_feature (1)..(25): SEQ ID NO: 1373; WAN024FD3; Start 75; Stop 99
tataattggtttagagagagggagc

SEQ ID NO: 292067 - DNA, 25 bp, Artificial
  probe
  misc_feature (1)..(25): SEQ ID NO: 1373; WAN024FD3; Start 519; Stop 543
tggtatcagaatgaccgattcaaga

SEQ ID NO: 292068 - DNA, 25 bp, Artificial
  probe
  misc_feature (1)..(25): SEQ ID NO: 1373; WAN024FD3; Start 652; Stop 676
cgactgatggaagaaattgctaata

SEQ ID NO: 292069 - DNA, 25 bp, Artificial
  probe
  misc_feature (1)..(25): SEQ ID NO: 1373; WAN024FD3; Start 76; Stop 100
ataattggtttagagagagggagca

SEQ ID NO: 292070 - DNA, 25 bp, Artificial
  probe
  misc_feature (1)..(25): SEQ ID NO: 1373; WAN024FD3; Start 60; Stop 84
agtagtcattggtagtataattggt

SEQ ID NO: 292071 - DNA, 25 bp, Artificial
  probe
  misc_feature (1)..(25): SEQ ID NO: 1373; WAN024FD3; Start 115; Stop 139
ggcatccgaacttatagtattgttt

SEQ ID NO: 292072 - DNA, 25 bp, Artificial
  probe
  misc_feature (1)..(25): SEQ ID NO: 1373; WAN024FD3; Start 59; Stop 83
cagtagtcattggtagtataattgg

SEQ ID NO: 292073 - DNA, 25 bp, Artificial
  probe
  misc_feature (1)..(25): SEQ ID NO: 1373; WAN024FD3; Start 77; Stop 101
taattggtttagagagagggagcaa

SEQ ID NO: 292074 - DNA, 25 bp, Artificial
  probe
  misc_feature (1)..(25): SEQ ID NO: 1373; WAN024FD3; Start 548; Stop 572
cgtttggagatgttaattctgacag

SEQ ID NO: 292075 - DNA, 25 bp, Artificial
  probe
  misc_feature (1)..(25): SEQ ID NO: 1373; WAN024FD3; Start 488; Stop 512
ataatcgtgtattggtttattgtgc

SEQ ID NO: 292076 - DNA, 25 bp, Artificial
  probe
  misc_feature (1)..(25): SEQ ID NO: 1373; WAN024FD3; Start 606; Stop 630
agcgtcatttattactctggaatta

SEQ ID NO: 292077 - DNA, 25 bp, Artificial
  probe
  misc_feature (1)..(25): SEQ ID NO: 1373; WAN024FD3; Start 605; Stop 629
tagcgtcatttattactctggaatt

SEQ ID NO: 292078 - DNA, 25 bp, Artificial
  probe
  misc_feature (1)..(25): SEQ ID NO: 1373; WAN024FD3; Start 546; Stop 570
agcgtttggagatgttaattctgac

SEQ ID NO: 292079 - DNA, 25 bp, Artificial
  probe
  misc_feature (1)..(25): SEQ ID NO: 1373; WAN024FD3; Start 148; Stop 172
gcatgtttgattatgatgacgaatg

SEQ ID NO: 292080 - DNA, 25 bp, Artificial
  probe
  misc_feature (1)..(25): SEQ ID NO: 1373; WAN024FD3; Start 79; Stop 103
attggtttagagagagggagcaaat

SEQ ID NO: 292081 - DNA, 25 bp, Artificial
  probe
  misc_feature (1)..(25): SEQ ID NO: 1373; WAN024FD3; Start 73; Stop 97
agtataattggtttagagagaggga

SEQ ID NO: 292082 - DNA, 25 bp, Artificial
  probe
  misc_feature (1)..(25): SEQ ID NO: 1373; WAN024FD3; Start 604; Stop 628
atagcgtcatttattactctggaat

SEQ ID NO: 292083 - DNA, 25 bp, Artificial
  probe
  misc_feature (1)..(25): SEQ ID NO: 1373; WAN024FD3; Start 74; Stop 98
gtataattggtttagagagagggag

SEQ ID NO: 292084 - DNA, 25 bp, Artificial
  probe
  misc_feature (1)..(25): SEQ ID NO: 1373; WAN024FD3; Start 116; Stop 140
gcatccgaacttatagtattgtttg

SEQ ID NO: 292085 - DNA, 25 bp, Artificial
  probe
  misc_feature (1)..(25): SEQ ID NO: 1373; WAN024FD3; Start 603; Stop 627
aatagcgtcatttattactctggaa

SEQ ID NO: 292086 - DNA, 25 bp, Artificial
  probe
  misc_feature (1)..(25): SEQ ID NO: 1374; WAN024CAG; Start 181; Stop 205
aatctcgctacaacaatacctattt

SEQ ID NO: 292087 - DNA, 25 bp, Artificial
  probe
  misc_feature (1)..(25): SEQ ID NO: 1374; WAN024CAG; Start 180; Stop 204
aaatctcgctacaacaatacctatt

SEQ ID NO: 292088 - DNA, 25 bp, Artificial
  probe
  misc_feature (1)..(25): SEQ ID NO: 1374; WAN024CAG; Start 177; Stop 201
attaaatctcgctacaacaatacct

SEQ ID NO: 292089 - DNA, 25 bp, Artificial
  probe
  misc_feature (1)..(25): SEQ ID NO: 1374; WAN024CAG; Start 176; Stop 200
cattaaatctcgctacaacaatacc

SEQ ID NO: 292090 - DNA, 25 bp, Artificial
  probe
  misc_feature (1)..(25): SEQ ID NO: 1374; WAN024CAG; Start 106; Stop 130
tctttctcgtttacattctctcttt

SEQ ID NO: 292091 - DNA, 25 bp, Artificial
  probe
  misc_feature (1)..(25): SEQ ID NO: 1374; WAN024CAG; Start 105; Stop 129
atctttctcgtttacattctctctt

SEQ ID NO: 292092 - DNA, 25 bp, Artificial
  probe
  misc_feature (1)..(25): SEQ ID NO: 1374; WAN024CAG; Start 178; Stop 202
ttaaatctcgctacaacaataccta

SEQ ID NO: 292093 - DNA, 25 bp, Artificial
  probe
  misc_feature (1)..(25): SEQ ID NO: 1374; WAN024CAG; Start 179; Stop 203
taaatctcgctacaacaatacctat

SEQ ID NO: 292094 - DNA, 25 bp, Artificial
  probe
  misc_feature (1)..(25): SEQ ID NO: 1374; WAN024CAG; Start 175; Stop 199
tcattaaatctcgctacaacaatac

SEQ ID NO: 292095 - DNA, 25 bp, Artificial
  probe
  misc_feature (1)..(25): SEQ ID NO: 1374; WAN024CAG; Start 172; Stop 196
aattcattaaatctcgctacaacaa

SEQ ID NO: 292096 - DNA, 25 bp, Artificial
  probe
  misc_feature (1)..(25): SEQ ID NO: 1374; WAN024CAG; Start 171; Stop 195
aaattcattaaatctcgctacaaca

SEQ ID NO: 292097 - DNA, 25 bp, Artificial
  probe
  misc_feature (1)..(25): SEQ ID NO: 1374; WAN024CAG; Start 173; Stop 197
attcattaaatctcgctacaacaat

SEQ ID NO: 292098 - DNA, 25 bp, Artificial
  probe
  misc_feature (1)..(25): SEQ ID NO: 1374; WAN024CAG; Start 104; Stop 128
tatctttctcgtttacattctctct

SEQ ID NO: 292099 - DNA, 25 bp, Artificial
  probe
  misc_feature (1)..(25): SEQ ID NO: 1374; WAN024CAG; Start 129; Stop 153
tttgagattatctagtgctccagat

SEQ ID NO: 292100 - DNA, 25 bp, Artificial
  probe
  misc_feature (1)..(25): SEQ ID NO: 1374; WAN024CAG; Start 174; Stop 198
ttcattaaatctcgctacaacaata

SEQ ID NO: 292101 - DNA, 25 bp, Artificial
  probe
  misc_feature (1)..(25): SEQ ID NO: 1374; WAN024CAG; Start 211; Stop 235
ttgtttgctactaaattaccttcat

SEQ ID NO: 292102 - DNA, 25 bp, Artificial
  probe
  misc_feature (1)..(25): SEQ ID NO: 1374; WAN024CAG; Start 210; Stop 234
attgtttgctactaaattaccttca

SEQ ID NO: 292103 - DNA, 25 bp, Artificial
  probe
  misc_feature (1)..(25): SEQ ID NO: 1374; WAN024CAG; Start 130; Stop 154
ttgagattatctagtgctccagata

SEQ ID NO: 292104 - DNA, 25 bp, Artificial
  probe
  misc_feature (1)..(25): SEQ ID NO: 1374; WAN024CAG; Start 103; Stop 127
atatctttctcgtttacattctctc

SEQ ID NO: 292105 - DNA, 25 bp, Artificial
  probe
  misc_feature (1)..(25): SEQ ID NO: 1374; WAN024CAG; Start 109; Stop 133
ttctcgtttacattctctcttttga

SEQ ID NO: 292106 - DNA, 25 bp, Artificial
  probe
  misc_feature (1)..(25): SEQ ID NO: 1374; WAN024CAG; Start 182; Stop 206
atctcgctacaacaatacctatttt

SEQ ID NO: 292107 - DNA, 25 bp, Artificial
  probe
  misc_feature (1)..(25): SEQ ID NO: 1374; WAN024CAG; Start 110; Stop 134
tctcgtttacattctctcttttgag

SEQ ID NO: 292108 - DNA, 25 bp, Artificial
  probe
  misc_feature (1)..(25): SEQ ID NO: 1374; WAN024CAG; Start 212; Stop 236
tgtttgctactaaattaccttcata

SEQ ID NO: 292109 - DNA, 25 bp, Artificial
  probe
  misc_feature (1)..(25): SEQ ID NO: 1374; WAN024CAG; Start 108; Stop 132
tttctcgtttacattctctcttttg

SEQ ID NO: 292110 - DNA, 25 bp, Artificial
  probe
  misc_feature (1)..(25): SEQ ID NO: 1374; WAN024CAG; Start 128; Stop 152
ttttgagattatctagtgctccaga

SEQ ID NO: 292111 - DNA, 25 bp, Artificial
  probe
  misc_feature (1)..(25): SEQ ID NO: 1374; WAN024CAG; Start 126; Stop 150
tcttttgagattatctagtgctcca

SEQ ID NO: 292112 - DNA, 25 bp, Artificial
  probe
  misc_feature (1)..(25): SEQ ID NO: 1374; WAN024CAG; Start 170; Stop 194
taaattcattaaatctcgctacaac

SEQ ID NO: 292113 - DNA, 25 bp, Artificial
  probe
  misc_feature (1)..(25): SEQ ID NO: 1374; WAN024CAG; Start 127; Stop 151
cttttgagattatctagtgctccag

SEQ ID NO: 292114 - DNA, 25 bp, Artificial
  probe
  misc_feature (1)..(25): SEQ ID NO: 1374; WAN024CAG; Start 183; Stop 207
tctcgctacaacaatacctatttta

SEQ ID NO: 292115 - DNA, 25 bp, Artificial
  probe
  misc_feature (1)..(25): SEQ ID NO: 1374; WAN024CAG; Start 125; Stop 149
ctcttttgagattatctagtgctcc

SEQ ID NO: 292116 - DNA, 25 bp, Artificial
  probe
  misc_feature (1)..(25): SEQ ID NO: 1374; WAN024CAG; Start 107; Stop 131
ctttctcgtttacattctctctttt

SEQ ID NO: 292117 - DNA, 25 bp, Artificial
  probe
  misc_feature (1)..(25): SEQ ID NO: 1374; WAN024CAG; Start 60; Stop 84
aatcagtggtatttcaaaagctcct

SEQ ID NO: 292118 - DNA, 25 bp, Artificial
  probe
  misc_feature (1)..(25): SEQ ID NO: 1374; WAN024CAG; Start 59; Stop 83
caatcagtggtatttcaaaagctcc

SEQ ID NO: 292119 - DNA, 25 bp, Artificial
  probe
  misc_feature (1)..(25): SEQ ID NO: 1375; WAN024ETY; Start 147; Stop 171
ttatatagatgcttggaagtacggc

SEQ ID NO: 292120 - DNA, 25 bp, Artificial
  probe
  misc_feature (1)..(25): SEQ ID NO: 1375; WAN024ETY; Start 148; Stop 172
tatatagatgcttggaagtacggct

SEQ ID NO: 292121 - DNA, 25 bp, Artificial
  probe
  misc_feature (1)..(25): SEQ ID NO: 1375; WAN024ETY; Start 146; Stop 170
cttatatagatgcttggaagtacgg

SEQ ID NO: 292122 - DNA, 25 bp, Artificial
  probe
  misc_feature (1)..(25): SEQ ID NO: 1375; WAN024ETY; Start 149; Stop 173
atatagatgcttggaagtacggctt

SEQ ID NO: 292123 - DNA, 25 bp, Artificial
  probe
  misc_feature (1)..(25): SEQ ID NO: 1375; WAN024ETY; Start 67; Stop 91
gctgtttgggaagatggatatagta

SEQ ID NO: 292124 - DNA, 25 bp, Artificial
  probe
  misc_feature (1)..(25): SEQ ID NO: 1375; WAN024ETY; Start 73; Stop 97
tgggaagatggatatagtagatggt

SEQ ID NO: 292125 - DNA, 25 bp, Artificial
  probe
  misc_feature (1)..(25): SEQ ID NO: 1375; WAN024ETY; Start 65; Stop 89
ttgctgtttgggaagatggatatag

SEQ ID NO: 292126 - DNA, 25 bp, Artificial
  probe
  misc_feature (1)..(25): SEQ ID NO: 1375; WAN024ETY; Start 145; Stop 169
tcttatatagatgcttggaagtacg

SEQ ID NO: 292127 - DNA, 25 bp, Artificial
  probe
  misc_feature (1)..(25): SEQ ID NO: 1375; WAN024ETY; Start 64; Stop 88
cttgctgtttgggaagatggatata

SEQ ID NO: 292128 - DNA, 25 bp, Artificial
  probe
  misc_feature (1)..(25): SEQ ID NO: 1375; WAN024ETY; Start 74; Stop 98
gggaagatggatatagtagatggtt

SEQ ID NO: 292129 - DNA, 25 bp, Artificial
  probe
  misc_feature (1)..(25): SEQ ID NO: 1375; WAN024ETY; Start 72; Stop 96
ttgggaagatggatatagtagatgg

SEQ ID NO: 292130 - DNA, 25 bp, Artificial
  probe
  misc_feature (1)..(25): SEQ ID NO: 1375; WAN024ETY; Start 66; Stop 90
tgctgtttgggaagatggatatagt

SEQ ID NO: 292131 - DNA, 25 bp, Artificial
  probe
  misc_feature (1)..(25): SEQ ID NO: 1375; WAN024ETY; Start 69; Stop 93
tgtttgggaagatggatatagtaga

SEQ ID NO: 292132 - DNA, 25 bp, Artificial
  probe
  misc_feature (1)..(25): SEQ ID NO: 1375; WAN024ETY; Start 75; Stop 99
ggaagatggatatagtagatggtta

SEQ ID NO: 292133 - DNA, 25 bp, Artificial
  probe
  misc_feature (1)..(25): SEQ ID NO: 1375; WAN024ETY; Start 68; Stop 92
ctgtttgggaagatggatatagtag

SEQ ID NO: 292134 - DNA, 25 bp, Artificial
  probe
  misc_feature (1)..(25): SEQ ID NO: 1375; WAN024ETY; Start 105; Stop 129
tagagaatttgctccctatatgagg

SEQ ID NO: 292135 - DNA, 25 bp, Artificial
  probe
  misc_feature (1)..(25): SEQ ID NO: 1375; WAN024ETY; Start 71; Stop 95
tttgggaagatggatatagtagatg

SEQ ID NO: 292136 - DNA, 25 bp, Artificial
  probe
  misc_feature (1)..(25): SEQ ID NO: 1375; WAN024ETY; Start 70; Stop 94
gtttgggaagatggatatagtagat

SEQ ID NO: 292137 - DNA, 25 bp, Artificial
  probe
  misc_feature (1)..(25): SEQ ID NO: 1375; WAN024ETY; Start 106; Stop 130
agagaatttgctccctatatgaggc

SEQ ID NO: 292138 - DNA, 25 bp, Artificial
  probe
  misc_feature (1)..(25): SEQ ID NO: 1375; WAN024ETY; Start 104; Stop 128
atagagaatttgctccctatatgag

SEQ ID NO: 292139 - DNA, 25 bp, Artificial
  probe
  misc_feature (1)..(25): SEQ ID NO: 1375; WAN024ETY; Start 150; Stop 174
tatagatgcttggaagtacggcttc

SEQ ID NO: 292140 - DNA, 25 bp, Artificial
  probe
  misc_feature (1)..(25): SEQ ID NO: 1375; WAN024ETY; Start 144; Stop 168
ttcttatatagatgcttggaagtac

SEQ ID NO: 292141 - DNA, 25 bp, Artificial
  probe
  misc_feature (1)..(25): SEQ ID NO: 1375; WAN024ETY; Start 142; Stop 166
aattcttatatagatgcttggaagt

SEQ ID NO: 292142 - DNA, 25 bp, Artificial
  probe
  misc_feature (1)..(25): SEQ ID NO: 1375; WAN024ETY; Start 128; Stop 152
ggcaaggggcacttaattcttatat

SEQ ID NO: 292143 - DNA, 25 bp, Artificial
  probe
  misc_feature (1)..(25): SEQ ID NO: 1375; WAN024ETY; Start 63; Stop 87
tcttgctgtttgggaagatggatat

SEQ ID NO: 292144 - DNA, 25 bp, Artificial
  probe
  misc_feature (1)..(25): SEQ ID NO: 1375; WAN024ETY; Start 29; Stop 53
tttcaactgaggacttggagcaaac

SEQ ID NO: 292145 - DNA, 25 bp, Artificial
  probe
  misc_feature (1)..(25): SEQ ID NO: 1375; WAN024ETY; Start 127; Stop 151
aggcaaggggcacttaattcttata

SEQ ID NO: 292146 - DNA, 25 bp, Artificial
  probe
  misc_feature (1)..(25): SEQ ID NO: 1375; WAN024ETY; Start 129; Stop 153
gcaaggggcacttaattcttatata

SEQ ID NO: 292147 - DNA, 25 bp, Artificial
  probe
  misc_feature (1)..(25): SEQ ID NO: 1375; WAN024ETY; Start 121; Stop 145
tatatgaggcaaggggcacttaatt

SEQ ID NO: 292148 - DNA, 25 bp, Artificial
  probe
  misc_feature (1)..(25): SEQ ID NO: 1375; WAN024ETY; Start 135; Stop 159
ggcacttaattcttatatagatgct

SEQ ID NO: 292149 - DNA, 25 bp, Artificial
  probe
  misc_feature (1)..(25): SEQ ID NO: 1375; WAN024ETY; Start 120; Stop 144
ctatatgaggcaaggggcacttaat

SEQ ID NO: 292150 - DNA, 25 bp, Artificial
  probe
  misc_feature (1)..(25): SEQ ID NO: 1375; WAN024ETY; Start 32; Stop 56
caactgaggacttggagcaaacttc

SEQ ID NO: 292151 - DNA, 25 bp, Artificial
  probe
  misc_feature (1)..(25): SEQ ID NO: 1375; WAN024ETY; Start 76; Stop 100
gaagatggatatagtagatggttat

SEQ ID NO: 292152 - DNA, 25 bp, Artificial
  probe
  misc_feature (1)..(25): SEQ ID NO: 1376; WAN024GAW; Start 49; Stop 73
ttaccttatcgctatcttgctcatt

SEQ ID NO: 292153 - DNA, 25 bp, Artificial
  probe
  misc_feature (1)..(25): SEQ ID NO: 1376; WAN024GAW; Start 706; Stop 730
gtaacaccattgagtccatctatct

SEQ ID NO: 292154 - DNA, 25 bp, Artificial
  probe
  misc_feature (1)..(25): SEQ ID NO: 1376; WAN024GAW; Start 721; Stop 745
ccatctatcttgccatctattacca

SEQ ID NO: 292155 - DNA, 25 bp, Artificial
  probe
  misc_feature (1)..(25): SEQ ID NO: 1376; WAN024GAW; Start 717; Stop 741
gagtccatctatcttgccatctatt

SEQ ID NO: 292156 - DNA, 25 bp, Artificial
  probe
  misc_feature (1)..(25): SEQ ID NO: 1376; WAN024GAW; Start 48; Stop 72
attaccttatcgctatcttgctcat

SEQ ID NO: 292157 - DNA, 25 bp, Artificial
  probe
  misc_feature (1)..(25): SEQ ID NO: 1376; WAN024GAW; Start 720; Stop 744
tccatctatcttgccatctattacc

SEQ ID NO: 292158 - DNA, 25 bp, Artificial
  probe
  misc_feature (1)..(25): SEQ ID NO: 1376; WAN024GAW; Start 716; Stop 740
tgagtccatctatcttgccatctat

SEQ ID NO: 292159 - DNA, 25 bp, Artificial
  probe
  misc_feature (1)..(25): SEQ ID NO: 1376; WAN024GAW; Start 708; Stop 732
aacaccattgagtccatctatcttg

SEQ ID NO: 292160 - DNA, 25 bp, Artificial
  probe
  misc_feature (1)..(25): SEQ ID NO: 1376; WAN024GAW; Start 715; Stop 739
ttgagtccatctatcttgccatcta

SEQ ID NO: 292161 - DNA, 25 bp, Artificial
  probe
  misc_feature (1)..(25): SEQ ID NO: 1376; WAN024GAW; Start 707; Stop 731
taacaccattgagtccatctatctt

SEQ ID NO: 292162 - DNA, 25 bp, Artificial
  probe
  misc_feature (1)..(25): SEQ ID NO: 1376; WAN024GAW; Start 705; Stop 729
tgtaacaccattgagtccatctatc

SEQ ID NO: 292163 - DNA, 25 bp, Artificial
  probe
  misc_feature (1)..(25): SEQ ID NO: 1376; WAN024GAW; Start 47; Stop 71
aattaccttatcgctatcttgctca

SEQ ID NO: 292164 - DNA, 25 bp, Artificial
  probe
  misc_feature (1)..(25): SEQ ID NO: 1376; WAN024GAW; Start 704; Stop 728
ttgtaacaccattgagtccatctat

SEQ ID NO: 292165 - DNA, 25 bp, Artificial
  probe
  misc_feature (1)..(25): SEQ ID NO: 1376; WAN024GAW; Start 731; Stop 755
tgccatctattaccaagtattcctt

SEQ ID NO: 292166 - DNA, 25 bp, Artificial
  probe
  misc_feature (1)..(25): SEQ ID NO: 1376; WAN024GAW; Start 385; Stop 409
ttgattggtgtcggagatattatcg

SEQ ID NO: 292167 - DNA, 25 bp, Artificial
  probe
  misc_feature (1)..(25): SEQ ID NO: 1376; WAN024GAW; Start 714; Stop 738
attgagtccatctatcttgccatct

SEQ ID NO: 292168 - DNA, 25 bp, Artificial
  probe
  misc_feature (1)..(25): SEQ ID NO: 1376; WAN024GAW; Start 713; Stop 737
cattgagtccatctatcttgccatc

SEQ ID NO: 292169 - DNA, 25 bp, Artificial
  probe
  misc_feature (1)..(25): SEQ ID NO: 1376; WAN024GAW; Start 730; Stop 754
ttgccatctattaccaagtattcct

SEQ ID NO: 292170 - DNA, 25 bp, Artificial
  probe
  misc_feature (1)..(25): SEQ ID NO: 1376; WAN024GAW; Start 719; Stop 743
gtccatctatcttgccatctattac

SEQ ID NO: 292171 - DNA, 25 bp, Artificial
  probe
  misc_feature (1)..(25): SEQ ID NO: 1376; WAN024GAW; Start 718; Stop 742
agtccatctatcttgccatctatta

SEQ ID NO: 292172 - DNA, 25 bp, Artificial
  probe
  misc_feature (1)..(25): SEQ ID NO: 1376; WAN024GAW; Start 491; Stop 515
ccaacttcttgattcaggatgagta

SEQ ID NO: 292173 - DNA, 25 bp, Artificial
  probe
  misc_feature (1)..(25): SEQ ID NO: 1376; WAN024GAW; Start 133; Stop 157
gagtcttctccaagtcttcactatg

SEQ ID NO: 292174 - DNA, 25 bp, Artificial
  probe
  misc_feature (1)..(25): SEQ ID NO: 1376; WAN024GAW; Start 132; Stop 156
agagtcttctccaagtcttcactat

SEQ ID NO: 292175 - DNA, 25 bp, Artificial
  probe
  misc_feature (1)..(25): SEQ ID NO: 1376; WAN024GAW; Start 489; Stop 513
aaccaacttcttgattcaggatgag

SEQ ID NO: 292176 - DNA, 25 bp, Artificial
  probe
  misc_feature (1)..(25): SEQ ID NO: 1376; WAN024GAW; Start 488; Stop 512
caaccaacttcttgattcaggatga

SEQ ID NO: 292177 - DNA, 25 bp, Artificial
  probe
  misc_feature (1)..(25): SEQ ID NO: 1376; WAN024GAW; Start 131; Stop 155
cagagtcttctccaagtcttcacta

SEQ ID NO: 292178 - DNA, 25 bp, Artificial
  probe
  misc_feature (1)..(25): SEQ ID NO: 1376; WAN024GAW; Start 493; Stop 517
aacttcttgattcaggatgagtacg

SEQ ID NO: 292179 - DNA, 25 bp, Artificial
  probe
  misc_feature (1)..(25): SEQ ID NO: 1376; WAN024GAW; Start 492; Stop 516
caacttcttgattcaggatgagtac

SEQ ID NO: 292180 - DNA, 25 bp, Artificial
  probe
  misc_feature (1)..(25): SEQ ID NO: 1376; WAN024GAW; Start 722; Stop 746
catctatcttgccatctattaccaa

SEQ ID NO: 292181 - DNA, 25 bp, Artificial
  probe
  misc_feature (1)..(25): SEQ ID NO: 1376; WAN024GAW; Start 386; Stop 410
tgattggtgtcggagatattatcgg

SEQ ID NO: 292182 - DNA, 25 bp, Artificial
  probe
  misc_feature (1)..(25): SEQ ID NO: 1376; WAN024GAW; Start 873; Stop 897
aattggaggtattcaacatggtgat

SEQ ID NO: 292183 - DNA, 25 bp, Artificial
  probe
  misc_feature (1)..(25): SEQ ID NO: 1376; WAN024GAW; Start 495; Stop 519
cttcttgattcaggatgagtacgac

SEQ ID NO: 292184 - DNA, 25 bp, Artificial
  probe
  misc_feature (1)..(25): SEQ ID NO: 1376; WAN024GAW; Start 490; Stop 514
accaacttcttgattcaggatgagt

SEQ ID NO: 292185 - DNA, 25 bp, Artificial
  probe
  misc_feature (1)..(25): SEQ ID NO: 1377; WAN024BGS; Start 47; Stop 71
gggttatttcaatcgttaatagcca

SEQ ID NO: 292186 - DNA, 25 bp, Artificial
  probe
  misc_feature (1)..(25): SEQ ID NO: 1377; WAN024BGS; Start 46; Stop 70
tgggttatttcaatcgttaatagcc

SEQ ID NO: 292187 - DNA, 25 bp, Artificial
  probe
  misc_feature (1)..(25): SEQ ID NO: 1377; WAN024BGS; Start 54; Stop 78
ttcaatcgttaatagccagaaacca

SEQ ID NO: 292188 - DNA, 25 bp, Artificial
  probe
  misc_feature (1)..(25): SEQ ID NO: 1377; WAN024BGS; Start 42; Stop 66
ttggtgggttatttcaatcgttaat

SEQ ID NO: 292189 - DNA, 25 bp, Artificial
  probe
  misc_feature (1)..(25): SEQ ID NO: 1377; WAN024BGS; Start 55; Stop 79
tcaatcgttaatagccagaaaccac

SEQ ID NO: 292190 - DNA, 25 bp, Artificial
  probe
  misc_feature (1)..(25): SEQ ID NO: 1377; WAN024BGS; Start 45; Stop 69
gtgggttatttcaatcgttaatagc

SEQ ID NO: 292191 - DNA, 25 bp, Artificial
  probe
  misc_feature (1)..(25): SEQ ID NO: 1377; WAN024BGS; Start 43; Stop 67
tggtgggttatttcaatcgttaata

SEQ ID NO: 292192 - DNA, 25 bp, Artificial
  probe
  misc_feature (1)..(25): SEQ ID NO: 1377; WAN024BGS; Start 48; Stop 72
ggttatttcaatcgttaatagccag

SEQ ID NO: 292193 - DNA, 25 bp, Artificial
  probe
  misc_feature (1)..(25): SEQ ID NO: 1377; WAN024BGS; Start 44; Stop 68
ggtgggttatttcaatcgttaatag

SEQ ID NO: 292194 - DNA, 25 bp, Artificial
  probe
  misc_feature (1)..(25): SEQ ID NO: 1377; WAN024BGS; Start 49; Stop 73
gttatttcaatcgttaatagccaga

SEQ ID NO: 292195 - DNA, 25 bp, Artificial
  probe
  misc_feature (1)..(25): SEQ ID NO: 1377; WAN024BGS; Start 53; Stop 77
tttcaatcgttaatagccagaaacc

SEQ ID NO: 292196 - DNA, 25 bp, Artificial
  probe
  misc_feature (1)..(25): SEQ ID NO: 1377; WAN024BGS; Start 50; Stop 74
ttatttcaatcgttaatagccagaa

SEQ ID NO: 292197 - DNA, 25 bp, Artificial
  probe
  misc_feature (1)..(25): SEQ ID NO: 1377; WAN024BGS; Start 52; Stop 76
atttcaatcgttaatagccagaaac

SEQ ID NO: 292198 - DNA, 25 bp, Artificial
  probe
  misc_feature (1)..(25): SEQ ID NO: 1377; WAN024BGS; Start 85; Stop 109
aatgaaacatttattggctatgtcc

SEQ ID NO: 292199 - DNA, 25 bp, Artificial
  probe
  misc_feature (1)..(25): SEQ ID NO: 1377; WAN024BGS; Start 51; Stop 75
tatttcaatcgttaatagccagaaa

SEQ ID NO: 292200 - DNA, 25 bp, Artificial
  probe
  misc_feature (1)..(25): SEQ ID NO: 1377; WAN024BGS; Start 84; Stop 108
aaatgaaacatttattggctatgtc

SEQ ID NO: 292201 - DNA, 25 bp, Artificial
  probe
  misc_feature (1)..(25): SEQ ID NO: 1377; WAN024BGS; Start 83; Stop 107
aaaatgaaacatttattggctatgt

SEQ ID NO: 292202 - DNA, 25 bp, Artificial
  probe
  misc_feature (1)..(25): SEQ ID NO: 1378; WAN024D8O; Start 842; Stop 866
aaggaatcgaagcatatagaaccaa

SEQ ID NO: 292203 - DNA, 25 bp, Artificial
  probe
  misc_feature (1)..(25): SEQ ID NO: 1378; WAN024D8O; Start 994; Stop 1018
aatgaatgtctgaatgagagtatct

SEQ ID NO: 292204 - DNA, 25 bp, Artificial
  probe
  misc_feature (1)..(25): SEQ ID NO: 1378; WAN024D8O; Start 560; Stop 584
ccctttcagatgtttggaatatacc

SEQ ID NO: 292205 - DNA, 25 bp, Artificial
  probe
  misc_feature (1)..(25): SEQ ID NO: 1378; WAN024D8O; Start 779; Stop 803
ctatcaatataactcagcaacgtct

SEQ ID NO: 292206 - DNA, 25 bp, Artificial
  probe
  misc_feature (1)..(25): SEQ ID NO: 1378; WAN024D8O; Start 146; Stop 170
atacgtggacttcgattgaggatta

SEQ ID NO: 292207 - DNA, 25 bp, Artificial
  probe
  misc_feature (1)..(25): SEQ ID NO: 1378; WAN024D8O; Start 182; Stop 206
tgtctgtaagattagaagaatgcaa

SEQ ID NO: 292208 - DNA, 25 bp, Artificial
  probe
  misc_feature (1)..(25): SEQ ID NO: 1378; WAN024D8O; Start 181; Stop 205
ttgtctgtaagattagaagaatgca

SEQ ID NO: 292209 - DNA, 25 bp, Artificial
  probe
  misc_feature (1)..(25): SEQ ID NO: 1378; WAN024D8O; Start 781; Stop 805
atcaatataactcagcaacgtctgg

SEQ ID NO: 292210 - DNA, 25 bp, Artificial
  probe
  misc_feature (1)..(25): SEQ ID NO: 1378; WAN024D8O; Start 783; Stop 807
caatataactcagcaacgtctggaa

SEQ ID NO: 292211 - DNA, 25 bp, Artificial
  probe
  misc_feature (1)..(25): SEQ ID NO: 1378; WAN024D8O; Start 780; Stop 804
tatcaatataactcagcaacgtctg

SEQ ID NO: 292212 - DNA, 25 bp, Artificial
  probe
  misc_feature (1)..(25): SEQ ID NO: 1378; WAN024D8O; Start 147; Stop 171
tacgtggacttcgattgaggattac

SEQ ID NO: 292213 - DNA, 25 bp, Artificial
  probe
  misc_feature (1)..(25): SEQ ID NO: 1378; WAN024D8O; Start 145; Stop 169
gatacgtggacttcgattgaggatt

SEQ ID NO: 292214 - DNA, 25 bp, Artificial
  probe
  misc_feature (1)..(25): SEQ ID NO: 1378; WAN024D8O; Start 757; Stop 781
gggattgatttatctgaggaagcta

SEQ ID NO: 292215 - DNA, 25 bp, Artificial
  probe
  misc_feature (1)..(25): SEQ ID NO: 1378; WAN024D8O; Start 70; Stop 94
tatatggaccctcctttctttacac

SEQ ID NO: 292216 - DNA, 25 bp, Artificial
  probe
  misc_feature (1)..(25): SEQ ID NO: 1378; WAN024D8O; Start 843; Stop 867
aggaatcgaagcatatagaaccaaa

SEQ ID NO: 292217 - DNA, 25 bp, Artificial
  probe
  misc_feature (1)..(25): SEQ ID NO: 1378; WAN024D8O; Start 841; Stop 865
aaaggaatcgaagcatatagaacca

SEQ ID NO: 292218 - DNA, 25 bp, Artificial
  probe
  misc_feature (1)..(25): SEQ ID NO: 1378; WAN024D8O; Start 782; Stop 806
tcaatataactcagcaacgtctgga

SEQ ID NO: 292219 - DNA, 25 bp, Artificial
  probe
  misc_feature (1)..(25): SEQ ID NO: 1378; WAN024D8O; Start 69; Stop 93
ctatatggaccctcctttctttaca

SEQ ID NO: 292220 - DNA, 25 bp, Artificial
  probe
  misc_feature (1)..(25): SEQ ID NO: 1378; WAN024D8O; Start 769; Stop 793
tctgaggaagctatcaatataactc

SEQ ID NO: 292221 - DNA, 25 bp, Artificial
  probe
  misc_feature (1)..(25): SEQ ID NO: 1378; WAN024D8O; Start 776; Stop 800
aagctatcaatataactcagcaacg

SEQ ID NO: 292222 - DNA, 25 bp, Artificial
  probe
  misc_feature (1)..(25): SEQ ID NO: 1378; WAN024D8O; Start 773; Stop 797
aggaagctatcaatataactcagca

SEQ ID NO: 292223 - DNA, 25 bp, Artificial
  probe
  misc_feature (1)..(25): SEQ ID NO: 1378; WAN024D8O; Start 68; Stop 92
tctatatggaccctcctttctttac

SEQ ID NO: 292224 - DNA, 25 bp, Artificial
  probe
  misc_feature (1)..(25): SEQ ID NO: 1378; WAN024D8O; Start 71; Stop 95
atatggaccctcctttctttacaca

SEQ ID NO: 292225 - DNA, 25 bp, Artificial
  probe
  misc_feature (1)..(25): SEQ ID NO: 1378; WAN024D8O; Start 66; Stop 90
aatctatatggaccctcctttcttt

SEQ ID NO: 292226 - DNA, 25 bp, Artificial
  probe
  misc_feature (1)..(25): SEQ ID NO: 1378; WAN024D8O; Start 772; Stop 796
gaggaagctatcaatataactcagc

SEQ ID NO: 292227 - DNA, 25 bp, Artificial
  probe
  misc_feature (1)..(25): SEQ ID NO: 1378; WAN024D8O; Start 149; Stop 173
cgtggacttcgattgaggattacaa

SEQ ID NO: 292228 - DNA, 25 bp, Artificial
  probe
  misc_feature (1)..(25): SEQ ID NO: 1378; WAN024D8O; Start 778; Stop 802
gctatcaatataactcagcaacgtc

SEQ ID NO: 292229 - DNA, 25 bp, Artificial
  probe
  misc_feature (1)..(25): SEQ ID NO: 1378; WAN024D8O; Start 777; Stop 801
agctatcaatataactcagcaacgt

SEQ ID NO: 292230 - DNA, 25 bp, Artificial
  probe
  misc_feature (1)..(25): SEQ ID NO: 1378; WAN024D8O; Start 774; Stop 798
ggaagctatcaatataactcagcaa

SEQ ID NO: 292231 - DNA, 25 bp, Artificial
  probe
  misc_feature (1)..(25): SEQ ID NO: 1378; WAN024D8O; Start 993; Stop 1017
taatgaatgtctgaatgagagtatc

SEQ ID NO: 292232 - DNA, 25 bp, Artificial
  probe
  misc_feature (1)..(25): SEQ ID NO: 1378; WAN024D8O; Start 180; Stop 204
tttgtctgtaagattagaagaatgc

SEQ ID NO: 292233 - DNA, 25 bp, Artificial
  probe
  misc_feature (1)..(25): SEQ ID NO: 1378; WAN024D8O; Start 152; Stop 176
ggacttcgattgaggattacaaaga

SEQ ID NO: 292234 - DNA, 25 bp, Artificial
  probe
  misc_feature (1)..(25): SEQ ID NO: 1378; WAN024D8O; Start 561; Stop 585
cctttcagatgtttggaatatacca

SEQ ID NO: 292235 - DNA, 25 bp, Artificial
  probe
  misc_feature (1)..(25): SEQ ID NO: 1379; WAN024GLA; Start 125; Stop 149
gctcttctggactcaaatctacttt

SEQ ID NO: 292236 - DNA, 25 bp, Artificial
  probe
  misc_feature (1)..(25): SEQ ID NO: 1379; WAN024GLA; Start 124; Stop 148
agctcttctggactcaaatctactt

SEQ ID NO: 292237 - DNA, 25 bp, Artificial
  probe
  misc_feature (1)..(25): SEQ ID NO: 1379; WAN024GLA; Start 123; Stop 147
aagctcttctggactcaaatctact

SEQ ID NO: 292238 - DNA, 25 bp, Artificial
  probe
  misc_feature (1)..(25): SEQ ID NO: 1379; WAN024GLA; Start 225; Stop 249
gagttcttgagcctcacctgttaag

SEQ ID NO: 292239 - DNA, 25 bp, Artificial
  probe
  misc_feature (1)..(25): SEQ ID NO: 1379; WAN024GLA; Start 71; Stop 95
tgtcttctttcaataaagcaaccag

SEQ ID NO: 292240 - DNA, 25 bp, Artificial
  probe
  misc_feature (1)..(25): SEQ ID NO: 1379; WAN024GLA; Start 224; Stop 248
agagttcttgagcctcacctgttaa

SEQ ID NO: 292241 - DNA, 25 bp, Artificial
  probe
  misc_feature (1)..(25): SEQ ID NO: 1379; WAN024GLA; Start 223; Stop 247
aagagttcttgagcctcacctgtta

SEQ ID NO: 292242 - DNA, 25 bp, Artificial
  probe
  misc_feature (1)..(25): SEQ ID NO: 1379; WAN024GLA; Start 72; Stop 96
gtcttctttcaataaagcaaccaga

SEQ ID NO: 292243 - DNA, 25 bp, Artificial
  probe
  misc_feature (1)..(25): SEQ ID NO: 1379; WAN024GLA; Start 70; Stop 94
ttgtcttctttcaataaagcaacca

SEQ ID NO: 292244 - DNA, 25 bp, Artificial
  probe
  misc_feature (1)..(25): SEQ ID NO: 1379; WAN024GLA; Start 69; Stop 93
cttgtcttctttcaataaagcaacc

SEQ ID NO: 292245 - DNA, 25 bp, Artificial
  probe
  misc_feature (1)..(25): SEQ ID NO: 1379; WAN024GLA; Start 73; Stop 97
tcttctttcaataaagcaaccagat

SEQ ID NO: 292246 - DNA, 25 bp, Artificial
  probe
  misc_feature (1)..(25): SEQ ID NO: 1379; WAN024GLA; Start 74; Stop 98
cttctttcaataaagcaaccagatc

SEQ ID NO: 292247 - DNA, 25 bp, Artificial
  probe
  misc_feature (1)..(25): SEQ ID NO: 1379; WAN024GLA; Start 96; Stop 120
atcttttagactctgtttcgctgtt

SEQ ID NO: 292248 - DNA, 25 bp, Artificial
  probe
  misc_feature (1)..(25): SEQ ID NO: 1379; WAN024GLA; Start 126; Stop 150
ctcttctggactcaaatctactttt

SEQ ID NO: 292249 - DNA, 25 bp, Artificial
  probe
  misc_feature (1)..(25): SEQ ID NO: 1379; WAN024GLA; Start 97; Stop 121
tcttttagactctgtttcgctgttg

SEQ ID NO: 292250 - DNA, 25 bp, Artificial
  probe
  misc_feature (1)..(25): SEQ ID NO: 1379; WAN024GLA; Start 242; Stop 266
ctgttaagcgatcaagctctgtctt

SEQ ID NO: 292251 - DNA, 25 bp, Artificial
  probe
  misc_feature (1)..(25): SEQ ID NO: 1379; WAN024GLA; Start 95; Stop 119
gatcttttagactctgtttcgctgt

SEQ ID NO: 292252 - DNA, 25 bp, Artificial
  probe
  misc_feature (1)..(25): SEQ ID NO: 1379; WAN024GLA; Start 31; Stop 55
acttcaacacctgttttactatcag

SEQ ID NO: 292253 - DNA, 25 bp, Artificial
  probe
  misc_feature (1)..(25): SEQ ID NO: 1379; WAN024GLA; Start 42; Stop 66
tgttttactatcagaaaagactgct

SEQ ID NO: 292254 - DNA, 25 bp, Artificial
  probe
  misc_feature (1)..(25): SEQ ID NO: 1379; WAN024GLA; Start 32; Stop 56
cttcaacacctgttttactatcaga

SEQ ID NO: 292255 - DNA, 25 bp, Artificial
  probe
  misc_feature (1)..(25): SEQ ID NO: 1379; WAN024GLA; Start 43; Stop 67
gttttactatcagaaaagactgctg

SEQ ID NO: 292256 - DNA, 25 bp, Artificial
  probe
  misc_feature (1)..(25): SEQ ID NO: 1379; WAN024GLA; Start 41; Stop 65
ctgttttactatcagaaaagactgc

SEQ ID NO: 292257 - DNA, 25 bp, Artificial
  probe
  misc_feature (1)..(25): SEQ ID NO: 1379; WAN024GLA; Start 30; Stop 54
tacttcaacacctgttttactatca

SEQ ID NO: 292258 - DNA, 25 bp, Artificial
  probe
  misc_feature (1)..(25): SEQ ID NO: 1379; WAN024GLA; Start 37; Stop 61
acacctgttttactatcagaaaaga

SEQ ID NO: 292259 - DNA, 25 bp, Artificial
  probe
  misc_feature (1)..(25): SEQ ID NO: 1379; WAN024GLA; Start 226; Stop 250
agttcttgagcctcacctgttaagc

SEQ ID NO: 292260 - DNA, 25 bp, Artificial
  probe
  misc_feature (1)..(25): SEQ ID NO: 1379; WAN024GLA; Start 34; Stop 58
tcaacacctgttttactatcagaaa

SEQ ID NO: 292261 - DNA, 25 bp, Artificial
  probe
  misc_feature (1)..(25): SEQ ID NO: 1379; WAN024GLA; Start 33; Stop 57
ttcaacacctgttttactatcagaa

SEQ ID NO: 292262 - DNA, 25 bp, Artificial
  probe
  misc_feature (1)..(25): SEQ ID NO: 1379; WAN024GLA; Start 38; Stop 62
cacctgttttactatcagaaaagac

SEQ ID NO: 292263 - DNA, 25 bp, Artificial
  probe
  misc_feature (1)..(25): SEQ ID NO: 1379; WAN024GLA; Start 29; Stop 53
gtacttcaacacctgttttactatc

SEQ ID NO: 292264 - DNA, 25 bp, Artificial
  probe
  misc_feature (1)..(25): SEQ ID NO: 1379; WAN024GLA; Start 28; Stop 52
tgtacttcaacacctgttttactat

SEQ ID NO: 292265 - DNA, 25 bp, Artificial
  probe
  misc_feature (1)..(25): SEQ ID NO: 1379; WAN024GLA; Start 39; Stop 63
acctgttttactatcagaaaagact

SEQ ID NO: 292266 - DNA, 25 bp, Artificial
  probe
  misc_feature (1)..(25): SEQ ID NO: 1379; WAN024GLA; Start 252; Stop 276
atcaagctctgtcttttcttccgta

SEQ ID NO: 292267 - DNA, 25 bp, Artificial
  probe
  misc_feature (1)..(25): SEQ ID NO: 1379; WAN024GLA; Start 243; Stop 267
tgttaagcgatcaagctctgtcttt

SEQ ID NO: 292268 - DNA, 25 bp, Artificial
  probe
  misc_feature (1)..(25): SEQ ID NO: 1380; WAN024FSK; Start 6; Stop 30
agtgttcccaattcccatagttaat

SEQ ID NO: 292269 - DNA, 25 bp, Artificial
  probe
  misc_feature (1)..(25): SEQ ID NO: 1380; WAN024FSK; Start 5; Stop 29
cagtgttcccaattcccatagttaa

SEQ ID NO: 292270 - DNA, 25 bp, Artificial
  probe
  misc_feature (1)..(25): SEQ ID NO: 1380; WAN024FSK; Start 7; Stop 31
gtgttcccaattcccatagttaata

SEQ ID NO: 292271 - DNA, 25 bp, Artificial
  probe
  misc_feature (1)..(25): SEQ ID NO: 1380; WAN024FSK; Start 4; Stop 28
acagtgttcccaattcccatagtta

SEQ ID NO: 292272 - DNA, 25 bp, Artificial
  probe
  misc_feature (1)..(25): SEQ ID NO: 1380; WAN024FSK; Start 174; Stop 198
cttcaagatcacacgccagatagtc

SEQ ID NO: 292273 - DNA, 25 bp, Artificial
  probe
  misc_feature (1)..(25): SEQ ID NO: 1380; WAN024FSK; Start 8; Stop 32
tgttcccaattcccatagttaatat

SEQ ID NO: 292274 - DNA, 25 bp, Artificial
  probe
  misc_feature (1)..(25): SEQ ID NO: 1380; WAN024FSK; Start 1; Stop 25
atgacagtgttcccaattcccatag

SEQ ID NO: 292275 - DNA, 25 bp, Artificial
  probe
  misc_feature (1)..(25): SEQ ID NO: 1380; WAN024FSK; Start 175; Stop 199
ttcaagatcacacgccagatagtct

SEQ ID NO: 292276 - DNA, 25 bp, Artificial
  probe
  misc_feature (1)..(25): SEQ ID NO: 1380; WAN024FSK; Start 3; Stop 27
gacagtgttcccaattcccatagtt

SEQ ID NO: 292277 - DNA, 25 bp, Artificial
  probe
  misc_feature (1)..(25): SEQ ID NO: 1380; WAN024FSK; Start 55; Stop 79
gtggtcaaggaagttgggataacag

SEQ ID NO: 292278 - DNA, 25 bp, Artificial
  probe
  misc_feature (1)..(25): SEQ ID NO: 1380; WAN024FSK; Start 173; Stop 197
ccttcaagatcacacgccagatagt

SEQ ID NO: 292279 - DNA, 25 bp, Artificial
  probe
  misc_feature (1)..(25): SEQ ID NO: 1380; WAN024FSK; Start 11; Stop 35
tcccaattcccatagttaatataga

SEQ ID NO: 292280 - DNA, 25 bp, Artificial
  probe
  misc_feature (1)..(25): SEQ ID NO: 1380; WAN024FSK; Start 2; Stop 26
tgacagtgttcccaattcccatagt

SEQ ID NO: 292281 - DNA, 25 bp, Artificial
  probe
  misc_feature (1)..(25): SEQ ID NO: 1380; WAN024FSK; Start 53; Stop 77
gtgtggtcaaggaagttgggataac

SEQ ID NO: 292282 - DNA, 25 bp, Artificial
  probe
  misc_feature (1)..(25): SEQ ID NO: 1380; WAN024FSK; Start 82; Stop 106
gagtttccgacaaccatctggatag

SEQ ID NO: 292283 - DNA, 25 bp, Artificial
  probe
  misc_feature (1)..(25): SEQ ID NO: 1380; WAN024FSK; Start 9; Stop 33
gttcccaattcccatagttaatata

SEQ ID NO: 292284 - DNA, 25 bp, Artificial
  probe
  misc_feature (1)..(25): SEQ ID NO: 1380; WAN024FSK; Start 81; Stop 105
tgagtttccgacaaccatctggata

SEQ ID NO: 292285 - DNA, 25 bp, Artificial
  probe
  misc_feature (1)..(25): SEQ ID NO: 1380; WAN024FSK; Start 54; Stop 78
tgtggtcaaggaagttgggataaca

SEQ ID NO: 292286 - DNA, 25 bp, Artificial
  probe
  misc_feature (1)..(25): SEQ ID NO: 1380; WAN024FSK; Start 10; Stop 34
ttcccaattcccatagttaatatag

SEQ ID NO: 292287 - DNA, 25 bp, Artificial
  probe
  misc_feature (1)..(25): SEQ ID NO: 1380; WAN024FSK; Start 12; Stop 36
cccaattcccatagttaatatagaa

SEQ ID NO: 292288 - DNA, 25 bp, Artificial
  probe
  misc_feature (1)..(25): SEQ ID NO: 1380; WAN024FSK; Start 52; Stop 76
ggtgtggtcaaggaagttgggataa

SEQ ID NO: 292289 - DNA, 25 bp, Artificial
  probe
  misc_feature (1)..(25): SEQ ID NO: 1380; WAN024FSK; Start 27; Stop 51
taatatagaagttaaagttgcagct

SEQ ID NO: 292290 - DNA, 25 bp, Artificial
  probe
  misc_feature (1)..(25): SEQ ID NO: 1380; WAN024FSK; Start 216; Stop 240
catagcgaaactggcttcacgataa

SEQ ID NO: 292291 - DNA, 25 bp, Artificial
  probe
  misc_feature (1)..(25): SEQ ID NO: 1380; WAN024FSK; Start 56; Stop 80
tggtcaaggaagttgggataacagc

SEQ ID NO: 292292 - DNA, 25 bp, Artificial
  probe
  misc_feature (1)..(25): SEQ ID NO: 1380; WAN024FSK; Start 83; Stop 107
agtttccgacaaccatctggatagc

SEQ ID NO: 292293 - DNA, 25 bp, Artificial
  probe
  misc_feature (1)..(25): SEQ ID NO: 1380; WAN024FSK; Start 80; Stop 104
ctgagtttccgacaaccatctggat

SEQ ID NO: 292294 - DNA, 25 bp, Artificial
  probe
  misc_feature (1)..(25): SEQ ID NO: 1380; WAN024FSK; Start 57; Stop 81
ggtcaaggaagttgggataacagct

SEQ ID NO: 292295 - DNA, 25 bp, Artificial
  probe
  misc_feature (1)..(25): SEQ ID NO: 1380; WAN024FSK; Start 176; Stop 200
tcaagatcacacgccagatagtctg

SEQ ID NO: 292296 - DNA, 25 bp, Artificial
  probe
  misc_feature (1)..(25): SEQ ID NO: 1380; WAN024FSK; Start 26; Stop 50
ttaatatagaagttaaagttgcagc

SEQ ID NO: 292297 - DNA, 25 bp, Artificial
  probe
  misc_feature (1)..(25): SEQ ID NO: 1380; WAN024FSK; Start 85; Stop 109
tttccgacaaccatctggatagcta

SEQ ID NO: 292298 - DNA, 25 bp, Artificial
  probe
  misc_feature (1)..(25): SEQ ID NO: 1380; WAN024FSK; Start 84; Stop 108
gtttccgacaaccatctggatagct

SEQ ID NO: 292299 - DNA, 25 bp, Artificial
  probe
  misc_feature (1)..(25): SEQ ID NO: 1380; WAN024FSK; Start 215; Stop 239
ccatagcgaaactggcttcacgata

SEQ ID NO: 292300 - DNA, 25 bp, Artificial
  probe
  misc_feature (1)..(25): SEQ ID NO: 1381; WAN024GMU; Start 766; Stop 790
gaatacggtgactatgtatcaggtc

SEQ ID NO: 292301 - DNA, 25 bp, Artificial
  probe
  misc_feature (1)..(25): SEQ ID NO: 1381; WAN024GMU; Start 368; Stop 392
tagatgtcttcatgtgtgctcctaa

SEQ ID NO: 292302 - DNA, 25 bp, Artificial
  probe
  misc_feature (1)..(25): SEQ ID NO: 1381; WAN024GMU; Start 765; Stop 789
tgaatacggtgactatgtatcaggt

SEQ ID NO: 292303 - DNA, 25 bp, Artificial
  probe
  misc_feature (1)..(25): SEQ ID NO: 1381; WAN024GMU; Start 761; Stop 785
ctgctgaatacggtgactatgtatc

SEQ ID NO: 292304 - DNA, 25 bp, Artificial
  probe
  misc_feature (1)..(25): SEQ ID NO: 1381; WAN024GMU; Start 707; Stop 731
ttgacttgatctacgaaggtggatt

SEQ ID NO: 292305 - DNA, 25 bp, Artificial
  probe
  misc_feature (1)..(25): SEQ ID NO: 1381; WAN024GMU; Start 364; Stop 388
gatgtagatgtcttcatgtgtgctc

SEQ ID NO: 292306 - DNA, 25 bp, Artificial
  probe
  misc_feature (1)..(25): SEQ ID NO: 1381; WAN024GMU; Start 713; Stop 737
tgatctacgaaggtggattcaagaa

SEQ ID NO: 292307 - DNA, 25 bp, Artificial
  probe
  misc_feature (1)..(25): SEQ ID NO: 1381; WAN024GMU; Start 767; Stop 791
aatacggtgactatgtatcaggtcc

SEQ ID NO: 292308 - DNA, 25 bp, Artificial
  probe
  misc_feature (1)..(25): SEQ ID NO: 1381; WAN024GMU; Start 762; Stop 786
tgctgaatacggtgactatgtatca

SEQ ID NO: 292309 - DNA, 25 bp, Artificial
  probe
  misc_feature (1)..(25): SEQ ID NO: 1381; WAN024GMU; Start 760; Stop 784
actgctgaatacggtgactatgtat

SEQ ID NO: 292310 - DNA, 25 bp, Artificial
  probe
  misc_feature (1)..(25): SEQ ID NO: 1381; WAN024GMU; Start 185; Stop 209
ttgatacttacacagtagcagaagc

SEQ ID NO: 292311 - DNA, 25 bp, Artificial
  probe
  misc_feature (1)..(25): SEQ ID NO: 1381; WAN024GMU; Start 367; Stop 391
gtagatgtcttcatgtgtgctccta

SEQ ID NO: 292312 - DNA, 25 bp, Artificial
  probe
  misc_feature (1)..(25): SEQ ID NO: 1381; WAN024GMU; Start 708; Stop 732
tgacttgatctacgaaggtggattc

SEQ ID NO: 292313 - DNA, 25 bp, Artificial
  probe
  misc_feature (1)..(25): SEQ ID NO: 1381; WAN024GMU; Start 738; Stop 762
aatgcgtcaatctatttcaaacact

SEQ ID NO: 292314 - DNA, 25 bp, Artificial
  probe
  misc_feature (1)..(25): SEQ ID NO: 1381; WAN024GMU; Start 739; Stop 763
atgcgtcaatctatttcaaacactg

SEQ ID NO: 292315 - DNA, 25 bp, Artificial
  probe
  misc_feature (1)..(25): SEQ ID NO: 1381; WAN024GMU; Start 706; Stop 730
gttgacttgatctacgaaggtggat

SEQ ID NO: 292316 - DNA, 25 bp, Artificial
  probe
  misc_feature (1)..(25): SEQ ID NO: 1381; WAN024GMU; Start 709; Stop 733
gacttgatctacgaaggtggattca

SEQ ID NO: 292317 - DNA, 25 bp, Artificial
  probe
  misc_feature (1)..(25): SEQ ID NO: 1381; WAN024GMU; Start 417; Stop 441
tacttacgaagaaggatttggtgtt

SEQ ID NO: 292318 - DNA, 25 bp, Artificial
  probe
  misc_feature (1)..(25): SEQ ID NO: 1381; WAN024GMU; Start 742; Stop 766
cgtcaatctatttcaaacactgctg

SEQ ID NO: 292319 - DNA, 25 bp, Artificial
  probe
  misc_feature (1)..(25): SEQ ID NO: 1381; WAN024GMU; Start 131; Stop 155
ttattatcggtgtacgtccaggtaa

SEQ ID NO: 292320 - DNA, 25 bp, Artificial
  probe
  misc_feature (1)..(25): SEQ ID NO: 1381; WAN024GMU; Start 562; Stop 586
actgaagaagatttgtttggtgaac

SEQ ID NO: 292321 - DNA, 25 bp, Artificial
  probe
  misc_feature (1)..(25): SEQ ID NO: 1381; WAN024GMU; Start 561; Stop 585
aactgaagaagatttgtttggtgaa

SEQ ID NO: 292322 - DNA, 25 bp, Artificial
  probe
  misc_feature (1)..(25): SEQ ID NO: 1381; WAN024GMU; Start 759; Stop 783
cactgctgaatacggtgactatgta

SEQ ID NO: 292323 - DNA, 25 bp, Artificial
  probe
  misc_feature (1)..(25): SEQ ID NO: 1381; WAN024GMU; Start 114; Stop 138
tgattcaggtcgtgacgttattatc

SEQ ID NO: 292324 - DNA, 25 bp, Artificial
  probe
  misc_feature (1)..(25): SEQ ID NO: 1381; WAN024GMU; Start 743; Stop 767
gtcaatctatttcaaacactgctga

SEQ ID NO: 292325 - DNA, 25 bp, Artificial
  probe
  misc_feature (1)..(25): SEQ ID NO: 1381; WAN024GMU; Start 418; Stop 442
acttacgaagaaggatttggtgttc

SEQ ID NO: 292326 - DNA, 25 bp, Artificial
  probe
  misc_feature (1)..(25): SEQ ID NO: 1381; WAN024GMU; Start 768; Stop 792
atacggtgactatgtatcaggtcca

SEQ ID NO: 292327 - DNA, 25 bp, Artificial
  probe
  misc_feature (1)..(25): SEQ ID NO: 1381; WAN024GMU; Start 113; Stop 137
gtgattcaggtcgtgacgttattat

SEQ ID NO: 292328 - DNA, 25 bp, Artificial
  probe
  misc_feature (1)..(25): SEQ ID NO: 1381; WAN024GMU; Start 531; Stop 555
aggtcttcttgaaacaacttacaaa

SEQ ID NO: 292329 - DNA, 25 bp, Artificial
  probe
  misc_feature (1)..(25): SEQ ID NO: 1381; WAN024GMU; Start 130; Stop 154
gttattatcggtgtacgtccaggta

SEQ ID NO: 292330 - DNA, 25 bp, Artificial
  probe
  misc_feature (1)..(25): SEQ ID NO: 1381; WAN024GMU; Start 529; Stop 553
gtaggtcttcttgaaacaacttaca

SEQ ID NO: 292331 - DNA, 25 bp, Artificial
  probe
  misc_feature (1)..(25): SEQ ID NO: 1381; WAN024GMU; Start 365; Stop 389
atgtagatgtcttcatgtgtgctcc

SEQ ID NO: 292332 - DNA, 25 bp, Artificial
  probe
  misc_feature (1)..(25): SEQ ID NO: 1381; WAN024GMU; Start 363; Stop 387
ggatgtagatgtcttcatgtgtgct

SEQ ID NO: 292333 - DNA, 25 bp, Artificial
  probe
  misc_feature (1)..(25): SEQ ID NO: 1382; WAN024CH6; Start 776; Stop 800
attctaatatccacggtgtcaatgt

SEQ ID NO: 292334 - DNA, 25 bp, Artificial
  probe
  misc_feature (1)..(25): SEQ ID NO: 1382; WAN024CH6; Start 775; Stop 799
gattctaatatccacggtgtcaatg

SEQ ID NO: 292335 - DNA, 25 bp, Artificial
  probe
  misc_feature (1)..(25): SEQ ID NO: 1382; WAN024CH6; Start 777; Stop 801
ttctaatatccacggtgtcaatgtc

SEQ ID NO: 292336 - DNA, 25 bp, Artificial
  probe
  misc_feature (1)..(25): SEQ ID NO: 1382; WAN024CH6; Start 774; Stop 798
tgattctaatatccacggtgtcaat

SEQ ID NO: 292337 - DNA, 25 bp, Artificial
  probe
  misc_feature (1)..(25): SEQ ID NO: 1382; WAN024CH6; Start 773; Stop 797
ctgattctaatatccacggtgtcaa

SEQ ID NO: 292338 - DNA, 25 bp, Artificial
  probe
  misc_feature (1)..(25): SEQ ID NO: 1382; WAN024CH6; Start 851; Stop 875
atgaggcagatattgtagttggtgt

SEQ ID NO: 292339 - DNA, 25 bp, Artificial
  probe
  misc_feature (1)..(25): SEQ ID NO: 1382; WAN024CH6; Start 846; Stop 870
taagcatgaggcagatattgtagtt

SEQ ID NO: 292340 - DNA, 25 bp, Artificial
  probe
  misc_feature (1)..(25): SEQ ID NO: 1382; WAN024CH6; Start 845; Stop 869
ttaagcatgaggcagatattgtagt

SEQ ID NO: 292341 - DNA, 25 bp, Artificial
  probe
  misc_feature (1)..(25): SEQ ID NO: 1382; WAN024CH6; Start 781; Stop 805
aatatccacggtgtcaatgtccata

SEQ ID NO: 292342 - DNA, 25 bp, Artificial
  probe
  misc_feature (1)..(25): SEQ ID NO: 1382; WAN024CH6; Start 780; Stop 804
taatatccacggtgtcaatgtccat

SEQ ID NO: 292343 - DNA, 25 bp, Artificial
  probe
  misc_feature (1)..(25): SEQ ID NO: 1382; WAN024CH6; Start 847; Stop 871
aagcatgaggcagatattgtagttg

SEQ ID NO: 292344 - DNA, 25 bp, Artificial
  probe
  misc_feature (1)..(25): SEQ ID NO: 1382; WAN024CH6; Start 433; Stop 457
ctcattcgtcgcagtcataatccta

SEQ ID NO: 292345 - DNA, 25 bp, Artificial
  probe
  misc_feature (1)..(25): SEQ ID NO: 1382; WAN024CH6; Start 778; Stop 802
tctaatatccacggtgtcaatgtcc

SEQ ID NO: 292346 - DNA, 25 bp, Artificial
  probe
  misc_feature (1)..(25): SEQ ID NO: 1382; WAN024CH6; Start 850; Stop 874
catgaggcagatattgtagttggtg

SEQ ID NO: 292347 - DNA, 25 bp, Artificial
  probe
  misc_feature (1)..(25): SEQ ID NO: 1382; WAN024CH6; Start 852; Stop 876
tgaggcagatattgtagttggtgtg

SEQ ID NO: 292348 - DNA, 25 bp, Artificial
  probe
  misc_feature (1)..(25): SEQ ID NO: 1382; WAN024CH6; Start 772; Stop 796
cctgattctaatatccacggtgtca

SEQ ID NO: 292349 - DNA, 25 bp, Artificial
  probe
  misc_feature (1)..(25): SEQ ID NO: 1382; WAN024CH6; Start 782; Stop 806
atatccacggtgtcaatgtccatac

SEQ ID NO: 292350 - DNA, 25 bp, Artificial
  probe
  misc_feature (1)..(25): SEQ ID NO: 1382; WAN024CH6; Start 779; Stop 803
ctaatatccacggtgtcaatgtcca

SEQ ID NO: 292351 - DNA, 25 bp, Artificial
  probe
  misc_feature (1)..(25): SEQ ID NO: 1382; WAN024CH6; Start 702; Stop 726
tcagtatgacagctatacagatgat

SEQ ID NO: 292352 - DNA, 25 bp, Artificial
  probe
  misc_feature (1)..(25): SEQ ID NO: 1382; WAN024CH6; Start 434; Stop 458
tcattcgtcgcagtcataatcctag

SEQ ID NO: 292353 - DNA, 25 bp, Artificial
  probe
  misc_feature (1)..(25): SEQ ID NO: 1382; WAN024CH6; Start 698; Stop 722
gcattcagtatgacagctatacaga

SEQ ID NO: 292354 - DNA, 25 bp, Artificial
  probe
  misc_feature (1)..(25): SEQ ID NO: 1382; WAN024CH6; Start 848; Stop 872
agcatgaggcagatattgtagttgg

SEQ ID NO: 292355 - DNA, 25 bp, Artificial
  probe
  misc_feature (1)..(25): SEQ ID NO: 1382; WAN024CH6; Start 61; Stop 85
ccagatgctgctaagttgacctatt

SEQ ID NO: 292356 - DNA, 25 bp, Artificial
  probe
  misc_feature (1)..(25): SEQ ID NO: 1382; WAN024CH6; Start 697; Stop 721
ggcattcagtatgacagctatacag

SEQ ID NO: 292357 - DNA, 25 bp, Artificial
  probe
  misc_feature (1)..(25): SEQ ID NO: 1382; WAN024CH6; Start 701; Stop 725
ttcagtatgacagctatacagatga

SEQ ID NO: 292358 - DNA, 25 bp, Artificial
  probe
  misc_feature (1)..(25): SEQ ID NO: 1382; WAN024CH6; Start 849; Stop 873
gcatgaggcagatattgtagttggt

SEQ ID NO: 292359 - DNA, 25 bp, Artificial
  probe
  misc_feature (1)..(25): SEQ ID NO: 1382; WAN024CH6; Start 842; Stop 866
aatttaagcatgaggcagatattgt

SEQ ID NO: 292360 - DNA, 25 bp, Artificial
  probe
  misc_feature (1)..(25): SEQ ID NO: 1382; WAN024CH6; Start 844; Stop 868
tttaagcatgaggcagatattgtag

SEQ ID NO: 292361 - DNA, 25 bp, Artificial
  probe
  misc_feature (1)..(25): SEQ ID NO: 1382; WAN024CH6; Start 839; Stop 863
gagaatttaagcatgaggcagatat

SEQ ID NO: 292362 - DNA, 25 bp, Artificial
  probe
  misc_feature (1)..(25): SEQ ID NO: 1382; WAN024CH6; Start 838; Stop 862
cgagaatttaagcatgaggcagata

SEQ ID NO: 292363 - DNA, 25 bp, Artificial
  probe
  misc_feature (1)..(25): SEQ ID NO: 1382; WAN024CH6; Start 704; Stop 728
agtatgacagctatacagatgatac

SEQ ID NO: 292364 - DNA, 25 bp, Artificial
  probe
  misc_feature (1)..(25): SEQ ID NO: 1382; WAN024CH6; Start 703; Stop 727
cagtatgacagctatacagatgata

SEQ ID NO: 292365 - DNA, 25 bp, Artificial
  probe
  misc_feature (1)..(25): SEQ ID NO: 1382; WAN024CH6; Start 18; Stop 42
atctcttaatgaagaatgtggtgtt

SEQ ID NO: 292366 - DNA, 25 bp, Artificial
  probe
  misc_feature (1)..(25): SEQ ID NO: 1383; WAN024FIW; Start 657; Stop 681
catggatctctggaaggattaacta

SEQ ID NO: 292367 - DNA, 25 bp, Artificial
  probe
  misc_feature (1)..(25): SEQ ID NO: 1383; WAN024FIW; Start 659; Stop 683
tggatctctggaaggattaactaat

SEQ ID NO: 292368 - DNA, 25 bp, Artificial
  probe
  misc_feature (1)..(25): SEQ ID NO: 1383; WAN024FIW; Start 658; Stop 682
atggatctctggaaggattaactaa

SEQ ID NO: 292369 - DNA, 25 bp, Artificial
  probe
  misc_feature (1)..(25): SEQ ID NO: 1383; WAN024FIW; Start 325; Stop 349
gttcattcaagttcagaccagctaa

SEQ ID NO: 292370 - DNA, 25 bp, Artificial
  probe
  misc_feature (1)..(25): SEQ ID NO: 1383; WAN024FIW; Start 471; Stop 495
cttgattaaggaggctcttcgtgaa

SEQ ID NO: 292371 - DNA, 25 bp, Artificial
  probe
  misc_feature (1)..(25): SEQ ID NO: 1383; WAN024FIW; Start 432; Stop 456
tttgaccaagacactaaaggaagat

SEQ ID NO: 292372 - DNA, 25 bp, Artificial
  probe
  misc_feature (1)..(25): SEQ ID NO: 1383; WAN024FIW; Start 431; Stop 455
atttgaccaagacactaaaggaaga

SEQ ID NO: 292373 - DNA, 25 bp, Artificial
  probe
  misc_feature (1)..(25): SEQ ID NO: 1383; WAN024FIW; Start 430; Stop 454
gatttgaccaagacactaaaggaag

SEQ ID NO: 292374 - DNA, 25 bp, Artificial
  probe
  misc_feature (1)..(25): SEQ ID NO: 1383; WAN024FIW; Start 326; Stop 350
ttcattcaagttcagaccagctaac

SEQ ID NO: 292375 - DNA, 25 bp, Artificial
  probe
  misc_feature (1)..(25): SEQ ID NO: 1383; WAN024FIW; Start 317; Stop 341
ttggagcagttcattcaagttcaga

SEQ ID NO: 292376 - DNA, 25 bp, Artificial
  probe
  misc_feature (1)..(25): SEQ ID NO: 1383; WAN024FIW; Start 254; Stop 278
taaatggcgaaattgaattgctctt

SEQ ID NO: 292377 - DNA, 25 bp, Artificial
  probe
  misc_feature (1)..(25): SEQ ID NO: 1383; WAN024FIW; Start 253; Stop 277
ttaaatggcgaaattgaattgctct

SEQ ID NO: 292378 - DNA, 25 bp, Artificial
  probe
  misc_feature (1)..(25): SEQ ID NO: 1383; WAN024FIW; Start 433; Stop 457
ttgaccaagacactaaaggaagatg

SEQ ID NO: 292379 - DNA, 25 bp, Artificial
  probe
  misc_feature (1)..(25): SEQ ID NO: 1383; WAN024FIW; Start 426; Stop 450
tgaggatttgaccaagacactaaag

SEQ ID NO: 292380 - DNA, 25 bp, Artificial
  probe
  misc_feature (1)..(25): SEQ ID NO: 1383; WAN024FIW; Start 252; Stop 276
attaaatggcgaaattgaattgctc

SEQ ID NO: 292381 - DNA, 25 bp, Artificial
  probe
  misc_feature (1)..(25): SEQ ID NO: 1383; WAN024FIW; Start 455; Stop 479
atggaaccagtgctgacttgattaa

SEQ ID NO: 292382 - DNA, 25 bp, Artificial
  probe
  misc_feature (1)..(25): SEQ ID NO: 1383; WAN024FIW; Start 429; Stop 453
ggatttgaccaagacactaaaggaa

SEQ ID NO: 292383 - DNA, 25 bp, Artificial
  probe
  misc_feature (1)..(25): SEQ ID NO: 1383; WAN024FIW; Start 438; Stop 462
caagacactaaaggaagatggaacc

SEQ ID NO: 292384 - DNA, 25 bp, Artificial
  probe
  misc_feature (1)..(25): SEQ ID NO: 1383; WAN024FIW; Start 324; Stop 348
agttcattcaagttcagaccagcta

SEQ ID NO: 292385 - DNA, 25 bp, Artificial
  probe
  misc_feature (1)..(25): SEQ ID NO: 1383; WAN024FIW; Start 267; Stop 291
tgaattgctctttgatgctagtttg

SEQ ID NO: 292386 - DNA, 25 bp, Artificial
  probe
  misc_feature (1)..(25): SEQ ID NO: 1383; WAN024FIW; Start 266; Stop 290
ttgaattgctctttgatgctagttt

SEQ ID NO: 292387 - DNA, 25 bp, Artificial
  probe
  misc_feature (1)..(25): SEQ ID NO: 1383; WAN024FIW; Start 424; Stop 448
attgaggatttgaccaagacactaa

SEQ ID NO: 292388 - DNA, 25 bp, Artificial
  probe
  misc_feature (1)..(25): SEQ ID NO: 1383; WAN024FIW; Start 255; Stop 279
aaatggcgaaattgaattgctcttt

SEQ ID NO: 292389 - DNA, 25 bp, Artificial
  probe
  misc_feature (1)..(25): SEQ ID NO: 1383; WAN024FIW; Start 425; Stop 449
ttgaggatttgaccaagacactaaa

SEQ ID NO: 292390 - DNA, 25 bp, Artificial
  probe
  misc_feature (1)..(25): SEQ ID NO: 1383; WAN024FIW; Start 418; Stop 442
tttgagattgaggatttgaccaaga

SEQ ID NO: 292391 - DNA, 25 bp, Artificial
  probe
  misc_feature (1)..(25): SEQ ID NO: 1383; WAN024FIW; Start 265; Stop 289
attgaattgctctttgatgctagtt

SEQ ID NO: 292392 - DNA, 25 bp, Artificial
  probe
  misc_feature (1)..(25): SEQ ID NO: 1383; WAN024FIW; Start 264; Stop 288
aattgaattgctctttgatgctagt

SEQ ID NO: 292393 - DNA, 25 bp, Artificial
  probe
  misc_feature (1)..(25): SEQ ID NO: 1383; WAN024FIW; Start 472; Stop 496
ttgattaaggaggctcttcgtgaag

SEQ ID NO: 292394 - DNA, 25 bp, Artificial
  probe
  misc_feature (1)..(25): SEQ ID NO: 1383; WAN024FIW; Start 467; Stop 491
ctgacttgattaaggaggctcttcg

SEQ ID NO: 292395 - DNA, 25 bp, Artificial
  probe
  misc_feature (1)..(25): SEQ ID NO: 1383; WAN024FIW; Start 423; Stop 447
gattgaggatttgaccaagacacta

SEQ ID NO: 292396 - DNA, 25 bp, Artificial
  probe
  misc_feature (1)..(25): SEQ ID NO: 1383; WAN024FIW; Start 427; Stop 451
gaggatttgaccaagacactaaagg

SEQ ID NO: 292397 - DNA, 25 bp, Artificial
  probe
  misc_feature (1)..(25): SEQ ID NO: 1383; WAN024FIW; Start 459; Stop 483
aaccagtgctgacttgattaaggag

SEQ ID NO: 292398 - DNA, 25 bp, Artificial
  probe
  misc_feature (1)..(25): SEQ ID NO: 1383; WAN024FIW; Start 458; Stop 482
gaaccagtgctgacttgattaagga

SEQ ID NO: 292399 - DNA, 25 bp, Artificial
  probe
  misc_feature (1)..(25): SEQ ID NO: 1384; WAN024D63; Start 106; Stop 130
cataagggtggacctcatatcttac

SEQ ID NO: 292400 - DNA, 25 bp, Artificial
  probe
  misc_feature (1)..(25): SEQ ID NO: 1384; WAN024D63; Start 107; Stop 131
ataagggtggacctcatatcttaca

SEQ ID NO: 292401 - DNA, 25 bp, Artificial
  probe
  misc_feature (1)..(25): SEQ ID NO: 1384; WAN024D63; Start 108; Stop 132
taagggtggacctcatatcttacaa

SEQ ID NO: 292402 - DNA, 25 bp, Artificial
  probe
  misc_feature (1)..(25): SEQ ID NO: 1384; WAN024D63; Start 109; Stop 133
aagggtggacctcatatcttacaaa

SEQ ID NO: 292403 - DNA, 25 bp, Artificial
  probe
  misc_feature (1)..(25): SEQ ID NO: 1384; WAN024D63; Start 105; Stop 129
gcataagggtggacctcatatctta

SEQ ID NO: 292404 - DNA, 25 bp, Artificial
  probe
  misc_feature (1)..(25): SEQ ID NO: 1384; WAN024D63; Start 216; Stop 240
ggataagggtgagattttctatgct

SEQ ID NO: 292405 - DNA, 25 bp, Artificial
  probe
  misc_feature (1)..(25): SEQ ID NO: 1384; WAN024D63; Start 218; Stop 242
ataagggtgagattttctatgctgg

SEQ ID NO: 292406 - DNA, 25 bp, Artificial
  probe
  misc_feature (1)..(25): SEQ ID NO: 1384; WAN024D63; Start 656; Stop 680
atctaggaaaaggtctggcaaatat

SEQ ID NO: 292407 - DNA, 25 bp, Artificial
  probe
  misc_feature (1)..(25): SEQ ID NO: 1384; WAN024D63; Start 654; Stop 678
ctatctaggaaaaggtctggcaaat

SEQ ID NO: 292408 - DNA, 25 bp, Artificial
  probe
  misc_feature (1)..(25): SEQ ID NO: 1384; WAN024D63; Start 217; Stop 241
gataagggtgagattttctatgctg

SEQ ID NO: 292409 - DNA, 25 bp, Artificial
  probe
  misc_feature (1)..(25): SEQ ID NO: 1384; WAN024D63; Start 655; Stop 679
tatctaggaaaaggtctggcaaata

SEQ ID NO: 292410 - DNA, 25 bp, Artificial
  probe
  misc_feature (1)..(25): SEQ ID NO: 1384; WAN024D63; Start 133; Stop 157
aagaccaaagatatcgtagctagtt

SEQ ID NO: 292411 - DNA, 25 bp, Artificial
  probe
  misc_feature (1)..(25): SEQ ID NO: 1384; WAN024D63; Start 132; Stop 156
aaagaccaaagatatcgtagctagt

SEQ ID NO: 292412 - DNA, 25 bp, Artificial
  probe
  misc_feature (1)..(25): SEQ ID NO: 1384; WAN024D63; Start 111; Stop 135
gggtggacctcatatcttacaaaag

SEQ ID NO: 292413 - DNA, 25 bp, Artificial
  probe
  misc_feature (1)..(25): SEQ ID NO: 1384; WAN024D63; Start 215; Stop 239
cggataagggtgagattttctatgc

SEQ ID NO: 292414 - DNA, 25 bp, Artificial
  probe
  misc_feature (1)..(25): SEQ ID NO: 1384; WAN024D63; Start 653; Stop 677
actatctaggaaaaggtctggcaaa

SEQ ID NO: 292415 - DNA, 25 bp, Artificial
  probe
  misc_feature (1)..(25): SEQ ID NO: 1384; WAN024D63; Start 134; Stop 158
agaccaaagatatcgtagctagtta

SEQ ID NO: 292416 - DNA, 25 bp, Artificial
  probe
  misc_feature (1)..(25): SEQ ID NO: 1384; WAN024D63; Start 657; Stop 681
tctaggaaaaggtctggcaaatatt

SEQ ID NO: 292417 - DNA, 25 bp, Artificial
  probe
  misc_feature (1)..(25): SEQ ID NO: 1384; WAN024D63; Start 189; Stop 213
catatcttctgctgggatggtggat

SEQ ID NO: 292418 - DNA, 25 bp, Artificial
  probe
  misc_feature (1)..(25): SEQ ID NO: 1384; WAN024D63; Start 219; Stop 243
taagggtgagattttctatgctggg

SEQ ID NO: 292419 - DNA, 25 bp, Artificial
  probe
  misc_feature (1)..(25): SEQ ID NO: 1384; WAN024D63; Start 175; Stop 199
gtagcaggtgttgccatatcttctg

SEQ ID NO: 292420 - DNA, 25 bp, Artificial
  probe
  misc_feature (1)..(25): SEQ ID NO: 1384; WAN024D63; Start 173; Stop 197
cagtagcaggtgttgccatatcttc

SEQ ID NO: 292421 - DNA, 25 bp, Artificial
  probe
  misc_feature (1)..(25): SEQ ID NO: 1384; WAN024D63; Start 190; Stop 214
atatcttctgctgggatggtggatc

SEQ ID NO: 292422 - DNA, 25 bp, Artificial
  probe
  misc_feature (1)..(25): SEQ ID NO: 1384; WAN024D63; Start 174; Stop 198
agtagcaggtgttgccatatcttct

SEQ ID NO: 292423 - DNA, 25 bp, Artificial
  probe
  misc_feature (1)..(25): SEQ ID NO: 1384; WAN024D63; Start 110; Stop 134
agggtggacctcatatcttacaaaa

SEQ ID NO: 292424 - DNA, 25 bp, Artificial
  probe
  misc_feature (1)..(25): SEQ ID NO: 1384; WAN024D63; Start 135; Stop 159
gaccaaagatatcgtagctagttat

SEQ ID NO: 292425 - DNA, 25 bp, Artificial
  probe
  misc_feature (1)..(25): SEQ ID NO: 1384; WAN024D63; Start 652; Stop 676
gactatctaggaaaaggtctggcaa

SEQ ID NO: 292426 - DNA, 25 bp, Artificial
  probe
  misc_feature (1)..(25): SEQ ID NO: 1384; WAN024D63; Start 129; Stop 153
acaaaagaccaaagatatcgtagct

SEQ ID NO: 292427 - DNA, 25 bp, Artificial
  probe
  misc_feature (1)..(25): SEQ ID NO: 1384; WAN024D63; Start 136; Stop 160
accaaagatatcgtagctagttatt

SEQ ID NO: 292428 - DNA, 25 bp, Artificial
  probe
  misc_feature (1)..(25): SEQ ID NO: 1384; WAN024D63; Start 128; Stop 152
tacaaaagaccaaagatatcgtagc

SEQ ID NO: 292429 - DNA, 25 bp, Artificial
  probe
  misc_feature (1)..(25): SEQ ID NO: 1384; WAN024D63; Start 104; Stop 128
cgcataagggtggacctcatatctt

SEQ ID NO: 292430 - DNA, 25 bp, Artificial
  probe
  misc_feature (1)..(25): SEQ ID NO: 1384; WAN024D63; Start 115; Stop 139
ggacctcatatcttacaaaagacca

SEQ ID NO: 292431 - DNA, 25 bp, Artificial
  probe
  misc_feature (1)..(25): SEQ ID NO: 1384; WAN024D63; Start 114; Stop 138
tggacctcatatcttacaaaagacc

SEQ ID NO: 292432 - DNA, 25 bp, Artificial
  probe
  misc_feature (1)..(25): SEQ ID NO: 1385; WAN024DYD; Start 188; Stop 212
gttctattgaggaccactttgattc

SEQ ID NO: 292433 - DNA, 25 bp, Artificial
  probe
  misc_feature (1)..(25): SEQ ID NO: 1385; WAN024DYD; Start 187; Stop 211
cgttctattgaggaccactttgatt

SEQ ID NO: 292434 - DNA, 25 bp, Artificial
  probe
  misc_feature (1)..(25): SEQ ID NO: 1385; WAN024DYD; Start 689; Stop 713
gaaatgaaatccaacttactgatgc

SEQ ID NO: 292435 - DNA, 25 bp, Artificial
  probe
  misc_feature (1)..(25): SEQ ID NO: 1385; WAN024DYD; Start 189; Stop 213
ttctattgaggaccactttgattca

SEQ ID NO: 292436 - DNA, 25 bp, Artificial
  probe
  misc_feature (1)..(25): SEQ ID NO: 1385; WAN024DYD; Start 822; Stop 846
cctcaaacatccacaagtcaaagat

SEQ ID NO: 292437 - DNA, 25 bp, Artificial
  probe
  misc_feature (1)..(25): SEQ ID NO: 1385; WAN024DYD; Start 750; Stop 774
ccgtgaatttacaggaactcgttac

SEQ ID NO: 292438 - DNA, 25 bp, Artificial
  probe
  misc_feature (1)..(25): SEQ ID NO: 1385; WAN024DYD; Start 219; Stop 243
tgagcttgaatacaatcttaaggaa

SEQ ID NO: 292439 - DNA, 25 bp, Artificial
  probe
  misc_feature (1)..(25): SEQ ID NO: 1385; WAN024DYD; Start 218; Stop 242
ttgagcttgaatacaatcttaagga

SEQ ID NO: 292440 - DNA, 25 bp, Artificial
  probe
  misc_feature (1)..(25): SEQ ID NO: 1385; WAN024DYD; Start 129; Stop 153
ggaagaagctctcaaatcaggtatt

SEQ ID NO: 292441 - DNA, 25 bp, Artificial
  probe
  misc_feature (1)..(25): SEQ ID NO: 1385; WAN024DYD; Start 121; Stop 145
tttatcgtggaagaagctctcaaat

SEQ ID NO: 292442 - DNA, 25 bp, Artificial
  probe
  misc_feature (1)..(25): SEQ ID NO: 1385; WAN024DYD; Start 130; Stop 154
gaagaagctctcaaatcaggtattg

SEQ ID NO: 292443 - DNA, 25 bp, Artificial
  probe
  misc_feature (1)..(25): SEQ ID NO: 1385; WAN024DYD; Start 122; Stop 146
ttatcgtggaagaagctctcaaatc

SEQ ID NO: 292444 - DNA, 25 bp, Artificial
  probe
  misc_feature (1)..(25): SEQ ID NO: 1385; WAN024DYD; Start 693; Stop 717
tgaaatccaacttactgatgcaatc

SEQ ID NO: 292445 - DNA, 25 bp, Artificial
  probe
  misc_feature (1)..(25): SEQ ID NO: 1385; WAN024DYD; Start 691; Stop 715
aatgaaatccaacttactgatgcaa

SEQ ID NO: 292446 - DNA, 25 bp, Artificial
  probe
  misc_feature (1)..(25): SEQ ID NO: 1385; WAN024DYD; Start 690; Stop 714
aaatgaaatccaacttactgatgca

SEQ ID NO: 292447 - DNA, 25 bp, Artificial
  probe
  misc_feature (1)..(25): SEQ ID NO: 1385; WAN024DYD; Start 692; Stop 716
atgaaatccaacttactgatgcaat

SEQ ID NO: 292448 - DNA, 25 bp, Artificial
  probe
  misc_feature (1)..(25): SEQ ID NO: 1385; WAN024DYD; Start 694; Stop 718
gaaatccaacttactgatgcaatcg

SEQ ID NO: 292449 - DNA, 25 bp, Artificial
  probe
  misc_feature (1)..(25): SEQ ID NO: 1385; WAN024DYD; Start 688; Stop 712
ggaaatgaaatccaacttactgatg

SEQ ID NO: 292450 - DNA, 25 bp, Artificial
  probe
  misc_feature (1)..(25): SEQ ID NO: 1385; WAN024DYD; Start 749; Stop 773
cccgtgaatttacaggaactcgtta

SEQ ID NO: 292451 - DNA, 25 bp, Artificial
  probe
  misc_feature (1)..(25): SEQ ID NO: 1385; WAN024DYD; Start 120; Stop 144
gtttatcgtggaagaagctctcaaa

SEQ ID NO: 292452 - DNA, 25 bp, Artificial
  probe
  misc_feature (1)..(25): SEQ ID NO: 1385; WAN024DYD; Start 695; Stop 719
aaatccaacttactgatgcaatcga

SEQ ID NO: 292453 - DNA, 25 bp, Artificial
  probe
  misc_feature (1)..(25): SEQ ID NO: 1385; WAN024DYD; Start 128; Stop 152
tggaagaagctctcaaatcaggtat

SEQ ID NO: 292454 - DNA, 25 bp, Artificial
  probe
  misc_feature (1)..(25): SEQ ID NO: 1385; WAN024DYD; Start 701; Stop 725
aacttactgatgcaatcgatactct

SEQ ID NO: 292455 - DNA, 25 bp, Artificial
  probe
  misc_feature (1)..(25): SEQ ID NO: 1385; WAN024DYD; Start 700; Stop 724
caacttactgatgcaatcgatactc

SEQ ID NO: 292456 - DNA, 25 bp, Artificial
  probe
  misc_feature (1)..(25): SEQ ID NO: 1385; WAN024DYD; Start 697; Stop 721
atccaacttactgatgcaatcgata

SEQ ID NO: 292457 - DNA, 25 bp, Artificial
  probe
  misc_feature (1)..(25): SEQ ID NO: 1385; WAN024DYD; Start 821; Stop 845
ccctcaaacatccacaagtcaaaga

SEQ ID NO: 292458 - DNA, 25 bp, Artificial
  probe
  misc_feature (1)..(25): SEQ ID NO: 1385; WAN024DYD; Start 696; Stop 720
aatccaacttactgatgcaatcgat

SEQ ID NO: 292459 - DNA, 25 bp, Artificial
  probe
  misc_feature (1)..(25): SEQ ID NO: 1385; WAN024DYD; Start 699; Stop 723
ccaacttactgatgcaatcgatact

SEQ ID NO: 292460 - DNA, 25 bp, Artificial
  probe
  misc_feature (1)..(25): SEQ ID NO: 1385; WAN024DYD; Start 698; Stop 722
tccaacttactgatgcaatcgatac

SEQ ID NO: 292461 - DNA, 25 bp, Artificial
  probe
  misc_feature (1)..(25): SEQ ID NO: 1385; WAN024DYD; Start 212; Stop 236
caaactttgagcttgaatacaatct

SEQ ID NO: 292462 - DNA, 25 bp, Artificial
  probe
  misc_feature (1)..(25): SEQ ID NO: 1385; WAN024DYD; Start 123; Stop 147
tatcgtggaagaagctctcaaatca

SEQ ID NO: 292463 - DNA, 25 bp, Artificial
  probe
  misc_feature (1)..(25): SEQ ID NO: 1385; WAN024DYD; Start 119; Stop 143
agtttatcgtggaagaagctctcaa

SEQ ID NO: 292464 - DNA, 25 bp, Artificial
  probe
  misc_feature (1)..(25): SEQ ID NO: 1385; WAN024DYD; Start 5; Stop 29
catcaaaagttagaaaggcagtcat

SEQ ID NO: 292465 - DNA, 25 bp, Artificial
  probe
  misc_feature (1)..(25): SEQ ID NO: 1386; WAN024DYE; Start 153; Stop 177
tgaagatattctagttgtcactggt

SEQ ID NO: 292466 - DNA, 25 bp, Artificial
  probe
  misc_feature (1)..(25): SEQ ID NO: 1386; WAN024DYE; Start 878; Stop 902
aagaattgactgagaaggaataact

SEQ ID NO: 292467 - DNA, 25 bp, Artificial
  probe
  misc_feature (1)..(25): SEQ ID NO: 1386; WAN024DYE; Start 152; Stop 176
ttgaagatattctagttgtcactgg

SEQ ID NO: 292468 - DNA, 25 bp, Artificial
  probe
  misc_feature (1)..(25): SEQ ID NO: 1386; WAN024DYE; Start 879; Stop 903
agaattgactgagaaggaataacta

SEQ ID NO: 292469 - DNA, 25 bp, Artificial
  probe
  misc_feature (1)..(25): SEQ ID NO: 1386; WAN024DYE; Start 154; Stop 178
gaagatattctagttgtcactggta

SEQ ID NO: 292470 - DNA, 25 bp, Artificial
  probe
  misc_feature (1)..(25): SEQ ID NO: 1386; WAN024DYE; Start 155; Stop 179
aagatattctagttgtcactggtaa

SEQ ID NO: 292471 - DNA, 25 bp, Artificial
  probe
  misc_feature (1)..(25): SEQ ID NO: 1386; WAN024DYE; Start 557; Stop 581
gtctttacagtgttgaaacctttgt

SEQ ID NO: 292472 - DNA, 25 bp, Artificial
  probe
  misc_feature (1)..(25): SEQ ID NO: 1386; WAN024DYE; Start 562; Stop 586
tacagtgttgaaacctttgttgaaa

SEQ ID NO: 292473 - DNA, 25 bp, Artificial
  probe
  misc_feature (1)..(25): SEQ ID NO: 1386; WAN024DYE; Start 561; Stop 585
ttacagtgttgaaacctttgttgaa

SEQ ID NO: 292474 - DNA, 25 bp, Artificial
  probe
  misc_feature (1)..(25): SEQ ID NO: 1386; WAN024DYE; Start 560; Stop 584
tttacagtgttgaaacctttgttga

SEQ ID NO: 292475 - DNA, 25 bp, Artificial
  probe
  misc_feature (1)..(25): SEQ ID NO: 1386; WAN024DYE; Start 559; Stop 583
ctttacagtgttgaaacctttgttg

SEQ ID NO: 292476 - DNA, 25 bp, Artificial
  probe
  misc_feature (1)..(25): SEQ ID NO: 1386; WAN024DYE; Start 558; Stop 582
tctttacagtgttgaaacctttgtt

SEQ ID NO: 292477 - DNA, 25 bp, Artificial
  probe
  misc_feature (1)..(25): SEQ ID NO: 1386; WAN024DYE; Start 880; Stop 904
gaattgactgagaaggaataactaa

SEQ ID NO: 292478 - DNA, 25 bp, Artificial
  probe
  misc_feature (1)..(25): SEQ ID NO: 1386; WAN024DYE; Start 161; Stop 185
ttctagttgtcactggtaaatcaaa

SEQ ID NO: 292479 - DNA, 25 bp, Artificial
  probe
  misc_feature (1)..(25): SEQ ID NO: 1386; WAN024DYE; Start 151; Stop 175
attgaagatattctagttgtcactg

SEQ ID NO: 292480 - DNA, 25 bp, Artificial
  probe
  misc_feature (1)..(25): SEQ ID NO: 1386; WAN024DYE; Start 160; Stop 184
attctagttgtcactggtaaatcaa

SEQ ID NO: 292481 - DNA, 25 bp, Artificial
  probe
  misc_feature (1)..(25): SEQ ID NO: 1386; WAN024DYE; Start 556; Stop 580
ggtctttacagtgttgaaacctttg

SEQ ID NO: 292482 - DNA, 25 bp, Artificial
  probe
  misc_feature (1)..(25): SEQ ID NO: 1386; WAN024DYE; Start 554; Stop 578
atggtctttacagtgttgaaacctt

SEQ ID NO: 292483 - DNA, 25 bp, Artificial
  probe
  misc_feature (1)..(25): SEQ ID NO: 1386; WAN024DYE; Start 555; Stop 579
tggtctttacagtgttgaaaccttt

SEQ ID NO: 292484 - DNA, 25 bp, Artificial
  probe
  misc_feature (1)..(25): SEQ ID NO: 1386; WAN024DYE; Start 877; Stop 901
aaagaattgactgagaaggaataac

SEQ ID NO: 292485 - DNA, 25 bp, Artificial
  probe
  misc_feature (1)..(25): SEQ ID NO: 1386; WAN024DYE; Start 553; Stop 577
gatggtctttacagtgttgaaacct

SEQ ID NO: 292486 - DNA, 25 bp, Artificial
  probe
  misc_feature (1)..(25): SEQ ID NO: 1386; WAN024DYE; Start 552; Stop 576
agatggtctttacagtgttgaaacc

SEQ ID NO: 292487 - DNA, 25 bp, Artificial
  probe
  misc_feature (1)..(25): SEQ ID NO: 1386; WAN024DYE; Start 881; Stop 905
aattgactgagaaggaataactaat

SEQ ID NO: 292488 - DNA, 25 bp, Artificial
  probe
  misc_feature (1)..(25): SEQ ID NO: 1386; WAN024DYE; Start 393; Stop 417
tgatgacttgatggatatcacagac

SEQ ID NO: 292489 - DNA, 25 bp, Artificial
  probe
  misc_feature (1)..(25): SEQ ID NO: 1386; WAN024DYE; Start 148; Stop 172
ggtattgaagatattctagttgtca

SEQ ID NO: 292490 - DNA, 25 bp, Artificial
  probe
  misc_feature (1)..(25): SEQ ID NO: 1386; WAN024DYE; Start 146; Stop 170
caggtattgaagatattctagttgt

SEQ ID NO: 292491 - DNA, 25 bp, Artificial
  probe
  misc_feature (1)..(25): SEQ ID NO: 1386; WAN024DYE; Start 551; Stop 575
aagatggtctttacagtgttgaaac

SEQ ID NO: 292492 - DNA, 25 bp, Artificial
  probe
  misc_feature (1)..(25): SEQ ID NO: 1386; WAN024DYE; Start 159; Stop 183
tattctagttgtcactggtaaatca

SEQ ID NO: 292493 - DNA, 25 bp, Artificial
  probe
  misc_feature (1)..(25): SEQ ID NO: 1386; WAN024DYE; Start 394; Stop 418
gatgacttgatggatatcacagacg

SEQ ID NO: 292494 - DNA, 25 bp, Artificial
  probe
  misc_feature (1)..(25): SEQ ID NO: 1386; WAN024DYE; Start 156; Stop 180
agatattctagttgtcactggtaaa

SEQ ID NO: 292495 - DNA, 25 bp, Artificial
  probe
  misc_feature (1)..(25): SEQ ID NO: 1386; WAN024DYE; Start 147; Stop 171
aggtattgaagatattctagttgtc

SEQ ID NO: 292496 - DNA, 25 bp, Artificial
  probe
  misc_feature (1)..(25): SEQ ID NO: 1386; WAN024DYE; Start 395; Stop 419
atgacttgatggatatcacagacga

SEQ ID NO: 292497 - DNA, 25 bp, Artificial
  probe
  misc_feature (1)..(25): SEQ ID NO: 1386; WAN024DYE; Start 396; Stop 420
tgacttgatggatatcacagacgaa

SEQ ID NO: 292498 - DNA, 25 bp, Artificial
  probe
  misc_feature (1)..(25): SEQ ID NO: 1387; WAN024FXN; Start 1012; Stop 1036
caaggcgttatctgtgtatctgaag

SEQ ID NO: 292499 - DNA, 25 bp, Artificial
  probe
  misc_feature (1)..(25): SEQ ID NO: 1387; WAN024FXN; Start 1019; Stop 1043
ttatctgtgtatctgaaggtgccaa

SEQ ID NO: 292500 - DNA, 25 bp, Artificial
  probe
  misc_feature (1)..(25): SEQ ID NO: 1387; WAN024FXN; Start 1020; Stop 1044
tatctgtgtatctgaaggtgccaac

SEQ ID NO: 292501 - DNA, 25 bp, Artificial
  probe
  misc_feature (1)..(25): SEQ ID NO: 1387; WAN024FXN; Start 1018; Stop 1042
gttatctgtgtatctgaaggtgcca

SEQ ID NO: 292502 - DNA, 25 bp, Artificial
  probe
  misc_feature (1)..(25): SEQ ID NO: 1387; WAN024FXN; Start 1011; Stop 1035
tcaaggcgttatctgtgtatctgaa

SEQ ID NO: 292503 - DNA, 25 bp, Artificial
  probe
  misc_feature (1)..(25): SEQ ID NO: 1387; WAN024FXN; Start 1013; Stop 1037
aaggcgttatctgtgtatctgaagg

SEQ ID NO: 292504 - DNA, 25 bp, Artificial
  probe
  misc_feature (1)..(25): SEQ ID NO: 1387; WAN024FXN; Start 1010; Stop 1034
ctcaaggcgttatctgtgtatctga

SEQ ID NO: 292505 - DNA, 25 bp, Artificial
  probe
  misc_feature (1)..(25): SEQ ID NO: 1387; WAN024FXN; Start 641; Stop 665
acggtttggtttactatactgaaga

SEQ ID NO: 292506 - DNA, 25 bp, Artificial
  probe
  misc_feature (1)..(25): SEQ ID NO: 1387; WAN024FXN; Start 636; Stop 660
tggttacggtttggtttactatact

SEQ ID NO: 292507 - DNA, 25 bp, Artificial
  probe
  misc_feature (1)..(25): SEQ ID NO: 1387; WAN024FXN; Start 634; Stop 658
actggttacggtttggtttactata

SEQ ID NO: 292508 - DNA, 25 bp, Artificial
  probe
  misc_feature (1)..(25): SEQ ID NO: 1387; WAN024FXN; Start 637; Stop 661
ggttacggtttggtttactatactg

SEQ ID NO: 292509 - DNA, 25 bp, Artificial
  probe
  misc_feature (1)..(25): SEQ ID NO: 1387; WAN024FXN; Start 635; Stop 659
ctggttacggtttggtttactatac

SEQ ID NO: 292510 - DNA, 25 bp, Artificial
  probe
  misc_feature (1)..(25): SEQ ID NO: 1387; WAN024FXN; Start 927; Stop 951
gacttacgctggaaactatgacatt

SEQ ID NO: 292511 - DNA, 25 bp, Artificial
  probe
  misc_feature (1)..(25): SEQ ID NO: 1387; WAN024FXN; Start 642; Stop 666
cggtttggtttactatactgaagaa

SEQ ID NO: 292512 - DNA, 25 bp, Artificial
  probe
  misc_feature (1)..(25): SEQ ID NO: 1387; WAN024FXN; Start 633; Stop 657
aactggttacggtttggtttactat

SEQ ID NO: 292513 - DNA, 25 bp, Artificial
  probe
  misc_feature (1)..(25): SEQ ID NO: 1387; WAN024FXN; Start 923; Stop 947
tatggacttacgctggaaactatga

SEQ ID NO: 292514 - DNA, 25 bp, Artificial
  probe
  misc_feature (1)..(25): SEQ ID NO: 1387; WAN024FXN; Start 148; Stop 172
aatatcttggcacgtattactgagc

SEQ ID NO: 292515 - DNA, 25 bp, Artificial
  probe
  misc_feature (1)..(25): SEQ ID NO: 1387; WAN024FXN; Start 922; Stop 946
gtatggacttacgctggaaactatg

SEQ ID NO: 292516 - DNA, 25 bp, Artificial
  probe
  misc_feature (1)..(25): SEQ ID NO: 1387; WAN024FXN; Start 638; Stop 662
gttacggtttggtttactatactga

SEQ ID NO: 292517 - DNA, 25 bp, Artificial
  probe
  misc_feature (1)..(25): SEQ ID NO: 1387; WAN024FXN; Start 1007; Stop 1031
ttgctcaaggcgttatctgtgtatc

SEQ ID NO: 292518 - DNA, 25 bp, Artificial
  probe
  misc_feature (1)..(25): SEQ ID NO: 1387; WAN024FXN; Start 928; Stop 952
acttacgctggaaactatgacattg

SEQ ID NO: 292519 - DNA, 25 bp, Artificial
  probe
  misc_feature (1)..(25): SEQ ID NO: 1387; WAN024FXN; Start 582; Stop 606
cttgactggtaaacctcttggattt

SEQ ID NO: 292520 - DNA, 25 bp, Artificial
  probe
  misc_feature (1)..(25): SEQ ID NO: 1387; WAN024FXN; Start 921; Stop 945
tgtatggacttacgctggaaactat

SEQ ID NO: 292521 - DNA, 25 bp, Artificial
  probe
  misc_feature (1)..(25): SEQ ID NO: 1387; WAN024FXN; Start 1017; Stop 1041
cgttatctgtgtatctgaaggtgcc

SEQ ID NO: 292522 - DNA, 25 bp, Artificial
  probe
  misc_feature (1)..(25): SEQ ID NO: 1387; WAN024FXN; Start 1015; Stop 1039
ggcgttatctgtgtatctgaaggtg

SEQ ID NO: 292523 - DNA, 25 bp, Artificial
  probe
  misc_feature (1)..(25): SEQ ID NO: 1387; WAN024FXN; Start 640; Stop 664
tacggtttggtttactatactgaag

SEQ ID NO: 292524 - DNA, 25 bp, Artificial
  probe
  misc_feature (1)..(25): SEQ ID NO: 1387; WAN024FXN; Start 583; Stop 607
ttgactggtaaacctcttggatttg

SEQ ID NO: 292525 - DNA, 25 bp, Artificial
  probe
  misc_feature (1)..(25): SEQ ID NO: 1387; WAN024FXN; Start 1014; Stop 1038
aggcgttatctgtgtatctgaaggt

SEQ ID NO: 292526 - DNA, 25 bp, Artificial
  probe
  misc_feature (1)..(25): SEQ ID NO: 1387; WAN024FXN; Start 632; Stop 656
caactggttacggtttggtttacta

SEQ ID NO: 292527 - DNA, 25 bp, Artificial
  probe
  misc_feature (1)..(25): SEQ ID NO: 1387; WAN024FXN; Start 581; Stop 605
tcttgactggtaaacctcttggatt

SEQ ID NO: 292528 - DNA, 25 bp, Artificial
  probe
  misc_feature (1)..(25): SEQ ID NO: 1387; WAN024FXN; Start 647; Stop 671
tggtttactatactgaagaaatgct

SEQ ID NO: 292529 - DNA, 25 bp, Artificial
  probe
  misc_feature (1)..(25): SEQ ID NO: 1387; WAN024FXN; Start 1173; Stop 1197
ctcatggactcgtgaagaagttgat

SEQ ID NO: 292530 - DNA, 25 bp, Artificial
  probe
  misc_feature (1)..(25): SEQ ID NO: 1387; WAN024FXN; Start 1006; Stop 1030
gttgctcaaggcgttatctgtgtat

SEQ ID NO: 292531 - DNA, 25 bp, Artificial
  probe
  misc_feature (1)..(25): SEQ ID NO: 1388; WAN024CTO; Start 1249; Stop 1273
actaagacagtgattgcttcaacag

SEQ ID NO: 292532 - DNA, 25 bp, Artificial
  probe
  misc_feature (1)..(25): SEQ ID NO: 1388; WAN024CTO; Start 221; Stop 245
actgtatcaacaatgcctacgatag

SEQ ID NO: 292533 - DNA, 25 bp, Artificial
  probe
  misc_feature (1)..(25): SEQ ID NO: 1388; WAN024CTO; Start 219; Stop 243
ctactgtatcaacaatgcctacgat

SEQ ID NO: 292534 - DNA, 25 bp, Artificial
  probe
  misc_feature (1)..(25): SEQ ID NO: 1388; WAN024CTO; Start 220; Stop 244
tactgtatcaacaatgcctacgata

SEQ ID NO: 292535 - DNA, 25 bp, Artificial
  probe
  misc_feature (1)..(25): SEQ ID NO: 1388; WAN024CTO; Start 216; Stop 240
ggactactgtatcaacaatgcctac

SEQ ID NO: 292536 - DNA, 25 bp, Artificial
  probe
  misc_feature (1)..(25): SEQ ID NO: 1388; WAN024CTO; Start 405; Stop 429
gattgttatcttgacagcgacatct

SEQ ID NO: 292537 - DNA, 25 bp, Artificial
  probe
  misc_feature (1)..(25): SEQ ID NO: 1388; WAN024CTO; Start 215; Stop 239
tggactactgtatcaacaatgccta

SEQ ID NO: 292538 - DNA, 25 bp, Artificial
  probe
  misc_feature (1)..(25): SEQ ID NO: 1388; WAN024CTO; Start 217; Stop 241
gactactgtatcaacaatgcctacg

SEQ ID NO: 292539 - DNA, 25 bp, Artificial
  probe
  misc_feature (1)..(25): SEQ ID NO: 1388; WAN024CTO; Start 218; Stop 242
actactgtatcaacaatgcctacga

SEQ ID NO: 292540 - DNA, 25 bp, Artificial
  probe
  misc_feature (1)..(25): SEQ ID NO: 1388; WAN024CTO; Start 222; Stop 246
ctgtatcaacaatgcctacgatagc

SEQ ID NO: 292541 - DNA, 25 bp, Artificial
  probe
  misc_feature (1)..(25): SEQ ID NO: 1388; WAN024CTO; Start 406; Stop 430
attgttatcttgacagcgacatctg

SEQ ID NO: 292542 - DNA, 25 bp, Artificial
  probe
  misc_feature (1)..(25): SEQ ID NO: 1388; WAN024CTO; Start 214; Stop 238
ttggactactgtatcaacaatgcct

SEQ ID NO: 292543 - DNA, 25 bp, Artificial
  probe
  misc_feature (1)..(25): SEQ ID NO: 1388; WAN024CTO; Start 1460; Stop 1484
cggttgaggcttatttaggacttta

SEQ ID NO: 292544 - DNA, 25 bp, Artificial
  probe
  misc_feature (1)..(25): SEQ ID NO: 1388; WAN024CTO; Start 799; Stop 823
ggaaactttggaaatatcttggctg

SEQ ID NO: 292545 - DNA, 25 bp, Artificial
  probe
  misc_feature (1)..(25): SEQ ID NO: 1388; WAN024CTO; Start 798; Stop 822
aggaaactttggaaatatcttggct

SEQ ID NO: 292546 - DNA, 25 bp, Artificial
  probe
  misc_feature (1)..(25): SEQ ID NO: 1388; WAN024CTO; Start 797; Stop 821
caggaaactttggaaatatcttggc

SEQ ID NO: 292547 - DNA, 25 bp, Artificial
  probe
  misc_feature (1)..(25): SEQ ID NO: 1388; WAN024CTO; Start 796; Stop 820
acaggaaactttggaaatatcttgg

SEQ ID NO: 292548 - DNA, 25 bp, Artificial
  probe
  misc_feature (1)..(25): SEQ ID NO: 1388; WAN024CTO; Start 153; Stop 177
ttaccaggaagttgctaagctagtt

SEQ ID NO: 292549 - DNA, 25 bp, Artificial
  probe
  misc_feature (1)..(25): SEQ ID NO: 1388; WAN024CTO; Start 253; Stop 277
gatactccagctattgcaccattag

SEQ ID NO: 292550 - DNA, 25 bp, Artificial
  probe
  misc_feature (1)..(25): SEQ ID NO: 1388; WAN024CTO; Start 800; Stop 824
gaaactttggaaatatcttggctgc

SEQ ID NO: 292551 - DNA, 25 bp, Artificial
  probe
  misc_feature (1)..(25): SEQ ID NO: 1388; WAN024CTO; Start 1461; Stop 1485
ggttgaggcttatttaggactttaa

SEQ ID NO: 292552 - DNA, 25 bp, Artificial
  probe
  misc_feature (1)..(25): SEQ ID NO: 1388; WAN024CTO; Start 283; Stop 307
ttagatgggcaatacaatttggaac

SEQ ID NO: 292553 - DNA, 25 bp, Artificial
  probe
  misc_feature (1)..(25): SEQ ID NO: 1388; WAN024CTO; Start 284; Stop 308
tagatgggcaatacaatttggaact

SEQ ID NO: 292554 - DNA, 25 bp, Artificial
  probe
  misc_feature (1)..(25): SEQ ID NO: 1388; WAN024CTO; Start 286; Stop 310
gatgggcaatacaatttggaacttt

SEQ ID NO: 292555 - DNA, 25 bp, Artificial
  probe
  misc_feature (1)..(25): SEQ ID NO: 1388; WAN024CTO; Start 252; Stop 276
tgatactccagctattgcaccatta

SEQ ID NO: 292556 - DNA, 25 bp, Artificial
  probe
  misc_feature (1)..(25): SEQ ID NO: 1388; WAN024CTO; Start 276; Stop 300
agtgaaattagatgggcaatacaat

SEQ ID NO: 292557 - DNA, 25 bp, Artificial
  probe
  misc_feature (1)..(25): SEQ ID NO: 1388; WAN024CTO; Start 404; Stop 428
agattgttatcttgacagcgacatc

SEQ ID NO: 292558 - DNA, 25 bp, Artificial
  probe
  misc_feature (1)..(25): SEQ ID NO: 1388; WAN024CTO; Start 967; Stop 991
atcttggtatcttcaaacttggagc

SEQ ID NO: 292559 - DNA, 25 bp, Artificial
  probe
  misc_feature (1)..(25): SEQ ID NO: 1388; WAN024CTO; Start 1115; Stop 1139
ctgaatatgcgactgaggaagaaac

SEQ ID NO: 292560 - DNA, 25 bp, Artificial
  probe
  misc_feature (1)..(25): SEQ ID NO: 1388; WAN024CTO; Start 282; Stop 306
attagatgggcaatacaatttggaa

SEQ ID NO: 292561 - DNA, 25 bp, Artificial
  probe
  misc_feature (1)..(25): SEQ ID NO: 1388; WAN024CTO; Start 285; Stop 309
agatgggcaatacaatttggaactt

SEQ ID NO: 292562 - DNA, 25 bp, Artificial
  probe
  misc_feature (1)..(25): SEQ ID NO: 1388; WAN024CTO; Start 150; Stop 174
ttcttaccaggaagttgctaagcta

SEQ ID NO: 292563 - DNA, 25 bp, Artificial
  probe
  misc_feature (1)..(25): SEQ ID NO: 1388; WAN024CTO; Start 275; Stop 299
tagtgaaattagatgggcaatacaa

SEQ ID NO: 292564 - DNA, 25 bp, Artificial
  probe
  misc_feature (1)..(25): SEQ ID NO: 1389; WAN024FOA; Start 320; Stop 344
gtcctgctagtcctgaattatatgt

SEQ ID NO: 292565 - DNA, 25 bp, Artificial
  probe
  misc_feature (1)..(25): SEQ ID NO: 1389; WAN024FOA; Start 319; Stop 343
agtcctgctagtcctgaattatatg

SEQ ID NO: 292566 - DNA, 25 bp, Artificial
  probe
  misc_feature (1)..(25): SEQ ID NO: 1389; WAN024FOA; Start 321; Stop 345
tcctgctagtcctgaattatatgtt

SEQ ID NO: 292567 - DNA, 25 bp, Artificial
  probe
  misc_feature (1)..(25): SEQ ID NO: 1389; WAN024FOA; Start 318; Stop 342
tagtcctgctagtcctgaattatat

SEQ ID NO: 292568 - DNA, 25 bp, Artificial
  probe
  misc_feature (1)..(25): SEQ ID NO: 1389; WAN024FOA; Start 322; Stop 346
cctgctagtcctgaattatatgtta

SEQ ID NO: 292569 - DNA, 25 bp, Artificial
  probe
  misc_feature (1)..(25): SEQ ID NO: 1389; WAN024FOA; Start 323; Stop 347
ctgctagtcctgaattatatgttaa

SEQ ID NO: 292570 - DNA, 25 bp, Artificial
  probe
  misc_feature (1)..(25): SEQ ID NO: 1389; WAN024FOA; Start 553; Stop 577
gctactgaaacactttgtgctagtt

SEQ ID NO: 292571 - DNA, 25 bp, Artificial
  probe
  misc_feature (1)..(25): SEQ ID NO: 1389; WAN024FOA; Start 554; Stop 578
ctactgaaacactttgtgctagttt

SEQ ID NO: 292572 - DNA, 25 bp, Artificial
  probe
  misc_feature (1)..(25): SEQ ID NO: 1389; WAN024FOA; Start 333; Stop 357
tgaattatatgttaatcagcctgta

SEQ ID NO: 292573 - DNA, 25 bp, Artificial
  probe
  misc_feature (1)..(25): SEQ ID NO: 1389; WAN024FOA; Start 336; Stop 360
attatatgttaatcagcctgtagaa

SEQ ID NO: 292574 - DNA, 25 bp, Artificial
  probe
  misc_feature (1)..(25): SEQ ID NO: 1389; WAN024FOA; Start 335; Stop 359
aattatatgttaatcagcctgtaga

SEQ ID NO: 292575 - DNA, 25 bp, Artificial
  probe
  misc_feature (1)..(25): SEQ ID NO: 1389; WAN024FOA; Start 338; Stop 362
tatatgttaatcagcctgtagaaac

SEQ ID NO: 292576 - DNA, 25 bp, Artificial
  probe
  misc_feature (1)..(25): SEQ ID NO: 1389; WAN024FOA; Start 324; Stop 348
tgctagtcctgaattatatgttaat

SEQ ID NO: 292577 - DNA, 25 bp, Artificial
  probe
  misc_feature (1)..(25): SEQ ID NO: 1389; WAN024FOA; Start 334; Stop 358
gaattatatgttaatcagcctgtag

SEQ ID NO: 292578 - DNA, 25 bp, Artificial
  probe
  misc_feature (1)..(25): SEQ ID NO: 1389; WAN024FOA; Start 342; Stop 366
tgttaatcagcctgtagaaacaatg

SEQ ID NO: 292579 - DNA, 25 bp, Artificial
  probe
  misc_feature (1)..(25): SEQ ID NO: 1389; WAN024FOA; Start 331; Stop 355
cctgaattatatgttaatcagcctg

SEQ ID NO: 292580 - DNA, 25 bp, Artificial
  probe
  misc_feature (1)..(25): SEQ ID NO: 1389; WAN024FOA; Start 329; Stop 353
gtcctgaattatatgttaatcagcc

SEQ ID NO: 292581 - DNA, 25 bp, Artificial
  probe
  misc_feature (1)..(25): SEQ ID NO: 1389; WAN024FOA; Start 193; Stop 217
ggaagaaagtttgaatcattagaaa

SEQ ID NO: 292582 - DNA, 25 bp, Artificial
  probe
  misc_feature (1)..(25): SEQ ID NO: 1389; WAN024FOA; Start 330; Stop 354
tcctgaattatatgttaatcagcct

SEQ ID NO: 292583 - DNA, 25 bp, Artificial
  probe
  misc_feature (1)..(25): SEQ ID NO: 1389; WAN024FOA; Start 341; Stop 365
atgttaatcagcctgtagaaacaat

SEQ ID NO: 292584 - DNA, 25 bp, Artificial
  probe
  misc_feature (1)..(25): SEQ ID NO: 1389; WAN024FOA; Start 551; Stop 575
gagctactgaaacactttgtgctag

SEQ ID NO: 292585 - DNA, 25 bp, Artificial
  probe
  misc_feature (1)..(25): SEQ ID NO: 1389; WAN024FOA; Start 325; Stop 349
gctagtcctgaattatatgttaatc

SEQ ID NO: 292586 - DNA, 25 bp, Artificial
  probe
  misc_feature (1)..(25): SEQ ID NO: 1389; WAN024FOA; Start 550; Stop 574
agagctactgaaacactttgtgcta

SEQ ID NO: 292587 - DNA, 25 bp, Artificial
  probe
  misc_feature (1)..(25): SEQ ID NO: 1389; WAN024FOA; Start 337; Stop 361
ttatatgttaatcagcctgtagaaa

SEQ ID NO: 292588 - DNA, 25 bp, Artificial
  probe
  misc_feature (1)..(25): SEQ ID NO: 1389; WAN024FOA; Start 340; Stop 364
tatgttaatcagcctgtagaaacaa

SEQ ID NO: 292589 - DNA, 25 bp, Artificial
  probe
  misc_feature (1)..(25): SEQ ID NO: 1389; WAN024FOA; Start 339; Stop 363
atatgttaatcagcctgtagaaaca

SEQ ID NO: 292590 - DNA, 25 bp, Artificial
  probe
  misc_feature (1)..(25): SEQ ID NO: 1389; WAN024FOA; Start 332; Stop 356
ctgaattatatgttaatcagcctgt

SEQ ID NO: 292591 - DNA, 25 bp, Artificial
  probe
  misc_feature (1)..(25): SEQ ID NO: 1389; WAN024FOA; Start 552; Stop 576
agctactgaaacactttgtgctagt

SEQ ID NO: 292592 - DNA, 25 bp, Artificial
  probe
  misc_feature (1)..(25): SEQ ID NO: 1389; WAN024FOA; Start 566; Stop 590
tttgtgctagttttgcttccgagta

SEQ ID NO: 292593 - DNA, 25 bp, Artificial
  probe
  misc_feature (1)..(25): SEQ ID NO: 1389; WAN024FOA; Start 556; Stop 580
actgaaacactttgtgctagttttg

SEQ ID NO: 292594 - DNA, 25 bp, Artificial
  probe
  misc_feature (1)..(25): SEQ ID NO: 1389; WAN024FOA; Start 555; Stop 579
tactgaaacactttgtgctagtttt

SEQ ID NO: 292595 - DNA, 25 bp, Artificial
  probe
  misc_feature (1)..(25): SEQ ID NO: 1389; WAN024FOA; Start 328; Stop 352
agtcctgaattatatgttaatcagc

SEQ ID NO: 292596 - DNA, 25 bp, Artificial
  probe
  misc_feature (1)..(25): SEQ ID NO: 1389; WAN024FOA; Start 560; Stop 584
aaacactttgtgctagttttgcttc

SEQ ID NO: 292597 - DNA, 25 bp, Artificial
  probe
  misc_feature (1)..(25): SEQ ID NO: 1390; WAN024FGZ; Start 684; Stop 708
tattggtatcggtagtggagaagaa

SEQ ID NO: 292598 - DNA, 25 bp, Artificial
  probe
  misc_feature (1)..(25): SEQ ID NO: 1390; WAN024FGZ; Start 729; Stop 753
taaggcaatctattcaccacttctt

SEQ ID NO: 292599 - DNA, 25 bp, Artificial
  probe
  misc_feature (1)..(25): SEQ ID NO: 1390; WAN024FGZ; Start 1215; Stop 1239
agatgaagatgaattggatacacct

SEQ ID NO: 292600 - DNA, 25 bp, Artificial
  probe
  misc_feature (1)..(25): SEQ ID NO: 1390; WAN024FGZ; Start 441; Stop 465
tgctgtagaaggaatcaatcaactt

SEQ ID NO: 292601 - DNA, 25 bp, Artificial
  probe
  misc_feature (1)..(25): SEQ ID NO: 1390; WAN024FGZ; Start 1216; Stop 1240
gatgaagatgaattggatacacctc

SEQ ID NO: 292602 - DNA, 25 bp, Artificial
  probe
  misc_feature (1)..(25): SEQ ID NO: 1390; WAN024FGZ; Start 728; Stop 752
gtaaggcaatctattcaccacttct

SEQ ID NO: 292603 - DNA, 25 bp, Artificial
  probe
  misc_feature (1)..(25): SEQ ID NO: 1390; WAN024FGZ; Start 683; Stop 707
gtattggtatcggtagtggagaaga

SEQ ID NO: 292604 - DNA, 25 bp, Artificial
  probe
  misc_feature (1)..(25): SEQ ID NO: 1390; WAN024FGZ; Start 1214; Stop 1238
aagatgaagatgaattggatacacc

SEQ ID NO: 292605 - DNA, 25 bp, Artificial
  probe
  misc_feature (1)..(25): SEQ ID NO: 1390; WAN024FGZ; Start 440; Stop 464
ttgctgtagaaggaatcaatcaact

SEQ ID NO: 292606 - DNA, 25 bp, Artificial
  probe
  misc_feature (1)..(25): SEQ ID NO: 1390; WAN024FGZ; Start 293; Stop 317
atatggtcttcatcactgctggtat

SEQ ID NO: 292607 - DNA, 25 bp, Artificial
  probe
  misc_feature (1)..(25): SEQ ID NO: 1390; WAN024FGZ; Start 685; Stop 709
attggtatcggtagtggagaagaac

SEQ ID NO: 292608 - DNA, 25 bp, Artificial
  probe
  misc_feature (1)..(25): SEQ ID NO: 1390; WAN024FGZ; Start 730; Stop 754
aaggcaatctattcaccacttcttg

SEQ ID NO: 292609 - DNA, 25 bp, Artificial
  probe
  misc_feature (1)..(25): SEQ ID NO: 1390; WAN024FGZ; Start 278; Stop 302
ctattagtggtgccgatatggtctt

SEQ ID NO: 292610 - DNA, 25 bp, Artificial
  probe
  misc_feature (1)..(25): SEQ ID NO: 1390; WAN024FGZ; Start 727; Stop 751
cgtaaggcaatctattcaccacttc

SEQ ID NO: 292611 - DNA, 25 bp, Artificial
  probe
  misc_feature (1)..(25): SEQ ID NO: 1390; WAN024FGZ; Start 995; Stop 1019
ctactaactaccgtgagacagtgaa

SEQ ID NO: 292612 - DNA, 25 bp, Artificial
  probe
  misc_feature (1)..(25): SEQ ID NO: 1390; WAN024FGZ; Start 682; Stop 706
ggtattggtatcggtagtggagaag

SEQ ID NO: 292613 - DNA, 25 bp, Artificial
  probe
  misc_feature (1)..(25): SEQ ID NO: 1390; WAN024FGZ; Start 279; Stop 303
tattagtggtgccgatatggtcttc

SEQ ID NO: 292614 - DNA, 25 bp, Artificial
  probe
  misc_feature (1)..(25): SEQ ID NO: 1390; WAN024FGZ; Start 292; Stop 316
gatatggtcttcatcactgctggta

SEQ ID NO: 292615 - DNA, 25 bp, Artificial
  probe
  misc_feature (1)..(25): SEQ ID NO: 1390; WAN024FGZ; Start 1212; Stop 1236
acaagatgaagatgaattggataca

SEQ ID NO: 292616 - DNA, 25 bp, Artificial
  probe
  misc_feature (1)..(25): SEQ ID NO: 1390; WAN024FGZ; Start 294; Stop 318
tatggtcttcatcactgctggtatg

SEQ ID NO: 292617 - DNA, 25 bp, Artificial
  probe
  misc_feature (1)..(25): SEQ ID NO: 1390; WAN024FGZ; Start 1213; Stop 1237
caagatgaagatgaattggatacac

SEQ ID NO: 292618 - DNA, 25 bp, Artificial
  probe
  misc_feature (1)..(25): SEQ ID NO: 1390; WAN024FGZ; Start 1211; Stop 1235
cacaagatgaagatgaattggatac

SEQ ID NO: 292619 - DNA, 25 bp, Artificial
  probe
  misc_feature (1)..(25): SEQ ID NO: 1390; WAN024FGZ; Start 761; Stop 785
ctattgacggtgctgaggatgttat

SEQ ID NO: 292620 - DNA, 25 bp, Artificial
  probe
  misc_feature (1)..(25): SEQ ID NO: 1390; WAN024FGZ; Start 731; Stop 755
aggcaatctattcaccacttcttga

SEQ ID NO: 292621 - DNA, 25 bp, Artificial
  probe
  misc_feature (1)..(25): SEQ ID NO: 1390; WAN024FGZ; Start 1217; Stop 1241
atgaagatgaattggatacacctcc

SEQ ID NO: 292622 - DNA, 25 bp, Artificial
  probe
  misc_feature (1)..(25): SEQ ID NO: 1390; WAN024FGZ; Start 762; Stop 786
tattgacggtgctgaggatgttatc

SEQ ID NO: 292623 - DNA, 25 bp, Artificial
  probe
  misc_feature (1)..(25): SEQ ID NO: 1390; WAN024FGZ; Start 453; Stop 477
aatcaatcaacttcgtgagcatgta

SEQ ID NO: 292624 - DNA, 25 bp, Artificial
  probe
  misc_feature (1)..(25): SEQ ID NO: 1390; WAN024FGZ; Start 1210; Stop 1234
tcacaagatgaagatgaattggata

SEQ ID NO: 292625 - DNA, 25 bp, Artificial
  probe
  misc_feature (1)..(25): SEQ ID NO: 1390; WAN024FGZ; Start 810; Stop 834
cttaaccttgattgaggcagaagag

SEQ ID NO: 292626 - DNA, 25 bp, Artificial
  probe
  misc_feature (1)..(25): SEQ ID NO: 1390; WAN024FGZ; Start 454; Stop 478
atcaatcaacttcgtgagcatgtag

SEQ ID NO: 292627 - DNA, 25 bp, Artificial
  probe
  misc_feature (1)..(25): SEQ ID NO: 1390; WAN024FGZ; Start 801; Stop 825
tggtcttgacttaaccttgattgag

SEQ ID NO: 292628 - DNA, 25 bp, Artificial
  probe
  misc_feature (1)..(25): SEQ ID NO: 1390; WAN024FGZ; Start 611; Stop 635
atccaggattgattaaccttgactt

SEQ ID NO: 292629 - DNA, 25 bp, Artificial
  probe
  misc_feature (1)..(25): SEQ ID NO: 1390; WAN024FGZ; Start 808; Stop 832
gacttaaccttgattgaggcagaag

SEQ ID NO: 292630 - DNA, 25 bp, Artificial
  probe
  misc_feature (1)..(25): SEQ ID NO: 1391; WAN024GBP; Start 715; Stop 739
caagaagaactcaatcacgaagaag

SEQ ID NO: 292631 - DNA, 25 bp, Artificial
  probe
  misc_feature (1)..(25): SEQ ID NO: 1391; WAN024GBP; Start 624; Stop 648
tatgtctacggttcctgaagttatc

SEQ ID NO: 292632 - DNA, 25 bp, Artificial
  probe
  misc_feature (1)..(25): SEQ ID NO: 1391; WAN024GBP; Start 623; Stop 647
gtatgtctacggttcctgaagttat

SEQ ID NO: 292633 - DNA, 25 bp, Artificial
  probe
  misc_feature (1)..(25): SEQ ID NO: 1391; WAN024GBP; Start 533; Stop 557
atgaaggtgtctatatcggagttac

SEQ ID NO: 292634 - DNA, 25 bp, Artificial
  probe
  misc_feature (1)..(25): SEQ ID NO: 1391; WAN024GBP; Start 535; Stop 559
gaaggtgtctatatcggagttactg

SEQ ID NO: 292635 - DNA, 25 bp, Artificial
  probe
  misc_feature (1)..(25): SEQ ID NO: 1391; WAN024GBP; Start 534; Stop 558
tgaaggtgtctatatcggagttact

SEQ ID NO: 292636 - DNA, 25 bp, Artificial
  probe
  misc_feature (1)..(25): SEQ ID NO: 1391; WAN024GBP; Start 306; Stop 330
tcttggatgtgaaggtgttattgta

SEQ ID NO: 292637 - DNA, 25 bp, Artificial
  probe
  misc_feature (1)..(25): SEQ ID NO: 1391; WAN024GBP; Start 304; Stop 328
gttcttggatgtgaaggtgttattg

SEQ ID NO: 292638 - DNA, 25 bp, Artificial
  probe
  misc_feature (1)..(25): SEQ ID NO: 1391; WAN024GBP; Start 303; Stop 327
agttcttggatgtgaaggtgttatt

SEQ ID NO: 292639 - DNA, 25 bp, Artificial
  probe
  misc_feature (1)..(25): SEQ ID NO: 1391; WAN024GBP; Start 302; Stop 326
aagttcttggatgtgaaggtgttat

SEQ ID NO: 292640 - DNA, 25 bp, Artificial
  probe
  misc_feature (1)..(25): SEQ ID NO: 1391; WAN024GBP; Start 532; Stop 556
gatgaaggtgtctatatcggagtta

SEQ ID NO: 292641 - DNA, 25 bp, Artificial
  probe
  misc_feature (1)..(25): SEQ ID NO: 1391; WAN024GBP; Start 531; Stop 555
tgatgaaggtgtctatatcggagtt

SEQ ID NO: 292642 - DNA, 25 bp, Artificial
  probe
  misc_feature (1)..(25): SEQ ID NO: 1391; WAN024GBP; Start 530; Stop 554
ttgatgaaggtgtctatatcggagt

SEQ ID NO: 292643 - DNA, 25 bp, Artificial
  probe
  misc_feature (1)..(25): SEQ ID NO: 1391; WAN024GBP; Start 305; Stop 329
ttcttggatgtgaaggtgttattgt

SEQ ID NO: 292644 - DNA, 25 bp, Artificial
  probe
  misc_feature (1)..(25): SEQ ID NO: 1391; WAN024GBP; Start 129; Stop 153
tgtagtagactatgctgagattcca

SEQ ID NO: 292645 - DNA, 25 bp, Artificial
  probe
  misc_feature (1)..(25): SEQ ID NO: 1391; WAN024GBP; Start 307; Stop 331
cttggatgtgaaggtgttattgtaa

SEQ ID NO: 292646 - DNA, 25 bp, Artificial
  probe
  misc_feature (1)..(25): SEQ ID NO: 1391; WAN024GBP; Start 714; Stop 738
ccaagaagaactcaatcacgaagaa

SEQ ID NO: 292647 - DNA, 25 bp, Artificial
  probe
  misc_feature (1)..(25): SEQ ID NO: 1391; WAN024GBP; Start 536; Stop 560
aaggtgtctatatcggagttactgg

SEQ ID NO: 292648 - DNA, 25 bp, Artificial
  probe
  misc_feature (1)..(25): SEQ ID NO: 1391; WAN024GBP; Start 725; Stop 749
tcaatcacgaagaagttgtagaagt

SEQ ID NO: 292649 - DNA, 25 bp, Artificial
  probe
  misc_feature (1)..(25): SEQ ID NO: 1391; WAN024GBP; Start 130; Stop 154
gtagtagactatgctgagattccaa

SEQ ID NO: 292650 - DNA, 25 bp, Artificial
  probe
  misc_feature (1)..(25): SEQ ID NO: 1391; WAN024GBP; Start 128; Stop 152
ttgtagtagactatgctgagattcc

SEQ ID NO: 292651 - DNA, 25 bp, Artificial
  probe
  misc_feature (1)..(25): SEQ ID NO: 1391; WAN024GBP; Start 724; Stop 748
ctcaatcacgaagaagttgtagaag

SEQ ID NO: 292652 - DNA, 25 bp, Artificial
  probe
  misc_feature (1)..(25): SEQ ID NO: 1391; WAN024GBP; Start 723; Stop 747
actcaatcacgaagaagttgtagaa

SEQ ID NO: 292653 - DNA, 25 bp, Artificial
  probe
  misc_feature (1)..(25): SEQ ID NO: 1391; WAN024GBP; Start 733; Stop 757
gaagaagttgtagaagtgactgaac

SEQ ID NO: 292654 - DNA, 25 bp, Artificial
  probe
  misc_feature (1)..(25): SEQ ID NO: 1391; WAN024GBP; Start 716; Stop 740
aagaagaactcaatcacgaagaagt

SEQ ID NO: 292655 - DNA, 25 bp, Artificial
  probe
  misc_feature (1)..(25): SEQ ID NO: 1391; WAN024GBP; Start 712; Stop 736
ttccaagaagaactcaatcacgaag

SEQ ID NO: 292656 - DNA, 25 bp, Artificial
  probe
  misc_feature (1)..(25): SEQ ID NO: 1391; WAN024GBP; Start 622; Stop 646
ggtatgtctacggttcctgaagtta

SEQ ID NO: 292657 - DNA, 25 bp, Artificial
  probe
  misc_feature (1)..(25): SEQ ID NO: 1391; WAN024GBP; Start 732; Stop 756
cgaagaagttgtagaagtgactgaa

SEQ ID NO: 292658 - DNA, 25 bp, Artificial
  probe
  misc_feature (1)..(25): SEQ ID NO: 1391; WAN024GBP; Start 734; Stop 758
aagaagttgtagaagtgactgaacg

SEQ ID NO: 292659 - DNA, 25 bp, Artificial
  probe
  misc_feature (1)..(25): SEQ ID NO: 1391; WAN024GBP; Start 127; Stop 151
gttgtagtagactatgctgagattc

SEQ ID NO: 292660 - DNA, 25 bp, Artificial
  probe
  misc_feature (1)..(25): SEQ ID NO: 1391; WAN024GBP; Start 713; Stop 737
tccaagaagaactcaatcacgaaga

SEQ ID NO: 292661 - DNA, 25 bp, Artificial
  probe
  misc_feature (1)..(25): SEQ ID NO: 1391; WAN024GBP; Start 538; Stop 562
ggtgtctatatcggagttactggtc

SEQ ID NO: 292662 - DNA, 25 bp, Artificial
  probe
  misc_feature (1)..(25): SEQ ID NO: 1391; WAN024GBP; Start 537; Stop 561
aggtgtctatatcggagttactggt

SEQ ID NO: 292663 - DNA, 25 bp, Artificial
  probe
  misc_feature (1)..(25): SEQ ID NO: 1392; WAN024D46; Start 629; Stop 653
tatttggagatgactacgatacacg

SEQ ID NO: 292664 - DNA, 25 bp, Artificial
  probe
  misc_feature (1)..(25): SEQ ID NO: 1392; WAN024D46; Start 235; Stop 259
attgttgtgagcgaaagtattgaaa

SEQ ID NO: 292665 - DNA, 25 bp, Artificial
  probe
  misc_feature (1)..(25): SEQ ID NO: 1392; WAN024D46; Start 577; Stop 601
atcattccaaatatcaacaagaccg

SEQ ID NO: 292666 - DNA, 25 bp, Artificial
  probe
  misc_feature (1)..(25): SEQ ID NO: 1392; WAN024D46; Start 564; Stop 588
aaatccaactcacatcattccaaat

SEQ ID NO: 292667 - DNA, 25 bp, Artificial
  probe
  misc_feature (1)..(25): SEQ ID NO: 1392; WAN024D46; Start 568; Stop 592
ccaactcacatcattccaaatatca

SEQ ID NO: 292668 - DNA, 25 bp, Artificial
  probe
  misc_feature (1)..(25): SEQ ID NO: 1392; WAN024D46; Start 234; Stop 258
aattgttgtgagcgaaagtattgaa

SEQ ID NO: 292669 - DNA, 25 bp, Artificial
  probe
  misc_feature (1)..(25): SEQ ID NO: 1392; WAN024D46; Start 233; Stop 257
aaattgttgtgagcgaaagtattga

SEQ ID NO: 292670 - DNA, 25 bp, Artificial
  probe
  misc_feature (1)..(25): SEQ ID NO: 1392; WAN024D46; Start 232; Stop 256
gaaattgttgtgagcgaaagtattg

SEQ ID NO: 292671 - DNA, 25 bp, Artificial
  probe
  misc_feature (1)..(25): SEQ ID NO: 1392; WAN024D46; Start 231; Stop 255
tgaaattgttgtgagcgaaagtatt

SEQ ID NO: 292672 - DNA, 25 bp, Artificial
  probe
  misc_feature (1)..(25): SEQ ID NO: 1392; WAN024D46; Start 654; Stop 678
tgacggttcatgtattcgagattac

SEQ ID NO: 292673 - DNA, 25 bp, Artificial
  probe
  misc_feature (1)..(25): SEQ ID NO: 1392; WAN024D46; Start 653; Stop 677
gtgacggttcatgtattcgagatta

SEQ ID NO: 292674 - DNA, 25 bp, Artificial
  probe
  misc_feature (1)..(25): SEQ ID NO: 1392; WAN024D46; Start 567; Stop 591
tccaactcacatcattccaaatatc

SEQ ID NO: 292675 - DNA, 25 bp, Artificial
  probe
  misc_feature (1)..(25): SEQ ID NO: 1392; WAN024D46; Start 353; Stop 377
cgactgcttctctctatggaaataa

SEQ ID NO: 292676 - DNA, 25 bp, Artificial
  probe
  misc_feature (1)..(25): SEQ ID NO: 1392; WAN024D46; Start 346; Stop 370
ttctcttcgactgcttctctctatg

SEQ ID NO: 292677 - DNA, 25 bp, Artificial
  probe
  misc_feature (1)..(25): SEQ ID NO: 1392; WAN024D46; Start 345; Stop 369
gttctcttcgactgcttctctctat

SEQ ID NO: 292678 - DNA, 25 bp, Artificial
  probe
  misc_feature (1)..(25): SEQ ID NO: 1392; WAN024D46; Start 230; Stop 254
gtgaaattgttgtgagcgaaagtat

SEQ ID NO: 292679 - DNA, 25 bp, Artificial
  probe
  misc_feature (1)..(25): SEQ ID NO: 1392; WAN024D46; Start 357; Stop 381
tgcttctctctatggaaataactgt

SEQ ID NO: 292680 - DNA, 25 bp, Artificial
  probe
  misc_feature (1)..(25): SEQ ID NO: 1392; WAN024D46; Start 355; Stop 379
actgcttctctctatggaaataact

SEQ ID NO: 292681 - DNA, 25 bp, Artificial
  probe
  misc_feature (1)..(25): SEQ ID NO: 1392; WAN024D46; Start 565; Stop 589
aatccaactcacatcattccaaata

SEQ ID NO: 292682 - DNA, 25 bp, Artificial
  probe
  misc_feature (1)..(25): SEQ ID NO: 1392; WAN024D46; Start 580; Stop 604
attccaaatatcaacaagaccgcat

SEQ ID NO: 292683 - DNA, 25 bp, Artificial
  probe
  misc_feature (1)..(25): SEQ ID NO: 1392; WAN024D46; Start 571; Stop 595
actcacatcattccaaatatcaaca

SEQ ID NO: 292684 - DNA, 25 bp, Artificial
  probe
  misc_feature (1)..(25): SEQ ID NO: 1392; WAN024D46; Start 356; Stop 380
ctgcttctctctatggaaataactg

SEQ ID NO: 292685 - DNA, 25 bp, Artificial
  probe
  misc_feature (1)..(25): SEQ ID NO: 1392; WAN024D46; Start 354; Stop 378
gactgcttctctctatggaaataac

SEQ ID NO: 292686 - DNA, 25 bp, Artificial
  probe
  misc_feature (1)..(25): SEQ ID NO: 1392; WAN024D46; Start 298; Stop 322
aaccaagttctcaaagtcttatctg

SEQ ID NO: 292687 - DNA, 25 bp, Artificial
  probe
  misc_feature (1)..(25): SEQ ID NO: 1392; WAN024D46; Start 581; Stop 605
ttccaaatatcaacaagaccgcatt

SEQ ID NO: 292688 - DNA, 25 bp, Artificial
  probe
  misc_feature (1)..(25): SEQ ID NO: 1392; WAN024D46; Start 576; Stop 600
catcattccaaatatcaacaagacc

SEQ ID NO: 292689 - DNA, 25 bp, Artificial
  probe
  misc_feature (1)..(25): SEQ ID NO: 1392; WAN024D46; Start 566; Stop 590
atccaactcacatcattccaaatat

SEQ ID NO: 292690 - DNA, 25 bp, Artificial
  probe
  misc_feature (1)..(25): SEQ ID NO: 1392; WAN024D46; Start 299; Stop 323
accaagttctcaaagtcttatctga

SEQ ID NO: 292691 - DNA, 25 bp, Artificial
  probe
  misc_feature (1)..(25): SEQ ID NO: 1392; WAN024D46; Start 306; Stop 330
tctcaaagtcttatctgaagttggc

SEQ ID NO: 292692 - DNA, 25 bp, Artificial
  probe
  misc_feature (1)..(25): SEQ ID NO: 1392; WAN024D46; Start 307; Stop 331
ctcaaagtcttatctgaagttggca

SEQ ID NO: 292693 - DNA, 25 bp, Artificial
  probe
  misc_feature (1)..(25): SEQ ID NO: 1392; WAN024D46; Start 339; Stop 363
aatcatgttctcttcgactgcttct

SEQ ID NO: 292694 - DNA, 25 bp, Artificial
  probe
  misc_feature (1)..(25): SEQ ID NO: 1392; WAN024D46; Start 148; Stop 172
aaagaactggatgtttatgatgcta

SEQ ID NO: 292695 - DNA, 25 bp, Artificial
  probe
  misc_feature (1)..(25): SEQ ID NO: 1392; WAN024D46; Start 368; Stop 392
atggaaataactgtattgacaagcc

SEQ ID NO: 292696 - DNA, 25 bp, Artificial
  probe
  misc_feature (1)..(25): SEQ ID NO: 1393; WAN024DJT; Start 168; Stop 192
ggaacttgtagacttgtatcaggac

SEQ ID NO: 292697 - DNA, 25 bp, Artificial
  probe
  misc_feature (1)..(25): SEQ ID NO: 1393; WAN024DJT; Start 167; Stop 191
aggaacttgtagacttgtatcagga

SEQ ID NO: 292698 - DNA, 25 bp, Artificial
  probe
  misc_feature (1)..(25): SEQ ID NO: 1393; WAN024DJT; Start 166; Stop 190
aaggaacttgtagacttgtatcagg

SEQ ID NO: 292699 - DNA, 25 bp, Artificial
  probe
  misc_feature (1)..(25): SEQ ID NO: 1393; WAN024DJT; Start 169; Stop 193
gaacttgtagacttgtatcaggacg

SEQ ID NO: 292700 - DNA, 25 bp, Artificial
  probe
  misc_feature (1)..(25): SEQ ID NO: 1393; WAN024DJT; Start 171; Stop 195
acttgtagacttgtatcaggacgat

SEQ ID NO: 292701 - DNA, 25 bp, Artificial
  probe
  misc_feature (1)..(25): SEQ ID NO: 1393; WAN024DJT; Start 170; Stop 194
aacttgtagacttgtatcaggacga

SEQ ID NO: 292702 - DNA, 25 bp, Artificial
  probe
  misc_feature (1)..(25): SEQ ID NO: 1393; WAN024DJT; Start 172; Stop 196
cttgtagacttgtatcaggacgatc

SEQ ID NO: 292703 - DNA, 25 bp, Artificial
  probe
  misc_feature (1)..(25): SEQ ID NO: 1393; WAN024DJT; Start 176; Stop 200
tagacttgtatcaggacgatcagag

SEQ ID NO: 292704 - DNA, 25 bp, Artificial
  probe
  misc_feature (1)..(25): SEQ ID NO: 1393; WAN024DJT; Start 173; Stop 197
ttgtagacttgtatcaggacgatca

SEQ ID NO: 292705 - DNA, 25 bp, Artificial
  probe
  misc_feature (1)..(25): SEQ ID NO: 1393; WAN024DJT; Start 175; Stop 199
gtagacttgtatcaggacgatcaga

SEQ ID NO: 292706 - DNA, 25 bp, Artificial
  probe
  misc_feature (1)..(25): SEQ ID NO: 1393; WAN024DJT; Start 174; Stop 198
tgtagacttgtatcaggacgatcag

SEQ ID NO: 292707 - DNA, 25 bp, Artificial
  probe
  misc_feature (1)..(25): SEQ ID NO: 1393; WAN024DJT; Start 180; Stop 204
cttgtatcaggacgatcagagtgtt

SEQ ID NO: 292708 - DNA, 25 bp, Artificial
  probe
  misc_feature (1)..(25): SEQ ID NO: 1393; WAN024DJT; Start 59; Stop 83
gaggaaatacaaaggaagaaggact

SEQ ID NO: 292709 - DNA, 25 bp, Artificial
  probe
  misc_feature (1)..(25): SEQ ID NO: 1393; WAN024DJT; Start 392; Stop 416
aaatcatcaaactcttcccaggtag

SEQ ID NO: 292710 - DNA, 25 bp, Artificial
  probe
  misc_feature (1)..(25): SEQ ID NO: 1393; WAN024DJT; Start 65; Stop 89
atacaaaggaagaaggactacaagc

SEQ ID NO: 292711 - DNA, 25 bp, Artificial
  probe
  misc_feature (1)..(25): SEQ ID NO: 1393; WAN024DJT; Start 61; Stop 85
ggaaatacaaaggaagaaggactac

SEQ ID NO: 292712 - DNA, 25 bp, Artificial
  probe
  misc_feature (1)..(25): SEQ ID NO: 1393; WAN024DJT; Start 60; Stop 84
aggaaatacaaaggaagaaggacta

SEQ ID NO: 292713 - DNA, 25 bp, Artificial
  probe
  misc_feature (1)..(25): SEQ ID NO: 1393; WAN024DJT; Start 391; Stop 415
gaaatcatcaaactcttcccaggta

SEQ ID NO: 292714 - DNA, 25 bp, Artificial
  probe
  misc_feature (1)..(25): SEQ ID NO: 1393; WAN024DJT; Start 316; Stop 340
aatctctacagcacaccgtacattc

SEQ ID NO: 292715 - DNA, 25 bp, Artificial
  probe
  misc_feature (1)..(25): SEQ ID NO: 1393; WAN024DJT; Start 58; Stop 82
cgaggaaatacaaaggaagaaggac

SEQ ID NO: 292716 - DNA, 25 bp, Artificial
  probe
  misc_feature (1)..(25): SEQ ID NO: 1393; WAN024DJT; Start 387; Stop 411
tagtgaaatcatcaaactcttccca

SEQ ID NO: 292717 - DNA, 25 bp, Artificial
  probe
  misc_feature (1)..(25): SEQ ID NO: 1393; WAN024DJT; Start 384; Stop 408
cggtagtgaaatcatcaaactcttc

SEQ ID NO: 292718 - DNA, 25 bp, Artificial
  probe
  misc_feature (1)..(25): SEQ ID NO: 1393; WAN024DJT; Start 64; Stop 88
aatacaaaggaagaaggactacaag

SEQ ID NO: 292719 - DNA, 25 bp, Artificial
  probe
  misc_feature (1)..(25): SEQ ID NO: 1393; WAN024DJT; Start 62; Stop 86
gaaatacaaaggaagaaggactaca

SEQ ID NO: 292720 - DNA, 25 bp, Artificial
  probe
  misc_feature (1)..(25): SEQ ID NO: 1393; WAN024DJT; Start 125; Stop 149
ttgaaatcgcctataccaatcagta

SEQ ID NO: 292721 - DNA, 25 bp, Artificial
  probe
  misc_feature (1)..(25): SEQ ID NO: 1393; WAN024DJT; Start 386; Stop 410
gtagtgaaatcatcaaactcttccc

SEQ ID NO: 292722 - DNA, 25 bp, Artificial
  probe
  misc_feature (1)..(25): SEQ ID NO: 1393; WAN024DJT; Start 385; Stop 409
ggtagtgaaatcatcaaactcttcc

SEQ ID NO: 292723 - DNA, 25 bp, Artificial
  probe
  misc_feature (1)..(25): SEQ ID NO: 1393; WAN024DJT; Start 234; Stop 258
cgtaactgctagagatgccattcta

SEQ ID NO: 292724 - DNA, 25 bp, Artificial
  probe
  misc_feature (1)..(25): SEQ ID NO: 1393; WAN024DJT; Start 315; Stop 339
caatctctacagcacaccgtacatt

SEQ ID NO: 292725 - DNA, 25 bp, Artificial
  probe
  misc_feature (1)..(25): SEQ ID NO: 1393; WAN024DJT; Start 178; Stop 202
gacttgtatcaggacgatcagagtg

SEQ ID NO: 292726 - DNA, 25 bp, Artificial
  probe
  misc_feature (1)..(25): SEQ ID NO: 1393; WAN024DJT; Start 177; Stop 201
agacttgtatcaggacgatcagagt

SEQ ID NO: 292727 - DNA, 25 bp, Artificial
  probe
  misc_feature (1)..(25): SEQ ID NO: 1393; WAN024DJT; Start 388; Stop 412
agtgaaatcatcaaactcttcccag

SEQ ID NO: 292728 - DNA, 25 bp, Artificial
  probe
  misc_feature (1)..(25): SEQ ID NO: 1393; WAN024DJT; Start 184; Stop 208
tatcaggacgatcagagtgtttgta

SEQ ID NO: 292729 - DNA, 25 bp, Artificial
  probe
  misc_feature (1)..(25): SEQ ID NO: 1394; WAN024EV7; Start 331; Stop 355
ggtggtcataatggtatcaagtcta

SEQ ID NO: 292730 - DNA, 25 bp, Artificial
  probe
  misc_feature (1)..(25): SEQ ID NO: 1394; WAN024EV7; Start 390; Stop 414
tgttaagattggaattggaagacct

SEQ ID NO: 292731 - DNA, 25 bp, Artificial
  probe
  misc_feature (1)..(25): SEQ ID NO: 1394; WAN024EV7; Start 389; Stop 413
gtgttaagattggaattggaagacc

SEQ ID NO: 292732 - DNA, 25 bp, Artificial
  probe
  misc_feature (1)..(25): SEQ ID NO: 1394; WAN024EV7; Start 388; Stop 412
cgtgttaagattggaattggaagac

SEQ ID NO: 292733 - DNA, 25 bp, Artificial
  probe
  misc_feature (1)..(25): SEQ ID NO: 1394; WAN024EV7; Start 330; Stop 354
aggtggtcataatggtatcaagtct

SEQ ID NO: 292734 - DNA, 25 bp, Artificial
  probe
  misc_feature (1)..(25): SEQ ID NO: 1394; WAN024EV7; Start 329; Stop 353
caggtggtcataatggtatcaagtc

SEQ ID NO: 292735 - DNA, 25 bp, Artificial
  probe
  misc_feature (1)..(25): SEQ ID NO: 1394; WAN024EV7; Start 359; Stop 383
ttcaacatataggaactcaggtctt

SEQ ID NO: 292736 - DNA, 25 bp, Artificial
  probe
  misc_feature (1)..(25): SEQ ID NO: 1394; WAN024EV7; Start 358; Stop 382
attcaacatataggaactcaggtct

SEQ ID NO: 292737 - DNA, 25 bp, Artificial
  probe
  misc_feature (1)..(25): SEQ ID NO: 1394; WAN024EV7; Start 387; Stop 411
ccgtgttaagattggaattggaaga

SEQ ID NO: 292738 - DNA, 25 bp, Artificial
  probe
  misc_feature (1)..(25): SEQ ID NO: 1394; WAN024EV7; Start 385; Stop 409
aaccgtgttaagattggaattggaa

SEQ ID NO: 292739 - DNA, 25 bp, Artificial
  probe
  misc_feature (1)..(25): SEQ ID NO: 1394; WAN024EV7; Start 391; Stop 415
gttaagattggaattggaagaccta

SEQ ID NO: 292740 - DNA, 25 bp, Artificial
  probe
  misc_feature (1)..(25): SEQ ID NO: 1394; WAN024EV7; Start 386; Stop 410
accgtgttaagattggaattggaag

SEQ ID NO: 292741 - DNA, 25 bp, Artificial
  probe
  misc_feature (1)..(25): SEQ ID NO: 1394; WAN024EV7; Start 273; Stop 297
ttacgatgatcttgacatggaagtt

SEQ ID NO: 292742 - DNA, 25 bp, Artificial
  probe
  misc_feature (1)..(25): SEQ ID NO: 1394; WAN024EV7; Start 418; Stop 442
aatggtatgtcagttgttcatcatg

SEQ ID NO: 292743 - DNA, 25 bp, Artificial
  probe
  misc_feature (1)..(25): SEQ ID NO: 1394; WAN024EV7; Start 419; Stop 443
atggtatgtcagttgttcatcatgt

SEQ ID NO: 292744 - DNA, 25 bp, Artificial
  probe
  misc_feature (1)..(25): SEQ ID NO: 1394; WAN024EV7; Start 420; Stop 444
tggtatgtcagttgttcatcatgtt

SEQ ID NO: 292745 - DNA, 25 bp, Artificial
  probe
  misc_feature (1)..(25): SEQ ID NO: 1394; WAN024EV7; Start 332; Stop 356
gtggtcataatggtatcaagtctat

SEQ ID NO: 292746 - DNA, 25 bp, Artificial
  probe
  misc_feature (1)..(25): SEQ ID NO: 1394; WAN024EV7; Start 274; Stop 298
tacgatgatcttgacatggaagttg

SEQ ID NO: 292747 - DNA, 25 bp, Artificial
  probe
  misc_feature (1)..(25): SEQ ID NO: 1394; WAN024EV7; Start 327; Stop 351
agcaggtggtcataatggtatcaag

SEQ ID NO: 292748 - DNA, 25 bp, Artificial
  probe
  misc_feature (1)..(25): SEQ ID NO: 1394; WAN024EV7; Start 392; Stop 416
ttaagattggaattggaagacctaa

SEQ ID NO: 292749 - DNA, 25 bp, Artificial
  probe
  misc_feature (1)..(25): SEQ ID NO: 1394; WAN024EV7; Start 384; Stop 408
taaccgtgttaagattggaattgga

SEQ ID NO: 292750 - DNA, 25 bp, Artificial
  probe
  misc_feature (1)..(25): SEQ ID NO: 1394; WAN024EV7; Start 357; Stop 381
tattcaacatataggaactcaggtc

SEQ ID NO: 292751 - DNA, 25 bp, Artificial
  probe
  misc_feature (1)..(25): SEQ ID NO: 1394; WAN024EV7; Start 328; Stop 352
gcaggtggtcataatggtatcaagt

SEQ ID NO: 292752 - DNA, 25 bp, Artificial
  probe
  misc_feature (1)..(25): SEQ ID NO: 1394; WAN024EV7; Start 326; Stop 350
cagcaggtggtcataatggtatcaa

SEQ ID NO: 292753 - DNA, 25 bp, Artificial
  probe
  misc_feature (1)..(25): SEQ ID NO: 1394; WAN024EV7; Start 324; Stop 348
ctcagcaggtggtcataatggtatc

SEQ ID NO: 292754 - DNA, 25 bp, Artificial
  probe
  misc_feature (1)..(25): SEQ ID NO: 1394; WAN024EV7; Start 546; Stop 570
aacaatgcagaggtataacggataa

SEQ ID NO: 292755 - DNA, 25 bp, Artificial
  probe
  misc_feature (1)..(25): SEQ ID NO: 1394; WAN024EV7; Start 548; Stop 572
caatgcagaggtataacggataact

SEQ ID NO: 292756 - DNA, 25 bp, Artificial
  probe
  misc_feature (1)..(25): SEQ ID NO: 1394; WAN024EV7; Start 333; Stop 357
tggtcataatggtatcaagtctatt

SEQ ID NO: 292757 - DNA, 25 bp, Artificial
  probe
  misc_feature (1)..(25): SEQ ID NO: 1394; WAN024EV7; Start 184; Stop 208
aaaccaacgacctttatgaatgaaa

SEQ ID NO: 292758 - DNA, 25 bp, Artificial
  probe
  misc_feature (1)..(25): SEQ ID NO: 1394; WAN024EV7; Start 547; Stop 571
acaatgcagaggtataacggataac

SEQ ID NO: 292759 - DNA, 25 bp, Artificial
  probe
  misc_feature (1)..(25): SEQ ID NO: 1394; WAN024EV7; Start 551; Stop 575
tgcagaggtataacggataactaat

SEQ ID NO: 292760 - DNA, 25 bp, Artificial
  probe
  misc_feature (1)..(25): SEQ ID NO: 1394; WAN024EV7; Start 550; Stop 574
atgcagaggtataacggataactaa

SEQ ID NO: 292761 - DNA, 25 bp, Artificial
  probe
  misc_feature (1)..(25): SEQ ID NO: 1394; WAN024EV7; Start 549; Stop 573
aatgcagaggtataacggataacta

SEQ ID NO: 292762 - DNA, 25 bp, Artificial
  probe
  misc_feature (1)..(25): SEQ ID NO: 1395; WAN024D2S; Start 52; Stop 76
ttgtctgctgatgaaatgagtttaa

SEQ ID NO: 292763 - DNA, 25 bp, Artificial
  probe
  misc_feature (1)..(25): SEQ ID NO: 1395; WAN024D2S; Start 51; Stop 75
attgtctgctgatgaaatgagttta

SEQ ID NO: 292764 - DNA, 25 bp, Artificial
  probe
  misc_feature (1)..(25): SEQ ID NO: 1395; WAN024D2S; Start 53; Stop 77
tgtctgctgatgaaatgagtttaat

SEQ ID NO: 292765 - DNA, 25 bp, Artificial
  probe
  misc_feature (1)..(25): SEQ ID NO: 1395; WAN024D2S; Start 54; Stop 78
gtctgctgatgaaatgagtttaatt

SEQ ID NO: 292766 - DNA, 25 bp, Artificial
  probe
  misc_feature (1)..(25): SEQ ID NO: 1395; WAN024D2S; Start 1; Stop 25
atgaccaactttaattcaaacgaaa

SEQ ID NO: 292767 - DNA, 25 bp, Artificial
  probe
  misc_feature (1)..(25): SEQ ID NO: 1395; WAN024D2S; Start 73; Stop 97
ttaatttatggtgcatctgatggtg

SEQ ID NO: 292768 - DNA, 25 bp, Artificial
  probe
  misc_feature (1)..(25): SEQ ID NO: 1395; WAN024D2S; Start 50; Stop 74
cattgtctgctgatgaaatgagttt

SEQ ID NO: 292769 - DNA, 25 bp, Artificial
  probe
  misc_feature (1)..(25): SEQ ID NO: 1395; WAN024D2S; Start 72; Stop 96
tttaatttatggtgcatctgatggt

SEQ ID NO: 292770 - DNA, 25 bp, Artificial
  probe
  misc_feature (1)..(25): SEQ ID NO: 1395; WAN024D2S; Start 71; Stop 95
gtttaatttatggtgcatctgatgg

SEQ ID NO: 292771 - DNA, 25 bp, Artificial
  probe
  misc_feature (1)..(25): SEQ ID NO: 1395; WAN024D2S; Start 55; Stop 79
tctgctgatgaaatgagtttaattt

SEQ ID NO: 292772 - DNA, 25 bp, Artificial
  probe
  misc_feature (1)..(25): SEQ ID NO: 1395; WAN024D2S; Start 68; Stop 92
tgagtttaatttatggtgcatctga

SEQ ID NO: 292773 - DNA, 25 bp, Artificial
  probe
  misc_feature (1)..(25): SEQ ID NO: 1395; WAN024D2S; Start 111; Stop 135
gacgcctactcctattattttgaaa

SEQ ID NO: 292774 - DNA, 25 bp, Artificial
  probe
  misc_feature (1)..(25): SEQ ID NO: 1395; WAN024D2S; Start 70; Stop 94
agtttaatttatggtgcatctgatg

SEQ ID NO: 292775 - DNA, 25 bp, Artificial
  probe
  misc_feature (1)..(25): SEQ ID NO: 1395; WAN024D2S; Start 67; Stop 91
atgagtttaatttatggtgcatctg

SEQ ID NO: 292776 - DNA, 25 bp, Artificial
  probe
  misc_feature (1)..(25): SEQ ID NO: 1395; WAN024D2S; Start 69; Stop 93
gagtttaatttatggtgcatctgat

SEQ ID NO: 292777 - DNA, 25 bp, Artificial
  probe
  misc_feature (1)..(25): SEQ ID NO: 1395; WAN024D2S; Start 62; Stop 86
atgaaatgagtttaatttatggtgc

SEQ ID NO: 292778 - DNA, 25 bp, Artificial
  probe
  misc_feature (1)..(25): SEQ ID NO: 1395; WAN024D2S; Start 112; Stop 136
acgcctactcctattattttgaaat

SEQ ID NO: 292779 - DNA, 25 bp, Artificial
  probe
  misc_feature (1)..(25): SEQ ID NO: 1395; WAN024D2S; Start 66; Stop 90
aatgagtttaatttatggtgcatct

SEQ ID NO: 292780 - DNA, 25 bp, Artificial
  probe
  misc_feature (1)..(25): SEQ ID NO: 1395; WAN024D2S; Start 63; Stop 87
tgaaatgagtttaatttatggtgca

SEQ ID NO: 292781 - DNA, 25 bp, Artificial
  probe
  misc_feature (1)..(25): SEQ ID NO: 1395; WAN024D2S; Start 2; Stop 26
tgaccaactttaattcaaacgaaaa

SEQ ID NO: 292782 - DNA, 25 bp, Artificial
  probe
  misc_feature (1)..(25): SEQ ID NO: 1395; WAN024D2S; Start 113; Stop 137
cgcctactcctattattttgaaatc

SEQ ID NO: 292783 - DNA, 25 bp, Artificial
  probe
  misc_feature (1)..(25): SEQ ID NO: 1395; WAN024D2S; Start 110; Stop 134
ggacgcctactcctattattttgaa

SEQ ID NO: 292784 - DNA, 25 bp, Artificial
  probe
  misc_feature (1)..(25): SEQ ID NO: 1395; WAN024D2S; Start 108; Stop 132
ttggacgcctactcctattattttg

SEQ ID NO: 292785 - DNA, 25 bp, Artificial
  probe
  misc_feature (1)..(25): SEQ ID NO: 1395; WAN024D2S; Start 107; Stop 131
gttggacgcctactcctattatttt

SEQ ID NO: 292786 - DNA, 25 bp, Artificial
  probe
  misc_feature (1)..(25): SEQ ID NO: 1395; WAN024D2S; Start 56; Stop 80
ctgctgatgaaatgagtttaattta

SEQ ID NO: 292787 - DNA, 25 bp, Artificial
  probe
  misc_feature (1)..(25): SEQ ID NO: 1395; WAN024D2S; Start 106; Stop 130
cgttggacgcctactcctattattt

SEQ ID NO: 292788 - DNA, 25 bp, Artificial
  probe
  misc_feature (1)..(25): SEQ ID NO: 1395; WAN024D2S; Start 191; Stop 215
ggctagttagctacaataatgattg

SEQ ID NO: 292789 - DNA, 25 bp, Artificial
  probe
  misc_feature (1)..(25): SEQ ID NO: 1395; WAN024D2S; Start 109; Stop 133
tggacgcctactcctattattttga

SEQ ID NO: 292790 - DNA, 25 bp, Artificial
  probe
  misc_feature (1)..(25): SEQ ID NO: 1395; WAN024D2S; Start 74; Stop 98
taatttatggtgcatctgatggtgc

SEQ ID NO: 292791 - DNA, 25 bp, Artificial
  probe
  misc_feature (1)..(25): SEQ ID NO: 1395; WAN024D2S; Start 105; Stop 129
acgttggacgcctactcctattatt

SEQ ID NO: 292792 - DNA, 25 bp, Artificial
  probe
  misc_feature (1)..(25): SEQ ID NO: 1395; WAN024D2S; Start 65; Stop 89
aaatgagtttaatttatggtgcatc

SEQ ID NO: 292793 - DNA, 25 bp, Artificial
  probe
  misc_feature (1)..(25): SEQ ID NO: 1395; WAN024D2S; Start 64; Stop 88
gaaatgagtttaatttatggtgcat

SEQ ID NO: 292794 - DNA, 25 bp, Artificial
  probe
  misc_feature (1)..(25): SEQ ID NO: 1395; WAN024D2S; Start 114; Stop 138
gcctactcctattattttgaaatca

SEQ ID NO: 292795 - DNA, 25 bp, Artificial
  probe
  misc_feature (1)..(25): SEQ ID NO: 1396; WAN024FAM; Start 49; Stop 73
gtctctctactcctaatccacatcc

SEQ ID NO: 292796 - DNA, 25 bp, Artificial
  probe
  misc_feature (1)..(25): SEQ ID NO: 1396; WAN024FAM; Start 48; Stop 72
agtctctctactcctaatccacatc

SEQ ID NO: 292797 - DNA, 25 bp, Artificial
  probe
  misc_feature (1)..(25): SEQ ID NO: 1396; WAN024FAM; Start 47; Stop 71
tagtctctctactcctaatccacat

SEQ ID NO: 292798 - DNA, 25 bp, Artificial
  probe
  misc_feature (1)..(25): SEQ ID NO: 1396; WAN024FAM; Start 46; Stop 70
atagtctctctactcctaatccaca

SEQ ID NO: 292799 - DNA, 25 bp, Artificial
  probe
  misc_feature (1)..(25): SEQ ID NO: 1396; WAN024FAM; Start 45; Stop 69
catagtctctctactcctaatccac

SEQ ID NO: 292800 - DNA, 25 bp, Artificial
  probe
  misc_feature (1)..(25): SEQ ID NO: 1396; WAN024FAM; Start 44; Stop 68
tcatagtctctctactcctaatcca

SEQ ID NO: 292801 - DNA, 25 bp, Artificial
  probe
  misc_feature (1)..(25): SEQ ID NO: 1396; WAN024FAM; Start 139; Stop 163
atagttcatggtcaaggtatggaag

SEQ ID NO: 292802 - DNA, 25 bp, Artificial
  probe
  misc_feature (1)..(25): SEQ ID NO: 1396; WAN024FAM; Start 140; Stop 164
tagttcatggtcaaggtatggaagt

SEQ ID NO: 292803 - DNA, 25 bp, Artificial
  probe
  misc_feature (1)..(25): SEQ ID NO: 1396; WAN024FAM; Start 50; Stop 74
tctctctactcctaatccacatccg

SEQ ID NO: 292804 - DNA, 25 bp, Artificial
  probe
  misc_feature (1)..(25): SEQ ID NO: 1396; WAN024FAM; Start 43; Stop 67
ttcatagtctctctactcctaatcc

SEQ ID NO: 292805 - DNA, 25 bp, Artificial
  probe
  misc_feature (1)..(25): SEQ ID NO: 1396; WAN024FAM; Start 133; Stop 157
caagacatagttcatggtcaaggta

SEQ ID NO: 292806 - DNA, 25 bp, Artificial
  probe
  misc_feature (1)..(25): SEQ ID NO: 1396; WAN024FAM; Start 134; Stop 158
aagacatagttcatggtcaaggtat

SEQ ID NO: 292807 - DNA, 25 bp, Artificial
  probe
  misc_feature (1)..(25): SEQ ID NO: 1396; WAN024FAM; Start 135; Stop 159
agacatagttcatggtcaaggtatg

SEQ ID NO: 292808 - DNA, 25 bp, Artificial
  probe
  misc_feature (1)..(25): SEQ ID NO: 1396; WAN024FAM; Start 138; Stop 162
catagttcatggtcaaggtatggaa

SEQ ID NO: 292809 - DNA, 25 bp, Artificial
  probe
  misc_feature (1)..(25): SEQ ID NO: 1396; WAN024FAM; Start 136; Stop 160
gacatagttcatggtcaaggtatgg

SEQ ID NO: 292810 - DNA, 25 bp, Artificial
  probe
  misc_feature (1)..(25): SEQ ID NO: 1396; WAN024FAM; Start 131; Stop 155
gtcaagacatagttcatggtcaagg

SEQ ID NO: 292811 - DNA, 25 bp, Artificial
  probe
  misc_feature (1)..(25): SEQ ID NO: 1396; WAN024FAM; Start 130; Stop 154
ggtcaagacatagttcatggtcaag

SEQ ID NO: 292812 - DNA, 25 bp, Artificial
  probe
  misc_feature (1)..(25): SEQ ID NO: 1396; WAN024FAM; Start 137; Stop 161
acatagttcatggtcaaggtatgga

SEQ ID NO: 292813 - DNA, 25 bp, Artificial
  probe
  misc_feature (1)..(25): SEQ ID NO: 1396; WAN024FAM; Start 83; Stop 107
gggttaaagaaggcattcaaatcat

SEQ ID NO: 292814 - DNA, 25 bp, Artificial
  probe
  misc_feature (1)..(25): SEQ ID NO: 1396; WAN024FAM; Start 143; Stop 167
ttcatggtcaaggtatggaagtctg

SEQ ID NO: 292815 - DNA, 25 bp, Artificial
  probe
  misc_feature (1)..(25): SEQ ID NO: 1396; WAN024FAM; Start 142; Stop 166
gttcatggtcaaggtatggaagtct

SEQ ID NO: 292816 - DNA, 25 bp, Artificial
  probe
  misc_feature (1)..(25): SEQ ID NO: 1396; WAN024FAM; Start 141; Stop 165
agttcatggtcaaggtatggaagtc

SEQ ID NO: 292817 - DNA, 25 bp, Artificial
  probe
  misc_feature (1)..(25): SEQ ID NO: 1396; WAN024FAM; Start 132; Stop 156
tcaagacatagttcatggtcaaggt

SEQ ID NO: 292818 - DNA, 25 bp, Artificial
  probe
  misc_feature (1)..(25): SEQ ID NO: 1396; WAN024FAM; Start 80; Stop 104
atcgggttaaagaaggcattcaaat

SEQ ID NO: 292819 - DNA, 25 bp, Artificial
  probe
  misc_feature (1)..(25): SEQ ID NO: 1396; WAN024FAM; Start 84; Stop 108
ggttaaagaaggcattcaaatcatt

SEQ ID NO: 292820 - DNA, 25 bp, Artificial
  probe
  misc_feature (1)..(25): SEQ ID NO: 1396; WAN024FAM; Start 53; Stop 77
ctctactcctaatccacatccgctt

SEQ ID NO: 292821 - DNA, 25 bp, Artificial
  probe
  misc_feature (1)..(25): SEQ ID NO: 1396; WAN024FAM; Start 81; Stop 105
tcgggttaaagaaggcattcaaatc

SEQ ID NO: 292822 - DNA, 25 bp, Artificial
  probe
  misc_feature (1)..(25): SEQ ID NO: 1396; WAN024FAM; Start 76; Stop 100
tttcatcgggttaaagaaggcattc

SEQ ID NO: 292823 - DNA, 25 bp, Artificial
  probe
  misc_feature (1)..(25): SEQ ID NO: 1396; WAN024FAM; Start 82; Stop 106
cgggttaaagaaggcattcaaatca

SEQ ID NO: 292824 - DNA, 25 bp, Artificial
  probe
  misc_feature (1)..(25): SEQ ID NO: 1396; WAN024FAM; Start 79; Stop 103
catcgggttaaagaaggcattcaaa

SEQ ID NO: 292825 - DNA, 25 bp, Artificial
  probe
  misc_feature (1)..(25): SEQ ID NO: 1396; WAN024FAM; Start 51; Stop 75
ctctctactcctaatccacatccgc

SEQ ID NO: 292826 - DNA, 25 bp, Artificial
  probe
  misc_feature (1)..(25): SEQ ID NO: 1396; WAN024FAM; Start 146; Stop 170
atggtcaaggtatggaagtctgctt

SEQ ID NO: 292827 - DNA, 25 bp, Artificial
  probe
  misc_feature (1)..(25): SEQ ID NO: 1396; WAN024FAM; Start 85; Stop 109
gttaaagaaggcattcaaatcattg

SEQ ID NO: 292828 - DNA, 25 bp, Artificial
  probe
  misc_feature (1)..(25): SEQ ID NO: 1397; WAN024DZS; Start 140; Stop 164
ccactgagtcaccaattaacatagt

SEQ ID NO: 292829 - DNA, 25 bp, Artificial
  probe
  misc_feature (1)..(25): SEQ ID NO: 1397; WAN024DZS; Start 139; Stop 163
gccactgagtcaccaattaacatag

SEQ ID NO: 292830 - DNA, 25 bp, Artificial
  probe
  misc_feature (1)..(25): SEQ ID NO: 1397; WAN024DZS; Start 138; Stop 162
agccactgagtcaccaattaacata

SEQ ID NO: 292831 - DNA, 25 bp, Artificial
  probe
  misc_feature (1)..(25): SEQ ID NO: 1397; WAN024DZS; Start 312; Stop 336
gacaatgatggtcaagattcctgta

SEQ ID NO: 292832 - DNA, 25 bp, Artificial
  probe
  misc_feature (1)..(25): SEQ ID NO: 1397; WAN024DZS; Start 313; Stop 337
acaatgatggtcaagattcctgtac

SEQ ID NO: 292833 - DNA, 25 bp, Artificial
  probe
  misc_feature (1)..(25): SEQ ID NO: 1397; WAN024DZS; Start 148; Stop 172
tcaccaattaacatagtgccatcag

SEQ ID NO: 292834 - DNA, 25 bp, Artificial
  probe
  misc_feature (1)..(25): SEQ ID NO: 1397; WAN024DZS; Start 146; Stop 170
agtcaccaattaacatagtgccatc

SEQ ID NO: 292835 - DNA, 25 bp, Artificial
  probe
  misc_feature (1)..(25): SEQ ID NO: 1397; WAN024DZS; Start 145; Stop 169
gagtcaccaattaacatagtgccat

SEQ ID NO: 292836 - DNA, 25 bp, Artificial
  probe
  misc_feature (1)..(25): SEQ ID NO: 1397; WAN024DZS; Start 142; Stop 166
actgagtcaccaattaacatagtgc

SEQ ID NO: 292837 - DNA, 25 bp, Artificial
  probe
  misc_feature (1)..(25): SEQ ID NO: 1397; WAN024DZS; Start 147; Stop 171
gtcaccaattaacatagtgccatca

SEQ ID NO: 292838 - DNA, 25 bp, Artificial
  probe
  misc_feature (1)..(25): SEQ ID NO: 1397; WAN024DZS; Start 310; Stop 334
cagacaatgatggtcaagattcctg

SEQ ID NO: 292839 - DNA, 25 bp, Artificial
  probe
  misc_feature (1)..(25): SEQ ID NO: 1397; WAN024DZS; Start 137; Stop 161
aagccactgagtcaccaattaacat

SEQ ID NO: 292840 - DNA, 25 bp, Artificial
  probe
  misc_feature (1)..(25): SEQ ID NO: 1397; WAN024DZS; Start 311; Stop 335
agacaatgatggtcaagattcctgt

SEQ ID NO: 292841 - DNA, 25 bp, Artificial
  probe
  misc_feature (1)..(25): SEQ ID NO: 1397; WAN024DZS; Start 143; Stop 167
ctgagtcaccaattaacatagtgcc

SEQ ID NO: 292842 - DNA, 25 bp, Artificial
  probe
  misc_feature (1)..(25): SEQ ID NO: 1397; WAN024DZS; Start 133; Stop 157
cttaaagccactgagtcaccaatta

SEQ ID NO: 292843 - DNA, 25 bp, Artificial
  probe
  misc_feature (1)..(25): SEQ ID NO: 1397; WAN024DZS; Start 144; Stop 168
tgagtcaccaattaacatagtgcca

SEQ ID NO: 292844 - DNA, 25 bp, Artificial
  probe
  misc_feature (1)..(25): SEQ ID NO: 1397; WAN024DZS; Start 115; Stop 139
tgtagtgctgtatttgcccttaaag

SEQ ID NO: 292845 - DNA, 25 bp, Artificial
  probe
  misc_feature (1)..(25): SEQ ID NO: 1397; WAN024DZS; Start 114; Stop 138
ctgtagtgctgtatttgcccttaaa

SEQ ID NO: 292846 - DNA, 25 bp, Artificial
  probe
  misc_feature (1)..(25): SEQ ID NO: 1397; WAN024DZS; Start 315; Stop 339
aatgatggtcaagattcctgtacct

SEQ ID NO: 292847 - DNA, 25 bp, Artificial
  probe
  misc_feature (1)..(25): SEQ ID NO: 1397; WAN024DZS; Start 314; Stop 338
caatgatggtcaagattcctgtacc

SEQ ID NO: 292848 - DNA, 25 bp, Artificial
  probe
  misc_feature (1)..(25): SEQ ID NO: 1397; WAN024DZS; Start 135; Stop 159
taaagccactgagtcaccaattaac

SEQ ID NO: 292849 - DNA, 25 bp, Artificial
  probe
  misc_feature (1)..(25): SEQ ID NO: 1397; WAN024DZS; Start 134; Stop 158
ttaaagccactgagtcaccaattaa

SEQ ID NO: 292850 - DNA, 25 bp, Artificial
  probe
  misc_feature (1)..(25): SEQ ID NO: 1397; WAN024DZS; Start 149; Stop 173
caccaattaacatagtgccatcagc

SEQ ID NO: 292851 - DNA, 25 bp, Artificial
  probe
  misc_feature (1)..(25): SEQ ID NO: 1397; WAN024DZS; Start 49; Stop 73
atttcatttgcggtcttggttgtta

SEQ ID NO: 292852 - DNA, 25 bp, Artificial
  probe
  misc_feature (1)..(25): SEQ ID NO: 1397; WAN024DZS; Start 113; Stop 137
tctgtagtgctgtatttgcccttaa

SEQ ID NO: 292853 - DNA, 25 bp, Artificial
  probe
  misc_feature (1)..(25): SEQ ID NO: 1397; WAN024DZS; Start 316; Stop 340
atgatggtcaagattcctgtacctg

SEQ ID NO: 292854 - DNA, 25 bp, Artificial
  probe
  misc_feature (1)..(25): SEQ ID NO: 1397; WAN024DZS; Start 154; Stop 178
attaacatagtgccatcagcaattc

SEQ ID NO: 292855 - DNA, 25 bp, Artificial
  probe
  misc_feature (1)..(25): SEQ ID NO: 1397; WAN024DZS; Start 152; Stop 176
caattaacatagtgccatcagcaat

SEQ ID NO: 292856 - DNA, 25 bp, Artificial
  probe
  misc_feature (1)..(25): SEQ ID NO: 1397; WAN024DZS; Start 153; Stop 177
aattaacatagtgccatcagcaatt

SEQ ID NO: 292857 - DNA, 25 bp, Artificial
  probe
  misc_feature (1)..(25): SEQ ID NO: 1397; WAN024DZS; Start 309; Stop 333
gcagacaatgatggtcaagattcct

SEQ ID NO: 292858 - DNA, 25 bp, Artificial
  probe
  misc_feature (1)..(25): SEQ ID NO: 1397; WAN024DZS; Start 112; Stop 136
gtctgtagtgctgtatttgccctta

SEQ ID NO: 292859 - DNA, 25 bp, Artificial
  probe
  misc_feature (1)..(25): SEQ ID NO: 1397; WAN024DZS; Start 155; Stop 179
ttaacatagtgccatcagcaattcc

SEQ ID NO: 292860 - DNA, 25 bp, Artificial
  probe
  misc_feature (1)..(25): SEQ ID NO: 1397; WAN024DZS; Start 50; Stop 74
tttcatttgcggtcttggttgttac

SEQ ID NO: 292861 - DNA, 25 bp, Artificial
  probe
  misc_feature (1)..(25): SEQ ID NO: 1398; WAN024FRO; Start 68; Stop 92
caggtttgataaagatattggtcca

SEQ ID NO: 292862 - DNA, 25 bp, Artificial
  probe
  misc_feature (1)..(25): SEQ ID NO: 1398; WAN024FRO; Start 58; Stop 82
cactcatacccaggtttgataaaga

SEQ ID NO: 292863 - DNA, 25 bp, Artificial
  probe
  misc_feature (1)..(25): SEQ ID NO: 1398; WAN024FRO; Start 59; Stop 83
actcatacccaggtttgataaagat

SEQ ID NO: 292864 - DNA, 25 bp, Artificial
  probe
  misc_feature (1)..(25): SEQ ID NO: 1398; WAN024FRO; Start 57; Stop 81
ccactcatacccaggtttgataaag

SEQ ID NO: 292865 - DNA, 25 bp, Artificial
  probe
  misc_feature (1)..(25): SEQ ID NO: 1398; WAN024FRO; Start 56; Stop 80
tccactcatacccaggtttgataaa

SEQ ID NO: 292866 - DNA, 25 bp, Artificial
  probe
  misc_feature (1)..(25): SEQ ID NO: 1398; WAN024FRO; Start 55; Stop 79
ttccactcatacccaggtttgataa

SEQ ID NO: 292867 - DNA, 25 bp, Artificial
  probe
  misc_feature (1)..(25): SEQ ID NO: 1398; WAN024FRO; Start 54; Stop 78
cttccactcatacccaggtttgata

SEQ ID NO: 292868 - DNA, 25 bp, Artificial
  probe
  misc_feature (1)..(25): SEQ ID NO: 1398; WAN024FRO; Start 65; Stop 89
acccaggtttgataaagatattggt

SEQ ID NO: 292869 - DNA, 25 bp, Artificial
  probe
  misc_feature (1)..(25): SEQ ID NO: 1398; WAN024FRO; Start 67; Stop 91
ccaggtttgataaagatattggtcc

SEQ ID NO: 292870 - DNA, 25 bp, Artificial
  probe
  misc_feature (1)..(25): SEQ ID NO: 1398; WAN024FRO; Start 66; Stop 90
cccaggtttgataaagatattggtc

SEQ ID NO: 292871 - DNA, 25 bp, Artificial
  probe
  misc_feature (1)..(25): SEQ ID NO: 1398; WAN024FRO; Start 60; Stop 84
ctcatacccaggtttgataaagata

SEQ ID NO: 292872 - DNA, 25 bp, Artificial
  probe
  misc_feature (1)..(25): SEQ ID NO: 1398; WAN024FRO; Start 70; Stop 94
ggtttgataaagatattggtccaac

SEQ ID NO: 292873 - DNA, 25 bp, Artificial
  probe
  misc_feature (1)..(25): SEQ ID NO: 1398; WAN024FRO; Start 69; Stop 93
aggtttgataaagatattggtccaa

SEQ ID NO: 292874 - DNA, 25 bp, Artificial
  probe
  misc_feature (1)..(25): SEQ ID NO: 1398; WAN024FRO; Start 64; Stop 88
tacccaggtttgataaagatattgg

SEQ ID NO: 292875 - DNA, 25 bp, Artificial
  probe
  misc_feature (1)..(25): SEQ ID NO: 1398; WAN024FRO; Start 61; Stop 85
tcatacccaggtttgataaagatat

SEQ ID NO: 292876 - DNA, 25 bp, Artificial
  probe
  misc_feature (1)..(25): SEQ ID NO: 1398; WAN024FRO; Start 63; Stop 87
atacccaggtttgataaagatattg

SEQ ID NO: 292877 - DNA, 25 bp, Artificial
  probe
  misc_feature (1)..(25): SEQ ID NO: 1398; WAN024FRO; Start 62; Stop 86
catacccaggtttgataaagatatt

SEQ ID NO: 292878 - DNA, 25 bp, Artificial
  probe
  misc_feature (1)..(25): SEQ ID NO: 1398; WAN024FRO; Start 71; Stop 95
gtttgataaagatattggtccaacc

SEQ ID NO: 292879 - DNA, 25 bp, Artificial
  probe
  misc_feature (1)..(25): SEQ ID NO: 1398; WAN024FRO; Start 114; Stop 138
cccatcaaacttggaaccaatagtt

SEQ ID NO: 292880 - DNA, 25 bp, Artificial
  probe
  misc_feature (1)..(25): SEQ ID NO: 1398; WAN024FRO; Start 111; Stop 135
ttgcccatcaaacttggaaccaata

SEQ ID NO: 292881 - DNA, 25 bp, Artificial
  probe
  misc_feature (1)..(25): SEQ ID NO: 1398; WAN024FRO; Start 79; Stop 103
aagatattggtccaaccagaatctg

SEQ ID NO: 292882 - DNA, 25 bp, Artificial
  probe
  misc_feature (1)..(25): SEQ ID NO: 1398; WAN024FRO; Start 53; Stop 77
ccttccactcatacccaggtttgat

SEQ ID NO: 292883 - DNA, 25 bp, Artificial
  probe
  misc_feature (1)..(25): SEQ ID NO: 1398; WAN024FRO; Start 113; Stop 137
gcccatcaaacttggaaccaatagt

SEQ ID NO: 292884 - DNA, 25 bp, Artificial
  probe
  misc_feature (1)..(25): SEQ ID NO: 1398; WAN024FRO; Start 112; Stop 136
tgcccatcaaacttggaaccaatag

SEQ ID NO: 292885 - DNA, 25 bp, Artificial
  probe
  misc_feature (1)..(25): SEQ ID NO: 1398; WAN024FRO; Start 97; Stop 121
gaatctgcttggatttgcccatcaa

SEQ ID NO: 292886 - DNA, 25 bp, Artificial
  probe
  misc_feature (1)..(25): SEQ ID NO: 1398; WAN024FRO; Start 105; Stop 129
ttggatttgcccatcaaacttggaa

SEQ ID NO: 292887 - DNA, 25 bp, Artificial
  probe
  misc_feature (1)..(25): SEQ ID NO: 1398; WAN024FRO; Start 82; Stop 106
atattggtccaaccagaatctgctt

SEQ ID NO: 292888 - DNA, 25 bp, Artificial
  probe
  misc_feature (1)..(25): SEQ ID NO: 1398; WAN024FRO; Start 98; Stop 122
aatctgcttggatttgcccatcaaa

SEQ ID NO: 292889 - DNA, 25 bp, Artificial
  probe
  misc_feature (1)..(25): SEQ ID NO: 1398; WAN024FRO; Start 8; Stop 32
gagttgattttggcaggtggaagtt

SEQ ID NO: 292890 - DNA, 25 bp, Artificial
  probe
  misc_feature (1)..(25): SEQ ID NO: 1398; WAN024FRO; Start 81; Stop 105
gatattggtccaaccagaatctgct

SEQ ID NO: 292891 - DNA, 25 bp, Artificial
  probe
  misc_feature (1)..(25): SEQ ID NO: 1398; WAN024FRO; Start 80; Stop 104
agatattggtccaaccagaatctgc

SEQ ID NO: 292892 - DNA, 25 bp, Artificial
  probe
  misc_feature (1)..(25): SEQ ID NO: 1398; WAN024FRO; Start 104; Stop 128
cttggatttgcccatcaaacttgga

SEQ ID NO: 292893 - DNA, 25 bp, Artificial
  probe
  misc_feature (1)..(25): SEQ ID NO: 1398; WAN024FRO; Start 78; Stop 102
aaagatattggtccaaccagaatct

SEQ ID NO: 292894 - DNA, 25 bp, Artificial
  probe
  misc_feature (1)..(25): SEQ ID NO: 1399; WAN024C44; Start 488; Stop 512
ttgaatctgctctataccgtgtaat

SEQ ID NO: 292895 - DNA, 25 bp, Artificial
  probe
  misc_feature (1)..(25): SEQ ID NO: 1399; WAN024C44; Start 254; Stop 278
atgctatctatgagttaggtctacg

SEQ ID NO: 292896 - DNA, 25 bp, Artificial
  probe
  misc_feature (1)..(25): SEQ ID NO: 1399; WAN024C44; Start 551; Stop 575
aagaagcattagacaagtcaatagc

SEQ ID NO: 292897 - DNA, 25 bp, Artificial
  probe
  misc_feature (1)..(25): SEQ ID NO: 1399; WAN024C44; Start 489; Stop 513
tgaatctgctctataccgtgtaata

SEQ ID NO: 292898 - DNA, 25 bp, Artificial
  probe
  misc_feature (1)..(25): SEQ ID NO: 1399; WAN024C44; Start 548; Stop 572
gtgaagaagcattagacaagtcaat

SEQ ID NO: 292899 - DNA, 25 bp, Artificial
  probe
  misc_feature (1)..(25): SEQ ID NO: 1399; WAN024C44; Start 547; Stop 571
agtgaagaagcattagacaagtcaa

SEQ ID NO: 292900 - DNA, 25 bp, Artificial
  probe
  misc_feature (1)..(25): SEQ ID NO: 1399; WAN024C44; Start 546; Stop 570
aagtgaagaagcattagacaagtca

SEQ ID NO: 292901 - DNA, 25 bp, Artificial
  probe
  misc_feature (1)..(25): SEQ ID NO: 1399; WAN024C44; Start 490; Stop 514
gaatctgctctataccgtgtaataa

SEQ ID NO: 292902 - DNA, 25 bp, Artificial
  probe
  misc_feature (1)..(25): SEQ ID NO: 1399; WAN024C44; Start 848; Stop 872
agaataggagtgacttaatgtctgc

SEQ ID NO: 292903 - DNA, 25 bp, Artificial
  probe
  misc_feature (1)..(25): SEQ ID NO: 1399; WAN024C44; Start 928; Stop 952
aggaattactgtgctaacctgttaa

SEQ ID NO: 292904 - DNA, 25 bp, Artificial
  probe
  misc_feature (1)..(25): SEQ ID NO: 1399; WAN024C44; Start 927; Stop 951
aaggaattactgtgctaacctgtta

SEQ ID NO: 292905 - DNA, 25 bp, Artificial
  probe
  misc_feature (1)..(25): SEQ ID NO: 1399; WAN024C44; Start 1196; Stop 1220
ttatgttaagtgaggatctccagag

SEQ ID NO: 292906 - DNA, 25 bp, Artificial
  probe
  misc_feature (1)..(25): SEQ ID NO: 1399; WAN024C44; Start 1197; Stop 1221
tatgttaagtgaggatctccagagg

SEQ ID NO: 292907 - DNA, 25 bp, Artificial
  probe
  misc_feature (1)..(25): SEQ ID NO: 1399; WAN024C44; Start 550; Stop 574
gaagaagcattagacaagtcaatag

SEQ ID NO: 292908 - DNA, 25 bp, Artificial
  probe
  misc_feature (1)..(25): SEQ ID NO: 1399; WAN024C44; Start 549; Stop 573
tgaagaagcattagacaagtcaata

SEQ ID NO: 292909 - DNA, 25 bp, Artificial
  probe
  misc_feature (1)..(25): SEQ ID NO: 1399; WAN024C44; Start 1195; Stop 1219
attatgttaagtgaggatctccaga

SEQ ID NO: 292910 - DNA, 25 bp, Artificial
  probe
  misc_feature (1)..(25): SEQ ID NO: 1399; WAN024C44; Start 926; Stop 950
caaggaattactgtgctaacctgtt

SEQ ID NO: 292911 - DNA, 25 bp, Artificial
  probe
  misc_feature (1)..(25): SEQ ID NO: 1399; WAN024C44; Start 491; Stop 515
aatctgctctataccgtgtaataat

SEQ ID NO: 292912 - DNA, 25 bp, Artificial
  probe
  misc_feature (1)..(25): SEQ ID NO: 1399; WAN024C44; Start 1202; Stop 1226
taagtgaggatctccagaggattaa

SEQ ID NO: 292913 - DNA, 25 bp, Artificial
  probe
  misc_feature (1)..(25): SEQ ID NO: 1399; WAN024C44; Start 1201; Stop 1225
ttaagtgaggatctccagaggatta

SEQ ID NO: 292914 - DNA, 25 bp, Artificial
  probe
  misc_feature (1)..(25): SEQ ID NO: 1399; WAN024C44; Start 1089; Stop 1113
ttccaatcaagaggatctaatgctg

SEQ ID NO: 292915 - DNA, 25 bp, Artificial
  probe
  misc_feature (1)..(25): SEQ ID NO: 1399; WAN024C44; Start 492; Stop 516
atctgctctataccgtgtaataatt

SEQ ID NO: 292916 - DNA, 25 bp, Artificial
  probe
  misc_feature (1)..(25): SEQ ID NO: 1399; WAN024C44; Start 255; Stop 279
tgctatctatgagttaggtctacgt

SEQ ID NO: 292917 - DNA, 25 bp, Artificial
  probe
  misc_feature (1)..(25): SEQ ID NO: 1399; WAN024C44; Start 256; Stop 280
gctatctatgagttaggtctacgtc

SEQ ID NO: 292918 - DNA, 25 bp, Artificial
  probe
  misc_feature (1)..(25): SEQ ID NO: 1399; WAN024C44; Start 556; Stop 580
gcattagacaagtcaatagctgaac

SEQ ID NO: 292919 - DNA, 25 bp, Artificial
  probe
  misc_feature (1)..(25): SEQ ID NO: 1399; WAN024C44; Start 847; Stop 871
aagaataggagtgacttaatgtctg

SEQ ID NO: 292920 - DNA, 25 bp, Artificial
  probe
  misc_feature (1)..(25): SEQ ID NO: 1399; WAN024C44; Start 544; Stop 568
caaagtgaagaagcattagacaagt

SEQ ID NO: 292921 - DNA, 25 bp, Artificial
  probe
  misc_feature (1)..(25): SEQ ID NO: 1399; WAN024C44; Start 292; Stop 316
cccaaatcaaccattatactgtgtg

SEQ ID NO: 292922 - DNA, 25 bp, Artificial
  probe
  misc_feature (1)..(25): SEQ ID NO: 1399; WAN024C44; Start 253; Stop 277
aatgctatctatgagttaggtctac

SEQ ID NO: 292923 - DNA, 25 bp, Artificial
  probe
  misc_feature (1)..(25): SEQ ID NO: 1399; WAN024C44; Start 487; Stop 511
tttgaatctgctctataccgtgtaa

SEQ ID NO: 292924 - DNA, 25 bp, Artificial
  probe
  misc_feature (1)..(25): SEQ ID NO: 1399; WAN024C44; Start 486; Stop 510
ctttgaatctgctctataccgtgta

SEQ ID NO: 292925 - DNA, 25 bp, Artificial
  probe
  misc_feature (1)..(25): SEQ ID NO: 1399; WAN024C44; Start 352; Stop 376
gcacacttacctcaaatcagatatg

SEQ ID NO: 292926 - DNA, 25 bp, Artificial
  probe
  misc_feature (1)..(25): SEQ ID NO: 1399; WAN024C44; Start 291; Stop 315
acccaaatcaaccattatactgtgt

SEQ ID NO: 292927 - DNA, 25 bp, Artificial
  probe
  misc_feature (1)..(25): SEQ ID NO: 1400; WAN024DOU; Start 126; Stop 150
aattgaagcattctacctaactaat

SEQ ID NO: 292928 - DNA, 25 bp, Artificial
  probe
  misc_feature (1)..(25): SEQ ID NO: 1400; WAN024DOU; Start 120; Stop 144
cccagaaattgaagcattctaccta

SEQ ID NO: 292929 - DNA, 25 bp, Artificial
  probe
  misc_feature (1)..(25): SEQ ID NO: 1400; WAN024DOU; Start 117; Stop 141
caacccagaaattgaagcattctac

SEQ ID NO: 292930 - DNA, 25 bp, Artificial
  probe
  misc_feature (1)..(25): SEQ ID NO: 1400; WAN024DOU; Start 121; Stop 145
ccagaaattgaagcattctacctaa

SEQ ID NO: 292931 - DNA, 25 bp, Artificial
  probe
  misc_feature (1)..(25): SEQ ID NO: 1400; WAN024DOU; Start 124; Stop 148
gaaattgaagcattctacctaacta

SEQ ID NO: 292932 - DNA, 25 bp, Artificial
  probe
  misc_feature (1)..(25): SEQ ID NO: 1400; WAN024DOU; Start 118; Stop 142
aacccagaaattgaagcattctacc

SEQ ID NO: 292933 - DNA, 25 bp, Artificial
  probe
  misc_feature (1)..(25): SEQ ID NO: 1400; WAN024DOU; Start 116; Stop 140
tcaacccagaaattgaagcattcta

SEQ ID NO: 292934 - DNA, 25 bp, Artificial
  probe
  misc_feature (1)..(25): SEQ ID NO: 1400; WAN024DOU; Start 123; Stop 147
agaaattgaagcattctacctaact

SEQ ID NO: 292935 - DNA, 25 bp, Artificial
  probe
  misc_feature (1)..(25): SEQ ID NO: 1400; WAN024DOU; Start 122; Stop 146
cagaaattgaagcattctacctaac

SEQ ID NO: 292936 - DNA, 25 bp, Artificial
  probe
  misc_feature (1)..(25): SEQ ID NO: 1400; WAN024DOU; Start 125; Stop 149
aaattgaagcattctacctaactaa

SEQ ID NO: 292937 - DNA, 25 bp, Artificial
  probe
  misc_feature (1)..(25): SEQ ID NO: 1400; WAN024DOU; Start 119; Stop 143
acccagaaattgaagcattctacct

SEQ ID NO: 292938 - DNA, 25 bp, Artificial
  probe
  misc_feature (1)..(25): SEQ ID NO: 1400; WAN024DOU; Start 113; Stop 137
aactcaacccagaaattgaagcatt

SEQ ID NO: 292939 - DNA, 25 bp, Artificial
  probe
  misc_feature (1)..(25): SEQ ID NO: 1400; WAN024DOU; Start 115; Stop 139
ctcaacccagaaattgaagcattct

SEQ ID NO: 292940 - DNA, 25 bp, Artificial
  probe
  misc_feature (1)..(25): SEQ ID NO: 1400; WAN024DOU; Start 114; Stop 138
actcaacccagaaattgaagcattc

SEQ ID NO: 292941 - DNA, 25 bp, Artificial
  probe
  misc_feature (1)..(25): SEQ ID NO: 1400; WAN024DOU; Start 112; Stop 136
caactcaacccagaaattgaagcat

SEQ ID NO: 292942 - DNA, 25 bp, Artificial
  probe
  misc_feature (1)..(25): SEQ ID NO: 1400; WAN024DOU; Start 43; Stop 67
aaagaacgtaagcgtaacaaaccag

SEQ ID NO: 292943 - DNA, 25 bp, Artificial
  probe
  misc_feature (1)..(25): SEQ ID NO: 1400; WAN024DOU; Start 42; Stop 66
caaagaacgtaagcgtaacaaacca

SEQ ID NO: 292944 - DNA, 25 bp, Artificial
  probe
  misc_feature (1)..(25): SEQ ID NO: 1400; WAN024DOU; Start 41; Stop 65
ccaaagaacgtaagcgtaacaaacc

SEQ ID NO: 292945 - DNA, 25 bp, Artificial
  probe
  misc_feature (1)..(25): SEQ ID NO: 1400; WAN024DOU; Start 50; Stop 74
gtaagcgtaacaaaccaggtgttgt

SEQ ID NO: 292946 - DNA, 25 bp, Artificial
  probe
  misc_feature (1)..(25): SEQ ID NO: 1400; WAN024DOU; Start 40; Stop 64
gccaaagaacgtaagcgtaacaaac

SEQ ID NO: 292947 - DNA, 25 bp, Artificial
  probe
  misc_feature (1)..(25): SEQ ID NO: 1400; WAN024DOU; Start 39; Stop 63
agccaaagaacgtaagcgtaacaaa

SEQ ID NO: 292948 - DNA, 25 bp, Artificial
  probe
  misc_feature (1)..(25): SEQ ID NO: 1400; WAN024DOU; Start 105; Stop 129
tttagcgcaactcaacccagaaatt

SEQ ID NO: 292949 - DNA, 25 bp, Artificial
  probe
  misc_feature (1)..(25): SEQ ID NO: 1400; WAN024DOU; Start 44; Stop 68
aagaacgtaagcgtaacaaaccagg

SEQ ID NO: 292950 - DNA, 25 bp, Artificial
  probe
  misc_feature (1)..(25): SEQ ID NO: 1400; WAN024DOU; Start 111; Stop 135
gcaactcaacccagaaattgaagca

SEQ ID NO: 292951 - DNA, 25 bp, Artificial
  probe
  misc_feature (1)..(25): SEQ ID NO: 1400; WAN024DOU; Start 104; Stop 128
ctttagcgcaactcaacccagaaat

SEQ ID NO: 292952 - DNA, 25 bp, Artificial
  probe
  misc_feature (1)..(25): SEQ ID NO: 1400; WAN024DOU; Start 38; Stop 62
cagccaaagaacgtaagcgtaacaa

SEQ ID NO: 292953 - DNA, 25 bp, Artificial
  probe
  misc_feature (1)..(25): SEQ ID NO: 1400; WAN024DOU; Start 30; Stop 54
taagttcgcagccaaagaacgtaag

SEQ ID NO: 292954 - DNA, 25 bp, Artificial
  probe
  misc_feature (1)..(25): SEQ ID NO: 1400; WAN024DOU; Start 106; Stop 130
ttagcgcaactcaacccagaaattg

SEQ ID NO: 292955 - DNA, 25 bp, Artificial
  probe
  misc_feature (1)..(25): SEQ ID NO: 1400; WAN024DOU; Start 29; Stop 53
gtaagttcgcagccaaagaacgtaa

SEQ ID NO: 292956 - DNA, 25 bp, Artificial
  probe
  misc_feature (1)..(25): SEQ ID NO: 1400; WAN024DOU; Start 49; Stop 73
cgtaagcgtaacaaaccaggtgttg

SEQ ID NO: 292957 - DNA, 25 bp, Artificial
  probe
  misc_feature (1)..(25): SEQ ID NO: 1400; WAN024DOU; Start 46; Stop 70
gaacgtaagcgtaacaaaccaggtg

SEQ ID NO: 292958 - DNA, 25 bp, Artificial
  probe
  misc_feature (1)..(25): SEQ ID NO: 1400; WAN024DOU; Start 45; Stop 69
agaacgtaagcgtaacaaaccaggt

SEQ ID NO: 292959 - DNA, 25 bp, Artificial
  probe
  misc_feature (1)..(25): SEQ ID NO: 1400; WAN024DOU; Start 107; Stop 131
tagcgcaactcaacccagaaattga

SEQ ID NO: 292960 - DNA, 25 bp, Artificial
  probe
  misc_feature (1)..(25): SEQ ID NO: 1401; WAN024CJS; Start 162; Stop 186
aagaagtacactgacgagaatacat

SEQ ID NO: 292961 - DNA, 25 bp, Artificial
  probe
  misc_feature (1)..(25): SEQ ID NO: 1401; WAN024CJS; Start 264; Stop 288
ctctggaataggcatagacactatc

SEQ ID NO: 292962 - DNA, 25 bp, Artificial
  probe
  misc_feature (1)..(25): SEQ ID NO: 1401; WAN024CJS; Start 163; Stop 187
agaagtacactgacgagaatacatg

SEQ ID NO: 292963 - DNA, 25 bp, Artificial
  probe
  misc_feature (1)..(25): SEQ ID NO: 1401; WAN024CJS; Start 269; Stop 293
gaataggcatagacactatcaccag

SEQ ID NO: 292964 - DNA, 25 bp, Artificial
  probe
  misc_feature (1)..(25): SEQ ID NO: 1401; WAN024CJS; Start 266; Stop 290
ctggaataggcatagacactatcac

SEQ ID NO: 292965 - DNA, 25 bp, Artificial
  probe
  misc_feature (1)..(25): SEQ ID NO: 1401; WAN024CJS; Start 265; Stop 289
tctggaataggcatagacactatca

SEQ ID NO: 292966 - DNA, 25 bp, Artificial
  probe
  misc_feature (1)..(25): SEQ ID NO: 1401; WAN024CJS; Start 268; Stop 292
ggaataggcatagacactatcacca

SEQ ID NO: 292967 - DNA, 25 bp, Artificial
  probe
  misc_feature (1)..(25): SEQ ID NO: 1401; WAN024CJS; Start 267; Stop 291
tggaataggcatagacactatcacc

SEQ ID NO: 292968 - DNA, 25 bp, Artificial
  probe
  misc_feature (1)..(25): SEQ ID NO: 1401; WAN024CJS; Start 164; Stop 188
gaagtacactgacgagaatacatgc

SEQ ID NO: 292969 - DNA, 25 bp, Artificial
  probe
  misc_feature (1)..(25): SEQ ID NO: 1401; WAN024CJS; Start 263; Stop 287
cctctggaataggcatagacactat

SEQ ID NO: 292970 - DNA, 25 bp, Artificial
  probe
  misc_feature (1)..(25): SEQ ID NO: 1401; WAN024CJS; Start 35; Stop 59
gaaccaatcgtcggtgtattatcta

SEQ ID NO: 292971 - DNA, 25 bp, Artificial
  probe
  misc_feature (1)..(25): SEQ ID NO: 1401; WAN024CJS; Start 19; Stop 43
agtagaccaagtaatggaaccaatc

SEQ ID NO: 292972 - DNA, 25 bp, Artificial
  probe
  misc_feature (1)..(25): SEQ ID NO: 1401; WAN024CJS; Start 36; Stop 60
aaccaatcgtcggtgtattatctac

SEQ ID NO: 292973 - DNA, 25 bp, Artificial
  probe
  misc_feature (1)..(25): SEQ ID NO: 1401; WAN024CJS; Start 18; Stop 42
cagtagaccaagtaatggaaccaat

SEQ ID NO: 292974 - DNA, 25 bp, Artificial
  probe
  misc_feature (1)..(25): SEQ ID NO: 1401; WAN024CJS; Start 270; Stop 294
aataggcatagacactatcaccagc

SEQ ID NO: 292975 - DNA, 25 bp, Artificial
  probe
  misc_feature (1)..(25): SEQ ID NO: 1401; WAN024CJS; Start 138; Stop 162
cattactcaaacgaaaggctacaaa

SEQ ID NO: 292976 - DNA, 25 bp, Artificial
  probe
  misc_feature (1)..(25): SEQ ID NO: 1401; WAN024CJS; Start 137; Stop 161
acattactcaaacgaaaggctacaa

SEQ ID NO: 292977 - DNA, 25 bp, Artificial
  probe
  misc_feature (1)..(25): SEQ ID NO: 1401; WAN024CJS; Start 20; Stop 44
gtagaccaagtaatggaaccaatcg

SEQ ID NO: 292978 - DNA, 25 bp, Artificial
  probe
  misc_feature (1)..(25): SEQ ID NO: 1401; WAN024CJS; Start 262; Stop 286
tcctctggaataggcatagacacta

SEQ ID NO: 292979 - DNA, 25 bp, Artificial
  probe
  misc_feature (1)..(25): SEQ ID NO: 1401; WAN024CJS; Start 136; Stop 160
gacattactcaaacgaaaggctaca

SEQ ID NO: 292980 - DNA, 25 bp, Artificial
  probe
  misc_feature (1)..(25): SEQ ID NO: 1401; WAN024CJS; Start 21; Stop 45
tagaccaagtaatggaaccaatcgt

SEQ ID NO: 292981 - DNA, 25 bp, Artificial
  probe
  misc_feature (1)..(25): SEQ ID NO: 1401; WAN024CJS; Start 161; Stop 185
aaagaagtacactgacgagaataca

SEQ ID NO: 292982 - DNA, 25 bp, Artificial
  probe
  misc_feature (1)..(25): SEQ ID NO: 1401; WAN024CJS; Start 37; Stop 61
accaatcgtcggtgtattatctaca

SEQ ID NO: 292983 - DNA, 25 bp, Artificial
  probe
  misc_feature (1)..(25): SEQ ID NO: 1401; WAN024CJS; Start 32; Stop 56
atggaaccaatcgtcggtgtattat

SEQ ID NO: 292984 - DNA, 25 bp, Artificial
  probe
  misc_feature (1)..(25): SEQ ID NO: 1401; WAN024CJS; Start 135; Stop 159
tgacattactcaaacgaaaggctac

SEQ ID NO: 292985 - DNA, 25 bp, Artificial
  probe
  misc_feature (1)..(25): SEQ ID NO: 1401; WAN024CJS; Start 165; Stop 189
aagtacactgacgagaatacatgcg

SEQ ID NO: 292986 - DNA, 25 bp, Artificial
  probe
  misc_feature (1)..(25): SEQ ID NO: 1401; WAN024CJS; Start 31; Stop 55
aatggaaccaatcgtcggtgtatta

SEQ ID NO: 292987 - DNA, 25 bp, Artificial
  probe
  misc_feature (1)..(25): SEQ ID NO: 1401; WAN024CJS; Start 30; Stop 54
taatggaaccaatcgtcggtgtatt

SEQ ID NO: 292988 - DNA, 25 bp, Artificial
  probe
  misc_feature (1)..(25): SEQ ID NO: 1401; WAN024CJS; Start 34; Stop 58
ggaaccaatcgtcggtgtattatct

SEQ ID NO: 292989 - DNA, 25 bp, Artificial
  probe
  misc_feature (1)..(25): SEQ ID NO: 1401; WAN024CJS; Start 33; Stop 57
tggaaccaatcgtcggtgtattatc

SEQ ID NO: 292990 - DNA, 25 bp, Artificial
  probe
  misc_feature (1)..(25): SEQ ID NO: 1401; WAN024CJS; Start 17; Stop 41
gcagtagaccaagtaatggaaccaa

SEQ ID NO: 292991 - DNA, 25 bp, Artificial
  probe
  misc_feature (1)..(25): SEQ ID NO: 1401; WAN024CJS; Start 22; Stop 46
agaccaagtaatggaaccaatcgtc

SEQ ID NO: 292992 - DNA, 25 bp, Artificial
  probe
  misc_feature (1)..(25): SEQ ID NO: 1401; WAN024CJS; Start 29; Stop 53
gtaatggaaccaatcgtcggtgtat

SEQ ID NO: 292993 - DNA, 25 bp, Artificial
  probe
  misc_feature (1)..(25): SEQ ID NO: 1402; WAN024FEA; Start 723; Stop 747
caccatctatcaggtcaatcaagaa

SEQ ID NO: 292994 - DNA, 25 bp, Artificial
  probe
  misc_feature (1)..(25): SEQ ID NO: 1402; WAN024FEA; Start 719; Stop 743
taaccaccatctatcaggtcaatca

SEQ ID NO: 292995 - DNA, 25 bp, Artificial
  probe
  misc_feature (1)..(25): SEQ ID NO: 1402; WAN024FEA; Start 729; Stop 753
ctatcaggtcaatcaagaaatggct

SEQ ID NO: 292996 - DNA, 25 bp, Artificial
  probe
  misc_feature (1)..(25): SEQ ID NO: 1402; WAN024FEA; Start 688; Stop 712
ctccgctatcaaatcttgtcaaatc

SEQ ID NO: 292997 - DNA, 25 bp, Artificial
  probe
  misc_feature (1)..(25): SEQ ID NO: 1402; WAN024FEA; Start 728; Stop 752
tctatcaggtcaatcaagaaatggc

SEQ ID NO: 292998 - DNA, 25 bp, Artificial
  probe
  misc_feature (1)..(25): SEQ ID NO: 1402; WAN024FEA; Start 720; Stop 744
aaccaccatctatcaggtcaatcaa

SEQ ID NO: 292999 - DNA, 25 bp, Artificial
  probe
  misc_feature (1)..(25): SEQ ID NO: 1402; WAN024FEA; Start 588; Stop 612
tcaacatcagaaggaccaagatttc

SEQ ID NO: 293000 - DNA, 25 bp, Artificial
  probe
  misc_feature (1)..(25): SEQ ID NO: 1402; WAN024FEA; Start 722; Stop 746
ccaccatctatcaggtcaatcaaga

SEQ ID NO: 293001 - DNA, 25 bp, Artificial
  probe
  misc_feature (1)..(25): SEQ ID NO: 1402; WAN024FEA; Start 721; Stop 745
accaccatctatcaggtcaatcaag

SEQ ID NO: 293002 - DNA, 25 bp, Artificial
  probe
  misc_feature (1)..(25): SEQ ID NO: 1402; WAN024FEA; Start 727; Stop 751
atctatcaggtcaatcaagaaatgg

SEQ ID NO: 293003 - DNA, 25 bp, Artificial
  probe
  misc_feature (1)..(25): SEQ ID NO: 1402; WAN024FEA; Start 725; Stop 749
ccatctatcaggtcaatcaagaaat

SEQ ID NO: 293004 - DNA, 25 bp, Artificial
  probe
  misc_feature (1)..(25): SEQ ID NO: 1402; WAN024FEA; Start 622; Stop 646
tttatgccttctgttgccctatttg

SEQ ID NO: 293005 - DNA, 25 bp, Artificial
  probe
  misc_feature (1)..(25): SEQ ID NO: 1402; WAN024FEA; Start 656; Stop 680
gtaaggtgatctgggaagactattt

SEQ ID NO: 293006 - DNA, 25 bp, Artificial
  probe
  misc_feature (1)..(25): SEQ ID NO: 1402; WAN024FEA; Start 692; Stop 716
gctatcaaatcttgtcaaatcccga

SEQ ID NO: 293007 - DNA, 25 bp, Artificial
  probe
  misc_feature (1)..(25): SEQ ID NO: 1402; WAN024FEA; Start 689; Stop 713
tccgctatcaaatcttgtcaaatcc

SEQ ID NO: 293008 - DNA, 25 bp, Artificial
  probe
  misc_feature (1)..(25): SEQ ID NO: 1402; WAN024FEA; Start 693; Stop 717
ctatcaaatcttgtcaaatcccgac

SEQ ID NO: 293009 - DNA, 25 bp, Artificial
  probe
  misc_feature (1)..(25): SEQ ID NO: 1402; WAN024FEA; Start 655; Stop 679
agtaaggtgatctgggaagactatt

SEQ ID NO: 293010 - DNA, 25 bp, Artificial
  probe
  misc_feature (1)..(25): SEQ ID NO: 1402; WAN024FEA; Start 790; Stop 814
gtggaagaattggtcgagttagtga

SEQ ID NO: 293011 - DNA, 25 bp, Artificial
  probe
  misc_feature (1)..(25): SEQ ID NO: 1402; WAN024FEA; Start 788; Stop 812
ctgtggaagaattggtcgagttagt

SEQ ID NO: 293012 - DNA, 25 bp, Artificial
  probe
  misc_feature (1)..(25): SEQ ID NO: 1402; WAN024FEA; Start 787; Stop 811
tctgtggaagaattggtcgagttag

SEQ ID NO: 293013 - DNA, 25 bp, Artificial
  probe
  misc_feature (1)..(25): SEQ ID NO: 1402; WAN024FEA; Start 687; Stop 711
gctccgctatcaaatcttgtcaaat

SEQ ID NO: 293014 - DNA, 25 bp, Artificial
  probe
  misc_feature (1)..(25): SEQ ID NO: 1402; WAN024FEA; Start 730; Stop 754
tatcaggtcaatcaagaaatggctg

SEQ ID NO: 293015 - DNA, 25 bp, Artificial
  probe
  misc_feature (1)..(25): SEQ ID NO: 1402; WAN024FEA; Start 586; Stop 610
cgtcaacatcagaaggaccaagatt

SEQ ID NO: 293016 - DNA, 25 bp, Artificial
  probe
  misc_feature (1)..(25): SEQ ID NO: 1402; WAN024FEA; Start 587; Stop 611
gtcaacatcagaaggaccaagattt

SEQ ID NO: 293017 - DNA, 25 bp, Artificial
  probe
  misc_feature (1)..(25): SEQ ID NO: 1402; WAN024FEA; Start 789; Stop 813
tgtggaagaattggtcgagttagtg

SEQ ID NO: 293018 - DNA, 25 bp, Artificial
  probe
  misc_feature (1)..(25): SEQ ID NO: 1402; WAN024FEA; Start 786; Stop 810
gtctgtggaagaattggtcgagtta

SEQ ID NO: 293019 - DNA, 25 bp, Artificial
  probe
  misc_feature (1)..(25): SEQ ID NO: 1402; WAN024FEA; Start 623; Stop 647
ttatgccttctgttgccctatttga

SEQ ID NO: 293020 - DNA, 25 bp, Artificial
  probe
  misc_feature (1)..(25): SEQ ID NO: 1402; WAN024FEA; Start 726; Stop 750
catctatcaggtcaatcaagaaatg

SEQ ID NO: 293021 - DNA, 25 bp, Artificial
  probe
  misc_feature (1)..(25): SEQ ID NO: 1402; WAN024FEA; Start 690; Stop 714
ccgctatcaaatcttgtcaaatccc

SEQ ID NO: 293022 - DNA, 25 bp, Artificial
  probe
  misc_feature (1)..(25): SEQ ID NO: 1402; WAN024FEA; Start 540; Stop 564
ccattctgtgaataaagatgtggac

SEQ ID NO: 293023 - DNA, 25 bp, Artificial
  probe
  misc_feature (1)..(25): SEQ ID NO: 1402; WAN024FEA; Start 724; Stop 748
accatctatcaggtcaatcaagaaa

SEQ ID NO: 293024 - DNA, 25 bp, Artificial
  probe
  misc_feature (1)..(25): SEQ ID NO: 1402; WAN024FEA; Start 654; Stop 678
cagtaaggtgatctgggaagactat

SEQ ID NO: 293025 - DNA, 25 bp, Artificial
  probe
  misc_feature (1)..(25): SEQ ID NO: 1402; WAN024FEA; Start 539; Stop 563
accattctgtgaataaagatgtgga

SEQ ID NO: 293026 - DNA, 25 bp, Artificial
  probe
  misc_feature (1)..(25): SEQ ID NO: 1403; WAN024FT5; Start 16; Stop 40
attattaccatgttgctgttgctag

SEQ ID NO: 293027 - DNA, 25 bp, Artificial
  probe
  misc_feature (1)..(25): SEQ ID NO: 1403; WAN024FT5; Start 15; Stop 39
cattattaccatgttgctgttgcta

SEQ ID NO: 293028 - DNA, 25 bp, Artificial
  probe
  misc_feature (1)..(25): SEQ ID NO: 1403; WAN024FT5; Start 13; Stop 37
atcattattaccatgttgctgttgc

SEQ ID NO: 293029 - DNA, 25 bp, Artificial
  probe
  misc_feature (1)..(25): SEQ ID NO: 1403; WAN024FT5; Start 671; Stop 695
cagtcttggttgaagtgattctagc

SEQ ID NO: 293030 - DNA, 25 bp, Artificial
  probe
  misc_feature (1)..(25): SEQ ID NO: 1403; WAN024FT5; Start 14; Stop 38
tcattattaccatgttgctgttgct

SEQ ID NO: 293031 - DNA, 25 bp, Artificial
  probe
  misc_feature (1)..(25): SEQ ID NO: 1403; WAN024FT5; Start 672; Stop 696
agtcttggttgaagtgattctagca

SEQ ID NO: 293032 - DNA, 25 bp, Artificial
  probe
  misc_feature (1)..(25): SEQ ID NO: 1403; WAN024FT5; Start 425; Stop 449
agaatccacaggttatgcaattact

SEQ ID NO: 293033 - DNA, 25 bp, Artificial
  probe
  misc_feature (1)..(25): SEQ ID NO: 1403; WAN024FT5; Start 424; Stop 448
cagaatccacaggttatgcaattac

SEQ ID NO: 293034 - DNA, 25 bp, Artificial
  probe
  misc_feature (1)..(25): SEQ ID NO: 1403; WAN024FT5; Start 423; Stop 447
tcagaatccacaggttatgcaatta

SEQ ID NO: 293035 - DNA, 25 bp, Artificial
  probe
  misc_feature (1)..(25): SEQ ID NO: 1403; WAN024FT5; Start 670; Stop 694
ccagtcttggttgaagtgattctag

SEQ ID NO: 293036 - DNA, 25 bp, Artificial
  probe
  misc_feature (1)..(25): SEQ ID NO: 1403; WAN024FT5; Start 667; Stop 691
aatccagtcttggttgaagtgattc

SEQ ID NO: 293037 - DNA, 25 bp, Artificial
  probe
  misc_feature (1)..(25): SEQ ID NO: 1403; WAN024FT5; Start 669; Stop 693
tccagtcttggttgaagtgattcta

SEQ ID NO: 293038 - DNA, 25 bp, Artificial
  probe
  misc_feature (1)..(25): SEQ ID NO: 1403; WAN024FT5; Start 43; Stop 67
tttctgataggaagcatttggtttg

SEQ ID NO: 293039 - DNA, 25 bp, Artificial
  probe
  misc_feature (1)..(25): SEQ ID NO: 1403; WAN024FT5; Start 673; Stop 697
gtcttggttgaagtgattctagcac

SEQ ID NO: 293040 - DNA, 25 bp, Artificial
  probe
  misc_feature (1)..(25): SEQ ID NO: 1403; WAN024FT5; Start 416; Stop 440
ttcaaactcagaatccacaggttat

SEQ ID NO: 293041 - DNA, 25 bp, Artificial
  probe
  misc_feature (1)..(25): SEQ ID NO: 1403; WAN024FT5; Start 422; Stop 446
ctcagaatccacaggttatgcaatt

SEQ ID NO: 293042 - DNA, 25 bp, Artificial
  probe
  misc_feature (1)..(25): SEQ ID NO: 1403; WAN024FT5; Start 12; Stop 36
tatcattattaccatgttgctgttg

SEQ ID NO: 293043 - DNA, 25 bp, Artificial
  probe
  misc_feature (1)..(25): SEQ ID NO: 1403; WAN024FT5; Start 417; Stop 441
tcaaactcagaatccacaggttatg

SEQ ID NO: 293044 - DNA, 25 bp, Artificial
  probe
  misc_feature (1)..(25): SEQ ID NO: 1403; WAN024FT5; Start 415; Stop 439
gttcaaactcagaatccacaggtta

SEQ ID NO: 293045 - DNA, 25 bp, Artificial
  probe
  misc_feature (1)..(25): SEQ ID NO: 1403; WAN024FT5; Start 668; Stop 692
atccagtcttggttgaagtgattct

SEQ ID NO: 293046 - DNA, 25 bp, Artificial
  probe
  misc_feature (1)..(25): SEQ ID NO: 1403; WAN024FT5; Start 10; Stop 34
catatcattattaccatgttgctgt

SEQ ID NO: 293047 - DNA, 25 bp, Artificial
  probe
  misc_feature (1)..(25): SEQ ID NO: 1403; WAN024FT5; Start 426; Stop 450
gaatccacaggttatgcaattactg

SEQ ID NO: 293048 - DNA, 25 bp, Artificial
  probe
  misc_feature (1)..(25): SEQ ID NO: 1403; WAN024FT5; Start 9; Stop 33
tcatatcattattaccatgttgctg

SEQ ID NO: 293049 - DNA, 25 bp, Artificial
  probe
  misc_feature (1)..(25): SEQ ID NO: 1403; WAN024FT5; Start 421; Stop 445
actcagaatccacaggttatgcaat

SEQ ID NO: 293050 - DNA, 25 bp, Artificial
  probe
  misc_feature (1)..(25): SEQ ID NO: 1403; WAN024FT5; Start 418; Stop 442
caaactcagaatccacaggttatgc

SEQ ID NO: 293051 - DNA, 25 bp, Artificial
  probe
  misc_feature (1)..(25): SEQ ID NO: 1403; WAN024FT5; Start 420; Stop 444
aactcagaatccacaggttatgcaa

SEQ ID NO: 293052 - DNA, 25 bp, Artificial
  probe
  misc_feature (1)..(25): SEQ ID NO: 1403; WAN024FT5; Start 118; Stop 142
gctttctttgtctcttcgcagattt

SEQ ID NO: 293053 - DNA, 25 bp, Artificial
  probe
  misc_feature (1)..(25): SEQ ID NO: 1403; WAN024FT5; Start 11; Stop 35
atatcattattaccatgttgctgtt

SEQ ID NO: 293054 - DNA, 25 bp, Artificial
  probe
  misc_feature (1)..(25): SEQ ID NO: 1403; WAN024FT5; Start 572; Stop 596
ttcgccagaagaaatggatttatct

SEQ ID NO: 293055 - DNA, 25 bp, Artificial
  probe
  misc_feature (1)..(25): SEQ ID NO: 1403; WAN024FT5; Start 571; Stop 595
gttcgccagaagaaatggatttatc

SEQ ID NO: 293056 - DNA, 25 bp, Artificial
  probe
  misc_feature (1)..(25): SEQ ID NO: 1403; WAN024FT5; Start 575; Stop 599
gccagaagaaatggatttatctcct

SEQ ID NO: 293057 - DNA, 25 bp, Artificial
  probe
  misc_feature (1)..(25): SEQ ID NO: 1403; WAN024FT5; Start 666; Stop 690
aaatccagtcttggttgaagtgatt

SEQ ID NO: 293058 - DNA, 25 bp, Artificial
  probe
  misc_feature (1)..(25): SEQ ID NO: 1403; WAN024FT5; Start 573; Stop 597
tcgccagaagaaatggatttatctc

SEQ ID NO: 293059 - DNA, 25 bp, Artificial
  probe
  misc_feature (1)..(25): SEQ ID NO: 1404; WAN024DHG; Start 927; Stop 951
tgctcttccaacacagtataattca

SEQ ID NO: 293060 - DNA, 25 bp, Artificial
  probe
  misc_feature (1)..(25): SEQ ID NO: 1404; WAN024DHG; Start 928; Stop 952
gctcttccaacacagtataattcag

SEQ ID NO: 293061 - DNA, 25 bp, Artificial
  probe
  misc_feature (1)..(25): SEQ ID NO: 1404; WAN024DHG; Start 929; Stop 953
ctcttccaacacagtataattcagg

SEQ ID NO: 293062 - DNA, 25 bp, Artificial
  probe
  misc_feature (1)..(25): SEQ ID NO: 1404; WAN024DHG; Start 935; Stop 959
caacacagtataattcaggagaagg

SEQ ID NO: 293063 - DNA, 25 bp, Artificial
  probe
  misc_feature (1)..(25): SEQ ID NO: 1404; WAN024DHG; Start 934; Stop 958
ccaacacagtataattcaggagaag

SEQ ID NO: 293064 - DNA, 25 bp, Artificial
  probe
  misc_feature (1)..(25): SEQ ID NO: 1404; WAN024DHG; Start 61; Stop 85
ggagcatataatgaagatggtaagg

SEQ ID NO: 293065 - DNA, 25 bp, Artificial
  probe
  misc_feature (1)..(25): SEQ ID NO: 1404; WAN024DHG; Start 925; Stop 949
tctgctcttccaacacagtataatt

SEQ ID NO: 293066 - DNA, 25 bp, Artificial
  probe
  misc_feature (1)..(25): SEQ ID NO: 1404; WAN024DHG; Start 923; Stop 947
aatctgctcttccaacacagtataa

SEQ ID NO: 293067 - DNA, 25 bp, Artificial
  probe
  misc_feature (1)..(25): SEQ ID NO: 1404; WAN024DHG; Start 926; Stop 950
ctgctcttccaacacagtataattc

SEQ ID NO: 293068 - DNA, 25 bp, Artificial
  probe
  misc_feature (1)..(25): SEQ ID NO: 1404; WAN024DHG; Start 924; Stop 948
atctgctcttccaacacagtataat

SEQ ID NO: 293069 - DNA, 25 bp, Artificial
  probe
  misc_feature (1)..(25): SEQ ID NO: 1404; WAN024DHG; Start 922; Stop 946
caatctgctcttccaacacagtata

SEQ ID NO: 293070 - DNA, 25 bp, Artificial
  probe
  misc_feature (1)..(25): SEQ ID NO: 1404; WAN024DHG; Start 777; Stop 801
gcatgttagaggttattatccgaat

SEQ ID NO: 293071 - DNA, 25 bp, Artificial
  probe
  misc_feature (1)..(25): SEQ ID NO: 1404; WAN024DHG; Start 933; Stop 957
tccaacacagtataattcaggagaa

SEQ ID NO: 293072 - DNA, 25 bp, Artificial
  probe
  misc_feature (1)..(25): SEQ ID NO: 1404; WAN024DHG; Start 932; Stop 956
ttccaacacagtataattcaggaga

SEQ ID NO: 293073 - DNA, 25 bp, Artificial
  probe
  misc_feature (1)..(25): SEQ ID NO: 1404; WAN024DHG; Start 930; Stop 954
tcttccaacacagtataattcagga

SEQ ID NO: 293074 - DNA, 25 bp, Artificial
  probe
  misc_feature (1)..(25): SEQ ID NO: 1404; WAN024DHG; Start 931; Stop 955
cttccaacacagtataattcaggag

SEQ ID NO: 293075 - DNA, 25 bp, Artificial
  probe
  misc_feature (1)..(25): SEQ ID NO: 1404; WAN024DHG; Start 640; Stop 664
attgctcgtgagattaattcagagt

SEQ ID NO: 293076 - DNA, 25 bp, Artificial
  probe
  misc_feature (1)..(25): SEQ ID NO: 1404; WAN024DHG; Start 641; Stop 665
ttgctcgtgagattaattcagagtt

SEQ ID NO: 293077 - DNA, 25 bp, Artificial
  probe
  misc_feature (1)..(25): SEQ ID NO: 1404; WAN024DHG; Start 769; Stop 793
tcagatgtgcatgttagaggttatt

SEQ ID NO: 293078 - DNA, 25 bp, Artificial
  probe
  misc_feature (1)..(25): SEQ ID NO: 1404; WAN024DHG; Start 768; Stop 792
ttcagatgtgcatgttagaggttat

SEQ ID NO: 293079 - DNA, 25 bp, Artificial
  probe
  misc_feature (1)..(25): SEQ ID NO: 1404; WAN024DHG; Start 776; Stop 800
tgcatgttagaggttattatccgaa

SEQ ID NO: 293080 - DNA, 25 bp, Artificial
  probe
  misc_feature (1)..(25): SEQ ID NO: 1404; WAN024DHG; Start 639; Stop 663
aattgctcgtgagattaattcagag

SEQ ID NO: 293081 - DNA, 25 bp, Artificial
  probe
  misc_feature (1)..(25): SEQ ID NO: 1404; WAN024DHG; Start 921; Stop 945
tcaatctgctcttccaacacagtat

SEQ ID NO: 293082 - DNA, 25 bp, Artificial
  probe
  misc_feature (1)..(25): SEQ ID NO: 1404; WAN024DHG; Start 775; Stop 799
gtgcatgttagaggttattatccga

SEQ ID NO: 293083 - DNA, 25 bp, Artificial
  probe
  misc_feature (1)..(25): SEQ ID NO: 1404; WAN024DHG; Start 774; Stop 798
tgtgcatgttagaggttattatccg

SEQ ID NO: 293084 - DNA, 25 bp, Artificial
  probe
  misc_feature (1)..(25): SEQ ID NO: 1404; WAN024DHG; Start 698; Stop 722
cttatccaatgactccaaatccaaa

SEQ ID NO: 293085 - DNA, 25 bp, Artificial
  probe
  misc_feature (1)..(25): SEQ ID NO: 1404; WAN024DHG; Start 545; Stop 569
gtggaggaatagatatacctaagga

SEQ ID NO: 293086 - DNA, 25 bp, Artificial
  probe
  misc_feature (1)..(25): SEQ ID NO: 1404; WAN024DHG; Start 544; Stop 568
agtggaggaatagatatacctaagg

SEQ ID NO: 293087 - DNA, 25 bp, Artificial
  probe
  misc_feature (1)..(25): SEQ ID NO: 1404; WAN024DHG; Start 938; Stop 962
cacagtataattcaggagaagggaa

SEQ ID NO: 293088 - DNA, 25 bp, Artificial
  probe
  misc_feature (1)..(25): SEQ ID NO: 1404; WAN024DHG; Start 936; Stop 960
aacacagtataattcaggagaaggg

SEQ ID NO: 293089 - DNA, 25 bp, Artificial
  probe
  misc_feature (1)..(25): SEQ ID NO: 1404; WAN024DHG; Start 773; Stop 797
atgtgcatgttagaggttattatcc

SEQ ID NO: 293090 - DNA, 25 bp, Artificial
  probe
  misc_feature (1)..(25): SEQ ID NO: 1404; WAN024DHG; Start 770; Stop 794
cagatgtgcatgttagaggttatta

SEQ ID NO: 293091 - DNA, 25 bp, Artificial
  probe
  misc_feature (1)..(25): SEQ ID NO: 1404; WAN024DHG; Start 546; Stop 570
tggaggaatagatatacctaaggag

SEQ ID NO: 293092 - DNA, 25 bp, Artificial
  probe
  misc_feature (1)..(25): SEQ ID NO: 1405; WAN024CFQ; Start 19; Stop 43
ttagaagaaaaggtcactaggcaag

SEQ ID NO: 293093 - DNA, 25 bp, Artificial
  probe
  misc_feature (1)..(25): SEQ ID NO: 1405; WAN024CFQ; Start 18; Stop 42
cttagaagaaaaggtcactaggcaa

SEQ ID NO: 293094 - DNA, 25 bp, Artificial
  probe
  misc_feature (1)..(25): SEQ ID NO: 1405; WAN024CFQ; Start 23; Stop 47
aagaaaaggtcactaggcaagaaag

SEQ ID NO: 293095 - DNA, 25 bp, Artificial
  probe
  misc_feature (1)..(25): SEQ ID NO: 1405; WAN024CFQ; Start 20; Stop 44
tagaagaaaaggtcactaggcaaga

SEQ ID NO: 293096 - DNA, 25 bp, Artificial
  probe
  misc_feature (1)..(25): SEQ ID NO: 1405; WAN024CFQ; Start 22; Stop 46
gaagaaaaggtcactaggcaagaaa

SEQ ID NO: 293097 - DNA, 25 bp, Artificial
  probe
  misc_feature (1)..(25): SEQ ID NO: 1405; WAN024CFQ; Start 184; Stop 208
gaaagacaattcgatgattctgaat

SEQ ID NO: 293098 - DNA, 25 bp, Artificial
  probe
  misc_feature (1)..(25): SEQ ID NO: 1405; WAN024CFQ; Start 183; Stop 207
agaaagacaattcgatgattctgaa

SEQ ID NO: 293099 - DNA, 25 bp, Artificial
  probe
  misc_feature (1)..(25): SEQ ID NO: 1405; WAN024CFQ; Start 182; Stop 206
aagaaagacaattcgatgattctga

SEQ ID NO: 293100 - DNA, 25 bp, Artificial
  probe
  misc_feature (1)..(25): SEQ ID NO: 1405; WAN024CFQ; Start 21; Stop 45
agaagaaaaggtcactaggcaagaa

SEQ ID NO: 293101 - DNA, 25 bp, Artificial
  probe
  misc_feature (1)..(25): SEQ ID NO: 1405; WAN024CFQ; Start 195; Stop 219
cgatgattctgaatttagaaaggat

SEQ ID NO: 293102 - DNA, 25 bp, Artificial
  probe
  misc_feature (1)..(25): SEQ ID NO: 1405; WAN024CFQ; Start 181; Stop 205
aaagaaagacaattcgatgattctg

SEQ ID NO: 293103 - DNA, 25 bp, Artificial
  probe
  misc_feature (1)..(25): SEQ ID NO: 1405; WAN024CFQ; Start 194; Stop 218
tcgatgattctgaatttagaaagga

SEQ ID NO: 293104 - DNA, 25 bp, Artificial
  probe
  misc_feature (1)..(25): SEQ ID NO: 1405; WAN024CFQ; Start 17; Stop 41
gcttagaagaaaaggtcactaggca

SEQ ID NO: 293105 - DNA, 25 bp, Artificial
  probe
  misc_feature (1)..(25): SEQ ID NO: 1405; WAN024CFQ; Start 193; Stop 217
ttcgatgattctgaatttagaaagg

SEQ ID NO: 293106 - DNA, 25 bp, Artificial
  probe
  misc_feature (1)..(25): SEQ ID NO: 1405; WAN024CFQ; Start 140; Stop 164
gtcacatgagttttgaagaagctct

SEQ ID NO: 293107 - DNA, 25 bp, Artificial
  probe
  misc_feature (1)..(25): SEQ ID NO: 1405; WAN024CFQ; Start 139; Stop 163
agtcacatgagttttgaagaagctc

SEQ ID NO: 293108 - DNA, 25 bp, Artificial
  probe
  misc_feature (1)..(25): SEQ ID NO: 1405; WAN024CFQ; Start 198; Stop 222
tgattctgaatttagaaaggatgaa

SEQ ID NO: 293109 - DNA, 25 bp, Artificial
  probe
  misc_feature (1)..(25): SEQ ID NO: 1405; WAN024CFQ; Start 197; Stop 221
atgattctgaatttagaaaggatga

SEQ ID NO: 293110 - DNA, 25 bp, Artificial
  probe
  misc_feature (1)..(25): SEQ ID NO: 1405; WAN024CFQ; Start 16; Stop 40
cgcttagaagaaaaggtcactaggc

SEQ ID NO: 293111 - DNA, 25 bp, Artificial
  probe
  misc_feature (1)..(25): SEQ ID NO: 1405; WAN024CFQ; Start 196; Stop 220
gatgattctgaatttagaaaggatg

SEQ ID NO: 293112 - DNA, 25 bp, Artificial
  probe
  misc_feature (1)..(25): SEQ ID NO: 1405; WAN024CFQ; Start 144; Stop 168
catgagttttgaagaagctcttgac

SEQ ID NO: 293113 - DNA, 25 bp, Artificial
  probe
  misc_feature (1)..(25): SEQ ID NO: 1405; WAN024CFQ; Start 143; Stop 167
acatgagttttgaagaagctcttga

SEQ ID NO: 293114 - DNA, 25 bp, Artificial
  probe
  misc_feature (1)..(25): SEQ ID NO: 1405; WAN024CFQ; Start 142; Stop 166
cacatgagttttgaagaagctcttg

SEQ ID NO: 293115 - DNA, 25 bp, Artificial
  probe
  misc_feature (1)..(25): SEQ ID NO: 1405; WAN024CFQ; Start 141; Stop 165
tcacatgagttttgaagaagctctt

SEQ ID NO: 293116 - DNA, 25 bp, Artificial
  probe
  misc_feature (1)..(25): SEQ ID NO: 1405; WAN024CFQ; Start 147; Stop 171
gagttttgaagaagctcttgaccat

SEQ ID NO: 293117 - DNA, 25 bp, Artificial
  probe
  misc_feature (1)..(25): SEQ ID NO: 1405; WAN024CFQ; Start 145; Stop 169
atgagttttgaagaagctcttgacc

SEQ ID NO: 293118 - DNA, 25 bp, Artificial
  probe
  misc_feature (1)..(25): SEQ ID NO: 1405; WAN024CFQ; Start 148; Stop 172
agttttgaagaagctcttgaccatg

SEQ ID NO: 293119 - DNA, 25 bp, Artificial
  probe
  misc_feature (1)..(25): SEQ ID NO: 1405; WAN024CFQ; Start 199; Stop 223
gattctgaatttagaaaggatgaaa

SEQ ID NO: 293120 - DNA, 25 bp, Artificial
  probe
  misc_feature (1)..(25): SEQ ID NO: 1405; WAN024CFQ; Start 186; Stop 210
aagacaattcgatgattctgaattt

SEQ ID NO: 293121 - DNA, 25 bp, Artificial
  probe
  misc_feature (1)..(25): SEQ ID NO: 1405; WAN024CFQ; Start 185; Stop 209
aaagacaattcgatgattctgaatt

SEQ ID NO: 293122 - DNA, 25 bp, Artificial
  probe
  misc_feature (1)..(25): SEQ ID NO: 1405; WAN024CFQ; Start 146; Stop 170
tgagttttgaagaagctcttgacca

SEQ ID NO: 293123 - DNA, 25 bp, Artificial
  probe
  misc_feature (1)..(25): SEQ ID NO: 1405; WAN024CFQ; Start 192; Stop 216
attcgatgattctgaatttagaaag

SEQ ID NO: 293124 - DNA, 25 bp, Artificial
  probe
  misc_feature (1)..(25): SEQ ID NO: 1405; WAN024CFQ; Start 149; Stop 173
gttttgaagaagctcttgaccatgc

SEQ ID NO: 293125 - DNA, 25 bp, Artificial
  probe
  misc_feature (1)..(25): SEQ ID NO: 1406; WAN024C7K; Start 304; Stop 328
agcaagtcttatacgattgaggatg

SEQ ID NO: 293126 - DNA, 25 bp, Artificial
  probe
  misc_feature (1)..(25): SEQ ID NO: 1406; WAN024C7K; Start 302; Stop 326
ttagcaagtcttatacgattgagga

SEQ ID NO: 293127 - DNA, 25 bp, Artificial
  probe
  misc_feature (1)..(25): SEQ ID NO: 1406; WAN024C7K; Start 303; Stop 327
tagcaagtcttatacgattgaggat

SEQ ID NO: 293128 - DNA, 25 bp, Artificial
  probe
  misc_feature (1)..(25): SEQ ID NO: 1406; WAN024C7K; Start 573; Stop 597
tatgatagttgacagtacagttgct

SEQ ID NO: 293129 - DNA, 25 bp, Artificial
  probe
  misc_feature (1)..(25): SEQ ID NO: 1406; WAN024C7K; Start 577; Stop 601
atagttgacagtacagttgctcttc

SEQ ID NO: 293130 - DNA, 25 bp, Artificial
  probe
  misc_feature (1)..(25): SEQ ID NO: 1406; WAN024C7K; Start 576; Stop 600
gatagttgacagtacagttgctctt

SEQ ID NO: 293131 - DNA, 25 bp, Artificial
  probe
  misc_feature (1)..(25): SEQ ID NO: 1406; WAN024C7K; Start 574; Stop 598
atgatagttgacagtacagttgctc

SEQ ID NO: 293132 - DNA, 25 bp, Artificial
  probe
  misc_feature (1)..(25): SEQ ID NO: 1406; WAN024C7K; Start 572; Stop 596
ttatgatagttgacagtacagttgc

SEQ ID NO: 293133 - DNA, 25 bp, Artificial
  probe
  misc_feature (1)..(25): SEQ ID NO: 1406; WAN024C7K; Start 575; Stop 599
tgatagttgacagtacagttgctct

SEQ ID NO: 293134 - DNA, 25 bp, Artificial
  probe
  misc_feature (1)..(25): SEQ ID NO: 1406; WAN024C7K; Start 306; Stop 330
caagtcttatacgattgaggatgcg

SEQ ID NO: 293135 - DNA, 25 bp, Artificial
  probe
  misc_feature (1)..(25): SEQ ID NO: 1406; WAN024C7K; Start 582; Stop 606
tgacagtacagttgctcttccatat

SEQ ID NO: 293136 - DNA, 25 bp, Artificial
  probe
  misc_feature (1)..(25): SEQ ID NO: 1406; WAN024C7K; Start 581; Stop 605
ttgacagtacagttgctcttccata

SEQ ID NO: 293137 - DNA, 25 bp, Artificial
  probe
  misc_feature (1)..(25): SEQ ID NO: 1406; WAN024C7K; Start 307; Stop 331
aagtcttatacgattgaggatgcgg

SEQ ID NO: 293138 - DNA, 25 bp, Artificial
  probe
  misc_feature (1)..(25): SEQ ID NO: 1406; WAN024C7K; Start 578; Stop 602
tagttgacagtacagttgctcttcc

SEQ ID NO: 293139 - DNA, 25 bp, Artificial
  probe
  misc_feature (1)..(25): SEQ ID NO: 1406; WAN024C7K; Start 309; Stop 333
gtcttatacgattgaggatgcggtt

SEQ ID NO: 293140 - DNA, 25 bp, Artificial
  probe
  misc_feature (1)..(25): SEQ ID NO: 1406; WAN024C7K; Start 753; Stop 777
cgatagtatgttgcttgtatttcca

SEQ ID NO: 293141 - DNA, 25 bp, Artificial
  probe
  misc_feature (1)..(25): SEQ ID NO: 1406; WAN024C7K; Start 360; Stop 384
gggctttggatttaatgctttacta

SEQ ID NO: 293142 - DNA, 25 bp, Artificial
  probe
  misc_feature (1)..(25): SEQ ID NO: 1406; WAN024C7K; Start 648; Stop 672
tgctggacaatttggtgatttacta

SEQ ID NO: 293143 - DNA, 25 bp, Artificial
  probe
  misc_feature (1)..(25): SEQ ID NO: 1406; WAN024C7K; Start 694; Stop 718
tttggtgttaaggattctgggaaat

SEQ ID NO: 293144 - DNA, 25 bp, Artificial
  probe
  misc_feature (1)..(25): SEQ ID NO: 1406; WAN024C7K; Start 649; Stop 673
gctggacaatttggtgatttactag

SEQ ID NO: 293145 - DNA, 25 bp, Artificial
  probe
  misc_feature (1)..(25): SEQ ID NO: 1406; WAN024C7K; Start 359; Stop 383
tgggctttggatttaatgctttact

SEQ ID NO: 293146 - DNA, 25 bp, Artificial
  probe
  misc_feature (1)..(25): SEQ ID NO: 1406; WAN024C7K; Start 358; Stop 382
gtgggctttggatttaatgctttac

SEQ ID NO: 293147 - DNA, 25 bp, Artificial
  probe
  misc_feature (1)..(25): SEQ ID NO: 1406; WAN024C7K; Start 695; Stop 719
ttggtgttaaggattctgggaaatt

SEQ ID NO: 293148 - DNA, 25 bp, Artificial
  probe
  misc_feature (1)..(25): SEQ ID NO: 1406; WAN024C7K; Start 456; Stop 480
ctatcttgttgggatgaactatggg

SEQ ID NO: 293149 - DNA, 25 bp, Artificial
  probe
  misc_feature (1)..(25): SEQ ID NO: 1406; WAN024C7K; Start 455; Stop 479
cctatcttgttgggatgaactatgg

SEQ ID NO: 293150 - DNA, 25 bp, Artificial
  probe
  misc_feature (1)..(25): SEQ ID NO: 1406; WAN024C7K; Start 372; Stop 396
taatgctttactagatgctcgtgtt

SEQ ID NO: 293151 - DNA, 25 bp, Artificial
  probe
  misc_feature (1)..(25): SEQ ID NO: 1406; WAN024C7K; Start 371; Stop 395
ttaatgctttactagatgctcgtgt

SEQ ID NO: 293152 - DNA, 25 bp, Artificial
  probe
  misc_feature (1)..(25): SEQ ID NO: 1406; WAN024C7K; Start 370; Stop 394
tttaatgctttactagatgctcgtg

SEQ ID NO: 293153 - DNA, 25 bp, Artificial
  probe
  misc_feature (1)..(25): SEQ ID NO: 1406; WAN024C7K; Start 457; Stop 481
tatcttgttgggatgaactatggga

SEQ ID NO: 293154 - DNA, 25 bp, Artificial
  probe
  misc_feature (1)..(25): SEQ ID NO: 1406; WAN024C7K; Start 757; Stop 781
agtatgttgcttgtatttccaatca

SEQ ID NO: 293155 - DNA, 25 bp, Artificial
  probe
  misc_feature (1)..(25): SEQ ID NO: 1406; WAN024C7K; Start 454; Stop 478
gcctatcttgttgggatgaactatg

SEQ ID NO: 293156 - DNA, 25 bp, Artificial
  probe
  misc_feature (1)..(25): SEQ ID NO: 1406; WAN024C7K; Start 650; Stop 674
ctggacaatttggtgatttactaga

SEQ ID NO: 293157 - DNA, 25 bp, Artificial
  probe
  misc_feature (1)..(25): SEQ ID NO: 1406; WAN024C7K; Start 580; Stop 604
gttgacagtacagttgctcttccat

SEQ ID NO: 293158 - DNA, 25 bp, Artificial
  probe
  misc_feature (1)..(25): SEQ ID NO: 1407; WAN024D6M; Start 558; Stop 582
cttcagcaataccttcactatcctc

SEQ ID NO: 293159 - DNA, 25 bp, Artificial
  probe
  misc_feature (1)..(25): SEQ ID NO: 1407; WAN024D6M; Start 559; Stop 583
ttcagcaataccttcactatcctca

SEQ ID NO: 293160 - DNA, 25 bp, Artificial
  probe
  misc_feature (1)..(25): SEQ ID NO: 1407; WAN024D6M; Start 563; Stop 587
gcaataccttcactatcctcagtaa

SEQ ID NO: 293161 - DNA, 25 bp, Artificial
  probe
  misc_feature (1)..(25): SEQ ID NO: 1407; WAN024D6M; Start 566; Stop 590
ataccttcactatcctcagtaacga

SEQ ID NO: 293162 - DNA, 25 bp, Artificial
  probe
  misc_feature (1)..(25): SEQ ID NO: 1407; WAN024D6M; Start 565; Stop 589
aataccttcactatcctcagtaacg

SEQ ID NO: 293163 - DNA, 25 bp, Artificial
  probe
  misc_feature (1)..(25): SEQ ID NO: 1407; WAN024D6M; Start 562; Stop 586
agcaataccttcactatcctcagta

SEQ ID NO: 293164 - DNA, 25 bp, Artificial
  probe
  misc_feature (1)..(25): SEQ ID NO: 1407; WAN024D6M; Start 560; Stop 584
tcagcaataccttcactatcctcag

SEQ ID NO: 293165 - DNA, 25 bp, Artificial
  probe
  misc_feature (1)..(25): SEQ ID NO: 1407; WAN024D6M; Start 163; Stop 187
aaggaatgtggctatctactgactg

SEQ ID NO: 293166 - DNA, 25 bp, Artificial
  probe
  misc_feature (1)..(25): SEQ ID NO: 1407; WAN024D6M; Start 162; Stop 186
caaggaatgtggctatctactgact

SEQ ID NO: 293167 - DNA, 25 bp, Artificial
  probe
  misc_feature (1)..(25): SEQ ID NO: 1407; WAN024D6M; Start 567; Stop 591
taccttcactatcctcagtaacgac

SEQ ID NO: 293168 - DNA, 25 bp, Artificial
  probe
  misc_feature (1)..(25): SEQ ID NO: 1407; WAN024D6M; Start 496; Stop 520
cattatctggacaagcactcacttc

SEQ ID NO: 293169 - DNA, 25 bp, Artificial
  probe
  misc_feature (1)..(25): SEQ ID NO: 1407; WAN024D6M; Start 564; Stop 588
caataccttcactatcctcagtaac

SEQ ID NO: 293170 - DNA, 25 bp, Artificial
  probe
  misc_feature (1)..(25): SEQ ID NO: 1407; WAN024D6M; Start 497; Stop 521
attatctggacaagcactcacttca

SEQ ID NO: 293171 - DNA, 25 bp, Artificial
  probe
  misc_feature (1)..(25): SEQ ID NO: 1407; WAN024D6M; Start 260; Stop 284
tagactatacaagtgaccagattca

SEQ ID NO: 293172 - DNA, 25 bp, Artificial
  probe
  misc_feature (1)..(25): SEQ ID NO: 1407; WAN024D6M; Start 561; Stop 585
cagcaataccttcactatcctcagt

SEQ ID NO: 293173 - DNA, 25 bp, Artificial
  probe
  misc_feature (1)..(25): SEQ ID NO: 1407; WAN024D6M; Start 166; Stop 190
gaatgtggctatctactgactgacc

SEQ ID NO: 293174 - DNA, 25 bp, Artificial
  probe
  misc_feature (1)..(25): SEQ ID NO: 1407; WAN024D6M; Start 165; Stop 189
ggaatgtggctatctactgactgac

SEQ ID NO: 293175 - DNA, 25 bp, Artificial
  probe
  misc_feature (1)..(25): SEQ ID NO: 1407; WAN024D6M; Start 554; Stop 578
atggcttcagcaataccttcactat

SEQ ID NO: 293176 - DNA, 25 bp, Artificial
  probe
  misc_feature (1)..(25): SEQ ID NO: 1407; WAN024D6M; Start 164; Stop 188
aggaatgtggctatctactgactga

SEQ ID NO: 293177 - DNA, 25 bp, Artificial
  probe
  misc_feature (1)..(25): SEQ ID NO: 1407; WAN024D6M; Start 160; Stop 184
gacaaggaatgtggctatctactga

SEQ ID NO: 293178 - DNA, 25 bp, Artificial
  probe
  misc_feature (1)..(25): SEQ ID NO: 1407; WAN024D6M; Start 557; Stop 581
gcttcagcaataccttcactatcct

SEQ ID NO: 293179 - DNA, 25 bp, Artificial
  probe
  misc_feature (1)..(25): SEQ ID NO: 1407; WAN024D6M; Start 167; Stop 191
aatgtggctatctactgactgacct

SEQ ID NO: 293180 - DNA, 25 bp, Artificial
  probe
  misc_feature (1)..(25): SEQ ID NO: 1407; WAN024D6M; Start 157; Stop 181
aaggacaaggaatgtggctatctac

SEQ ID NO: 293181 - DNA, 25 bp, Artificial
  probe
  misc_feature (1)..(25): SEQ ID NO: 1407; WAN024D6M; Start 50; Stop 74
tagacctgcataagattaccaacaa

SEQ ID NO: 293182 - DNA, 25 bp, Artificial
  probe
  misc_feature (1)..(25): SEQ ID NO: 1407; WAN024D6M; Start 49; Stop 73
atagacctgcataagattaccaaca

SEQ ID NO: 293183 - DNA, 25 bp, Artificial
  probe
  misc_feature (1)..(25): SEQ ID NO: 1407; WAN024D6M; Start 587; Stop 611
acgacgaggatttacaagtgaatat

SEQ ID NO: 293184 - DNA, 25 bp, Artificial
  probe
  misc_feature (1)..(25): SEQ ID NO: 1407; WAN024D6M; Start 586; Stop 610
aacgacgaggatttacaagtgaata

SEQ ID NO: 293185 - DNA, 25 bp, Artificial
  probe
  misc_feature (1)..(25): SEQ ID NO: 1407; WAN024D6M; Start 585; Stop 609
taacgacgaggatttacaagtgaat

SEQ ID NO: 293186 - DNA, 25 bp, Artificial
  probe
  misc_feature (1)..(25): SEQ ID NO: 1407; WAN024D6M; Start 161; Stop 185
acaaggaatgtggctatctactgac

SEQ ID NO: 293187 - DNA, 25 bp, Artificial
  probe
  misc_feature (1)..(25): SEQ ID NO: 1407; WAN024D6M; Start 259; Stop 283
ttagactatacaagtgaccagattc

SEQ ID NO: 293188 - DNA, 25 bp, Artificial
  probe
  misc_feature (1)..(25): SEQ ID NO: 1407; WAN024D6M; Start 570; Stop 594
cttcactatcctcagtaacgacgag

SEQ ID NO: 293189 - DNA, 25 bp, Artificial
  probe
  misc_feature (1)..(25): SEQ ID NO: 1407; WAN024D6M; Start 48; Stop 72
catagacctgcataagattaccaac

SEQ ID NO: 293190 - DNA, 25 bp, Artificial
  probe
  misc_feature (1)..(25): SEQ ID NO: 1407; WAN024D6M; Start 498; Stop 522
ttatctggacaagcactcacttcac

SEQ ID NO: 293191 - DNA, 25 bp, Artificial
  probe
  misc_feature (1)..(25): SEQ ID NO: 1408; WAN024CKX; Start 649; Stop 673
gtagattcggtatatcgtgttccaa

SEQ ID NO: 293192 - DNA, 25 bp, Artificial
  probe
  misc_feature (1)..(25): SEQ ID NO: 1408; WAN024CKX; Start 650; Stop 674
tagattcggtatatcgtgttccaat

SEQ ID NO: 293193 - DNA, 25 bp, Artificial
  probe
  misc_feature (1)..(25): SEQ ID NO: 1408; WAN024CKX; Start 204; Stop 228
atctacaagtaattcagcgagttca

SEQ ID NO: 293194 - DNA, 25 bp, Artificial
  probe
  misc_feature (1)..(25): SEQ ID NO: 1408; WAN024CKX; Start 206; Stop 230
ctacaagtaattcagcgagttcaac

SEQ ID NO: 293195 - DNA, 25 bp, Artificial
  probe
  misc_feature (1)..(25): SEQ ID NO: 1408; WAN024CKX; Start 205; Stop 229
tctacaagtaattcagcgagttcaa

SEQ ID NO: 293196 - DNA, 25 bp, Artificial
  probe
  misc_feature (1)..(25): SEQ ID NO: 1408; WAN024CKX; Start 1089; Stop 1113
aattaactacttcaatggtggagga

SEQ ID NO: 293197 - DNA, 25 bp, Artificial
  probe
  misc_feature (1)..(25): SEQ ID NO: 1408; WAN024CKX; Start 911; Stop 935
ataatacatctacaatgacgacgca

SEQ ID NO: 293198 - DNA, 25 bp, Artificial
  probe
  misc_feature (1)..(25): SEQ ID NO: 1408; WAN024CKX; Start 640; Stop 664
ggtgaaggtgtagattcggtatatc

SEQ ID NO: 293199 - DNA, 25 bp, Artificial
  probe
  misc_feature (1)..(25): SEQ ID NO: 1408; WAN024CKX; Start 651; Stop 675
agattcggtatatcgtgttccaatt

SEQ ID NO: 293200 - DNA, 25 bp, Artificial
  probe
  misc_feature (1)..(25): SEQ ID NO: 1408; WAN024CKX; Start 773; Stop 797
caagtatgcgtcctggatattctat

SEQ ID NO: 293201 - DNA, 25 bp, Artificial
  probe
  misc_feature (1)..(25): SEQ ID NO: 1408; WAN024CKX; Start 647; Stop 671
gtgtagattcggtatatcgtgttcc

SEQ ID NO: 293202 - DNA, 25 bp, Artificial
  probe
  misc_feature (1)..(25): SEQ ID NO: 1408; WAN024CKX; Start 646; Stop 670
ggtgtagattcggtatatcgtgttc

SEQ ID NO: 293203 - DNA, 25 bp, Artificial
  probe
  misc_feature (1)..(25): SEQ ID NO: 1408; WAN024CKX; Start 1090; Stop 1114
attaactacttcaatggtggaggaa

SEQ ID NO: 293204 - DNA, 25 bp, Artificial
  probe
  misc_feature (1)..(25): SEQ ID NO: 1408; WAN024CKX; Start 639; Stop 663
aggtgaaggtgtagattcggtatat

SEQ ID NO: 293205 - DNA, 25 bp, Artificial
  probe
  misc_feature (1)..(25): SEQ ID NO: 1408; WAN024CKX; Start 643; Stop 667
gaaggtgtagattcggtatatcgtg

SEQ ID NO: 293206 - DNA, 25 bp, Artificial
  probe
  misc_feature (1)..(25): SEQ ID NO: 1408; WAN024CKX; Start 641; Stop 665
gtgaaggtgtagattcggtatatcg

SEQ ID NO: 293207 - DNA, 25 bp, Artificial
  probe
  misc_feature (1)..(25): SEQ ID NO: 1408; WAN024CKX; Start 1086; Stop 1110
tggaattaactacttcaatggtgga

SEQ ID NO: 293208 - DNA, 25 bp, Artificial
  probe
  misc_feature (1)..(25): SEQ ID NO: 1408; WAN024CKX; Start 912; Stop 936
taatacatctacaatgacgacgcag

SEQ ID NO: 293209 - DNA, 25 bp, Artificial
  probe
  misc_feature (1)..(25): SEQ ID NO: 1408; WAN024CKX; Start 648; Stop 672
tgtagattcggtatatcgtgttcca

SEQ ID NO: 293210 - DNA, 25 bp, Artificial
  probe
  misc_feature (1)..(25): SEQ ID NO: 1408; WAN024CKX; Start 645; Stop 669
aggtgtagattcggtatatcgtgtt

SEQ ID NO: 293211 - DNA, 25 bp, Artificial
  probe
  misc_feature (1)..(25): SEQ ID NO: 1408; WAN024CKX; Start 644; Stop 668
aaggtgtagattcggtatatcgtgt

SEQ ID NO: 293212 - DNA, 25 bp, Artificial
  probe
  misc_feature (1)..(25): SEQ ID NO: 1408; WAN024CKX; Start 642; Stop 666
tgaaggtgtagattcggtatatcgt

SEQ ID NO: 293213 - DNA, 25 bp, Artificial
  probe
  misc_feature (1)..(25): SEQ ID NO: 1408; WAN024CKX; Start 1088; Stop 1112
gaattaactacttcaatggtggagg

SEQ ID NO: 293214 - DNA, 25 bp, Artificial
  probe
  misc_feature (1)..(25): SEQ ID NO: 1408; WAN024CKX; Start 1087; Stop 1111
ggaattaactacttcaatggtggag

SEQ ID NO: 293215 - DNA, 25 bp, Artificial
  probe
  misc_feature (1)..(25): SEQ ID NO: 1408; WAN024CKX; Start 772; Stop 796
tcaagtatgcgtcctggatattcta

SEQ ID NO: 293216 - DNA, 25 bp, Artificial
  probe
  misc_feature (1)..(25): SEQ ID NO: 1408; WAN024CKX; Start 910; Stop 934
tataatacatctacaatgacgacgc

SEQ ID NO: 293217 - DNA, 25 bp, Artificial
  probe
  misc_feature (1)..(25): SEQ ID NO: 1408; WAN024CKX; Start 1085; Stop 1109
ttggaattaactacttcaatggtgg

SEQ ID NO: 293218 - DNA, 25 bp, Artificial
  probe
  misc_feature (1)..(25): SEQ ID NO: 1408; WAN024CKX; Start 638; Stop 662
caggtgaaggtgtagattcggtata

SEQ ID NO: 293219 - DNA, 25 bp, Artificial
  probe
  misc_feature (1)..(25): SEQ ID NO: 1408; WAN024CKX; Start 203; Stop 227
tatctacaagtaattcagcgagttc

SEQ ID NO: 293220 - DNA, 25 bp, Artificial
  probe
  misc_feature (1)..(25): SEQ ID NO: 1408; WAN024CKX; Start 766; Stop 790
aatatatcaagtatgcgtcctggat

SEQ ID NO: 293221 - DNA, 25 bp, Artificial
  probe
  misc_feature (1)..(25): SEQ ID NO: 1408; WAN024CKX; Start 771; Stop 795
atcaagtatgcgtcctggatattct

SEQ ID NO: 293222 - DNA, 25 bp, Artificial
  probe
  misc_feature (1)..(25): SEQ ID NO: 1408; WAN024CKX; Start 998; Stop 1022
atggattaacatcatcttggactgt

SEQ ID NO: 293223 - DNA, 25 bp, Artificial
  probe
  misc_feature (1)..(25): SEQ ID NO: 1408; WAN024CKX; Start 762; Stop 786
tggtaatatatcaagtatgcgtcct

SEQ ID NO: 293224 - DNA, 25 bp, Artificial
  probe
  misc_feature (1)..(25): SEQ ID NO: 1409; WAN024G38; Start 271; Stop 295
tgtatctccaccattgcgactataa

SEQ ID NO: 293225 - DNA, 25 bp, Artificial
  probe
  misc_feature (1)..(25): SEQ ID NO: 1409; WAN024G38; Start 270; Stop 294
ttgtatctccaccattgcgactata

SEQ ID NO: 293226 - DNA, 25 bp, Artificial
  probe
  misc_feature (1)..(25): SEQ ID NO: 1409; WAN024G38; Start 258; Stop 282
tagagttaatggttgtatctccacc

SEQ ID NO: 293227 - DNA, 25 bp, Artificial
  probe
  misc_feature (1)..(25): SEQ ID NO: 1409; WAN024G38; Start 269; Stop 293
gttgtatctccaccattgcgactat

SEQ ID NO: 293228 - DNA, 25 bp, Artificial
  probe
  misc_feature (1)..(25): SEQ ID NO: 1409; WAN024G38; Start 113; Stop 137
atacctgcgtgaacaaagatatact

SEQ ID NO: 293229 - DNA, 25 bp, Artificial
  probe
  misc_feature (1)..(25): SEQ ID NO: 1409; WAN024G38; Start 112; Stop 136
aatacctgcgtgaacaaagatatac

SEQ ID NO: 293230 - DNA, 25 bp, Artificial
  probe
  misc_feature (1)..(25): SEQ ID NO: 1409; WAN024G38; Start 111; Stop 135
caatacctgcgtgaacaaagatata

SEQ ID NO: 293231 - DNA, 25 bp, Artificial
  probe
  misc_feature (1)..(25): SEQ ID NO: 1409; WAN024G38; Start 114; Stop 138
tacctgcgtgaacaaagatatactt

SEQ ID NO: 293232 - DNA, 25 bp, Artificial
  probe
  misc_feature (1)..(25): SEQ ID NO: 1409; WAN024G38; Start 255; Stop 279
ggatagagttaatggttgtatctcc

SEQ ID NO: 293233 - DNA, 25 bp, Artificial
  probe
  misc_feature (1)..(25): SEQ ID NO: 1409; WAN024G38; Start 254; Stop 278
aggatagagttaatggttgtatctc

SEQ ID NO: 293234 - DNA, 25 bp, Artificial
  probe
  misc_feature (1)..(25): SEQ ID NO: 1409; WAN024G38; Start 110; Stop 134
tcaatacctgcgtgaacaaagatat

SEQ ID NO: 293235 - DNA, 25 bp, Artificial
  probe
  misc_feature (1)..(25): SEQ ID NO: 1409; WAN024G38; Start 109; Stop 133
atcaatacctgcgtgaacaaagata

SEQ ID NO: 293236 - DNA, 25 bp, Artificial
  probe
  misc_feature (1)..(25): SEQ ID NO: 1409; WAN024G38; Start 257; Stop 281
atagagttaatggttgtatctccac

SEQ ID NO: 293237 - DNA, 25 bp, Artificial
  probe
  misc_feature (1)..(25): SEQ ID NO: 1409; WAN024G38; Start 115; Stop 139
acctgcgtgaacaaagatatacttg

SEQ ID NO: 293238 - DNA, 25 bp, Artificial
  probe
  misc_feature (1)..(25): SEQ ID NO: 1409; WAN024G38; Start 108; Stop 132
aatcaatacctgcgtgaacaaagat

SEQ ID NO: 293239 - DNA, 25 bp, Artificial
  probe
  misc_feature (1)..(25): SEQ ID NO: 1409; WAN024G38; Start 107; Stop 131
aaatcaatacctgcgtgaacaaaga

SEQ ID NO: 293240 - DNA, 25 bp, Artificial
  probe
  misc_feature (1)..(25): SEQ ID NO: 1409; WAN024G38; Start 106; Stop 130
caaatcaatacctgcgtgaacaaag

SEQ ID NO: 293241 - DNA, 25 bp, Artificial
  probe
  misc_feature (1)..(25): SEQ ID NO: 1409; WAN024G38; Start 208; Stop 232
cttggcatcttctactccatcaact

SEQ ID NO: 293242 - DNA, 25 bp, Artificial
  probe
  misc_feature (1)..(25): SEQ ID NO: 1409; WAN024G38; Start 256; Stop 280
gatagagttaatggttgtatctcca

SEQ ID NO: 293243 - DNA, 25 bp, Artificial
  probe
  misc_feature (1)..(25): SEQ ID NO: 1409; WAN024G38; Start 139; Stop 163
gtctgtctctactacaaatggcatt

SEQ ID NO: 293244 - DNA, 25 bp, Artificial
  probe
  misc_feature (1)..(25): SEQ ID NO: 1409; WAN024G38; Start 105; Stop 129
tcaaatcaatacctgcgtgaacaaa

SEQ ID NO: 293245 - DNA, 25 bp, Artificial
  probe
  misc_feature (1)..(25): SEQ ID NO: 1409; WAN024G38; Start 209; Stop 233
ttggcatcttctactccatcaactg

SEQ ID NO: 293246 - DNA, 25 bp, Artificial
  probe
  misc_feature (1)..(25): SEQ ID NO: 1409; WAN024G38; Start 138; Stop 162
tgtctgtctctactacaaatggcat

SEQ ID NO: 293247 - DNA, 25 bp, Artificial
  probe
  misc_feature (1)..(25): SEQ ID NO: 1409; WAN024G38; Start 129; Stop 153
agatatacttgtctgtctctactac

SEQ ID NO: 293248 - DNA, 25 bp, Artificial
  probe
  misc_feature (1)..(25): SEQ ID NO: 1409; WAN024G38; Start 130; Stop 154
gatatacttgtctgtctctactaca

SEQ ID NO: 293249 - DNA, 25 bp, Artificial
  probe
  misc_feature (1)..(25): SEQ ID NO: 1409; WAN024G38; Start 72; Stop 96
tataatctgttgtttcatgccagtc

SEQ ID NO: 293250 - DNA, 25 bp, Artificial
  probe
  misc_feature (1)..(25): SEQ ID NO: 1409; WAN024G38; Start 104; Stop 128
gtcaaatcaatacctgcgtgaacaa

SEQ ID NO: 293251 - DNA, 25 bp, Artificial
  probe
  misc_feature (1)..(25): SEQ ID NO: 1409; WAN024G38; Start 140; Stop 164
tctgtctctactacaaatggcattt

SEQ ID NO: 293252 - DNA, 25 bp, Artificial
  probe
  misc_feature (1)..(25): SEQ ID NO: 1409; WAN024G38; Start 71; Stop 95
ttataatctgttgtttcatgccagt

SEQ ID NO: 293253 - DNA, 25 bp, Artificial
  probe
  misc_feature (1)..(25): SEQ ID NO: 1409; WAN024G38; Start 213; Stop 237
catcttctactccatcaactggtgc

SEQ ID NO: 293254 - DNA, 25 bp, Artificial
  probe
  misc_feature (1)..(25): SEQ ID NO: 1409; WAN024G38; Start 212; Stop 236
gcatcttctactccatcaactggtg

SEQ ID NO: 293255 - DNA, 25 bp, Artificial
  probe
  misc_feature (1)..(25): SEQ ID NO: 1409; WAN024G38; Start 253; Stop 277
taggatagagttaatggttgtatct

SEQ ID NO: 293256 - DNA, 25 bp, Artificial
  probe
  misc_feature (1)..(25): SEQ ID NO: 1409; WAN024G38; Start 70; Stop 94
tttataatctgttgtttcatgccag

SEQ ID NO: 293257 - DNA, 25 bp, Artificial
  probe
  misc_feature (1)..(25): SEQ ID NO: 1410; WAN024GNV; Start 114; Stop 138
caatttcttcgctcagtttgactac

SEQ ID NO: 293258 - DNA, 25 bp, Artificial
  probe
  misc_feature (1)..(25): SEQ ID NO: 1410; WAN024GNV; Start 183; Stop 207
catgaacgacacctgcaatcttatt

SEQ ID NO: 293259 - DNA, 25 bp, Artificial
  probe
  misc_feature (1)..(25): SEQ ID NO: 1410; WAN024GNV; Start 115; Stop 139
aatttcttcgctcagtttgactacc

SEQ ID NO: 293260 - DNA, 25 bp, Artificial
  probe
  misc_feature (1)..(25): SEQ ID NO: 1410; WAN024GNV; Start 113; Stop 137
gcaatttcttcgctcagtttgacta

SEQ ID NO: 293261 - DNA, 25 bp, Artificial
  probe
  misc_feature (1)..(25): SEQ ID NO: 1410; WAN024GNV; Start 116; Stop 140
atttcttcgctcagtttgactacct

SEQ ID NO: 293262 - DNA, 25 bp, Artificial
  probe
  misc_feature (1)..(25): SEQ ID NO: 1410; WAN024GNV; Start 152; Stop 176
atatagacggtgtttccactagcag

SEQ ID NO: 293263 - DNA, 25 bp, Artificial
  probe
  misc_feature (1)..(25): SEQ ID NO: 1410; WAN024GNV; Start 151; Stop 175
gatatagacggtgtttccactagca

SEQ ID NO: 293264 - DNA, 25 bp, Artificial
  probe
  misc_feature (1)..(25): SEQ ID NO: 1410; WAN024GNV; Start 160; Stop 184
ggtgtttccactagcagaaatatca

SEQ ID NO: 293265 - DNA, 25 bp, Artificial
  probe
  misc_feature (1)..(25): SEQ ID NO: 1410; WAN024GNV; Start 117; Stop 141
tttcttcgctcagtttgactacctc

SEQ ID NO: 293266 - DNA, 25 bp, Artificial
  probe
  misc_feature (1)..(25): SEQ ID NO: 1410; WAN024GNV; Start 161; Stop 185
gtgtttccactagcagaaatatcat

SEQ ID NO: 293267 - DNA, 25 bp, Artificial
  probe
  misc_feature (1)..(25): SEQ ID NO: 1410; WAN024GNV; Start 178; Stop 202
aatatcatgaacgacacctgcaatc

SEQ ID NO: 293268 - DNA, 25 bp, Artificial
  probe
  misc_feature (1)..(25): SEQ ID NO: 1410; WAN024GNV; Start 184; Stop 208
atgaacgacacctgcaatcttattg

SEQ ID NO: 293269 - DNA, 25 bp, Artificial
  probe
  misc_feature (1)..(25): SEQ ID NO: 1410; WAN024GNV; Start 162; Stop 186
tgtttccactagcagaaatatcatg

SEQ ID NO: 293270 - DNA, 25 bp, Artificial
  probe
  misc_feature (1)..(25): SEQ ID NO: 1410; WAN024GNV; Start 148; Stop 172
ttcgatatagacggtgtttccacta

SEQ ID NO: 293271 - DNA, 25 bp, Artificial
  probe
  misc_feature (1)..(25): SEQ ID NO: 1410; WAN024GNV; Start 159; Stop 183
cggtgtttccactagcagaaatatc

SEQ ID NO: 293272 - DNA, 25 bp, Artificial
  probe
  misc_feature (1)..(25): SEQ ID NO: 1410; WAN024GNV; Start 149; Stop 173
tcgatatagacggtgtttccactag

SEQ ID NO: 293273 - DNA, 25 bp, Artificial
  probe
  misc_feature (1)..(25): SEQ ID NO: 1410; WAN024GNV; Start 179; Stop 203
atatcatgaacgacacctgcaatct

SEQ ID NO: 293274 - DNA, 25 bp, Artificial
  probe
  misc_feature (1)..(25): SEQ ID NO: 1410; WAN024GNV; Start 153; Stop 177
tatagacggtgtttccactagcaga

SEQ ID NO: 293275 - DNA, 25 bp, Artificial
  probe
  misc_feature (1)..(25): SEQ ID NO: 1410; WAN024GNV; Start 110; Stop 134
ctagcaatttcttcgctcagtttga

SEQ ID NO: 293276 - DNA, 25 bp, Artificial
  probe
  misc_feature (1)..(25): SEQ ID NO: 1410; WAN024GNV; Start 108; Stop 132
gactagcaatttcttcgctcagttt

SEQ ID NO: 293277 - DNA, 25 bp, Artificial
  probe
  misc_feature (1)..(25): SEQ ID NO: 1410; WAN024GNV; Start 150; Stop 174
cgatatagacggtgtttccactagc

SEQ ID NO: 293278 - DNA, 25 bp, Artificial
  probe
  misc_feature (1)..(25): SEQ ID NO: 1410; WAN024GNV; Start 182; Stop 206
tcatgaacgacacctgcaatcttat

SEQ ID NO: 293279 - DNA, 25 bp, Artificial
  probe
  misc_feature (1)..(25): SEQ ID NO: 1410; WAN024GNV; Start 181; Stop 205
atcatgaacgacacctgcaatctta

SEQ ID NO: 293280 - DNA, 25 bp, Artificial
  probe
  misc_feature (1)..(25): SEQ ID NO: 1410; WAN024GNV; Start 180; Stop 204
tatcatgaacgacacctgcaatctt

SEQ ID NO: 293281 - DNA, 25 bp, Artificial
  probe
  misc_feature (1)..(25): SEQ ID NO: 1410; WAN024GNV; Start 158; Stop 182
acggtgtttccactagcagaaatat

SEQ ID NO: 293282 - DNA, 25 bp, Artificial
  probe
  misc_feature (1)..(25): SEQ ID NO: 1410; WAN024GNV; Start 111; Stop 135
tagcaatttcttcgctcagtttgac

SEQ ID NO: 293283 - DNA, 25 bp, Artificial
  probe
  misc_feature (1)..(25): SEQ ID NO: 1410; WAN024GNV; Start 109; Stop 133
actagcaatttcttcgctcagtttg

SEQ ID NO: 293284 - DNA, 25 bp, Artificial
  probe
  misc_feature (1)..(25): SEQ ID NO: 1410; WAN024GNV; Start 118; Stop 142
ttcttcgctcagtttgactacctca

SEQ ID NO: 293285 - DNA, 25 bp, Artificial
  probe
  misc_feature (1)..(25): SEQ ID NO: 1410; WAN024GNV; Start 170; Stop 194
ctagcagaaatatcatgaacgacac

SEQ ID NO: 293286 - DNA, 25 bp, Artificial
  probe
  misc_feature (1)..(25): SEQ ID NO: 1410; WAN024GNV; Start 169; Stop 193
actagcagaaatatcatgaacgaca

SEQ ID NO: 293287 - DNA, 25 bp, Artificial
  probe
  misc_feature (1)..(25): SEQ ID NO: 1410; WAN024GNV; Start 168; Stop 192
cactagcagaaatatcatgaacgac

SEQ ID NO: 293288 - DNA, 25 bp, Artificial
  probe
  misc_feature (1)..(25): SEQ ID NO: 1410; WAN024GNV; Start 167; Stop 191
ccactagcagaaatatcatgaacga

SEQ ID NO: 293289 - DNA, 25 bp, Artificial
  probe
  misc_feature (1)..(25): SEQ ID NO: 1410; WAN024GNV; Start 166; Stop 190
tccactagcagaaatatcatgaacg

SEQ ID NO: 293290 - DNA, 25 bp, Artificial
  probe
  misc_feature (1)..(25): SEQ ID NO: 1411; WAN024F63; Start 167; Stop 191
cgaacatcttgtaccttacgatctg

SEQ ID NO: 293291 - DNA, 25 bp, Artificial
  probe
  misc_feature (1)..(25): SEQ ID NO: 1411; WAN024F63; Start 168; Stop 192
gaacatcttgtaccttacgatctgc

SEQ ID NO: 293292 - DNA, 25 bp, Artificial
  probe
  misc_feature (1)..(25): SEQ ID NO: 1411; WAN024F63; Start 173; Stop 197
tcttgtaccttacgatctgcaataa

SEQ ID NO: 293293 - DNA, 25 bp, Artificial
  probe
  misc_feature (1)..(25): SEQ ID NO: 1411; WAN024F63; Start 172; Stop 196
atcttgtaccttacgatctgcaata

SEQ ID NO: 293294 - DNA, 25 bp, Artificial
  probe
  misc_feature (1)..(25): SEQ ID NO: 1411; WAN024F63; Start 174; Stop 198
cttgtaccttacgatctgcaataat

SEQ ID NO: 293295 - DNA, 25 bp, Artificial
  probe
  misc_feature (1)..(25): SEQ ID NO: 1411; WAN024F63; Start 171; Stop 195
catcttgtaccttacgatctgcaat

SEQ ID NO: 293296 - DNA, 25 bp, Artificial
  probe
  misc_feature (1)..(25): SEQ ID NO: 1411; WAN024F63; Start 175; Stop 199
ttgtaccttacgatctgcaataatt

SEQ ID NO: 293297 - DNA, 25 bp, Artificial
  probe
  misc_feature (1)..(25): SEQ ID NO: 1411; WAN024F63; Start 162; Stop 186
cattgcgaacatcttgtaccttacg

SEQ ID NO: 293298 - DNA, 25 bp, Artificial
  probe
  misc_feature (1)..(25): SEQ ID NO: 1411; WAN024F63; Start 164; Stop 188
ttgcgaacatcttgtaccttacgat

SEQ ID NO: 293299 - DNA, 25 bp, Artificial
  probe
  misc_feature (1)..(25): SEQ ID NO: 1411; WAN024F63; Start 163; Stop 187
attgcgaacatcttgtaccttacga

SEQ ID NO: 293300 - DNA, 25 bp, Artificial
  probe
  misc_feature (1)..(25): SEQ ID NO: 1411; WAN024F63; Start 166; Stop 190
gcgaacatcttgtaccttacgatct

SEQ ID NO: 293301 - DNA, 25 bp, Artificial
  probe
  misc_feature (1)..(25): SEQ ID NO: 1411; WAN024F63; Start 161; Stop 185
gcattgcgaacatcttgtaccttac

SEQ ID NO: 293302 - DNA, 25 bp, Artificial
  probe
  misc_feature (1)..(25): SEQ ID NO: 1411; WAN024F63; Start 165; Stop 189
tgcgaacatcttgtaccttacgatc

SEQ ID NO: 293303 - DNA, 25 bp, Artificial
  probe
  misc_feature (1)..(25): SEQ ID NO: 1411; WAN024F63; Start 170; Stop 194
acatcttgtaccttacgatctgcaa

SEQ ID NO: 293304 - DNA, 25 bp, Artificial
  probe
  misc_feature (1)..(25): SEQ ID NO: 1411; WAN024F63; Start 169; Stop 193
aacatcttgtaccttacgatctgca

SEQ ID NO: 293305 - DNA, 25 bp, Artificial
  probe
  misc_feature (1)..(25): SEQ ID NO: 1411; WAN024F63; Start 176; Stop 200
tgtaccttacgatctgcaataattt

SEQ ID NO: 293306 - DNA, 25 bp, Artificial
  probe
  misc_feature (1)..(25): SEQ ID NO: 1411; WAN024F63; Start 200; Stop 224
ttaatattctctggcaaaccaactg

SEQ ID NO: 293307 - DNA, 25 bp, Artificial
  probe
  misc_feature (1)..(25): SEQ ID NO: 1411; WAN024F63; Start 201; Stop 225
taatattctctggcaaaccaactgg

SEQ ID NO: 293308 - DNA, 25 bp, Artificial
  probe
  misc_feature (1)..(25): SEQ ID NO: 1411; WAN024F63; Start 199; Stop 223
tttaatattctctggcaaaccaact

SEQ ID NO: 293309 - DNA, 25 bp, Artificial
  probe
  misc_feature (1)..(25): SEQ ID NO: 1411; WAN024F63; Start 160; Stop 184
tgcattgcgaacatcttgtacctta

SEQ ID NO: 293310 - DNA, 25 bp, Artificial
  probe
  misc_feature (1)..(25): SEQ ID NO: 1411; WAN024F63; Start 156; Stop 180
caactgcattgcgaacatcttgtac

SEQ ID NO: 293311 - DNA, 25 bp, Artificial
  probe
  misc_feature (1)..(25): SEQ ID NO: 1411; WAN024F63; Start 202; Stop 226
aatattctctggcaaaccaactggt

SEQ ID NO: 293312 - DNA, 25 bp, Artificial
  probe
  misc_feature (1)..(25): SEQ ID NO: 1411; WAN024F63; Start 159; Stop 183
ctgcattgcgaacatcttgtacctt

SEQ ID NO: 293313 - DNA, 25 bp, Artificial
  probe
  misc_feature (1)..(25): SEQ ID NO: 1411; WAN024F63; Start 203; Stop 227
atattctctggcaaaccaactggtc

SEQ ID NO: 293314 - DNA, 25 bp, Artificial
  probe
  misc_feature (1)..(25): SEQ ID NO: 1411; WAN024F63; Start 157; Stop 181
aactgcattgcgaacatcttgtacc

SEQ ID NO: 293315 - DNA, 25 bp, Artificial
  probe
  misc_feature (1)..(25): SEQ ID NO: 1411; WAN024F63; Start 54; Stop 78
aaatttcaccctcacgaacttcacg

SEQ ID NO: 293316 - DNA, 25 bp, Artificial
  probe
  misc_feature (1)..(25): SEQ ID NO: 1411; WAN024F63; Start 177; Stop 201
gtaccttacgatctgcaataatttt

SEQ ID NO: 293317 - DNA, 25 bp, Artificial
  probe
  misc_feature (1)..(25): SEQ ID NO: 1411; WAN024F63; Start 198; Stop 222
ttttaatattctctggcaaaccaac

SEQ ID NO: 293318 - DNA, 25 bp, Artificial
  probe
  misc_feature (1)..(25): SEQ ID NO: 1411; WAN024F63; Start 155; Stop 179
acaactgcattgcgaacatcttgta

SEQ ID NO: 293319 - DNA, 25 bp, Artificial
  probe
  misc_feature (1)..(25): SEQ ID NO: 1411; WAN024F63; Start 158; Stop 182
actgcattgcgaacatcttgtacct

SEQ ID NO: 293320 - DNA, 25 bp, Artificial
  probe
  misc_feature (1)..(25): SEQ ID NO: 1411; WAN024F63; Start 179; Stop 203
accttacgatctgcaataattttaa

SEQ ID NO: 293321 - DNA, 25 bp, Artificial
  probe
  misc_feature (1)..(25): SEQ ID NO: 1411; WAN024F63; Start 197; Stop 221
attttaatattctctggcaaaccaa

SEQ ID NO: 293322 - DNA, 25 bp, Artificial
  probe
  misc_feature (1)..(25): SEQ ID NO: 1411; WAN024F63; Start 196; Stop 220
aattttaatattctctggcaaacca

SEQ ID NO: 293323 - DNA, 25 bp, Artificial
  probe
  misc_feature (1)..(25): SEQ ID NO: 1412; WAN024CCT; Start 262; Stop 286
cagattatagacttgcttgaggagt

SEQ ID NO: 293324 - DNA, 25 bp, Artificial
  probe
  misc_feature (1)..(25): SEQ ID NO: 1412; WAN024CCT; Start 267; Stop 291
tatagacttgcttgaggagttatcg

SEQ ID NO: 293325 - DNA, 25 bp, Artificial
  probe
  misc_feature (1)..(25): SEQ ID NO: 1412; WAN024CCT; Start 261; Stop 285
tcagattatagacttgcttgaggag

SEQ ID NO: 293326 - DNA, 25 bp, Artificial
  probe
  misc_feature (1)..(25): SEQ ID NO: 1412; WAN024CCT; Start 263; Stop 287
agattatagacttgcttgaggagtt

SEQ ID NO: 293327 - DNA, 25 bp, Artificial
  probe
  misc_feature (1)..(25): SEQ ID NO: 1412; WAN024CCT; Start 257; Stop 281
ttcctcagattatagacttgcttga

SEQ ID NO: 293328 - DNA, 25 bp, Artificial
  probe
  misc_feature (1)..(25): SEQ ID NO: 1412; WAN024CCT; Start 412; Stop 436
cataaggcagatgtcattcaccaag

SEQ ID NO: 293329 - DNA, 25 bp, Artificial
  probe
  misc_feature (1)..(25): SEQ ID NO: 1412; WAN024CCT; Start 470; Stop 494
ccatcatcatcggagataccaagtt

SEQ ID NO: 293330 - DNA, 25 bp, Artificial
  probe
  misc_feature (1)..(25): SEQ ID NO: 1412; WAN024CCT; Start 266; Stop 290
ttatagacttgcttgaggagttatc

SEQ ID NO: 293331 - DNA, 25 bp, Artificial
  probe
  misc_feature (1)..(25): SEQ ID NO: 1412; WAN024CCT; Start 264; Stop 288
gattatagacttgcttgaggagtta

SEQ ID NO: 293332 - DNA, 25 bp, Artificial
  probe
  misc_feature (1)..(25): SEQ ID NO: 1412; WAN024CCT; Start 277; Stop 301
cttgaggagttatcgagcagttatc

SEQ ID NO: 293333 - DNA, 25 bp, Artificial
  probe
  misc_feature (1)..(25): SEQ ID NO: 1412; WAN024CCT; Start 296; Stop 320
gttatccactctacatcaccacgac

SEQ ID NO: 293334 - DNA, 25 bp, Artificial
  probe
  misc_feature (1)..(25): SEQ ID NO: 1412; WAN024CCT; Start 464; Stop 488
aacaagccatcatcatcggagatac

SEQ ID NO: 293335 - DNA, 25 bp, Artificial
  probe
  misc_feature (1)..(25): SEQ ID NO: 1412; WAN024CCT; Start 66; Stop 90
tcacaatgcctttacctataccttt

SEQ ID NO: 293336 - DNA, 25 bp, Artificial
  probe
  misc_feature (1)..(25): SEQ ID NO: 1412; WAN024CCT; Start 65; Stop 89
ttcacaatgcctttacctatacctt

SEQ ID NO: 293337 - DNA, 25 bp, Artificial
  probe
  misc_feature (1)..(25): SEQ ID NO: 1412; WAN024CCT; Start 64; Stop 88
attcacaatgcctttacctatacct

SEQ ID NO: 293338 - DNA, 25 bp, Artificial
  probe
  misc_feature (1)..(25): SEQ ID NO: 1412; WAN024CCT; Start 61; Stop 85
gggattcacaatgcctttacctata

SEQ ID NO: 293339 - DNA, 25 bp, Artificial
  probe
  misc_feature (1)..(25): SEQ ID NO: 1412; WAN024CCT; Start 587; Stop 611
attatatcgctcacaaacccttaga

SEQ ID NO: 293340 - DNA, 25 bp, Artificial
  probe
  misc_feature (1)..(25): SEQ ID NO: 1412; WAN024CCT; Start 63; Stop 87
gattcacaatgcctttacctatacc

SEQ ID NO: 293341 - DNA, 25 bp, Artificial
  probe
  misc_feature (1)..(25): SEQ ID NO: 1412; WAN024CCT; Start 62; Stop 86
ggattcacaatgcctttacctatac

SEQ ID NO: 293342 - DNA, 25 bp, Artificial
  probe
  misc_feature (1)..(25): SEQ ID NO: 1412; WAN024CCT; Start 372; Stop 396
tttctttgatggcatttatggttct

SEQ ID NO: 293343 - DNA, 25 bp, Artificial
  probe
  misc_feature (1)..(25): SEQ ID NO: 1412; WAN024CCT; Start 586; Stop 610
gattatatcgctcacaaacccttag

SEQ ID NO: 293344 - DNA, 25 bp, Artificial
  probe
  misc_feature (1)..(25): SEQ ID NO: 1412; WAN024CCT; Start 471; Stop 495
catcatcatcggagataccaagttt

SEQ ID NO: 293345 - DNA, 25 bp, Artificial
  probe
  misc_feature (1)..(25): SEQ ID NO: 1412; WAN024CCT; Start 291; Stop 315
gagcagttatccactctacatcacc

SEQ ID NO: 293346 - DNA, 25 bp, Artificial
  probe
  misc_feature (1)..(25): SEQ ID NO: 1412; WAN024CCT; Start 285; Stop 309
gttatcgagcagttatccactctac

SEQ ID NO: 293347 - DNA, 25 bp, Artificial
  probe
  misc_feature (1)..(25): SEQ ID NO: 1412; WAN024CCT; Start 284; Stop 308
agttatcgagcagttatccactcta

SEQ ID NO: 293348 - DNA, 25 bp, Artificial
  probe
  misc_feature (1)..(25): SEQ ID NO: 1412; WAN024CCT; Start 472; Stop 496
atcatcatcggagataccaagtttg

SEQ ID NO: 293349 - DNA, 25 bp, Artificial
  probe
  misc_feature (1)..(25): SEQ ID NO: 1412; WAN024CCT; Start 298; Stop 322
tatccactctacatcaccacgacaa

SEQ ID NO: 293350 - DNA, 25 bp, Artificial
  probe
  misc_feature (1)..(25): SEQ ID NO: 1412; WAN024CCT; Start 297; Stop 321
ttatccactctacatcaccacgaca

SEQ ID NO: 293351 - DNA, 25 bp, Artificial
  probe
  misc_feature (1)..(25): SEQ ID NO: 1412; WAN024CCT; Start 287; Stop 311
tatcgagcagttatccactctacat

SEQ ID NO: 293352 - DNA, 25 bp, Artificial
  probe
  misc_feature (1)..(25): SEQ ID NO: 1412; WAN024CCT; Start 478; Stop 502
atcggagataccaagtttgatatgc

SEQ ID NO: 293353 - DNA, 25 bp, Artificial
  probe
  misc_feature (1)..(25): SEQ ID NO: 1412; WAN024CCT; Start 286; Stop 310
ttatcgagcagttatccactctaca

SEQ ID NO: 293354 - DNA, 25 bp, Artificial
  probe
  misc_feature (1)..(25): SEQ ID NO: 1412; WAN024CCT; Start 50; Stop 74
atagttctatcgggattcacaatgc

SEQ ID NO: 293355 - DNA, 25 bp, Artificial
  probe
  misc_feature (1)..(25): SEQ ID NO: 1412; WAN024CCT; Start 511; Stop 535
cgagaaacaggtattcagaaattgg

SEQ ID NO: 293356 - DNA, 25 bp, Artificial
  probe
  misc_feature (1)..(25): SEQ ID NO: 1413; WAN024FKY; Start 63; Stop 87
ttcttccaagatattcatcggtatg

SEQ ID NO: 293357 - DNA, 25 bp, Artificial
  probe
  misc_feature (1)..(25): SEQ ID NO: 1413; WAN024FKY; Start 61; Stop 85
aattcttccaagatattcatcggta

SEQ ID NO: 293358 - DNA, 25 bp, Artificial
  probe
  misc_feature (1)..(25): SEQ ID NO: 1413; WAN024FKY; Start 62; Stop 86
attcttccaagatattcatcggtat

SEQ ID NO: 293359 - DNA, 25 bp, Artificial
  probe
  misc_feature (1)..(25): SEQ ID NO: 1413; WAN024FKY; Start 187; Stop 211
aagtcatactgtaaattagcggttg

SEQ ID NO: 293360 - DNA, 25 bp, Artificial
  probe
  misc_feature (1)..(25): SEQ ID NO: 1413; WAN024FKY; Start 29; Stop 53
aaatccgcaaagccaaagataagaa

SEQ ID NO: 293361 - DNA, 25 bp, Artificial
  probe
  misc_feature (1)..(25): SEQ ID NO: 1413; WAN024FKY; Start 188; Stop 212
agtcatactgtaaattagcggttgg

SEQ ID NO: 293362 - DNA, 25 bp, Artificial
  probe
  misc_feature (1)..(25): SEQ ID NO: 1413; WAN024FKY; Start 140; Stop 164
gaacgctttctatatgtgtcaacaa

SEQ ID NO: 293363 - DNA, 25 bp, Artificial
  probe
  misc_feature (1)..(25): SEQ ID NO: 1413; WAN024FKY; Start 67; Stop 91
tccaagatattcatcggtatgacaa

SEQ ID NO: 293364 - DNA, 25 bp, Artificial
  probe
  misc_feature (1)..(25): SEQ ID NO: 1413; WAN024FKY; Start 66; Stop 90
ttccaagatattcatcggtatgaca

SEQ ID NO: 293365 - DNA, 25 bp, Artificial
  probe
  misc_feature (1)..(25): SEQ ID NO: 1413; WAN024FKY; Start 141; Stop 165
aacgctttctatatgtgtcaacaaa

SEQ ID NO: 293366 - DNA, 25 bp, Artificial
  probe
  misc_feature (1)..(25): SEQ ID NO: 1413; WAN024FKY; Start 138; Stop 162
acgaacgctttctatatgtgtcaac

SEQ ID NO: 293367 - DNA, 25 bp, Artificial
  probe
  misc_feature (1)..(25): SEQ ID NO: 1413; WAN024FKY; Start 65; Stop 89
cttccaagatattcatcggtatgac

SEQ ID NO: 293368 - DNA, 25 bp, Artificial
  probe
  misc_feature (1)..(25): SEQ ID NO: 1413; WAN024FKY; Start 64; Stop 88
tcttccaagatattcatcggtatga

SEQ ID NO: 293369 - DNA, 25 bp, Artificial
  probe
  misc_feature (1)..(25): SEQ ID NO: 1413; WAN024FKY; Start 30; Stop 54
aatccgcaaagccaaagataagaag

SEQ ID NO: 293370 - DNA, 25 bp, Artificial
  probe
  misc_feature (1)..(25): SEQ ID NO: 1413; WAN024FKY; Start 60; Stop 84
aaattcttccaagatattcatcggt

SEQ ID NO: 293371 - DNA, 25 bp, Artificial
  probe
  misc_feature (1)..(25): SEQ ID NO: 1413; WAN024FKY; Start 189; Stop 213
gtcatactgtaaattagcggttggc

SEQ ID NO: 293372 - DNA, 25 bp, Artificial
  probe
  misc_feature (1)..(25): SEQ ID NO: 1413; WAN024FKY; Start 186; Stop 210
taagtcatactgtaaattagcggtt

SEQ ID NO: 293373 - DNA, 25 bp, Artificial
  probe
  misc_feature (1)..(25): SEQ ID NO: 1413; WAN024FKY; Start 185; Stop 209
ttaagtcatactgtaaattagcggt

SEQ ID NO: 293374 - DNA, 25 bp, Artificial
  probe
  misc_feature (1)..(25): SEQ ID NO: 1413; WAN024FKY; Start 139; Stop 163
cgaacgctttctatatgtgtcaaca

SEQ ID NO: 293375 - DNA, 25 bp, Artificial
  probe
  misc_feature (1)..(25): SEQ ID NO: 1413; WAN024FKY; Start 33; Stop 57
ccgcaaagccaaagataagaagttt

SEQ ID NO: 293376 - DNA, 25 bp, Artificial
  probe
  misc_feature (1)..(25): SEQ ID NO: 1413; WAN024FKY; Start 137; Stop 161
gacgaacgctttctatatgtgtcaa

SEQ ID NO: 293377 - DNA, 25 bp, Artificial
  probe
  misc_feature (1)..(25): SEQ ID NO: 1413; WAN024FKY; Start 184; Stop 208
gttaagtcatactgtaaattagcgg

SEQ ID NO: 293378 - DNA, 25 bp, Artificial
  probe
  misc_feature (1)..(25): SEQ ID NO: 1413; WAN024FKY; Start 183; Stop 207
ggttaagtcatactgtaaattagcg

SEQ ID NO: 293379 - DNA, 25 bp, Artificial
  probe
  misc_feature (1)..(25): SEQ ID NO: 1413; WAN024FKY; Start 192; Stop 216
atactgtaaattagcggttggcgaa

SEQ ID NO: 293380 - DNA, 25 bp, Artificial
  probe
  misc_feature (1)..(25): SEQ ID NO: 1413; WAN024FKY; Start 31; Stop 55
atccgcaaagccaaagataagaagt

SEQ ID NO: 293381 - DNA, 25 bp, Artificial
  probe
  misc_feature (1)..(25): SEQ ID NO: 1413; WAN024FKY; Start 32; Stop 56
tccgcaaagccaaagataagaagtt

SEQ ID NO: 293382 - DNA, 25 bp, Artificial
  probe
  misc_feature (1)..(25): SEQ ID NO: 1413; WAN024FKY; Start 134; Stop 158
gacgacgaacgctttctatatgtgt

SEQ ID NO: 293383 - DNA, 25 bp, Artificial
  probe
  misc_feature (1)..(25): SEQ ID NO: 1413; WAN024FKY; Start 35; Stop 59
gcaaagccaaagataagaagtttgt

SEQ ID NO: 293384 - DNA, 25 bp, Artificial
  probe
  misc_feature (1)..(25): SEQ ID NO: 1413; WAN024FKY; Start 59; Stop 83
taaattcttccaagatattcatcgg

SEQ ID NO: 293385 - DNA, 25 bp, Artificial
  probe
  misc_feature (1)..(25): SEQ ID NO: 1413; WAN024FKY; Start 191; Stop 215
catactgtaaattagcggttggcga

SEQ ID NO: 293386 - DNA, 25 bp, Artificial
  probe
  misc_feature (1)..(25): SEQ ID NO: 1413; WAN024FKY; Start 190; Stop 214
tcatactgtaaattagcggttggcg

SEQ ID NO: 293387 - DNA, 25 bp, Artificial
  probe
  misc_feature (1)..(25): SEQ ID NO: 1413; WAN024FKY; Start 68; Stop 92
ccaagatattcatcggtatgacaaa

SEQ ID NO: 293388 - DNA, 25 bp, Artificial
  probe
  misc_feature (1)..(25): SEQ ID NO: 1413; WAN024FKY; Start 1; Stop 25
atgacctctcctgcaaagatattcc

SEQ ID NO: 293389 - DNA, 25 bp, Artificial
  probe
  misc_feature (1)..(25): SEQ ID NO: 1414; WAN024FU4; Start 166; Stop 190
ctggtcattctcaatcttcatacga

SEQ ID NO: 293390 - DNA, 25 bp, Artificial
  probe
  misc_feature (1)..(25): SEQ ID NO: 1414; WAN024FU4; Start 170; Stop 194
tcattctcaatcttcatacgaccac

SEQ ID NO: 293391 - DNA, 25 bp, Artificial
  probe
  misc_feature (1)..(25): SEQ ID NO: 1414; WAN024FU4; Start 164; Stop 188
acctggtcattctcaatcttcatac

SEQ ID NO: 293392 - DNA, 25 bp, Artificial
  probe
  misc_feature (1)..(25): SEQ ID NO: 1414; WAN024FU4; Start 163; Stop 187
aacctggtcattctcaatcttcata

SEQ ID NO: 293393 - DNA, 25 bp, Artificial
  probe
  misc_feature (1)..(25): SEQ ID NO: 1414; WAN024FU4; Start 165; Stop 189
cctggtcattctcaatcttcatacg

SEQ ID NO: 293394 - DNA, 25 bp, Artificial
  probe
  misc_feature (1)..(25): SEQ ID NO: 1414; WAN024FU4; Start 171; Stop 195
cattctcaatcttcatacgaccacc

SEQ ID NO: 293395 - DNA, 25 bp, Artificial
  probe
  misc_feature (1)..(25): SEQ ID NO: 1414; WAN024FU4; Start 162; Stop 186
caacctggtcattctcaatcttcat

SEQ ID NO: 293396 - DNA, 25 bp, Artificial
  probe
  misc_feature (1)..(25): SEQ ID NO: 1414; WAN024FU4; Start 172; Stop 196
attctcaatcttcatacgaccacca

SEQ ID NO: 293397 - DNA, 25 bp, Artificial
  probe
  misc_feature (1)..(25): SEQ ID NO: 1414; WAN024FU4; Start 98; Stop 122
ttgatgacatccatagtaataggcg

SEQ ID NO: 293398 - DNA, 25 bp, Artificial
  probe
  misc_feature (1)..(25): SEQ ID NO: 1414; WAN024FU4; Start 169; Stop 193
gtcattctcaatcttcatacgacca

SEQ ID NO: 293399 - DNA, 25 bp, Artificial
  probe
  misc_feature (1)..(25): SEQ ID NO: 1414; WAN024FU4; Start 167; Stop 191
tggtcattctcaatcttcatacgac

SEQ ID NO: 293400 - DNA, 25 bp, Artificial
  probe
  misc_feature (1)..(25): SEQ ID NO: 1414; WAN024FU4; Start 161; Stop 185
acaacctggtcattctcaatcttca

SEQ ID NO: 293401 - DNA, 25 bp, Artificial
  probe
  misc_feature (1)..(25): SEQ ID NO: 1414; WAN024FU4; Start 90; Stop 114
ggtccttattgatgacatccatagt

SEQ ID NO: 293402 - DNA, 25 bp, Artificial
  probe
  misc_feature (1)..(25): SEQ ID NO: 1414; WAN024FU4; Start 173; Stop 197
ttctcaatcttcatacgaccaccac

SEQ ID NO: 293403 - DNA, 25 bp, Artificial
  probe
  misc_feature (1)..(25): SEQ ID NO: 1414; WAN024FU4; Start 97; Stop 121
attgatgacatccatagtaataggc

SEQ ID NO: 293404 - DNA, 25 bp, Artificial
  probe
  misc_feature (1)..(25): SEQ ID NO: 1414; WAN024FU4; Start 83; Stop 107
ttctggtggtccttattgatgacat

SEQ ID NO: 293405 - DNA, 25 bp, Artificial
  probe
  misc_feature (1)..(25): SEQ ID NO: 1414; WAN024FU4; Start 160; Stop 184
gacaacctggtcattctcaatcttc

SEQ ID NO: 293406 - DNA, 25 bp, Artificial
  probe
  misc_feature (1)..(25): SEQ ID NO: 1414; WAN024FU4; Start 159; Stop 183
agacaacctggtcattctcaatctt

SEQ ID NO: 293407 - DNA, 25 bp, Artificial
  probe
  misc_feature (1)..(25): SEQ ID NO: 1414; WAN024FU4; Start 158; Stop 182
aagacaacctggtcattctcaatct

SEQ ID NO: 293408 - DNA, 25 bp, Artificial
  probe
  misc_feature (1)..(25): SEQ ID NO: 1414; WAN024FU4; Start 89; Stop 113
tggtccttattgatgacatccatag

SEQ ID NO: 293409 - DNA, 25 bp, Artificial
  probe
  misc_feature (1)..(25): SEQ ID NO: 1414; WAN024FU4; Start 88; Stop 112
gtggtccttattgatgacatccata

SEQ ID NO: 293410 - DNA, 25 bp, Artificial
  probe
  misc_feature (1)..(25): SEQ ID NO: 1414; WAN024FU4; Start 80; Stop 104
catttctggtggtccttattgatga

SEQ ID NO: 293411 - DNA, 25 bp, Artificial
  probe
  misc_feature (1)..(25): SEQ ID NO: 1414; WAN024FU4; Start 84; Stop 108
tctggtggtccttattgatgacatc

SEQ ID NO: 293412 - DNA, 25 bp, Artificial
  probe
  misc_feature (1)..(25): SEQ ID NO: 1414; WAN024FU4; Start 91; Stop 115
gtccttattgatgacatccatagta

SEQ ID NO: 293413 - DNA, 25 bp, Artificial
  probe
  misc_feature (1)..(25): SEQ ID NO: 1414; WAN024FU4; Start 92; Stop 116
tccttattgatgacatccatagtaa

SEQ ID NO: 293414 - DNA, 25 bp, Artificial
  probe
  misc_feature (1)..(25): SEQ ID NO: 1414; WAN024FU4; Start 220; Stop 244
tctaaggtcctcattgatatcctca

SEQ ID NO: 293415 - DNA, 25 bp, Artificial
  probe
  misc_feature (1)..(25): SEQ ID NO: 1414; WAN024FU4; Start 219; Stop 243
gtctaaggtcctcattgatatcctc

SEQ ID NO: 293416 - DNA, 25 bp, Artificial
  probe
  misc_feature (1)..(25): SEQ ID NO: 1414; WAN024FU4; Start 156; Stop 180
taaagacaacctggtcattctcaat

SEQ ID NO: 293417 - DNA, 25 bp, Artificial
  probe
  misc_feature (1)..(25): SEQ ID NO: 1414; WAN024FU4; Start 221; Stop 245
ctaaggtcctcattgatatcctcag

SEQ ID NO: 293418 - DNA, 25 bp, Artificial
  probe
  misc_feature (1)..(25): SEQ ID NO: 1414; WAN024FU4; Start 81; Stop 105
atttctggtggtccttattgatgac

SEQ ID NO: 293419 - DNA, 25 bp, Artificial
  probe
  misc_feature (1)..(25): SEQ ID NO: 1414; WAN024FU4; Start 153; Stop 177
aagtaaagacaacctggtcattctc

SEQ ID NO: 293420 - DNA, 25 bp, Artificial
  probe
  misc_feature (1)..(25): SEQ ID NO: 1414; WAN024FU4; Start 152; Stop 176
gaagtaaagacaacctggtcattct

SEQ ID NO: 293421 - DNA, 25 bp, Artificial
  probe
  misc_feature (1)..(25): SEQ ID NO: 1414; WAN024FU4; Start 155; Stop 179
gtaaagacaacctggtcattctcaa

SEQ ID NO: 293422 - DNA, 25 bp, Artificial
  probe
  misc_feature (1)..(25): SEQ ID NO: 1415; WAN024EZ5; Start 303; Stop 327
catacaggagcgagattacattact

SEQ ID NO: 293423 - DNA, 25 bp, Artificial
  probe
  misc_feature (1)..(25): SEQ ID NO: 1415; WAN024EZ5; Start 302; Stop 326
tcatacaggagcgagattacattac

SEQ ID NO: 293424 - DNA, 25 bp, Artificial
  probe
  misc_feature (1)..(25): SEQ ID NO: 1415; WAN024EZ5; Start 301; Stop 325
atcatacaggagcgagattacatta

SEQ ID NO: 293425 - DNA, 25 bp, Artificial
  probe
  misc_feature (1)..(25): SEQ ID NO: 1415; WAN024EZ5; Start 73; Stop 97
ggtattcgtaagcaatatcgtaagc

SEQ ID NO: 293426 - DNA, 25 bp, Artificial
  probe
  misc_feature (1)..(25): SEQ ID NO: 1415; WAN024EZ5; Start 67; Stop 91
cttcgtggtattcgtaagcaatatc

SEQ ID NO: 293427 - DNA, 25 bp, Artificial
  probe
  misc_feature (1)..(25): SEQ ID NO: 1415; WAN024EZ5; Start 66; Stop 90
acttcgtggtattcgtaagcaatat

SEQ ID NO: 293428 - DNA, 25 bp, Artificial
  probe
  misc_feature (1)..(25): SEQ ID NO: 1415; WAN024EZ5; Start 74; Stop 98
gtattcgtaagcaatatcgtaagca

SEQ ID NO: 293429 - DNA, 25 bp, Artificial
  probe
  misc_feature (1)..(25): SEQ ID NO: 1415; WAN024EZ5; Start 65; Stop 89
aacttcgtggtattcgtaagcaata

SEQ ID NO: 293430 - DNA, 25 bp, Artificial
  probe
  misc_feature (1)..(25): SEQ ID NO: 1415; WAN024EZ5; Start 360; Stop 384
tgtggtagtagaatatacggttgat

SEQ ID NO: 293431 - DNA, 25 bp, Artificial
  probe
  misc_feature (1)..(25): SEQ ID NO: 1415; WAN024EZ5; Start 359; Stop 383
atgtggtagtagaatatacggttga

SEQ ID NO: 293432 - DNA, 25 bp, Artificial
  probe
  misc_feature (1)..(25): SEQ ID NO: 1415; WAN024EZ5; Start 71; Stop 95
gtggtattcgtaagcaatatcgtaa

SEQ ID NO: 293433 - DNA, 25 bp, Artificial
  probe
  misc_feature (1)..(25): SEQ ID NO: 1415; WAN024EZ5; Start 70; Stop 94
cgtggtattcgtaagcaatatcgta

SEQ ID NO: 293434 - DNA, 25 bp, Artificial
  probe
  misc_feature (1)..(25): SEQ ID NO: 1415; WAN024EZ5; Start 72; Stop 96
tggtattcgtaagcaatatcgtaag

SEQ ID NO: 293435 - DNA, 25 bp, Artificial
  probe
  misc_feature (1)..(25): SEQ ID NO: 1415; WAN024EZ5; Start 498; Stop 522
agatgagattaagaagcgactggaa

SEQ ID NO: 293436 - DNA, 25 bp, Artificial
  probe
  misc_feature (1)..(25): SEQ ID NO: 1415; WAN024EZ5; Start 75; Stop 99
tattcgtaagcaatatcgtaagcaa

SEQ ID NO: 293437 - DNA, 25 bp, Artificial
  probe
  misc_feature (1)..(25): SEQ ID NO: 1415; WAN024EZ5; Start 307; Stop 331
caggagcgagattacattactcata

SEQ ID NO: 293438 - DNA, 25 bp, Artificial
  probe
  misc_feature (1)..(25): SEQ ID NO: 1415; WAN024EZ5; Start 304; Stop 328
atacaggagcgagattacattactc

SEQ ID NO: 293439 - DNA, 25 bp, Artificial
  probe
  misc_feature (1)..(25): SEQ ID NO: 1415; WAN024EZ5; Start 309; Stop 333
ggagcgagattacattactcataga

SEQ ID NO: 293440 - DNA, 25 bp, Artificial
  probe
  misc_feature (1)..(25): SEQ ID NO: 1415; WAN024EZ5; Start 308; Stop 332
aggagcgagattacattactcatag

SEQ ID NO: 293441 - DNA, 25 bp, Artificial
  probe
  misc_feature (1)..(25): SEQ ID NO: 1415; WAN024EZ5; Start 68; Stop 92
ttcgtggtattcgtaagcaatatcg

SEQ ID NO: 293442 - DNA, 25 bp, Artificial
  probe
  misc_feature (1)..(25): SEQ ID NO: 1415; WAN024EZ5; Start 347; Stop 371
atcgttcctatcatgtggtagtaga

SEQ ID NO: 293443 - DNA, 25 bp, Artificial
  probe
  misc_feature (1)..(25): SEQ ID NO: 1415; WAN024EZ5; Start 305; Stop 329
tacaggagcgagattacattactca

SEQ ID NO: 293444 - DNA, 25 bp, Artificial
  probe
  misc_feature (1)..(25): SEQ ID NO: 1415; WAN024EZ5; Start 454; Stop 478
acgatagaacattctctcaactaca

SEQ ID NO: 293445 - DNA, 25 bp, Artificial
  probe
  misc_feature (1)..(25): SEQ ID NO: 1415; WAN024EZ5; Start 349; Stop 373
cgttcctatcatgtggtagtagaat

SEQ ID NO: 293446 - DNA, 25 bp, Artificial
  probe
  misc_feature (1)..(25): SEQ ID NO: 1415; WAN024EZ5; Start 464; Stop 488
attctctcaactacaagtaccaagg

SEQ ID NO: 293447 - DNA, 25 bp, Artificial
  probe
  misc_feature (1)..(25): SEQ ID NO: 1415; WAN024EZ5; Start 348; Stop 372
tcgttcctatcatgtggtagtagaa

SEQ ID NO: 293448 - DNA, 25 bp, Artificial
  probe
  misc_feature (1)..(25): SEQ ID NO: 1415; WAN024EZ5; Start 346; Stop 370
tatcgttcctatcatgtggtagtag

SEQ ID NO: 293449 - DNA, 25 bp, Artificial
  probe
  misc_feature (1)..(25): SEQ ID NO: 1415; WAN024EZ5; Start 345; Stop 369
ctatcgttcctatcatgtggtagta

SEQ ID NO: 293450 - DNA, 25 bp, Artificial
  probe
  misc_feature (1)..(25): SEQ ID NO: 1415; WAN024EZ5; Start 462; Stop 486
acattctctcaactacaagtaccaa

SEQ ID NO: 293451 - DNA, 25 bp, Artificial
  probe
  misc_feature (1)..(25): SEQ ID NO: 1415; WAN024EZ5; Start 461; Stop 485
aacattctctcaactacaagtacca

SEQ ID NO: 293452 - DNA, 25 bp, Artificial
  probe
  misc_feature (1)..(25): SEQ ID NO: 1415; WAN024EZ5; Start 451; Stop 475
gcaacgatagaacattctctcaact

SEQ ID NO: 293453 - DNA, 25 bp, Artificial
  probe
  misc_feature (1)..(25): SEQ ID NO: 1415; WAN024EZ5; Start 358; Stop 382
catgtggtagtagaatatacggttg

SEQ ID NO: 293454 - DNA, 25 bp, Artificial
  probe
  misc_feature (1)..(25): SEQ ID NO: 1415; WAN024EZ5; Start 306; Stop 330
acaggagcgagattacattactcat

SEQ ID NO: 293455 - DNA, 25 bp, Artificial
  probe
  misc_feature (1)..(25): SEQ ID NO: 1416; WAN024CNT; Start 73; Stop 97
aagcagttgaaacacttgaagaaat

SEQ ID NO: 293456 - DNA, 25 bp, Artificial
  probe
  misc_feature (1)..(25): SEQ ID NO: 1416; WAN024CNT; Start 72; Stop 96
aaagcagttgaaacacttgaagaaa

SEQ ID NO: 293457 - DNA, 25 bp, Artificial
  probe
  misc_feature (1)..(25): SEQ ID NO: 1416; WAN024CNT; Start 74; Stop 98
agcagttgaaacacttgaagaaatt

SEQ ID NO: 293458 - DNA, 25 bp, Artificial
  probe
  misc_feature (1)..(25): SEQ ID NO: 1416; WAN024CNT; Start 71; Stop 95
caaagcagttgaaacacttgaagaa

SEQ ID NO: 293459 - DNA, 25 bp, Artificial
  probe
  misc_feature (1)..(25): SEQ ID NO: 1416; WAN024CNT; Start 69; Stop 93
gacaaagcagttgaaacacttgaag

SEQ ID NO: 293460 - DNA, 25 bp, Artificial
  probe
  misc_feature (1)..(25): SEQ ID NO: 1416; WAN024CNT; Start 70; Stop 94
acaaagcagttgaaacacttgaaga

SEQ ID NO: 293461 - DNA, 25 bp, Artificial
  probe
  misc_feature (1)..(25): SEQ ID NO: 1416; WAN024CNT; Start 68; Stop 92
agacaaagcagttgaaacacttgaa

SEQ ID NO: 293462 - DNA, 25 bp, Artificial
  probe
  misc_feature (1)..(25): SEQ ID NO: 1416; WAN024CNT; Start 67; Stop 91
gagacaaagcagttgaaacacttga

SEQ ID NO: 293463 - DNA, 25 bp, Artificial
  probe
  misc_feature (1)..(25): SEQ ID NO: 1416; WAN024CNT; Start 26; Stop 50
cgctgaaattggataccactataca

SEQ ID NO: 293464 - DNA, 25 bp, Artificial
  probe
  misc_feature (1)..(25): SEQ ID NO: 1416; WAN024CNT; Start 27; Stop 51
gctgaaattggataccactatacat

SEQ ID NO: 293465 - DNA, 25 bp, Artificial
  probe
  misc_feature (1)..(25): SEQ ID NO: 1416; WAN024CNT; Start 25; Stop 49
ccgctgaaattggataccactatac

SEQ ID NO: 293466 - DNA, 25 bp, Artificial
  probe
  misc_feature (1)..(25): SEQ ID NO: 1416; WAN024CNT; Start 33; Stop 57
attggataccactatacatgggttc

SEQ ID NO: 293467 - DNA, 25 bp, Artificial
  probe
  misc_feature (1)..(25): SEQ ID NO: 1416; WAN024CNT; Start 32; Stop 56
aattggataccactatacatgggtt

SEQ ID NO: 293468 - DNA, 25 bp, Artificial
  probe
  misc_feature (1)..(25): SEQ ID NO: 1416; WAN024CNT; Start 31; Stop 55
aaattggataccactatacatgggt

SEQ ID NO: 293469 - DNA, 25 bp, Artificial
  probe
  misc_feature (1)..(25): SEQ ID NO: 1416; WAN024CNT; Start 75; Stop 99
gcagttgaaacacttgaagaaattt

SEQ ID NO: 293470 - DNA, 25 bp, Artificial
  probe
  misc_feature (1)..(25): SEQ ID NO: 1416; WAN024CNT; Start 34; Stop 58
ttggataccactatacatgggttca

SEQ ID NO: 293471 - DNA, 25 bp, Artificial
  probe
  misc_feature (1)..(25): SEQ ID NO: 1416; WAN024CNT; Start 30; Stop 54
gaaattggataccactatacatggg

SEQ ID NO: 293472 - DNA, 25 bp, Artificial
  probe
  misc_feature (1)..(25): SEQ ID NO: 1416; WAN024CNT; Start 38; Stop 62
ataccactatacatgggttcaccaa

SEQ ID NO: 293473 - DNA, 25 bp, Artificial
  probe
  misc_feature (1)..(25): SEQ ID NO: 1416; WAN024CNT; Start 42; Stop 66
cactatacatgggttcaccaacttc

SEQ ID NO: 293474 - DNA, 25 bp, Artificial
  probe
  misc_feature (1)..(25): SEQ ID NO: 1416; WAN024CNT; Start 37; Stop 61
gataccactatacatgggttcacca

SEQ ID NO: 293475 - DNA, 25 bp, Artificial
  probe
  misc_feature (1)..(25): SEQ ID NO: 1416; WAN024CNT; Start 35; Stop 59
tggataccactatacatgggttcac

SEQ ID NO: 293476 - DNA, 25 bp, Artificial
  probe
  misc_feature (1)..(25): SEQ ID NO: 1416; WAN024CNT; Start 29; Stop 53
tgaaattggataccactatacatgg

SEQ ID NO: 293477 - DNA, 25 bp, Artificial
  probe
  misc_feature (1)..(25): SEQ ID NO: 1416; WAN024CNT; Start 66; Stop 90
cgagacaaagcagttgaaacacttg

SEQ ID NO: 293478 - DNA, 25 bp, Artificial
  probe
  misc_feature (1)..(25): SEQ ID NO: 1416; WAN024CNT; Start 39; Stop 63
taccactatacatgggttcaccaac

SEQ ID NO: 293479 - DNA, 25 bp, Artificial
  probe
  misc_feature (1)..(25): SEQ ID NO: 1416; WAN024CNT; Start 36; Stop 60
ggataccactatacatgggttcacc

SEQ ID NO: 293480 - DNA, 25 bp, Artificial
  probe
  misc_feature (1)..(25): SEQ ID NO: 1416; WAN024CNT; Start 24; Stop 48
gccgctgaaattggataccactata

SEQ ID NO: 293481 - DNA, 25 bp, Artificial
  probe
  misc_feature (1)..(25): SEQ ID NO: 1416; WAN024CNT; Start 41; Stop 65
ccactatacatgggttcaccaactt

SEQ ID NO: 293482 - DNA, 25 bp, Artificial
  probe
  misc_feature (1)..(25): SEQ ID NO: 1416; WAN024CNT; Start 43; Stop 67
actatacatgggttcaccaacttcg

SEQ ID NO: 293483 - DNA, 25 bp, Artificial
  probe
  misc_feature (1)..(25): SEQ ID NO: 1416; WAN024CNT; Start 28; Stop 52
ctgaaattggataccactatacatg

SEQ ID NO: 293484 - DNA, 25 bp, Artificial
  probe
  misc_feature (1)..(25): SEQ ID NO: 1416; WAN024CNT; Start 63; Stop 87
cttcgagacaaagcagttgaaacac

SEQ ID NO: 293485 - DNA, 25 bp, Artificial
  probe
  misc_feature (1)..(25): SEQ ID NO: 1416; WAN024CNT; Start 45; Stop 69
tatacatgggttcaccaacttcgag

SEQ ID NO: 293486 - DNA, 25 bp, Artificial
  probe
  misc_feature (1)..(25): SEQ ID NO: 1416; WAN024CNT; Start 44; Stop 68
ctatacatgggttcaccaacttcga

SEQ ID NO: 293487 - DNA, 25 bp, Artificial
  probe
  misc_feature (1)..(25): SEQ ID NO: 1416; WAN024CNT; Start 65; Stop 89
tcgagacaaagcagttgaaacactt

SEQ ID NO: 293488 - DNA, 25 bp, Artificial
  probe
  misc_feature (1)..(25): SEQ ID NO: 1417; WAN024C7H; Start 79; Stop 103
cataccattctcagtcaacatccac

SEQ ID NO: 293489 - DNA, 25 bp, Artificial
  probe
  misc_feature (1)..(25): SEQ ID NO: 1417; WAN024C7H; Start 86; Stop 110
ttctcagtcaacatccactcaatat

SEQ ID NO: 293490 - DNA, 25 bp, Artificial
  probe
  misc_feature (1)..(25): SEQ ID NO: 1417; WAN024C7H; Start 85; Stop 109
attctcagtcaacatccactcaata

SEQ ID NO: 293491 - DNA, 25 bp, Artificial
  probe
  misc_feature (1)..(25): SEQ ID NO: 1417; WAN024C7H; Start 84; Stop 108
cattctcagtcaacatccactcaat

SEQ ID NO: 293492 - DNA, 25 bp, Artificial
  probe
  misc_feature (1)..(25): SEQ ID NO: 1417; WAN024C7H; Start 30; Stop 54
catcttgaatcattccatcttgacg

SEQ ID NO: 293493 - DNA, 25 bp, Artificial
  probe
  misc_feature (1)..(25): SEQ ID NO: 1417; WAN024C7H; Start 22; Stop 46
acggtaatcatcttgaatcattcca

SEQ ID NO: 293494 - DNA, 25 bp, Artificial
  probe
  misc_feature (1)..(25): SEQ ID NO: 1417; WAN024C7H; Start 23; Stop 47
cggtaatcatcttgaatcattccat

SEQ ID NO: 293495 - DNA, 25 bp, Artificial
  probe
  misc_feature (1)..(25): SEQ ID NO: 1417; WAN024C7H; Start 29; Stop 53
tcatcttgaatcattccatcttgac

SEQ ID NO: 293496 - DNA, 25 bp, Artificial
  probe
  misc_feature (1)..(25): SEQ ID NO: 1417; WAN024C7H; Start 80; Stop 104
ataccattctcagtcaacatccact

SEQ ID NO: 293497 - DNA, 25 bp, Artificial
  probe
  misc_feature (1)..(25): SEQ ID NO: 1417; WAN024C7H; Start 31; Stop 55
atcttgaatcattccatcttgacgg

SEQ ID NO: 293498 - DNA, 25 bp, Artificial
  probe
  misc_feature (1)..(25): SEQ ID NO: 1417; WAN024C7H; Start 21; Stop 45
tacggtaatcatcttgaatcattcc

SEQ ID NO: 293499 - DNA, 25 bp, Artificial
  probe
  misc_feature (1)..(25): SEQ ID NO: 1417; WAN024C7H; Start 78; Stop 102
ccataccattctcagtcaacatcca

SEQ ID NO: 293500 - DNA, 25 bp, Artificial
  probe
  misc_feature (1)..(25): SEQ ID NO: 1417; WAN024C7H; Start 28; Stop 52
atcatcttgaatcattccatcttga

SEQ ID NO: 293501 - DNA, 25 bp, Artificial
  probe
  misc_feature (1)..(25): SEQ ID NO: 1417; WAN024C7H; Start 81; Stop 105
taccattctcagtcaacatccactc

SEQ ID NO: 293502 - DNA, 25 bp, Artificial
  probe
  misc_feature (1)..(25): SEQ ID NO: 1417; WAN024C7H; Start 87; Stop 111
tctcagtcaacatccactcaatatt

SEQ ID NO: 293503 - DNA, 25 bp, Artificial
  probe
  misc_feature (1)..(25): SEQ ID NO: 1417; WAN024C7H; Start 146; Stop 170
taaatcccttgctcataaatctccc

SEQ ID NO: 293504 - DNA, 25 bp, Artificial
  probe
  misc_feature (1)..(25): SEQ ID NO: 1417; WAN024C7H; Start 24; Stop 48
ggtaatcatcttgaatcattccatc

SEQ ID NO: 293505 - DNA, 25 bp, Artificial
  probe
  misc_feature (1)..(25): SEQ ID NO: 1417; WAN024C7H; Start 27; Stop 51
aatcatcttgaatcattccatcttg

SEQ ID NO: 293506 - DNA, 25 bp, Artificial
  probe
  misc_feature (1)..(25): SEQ ID NO: 1417; WAN024C7H; Start 138; Stop 162
cgatgtcataaatcccttgctcata

SEQ ID NO: 293507 - DNA, 25 bp, Artificial
  probe
  misc_feature (1)..(25): SEQ ID NO: 1417; WAN024C7H; Start 145; Stop 169
ataaatcccttgctcataaatctcc

SEQ ID NO: 293508 - DNA, 25 bp, Artificial
  probe
  misc_feature (1)..(25): SEQ ID NO: 1417; WAN024C7H; Start 83; Stop 107
ccattctcagtcaacatccactcaa

SEQ ID NO: 293509 - DNA, 25 bp, Artificial
  probe
  misc_feature (1)..(25): SEQ ID NO: 1417; WAN024C7H; Start 18; Stop 42
caatacggtaatcatcttgaatcat

SEQ ID NO: 293510 - DNA, 25 bp, Artificial
  probe
  misc_feature (1)..(25): SEQ ID NO: 1417; WAN024C7H; Start 139; Stop 163
gatgtcataaatcccttgctcataa

SEQ ID NO: 293511 - DNA, 25 bp, Artificial
  probe
  misc_feature (1)..(25): SEQ ID NO: 1417; WAN024C7H; Start 141; Stop 165
tgtcataaatcccttgctcataaat

SEQ ID NO: 293512 - DNA, 25 bp, Artificial
  probe
  misc_feature (1)..(25): SEQ ID NO: 1417; WAN024C7H; Start 32; Stop 56
tcttgaatcattccatcttgacgga

SEQ ID NO: 293513 - DNA, 25 bp, Artificial
  probe
  misc_feature (1)..(25): SEQ ID NO: 1417; WAN024C7H; Start 140; Stop 164
atgtcataaatcccttgctcataaa

SEQ ID NO: 293514 - DNA, 25 bp, Artificial
  probe
  misc_feature (1)..(25): SEQ ID NO: 1417; WAN024C7H; Start 11; Stop 35
acaaagtcaatacggtaatcatctt

SEQ ID NO: 293515 - DNA, 25 bp, Artificial
  probe
  misc_feature (1)..(25): SEQ ID NO: 1417; WAN024C7H; Start 147; Stop 171
aaatcccttgctcataaatctccca

SEQ ID NO: 293516 - DNA, 25 bp, Artificial
  probe
  misc_feature (1)..(25): SEQ ID NO: 1417; WAN024C7H; Start 142; Stop 166
gtcataaatcccttgctcataaatc

SEQ ID NO: 293517 - DNA, 25 bp, Artificial
  probe
  misc_feature (1)..(25): SEQ ID NO: 1417; WAN024C7H; Start 20; Stop 44
atacggtaatcatcttgaatcattc

SEQ ID NO: 293518 - DNA, 25 bp, Artificial
  probe
  misc_feature (1)..(25): SEQ ID NO: 1417; WAN024C7H; Start 143; Stop 167
tcataaatcccttgctcataaatct

SEQ ID NO: 293519 - DNA, 25 bp, Artificial
  probe
  misc_feature (1)..(25): SEQ ID NO: 1417; WAN024C7H; Start 25; Stop 49
gtaatcatcttgaatcattccatct

SEQ ID NO: 293520 - DNA, 25 bp, Artificial
  probe
  misc_feature (1)..(25): SEQ ID NO: 1417; WAN024C7H; Start 12; Stop 36
caaagtcaatacggtaatcatcttg

SEQ ID NO: 293521 - DNA, 25 bp, Artificial
  probe
  misc_feature (1)..(25): SEQ ID NO: 1418; WAN024C6Q; Start 172; Stop 196
ggcttagacactcctatgattaact

SEQ ID NO: 293522 - DNA, 25 bp, Artificial
  probe
  misc_feature (1)..(25): SEQ ID NO: 1418; WAN024C6Q; Start 109; Stop 133
catcaggttattattacgacaggtc

SEQ ID NO: 293523 - DNA, 25 bp, Artificial
  probe
  misc_feature (1)..(25): SEQ ID NO: 1418; WAN024C6Q; Start 178; Stop 202
gacactcctatgattaacttcaacg

SEQ ID NO: 293524 - DNA, 25 bp, Artificial
  probe
  misc_feature (1)..(25): SEQ ID NO: 1418; WAN024C6Q; Start 179; Stop 203
acactcctatgattaacttcaacgg

SEQ ID NO: 293525 - DNA, 25 bp, Artificial
  probe
  misc_feature (1)..(25): SEQ ID NO: 1418; WAN024C6Q; Start 611; Stop 635
tgctcaagataatgaatcgtgacaa

SEQ ID NO: 293526 - DNA, 25 bp, Artificial
  probe
  misc_feature (1)..(25): SEQ ID NO: 1418; WAN024C6Q; Start 610; Stop 634
ttgctcaagataatgaatcgtgaca

SEQ ID NO: 293527 - DNA, 25 bp, Artificial
  probe
  misc_feature (1)..(25): SEQ ID NO: 1418; WAN024C6Q; Start 173; Stop 197
gcttagacactcctatgattaactt

SEQ ID NO: 293528 - DNA, 25 bp, Artificial
  probe
  misc_feature (1)..(25): SEQ ID NO: 1418; WAN024C6Q; Start 177; Stop 201
agacactcctatgattaacttcaac

SEQ ID NO: 293529 - DNA, 25 bp, Artificial
  probe
  misc_feature (1)..(25): SEQ ID NO: 1418; WAN024C6Q; Start 602; Stop 626
tggactacttgctcaagataatgaa

SEQ ID NO: 293530 - DNA, 25 bp, Artificial
  probe
  misc_feature (1)..(25): SEQ ID NO: 1418; WAN024C6Q; Start 601; Stop 625
ttggactacttgctcaagataatga

SEQ ID NO: 293531 - DNA, 25 bp, Artificial
  probe
  misc_feature (1)..(25): SEQ ID NO: 1418; WAN024C6Q; Start 609; Stop 633
cttgctcaagataatgaatcgtgac

SEQ ID NO: 293532 - DNA, 25 bp, Artificial
  probe
  misc_feature (1)..(25): SEQ ID NO: 1418; WAN024C6Q; Start 608; Stop 632
acttgctcaagataatgaatcgtga

SEQ ID NO: 293533 - DNA, 25 bp, Artificial
  probe
  misc_feature (1)..(25): SEQ ID NO: 1418; WAN024C6Q; Start 607; Stop 631
tacttgctcaagataatgaatcgtg

SEQ ID NO: 293534 - DNA, 25 bp, Artificial
  probe
  misc_feature (1)..(25): SEQ ID NO: 1418; WAN024C6Q; Start 180; Stop 204
cactcctatgattaacttcaacgga

SEQ ID NO: 293535 - DNA, 25 bp, Artificial
  probe
  misc_feature (1)..(25): SEQ ID NO: 1418; WAN024C6Q; Start 181; Stop 205
actcctatgattaacttcaacggat

SEQ ID NO: 293536 - DNA, 25 bp, Artificial
  probe
  misc_feature (1)..(25): SEQ ID NO: 1418; WAN024C6Q; Start 606; Stop 630
ctacttgctcaagataatgaatcgt

SEQ ID NO: 293537 - DNA, 25 bp, Artificial
  probe
  misc_feature (1)..(25): SEQ ID NO: 1418; WAN024C6Q; Start 605; Stop 629
actacttgctcaagataatgaatcg

SEQ ID NO: 293538 - DNA, 25 bp, Artificial
  probe
  misc_feature (1)..(25): SEQ ID NO: 1418; WAN024C6Q; Start 603; Stop 627
ggactacttgctcaagataatgaat

SEQ ID NO: 293539 - DNA, 25 bp, Artificial
  probe
  misc_feature (1)..(25): SEQ ID NO: 1418; WAN024C6Q; Start 519; Stop 543
gcatcaactttctatcaatacctgg

SEQ ID NO: 293540 - DNA, 25 bp, Artificial
  probe
  misc_feature (1)..(25): SEQ ID NO: 1418; WAN024C6Q; Start 516; Stop 540
ccagcatcaactttctatcaatacc

SEQ ID NO: 293541 - DNA, 25 bp, Artificial
  probe
  misc_feature (1)..(25): SEQ ID NO: 1418; WAN024C6Q; Start 512; Stop 536
tctaccagcatcaactttctatcaa

SEQ ID NO: 293542 - DNA, 25 bp, Artificial
  probe
  misc_feature (1)..(25): SEQ ID NO: 1418; WAN024C6Q; Start 511; Stop 535
ttctaccagcatcaactttctatca

SEQ ID NO: 293543 - DNA, 25 bp, Artificial
  probe
  misc_feature (1)..(25): SEQ ID NO: 1418; WAN024C6Q; Start 509; Stop 533
ccttctaccagcatcaactttctat

SEQ ID NO: 293544 - DNA, 25 bp, Artificial
  probe
  misc_feature (1)..(25): SEQ ID NO: 1418; WAN024C6Q; Start 182; Stop 206
ctcctatgattaacttcaacggatc

SEQ ID NO: 293545 - DNA, 25 bp, Artificial
  probe
  misc_feature (1)..(25): SEQ ID NO: 1418; WAN024C6Q; Start 510; Stop 534
cttctaccagcatcaactttctatc

SEQ ID NO: 293546 - DNA, 25 bp, Artificial
  probe
  misc_feature (1)..(25): SEQ ID NO: 1418; WAN024C6Q; Start 171; Stop 195
gggcttagacactcctatgattaac

SEQ ID NO: 293547 - DNA, 25 bp, Artificial
  probe
  misc_feature (1)..(25): SEQ ID NO: 1418; WAN024C6Q; Start 520; Stop 544
catcaactttctatcaatacctggg

SEQ ID NO: 293548 - DNA, 25 bp, Artificial
  probe
  misc_feature (1)..(25): SEQ ID NO: 1418; WAN024C6Q; Start 640; Stop 664
gatttgattgcctttggagatgaac

SEQ ID NO: 293549 - DNA, 25 bp, Artificial
  probe
  misc_feature (1)..(25): SEQ ID NO: 1418; WAN024C6Q; Start 639; Stop 663
agatttgattgcctttggagatgaa

SEQ ID NO: 293550 - DNA, 25 bp, Artificial
  probe
  misc_feature (1)..(25): SEQ ID NO: 1418; WAN024C6Q; Start 515; Stop 539
accagcatcaactttctatcaatac

SEQ ID NO: 293551 - DNA, 25 bp, Artificial
  probe
  misc_feature (1)..(25): SEQ ID NO: 1418; WAN024C6Q; Start 170; Stop 194
tgggcttagacactcctatgattaa

SEQ ID NO: 293552 - DNA, 25 bp, Artificial
  probe
  misc_feature (1)..(25): SEQ ID NO: 1418; WAN024C6Q; Start 518; Stop 542
agcatcaactttctatcaatacctg

SEQ ID NO: 293553 - DNA, 25 bp, Artificial
  probe
  misc_feature (1)..(25): SEQ ID NO: 1418; WAN024C6Q; Start 517; Stop 541
cagcatcaactttctatcaatacct

SEQ ID NO: 293554 - DNA, 25 bp, Artificial
  probe
  misc_feature (1)..(25): SEQ ID NO: 1419; WAN024CVN; Start 563; Stop 587
ttactgactattgcttcggtattga

SEQ ID NO: 293555 - DNA, 25 bp, Artificial
  probe
  misc_feature (1)..(25): SEQ ID NO: 1419; WAN024CVN; Start 564; Stop 588
tactgactattgcttcggtattgat

SEQ ID NO: 293556 - DNA, 25 bp, Artificial
  probe
  misc_feature (1)..(25): SEQ ID NO: 1419; WAN024CVN; Start 521; Stop 545
cagtcctagaagccaagtatgaatt

SEQ ID NO: 293557 - DNA, 25 bp, Artificial
  probe
  misc_feature (1)..(25): SEQ ID NO: 1419; WAN024CVN; Start 849; Stop 873
ttaccaactactccatcattcctcc

SEQ ID NO: 293558 - DNA, 25 bp, Artificial
  probe
  misc_feature (1)..(25): SEQ ID NO: 1419; WAN024CVN; Start 565; Stop 589
actgactattgcttcggtattgatc

SEQ ID NO: 293559 - DNA, 25 bp, Artificial
  probe
  misc_feature (1)..(25): SEQ ID NO: 1419; WAN024CVN; Start 318; Stop 342
taagcatacgagtatcagccagatt

SEQ ID NO: 293560 - DNA, 25 bp, Artificial
  probe
  misc_feature (1)..(25): SEQ ID NO: 1419; WAN024CVN; Start 570; Stop 594
ctattgcttcggtattgatcctctc

SEQ ID NO: 293561 - DNA, 25 bp, Artificial
  probe
  misc_feature (1)..(25): SEQ ID NO: 1419; WAN024CVN; Start 568; Stop 592
gactattgcttcggtattgatcctc

SEQ ID NO: 293562 - DNA, 25 bp, Artificial
  probe
  misc_feature (1)..(25): SEQ ID NO: 1419; WAN024CVN; Start 569; Stop 593
actattgcttcggtattgatcctct

SEQ ID NO: 293563 - DNA, 25 bp, Artificial
  probe
  misc_feature (1)..(25): SEQ ID NO: 1419; WAN024CVN; Start 566; Stop 590
ctgactattgcttcggtattgatcc

SEQ ID NO: 293564 - DNA, 25 bp, Artificial
  probe
  misc_feature (1)..(25): SEQ ID NO: 1419; WAN024CVN; Start 520; Stop 544
tcagtcctagaagccaagtatgaat

SEQ ID NO: 293565 - DNA, 25 bp, Artificial
  probe
  misc_feature (1)..(25): SEQ ID NO: 1419; WAN024CVN; Start 567; Stop 591
tgactattgcttcggtattgatcct

SEQ ID NO: 293566 - DNA, 25 bp, Artificial
  probe
  misc_feature (1)..(25): SEQ ID NO: 1419; WAN024CVN; Start 317; Stop 341
gtaagcatacgagtatcagccagat

SEQ ID NO: 293567 - DNA, 25 bp, Artificial
  probe
  misc_feature (1)..(25): SEQ ID NO: 1419; WAN024CVN; Start 350; Stop 374
acatgctagatatggattctctctt

SEQ ID NO: 293568 - DNA, 25 bp, Artificial
  probe
  misc_feature (1)..(25): SEQ ID NO: 1419; WAN024CVN; Start 349; Stop 373
aacatgctagatatggattctctct

SEQ ID NO: 293569 - DNA, 25 bp, Artificial
  probe
  misc_feature (1)..(25): SEQ ID NO: 1419; WAN024CVN; Start 571; Stop 595
tattgcttcggtattgatcctctca

SEQ ID NO: 293570 - DNA, 25 bp, Artificial
  probe
  misc_feature (1)..(25): SEQ ID NO: 1419; WAN024CVN; Start 319; Stop 343
aagcatacgagtatcagccagattc

SEQ ID NO: 293571 - DNA, 25 bp, Artificial
  probe
  misc_feature (1)..(25): SEQ ID NO: 1419; WAN024CVN; Start 848; Stop 872
tttaccaactactccatcattcctc

SEQ ID NO: 293572 - DNA, 25 bp, Artificial
  probe
  misc_feature (1)..(25): SEQ ID NO: 1419; WAN024CVN; Start 847; Stop 871
ctttaccaactactccatcattcct

SEQ ID NO: 293573 - DNA, 25 bp, Artificial
  probe
  misc_feature (1)..(25): SEQ ID NO: 1419; WAN024CVN; Start 572; Stop 596
attgcttcggtattgatcctctcat

SEQ ID NO: 293574 - DNA, 25 bp, Artificial
  probe
  misc_feature (1)..(25): SEQ ID NO: 1419; WAN024CVN; Start 854; Stop 878
aactactccatcattcctccctaaa

SEQ ID NO: 293575 - DNA, 25 bp, Artificial
  probe
  misc_feature (1)..(25): SEQ ID NO: 1419; WAN024CVN; Start 846; Stop 870
cctttaccaactactccatcattcc

SEQ ID NO: 293576 - DNA, 25 bp, Artificial
  probe
  misc_feature (1)..(25): SEQ ID NO: 1419; WAN024CVN; Start 845; Stop 869
ccctttaccaactactccatcattc

SEQ ID NO: 293577 - DNA, 25 bp, Artificial
  probe
  misc_feature (1)..(25): SEQ ID NO: 1419; WAN024CVN; Start 562; Stop 586
tttactgactattgcttcggtattg

SEQ ID NO: 293578 - DNA, 25 bp, Artificial
  probe
  misc_feature (1)..(25): SEQ ID NO: 1419; WAN024CVN; Start 853; Stop 877
caactactccatcattcctccctaa

SEQ ID NO: 293579 - DNA, 25 bp, Artificial
  probe
  misc_feature (1)..(25): SEQ ID NO: 1419; WAN024CVN; Start 522; Stop 546
agtcctagaagccaagtatgaattt

SEQ ID NO: 293580 - DNA, 25 bp, Artificial
  probe
  misc_feature (1)..(25): SEQ ID NO: 1419; WAN024CVN; Start 503; Stop 527
tgagaacaaagatgatttcagtcct

SEQ ID NO: 293581 - DNA, 25 bp, Artificial
  probe
  misc_feature (1)..(25): SEQ ID NO: 1419; WAN024CVN; Start 516; Stop 540
gatttcagtcctagaagccaagtat

SEQ ID NO: 293582 - DNA, 25 bp, Artificial
  probe
  misc_feature (1)..(25): SEQ ID NO: 1419; WAN024CVN; Start 517; Stop 541
atttcagtcctagaagccaagtatg

SEQ ID NO: 293583 - DNA, 25 bp, Artificial
  probe
  misc_feature (1)..(25): SEQ ID NO: 1419; WAN024CVN; Start 509; Stop 533
caaagatgatttcagtcctagaagc

SEQ ID NO: 293584 - DNA, 25 bp, Artificial
  probe
  misc_feature (1)..(25): SEQ ID NO: 1419; WAN024CVN; Start 356; Stop 380
tagatatggattctctctttcaggg

SEQ ID NO: 293585 - DNA, 25 bp, Artificial
  probe
  misc_feature (1)..(25): SEQ ID NO: 1419; WAN024CVN; Start 510; Stop 534
aaagatgatttcagtcctagaagcc

SEQ ID NO: 293586 - DNA, 25 bp, Artificial
  probe
  misc_feature (1)..(25): SEQ ID NO: 1419; WAN024CVN; Start 504; Stop 528
gagaacaaagatgatttcagtccta

SEQ ID NO: 293587 - DNA, 25 bp, Artificial
  probe
  misc_feature (1)..(25): SEQ ID NO: 1420; WAN024C3T; Start 387; Stop 411
gactgtagaagagatgaatcctgtt

SEQ ID NO: 293588 - DNA, 25 bp, Artificial
  probe
  misc_feature (1)..(25): SEQ ID NO: 1420; WAN024C3T; Start 386; Stop 410
agactgtagaagagatgaatcctgt

SEQ ID NO: 293589 - DNA, 25 bp, Artificial
  probe
  misc_feature (1)..(25): SEQ ID NO: 1420; WAN024C3T; Start 388; Stop 412
actgtagaagagatgaatcctgttc

SEQ ID NO: 293590 - DNA, 25 bp, Artificial
  probe
  misc_feature (1)..(25): SEQ ID NO: 1420; WAN024C3T; Start 394; Stop 418
gaagagatgaatcctgttctattgc

SEQ ID NO: 293591 - DNA, 25 bp, Artificial
  probe
  misc_feature (1)..(25): SEQ ID NO: 1420; WAN024C3T; Start 771; Stop 795
gctggatatgattaagtgcttggtt

SEQ ID NO: 293592 - DNA, 25 bp, Artificial
  probe
  misc_feature (1)..(25): SEQ ID NO: 1420; WAN024C3T; Start 384; Stop 408
tcagactgtagaagagatgaatcct

SEQ ID NO: 293593 - DNA, 25 bp, Artificial
  probe
  misc_feature (1)..(25): SEQ ID NO: 1420; WAN024C3T; Start 855; Stop 879
agttgaagaagtgattggcattgtc

SEQ ID NO: 293594 - DNA, 25 bp, Artificial
  probe
  misc_feature (1)..(25): SEQ ID NO: 1420; WAN024C3T; Start 385; Stop 409
cagactgtagaagagatgaatcctg

SEQ ID NO: 293595 - DNA, 25 bp, Artificial
  probe
  misc_feature (1)..(25): SEQ ID NO: 1420; WAN024C3T; Start 854; Stop 878
cagttgaagaagtgattggcattgt

SEQ ID NO: 293596 - DNA, 25 bp, Artificial
  probe
  misc_feature (1)..(25): SEQ ID NO: 1420; WAN024C3T; Start 853; Stop 877
acagttgaagaagtgattggcattg

SEQ ID NO: 293597 - DNA, 25 bp, Artificial
  probe
  misc_feature (1)..(25): SEQ ID NO: 1420; WAN024C3T; Start 846; Stop 870
aacctacacagttgaagaagtgatt

SEQ ID NO: 293598 - DNA, 25 bp, Artificial
  probe
  misc_feature (1)..(25): SEQ ID NO: 1420; WAN024C3T; Start 847; Stop 871
acctacacagttgaagaagtgattg

SEQ ID NO: 293599 - DNA, 25 bp, Artificial
  probe
  misc_feature (1)..(25): SEQ ID NO: 1420; WAN024C3T; Start 848; Stop 872
cctacacagttgaagaagtgattgg

SEQ ID NO: 293600 - DNA, 25 bp, Artificial
  probe
  misc_feature (1)..(25): SEQ ID NO: 1420; WAN024C3T; Start 856; Stop 880
gttgaagaagtgattggcattgtcc

SEQ ID NO: 293601 - DNA, 25 bp, Artificial
  probe
  misc_feature (1)..(25): SEQ ID NO: 1420; WAN024C3T; Start 187; Stop 211
ggtggaagtaataagggaagagaaa

SEQ ID NO: 293602 - DNA, 25 bp, Artificial
  probe
  misc_feature (1)..(25): SEQ ID NO: 1420; WAN024C3T; Start 84; Stop 108
gattcattcttccttgcctctttac

SEQ ID NO: 293603 - DNA, 25 bp, Artificial
  probe
  misc_feature (1)..(25): SEQ ID NO: 1420; WAN024C3T; Start 85; Stop 109
attcattcttccttgcctctttaca

SEQ ID NO: 293604 - DNA, 25 bp, Artificial
  probe
  misc_feature (1)..(25): SEQ ID NO: 1420; WAN024C3T; Start 98; Stop 122
tgcctctttacaatctggatgaaat

SEQ ID NO: 293605 - DNA, 25 bp, Artificial
  probe
  misc_feature (1)..(25): SEQ ID NO: 1420; WAN024C3T; Start 100; Stop 124
cctctttacaatctggatgaaatcg

SEQ ID NO: 293606 - DNA, 25 bp, Artificial
  probe
  misc_feature (1)..(25): SEQ ID NO: 1420; WAN024C3T; Start 99; Stop 123
gcctctttacaatctggatgaaatc

SEQ ID NO: 293607 - DNA, 25 bp, Artificial
  probe
  misc_feature (1)..(25): SEQ ID NO: 1420; WAN024C3T; Start 899; Stop 923
tacgcttgattatgtgttcccttaa

SEQ ID NO: 293608 - DNA, 25 bp, Artificial
  probe
  misc_feature (1)..(25): SEQ ID NO: 1420; WAN024C3T; Start 898; Stop 922
ctacgcttgattatgtgttccctta

SEQ ID NO: 293609 - DNA, 25 bp, Artificial
  probe
  misc_feature (1)..(25): SEQ ID NO: 1420; WAN024C3T; Start 83; Stop 107
tgattcattcttccttgcctcttta

SEQ ID NO: 293610 - DNA, 25 bp, Artificial
  probe
  misc_feature (1)..(25): SEQ ID NO: 1420; WAN024C3T; Start 186; Stop 210
tggtggaagtaataagggaagagaa

SEQ ID NO: 293611 - DNA, 25 bp, Artificial
  probe
  misc_feature (1)..(25): SEQ ID NO: 1420; WAN024C3T; Start 428; Stop 452
tcaatgtcatgcaggaattactcat

SEQ ID NO: 293612 - DNA, 25 bp, Artificial
  probe
  misc_feature (1)..(25): SEQ ID NO: 1420; WAN024C3T; Start 395; Stop 419
aagagatgaatcctgttctattgca

SEQ ID NO: 293613 - DNA, 25 bp, Artificial
  probe
  misc_feature (1)..(25): SEQ ID NO: 1420; WAN024C3T; Start 253; Stop 277
ttatttgtaacgggttcttatagcg

SEQ ID NO: 293614 - DNA, 25 bp, Artificial
  probe
  misc_feature (1)..(25): SEQ ID NO: 1420; WAN024C3T; Start 772; Stop 796
ctggatatgattaagtgcttggttt

SEQ ID NO: 293615 - DNA, 25 bp, Artificial
  probe
  misc_feature (1)..(25): SEQ ID NO: 1420; WAN024C3T; Start 425; Stop 449
atgtcaatgtcatgcaggaattact

SEQ ID NO: 293616 - DNA, 25 bp, Artificial
  probe
  misc_feature (1)..(25): SEQ ID NO: 1420; WAN024C3T; Start 841; Stop 865
gttgaaacctacacagttgaagaag

SEQ ID NO: 293617 - DNA, 25 bp, Artificial
  probe
  misc_feature (1)..(25): SEQ ID NO: 1420; WAN024C3T; Start 902; Stop 926
gcttgattatgtgttcccttaactg

SEQ ID NO: 293618 - DNA, 25 bp, Artificial
  probe
  misc_feature (1)..(25): SEQ ID NO: 1420; WAN024C3T; Start 427; Stop 451
gtcaatgtcatgcaggaattactca

SEQ ID NO: 293619 - DNA, 25 bp, Artificial
  probe
  misc_feature (1)..(25): SEQ ID NO: 1420; WAN024C3T; Start 426; Stop 450
tgtcaatgtcatgcaggaattactc

SEQ ID NO: 293620 - DNA, 25 bp, Artificial
  probe
  misc_feature (1)..(25): SEQ ID NO: 1421; WAN024FI6; Start 248; Stop 272
agtctcctgaagatattgatgtgat

SEQ ID NO: 293621 - DNA, 25 bp, Artificial
  probe
  misc_feature (1)..(25): SEQ ID NO: 1421; WAN024FI6; Start 249; Stop 273
gtctcctgaagatattgatgtgatt

SEQ ID NO: 293622 - DNA, 25 bp, Artificial
  probe
  misc_feature (1)..(25): SEQ ID NO: 1421; WAN024FI6; Start 247; Stop 271
cagtctcctgaagatattgatgtga

SEQ ID NO: 293623 - DNA, 25 bp, Artificial
  probe
  misc_feature (1)..(25): SEQ ID NO: 1421; WAN024FI6; Start 246; Stop 270
ccagtctcctgaagatattgatgtg

SEQ ID NO: 293624 - DNA, 25 bp, Artificial
  probe
  misc_feature (1)..(25): SEQ ID NO: 1421; WAN024FI6; Start 22; Stop 46
atttcctatgatggttatgcctttg

SEQ ID NO: 293625 - DNA, 25 bp, Artificial
  probe
  misc_feature (1)..(25): SEQ ID NO: 1421; WAN024FI6; Start 19; Stop 43
actatttcctatgatggttatgcct

SEQ ID NO: 293626 - DNA, 25 bp, Artificial
  probe
  misc_feature (1)..(25): SEQ ID NO: 1421; WAN024FI6; Start 586; Stop 610
tataaacagattcgcaatatggtgg

SEQ ID NO: 293627 - DNA, 25 bp, Artificial
  probe
  misc_feature (1)..(25): SEQ ID NO: 1421; WAN024FI6; Start 645; Stop 669
agtagagcagattgatctcatcttg

SEQ ID NO: 293628 - DNA, 25 bp, Artificial
  probe
  misc_feature (1)..(25): SEQ ID NO: 1421; WAN024FI6; Start 644; Stop 668
cagtagagcagattgatctcatctt

SEQ ID NO: 293629 - DNA, 25 bp, Artificial
  probe
  misc_feature (1)..(25): SEQ ID NO: 1421; WAN024FI6; Start 252; Stop 276
tcctgaagatattgatgtgatttcg

SEQ ID NO: 293630 - DNA, 25 bp, Artificial
  probe
  misc_feature (1)..(25): SEQ ID NO: 1421; WAN024FI6; Start 102; Stop 126
cttgaccagattaaataaagggcaa

SEQ ID NO: 293631 - DNA, 25 bp, Artificial
  probe
  misc_feature (1)..(25): SEQ ID NO: 1421; WAN024FI6; Start 587; Stop 611
ataaacagattcgcaatatggtggg

SEQ ID NO: 293632 - DNA, 25 bp, Artificial
  probe
  misc_feature (1)..(25): SEQ ID NO: 1421; WAN024FI6; Start 527; Stop 551
taatagtcgatgagacaggacaatt

SEQ ID NO: 293633 - DNA, 25 bp, Artificial
  probe
  misc_feature (1)..(25): SEQ ID NO: 1421; WAN024FI6; Start 526; Stop 550
ttaatagtcgatgagacaggacaat

SEQ ID NO: 293634 - DNA, 25 bp, Artificial
  probe
  misc_feature (1)..(25): SEQ ID NO: 1421; WAN024FI6; Start 585; Stop 609
gtataaacagattcgcaatatggtg

SEQ ID NO: 293635 - DNA, 25 bp, Artificial
  probe
  misc_feature (1)..(25): SEQ ID NO: 1421; WAN024FI6; Start 203; Stop 227
cttatcagatggatgaggagaaact

SEQ ID NO: 293636 - DNA, 25 bp, Artificial
  probe
  misc_feature (1)..(25): SEQ ID NO: 1421; WAN024FI6; Start 647; Stop 671
tagagcagattgatctcatcttgga

SEQ ID NO: 293637 - DNA, 25 bp, Artificial
  probe
  misc_feature (1)..(25): SEQ ID NO: 1421; WAN024FI6; Start 646; Stop 670
gtagagcagattgatctcatcttgg

SEQ ID NO: 293638 - DNA, 25 bp, Artificial
  probe
  misc_feature (1)..(25): SEQ ID NO: 1421; WAN024FI6; Start 23; Stop 47
tttcctatgatggttatgcctttgc

SEQ ID NO: 293639 - DNA, 25 bp, Artificial
  probe
  misc_feature (1)..(25): SEQ ID NO: 1421; WAN024FI6; Start 20; Stop 44
ctatttcctatgatggttatgcctt

SEQ ID NO: 293640 - DNA, 25 bp, Artificial
  probe
  misc_feature (1)..(25): SEQ ID NO: 1421; WAN024FI6; Start 485; Stop 509
ctagtgtagaggataaggttcgcac

SEQ ID NO: 293641 - DNA, 25 bp, Artificial
  probe
  misc_feature (1)..(25): SEQ ID NO: 1421; WAN024FI6; Start 204; Stop 228
ttatcagatggatgaggagaaactc

SEQ ID NO: 293642 - DNA, 25 bp, Artificial
  probe
  misc_feature (1)..(25): SEQ ID NO: 1421; WAN024FI6; Start 18; Stop 42
aactatttcctatgatggttatgcc

SEQ ID NO: 293643 - DNA, 25 bp, Artificial
  probe
  misc_feature (1)..(25): SEQ ID NO: 1421; WAN024FI6; Start 13; Stop 37
aaagcaactatttcctatgatggtt

SEQ ID NO: 293644 - DNA, 25 bp, Artificial
  probe
  misc_feature (1)..(25): SEQ ID NO: 1421; WAN024FI6; Start 643; Stop 667
ccagtagagcagattgatctcatct

SEQ ID NO: 293645 - DNA, 25 bp, Artificial
  probe
  misc_feature (1)..(25): SEQ ID NO: 1421; WAN024FI6; Start 21; Stop 45
tatttcctatgatggttatgccttt

SEQ ID NO: 293646 - DNA, 25 bp, Artificial
  probe
  misc_feature (1)..(25): SEQ ID NO: 1421; WAN024FI6; Start 12; Stop 36
taaagcaactatttcctatgatggt

SEQ ID NO: 293647 - DNA, 25 bp, Artificial
  probe
  misc_feature (1)..(25): SEQ ID NO: 1421; WAN024FI6; Start 243; Stop 267
tacccagtctcctgaagatattgat

SEQ ID NO: 293648 - DNA, 25 bp, Artificial
  probe
  misc_feature (1)..(25): SEQ ID NO: 1421; WAN024FI6; Start 242; Stop 266
atacccagtctcctgaagatattga

SEQ ID NO: 293649 - DNA, 25 bp, Artificial
  probe
  misc_feature (1)..(25): SEQ ID NO: 1421; WAN024FI6; Start 241; Stop 265
gatacccagtctcctgaagatattg

SEQ ID NO: 293650 - DNA, 25 bp, Artificial
  probe
  misc_feature (1)..(25): SEQ ID NO: 1421; WAN024FI6; Start 4; Stop 28
acgagatataaagcaactatttcct

SEQ ID NO: 293651 - DNA, 25 bp, Artificial
  probe
  misc_feature (1)..(25): SEQ ID NO: 1421; WAN024FI6; Start 642; Stop 666
gccagtagagcagattgatctcatc

SEQ ID NO: 293652 - DNA, 25 bp, Artificial
  probe
  misc_feature (1)..(25): SEQ ID NO: 1421; WAN024FI6; Start 24; Stop 48
ttcctatgatggttatgcctttgct

SEQ ID NO: 293653 - DNA, 25 bp, Artificial
  probe
  misc_feature (1)..(25): SEQ ID NO: 1422; WAN024DO8; Start 394; Stop 418
ttcttacctctaccaccttattcac

SEQ ID NO: 293654 - DNA, 25 bp, Artificial
  probe
  misc_feature (1)..(25): SEQ ID NO: 1422; WAN024DO8; Start 395; Stop 419
tcttacctctaccaccttattcacc

SEQ ID NO: 293655 - DNA, 25 bp, Artificial
  probe
  misc_feature (1)..(25): SEQ ID NO: 1422; WAN024DO8; Start 396; Stop 420
cttacctctaccaccttattcaccg

SEQ ID NO: 293656 - DNA, 25 bp, Artificial
  probe
  misc_feature (1)..(25): SEQ ID NO: 1422; WAN024DO8; Start 31; Stop 55
aaagtcgctgagtttcttgatattt

SEQ ID NO: 293657 - DNA, 25 bp, Artificial
  probe
  misc_feature (1)..(25): SEQ ID NO: 1422; WAN024DO8; Start 393; Stop 417
tttcttacctctaccaccttattca

SEQ ID NO: 293658 - DNA, 25 bp, Artificial
  probe
  misc_feature (1)..(25): SEQ ID NO: 1422; WAN024DO8; Start 302; Stop 326
ctttgaagacacctcatgttattgt

SEQ ID NO: 293659 - DNA, 25 bp, Artificial
  probe
  misc_feature (1)..(25): SEQ ID NO: 1422; WAN024DO8; Start 207; Stop 231
acaagtagacggagagtttatagct

SEQ ID NO: 293660 - DNA, 25 bp, Artificial
  probe
  misc_feature (1)..(25): SEQ ID NO: 1422; WAN024DO8; Start 301; Stop 325
gctttgaagacacctcatgttattg

SEQ ID NO: 293661 - DNA, 25 bp, Artificial
  probe
  misc_feature (1)..(25): SEQ ID NO: 1422; WAN024DO8; Start 300; Stop 324
tgctttgaagacacctcatgttatt

SEQ ID NO: 293662 - DNA, 25 bp, Artificial
  probe
  misc_feature (1)..(25): SEQ ID NO: 1422; WAN024DO8; Start 299; Stop 323
ctgctttgaagacacctcatgttat

SEQ ID NO: 293663 - DNA, 25 bp, Artificial
  probe
  misc_feature (1)..(25): SEQ ID NO: 1422; WAN024DO8; Start 208; Stop 232
caagtagacggagagtttatagctc

SEQ ID NO: 293664 - DNA, 25 bp, Artificial
  probe
  misc_feature (1)..(25): SEQ ID NO: 1422; WAN024DO8; Start 365; Stop 389
atgaactctgcatccaagataaaca

SEQ ID NO: 293665 - DNA, 25 bp, Artificial
  probe
  misc_feature (1)..(25): SEQ ID NO: 1422; WAN024DO8; Start 369; Stop 393
actctgcatccaagataaacacttt

SEQ ID NO: 293666 - DNA, 25 bp, Artificial
  probe
  misc_feature (1)..(25): SEQ ID NO: 1422; WAN024DO8; Start 368; Stop 392
aactctgcatccaagataaacactt

SEQ ID NO: 293667 - DNA, 25 bp, Artificial
  probe
  misc_feature (1)..(25): SEQ ID NO: 1422; WAN024DO8; Start 30; Stop 54
gaaagtcgctgagtttcttgatatt

SEQ ID NO: 293668 - DNA, 25 bp, Artificial
  probe
  misc_feature (1)..(25): SEQ ID NO: 1422; WAN024DO8; Start 367; Stop 391
gaactctgcatccaagataaacact

SEQ ID NO: 293669 - DNA, 25 bp, Artificial
  probe
  misc_feature (1)..(25): SEQ ID NO: 1422; WAN024DO8; Start 221; Stop 245
agtttatagctcccatgatttacaa

SEQ ID NO: 293670 - DNA, 25 bp, Artificial
  probe
  misc_feature (1)..(25): SEQ ID NO: 1422; WAN024DO8; Start 366; Stop 390
tgaactctgcatccaagataaacac

SEQ ID NO: 293671 - DNA, 25 bp, Artificial
  probe
  misc_feature (1)..(25): SEQ ID NO: 1422; WAN024DO8; Start 222; Stop 246
gtttatagctcccatgatttacaag

SEQ ID NO: 293672 - DNA, 25 bp, Artificial
  probe
  misc_feature (1)..(25): SEQ ID NO: 1422; WAN024DO8; Start 220; Stop 244
gagtttatagctcccatgatttaca

SEQ ID NO: 293673 - DNA, 25 bp, Artificial
  probe
  misc_feature (1)..(25): SEQ ID NO: 1422; WAN024DO8; Start 106; Stop 130
gaccgctacctctatcgtccttatg

SEQ ID NO: 293674 - DNA, 25 bp, Artificial
  probe
  misc_feature (1)..(25): SEQ ID NO: 1422; WAN024DO8; Start 224; Stop 248
ttatagctcccatgatttacaagaa

SEQ ID NO: 293675 - DNA, 25 bp, Artificial
  probe
  misc_feature (1)..(25): SEQ ID NO: 1422; WAN024DO8; Start 223; Stop 247
tttatagctcccatgatttacaaga

SEQ ID NO: 293676 - DNA, 25 bp, Artificial
  probe
  misc_feature (1)..(25): SEQ ID NO: 1422; WAN024DO8; Start 36; Stop 60
cgctgagtttcttgatattttggat

SEQ ID NO: 293677 - DNA, 25 bp, Artificial
  probe
  misc_feature (1)..(25): SEQ ID NO: 1422; WAN024DO8; Start 33; Stop 57
agtcgctgagtttcttgatattttg

SEQ ID NO: 293678 - DNA, 25 bp, Artificial
  probe
  misc_feature (1)..(25): SEQ ID NO: 1422; WAN024DO8; Start 225; Stop 249
tatagctcccatgatttacaagaaa

SEQ ID NO: 293679 - DNA, 25 bp, Artificial
  probe
  misc_feature (1)..(25): SEQ ID NO: 1422; WAN024DO8; Start 219; Stop 243
agagtttatagctcccatgatttac

SEQ ID NO: 293680 - DNA, 25 bp, Artificial
  probe
  misc_feature (1)..(25): SEQ ID NO: 1422; WAN024DO8; Start 35; Stop 59
tcgctgagtttcttgatattttgga

SEQ ID NO: 293681 - DNA, 25 bp, Artificial
  probe
  misc_feature (1)..(25): SEQ ID NO: 1422; WAN024DO8; Start 34; Stop 58
gtcgctgagtttcttgatattttgg

SEQ ID NO: 293682 - DNA, 25 bp, Artificial
  probe
  misc_feature (1)..(25): SEQ ID NO: 1422; WAN024DO8; Start 143; Stop 167
gaggggagaaagtctatgaaaagat

SEQ ID NO: 293683 - DNA, 25 bp, Artificial
  probe
  misc_feature (1)..(25): SEQ ID NO: 1422; WAN024DO8; Start 32; Stop 56
aagtcgctgagtttcttgatatttt

SEQ ID NO: 293684 - DNA, 25 bp, Artificial
  probe
  misc_feature (1)..(25): SEQ ID NO: 1422; WAN024DO8; Start 218; Stop 242
gagagtttatagctcccatgattta

SEQ ID NO: 293685 - DNA, 25 bp, Artificial
  probe
  misc_feature (1)..(25): SEQ ID NO: 1422; WAN024DO8; Start 142; Stop 166
agaggggagaaagtctatgaaaaga

SEQ ID NO: 293686 - DNA, 25 bp, Artificial
  probe
  misc_feature (1)..(25): SEQ ID NO: 1423; WAN024C4E; Start 283; Stop 307
atgaatggtagtaggataacgacac

SEQ ID NO: 293687 - DNA, 25 bp, Artificial
  probe
  misc_feature (1)..(25): SEQ ID NO: 1423; WAN024C4E; Start 280; Stop 304
ggaatgaatggtagtaggataacga

SEQ ID NO: 293688 - DNA, 25 bp, Artificial
  probe
  misc_feature (1)..(25): SEQ ID NO: 1423; WAN024C4E; Start 279; Stop 303
aggaatgaatggtagtaggataacg

SEQ ID NO: 293689 - DNA, 25 bp, Artificial
  probe
  misc_feature (1)..(25): SEQ ID NO: 1423; WAN024C4E; Start 346; Stop 370
cgtcttaactctctaccttcaacat

SEQ ID NO: 293690 - DNA, 25 bp, Artificial
  probe
  misc_feature (1)..(25): SEQ ID NO: 1423; WAN024C4E; Start 344; Stop 368
atcgtcttaactctctaccttcaac

SEQ ID NO: 293691 - DNA, 25 bp, Artificial
  probe
  misc_feature (1)..(25): SEQ ID NO: 1423; WAN024C4E; Start 282; Stop 306
aatgaatggtagtaggataacgaca

SEQ ID NO: 293692 - DNA, 25 bp, Artificial
  probe
  misc_feature (1)..(25): SEQ ID NO: 1423; WAN024C4E; Start 913; Stop 937
atgaatcagatgagccaacaactat

SEQ ID NO: 293693 - DNA, 25 bp, Artificial
  probe
  misc_feature (1)..(25): SEQ ID NO: 1423; WAN024C4E; Start 343; Stop 367
aatcgtcttaactctctaccttcaa

SEQ ID NO: 293694 - DNA, 25 bp, Artificial
  probe
  misc_feature (1)..(25): SEQ ID NO: 1423; WAN024C4E; Start 345; Stop 369
tcgtcttaactctctaccttcaaca

SEQ ID NO: 293695 - DNA, 25 bp, Artificial
  probe
  misc_feature (1)..(25): SEQ ID NO: 1423; WAN024C4E; Start 281; Stop 305
gaatgaatggtagtaggataacgac

SEQ ID NO: 293696 - DNA, 25 bp, Artificial
  probe
  misc_feature (1)..(25): SEQ ID NO: 1423; WAN024C4E; Start 912; Stop 936
gatgaatcagatgagccaacaacta

SEQ ID NO: 293697 - DNA, 25 bp, Artificial
  probe
  misc_feature (1)..(25): SEQ ID NO: 1423; WAN024C4E; Start 619; Stop 643
tatagaacttcgcttagaccaggta

SEQ ID NO: 293698 - DNA, 25 bp, Artificial
  probe
  misc_feature (1)..(25): SEQ ID NO: 1423; WAN024C4E; Start 914; Stop 938
tgaatcagatgagccaacaactatc

SEQ ID NO: 293699 - DNA, 25 bp, Artificial
  probe
  misc_feature (1)..(25): SEQ ID NO: 1423; WAN024C4E; Start 1466; Stop 1490
gtattgaacttgattctgaacagca

SEQ ID NO: 293700 - DNA, 25 bp, Artificial
  probe
  misc_feature (1)..(25): SEQ ID NO: 1423; WAN024C4E; Start 620; Stop 644
atagaacttcgcttagaccaggtat

SEQ ID NO: 293701 - DNA, 25 bp, Artificial
  probe
  misc_feature (1)..(25): SEQ ID NO: 1423; WAN024C4E; Start 618; Stop 642
atatagaacttcgcttagaccaggt

SEQ ID NO: 293702 - DNA, 25 bp, Artificial
  probe
  misc_feature (1)..(25): SEQ ID NO: 1423; WAN024C4E; Start 2015; Stop 2039
agttgaatccaggttatacaagagt

SEQ ID NO: 293703 - DNA, 25 bp, Artificial
  probe
  misc_feature (1)..(25): SEQ ID NO: 1423; WAN024C4E; Start 621; Stop 645
tagaacttcgcttagaccaggtatt

SEQ ID NO: 293704 - DNA, 25 bp, Artificial
  probe
  misc_feature (1)..(25): SEQ ID NO: 1423; WAN024C4E; Start 636; Stop 660
accaggtattcaagcaatagatagc

SEQ ID NO: 293705 - DNA, 25 bp, Artificial
  probe
  misc_feature (1)..(25): SEQ ID NO: 1423; WAN024C4E; Start 1806; Stop 1830
cggttatgaattagatgttacgaga

SEQ ID NO: 293706 - DNA, 25 bp, Artificial
  probe
  misc_feature (1)..(25): SEQ ID NO: 1423; WAN024C4E; Start 1465; Stop 1489
agtattgaacttgattctgaacagc

SEQ ID NO: 293707 - DNA, 25 bp, Artificial
  probe
  misc_feature (1)..(25): SEQ ID NO: 1423; WAN024C4E; Start 617; Stop 641
tatatagaacttcgcttagaccagg

SEQ ID NO: 293708 - DNA, 25 bp, Artificial
  probe
  misc_feature (1)..(25): SEQ ID NO: 1423; WAN024C4E; Start 284; Stop 308
tgaatggtagtaggataacgacact

SEQ ID NO: 293709 - DNA, 25 bp, Artificial
  probe
  misc_feature (1)..(25): SEQ ID NO: 1423; WAN024C4E; Start 919; Stop 943
cagatgagccaacaactatcagatt

SEQ ID NO: 293710 - DNA, 25 bp, Artificial
  probe
  misc_feature (1)..(25): SEQ ID NO: 1423; WAN024C4E; Start 916; Stop 940
aatcagatgagccaacaactatcag

SEQ ID NO: 293711 - DNA, 25 bp, Artificial
  probe
  misc_feature (1)..(25): SEQ ID NO: 1423; WAN024C4E; Start 915; Stop 939
gaatcagatgagccaacaactatca

SEQ ID NO: 293712 - DNA, 25 bp, Artificial
  probe
  misc_feature (1)..(25): SEQ ID NO: 1423; WAN024C4E; Start 632; Stop 656
ttagaccaggtattcaagcaataga

SEQ ID NO: 293713 - DNA, 25 bp, Artificial
  probe
  misc_feature (1)..(25): SEQ ID NO: 1423; WAN024C4E; Start 2016; Stop 2040
gttgaatccaggttatacaagagtt

SEQ ID NO: 293714 - DNA, 25 bp, Artificial
  probe
  misc_feature (1)..(25): SEQ ID NO: 1423; WAN024C4E; Start 347; Stop 371
gtcttaactctctaccttcaacatt

SEQ ID NO: 293715 - DNA, 25 bp, Artificial
  probe
  misc_feature (1)..(25): SEQ ID NO: 1423; WAN024C4E; Start 634; Stop 658
agaccaggtattcaagcaatagata

SEQ ID NO: 293716 - DNA, 25 bp, Artificial
  probe
  misc_feature (1)..(25): SEQ ID NO: 1423; WAN024C4E; Start 633; Stop 657
tagaccaggtattcaagcaatagat

SEQ ID NO: 293717 - DNA, 25 bp, Artificial
  probe
  misc_feature (1)..(25): SEQ ID NO: 1423; WAN024C4E; Start 631; Stop 655
cttagaccaggtattcaagcaatag

SEQ ID NO: 293718 - DNA, 25 bp, Artificial
  probe
  misc_feature (1)..(25): SEQ ID NO: 1423; WAN024C4E; Start 2005; Stop 2029
ttgaatagtaagttgaatccaggtt

SEQ ID NO: 293719 - DNA, 25 bp, Artificial
  probe
  misc_feature (1)..(25): SEQ ID NO: 1424; WAN024DPX; Start 475; Stop 499
ttctaccgccacattactattcgta

SEQ ID NO: 293720 - DNA, 25 bp, Artificial
  probe
  misc_feature (1)..(25): SEQ ID NO: 1424; WAN024DPX; Start 428; Stop 452
aatcctattctaagactgcctatca

SEQ ID NO: 293721 - DNA, 25 bp, Artificial
  probe
  misc_feature (1)..(25): SEQ ID NO: 1424; WAN024DPX; Start 476; Stop 500
tctaccgccacattactattcgtaa

SEQ ID NO: 293722 - DNA, 25 bp, Artificial
  probe
  misc_feature (1)..(25): SEQ ID NO: 1424; WAN024DPX; Start 193; Stop 217
gcagtccattatccatttattcaga

SEQ ID NO: 293723 - DNA, 25 bp, Artificial
  probe
  misc_feature (1)..(25): SEQ ID NO: 1424; WAN024DPX; Start 472; Stop 496
cctttctaccgccacattactattc

SEQ ID NO: 293724 - DNA, 25 bp, Artificial
  probe
  misc_feature (1)..(25): SEQ ID NO: 1424; WAN024DPX; Start 195; Stop 219
agtccattatccatttattcagagc

SEQ ID NO: 293725 - DNA, 25 bp, Artificial
  probe
  misc_feature (1)..(25): SEQ ID NO: 1424; WAN024DPX; Start 473; Stop 497
ctttctaccgccacattactattcg

SEQ ID NO: 293726 - DNA, 25 bp, Artificial
  probe
  misc_feature (1)..(25): SEQ ID NO: 1424; WAN024DPX; Start 427; Stop 451
gaatcctattctaagactgcctatc

SEQ ID NO: 293727 - DNA, 25 bp, Artificial
  probe
  misc_feature (1)..(25): SEQ ID NO: 1424; WAN024DPX; Start 16; Stop 40
ttgctggtgagaggtatcaatgttg

SEQ ID NO: 293728 - DNA, 25 bp, Artificial
  probe
  misc_feature (1)..(25): SEQ ID NO: 1424; WAN024DPX; Start 79; Stop 103
gaattgacaaacttgggactggaaa

SEQ ID NO: 293729 - DNA, 25 bp, Artificial
  probe
  misc_feature (1)..(25): SEQ ID NO: 1424; WAN024DPX; Start 474; Stop 498
tttctaccgccacattactattcgt

SEQ ID NO: 293730 - DNA, 25 bp, Artificial
  probe
  misc_feature (1)..(25): SEQ ID NO: 1424; WAN024DPX; Start 357; Stop 381
aagtttagagctgaaagatgaagtg

SEQ ID NO: 293731 - DNA, 25 bp, Artificial
  probe
  misc_feature (1)..(25): SEQ ID NO: 1424; WAN024DPX; Start 78; Stop 102
agaattgacaaacttgggactggaa

SEQ ID NO: 293732 - DNA, 25 bp, Artificial
  probe
  misc_feature (1)..(25): SEQ ID NO: 1424; WAN024DPX; Start 194; Stop 218
cagtccattatccatttattcagag

SEQ ID NO: 293733 - DNA, 25 bp, Artificial
  probe
  misc_feature (1)..(25): SEQ ID NO: 1424; WAN024DPX; Start 196; Stop 220
gtccattatccatttattcagagct

SEQ ID NO: 293734 - DNA, 25 bp, Artificial
  probe
  misc_feature (1)..(25): SEQ ID NO: 1424; WAN024DPX; Start 358; Stop 382
agtttagagctgaaagatgaagtgc

SEQ ID NO: 293735 - DNA, 25 bp, Artificial
  probe
  misc_feature (1)..(25): SEQ ID NO: 1424; WAN024DPX; Start 352; Stop 376
gttgaaagtttagagctgaaagatg

SEQ ID NO: 293736 - DNA, 25 bp, Artificial
  probe
  misc_feature (1)..(25): SEQ ID NO: 1424; WAN024DPX; Start 185; Stop 209
ctttctttgcagtccattatccatt

SEQ ID NO: 293737 - DNA, 25 bp, Artificial
  probe
  misc_feature (1)..(25): SEQ ID NO: 1424; WAN024DPX; Start 77; Stop 101
aagaattgacaaacttgggactgga

SEQ ID NO: 293738 - DNA, 25 bp, Artificial
  probe
  misc_feature (1)..(25): SEQ ID NO: 1424; WAN024DPX; Start 356; Stop 380
aaagtttagagctgaaagatgaagt

SEQ ID NO: 293739 - DNA, 25 bp, Artificial
  probe
  misc_feature (1)..(25): SEQ ID NO: 1424; WAN024DPX; Start 354; Stop 378
tgaaagtttagagctgaaagatgaa

SEQ ID NO: 293740 - DNA, 25 bp, Artificial
  probe
  misc_feature (1)..(25): SEQ ID NO: 1424; WAN024DPX; Start 353; Stop 377
ttgaaagtttagagctgaaagatga

SEQ ID NO: 293741 - DNA, 25 bp, Artificial
  probe
  misc_feature (1)..(25): SEQ ID NO: 1424; WAN024DPX; Start 351; Stop 375
agttgaaagtttagagctgaaagat

SEQ ID NO: 293742 - DNA, 25 bp, Artificial
  probe
  misc_feature (1)..(25): SEQ ID NO: 1424; WAN024DPX; Start 186; Stop 210
tttctttgcagtccattatccattt

SEQ ID NO: 293743 - DNA, 25 bp, Artificial
  probe
  misc_feature (1)..(25): SEQ ID NO: 1424; WAN024DPX; Start 15; Stop 39
tttgctggtgagaggtatcaatgtt

SEQ ID NO: 293744 - DNA, 25 bp, Artificial
  probe
  misc_feature (1)..(25): SEQ ID NO: 1424; WAN024DPX; Start 192; Stop 216
tgcagtccattatccatttattcag

SEQ ID NO: 293745 - DNA, 25 bp, Artificial
  probe
  misc_feature (1)..(25): SEQ ID NO: 1424; WAN024DPX; Start 471; Stop 495
gcctttctaccgccacattactatt

SEQ ID NO: 293746 - DNA, 25 bp, Artificial
  probe
  misc_feature (1)..(25): SEQ ID NO: 1424; WAN024DPX; Start 143; Stop 167
cttcgatagattccaaagcccaatt

SEQ ID NO: 293747 - DNA, 25 bp, Artificial
  probe
  misc_feature (1)..(25): SEQ ID NO: 1424; WAN024DPX; Start 191; Stop 215
ttgcagtccattatccatttattca

SEQ ID NO: 293748 - DNA, 25 bp, Artificial
  probe
  misc_feature (1)..(25): SEQ ID NO: 1424; WAN024DPX; Start 9; Stop 33
ctatgctttgctggtgagaggtatc

SEQ ID NO: 293749 - DNA, 25 bp, Artificial
  probe
  misc_feature (1)..(25): SEQ ID NO: 1424; WAN024DPX; Start 355; Stop 379
gaaagtttagagctgaaagatgaag

SEQ ID NO: 293750 - DNA, 25 bp, Artificial
  probe
  misc_feature (1)..(25): SEQ ID NO: 1424; WAN024DPX; Start 187; Stop 211
ttctttgcagtccattatccattta

SEQ ID NO: 293751 - DNA, 25 bp, Artificial
  probe
  misc_feature (1)..(25): SEQ ID NO: 1424; WAN024DPX; Start 349; Stop 373
acagttgaaagtttagagctgaaag

SEQ ID NO: 293752 - DNA, 25 bp, Artificial
  probe
  misc_feature (1)..(25): SEQ ID NO: 1425; WAN024FT6; Start 234; Stop 258
aataatcagcctctccacctacttt

SEQ ID NO: 293753 - DNA, 25 bp, Artificial
  probe
  misc_feature (1)..(25): SEQ ID NO: 1425; WAN024FT6; Start 233; Stop 257
aaataatcagcctctccacctactt

SEQ ID NO: 293754 - DNA, 25 bp, Artificial
  probe
  misc_feature (1)..(25): SEQ ID NO: 1425; WAN024FT6; Start 13; Stop 37
aatgcgagttgtttcaatcaagtta

SEQ ID NO: 293755 - DNA, 25 bp, Artificial
  probe
  misc_feature (1)..(25): SEQ ID NO: 1425; WAN024FT6; Start 14; Stop 38
atgcgagttgtttcaatcaagttag

SEQ ID NO: 293756 - DNA, 25 bp, Artificial
  probe
  misc_feature (1)..(25): SEQ ID NO: 1425; WAN024FT6; Start 225; Stop 249
gaaagaccaaataatcagcctctcc

SEQ ID NO: 293757 - DNA, 25 bp, Artificial
  probe
  misc_feature (1)..(25): SEQ ID NO: 1425; WAN024FT6; Start 224; Stop 248
ggaaagaccaaataatcagcctctc

SEQ ID NO: 293758 - DNA, 25 bp, Artificial
  probe
  misc_feature (1)..(25): SEQ ID NO: 1425; WAN024FT6; Start 232; Stop 256
caaataatcagcctctccacctact

SEQ ID NO: 293759 - DNA, 25 bp, Artificial
  probe
  misc_feature (1)..(25): SEQ ID NO: 1425; WAN024FT6; Start 12; Stop 36
caatgcgagttgtttcaatcaagtt

SEQ ID NO: 293760 - DNA, 25 bp, Artificial
  probe
  misc_feature (1)..(25): SEQ ID NO: 1425; WAN024FT6; Start 94; Stop 118
acacaagatgacaaatccacgaatc

SEQ ID NO: 293761 - DNA, 25 bp, Artificial
  probe
  misc_feature (1)..(25): SEQ ID NO: 1425; WAN024FT6; Start 93; Stop 117
cacacaagatgacaaatccacgaat

SEQ ID NO: 293762 - DNA, 25 bp, Artificial
  probe
  misc_feature (1)..(25): SEQ ID NO: 1425; WAN024FT6; Start 226; Stop 250
aaagaccaaataatcagcctctcca

SEQ ID NO: 293763 - DNA, 25 bp, Artificial
  probe
  misc_feature (1)..(25): SEQ ID NO: 1425; WAN024FT6; Start 95; Stop 119
cacaagatgacaaatccacgaatcc

SEQ ID NO: 293764 - DNA, 25 bp, Artificial
  probe
  misc_feature (1)..(25): SEQ ID NO: 1425; WAN024FT6; Start 231; Stop 255
ccaaataatcagcctctccacctac

SEQ ID NO: 293765 - DNA, 25 bp, Artificial
  probe
  misc_feature (1)..(25): SEQ ID NO: 1425; WAN024FT6; Start 227; Stop 251
aagaccaaataatcagcctctccac

SEQ ID NO: 293766 - DNA, 25 bp, Artificial
  probe
  misc_feature (1)..(25): SEQ ID NO: 1425; WAN024FT6; Start 15; Stop 39
tgcgagttgtttcaatcaagttagc

SEQ ID NO: 293767 - DNA, 25 bp, Artificial
  probe
  misc_feature (1)..(25): SEQ ID NO: 1425; WAN024FT6; Start 127; Stop 151
acgaacgatgatattgcttgcattg

SEQ ID NO: 293768 - DNA, 25 bp, Artificial
  probe
  misc_feature (1)..(25): SEQ ID NO: 1425; WAN024FT6; Start 126; Stop 150
cacgaacgatgatattgcttgcatt

SEQ ID NO: 293769 - DNA, 25 bp, Artificial
  probe
  misc_feature (1)..(25): SEQ ID NO: 1425; WAN024FT6; Start 230; Stop 254
accaaataatcagcctctccaccta

SEQ ID NO: 293770 - DNA, 25 bp, Artificial
  probe
  misc_feature (1)..(25): SEQ ID NO: 1425; WAN024FT6; Start 17; Stop 41
cgagttgtttcaatcaagttagccc

SEQ ID NO: 293771 - DNA, 25 bp, Artificial
  probe
  misc_feature (1)..(25): SEQ ID NO: 1425; WAN024FT6; Start 218; Stop 242
tttcgtggaaagaccaaataatcag

SEQ ID NO: 293772 - DNA, 25 bp, Artificial
  probe
  misc_feature (1)..(25): SEQ ID NO: 1425; WAN024FT6; Start 215; Stop 239
cgatttcgtggaaagaccaaataat

SEQ ID NO: 293773 - DNA, 25 bp, Artificial
  probe
  misc_feature (1)..(25): SEQ ID NO: 1425; WAN024FT6; Start 217; Stop 241
atttcgtggaaagaccaaataatca

SEQ ID NO: 293774 - DNA, 25 bp, Artificial
  probe
  misc_feature (1)..(25): SEQ ID NO: 1425; WAN024FT6; Start 219; Stop 243
ttcgtggaaagaccaaataatcagc

SEQ ID NO: 293775 - DNA, 25 bp, Artificial
  probe
  misc_feature (1)..(25): SEQ ID NO: 1425; WAN024FT6; Start 216; Stop 240
gatttcgtggaaagaccaaataatc

SEQ ID NO: 293776 - DNA, 25 bp, Artificial
  probe
  misc_feature (1)..(25): SEQ ID NO: 1425; WAN024FT6; Start 223; Stop 247
tggaaagaccaaataatcagcctct

SEQ ID NO: 293777 - DNA, 25 bp, Artificial
  probe
  misc_feature (1)..(25): SEQ ID NO: 1425; WAN024FT6; Start 222; Stop 246
gtggaaagaccaaataatcagcctc

SEQ ID NO: 293778 - DNA, 25 bp, Artificial
  probe
  misc_feature (1)..(25): SEQ ID NO: 1425; WAN024FT6; Start 92; Stop 116
tcacacaagatgacaaatccacgaa

SEQ ID NO: 293779 - DNA, 25 bp, Artificial
  probe
  misc_feature (1)..(25): SEQ ID NO: 1425; WAN024FT6; Start 98; Stop 122
aagatgacaaatccacgaatcccac

SEQ ID NO: 293780 - DNA, 25 bp, Artificial
  probe
  misc_feature (1)..(25): SEQ ID NO: 1425; WAN024FT6; Start 97; Stop 121
caagatgacaaatccacgaatccca

SEQ ID NO: 293781 - DNA, 25 bp, Artificial
  probe
  misc_feature (1)..(25): SEQ ID NO: 1425; WAN024FT6; Start 96; Stop 120
acaagatgacaaatccacgaatccc

SEQ ID NO: 293782 - DNA, 25 bp, Artificial
  probe
  misc_feature (1)..(25): SEQ ID NO: 1425; WAN024FT6; Start 243; Stop 267
cctctccacctacttttgtataact

SEQ ID NO: 293783 - DNA, 25 bp, Artificial
  probe
  misc_feature (1)..(25): SEQ ID NO: 1425; WAN024FT6; Start 16; Stop 40
gcgagttgtttcaatcaagttagcc

SEQ ID NO: 293784 - DNA, 25 bp, Artificial
  probe
  misc_feature (1)..(25): SEQ ID NO: 1425; WAN024FT6; Start 242; Stop 266
gcctctccacctacttttgtataac

SEQ ID NO: 293785 - DNA, 25 bp, Artificial
  probe
  misc_feature (1)..(25): SEQ ID NO: 1426; WAN024CDZ; Start 118; Stop 142
ttcttccaagtgataactgatccaa

SEQ ID NO: 293786 - DNA, 25 bp, Artificial
  probe
  misc_feature (1)..(25): SEQ ID NO: 1426; WAN024CDZ; Start 205; Stop 229
atgatcgcttacttcttcaacttca

SEQ ID NO: 293787 - DNA, 25 bp, Artificial
  probe
  misc_feature (1)..(25): SEQ ID NO: 1426; WAN024CDZ; Start 206; Stop 230
tgatcgcttacttcttcaacttcaa

SEQ ID NO: 293788 - DNA, 25 bp, Artificial
  probe
  misc_feature (1)..(25): SEQ ID NO: 1426; WAN024CDZ; Start 204; Stop 228
catgatcgcttacttcttcaacttc

SEQ ID NO: 293789 - DNA, 25 bp, Artificial
  probe
  misc_feature (1)..(25): SEQ ID NO: 1426; WAN024CDZ; Start 203; Stop 227
ccatgatcgcttacttcttcaactt

SEQ ID NO: 293790 - DNA, 25 bp, Artificial
  probe
  misc_feature (1)..(25): SEQ ID NO: 1426; WAN024CDZ; Start 208; Stop 232
atcgcttacttcttcaacttcaaac

SEQ ID NO: 293791 - DNA, 25 bp, Artificial
  probe
  misc_feature (1)..(25): SEQ ID NO: 1426; WAN024CDZ; Start 210; Stop 234
cgcttacttcttcaacttcaaacaa

SEQ ID NO: 293792 - DNA, 25 bp, Artificial
  probe
  misc_feature (1)..(25): SEQ ID NO: 1426; WAN024CDZ; Start 209; Stop 233
tcgcttacttcttcaacttcaaaca

SEQ ID NO: 293793 - DNA, 25 bp, Artificial
  probe
  misc_feature (1)..(25): SEQ ID NO: 1426; WAN024CDZ; Start 212; Stop 236
cttacttcttcaacttcaaacaagc

SEQ ID NO: 293794 - DNA, 25 bp, Artificial
  probe
  misc_feature (1)..(25): SEQ ID NO: 1426; WAN024CDZ; Start 211; Stop 235
gcttacttcttcaacttcaaacaag

SEQ ID NO: 293795 - DNA, 25 bp, Artificial
  probe
  misc_feature (1)..(25): SEQ ID NO: 1426; WAN024CDZ; Start 99; Stop 123
tgatttcataggcaccagtttcttc

SEQ ID NO: 293796 - DNA, 25 bp, Artificial
  probe
  misc_feature (1)..(25): SEQ ID NO: 1426; WAN024CDZ; Start 23; Stop 47
aaatcaccagacaagttgaaatagc

SEQ ID NO: 293797 - DNA, 25 bp, Artificial
  probe
  misc_feature (1)..(25): SEQ ID NO: 1426; WAN024CDZ; Start 207; Stop 231
gatcgcttacttcttcaacttcaaa

SEQ ID NO: 293798 - DNA, 25 bp, Artificial
  probe
  misc_feature (1)..(25): SEQ ID NO: 1426; WAN024CDZ; Start 21; Stop 45
tgaaatcaccagacaagttgaaata

SEQ ID NO: 293799 - DNA, 25 bp, Artificial
  probe
  misc_feature (1)..(25): SEQ ID NO: 1426; WAN024CDZ; Start 100; Stop 124
gatttcataggcaccagtttcttcc

SEQ ID NO: 293800 - DNA, 25 bp, Artificial
  probe
  misc_feature (1)..(25): SEQ ID NO: 1426; WAN024CDZ; Start 119; Stop 143
tcttccaagtgataactgatccaaa

SEQ ID NO: 293801 - DNA, 25 bp, Artificial
  probe
  misc_feature (1)..(25): SEQ ID NO: 1426; WAN024CDZ; Start 117; Stop 141
tttcttccaagtgataactgatcca

SEQ ID NO: 293802 - DNA, 25 bp, Artificial
  probe
  misc_feature (1)..(25): SEQ ID NO: 1426; WAN024CDZ; Start 122; Stop 146
tccaagtgataactgatccaaatct

SEQ ID NO: 293803 - DNA, 25 bp, Artificial
  probe
  misc_feature (1)..(25): SEQ ID NO: 1426; WAN024CDZ; Start 116; Stop 140
gtttcttccaagtgataactgatcc

SEQ ID NO: 293804 - DNA, 25 bp, Artificial
  probe
  misc_feature (1)..(25): SEQ ID NO: 1426; WAN024CDZ; Start 186; Stop 210
ctgtgtagagagtcaagccatgatc

SEQ ID NO: 293805 - DNA, 25 bp, Artificial
  probe
  misc_feature (1)..(25): SEQ ID NO: 1426; WAN024CDZ; Start 22; Stop 46
gaaatcaccagacaagttgaaatag

SEQ ID NO: 293806 - DNA, 25 bp, Artificial
  probe
  misc_feature (1)..(25): SEQ ID NO: 1426; WAN024CDZ; Start 121; Stop 145
ttccaagtgataactgatccaaatc

SEQ ID NO: 293807 - DNA, 25 bp, Artificial
  probe
  misc_feature (1)..(25): SEQ ID NO: 1426; WAN024CDZ; Start 123; Stop 147
ccaagtgataactgatccaaatctt

SEQ ID NO: 293808 - DNA, 25 bp, Artificial
  probe
  misc_feature (1)..(25): SEQ ID NO: 1426; WAN024CDZ; Start 120; Stop 144
cttccaagtgataactgatccaaat

SEQ ID NO: 293809 - DNA, 25 bp, Artificial
  probe
  misc_feature (1)..(25): SEQ ID NO: 1426; WAN024CDZ; Start 101; Stop 125
atttcataggcaccagtttcttcca

SEQ ID NO: 293810 - DNA, 25 bp, Artificial
  probe
  misc_feature (1)..(25): SEQ ID NO: 1426; WAN024CDZ; Start 127; Stop 151
gtgataactgatccaaatcttgaga

SEQ ID NO: 293811 - DNA, 25 bp, Artificial
  probe
  misc_feature (1)..(25): SEQ ID NO: 1426; WAN024CDZ; Start 98; Stop 122
ctgatttcataggcaccagtttctt

SEQ ID NO: 293812 - DNA, 25 bp, Artificial
  probe
  misc_feature (1)..(25): SEQ ID NO: 1426; WAN024CDZ; Start 126; Stop 150
agtgataactgatccaaatcttgag

SEQ ID NO: 293813 - DNA, 25 bp, Artificial
  probe
  misc_feature (1)..(25): SEQ ID NO: 1426; WAN024CDZ; Start 185; Stop 209
tctgtgtagagagtcaagccatgat

SEQ ID NO: 293814 - DNA, 25 bp, Artificial
  probe
  misc_feature (1)..(25): SEQ ID NO: 1426; WAN024CDZ; Start 214; Stop 238
tacttcttcaacttcaaacaagctg

SEQ ID NO: 293815 - DNA, 25 bp, Artificial
  probe
  misc_feature (1)..(25): SEQ ID NO: 1426; WAN024CDZ; Start 102; Stop 126
tttcataggcaccagtttcttccaa

SEQ ID NO: 293816 - DNA, 25 bp, Artificial
  probe
  misc_feature (1)..(25): SEQ ID NO: 1426; WAN024CDZ; Start 213; Stop 237
ttacttcttcaacttcaaacaagct

SEQ ID NO: 293817 - DNA, 25 bp, Artificial
  probe
  misc_feature (1)..(25): SEQ ID NO: 1426; WAN024CDZ; Start 125; Stop 149
aagtgataactgatccaaatcttga

SEQ ID NO: 293818 - DNA, 25 bp, Artificial
  probe
  misc_feature (1)..(25): SEQ ID NO: 1427; WAN024D9Y; Start 435; Stop 459
acttgaacttggaaagcctataaag

SEQ ID NO: 293819 - DNA, 25 bp, Artificial
  probe
  misc_feature (1)..(25): SEQ ID NO: 1427; WAN024D9Y; Start 431; Stop 455
aaatacttgaacttggaaagcctat

SEQ ID NO: 293820 - DNA, 25 bp, Artificial
  probe
  misc_feature (1)..(25): SEQ ID NO: 1427; WAN024D9Y; Start 434; Stop 458
tacttgaacttggaaagcctataaa

SEQ ID NO: 293821 - DNA, 25 bp, Artificial
  probe
  misc_feature (1)..(25): SEQ ID NO: 1427; WAN024D9Y; Start 438; Stop 462
tgaacttggaaagcctataaaggaa

SEQ ID NO: 293822 - DNA, 25 bp, Artificial
  probe
  misc_feature (1)..(25): SEQ ID NO: 1427; WAN024D9Y; Start 437; Stop 461
ttgaacttggaaagcctataaagga

SEQ ID NO: 293823 - DNA, 25 bp, Artificial
  probe
  misc_feature (1)..(25): SEQ ID NO: 1427; WAN024D9Y; Start 436; Stop 460
cttgaacttggaaagcctataaagg

SEQ ID NO: 293824 - DNA, 25 bp, Artificial
  probe
  misc_feature (1)..(25): SEQ ID NO: 1427; WAN024D9Y; Start 227; Stop 251
gtgatgagactattcaagctggtga

SEQ ID NO: 293825 - DNA, 25 bp, Artificial
  probe
  misc_feature (1)..(25): SEQ ID NO: 1427; WAN024D9Y; Start 433; Stop 457
atacttgaacttggaaagcctataa

SEQ ID NO: 293826 - DNA, 25 bp, Artificial
  probe
  misc_feature (1)..(25): SEQ ID NO: 1427; WAN024D9Y; Start 432; Stop 456
aatacttgaacttggaaagcctata

SEQ ID NO: 293827 - DNA, 25 bp, Artificial
  probe
  misc_feature (1)..(25): SEQ ID NO: 1427; WAN024D9Y; Start 439; Stop 463
gaacttggaaagcctataaaggaaa

SEQ ID NO: 293828 - DNA, 25 bp, Artificial
  probe
  misc_feature (1)..(25): SEQ ID NO: 1427; WAN024D9Y; Start 244; Stop 268
gctggtgaaattattgctttatatg

SEQ ID NO: 293829 - DNA, 25 bp, Artificial
  probe
  misc_feature (1)..(25): SEQ ID NO: 1427; WAN024D9Y; Start 228; Stop 252
tgatgagactattcaagctggtgaa

SEQ ID NO: 293830 - DNA, 25 bp, Artificial
  probe
  misc_feature (1)..(25): SEQ ID NO: 1427; WAN024D9Y; Start 401; Stop 425
aaatgggttttacttttgatggaca

SEQ ID NO: 293831 - DNA, 25 bp, Artificial
  probe
  misc_feature (1)..(25): SEQ ID NO: 1427; WAN024D9Y; Start 226; Stop 250
cgtgatgagactattcaagctggtg

SEQ ID NO: 293832 - DNA, 25 bp, Artificial
  probe
  misc_feature (1)..(25): SEQ ID NO: 1427; WAN024D9Y; Start 158; Stop 182
atccagaaaatacattgattgcgat

SEQ ID NO: 293833 - DNA, 25 bp, Artificial
  probe
  misc_feature (1)..(25): SEQ ID NO: 1427; WAN024D9Y; Start 161; Stop 185
cagaaaatacattgattgcgatgga

SEQ ID NO: 293834 - DNA, 25 bp, Artificial
  probe
  misc_feature (1)..(25): SEQ ID NO: 1427; WAN024D9Y; Start 159; Stop 183
tccagaaaatacattgattgcgatg

SEQ ID NO: 293835 - DNA, 25 bp, Artificial
  probe
  misc_feature (1)..(25): SEQ ID NO: 1427; WAN024D9Y; Start 225; Stop 249
tcgtgatgagactattcaagctggt

SEQ ID NO: 293836 - DNA, 25 bp, Artificial
  probe
  misc_feature (1)..(25): SEQ ID NO: 1427; WAN024D9Y; Start 164; Stop 188
aaaatacattgattgcgatggatgg

SEQ ID NO: 293837 - DNA, 25 bp, Artificial
  probe
  misc_feature (1)..(25): SEQ ID NO: 1427; WAN024D9Y; Start 163; Stop 187
gaaaatacattgattgcgatggatg

SEQ ID NO: 293838 - DNA, 25 bp, Artificial
  probe
  misc_feature (1)..(25): SEQ ID NO: 1427; WAN024D9Y; Start 162; Stop 186
agaaaatacattgattgcgatggat

SEQ ID NO: 293839 - DNA, 25 bp, Artificial
  probe
  misc_feature (1)..(25): SEQ ID NO: 1427; WAN024D9Y; Start 157; Stop 181
tatccagaaaatacattgattgcga

SEQ ID NO: 293840 - DNA, 25 bp, Artificial
  probe
  misc_feature (1)..(25): SEQ ID NO: 1427; WAN024D9Y; Start 405; Stop 429
gggttttacttttgatggacaagaa

SEQ ID NO: 293841 - DNA, 25 bp, Artificial
  probe
  misc_feature (1)..(25): SEQ ID NO: 1427; WAN024D9Y; Start 403; Stop 427
atgggttttacttttgatggacaag

SEQ ID NO: 293842 - DNA, 25 bp, Artificial
  probe
  misc_feature (1)..(25): SEQ ID NO: 1427; WAN024D9Y; Start 402; Stop 426
aatgggttttacttttgatggacaa

SEQ ID NO: 293843 - DNA, 25 bp, Artificial
  probe
  misc_feature (1)..(25): SEQ ID NO: 1427; WAN024D9Y; Start 404; Stop 428
tgggttttacttttgatggacaaga

SEQ ID NO: 293844 - DNA, 25 bp, Artificial
  probe
  misc_feature (1)..(25): SEQ ID NO: 1427; WAN024D9Y; Start 430; Stop 454
aaaatacttgaacttggaaagccta

SEQ ID NO: 293845 - DNA, 25 bp, Artificial
  probe
  misc_feature (1)..(25): SEQ ID NO: 1427; WAN024D9Y; Start 406; Stop 430
ggttttacttttgatggacaagaaa

SEQ ID NO: 293846 - DNA, 25 bp, Artificial
  probe
  misc_feature (1)..(25): SEQ ID NO: 1427; WAN024D9Y; Start 230; Stop 254
atgagactattcaagctggtgaaat

SEQ ID NO: 293847 - DNA, 25 bp, Artificial
  probe
  misc_feature (1)..(25): SEQ ID NO: 1427; WAN024D9Y; Start 231; Stop 255
tgagactattcaagctggtgaaatt

SEQ ID NO: 293848 - DNA, 25 bp, Artificial
  probe
  misc_feature (1)..(25): SEQ ID NO: 1427; WAN024D9Y; Start 237; Stop 261
tattcaagctggtgaaattattgct

SEQ ID NO: 293849 - DNA, 25 bp, Artificial
  probe
  misc_feature (1)..(25): SEQ ID NO: 1427; WAN024D9Y; Start 229; Stop 253
gatgagactattcaagctggtgaaa

SEQ ID NO: 293850 - DNA, 25 bp, Artificial
  probe
  misc_feature (1)..(25): SEQ ID NO: 1427; WAN024D9Y; Start 245; Stop 269
ctggtgaaattattgctttatatgt

SEQ ID NO: 293851 - DNA, 25 bp, Artificial
  probe
  misc_feature (1)..(25): SEQ ID NO: 1428; WAN024FFT; Start 12; Stop 36
taccaataacacaaagtcctccaag

SEQ ID NO: 293852 - DNA, 25 bp, Artificial
  probe
  misc_feature (1)..(25): SEQ ID NO: 1428; WAN024FFT; Start 15; Stop 39
caataacacaaagtcctccaagttc

SEQ ID NO: 293853 - DNA, 25 bp, Artificial
  probe
  misc_feature (1)..(25): SEQ ID NO: 1428; WAN024FFT; Start 16; Stop 40
aataacacaaagtcctccaagttca

SEQ ID NO: 293854 - DNA, 25 bp, Artificial
  probe
  misc_feature (1)..(25): SEQ ID NO: 1428; WAN024FFT; Start 17; Stop 41
ataacacaaagtcctccaagttcac

SEQ ID NO: 293855 - DNA, 25 bp, Artificial
  probe
  misc_feature (1)..(25): SEQ ID NO: 1428; WAN024FFT; Start 1; Stop 25
atgacgttctgtaccaataacacaa

SEQ ID NO: 293856 - DNA, 25 bp, Artificial
  probe
  misc_feature (1)..(25): SEQ ID NO: 1428; WAN024FFT; Start 14; Stop 38
ccaataacacaaagtcctccaagtt

SEQ ID NO: 293857 - DNA, 25 bp, Artificial
  probe
  misc_feature (1)..(25): SEQ ID NO: 1428; WAN024FFT; Start 11; Stop 35
gtaccaataacacaaagtcctccaa

SEQ ID NO: 293858 - DNA, 25 bp, Artificial
  probe
  misc_feature (1)..(25): SEQ ID NO: 1428; WAN024FFT; Start 13; Stop 37
accaataacacaaagtcctccaagt

SEQ ID NO: 293859 - DNA, 25 bp, Artificial
  probe
  misc_feature (1)..(25): SEQ ID NO: 1428; WAN024FFT; Start 7; Stop 31
ttctgtaccaataacacaaagtcct

SEQ ID NO: 293860 - DNA, 25 bp, Artificial
  probe
  misc_feature (1)..(25): SEQ ID NO: 1428; WAN024FFT; Start 6; Stop 30
gttctgtaccaataacacaaagtcc

SEQ ID NO: 293861 - DNA, 25 bp, Artificial
  probe
  misc_feature (1)..(25): SEQ ID NO: 1428; WAN024FFT; Start 5; Stop 29
cgttctgtaccaataacacaaagtc

SEQ ID NO: 293862 - DNA, 25 bp, Artificial
  probe
  misc_feature (1)..(25): SEQ ID NO: 1428; WAN024FFT; Start 8; Stop 32
tctgtaccaataacacaaagtcctc

SEQ ID NO: 293863 - DNA, 25 bp, Artificial
  probe
  misc_feature (1)..(25): SEQ ID NO: 1428; WAN024FFT; Start 285; Stop 309
caaccgctttaaacttagattcgat

SEQ ID NO: 293864 - DNA, 25 bp, Artificial
  probe
  misc_feature (1)..(25): SEQ ID NO: 1428; WAN024FFT; Start 283; Stop 307
gacaaccgctttaaacttagattcg

SEQ ID NO: 293865 - DNA, 25 bp, Artificial
  probe
  misc_feature (1)..(25): SEQ ID NO: 1428; WAN024FFT; Start 282; Stop 306
cgacaaccgctttaaacttagattc

SEQ ID NO: 293866 - DNA, 25 bp, Artificial
  probe
  misc_feature (1)..(25): SEQ ID NO: 1428; WAN024FFT; Start 287; Stop 311
accgctttaaacttagattcgatac

SEQ ID NO: 293867 - DNA, 25 bp, Artificial
  probe
  misc_feature (1)..(25): SEQ ID NO: 1428; WAN024FFT; Start 9; Stop 33
ctgtaccaataacacaaagtcctcc

SEQ ID NO: 293868 - DNA, 25 bp, Artificial
  probe
  misc_feature (1)..(25): SEQ ID NO: 1428; WAN024FFT; Start 126; Stop 150
tgatgatttgggcttctctatagtg

SEQ ID NO: 293869 - DNA, 25 bp, Artificial
  probe
  misc_feature (1)..(25): SEQ ID NO: 1428; WAN024FFT; Start 288; Stop 312
ccgctttaaacttagattcgatact

SEQ ID NO: 293870 - DNA, 25 bp, Artificial
  probe
  misc_feature (1)..(25): SEQ ID NO: 1428; WAN024FFT; Start 284; Stop 308
acaaccgctttaaacttagattcga

SEQ ID NO: 293871 - DNA, 25 bp, Artificial
  probe
  misc_feature (1)..(25): SEQ ID NO: 1428; WAN024FFT; Start 281; Stop 305
tcgacaaccgctttaaacttagatt

SEQ ID NO: 293872 - DNA, 25 bp, Artificial
  probe
  misc_feature (1)..(25): SEQ ID NO: 1428; WAN024FFT; Start 280; Stop 304
ttcgacaaccgctttaaacttagat

SEQ ID NO: 293873 - DNA, 25 bp, Artificial
  probe
  misc_feature (1)..(25): SEQ ID NO: 1428; WAN024FFT; Start 130; Stop 154
gatttgggcttctctatagtggttt

SEQ ID NO: 293874 - DNA, 25 bp, Artificial
  probe
  misc_feature (1)..(25): SEQ ID NO: 1428; WAN024FFT; Start 125; Stop 149
atgatgatttgggcttctctatagt

SEQ ID NO: 293875 - DNA, 25 bp, Artificial
  probe
  misc_feature (1)..(25): SEQ ID NO: 1428; WAN024FFT; Start 127; Stop 151
gatgatttgggcttctctatagtgg

SEQ ID NO: 293876 - DNA, 25 bp, Artificial
  probe
  misc_feature (1)..(25): SEQ ID NO: 1428; WAN024FFT; Start 124; Stop 148
catgatgatttgggcttctctatag

SEQ ID NO: 293877 - DNA, 25 bp, Artificial
  probe
  misc_feature (1)..(25): SEQ ID NO: 1428; WAN024FFT; Start 286; Stop 310
aaccgctttaaacttagattcgata

SEQ ID NO: 293878 - DNA, 25 bp, Artificial
  probe
  misc_feature (1)..(25): SEQ ID NO: 1428; WAN024FFT; Start 304; Stop 328
ttcgatacttgcataaagaaggtct

SEQ ID NO: 293879 - DNA, 25 bp, Artificial
  probe
  misc_feature (1)..(25): SEQ ID NO: 1428; WAN024FFT; Start 128; Stop 152
atgatttgggcttctctatagtggt

SEQ ID NO: 293880 - DNA, 25 bp, Artificial
  probe
  misc_feature (1)..(25): SEQ ID NO: 1428; WAN024FFT; Start 10; Stop 34
tgtaccaataacacaaagtcctcca

SEQ ID NO: 293881 - DNA, 25 bp, Artificial
  probe
  misc_feature (1)..(25): SEQ ID NO: 1428; WAN024FFT; Start 279; Stop 303
cttcgacaaccgctttaaacttaga

SEQ ID NO: 293882 - DNA, 25 bp, Artificial
  probe
  misc_feature (1)..(25): SEQ ID NO: 1428; WAN024FFT; Start 278; Stop 302
tcttcgacaaccgctttaaacttag

SEQ ID NO: 293883 - DNA, 25 bp, Artificial
  probe
  misc_feature (1)..(25): SEQ ID NO: 1428; WAN024FFT; Start 303; Stop 327
attcgatacttgcataaagaaggtc

SEQ ID NO: 293884 - DNA, 25 bp, Artificial
  probe
  misc_feature (1)..(25): SEQ ID NO: 1429; WAN024F5O; Start 197; Stop 221
aacatagtctcaggacgagttgtag

SEQ ID NO: 293885 - DNA, 25 bp, Artificial
  probe
  misc_feature (1)..(25): SEQ ID NO: 1429; WAN024F5O; Start 108; Stop 132
gtttattagcgattggaaggatgac

SEQ ID NO: 293886 - DNA, 25 bp, Artificial
  probe
  misc_feature (1)..(25): SEQ ID NO: 1429; WAN024F5O; Start 107; Stop 131
agtttattagcgattggaaggatga

SEQ ID NO: 293887 - DNA, 25 bp, Artificial
  probe
  misc_feature (1)..(25): SEQ ID NO: 1429; WAN024F5O; Start 106; Stop 130
gagtttattagcgattggaaggatg

SEQ ID NO: 293888 - DNA, 25 bp, Artificial
  probe
  misc_feature (1)..(25): SEQ ID NO: 1429; WAN024F5O; Start 105; Stop 129
tgagtttattagcgattggaaggat

SEQ ID NO: 293889 - DNA, 25 bp, Artificial
  probe
  misc_feature (1)..(25): SEQ ID NO: 1429; WAN024F5O; Start 104; Stop 128
atgagtttattagcgattggaagga

SEQ ID NO: 293890 - DNA, 25 bp, Artificial
  probe
  misc_feature (1)..(25): SEQ ID NO: 1429; WAN024F5O; Start 103; Stop 127
gatgagtttattagcgattggaagg

SEQ ID NO: 293891 - DNA, 25 bp, Artificial
  probe
  misc_feature (1)..(25): SEQ ID NO: 1429; WAN024F5O; Start 102; Stop 126
ggatgagtttattagcgattggaag

SEQ ID NO: 293892 - DNA, 25 bp, Artificial
  probe
  misc_feature (1)..(25): SEQ ID NO: 1429; WAN024F5O; Start 98; Stop 122
attgggatgagtttattagcgattg

SEQ ID NO: 293893 - DNA, 25 bp, Artificial
  probe
  misc_feature (1)..(25): SEQ ID NO: 1429; WAN024F5O; Start 97; Stop 121
gattgggatgagtttattagcgatt

SEQ ID NO: 293894 - DNA, 25 bp, Artificial
  probe
  misc_feature (1)..(25): SEQ ID NO: 1429; WAN024F5O; Start 101; Stop 125
gggatgagtttattagcgattggaa

SEQ ID NO: 293895 - DNA, 25 bp, Artificial
  probe
  misc_feature (1)..(25): SEQ ID NO: 1429; WAN024F5O; Start 96; Stop 120
cgattgggatgagtttattagcgat

SEQ ID NO: 293896 - DNA, 25 bp, Artificial
  probe
  misc_feature (1)..(25): SEQ ID NO: 1429; WAN024F5O; Start 99; Stop 123
ttgggatgagtttattagcgattgg

SEQ ID NO: 293897 - DNA, 25 bp, Artificial
  probe
  misc_feature (1)..(25): SEQ ID NO: 1429; WAN024F5O; Start 109; Stop 133
tttattagcgattggaaggatgacg

SEQ ID NO: 293898 - DNA, 25 bp, Artificial
  probe
  misc_feature (1)..(25): SEQ ID NO: 1429; WAN024F5O; Start 93; Stop 117
caacgattgggatgagtttattagc

SEQ ID NO: 293899 - DNA, 25 bp, Artificial
  probe
  misc_feature (1)..(25): SEQ ID NO: 1429; WAN024F5O; Start 100; Stop 124
tgggatgagtttattagcgattgga

SEQ ID NO: 293900 - DNA, 25 bp, Artificial
  probe
  misc_feature (1)..(25): SEQ ID NO: 1429; WAN024F5O; Start 94; Stop 118
aacgattgggatgagtttattagcg

SEQ ID NO: 293901 - DNA, 25 bp, Artificial
  probe
  misc_feature (1)..(25): SEQ ID NO: 1429; WAN024F5O; Start 111; Stop 135
tattagcgattggaaggatgacgtt

SEQ ID NO: 293902 - DNA, 25 bp, Artificial
  probe
  misc_feature (1)..(25): SEQ ID NO: 1429; WAN024F5O; Start 110; Stop 134
ttattagcgattggaaggatgacgt

SEQ ID NO: 293903 - DNA, 25 bp, Artificial
  probe
  misc_feature (1)..(25): SEQ ID NO: 1429; WAN024F5O; Start 95; Stop 119
acgattgggatgagtttattagcga

SEQ ID NO: 293904 - DNA, 25 bp, Artificial
  probe
  misc_feature (1)..(25): SEQ ID NO: 1429; WAN024F5O; Start 200; Stop 224
atagtctcaggacgagttgtagcaa

SEQ ID NO: 293905 - DNA, 25 bp, Artificial
  probe
  misc_feature (1)..(25): SEQ ID NO: 1429; WAN024F5O; Start 196; Stop 220
aaacatagtctcaggacgagttgta

SEQ ID NO: 293906 - DNA, 25 bp, Artificial
  probe
  misc_feature (1)..(25): SEQ ID NO: 1429; WAN024F5O; Start 199; Stop 223
catagtctcaggacgagttgtagca

SEQ ID NO: 293907 - DNA, 25 bp, Artificial
  probe
  misc_feature (1)..(25): SEQ ID NO: 1429; WAN024F5O; Start 198; Stop 222
acatagtctcaggacgagttgtagc

SEQ ID NO: 293908 - DNA, 25 bp, Artificial
  probe
  misc_feature (1)..(25): SEQ ID NO: 1429; WAN024F5O; Start 195; Stop 219
caaacatagtctcaggacgagttgt

SEQ ID NO: 293909 - DNA, 25 bp, Artificial
  probe
  misc_feature (1)..(25): SEQ ID NO: 1429; WAN024F5O; Start 194; Stop 218
ccaaacatagtctcaggacgagttg

SEQ ID NO: 293910 - DNA, 25 bp, Artificial
  probe
  misc_feature (1)..(25): SEQ ID NO: 1429; WAN024F5O; Start 112; Stop 136
attagcgattggaaggatgacgttt

SEQ ID NO: 293911 - DNA, 25 bp, Artificial
  probe
  misc_feature (1)..(25): SEQ ID NO: 1429; WAN024F5O; Start 135; Stop 159
ttttaccaatcaagtccttgtagcg

SEQ ID NO: 293912 - DNA, 25 bp, Artificial
  probe
  misc_feature (1)..(25): SEQ ID NO: 1429; WAN024F5O; Start 193; Stop 217
cccaaacatagtctcaggacgagtt

SEQ ID NO: 293913 - DNA, 25 bp, Artificial
  probe
  misc_feature (1)..(25): SEQ ID NO: 1429; WAN024F5O; Start 91; Stop 115
tccaacgattgggatgagtttatta

SEQ ID NO: 293914 - DNA, 25 bp, Artificial
  probe
  misc_feature (1)..(25): SEQ ID NO: 1429; WAN024F5O; Start 92; Stop 116
ccaacgattgggatgagtttattag

SEQ ID NO: 293915 - DNA, 25 bp, Artificial
  probe
  misc_feature (1)..(25): SEQ ID NO: 1429; WAN024F5O; Start 90; Stop 114
ctccaacgattgggatgagtttatt

SEQ ID NO: 293916 - DNA, 25 bp, Artificial
  probe
  misc_feature (1)..(25): SEQ ID NO: 1429; WAN024F5O; Start 89; Stop 113
tctccaacgattgggatgagtttat

SEQ ID NO: 293917 - DNA, 25 bp, Artificial
  probe
  misc_feature (1)..(25): SEQ ID NO: 1430; WAN024ES3; Start 166; Stop 190
acaagcggtcaagtatctattcaag

SEQ ID NO: 293918 - DNA, 25 bp, Artificial
  probe
  misc_feature (1)..(25): SEQ ID NO: 1430; WAN024ES3; Start 193; Stop 217
ttaccagtgacgagttctaagttag

SEQ ID NO: 293919 - DNA, 25 bp, Artificial
  probe
  misc_feature (1)..(25): SEQ ID NO: 1430; WAN024ES3; Start 165; Stop 189
cacaagcggtcaagtatctattcaa

SEQ ID NO: 293920 - DNA, 25 bp, Artificial
  probe
  misc_feature (1)..(25): SEQ ID NO: 1430; WAN024ES3; Start 82; Stop 106
gatggtgaatgtgttgccttaattg

SEQ ID NO: 293921 - DNA, 25 bp, Artificial
  probe
  misc_feature (1)..(25): SEQ ID NO: 1430; WAN024ES3; Start 167; Stop 191
caagcggtcaagtatctattcaagg

SEQ ID NO: 293922 - DNA, 25 bp, Artificial
  probe
  misc_feature (1)..(25): SEQ ID NO: 1430; WAN024ES3; Start 163; Stop 187
gtcacaagcggtcaagtatctattc

SEQ ID NO: 293923 - DNA, 25 bp, Artificial
  probe
  misc_feature (1)..(25): SEQ ID NO: 1430; WAN024ES3; Start 169; Stop 193
agcggtcaagtatctattcaaggtt

SEQ ID NO: 293924 - DNA, 25 bp, Artificial
  probe
  misc_feature (1)..(25): SEQ ID NO: 1430; WAN024ES3; Start 168; Stop 192
aagcggtcaagtatctattcaaggt

SEQ ID NO: 293925 - DNA, 25 bp, Artificial
  probe
  misc_feature (1)..(25): SEQ ID NO: 1430; WAN024ES3; Start 164; Stop 188
tcacaagcggtcaagtatctattca

SEQ ID NO: 293926 - DNA, 25 bp, Artificial
  probe
  misc_feature (1)..(25): SEQ ID NO: 1430; WAN024ES3; Start 83; Stop 107
atggtgaatgtgttgccttaattgg

SEQ ID NO: 293927 - DNA, 25 bp, Artificial
  probe
  misc_feature (1)..(25): SEQ ID NO: 1430; WAN024ES3; Start 81; Stop 105
cgatggtgaatgtgttgccttaatt

SEQ ID NO: 293928 - DNA, 25 bp, Artificial
  probe
  misc_feature (1)..(25): SEQ ID NO: 1430; WAN024ES3; Start 530; Stop 554
aaggagtcaccattctctattcgtc

SEQ ID NO: 293929 - DNA, 25 bp, Artificial
  probe
  misc_feature (1)..(25): SEQ ID NO: 1430; WAN024ES3; Start 557; Stop 581
attatattgaggaagtggaacacac

SEQ ID NO: 293930 - DNA, 25 bp, Artificial
  probe
  misc_feature (1)..(25): SEQ ID NO: 1430; WAN024ES3; Start 556; Stop 580
cattatattgaggaagtggaacaca

SEQ ID NO: 293931 - DNA, 25 bp, Artificial
  probe
  misc_feature (1)..(25): SEQ ID NO: 1430; WAN024ES3; Start 162; Stop 186
ggtcacaagcggtcaagtatctatt

SEQ ID NO: 293932 - DNA, 25 bp, Artificial
  probe
  misc_feature (1)..(25): SEQ ID NO: 1430; WAN024ES3; Start 681; Stop 705
tatagcttacaaggaagtcgtagag

SEQ ID NO: 293933 - DNA, 25 bp, Artificial
  probe
  misc_feature (1)..(25): SEQ ID NO: 1430; WAN024ES3; Start 555; Stop 579
ccattatattgaggaagtggaacac

SEQ ID NO: 293934 - DNA, 25 bp, Artificial
  probe
  misc_feature (1)..(25): SEQ ID NO: 1430; WAN024ES3; Start 529; Stop 553
caaggagtcaccattctctattcgt

SEQ ID NO: 293935 - DNA, 25 bp, Artificial
  probe
  misc_feature (1)..(25): SEQ ID NO: 1430; WAN024ES3; Start 686; Stop 710
cttacaaggaagtcgtagagcagtc

SEQ ID NO: 293936 - DNA, 25 bp, Artificial
  probe
  misc_feature (1)..(25): SEQ ID NO: 1430; WAN024ES3; Start 537; Stop 561
caccattctctattcgtcccattat

SEQ ID NO: 293937 - DNA, 25 bp, Artificial
  probe
  misc_feature (1)..(25): SEQ ID NO: 1430; WAN024ES3; Start 192; Stop 216
tttaccagtgacgagttctaagtta

SEQ ID NO: 293938 - DNA, 25 bp, Artificial
  probe
  misc_feature (1)..(25): SEQ ID NO: 1430; WAN024ES3; Start 191; Stop 215
gtttaccagtgacgagttctaagtt

SEQ ID NO: 293939 - DNA, 25 bp, Artificial
  probe
  misc_feature (1)..(25): SEQ ID NO: 1430; WAN024ES3; Start 680; Stop 704
ctatagcttacaaggaagtcgtaga

SEQ ID NO: 293940 - DNA, 25 bp, Artificial
  probe
  misc_feature (1)..(25): SEQ ID NO: 1430; WAN024ES3; Start 86; Stop 110
gtgaatgtgttgccttaattggtcc

SEQ ID NO: 293941 - DNA, 25 bp, Artificial
  probe
  misc_feature (1)..(25): SEQ ID NO: 1430; WAN024ES3; Start 85; Stop 109
ggtgaatgtgttgccttaattggtc

SEQ ID NO: 293942 - DNA, 25 bp, Artificial
  probe
  misc_feature (1)..(25): SEQ ID NO: 1430; WAN024ES3; Start 536; Stop 560
tcaccattctctattcgtcccatta

SEQ ID NO: 293943 - DNA, 25 bp, Artificial
  probe
  misc_feature (1)..(25): SEQ ID NO: 1430; WAN024ES3; Start 194; Stop 218
taccagtgacgagttctaagttaga

SEQ ID NO: 293944 - DNA, 25 bp, Artificial
  probe
  misc_feature (1)..(25): SEQ ID NO: 1430; WAN024ES3; Start 170; Stop 194
gcggtcaagtatctattcaaggttt

SEQ ID NO: 293945 - DNA, 25 bp, Artificial
  probe
  misc_feature (1)..(25): SEQ ID NO: 1430; WAN024ES3; Start 197; Stop 221
cagtgacgagttctaagttagacta

SEQ ID NO: 293946 - DNA, 25 bp, Artificial
  probe
  misc_feature (1)..(25): SEQ ID NO: 1430; WAN024ES3; Start 538; Stop 562
accattctctattcgtcccattata

SEQ ID NO: 293947 - DNA, 25 bp, Artificial
  probe
  misc_feature (1)..(25): SEQ ID NO: 1430; WAN024ES3; Start 688; Stop 712
tacaaggaagtcgtagagcagtcaa

SEQ ID NO: 293948 - DNA, 25 bp, Artificial
  probe
  misc_feature (1)..(25): SEQ ID NO: 1430; WAN024ES3; Start 687; Stop 711
ttacaaggaagtcgtagagcagtca

SEQ ID NO: 293949 - DNA, 25 bp, Artificial
  probe
  misc_feature (1)..(25): SEQ ID NO: 1430; WAN024ES3; Start 171; Stop 195
cggtcaagtatctattcaaggttta

SEQ ID NO: 293950 - DNA, 25 bp, Artificial
  probe
  misc_feature (1)..(25): SEQ ID NO: 1431; WAN024CDW; Start 358; Stop 382
attgaactctatcgagataagccag

SEQ ID NO: 293951 - DNA, 25 bp, Artificial
  probe
  misc_feature (1)..(25): SEQ ID NO: 1431; WAN024CDW; Start 357; Stop 381
cattgaactctatcgagataagcca

SEQ ID NO: 293952 - DNA, 25 bp, Artificial
  probe
  misc_feature (1)..(25): SEQ ID NO: 1431; WAN024CDW; Start 354; Stop 378
tggcattgaactctatcgagataag

SEQ ID NO: 293953 - DNA, 25 bp, Artificial
  probe
  misc_feature (1)..(25): SEQ ID NO: 1431; WAN024CDW; Start 353; Stop 377
atggcattgaactctatcgagataa

SEQ ID NO: 293954 - DNA, 25 bp, Artificial
  probe
  misc_feature (1)..(25): SEQ ID NO: 1431; WAN024CDW; Start 352; Stop 376
aatggcattgaactctatcgagata

SEQ ID NO: 293955 - DNA, 25 bp, Artificial
  probe
  misc_feature (1)..(25): SEQ ID NO: 1431; WAN024CDW; Start 359; Stop 383
ttgaactctatcgagataagccagt

SEQ ID NO: 293956 - DNA, 25 bp, Artificial
  probe
  misc_feature (1)..(25): SEQ ID NO: 1431; WAN024CDW; Start 800; Stop 824
aattggaaatcacagactcagatgg

SEQ ID NO: 293957 - DNA, 25 bp, Artificial
  probe
  misc_feature (1)..(25): SEQ ID NO: 1431; WAN024CDW; Start 356; Stop 380
gcattgaactctatcgagataagcc

SEQ ID NO: 293958 - DNA, 25 bp, Artificial
  probe
  misc_feature (1)..(25): SEQ ID NO: 1431; WAN024CDW; Start 355; Stop 379
ggcattgaactctatcgagataagc

SEQ ID NO: 293959 - DNA, 25 bp, Artificial
  probe
  misc_feature (1)..(25): SEQ ID NO: 1431; WAN024CDW; Start 697; Stop 721
ttagcctactatgtcatcgaagtcg

SEQ ID NO: 293960 - DNA, 25 bp, Artificial
  probe
  misc_feature (1)..(25): SEQ ID NO: 1431; WAN024CDW; Start 689; Stop 713
taccaggtttagcctactatgtcat

SEQ ID NO: 293961 - DNA, 25 bp, Artificial
  probe
  misc_feature (1)..(25): SEQ ID NO: 1431; WAN024CDW; Start 346; Stop 370
gagggaaatggcattgaactctatc

SEQ ID NO: 293962 - DNA, 25 bp, Artificial
  probe
  misc_feature (1)..(25): SEQ ID NO: 1431; WAN024CDW; Start 694; Stop 718
ggtttagcctactatgtcatcgaag

SEQ ID NO: 293963 - DNA, 25 bp, Artificial
  probe
  misc_feature (1)..(25): SEQ ID NO: 1431; WAN024CDW; Start 690; Stop 714
accaggtttagcctactatgtcatc

SEQ ID NO: 293964 - DNA, 25 bp, Artificial
  probe
  misc_feature (1)..(25): SEQ ID NO: 1431; WAN024CDW; Start 696; Stop 720
tttagcctactatgtcatcgaagtc

SEQ ID NO: 293965 - DNA, 25 bp, Artificial
  probe
  misc_feature (1)..(25): SEQ ID NO: 1431; WAN024CDW; Start 695; Stop 719
gtttagcctactatgtcatcgaagt

SEQ ID NO: 293966 - DNA, 25 bp, Artificial
  probe
  misc_feature (1)..(25): SEQ ID NO: 1431; WAN024CDW; Start 351; Stop 375
aaatggcattgaactctatcgagat

SEQ ID NO: 293967 - DNA, 25 bp, Artificial
  probe
  misc_feature (1)..(25): SEQ ID NO: 1431; WAN024CDW; Start 367; Stop 391
tatcgagataagccagtttccacat

SEQ ID NO: 293968 - DNA, 25 bp, Artificial
  probe
  misc_feature (1)..(25): SEQ ID NO: 1431; WAN024CDW; Start 801; Stop 825
attggaaatcacagactcagatggc

SEQ ID NO: 293969 - DNA, 25 bp, Artificial
  probe
  misc_feature (1)..(25): SEQ ID NO: 1431; WAN024CDW; Start 350; Stop 374
gaaatggcattgaactctatcgaga

SEQ ID NO: 293970 - DNA, 25 bp, Artificial
  probe
  misc_feature (1)..(25): SEQ ID NO: 1431; WAN024CDW; Start 360; Stop 384
tgaactctatcgagataagccagtt

SEQ ID NO: 293971 - DNA, 25 bp, Artificial
  probe
  misc_feature (1)..(25): SEQ ID NO: 1431; WAN024CDW; Start 347; Stop 371
agggaaatggcattgaactctatcg

SEQ ID NO: 293972 - DNA, 25 bp, Artificial
  probe
  misc_feature (1)..(25): SEQ ID NO: 1431; WAN024CDW; Start 388; Stop 412
acatgggatattcgagaagatggac

SEQ ID NO: 293973 - DNA, 25 bp, Artificial
  probe
  misc_feature (1)..(25): SEQ ID NO: 1431; WAN024CDW; Start 387; Stop 411
cacatgggatattcgagaagatgga

SEQ ID NO: 293974 - DNA, 25 bp, Artificial
  probe
  misc_feature (1)..(25): SEQ ID NO: 1431; WAN024CDW; Start 366; Stop 390
ctatcgagataagccagtttccaca

SEQ ID NO: 293975 - DNA, 25 bp, Artificial
  probe
  misc_feature (1)..(25): SEQ ID NO: 1431; WAN024CDW; Start 345; Stop 369
ggagggaaatggcattgaactctat

SEQ ID NO: 293976 - DNA, 25 bp, Artificial
  probe
  misc_feature (1)..(25): SEQ ID NO: 1431; WAN024CDW; Start 365; Stop 389
tctatcgagataagccagtttccac

SEQ ID NO: 293977 - DNA, 25 bp, Artificial
  probe
  misc_feature (1)..(25): SEQ ID NO: 1431; WAN024CDW; Start 691; Stop 715
ccaggtttagcctactatgtcatcg

SEQ ID NO: 293978 - DNA, 25 bp, Artificial
  probe
  misc_feature (1)..(25): SEQ ID NO: 1431; WAN024CDW; Start 364; Stop 388
ctctatcgagataagccagtttcca

SEQ ID NO: 293979 - DNA, 25 bp, Artificial
  probe
  misc_feature (1)..(25): SEQ ID NO: 1431; WAN024CDW; Start 363; Stop 387
actctatcgagataagccagtttcc

SEQ ID NO: 293980 - DNA, 25 bp, Artificial
  probe
  misc_feature (1)..(25): SEQ ID NO: 1431; WAN024CDW; Start 693; Stop 717
aggtttagcctactatgtcatcgaa

SEQ ID NO: 293981 - DNA, 25 bp, Artificial
  probe
  misc_feature (1)..(25): SEQ ID NO: 1431; WAN024CDW; Start 349; Stop 373
ggaaatggcattgaactctatcgag

SEQ ID NO: 293982 - DNA, 25 bp, Artificial
  probe
  misc_feature (1)..(25): SEQ ID NO: 1431; WAN024CDW; Start 374; Stop 398
ataagccagtttccacatgggatat

SEQ ID NO: 293983 - DNA, 25 bp, Artificial
  probe
  misc_feature (1)..(25): SEQ ID NO: 1432; WAN024FUY; Start 1014; Stop 1038
tggctactctattatgtatggaacc

SEQ ID NO: 293984 - DNA, 25 bp, Artificial
  probe
  misc_feature (1)..(25): SEQ ID NO: 1432; WAN024FUY; Start 500; Stop 524
aagatgactatatggtatatgcggc

SEQ ID NO: 293985 - DNA, 25 bp, Artificial
  probe
  misc_feature (1)..(25): SEQ ID NO: 1432; WAN024FUY; Start 1011; Stop 1035
tgttggctactctattatgtatgga

SEQ ID NO: 293986 - DNA, 25 bp, Artificial
  probe
  misc_feature (1)..(25): SEQ ID NO: 1432; WAN024FUY; Start 1075; Stop 1099
attcaggcaagtattattggtgttg

SEQ ID NO: 293987 - DNA, 25 bp, Artificial
  probe
  misc_feature (1)..(25): SEQ ID NO: 1432; WAN024FUY; Start 1074; Stop 1098
cattcaggcaagtattattggtgtt

SEQ ID NO: 293988 - DNA, 25 bp, Artificial
  probe
  misc_feature (1)..(25): SEQ ID NO: 1432; WAN024FUY; Start 1015; Stop 1039
ggctactctattatgtatggaacca

SEQ ID NO: 293989 - DNA, 25 bp, Artificial
  probe
  misc_feature (1)..(25): SEQ ID NO: 1432; WAN024FUY; Start 679; Stop 703
aagaatacagatgtcgttatgatgg

SEQ ID NO: 293990 - DNA, 25 bp, Artificial
  probe
  misc_feature (1)..(25): SEQ ID NO: 1432; WAN024FUY; Start 1068; Stop 1092
tgtaaccattcaggcaagtattatt

SEQ ID NO: 293991 - DNA, 25 bp, Artificial
  probe
  misc_feature (1)..(25): SEQ ID NO: 1432; WAN024FUY; Start 1077; Stop 1101
tcaggcaagtattattggtgttgtt

SEQ ID NO: 293992 - DNA, 25 bp, Artificial
  probe
  misc_feature (1)..(25): SEQ ID NO: 1432; WAN024FUY; Start 1076; Stop 1100
ttcaggcaagtattattggtgttgt

SEQ ID NO: 293993 - DNA, 25 bp, Artificial
  probe
  misc_feature (1)..(25): SEQ ID NO: 1432; WAN024FUY; Start 239; Stop 263
gtcagactgtcagagaattgttagt

SEQ ID NO: 293994 - DNA, 25 bp, Artificial
  probe
  misc_feature (1)..(25): SEQ ID NO: 1432; WAN024FUY; Start 510; Stop 534
tatggtatatgcggcaattacagtt

SEQ ID NO: 293995 - DNA, 25 bp, Artificial
  probe
  misc_feature (1)..(25): SEQ ID NO: 1432; WAN024FUY; Start 763; Stop 787
atagtgctcagtgtagtaacttctt

SEQ ID NO: 293996 - DNA, 25 bp, Artificial
  probe
  misc_feature (1)..(25): SEQ ID NO: 1432; WAN024FUY; Start 504; Stop 528
tgactatatggtatatgcggcaatt

SEQ ID NO: 293997 - DNA, 25 bp, Artificial
  probe
  misc_feature (1)..(25): SEQ ID NO: 1432; WAN024FUY; Start 509; Stop 533
atatggtatatgcggcaattacagt

SEQ ID NO: 293998 - DNA, 25 bp, Artificial
  probe
  misc_feature (1)..(25): SEQ ID NO: 1432; WAN024FUY; Start 503; Stop 527
atgactatatggtatatgcggcaat

SEQ ID NO: 293999 - DNA, 25 bp, Artificial
  probe
  misc_feature (1)..(25): SEQ ID NO: 1432; WAN024FUY; Start 502; Stop 526
gatgactatatggtatatgcggcaa

SEQ ID NO: 294000 - DNA, 25 bp, Artificial
  probe
  misc_feature (1)..(25): SEQ ID NO: 1432; WAN024FUY; Start 1010; Stop 1034
ttgttggctactctattatgtatgg

SEQ ID NO: 294001 - DNA, 25 bp, Artificial
  probe
  misc_feature (1)..(25): SEQ ID NO: 1432; WAN024FUY; Start 362; Stop 386
cgtcatctacaattcctctcaatat

SEQ ID NO: 294002 - DNA, 25 bp, Artificial
  probe
  misc_feature (1)..(25): SEQ ID NO: 1432; WAN024FUY; Start 1067; Stop 1091
atgtaaccattcaggcaagtattat

SEQ ID NO: 294003 - DNA, 25 bp, Artificial
  probe
  misc_feature (1)..(25): SEQ ID NO: 1432; WAN024FUY; Start 501; Stop 525
agatgactatatggtatatgcggca

SEQ ID NO: 294004 - DNA, 25 bp, Artificial
  probe
  misc_feature (1)..(25): SEQ ID NO: 1432; WAN024FUY; Start 762; Stop 786
tatagtgctcagtgtagtaacttct

SEQ ID NO: 294005 - DNA, 25 bp, Artificial
  probe
  misc_feature (1)..(25): SEQ ID NO: 1432; WAN024FUY; Start 1013; Stop 1037
ttggctactctattatgtatggaac

SEQ ID NO: 294006 - DNA, 25 bp, Artificial
  probe
  misc_feature (1)..(25): SEQ ID NO: 1432; WAN024FUY; Start 1012; Stop 1036
gttggctactctattatgtatggaa

SEQ ID NO: 294007 - DNA, 25 bp, Artificial
  probe
  misc_feature (1)..(25): SEQ ID NO: 1432; WAN024FUY; Start 1069; Stop 1093
gtaaccattcaggcaagtattattg

SEQ ID NO: 294008 - DNA, 25 bp, Artificial
  probe
  misc_feature (1)..(25): SEQ ID NO: 1432; WAN024FUY; Start 508; Stop 532
tatatggtatatgcggcaattacag

SEQ ID NO: 294009 - DNA, 25 bp, Artificial
  probe
  misc_feature (1)..(25): SEQ ID NO: 1432; WAN024FUY; Start 507; Stop 531
ctatatggtatatgcggcaattaca

SEQ ID NO: 294010 - DNA, 25 bp, Artificial
  probe
  misc_feature (1)..(25): SEQ ID NO: 1432; WAN024FUY; Start 506; Stop 530
actatatggtatatgcggcaattac

SEQ ID NO: 294011 - DNA, 25 bp, Artificial
  probe
  misc_feature (1)..(25): SEQ ID NO: 1432; WAN024FUY; Start 505; Stop 529
gactatatggtatatgcggcaatta

SEQ ID NO: 294012 - DNA, 25 bp, Artificial
  probe
  misc_feature (1)..(25): SEQ ID NO: 1432; WAN024FUY; Start 411; Stop 435
agcattggaagactattcgtatatt

SEQ ID NO: 294013 - DNA, 25 bp, Artificial
  probe
  misc_feature (1)..(25): SEQ ID NO: 1432; WAN024FUY; Start 410; Stop 434
aagcattggaagactattcgtatat

SEQ ID NO: 294014 - DNA, 25 bp, Artificial
  probe
  misc_feature (1)..(25): SEQ ID NO: 1432; WAN024FUY; Start 238; Stop 262
agtcagactgtcagagaattgttag

SEQ ID NO: 294015 - DNA, 25 bp, Artificial
  probe
  misc_feature (1)..(25): SEQ ID NO: 1432; WAN024FUY; Start 235; Stop 259
ctaagtcagactgtcagagaattgt

SEQ ID NO: 294016 - DNA, 25 bp, Artificial
  probe
  misc_feature (1)..(25): SEQ ID NO: 1433; WAN024F48; Start 384; Stop 408
caagatggtagcagttctcaatacg

SEQ ID NO: 294017 - DNA, 25 bp, Artificial
  probe
  misc_feature (1)..(25): SEQ ID NO: 1433; WAN024F48; Start 383; Stop 407
gcaagatggtagcagttctcaatac

SEQ ID NO: 294018 - DNA, 25 bp, Artificial
  probe
  misc_feature (1)..(25): SEQ ID NO: 1433; WAN024F48; Start 461; Stop 485
ttactccagccaactataacacacc

SEQ ID NO: 294019 - DNA, 25 bp, Artificial
  probe
  misc_feature (1)..(25): SEQ ID NO: 1433; WAN024F48; Start 403; Stop 427
aatacgccagtagaggtcattgaag

SEQ ID NO: 294020 - DNA, 25 bp, Artificial
  probe
  misc_feature (1)..(25): SEQ ID NO: 1433; WAN024F48; Start 460; Stop 484
gttactccagccaactataacacac

SEQ ID NO: 294021 - DNA, 25 bp, Artificial
  probe
  misc_feature (1)..(25): SEQ ID NO: 1433; WAN024F48; Start 382; Stop 406
ggcaagatggtagcagttctcaata

SEQ ID NO: 294022 - DNA, 25 bp, Artificial
  probe
  misc_feature (1)..(25): SEQ ID NO: 1433; WAN024F48; Start 462; Stop 486
tactccagccaactataacacacct

SEQ ID NO: 294023 - DNA, 25 bp, Artificial
  probe
  misc_feature (1)..(25): SEQ ID NO: 1433; WAN024F48; Start 391; Stop 415
gtagcagttctcaatacgccagtag

SEQ ID NO: 294024 - DNA, 25 bp, Artificial
  probe
  misc_feature (1)..(25): SEQ ID NO: 1433; WAN024F48; Start 404; Stop 428
atacgccagtagaggtcattgaaga

SEQ ID NO: 294025 - DNA, 25 bp, Artificial
  probe
  misc_feature (1)..(25): SEQ ID NO: 1433; WAN024F48; Start 385; Stop 409
aagatggtagcagttctcaatacgc

SEQ ID NO: 294026 - DNA, 25 bp, Artificial
  probe
  misc_feature (1)..(25): SEQ ID NO: 1433; WAN024F48; Start 339; Stop 363
taagcgtggagcctatatggaagaa

SEQ ID NO: 294027 - DNA, 25 bp, Artificial
  probe
  misc_feature (1)..(25): SEQ ID NO: 1433; WAN024F48; Start 392; Stop 416
tagcagttctcaatacgccagtaga

SEQ ID NO: 294028 - DNA, 25 bp, Artificial
  probe
  misc_feature (1)..(25): SEQ ID NO: 1433; WAN024F48; Start 785; Stop 809
aagaagcaggcataagcaactttat

SEQ ID NO: 294029 - DNA, 25 bp, Artificial
  probe
  misc_feature (1)..(25): SEQ ID NO: 1433; WAN024F48; Start 459; Stop 483
ggttactccagccaactataacaca

SEQ ID NO: 294030 - DNA, 25 bp, Artificial
  probe
  misc_feature (1)..(25): SEQ ID NO: 1433; WAN024F48; Start 405; Stop 429
tacgccagtagaggtcattgaagaa

SEQ ID NO: 294031 - DNA, 25 bp, Artificial
  probe
  misc_feature (1)..(25): SEQ ID NO: 1433; WAN024F48; Start 456; Stop 480
agtggttactccagccaactataac

SEQ ID NO: 294032 - DNA, 25 bp, Artificial
  probe
  misc_feature (1)..(25): SEQ ID NO: 1433; WAN024F48; Start 786; Stop 810
agaagcaggcataagcaactttatc

SEQ ID NO: 294033 - DNA, 25 bp, Artificial
  probe
  misc_feature (1)..(25): SEQ ID NO: 1433; WAN024F48; Start 458; Stop 482
tggttactccagccaactataacac

SEQ ID NO: 294034 - DNA, 25 bp, Artificial
  probe
  misc_feature (1)..(25): SEQ ID NO: 1433; WAN024F48; Start 457; Stop 481
gtggttactccagccaactataaca

SEQ ID NO: 294035 - DNA, 25 bp, Artificial
  probe
  misc_feature (1)..(25): SEQ ID NO: 1433; WAN024F48; Start 338; Stop 362
ctaagcgtggagcctatatggaaga

SEQ ID NO: 294036 - DNA, 25 bp, Artificial
  probe
  misc_feature (1)..(25): SEQ ID NO: 1433; WAN024F48; Start 880; Stop 904
gtggaagatcaagcgagtttagtag

SEQ ID NO: 294037 - DNA, 25 bp, Artificial
  probe
  misc_feature (1)..(25): SEQ ID NO: 1433; WAN024F48; Start 868; Stop 892
cacttagctcatgtggaagatcaag

SEQ ID NO: 294038 - DNA, 25 bp, Artificial
  probe
  misc_feature (1)..(25): SEQ ID NO: 1433; WAN024F48; Start 399; Stop 423
tctcaatacgccagtagaggtcatt

SEQ ID NO: 294039 - DNA, 25 bp, Artificial
  probe
  misc_feature (1)..(25): SEQ ID NO: 1433; WAN024F48; Start 398; Stop 422
ttctcaatacgccagtagaggtcat

SEQ ID NO: 294040 - DNA, 25 bp, Artificial
  probe
  misc_feature (1)..(25): SEQ ID NO: 1433; WAN024F48; Start 867; Stop 891
tcacttagctcatgtggaagatcaa

SEQ ID NO: 294041 - DNA, 25 bp, Artificial
  probe
  misc_feature (1)..(25): SEQ ID NO: 1433; WAN024F48; Start 784; Stop 808
caagaagcaggcataagcaacttta

SEQ ID NO: 294042 - DNA, 25 bp, Artificial
  probe
  misc_feature (1)..(25): SEQ ID NO: 1433; WAN024F48; Start 412; Stop 436
gtagaggtcattgaagaagcctgtc

SEQ ID NO: 294043 - DNA, 25 bp, Artificial
  probe
  misc_feature (1)..(25): SEQ ID NO: 1433; WAN024F48; Start 410; Stop 434
cagtagaggtcattgaagaagcctg

SEQ ID NO: 294044 - DNA, 25 bp, Artificial
  probe
  misc_feature (1)..(25): SEQ ID NO: 1433; WAN024F48; Start 879; Stop 903
tgtggaagatcaagcgagtttagta

SEQ ID NO: 294045 - DNA, 25 bp, Artificial
  probe
  misc_feature (1)..(25): SEQ ID NO: 1433; WAN024F48; Start 883; Stop 907
gaagatcaagcgagtttagtagcac

SEQ ID NO: 294046 - DNA, 25 bp, Artificial
  probe
  misc_feature (1)..(25): SEQ ID NO: 1433; WAN024F48; Start 157; Stop 181
gacaaactcaatcagacccgctata

SEQ ID NO: 294047 - DNA, 25 bp, Artificial
  probe
  misc_feature (1)..(25): SEQ ID NO: 1433; WAN024F48; Start 886; Stop 910
gatcaagcgagtttagtagcacttt

SEQ ID NO: 294048 - DNA, 25 bp, Artificial
  probe
  misc_feature (1)..(25): SEQ ID NO: 1433; WAN024F48; Start 866; Stop 890
ctcacttagctcatgtggaagatca

SEQ ID NO: 294049 - DNA, 25 bp, Artificial
  probe
  misc_feature (1)..(25): SEQ ID NO: 1434; WAN024CXA; Start 269; Stop 293
agttggctgagttgtctatgtatta

SEQ ID NO: 294050 - DNA, 25 bp, Artificial
  probe
  misc_feature (1)..(25): SEQ ID NO: 1434; WAN024CXA; Start 268; Stop 292
gagttggctgagttgtctatgtatt

SEQ ID NO: 294051 - DNA, 25 bp, Artificial
  probe
  misc_feature (1)..(25): SEQ ID NO: 1434; WAN024CXA; Start 517; Stop 541
tataactgtgatgtcttggtagagc

SEQ ID NO: 294052 - DNA, 25 bp, Artificial
  probe
  misc_feature (1)..(25): SEQ ID NO: 1434; WAN024CXA; Start 514; Stop 538
gcatataactgtgatgtcttggtag

SEQ ID NO: 294053 - DNA, 25 bp, Artificial
  probe
  misc_feature (1)..(25): SEQ ID NO: 1434; WAN024CXA; Start 270; Stop 294
gttggctgagttgtctatgtattat

SEQ ID NO: 294054 - DNA, 25 bp, Artificial
  probe
  misc_feature (1)..(25): SEQ ID NO: 1434; WAN024CXA; Start 267; Stop 291
agagttggctgagttgtctatgtat

SEQ ID NO: 294055 - DNA, 25 bp, Artificial
  probe
  misc_feature (1)..(25): SEQ ID NO: 1434; WAN024CXA; Start 829; Stop 853
gatgtgaagaccaagcgttatctac

SEQ ID NO: 294056 - DNA, 25 bp, Artificial
  probe
  misc_feature (1)..(25): SEQ ID NO: 1434; WAN024CXA; Start 830; Stop 854
atgtgaagaccaagcgttatctact

SEQ ID NO: 294057 - DNA, 25 bp, Artificial
  probe
  misc_feature (1)..(25): SEQ ID NO: 1434; WAN024CXA; Start 828; Stop 852
tgatgtgaagaccaagcgttatcta

SEQ ID NO: 294058 - DNA, 25 bp, Artificial
  probe
  misc_feature (1)..(25): SEQ ID NO: 1434; WAN024CXA; Start 831; Stop 855
tgtgaagaccaagcgttatctactt

SEQ ID NO: 294059 - DNA, 25 bp, Artificial
  probe
  misc_feature (1)..(25): SEQ ID NO: 1434; WAN024CXA; Start 518; Stop 542
ataactgtgatgtcttggtagagcc

SEQ ID NO: 294060 - DNA, 25 bp, Artificial
  probe
  misc_feature (1)..(25): SEQ ID NO: 1434; WAN024CXA; Start 515; Stop 539
catataactgtgatgtcttggtaga

SEQ ID NO: 294061 - DNA, 25 bp, Artificial
  probe
  misc_feature (1)..(25): SEQ ID NO: 1434; WAN024CXA; Start 52; Stop 76
attggacattatgttggaagtctca

SEQ ID NO: 294062 - DNA, 25 bp, Artificial
  probe
  misc_feature (1)..(25): SEQ ID NO: 1434; WAN024CXA; Start 53; Stop 77
ttggacattatgttggaagtctcaa

SEQ ID NO: 294063 - DNA, 25 bp, Artificial
  probe
  misc_feature (1)..(25): SEQ ID NO: 1434; WAN024CXA; Start 516; Stop 540
atataactgtgatgtcttggtagag

SEQ ID NO: 294064 - DNA, 25 bp, Artificial
  probe
  misc_feature (1)..(25): SEQ ID NO: 1434; WAN024CXA; Start 48; Stop 72
gcatattggacattatgttggaagt

SEQ ID NO: 294065 - DNA, 25 bp, Artificial
  probe
  misc_feature (1)..(25): SEQ ID NO: 1434; WAN024CXA; Start 271; Stop 295
ttggctgagttgtctatgtattata

SEQ ID NO: 294066 - DNA, 25 bp, Artificial
  probe
  misc_feature (1)..(25): SEQ ID NO: 1434; WAN024CXA; Start 205; Stop 229
gattatcttgcagttggattggatc

SEQ ID NO: 294067 - DNA, 25 bp, Artificial
  probe
  misc_feature (1)..(25): SEQ ID NO: 1434; WAN024CXA; Start 51; Stop 75
tattggacattatgttggaagtctc

SEQ ID NO: 294068 - DNA, 25 bp, Artificial
  probe
  misc_feature (1)..(25): SEQ ID NO: 1434; WAN024CXA; Start 904; Stop 928
tttgctaaggatatgggagaagttt

SEQ ID NO: 294069 - DNA, 25 bp, Artificial
  probe
  misc_feature (1)..(25): SEQ ID NO: 1434; WAN024CXA; Start 716; Stop 740
caggtaagattgagggaaatatggt

SEQ ID NO: 294070 - DNA, 25 bp, Artificial
  probe
  misc_feature (1)..(25): SEQ ID NO: 1434; WAN024CXA; Start 94; Stop 118
caggaagaggataagtatgatatgt

SEQ ID NO: 294071 - DNA, 25 bp, Artificial
  probe
  misc_feature (1)..(25): SEQ ID NO: 1434; WAN024CXA; Start 93; Stop 117
acaggaagaggataagtatgatatg

SEQ ID NO: 294072 - DNA, 25 bp, Artificial
  probe
  misc_feature (1)..(25): SEQ ID NO: 1434; WAN024CXA; Start 903; Stop 927
atttgctaaggatatgggagaagtt

SEQ ID NO: 294073 - DNA, 25 bp, Artificial
  probe
  misc_feature (1)..(25): SEQ ID NO: 1434; WAN024CXA; Start 248; Stop 272
ttattcaaagccagattccagagtt

SEQ ID NO: 294074 - DNA, 25 bp, Artificial
  probe
  misc_feature (1)..(25): SEQ ID NO: 1434; WAN024CXA; Start 247; Stop 271
tttattcaaagccagattccagagt

SEQ ID NO: 294075 - DNA, 25 bp, Artificial
  probe
  misc_feature (1)..(25): SEQ ID NO: 1434; WAN024CXA; Start 109; Stop 133
tatgatatgtttgtgttcttggctg

SEQ ID NO: 294076 - DNA, 25 bp, Artificial
  probe
  misc_feature (1)..(25): SEQ ID NO: 1434; WAN024CXA; Start 108; Stop 132
gtatgatatgtttgtgttcttggct

SEQ ID NO: 294077 - DNA, 25 bp, Artificial
  probe
  misc_feature (1)..(25): SEQ ID NO: 1434; WAN024CXA; Start 107; Stop 131
agtatgatatgtttgtgttcttggc

SEQ ID NO: 294078 - DNA, 25 bp, Artificial
  probe
  misc_feature (1)..(25): SEQ ID NO: 1434; WAN024CXA; Start 430; Stop 454
ttcaaggctaattatgttcctgttg

SEQ ID NO: 294079 - DNA, 25 bp, Artificial
  probe
  misc_feature (1)..(25): SEQ ID NO: 1434; WAN024CXA; Start 266; Stop 290
cagagttggctgagttgtctatgta

SEQ ID NO: 294080 - DNA, 25 bp, Artificial
  probe
  misc_feature (1)..(25): SEQ ID NO: 1434; WAN024CXA; Start 717; Stop 741
aggtaagattgagggaaatatggtt

SEQ ID NO: 294081 - DNA, 25 bp, Artificial
  probe
  misc_feature (1)..(25): SEQ ID NO: 1434; WAN024CXA; Start 513; Stop 537
tgcatataactgtgatgtcttggta

SEQ ID NO: 294082 - DNA, 25 bp, Artificial
  probe
  misc_feature (1)..(25): SEQ ID NO: 1435; WAN024DEZ; Start 290; Stop 314
acattattccagtagagttgactcg

SEQ ID NO: 294083 - DNA, 25 bp, Artificial
  probe
  misc_feature (1)..(25): SEQ ID NO: 1435; WAN024DEZ; Start 298; Stop 322
ccagtagagttgactcggtattatt

SEQ ID NO: 294084 - DNA, 25 bp, Artificial
  probe
  misc_feature (1)..(25): SEQ ID NO: 1435; WAN024DEZ; Start 297; Stop 321
tccagtagagttgactcggtattat

SEQ ID NO: 294085 - DNA, 25 bp, Artificial
  probe
  misc_feature (1)..(25): SEQ ID NO: 1435; WAN024DEZ; Start 294; Stop 318
tattccagtagagttgactcggtat

SEQ ID NO: 294086 - DNA, 25 bp, Artificial
  probe
  misc_feature (1)..(25): SEQ ID NO: 1435; WAN024DEZ; Start 296; Stop 320
ttccagtagagttgactcggtatta

SEQ ID NO: 294087 - DNA, 25 bp, Artificial
  probe
  misc_feature (1)..(25): SEQ ID NO: 1435; WAN024DEZ; Start 293; Stop 317
ttattccagtagagttgactcggta

SEQ ID NO: 294088 - DNA, 25 bp, Artificial
  probe
  misc_feature (1)..(25): SEQ ID NO: 1435; WAN024DEZ; Start 291; Stop 315
cattattccagtagagttgactcgg

SEQ ID NO: 294089 - DNA, 25 bp, Artificial
  probe
  misc_feature (1)..(25): SEQ ID NO: 1435; WAN024DEZ; Start 295; Stop 319
attccagtagagttgactcggtatt

SEQ ID NO: 294090 - DNA, 25 bp, Artificial
  probe
  misc_feature (1)..(25): SEQ ID NO: 1435; WAN024DEZ; Start 292; Stop 316
attattccagtagagttgactcggt

SEQ ID NO: 294091 - DNA, 25 bp, Artificial
  probe
  misc_feature (1)..(25): SEQ ID NO: 1435; WAN024DEZ; Start 350; Stop 374
gaatcatcatcaatatgtgttccat

SEQ ID NO: 294092 - DNA, 25 bp, Artificial
  probe
  misc_feature (1)..(25): SEQ ID NO: 1435; WAN024DEZ; Start 138; Stop 162
tttacagagagatttgaccttggac

SEQ ID NO: 294093 - DNA, 25 bp, Artificial
  probe
  misc_feature (1)..(25): SEQ ID NO: 1435; WAN024DEZ; Start 68; Stop 92
tagagaagggctatcaagtttatgg

SEQ ID NO: 294094 - DNA, 25 bp, Artificial
  probe
  misc_feature (1)..(25): SEQ ID NO: 1435; WAN024DEZ; Start 72; Stop 96
gaagggctatcaagtttatggagtt

SEQ ID NO: 294095 - DNA, 25 bp, Artificial
  probe
  misc_feature (1)..(25): SEQ ID NO: 1435; WAN024DEZ; Start 305; Stop 329
agttgactcggtattatttgacaca

SEQ ID NO: 294096 - DNA, 25 bp, Artificial
  probe
  misc_feature (1)..(25): SEQ ID NO: 1435; WAN024DEZ; Start 70; Stop 94
gagaagggctatcaagtttatggag

SEQ ID NO: 294097 - DNA, 25 bp, Artificial
  probe
  misc_feature (1)..(25): SEQ ID NO: 1435; WAN024DEZ; Start 69; Stop 93
agagaagggctatcaagtttatgga

SEQ ID NO: 294098 - DNA, 25 bp, Artificial
  probe
  misc_feature (1)..(25): SEQ ID NO: 1435; WAN024DEZ; Start 357; Stop 381
catcaatatgtgttccattgcttct

SEQ ID NO: 294099 - DNA, 25 bp, Artificial
  probe
  misc_feature (1)..(25): SEQ ID NO: 1435; WAN024DEZ; Start 356; Stop 380
tcatcaatatgtgttccattgcttc

SEQ ID NO: 294100 - DNA, 25 bp, Artificial
  probe
  misc_feature (1)..(25): SEQ ID NO: 1435; WAN024DEZ; Start 354; Stop 378
catcatcaatatgtgttccattgct

SEQ ID NO: 294101 - DNA, 25 bp, Artificial
  probe
  misc_feature (1)..(25): SEQ ID NO: 1435; WAN024DEZ; Start 353; Stop 377
tcatcatcaatatgtgttccattgc

SEQ ID NO: 294102 - DNA, 25 bp, Artificial
  probe
  misc_feature (1)..(25): SEQ ID NO: 1435; WAN024DEZ; Start 140; Stop 164
tacagagagatttgaccttggactt

SEQ ID NO: 294103 - DNA, 25 bp, Artificial
  probe
  misc_feature (1)..(25): SEQ ID NO: 1435; WAN024DEZ; Start 139; Stop 163
ttacagagagatttgaccttggact

SEQ ID NO: 294104 - DNA, 25 bp, Artificial
  probe
  misc_feature (1)..(25): SEQ ID NO: 1435; WAN024DEZ; Start 71; Stop 95
agaagggctatcaagtttatggagt

SEQ ID NO: 294105 - DNA, 25 bp, Artificial
  probe
  misc_feature (1)..(25): SEQ ID NO: 1435; WAN024DEZ; Start 351; Stop 375
aatcatcatcaatatgtgttccatt

SEQ ID NO: 294106 - DNA, 25 bp, Artificial
  probe
  misc_feature (1)..(25): SEQ ID NO: 1435; WAN024DEZ; Start 355; Stop 379
atcatcaatatgtgttccattgctt

SEQ ID NO: 294107 - DNA, 25 bp, Artificial
  probe
  misc_feature (1)..(25): SEQ ID NO: 1435; WAN024DEZ; Start 359; Stop 383
tcaatatgtgttccattgcttctag

SEQ ID NO: 294108 - DNA, 25 bp, Artificial
  probe
  misc_feature (1)..(25): SEQ ID NO: 1435; WAN024DEZ; Start 306; Stop 330
gttgactcggtattatttgacacaa

SEQ ID NO: 294109 - DNA, 25 bp, Artificial
  probe
  misc_feature (1)..(25): SEQ ID NO: 1435; WAN024DEZ; Start 347; Stop 371
agggaatcatcatcaatatgtgttc

SEQ ID NO: 294110 - DNA, 25 bp, Artificial
  probe
  misc_feature (1)..(25): SEQ ID NO: 1435; WAN024DEZ; Start 73; Stop 97
aagggctatcaagtttatggagttg

SEQ ID NO: 294111 - DNA, 25 bp, Artificial
  probe
  misc_feature (1)..(25): SEQ ID NO: 1435; WAN024DEZ; Start 360; Stop 384
caatatgtgttccattgcttctagc

SEQ ID NO: 294112 - DNA, 25 bp, Artificial
  probe
  misc_feature (1)..(25): SEQ ID NO: 1435; WAN024DEZ; Start 346; Stop 370
aagggaatcatcatcaatatgtgtt

SEQ ID NO: 294113 - DNA, 25 bp, Artificial
  probe
  misc_feature (1)..(25): SEQ ID NO: 1435; WAN024DEZ; Start 345; Stop 369
aaagggaatcatcatcaatatgtgt

SEQ ID NO: 294114 - DNA, 25 bp, Artificial
  probe
  misc_feature (1)..(25): SEQ ID NO: 1435; WAN024DEZ; Start 149; Stop 173
atttgaccttggacttggaacctat

SEQ ID NO: 294115 - DNA, 25 bp, Artificial
  probe
  misc_feature (1)..(25): SEQ ID NO: 1436; WAN024DMG; Start 384; Stop 408
cgatgatgacgaagatgaataacta

SEQ ID NO: 294116 - DNA, 25 bp, Artificial
  probe
  misc_feature (1)..(25): SEQ ID NO: 1436; WAN024DMG; Start 52; Stop 76
agaggtagcacagaaatgattatgg

SEQ ID NO: 294117 - DNA, 25 bp, Artificial
  probe
  misc_feature (1)..(25): SEQ ID NO: 1436; WAN024DMG; Start 353; Stop 377
ttgtgaaagttaatgacctgttagc

SEQ ID NO: 294118 - DNA, 25 bp, Artificial
  probe
  misc_feature (1)..(25): SEQ ID NO: 1436; WAN024DMG; Start 289; Stop 313
gaatttatcaatgcgagccttacag

SEQ ID NO: 294119 - DNA, 25 bp, Artificial
  probe
  misc_feature (1)..(25): SEQ ID NO: 1436; WAN024DMG; Start 267; Stop 291
gatgaatcttccaatggtgattgaa

SEQ ID NO: 294120 - DNA, 25 bp, Artificial
  probe
  misc_feature (1)..(25): SEQ ID NO: 1436; WAN024DMG; Start 53; Stop 77
gaggtagcacagaaatgattatggg

SEQ ID NO: 294121 - DNA, 25 bp, Artificial
  probe
  misc_feature (1)..(25): SEQ ID NO: 1436; WAN024DMG; Start 269; Stop 293
tgaatcttccaatggtgattgaatt

SEQ ID NO: 294122 - DNA, 25 bp, Artificial
  probe
  misc_feature (1)..(25): SEQ ID NO: 1436; WAN024DMG; Start 268; Stop 292
atgaatcttccaatggtgattgaat

SEQ ID NO: 294123 - DNA, 25 bp, Artificial
  probe
  misc_feature (1)..(25): SEQ ID NO: 1436; WAN024DMG; Start 266; Stop 290
ggatgaatcttccaatggtgattga

SEQ ID NO: 294124 - DNA, 25 bp, Artificial
  probe
  misc_feature (1)..(25): SEQ ID NO: 1436; WAN024DMG; Start 385; Stop 409
gatgatgacgaagatgaataactaa

SEQ ID NO: 294125 - DNA, 25 bp, Artificial
  probe
  misc_feature (1)..(25): SEQ ID NO: 1436; WAN024DMG; Start 354; Stop 378
tgtgaaagttaatgacctgttagcg

SEQ ID NO: 294126 - DNA, 25 bp, Artificial
  probe
  misc_feature (1)..(25): SEQ ID NO: 1436; WAN024DMG; Start 209; Stop 233
cttgtaatgtggtgagtcgcttgat

SEQ ID NO: 294127 - DNA, 25 bp, Artificial
  probe
  misc_feature (1)..(25): SEQ ID NO: 1436; WAN024DMG; Start 51; Stop 75
tagaggtagcacagaaatgattatg

SEQ ID NO: 294128 - DNA, 25 bp, Artificial
  probe
  misc_feature (1)..(25): SEQ ID NO: 1436; WAN024DMG; Start 49; Stop 73
cttagaggtagcacagaaatgatta

SEQ ID NO: 294129 - DNA, 25 bp, Artificial
  probe
  misc_feature (1)..(25): SEQ ID NO: 1436; WAN024DMG; Start 288; Stop 312
tgaatttatcaatgcgagccttaca

SEQ ID NO: 294130 - DNA, 25 bp, Artificial
  probe
  misc_feature (1)..(25): SEQ ID NO: 1436; WAN024DMG; Start 355; Stop 379
gtgaaagttaatgacctgttagcgg

SEQ ID NO: 294131 - DNA, 25 bp, Artificial
  probe
  misc_feature (1)..(25): SEQ ID NO: 1436; WAN024DMG; Start 210; Stop 234
ttgtaatgtggtgagtcgcttgatc

SEQ ID NO: 294132 - DNA, 25 bp, Artificial
  probe
  misc_feature (1)..(25): SEQ ID NO: 1436; WAN024DMG; Start 86; Stop 110
acaacatttacacagtagctcttct

SEQ ID NO: 294133 - DNA, 25 bp, Artificial
  probe
  misc_feature (1)..(25): SEQ ID NO: 1436; WAN024DMG; Start 85; Stop 109
gacaacatttacacagtagctcttc

SEQ ID NO: 294134 - DNA, 25 bp, Artificial
  probe
  misc_feature (1)..(25): SEQ ID NO: 1436; WAN024DMG; Start 82; Stop 106
caagacaacatttacacagtagctc

SEQ ID NO: 294135 - DNA, 25 bp, Artificial
  probe
  misc_feature (1)..(25): SEQ ID NO: 1436; WAN024DMG; Start 91; Stop 115
atttacacagtagctcttcttccag

SEQ ID NO: 294136 - DNA, 25 bp, Artificial
  probe
  misc_feature (1)..(25): SEQ ID NO: 1436; WAN024DMG; Start 231; Stop 255
gatcatggaaggtcgtgatattgac

SEQ ID NO: 294137 - DNA, 25 bp, Artificial
  probe
  misc_feature (1)..(25): SEQ ID NO: 1436; WAN024DMG; Start 90; Stop 114
catttacacagtagctcttcttcca

SEQ ID NO: 294138 - DNA, 25 bp, Artificial
  probe
  misc_feature (1)..(25): SEQ ID NO: 1436; WAN024DMG; Start 89; Stop 113
acatttacacagtagctcttcttcc

SEQ ID NO: 294139 - DNA, 25 bp, Artificial
  probe
  misc_feature (1)..(25): SEQ ID NO: 1436; WAN024DMG; Start 50; Stop 74
ttagaggtagcacagaaatgattat

SEQ ID NO: 294140 - DNA, 25 bp, Artificial
  probe
  misc_feature (1)..(25): SEQ ID NO: 1436; WAN024DMG; Start 81; Stop 105
acaagacaacatttacacagtagct

SEQ ID NO: 294141 - DNA, 25 bp, Artificial
  probe
  misc_feature (1)..(25): SEQ ID NO: 1436; WAN024DMG; Start 87; Stop 111
caacatttacacagtagctcttctt

SEQ ID NO: 294142 - DNA, 25 bp, Artificial
  probe
  misc_feature (1)..(25): SEQ ID NO: 1436; WAN024DMG; Start 383; Stop 407
tcgatgatgacgaagatgaataact

SEQ ID NO: 294143 - DNA, 25 bp, Artificial
  probe
  misc_feature (1)..(25): SEQ ID NO: 1436; WAN024DMG; Start 386; Stop 410
atgatgacgaagatgaataactaat

SEQ ID NO: 294144 - DNA, 25 bp, Artificial
  probe
  misc_feature (1)..(25): SEQ ID NO: 1436; WAN024DMG; Start 352; Stop 376
attgtgaaagttaatgacctgttag

SEQ ID NO: 294145 - DNA, 25 bp, Artificial
  probe
  misc_feature (1)..(25): SEQ ID NO: 1436; WAN024DMG; Start 88; Stop 112
aacatttacacagtagctcttcttc

SEQ ID NO: 294146 - DNA, 25 bp, Artificial
  probe
  misc_feature (1)..(25): SEQ ID NO: 1436; WAN024DMG; Start 84; Stop 108
agacaacatttacacagtagctctt

SEQ ID NO: 294147 - DNA, 25 bp, Artificial
  probe
  misc_feature (1)..(25): SEQ ID NO: 1436; WAN024DMG; Start 83; Stop 107
aagacaacatttacacagtagctct

SEQ ID NO: 294148 - DNA, 25 bp, Artificial
  probe
  misc_feature (1)..(25): SEQ ID NO: 1437; WAN024G9C; Start 314; Stop 338
actacttcctccgtcaactccataa

SEQ ID NO: 294149 - DNA, 25 bp, Artificial
  probe
  misc_feature (1)..(25): SEQ ID NO: 1437; WAN024G9C; Start 88; Stop 112
gccactactgttcaggatatcattg

SEQ ID NO: 294150 - DNA, 25 bp, Artificial
  probe
  misc_feature (1)..(25): SEQ ID NO: 1437; WAN024G9C; Start 89; Stop 113
ccactactgttcaggatatcattga

SEQ ID NO: 294151 - DNA, 25 bp, Artificial
  probe
  misc_feature (1)..(25): SEQ ID NO: 1437; WAN024G9C; Start 94; Stop 118
actgttcaggatatcattgatctcg

SEQ ID NO: 294152 - DNA, 25 bp, Artificial
  probe
  misc_feature (1)..(25): SEQ ID NO: 1437; WAN024G9C; Start 338; Stop 362
aagagctagaacaccatgtctattc

SEQ ID NO: 294153 - DNA, 25 bp, Artificial
  probe
  misc_feature (1)..(25): SEQ ID NO: 1437; WAN024G9C; Start 315; Stop 339
ctacttcctccgtcaactccataaa

SEQ ID NO: 294154 - DNA, 25 bp, Artificial
  probe
  misc_feature (1)..(25): SEQ ID NO: 1437; WAN024G9C; Start 316; Stop 340
tacttcctccgtcaactccataaag

SEQ ID NO: 294155 - DNA, 25 bp, Artificial
  probe
  misc_feature (1)..(25): SEQ ID NO: 1437; WAN024G9C; Start 98; Stop 122
ttcaggatatcattgatctcgcaga

SEQ ID NO: 294156 - DNA, 25 bp, Artificial
  probe
  misc_feature (1)..(25): SEQ ID NO: 1437; WAN024G9C; Start 97; Stop 121
gttcaggatatcattgatctcgcag

SEQ ID NO: 294157 - DNA, 25 bp, Artificial
  probe
  misc_feature (1)..(25): SEQ ID NO: 1437; WAN024G9C; Start 95; Stop 119
ctgttcaggatatcattgatctcgc

SEQ ID NO: 294158 - DNA, 25 bp, Artificial
  probe
  misc_feature (1)..(25): SEQ ID NO: 1437; WAN024G9C; Start 474; Stop 498
tcaagatttcacagaccaggaagtt

SEQ ID NO: 294159 - DNA, 25 bp, Artificial
  probe
  misc_feature (1)..(25): SEQ ID NO: 1437; WAN024G9C; Start 339; Stop 363
agagctagaacaccatgtctattcc

SEQ ID NO: 294160 - DNA, 25 bp, Artificial
  probe
  misc_feature (1)..(25): SEQ ID NO: 1437; WAN024G9C; Start 313; Stop 337
gactacttcctccgtcaactccata

SEQ ID NO: 294161 - DNA, 25 bp, Artificial
  probe
  misc_feature (1)..(25): SEQ ID NO: 1437; WAN024G9C; Start 475; Stop 499
caagatttcacagaccaggaagttg

SEQ ID NO: 294162 - DNA, 25 bp, Artificial
  probe
  misc_feature (1)..(25): SEQ ID NO: 1437; WAN024G9C; Start 90; Stop 114
cactactgttcaggatatcattgat

SEQ ID NO: 294163 - DNA, 25 bp, Artificial
  probe
  misc_feature (1)..(25): SEQ ID NO: 1437; WAN024G9C; Start 96; Stop 120
tgttcaggatatcattgatctcgca

SEQ ID NO: 294164 - DNA, 25 bp, Artificial
  probe
  misc_feature (1)..(25): SEQ ID NO: 1437; WAN024G9C; Start 91; Stop 115
actactgttcaggatatcattgatc

SEQ ID NO: 294165 - DNA, 25 bp, Artificial
  probe
  misc_feature (1)..(25): SEQ ID NO: 1437; WAN024G9C; Start 93; Stop 117
tactgttcaggatatcattgatctc

SEQ ID NO: 294166 - DNA, 25 bp, Artificial
  probe
  misc_feature (1)..(25): SEQ ID NO: 1437; WAN024G9C; Start 92; Stop 116
ctactgttcaggatatcattgatct

SEQ ID NO: 294167 - DNA, 25 bp, Artificial
  probe
  misc_feature (1)..(25): SEQ ID NO: 1437; WAN024G9C; Start 327; Stop 351
tcaactccataaagagctagaacac

SEQ ID NO: 294168 - DNA, 25 bp, Artificial
  probe
  misc_feature (1)..(25): SEQ ID NO: 1437; WAN024G9C; Start 326; Stop 350
gtcaactccataaagagctagaaca

SEQ ID NO: 294169 - DNA, 25 bp, Artificial
  probe
  misc_feature (1)..(25): SEQ ID NO: 1437; WAN024G9C; Start 476; Stop 500
aagatttcacagaccaggaagttgt

SEQ ID NO: 294170 - DNA, 25 bp, Artificial
  probe
  misc_feature (1)..(25): SEQ ID NO: 1437; WAN024G9C; Start 334; Stop 358
cataaagagctagaacaccatgtct

SEQ ID NO: 294171 - DNA, 25 bp, Artificial
  probe
  misc_feature (1)..(25): SEQ ID NO: 1437; WAN024G9C; Start 331; Stop 355
ctccataaagagctagaacaccatg

SEQ ID NO: 294172 - DNA, 25 bp, Artificial
  probe
  misc_feature (1)..(25): SEQ ID NO: 1437; WAN024G9C; Start 100; Stop 124
caggatatcattgatctcgcagatg

SEQ ID NO: 294173 - DNA, 25 bp, Artificial
  probe
  misc_feature (1)..(25): SEQ ID NO: 1437; WAN024G9C; Start 99; Stop 123
tcaggatatcattgatctcgcagat

SEQ ID NO: 294174 - DNA, 25 bp, Artificial
  probe
  misc_feature (1)..(25): SEQ ID NO: 1437; WAN024G9C; Start 328; Stop 352
caactccataaagagctagaacacc

SEQ ID NO: 294175 - DNA, 25 bp, Artificial
  probe
  misc_feature (1)..(25): SEQ ID NO: 1437; WAN024G9C; Start 87; Stop 111
ggccactactgttcaggatatcatt

SEQ ID NO: 294176 - DNA, 25 bp, Artificial
  probe
  misc_feature (1)..(25): SEQ ID NO: 1437; WAN024G9C; Start 330; Stop 354
actccataaagagctagaacaccat

SEQ ID NO: 294177 - DNA, 25 bp, Artificial
  probe
  misc_feature (1)..(25): SEQ ID NO: 1437; WAN024G9C; Start 325; Stop 349
cgtcaactccataaagagctagaac

SEQ ID NO: 294178 - DNA, 25 bp, Artificial
  probe
  misc_feature (1)..(25): SEQ ID NO: 1437; WAN024G9C; Start 318; Stop 342
cttcctccgtcaactccataaagag

SEQ ID NO: 294179 - DNA, 25 bp, Artificial
  probe
  misc_feature (1)..(25): SEQ ID NO: 1437; WAN024G9C; Start 346; Stop 370
gaacaccatgtctattccgtgctag

SEQ ID NO: 294180 - DNA, 25 bp, Artificial
  probe
  misc_feature (1)..(25): SEQ ID NO: 1437; WAN024G9C; Start 103; Stop 127
gatatcattgatctcgcagatgtgg

SEQ ID NO: 294181 - DNA, 25 bp, Artificial
  probe
  misc_feature (1)..(25): SEQ ID NO: 1438; WAN024CIX; Start 257; Stop 281
catcaagtaggagaggagaatttgt

SEQ ID NO: 294182 - DNA, 25 bp, Artificial
  probe
  misc_feature (1)..(25): SEQ ID NO: 1438; WAN024CIX; Start 253; Stop 277
atttcatcaagtaggagaggagaat

SEQ ID NO: 294183 - DNA, 25 bp, Artificial
  probe
  misc_feature (1)..(25): SEQ ID NO: 1438; WAN024CIX; Start 256; Stop 280
tcatcaagtaggagaggagaatttg

SEQ ID NO: 294184 - DNA, 25 bp, Artificial
  probe
  misc_feature (1)..(25): SEQ ID NO: 1438; WAN024CIX; Start 255; Stop 279
ttcatcaagtaggagaggagaattt

SEQ ID NO: 294185 - DNA, 25 bp, Artificial
  probe
  misc_feature (1)..(25): SEQ ID NO: 1438; WAN024CIX; Start 254; Stop 278
tttcatcaagtaggagaggagaatt

SEQ ID NO: 294186 - DNA, 25 bp, Artificial
  probe
  misc_feature (1)..(25): SEQ ID NO: 1438; WAN024CIX; Start 260; Stop 284
caagtaggagaggagaatttgtaga

SEQ ID NO: 294187 - DNA, 25 bp, Artificial
  probe
  misc_feature (1)..(25): SEQ ID NO: 1438; WAN024CIX; Start 259; Stop 283
tcaagtaggagaggagaatttgtag

SEQ ID NO: 294188 - DNA, 25 bp, Artificial
  probe
  misc_feature (1)..(25): SEQ ID NO: 1438; WAN024CIX; Start 261; Stop 285
aagtaggagaggagaatttgtagaa

SEQ ID NO: 294189 - DNA, 25 bp, Artificial
  probe
  misc_feature (1)..(25): SEQ ID NO: 1438; WAN024CIX; Start 262; Stop 286
agtaggagaggagaatttgtagaaa

SEQ ID NO: 294190 - DNA, 25 bp, Artificial
  probe
  misc_feature (1)..(25): SEQ ID NO: 1438; WAN024CIX; Start 251; Stop 275
atatttcatcaagtaggagaggaga

SEQ ID NO: 294191 - DNA, 25 bp, Artificial
  probe
  misc_feature (1)..(25): SEQ ID NO: 1438; WAN024CIX; Start 252; Stop 276
tatttcatcaagtaggagaggagaa

SEQ ID NO: 294192 - DNA, 25 bp, Artificial
  probe
  misc_feature (1)..(25): SEQ ID NO: 1438; WAN024CIX; Start 258; Stop 282
atcaagtaggagaggagaatttgta

SEQ ID NO: 294193 - DNA, 25 bp, Artificial
  probe
  misc_feature (1)..(25): SEQ ID NO: 1438; WAN024CIX; Start 172; Stop 196
agcaatttagaaatgaaacaacaga

SEQ ID NO: 294194 - DNA, 25 bp, Artificial
  probe
  misc_feature (1)..(25): SEQ ID NO: 1438; WAN024CIX; Start 20; Stop 44
cgacaatgcaagatattgagaatgt

SEQ ID NO: 294195 - DNA, 25 bp, Artificial
  probe
  misc_feature (1)..(25): SEQ ID NO: 1438; WAN024CIX; Start 19; Stop 43
tcgacaatgcaagatattgagaatg

SEQ ID NO: 294196 - DNA, 25 bp, Artificial
  probe
  misc_feature (1)..(25): SEQ ID NO: 1438; WAN024CIX; Start 18; Stop 42
ttcgacaatgcaagatattgagaat

SEQ ID NO: 294197 - DNA, 25 bp, Artificial
  probe
  misc_feature (1)..(25): SEQ ID NO: 1438; WAN024CIX; Start 176; Stop 200
atttagaaatgaaacaacagaacct

SEQ ID NO: 294198 - DNA, 25 bp, Artificial
  probe
  misc_feature (1)..(25): SEQ ID NO: 1438; WAN024CIX; Start 173; Stop 197
gcaatttagaaatgaaacaacagaa

SEQ ID NO: 294199 - DNA, 25 bp, Artificial
  probe
  misc_feature (1)..(25): SEQ ID NO: 1438; WAN024CIX; Start 171; Stop 195
aagcaatttagaaatgaaacaacag

SEQ ID NO: 294200 - DNA, 25 bp, Artificial
  probe
  misc_feature (1)..(25): SEQ ID NO: 1438; WAN024CIX; Start 249; Stop 273
gtatatttcatcaagtaggagagga

SEQ ID NO: 294201 - DNA, 25 bp, Artificial
  probe
  misc_feature (1)..(25): SEQ ID NO: 1438; WAN024CIX; Start 248; Stop 272
agtatatttcatcaagtaggagagg

SEQ ID NO: 294202 - DNA, 25 bp, Artificial
  probe
  misc_feature (1)..(25): SEQ ID NO: 1438; WAN024CIX; Start 22; Stop 46
acaatgcaagatattgagaatgttg

SEQ ID NO: 294203 - DNA, 25 bp, Artificial
  probe
  misc_feature (1)..(25): SEQ ID NO: 1438; WAN024CIX; Start 250; Stop 274
tatatttcatcaagtaggagaggag

SEQ ID NO: 294204 - DNA, 25 bp, Artificial
  probe
  misc_feature (1)..(25): SEQ ID NO: 1438; WAN024CIX; Start 21; Stop 45
gacaatgcaagatattgagaatgtt

SEQ ID NO: 294205 - DNA, 25 bp, Artificial
  probe
  misc_feature (1)..(25): SEQ ID NO: 1438; WAN024CIX; Start 170; Stop 194
aaagcaatttagaaatgaaacaaca

SEQ ID NO: 294206 - DNA, 25 bp, Artificial
  probe
  misc_feature (1)..(25): SEQ ID NO: 1438; WAN024CIX; Start 175; Stop 199
aatttagaaatgaaacaacagaacc

SEQ ID NO: 294207 - DNA, 25 bp, Artificial
  probe
  misc_feature (1)..(25): SEQ ID NO: 1438; WAN024CIX; Start 246; Stop 270
tcagtatatttcatcaagtaggaga

SEQ ID NO: 294208 - DNA, 25 bp, Artificial
  probe
  misc_feature (1)..(25): SEQ ID NO: 1438; WAN024CIX; Start 169; Stop 193
gaaagcaatttagaaatgaaacaac

SEQ ID NO: 294209 - DNA, 25 bp, Artificial
  probe
  misc_feature (1)..(25): SEQ ID NO: 1438; WAN024CIX; Start 168; Stop 192
agaaagcaatttagaaatgaaacaa

SEQ ID NO: 294210 - DNA, 25 bp, Artificial
  probe
  misc_feature (1)..(25): SEQ ID NO: 1438; WAN024CIX; Start 247; Stop 271
cagtatatttcatcaagtaggagag

SEQ ID NO: 294211 - DNA, 25 bp, Artificial
  probe
  misc_feature (1)..(25): SEQ ID NO: 1438; WAN024CIX; Start 17; Stop 41
tttcgacaatgcaagatattgagaa

SEQ ID NO: 294212 - DNA, 25 bp, Artificial
  probe
  misc_feature (1)..(25): SEQ ID NO: 1438; WAN024CIX; Start 287; Stop 311
aaattattggtagggtggtagaaaa

SEQ ID NO: 294213 - DNA, 25 bp, Artificial
  probe
  misc_feature (1)..(25): SEQ ID NO: 1438; WAN024CIX; Start 286; Stop 310
aaaattattggtagggtggtagaaa

SEQ ID NO: 294214 - DNA, 25 bp, Artificial
  probe
  misc_feature (1)..(25): SEQ ID NO: 1439; WAN024AUS; Start 331; Stop 355
tcctatttggatgaagtgattgtca

SEQ ID NO: 294215 - DNA, 25 bp, Artificial
  probe
  misc_feature (1)..(25): SEQ ID NO: 1439; WAN024AUS; Start 329; Stop 353
agtcctatttggatgaagtgattgt

SEQ ID NO: 294216 - DNA, 25 bp, Artificial
  probe
  misc_feature (1)..(25): SEQ ID NO: 1439; WAN024AUS; Start 325; Stop 349
tttgagtcctatttggatgaagtga

SEQ ID NO: 294217 - DNA, 25 bp, Artificial
  probe
  misc_feature (1)..(25): SEQ ID NO: 1439; WAN024AUS; Start 330; Stop 354
gtcctatttggatgaagtgattgtc

SEQ ID NO: 294218 - DNA, 25 bp, Artificial
  probe
  misc_feature (1)..(25): SEQ ID NO: 1439; WAN024AUS; Start 327; Stop 351
tgagtcctatttggatgaagtgatt

SEQ ID NO: 294219 - DNA, 25 bp, Artificial
  probe
  misc_feature (1)..(25): SEQ ID NO: 1439; WAN024AUS; Start 326; Stop 350
ttgagtcctatttggatgaagtgat

SEQ ID NO: 294220 - DNA, 25 bp, Artificial
  probe
  misc_feature (1)..(25): SEQ ID NO: 1439; WAN024AUS; Start 328; Stop 352
gagtcctatttggatgaagtgattg

SEQ ID NO: 294221 - DNA, 25 bp, Artificial
  probe
  misc_feature (1)..(25): SEQ ID NO: 1439; WAN024AUS; Start 315; Stop 339
ttttcaggcttttgagtcctatttg

SEQ ID NO: 294222 - DNA, 25 bp, Artificial
  probe
  misc_feature (1)..(25): SEQ ID NO: 1439; WAN024AUS; Start 211; Stop 235
gaagaaaagatagacggggttgcta

SEQ ID NO: 294223 - DNA, 25 bp, Artificial
  probe
  misc_feature (1)..(25): SEQ ID NO: 1439; WAN024AUS; Start 322; Stop 346
gcttttgagtcctatttggatgaag

SEQ ID NO: 294224 - DNA, 25 bp, Artificial
  probe
  misc_feature (1)..(25): SEQ ID NO: 1439; WAN024AUS; Start 208; Stop 232
tctgaagaaaagatagacggggttg

SEQ ID NO: 294225 - DNA, 25 bp, Artificial
  probe
  misc_feature (1)..(25): SEQ ID NO: 1439; WAN024AUS; Start 212; Stop 236
aagaaaagatagacggggttgctac

SEQ ID NO: 294226 - DNA, 25 bp, Artificial
  probe
  misc_feature (1)..(25): SEQ ID NO: 1439; WAN024AUS; Start 324; Stop 348
ttttgagtcctatttggatgaagtg

SEQ ID NO: 294227 - DNA, 25 bp, Artificial
  probe
  misc_feature (1)..(25): SEQ ID NO: 1439; WAN024AUS; Start 323; Stop 347
cttttgagtcctatttggatgaagt

SEQ ID NO: 294228 - DNA, 25 bp, Artificial
  probe
  misc_feature (1)..(25): SEQ ID NO: 1439; WAN024AUS; Start 316; Stop 340
tttcaggcttttgagtcctatttgg

SEQ ID NO: 294229 - DNA, 25 bp, Artificial
  probe
  misc_feature (1)..(25): SEQ ID NO: 1439; WAN024AUS; Start 217; Stop 241
aagatagacggggttgctacttttc

SEQ ID NO: 294230 - DNA, 25 bp, Artificial
  probe
  misc_feature (1)..(25): SEQ ID NO: 1439; WAN024AUS; Start 214; Stop 238
gaaaagatagacggggttgctactt

SEQ ID NO: 294231 - DNA, 25 bp, Artificial
  probe
  misc_feature (1)..(25): SEQ ID NO: 1439; WAN024AUS; Start 321; Stop 345
ggcttttgagtcctatttggatgaa

SEQ ID NO: 294232 - DNA, 25 bp, Artificial
  probe
  misc_feature (1)..(25): SEQ ID NO: 1439; WAN024AUS; Start 435; Stop 459
caaattttacgccaaagatgagaaa

SEQ ID NO: 294233 - DNA, 25 bp, Artificial
  probe
  misc_feature (1)..(25): SEQ ID NO: 1439; WAN024AUS; Start 234; Stop 258
tacttttcacgatgtccagtctgtc

SEQ ID NO: 294234 - DNA, 25 bp, Artificial
  probe
  misc_feature (1)..(25): SEQ ID NO: 1439; WAN024AUS; Start 233; Stop 257
ctacttttcacgatgtccagtctgt

SEQ ID NO: 294235 - DNA, 25 bp, Artificial
  probe
  misc_feature (1)..(25): SEQ ID NO: 1439; WAN024AUS; Start 381; Stop 405
ggatacctattttcctgaggagttt

SEQ ID NO: 294236 - DNA, 25 bp, Artificial
  probe
  misc_feature (1)..(25): SEQ ID NO: 1439; WAN024AUS; Start 320; Stop 344
aggcttttgagtcctatttggatga

SEQ ID NO: 294237 - DNA, 25 bp, Artificial
  probe
  misc_feature (1)..(25): SEQ ID NO: 1439; WAN024AUS; Start 319; Stop 343
caggcttttgagtcctatttggatg

SEQ ID NO: 294238 - DNA, 25 bp, Artificial
  probe
  misc_feature (1)..(25): SEQ ID NO: 1439; WAN024AUS; Start 318; Stop 342
tcaggcttttgagtcctatttggat

SEQ ID NO: 294239 - DNA, 25 bp, Artificial
  probe
  misc_feature (1)..(25): SEQ ID NO: 1439; WAN024AUS; Start 236; Stop 260
cttttcacgatgtccagtctgtctt

SEQ ID NO: 294240 - DNA, 25 bp, Artificial
  probe
  misc_feature (1)..(25): SEQ ID NO: 1439; WAN024AUS; Start 317; Stop 341
ttcaggcttttgagtcctatttgga

SEQ ID NO: 294241 - DNA, 25 bp, Artificial
  probe
  misc_feature (1)..(25): SEQ ID NO: 1439; WAN024AUS; Start 213; Stop 237
agaaaagatagacggggttgctact

SEQ ID NO: 294242 - DNA, 25 bp, Artificial
  probe
  misc_feature (1)..(25): SEQ ID NO: 1439; WAN024AUS; Start 380; Stop 404
gggatacctattttcctgaggagtt

SEQ ID NO: 294243 - DNA, 25 bp, Artificial
  probe
  misc_feature (1)..(25): SEQ ID NO: 1439; WAN024AUS; Start 332; Stop 356
cctatttggatgaagtgattgtcac

SEQ ID NO: 294244 - DNA, 25 bp, Artificial
  probe
  misc_feature (1)..(25): SEQ ID NO: 1439; WAN024AUS; Start 237; Stop 261
ttttcacgatgtccagtctgtcttg

SEQ ID NO: 294245 - DNA, 25 bp, Artificial
  probe
  misc_feature (1)..(25): SEQ ID NO: 1439; WAN024AUS; Start 219; Stop 243
gatagacggggttgctacttttcac

SEQ ID NO: 294246 - DNA, 25 bp, Artificial
  probe
  misc_feature (1)..(25): SEQ ID NO: 1439; WAN024AUS; Start 218; Stop 242
agatagacggggttgctacttttca

SEQ ID NO: 294247 - DNA, 25 bp, Artificial
  probe
  misc_feature (1)..(25): SEQ ID NO: 1440; WAN024AUV; Start 487; Stop 511
cgcaagagaaaggaagtctaactaa

SEQ ID NO: 294248 - DNA, 25 bp, Artificial
  probe
  misc_feature (1)..(25): SEQ ID NO: 1440; WAN024AUV; Start 488; Stop 512
gcaagagaaaggaagtctaactaat

SEQ ID NO: 294249 - DNA, 25 bp, Artificial
  probe
  misc_feature (1)..(25): SEQ ID NO: 1440; WAN024AUV; Start 486; Stop 510
ccgcaagagaaaggaagtctaacta

SEQ ID NO: 294250 - DNA, 25 bp, Artificial
  probe
  misc_feature (1)..(25): SEQ ID NO: 1440; WAN024AUV; Start 484; Stop 508
taccgcaagagaaaggaagtctaac

SEQ ID NO: 294251 - DNA, 25 bp, Artificial
  probe
  misc_feature (1)..(25): SEQ ID NO: 1440; WAN024AUV; Start 219; Stop 243
gatagatggggttgctacttttcag

SEQ ID NO: 294252 - DNA, 25 bp, Artificial
  probe
  misc_feature (1)..(25): SEQ ID NO: 1440; WAN024AUV; Start 485; Stop 509
accgcaagagaaaggaagtctaact

SEQ ID NO: 294253 - DNA, 25 bp, Artificial
  probe
  misc_feature (1)..(25): SEQ ID NO: 1440; WAN024AUV; Start 220; Stop 244
atagatggggttgctacttttcagg

SEQ ID NO: 294254 - DNA, 25 bp, Artificial
  probe
  misc_feature (1)..(25): SEQ ID NO: 1440; WAN024AUV; Start 221; Stop 245
tagatggggttgctacttttcagga

SEQ ID NO: 294255 - DNA, 25 bp, Artificial
  probe
  misc_feature (1)..(25): SEQ ID NO: 1440; WAN024AUV; Start 222; Stop 246
agatggggttgctacttttcaggac

SEQ ID NO: 294256 - DNA, 25 bp, Artificial
  probe
  misc_feature (1)..(25): SEQ ID NO: 1441; WAN024AUT; Start 34; Stop 58
gatgaagatggtgtgattggtaagg

SEQ ID NO: 294257 - DNA, 25 bp, Artificial
  probe
  misc_feature (1)..(25): SEQ ID NO: 1441; WAN024AUT; Start 33; Stop 57
ggatgaagatggtgtgattggtaag

SEQ ID NO: 294258 - DNA, 25 bp, Artificial
  probe
  misc_feature (1)..(25): SEQ ID NO: 1441; WAN024AUT; Start 35; Stop 59
atgaagatggtgtgattggtaagga

SEQ ID NO: 294259 - DNA, 25 bp, Artificial
  probe
  misc_feature (1)..(25): SEQ ID NO: 1441; WAN024AUT; Start 32; Stop 56
aggatgaagatggtgtgattggtaa

SEQ ID NO: 294260 - DNA, 25 bp, Artificial
  probe
  misc_feature (1)..(25): SEQ ID NO: 1441; WAN024AUT; Start 265; Stop 289
tggtatcatgctcaagacaagaatc

SEQ ID NO: 294261 - DNA, 25 bp, Artificial
  probe
  misc_feature (1)..(25): SEQ ID NO: 1441; WAN024AUT; Start 264; Stop 288
ctggtatcatgctcaagacaagaat

SEQ ID NO: 294262 - DNA, 25 bp, Artificial
  probe
  misc_feature (1)..(25): SEQ ID NO: 1441; WAN024AUT; Start 267; Stop 291
gtatcatgctcaagacaagaatctc

SEQ ID NO: 294263 - DNA, 25 bp, Artificial
  probe
  misc_feature (1)..(25): SEQ ID NO: 1441; WAN024AUT; Start 270; Stop 294
tcatgctcaagacaagaatctctat

SEQ ID NO: 294264 - DNA, 25 bp, Artificial
  probe
  misc_feature (1)..(25): SEQ ID NO: 1441; WAN024AUT; Start 269; Stop 293
atcatgctcaagacaagaatctcta

SEQ ID NO: 294265 - DNA, 25 bp, Artificial
  probe
  misc_feature (1)..(25): SEQ ID NO: 1441; WAN024AUT; Start 268; Stop 292
tatcatgctcaagacaagaatctct

SEQ ID NO: 294266 - DNA, 25 bp, Artificial
  probe
  misc_feature (1)..(25): SEQ ID NO: 1441; WAN024AUT; Start 266; Stop 290
ggtatcatgctcaagacaagaatct

SEQ ID NO: 294267 - DNA, 25 bp, Artificial
  probe
  misc_feature (1)..(25): SEQ ID NO: 1441; WAN024AUT; Start 31; Stop 55
caggatgaagatggtgtgattggta

SEQ ID NO: 294268 - DNA, 25 bp, Artificial
  probe
  misc_feature (1)..(25): SEQ ID NO: 1441; WAN024AUT; Start 36; Stop 60
tgaagatggtgtgattggtaaggac

SEQ ID NO: 294269 - DNA, 25 bp, Artificial
  probe
  misc_feature (1)..(25): SEQ ID NO: 1441; WAN024AUT; Start 263; Stop 287
actggtatcatgctcaagacaagaa

SEQ ID NO: 294270 - DNA, 25 bp, Artificial
  probe
  misc_feature (1)..(25): SEQ ID NO: 1441; WAN024AUT; Start 273; Stop 297
tgctcaagacaagaatctctatatt

SEQ ID NO: 294271 - DNA, 25 bp, Artificial
  probe
  misc_feature (1)..(25): SEQ ID NO: 1441; WAN024AUT; Start 271; Stop 295
catgctcaagacaagaatctctata

SEQ ID NO: 294272 - DNA, 25 bp, Artificial
  probe
  misc_feature (1)..(25): SEQ ID NO: 1441; WAN024AUT; Start 38; Stop 62
aagatggtgtgattggtaaggacaa

SEQ ID NO: 294273 - DNA, 25 bp, Artificial
  probe
  misc_feature (1)..(25): SEQ ID NO: 1441; WAN024AUT; Start 272; Stop 296
atgctcaagacaagaatctctatat

SEQ ID NO: 294274 - DNA, 25 bp, Artificial
  probe
  misc_feature (1)..(25): SEQ ID NO: 1441; WAN024AUT; Start 384; Stop 408
tacctatttccctgaagagtttgac

SEQ ID NO: 294275 - DNA, 25 bp, Artificial
  probe
  misc_feature (1)..(25): SEQ ID NO: 1441; WAN024AUT; Start 286; Stop 310
aatctctatattcttggtgggaagc

SEQ ID NO: 294276 - DNA, 25 bp, Artificial
  probe
  misc_feature (1)..(25): SEQ ID NO: 1441; WAN024AUT; Start 262; Stop 286
gactggtatcatgctcaagacaaga

SEQ ID NO: 294277 - DNA, 25 bp, Artificial
  probe
  misc_feature (1)..(25): SEQ ID NO: 1441; WAN024AUT; Start 422; Stop 446
agacggtttcaagcaaatcttatac

SEQ ID NO: 294278 - DNA, 25 bp, Artificial
  probe
  misc_feature (1)..(25): SEQ ID NO: 1441; WAN024AUT; Start 421; Stop 445
gagacggtttcaagcaaatcttata

SEQ ID NO: 294279 - DNA, 25 bp, Artificial
  probe
  misc_feature (1)..(25): SEQ ID NO: 1441; WAN024AUT; Start 290; Stop 314
tctatattcttggtgggaagcaaat

SEQ ID NO: 294280 - DNA, 25 bp, Artificial
  probe
  misc_feature (1)..(25): SEQ ID NO: 1441; WAN024AUT; Start 287; Stop 311
atctctatattcttggtgggaagca

SEQ ID NO: 294281 - DNA, 25 bp, Artificial
  probe
  misc_feature (1)..(25): SEQ ID NO: 1441; WAN024AUT; Start 37; Stop 61
gaagatggtgtgattggtaaggaca

SEQ ID NO: 294282 - DNA, 25 bp, Artificial
  probe
  misc_feature (1)..(25): SEQ ID NO: 1441; WAN024AUT; Start 289; Stop 313
ctctatattcttggtgggaagcaaa

SEQ ID NO: 294283 - DNA, 25 bp, Artificial
  probe
  misc_feature (1)..(25): SEQ ID NO: 1441; WAN024AUT; Start 388; Stop 412
tatttccctgaagagtttgacttgt

SEQ ID NO: 294284 - DNA, 25 bp, Artificial
  probe
  misc_feature (1)..(25): SEQ ID NO: 1441; WAN024AUT; Start 387; Stop 411
ctatttccctgaagagtttgacttg

SEQ ID NO: 294285 - DNA, 25 bp, Artificial
  probe
  misc_feature (1)..(25): SEQ ID NO: 1441; WAN024AUT; Start 386; Stop 410
cctatttccctgaagagtttgactt

SEQ ID NO: 294286 - DNA, 25 bp, Artificial
  probe
  misc_feature (1)..(25): SEQ ID NO: 1441; WAN024AUT; Start 291; Stop 315
ctatattcttggtgggaagcaaatt

SEQ ID NO: 294287 - DNA, 25 bp, Artificial
  probe
  misc_feature (1)..(25): SEQ ID NO: 1441; WAN024AUT; Start 288; Stop 312
tctctatattcttggtgggaagcaa

SEQ ID NO: 294288 - DNA, 25 bp, Artificial
  probe
  misc_feature (1)..(25): SEQ ID NO: 1441; WAN024AUT; Start 420; Stop 444
tgagacggtttcaagcaaatcttat

SEQ ID NO: 294289 - DNA, 25 bp, Artificial
  probe
  misc_feature (1)..(25): SEQ ID NO: 1442; WAN024AUU; Start 423; Stop 447
gacagtttcaagcaaatcctatacc

SEQ ID NO: 294290 - DNA, 25 bp, Artificial
  probe
  misc_feature (1)..(25): SEQ ID NO: 1442; WAN024AUU; Start 424; Stop 448
acagtttcaagcaaatcctatacca

SEQ ID NO: 294291 - DNA, 25 bp, Artificial
  probe
  misc_feature (1)..(25): SEQ ID NO: 1442; WAN024AUU; Start 425; Stop 449
cagtttcaagcaaatcctataccaa

SEQ ID NO: 294292 - DNA, 25 bp, Artificial
  probe
  misc_feature (1)..(25): SEQ ID NO: 1442; WAN024AUU; Start 433; Stop 457
agcaaatcctataccaaagatgaga

SEQ ID NO: 294293 - DNA, 25 bp, Artificial
  probe
  misc_feature (1)..(25): SEQ ID NO: 1442; WAN024AUU; Start 422; Stop 446
agacagtttcaagcaaatcctatac

SEQ ID NO: 294294 - DNA, 25 bp, Artificial
  probe
  misc_feature (1)..(25): SEQ ID NO: 1442; WAN024AUU; Start 431; Stop 455
caagcaaatcctataccaaagatga

SEQ ID NO: 294295 - DNA, 25 bp, Artificial
  probe
  misc_feature (1)..(25): SEQ ID NO: 1442; WAN024AUU; Start 430; Stop 454
tcaagcaaatcctataccaaagatg

SEQ ID NO: 294296 - DNA, 25 bp, Artificial
  probe
  misc_feature (1)..(25): SEQ ID NO: 1442; WAN024AUU; Start 290; Stop 314
tttatattctcggtgggaagcaaat

SEQ ID NO: 294297 - DNA, 25 bp, Artificial
  probe
  misc_feature (1)..(25): SEQ ID NO: 1442; WAN024AUU; Start 426; Stop 450
agtttcaagcaaatcctataccaaa

SEQ ID NO: 294298 - DNA, 25 bp, Artificial
  probe
  misc_feature (1)..(25): SEQ ID NO: 1442; WAN024AUU; Start 286; Stop 310
aatctttatattctcggtgggaagc

SEQ ID NO: 294299 - DNA, 25 bp, Artificial
  probe
  misc_feature (1)..(25): SEQ ID NO: 1442; WAN024AUU; Start 432; Stop 456
aagcaaatcctataccaaagatgag

SEQ ID NO: 294300 - DNA, 25 bp, Artificial
  probe
  misc_feature (1)..(25): SEQ ID NO: 1442; WAN024AUU; Start 291; Stop 315
ttatattctcggtgggaagcaaatt

SEQ ID NO: 294301 - DNA, 25 bp, Artificial
  probe
  misc_feature (1)..(25): SEQ ID NO: 1442; WAN024AUU; Start 427; Stop 451
gtttcaagcaaatcctataccaaag

SEQ ID NO: 294302 - DNA, 25 bp, Artificial
  probe
  misc_feature (1)..(25): SEQ ID NO: 1442; WAN024AUU; Start 428; Stop 452
tttcaagcaaatcctataccaaaga

SEQ ID NO: 294303 - DNA, 25 bp, Artificial
  probe
  misc_feature (1)..(25): SEQ ID NO: 1442; WAN024AUU; Start 289; Stop 313
ctttatattctcggtgggaagcaaa

SEQ ID NO: 294304 - DNA, 25 bp, Artificial
  probe
  misc_feature (1)..(25): SEQ ID NO: 1442; WAN024AUU; Start 429; Stop 453
ttcaagcaaatcctataccaaagat

SEQ ID NO: 294305 - DNA, 25 bp, Artificial
  probe
  misc_feature (1)..(25): SEQ ID NO: 1442; WAN024AUU; Start 287; Stop 311
atctttatattctcggtgggaagca

SEQ ID NO: 294306 - DNA, 25 bp, Artificial
  probe
  misc_feature (1)..(25): SEQ ID NO: 1442; WAN024AUU; Start 288; Stop 312
tctttatattctcggtgggaagcaa

SEQ ID NO: 294307 - DNA, 25 bp, Artificial
  probe
  misc_feature (1)..(25): SEQ ID NO: 1442; WAN024AUU; Start 285; Stop 309
gaatctttatattctcggtgggaag

SEQ ID NO: 294308 - DNA, 25 bp, Artificial
  probe
  misc_feature (1)..(25): SEQ ID NO: 1442; WAN024AUU; Start 292; Stop 316
tatattctcggtgggaagcaaattt

SEQ ID NO: 294309 - DNA, 25 bp, Artificial
  probe
  misc_feature (1)..(25): SEQ ID NO: 1442; WAN024AUU; Start 435; Stop 459
caaatcctataccaaagatgagaaa

SEQ ID NO: 294310 - DNA, 25 bp, Artificial
  probe
  misc_feature (1)..(25): SEQ ID NO: 1442; WAN024AUU; Start 338; Stop 362
ttgacgaagtgattgtgactcaaat

SEQ ID NO: 294311 - DNA, 25 bp, Artificial
  probe
  misc_feature (1)..(25): SEQ ID NO: 1442; WAN024AUU; Start 336; Stop 360
ccttgacgaagtgattgtgactcaa

SEQ ID NO: 294312 - DNA, 25 bp, Artificial
  probe
  misc_feature (1)..(25): SEQ ID NO: 1442; WAN024AUU; Start 337; Stop 361
cttgacgaagtgattgtgactcaaa

SEQ ID NO: 294313 - DNA, 25 bp, Artificial
  probe
  misc_feature (1)..(25): SEQ ID NO: 1442; WAN024AUU; Start 293; Stop 317
atattctcggtgggaagcaaatttt

SEQ ID NO: 294314 - DNA, 25 bp, Artificial
  probe
  misc_feature (1)..(25): SEQ ID NO: 1442; WAN024AUU; Start 284; Stop 308
agaatctttatattctcggtgggaa

SEQ ID NO: 294315 - DNA, 25 bp, Artificial
  probe
  misc_feature (1)..(25): SEQ ID NO: 1442; WAN024AUU; Start 283; Stop 307
aagaatctttatattctcggtggga

SEQ ID NO: 294316 - DNA, 25 bp, Artificial
  probe
  misc_feature (1)..(25): SEQ ID NO: 1442; WAN024AUU; Start 436; Stop 460
aaatcctataccaaagatgagaaaa

SEQ ID NO: 294317 - DNA, 25 bp, Artificial
  probe
  misc_feature (1)..(25): SEQ ID NO: 1443; WAN024D4T; Start 741; Stop 765
caatcaggtaatggctgtattaact

SEQ ID NO: 294318 - DNA, 25 bp, Artificial
  probe
  misc_feature (1)..(25): SEQ ID NO: 1443; WAN024D4T; Start 740; Stop 764
tcaatcaggtaatggctgtattaac

SEQ ID NO: 294319 - DNA, 25 bp, Artificial
  probe
  misc_feature (1)..(25): SEQ ID NO: 1443; WAN024D4T; Start 274; Stop 298
ggttctattattgtcaatgcactgg

SEQ ID NO: 294320 - DNA, 25 bp, Artificial
  probe
  misc_feature (1)..(25): SEQ ID NO: 1443; WAN024D4T; Start 273; Stop 297
tggttctattattgtcaatgcactg

SEQ ID NO: 294321 - DNA, 25 bp, Artificial
  probe
  misc_feature (1)..(25): SEQ ID NO: 1443; WAN024D4T; Start 436; Stop 460
aatcgtcttgcagttattattccag

SEQ ID NO: 294322 - DNA, 25 bp, Artificial
  probe
  misc_feature (1)..(25): SEQ ID NO: 1443; WAN024D4T; Start 634; Stop 658
tcaagctggaatgattatatctggc

SEQ ID NO: 294323 - DNA, 25 bp, Artificial
  probe
  misc_feature (1)..(25): SEQ ID NO: 1443; WAN024D4T; Start 739; Stop 763
atcaatcaggtaatggctgtattaa

SEQ ID NO: 294324 - DNA, 25 bp, Artificial
  probe
  misc_feature (1)..(25): SEQ ID NO: 1443; WAN024D4T; Start 275; Stop 299
gttctattattgtcaatgcactggc

SEQ ID NO: 294325 - DNA, 25 bp, Artificial
  probe
  misc_feature (1)..(25): SEQ ID NO: 1443; WAN024D4T; Start 577; Stop 601
attatgcttccaatgtctaaacctg

SEQ ID NO: 294326 - DNA, 25 bp, Artificial
  probe
  misc_feature (1)..(25): SEQ ID NO: 1443; WAN024D4T; Start 441; Stop 465
tcttgcagttattattccaggattg

SEQ ID NO: 294327 - DNA, 25 bp, Artificial
  probe
  misc_feature (1)..(25): SEQ ID NO: 1443; WAN024D4T; Start 440; Stop 464
gtcttgcagttattattccaggatt

SEQ ID NO: 294328 - DNA, 25 bp, Artificial
  probe
  misc_feature (1)..(25): SEQ ID NO: 1443; WAN024D4T; Start 439; Stop 463
cgtcttgcagttattattccaggat

SEQ ID NO: 294329 - DNA, 25 bp, Artificial
  probe
  misc_feature (1)..(25): SEQ ID NO: 1443; WAN024D4T; Start 437; Stop 461
atcgtcttgcagttattattccagg

SEQ ID NO: 294330 - DNA, 25 bp, Artificial
  probe
  misc_feature (1)..(25): SEQ ID NO: 1443; WAN024D4T; Start 450; Stop 474
tattattccaggattggcgagtgta

SEQ ID NO: 294331 - DNA, 25 bp, Artificial
  probe
  misc_feature (1)..(25): SEQ ID NO: 1443; WAN024D4T; Start 417; Stop 441
ttccttaggtttggtcaataatcgt

SEQ ID NO: 294332 - DNA, 25 bp, Artificial
  probe
  misc_feature (1)..(25): SEQ ID NO: 1443; WAN024D4T; Start 420; Stop 444
cttaggtttggtcaataatcgtctt

SEQ ID NO: 294333 - DNA, 25 bp, Artificial
  probe
  misc_feature (1)..(25): SEQ ID NO: 1443; WAN024D4T; Start 82; Stop 106
cctatggtttggatggtagtttcag

SEQ ID NO: 294334 - DNA, 25 bp, Artificial
  probe
  misc_feature (1)..(25): SEQ ID NO: 1443; WAN024D4T; Start 789; Stop 813
ggtctatgtagtcgctcagaaatat

SEQ ID NO: 294335 - DNA, 25 bp, Artificial
  probe
  misc_feature (1)..(25): SEQ ID NO: 1443; WAN024D4T; Start 737; Stop 761
atatcaatcaggtaatggctgtatt

SEQ ID NO: 294336 - DNA, 25 bp, Artificial
  probe
  misc_feature (1)..(25): SEQ ID NO: 1443; WAN024D4T; Start 446; Stop 470
cagttattattccaggattggcgag

SEQ ID NO: 294337 - DNA, 25 bp, Artificial
  probe
  misc_feature (1)..(25): SEQ ID NO: 1443; WAN024D4T; Start 458; Stop 482
caggattggcgagtgtatttaatat

SEQ ID NO: 294338 - DNA, 25 bp, Artificial
  probe
  misc_feature (1)..(25): SEQ ID NO: 1443; WAN024D4T; Start 419; Stop 443
ccttaggtttggtcaataatcgtct

SEQ ID NO: 294339 - DNA, 25 bp, Artificial
  probe
  misc_feature (1)..(25): SEQ ID NO: 1443; WAN024D4T; Start 418; Stop 442
tccttaggtttggtcaataatcgtc

SEQ ID NO: 294340 - DNA, 25 bp, Artificial
  probe
  misc_feature (1)..(25): SEQ ID NO: 1443; WAN024D4T; Start 633; Stop 657
ttcaagctggaatgattatatctgg

SEQ ID NO: 294341 - DNA, 25 bp, Artificial
  probe
  misc_feature (1)..(25): SEQ ID NO: 1443; WAN024D4T; Start 428; Stop 452
tggtcaataatcgtcttgcagttat

SEQ ID NO: 294342 - DNA, 25 bp, Artificial
  probe
  misc_feature (1)..(25): SEQ ID NO: 1443; WAN024D4T; Start 427; Stop 451
ttggtcaataatcgtcttgcagtta

SEQ ID NO: 294343 - DNA, 25 bp, Artificial
  probe
  misc_feature (1)..(25): SEQ ID NO: 1443; WAN024D4T; Start 416; Stop 440
attccttaggtttggtcaataatcg

SEQ ID NO: 294344 - DNA, 25 bp, Artificial
  probe
  misc_feature (1)..(25): SEQ ID NO: 1443; WAN024D4T; Start 788; Stop 812
tggtctatgtagtcgctcagaaata

SEQ ID NO: 294345 - DNA, 25 bp, Artificial
  probe
  misc_feature (1)..(25): SEQ ID NO: 1443; WAN024D4T; Start 272; Stop 296
ttggttctattattgtcaatgcact

SEQ ID NO: 294346 - DNA, 25 bp, Artificial
  probe
  misc_feature (1)..(25): SEQ ID NO: 1443; WAN024D4T; Start 448; Stop 472
gttattattccaggattggcgagtg

SEQ ID NO: 294347 - DNA, 25 bp, Artificial
  probe
  misc_feature (1)..(25): SEQ ID NO: 1443; WAN024D4T; Start 447; Stop 471
agttattattccaggattggcgagt

SEQ ID NO: 294348 - DNA, 25 bp, Artificial
  probe
  misc_feature (1)..(25): SEQ ID NO: 1443; WAN024D4T; Start 421; Stop 445
ttaggtttggtcaataatcgtcttg

SEQ ID NO: 294349 - DNA, 25 bp, Artificial
  probe
  misc_feature (1)..(25): SEQ ID NO: 1443; WAN024D4T; Start 752; Stop 776
tggctgtattaactatttcaacgat

SEQ ID NO: 294350 - DNA, 25 bp, Artificial
  probe
  misc_feature (1)..(25): SEQ ID NO: 1444; WAN024CIB; Start 913; Stop 937
tgttacgatgaatggagaagagatt

SEQ ID NO: 294351 - DNA, 25 bp, Artificial
  probe
  misc_feature (1)..(25): SEQ ID NO: 1444; WAN024CIB; Start 912; Stop 936
ttgttacgatgaatggagaagagat

SEQ ID NO: 294352 - DNA, 25 bp, Artificial
  probe
  misc_feature (1)..(25): SEQ ID NO: 1444; WAN024CIB; Start 914; Stop 938
gttacgatgaatggagaagagattg

SEQ ID NO: 294353 - DNA, 25 bp, Artificial
  probe
  misc_feature (1)..(25): SEQ ID NO: 1444; WAN024CIB; Start 484; Stop 508
ggttctattgtaatcctcctatcca

SEQ ID NO: 294354 - DNA, 25 bp, Artificial
  probe
  misc_feature (1)..(25): SEQ ID NO: 1444; WAN024CIB; Start 915; Stop 939
ttacgatgaatggagaagagattgc

SEQ ID NO: 294355 - DNA, 25 bp, Artificial
  probe
  misc_feature (1)..(25): SEQ ID NO: 1444; WAN024CIB; Start 729; Stop 753
ggatgccttatatgtatgtgatgag

SEQ ID NO: 294356 - DNA, 25 bp, Artificial
  probe
  misc_feature (1)..(25): SEQ ID NO: 1444; WAN024CIB; Start 1101; Stop 1125
agttattacgattggcaatgattcc

SEQ ID NO: 294357 - DNA, 25 bp, Artificial
  probe
  misc_feature (1)..(25): SEQ ID NO: 1444; WAN024CIB; Start 730; Stop 754
gatgccttatatgtatgtgatgagt

SEQ ID NO: 294358 - DNA, 25 bp, Artificial
  probe
  misc_feature (1)..(25): SEQ ID NO: 1444; WAN024CIB; Start 485; Stop 509
gttctattgtaatcctcctatccag

SEQ ID NO: 294359 - DNA, 25 bp, Artificial
  probe
  misc_feature (1)..(25): SEQ ID NO: 1444; WAN024CIB; Start 731; Stop 755
atgccttatatgtatgtgatgagtt

SEQ ID NO: 294360 - DNA, 25 bp, Artificial
  probe
  misc_feature (1)..(25): SEQ ID NO: 1444; WAN024CIB; Start 1100; Stop 1124
aagttattacgattggcaatgattc

SEQ ID NO: 294361 - DNA, 25 bp, Artificial
  probe
  misc_feature (1)..(25): SEQ ID NO: 1444; WAN024CIB; Start 318; Stop 342
gaccttgctaattgctgtgattcaa

SEQ ID NO: 294362 - DNA, 25 bp, Artificial
  probe
  misc_feature (1)..(25): SEQ ID NO: 1444; WAN024CIB; Start 316; Stop 340
ctgaccttgctaattgctgtgattc

SEQ ID NO: 294363 - DNA, 25 bp, Artificial
  probe
  misc_feature (1)..(25): SEQ ID NO: 1444; WAN024CIB; Start 1102; Stop 1126
gttattacgattggcaatgattcca

SEQ ID NO: 294364 - DNA, 25 bp, Artificial
  probe
  misc_feature (1)..(25): SEQ ID NO: 1444; WAN024CIB; Start 1103; Stop 1127
ttattacgattggcaatgattccag

SEQ ID NO: 294365 - DNA, 25 bp, Artificial
  probe
  misc_feature (1)..(25): SEQ ID NO: 1444; WAN024CIB; Start 911; Stop 935
tttgttacgatgaatggagaagaga

SEQ ID NO: 294366 - DNA, 25 bp, Artificial
  probe
  misc_feature (1)..(25): SEQ ID NO: 1444; WAN024CIB; Start 1115; Stop 1139
gcaatgattccaggcttatttatga

SEQ ID NO: 294367 - DNA, 25 bp, Artificial
  probe
  misc_feature (1)..(25): SEQ ID NO: 1444; WAN024CIB; Start 728; Stop 752
gggatgccttatatgtatgtgatga

SEQ ID NO: 294368 - DNA, 25 bp, Artificial
  probe
  misc_feature (1)..(25): SEQ ID NO: 1444; WAN024CIB; Start 1028; Stop 1052
ttctcagtcataggtggtctcttta

SEQ ID NO: 294369 - DNA, 25 bp, Artificial
  probe
  misc_feature (1)..(25): SEQ ID NO: 1444; WAN024CIB; Start 858; Stop 882
tgtgggtctatgtttatatttcggt

SEQ ID NO: 294370 - DNA, 25 bp, Artificial
  probe
  misc_feature (1)..(25): SEQ ID NO: 1444; WAN024CIB; Start 852; Stop 876
agcctttgtgggtctatgtttatat

SEQ ID NO: 294371 - DNA, 25 bp, Artificial
  probe
  misc_feature (1)..(25): SEQ ID NO: 1444; WAN024CIB; Start 851; Stop 875
aagcctttgtgggtctatgtttata

SEQ ID NO: 294372 - DNA, 25 bp, Artificial
  probe
  misc_feature (1)..(25): SEQ ID NO: 1444; WAN024CIB; Start 727; Stop 751
tgggatgccttatatgtatgtgatg

SEQ ID NO: 294373 - DNA, 25 bp, Artificial
  probe
  misc_feature (1)..(25): SEQ ID NO: 1444; WAN024CIB; Start 726; Stop 750
gtgggatgccttatatgtatgtgat

SEQ ID NO: 294374 - DNA, 25 bp, Artificial
  probe
  misc_feature (1)..(25): SEQ ID NO: 1444; WAN024CIB; Start 1121; Stop 1145
attccaggcttatttatgatgttcg

SEQ ID NO: 294375 - DNA, 25 bp, Artificial
  probe
  misc_feature (1)..(25): SEQ ID NO: 1444; WAN024CIB; Start 1114; Stop 1138
ggcaatgattccaggcttatttatg

SEQ ID NO: 294376 - DNA, 25 bp, Artificial
  probe
  misc_feature (1)..(25): SEQ ID NO: 1444; WAN024CIB; Start 1029; Stop 1053
tctcagtcataggtggtctctttaa

SEQ ID NO: 294377 - DNA, 25 bp, Artificial
  probe
  misc_feature (1)..(25): SEQ ID NO: 1444; WAN024CIB; Start 332; Stop 356
ctgtgattcaatccttggcagttag

SEQ ID NO: 294378 - DNA, 25 bp, Artificial
  probe
  misc_feature (1)..(25): SEQ ID NO: 1444; WAN024CIB; Start 1030; Stop 1054
ctcagtcataggtggtctctttaat

SEQ ID NO: 294379 - DNA, 25 bp, Artificial
  probe
  misc_feature (1)..(25): SEQ ID NO: 1444; WAN024CIB; Start 860; Stop 884
tgggtctatgtttatatttcggtct

SEQ ID NO: 294380 - DNA, 25 bp, Artificial
  probe
  misc_feature (1)..(25): SEQ ID NO: 1444; WAN024CIB; Start 859; Stop 883
gtgggtctatgtttatatttcggtc

SEQ ID NO: 294381 - DNA, 25 bp, Artificial
  probe
  misc_feature (1)..(25): SEQ ID NO: 1444; WAN024CIB; Start 1104; Stop 1128
tattacgattggcaatgattccagg

SEQ ID NO: 294382 - DNA, 25 bp, Artificial
  probe
  misc_feature (1)..(25): SEQ ID NO: 1444; WAN024CIB; Start 853; Stop 877
gcctttgtgggtctatgtttatatt

SEQ ID NO: 294383 - DNA, 25 bp, Artificial
  probe
  misc_feature (1)..(25): SEQ ID NO: 1445; WAN024DAL; Start 300; Stop 324
cctcaatatgaatcgtaatggctgt

SEQ ID NO: 294384 - DNA, 25 bp, Artificial
  probe
  misc_feature (1)..(25): SEQ ID NO: 1445; WAN024DAL; Start 301; Stop 325
ctcaatatgaatcgtaatggctgta

SEQ ID NO: 294385 - DNA, 25 bp, Artificial
  probe
  misc_feature (1)..(25): SEQ ID NO: 1445; WAN024DAL; Start 296; Stop 320
atagcctcaatatgaatcgtaatgg

SEQ ID NO: 294386 - DNA, 25 bp, Artificial
  probe
  misc_feature (1)..(25): SEQ ID NO: 1445; WAN024DAL; Start 302; Stop 326
tcaatatgaatcgtaatggctgtat

SEQ ID NO: 294387 - DNA, 25 bp, Artificial
  probe
  misc_feature (1)..(25): SEQ ID NO: 1445; WAN024DAL; Start 295; Stop 319
tatagcctcaatatgaatcgtaatg

SEQ ID NO: 294388 - DNA, 25 bp, Artificial
  probe
  misc_feature (1)..(25): SEQ ID NO: 1445; WAN024DAL; Start 182; Stop 206
ggaaatctccatcattagtcaaaga

SEQ ID NO: 294389 - DNA, 25 bp, Artificial
  probe
  misc_feature (1)..(25): SEQ ID NO: 1445; WAN024DAL; Start 512; Stop 536
agactatatggcaagtttctaaaga

SEQ ID NO: 294390 - DNA, 25 bp, Artificial
  probe
  misc_feature (1)..(25): SEQ ID NO: 1445; WAN024DAL; Start 183; Stop 207
gaaatctccatcattagtcaaagaa

SEQ ID NO: 294391 - DNA, 25 bp, Artificial
  probe
  misc_feature (1)..(25): SEQ ID NO: 1445; WAN024DAL; Start 429; Stop 453
aagagcgattttacaccaagagaat

SEQ ID NO: 294392 - DNA, 25 bp, Artificial
  probe
  misc_feature (1)..(25): SEQ ID NO: 1445; WAN024DAL; Start 511; Stop 535
aagactatatggcaagtttctaaag

SEQ ID NO: 294393 - DNA, 25 bp, Artificial
  probe
  misc_feature (1)..(25): SEQ ID NO: 1445; WAN024DAL; Start 428; Stop 452
aaagagcgattttacaccaagagaa

SEQ ID NO: 294394 - DNA, 25 bp, Artificial
  probe
  misc_feature (1)..(25): SEQ ID NO: 1445; WAN024DAL; Start 293; Stop 317
aatatagcctcaatatgaatcgtaa

SEQ ID NO: 294395 - DNA, 25 bp, Artificial
  probe
  misc_feature (1)..(25): SEQ ID NO: 1445; WAN024DAL; Start 95; Stop 119
acacttgtcaattagcaaatagtat

SEQ ID NO: 294396 - DNA, 25 bp, Artificial
  probe
  misc_feature (1)..(25): SEQ ID NO: 1445; WAN024DAL; Start 297; Stop 321
tagcctcaatatgaatcgtaatggc

SEQ ID NO: 294397 - DNA, 25 bp, Artificial
  probe
  misc_feature (1)..(25): SEQ ID NO: 1445; WAN024DAL; Start 430; Stop 454
agagcgattttacaccaagagaatg

SEQ ID NO: 294398 - DNA, 25 bp, Artificial
  probe
  misc_feature (1)..(25): SEQ ID NO: 1445; WAN024DAL; Start 513; Stop 537
gactatatggcaagtttctaaagaa

SEQ ID NO: 294399 - DNA, 25 bp, Artificial
  probe
  misc_feature (1)..(25): SEQ ID NO: 1445; WAN024DAL; Start 225; Stop 249
aagggattcacaagtagataatctt

SEQ ID NO: 294400 - DNA, 25 bp, Artificial
  probe
  misc_feature (1)..(25): SEQ ID NO: 1445; WAN024DAL; Start 47; Stop 71
tgtctgaagttgattttaatgaagc

SEQ ID NO: 294401 - DNA, 25 bp, Artificial
  probe
  misc_feature (1)..(25): SEQ ID NO: 1445; WAN024DAL; Start 78; Stop 102
ttatgaatttacatctgacacttgt

SEQ ID NO: 294402 - DNA, 25 bp, Artificial
  probe
  misc_feature (1)..(25): SEQ ID NO: 1445; WAN024DAL; Start 94; Stop 118
gacacttgtcaattagcaaatagta

SEQ ID NO: 294403 - DNA, 25 bp, Artificial
  probe
  misc_feature (1)..(25): SEQ ID NO: 1445; WAN024DAL; Start 294; Stop 318
atatagcctcaatatgaatcgtaat

SEQ ID NO: 294404 - DNA, 25 bp, Artificial
  probe
  misc_feature (1)..(25): SEQ ID NO: 1445; WAN024DAL; Start 510; Stop 534
aaagactatatggcaagtttctaaa

SEQ ID NO: 294405 - DNA, 25 bp, Artificial
  probe
  misc_feature (1)..(25): SEQ ID NO: 1445; WAN024DAL; Start 79; Stop 103
tatgaatttacatctgacacttgtc

SEQ ID NO: 294406 - DNA, 25 bp, Artificial
  probe
  misc_feature (1)..(25): SEQ ID NO: 1445; WAN024DAL; Start 299; Stop 323
gcctcaatatgaatcgtaatggctg

SEQ ID NO: 294407 - DNA, 25 bp, Artificial
  probe
  misc_feature (1)..(25): SEQ ID NO: 1445; WAN024DAL; Start 427; Stop 451
aaaagagcgattttacaccaagaga

SEQ ID NO: 294408 - DNA, 25 bp, Artificial
  probe
  misc_feature (1)..(25): SEQ ID NO: 1445; WAN024DAL; Start 228; Stop 252
ggattcacaagtagataatcttaga

SEQ ID NO: 294409 - DNA, 25 bp, Artificial
  probe
  misc_feature (1)..(25): SEQ ID NO: 1445; WAN024DAL; Start 226; Stop 250
agggattcacaagtagataatctta

SEQ ID NO: 294410 - DNA, 25 bp, Artificial
  probe
  misc_feature (1)..(25): SEQ ID NO: 1445; WAN024DAL; Start 597; Stop 621
cgaaagaggtagtaaaatgcttaat

SEQ ID NO: 294411 - DNA, 25 bp, Artificial
  probe
  misc_feature (1)..(25): SEQ ID NO: 1445; WAN024DAL; Start 431; Stop 455
gagcgattttacaccaagagaatgc

SEQ ID NO: 294412 - DNA, 25 bp, Artificial
  probe
  misc_feature (1)..(25): SEQ ID NO: 1445; WAN024DAL; Start 35; Stop 59
agtacattgaaatgtctgaagttga

SEQ ID NO: 294413 - DNA, 25 bp, Artificial
  probe
  misc_feature (1)..(25): SEQ ID NO: 1445; WAN024DAL; Start 96; Stop 120
cacttgtcaattagcaaatagtatt

SEQ ID NO: 294414 - DNA, 25 bp, Artificial
  probe
  misc_feature (1)..(25): SEQ ID NO: 1445; WAN024DAL; Start 34; Stop 58
gagtacattgaaatgtctgaagttg

SEQ ID NO: 294415 - DNA, 25 bp, Artificial
  probe
  misc_feature (1)..(25): SEQ ID NO: 1445; WAN024DAL; Start 33; Stop 57
agagtacattgaaatgtctgaagtt

SEQ ID NO: 294416 - DNA, 25 bp, Artificial
  probe
  misc_feature (1)..(25): SEQ ID NO: 1446; WAN024DK3; Start 367; Stop 391
gaacctgtcatcactctatctcatt

SEQ ID NO: 294417 - DNA, 25 bp, Artificial
  probe
  misc_feature (1)..(25): SEQ ID NO: 1446; WAN024DK3; Start 298; Stop 322
ttagagccgaatgaagaaggattac

SEQ ID NO: 294418 - DNA, 25 bp, Artificial
  probe
  misc_feature (1)..(25): SEQ ID NO: 1446; WAN024DK3; Start 297; Stop 321
gttagagccgaatgaagaaggatta

SEQ ID NO: 294419 - DNA, 25 bp, Artificial
  probe
  misc_feature (1)..(25): SEQ ID NO: 1446; WAN024DK3; Start 1088; Stop 1112
ttacagaccactatcacttaccact

SEQ ID NO: 294420 - DNA, 25 bp, Artificial
  probe
  misc_feature (1)..(25): SEQ ID NO: 1446; WAN024DK3; Start 578; Stop 602
caggtattgtatatgaggaaggtga

SEQ ID NO: 294421 - DNA, 25 bp, Artificial
  probe
  misc_feature (1)..(25): SEQ ID NO: 1446; WAN024DK3; Start 699; Stop 723
aataggttgtatgattgcgatgtgt

SEQ ID NO: 294422 - DNA, 25 bp, Artificial
  probe
  misc_feature (1)..(25): SEQ ID NO: 1446; WAN024DK3; Start 622; Stop 646
tatcaagcagcacattacgaattag

SEQ ID NO: 294423 - DNA, 25 bp, Artificial
  probe
  misc_feature (1)..(25): SEQ ID NO: 1446; WAN024DK3; Start 621; Stop 645
gtatcaagcagcacattacgaatta

SEQ ID NO: 294424 - DNA, 25 bp, Artificial
  probe
  misc_feature (1)..(25): SEQ ID NO: 1446; WAN024DK3; Start 1089; Stop 1113
tacagaccactatcacttaccactc

SEQ ID NO: 294425 - DNA, 25 bp, Artificial
  probe
  misc_feature (1)..(25): SEQ ID NO: 1446; WAN024DK3; Start 85; Stop 109
ggaattagtgttgctgatgttatga

SEQ ID NO: 294426 - DNA, 25 bp, Artificial
  probe
  misc_feature (1)..(25): SEQ ID NO: 1446; WAN024DK3; Start 700; Stop 724
ataggttgtatgattgcgatgtgtc

SEQ ID NO: 294427 - DNA, 25 bp, Artificial
  probe
  misc_feature (1)..(25): SEQ ID NO: 1446; WAN024DK3; Start 299; Stop 323
tagagccgaatgaagaaggattaca

SEQ ID NO: 294428 - DNA, 25 bp, Artificial
  probe
  misc_feature (1)..(25): SEQ ID NO: 1446; WAN024DK3; Start 292; Stop 316
gatgagttagagccgaatgaagaag

SEQ ID NO: 294429 - DNA, 25 bp, Artificial
  probe
  misc_feature (1)..(25): SEQ ID NO: 1446; WAN024DK3; Start 623; Stop 647
atcaagcagcacattacgaattagt

SEQ ID NO: 294430 - DNA, 25 bp, Artificial
  probe
  misc_feature (1)..(25): SEQ ID NO: 1446; WAN024DK3; Start 1225; Stop 1249
gctgtagttgaagatggtgttgatt

SEQ ID NO: 294431 - DNA, 25 bp, Artificial
  probe
  misc_feature (1)..(25): SEQ ID NO: 1446; WAN024DK3; Start 364; Stop 388
attgaacctgtcatcactctatctc

SEQ ID NO: 294432 - DNA, 25 bp, Artificial
  probe
  misc_feature (1)..(25): SEQ ID NO: 1446; WAN024DK3; Start 579; Stop 603
aggtattgtatatgaggaaggtgat

SEQ ID NO: 294433 - DNA, 25 bp, Artificial
  probe
  misc_feature (1)..(25): SEQ ID NO: 1446; WAN024DK3; Start 624; Stop 648
tcaagcagcacattacgaattagtt

SEQ ID NO: 294434 - DNA, 25 bp, Artificial
  probe
  misc_feature (1)..(25): SEQ ID NO: 1446; WAN024DK3; Start 632; Stop 656
cacattacgaattagttgcttctgc

SEQ ID NO: 294435 - DNA, 25 bp, Artificial
  probe
  misc_feature (1)..(25): SEQ ID NO: 1446; WAN024DK3; Start 577; Stop 601
tcaggtattgtatatgaggaaggtg

SEQ ID NO: 294436 - DNA, 25 bp, Artificial
  probe
  misc_feature (1)..(25): SEQ ID NO: 1446; WAN024DK3; Start 88; Stop 112
attagtgttgctgatgttatgactg

SEQ ID NO: 294437 - DNA, 25 bp, Artificial
  probe
  misc_feature (1)..(25): SEQ ID NO: 1446; WAN024DK3; Start 86; Stop 110
gaattagtgttgctgatgttatgac

SEQ ID NO: 294438 - DNA, 25 bp, Artificial
  probe
  misc_feature (1)..(25): SEQ ID NO: 1446; WAN024DK3; Start 366; Stop 390
tgaacctgtcatcactctatctcat

SEQ ID NO: 294439 - DNA, 25 bp, Artificial
  probe
  misc_feature (1)..(25): SEQ ID NO: 1446; WAN024DK3; Start 296; Stop 320
agttagagccgaatgaagaaggatt

SEQ ID NO: 294440 - DNA, 25 bp, Artificial
  probe
  misc_feature (1)..(25): SEQ ID NO: 1446; WAN024DK3; Start 365; Stop 389
ttgaacctgtcatcactctatctca

SEQ ID NO: 294441 - DNA, 25 bp, Artificial
  probe
  misc_feature (1)..(25): SEQ ID NO: 1446; WAN024DK3; Start 291; Stop 315
tgatgagttagagccgaatgaagaa

SEQ ID NO: 294442 - DNA, 25 bp, Artificial
  probe
  misc_feature (1)..(25): SEQ ID NO: 1446; WAN024DK3; Start 1091; Stop 1115
cagaccactatcacttaccactctt

SEQ ID NO: 294443 - DNA, 25 bp, Artificial
  probe
  misc_feature (1)..(25): SEQ ID NO: 1446; WAN024DK3; Start 362; Stop 386
gtattgaacctgtcatcactctatc

SEQ ID NO: 294444 - DNA, 25 bp, Artificial
  probe
  misc_feature (1)..(25): SEQ ID NO: 1446; WAN024DK3; Start 625; Stop 649
caagcagcacattacgaattagttg

SEQ ID NO: 294445 - DNA, 25 bp, Artificial
  probe
  misc_feature (1)..(25): SEQ ID NO: 1446; WAN024DK3; Start 363; Stop 387
tattgaacctgtcatcactctatct

SEQ ID NO: 294446 - DNA, 25 bp, Artificial
  probe
  misc_feature (1)..(25): SEQ ID NO: 1446; WAN024DK3; Start 87; Stop 111
aattagtgttgctgatgttatgact

SEQ ID NO: 294447 - DNA, 25 bp, Artificial
  probe
  misc_feature (1)..(25): SEQ ID NO: 1446; WAN024DK3; Start 295; Stop 319
gagttagagccgaatgaagaaggat

SEQ ID NO: 294448 - DNA, 25 bp, Artificial
  probe
  misc_feature (1)..(25): SEQ ID NO: 1446; WAN024DK3; Start 1156; Stop 1180
gcagatggtatggtacatgatgatt

SEQ ID NO: 294449 - DNA, 25 bp, Artificial
  probe
  misc_feature (1)..(25): SEQ ID NO: 1447; WAN024CSI; Start 851; Stop 875
atactcgtgtaactaactatggctg

SEQ ID NO: 294450 - DNA, 25 bp, Artificial
  probe
  misc_feature (1)..(25): SEQ ID NO: 1447; WAN024CSI; Start 849; Stop 873
tgatactcgtgtaactaactatggc

SEQ ID NO: 294451 - DNA, 25 bp, Artificial
  probe
  misc_feature (1)..(25): SEQ ID NO: 1447; WAN024CSI; Start 850; Stop 874
gatactcgtgtaactaactatggct

SEQ ID NO: 294452 - DNA, 25 bp, Artificial
  probe
  misc_feature (1)..(25): SEQ ID NO: 1447; WAN024CSI; Start 771; Stop 795
tagtgacttgattggtaatggtagc

SEQ ID NO: 294453 - DNA, 25 bp, Artificial
  probe
  misc_feature (1)..(25): SEQ ID NO: 1447; WAN024CSI; Start 768; Stop 792
tgatagtgacttgattggtaatggt

SEQ ID NO: 294454 - DNA, 25 bp, Artificial
  probe
  misc_feature (1)..(25): SEQ ID NO: 1447; WAN024CSI; Start 356; Stop 380
ttaagtatgatgatgacaagttggc

SEQ ID NO: 294455 - DNA, 25 bp, Artificial
  probe
  misc_feature (1)..(25): SEQ ID NO: 1447; WAN024CSI; Start 466; Stop 490
ttctaccaagatagcgatagcaatg

SEQ ID NO: 294456 - DNA, 25 bp, Artificial
  probe
  misc_feature (1)..(25): SEQ ID NO: 1447; WAN024CSI; Start 357; Stop 381
taagtatgatgatgacaagttggcg

SEQ ID NO: 294457 - DNA, 25 bp, Artificial
  probe
  misc_feature (1)..(25): SEQ ID NO: 1447; WAN024CSI; Start 767; Stop 791
ttgatagtgacttgattggtaatgg

SEQ ID NO: 294458 - DNA, 25 bp, Artificial
  probe
  misc_feature (1)..(25): SEQ ID NO: 1447; WAN024CSI; Start 468; Stop 492
ctaccaagatagcgatagcaatgtg

SEQ ID NO: 294459 - DNA, 25 bp, Artificial
  probe
  misc_feature (1)..(25): SEQ ID NO: 1447; WAN024CSI; Start 467; Stop 491
tctaccaagatagcgatagcaatgt

SEQ ID NO: 294460 - DNA, 25 bp, Artificial
  probe
  misc_feature (1)..(25): SEQ ID NO: 1447; WAN024CSI; Start 770; Stop 794
atagtgacttgattggtaatggtag

SEQ ID NO: 294461 - DNA, 25 bp, Artificial
  probe
  misc_feature (1)..(25): SEQ ID NO: 1447; WAN024CSI; Start 769; Stop 793
gatagtgacttgattggtaatggta

SEQ ID NO: 294462 - DNA, 25 bp, Artificial
  probe
  misc_feature (1)..(25): SEQ ID NO: 1447; WAN024CSI; Start 848; Stop 872
ttgatactcgtgtaactaactatgg

SEQ ID NO: 294463 - DNA, 25 bp, Artificial
  probe
  misc_feature (1)..(25): SEQ ID NO: 1447; WAN024CSI; Start 355; Stop 379
gttaagtatgatgatgacaagttgg

SEQ ID NO: 294464 - DNA, 25 bp, Artificial
  probe
  misc_feature (1)..(25): SEQ ID NO: 1447; WAN024CSI; Start 852; Stop 876
tactcgtgtaactaactatggctgc

SEQ ID NO: 294465 - DNA, 25 bp, Artificial
  probe
  misc_feature (1)..(25): SEQ ID NO: 1447; WAN024CSI; Start 845; Stop 869
ggattgatactcgtgtaactaacta

SEQ ID NO: 294466 - DNA, 25 bp, Artificial
  probe
  misc_feature (1)..(25): SEQ ID NO: 1447; WAN024CSI; Start 772; Stop 796
agtgacttgattggtaatggtagcc

SEQ ID NO: 294467 - DNA, 25 bp, Artificial
  probe
  misc_feature (1)..(25): SEQ ID NO: 1447; WAN024CSI; Start 409; Stop 433
ggtgctgtactctatattccagata

SEQ ID NO: 294468 - DNA, 25 bp, Artificial
  probe
  misc_feature (1)..(25): SEQ ID NO: 1447; WAN024CSI; Start 844; Stop 868
gggattgatactcgtgtaactaact

SEQ ID NO: 294469 - DNA, 25 bp, Artificial
  probe
  misc_feature (1)..(25): SEQ ID NO: 1447; WAN024CSI; Start 843; Stop 867
agggattgatactcgtgtaactaac

SEQ ID NO: 294470 - DNA, 25 bp, Artificial
  probe
  misc_feature (1)..(25): SEQ ID NO: 1447; WAN024CSI; Start 412; Stop 436
gctgtactctatattccagataacg

SEQ ID NO: 294471 - DNA, 25 bp, Artificial
  probe
  misc_feature (1)..(25): SEQ ID NO: 1447; WAN024CSI; Start 408; Stop 432
tggtgctgtactctatattccagat

SEQ ID NO: 294472 - DNA, 25 bp, Artificial
  probe
  misc_feature (1)..(25): SEQ ID NO: 1447; WAN024CSI; Start 202; Stop 226
ttagatcatcacttgaagttggtgc

SEQ ID NO: 294473 - DNA, 25 bp, Artificial
  probe
  misc_feature (1)..(25): SEQ ID NO: 1447; WAN024CSI; Start 842; Stop 866
aagggattgatactcgtgtaactaa

SEQ ID NO: 294474 - DNA, 25 bp, Artificial
  probe
  misc_feature (1)..(25): SEQ ID NO: 1447; WAN024CSI; Start 1207; Stop 1231
aaggaagttcgtgatgaaatgattg

SEQ ID NO: 294475 - DNA, 25 bp, Artificial
  probe
  misc_feature (1)..(25): SEQ ID NO: 1447; WAN024CSI; Start 1206; Stop 1230
caaggaagttcgtgatgaaatgatt

SEQ ID NO: 294476 - DNA, 25 bp, Artificial
  probe
  misc_feature (1)..(25): SEQ ID NO: 1447; WAN024CSI; Start 352; Stop 376
tctgttaagtatgatgatgacaagt

SEQ ID NO: 294477 - DNA, 25 bp, Artificial
  probe
  misc_feature (1)..(25): SEQ ID NO: 1447; WAN024CSI; Start 539; Stop 563
ttagttatctggagcgtttagagtc

SEQ ID NO: 294478 - DNA, 25 bp, Artificial
  probe
  misc_feature (1)..(25): SEQ ID NO: 1447; WAN024CSI; Start 465; Stop 489
tttctaccaagatagcgatagcaat

SEQ ID NO: 294479 - DNA, 25 bp, Artificial
  probe
  misc_feature (1)..(25): SEQ ID NO: 1447; WAN024CSI; Start 679; Stop 703
tacattagccgtcgtggtaaattag

SEQ ID NO: 294480 - DNA, 25 bp, Artificial
  probe
  misc_feature (1)..(25): SEQ ID NO: 1447; WAN024CSI; Start 678; Stop 702
ctacattagccgtcgtggtaaatta

SEQ ID NO: 294481 - DNA, 25 bp, Artificial
  probe
  misc_feature (1)..(25): SEQ ID NO: 1447; WAN024CSI; Start 841; Stop 865
caagggattgatactcgtgtaacta

SEQ ID NO: 294482 - DNA, 25 bp, Artificial
  probe
  misc_feature (1)..(25): SEQ ID NO: 1448; WAN024CN7; Start 292; Stop 316
aatgctatgattggtcctaattgtc

SEQ ID NO: 294483 - DNA, 25 bp, Artificial
  probe
  misc_feature (1)..(25): SEQ ID NO: 1448; WAN024CN7; Start 293; Stop 317
atgctatgattggtcctaattgtca

SEQ ID NO: 294484 - DNA, 25 bp, Artificial
  probe
  misc_feature (1)..(25): SEQ ID NO: 1448; WAN024CN7; Start 295; Stop 319
gctatgattggtcctaattgtcagt

SEQ ID NO: 294485 - DNA, 25 bp, Artificial
  probe
  misc_feature (1)..(25): SEQ ID NO: 1448; WAN024CN7; Start 294; Stop 318
tgctatgattggtcctaattgtcag

SEQ ID NO: 294486 - DNA, 25 bp, Artificial
  probe
  misc_feature (1)..(25): SEQ ID NO: 1448; WAN024CN7; Start 379; Stop 403
aagcctatcacaatcggagataatt

SEQ ID NO: 294487 - DNA, 25 bp, Artificial
  probe
  misc_feature (1)..(25): SEQ ID NO: 1448; WAN024CN7; Start 296; Stop 320
ctatgattggtcctaattgtcagtt

SEQ ID NO: 294488 - DNA, 25 bp, Artificial
  probe
  misc_feature (1)..(25): SEQ ID NO: 1448; WAN024CN7; Start 238; Stop 262
tattctaattggaacttgaccatgc

SEQ ID NO: 294489 - DNA, 25 bp, Artificial
  probe
  misc_feature (1)..(25): SEQ ID NO: 1448; WAN024CN7; Start 291; Stop 315
caatgctatgattggtcctaattgt

SEQ ID NO: 294490 - DNA, 25 bp, Artificial
  probe
  misc_feature (1)..(25): SEQ ID NO: 1448; WAN024CN7; Start 290; Stop 314
acaatgctatgattggtcctaattg

SEQ ID NO: 294491 - DNA, 25 bp, Artificial
  probe
  misc_feature (1)..(25): SEQ ID NO: 1448; WAN024CN7; Start 239; Stop 263
attctaattggaacttgaccatgct

SEQ ID NO: 294492 - DNA, 25 bp, Artificial
  probe
  misc_feature (1)..(25): SEQ ID NO: 1448; WAN024CN7; Start 385; Stop 409
atcacaatcggagataatttctgga

SEQ ID NO: 294493 - DNA, 25 bp, Artificial
  probe
  misc_feature (1)..(25): SEQ ID NO: 1448; WAN024CN7; Start 289; Stop 313
gacaatgctatgattggtcctaatt

SEQ ID NO: 294494 - DNA, 25 bp, Artificial
  probe
  misc_feature (1)..(25): SEQ ID NO: 1448; WAN024CN7; Start 171; Stop 195
aaatctttacatcaacactcgcttg

SEQ ID NO: 294495 - DNA, 25 bp, Artificial
  probe
  misc_feature (1)..(25): SEQ ID NO: 1448; WAN024CN7; Start 388; Stop 412
acaatcggagataatttctggactg

SEQ ID NO: 294496 - DNA, 25 bp, Artificial
  probe
  misc_feature (1)..(25): SEQ ID NO: 1448; WAN024CN7; Start 387; Stop 411
cacaatcggagataatttctggact

SEQ ID NO: 294497 - DNA, 25 bp, Artificial
  probe
  misc_feature (1)..(25): SEQ ID NO: 1448; WAN024CN7; Start 386; Stop 410
tcacaatcggagataatttctggac

SEQ ID NO: 294498 - DNA, 25 bp, Artificial
  probe
  misc_feature (1)..(25): SEQ ID NO: 1448; WAN024CN7; Start 389; Stop 413
caatcggagataatttctggactgg

SEQ ID NO: 294499 - DNA, 25 bp, Artificial
  probe
  misc_feature (1)..(25): SEQ ID NO: 1448; WAN024CN7; Start 240; Stop 264
ttctaattggaacttgaccatgctg

SEQ ID NO: 294500 - DNA, 25 bp, Artificial
  probe
  misc_feature (1)..(25): SEQ ID NO: 1448; WAN024CN7; Start 202; Stop 226
gactacggtgtcaacatccatctag

SEQ ID NO: 294501 - DNA, 25 bp, Artificial
  probe
  misc_feature (1)..(25): SEQ ID NO: 1448; WAN024CN7; Start 380; Stop 404
agcctatcacaatcggagataattt

SEQ ID NO: 294502 - DNA, 25 bp, Artificial
  probe
  misc_feature (1)..(25): SEQ ID NO: 1448; WAN024CN7; Start 378; Stop 402
aaagcctatcacaatcggagataat

SEQ ID NO: 294503 - DNA, 25 bp, Artificial
  probe
  misc_feature (1)..(25): SEQ ID NO: 1448; WAN024CN7; Start 381; Stop 405
gcctatcacaatcggagataatttc

SEQ ID NO: 294504 - DNA, 25 bp, Artificial
  probe
  misc_feature (1)..(25): SEQ ID NO: 1448; WAN024CN7; Start 377; Stop 401
gaaagcctatcacaatcggagataa

SEQ ID NO: 294505 - DNA, 25 bp, Artificial
  probe
  misc_feature (1)..(25): SEQ ID NO: 1448; WAN024CN7; Start 390; Stop 414
aatcggagataatttctggactggt

SEQ ID NO: 294506 - DNA, 25 bp, Artificial
  probe
  misc_feature (1)..(25): SEQ ID NO: 1448; WAN024CN7; Start 530; Stop 554
gcgtgattaaggaaatacctgttaa

SEQ ID NO: 294507 - DNA, 25 bp, Artificial
  probe
  misc_feature (1)..(25): SEQ ID NO: 1448; WAN024CN7; Start 384; Stop 408
tatcacaatcggagataatttctgg

SEQ ID NO: 294508 - DNA, 25 bp, Artificial
  probe
  misc_feature (1)..(25): SEQ ID NO: 1448; WAN024CN7; Start 297; Stop 321
tatgattggtcctaattgtcagttt

SEQ ID NO: 294509 - DNA, 25 bp, Artificial
  probe
  misc_feature (1)..(25): SEQ ID NO: 1448; WAN024CN7; Start 245; Stop 269
attggaacttgaccatgctggatat

SEQ ID NO: 294510 - DNA, 25 bp, Artificial
  probe
  misc_feature (1)..(25): SEQ ID NO: 1448; WAN024CN7; Start 391; Stop 415
atcggagataatttctggactggtg

SEQ ID NO: 294511 - DNA, 25 bp, Artificial
  probe
  misc_feature (1)..(25): SEQ ID NO: 1448; WAN024CN7; Start 382; Stop 406
cctatcacaatcggagataatttct

SEQ ID NO: 294512 - DNA, 25 bp, Artificial
  probe
  misc_feature (1)..(25): SEQ ID NO: 1448; WAN024CN7; Start 203; Stop 227
actacggtgtcaacatccatctagg

SEQ ID NO: 294513 - DNA, 25 bp, Artificial
  probe
  misc_feature (1)..(25): SEQ ID NO: 1448; WAN024CN7; Start 244; Stop 268
aattggaacttgaccatgctggata

SEQ ID NO: 294514 - DNA, 25 bp, Artificial
  probe
  misc_feature (1)..(25): SEQ ID NO: 1448; WAN024CN7; Start 243; Stop 267
taattggaacttgaccatgctggat

SEQ ID NO: 294515 - DNA, 25 bp, Artificial
  probe
  misc_feature (1)..(25): SEQ ID NO: 1449; WAN024GDS; Start 1364; Stop 1388
ttcaatacgaccttccagttatcaa

SEQ ID NO: 294516 - DNA, 25 bp, Artificial
  probe
  misc_feature (1)..(25): SEQ ID NO: 1449; WAN024GDS; Start 522; Stop 546
ctcatactacggttcaggttcatac

SEQ ID NO: 294517 - DNA, 25 bp, Artificial
  probe
  misc_feature (1)..(25): SEQ ID NO: 1449; WAN024GDS; Start 1363; Stop 1387
gttcaatacgaccttccagttatca

SEQ ID NO: 294518 - DNA, 25 bp, Artificial
  probe
  misc_feature (1)..(25): SEQ ID NO: 1449; WAN024GDS; Start 521; Stop 545
actcatactacggttcaggttcata

SEQ ID NO: 294519 - DNA, 25 bp, Artificial
  probe
  misc_feature (1)..(25): SEQ ID NO: 1449; WAN024GDS; Start 1376; Stop 1400
ttccagttatcaaccttgtcttctc

SEQ ID NO: 294520 - DNA, 25 bp, Artificial
  probe
  misc_feature (1)..(25): SEQ ID NO: 1449; WAN024GDS; Start 1375; Stop 1399
cttccagttatcaaccttgtcttct

SEQ ID NO: 294521 - DNA, 25 bp, Artificial
  probe
  misc_feature (1)..(25): SEQ ID NO: 1449; WAN024GDS; Start 1365; Stop 1389
tcaatacgaccttccagttatcaac

SEQ ID NO: 294522 - DNA, 25 bp, Artificial
  probe
  misc_feature (1)..(25): SEQ ID NO: 1449; WAN024GDS; Start 1378; Stop 1402
ccagttatcaaccttgtcttctcaa

SEQ ID NO: 294523 - DNA, 25 bp, Artificial
  probe
  misc_feature (1)..(25): SEQ ID NO: 1449; WAN024GDS; Start 659; Stop 683
ctggtgaagtgattactgaattgtc

SEQ ID NO: 294524 - DNA, 25 bp, Artificial
  probe
  misc_feature (1)..(25): SEQ ID NO: 1449; WAN024GDS; Start 525; Stop 549
atactacggttcaggttcatacgaa

SEQ ID NO: 294525 - DNA, 25 bp, Artificial
  probe
  misc_feature (1)..(25): SEQ ID NO: 1449; WAN024GDS; Start 660; Stop 684
tggtgaagtgattactgaattgtca

SEQ ID NO: 294526 - DNA, 25 bp, Artificial
  probe
  misc_feature (1)..(25): SEQ ID NO: 1449; WAN024GDS; Start 1377; Stop 1401
tccagttatcaaccttgtcttctca

SEQ ID NO: 294527 - DNA, 25 bp, Artificial
  probe
  misc_feature (1)..(25): SEQ ID NO: 1449; WAN024GDS; Start 1374; Stop 1398
ccttccagttatcaaccttgtcttc

SEQ ID NO: 294528 - DNA, 25 bp, Artificial
  probe
  misc_feature (1)..(25): SEQ ID NO: 1449; WAN024GDS; Start 1368; Stop 1392
atacgaccttccagttatcaacctt

SEQ ID NO: 294529 - DNA, 25 bp, Artificial
  probe
  misc_feature (1)..(25): SEQ ID NO: 1449; WAN024GDS; Start 1367; Stop 1391
aatacgaccttccagttatcaacct

SEQ ID NO: 294530 - DNA, 25 bp, Artificial
  probe
  misc_feature (1)..(25): SEQ ID NO: 1449; WAN024GDS; Start 1366; Stop 1390
caatacgaccttccagttatcaacc

SEQ ID NO: 294531 - DNA, 25 bp, Artificial
  probe
  misc_feature (1)..(25): SEQ ID NO: 1449; WAN024GDS; Start 520; Stop 544
aactcatactacggttcaggttcat

SEQ ID NO: 294532 - DNA, 25 bp, Artificial
  probe
  misc_feature (1)..(25): SEQ ID NO: 1449; WAN024GDS; Start 524; Stop 548
catactacggttcaggttcatacga

SEQ ID NO: 294533 - DNA, 25 bp, Artificial
  probe
  misc_feature (1)..(25): SEQ ID NO: 1449; WAN024GDS; Start 523; Stop 547
tcatactacggttcaggttcatacg

SEQ ID NO: 294534 - DNA, 25 bp, Artificial
  probe
  misc_feature (1)..(25): SEQ ID NO: 1449; WAN024GDS; Start 1373; Stop 1397
accttccagttatcaaccttgtctt

SEQ ID NO: 294535 - DNA, 25 bp, Artificial
  probe
  misc_feature (1)..(25): SEQ ID NO: 1449; WAN024GDS; Start 658; Stop 682
gctggtgaagtgattactgaattgt

SEQ ID NO: 294536 - DNA, 25 bp, Artificial
  probe
  misc_feature (1)..(25): SEQ ID NO: 1449; WAN024GDS; Start 1369; Stop 1393
tacgaccttccagttatcaaccttg

SEQ ID NO: 294537 - DNA, 25 bp, Artificial
  probe
  misc_feature (1)..(25): SEQ ID NO: 1449; WAN024GDS; Start 656; Stop 680
aagctggtgaagtgattactgaatt

SEQ ID NO: 294538 - DNA, 25 bp, Artificial
  probe
  misc_feature (1)..(25): SEQ ID NO: 1449; WAN024GDS; Start 1170; Stop 1194
cactactcaaacatctactcgtcac

SEQ ID NO: 294539 - DNA, 25 bp, Artificial
  probe
  misc_feature (1)..(25): SEQ ID NO: 1449; WAN024GDS; Start 689; Stop 713
aaatcaaagcaccaatcatcacaac

SEQ ID NO: 294540 - DNA, 25 bp, Artificial
  probe
  misc_feature (1)..(25): SEQ ID NO: 1449; WAN024GDS; Start 977; Stop 1001
ctatccttgacaaagtaaacccagt

SEQ ID NO: 294541 - DNA, 25 bp, Artificial
  probe
  misc_feature (1)..(25): SEQ ID NO: 1449; WAN024GDS; Start 1372; Stop 1396
gaccttccagttatcaaccttgtct

SEQ ID NO: 294542 - DNA, 25 bp, Artificial
  probe
  misc_feature (1)..(25): SEQ ID NO: 1449; WAN024GDS; Start 736; Stop 760
gaatggaactatgaaggtttgacag

SEQ ID NO: 294543 - DNA, 25 bp, Artificial
  probe
  misc_feature (1)..(25): SEQ ID NO: 1449; WAN024GDS; Start 978; Stop 1002
tatccttgacaaagtaaacccagtt

SEQ ID NO: 294544 - DNA, 25 bp, Artificial
  probe
  misc_feature (1)..(25): SEQ ID NO: 1449; WAN024GDS; Start 853; Stop 877
gaagtttacgaagcattcaagaaca

SEQ ID NO: 294545 - DNA, 25 bp, Artificial
  probe
  misc_feature (1)..(25): SEQ ID NO: 1449; WAN024GDS; Start 657; Stop 681
agctggtgaagtgattactgaattg

SEQ ID NO: 294546 - DNA, 25 bp, Artificial
  probe
  misc_feature (1)..(25): SEQ ID NO: 1449; WAN024GDS; Start 854; Stop 878
aagtttacgaagcattcaagaacac

SEQ ID NO: 294547 - DNA, 25 bp, Artificial
  probe
  misc_feature (1)..(25): SEQ ID NO: 1449; WAN024GDS; Start 1382; Stop 1406
ttatcaaccttgtcttctcaaatgc

SEQ ID NO: 294548 - DNA, 25 bp, Artificial
  probe
  misc_feature (1)..(25): SEQ ID NO: 1450; WAN024AZQ; Start 137; Stop 161
ttattaaacgcttccaactaactaa

SEQ ID NO: 294549 - DNA, 25 bp, Artificial
  probe
  misc_feature (1)..(25): SEQ ID NO: 1450; WAN024AZQ; Start 136; Stop 160
tttattaaacgcttccaactaacta

SEQ ID NO: 294550 - DNA, 25 bp, Artificial
  probe
  misc_feature (1)..(25): SEQ ID NO: 1450; WAN024AZQ; Start 138; Stop 162
tattaaacgcttccaactaactaat

SEQ ID NO: 294551 - DNA, 25 bp, Artificial
  probe
  misc_feature (1)..(25): SEQ ID NO: 1450; WAN024AZQ; Start 135; Stop 159
ttttattaaacgcttccaactaact

SEQ ID NO: 294552 - DNA, 25 bp, Artificial
  probe
  misc_feature (1)..(25): SEQ ID NO: 1450; WAN024AZQ; Start 99; Stop 123
taacttgaacttgaaatttagcaaa

SEQ ID NO: 294553 - DNA, 25 bp, Artificial
  probe
  misc_feature (1)..(25): SEQ ID NO: 1450; WAN024AZQ; Start 104; Stop 128
tgaacttgaaatttagcaaaatgga

SEQ ID NO: 294554 - DNA, 25 bp, Artificial
  probe
  misc_feature (1)..(25): SEQ ID NO: 1450; WAN024AZQ; Start 103; Stop 127
ttgaacttgaaatttagcaaaatgg

SEQ ID NO: 294555 - DNA, 25 bp, Artificial
  probe
  misc_feature (1)..(25): SEQ ID NO: 1450; WAN024AZQ; Start 105; Stop 129
gaacttgaaatttagcaaaatggaa

SEQ ID NO: 294556 - DNA, 25 bp, Artificial
  probe
  misc_feature (1)..(25): SEQ ID NO: 1450; WAN024AZQ; Start 100; Stop 124
aacttgaacttgaaatttagcaaaa

SEQ ID NO: 294557 - DNA, 25 bp, Artificial
  probe
  misc_feature (1)..(25): SEQ ID NO: 1450; WAN024AZQ; Start 106; Stop 130
aacttgaaatttagcaaaatggaaa

SEQ ID NO: 294558 - DNA, 25 bp, Artificial
  probe
  misc_feature (1)..(25): SEQ ID NO: 1450; WAN024AZQ; Start 107; Stop 131
acttgaaatttagcaaaatggaaat

SEQ ID NO: 294559 - DNA, 25 bp, Artificial
  probe
  misc_feature (1)..(25): SEQ ID NO: 1450; WAN024AZQ; Start 101; Stop 125
acttgaacttgaaatttagcaaaat

SEQ ID NO: 294560 - DNA, 25 bp, Artificial
  probe
  misc_feature (1)..(25): SEQ ID NO: 1450; WAN024AZQ; Start 102; Stop 126
cttgaacttgaaatttagcaaaatg

SEQ ID NO: 294561 - DNA, 25 bp, Artificial
  probe
  misc_feature (1)..(25): SEQ ID NO: 1450; WAN024AZQ; Start 108; Stop 132
cttgaaatttagcaaaatggaaata

SEQ ID NO: 294562 - DNA, 25 bp, Artificial
  probe
  misc_feature (1)..(25): SEQ ID NO: 1451; WAN024CNQ; Start 22; Stop 46
aagacaagtggatggaaagagtatt

SEQ ID NO: 294563 - DNA, 25 bp, Artificial
  probe
  misc_feature (1)..(25): SEQ ID NO: 1451; WAN024CNQ; Start 21; Stop 45
aaagacaagtggatggaaagagtat

SEQ ID NO: 294564 - DNA, 25 bp, Artificial
  probe
  misc_feature (1)..(25): SEQ ID NO: 1451; WAN024CNQ; Start 19; Stop 43
ataaagacaagtggatggaaagagt

SEQ ID NO: 294565 - DNA, 25 bp, Artificial
  probe
  misc_feature (1)..(25): SEQ ID NO: 1451; WAN024CNQ; Start 20; Stop 44
taaagacaagtggatggaaagagta

SEQ ID NO: 294566 - DNA, 25 bp, Artificial
  probe
  misc_feature (1)..(25): SEQ ID NO: 1451; WAN024CNQ; Start 65; Stop 89
ttctaatccagacgttaagactcac

SEQ ID NO: 294567 - DNA, 25 bp, Artificial
  probe
  misc_feature (1)..(25): SEQ ID NO: 1451; WAN024CNQ; Start 64; Stop 88
gttctaatccagacgttaagactca

SEQ ID NO: 294568 - DNA, 25 bp, Artificial
  probe
  misc_feature (1)..(25): SEQ ID NO: 1451; WAN024CNQ; Start 10; Stop 34
ctacgaagcataaagacaagtggat

SEQ ID NO: 294569 - DNA, 25 bp, Artificial
  probe
  misc_feature (1)..(25): SEQ ID NO: 1451; WAN024CNQ; Start 61; Stop 85
acagttctaatccagacgttaagac

SEQ ID NO: 294570 - DNA, 25 bp, Artificial
  probe
  misc_feature (1)..(25): SEQ ID NO: 1451; WAN024CNQ; Start 60; Stop 84
aacagttctaatccagacgttaaga

SEQ ID NO: 294571 - DNA, 25 bp, Artificial
  probe
  misc_feature (1)..(25): SEQ ID NO: 1451; WAN024CNQ; Start 23; Stop 47
agacaagtggatggaaagagtattc

SEQ ID NO: 294572 - DNA, 25 bp, Artificial
  probe
  misc_feature (1)..(25): SEQ ID NO: 1451; WAN024CNQ; Start 18; Stop 42
cataaagacaagtggatggaaagag

SEQ ID NO: 294573 - DNA, 25 bp, Artificial
  probe
  misc_feature (1)..(25): SEQ ID NO: 1451; WAN024CNQ; Start 63; Stop 87
agttctaatccagacgttaagactc

SEQ ID NO: 294574 - DNA, 25 bp, Artificial
  probe
  misc_feature (1)..(25): SEQ ID NO: 1451; WAN024CNQ; Start 62; Stop 86
cagttctaatccagacgttaagact

SEQ ID NO: 294575 - DNA, 25 bp, Artificial
  probe
  misc_feature (1)..(25): SEQ ID NO: 1451; WAN024CNQ; Start 15; Stop 39
aagcataaagacaagtggatggaaa

SEQ ID NO: 294576 - DNA, 25 bp, Artificial
  probe
  misc_feature (1)..(25): SEQ ID NO: 1451; WAN024CNQ; Start 11; Stop 35
tacgaagcataaagacaagtggatg

SEQ ID NO: 294577 - DNA, 25 bp, Artificial
  probe
  misc_feature (1)..(25): SEQ ID NO: 1451; WAN024CNQ; Start 17; Stop 41
gcataaagacaagtggatggaaaga

SEQ ID NO: 294578 - DNA, 25 bp, Artificial
  probe
  misc_feature (1)..(25): SEQ ID NO: 1451; WAN024CNQ; Start 16; Stop 40
agcataaagacaagtggatggaaag

SEQ ID NO: 294579 - DNA, 25 bp, Artificial
  probe
  misc_feature (1)..(25): SEQ ID NO: 1451; WAN024CNQ; Start 14; Stop 38
gaagcataaagacaagtggatggaa

SEQ ID NO: 294580 - DNA, 25 bp, Artificial
  probe
  misc_feature (1)..(25): SEQ ID NO: 1451; WAN024CNQ; Start 24; Stop 48
gacaagtggatggaaagagtattcg

SEQ ID NO: 294581 - DNA, 25 bp, Artificial
  probe
  misc_feature (1)..(25): SEQ ID NO: 1451; WAN024CNQ; Start 8; Stop 32
gactacgaagcataaagacaagtgg

SEQ ID NO: 294582 - DNA, 25 bp, Artificial
  probe
  misc_feature (1)..(25): SEQ ID NO: 1451; WAN024CNQ; Start 9; Stop 33
actacgaagcataaagacaagtgga

SEQ ID NO: 294583 - DNA, 25 bp, Artificial
  probe
  misc_feature (1)..(25): SEQ ID NO: 1451; WAN024CNQ; Start 7; Stop 31
cgactacgaagcataaagacaagtg

SEQ ID NO: 294584 - DNA, 25 bp, Artificial
  probe
  misc_feature (1)..(25): SEQ ID NO: 1451; WAN024CNQ; Start 59; Stop 83
aaacagttctaatccagacgttaag

SEQ ID NO: 294585 - DNA, 25 bp, Artificial
  probe
  misc_feature (1)..(25): SEQ ID NO: 1451; WAN024CNQ; Start 58; Stop 82
gaaacagttctaatccagacgttaa

SEQ ID NO: 294586 - DNA, 25 bp, Artificial
  probe
  misc_feature (1)..(25): SEQ ID NO: 1451; WAN024CNQ; Start 57; Stop 81
cgaaacagttctaatccagacgtta

SEQ ID NO: 294587 - DNA, 25 bp, Artificial
  probe
  misc_feature (1)..(25): SEQ ID NO: 1451; WAN024CNQ; Start 25; Stop 49
acaagtggatggaaagagtattcga

SEQ ID NO: 294588 - DNA, 25 bp, Artificial
  probe
  misc_feature (1)..(25): SEQ ID NO: 1451; WAN024CNQ; Start 13; Stop 37
cgaagcataaagacaagtggatgga

SEQ ID NO: 294589 - DNA, 25 bp, Artificial
  probe
  misc_feature (1)..(25): SEQ ID NO: 1451; WAN024CNQ; Start 12; Stop 36
acgaagcataaagacaagtggatgg

SEQ ID NO: 294590 - DNA, 25 bp, Artificial
  probe
  misc_feature (1)..(25): SEQ ID NO: 1451; WAN024CNQ; Start 78; Stop 102
gttaagactcacgcatttgggatga

SEQ ID NO: 294591 - DNA, 25 bp, Artificial
  probe
  misc_feature (1)..(25): SEQ ID NO: 1451; WAN024CNQ; Start 66; Stop 90
tctaatccagacgttaagactcacg

SEQ ID NO: 294592 - DNA, 25 bp, Artificial
  probe
  misc_feature (1)..(25): SEQ ID NO: 1451; WAN024CNQ; Start 56; Stop 80
tcgaaacagttctaatccagacgtt

SEQ ID NO: 294593 - DNA, 25 bp, Artificial
  probe
  misc_feature (1)..(25): SEQ ID NO: 1451; WAN024CNQ; Start 5; Stop 29
ctcgactacgaagcataaagacaag

SEQ ID NO: 294594 - DNA, 25 bp, Artificial
  probe
  misc_feature (1)..(25): SEQ ID NO: 1451; WAN024CNQ; Start 1; Stop 25
atgactcgactacgaagcataaaga

SEQ ID NO: 294595 - DNA, 25 bp, Artificial
  probe
  misc_feature (1)..(25): SEQ ID NO: 1452; WAN024DKK; Start 19; Stop 43
atcttacaatatcgcctgaaacaag

SEQ ID NO: 294596 - DNA, 25 bp, Artificial
  probe
  misc_feature (1)..(25): SEQ ID NO: 1452; WAN024DKK; Start 163; Stop 187
aagaaattgaaatcactcggaagaa

SEQ ID NO: 294597 - DNA, 25 bp, Artificial
  probe
  misc_feature (1)..(25): SEQ ID NO: 1452; WAN024DKK; Start 162; Stop 186
aaagaaattgaaatcactcggaaga

SEQ ID NO: 294598 - DNA, 25 bp, Artificial
  probe
  misc_feature (1)..(25): SEQ ID NO: 1452; WAN024DKK; Start 164; Stop 188
agaaattgaaatcactcggaagaat

SEQ ID NO: 294599 - DNA, 25 bp, Artificial
  probe
  misc_feature (1)..(25): SEQ ID NO: 1452; WAN024DKK; Start 160; Stop 184
ccaaagaaattgaaatcactcggaa

SEQ ID NO: 294600 - DNA, 25 bp, Artificial
  probe
  misc_feature (1)..(25): SEQ ID NO: 1452; WAN024DKK; Start 161; Stop 185
caaagaaattgaaatcactcggaag

SEQ ID NO: 294601 - DNA, 25 bp, Artificial
  probe
  misc_feature (1)..(25): SEQ ID NO: 1452; WAN024DKK; Start 18; Stop 42
tatcttacaatatcgcctgaaacaa

SEQ ID NO: 294602 - DNA, 25 bp, Artificial
  probe
  misc_feature (1)..(25): SEQ ID NO: 1452; WAN024DKK; Start 20; Stop 44
tcttacaatatcgcctgaaacaagc

SEQ ID NO: 294603 - DNA, 25 bp, Artificial
  probe
  misc_feature (1)..(25): SEQ ID NO: 1452; WAN024DKK; Start 17; Stop 41
atatcttacaatatcgcctgaaaca

SEQ ID NO: 294604 - DNA, 25 bp, Artificial
  probe
  misc_feature (1)..(25): SEQ ID NO: 1452; WAN024DKK; Start 167; Stop 191
aattgaaatcactcggaagaatagt

SEQ ID NO: 294605 - DNA, 25 bp, Artificial
  probe
  misc_feature (1)..(25): SEQ ID NO: 1452; WAN024DKK; Start 159; Stop 183
cccaaagaaattgaaatcactcgga

SEQ ID NO: 294606 - DNA, 25 bp, Artificial
  probe
  misc_feature (1)..(25): SEQ ID NO: 1452; WAN024DKK; Start 166; Stop 190
aaattgaaatcactcggaagaatag

SEQ ID NO: 294607 - DNA, 25 bp, Artificial
  probe
  misc_feature (1)..(25): SEQ ID NO: 1452; WAN024DKK; Start 165; Stop 189
gaaattgaaatcactcggaagaata

SEQ ID NO: 294608 - DNA, 25 bp, Artificial
  probe
  misc_feature (1)..(25): SEQ ID NO: 1452; WAN024DKK; Start 24; Stop 48
acaatatcgcctgaaacaagctata

SEQ ID NO: 294609 - DNA, 25 bp, Artificial
  probe
  misc_feature (1)..(25): SEQ ID NO: 1452; WAN024DKK; Start 23; Stop 47
tacaatatcgcctgaaacaagctat

SEQ ID NO: 294610 - DNA, 25 bp, Artificial
  probe
  misc_feature (1)..(25): SEQ ID NO: 1452; WAN024DKK; Start 22; Stop 46
ttacaatatcgcctgaaacaagcta

SEQ ID NO: 294611 - DNA, 25 bp, Artificial
  probe
  misc_feature (1)..(25): SEQ ID NO: 1452; WAN024DKK; Start 26; Stop 50
aatatcgcctgaaacaagctataga

SEQ ID NO: 294612 - DNA, 25 bp, Artificial
  probe
  misc_feature (1)..(25): SEQ ID NO: 1452; WAN024DKK; Start 25; Stop 49
caatatcgcctgaaacaagctatag

SEQ ID NO: 294613 - DNA, 25 bp, Artificial
  probe
  misc_feature (1)..(25): SEQ ID NO: 1452; WAN024DKK; Start 31; Stop 55
cgcctgaaacaagctatagataaga

SEQ ID NO: 294614 - DNA, 25 bp, Artificial
  probe
  misc_feature (1)..(25): SEQ ID NO: 1452; WAN024DKK; Start 30; Stop 54
tcgcctgaaacaagctatagataag

SEQ ID NO: 294615 - DNA, 25 bp, Artificial
  probe
  misc_feature (1)..(25): SEQ ID NO: 1452; WAN024DKK; Start 29; Stop 53
atcgcctgaaacaagctatagataa

SEQ ID NO: 294616 - DNA, 25 bp, Artificial
  probe
  misc_feature (1)..(25): SEQ ID NO: 1452; WAN024DKK; Start 27; Stop 51
atatcgcctgaaacaagctatagat

SEQ ID NO: 294617 - DNA, 25 bp, Artificial
  probe
  misc_feature (1)..(25): SEQ ID NO: 1452; WAN024DKK; Start 39; Stop 63
acaagctatagataagatggctgaa

SEQ ID NO: 294618 - DNA, 25 bp, Artificial
  probe
  misc_feature (1)..(25): SEQ ID NO: 1452; WAN024DKK; Start 38; Stop 62
aacaagctatagataagatggctga

SEQ ID NO: 294619 - DNA, 25 bp, Artificial
  probe
  misc_feature (1)..(25): SEQ ID NO: 1452; WAN024DKK; Start 12; Stop 36
tgaatatatcttacaatatcgcctg

SEQ ID NO: 294620 - DNA, 25 bp, Artificial
  probe
  misc_feature (1)..(25): SEQ ID NO: 1452; WAN024DKK; Start 43; Stop 67
gctatagataagatggctgaatctc

SEQ ID NO: 294621 - DNA, 25 bp, Artificial
  probe
  misc_feature (1)..(25): SEQ ID NO: 1452; WAN024DKK; Start 35; Stop 59
tgaaacaagctatagataagatggc

SEQ ID NO: 294622 - DNA, 25 bp, Artificial
  probe
  misc_feature (1)..(25): SEQ ID NO: 1452; WAN024DKK; Start 42; Stop 66
agctatagataagatggctgaatct

SEQ ID NO: 294623 - DNA, 25 bp, Artificial
  probe
  misc_feature (1)..(25): SEQ ID NO: 1452; WAN024DKK; Start 46; Stop 70
atagataagatggctgaatctccca

SEQ ID NO: 294624 - DNA, 25 bp, Artificial
  probe
  misc_feature (1)..(25): SEQ ID NO: 1452; WAN024DKK; Start 32; Stop 56
gcctgaaacaagctatagataagat

SEQ ID NO: 294625 - DNA, 25 bp, Artificial
  probe
  misc_feature (1)..(25): SEQ ID NO: 1452; WAN024DKK; Start 21; Stop 45
cttacaatatcgcctgaaacaagct

SEQ ID NO: 294626 - DNA, 25 bp, Artificial
  probe
  misc_feature (1)..(25): SEQ ID NO: 1452; WAN024DKK; Start 47; Stop 71
tagataagatggctgaatctcccaa

SEQ ID NO: 294627 - DNA, 25 bp, Artificial
  probe
  misc_feature (1)..(25): SEQ ID NO: 1452; WAN024DKK; Start 45; Stop 69
tatagataagatggctgaatctccc

SEQ ID NO: 294628 - DNA, 25 bp, Artificial
  probe
  misc_feature (1)..(25): SEQ ID NO: 1453; WAN024GDL; Start 53; Stop 77
taattgcgaatcgttccacttgtaa

SEQ ID NO: 294629 - DNA, 25 bp, Artificial
  probe
  misc_feature (1)..(25): SEQ ID NO: 1453; WAN024GDL; Start 49; Stop 73
ctactaattgcgaatcgttccactt

SEQ ID NO: 294630 - DNA, 25 bp, Artificial
  probe
  misc_feature (1)..(25): SEQ ID NO: 1453; WAN024GDL; Start 52; Stop 76
ctaattgcgaatcgttccacttgta

SEQ ID NO: 294631 - DNA, 25 bp, Artificial
  probe
  misc_feature (1)..(25): SEQ ID NO: 1453; WAN024GDL; Start 50; Stop 74
tactaattgcgaatcgttccacttg

SEQ ID NO: 294632 - DNA, 25 bp, Artificial
  probe
  misc_feature (1)..(25): SEQ ID NO: 1453; WAN024GDL; Start 418; Stop 442
ttaccacttgagacagtacagacag

SEQ ID NO: 294633 - DNA, 25 bp, Artificial
  probe
  misc_feature (1)..(25): SEQ ID NO: 1453; WAN024GDL; Start 345; Stop 369
ttatatcaaccagtaccgaatggac

SEQ ID NO: 294634 - DNA, 25 bp, Artificial
  probe
  misc_feature (1)..(25): SEQ ID NO: 1453; WAN024GDL; Start 373; Stop 397
tacgcccaatacctttatcaagaaa

SEQ ID NO: 294635 - DNA, 25 bp, Artificial
  probe
  misc_feature (1)..(25): SEQ ID NO: 1453; WAN024GDL; Start 372; Stop 396
ctacgcccaatacctttatcaagaa

SEQ ID NO: 294636 - DNA, 25 bp, Artificial
  probe
  misc_feature (1)..(25): SEQ ID NO: 1453; WAN024GDL; Start 425; Stop 449
ttgagacagtacagacagctcttaa

SEQ ID NO: 294637 - DNA, 25 bp, Artificial
  probe
  misc_feature (1)..(25): SEQ ID NO: 1453; WAN024GDL; Start 405; Stop 429
agaattgacccatttaccacttgag

SEQ ID NO: 294638 - DNA, 25 bp, Artificial
  probe
  misc_feature (1)..(25): SEQ ID NO: 1453; WAN024GDL; Start 115; Stop 139
aaggttatttccactggttacaatg

SEQ ID NO: 294639 - DNA, 25 bp, Artificial
  probe
  misc_feature (1)..(25): SEQ ID NO: 1453; WAN024GDL; Start 406; Stop 430
gaattgacccatttaccacttgaga

SEQ ID NO: 294640 - DNA, 25 bp, Artificial
  probe
  misc_feature (1)..(25): SEQ ID NO: 1453; WAN024GDL; Start 407; Stop 431
aattgacccatttaccacttgagac

SEQ ID NO: 294641 - DNA, 25 bp, Artificial
  probe
  misc_feature (1)..(25): SEQ ID NO: 1453; WAN024GDL; Start 404; Stop 428
cagaattgacccatttaccacttga

SEQ ID NO: 294642 - DNA, 25 bp, Artificial
  probe
  misc_feature (1)..(25): SEQ ID NO: 1453; WAN024GDL; Start 402; Stop 426
gacagaattgacccatttaccactt

SEQ ID NO: 294643 - DNA, 25 bp, Artificial
  probe
  misc_feature (1)..(25): SEQ ID NO: 1453; WAN024GDL; Start 424; Stop 448
cttgagacagtacagacagctctta

SEQ ID NO: 294644 - DNA, 25 bp, Artificial
  probe
  misc_feature (1)..(25): SEQ ID NO: 1453; WAN024GDL; Start 370; Stop 394
gactacgcccaatacctttatcaag

SEQ ID NO: 294645 - DNA, 25 bp, Artificial
  probe
  misc_feature (1)..(25): SEQ ID NO: 1453; WAN024GDL; Start 403; Stop 427
acagaattgacccatttaccacttg

SEQ ID NO: 294646 - DNA, 25 bp, Artificial
  probe
  misc_feature (1)..(25): SEQ ID NO: 1453; WAN024GDL; Start 449; Stop 473
aagaggctgatctaatgtaactaat

SEQ ID NO: 294647 - DNA, 25 bp, Artificial
  probe
  misc_feature (1)..(25): SEQ ID NO: 1453; WAN024GDL; Start 371; Stop 395
actacgcccaatacctttatcaaga

SEQ ID NO: 294648 - DNA, 25 bp, Artificial
  probe
  misc_feature (1)..(25): SEQ ID NO: 1453; WAN024GDL; Start 346; Stop 370
tatatcaaccagtaccgaatggacg

SEQ ID NO: 294649 - DNA, 25 bp, Artificial
  probe
  misc_feature (1)..(25): SEQ ID NO: 1453; WAN024GDL; Start 416; Stop 440
atttaccacttgagacagtacagac

SEQ ID NO: 294650 - DNA, 25 bp, Artificial
  probe
  misc_feature (1)..(25): SEQ ID NO: 1453; WAN024GDL; Start 415; Stop 439
catttaccacttgagacagtacaga

SEQ ID NO: 294651 - DNA, 25 bp, Artificial
  probe
  misc_feature (1)..(25): SEQ ID NO: 1453; WAN024GDL; Start 408; Stop 432
attgacccatttaccacttgagaca

SEQ ID NO: 294652 - DNA, 25 bp, Artificial
  probe
  misc_feature (1)..(25): SEQ ID NO: 1453; WAN024GDL; Start 114; Stop 138
taaggttatttccactggttacaat

SEQ ID NO: 294653 - DNA, 25 bp, Artificial
  probe
  misc_feature (1)..(25): SEQ ID NO: 1453; WAN024GDL; Start 113; Stop 137
ataaggttatttccactggttacaa

SEQ ID NO: 294654 - DNA, 25 bp, Artificial
  probe
  misc_feature (1)..(25): SEQ ID NO: 1453; WAN024GDL; Start 51; Stop 75
actaattgcgaatcgttccacttgt

SEQ ID NO: 294655 - DNA, 25 bp, Artificial
  probe
  misc_feature (1)..(25): SEQ ID NO: 1453; WAN024GDL; Start 414; Stop 438
ccatttaccacttgagacagtacag

SEQ ID NO: 294656 - DNA, 25 bp, Artificial
  probe
  misc_feature (1)..(25): SEQ ID NO: 1453; WAN024GDL; Start 411; Stop 435
gacccatttaccacttgagacagta

SEQ ID NO: 294657 - DNA, 25 bp, Artificial
  probe
  misc_feature (1)..(25): SEQ ID NO: 1453; WAN024GDL; Start 417; Stop 441
tttaccacttgagacagtacagaca

SEQ ID NO: 294658 - DNA, 25 bp, Artificial
  probe
  misc_feature (1)..(25): SEQ ID NO: 1453; WAN024GDL; Start 112; Stop 136
aataaggttatttccactggttaca

SEQ ID NO: 294659 - DNA, 25 bp, Artificial
  probe
  misc_feature (1)..(25): SEQ ID NO: 1453; WAN024GDL; Start 54; Stop 78
aattgcgaatcgttccacttgtaaa

SEQ ID NO: 294660 - DNA, 25 bp, Artificial
  probe
  misc_feature (1)..(25): SEQ ID NO: 1453; WAN024GDL; Start 409; Stop 433
ttgacccatttaccacttgagacag

SEQ ID NO: 294661 - DNA, 25 bp, Artificial
  probe
  misc_feature (1)..(25): SEQ ID NO: 1454; WAN024D6P; Start 832; Stop 856
aagatgattgtagatggtgctgtag

SEQ ID NO: 294662 - DNA, 25 bp, Artificial
  probe
  misc_feature (1)..(25): SEQ ID NO: 1454; WAN024D6P; Start 593; Stop 617
tctatccttacgatgtgtctcctaa

SEQ ID NO: 294663 - DNA, 25 bp, Artificial
  probe
  misc_feature (1)..(25): SEQ ID NO: 1454; WAN024D6P; Start 592; Stop 616
atctatccttacgatgtgtctccta

SEQ ID NO: 294664 - DNA, 25 bp, Artificial
  probe
  misc_feature (1)..(25): SEQ ID NO: 1454; WAN024D6P; Start 595; Stop 619
tatccttacgatgtgtctcctaatg

SEQ ID NO: 294665 - DNA, 25 bp, Artificial
  probe
  misc_feature (1)..(25): SEQ ID NO: 1454; WAN024D6P; Start 594; Stop 618
ctatccttacgatgtgtctcctaat

SEQ ID NO: 294666 - DNA, 25 bp, Artificial
  probe
  misc_feature (1)..(25): SEQ ID NO: 1454; WAN024D6P; Start 596; Stop 620
atccttacgatgtgtctcctaatgt

SEQ ID NO: 294667 - DNA, 25 bp, Artificial
  probe
  misc_feature (1)..(25): SEQ ID NO: 1454; WAN024D6P; Start 895; Stop 919
gaattggtagaacttgacgaagaac

SEQ ID NO: 294668 - DNA, 25 bp, Artificial
  probe
  misc_feature (1)..(25): SEQ ID NO: 1454; WAN024D6P; Start 837; Stop 861
gattgtagatggtgctgtaggaatg

SEQ ID NO: 294669 - DNA, 25 bp, Artificial
  probe
  misc_feature (1)..(25): SEQ ID NO: 1454; WAN024D6P; Start 581; Stop 605
atattgtccgcatctatccttacga

SEQ ID NO: 294670 - DNA, 25 bp, Artificial
  probe
  misc_feature (1)..(25): SEQ ID NO: 1454; WAN024D6P; Start 582; Stop 606
tattgtccgcatctatccttacgat

SEQ ID NO: 294671 - DNA, 25 bp, Artificial
  probe
  misc_feature (1)..(25): SEQ ID NO: 1454; WAN024D6P; Start 836; Stop 860
tgattgtagatggtgctgtaggaat

SEQ ID NO: 294672 - DNA, 25 bp, Artificial
  probe
  misc_feature (1)..(25): SEQ ID NO: 1454; WAN024D6P; Start 835; Stop 859
atgattgtagatggtgctgtaggaa

SEQ ID NO: 294673 - DNA, 25 bp, Artificial
  probe
  misc_feature (1)..(25): SEQ ID NO: 1454; WAN024D6P; Start 35; Stop 59
gtgtattcgcattgattctcattga

SEQ ID NO: 294674 - DNA, 25 bp, Artificial
  probe
  misc_feature (1)..(25): SEQ ID NO: 1454; WAN024D6P; Start 894; Stop 918
ggaattggtagaacttgacgaagaa

SEQ ID NO: 294675 - DNA, 25 bp, Artificial
  probe
  misc_feature (1)..(25): SEQ ID NO: 1454; WAN024D6P; Start 34; Stop 58
ggtgtattcgcattgattctcattg

SEQ ID NO: 294676 - DNA, 25 bp, Artificial
  probe
  misc_feature (1)..(25): SEQ ID NO: 1454; WAN024D6P; Start 32; Stop 56
atggtgtattcgcattgattctcat

SEQ ID NO: 294677 - DNA, 25 bp, Artificial
  probe
  misc_feature (1)..(25): SEQ ID NO: 1454; WAN024D6P; Start 33; Stop 57
tggtgtattcgcattgattctcatt

SEQ ID NO: 294678 - DNA, 25 bp, Artificial
  probe
  misc_feature (1)..(25): SEQ ID NO: 1454; WAN024D6P; Start 834; Stop 858
gatgattgtagatggtgctgtagga

SEQ ID NO: 294679 - DNA, 25 bp, Artificial
  probe
  misc_feature (1)..(25): SEQ ID NO: 1454; WAN024D6P; Start 833; Stop 857
agatgattgtagatggtgctgtagg

SEQ ID NO: 294680 - DNA, 25 bp, Artificial
  probe
  misc_feature (1)..(25): SEQ ID NO: 1454; WAN024D6P; Start 597; Stop 621
tccttacgatgtgtctcctaatgtg

SEQ ID NO: 294681 - DNA, 25 bp, Artificial
  probe
  misc_feature (1)..(25): SEQ ID NO: 1454; WAN024D6P; Start 896; Stop 920
aattggtagaacttgacgaagaacg

SEQ ID NO: 294682 - DNA, 25 bp, Artificial
  probe
  misc_feature (1)..(25): SEQ ID NO: 1454; WAN024D6P; Start 580; Stop 604
aatattgtccgcatctatccttacg

SEQ ID NO: 294683 - DNA, 25 bp, Artificial
  probe
  misc_feature (1)..(25): SEQ ID NO: 1454; WAN024D6P; Start 577; Stop 601
cgtaatattgtccgcatctatcctt

SEQ ID NO: 294684 - DNA, 25 bp, Artificial
  probe
  misc_feature (1)..(25): SEQ ID NO: 1454; WAN024D6P; Start 838; Stop 862
attgtagatggtgctgtaggaatgg

SEQ ID NO: 294685 - DNA, 25 bp, Artificial
  probe
  misc_feature (1)..(25): SEQ ID NO: 1454; WAN024D6P; Start 897; Stop 921
attggtagaacttgacgaagaacga

SEQ ID NO: 294686 - DNA, 25 bp, Artificial
  probe
  misc_feature (1)..(25): SEQ ID NO: 1454; WAN024D6P; Start 574; Stop 598
ctccgtaatattgtccgcatctatc

SEQ ID NO: 294687 - DNA, 25 bp, Artificial
  probe
  misc_feature (1)..(25): SEQ ID NO: 1454; WAN024D6P; Start 601; Stop 625
tacgatgtgtctcctaatgtggata

SEQ ID NO: 294688 - DNA, 25 bp, Artificial
  probe
  misc_feature (1)..(25): SEQ ID NO: 1454; WAN024D6P; Start 898; Stop 922
ttggtagaacttgacgaagaacgaa

SEQ ID NO: 294689 - DNA, 25 bp, Artificial
  probe
  misc_feature (1)..(25): SEQ ID NO: 1454; WAN024D6P; Start 598; Stop 622
ccttacgatgtgtctcctaatgtgg

SEQ ID NO: 294690 - DNA, 25 bp, Artificial
  probe
  misc_feature (1)..(25): SEQ ID NO: 1454; WAN024D6P; Start 600; Stop 624
ttacgatgtgtctcctaatgtggat

SEQ ID NO: 294691 - DNA, 25 bp, Artificial
  probe
  misc_feature (1)..(25): SEQ ID NO: 1454; WAN024D6P; Start 801; Stop 825
ccaacaagcatctgccattattgat

SEQ ID NO: 294692 - DNA, 25 bp, Artificial
  probe
  misc_feature (1)..(25): SEQ ID NO: 1454; WAN024D6P; Start 579; Stop 603
taatattgtccgcatctatccttac

SEQ ID NO: 294693 - DNA, 25 bp, Artificial
  probe
  misc_feature (1)..(25): SEQ ID NO: 1454; WAN024D6P; Start 578; Stop 602
gtaatattgtccgcatctatcctta

SEQ ID NO: 294694 - DNA, 25 bp, Artificial
  probe
  misc_feature (1)..(25): SEQ ID NO: 1455; WAN024C6U; Start 451; Stop 475
cgtatgtcattcttgtggtatgttc

SEQ ID NO: 294695 - DNA, 25 bp, Artificial
  probe
  misc_feature (1)..(25): SEQ ID NO: 1455; WAN024C6U; Start 450; Stop 474
tcgtatgtcattcttgtggtatgtt

SEQ ID NO: 294696 - DNA, 25 bp, Artificial
  probe
  misc_feature (1)..(25): SEQ ID NO: 1455; WAN024C6U; Start 449; Stop 473
ttcgtatgtcattcttgtggtatgt

SEQ ID NO: 294697 - DNA, 25 bp, Artificial
  probe
  misc_feature (1)..(25): SEQ ID NO: 1455; WAN024C6U; Start 447; Stop 471
gattcgtatgtcattcttgtggtat

SEQ ID NO: 294698 - DNA, 25 bp, Artificial
  probe
  misc_feature (1)..(25): SEQ ID NO: 1455; WAN024C6U; Start 448; Stop 472
attcgtatgtcattcttgtggtatg

SEQ ID NO: 294699 - DNA, 25 bp, Artificial
  probe
  misc_feature (1)..(25): SEQ ID NO: 1455; WAN024C6U; Start 452; Stop 476
gtatgtcattcttgtggtatgttca

SEQ ID NO: 294700 - DNA, 25 bp, Artificial
  probe
  misc_feature (1)..(25): SEQ ID NO: 1455; WAN024C6U; Start 843; Stop 867
atctccaatcactattatccttgcc

SEQ ID NO: 294701 - DNA, 25 bp, Artificial
  probe
  misc_feature (1)..(25): SEQ ID NO: 1455; WAN024C6U; Start 516; Stop 540
tatgtctggtggtatccttcaagat

SEQ ID NO: 294702 - DNA, 25 bp, Artificial
  probe
  misc_feature (1)..(25): SEQ ID NO: 1455; WAN024C6U; Start 515; Stop 539
atatgtctggtggtatccttcaaga

SEQ ID NO: 294703 - DNA, 25 bp, Artificial
  probe
  misc_feature (1)..(25): SEQ ID NO: 1455; WAN024C6U; Start 463; Stop 487
ttgtggtatgttcaagagattggat

SEQ ID NO: 294704 - DNA, 25 bp, Artificial
  probe
  misc_feature (1)..(25): SEQ ID NO: 1455; WAN024C6U; Start 464; Stop 488
tgtggtatgttcaagagattggata

SEQ ID NO: 294705 - DNA, 25 bp, Artificial
  probe
  misc_feature (1)..(25): SEQ ID NO: 1455; WAN024C6U; Start 446; Stop 470
tgattcgtatgtcattcttgtggta

SEQ ID NO: 294706 - DNA, 25 bp, Artificial
  probe
  misc_feature (1)..(25): SEQ ID NO: 1455; WAN024C6U; Start 444; Stop 468
cttgattcgtatgtcattcttgtgg

SEQ ID NO: 294707 - DNA, 25 bp, Artificial
  probe
  misc_feature (1)..(25): SEQ ID NO: 1455; WAN024C6U; Start 443; Stop 467
acttgattcgtatgtcattcttgtg

SEQ ID NO: 294708 - DNA, 25 bp, Artificial
  probe
  misc_feature (1)..(25): SEQ ID NO: 1455; WAN024C6U; Start 439; Stop 463
tggaacttgattcgtatgtcattct

SEQ ID NO: 294709 - DNA, 25 bp, Artificial
  probe
  misc_feature (1)..(25): SEQ ID NO: 1455; WAN024C6U; Start 438; Stop 462
atggaacttgattcgtatgtcattc

SEQ ID NO: 294710 - DNA, 25 bp, Artificial
  probe
  misc_feature (1)..(25): SEQ ID NO: 1455; WAN024C6U; Start 440; Stop 464
ggaacttgattcgtatgtcattctt

SEQ ID NO: 294711 - DNA, 25 bp, Artificial
  probe
  misc_feature (1)..(25): SEQ ID NO: 1455; WAN024C6U; Start 445; Stop 469
ttgattcgtatgtcattcttgtggt

SEQ ID NO: 294712 - DNA, 25 bp, Artificial
  probe
  misc_feature (1)..(25): SEQ ID NO: 1455; WAN024C6U; Start 442; Stop 466
aacttgattcgtatgtcattcttgt

SEQ ID NO: 294713 - DNA, 25 bp, Artificial
  probe
  misc_feature (1)..(25): SEQ ID NO: 1455; WAN024C6U; Start 514; Stop 538
gatatgtctggtggtatccttcaag

SEQ ID NO: 294714 - DNA, 25 bp, Artificial
  probe
  misc_feature (1)..(25): SEQ ID NO: 1455; WAN024C6U; Start 518; Stop 542
tgtctggtggtatccttcaagatat

SEQ ID NO: 294715 - DNA, 25 bp, Artificial
  probe
  misc_feature (1)..(25): SEQ ID NO: 1455; WAN024C6U; Start 517; Stop 541
atgtctggtggtatccttcaagata

SEQ ID NO: 294716 - DNA, 25 bp, Artificial
  probe
  misc_feature (1)..(25): SEQ ID NO: 1455; WAN024C6U; Start 513; Stop 537
agatatgtctggtggtatccttcaa

SEQ ID NO: 294717 - DNA, 25 bp, Artificial
  probe
  misc_feature (1)..(25): SEQ ID NO: 1455; WAN024C6U; Start 512; Stop 536
aagatatgtctggtggtatccttca

SEQ ID NO: 294718 - DNA, 25 bp, Artificial
  probe
  misc_feature (1)..(25): SEQ ID NO: 1455; WAN024C6U; Start 568; Stop 592
atgttcattcttgctgtccttgttc

SEQ ID NO: 294719 - DNA, 25 bp, Artificial
  probe
  misc_feature (1)..(25): SEQ ID NO: 1455; WAN024C6U; Start 567; Stop 591
gatgttcattcttgctgtccttgtt

SEQ ID NO: 294720 - DNA, 25 bp, Artificial
  probe
  misc_feature (1)..(25): SEQ ID NO: 1455; WAN024C6U; Start 441; Stop 465
gaacttgattcgtatgtcattcttg

SEQ ID NO: 294721 - DNA, 25 bp, Artificial
  probe
  misc_feature (1)..(25): SEQ ID NO: 1455; WAN024C6U; Start 472; Stop 496
gttcaagagattggatacaaggctg

SEQ ID NO: 294722 - DNA, 25 bp, Artificial
  probe
  misc_feature (1)..(25): SEQ ID NO: 1455; WAN024C6U; Start 453; Stop 477
tatgtcattcttgtggtatgttcaa

SEQ ID NO: 294723 - DNA, 25 bp, Artificial
  probe
  misc_feature (1)..(25): SEQ ID NO: 1455; WAN024C6U; Start 470; Stop 494
atgttcaagagattggatacaaggc

SEQ ID NO: 294724 - DNA, 25 bp, Artificial
  probe
  misc_feature (1)..(25): SEQ ID NO: 1455; WAN024C6U; Start 437; Stop 461
catggaacttgattcgtatgtcatt

SEQ ID NO: 294725 - DNA, 25 bp, Artificial
  probe
  misc_feature (1)..(25): SEQ ID NO: 1455; WAN024C6U; Start 466; Stop 490
tggtatgttcaagagattggataca

SEQ ID NO: 294726 - DNA, 25 bp, Artificial
  probe
  misc_feature (1)..(25): SEQ ID NO: 1455; WAN024C6U; Start 465; Stop 489
gtggtatgttcaagagattggatac

SEQ ID NO: 294727 - DNA, 25 bp, Artificial
  probe
  misc_feature (1)..(25): SEQ ID NO: 1456; WAN024CAU; Start 295; Stop 319
gaagagcctattacagcagatgatg

SEQ ID NO: 294728 - DNA, 25 bp, Artificial
  probe
  misc_feature (1)..(25): SEQ ID NO: 1456; WAN024CAU; Start 294; Stop 318
agaagagcctattacagcagatgat

SEQ ID NO: 294729 - DNA, 25 bp, Artificial
  probe
  misc_feature (1)..(25): SEQ ID NO: 1456; WAN024CAU; Start 293; Stop 317
aagaagagcctattacagcagatga

SEQ ID NO: 294730 - DNA, 25 bp, Artificial
  probe
  misc_feature (1)..(25): SEQ ID NO: 1456; WAN024CAU; Start 353; Stop 377
taacagtggcagaaatgagagaata

SEQ ID NO: 294731 - DNA, 25 bp, Artificial
  probe
  misc_feature (1)..(25): SEQ ID NO: 1456; WAN024CAU; Start 144; Stop 168
taaggaagtgattatcgggaaagtg

SEQ ID NO: 294732 - DNA, 25 bp, Artificial
  probe
  misc_feature (1)..(25): SEQ ID NO: 1456; WAN024CAU; Start 148; Stop 172
gaagtgattatcgggaaagtgtatg

SEQ ID NO: 294733 - DNA, 25 bp, Artificial
  probe
  misc_feature (1)..(25): SEQ ID NO: 1456; WAN024CAU; Start 147; Stop 171
ggaagtgattatcgggaaagtgtat

SEQ ID NO: 294734 - DNA, 25 bp, Artificial
  probe
  misc_feature (1)..(25): SEQ ID NO: 1456; WAN024CAU; Start 292; Stop 316
aaagaagagcctattacagcagatg

SEQ ID NO: 294735 - DNA, 25 bp, Artificial
  probe
  misc_feature (1)..(25): SEQ ID NO: 1456; WAN024CAU; Start 430; Stop 454
atggataatgatactacccttgctt

SEQ ID NO: 294736 - DNA, 25 bp, Artificial
  probe
  misc_feature (1)..(25): SEQ ID NO: 1456; WAN024CAU; Start 352; Stop 376
ttaacagtggcagaaatgagagaat

SEQ ID NO: 294737 - DNA, 25 bp, Artificial
  probe
  misc_feature (1)..(25): SEQ ID NO: 1456; WAN024CAU; Start 351; Stop 375
attaacagtggcagaaatgagagaa

SEQ ID NO: 294738 - DNA, 25 bp, Artificial
  probe
  misc_feature (1)..(25): SEQ ID NO: 1456; WAN024CAU; Start 349; Stop 373
aaattaacagtggcagaaatgagag

SEQ ID NO: 294739 - DNA, 25 bp, Artificial
  probe
  misc_feature (1)..(25): SEQ ID NO: 1456; WAN024CAU; Start 348; Stop 372
caaattaacagtggcagaaatgaga

SEQ ID NO: 294740 - DNA, 25 bp, Artificial
  probe
  misc_feature (1)..(25): SEQ ID NO: 1456; WAN024CAU; Start 350; Stop 374
aattaacagtggcagaaatgagaga

SEQ ID NO: 294741 - DNA, 25 bp, Artificial
  probe
  misc_feature (1)..(25): SEQ ID NO: 1456; WAN024CAU; Start 357; Stop 381
agtggcagaaatgagagaataccta

SEQ ID NO: 294742 - DNA, 25 bp, Artificial
  probe
  misc_feature (1)..(25): SEQ ID NO: 1456; WAN024CAU; Start 354; Stop 378
aacagtggcagaaatgagagaatac

SEQ ID NO: 294743 - DNA, 25 bp, Artificial
  probe
  misc_feature (1)..(25): SEQ ID NO: 1456; WAN024CAU; Start 121; Stop 145
gctcaagatgggcaattagtttata

SEQ ID NO: 294744 - DNA, 25 bp, Artificial
  probe
  misc_feature (1)..(25): SEQ ID NO: 1456; WAN024CAU; Start 431; Stop 455
tggataatgatactacccttgctta

SEQ ID NO: 294745 - DNA, 25 bp, Artificial
  probe
  misc_feature (1)..(25): SEQ ID NO: 1456; WAN024CAU; Start 149; Stop 173
aagtgattatcgggaaagtgtatgc

SEQ ID NO: 294746 - DNA, 25 bp, Artificial
  probe
  misc_feature (1)..(25): SEQ ID NO: 1456; WAN024CAU; Start 146; Stop 170
aggaagtgattatcgggaaagtgta

SEQ ID NO: 294747 - DNA, 25 bp, Artificial
  probe
  misc_feature (1)..(25): SEQ ID NO: 1456; WAN024CAU; Start 143; Stop 167
ataaggaagtgattatcgggaaagt

SEQ ID NO: 294748 - DNA, 25 bp, Artificial
  probe
  misc_feature (1)..(25): SEQ ID NO: 1456; WAN024CAU; Start 360; Stop 384
ggcagaaatgagagaatacctagaa

SEQ ID NO: 294749 - DNA, 25 bp, Artificial
  probe
  misc_feature (1)..(25): SEQ ID NO: 1456; WAN024CAU; Start 543; Stop 567
cggtggtttacttattaacggagat

SEQ ID NO: 294750 - DNA, 25 bp, Artificial
  probe
  misc_feature (1)..(25): SEQ ID NO: 1456; WAN024CAU; Start 343; Stop 367
agtatcaaattaacagtggcagaaa

SEQ ID NO: 294751 - DNA, 25 bp, Artificial
  probe
  misc_feature (1)..(25): SEQ ID NO: 1456; WAN024CAU; Start 429; Stop 453
tatggataatgatactacccttgct

SEQ ID NO: 294752 - DNA, 25 bp, Artificial
  probe
  misc_feature (1)..(25): SEQ ID NO: 1456; WAN024CAU; Start 359; Stop 383
tggcagaaatgagagaatacctaga

SEQ ID NO: 294753 - DNA, 25 bp, Artificial
  probe
  misc_feature (1)..(25): SEQ ID NO: 1456; WAN024CAU; Start 358; Stop 382
gtggcagaaatgagagaatacctag

SEQ ID NO: 294754 - DNA, 25 bp, Artificial
  probe
  misc_feature (1)..(25): SEQ ID NO: 1456; WAN024CAU; Start 347; Stop 371
tcaaattaacagtggcagaaatgag

SEQ ID NO: 294755 - DNA, 25 bp, Artificial
  probe
  misc_feature (1)..(25): SEQ ID NO: 1456; WAN024CAU; Start 346; Stop 370
atcaaattaacagtggcagaaatga

SEQ ID NO: 294756 - DNA, 25 bp, Artificial
  probe
  misc_feature (1)..(25): SEQ ID NO: 1456; WAN024CAU; Start 341; Stop 365
ctagtatcaaattaacagtggcaga

SEQ ID NO: 294757 - DNA, 25 bp, Artificial
  probe
  misc_feature (1)..(25): SEQ ID NO: 1456; WAN024CAU; Start 340; Stop 364
tctagtatcaaattaacagtggcag

SEQ ID NO: 294758 - DNA, 25 bp, Artificial
  probe
  misc_feature (1)..(25): SEQ ID NO: 1456; WAN024CAU; Start 145; Stop 169
aaggaagtgattatcgggaaagtgt

SEQ ID NO: 294759 - DNA, 25 bp, Artificial
  probe
  misc_feature (1)..(25): SEQ ID NO: 1456; WAN024CAU; Start 342; Stop 366
tagtatcaaattaacagtggcagaa

SEQ ID NO: 294760 - DNA, 25 bp, Artificial
  probe
  misc_feature (1)..(25): SEQ ID NO: 1457; WAN024DCL; Start 90; Stop 114
taagaaagagtcagaaatccagcaa

SEQ ID NO: 294761 - DNA, 25 bp, Artificial
  probe
  misc_feature (1)..(25): SEQ ID NO: 1457; WAN024DCL; Start 91; Stop 115
aagaaagagtcagaaatccagcaat

SEQ ID NO: 294762 - DNA, 25 bp, Artificial
  probe
  misc_feature (1)..(25): SEQ ID NO: 1457; WAN024DCL; Start 92; Stop 116
agaaagagtcagaaatccagcaatt

SEQ ID NO: 294763 - DNA, 25 bp, Artificial
  probe
  misc_feature (1)..(25): SEQ ID NO: 1457; WAN024DCL; Start 95; Stop 119
aagagtcagaaatccagcaattaag

SEQ ID NO: 294764 - DNA, 25 bp, Artificial
  probe
  misc_feature (1)..(25): SEQ ID NO: 1457; WAN024DCL; Start 93; Stop 117
gaaagagtcagaaatccagcaatta

SEQ ID NO: 294765 - DNA, 25 bp, Artificial
  probe
  misc_feature (1)..(25): SEQ ID NO: 1457; WAN024DCL; Start 238; Stop 262
tcagcagagacagaaactaaactag

SEQ ID NO: 294766 - DNA, 25 bp, Artificial
  probe
  misc_feature (1)..(25): SEQ ID NO: 1457; WAN024DCL; Start 94; Stop 118
aaagagtcagaaatccagcaattaa

SEQ ID NO: 294767 - DNA, 25 bp, Artificial
  probe
  misc_feature (1)..(25): SEQ ID NO: 1457; WAN024DCL; Start 271; Stop 295
cttaaagcaatccttgacaaactca

SEQ ID NO: 294768 - DNA, 25 bp, Artificial
  probe
  misc_feature (1)..(25): SEQ ID NO: 1457; WAN024DCL; Start 28; Stop 52
ggagtgattgtggtcagtctacttg

SEQ ID NO: 294769 - DNA, 25 bp, Artificial
  probe
  misc_feature (1)..(25): SEQ ID NO: 1457; WAN024DCL; Start 27; Stop 51
aggagtgattgtggtcagtctactt

SEQ ID NO: 294770 - DNA, 25 bp, Artificial
  probe
  misc_feature (1)..(25): SEQ ID NO: 1457; WAN024DCL; Start 96; Stop 120
agagtcagaaatccagcaattaagc

SEQ ID NO: 294771 - DNA, 25 bp, Artificial
  probe
  misc_feature (1)..(25): SEQ ID NO: 1457; WAN024DCL; Start 237; Stop 261
ctcagcagagacagaaactaaacta

SEQ ID NO: 294772 - DNA, 25 bp, Artificial
  probe
  misc_feature (1)..(25): SEQ ID NO: 1457; WAN024DCL; Start 97; Stop 121
gagtcagaaatccagcaattaagca

SEQ ID NO: 294773 - DNA, 25 bp, Artificial
  probe
  misc_feature (1)..(25): SEQ ID NO: 1457; WAN024DCL; Start 207; Stop 231
aacccttgatttcgtgaaagaagaa

SEQ ID NO: 294774 - DNA, 25 bp, Artificial
  probe
  misc_feature (1)..(25): SEQ ID NO: 1457; WAN024DCL; Start 206; Stop 230
aaacccttgatttcgtgaaagaaga

SEQ ID NO: 294775 - DNA, 25 bp, Artificial
  probe
  misc_feature (1)..(25): SEQ ID NO: 1457; WAN024DCL; Start 98; Stop 122
agtcagaaatccagcaattaagcac

SEQ ID NO: 294776 - DNA, 25 bp, Artificial
  probe
  misc_feature (1)..(25): SEQ ID NO: 1457; WAN024DCL; Start 29; Stop 53
gagtgattgtggtcagtctacttgc

SEQ ID NO: 294777 - DNA, 25 bp, Artificial
  probe
  misc_feature (1)..(25): SEQ ID NO: 1457; WAN024DCL; Start 26; Stop 50
caggagtgattgtggtcagtctact

SEQ ID NO: 294778 - DNA, 25 bp, Artificial
  probe
  misc_feature (1)..(25): SEQ ID NO: 1457; WAN024DCL; Start 99; Stop 123
gtcagaaatccagcaattaagcacg

SEQ ID NO: 294779 - DNA, 25 bp, Artificial
  probe
  misc_feature (1)..(25): SEQ ID NO: 1457; WAN024DCL; Start 205; Stop 229
gaaacccttgatttcgtgaaagaag

SEQ ID NO: 294780 - DNA, 25 bp, Artificial
  probe
  misc_feature (1)..(25): SEQ ID NO: 1457; WAN024DCL; Start 104; Stop 128
aaatccagcaattaagcacggaatt

SEQ ID NO: 294781 - DNA, 25 bp, Artificial
  probe
  misc_feature (1)..(25): SEQ ID NO: 1457; WAN024DCL; Start 208; Stop 232
acccttgatttcgtgaaagaagaaa

SEQ ID NO: 294782 - DNA, 25 bp, Artificial
  probe
  misc_feature (1)..(25): SEQ ID NO: 1457; WAN024DCL; Start 204; Stop 228
agaaacccttgatttcgtgaaagaa

SEQ ID NO: 294783 - DNA, 25 bp, Artificial
  probe
  misc_feature (1)..(25): SEQ ID NO: 1457; WAN024DCL; Start 203; Stop 227
aagaaacccttgatttcgtgaaaga

SEQ ID NO: 294784 - DNA, 25 bp, Artificial
  probe
  misc_feature (1)..(25): SEQ ID NO: 1457; WAN024DCL; Start 236; Stop 260
gctcagcagagacagaaactaaact

SEQ ID NO: 294785 - DNA, 25 bp, Artificial
  probe
  misc_feature (1)..(25): SEQ ID NO: 1457; WAN024DCL; Start 103; Stop 127
gaaatccagcaattaagcacggaat

SEQ ID NO: 294786 - DNA, 25 bp, Artificial
  probe
  misc_feature (1)..(25): SEQ ID NO: 1457; WAN024DCL; Start 272; Stop 296
ttaaagcaatccttgacaaactcaa

SEQ ID NO: 294787 - DNA, 25 bp, Artificial
  probe
  misc_feature (1)..(25): SEQ ID NO: 1457; WAN024DCL; Start 30; Stop 54
agtgattgtggtcagtctacttgcc

SEQ ID NO: 294788 - DNA, 25 bp, Artificial
  probe
  misc_feature (1)..(25): SEQ ID NO: 1457; WAN024DCL; Start 259; Stop 283
ctagtagaggagcttaaagcaatcc

SEQ ID NO: 294789 - DNA, 25 bp, Artificial
  probe
  misc_feature (1)..(25): SEQ ID NO: 1457; WAN024DCL; Start 270; Stop 294
gcttaaagcaatccttgacaaactc

SEQ ID NO: 294790 - DNA, 25 bp, Artificial
  probe
  misc_feature (1)..(25): SEQ ID NO: 1457; WAN024DCL; Start 268; Stop 292
gagcttaaagcaatccttgacaaac

SEQ ID NO: 294791 - DNA, 25 bp, Artificial
  probe
  misc_feature (1)..(25): SEQ ID NO: 1457; WAN024DCL; Start 100; Stop 124
tcagaaatccagcaattaagcacgg

SEQ ID NO: 294792 - DNA, 25 bp, Artificial
  probe
  misc_feature (1)..(25): SEQ ID NO: 1457; WAN024DCL; Start 269; Stop 293
agcttaaagcaatccttgacaaact

SEQ ID NO: 294793 - DNA, 25 bp, Artificial
  probe
  misc_feature (1)..(25): SEQ ID NO: 1458; WAN024F8Z-5; Start 943; Stop 967
ctcaaggcaacaatcaagtggtata

SEQ ID NO: 294794 - DNA, 25 bp, Artificial
  probe
  misc_feature (1)..(25): SEQ ID NO: 1458; WAN024F8Z-5; Start 685; Stop 709
cataccaatgaccattcttcaggag

SEQ ID NO: 294795 - DNA, 25 bp, Artificial
  probe
  misc_feature (1)..(25): SEQ ID NO: 1458; WAN024F8Z-5; Start 686; Stop 710
ataccaatgaccattcttcaggagt

SEQ ID NO: 294796 - DNA, 25 bp, Artificial
  probe
  misc_feature (1)..(25): SEQ ID NO: 1458; WAN024F8Z-5; Start 687; Stop 711
taccaatgaccattcttcaggagtt

SEQ ID NO: 294797 - DNA, 25 bp, Artificial
  probe
  misc_feature (1)..(25): SEQ ID NO: 1458; WAN024F8Z-5; Start 47; Stop 71
tcggttctaactttgtccattatgt

SEQ ID NO: 294798 - DNA, 25 bp, Artificial
  probe
  misc_feature (1)..(25): SEQ ID NO: 1458; WAN024F8Z-5; Start 46; Stop 70
atcggttctaactttgtccattatg

SEQ ID NO: 294799 - DNA, 25 bp, Artificial
  probe
  misc_feature (1)..(25): SEQ ID NO: 1458; WAN024F8Z-5; Start 283; Stop 307
ccatcgccatttattcatactaact

SEQ ID NO: 294800 - DNA, 25 bp, Artificial
  probe
  misc_feature (1)..(25): SEQ ID NO: 1458; WAN024F8Z-5; Start 282; Stop 306
tccatcgccatttattcatactaac

SEQ ID NO: 294801 - DNA, 25 bp, Artificial
  probe
  misc_feature (1)..(25): SEQ ID NO: 1458; WAN024F8Z-5; Start 42; Stop 66
ctttatcggttctaactttgtccat

SEQ ID NO: 294802 - DNA, 25 bp, Artificial
  probe
  misc_feature (1)..(25): SEQ ID NO: 1458; WAN024F8Z-5; Start 554; Stop 578
tttccaactgttcaaataactacgg

SEQ ID NO: 294803 - DNA, 25 bp, Artificial
  probe
  misc_feature (1)..(25): SEQ ID NO: 1458; WAN024F8Z-5; Start 560; Stop 584
actgttcaaataactacggtcctta

SEQ ID NO: 294804 - DNA, 25 bp, Artificial
  probe
  misc_feature (1)..(25): SEQ ID NO: 1458; WAN024F8Z-5; Start 559; Stop 583
aactgttcaaataactacggtcctt

SEQ ID NO: 294805 - DNA, 25 bp, Artificial
  probe
  misc_feature (1)..(25): SEQ ID NO: 1458; WAN024F8Z-5; Start 48; Stop 72
cggttctaactttgtccattatgtt

SEQ ID NO: 294806 - DNA, 25 bp, Artificial
  probe
  misc_feature (1)..(25): SEQ ID NO: 1458; WAN024F8Z-5; Start 555; Stop 579
ttccaactgttcaaataactacggt

SEQ ID NO: 294807 - DNA, 25 bp, Artificial
  probe
  misc_feature (1)..(25): SEQ ID NO: 1458; WAN024F8Z-5; Start 63; Stop 87
ccattatgtttacgagaactttcca

SEQ ID NO: 294808 - DNA, 25 bp, Artificial
  probe
  misc_feature (1)..(25): SEQ ID NO: 1458; WAN024F8Z-5; Start 56; Stop 80
actttgtccattatgtttacgagaa

SEQ ID NO: 294809 - DNA, 25 bp, Artificial
  probe
  misc_feature (1)..(25): SEQ ID NO: 1458; WAN024F8Z-5; Start 43; Stop 67
tttatcggttctaactttgtccatt

SEQ ID NO: 294810 - DNA, 25 bp, Artificial
  probe
  misc_feature (1)..(25): SEQ ID NO: 1458; WAN024F8Z-5; Start 41; Stop 65
gctttatcggttctaactttgtcca

SEQ ID NO: 294811 - DNA, 25 bp, Artificial
  probe
  misc_feature (1)..(25): SEQ ID NO: 1458; WAN024F8Z-5; Start 39; Stop 63
tggctttatcggttctaactttgtc

SEQ ID NO: 294812 - DNA, 25 bp, Artificial
  probe
  misc_feature (1)..(25): SEQ ID NO: 1458; WAN024F8Z-5; Start 38; Stop 62
ctggctttatcggttctaactttgt

SEQ ID NO: 294813 - DNA, 25 bp, Artificial
  probe
  misc_feature (1)..(25): SEQ ID NO: 1458; WAN024F8Z-5; Start 62; Stop 86
tccattatgtttacgagaactttcc

SEQ ID NO: 294814 - DNA, 25 bp, Artificial
  probe
  misc_feature (1)..(25): SEQ ID NO: 1458; WAN024F8Z-5; Start 949; Stop 973
gcaacaatcaagtggtatacagata

SEQ ID NO: 294815 - DNA, 25 bp, Artificial
  probe
  misc_feature (1)..(25): SEQ ID NO: 1458; WAN024F8Z-5; Start 948; Stop 972
ggcaacaatcaagtggtatacagat

SEQ ID NO: 294816 - DNA, 25 bp, Artificial
  probe
  misc_feature (1)..(25): SEQ ID NO: 1458; WAN024F8Z-5; Start 558; Stop 582
caactgttcaaataactacggtcct

SEQ ID NO: 294817 - DNA, 25 bp, Artificial
  probe
  misc_feature (1)..(25): SEQ ID NO: 1458; WAN024F8Z-5; Start 556; Stop 580
tccaactgttcaaataactacggtc

SEQ ID NO: 294818 - DNA, 25 bp, Artificial
  probe
  misc_feature (1)..(25): SEQ ID NO: 1458; WAN024F8Z-5; Start 946; Stop 970
aaggcaacaatcaagtggtatacag

SEQ ID NO: 294819 - DNA, 25 bp, Artificial
  probe
  misc_feature (1)..(25): SEQ ID NO: 1458; WAN024F8Z-5; Start 944; Stop 968
tcaaggcaacaatcaagtggtatac

SEQ ID NO: 294820 - DNA, 25 bp, Artificial
  probe
  misc_feature (1)..(25): SEQ ID NO: 1458; WAN024F8Z-5; Start 286; Stop 310
tcgccatttattcatactaacttca

SEQ ID NO: 294821 - DNA, 25 bp, Artificial
  probe
  misc_feature (1)..(25): SEQ ID NO: 1458; WAN024F8Z-5; Start 945; Stop 969
caaggcaacaatcaagtggtataca

SEQ ID NO: 294822 - DNA, 25 bp, Artificial
  probe
  misc_feature (1)..(25): SEQ ID NO: 1458; WAN024F8Z-5; Start 60; Stop 84
tgtccattatgtttacgagaacttt

SEQ ID NO: 294823 - DNA, 25 bp, Artificial
  probe
  misc_feature (1)..(25): SEQ ID NO: 1458; WAN024F8Z-5; Start 59; Stop 83
ttgtccattatgtttacgagaactt

SEQ ID NO: 294824 - DNA, 25 bp, Artificial
  probe
  misc_feature (1)..(25): SEQ ID NO: 1458; WAN024F8Z-5; Start 58; Stop 82
tttgtccattatgtttacgagaact

SEQ ID NO: 294825 - DNA, 25 bp, Artificial
  probe
  misc_feature (1)..(25): SEQ ID NO: 1458; WAN024F8Z-5; Start 55; Stop 79
aactttgtccattatgtttacgaga

SEQ ID NO: 294826 - DNA, 25 bp, Artificial
  probe
  misc_feature (1)..(25): SEQ ID NO: 1459; WAN024DWZ; Start 285; Stop 309
ctctctaacatctcgtgacatcatc

SEQ ID NO: 294827 - DNA, 25 bp, Artificial
  probe
  misc_feature (1)..(25): SEQ ID NO: 1459; WAN024DWZ; Start 880; Stop 904
gaggacttcaatacgattcaagaac

SEQ ID NO: 294828 - DNA, 25 bp, Artificial
  probe
  misc_feature (1)..(25): SEQ ID NO: 1459; WAN024DWZ; Start 284; Stop 308
tctctctaacatctcgtgacatcat

SEQ ID NO: 294829 - DNA, 25 bp, Artificial
  probe
  misc_feature (1)..(25): SEQ ID NO: 1459; WAN024DWZ; Start 283; Stop 307
ttctctctaacatctcgtgacatca

SEQ ID NO: 294830 - DNA, 25 bp, Artificial
  probe
  misc_feature (1)..(25): SEQ ID NO: 1459; WAN024DWZ; Start 722; Stop 746
ttgttaagatgttggaacttggtct

SEQ ID NO: 294831 - DNA, 25 bp, Artificial
  probe
  misc_feature (1)..(25): SEQ ID NO: 1459; WAN024DWZ; Start 721; Stop 745
gttgttaagatgttggaacttggtc

SEQ ID NO: 294832 - DNA, 25 bp, Artificial
  probe
  misc_feature (1)..(25): SEQ ID NO: 1459; WAN024DWZ; Start 719; Stop 743
ctgttgttaagatgttggaacttgg

SEQ ID NO: 294833 - DNA, 25 bp, Artificial
  probe
  misc_feature (1)..(25): SEQ ID NO: 1459; WAN024DWZ; Start 725; Stop 749
ttaagatgttggaacttggtctcaa

SEQ ID NO: 294834 - DNA, 25 bp, Artificial
  probe
  misc_feature (1)..(25): SEQ ID NO: 1459; WAN024DWZ; Start 724; Stop 748
gttaagatgttggaacttggtctca

SEQ ID NO: 294835 - DNA, 25 bp, Artificial
  probe
  misc_feature (1)..(25): SEQ ID NO: 1459; WAN024DWZ; Start 723; Stop 747
tgttaagatgttggaacttggtctc

SEQ ID NO: 294836 - DNA, 25 bp, Artificial
  probe
  misc_feature (1)..(25): SEQ ID NO: 1459; WAN024DWZ; Start 879; Stop 903
tgaggacttcaatacgattcaagaa

SEQ ID NO: 294837 - DNA, 25 bp, Artificial
  probe
  misc_feature (1)..(25): SEQ ID NO: 1459; WAN024DWZ; Start 881; Stop 905
aggacttcaatacgattcaagaacg

SEQ ID NO: 294838 - DNA, 25 bp, Artificial
  probe
  misc_feature (1)..(25): SEQ ID NO: 1459; WAN024DWZ; Start 720; Stop 744
tgttgttaagatgttggaacttggt

SEQ ID NO: 294839 - DNA, 25 bp, Artificial
  probe
  misc_feature (1)..(25): SEQ ID NO: 1459; WAN024DWZ; Start 718; Stop 742
gctgttgttaagatgttggaacttg

SEQ ID NO: 294840 - DNA, 25 bp, Artificial
  probe
  misc_feature (1)..(25): SEQ ID NO: 1459; WAN024DWZ; Start 388; Stop 412
cctggatctatgattgctattgcta

SEQ ID NO: 294841 - DNA, 25 bp, Artificial
  probe
  misc_feature (1)..(25): SEQ ID NO: 1459; WAN024DWZ; Start 717; Stop 741
tgctgttgttaagatgttggaactt

SEQ ID NO: 294842 - DNA, 25 bp, Artificial
  probe
  misc_feature (1)..(25): SEQ ID NO: 1459; WAN024DWZ; Start 385; Stop 409
atgcctggatctatgattgctattg

SEQ ID NO: 294843 - DNA, 25 bp, Artificial
  probe
  misc_feature (1)..(25): SEQ ID NO: 1459; WAN024DWZ; Start 286; Stop 310
tctctaacatctcgtgacatcatcg

SEQ ID NO: 294844 - DNA, 25 bp, Artificial
  probe
  misc_feature (1)..(25): SEQ ID NO: 1459; WAN024DWZ; Start 384; Stop 408
catgcctggatctatgattgctatt

SEQ ID NO: 294845 - DNA, 25 bp, Artificial
  probe
  misc_feature (1)..(25): SEQ ID NO: 1459; WAN024DWZ; Start 716; Stop 740
gtgctgttgttaagatgttggaact

SEQ ID NO: 294846 - DNA, 25 bp, Artificial
  probe
  misc_feature (1)..(25): SEQ ID NO: 1459; WAN024DWZ; Start 1673; Stop 1697
tctggaatatggacaagtcaggtaa

SEQ ID NO: 294847 - DNA, 25 bp, Artificial
  probe
  misc_feature (1)..(25): SEQ ID NO: 1459; WAN024DWZ; Start 1672; Stop 1696
ttctggaatatggacaagtcaggta

SEQ ID NO: 294848 - DNA, 25 bp, Artificial
  probe
  misc_feature (1)..(25): SEQ ID NO: 1459; WAN024DWZ; Start 389; Stop 413
ctggatctatgattgctattgctaa

SEQ ID NO: 294849 - DNA, 25 bp, Artificial
  probe
  misc_feature (1)..(25): SEQ ID NO: 1459; WAN024DWZ; Start 379; Stop 403
aagaacatgcctggatctatgattg

SEQ ID NO: 294850 - DNA, 25 bp, Artificial
  probe
  misc_feature (1)..(25): SEQ ID NO: 1459; WAN024DWZ; Start 378; Stop 402
caagaacatgcctggatctatgatt

SEQ ID NO: 294851 - DNA, 25 bp, Artificial
  probe
  misc_feature (1)..(25): SEQ ID NO: 1459; WAN024DWZ; Start 1431; Stop 1455
ttatggtctggttgttggacatatc

SEQ ID NO: 294852 - DNA, 25 bp, Artificial
  probe
  misc_feature (1)..(25): SEQ ID NO: 1459; WAN024DWZ; Start 1430; Stop 1454
cttatggtctggttgttggacatat

SEQ ID NO: 294853 - DNA, 25 bp, Artificial
  probe
  misc_feature (1)..(25): SEQ ID NO: 1459; WAN024DWZ; Start 1505; Stop 1529
atatcgttacggttgaccaagatac

SEQ ID NO: 294854 - DNA, 25 bp, Artificial
  probe
  misc_feature (1)..(25): SEQ ID NO: 1459; WAN024DWZ; Start 1428; Stop 1452
tacttatggtctggttgttggacat

SEQ ID NO: 294855 - DNA, 25 bp, Artificial
  probe
  misc_feature (1)..(25): SEQ ID NO: 1459; WAN024DWZ; Start 1035; Stop 1059
atgtactggtaagactgtagctgaa

SEQ ID NO: 294856 - DNA, 25 bp, Artificial
  probe
  misc_feature (1)..(25): SEQ ID NO: 1459; WAN024DWZ; Start 80; Stop 104
cgactggtatgacagataaggactt

SEQ ID NO: 294857 - DNA, 25 bp, Artificial
  probe
  misc_feature (1)..(25): SEQ ID NO: 1459; WAN024DWZ; Start 383; Stop 407
acatgcctggatctatgattgctat

SEQ ID NO: 294858 - DNA, 25 bp, Artificial
  probe
  misc_feature (1)..(25): SEQ ID NO: 1459; WAN024DWZ; Start 390; Stop 414
tggatctatgattgctattgctaat

SEQ ID NO: 294859 - DNA, 25 bp, Artificial
  probe
  misc_feature (1)..(25): SEQ ID NO: 1460; WAN024EXD; Start 70; Stop 94
catctcaccgaccaattcttctctt

SEQ ID NO: 294860 - DNA, 25 bp, Artificial
  probe
  misc_feature (1)..(25): SEQ ID NO: 1460; WAN024EXD; Start 230; Stop 254
ttattatgagtagcagctcggtaag

SEQ ID NO: 294861 - DNA, 25 bp, Artificial
  probe
  misc_feature (1)..(25): SEQ ID NO: 1460; WAN024EXD; Start 116; Stop 140
ctaagaccttgatagcgtccatctc

SEQ ID NO: 294862 - DNA, 25 bp, Artificial
  probe
  misc_feature (1)..(25): SEQ ID NO: 1460; WAN024EXD; Start 231; Stop 255
tattatgagtagcagctcggtaagg

SEQ ID NO: 294863 - DNA, 25 bp, Artificial
  probe
  misc_feature (1)..(25): SEQ ID NO: 1460; WAN024EXD; Start 69; Stop 93
tcatctcaccgaccaattcttctct

SEQ ID NO: 294864 - DNA, 25 bp, Artificial
  probe
  misc_feature (1)..(25): SEQ ID NO: 1460; WAN024EXD; Start 81; Stop 105
ccaattcttctctttcaaggtccag

SEQ ID NO: 294865 - DNA, 25 bp, Artificial
  probe
  misc_feature (1)..(25): SEQ ID NO: 1460; WAN024EXD; Start 71; Stop 95
atctcaccgaccaattcttctcttt

SEQ ID NO: 294866 - DNA, 25 bp, Artificial
  probe
  misc_feature (1)..(25): SEQ ID NO: 1460; WAN024EXD; Start 82; Stop 106
caattcttctctttcaaggtccagc

SEQ ID NO: 294867 - DNA, 25 bp, Artificial
  probe
  misc_feature (1)..(25): SEQ ID NO: 1460; WAN024EXD; Start 75; Stop 99
caccgaccaattcttctctttcaag

SEQ ID NO: 294868 - DNA, 25 bp, Artificial
  probe
  misc_feature (1)..(25): SEQ ID NO: 1460; WAN024EXD; Start 74; Stop 98
tcaccgaccaattcttctctttcaa

SEQ ID NO: 294869 - DNA, 25 bp, Artificial
  probe
  misc_feature (1)..(25): SEQ ID NO: 1460; WAN024EXD; Start 68; Stop 92
gtcatctcaccgaccaattcttctc

SEQ ID NO: 294870 - DNA, 25 bp, Artificial
  probe
  misc_feature (1)..(25): SEQ ID NO: 1460; WAN024EXD; Start 222; Stop 246
aaattcctttattatgagtagcagc

SEQ ID NO: 294871 - DNA, 25 bp, Artificial
  probe
  misc_feature (1)..(25): SEQ ID NO: 1460; WAN024EXD; Start 72; Stop 96
tctcaccgaccaattcttctctttc

SEQ ID NO: 294872 - DNA, 25 bp, Artificial
  probe
  misc_feature (1)..(25): SEQ ID NO: 1460; WAN024EXD; Start 73; Stop 97
ctcaccgaccaattcttctctttca

SEQ ID NO: 294873 - DNA, 25 bp, Artificial
  probe
  misc_feature (1)..(25): SEQ ID NO: 1460; WAN024EXD; Start 228; Stop 252
ctttattatgagtagcagctcggta

SEQ ID NO: 294874 - DNA, 25 bp, Artificial
  probe
  misc_feature (1)..(25): SEQ ID NO: 1460; WAN024EXD; Start 229; Stop 253
tttattatgagtagcagctcggtaa

SEQ ID NO: 294875 - DNA, 25 bp, Artificial
  probe
  misc_feature (1)..(25): SEQ ID NO: 1460; WAN024EXD; Start 225; Stop 249
ttcctttattatgagtagcagctcg

SEQ ID NO: 294876 - DNA, 25 bp, Artificial
  probe
  misc_feature (1)..(25): SEQ ID NO: 1460; WAN024EXD; Start 233; Stop 257
ttatgagtagcagctcggtaaggat

SEQ ID NO: 294877 - DNA, 25 bp, Artificial
  probe
  misc_feature (1)..(25): SEQ ID NO: 1460; WAN024EXD; Start 232; Stop 256
attatgagtagcagctcggtaagga

SEQ ID NO: 294878 - DNA, 25 bp, Artificial
  probe
  misc_feature (1)..(25): SEQ ID NO: 1460; WAN024EXD; Start 223; Stop 247
aattcctttattatgagtagcagct

SEQ ID NO: 294879 - DNA, 25 bp, Artificial
  probe
  misc_feature (1)..(25): SEQ ID NO: 1460; WAN024EXD; Start 405; Stop 429
tctgtccctgactgagttcttctaa

SEQ ID NO: 294880 - DNA, 25 bp, Artificial
  probe
  misc_feature (1)..(25): SEQ ID NO: 1460; WAN024EXD; Start 76; Stop 100
accgaccaattcttctctttcaagg

SEQ ID NO: 294881 - DNA, 25 bp, Artificial
  probe
  misc_feature (1)..(25): SEQ ID NO: 1460; WAN024EXD; Start 117; Stop 141
taagaccttgatagcgtccatctcg

SEQ ID NO: 294882 - DNA, 25 bp, Artificial
  probe
  misc_feature (1)..(25): SEQ ID NO: 1460; WAN024EXD; Start 224; Stop 248
attcctttattatgagtagcagctc

SEQ ID NO: 294883 - DNA, 25 bp, Artificial
  probe
  misc_feature (1)..(25): SEQ ID NO: 1460; WAN024EXD; Start 234; Stop 258
tatgagtagcagctcggtaaggatc

SEQ ID NO: 294884 - DNA, 25 bp, Artificial
  probe
  misc_feature (1)..(25): SEQ ID NO: 1460; WAN024EXD; Start 80; Stop 104
accaattcttctctttcaaggtcca

SEQ ID NO: 294885 - DNA, 25 bp, Artificial
  probe
  misc_feature (1)..(25): SEQ ID NO: 1460; WAN024EXD; Start 404; Stop 428
ctctgtccctgactgagttcttcta

SEQ ID NO: 294886 - DNA, 25 bp, Artificial
  probe
  misc_feature (1)..(25): SEQ ID NO: 1460; WAN024EXD; Start 83; Stop 107
aattcttctctttcaaggtccagcg

SEQ ID NO: 294887 - DNA, 25 bp, Artificial
  probe
  misc_feature (1)..(25): SEQ ID NO: 1460; WAN024EXD; Start 195; Stop 219
caatcaaaatcgcatcaataccatt

SEQ ID NO: 294888 - DNA, 25 bp, Artificial
  probe
  misc_feature (1)..(25): SEQ ID NO: 1460; WAN024EXD; Start 194; Stop 218
gcaatcaaaatcgcatcaataccat

SEQ ID NO: 294889 - DNA, 25 bp, Artificial
  probe
  misc_feature (1)..(25): SEQ ID NO: 1460; WAN024EXD; Start 226; Stop 250
tcctttattatgagtagcagctcgg

SEQ ID NO: 294890 - DNA, 25 bp, Artificial
  probe
  misc_feature (1)..(25): SEQ ID NO: 1460; WAN024EXD; Start 227; Stop 251
cctttattatgagtagcagctcggt

SEQ ID NO: 294891 - DNA, 25 bp, Artificial
  probe
  misc_feature (1)..(25): SEQ ID NO: 1460; WAN024EXD; Start 181; Stop 205
gtcattaccagtggcaatcaaaatc

SEQ ID NO: 294892 - DNA, 25 bp, Artificial
  probe
  misc_feature (1)..(25): SEQ ID NO: 1461; WAN024GCX; Start 258; Stop 282
cacggttaatatccacataggcatt

SEQ ID NO: 294893 - DNA, 25 bp, Artificial
  probe
  misc_feature (1)..(25): SEQ ID NO: 1461; WAN024GCX; Start 257; Stop 281
acacggttaatatccacataggcat

SEQ ID NO: 294894 - DNA, 25 bp, Artificial
  probe
  misc_feature (1)..(25): SEQ ID NO: 1461; WAN024GCX; Start 256; Stop 280
cacacggttaatatccacataggca

SEQ ID NO: 294895 - DNA, 25 bp, Artificial
  probe
  misc_feature (1)..(25): SEQ ID NO: 1461; WAN024GCX; Start 260; Stop 284
cggttaatatccacataggcatttg

SEQ ID NO: 294896 - DNA, 25 bp, Artificial
  probe
  misc_feature (1)..(25): SEQ ID NO: 1461; WAN024GCX; Start 259; Stop 283
acggttaatatccacataggcattt

SEQ ID NO: 294897 - DNA, 25 bp, Artificial
  probe
  misc_feature (1)..(25): SEQ ID NO: 1461; WAN024GCX; Start 255; Stop 279
ccacacggttaatatccacataggc

SEQ ID NO: 294898 - DNA, 25 bp, Artificial
  probe
  misc_feature (1)..(25): SEQ ID NO: 1461; WAN024GCX; Start 254; Stop 278
accacacggttaatatccacatagg

SEQ ID NO: 294899 - DNA, 25 bp, Artificial
  probe
  misc_feature (1)..(25): SEQ ID NO: 1461; WAN024GCX; Start 261; Stop 285
ggttaatatccacataggcatttgt

SEQ ID NO: 294900 - DNA, 25 bp, Artificial
  probe
  misc_feature (1)..(25): SEQ ID NO: 1461; WAN024GCX; Start 231; Stop 255
caatctctgcaatggtatcacgaac

SEQ ID NO: 294901 - DNA, 25 bp, Artificial
  probe
  misc_feature (1)..(25): SEQ ID NO: 1461; WAN024GCX; Start 268; Stop 292
atccacataggcatttgtagaaatt

SEQ ID NO: 294902 - DNA, 25 bp, Artificial
  probe
  misc_feature (1)..(25): SEQ ID NO: 1461; WAN024GCX; Start 24; Stop 48
gcataagctcttctgtttcatctac

SEQ ID NO: 294903 - DNA, 25 bp, Artificial
  probe
  misc_feature (1)..(25): SEQ ID NO: 1461; WAN024GCX; Start 27; Stop 51
taagctcttctgtttcatctactgc

SEQ ID NO: 294904 - DNA, 25 bp, Artificial
  probe
  misc_feature (1)..(25): SEQ ID NO: 1461; WAN024GCX; Start 23; Stop 47
ggcataagctcttctgtttcatcta

SEQ ID NO: 294905 - DNA, 25 bp, Artificial
  probe
  misc_feature (1)..(25): SEQ ID NO: 1461; WAN024GCX; Start 267; Stop 291
tatccacataggcatttgtagaaat

SEQ ID NO: 294906 - DNA, 25 bp, Artificial
  probe
  misc_feature (1)..(25): SEQ ID NO: 1461; WAN024GCX; Start 266; Stop 290
atatccacataggcatttgtagaaa

SEQ ID NO: 294907 - DNA, 25 bp, Artificial
  probe
  misc_feature (1)..(25): SEQ ID NO: 1461; WAN024GCX; Start 265; Stop 289
aatatccacataggcatttgtagaa

SEQ ID NO: 294908 - DNA, 25 bp, Artificial
  probe
  misc_feature (1)..(25): SEQ ID NO: 1461; WAN024GCX; Start 20; Stop 44
aatggcataagctcttctgtttcat

SEQ ID NO: 294909 - DNA, 25 bp, Artificial
  probe
  misc_feature (1)..(25): SEQ ID NO: 1461; WAN024GCX; Start 36; Stop 60
ctgtttcatctactgcaaatccaaa

SEQ ID NO: 294910 - DNA, 25 bp, Artificial
  probe
  misc_feature (1)..(25): SEQ ID NO: 1461; WAN024GCX; Start 33; Stop 57
cttctgtttcatctactgcaaatcc

SEQ ID NO: 294911 - DNA, 25 bp, Artificial
  probe
  misc_feature (1)..(25): SEQ ID NO: 1461; WAN024GCX; Start 39; Stop 63
tttcatctactgcaaatccaaacat

SEQ ID NO: 294912 - DNA, 25 bp, Artificial
  probe
  misc_feature (1)..(25): SEQ ID NO: 1461; WAN024GCX; Start 32; Stop 56
tcttctgtttcatctactgcaaatc

SEQ ID NO: 294913 - DNA, 25 bp, Artificial
  probe
  misc_feature (1)..(25): SEQ ID NO: 1461; WAN024GCX; Start 144; Stop 168
cttgagcgatgtcaggagattgttc

SEQ ID NO: 294914 - DNA, 25 bp, Artificial
  probe
  misc_feature (1)..(25): SEQ ID NO: 1461; WAN024GCX; Start 35; Stop 59
tctgtttcatctactgcaaatccaa

SEQ ID NO: 294915 - DNA, 25 bp, Artificial
  probe
  misc_feature (1)..(25): SEQ ID NO: 1461; WAN024GCX; Start 34; Stop 58
ttctgtttcatctactgcaaatcca

SEQ ID NO: 294916 - DNA, 25 bp, Artificial
  probe
  misc_feature (1)..(25): SEQ ID NO: 1461; WAN024GCX; Start 31; Stop 55
ctcttctgtttcatctactgcaaat

SEQ ID NO: 294917 - DNA, 25 bp, Artificial
  probe
  misc_feature (1)..(25): SEQ ID NO: 1461; WAN024GCX; Start 40; Stop 64
ttcatctactgcaaatccaaacatg

SEQ ID NO: 294918 - DNA, 25 bp, Artificial
  probe
  misc_feature (1)..(25): SEQ ID NO: 1461; WAN024GCX; Start 26; Stop 50
ataagctcttctgtttcatctactg

SEQ ID NO: 294919 - DNA, 25 bp, Artificial
  probe
  misc_feature (1)..(25): SEQ ID NO: 1461; WAN024GCX; Start 25; Stop 49
cataagctcttctgtttcatctact

SEQ ID NO: 294920 - DNA, 25 bp, Artificial
  probe
  misc_feature (1)..(25): SEQ ID NO: 1461; WAN024GCX; Start 21; Stop 45
atggcataagctcttctgtttcatc

SEQ ID NO: 294921 - DNA, 25 bp, Artificial
  probe
  misc_feature (1)..(25): SEQ ID NO: 1461; WAN024GCX; Start 42; Stop 66
catctactgcaaatccaaacatgag

SEQ ID NO: 294922 - DNA, 25 bp, Artificial
  probe
  misc_feature (1)..(25): SEQ ID NO: 1461; WAN024GCX; Start 13; Stop 37
aattggcaatggcataagctcttct

SEQ ID NO: 294923 - DNA, 25 bp, Artificial
  probe
  misc_feature (1)..(25): SEQ ID NO: 1461; WAN024GCX; Start 19; Stop 43
caatggcataagctcttctgtttca

SEQ ID NO: 294924 - DNA, 25 bp, Artificial
  probe
  misc_feature (1)..(25): SEQ ID NO: 1461; WAN024GCX; Start 30; Stop 54
gctcttctgtttcatctactgcaaa

SEQ ID NO: 294925 - DNA, 25 bp, Artificial
  probe
  misc_feature (1)..(25): SEQ ID NO: 1462; WAN024F4B; Start 50; Stop 74
gttggacctactactatcacttgaa

SEQ ID NO: 294926 - DNA, 25 bp, Artificial
  probe
  misc_feature (1)..(25): SEQ ID NO: 1462; WAN024F4B; Start 47; Stop 71
ctcgttggacctactactatcactt

SEQ ID NO: 294927 - DNA, 25 bp, Artificial
  probe
  misc_feature (1)..(25): SEQ ID NO: 1462; WAN024F4B; Start 48; Stop 72
tcgttggacctactactatcacttg

SEQ ID NO: 294928 - DNA, 25 bp, Artificial
  probe
  misc_feature (1)..(25): SEQ ID NO: 1462; WAN024F4B; Start 49; Stop 73
cgttggacctactactatcacttga

SEQ ID NO: 294929 - DNA, 25 bp, Artificial
  probe
  misc_feature (1)..(25): SEQ ID NO: 1462; WAN024F4B; Start 43; Stop 67
ctagctcgttggacctactactatc

SEQ ID NO: 294930 - DNA, 25 bp, Artificial
  probe
  misc_feature (1)..(25): SEQ ID NO: 1462; WAN024F4B; Start 182; Stop 206
gaaatcgtggttatctggtaaatca

SEQ ID NO: 294931 - DNA, 25 bp, Artificial
  probe
  misc_feature (1)..(25): SEQ ID NO: 1462; WAN024F4B; Start 53; Stop 77
ggacctactactatcacttgaaaca

SEQ ID NO: 294932 - DNA, 25 bp, Artificial
  probe
  misc_feature (1)..(25): SEQ ID NO: 1462; WAN024F4B; Start 52; Stop 76
tggacctactactatcacttgaaac

SEQ ID NO: 294933 - DNA, 25 bp, Artificial
  probe
  misc_feature (1)..(25): SEQ ID NO: 1462; WAN024F4B; Start 176; Stop 200
aactaagaaatcgtggttatctggt

SEQ ID NO: 294934 - DNA, 25 bp, Artificial
  probe
  misc_feature (1)..(25): SEQ ID NO: 1462; WAN024F4B; Start 44; Stop 68
tagctcgttggacctactactatca

SEQ ID NO: 294935 - DNA, 25 bp, Artificial
  probe
  misc_feature (1)..(25): SEQ ID NO: 1462; WAN024F4B; Start 42; Stop 66
actagctcgttggacctactactat

SEQ ID NO: 294936 - DNA, 25 bp, Artificial
  probe
  misc_feature (1)..(25): SEQ ID NO: 1462; WAN024F4B; Start 175; Stop 199
gaactaagaaatcgtggttatctgg

SEQ ID NO: 294937 - DNA, 25 bp, Artificial
  probe
  misc_feature (1)..(25): SEQ ID NO: 1462; WAN024F4B; Start 298; Stop 322
aagaaggcagagaatctcattcaag

SEQ ID NO: 294938 - DNA, 25 bp, Artificial
  probe
  misc_feature (1)..(25): SEQ ID NO: 1462; WAN024F4B; Start 51; Stop 75
ttggacctactactatcacttgaaa

SEQ ID NO: 294939 - DNA, 25 bp, Artificial
  probe
  misc_feature (1)..(25): SEQ ID NO: 1462; WAN024F4B; Start 177; Stop 201
actaagaaatcgtggttatctggta

SEQ ID NO: 294940 - DNA, 25 bp, Artificial
  probe
  misc_feature (1)..(25): SEQ ID NO: 1462; WAN024F4B; Start 46; Stop 70
gctcgttggacctactactatcact

SEQ ID NO: 294941 - DNA, 25 bp, Artificial
  probe
  misc_feature (1)..(25): SEQ ID NO: 1462; WAN024F4B; Start 183; Stop 207
aaatcgtggttatctggtaaatcat

SEQ ID NO: 294942 - DNA, 25 bp, Artificial
  probe
  misc_feature (1)..(25): SEQ ID NO: 1462; WAN024F4B; Start 181; Stop 205
agaaatcgtggttatctggtaaatc

SEQ ID NO: 294943 - DNA, 25 bp, Artificial
  probe
  misc_feature (1)..(25): SEQ ID NO: 1462; WAN024F4B; Start 174; Stop 198
agaactaagaaatcgtggttatctg

SEQ ID NO: 294944 - DNA, 25 bp, Artificial
  probe
  misc_feature (1)..(25): SEQ ID NO: 1462; WAN024F4B; Start 180; Stop 204
aagaaatcgtggttatctggtaaat

SEQ ID NO: 294945 - DNA, 25 bp, Artificial
  probe
  misc_feature (1)..(25): SEQ ID NO: 1462; WAN024F4B; Start 178; Stop 202
ctaagaaatcgtggttatctggtaa

SEQ ID NO: 294946 - DNA, 25 bp, Artificial
  probe
  misc_feature (1)..(25): SEQ ID NO: 1462; WAN024F4B; Start 184; Stop 208
aatcgtggttatctggtaaatcata

SEQ ID NO: 294947 - DNA, 25 bp, Artificial
  probe
  misc_feature (1)..(25): SEQ ID NO: 1462; WAN024F4B; Start 138; Stop 162
acacaagggaaattatgcttatcgc

SEQ ID NO: 294948 - DNA, 25 bp, Artificial
  probe
  misc_feature (1)..(25): SEQ ID NO: 1462; WAN024F4B; Start 186; Stop 210
tcgtggttatctggtaaatcataaa

SEQ ID NO: 294949 - DNA, 25 bp, Artificial
  probe
  misc_feature (1)..(25): SEQ ID NO: 1462; WAN024F4B; Start 179; Stop 203
taagaaatcgtggttatctggtaaa

SEQ ID NO: 294950 - DNA, 25 bp, Artificial
  probe
  misc_feature (1)..(25): SEQ ID NO: 1462; WAN024F4B; Start 185; Stop 209
atcgtggttatctggtaaatcataa

SEQ ID NO: 294951 - DNA, 25 bp, Artificial
  probe
  misc_feature (1)..(25): SEQ ID NO: 1462; WAN024F4B; Start 61; Stop 85
tactatcacttgaaacagctagaca

SEQ ID NO: 294952 - DNA, 25 bp, Artificial
  probe
  misc_feature (1)..(25): SEQ ID NO: 1462; WAN024F4B; Start 168; Stop 192
tcatttagaactaagaaatcgtggt

SEQ ID NO: 294953 - DNA, 25 bp, Artificial
  probe
  misc_feature (1)..(25): SEQ ID NO: 1462; WAN024F4B; Start 121; Stop 145
caatccatctttatcgaacacaagg

SEQ ID NO: 294954 - DNA, 25 bp, Artificial
  probe
  misc_feature (1)..(25): SEQ ID NO: 1462; WAN024F4B; Start 126; Stop 150
catctttatcgaacacaagggaaat

SEQ ID NO: 294955 - DNA, 25 bp, Artificial
  probe
  misc_feature (1)..(25): SEQ ID NO: 1462; WAN024F4B; Start 62; Stop 86
actatcacttgaaacagctagacaa

SEQ ID NO: 294956 - DNA, 25 bp, Artificial
  probe
  misc_feature (1)..(25): SEQ ID NO: 1462; WAN024F4B; Start 120; Stop 144
tcaatccatctttatcgaacacaag

SEQ ID NO: 294957 - DNA, 25 bp, Artificial
  probe
  misc_feature (1)..(25): SEQ ID NO: 1462; WAN024F4B; Start 60; Stop 84
ctactatcacttgaaacagctagac

SEQ ID NO: 294958 - DNA, 25 bp, Artificial
  probe
  misc_feature (1)..(25): SEQ ID NO: 1463; WAN024B2N; Start 556; Stop 580
ggcaatatcaacacgattcttatca

SEQ ID NO: 294959 - DNA, 25 bp, Artificial
  probe
  misc_feature (1)..(25): SEQ ID NO: 1463; WAN024B2N; Start 555; Stop 579
tggcaatatcaacacgattcttatc

SEQ ID NO: 294960 - DNA, 25 bp, Artificial
  probe
  misc_feature (1)..(25): SEQ ID NO: 1463; WAN024B2N; Start 554; Stop 578
ctggcaatatcaacacgattcttat

SEQ ID NO: 294961 - DNA, 25 bp, Artificial
  probe
  misc_feature (1)..(25): SEQ ID NO: 1463; WAN024B2N; Start 572; Stop 596
ttcttatcatcggttcttagagagt

SEQ ID NO: 294962 - DNA, 25 bp, Artificial
  probe
  misc_feature (1)..(25): SEQ ID NO: 1463; WAN024B2N; Start 553; Stop 577
gctggcaatatcaacacgattctta

SEQ ID NO: 294963 - DNA, 25 bp, Artificial
  probe
  misc_feature (1)..(25): SEQ ID NO: 1463; WAN024B2N; Start 557; Stop 581
gcaatatcaacacgattcttatcat

SEQ ID NO: 294964 - DNA, 25 bp, Artificial
  probe
  misc_feature (1)..(25): SEQ ID NO: 1463; WAN024B2N; Start 573; Stop 597
tcttatcatcggttcttagagagta

SEQ ID NO: 294965 - DNA, 25 bp, Artificial
  probe
  misc_feature (1)..(25): SEQ ID NO: 1463; WAN024B2N; Start 576; Stop 600
tatcatcggttcttagagagtaagg

SEQ ID NO: 294966 - DNA, 25 bp, Artificial
  probe
  misc_feature (1)..(25): SEQ ID NO: 1463; WAN024B2N; Start 570; Stop 594
gattcttatcatcggttcttagaga

SEQ ID NO: 294967 - DNA, 25 bp, Artificial
  probe
  misc_feature (1)..(25): SEQ ID NO: 1463; WAN024B2N; Start 571; Stop 595
attcttatcatcggttcttagagag

SEQ ID NO: 294968 - DNA, 25 bp, Artificial
  probe
  misc_feature (1)..(25): SEQ ID NO: 1463; WAN024B2N; Start 574; Stop 598
cttatcatcggttcttagagagtaa

SEQ ID NO: 294969 - DNA, 25 bp, Artificial
  probe
  misc_feature (1)..(25): SEQ ID NO: 1463; WAN024B2N; Start 453; Stop 477
aatctttcaacttcacccaacttag

SEQ ID NO: 294970 - DNA, 25 bp, Artificial
  probe
  misc_feature (1)..(25): SEQ ID NO: 1463; WAN024B2N; Start 447; Stop 471
gcctataatctttcaacttcaccca

SEQ ID NO: 294971 - DNA, 25 bp, Artificial
  probe
  misc_feature (1)..(25): SEQ ID NO: 1463; WAN024B2N; Start 444; Stop 468
atcgcctataatctttcaacttcac

SEQ ID NO: 294972 - DNA, 25 bp, Artificial
  probe
  misc_feature (1)..(25): SEQ ID NO: 1463; WAN024B2N; Start 445; Stop 469
tcgcctataatctttcaacttcacc

SEQ ID NO: 294973 - DNA, 25 bp, Artificial
  probe
  misc_feature (1)..(25): SEQ ID NO: 1463; WAN024B2N; Start 456; Stop 480
ctttcaacttcacccaacttagaac

SEQ ID NO: 294974 - DNA, 25 bp, Artificial
  probe
  misc_feature (1)..(25): SEQ ID NO: 1463; WAN024B2N; Start 455; Stop 479
tctttcaacttcacccaacttagaa

SEQ ID NO: 294975 - DNA, 25 bp, Artificial
  probe
  misc_feature (1)..(25): SEQ ID NO: 1463; WAN024B2N; Start 454; Stop 478
atctttcaacttcacccaacttaga

SEQ ID NO: 294976 - DNA, 25 bp, Artificial
  probe
  misc_feature (1)..(25): SEQ ID NO: 1463; WAN024B2N; Start 458; Stop 482
ttcaacttcacccaacttagaacaa

SEQ ID NO: 294977 - DNA, 25 bp, Artificial
  probe
  misc_feature (1)..(25): SEQ ID NO: 1463; WAN024B2N; Start 457; Stop 481
tttcaacttcacccaacttagaaca

SEQ ID NO: 294978 - DNA, 25 bp, Artificial
  probe
  misc_feature (1)..(25): SEQ ID NO: 1463; WAN024B2N; Start 451; Stop 475
ataatctttcaacttcacccaactt

SEQ ID NO: 294979 - DNA, 25 bp, Artificial
  probe
  misc_feature (1)..(25): SEQ ID NO: 1463; WAN024B2N; Start 448; Stop 472
cctataatctttcaacttcacccaa

SEQ ID NO: 294980 - DNA, 25 bp, Artificial
  probe
  misc_feature (1)..(25): SEQ ID NO: 1463; WAN024B2N; Start 459; Stop 483
tcaacttcacccaacttagaacaag

SEQ ID NO: 294981 - DNA, 25 bp, Artificial
  probe
  misc_feature (1)..(25): SEQ ID NO: 1463; WAN024B2N; Start 575; Stop 599
ttatcatcggttcttagagagtaag

SEQ ID NO: 294982 - DNA, 25 bp, Artificial
  probe
  misc_feature (1)..(25): SEQ ID NO: 1463; WAN024B2N; Start 452; Stop 476
taatctttcaacttcacccaactta

SEQ ID NO: 294983 - DNA, 25 bp, Artificial
  probe
  misc_feature (1)..(25): SEQ ID NO: 1463; WAN024B2N; Start 446; Stop 470
cgcctataatctttcaacttcaccc

SEQ ID NO: 294984 - DNA, 25 bp, Artificial
  probe
  misc_feature (1)..(25): SEQ ID NO: 1463; WAN024B2N; Start 450; Stop 474
tataatctttcaacttcacccaact

SEQ ID NO: 294985 - DNA, 25 bp, Artificial
  probe
  misc_feature (1)..(25): SEQ ID NO: 1463; WAN024B2N; Start 449; Stop 473
ctataatctttcaacttcacccaac

SEQ ID NO: 294986 - DNA, 25 bp, Artificial
  probe
  misc_feature (1)..(25): SEQ ID NO: 1463; WAN024B2N; Start 443; Stop 467
tatcgcctataatctttcaacttca

SEQ ID NO: 294987 - DNA, 25 bp, Artificial
  probe
  misc_feature (1)..(25): SEQ ID NO: 1463; WAN024B2N; Start 580; Stop 604
atcggttcttagagagtaagggaat

SEQ ID NO: 294988 - DNA, 25 bp, Artificial
  probe
  misc_feature (1)..(25): SEQ ID NO: 1463; WAN024B2N; Start 581; Stop 605
tcggttcttagagagtaagggaatt

SEQ ID NO: 294989 - DNA, 25 bp, Artificial
  probe
  misc_feature (1)..(25): SEQ ID NO: 1463; WAN024B2N; Start 640; Stop 664
acaacggtatgatggagtccttctt

SEQ ID NO: 294990 - DNA, 25 bp, Artificial
  probe
  misc_feature (1)..(25): SEQ ID NO: 1463; WAN024B2N; Start 577; Stop 601
atcatcggttcttagagagtaaggg

SEQ ID NO: 294991 - DNA, 25 bp, Artificial
  probe
  misc_feature (1)..(25): SEQ ID NO: 1465; WAN024DGH; Start 263; Stop 287
ttattcggcttaatctgtctggtaa

SEQ ID NO: 294992 - DNA, 25 bp, Artificial
  probe
  misc_feature (1)..(25): SEQ ID NO: 1465; WAN024DGH; Start 31; Stop 55
tatggaggttatacaagtctggaca

SEQ ID NO: 294993 - DNA, 25 bp, Artificial
  probe
  misc_feature (1)..(25): SEQ ID NO: 1465; WAN024DGH; Start 32; Stop 56
atggaggttatacaagtctggacaa

SEQ ID NO: 294994 - DNA, 25 bp, Artificial
  probe
  misc_feature (1)..(25): SEQ ID NO: 1465; WAN024DGH; Start 35; Stop 59
gaggttatacaagtctggacaaggt

SEQ ID NO: 294995 - DNA, 25 bp, Artificial
  probe
  misc_feature (1)..(25): SEQ ID NO: 1465; WAN024DGH; Start 33; Stop 57
tggaggttatacaagtctggacaag

SEQ ID NO: 294996 - DNA, 25 bp, Artificial
  probe
  misc_feature (1)..(25): SEQ ID NO: 1465; WAN024DGH; Start 41; Stop 65
atacaagtctggacaaggtctatct

SEQ ID NO: 294997 - DNA, 25 bp, Artificial
  probe
  misc_feature (1)..(25): SEQ ID NO: 1465; WAN024DGH; Start 38; Stop 62
gttatacaagtctggacaaggtcta

SEQ ID NO: 294998 - DNA, 25 bp, Artificial
  probe
  misc_feature (1)..(25): SEQ ID NO: 1465; WAN024DGH; Start 40; Stop 64
tatacaagtctggacaaggtctatc

SEQ ID NO: 294999 - DNA, 25 bp, Artificial
  probe
  misc_feature (1)..(25): SEQ ID NO: 1465; WAN024DGH; Start 30; Stop 54
gtatggaggttatacaagtctggac

SEQ ID NO: 295000 - DNA, 25 bp, Artificial
  probe
  misc_feature (1)..(25): SEQ ID NO: 1465; WAN024DGH; Start 29; Stop 53
agtatggaggttatacaagtctgga

SEQ ID NO: 295001 - DNA, 25 bp, Artificial
  probe
  misc_feature (1)..(25): SEQ ID NO: 1465; WAN024DGH; Start 103; Stop 127
ttaacacttattacacctccgccaa

SEQ ID NO: 295002 - DNA, 25 bp, Artificial
  probe
  misc_feature (1)..(25): SEQ ID NO: 1465; WAN024DGH; Start 28; Stop 52
aagtatggaggttatacaagtctgg

SEQ ID NO: 295003 - DNA, 25 bp, Artificial
  probe
  misc_feature (1)..(25): SEQ ID NO: 1465; WAN024DGH; Start 42; Stop 66
tacaagtctggacaaggtctatctg

SEQ ID NO: 295004 - DNA, 25 bp, Artificial
  probe
  misc_feature (1)..(25): SEQ ID NO: 1465; WAN024DGH; Start 39; Stop 63
ttatacaagtctggacaaggtctat

SEQ ID NO: 295005 - DNA, 25 bp, Artificial
  probe
  misc_feature (1)..(25): SEQ ID NO: 1465; WAN024DGH; Start 598; Stop 622
cgcacagccatgttatatattgatt

SEQ ID NO: 295006 - DNA, 25 bp, Artificial
  probe
  misc_feature (1)..(25): SEQ ID NO: 1465; WAN024DGH; Start 34; Stop 58
ggaggttatacaagtctggacaagg

SEQ ID NO: 295007 - DNA, 25 bp, Artificial
  probe
  misc_feature (1)..(25): SEQ ID NO: 1465; WAN024DGH; Start 104; Stop 128
taacacttattacacctccgccaag

SEQ ID NO: 295008 - DNA, 25 bp, Artificial
  probe
  misc_feature (1)..(25): SEQ ID NO: 1465; WAN024DGH; Start 37; Stop 61
ggttatacaagtctggacaaggtct

SEQ ID NO: 295009 - DNA, 25 bp, Artificial
  probe
  misc_feature (1)..(25): SEQ ID NO: 1465; WAN024DGH; Start 36; Stop 60
aggttatacaagtctggacaaggtc

SEQ ID NO: 295010 - DNA, 25 bp, Artificial
  probe
  misc_feature (1)..(25): SEQ ID NO: 1465; WAN024DGH; Start 597; Stop 621
ccgcacagccatgttatatattgat

SEQ ID NO: 295011 - DNA, 25 bp, Artificial
  probe
  misc_feature (1)..(25): SEQ ID NO: 1465; WAN024DGH; Start 213; Stop 237
actgaatctttacaatactgagcca

SEQ ID NO: 295012 - DNA, 25 bp, Artificial
  probe
  misc_feature (1)..(25): SEQ ID NO: 1465; WAN024DGH; Start 275; Stop 299
atctgtctggtaaatcctttggttt

SEQ ID NO: 295013 - DNA, 25 bp, Artificial
  probe
  misc_feature (1)..(25): SEQ ID NO: 1465; WAN024DGH; Start 274; Stop 298
aatctgtctggtaaatcctttggtt

SEQ ID NO: 295014 - DNA, 25 bp, Artificial
  probe
  misc_feature (1)..(25): SEQ ID NO: 1465; WAN024DGH; Start 273; Stop 297
taatctgtctggtaaatcctttggt

SEQ ID NO: 295015 - DNA, 25 bp, Artificial
  probe
  misc_feature (1)..(25): SEQ ID NO: 1465; WAN024DGH; Start 265; Stop 289
attcggcttaatctgtctggtaaat

SEQ ID NO: 295016 - DNA, 25 bp, Artificial
  probe
  misc_feature (1)..(25): SEQ ID NO: 1465; WAN024DGH; Start 264; Stop 288
tattcggcttaatctgtctggtaaa

SEQ ID NO: 295017 - DNA, 25 bp, Artificial
  probe
  misc_feature (1)..(25): SEQ ID NO: 1465; WAN024DGH; Start 262; Stop 286
tttattcggcttaatctgtctggta

SEQ ID NO: 295018 - DNA, 25 bp, Artificial
  probe
  misc_feature (1)..(25): SEQ ID NO: 1465; WAN024DGH; Start 269; Stop 293
ggcttaatctgtctggtaaatcctt

SEQ ID NO: 295019 - DNA, 25 bp, Artificial
  probe
  misc_feature (1)..(25): SEQ ID NO: 1465; WAN024DGH; Start 214; Stop 238
ctgaatctttacaatactgagccaa

SEQ ID NO: 295020 - DNA, 25 bp, Artificial
  probe
  misc_feature (1)..(25): SEQ ID NO: 1465; WAN024DGH; Start 212; Stop 236
aactgaatctttacaatactgagcc

SEQ ID NO: 295021 - DNA, 25 bp, Artificial
  probe
  misc_feature (1)..(25): SEQ ID NO: 1465; WAN024DGH; Start 270; Stop 294
gcttaatctgtctggtaaatccttt

SEQ ID NO: 295022 - DNA, 25 bp, Artificial
  probe
  misc_feature (1)..(25): SEQ ID NO: 1465; WAN024DGH; Start 266; Stop 290
ttcggcttaatctgtctggtaaatc

SEQ ID NO: 295023 - DNA, 25 bp, Artificial
  probe
  misc_feature (1)..(25): SEQ ID NO: 1465; WAN024DGH; Start 595; Stop 619
aaccgcacagccatgttatatattg

SEQ ID NO: 295024 - DNA, 25 bp, Artificial
  probe
  misc_feature (1)..(25): SEQ ID NO: 1466; WAN024GCP; Start 129; Stop 153
tctccttattctctactcacttctg

SEQ ID NO: 295025 - DNA, 25 bp, Artificial
  probe
  misc_feature (1)..(25): SEQ ID NO: 1466; WAN024GCP; Start 132; Stop 156
ccttattctctactcacttctgacg

SEQ ID NO: 295026 - DNA, 25 bp, Artificial
  probe
  misc_feature (1)..(25): SEQ ID NO: 1466; WAN024GCP; Start 133; Stop 157
cttattctctactcacttctgacga

SEQ ID NO: 295027 - DNA, 25 bp, Artificial
  probe
  misc_feature (1)..(25): SEQ ID NO: 1466; WAN024GCP; Start 131; Stop 155
tccttattctctactcacttctgac

SEQ ID NO: 295028 - DNA, 25 bp, Artificial
  probe
  misc_feature (1)..(25): SEQ ID NO: 1466; WAN024GCP; Start 137; Stop 161
ttctctactcacttctgacgaatga

SEQ ID NO: 295029 - DNA, 25 bp, Artificial
  probe
  misc_feature (1)..(25): SEQ ID NO: 1466; WAN024GCP; Start 134; Stop 158
ttattctctactcacttctgacgaa

SEQ ID NO: 295030 - DNA, 25 bp, Artificial
  probe
  misc_feature (1)..(25): SEQ ID NO: 1466; WAN024GCP; Start 128; Stop 152
ttctccttattctctactcacttct

SEQ ID NO: 295031 - DNA, 25 bp, Artificial
  probe
  misc_feature (1)..(25): SEQ ID NO: 1466; WAN024GCP; Start 126; Stop 150
tcttctccttattctctactcactt

SEQ ID NO: 295032 - DNA, 25 bp, Artificial
  probe
  misc_feature (1)..(25): SEQ ID NO: 1466; WAN024GCP; Start 125; Stop 149
ttcttctccttattctctactcact

SEQ ID NO: 295033 - DNA, 25 bp, Artificial
  probe
  misc_feature (1)..(25): SEQ ID NO: 1466; WAN024GCP; Start 130; Stop 154
ctccttattctctactcacttctga

SEQ ID NO: 295034 - DNA, 25 bp, Artificial
  probe
  misc_feature (1)..(25): SEQ ID NO: 1466; WAN024GCP; Start 127; Stop 151
cttctccttattctctactcacttc

SEQ ID NO: 295035 - DNA, 25 bp, Artificial
  probe
  misc_feature (1)..(25): SEQ ID NO: 1466; WAN024GCP; Start 140; Stop 164
tctactcacttctgacgaatgacaa

SEQ ID NO: 295036 - DNA, 25 bp, Artificial
  probe
  misc_feature (1)..(25): SEQ ID NO: 1466; WAN024GCP; Start 138; Stop 162
tctctactcacttctgacgaatgac

SEQ ID NO: 295037 - DNA, 25 bp, Artificial
  probe
  misc_feature (1)..(25): SEQ ID NO: 1466; WAN024GCP; Start 139; Stop 163
ctctactcacttctgacgaatgaca

SEQ ID NO: 295038 - DNA, 25 bp, Artificial
  probe
  misc_feature (1)..(25): SEQ ID NO: 1466; WAN024GCP; Start 136; Stop 160
attctctactcacttctgacgaatg

SEQ ID NO: 295039 - DNA, 25 bp, Artificial
  probe
  misc_feature (1)..(25): SEQ ID NO: 1466; WAN024GCP; Start 249; Stop 273
tagtttgagtcggtttctttccttt

SEQ ID NO: 295040 - DNA, 25 bp, Artificial
  probe
  misc_feature (1)..(25): SEQ ID NO: 1466; WAN024GCP; Start 248; Stop 272
ttagtttgagtcggtttctttcctt

SEQ ID NO: 295041 - DNA, 25 bp, Artificial
  probe
  misc_feature (1)..(25): SEQ ID NO: 1466; WAN024GCP; Start 247; Stop 271
tttagtttgagtcggtttctttcct

SEQ ID NO: 295042 - DNA, 25 bp, Artificial
  probe
  misc_feature (1)..(25): SEQ ID NO: 1466; WAN024GCP; Start 246; Stop 270
gtttagtttgagtcggtttctttcc

SEQ ID NO: 295043 - DNA, 25 bp, Artificial
  probe
  misc_feature (1)..(25): SEQ ID NO: 1466; WAN024GCP; Start 135; Stop 159
tattctctactcacttctgacgaat

SEQ ID NO: 295044 - DNA, 25 bp, Artificial
  probe
  misc_feature (1)..(25): SEQ ID NO: 1466; WAN024GCP; Start 245; Stop 269
cgtttagtttgagtcggtttctttc

SEQ ID NO: 295045 - DNA, 25 bp, Artificial
  probe
  misc_feature (1)..(25): SEQ ID NO: 1466; WAN024GCP; Start 241; Stop 265
ctttcgtttagtttgagtcggtttc

SEQ ID NO: 295046 - DNA, 25 bp, Artificial
  probe
  misc_feature (1)..(25): SEQ ID NO: 1466; WAN024GCP; Start 244; Stop 268
tcgtttagtttgagtcggtttcttt

SEQ ID NO: 295047 - DNA, 25 bp, Artificial
  probe
  misc_feature (1)..(25): SEQ ID NO: 1466; WAN024GCP; Start 243; Stop 267
ttcgtttagtttgagtcggtttctt

SEQ ID NO: 295048 - DNA, 25 bp, Artificial
  probe
  misc_feature (1)..(25): SEQ ID NO: 1466; WAN024GCP; Start 242; Stop 266
tttcgtttagtttgagtcggtttct

SEQ ID NO: 295049 - DNA, 25 bp, Artificial
  probe
  misc_feature (1)..(25): SEQ ID NO: 1466; WAN024GCP; Start 116; Stop 140
gggtttcatttcttctccttattct

SEQ ID NO: 295050 - DNA, 25 bp, Artificial
  probe
  misc_feature (1)..(25): SEQ ID NO: 1466; WAN024GCP; Start 141; Stop 165
ctactcacttctgacgaatgacaaa

SEQ ID NO: 295051 - DNA, 25 bp, Artificial
  probe
  misc_feature (1)..(25): SEQ ID NO: 1466; WAN024GCP; Start 109; Stop 133
gaattgagggtttcatttcttctcc

SEQ ID NO: 295052 - DNA, 25 bp, Artificial
  probe
  misc_feature (1)..(25): SEQ ID NO: 1466; WAN024GCP; Start 240; Stop 264
actttcgtttagtttgagtcggttt

SEQ ID NO: 295053 - DNA, 25 bp, Artificial
  probe
  misc_feature (1)..(25): SEQ ID NO: 1466; WAN024GCP; Start 112; Stop 136
ttgagggtttcatttcttctcctta

SEQ ID NO: 295054 - DNA, 25 bp, Artificial
  probe
  misc_feature (1)..(25): SEQ ID NO: 1466; WAN024GCP; Start 111; Stop 135
attgagggtttcatttcttctcctt

SEQ ID NO: 295055 - DNA, 25 bp, Artificial
  probe
  misc_feature (1)..(25): SEQ ID NO: 1466; WAN024GCP; Start 110; Stop 134
aattgagggtttcatttcttctcct

SEQ ID NO: 295056 - DNA, 25 bp, Artificial
  probe
  misc_feature (1)..(25): SEQ ID NO: 1466; WAN024GCP; Start 113; Stop 137
tgagggtttcatttcttctccttat

SEQ ID NO: 295057 - DNA, 25 bp, Artificial
  probe
  misc_feature (1)..(25): SEQ ID NO: 1467; WAN024DXU; Start 190; Stop 214
aatcaagattatgttgtcgagcaag

SEQ ID NO: 295058 - DNA, 25 bp, Artificial
  probe
  misc_feature (1)..(25): SEQ ID NO: 1467; WAN024DXU; Start 193; Stop 217
caagattatgttgtcgagcaagatg

SEQ ID NO: 295059 - DNA, 25 bp, Artificial
  probe
  misc_feature (1)..(25): SEQ ID NO: 1467; WAN024DXU; Start 192; Stop 216
tcaagattatgttgtcgagcaagat

SEQ ID NO: 295060 - DNA, 25 bp, Artificial
  probe
  misc_feature (1)..(25): SEQ ID NO: 1467; WAN024DXU; Start 191; Stop 215
atcaagattatgttgtcgagcaaga

SEQ ID NO: 295061 - DNA, 25 bp, Artificial
  probe
  misc_feature (1)..(25): SEQ ID NO: 1467; WAN024DXU; Start 31; Stop 55
attatccaatttatcgccaatgctg

SEQ ID NO: 295062 - DNA, 25 bp, Artificial
  probe
  misc_feature (1)..(25): SEQ ID NO: 1467; WAN024DXU; Start 33; Stop 57
tatccaatttatcgccaatgctgaa

SEQ ID NO: 295063 - DNA, 25 bp, Artificial
  probe
  misc_feature (1)..(25): SEQ ID NO: 1467; WAN024DXU; Start 32; Stop 56
ttatccaatttatcgccaatgctga

SEQ ID NO: 295064 - DNA, 25 bp, Artificial
  probe
  misc_feature (1)..(25): SEQ ID NO: 1467; WAN024DXU; Start 337; Stop 361
gttatcaatatcggtgctgaaatcg

SEQ ID NO: 295065 - DNA, 25 bp, Artificial
  probe
  misc_feature (1)..(25): SEQ ID NO: 1467; WAN024DXU; Start 336; Stop 360
tgttatcaatatcggtgctgaaatc

SEQ ID NO: 295066 - DNA, 25 bp, Artificial
  probe
  misc_feature (1)..(25): SEQ ID NO: 1467; WAN024DXU; Start 335; Stop 359
ctgttatcaatatcggtgctgaaat

SEQ ID NO: 295067 - DNA, 25 bp, Artificial
  probe
  misc_feature (1)..(25): SEQ ID NO: 1467; WAN024DXU; Start 114; Stop 138
ctctgttgtcaaactaggaaatgtc

SEQ ID NO: 295068 - DNA, 25 bp, Artificial
  probe
  misc_feature (1)..(25): SEQ ID NO: 1467; WAN024DXU; Start 15; Stop 39
aatgaacgctcaagaaattatccaa

SEQ ID NO: 295069 - DNA, 25 bp, Artificial
  probe
  misc_feature (1)..(25): SEQ ID NO: 1467; WAN024DXU; Start 14; Stop 38
aaatgaacgctcaagaaattatcca

SEQ ID NO: 295070 - DNA, 25 bp, Artificial
  probe
  misc_feature (1)..(25): SEQ ID NO: 1467; WAN024DXU; Start 303; Stop 327
aattggtgacaatgctgttatcatg

SEQ ID NO: 295071 - DNA, 25 bp, Artificial
  probe
  misc_feature (1)..(25): SEQ ID NO: 1467; WAN024DXU; Start 16; Stop 40
atgaacgctcaagaaattatccaat

SEQ ID NO: 295072 - DNA, 25 bp, Artificial
  probe
  misc_feature (1)..(25): SEQ ID NO: 1467; WAN024DXU; Start 30; Stop 54
aattatccaatttatcgccaatgct

SEQ ID NO: 295073 - DNA, 25 bp, Artificial
  probe
  misc_feature (1)..(25): SEQ ID NO: 1467; WAN024DXU; Start 17; Stop 41
tgaacgctcaagaaattatccaatt

SEQ ID NO: 295074 - DNA, 25 bp, Artificial
  probe
  misc_feature (1)..(25): SEQ ID NO: 1467; WAN024DXU; Start 338; Stop 362
ttatcaatatcggtgctgaaatcgg

SEQ ID NO: 295075 - DNA, 25 bp, Artificial
  probe
  misc_feature (1)..(25): SEQ ID NO: 1467; WAN024DXU; Start 34; Stop 58
atccaatttatcgccaatgctgaaa

SEQ ID NO: 295076 - DNA, 25 bp, Artificial
  probe
  misc_feature (1)..(25): SEQ ID NO: 1467; WAN024DXU; Start 113; Stop 137
gctctgttgtcaaactaggaaatgt

SEQ ID NO: 295077 - DNA, 25 bp, Artificial
  probe
  misc_feature (1)..(25): SEQ ID NO: 1467; WAN024DXU; Start 516; Stop 540
taatgcagtggttatcgaaggagtc

SEQ ID NO: 295078 - DNA, 25 bp, Artificial
  probe
  misc_feature (1)..(25): SEQ ID NO: 1467; WAN024DXU; Start 515; Stop 539
ctaatgcagtggttatcgaaggagt

SEQ ID NO: 295079 - DNA, 25 bp, Artificial
  probe
  misc_feature (1)..(25): SEQ ID NO: 1467; WAN024DXU; Start 111; Stop 135
tagctctgttgtcaaactaggaaat

SEQ ID NO: 295080 - DNA, 25 bp, Artificial
  probe
  misc_feature (1)..(25): SEQ ID NO: 1467; WAN024DXU; Start 339; Stop 363
tatcaatatcggtgctgaaatcggt

SEQ ID NO: 295081 - DNA, 25 bp, Artificial
  probe
  misc_feature (1)..(25): SEQ ID NO: 1467; WAN024DXU; Start 115; Stop 139
tctgttgtcaaactaggaaatgtcc

SEQ ID NO: 295082 - DNA, 25 bp, Artificial
  probe
  misc_feature (1)..(25): SEQ ID NO: 1467; WAN024DXU; Start 189; Stop 213
aaatcaagattatgttgtcgagcaa

SEQ ID NO: 295083 - DNA, 25 bp, Artificial
  probe
  misc_feature (1)..(25): SEQ ID NO: 1467; WAN024DXU; Start 112; Stop 136
agctctgttgtcaaactaggaaatg

SEQ ID NO: 295084 - DNA, 25 bp, Artificial
  probe
  misc_feature (1)..(25): SEQ ID NO: 1467; WAN024DXU; Start 302; Stop 326
aaattggtgacaatgctgttatcat

SEQ ID NO: 295085 - DNA, 25 bp, Artificial
  probe
  misc_feature (1)..(25): SEQ ID NO: 1467; WAN024DXU; Start 301; Stop 325
gaaattggtgacaatgctgttatca

SEQ ID NO: 295086 - DNA, 25 bp, Artificial
  probe
  misc_feature (1)..(25): SEQ ID NO: 1467; WAN024DXU; Start 300; Stop 324
ggaaattggtgacaatgctgttatc

SEQ ID NO: 295087 - DNA, 25 bp, Artificial
  probe
  misc_feature (1)..(25): SEQ ID NO: 1467; WAN024DXU; Start 133; Stop 157
aatgtcctattcggagactggaagg

SEQ ID NO: 295088 - DNA, 25 bp, Artificial
  probe
  misc_feature (1)..(25): SEQ ID NO: 1467; WAN024DXU; Start 132; Stop 156
aaatgtcctattcggagactggaag

SEQ ID NO: 295089 - DNA, 25 bp, Artificial
  probe
  misc_feature (1)..(25): SEQ ID NO: 1467; WAN024DXU; Start 131; Stop 155
gaaatgtcctattcggagactggaa

SEQ ID NO: 295090 - DNA, 25 bp, Artificial
  probe
  misc_feature (1)..(25): SEQ ID NO: 1468; WAN024G9S; Start 78; Stop 102
tcagaccgtttcagctaaagaatat

SEQ ID NO: 295091 - DNA, 25 bp, Artificial
  probe
  misc_feature (1)..(25): SEQ ID NO: 1468; WAN024G9S; Start 79; Stop 103
cagaccgtttcagctaaagaatatc

SEQ ID NO: 295092 - DNA, 25 bp, Artificial
  probe
  misc_feature (1)..(25): SEQ ID NO: 1468; WAN024G9S; Start 80; Stop 104
agaccgtttcagctaaagaatatct

SEQ ID NO: 295093 - DNA, 25 bp, Artificial
  probe
  misc_feature (1)..(25): SEQ ID NO: 1468; WAN024G9S; Start 77; Stop 101
ctcagaccgtttcagctaaagaata

SEQ ID NO: 295094 - DNA, 25 bp, Artificial
  probe
  misc_feature (1)..(25): SEQ ID NO: 1468; WAN024G9S; Start 73; Stop 97
gattctcagaccgtttcagctaaag

SEQ ID NO: 295095 - DNA, 25 bp, Artificial
  probe
  misc_feature (1)..(25): SEQ ID NO: 1468; WAN024G9S; Start 76; Stop 100
tctcagaccgtttcagctaaagaat

SEQ ID NO: 295096 - DNA, 25 bp, Artificial
  probe
  misc_feature (1)..(25): SEQ ID NO: 1468; WAN024G9S; Start 74; Stop 98
attctcagaccgtttcagctaaaga

SEQ ID NO: 295097 - DNA, 25 bp, Artificial
  probe
  misc_feature (1)..(25): SEQ ID NO: 1468; WAN024G9S; Start 63; Stop 87
tgttagcttggattctcagaccgtt

SEQ ID NO: 295098 - DNA, 25 bp, Artificial
  probe
  misc_feature (1)..(25): SEQ ID NO: 1468; WAN024G9S; Start 72; Stop 96
ggattctcagaccgtttcagctaaa

SEQ ID NO: 295099 - DNA, 25 bp, Artificial
  probe
  misc_feature (1)..(25): SEQ ID NO: 1468; WAN024G9S; Start 65; Stop 89
ttagcttggattctcagaccgtttc

SEQ ID NO: 295100 - DNA, 25 bp, Artificial
  probe
  misc_feature (1)..(25): SEQ ID NO: 1468; WAN024G9S; Start 59; Stop 83
catctgttagcttggattctcagac

SEQ ID NO: 295101 - DNA, 25 bp, Artificial
  probe
  misc_feature (1)..(25): SEQ ID NO: 1468; WAN024G9S; Start 81; Stop 105
gaccgtttcagctaaagaatatctt

SEQ ID NO: 295102 - DNA, 25 bp, Artificial
  probe
  misc_feature (1)..(25): SEQ ID NO: 1468; WAN024G9S; Start 64; Stop 88
gttagcttggattctcagaccgttt

SEQ ID NO: 295103 - DNA, 25 bp, Artificial
  probe
  misc_feature (1)..(25): SEQ ID NO: 1468; WAN024G9S; Start 27; Stop 51
tagtgtgcttcagactgggctattt

SEQ ID NO: 295104 - DNA, 25 bp, Artificial
  probe
  misc_feature (1)..(25): SEQ ID NO: 1468; WAN024G9S; Start 60; Stop 84
atctgttagcttggattctcagacc

SEQ ID NO: 295105 - DNA, 25 bp, Artificial
  probe
  misc_feature (1)..(25): SEQ ID NO: 1468; WAN024G9S; Start 58; Stop 82
ccatctgttagcttggattctcaga

SEQ ID NO: 295106 - DNA, 25 bp, Artificial
  probe
  misc_feature (1)..(25): SEQ ID NO: 1468; WAN024G9S; Start 143; Stop 167
aagtgaagggacgacaagccaatat

SEQ ID NO: 295107 - DNA, 25 bp, Artificial
  probe
  misc_feature (1)..(25): SEQ ID NO: 1468; WAN024G9S; Start 75; Stop 99
ttctcagaccgtttcagctaaagaa

SEQ ID NO: 295108 - DNA, 25 bp, Artificial
  probe
  misc_feature (1)..(25): SEQ ID NO: 1468; WAN024G9S; Start 71; Stop 95
tggattctcagaccgtttcagctaa

SEQ ID NO: 295109 - DNA, 25 bp, Artificial
  probe
  misc_feature (1)..(25): SEQ ID NO: 1468; WAN024G9S; Start 70; Stop 94
ttggattctcagaccgtttcagcta

SEQ ID NO: 295110 - DNA, 25 bp, Artificial
  probe
  misc_feature (1)..(25): SEQ ID NO: 1468; WAN024G9S; Start 66; Stop 90
tagcttggattctcagaccgtttca

SEQ ID NO: 295111 - DNA, 25 bp, Artificial
  probe
  misc_feature (1)..(25): SEQ ID NO: 1468; WAN024G9S; Start 62; Stop 86
ctgttagcttggattctcagaccgt

SEQ ID NO: 295112 - DNA, 25 bp, Artificial
  probe
  misc_feature (1)..(25): SEQ ID NO: 1468; WAN024G9S; Start 52; Stop 76
ttctctccatctgttagcttggatt

SEQ ID NO: 295113 - DNA, 25 bp, Artificial
  probe
  misc_feature (1)..(25): SEQ ID NO: 1468; WAN024G9S; Start 55; Stop 79
tctccatctgttagcttggattctc

SEQ ID NO: 295114 - DNA, 25 bp, Artificial
  probe
  misc_feature (1)..(25): SEQ ID NO: 1468; WAN024G9S; Start 54; Stop 78
ctctccatctgttagcttggattct

SEQ ID NO: 295115 - DNA, 25 bp, Artificial
  probe
  misc_feature (1)..(25): SEQ ID NO: 1468; WAN024G9S; Start 53; Stop 77
tctctccatctgttagcttggattc

SEQ ID NO: 295116 - DNA, 25 bp, Artificial
  probe
  misc_feature (1)..(25): SEQ ID NO: 1468; WAN024G9S; Start 144; Stop 168
agtgaagggacgacaagccaatatt

SEQ ID NO: 295117 - DNA, 25 bp, Artificial
  probe
  misc_feature (1)..(25): SEQ ID NO: 1468; WAN024G9S; Start 57; Stop 81
tccatctgttagcttggattctcag

SEQ ID NO: 295118 - DNA, 25 bp, Artificial
  probe
  misc_feature (1)..(25): SEQ ID NO: 1468; WAN024G9S; Start 56; Stop 80
ctccatctgttagcttggattctca

SEQ ID NO: 295119 - DNA, 25 bp, Artificial
  probe
  misc_feature (1)..(25): SEQ ID NO: 1468; WAN024G9S; Start 142; Stop 166
caagtgaagggacgacaagccaata

SEQ ID NO: 295120 - DNA, 25 bp, Artificial
  probe
  misc_feature (1)..(25): SEQ ID NO: 1468; WAN024G9S; Start 96; Stop 120
agaatatcttttcccttatcagaag

SEQ ID NO: 295121 - DNA, 25 bp, Artificial
  probe
  misc_feature (1)..(25): SEQ ID NO: 1468; WAN024G9S; Start 69; Stop 93
cttggattctcagaccgtttcagct

SEQ ID NO: 295122 - DNA, 25 bp, Artificial
  probe
  misc_feature (1)..(25): SEQ ID NO: 1468; WAN024G9S; Start 67; Stop 91
agcttggattctcagaccgtttcag

SEQ ID NO: 295123 - DNA, 25 bp, Artificial
  probe
  misc_feature (1)..(25): SEQ ID NO: 1469; WAN024G9P; Start 52; Stop 76
tttctctccattatcattgaagccc

SEQ ID NO: 295124 - DNA, 25 bp, Artificial
  probe
  misc_feature (1)..(25): SEQ ID NO: 1469; WAN024G9P; Start 54; Stop 78
tctctccattatcattgaagccctt

SEQ ID NO: 295125 - DNA, 25 bp, Artificial
  probe
  misc_feature (1)..(25): SEQ ID NO: 1469; WAN024G9P; Start 53; Stop 77
ttctctccattatcattgaagccct

SEQ ID NO: 295126 - DNA, 25 bp, Artificial
  probe
  misc_feature (1)..(25): SEQ ID NO: 1469; WAN024G9P; Start 117; Stop 141
tgaagtttatatcacacctgacaag

SEQ ID NO: 295127 - DNA, 25 bp, Artificial
  probe
  misc_feature (1)..(25): SEQ ID NO: 1469; WAN024G9P; Start 17; Stop 41
aactcccatctagtgtacttcaaac

SEQ ID NO: 295128 - DNA, 25 bp, Artificial
  probe
  misc_feature (1)..(25): SEQ ID NO: 1469; WAN024G9P; Start 16; Stop 40
caactcccatctagtgtacttcaaa

SEQ ID NO: 295129 - DNA, 25 bp, Artificial
  probe
  misc_feature (1)..(25): SEQ ID NO: 1469; WAN024G9P; Start 19; Stop 43
ctcccatctagtgtacttcaaactg

SEQ ID NO: 295130 - DNA, 25 bp, Artificial
  probe
  misc_feature (1)..(25): SEQ ID NO: 1469; WAN024G9P; Start 678; Stop 702
ctttcttctttcgctctgtagtgag

SEQ ID NO: 295131 - DNA, 25 bp, Artificial
  probe
  misc_feature (1)..(25): SEQ ID NO: 1469; WAN024G9P; Start 116; Stop 140
ttgaagtttatatcacacctgacaa

SEQ ID NO: 295132 - DNA, 25 bp, Artificial
  probe
  misc_feature (1)..(25): SEQ ID NO: 1469; WAN024G9P; Start 55; Stop 79
ctctccattatcattgaagcccttc

SEQ ID NO: 295133 - DNA, 25 bp, Artificial
  probe
  misc_feature (1)..(25): SEQ ID NO: 1469; WAN024G9P; Start 18; Stop 42
actcccatctagtgtacttcaaact

SEQ ID NO: 295134 - DNA, 25 bp, Artificial
  probe
  misc_feature (1)..(25): SEQ ID NO: 1469; WAN024G9P; Start 118; Stop 142
gaagtttatatcacacctgacaagg

SEQ ID NO: 295135 - DNA, 25 bp, Artificial
  probe
  misc_feature (1)..(25): SEQ ID NO: 1469; WAN024G9P; Start 115; Stop 139
attgaagtttatatcacacctgaca

SEQ ID NO: 295136 - DNA, 25 bp, Artificial
  probe
  misc_feature (1)..(25): SEQ ID NO: 1469; WAN024G9P; Start 103; Stop 127
gtctcagggctgattgaagtttata

SEQ ID NO: 295137 - DNA, 25 bp, Artificial
  probe
  misc_feature (1)..(25): SEQ ID NO: 1469; WAN024G9P; Start 10; Stop 34
tttcaacaactcccatctagtgtac

SEQ ID NO: 295138 - DNA, 25 bp, Artificial
  probe
  misc_feature (1)..(25): SEQ ID NO: 1469; WAN024G9P; Start 104; Stop 128
tctcagggctgattgaagtttatat

SEQ ID NO: 295139 - DNA, 25 bp, Artificial
  probe
  misc_feature (1)..(25): SEQ ID NO: 1469; WAN024G9P; Start 23; Stop 47
catctagtgtacttcaaactggagc

SEQ ID NO: 295140 - DNA, 25 bp, Artificial
  probe
  misc_feature (1)..(25): SEQ ID NO: 1469; WAN024G9P; Start 105; Stop 129
ctcagggctgattgaagtttatatc

SEQ ID NO: 295141 - DNA, 25 bp, Artificial
  probe
  misc_feature (1)..(25): SEQ ID NO: 1469; WAN024G9P; Start 13; Stop 37
caacaactcccatctagtgtacttc

SEQ ID NO: 295142 - DNA, 25 bp, Artificial
  probe
  misc_feature (1)..(25): SEQ ID NO: 1469; WAN024G9P; Start 677; Stop 701
cctttcttctttcgctctgtagtga

SEQ ID NO: 295143 - DNA, 25 bp, Artificial
  probe
  misc_feature (1)..(25): SEQ ID NO: 1469; WAN024G9P; Start 15; Stop 39
acaactcccatctagtgtacttcaa

SEQ ID NO: 295144 - DNA, 25 bp, Artificial
  probe
  misc_feature (1)..(25): SEQ ID NO: 1469; WAN024G9P; Start 14; Stop 38
aacaactcccatctagtgtacttca

SEQ ID NO: 295145 - DNA, 25 bp, Artificial
  probe
  misc_feature (1)..(25): SEQ ID NO: 1469; WAN024G9P; Start 12; Stop 36
tcaacaactcccatctagtgtactt

SEQ ID NO: 295146 - DNA, 25 bp, Artificial
  probe
  misc_feature (1)..(25): SEQ ID NO: 1469; WAN024G9P; Start 11; Stop 35
ttcaacaactcccatctagtgtact

SEQ ID NO: 295147 - DNA, 25 bp, Artificial
  probe
  misc_feature (1)..(25): SEQ ID NO: 1469; WAN024G9P; Start 114; Stop 138
gattgaagtttatatcacacctgac

SEQ ID NO: 295148 - DNA, 25 bp, Artificial
  probe
  misc_feature (1)..(25): SEQ ID NO: 1469; WAN024G9P; Start 27; Stop 51
tagtgtacttcaaactggagccatt

SEQ ID NO: 295149 - DNA, 25 bp, Artificial
  probe
  misc_feature (1)..(25): SEQ ID NO: 1469; WAN024G9P; Start 24; Stop 48
atctagtgtacttcaaactggagcc

SEQ ID NO: 295150 - DNA, 25 bp, Artificial
  probe
  misc_feature (1)..(25): SEQ ID NO: 1469; WAN024G9P; Start 22; Stop 46
ccatctagtgtacttcaaactggag

SEQ ID NO: 295151 - DNA, 25 bp, Artificial
  probe
  misc_feature (1)..(25): SEQ ID NO: 1469; WAN024G9P; Start 56; Stop 80
tctccattatcattgaagcccttcc

SEQ ID NO: 295152 - DNA, 25 bp, Artificial
  probe
  misc_feature (1)..(25): SEQ ID NO: 1469; WAN024G9P; Start 679; Stop 703
tttcttctttcgctctgtagtgagg

SEQ ID NO: 295153 - DNA, 25 bp, Artificial
  probe
  misc_feature (1)..(25): SEQ ID NO: 1469; WAN024G9P; Start 303; Stop 327
acctgttatcaatcccattgttctt

SEQ ID NO: 295154 - DNA, 25 bp, Artificial
  probe
  misc_feature (1)..(25): SEQ ID NO: 1469; WAN024G9P; Start 102; Stop 126
tgtctcagggctgattgaagtttat

SEQ ID NO: 295155 - DNA, 25 bp, Artificial
  probe
  misc_feature (1)..(25): SEQ ID NO: 1469; WAN024G9P; Start 304; Stop 328
cctgttatcaatcccattgttcttt

SEQ ID NO: 295156 - DNA, 25 bp, Artificial
  probe
  misc_feature (1)..(25): SEQ ID NO: 1470; WAN024C5R; Start 584; Stop 608
ctgttaagattatggtgccgattac

SEQ ID NO: 295157 - DNA, 25 bp, Artificial
  probe
  misc_feature (1)..(25): SEQ ID NO: 1470; WAN024C5R; Start 772; Stop 796
acagttatcatcggaattatcggaa

SEQ ID NO: 295158 - DNA, 25 bp, Artificial
  probe
  misc_feature (1)..(25): SEQ ID NO: 1470; WAN024C5R; Start 771; Stop 795
aacagttatcatcggaattatcgga

SEQ ID NO: 295159 - DNA, 25 bp, Artificial
  probe
  misc_feature (1)..(25): SEQ ID NO: 1470; WAN024C5R; Start 452; Stop 476
aattgtcaactggtctgtatggata

SEQ ID NO: 295160 - DNA, 25 bp, Artificial
  probe
  misc_feature (1)..(25): SEQ ID NO: 1470; WAN024C5R; Start 773; Stop 797
cagttatcatcggaattatcggaag

SEQ ID NO: 295161 - DNA, 25 bp, Artificial
  probe
  misc_feature (1)..(25): SEQ ID NO: 1470; WAN024C5R; Start 453; Stop 477
attgtcaactggtctgtatggatac

SEQ ID NO: 295162 - DNA, 25 bp, Artificial
  probe
  misc_feature (1)..(25): SEQ ID NO: 1470; WAN024C5R; Start 409; Stop 433
atcttgttcttccttgcgatgaata

SEQ ID NO: 295163 - DNA, 25 bp, Artificial
  probe
  misc_feature (1)..(25): SEQ ID NO: 1470; WAN024C5R; Start 774; Stop 798
agttatcatcggaattatcggaagc

SEQ ID NO: 295164 - DNA, 25 bp, Artificial
  probe
  misc_feature (1)..(25): SEQ ID NO: 1470; WAN024C5R; Start 583; Stop 607
tctgttaagattatggtgccgatta

SEQ ID NO: 295165 - DNA, 25 bp, Artificial
  probe
  misc_feature (1)..(25): SEQ ID NO: 1470; WAN024C5R; Start 408; Stop 432
aatcttgttcttccttgcgatgaat

SEQ ID NO: 295166 - DNA, 25 bp, Artificial
  probe
  misc_feature (1)..(25): SEQ ID NO: 1470; WAN024C5R; Start 410; Stop 434
tcttgttcttccttgcgatgaatac

SEQ ID NO: 295167 - DNA, 25 bp, Artificial
  probe
  misc_feature (1)..(25): SEQ ID NO: 1470; WAN024C5R; Start 770; Stop 794
taacagttatcatcggaattatcgg

SEQ ID NO: 295168 - DNA, 25 bp, Artificial
  probe
  misc_feature (1)..(25): SEQ ID NO: 1470; WAN024C5R; Start 414; Stop 438
gttcttccttgcgatgaatacgatt

SEQ ID NO: 295169 - DNA, 25 bp, Artificial
  probe
  misc_feature (1)..(25): SEQ ID NO: 1470; WAN024C5R; Start 105; Stop 129
atatgccaatgtgatgtatcctgct

SEQ ID NO: 295170 - DNA, 25 bp, Artificial
  probe
  misc_feature (1)..(25): SEQ ID NO: 1470; WAN024C5R; Start 106; Stop 130
tatgccaatgtgatgtatcctgctt

SEQ ID NO: 295171 - DNA, 25 bp, Artificial
  probe
  misc_feature (1)..(25): SEQ ID NO: 1470; WAN024C5R; Start 531; Stop 555
tcgtattgccaatattatcggtgta

SEQ ID NO: 295172 - DNA, 25 bp, Artificial
  probe
  misc_feature (1)..(25): SEQ ID NO: 1470; WAN024C5R; Start 528; Stop 552
ttctcgtattgccaatattatcggt

SEQ ID NO: 295173 - DNA, 25 bp, Artificial
  probe
  misc_feature (1)..(25): SEQ ID NO: 1470; WAN024C5R; Start 532; Stop 556
cgtattgccaatattatcggtgtaa

SEQ ID NO: 295174 - DNA, 25 bp, Artificial
  probe
  misc_feature (1)..(25): SEQ ID NO: 1470; WAN024C5R; Start 407; Stop 431
caatcttgttcttccttgcgatgaa

SEQ ID NO: 295175 - DNA, 25 bp, Artificial
  probe
  misc_feature (1)..(25): SEQ ID NO: 1470; WAN024C5R; Start 776; Stop 800
ttatcatcggaattatcggaagctg

SEQ ID NO: 295176 - DNA, 25 bp, Artificial
  probe
  misc_feature (1)..(25): SEQ ID NO: 1470; WAN024C5R; Start 775; Stop 799
gttatcatcggaattatcggaagct

SEQ ID NO: 295177 - DNA, 25 bp, Artificial
  probe
  misc_feature (1)..(25): SEQ ID NO: 1470; WAN024C5R; Start 529; Stop 553
tctcgtattgccaatattatcggtg

SEQ ID NO: 295178 - DNA, 25 bp, Artificial
  probe
  misc_feature (1)..(25): SEQ ID NO: 1470; WAN024C5R; Start 479; Stop 503
aactaggaacaactgtgattgataa

SEQ ID NO: 295179 - DNA, 25 bp, Artificial
  probe
  misc_feature (1)..(25): SEQ ID NO: 1470; WAN024C5R; Start 587; Stop 611
ttaagattatggtgccgattacctt

SEQ ID NO: 295180 - DNA, 25 bp, Artificial
  probe
  misc_feature (1)..(25): SEQ ID NO: 1470; WAN024C5R; Start 530; Stop 554
ctcgtattgccaatattatcggtgt

SEQ ID NO: 295181 - DNA, 25 bp, Artificial
  probe
  misc_feature (1)..(25): SEQ ID NO: 1470; WAN024C5R; Start 411; Stop 435
cttgttcttccttgcgatgaatacg

SEQ ID NO: 295182 - DNA, 25 bp, Artificial
  probe
  misc_feature (1)..(25): SEQ ID NO: 1470; WAN024C5R; Start 104; Stop 128
gatatgccaatgtgatgtatcctgc

SEQ ID NO: 295183 - DNA, 25 bp, Artificial
  probe
  misc_feature (1)..(25): SEQ ID NO: 1470; WAN024C5R; Start 586; Stop 610
gttaagattatggtgccgattacct

SEQ ID NO: 295184 - DNA, 25 bp, Artificial
  probe
  misc_feature (1)..(25): SEQ ID NO: 1470; WAN024C5R; Start 585; Stop 609
tgttaagattatggtgccgattacc

SEQ ID NO: 295185 - DNA, 25 bp, Artificial
  probe
  misc_feature (1)..(25): SEQ ID NO: 1470; WAN024C5R; Start 413; Stop 437
tgttcttccttgcgatgaatacgat

SEQ ID NO: 295186 - DNA, 25 bp, Artificial
  probe
  misc_feature (1)..(25): SEQ ID NO: 1470; WAN024C5R; Start 691; Stop 715
cttctaccagccctatttacacttt

SEQ ID NO: 295187 - DNA, 25 bp, Artificial
  probe
  misc_feature (1)..(25): SEQ ID NO: 1470; WAN024C5R; Start 490; Stop 514
actgtgattgataaactaagcgaac

SEQ ID NO: 295188 - DNA, 25 bp, Artificial
  probe
  misc_feature (1)..(25): SEQ ID NO: 1470; WAN024C5R; Start 496; Stop 520
attgataaactaagcgaacagatgg

SEQ ID NO: 295189 - DNA, 25 bp, Artificial
  probe
  misc_feature (1)..(25): SEQ ID NO: 1471; WAN024FLR; Start 107; Stop 131
ataccgtaattgccttgttatctaa

SEQ ID NO: 295190 - DNA, 25 bp, Artificial
  probe
  misc_feature (1)..(25): SEQ ID NO: 1471; WAN024FLR; Start 106; Stop 130
aataccgtaattgccttgttatcta

SEQ ID NO: 295191 - DNA, 25 bp, Artificial
  probe
  misc_feature (1)..(25): SEQ ID NO: 1471; WAN024FLR; Start 105; Stop 129
aaataccgtaattgccttgttatct

SEQ ID NO: 295192 - DNA, 25 bp, Artificial
  probe
  misc_feature (1)..(25): SEQ ID NO: 1471; WAN024FLR; Start 173; Stop 197
tttgctccataaatacttcctttct

SEQ ID NO: 295193 - DNA, 25 bp, Artificial
  probe
  misc_feature (1)..(25): SEQ ID NO: 1471; WAN024FLR; Start 108; Stop 132
taccgtaattgccttgttatctaaa

SEQ ID NO: 295194 - DNA, 25 bp, Artificial
  probe
  misc_feature (1)..(25): SEQ ID NO: 1471; WAN024FLR; Start 187; Stop 211
acttcctttctattgttctctcatt

SEQ ID NO: 295195 - DNA, 25 bp, Artificial
  probe
  misc_feature (1)..(25): SEQ ID NO: 1471; WAN024FLR; Start 75; Stop 99
aagattcagtcccaataataaggtt

SEQ ID NO: 295196 - DNA, 25 bp, Artificial
  probe
  misc_feature (1)..(25): SEQ ID NO: 1471; WAN024FLR; Start 74; Stop 98
aaagattcagtcccaataataaggt

SEQ ID NO: 295197 - DNA, 25 bp, Artificial
  probe
  misc_feature (1)..(25): SEQ ID NO: 1471; WAN024FLR; Start 174; Stop 198
ttgctccataaatacttcctttcta

SEQ ID NO: 295198 - DNA, 25 bp, Artificial
  probe
  misc_feature (1)..(25): SEQ ID NO: 1471; WAN024FLR; Start 175; Stop 199
tgctccataaatacttcctttctat

SEQ ID NO: 295199 - DNA, 25 bp, Artificial
  probe
  misc_feature (1)..(25): SEQ ID NO: 1471; WAN024FLR; Start 186; Stop 210
tacttcctttctattgttctctcat

SEQ ID NO: 295200 - DNA, 25 bp, Artificial
  probe
  misc_feature (1)..(25): SEQ ID NO: 1471; WAN024FLR; Start 185; Stop 209
atacttcctttctattgttctctca

SEQ ID NO: 295201 - DNA, 25 bp, Artificial
  probe
  misc_feature (1)..(25): SEQ ID NO: 1471; WAN024FLR; Start 77; Stop 101
gattcagtcccaataataaggttac

SEQ ID NO: 295202 - DNA, 25 bp, Artificial
  probe
  misc_feature (1)..(25): SEQ ID NO: 1471; WAN024FLR; Start 76; Stop 100
agattcagtcccaataataaggtta

SEQ ID NO: 295203 - DNA, 25 bp, Artificial
  probe
  misc_feature (1)..(25): SEQ ID NO: 1471; WAN024FLR; Start 78; Stop 102
attcagtcccaataataaggttact

SEQ ID NO: 295204 - DNA, 25 bp, Artificial
  probe
  misc_feature (1)..(25): SEQ ID NO: 1471; WAN024FLR; Start 80; Stop 104
tcagtcccaataataaggttactaa

SEQ ID NO: 295205 - DNA, 25 bp, Artificial
  probe
  misc_feature (1)..(25): SEQ ID NO: 1471; WAN024FLR; Start 79; Stop 103
ttcagtcccaataataaggttacta

SEQ ID NO: 295206 - DNA, 25 bp, Artificial
  probe
  misc_feature (1)..(25): SEQ ID NO: 1471; WAN024FLR; Start 109; Stop 133
accgtaattgccttgttatctaaaa

SEQ ID NO: 295207 - DNA, 25 bp, Artificial
  probe
  misc_feature (1)..(25): SEQ ID NO: 1471; WAN024FLR; Start 176; Stop 200
gctccataaatacttcctttctatt

SEQ ID NO: 295208 - DNA, 25 bp, Artificial
  probe
  misc_feature (1)..(25): SEQ ID NO: 1471; WAN024FLR; Start 146; Stop 170
accaagataggctaaaatgtttctc

SEQ ID NO: 295209 - DNA, 25 bp, Artificial
  probe
  misc_feature (1)..(25): SEQ ID NO: 1471; WAN024FLR; Start 188; Stop 212
cttcctttctattgttctctcatta

SEQ ID NO: 295210 - DNA, 25 bp, Artificial
  probe
  misc_feature (1)..(25): SEQ ID NO: 1471; WAN024FLR; Start 147; Stop 171
ccaagataggctaaaatgtttctct

SEQ ID NO: 295211 - DNA, 25 bp, Artificial
  probe
  misc_feature (1)..(25): SEQ ID NO: 1471; WAN024FLR; Start 145; Stop 169
aaccaagataggctaaaatgtttct

SEQ ID NO: 295212 - DNA, 25 bp, Artificial
  probe
  misc_feature (1)..(25): SEQ ID NO: 1471; WAN024FLR; Start 195; Stop 219
tctattgttctctcattataccatt

SEQ ID NO: 295213 - DNA, 25 bp, Artificial
  probe
  misc_feature (1)..(25): SEQ ID NO: 1471; WAN024FLR; Start 194; Stop 218
ttctattgttctctcattataccat

SEQ ID NO: 295214 - DNA, 25 bp, Artificial
  probe
  misc_feature (1)..(25): SEQ ID NO: 1471; WAN024FLR; Start 104; Stop 128
aaaataccgtaattgccttgttatc

SEQ ID NO: 295215 - DNA, 25 bp, Artificial
  probe
  misc_feature (1)..(25): SEQ ID NO: 1471; WAN024FLR; Start 184; Stop 208
aatacttcctttctattgttctctc

SEQ ID NO: 295216 - DNA, 25 bp, Artificial
  probe
  misc_feature (1)..(25): SEQ ID NO: 1471; WAN024FLR; Start 172; Stop 196
ttttgctccataaatacttcctttc

SEQ ID NO: 295217 - DNA, 25 bp, Artificial
  probe
  misc_feature (1)..(25): SEQ ID NO: 1471; WAN024FLR; Start 81; Stop 105
cagtcccaataataaggttactaaa

SEQ ID NO: 295218 - DNA, 25 bp, Artificial
  probe
  misc_feature (1)..(25): SEQ ID NO: 1471; WAN024FLR; Start 183; Stop 207
aaatacttcctttctattgttctct

SEQ ID NO: 295219 - DNA, 25 bp, Artificial
  probe
  misc_feature (1)..(25): SEQ ID NO: 1471; WAN024FLR; Start 189; Stop 213
ttcctttctattgttctctcattat

SEQ ID NO: 295220 - DNA, 25 bp, Artificial
  probe
  misc_feature (1)..(25): SEQ ID NO: 1471; WAN024FLR; Start 178; Stop 202
tccataaatacttcctttctattgt

SEQ ID NO: 295221 - DNA, 25 bp, Artificial
  probe
  misc_feature (1)..(25): SEQ ID NO: 1471; WAN024FLR; Start 73; Stop 97
aaaagattcagtcccaataataagg

SEQ ID NO: 295222 - DNA, 25 bp, Artificial
  probe
  misc_feature (1)..(25): SEQ ID NO: 1472; WAN024FQF; Start 52; Stop 76
actgttgatgtggatatggtgatta

SEQ ID NO: 295223 - DNA, 25 bp, Artificial
  probe
  misc_feature (1)..(25): SEQ ID NO: 1472; WAN024FQF; Start 53; Stop 77
ctgttgatgtggatatggtgattac

SEQ ID NO: 295224 - DNA, 25 bp, Artificial
  probe
  misc_feature (1)..(25): SEQ ID NO: 1472; WAN024FQF; Start 51; Stop 75
aactgttgatgtggatatggtgatt

SEQ ID NO: 295225 - DNA, 25 bp, Artificial
  probe
  misc_feature (1)..(25): SEQ ID NO: 1472; WAN024FQF; Start 54; Stop 78
tgttgatgtggatatggtgattaca

SEQ ID NO: 295226 - DNA, 25 bp, Artificial
  probe
  misc_feature (1)..(25): SEQ ID NO: 1472; WAN024FQF; Start 56; Stop 80
ttgatgtggatatggtgattacaga

SEQ ID NO: 295227 - DNA, 25 bp, Artificial
  probe
  misc_feature (1)..(25): SEQ ID NO: 1472; WAN024FQF; Start 55; Stop 79
gttgatgtggatatggtgattacag

SEQ ID NO: 295228 - DNA, 25 bp, Artificial
  probe
  misc_feature (1)..(25): SEQ ID NO: 1472; WAN024FQF; Start 57; Stop 81
tgatgtggatatggtgattacagat

SEQ ID NO: 295229 - DNA, 25 bp, Artificial
  probe
  misc_feature (1)..(25): SEQ ID NO: 1472; WAN024FQF; Start 88; Stop 112
gagcagcatgtcaataacgatacta

SEQ ID NO: 295230 - DNA, 25 bp, Artificial
  probe
  misc_feature (1)..(25): SEQ ID NO: 1472; WAN024FQF; Start 89; Stop 113
agcagcatgtcaataacgatactac

SEQ ID NO: 295231 - DNA, 25 bp, Artificial
  probe
  misc_feature (1)..(25): SEQ ID NO: 1472; WAN024FQF; Start 97; Stop 121
gtcaataacgatactacagtacgaa

SEQ ID NO: 295232 - DNA, 25 bp, Artificial
  probe
  misc_feature (1)..(25): SEQ ID NO: 1472; WAN024FQF; Start 256; Stop 280
tatgttgacattcagtacacactct

SEQ ID NO: 295233 - DNA, 25 bp, Artificial
  probe
  misc_feature (1)..(25): SEQ ID NO: 1472; WAN024FQF; Start 257; Stop 281
atgttgacattcagtacacactctt

SEQ ID NO: 295234 - DNA, 25 bp, Artificial
  probe
  misc_feature (1)..(25): SEQ ID NO: 1472; WAN024FQF; Start 58; Stop 82
gatgtggatatggtgattacagatt

SEQ ID NO: 295235 - DNA, 25 bp, Artificial
  probe
  misc_feature (1)..(25): SEQ ID NO: 1472; WAN024FQF; Start 96; Stop 120
tgtcaataacgatactacagtacga

SEQ ID NO: 295236 - DNA, 25 bp, Artificial
  probe
  misc_feature (1)..(25): SEQ ID NO: 1472; WAN024FQF; Start 255; Stop 279
ttatgttgacattcagtacacactc

SEQ ID NO: 295237 - DNA, 25 bp, Artificial
  probe
  misc_feature (1)..(25): SEQ ID NO: 1472; WAN024FQF; Start 92; Stop 116
agcatgtcaataacgatactacagt

SEQ ID NO: 295238 - DNA, 25 bp, Artificial
  probe
  misc_feature (1)..(25): SEQ ID NO: 1472; WAN024FQF; Start 91; Stop 115
cagcatgtcaataacgatactacag

SEQ ID NO: 295239 - DNA, 25 bp, Artificial
  probe
  misc_feature (1)..(25): SEQ ID NO: 1472; WAN024FQF; Start 87; Stop 111
agagcagcatgtcaataacgatact

SEQ ID NO: 295240 - DNA, 25 bp, Artificial
  probe
  misc_feature (1)..(25): SEQ ID NO: 1472; WAN024FQF; Start 86; Stop 110
cagagcagcatgtcaataacgatac

SEQ ID NO: 295241 - DNA, 25 bp, Artificial
  probe
  misc_feature (1)..(25): SEQ ID NO: 1472; WAN024FQF; Start 369; Stop 393
tgagagtatgaagcgaaatgtaagt

SEQ ID NO: 295242 - DNA, 25 bp, Artificial
  probe
  misc_feature (1)..(25): SEQ ID NO: 1472; WAN024FQF; Start 95; Stop 119
atgtcaataacgatactacagtacg

SEQ ID NO: 295243 - DNA, 25 bp, Artificial
  probe
  misc_feature (1)..(25): SEQ ID NO: 1472; WAN024FQF; Start 90; Stop 114
gcagcatgtcaataacgatactaca

SEQ ID NO: 295244 - DNA, 25 bp, Artificial
  probe
  misc_feature (1)..(25): SEQ ID NO: 1472; WAN024FQF; Start 361; Stop 385
atgaatattgagagtatgaagcgaa

SEQ ID NO: 295245 - DNA, 25 bp, Artificial
  probe
  misc_feature (1)..(25): SEQ ID NO: 1472; WAN024FQF; Start 370; Stop 394
gagagtatgaagcgaaatgtaagtc

SEQ ID NO: 295246 - DNA, 25 bp, Artificial
  probe
  misc_feature (1)..(25): SEQ ID NO: 1472; WAN024FQF; Start 93; Stop 117
gcatgtcaataacgatactacagta

SEQ ID NO: 295247 - DNA, 25 bp, Artificial
  probe
  misc_feature (1)..(25): SEQ ID NO: 1472; WAN024FQF; Start 46; Stop 70
cttgaaactgttgatgtggatatgg

SEQ ID NO: 295248 - DNA, 25 bp, Artificial
  probe
  misc_feature (1)..(25): SEQ ID NO: 1472; WAN024FQF; Start 50; Stop 74
aaactgttgatgtggatatggtgat

SEQ ID NO: 295249 - DNA, 25 bp, Artificial
  probe
  misc_feature (1)..(25): SEQ ID NO: 1472; WAN024FQF; Start 368; Stop 392
ttgagagtatgaagcgaaatgtaag

SEQ ID NO: 295250 - DNA, 25 bp, Artificial
  probe
  misc_feature (1)..(25): SEQ ID NO: 1472; WAN024FQF; Start 47; Stop 71
ttgaaactgttgatgtggatatggt

SEQ ID NO: 295251 - DNA, 25 bp, Artificial
  probe
  misc_feature (1)..(25): SEQ ID NO: 1472; WAN024FQF; Start 45; Stop 69
tcttgaaactgttgatgtggatatg

SEQ ID NO: 295252 - DNA, 25 bp, Artificial
  probe
  misc_feature (1)..(25): SEQ ID NO: 1472; WAN024FQF; Start 478; Stop 502
accttagtttatctcatcagtttgc

SEQ ID NO: 295253 - DNA, 25 bp, Artificial
  probe
  misc_feature (1)..(25): SEQ ID NO: 1472; WAN024FQF; Start 44; Stop 68
ctcttgaaactgttgatgtggatat

SEQ ID NO: 295254 - DNA, 25 bp, Artificial
  probe
  misc_feature (1)..(25): SEQ ID NO: 1472; WAN024FQF; Start 49; Stop 73
gaaactgttgatgtggatatggtga

SEQ ID NO: 295255 - DNA, 25 bp, Artificial
  probe
  misc_feature (1)..(25): SEQ ID NO: 1473; WAN024DIK; Start 304; Stop 328
cttggaattactgctcagactgtaa

SEQ ID NO: 295256 - DNA, 25 bp, Artificial
  probe
  misc_feature (1)..(25): SEQ ID NO: 1473; WAN024DIK; Start 303; Stop 327
gcttggaattactgctcagactgta

SEQ ID NO: 295257 - DNA, 25 bp, Artificial
  probe
  misc_feature (1)..(25): SEQ ID NO: 1473; WAN024DIK; Start 234; Stop 258
ctacggaacaaagattagtgaagtg

SEQ ID NO: 295258 - DNA, 25 bp, Artificial
  probe
  misc_feature (1)..(25): SEQ ID NO: 1473; WAN024DIK; Start 118; Stop 142
aatgccctcaaagataatttccaag

SEQ ID NO: 295259 - DNA, 25 bp, Artificial
  probe
  misc_feature (1)..(25): SEQ ID NO: 1473; WAN024DIK; Start 233; Stop 257
gctacggaacaaagattagtgaagt

SEQ ID NO: 295260 - DNA, 25 bp, Artificial
  probe
  misc_feature (1)..(25): SEQ ID NO: 1473; WAN024DIK; Start 235; Stop 259
tacggaacaaagattagtgaagtgt

SEQ ID NO: 295261 - DNA, 25 bp, Artificial
  probe
  misc_feature (1)..(25): SEQ ID NO: 1473; WAN024DIK; Start 238; Stop 262
ggaacaaagattagtgaagtgtcaa

SEQ ID NO: 295262 - DNA, 25 bp, Artificial
  probe
  misc_feature (1)..(25): SEQ ID NO: 1473; WAN024DIK; Start 117; Stop 141
aaatgccctcaaagataatttccaa

SEQ ID NO: 295263 - DNA, 25 bp, Artificial
  probe
  misc_feature (1)..(25): SEQ ID NO: 1473; WAN024DIK; Start 123; Stop 147
cctcaaagataatttccaagccctg

SEQ ID NO: 295264 - DNA, 25 bp, Artificial
  probe
  misc_feature (1)..(25): SEQ ID NO: 1473; WAN024DIK; Start 119; Stop 143
atgccctcaaagataatttccaagc

SEQ ID NO: 295265 - DNA, 25 bp, Artificial
  probe
  misc_feature (1)..(25): SEQ ID NO: 1473; WAN024DIK; Start 237; Stop 261
cggaacaaagattagtgaagtgtca

SEQ ID NO: 295266 - DNA, 25 bp, Artificial
  probe
  misc_feature (1)..(25): SEQ ID NO: 1473; WAN024DIK; Start 236; Stop 260
acggaacaaagattagtgaagtgtc

SEQ ID NO: 295267 - DNA, 25 bp, Artificial
  probe
  misc_feature (1)..(25): SEQ ID NO: 1473; WAN024DIK; Start 306; Stop 330
tggaattactgctcagactgtaaat

SEQ ID NO: 295268 - DNA, 25 bp, Artificial
  probe
  misc_feature (1)..(25): SEQ ID NO: 1473; WAN024DIK; Start 305; Stop 329
ttggaattactgctcagactgtaaa

SEQ ID NO: 295269 - DNA, 25 bp, Artificial
  probe
  misc_feature (1)..(25): SEQ ID NO: 1473; WAN024DIK; Start 230; Stop 254
taagctacggaacaaagattagtga

SEQ ID NO: 295270 - DNA, 25 bp, Artificial
  probe
  misc_feature (1)..(25): SEQ ID NO: 1473; WAN024DIK; Start 307; Stop 331
ggaattactgctcagactgtaaatg

SEQ ID NO: 295271 - DNA, 25 bp, Artificial
  probe
  misc_feature (1)..(25): SEQ ID NO: 1473; WAN024DIK; Start 231; Stop 255
aagctacggaacaaagattagtgaa

SEQ ID NO: 295272 - DNA, 25 bp, Artificial
  probe
  misc_feature (1)..(25): SEQ ID NO: 1473; WAN024DIK; Start 232; Stop 256
agctacggaacaaagattagtgaag

SEQ ID NO: 295273 - DNA, 25 bp, Artificial
  probe
  misc_feature (1)..(25): SEQ ID NO: 1473; WAN024DIK; Start 124; Stop 148
ctcaaagataatttccaagccctgc

SEQ ID NO: 295274 - DNA, 25 bp, Artificial
  probe
  misc_feature (1)..(25): SEQ ID NO: 1473; WAN024DIK; Start 309; Stop 333
aattactgctcagactgtaaatgtc

SEQ ID NO: 295275 - DNA, 25 bp, Artificial
  probe
  misc_feature (1)..(25): SEQ ID NO: 1473; WAN024DIK; Start 308; Stop 332
gaattactgctcagactgtaaatgt

SEQ ID NO: 295276 - DNA, 25 bp, Artificial
  probe
  misc_feature (1)..(25): SEQ ID NO: 1473; WAN024DIK; Start 229; Stop 253
ttaagctacggaacaaagattagtg

SEQ ID NO: 295277 - DNA, 25 bp, Artificial
  probe
  misc_feature (1)..(25): SEQ ID NO: 1473; WAN024DIK; Start 239; Stop 263
gaacaaagattagtgaagtgtcaaa

SEQ ID NO: 295278 - DNA, 25 bp, Artificial
  probe
  misc_feature (1)..(25): SEQ ID NO: 1473; WAN024DIK; Start 228; Stop 252
gttaagctacggaacaaagattagt

SEQ ID NO: 295279 - DNA, 25 bp, Artificial
  probe
  misc_feature (1)..(25): SEQ ID NO: 1473; WAN024DIK; Start 122; Stop 146
ccctcaaagataatttccaagccct

SEQ ID NO: 295280 - DNA, 25 bp, Artificial
  probe
  misc_feature (1)..(25): SEQ ID NO: 1473; WAN024DIK; Start 198; Stop 222
tggcagtattgcagttgatgtatat

SEQ ID NO: 295281 - DNA, 25 bp, Artificial
  probe
  misc_feature (1)..(25): SEQ ID NO: 1473; WAN024DIK; Start 197; Stop 221
atggcagtattgcagttgatgtata

SEQ ID NO: 295282 - DNA, 25 bp, Artificial
  probe
  misc_feature (1)..(25): SEQ ID NO: 1473; WAN024DIK; Start 207; Stop 231
tgcagttgatgtatataccgtgtta

SEQ ID NO: 295283 - DNA, 25 bp, Artificial
  probe
  misc_feature (1)..(25): SEQ ID NO: 1473; WAN024DIK; Start 205; Stop 229
attgcagttgatgtatataccgtgt

SEQ ID NO: 295284 - DNA, 25 bp, Artificial
  probe
  misc_feature (1)..(25): SEQ ID NO: 1473; WAN024DIK; Start 206; Stop 230
ttgcagttgatgtatataccgtgtt

SEQ ID NO: 295285 - DNA, 25 bp, Artificial
  probe
  misc_feature (1)..(25): SEQ ID NO: 1473; WAN024DIK; Start 199; Stop 223
ggcagtattgcagttgatgtatata

SEQ ID NO: 295286 - DNA, 25 bp, Artificial
  probe
  misc_feature (1)..(25): SEQ ID NO: 1473; WAN024DIK; Start 208; Stop 232
gcagttgatgtatataccgtgttaa

SEQ ID NO: 295287 - DNA, 25 bp, Artificial
  probe
  misc_feature (1)..(25): SEQ ID NO: 1473; WAN024DIK; Start 127; Stop 151
aaagataatttccaagccctgctag

SEQ ID NO: 295288 - DNA, 25 bp, Artificial
  probe
  misc_feature (1)..(25): SEQ ID NO: 1474; WAN024FLQ; Start 897; Stop 921
gaagatgtcagttgaagaatacgca

SEQ ID NO: 295289 - DNA, 25 bp, Artificial
  probe
  misc_feature (1)..(25): SEQ ID NO: 1474; WAN024FLQ; Start 898; Stop 922
aagatgtcagttgaagaatacgcaa

SEQ ID NO: 295290 - DNA, 25 bp, Artificial
  probe
  misc_feature (1)..(25): SEQ ID NO: 1474; WAN024FLQ; Start 765; Stop 789
tcagttaatctgtatggcattggaa

SEQ ID NO: 295291 - DNA, 25 bp, Artificial
  probe
  misc_feature (1)..(25): SEQ ID NO: 1474; WAN024FLQ; Start 764; Stop 788
ttcagttaatctgtatggcattgga

SEQ ID NO: 295292 - DNA, 25 bp, Artificial
  probe
  misc_feature (1)..(25): SEQ ID NO: 1474; WAN024FLQ; Start 896; Stop 920
ggaagatgtcagttgaagaatacgc

SEQ ID NO: 295293 - DNA, 25 bp, Artificial
  probe
  misc_feature (1)..(25): SEQ ID NO: 1474; WAN024FLQ; Start 894; Stop 918
agggaagatgtcagttgaagaatac

SEQ ID NO: 295294 - DNA, 25 bp, Artificial
  probe
  misc_feature (1)..(25): SEQ ID NO: 1474; WAN024FLQ; Start 892; Stop 916
ttagggaagatgtcagttgaagaat

SEQ ID NO: 295295 - DNA, 25 bp, Artificial
  probe
  misc_feature (1)..(25): SEQ ID NO: 1474; WAN024FLQ; Start 891; Stop 915
gttagggaagatgtcagttgaagaa

SEQ ID NO: 295296 - DNA, 25 bp, Artificial
  probe
  misc_feature (1)..(25): SEQ ID NO: 1474; WAN024FLQ; Start 886; Stop 910
aaatcgttagggaagatgtcagttg

SEQ ID NO: 295297 - DNA, 25 bp, Artificial
  probe
  misc_feature (1)..(25): SEQ ID NO: 1474; WAN024FLQ; Start 325; Stop 349
agtgagtctaggattatttgcgatt

SEQ ID NO: 295298 - DNA, 25 bp, Artificial
  probe
  misc_feature (1)..(25): SEQ ID NO: 1474; WAN024FLQ; Start 893; Stop 917
tagggaagatgtcagttgaagaata

SEQ ID NO: 295299 - DNA, 25 bp, Artificial
  probe
  misc_feature (1)..(25): SEQ ID NO: 1474; WAN024FLQ; Start 266; Stop 290
cgtctctttatcaagttcctggttt

SEQ ID NO: 295300 - DNA, 25 bp, Artificial
  probe
  misc_feature (1)..(25): SEQ ID NO: 1474; WAN024FLQ; Start 326; Stop 350
gtgagtctaggattatttgcgattt

SEQ ID NO: 295301 - DNA, 25 bp, Artificial
  probe
  misc_feature (1)..(25): SEQ ID NO: 1474; WAN024FLQ; Start 895; Stop 919
gggaagatgtcagttgaagaatacg

SEQ ID NO: 295302 - DNA, 25 bp, Artificial
  probe
  misc_feature (1)..(25): SEQ ID NO: 1474; WAN024FLQ; Start 324; Stop 348
tagtgagtctaggattatttgcgat

SEQ ID NO: 295303 - DNA, 25 bp, Artificial
  probe
  misc_feature (1)..(25): SEQ ID NO: 1474; WAN024FLQ; Start 323; Stop 347
atagtgagtctaggattatttgcga

SEQ ID NO: 295304 - DNA, 25 bp, Artificial
  probe
  misc_feature (1)..(25): SEQ ID NO: 1474; WAN024FLQ; Start 899; Stop 923
agatgtcagttgaagaatacgcaaa

SEQ ID NO: 295305 - DNA, 25 bp, Artificial
  probe
  misc_feature (1)..(25): SEQ ID NO: 1474; WAN024FLQ; Start 322; Stop 346
gatagtgagtctaggattatttgcg

SEQ ID NO: 295306 - DNA, 25 bp, Artificial
  probe
  misc_feature (1)..(25): SEQ ID NO: 1474; WAN024FLQ; Start 1172; Stop 1196
atggtattagccagcttgatacaat

SEQ ID NO: 295307 - DNA, 25 bp, Artificial
  probe
  misc_feature (1)..(25): SEQ ID NO: 1474; WAN024FLQ; Start 1173; Stop 1197
tggtattagccagcttgatacaatt

SEQ ID NO: 295308 - DNA, 25 bp, Artificial
  probe
  misc_feature (1)..(25): SEQ ID NO: 1474; WAN024FLQ; Start 1171; Stop 1195
aatggtattagccagcttgatacaa

SEQ ID NO: 295309 - DNA, 25 bp, Artificial
  probe
  misc_feature (1)..(25): SEQ ID NO: 1474; WAN024FLQ; Start 888; Stop 912
atcgttagggaagatgtcagttgaa

SEQ ID NO: 295310 - DNA, 25 bp, Artificial
  probe
  misc_feature (1)..(25): SEQ ID NO: 1474; WAN024FLQ; Start 887; Stop 911
aatcgttagggaagatgtcagttga

SEQ ID NO: 295311 - DNA, 25 bp, Artificial
  probe
  misc_feature (1)..(25): SEQ ID NO: 1474; WAN024FLQ; Start 766; Stop 790
cagttaatctgtatggcattggaaa

SEQ ID NO: 295312 - DNA, 25 bp, Artificial
  probe
  misc_feature (1)..(25): SEQ ID NO: 1474; WAN024FLQ; Start 763; Stop 787
tttcagttaatctgtatggcattgg

SEQ ID NO: 295313 - DNA, 25 bp, Artificial
  probe
  misc_feature (1)..(25): SEQ ID NO: 1474; WAN024FLQ; Start 497; Stop 521
actatgaaccaggtttctatccatg

SEQ ID NO: 295314 - DNA, 25 bp, Artificial
  probe
  misc_feature (1)..(25): SEQ ID NO: 1474; WAN024FLQ; Start 496; Stop 520
gactatgaaccaggtttctatccat

SEQ ID NO: 295315 - DNA, 25 bp, Artificial
  probe
  misc_feature (1)..(25): SEQ ID NO: 1474; WAN024FLQ; Start 494; Stop 518
aagactatgaaccaggtttctatcc

SEQ ID NO: 295316 - DNA, 25 bp, Artificial
  probe
  misc_feature (1)..(25): SEQ ID NO: 1474; WAN024FLQ; Start 321; Stop 345
tgatagtgagtctaggattatttgc

SEQ ID NO: 295317 - DNA, 25 bp, Artificial
  probe
  misc_feature (1)..(25): SEQ ID NO: 1474; WAN024FLQ; Start 890; Stop 914
cgttagggaagatgtcagttgaaga

SEQ ID NO: 295318 - DNA, 25 bp, Artificial
  probe
  misc_feature (1)..(25): SEQ ID NO: 1474; WAN024FLQ; Start 889; Stop 913
tcgttagggaagatgtcagttgaag

SEQ ID NO: 295319 - DNA, 25 bp, Artificial
  probe
  misc_feature (1)..(25): SEQ ID NO: 1474; WAN024FLQ; Start 495; Stop 519
agactatgaaccaggtttctatcca

SEQ ID NO: 295320 - DNA, 25 bp, Artificial
  probe
  misc_feature (1)..(25): SEQ ID NO: 1474; WAN024FLQ; Start 327; Stop 351
tgagtctaggattatttgcgattta

SEQ ID NO: 295321 - DNA, 25 bp, Artificial
  probe
  misc_feature (1)..(25): SEQ ID NO: 1475; WAN024CEB; Start 532; Stop 556
atcaatgatacctccgttacagatt

SEQ ID NO: 295322 - DNA, 25 bp, Artificial
  probe
  misc_feature (1)..(25): SEQ ID NO: 1475; WAN024CEB; Start 531; Stop 555
aatcaatgatacctccgttacagat

SEQ ID NO: 295323 - DNA, 25 bp, Artificial
  probe
  misc_feature (1)..(25): SEQ ID NO: 1475; WAN024CEB; Start 502; Stop 526
ggtaatcaatactttccaagaagcc

SEQ ID NO: 295324 - DNA, 25 bp, Artificial
  probe
  misc_feature (1)..(25): SEQ ID NO: 1475; WAN024CEB; Start 538; Stop 562
gatacctccgttacagattgtagag

SEQ ID NO: 295325 - DNA, 25 bp, Artificial
  probe
  misc_feature (1)..(25): SEQ ID NO: 1475; WAN024CEB; Start 539; Stop 563
atacctccgttacagattgtagaga

SEQ ID NO: 295326 - DNA, 25 bp, Artificial
  probe
  misc_feature (1)..(25): SEQ ID NO: 1475; WAN024CEB; Start 536; Stop 560
atgatacctccgttacagattgtag

SEQ ID NO: 295327 - DNA, 25 bp, Artificial
  probe
  misc_feature (1)..(25): SEQ ID NO: 1475; WAN024CEB; Start 533; Stop 557
tcaatgatacctccgttacagattg

SEQ ID NO: 295328 - DNA, 25 bp, Artificial
  probe
  misc_feature (1)..(25): SEQ ID NO: 1475; WAN024CEB; Start 540; Stop 564
tacctccgttacagattgtagagaa

SEQ ID NO: 295329 - DNA, 25 bp, Artificial
  probe
  misc_feature (1)..(25): SEQ ID NO: 1475; WAN024CEB; Start 537; Stop 561
tgatacctccgttacagattgtaga

SEQ ID NO: 295330 - DNA, 25 bp, Artificial
  probe
  misc_feature (1)..(25): SEQ ID NO: 1475; WAN024CEB; Start 534; Stop 558
caatgatacctccgttacagattgt

SEQ ID NO: 295331 - DNA, 25 bp, Artificial
  probe
  misc_feature (1)..(25): SEQ ID NO: 1475; WAN024CEB; Start 325; Stop 349
atagttggaaccttgttgctttatc

SEQ ID NO: 295332 - DNA, 25 bp, Artificial
  probe
  misc_feature (1)..(25): SEQ ID NO: 1475; WAN024CEB; Start 535; Stop 559
aatgatacctccgttacagattgta

SEQ ID NO: 295333 - DNA, 25 bp, Artificial
  probe
  misc_feature (1)..(25): SEQ ID NO: 1475; WAN024CEB; Start 326; Stop 350
tagttggaaccttgttgctttatca

SEQ ID NO: 295334 - DNA, 25 bp, Artificial
  probe
  misc_feature (1)..(25): SEQ ID NO: 1475; WAN024CEB; Start 503; Stop 527
gtaatcaatactttccaagaagcct

SEQ ID NO: 295335 - DNA, 25 bp, Artificial
  probe
  misc_feature (1)..(25): SEQ ID NO: 1475; WAN024CEB; Start 501; Stop 525
aggtaatcaatactttccaagaagc

SEQ ID NO: 295336 - DNA, 25 bp, Artificial
  probe
  misc_feature (1)..(25): SEQ ID NO: 1475; WAN024CEB; Start 329; Stop 353
ttggaaccttgttgctttatcaaat

SEQ ID NO: 295337 - DNA, 25 bp, Artificial
  probe
  misc_feature (1)..(25): SEQ ID NO: 1475; WAN024CEB; Start 323; Stop 347
aaatagttggaaccttgttgcttta

SEQ ID NO: 295338 - DNA, 25 bp, Artificial
  probe
  misc_feature (1)..(25): SEQ ID NO: 1475; WAN024CEB; Start 331; Stop 355
ggaaccttgttgctttatcaaatgt

SEQ ID NO: 295339 - DNA, 25 bp, Artificial
  probe
  misc_feature (1)..(25): SEQ ID NO: 1475; WAN024CEB; Start 330; Stop 354
tggaaccttgttgctttatcaaatg

SEQ ID NO: 295340 - DNA, 25 bp, Artificial
  probe
  misc_feature (1)..(25): SEQ ID NO: 1475; WAN024CEB; Start 324; Stop 348
aatagttggaaccttgttgctttat

SEQ ID NO: 295341 - DNA, 25 bp, Artificial
  probe
  misc_feature (1)..(25): SEQ ID NO: 1475; WAN024CEB; Start 328; Stop 352
gttggaaccttgttgctttatcaaa

SEQ ID NO: 295342 - DNA, 25 bp, Artificial
  probe
  misc_feature (1)..(25): SEQ ID NO: 1475; WAN024CEB; Start 530; Stop 554
aaatcaatgatacctccgttacaga

SEQ ID NO: 295343 - DNA, 25 bp, Artificial
  probe
  misc_feature (1)..(25): SEQ ID NO: 1475; WAN024CEB; Start 332; Stop 356
gaaccttgttgctttatcaaatgtt

SEQ ID NO: 295344 - DNA, 25 bp, Artificial
  probe
  misc_feature (1)..(25): SEQ ID NO: 1475; WAN024CEB; Start 507; Stop 531
tcaatactttccaagaagccttaaa

SEQ ID NO: 295345 - DNA, 25 bp, Artificial
  probe
  misc_feature (1)..(25): SEQ ID NO: 1475; WAN024CEB; Start 327; Stop 351
agttggaaccttgttgctttatcaa

SEQ ID NO: 295346 - DNA, 25 bp, Artificial
  probe
  misc_feature (1)..(25): SEQ ID NO: 1475; WAN024CEB; Start 505; Stop 529
aatcaatactttccaagaagcctta

SEQ ID NO: 295347 - DNA, 25 bp, Artificial
  probe
  misc_feature (1)..(25): SEQ ID NO: 1475; WAN024CEB; Start 504; Stop 528
taatcaatactttccaagaagcctt

SEQ ID NO: 295348 - DNA, 25 bp, Artificial
  probe
  misc_feature (1)..(25): SEQ ID NO: 1475; WAN024CEB; Start 506; Stop 530
atcaatactttccaagaagccttaa

SEQ ID NO: 295349 - DNA, 25 bp, Artificial
  probe
  misc_feature (1)..(25): SEQ ID NO: 1475; WAN024CEB; Start 334; Stop 358
accttgttgctttatcaaatgttac

SEQ ID NO: 295350 - DNA, 25 bp, Artificial
  probe
  misc_feature (1)..(25): SEQ ID NO: 1475; WAN024CEB; Start 335; Stop 359
ccttgttgctttatcaaatgttaca

SEQ ID NO: 295351 - DNA, 25 bp, Artificial
  probe
  misc_feature (1)..(25): SEQ ID NO: 1475; WAN024CEB; Start 124; Stop 148
acaaatatggagaactgtcctgaaa

SEQ ID NO: 295352 - DNA, 25 bp, Artificial
  probe
  misc_feature (1)..(25): SEQ ID NO: 1475; WAN024CEB; Start 333; Stop 357
aaccttgttgctttatcaaatgtta

SEQ ID NO: 295353 - DNA, 25 bp, Artificial
  probe
  misc_feature (1)..(25): SEQ ID NO: 1475; WAN024CEB; Start 125; Stop 149
caaatatggagaactgtcctgaaat

SEQ ID NO: 295354 - DNA, 25 bp, Artificial
  probe
  misc_feature (1)..(25): SEQ ID NO: 1476; WAN024DCC; Start 60; Stop 84
tgatgaacactctactactactcca

SEQ ID NO: 295355 - DNA, 25 bp, Artificial
  probe
  misc_feature (1)..(25): SEQ ID NO: 1476; WAN024DCC; Start 56; Stop 80
gctctgatgaacactctactactac

SEQ ID NO: 295356 - DNA, 25 bp, Artificial
  probe
  misc_feature (1)..(25): SEQ ID NO: 1476; WAN024DCC; Start 59; Stop 83
ctgatgaacactctactactactcc

SEQ ID NO: 295357 - DNA, 25 bp, Artificial
  probe
  misc_feature (1)..(25): SEQ ID NO: 1476; WAN024DCC; Start 62; Stop 86
atgaacactctactactactccaag

SEQ ID NO: 295358 - DNA, 25 bp, Artificial
  probe
  misc_feature (1)..(25): SEQ ID NO: 1476; WAN024DCC; Start 61; Stop 85
gatgaacactctactactactccaa

SEQ ID NO: 295359 - DNA, 25 bp, Artificial
  probe
  misc_feature (1)..(25): SEQ ID NO: 1476; WAN024DCC; Start 55; Stop 79
cgctctgatgaacactctactacta

SEQ ID NO: 295360 - DNA, 25 bp, Artificial
  probe
  misc_feature (1)..(25): SEQ ID NO: 1476; WAN024DCC; Start 58; Stop 82
tctgatgaacactctactactactc

SEQ ID NO: 295361 - DNA, 25 bp, Artificial
  probe
  misc_feature (1)..(25): SEQ ID NO: 1476; WAN024DCC; Start 57; Stop 81
ctctgatgaacactctactactact

SEQ ID NO: 295362 - DNA, 25 bp, Artificial
  probe
  misc_feature (1)..(25): SEQ ID NO: 1476; WAN024DCC; Start 457; Stop 481
gccattgaatatctaactgctcatc

SEQ ID NO: 295363 - DNA, 25 bp, Artificial
  probe
  misc_feature (1)..(25): SEQ ID NO: 1476; WAN024DCC; Start 63; Stop 87
tgaacactctactactactccaagt

SEQ ID NO: 295364 - DNA, 25 bp, Artificial
  probe
  misc_feature (1)..(25): SEQ ID NO: 1476; WAN024DCC; Start 462; Stop 486
tgaatatctaactgctcatcctgaa

SEQ ID NO: 295365 - DNA, 25 bp, Artificial
  probe
  misc_feature (1)..(25): SEQ ID NO: 1476; WAN024DCC; Start 461; Stop 485
ttgaatatctaactgctcatcctga

SEQ ID NO: 295366 - DNA, 25 bp, Artificial
  probe
  misc_feature (1)..(25): SEQ ID NO: 1476; WAN024DCC; Start 458; Stop 482
ccattgaatatctaactgctcatcc

SEQ ID NO: 295367 - DNA, 25 bp, Artificial
  probe
  misc_feature (1)..(25): SEQ ID NO: 1476; WAN024DCC; Start 794; Stop 818
atctaatggatgtgacaggtagtgt

SEQ ID NO: 295368 - DNA, 25 bp, Artificial
  probe
  misc_feature (1)..(25): SEQ ID NO: 1476; WAN024DCC; Start 460; Stop 484
attgaatatctaactgctcatcctg

SEQ ID NO: 295369 - DNA, 25 bp, Artificial
  probe
  misc_feature (1)..(25): SEQ ID NO: 1476; WAN024DCC; Start 459; Stop 483
cattgaatatctaactgctcatcct

SEQ ID NO: 295370 - DNA, 25 bp, Artificial
  probe
  misc_feature (1)..(25): SEQ ID NO: 1476; WAN024DCC; Start 796; Stop 820
ctaatggatgtgacaggtagtgttg

SEQ ID NO: 295371 - DNA, 25 bp, Artificial
  probe
  misc_feature (1)..(25): SEQ ID NO: 1476; WAN024DCC; Start 795; Stop 819
tctaatggatgtgacaggtagtgtt

SEQ ID NO: 295372 - DNA, 25 bp, Artificial
  probe
  misc_feature (1)..(25): SEQ ID NO: 1476; WAN024DCC; Start 451; Stop 475
atgacagccattgaatatctaactg

SEQ ID NO: 295373 - DNA, 25 bp, Artificial
  probe
  misc_feature (1)..(25): SEQ ID NO: 1476; WAN024DCC; Start 797; Stop 821
taatggatgtgacaggtagtgttga

SEQ ID NO: 295374 - DNA, 25 bp, Artificial
  probe
  misc_feature (1)..(25): SEQ ID NO: 1476; WAN024DCC; Start 452; Stop 476
tgacagccattgaatatctaactgc

SEQ ID NO: 295375 - DNA, 25 bp, Artificial
  probe
  misc_feature (1)..(25): SEQ ID NO: 1476; WAN024DCC; Start 486; Stop 510
aattaagcactgtgagattcgtgtt

SEQ ID NO: 295376 - DNA, 25 bp, Artificial
  probe
  misc_feature (1)..(25): SEQ ID NO: 1476; WAN024DCC; Start 1038; Stop 1062
tatcacgcctattatcgaaccaatc

SEQ ID NO: 295377 - DNA, 25 bp, Artificial
  probe
  misc_feature (1)..(25): SEQ ID NO: 1476; WAN024DCC; Start 450; Stop 474
tatgacagccattgaatatctaact

SEQ ID NO: 295378 - DNA, 25 bp, Artificial
  probe
  misc_feature (1)..(25): SEQ ID NO: 1476; WAN024DCC; Start 1037; Stop 1061
gtatcacgcctattatcgaaccaat

SEQ ID NO: 295379 - DNA, 25 bp, Artificial
  probe
  misc_feature (1)..(25): SEQ ID NO: 1476; WAN024DCC; Start 68; Stop 92
actctactactactccaagtacaca

SEQ ID NO: 295380 - DNA, 25 bp, Artificial
  probe
  misc_feature (1)..(25): SEQ ID NO: 1476; WAN024DCC; Start 66; Stop 90
acactctactactactccaagtaca

SEQ ID NO: 295381 - DNA, 25 bp, Artificial
  probe
  misc_feature (1)..(25): SEQ ID NO: 1476; WAN024DCC; Start 487; Stop 511
attaagcactgtgagattcgtgttg

SEQ ID NO: 295382 - DNA, 25 bp, Artificial
  probe
  misc_feature (1)..(25): SEQ ID NO: 1476; WAN024DCC; Start 70; Stop 94
tctactactactccaagtacacaga

SEQ ID NO: 295383 - DNA, 25 bp, Artificial
  probe
  misc_feature (1)..(25): SEQ ID NO: 1476; WAN024DCC; Start 67; Stop 91
cactctactactactccaagtacac

SEQ ID NO: 295384 - DNA, 25 bp, Artificial
  probe
  misc_feature (1)..(25): SEQ ID NO: 1476; WAN024DCC; Start 267; Stop 291
tgaaggagtcaatccacaggtaatt

SEQ ID NO: 295385 - DNA, 25 bp, Artificial
  probe
  misc_feature (1)..(25): SEQ ID NO: 1476; WAN024DCC; Start 109; Stop 133
gcaacaaatgtcctaattcctgaaa

SEQ ID NO: 295386 - DNA, 25 bp, Artificial
  probe
  misc_feature (1)..(25): SEQ ID NO: 1476; WAN024DCC; Start 71; Stop 95
ctactactactccaagtacacagag

SEQ ID NO: 295387 - DNA, 25 bp, Artificial
  probe
  misc_feature (1)..(25): SEQ ID NO: 1477; WAN024DFT; Start 94; Stop 118
gatgtctatggaatggctgttgtaa

SEQ ID NO: 295388 - DNA, 25 bp, Artificial
  probe
  misc_feature (1)..(25): SEQ ID NO: 1477; WAN024DFT; Start 95; Stop 119
atgtctatggaatggctgttgtaac

SEQ ID NO: 295389 - DNA, 25 bp, Artificial
  probe
  misc_feature (1)..(25): SEQ ID NO: 1477; WAN024DFT; Start 389; Stop 413
tacctctagcaactattattacgcc

SEQ ID NO: 295390 - DNA, 25 bp, Artificial
  probe
  misc_feature (1)..(25): SEQ ID NO: 1477; WAN024DFT; Start 391; Stop 415
cctctagcaactattattacgccaa

SEQ ID NO: 295391 - DNA, 25 bp, Artificial
  probe
  misc_feature (1)..(25): SEQ ID NO: 1477; WAN024DFT; Start 303; Stop 327
ctatgtccttgatcctgttatggtt

SEQ ID NO: 295392 - DNA, 25 bp, Artificial
  probe
  misc_feature (1)..(25): SEQ ID NO: 1477; WAN024DFT; Start 93; Stop 117
agatgtctatggaatggctgttgta

SEQ ID NO: 295393 - DNA, 25 bp, Artificial
  probe
  misc_feature (1)..(25): SEQ ID NO: 1477; WAN024DFT; Start 304; Stop 328
tatgtccttgatcctgttatggttg

SEQ ID NO: 295394 - DNA, 25 bp, Artificial
  probe
  misc_feature (1)..(25): SEQ ID NO: 1477; WAN024DFT; Start 388; Stop 412
ctacctctagcaactattattacgc

SEQ ID NO: 295395 - DNA, 25 bp, Artificial
  probe
  misc_feature (1)..(25): SEQ ID NO: 1477; WAN024DFT; Start 390; Stop 414
acctctagcaactattattacgcca

SEQ ID NO: 295396 - DNA, 25 bp, Artificial
  probe
  misc_feature (1)..(25): SEQ ID NO: 1477; WAN024DFT; Start 319; Stop 343
gttatggttgctacaagtggagatg

SEQ ID NO: 295397 - DNA, 25 bp, Artificial
  probe
  misc_feature (1)..(25): SEQ ID NO: 1477; WAN024DFT; Start 234; Stop 258
aactggaatgttggctactactgaa

SEQ ID NO: 295398 - DNA, 25 bp, Artificial
  probe
  misc_feature (1)..(25): SEQ ID NO: 1477; WAN024DFT; Start 302; Stop 326
cctatgtccttgatcctgttatggt

SEQ ID NO: 295399 - DNA, 25 bp, Artificial
  probe
  misc_feature (1)..(25): SEQ ID NO: 1477; WAN024DFT; Start 90; Stop 114
gagagatgtctatggaatggctgtt

SEQ ID NO: 295400 - DNA, 25 bp, Artificial
  probe
  misc_feature (1)..(25): SEQ ID NO: 1477; WAN024DFT; Start 79; Stop 103
tcattccaagcgagagatgtctatg

SEQ ID NO: 295401 - DNA, 25 bp, Artificial
  probe
  misc_feature (1)..(25): SEQ ID NO: 1477; WAN024DFT; Start 78; Stop 102
gtcattccaagcgagagatgtctat

SEQ ID NO: 295402 - DNA, 25 bp, Artificial
  probe
  misc_feature (1)..(25): SEQ ID NO: 1477; WAN024DFT; Start 311; Stop 335
ttgatcctgttatggttgctacaag

SEQ ID NO: 295403 - DNA, 25 bp, Artificial
  probe
  misc_feature (1)..(25): SEQ ID NO: 1477; WAN024DFT; Start 310; Stop 334
cttgatcctgttatggttgctacaa

SEQ ID NO: 295404 - DNA, 25 bp, Artificial
  probe
  misc_feature (1)..(25): SEQ ID NO: 1477; WAN024DFT; Start 91; Stop 115
agagatgtctatggaatggctgttg

SEQ ID NO: 295405 - DNA, 25 bp, Artificial
  probe
  misc_feature (1)..(25): SEQ ID NO: 1477; WAN024DFT; Start 92; Stop 116
gagatgtctatggaatggctgttgt

SEQ ID NO: 295406 - DNA, 25 bp, Artificial
  probe
  misc_feature (1)..(25): SEQ ID NO: 1477; WAN024DFT; Start 318; Stop 342
tgttatggttgctacaagtggagat

SEQ ID NO: 295407 - DNA, 25 bp, Artificial
  probe
  misc_feature (1)..(25): SEQ ID NO: 1477; WAN024DFT; Start 308; Stop 332
tccttgatcctgttatggttgctac

SEQ ID NO: 295408 - DNA, 25 bp, Artificial
  probe
  misc_feature (1)..(25): SEQ ID NO: 1477; WAN024DFT; Start 307; Stop 331
gtccttgatcctgttatggttgcta

SEQ ID NO: 295409 - DNA, 25 bp, Artificial
  probe
  misc_feature (1)..(25): SEQ ID NO: 1477; WAN024DFT; Start 387; Stop 411
actacctctagcaactattattacg

SEQ ID NO: 295410 - DNA, 25 bp, Artificial
  probe
  misc_feature (1)..(25): SEQ ID NO: 1477; WAN024DFT; Start 96; Stop 120
tgtctatggaatggctgttgtaacc

SEQ ID NO: 295411 - DNA, 25 bp, Artificial
  probe
  misc_feature (1)..(25): SEQ ID NO: 1477; WAN024DFT; Start 313; Stop 337
gatcctgttatggttgctacaagtg

SEQ ID NO: 295412 - DNA, 25 bp, Artificial
  probe
  misc_feature (1)..(25): SEQ ID NO: 1477; WAN024DFT; Start 237; Stop 261
tggaatgttggctactactgaaatc

SEQ ID NO: 295413 - DNA, 25 bp, Artificial
  probe
  misc_feature (1)..(25): SEQ ID NO: 1477; WAN024DFT; Start 236; Stop 260
ctggaatgttggctactactgaaat

SEQ ID NO: 295414 - DNA, 25 bp, Artificial
  probe
  misc_feature (1)..(25): SEQ ID NO: 1477; WAN024DFT; Start 396; Stop 420
agcaactattattacgccaaatctt

SEQ ID NO: 295415 - DNA, 25 bp, Artificial
  probe
  misc_feature (1)..(25): SEQ ID NO: 1477; WAN024DFT; Start 400; Stop 424
actattattacgccaaatcttcctg

SEQ ID NO: 295416 - DNA, 25 bp, Artificial
  probe
  misc_feature (1)..(25): SEQ ID NO: 1477; WAN024DFT; Start 1; Stop 25
atgacttatttacccgttgctttga

SEQ ID NO: 295417 - DNA, 25 bp, Artificial
  probe
  misc_feature (1)..(25): SEQ ID NO: 1477; WAN024DFT; Start 312; Stop 336
tgatcctgttatggttgctacaagt

SEQ ID NO: 295418 - DNA, 25 bp, Artificial
  probe
  misc_feature (1)..(25): SEQ ID NO: 1477; WAN024DFT; Start 238; Stop 262
ggaatgttggctactactgaaatca

SEQ ID NO: 295419 - DNA, 25 bp, Artificial
  probe
  misc_feature (1)..(25): SEQ ID NO: 1477; WAN024DFT; Start 397; Stop 421
gcaactattattacgccaaatcttc

SEQ ID NO: 295420 - DNA, 25 bp, Artificial
  probe
  misc_feature (1)..(25): SEQ ID NO: 1478; WAN024EZ7; Start 245; Stop 269
attccttaatcatctcttcggcatc

SEQ ID NO: 295421 - DNA, 25 bp, Artificial
  probe
  misc_feature (1)..(25): SEQ ID NO: 1478; WAN024EZ7; Start 244; Stop 268
gattccttaatcatctcttcggcat

SEQ ID NO: 295422 - DNA, 25 bp, Artificial
  probe
  misc_feature (1)..(25): SEQ ID NO: 1478; WAN024EZ7; Start 246; Stop 270
ttccttaatcatctcttcggcatcg

SEQ ID NO: 295423 - DNA, 25 bp, Artificial
  probe
  misc_feature (1)..(25): SEQ ID NO: 1478; WAN024EZ7; Start 45; Stop 69
catagttagcaaatctccagcgaaa

SEQ ID NO: 295424 - DNA, 25 bp, Artificial
  probe
  misc_feature (1)..(25): SEQ ID NO: 1478; WAN024EZ7; Start 43; Stop 67
tacatagttagcaaatctccagcga

SEQ ID NO: 295425 - DNA, 25 bp, Artificial
  probe
  misc_feature (1)..(25): SEQ ID NO: 1478; WAN024EZ7; Start 97; Stop 121
ccacggatttcaaggatgatattct

SEQ ID NO: 295426 - DNA, 25 bp, Artificial
  probe
  misc_feature (1)..(25): SEQ ID NO: 1478; WAN024EZ7; Start 98; Stop 122
cacggatttcaaggatgatattctt

SEQ ID NO: 295427 - DNA, 25 bp, Artificial
  probe
  misc_feature (1)..(25): SEQ ID NO: 1478; WAN024EZ7; Start 41; Stop 65
ggtacatagttagcaaatctccagc

SEQ ID NO: 295428 - DNA, 25 bp, Artificial
  probe
  misc_feature (1)..(25): SEQ ID NO: 1478; WAN024EZ7; Start 113; Stop 137
tgatattcttgtcatcgtttggatc

SEQ ID NO: 295429 - DNA, 25 bp, Artificial
  probe
  misc_feature (1)..(25): SEQ ID NO: 1478; WAN024EZ7; Start 42; Stop 66
gtacatagttagcaaatctccagcg

SEQ ID NO: 295430 - DNA, 25 bp, Artificial
  probe
  misc_feature (1)..(25): SEQ ID NO: 1478; WAN024EZ7; Start 44; Stop 68
acatagttagcaaatctccagcgaa

SEQ ID NO: 295431 - DNA, 25 bp, Artificial
  probe
  misc_feature (1)..(25): SEQ ID NO: 1478; WAN024EZ7; Start 96; Stop 120
tccacggatttcaaggatgatattc

SEQ ID NO: 295432 - DNA, 25 bp, Artificial
  probe
  misc_feature (1)..(25): SEQ ID NO: 1478; WAN024EZ7; Start 95; Stop 119
ctccacggatttcaaggatgatatt

SEQ ID NO: 295433 - DNA, 25 bp, Artificial
  probe
  misc_feature (1)..(25): SEQ ID NO: 1478; WAN024EZ7; Start 40; Stop 64
tggtacatagttagcaaatctccag

SEQ ID NO: 295434 - DNA, 25 bp, Artificial
  probe
  misc_feature (1)..(25): SEQ ID NO: 1478; WAN024EZ7; Start 39; Stop 63
ttggtacatagttagcaaatctcca

SEQ ID NO: 295435 - DNA, 25 bp, Artificial
  probe
  misc_feature (1)..(25): SEQ ID NO: 1478; WAN024EZ7; Start 46; Stop 70
atagttagcaaatctccagcgaaaa

SEQ ID NO: 295436 - DNA, 25 bp, Artificial
  probe
  misc_feature (1)..(25): SEQ ID NO: 1478; WAN024EZ7; Start 47; Stop 71
tagttagcaaatctccagcgaaaag

SEQ ID NO: 295437 - DNA, 25 bp, Artificial
  probe
  misc_feature (1)..(25): SEQ ID NO: 1478; WAN024EZ7; Start 38; Stop 62
tttggtacatagttagcaaatctcc

SEQ ID NO: 295438 - DNA, 25 bp, Artificial
  probe
  misc_feature (1)..(25): SEQ ID NO: 1478; WAN024EZ7; Start 94; Stop 118
gctccacggatttcaaggatgatat

SEQ ID NO: 295439 - DNA, 25 bp, Artificial
  probe
  misc_feature (1)..(25): SEQ ID NO: 1478; WAN024EZ7; Start 112; Stop 136
atgatattcttgtcatcgtttggat

SEQ ID NO: 295440 - DNA, 25 bp, Artificial
  probe
  misc_feature (1)..(25): SEQ ID NO: 1478; WAN024EZ7; Start 30; Stop 54
cgcatacttttggtacatagttagc

SEQ ID NO: 295441 - DNA, 25 bp, Artificial
  probe
  misc_feature (1)..(25): SEQ ID NO: 1478; WAN024EZ7; Start 28; Stop 52
tccgcatacttttggtacatagtta

SEQ ID NO: 295442 - DNA, 25 bp, Artificial
  probe
  misc_feature (1)..(25): SEQ ID NO: 1478; WAN024EZ7; Start 29; Stop 53
ccgcatacttttggtacatagttag

SEQ ID NO: 295443 - DNA, 25 bp, Artificial
  probe
  misc_feature (1)..(25): SEQ ID NO: 1478; WAN024EZ7; Start 27; Stop 51
ttccgcatacttttggtacatagtt

SEQ ID NO: 295444 - DNA, 25 bp, Artificial
  probe
  misc_feature (1)..(25): SEQ ID NO: 1478; WAN024EZ7; Start 31; Stop 55
gcatacttttggtacatagttagca

SEQ ID NO: 295445 - DNA, 25 bp, Artificial
  probe
  misc_feature (1)..(25): SEQ ID NO: 1478; WAN024EZ7; Start 26; Stop 50
cttccgcatacttttggtacatagt

SEQ ID NO: 295446 - DNA, 25 bp, Artificial
  probe
  misc_feature (1)..(25): SEQ ID NO: 1478; WAN024EZ7; Start 248; Stop 272
ccttaatcatctcttcggcatcgac

SEQ ID NO: 295447 - DNA, 25 bp, Artificial
  probe
  misc_feature (1)..(25): SEQ ID NO: 1478; WAN024EZ7; Start 100; Stop 124
cggatttcaaggatgatattcttgt

SEQ ID NO: 295448 - DNA, 25 bp, Artificial
  probe
  misc_feature (1)..(25): SEQ ID NO: 1478; WAN024EZ7; Start 99; Stop 123
acggatttcaaggatgatattcttg

SEQ ID NO: 295449 - DNA, 25 bp, Artificial
  probe
  misc_feature (1)..(25): SEQ ID NO: 1478; WAN024EZ7; Start 25; Stop 49
gcttccgcatacttttggtacatag

SEQ ID NO: 295450 - DNA, 25 bp, Artificial
  probe
  misc_feature (1)..(25): SEQ ID NO: 1478; WAN024EZ7; Start 247; Stop 271
tccttaatcatctcttcggcatcga

SEQ ID NO: 295451 - DNA, 25 bp, Artificial
  probe
  misc_feature (1)..(25): SEQ ID NO: 1478; WAN024EZ7; Start 49; Stop 73
gttagcaaatctccagcgaaaagtg

SEQ ID NO: 295452 - DNA, 25 bp, Artificial
  probe
  misc_feature (1)..(25): SEQ ID NO: 1478; WAN024EZ7; Start 48; Stop 72
agttagcaaatctccagcgaaaagt

SEQ ID NO: 295453 - DNA, 25 bp, Artificial
  probe
  misc_feature (1)..(25): SEQ ID NO: 1479; WAN024DAA; Start 785; Stop 809
tattccaagaaggtcaatacggagt

SEQ ID NO: 295454 - DNA, 25 bp, Artificial
  probe
  misc_feature (1)..(25): SEQ ID NO: 1479; WAN024DAA; Start 396; Stop 420
ttactcaacttggaaattctctggt

SEQ ID NO: 295455 - DNA, 25 bp, Artificial
  probe
  misc_feature (1)..(25): SEQ ID NO: 1479; WAN024DAA; Start 631; Stop 655
gaagctgaattgattgaattgttcg

SEQ ID NO: 295456 - DNA, 25 bp, Artificial
  probe
  misc_feature (1)..(25): SEQ ID NO: 1479; WAN024DAA; Start 395; Stop 419
cttactcaacttggaaattctctgg

SEQ ID NO: 295457 - DNA, 25 bp, Artificial
  probe
  misc_feature (1)..(25): SEQ ID NO: 1479; WAN024DAA; Start 632; Stop 656
aagctgaattgattgaattgttcga

SEQ ID NO: 295458 - DNA, 25 bp, Artificial
  probe
  misc_feature (1)..(25): SEQ ID NO: 1479; WAN024DAA; Start 786; Stop 810
attccaagaaggtcaatacggagtt

SEQ ID NO: 295459 - DNA, 25 bp, Artificial
  probe
  misc_feature (1)..(25): SEQ ID NO: 1479; WAN024DAA; Start 397; Stop 421
tactcaacttggaaattctctggtt

SEQ ID NO: 295460 - DNA, 25 bp, Artificial
  probe
  misc_feature (1)..(25): SEQ ID NO: 1479; WAN024DAA; Start 394; Stop 418
acttactcaacttggaaattctctg

SEQ ID NO: 295461 - DNA, 25 bp, Artificial
  probe
  misc_feature (1)..(25): SEQ ID NO: 1479; WAN024DAA; Start 778; Stop 802
ctttcagtattccaagaaggtcaat

SEQ ID NO: 295462 - DNA, 25 bp, Artificial
  probe
  misc_feature (1)..(25): SEQ ID NO: 1479; WAN024DAA; Start 777; Stop 801
actttcagtattccaagaaggtcaa

SEQ ID NO: 295463 - DNA, 25 bp, Artificial
  probe
  misc_feature (1)..(25): SEQ ID NO: 1479; WAN024DAA; Start 771; Stop 795
acttccactttcagtattccaagaa

SEQ ID NO: 295464 - DNA, 25 bp, Artificial
  probe
  misc_feature (1)..(25): SEQ ID NO: 1479; WAN024DAA; Start 735; Stop 759
tatcactaaagcaatccttgacgat

SEQ ID NO: 295465 - DNA, 25 bp, Artificial
  probe
  misc_feature (1)..(25): SEQ ID NO: 1479; WAN024DAA; Start 628; Stop 652
caagaagctgaattgattgaattgt

SEQ ID NO: 295466 - DNA, 25 bp, Artificial
  probe
  misc_feature (1)..(25): SEQ ID NO: 1479; WAN024DAA; Start 398; Stop 422
actcaacttggaaattctctggttt

SEQ ID NO: 295467 - DNA, 25 bp, Artificial
  probe
  misc_feature (1)..(25): SEQ ID NO: 1479; WAN024DAA; Start 393; Stop 417
gacttactcaacttggaaattctct

SEQ ID NO: 295468 - DNA, 25 bp, Artificial
  probe
  misc_feature (1)..(25): SEQ ID NO: 1479; WAN024DAA; Start 776; Stop 800
cactttcagtattccaagaaggtca

SEQ ID NO: 295469 - DNA, 25 bp, Artificial
  probe
  misc_feature (1)..(25): SEQ ID NO: 1479; WAN024DAA; Start 773; Stop 797
ttccactttcagtattccaagaagg

SEQ ID NO: 295470 - DNA, 25 bp, Artificial
  probe
  misc_feature (1)..(25): SEQ ID NO: 1479; WAN024DAA; Start 739; Stop 763
actaaagcaatccttgacgatgaaa

SEQ ID NO: 295471 - DNA, 25 bp, Artificial
  probe
  misc_feature (1)..(25): SEQ ID NO: 1479; WAN024DAA; Start 731; Stop 755
ctcgtatcactaaagcaatccttga

SEQ ID NO: 295472 - DNA, 25 bp, Artificial
  probe
  misc_feature (1)..(25): SEQ ID NO: 1479; WAN024DAA; Start 90; Stop 114
aattgcacaagagcttggaattatc

SEQ ID NO: 295473 - DNA, 25 bp, Artificial
  probe
  misc_feature (1)..(25): SEQ ID NO: 1479; WAN024DAA; Start 89; Stop 113
gaattgcacaagagcttggaattat

SEQ ID NO: 295474 - DNA, 25 bp, Artificial
  probe
  misc_feature (1)..(25): SEQ ID NO: 1479; WAN024DAA; Start 630; Stop 654
agaagctgaattgattgaattgttc

SEQ ID NO: 295475 - DNA, 25 bp, Artificial
  probe
  misc_feature (1)..(25): SEQ ID NO: 1479; WAN024DAA; Start 734; Stop 758
gtatcactaaagcaatccttgacga

SEQ ID NO: 295476 - DNA, 25 bp, Artificial
  probe
  misc_feature (1)..(25): SEQ ID NO: 1479; WAN024DAA; Start 732; Stop 756
tcgtatcactaaagcaatccttgac

SEQ ID NO: 295477 - DNA, 25 bp, Artificial
  probe
  misc_feature (1)..(25): SEQ ID NO: 1479; WAN024DAA; Start 195; Stop 219
aatctatgcagctcaatactctgac

SEQ ID NO: 295478 - DNA, 25 bp, Artificial
  probe
  misc_feature (1)..(25): SEQ ID NO: 1479; WAN024DAA; Start 392; Stop 416
tgacttactcaacttggaaattctc

SEQ ID NO: 295479 - DNA, 25 bp, Artificial
  probe
  misc_feature (1)..(25): SEQ ID NO: 1479; WAN024DAA; Start 775; Stop 799
ccactttcagtattccaagaaggtc

SEQ ID NO: 295480 - DNA, 25 bp, Artificial
  probe
  misc_feature (1)..(25): SEQ ID NO: 1479; WAN024DAA; Start 629; Stop 653
aagaagctgaattgattgaattgtt

SEQ ID NO: 295481 - DNA, 25 bp, Artificial
  probe
  misc_feature (1)..(25): SEQ ID NO: 1479; WAN024DAA; Start 736; Stop 760
atcactaaagcaatccttgacgatg

SEQ ID NO: 295482 - DNA, 25 bp, Artificial
  probe
  misc_feature (1)..(25): SEQ ID NO: 1479; WAN024DAA; Start 738; Stop 762
cactaaagcaatccttgacgatgaa

SEQ ID NO: 295483 - DNA, 25 bp, Artificial
  probe
  misc_feature (1)..(25): SEQ ID NO: 1479; WAN024DAA; Start 196; Stop 220
atctatgcagctcaatactctgact

SEQ ID NO: 295484 - DNA, 25 bp, Artificial
  probe
  misc_feature (1)..(25): SEQ ID NO: 1479; WAN024DAA; Start 774; Stop 798
tccactttcagtattccaagaaggt

SEQ ID NO: 295485 - DNA, 25 bp, Artificial
  probe
  misc_feature (1)..(25): SEQ ID NO: 1479; WAN024DAA; Start 787; Stop 811
ttccaagaaggtcaatacggagttg

SEQ ID NO: 295486 - DNA, 25 bp, Artificial
  probe
  misc_feature (1)..(25): SEQ ID NO: 1480; WAN024FE6; Start 95; Stop 119
ggctaatcttaccagacttaactga

SEQ ID NO: 295487 - DNA, 25 bp, Artificial
  probe
  misc_feature (1)..(25): SEQ ID NO: 1480; WAN024FE6; Start 107; Stop 131
cagacttaactgacttaggaaggat

SEQ ID NO: 295488 - DNA, 25 bp, Artificial
  probe
  misc_feature (1)..(25): SEQ ID NO: 1480; WAN024FE6; Start 108; Stop 132
agacttaactgacttaggaaggata

SEQ ID NO: 295489 - DNA, 25 bp, Artificial
  probe
  misc_feature (1)..(25): SEQ ID NO: 1480; WAN024FE6; Start 104; Stop 128
taccagacttaactgacttaggaag

SEQ ID NO: 295490 - DNA, 25 bp, Artificial
  probe
  misc_feature (1)..(25): SEQ ID NO: 1480; WAN024FE6; Start 102; Stop 126
cttaccagacttaactgacttagga

SEQ ID NO: 295491 - DNA, 25 bp, Artificial
  probe
  misc_feature (1)..(25): SEQ ID NO: 1480; WAN024FE6; Start 101; Stop 125
tcttaccagacttaactgacttagg

SEQ ID NO: 295492 - DNA, 25 bp, Artificial
  probe
  misc_feature (1)..(25): SEQ ID NO: 1480; WAN024FE6; Start 96; Stop 120
gctaatcttaccagacttaactgac

SEQ ID NO: 295493 - DNA, 25 bp, Artificial
  probe
  misc_feature (1)..(25): SEQ ID NO: 1480; WAN024FE6; Start 106; Stop 130
ccagacttaactgacttaggaagga

SEQ ID NO: 295494 - DNA, 25 bp, Artificial
  probe
  misc_feature (1)..(25): SEQ ID NO: 1480; WAN024FE6; Start 103; Stop 127
ttaccagacttaactgacttaggaa

SEQ ID NO: 295495 - DNA, 25 bp, Artificial
  probe
  misc_feature (1)..(25): SEQ ID NO: 1480; WAN024FE6; Start 105; Stop 129
accagacttaactgacttaggaagg

SEQ ID NO: 295496 - DNA, 25 bp, Artificial
  probe
  misc_feature (1)..(25): SEQ ID NO: 1480; WAN024FE6; Start 94; Stop 118
tggctaatcttaccagacttaactg

SEQ ID NO: 295497 - DNA, 25 bp, Artificial
  probe
  misc_feature (1)..(25): SEQ ID NO: 1480; WAN024FE6; Start 109; Stop 133
gacttaactgacttaggaaggatat

SEQ ID NO: 295498 - DNA, 25 bp, Artificial
  probe
  misc_feature (1)..(25): SEQ ID NO: 1480; WAN024FE6; Start 291; Stop 315
caactggacatctgtgatttcattg

SEQ ID NO: 295499 - DNA, 25 bp, Artificial
  probe
  misc_feature (1)..(25): SEQ ID NO: 1480; WAN024FE6; Start 100; Stop 124
atcttaccagacttaactgacttag

SEQ ID NO: 295500 - DNA, 25 bp, Artificial
  probe
  misc_feature (1)..(25): SEQ ID NO: 1480; WAN024FE6; Start 97; Stop 121
ctaatcttaccagacttaactgact

SEQ ID NO: 295501 - DNA, 25 bp, Artificial
  probe
  misc_feature (1)..(25): SEQ ID NO: 1480; WAN024FE6; Start 290; Stop 314
tcaactggacatctgtgatttcatt

SEQ ID NO: 295502 - DNA, 25 bp, Artificial
  probe
  misc_feature (1)..(25): SEQ ID NO: 1480; WAN024FE6; Start 294; Stop 318
ctggacatctgtgatttcattgtag

SEQ ID NO: 295503 - DNA, 25 bp, Artificial
  probe
  misc_feature (1)..(25): SEQ ID NO: 1480; WAN024FE6; Start 293; Stop 317
actggacatctgtgatttcattgta

SEQ ID NO: 295504 - DNA, 25 bp, Artificial
  probe
  misc_feature (1)..(25): SEQ ID NO: 1480; WAN024FE6; Start 292; Stop 316
aactggacatctgtgatttcattgt

SEQ ID NO: 295505 - DNA, 25 bp, Artificial
  probe
  misc_feature (1)..(25): SEQ ID NO: 1480; WAN024FE6; Start 99; Stop 123
aatcttaccagacttaactgactta

SEQ ID NO: 295506 - DNA, 25 bp, Artificial
  probe
  misc_feature (1)..(25): SEQ ID NO: 1480; WAN024FE6; Start 98; Stop 122
taatcttaccagacttaactgactt

SEQ ID NO: 295507 - DNA, 25 bp, Artificial
  probe
  misc_feature (1)..(25): SEQ ID NO: 1480; WAN024FE6; Start 289; Stop 313
gtcaactggacatctgtgatttcat

SEQ ID NO: 295508 - DNA, 25 bp, Artificial
  probe
  misc_feature (1)..(25): SEQ ID NO: 1480; WAN024FE6; Start 227; Stop 251
cattgaccactaaagcatcactgtc

SEQ ID NO: 295509 - DNA, 25 bp, Artificial
  probe
  misc_feature (1)..(25): SEQ ID NO: 1480; WAN024FE6; Start 110; Stop 134
acttaactgacttaggaaggatatc

SEQ ID NO: 295510 - DNA, 25 bp, Artificial
  probe
  misc_feature (1)..(25): SEQ ID NO: 1480; WAN024FE6; Start 228; Stop 252
attgaccactaaagcatcactgtct

SEQ ID NO: 295511 - DNA, 25 bp, Artificial
  probe
  misc_feature (1)..(25): SEQ ID NO: 1480; WAN024FE6; Start 111; Stop 135
cttaactgacttaggaaggatatct

SEQ ID NO: 295512 - DNA, 25 bp, Artificial
  probe
  misc_feature (1)..(25): SEQ ID NO: 1480; WAN024FE6; Start 226; Stop 250
acattgaccactaaagcatcactgt

SEQ ID NO: 295513 - DNA, 25 bp, Artificial
  probe
  misc_feature (1)..(25): SEQ ID NO: 1480; WAN024FE6; Start 21; Stop 45
tttattttgtgctgaagttaggacc

SEQ ID NO: 295514 - DNA, 25 bp, Artificial
  probe
  misc_feature (1)..(25): SEQ ID NO: 1480; WAN024FE6; Start 22; Stop 46
ttattttgtgctgaagttaggacca

SEQ ID NO: 295515 - DNA, 25 bp, Artificial
  probe
  misc_feature (1)..(25): SEQ ID NO: 1480; WAN024FE6; Start 229; Stop 253
ttgaccactaaagcatcactgtctc

SEQ ID NO: 295516 - DNA, 25 bp, Artificial
  probe
  misc_feature (1)..(25): SEQ ID NO: 1480; WAN024FE6; Start 112; Stop 136
ttaactgacttaggaaggatatctt

SEQ ID NO: 295517 - DNA, 25 bp, Artificial
  probe
  misc_feature (1)..(25): SEQ ID NO: 1480; WAN024FE6; Start 288; Stop 312
cgtcaactggacatctgtgatttca

SEQ ID NO: 295518 - DNA, 25 bp, Artificial
  probe
  misc_feature (1)..(25): SEQ ID NO: 1480; WAN024FE6; Start 23; Stop 47
tattttgtgctgaagttaggaccac

SEQ ID NO: 295519 - DNA, 25 bp, Artificial
  probe
  misc_feature (1)..(25): SEQ ID NO: 1481; WAN024C8M; Start 146; Stop 170
cgataagaacaactggagttacttc

SEQ ID NO: 295520 - DNA, 25 bp, Artificial
  probe
  misc_feature (1)..(25): SEQ ID NO: 1481; WAN024C8M; Start 83; Stop 107
tagtcaactcaccgttaccaagaat

SEQ ID NO: 295521 - DNA, 25 bp, Artificial
  probe
  misc_feature (1)..(25): SEQ ID NO: 1481; WAN024C8M; Start 82; Stop 106
ttagtcaactcaccgttaccaagaa

SEQ ID NO: 295522 - DNA, 25 bp, Artificial
  probe
  misc_feature (1)..(25): SEQ ID NO: 1481; WAN024C8M; Start 79; Stop 103
ttcttagtcaactcaccgttaccaa

SEQ ID NO: 295523 - DNA, 25 bp, Artificial
  probe
  misc_feature (1)..(25): SEQ ID NO: 1481; WAN024C8M; Start 147; Stop 171
gataagaacaactggagttacttca

SEQ ID NO: 295524 - DNA, 25 bp, Artificial
  probe
  misc_feature (1)..(25): SEQ ID NO: 1481; WAN024C8M; Start 81; Stop 105
cttagtcaactcaccgttaccaaga

SEQ ID NO: 295525 - DNA, 25 bp, Artificial
  probe
  misc_feature (1)..(25): SEQ ID NO: 1481; WAN024C8M; Start 80; Stop 104
tcttagtcaactcaccgttaccaag

SEQ ID NO: 295526 - DNA, 25 bp, Artificial
  probe
  misc_feature (1)..(25): SEQ ID NO: 1481; WAN024C8M; Start 149; Stop 173
taagaacaactggagttacttcagc

SEQ ID NO: 295527 - DNA, 25 bp, Artificial
  probe
  misc_feature (1)..(25): SEQ ID NO: 1481; WAN024C8M; Start 223; Stop 247
ttagcgttgatgttagtgaatccac

SEQ ID NO: 295528 - DNA, 25 bp, Artificial
  probe
  misc_feature (1)..(25): SEQ ID NO: 1481; WAN024C8M; Start 84; Stop 108
agtcaactcaccgttaccaagaatt

SEQ ID NO: 295529 - DNA, 25 bp, Artificial
  probe
  misc_feature (1)..(25): SEQ ID NO: 1481; WAN024C8M; Start 145; Stop 169
tcgataagaacaactggagttactt

SEQ ID NO: 295530 - DNA, 25 bp, Artificial
  probe
  misc_feature (1)..(25): SEQ ID NO: 1481; WAN024C8M; Start 144; Stop 168
ttcgataagaacaactggagttact

SEQ ID NO: 295531 - DNA, 25 bp, Artificial
  probe
  misc_feature (1)..(25): SEQ ID NO: 1481; WAN024C8M; Start 131; Stop 155
taacaattcctgcttcgataagaac

SEQ ID NO: 295532 - DNA, 25 bp, Artificial
  probe
  misc_feature (1)..(25): SEQ ID NO: 1481; WAN024C8M; Start 143; Stop 167
cttcgataagaacaactggagttac

SEQ ID NO: 295533 - DNA, 25 bp, Artificial
  probe
  misc_feature (1)..(25): SEQ ID NO: 1481; WAN024C8M; Start 135; Stop 159
aattcctgcttcgataagaacaact

SEQ ID NO: 295534 - DNA, 25 bp, Artificial
  probe
  misc_feature (1)..(25): SEQ ID NO: 1481; WAN024C8M; Start 134; Stop 158
caattcctgcttcgataagaacaac

SEQ ID NO: 295535 - DNA, 25 bp, Artificial
  probe
  misc_feature (1)..(25): SEQ ID NO: 1481; WAN024C8M; Start 160; Stop 184
ggagttacttcagcaccatcttcaa

SEQ ID NO: 295536 - DNA, 25 bp, Artificial
  probe
  misc_feature (1)..(25): SEQ ID NO: 1481; WAN024C8M; Start 133; Stop 157
acaattcctgcttcgataagaacaa

SEQ ID NO: 295537 - DNA, 25 bp, Artificial
  probe
  misc_feature (1)..(25): SEQ ID NO: 1481; WAN024C8M; Start 132; Stop 156
aacaattcctgcttcgataagaaca

SEQ ID NO: 295538 - DNA, 25 bp, Artificial
  probe
  misc_feature (1)..(25): SEQ ID NO: 1481; WAN024C8M; Start 215; Stop 239
cgtattctttagcgttgatgttagt

SEQ ID NO: 295539 - DNA, 25 bp, Artificial
  probe
  misc_feature (1)..(25): SEQ ID NO: 1481; WAN024C8M; Start 142; Stop 166
gcttcgataagaacaactggagtta

SEQ ID NO: 295540 - DNA, 25 bp, Artificial
  probe
  misc_feature (1)..(25): SEQ ID NO: 1481; WAN024C8M; Start 148; Stop 172
ataagaacaactggagttacttcag

SEQ ID NO: 295541 - DNA, 25 bp, Artificial
  probe
  misc_feature (1)..(25): SEQ ID NO: 1481; WAN024C8M; Start 221; Stop 245
ctttagcgttgatgttagtgaatcc

SEQ ID NO: 295542 - DNA, 25 bp, Artificial
  probe
  misc_feature (1)..(25): SEQ ID NO: 1481; WAN024C8M; Start 214; Stop 238
gcgtattctttagcgttgatgttag

SEQ ID NO: 295543 - DNA, 25 bp, Artificial
  probe
  misc_feature (1)..(25): SEQ ID NO: 1481; WAN024C8M; Start 220; Stop 244
tctttagcgttgatgttagtgaatc

SEQ ID NO: 295544 - DNA, 25 bp, Artificial
  probe
  misc_feature (1)..(25): SEQ ID NO: 1481; WAN024C8M; Start 130; Stop 154
ttaacaattcctgcttcgataagaa

SEQ ID NO: 295545 - DNA, 25 bp, Artificial
  probe
  misc_feature (1)..(25): SEQ ID NO: 1481; WAN024C8M; Start 64; Stop 88
gctttcacagtcaatttcttagtca

SEQ ID NO: 295546 - DNA, 25 bp, Artificial
  probe
  misc_feature (1)..(25): SEQ ID NO: 1481; WAN024C8M; Start 63; Stop 87
tgctttcacagtcaatttcttagtc

SEQ ID NO: 295547 - DNA, 25 bp, Artificial
  probe
  misc_feature (1)..(25): SEQ ID NO: 1481; WAN024C8M; Start 1; Stop 25
atgacttctactgaaccacctttag

SEQ ID NO: 295548 - DNA, 25 bp, Artificial
  probe
  misc_feature (1)..(25): SEQ ID NO: 1481; WAN024C8M; Start 222; Stop 246
tttagcgttgatgttagtgaatcca

SEQ ID NO: 295549 - DNA, 25 bp, Artificial
  probe
  misc_feature (1)..(25): SEQ ID NO: 1481; WAN024C8M; Start 136; Stop 160
attcctgcttcgataagaacaactg

SEQ ID NO: 295550 - DNA, 25 bp, Artificial
  probe
  misc_feature (1)..(25): SEQ ID NO: 1481; WAN024C8M; Start 210; Stop 234
aattgcgtattctttagcgttgatg

SEQ ID NO: 295551 - DNA, 25 bp, Artificial
  probe
  misc_feature (1)..(25): SEQ ID NO: 1481; WAN024C8M; Start 213; Stop 237
tgcgtattctttagcgttgatgtta

SEQ ID NO: 295552 - DNA, 25 bp, Artificial
  probe
  misc_feature (1)..(25): SEQ ID NO: 1482; WAN024FAP; Start 351; Stop 375
tggttgagaataacgaaggtattga

SEQ ID NO: 295553 - DNA, 25 bp, Artificial
  probe
  misc_feature (1)..(25): SEQ ID NO: 1482; WAN024FAP; Start 350; Stop 374
ttggttgagaataacgaaggtattg

SEQ ID NO: 295554 - DNA, 25 bp, Artificial
  probe
  misc_feature (1)..(25): SEQ ID NO: 1482; WAN024FAP; Start 352; Stop 376
ggttgagaataacgaaggtattgat

SEQ ID NO: 295555 - DNA, 25 bp, Artificial
  probe
  misc_feature (1)..(25): SEQ ID NO: 1482; WAN024FAP; Start 353; Stop 377
gttgagaataacgaaggtattgatt

SEQ ID NO: 295556 - DNA, 25 bp, Artificial
  probe
  misc_feature (1)..(25): SEQ ID NO: 1482; WAN024FAP; Start 347; Stop 371
catttggttgagaataacgaaggta

SEQ ID NO: 295557 - DNA, 25 bp, Artificial
  probe
  misc_feature (1)..(25): SEQ ID NO: 1482; WAN024FAP; Start 133; Stop 157
atgaaggtcccaatcttaaagttcg

SEQ ID NO: 295558 - DNA, 25 bp, Artificial
  probe
  misc_feature (1)..(25): SEQ ID NO: 1482; WAN024FAP; Start 357; Stop 381
agaataacgaaggtattgatttgct

SEQ ID NO: 295559 - DNA, 25 bp, Artificial
  probe
  misc_feature (1)..(25): SEQ ID NO: 1482; WAN024FAP; Start 341; Stop 365
taatggcatttggttgagaataacg

SEQ ID NO: 295560 - DNA, 25 bp, Artificial
  probe
  misc_feature (1)..(25): SEQ ID NO: 1482; WAN024FAP; Start 349; Stop 373
tttggttgagaataacgaaggtatt

SEQ ID NO: 295561 - DNA, 25 bp, Artificial
  probe
  misc_feature (1)..(25): SEQ ID NO: 1482; WAN024FAP; Start 335; Stop 359
acaatttaatggcatttggttgaga

SEQ ID NO: 295562 - DNA, 25 bp, Artificial
  probe
  misc_feature (1)..(25): SEQ ID NO: 1482; WAN024FAP; Start 356; Stop 380
gagaataacgaaggtattgatttgc

SEQ ID NO: 295563 - DNA, 25 bp, Artificial
  probe
  misc_feature (1)..(25): SEQ ID NO: 1482; WAN024FAP; Start 334; Stop 358
gacaatttaatggcatttggttgag

SEQ ID NO: 295564 - DNA, 25 bp, Artificial
  probe
  misc_feature (1)..(25): SEQ ID NO: 1482; WAN024FAP; Start 348; Stop 372
atttggttgagaataacgaaggtat

SEQ ID NO: 295565 - DNA, 25 bp, Artificial
  probe
  misc_feature (1)..(25): SEQ ID NO: 1482; WAN024FAP; Start 343; Stop 367
atggcatttggttgagaataacgaa

SEQ ID NO: 295566 - DNA, 25 bp, Artificial
  probe
  misc_feature (1)..(25): SEQ ID NO: 1482; WAN024FAP; Start 14; Stop 38
gggtcatatattccacaaaggcatt

SEQ ID NO: 295567 - DNA, 25 bp, Artificial
  probe
  misc_feature (1)..(25): SEQ ID NO: 1482; WAN024FAP; Start 132; Stop 156
catgaaggtcccaatcttaaagttc

SEQ ID NO: 295568 - DNA, 25 bp, Artificial
  probe
  misc_feature (1)..(25): SEQ ID NO: 1482; WAN024FAP; Start 336; Stop 360
caatttaatggcatttggttgagaa

SEQ ID NO: 295569 - DNA, 25 bp, Artificial
  probe
  misc_feature (1)..(25): SEQ ID NO: 1482; WAN024FAP; Start 15; Stop 39
ggtcatatattccacaaaggcattg

SEQ ID NO: 295570 - DNA, 25 bp, Artificial
  probe
  misc_feature (1)..(25): SEQ ID NO: 1482; WAN024FAP; Start 333; Stop 357
cgacaatttaatggcatttggttga

SEQ ID NO: 295571 - DNA, 25 bp, Artificial
  probe
  misc_feature (1)..(25): SEQ ID NO: 1482; WAN024FAP; Start 358; Stop 382
gaataacgaaggtattgatttgctt

SEQ ID NO: 295572 - DNA, 25 bp, Artificial
  probe
  misc_feature (1)..(25): SEQ ID NO: 1482; WAN024FAP; Start 342; Stop 366
aatggcatttggttgagaataacga

SEQ ID NO: 295573 - DNA, 25 bp, Artificial
  probe
  misc_feature (1)..(25): SEQ ID NO: 1482; WAN024FAP; Start 337; Stop 361
aatttaatggcatttggttgagaat

SEQ ID NO: 295574 - DNA, 25 bp, Artificial
  probe
  misc_feature (1)..(25): SEQ ID NO: 1482; WAN024FAP; Start 346; Stop 370
gcatttggttgagaataacgaaggt

SEQ ID NO: 295575 - DNA, 25 bp, Artificial
  probe
  misc_feature (1)..(25): SEQ ID NO: 1482; WAN024FAP; Start 344; Stop 368
tggcatttggttgagaataacgaag

SEQ ID NO: 295576 - DNA, 25 bp, Artificial
  probe
  misc_feature (1)..(25): SEQ ID NO: 1482; WAN024FAP; Start 329; Stop 353
gatccgacaatttaatggcatttgg

SEQ ID NO: 295577 - DNA, 25 bp, Artificial
  probe
  misc_feature (1)..(25): SEQ ID NO: 1482; WAN024FAP; Start 340; Stop 364
ttaatggcatttggttgagaataac

SEQ ID NO: 295578 - DNA, 25 bp, Artificial
  probe
  misc_feature (1)..(25): SEQ ID NO: 1482; WAN024FAP; Start 137; Stop 161
aggtcccaatcttaaagttcggttt

SEQ ID NO: 295579 - DNA, 25 bp, Artificial
  probe
  misc_feature (1)..(25): SEQ ID NO: 1482; WAN024FAP; Start 136; Stop 160
aaggtcccaatcttaaagttcggtt

SEQ ID NO: 295580 - DNA, 25 bp, Artificial
  probe
  misc_feature (1)..(25): SEQ ID NO: 1482; WAN024FAP; Start 330; Stop 354
atccgacaatttaatggcatttggt

SEQ ID NO: 295581 - DNA, 25 bp, Artificial
  probe
  misc_feature (1)..(25): SEQ ID NO: 1482; WAN024FAP; Start 332; Stop 356
ccgacaatttaatggcatttggttg

SEQ ID NO: 295582 - DNA, 25 bp, Artificial
  probe
  misc_feature (1)..(25): SEQ ID NO: 1482; WAN024FAP; Start 331; Stop 355
tccgacaatttaatggcatttggtt

SEQ ID NO: 295583 - DNA, 25 bp, Artificial
  probe
  misc_feature (1)..(25): SEQ ID NO: 1482; WAN024FAP; Start 339; Stop 363
tttaatggcatttggttgagaataa

SEQ ID NO: 295584 - DNA, 25 bp, Artificial
  probe
  misc_feature (1)..(25): SEQ ID NO: 1482; WAN024FAP; Start 355; Stop 379
tgagaataacgaaggtattgatttg

SEQ ID NO: 295585 - DNA, 25 bp, Artificial
  probe
  misc_feature (1)..(25): SEQ ID NO: 1483; WAN024B68; Start 83; Stop 107
atttgtattgcgagatgagtttgtg

SEQ ID NO: 295586 - DNA, 25 bp, Artificial
  probe
  misc_feature (1)..(25): SEQ ID NO: 1483; WAN024B68; Start 82; Stop 106
aatttgtattgcgagatgagtttgt

SEQ ID NO: 295587 - DNA, 25 bp, Artificial
  probe
  misc_feature (1)..(25): SEQ ID NO: 1483; WAN024B68; Start 158; Stop 182
ggttagtgaccttgtccttggttaa

SEQ ID NO: 295588 - DNA, 25 bp, Artificial
  probe
  misc_feature (1)..(25): SEQ ID NO: 1483; WAN024B68; Start 84; Stop 108
tttgtattgcgagatgagtttgtgg

SEQ ID NO: 295589 - DNA, 25 bp, Artificial
  probe
  misc_feature (1)..(25): SEQ ID NO: 1483; WAN024B68; Start 6; Stop 30
ttgctccaagaaccagtttgatttc

SEQ ID NO: 295590 - DNA, 25 bp, Artificial
  probe
  misc_feature (1)..(25): SEQ ID NO: 1483; WAN024B68; Start 160; Stop 184
ttagtgaccttgtccttggttaaat

SEQ ID NO: 295591 - DNA, 25 bp, Artificial
  probe
  misc_feature (1)..(25): SEQ ID NO: 1483; WAN024B68; Start 161; Stop 185
tagtgaccttgtccttggttaaatc

SEQ ID NO: 295592 - DNA, 25 bp, Artificial
  probe
  misc_feature (1)..(25): SEQ ID NO: 1483; WAN024B68; Start 20; Stop 44
agtttgatttctcatacttatccca

SEQ ID NO: 295593 - DNA, 25 bp, Artificial
  probe
  misc_feature (1)..(25): SEQ ID NO: 1483; WAN024B68; Start 159; Stop 183
gttagtgaccttgtccttggttaaa

SEQ ID NO: 295594 - DNA, 25 bp, Artificial
  probe
  misc_feature (1)..(25): SEQ ID NO: 1483; WAN024B68; Start 21; Stop 45
gtttgatttctcatacttatcccag

SEQ ID NO: 295595 - DNA, 25 bp, Artificial
  probe
  misc_feature (1)..(25): SEQ ID NO: 1483; WAN024B68; Start 19; Stop 43
cagtttgatttctcatacttatccc

SEQ ID NO: 295596 - DNA, 25 bp, Artificial
  probe
  misc_feature (1)..(25): SEQ ID NO: 1483; WAN024B68; Start 18; Stop 42
ccagtttgatttctcatacttatcc

SEQ ID NO: 295597 - DNA, 25 bp, Artificial
  probe
  misc_feature (1)..(25): SEQ ID NO: 1483; WAN024B68; Start 81; Stop 105
caatttgtattgcgagatgagtttg

SEQ ID NO: 295598 - DNA, 25 bp, Artificial
  probe
  misc_feature (1)..(25): SEQ ID NO: 1483; WAN024B68; Start 80; Stop 104
ccaatttgtattgcgagatgagttt

SEQ ID NO: 295599 - DNA, 25 bp, Artificial
  probe
  misc_feature (1)..(25): SEQ ID NO: 1483; WAN024B68; Start 72; Stop 96
aaagttctccaatttgtattgcgag

SEQ ID NO: 295600 - DNA, 25 bp, Artificial
  probe
  misc_feature (1)..(25): SEQ ID NO: 1483; WAN024B68; Start 22; Stop 46
tttgatttctcatacttatcccaga

SEQ ID NO: 295601 - DNA, 25 bp, Artificial
  probe
  misc_feature (1)..(25): SEQ ID NO: 1483; WAN024B68; Start 157; Stop 181
tggttagtgaccttgtccttggtta

SEQ ID NO: 295602 - DNA, 25 bp, Artificial
  probe
  misc_feature (1)..(25): SEQ ID NO: 1483; WAN024B68; Start 79; Stop 103
tccaatttgtattgcgagatgagtt

SEQ ID NO: 295603 - DNA, 25 bp, Artificial
  probe
  misc_feature (1)..(25): SEQ ID NO: 1483; WAN024B68; Start 10; Stop 34
tccaagaaccagtttgatttctcat

SEQ ID NO: 295604 - DNA, 25 bp, Artificial
  probe
  misc_feature (1)..(25): SEQ ID NO: 1483; WAN024B68; Start 15; Stop 39
gaaccagtttgatttctcatactta

SEQ ID NO: 295605 - DNA, 25 bp, Artificial
  probe
  misc_feature (1)..(25): SEQ ID NO: 1483; WAN024B68; Start 11; Stop 35
ccaagaaccagtttgatttctcata

SEQ ID NO: 295606 - DNA, 25 bp, Artificial
  probe
  misc_feature (1)..(25): SEQ ID NO: 1483; WAN024B68; Start 78; Stop 102
ctccaatttgtattgcgagatgagt

SEQ ID NO: 295607 - DNA, 25 bp, Artificial
  probe
  misc_feature (1)..(25): SEQ ID NO: 1483; WAN024B68; Start 271; Stop 295
atcgcttggtattttacatttgctt

SEQ ID NO: 295608 - DNA, 25 bp, Artificial
  probe
  misc_feature (1)..(25): SEQ ID NO: 1483; WAN024B68; Start 270; Stop 294
aatcgcttggtattttacatttgct

SEQ ID NO: 295609 - DNA, 25 bp, Artificial
  probe
  misc_feature (1)..(25): SEQ ID NO: 1483; WAN024B68; Start 9; Stop 33
ctccaagaaccagtttgatttctca

SEQ ID NO: 295610 - DNA, 25 bp, Artificial
  probe
  misc_feature (1)..(25): SEQ ID NO: 1483; WAN024B68; Start 272; Stop 296
tcgcttggtattttacatttgcttc

SEQ ID NO: 295611 - DNA, 25 bp, Artificial
  probe
  misc_feature (1)..(25): SEQ ID NO: 1483; WAN024B68; Start 71; Stop 95
caaagttctccaatttgtattgcga

SEQ ID NO: 295612 - DNA, 25 bp, Artificial
  probe
  misc_feature (1)..(25): SEQ ID NO: 1483; WAN024B68; Start 70; Stop 94
tcaaagttctccaatttgtattgcg

SEQ ID NO: 295613 - DNA, 25 bp, Artificial
  probe
  misc_feature (1)..(25): SEQ ID NO: 1483; WAN024B68; Start 180; Stop 204
taaatccaatgagaaaacaggtgtg

SEQ ID NO: 295614 - DNA, 25 bp, Artificial
  probe
  misc_feature (1)..(25): SEQ ID NO: 1483; WAN024B68; Start 17; Stop 41
accagtttgatttctcatacttatc

SEQ ID NO: 295615 - DNA, 25 bp, Artificial
  probe
  misc_feature (1)..(25): SEQ ID NO: 1483; WAN024B68; Start 273; Stop 297
cgcttggtattttacatttgcttca

SEQ ID NO: 295616 - DNA, 25 bp, Artificial
  probe
  misc_feature (1)..(25): SEQ ID NO: 1483; WAN024B68; Start 69; Stop 93
ctcaaagttctccaatttgtattgc

SEQ ID NO: 295617 - DNA, 25 bp, Artificial
  probe
  misc_feature (1)..(25): SEQ ID NO: 1483; WAN024B68; Start 274; Stop 298
gcttggtattttacatttgcttcat

SEQ ID NO: 295618 - DNA, 25 bp, Artificial
  probe
  misc_feature (1)..(25): SEQ ID NO: 1484; WAN024DFL; Start 15; Stop 39
tattgctgactctggttgtgattat

SEQ ID NO: 295619 - DNA, 25 bp, Artificial
  probe
  misc_feature (1)..(25): SEQ ID NO: 1484; WAN024DFL; Start 14; Stop 38
ttattgctgactctggttgtgatta

SEQ ID NO: 295620 - DNA, 25 bp, Artificial
  probe
  misc_feature (1)..(25): SEQ ID NO: 1484; WAN024DFL; Start 13; Stop 37
attattgctgactctggttgtgatt

SEQ ID NO: 295621 - DNA, 25 bp, Artificial
  probe
  misc_feature (1)..(25): SEQ ID NO: 1484; WAN024DFL; Start 16; Stop 40
attgctgactctggttgtgattatc

SEQ ID NO: 295622 - DNA, 25 bp, Artificial
  probe
  misc_feature (1)..(25): SEQ ID NO: 1484; WAN024DFL; Start 316; Stop 340
gaagaccatcctgacactaagattc

SEQ ID NO: 295623 - DNA, 25 bp, Artificial
  probe
  misc_feature (1)..(25): SEQ ID NO: 1484; WAN024DFL; Start 318; Stop 342
agaccatcctgacactaagattcat

SEQ ID NO: 295624 - DNA, 25 bp, Artificial
  probe
  misc_feature (1)..(25): SEQ ID NO: 1484; WAN024DFL; Start 317; Stop 341
aagaccatcctgacactaagattca

SEQ ID NO: 295625 - DNA, 25 bp, Artificial
  probe
  misc_feature (1)..(25): SEQ ID NO: 1484; WAN024DFL; Start 319; Stop 343
gaccatcctgacactaagattcatg

SEQ ID NO: 295626 - DNA, 25 bp, Artificial
  probe
  misc_feature (1)..(25): SEQ ID NO: 1484; WAN024DFL; Start 637; Stop 661
caagctgcctatgatgagttagtaa

SEQ ID NO: 295627 - DNA, 25 bp, Artificial
  probe
  misc_feature (1)..(25): SEQ ID NO: 1484; WAN024DFL; Start 325; Stop 349
cctgacactaagattcatgtgattg

SEQ ID NO: 295628 - DNA, 25 bp, Artificial
  probe
  misc_feature (1)..(25): SEQ ID NO: 1484; WAN024DFL; Start 324; Stop 348
tcctgacactaagattcatgtgatt

SEQ ID NO: 295629 - DNA, 25 bp, Artificial
  probe
  misc_feature (1)..(25): SEQ ID NO: 1484; WAN024DFL; Start 322; Stop 346
catcctgacactaagattcatgtga

SEQ ID NO: 295630 - DNA, 25 bp, Artificial
  probe
  misc_feature (1)..(25): SEQ ID NO: 1484; WAN024DFL; Start 323; Stop 347
atcctgacactaagattcatgtgat

SEQ ID NO: 295631 - DNA, 25 bp, Artificial
  probe
  misc_feature (1)..(25): SEQ ID NO: 1484; WAN024DFL; Start 320; Stop 344
accatcctgacactaagattcatgt

SEQ ID NO: 295632 - DNA, 25 bp, Artificial
  probe
  misc_feature (1)..(25): SEQ ID NO: 1484; WAN024DFL; Start 391; Stop 415
aaattgaatgacttgattgaccagg

SEQ ID NO: 295633 - DNA, 25 bp, Artificial
  probe
  misc_feature (1)..(25): SEQ ID NO: 1484; WAN024DFL; Start 822; Stop 846
gctgatgggctatgaaattgattaa

SEQ ID NO: 295634 - DNA, 25 bp, Artificial
  probe
  misc_feature (1)..(25): SEQ ID NO: 1484; WAN024DFL; Start 636; Stop 660
tcaagctgcctatgatgagttagta

SEQ ID NO: 295635 - DNA, 25 bp, Artificial
  probe
  misc_feature (1)..(25): SEQ ID NO: 1484; WAN024DFL; Start 326; Stop 350
ctgacactaagattcatgtgattga

SEQ ID NO: 295636 - DNA, 25 bp, Artificial
  probe
  misc_feature (1)..(25): SEQ ID NO: 1484; WAN024DFL; Start 550; Stop 574
cttctcaacattcgtatggtcggaa

SEQ ID NO: 295637 - DNA, 25 bp, Artificial
  probe
  misc_feature (1)..(25): SEQ ID NO: 1484; WAN024DFL; Start 315; Stop 339
ggaagaccatcctgacactaagatt

SEQ ID NO: 295638 - DNA, 25 bp, Artificial
  probe
  misc_feature (1)..(25): SEQ ID NO: 1484; WAN024DFL; Start 50; Stop 74
caacaccagctattaacacaacctt

SEQ ID NO: 295639 - DNA, 25 bp, Artificial
  probe
  misc_feature (1)..(25): SEQ ID NO: 1484; WAN024DFL; Start 821; Stop 845
tgctgatgggctatgaaattgatta

SEQ ID NO: 295640 - DNA, 25 bp, Artificial
  probe
  misc_feature (1)..(25): SEQ ID NO: 1484; WAN024DFL; Start 321; Stop 345
ccatcctgacactaagattcatgtg

SEQ ID NO: 295641 - DNA, 25 bp, Artificial
  probe
  misc_feature (1)..(25): SEQ ID NO: 1484; WAN024DFL; Start 17; Stop 41
ttgctgactctggttgtgattatcg

SEQ ID NO: 295642 - DNA, 25 bp, Artificial
  probe
  misc_feature (1)..(25): SEQ ID NO: 1484; WAN024DFL; Start 634; Stop 658
gttcaagctgcctatgatgagttag

SEQ ID NO: 295643 - DNA, 25 bp, Artificial
  probe
  misc_feature (1)..(25): SEQ ID NO: 1484; WAN024DFL; Start 820; Stop 844
ttgctgatgggctatgaaattgatt

SEQ ID NO: 295644 - DNA, 25 bp, Artificial
  probe
  misc_feature (1)..(25): SEQ ID NO: 1484; WAN024DFL; Start 819; Stop 843
tttgctgatgggctatgaaattgat

SEQ ID NO: 295645 - DNA, 25 bp, Artificial
  probe
  misc_feature (1)..(25): SEQ ID NO: 1484; WAN024DFL; Start 327; Stop 351
tgacactaagattcatgtgattgat

SEQ ID NO: 295646 - DNA, 25 bp, Artificial
  probe
  misc_feature (1)..(25): SEQ ID NO: 1484; WAN024DFL; Start 310; Stop 334
tatctggaagaccatcctgacacta

SEQ ID NO: 295647 - DNA, 25 bp, Artificial
  probe
  misc_feature (1)..(25): SEQ ID NO: 1484; WAN024DFL; Start 635; Stop 659
ttcaagctgcctatgatgagttagt

SEQ ID NO: 295648 - DNA, 25 bp, Artificial
  probe
  misc_feature (1)..(25): SEQ ID NO: 1484; WAN024DFL; Start 633; Stop 657
agttcaagctgcctatgatgagtta

SEQ ID NO: 295649 - DNA, 25 bp, Artificial
  probe
  misc_feature (1)..(25): SEQ ID NO: 1484; WAN024DFL; Start 350; Stop 374
atagtttatctgctggtggtgaagt

SEQ ID NO: 295650 - DNA, 25 bp, Artificial
  probe
  misc_feature (1)..(25): SEQ ID NO: 1484; WAN024DFL; Start 824; Stop 848
tgatgggctatgaaattgattaact

SEQ ID NO: 295651 - DNA, 25 bp, Artificial
  probe
  misc_feature (1)..(25): SEQ ID NO: 1485; WAN024FD5; Start 95; Stop 119
cagttacgatacgctcaatgacatc

SEQ ID NO: 295652 - DNA, 25 bp, Artificial
  probe
  misc_feature (1)..(25): SEQ ID NO: 1485; WAN024FD5; Start 96; Stop 120
agttacgatacgctcaatgacatcc

SEQ ID NO: 295653 - DNA, 25 bp, Artificial
  probe
  misc_feature (1)..(25): SEQ ID NO: 1485; WAN024FD5; Start 169; Stop 193
atctctttcatcctagtttcctcac

SEQ ID NO: 295654 - DNA, 25 bp, Artificial
  probe
  misc_feature (1)..(25): SEQ ID NO: 1485; WAN024FD5; Start 94; Stop 118
ccagttacgatacgctcaatgacat

SEQ ID NO: 295655 - DNA, 25 bp, Artificial
  probe
  misc_feature (1)..(25): SEQ ID NO: 1485; WAN024FD5; Start 168; Stop 192
aatctctttcatcctagtttcctca

SEQ ID NO: 295656 - DNA, 25 bp, Artificial
  probe
  misc_feature (1)..(25): SEQ ID NO: 1485; WAN024FD5; Start 182; Stop 206
tagtttcctcactttacaacctcct

SEQ ID NO: 295657 - DNA, 25 bp, Artificial
  probe
  misc_feature (1)..(25): SEQ ID NO: 1485; WAN024FD5; Start 178; Stop 202
atcctagtttcctcactttacaacc

SEQ ID NO: 295658 - DNA, 25 bp, Artificial
  probe
  misc_feature (1)..(25): SEQ ID NO: 1485; WAN024FD5; Start 171; Stop 195
ctctttcatcctagtttcctcactt

SEQ ID NO: 295659 - DNA, 25 bp, Artificial
  probe
  misc_feature (1)..(25): SEQ ID NO: 1485; WAN024FD5; Start 172; Stop 196
tctttcatcctagtttcctcacttt

SEQ ID NO: 295660 - DNA, 25 bp, Artificial
  probe
  misc_feature (1)..(25): SEQ ID NO: 1485; WAN024FD5; Start 177; Stop 201
catcctagtttcctcactttacaac

SEQ ID NO: 295661 - DNA, 25 bp, Artificial
  probe
  misc_feature (1)..(25): SEQ ID NO: 1485; WAN024FD5; Start 170; Stop 194
tctctttcatcctagtttcctcact

SEQ ID NO: 295662 - DNA, 25 bp, Artificial
  probe
  misc_feature (1)..(25): SEQ ID NO: 1485; WAN024FD5; Start 176; Stop 200
tcatcctagtttcctcactttacaa

SEQ ID NO: 295663 - DNA, 25 bp, Artificial
  probe
  misc_feature (1)..(25): SEQ ID NO: 1485; WAN024FD5; Start 175; Stop 199
ttcatcctagtttcctcactttaca

SEQ ID NO: 295664 - DNA, 25 bp, Artificial
  probe
  misc_feature (1)..(25): SEQ ID NO: 1485; WAN024FD5; Start 181; Stop 205
ctagtttcctcactttacaacctcc

SEQ ID NO: 295665 - DNA, 25 bp, Artificial
  probe
  misc_feature (1)..(25): SEQ ID NO: 1485; WAN024FD5; Start 180; Stop 204
cctagtttcctcactttacaacctc

SEQ ID NO: 295666 - DNA, 25 bp, Artificial
  probe
  misc_feature (1)..(25): SEQ ID NO: 1485; WAN024FD5; Start 179; Stop 203
tcctagtttcctcactttacaacct

SEQ ID NO: 295667 - DNA, 25 bp, Artificial
  probe
  misc_feature (1)..(25): SEQ ID NO: 1485; WAN024FD5; Start 174; Stop 198
tttcatcctagtttcctcactttac

SEQ ID NO: 295668 - DNA, 25 bp, Artificial
  probe
  misc_feature (1)..(25): SEQ ID NO: 1485; WAN024FD5; Start 119; Stop 143
ccgtcatttccacacctgataaatt

SEQ ID NO: 295669 - DNA, 25 bp, Artificial
  probe
  misc_feature (1)..(25): SEQ ID NO: 1485; WAN024FD5; Start 213; Stop 237
aattccgaatagaagacaagccgtc

SEQ ID NO: 295670 - DNA, 25 bp, Artificial
  probe
  misc_feature (1)..(25): SEQ ID NO: 1485; WAN024FD5; Start 183; Stop 207
agtttcctcactttacaacctcctc

SEQ ID NO: 295671 - DNA, 25 bp, Artificial
  probe
  misc_feature (1)..(25): SEQ ID NO: 1485; WAN024FD5; Start 173; Stop 197
ctttcatcctagtttcctcacttta

SEQ ID NO: 295672 - DNA, 25 bp, Artificial
  probe
  misc_feature (1)..(25): SEQ ID NO: 1485; WAN024FD5; Start 50; Stop 74
taagagctaagaggagagaagcaat

SEQ ID NO: 295673 - DNA, 25 bp, Artificial
  probe
  misc_feature (1)..(25): SEQ ID NO: 1485; WAN024FD5; Start 49; Stop 73
ttaagagctaagaggagagaagcaa

SEQ ID NO: 295674 - DNA, 25 bp, Artificial
  probe
  misc_feature (1)..(25): SEQ ID NO: 1485; WAN024FD5; Start 117; Stop 141
atccgtcatttccacacctgataaa

SEQ ID NO: 295675 - DNA, 25 bp, Artificial
  probe
  misc_feature (1)..(25): SEQ ID NO: 1485; WAN024FD5; Start 167; Stop 191
taatctctttcatcctagtttcctc

SEQ ID NO: 295676 - DNA, 25 bp, Artificial
  probe
  misc_feature (1)..(25): SEQ ID NO: 1485; WAN024FD5; Start 97; Stop 121
gttacgatacgctcaatgacatccg

SEQ ID NO: 295677 - DNA, 25 bp, Artificial
  probe
  misc_feature (1)..(25): SEQ ID NO: 1485; WAN024FD5; Start 189; Stop 213
ctcactttacaacctcctcgataaa

SEQ ID NO: 295678 - DNA, 25 bp, Artificial
  probe
  misc_feature (1)..(25): SEQ ID NO: 1485; WAN024FD5; Start 118; Stop 142
tccgtcatttccacacctgataaat

SEQ ID NO: 295679 - DNA, 25 bp, Artificial
  probe
  misc_feature (1)..(25): SEQ ID NO: 1485; WAN024FD5; Start 247; Stop 271
aatgctctctggatggtactggaag

SEQ ID NO: 295680 - DNA, 25 bp, Artificial
  probe
  misc_feature (1)..(25): SEQ ID NO: 1485; WAN024FD5; Start 51; Stop 75
aagagctaagaggagagaagcaatc

SEQ ID NO: 295681 - DNA, 25 bp, Artificial
  probe
  misc_feature (1)..(25): SEQ ID NO: 1485; WAN024FD5; Start 188; Stop 212
cctcactttacaacctcctcgataa

SEQ ID NO: 295682 - DNA, 25 bp, Artificial
  probe
  misc_feature (1)..(25): SEQ ID NO: 1485; WAN024FD5; Start 212; Stop 236
aaattccgaatagaagacaagccgt

SEQ ID NO: 295683 - DNA, 25 bp, Artificial
  probe
  misc_feature (1)..(25): SEQ ID NO: 1485; WAN024FD5; Start 120; Stop 144
cgtcatttccacacctgataaattt

SEQ ID NO: 295684 - DNA, 25 bp, Artificial
  probe
  misc_feature (1)..(25): SEQ ID NO: 1486; WAN024G6O; Start 23; Stop 47
gaacagactcaggaatagtaatacc

SEQ ID NO: 295685 - DNA, 25 bp, Artificial
  probe
  misc_feature (1)..(25): SEQ ID NO: 1486; WAN024G6O; Start 24; Stop 48
aacagactcaggaatagtaatacct

SEQ ID NO: 295686 - DNA, 25 bp, Artificial
  probe
  misc_feature (1)..(25): SEQ ID NO: 1486; WAN024G6O; Start 22; Stop 46
agaacagactcaggaatagtaatac

SEQ ID NO: 295687 - DNA, 25 bp, Artificial
  probe
  misc_feature (1)..(25): SEQ ID NO: 1486; WAN024G6O; Start 36; Stop 60
aatagtaatacctagttcttgtgct

SEQ ID NO: 295688 - DNA, 25 bp, Artificial
  probe
  misc_feature (1)..(25): SEQ ID NO: 1486; WAN024G6O; Start 25; Stop 49
acagactcaggaatagtaataccta

SEQ ID NO: 295689 - DNA, 25 bp, Artificial
  probe
  misc_feature (1)..(25): SEQ ID NO: 1486; WAN024G6O; Start 39; Stop 63
agtaatacctagttcttgtgctatt

SEQ ID NO: 295690 - DNA, 25 bp, Artificial
  probe
  misc_feature (1)..(25): SEQ ID NO: 1486; WAN024G6O; Start 35; Stop 59
gaatagtaatacctagttcttgtgc

SEQ ID NO: 295691 - DNA, 25 bp, Artificial
  probe
  misc_feature (1)..(25): SEQ ID NO: 1486; WAN024G6O; Start 21; Stop 45
gagaacagactcaggaatagtaata

SEQ ID NO: 295692 - DNA, 25 bp, Artificial
  probe
  misc_feature (1)..(25): SEQ ID NO: 1486; WAN024G6O; Start 27; Stop 51
agactcaggaatagtaatacctagt

SEQ ID NO: 295693 - DNA, 25 bp, Artificial
  probe
  misc_feature (1)..(25): SEQ ID NO: 1486; WAN024G6O; Start 200; Stop 224
aaccacctacttctaccatagctgt

SEQ ID NO: 295694 - DNA, 25 bp, Artificial
  probe
  misc_feature (1)..(25): SEQ ID NO: 1486; WAN024G6O; Start 26; Stop 50
cagactcaggaatagtaatacctag

SEQ ID NO: 295695 - DNA, 25 bp, Artificial
  probe
  misc_feature (1)..(25): SEQ ID NO: 1486; WAN024G6O; Start 184; Stop 208
attacaactgatgccaaaccaccta

SEQ ID NO: 295696 - DNA, 25 bp, Artificial
  probe
  misc_feature (1)..(25): SEQ ID NO: 1486; WAN024G6O; Start 38; Stop 62
tagtaatacctagttcttgtgctat

SEQ ID NO: 295697 - DNA, 25 bp, Artificial
  probe
  misc_feature (1)..(25): SEQ ID NO: 1486; WAN024G6O; Start 37; Stop 61
atagtaatacctagttcttgtgcta

SEQ ID NO: 295698 - DNA, 25 bp, Artificial
  probe
  misc_feature (1)..(25): SEQ ID NO: 1486; WAN024G6O; Start 34; Stop 58
ggaatagtaatacctagttcttgtg

SEQ ID NO: 295699 - DNA, 25 bp, Artificial
  probe
  misc_feature (1)..(25): SEQ ID NO: 1486; WAN024G6O; Start 197; Stop 221
ccaaaccacctacttctaccatagc

SEQ ID NO: 295700 - DNA, 25 bp, Artificial
  probe
  misc_feature (1)..(25): SEQ ID NO: 1486; WAN024G6O; Start 196; Stop 220
gccaaaccacctacttctaccatag

SEQ ID NO: 295701 - DNA, 25 bp, Artificial
  probe
  misc_feature (1)..(25): SEQ ID NO: 1486; WAN024G6O; Start 201; Stop 225
accacctacttctaccatagctgtc

SEQ ID NO: 295702 - DNA, 25 bp, Artificial
  probe
  misc_feature (1)..(25): SEQ ID NO: 1486; WAN024G6O; Start 181; Stop 205
tcaattacaactgatgccaaaccac

SEQ ID NO: 295703 - DNA, 25 bp, Artificial
  probe
  misc_feature (1)..(25): SEQ ID NO: 1486; WAN024G6O; Start 180; Stop 204
gtcaattacaactgatgccaaacca

SEQ ID NO: 295704 - DNA, 25 bp, Artificial
  probe
  misc_feature (1)..(25): SEQ ID NO: 1486; WAN024G6O; Start 29; Stop 53
actcaggaatagtaatacctagttc

SEQ ID NO: 295705 - DNA, 25 bp, Artificial
  probe
  misc_feature (1)..(25): SEQ ID NO: 1486; WAN024G6O; Start 28; Stop 52
gactcaggaatagtaatacctagtt

SEQ ID NO: 295706 - DNA, 25 bp, Artificial
  probe
  misc_feature (1)..(25): SEQ ID NO: 1486; WAN024G6O; Start 199; Stop 223
aaaccacctacttctaccatagctg

SEQ ID NO: 295707 - DNA, 25 bp, Artificial
  probe
  misc_feature (1)..(25): SEQ ID NO: 1486; WAN024G6O; Start 198; Stop 222
caaaccacctacttctaccatagct

SEQ ID NO: 295708 - DNA, 25 bp, Artificial
  probe
  misc_feature (1)..(25): SEQ ID NO: 1486; WAN024G6O; Start 30; Stop 54
ctcaggaatagtaatacctagttct

SEQ ID NO: 295709 - DNA, 25 bp, Artificial
  probe
  misc_feature (1)..(25): SEQ ID NO: 1486; WAN024G6O; Start 127; Stop 151
cctttcaagacttgcacaatcattt

SEQ ID NO: 295710 - DNA, 25 bp, Artificial
  probe
  misc_feature (1)..(25): SEQ ID NO: 1486; WAN024G6O; Start 195; Stop 219
tgccaaaccacctacttctaccata

SEQ ID NO: 295711 - DNA, 25 bp, Artificial
  probe
  misc_feature (1)..(25): SEQ ID NO: 1486; WAN024G6O; Start 191; Stop 215
ctgatgccaaaccacctacttctac

SEQ ID NO: 295712 - DNA, 25 bp, Artificial
  probe
  misc_feature (1)..(25): SEQ ID NO: 1486; WAN024G6O; Start 182; Stop 206
caattacaactgatgccaaaccacc

SEQ ID NO: 295713 - DNA, 25 bp, Artificial
  probe
  misc_feature (1)..(25): SEQ ID NO: 1486; WAN024G6O; Start 185; Stop 209
ttacaactgatgccaaaccacctac

SEQ ID NO: 295714 - DNA, 25 bp, Artificial
  probe
  misc_feature (1)..(25): SEQ ID NO: 1486; WAN024G6O; Start 183; Stop 207
aattacaactgatgccaaaccacct

SEQ ID NO: 295715 - DNA, 25 bp, Artificial
  probe
  misc_feature (1)..(25): SEQ ID NO: 1486; WAN024G6O; Start 172; Stop 196
tcatgttggtcaattacaactgatg

SEQ ID NO: 295716 - DNA, 25 bp, Artificial
  probe
  misc_feature (1)..(25): SEQ ID NO: 1486; WAN024G6O; Start 171; Stop 195
gtcatgttggtcaattacaactgat

SEQ ID NO: 295717 - DNA, 25 bp, Artificial
  probe
  misc_feature (1)..(25): SEQ ID NO: 1487; WAN024DH8; Start 193; Stop 217
caaggagaggatattcgtaagaagg

SEQ ID NO: 295718 - DNA, 25 bp, Artificial
  probe
  misc_feature (1)..(25): SEQ ID NO: 1487; WAN024DH8; Start 192; Stop 216
tcaaggagaggatattcgtaagaag

SEQ ID NO: 295719 - DNA, 25 bp, Artificial
  probe
  misc_feature (1)..(25): SEQ ID NO: 1487; WAN024DH8; Start 191; Stop 215
ttcaaggagaggatattcgtaagaa

SEQ ID NO: 295720 - DNA, 25 bp, Artificial
  probe
  misc_feature (1)..(25): SEQ ID NO: 1487; WAN024DH8; Start 12; Stop 36
acaattacaagatgttacctaccgt

SEQ ID NO: 295721 - DNA, 25 bp, Artificial
  probe
  misc_feature (1)..(25): SEQ ID NO: 1487; WAN024DH8; Start 581; Stop 605
aagcgtcagatattacacttgaatt

SEQ ID NO: 295722 - DNA, 25 bp, Artificial
  probe
  misc_feature (1)..(25): SEQ ID NO: 1487; WAN024DH8; Start 28; Stop 52
acctaccgttataagaatactgctg

SEQ ID NO: 295723 - DNA, 25 bp, Artificial
  probe
  misc_feature (1)..(25): SEQ ID NO: 1487; WAN024DH8; Start 29; Stop 53
cctaccgttataagaatactgctga

SEQ ID NO: 295724 - DNA, 25 bp, Artificial
  probe
  misc_feature (1)..(25): SEQ ID NO: 1487; WAN024DH8; Start 13; Stop 37
caattacaagatgttacctaccgtt

SEQ ID NO: 295725 - DNA, 25 bp, Artificial
  probe
  misc_feature (1)..(25): SEQ ID NO: 1487; WAN024DH8; Start 32; Stop 56
accgttataagaatactgctgaagc

SEQ ID NO: 295726 - DNA, 25 bp, Artificial
  probe
  misc_feature (1)..(25): SEQ ID NO: 1487; WAN024DH8; Start 164; Stop 188
atagtcctgttgaaggttctatcct

SEQ ID NO: 295727 - DNA, 25 bp, Artificial
  probe
  misc_feature (1)..(25): SEQ ID NO: 1487; WAN024DH8; Start 582; Stop 606
agcgtcagatattacacttgaatta

SEQ ID NO: 295728 - DNA, 25 bp, Artificial
  probe
  misc_feature (1)..(25): SEQ ID NO: 1487; WAN024DH8; Start 27; Stop 51
tacctaccgttataagaatactgct

SEQ ID NO: 295729 - DNA, 25 bp, Artificial
  probe
  misc_feature (1)..(25): SEQ ID NO: 1487; WAN024DH8; Start 11; Stop 35
tacaattacaagatgttacctaccg

SEQ ID NO: 295730 - DNA, 25 bp, Artificial
  probe
  misc_feature (1)..(25): SEQ ID NO: 1487; WAN024DH8; Start 31; Stop 55
taccgttataagaatactgctgaag

SEQ ID NO: 295731 - DNA, 25 bp, Artificial
  probe
  misc_feature (1)..(25): SEQ ID NO: 1487; WAN024DH8; Start 30; Stop 54
ctaccgttataagaatactgctgaa

SEQ ID NO: 295732 - DNA, 25 bp, Artificial
  probe
  misc_feature (1)..(25): SEQ ID NO: 1487; WAN024DH8; Start 160; Stop 184
ctagatagtcctgttgaaggttcta

SEQ ID NO: 295733 - DNA, 25 bp, Artificial
  probe
  misc_feature (1)..(25): SEQ ID NO: 1487; WAN024DH8; Start 538; Stop 562
ggtaaatgtgtgattgtcgtaactc

SEQ ID NO: 295734 - DNA, 25 bp, Artificial
  probe
  misc_feature (1)..(25): SEQ ID NO: 1487; WAN024DH8; Start 26; Stop 50
ttacctaccgttataagaatactgc

SEQ ID NO: 295735 - DNA, 25 bp, Artificial
  probe
  misc_feature (1)..(25): SEQ ID NO: 1487; WAN024DH8; Start 606; Stop 630
aaaggataagaaactgactgaaacg

SEQ ID NO: 295736 - DNA, 25 bp, Artificial
  probe
  misc_feature (1)..(25): SEQ ID NO: 1487; WAN024DH8; Start 537; Stop 561
aggtaaatgtgtgattgtcgtaact

SEQ ID NO: 295737 - DNA, 25 bp, Artificial
  probe
  misc_feature (1)..(25): SEQ ID NO: 1487; WAN024DH8; Start 536; Stop 560
caggtaaatgtgtgattgtcgtaac

SEQ ID NO: 295738 - DNA, 25 bp, Artificial
  probe
  misc_feature (1)..(25): SEQ ID NO: 1487; WAN024DH8; Start 583; Stop 607
gcgtcagatattacacttgaattaa

SEQ ID NO: 295739 - DNA, 25 bp, Artificial
  probe
  misc_feature (1)..(25): SEQ ID NO: 1487; WAN024DH8; Start 19; Stop 43
caagatgttacctaccgttataaga

SEQ ID NO: 295740 - DNA, 25 bp, Artificial
  probe
  misc_feature (1)..(25): SEQ ID NO: 1487; WAN024DH8; Start 494; Stop 518
ctggagatattgtcgaactactcaa

SEQ ID NO: 295741 - DNA, 25 bp, Artificial
  probe
  misc_feature (1)..(25): SEQ ID NO: 1487; WAN024DH8; Start 489; Stop 513
aactgctggagatattgtcgaacta

SEQ ID NO: 295742 - DNA, 25 bp, Artificial
  probe
  misc_feature (1)..(25): SEQ ID NO: 1487; WAN024DH8; Start 200; Stop 224
aggatattcgtaagaagggctattc

SEQ ID NO: 295743 - DNA, 25 bp, Artificial
  probe
  misc_feature (1)..(25): SEQ ID NO: 1487; WAN024DH8; Start 199; Stop 223
gaggatattcgtaagaagggctatt

SEQ ID NO: 295744 - DNA, 25 bp, Artificial
  probe
  misc_feature (1)..(25): SEQ ID NO: 1487; WAN024DH8; Start 14; Stop 38
aattacaagatgttacctaccgtta

SEQ ID NO: 295745 - DNA, 25 bp, Artificial
  probe
  misc_feature (1)..(25): SEQ ID NO: 1487; WAN024DH8; Start 198; Stop 222
agaggatattcgtaagaagggctat

SEQ ID NO: 295746 - DNA, 25 bp, Artificial
  probe
  misc_feature (1)..(25): SEQ ID NO: 1487; WAN024DH8; Start 190; Stop 214
tttcaaggagaggatattcgtaaga

SEQ ID NO: 295747 - DNA, 25 bp, Artificial
  probe
  misc_feature (1)..(25): SEQ ID NO: 1487; WAN024DH8; Start 161; Stop 185
tagatagtcctgttgaaggttctat

SEQ ID NO: 295748 - DNA, 25 bp, Artificial
  probe
  misc_feature (1)..(25): SEQ ID NO: 1487; WAN024DH8; Start 15; Stop 39
attacaagatgttacctaccgttat

SEQ ID NO: 295749 - DNA, 25 bp, Artificial
  probe
  misc_feature (1)..(25): SEQ ID NO: 1487; WAN024DH8; Start 197; Stop 221
gagaggatattcgtaagaagggcta

SEQ ID NO: 295750 - DNA, 25 bp, Artificial
  probe
  misc_feature (1)..(25): SEQ ID NO: 1488; WAN024GMM; Start 67; Stop 91
atgatggttccgacgatagagatta

SEQ ID NO: 295751 - DNA, 25 bp, Artificial
  probe
  misc_feature (1)..(25): SEQ ID NO: 1488; WAN024GMM; Start 66; Stop 90
tatgatggttccgacgatagagatt

SEQ ID NO: 295752 - DNA, 25 bp, Artificial
  probe
  misc_feature (1)..(25): SEQ ID NO: 1488; WAN024GMM; Start 68; Stop 92
tgatggttccgacgatagagattaa

SEQ ID NO: 295753 - DNA, 25 bp, Artificial
  probe
  misc_feature (1)..(25): SEQ ID NO: 1488; WAN024GMM; Start 346; Stop 370
ccaggttctacttgaatcatcttga

SEQ ID NO: 295754 - DNA, 25 bp, Artificial
  probe
  misc_feature (1)..(25): SEQ ID NO: 1488; WAN024GMM; Start 345; Stop 369
accaggttctacttgaatcatcttg

SEQ ID NO: 295755 - DNA, 25 bp, Artificial
  probe
  misc_feature (1)..(25): SEQ ID NO: 1488; WAN024GMM; Start 674; Stop 698
ttggactcatacctgcgataatcat

SEQ ID NO: 295756 - DNA, 25 bp, Artificial
  probe
  misc_feature (1)..(25): SEQ ID NO: 1488; WAN024GMM; Start 615; Stop 639
aactggttcgctagtatagtaactg

SEQ ID NO: 295757 - DNA, 25 bp, Artificial
  probe
  misc_feature (1)..(25): SEQ ID NO: 1488; WAN024GMM; Start 688; Stop 712
gcgataatcatgtcaatcttaccag

SEQ ID NO: 295758 - DNA, 25 bp, Artificial
  probe
  misc_feature (1)..(25): SEQ ID NO: 1488; WAN024GMM; Start 686; Stop 710
ctgcgataatcatgtcaatcttacc

SEQ ID NO: 295759 - DNA, 25 bp, Artificial
  probe
  misc_feature (1)..(25): SEQ ID NO: 1488; WAN024GMM; Start 685; Stop 709
cctgcgataatcatgtcaatcttac

SEQ ID NO: 295760 - DNA, 25 bp, Artificial
  probe
  misc_feature (1)..(25): SEQ ID NO: 1488; WAN024GMM; Start 684; Stop 708
acctgcgataatcatgtcaatctta

SEQ ID NO: 295761 - DNA, 25 bp, Artificial
  probe
  misc_feature (1)..(25): SEQ ID NO: 1488; WAN024GMM; Start 683; Stop 707
tacctgcgataatcatgtcaatctt

SEQ ID NO: 295762 - DNA, 25 bp, Artificial
  probe
  misc_feature (1)..(25): SEQ ID NO: 1488; WAN024GMM; Start 682; Stop 706
atacctgcgataatcatgtcaatct

SEQ ID NO: 295763 - DNA, 25 bp, Artificial
  probe
  misc_feature (1)..(25): SEQ ID NO: 1488; WAN024GMM; Start 347; Stop 371
caggttctacttgaatcatcttgaa

SEQ ID NO: 295764 - DNA, 25 bp, Artificial
  probe
  misc_feature (1)..(25): SEQ ID NO: 1488; WAN024GMM; Start 687; Stop 711
tgcgataatcatgtcaatcttacca

SEQ ID NO: 295765 - DNA, 25 bp, Artificial
  probe
  misc_feature (1)..(25): SEQ ID NO: 1488; WAN024GMM; Start 681; Stop 705
catacctgcgataatcatgtcaatc

SEQ ID NO: 295766 - DNA, 25 bp, Artificial
  probe
  misc_feature (1)..(25): SEQ ID NO: 1488; WAN024GMM; Start 680; Stop 704
tcatacctgcgataatcatgtcaat

SEQ ID NO: 295767 - DNA, 25 bp, Artificial
  probe
  misc_feature (1)..(25): SEQ ID NO: 1488; WAN024GMM; Start 46; Stop 70
gcaagtccaataatgagacctatga

SEQ ID NO: 295768 - DNA, 25 bp, Artificial
  probe
  misc_feature (1)..(25): SEQ ID NO: 1488; WAN024GMM; Start 679; Stop 703
ctcatacctgcgataatcatgtcaa

SEQ ID NO: 295769 - DNA, 25 bp, Artificial
  probe
  misc_feature (1)..(25): SEQ ID NO: 1488; WAN024GMM; Start 65; Stop 89
ctatgatggttccgacgatagagat

SEQ ID NO: 295770 - DNA, 25 bp, Artificial
  probe
  misc_feature (1)..(25): SEQ ID NO: 1488; WAN024GMM; Start 344; Stop 368
aaccaggttctacttgaatcatctt

SEQ ID NO: 295771 - DNA, 25 bp, Artificial
  probe
  misc_feature (1)..(25): SEQ ID NO: 1488; WAN024GMM; Start 45; Stop 69
ggcaagtccaataatgagacctatg

SEQ ID NO: 295772 - DNA, 25 bp, Artificial
  probe
  misc_feature (1)..(25): SEQ ID NO: 1488; WAN024GMM; Start 169; Stop 193
ctgctagtctcttcagttgttgtag

SEQ ID NO: 295773 - DNA, 25 bp, Artificial
  probe
  misc_feature (1)..(25): SEQ ID NO: 1488; WAN024GMM; Start 673; Stop 697
gttggactcatacctgcgataatca

SEQ ID NO: 295774 - DNA, 25 bp, Artificial
  probe
  misc_feature (1)..(25): SEQ ID NO: 1488; WAN024GMM; Start 173; Stop 197
tagtctcttcagttgttgtagcttc

SEQ ID NO: 295775 - DNA, 25 bp, Artificial
  probe
  misc_feature (1)..(25): SEQ ID NO: 1488; WAN024GMM; Start 172; Stop 196
ctagtctcttcagttgttgtagctt

SEQ ID NO: 295776 - DNA, 25 bp, Artificial
  probe
  misc_feature (1)..(25): SEQ ID NO: 1488; WAN024GMM; Start 618; Stop 642
tggttcgctagtatagtaactgctc

SEQ ID NO: 295777 - DNA, 25 bp, Artificial
  probe
  misc_feature (1)..(25): SEQ ID NO: 1488; WAN024GMM; Start 617; Stop 641
ctggttcgctagtatagtaactgct

SEQ ID NO: 295778 - DNA, 25 bp, Artificial
  probe
  misc_feature (1)..(25): SEQ ID NO: 1488; WAN024GMM; Start 689; Stop 713
cgataatcatgtcaatcttaccaga

SEQ ID NO: 295779 - DNA, 25 bp, Artificial
  probe
  misc_feature (1)..(25): SEQ ID NO: 1488; WAN024GMM; Start 355; Stop 379
acttgaatcatcttgaacttagagt

SEQ ID NO: 295780 - DNA, 25 bp, Artificial
  probe
  misc_feature (1)..(25): SEQ ID NO: 1488; WAN024GMM; Start 50; Stop 74
gtccaataatgagacctatgatggt

SEQ ID NO: 295781 - DNA, 25 bp, Artificial
  probe
  misc_feature (1)..(25): SEQ ID NO: 1488; WAN024GMM; Start 54; Stop 78
aataatgagacctatgatggttccg

SEQ ID NO: 295782 - DNA, 25 bp, Artificial
  probe
  misc_feature (1)..(25): SEQ ID NO: 1488; WAN024GMM; Start 678; Stop 702
actcatacctgcgataatcatgtca

SEQ ID NO: 295783 - DNA, 25 bp, Artificial
  probe
  misc_feature (1)..(25): SEQ ID NO: 1489; WAN024G8I; Start 628; Stop 652
gtagcagtagttgttgactctatga

SEQ ID NO: 295784 - DNA, 25 bp, Artificial
  probe
  misc_feature (1)..(25): SEQ ID NO: 1489; WAN024G8I; Start 627; Stop 651
tgtagcagtagttgttgactctatg

SEQ ID NO: 295785 - DNA, 25 bp, Artificial
  probe
  misc_feature (1)..(25): SEQ ID NO: 1489; WAN024G8I; Start 629; Stop 653
tagcagtagttgttgactctatgaa

SEQ ID NO: 295786 - DNA, 25 bp, Artificial
  probe
  misc_feature (1)..(25): SEQ ID NO: 1489; WAN024G8I; Start 626; Stop 650
ctgtagcagtagttgttgactctat

SEQ ID NO: 295787 - DNA, 25 bp, Artificial
  probe
  misc_feature (1)..(25): SEQ ID NO: 1489; WAN024G8I; Start 396; Stop 420
gtctcagattgatgacttccgtaat

SEQ ID NO: 295788 - DNA, 25 bp, Artificial
  probe
  misc_feature (1)..(25): SEQ ID NO: 1489; WAN024G8I; Start 623; Stop 647
attctgtagcagtagttgttgactc

SEQ ID NO: 295789 - DNA, 25 bp, Artificial
  probe
  misc_feature (1)..(25): SEQ ID NO: 1489; WAN024G8I; Start 625; Stop 649
tctgtagcagtagttgttgactcta

SEQ ID NO: 295790 - DNA, 25 bp, Artificial
  probe
  misc_feature (1)..(25): SEQ ID NO: 1489; WAN024G8I; Start 622; Stop 646
cattctgtagcagtagttgttgact

SEQ ID NO: 295791 - DNA, 25 bp, Artificial
  probe
  misc_feature (1)..(25): SEQ ID NO: 1489; WAN024G8I; Start 391; Stop 415
ctcttgtctcagattgatgacttcc

SEQ ID NO: 295792 - DNA, 25 bp, Artificial
  probe
  misc_feature (1)..(25): SEQ ID NO: 1489; WAN024G8I; Start 624; Stop 648
ttctgtagcagtagttgttgactct

SEQ ID NO: 295793 - DNA, 25 bp, Artificial
  probe
  misc_feature (1)..(25): SEQ ID NO: 1489; WAN024G8I; Start 390; Stop 414
gctcttgtctcagattgatgacttc

SEQ ID NO: 295794 - DNA, 25 bp, Artificial
  probe
  misc_feature (1)..(25): SEQ ID NO: 1489; WAN024G8I; Start 395; Stop 419
tgtctcagattgatgacttccgtaa

SEQ ID NO: 295795 - DNA, 25 bp, Artificial
  probe
  misc_feature (1)..(25): SEQ ID NO: 1489; WAN024G8I; Start 394; Stop 418
ttgtctcagattgatgacttccgta

SEQ ID NO: 295796 - DNA, 25 bp, Artificial
  probe
  misc_feature (1)..(25): SEQ ID NO: 1489; WAN024G8I; Start 397; Stop 421
tctcagattgatgacttccgtaatc

SEQ ID NO: 295797 - DNA, 25 bp, Artificial
  probe
  misc_feature (1)..(25): SEQ ID NO: 1489; WAN024G8I; Start 140; Stop 164
tttacacgactgataaggagcaaat

SEQ ID NO: 295798 - DNA, 25 bp, Artificial
  probe
  misc_feature (1)..(25): SEQ ID NO: 1489; WAN024G8I; Start 139; Stop 163
atttacacgactgataaggagcaaa

SEQ ID NO: 295799 - DNA, 25 bp, Artificial
  probe
  misc_feature (1)..(25): SEQ ID NO: 1489; WAN024G8I; Start 718; Stop 742
aaagggattatcatcggtaaaggtg

SEQ ID NO: 295800 - DNA, 25 bp, Artificial
  probe
  misc_feature (1)..(25): SEQ ID NO: 1489; WAN024G8I; Start 621; Stop 645
gcattctgtagcagtagttgttgac

SEQ ID NO: 295801 - DNA, 25 bp, Artificial
  probe
  misc_feature (1)..(25): SEQ ID NO: 1489; WAN024G8I; Start 141; Stop 165
ttacacgactgataaggagcaaatt

SEQ ID NO: 295802 - DNA, 25 bp, Artificial
  probe
  misc_feature (1)..(25): SEQ ID NO: 1489; WAN024G8I; Start 138; Stop 162
aatttacacgactgataaggagcaa

SEQ ID NO: 295803 - DNA, 25 bp, Artificial
  probe
  misc_feature (1)..(25): SEQ ID NO: 1489; WAN024G8I; Start 133; Stop 157
atgggaatttacacgactgataagg

SEQ ID NO: 295804 - DNA, 25 bp, Artificial
  probe
  misc_feature (1)..(25): SEQ ID NO: 1489; WAN024G8I; Start 137; Stop 161
gaatttacacgactgataaggagca

SEQ ID NO: 295805 - DNA, 25 bp, Artificial
  probe
  misc_feature (1)..(25): SEQ ID NO: 1489; WAN024G8I; Start 392; Stop 416
tcttgtctcagattgatgacttccg

SEQ ID NO: 295806 - DNA, 25 bp, Artificial
  probe
  misc_feature (1)..(25): SEQ ID NO: 1489; WAN024G8I; Start 135; Stop 159
gggaatttacacgactgataaggag

SEQ ID NO: 295807 - DNA, 25 bp, Artificial
  probe
  misc_feature (1)..(25): SEQ ID NO: 1489; WAN024G8I; Start 782; Stop 806
atatcgaactcatgctaggagacaa

SEQ ID NO: 295808 - DNA, 25 bp, Artificial
  probe
  misc_feature (1)..(25): SEQ ID NO: 1489; WAN024G8I; Start 142; Stop 166
tacacgactgataaggagcaaattg

SEQ ID NO: 295809 - DNA, 25 bp, Artificial
  probe
  misc_feature (1)..(25): SEQ ID NO: 1489; WAN024G8I; Start 661; Stop 685
gaagagacagacaaggttcacatcc

SEQ ID NO: 295810 - DNA, 25 bp, Artificial
  probe
  misc_feature (1)..(25): SEQ ID NO: 1489; WAN024G8I; Start 631; Stop 655
gcagtagttgttgactctatgaaac

SEQ ID NO: 295811 - DNA, 25 bp, Artificial
  probe
  misc_feature (1)..(25): SEQ ID NO: 1489; WAN024G8I; Start 630; Stop 654
agcagtagttgttgactctatgaaa

SEQ ID NO: 295812 - DNA, 25 bp, Artificial
  probe
  misc_feature (1)..(25): SEQ ID NO: 1489; WAN024G8I; Start 307; Stop 331
gatatgattatcgagcgtctcaagg

SEQ ID NO: 295813 - DNA, 25 bp, Artificial
  probe
  misc_feature (1)..(25): SEQ ID NO: 1489; WAN024G8I; Start 633; Stop 657
agtagttgttgactctatgaaacga

SEQ ID NO: 295814 - DNA, 25 bp, Artificial
  probe
  misc_feature (1)..(25): SEQ ID NO: 1489; WAN024G8I; Start 632; Stop 656
cagtagttgttgactctatgaaacg

SEQ ID NO: 295815 - DNA, 25 bp, Artificial
  probe
  misc_feature (1)..(25): SEQ ID NO: 1489; WAN024G8I; Start 136; Stop 160
ggaatttacacgactgataaggagc

SEQ ID NO: 295816 - DNA, 25 bp, Artificial
  probe
  misc_feature (1)..(25): SEQ ID NO: 1490; WAN024D2U; Start 64; Stop 88
agtaatacaattccttaccaacagt

SEQ ID NO: 295817 - DNA, 25 bp, Artificial
  probe
  misc_feature (1)..(25): SEQ ID NO: 1490; WAN024D2U; Start 133; Stop 157
aagaagtccaatggtcttgatgttg

SEQ ID NO: 295818 - DNA, 25 bp, Artificial
  probe
  misc_feature (1)..(25): SEQ ID NO: 1490; WAN024D2U; Start 65; Stop 89
gtaatacaattccttaccaacagtt

SEQ ID NO: 295819 - DNA, 25 bp, Artificial
  probe
  misc_feature (1)..(25): SEQ ID NO: 1490; WAN024D2U; Start 152; Stop 176
atgttgggaaggcggattaactaat

SEQ ID NO: 295820 - DNA, 25 bp, Artificial
  probe
  misc_feature (1)..(25): SEQ ID NO: 1490; WAN024D2U; Start 28; Stop 52
ttagttacatttgcattgctaggtg

SEQ ID NO: 295821 - DNA, 25 bp, Artificial
  probe
  misc_feature (1)..(25): SEQ ID NO: 1490; WAN024D2U; Start 27; Stop 51
attagttacatttgcattgctaggt

SEQ ID NO: 295822 - DNA, 25 bp, Artificial
  probe
  misc_feature (1)..(25): SEQ ID NO: 1490; WAN024D2U; Start 151; Stop 175
gatgttgggaaggcggattaactaa

SEQ ID NO: 295823 - DNA, 25 bp, Artificial
  probe
  misc_feature (1)..(25): SEQ ID NO: 1490; WAN024D2U; Start 132; Stop 156
aaagaagtccaatggtcttgatgtt

SEQ ID NO: 295824 - DNA, 25 bp, Artificial
  probe
  misc_feature (1)..(25): SEQ ID NO: 1490; WAN024D2U; Start 29; Stop 53
tagttacatttgcattgctaggtgt

SEQ ID NO: 295825 - DNA, 25 bp, Artificial
  probe
  misc_feature (1)..(25): SEQ ID NO: 1490; WAN024D2U; Start 26; Stop 50
aattagttacatttgcattgctagg

SEQ ID NO: 295826 - DNA, 25 bp, Artificial
  probe
  misc_feature (1)..(25): SEQ ID NO: 1490; WAN024D2U; Start 31; Stop 55
gttacatttgcattgctaggtgttt

SEQ ID NO: 295827 - DNA, 25 bp, Artificial
  probe
  misc_feature (1)..(25): SEQ ID NO: 1490; WAN024D2U; Start 63; Stop 87
tagtaatacaattccttaccaacag

SEQ ID NO: 295828 - DNA, 25 bp, Artificial
  probe
  misc_feature (1)..(25): SEQ ID NO: 1490; WAN024D2U; Start 69; Stop 93
tacaattccttaccaacagtttatt

SEQ ID NO: 295829 - DNA, 25 bp, Artificial
  probe
  misc_feature (1)..(25): SEQ ID NO: 1490; WAN024D2U; Start 67; Stop 91
aatacaattccttaccaacagttta

SEQ ID NO: 295830 - DNA, 25 bp, Artificial
  probe
  misc_feature (1)..(25): SEQ ID NO: 1490; WAN024D2U; Start 66; Stop 90
taatacaattccttaccaacagttt

SEQ ID NO: 295831 - DNA, 25 bp, Artificial
  probe
  misc_feature (1)..(25): SEQ ID NO: 1490; WAN024D2U; Start 30; Stop 54
agttacatttgcattgctaggtgtt

SEQ ID NO: 295832 - DNA, 25 bp, Artificial
  probe
  misc_feature (1)..(25): SEQ ID NO: 1490; WAN024D2U; Start 100; Stop 124
aataaacaattggagattcgagtgc

SEQ ID NO: 295833 - DNA, 25 bp, Artificial
  probe
  misc_feature (1)..(25): SEQ ID NO: 1490; WAN024D2U; Start 68; Stop 92
atacaattccttaccaacagtttat

SEQ ID NO: 295834 - DNA, 25 bp, Artificial
  probe
  misc_feature (1)..(25): SEQ ID NO: 1490; WAN024D2U; Start 101; Stop 125
ataaacaattggagattcgagtgca

SEQ ID NO: 295835 - DNA, 25 bp, Artificial
  probe
  misc_feature (1)..(25): SEQ ID NO: 1490; WAN024D2U; Start 62; Stop 86
ttagtaatacaattccttaccaaca

SEQ ID NO: 295836 - DNA, 25 bp, Artificial
  probe
  misc_feature (1)..(25): SEQ ID NO: 1490; WAN024D2U; Start 150; Stop 174
tgatgttgggaaggcggattaacta

SEQ ID NO: 295837 - DNA, 25 bp, Artificial
  probe
  misc_feature (1)..(25): SEQ ID NO: 1490; WAN024D2U; Start 102; Stop 126
taaacaattggagattcgagtgcaa

SEQ ID NO: 295838 - DNA, 25 bp, Artificial
  probe
  misc_feature (1)..(25): SEQ ID NO: 1490; WAN024D2U; Start 104; Stop 128
aacaattggagattcgagtgcaatc

SEQ ID NO: 295839 - DNA, 25 bp, Artificial
  probe
  misc_feature (1)..(25): SEQ ID NO: 1490; WAN024D2U; Start 148; Stop 172
cttgatgttgggaaggcggattaac

SEQ ID NO: 295840 - DNA, 25 bp, Artificial
  probe
  misc_feature (1)..(25): SEQ ID NO: 1490; WAN024D2U; Start 147; Stop 171
tcttgatgttgggaaggcggattaa

SEQ ID NO: 295841 - DNA, 25 bp, Artificial
  probe
  misc_feature (1)..(25): SEQ ID NO: 1490; WAN024D2U; Start 149; Stop 173
ttgatgttgggaaggcggattaact

SEQ ID NO: 295842 - DNA, 25 bp, Artificial
  probe
  misc_feature (1)..(25): SEQ ID NO: 1490; WAN024D2U; Start 99; Stop 123
gaataaacaattggagattcgagtg

SEQ ID NO: 295843 - DNA, 25 bp, Artificial
  probe
  misc_feature (1)..(25): SEQ ID NO: 1490; WAN024D2U; Start 98; Stop 122
agaataaacaattggagattcgagt

SEQ ID NO: 295844 - DNA, 25 bp, Artificial
  probe
  misc_feature (1)..(25): SEQ ID NO: 1490; WAN024D2U; Start 25; Stop 49
aaattagttacatttgcattgctag

SEQ ID NO: 295845 - DNA, 25 bp, Artificial
  probe
  misc_feature (1)..(25): SEQ ID NO: 1490; WAN024D2U; Start 130; Stop 154
caaaagaagtccaatggtcttgatg

SEQ ID NO: 295846 - DNA, 25 bp, Artificial
  probe
  misc_feature (1)..(25): SEQ ID NO: 1490; WAN024D2U; Start 32; Stop 56
ttacatttgcattgctaggtgtttt

SEQ ID NO: 295847 - DNA, 25 bp, Artificial
  probe
  misc_feature (1)..(25): SEQ ID NO: 1490; WAN024D2U; Start 131; Stop 155
aaaagaagtccaatggtcttgatgt

SEQ ID NO: 295848 - DNA, 25 bp, Artificial
  probe
  misc_feature (1)..(25): SEQ ID NO: 1490; WAN024D2U; Start 124; Stop 148
caatcgcaaaagaagtccaatggtc

SEQ ID NO: 295849 - DNA, 25 bp, Artificial
  probe
  misc_feature (1)..(25): SEQ ID NO: 1491; WAN024ATB; Start 183; Stop 207
gttaggcaagagggagataacttat

SEQ ID NO: 295850 - DNA, 25 bp, Artificial
  probe
  misc_feature (1)..(25): SEQ ID NO: 1491; WAN024ATB; Start 184; Stop 208
ttaggcaagagggagataacttatc

SEQ ID NO: 295851 - DNA, 25 bp, Artificial
  probe
  misc_feature (1)..(25): SEQ ID NO: 1491; WAN024ATB; Start 182; Stop 206
tgttaggcaagagggagataactta

SEQ ID NO: 295852 - DNA, 25 bp, Artificial
  probe
  misc_feature (1)..(25): SEQ ID NO: 1491; WAN024ATB; Start 181; Stop 205
ttgttaggcaagagggagataactt

SEQ ID NO: 295853 - DNA, 25 bp, Artificial
  probe
  misc_feature (1)..(25): SEQ ID NO: 1491; WAN024ATB; Start 334; Stop 358
agaggttatttctttcagttttggt

SEQ ID NO: 295854 - DNA, 25 bp, Artificial
  probe
  misc_feature (1)..(25): SEQ ID NO: 1491; WAN024ATB; Start 335; Stop 359
gaggttatttctttcagttttggtt

SEQ ID NO: 295855 - DNA, 25 bp, Artificial
  probe
  misc_feature (1)..(25): SEQ ID NO: 1491; WAN024ATB; Start 236; Stop 260
ttttaataacagtgtcatcatggtc

SEQ ID NO: 295856 - DNA, 25 bp, Artificial
  probe
  misc_feature (1)..(25): SEQ ID NO: 1491; WAN024ATB; Start 187; Stop 211
ggcaagagggagataacttatcttt

SEQ ID NO: 295857 - DNA, 25 bp, Artificial
  probe
  misc_feature (1)..(25): SEQ ID NO: 1491; WAN024ATB; Start 185; Stop 209
taggcaagagggagataacttatct

SEQ ID NO: 295858 - DNA, 25 bp, Artificial
  probe
  misc_feature (1)..(25): SEQ ID NO: 1491; WAN024ATB; Start 186; Stop 210
aggcaagagggagataacttatctt

SEQ ID NO: 295859 - DNA, 25 bp, Artificial
  probe
  misc_feature (1)..(25): SEQ ID NO: 1491; WAN024ATB; Start 235; Stop 259
attttaataacagtgtcatcatggt

SEQ ID NO: 295860 - DNA, 25 bp, Artificial
  probe
  misc_feature (1)..(25): SEQ ID NO: 1491; WAN024ATB; Start 333; Stop 357
aagaggttatttctttcagttttgg

SEQ ID NO: 295861 - DNA, 25 bp, Artificial
  probe
  misc_feature (1)..(25): SEQ ID NO: 1491; WAN024ATB; Start 188; Stop 212
gcaagagggagataacttatcttta

SEQ ID NO: 295862 - DNA, 25 bp, Artificial
  probe
  misc_feature (1)..(25): SEQ ID NO: 1491; WAN024ATB; Start 190; Stop 214
aagagggagataacttatctttaca

SEQ ID NO: 295863 - DNA, 25 bp, Artificial
  probe
  misc_feature (1)..(25): SEQ ID NO: 1491; WAN024ATB; Start 189; Stop 213
caagagggagataacttatctttac

SEQ ID NO: 295864 - DNA, 25 bp, Artificial
  probe
  misc_feature (1)..(25): SEQ ID NO: 1491; WAN024ATB; Start 191; Stop 215
agagggagataacttatctttacat

SEQ ID NO: 295865 - DNA, 25 bp, Artificial
  probe
  misc_feature (1)..(25): SEQ ID NO: 1491; WAN024ATB; Start 330; Stop 354
acaaagaggttatttctttcagttt

SEQ ID NO: 295866 - DNA, 25 bp, Artificial
  probe
  misc_feature (1)..(25): SEQ ID NO: 1491; WAN024ATB; Start 329; Stop 353
tacaaagaggttatttctttcagtt

SEQ ID NO: 295867 - DNA, 25 bp, Artificial
  probe
  misc_feature (1)..(25): SEQ ID NO: 1491; WAN024ATB; Start 328; Stop 352
atacaaagaggttatttctttcagt

SEQ ID NO: 295868 - DNA, 25 bp, Artificial
  probe
  misc_feature (1)..(25): SEQ ID NO: 1491; WAN024ATB; Start 326; Stop 350
tgatacaaagaggttatttctttca

SEQ ID NO: 295869 - DNA, 25 bp, Artificial
  probe
  misc_feature (1)..(25): SEQ ID NO: 1491; WAN024ATB; Start 194; Stop 218
gggagataacttatctttacatact

SEQ ID NO: 295870 - DNA, 25 bp, Artificial
  probe
  misc_feature (1)..(25): SEQ ID NO: 1491; WAN024ATB; Start 193; Stop 217
agggagataacttatctttacatac

SEQ ID NO: 295871 - DNA, 25 bp, Artificial
  probe
  misc_feature (1)..(25): SEQ ID NO: 1491; WAN024ATB; Start 327; Stop 351
gatacaaagaggttatttctttcag

SEQ ID NO: 295872 - DNA, 25 bp, Artificial
  probe
  misc_feature (1)..(25): SEQ ID NO: 1491; WAN024ATB; Start 192; Stop 216
gagggagataacttatctttacata

SEQ ID NO: 295873 - DNA, 25 bp, Artificial
  probe
  misc_feature (1)..(25): SEQ ID NO: 1491; WAN024ATB; Start 325; Stop 349
ttgatacaaagaggttatttctttc

SEQ ID NO: 295874 - DNA, 25 bp, Artificial
  probe
  misc_feature (1)..(25): SEQ ID NO: 1491; WAN024ATB; Start 332; Stop 356
aaagaggttatttctttcagttttg

SEQ ID NO: 295875 - DNA, 25 bp, Artificial
  probe
  misc_feature (1)..(25): SEQ ID NO: 1491; WAN024ATB; Start 331; Stop 355
caaagaggttatttctttcagtttt

SEQ ID NO: 295876 - DNA, 25 bp, Artificial
  probe
  misc_feature (1)..(25): SEQ ID NO: 1491; WAN024ATB; Start 324; Stop 348
tttgatacaaagaggttatttcttt

SEQ ID NO: 295877 - DNA, 25 bp, Artificial
  probe
  misc_feature (1)..(25): SEQ ID NO: 1492; WAN024CZB; Start 226; Stop 250
ttgtctcatcatttagaaggtgttg

SEQ ID NO: 295878 - DNA, 25 bp, Artificial
  probe
  misc_feature (1)..(25): SEQ ID NO: 1492; WAN024CZB; Start 417; Stop 441
tcgtttgctagatttgatgaaagat

SEQ ID NO: 295879 - DNA, 25 bp, Artificial
  probe
  misc_feature (1)..(25): SEQ ID NO: 1492; WAN024CZB; Start 416; Stop 440
atcgtttgctagatttgatgaaaga

SEQ ID NO: 295880 - DNA, 25 bp, Artificial
  probe
  misc_feature (1)..(25): SEQ ID NO: 1492; WAN024CZB; Start 411; Stop 435
ggaagatcgtttgctagatttgatg

SEQ ID NO: 295881 - DNA, 25 bp, Artificial
  probe
  misc_feature (1)..(25): SEQ ID NO: 1492; WAN024CZB; Start 227; Stop 251
tgtctcatcatttagaaggtgttgc

SEQ ID NO: 295882 - DNA, 25 bp, Artificial
  probe
  misc_feature (1)..(25): SEQ ID NO: 1492; WAN024CZB; Start 412; Stop 436
gaagatcgtttgctagatttgatga

SEQ ID NO: 295883 - DNA, 25 bp, Artificial
  probe
  misc_feature (1)..(25): SEQ ID NO: 1492; WAN024CZB; Start 410; Stop 434
tggaagatcgtttgctagatttgat

SEQ ID NO: 295884 - DNA, 25 bp, Artificial
  probe
  misc_feature (1)..(25): SEQ ID NO: 1492; WAN024CZB; Start 409; Stop 433
atggaagatcgtttgctagatttga

SEQ ID NO: 295885 - DNA, 25 bp, Artificial
  probe
  misc_feature (1)..(25): SEQ ID NO: 1492; WAN024CZB; Start 225; Stop 249
tttgtctcatcatttagaaggtgtt

SEQ ID NO: 295886 - DNA, 25 bp, Artificial
  probe
  misc_feature (1)..(25): SEQ ID NO: 1492; WAN024CZB; Start 414; Stop 438
agatcgtttgctagatttgatgaaa

SEQ ID NO: 295887 - DNA, 25 bp, Artificial
  probe
  misc_feature (1)..(25): SEQ ID NO: 1492; WAN024CZB; Start 413; Stop 437
aagatcgtttgctagatttgatgaa

SEQ ID NO: 295888 - DNA, 25 bp, Artificial
  probe
  misc_feature (1)..(25): SEQ ID NO: 1492; WAN024CZB; Start 415; Stop 439
gatcgtttgctagatttgatgaaag

SEQ ID NO: 295889 - DNA, 25 bp, Artificial
  probe
  misc_feature (1)..(25): SEQ ID NO: 1492; WAN024CZB; Start 408; Stop 432
catggaagatcgtttgctagatttg

SEQ ID NO: 295890 - DNA, 25 bp, Artificial
  probe
  misc_feature (1)..(25): SEQ ID NO: 1492; WAN024CZB; Start 407; Stop 431
tcatggaagatcgtttgctagattt

SEQ ID NO: 295891 - DNA, 25 bp, Artificial
  probe
  misc_feature (1)..(25): SEQ ID NO: 1492; WAN024CZB; Start 257; Stop 281
cagagtttaccttggtgcttcatac

SEQ ID NO: 295892 - DNA, 25 bp, Artificial
  probe
  misc_feature (1)..(25): SEQ ID NO: 1492; WAN024CZB; Start 406; Stop 430
ctcatggaagatcgtttgctagatt

SEQ ID NO: 295893 - DNA, 25 bp, Artificial
  probe
  misc_feature (1)..(25): SEQ ID NO: 1492; WAN024CZB; Start 67; Stop 91
aaagaaattcaagatcggttggagg

SEQ ID NO: 295894 - DNA, 25 bp, Artificial
  probe
  misc_feature (1)..(25): SEQ ID NO: 1492; WAN024CZB; Start 371; Stop 395
tattggttatttgtcgagatcagca

SEQ ID NO: 295895 - DNA, 25 bp, Artificial
  probe
  misc_feature (1)..(25): SEQ ID NO: 1492; WAN024CZB; Start 418; Stop 442
cgtttgctagatttgatgaaagata

SEQ ID NO: 295896 - DNA, 25 bp, Artificial
  probe
  misc_feature (1)..(25): SEQ ID NO: 1492; WAN024CZB; Start 370; Stop 394
ttattggttatttgtcgagatcagc

SEQ ID NO: 295897 - DNA, 25 bp, Artificial
  probe
  misc_feature (1)..(25): SEQ ID NO: 1492; WAN024CZB; Start 405; Stop 429
actcatggaagatcgtttgctagat

SEQ ID NO: 295898 - DNA, 25 bp, Artificial
  probe
  misc_feature (1)..(25): SEQ ID NO: 1492; WAN024CZB; Start 368; Stop 392
ccttattggttatttgtcgagatca

SEQ ID NO: 295899 - DNA, 25 bp, Artificial
  probe
  misc_feature (1)..(25): SEQ ID NO: 1492; WAN024CZB; Start 43; Stop 67
actgaggagaaattaagtacacaaa

SEQ ID NO: 295900 - DNA, 25 bp, Artificial
  probe
  misc_feature (1)..(25): SEQ ID NO: 1492; WAN024CZB; Start 404; Stop 428
aactcatggaagatcgtttgctaga

SEQ ID NO: 295901 - DNA, 25 bp, Artificial
  probe
  misc_feature (1)..(25): SEQ ID NO: 1492; WAN024CZB; Start 372; Stop 396
attggttatttgtcgagatcagcac

SEQ ID NO: 295902 - DNA, 25 bp, Artificial
  probe
  misc_feature (1)..(25): SEQ ID NO: 1492; WAN024CZB; Start 228; Stop 252
gtctcatcatttagaaggtgttgca

SEQ ID NO: 295903 - DNA, 25 bp, Artificial
  probe
  misc_feature (1)..(25): SEQ ID NO: 1492; WAN024CZB; Start 369; Stop 393
cttattggttatttgtcgagatcag

SEQ ID NO: 295904 - DNA, 25 bp, Artificial
  probe
  misc_feature (1)..(25): SEQ ID NO: 1492; WAN024CZB; Start 329; Stop 353
aggatgaatggattttaggaacagt

SEQ ID NO: 295905 - DNA, 25 bp, Artificial
  probe
  misc_feature (1)..(25): SEQ ID NO: 1492; WAN024CZB; Start 198; Stop 222
gacagaaaagattgatttggtggaa

SEQ ID NO: 295906 - DNA, 25 bp, Artificial
  probe
  misc_feature (1)..(25): SEQ ID NO: 1492; WAN024CZB; Start 196; Stop 220
gagacagaaaagattgatttggtgg

SEQ ID NO: 295907 - DNA, 25 bp, Artificial
  probe
  misc_feature (1)..(25): SEQ ID NO: 1492; WAN024CZB; Start 195; Stop 219
tgagacagaaaagattgatttggtg

SEQ ID NO: 295908 - DNA, 25 bp, Artificial
  probe
  misc_feature (1)..(25): SEQ ID NO: 1492; WAN024CZB; Start 332; Stop 356
atgaatggattttaggaacagttgc

SEQ ID NO: 295909 - DNA, 25 bp, Artificial
  probe
  misc_feature (1)..(25): SEQ ID NO: 1492; WAN024CZB; Start 350; Stop 374
cagttgctggtgccaataccttatt

SEQ ID NO: 295910 - DNA, 25 bp, Artificial
  probe
  misc_feature (1)..(25): SEQ ID NO: 1493; WAN024FTQ; Start 485; Stop 509
aatatggaggagtgtggttagattc

SEQ ID NO: 295911 - DNA, 25 bp, Artificial
  probe
  misc_feature (1)..(25): SEQ ID NO: 1493; WAN024FTQ; Start 392; Stop 416
tgacacttccatcagagatagtaga

SEQ ID NO: 295912 - DNA, 25 bp, Artificial
  probe
  misc_feature (1)..(25): SEQ ID NO: 1493; WAN024FTQ; Start 295; Stop 319
aagttggttcagaagacgattgata

SEQ ID NO: 295913 - DNA, 25 bp, Artificial
  probe
  misc_feature (1)..(25): SEQ ID NO: 1493; WAN024FTQ; Start 294; Stop 318
taagttggttcagaagacgattgat

SEQ ID NO: 295914 - DNA, 25 bp, Artificial
  probe
  misc_feature (1)..(25): SEQ ID NO: 1493; WAN024FTQ; Start 296; Stop 320
agttggttcagaagacgattgatag

SEQ ID NO: 295915 - DNA, 25 bp, Artificial
  probe
  misc_feature (1)..(25): SEQ ID NO: 1493; WAN024FTQ; Start 292; Stop 316
cctaagttggttcagaagacgattg

SEQ ID NO: 295916 - DNA, 25 bp, Artificial
  probe
  misc_feature (1)..(25): SEQ ID NO: 1493; WAN024FTQ; Start 291; Stop 315
tcctaagttggttcagaagacgatt

SEQ ID NO: 295917 - DNA, 25 bp, Artificial
  probe
  misc_feature (1)..(25): SEQ ID NO: 1493; WAN024FTQ; Start 391; Stop 415
gtgacacttccatcagagatagtag

SEQ ID NO: 295918 - DNA, 25 bp, Artificial
  probe
  misc_feature (1)..(25): SEQ ID NO: 1493; WAN024FTQ; Start 385; Stop 409
gaatatgtgacacttccatcagaga

SEQ ID NO: 295919 - DNA, 25 bp, Artificial
  probe
  misc_feature (1)..(25): SEQ ID NO: 1493; WAN024FTQ; Start 384; Stop 408
tgaatatgtgacacttccatcagag

SEQ ID NO: 295920 - DNA, 25 bp, Artificial
  probe
  misc_feature (1)..(25): SEQ ID NO: 1493; WAN024FTQ; Start 293; Stop 317
ctaagttggttcagaagacgattga

SEQ ID NO: 295921 - DNA, 25 bp, Artificial
  probe
  misc_feature (1)..(25): SEQ ID NO: 1493; WAN024FTQ; Start 486; Stop 510
atatggaggagtgtggttagattcg

SEQ ID NO: 295922 - DNA, 25 bp, Artificial
  probe
  misc_feature (1)..(25): SEQ ID NO: 1493; WAN024FTQ; Start 393; Stop 417
gacacttccatcagagatagtagaa

SEQ ID NO: 295923 - DNA, 25 bp, Artificial
  probe
  misc_feature (1)..(25): SEQ ID NO: 1493; WAN024FTQ; Start 390; Stop 414
tgtgacacttccatcagagatagta

SEQ ID NO: 295924 - DNA, 25 bp, Artificial
  probe
  misc_feature (1)..(25): SEQ ID NO: 1493; WAN024FTQ; Start 386; Stop 410
aatatgtgacacttccatcagagat

SEQ ID NO: 295925 - DNA, 25 bp, Artificial
  probe
  misc_feature (1)..(25): SEQ ID NO: 1493; WAN024FTQ; Start 388; Stop 412
tatgtgacacttccatcagagatag

SEQ ID NO: 295926 - DNA, 25 bp, Artificial
  probe
  misc_feature (1)..(25): SEQ ID NO: 1493; WAN024FTQ; Start 260; Stop 284
tctctatgtggatacaaggatacga

SEQ ID NO: 295927 - DNA, 25 bp, Artificial
  probe
  misc_feature (1)..(25): SEQ ID NO: 1493; WAN024FTQ; Start 261; Stop 285
ctctatgtggatacaaggatacgaa

SEQ ID NO: 295928 - DNA, 25 bp, Artificial
  probe
  misc_feature (1)..(25): SEQ ID NO: 1493; WAN024FTQ; Start 259; Stop 283
ttctctatgtggatacaaggatacg

SEQ ID NO: 295929 - DNA, 25 bp, Artificial
  probe
  misc_feature (1)..(25): SEQ ID NO: 1493; WAN024FTQ; Start 389; Stop 413
atgtgacacttccatcagagatagt

SEQ ID NO: 295930 - DNA, 25 bp, Artificial
  probe
  misc_feature (1)..(25): SEQ ID NO: 1493; WAN024FTQ; Start 387; Stop 411
atatgtgacacttccatcagagata

SEQ ID NO: 295931 - DNA, 25 bp, Artificial
  probe
  misc_feature (1)..(25): SEQ ID NO: 1493; WAN024FTQ; Start 290; Stop 314
ctcctaagttggttcagaagacgat

SEQ ID NO: 295932 - DNA, 25 bp, Artificial
  probe
  misc_feature (1)..(25): SEQ ID NO: 1493; WAN024FTQ; Start 374; Stop 398
acaatatccgtgaatatgtgacact

SEQ ID NO: 295933 - DNA, 25 bp, Artificial
  probe
  misc_feature (1)..(25): SEQ ID NO: 1493; WAN024FTQ; Start 255; Stop 279
aatcttctctatgtggatacaagga

SEQ ID NO: 295934 - DNA, 25 bp, Artificial
  probe
  misc_feature (1)..(25): SEQ ID NO: 1493; WAN024FTQ; Start 377; Stop 401
atatccgtgaatatgtgacacttcc

SEQ ID NO: 295935 - DNA, 25 bp, Artificial
  probe
  misc_feature (1)..(25): SEQ ID NO: 1493; WAN024FTQ; Start 373; Stop 397
aacaatatccgtgaatatgtgacac

SEQ ID NO: 295936 - DNA, 25 bp, Artificial
  probe
  misc_feature (1)..(25): SEQ ID NO: 1493; WAN024FTQ; Start 383; Stop 407
gtgaatatgtgacacttccatcaga

SEQ ID NO: 295937 - DNA, 25 bp, Artificial
  probe
  misc_feature (1)..(25): SEQ ID NO: 1493; WAN024FTQ; Start 375; Stop 399
caatatccgtgaatatgtgacactt

SEQ ID NO: 295938 - DNA, 25 bp, Artificial
  probe
  misc_feature (1)..(25): SEQ ID NO: 1493; WAN024FTQ; Start 256; Stop 280
atcttctctatgtggatacaaggat

SEQ ID NO: 295939 - DNA, 25 bp, Artificial
  probe
  misc_feature (1)..(25): SEQ ID NO: 1493; WAN024FTQ; Start 376; Stop 400
aatatccgtgaatatgtgacacttc

SEQ ID NO: 295940 - DNA, 25 bp, Artificial
  probe
  misc_feature (1)..(25): SEQ ID NO: 1493; WAN024FTQ; Start 297; Stop 321
gttggttcagaagacgattgatagc

SEQ ID NO: 295941 - DNA, 25 bp, Artificial
  probe
  misc_feature (1)..(25): SEQ ID NO: 1493; WAN024FTQ; Start 285; Stop 309
aagtgctcctaagttggttcagaag

SEQ ID NO: 295942 - DNA, 25 bp, Artificial
  probe
  misc_feature (1)..(25): SEQ ID NO: 1493; WAN024FTQ; Start 258; Stop 282
cttctctatgtggatacaaggatac

SEQ ID NO: 295943 - DNA, 25 bp, Artificial
  probe
  misc_feature (1)..(25): SEQ ID NO: 1494; WAN024ATA; Start 486; Stop 510
tatcctacttcagatgccaatacaa

SEQ ID NO: 295944 - DNA, 25 bp, Artificial
  probe
  misc_feature (1)..(25): SEQ ID NO: 1494; WAN024ATA; Start 485; Stop 509
atatcctacttcagatgccaataca

SEQ ID NO: 295945 - DNA, 25 bp, Artificial
  probe
  misc_feature (1)..(25): SEQ ID NO: 1494; WAN024ATA; Start 484; Stop 508
aatatcctacttcagatgccaatac

SEQ ID NO: 295946 - DNA, 25 bp, Artificial
  probe
  misc_feature (1)..(25): SEQ ID NO: 1494; WAN024ATA; Start 487; Stop 511
atcctacttcagatgccaatacaaa

SEQ ID NO: 295947 - DNA, 25 bp, Artificial
  probe
  misc_feature (1)..(25): SEQ ID NO: 1494; WAN024ATA; Start 488; Stop 512
tcctacttcagatgccaatacaaac

SEQ ID NO: 295948 - DNA, 25 bp, Artificial
  probe
  misc_feature (1)..(25): SEQ ID NO: 1494; WAN024ATA; Start 674; Stop 698
tcatagcaaagaccacttaccataa

SEQ ID NO: 295949 - DNA, 25 bp, Artificial
  probe
  misc_feature (1)..(25): SEQ ID NO: 1494; WAN024ATA; Start 673; Stop 697
ttcatagcaaagaccacttaccata

SEQ ID NO: 295950 - DNA, 25 bp, Artificial
  probe
  misc_feature (1)..(25): SEQ ID NO: 1494; WAN024ATA; Start 672; Stop 696
tttcatagcaaagaccacttaccat

SEQ ID NO: 295951 - DNA, 25 bp, Artificial
  probe
  misc_feature (1)..(25): SEQ ID NO: 1494; WAN024ATA; Start 489; Stop 513
cctacttcagatgccaatacaaaca

SEQ ID NO: 295952 - DNA, 25 bp, Artificial
  probe
  misc_feature (1)..(25): SEQ ID NO: 1494; WAN024ATA; Start 490; Stop 514
ctacttcagatgccaatacaaacat

SEQ ID NO: 295953 - DNA, 25 bp, Artificial
  probe
  misc_feature (1)..(25): SEQ ID NO: 1494; WAN024ATA; Start 675; Stop 699
catagcaaagaccacttaccataat

SEQ ID NO: 295954 - DNA, 25 bp, Artificial
  probe
  misc_feature (1)..(25): SEQ ID NO: 1494; WAN024ATA; Start 185; Stop 209
taggcaagagggaaataacttatct

SEQ ID NO: 295955 - DNA, 25 bp, Artificial
  probe
  misc_feature (1)..(25): SEQ ID NO: 1494; WAN024ATA; Start 677; Stop 701
tagcaaagaccacttaccataattt

SEQ ID NO: 295956 - DNA, 25 bp, Artificial
  probe
  misc_feature (1)..(25): SEQ ID NO: 1494; WAN024ATA; Start 676; Stop 700
atagcaaagaccacttaccataatt

SEQ ID NO: 295957 - DNA, 25 bp, Artificial
  probe
  misc_feature (1)..(25): SEQ ID NO: 1494; WAN024ATA; Start 481; Stop 505
ttaaatatcctacttcagatgccaa

SEQ ID NO: 295958 - DNA, 25 bp, Artificial
  probe
  misc_feature (1)..(25): SEQ ID NO: 1494; WAN024ATA; Start 483; Stop 507
aaatatcctacttcagatgccaata

SEQ ID NO: 295959 - DNA, 25 bp, Artificial
  probe
  misc_feature (1)..(25): SEQ ID NO: 1494; WAN024ATA; Start 482; Stop 506
taaatatcctacttcagatgccaat

SEQ ID NO: 295960 - DNA, 25 bp, Artificial
  probe
  misc_feature (1)..(25): SEQ ID NO: 1494; WAN024ATA; Start 480; Stop 504
attaaatatcctacttcagatgcca

SEQ ID NO: 295961 - DNA, 25 bp, Artificial
  probe
  misc_feature (1)..(25): SEQ ID NO: 1494; WAN024ATA; Start 89; Stop 113
ttaaagagacaggctcatggaatct

SEQ ID NO: 295962 - DNA, 25 bp, Artificial
  probe
  misc_feature (1)..(25): SEQ ID NO: 1494; WAN024ATA; Start 87; Stop 111
atttaaagagacaggctcatggaat

SEQ ID NO: 295963 - DNA, 25 bp, Artificial
  probe
  misc_feature (1)..(25): SEQ ID NO: 1494; WAN024ATA; Start 88; Stop 112
tttaaagagacaggctcatggaatc

SEQ ID NO: 295964 - DNA, 25 bp, Artificial
  probe
  misc_feature (1)..(25): SEQ ID NO: 1494; WAN024ATA; Start 86; Stop 110
gatttaaagagacaggctcatggaa

SEQ ID NO: 295965 - DNA, 25 bp, Artificial
  probe
  misc_feature (1)..(25): SEQ ID NO: 1494; WAN024ATA; Start 186; Stop 210
aggcaagagggaaataacttatctt

SEQ ID NO: 295966 - DNA, 25 bp, Artificial
  probe
  misc_feature (1)..(25): SEQ ID NO: 1494; WAN024ATA; Start 187; Stop 211
ggcaagagggaaataacttatcttt

SEQ ID NO: 295967 - DNA, 25 bp, Artificial
  probe
  misc_feature (1)..(25): SEQ ID NO: 1494; WAN024ATA; Start 671; Stop 695
ttttcatagcaaagaccacttacca

SEQ ID NO: 295968 - DNA, 25 bp, Artificial
  probe
  misc_feature (1)..(25): SEQ ID NO: 1494; WAN024ATA; Start 336; Stop 360
aggttatttctctcagttttggttt

SEQ ID NO: 295969 - DNA, 25 bp, Artificial
  probe
  misc_feature (1)..(25): SEQ ID NO: 1494; WAN024ATA; Start 678; Stop 702
agcaaagaccacttaccataatttt

SEQ ID NO: 295970 - DNA, 25 bp, Artificial
  probe
  misc_feature (1)..(25): SEQ ID NO: 1494; WAN024ATA; Start 90; Stop 114
taaagagacaggctcatggaatctt

SEQ ID NO: 295971 - DNA, 25 bp, Artificial
  probe
  misc_feature (1)..(25): SEQ ID NO: 1494; WAN024ATA; Start 85; Stop 109
ggatttaaagagacaggctcatgga

SEQ ID NO: 295972 - DNA, 25 bp, Artificial
  probe
  misc_feature (1)..(25): SEQ ID NO: 1494; WAN024ATA; Start 136; Stop 160
ggtacttactctattcccctgtttt

SEQ ID NO: 295973 - DNA, 25 bp, Artificial
  probe
  misc_feature (1)..(25): SEQ ID NO: 1494; WAN024ATA; Start 337; Stop 361
ggttatttctctcagttttggtttt

SEQ ID NO: 295974 - DNA, 25 bp, Artificial
  probe
  misc_feature (1)..(25): SEQ ID NO: 1494; WAN024ATA; Start 380; Stop 404
tctatttatgtctgccaattgtgag

SEQ ID NO: 295975 - DNA, 25 bp, Artificial
  probe
  misc_feature (1)..(25): SEQ ID NO: 1494; WAN024ATA; Start 375; Stop 399
acttatctatttatgtctgccaatt

SEQ ID NO: 295976 - DNA, 25 bp, Artificial
  probe
  misc_feature (1)..(25): SEQ ID NO: 1495; WAN024F5Q; Start 1228; Stop 1252
ttaggagcggatattagacttgttg

SEQ ID NO: 295977 - DNA, 25 bp, Artificial
  probe
  misc_feature (1)..(25): SEQ ID NO: 1495; WAN024F5Q; Start 566; Stop 590
gtgaacctgagattattgatgtagc

SEQ ID NO: 295978 - DNA, 25 bp, Artificial
  probe
  misc_feature (1)..(25): SEQ ID NO: 1495; WAN024F5Q; Start 564; Stop 588
ccgtgaacctgagattattgatgta

SEQ ID NO: 295979 - DNA, 25 bp, Artificial
  probe
  misc_feature (1)..(25): SEQ ID NO: 1495; WAN024F5Q; Start 565; Stop 589
cgtgaacctgagattattgatgtag

SEQ ID NO: 295980 - DNA, 25 bp, Artificial
  probe
  misc_feature (1)..(25): SEQ ID NO: 1495; WAN024F5Q; Start 1234; Stop 1258
gcggatattagacttgttgaggatt

SEQ ID NO: 295981 - DNA, 25 bp, Artificial
  probe
  misc_feature (1)..(25): SEQ ID NO: 1495; WAN024F5Q; Start 1229; Stop 1253
taggagcggatattagacttgttga

SEQ ID NO: 295982 - DNA, 25 bp, Artificial
  probe
  misc_feature (1)..(25): SEQ ID NO: 1495; WAN024F5Q; Start 1233; Stop 1257
agcggatattagacttgttgaggat

SEQ ID NO: 295983 - DNA, 25 bp, Artificial
  probe
  misc_feature (1)..(25): SEQ ID NO: 1495; WAN024F5Q; Start 816; Stop 840
agtgagaatgactgtatctgaagac

SEQ ID NO: 295984 - DNA, 25 bp, Artificial
  probe
  misc_feature (1)..(25): SEQ ID NO: 1495; WAN024F5Q; Start 815; Stop 839
gagtgagaatgactgtatctgaaga

SEQ ID NO: 295985 - DNA, 25 bp, Artificial
  probe
  misc_feature (1)..(25): SEQ ID NO: 1495; WAN024F5Q; Start 814; Stop 838
ggagtgagaatgactgtatctgaag

SEQ ID NO: 295986 - DNA, 25 bp, Artificial
  probe
  misc_feature (1)..(25): SEQ ID NO: 1495; WAN024F5Q; Start 817; Stop 841
gtgagaatgactgtatctgaagaca

SEQ ID NO: 295987 - DNA, 25 bp, Artificial
  probe
  misc_feature (1)..(25): SEQ ID NO: 1495; WAN024F5Q; Start 1232; Stop 1256
gagcggatattagacttgttgagga

SEQ ID NO: 295988 - DNA, 25 bp, Artificial
  probe
  misc_feature (1)..(25): SEQ ID NO: 1495; WAN024F5Q; Start 1230; Stop 1254
aggagcggatattagacttgttgag

SEQ ID NO: 295989 - DNA, 25 bp, Artificial
  probe
  misc_feature (1)..(25): SEQ ID NO: 1495; WAN024F5Q; Start 1235; Stop 1259
cggatattagacttgttgaggatta

SEQ ID NO: 295990 - DNA, 25 bp, Artificial
  probe
  misc_feature (1)..(25): SEQ ID NO: 1495; WAN024F5Q; Start 567; Stop 591
tgaacctgagattattgatgtagct

SEQ ID NO: 295991 - DNA, 25 bp, Artificial
  probe
  misc_feature (1)..(25): SEQ ID NO: 1495; WAN024F5Q; Start 496; Stop 520
ggagcaacgattaatacgatgattg

SEQ ID NO: 295992 - DNA, 25 bp, Artificial
  probe
  misc_feature (1)..(25): SEQ ID NO: 1495; WAN024F5Q; Start 874; Stop 898
gcaatcaatattaagacagctcctt

SEQ ID NO: 295993 - DNA, 25 bp, Artificial
  probe
  misc_feature (1)..(25): SEQ ID NO: 1495; WAN024F5Q; Start 699; Stop 723
ccgcattgaagctggaacatatata

SEQ ID NO: 295994 - DNA, 25 bp, Artificial
  probe
  misc_feature (1)..(25): SEQ ID NO: 1495; WAN024F5Q; Start 1231; Stop 1255
ggagcggatattagacttgttgagg

SEQ ID NO: 295995 - DNA, 25 bp, Artificial
  probe
  misc_feature (1)..(25): SEQ ID NO: 1495; WAN024F5Q; Start 500; Stop 524
caacgattaatacgatgattgctgc

SEQ ID NO: 295996 - DNA, 25 bp, Artificial
  probe
  misc_feature (1)..(25): SEQ ID NO: 1495; WAN024F5Q; Start 261; Stop 285
aattaacagtcttcgtgcatcttac

SEQ ID NO: 295997 - DNA, 25 bp, Artificial
  probe
  misc_feature (1)..(25): SEQ ID NO: 1495; WAN024F5Q; Start 591; Stop 615
tactctcttgaataatatgggtgcc

SEQ ID NO: 295998 - DNA, 25 bp, Artificial
  probe
  misc_feature (1)..(25): SEQ ID NO: 1495; WAN024F5Q; Start 1227; Stop 1251
tttaggagcggatattagacttgtt

SEQ ID NO: 295999 - DNA, 25 bp, Artificial
  probe
  misc_feature (1)..(25): SEQ ID NO: 1495; WAN024F5Q; Start 1226; Stop 1250
atttaggagcggatattagacttgt

SEQ ID NO: 296000 - DNA, 25 bp, Artificial
  probe
  misc_feature (1)..(25): SEQ ID NO: 1495; WAN024F5Q; Start 797; Stop 821
ctaagttggaagaaatgggagtgag

SEQ ID NO: 296001 - DNA, 25 bp, Artificial
  probe
  misc_feature (1)..(25): SEQ ID NO: 1495; WAN024F5Q; Start 700; Stop 724
cgcattgaagctggaacatatatat

SEQ ID NO: 296002 - DNA, 25 bp, Artificial
  probe
  misc_feature (1)..(25): SEQ ID NO: 1495; WAN024F5Q; Start 590; Stop 614
ctactctcttgaataatatgggtgc

SEQ ID NO: 296003 - DNA, 25 bp, Artificial
  probe
  misc_feature (1)..(25): SEQ ID NO: 1495; WAN024F5Q; Start 589; Stop 613
gctactctcttgaataatatgggtg

SEQ ID NO: 296004 - DNA, 25 bp, Artificial
  probe
  misc_feature (1)..(25): SEQ ID NO: 1495; WAN024F5Q; Start 263; Stop 287
ttaacagtcttcgtgcatcttacta

SEQ ID NO: 296005 - DNA, 25 bp, Artificial
  probe
  misc_feature (1)..(25): SEQ ID NO: 1495; WAN024F5Q; Start 798; Stop 822
taagttggaagaaatgggagtgaga

SEQ ID NO: 296006 - DNA, 25 bp, Artificial
  probe
  misc_feature (1)..(25): SEQ ID NO: 1495; WAN024F5Q; Start 265; Stop 289
aacagtcttcgtgcatcttactatt

SEQ ID NO: 296007 - DNA, 25 bp, Artificial
  probe
  misc_feature (1)..(25): SEQ ID NO: 1495; WAN024F5Q; Start 264; Stop 288
taacagtcttcgtgcatcttactat

SEQ ID NO: 296008 - DNA, 25 bp, Artificial
  probe
  misc_feature (1)..(25): SEQ ID NO: 1495; WAN024F5Q; Start 262; Stop 286
attaacagtcttcgtgcatcttact

SEQ ID NO: 296009 - DNA, 25 bp, Artificial
  probe
  misc_feature (1)..(25): SEQ ID NO: 1496; WAN024DCQ; Start 572; Stop 596
tggaagaacacagtattgatacagg

SEQ ID NO: 296010 - DNA, 25 bp, Artificial
  probe
  misc_feature (1)..(25): SEQ ID NO: 1496; WAN024DCQ; Start 112; Stop 136
aatatagcacagattgaagcacagg

SEQ ID NO: 296011 - DNA, 25 bp, Artificial
  probe
  misc_feature (1)..(25): SEQ ID NO: 1496; WAN024DCQ; Start 574; Stop 598
gaagaacacagtattgatacaggca

SEQ ID NO: 296012 - DNA, 25 bp, Artificial
  probe
  misc_feature (1)..(25): SEQ ID NO: 1496; WAN024DCQ; Start 575; Stop 599
aagaacacagtattgatacaggcaa

SEQ ID NO: 296013 - DNA, 25 bp, Artificial
  probe
  misc_feature (1)..(25): SEQ ID NO: 1496; WAN024DCQ; Start 578; Stop 602
aacacagtattgatacaggcaagtt

SEQ ID NO: 296014 - DNA, 25 bp, Artificial
  probe
  misc_feature (1)..(25): SEQ ID NO: 1496; WAN024DCQ; Start 576; Stop 600
agaacacagtattgatacaggcaag

SEQ ID NO: 296015 - DNA, 25 bp, Artificial
  probe
  misc_feature (1)..(25): SEQ ID NO: 1496; WAN024DCQ; Start 573; Stop 597
ggaagaacacagtattgatacaggc

SEQ ID NO: 296016 - DNA, 25 bp, Artificial
  probe
  misc_feature (1)..(25): SEQ ID NO: 1496; WAN024DCQ; Start 571; Stop 595
atggaagaacacagtattgatacag

SEQ ID NO: 296017 - DNA, 25 bp, Artificial
  probe
  misc_feature (1)..(25): SEQ ID NO: 1496; WAN024DCQ; Start 577; Stop 601
gaacacagtattgatacaggcaagt

SEQ ID NO: 296018 - DNA, 25 bp, Artificial
  probe
  misc_feature (1)..(25): SEQ ID NO: 1496; WAN024DCQ; Start 477; Stop 501
catgtctaatatgaacgaaggtgtc

SEQ ID NO: 296019 - DNA, 25 bp, Artificial
  probe
  misc_feature (1)..(25): SEQ ID NO: 1496; WAN024DCQ; Start 476; Stop 500
ccatgtctaatatgaacgaaggtgt

SEQ ID NO: 296020 - DNA, 25 bp, Artificial
  probe
  misc_feature (1)..(25): SEQ ID NO: 1496; WAN024DCQ; Start 570; Stop 594
catggaagaacacagtattgataca

SEQ ID NO: 296021 - DNA, 25 bp, Artificial
  probe
  misc_feature (1)..(25): SEQ ID NO: 1496; WAN024DCQ; Start 569; Stop 593
tcatggaagaacacagtattgatac

SEQ ID NO: 296022 - DNA, 25 bp, Artificial
  probe
  misc_feature (1)..(25): SEQ ID NO: 1496; WAN024DCQ; Start 221; Stop 245
atatttcaggtgctattgttcgtgt

SEQ ID NO: 296023 - DNA, 25 bp, Artificial
  probe
  misc_feature (1)..(25): SEQ ID NO: 1496; WAN024DCQ; Start 474; Stop 498
aaccatgtctaatatgaacgaaggt

SEQ ID NO: 296024 - DNA, 25 bp, Artificial
  probe
  misc_feature (1)..(25): SEQ ID NO: 1496; WAN024DCQ; Start 222; Stop 246
tatttcaggtgctattgttcgtgtt

SEQ ID NO: 296025 - DNA, 25 bp, Artificial
  probe
  misc_feature (1)..(25): SEQ ID NO: 1496; WAN024DCQ; Start 111; Stop 135
caatatagcacagattgaagcacag

SEQ ID NO: 296026 - DNA, 25 bp, Artificial
  probe
  misc_feature (1)..(25): SEQ ID NO: 1496; WAN024DCQ; Start 108; Stop 132
atccaatatagcacagattgaagca

SEQ ID NO: 296027 - DNA, 25 bp, Artificial
  probe
  misc_feature (1)..(25): SEQ ID NO: 1496; WAN024DCQ; Start 568; Stop 592
ttcatggaagaacacagtattgata

SEQ ID NO: 296028 - DNA, 25 bp, Artificial
  probe
  misc_feature (1)..(25): SEQ ID NO: 1496; WAN024DCQ; Start 475; Stop 499
accatgtctaatatgaacgaaggtg

SEQ ID NO: 296029 - DNA, 25 bp, Artificial
  probe
  misc_feature (1)..(25): SEQ ID NO: 1496; WAN024DCQ; Start 107; Stop 131
aatccaatatagcacagattgaagc

SEQ ID NO: 296030 - DNA, 25 bp, Artificial
  probe
  misc_feature (1)..(25): SEQ ID NO: 1496; WAN024DCQ; Start 431; Stop 455
ctccttacagccctagttactattg

SEQ ID NO: 296031 - DNA, 25 bp, Artificial
  probe
  misc_feature (1)..(25): SEQ ID NO: 1496; WAN024DCQ; Start 430; Stop 454
tctccttacagccctagttactatt

SEQ ID NO: 296032 - DNA, 25 bp, Artificial
  probe
  misc_feature (1)..(25): SEQ ID NO: 1496; WAN024DCQ; Start 429; Stop 453
ctctccttacagccctagttactat

SEQ ID NO: 296033 - DNA, 25 bp, Artificial
  probe
  misc_feature (1)..(25): SEQ ID NO: 1496; WAN024DCQ; Start 140; Stop 164
tgaaacacttagacaaaccgattat

SEQ ID NO: 296034 - DNA, 25 bp, Artificial
  probe
  misc_feature (1)..(25): SEQ ID NO: 1496; WAN024DCQ; Start 149; Stop 173
tagacaaaccgattattgacctctc

SEQ ID NO: 296035 - DNA, 25 bp, Artificial
  probe
  misc_feature (1)..(25): SEQ ID NO: 1496; WAN024DCQ; Start 146; Stop 170
acttagacaaaccgattattgacct

SEQ ID NO: 296036 - DNA, 25 bp, Artificial
  probe
  misc_feature (1)..(25): SEQ ID NO: 1496; WAN024DCQ; Start 145; Stop 169
cacttagacaaaccgattattgacc

SEQ ID NO: 296037 - DNA, 25 bp, Artificial
  probe
  misc_feature (1)..(25): SEQ ID NO: 1496; WAN024DCQ; Start 77; Stop 101
cacttaatgacagccaatcgtttaa

SEQ ID NO: 296038 - DNA, 25 bp, Artificial
  probe
  misc_feature (1)..(25): SEQ ID NO: 1496; WAN024DCQ; Start 148; Stop 172
ttagacaaaccgattattgacctct

SEQ ID NO: 296039 - DNA, 25 bp, Artificial
  probe
  misc_feature (1)..(25): SEQ ID NO: 1496; WAN024DCQ; Start 61; Stop 85
ttaatcatcaatcgcccacttaatg

SEQ ID NO: 296040 - DNA, 25 bp, Artificial
  probe
  misc_feature (1)..(25): SEQ ID NO: 1496; WAN024DCQ; Start 549; Stop 573
catctacgttggtgtctacttcatg

SEQ ID NO: 296041 - DNA, 25 bp, Artificial
  probe
  misc_feature (1)..(25): SEQ ID NO: 1496; WAN024DCQ; Start 147; Stop 171
cttagacaaaccgattattgacctc

SEQ ID NO: 296042 - DNA, 25 bp, Artificial
  probe
  misc_feature (1)..(25): SEQ ID NO: 1497; WAN024BDA; Start 49; Stop 73
tattgtgtgaggagcagaatcaaat

SEQ ID NO: 296043 - DNA, 25 bp, Artificial
  probe
  misc_feature (1)..(25): SEQ ID NO: 1497; WAN024BDA; Start 48; Stop 72
ttattgtgtgaggagcagaatcaaa

SEQ ID NO: 296044 - DNA, 25 bp, Artificial
  probe
  misc_feature (1)..(25): SEQ ID NO: 1497; WAN024BDA; Start 47; Stop 71
tttattgtgtgaggagcagaatcaa

SEQ ID NO: 296045 - DNA, 25 bp, Artificial
  probe
  misc_feature (1)..(25): SEQ ID NO: 1497; WAN024BDA; Start 53; Stop 77
gtgtgaggagcagaatcaaatcttt

SEQ ID NO: 296046 - DNA, 25 bp, Artificial
  probe
  misc_feature (1)..(25): SEQ ID NO: 1497; WAN024BDA; Start 50; Stop 74
attgtgtgaggagcagaatcaaatc

SEQ ID NO: 296047 - DNA, 25 bp, Artificial
  probe
  misc_feature (1)..(25): SEQ ID NO: 1497; WAN024BDA; Start 52; Stop 76
tgtgtgaggagcagaatcaaatctt

SEQ ID NO: 296048 - DNA, 25 bp, Artificial
  probe
  misc_feature (1)..(25): SEQ ID NO: 1497; WAN024BDA; Start 51; Stop 75
ttgtgtgaggagcagaatcaaatct

SEQ ID NO: 296049 - DNA, 25 bp, Artificial
  probe
  misc_feature (1)..(25): SEQ ID NO: 1497; WAN024BDA; Start 85; Stop 109
gttgtggggagatttacttcatttt

SEQ ID NO: 296050 - DNA, 25 bp, Artificial
  probe
  misc_feature (1)..(25): SEQ ID NO: 1497; WAN024BDA; Start 41; Stop 65
aaagattttattgtgtgaggagcag

SEQ ID NO: 296051 - DNA, 25 bp, Artificial
  probe
  misc_feature (1)..(25): SEQ ID NO: 1497; WAN024BDA; Start 45; Stop 69
attttattgtgtgaggagcagaatc

SEQ ID NO: 296052 - DNA, 25 bp, Artificial
  probe
  misc_feature (1)..(25): SEQ ID NO: 1497; WAN024BDA; Start 44; Stop 68
gattttattgtgtgaggagcagaat

SEQ ID NO: 296053 - DNA, 25 bp, Artificial
  probe
  misc_feature (1)..(25): SEQ ID NO: 1497; WAN024BDA; Start 43; Stop 67
agattttattgtgtgaggagcagaa

SEQ ID NO: 296054 - DNA, 25 bp, Artificial
  probe
  misc_feature (1)..(25): SEQ ID NO: 1497; WAN024BDA; Start 42; Stop 66
aagattttattgtgtgaggagcaga

SEQ ID NO: 296055 - DNA, 25 bp, Artificial
  probe
  misc_feature (1)..(25): SEQ ID NO: 1497; WAN024BDA; Start 86; Stop 110
ttgtggggagatttacttcattttc

SEQ ID NO: 296056 - DNA, 25 bp, Artificial
  probe
  misc_feature (1)..(25): SEQ ID NO: 1497; WAN024BDA; Start 87; Stop 111
tgtggggagatttacttcattttct

SEQ ID NO: 296057 - DNA, 25 bp, Artificial
  probe
  misc_feature (1)..(25): SEQ ID NO: 1497; WAN024BDA; Start 40; Stop 64
aaaagattttattgtgtgaggagca

SEQ ID NO: 296058 - DNA, 25 bp, Artificial
  probe
  misc_feature (1)..(25): SEQ ID NO: 1497; WAN024BDA; Start 84; Stop 108
agttgtggggagatttacttcattt

SEQ ID NO: 296059 - DNA, 25 bp, Artificial
  probe
  misc_feature (1)..(25): SEQ ID NO: 1497; WAN024BDA; Start 83; Stop 107
tagttgtggggagatttacttcatt

SEQ ID NO: 296060 - DNA, 25 bp, Artificial
  probe
  misc_feature (1)..(25): SEQ ID NO: 1497; WAN024BDA; Start 82; Stop 106
atagttgtggggagatttacttcat

SEQ ID NO: 296061 - DNA, 25 bp, Artificial
  probe
  misc_feature (1)..(25): SEQ ID NO: 1497; WAN024BDA; Start 46; Stop 70
ttttattgtgtgaggagcagaatca

SEQ ID NO: 296062 - DNA, 25 bp, Artificial
  probe
  misc_feature (1)..(25): SEQ ID NO: 1497; WAN024BDA; Start 54; Stop 78
tgtgaggagcagaatcaaatctttt

SEQ ID NO: 296063 - DNA, 25 bp, Artificial
  probe
  misc_feature (1)..(25): SEQ ID NO: 1497; WAN024BDA; Start 81; Stop 105
tatagttgtggggagatttacttca

SEQ ID NO: 296064 - DNA, 25 bp, Artificial
  probe
  misc_feature (1)..(25): SEQ ID NO: 1497; WAN024BDA; Start 100; Stop 124
acttcattttctcctgagattgagt

SEQ ID NO: 296065 - DNA, 25 bp, Artificial
  probe
  misc_feature (1)..(25): SEQ ID NO: 1497; WAN024BDA; Start 101; Stop 125
cttcattttctcctgagattgagtt

SEQ ID NO: 296066 - DNA, 25 bp, Artificial
  probe
  misc_feature (1)..(25): SEQ ID NO: 1497; WAN024BDA; Start 103; Stop 127
tcattttctcctgagattgagtttt

SEQ ID NO: 296067 - DNA, 25 bp, Artificial
  probe
  misc_feature (1)..(25): SEQ ID NO: 1497; WAN024BDA; Start 102; Stop 126
ttcattttctcctgagattgagttt

SEQ ID NO: 296068 - DNA, 25 bp, Artificial
  probe
  misc_feature (1)..(25): SEQ ID NO: 1497; WAN024BDA; Start 99; Stop 123
tacttcattttctcctgagattgag

SEQ ID NO: 296069 - DNA, 25 bp, Artificial
  probe
  misc_feature (1)..(25): SEQ ID NO: 1497; WAN024BDA; Start 98; Stop 122
ttacttcattttctcctgagattga

SEQ ID NO: 296070 - DNA, 25 bp, Artificial
  probe
  misc_feature (1)..(25): SEQ ID NO: 1497; WAN024BDA; Start 206; Stop 230
cttaccgtactcaagtacagcctga

SEQ ID NO: 296071 - DNA, 25 bp, Artificial
  probe
  misc_feature (1)..(25): SEQ ID NO: 1497; WAN024BDA; Start 79; Stop 103
tctatagttgtggggagatttactt

SEQ ID NO: 296072 - DNA, 25 bp, Artificial
  probe
  misc_feature (1)..(25): SEQ ID NO: 1497; WAN024BDA; Start 78; Stop 102
ttctatagttgtggggagatttact

SEQ ID NO: 296073 - DNA, 25 bp, Artificial
  probe
  misc_feature (1)..(25): SEQ ID NO: 1497; WAN024BDA; Start 94; Stop 118
agatttacttcattttctcctgaga

SEQ ID NO: 296074 - DNA, 25 bp, Artificial
  probe
  misc_feature (1)..(25): SEQ ID NO: 1497; WAN024BDA; Start 80; Stop 104
ctatagttgtggggagatttacttc

SEQ ID NO: 296075 - DNA, 25 bp, Artificial
  probe
  misc_feature (1)..(25): SEQ ID NO: 1498; WAN024FJ9; Start 437; Stop 461
gagagagtcatattgtagaccatcg

SEQ ID NO: 296076 - DNA, 25 bp, Artificial
  probe
  misc_feature (1)..(25): SEQ ID NO: 1498; WAN024FJ9; Start 436; Stop 460
ggagagagtcatattgtagaccatc

SEQ ID NO: 296077 - DNA, 25 bp, Artificial
  probe
  misc_feature (1)..(25): SEQ ID NO: 1498; WAN024FJ9; Start 447; Stop 471
tattgtagaccatcgaggcataatt

SEQ ID NO: 296078 - DNA, 25 bp, Artificial
  probe
  misc_feature (1)..(25): SEQ ID NO: 1498; WAN024FJ9; Start 445; Stop 469
catattgtagaccatcgaggcataa

SEQ ID NO: 296079 - DNA, 25 bp, Artificial
  probe
  misc_feature (1)..(25): SEQ ID NO: 1498; WAN024FJ9; Start 446; Stop 470
atattgtagaccatcgaggcataat

SEQ ID NO: 296080 - DNA, 25 bp, Artificial
  probe
  misc_feature (1)..(25): SEQ ID NO: 1498; WAN024FJ9; Start 435; Stop 459
tggagagagtcatattgtagaccat

SEQ ID NO: 296081 - DNA, 25 bp, Artificial
  probe
  misc_feature (1)..(25): SEQ ID NO: 1498; WAN024FJ9; Start 444; Stop 468
tcatattgtagaccatcgaggcata

SEQ ID NO: 296082 - DNA, 25 bp, Artificial
  probe
  misc_feature (1)..(25): SEQ ID NO: 1498; WAN024FJ9; Start 448; Stop 472
attgtagaccatcgaggcataattg

SEQ ID NO: 296083 - DNA, 25 bp, Artificial
  probe
  misc_feature (1)..(25): SEQ ID NO: 1498; WAN024FJ9; Start 434; Stop 458
ctggagagagtcatattgtagacca

SEQ ID NO: 296084 - DNA, 25 bp, Artificial
  probe
  misc_feature (1)..(25): SEQ ID NO: 1498; WAN024FJ9; Start 880; Stop 904
atttcatctaacttccttcgtctgg

SEQ ID NO: 296085 - DNA, 25 bp, Artificial
  probe
  misc_feature (1)..(25): SEQ ID NO: 1498; WAN024FJ9; Start 879; Stop 903
gatttcatctaacttccttcgtctg

SEQ ID NO: 296086 - DNA, 25 bp, Artificial
  probe
  misc_feature (1)..(25): SEQ ID NO: 1498; WAN024FJ9; Start 460; Stop 484
cgaggcataattgacaatgtctatg

SEQ ID NO: 296087 - DNA, 25 bp, Artificial
  probe
  misc_feature (1)..(25): SEQ ID NO: 1498; WAN024FJ9; Start 877; Stop 901
gtgatttcatctaacttccttcgtc

SEQ ID NO: 296088 - DNA, 25 bp, Artificial
  probe
  misc_feature (1)..(25): SEQ ID NO: 1498; WAN024FJ9; Start 596; Stop 620
tgcccaatatcgtgattaaggaaat

SEQ ID NO: 296089 - DNA, 25 bp, Artificial
  probe
  misc_feature (1)..(25): SEQ ID NO: 1498; WAN024FJ9; Start 878; Stop 902
tgatttcatctaacttccttcgtct

SEQ ID NO: 296090 - DNA, 25 bp, Artificial
  probe
  misc_feature (1)..(25): SEQ ID NO: 1498; WAN024FJ9; Start 601; Stop 625
aatatcgtgattaaggaaattgggc

SEQ ID NO: 296091 - DNA, 25 bp, Artificial
  probe
  misc_feature (1)..(25): SEQ ID NO: 1498; WAN024FJ9; Start 597; Stop 621
gcccaatatcgtgattaaggaaatt

SEQ ID NO: 296092 - DNA, 25 bp, Artificial
  probe
  misc_feature (1)..(25): SEQ ID NO: 1498; WAN024FJ9; Start 463; Stop 487
ggcataattgacaatgtctatgtga

SEQ ID NO: 296093 - DNA, 25 bp, Artificial
  probe
  misc_feature (1)..(25): SEQ ID NO: 1498; WAN024FJ9; Start 462; Stop 486
aggcataattgacaatgtctatgtg

SEQ ID NO: 296094 - DNA, 25 bp, Artificial
  probe
  misc_feature (1)..(25): SEQ ID NO: 1498; WAN024FJ9; Start 595; Stop 619
ttgcccaatatcgtgattaaggaaa

SEQ ID NO: 296095 - DNA, 25 bp, Artificial
  probe
  misc_feature (1)..(25): SEQ ID NO: 1498; WAN024FJ9; Start 594; Stop 618
tttgcccaatatcgtgattaaggaa

SEQ ID NO: 296096 - DNA, 25 bp, Artificial
  probe
  misc_feature (1)..(25): SEQ ID NO: 1498; WAN024FJ9; Start 461; Stop 485
gaggcataattgacaatgtctatgt

SEQ ID NO: 296097 - DNA, 25 bp, Artificial
  probe
  misc_feature (1)..(25): SEQ ID NO: 1498; WAN024FJ9; Start 452; Stop 476
tagaccatcgaggcataattgacaa

SEQ ID NO: 296098 - DNA, 25 bp, Artificial
  probe
  misc_feature (1)..(25): SEQ ID NO: 1498; WAN024FJ9; Start 449; Stop 473
ttgtagaccatcgaggcataattga

SEQ ID NO: 296099 - DNA, 25 bp, Artificial
  probe
  misc_feature (1)..(25): SEQ ID NO: 1498; WAN024FJ9; Start 848; Stop 872
ttgtaggtctttgtaagcaagtttc

SEQ ID NO: 296100 - DNA, 25 bp, Artificial
  probe
  misc_feature (1)..(25): SEQ ID NO: 1498; WAN024FJ9; Start 459; Stop 483
tcgaggcataattgacaatgtctat

SEQ ID NO: 296101 - DNA, 25 bp, Artificial
  probe
  misc_feature (1)..(25): SEQ ID NO: 1498; WAN024FJ9; Start 458; Stop 482
atcgaggcataattgacaatgtcta

SEQ ID NO: 296102 - DNA, 25 bp, Artificial
  probe
  misc_feature (1)..(25): SEQ ID NO: 1498; WAN024FJ9; Start 439; Stop 463
gagagtcatattgtagaccatcgag

SEQ ID NO: 296103 - DNA, 25 bp, Artificial
  probe
  misc_feature (1)..(25): SEQ ID NO: 1498; WAN024FJ9; Start 929; Stop 953
gagatttgattgtggacgagttgat

SEQ ID NO: 296104 - DNA, 25 bp, Artificial
  probe
  misc_feature (1)..(25): SEQ ID NO: 1498; WAN024FJ9; Start 438; Stop 462
agagagtcatattgtagaccatcga

SEQ ID NO: 296105 - DNA, 25 bp, Artificial
  probe
  misc_feature (1)..(25): SEQ ID NO: 1498; WAN024FJ9; Start 370; Stop 394
atttatccttccagtgaccatcctt

SEQ ID NO: 296106 - DNA, 25 bp, Artificial
  probe
  misc_feature (1)..(25): SEQ ID NO: 1498; WAN024FJ9; Start 876; Stop 900
cgtgatttcatctaacttccttcgt

SEQ ID NO: 296107 - DNA, 25 bp, Artificial
  probe
  misc_feature (1)..(25): SEQ ID NO: 1498; WAN024FJ9; Start 847; Stop 871
tttgtaggtctttgtaagcaagttt

SEQ ID NO: 296108 - DNA, 25 bp, Artificial
  probe
  misc_feature (1)..(25): SEQ ID NO: 1499; WAN024CI8; Start 983; Stop 1007
ttgattggctattggacgattctat

SEQ ID NO: 296109 - DNA, 25 bp, Artificial
  probe
  misc_feature (1)..(25): SEQ ID NO: 1499; WAN024CI8; Start 982; Stop 1006
attgattggctattggacgattcta

SEQ ID NO: 296110 - DNA, 25 bp, Artificial
  probe
  misc_feature (1)..(25): SEQ ID NO: 1499; WAN024CI8; Start 375; Stop 399
tgttgatgatgtctatgcctatgaa

SEQ ID NO: 296111 - DNA, 25 bp, Artificial
  probe
  misc_feature (1)..(25): SEQ ID NO: 1499; WAN024CI8; Start 374; Stop 398
ctgttgatgatgtctatgcctatga

SEQ ID NO: 296112 - DNA, 25 bp, Artificial
  probe
  misc_feature (1)..(25): SEQ ID NO: 1499; WAN024CI8; Start 984; Stop 1008
tgattggctattggacgattctata

SEQ ID NO: 296113 - DNA, 25 bp, Artificial
  probe
  misc_feature (1)..(25): SEQ ID NO: 1499; WAN024CI8; Start 376; Stop 400
gttgatgatgtctatgcctatgaag

SEQ ID NO: 296114 - DNA, 25 bp, Artificial
  probe
  misc_feature (1)..(25): SEQ ID NO: 1499; WAN024CI8; Start 978; Stop 1002
tagaattgattggctattggacgat

SEQ ID NO: 296115 - DNA, 25 bp, Artificial
  probe
  misc_feature (1)..(25): SEQ ID NO: 1499; WAN024CI8; Start 981; Stop 1005
aattgattggctattggacgattct

SEQ ID NO: 296116 - DNA, 25 bp, Artificial
  probe
  misc_feature (1)..(25): SEQ ID NO: 1499; WAN024CI8; Start 979; Stop 1003
agaattgattggctattggacgatt

SEQ ID NO: 296117 - DNA, 25 bp, Artificial
  probe
  misc_feature (1)..(25): SEQ ID NO: 1499; WAN024CI8; Start 366; Stop 390
aattggtgctgttgatgatgtctat

SEQ ID NO: 296118 - DNA, 25 bp, Artificial
  probe
  misc_feature (1)..(25): SEQ ID NO: 1499; WAN024CI8; Start 977; Stop 1001
gtagaattgattggctattggacga

SEQ ID NO: 296119 - DNA, 25 bp, Artificial
  probe
  misc_feature (1)..(25): SEQ ID NO: 1499; WAN024CI8; Start 976; Stop 1000
agtagaattgattggctattggacg

SEQ ID NO: 296120 - DNA, 25 bp, Artificial
  probe
  misc_feature (1)..(25): SEQ ID NO: 1499; WAN024CI8; Start 367; Stop 391
attggtgctgttgatgatgtctatg

SEQ ID NO: 296121 - DNA, 25 bp, Artificial
  probe
  misc_feature (1)..(25): SEQ ID NO: 1499; WAN024CI8; Start 1113; Stop 1137
ggatgatggactctatgacggtatt

SEQ ID NO: 296122 - DNA, 25 bp, Artificial
  probe
  misc_feature (1)..(25): SEQ ID NO: 1499; WAN024CI8; Start 1107; Stop 1131
aagtatggatgatggactctatgac

SEQ ID NO: 296123 - DNA, 25 bp, Artificial
  probe
  misc_feature (1)..(25): SEQ ID NO: 1499; WAN024CI8; Start 373; Stop 397
gctgttgatgatgtctatgcctatg

SEQ ID NO: 296124 - DNA, 25 bp, Artificial
  probe
  misc_feature (1)..(25): SEQ ID NO: 1499; WAN024CI8; Start 10; Stop 34
tcaatagtattagcggcagataatg

SEQ ID NO: 296125 - DNA, 25 bp, Artificial
  probe
  misc_feature (1)..(25): SEQ ID NO: 1499; WAN024CI8; Start 975; Stop 999
tagtagaattgattggctattggac

SEQ ID NO: 296126 - DNA, 25 bp, Artificial
  probe
  misc_feature (1)..(25): SEQ ID NO: 1499; WAN024CI8; Start 372; Stop 396
tgctgttgatgatgtctatgcctat

SEQ ID NO: 296127 - DNA, 25 bp, Artificial
  probe
  misc_feature (1)..(25): SEQ ID NO: 1499; WAN024CI8; Start 1108; Stop 1132
agtatggatgatggactctatgacg

SEQ ID NO: 296128 - DNA, 25 bp, Artificial
  probe
  misc_feature (1)..(25): SEQ ID NO: 1499; WAN024CI8; Start 1109; Stop 1133
gtatggatgatggactctatgacgg

SEQ ID NO: 296129 - DNA, 25 bp, Artificial
  probe
  misc_feature (1)..(25): SEQ ID NO: 1499; WAN024CI8; Start 8; Stop 32
aatcaatagtattagcggcagataa

SEQ ID NO: 296130 - DNA, 25 bp, Artificial
  probe
  misc_feature (1)..(25): SEQ ID NO: 1499; WAN024CI8; Start 377; Stop 401
ttgatgatgtctatgcctatgaagg

SEQ ID NO: 296131 - DNA, 25 bp, Artificial
  probe
  misc_feature (1)..(25): SEQ ID NO: 1499; WAN024CI8; Start 379; Stop 403
gatgatgtctatgcctatgaaggac

SEQ ID NO: 296132 - DNA, 25 bp, Artificial
  probe
  misc_feature (1)..(25): SEQ ID NO: 1499; WAN024CI8; Start 378; Stop 402
tgatgatgtctatgcctatgaagga

SEQ ID NO: 296133 - DNA, 25 bp, Artificial
  probe
  misc_feature (1)..(25): SEQ ID NO: 1499; WAN024CI8; Start 1112; Stop 1136
tggatgatggactctatgacggtat

SEQ ID NO: 296134 - DNA, 25 bp, Artificial
  probe
  misc_feature (1)..(25): SEQ ID NO: 1499; WAN024CI8; Start 1111; Stop 1135
atggatgatggactctatgacggta

SEQ ID NO: 296135 - DNA, 25 bp, Artificial
  probe
  misc_feature (1)..(25): SEQ ID NO: 1499; WAN024CI8; Start 1110; Stop 1134
tatggatgatggactctatgacggt

SEQ ID NO: 296136 - DNA, 25 bp, Artificial
  probe
  misc_feature (1)..(25): SEQ ID NO: 1499; WAN024CI8; Start 9; Stop 33
atcaatagtattagcggcagataat

SEQ ID NO: 296137 - DNA, 25 bp, Artificial
  probe
  misc_feature (1)..(25): SEQ ID NO: 1499; WAN024CI8; Start 980; Stop 1004
gaattgattggctattggacgattc

SEQ ID NO: 296138 - DNA, 25 bp, Artificial
  probe
  misc_feature (1)..(25): SEQ ID NO: 1499; WAN024CI8; Start 371; Stop 395
gtgctgttgatgatgtctatgccta

SEQ ID NO: 296139 - DNA, 25 bp, Artificial
  probe
  misc_feature (1)..(25): SEQ ID NO: 1499; WAN024CI8; Start 1114; Stop 1138
gatgatggactctatgacggtattt

SEQ ID NO: 296140 - DNA, 25 bp, Artificial
  probe
  misc_feature (1)..(25): SEQ ID NO: 1499; WAN024CI8; Start 820; Stop 844
cttgtgacatggagtgcagatataa

SEQ ID NO: 296141 - DNA, 25 bp, Artificial
  probe
  misc_feature (1)..(25): SEQ ID NO: 1500; WAN024DD5; Start 184; Stop 208
gacagcatttggcaggaatatctag

SEQ ID NO: 296142 - DNA, 25 bp, Artificial
  probe
  misc_feature (1)..(25): SEQ ID NO: 1500; WAN024DD5; Start 183; Stop 207
tgacagcatttggcaggaatatcta

SEQ ID NO: 296143 - DNA, 25 bp, Artificial
  probe
  misc_feature (1)..(25): SEQ ID NO: 1500; WAN024DD5; Start 181; Stop 205
tttgacagcatttggcaggaatatc

SEQ ID NO: 296144 - DNA, 25 bp, Artificial
  probe
  misc_feature (1)..(25): SEQ ID NO: 1500; WAN024DD5; Start 182; Stop 206
ttgacagcatttggcaggaatatct

SEQ ID NO: 296145 - DNA, 25 bp, Artificial
  probe
  misc_feature (1)..(25): SEQ ID NO: 1500; WAN024DD5; Start 44; Stop 68
ctaaaagtaacagtcccaaagcaat

SEQ ID NO: 296146 - DNA, 25 bp, Artificial
  probe
  misc_feature (1)..(25): SEQ ID NO: 1500; WAN024DD5; Start 39; Stop 63
caatcctaaaagtaacagtcccaaa

SEQ ID NO: 296147 - DNA, 25 bp, Artificial
  probe
  misc_feature (1)..(25): SEQ ID NO: 1500; WAN024DD5; Start 189; Stop 213
catttggcaggaatatctagaacac

SEQ ID NO: 296148 - DNA, 25 bp, Artificial
  probe
  misc_feature (1)..(25): SEQ ID NO: 1500; WAN024DD5; Start 47; Stop 71
aaagtaacagtcccaaagcaatttt

SEQ ID NO: 296149 - DNA, 25 bp, Artificial
  probe
  misc_feature (1)..(25): SEQ ID NO: 1500; WAN024DD5; Start 46; Stop 70
aaaagtaacagtcccaaagcaattt

SEQ ID NO: 296150 - DNA, 25 bp, Artificial
  probe
  misc_feature (1)..(25): SEQ ID NO: 1500; WAN024DD5; Start 190; Stop 214
atttggcaggaatatctagaacact

SEQ ID NO: 296151 - DNA, 25 bp, Artificial
  probe
  misc_feature (1)..(25): SEQ ID NO: 1500; WAN024DD5; Start 41; Stop 65
atcctaaaagtaacagtcccaaagc

SEQ ID NO: 296152 - DNA, 25 bp, Artificial
  probe
  misc_feature (1)..(25): SEQ ID NO: 1500; WAN024DD5; Start 45; Stop 69
taaaagtaacagtcccaaagcaatt

SEQ ID NO: 296153 - DNA, 25 bp, Artificial
  probe
  misc_feature (1)..(25): SEQ ID NO: 1500; WAN024DD5; Start 40; Stop 64
aatcctaaaagtaacagtcccaaag

SEQ ID NO: 296154 - DNA, 25 bp, Artificial
  probe
  misc_feature (1)..(25): SEQ ID NO: 1500; WAN024DD5; Start 191; Stop 215
tttggcaggaatatctagaacacta

SEQ ID NO: 296155 - DNA, 25 bp, Artificial
  probe
  misc_feature (1)..(25): SEQ ID NO: 1500; WAN024DD5; Start 38; Stop 62
gcaatcctaaaagtaacagtcccaa

SEQ ID NO: 296156 - DNA, 25 bp, Artificial
  probe
  misc_feature (1)..(25): SEQ ID NO: 1500; WAN024DD5; Start 187; Stop 211
agcatttggcaggaatatctagaac

SEQ ID NO: 296157 - DNA, 25 bp, Artificial
  probe
  misc_feature (1)..(25): SEQ ID NO: 1500; WAN024DD5; Start 186; Stop 210
cagcatttggcaggaatatctagaa

SEQ ID NO: 296158 - DNA, 25 bp, Artificial
  probe
  misc_feature (1)..(25): SEQ ID NO: 1500; WAN024DD5; Start 188; Stop 212
gcatttggcaggaatatctagaaca

SEQ ID NO: 296159 - DNA, 25 bp, Artificial
  probe
  misc_feature (1)..(25): SEQ ID NO: 1500; WAN024DD5; Start 43; Stop 67
cctaaaagtaacagtcccaaagcaa

SEQ ID NO: 296160 - DNA, 25 bp, Artificial
  probe
  misc_feature (1)..(25): SEQ ID NO: 1500; WAN024DD5; Start 112; Stop 136
acagatgattttgatgaggtcagtc

SEQ ID NO: 296161 - DNA, 25 bp, Artificial
  probe
  misc_feature (1)..(25): SEQ ID NO: 1500; WAN024DD5; Start 179; Stop 203
attttgacagcatttggcaggaata

SEQ ID NO: 296162 - DNA, 25 bp, Artificial
  probe
  misc_feature (1)..(25): SEQ ID NO: 1500; WAN024DD5; Start 180; Stop 204
ttttgacagcatttggcaggaatat

SEQ ID NO: 296163 - DNA, 25 bp, Artificial
  probe
  misc_feature (1)..(25): SEQ ID NO: 1500; WAN024DD5; Start 185; Stop 209
acagcatttggcaggaatatctaga

SEQ ID NO: 296164 - DNA, 25 bp, Artificial
  probe
  misc_feature (1)..(25): SEQ ID NO: 1500; WAN024DD5; Start 42; Stop 66
tcctaaaagtaacagtcccaaagca

SEQ ID NO: 296165 - DNA, 25 bp, Artificial
  probe
  misc_feature (1)..(25): SEQ ID NO: 1500; WAN024DD5; Start 151; Stop 175
catgccagtttctcttttaacctag

SEQ ID NO: 296166 - DNA, 25 bp, Artificial
  probe
  misc_feature (1)..(25): SEQ ID NO: 1500; WAN024DD5; Start 113; Stop 137
cagatgattttgatgaggtcagtcg

SEQ ID NO: 296167 - DNA, 25 bp, Artificial
  probe
  misc_feature (1)..(25): SEQ ID NO: 1500; WAN024DD5; Start 118; Stop 142
gattttgatgaggtcagtcgctttt

SEQ ID NO: 296168 - DNA, 25 bp, Artificial
  probe
  misc_feature (1)..(25): SEQ ID NO: 1500; WAN024DD5; Start 172; Stop 196
ctaggagattttgacagcatttggc

SEQ ID NO: 296169 - DNA, 25 bp, Artificial
  probe
  misc_feature (1)..(25): SEQ ID NO: 1500; WAN024DD5; Start 4; Stop 28
agaaaatcattttacacttggctca

SEQ ID NO: 296170 - DNA, 25 bp, Artificial
  probe
  misc_feature (1)..(25): SEQ ID NO: 1500; WAN024DD5; Start 2; Stop 26
tgagaaaatcattttacacttggct

SEQ ID NO: 296171 - DNA, 25 bp, Artificial
  probe
  misc_feature (1)..(25): SEQ ID NO: 1500; WAN024DD5; Start 178; Stop 202
gattttgacagcatttggcaggaat

SEQ ID NO: 296172 - DNA, 25 bp, Artificial
  probe
  misc_feature (1)..(25): SEQ ID NO: 1500; WAN024DD5; Start 3; Stop 27
gagaaaatcattttacacttggctc

SEQ ID NO: 296173 - DNA, 25 bp, Artificial
  probe
  misc_feature (1)..(25): SEQ ID NO: 1500; WAN024DD5; Start 173; Stop 197
taggagattttgacagcatttggca

SEQ ID NO: 296174 - DNA, 25 bp, Artificial
  probe
  misc_feature (1)..(25): SEQ ID NO: 1501; WAN024FZS; Start 3; Stop 27
gagaaaattgggaataaaattagca

SEQ ID NO: 296175 - DNA, 25 bp, Artificial
  probe
  misc_feature (1)..(25): SEQ ID NO: 1501; WAN024FZS; Start 2; Stop 26
tgagaaaattgggaataaaattagc

SEQ ID NO: 296176 - DNA, 25 bp, Artificial
  probe
  misc_feature (1)..(25): SEQ ID NO: 1501; WAN024FZS; Start 4; Stop 28
agaaaattgggaataaaattagcaa

SEQ ID NO: 296177 - DNA, 25 bp, Artificial
  probe
  misc_feature (1)..(25): SEQ ID NO: 1501; WAN024FZS; Start 58; Stop 82
gtctccttttccgaatattctctca

SEQ ID NO: 296178 - DNA, 25 bp, Artificial
  probe
  misc_feature (1)..(25): SEQ ID NO: 1501; WAN024FZS; Start 57; Stop 81
agtctccttttccgaatattctctc

SEQ ID NO: 296179 - DNA, 25 bp, Artificial
  probe
  misc_feature (1)..(25): SEQ ID NO: 1501; WAN024FZS; Start 59; Stop 83
tctccttttccgaatattctctcat

SEQ ID NO: 296180 - DNA, 25 bp, Artificial
  probe
  misc_feature (1)..(25): SEQ ID NO: 1501; WAN024FZS; Start 67; Stop 91
tccgaatattctctcattatatcag

SEQ ID NO: 296181 - DNA, 25 bp, Artificial
  probe
  misc_feature (1)..(25): SEQ ID NO: 1501; WAN024FZS; Start 56; Stop 80
tagtctccttttccgaatattctct

SEQ ID NO: 296182 - DNA, 25 bp, Artificial
  probe
  misc_feature (1)..(25): SEQ ID NO: 1501; WAN024FZS; Start 68; Stop 92
ccgaatattctctcattatatcaga

SEQ ID NO: 296183 - DNA, 25 bp, Artificial
  probe
  misc_feature (1)..(25): SEQ ID NO: 1501; WAN024FZS; Start 60; Stop 84
ctccttttccgaatattctctcatt

SEQ ID NO: 296184 - DNA, 25 bp, Artificial
  probe
  misc_feature (1)..(25): SEQ ID NO: 1501; WAN024FZS; Start 5; Stop 29
gaaaattgggaataaaattagcaaa

SEQ ID NO: 296185 - DNA, 25 bp, Artificial
  probe
  misc_feature (1)..(25): SEQ ID NO: 1501; WAN024FZS; Start 55; Stop 79
ttagtctccttttccgaatattctc

SEQ ID NO: 296186 - DNA, 25 bp, Artificial
  probe
  misc_feature (1)..(25): SEQ ID NO: 1501; WAN024FZS; Start 66; Stop 90
ttccgaatattctctcattatatca

SEQ ID NO: 296187 - DNA, 25 bp, Artificial
  probe
  misc_feature (1)..(25): SEQ ID NO: 1501; WAN024FZS; Start 54; Stop 78
tttagtctccttttccgaatattct

SEQ ID NO: 296188 - DNA, 25 bp, Artificial
  probe
  misc_feature (1)..(25): SEQ ID NO: 1501; WAN024FZS; Start 61; Stop 85
tccttttccgaatattctctcatta

SEQ ID NO: 296189 - DNA, 25 bp, Artificial
  probe
  misc_feature (1)..(25): SEQ ID NO: 1501; WAN024FZS; Start 53; Stop 77
ttttagtctccttttccgaatattc

SEQ ID NO: 296190 - DNA, 25 bp, Artificial
  probe
  misc_feature (1)..(25): SEQ ID NO: 1501; WAN024FZS; Start 62; Stop 86
ccttttccgaatattctctcattat

SEQ ID NO: 296191 - DNA, 25 bp, Artificial
  probe
  misc_feature (1)..(25): SEQ ID NO: 1502; WAN024DJ6; Start 628; Stop 652
ctcaagagtaacaagagtgtcaaga

SEQ ID NO: 296192 - DNA, 25 bp, Artificial
  probe
  misc_feature (1)..(25): SEQ ID NO: 1502; WAN024DJ6; Start 627; Stop 651
tctcaagagtaacaagagtgtcaag

SEQ ID NO: 296193 - DNA, 25 bp, Artificial
  probe
  misc_feature (1)..(25): SEQ ID NO: 1502; WAN024DJ6; Start 629; Stop 653
tcaagagtaacaagagtgtcaagat

SEQ ID NO: 296194 - DNA, 25 bp, Artificial
  probe
  misc_feature (1)..(25): SEQ ID NO: 1502; WAN024DJ6; Start 626; Stop 650
atctcaagagtaacaagagtgtcaa

SEQ ID NO: 296195 - DNA, 25 bp, Artificial
  probe
  misc_feature (1)..(25): SEQ ID NO: 1502; WAN024DJ6; Start 630; Stop 654
caagagtaacaagagtgtcaagatt

SEQ ID NO: 296196 - DNA, 25 bp, Artificial
  probe
  misc_feature (1)..(25): SEQ ID NO: 1502; WAN024DJ6; Start 625; Stop 649
tatctcaagagtaacaagagtgtca

SEQ ID NO: 296197 - DNA, 25 bp, Artificial
  probe
  misc_feature (1)..(25): SEQ ID NO: 1502; WAN024DJ6; Start 623; Stop 647
actatctcaagagtaacaagagtgt

SEQ ID NO: 296198 - DNA, 25 bp, Artificial
  probe
  misc_feature (1)..(25): SEQ ID NO: 1502; WAN024DJ6; Start 417; Stop 441
caaggacactattcatctggagagg

SEQ ID NO: 296199 - DNA, 25 bp, Artificial
  probe
  misc_feature (1)..(25): SEQ ID NO: 1502; WAN024DJ6; Start 622; Stop 646
gactatctcaagagtaacaagagtg

SEQ ID NO: 296200 - DNA, 25 bp, Artificial
  probe
  misc_feature (1)..(25): SEQ ID NO: 1502; WAN024DJ6; Start 621; Stop 645
agactatctcaagagtaacaagagt

SEQ ID NO: 296201 - DNA, 25 bp, Artificial
  probe
  misc_feature (1)..(25): SEQ ID NO: 1502; WAN024DJ6; Start 624; Stop 648
ctatctcaagagtaacaagagtgtc

SEQ ID NO: 296202 - DNA, 25 bp, Artificial
  probe
  misc_feature (1)..(25): SEQ ID NO: 1502; WAN024DJ6; Start 416; Stop 440
gcaaggacactattcatctggagag

SEQ ID NO: 296203 - DNA, 25 bp, Artificial
  probe
  misc_feature (1)..(25): SEQ ID NO: 1502; WAN024DJ6; Start 247; Stop 271
ctctttcttctttacccgatgatga

SEQ ID NO: 296204 - DNA, 25 bp, Artificial
  probe
  misc_feature (1)..(25): SEQ ID NO: 1502; WAN024DJ6; Start 117; Stop 141
tttgattcgctactacactggtaaa

SEQ ID NO: 296205 - DNA, 25 bp, Artificial
  probe
  misc_feature (1)..(25): SEQ ID NO: 1502; WAN024DJ6; Start 126; Stop 150
ctactacactggtaaagagggaaat

SEQ ID NO: 296206 - DNA, 25 bp, Artificial
  probe
  misc_feature (1)..(25): SEQ ID NO: 1502; WAN024DJ6; Start 241; Stop 265
tatagcctctttcttctttacccga

SEQ ID NO: 296207 - DNA, 25 bp, Artificial
  probe
  misc_feature (1)..(25): SEQ ID NO: 1502; WAN024DJ6; Start 118; Stop 142
ttgattcgctactacactggtaaag

SEQ ID NO: 296208 - DNA, 25 bp, Artificial
  probe
  misc_feature (1)..(25): SEQ ID NO: 1502; WAN024DJ6; Start 620; Stop 644
aagactatctcaagagtaacaagag

SEQ ID NO: 296209 - DNA, 25 bp, Artificial
  probe
  misc_feature (1)..(25): SEQ ID NO: 1502; WAN024DJ6; Start 512; Stop 536
ctgtagatgtggaagtcagtctcag

SEQ ID NO: 296210 - DNA, 25 bp, Artificial
  probe
  misc_feature (1)..(25): SEQ ID NO: 1502; WAN024DJ6; Start 509; Stop 533
tacctgtagatgtggaagtcagtct

SEQ ID NO: 296211 - DNA, 25 bp, Artificial
  probe
  misc_feature (1)..(25): SEQ ID NO: 1502; WAN024DJ6; Start 120; Stop 144
gattcgctactacactggtaaagag

SEQ ID NO: 296212 - DNA, 25 bp, Artificial
  probe
  misc_feature (1)..(25): SEQ ID NO: 1502; WAN024DJ6; Start 333; Stop 357
aaatcgttggtttggaaatcttcat

SEQ ID NO: 296213 - DNA, 25 bp, Artificial
  probe
  misc_feature (1)..(25): SEQ ID NO: 1502; WAN024DJ6; Start 249; Stop 273
ctttcttctttacccgatgatgaac

SEQ ID NO: 296214 - DNA, 25 bp, Artificial
  probe
  misc_feature (1)..(25): SEQ ID NO: 1502; WAN024DJ6; Start 248; Stop 272
tctttcttctttacccgatgatgaa

SEQ ID NO: 296215 - DNA, 25 bp, Artificial
  probe
  misc_feature (1)..(25): SEQ ID NO: 1502; WAN024DJ6; Start 334; Stop 358
aatcgttggtttggaaatcttcatc

SEQ ID NO: 296216 - DNA, 25 bp, Artificial
  probe
  misc_feature (1)..(25): SEQ ID NO: 1502; WAN024DJ6; Start 128; Stop 152
actacactggtaaagagggaaataa

SEQ ID NO: 296217 - DNA, 25 bp, Artificial
  probe
  misc_feature (1)..(25): SEQ ID NO: 1502; WAN024DJ6; Start 426; Stop 450
tattcatctggagagggtcatctta

SEQ ID NO: 296218 - DNA, 25 bp, Artificial
  probe
  misc_feature (1)..(25): SEQ ID NO: 1502; WAN024DJ6; Start 337; Stop 361
cgttggtttggaaatcttcatcatt

SEQ ID NO: 296219 - DNA, 25 bp, Artificial
  probe
  misc_feature (1)..(25): SEQ ID NO: 1502; WAN024DJ6; Start 246; Stop 270
cctctttcttctttacccgatgatg

SEQ ID NO: 296220 - DNA, 25 bp, Artificial
  probe
  misc_feature (1)..(25): SEQ ID NO: 1502; WAN024DJ6; Start 242; Stop 266
atagcctctttcttctttacccgat

SEQ ID NO: 296221 - DNA, 25 bp, Artificial
  probe
  misc_feature (1)..(25): SEQ ID NO: 1502; WAN024DJ6; Start 131; Stop 155
acactggtaaagagggaaataatct

SEQ ID NO: 296222 - DNA, 25 bp, Artificial
  probe
  misc_feature (1)..(25): SEQ ID NO: 1502; WAN024DJ6; Start 427; Stop 451
attcatctggagagggtcatcttaa

SEQ ID NO: 296223 - DNA, 25 bp, Artificial
  probe
  misc_feature (1)..(25): SEQ ID NO: 1502; WAN024DJ6; Start 119; Stop 143
tgattcgctactacactggtaaaga

SEQ ID NO: 296224 - DNA, 25 bp, Artificial
  probe
  misc_feature (1)..(25): SEQ ID NO: 1503; WAN024DUL; Start 116; Stop 140
tagatcaatctggtatcgtggagtt

SEQ ID NO: 296225 - DNA, 25 bp, Artificial
  probe
  misc_feature (1)..(25): SEQ ID NO: 1503; WAN024DUL; Start 115; Stop 139
ttagatcaatctggtatcgtggagt

SEQ ID NO: 296226 - DNA, 25 bp, Artificial
  probe
  misc_feature (1)..(25): SEQ ID NO: 1503; WAN024DUL; Start 169; Stop 193
caggttgttcctagtcagattaact

SEQ ID NO: 296227 - DNA, 25 bp, Artificial
  probe
  misc_feature (1)..(25): SEQ ID NO: 1503; WAN024DUL; Start 168; Stop 192
tcaggttgttcctagtcagattaac

SEQ ID NO: 296228 - DNA, 25 bp, Artificial
  probe
  misc_feature (1)..(25): SEQ ID NO: 1503; WAN024DUL; Start 167; Stop 191
ttcaggttgttcctagtcagattaa

SEQ ID NO: 296229 - DNA, 25 bp, Artificial
  probe
  misc_feature (1)..(25): SEQ ID NO: 1503; WAN024DUL; Start 390; Stop 414
attgatgaccaagcaggagatgaat

SEQ ID NO: 296230 - DNA, 25 bp, Artificial
  probe
  misc_feature (1)..(25): SEQ ID NO: 1503; WAN024DUL; Start 391; Stop 415
ttgatgaccaagcaggagatgaatt

SEQ ID NO: 296231 - DNA, 25 bp, Artificial
  probe
  misc_feature (1)..(25): SEQ ID NO: 1503; WAN024DUL; Start 389; Stop 413
aattgatgaccaagcaggagatgaa

SEQ ID NO: 296232 - DNA, 25 bp, Artificial
  probe
  misc_feature (1)..(25): SEQ ID NO: 1503; WAN024DUL; Start 42; Stop 66
taaagagagaggtgggtttgttatg

SEQ ID NO: 296233 - DNA, 25 bp, Artificial
  probe
  misc_feature (1)..(25): SEQ ID NO: 1503; WAN024DUL; Start 172; Stop 196
gttgttcctagtcagattaactacg

SEQ ID NO: 296234 - DNA, 25 bp, Artificial
  probe
  misc_feature (1)..(25): SEQ ID NO: 1503; WAN024DUL; Start 49; Stop 73
agaggtgggtttgttatgagattta

SEQ ID NO: 296235 - DNA, 25 bp, Artificial
  probe
  misc_feature (1)..(25): SEQ ID NO: 1503; WAN024DUL; Start 12; Stop 36
tcggtataatagtcaaacaaggtca

SEQ ID NO: 296236 - DNA, 25 bp, Artificial
  probe
  misc_feature (1)..(25): SEQ ID NO: 1503; WAN024DUL; Start 117; Stop 141
agatcaatctggtatcgtggagttg

SEQ ID NO: 296237 - DNA, 25 bp, Artificial
  probe
  misc_feature (1)..(25): SEQ ID NO: 1503; WAN024DUL; Start 48; Stop 72
gagaggtgggtttgttatgagattt

SEQ ID NO: 296238 - DNA, 25 bp, Artificial
  probe
  misc_feature (1)..(25): SEQ ID NO: 1503; WAN024DUL; Start 41; Stop 65
ttaaagagagaggtgggtttgttat

SEQ ID NO: 296239 - DNA, 25 bp, Artificial
  probe
  misc_feature (1)..(25): SEQ ID NO: 1503; WAN024DUL; Start 171; Stop 195
ggttgttcctagtcagattaactac

SEQ ID NO: 296240 - DNA, 25 bp, Artificial
  probe
  misc_feature (1)..(25): SEQ ID NO: 1503; WAN024DUL; Start 170; Stop 194
aggttgttcctagtcagattaacta

SEQ ID NO: 296241 - DNA, 25 bp, Artificial
  probe
  misc_feature (1)..(25): SEQ ID NO: 1503; WAN024DUL; Start 13; Stop 37
cggtataatagtcaaacaaggtcaa

SEQ ID NO: 296242 - DNA, 25 bp, Artificial
  probe
  misc_feature (1)..(25): SEQ ID NO: 1503; WAN024DUL; Start 50; Stop 74
gaggtgggtttgttatgagatttaa

SEQ ID NO: 296243 - DNA, 25 bp, Artificial
  probe
  misc_feature (1)..(25): SEQ ID NO: 1503; WAN024DUL; Start 47; Stop 71
agagaggtgggtttgttatgagatt

SEQ ID NO: 296244 - DNA, 25 bp, Artificial
  probe
  misc_feature (1)..(25): SEQ ID NO: 1503; WAN024DUL; Start 11; Stop 35
ttcggtataatagtcaaacaaggtc

SEQ ID NO: 296245 - DNA, 25 bp, Artificial
  probe
  misc_feature (1)..(25): SEQ ID NO: 1503; WAN024DUL; Start 43; Stop 67
aaagagagaggtgggtttgttatga

SEQ ID NO: 296246 - DNA, 25 bp, Artificial
  probe
  misc_feature (1)..(25): SEQ ID NO: 1503; WAN024DUL; Start 46; Stop 70
gagagaggtgggtttgttatgagat

SEQ ID NO: 296247 - DNA, 25 bp, Artificial
  probe
  misc_feature (1)..(25): SEQ ID NO: 1503; WAN024DUL; Start 10; Stop 34
tttcggtataatagtcaaacaaggt

SEQ ID NO: 296248 - DNA, 25 bp, Artificial
  probe
  misc_feature (1)..(25): SEQ ID NO: 1503; WAN024DUL; Start 114; Stop 138
tttagatcaatctggtatcgtggag

SEQ ID NO: 296249 - DNA, 25 bp, Artificial
  probe
  misc_feature (1)..(25): SEQ ID NO: 1503; WAN024DUL; Start 44; Stop 68
aagagagaggtgggtttgttatgag

SEQ ID NO: 296250 - DNA, 25 bp, Artificial
  probe
  misc_feature (1)..(25): SEQ ID NO: 1503; WAN024DUL; Start 17; Stop 41
ataatagtcaaacaaggtcaaggtt

SEQ ID NO: 296251 - DNA, 25 bp, Artificial
  probe
  misc_feature (1)..(25): SEQ ID NO: 1503; WAN024DUL; Start 261; Stop 285
ctacattcgtataggacggattgag

SEQ ID NO: 296252 - DNA, 25 bp, Artificial
  probe
  misc_feature (1)..(25): SEQ ID NO: 1503; WAN024DUL; Start 174; Stop 198
tgttcctagtcagattaactacgtg

SEQ ID NO: 296253 - DNA, 25 bp, Artificial
  probe
  misc_feature (1)..(25): SEQ ID NO: 1503; WAN024DUL; Start 175; Stop 199
gttcctagtcagattaactacgtga

SEQ ID NO: 296254 - DNA, 25 bp, Artificial
  probe
  misc_feature (1)..(25): SEQ ID NO: 1503; WAN024DUL; Start 262; Stop 286
tacattcgtataggacggattgagt

SEQ ID NO: 296255 - DNA, 25 bp, Artificial
  probe
  misc_feature (1)..(25): SEQ ID NO: 1503; WAN024DUL; Start 165; Stop 189
ctttcaggttgttcctagtcagatt

SEQ ID NO: 296256 - DNA, 25 bp, Artificial
  probe
  misc_feature (1)..(25): SEQ ID NO: 1503; WAN024DUL; Start 16; Stop 40
tataatagtcaaacaaggtcaaggt

SEQ ID NO: 296257 - DNA, 25 bp, Artificial
  probe
  misc_feature (1)..(25): SEQ ID NO: 1504; WAN024G7R; Start 102; Stop 126
aacctatgtccaacctgaatatgtc

SEQ ID NO: 296258 - DNA, 25 bp, Artificial
  probe
  misc_feature (1)..(25): SEQ ID NO: 1504; WAN024G7R; Start 105; Stop 129
ctatgtccaacctgaatatgtccta

SEQ ID NO: 296259 - DNA, 25 bp, Artificial
  probe
  misc_feature (1)..(25): SEQ ID NO: 1504; WAN024G7R; Start 273; Stop 297
gttgtattcatcagccaagattcaa

SEQ ID NO: 296260 - DNA, 25 bp, Artificial
  probe
  misc_feature (1)..(25): SEQ ID NO: 1504; WAN024G7R; Start 271; Stop 295
cagttgtattcatcagccaagattc

SEQ ID NO: 296261 - DNA, 25 bp, Artificial
  probe
  misc_feature (1)..(25): SEQ ID NO: 1504; WAN024G7R; Start 679; Stop 703
cgcaagattgttgaagataccttaa

SEQ ID NO: 296262 - DNA, 25 bp, Artificial
  probe
  misc_feature (1)..(25): SEQ ID NO: 1504; WAN024G7R; Start 272; Stop 296
agttgtattcatcagccaagattca

SEQ ID NO: 296263 - DNA, 25 bp, Artificial
  probe
  misc_feature (1)..(25): SEQ ID NO: 1504; WAN024G7R; Start 106; Stop 130
tatgtccaacctgaatatgtcctag

SEQ ID NO: 296264 - DNA, 25 bp, Artificial
  probe
  misc_feature (1)..(25): SEQ ID NO: 1504; WAN024G7R; Start 270; Stop 294
acagttgtattcatcagccaagatt

SEQ ID NO: 296265 - DNA, 25 bp, Artificial
  probe
  misc_feature (1)..(25): SEQ ID NO: 1504; WAN024G7R; Start 104; Stop 128
cctatgtccaacctgaatatgtcct

SEQ ID NO: 296266 - DNA, 25 bp, Artificial
  probe
  misc_feature (1)..(25): SEQ ID NO: 1504; WAN024G7R; Start 269; Stop 293
tacagttgtattcatcagccaagat

SEQ ID NO: 296267 - DNA, 25 bp, Artificial
  probe
  misc_feature (1)..(25): SEQ ID NO: 1504; WAN024G7R; Start 267; Stop 291
cttacagttgtattcatcagccaag

SEQ ID NO: 296268 - DNA, 25 bp, Artificial
  probe
  misc_feature (1)..(25): SEQ ID NO: 1504; WAN024G7R; Start 268; Stop 292
ttacagttgtattcatcagccaaga

SEQ ID NO: 296269 - DNA, 25 bp, Artificial
  probe
  misc_feature (1)..(25): SEQ ID NO: 1504; WAN024G7R; Start 103; Stop 127
acctatgtccaacctgaatatgtcc

SEQ ID NO: 296270 - DNA, 25 bp, Artificial
  probe
  misc_feature (1)..(25): SEQ ID NO: 1504; WAN024G7R; Start 901; Stop 925
ctagaggacggtggtaacttcttaa

SEQ ID NO: 296271 - DNA, 25 bp, Artificial
  probe
  misc_feature (1)..(25): SEQ ID NO: 1504; WAN024G7R; Start 254; Stop 278
ccaatgactctagcttacagttgta

SEQ ID NO: 296272 - DNA, 25 bp, Artificial
  probe
  misc_feature (1)..(25): SEQ ID NO: 1504; WAN024G7R; Start 191; Stop 215
caacagataccaaagaactcaagac

SEQ ID NO: 296273 - DNA, 25 bp, Artificial
  probe
  misc_feature (1)..(25): SEQ ID NO: 1504; WAN024G7R; Start 190; Stop 214
tcaacagataccaaagaactcaaga

SEQ ID NO: 296274 - DNA, 25 bp, Artificial
  probe
  misc_feature (1)..(25): SEQ ID NO: 1504; WAN024G7R; Start 101; Stop 125
aaacctatgtccaacctgaatatgt

SEQ ID NO: 296275 - DNA, 25 bp, Artificial
  probe
  misc_feature (1)..(25): SEQ ID NO: 1504; WAN024G7R; Start 98; Stop 122
atgaaacctatgtccaacctgaata

SEQ ID NO: 296276 - DNA, 25 bp, Artificial
  probe
  misc_feature (1)..(25): SEQ ID NO: 1504; WAN024G7R; Start 189; Stop 213
ctcaacagataccaaagaactcaag

SEQ ID NO: 296277 - DNA, 25 bp, Artificial
  probe
  misc_feature (1)..(25): SEQ ID NO: 1504; WAN024G7R; Start 99; Stop 123
tgaaacctatgtccaacctgaatat

SEQ ID NO: 296278 - DNA, 25 bp, Artificial
  probe
  misc_feature (1)..(25): SEQ ID NO: 1504; WAN024G7R; Start 194; Stop 218
cagataccaaagaactcaagaccat

SEQ ID NO: 296279 - DNA, 25 bp, Artificial
  probe
  misc_feature (1)..(25): SEQ ID NO: 1504; WAN024G7R; Start 258; Stop 282
tgactctagcttacagttgtattca

SEQ ID NO: 296280 - DNA, 25 bp, Artificial
  probe
  misc_feature (1)..(25): SEQ ID NO: 1504; WAN024G7R; Start 192; Stop 216
aacagataccaaagaactcaagacc

SEQ ID NO: 296281 - DNA, 25 bp, Artificial
  probe
  misc_feature (1)..(25): SEQ ID NO: 1504; WAN024G7R; Start 188; Stop 212
cctcaacagataccaaagaactcaa

SEQ ID NO: 296282 - DNA, 25 bp, Artificial
  probe
  misc_feature (1)..(25): SEQ ID NO: 1504; WAN024G7R; Start 100; Stop 124
gaaacctatgtccaacctgaatatg

SEQ ID NO: 296283 - DNA, 25 bp, Artificial
  probe
  misc_feature (1)..(25): SEQ ID NO: 1504; WAN024G7R; Start 97; Stop 121
gatgaaacctatgtccaacctgaat

SEQ ID NO: 296284 - DNA, 25 bp, Artificial
  probe
  misc_feature (1)..(25): SEQ ID NO: 1504; WAN024G7R; Start 827; Stop 851
ttaaacaaagcatcgtatcacaagc

SEQ ID NO: 296285 - DNA, 25 bp, Artificial
  probe
  misc_feature (1)..(25): SEQ ID NO: 1504; WAN024G7R; Start 825; Stop 849
ccttaaacaaagcatcgtatcacaa

SEQ ID NO: 296286 - DNA, 25 bp, Artificial
  probe
  misc_feature (1)..(25): SEQ ID NO: 1504; WAN024G7R; Start 181; Stop 205
tacaatgcctcaacagataccaaag

SEQ ID NO: 296287 - DNA, 25 bp, Artificial
  probe
  misc_feature (1)..(25): SEQ ID NO: 1504; WAN024G7R; Start 180; Stop 204
ctacaatgcctcaacagataccaaa

SEQ ID NO: 296288 - DNA, 25 bp, Artificial
  probe
  misc_feature (1)..(25): SEQ ID NO: 1504; WAN024G7R; Start 821; Stop 845
atgaccttaaacaaagcatcgtatc

SEQ ID NO: 296289 - DNA, 25 bp, Artificial
  probe
  misc_feature (1)..(25): SEQ ID NO: 1504; WAN024G7R; Start 823; Stop 847
gaccttaaacaaagcatcgtatcac

SEQ ID NO: 296290 - DNA, 25 bp, Artificial
  probe
  misc_feature (1)..(25): SEQ ID NO: 1505; WAN024GFE; Start 7; Stop 31
aagaccagaaagatggaaataacca

SEQ ID NO: 296291 - DNA, 25 bp, Artificial
  probe
  misc_feature (1)..(25): SEQ ID NO: 1505; WAN024GFE; Start 2; Stop 26
tgagaaagaccagaaagatggaaat

SEQ ID NO: 296292 - DNA, 25 bp, Artificial
  probe
  misc_feature (1)..(25): SEQ ID NO: 1505; WAN024GFE; Start 1; Stop 25
atgagaaagaccagaaagatggaaa

SEQ ID NO: 296293 - DNA, 25 bp, Artificial
  probe
  misc_feature (1)..(25): SEQ ID NO: 1505; WAN024GFE; Start 6; Stop 30
aaagaccagaaagatggaaataacc

SEQ ID NO: 296294 - DNA, 25 bp, Artificial
  probe
  misc_feature (1)..(25): SEQ ID NO: 1505; WAN024GFE; Start 3; Stop 27
gagaaagaccagaaagatggaaata

SEQ ID NO: 296295 - DNA, 25 bp, Artificial
  probe
  misc_feature (1)..(25): SEQ ID NO: 1505; WAN024GFE; Start 5; Stop 29
gaaagaccagaaagatggaaataac

SEQ ID NO: 296296 - DNA, 25 bp, Artificial
  probe
  misc_feature (1)..(25): SEQ ID NO: 1505; WAN024GFE; Start 4; Stop 28
agaaagaccagaaagatggaaataa

SEQ ID NO: 296297 - DNA, 25 bp, Artificial
  probe
  misc_feature (1)..(25): SEQ ID NO: 1505; WAN024GFE; Start 8; Stop 32
agaccagaaagatggaaataaccat

SEQ ID NO: 296298 - DNA, 25 bp, Artificial
  probe
  misc_feature (1)..(25): SEQ ID NO: 1505; WAN024GFE; Start 10; Stop 34
accagaaagatggaaataaccattc

SEQ ID NO: 296299 - DNA, 25 bp, Artificial
  probe
  misc_feature (1)..(25): SEQ ID NO: 1505; WAN024GFE; Start 9; Stop 33
gaccagaaagatggaaataaccatt

SEQ ID NO: 296300 - DNA, 25 bp, Artificial
  probe
  misc_feature (1)..(25): SEQ ID NO: 1505; WAN024GFE; Start 11; Stop 35
ccagaaagatggaaataaccattct

SEQ ID NO: 296301 - DNA, 25 bp, Artificial
  probe
  misc_feature (1)..(25): SEQ ID NO: 1505; WAN024GFE; Start 32; Stop 56
ttctaactaaaagagaagaacgctt

SEQ ID NO: 296302 - DNA, 25 bp, Artificial
  probe
  misc_feature (1)..(25): SEQ ID NO: 1505; WAN024GFE; Start 42; Stop 66
aagagaagaacgcttcatcggtctt

SEQ ID NO: 296303 - DNA, 25 bp, Artificial
  probe
  misc_feature (1)..(25): SEQ ID NO: 1505; WAN024GFE; Start 31; Stop 55
attctaactaaaagagaagaacgct

SEQ ID NO: 296304 - DNA, 25 bp, Artificial
  probe
  misc_feature (1)..(25): SEQ ID NO: 1505; WAN024GFE; Start 30; Stop 54
cattctaactaaaagagaagaacgc

SEQ ID NO: 296305 - DNA, 25 bp, Artificial
  probe
  misc_feature (1)..(25): SEQ ID NO: 1505; WAN024GFE; Start 36; Stop 60
aactaaaagagaagaacgcttcatc

SEQ ID NO: 296306 - DNA, 25 bp, Artificial
  probe
  misc_feature (1)..(25): SEQ ID NO: 1505; WAN024GFE; Start 34; Stop 58
ctaactaaaagagaagaacgcttca

SEQ ID NO: 296307 - DNA, 25 bp, Artificial
  probe
  misc_feature (1)..(25): SEQ ID NO: 1505; WAN024GFE; Start 29; Stop 53
ccattctaactaaaagagaagaacg

SEQ ID NO: 296308 - DNA, 25 bp, Artificial
  probe
  misc_feature (1)..(25): SEQ ID NO: 1505; WAN024GFE; Start 33; Stop 57
tctaactaaaagagaagaacgcttc

SEQ ID NO: 296309 - DNA, 25 bp, Artificial
  probe
  misc_feature (1)..(25): SEQ ID NO: 1505; WAN024GFE; Start 37; Stop 61
actaaaagagaagaacgcttcatcg

SEQ ID NO: 296310 - DNA, 25 bp, Artificial
  probe
  misc_feature (1)..(25): SEQ ID NO: 1505; WAN024GFE; Start 35; Stop 59
taactaaaagagaagaacgcttcat

SEQ ID NO: 296311 - DNA, 25 bp, Artificial
  probe
  misc_feature (1)..(25): SEQ ID NO: 1505; WAN024GFE; Start 38; Stop 62
ctaaaagagaagaacgcttcatcgg

SEQ ID NO: 296312 - DNA, 25 bp, Artificial
  probe
  misc_feature (1)..(25): SEQ ID NO: 1505; WAN024GFE; Start 12; Stop 36
cagaaagatggaaataaccattcta

SEQ ID NO: 296313 - DNA, 25 bp, Artificial
  probe
  misc_feature (1)..(25): SEQ ID NO: 1505; WAN024GFE; Start 39; Stop 63
taaaagagaagaacgcttcatcggt

SEQ ID NO: 296314 - DNA, 25 bp, Artificial
  probe
  misc_feature (1)..(25): SEQ ID NO: 1505; WAN024GFE; Start 28; Stop 52
accattctaactaaaagagaagaac

SEQ ID NO: 296315 - DNA, 25 bp, Artificial
  probe
  misc_feature (1)..(25): SEQ ID NO: 1505; WAN024GFE; Start 41; Stop 65
aaagagaagaacgcttcatcggtct

SEQ ID NO: 296316 - DNA, 25 bp, Artificial
  probe
  misc_feature (1)..(25): SEQ ID NO: 1505; WAN024GFE; Start 15; Stop 39
aaagatggaaataaccattctaact

SEQ ID NO: 296317 - DNA, 25 bp, Artificial
  probe
  misc_feature (1)..(25): SEQ ID NO: 1505; WAN024GFE; Start 14; Stop 38
gaaagatggaaataaccattctaac

SEQ ID NO: 296318 - DNA, 25 bp, Artificial
  probe
  misc_feature (1)..(25): SEQ ID NO: 1505; WAN024GFE; Start 13; Stop 37
agaaagatggaaataaccattctaa

SEQ ID NO: 296319 - DNA, 25 bp, Artificial
  probe
  misc_feature (1)..(25): SEQ ID NO: 1505; WAN024GFE; Start 27; Stop 51
aaccattctaactaaaagagaagaa

SEQ ID NO: 296320 - DNA, 25 bp, Artificial
  probe
  misc_feature (1)..(25): SEQ ID NO: 1505; WAN024GFE; Start 40; Stop 64
aaaagagaagaacgcttcatcggtc

SEQ ID NO: 296321 - DNA, 25 bp, Artificial
  probe
  misc_feature (1)..(25): SEQ ID NO: 1505; WAN024GFE; Start 21; Stop 45
ggaaataaccattctaactaaaaga

SEQ ID NO: 296322 - DNA, 25 bp, Artificial
  probe
  misc_feature (1)..(25): SEQ ID NO: 1505; WAN024GFE; Start 17; Stop 41
agatggaaataaccattctaactaa

SEQ ID NO: 296323 - DNA, 25 bp, Artificial
  probe
  misc_feature (1)..(25): SEQ ID NO: 1506; WAN024DH6; Start 1; Stop 25
atgagaaaggaatttcacaacgttt

SEQ ID NO: 296324 - DNA, 25 bp, Artificial
  probe
  misc_feature (1)..(25): SEQ ID NO: 1506; WAN024DH6; Start 9; Stop 33
ggaatttcacaacgttttatctagt

SEQ ID NO: 296325 - DNA, 25 bp, Artificial
  probe
  misc_feature (1)..(25): SEQ ID NO: 1506; WAN024DH6; Start 6; Stop 30
aaaggaatttcacaacgttttatct

SEQ ID NO: 296326 - DNA, 25 bp, Artificial
  probe
  misc_feature (1)..(25): SEQ ID NO: 1506; WAN024DH6; Start 8; Stop 32
aggaatttcacaacgttttatctag

SEQ ID NO: 296327 - DNA, 25 bp, Artificial
  probe
  misc_feature (1)..(25): SEQ ID NO: 1506; WAN024DH6; Start 2; Stop 26
tgagaaaggaatttcacaacgtttt

SEQ ID NO: 296328 - DNA, 25 bp, Artificial
  probe
  misc_feature (1)..(25): SEQ ID NO: 1506; WAN024DH6; Start 7; Stop 31
aaggaatttcacaacgttttatcta

SEQ ID NO: 296329 - DNA, 25 bp, Artificial
  probe
  misc_feature (1)..(25): SEQ ID NO: 1506; WAN024DH6; Start 3; Stop 27
gagaaaggaatttcacaacgtttta

SEQ ID NO: 296330 - DNA, 25 bp, Artificial
  probe
  misc_feature (1)..(25): SEQ ID NO: 1506; WAN024DH6; Start 4; Stop 28
agaaaggaatttcacaacgttttat

SEQ ID NO: 296331 - DNA, 25 bp, Artificial
  probe
  misc_feature (1)..(25): SEQ ID NO: 1506; WAN024DH6; Start 5; Stop 29
gaaaggaatttcacaacgttttatc

SEQ ID NO: 296332 - DNA, 25 bp, Artificial
  probe
  misc_feature (1)..(25): SEQ ID NO: 1506; WAN024DH6; Start 10; Stop 34
gaatttcacaacgttttatctagtg

SEQ ID NO: 296333 - DNA, 25 bp, Artificial
  probe
  misc_feature (1)..(25): SEQ ID NO: 1507; WAN024EV8; Start 819; Stop 843
agaatcaggtgtagataagttgacg

SEQ ID NO: 296334 - DNA, 25 bp, Artificial
  probe
  misc_feature (1)..(25): SEQ ID NO: 1507; WAN024EV8; Start 818; Stop 842
cagaatcaggtgtagataagttgac

SEQ ID NO: 296335 - DNA, 25 bp, Artificial
  probe
  misc_feature (1)..(25): SEQ ID NO: 1507; WAN024EV8; Start 817; Stop 841
acagaatcaggtgtagataagttga

SEQ ID NO: 296336 - DNA, 25 bp, Artificial
  probe
  misc_feature (1)..(25): SEQ ID NO: 1507; WAN024EV8; Start 815; Stop 839
tgacagaatcaggtgtagataagtt

SEQ ID NO: 296337 - DNA, 25 bp, Artificial
  probe
  misc_feature (1)..(25): SEQ ID NO: 1507; WAN024EV8; Start 814; Stop 838
ttgacagaatcaggtgtagataagt

SEQ ID NO: 296338 - DNA, 25 bp, Artificial
  probe
  misc_feature (1)..(25): SEQ ID NO: 1507; WAN024EV8; Start 820; Stop 844
gaatcaggtgtagataagttgacgc

SEQ ID NO: 296339 - DNA, 25 bp, Artificial
  probe
  misc_feature (1)..(25): SEQ ID NO: 1507; WAN024EV8; Start 816; Stop 840
gacagaatcaggtgtagataagttg

SEQ ID NO: 296340 - DNA, 25 bp, Artificial
  probe
  misc_feature (1)..(25): SEQ ID NO: 1507; WAN024EV8; Start 981; Stop 1005
tattcgtgcagtaaccatgtcatat

SEQ ID NO: 296341 - DNA, 25 bp, Artificial
  probe
  misc_feature (1)..(25): SEQ ID NO: 1507; WAN024EV8; Start 980; Stop 1004
ttattcgtgcagtaaccatgtcata

SEQ ID NO: 296342 - DNA, 25 bp, Artificial
  probe
  misc_feature (1)..(25): SEQ ID NO: 1507; WAN024EV8; Start 374; Stop 398
ttgtagatccacttgcagatattga

SEQ ID NO: 296343 - DNA, 25 bp, Artificial
  probe
  misc_feature (1)..(25): SEQ ID NO: 1507; WAN024EV8; Start 375; Stop 399
tgtagatccacttgcagatattgat

SEQ ID NO: 296344 - DNA, 25 bp, Artificial
  probe
  misc_feature (1)..(25): SEQ ID NO: 1507; WAN024EV8; Start 431; Stop 455
tagaatcagtgaacaaacgatatgc

SEQ ID NO: 296345 - DNA, 25 bp, Artificial
  probe
  misc_feature (1)..(25): SEQ ID NO: 1507; WAN024EV8; Start 721; Stop 745
aatgctgaagtagtcgttatttctg

SEQ ID NO: 296346 - DNA, 25 bp, Artificial
  probe
  misc_feature (1)..(25): SEQ ID NO: 1507; WAN024EV8; Start 1085; Stop 1109
ttcaagatggcgatatcatggaatt

SEQ ID NO: 296347 - DNA, 25 bp, Artificial
  probe
  misc_feature (1)..(25): SEQ ID NO: 1507; WAN024EV8; Start 617; Stop 641
cgactaaaccagttctttatgtagc

SEQ ID NO: 296348 - DNA, 25 bp, Artificial
  probe
  misc_feature (1)..(25): SEQ ID NO: 1507; WAN024EV8; Start 614; Stop 638
tgacgactaaaccagttctttatgt

SEQ ID NO: 296349 - DNA, 25 bp, Artificial
  probe
  misc_feature (1)..(25): SEQ ID NO: 1507; WAN024EV8; Start 196; Stop 220
acagttcccacaacatttgaattta

SEQ ID NO: 296350 - DNA, 25 bp, Artificial
  probe
  misc_feature (1)..(25): SEQ ID NO: 1507; WAN024EV8; Start 426; Stop 450
tgacttagaatcagtgaacaaacga

SEQ ID NO: 296351 - DNA, 25 bp, Artificial
  probe
  misc_feature (1)..(25): SEQ ID NO: 1507; WAN024EV8; Start 287; Stop 311
atattcgtgaagtagatgcgattgt

SEQ ID NO: 296352 - DNA, 25 bp, Artificial
  probe
  misc_feature (1)..(25): SEQ ID NO: 1507; WAN024EV8; Start 197; Stop 221
cagttcccacaacatttgaatttac

SEQ ID NO: 296353 - DNA, 25 bp, Artificial
  probe
  misc_feature (1)..(25): SEQ ID NO: 1507; WAN024EV8; Start 195; Stop 219
gacagttcccacaacatttgaattt

SEQ ID NO: 296354 - DNA, 25 bp, Artificial
  probe
  misc_feature (1)..(25): SEQ ID NO: 1507; WAN024EV8; Start 666; Stop 690
agaacctgactctatcgactatgtc

SEQ ID NO: 296355 - DNA, 25 bp, Artificial
  probe
  misc_feature (1)..(25): SEQ ID NO: 1507; WAN024EV8; Start 427; Stop 451
gacttagaatcagtgaacaaacgat

SEQ ID NO: 296356 - DNA, 25 bp, Artificial
  probe
  misc_feature (1)..(25): SEQ ID NO: 1507; WAN024EV8; Start 613; Stop 637
ttgacgactaaaccagttctttatg

SEQ ID NO: 296357 - DNA, 25 bp, Artificial
  probe
  misc_feature (1)..(25): SEQ ID NO: 1507; WAN024EV8; Start 288; Stop 312
tattcgtgaagtagatgcgattgtt

SEQ ID NO: 296358 - DNA, 25 bp, Artificial
  probe
  misc_feature (1)..(25): SEQ ID NO: 1507; WAN024EV8; Start 722; Stop 746
atgctgaagtagtcgttatttctgc

SEQ ID NO: 296359 - DNA, 25 bp, Artificial
  probe
  misc_feature (1)..(25): SEQ ID NO: 1507; WAN024EV8; Start 1073; Stop 1097
aagaatatatcgttcaagatggcga

SEQ ID NO: 296360 - DNA, 25 bp, Artificial
  probe
  misc_feature (1)..(25): SEQ ID NO: 1507; WAN024EV8; Start 1084; Stop 1108
gttcaagatggcgatatcatggaat

SEQ ID NO: 296361 - DNA, 25 bp, Artificial
  probe
  misc_feature (1)..(25): SEQ ID NO: 1507; WAN024EV8; Start 862; Stop 886
cttggattgggaacttacttcacag

SEQ ID NO: 296362 - DNA, 25 bp, Artificial
  probe
  misc_feature (1)..(25): SEQ ID NO: 1507; WAN024EV8; Start 665; Stop 689
cagaacctgactctatcgactatgt

SEQ ID NO: 296363 - DNA, 25 bp, Artificial
  probe
  misc_feature (1)..(25): SEQ ID NO: 1507; WAN024EV8; Start 193; Stop 217
aagacagttcccacaacatttgaat

SEQ ID NO: 296364 - DNA, 25 bp, Artificial
  probe
  misc_feature (1)..(25): SEQ ID NO: 1507; WAN024EV8; Start 811; Stop 835
ggtttgacagaatcaggtgtagata

SEQ ID NO: 296365 - DNA, 25 bp, Artificial
  probe
  misc_feature (1)..(25): SEQ ID NO: 1507; WAN024EV8; Start 1072; Stop 1096
aaagaatatatcgttcaagatggcg

SEQ ID NO: 296366 - DNA, 25 bp, Artificial
  probe
  misc_feature (1)..(25): SEQ ID NO: 1508; WAN024CZ7; Start 576; Stop 600
cttcgctgattacattgctaacatt

SEQ ID NO: 296367 - DNA, 25 bp, Artificial
  probe
  misc_feature (1)..(25): SEQ ID NO: 1508; WAN024CZ7; Start 241; Stop 265
attagcatcatgtcttcttgttcag

SEQ ID NO: 296368 - DNA, 25 bp, Artificial
  probe
  misc_feature (1)..(25): SEQ ID NO: 1508; WAN024CZ7; Start 242; Stop 266
ttagcatcatgtcttcttgttcaga

SEQ ID NO: 296369 - DNA, 25 bp, Artificial
  probe
  misc_feature (1)..(25): SEQ ID NO: 1508; WAN024CZ7; Start 575; Stop 599
gcttcgctgattacattgctaacat

SEQ ID NO: 296370 - DNA, 25 bp, Artificial
  probe
  misc_feature (1)..(25): SEQ ID NO: 1508; WAN024CZ7; Start 122; Stop 146
tggcagagctaattatcaataagga

SEQ ID NO: 296371 - DNA, 25 bp, Artificial
  probe
  misc_feature (1)..(25): SEQ ID NO: 1508; WAN024CZ7; Start 117; Stop 141
ggagatggcagagctaattatcaat

SEQ ID NO: 296372 - DNA, 25 bp, Artificial
  probe
  misc_feature (1)..(25): SEQ ID NO: 1508; WAN024CZ7; Start 114; Stop 138
caaggagatggcagagctaattatc

SEQ ID NO: 296373 - DNA, 25 bp, Artificial
  probe
  misc_feature (1)..(25): SEQ ID NO: 1508; WAN024CZ7; Start 121; Stop 145
atggcagagctaattatcaataagg

SEQ ID NO: 296374 - DNA, 25 bp, Artificial
  probe
  misc_feature (1)..(25): SEQ ID NO: 1508; WAN024CZ7; Start 116; Stop 140
aggagatggcagagctaattatcaa

SEQ ID NO: 296375 - DNA, 25 bp, Artificial
  probe
  misc_feature (1)..(25): SEQ ID NO: 1508; WAN024CZ7; Start 115; Stop 139
aaggagatggcagagctaattatca

SEQ ID NO: 296376 - DNA, 25 bp, Artificial
  probe
  misc_feature (1)..(25): SEQ ID NO: 1508; WAN024CZ7; Start 577; Stop 601
ttcgctgattacattgctaacattt

SEQ ID NO: 296377 - DNA, 25 bp, Artificial
  probe
  misc_feature (1)..(25): SEQ ID NO: 1508; WAN024CZ7; Start 551; Stop 575
tttatatcatagggcatctggaacg

SEQ ID NO: 296378 - DNA, 25 bp, Artificial
  probe
  misc_feature (1)..(25): SEQ ID NO: 1508; WAN024CZ7; Start 578; Stop 602
tcgctgattacattgctaacatttg

SEQ ID NO: 296379 - DNA, 25 bp, Artificial
  probe
  misc_feature (1)..(25): SEQ ID NO: 1508; WAN024CZ7; Start 113; Stop 137
acaaggagatggcagagctaattat

SEQ ID NO: 296380 - DNA, 25 bp, Artificial
  probe
  misc_feature (1)..(25): SEQ ID NO: 1508; WAN024CZ7; Start 123; Stop 147
ggcagagctaattatcaataaggat

SEQ ID NO: 296381 - DNA, 25 bp, Artificial
  probe
  misc_feature (1)..(25): SEQ ID NO: 1508; WAN024CZ7; Start 503; Stop 527
gacttatgaaagaccaagaaacctc

SEQ ID NO: 296382 - DNA, 25 bp, Artificial
  probe
  misc_feature (1)..(25): SEQ ID NO: 1508; WAN024CZ7; Start 118; Stop 142
gagatggcagagctaattatcaata

SEQ ID NO: 296383 - DNA, 25 bp, Artificial
  probe
  misc_feature (1)..(25): SEQ ID NO: 1508; WAN024CZ7; Start 502; Stop 526
ggacttatgaaagaccaagaaacct

SEQ ID NO: 296384 - DNA, 25 bp, Artificial
  probe
  misc_feature (1)..(25): SEQ ID NO: 1508; WAN024CZ7; Start 550; Stop 574
ctttatatcatagggcatctggaac

SEQ ID NO: 296385 - DNA, 25 bp, Artificial
  probe
  misc_feature (1)..(25): SEQ ID NO: 1508; WAN024CZ7; Start 593; Stop 617
ctaacatttgtgaacgcctagtcta

SEQ ID NO: 296386 - DNA, 25 bp, Artificial
  probe
  misc_feature (1)..(25): SEQ ID NO: 1508; WAN024CZ7; Start 393; Stop 417
cgatttattggttgcctttcctttg

SEQ ID NO: 296387 - DNA, 25 bp, Artificial
  probe
  misc_feature (1)..(25): SEQ ID NO: 1508; WAN024CZ7; Start 504; Stop 528
acttatgaaagaccaagaaacctca

SEQ ID NO: 296388 - DNA, 25 bp, Artificial
  probe
  misc_feature (1)..(25): SEQ ID NO: 1508; WAN024CZ7; Start 594; Stop 618
taacatttgtgaacgcctagtctac

SEQ ID NO: 296389 - DNA, 25 bp, Artificial
  probe
  misc_feature (1)..(25): SEQ ID NO: 1508; WAN024CZ7; Start 112; Stop 136
gacaaggagatggcagagctaatta

SEQ ID NO: 296390 - DNA, 25 bp, Artificial
  probe
  misc_feature (1)..(25): SEQ ID NO: 1508; WAN024CZ7; Start 508; Stop 532
atgaaagaccaagaaacctcaattc

SEQ ID NO: 296391 - DNA, 25 bp, Artificial
  probe
  misc_feature (1)..(25): SEQ ID NO: 1508; WAN024CZ7; Start 394; Stop 418
gatttattggttgcctttcctttgc

SEQ ID NO: 296392 - DNA, 25 bp, Artificial
  probe
  misc_feature (1)..(25): SEQ ID NO: 1508; WAN024CZ7; Start 119; Stop 143
agatggcagagctaattatcaataa

SEQ ID NO: 296393 - DNA, 25 bp, Artificial
  probe
  misc_feature (1)..(25): SEQ ID NO: 1508; WAN024CZ7; Start 505; Stop 529
cttatgaaagaccaagaaacctcaa

SEQ ID NO: 296394 - DNA, 25 bp, Artificial
  probe
  misc_feature (1)..(25): SEQ ID NO: 1508; WAN024CZ7; Start 342; Stop 366
tgacgaagaacagttacaccaaatg

SEQ ID NO: 296395 - DNA, 25 bp, Artificial
  probe
  misc_feature (1)..(25): SEQ ID NO: 1508; WAN024CZ7; Start 120; Stop 144
gatggcagagctaattatcaataag

SEQ ID NO: 296396 - DNA, 25 bp, Artificial
  probe
  misc_feature (1)..(25): SEQ ID NO: 1508; WAN024CZ7; Start 580; Stop 604
gctgattacattgctaacatttgtg

SEQ ID NO: 296397 - DNA, 25 bp, Artificial
  probe
  misc_feature (1)..(25): SEQ ID NO: 1508; WAN024CZ7; Start 579; Stop 603
cgctgattacattgctaacatttgt

SEQ ID NO: 296398 - DNA, 25 bp, Artificial
  probe
  misc_feature (1)..(25): SEQ ID NO: 1508; WAN024CZ7; Start 506; Stop 530
ttatgaaagaccaagaaacctcaat

SEQ ID NO: 296399 - DNA, 25 bp, Artificial
  probe
  misc_feature (1)..(25): SEQ ID NO: 1509; WAN024CV5; Start 788; Stop 812
ctatctcactgaataccttgctctt

SEQ ID NO: 296400 - DNA, 25 bp, Artificial
  probe
  misc_feature (1)..(25): SEQ ID NO: 1509; WAN024CV5; Start 784; Stop 808
gatgctatctcactgaataccttgc

SEQ ID NO: 296401 - DNA, 25 bp, Artificial
  probe
  misc_feature (1)..(25): SEQ ID NO: 1509; WAN024CV5; Start 785; Stop 809
atgctatctcactgaataccttgct

SEQ ID NO: 296402 - DNA, 25 bp, Artificial
  probe
  misc_feature (1)..(25): SEQ ID NO: 1509; WAN024CV5; Start 1122; Stop 1146
catgtatgctagtctcgttcttcaa

SEQ ID NO: 296403 - DNA, 25 bp, Artificial
  probe
  misc_feature (1)..(25): SEQ ID NO: 1509; WAN024CV5; Start 787; Stop 811
gctatctcactgaataccttgctct

SEQ ID NO: 296404 - DNA, 25 bp, Artificial
  probe
  misc_feature (1)..(25): SEQ ID NO: 1509; WAN024CV5; Start 181; Stop 205
gtagcagaaggactgaagaatgtaa

SEQ ID NO: 296405 - DNA, 25 bp, Artificial
  probe
  misc_feature (1)..(25): SEQ ID NO: 1509; WAN024CV5; Start 538; Stop 562
tatatgattctgattacctatgcgg

SEQ ID NO: 296406 - DNA, 25 bp, Artificial
  probe
  misc_feature (1)..(25): SEQ ID NO: 1509; WAN024CV5; Start 786; Stop 810
tgctatctcactgaataccttgctc

SEQ ID NO: 296407 - DNA, 25 bp, Artificial
  probe
  misc_feature (1)..(25): SEQ ID NO: 1509; WAN024CV5; Start 395; Stop 419
ttaatcgttcaactgcttccttgtc

SEQ ID NO: 296408 - DNA, 25 bp, Artificial
  probe
  misc_feature (1)..(25): SEQ ID NO: 1509; WAN024CV5; Start 394; Stop 418
cttaatcgttcaactgcttccttgt

SEQ ID NO: 296409 - DNA, 25 bp, Artificial
  probe
  misc_feature (1)..(25): SEQ ID NO: 1509; WAN024CV5; Start 359; Stop 383
aggttacaggtacactcaatgaact

SEQ ID NO: 296410 - DNA, 25 bp, Artificial
  probe
  misc_feature (1)..(25): SEQ ID NO: 1509; WAN024CV5; Start 180; Stop 204
tgtagcagaaggactgaagaatgta

SEQ ID NO: 296411 - DNA, 25 bp, Artificial
  probe
  misc_feature (1)..(25): SEQ ID NO: 1509; WAN024CV5; Start 358; Stop 382
gaggttacaggtacactcaatgaac

SEQ ID NO: 296412 - DNA, 25 bp, Artificial
  probe
  misc_feature (1)..(25): SEQ ID NO: 1509; WAN024CV5; Start 396; Stop 420
taatcgttcaactgcttccttgtct

SEQ ID NO: 296413 - DNA, 25 bp, Artificial
  probe
  misc_feature (1)..(25): SEQ ID NO: 1509; WAN024CV5; Start 360; Stop 384
ggttacaggtacactcaatgaactg

SEQ ID NO: 296414 - DNA, 25 bp, Artificial
  probe
  misc_feature (1)..(25): SEQ ID NO: 1509; WAN024CV5; Start 187; Stop 211
gaaggactgaagaatgtaaatggtg

SEQ ID NO: 296415 - DNA, 25 bp, Artificial
  probe
  misc_feature (1)..(25): SEQ ID NO: 1509; WAN024CV5; Start 186; Stop 210
agaaggactgaagaatgtaaatggt

SEQ ID NO: 296416 - DNA, 25 bp, Artificial
  probe
  misc_feature (1)..(25): SEQ ID NO: 1509; WAN024CV5; Start 539; Stop 563
atatgattctgattacctatgcggg

SEQ ID NO: 296417 - DNA, 25 bp, Artificial
  probe
  misc_feature (1)..(25): SEQ ID NO: 1509; WAN024CV5; Start 189; Stop 213
aggactgaagaatgtaaatggtgtt

SEQ ID NO: 296418 - DNA, 25 bp, Artificial
  probe
  misc_feature (1)..(25): SEQ ID NO: 1509; WAN024CV5; Start 188; Stop 212
aaggactgaagaatgtaaatggtgt

SEQ ID NO: 296419 - DNA, 25 bp, Artificial
  probe
  misc_feature (1)..(25): SEQ ID NO: 1509; WAN024CV5; Start 1146; Stop 1170
aacggatgatttagggatttggaaa

SEQ ID NO: 296420 - DNA, 25 bp, Artificial
  probe
  misc_feature (1)..(25): SEQ ID NO: 1509; WAN024CV5; Start 1145; Stop 1169
aaacggatgatttagggatttggaa

SEQ ID NO: 296421 - DNA, 25 bp, Artificial
  probe
  misc_feature (1)..(25): SEQ ID NO: 1509; WAN024CV5; Start 791; Stop 815
tctcactgaataccttgctctttat

SEQ ID NO: 296422 - DNA, 25 bp, Artificial
  probe
  misc_feature (1)..(25): SEQ ID NO: 1509; WAN024CV5; Start 790; Stop 814
atctcactgaataccttgctcttta

SEQ ID NO: 296423 - DNA, 25 bp, Artificial
  probe
  misc_feature (1)..(25): SEQ ID NO: 1509; WAN024CV5; Start 789; Stop 813
tatctcactgaataccttgctcttt

SEQ ID NO: 296424 - DNA, 25 bp, Artificial
  probe
  misc_feature (1)..(25): SEQ ID NO: 1509; WAN024CV5; Start 626; Stop 650
gcataagggcaagtcactatttcta

SEQ ID NO: 296425 - DNA, 25 bp, Artificial
  probe
  misc_feature (1)..(25): SEQ ID NO: 1509; WAN024CV5; Start 624; Stop 648
tagcataagggcaagtcactatttc

SEQ ID NO: 296426 - DNA, 25 bp, Artificial
  probe
  misc_feature (1)..(25): SEQ ID NO: 1509; WAN024CV5; Start 93; Stop 117
tttaggaatctctgtaggaattggg

SEQ ID NO: 296427 - DNA, 25 bp, Artificial
  probe
  misc_feature (1)..(25): SEQ ID NO: 1509; WAN024CV5; Start 190; Stop 214
ggactgaagaatgtaaatggtgtta

SEQ ID NO: 296428 - DNA, 25 bp, Artificial
  probe
  misc_feature (1)..(25): SEQ ID NO: 1509; WAN024CV5; Start 783; Stop 807
agatgctatctcactgaataccttg

SEQ ID NO: 296429 - DNA, 25 bp, Artificial
  probe
  misc_feature (1)..(25): SEQ ID NO: 1509; WAN024CV5; Start 516; Stop 540
aggtgccttaggattctttctttat

SEQ ID NO: 296430 - DNA, 25 bp, Artificial
  probe
  misc_feature (1)..(25): SEQ ID NO: 1509; WAN024CV5; Start 515; Stop 539
caggtgccttaggattctttcttta

SEQ ID NO: 296431 - DNA, 25 bp, Artificial
  probe
  misc_feature (1)..(25): SEQ ID NO: 1509; WAN024CV5; Start 179; Stop 203
ctgtagcagaaggactgaagaatgt

SEQ ID NO: 296432 - DNA, 25 bp, Artificial
  probe
  misc_feature (1)..(25): SEQ ID NO: 1510; WAN024DBA; Start 142; Stop 166
ttatggattatcgcaccagtagcaa

SEQ ID NO: 296433 - DNA, 25 bp, Artificial
  probe
  misc_feature (1)..(25): SEQ ID NO: 1510; WAN024DBA; Start 94; Stop 118
ggtgttcttacttgctgttacggag

SEQ ID NO: 296434 - DNA, 25 bp, Artificial
  probe
  misc_feature (1)..(25): SEQ ID NO: 1510; WAN024DBA; Start 143; Stop 167
tatggattatcgcaccagtagcaac

SEQ ID NO: 296435 - DNA, 25 bp, Artificial
  probe
  misc_feature (1)..(25): SEQ ID NO: 1510; WAN024DBA; Start 141; Stop 165
tttatggattatcgcaccagtagca

SEQ ID NO: 296436 - DNA, 25 bp, Artificial
  probe
  misc_feature (1)..(25): SEQ ID NO: 1510; WAN024DBA; Start 144; Stop 168
atggattatcgcaccagtagcaact

SEQ ID NO: 296437 - DNA, 25 bp, Artificial
  probe
  misc_feature (1)..(25): SEQ ID NO: 1510; WAN024DBA; Start 134; Stop 158
acattattttatggattatcgcacc

SEQ ID NO: 296438 - DNA, 25 bp, Artificial
  probe
  misc_feature (1)..(25): SEQ ID NO: 1510; WAN024DBA; Start 89; Stop 113
tttggggtgttcttacttgctgtta

SEQ ID NO: 296439 - DNA, 25 bp, Artificial
  probe
  misc_feature (1)..(25): SEQ ID NO: 1510; WAN024DBA; Start 118; Stop 142
gctggaattgtagcttacattattt

SEQ ID NO: 296440 - DNA, 25 bp, Artificial
  probe
  misc_feature (1)..(25): SEQ ID NO: 1510; WAN024DBA; Start 139; Stop 163
attttatggattatcgcaccagtag

SEQ ID NO: 296441 - DNA, 25 bp, Artificial
  probe
  misc_feature (1)..(25): SEQ ID NO: 1510; WAN024DBA; Start 95; Stop 119
gtgttcttacttgctgttacggagc

SEQ ID NO: 296442 - DNA, 25 bp, Artificial
  probe
  misc_feature (1)..(25): SEQ ID NO: 1510; WAN024DBA; Start 140; Stop 164
ttttatggattatcgcaccagtagc

SEQ ID NO: 296443 - DNA, 25 bp, Artificial
  probe
  misc_feature (1)..(25): SEQ ID NO: 1510; WAN024DBA; Start 137; Stop 161
ttattttatggattatcgcaccagt

SEQ ID NO: 296444 - DNA, 25 bp, Artificial
  probe
  misc_feature (1)..(25): SEQ ID NO: 1510; WAN024DBA; Start 88; Stop 112
atttggggtgttcttacttgctgtt

SEQ ID NO: 296445 - DNA, 25 bp, Artificial
  probe
  misc_feature (1)..(25): SEQ ID NO: 1510; WAN024DBA; Start 97; Stop 121
gttcttacttgctgttacggagctg

SEQ ID NO: 296446 - DNA, 25 bp, Artificial
  probe
  misc_feature (1)..(25): SEQ ID NO: 1510; WAN024DBA; Start 90; Stop 114
ttggggtgttcttacttgctgttac

SEQ ID NO: 296447 - DNA, 25 bp, Artificial
  probe
  misc_feature (1)..(25): SEQ ID NO: 1510; WAN024DBA; Start 115; Stop 139
ggagctggaattgtagcttacatta

SEQ ID NO: 296448 - DNA, 25 bp, Artificial
  probe
  misc_feature (1)..(25): SEQ ID NO: 1510; WAN024DBA; Start 138; Stop 162
tattttatggattatcgcaccagta

SEQ ID NO: 296449 - DNA, 25 bp, Artificial
  probe
  misc_feature (1)..(25): SEQ ID NO: 1510; WAN024DBA; Start 93; Stop 117
gggtgttcttacttgctgttacgga

SEQ ID NO: 296450 - DNA, 25 bp, Artificial
  probe
  misc_feature (1)..(25): SEQ ID NO: 1510; WAN024DBA; Start 116; Stop 140
gagctggaattgtagcttacattat

SEQ ID NO: 296451 - DNA, 25 bp, Artificial
  probe
  misc_feature (1)..(25): SEQ ID NO: 1510; WAN024DBA; Start 86; Stop 110
tcatttggggtgttcttacttgctg

SEQ ID NO: 296452 - DNA, 25 bp, Artificial
  probe
  misc_feature (1)..(25): SEQ ID NO: 1510; WAN024DBA; Start 85; Stop 109
gtcatttggggtgttcttacttgct

SEQ ID NO: 296453 - DNA, 25 bp, Artificial
  probe
  misc_feature (1)..(25): SEQ ID NO: 1510; WAN024DBA; Start 135; Stop 159
cattattttatggattatcgcacca

SEQ ID NO: 296454 - DNA, 25 bp, Artificial
  probe
  misc_feature (1)..(25): SEQ ID NO: 1510; WAN024DBA; Start 96; Stop 120
tgttcttacttgctgttacggagct

SEQ ID NO: 296455 - DNA, 25 bp, Artificial
  probe
  misc_feature (1)..(25): SEQ ID NO: 1510; WAN024DBA; Start 136; Stop 160
attattttatggattatcgcaccag

SEQ ID NO: 296456 - DNA, 25 bp, Artificial
  probe
  misc_feature (1)..(25): SEQ ID NO: 1510; WAN024DBA; Start 117; Stop 141
agctggaattgtagcttacattatt

SEQ ID NO: 296457 - DNA, 25 bp, Artificial
  probe
  misc_feature (1)..(25): SEQ ID NO: 1510; WAN024DBA; Start 102; Stop 126
tacttgctgttacggagctggaatt

SEQ ID NO: 296458 - DNA, 25 bp, Artificial
  probe
  misc_feature (1)..(25): SEQ ID NO: 1510; WAN024DBA; Start 101; Stop 125
ttacttgctgttacggagctggaat

SEQ ID NO: 296459 - DNA, 25 bp, Artificial
  probe
  misc_feature (1)..(25): SEQ ID NO: 1510; WAN024DBA; Start 87; Stop 111
catttggggtgttcttacttgctgt

SEQ ID NO: 296460 - DNA, 25 bp, Artificial
  probe
  misc_feature (1)..(25): SEQ ID NO: 1510; WAN024DBA; Start 84; Stop 108
agtcatttggggtgttcttacttgc

SEQ ID NO: 296461 - DNA, 25 bp, Artificial
  probe
  misc_feature (1)..(25): SEQ ID NO: 1510; WAN024DBA; Start 150; Stop 174
tatcgcaccagtagcaactgactat

SEQ ID NO: 296462 - DNA, 25 bp, Artificial
  probe
  misc_feature (1)..(25): SEQ ID NO: 1510; WAN024DBA; Start 105; Stop 129
ttgctgttacggagctggaattgta

SEQ ID NO: 296463 - DNA, 25 bp, Artificial
  probe
  misc_feature (1)..(25): SEQ ID NO: 1510; WAN024DBA; Start 149; Stop 173
ttatcgcaccagtagcaactgacta

SEQ ID NO: 296464 - DNA, 25 bp, Artificial
  probe
  misc_feature (1)..(25): SEQ ID NO: 1510; WAN024DBA; Start 147; Stop 171
gattatcgcaccagtagcaactgac

SEQ ID NO: 296465 - DNA, 25 bp, Artificial
  probe
  misc_feature (1)..(25): SEQ ID NO: 1511; WAN024CMV; Start 70; Stop 94
acacctcaagttcataagatggcta

SEQ ID NO: 296466 - DNA, 25 bp, Artificial
  probe
  misc_feature (1)..(25): SEQ ID NO: 1511; WAN024CMV; Start 24; Stop 48
agttgctgtattagttattggctta

SEQ ID NO: 296467 - DNA, 25 bp, Artificial
  probe
  misc_feature (1)..(25): SEQ ID NO: 1511; WAN024CMV; Start 23; Stop 47
tagttgctgtattagttattggctt

SEQ ID NO: 296468 - DNA, 25 bp, Artificial
  probe
  misc_feature (1)..(25): SEQ ID NO: 1511; WAN024CMV; Start 71; Stop 95
cacctcaagttcataagatggctag

SEQ ID NO: 296469 - DNA, 25 bp, Artificial
  probe
  misc_feature (1)..(25): SEQ ID NO: 1511; WAN024CMV; Start 72; Stop 96
acctcaagttcataagatggctaga

SEQ ID NO: 296470 - DNA, 25 bp, Artificial
  probe
  misc_feature (1)..(25): SEQ ID NO: 1511; WAN024CMV; Start 22; Stop 46
atagttgctgtattagttattggct

SEQ ID NO: 296471 - DNA, 25 bp, Artificial
  probe
  misc_feature (1)..(25): SEQ ID NO: 1511; WAN024CMV; Start 73; Stop 97
cctcaagttcataagatggctagag

SEQ ID NO: 296472 - DNA, 25 bp, Artificial
  probe
  misc_feature (1)..(25): SEQ ID NO: 1511; WAN024CMV; Start 36; Stop 60
agttattggcttaattctgttagga

SEQ ID NO: 296473 - DNA, 25 bp, Artificial
  probe
  misc_feature (1)..(25): SEQ ID NO: 1511; WAN024CMV; Start 25; Stop 49
gttgctgtattagttattggcttaa

SEQ ID NO: 296474 - DNA, 25 bp, Artificial
  probe
  misc_feature (1)..(25): SEQ ID NO: 1511; WAN024CMV; Start 69; Stop 93
aacacctcaagttcataagatggct

SEQ ID NO: 296475 - DNA, 25 bp, Artificial
  probe
  misc_feature (1)..(25): SEQ ID NO: 1511; WAN024CMV; Start 21; Stop 45
aatagttgctgtattagttattggc

SEQ ID NO: 296476 - DNA, 25 bp, Artificial
  probe
  misc_feature (1)..(25): SEQ ID NO: 1511; WAN024CMV; Start 37; Stop 61
gttattggcttaattctgttaggaa

SEQ ID NO: 296477 - DNA, 25 bp, Artificial
  probe
  misc_feature (1)..(25): SEQ ID NO: 1511; WAN024CMV; Start 26; Stop 50
ttgctgtattagttattggcttaat

SEQ ID NO: 296478 - DNA, 25 bp, Artificial
  probe
  misc_feature (1)..(25): SEQ ID NO: 1511; WAN024CMV; Start 27; Stop 51
tgctgtattagttattggcttaatt

SEQ ID NO: 296479 - DNA, 25 bp, Artificial
  probe
  misc_feature (1)..(25): SEQ ID NO: 1511; WAN024CMV; Start 35; Stop 59
tagttattggcttaattctgttagg

SEQ ID NO: 296480 - DNA, 25 bp, Artificial
  probe
  misc_feature (1)..(25): SEQ ID NO: 1511; WAN024CMV; Start 55; Stop 79
ttaggaattgcgagaacacctcaag

SEQ ID NO: 296481 - DNA, 25 bp, Artificial
  probe
  misc_feature (1)..(25): SEQ ID NO: 1511; WAN024CMV; Start 28; Stop 52
gctgtattagttattggcttaattc

SEQ ID NO: 296482 - DNA, 25 bp, Artificial
  probe
  misc_feature (1)..(25): SEQ ID NO: 1511; WAN024CMV; Start 54; Stop 78
gttaggaattgcgagaacacctcaa

SEQ ID NO: 296483 - DNA, 25 bp, Artificial
  probe
  misc_feature (1)..(25): SEQ ID NO: 1511; WAN024CMV; Start 67; Stop 91
agaacacctcaagttcataagatgg

SEQ ID NO: 296484 - DNA, 25 bp, Artificial
  probe
  misc_feature (1)..(25): SEQ ID NO: 1511; WAN024CMV; Start 66; Stop 90
gagaacacctcaagttcataagatg

SEQ ID NO: 296485 - DNA, 25 bp, Artificial
  probe
  misc_feature (1)..(25): SEQ ID NO: 1511; WAN024CMV; Start 65; Stop 89
cgagaacacctcaagttcataagat

SEQ ID NO: 296486 - DNA, 25 bp, Artificial
  probe
  misc_feature (1)..(25): SEQ ID NO: 1511; WAN024CMV; Start 49; Stop 73
attctgttaggaattgcgagaacac

SEQ ID NO: 296487 - DNA, 25 bp, Artificial
  probe
  misc_feature (1)..(25): SEQ ID NO: 1511; WAN024CMV; Start 38; Stop 62
ttattggcttaattctgttaggaat

SEQ ID NO: 296488 - DNA, 25 bp, Artificial
  probe
  misc_feature (1)..(25): SEQ ID NO: 1511; WAN024CMV; Start 84; Stop 108
taagatggctagagggattgatcct

SEQ ID NO: 296489 - DNA, 25 bp, Artificial
  probe
  misc_feature (1)..(25): SEQ ID NO: 1511; WAN024CMV; Start 56; Stop 80
taggaattgcgagaacacctcaagt

SEQ ID NO: 296490 - DNA, 25 bp, Artificial
  probe
  misc_feature (1)..(25): SEQ ID NO: 1511; WAN024CMV; Start 68; Stop 92
gaacacctcaagttcataagatggc

SEQ ID NO: 296491 - DNA, 25 bp, Artificial
  probe
  misc_feature (1)..(25): SEQ ID NO: 1511; WAN024CMV; Start 61; Stop 85
attgcgagaacacctcaagttcata

SEQ ID NO: 296492 - DNA, 25 bp, Artificial
  probe
  misc_feature (1)..(25): SEQ ID NO: 1511; WAN024CMV; Start 41; Stop 65
ttggcttaattctgttaggaattgc

SEQ ID NO: 296493 - DNA, 25 bp, Artificial
  probe
  misc_feature (1)..(25): SEQ ID NO: 1511; WAN024CMV; Start 47; Stop 71
taattctgttaggaattgcgagaac

SEQ ID NO: 296494 - DNA, 25 bp, Artificial
  probe
  misc_feature (1)..(25): SEQ ID NO: 1511; WAN024CMV; Start 44; Stop 68
gcttaattctgttaggaattgcgag

SEQ ID NO: 296495 - DNA, 25 bp, Artificial
  probe
  misc_feature (1)..(25): SEQ ID NO: 1511; WAN024CMV; Start 62; Stop 86
ttgcgagaacacctcaagttcataa

SEQ ID NO: 296496 - DNA, 25 bp, Artificial
  probe
  misc_feature (1)..(25): SEQ ID NO: 1511; WAN024CMV; Start 45; Stop 69
cttaattctgttaggaattgcgaga

SEQ ID NO: 296497 - DNA, 25 bp, Artificial
  probe
  misc_feature (1)..(25): SEQ ID NO: 1511; WAN024CMV; Start 48; Stop 72
aattctgttaggaattgcgagaaca

SEQ ID NO: 296498 - DNA, 25 bp, Artificial
  probe
  misc_feature (1)..(25): SEQ ID NO: 1512; WAN024CMU; Start 72; Stop 96
aactcaagttcataagatggctaga

SEQ ID NO: 296499 - DNA, 25 bp, Artificial
  probe
  misc_feature (1)..(25): SEQ ID NO: 1512; WAN024CMU; Start 73; Stop 97
actcaagttcataagatggctagag

SEQ ID NO: 296500 - DNA, 25 bp, Artificial
  probe
  misc_feature (1)..(25): SEQ ID NO: 1512; WAN024CMU; Start 111; Stop 135
tcctgcgaatggtatttatagacta

SEQ ID NO: 296501 - DNA, 25 bp, Artificial
  probe
  misc_feature (1)..(25): SEQ ID NO: 1512; WAN024CMU; Start 23; Stop 47
ttgttgctttgttagtcataggatt

SEQ ID NO: 296502 - DNA, 25 bp, Artificial
  probe
  misc_feature (1)..(25): SEQ ID NO: 1512; WAN024CMU; Start 22; Stop 46
attgttgctttgttagtcataggat

SEQ ID NO: 296503 - DNA, 25 bp, Artificial
  probe
  misc_feature (1)..(25): SEQ ID NO: 1512; WAN024CMU; Start 21; Stop 45
aattgttgctttgttagtcatagga

SEQ ID NO: 296504 - DNA, 25 bp, Artificial
  probe
  misc_feature (1)..(25): SEQ ID NO: 1512; WAN024CMU; Start 108; Stop 132
aggtcctgcgaatggtatttataga

SEQ ID NO: 296505 - DNA, 25 bp, Artificial
  probe
  misc_feature (1)..(25): SEQ ID NO: 1512; WAN024CMU; Start 24; Stop 48
tgttgctttgttagtcataggatta

SEQ ID NO: 296506 - DNA, 25 bp, Artificial
  probe
  misc_feature (1)..(25): SEQ ID NO: 1512; WAN024CMU; Start 20; Stop 44
aaattgttgctttgttagtcatagg

SEQ ID NO: 296507 - DNA, 25 bp, Artificial
  probe
  misc_feature (1)..(25): SEQ ID NO: 1512; WAN024CMU; Start 110; Stop 134
gtcctgcgaatggtatttatagact

SEQ ID NO: 296508 - DNA, 25 bp, Artificial
  probe
  misc_feature (1)..(25): SEQ ID NO: 1512; WAN024CMU; Start 109; Stop 133
ggtcctgcgaatggtatttatagac

SEQ ID NO: 296509 - DNA, 25 bp, Artificial
  probe
  misc_feature (1)..(25): SEQ ID NO: 1512; WAN024CMU; Start 25; Stop 49
gttgctttgttagtcataggattaa

SEQ ID NO: 296510 - DNA, 25 bp, Artificial
  probe
  misc_feature (1)..(25): SEQ ID NO: 1512; WAN024CMU; Start 46; Stop 70
ttaatcctattagggactgctggag

SEQ ID NO: 296511 - DNA, 25 bp, Artificial
  probe
  misc_feature (1)..(25): SEQ ID NO: 1512; WAN024CMU; Start 45; Stop 69
attaatcctattagggactgctgga

SEQ ID NO: 296512 - DNA, 25 bp, Artificial
  probe
  misc_feature (1)..(25): SEQ ID NO: 1512; WAN024CMU; Start 107; Stop 131
caggtcctgcgaatggtatttatag

SEQ ID NO: 296513 - DNA, 25 bp, Artificial
  probe
  misc_feature (1)..(25): SEQ ID NO: 1512; WAN024CMU; Start 16; Stop 40
aggaaaattgttgctttgttagtca

SEQ ID NO: 296514 - DNA, 25 bp, Artificial
  probe
  misc_feature (1)..(25): SEQ ID NO: 1512; WAN024CMU; Start 17; Stop 41
ggaaaattgttgctttgttagtcat

SEQ ID NO: 296515 - DNA, 25 bp, Artificial
  probe
  misc_feature (1)..(25): SEQ ID NO: 1512; WAN024CMU; Start 11; Stop 35
tgtttaggaaaattgttgctttgtt

SEQ ID NO: 296516 - DNA, 25 bp, Artificial
  probe
  misc_feature (1)..(25): SEQ ID NO: 1512; WAN024CMU; Start 10; Stop 34
ttgtttaggaaaattgttgctttgt

SEQ ID NO: 296517 - DNA, 25 bp, Artificial
  probe
  misc_feature (1)..(25): SEQ ID NO: 1512; WAN024CMU; Start 65; Stop 89
ctggaggaactcaagttcataagat

SEQ ID NO: 296518 - DNA, 25 bp, Artificial
  probe
  misc_feature (1)..(25): SEQ ID NO: 1512; WAN024CMU; Start 70; Stop 94
ggaactcaagttcataagatggcta

SEQ ID NO: 296519 - DNA, 25 bp, Artificial
  probe
  misc_feature (1)..(25): SEQ ID NO: 1512; WAN024CMU; Start 66; Stop 90
tggaggaactcaagttcataagatg

SEQ ID NO: 296520 - DNA, 25 bp, Artificial
  probe
  misc_feature (1)..(25): SEQ ID NO: 1512; WAN024CMU; Start 7; Stop 31
agtttgtttaggaaaattgttgctt

SEQ ID NO: 296521 - DNA, 25 bp, Artificial
  probe
  misc_feature (1)..(25): SEQ ID NO: 1512; WAN024CMU; Start 6; Stop 30
aagtttgtttaggaaaattgttgct

SEQ ID NO: 296522 - DNA, 25 bp, Artificial
  probe
  misc_feature (1)..(25): SEQ ID NO: 1512; WAN024CMU; Start 47; Stop 71
taatcctattagggactgctggagg

SEQ ID NO: 296523 - DNA, 25 bp, Artificial
  probe
  misc_feature (1)..(25): SEQ ID NO: 1512; WAN024CMU; Start 84; Stop 108
taagatggctagagggattgatcca

SEQ ID NO: 296524 - DNA, 25 bp, Artificial
  probe
  misc_feature (1)..(25): SEQ ID NO: 1512; WAN024CMU; Start 71; Stop 95
gaactcaagttcataagatggctag

SEQ ID NO: 296525 - DNA, 25 bp, Artificial
  probe
  misc_feature (1)..(25): SEQ ID NO: 1512; WAN024CMU; Start 5; Stop 29
gaagtttgtttaggaaaattgttgc

SEQ ID NO: 296526 - DNA, 25 bp, Artificial
  probe
  misc_feature (1)..(25): SEQ ID NO: 1512; WAN024CMU; Start 67; Stop 91
ggaggaactcaagttcataagatgg

SEQ ID NO: 296527 - DNA, 25 bp, Artificial
  probe
  misc_feature (1)..(25): SEQ ID NO: 1512; WAN024CMU; Start 15; Stop 39
taggaaaattgttgctttgttagtc

SEQ ID NO: 296528 - DNA, 25 bp, Artificial
  probe
  misc_feature (1)..(25): SEQ ID NO: 1512; WAN024CMU; Start 68; Stop 92
gaggaactcaagttcataagatggc

SEQ ID NO: 296529 - DNA, 25 bp, Artificial
  probe
  misc_feature (1)..(25): SEQ ID NO: 1512; WAN024CMU; Start 52; Stop 76
ctattagggactgctggaggaactc

SEQ ID NO: 296530 - DNA, 25 bp, Artificial
  probe
  misc_feature (1)..(25): SEQ ID NO: 1512; WAN024CMU; Start 9; Stop 33
tttgtttaggaaaattgttgctttg

SEQ ID NO: 296531 - DNA, 25 bp, Artificial
  probe
  misc_feature (1)..(25): SEQ ID NO: 1513; WAN024FR9; Start 290; Stop 314
ctactgcggttacaactgctaatat

SEQ ID NO: 296532 - DNA, 25 bp, Artificial
  probe
  misc_feature (1)..(25): SEQ ID NO: 1513; WAN024FR9; Start 19; Stop 43
ctacctgagataagcactgttccta

SEQ ID NO: 296533 - DNA, 25 bp, Artificial
  probe
  misc_feature (1)..(25): SEQ ID NO: 1513; WAN024FR9; Start 461; Stop 485
tccaatcttatacagagactccagt

SEQ ID NO: 296534 - DNA, 25 bp, Artificial
  probe
  misc_feature (1)..(25): SEQ ID NO: 1513; WAN024FR9; Start 20; Stop 44
tacctgagataagcactgttcctac

SEQ ID NO: 296535 - DNA, 25 bp, Artificial
  probe
  misc_feature (1)..(25): SEQ ID NO: 1513; WAN024FR9; Start 462; Stop 486
ccaatcttatacagagactccagtt

SEQ ID NO: 296536 - DNA, 25 bp, Artificial
  probe
  misc_feature (1)..(25): SEQ ID NO: 1513; WAN024FR9; Start 15; Stop 39
ttgtctacctgagataagcactgtt

SEQ ID NO: 296537 - DNA, 25 bp, Artificial
  probe
  misc_feature (1)..(25): SEQ ID NO: 1513; WAN024FR9; Start 433; Stop 457
acagtatctaagtggttatgtgaca

SEQ ID NO: 296538 - DNA, 25 bp, Artificial
  probe
  misc_feature (1)..(25): SEQ ID NO: 1513; WAN024FR9; Start 460; Stop 484
gtccaatcttatacagagactccag

SEQ ID NO: 296539 - DNA, 25 bp, Artificial
  probe
  misc_feature (1)..(25): SEQ ID NO: 1513; WAN024FR9; Start 16; Stop 40
tgtctacctgagataagcactgttc

SEQ ID NO: 296540 - DNA, 25 bp, Artificial
  probe
  misc_feature (1)..(25): SEQ ID NO: 1513; WAN024FR9; Start 291; Stop 315
tactgcggttacaactgctaatatt

SEQ ID NO: 296541 - DNA, 25 bp, Artificial
  probe
  misc_feature (1)..(25): SEQ ID NO: 1513; WAN024FR9; Start 709; Stop 733
tatactcaacaagctacacaacagg

SEQ ID NO: 296542 - DNA, 25 bp, Artificial
  probe
  misc_feature (1)..(25): SEQ ID NO: 1513; WAN024FR9; Start 715; Stop 739
caacaagctacacaacaggaattac

SEQ ID NO: 296543 - DNA, 25 bp, Artificial
  probe
  misc_feature (1)..(25): SEQ ID NO: 1513; WAN024FR9; Start 714; Stop 738
tcaacaagctacacaacaggaatta

SEQ ID NO: 296544 - DNA, 25 bp, Artificial
  probe
  misc_feature (1)..(25): SEQ ID NO: 1513; WAN024FR9; Start 717; Stop 741
acaagctacacaacaggaattacaa

SEQ ID NO: 296545 - DNA, 25 bp, Artificial
  probe
  misc_feature (1)..(25): SEQ ID NO: 1513; WAN024FR9; Start 716; Stop 740
aacaagctacacaacaggaattaca

SEQ ID NO: 296546 - DNA, 25 bp, Artificial
  probe
  misc_feature (1)..(25): SEQ ID NO: 1513; WAN024FR9; Start 708; Stop 732
ttatactcaacaagctacacaacag

SEQ ID NO: 296547 - DNA, 25 bp, Artificial
  probe
  misc_feature (1)..(25): SEQ ID NO: 1513; WAN024FR9; Start 434; Stop 458
cagtatctaagtggttatgtgacat

SEQ ID NO: 296548 - DNA, 25 bp, Artificial
  probe
  misc_feature (1)..(25): SEQ ID NO: 1513; WAN024FR9; Start 665; Stop 689
ttggagttcctagtagaccagtatt

SEQ ID NO: 296549 - DNA, 25 bp, Artificial
  probe
  misc_feature (1)..(25): SEQ ID NO: 1513; WAN024FR9; Start 18; Stop 42
tctacctgagataagcactgttcct

SEQ ID NO: 296550 - DNA, 25 bp, Artificial
  probe
  misc_feature (1)..(25): SEQ ID NO: 1513; WAN024FR9; Start 17; Stop 41
gtctacctgagataagcactgttcc

SEQ ID NO: 296551 - DNA, 25 bp, Artificial
  probe
  misc_feature (1)..(25): SEQ ID NO: 1513; WAN024FR9; Start 968; Stop 992
tatccatagcaacgcaagcaactaa

SEQ ID NO: 296552 - DNA, 25 bp, Artificial
  probe
  misc_feature (1)..(25): SEQ ID NO: 1513; WAN024FR9; Start 967; Stop 991
ttatccatagcaacgcaagcaacta

SEQ ID NO: 296553 - DNA, 25 bp, Artificial
  probe
  misc_feature (1)..(25): SEQ ID NO: 1513; WAN024FR9; Start 132; Stop 156
atggaacagagttactaagaattgt

SEQ ID NO: 296554 - DNA, 25 bp, Artificial
  probe
  misc_feature (1)..(25): SEQ ID NO: 1513; WAN024FR9; Start 978; Stop 1002
aacgcaagcaactaaagatatgaaa

SEQ ID NO: 296555 - DNA, 25 bp, Artificial
  probe
  misc_feature (1)..(25): SEQ ID NO: 1513; WAN024FR9; Start 977; Stop 1001
caacgcaagcaactaaagatatgaa

SEQ ID NO: 296556 - DNA, 25 bp, Artificial
  probe
  misc_feature (1)..(25): SEQ ID NO: 1513; WAN024FR9; Start 707; Stop 731
attatactcaacaagctacacaaca

SEQ ID NO: 296557 - DNA, 25 bp, Artificial
  probe
  misc_feature (1)..(25): SEQ ID NO: 1513; WAN024FR9; Start 451; Stop 475
tgtgacatagtccaatcttatacag

SEQ ID NO: 296558 - DNA, 25 bp, Artificial
  probe
  misc_feature (1)..(25): SEQ ID NO: 1513; WAN024FR9; Start 289; Stop 313
gctactgcggttacaactgctaata

SEQ ID NO: 296559 - DNA, 25 bp, Artificial
  probe
  misc_feature (1)..(25): SEQ ID NO: 1513; WAN024FR9; Start 713; Stop 737
ctcaacaagctacacaacaggaatt

SEQ ID NO: 296560 - DNA, 25 bp, Artificial
  probe
  misc_feature (1)..(25): SEQ ID NO: 1513; WAN024FR9; Start 439; Stop 463
tctaagtggttatgtgacatagtcc

SEQ ID NO: 296561 - DNA, 25 bp, Artificial
  probe
  misc_feature (1)..(25): SEQ ID NO: 1513; WAN024FR9; Start 292; Stop 316
actgcggttacaactgctaatattg

SEQ ID NO: 296562 - DNA, 25 bp, Artificial
  probe
  misc_feature (1)..(25): SEQ ID NO: 1513; WAN024FR9; Start 973; Stop 997
atagcaacgcaagcaactaaagata

SEQ ID NO: 296563 - DNA, 25 bp, Artificial
  probe
  misc_feature (1)..(25): SEQ ID NO: 1513; WAN024FR9; Start 974; Stop 998
tagcaacgcaagcaactaaagatat

SEQ ID NO: 296564 - DNA, 25 bp, Artificial
  probe
  misc_feature (1)..(25): SEQ ID NO: 1514; WAN024FPP; Start 468; Stop 492
tgttcaggtgatttcccaatatagt

SEQ ID NO: 296565 - DNA, 25 bp, Artificial
  probe
  misc_feature (1)..(25): SEQ ID NO: 1514; WAN024FPP; Start 831; Stop 855
tcaagtgaaatggtttggatatggt

SEQ ID NO: 296566 - DNA, 25 bp, Artificial
  probe
  misc_feature (1)..(25): SEQ ID NO: 1514; WAN024FPP; Start 467; Stop 491
atgttcaggtgatttcccaatatag

SEQ ID NO: 296567 - DNA, 25 bp, Artificial
  probe
  misc_feature (1)..(25): SEQ ID NO: 1514; WAN024FPP; Start 466; Stop 490
catgttcaggtgatttcccaatata

SEQ ID NO: 296568 - DNA, 25 bp, Artificial
  probe
  misc_feature (1)..(25): SEQ ID NO: 1514; WAN024FPP; Start 713; Stop 737
catctgttgtgatgttagcattagt

SEQ ID NO: 296569 - DNA, 25 bp, Artificial
  probe
  misc_feature (1)..(25): SEQ ID NO: 1514; WAN024FPP; Start 712; Stop 736
gcatctgttgtgatgttagcattag

SEQ ID NO: 296570 - DNA, 25 bp, Artificial
  probe
  misc_feature (1)..(25): SEQ ID NO: 1514; WAN024FPP; Start 859; Stop 883
tttggctttcaatttaaacttccgt

SEQ ID NO: 296571 - DNA, 25 bp, Artificial
  probe
  misc_feature (1)..(25): SEQ ID NO: 1514; WAN024FPP; Start 864; Stop 888
ctttcaatttaaacttccgtggcag

SEQ ID NO: 296572 - DNA, 25 bp, Artificial
  probe
  misc_feature (1)..(25): SEQ ID NO: 1514; WAN024FPP; Start 860; Stop 884
ttggctttcaatttaaacttccgtg

SEQ ID NO: 296573 - DNA, 25 bp, Artificial
  probe
  misc_feature (1)..(25): SEQ ID NO: 1514; WAN024FPP; Start 707; Stop 731
ttattgcatctgttgtgatgttagc

SEQ ID NO: 296574 - DNA, 25 bp, Artificial
  probe
  misc_feature (1)..(25): SEQ ID NO: 1514; WAN024FPP; Start 861; Stop 885
tggctttcaatttaaacttccgtgg

SEQ ID NO: 296575 - DNA, 25 bp, Artificial
  probe
  misc_feature (1)..(25): SEQ ID NO: 1514; WAN024FPP; Start 711; Stop 735
tgcatctgttgtgatgttagcatta

SEQ ID NO: 296576 - DNA, 25 bp, Artificial
  probe
  misc_feature (1)..(25): SEQ ID NO: 1514; WAN024FPP; Start 708; Stop 732
tattgcatctgttgtgatgttagca

SEQ ID NO: 296577 - DNA, 25 bp, Artificial
  probe
  misc_feature (1)..(25): SEQ ID NO: 1514; WAN024FPP; Start 709; Stop 733
attgcatctgttgtgatgttagcat

SEQ ID NO: 296578 - DNA, 25 bp, Artificial
  probe
  misc_feature (1)..(25): SEQ ID NO: 1514; WAN024FPP; Start 710; Stop 734
ttgcatctgttgtgatgttagcatt

SEQ ID NO: 296579 - DNA, 25 bp, Artificial
  probe
  misc_feature (1)..(25): SEQ ID NO: 1514; WAN024FPP; Start 858; Stop 882
gtttggctttcaatttaaacttccg

SEQ ID NO: 296580 - DNA, 25 bp, Artificial
  probe
  misc_feature (1)..(25): SEQ ID NO: 1514; WAN024FPP; Start 185; Stop 209
tatctcgaaatatcgccattcatca

SEQ ID NO: 296581 - DNA, 25 bp, Artificial
  probe
  misc_feature (1)..(25): SEQ ID NO: 1514; WAN024FPP; Start 857; Stop 881
tgtttggctttcaatttaaacttcc

SEQ ID NO: 296582 - DNA, 25 bp, Artificial
  probe
  misc_feature (1)..(25): SEQ ID NO: 1514; WAN024FPP; Start 863; Stop 887
gctttcaatttaaacttccgtggca

SEQ ID NO: 296583 - DNA, 25 bp, Artificial
  probe
  misc_feature (1)..(25): SEQ ID NO: 1514; WAN024FPP; Start 184; Stop 208
ttatctcgaaatatcgccattcatc

SEQ ID NO: 296584 - DNA, 25 bp, Artificial
  probe
  misc_feature (1)..(25): SEQ ID NO: 1514; WAN024FPP; Start 186; Stop 210
atctcgaaatatcgccattcatcag

SEQ ID NO: 296585 - DNA, 25 bp, Artificial
  probe
  misc_feature (1)..(25): SEQ ID NO: 1514; WAN024FPP; Start 337; Stop 361
gttcgagataagaaatcaatagtgt

SEQ ID NO: 296586 - DNA, 25 bp, Artificial
  probe
  misc_feature (1)..(25): SEQ ID NO: 1514; WAN024FPP; Start 183; Stop 207
attatctcgaaatatcgccattcat

SEQ ID NO: 296587 - DNA, 25 bp, Artificial
  probe
  misc_feature (1)..(25): SEQ ID NO: 1514; WAN024FPP; Start 927; Stop 951
agttttacagttagcacttgatagt

SEQ ID NO: 296588 - DNA, 25 bp, Artificial
  probe
  misc_feature (1)..(25): SEQ ID NO: 1514; WAN024FPP; Start 556; Stop 580
cagttgctgttgattttaacgatta

SEQ ID NO: 296589 - DNA, 25 bp, Artificial
  probe
  misc_feature (1)..(25): SEQ ID NO: 1514; WAN024FPP; Start 557; Stop 581
agttgctgttgattttaacgattat

SEQ ID NO: 296590 - DNA, 25 bp, Artificial
  probe
  misc_feature (1)..(25): SEQ ID NO: 1514; WAN024FPP; Start 336; Stop 360
agttcgagataagaaatcaatagtg

SEQ ID NO: 296591 - DNA, 25 bp, Artificial
  probe
  misc_feature (1)..(25): SEQ ID NO: 1514; WAN024FPP; Start 465; Stop 489
acatgttcaggtgatttcccaatat

SEQ ID NO: 296592 - DNA, 25 bp, Artificial
  probe
  misc_feature (1)..(25): SEQ ID NO: 1514; WAN024FPP; Start 558; Stop 582
gttgctgttgattttaacgattatc

SEQ ID NO: 296593 - DNA, 25 bp, Artificial
  probe
  misc_feature (1)..(25): SEQ ID NO: 1514; WAN024FPP; Start 182; Stop 206
tattatctcgaaatatcgccattca

SEQ ID NO: 296594 - DNA, 25 bp, Artificial
  probe
  misc_feature (1)..(25): SEQ ID NO: 1514; WAN024FPP; Start 862; Stop 886
ggctttcaatttaaacttccgtggc

SEQ ID NO: 296595 - DNA, 25 bp, Artificial
  probe
  misc_feature (1)..(25): SEQ ID NO: 1514; WAN024FPP; Start 331; Stop 355
aatgaagttcgagataagaaatcaa

SEQ ID NO: 296596 - DNA, 25 bp, Artificial
  probe
  misc_feature (1)..(25): SEQ ID NO: 1514; WAN024FPP; Start 464; Stop 488
gacatgttcaggtgatttcccaata

SEQ ID NO: 296597 - DNA, 25 bp, Artificial
  probe
  misc_feature (1)..(25): SEQ ID NO: 1515; WAN024AW6; Start 71; Stop 95
tgaaggaacatcatatcactctgag

SEQ ID NO: 296598 - DNA, 25 bp, Artificial
  probe
  misc_feature (1)..(25): SEQ ID NO: 1515; WAN024AW6; Start 70; Stop 94
ttgaaggaacatcatatcactctga

SEQ ID NO: 296599 - DNA, 25 bp, Artificial
  probe
  misc_feature (1)..(25): SEQ ID NO: 1515; WAN024AW6; Start 66; Stop 90
actcttgaaggaacatcatatcact

SEQ ID NO: 296600 - DNA, 25 bp, Artificial
  probe
  misc_feature (1)..(25): SEQ ID NO: 1515; WAN024AW6; Start 69; Stop 93
cttgaaggaacatcatatcactctg

SEQ ID NO: 296601 - DNA, 25 bp, Artificial
  probe
  misc_feature (1)..(25): SEQ ID NO: 1515; WAN024AW6; Start 68; Stop 92
tcttgaaggaacatcatatcactct

SEQ ID NO: 296602 - DNA, 25 bp, Artificial
  probe
  misc_feature (1)..(25): SEQ ID NO: 1515; WAN024AW6; Start 67; Stop 91
ctcttgaaggaacatcatatcactc

SEQ ID NO: 296603 - DNA, 25 bp, Artificial
  probe
  misc_feature (1)..(25): SEQ ID NO: 1515; WAN024AW6; Start 65; Stop 89
aactcttgaaggaacatcatatcac

SEQ ID NO: 296604 - DNA, 25 bp, Artificial
  probe
  misc_feature (1)..(25): SEQ ID NO: 1515; WAN024AW6; Start 72; Stop 96
gaaggaacatcatatcactctgagt

SEQ ID NO: 296605 - DNA, 25 bp, Artificial
  probe
  misc_feature (1)..(25): SEQ ID NO: 1515; WAN024AW6; Start 73; Stop 97
aaggaacatcatatcactctgagtt

SEQ ID NO: 296606 - DNA, 25 bp, Artificial
  probe
  misc_feature (1)..(25): SEQ ID NO: 1515; WAN024AW6; Start 44; Stop 68
gaattgaaacgacgattgagaaact

SEQ ID NO: 296607 - DNA, 25 bp, Artificial
  probe
  misc_feature (1)..(25): SEQ ID NO: 1515; WAN024AW6; Start 43; Stop 67
agaattgaaacgacgattgagaaac

SEQ ID NO: 296608 - DNA, 25 bp, Artificial
  probe
  misc_feature (1)..(25): SEQ ID NO: 1515; WAN024AW6; Start 42; Stop 66
tagaattgaaacgacgattgagaaa

SEQ ID NO: 296609 - DNA, 25 bp, Artificial
  probe
  misc_feature (1)..(25): SEQ ID NO: 1515; WAN024AW6; Start 39; Stop 63
gactagaattgaaacgacgattgag

SEQ ID NO: 296610 - DNA, 25 bp, Artificial
  probe
  misc_feature (1)..(25): SEQ ID NO: 1515; WAN024AW6; Start 40; Stop 64
actagaattgaaacgacgattgaga

SEQ ID NO: 296611 - DNA, 25 bp, Artificial
  probe
  misc_feature (1)..(25): SEQ ID NO: 1515; WAN024AW6; Start 38; Stop 62
agactagaattgaaacgacgattga

SEQ ID NO: 296612 - DNA, 25 bp, Artificial
  probe
  misc_feature (1)..(25): SEQ ID NO: 1515; WAN024AW6; Start 37; Stop 61
cagactagaattgaaacgacgattg

SEQ ID NO: 296613 - DNA, 25 bp, Artificial
  probe
  misc_feature (1)..(25): SEQ ID NO: 1515; WAN024AW6; Start 41; Stop 65
ctagaattgaaacgacgattgagaa

SEQ ID NO: 296614 - DNA, 25 bp, Artificial
  probe
  misc_feature (1)..(25): SEQ ID NO: 1515; WAN024AW6; Start 36; Stop 60
acagactagaattgaaacgacgatt

SEQ ID NO: 296615 - DNA, 25 bp, Artificial
  probe
  misc_feature (1)..(25): SEQ ID NO: 1515; WAN024AW6; Start 60; Stop 84
tgagaaactcttgaaggaacatcat

SEQ ID NO: 296616 - DNA, 25 bp, Artificial
  probe
  misc_feature (1)..(25): SEQ ID NO: 1515; WAN024AW6; Start 59; Stop 83
ttgagaaactcttgaaggaacatca

SEQ ID NO: 296617 - DNA, 25 bp, Artificial
  probe
  misc_feature (1)..(25): SEQ ID NO: 1515; WAN024AW6; Start 45; Stop 69
aattgaaacgacgattgagaaactc

SEQ ID NO: 296618 - DNA, 25 bp, Artificial
  probe
  misc_feature (1)..(25): SEQ ID NO: 1515; WAN024AW6; Start 58; Stop 82
attgagaaactcttgaaggaacatc

SEQ ID NO: 296619 - DNA, 25 bp, Artificial
  probe
  misc_feature (1)..(25): SEQ ID NO: 1515; WAN024AW6; Start 57; Stop 81
gattgagaaactcttgaaggaacat

SEQ ID NO: 296620 - DNA, 25 bp, Artificial
  probe
  misc_feature (1)..(25): SEQ ID NO: 1515; WAN024AW6; Start 54; Stop 78
gacgattgagaaactcttgaaggaa

SEQ ID NO: 296621 - DNA, 25 bp, Artificial
  probe
  misc_feature (1)..(25): SEQ ID NO: 1515; WAN024AW6; Start 46; Stop 70
attgaaacgacgattgagaaactct

SEQ ID NO: 296622 - DNA, 25 bp, Artificial
  probe
  misc_feature (1)..(25): SEQ ID NO: 1515; WAN024AW6; Start 705; Stop 729
ggaagtgtctgaggctattaataac

SEQ ID NO: 296623 - DNA, 25 bp, Artificial
  probe
  misc_feature (1)..(25): SEQ ID NO: 1515; WAN024AW6; Start 55; Stop 79
acgattgagaaactcttgaaggaac

SEQ ID NO: 296624 - DNA, 25 bp, Artificial
  probe
  misc_feature (1)..(25): SEQ ID NO: 1515; WAN024AW6; Start 50; Stop 74
aaacgacgattgagaaactcttgaa

SEQ ID NO: 296625 - DNA, 25 bp, Artificial
  probe
  misc_feature (1)..(25): SEQ ID NO: 1515; WAN024AW6; Start 47; Stop 71
ttgaaacgacgattgagaaactctt

SEQ ID NO: 296626 - DNA, 25 bp, Artificial
  probe
  misc_feature (1)..(25): SEQ ID NO: 1515; WAN024AW6; Start 56; Stop 80
cgattgagaaactcttgaaggaaca

SEQ ID NO: 296627 - DNA, 25 bp, Artificial
  probe
  misc_feature (1)..(25): SEQ ID NO: 1515; WAN024AW6; Start 61; Stop 85
gagaaactcttgaaggaacatcata

SEQ ID NO: 296628 - DNA, 25 bp, Artificial
  probe
  misc_feature (1)..(25): SEQ ID NO: 1515; WAN024AW6; Start 51; Stop 75
aacgacgattgagaaactcttgaag

SEQ ID NO: 296629 - DNA, 25 bp, Artificial
  probe
  misc_feature (1)..(25): SEQ ID NO: 1515; WAN024AW6; Start 49; Stop 73
gaaacgacgattgagaaactcttga

SEQ ID NO: 296630 - DNA, 25 bp, Artificial
  probe
  misc_feature (1)..(25): SEQ ID NO: 1516; WAN024AW7; Start 510; Stop 534
tattctctataccaagacagacagg

SEQ ID NO: 296631 - DNA, 25 bp, Artificial
  probe
  misc_feature (1)..(25): SEQ ID NO: 1516; WAN024AW7; Start 511; Stop 535
attctctataccaagacagacaggc

SEQ ID NO: 296632 - DNA, 25 bp, Artificial
  probe
  misc_feature (1)..(25): SEQ ID NO: 1516; WAN024AW7; Start 378; Stop 402
cctctatgccaatagtcaagatagt

SEQ ID NO: 296633 - DNA, 25 bp, Artificial
  probe
  misc_feature (1)..(25): SEQ ID NO: 1516; WAN024AW7; Start 377; Stop 401
tcctctatgccaatagtcaagatag

SEQ ID NO: 296634 - DNA, 25 bp, Artificial
  probe
  misc_feature (1)..(25): SEQ ID NO: 1516; WAN024AW7; Start 376; Stop 400
ctcctctatgccaatagtcaagata

SEQ ID NO: 296635 - DNA, 25 bp, Artificial
  probe
  misc_feature (1)..(25): SEQ ID NO: 1516; WAN024AW7; Start 504; Stop 528
tcgtgttattctctataccaagaca

SEQ ID NO: 296636 - DNA, 25 bp, Artificial
  probe
  misc_feature (1)..(25): SEQ ID NO: 1516; WAN024AW7; Start 505; Stop 529
cgtgttattctctataccaagacag

SEQ ID NO: 296637 - DNA, 25 bp, Artificial
  probe
  misc_feature (1)..(25): SEQ ID NO: 1516; WAN024AW7; Start 375; Stop 399
cctcctctatgccaatagtcaagat

SEQ ID NO: 296638 - DNA, 25 bp, Artificial
  probe
  misc_feature (1)..(25): SEQ ID NO: 1516; WAN024AW7; Start 76; Stop 100
gcacatcatatcattcctagctctt

SEQ ID NO: 296639 - DNA, 25 bp, Artificial
  probe
  misc_feature (1)..(25): SEQ ID NO: 1516; WAN024AW7; Start 512; Stop 536
ttctctataccaagacagacaggct

SEQ ID NO: 296640 - DNA, 25 bp, Artificial
  probe
  misc_feature (1)..(25): SEQ ID NO: 1516; WAN024AW7; Start 508; Stop 532
gttattctctataccaagacagaca

SEQ ID NO: 296641 - DNA, 25 bp, Artificial
  probe
  misc_feature (1)..(25): SEQ ID NO: 1516; WAN024AW7; Start 509; Stop 533
ttattctctataccaagacagacag

SEQ ID NO: 296642 - DNA, 25 bp, Artificial
  probe
  misc_feature (1)..(25): SEQ ID NO: 1516; WAN024AW7; Start 310; Stop 334
tctgctttggactacattgataagg

SEQ ID NO: 296643 - DNA, 25 bp, Artificial
  probe
  misc_feature (1)..(25): SEQ ID NO: 1516; WAN024AW7; Start 507; Stop 531
tgttattctctataccaagacagac

SEQ ID NO: 296644 - DNA, 25 bp, Artificial
  probe
  misc_feature (1)..(25): SEQ ID NO: 1516; WAN024AW7; Start 506; Stop 530
gtgttattctctataccaagacaga

SEQ ID NO: 296645 - DNA, 25 bp, Artificial
  probe
  misc_feature (1)..(25): SEQ ID NO: 1516; WAN024AW7; Start 538; Stop 562
gaatttacagcgagtttagaggagg

SEQ ID NO: 296646 - DNA, 25 bp, Artificial
  probe
  misc_feature (1)..(25): SEQ ID NO: 1516; WAN024AW7; Start 537; Stop 561
ggaatttacagcgagtttagaggag

SEQ ID NO: 296647 - DNA, 25 bp, Artificial
  probe
  misc_feature (1)..(25): SEQ ID NO: 1516; WAN024AW7; Start 72; Stop 96
gaaagcacatcatatcattcctagc

SEQ ID NO: 296648 - DNA, 25 bp, Artificial
  probe
  misc_feature (1)..(25): SEQ ID NO: 1516; WAN024AW7; Start 189; Stop 213
aaatgaagagatgaagggactggaa

SEQ ID NO: 296649 - DNA, 25 bp, Artificial
  probe
  misc_feature (1)..(25): SEQ ID NO: 1516; WAN024AW7; Start 540; Stop 564
atttacagcgagtttagaggaggtt

SEQ ID NO: 296650 - DNA, 25 bp, Artificial
  probe
  misc_feature (1)..(25): SEQ ID NO: 1516; WAN024AW7; Start 498; Stop 522
agcccatcgtgttattctctatacc

SEQ ID NO: 296651 - DNA, 25 bp, Artificial
  probe
  misc_feature (1)..(25): SEQ ID NO: 1516; WAN024AW7; Start 497; Stop 521
gagcccatcgtgttattctctatac

SEQ ID NO: 296652 - DNA, 25 bp, Artificial
  probe
  misc_feature (1)..(25): SEQ ID NO: 1516; WAN024AW7; Start 69; Stop 93
tttgaaagcacatcatatcattcct

SEQ ID NO: 296653 - DNA, 25 bp, Artificial
  probe
  misc_feature (1)..(25): SEQ ID NO: 1516; WAN024AW7; Start 379; Stop 403
ctctatgccaatagtcaagatagta

SEQ ID NO: 296654 - DNA, 25 bp, Artificial
  probe
  misc_feature (1)..(25): SEQ ID NO: 1516; WAN024AW7; Start 541; Stop 565
tttacagcgagtttagaggaggttt

SEQ ID NO: 296655 - DNA, 25 bp, Artificial
  probe
  misc_feature (1)..(25): SEQ ID NO: 1516; WAN024AW7; Start 539; Stop 563
aatttacagcgagtttagaggaggt

SEQ ID NO: 296656 - DNA, 25 bp, Artificial
  probe
  misc_feature (1)..(25): SEQ ID NO: 1516; WAN024AW7; Start 536; Stop 560
tggaatttacagcgagtttagagga

SEQ ID NO: 296657 - DNA, 25 bp, Artificial
  probe
  misc_feature (1)..(25): SEQ ID NO: 1516; WAN024AW7; Start 440; Stop 464
aatttgcccaatttcagtatccttt

SEQ ID NO: 296658 - DNA, 25 bp, Artificial
  probe
  misc_feature (1)..(25): SEQ ID NO: 1516; WAN024AW7; Start 499; Stop 523
gcccatcgtgttattctctatacca

SEQ ID NO: 296659 - DNA, 25 bp, Artificial
  probe
  misc_feature (1)..(25): SEQ ID NO: 1516; WAN024AW7; Start 190; Stop 214
aatgaagagatgaagggactggaag

SEQ ID NO: 296660 - DNA, 25 bp, Artificial
  probe
  misc_feature (1)..(25): SEQ ID NO: 1516; WAN024AW7; Start 188; Stop 212
gaaatgaagagatgaagggactgga

SEQ ID NO: 296661 - DNA, 25 bp, Artificial
  probe
  misc_feature (1)..(25): SEQ ID NO: 1516; WAN024AW7; Start 308; Stop 332
tgtctgctttggactacattgataa

SEQ ID NO: 296662 - DNA, 25 bp, Artificial
  probe
  misc_feature (1)..(25): SEQ ID NO: 1516; WAN024AW7; Start 309; Stop 333
gtctgctttggactacattgataag

SEQ ID NO: 296663 - DNA, 25 bp, Artificial
  probe
  misc_feature (1)..(25): SEQ ID NO: 1517; WAN024FRM; Start 56; Stop 80
agcattatggtcattcaatcattct

SEQ ID NO: 296664 - DNA, 25 bp, Artificial
  probe
  misc_feature (1)..(25): SEQ ID NO: 1517; WAN024FRM; Start 52; Stop 76
agtaagcattatggtcattcaatca

SEQ ID NO: 296665 - DNA, 25 bp, Artificial
  probe
  misc_feature (1)..(25): SEQ ID NO: 1517; WAN024FRM; Start 57; Stop 81
gcattatggtcattcaatcattctc

SEQ ID NO: 296666 - DNA, 25 bp, Artificial
  probe
  misc_feature (1)..(25): SEQ ID NO: 1517; WAN024FRM; Start 48; Stop 72
tgtaagtaagcattatggtcattca

SEQ ID NO: 296667 - DNA, 25 bp, Artificial
  probe
  misc_feature (1)..(25): SEQ ID NO: 1517; WAN024FRM; Start 55; Stop 79
aagcattatggtcattcaatcattc

SEQ ID NO: 296668 - DNA, 25 bp, Artificial
  probe
  misc_feature (1)..(25): SEQ ID NO: 1517; WAN024FRM; Start 51; Stop 75
aagtaagcattatggtcattcaatc

SEQ ID NO: 296669 - DNA, 25 bp, Artificial
  probe
  misc_feature (1)..(25): SEQ ID NO: 1517; WAN024FRM; Start 53; Stop 77
gtaagcattatggtcattcaatcat

SEQ ID NO: 296670 - DNA, 25 bp, Artificial
  probe
  misc_feature (1)..(25): SEQ ID NO: 1517; WAN024FRM; Start 675; Stop 699
ttcatcagctacagatagagacatt

SEQ ID NO: 296671 - DNA, 25 bp, Artificial
  probe
  misc_feature (1)..(25): SEQ ID NO: 1517; WAN024FRM; Start 49; Stop 73
gtaagtaagcattatggtcattcaa

SEQ ID NO: 296672 - DNA, 25 bp, Artificial
  probe
  misc_feature (1)..(25): SEQ ID NO: 1517; WAN024FRM; Start 58; Stop 82
cattatggtcattcaatcattctca

SEQ ID NO: 296673 - DNA, 25 bp, Artificial
  probe
  misc_feature (1)..(25): SEQ ID NO: 1517; WAN024FRM; Start 140; Stop 164
gagttggtaagagtacgttgatgaa

SEQ ID NO: 296674 - DNA, 25 bp, Artificial
  probe
  misc_feature (1)..(25): SEQ ID NO: 1517; WAN024FRM; Start 47; Stop 71
atgtaagtaagcattatggtcattc

SEQ ID NO: 296675 - DNA, 25 bp, Artificial
  probe
  misc_feature (1)..(25): SEQ ID NO: 1517; WAN024FRM; Start 54; Stop 78
taagcattatggtcattcaatcatt

SEQ ID NO: 296676 - DNA, 25 bp, Artificial
  probe
  misc_feature (1)..(25): SEQ ID NO: 1517; WAN024FRM; Start 130; Stop 154
gggagaaatggagttggtaagagta

SEQ ID NO: 296677 - DNA, 25 bp, Artificial
  probe
  misc_feature (1)..(25): SEQ ID NO: 1517; WAN024FRM; Start 137; Stop 161
atggagttggtaagagtacgttgat

SEQ ID NO: 296678 - DNA, 25 bp, Artificial
  probe
  misc_feature (1)..(25): SEQ ID NO: 1517; WAN024FRM; Start 136; Stop 160
aatggagttggtaagagtacgttga

SEQ ID NO: 296679 - DNA, 25 bp, Artificial
  probe
  misc_feature (1)..(25): SEQ ID NO: 1517; WAN024FRM; Start 131; Stop 155
ggagaaatggagttggtaagagtac

SEQ ID NO: 296680 - DNA, 25 bp, Artificial
  probe
  misc_feature (1)..(25): SEQ ID NO: 1517; WAN024FRM; Start 59; Stop 83
attatggtcattcaatcattctcaa

SEQ ID NO: 296681 - DNA, 25 bp, Artificial
  probe
  misc_feature (1)..(25): SEQ ID NO: 1517; WAN024FRM; Start 132; Stop 156
gagaaatggagttggtaagagtacg

SEQ ID NO: 296682 - DNA, 25 bp, Artificial
  probe
  misc_feature (1)..(25): SEQ ID NO: 1517; WAN024FRM; Start 178; Stop 202
aataatcaaccgacttcaggtaata

SEQ ID NO: 296683 - DNA, 25 bp, Artificial
  probe
  misc_feature (1)..(25): SEQ ID NO: 1517; WAN024FRM; Start 139; Stop 163
ggagttggtaagagtacgttgatga

SEQ ID NO: 296684 - DNA, 25 bp, Artificial
  probe
  misc_feature (1)..(25): SEQ ID NO: 1517; WAN024FRM; Start 50; Stop 74
taagtaagcattatggtcattcaat

SEQ ID NO: 296685 - DNA, 25 bp, Artificial
  probe
  misc_feature (1)..(25): SEQ ID NO: 1517; WAN024FRM; Start 179; Stop 203
ataatcaaccgacttcaggtaatat

SEQ ID NO: 296686 - DNA, 25 bp, Artificial
  probe
  misc_feature (1)..(25): SEQ ID NO: 1517; WAN024FRM; Start 138; Stop 162
tggagttggtaagagtacgttgatg

SEQ ID NO: 296687 - DNA, 25 bp, Artificial
  probe
  misc_feature (1)..(25): SEQ ID NO: 1517; WAN024FRM; Start 676; Stop 700
tcatcagctacagatagagacattt

SEQ ID NO: 296688 - DNA, 25 bp, Artificial
  probe
  misc_feature (1)..(25): SEQ ID NO: 1517; WAN024FRM; Start 674; Stop 698
tttcatcagctacagatagagacat

SEQ ID NO: 296689 - DNA, 25 bp, Artificial
  probe
  misc_feature (1)..(25): SEQ ID NO: 1517; WAN024FRM; Start 332; Stop 356
gtttgatccaagagttagatttgac

SEQ ID NO: 296690 - DNA, 25 bp, Artificial
  probe
  misc_feature (1)..(25): SEQ ID NO: 1517; WAN024FRM; Start 180; Stop 204
taatcaaccgacttcaggtaatatt

SEQ ID NO: 296691 - DNA, 25 bp, Artificial
  probe
  misc_feature (1)..(25): SEQ ID NO: 1517; WAN024FRM; Start 141; Stop 165
agttggtaagagtacgttgatgaaa

SEQ ID NO: 296692 - DNA, 25 bp, Artificial
  probe
  misc_feature (1)..(25): SEQ ID NO: 1517; WAN024FRM; Start 333; Stop 357
tttgatccaagagttagatttgact

SEQ ID NO: 296693 - DNA, 25 bp, Artificial
  probe
  misc_feature (1)..(25): SEQ ID NO: 1517; WAN024FRM; Start 129; Stop 153
agggagaaatggagttggtaagagt

SEQ ID NO: 296694 - DNA, 25 bp, Artificial
  probe
  misc_feature (1)..(25): SEQ ID NO: 1517; WAN024FRM; Start 297; Stop 321
atatggtgttgactacaatcaagaa

SEQ ID NO: 296695 - DNA, 25 bp, Artificial
  probe
  misc_feature (1)..(25): SEQ ID NO: 1517; WAN024FRM; Start 134; Stop 158
gaaatggagttggtaagagtacgtt

SEQ ID NO: 296696 - DNA, 25 bp, Artificial
  probe
  misc_feature (1)..(25): SEQ ID NO: 1518; WAN024CYS; Start 589; Stop 613
ggtctccaagtagataagttgtctc

SEQ ID NO: 296697 - DNA, 25 bp, Artificial
  probe
  misc_feature (1)..(25): SEQ ID NO: 1518; WAN024CYS; Start 590; Stop 614
gtctccaagtagataagttgtctcg

SEQ ID NO: 296698 - DNA, 25 bp, Artificial
  probe
  misc_feature (1)..(25): SEQ ID NO: 1518; WAN024CYS; Start 591; Stop 615
tctccaagtagataagttgtctcgg

SEQ ID NO: 296699 - DNA, 25 bp, Artificial
  probe
  misc_feature (1)..(25): SEQ ID NO: 1518; WAN024CYS; Start 595; Stop 619
caagtagataagttgtctcggactc

SEQ ID NO: 296700 - DNA, 25 bp, Artificial
  probe
  misc_feature (1)..(25): SEQ ID NO: 1518; WAN024CYS; Start 106; Stop 130
gaactagcaaccactatcaagtcag

SEQ ID NO: 296701 - DNA, 25 bp, Artificial
  probe
  misc_feature (1)..(25): SEQ ID NO: 1518; WAN024CYS; Start 105; Stop 129
tgaactagcaaccactatcaagtca

SEQ ID NO: 296702 - DNA, 25 bp, Artificial
  probe
  misc_feature (1)..(25): SEQ ID NO: 1518; WAN024CYS; Start 594; Stop 618
ccaagtagataagttgtctcggact

SEQ ID NO: 296703 - DNA, 25 bp, Artificial
  probe
  misc_feature (1)..(25): SEQ ID NO: 1518; WAN024CYS; Start 596; Stop 620
aagtagataagttgtctcggactcg

SEQ ID NO: 296704 - DNA, 25 bp, Artificial
  probe
  misc_feature (1)..(25): SEQ ID NO: 1518; WAN024CYS; Start 588; Stop 612
tggtctccaagtagataagttgtct

SEQ ID NO: 296705 - DNA, 25 bp, Artificial
  probe
  misc_feature (1)..(25): SEQ ID NO: 1518; WAN024CYS; Start 592; Stop 616
ctccaagtagataagttgtctcgga

SEQ ID NO: 296706 - DNA, 25 bp, Artificial
  probe
  misc_feature (1)..(25): SEQ ID NO: 1518; WAN024CYS; Start 104; Stop 128
gtgaactagcaaccactatcaagtc

SEQ ID NO: 296707 - DNA, 25 bp, Artificial
  probe
  misc_feature (1)..(25): SEQ ID NO: 1518; WAN024CYS; Start 598; Stop 622
gtagataagttgtctcggactcgtt

SEQ ID NO: 296708 - DNA, 25 bp, Artificial
  probe
  misc_feature (1)..(25): SEQ ID NO: 1518; WAN024CYS; Start 107; Stop 131
aactagcaaccactatcaagtcagg

SEQ ID NO: 296709 - DNA, 25 bp, Artificial
  probe
  misc_feature (1)..(25): SEQ ID NO: 1518; WAN024CYS; Start 593; Stop 617
tccaagtagataagttgtctcggac

SEQ ID NO: 296710 - DNA, 25 bp, Artificial
  probe
  misc_feature (1)..(25): SEQ ID NO: 1518; WAN024CYS; Start 343; Stop 367
gactttacagacgagatgattcacc

SEQ ID NO: 296711 - DNA, 25 bp, Artificial
  probe
  misc_feature (1)..(25): SEQ ID NO: 1518; WAN024CYS; Start 342; Stop 366
ggactttacagacgagatgattcac

SEQ ID NO: 296712 - DNA, 25 bp, Artificial
  probe
  misc_feature (1)..(25): SEQ ID NO: 1518; WAN024CYS; Start 148; Stop 172
gaaggtcaacctatctacaacgaag

SEQ ID NO: 296713 - DNA, 25 bp, Artificial
  probe
  misc_feature (1)..(25): SEQ ID NO: 1518; WAN024CYS; Start 446; Stop 470
gtggtcttgagattgatggtaagaa

SEQ ID NO: 296714 - DNA, 25 bp, Artificial
  probe
  misc_feature (1)..(25): SEQ ID NO: 1518; WAN024CYS; Start 597; Stop 621
agtagataagttgtctcggactcgt

SEQ ID NO: 296715 - DNA, 25 bp, Artificial
  probe
  misc_feature (1)..(25): SEQ ID NO: 1518; WAN024CYS; Start 151; Stop 175
ggtcaacctatctacaacgaagaaa

SEQ ID NO: 296716 - DNA, 25 bp, Artificial
  probe
  misc_feature (1)..(25): SEQ ID NO: 1518; WAN024CYS; Start 485; Stop 509
tttatgaaattctcaaagtggaccc

SEQ ID NO: 296717 - DNA, 25 bp, Artificial
  probe
  misc_feature (1)..(25): SEQ ID NO: 1518; WAN024CYS; Start 150; Stop 174
aggtcaacctatctacaacgaagaa

SEQ ID NO: 296718 - DNA, 25 bp, Artificial
  probe
  misc_feature (1)..(25): SEQ ID NO: 1518; WAN024CYS; Start 149; Stop 173
aaggtcaacctatctacaacgaaga

SEQ ID NO: 296719 - DNA, 25 bp, Artificial
  probe
  misc_feature (1)..(25): SEQ ID NO: 1518; WAN024CYS; Start 444; Stop 468
ccgtggtcttgagattgatggtaag

SEQ ID NO: 296720 - DNA, 25 bp, Artificial
  probe
  misc_feature (1)..(25): SEQ ID NO: 1518; WAN024CYS; Start 370; Stop 394
cgtaatgagattgacaaggtttatg

SEQ ID NO: 296721 - DNA, 25 bp, Artificial
  probe
  misc_feature (1)..(25): SEQ ID NO: 1518; WAN024CYS; Start 357; Stop 381
gatgattcaccctcgtaatgagatt

SEQ ID NO: 296722 - DNA, 25 bp, Artificial
  probe
  misc_feature (1)..(25): SEQ ID NO: 1518; WAN024CYS; Start 481; Stop 505
gctgtttatgaaattctcaaagtgg

SEQ ID NO: 296723 - DNA, 25 bp, Artificial
  probe
  misc_feature (1)..(25): SEQ ID NO: 1518; WAN024CYS; Start 486; Stop 510
ttatgaaattctcaaagtggaccca

SEQ ID NO: 296724 - DNA, 25 bp, Artificial
  probe
  misc_feature (1)..(25): SEQ ID NO: 1518; WAN024CYS; Start 369; Stop 393
tcgtaatgagattgacaaggtttat

SEQ ID NO: 296725 - DNA, 25 bp, Artificial
  probe
  misc_feature (1)..(25): SEQ ID NO: 1518; WAN024CYS; Start 147; Stop 171
tgaaggtcaacctatctacaacgaa

SEQ ID NO: 296726 - DNA, 25 bp, Artificial
  probe
  misc_feature (1)..(25): SEQ ID NO: 1518; WAN024CYS; Start 358; Stop 382
atgattcaccctcgtaatgagattg

SEQ ID NO: 296727 - DNA, 25 bp, Artificial
  probe
  misc_feature (1)..(25): SEQ ID NO: 1518; WAN024CYS; Start 487; Stop 511
tatgaaattctcaaagtggacccag

SEQ ID NO: 296728 - DNA, 25 bp, Artificial
  probe
  misc_feature (1)..(25): SEQ ID NO: 1518; WAN024CYS; Start 368; Stop 392
ctcgtaatgagattgacaaggttta

SEQ ID NO: 296729 - DNA, 25 bp, Artificial
  probe
  misc_feature (1)..(25): SEQ ID NO: 1519; WAN024BH7; Start 379; Stop 403
cgttcaactgttaccttaataccaa

SEQ ID NO: 296730 - DNA, 25 bp, Artificial
  probe
  misc_feature (1)..(25): SEQ ID NO: 1519; WAN024BH7; Start 378; Stop 402
ccgttcaactgttaccttaatacca

SEQ ID NO: 296731 - DNA, 25 bp, Artificial
  probe
  misc_feature (1)..(25): SEQ ID NO: 1519; WAN024BH7; Start 185; Stop 209
aagatacagtggcaatatcggagtt

SEQ ID NO: 296732 - DNA, 25 bp, Artificial
  probe
  misc_feature (1)..(25): SEQ ID NO: 1519; WAN024BH7; Start 186; Stop 210
agatacagtggcaatatcggagttg

SEQ ID NO: 296733 - DNA, 25 bp, Artificial
  probe
  misc_feature (1)..(25): SEQ ID NO: 1519; WAN024BH7; Start 382; Stop 406
tcaactgttaccttaataccaaagc

SEQ ID NO: 296734 - DNA, 25 bp, Artificial
  probe
  misc_feature (1)..(25): SEQ ID NO: 1519; WAN024BH7; Start 172; Stop 196
catagttctcggaaagatacagtgg

SEQ ID NO: 296735 - DNA, 25 bp, Artificial
  probe
  misc_feature (1)..(25): SEQ ID NO: 1519; WAN024BH7; Start 171; Stop 195
ccatagttctcggaaagatacagtg

SEQ ID NO: 296736 - DNA, 25 bp, Artificial
  probe
  misc_feature (1)..(25): SEQ ID NO: 1519; WAN024BH7; Start 281; Stop 305
ctagagcgaggtcatctgatagatt

SEQ ID NO: 296737 - DNA, 25 bp, Artificial
  probe
  misc_feature (1)..(25): SEQ ID NO: 1519; WAN024BH7; Start 377; Stop 401
cccgttcaactgttaccttaatacc

SEQ ID NO: 296738 - DNA, 25 bp, Artificial
  probe
  misc_feature (1)..(25): SEQ ID NO: 1519; WAN024BH7; Start 282; Stop 306
tagagcgaggtcatctgatagattg

SEQ ID NO: 296739 - DNA, 25 bp, Artificial
  probe
  misc_feature (1)..(25): SEQ ID NO: 1519; WAN024BH7; Start 178; Stop 202
tctcggaaagatacagtggcaatat

SEQ ID NO: 296740 - DNA, 25 bp, Artificial
  probe
  misc_feature (1)..(25): SEQ ID NO: 1519; WAN024BH7; Start 170; Stop 194
cccatagttctcggaaagatacagt

SEQ ID NO: 296741 - DNA, 25 bp, Artificial
  probe
  misc_feature (1)..(25): SEQ ID NO: 1519; WAN024BH7; Start 106; Stop 130
gttccattaacagccttccctaaag

SEQ ID NO: 296742 - DNA, 25 bp, Artificial
  probe
  misc_feature (1)..(25): SEQ ID NO: 1519; WAN024BH7; Start 376; Stop 400
gcccgttcaactgttaccttaatac

SEQ ID NO: 296743 - DNA, 25 bp, Artificial
  probe
  misc_feature (1)..(25): SEQ ID NO: 1519; WAN024BH7; Start 177; Stop 201
ttctcggaaagatacagtggcaata

SEQ ID NO: 296744 - DNA, 25 bp, Artificial
  probe
  misc_feature (1)..(25): SEQ ID NO: 1519; WAN024BH7; Start 296; Stop 320
ctgatagattggaaatgcggttgac

SEQ ID NO: 296745 - DNA, 25 bp, Artificial
  probe
  misc_feature (1)..(25): SEQ ID NO: 1519; WAN024BH7; Start 183; Stop 207
gaaagatacagtggcaatatcggag

SEQ ID NO: 296746 - DNA, 25 bp, Artificial
  probe
  misc_feature (1)..(25): SEQ ID NO: 1519; WAN024BH7; Start 179; Stop 203
ctcggaaagatacagtggcaatatc

SEQ ID NO: 296747 - DNA, 25 bp, Artificial
  probe
  misc_feature (1)..(25): SEQ ID NO: 1519; WAN024BH7; Start 173; Stop 197
atagttctcggaaagatacagtggc

SEQ ID NO: 296748 - DNA, 25 bp, Artificial
  probe
  misc_feature (1)..(25): SEQ ID NO: 1519; WAN024BH7; Start 157; Stop 181
gtttgcgattgttcccatagttctc

SEQ ID NO: 296749 - DNA, 25 bp, Artificial
  probe
  misc_feature (1)..(25): SEQ ID NO: 1519; WAN024BH7; Start 15; Stop 39
aataatgccgttaactgctactgac

SEQ ID NO: 296750 - DNA, 25 bp, Artificial
  probe
  misc_feature (1)..(25): SEQ ID NO: 1519; WAN024BH7; Start 14; Stop 38
caataatgccgttaactgctactga

SEQ ID NO: 296751 - DNA, 25 bp, Artificial
  probe
  misc_feature (1)..(25): SEQ ID NO: 1519; WAN024BH7; Start 213; Stop 237
cacttcaattccgattagggatttc

SEQ ID NO: 296752 - DNA, 25 bp, Artificial
  probe
  misc_feature (1)..(25): SEQ ID NO: 1519; WAN024BH7; Start 187; Stop 211
gatacagtggcaatatcggagttgg

SEQ ID NO: 296753 - DNA, 25 bp, Artificial
  probe
  misc_feature (1)..(25): SEQ ID NO: 1519; WAN024BH7; Start 25; Stop 49
ttaactgctactgacttccctgaac

SEQ ID NO: 296754 - DNA, 25 bp, Artificial
  probe
  misc_feature (1)..(25): SEQ ID NO: 1519; WAN024BH7; Start 295; Stop 319
tctgatagattggaaatgcggttga

SEQ ID NO: 296755 - DNA, 25 bp, Artificial
  probe
  misc_feature (1)..(25): SEQ ID NO: 1519; WAN024BH7; Start 214; Stop 238
acttcaattccgattagggatttcc

SEQ ID NO: 296756 - DNA, 25 bp, Artificial
  probe
  misc_feature (1)..(25): SEQ ID NO: 1519; WAN024BH7; Start 380; Stop 404
gttcaactgttaccttaataccaaa

SEQ ID NO: 296757 - DNA, 25 bp, Artificial
  probe
  misc_feature (1)..(25): SEQ ID NO: 1519; WAN024BH7; Start 184; Stop 208
aaagatacagtggcaatatcggagt

SEQ ID NO: 296758 - DNA, 25 bp, Artificial
  probe
  misc_feature (1)..(25): SEQ ID NO: 1519; WAN024BH7; Start 383; Stop 407
caactgttaccttaataccaaagct

SEQ ID NO: 296759 - DNA, 25 bp, Artificial
  probe
  misc_feature (1)..(25): SEQ ID NO: 1519; WAN024BH7; Start 169; Stop 193
tcccatagttctcggaaagatacag

SEQ ID NO: 296760 - DNA, 25 bp, Artificial
  probe
  misc_feature (1)..(25): SEQ ID NO: 1519; WAN024BH7; Start 342; Stop 366
gacttcatacttggtcactgatggc

SEQ ID NO: 296761 - DNA, 25 bp, Artificial
  probe
  misc_feature (1)..(25): SEQ ID NO: 1519; WAN024BH7; Start 16; Stop 40
ataatgccgttaactgctactgact

SEQ ID NO: 296762 - DNA, 25 bp, Artificial
  probe
  misc_feature (1)..(25): SEQ ID NO: 1520; WAN024EUD; Start 146; Stop 170
ttgatacttacaaggtggaacgatt

SEQ ID NO: 296763 - DNA, 25 bp, Artificial
  probe
  misc_feature (1)..(25): SEQ ID NO: 1520; WAN024EUD; Start 141; Stop 165
attggttgatacttacaaggtggaa

SEQ ID NO: 296764 - DNA, 25 bp, Artificial
  probe
  misc_feature (1)..(25): SEQ ID NO: 1520; WAN024EUD; Start 140; Stop 164
aattggttgatacttacaaggtgga

SEQ ID NO: 296765 - DNA, 25 bp, Artificial
  probe
  misc_feature (1)..(25): SEQ ID NO: 1520; WAN024EUD; Start 139; Stop 163
gaattggttgatacttacaaggtgg

SEQ ID NO: 296766 - DNA, 25 bp, Artificial
  probe
  misc_feature (1)..(25): SEQ ID NO: 1520; WAN024EUD; Start 138; Stop 162
ggaattggttgatacttacaaggtg

SEQ ID NO: 296767 - DNA, 25 bp, Artificial
  probe
  misc_feature (1)..(25): SEQ ID NO: 1520; WAN024EUD; Start 137; Stop 161
aggaattggttgatacttacaaggt

SEQ ID NO: 296768 - DNA, 25 bp, Artificial
  probe
  misc_feature (1)..(25): SEQ ID NO: 1520; WAN024EUD; Start 145; Stop 169
gttgatacttacaaggtggaacgat

SEQ ID NO: 296769 - DNA, 25 bp, Artificial
  probe
  misc_feature (1)..(25): SEQ ID NO: 1520; WAN024EUD; Start 142; Stop 166
ttggttgatacttacaaggtggaac

SEQ ID NO: 296770 - DNA, 25 bp, Artificial
  probe
  misc_feature (1)..(25): SEQ ID NO: 1520; WAN024EUD; Start 266; Stop 290
taccagtagactatcaggatgaacg

SEQ ID NO: 296771 - DNA, 25 bp, Artificial
  probe
  misc_feature (1)..(25): SEQ ID NO: 1520; WAN024EUD; Start 265; Stop 289
ttaccagtagactatcaggatgaac

SEQ ID NO: 296772 - DNA, 25 bp, Artificial
  probe
  misc_feature (1)..(25): SEQ ID NO: 1520; WAN024EUD; Start 136; Stop 160
aaggaattggttgatacttacaagg

SEQ ID NO: 296773 - DNA, 25 bp, Artificial
  probe
  misc_feature (1)..(25): SEQ ID NO: 1520; WAN024EUD; Start 131; Stop 155
gcgttaaggaattggttgatactta

SEQ ID NO: 296774 - DNA, 25 bp, Artificial
  probe
  misc_feature (1)..(25): SEQ ID NO: 1520; WAN024EUD; Start 272; Stop 296
tagactatcaggatgaacgcttgac

SEQ ID NO: 296775 - DNA, 25 bp, Artificial
  probe
  misc_feature (1)..(25): SEQ ID NO: 1520; WAN024EUD; Start 271; Stop 295
gtagactatcaggatgaacgcttga

SEQ ID NO: 296776 - DNA, 25 bp, Artificial
  probe
  misc_feature (1)..(25): SEQ ID NO: 1520; WAN024EUD; Start 270; Stop 294
agtagactatcaggatgaacgcttg

SEQ ID NO: 296777 - DNA, 25 bp, Artificial
  probe
  misc_feature (1)..(25): SEQ ID NO: 1520; WAN024EUD; Start 269; Stop 293
cagtagactatcaggatgaacgctt

SEQ ID NO: 296778 - DNA, 25 bp, Artificial
  probe
  misc_feature (1)..(25): SEQ ID NO: 1520; WAN024EUD; Start 359; Stop 383
aagtcattgataagttagcagctca

SEQ ID NO: 296779 - DNA, 25 bp, Artificial
  probe
  misc_feature (1)..(25): SEQ ID NO: 1520; WAN024EUD; Start 144; Stop 168
ggttgatacttacaaggtggaacga

SEQ ID NO: 296780 - DNA, 25 bp, Artificial
  probe
  misc_feature (1)..(25): SEQ ID NO: 1520; WAN024EUD; Start 147; Stop 171
tgatacttacaaggtggaacgattt

SEQ ID NO: 296781 - DNA, 25 bp, Artificial
  probe
  misc_feature (1)..(25): SEQ ID NO: 1520; WAN024EUD; Start 360; Stop 384
agtcattgataagttagcagctcag

SEQ ID NO: 296782 - DNA, 25 bp, Artificial
  probe
  misc_feature (1)..(25): SEQ ID NO: 1520; WAN024EUD; Start 132; Stop 156
cgttaaggaattggttgatacttac

SEQ ID NO: 296783 - DNA, 25 bp, Artificial
  probe
  misc_feature (1)..(25): SEQ ID NO: 1520; WAN024EUD; Start 356; Stop 380
agaaagtcattgataagttagcagc

SEQ ID NO: 296784 - DNA, 25 bp, Artificial
  probe
  misc_feature (1)..(25): SEQ ID NO: 1520; WAN024EUD; Start 90; Stop 114
catccagataaatgaagaacaaggc

SEQ ID NO: 296785 - DNA, 25 bp, Artificial
  probe
  misc_feature (1)..(25): SEQ ID NO: 1520; WAN024EUD; Start 143; Stop 167
tggttgatacttacaaggtggaacg

SEQ ID NO: 296786 - DNA, 25 bp, Artificial
  probe
  misc_feature (1)..(25): SEQ ID NO: 1520; WAN024EUD; Start 262; Stop 286
ggtttaccagtagactatcaggatg

SEQ ID NO: 296787 - DNA, 25 bp, Artificial
  probe
  misc_feature (1)..(25): SEQ ID NO: 1520; WAN024EUD; Start 326; Stop 350
aacaagcagatatcagtcgcaataa

SEQ ID NO: 296788 - DNA, 25 bp, Artificial
  probe
  misc_feature (1)..(25): SEQ ID NO: 1520; WAN024EUD; Start 148; Stop 172
gatacttacaaggtggaacgatttg

SEQ ID NO: 296789 - DNA, 25 bp, Artificial
  probe
  misc_feature (1)..(25): SEQ ID NO: 1520; WAN024EUD; Start 274; Stop 298
gactatcaggatgaacgcttgacaa

SEQ ID NO: 296790 - DNA, 25 bp, Artificial
  probe
  misc_feature (1)..(25): SEQ ID NO: 1520; WAN024EUD; Start 327; Stop 351
acaagcagatatcagtcgcaataag

SEQ ID NO: 296791 - DNA, 25 bp, Artificial
  probe
  misc_feature (1)..(25): SEQ ID NO: 1520; WAN024EUD; Start 325; Stop 349
gaacaagcagatatcagtcgcaata

SEQ ID NO: 296792 - DNA, 25 bp, Artificial
  probe
  misc_feature (1)..(25): SEQ ID NO: 1520; WAN024EUD; Start 263; Stop 287
gtttaccagtagactatcaggatga

SEQ ID NO: 296793 - DNA, 25 bp, Artificial
  probe
  misc_feature (1)..(25): SEQ ID NO: 1520; WAN024EUD; Start 353; Stop 377
gcaagaaagtcattgataagttagc

SEQ ID NO: 296794 - DNA, 25 bp, Artificial
  probe
  misc_feature (1)..(25): SEQ ID NO: 1520; WAN024EUD; Start 361; Stop 385
gtcattgataagttagcagctcagc

SEQ ID NO: 296795 - DNA, 25 bp, Artificial
  probe
  misc_feature (1)..(25): SEQ ID NO: 1521; WAN024FPV; Start 190; Stop 214
cttgattgcggtctaatatccattg

SEQ ID NO: 296796 - DNA, 25 bp, Artificial
  probe
  misc_feature (1)..(25): SEQ ID NO: 1521; WAN024FPV; Start 191; Stop 215
ttgattgcggtctaatatccattga

SEQ ID NO: 296797 - DNA, 25 bp, Artificial
  probe
  misc_feature (1)..(25): SEQ ID NO: 1521; WAN024FPV; Start 189; Stop 213
acttgattgcggtctaatatccatt

SEQ ID NO: 296798 - DNA, 25 bp, Artificial
  probe
  misc_feature (1)..(25): SEQ ID NO: 1521; WAN024FPV; Start 192; Stop 216
tgattgcggtctaatatccattgag

SEQ ID NO: 296799 - DNA, 25 bp, Artificial
  probe
  misc_feature (1)..(25): SEQ ID NO: 1521; WAN024FPV; Start 188; Stop 212
cacttgattgcggtctaatatccat

SEQ ID NO: 296800 - DNA, 25 bp, Artificial
  probe
  misc_feature (1)..(25): SEQ ID NO: 1521; WAN024FPV; Start 185; Stop 209
catcacttgattgcggtctaatatc

SEQ ID NO: 296801 - DNA, 25 bp, Artificial
  probe
  misc_feature (1)..(25): SEQ ID NO: 1521; WAN024FPV; Start 186; Stop 210
atcacttgattgcggtctaatatcc

SEQ ID NO: 296802 - DNA, 25 bp, Artificial
  probe
  misc_feature (1)..(25): SEQ ID NO: 1521; WAN024FPV; Start 193; Stop 217
gattgcggtctaatatccattgagc

SEQ ID NO: 296803 - DNA, 25 bp, Artificial
  probe
  misc_feature (1)..(25): SEQ ID NO: 1521; WAN024FPV; Start 187; Stop 211
tcacttgattgcggtctaatatcca

SEQ ID NO: 296804 - DNA, 25 bp, Artificial
  probe
  misc_feature (1)..(25): SEQ ID NO: 1521; WAN024FPV; Start 184; Stop 208
tcatcacttgattgcggtctaatat

SEQ ID NO: 296805 - DNA, 25 bp, Artificial
  probe
  misc_feature (1)..(25): SEQ ID NO: 1521; WAN024FPV; Start 183; Stop 207
ttcatcacttgattgcggtctaata

SEQ ID NO: 296806 - DNA, 25 bp, Artificial
  probe
  misc_feature (1)..(25): SEQ ID NO: 1521; WAN024FPV; Start 104; Stop 128
caataccagccacaactgttagtaa

SEQ ID NO: 296807 - DNA, 25 bp, Artificial
  probe
  misc_feature (1)..(25): SEQ ID NO: 1521; WAN024FPV; Start 182; Stop 206
gttcatcacttgattgcggtctaat

SEQ ID NO: 296808 - DNA, 25 bp, Artificial
  probe
  misc_feature (1)..(25): SEQ ID NO: 1521; WAN024FPV; Start 161; Stop 185
ttactcttctttgcgaatcaagttc

SEQ ID NO: 296809 - DNA, 25 bp, Artificial
  probe
  misc_feature (1)..(25): SEQ ID NO: 1521; WAN024FPV; Start 160; Stop 184
cttactcttctttgcgaatcaagtt

SEQ ID NO: 296810 - DNA, 25 bp, Artificial
  probe
  misc_feature (1)..(25): SEQ ID NO: 1521; WAN024FPV; Start 155; Stop 179
ctctccttactcttctttgcgaatc

SEQ ID NO: 296811 - DNA, 25 bp, Artificial
  probe
  misc_feature (1)..(25): SEQ ID NO: 1521; WAN024FPV; Start 164; Stop 188
ctcttctttgcgaatcaagttcatc

SEQ ID NO: 296812 - DNA, 25 bp, Artificial
  probe
  misc_feature (1)..(25): SEQ ID NO: 1521; WAN024FPV; Start 181; Stop 205
agttcatcacttgattgcggtctaa

SEQ ID NO: 296813 - DNA, 25 bp, Artificial
  probe
  misc_feature (1)..(25): SEQ ID NO: 1521; WAN024FPV; Start 162; Stop 186
tactcttctttgcgaatcaagttca

SEQ ID NO: 296814 - DNA, 25 bp, Artificial
  probe
  misc_feature (1)..(25): SEQ ID NO: 1521; WAN024FPV; Start 194; Stop 218
attgcggtctaatatccattgagct

SEQ ID NO: 296815 - DNA, 25 bp, Artificial
  probe
  misc_feature (1)..(25): SEQ ID NO: 1521; WAN024FPV; Start 158; Stop 182
tccttactcttctttgcgaatcaag

SEQ ID NO: 296816 - DNA, 25 bp, Artificial
  probe
  misc_feature (1)..(25): SEQ ID NO: 1521; WAN024FPV; Start 157; Stop 181
ctccttactcttctttgcgaatcaa

SEQ ID NO: 296817 - DNA, 25 bp, Artificial
  probe
  misc_feature (1)..(25): SEQ ID NO: 1521; WAN024FPV; Start 166; Stop 190
cttctttgcgaatcaagttcatcac

SEQ ID NO: 296818 - DNA, 25 bp, Artificial
  probe
  misc_feature (1)..(25): SEQ ID NO: 1521; WAN024FPV; Start 165; Stop 189
tcttctttgcgaatcaagttcatca

SEQ ID NO: 296819 - DNA, 25 bp, Artificial
  probe
  misc_feature (1)..(25): SEQ ID NO: 1521; WAN024FPV; Start 154; Stop 178
tctctccttactcttctttgcgaat

SEQ ID NO: 296820 - DNA, 25 bp, Artificial
  probe
  misc_feature (1)..(25): SEQ ID NO: 1521; WAN024FPV; Start 52; Stop 76
gaaattccgtgtgccattaggtatt

SEQ ID NO: 296821 - DNA, 25 bp, Artificial
  probe
  misc_feature (1)..(25): SEQ ID NO: 1521; WAN024FPV; Start 163; Stop 187
actcttctttgcgaatcaagttcat

SEQ ID NO: 296822 - DNA, 25 bp, Artificial
  probe
  misc_feature (1)..(25): SEQ ID NO: 1521; WAN024FPV; Start 156; Stop 180
tctccttactcttctttgcgaatca

SEQ ID NO: 296823 - DNA, 25 bp, Artificial
  probe
  misc_feature (1)..(25): SEQ ID NO: 1521; WAN024FPV; Start 159; Stop 183
ccttactcttctttgcgaatcaagt

SEQ ID NO: 296824 - DNA, 25 bp, Artificial
  probe
  misc_feature (1)..(25): SEQ ID NO: 1521; WAN024FPV; Start 53; Stop 77
aaattccgtgtgccattaggtattg

SEQ ID NO: 296825 - DNA, 25 bp, Artificial
  probe
  misc_feature (1)..(25): SEQ ID NO: 1521; WAN024FPV; Start 105; Stop 129
aataccagccacaactgttagtaaa

SEQ ID NO: 296826 - DNA, 25 bp, Artificial
  probe
  misc_feature (1)..(25): SEQ ID NO: 1521; WAN024FPV; Start 167; Stop 191
ttctttgcgaatcaagttcatcact

SEQ ID NO: 296827 - DNA, 25 bp, Artificial
  probe
  misc_feature (1)..(25): SEQ ID NO: 1521; WAN024FPV; Start 150; Stop 174
catgtctctccttactcttctttgc

SEQ ID NO: 296828 - DNA, 25 bp, Artificial
  probe
  misc_feature (1)..(25): SEQ ID NO: 1522; WAN024D2A; Start 328; Stop 352
attactggtgaattgcttatgtgtg

SEQ ID NO: 296829 - DNA, 25 bp, Artificial
  probe
  misc_feature (1)..(25): SEQ ID NO: 1522; WAN024D2A; Start 331; Stop 355
actggtgaattgcttatgtgtgata

SEQ ID NO: 296830 - DNA, 25 bp, Artificial
  probe
  misc_feature (1)..(25): SEQ ID NO: 1522; WAN024D2A; Start 330; Stop 354
tactggtgaattgcttatgtgtgat

SEQ ID NO: 296831 - DNA, 25 bp, Artificial
  probe
  misc_feature (1)..(25): SEQ ID NO: 1522; WAN024D2A; Start 332; Stop 356
ctggtgaattgcttatgtgtgatat

SEQ ID NO: 296832 - DNA, 25 bp, Artificial
  probe
  misc_feature (1)..(25): SEQ ID NO: 1522; WAN024D2A; Start 329; Stop 353
ttactggtgaattgcttatgtgtga

SEQ ID NO: 296833 - DNA, 25 bp, Artificial
  probe
  misc_feature (1)..(25): SEQ ID NO: 1522; WAN024D2A; Start 184; Stop 208
gtatgtatctgtggtactggtgttg

SEQ ID NO: 296834 - DNA, 25 bp, Artificial
  probe
  misc_feature (1)..(25): SEQ ID NO: 1522; WAN024D2A; Start 189; Stop 213
tatctgtggtactggtgttggtatc

SEQ ID NO: 296835 - DNA, 25 bp, Artificial
  probe
  misc_feature (1)..(25): SEQ ID NO: 1522; WAN024D2A; Start 188; Stop 212
gtatctgtggtactggtgttggtat

SEQ ID NO: 296836 - DNA, 25 bp, Artificial
  probe
  misc_feature (1)..(25): SEQ ID NO: 1522; WAN024D2A; Start 185; Stop 209
tatgtatctgtggtactggtgttgg

SEQ ID NO: 296837 - DNA, 25 bp, Artificial
  probe
  misc_feature (1)..(25): SEQ ID NO: 1522; WAN024D2A; Start 223; Stop 247
gtaaataaagttccaggtgttcgtt

SEQ ID NO: 296838 - DNA, 25 bp, Artificial
  probe
  misc_feature (1)..(25): SEQ ID NO: 1522; WAN024D2A; Start 224; Stop 248
taaataaagttccaggtgttcgttc

SEQ ID NO: 296839 - DNA, 25 bp, Artificial
  probe
  misc_feature (1)..(25): SEQ ID NO: 1522; WAN024D2A; Start 222; Stop 246
tgtaaataaagttccaggtgttcgt

SEQ ID NO: 296840 - DNA, 25 bp, Artificial
  probe
  misc_feature (1)..(25): SEQ ID NO: 1522; WAN024D2A; Start 225; Stop 249
aaataaagttccaggtgttcgttct

SEQ ID NO: 296841 - DNA, 25 bp, Artificial
  probe
  misc_feature (1)..(25): SEQ ID NO: 1522; WAN024D2A; Start 333; Stop 357
tggtgaattgcttatgtgtgatatc

SEQ ID NO: 296842 - DNA, 25 bp, Artificial
  probe
  misc_feature (1)..(25): SEQ ID NO: 1522; WAN024D2A; Start 433; Stop 457
gaaagtcacaatgctcaacaaacag

SEQ ID NO: 296843 - DNA, 25 bp, Artificial
  probe
  misc_feature (1)..(25): SEQ ID NO: 1522; WAN024D2A; Start 187; Stop 211
tgtatctgtggtactggtgttggta

SEQ ID NO: 296844 - DNA, 25 bp, Artificial
  probe
  misc_feature (1)..(25): SEQ ID NO: 1522; WAN024D2A; Start 434; Stop 458
aaagtcacaatgctcaacaaacaga

SEQ ID NO: 296845 - DNA, 25 bp, Artificial
  probe
  misc_feature (1)..(25): SEQ ID NO: 1522; WAN024D2A; Start 212; Stop 236
tcaacaacgctgtaaataaagttcc

SEQ ID NO: 296846 - DNA, 25 bp, Artificial
  probe
  misc_feature (1)..(25): SEQ ID NO: 1522; WAN024D2A; Start 213; Stop 237
caacaacgctgtaaataaagttcca

SEQ ID NO: 296847 - DNA, 25 bp, Artificial
  probe
  misc_feature (1)..(25): SEQ ID NO: 1522; WAN024D2A; Start 207; Stop 231
tggtatcaacaacgctgtaaataaa

SEQ ID NO: 296848 - DNA, 25 bp, Artificial
  probe
  misc_feature (1)..(25): SEQ ID NO: 1522; WAN024D2A; Start 206; Stop 230
ttggtatcaacaacgctgtaaataa

SEQ ID NO: 296849 - DNA, 25 bp, Artificial
  probe
  misc_feature (1)..(25): SEQ ID NO: 1522; WAN024D2A; Start 259; Stop 283
cgtgatatgacaacagccctttatg

SEQ ID NO: 296850 - DNA, 25 bp, Artificial
  probe
  misc_feature (1)..(25): SEQ ID NO: 1522; WAN024D2A; Start 221; Stop 245
ctgtaaataaagttccaggtgttcg

SEQ ID NO: 296851 - DNA, 25 bp, Artificial
  probe
  misc_feature (1)..(25): SEQ ID NO: 1522; WAN024D2A; Start 214; Stop 238
aacaacgctgtaaataaagttccag

SEQ ID NO: 296852 - DNA, 25 bp, Artificial
  probe
  misc_feature (1)..(25): SEQ ID NO: 1522; WAN024D2A; Start 220; Stop 244
gctgtaaataaagttccaggtgttc

SEQ ID NO: 296853 - DNA, 25 bp, Artificial
  probe
  misc_feature (1)..(25): SEQ ID NO: 1522; WAN024D2A; Start 190; Stop 214
atctgtggtactggtgttggtatca

SEQ ID NO: 296854 - DNA, 25 bp, Artificial
  probe
  misc_feature (1)..(25): SEQ ID NO: 1522; WAN024D2A; Start 258; Stop 282
tcgtgatatgacaacagccctttat

SEQ ID NO: 296855 - DNA, 25 bp, Artificial
  probe
  misc_feature (1)..(25): SEQ ID NO: 1522; WAN024D2A; Start 208; Stop 232
ggtatcaacaacgctgtaaataaag

SEQ ID NO: 296856 - DNA, 25 bp, Artificial
  probe
  misc_feature (1)..(25): SEQ ID NO: 1522; WAN024D2A; Start 260; Stop 284
gtgatatgacaacagccctttatgc

SEQ ID NO: 296857 - DNA, 25 bp, Artificial
  probe
  misc_feature (1)..(25): SEQ ID NO: 1522; WAN024D2A; Start 257; Stop 281
ttcgtgatatgacaacagcccttta

SEQ ID NO: 296858 - DNA, 25 bp, Artificial
  probe
  misc_feature (1)..(25): SEQ ID NO: 1522; WAN024D2A; Start 211; Stop 235
atcaacaacgctgtaaataaagttc

SEQ ID NO: 296859 - DNA, 25 bp, Artificial
  probe
  misc_feature (1)..(25): SEQ ID NO: 1522; WAN024D2A; Start 432; Stop 456
tgaaagtcacaatgctcaacaaaca

SEQ ID NO: 296860 - DNA, 25 bp, Artificial
  probe
  misc_feature (1)..(25): SEQ ID NO: 1522; WAN024D2A; Start 226; Stop 250
aataaagttccaggtgttcgttctg

SEQ ID NO: 296861 - DNA, 25 bp, Artificial
  probe
  misc_feature (1)..(25): SEQ ID NO: 1523; WAN024ESX; Start 381; Stop 405
ttactacatcacgacgcctattctc

SEQ ID NO: 296862 - DNA, 25 bp, Artificial
  probe
  misc_feature (1)..(25): SEQ ID NO: 1523; WAN024ESX; Start 380; Stop 404
cttactacatcacgacgcctattct

SEQ ID NO: 296863 - DNA, 25 bp, Artificial
  probe
  misc_feature (1)..(25): SEQ ID NO: 1523; WAN024ESX; Start 703; Stop 727
aagaccttgtggaataacttgacag

SEQ ID NO: 296864 - DNA, 25 bp, Artificial
  probe
  misc_feature (1)..(25): SEQ ID NO: 1523; WAN024ESX; Start 638; Stop 662
ccgtagcagtagaagatgagaactt

SEQ ID NO: 296865 - DNA, 25 bp, Artificial
  probe
  misc_feature (1)..(25): SEQ ID NO: 1523; WAN024ESX; Start 710; Stop 734
tgtggaataacttgacaggttactt

SEQ ID NO: 296866 - DNA, 25 bp, Artificial
  probe
  misc_feature (1)..(25): SEQ ID NO: 1523; WAN024ESX; Start 709; Stop 733
ttgtggaataacttgacaggttact

SEQ ID NO: 296867 - DNA, 25 bp, Artificial
  probe
  misc_feature (1)..(25): SEQ ID NO: 1523; WAN024ESX; Start 708; Stop 732
cttgtggaataacttgacaggttac

SEQ ID NO: 296868 - DNA, 25 bp, Artificial
  probe
  misc_feature (1)..(25): SEQ ID NO: 1523; WAN024ESX; Start 707; Stop 731
ccttgtggaataacttgacaggtta

SEQ ID NO: 296869 - DNA, 25 bp, Artificial
  probe
  misc_feature (1)..(25): SEQ ID NO: 1523; WAN024ESX; Start 292; Stop 316
aacgaagatattctcaaggttgatt

SEQ ID NO: 296870 - DNA, 25 bp, Artificial
  probe
  misc_feature (1)..(25): SEQ ID NO: 1523; WAN024ESX; Start 529; Stop 553
cagtattacatgacagccaaggttg

SEQ ID NO: 296871 - DNA, 25 bp, Artificial
  probe
  misc_feature (1)..(25): SEQ ID NO: 1523; WAN024ESX; Start 738; Stop 762
taagactgaagaggtcaaggacaag

SEQ ID NO: 296872 - DNA, 25 bp, Artificial
  probe
  misc_feature (1)..(25): SEQ ID NO: 1523; WAN024ESX; Start 737; Stop 761
gtaagactgaagaggtcaaggacaa

SEQ ID NO: 296873 - DNA, 25 bp, Artificial
  probe
  misc_feature (1)..(25): SEQ ID NO: 1523; WAN024ESX; Start 379; Stop 403
ccttactacatcacgacgcctattc

SEQ ID NO: 296874 - DNA, 25 bp, Artificial
  probe
  misc_feature (1)..(25): SEQ ID NO: 1523; WAN024ESX; Start 1; Stop 25
atgagaattgcagattatagcgtga

SEQ ID NO: 296875 - DNA, 25 bp, Artificial
  probe
  misc_feature (1)..(25): SEQ ID NO: 1523; WAN024ESX; Start 290; Stop 314
ttaacgaagatattctcaaggttga

SEQ ID NO: 296876 - DNA, 25 bp, Artificial
  probe
  misc_feature (1)..(25): SEQ ID NO: 1523; WAN024ESX; Start 382; Stop 406
tactacatcacgacgcctattctca

SEQ ID NO: 296877 - DNA, 25 bp, Artificial
  probe
  misc_feature (1)..(25): SEQ ID NO: 1523; WAN024ESX; Start 854; Stop 878
ttaaagggcaaggactctaactaat

SEQ ID NO: 296878 - DNA, 25 bp, Artificial
  probe
  misc_feature (1)..(25): SEQ ID NO: 1523; WAN024ESX; Start 371; Stop 395
ctaatttgccttactacatcacgac

SEQ ID NO: 296879 - DNA, 25 bp, Artificial
  probe
  misc_feature (1)..(25): SEQ ID NO: 1523; WAN024ESX; Start 853; Stop 877
cttaaagggcaaggactctaactaa

SEQ ID NO: 296880 - DNA, 25 bp, Artificial
  probe
  misc_feature (1)..(25): SEQ ID NO: 1523; WAN024ESX; Start 291; Stop 315
taacgaagatattctcaaggttgat

SEQ ID NO: 296881 - DNA, 25 bp, Artificial
  probe
  misc_feature (1)..(25): SEQ ID NO: 1523; WAN024ESX; Start 2; Stop 26
tgagaattgcagattatagcgtgac

SEQ ID NO: 296882 - DNA, 25 bp, Artificial
  probe
  misc_feature (1)..(25): SEQ ID NO: 1523; WAN024ESX; Start 852; Stop 876
acttaaagggcaaggactctaacta

SEQ ID NO: 296883 - DNA, 25 bp, Artificial
  probe
  misc_feature (1)..(25): SEQ ID NO: 1523; WAN024ESX; Start 372; Stop 396
taatttgccttactacatcacgacg

SEQ ID NO: 296884 - DNA, 25 bp, Artificial
  probe
  misc_feature (1)..(25): SEQ ID NO: 1523; WAN024ESX; Start 370; Stop 394
gctaatttgccttactacatcacga

SEQ ID NO: 296885 - DNA, 25 bp, Artificial
  probe
  misc_feature (1)..(25): SEQ ID NO: 1523; WAN024ESX; Start 665; Stop 689
tctttaaggtttccaaggctagttt

SEQ ID NO: 296886 - DNA, 25 bp, Artificial
  probe
  misc_feature (1)..(25): SEQ ID NO: 1523; WAN024ESX; Start 664; Stop 688
ttctttaaggtttccaaggctagtt

SEQ ID NO: 296887 - DNA, 25 bp, Artificial
  probe
  misc_feature (1)..(25): SEQ ID NO: 1523; WAN024ESX; Start 663; Stop 687
tttctttaaggtttccaaggctagt

SEQ ID NO: 296888 - DNA, 25 bp, Artificial
  probe
  misc_feature (1)..(25): SEQ ID NO: 1523; WAN024ESX; Start 639; Stop 663
cgtagcagtagaagatgagaacttt

SEQ ID NO: 296889 - DNA, 25 bp, Artificial
  probe
  misc_feature (1)..(25): SEQ ID NO: 1523; WAN024ESX; Start 704; Stop 728
agaccttgtggaataacttgacagg

SEQ ID NO: 296890 - DNA, 25 bp, Artificial
  probe
  misc_feature (1)..(25): SEQ ID NO: 1523; WAN024ESX; Start 3; Stop 27
gagaattgcagattatagcgtgacc

SEQ ID NO: 296891 - DNA, 25 bp, Artificial
  probe
  misc_feature (1)..(25): SEQ ID NO: 1523; WAN024ESX; Start 383; Stop 407
actacatcacgacgcctattctcat

SEQ ID NO: 296892 - DNA, 25 bp, Artificial
  probe
  misc_feature (1)..(25): SEQ ID NO: 1523; WAN024ESX; Start 6; Stop 30
aattgcagattatagcgtgaccaag

SEQ ID NO: 296893 - DNA, 25 bp, Artificial
  probe
  misc_feature (1)..(25): SEQ ID NO: 1523; WAN024ESX; Start 5; Stop 29
gaattgcagattatagcgtgaccaa

SEQ ID NO: 296894 - DNA, 25 bp, Artificial
  probe
  misc_feature (1)..(25): SEQ ID NO: 1524; WAN024CM5; Start 32; Stop 56
ctactccttatgagggacactatca

SEQ ID NO: 296895 - DNA, 25 bp, Artificial
  probe
  misc_feature (1)..(25): SEQ ID NO: 1524; WAN024CM5; Start 26; Stop 50
tattacctactccttatgagggaca

SEQ ID NO: 296896 - DNA, 25 bp, Artificial
  probe
  misc_feature (1)..(25): SEQ ID NO: 1524; WAN024CM5; Start 27; Stop 51
attacctactccttatgagggacac

SEQ ID NO: 296897 - DNA, 25 bp, Artificial
  probe
  misc_feature (1)..(25): SEQ ID NO: 1524; WAN024CM5; Start 31; Stop 55
cctactccttatgagggacactatc

SEQ ID NO: 296898 - DNA, 25 bp, Artificial
  probe
  misc_feature (1)..(25): SEQ ID NO: 1524; WAN024CM5; Start 29; Stop 53
tacctactccttatgagggacacta

SEQ ID NO: 296899 - DNA, 25 bp, Artificial
  probe
  misc_feature (1)..(25): SEQ ID NO: 1524; WAN024CM5; Start 82; Stop 106
catgtattagttgggaaacaggaaa

SEQ ID NO: 296900 - DNA, 25 bp, Artificial
  probe
  misc_feature (1)..(25): SEQ ID NO: 1524; WAN024CM5; Start 30; Stop 54
acctactccttatgagggacactat

SEQ ID NO: 296901 - DNA, 25 bp, Artificial
  probe
  misc_feature (1)..(25): SEQ ID NO: 1524; WAN024CM5; Start 28; Stop 52
ttacctactccttatgagggacact

SEQ ID NO: 296902 - DNA, 25 bp, Artificial
  probe
  misc_feature (1)..(25): SEQ ID NO: 1524; WAN024CM5; Start 25; Stop 49
atattacctactccttatgagggac

SEQ ID NO: 296903 - DNA, 25 bp, Artificial
  probe
  misc_feature (1)..(25): SEQ ID NO: 1524; WAN024CM5; Start 23; Stop 47
agatattacctactccttatgaggg

SEQ ID NO: 296904 - DNA, 25 bp, Artificial
  probe
  misc_feature (1)..(25): SEQ ID NO: 1524; WAN024CM5; Start 22; Stop 46
aagatattacctactccttatgagg

SEQ ID NO: 296905 - DNA, 25 bp, Artificial
  probe
  misc_feature (1)..(25): SEQ ID NO: 1524; WAN024CM5; Start 24; Stop 48
gatattacctactccttatgaggga

SEQ ID NO: 296906 - DNA, 25 bp, Artificial
  probe
  misc_feature (1)..(25): SEQ ID NO: 1524; WAN024CM5; Start 35; Stop 59
ctccttatgagggacactatcattt

SEQ ID NO: 296907 - DNA, 25 bp, Artificial
  probe
  misc_feature (1)..(25): SEQ ID NO: 1524; WAN024CM5; Start 33; Stop 57
tactccttatgagggacactatcat

SEQ ID NO: 296908 - DNA, 25 bp, Artificial
  probe
  misc_feature (1)..(25): SEQ ID NO: 1524; WAN024CM5; Start 34; Stop 58
actccttatgagggacactatcatt

SEQ ID NO: 296909 - DNA, 25 bp, Artificial
  probe
  misc_feature (1)..(25): SEQ ID NO: 1524; WAN024CM5; Start 36; Stop 60
tccttatgagggacactatcattta

SEQ ID NO: 296910 - DNA, 25 bp, Artificial
  probe
  misc_feature (1)..(25): SEQ ID NO: 1524; WAN024CM5; Start 83; Stop 107
atgtattagttgggaaacaggaaaa

SEQ ID NO: 296911 - DNA, 25 bp, Artificial
  probe
  misc_feature (1)..(25): SEQ ID NO: 1524; WAN024CM5; Start 37; Stop 61
ccttatgagggacactatcatttat

SEQ ID NO: 296912 - DNA, 25 bp, Artificial
  probe
  misc_feature (1)..(25): SEQ ID NO: 1524; WAN024CM5; Start 81; Stop 105
acatgtattagttgggaaacaggaa

SEQ ID NO: 296913 - DNA, 25 bp, Artificial
  probe
  misc_feature (1)..(25): SEQ ID NO: 1524; WAN024CM5; Start 80; Stop 104
aacatgtattagttgggaaacagga

SEQ ID NO: 296914 - DNA, 25 bp, Artificial
  probe
  misc_feature (1)..(25): SEQ ID NO: 1524; WAN024CM5; Start 79; Stop 103
aaacatgtattagttgggaaacagg

SEQ ID NO: 296915 - DNA, 25 bp, Artificial
  probe
  misc_feature (1)..(25): SEQ ID NO: 1524; WAN024CM5; Start 61; Stop 85
tatataccatccagtaagaaacatg

SEQ ID NO: 296916 - DNA, 25 bp, Artificial
  probe
  misc_feature (1)..(25): SEQ ID NO: 1524; WAN024CM5; Start 77; Stop 101
agaaacatgtattagttgggaaaca

SEQ ID NO: 296917 - DNA, 25 bp, Artificial
  probe
  misc_feature (1)..(25): SEQ ID NO: 1524; WAN024CM5; Start 78; Stop 102
gaaacatgtattagttgggaaacag

SEQ ID NO: 296918 - DNA, 25 bp, Artificial
  probe
  misc_feature (1)..(25): SEQ ID NO: 1524; WAN024CM5; Start 66; Stop 90
accatccagtaagaaacatgtatta

SEQ ID NO: 296919 - DNA, 25 bp, Artificial
  probe
  misc_feature (1)..(25): SEQ ID NO: 1524; WAN024CM5; Start 65; Stop 89
taccatccagtaagaaacatgtatt

SEQ ID NO: 296920 - DNA, 25 bp, Artificial
  probe
  misc_feature (1)..(25): SEQ ID NO: 1524; WAN024CM5; Start 76; Stop 100
aagaaacatgtattagttgggaaac

SEQ ID NO: 296921 - DNA, 25 bp, Artificial
  probe
  misc_feature (1)..(25): SEQ ID NO: 1524; WAN024CM5; Start 72; Stop 96
cagtaagaaacatgtattagttggg

SEQ ID NO: 296922 - DNA, 25 bp, Artificial
  probe
  misc_feature (1)..(25): SEQ ID NO: 1524; WAN024CM5; Start 73; Stop 97
agtaagaaacatgtattagttggga

SEQ ID NO: 296923 - DNA, 25 bp, Artificial
  probe
  misc_feature (1)..(25): SEQ ID NO: 1524; WAN024CM5; Start 62; Stop 86
atataccatccagtaagaaacatgt

SEQ ID NO: 296924 - DNA, 25 bp, Artificial
  probe
  misc_feature (1)..(25): SEQ ID NO: 1524; WAN024CM5; Start 67; Stop 91
ccatccagtaagaaacatgtattag

SEQ ID NO: 296925 - DNA, 25 bp, Artificial
  probe
  misc_feature (1)..(25): SEQ ID NO: 1524; WAN024CM5; Start 63; Stop 87
tataccatccagtaagaaacatgta

SEQ ID NO: 296926 - DNA, 25 bp, Artificial
  probe
  misc_feature (1)..(25): SEQ ID NO: 1524; WAN024CM5; Start 74; Stop 98
gtaagaaacatgtattagttgggaa

SEQ ID NO: 296927 - DNA, 25 bp, Artificial
  probe
  misc_feature (1)..(25): SEQ ID NO: 1525; WAN024F4W; Start 1052; Stop 1076
ctattatcgctgtagatgcctatgt

SEQ ID NO: 296928 - DNA, 25 bp, Artificial
  probe
  misc_feature (1)..(25): SEQ ID NO: 1525; WAN024F4W; Start 1054; Stop 1078
attatcgctgtagatgcctatgtaa

SEQ ID NO: 296929 - DNA, 25 bp, Artificial
  probe
  misc_feature (1)..(25): SEQ ID NO: 1525; WAN024F4W; Start 1051; Stop 1075
gctattatcgctgtagatgcctatg

SEQ ID NO: 296930 - DNA, 25 bp, Artificial
  probe
  misc_feature (1)..(25): SEQ ID NO: 1525; WAN024F4W; Start 1053; Stop 1077
tattatcgctgtagatgcctatgta

SEQ ID NO: 296931 - DNA, 25 bp, Artificial
  probe
  misc_feature (1)..(25): SEQ ID NO: 1525; WAN024F4W; Start 250; Stop 274
tgtgatagtattatcggtcttggtg

SEQ ID NO: 296932 - DNA, 25 bp, Artificial
  probe
  misc_feature (1)..(25): SEQ ID NO: 1525; WAN024F4W; Start 251; Stop 275
gtgatagtattatcggtcttggtgg

SEQ ID NO: 296933 - DNA, 25 bp, Artificial
  probe
  misc_feature (1)..(25): SEQ ID NO: 1525; WAN024F4W; Start 249; Stop 273
ttgtgatagtattatcggtcttggt

SEQ ID NO: 296934 - DNA, 25 bp, Artificial
  probe
  misc_feature (1)..(25): SEQ ID NO: 1525; WAN024F4W; Start 248; Stop 272
attgtgatagtattatcggtcttgg

SEQ ID NO: 296935 - DNA, 25 bp, Artificial
  probe
  misc_feature (1)..(25): SEQ ID NO: 1525; WAN024F4W; Start 781; Stop 805
gcattgacaggtgacattcatcatt

SEQ ID NO: 296936 - DNA, 25 bp, Artificial
  probe
  misc_feature (1)..(25): SEQ ID NO: 1525; WAN024F4W; Start 1035; Stop 1059
ttcagatgttgctcaagctattatc

SEQ ID NO: 296937 - DNA, 25 bp, Artificial
  probe
  misc_feature (1)..(25): SEQ ID NO: 1525; WAN024F4W; Start 1036; Stop 1060
tcagatgttgctcaagctattatcg

SEQ ID NO: 296938 - DNA, 25 bp, Artificial
  probe
  misc_feature (1)..(25): SEQ ID NO: 1525; WAN024F4W; Start 1034; Stop 1058
cttcagatgttgctcaagctattat

SEQ ID NO: 296939 - DNA, 25 bp, Artificial
  probe
  misc_feature (1)..(25): SEQ ID NO: 1525; WAN024F4W; Start 1033; Stop 1057
ccttcagatgttgctcaagctatta

SEQ ID NO: 296940 - DNA, 25 bp, Artificial
  probe
  misc_feature (1)..(25): SEQ ID NO: 1525; WAN024F4W; Start 480; Stop 504
taagcgtttattagcgtctggtatt

SEQ ID NO: 296941 - DNA, 25 bp, Artificial
  probe
  misc_feature (1)..(25): SEQ ID NO: 1525; WAN024F4W; Start 1055; Stop 1079
ttatcgctgtagatgcctatgtaaa

SEQ ID NO: 296942 - DNA, 25 bp, Artificial
  probe
  misc_feature (1)..(25): SEQ ID NO: 1525; WAN024F4W; Start 1056; Stop 1080
tatcgctgtagatgcctatgtaaat

SEQ ID NO: 296943 - DNA, 25 bp, Artificial
  probe
  misc_feature (1)..(25): SEQ ID NO: 1525; WAN024F4W; Start 1057; Stop 1081
atcgctgtagatgcctatgtaaatt

SEQ ID NO: 296944 - DNA, 25 bp, Artificial
  probe
  misc_feature (1)..(25): SEQ ID NO: 1525; WAN024F4W; Start 1021; Stop 1045
tttaagatttcgccttcagatgttg

SEQ ID NO: 296945 - DNA, 25 bp, Artificial
  probe
  misc_feature (1)..(25): SEQ ID NO: 1525; WAN024F4W; Start 1020; Stop 1044
gtttaagatttcgccttcagatgtt

SEQ ID NO: 296946 - DNA, 25 bp, Artificial
  probe
  misc_feature (1)..(25): SEQ ID NO: 1525; WAN024F4W; Start 1060; Stop 1084
gctgtagatgcctatgtaaattcaa

SEQ ID NO: 296947 - DNA, 25 bp, Artificial
  probe
  misc_feature (1)..(25): SEQ ID NO: 1525; WAN024F4W; Start 1058; Stop 1082
tcgctgtagatgcctatgtaaattc

SEQ ID NO: 296948 - DNA, 25 bp, Artificial
  probe
  misc_feature (1)..(25): SEQ ID NO: 1525; WAN024F4W; Start 1059; Stop 1083
cgctgtagatgcctatgtaaattca

SEQ ID NO: 296949 - DNA, 25 bp, Artificial
  probe
  misc_feature (1)..(25): SEQ ID NO: 1525; WAN024F4W; Start 782; Stop 806
cattgacaggtgacattcatcattt

SEQ ID NO: 296950 - DNA, 25 bp, Artificial
  probe
  misc_feature (1)..(25): SEQ ID NO: 1525; WAN024F4W; Start 786; Stop 810
gacaggtgacattcatcatttaaca

SEQ ID NO: 296951 - DNA, 25 bp, Artificial
  probe
  misc_feature (1)..(25): SEQ ID NO: 1525; WAN024F4W; Start 785; Stop 809
tgacaggtgacattcatcatttaac

SEQ ID NO: 296952 - DNA, 25 bp, Artificial
  probe
  misc_feature (1)..(25): SEQ ID NO: 1525; WAN024F4W; Start 362; Stop 386
cacctgtatctgctttatctgttat

SEQ ID NO: 296953 - DNA, 25 bp, Artificial
  probe
  misc_feature (1)..(25): SEQ ID NO: 1525; WAN024F4W; Start 600; Stop 624
aattgcgaagaaatgtgaagaaacg

SEQ ID NO: 296954 - DNA, 25 bp, Artificial
  probe
  misc_feature (1)..(25): SEQ ID NO: 1525; WAN024F4W; Start 481; Stop 505
aagcgtttattagcgtctggtattg

SEQ ID NO: 296955 - DNA, 25 bp, Artificial
  probe
  misc_feature (1)..(25): SEQ ID NO: 1525; WAN024F4W; Start 1007; Stop 1031
ttcatcagatgccgtttaagatttc

SEQ ID NO: 296956 - DNA, 25 bp, Artificial
  probe
  misc_feature (1)..(25): SEQ ID NO: 1525; WAN024F4W; Start 1004; Stop 1028
caattcatcagatgccgtttaagat

SEQ ID NO: 296957 - DNA, 25 bp, Artificial
  probe
  misc_feature (1)..(25): SEQ ID NO: 1525; WAN024F4W; Start 784; Stop 808
ttgacaggtgacattcatcatttaa

SEQ ID NO: 296958 - DNA, 25 bp, Artificial
  probe
  misc_feature (1)..(25): SEQ ID NO: 1525; WAN024F4W; Start 94; Stop 118
attctattatgcgatcagttggttt

SEQ ID NO: 296959 - DNA, 25 bp, Artificial
  probe
  misc_feature (1)..(25): SEQ ID NO: 1525; WAN024F4W; Start 1006; Stop 1030
attcatcagatgccgtttaagattt

SEQ ID NO: 296960 - DNA, 25 bp, Artificial
  probe
  misc_feature (1)..(25): SEQ ID NO: 1526; WAN024FO8; Start 700; Stop 724
tatgaatcatacatggaagaacggc

SEQ ID NO: 296961 - DNA, 25 bp, Artificial
  probe
  misc_feature (1)..(25): SEQ ID NO: 1526; WAN024FO8; Start 699; Stop 723
ttatgaatcatacatggaagaacgg

SEQ ID NO: 296962 - DNA, 25 bp, Artificial
  probe
  misc_feature (1)..(25): SEQ ID NO: 1526; WAN024FO8; Start 219; Stop 243
tgaggataaagcaccagatttagta

SEQ ID NO: 296963 - DNA, 25 bp, Artificial
  probe
  misc_feature (1)..(25): SEQ ID NO: 1526; WAN024FO8; Start 220; Stop 244
gaggataaagcaccagatttagtaa

SEQ ID NO: 296964 - DNA, 25 bp, Artificial
  probe
  misc_feature (1)..(25): SEQ ID NO: 1526; WAN024FO8; Start 218; Stop 242
gtgaggataaagcaccagatttagt

SEQ ID NO: 296965 - DNA, 25 bp, Artificial
  probe
  misc_feature (1)..(25): SEQ ID NO: 1526; WAN024FO8; Start 221; Stop 245
aggataaagcaccagatttagtaaa

SEQ ID NO: 296966 - DNA, 25 bp, Artificial
  probe
  misc_feature (1)..(25): SEQ ID NO: 1526; WAN024FO8; Start 698; Stop 722
attatgaatcatacatggaagaacg

SEQ ID NO: 296967 - DNA, 25 bp, Artificial
  probe
  misc_feature (1)..(25): SEQ ID NO: 1526; WAN024FO8; Start 695; Stop 719
tgaattatgaatcatacatggaaga

SEQ ID NO: 296968 - DNA, 25 bp, Artificial
  probe
  misc_feature (1)..(25): SEQ ID NO: 1526; WAN024FO8; Start 701; Stop 725
atgaatcatacatggaagaacggcc

SEQ ID NO: 296969 - DNA, 25 bp, Artificial
  probe
  misc_feature (1)..(25): SEQ ID NO: 1526; WAN024FO8; Start 195; Stop 219
aatttggatttgctggtttcagggt

SEQ ID NO: 296970 - DNA, 25 bp, Artificial
  probe
  misc_feature (1)..(25): SEQ ID NO: 1526; WAN024FO8; Start 861; Stop 885
aaatggtagggaaacggtttataaa

SEQ ID NO: 296971 - DNA, 25 bp, Artificial
  probe
  misc_feature (1)..(25): SEQ ID NO: 1526; WAN024FO8; Start 860; Stop 884
aaaatggtagggaaacggtttataa

SEQ ID NO: 296972 - DNA, 25 bp, Artificial
  probe
  misc_feature (1)..(25): SEQ ID NO: 1526; WAN024FO8; Start 455; Stop 479
tgactagggatttagatttgtctat

SEQ ID NO: 296973 - DNA, 25 bp, Artificial
  probe
  misc_feature (1)..(25): SEQ ID NO: 1526; WAN024FO8; Start 194; Stop 218
aaatttggatttgctggtttcaggg

SEQ ID NO: 296974 - DNA, 25 bp, Artificial
  probe
  misc_feature (1)..(25): SEQ ID NO: 1526; WAN024FO8; Start 703; Stop 727
gaatcatacatggaagaacggcctg

SEQ ID NO: 296975 - DNA, 25 bp, Artificial
  probe
  misc_feature (1)..(25): SEQ ID NO: 1526; WAN024FO8; Start 202; Stop 226
atttgctggtttcagggtgaggata

SEQ ID NO: 296976 - DNA, 25 bp, Artificial
  probe
  misc_feature (1)..(25): SEQ ID NO: 1526; WAN024FO8; Start 222; Stop 246
ggataaagcaccagatttagtaaaa

SEQ ID NO: 296977 - DNA, 25 bp, Artificial
  probe
  misc_feature (1)..(25): SEQ ID NO: 1526; WAN024FO8; Start 627; Stop 651
tgagaaatatgatcgctttatagat

SEQ ID NO: 296978 - DNA, 25 bp, Artificial
  probe
  misc_feature (1)..(25): SEQ ID NO: 1526; WAN024FO8; Start 697; Stop 721
aattatgaatcatacatggaagaac

SEQ ID NO: 296979 - DNA, 25 bp, Artificial
  probe
  misc_feature (1)..(25): SEQ ID NO: 1526; WAN024FO8; Start 694; Stop 718
ttgaattatgaatcatacatggaag

SEQ ID NO: 296980 - DNA, 25 bp, Artificial
  probe
  misc_feature (1)..(25): SEQ ID NO: 1526; WAN024FO8; Start 702; Stop 726
tgaatcatacatggaagaacggcct

SEQ ID NO: 296981 - DNA, 25 bp, Artificial
  probe
  misc_feature (1)..(25): SEQ ID NO: 1526; WAN024FO8; Start 204; Stop 228
ttgctggtttcagggtgaggataaa

SEQ ID NO: 296982 - DNA, 25 bp, Artificial
  probe
  misc_feature (1)..(25): SEQ ID NO: 1526; WAN024FO8; Start 203; Stop 227
tttgctggtttcagggtgaggataa

SEQ ID NO: 296983 - DNA, 25 bp, Artificial
  probe
  misc_feature (1)..(25): SEQ ID NO: 1526; WAN024FO8; Start 196; Stop 220
atttggatttgctggtttcagggtg

SEQ ID NO: 296984 - DNA, 25 bp, Artificial
  probe
  misc_feature (1)..(25): SEQ ID NO: 1526; WAN024FO8; Start 192; Stop 216
taaaatttggatttgctggtttcag

SEQ ID NO: 296985 - DNA, 25 bp, Artificial
  probe
  misc_feature (1)..(25): SEQ ID NO: 1526; WAN024FO8; Start 193; Stop 217
aaaatttggatttgctggtttcagg

SEQ ID NO: 296986 - DNA, 25 bp, Artificial
  probe
  misc_feature (1)..(25): SEQ ID NO: 1526; WAN024FO8; Start 573; Stop 597
gccctctaattttaaattggttcaa

SEQ ID NO: 296987 - DNA, 25 bp, Artificial
  probe
  misc_feature (1)..(25): SEQ ID NO: 1526; WAN024FO8; Start 696; Stop 720
gaattatgaatcatacatggaagaa

SEQ ID NO: 296988 - DNA, 25 bp, Artificial
  probe
  misc_feature (1)..(25): SEQ ID NO: 1526; WAN024FO8; Start 191; Stop 215
ataaaatttggatttgctggtttca

SEQ ID NO: 296989 - DNA, 25 bp, Artificial
  probe
  misc_feature (1)..(25): SEQ ID NO: 1526; WAN024FO8; Start 188; Stop 212
tgaataaaatttggatttgctggtt

SEQ ID NO: 296990 - DNA, 25 bp, Artificial
  probe
  misc_feature (1)..(25): SEQ ID NO: 1526; WAN024FO8; Start 187; Stop 211
ttgaataaaatttggatttgctggt

SEQ ID NO: 296991 - DNA, 25 bp, Artificial
  probe
  misc_feature (1)..(25): SEQ ID NO: 1526; WAN024FO8; Start 207; Stop 231
ctggtttcagggtgaggataaagca

SEQ ID NO: 296992 - DNA, 25 bp, Artificial
  probe
  misc_feature (1)..(25): SEQ ID NO: 1526; WAN024FO8; Start 205; Stop 229
tgctggtttcagggtgaggataaag

SEQ ID NO: 296993 - DNA, 25 bp, Artificial
  probe
  misc_feature (1)..(25): SEQ ID NO: 1527; WAN024CXJ; Start 294; Stop 318
gttgaatcgttggacaagaatgcta

SEQ ID NO: 296994 - DNA, 25 bp, Artificial
  probe
  misc_feature (1)..(25): SEQ ID NO: 1527; WAN024CXJ; Start 320; Stop 344
ctatgattgtgctgacattcctgtt

SEQ ID NO: 296995 - DNA, 25 bp, Artificial
  probe
  misc_feature (1)..(25): SEQ ID NO: 1527; WAN024CXJ; Start 295; Stop 319
ttgaatcgttggacaagaatgctag

SEQ ID NO: 296996 - DNA, 25 bp, Artificial
  probe
  misc_feature (1)..(25): SEQ ID NO: 1527; WAN024CXJ; Start 140; Stop 164
ttgagacgatagaagtatcagagta

SEQ ID NO: 296997 - DNA, 25 bp, Artificial
  probe
  misc_feature (1)..(25): SEQ ID NO: 1527; WAN024CXJ; Start 141; Stop 165
tgagacgatagaagtatcagagtat

SEQ ID NO: 296998 - DNA, 25 bp, Artificial
  probe
  misc_feature (1)..(25): SEQ ID NO: 1527; WAN024CXJ; Start 338; Stop 362
tcctgtttgaaatgggtagttatct

SEQ ID NO: 296999 - DNA, 25 bp, Artificial
  probe
  misc_feature (1)..(25): SEQ ID NO: 1527; WAN024CXJ; Start 45; Stop 69
ctttgttctaattgacgcccatatt

SEQ ID NO: 297000 - DNA, 25 bp, Artificial
  probe
  misc_feature (1)..(25): SEQ ID NO: 1527; WAN024CXJ; Start 372; Stop 396
tatggtagggttgacagtagatagc

SEQ ID NO: 297001 - DNA, 25 bp, Artificial
  probe
  misc_feature (1)..(25): SEQ ID NO: 1527; WAN024CXJ; Start 192; Stop 216
aggcttggtttatgatgtttacttt

SEQ ID NO: 297002 - DNA, 25 bp, Artificial
  probe
  misc_feature (1)..(25): SEQ ID NO: 1527; WAN024CXJ; Start 38; Stop 62
ttcctttctttgttctaattgacgc

SEQ ID NO: 297003 - DNA, 25 bp, Artificial
  probe
  misc_feature (1)..(25): SEQ ID NO: 1527; WAN024CXJ; Start 143; Stop 167
agacgatagaagtatcagagtatct

SEQ ID NO: 297004 - DNA, 25 bp, Artificial
  probe
  misc_feature (1)..(25): SEQ ID NO: 1527; WAN024CXJ; Start 44; Stop 68
tctttgttctaattgacgcccatat

SEQ ID NO: 297005 - DNA, 25 bp, Artificial
  probe
  misc_feature (1)..(25): SEQ ID NO: 1527; WAN024CXJ; Start 339; Stop 363
cctgtttgaaatgggtagttatctt

SEQ ID NO: 297006 - DNA, 25 bp, Artificial
  probe
  misc_feature (1)..(25): SEQ ID NO: 1527; WAN024CXJ; Start 43; Stop 67
ttctttgttctaattgacgcccata

SEQ ID NO: 297007 - DNA, 25 bp, Artificial
  probe
  misc_feature (1)..(25): SEQ ID NO: 1527; WAN024CXJ; Start 5; Stop 29
gacagttgaagcgagttggagtatt

SEQ ID NO: 297008 - DNA, 25 bp, Artificial
  probe
  misc_feature (1)..(25): SEQ ID NO: 1527; WAN024CXJ; Start 371; Stop 395
ttatggtagggttgacagtagatag

SEQ ID NO: 297009 - DNA, 25 bp, Artificial
  probe
  misc_feature (1)..(25): SEQ ID NO: 1527; WAN024CXJ; Start 35; Stop 59
tgcttcctttctttgttctaattga

SEQ ID NO: 297010 - DNA, 25 bp, Artificial
  probe
  misc_feature (1)..(25): SEQ ID NO: 1527; WAN024CXJ; Start 337; Stop 361
ttcctgtttgaaatgggtagttatc

SEQ ID NO: 297011 - DNA, 25 bp, Artificial
  probe
  misc_feature (1)..(25): SEQ ID NO: 1527; WAN024CXJ; Start 144; Stop 168
gacgatagaagtatcagagtatctc

SEQ ID NO: 297012 - DNA, 25 bp, Artificial
  probe
  misc_feature (1)..(25): SEQ ID NO: 1527; WAN024CXJ; Start 142; Stop 166
gagacgatagaagtatcagagtatc

SEQ ID NO: 297013 - DNA, 25 bp, Artificial
  probe
  misc_feature (1)..(25): SEQ ID NO: 1527; WAN024CXJ; Start 36; Stop 60
gcttcctttctttgttctaattgac

SEQ ID NO: 297014 - DNA, 25 bp, Artificial
  probe
  misc_feature (1)..(25): SEQ ID NO: 1527; WAN024CXJ; Start 186; Stop 210
tgttataggcttggtttatgatgtt

SEQ ID NO: 297015 - DNA, 25 bp, Artificial
  probe
  misc_feature (1)..(25): SEQ ID NO: 1527; WAN024CXJ; Start 185; Stop 209
ttgttataggcttggtttatgatgt

SEQ ID NO: 297016 - DNA, 25 bp, Artificial
  probe
  misc_feature (1)..(25): SEQ ID NO: 1527; WAN024CXJ; Start 37; Stop 61
cttcctttctttgttctaattgacg

SEQ ID NO: 297017 - DNA, 25 bp, Artificial
  probe
  misc_feature (1)..(25): SEQ ID NO: 1527; WAN024CXJ; Start 370; Stop 394
tttatggtagggttgacagtagata

SEQ ID NO: 297018 - DNA, 25 bp, Artificial
  probe
  misc_feature (1)..(25): SEQ ID NO: 1527; WAN024CXJ; Start 191; Stop 215
taggcttggtttatgatgtttactt

SEQ ID NO: 297019 - DNA, 25 bp, Artificial
  probe
  misc_feature (1)..(25): SEQ ID NO: 1527; WAN024CXJ; Start 42; Stop 66
tttctttgttctaattgacgcccat

SEQ ID NO: 297020 - DNA, 25 bp, Artificial
  probe
  misc_feature (1)..(25): SEQ ID NO: 1527; WAN024CXJ; Start 34; Stop 58
ttgcttcctttctttgttctaattg

SEQ ID NO: 297021 - DNA, 25 bp, Artificial
  probe
  misc_feature (1)..(25): SEQ ID NO: 1527; WAN024CXJ; Start 46; Stop 70
tttgttctaattgacgcccatatta

SEQ ID NO: 297022 - DNA, 25 bp, Artificial
  probe
  misc_feature (1)..(25): SEQ ID NO: 1527; WAN024CXJ; Start 190; Stop 214
ataggcttggtttatgatgtttact

SEQ ID NO: 297023 - DNA, 25 bp, Artificial
  probe
  misc_feature (1)..(25): SEQ ID NO: 1527; WAN024CXJ; Start 336; Stop 360
attcctgtttgaaatgggtagttat

SEQ ID NO: 297024 - DNA, 25 bp, Artificial
  probe
  misc_feature (1)..(25): SEQ ID NO: 1527; WAN024CXJ; Start 39; Stop 63
tcctttctttgttctaattgacgcc

SEQ ID NO: 297025 - DNA, 25 bp, Artificial
  probe
  misc_feature (1)..(25): SEQ ID NO: 1527; WAN024CXJ; Start 321; Stop 345
tatgattgtgctgacattcctgttt

SEQ ID NO: 297026 - DNA, 25 bp, Artificial
  probe
  misc_feature (1)..(25): SEQ ID NO: 1528; WAN024DF7; Start 95; Stop 119
ccactattgaagaggctatccagaa

SEQ ID NO: 297027 - DNA, 25 bp, Artificial
  probe
  misc_feature (1)..(25): SEQ ID NO: 1528; WAN024DF7; Start 127; Stop 151
gctgttcaccttatcttgtctgaga

SEQ ID NO: 297028 - DNA, 25 bp, Artificial
  probe
  misc_feature (1)..(25): SEQ ID NO: 1528; WAN024DF7; Start 128; Stop 152
ctgttcaccttatcttgtctgagac

SEQ ID NO: 297029 - DNA, 25 bp, Artificial
  probe
  misc_feature (1)..(25): SEQ ID NO: 1528; WAN024DF7; Start 98; Stop 122
ctattgaagaggctatccagaaaca

SEQ ID NO: 297030 - DNA, 25 bp, Artificial
  probe
  misc_feature (1)..(25): SEQ ID NO: 1528; WAN024DF7; Start 97; Stop 121
actattgaagaggctatccagaaac

SEQ ID NO: 297031 - DNA, 25 bp, Artificial
  probe
  misc_feature (1)..(25): SEQ ID NO: 1528; WAN024DF7; Start 96; Stop 120
cactattgaagaggctatccagaaa

SEQ ID NO: 297032 - DNA, 25 bp, Artificial
  probe
  misc_feature (1)..(25): SEQ ID NO: 1528; WAN024DF7; Start 1; Stop 25
atgagacataaattccagcaagttc

SEQ ID NO: 297033 - DNA, 25 bp, Artificial
  probe
  misc_feature (1)..(25): SEQ ID NO: 1528; WAN024DF7; Start 99; Stop 123
tattgaagaggctatccagaaacaa

SEQ ID NO: 297034 - DNA, 25 bp, Artificial
  probe
  misc_feature (1)..(25): SEQ ID NO: 1528; WAN024DF7; Start 100; Stop 124
attgaagaggctatccagaaacaaa

SEQ ID NO: 297035 - DNA, 25 bp, Artificial
  probe
  misc_feature (1)..(25): SEQ ID NO: 1528; WAN024DF7; Start 2; Stop 26
tgagacataaattccagcaagttct

SEQ ID NO: 297036 - DNA, 25 bp, Artificial
  probe
  misc_feature (1)..(25): SEQ ID NO: 1528; WAN024DF7; Start 3; Stop 27
gagacataaattccagcaagttcta

SEQ ID NO: 297037 - DNA, 25 bp, Artificial
  probe
  misc_feature (1)..(25): SEQ ID NO: 1528; WAN024DF7; Start 233; Stop 257
ggattatccgtataagcgatattca

SEQ ID NO: 297038 - DNA, 25 bp, Artificial
  probe
  misc_feature (1)..(25): SEQ ID NO: 1528; WAN024DF7; Start 101; Stop 125
ttgaagaggctatccagaaacaaac

SEQ ID NO: 297039 - DNA, 25 bp, Artificial
  probe
  misc_feature (1)..(25): SEQ ID NO: 1528; WAN024DF7; Start 235; Stop 259
attatccgtataagcgatattcaac

SEQ ID NO: 297040 - DNA, 25 bp, Artificial
  probe
  misc_feature (1)..(25): SEQ ID NO: 1528; WAN024DF7; Start 236; Stop 260
ttatccgtataagcgatattcaacg

SEQ ID NO: 297041 - DNA, 25 bp, Artificial
  probe
  misc_feature (1)..(25): SEQ ID NO: 1528; WAN024DF7; Start 82; Stop 106
aactcccttacagccactattgaag

SEQ ID NO: 297042 - DNA, 25 bp, Artificial
  probe
  misc_feature (1)..(25): SEQ ID NO: 1528; WAN024DF7; Start 234; Stop 258
gattatccgtataagcgatattcaa

SEQ ID NO: 297043 - DNA, 25 bp, Artificial
  probe
  misc_feature (1)..(25): SEQ ID NO: 1528; WAN024DF7; Start 126; Stop 150
cgctgttcaccttatcttgtctgag

SEQ ID NO: 297044 - DNA, 25 bp, Artificial
  probe
  misc_feature (1)..(25): SEQ ID NO: 1528; WAN024DF7; Start 102; Stop 126
tgaagaggctatccagaaacaaacc

SEQ ID NO: 297045 - DNA, 25 bp, Artificial
  probe
  misc_feature (1)..(25): SEQ ID NO: 1528; WAN024DF7; Start 81; Stop 105
caactcccttacagccactattgaa

SEQ ID NO: 297046 - DNA, 25 bp, Artificial
  probe
  misc_feature (1)..(25): SEQ ID NO: 1528; WAN024DF7; Start 84; Stop 108
ctcccttacagccactattgaagag

SEQ ID NO: 297047 - DNA, 25 bp, Artificial
  probe
  misc_feature (1)..(25): SEQ ID NO: 1528; WAN024DF7; Start 83; Stop 107
actcccttacagccactattgaaga

SEQ ID NO: 297048 - DNA, 25 bp, Artificial
  probe
  misc_feature (1)..(25): SEQ ID NO: 1528; WAN024DF7; Start 123; Stop 147
aaccgctgttcaccttatcttgtct

SEQ ID NO: 297049 - DNA, 25 bp, Artificial
  probe
  misc_feature (1)..(25): SEQ ID NO: 1528; WAN024DF7; Start 70; Stop 94
cagactgaaaccaactcccttacag

SEQ ID NO: 297050 - DNA, 25 bp, Artificial
  probe
  misc_feature (1)..(25): SEQ ID NO: 1528; WAN024DF7; Start 103; Stop 127
gaagaggctatccagaaacaaaccg

SEQ ID NO: 297051 - DNA, 25 bp, Artificial
  probe
  misc_feature (1)..(25): SEQ ID NO: 1528; WAN024DF7; Start 78; Stop 102
aaccaactcccttacagccactatt

SEQ ID NO: 297052 - DNA, 25 bp, Artificial
  probe
  misc_feature (1)..(25): SEQ ID NO: 1528; WAN024DF7; Start 77; Stop 101
aaaccaactcccttacagccactat

SEQ ID NO: 297053 - DNA, 25 bp, Artificial
  probe
  misc_feature (1)..(25): SEQ ID NO: 1528; WAN024DF7; Start 122; Stop 146
aaaccgctgttcaccttatcttgtc

SEQ ID NO: 297054 - DNA, 25 bp, Artificial
  probe
  misc_feature (1)..(25): SEQ ID NO: 1528; WAN024DF7; Start 124; Stop 148
accgctgttcaccttatcttgtctg

SEQ ID NO: 297055 - DNA, 25 bp, Artificial
  probe
  misc_feature (1)..(25): SEQ ID NO: 1528; WAN024DF7; Start 125; Stop 149
ccgctgttcaccttatcttgtctga

SEQ ID NO: 297056 - DNA, 25 bp, Artificial
  probe
  misc_feature (1)..(25): SEQ ID NO: 1528; WAN024DF7; Start 67; Stop 91
gaccagactgaaaccaactccctta

SEQ ID NO: 297057 - DNA, 25 bp, Artificial
  probe
  misc_feature (1)..(25): SEQ ID NO: 1528; WAN024DF7; Start 121; Stop 145
caaaccgctgttcaccttatcttgt

SEQ ID NO: 297058 - DNA, 25 bp, Artificial
  probe
  misc_feature (1)..(25): SEQ ID NO: 1528; WAN024DF7; Start 76; Stop 100
gaaaccaactcccttacagccacta

SEQ ID NO: 297059 - DNA, 25 bp, Artificial
  probe
  misc_feature (1)..(25): SEQ ID NO: 1529; WAN024CMH; Start 92; Stop 116
aagatgtatactgtagatgtaagct

SEQ ID NO: 297060 - DNA, 25 bp, Artificial
  probe
  misc_feature (1)..(25): SEQ ID NO: 1529; WAN024CMH; Start 93; Stop 117
agatgtatactgtagatgtaagctt

SEQ ID NO: 297061 - DNA, 25 bp, Artificial
  probe
  misc_feature (1)..(25): SEQ ID NO: 1529; WAN024CMH; Start 91; Stop 115
aaagatgtatactgtagatgtaagc

SEQ ID NO: 297062 - DNA, 25 bp, Artificial
  probe
  misc_feature (1)..(25): SEQ ID NO: 1530; WAN024CMI; Start 59; Stop 83
cagttgaggagatgggctataaaat

SEQ ID NO: 297063 - DNA, 25 bp, Artificial
  probe
  misc_feature (1)..(25): SEQ ID NO: 1530; WAN024CMI; Start 60; Stop 84
agttgaggagatgggctataaaata

SEQ ID NO: 297064 - DNA, 25 bp, Artificial
  probe
  misc_feature (1)..(25): SEQ ID NO: 1530; WAN024CMI; Start 64; Stop 88
gaggagatgggctataaaatagaca

SEQ ID NO: 297065 - DNA, 25 bp, Artificial
  probe
  misc_feature (1)..(25): SEQ ID NO: 1530; WAN024CMI; Start 63; Stop 87
tgaggagatgggctataaaatagac

SEQ ID NO: 297066 - DNA, 25 bp, Artificial
  probe
  misc_feature (1)..(25): SEQ ID NO: 1530; WAN024CMI; Start 65; Stop 89
aggagatgggctataaaatagacaa

SEQ ID NO: 297067 - DNA, 25 bp, Artificial
  probe
  misc_feature (1)..(25): SEQ ID NO: 1530; WAN024CMI; Start 61; Stop 85
gttgaggagatgggctataaaatag

SEQ ID NO: 297068 - DNA, 25 bp, Artificial
  probe
  misc_feature (1)..(25): SEQ ID NO: 1530; WAN024CMI; Start 62; Stop 86
ttgaggagatgggctataaaataga

SEQ ID NO: 297069 - DNA, 25 bp, Artificial
  probe
  misc_feature (1)..(25): SEQ ID NO: 1530; WAN024CMI; Start 66; Stop 90
ggagatgggctataaaatagacaaa

SEQ ID NO: 297070 - DNA, 25 bp, Artificial
  probe
  misc_feature (1)..(25): SEQ ID NO: 1530; WAN024CMI; Start 58; Stop 82
ccagttgaggagatgggctataaaa

SEQ ID NO: 297071 - DNA, 25 bp, Artificial
  probe
  misc_feature (1)..(25): SEQ ID NO: 1530; WAN024CMI; Start 67; Stop 91
gagatgggctataaaatagacaaaa

SEQ ID NO: 297072 - DNA, 25 bp, Artificial
  probe
  misc_feature (1)..(25): SEQ ID NO: 1530; WAN024CMI; Start 57; Stop 81
gccagttgaggagatgggctataaa

SEQ ID NO: 297073 - DNA, 25 bp, Artificial
  probe
  misc_feature (1)..(25): SEQ ID NO: 1530; WAN024CMI; Start 56; Stop 80
tgccagttgaggagatgggctataa

SEQ ID NO: 297074 - DNA, 25 bp, Artificial
  probe
  misc_feature (1)..(25): SEQ ID NO: 1530; WAN024CMI; Start 55; Stop 79
ttgccagttgaggagatgggctata

SEQ ID NO: 297075 - DNA, 25 bp, Artificial
  probe
  misc_feature (1)..(25): SEQ ID NO: 1531; WAN024EWZ; Start 81; Stop 105
agatgtgacaaccattatcgagaat

SEQ ID NO: 297076 - DNA, 25 bp, Artificial
  probe
  misc_feature (1)..(25): SEQ ID NO: 1531; WAN024EWZ; Start 79; Stop 103
ctagatgtgacaaccattatcgaga

SEQ ID NO: 297077 - DNA, 25 bp, Artificial
  probe
  misc_feature (1)..(25): SEQ ID NO: 1531; WAN024EWZ; Start 80; Stop 104
tagatgtgacaaccattatcgagaa

SEQ ID NO: 297078 - DNA, 25 bp, Artificial
  probe
  misc_feature (1)..(25): SEQ ID NO: 1531; WAN024EWZ; Start 76; Stop 100
aagctagatgtgacaaccattatcg

SEQ ID NO: 297079 - DNA, 25 bp, Artificial
  probe
  misc_feature (1)..(25): SEQ ID NO: 1531; WAN024EWZ; Start 549; Stop 573
tcactttgtccctaaccgaaatatc

SEQ ID NO: 297080 - DNA, 25 bp, Artificial
  probe
  misc_feature (1)..(25): SEQ ID NO: 1531; WAN024EWZ; Start 82; Stop 106
gatgtgacaaccattatcgagaata

SEQ ID NO: 297081 - DNA, 25 bp, Artificial
  probe
  misc_feature (1)..(25): SEQ ID NO: 1531; WAN024EWZ; Start 551; Stop 575
actttgtccctaaccgaaatatcac

SEQ ID NO: 297082 - DNA, 25 bp, Artificial
  probe
  misc_feature (1)..(25): SEQ ID NO: 1531; WAN024EWZ; Start 550; Stop 574
cactttgtccctaaccgaaatatca

SEQ ID NO: 297083 - DNA, 25 bp, Artificial
  probe
  misc_feature (1)..(25): SEQ ID NO: 1531; WAN024EWZ; Start 78; Stop 102
gctagatgtgacaaccattatcgag

SEQ ID NO: 297084 - DNA, 25 bp, Artificial
  probe
  misc_feature (1)..(25): SEQ ID NO: 1531; WAN024EWZ; Start 548; Stop 572
ttcactttgtccctaaccgaaatat

SEQ ID NO: 297085 - DNA, 25 bp, Artificial
  probe
  misc_feature (1)..(25): SEQ ID NO: 1531; WAN024EWZ; Start 84; Stop 108
tgtgacaaccattatcgagaatatt

SEQ ID NO: 297086 - DNA, 25 bp, Artificial
  probe
  misc_feature (1)..(25): SEQ ID NO: 1531; WAN024EWZ; Start 547; Stop 571
cttcactttgtccctaaccgaaata

SEQ ID NO: 297087 - DNA, 25 bp, Artificial
  probe
  misc_feature (1)..(25): SEQ ID NO: 1531; WAN024EWZ; Start 315; Stop 339
tttaggtttgccagtttctagtttg

SEQ ID NO: 297088 - DNA, 25 bp, Artificial
  probe
  misc_feature (1)..(25): SEQ ID NO: 1531; WAN024EWZ; Start 77; Stop 101
agctagatgtgacaaccattatcga

SEQ ID NO: 297089 - DNA, 25 bp, Artificial
  probe
  misc_feature (1)..(25): SEQ ID NO: 1531; WAN024EWZ; Start 571; Stop 595
atcacagttgttagcaatttctcac

SEQ ID NO: 297090 - DNA, 25 bp, Artificial
  probe
  misc_feature (1)..(25): SEQ ID NO: 1531; WAN024EWZ; Start 564; Stop 588
ccgaaatatcacagttgttagcaat

SEQ ID NO: 297091 - DNA, 25 bp, Artificial
  probe
  misc_feature (1)..(25): SEQ ID NO: 1531; WAN024EWZ; Start 83; Stop 107
atgtgacaaccattatcgagaatat

SEQ ID NO: 297092 - DNA, 25 bp, Artificial
  probe
  misc_feature (1)..(25): SEQ ID NO: 1531; WAN024EWZ; Start 562; Stop 586
aaccgaaatatcacagttgttagca

SEQ ID NO: 297093 - DNA, 25 bp, Artificial
  probe
  misc_feature (1)..(25): SEQ ID NO: 1531; WAN024EWZ; Start 558; Stop 582
ccctaaccgaaatatcacagttgtt

SEQ ID NO: 297094 - DNA, 25 bp, Artificial
  probe
  misc_feature (1)..(25): SEQ ID NO: 1531; WAN024EWZ; Start 563; Stop 587
accgaaatatcacagttgttagcaa

SEQ ID NO: 297095 - DNA, 25 bp, Artificial
  probe
  misc_feature (1)..(25): SEQ ID NO: 1531; WAN024EWZ; Start 556; Stop 580
gtccctaaccgaaatatcacagttg

SEQ ID NO: 297096 - DNA, 25 bp, Artificial
  probe
  misc_feature (1)..(25): SEQ ID NO: 1531; WAN024EWZ; Start 460; Stop 484
gttctgacaaatggaccgattactg

SEQ ID NO: 297097 - DNA, 25 bp, Artificial
  probe
  misc_feature (1)..(25): SEQ ID NO: 1531; WAN024EWZ; Start 570; Stop 594
tatcacagttgttagcaatttctca

SEQ ID NO: 297098 - DNA, 25 bp, Artificial
  probe
  misc_feature (1)..(25): SEQ ID NO: 1531; WAN024EWZ; Start 463; Stop 487
ctgacaaatggaccgattactgtat

SEQ ID NO: 297099 - DNA, 25 bp, Artificial
  probe
  misc_feature (1)..(25): SEQ ID NO: 1531; WAN024EWZ; Start 464; Stop 488
tgacaaatggaccgattactgtatc

SEQ ID NO: 297100 - DNA, 25 bp, Artificial
  probe
  misc_feature (1)..(25): SEQ ID NO: 1531; WAN024EWZ; Start 553; Stop 577
tttgtccctaaccgaaatatcacag

SEQ ID NO: 297101 - DNA, 25 bp, Artificial
  probe
  misc_feature (1)..(25): SEQ ID NO: 1531; WAN024EWZ; Start 552; Stop 576
ctttgtccctaaccgaaatatcaca

SEQ ID NO: 297102 - DNA, 25 bp, Artificial
  probe
  misc_feature (1)..(25): SEQ ID NO: 1531; WAN024EWZ; Start 565; Stop 589
cgaaatatcacagttgttagcaatt

SEQ ID NO: 297103 - DNA, 25 bp, Artificial
  probe
  misc_feature (1)..(25): SEQ ID NO: 1531; WAN024EWZ; Start 557; Stop 581
tccctaaccgaaatatcacagttgt

SEQ ID NO: 297104 - DNA, 25 bp, Artificial
  probe
  misc_feature (1)..(25): SEQ ID NO: 1531; WAN024EWZ; Start 106; Stop 130
attctaaccaaggtcatttctcttt

SEQ ID NO: 297105 - DNA, 25 bp, Artificial
  probe
  misc_feature (1)..(25): SEQ ID NO: 1531; WAN024EWZ; Start 316; Stop 340
ttaggtttgccagtttctagtttgc

SEQ ID NO: 297106 - DNA, 25 bp, Artificial
  probe
  misc_feature (1)..(25): SEQ ID NO: 1531; WAN024EWZ; Start 462; Stop 486
tctgacaaatggaccgattactgta

SEQ ID NO: 297107 - DNA, 25 bp, Artificial
  probe
  misc_feature (1)..(25): SEQ ID NO: 1531; WAN024EWZ; Start 572; Stop 596
tcacagttgttagcaatttctcacg

SEQ ID NO: 297108 - DNA, 25 bp, Artificial
  probe
  misc_feature (1)..(25): SEQ ID NO: 1532; WAN024FGR; Start 91; Stop 115
accattattggtcgtttgttgtata

SEQ ID NO: 297109 - DNA, 25 bp, Artificial
  probe
  misc_feature (1)..(25): SEQ ID NO: 1532; WAN024FGR; Start 67; Stop 91
tcaatcgtcattttactctttatga

SEQ ID NO: 297110 - DNA, 25 bp, Artificial
  probe
  misc_feature (1)..(25): SEQ ID NO: 1532; WAN024FGR; Start 77; Stop 101
ttttactctttatgaccattattgg

SEQ ID NO: 297111 - DNA, 25 bp, Artificial
  probe
  misc_feature (1)..(25): SEQ ID NO: 1532; WAN024FGR; Start 78; Stop 102
tttactctttatgaccattattggt

SEQ ID NO: 297112 - DNA, 25 bp, Artificial
  probe
  misc_feature (1)..(25): SEQ ID NO: 1533; WAN024FGP; Start 1331; Stop 1355
ccttggagtattcttctaatgccta

SEQ ID NO: 297113 - DNA, 25 bp, Artificial
  probe
  misc_feature (1)..(25): SEQ ID NO: 1533; WAN024FGP; Start 1025; Stop 1049
ccaagtattctgaaggtgtctatgc

SEQ ID NO: 297114 - DNA, 25 bp, Artificial
  probe
  misc_feature (1)..(25): SEQ ID NO: 1533; WAN024FGP; Start 1024; Stop 1048
gccaagtattctgaaggtgtctatg

SEQ ID NO: 297115 - DNA, 25 bp, Artificial
  probe
  misc_feature (1)..(25): SEQ ID NO: 1533; WAN024FGP; Start 1023; Stop 1047
agccaagtattctgaaggtgtctat

SEQ ID NO: 297116 - DNA, 25 bp, Artificial
  probe
  misc_feature (1)..(25): SEQ ID NO: 1533; WAN024FGP; Start 451; Stop 475
cgtctatccgaatcagaactgtata

SEQ ID NO: 297117 - DNA, 25 bp, Artificial
  probe
  misc_feature (1)..(25): SEQ ID NO: 1533; WAN024FGP; Start 823; Stop 847
aagcaatatgaagagaccttacaag

SEQ ID NO: 297118 - DNA, 25 bp, Artificial
  probe
  misc_feature (1)..(25): SEQ ID NO: 1533; WAN024FGP; Start 161; Stop 185
ctagtcagaccaagattacaagcag

SEQ ID NO: 297119 - DNA, 25 bp, Artificial
  probe
  misc_feature (1)..(25): SEQ ID NO: 1533; WAN024FGP; Start 162; Stop 186
tagtcagaccaagattacaagcagt

SEQ ID NO: 297120 - DNA, 25 bp, Artificial
  probe
  misc_feature (1)..(25): SEQ ID NO: 1533; WAN024FGP; Start 166; Stop 190
cagaccaagattacaagcagttcag

SEQ ID NO: 297121 - DNA, 25 bp, Artificial
  probe
  misc_feature (1)..(25): SEQ ID NO: 1533; WAN024FGP; Start 1022; Stop 1046
gagccaagtattctgaaggtgtcta

SEQ ID NO: 297122 - DNA, 25 bp, Artificial
  probe
  misc_feature (1)..(25): SEQ ID NO: 1533; WAN024FGP; Start 460; Stop 484
gaatcagaactgtataacaatgcgg

SEQ ID NO: 297123 - DNA, 25 bp, Artificial
  probe
  misc_feature (1)..(25): SEQ ID NO: 1533; WAN024FGP; Start 458; Stop 482
ccgaatcagaactgtataacaatgc

SEQ ID NO: 297124 - DNA, 25 bp, Artificial
  probe
  misc_feature (1)..(25): SEQ ID NO: 1533; WAN024FGP; Start 164; Stop 188
gtcagaccaagattacaagcagttc

SEQ ID NO: 297125 - DNA, 25 bp, Artificial
  probe
  misc_feature (1)..(25): SEQ ID NO: 1533; WAN024FGP; Start 459; Stop 483
cgaatcagaactgtataacaatgcg

SEQ ID NO: 297126 - DNA, 25 bp, Artificial
  probe
  misc_feature (1)..(25): SEQ ID NO: 1533; WAN024FGP; Start 461; Stop 485
aatcagaactgtataacaatgcggt

SEQ ID NO: 297127 - DNA, 25 bp, Artificial
  probe
  misc_feature (1)..(25): SEQ ID NO: 1533; WAN024FGP; Start 1332; Stop 1356
cttggagtattcttctaatgcctat

SEQ ID NO: 297128 - DNA, 25 bp, Artificial
  probe
  misc_feature (1)..(25): SEQ ID NO: 1533; WAN024FGP; Start 165; Stop 189
tcagaccaagattacaagcagttca

SEQ ID NO: 297129 - DNA, 25 bp, Artificial
  probe
  misc_feature (1)..(25): SEQ ID NO: 1533; WAN024FGP; Start 462; Stop 486
atcagaactgtataacaatgcggtc

SEQ ID NO: 297130 - DNA, 25 bp, Artificial
  probe
  misc_feature (1)..(25): SEQ ID NO: 1533; WAN024FGP; Start 1330; Stop 1354
gccttggagtattcttctaatgcct

SEQ ID NO: 297131 - DNA, 25 bp, Artificial
  probe
  misc_feature (1)..(25): SEQ ID NO: 1533; WAN024FGP; Start 163; Stop 187
agtcagaccaagattacaagcagtt

SEQ ID NO: 297132 - DNA, 25 bp, Artificial
  probe
  misc_feature (1)..(25): SEQ ID NO: 1533; WAN024FGP; Start 1341; Stop 1365
ttcttctaatgcctatatggttcaa

SEQ ID NO: 297133 - DNA, 25 bp, Artificial
  probe
  misc_feature (1)..(25): SEQ ID NO: 1533; WAN024FGP; Start 1340; Stop 1364
attcttctaatgcctatatggttca

SEQ ID NO: 297134 - DNA, 25 bp, Artificial
  probe
  misc_feature (1)..(25): SEQ ID NO: 1533; WAN024FGP; Start 319; Stop 343
acttatgtgagcatcagttctccaa

SEQ ID NO: 297135 - DNA, 25 bp, Artificial
  probe
  misc_feature (1)..(25): SEQ ID NO: 1533; WAN024FGP; Start 453; Stop 477
tctatccgaatcagaactgtataac

SEQ ID NO: 297136 - DNA, 25 bp, Artificial
  probe
  misc_feature (1)..(25): SEQ ID NO: 1533; WAN024FGP; Start 452; Stop 476
gtctatccgaatcagaactgtataa

SEQ ID NO: 297137 - DNA, 25 bp, Artificial
  probe
  misc_feature (1)..(25): SEQ ID NO: 1533; WAN024FGP; Start 158; Stop 182
cagctagtcagaccaagattacaag

SEQ ID NO: 297138 - DNA, 25 bp, Artificial
  probe
  misc_feature (1)..(25): SEQ ID NO: 1533; WAN024FGP; Start 157; Stop 181
tcagctagtcagaccaagattacaa

SEQ ID NO: 297139 - DNA, 25 bp, Artificial
  probe
  misc_feature (1)..(25): SEQ ID NO: 1533; WAN024FGP; Start 1026; Stop 1050
caagtattctgaaggtgtctatgca

SEQ ID NO: 297140 - DNA, 25 bp, Artificial
  probe
  misc_feature (1)..(25): SEQ ID NO: 1533; WAN024FGP; Start 825; Stop 849
gcaatatgaagagaccttacaagga

SEQ ID NO: 297141 - DNA, 25 bp, Artificial
  probe
  misc_feature (1)..(25): SEQ ID NO: 1533; WAN024FGP; Start 824; Stop 848
agcaatatgaagagaccttacaagg

SEQ ID NO: 297142 - DNA, 25 bp, Artificial
  probe
  misc_feature (1)..(25): SEQ ID NO: 1533; WAN024FGP; Start 318; Stop 342
gacttatgtgagcatcagttctcca

SEQ ID NO: 297143 - DNA, 25 bp, Artificial
  probe
  misc_feature (1)..(25): SEQ ID NO: 1533; WAN024FGP; Start 317; Stop 341
tgacttatgtgagcatcagttctcc

SEQ ID NO: 297144 - DNA, 25 bp, Artificial
  probe
  misc_feature (1)..(25): SEQ ID NO: 1533; WAN024FGP; Start 879; Stop 903
taaatatggcaatatggaaagcgtg

SEQ ID NO: 297145 - DNA, 25 bp, Artificial
  probe
  misc_feature (1)..(25): SEQ ID NO: 1534; WAN024G8Q; Start 172; Stop 196
ttcacgattgtctatctaggtcttg

SEQ ID NO: 297146 - DNA, 25 bp, Artificial
  probe
  misc_feature (1)..(25): SEQ ID NO: 1534; WAN024G8Q; Start 174; Stop 198
cacgattgtctatctaggtcttgag

SEQ ID NO: 297147 - DNA, 25 bp, Artificial
  probe
  misc_feature (1)..(25): SEQ ID NO: 1534; WAN024G8Q; Start 171; Stop 195
cttcacgattgtctatctaggtctt

SEQ ID NO: 297148 - DNA, 25 bp, Artificial
  probe
  misc_feature (1)..(25): SEQ ID NO: 1534; WAN024G8Q; Start 175; Stop 199
acgattgtctatctaggtcttgagg

SEQ ID NO: 297149 - DNA, 25 bp, Artificial
  probe
  misc_feature (1)..(25): SEQ ID NO: 1534; WAN024G8Q; Start 173; Stop 197
tcacgattgtctatctaggtcttga

SEQ ID NO: 297150 - DNA, 25 bp, Artificial
  probe
  misc_feature (1)..(25): SEQ ID NO: 1534; WAN024G8Q; Start 166; Stop 190
catgccttcacgattgtctatctag

SEQ ID NO: 297151 - DNA, 25 bp, Artificial
  probe
  misc_feature (1)..(25): SEQ ID NO: 1534; WAN024G8Q; Start 219; Stop 243
gttgacttataactacgatcacggt

SEQ ID NO: 297152 - DNA, 25 bp, Artificial
  probe
  misc_feature (1)..(25): SEQ ID NO: 1534; WAN024G8Q; Start 170; Stop 194
ccttcacgattgtctatctaggtct

SEQ ID NO: 297153 - DNA, 25 bp, Artificial
  probe
  misc_feature (1)..(25): SEQ ID NO: 1534; WAN024G8Q; Start 220; Stop 244
ttgacttataactacgatcacggtc

SEQ ID NO: 297154 - DNA, 25 bp, Artificial
  probe
  misc_feature (1)..(25): SEQ ID NO: 1534; WAN024G8Q; Start 63; Stop 87
aatgctacacacttgcttacgagta

SEQ ID NO: 297155 - DNA, 25 bp, Artificial
  probe
  misc_feature (1)..(25): SEQ ID NO: 1534; WAN024G8Q; Start 358; Stop 382
ccaggaactacaccaaactattact

SEQ ID NO: 297156 - DNA, 25 bp, Artificial
  probe
  misc_feature (1)..(25): SEQ ID NO: 1534; WAN024G8Q; Start 357; Stop 381
accaggaactacaccaaactattac

SEQ ID NO: 297157 - DNA, 25 bp, Artificial
  probe
  misc_feature (1)..(25): SEQ ID NO: 1534; WAN024G8Q; Start 355; Stop 379
ctaccaggaactacaccaaactatt

SEQ ID NO: 297158 - DNA, 25 bp, Artificial
  probe
  misc_feature (1)..(25): SEQ ID NO: 1534; WAN024G8Q; Start 395; Stop 419
ctgatggatataaggtcgaagtcat

SEQ ID NO: 297159 - DNA, 25 bp, Artificial
  probe
  misc_feature (1)..(25): SEQ ID NO: 1534; WAN024G8Q; Start 397; Stop 421
gatggatataaggtcgaagtcattc

SEQ ID NO: 297160 - DNA, 25 bp, Artificial
  probe
  misc_feature (1)..(25): SEQ ID NO: 1534; WAN024G8Q; Start 354; Stop 378
tctaccaggaactacaccaaactat

SEQ ID NO: 297161 - DNA, 25 bp, Artificial
  probe
  misc_feature (1)..(25): SEQ ID NO: 1534; WAN024G8Q; Start 396; Stop 420
tgatggatataaggtcgaagtcatt

SEQ ID NO: 297162 - DNA, 25 bp, Artificial
  probe
  misc_feature (1)..(25): SEQ ID NO: 1534; WAN024G8Q; Start 165; Stop 189
ccatgccttcacgattgtctatcta

SEQ ID NO: 297163 - DNA, 25 bp, Artificial
  probe
  misc_feature (1)..(25): SEQ ID NO: 1534; WAN024G8Q; Start 356; Stop 380
taccaggaactacaccaaactatta

SEQ ID NO: 297164 - DNA, 25 bp, Artificial
  probe
  misc_feature (1)..(25): SEQ ID NO: 1534; WAN024G8Q; Start 167; Stop 191
atgccttcacgattgtctatctagg

SEQ ID NO: 297165 - DNA, 25 bp, Artificial
  probe
  misc_feature (1)..(25): SEQ ID NO: 1534; WAN024G8Q; Start 353; Stop 377
gtctaccaggaactacaccaaacta

SEQ ID NO: 297166 - DNA, 25 bp, Artificial
  probe
  misc_feature (1)..(25): SEQ ID NO: 1534; WAN024G8Q; Start 359; Stop 383
caggaactacaccaaactattactt

SEQ ID NO: 297167 - DNA, 25 bp, Artificial
  probe
  misc_feature (1)..(25): SEQ ID NO: 1534; WAN024G8Q; Start 221; Stop 245
tgacttataactacgatcacggtcc

SEQ ID NO: 297168 - DNA, 25 bp, Artificial
  probe
  misc_feature (1)..(25): SEQ ID NO: 1534; WAN024G8Q; Start 169; Stop 193
gccttcacgattgtctatctaggtc

SEQ ID NO: 297169 - DNA, 25 bp, Artificial
  probe
  misc_feature (1)..(25): SEQ ID NO: 1534; WAN024G8Q; Start 38; Stop 62
taaaggagaaagatatggcttcaaa

SEQ ID NO: 297170 - DNA, 25 bp, Artificial
  probe
  misc_feature (1)..(25): SEQ ID NO: 1534; WAN024G8Q; Start 394; Stop 418
cctgatggatataaggtcgaagtca

SEQ ID NO: 297171 - DNA, 25 bp, Artificial
  probe
  misc_feature (1)..(25): SEQ ID NO: 1534; WAN024G8Q; Start 176; Stop 200
cgattgtctatctaggtcttgaggg

SEQ ID NO: 297172 - DNA, 25 bp, Artificial
  probe
  misc_feature (1)..(25): SEQ ID NO: 1534; WAN024G8Q; Start 360; Stop 384
aggaactacaccaaactattacttt

SEQ ID NO: 297173 - DNA, 25 bp, Artificial
  probe
  misc_feature (1)..(25): SEQ ID NO: 1534; WAN024G8Q; Start 37; Stop 61
ataaaggagaaagatatggcttcaa

SEQ ID NO: 297174 - DNA, 25 bp, Artificial
  probe
  misc_feature (1)..(25): SEQ ID NO: 1534; WAN024G8Q; Start 36; Stop 60
aataaaggagaaagatatggcttca

SEQ ID NO: 297175 - DNA, 25 bp, Artificial
  probe
  misc_feature (1)..(25): SEQ ID NO: 1534; WAN024G8Q; Start 218; Stop 242
agttgacttataactacgatcacgg

SEQ ID NO: 297176 - DNA, 25 bp, Artificial
  probe
  misc_feature (1)..(25): SEQ ID NO: 1534; WAN024G8Q; Start 222; Stop 246
gacttataactacgatcacggtccg

SEQ ID NO: 297177 - DNA, 25 bp, Artificial
  probe
  misc_feature (1)..(25): SEQ ID NO: 1534; WAN024G8Q; Start 168; Stop 192
tgccttcacgattgtctatctaggt

SEQ ID NO: 297178 - DNA, 25 bp, Artificial
  probe
  misc_feature (1)..(25): SEQ ID NO: 1535; WAN024D8J; Start 161; Stop 185
tgattatgattggagtcttggttgt

SEQ ID NO: 297179 - DNA, 25 bp, Artificial
  probe
  misc_feature (1)..(25): SEQ ID NO: 1535; WAN024D8J; Start 162; Stop 186
gattatgattggagtcttggttgtc

SEQ ID NO: 297180 - DNA, 25 bp, Artificial
  probe
  misc_feature (1)..(25): SEQ ID NO: 1535; WAN024D8J; Start 160; Stop 184
atgattatgattggagtcttggttg

SEQ ID NO: 297181 - DNA, 25 bp, Artificial
  probe
  misc_feature (1)..(25): SEQ ID NO: 1535; WAN024D8J; Start 159; Stop 183
tatgattatgattggagtcttggtt

SEQ ID NO: 297182 - DNA, 25 bp, Artificial
  probe
  misc_feature (1)..(25): SEQ ID NO: 1535; WAN024D8J; Start 158; Stop 182
atatgattatgattggagtcttggt

SEQ ID NO: 297183 - DNA, 25 bp, Artificial
  probe
  misc_feature (1)..(25): SEQ ID NO: 1535; WAN024D8J; Start 163; Stop 187
attatgattggagtcttggttgtcc

SEQ ID NO: 297184 - DNA, 25 bp, Artificial
  probe
  misc_feature (1)..(25): SEQ ID NO: 1535; WAN024D8J; Start 189; Stop 213
agtattatcctttgcggttatgagt

SEQ ID NO: 297185 - DNA, 25 bp, Artificial
  probe
  misc_feature (1)..(25): SEQ ID NO: 1535; WAN024D8J; Start 188; Stop 212
cagtattatcctttgcggttatgag

SEQ ID NO: 297186 - DNA, 25 bp, Artificial
  probe
  misc_feature (1)..(25): SEQ ID NO: 1535; WAN024D8J; Start 187; Stop 211
ccagtattatcctttgcggttatga

SEQ ID NO: 297187 - DNA, 25 bp, Artificial
  probe
  misc_feature (1)..(25): SEQ ID NO: 1535; WAN024D8J; Start 190; Stop 214
gtattatcctttgcggttatgagtt

SEQ ID NO: 297188 - DNA, 25 bp, Artificial
  probe
  misc_feature (1)..(25): SEQ ID NO: 1535; WAN024D8J; Start 197; Stop 221
cctttgcggttatgagtttaattct

SEQ ID NO: 297189 - DNA, 25 bp, Artificial
  probe
  misc_feature (1)..(25): SEQ ID NO: 1535; WAN024D8J; Start 196; Stop 220
tcctttgcggttatgagtttaattc

SEQ ID NO: 297190 - DNA, 25 bp, Artificial
  probe
  misc_feature (1)..(25): SEQ ID NO: 1535; WAN024D8J; Start 157; Stop 181
gatatgattatgattggagtcttgg

SEQ ID NO: 297191 - DNA, 25 bp, Artificial
  probe
  misc_feature (1)..(25): SEQ ID NO: 1535; WAN024D8J; Start 141; Stop 165
ccaagcccatctctatgatatgatt

SEQ ID NO: 297192 - DNA, 25 bp, Artificial
  probe
  misc_feature (1)..(25): SEQ ID NO: 1535; WAN024D8J; Start 201; Stop 225
tgcggttatgagtttaattcttgtt

SEQ ID NO: 297193 - DNA, 25 bp, Artificial
  probe
  misc_feature (1)..(25): SEQ ID NO: 1535; WAN024D8J; Start 200; Stop 224
ttgcggttatgagtttaattcttgt

SEQ ID NO: 297194 - DNA, 25 bp, Artificial
  probe
  misc_feature (1)..(25): SEQ ID NO: 1535; WAN024D8J; Start 195; Stop 219
atcctttgcggttatgagtttaatt

SEQ ID NO: 297195 - DNA, 25 bp, Artificial
  probe
  misc_feature (1)..(25): SEQ ID NO: 1535; WAN024D8J; Start 193; Stop 217
ttatcctttgcggttatgagtttaa

SEQ ID NO: 297196 - DNA, 25 bp, Artificial
  probe
  misc_feature (1)..(25): SEQ ID NO: 1535; WAN024D8J; Start 192; Stop 216
attatcctttgcggttatgagttta

SEQ ID NO: 297197 - DNA, 25 bp, Artificial
  probe
  misc_feature (1)..(25): SEQ ID NO: 1535; WAN024D8J; Start 191; Stop 215
tattatcctttgcggttatgagttt

SEQ ID NO: 297198 - DNA, 25 bp, Artificial
  probe
  misc_feature (1)..(25): SEQ ID NO: 1535; WAN024D8J; Start 81; Stop 105
tttagggatttggattggtctgaga

SEQ ID NO: 297199 - DNA, 25 bp, Artificial
  probe
  misc_feature (1)..(25): SEQ ID NO: 1535; WAN024D8J; Start 186; Stop 210
cccagtattatcctttgcggttatg

SEQ ID NO: 297200 - DNA, 25 bp, Artificial
  probe
  misc_feature (1)..(25): SEQ ID NO: 1535; WAN024D8J; Start 185; Stop 209
tcccagtattatcctttgcggttat

SEQ ID NO: 297201 - DNA, 25 bp, Artificial
  probe
  misc_feature (1)..(25): SEQ ID NO: 1535; WAN024D8J; Start 194; Stop 218
tatcctttgcggttatgagtttaat

SEQ ID NO: 297202 - DNA, 25 bp, Artificial
  probe
  misc_feature (1)..(25): SEQ ID NO: 1535; WAN024D8J; Start 199; Stop 223
tttgcggttatgagtttaattcttg

SEQ ID NO: 297203 - DNA, 25 bp, Artificial
  probe
  misc_feature (1)..(25): SEQ ID NO: 1535; WAN024D8J; Start 202; Stop 226
gcggttatgagtttaattcttgttt

SEQ ID NO: 297204 - DNA, 25 bp, Artificial
  probe
  misc_feature (1)..(25): SEQ ID NO: 1535; WAN024D8J; Start 82; Stop 106
ttagggatttggattggtctgagag

SEQ ID NO: 297205 - DNA, 25 bp, Artificial
  probe
  misc_feature (1)..(25): SEQ ID NO: 1535; WAN024D8J; Start 198; Stop 222
ctttgcggttatgagtttaattctt

SEQ ID NO: 297206 - DNA, 25 bp, Artificial
  probe
  misc_feature (1)..(25): SEQ ID NO: 1535; WAN024D8J; Start 156; Stop 180
tgatatgattatgattggagtcttg

SEQ ID NO: 297207 - DNA, 25 bp, Artificial
  probe
  misc_feature (1)..(25): SEQ ID NO: 1535; WAN024D8J; Start 140; Stop 164
gccaagcccatctctatgatatgat

SEQ ID NO: 297208 - DNA, 25 bp, Artificial
  probe
  misc_feature (1)..(25): SEQ ID NO: 1535; WAN024D8J; Start 142; Stop 166
caagcccatctctatgatatgatta

SEQ ID NO: 297209 - DNA, 25 bp, Artificial
  probe
  misc_feature (1)..(25): SEQ ID NO: 1535; WAN024D8J; Start 184; Stop 208
gtcccagtattatcctttgcggtta

SEQ ID NO: 297210 - DNA, 25 bp, Artificial
  probe
  misc_feature (1)..(25): SEQ ID NO: 1535; WAN024D8J; Start 145; Stop 169
gcccatctctatgatatgattatga

SEQ ID NO: 297211 - DNA, 25 bp, Artificial
  probe
  misc_feature (1)..(25): SEQ ID NO: 1536; WAN024C5E; Start 16; Stop 40
caagaattgttagacagttcgatgt

SEQ ID NO: 297212 - DNA, 25 bp, Artificial
  probe
  misc_feature (1)..(25): SEQ ID NO: 1536; WAN024C5E; Start 15; Stop 39
tcaagaattgttagacagttcgatg

SEQ ID NO: 297213 - DNA, 25 bp, Artificial
  probe
  misc_feature (1)..(25): SEQ ID NO: 1536; WAN024C5E; Start 14; Stop 38
ttcaagaattgttagacagttcgat

SEQ ID NO: 297214 - DNA, 25 bp, Artificial
  probe
  misc_feature (1)..(25): SEQ ID NO: 1536; WAN024C5E; Start 13; Stop 37
attcaagaattgttagacagttcga

SEQ ID NO: 297215 - DNA, 25 bp, Artificial
  probe
  misc_feature (1)..(25): SEQ ID NO: 1536; WAN024C5E; Start 12; Stop 36
tattcaagaattgttagacagttcg

SEQ ID NO: 297216 - DNA, 25 bp, Artificial
  probe
  misc_feature (1)..(25): SEQ ID NO: 1536; WAN024C5E; Start 37; Stop 61
atgtctacatctgctatttcccaag

SEQ ID NO: 297217 - DNA, 25 bp, Artificial
  probe
  misc_feature (1)..(25): SEQ ID NO: 1536; WAN024C5E; Start 40; Stop 64
tctacatctgctatttcccaaggtg

SEQ ID NO: 297218 - DNA, 25 bp, Artificial
  probe
  misc_feature (1)..(25): SEQ ID NO: 1536; WAN024C5E; Start 39; Stop 63
gtctacatctgctatttcccaaggt

SEQ ID NO: 297219 - DNA, 25 bp, Artificial
  probe
  misc_feature (1)..(25): SEQ ID NO: 1536; WAN024C5E; Start 38; Stop 62
tgtctacatctgctatttcccaagg

SEQ ID NO: 297220 - DNA, 25 bp, Artificial
  probe
  misc_feature (1)..(25): SEQ ID NO: 1536; WAN024C5E; Start 2; Stop 26
tgagagaagttattcaagaattgtt

SEQ ID NO: 297221 - DNA, 25 bp, Artificial
  probe
  misc_feature (1)..(25): SEQ ID NO: 1536; WAN024C5E; Start 1; Stop 25
atgagagaagttattcaagaattgt

SEQ ID NO: 297222 - DNA, 25 bp, Artificial
  probe
  misc_feature (1)..(25): SEQ ID NO: 1536; WAN024C5E; Start 146; Stop 170
aactttatgaatttgctacaactga

SEQ ID NO: 297223 - DNA, 25 bp, Artificial
  probe
  misc_feature (1)..(25): SEQ ID NO: 1536; WAN024C5E; Start 9; Stop 33
agttattcaagaattgttagacagt

SEQ ID NO: 297224 - DNA, 25 bp, Artificial
  probe
  misc_feature (1)..(25): SEQ ID NO: 1536; WAN024C5E; Start 147; Stop 171
actttatgaatttgctacaactgat

SEQ ID NO: 297225 - DNA, 25 bp, Artificial
  probe
  misc_feature (1)..(25): SEQ ID NO: 1536; WAN024C5E; Start 41; Stop 65
ctacatctgctatttcccaaggtgc

SEQ ID NO: 297226 - DNA, 25 bp, Artificial
  probe
  misc_feature (1)..(25): SEQ ID NO: 1536; WAN024C5E; Start 30; Stop 54
cagttcgatgtctacatctgctatt

SEQ ID NO: 297227 - DNA, 25 bp, Artificial
  probe
  misc_feature (1)..(25): SEQ ID NO: 1536; WAN024C5E; Start 145; Stop 169
aaactttatgaatttgctacaactg

SEQ ID NO: 297228 - DNA, 25 bp, Artificial
  probe
  misc_feature (1)..(25): SEQ ID NO: 1536; WAN024C5E; Start 29; Stop 53
acagttcgatgtctacatctgctat

SEQ ID NO: 297229 - DNA, 25 bp, Artificial
  probe
  misc_feature (1)..(25): SEQ ID NO: 1536; WAN024C5E; Start 42; Stop 66
tacatctgctatttcccaaggtgct

SEQ ID NO: 297230 - DNA, 25 bp, Artificial
  probe
  misc_feature (1)..(25): SEQ ID NO: 1536; WAN024C5E; Start 74; Stop 98
catggactactgtttctgacctcag

SEQ ID NO: 297231 - DNA, 25 bp, Artificial
  probe
  misc_feature (1)..(25): SEQ ID NO: 1536; WAN024C5E; Start 10; Stop 34
gttattcaagaattgttagacagtt

SEQ ID NO: 297232 - DNA, 25 bp, Artificial
  probe
  misc_feature (1)..(25): SEQ ID NO: 1536; WAN024C5E; Start 151; Stop 175
tatgaatttgctacaactgataagc

SEQ ID NO: 297233 - DNA, 25 bp, Artificial
  probe
  misc_feature (1)..(25): SEQ ID NO: 1536; WAN024C5E; Start 11; Stop 35
ttattcaagaattgttagacagttc

SEQ ID NO: 297234 - DNA, 25 bp, Artificial
  probe
  misc_feature (1)..(25): SEQ ID NO: 1536; WAN024C5E; Start 8; Stop 32
aagttattcaagaattgttagacag

SEQ ID NO: 297235 - DNA, 25 bp, Artificial
  probe
  misc_feature (1)..(25): SEQ ID NO: 1536; WAN024C5E; Start 7; Stop 31
gaagttattcaagaattgttagaca

SEQ ID NO: 297236 - DNA, 25 bp, Artificial
  probe
  misc_feature (1)..(25): SEQ ID NO: 1536; WAN024C5E; Start 6; Stop 30
agaagttattcaagaattgttagac

SEQ ID NO: 297237 - DNA, 25 bp, Artificial
  probe
  misc_feature (1)..(25): SEQ ID NO: 1536; WAN024C5E; Start 17; Stop 41
aagaattgttagacagttcgatgtc

SEQ ID NO: 297238 - DNA, 25 bp, Artificial
  probe
  misc_feature (1)..(25): SEQ ID NO: 1536; WAN024C5E; Start 5; Stop 29
gagaagttattcaagaattgttaga

SEQ ID NO: 297239 - DNA, 25 bp, Artificial
  probe
  misc_feature (1)..(25): SEQ ID NO: 1536; WAN024C5E; Start 4; Stop 28
agagaagttattcaagaattgttag

SEQ ID NO: 297240 - DNA, 25 bp, Artificial
  probe
  misc_feature (1)..(25): SEQ ID NO: 1536; WAN024C5E; Start 3; Stop 27
gagagaagttattcaagaattgtta

SEQ ID NO: 297241 - DNA, 25 bp, Artificial
  probe
  misc_feature (1)..(25): SEQ ID NO: 1536; WAN024C5E; Start 32; Stop 56
gttcgatgtctacatctgctatttc

SEQ ID NO: 297242 - DNA, 25 bp, Artificial
  probe
  misc_feature (1)..(25): SEQ ID NO: 1536; WAN024C5E; Start 31; Stop 55
agttcgatgtctacatctgctattt

SEQ ID NO: 297243 - DNA, 25 bp, Artificial
  probe
  misc_feature (1)..(25): SEQ ID NO: 1536; WAN024C5E; Start 36; Stop 60
gatgtctacatctgctatttcccaa

SEQ ID NO: 297244 - DNA, 25 bp, Artificial
  probe
  misc_feature (1)..(25): SEQ ID NO: 1537; WAN024CU8; Start 347; Stop 371
ttgtagattctcatactgtaagcgt

SEQ ID NO: 297245 - DNA, 25 bp, Artificial
  probe
  misc_feature (1)..(25): SEQ ID NO: 1537; WAN024CU8; Start 455; Stop 479
taggtggctcttctgatgatgtatt

SEQ ID NO: 297246 - DNA, 25 bp, Artificial
  probe
  misc_feature (1)..(25): SEQ ID NO: 1537; WAN024CU8; Start 348; Stop 372
tgtagattctcatactgtaagcgta

SEQ ID NO: 297247 - DNA, 25 bp, Artificial
  probe
  misc_feature (1)..(25): SEQ ID NO: 1537; WAN024CU8; Start 885; Stop 909
aatctatgctctaggtgatgtaacg

SEQ ID NO: 297248 - DNA, 25 bp, Artificial
  probe
  misc_feature (1)..(25): SEQ ID NO: 1537; WAN024CU8; Start 883; Stop 907
ggaatctatgctctaggtgatgtaa

SEQ ID NO: 297249 - DNA, 25 bp, Artificial
  probe
  misc_feature (1)..(25): SEQ ID NO: 1537; WAN024CU8; Start 14; Stop 38
atatcattgctatcggtggaggtag

SEQ ID NO: 297250 - DNA, 25 bp, Artificial
  probe
  misc_feature (1)..(25): SEQ ID NO: 1537; WAN024CU8; Start 454; Stop 478
ctaggtggctcttctgatgatgtat

SEQ ID NO: 297251 - DNA, 25 bp, Artificial
  probe
  misc_feature (1)..(25): SEQ ID NO: 1537; WAN024CU8; Start 884; Stop 908
gaatctatgctctaggtgatgtaac

SEQ ID NO: 297252 - DNA, 25 bp, Artificial
  probe
  misc_feature (1)..(25): SEQ ID NO: 1537; WAN024CU8; Start 349; Stop 373
gtagattctcatactgtaagcgtaa

SEQ ID NO: 297253 - DNA, 25 bp, Artificial
  probe
  misc_feature (1)..(25): SEQ ID NO: 1537; WAN024CU8; Start 886; Stop 910
atctatgctctaggtgatgtaacgg

SEQ ID NO: 297254 - DNA, 25 bp, Artificial
  probe
  misc_feature (1)..(25): SEQ ID NO: 1537; WAN024CU8; Start 521; Stop 545
ctggttatatcgccgttgaattagc

SEQ ID NO: 297255 - DNA, 25 bp, Artificial
  probe
  misc_feature (1)..(25): SEQ ID NO: 1537; WAN024CU8; Start 520; Stop 544
gctggttatatcgccgttgaattag

SEQ ID NO: 297256 - DNA, 25 bp, Artificial
  probe
  misc_feature (1)..(25): SEQ ID NO: 1537; WAN024CU8; Start 428; Stop 452
gtattcctaatattcctggtgctga

SEQ ID NO: 297257 - DNA, 25 bp, Artificial
  probe
  misc_feature (1)..(25): SEQ ID NO: 1537; WAN024CU8; Start 427; Stop 451
agtattcctaatattcctggtgctg

SEQ ID NO: 297258 - DNA, 25 bp, Artificial
  probe
  misc_feature (1)..(25): SEQ ID NO: 1537; WAN024CU8; Start 429; Stop 453
tattcctaatattcctggtgctgag

SEQ ID NO: 297259 - DNA, 25 bp, Artificial
  probe
  misc_feature (1)..(25): SEQ ID NO: 1537; WAN024CU8; Start 425; Stop 449
caagtattcctaatattcctggtgc

SEQ ID NO: 297260 - DNA, 25 bp, Artificial
  probe
  misc_feature (1)..(25): SEQ ID NO: 1537; WAN024CU8; Start 426; Stop 450
aagtattcctaatattcctggtgct

SEQ ID NO: 297261 - DNA, 25 bp, Artificial
  probe
  misc_feature (1)..(25): SEQ ID NO: 1537; WAN024CU8; Start 323; Stop 347
acttgattgaaggtcatgctgaatt

SEQ ID NO: 297262 - DNA, 25 bp, Artificial
  probe
  misc_feature (1)..(25): SEQ ID NO: 1537; WAN024CU8; Start 996; Stop 1020
ggattactcaactattccaactgtt

SEQ ID NO: 297263 - DNA, 25 bp, Artificial
  probe
  misc_feature (1)..(25): SEQ ID NO: 1537; WAN024CU8; Start 706; Stop 730
actactgacggcattaccattcatt

SEQ ID NO: 297264 - DNA, 25 bp, Artificial
  probe
  misc_feature (1)..(25): SEQ ID NO: 1537; WAN024CU8; Start 705; Stop 729
aactactgacggcattaccattcat

SEQ ID NO: 297265 - DNA, 25 bp, Artificial
  probe
  misc_feature (1)..(25): SEQ ID NO: 1537; WAN024CU8; Start 640; Stop 664
gtcaaggaaatggaaagaacaaact

SEQ ID NO: 297266 - DNA, 25 bp, Artificial
  probe
  misc_feature (1)..(25): SEQ ID NO: 1537; WAN024CU8; Start 393; Stop 417
taaacatatcgtgattgctacaggt

SEQ ID NO: 297267 - DNA, 25 bp, Artificial
  probe
  misc_feature (1)..(25): SEQ ID NO: 1537; WAN024CU8; Start 385; Stop 409
attcgtgctaaacatatcgtgattg

SEQ ID NO: 297268 - DNA, 25 bp, Artificial
  probe
  misc_feature (1)..(25): SEQ ID NO: 1537; WAN024CU8; Start 391; Stop 415
gctaaacatatcgtgattgctacag

SEQ ID NO: 297269 - DNA, 25 bp, Artificial
  probe
  misc_feature (1)..(25): SEQ ID NO: 1537; WAN024CU8; Start 392; Stop 416
ctaaacatatcgtgattgctacagg

SEQ ID NO: 297270 - DNA, 25 bp, Artificial
  probe
  misc_feature (1)..(25): SEQ ID NO: 1537; WAN024CU8; Start 389; Stop 413
gtgctaaacatatcgtgattgctac

SEQ ID NO: 297271 - DNA, 25 bp, Artificial
  probe
  misc_feature (1)..(25): SEQ ID NO: 1537; WAN024CU8; Start 359; Stop 383
atactgtaagcgtaaatggtgaact

SEQ ID NO: 297272 - DNA, 25 bp, Artificial
  probe
  misc_feature (1)..(25): SEQ ID NO: 1537; WAN024CU8; Start 869; Stop 893
atactgttgttgagggaatctatgc

SEQ ID NO: 297273 - DNA, 25 bp, Artificial
  probe
  misc_feature (1)..(25): SEQ ID NO: 1537; WAN024CU8; Start 384; Stop 408
gattcgtgctaaacatatcgtgatt

SEQ ID NO: 297274 - DNA, 25 bp, Artificial
  probe
  misc_feature (1)..(25): SEQ ID NO: 1537; WAN024CU8; Start 390; Stop 414
tgctaaacatatcgtgattgctaca

SEQ ID NO: 297275 - DNA, 25 bp, Artificial
  probe
  misc_feature (1)..(25): SEQ ID NO: 1537; WAN024CU8; Start 653; Stop 677
aaagaacaaacttaccacttcacac

SEQ ID NO: 297276 - DNA, 25 bp, Artificial
  probe
  misc_feature (1)..(25): SEQ ID NO: 1537; WAN024CU8; Start 652; Stop 676
gaaagaacaaacttaccacttcaca

SEQ ID NO: 297277 - DNA, 25 bp, Artificial
  probe
  misc_feature (1)..(25): SEQ ID NO: 1538; WAN024CYP; Start 78; Stop 102
tgatacagatgtggaattggatgtt

SEQ ID NO: 297278 - DNA, 25 bp, Artificial
  probe
  misc_feature (1)..(25): SEQ ID NO: 1538; WAN024CYP; Start 77; Stop 101
ttgatacagatgtggaattggatgt

SEQ ID NO: 297279 - DNA, 25 bp, Artificial
  probe
  misc_feature (1)..(25): SEQ ID NO: 1538; WAN024CYP; Start 76; Stop 100
tttgatacagatgtggaattggatg

SEQ ID NO: 297280 - DNA, 25 bp, Artificial
  probe
  misc_feature (1)..(25): SEQ ID NO: 1538; WAN024CYP; Start 95; Stop 119
tggatgtttacaatctaggtctgat

SEQ ID NO: 297281 - DNA, 25 bp, Artificial
  probe
  misc_feature (1)..(25): SEQ ID NO: 1538; WAN024CYP; Start 121; Stop 145
tatgaaatcaatctggatgaaacgg

SEQ ID NO: 297282 - DNA, 25 bp, Artificial
  probe
  misc_feature (1)..(25): SEQ ID NO: 1538; WAN024CYP; Start 94; Stop 118
ttggatgtttacaatctaggtctga

SEQ ID NO: 297283 - DNA, 25 bp, Artificial
  probe
  misc_feature (1)..(25): SEQ ID NO: 1538; WAN024CYP; Start 83; Stop 107
cagatgtggaattggatgtttacaa

SEQ ID NO: 297284 - DNA, 25 bp, Artificial
  probe
  misc_feature (1)..(25): SEQ ID NO: 1538; WAN024CYP; Start 82; Stop 106
acagatgtggaattggatgtttaca

SEQ ID NO: 297285 - DNA, 25 bp, Artificial
  probe
  misc_feature (1)..(25): SEQ ID NO: 1538; WAN024CYP; Start 79; Stop 103
gatacagatgtggaattggatgttt

SEQ ID NO: 297286 - DNA, 25 bp, Artificial
  probe
  misc_feature (1)..(25): SEQ ID NO: 1538; WAN024CYP; Start 81; Stop 105
tacagatgtggaattggatgtttac

SEQ ID NO: 297287 - DNA, 25 bp, Artificial
  probe
  misc_feature (1)..(25): SEQ ID NO: 1538; WAN024CYP; Start 122; Stop 146
atgaaatcaatctggatgaaacggg

SEQ ID NO: 297288 - DNA, 25 bp, Artificial
  probe
  misc_feature (1)..(25): SEQ ID NO: 1538; WAN024CYP; Start 120; Stop 144
ttatgaaatcaatctggatgaaacg

SEQ ID NO: 297289 - DNA, 25 bp, Artificial
  probe
  misc_feature (1)..(25): SEQ ID NO: 1538; WAN024CYP; Start 80; Stop 104
atacagatgtggaattggatgttta

SEQ ID NO: 297290 - DNA, 25 bp, Artificial
  probe
  misc_feature (1)..(25): SEQ ID NO: 1538; WAN024CYP; Start 207; Stop 231
tattgaaatcgtggcaggtctgaaa

SEQ ID NO: 297291 - DNA, 25 bp, Artificial
  probe
  misc_feature (1)..(25): SEQ ID NO: 1538; WAN024CYP; Start 96; Stop 120
ggatgtttacaatctaggtctgatt

SEQ ID NO: 297292 - DNA, 25 bp, Artificial
  probe
  misc_feature (1)..(25): SEQ ID NO: 1538; WAN024CYP; Start 86; Stop 110
atgtggaattggatgtttacaatct

SEQ ID NO: 297293 - DNA, 25 bp, Artificial
  probe
  misc_feature (1)..(25): SEQ ID NO: 1538; WAN024CYP; Start 84; Stop 108
agatgtggaattggatgtttacaat

SEQ ID NO: 297294 - DNA, 25 bp, Artificial
  probe
  misc_feature (1)..(25): SEQ ID NO: 1538; WAN024CYP; Start 90; Stop 114
ggaattggatgtttacaatctaggt

SEQ ID NO: 297295 - DNA, 25 bp, Artificial
  probe
  misc_feature (1)..(25): SEQ ID NO: 1538; WAN024CYP; Start 89; Stop 113
tggaattggatgtttacaatctagg

SEQ ID NO: 297296 - DNA, 25 bp, Artificial
  probe
  misc_feature (1)..(25): SEQ ID NO: 1538; WAN024CYP; Start 206; Stop 230
ctattgaaatcgtggcaggtctgaa

SEQ ID NO: 297297 - DNA, 25 bp, Artificial
  probe
  misc_feature (1)..(25): SEQ ID NO: 1538; WAN024CYP; Start 85; Stop 109
gatgtggaattggatgtttacaatc

SEQ ID NO: 297298 - DNA, 25 bp, Artificial
  probe
  misc_feature (1)..(25): SEQ ID NO: 1538; WAN024CYP; Start 93; Stop 117
attggatgtttacaatctaggtctg

SEQ ID NO: 297299 - DNA, 25 bp, Artificial
  probe
  misc_feature (1)..(25): SEQ ID NO: 1538; WAN024CYP; Start 222; Stop 246
aggtctgaaacaaatcgagggtatc

SEQ ID NO: 297300 - DNA, 25 bp, Artificial
  probe
  misc_feature (1)..(25): SEQ ID NO: 1538; WAN024CYP; Start 87; Stop 111
tgtggaattggatgtttacaatcta

SEQ ID NO: 297301 - DNA, 25 bp, Artificial
  probe
  misc_feature (1)..(25): SEQ ID NO: 1538; WAN024CYP; Start 221; Stop 245
caggtctgaaacaaatcgagggtat

SEQ ID NO: 297302 - DNA, 25 bp, Artificial
  probe
  misc_feature (1)..(25): SEQ ID NO: 1538; WAN024CYP; Start 88; Stop 112
gtggaattggatgtttacaatctag

SEQ ID NO: 297303 - DNA, 25 bp, Artificial
  probe
  misc_feature (1)..(25): SEQ ID NO: 1538; WAN024CYP; Start 11; Stop 35
atatcaaaatcaatgaccgtgcttt

SEQ ID NO: 297304 - DNA, 25 bp, Artificial
  probe
  misc_feature (1)..(25): SEQ ID NO: 1538; WAN024CYP; Start 92; Stop 116
aattggatgtttacaatctaggtct

SEQ ID NO: 297305 - DNA, 25 bp, Artificial
  probe
  misc_feature (1)..(25): SEQ ID NO: 1538; WAN024CYP; Start 75; Stop 99
ttttgatacagatgtggaattggat

SEQ ID NO: 297306 - DNA, 25 bp, Artificial
  probe
  misc_feature (1)..(25): SEQ ID NO: 1538; WAN024CYP; Start 212; Stop 236
aaatcgtggcaggtctgaaacaaat

SEQ ID NO: 297307 - DNA, 25 bp, Artificial
  probe
  misc_feature (1)..(25): SEQ ID NO: 1538; WAN024CYP; Start 91; Stop 115
gaattggatgtttacaatctaggtc

SEQ ID NO: 297308 - DNA, 25 bp, Artificial
  probe
  misc_feature (1)..(25): SEQ ID NO: 1538; WAN024CYP; Start 97; Stop 121
gatgtttacaatctaggtctgattt

SEQ ID NO: 297309 - DNA, 25 bp, Artificial
  probe
  misc_feature (1)..(25): SEQ ID NO: 1538; WAN024CYP; Start 213; Stop 237
aatcgtggcaggtctgaaacaaatc

SEQ ID NO: 297310 - DNA, 25 bp, Artificial
  probe
  misc_feature (1)..(25): SEQ ID NO: 1539; WAN024CSY; Start 390; Stop 414
attacaagaagacagagtagcagac

SEQ ID NO: 297311 - DNA, 25 bp, Artificial
  probe
  misc_feature (1)..(25): SEQ ID NO: 1539; WAN024CSY; Start 326; Stop 350
gaggctattatgtagatacggtagg

SEQ ID NO: 297312 - DNA, 25 bp, Artificial
  probe
  misc_feature (1)..(25): SEQ ID NO: 1539; WAN024CSY; Start 387; Stop 411
tcaattacaagaagacagagtagca

SEQ ID NO: 297313 - DNA, 25 bp, Artificial
  probe
  misc_feature (1)..(25): SEQ ID NO: 1539; WAN024CSY; Start 388; Stop 412
caattacaagaagacagagtagcag

SEQ ID NO: 297314 - DNA, 25 bp, Artificial
  probe
  misc_feature (1)..(25): SEQ ID NO: 1539; WAN024CSY; Start 389; Stop 413
aattacaagaagacagagtagcaga

SEQ ID NO: 297315 - DNA, 25 bp, Artificial
  probe
  misc_feature (1)..(25): SEQ ID NO: 1539; WAN024CSY; Start 327; Stop 351
aggctattatgtagatacggtaggc

SEQ ID NO: 297316 - DNA, 25 bp, Artificial
  probe
  misc_feature (1)..(25): SEQ ID NO: 1539; WAN024CSY; Start 323; Stop 347
gtagaggctattatgtagatacggt

SEQ ID NO: 297317 - DNA, 25 bp, Artificial
  probe
  misc_feature (1)..(25): SEQ ID NO: 1539; WAN024CSY; Start 322; Stop 346
tgtagaggctattatgtagatacgg

SEQ ID NO: 297318 - DNA, 25 bp, Artificial
  probe
  misc_feature (1)..(25): SEQ ID NO: 1539; WAN024CSY; Start 325; Stop 349
agaggctattatgtagatacggtag

SEQ ID NO: 297319 - DNA, 25 bp, Artificial
  probe
  misc_feature (1)..(25): SEQ ID NO: 1539; WAN024CSY; Start 318; Stop 342
ttggtgtagaggctattatgtagat

SEQ ID NO: 297320 - DNA, 25 bp, Artificial
  probe
  misc_feature (1)..(25): SEQ ID NO: 1539; WAN024CSY; Start 386; Stop 410
atcaattacaagaagacagagtagc

SEQ ID NO: 297321 - DNA, 25 bp, Artificial
  probe
  misc_feature (1)..(25): SEQ ID NO: 1539; WAN024CSY; Start 391; Stop 415
ttacaagaagacagagtagcagacc

SEQ ID NO: 297322 - DNA, 25 bp, Artificial
  probe
  misc_feature (1)..(25): SEQ ID NO: 1539; WAN024CSY; Start 188; Stop 212
ttcacatgcttatcagtattcctcc

SEQ ID NO: 297323 - DNA, 25 bp, Artificial
  probe
  misc_feature (1)..(25): SEQ ID NO: 1539; WAN024CSY; Start 180; Stop 204
agaccatattcacatgcttatcagt

SEQ ID NO: 297324 - DNA, 25 bp, Artificial
  probe
  misc_feature (1)..(25): SEQ ID NO: 1539; WAN024CSY; Start 178; Stop 202
tcagaccatattcacatgcttatca

SEQ ID NO: 297325 - DNA, 25 bp, Artificial
  probe
  misc_feature (1)..(25): SEQ ID NO: 1539; WAN024CSY; Start 321; Stop 345
gtgtagaggctattatgtagatacg

SEQ ID NO: 297326 - DNA, 25 bp, Artificial
  probe
  misc_feature (1)..(25): SEQ ID NO: 1539; WAN024CSY; Start 170; Stop 194
atgcttgttcagaccatattcacat

SEQ ID NO: 297327 - DNA, 25 bp, Artificial
  probe
  misc_feature (1)..(25): SEQ ID NO: 1539; WAN024CSY; Start 179; Stop 203
cagaccatattcacatgcttatcag

SEQ ID NO: 297328 - DNA, 25 bp, Artificial
  probe
  misc_feature (1)..(25): SEQ ID NO: 1539; WAN024CSY; Start 148; Stop 172
ggtgtaataatccatgaagcgaatg

SEQ ID NO: 297329 - DNA, 25 bp, Artificial
  probe
  misc_feature (1)..(25): SEQ ID NO: 1539; WAN024CSY; Start 169; Stop 193
aatgcttgttcagaccatattcaca

SEQ ID NO: 297330 - DNA, 25 bp, Artificial
  probe
  misc_feature (1)..(25): SEQ ID NO: 1539; WAN024CSY; Start 176; Stop 200
gttcagaccatattcacatgcttat

SEQ ID NO: 297331 - DNA, 25 bp, Artificial
  probe
  misc_feature (1)..(25): SEQ ID NO: 1539; WAN024CSY; Start 319; Stop 343
tggtgtagaggctattatgtagata

SEQ ID NO: 297332 - DNA, 25 bp, Artificial
  probe
  misc_feature (1)..(25): SEQ ID NO: 1539; WAN024CSY; Start 149; Stop 173
gtgtaataatccatgaagcgaatgc

SEQ ID NO: 297333 - DNA, 25 bp, Artificial
  probe
  misc_feature (1)..(25): SEQ ID NO: 1539; WAN024CSY; Start 187; Stop 211
attcacatgcttatcagtattcctc

SEQ ID NO: 297334 - DNA, 25 bp, Artificial
  probe
  misc_feature (1)..(25): SEQ ID NO: 1539; WAN024CSY; Start 177; Stop 201
ttcagaccatattcacatgcttatc

SEQ ID NO: 297335 - DNA, 25 bp, Artificial
  probe
  misc_feature (1)..(25): SEQ ID NO: 1539; WAN024CSY; Start 383; Stop 407
agaatcaattacaagaagacagagt

SEQ ID NO: 297336 - DNA, 25 bp, Artificial
  probe
  misc_feature (1)..(25): SEQ ID NO: 1539; WAN024CSY; Start 381; Stop 405
tcagaatcaattacaagaagacaga

SEQ ID NO: 297337 - DNA, 25 bp, Artificial
  probe
  misc_feature (1)..(25): SEQ ID NO: 1539; WAN024CSY; Start 320; Stop 344
ggtgtagaggctattatgtagatac

SEQ ID NO: 297338 - DNA, 25 bp, Artificial
  probe
  misc_feature (1)..(25): SEQ ID NO: 1539; WAN024CSY; Start 382; Stop 406
cagaatcaattacaagaagacagag

SEQ ID NO: 297339 - DNA, 25 bp, Artificial
  probe
  misc_feature (1)..(25): SEQ ID NO: 1539; WAN024CSY; Start 175; Stop 199
tgttcagaccatattcacatgctta

SEQ ID NO: 297340 - DNA, 25 bp, Artificial
  probe
  misc_feature (1)..(25): SEQ ID NO: 1539; WAN024CSY; Start 324; Stop 348
tagaggctattatgtagatacggta

SEQ ID NO: 297341 - DNA, 25 bp, Artificial
  probe
  misc_feature (1)..(25): SEQ ID NO: 1539; WAN024CSY; Start 181; Stop 205
gaccatattcacatgcttatcagta

SEQ ID NO: 297342 - DNA, 25 bp, Artificial
  probe
  misc_feature (1)..(25): SEQ ID NO: 1539; WAN024CSY; Start 191; Stop 215
acatgcttatcagtattcctccgaa

SEQ ID NO: 297343 - DNA, 25 bp, Artificial
  probe
  misc_feature (1)..(25): SEQ ID NO: 1540; WAN024GBJ; Start 416; Stop 440
ttattcgtcaggttcaggatattgg

SEQ ID NO: 297344 - DNA, 25 bp, Artificial
  probe
  misc_feature (1)..(25): SEQ ID NO: 1540; WAN024GBJ; Start 695; Stop 719
cagtagcagtgattacggatatgag

SEQ ID NO: 297345 - DNA, 25 bp, Artificial
  probe
  misc_feature (1)..(25): SEQ ID NO: 1540; WAN024GBJ; Start 693; Stop 717
gacagtagcagtgattacggatatg

SEQ ID NO: 297346 - DNA, 25 bp, Artificial
  probe
  misc_feature (1)..(25): SEQ ID NO: 1540; WAN024GBJ; Start 692; Stop 716
agacagtagcagtgattacggatat

SEQ ID NO: 297347 - DNA, 25 bp, Artificial
  probe
  misc_feature (1)..(25): SEQ ID NO: 1540; WAN024GBJ; Start 417; Stop 441
tattcgtcaggttcaggatattgga

SEQ ID NO: 297348 - DNA, 25 bp, Artificial
  probe
  misc_feature (1)..(25): SEQ ID NO: 1540; WAN024GBJ; Start 691; Stop 715
aagacagtagcagtgattacggata

SEQ ID NO: 297349 - DNA, 25 bp, Artificial
  probe
  misc_feature (1)..(25): SEQ ID NO: 1540; WAN024GBJ; Start 694; Stop 718
acagtagcagtgattacggatatga

SEQ ID NO: 297350 - DNA, 25 bp, Artificial
  probe
  misc_feature (1)..(25): SEQ ID NO: 1540; WAN024GBJ; Start 421; Stop 445
cgtcaggttcaggatattggagtat

SEQ ID NO: 297351 - DNA, 25 bp, Artificial
  probe
  misc_feature (1)..(25): SEQ ID NO: 1540; WAN024GBJ; Start 423; Stop 447
tcaggttcaggatattggagtatct

SEQ ID NO: 297352 - DNA, 25 bp, Artificial
  probe
  misc_feature (1)..(25): SEQ ID NO: 1540; WAN024GBJ; Start 422; Stop 446
gtcaggttcaggatattggagtatc

SEQ ID NO: 297353 - DNA, 25 bp, Artificial
  probe
  misc_feature (1)..(25): SEQ ID NO: 1540; WAN024GBJ; Start 431; Stop 455
aggatattggagtatctgtcattgg

SEQ ID NO: 297354 - DNA, 25 bp, Artificial
  probe
  misc_feature (1)..(25): SEQ ID NO: 1540; WAN024GBJ; Start 696; Stop 720
agtagcagtgattacggatatgagc

SEQ ID NO: 297355 - DNA, 25 bp, Artificial
  probe
  misc_feature (1)..(25): SEQ ID NO: 1540; WAN024GBJ; Start 426; Stop 450
ggttcaggatattggagtatctgtc

SEQ ID NO: 297356 - DNA, 25 bp, Artificial
  probe
  misc_feature (1)..(25): SEQ ID NO: 1540; WAN024GBJ; Start 424; Stop 448
caggttcaggatattggagtatctg

SEQ ID NO: 297357 - DNA, 25 bp, Artificial
  probe
  misc_feature (1)..(25): SEQ ID NO: 1540; WAN024GBJ; Start 427; Stop 451
gttcaggatattggagtatctgtca

SEQ ID NO: 297358 - DNA, 25 bp, Artificial
  probe
  misc_feature (1)..(25): SEQ ID NO: 1540; WAN024GBJ; Start 425; Stop 449
aggttcaggatattggagtatctgt

SEQ ID NO: 297359 - DNA, 25 bp, Artificial
  probe
  misc_feature (1)..(25): SEQ ID NO: 1540; WAN024GBJ; Start 418; Stop 442
attcgtcaggttcaggatattggag

SEQ ID NO: 297360 - DNA, 25 bp, Artificial
  probe
  misc_feature (1)..(25): SEQ ID NO: 1540; WAN024GBJ; Start 690; Stop 714
gaagacagtagcagtgattacggat

SEQ ID NO: 297361 - DNA, 25 bp, Artificial
  probe
  misc_feature (1)..(25): SEQ ID NO: 1540; WAN024GBJ; Start 430; Stop 454
caggatattggagtatctgtcattg

SEQ ID NO: 297362 - DNA, 25 bp, Artificial
  probe
  misc_feature (1)..(25): SEQ ID NO: 1540; WAN024GBJ; Start 429; Stop 453
tcaggatattggagtatctgtcatt

SEQ ID NO: 297363 - DNA, 25 bp, Artificial
  probe
  misc_feature (1)..(25): SEQ ID NO: 1540; WAN024GBJ; Start 428; Stop 452
ttcaggatattggagtatctgtcat

SEQ ID NO: 297364 - DNA, 25 bp, Artificial
  probe
  misc_feature (1)..(25): SEQ ID NO: 1540; WAN024GBJ; Start 420; Stop 444
tcgtcaggttcaggatattggagta

SEQ ID NO: 297365 - DNA, 25 bp, Artificial
  probe
  misc_feature (1)..(25): SEQ ID NO: 1540; WAN024GBJ; Start 173; Stop 197
taacgatgaatatggttaagactgg

SEQ ID NO: 297366 - DNA, 25 bp, Artificial
  probe
  misc_feature (1)..(25): SEQ ID NO: 1540; WAN024GBJ; Start 686; Stop 710
gacggaagacagtagcagtgattac

SEQ ID NO: 297367 - DNA, 25 bp, Artificial
  probe
  misc_feature (1)..(25): SEQ ID NO: 1540; WAN024GBJ; Start 697; Stop 721
gtagcagtgattacggatatgagcc

SEQ ID NO: 297368 - DNA, 25 bp, Artificial
  probe
  misc_feature (1)..(25): SEQ ID NO: 1540; WAN024GBJ; Start 178; Stop 202
atgaatatggttaagactgggcaag

SEQ ID NO: 297369 - DNA, 25 bp, Artificial
  probe
  misc_feature (1)..(25): SEQ ID NO: 1540; WAN024GBJ; Start 177; Stop 201
gatgaatatggttaagactgggcaa

SEQ ID NO: 297370 - DNA, 25 bp, Artificial
  probe
  misc_feature (1)..(25): SEQ ID NO: 1540; WAN024GBJ; Start 415; Stop 439
tttattcgtcaggttcaggatattg

SEQ ID NO: 297371 - DNA, 25 bp, Artificial
  probe
  misc_feature (1)..(25): SEQ ID NO: 1540; WAN024GBJ; Start 174; Stop 198
aacgatgaatatggttaagactggg

SEQ ID NO: 297372 - DNA, 25 bp, Artificial
  probe
  misc_feature (1)..(25): SEQ ID NO: 1540; WAN024GBJ; Start 793; Stop 817
cgtcaggatattacccactttattt

SEQ ID NO: 297373 - DNA, 25 bp, Artificial
  probe
  misc_feature (1)..(25): SEQ ID NO: 1540; WAN024GBJ; Start 180; Stop 204
gaatatggttaagactgggcaagag

SEQ ID NO: 297374 - DNA, 25 bp, Artificial
  probe
  misc_feature (1)..(25): SEQ ID NO: 1540; WAN024GBJ; Start 698; Stop 722
tagcagtgattacggatatgagcca

SEQ ID NO: 297375 - DNA, 25 bp, Artificial
  probe
  misc_feature (1)..(25): SEQ ID NO: 1540; WAN024GBJ; Start 434; Stop 458
atattggagtatctgtcattgggca

SEQ ID NO: 297376 - DNA, 25 bp, Artificial
  probe
  misc_feature (1)..(25): SEQ ID NO: 1541; WAN024DBL; Start 281; Stop 305
ttcttatgttagcagaggcaatcat

SEQ ID NO: 297377 - DNA, 25 bp, Artificial
  probe
  misc_feature (1)..(25): SEQ ID NO: 1541; WAN024DBL; Start 546; Stop 570
tggaagttatcaacattcactgact

SEQ ID NO: 297378 - DNA, 25 bp, Artificial
  probe
  misc_feature (1)..(25): SEQ ID NO: 1541; WAN024DBL; Start 545; Stop 569
atggaagttatcaacattcactgac

SEQ ID NO: 297379 - DNA, 25 bp, Artificial
  probe
  misc_feature (1)..(25): SEQ ID NO: 1541; WAN024DBL; Start 544; Stop 568
gatggaagttatcaacattcactga

SEQ ID NO: 297380 - DNA, 25 bp, Artificial
  probe
  misc_feature (1)..(25): SEQ ID NO: 1541; WAN024DBL; Start 543; Stop 567
agatggaagttatcaacattcactg

SEQ ID NO: 297381 - DNA, 25 bp, Artificial
  probe
  misc_feature (1)..(25): SEQ ID NO: 1541; WAN024DBL; Start 734; Stop 758
ttcgcaacaacttgatattctctat

SEQ ID NO: 297382 - DNA, 25 bp, Artificial
  probe
  misc_feature (1)..(25): SEQ ID NO: 1541; WAN024DBL; Start 547; Stop 571
ggaagttatcaacattcactgacta

SEQ ID NO: 297383 - DNA, 25 bp, Artificial
  probe
  misc_feature (1)..(25): SEQ ID NO: 1541; WAN024DBL; Start 542; Stop 566
aagatggaagttatcaacattcact

SEQ ID NO: 297384 - DNA, 25 bp, Artificial
  probe
  misc_feature (1)..(25): SEQ ID NO: 1541; WAN024DBL; Start 282; Stop 306
tcttatgttagcagaggcaatcata

SEQ ID NO: 297385 - DNA, 25 bp, Artificial
  probe
  misc_feature (1)..(25): SEQ ID NO: 1541; WAN024DBL; Start 735; Stop 759
tcgcaacaacttgatattctctata

SEQ ID NO: 297386 - DNA, 25 bp, Artificial
  probe
  misc_feature (1)..(25): SEQ ID NO: 1541; WAN024DBL; Start 363; Stop 387
aaagttacaaatggcagtctcaatc

SEQ ID NO: 297387 - DNA, 25 bp, Artificial
  probe
  misc_feature (1)..(25): SEQ ID NO: 1541; WAN024DBL; Start 364; Stop 388
aagttacaaatggcagtctcaatca

SEQ ID NO: 297388 - DNA, 25 bp, Artificial
  probe
  misc_feature (1)..(25): SEQ ID NO: 1541; WAN024DBL; Start 369; Stop 393
acaaatggcagtctcaatcataatg

SEQ ID NO: 297389 - DNA, 25 bp, Artificial
  probe
  misc_feature (1)..(25): SEQ ID NO: 1541; WAN024DBL; Start 736; Stop 760
cgcaacaacttgatattctctataa

SEQ ID NO: 297390 - DNA, 25 bp, Artificial
  probe
  misc_feature (1)..(25): SEQ ID NO: 1541; WAN024DBL; Start 366; Stop 390
gttacaaatggcagtctcaatcata

SEQ ID NO: 297391 - DNA, 25 bp, Artificial
  probe
  misc_feature (1)..(25): SEQ ID NO: 1541; WAN024DBL; Start 365; Stop 389
agttacaaatggcagtctcaatcat

SEQ ID NO: 297392 - DNA, 25 bp, Artificial
  probe
  misc_feature (1)..(25): SEQ ID NO: 1541; WAN024DBL; Start 280; Stop 304
tttcttatgttagcagaggcaatca

SEQ ID NO: 297393 - DNA, 25 bp, Artificial
  probe
  misc_feature (1)..(25): SEQ ID NO: 1541; WAN024DBL; Start 367; Stop 391
ttacaaatggcagtctcaatcataa

SEQ ID NO: 297394 - DNA, 25 bp, Artificial
  probe
  misc_feature (1)..(25): SEQ ID NO: 1541; WAN024DBL; Start 368; Stop 392
tacaaatggcagtctcaatcataat

SEQ ID NO: 297395 - DNA, 25 bp, Artificial
  probe
  misc_feature (1)..(25): SEQ ID NO: 1541; WAN024DBL; Start 536; Stop 560
gtgagaaagatggaagttatcaaca

SEQ ID NO: 297396 - DNA, 25 bp, Artificial
  probe
  misc_feature (1)..(25): SEQ ID NO: 1541; WAN024DBL; Start 48; Stop 72
aaattccaaagagaaattcggtagc

SEQ ID NO: 297397 - DNA, 25 bp, Artificial
  probe
  misc_feature (1)..(25): SEQ ID NO: 1541; WAN024DBL; Start 45; Stop 69
aacaaattccaaagagaaattcggt

SEQ ID NO: 297398 - DNA, 25 bp, Artificial
  probe
  misc_feature (1)..(25): SEQ ID NO: 1541; WAN024DBL; Start 100; Stop 124
acacctgtttcttatgattacaagc

SEQ ID NO: 297399 - DNA, 25 bp, Artificial
  probe
  misc_feature (1)..(25): SEQ ID NO: 1541; WAN024DBL; Start 535; Stop 559
agtgagaaagatggaagttatcaac

SEQ ID NO: 297400 - DNA, 25 bp, Artificial
  probe
  misc_feature (1)..(25): SEQ ID NO: 1541; WAN024DBL; Start 502; Stop 526
tgggttaatcaatggttaagtgaaa

SEQ ID NO: 297401 - DNA, 25 bp, Artificial
  probe
  misc_feature (1)..(25): SEQ ID NO: 1541; WAN024DBL; Start 646; Stop 670
ggttctcacttatcaggtgcatata

SEQ ID NO: 297402 - DNA, 25 bp, Artificial
  probe
  misc_feature (1)..(25): SEQ ID NO: 1541; WAN024DBL; Start 548; Stop 572
gaagttatcaacattcactgactat

SEQ ID NO: 297403 - DNA, 25 bp, Artificial
  probe
  misc_feature (1)..(25): SEQ ID NO: 1541; WAN024DBL; Start 370; Stop 394
caaatggcagtctcaatcataatga

SEQ ID NO: 297404 - DNA, 25 bp, Artificial
  probe
  misc_feature (1)..(25): SEQ ID NO: 1541; WAN024DBL; Start 46; Stop 70
acaaattccaaagagaaattcggta

SEQ ID NO: 297405 - DNA, 25 bp, Artificial
  probe
  misc_feature (1)..(25): SEQ ID NO: 1541; WAN024DBL; Start 501; Stop 525
atgggttaatcaatggttaagtgaa

SEQ ID NO: 297406 - DNA, 25 bp, Artificial
  probe
  misc_feature (1)..(25): SEQ ID NO: 1541; WAN024DBL; Start 493; Stop 517
caagaatcatgggttaatcaatggt

SEQ ID NO: 297407 - DNA, 25 bp, Artificial
  probe
  misc_feature (1)..(25): SEQ ID NO: 1541; WAN024DBL; Start 492; Stop 516
acaagaatcatgggttaatcaatgg

SEQ ID NO: 297408 - DNA, 25 bp, Artificial
  probe
  misc_feature (1)..(25): SEQ ID NO: 1541; WAN024DBL; Start 372; Stop 396
aatggcagtctcaatcataatgaaa

SEQ ID NO: 297409 - DNA, 25 bp, Artificial
  probe
  misc_feature (1)..(25): SEQ ID NO: 1542; WAN024CKH; Start 255; Stop 279
attgccgttacatagtattgtgtct

SEQ ID NO: 297410 - DNA, 25 bp, Artificial
  probe
  misc_feature (1)..(25): SEQ ID NO: 1542; WAN024CKH; Start 256; Stop 280
ttgccgttacatagtattgtgtctt

SEQ ID NO: 297411 - DNA, 25 bp, Artificial
  probe
  misc_feature (1)..(25): SEQ ID NO: 1542; WAN024CKH; Start 254; Stop 278
tattgccgttacatagtattgtgtc

SEQ ID NO: 297412 - DNA, 25 bp, Artificial
  probe
  misc_feature (1)..(25): SEQ ID NO: 1542; WAN024CKH; Start 253; Stop 277
atattgccgttacatagtattgtgt

SEQ ID NO: 297413 - DNA, 25 bp, Artificial
  probe
  misc_feature (1)..(25): SEQ ID NO: 1542; WAN024CKH; Start 251; Stop 275
tgatattgccgttacatagtattgt

SEQ ID NO: 297414 - DNA, 25 bp, Artificial
  probe
  misc_feature (1)..(25): SEQ ID NO: 1542; WAN024CKH; Start 978; Stop 1002
gaattgtgataacttcatggacaga

SEQ ID NO: 297415 - DNA, 25 bp, Artificial
  probe
  misc_feature (1)..(25): SEQ ID NO: 1542; WAN024CKH; Start 977; Stop 1001
agaattgtgataacttcatggacag

SEQ ID NO: 297416 - DNA, 25 bp, Artificial
  probe
  misc_feature (1)..(25): SEQ ID NO: 1542; WAN024CKH; Start 252; Stop 276
gatattgccgttacatagtattgtg

SEQ ID NO: 297417 - DNA, 25 bp, Artificial
  probe
  misc_feature (1)..(25): SEQ ID NO: 1542; WAN024CKH; Start 981; Stop 1005
ttgtgataacttcatggacagaatt

SEQ ID NO: 297418 - DNA, 25 bp, Artificial
  probe
  misc_feature (1)..(25): SEQ ID NO: 1542; WAN024CKH; Start 979; Stop 1003
aattgtgataacttcatggacagaa

SEQ ID NO: 297419 - DNA, 25 bp, Artificial
  probe
  misc_feature (1)..(25): SEQ ID NO: 1542; WAN024CKH; Start 976; Stop 1000
aagaattgtgataacttcatggaca

SEQ ID NO: 297420 - DNA, 25 bp, Artificial
  probe
  misc_feature (1)..(25): SEQ ID NO: 1542; WAN024CKH; Start 360; Stop 384
tttggtttatcgtttggttcagaaa

SEQ ID NO: 297421 - DNA, 25 bp, Artificial
  probe
  misc_feature (1)..(25): SEQ ID NO: 1542; WAN024CKH; Start 980; Stop 1004
attgtgataacttcatggacagaat

SEQ ID NO: 297422 - DNA, 25 bp, Artificial
  probe
  misc_feature (1)..(25): SEQ ID NO: 1542; WAN024CKH; Start 633; Stop 657
aggtactaatgcaggagaattaagg

SEQ ID NO: 297423 - DNA, 25 bp, Artificial
  probe
  misc_feature (1)..(25): SEQ ID NO: 1542; WAN024CKH; Start 797; Stop 821
tgtctaataaactctactttgctgc

SEQ ID NO: 297424 - DNA, 25 bp, Artificial
  probe
  misc_feature (1)..(25): SEQ ID NO: 1542; WAN024CKH; Start 250; Stop 274
atgatattgccgttacatagtattg

SEQ ID NO: 297425 - DNA, 25 bp, Artificial
  probe
  misc_feature (1)..(25): SEQ ID NO: 1542; WAN024CKH; Start 774; Stop 798
cactcccttactagactatgctttg

SEQ ID NO: 297426 - DNA, 25 bp, Artificial
  probe
  misc_feature (1)..(25): SEQ ID NO: 1542; WAN024CKH; Start 527; Stop 551
cgtttccaattcaactttcctacat

SEQ ID NO: 297427 - DNA, 25 bp, Artificial
  probe
  misc_feature (1)..(25): SEQ ID NO: 1542; WAN024CKH; Start 540; Stop 564
actttcctacattggtttaattcgt

SEQ ID NO: 297428 - DNA, 25 bp, Artificial
  probe
  misc_feature (1)..(25): SEQ ID NO: 1542; WAN024CKH; Start 775; Stop 799
actcccttactagactatgctttgt

SEQ ID NO: 297429 - DNA, 25 bp, Artificial
  probe
  misc_feature (1)..(25): SEQ ID NO: 1542; WAN024CKH; Start 773; Stop 797
acactcccttactagactatgcttt

SEQ ID NO: 297430 - DNA, 25 bp, Artificial
  probe
  misc_feature (1)..(25): SEQ ID NO: 1542; WAN024CKH; Start 246; Stop 270
tgatatgatattgccgttacatagt

SEQ ID NO: 297431 - DNA, 25 bp, Artificial
  probe
  misc_feature (1)..(25): SEQ ID NO: 1542; WAN024CKH; Start 982; Stop 1006
tgtgataacttcatggacagaatta

SEQ ID NO: 297432 - DNA, 25 bp, Artificial
  probe
  misc_feature (1)..(25): SEQ ID NO: 1542; WAN024CKH; Start 769; Stop 793
aatcacactcccttactagactatg

SEQ ID NO: 297433 - DNA, 25 bp, Artificial
  probe
  misc_feature (1)..(25): SEQ ID NO: 1542; WAN024CKH; Start 984; Stop 1008
tgataacttcatggacagaattagt

SEQ ID NO: 297434 - DNA, 25 bp, Artificial
  probe
  misc_feature (1)..(25): SEQ ID NO: 1542; WAN024CKH; Start 770; Stop 794
atcacactcccttactagactatgc

SEQ ID NO: 297435 - DNA, 25 bp, Artificial
  probe
  misc_feature (1)..(25): SEQ ID NO: 1542; WAN024CKH; Start 701; Stop 725
acacattccagcctaaagataccat

SEQ ID NO: 297436 - DNA, 25 bp, Artificial
  probe
  misc_feature (1)..(25): SEQ ID NO: 1542; WAN024CKH; Start 460; Stop 484
tttactacccataacctacccaata

SEQ ID NO: 297437 - DNA, 25 bp, Artificial
  probe
  misc_feature (1)..(25): SEQ ID NO: 1542; WAN024CKH; Start 768; Stop 792
gaatcacactcccttactagactat

SEQ ID NO: 297438 - DNA, 25 bp, Artificial
  probe
  misc_feature (1)..(25): SEQ ID NO: 1542; WAN024CKH; Start 754; Stop 778
ttgaatttatacgggaatcacactc

SEQ ID NO: 297439 - DNA, 25 bp, Artificial
  probe
  misc_feature (1)..(25): SEQ ID NO: 1542; WAN024CKH; Start 772; Stop 796
cacactcccttactagactatgctt

SEQ ID NO: 297440 - DNA, 25 bp, Artificial
  probe
  misc_feature (1)..(25): SEQ ID NO: 1542; WAN024CKH; Start 258; Stop 282
gccgttacatagtattgtgtctttc

SEQ ID NO: 297441 - DNA, 25 bp, Artificial
  probe
  misc_feature (1)..(25): SEQ ID NO: 1542; WAN024CKH; Start 983; Stop 1007
gtgataacttcatggacagaattag

SEQ ID NO: 297442 - DNA, 25 bp, Artificial
  probe
  misc_feature (1)..(25): SEQ ID NO: 1543; WAN024DHN; Start 608; Stop 632
ttatctaccgagttgaggcagaatt

SEQ ID NO: 297443 - DNA, 25 bp, Artificial
  probe
  misc_feature (1)..(25): SEQ ID NO: 1543; WAN024DHN; Start 607; Stop 631
gttatctaccgagttgaggcagaat

SEQ ID NO: 297444 - DNA, 25 bp, Artificial
  probe
  misc_feature (1)..(25): SEQ ID NO: 1543; WAN024DHN; Start 26; Stop 50
caacagaattactagaggcaaatcc

SEQ ID NO: 297445 - DNA, 25 bp, Artificial
  probe
  misc_feature (1)..(25): SEQ ID NO: 1543; WAN024DHN; Start 25; Stop 49
gcaacagaattactagaggcaaatc

SEQ ID NO: 297446 - DNA, 25 bp, Artificial
  probe
  misc_feature (1)..(25): SEQ ID NO: 1543; WAN024DHN; Start 27; Stop 51
aacagaattactagaggcaaatccc

SEQ ID NO: 297447 - DNA, 25 bp, Artificial
  probe
  misc_feature (1)..(25): SEQ ID NO: 1543; WAN024DHN; Start 323; Stop 347
agattgatcgcttgtatctgaactt

SEQ ID NO: 297448 - DNA, 25 bp, Artificial
  probe
  misc_feature (1)..(25): SEQ ID NO: 1543; WAN024DHN; Start 604; Stop 628
caagttatctaccgagttgaggcag

SEQ ID NO: 297449 - DNA, 25 bp, Artificial
  probe
  misc_feature (1)..(25): SEQ ID NO: 1543; WAN024DHN; Start 322; Stop 346
gagattgatcgcttgtatctgaact

SEQ ID NO: 297450 - DNA, 25 bp, Artificial
  probe
  misc_feature (1)..(25): SEQ ID NO: 1543; WAN024DHN; Start 606; Stop 630
agttatctaccgagttgaggcagaa

SEQ ID NO: 297451 - DNA, 25 bp, Artificial
  probe
  misc_feature (1)..(25): SEQ ID NO: 1543; WAN024DHN; Start 605; Stop 629
aagttatctaccgagttgaggcaga

SEQ ID NO: 297452 - DNA, 25 bp, Artificial
  probe
  misc_feature (1)..(25): SEQ ID NO: 1543; WAN024DHN; Start 181; Stop 205
cctgacatcaactatatcgggattg

SEQ ID NO: 297453 - DNA, 25 bp, Artificial
  probe
  misc_feature (1)..(25): SEQ ID NO: 1543; WAN024DHN; Start 121; Stop 145
attcatgtggaagttggaagtggaa

SEQ ID NO: 297454 - DNA, 25 bp, Artificial
  probe
  misc_feature (1)..(25): SEQ ID NO: 1543; WAN024DHN; Start 321; Stop 345
tgagattgatcgcttgtatctgaac

SEQ ID NO: 297455 - DNA, 25 bp, Artificial
  probe
  misc_feature (1)..(25): SEQ ID NO: 1543; WAN024DHN; Start 320; Stop 344
gtgagattgatcgcttgtatctgaa

SEQ ID NO: 297456 - DNA, 25 bp, Artificial
  probe
  misc_feature (1)..(25): SEQ ID NO: 1543; WAN024DHN; Start 324; Stop 348
gattgatcgcttgtatctgaacttt

SEQ ID NO: 297457 - DNA, 25 bp, Artificial
  probe
  misc_feature (1)..(25): SEQ ID NO: 1543; WAN024DHN; Start 24; Stop 48
ggcaacagaattactagaggcaaat

SEQ ID NO: 297458 - DNA, 25 bp, Artificial
  probe
  misc_feature (1)..(25): SEQ ID NO: 1543; WAN024DHN; Start 609; Stop 633
tatctaccgagttgaggcagaattt

SEQ ID NO: 297459 - DNA, 25 bp, Artificial
  probe
  misc_feature (1)..(25): SEQ ID NO: 1543; WAN024DHN; Start 499; Stop 523
tctcaatatggcatgaaactcaatg

SEQ ID NO: 297460 - DNA, 25 bp, Artificial
  probe
  misc_feature (1)..(25): SEQ ID NO: 1543; WAN024DHN; Start 471; Stop 495
cttgtttgagtacagtttagtgagc

SEQ ID NO: 297461 - DNA, 25 bp, Artificial
  probe
  misc_feature (1)..(25): SEQ ID NO: 1543; WAN024DHN; Start 470; Stop 494
gcttgtttgagtacagtttagtgag

SEQ ID NO: 297462 - DNA, 25 bp, Artificial
  probe
  misc_feature (1)..(25): SEQ ID NO: 1543; WAN024DHN; Start 500; Stop 524
ctcaatatggcatgaaactcaatgg

SEQ ID NO: 297463 - DNA, 25 bp, Artificial
  probe
  misc_feature (1)..(25): SEQ ID NO: 1543; WAN024DHN; Start 474; Stop 498
gtttgagtacagtttagtgagcttt

SEQ ID NO: 297464 - DNA, 25 bp, Artificial
  probe
  misc_feature (1)..(25): SEQ ID NO: 1543; WAN024DHN; Start 502; Stop 526
caatatggcatgaaactcaatggtg

SEQ ID NO: 297465 - DNA, 25 bp, Artificial
  probe
  misc_feature (1)..(25): SEQ ID NO: 1543; WAN024DHN; Start 501; Stop 525
tcaatatggcatgaaactcaatggt

SEQ ID NO: 297466 - DNA, 25 bp, Artificial
  probe
  misc_feature (1)..(25): SEQ ID NO: 1543; WAN024DHN; Start 498; Stop 522
ttctcaatatggcatgaaactcaat

SEQ ID NO: 297467 - DNA, 25 bp, Artificial
  probe
  misc_feature (1)..(25): SEQ ID NO: 1543; WAN024DHN; Start 120; Stop 144
cattcatgtggaagttggaagtgga

SEQ ID NO: 297468 - DNA, 25 bp, Artificial
  probe
  misc_feature (1)..(25): SEQ ID NO: 1543; WAN024DHN; Start 503; Stop 527
aatatggcatgaaactcaatggtgt

SEQ ID NO: 297469 - DNA, 25 bp, Artificial
  probe
  misc_feature (1)..(25): SEQ ID NO: 1543; WAN024DHN; Start 469; Stop 493
ggcttgtttgagtacagtttagtga

SEQ ID NO: 297470 - DNA, 25 bp, Artificial
  probe
  misc_feature (1)..(25): SEQ ID NO: 1543; WAN024DHN; Start 468; Stop 492
tggcttgtttgagtacagtttagtg

SEQ ID NO: 297471 - DNA, 25 bp, Artificial
  probe
  misc_feature (1)..(25): SEQ ID NO: 1543; WAN024DHN; Start 467; Stop 491
gtggcttgtttgagtacagtttagt

SEQ ID NO: 297472 - DNA, 25 bp, Artificial
  probe
  misc_feature (1)..(25): SEQ ID NO: 1543; WAN024DHN; Start 319; Stop 343
ggtgagattgatcgcttgtatctga

SEQ ID NO: 297473 - DNA, 25 bp, Artificial
  probe
  misc_feature (1)..(25): SEQ ID NO: 1543; WAN024DHN; Start 504; Stop 528
atatggcatgaaactcaatggtgtc

SEQ ID NO: 297474 - DNA, 25 bp, Artificial
  probe
  misc_feature (1)..(25): SEQ ID NO: 1543; WAN024DHN; Start 316; Stop 340
gacggtgagattgatcgcttgtatc

SEQ ID NO: 297475 - DNA, 25 bp, Artificial
  probe
  misc_feature (1)..(25): SEQ ID NO: 1544; WAN0249H8; Start 38; Stop 62
cgaggttaactcctttgtttataga

SEQ ID NO: 297476 - DNA, 25 bp, Artificial
  probe
  misc_feature (1)..(25): SEQ ID NO: 1544; WAN0249H8; Start 37; Stop 61
tcgaggttaactcctttgtttatag

SEQ ID NO: 297477 - DNA, 25 bp, Artificial
  probe
  misc_feature (1)..(25): SEQ ID NO: 1544; WAN0249H8; Start 35; Stop 59
tctcgaggttaactcctttgtttat

SEQ ID NO: 297478 - DNA, 25 bp, Artificial
  probe
  misc_feature (1)..(25): SEQ ID NO: 1544; WAN0249H8; Start 34; Stop 58
ttctcgaggttaactcctttgttta

SEQ ID NO: 297479 - DNA, 25 bp, Artificial
  probe
  misc_feature (1)..(25): SEQ ID NO: 1544; WAN0249H8; Start 39; Stop 63
gaggttaactcctttgtttatagat

SEQ ID NO: 297480 - DNA, 25 bp, Artificial
  probe
  misc_feature (1)..(25): SEQ ID NO: 1544; WAN0249H8; Start 33; Stop 57
tttctcgaggttaactcctttgttt

SEQ ID NO: 297481 - DNA, 25 bp, Artificial
  probe
  misc_feature (1)..(25): SEQ ID NO: 1544; WAN0249H8; Start 32; Stop 56
ctttctcgaggttaactcctttgtt

SEQ ID NO: 297482 - DNA, 25 bp, Artificial
  probe
  misc_feature (1)..(25): SEQ ID NO: 1544; WAN0249H8; Start 36; Stop 60
ctcgaggttaactcctttgtttata

SEQ ID NO: 297483 - DNA, 25 bp, Artificial
  probe
  misc_feature (1)..(25): SEQ ID NO: 1544; WAN0249H8; Start 31; Stop 55
cctttctcgaggttaactcctttgt

SEQ ID NO: 297484 - DNA, 25 bp, Artificial
  probe
  misc_feature (1)..(25): SEQ ID NO: 1544; WAN0249H8; Start 40; Stop 64
aggttaactcctttgtttatagata

SEQ ID NO: 297485 - DNA, 25 bp, Artificial
  probe
  misc_feature (1)..(25): SEQ ID NO: 1544; WAN0249H8; Start 29; Stop 53
tacctttctcgaggttaactccttt

SEQ ID NO: 297486 - DNA, 25 bp, Artificial
  probe
  misc_feature (1)..(25): SEQ ID NO: 1544; WAN0249H8; Start 28; Stop 52
ttacctttctcgaggttaactcctt

SEQ ID NO: 297487 - DNA, 25 bp, Artificial
  probe
  misc_feature (1)..(25): SEQ ID NO: 1544; WAN0249H8; Start 22; Stop 46
aaggagttacctttctcgaggttaa

SEQ ID NO: 297488 - DNA, 25 bp, Artificial
  probe
  misc_feature (1)..(25): SEQ ID NO: 1544; WAN0249H8; Start 27; Stop 51
gttacctttctcgaggttaactcct

SEQ ID NO: 297489 - DNA, 25 bp, Artificial
  probe
  misc_feature (1)..(25): SEQ ID NO: 1544; WAN0249H8; Start 26; Stop 50
agttacctttctcgaggttaactcc

SEQ ID NO: 297490 - DNA, 25 bp, Artificial
  probe
  misc_feature (1)..(25): SEQ ID NO: 1544; WAN0249H8; Start 24; Stop 48
ggagttacctttctcgaggttaact

SEQ ID NO: 297491 - DNA, 25 bp, Artificial
  probe
  misc_feature (1)..(25): SEQ ID NO: 1544; WAN0249H8; Start 23; Stop 47
aggagttacctttctcgaggttaac

SEQ ID NO: 297492 - DNA, 25 bp, Artificial
  probe
  misc_feature (1)..(25): SEQ ID NO: 1544; WAN0249H8; Start 30; Stop 54
acctttctcgaggttaactcctttg

SEQ ID NO: 297493 - DNA, 25 bp, Artificial
  probe
  misc_feature (1)..(25): SEQ ID NO: 1545; WAN024DV9; Start 594; Stop 618
tgaagaagttaaggattatgcggat

SEQ ID NO: 297494 - DNA, 25 bp, Artificial
  probe
  misc_feature (1)..(25): SEQ ID NO: 1545; WAN024DV9; Start 593; Stop 617
ctgaagaagttaaggattatgcgga

SEQ ID NO: 297495 - DNA, 25 bp, Artificial
  probe
  misc_feature (1)..(25): SEQ ID NO: 1545; WAN024DV9; Start 595; Stop 619
gaagaagttaaggattatgcggatc

SEQ ID NO: 297496 - DNA, 25 bp, Artificial
  probe
  misc_feature (1)..(25): SEQ ID NO: 1545; WAN024DV9; Start 216; Stop 240
gagaatagcctatcttcctcaacaa

SEQ ID NO: 297497 - DNA, 25 bp, Artificial
  probe
  misc_feature (1)..(25): SEQ ID NO: 1545; WAN024DV9; Start 596; Stop 620
aagaagttaaggattatgcggatcg

SEQ ID NO: 297498 - DNA, 25 bp, Artificial
  probe
  misc_feature (1)..(25): SEQ ID NO: 1545; WAN024DV9; Start 623; Stop 647
atattcatctagtccgtaaccaaga

SEQ ID NO: 297499 - DNA, 25 bp, Artificial
  probe
  misc_feature (1)..(25): SEQ ID NO: 1545; WAN024DV9; Start 617; Stop 641
atcgcaatattcatctagtccgtaa

SEQ ID NO: 297500 - DNA, 25 bp, Artificial
  probe
  misc_feature (1)..(25): SEQ ID NO: 1545; WAN024DV9; Start 620; Stop 644
gcaatattcatctagtccgtaacca

SEQ ID NO: 297501 - DNA, 25 bp, Artificial
  probe
  misc_feature (1)..(25): SEQ ID NO: 1545; WAN024DV9; Start 624; Stop 648
tattcatctagtccgtaaccaagac

SEQ ID NO: 297502 - DNA, 25 bp, Artificial
  probe
  misc_feature (1)..(25): SEQ ID NO: 1545; WAN024DV9; Start 616; Stop 640
gatcgcaatattcatctagtccgta

SEQ ID NO: 297503 - DNA, 25 bp, Artificial
  probe
  misc_feature (1)..(25): SEQ ID NO: 1545; WAN024DV9; Start 618; Stop 642
tcgcaatattcatctagtccgtaac

SEQ ID NO: 297504 - DNA, 25 bp, Artificial
  probe
  misc_feature (1)..(25): SEQ ID NO: 1545; WAN024DV9; Start 619; Stop 643
cgcaatattcatctagtccgtaacc

SEQ ID NO: 297505 - DNA, 25 bp, Artificial
  probe
  misc_feature (1)..(25): SEQ ID NO: 1545; WAN024DV9; Start 621; Stop 645
caatattcatctagtccgtaaccaa

SEQ ID NO: 297506 - DNA, 25 bp, Artificial
  probe
  misc_feature (1)..(25): SEQ ID NO: 1545; WAN024DV9; Start 592; Stop 616
cctgaagaagttaaggattatgcgg

SEQ ID NO: 297507 - DNA, 25 bp, Artificial
  probe
  misc_feature (1)..(25): SEQ ID NO: 1545; WAN024DV9; Start 622; Stop 646
aatattcatctagtccgtaaccaag

SEQ ID NO: 297508 - DNA, 25 bp, Artificial
  probe
  misc_feature (1)..(25): SEQ ID NO: 1545; WAN024DV9; Start 188; Stop 212
caaagacaaatacgcaaggtaagaa

SEQ ID NO: 297509 - DNA, 25 bp, Artificial
  probe
  misc_feature (1)..(25): SEQ ID NO: 1545; WAN024DV9; Start 186; Stop 210
ttcaaagacaaatacgcaaggtaag

SEQ ID NO: 297510 - DNA, 25 bp, Artificial
  probe
  misc_feature (1)..(25): SEQ ID NO: 1545; WAN024DV9; Start 185; Stop 209
tttcaaagacaaatacgcaaggtaa

SEQ ID NO: 297511 - DNA, 25 bp, Artificial
  probe
  misc_feature (1)..(25): SEQ ID NO: 1545; WAN024DV9; Start 189; Stop 213
aaagacaaatacgcaaggtaagaaa

SEQ ID NO: 297512 - DNA, 25 bp, Artificial
  probe
  misc_feature (1)..(25): SEQ ID NO: 1545; WAN024DV9; Start 187; Stop 211
tcaaagacaaatacgcaaggtaaga

SEQ ID NO: 297513 - DNA, 25 bp, Artificial
  probe
  misc_feature (1)..(25): SEQ ID NO: 1545; WAN024DV9; Start 190; Stop 214
aagacaaatacgcaaggtaagaaat

SEQ ID NO: 297514 - DNA, 25 bp, Artificial
  probe
  misc_feature (1)..(25): SEQ ID NO: 1545; WAN024DV9; Start 459; Stop 483
ttctgaccctgatgtgtttatccta

SEQ ID NO: 297515 - DNA, 25 bp, Artificial
  probe
  misc_feature (1)..(25): SEQ ID NO: 1545; WAN024DV9; Start 191; Stop 215
agacaaatacgcaaggtaagaaatt

SEQ ID NO: 297516 - DNA, 25 bp, Artificial
  probe
  misc_feature (1)..(25): SEQ ID NO: 1545; WAN024DV9; Start 217; Stop 241
agaatagcctatcttcctcaacaaa

SEQ ID NO: 297517 - DNA, 25 bp, Artificial
  probe
  misc_feature (1)..(25): SEQ ID NO: 1545; WAN024DV9; Start 201; Stop 225
gcaaggtaagaaattgagaatagcc

SEQ ID NO: 297518 - DNA, 25 bp, Artificial
  probe
  misc_feature (1)..(25): SEQ ID NO: 1545; WAN024DV9; Start 193; Stop 217
acaaatacgcaaggtaagaaattga

SEQ ID NO: 297519 - DNA, 25 bp, Artificial
  probe
  misc_feature (1)..(25): SEQ ID NO: 1545; WAN024DV9; Start 200; Stop 224
cgcaaggtaagaaattgagaatagc

SEQ ID NO: 297520 - DNA, 25 bp, Artificial
  probe
  misc_feature (1)..(25): SEQ ID NO: 1545; WAN024DV9; Start 199; Stop 223
acgcaaggtaagaaattgagaatag

SEQ ID NO: 297521 - DNA, 25 bp, Artificial
  probe
  misc_feature (1)..(25): SEQ ID NO: 1545; WAN024DV9; Start 192; Stop 216
gacaaatacgcaaggtaagaaattg

SEQ ID NO: 297522 - DNA, 25 bp, Artificial
  probe
  misc_feature (1)..(25): SEQ ID NO: 1545; WAN024DV9; Start 226; Stop 250
tatcttcctcaacaaattgccagtt

SEQ ID NO: 297523 - DNA, 25 bp, Artificial
  probe
  misc_feature (1)..(25): SEQ ID NO: 1545; WAN024DV9; Start 194; Stop 218
caaatacgcaaggtaagaaattgag

SEQ ID NO: 297524 - DNA, 25 bp, Artificial
  probe
  misc_feature (1)..(25): SEQ ID NO: 1545; WAN024DV9; Start 196; Stop 220
aatacgcaaggtaagaaattgagaa

SEQ ID NO: 297525 - DNA, 25 bp, Artificial
  probe
  misc_feature (1)..(25): SEQ ID NO: 1545; WAN024DV9; Start 195; Stop 219
aaatacgcaaggtaagaaattgaga

SEQ ID NO: 297526 - DNA, 25 bp, Artificial
  probe
  misc_feature (1)..(25): SEQ ID NO: 1546; WAN024FU6; Start 850; Stop 874
tatactcgccgtaccaataatctag

SEQ ID NO: 297527 - DNA, 25 bp, Artificial
  probe
  misc_feature (1)..(25): SEQ ID NO: 1546; WAN024FU6; Start 848; Stop 872
gttatactcgccgtaccaataatct

SEQ ID NO: 297528 - DNA, 25 bp, Artificial
  probe
  misc_feature (1)..(25): SEQ ID NO: 1546; WAN024FU6; Start 849; Stop 873
ttatactcgccgtaccaataatcta

SEQ ID NO: 297529 - DNA, 25 bp, Artificial
  probe
  misc_feature (1)..(25): SEQ ID NO: 1546; WAN024FU6; Start 851; Stop 875
atactcgccgtaccaataatctagg

SEQ ID NO: 297530 - DNA, 25 bp, Artificial
  probe
  misc_feature (1)..(25): SEQ ID NO: 1546; WAN024FU6; Start 586; Stop 610
cgagaacaggaaatcaaggactata

SEQ ID NO: 297531 - DNA, 25 bp, Artificial
  probe
  misc_feature (1)..(25): SEQ ID NO: 1546; WAN024FU6; Start 813; Stop 837
agttatggatgaaattctctggtct

SEQ ID NO: 297532 - DNA, 25 bp, Artificial
  probe
  misc_feature (1)..(25): SEQ ID NO: 1546; WAN024FU6; Start 847; Stop 871
ggttatactcgccgtaccaataatc

SEQ ID NO: 297533 - DNA, 25 bp, Artificial
  probe
  misc_feature (1)..(25): SEQ ID NO: 1546; WAN024FU6; Start 811; Stop 835
caagttatggatgaaattctctggt

SEQ ID NO: 297534 - DNA, 25 bp, Artificial
  probe
  misc_feature (1)..(25): SEQ ID NO: 1546; WAN024FU6; Start 818; Stop 842
tggatgaaattctctggtctaaaga

SEQ ID NO: 297535 - DNA, 25 bp, Artificial
  probe
  misc_feature (1)..(25): SEQ ID NO: 1546; WAN024FU6; Start 812; Stop 836
aagttatggatgaaattctctggtc

SEQ ID NO: 297536 - DNA, 25 bp, Artificial
  probe
  misc_feature (1)..(25): SEQ ID NO: 1546; WAN024FU6; Start 585; Stop 609
acgagaacaggaaatcaaggactat

SEQ ID NO: 297537 - DNA, 25 bp, Artificial
  probe
  misc_feature (1)..(25): SEQ ID NO: 1546; WAN024FU6; Start 737; Stop 761
ctgttgtctctatcaatgcctttaa

SEQ ID NO: 297538 - DNA, 25 bp, Artificial
  probe
  misc_feature (1)..(25): SEQ ID NO: 1546; WAN024FU6; Start 584; Stop 608
aacgagaacaggaaatcaaggacta

SEQ ID NO: 297539 - DNA, 25 bp, Artificial
  probe
  misc_feature (1)..(25): SEQ ID NO: 1546; WAN024FU6; Start 817; Stop 841
atggatgaaattctctggtctaaag

SEQ ID NO: 297540 - DNA, 25 bp, Artificial
  probe
  misc_feature (1)..(25): SEQ ID NO: 1546; WAN024FU6; Start 736; Stop 760
gctgttgtctctatcaatgccttta

SEQ ID NO: 297541 - DNA, 25 bp, Artificial
  probe
  misc_feature (1)..(25): SEQ ID NO: 1546; WAN024FU6; Start 731; Stop 755
ctcaagctgttgtctctatcaatgc

SEQ ID NO: 297542 - DNA, 25 bp, Artificial
  probe
  misc_feature (1)..(25): SEQ ID NO: 1546; WAN024FU6; Start 730; Stop 754
gctcaagctgttgtctctatcaatg

SEQ ID NO: 297543 - DNA, 25 bp, Artificial
  probe
  misc_feature (1)..(25): SEQ ID NO: 1546; WAN024FU6; Start 362; Stop 386
ttgatgatttgcgaaattctttgga

SEQ ID NO: 297544 - DNA, 25 bp, Artificial
  probe
  misc_feature (1)..(25): SEQ ID NO: 1546; WAN024FU6; Start 954; Stop 978
acctcttatgagtgtggatatcgaa

SEQ ID NO: 297545 - DNA, 25 bp, Artificial
  probe
  misc_feature (1)..(25): SEQ ID NO: 1546; WAN024FU6; Start 953; Stop 977
aacctcttatgagtgtggatatcga

SEQ ID NO: 297546 - DNA, 25 bp, Artificial
  probe
  misc_feature (1)..(25): SEQ ID NO: 1546; WAN024FU6; Start 361; Stop 385
tttgatgatttgcgaaattctttgg

SEQ ID NO: 297547 - DNA, 25 bp, Artificial
  probe
  misc_feature (1)..(25): SEQ ID NO: 1546; WAN024FU6; Start 363; Stop 387
tgatgatttgcgaaattctttggag

SEQ ID NO: 297548 - DNA, 25 bp, Artificial
  probe
  misc_feature (1)..(25): SEQ ID NO: 1546; WAN024FU6; Start 519; Stop 543
aaatctgacagtcgctgaaattaag

SEQ ID NO: 297549 - DNA, 25 bp, Artificial
  probe
  misc_feature (1)..(25): SEQ ID NO: 1546; WAN024FU6; Start 814; Stop 838
gttatggatgaaattctctggtcta

SEQ ID NO: 297550 - DNA, 25 bp, Artificial
  probe
  misc_feature (1)..(25): SEQ ID NO: 1546; WAN024FU6; Start 581; Stop 605
aagaacgagaacaggaaatcaagga

SEQ ID NO: 297551 - DNA, 25 bp, Artificial
  probe
  misc_feature (1)..(25): SEQ ID NO: 1546; WAN024FU6; Start 580; Stop 604
caagaacgagaacaggaaatcaagg

SEQ ID NO: 297552 - DNA, 25 bp, Artificial
  probe
  misc_feature (1)..(25): SEQ ID NO: 1546; WAN024FU6; Start 579; Stop 603
ccaagaacgagaacaggaaatcaag

SEQ ID NO: 297553 - DNA, 25 bp, Artificial
  probe
  misc_feature (1)..(25): SEQ ID NO: 1546; WAN024FU6; Start 587; Stop 611
gagaacaggaaatcaaggactatat

SEQ ID NO: 297554 - DNA, 25 bp, Artificial
  probe
  misc_feature (1)..(25): SEQ ID NO: 1546; WAN024FU6; Start 1099; Stop 1123
tcatcagataatcttgaggaactaa

SEQ ID NO: 297555 - DNA, 25 bp, Artificial
  probe
  misc_feature (1)..(25): SEQ ID NO: 1546; WAN024FU6; Start 835; Stop 859
tctaaagaagacggttatactcgcc

SEQ ID NO: 297556 - DNA, 25 bp, Artificial
  probe
  misc_feature (1)..(25): SEQ ID NO: 1546; WAN024FU6; Start 734; Stop 758
aagctgttgtctctatcaatgcctt

SEQ ID NO: 297557 - DNA, 25 bp, Artificial
  probe
  misc_feature (1)..(25): SEQ ID NO: 1546; WAN024FU6; Start 795; Stop 819
ttatcgtaaaggcagccaagttatg

SEQ ID NO: 297558 - DNA, 25 bp, Artificial
  probe
  misc_feature (1)..(25): SEQ ID NO: 1546; WAN024FU6; Start 794; Stop 818
gttatcgtaaaggcagccaagttat

SEQ ID NO: 297559 - DNA, 25 bp, Artificial
  probe
  misc_feature (1)..(25): SEQ ID NO: 1547; WAN024FFL; Start 219; Stop 243
aaggcgagatattattgtagagagc

SEQ ID NO: 297560 - DNA, 25 bp, Artificial
  probe
  misc_feature (1)..(25): SEQ ID NO: 1547; WAN024FFL; Start 601; Stop 625
ttagccaatctctccactgtatatt

SEQ ID NO: 297561 - DNA, 25 bp, Artificial
  probe
  misc_feature (1)..(25): SEQ ID NO: 1547; WAN024FFL; Start 222; Stop 246
gcgagatattattgtagagagccaa

SEQ ID NO: 297562 - DNA, 25 bp, Artificial
  probe
  misc_feature (1)..(25): SEQ ID NO: 1547; WAN024FFL; Start 59; Stop 83
aacaagatgtatgtggacaagtcat

SEQ ID NO: 297563 - DNA, 25 bp, Artificial
  probe
  misc_feature (1)..(25): SEQ ID NO: 1547; WAN024FFL; Start 432; Stop 456
ggactatcttgaacctatggataca

SEQ ID NO: 297564 - DNA, 25 bp, Artificial
  probe
  misc_feature (1)..(25): SEQ ID NO: 1547; WAN024FFL; Start 60; Stop 84
acaagatgtatgtggacaagtcata

SEQ ID NO: 297565 - DNA, 25 bp, Artificial
  probe
  misc_feature (1)..(25): SEQ ID NO: 1547; WAN024FFL; Start 58; Stop 82
caacaagatgtatgtggacaagtca

SEQ ID NO: 297566 - DNA, 25 bp, Artificial
  probe
  misc_feature (1)..(25): SEQ ID NO: 1547; WAN024FFL; Start 445; Stop 469
cctatggatacatggtacattagtg

SEQ ID NO: 297567 - DNA, 25 bp, Artificial
  probe
  misc_feature (1)..(25): SEQ ID NO: 1547; WAN024FFL; Start 427; Stop 451
atttgggactatcttgaacctatgg

SEQ ID NO: 297568 - DNA, 25 bp, Artificial
  probe
  misc_feature (1)..(25): SEQ ID NO: 1547; WAN024FFL; Start 779; Stop 803
tattacgactaaccaaagaagaggc

SEQ ID NO: 297569 - DNA, 25 bp, Artificial
  probe
  misc_feature (1)..(25): SEQ ID NO: 1547; WAN024FFL; Start 733; Stop 757
ggaatactacaacataactccgatt

SEQ ID NO: 297570 - DNA, 25 bp, Artificial
  probe
  misc_feature (1)..(25): SEQ ID NO: 1547; WAN024FFL; Start 699; Stop 723
atacgatattcttggattctctcaa

SEQ ID NO: 297571 - DNA, 25 bp, Artificial
  probe
  misc_feature (1)..(25): SEQ ID NO: 1547; WAN024FFL; Start 465; Stop 489
tagtgatttgaaattgcttggaacc

SEQ ID NO: 297572 - DNA, 25 bp, Artificial
  probe
  misc_feature (1)..(25): SEQ ID NO: 1547; WAN024FFL; Start 429; Stop 453
ttgggactatcttgaacctatggat

SEQ ID NO: 297573 - DNA, 25 bp, Artificial
  probe
  misc_feature (1)..(25): SEQ ID NO: 1547; WAN024FFL; Start 428; Stop 452
tttgggactatcttgaacctatgga

SEQ ID NO: 297574 - DNA, 25 bp, Artificial
  probe
  misc_feature (1)..(25): SEQ ID NO: 1547; WAN024FFL; Start 194; Stop 218
tatgcaacgaataccatcctagtaa

SEQ ID NO: 297575 - DNA, 25 bp, Artificial
  probe
  misc_feature (1)..(25): SEQ ID NO: 1547; WAN024FFL; Start 439; Stop 463
cttgaacctatggatacatggtaca

SEQ ID NO: 297576 - DNA, 25 bp, Artificial
  probe
  misc_feature (1)..(25): SEQ ID NO: 1547; WAN024FFL; Start 602; Stop 626
tagccaatctctccactgtatattt

SEQ ID NO: 297577 - DNA, 25 bp, Artificial
  probe
  misc_feature (1)..(25): SEQ ID NO: 1547; WAN024FFL; Start 600; Stop 624
tttagccaatctctccactgtatat

SEQ ID NO: 297578 - DNA, 25 bp, Artificial
  probe
  misc_feature (1)..(25): SEQ ID NO: 1547; WAN024FFL; Start 193; Stop 217
atatgcaacgaataccatcctagta

SEQ ID NO: 297579 - DNA, 25 bp, Artificial
  probe
  misc_feature (1)..(25): SEQ ID NO: 1547; WAN024FFL; Start 192; Stop 216
tatatgcaacgaataccatcctagt

SEQ ID NO: 297580 - DNA, 25 bp, Artificial
  probe
  misc_feature (1)..(25): SEQ ID NO: 1547; WAN024FFL; Start 438; Stop 462
tcttgaacctatggatacatggtac

SEQ ID NO: 297581 - DNA, 25 bp, Artificial
  probe
  misc_feature (1)..(25): SEQ ID NO: 1547; WAN024FFL; Start 435; Stop 459
ctatcttgaacctatggatacatgg

SEQ ID NO: 297582 - DNA, 25 bp, Artificial
  probe
  misc_feature (1)..(25): SEQ ID NO: 1547; WAN024FFL; Start 468; Stop 492
tgatttgaaattgcttggaaccatt

SEQ ID NO: 297583 - DNA, 25 bp, Artificial
  probe
  misc_feature (1)..(25): SEQ ID NO: 1547; WAN024FFL; Start 441; Stop 465
tgaacctatggatacatggtacatt

SEQ ID NO: 297584 - DNA, 25 bp, Artificial
  probe
  misc_feature (1)..(25): SEQ ID NO: 1547; WAN024FFL; Start 440; Stop 464
ttgaacctatggatacatggtacat

SEQ ID NO: 297585 - DNA, 25 bp, Artificial
  probe
  misc_feature (1)..(25): SEQ ID NO: 1547; WAN024FFL; Start 725; Stop 749
tacgcttgggaatactacaacataa

SEQ ID NO: 297586 - DNA, 25 bp, Artificial
  probe
  misc_feature (1)..(25): SEQ ID NO: 1547; WAN024FFL; Start 106; Stop 130
attgaacacggtaaagttattccca

SEQ ID NO: 297587 - DNA, 25 bp, Artificial
  probe
  misc_feature (1)..(25): SEQ ID NO: 1547; WAN024FFL; Start 110; Stop 134
aacacggtaaagttattcccagttt

SEQ ID NO: 297588 - DNA, 25 bp, Artificial
  probe
  misc_feature (1)..(25): SEQ ID NO: 1547; WAN024FFL; Start 728; Stop 752
gcttgggaatactacaacataactc

SEQ ID NO: 297589 - DNA, 25 bp, Artificial
  probe
  misc_feature (1)..(25): SEQ ID NO: 1547; WAN024FFL; Start 470; Stop 494
atttgaaattgcttggaaccattct

SEQ ID NO: 297590 - DNA, 25 bp, Artificial
  probe
  misc_feature (1)..(25): SEQ ID NO: 1547; WAN024FFL; Start 469; Stop 493
gatttgaaattgcttggaaccattc

SEQ ID NO: 297591 - DNA, 25 bp, Artificial
  probe
  misc_feature (1)..(25): SEQ ID NO: 1547; WAN024FFL; Start 105; Stop 129
tattgaacacggtaaagttattccc

SEQ ID NO: 297592 - DNA, 25 bp, Artificial
  probe
  misc_feature (1)..(25): SEQ ID NO: 1548; WAN024GMW; Start 247; Stop 271
cgagatattacagacaagcctcatt

SEQ ID NO: 297593 - DNA, 25 bp, Artificial
  probe
  misc_feature (1)..(25): SEQ ID NO: 1548; WAN024GMW; Start 89; Stop 113
tcctatctcgtcgtcaggttaatat

SEQ ID NO: 297594 - DNA, 25 bp, Artificial
  probe
  misc_feature (1)..(25): SEQ ID NO: 1548; WAN024GMW; Start 91; Stop 115
ctatctcgtcgtcaggttaatattg

SEQ ID NO: 297595 - DNA, 25 bp, Artificial
  probe
  misc_feature (1)..(25): SEQ ID NO: 1548; WAN024GMW; Start 93; Stop 117
atctcgtcgtcaggttaatattgaa

SEQ ID NO: 297596 - DNA, 25 bp, Artificial
  probe
  misc_feature (1)..(25): SEQ ID NO: 1548; WAN024GMW; Start 88; Stop 112
gtcctatctcgtcgtcaggttaata

SEQ ID NO: 297597 - DNA, 25 bp, Artificial
  probe
  misc_feature (1)..(25): SEQ ID NO: 1548; WAN024GMW; Start 243; Stop 267
cattcgagatattacagacaagcct

SEQ ID NO: 297598 - DNA, 25 bp, Artificial
  probe
  misc_feature (1)..(25): SEQ ID NO: 1548; WAN024GMW; Start 92; Stop 116
tatctcgtcgtcaggttaatattga

SEQ ID NO: 297599 - DNA, 25 bp, Artificial
  probe
  misc_feature (1)..(25): SEQ ID NO: 1548; WAN024GMW; Start 131; Stop 155
gagcaacagaagatccgaatgtatc

SEQ ID NO: 297600 - DNA, 25 bp, Artificial
  probe
  misc_feature (1)..(25): SEQ ID NO: 1548; WAN024GMW; Start 244; Stop 268
attcgagatattacagacaagcctc

SEQ ID NO: 297601 - DNA, 25 bp, Artificial
  probe
  misc_feature (1)..(25): SEQ ID NO: 1548; WAN024GMW; Start 90; Stop 114
cctatctcgtcgtcaggttaatatt

SEQ ID NO: 297602 - DNA, 25 bp, Artificial
  probe
  misc_feature (1)..(25): SEQ ID NO: 1548; WAN024GMW; Start 330; Stop 354
tttagcgattattcaacctttccgt

SEQ ID NO: 297603 - DNA, 25 bp, Artificial
  probe
  misc_feature (1)..(25): SEQ ID NO: 1548; WAN024GMW; Start 251; Stop 275
atattacagacaagcctcatttgga

SEQ ID NO: 297604 - DNA, 25 bp, Artificial
  probe
  misc_feature (1)..(25): SEQ ID NO: 1548; WAN024GMW; Start 250; Stop 274
gatattacagacaagcctcatttgg

SEQ ID NO: 297605 - DNA, 25 bp, Artificial
  probe
  misc_feature (1)..(25): SEQ ID NO: 1548; WAN024GMW; Start 246; Stop 270
tcgagatattacagacaagcctcat

SEQ ID NO: 297606 - DNA, 25 bp, Artificial
  probe
  misc_feature (1)..(25): SEQ ID NO: 1548; WAN024GMW; Start 384; Stop 408
gattaccattcagatgacgggaaat

SEQ ID NO: 297607 - DNA, 25 bp, Artificial
  probe
  misc_feature (1)..(25): SEQ ID NO: 1548; WAN024GMW; Start 242; Stop 266
gcattcgagatattacagacaagcc

SEQ ID NO: 297608 - DNA, 25 bp, Artificial
  probe
  misc_feature (1)..(25): SEQ ID NO: 1548; WAN024GMW; Start 224; Stop 248
gtcagattgatgtgattcgcattcg

SEQ ID NO: 297609 - DNA, 25 bp, Artificial
  probe
  misc_feature (1)..(25): SEQ ID NO: 1548; WAN024GMW; Start 223; Stop 247
cgtcagattgatgtgattcgcattc

SEQ ID NO: 297610 - DNA, 25 bp, Artificial
  probe
  misc_feature (1)..(25): SEQ ID NO: 1548; WAN024GMW; Start 245; Stop 269
ttcgagatattacagacaagcctca

SEQ ID NO: 297611 - DNA, 25 bp, Artificial
  probe
  misc_feature (1)..(25): SEQ ID NO: 1548; WAN024GMW; Start 331; Stop 355
ttagcgattattcaacctttccgtg

SEQ ID NO: 297612 - DNA, 25 bp, Artificial
  probe
  misc_feature (1)..(25): SEQ ID NO: 1548; WAN024GMW; Start 249; Stop 273
agatattacagacaagcctcatttg

SEQ ID NO: 297613 - DNA, 25 bp, Artificial
  probe
  misc_feature (1)..(25): SEQ ID NO: 1548; WAN024GMW; Start 252; Stop 276
tattacagacaagcctcatttggag

SEQ ID NO: 297614 - DNA, 25 bp, Artificial
  probe
  misc_feature (1)..(25): SEQ ID NO: 1548; WAN024GMW; Start 241; Stop 265
cgcattcgagatattacagacaagc

SEQ ID NO: 297615 - DNA, 25 bp, Artificial
  probe
  misc_feature (1)..(25): SEQ ID NO: 1548; WAN024GMW; Start 221; Stop 245
atcgtcagattgatgtgattcgcat

SEQ ID NO: 297616 - DNA, 25 bp, Artificial
  probe
  misc_feature (1)..(25): SEQ ID NO: 1548; WAN024GMW; Start 222; Stop 246
tcgtcagattgatgtgattcgcatt

SEQ ID NO: 297617 - DNA, 25 bp, Artificial
  probe
  misc_feature (1)..(25): SEQ ID NO: 1548; WAN024GMW; Start 248; Stop 272
gagatattacagacaagcctcattt

SEQ ID NO: 297618 - DNA, 25 bp, Artificial
  probe
  misc_feature (1)..(25): SEQ ID NO: 1548; WAN024GMW; Start 110; Stop 134
atattgaaagcatctctgttggagc

SEQ ID NO: 297619 - DNA, 25 bp, Artificial
  probe
  misc_feature (1)..(25): SEQ ID NO: 1548; WAN024GMW; Start 87; Stop 111
tgtcctatctcgtcgtcaggttaat

SEQ ID NO: 297620 - DNA, 25 bp, Artificial
  probe
  misc_feature (1)..(25): SEQ ID NO: 1548; WAN024GMW; Start 192; Stop 216
tgaagtggagcaaatcatcaaacag

SEQ ID NO: 297621 - DNA, 25 bp, Artificial
  probe
  misc_feature (1)..(25): SEQ ID NO: 1548; WAN024GMW; Start 237; Stop 261
gattcgcattcgagatattacagac

SEQ ID NO: 297622 - DNA, 25 bp, Artificial
  probe
  misc_feature (1)..(25): SEQ ID NO: 1548; WAN024GMW; Start 236; Stop 260
tgattcgcattcgagatattacaga

SEQ ID NO: 297623 - DNA, 25 bp, Artificial
  probe
  misc_feature (1)..(25): SEQ ID NO: 1548; WAN024GMW; Start 235; Stop 259
gtgattcgcattcgagatattacag

SEQ ID NO: 297624 - DNA, 25 bp, Artificial
  probe
  misc_feature (1)..(25): SEQ ID NO: 1548; WAN024GMW; Start 95; Stop 119
ctcgtcgtcaggttaatattgaaag

SEQ ID NO: 297625 - DNA, 25 bp, Artificial
  probe
  misc_feature (1)..(25): SEQ ID NO: 1549; WAN024BFJ; Start 1145; Stop 1169
gagaattggagaataatcgtgaagc

SEQ ID NO: 297626 - DNA, 25 bp, Artificial
  probe
  misc_feature (1)..(25): SEQ ID NO: 1549; WAN024BFJ; Start 1143; Stop 1167
tggagaattggagaataatcgtgaa

SEQ ID NO: 297627 - DNA, 25 bp, Artificial
  probe
  misc_feature (1)..(25): SEQ ID NO: 1549; WAN024BFJ; Start 1142; Stop 1166
atggagaattggagaataatcgtga

SEQ ID NO: 297628 - DNA, 25 bp, Artificial
  probe
  misc_feature (1)..(25): SEQ ID NO: 1549; WAN024BFJ; Start 1144; Stop 1168
ggagaattggagaataatcgtgaag

SEQ ID NO: 297629 - DNA, 25 bp, Artificial
  probe
  misc_feature (1)..(25): SEQ ID NO: 1549; WAN024BFJ; Start 1141; Stop 1165
gatggagaattggagaataatcgtg

SEQ ID NO: 297630 - DNA, 25 bp, Artificial
  probe
  misc_feature (1)..(25): SEQ ID NO: 1549; WAN024BFJ; Start 1146; Stop 1170
agaattggagaataatcgtgaagcc

SEQ ID NO: 297631 - DNA, 25 bp, Artificial
  probe
  misc_feature (1)..(25): SEQ ID NO: 1549; WAN024BFJ; Start 156; Stop 180
ttatccagaagagaccaagcagatt

SEQ ID NO: 297632 - DNA, 25 bp, Artificial
  probe
  misc_feature (1)..(25): SEQ ID NO: 1549; WAN024BFJ; Start 155; Stop 179
cttatccagaagagaccaagcagat

SEQ ID NO: 297633 - DNA, 25 bp, Artificial
  probe
  misc_feature (1)..(25): SEQ ID NO: 1549; WAN024BFJ; Start 268; Stop 292
acagaggatgtctatgtggactatc

SEQ ID NO: 297634 - DNA, 25 bp, Artificial
  probe
  misc_feature (1)..(25): SEQ ID NO: 1549; WAN024BFJ; Start 1136; Stop 1160
ttgtcgatggagaattggagaataa

SEQ ID NO: 297635 - DNA, 25 bp, Artificial
  probe
  misc_feature (1)..(25): SEQ ID NO: 1549; WAN024BFJ; Start 1137; Stop 1161
tgtcgatggagaattggagaataat

SEQ ID NO: 297636 - DNA, 25 bp, Artificial
  probe
  misc_feature (1)..(25): SEQ ID NO: 1549; WAN024BFJ; Start 1135; Stop 1159
attgtcgatggagaattggagaata

SEQ ID NO: 297637 - DNA, 25 bp, Artificial
  probe
  misc_feature (1)..(25): SEQ ID NO: 1549; WAN024BFJ; Start 1153; Stop 1177
gagaataatcgtgaagccatccatg

SEQ ID NO: 297638 - DNA, 25 bp, Artificial
  probe
  misc_feature (1)..(25): SEQ ID NO: 1549; WAN024BFJ; Start 1138; Stop 1162
gtcgatggagaattggagaataatc

SEQ ID NO: 297639 - DNA, 25 bp, Artificial
  probe
  misc_feature (1)..(25): SEQ ID NO: 1549; WAN024BFJ; Start 1148; Stop 1172
aattggagaataatcgtgaagccat

SEQ ID NO: 297640 - DNA, 25 bp, Artificial
  probe
  misc_feature (1)..(25): SEQ ID NO: 1549; WAN024BFJ; Start 269; Stop 293
cagaggatgtctatgtggactatcg

SEQ ID NO: 297641 - DNA, 25 bp, Artificial
  probe
  misc_feature (1)..(25): SEQ ID NO: 1549; WAN024BFJ; Start 781; Stop 805
ttactatgggctttggagattgaaa

SEQ ID NO: 297642 - DNA, 25 bp, Artificial
  probe
  misc_feature (1)..(25): SEQ ID NO: 1549; WAN024BFJ; Start 780; Stop 804
tttactatgggctttggagattgaa

SEQ ID NO: 297643 - DNA, 25 bp, Artificial
  probe
  misc_feature (1)..(25): SEQ ID NO: 1549; WAN024BFJ; Start 722; Stop 746
gactgtttgatttggagactgattt

SEQ ID NO: 297644 - DNA, 25 bp, Artificial
  probe
  misc_feature (1)..(25): SEQ ID NO: 1549; WAN024BFJ; Start 721; Stop 745
agactgtttgatttggagactgatt

SEQ ID NO: 297645 - DNA, 25 bp, Artificial
  probe
  misc_feature (1)..(25): SEQ ID NO: 1549; WAN024BFJ; Start 779; Stop 803
ctttactatgggctttggagattga

SEQ ID NO: 297646 - DNA, 25 bp, Artificial
  probe
  misc_feature (1)..(25): SEQ ID NO: 1549; WAN024BFJ; Start 1149; Stop 1173
attggagaataatcgtgaagccatc

SEQ ID NO: 297647 - DNA, 25 bp, Artificial
  probe
  misc_feature (1)..(25): SEQ ID NO: 1549; WAN024BFJ; Start 1134; Stop 1158
cattgtcgatggagaattggagaat

SEQ ID NO: 297648 - DNA, 25 bp, Artificial
  probe
  misc_feature (1)..(25): SEQ ID NO: 1549; WAN024BFJ; Start 30; Stop 54
tcagaaggctttaccagtattagaa

SEQ ID NO: 297649 - DNA, 25 bp, Artificial
  probe
  misc_feature (1)..(25): SEQ ID NO: 1549; WAN024BFJ; Start 29; Stop 53
ttcagaaggctttaccagtattaga

SEQ ID NO: 297650 - DNA, 25 bp, Artificial
  probe
  misc_feature (1)..(25): SEQ ID NO: 1549; WAN024BFJ; Start 1147; Stop 1171
gaattggagaataatcgtgaagcca

SEQ ID NO: 297651 - DNA, 25 bp, Artificial
  probe
  misc_feature (1)..(25): SEQ ID NO: 1549; WAN024BFJ; Start 1114; Stop 1138
ttaacagagattgagtttgccattg

SEQ ID NO: 297652 - DNA, 25 bp, Artificial
  probe
  misc_feature (1)..(25): SEQ ID NO: 1549; WAN024BFJ; Start 468; Stop 492
caacgaagatgctttacggattatg

SEQ ID NO: 297653 - DNA, 25 bp, Artificial
  probe
  misc_feature (1)..(25): SEQ ID NO: 1549; WAN024BFJ; Start 467; Stop 491
tcaacgaagatgctttacggattat

SEQ ID NO: 297654 - DNA, 25 bp, Artificial
  probe
  misc_feature (1)..(25): SEQ ID NO: 1549; WAN024BFJ; Start 466; Stop 490
ttcaacgaagatgctttacggatta

SEQ ID NO: 297655 - DNA, 25 bp, Artificial
  probe
  misc_feature (1)..(25): SEQ ID NO: 1549; WAN024BFJ; Start 25; Stop 49
gaatttcagaaggctttaccagtat

SEQ ID NO: 297656 - DNA, 25 bp, Artificial
  probe
  misc_feature (1)..(25): SEQ ID NO: 1549; WAN024BFJ; Start 1113; Stop 1137
tttaacagagattgagtttgccatt

SEQ ID NO: 297657 - DNA, 25 bp, Artificial
  probe
  misc_feature (1)..(25): SEQ ID NO: 1549; WAN024BFJ; Start 157; Stop 181
tatccagaagagaccaagcagattt

SEQ ID NO: 297658 - DNA, 25 bp, Artificial
  probe
  misc_feature (1)..(25): SEQ ID NO: 1550; WAN024CWG; Start 75; Stop 99
aggtagaatcaaggttaatggaatc

SEQ ID NO: 297659 - DNA, 25 bp, Artificial
  probe
  misc_feature (1)..(25): SEQ ID NO: 1550; WAN024CWG; Start 76; Stop 100
ggtagaatcaaggttaatggaatct

SEQ ID NO: 297660 - DNA, 25 bp, Artificial
  probe
  misc_feature (1)..(25): SEQ ID NO: 1550; WAN024CWG; Start 74; Stop 98
aaggtagaatcaaggttaatggaat

SEQ ID NO: 297661 - DNA, 25 bp, Artificial
  probe
  misc_feature (1)..(25): SEQ ID NO: 1550; WAN024CWG; Start 55; Stop 79
gcaaaggaagtagcagataaaggta

SEQ ID NO: 297662 - DNA, 25 bp, Artificial
  probe
  misc_feature (1)..(25): SEQ ID NO: 1550; WAN024CWG; Start 66; Stop 90
agcagataaaggtagaatcaaggtt

SEQ ID NO: 297663 - DNA, 25 bp, Artificial
  probe
  misc_feature (1)..(25): SEQ ID NO: 1550; WAN024CWG; Start 58; Stop 82
aaggaagtagcagataaaggtagaa

SEQ ID NO: 297664 - DNA, 25 bp, Artificial
  probe
  misc_feature (1)..(25): SEQ ID NO: 1550; WAN024CWG; Start 57; Stop 81
aaaggaagtagcagataaaggtaga

SEQ ID NO: 297665 - DNA, 25 bp, Artificial
  probe
  misc_feature (1)..(25): SEQ ID NO: 1550; WAN024CWG; Start 56; Stop 80
caaaggaagtagcagataaaggtag

SEQ ID NO: 297666 - DNA, 25 bp, Artificial
  probe
  misc_feature (1)..(25): SEQ ID NO: 1550; WAN024CWG; Start 65; Stop 89
tagcagataaaggtagaatcaaggt

SEQ ID NO: 297667 - DNA, 25 bp, Artificial
  probe
  misc_feature (1)..(25): SEQ ID NO: 1550; WAN024CWG; Start 59; Stop 83
aggaagtagcagataaaggtagaat

SEQ ID NO: 297668 - DNA, 25 bp, Artificial
  probe
  misc_feature (1)..(25): SEQ ID NO: 1550; WAN024CWG; Start 64; Stop 88
gtagcagataaaggtagaatcaagg

SEQ ID NO: 297669 - DNA, 25 bp, Artificial
  probe
  misc_feature (1)..(25): SEQ ID NO: 1550; WAN024CWG; Start 140; Stop 164
ttgaaattcgctttggcaataagtt

SEQ ID NO: 297670 - DNA, 25 bp, Artificial
  probe
  misc_feature (1)..(25): SEQ ID NO: 1550; WAN024CWG; Start 137; Stop 161
aagttgaaattcgctttggcaataa

SEQ ID NO: 297671 - DNA, 25 bp, Artificial
  probe
  misc_feature (1)..(25): SEQ ID NO: 1550; WAN024CWG; Start 60; Stop 84
ggaagtagcagataaaggtagaatc

SEQ ID NO: 297672 - DNA, 25 bp, Artificial
  probe
  misc_feature (1)..(25): SEQ ID NO: 1550; WAN024CWG; Start 67; Stop 91
gcagataaaggtagaatcaaggtta

SEQ ID NO: 297673 - DNA, 25 bp, Artificial
  probe
  misc_feature (1)..(25): SEQ ID NO: 1550; WAN024CWG; Start 138; Stop 162
agttgaaattcgctttggcaataag

SEQ ID NO: 297674 - DNA, 25 bp, Artificial
  probe
  misc_feature (1)..(25): SEQ ID NO: 1550; WAN024CWG; Start 141; Stop 165
tgaaattcgctttggcaataagttg

SEQ ID NO: 297675 - DNA, 25 bp, Artificial
  probe
  misc_feature (1)..(25): SEQ ID NO: 1550; WAN024CWG; Start 139; Stop 163
gttgaaattcgctttggcaataagt

SEQ ID NO: 297676 - DNA, 25 bp, Artificial
  probe
  misc_feature (1)..(25): SEQ ID NO: 1550; WAN024CWG; Start 136; Stop 160
caagttgaaattcgctttggcaata

SEQ ID NO: 297677 - DNA, 25 bp, Artificial
  probe
  misc_feature (1)..(25): SEQ ID NO: 1550; WAN024CWG; Start 77; Stop 101
gtagaatcaaggttaatggaatctt

SEQ ID NO: 297678 - DNA, 25 bp, Artificial
  probe
  misc_feature (1)..(25): SEQ ID NO: 1550; WAN024CWG; Start 73; Stop 97
aaaggtagaatcaaggttaatggaa

SEQ ID NO: 297679 - DNA, 25 bp, Artificial
  probe
  misc_feature (1)..(25): SEQ ID NO: 1550; WAN024CWG; Start 52; Stop 76
gtcgcaaaggaagtagcagataaag

SEQ ID NO: 297680 - DNA, 25 bp, Artificial
  probe
  misc_feature (1)..(25): SEQ ID NO: 1550; WAN024CWG; Start 63; Stop 87
agtagcagataaaggtagaatcaag

SEQ ID NO: 297681 - DNA, 25 bp, Artificial
  probe
  misc_feature (1)..(25): SEQ ID NO: 1550; WAN024CWG; Start 61; Stop 85
gaagtagcagataaaggtagaatca

SEQ ID NO: 297682 - DNA, 25 bp, Artificial
  probe
  misc_feature (1)..(25): SEQ ID NO: 1550; WAN024CWG; Start 51; Stop 75
agtcgcaaaggaagtagcagataaa

SEQ ID NO: 297683 - DNA, 25 bp, Artificial
  probe
  misc_feature (1)..(25): SEQ ID NO: 1550; WAN024CWG; Start 229; Stop 253
gaaattatcagtgaaacacgggtag

SEQ ID NO: 297684 - DNA, 25 bp, Artificial
  probe
  misc_feature (1)..(25): SEQ ID NO: 1550; WAN024CWG; Start 231; Stop 255
aattatcagtgaaacacgggtagaa

SEQ ID NO: 297685 - DNA, 25 bp, Artificial
  probe
  misc_feature (1)..(25): SEQ ID NO: 1550; WAN024CWG; Start 230; Stop 254
aaattatcagtgaaacacgggtaga

SEQ ID NO: 297686 - DNA, 25 bp, Artificial
  probe
  misc_feature (1)..(25): SEQ ID NO: 1550; WAN024CWG; Start 228; Stop 252
tgaaattatcagtgaaacacgggta

SEQ ID NO: 297687 - DNA, 25 bp, Artificial
  probe
  misc_feature (1)..(25): SEQ ID NO: 1550; WAN024CWG; Start 232; Stop 256
attatcagtgaaacacgggtagaag

SEQ ID NO: 297688 - DNA, 25 bp, Artificial
  probe
  misc_feature (1)..(25): SEQ ID NO: 1550; WAN024CWG; Start 226; Stop 250
tatgaaattatcagtgaaacacggg

SEQ ID NO: 297689 - DNA, 25 bp, Artificial
  probe
  misc_feature (1)..(25): SEQ ID NO: 1550; WAN024CWG; Start 227; Stop 251
atgaaattatcagtgaaacacgggt

SEQ ID NO: 297690 - DNA, 25 bp, Artificial
  probe
  misc_feature (1)..(25): SEQ ID NO: 1550; WAN024CWG; Start 62; Stop 86
aagtagcagataaaggtagaatcaa

SEQ ID NO: 297691 - DNA, 25 bp, Artificial
  probe
  misc_feature (1)..(25): SEQ ID NO: 1551; WAN024C6Y; Start 158; Stop 182
aagtgttggagtatgaagagtttgt

SEQ ID NO: 297692 - DNA, 25 bp, Artificial
  probe
  misc_feature (1)..(25): SEQ ID NO: 1551; WAN024C6Y; Start 159; Stop 183
agtgttggagtatgaagagtttgtc

SEQ ID NO: 297693 - DNA, 25 bp, Artificial
  probe
  misc_feature (1)..(25): SEQ ID NO: 1551; WAN024C6Y; Start 675; Stop 699
tcgcttgaccaaggaagaattagaa

SEQ ID NO: 297694 - DNA, 25 bp, Artificial
  probe
  misc_feature (1)..(25): SEQ ID NO: 1551; WAN024C6Y; Start 161; Stop 185
tgttggagtatgaagagtttgtcta

SEQ ID NO: 297695 - DNA, 25 bp, Artificial
  probe
  misc_feature (1)..(25): SEQ ID NO: 1551; WAN024C6Y; Start 160; Stop 184
gtgttggagtatgaagagtttgtct

SEQ ID NO: 297696 - DNA, 25 bp, Artificial
  probe
  misc_feature (1)..(25): SEQ ID NO: 1551; WAN024C6Y; Start 157; Stop 181
caagtgttggagtatgaagagtttg

SEQ ID NO: 297697 - DNA, 25 bp, Artificial
  probe
  misc_feature (1)..(25): SEQ ID NO: 1551; WAN024C6Y; Start 616; Stop 640
caacgattgactatgggaactttag

SEQ ID NO: 297698 - DNA, 25 bp, Artificial
  probe
  misc_feature (1)..(25): SEQ ID NO: 1551; WAN024C6Y; Start 162; Stop 186
gttggagtatgaagagtttgtctac

SEQ ID NO: 297699 - DNA, 25 bp, Artificial
  probe
  misc_feature (1)..(25): SEQ ID NO: 1551; WAN024C6Y; Start 155; Stop 179
ggcaagtgttggagtatgaagagtt

SEQ ID NO: 297700 - DNA, 25 bp, Artificial
  probe
  misc_feature (1)..(25): SEQ ID NO: 1551; WAN024C6Y; Start 558; Stop 582
gaagtttcatcagatcaagcgtatg

SEQ ID NO: 297701 - DNA, 25 bp, Artificial
  probe
  misc_feature (1)..(25): SEQ ID NO: 1551; WAN024C6Y; Start 552; Stop 576
agaagggaagtttcatcagatcaag

SEQ ID NO: 297702 - DNA, 25 bp, Artificial
  probe
  misc_feature (1)..(25): SEQ ID NO: 1551; WAN024C6Y; Start 615; Stop 639
gcaacgattgactatgggaacttta

SEQ ID NO: 297703 - DNA, 25 bp, Artificial
  probe
  misc_feature (1)..(25): SEQ ID NO: 1551; WAN024C6Y; Start 551; Stop 575
cagaagggaagtttcatcagatcaa

SEQ ID NO: 297704 - DNA, 25 bp, Artificial
  probe
  misc_feature (1)..(25): SEQ ID NO: 1551; WAN024C6Y; Start 557; Stop 581
ggaagtttcatcagatcaagcgtat

SEQ ID NO: 297705 - DNA, 25 bp, Artificial
  probe
  misc_feature (1)..(25): SEQ ID NO: 1551; WAN024C6Y; Start 156; Stop 180
gcaagtgttggagtatgaagagttt

SEQ ID NO: 297706 - DNA, 25 bp, Artificial
  probe
  misc_feature (1)..(25): SEQ ID NO: 1551; WAN024C6Y; Start 677; Stop 701
gcttgaccaaggaagaattagaaat

SEQ ID NO: 297707 - DNA, 25 bp, Artificial
  probe
  misc_feature (1)..(25): SEQ ID NO: 1551; WAN024C6Y; Start 184; Stop 208
tactacatgatgaacaagcccaaag

SEQ ID NO: 297708 - DNA, 25 bp, Artificial
  probe
  misc_feature (1)..(25): SEQ ID NO: 1551; WAN024C6Y; Start 183; Stop 207
ctactacatgatgaacaagcccaaa

SEQ ID NO: 297709 - DNA, 25 bp, Artificial
  probe
  misc_feature (1)..(25): SEQ ID NO: 1551; WAN024C6Y; Start 559; Stop 583
aagtttcatcagatcaagcgtatgg

SEQ ID NO: 297710 - DNA, 25 bp, Artificial
  probe
  misc_feature (1)..(25): SEQ ID NO: 1551; WAN024C6Y; Start 247; Stop 271
gttctggacttgttggatgacttgg

SEQ ID NO: 297711 - DNA, 25 bp, Artificial
  probe
  misc_feature (1)..(25): SEQ ID NO: 1551; WAN024C6Y; Start 182; Stop 206
tctactacatgatgaacaagcccaa

SEQ ID NO: 297712 - DNA, 25 bp, Artificial
  probe
  misc_feature (1)..(25): SEQ ID NO: 1551; WAN024C6Y; Start 676; Stop 700
cgcttgaccaaggaagaattagaaa

SEQ ID NO: 297713 - DNA, 25 bp, Artificial
  probe
  misc_feature (1)..(25): SEQ ID NO: 1551; WAN024C6Y; Start 674; Stop 698
gtcgcttgaccaaggaagaattaga

SEQ ID NO: 297714 - DNA, 25 bp, Artificial
  probe
  misc_feature (1)..(25): SEQ ID NO: 1551; WAN024C6Y; Start 617; Stop 641
aacgattgactatgggaactttagt

SEQ ID NO: 297715 - DNA, 25 bp, Artificial
  probe
  misc_feature (1)..(25): SEQ ID NO: 1551; WAN024C6Y; Start 553; Stop 577
gaagggaagtttcatcagatcaagc

SEQ ID NO: 297716 - DNA, 25 bp, Artificial
  probe
  misc_feature (1)..(25): SEQ ID NO: 1551; WAN024C6Y; Start 191; Stop 215
tgatgaacaagcccaaaggagttat

SEQ ID NO: 297717 - DNA, 25 bp, Artificial
  probe
  misc_feature (1)..(25): SEQ ID NO: 1551; WAN024C6Y; Start 190; Stop 214
atgatgaacaagcccaaaggagtta

SEQ ID NO: 297718 - DNA, 25 bp, Artificial
  probe
  misc_feature (1)..(25): SEQ ID NO: 1551; WAN024C6Y; Start 618; Stop 642
acgattgactatgggaactttagta

SEQ ID NO: 297719 - DNA, 25 bp, Artificial
  probe
  misc_feature (1)..(25): SEQ ID NO: 1551; WAN024C6Y; Start 163; Stop 187
ttggagtatgaagagtttgtctact

SEQ ID NO: 297720 - DNA, 25 bp, Artificial
  probe
  misc_feature (1)..(25): SEQ ID NO: 1551; WAN024C6Y; Start 175; Stop 199
gagtttgtctactacatgatgaaca

SEQ ID NO: 297721 - DNA, 25 bp, Artificial
  probe
  misc_feature (1)..(25): SEQ ID NO: 1551; WAN024C6Y; Start 246; Stop 270
cgttctggacttgttggatgacttg

SEQ ID NO: 297722 - DNA, 25 bp, Artificial
  probe
  misc_feature (1)..(25): SEQ ID NO: 1551; WAN024C6Y; Start 561; Stop 585
gtttcatcagatcaagcgtatggtg

SEQ ID NO: 297723 - DNA, 25 bp, Artificial
  probe
  misc_feature (1)..(25): SEQ ID NO: 1551; WAN024C6Y; Start 560; Stop 584
agtttcatcagatcaagcgtatggt

SEQ ID NO: 297724 - DNA, 25 bp, Artificial
  probe
  misc_feature (1)..(25): SEQ ID NO: 1552; WAN024A3I; Start 103; Stop 127
agatgctatactagaagtaggatgt

SEQ ID NO: 297725 - DNA, 25 bp, Artificial
  probe
  misc_feature (1)..(25): SEQ ID NO: 1552; WAN024A3I; Start 102; Stop 126
aagatgctatactagaagtaggatg

SEQ ID NO: 297726 - DNA, 25 bp, Artificial
  probe
  misc_feature (1)..(25): SEQ ID NO: 1552; WAN024A3I; Start 104; Stop 128
gatgctatactagaagtaggatgta

SEQ ID NO: 297727 - DNA, 25 bp, Artificial
  probe
  misc_feature (1)..(25): SEQ ID NO: 1552; WAN024A3I; Start 13; Stop 37
acgatatagttaaagtgttagttca

SEQ ID NO: 297728 - DNA, 25 bp, Artificial
  probe
  misc_feature (1)..(25): SEQ ID NO: 1552; WAN024A3I; Start 101; Stop 125
aaagatgctatactagaagtaggat

SEQ ID NO: 297729 - DNA, 25 bp, Artificial
  probe
  misc_feature (1)..(25): SEQ ID NO: 1552; WAN024A3I; Start 90; Stop 114
cgtttgatagaaaagatgctatact

SEQ ID NO: 297730 - DNA, 25 bp, Artificial
  probe
  misc_feature (1)..(25): SEQ ID NO: 1552; WAN024A3I; Start 14; Stop 38
cgatatagttaaagtgttagttcaa

SEQ ID NO: 297731 - DNA, 25 bp, Artificial
  probe
  misc_feature (1)..(25): SEQ ID NO: 1552; WAN024A3I; Start 89; Stop 113
acgtttgatagaaaagatgctatac

SEQ ID NO: 297732 - DNA, 25 bp, Artificial
  probe
  misc_feature (1)..(25): SEQ ID NO: 1552; WAN024A3I; Start 100; Stop 124
aaaagatgctatactagaagtagga

SEQ ID NO: 297733 - DNA, 25 bp, Artificial
  probe
  misc_feature (1)..(25): SEQ ID NO: 1552; WAN024A3I; Start 99; Stop 123
gaaaagatgctatactagaagtagg

SEQ ID NO: 297734 - DNA, 25 bp, Artificial
  probe
  misc_feature (1)..(25): SEQ ID NO: 1552; WAN024A3I; Start 84; Stop 108
gtttaacgtttgatagaaaagatgc

SEQ ID NO: 297735 - DNA, 25 bp, Artificial
  probe
  misc_feature (1)..(25): SEQ ID NO: 1552; WAN024A3I; Start 98; Stop 122
agaaaagatgctatactagaagtag

SEQ ID NO: 297736 - DNA, 25 bp, Artificial
  probe
  misc_feature (1)..(25): SEQ ID NO: 1552; WAN024A3I; Start 85; Stop 109
tttaacgtttgatagaaaagatgct

SEQ ID NO: 297737 - DNA, 25 bp, Artificial
  probe
  misc_feature (1)..(25): SEQ ID NO: 1552; WAN024A3I; Start 86; Stop 110
ttaacgtttgatagaaaagatgcta

SEQ ID NO: 297738 - DNA, 25 bp, Artificial
  probe
  misc_feature (1)..(25): SEQ ID NO: 1552; WAN024A3I; Start 83; Stop 107
tgtttaacgtttgatagaaaagatg

SEQ ID NO: 297739 - DNA, 25 bp, Artificial
  probe
  misc_feature (1)..(25): SEQ ID NO: 1552; WAN024A3I; Start 88; Stop 112
aacgtttgatagaaaagatgctata

SEQ ID NO: 297740 - DNA, 25 bp, Artificial
  probe
  misc_feature (1)..(25): SEQ ID NO: 1552; WAN024A3I; Start 87; Stop 111
taacgtttgatagaaaagatgctat

SEQ ID NO: 297741 - DNA, 25 bp, Artificial
  probe
  misc_feature (1)..(25): SEQ ID NO: 1553; WAN024GGH; Start 617; Stop 641
tccttgagcatgatattgtacttgg

SEQ ID NO: 297742 - DNA, 25 bp, Artificial
  probe
  misc_feature (1)..(25): SEQ ID NO: 1553; WAN024GGH; Start 616; Stop 640
atccttgagcatgatattgtacttg

SEQ ID NO: 297743 - DNA, 25 bp, Artificial
  probe
  misc_feature (1)..(25): SEQ ID NO: 1553; WAN024GGH; Start 363; Stop 387
aataagcctcatccttcttacagat

SEQ ID NO: 297744 - DNA, 25 bp, Artificial
  probe
  misc_feature (1)..(25): SEQ ID NO: 1553; WAN024GGH; Start 615; Stop 639
catccttgagcatgatattgtactt

SEQ ID NO: 297745 - DNA, 25 bp, Artificial
  probe
  misc_feature (1)..(25): SEQ ID NO: 1553; WAN024GGH; Start 141; Stop 165
tatccacatagtagccaaagacatc

SEQ ID NO: 297746 - DNA, 25 bp, Artificial
  probe
  misc_feature (1)..(25): SEQ ID NO: 1553; WAN024GGH; Start 140; Stop 164
ttatccacatagtagccaaagacat

SEQ ID NO: 297747 - DNA, 25 bp, Artificial
  probe
  misc_feature (1)..(25): SEQ ID NO: 1553; WAN024GGH; Start 139; Stop 163
cttatccacatagtagccaaagaca

SEQ ID NO: 297748 - DNA, 25 bp, Artificial
  probe
  misc_feature (1)..(25): SEQ ID NO: 1553; WAN024GGH; Start 14; Stop 38
tgatagaattgtcctacataggtca

SEQ ID NO: 297749 - DNA, 25 bp, Artificial
  probe
  misc_feature (1)..(25): SEQ ID NO: 1553; WAN024GGH; Start 44; Stop 68
tcctcatctggatcattgaagtagg

SEQ ID NO: 297750 - DNA, 25 bp, Artificial
  probe
  misc_feature (1)..(25): SEQ ID NO: 1553; WAN024GGH; Start 138; Stop 162
ccttatccacatagtagccaaagac

SEQ ID NO: 297751 - DNA, 25 bp, Artificial
  probe
  misc_feature (1)..(25): SEQ ID NO: 1553; WAN024GGH; Start 357; Stop 381
acttgaaataagcctcatccttctt

SEQ ID NO: 297752 - DNA, 25 bp, Artificial
  probe
  misc_feature (1)..(25): SEQ ID NO: 1553; WAN024GGH; Start 356; Stop 380
gacttgaaataagcctcatccttct

SEQ ID NO: 297753 - DNA, 25 bp, Artificial
  probe
  misc_feature (1)..(25): SEQ ID NO: 1553; WAN024GGH; Start 355; Stop 379
agacttgaaataagcctcatccttc

SEQ ID NO: 297754 - DNA, 25 bp, Artificial
  probe
  misc_feature (1)..(25): SEQ ID NO: 1553; WAN024GGH; Start 592; Stop 616
tttgatgaaaggataggacttgtca

SEQ ID NO: 297755 - DNA, 25 bp, Artificial
  probe
  misc_feature (1)..(25): SEQ ID NO: 1553; WAN024GGH; Start 354; Stop 378
tagacttgaaataagcctcatcctt

SEQ ID NO: 297756 - DNA, 25 bp, Artificial
  probe
  misc_feature (1)..(25): SEQ ID NO: 1553; WAN024GGH; Start 352; Stop 376
catagacttgaaataagcctcatcc

SEQ ID NO: 297757 - DNA, 25 bp, Artificial
  probe
  misc_feature (1)..(25): SEQ ID NO: 1553; WAN024GGH; Start 351; Stop 375
ccatagacttgaaataagcctcatc

SEQ ID NO: 297758 - DNA, 25 bp, Artificial
  probe
  misc_feature (1)..(25): SEQ ID NO: 1553; WAN024GGH; Start 353; Stop 377
atagacttgaaataagcctcatcct

SEQ ID NO: 297759 - DNA, 25 bp, Artificial
  probe
  misc_feature (1)..(25): SEQ ID NO: 1553; WAN024GGH; Start 350; Stop 374
gccatagacttgaaataagcctcat

SEQ ID NO: 297760 - DNA, 25 bp, Artificial
  probe
  misc_feature (1)..(25): SEQ ID NO: 1553; WAN024GGH; Start 625; Stop 649
catgatattgtacttgggcttgttt

SEQ ID NO: 297761 - DNA, 25 bp, Artificial
  probe
  misc_feature (1)..(25): SEQ ID NO: 1553; WAN024GGH; Start 137; Stop 161
cccttatccacatagtagccaaaga

SEQ ID NO: 297762 - DNA, 25 bp, Artificial
  probe
  misc_feature (1)..(25): SEQ ID NO: 1553; WAN024GGH; Start 130; Stop 154
catccagcccttatccacatagtag

SEQ ID NO: 297763 - DNA, 25 bp, Artificial
  probe
  misc_feature (1)..(25): SEQ ID NO: 1553; WAN024GGH; Start 360; Stop 384
tgaaataagcctcatccttcttaca

SEQ ID NO: 297764 - DNA, 25 bp, Artificial
  probe
  misc_feature (1)..(25): SEQ ID NO: 1553; WAN024GGH; Start 15; Stop 39
gatagaattgtcctacataggtcaa

SEQ ID NO: 297765 - DNA, 25 bp, Artificial
  probe
  misc_feature (1)..(25): SEQ ID NO: 1553; WAN024GGH; Start 13; Stop 37
ttgatagaattgtcctacataggtc

SEQ ID NO: 297766 - DNA, 25 bp, Artificial
  probe
  misc_feature (1)..(25): SEQ ID NO: 1553; WAN024GGH; Start 12; Stop 36
cttgatagaattgtcctacataggt

SEQ ID NO: 297767 - DNA, 25 bp, Artificial
  probe
  misc_feature (1)..(25): SEQ ID NO: 1553; WAN024GGH; Start 612; Stop 636
tgtcatccttgagcatgatattgta

SEQ ID NO: 297768 - DNA, 25 bp, Artificial
  probe
  misc_feature (1)..(25): SEQ ID NO: 1553; WAN024GGH; Start 610; Stop 634
cttgtcatccttgagcatgatattg

SEQ ID NO: 297769 - DNA, 25 bp, Artificial
  probe
  misc_feature (1)..(25): SEQ ID NO: 1553; WAN024GGH; Start 362; Stop 386
aaataagcctcatccttcttacaga

SEQ ID NO: 297770 - DNA, 25 bp, Artificial
  probe
  misc_feature (1)..(25): SEQ ID NO: 1553; WAN024GGH; Start 609; Stop 633
acttgtcatccttgagcatgatatt

SEQ ID NO: 297771 - DNA, 25 bp, Artificial
  probe
  misc_feature (1)..(25): SEQ ID NO: 1553; WAN024GGH; Start 614; Stop 638
tcatccttgagcatgatattgtact

SEQ ID NO: 297772 - DNA, 25 bp, Artificial
  probe
  misc_feature (1)..(25): SEQ ID NO: 1553; WAN024GGH; Start 613; Stop 637
gtcatccttgagcatgatattgtac

SEQ ID NO: 297773 - DNA, 25 bp, Artificial
  probe
  misc_feature (1)..(25): SEQ ID NO: 1553; WAN024GGH; Start 611; Stop 635
ttgtcatccttgagcatgatattgt

SEQ ID NO: 297774 - DNA, 25 bp, Artificial
  probe
  misc_feature (1)..(25): SEQ ID NO: 1554; WAN024GA6; Start 165; Stop 189
ccatatccttgagcacataataaga

SEQ ID NO: 297775 - DNA, 25 bp, Artificial
  probe
  misc_feature (1)..(25): SEQ ID NO: 1554; WAN024GA6; Start 164; Stop 188
tccatatccttgagcacataataag

SEQ ID NO: 297776 - DNA, 25 bp, Artificial
  probe
  misc_feature (1)..(25): SEQ ID NO: 1554; WAN024GA6; Start 173; Stop 197
ttgagcacataataagaattgtcca

SEQ ID NO: 297777 - DNA, 25 bp, Artificial
  probe
  misc_feature (1)..(25): SEQ ID NO: 1554; WAN024GA6; Start 78; Stop 102
cctcacggaagaactcaatatggaa

SEQ ID NO: 297778 - DNA, 25 bp, Artificial
  probe
  misc_feature (1)..(25): SEQ ID NO: 1554; WAN024GA6; Start 174; Stop 198
tgagcacataataagaattgtccat

SEQ ID NO: 297779 - DNA, 25 bp, Artificial
  probe
  misc_feature (1)..(25): SEQ ID NO: 1554; WAN024GA6; Start 170; Stop 194
tccttgagcacataataagaattgt

SEQ ID NO: 297780 - DNA, 25 bp, Artificial
  probe
  misc_feature (1)..(25): SEQ ID NO: 1554; WAN024GA6; Start 163; Stop 187
atccatatccttgagcacataataa

SEQ ID NO: 297781 - DNA, 25 bp, Artificial
  probe
  misc_feature (1)..(25): SEQ ID NO: 1554; WAN024GA6; Start 176; Stop 200
agcacataataagaattgtccatct

SEQ ID NO: 297782 - DNA, 25 bp, Artificial
  probe
  misc_feature (1)..(25): SEQ ID NO: 1554; WAN024GA6; Start 172; Stop 196
cttgagcacataataagaattgtcc

SEQ ID NO: 297783 - DNA, 25 bp, Artificial
  probe
  misc_feature (1)..(25): SEQ ID NO: 1554; WAN024GA6; Start 171; Stop 195
ccttgagcacataataagaattgtc

SEQ ID NO: 297784 - DNA, 25 bp, Artificial
  probe
  misc_feature (1)..(25): SEQ ID NO: 1554; WAN024GA6; Start 162; Stop 186
gatccatatccttgagcacataata

SEQ ID NO: 297785 - DNA, 25 bp, Artificial
  probe
  misc_feature (1)..(25): SEQ ID NO: 1554; WAN024GA6; Start 175; Stop 199
gagcacataataagaattgtccatc

SEQ ID NO: 297786 - DNA, 25 bp, Artificial
  probe
  misc_feature (1)..(25): SEQ ID NO: 1554; WAN024GA6; Start 43; Stop 67
gcggttattgtactcgatggtaata

SEQ ID NO: 297787 - DNA, 25 bp, Artificial
  probe
  misc_feature (1)..(25): SEQ ID NO: 1554; WAN024GA6; Start 169; Stop 193
atccttgagcacataataagaattg

SEQ ID NO: 297788 - DNA, 25 bp, Artificial
  probe
  misc_feature (1)..(25): SEQ ID NO: 1554; WAN024GA6; Start 79; Stop 103
ctcacggaagaactcaatatggaaa

SEQ ID NO: 297789 - DNA, 25 bp, Artificial
  probe
  misc_feature (1)..(25): SEQ ID NO: 1554; WAN024GA6; Start 105; Stop 129
accgttctttcataccaaattcttt

SEQ ID NO: 297790 - DNA, 25 bp, Artificial
  probe
  misc_feature (1)..(25): SEQ ID NO: 1554; WAN024GA6; Start 104; Stop 128
aaccgttctttcataccaaattctt

SEQ ID NO: 297791 - DNA, 25 bp, Artificial
  probe
  misc_feature (1)..(25): SEQ ID NO: 1554; WAN024GA6; Start 103; Stop 127
aaaccgttctttcataccaaattct

SEQ ID NO: 297792 - DNA, 25 bp, Artificial
  probe
  misc_feature (1)..(25): SEQ ID NO: 1554; WAN024GA6; Start 44; Stop 68
cggttattgtactcgatggtaatat

SEQ ID NO: 297793 - DNA, 25 bp, Artificial
  probe
  misc_feature (1)..(25): SEQ ID NO: 1554; WAN024GA6; Start 166; Stop 190
catatccttgagcacataataagaa

SEQ ID NO: 297794 - DNA, 25 bp, Artificial
  probe
  misc_feature (1)..(25): SEQ ID NO: 1554; WAN024GA6; Start 224; Stop 248
gtataggcgtagtcaaaggttgttg

SEQ ID NO: 297795 - DNA, 25 bp, Artificial
  probe
  misc_feature (1)..(25): SEQ ID NO: 1554; WAN024GA6; Start 223; Stop 247
tgtataggcgtagtcaaaggttgtt

SEQ ID NO: 297796 - DNA, 25 bp, Artificial
  probe
  misc_feature (1)..(25): SEQ ID NO: 1554; WAN024GA6; Start 42; Stop 66
ggcggttattgtactcgatggtaat

SEQ ID NO: 297797 - DNA, 25 bp, Artificial
  probe
  misc_feature (1)..(25): SEQ ID NO: 1554; WAN024GA6; Start 177; Stop 201
gcacataataagaattgtccatctt

SEQ ID NO: 297798 - DNA, 25 bp, Artificial
  probe
  misc_feature (1)..(25): SEQ ID NO: 1554; WAN024GA6; Start 222; Stop 246
gtgtataggcgtagtcaaaggttgt

SEQ ID NO: 297799 - DNA, 25 bp, Artificial
  probe
  misc_feature (1)..(25): SEQ ID NO: 1554; WAN024GA6; Start 3; Stop 27
gagcaaagttataaacatcaatggt

SEQ ID NO: 297800 - DNA, 25 bp, Artificial
  probe
  misc_feature (1)..(25): SEQ ID NO: 1554; WAN024GA6; Start 168; Stop 192
tatccttgagcacataataagaatt

SEQ ID NO: 297801 - DNA, 25 bp, Artificial
  probe
  misc_feature (1)..(25): SEQ ID NO: 1554; WAN024GA6; Start 2; Stop 26
tgagcaaagttataaacatcaatgg

SEQ ID NO: 297802 - DNA, 25 bp, Artificial
  probe
  misc_feature (1)..(25): SEQ ID NO: 1554; WAN024GA6; Start 167; Stop 191
atatccttgagcacataataagaat

SEQ ID NO: 297803 - DNA, 25 bp, Artificial
  probe
  misc_feature (1)..(25): SEQ ID NO: 1554; WAN024GA6; Start 80; Stop 104
tcacggaagaactcaatatggaaaa

SEQ ID NO: 297804 - DNA, 25 bp, Artificial
  probe
  misc_feature (1)..(25): SEQ ID NO: 1554; WAN024GA6; Start 221; Stop 245
ggtgtataggcgtagtcaaaggttg

SEQ ID NO: 297805 - DNA, 25 bp, Artificial
  probe
  misc_feature (1)..(25): SEQ ID NO: 1554; WAN024GA6; Start 106; Stop 130
ccgttctttcataccaaattctttg

SEQ ID NO: 297806 - DNA, 25 bp, Artificial
  probe
  misc_feature (1)..(25): SEQ ID NO: 1554; WAN024GA6; Start 102; Stop 126
aaaaccgttctttcataccaaattc

SEQ ID NO: 297807 - DNA, 25 bp, Artificial
  probe
  misc_feature (1)..(25): SEQ ID NO: 1555; WAN024AT9; Start 55; Stop 79
ggagtcgttctacttcatacaacta

SEQ ID NO: 297808 - DNA, 25 bp, Artificial
  probe
  misc_feature (1)..(25): SEQ ID NO: 1555; WAN024AT9; Start 53; Stop 77
ttggagtcgttctacttcatacaac

SEQ ID NO: 297809 - DNA, 25 bp, Artificial
  probe
  misc_feature (1)..(25): SEQ ID NO: 1555; WAN024AT9; Start 52; Stop 76
gttggagtcgttctacttcatacaa

SEQ ID NO: 297810 - DNA, 25 bp, Artificial
  probe
  misc_feature (1)..(25): SEQ ID NO: 1555; WAN024AT9; Start 54; Stop 78
tggagtcgttctacttcatacaact

SEQ ID NO: 297811 - DNA, 25 bp, Artificial
  probe
  misc_feature (1)..(25): SEQ ID NO: 1555; WAN024AT9; Start 58; Stop 82
gtcgttctacttcatacaactatgg

SEQ ID NO: 297812 - DNA, 25 bp, Artificial
  probe
  misc_feature (1)..(25): SEQ ID NO: 1555; WAN024AT9; Start 56; Stop 80
gagtcgttctacttcatacaactat

SEQ ID NO: 297813 - DNA, 25 bp, Artificial
  probe
  misc_feature (1)..(25): SEQ ID NO: 1555; WAN024AT9; Start 57; Stop 81
agtcgttctacttcatacaactatg

SEQ ID NO: 297814 - DNA, 25 bp, Artificial
  probe
  misc_feature (1)..(25): SEQ ID NO: 1555; WAN024AT9; Start 600; Stop 624
cgaatcaaggtttaagaattggatg

SEQ ID NO: 297815 - DNA, 25 bp, Artificial
  probe
  misc_feature (1)..(25): SEQ ID NO: 1555; WAN024AT9; Start 60; Stop 84
cgttctacttcatacaactatgggt

SEQ ID NO: 297816 - DNA, 25 bp, Artificial
  probe
  misc_feature (1)..(25): SEQ ID NO: 1555; WAN024AT9; Start 59; Stop 83
tcgttctacttcatacaactatggg

SEQ ID NO: 297817 - DNA, 25 bp, Artificial
  probe
  misc_feature (1)..(25): SEQ ID NO: 1555; WAN024AT9; Start 68; Stop 92
ttcatacaactatgggtgggtttaa

SEQ ID NO: 297818 - DNA, 25 bp, Artificial
  probe
  misc_feature (1)..(25): SEQ ID NO: 1555; WAN024AT9; Start 67; Stop 91
cttcatacaactatgggtgggttta

SEQ ID NO: 297819 - DNA, 25 bp, Artificial
  probe
  misc_feature (1)..(25): SEQ ID NO: 1555; WAN024AT9; Start 62; Stop 86
ttctacttcatacaactatgggtgg

SEQ ID NO: 297820 - DNA, 25 bp, Artificial
  probe
  misc_feature (1)..(25): SEQ ID NO: 1555; WAN024AT9; Start 61; Stop 85
gttctacttcatacaactatgggtg

SEQ ID NO: 297821 - DNA, 25 bp, Artificial
  probe
  misc_feature (1)..(25): SEQ ID NO: 1555; WAN024AT9; Start 65; Stop 89
tacttcatacaactatgggtgggtt

SEQ ID NO: 297822 - DNA, 25 bp, Artificial
  probe
  misc_feature (1)..(25): SEQ ID NO: 1555; WAN024AT9; Start 63; Stop 87
tctacttcatacaactatgggtggg

SEQ ID NO: 297823 - DNA, 25 bp, Artificial
  probe
  misc_feature (1)..(25): SEQ ID NO: 1555; WAN024AT9; Start 72; Stop 96
tacaactatgggtgggtttaaagag

SEQ ID NO: 297824 - DNA, 25 bp, Artificial
  probe
  misc_feature (1)..(25): SEQ ID NO: 1555; WAN024AT9; Start 71; Stop 95
atacaactatgggtgggtttaaaga

SEQ ID NO: 297825 - DNA, 25 bp, Artificial
  probe
  misc_feature (1)..(25): SEQ ID NO: 1555; WAN024AT9; Start 64; Stop 88
ctacttcatacaactatgggtgggt

SEQ ID NO: 297826 - DNA, 25 bp, Artificial
  probe
  misc_feature (1)..(25): SEQ ID NO: 1555; WAN024AT9; Start 66; Stop 90
acttcatacaactatgggtgggttt

SEQ ID NO: 297827 - DNA, 25 bp, Artificial
  probe
  misc_feature (1)..(25): SEQ ID NO: 1555; WAN024AT9; Start 74; Stop 98
caactatgggtgggtttaaagagac

SEQ ID NO: 297828 - DNA, 25 bp, Artificial
  probe
  misc_feature (1)..(25): SEQ ID NO: 1555; WAN024AT9; Start 75; Stop 99
aactatgggtgggtttaaagagaca

SEQ ID NO: 297829 - DNA, 25 bp, Artificial
  probe
  misc_feature (1)..(25): SEQ ID NO: 1555; WAN024AT9; Start 73; Stop 97
acaactatgggtgggtttaaagaga

SEQ ID NO: 297830 - DNA, 25 bp, Artificial
  probe
  misc_feature (1)..(25): SEQ ID NO: 1555; WAN024AT9; Start 599; Stop 623
tcgaatcaaggtttaagaattggat

SEQ ID NO: 297831 - DNA, 25 bp, Artificial
  probe
  misc_feature (1)..(25): SEQ ID NO: 1555; WAN024AT9; Start 598; Stop 622
atcgaatcaaggtttaagaattgga

SEQ ID NO: 297832 - DNA, 25 bp, Artificial
  probe
  misc_feature (1)..(25): SEQ ID NO: 1555; WAN024AT9; Start 76; Stop 100
actatgggtgggtttaaagagacag

SEQ ID NO: 297833 - DNA, 25 bp, Artificial
  probe
  misc_feature (1)..(25): SEQ ID NO: 1555; WAN024AT9; Start 69; Stop 93
tcatacaactatgggtgggtttaaa

SEQ ID NO: 297834 - DNA, 25 bp, Artificial
  probe
  misc_feature (1)..(25): SEQ ID NO: 1555; WAN024AT9; Start 70; Stop 94
catacaactatgggtgggtttaaag

SEQ ID NO: 297835 - DNA, 25 bp, Artificial
  probe
  misc_feature (1)..(25): SEQ ID NO: 1555; WAN024AT9; Start 772; Stop 796
atgcttactttgaatgaaaaccgaa

SEQ ID NO: 297836 - DNA, 25 bp, Artificial
  probe
  misc_feature (1)..(25): SEQ ID NO: 1555; WAN024AT9; Start 597; Stop 621
aatcgaatcaaggtttaagaattgg

SEQ ID NO: 297837 - DNA, 25 bp, Artificial
  probe
  misc_feature (1)..(25): SEQ ID NO: 1555; WAN024AT9; Start 592; Stop 616
gaagaaatcgaatcaaggtttaaga

SEQ ID NO: 297838 - DNA, 25 bp, Artificial
  probe
  misc_feature (1)..(25): SEQ ID NO: 1555; WAN024AT9; Start 591; Stop 615
agaagaaatcgaatcaaggtttaag

SEQ ID NO: 297839 - DNA, 25 bp, Artificial
  probe
  misc_feature (1)..(25): SEQ ID NO: 1555; WAN024AT9; Start 773; Stop 797
tgcttactttgaatgaaaaccgaag

SEQ ID NO: 297840 - DNA, 25 bp, Artificial
  probe
  misc_feature (1)..(25): SEQ ID NO: 1556; WAN024FQQ; Start 39; Stop 63
aatcatcgtattggactatggtagc

SEQ ID NO: 297841 - DNA, 25 bp, Artificial
  probe
  misc_feature (1)..(25): SEQ ID NO: 1556; WAN024FQQ; Start 145; Stop 169
gaagttcgtgaagtcaatcctgtag

SEQ ID NO: 297842 - DNA, 25 bp, Artificial
  probe
  misc_feature (1)..(25): SEQ ID NO: 1556; WAN024FQQ; Start 756; Stop 780
attgatctgtatcttcgtagaccac

SEQ ID NO: 297843 - DNA, 25 bp, Artificial
  probe
  misc_feature (1)..(25): SEQ ID NO: 1556; WAN024FQQ; Start 165; Stop 189
tgtaggaattattctatcaggtggt

SEQ ID NO: 297844 - DNA, 25 bp, Artificial
  probe
  misc_feature (1)..(25): SEQ ID NO: 1556; WAN024FQQ; Start 755; Stop 779
aattgatctgtatcttcgtagacca

SEQ ID NO: 297845 - DNA, 25 bp, Artificial
  probe
  misc_feature (1)..(25): SEQ ID NO: 1556; WAN024FQQ; Start 40; Stop 64
atcatcgtattggactatggtagcc

SEQ ID NO: 297846 - DNA, 25 bp, Artificial
  probe
  misc_feature (1)..(25): SEQ ID NO: 1556; WAN024FQQ; Start 166; Stop 190
gtaggaattattctatcaggtggtc

SEQ ID NO: 297847 - DNA, 25 bp, Artificial
  probe
  misc_feature (1)..(25): SEQ ID NO: 1556; WAN024FQQ; Start 144; Stop 168
tgaagttcgtgaagtcaatcctgta

SEQ ID NO: 297848 - DNA, 25 bp, Artificial
  probe
  misc_feature (1)..(25): SEQ ID NO: 1556; WAN024FQQ; Start 169; Stop 193
ggaattattctatcaggtggtccaa

SEQ ID NO: 297849 - DNA, 25 bp, Artificial
  probe
  misc_feature (1)..(25): SEQ ID NO: 1556; WAN024FQQ; Start 168; Stop 192
aggaattattctatcaggtggtcca

SEQ ID NO: 297850 - DNA, 25 bp, Artificial
  probe
  misc_feature (1)..(25): SEQ ID NO: 1556; WAN024FQQ; Start 1122; Stop 1146
ttacaaggatgaagttcgtgctctt

SEQ ID NO: 297851 - DNA, 25 bp, Artificial
  probe
  misc_feature (1)..(25): SEQ ID NO: 1556; WAN024FQQ; Start 167; Stop 191
taggaattattctatcaggtggtcc

SEQ ID NO: 297852 - DNA, 25 bp, Artificial
  probe
  misc_feature (1)..(25): SEQ ID NO: 1556; WAN024FQQ; Start 146; Stop 170
aagttcgtgaagtcaatcctgtagg

SEQ ID NO: 297853 - DNA, 25 bp, Artificial
  probe
  misc_feature (1)..(25): SEQ ID NO: 1556; WAN024FQQ; Start 827; Stop 851
gtggtaagtttggtttgaatatcgt

SEQ ID NO: 297854 - DNA, 25 bp, Artificial
  probe
  misc_feature (1)..(25): SEQ ID NO: 1556; WAN024FQQ; Start 164; Stop 188
ctgtaggaattattctatcaggtgg

SEQ ID NO: 297855 - DNA, 25 bp, Artificial
  probe
  misc_feature (1)..(25): SEQ ID NO: 1556; WAN024FQQ; Start 828; Stop 852
tggtaagtttggtttgaatatcgtc

SEQ ID NO: 297856 - DNA, 25 bp, Artificial
  probe
  misc_feature (1)..(25): SEQ ID NO: 1556; WAN024FQQ; Start 826; Stop 850
ggtggtaagtttggtttgaatatcg

SEQ ID NO: 297857 - DNA, 25 bp, Artificial
  probe
  misc_feature (1)..(25): SEQ ID NO: 1556; WAN024FQQ; Start 825; Stop 849
cggtggtaagtttggtttgaatatc

SEQ ID NO: 297858 - DNA, 25 bp, Artificial
  probe
  misc_feature (1)..(25): SEQ ID NO: 1556; WAN024FQQ; Start 569; Stop 593
atatccttcgtaactttgcccttaa

SEQ ID NO: 297859 - DNA, 25 bp, Artificial
  probe
  misc_feature (1)..(25): SEQ ID NO: 1556; WAN024FQQ; Start 574; Stop 598
cttcgtaactttgcccttaacattt

SEQ ID NO: 297860 - DNA, 25 bp, Artificial
  probe
  misc_feature (1)..(25): SEQ ID NO: 1556; WAN024FQQ; Start 575; Stop 599
ttcgtaactttgcccttaacatttg

SEQ ID NO: 297861 - DNA, 25 bp, Artificial
  probe
  misc_feature (1)..(25): SEQ ID NO: 1556; WAN024FQQ; Start 824; Stop 848
tcggtggtaagtttggtttgaatat

SEQ ID NO: 297862 - DNA, 25 bp, Artificial
  probe
  misc_feature (1)..(25): SEQ ID NO: 1556; WAN024FQQ; Start 47; Stop 71
tattggactatggtagccagtacaa

SEQ ID NO: 297863 - DNA, 25 bp, Artificial
  probe
  misc_feature (1)..(25): SEQ ID NO: 1556; WAN024FQQ; Start 577; Stop 601
cgtaactttgcccttaacatttgta

SEQ ID NO: 297864 - DNA, 25 bp, Artificial
  probe
  misc_feature (1)..(25): SEQ ID NO: 1556; WAN024FQQ; Start 511; Stop 535
aaacacatttacggtatccaattcc

SEQ ID NO: 297865 - DNA, 25 bp, Artificial
  probe
  misc_feature (1)..(25): SEQ ID NO: 1556; WAN024FQQ; Start 570; Stop 594
tatccttcgtaactttgcccttaac

SEQ ID NO: 297866 - DNA, 25 bp, Artificial
  probe
  misc_feature (1)..(25): SEQ ID NO: 1556; WAN024FQQ; Start 1106; Stop 1130
aaccactcaatactctttacaagga

SEQ ID NO: 297867 - DNA, 25 bp, Artificial
  probe
  misc_feature (1)..(25): SEQ ID NO: 1556; WAN024FQQ; Start 592; Stop 616
aacatttgtaaggctaaaggtgact

SEQ ID NO: 297868 - DNA, 25 bp, Artificial
  probe
  misc_feature (1)..(25): SEQ ID NO: 1556; WAN024FQQ; Start 685; Stop 709
cttcttggtctatcaggtggtgttg

SEQ ID NO: 297869 - DNA, 25 bp, Artificial
  probe
  misc_feature (1)..(25): SEQ ID NO: 1556; WAN024FQQ; Start 591; Stop 615
taacatttgtaaggctaaaggtgac

SEQ ID NO: 297870 - DNA, 25 bp, Artificial
  probe
  misc_feature (1)..(25): SEQ ID NO: 1556; WAN024FQQ; Start 512; Stop 536
aacacatttacggtatccaattcca

SEQ ID NO: 297871 - DNA, 25 bp, Artificial
  probe
  misc_feature (1)..(25): SEQ ID NO: 1556; WAN024FQQ; Start 1107; Stop 1131
accactcaatactctttacaaggat

SEQ ID NO: 297872 - DNA, 25 bp, Artificial
  probe
  misc_feature (1)..(25): SEQ ID NO: 1556; WAN024FQQ; Start 1105; Stop 1129
gaaccactcaatactctttacaagg

SEQ ID NO: 297873 - DNA, 25 bp, Artificial
  probe
  misc_feature (1)..(25): SEQ ID NO: 1557; WAN024DEI; Start 72; Stop 96
tgaaggttatacattgactatcggt

SEQ ID NO: 297874 - DNA, 25 bp, Artificial
  probe
  misc_feature (1)..(25): SEQ ID NO: 1557; WAN024DEI; Start 71; Stop 95
ttgaaggttatacattgactatcgg

SEQ ID NO: 297875 - DNA, 25 bp, Artificial
  probe
  misc_feature (1)..(25): SEQ ID NO: 1557; WAN024DEI; Start 73; Stop 97
gaaggttatacattgactatcggta

SEQ ID NO: 297876 - DNA, 25 bp, Artificial
  probe
  misc_feature (1)..(25): SEQ ID NO: 1557; WAN024DEI; Start 74; Stop 98
aaggttatacattgactatcggtaa

SEQ ID NO: 297877 - DNA, 25 bp, Artificial
  probe
  misc_feature (1)..(25): SEQ ID NO: 1557; WAN024DEI; Start 123; Stop 147
attagacggacaatttgccattata

SEQ ID NO: 297878 - DNA, 25 bp, Artificial
  probe
  misc_feature (1)..(25): SEQ ID NO: 1557; WAN024DEI; Start 121; Stop 145
gaattagacggacaatttgccatta

SEQ ID NO: 297879 - DNA, 25 bp, Artificial
  probe
  misc_feature (1)..(25): SEQ ID NO: 1557; WAN024DEI; Start 122; Stop 146
aattagacggacaatttgccattat

SEQ ID NO: 297880 - DNA, 25 bp, Artificial
  probe
  misc_feature (1)..(25): SEQ ID NO: 1557; WAN024DEI; Start 127; Stop 151
gacggacaatttgccattataaaga

SEQ ID NO: 297881 - DNA, 25 bp, Artificial
  probe
  misc_feature (1)..(25): SEQ ID NO: 1557; WAN024DEI; Start 126; Stop 150
agacggacaatttgccattataaag

SEQ ID NO: 297882 - DNA, 25 bp, Artificial
  probe
  misc_feature (1)..(25): SEQ ID NO: 1557; WAN024DEI; Start 128; Stop 152
acggacaatttgccattataaagaa

SEQ ID NO: 297883 - DNA, 25 bp, Artificial
  probe
  misc_feature (1)..(25): SEQ ID NO: 1557; WAN024DEI; Start 125; Stop 149
tagacggacaatttgccattataaa

SEQ ID NO: 297884 - DNA, 25 bp, Artificial
  probe
  misc_feature (1)..(25): SEQ ID NO: 1557; WAN024DEI; Start 124; Stop 148
ttagacggacaatttgccattataa

SEQ ID NO: 297885 - DNA, 25 bp, Artificial
  probe
  misc_feature (1)..(25): SEQ ID NO: 1557; WAN024DEI; Start 129; Stop 153
cggacaatttgccattataaagaat

SEQ ID NO: 297886 - DNA, 25 bp, Artificial
  probe
  misc_feature (1)..(25): SEQ ID NO: 1557; WAN024DEI; Start 75; Stop 99
aggttatacattgactatcggtaaa

SEQ ID NO: 297887 - DNA, 25 bp, Artificial
  probe
  misc_feature (1)..(25): SEQ ID NO: 1557; WAN024DEI; Start 45; Stop 69
caaagttaatgttggtaaagacagt

SEQ ID NO: 297888 - DNA, 25 bp, Artificial
  probe
  misc_feature (1)..(25): SEQ ID NO: 1557; WAN024DEI; Start 31; Stop 55
caagtagcggatgccaaagttaatg

SEQ ID NO: 297889 - DNA, 25 bp, Artificial
  probe
  misc_feature (1)..(25): SEQ ID NO: 1557; WAN024DEI; Start 28; Stop 52
attcaagtagcggatgccaaagtta

SEQ ID NO: 297890 - DNA, 25 bp, Artificial
  probe
  misc_feature (1)..(25): SEQ ID NO: 1557; WAN024DEI; Start 30; Stop 54
tcaagtagcggatgccaaagttaat

SEQ ID NO: 297891 - DNA, 25 bp, Artificial
  probe
  misc_feature (1)..(25): SEQ ID NO: 1557; WAN024DEI; Start 29; Stop 53
ttcaagtagcggatgccaaagttaa

SEQ ID NO: 297892 - DNA, 25 bp, Artificial
  probe
  misc_feature (1)..(25): SEQ ID NO: 1557; WAN024DEI; Start 70; Stop 94
tttgaaggttatacattgactatcg

SEQ ID NO: 297893 - DNA, 25 bp, Artificial
  probe
  misc_feature (1)..(25): SEQ ID NO: 1557; WAN024DEI; Start 146; Stop 170
taaagaatgggaatgtcgatagttt

SEQ ID NO: 297894 - DNA, 25 bp, Artificial
  probe
  misc_feature (1)..(25): SEQ ID NO: 1557; WAN024DEI; Start 25; Stop 49
gaaattcaagtagcggatgccaaag

SEQ ID NO: 297895 - DNA, 25 bp, Artificial
  probe
  misc_feature (1)..(25): SEQ ID NO: 1557; WAN024DEI; Start 120; Stop 144
cgaattagacggacaatttgccatt

SEQ ID NO: 297896 - DNA, 25 bp, Artificial
  probe
  misc_feature (1)..(25): SEQ ID NO: 1557; WAN024DEI; Start 33; Stop 57
agtagcggatgccaaagttaatgtt

SEQ ID NO: 297897 - DNA, 25 bp, Artificial
  probe
  misc_feature (1)..(25): SEQ ID NO: 1557; WAN024DEI; Start 32; Stop 56
aagtagcggatgccaaagttaatgt

SEQ ID NO: 297898 - DNA, 25 bp, Artificial
  probe
  misc_feature (1)..(25): SEQ ID NO: 1557; WAN024DEI; Start 145; Stop 169
ataaagaatgggaatgtcgatagtt

SEQ ID NO: 297899 - DNA, 25 bp, Artificial
  probe
  misc_feature (1)..(25): SEQ ID NO: 1557; WAN024DEI; Start 34; Stop 58
gtagcggatgccaaagttaatgttg

SEQ ID NO: 297900 - DNA, 25 bp, Artificial
  probe
  misc_feature (1)..(25): SEQ ID NO: 1557; WAN024DEI; Start 47; Stop 71
aagttaatgttggtaaagacagttt

SEQ ID NO: 297901 - DNA, 25 bp, Artificial
  probe
  misc_feature (1)..(25): SEQ ID NO: 1557; WAN024DEI; Start 46; Stop 70
aaagttaatgttggtaaagacagtt

SEQ ID NO: 297902 - DNA, 25 bp, Artificial
  probe
  misc_feature (1)..(25): SEQ ID NO: 1557; WAN024DEI; Start 55; Stop 79
gttggtaaagacagttttgaaggtt

SEQ ID NO: 297903 - DNA, 25 bp, Artificial
  probe
  misc_feature (1)..(25): SEQ ID NO: 1557; WAN024DEI; Start 27; Stop 51
aattcaagtagcggatgccaaagtt

SEQ ID NO: 297904 - DNA, 25 bp, Artificial
  probe
  misc_feature (1)..(25): SEQ ID NO: 1557; WAN024DEI; Start 26; Stop 50
aaattcaagtagcggatgccaaagt

SEQ ID NO: 297905 - DNA, 25 bp, Artificial
  probe
  misc_feature (1)..(25): SEQ ID NO: 1557; WAN024DEI; Start 56; Stop 80
ttggtaaagacagttttgaaggtta

SEQ ID NO: 297906 - DNA, 25 bp, Artificial
  probe
  misc_feature (1)..(25): SEQ ID NO: 1558; WAN024FKJ-5; Start 3; Stop 27
gagcaaggaattacacattaacaca

SEQ ID NO: 297907 - DNA, 25 bp, Artificial
  probe
  misc_feature (1)..(25): SEQ ID NO: 1558; WAN024FKJ-5; Start 2; Stop 26
tgagcaaggaattacacattaacac

SEQ ID NO: 297908 - DNA, 25 bp, Artificial
  probe
  misc_feature (1)..(25): SEQ ID NO: 1558; WAN024FKJ-5; Start 4; Stop 28
agcaaggaattacacattaacacaa

SEQ ID NO: 297909 - DNA, 25 bp, Artificial
  probe
  misc_feature (1)..(25): SEQ ID NO: 1558; WAN024FKJ-5; Start 1; Stop 25
atgagcaaggaattacacattaaca

SEQ ID NO: 297910 - DNA, 25 bp, Artificial
  probe
  misc_feature (1)..(25): SEQ ID NO: 1558; WAN024FKJ-5; Start 5; Stop 29
gcaaggaattacacattaacacaat

SEQ ID NO: 297911 - DNA, 25 bp, Artificial
  probe
  misc_feature (1)..(25): SEQ ID NO: 1558; WAN024FKJ-5; Start 165; Stop 189
tcgtagtaaggctgaggaagtcttg

SEQ ID NO: 297912 - DNA, 25 bp, Artificial
  probe
  misc_feature (1)..(25): SEQ ID NO: 1558; WAN024FKJ-5; Start 164; Stop 188
ctcgtagtaaggctgaggaagtctt

SEQ ID NO: 297913 - DNA, 25 bp, Artificial
  probe
  misc_feature (1)..(25): SEQ ID NO: 1558; WAN024FKJ-5; Start 270; Stop 294
agtaggaagtaaggtcttggcagtg

SEQ ID NO: 297914 - DNA, 25 bp, Artificial
  probe
  misc_feature (1)..(25): SEQ ID NO: 1558; WAN024FKJ-5; Start 269; Stop 293
cagtaggaagtaaggtcttggcagt

SEQ ID NO: 297915 - DNA, 25 bp, Artificial
  probe
  misc_feature (1)..(25): SEQ ID NO: 1558; WAN024FKJ-5; Start 162; Stop 186
aactcgtagtaaggctgaggaagtc

SEQ ID NO: 297916 - DNA, 25 bp, Artificial
  probe
  misc_feature (1)..(25): SEQ ID NO: 1558; WAN024FKJ-5; Start 6; Stop 30
caaggaattacacattaacacaatt

SEQ ID NO: 297917 - DNA, 25 bp, Artificial
  probe
  misc_feature (1)..(25): SEQ ID NO: 1558; WAN024FKJ-5; Start 156; Stop 180
aaatccaactcgtagtaaggctgag

SEQ ID NO: 297918 - DNA, 25 bp, Artificial
  probe
  misc_feature (1)..(25): SEQ ID NO: 1558; WAN024FKJ-5; Start 123; Stop 147
tcgatctactgggtttgactatacg

SEQ ID NO: 297919 - DNA, 25 bp, Artificial
  probe
  misc_feature (1)..(25): SEQ ID NO: 1558; WAN024FKJ-5; Start 161; Stop 185
caactcgtagtaaggctgaggaagt

SEQ ID NO: 297920 - DNA, 25 bp, Artificial
  probe
  misc_feature (1)..(25): SEQ ID NO: 1558; WAN024FKJ-5; Start 93; Stop 117
ttcaacgacctatcagcatccagag

SEQ ID NO: 297921 - DNA, 25 bp, Artificial
  probe
  misc_feature (1)..(25): SEQ ID NO: 1558; WAN024FKJ-5; Start 157; Stop 181
aatccaactcgtagtaaggctgagg

SEQ ID NO: 297922 - DNA, 25 bp, Artificial
  probe
  misc_feature (1)..(25): SEQ ID NO: 1558; WAN024FKJ-5; Start 122; Stop 146
gtcgatctactgggtttgactatac

SEQ ID NO: 297923 - DNA, 25 bp, Artificial
  probe
  misc_feature (1)..(25): SEQ ID NO: 1558; WAN024FKJ-5; Start 124; Stop 148
cgatctactgggtttgactatacgc

SEQ ID NO: 297924 - DNA, 25 bp, Artificial
  probe
  misc_feature (1)..(25): SEQ ID NO: 1558; WAN024FKJ-5; Start 121; Stop 145
ggtcgatctactgggtttgactata

SEQ ID NO: 297925 - DNA, 25 bp, Artificial
  probe
  misc_feature (1)..(25): SEQ ID NO: 1558; WAN024FKJ-5; Start 166; Stop 190
cgtagtaaggctgaggaagtcttgg

SEQ ID NO: 297926 - DNA, 25 bp, Artificial
  probe
  misc_feature (1)..(25): SEQ ID NO: 1558; WAN024FKJ-5; Start 95; Stop 119
caacgacctatcagcatccagagtt

SEQ ID NO: 297927 - DNA, 25 bp, Artificial
  probe
  misc_feature (1)..(25): SEQ ID NO: 1558; WAN024FKJ-5; Start 163; Stop 187
actcgtagtaaggctgaggaagtct

SEQ ID NO: 297928 - DNA, 25 bp, Artificial
  probe
  misc_feature (1)..(25): SEQ ID NO: 1558; WAN024FKJ-5; Start 167; Stop 191
gtagtaaggctgaggaagtcttggc

SEQ ID NO: 297929 - DNA, 25 bp, Artificial
  probe
  misc_feature (1)..(25): SEQ ID NO: 1558; WAN024FKJ-5; Start 160; Stop 184
ccaactcgtagtaaggctgaggaag

SEQ ID NO: 297930 - DNA, 25 bp, Artificial
  probe
  misc_feature (1)..(25): SEQ ID NO: 1558; WAN024FKJ-5; Start 92; Stop 116
tttcaacgacctatcagcatccaga

SEQ ID NO: 297931 - DNA, 25 bp, Artificial
  probe
  misc_feature (1)..(25): SEQ ID NO: 1558; WAN024FKJ-5; Start 228; Stop 252
ctcagggatgtcagctattgtactg

SEQ ID NO: 297932 - DNA, 25 bp, Artificial
  probe
  misc_feature (1)..(25): SEQ ID NO: 1558; WAN024FKJ-5; Start 96; Stop 120
aacgacctatcagcatccagagttt

SEQ ID NO: 297933 - DNA, 25 bp, Artificial
  probe
  misc_feature (1)..(25): SEQ ID NO: 1558; WAN024FKJ-5; Start 268; Stop 292
ccagtaggaagtaaggtcttggcag

SEQ ID NO: 297934 - DNA, 25 bp, Artificial
  probe
  misc_feature (1)..(25): SEQ ID NO: 1558; WAN024FKJ-5; Start 155; Stop 179
aaaatccaactcgtagtaaggctga

SEQ ID NO: 297935 - DNA, 25 bp, Artificial
  probe
  misc_feature (1)..(25): SEQ ID NO: 1558; WAN024FKJ-5; Start 120; Stop 144
tggtcgatctactgggtttgactat

SEQ ID NO: 297936 - DNA, 25 bp, Artificial
  probe
  misc_feature (1)..(25): SEQ ID NO: 1558; WAN024FKJ-5; Start 94; Stop 118
tcaacgacctatcagcatccagagt

SEQ ID NO: 297937 - DNA, 25 bp, Artificial
  probe
  misc_feature (1)..(25): SEQ ID NO: 1558; WAN024FKJ-5; Start 119; Stop 143
ttggtcgatctactgggtttgacta

SEQ ID NO: 297938 - DNA, 25 bp, Artificial
  probe
  misc_feature (1)..(25): SEQ ID NO: 1558; WAN024FKJ-5; Start 158; Stop 182
atccaactcgtagtaaggctgagga

SEQ ID NO: 297939 - DNA, 25 bp, Artificial
  probe
  misc_feature (1)..(25): SEQ ID NO: 1559; WAN024FWT; Start 305; Stop 329
tctatgtggatgagaatcttcgttc

SEQ ID NO: 297940 - DNA, 25 bp, Artificial
  probe
  misc_feature (1)..(25): SEQ ID NO: 1559; WAN024FWT; Start 304; Stop 328
gtctatgtggatgagaatcttcgtt

SEQ ID NO: 297941 - DNA, 25 bp, Artificial
  probe
  misc_feature (1)..(25): SEQ ID NO: 1559; WAN024FWT; Start 302; Stop 326
ttgtctatgtggatgagaatcttcg

SEQ ID NO: 297942 - DNA, 25 bp, Artificial
  probe
  misc_feature (1)..(25): SEQ ID NO: 1559; WAN024FWT; Start 306; Stop 330
ctatgtggatgagaatcttcgttca

SEQ ID NO: 297943 - DNA, 25 bp, Artificial
  probe
  misc_feature (1)..(25): SEQ ID NO: 1559; WAN024FWT; Start 137; Stop 161
ttacaacaattccaagtcgtcttaa

SEQ ID NO: 297944 - DNA, 25 bp, Artificial
  probe
  misc_feature (1)..(25): SEQ ID NO: 1559; WAN024FWT; Start 303; Stop 327
tgtctatgtggatgagaatcttcgt

SEQ ID NO: 297945 - DNA, 25 bp, Artificial
  probe
  misc_feature (1)..(25): SEQ ID NO: 1559; WAN024FWT; Start 138; Stop 162
tacaacaattccaagtcgtcttaat

SEQ ID NO: 297946 - DNA, 25 bp, Artificial
  probe
  misc_feature (1)..(25): SEQ ID NO: 1559; WAN024FWT; Start 301; Stop 325
attgtctatgtggatgagaatcttc

SEQ ID NO: 297947 - DNA, 25 bp, Artificial
  probe
  misc_feature (1)..(25): SEQ ID NO: 1559; WAN024FWT; Start 139; Stop 163
acaacaattccaagtcgtcttaatt

SEQ ID NO: 297948 - DNA, 25 bp, Artificial
  probe
  misc_feature (1)..(25): SEQ ID NO: 1559; WAN024FWT; Start 371; Stop 395
gtatagttgttctagttgatgacga

SEQ ID NO: 297949 - DNA, 25 bp, Artificial
  probe
  misc_feature (1)..(25): SEQ ID NO: 1559; WAN024FWT; Start 370; Stop 394
agtatagttgttctagttgatgacg

SEQ ID NO: 297950 - DNA, 25 bp, Artificial
  probe
  misc_feature (1)..(25): SEQ ID NO: 1559; WAN024FWT; Start 307; Stop 331
tatgtggatgagaatcttcgttcac

SEQ ID NO: 297951 - DNA, 25 bp, Artificial
  probe
  misc_feature (1)..(25): SEQ ID NO: 1559; WAN024FWT; Start 300; Stop 324
aattgtctatgtggatgagaatctt

SEQ ID NO: 297952 - DNA, 25 bp, Artificial
  probe
  misc_feature (1)..(25): SEQ ID NO: 1559; WAN024FWT; Start 538; Stop 562
atatcaggagctactataccatcgt

SEQ ID NO: 297953 - DNA, 25 bp, Artificial
  probe
  misc_feature (1)..(25): SEQ ID NO: 1559; WAN024FWT; Start 660; Stop 684
tctagctgatgatgtatggttgaat

SEQ ID NO: 297954 - DNA, 25 bp, Artificial
  probe
  misc_feature (1)..(25): SEQ ID NO: 1559; WAN024FWT; Start 539; Stop 563
tatcaggagctactataccatcgta

SEQ ID NO: 297955 - DNA, 25 bp, Artificial
  probe
  misc_feature (1)..(25): SEQ ID NO: 1559; WAN024FWT; Start 659; Stop 683
ttctagctgatgatgtatggttgaa

SEQ ID NO: 297956 - DNA, 25 bp, Artificial
  probe
  misc_feature (1)..(25): SEQ ID NO: 1559; WAN024FWT; Start 537; Stop 561
aatatcaggagctactataccatcg

SEQ ID NO: 297957 - DNA, 25 bp, Artificial
  probe
  misc_feature (1)..(25): SEQ ID NO: 1559; WAN024FWT; Start 661; Stop 685
ctagctgatgatgtatggttgaatt

SEQ ID NO: 297958 - DNA, 25 bp, Artificial
  probe
  misc_feature (1)..(25): SEQ ID NO: 1559; WAN024FWT; Start 723; Stop 747
aacacgatataaagggacaccatta

SEQ ID NO: 297959 - DNA, 25 bp, Artificial
  probe
  misc_feature (1)..(25): SEQ ID NO: 1559; WAN024FWT; Start 311; Stop 335
tggatgagaatcttcgttcacacaa

SEQ ID NO: 297960 - DNA, 25 bp, Artificial
  probe
  misc_feature (1)..(25): SEQ ID NO: 1559; WAN024FWT; Start 1; Stop 25
atgagcaagttacttaataccatct

SEQ ID NO: 297961 - DNA, 25 bp, Artificial
  probe
  misc_feature (1)..(25): SEQ ID NO: 1559; WAN024FWT; Start 724; Stop 748
acacgatataaagggacaccattaa

SEQ ID NO: 297962 - DNA, 25 bp, Artificial
  probe
  misc_feature (1)..(25): SEQ ID NO: 1559; WAN024FWT; Start 374; Stop 398
tagttgttctagttgatgacgatat

SEQ ID NO: 297963 - DNA, 25 bp, Artificial
  probe
  misc_feature (1)..(25): SEQ ID NO: 1559; WAN024FWT; Start 373; Stop 397
atagttgttctagttgatgacgata

SEQ ID NO: 297964 - DNA, 25 bp, Artificial
  probe
  misc_feature (1)..(25): SEQ ID NO: 1559; WAN024FWT; Start 372; Stop 396
tatagttgttctagttgatgacgat

SEQ ID NO: 297965 - DNA, 25 bp, Artificial
  probe
  misc_feature (1)..(25): SEQ ID NO: 1559; WAN024FWT; Start 726; Stop 750
acgatataaagggacaccattaact

SEQ ID NO: 297966 - DNA, 25 bp, Artificial
  probe
  misc_feature (1)..(25): SEQ ID NO: 1559; WAN024FWT; Start 725; Stop 749
cacgatataaagggacaccattaac

SEQ ID NO: 297967 - DNA, 25 bp, Artificial
  probe
  misc_feature (1)..(25): SEQ ID NO: 1559; WAN024FWT; Start 292; Stop 316
ggtttggaaattgtctatgtggatg

SEQ ID NO: 297968 - DNA, 25 bp, Artificial
  probe
  misc_feature (1)..(25): SEQ ID NO: 1559; WAN024FWT; Start 293; Stop 317
gtttggaaattgtctatgtggatga

SEQ ID NO: 297969 - DNA, 25 bp, Artificial
  probe
  misc_feature (1)..(25): SEQ ID NO: 1559; WAN024FWT; Start 763; Stop 787
cctgaggagagtttggtatatttga

SEQ ID NO: 297970 - DNA, 25 bp, Artificial
  probe
  misc_feature (1)..(25): SEQ ID NO: 1559; WAN024FWT; Start 291; Stop 315
tggtttggaaattgtctatgtggat

SEQ ID NO: 297971 - DNA, 25 bp, Artificial
  probe
  misc_feature (1)..(25): SEQ ID NO: 1559; WAN024FWT; Start 294; Stop 318
tttggaaattgtctatgtggatgag

SEQ ID NO: 297972 - DNA, 25 bp, Artificial
  probe
  misc_feature (1)..(25): SEQ ID NO: 1560; WAN024FWU; Start 138; Stop 162
tacaacaattccaagccgtcttaat

SEQ ID NO: 297973 - DNA, 25 bp, Artificial
  probe
  misc_feature (1)..(25): SEQ ID NO: 1560; WAN024FWU; Start 137; Stop 161
ttacaacaattccaagccgtcttaa

SEQ ID NO: 297974 - DNA, 25 bp, Artificial
  probe
  misc_feature (1)..(25): SEQ ID NO: 1560; WAN024FWU; Start 139; Stop 163
acaacaattccaagccgtcttaatt

SEQ ID NO: 297975 - DNA, 25 bp, Artificial
  probe
  misc_feature (1)..(25): SEQ ID NO: 1560; WAN024FWU; Start 140; Stop 164
caacaattccaagccgtcttaatta

SEQ ID NO: 297976 - DNA, 25 bp, Artificial
  probe
  misc_feature (1)..(25): SEQ ID NO: 1560; WAN024FWU; Start 142; Stop 166
acaattccaagccgtcttaattatt

SEQ ID NO: 297977 - DNA, 25 bp, Artificial
  probe
  misc_feature (1)..(25): SEQ ID NO: 1560; WAN024FWU; Start 141; Stop 165
aacaattccaagccgtcttaattat

SEQ ID NO: 297978 - DNA, 25 bp, Artificial
  probe
  misc_feature (1)..(25): SEQ ID NO: 1560; WAN024FWU; Start 382; Stop 406
ttggttgatgatgacactgtctatt

SEQ ID NO: 297979 - DNA, 25 bp, Artificial
  probe
  misc_feature (1)..(25): SEQ ID NO: 1560; WAN024FWU; Start 750; Stop 774
tatagatgacaaccctgaagagagt

SEQ ID NO: 297980 - DNA, 25 bp, Artificial
  probe
  misc_feature (1)..(25): SEQ ID NO: 1560; WAN024FWU; Start 661; Stop 685
ttagctgatgatgtatggttgaatt

SEQ ID NO: 297981 - DNA, 25 bp, Artificial
  probe
  misc_feature (1)..(25): SEQ ID NO: 1560; WAN024FWU; Start 384; Stop 408
ggttgatgatgacactgtctattca

SEQ ID NO: 297982 - DNA, 25 bp, Artificial
  probe
  misc_feature (1)..(25): SEQ ID NO: 1560; WAN024FWU; Start 383; Stop 407
tggttgatgatgacactgtctattc

SEQ ID NO: 297983 - DNA, 25 bp, Artificial
  probe
  misc_feature (1)..(25): SEQ ID NO: 1560; WAN024FWU; Start 481; Stop 505
cgaattaaactgcttactgatggaa

SEQ ID NO: 297984 - DNA, 25 bp, Artificial
  probe
  misc_feature (1)..(25): SEQ ID NO: 1560; WAN024FWU; Start 348; Stop 372
tgctatgaaggataatccgaatagt

SEQ ID NO: 297985 - DNA, 25 bp, Artificial
  probe
  misc_feature (1)..(25): SEQ ID NO: 1560; WAN024FWU; Start 428; Stop 452
tagttgcttcttacaggaaataccc

SEQ ID NO: 297986 - DNA, 25 bp, Artificial
  probe
  misc_feature (1)..(25): SEQ ID NO: 1560; WAN024FWU; Start 434; Stop 458
cttcttacaggaaatacccaagttg

SEQ ID NO: 297987 - DNA, 25 bp, Artificial
  probe
  misc_feature (1)..(25): SEQ ID NO: 1560; WAN024FWU; Start 770; Stop 794
agagtttggtgtatctgaatgctat

SEQ ID NO: 297988 - DNA, 25 bp, Artificial
  probe
  misc_feature (1)..(25): SEQ ID NO: 1560; WAN024FWU; Start 764; Stop 788
ctgaagagagtttggtgtatctgaa

SEQ ID NO: 297989 - DNA, 25 bp, Artificial
  probe
  misc_feature (1)..(25): SEQ ID NO: 1560; WAN024FWU; Start 769; Stop 793
gagagtttggtgtatctgaatgcta

SEQ ID NO: 297990 - DNA, 25 bp, Artificial
  probe
  misc_feature (1)..(25): SEQ ID NO: 1560; WAN024FWU; Start 765; Stop 789
tgaagagagtttggtgtatctgaat

SEQ ID NO: 297991 - DNA, 25 bp, Artificial
  probe
  misc_feature (1)..(25): SEQ ID NO: 1560; WAN024FWU; Start 814; Stop 838
aggtgtatcaagaatatggtagatt

SEQ ID NO: 297992 - DNA, 25 bp, Artificial
  probe
  misc_feature (1)..(25): SEQ ID NO: 1560; WAN024FWU; Start 766; Stop 790
gaagagagtttggtgtatctgaatg

SEQ ID NO: 297993 - DNA, 25 bp, Artificial
  probe
  misc_feature (1)..(25): SEQ ID NO: 1560; WAN024FWU; Start 433; Stop 457
gcttcttacaggaaatacccaagtt

SEQ ID NO: 297994 - DNA, 25 bp, Artificial
  probe
  misc_feature (1)..(25): SEQ ID NO: 1560; WAN024FWU; Start 751; Stop 775
atagatgacaaccctgaagagagtt

SEQ ID NO: 297995 - DNA, 25 bp, Artificial
  probe
  misc_feature (1)..(25): SEQ ID NO: 1560; WAN024FWU; Start 767; Stop 791
aagagagtttggtgtatctgaatgc

SEQ ID NO: 297996 - DNA, 25 bp, Artificial
  probe
  misc_feature (1)..(25): SEQ ID NO: 1560; WAN024FWU; Start 485; Stop 509
ttaaactgcttactgatggaagtct

SEQ ID NO: 297997 - DNA, 25 bp, Artificial
  probe
  misc_feature (1)..(25): SEQ ID NO: 1560; WAN024FWU; Start 427; Stop 451
ttagttgcttcttacaggaaatacc

SEQ ID NO: 297998 - DNA, 25 bp, Artificial
  probe
  misc_feature (1)..(25): SEQ ID NO: 1560; WAN024FWU; Start 423; Stop 447
aaagttagttgcttcttacaggaaa

SEQ ID NO: 297999 - DNA, 25 bp, Artificial
  probe
  misc_feature (1)..(25): SEQ ID NO: 1560; WAN024FWU; Start 752; Stop 776
tagatgacaaccctgaagagagttt

SEQ ID NO: 298000 - DNA, 25 bp, Artificial
  probe
  misc_feature (1)..(25): SEQ ID NO: 1560; WAN024FWU; Start 486; Stop 510
taaactgcttactgatggaagtctg

SEQ ID NO: 298001 - DNA, 25 bp, Artificial
  probe
  misc_feature (1)..(25): SEQ ID NO: 1560; WAN024FWU; Start 771; Stop 795
gagtttggtgtatctgaatgctata

SEQ ID NO: 298002 - DNA, 25 bp, Artificial
  probe
  misc_feature (1)..(25): SEQ ID NO: 1560; WAN024FWU; Start 739; Stop 763
acaccattaactatagatgacaacc

SEQ ID NO: 298003 - DNA, 25 bp, Artificial
  probe
  misc_feature (1)..(25): SEQ ID NO: 1560; WAN024FWU; Start 431; Stop 455
ttgcttcttacaggaaatacccaag

SEQ ID NO: 298004 - DNA, 25 bp, Artificial
  probe
  misc_feature (1)..(25): SEQ ID NO: 1560; WAN024FWU; Start 424; Stop 448
aagttagttgcttcttacaggaaat

SEQ ID NO: 298005 - DNA, 25 bp, Artificial
  probe
  misc_feature (1)..(25): SEQ ID NO: 1561; WAN024CIZ; Start 333; Stop 357
acgatattcacaacaagaggtcata

SEQ ID NO: 298006 - DNA, 25 bp, Artificial
  probe
  misc_feature (1)..(25): SEQ ID NO: 1561; WAN024CIZ; Start 332; Stop 356
aacgatattcacaacaagaggtcat

SEQ ID NO: 298007 - DNA, 25 bp, Artificial
  probe
  misc_feature (1)..(25): SEQ ID NO: 1561; WAN024CIZ; Start 334; Stop 358
cgatattcacaacaagaggtcatag

SEQ ID NO: 298008 - DNA, 25 bp, Artificial
  probe
  misc_feature (1)..(25): SEQ ID NO: 1561; WAN024CIZ; Start 325; Stop 349
attctggaacgatattcacaacaag

SEQ ID NO: 298009 - DNA, 25 bp, Artificial
  probe
  misc_feature (1)..(25): SEQ ID NO: 1561; WAN024CIZ; Start 338; Stop 362
attcacaacaagaggtcatagtaac

SEQ ID NO: 298010 - DNA, 25 bp, Artificial
  probe
  misc_feature (1)..(25): SEQ ID NO: 1561; WAN024CIZ; Start 326; Stop 350
ttctggaacgatattcacaacaaga

SEQ ID NO: 298011 - DNA, 25 bp, Artificial
  probe
  misc_feature (1)..(25): SEQ ID NO: 1561; WAN024CIZ; Start 327; Stop 351
tctggaacgatattcacaacaagag

SEQ ID NO: 298012 - DNA, 25 bp, Artificial
  probe
  misc_feature (1)..(25): SEQ ID NO: 1561; WAN024CIZ; Start 324; Stop 348
aattctggaacgatattcacaacaa

SEQ ID NO: 298013 - DNA, 25 bp, Artificial
  probe
  misc_feature (1)..(25): SEQ ID NO: 1561; WAN024CIZ; Start 331; Stop 355
gaacgatattcacaacaagaggtca

SEQ ID NO: 298014 - DNA, 25 bp, Artificial
  probe
  misc_feature (1)..(25): SEQ ID NO: 1561; WAN024CIZ; Start 335; Stop 359
gatattcacaacaagaggtcatagt

SEQ ID NO: 298015 - DNA, 25 bp, Artificial
  probe
  misc_feature (1)..(25): SEQ ID NO: 1561; WAN024CIZ; Start 330; Stop 354
ggaacgatattcacaacaagaggtc

SEQ ID NO: 298016 - DNA, 25 bp, Artificial
  probe
  misc_feature (1)..(25): SEQ ID NO: 1561; WAN024CIZ; Start 328; Stop 352
ctggaacgatattcacaacaagagg

SEQ ID NO: 298017 - DNA, 25 bp, Artificial
  probe
  misc_feature (1)..(25): SEQ ID NO: 1561; WAN024CIZ; Start 329; Stop 353
tggaacgatattcacaacaagaggt

SEQ ID NO: 298018 - DNA, 25 bp, Artificial
  probe
  misc_feature (1)..(25): SEQ ID NO: 1561; WAN024CIZ; Start 337; Stop 361
tattcacaacaagaggtcatagtaa

SEQ ID NO: 298019 - DNA, 25 bp, Artificial
  probe
  misc_feature (1)..(25): SEQ ID NO: 1561; WAN024CIZ; Start 336; Stop 360
atattcacaacaagaggtcatagta

SEQ ID NO: 298020 - DNA, 25 bp, Artificial
  probe
  misc_feature (1)..(25): SEQ ID NO: 1561; WAN024CIZ; Start 543; Stop 567
agaaagttcaagtatcgcaaatcaa

SEQ ID NO: 298021 - DNA, 25 bp, Artificial
  probe
  misc_feature (1)..(25): SEQ ID NO: 1561; WAN024CIZ; Start 542; Stop 566
aagaaagttcaagtatcgcaaatca

SEQ ID NO: 298022 - DNA, 25 bp, Artificial
  probe
  misc_feature (1)..(25): SEQ ID NO: 1561; WAN024CIZ; Start 540; Stop 564
ggaagaaagttcaagtatcgcaaat

SEQ ID NO: 298023 - DNA, 25 bp, Artificial
  probe
  misc_feature (1)..(25): SEQ ID NO: 1561; WAN024CIZ; Start 537; Stop 561
taaggaagaaagttcaagtatcgca

SEQ ID NO: 298024 - DNA, 25 bp, Artificial
  probe
  misc_feature (1)..(25): SEQ ID NO: 1561; WAN024CIZ; Start 536; Stop 560
ctaaggaagaaagttcaagtatcgc

SEQ ID NO: 298025 - DNA, 25 bp, Artificial
  probe
  misc_feature (1)..(25): SEQ ID NO: 1561; WAN024CIZ; Start 544; Stop 568
gaaagttcaagtatcgcaaatcaaa

SEQ ID NO: 298026 - DNA, 25 bp, Artificial
  probe
  misc_feature (1)..(25): SEQ ID NO: 1561; WAN024CIZ; Start 541; Stop 565
gaagaaagttcaagtatcgcaaatc

SEQ ID NO: 298027 - DNA, 25 bp, Artificial
  probe
  misc_feature (1)..(25): SEQ ID NO: 1561; WAN024CIZ; Start 539; Stop 563
aggaagaaagttcaagtatcgcaaa

SEQ ID NO: 298028 - DNA, 25 bp, Artificial
  probe
  misc_feature (1)..(25): SEQ ID NO: 1561; WAN024CIZ; Start 538; Stop 562
aaggaagaaagttcaagtatcgcaa

SEQ ID NO: 298029 - DNA, 25 bp, Artificial
  probe
  misc_feature (1)..(25): SEQ ID NO: 1561; WAN024CIZ; Start 545; Stop 569
aaagttcaagtatcgcaaatcaaat

SEQ ID NO: 298030 - DNA, 25 bp, Artificial
  probe
  misc_feature (1)..(25): SEQ ID NO: 1561; WAN024CIZ; Start 452; Stop 476
ctatctcaaatgaatcaggcttact

SEQ ID NO: 298031 - DNA, 25 bp, Artificial
  probe
  misc_feature (1)..(25): SEQ ID NO: 1561; WAN024CIZ; Start 546; Stop 570
aagttcaagtatcgcaaatcaaatt

SEQ ID NO: 298032 - DNA, 25 bp, Artificial
  probe
  misc_feature (1)..(25): SEQ ID NO: 1561; WAN024CIZ; Start 535; Stop 559
tctaaggaagaaagttcaagtatcg

SEQ ID NO: 298033 - DNA, 25 bp, Artificial
  probe
  misc_feature (1)..(25): SEQ ID NO: 1561; WAN024CIZ; Start 455; Stop 479
tctcaaatgaatcaggcttacttat

SEQ ID NO: 298034 - DNA, 25 bp, Artificial
  probe
  misc_feature (1)..(25): SEQ ID NO: 1561; WAN024CIZ; Start 454; Stop 478
atctcaaatgaatcaggcttactta

SEQ ID NO: 298035 - DNA, 25 bp, Artificial
  probe
  misc_feature (1)..(25): SEQ ID NO: 1561; WAN024CIZ; Start 453; Stop 477
tatctcaaatgaatcaggcttactt

SEQ ID NO: 298036 - DNA, 25 bp, Artificial
  probe
  misc_feature (1)..(25): SEQ ID NO: 1561; WAN024CIZ; Start 309; Stop 333
ggagttcatctatcgaattctggaa

SEQ ID NO: 298037 - DNA, 25 bp, Artificial
  probe
  misc_feature (1)..(25): SEQ ID NO: 1561; WAN024CIZ; Start 307; Stop 331
atggagttcatctatcgaattctgg

SEQ ID NO: 298038 - DNA, 25 bp, Artificial
  probe
  misc_feature (1)..(25): SEQ ID NO: 1562; WAN024G62; Start 296; Stop 320
tcaacgcaatcaacgcttaactaat

SEQ ID NO: 298039 - DNA, 25 bp, Artificial
  probe
  misc_feature (1)..(25): SEQ ID NO: 1562; WAN024G62; Start 295; Stop 319
atcaacgcaatcaacgcttaactaa

SEQ ID NO: 298040 - DNA, 25 bp, Artificial
  probe
  misc_feature (1)..(25): SEQ ID NO: 1562; WAN024G62; Start 294; Stop 318
catcaacgcaatcaacgcttaacta

SEQ ID NO: 298041 - DNA, 25 bp, Artificial
  probe
  misc_feature (1)..(25): SEQ ID NO: 1562; WAN024G62; Start 109; Stop 133
tttaacgaagttgttcttgttggtg

SEQ ID NO: 298042 - DNA, 25 bp, Artificial
  probe
  misc_feature (1)..(25): SEQ ID NO: 1562; WAN024G62; Start 35; Stop 59
aacaagttaaagttgaagttggtca

SEQ ID NO: 298043 - DNA, 25 bp, Artificial
  probe
  misc_feature (1)..(25): SEQ ID NO: 1562; WAN024G62; Start 171; Stop 195
agctactgtagttggaactgttgaa

SEQ ID NO: 298044 - DNA, 25 bp, Artificial
  probe
  misc_feature (1)..(25): SEQ ID NO: 1562; WAN024G62; Start 34; Stop 58
aaacaagttaaagttgaagttggtc

SEQ ID NO: 298045 - DNA, 25 bp, Artificial
  probe
  misc_feature (1)..(25): SEQ ID NO: 1562; WAN024G62; Start 170; Stop 194
gagctactgtagttggaactgttga

SEQ ID NO: 298046 - DNA, 25 bp, Artificial
  probe
  misc_feature (1)..(25): SEQ ID NO: 1562; WAN024G62; Start 172; Stop 196
gctactgtagttggaactgttgaaa

SEQ ID NO: 298047 - DNA, 25 bp, Artificial
  probe
  misc_feature (1)..(25): SEQ ID NO: 1562; WAN024G62; Start 292; Stop 316
gtcatcaacgcaatcaacgcttaac

SEQ ID NO: 298048 - DNA, 25 bp, Artificial
  probe
  misc_feature (1)..(25): SEQ ID NO: 1562; WAN024G62; Start 262; Stop 286
caaggtcaccgtcaaccatatacaa

SEQ ID NO: 298049 - DNA, 25 bp, Artificial
  probe
  misc_feature (1)..(25): SEQ ID NO: 1562; WAN024G62; Start 260; Stop 284
aacaaggtcaccgtcaaccatatac

SEQ ID NO: 298050 - DNA, 25 bp, Artificial
  probe
  misc_feature (1)..(25): SEQ ID NO: 1562; WAN024G62; Start 293; Stop 317
tcatcaacgcaatcaacgcttaact

SEQ ID NO: 298051 - DNA, 25 bp, Artificial
  probe
  misc_feature (1)..(25): SEQ ID NO: 1562; WAN024G62; Start 291; Stop 315
tgtcatcaacgcaatcaacgcttaa

SEQ ID NO: 298052 - DNA, 25 bp, Artificial
  probe
  misc_feature (1)..(25): SEQ ID NO: 1562; WAN024G62; Start 169; Stop 193
ggagctactgtagttggaactgttg

SEQ ID NO: 298053 - DNA, 25 bp, Artificial
  probe
  misc_feature (1)..(25): SEQ ID NO: 1562; WAN024G62; Start 290; Stop 314
ttgtcatcaacgcaatcaacgctta

SEQ ID NO: 298054 - DNA, 25 bp, Artificial
  probe
  misc_feature (1)..(25): SEQ ID NO: 1562; WAN024G62; Start 85; Stop 109
gttgaagctggtcaagaagttactt

SEQ ID NO: 298055 - DNA, 25 bp, Artificial
  probe
  misc_feature (1)..(25): SEQ ID NO: 1562; WAN024G62; Start 160; Stop 184
cttgttgctggagctactgtagttg

SEQ ID NO: 298056 - DNA, 25 bp, Artificial
  probe
  misc_feature (1)..(25): SEQ ID NO: 1562; WAN024G62; Start 168; Stop 192
tggagctactgtagttggaactgtt

SEQ ID NO: 298057 - DNA, 25 bp, Artificial
  probe
  misc_feature (1)..(25): SEQ ID NO: 1562; WAN024G62; Start 197; Stop 221
aacaaggaaaacaaaagaaagtggt

SEQ ID NO: 298058 - DNA, 25 bp, Artificial
  probe
  misc_feature (1)..(25): SEQ ID NO: 1562; WAN024G62; Start 196; Stop 220
aaacaaggaaaacaaaagaaagtgg

SEQ ID NO: 298059 - DNA, 25 bp, Artificial
  probe
  misc_feature (1)..(25): SEQ ID NO: 1562; WAN024G62; Start 16; Stop 40
attatcaaaactggcggaaaacaag

SEQ ID NO: 298060 - DNA, 25 bp, Artificial
  probe
  misc_feature (1)..(25): SEQ ID NO: 1562; WAN024G62; Start 263; Stop 287
aaggtcaccgtcaaccatatacaaa

SEQ ID NO: 298061 - DNA, 25 bp, Artificial
  probe
  misc_feature (1)..(25): SEQ ID NO: 1562; WAN024G62; Start 259; Stop 283
aaacaaggtcaccgtcaaccatata

SEQ ID NO: 298062 - DNA, 25 bp, Artificial
  probe
  misc_feature (1)..(25): SEQ ID NO: 1562; WAN024G62; Start 258; Stop 282
taaacaaggtcaccgtcaaccatat

SEQ ID NO: 298063 - DNA, 25 bp, Artificial
  probe
  misc_feature (1)..(25): SEQ ID NO: 1562; WAN024G62; Start 15; Stop 39
aattatcaaaactggcggaaaacaa

SEQ ID NO: 298064 - DNA, 25 bp, Artificial
  probe
  misc_feature (1)..(25): SEQ ID NO: 1562; WAN024G62; Start 3; Stop 27
gagcacatacgcaattatcaaaact

SEQ ID NO: 298065 - DNA, 25 bp, Artificial
  probe
  misc_feature (1)..(25): SEQ ID NO: 1562; WAN024G62; Start 4; Stop 28
agcacatacgcaattatcaaaactg

SEQ ID NO: 298066 - DNA, 25 bp, Artificial
  probe
  misc_feature (1)..(25): SEQ ID NO: 1562; WAN024G62; Start 198; Stop 222
acaaggaaaacaaaagaaagtggtt

SEQ ID NO: 298067 - DNA, 25 bp, Artificial
  probe
  misc_feature (1)..(25): SEQ ID NO: 1562; WAN024G62; Start 108; Stop 132
ttttaacgaagttgttcttgttggt

SEQ ID NO: 298068 - DNA, 25 bp, Artificial
  probe
  misc_feature (1)..(25): SEQ ID NO: 1562; WAN024G62; Start 107; Stop 131
cttttaacgaagttgttcttgttgg

SEQ ID NO: 298069 - DNA, 25 bp, Artificial
  probe
  misc_feature (1)..(25): SEQ ID NO: 1562; WAN024G62; Start 14; Stop 38
caattatcaaaactggcggaaaaca

SEQ ID NO: 298070 - DNA, 25 bp, Artificial
  probe
  misc_feature (1)..(25): SEQ ID NO: 1562; WAN024G62; Start 267; Stop 291
tcaccgtcaaccatatacaaaagtt

SEQ ID NO: 298071 - DNA, 25 bp, Artificial
  probe
  misc_feature (1)..(25): SEQ ID NO: 1563; WAN024CRW; Start 341; Stop 365
ctccagccatattgatagtagaacc

SEQ ID NO: 298072 - DNA, 25 bp, Artificial
  probe
  misc_feature (1)..(25): SEQ ID NO: 1563; WAN024CRW; Start 344; Stop 368
cagccatattgatagtagaaccgag

SEQ ID NO: 298073 - DNA, 25 bp, Artificial
  probe
  misc_feature (1)..(25): SEQ ID NO: 1563; WAN024CRW; Start 346; Stop 370
gccatattgatagtagaaccgagtg

SEQ ID NO: 298074 - DNA, 25 bp, Artificial
  probe
  misc_feature (1)..(25): SEQ ID NO: 1563; WAN024CRW; Start 345; Stop 369
agccatattgatagtagaaccgagt

SEQ ID NO: 298075 - DNA, 25 bp, Artificial
  probe
  misc_feature (1)..(25): SEQ ID NO: 1563; WAN024CRW; Start 66; Stop 90
gaggacatctgtagaagagttaagg

SEQ ID NO: 298076 - DNA, 25 bp, Artificial
  probe
  misc_feature (1)..(25): SEQ ID NO: 1563; WAN024CRW; Start 340; Stop 364
actccagccatattgatagtagaac

SEQ ID NO: 298077 - DNA, 25 bp, Artificial
  probe
  misc_feature (1)..(25): SEQ ID NO: 1563; WAN024CRW; Start 65; Stop 89
agaggacatctgtagaagagttaag

SEQ ID NO: 298078 - DNA, 25 bp, Artificial
  probe
  misc_feature (1)..(25): SEQ ID NO: 1563; WAN024CRW; Start 343; Stop 367
ccagccatattgatagtagaaccga

SEQ ID NO: 298079 - DNA, 25 bp, Artificial
  probe
  misc_feature (1)..(25): SEQ ID NO: 1563; WAN024CRW; Start 342; Stop 366
tccagccatattgatagtagaaccg

SEQ ID NO: 298080 - DNA, 25 bp, Artificial
  probe
  misc_feature (1)..(25): SEQ ID NO: 1563; WAN024CRW; Start 64; Stop 88
aagaggacatctgtagaagagttaa

SEQ ID NO: 298081 - DNA, 25 bp, Artificial
  probe
  misc_feature (1)..(25): SEQ ID NO: 1563; WAN024CRW; Start 347; Stop 371
ccatattgatagtagaaccgagtgg

SEQ ID NO: 298082 - DNA, 25 bp, Artificial
  probe
  misc_feature (1)..(25): SEQ ID NO: 1563; WAN024CRW; Start 355; Stop 379
atagtagaaccgagtgggatagaaa

SEQ ID NO: 298083 - DNA, 25 bp, Artificial
  probe
  misc_feature (1)..(25): SEQ ID NO: 1563; WAN024CRW; Start 351; Stop 375
attgatagtagaaccgagtgggata

SEQ ID NO: 298084 - DNA, 25 bp, Artificial
  probe
  misc_feature (1)..(25): SEQ ID NO: 1563; WAN024CRW; Start 350; Stop 374
tattgatagtagaaccgagtgggat

SEQ ID NO: 298085 - DNA, 25 bp, Artificial
  probe
  misc_feature (1)..(25): SEQ ID NO: 1563; WAN024CRW; Start 349; Stop 373
atattgatagtagaaccgagtggga

SEQ ID NO: 298086 - DNA, 25 bp, Artificial
  probe
  misc_feature (1)..(25): SEQ ID NO: 1563; WAN024CRW; Start 348; Stop 372
catattgatagtagaaccgagtggg

SEQ ID NO: 298087 - DNA, 25 bp, Artificial
  probe
  misc_feature (1)..(25): SEQ ID NO: 1563; WAN024CRW; Start 354; Stop 378
gatagtagaaccgagtgggatagaa

SEQ ID NO: 298088 - DNA, 25 bp, Artificial
  probe
  misc_feature (1)..(25): SEQ ID NO: 1563; WAN024CRW; Start 352; Stop 376
ttgatagtagaaccgagtgggatag

SEQ ID NO: 298089 - DNA, 25 bp, Artificial
  probe
  misc_feature (1)..(25): SEQ ID NO: 1563; WAN024CRW; Start 320; Stop 344
aaaggttaatggtaatcgctactcc

SEQ ID NO: 298090 - DNA, 25 bp, Artificial
  probe
  misc_feature (1)..(25): SEQ ID NO: 1563; WAN024CRW; Start 356; Stop 380
tagtagaaccgagtgggatagaaac

SEQ ID NO: 298091 - DNA, 25 bp, Artificial
  probe
  misc_feature (1)..(25): SEQ ID NO: 1563; WAN024CRW; Start 321; Stop 345
aaggttaatggtaatcgctactcca

SEQ ID NO: 298092 - DNA, 25 bp, Artificial
  probe
  misc_feature (1)..(25): SEQ ID NO: 1563; WAN024CRW; Start 147; Stop 171
tatggcaatatcgttagaaataccg

SEQ ID NO: 298093 - DNA, 25 bp, Artificial
  probe
  misc_feature (1)..(25): SEQ ID NO: 1563; WAN024CRW; Start 362; Stop 386
aaccgagtgggatagaaacagaata

SEQ ID NO: 298094 - DNA, 25 bp, Artificial
  probe
  misc_feature (1)..(25): SEQ ID NO: 1563; WAN024CRW; Start 60; Stop 84
ggtaaagaggacatctgtagaagag

SEQ ID NO: 298095 - DNA, 25 bp, Artificial
  probe
  misc_feature (1)..(25): SEQ ID NO: 1563; WAN024CRW; Start 339; Stop 363
tactccagccatattgatagtagaa

SEQ ID NO: 298096 - DNA, 25 bp, Artificial
  probe
  misc_feature (1)..(25): SEQ ID NO: 1563; WAN024CRW; Start 353; Stop 377
tgatagtagaaccgagtgggataga

SEQ ID NO: 298097 - DNA, 25 bp, Artificial
  probe
  misc_feature (1)..(25): SEQ ID NO: 1563; WAN024CRW; Start 74; Stop 98
ctgtagaagagttaagggctgtttc

SEQ ID NO: 298098 - DNA, 25 bp, Artificial
  probe
  misc_feature (1)..(25): SEQ ID NO: 1563; WAN024CRW; Start 61; Stop 85
gtaaagaggacatctgtagaagagt

SEQ ID NO: 298099 - DNA, 25 bp, Artificial
  probe
  misc_feature (1)..(25): SEQ ID NO: 1563; WAN024CRW; Start 363; Stop 387
accgagtgggatagaaacagaatag

SEQ ID NO: 298100 - DNA, 25 bp, Artificial
  probe
  misc_feature (1)..(25): SEQ ID NO: 1563; WAN024CRW; Start 72; Stop 96
atctgtagaagagttaagggctgtt

SEQ ID NO: 298101 - DNA, 25 bp, Artificial
  probe
  misc_feature (1)..(25): SEQ ID NO: 1563; WAN024CRW; Start 322; Stop 346
aggttaatggtaatcgctactccag

SEQ ID NO: 298102 - DNA, 25 bp, Artificial
  probe
  misc_feature (1)..(25): SEQ ID NO: 1563; WAN024CRW; Start 76; Stop 100
gtagaagagttaagggctgtttcac

SEQ ID NO: 298103 - DNA, 25 bp, Artificial
  probe
  misc_feature (1)..(25): SEQ ID NO: 1563; WAN024CRW; Start 67; Stop 91
aggacatctgtagaagagttaaggg

SEQ ID NO: 298104 - DNA, 25 bp, Artificial
  probe
  misc_feature (1)..(25): SEQ ID NO: 1564; WAN024FTG; Start 949; Stop 973
ttgttaggtggagagcagtatattc

SEQ ID NO: 298105 - DNA, 25 bp, Artificial
  probe
  misc_feature (1)..(25): SEQ ID NO: 1564; WAN024FTG; Start 951; Stop 975
gttaggtggagagcagtatattcag

SEQ ID NO: 298106 - DNA, 25 bp, Artificial
  probe
  misc_feature (1)..(25): SEQ ID NO: 1564; WAN024FTG; Start 945; Stop 969
attattgttaggtggagagcagtat

SEQ ID NO: 298107 - DNA, 25 bp, Artificial
  probe
  misc_feature (1)..(25): SEQ ID NO: 1564; WAN024FTG; Start 950; Stop 974
tgttaggtggagagcagtatattca

SEQ ID NO: 298108 - DNA, 25 bp, Artificial
  probe
  misc_feature (1)..(25): SEQ ID NO: 1564; WAN024FTG; Start 948; Stop 972
attgttaggtggagagcagtatatt

SEQ ID NO: 298109 - DNA, 25 bp, Artificial
  probe
  misc_feature (1)..(25): SEQ ID NO: 1564; WAN024FTG; Start 943; Stop 967
atattattgttaggtggagagcagt

SEQ ID NO: 298110 - DNA, 25 bp, Artificial
  probe
  misc_feature (1)..(25): SEQ ID NO: 1564; WAN024FTG; Start 324; Stop 348
ccgattagagcagttaagttcagaa

SEQ ID NO: 298111 - DNA, 25 bp, Artificial
  probe
  misc_feature (1)..(25): SEQ ID NO: 1564; WAN024FTG; Start 322; Stop 346
ttccgattagagcagttaagttcag

SEQ ID NO: 298112 - DNA, 25 bp, Artificial
  probe
  misc_feature (1)..(25): SEQ ID NO: 1564; WAN024FTG; Start 952; Stop 976
ttaggtggagagcagtatattcagg

SEQ ID NO: 298113 - DNA, 25 bp, Artificial
  probe
  misc_feature (1)..(25): SEQ ID NO: 1564; WAN024FTG; Start 944; Stop 968
tattattgttaggtggagagcagta

SEQ ID NO: 298114 - DNA, 25 bp, Artificial
  probe
  misc_feature (1)..(25): SEQ ID NO: 1564; WAN024FTG; Start 946; Stop 970
ttattgttaggtggagagcagtata

SEQ ID NO: 298115 - DNA, 25 bp, Artificial
  probe
  misc_feature (1)..(25): SEQ ID NO: 1564; WAN024FTG; Start 323; Stop 347
tccgattagagcagttaagttcaga

SEQ ID NO: 298116 - DNA, 25 bp, Artificial
  probe
  misc_feature (1)..(25): SEQ ID NO: 1564; WAN024FTG; Start 775; Stop 799
ttatcagtcgttacttcagtgagtt

SEQ ID NO: 298117 - DNA, 25 bp, Artificial
  probe
  misc_feature (1)..(25): SEQ ID NO: 1564; WAN024FTG; Start 947; Stop 971
tattgttaggtggagagcagtatat

SEQ ID NO: 298118 - DNA, 25 bp, Artificial
  probe
  misc_feature (1)..(25): SEQ ID NO: 1564; WAN024FTG; Start 774; Stop 798
attatcagtcgttacttcagtgagt

SEQ ID NO: 298119 - DNA, 25 bp, Artificial
  probe
  misc_feature (1)..(25): SEQ ID NO: 1564; WAN024FTG; Start 144; Stop 168
ttcatctattggttcttatggtgtt

SEQ ID NO: 298120 - DNA, 25 bp, Artificial
  probe
  misc_feature (1)..(25): SEQ ID NO: 1564; WAN024FTG; Start 941; Stop 965
gtatattattgttaggtggagagca

SEQ ID NO: 298121 - DNA, 25 bp, Artificial
  probe
  misc_feature (1)..(25): SEQ ID NO: 1564; WAN024FTG; Start 942; Stop 966
tatattattgttaggtggagagcag

SEQ ID NO: 298122 - DNA, 25 bp, Artificial
  probe
  misc_feature (1)..(25): SEQ ID NO: 1564; WAN024FTG; Start 940; Stop 964
agtatattattgttaggtggagagc

SEQ ID NO: 298123 - DNA, 25 bp, Artificial
  probe
  misc_feature (1)..(25): SEQ ID NO: 1564; WAN024FTG; Start 773; Stop 797
tattatcagtcgttacttcagtgag

SEQ ID NO: 298124 - DNA, 25 bp, Artificial
  probe
  misc_feature (1)..(25): SEQ ID NO: 1564; WAN024FTG; Start 717; Stop 741
taatggaaatgatgcggtaggtatt

SEQ ID NO: 298125 - DNA, 25 bp, Artificial
  probe
  misc_feature (1)..(25): SEQ ID NO: 1564; WAN024FTG; Start 315; Stop 339
aatgagtttccgattagagcagtta

SEQ ID NO: 298126 - DNA, 25 bp, Artificial
  probe
  misc_feature (1)..(25): SEQ ID NO: 1564; WAN024FTG; Start 772; Stop 796
ttattatcagtcgttacttcagtga

SEQ ID NO: 298127 - DNA, 25 bp, Artificial
  probe
  misc_feature (1)..(25): SEQ ID NO: 1564; WAN024FTG; Start 716; Stop 740
ttaatggaaatgatgcggtaggtat

SEQ ID NO: 298128 - DNA, 25 bp, Artificial
  probe
  misc_feature (1)..(25): SEQ ID NO: 1564; WAN024FTG; Start 320; Stop 344
gtttccgattagagcagttaagttc

SEQ ID NO: 298129 - DNA, 25 bp, Artificial
  probe
  misc_feature (1)..(25): SEQ ID NO: 1564; WAN024FTG; Start 316; Stop 340
atgagtttccgattagagcagttaa

SEQ ID NO: 298130 - DNA, 25 bp, Artificial
  probe
  misc_feature (1)..(25): SEQ ID NO: 1564; WAN024FTG; Start 732; Stop 756
ggtaggtatttactcaatcgcatca

SEQ ID NO: 298131 - DNA, 25 bp, Artificial
  probe
  misc_feature (1)..(25): SEQ ID NO: 1564; WAN024FTG; Start 321; Stop 345
tttccgattagagcagttaagttca

SEQ ID NO: 298132 - DNA, 25 bp, Artificial
  probe
  misc_feature (1)..(25): SEQ ID NO: 1564; WAN024FTG; Start 319; Stop 343
agtttccgattagagcagttaagtt

SEQ ID NO: 298133 - DNA, 25 bp, Artificial
  probe
  misc_feature (1)..(25): SEQ ID NO: 1564; WAN024FTG; Start 647; Stop 671
ggtatttatttgcttcgttacttgc

SEQ ID NO: 298134 - DNA, 25 bp, Artificial
  probe
  misc_feature (1)..(25): SEQ ID NO: 1564; WAN024FTG; Start 318; Stop 342
gagtttccgattagagcagttaagt

SEQ ID NO: 298135 - DNA, 25 bp, Artificial
  probe
  misc_feature (1)..(25): SEQ ID NO: 1564; WAN024FTG; Start 317; Stop 341
tgagtttccgattagagcagttaag

SEQ ID NO: 298136 - DNA, 25 bp, Artificial
  probe
  misc_feature (1)..(25): SEQ ID NO: 1564; WAN024FTG; Start 325; Stop 349
cgattagagcagttaagttcagaaa

SEQ ID NO: 298137 - DNA, 25 bp, Artificial
  probe
  misc_feature (1)..(25): SEQ ID NO: 1565; WAN024DVH; Start 110; Stop 134
tccatcactacaatatcggattctt

SEQ ID NO: 298138 - DNA, 25 bp, Artificial
  probe
  misc_feature (1)..(25): SEQ ID NO: 1565; WAN024DVH; Start 217; Stop 241
tcctttcgtcaaatctgtttctact

SEQ ID NO: 298139 - DNA, 25 bp, Artificial
  probe
  misc_feature (1)..(25): SEQ ID NO: 1565; WAN024DVH; Start 216; Stop 240
ttcctttcgtcaaatctgtttctac

SEQ ID NO: 298140 - DNA, 25 bp, Artificial
  probe
  misc_feature (1)..(25): SEQ ID NO: 1565; WAN024DVH; Start 215; Stop 239
gttcctttcgtcaaatctgtttcta

SEQ ID NO: 298141 - DNA, 25 bp, Artificial
  probe
  misc_feature (1)..(25): SEQ ID NO: 1565; WAN024DVH; Start 82; Stop 106
ttctccctctacaacatttccatta

SEQ ID NO: 298142 - DNA, 25 bp, Artificial
  probe
  misc_feature (1)..(25): SEQ ID NO: 1565; WAN024DVH; Start 83; Stop 107
tctccctctacaacatttccattaa

SEQ ID NO: 298143 - DNA, 25 bp, Artificial
  probe
  misc_feature (1)..(25): SEQ ID NO: 1565; WAN024DVH; Start 213; Stop 237
ctgttcctttcgtcaaatctgtttc

SEQ ID NO: 298144 - DNA, 25 bp, Artificial
  probe
  misc_feature (1)..(25): SEQ ID NO: 1565; WAN024DVH; Start 214; Stop 238
tgttcctttcgtcaaatctgtttct

SEQ ID NO: 298145 - DNA, 25 bp, Artificial
  probe
  misc_feature (1)..(25): SEQ ID NO: 1565; WAN024DVH; Start 218; Stop 242
cctttcgtcaaatctgtttctacta

SEQ ID NO: 298146 - DNA, 25 bp, Artificial
  probe
  misc_feature (1)..(25): SEQ ID NO: 1565; WAN024DVH; Start 81; Stop 105
gttctccctctacaacatttccatt

SEQ ID NO: 298147 - DNA, 25 bp, Artificial
  probe
  misc_feature (1)..(25): SEQ ID NO: 1565; WAN024DVH; Start 111; Stop 135
ccatcactacaatatcggattcttt

SEQ ID NO: 298148 - DNA, 25 bp, Artificial
  probe
  misc_feature (1)..(25): SEQ ID NO: 1565; WAN024DVH; Start 212; Stop 236
cctgttcctttcgtcaaatctgttt

SEQ ID NO: 298149 - DNA, 25 bp, Artificial
  probe
  misc_feature (1)..(25): SEQ ID NO: 1565; WAN024DVH; Start 112; Stop 136
catcactacaatatcggattctttg

SEQ ID NO: 298150 - DNA, 25 bp, Artificial
  probe
  misc_feature (1)..(25): SEQ ID NO: 1565; WAN024DVH; Start 219; Stop 243
ctttcgtcaaatctgtttctactag

SEQ ID NO: 298151 - DNA, 25 bp, Artificial
  probe
  misc_feature (1)..(25): SEQ ID NO: 1565; WAN024DVH; Start 114; Stop 138
tcactacaatatcggattctttgat

SEQ ID NO: 298152 - DNA, 25 bp, Artificial
  probe
  misc_feature (1)..(25): SEQ ID NO: 1565; WAN024DVH; Start 113; Stop 137
atcactacaatatcggattctttga

SEQ ID NO: 298153 - DNA, 25 bp, Artificial
  probe
  misc_feature (1)..(25): SEQ ID NO: 1565; WAN024DVH; Start 84; Stop 108
ctccctctacaacatttccattaat

SEQ ID NO: 298154 - DNA, 25 bp, Artificial
  probe
  misc_feature (1)..(25): SEQ ID NO: 1565; WAN024DVH; Start 80; Stop 104
cgttctccctctacaacatttccat

SEQ ID NO: 298155 - DNA, 25 bp, Artificial
  probe
  misc_feature (1)..(25): SEQ ID NO: 1565; WAN024DVH; Start 211; Stop 235
acctgttcctttcgtcaaatctgtt

SEQ ID NO: 298156 - DNA, 25 bp, Artificial
  probe
  misc_feature (1)..(25): SEQ ID NO: 1565; WAN024DVH; Start 104; Stop 128
ttaatatccatcactacaatatcgg

SEQ ID NO: 298157 - DNA, 25 bp, Artificial
  probe
  misc_feature (1)..(25): SEQ ID NO: 1565; WAN024DVH; Start 105; Stop 129
taatatccatcactacaatatcgga

SEQ ID NO: 298158 - DNA, 25 bp, Artificial
  probe
  misc_feature (1)..(25): SEQ ID NO: 1565; WAN024DVH; Start 115; Stop 139
cactacaatatcggattctttgatt

SEQ ID NO: 298159 - DNA, 25 bp, Artificial
  probe
  misc_feature (1)..(25): SEQ ID NO: 1565; WAN024DVH; Start 109; Stop 133
atccatcactacaatatcggattct

SEQ ID NO: 298160 - DNA, 25 bp, Artificial
  probe
  misc_feature (1)..(25): SEQ ID NO: 1565; WAN024DVH; Start 77; Stop 101
aagcgttctccctctacaacatttc

SEQ ID NO: 298161 - DNA, 25 bp, Artificial
  probe
  misc_feature (1)..(25): SEQ ID NO: 1565; WAN024DVH; Start 119; Stop 143
acaatatcggattctttgatttcaa

SEQ ID NO: 298162 - DNA, 25 bp, Artificial
  probe
  misc_feature (1)..(25): SEQ ID NO: 1565; WAN024DVH; Start 85; Stop 109
tccctctacaacatttccattaata

SEQ ID NO: 298163 - DNA, 25 bp, Artificial
  probe
  misc_feature (1)..(25): SEQ ID NO: 1565; WAN024DVH; Start 76; Stop 100
caagcgttctccctctacaacattt

SEQ ID NO: 298164 - DNA, 25 bp, Artificial
  probe
  misc_feature (1)..(25): SEQ ID NO: 1565; WAN024DVH; Start 210; Stop 234
cacctgttcctttcgtcaaatctgt

SEQ ID NO: 298165 - DNA, 25 bp, Artificial
  probe
  misc_feature (1)..(25): SEQ ID NO: 1565; WAN024DVH; Start 9; Stop 33
ggataattgcatcgatatcatcacg

SEQ ID NO: 298166 - DNA, 25 bp, Artificial
  probe
  misc_feature (1)..(25): SEQ ID NO: 1565; WAN024DVH; Start 8; Stop 32
tggataattgcatcgatatcatcac

SEQ ID NO: 298167 - DNA, 25 bp, Artificial
  probe
  misc_feature (1)..(25): SEQ ID NO: 1565; WAN024DVH; Start 116; Stop 140
actacaatatcggattctttgattt

SEQ ID NO: 298168 - DNA, 25 bp, Artificial
  probe
  misc_feature (1)..(25): SEQ ID NO: 1565; WAN024DVH; Start 26; Stop 50
tcatcacgagtttgatattgaatca

SEQ ID NO: 298169 - DNA, 25 bp, Artificial
  probe
  misc_feature (1)..(25): SEQ ID NO: 1565; WAN024DVH; Start 118; Stop 142
tacaatatcggattctttgatttca

SEQ ID NO: 298170 - DNA, 25 bp, Artificial
  probe
  misc_feature (1)..(25): SEQ ID NO: 1566; WAN024CIU; Start 281; Stop 305
tagatgaacttgtagaatgcggaac

SEQ ID NO: 298171 - DNA, 25 bp, Artificial
  probe
  misc_feature (1)..(25): SEQ ID NO: 1566; WAN024CIU; Start 280; Stop 304
gtagatgaacttgtagaatgcggaa

SEQ ID NO: 298172 - DNA, 25 bp, Artificial
  probe
  misc_feature (1)..(25): SEQ ID NO: 1566; WAN024CIU; Start 343; Stop 367
tatgatggcttagttgtcagtgaat

SEQ ID NO: 298173 - DNA, 25 bp, Artificial
  probe
  misc_feature (1)..(25): SEQ ID NO: 1566; WAN024CIU; Start 342; Stop 366
atatgatggcttagttgtcagtgaa

SEQ ID NO: 298174 - DNA, 25 bp, Artificial
  probe
  misc_feature (1)..(25): SEQ ID NO: 1566; WAN024CIU; Start 339; Stop 363
aagatatgatggcttagttgtcagt

SEQ ID NO: 298175 - DNA, 25 bp, Artificial
  probe
  misc_feature (1)..(25): SEQ ID NO: 1566; WAN024CIU; Start 341; Stop 365
gatatgatggcttagttgtcagtga

SEQ ID NO: 298176 - DNA, 25 bp, Artificial
  probe
  misc_feature (1)..(25): SEQ ID NO: 1566; WAN024CIU; Start 340; Stop 364
agatatgatggcttagttgtcagtg

SEQ ID NO: 298177 - DNA, 25 bp, Artificial
  probe
  misc_feature (1)..(25): SEQ ID NO: 1566; WAN024CIU; Start 338; Stop 362
caagatatgatggcttagttgtcag

SEQ ID NO: 298178 - DNA, 25 bp, Artificial
  probe
  misc_feature (1)..(25): SEQ ID NO: 1566; WAN024CIU; Start 344; Stop 368
atgatggcttagttgtcagtgaatt

SEQ ID NO: 298179 - DNA, 25 bp, Artificial
  probe
  misc_feature (1)..(25): SEQ ID NO: 1566; WAN024CIU; Start 243; Stop 267
acctcaagaaccatatattactgct

SEQ ID NO: 298180 - DNA, 25 bp, Artificial
  probe
  misc_feature (1)..(25): SEQ ID NO: 1566; WAN024CIU; Start 242; Stop 266
cacctcaagaaccatatattactgc

SEQ ID NO: 298181 - DNA, 25 bp, Artificial
  probe
  misc_feature (1)..(25): SEQ ID NO: 1566; WAN024CIU; Start 471; Stop 495
tggtacaacattatcaggttacaca

SEQ ID NO: 298182 - DNA, 25 bp, Artificial
  probe
  misc_feature (1)..(25): SEQ ID NO: 1566; WAN024CIU; Start 475; Stop 499
acaacattatcaggttacacaagta

SEQ ID NO: 298183 - DNA, 25 bp, Artificial
  probe
  misc_feature (1)..(25): SEQ ID NO: 1566; WAN024CIU; Start 474; Stop 498
tacaacattatcaggttacacaagt

SEQ ID NO: 298184 - DNA, 25 bp, Artificial
  probe
  misc_feature (1)..(25): SEQ ID NO: 1566; WAN024CIU; Start 279; Stop 303
agtagatgaacttgtagaatgcgga

SEQ ID NO: 298185 - DNA, 25 bp, Artificial
  probe
  misc_feature (1)..(25): SEQ ID NO: 1566; WAN024CIU; Start 241; Stop 265
ccacctcaagaaccatatattactg

SEQ ID NO: 298186 - DNA, 25 bp, Artificial
  probe
  misc_feature (1)..(25): SEQ ID NO: 1566; WAN024CIU; Start 240; Stop 264
tccacctcaagaaccatatattact

SEQ ID NO: 298187 - DNA, 25 bp, Artificial
  probe
  misc_feature (1)..(25): SEQ ID NO: 1566; WAN024CIU; Start 472; Stop 496
ggtacaacattatcaggttacacaa

SEQ ID NO: 298188 - DNA, 25 bp, Artificial
  probe
  misc_feature (1)..(25): SEQ ID NO: 1566; WAN024CIU; Start 470; Stop 494
ttggtacaacattatcaggttacac

SEQ ID NO: 298189 - DNA, 25 bp, Artificial
  probe
  misc_feature (1)..(25): SEQ ID NO: 1566; WAN024CIU; Start 247; Stop 271
caagaaccatatattactgctacga

SEQ ID NO: 298190 - DNA, 25 bp, Artificial
  probe
  misc_feature (1)..(25): SEQ ID NO: 1566; WAN024CIU; Start 246; Stop 270
tcaagaaccatatattactgctacg

SEQ ID NO: 298191 - DNA, 25 bp, Artificial
  probe
  misc_feature (1)..(25): SEQ ID NO: 1566; WAN024CIU; Start 478; Stop 502
acattatcaggttacacaagtacaa

SEQ ID NO: 298192 - DNA, 25 bp, Artificial
  probe
  misc_feature (1)..(25): SEQ ID NO: 1566; WAN024CIU; Start 235; Stop 259
gattatccacctcaagaaccatata

SEQ ID NO: 298193 - DNA, 25 bp, Artificial
  probe
  misc_feature (1)..(25): SEQ ID NO: 1566; WAN024CIU; Start 477; Stop 501
aacattatcaggttacacaagtaca

SEQ ID NO: 298194 - DNA, 25 bp, Artificial
  probe
  misc_feature (1)..(25): SEQ ID NO: 1566; WAN024CIU; Start 402; Stop 426
attgctgatggcggatgtaagtaat

SEQ ID NO: 298195 - DNA, 25 bp, Artificial
  probe
  misc_feature (1)..(25): SEQ ID NO: 1566; WAN024CIU; Start 619; Stop 643
ttaggtgttaccagtgtagtcattg

SEQ ID NO: 298196 - DNA, 25 bp, Artificial
  probe
  misc_feature (1)..(25): SEQ ID NO: 1566; WAN024CIU; Start 333; Stop 357
aagaccaagatatgatggcttagtt

SEQ ID NO: 298197 - DNA, 25 bp, Artificial
  probe
  misc_feature (1)..(25): SEQ ID NO: 1566; WAN024CIU; Start 334; Stop 358
agaccaagatatgatggcttagttg

SEQ ID NO: 298198 - DNA, 25 bp, Artificial
  probe
  misc_feature (1)..(25): SEQ ID NO: 1566; WAN024CIU; Start 480; Stop 504
attatcaggttacacaagtacaagt

SEQ ID NO: 298199 - DNA, 25 bp, Artificial
  probe
  misc_feature (1)..(25): SEQ ID NO: 1566; WAN024CIU; Start 250; Stop 274
gaaccatatattactgctacgatga

SEQ ID NO: 298200 - DNA, 25 bp, Artificial
  probe
  misc_feature (1)..(25): SEQ ID NO: 1566; WAN024CIU; Start 249; Stop 273
agaaccatatattactgctacgatg

SEQ ID NO: 298201 - DNA, 25 bp, Artificial
  probe
  misc_feature (1)..(25): SEQ ID NO: 1566; WAN024CIU; Start 337; Stop 361
ccaagatatgatggcttagttgtca

SEQ ID NO: 298202 - DNA, 25 bp, Artificial
  probe
  misc_feature (1)..(25): SEQ ID NO: 1566; WAN024CIU; Start 336; Stop 360
accaagatatgatggcttagttgtc

SEQ ID NO: 298203 - DNA, 25 bp, Artificial
  probe
  misc_feature (1)..(25): SEQ ID NO: 1567; WAN024FW4; Start 86; Stop 110
aactgtcagaatttaaggctccaaa

SEQ ID NO: 298204 - DNA, 25 bp, Artificial
  probe
  misc_feature (1)..(25): SEQ ID NO: 1567; WAN024FW4; Start 85; Stop 109
aaactgtcagaatttaaggctccaa

SEQ ID NO: 298205 - DNA, 25 bp, Artificial
  probe
  misc_feature (1)..(25): SEQ ID NO: 1567; WAN024FW4; Start 84; Stop 108
taaactgtcagaatttaaggctcca

SEQ ID NO: 298206 - DNA, 25 bp, Artificial
  probe
  misc_feature (1)..(25): SEQ ID NO: 1567; WAN024FW4; Start 83; Stop 107
ataaactgtcagaatttaaggctcc

SEQ ID NO: 298207 - DNA, 25 bp, Artificial
  probe
  misc_feature (1)..(25): SEQ ID NO: 1567; WAN024FW4; Start 80; Stop 104
cgaataaactgtcagaatttaaggc

SEQ ID NO: 298208 - DNA, 25 bp, Artificial
  probe
  misc_feature (1)..(25): SEQ ID NO: 1567; WAN024FW4; Start 636; Stop 660
agtaaatgacatccataaactggga

SEQ ID NO: 298209 - DNA, 25 bp, Artificial
  probe
  misc_feature (1)..(25): SEQ ID NO: 1567; WAN024FW4; Start 82; Stop 106
aataaactgtcagaatttaaggctc

SEQ ID NO: 298210 - DNA, 25 bp, Artificial
  probe
  misc_feature (1)..(25): SEQ ID NO: 1567; WAN024FW4; Start 81; Stop 105
gaataaactgtcagaatttaaggct

SEQ ID NO: 298211 - DNA, 25 bp, Artificial
  probe
  misc_feature (1)..(25): SEQ ID NO: 1567; WAN024FW4; Start 79; Stop 103
acgaataaactgtcagaatttaagg

SEQ ID NO: 298212 - DNA, 25 bp, Artificial
  probe
  misc_feature (1)..(25): SEQ ID NO: 1567; WAN024FW4; Start 635; Stop 659
tagtaaatgacatccataaactggg

SEQ ID NO: 298213 - DNA, 25 bp, Artificial
  probe
  misc_feature (1)..(25): SEQ ID NO: 1567; WAN024FW4; Start 70; Stop 94
tgtaatcttacgaataaactgtcag

SEQ ID NO: 298214 - DNA, 25 bp, Artificial
  probe
  misc_feature (1)..(25): SEQ ID NO: 1567; WAN024FW4; Start 614; Stop 638
cactagacaacattgtgaatatagt

SEQ ID NO: 298215 - DNA, 25 bp, Artificial
  probe
  misc_feature (1)..(25): SEQ ID NO: 1567; WAN024FW4; Start 75; Stop 99
tcttacgaataaactgtcagaattt

SEQ ID NO: 298216 - DNA, 25 bp, Artificial
  probe
  misc_feature (1)..(25): SEQ ID NO: 1567; WAN024FW4; Start 71; Stop 95
gtaatcttacgaataaactgtcaga

SEQ ID NO: 298217 - DNA, 25 bp, Artificial
  probe
  misc_feature (1)..(25): SEQ ID NO: 1567; WAN024FW4; Start 575; Stop 599
ttcgagaaacagaatactccttaaa

SEQ ID NO: 298218 - DNA, 25 bp, Artificial
  probe
  misc_feature (1)..(25): SEQ ID NO: 1567; WAN024FW4; Start 69; Stop 93
ttgtaatcttacgaataaactgtca

SEQ ID NO: 298219 - DNA, 25 bp, Artificial
  probe
  misc_feature (1)..(25): SEQ ID NO: 1567; WAN024FW4; Start 576; Stop 600
tcgagaaacagaatactccttaaat

SEQ ID NO: 298220 - DNA, 25 bp, Artificial
  probe
  misc_feature (1)..(25): SEQ ID NO: 1567; WAN024FW4; Start 74; Stop 98
atcttacgaataaactgtcagaatt

SEQ ID NO: 298221 - DNA, 25 bp, Artificial
  probe
  misc_feature (1)..(25): SEQ ID NO: 1567; WAN024FW4; Start 73; Stop 97
aatcttacgaataaactgtcagaat

SEQ ID NO: 298222 - DNA, 25 bp, Artificial
  probe
  misc_feature (1)..(25): SEQ ID NO: 1567; WAN024FW4; Start 577; Stop 601
cgagaaacagaatactccttaaata

SEQ ID NO: 298223 - DNA, 25 bp, Artificial
  probe
  misc_feature (1)..(25): SEQ ID NO: 1567; WAN024FW4; Start 574; Stop 598
attcgagaaacagaatactccttaa

SEQ ID NO: 298224 - DNA, 25 bp, Artificial
  probe
  misc_feature (1)..(25): SEQ ID NO: 1567; WAN024FW4; Start 72; Stop 96
taatcttacgaataaactgtcagaa

SEQ ID NO: 298225 - DNA, 25 bp, Artificial
  probe
  misc_feature (1)..(25): SEQ ID NO: 1567; WAN024FW4; Start 637; Stop 661
gtaaatgacatccataaactgggat

SEQ ID NO: 298226 - DNA, 25 bp, Artificial
  probe
  misc_feature (1)..(25): SEQ ID NO: 1567; WAN024FW4; Start 634; Stop 658
atagtaaatgacatccataaactgg

SEQ ID NO: 298227 - DNA, 25 bp, Artificial
  probe
  misc_feature (1)..(25): SEQ ID NO: 1567; WAN024FW4; Start 516; Stop 540
agtggatgattattttcttgttcag

SEQ ID NO: 298228 - DNA, 25 bp, Artificial
  probe
  misc_feature (1)..(25): SEQ ID NO: 1567; WAN024FW4; Start 626; Stop 650
ttgtgaatatagtaaatgacatcca

SEQ ID NO: 298229 - DNA, 25 bp, Artificial
  probe
  misc_feature (1)..(25): SEQ ID NO: 1567; WAN024FW4; Start 68; Stop 92
tttgtaatcttacgaataaactgtc

SEQ ID NO: 298230 - DNA, 25 bp, Artificial
  probe
  misc_feature (1)..(25): SEQ ID NO: 1567; WAN024FW4; Start 639; Stop 663
aaatgacatccataaactgggatat

SEQ ID NO: 298231 - DNA, 25 bp, Artificial
  probe
  misc_feature (1)..(25): SEQ ID NO: 1567; WAN024FW4; Start 627; Stop 651
tgtgaatatagtaaatgacatccat

SEQ ID NO: 298232 - DNA, 25 bp, Artificial
  probe
  misc_feature (1)..(25): SEQ ID NO: 1567; WAN024FW4; Start 78; Stop 102
tacgaataaactgtcagaatttaag

SEQ ID NO: 298233 - DNA, 25 bp, Artificial
  probe
  misc_feature (1)..(25): SEQ ID NO: 1567; WAN024FW4; Start 76; Stop 100
cttacgaataaactgtcagaattta

SEQ ID NO: 298234 - DNA, 25 bp, Artificial
  probe
  misc_feature (1)..(25): SEQ ID NO: 1567; WAN024FW4; Start 615; Stop 639
actagacaacattgtgaatatagta

SEQ ID NO: 298235 - DNA, 25 bp, Artificial
  probe
  misc_feature (1)..(25): SEQ ID NO: 1567; WAN024FW4; Start 642; Stop 666
tgacatccataaactgggatataaa

SEQ ID NO: 298236 - DNA, 25 bp, Artificial
  probe
  misc_feature (1)..(25): SEQ ID NO: 1568; WAN024CNB-5; Start 1561; Stop 1585
aacttaatagacactacctcagcat

SEQ ID NO: 298237 - DNA, 25 bp, Artificial
  probe
  misc_feature (1)..(25): SEQ ID NO: 1568; WAN024CNB-5; Start 751; Stop 775
gcagcagacaatctatcttctaatg

SEQ ID NO: 298238 - DNA, 25 bp, Artificial
  probe
  misc_feature (1)..(25): SEQ ID NO: 1568; WAN024CNB-5; Start 750; Stop 774
agcagcagacaatctatcttctaat

SEQ ID NO: 298239 - DNA, 25 bp, Artificial
  probe
  misc_feature (1)..(25): SEQ ID NO: 1568; WAN024CNB-5; Start 1560; Stop 1584
taacttaatagacactacctcagca

SEQ ID NO: 298240 - DNA, 25 bp, Artificial
  probe
  misc_feature (1)..(25): SEQ ID NO: 1568; WAN024CNB-5; Start 749; Stop 773
tagcagcagacaatctatcttctaa

SEQ ID NO: 298241 - DNA, 25 bp, Artificial
  probe
  misc_feature (1)..(25): SEQ ID NO: 1568; WAN024CNB-5; Start 1562; Stop 1586
acttaatagacactacctcagcata

SEQ ID NO: 298242 - DNA, 25 bp, Artificial
  probe
  misc_feature (1)..(25): SEQ ID NO: 1568; WAN024CNB-5; Start 1000; Stop 1024
ttaccagtctacactaagccactag

SEQ ID NO: 298243 - DNA, 25 bp, Artificial
  probe
  misc_feature (1)..(25): SEQ ID NO: 1568; WAN024CNB-5; Start 752; Stop 776
cagcagacaatctatcttctaatga

SEQ ID NO: 298244 - DNA, 25 bp, Artificial
  probe
  misc_feature (1)..(25): SEQ ID NO: 1568; WAN024CNB-5; Start 748; Stop 772
atagcagcagacaatctatcttcta

SEQ ID NO: 298245 - DNA, 25 bp, Artificial
  probe
  misc_feature (1)..(25): SEQ ID NO: 1568; WAN024CNB-5; Start 747; Stop 771
tatagcagcagacaatctatcttct

SEQ ID NO: 298246 - DNA, 25 bp, Artificial
  probe
  misc_feature (1)..(25): SEQ ID NO: 1568; WAN024CNB-5; Start 999; Stop 1023
cttaccagtctacactaagccacta

SEQ ID NO: 298247 - DNA, 25 bp, Artificial
  probe
  misc_feature (1)..(25): SEQ ID NO: 1568; WAN024CNB-5; Start 1559; Stop 1583
ataacttaatagacactacctcagc

SEQ ID NO: 298248 - DNA, 25 bp, Artificial
  probe
  misc_feature (1)..(25): SEQ ID NO: 1568; WAN024CNB-5; Start 773; Stop 797
atgattcattcgcaagtcaagttga

SEQ ID NO: 298249 - DNA, 25 bp, Artificial
  probe
  misc_feature (1)..(25): SEQ ID NO: 1568; WAN024CNB-5; Start 1563; Stop 1587
cttaatagacactacctcagcatat

SEQ ID NO: 298250 - DNA, 25 bp, Artificial
  probe
  misc_feature (1)..(25): SEQ ID NO: 1568; WAN024CNB-5; Start 1260; Stop 1284
cactacacgaaatagaacggaaatc

SEQ ID NO: 298251 - DNA, 25 bp, Artificial
  probe
  misc_feature (1)..(25): SEQ ID NO: 1568; WAN024CNB-5; Start 1259; Stop 1283
tcactacacgaaatagaacggaaat

SEQ ID NO: 298252 - DNA, 25 bp, Artificial
  probe
  misc_feature (1)..(25): SEQ ID NO: 1568; WAN024CNB-5; Start 1253; Stop 1277
tagaggtcactacacgaaatagaac

SEQ ID NO: 298253 - DNA, 25 bp, Artificial
  probe
  misc_feature (1)..(25): SEQ ID NO: 1568; WAN024CNB-5; Start 1249; Stop 1273
gctttagaggtcactacacgaaata

SEQ ID NO: 298254 - DNA, 25 bp, Artificial
  probe
  misc_feature (1)..(25): SEQ ID NO: 1568; WAN024CNB-5; Start 691; Stop 715
aaggttagtttacaaggtgaagcat

SEQ ID NO: 298255 - DNA, 25 bp, Artificial
  probe
  misc_feature (1)..(25): SEQ ID NO: 1568; WAN024CNB-5; Start 740; Stop 764
aatcttctatagcagcagacaatct

SEQ ID NO: 298256 - DNA, 25 bp, Artificial
  probe
  misc_feature (1)..(25): SEQ ID NO: 1568; WAN024CNB-5; Start 1655; Stop 1679
ccaaagagcaagtaatatcaggttt

SEQ ID NO: 298257 - DNA, 25 bp, Artificial
  probe
  misc_feature (1)..(25): SEQ ID NO: 1568; WAN024CNB-5; Start 1401; Stop 1425
cgtaaatggtaatgtcgtagaaact

SEQ ID NO: 298258 - DNA, 25 bp, Artificial
  probe
  misc_feature (1)..(25): SEQ ID NO: 1568; WAN024CNB-5; Start 1400; Stop 1424
tcgtaaatggtaatgtcgtagaaac

SEQ ID NO: 298259 - DNA, 25 bp, Artificial
  probe
  misc_feature (1)..(25): SEQ ID NO: 1568; WAN024CNB-5; Start 753; Stop 777
agcagacaatctatcttctaatgat

SEQ ID NO: 298260 - DNA, 25 bp, Artificial
  probe
  misc_feature (1)..(25): SEQ ID NO: 1568; WAN024CNB-5; Start 774; Stop 798
tgattcattcgcaagtcaagttgag

SEQ ID NO: 298261 - DNA, 25 bp, Artificial
  probe
  misc_feature (1)..(25): SEQ ID NO: 1568; WAN024CNB-5; Start 1252; Stop 1276
ttagaggtcactacacgaaatagaa

SEQ ID NO: 298262 - DNA, 25 bp, Artificial
  probe
  misc_feature (1)..(25): SEQ ID NO: 1568; WAN024CNB-5; Start 1251; Stop 1275
tttagaggtcactacacgaaataga

SEQ ID NO: 298263 - DNA, 25 bp, Artificial
  probe
  misc_feature (1)..(25): SEQ ID NO: 1568; WAN024CNB-5; Start 692; Stop 716
aggttagtttacaaggtgaagcatc

SEQ ID NO: 298264 - DNA, 25 bp, Artificial
  probe
  misc_feature (1)..(25): SEQ ID NO: 1568; WAN024CNB-5; Start 1258; Stop 1282
gtcactacacgaaatagaacggaaa

SEQ ID NO: 298265 - DNA, 25 bp, Artificial
  probe
  misc_feature (1)..(25): SEQ ID NO: 1568; WAN024CNB-5; Start 365; Stop 389
atggaaagaaacgacttgttcattt

SEQ ID NO: 298266 - DNA, 25 bp, Artificial
  probe
  misc_feature (1)..(25): SEQ ID NO: 1568; WAN024CNB-5; Start 363; Stop 387
aaatggaaagaaacgacttgttcat

SEQ ID NO: 298267 - DNA, 25 bp, Artificial
  probe
  misc_feature (1)..(25): SEQ ID NO: 1568; WAN024CNB-5; Start 1001; Stop 1025
taccagtctacactaagccactaga

SEQ ID NO: 298268 - DNA, 25 bp, Artificial
  probe
  misc_feature (1)..(25): SEQ ID NO: 1568; WAN024CNB-5; Start 690; Stop 714
gaaggttagtttacaaggtgaagca

SEQ ID NO: 298269 - DNA, 25 bp, Artificial
  probe
  misc_feature (1)..(25): SEQ ID NO: 1569; WAN024DMU; Start 37; Stop 61
gcagatgttatagctggaattatct

SEQ ID NO: 298270 - DNA, 25 bp, Artificial
  probe
  misc_feature (1)..(25): SEQ ID NO: 1569; WAN024DMU; Start 36; Stop 60
agcagatgttatagctggaattatc

SEQ ID NO: 298271 - DNA, 25 bp, Artificial
  probe
  misc_feature (1)..(25): SEQ ID NO: 1569; WAN024DMU; Start 57; Stop 81
tatcttgtatttcgtctgcaaatgg

SEQ ID NO: 298272 - DNA, 25 bp, Artificial
  probe
  misc_feature (1)..(25): SEQ ID NO: 1569; WAN024DMU; Start 72; Stop 96
ctgcaaatggctagatggtaagaag

SEQ ID NO: 298273 - DNA, 25 bp, Artificial
  probe
  misc_feature (1)..(25): SEQ ID NO: 1569; WAN024DMU; Start 71; Stop 95
tctgcaaatggctagatggtaagaa

SEQ ID NO: 298274 - DNA, 25 bp, Artificial
  probe
  misc_feature (1)..(25): SEQ ID NO: 1569; WAN024DMU; Start 64; Stop 88
tatttcgtctgcaaatggctagatg

SEQ ID NO: 298275 - DNA, 25 bp, Artificial
  probe
  misc_feature (1)..(25): SEQ ID NO: 1569; WAN024DMU; Start 63; Stop 87
gtatttcgtctgcaaatggctagat

SEQ ID NO: 298276 - DNA, 25 bp, Artificial
  probe
  misc_feature (1)..(25): SEQ ID NO: 1569; WAN024DMU; Start 35; Stop 59
tagcagatgttatagctggaattat

SEQ ID NO: 298277 - DNA, 25 bp, Artificial
  probe
  misc_feature (1)..(25): SEQ ID NO: 1569; WAN024DMU; Start 34; Stop 58
atagcagatgttatagctggaatta

SEQ ID NO: 298278 - DNA, 25 bp, Artificial
  probe
  misc_feature (1)..(25): SEQ ID NO: 1569; WAN024DMU; Start 33; Stop 57
tatagcagatgttatagctggaatt

SEQ ID NO: 298279 - DNA, 25 bp, Artificial
  probe
  misc_feature (1)..(25): SEQ ID NO: 1569; WAN024DMU; Start 32; Stop 56
ttatagcagatgttatagctggaat

SEQ ID NO: 298280 - DNA, 25 bp, Artificial
  probe
  misc_feature (1)..(25): SEQ ID NO: 1569; WAN024DMU; Start 31; Stop 55
attatagcagatgttatagctggaa

SEQ ID NO: 298281 - DNA, 25 bp, Artificial
  probe
  misc_feature (1)..(25): SEQ ID NO: 1569; WAN024DMU; Start 53; Stop 77
gaattatcttgtatttcgtctgcaa

SEQ ID NO: 298282 - DNA, 25 bp, Artificial
  probe
  misc_feature (1)..(25): SEQ ID NO: 1569; WAN024DMU; Start 56; Stop 80
ttatcttgtatttcgtctgcaaatg

SEQ ID NO: 298283 - DNA, 25 bp, Artificial
  probe
  misc_feature (1)..(25): SEQ ID NO: 1569; WAN024DMU; Start 61; Stop 85
ttgtatttcgtctgcaaatggctag

SEQ ID NO: 298284 - DNA, 25 bp, Artificial
  probe
  misc_feature (1)..(25): SEQ ID NO: 1569; WAN024DMU; Start 60; Stop 84
cttgtatttcgtctgcaaatggcta

SEQ ID NO: 298285 - DNA, 25 bp, Artificial
  probe
  misc_feature (1)..(25): SEQ ID NO: 1569; WAN024DMU; Start 54; Stop 78
aattatcttgtatttcgtctgcaaa

SEQ ID NO: 298286 - DNA, 25 bp, Artificial
  probe
  misc_feature (1)..(25): SEQ ID NO: 1569; WAN024DMU; Start 70; Stop 94
gtctgcaaatggctagatggtaaga

SEQ ID NO: 298287 - DNA, 25 bp, Artificial
  probe
  misc_feature (1)..(25): SEQ ID NO: 1569; WAN024DMU; Start 58; Stop 82
atcttgtatttcgtctgcaaatggc

SEQ ID NO: 298288 - DNA, 25 bp, Artificial
  probe
  misc_feature (1)..(25): SEQ ID NO: 1569; WAN024DMU; Start 62; Stop 86
tgtatttcgtctgcaaatggctaga

SEQ ID NO: 298289 - DNA, 25 bp, Artificial
  probe
  misc_feature (1)..(25): SEQ ID NO: 1569; WAN024DMU; Start 30; Stop 54
tattatagcagatgttatagctgga

SEQ ID NO: 298290 - DNA, 25 bp, Artificial
  probe
  misc_feature (1)..(25): SEQ ID NO: 1569; WAN024DMU; Start 55; Stop 79
attatcttgtatttcgtctgcaaat

SEQ ID NO: 298291 - DNA, 25 bp, Artificial
  probe
  misc_feature (1)..(25): SEQ ID NO: 1569; WAN024DMU; Start 39; Stop 63
agatgttatagctggaattatcttg

SEQ ID NO: 298292 - DNA, 25 bp, Artificial
  probe
  misc_feature (1)..(25): SEQ ID NO: 1569; WAN024DMU; Start 38; Stop 62
cagatgttatagctggaattatctt

SEQ ID NO: 298293 - DNA, 25 bp, Artificial
  probe
  misc_feature (1)..(25): SEQ ID NO: 1569; WAN024DMU; Start 29; Stop 53
ctattatagcagatgttatagctgg

SEQ ID NO: 298294 - DNA, 25 bp, Artificial
  probe
  misc_feature (1)..(25): SEQ ID NO: 1569; WAN024DMU; Start 7; Stop 31
cttataccagagcttgctcttacta

SEQ ID NO: 298295 - DNA, 25 bp, Artificial
  probe
  misc_feature (1)..(25): SEQ ID NO: 1569; WAN024DMU; Start 14; Stop 38
cagagcttgctcttactattatagc

SEQ ID NO: 298296 - DNA, 25 bp, Artificial
  probe
  misc_feature (1)..(25): SEQ ID NO: 1569; WAN024DMU; Start 22; Stop 46
gctcttactattatagcagatgtta

SEQ ID NO: 298297 - DNA, 25 bp, Artificial
  probe
  misc_feature (1)..(25): SEQ ID NO: 1569; WAN024DMU; Start 12; Stop 36
accagagcttgctcttactattata

SEQ ID NO: 298298 - DNA, 25 bp, Artificial
  probe
  misc_feature (1)..(25): SEQ ID NO: 1569; WAN024DMU; Start 11; Stop 35
taccagagcttgctcttactattat

SEQ ID NO: 298299 - DNA, 25 bp, Artificial
  probe
  misc_feature (1)..(25): SEQ ID NO: 1569; WAN024DMU; Start 10; Stop 34
ataccagagcttgctcttactatta

SEQ ID NO: 298300 - DNA, 25 bp, Artificial
  probe
  misc_feature (1)..(25): SEQ ID NO: 1569; WAN024DMU; Start 9; Stop 33
tataccagagcttgctcttactatt

SEQ ID NO: 298301 - DNA, 25 bp, Artificial
  probe
  misc_feature (1)..(25): SEQ ID NO: 1569; WAN024DMU; Start 8; Stop 32
ttataccagagcttgctcttactat

SEQ ID NO: 298302 - DNA, 25 bp, Artificial
  probe
  misc_feature (1)..(25): SEQ ID NO: 1570; WAN024C72; Start 186; Stop 210
tcttgataatggtctggagttcctc

SEQ ID NO: 298303 - DNA, 25 bp, Artificial
  probe
  misc_feature (1)..(25): SEQ ID NO: 1570; WAN024C72; Start 185; Stop 209
ctcttgataatggtctggagttcct

SEQ ID NO: 298304 - DNA, 25 bp, Artificial
  probe
  misc_feature (1)..(25): SEQ ID NO: 1570; WAN024C72; Start 79; Stop 103
actacggacgataatttcacgataa

SEQ ID NO: 298305 - DNA, 25 bp, Artificial
  probe
  misc_feature (1)..(25): SEQ ID NO: 1570; WAN024C72; Start 78; Stop 102
aactacggacgataatttcacgata

SEQ ID NO: 298306 - DNA, 25 bp, Artificial
  probe
  misc_feature (1)..(25): SEQ ID NO: 1570; WAN024C72; Start 77; Stop 101
aaactacggacgataatttcacgat

SEQ ID NO: 298307 - DNA, 25 bp, Artificial
  probe
  misc_feature (1)..(25): SEQ ID NO: 1570; WAN024C72; Start 80; Stop 104
ctacggacgataatttcacgataaa

SEQ ID NO: 298308 - DNA, 25 bp, Artificial
  probe
  misc_feature (1)..(25): SEQ ID NO: 1570; WAN024C72; Start 121; Stop 145
gatatagtgaacatttcccgtagcc

SEQ ID NO: 298309 - DNA, 25 bp, Artificial
  probe
  misc_feature (1)..(25): SEQ ID NO: 1570; WAN024C72; Start 166; Stop 190
gtctccaacctctatcaaactcttg

SEQ ID NO: 298310 - DNA, 25 bp, Artificial
  probe
  misc_feature (1)..(25): SEQ ID NO: 1570; WAN024C72; Start 120; Stop 144
cgatatagtgaacatttcccgtagc

SEQ ID NO: 298311 - DNA, 25 bp, Artificial
  probe
  misc_feature (1)..(25): SEQ ID NO: 1570; WAN024C72; Start 76; Stop 100
caaactacggacgataatttcacga

SEQ ID NO: 298312 - DNA, 25 bp, Artificial
  probe
  misc_feature (1)..(25): SEQ ID NO: 1570; WAN024C72; Start 122; Stop 146
atatagtgaacatttcccgtagcca

SEQ ID NO: 298313 - DNA, 25 bp, Artificial
  probe
  misc_feature (1)..(25): SEQ ID NO: 1570; WAN024C72; Start 82; Stop 106
acggacgataatttcacgataaatc

SEQ ID NO: 298314 - DNA, 25 bp, Artificial
  probe
  misc_feature (1)..(25): SEQ ID NO: 1570; WAN024C72; Start 83; Stop 107
cggacgataatttcacgataaatct

SEQ ID NO: 298315 - DNA, 25 bp, Artificial
  probe
  misc_feature (1)..(25): SEQ ID NO: 1570; WAN024C72; Start 92; Stop 116
atttcacgataaatctcttcttccg

SEQ ID NO: 298316 - DNA, 25 bp, Artificial
  probe
  misc_feature (1)..(25): SEQ ID NO: 1570; WAN024C72; Start 103; Stop 127
aatctcttcttccggttcgatatag

SEQ ID NO: 298317 - DNA, 25 bp, Artificial
  probe
  misc_feature (1)..(25): SEQ ID NO: 1570; WAN024C72; Start 74; Stop 98
cccaaactacggacgataatttcac

SEQ ID NO: 298318 - DNA, 25 bp, Artificial
  probe
  misc_feature (1)..(25): SEQ ID NO: 1570; WAN024C72; Start 104; Stop 128
atctcttcttccggttcgatatagt

SEQ ID NO: 298319 - DNA, 25 bp, Artificial
  probe
  misc_feature (1)..(25): SEQ ID NO: 1570; WAN024C72; Start 81; Stop 105
tacggacgataatttcacgataaat

SEQ ID NO: 298320 - DNA, 25 bp, Artificial
  probe
  misc_feature (1)..(25): SEQ ID NO: 1570; WAN024C72; Start 75; Stop 99
ccaaactacggacgataatttcacg

SEQ ID NO: 298321 - DNA, 25 bp, Artificial
  probe
  misc_feature (1)..(25): SEQ ID NO: 1570; WAN024C72; Start 107; Stop 131
tcttcttccggttcgatatagtgaa

SEQ ID NO: 298322 - DNA, 25 bp, Artificial
  probe
  misc_feature (1)..(25): SEQ ID NO: 1570; WAN024C72; Start 106; Stop 130
ctcttcttccggttcgatatagtga

SEQ ID NO: 298323 - DNA, 25 bp, Artificial
  probe
  misc_feature (1)..(25): SEQ ID NO: 1570; WAN024C72; Start 105; Stop 129
tctcttcttccggttcgatatagtg

SEQ ID NO: 298324 - DNA, 25 bp, Artificial
  probe
  misc_feature (1)..(25): SEQ ID NO: 1570; WAN024C72; Start 119; Stop 143
tcgatatagtgaacatttcccgtag

SEQ ID NO: 298325 - DNA, 25 bp, Artificial
  probe
  misc_feature (1)..(25): SEQ ID NO: 1570; WAN024C72; Start 118; Stop 142
ttcgatatagtgaacatttcccgta

SEQ ID NO: 298326 - DNA, 25 bp, Artificial
  probe
  misc_feature (1)..(25): SEQ ID NO: 1570; WAN024C72; Start 84; Stop 108
ggacgataatttcacgataaatctc

SEQ ID NO: 298327 - DNA, 25 bp, Artificial
  probe
  misc_feature (1)..(25): SEQ ID NO: 1570; WAN024C72; Start 165; Stop 189
ggtctccaacctctatcaaactctt

SEQ ID NO: 298328 - DNA, 25 bp, Artificial
  probe
  misc_feature (1)..(25): SEQ ID NO: 1570; WAN024C72; Start 73; Stop 97
tcccaaactacggacgataatttca

SEQ ID NO: 298329 - DNA, 25 bp, Artificial
  probe
  misc_feature (1)..(25): SEQ ID NO: 1570; WAN024C72; Start 91; Stop 115
aatttcacgataaatctcttcttcc

SEQ ID NO: 298330 - DNA, 25 bp, Artificial
  probe
  misc_feature (1)..(25): SEQ ID NO: 1570; WAN024C72; Start 85; Stop 109
gacgataatttcacgataaatctct

SEQ ID NO: 298331 - DNA, 25 bp, Artificial
  probe
  misc_feature (1)..(25): SEQ ID NO: 1570; WAN024C72; Start 204; Stop 228
gttcctccatatccttgacctgctc

SEQ ID NO: 298332 - DNA, 25 bp, Artificial
  probe
  misc_feature (1)..(25): SEQ ID NO: 1570; WAN024C72; Start 206; Stop 230
tcctccatatccttgacctgctctt

SEQ ID NO: 298333 - DNA, 25 bp, Artificial
  probe
  misc_feature (1)..(25): SEQ ID NO: 1570; WAN024C72; Start 205; Stop 229
ttcctccatatccttgacctgctct

SEQ ID NO: 298334 - DNA, 25 bp, Artificial
  probe
  misc_feature (1)..(25): SEQ ID NO: 1570; WAN024C72; Start 180; Stop 204
tcaaactcttgataatggtctggag

SEQ ID NO: 298335 - DNA, 25 bp, Artificial
  probe
  misc_feature (1)..(25): SEQ ID NO: 1571; WAN024BDE; Start 17; Stop 41
taaatatccctggcgaatgcttgta

SEQ ID NO: 298336 - DNA, 25 bp, Artificial
  probe
  misc_feature (1)..(25): SEQ ID NO: 1571; WAN024BDE; Start 200; Stop 224
cctgctttgaggttgtagatatagt

SEQ ID NO: 298337 - DNA, 25 bp, Artificial
  probe
  misc_feature (1)..(25): SEQ ID NO: 1571; WAN024BDE; Start 199; Stop 223
ccctgctttgaggttgtagatatag

SEQ ID NO: 298338 - DNA, 25 bp, Artificial
  probe
  misc_feature (1)..(25): SEQ ID NO: 1571; WAN024BDE; Start 201; Stop 225
ctgctttgaggttgtagatatagta

SEQ ID NO: 298339 - DNA, 25 bp, Artificial
  probe
  misc_feature (1)..(25): SEQ ID NO: 1571; WAN024BDE; Start 18; Stop 42
aaatatccctggcgaatgcttgtat

SEQ ID NO: 298340 - DNA, 25 bp, Artificial
  probe
  misc_feature (1)..(25): SEQ ID NO: 1571; WAN024BDE; Start 198; Stop 222
accctgctttgaggttgtagatata

SEQ ID NO: 298341 - DNA, 25 bp, Artificial
  probe
  misc_feature (1)..(25): SEQ ID NO: 1571; WAN024BDE; Start 202; Stop 226
tgctttgaggttgtagatatagtaa

SEQ ID NO: 298342 - DNA, 25 bp, Artificial
  probe
  misc_feature (1)..(25): SEQ ID NO: 1571; WAN024BDE; Start 19; Stop 43
aatatccctggcgaatgcttgtatg

SEQ ID NO: 298343 - DNA, 25 bp, Artificial
  probe
  misc_feature (1)..(25): SEQ ID NO: 1571; WAN024BDE; Start 149; Stop 173
aatggaaggctaaagagcaaactag

SEQ ID NO: 298344 - DNA, 25 bp, Artificial
  probe
  misc_feature (1)..(25): SEQ ID NO: 1571; WAN024BDE; Start 148; Stop 172
gaatggaaggctaaagagcaaacta

SEQ ID NO: 298345 - DNA, 25 bp, Artificial
  probe
  misc_feature (1)..(25): SEQ ID NO: 1571; WAN024BDE; Start 16; Stop 40
gtaaatatccctggcgaatgcttgt

SEQ ID NO: 298346 - DNA, 25 bp, Artificial
  probe
  misc_feature (1)..(25): SEQ ID NO: 1571; WAN024BDE; Start 153; Stop 177
gaaggctaaagagcaaactaggaag

SEQ ID NO: 298347 - DNA, 25 bp, Artificial
  probe
  misc_feature (1)..(25): SEQ ID NO: 1571; WAN024BDE; Start 145; Stop 169
tttgaatggaaggctaaagagcaaa

SEQ ID NO: 298348 - DNA, 25 bp, Artificial
  probe
  misc_feature (1)..(25): SEQ ID NO: 1571; WAN024BDE; Start 203; Stop 227
gctttgaggttgtagatatagtaaa

SEQ ID NO: 298349 - DNA, 25 bp, Artificial
  probe
  misc_feature (1)..(25): SEQ ID NO: 1571; WAN024BDE; Start 138; Stop 162
catcacttttgaatggaaggctaaa

SEQ ID NO: 298350 - DNA, 25 bp, Artificial
  probe
  misc_feature (1)..(25): SEQ ID NO: 1571; WAN024BDE; Start 154; Stop 178
aaggctaaagagcaaactaggaagt

SEQ ID NO: 298351 - DNA, 25 bp, Artificial
  probe
  misc_feature (1)..(25): SEQ ID NO: 1571; WAN024BDE; Start 133; Stop 157
gatagcatcacttttgaatggaagg

SEQ ID NO: 298352 - DNA, 25 bp, Artificial
  probe
  misc_feature (1)..(25): SEQ ID NO: 1571; WAN024BDE; Start 132; Stop 156
agatagcatcacttttgaatggaag

SEQ ID NO: 298353 - DNA, 25 bp, Artificial
  probe
  misc_feature (1)..(25): SEQ ID NO: 1571; WAN024BDE; Start 146; Stop 170
ttgaatggaaggctaaagagcaaac

SEQ ID NO: 298354 - DNA, 25 bp, Artificial
  probe
  misc_feature (1)..(25): SEQ ID NO: 1571; WAN024BDE; Start 131; Stop 155
aagatagcatcacttttgaatggaa

SEQ ID NO: 298355 - DNA, 25 bp, Artificial
  probe
  misc_feature (1)..(25): SEQ ID NO: 1571; WAN024BDE; Start 20; Stop 44
atatccctggcgaatgcttgtatga

SEQ ID NO: 298356 - DNA, 25 bp, Artificial
  probe
  misc_feature (1)..(25): SEQ ID NO: 1571; WAN024BDE; Start 158; Stop 182
ctaaagagcaaactaggaagttggc

SEQ ID NO: 298357 - DNA, 25 bp, Artificial
  probe
  misc_feature (1)..(25): SEQ ID NO: 1571; WAN024BDE; Start 157; Stop 181
gctaaagagcaaactaggaagttgg

SEQ ID NO: 298358 - DNA, 25 bp, Artificial
  probe
  misc_feature (1)..(25): SEQ ID NO: 1571; WAN024BDE; Start 156; Stop 180
ggctaaagagcaaactaggaagttg

SEQ ID NO: 298359 - DNA, 25 bp, Artificial
  probe
  misc_feature (1)..(25): SEQ ID NO: 1571; WAN024BDE; Start 155; Stop 179
aggctaaagagcaaactaggaagtt

SEQ ID NO: 298360 - DNA, 25 bp, Artificial
  probe
  misc_feature (1)..(25): SEQ ID NO: 1571; WAN024BDE; Start 15; Stop 39
ggtaaatatccctggcgaatgcttg

SEQ ID NO: 298361 - DNA, 25 bp, Artificial
  probe
  misc_feature (1)..(25): SEQ ID NO: 1571; WAN024BDE; Start 152; Stop 176
ggaaggctaaagagcaaactaggaa

SEQ ID NO: 298362 - DNA, 25 bp, Artificial
  probe
  misc_feature (1)..(25): SEQ ID NO: 1571; WAN024BDE; Start 150; Stop 174
atggaaggctaaagagcaaactagg

SEQ ID NO: 298363 - DNA, 25 bp, Artificial
  probe
  misc_feature (1)..(25): SEQ ID NO: 1571; WAN024BDE; Start 134; Stop 158
atagcatcacttttgaatggaaggc

SEQ ID NO: 298364 - DNA, 25 bp, Artificial
  probe
  misc_feature (1)..(25): SEQ ID NO: 1571; WAN024BDE; Start 147; Stop 171
tgaatggaaggctaaagagcaaact

SEQ ID NO: 298365 - DNA, 25 bp, Artificial
  probe
  misc_feature (1)..(25): SEQ ID NO: 1571; WAN024BDE; Start 137; Stop 161
gcatcacttttgaatggaaggctaa

SEQ ID NO: 298366 - DNA, 25 bp, Artificial
  probe
  misc_feature (1)..(25): SEQ ID NO: 1571; WAN024BDE; Start 141; Stop 165
cacttttgaatggaaggctaaagag

SEQ ID NO: 298367 - DNA, 25 bp, Artificial
  probe
  misc_feature (1)..(25): SEQ ID NO: 1571; WAN024BDE; Start 139; Stop 163
atcacttttgaatggaaggctaaag

SEQ ID NO: 298368 - DNA, 25 bp, Artificial
  probe
  misc_feature (1)..(25): SEQ ID NO: 1572; WAN024GBG; Start 263; Stop 287
ctcatatccgtaatcactgctactg

SEQ ID NO: 298369 - DNA, 25 bp, Artificial
  probe
  misc_feature (1)..(25): SEQ ID NO: 1572; WAN024GBG; Start 266; Stop 290
atatccgtaatcactgctactgtct

SEQ ID NO: 298370 - DNA, 25 bp, Artificial
  probe
  misc_feature (1)..(25): SEQ ID NO: 1572; WAN024GBG; Start 265; Stop 289
catatccgtaatcactgctactgtc

SEQ ID NO: 298371 - DNA, 25 bp, Artificial
  probe
  misc_feature (1)..(25): SEQ ID NO: 1572; WAN024GBG; Start 267; Stop 291
tatccgtaatcactgctactgtctt

SEQ ID NO: 298372 - DNA, 25 bp, Artificial
  probe
  misc_feature (1)..(25): SEQ ID NO: 1572; WAN024GBG; Start 264; Stop 288
tcatatccgtaatcactgctactgt

SEQ ID NO: 298373 - DNA, 25 bp, Artificial
  probe
  misc_feature (1)..(25): SEQ ID NO: 1572; WAN024GBG; Start 262; Stop 286
gctcatatccgtaatcactgctact

SEQ ID NO: 298374 - DNA, 25 bp, Artificial
  probe
  misc_feature (1)..(25): SEQ ID NO: 1572; WAN024GBG; Start 268; Stop 292
atccgtaatcactgctactgtcttc

SEQ ID NO: 298375 - DNA, 25 bp, Artificial
  probe
  misc_feature (1)..(25): SEQ ID NO: 1572; WAN024GBG; Start 272; Stop 296
gtaatcactgctactgtcttccgtc

SEQ ID NO: 298376 - DNA, 25 bp, Artificial
  probe
  misc_feature (1)..(25): SEQ ID NO: 1572; WAN024GBG; Start 261; Stop 285
ggctcatatccgtaatcactgctac

SEQ ID NO: 298377 - DNA, 25 bp, Artificial
  probe
  misc_feature (1)..(25): SEQ ID NO: 1572; WAN024GBG; Start 165; Stop 189
aaataaagtgggtaatatcctgacg

SEQ ID NO: 298378 - DNA, 25 bp, Artificial
  probe
  misc_feature (1)..(25): SEQ ID NO: 1572; WAN024GBG; Start 260; Stop 284
tggctcatatccgtaatcactgcta

SEQ ID NO: 298379 - DNA, 25 bp, Artificial
  probe
  misc_feature (1)..(25): SEQ ID NO: 1572; WAN024GBG; Start 5; Stop 29
gctacatttacaggacgatagaggt

SEQ ID NO: 298380 - DNA, 25 bp, Artificial
  probe
  misc_feature (1)..(25): SEQ ID NO: 1572; WAN024GBG; Start 142; Stop 166
aagcataatttgagccaattcacaa

SEQ ID NO: 298381 - DNA, 25 bp, Artificial
  probe
  misc_feature (1)..(25): SEQ ID NO: 1572; WAN024GBG; Start 137; Stop 161
aaaccaagcataatttgagccaatt

SEQ ID NO: 298382 - DNA, 25 bp, Artificial
  probe
  misc_feature (1)..(25): SEQ ID NO: 1572; WAN024GBG; Start 12; Stop 36
ttacaggacgatagaggtcttccaa

SEQ ID NO: 298383 - DNA, 25 bp, Artificial
  probe
  misc_feature (1)..(25): SEQ ID NO: 1572; WAN024GBG; Start 141; Stop 165
caagcataatttgagccaattcaca

SEQ ID NO: 298384 - DNA, 25 bp, Artificial
  probe
  misc_feature (1)..(25): SEQ ID NO: 1572; WAN024GBG; Start 138; Stop 162
aaccaagcataatttgagccaattc

SEQ ID NO: 298385 - DNA, 25 bp, Artificial
  probe
  misc_feature (1)..(25): SEQ ID NO: 1572; WAN024GBG; Start 6; Stop 30
ctacatttacaggacgatagaggtc

SEQ ID NO: 298386 - DNA, 25 bp, Artificial
  probe
  misc_feature (1)..(25): SEQ ID NO: 1572; WAN024GBG; Start 7; Stop 31
tacatttacaggacgatagaggtct

SEQ ID NO: 298387 - DNA, 25 bp, Artificial
  probe
  misc_feature (1)..(25): SEQ ID NO: 1572; WAN024GBG; Start 9; Stop 33
catttacaggacgatagaggtcttc

SEQ ID NO: 298388 - DNA, 25 bp, Artificial
  probe
  misc_feature (1)..(25): SEQ ID NO: 1572; WAN024GBG; Start 8; Stop 32
acatttacaggacgatagaggtctt

SEQ ID NO: 298389 - DNA, 25 bp, Artificial
  probe
  misc_feature (1)..(25): SEQ ID NO: 1572; WAN024GBG; Start 140; Stop 164
ccaagcataatttgagccaattcac

SEQ ID NO: 298390 - DNA, 25 bp, Artificial
  probe
  misc_feature (1)..(25): SEQ ID NO: 1572; WAN024GBG; Start 163; Stop 187
acaaataaagtgggtaatatcctga

SEQ ID NO: 298391 - DNA, 25 bp, Artificial
  probe
  misc_feature (1)..(25): SEQ ID NO: 1572; WAN024GBG; Start 13; Stop 37
tacaggacgatagaggtcttccaag

SEQ ID NO: 298392 - DNA, 25 bp, Artificial
  probe
  misc_feature (1)..(25): SEQ ID NO: 1572; WAN024GBG; Start 300; Stop 324
caaccttaccaagatctaccatagt

SEQ ID NO: 298393 - DNA, 25 bp, Artificial
  probe
  misc_feature (1)..(25): SEQ ID NO: 1572; WAN024GBG; Start 299; Stop 323
acaaccttaccaagatctaccatag

SEQ ID NO: 298394 - DNA, 25 bp, Artificial
  probe
  misc_feature (1)..(25): SEQ ID NO: 1572; WAN024GBG; Start 297; Stop 321
caacaaccttaccaagatctaccat

SEQ ID NO: 298395 - DNA, 25 bp, Artificial
  probe
  misc_feature (1)..(25): SEQ ID NO: 1572; WAN024GBG; Start 3; Stop 27
gagctacatttacaggacgatagag

SEQ ID NO: 298396 - DNA, 25 bp, Artificial
  probe
  misc_feature (1)..(25): SEQ ID NO: 1572; WAN024GBG; Start 164; Stop 188
caaataaagtgggtaatatcctgac

SEQ ID NO: 298397 - DNA, 25 bp, Artificial
  probe
  misc_feature (1)..(25): SEQ ID NO: 1572; WAN024GBG; Start 139; Stop 163
accaagcataatttgagccaattca

SEQ ID NO: 298398 - DNA, 25 bp, Artificial
  probe
  misc_feature (1)..(25): SEQ ID NO: 1572; WAN024GBG; Start 298; Stop 322
aacaaccttaccaagatctaccata

SEQ ID NO: 298399 - DNA, 25 bp, Artificial
  probe
  misc_feature (1)..(25): SEQ ID NO: 1572; WAN024GBG; Start 2; Stop 26
tgagctacatttacaggacgataga

SEQ ID NO: 298400 - DNA, 25 bp, Artificial
  probe
  misc_feature (1)..(25): SEQ ID NO: 1572; WAN024GBG; Start 1; Stop 25
atgagctacatttacaggacgatag

SEQ ID NO: 298401 - DNA, 25 bp, Artificial
  probe
  misc_feature (1)..(25): SEQ ID NO: 1573; WAN024BE8; Start 315; Stop 339
catagtcagcagttacgatacattg

SEQ ID NO: 298402 - DNA, 25 bp, Artificial
  probe
  misc_feature (1)..(25): SEQ ID NO: 1573; WAN024BE8; Start 326; Stop 350
gttacgatacattgttcagccatac

SEQ ID NO: 298403 - DNA, 25 bp, Artificial
  probe
  misc_feature (1)..(25): SEQ ID NO: 1573; WAN024BE8; Start 325; Stop 349
agttacgatacattgttcagccata

SEQ ID NO: 298404 - DNA, 25 bp, Artificial
  probe
  misc_feature (1)..(25): SEQ ID NO: 1573; WAN024BE8; Start 317; Stop 341
tagtcagcagttacgatacattgtt

SEQ ID NO: 298405 - DNA, 25 bp, Artificial
  probe
  misc_feature (1)..(25): SEQ ID NO: 1573; WAN024BE8; Start 316; Stop 340
atagtcagcagttacgatacattgt

SEQ ID NO: 298406 - DNA, 25 bp, Artificial
  probe
  misc_feature (1)..(25): SEQ ID NO: 1573; WAN024BE8; Start 314; Stop 338
gcatagtcagcagttacgatacatt

SEQ ID NO: 298407 - DNA, 25 bp, Artificial
  probe
  misc_feature (1)..(25): SEQ ID NO: 1573; WAN024BE8; Start 327; Stop 351
ttacgatacattgttcagccatacc

SEQ ID NO: 298408 - DNA, 25 bp, Artificial
  probe
  misc_feature (1)..(25): SEQ ID NO: 1573; WAN024BE8; Start 320; Stop 344
tcagcagttacgatacattgttcag

SEQ ID NO: 298409 - DNA, 25 bp, Artificial
  probe
  misc_feature (1)..(25): SEQ ID NO: 1573; WAN024BE8; Start 318; Stop 342
agtcagcagttacgatacattgttc

SEQ ID NO: 298410 - DNA, 25 bp, Artificial
  probe
  misc_feature (1)..(25): SEQ ID NO: 1573; WAN024BE8; Start 324; Stop 348
cagttacgatacattgttcagccat

SEQ ID NO: 298411 - DNA, 25 bp, Artificial
  probe
  misc_feature (1)..(25): SEQ ID NO: 1573; WAN024BE8; Start 319; Stop 343
gtcagcagttacgatacattgttca

SEQ ID NO: 298412 - DNA, 25 bp, Artificial
  probe
  misc_feature (1)..(25): SEQ ID NO: 1573; WAN024BE8; Start 313; Stop 337
agcatagtcagcagttacgatacat

SEQ ID NO: 298413 - DNA, 25 bp, Artificial
  probe
  misc_feature (1)..(25): SEQ ID NO: 1573; WAN024BE8; Start 125; Stop 149
gcgataacatgagcattgaatactt

SEQ ID NO: 298414 - DNA, 25 bp, Artificial
  probe
  misc_feature (1)..(25): SEQ ID NO: 1573; WAN024BE8; Start 328; Stop 352
tacgatacattgttcagccatacca

SEQ ID NO: 298415 - DNA, 25 bp, Artificial
  probe
  misc_feature (1)..(25): SEQ ID NO: 1573; WAN024BE8; Start 312; Stop 336
cagcatagtcagcagttacgataca

SEQ ID NO: 298416 - DNA, 25 bp, Artificial
  probe
  misc_feature (1)..(25): SEQ ID NO: 1573; WAN024BE8; Start 311; Stop 335
acagcatagtcagcagttacgatac

SEQ ID NO: 298417 - DNA, 25 bp, Artificial
  probe
  misc_feature (1)..(25): SEQ ID NO: 1573; WAN024BE8; Start 242; Stop 266
ttataggttgttactccagcacatg

SEQ ID NO: 298418 - DNA, 25 bp, Artificial
  probe
  misc_feature (1)..(25): SEQ ID NO: 1573; WAN024BE8; Start 321; Stop 345
cagcagttacgatacattgttcagc

SEQ ID NO: 298419 - DNA, 25 bp, Artificial
  probe
  misc_feature (1)..(25): SEQ ID NO: 1573; WAN024BE8; Start 26; Stop 50
ttaatgagtccagctacatcttcaa

SEQ ID NO: 298420 - DNA, 25 bp, Artificial
  probe
  misc_feature (1)..(25): SEQ ID NO: 1573; WAN024BE8; Start 27; Stop 51
taatgagtccagctacatcttcaac

SEQ ID NO: 298421 - DNA, 25 bp, Artificial
  probe
  misc_feature (1)..(25): SEQ ID NO: 1573; WAN024BE8; Start 310; Stop 334
gacagcatagtcagcagttacgata

SEQ ID NO: 298422 - DNA, 25 bp, Artificial
  probe
  misc_feature (1)..(25): SEQ ID NO: 1573; WAN024BE8; Start 329; Stop 353
acgatacattgttcagccataccac

SEQ ID NO: 298423 - DNA, 25 bp, Artificial
  probe
  misc_feature (1)..(25): SEQ ID NO: 1573; WAN024BE8; Start 29; Stop 53
atgagtccagctacatcttcaactt

SEQ ID NO: 298424 - DNA, 25 bp, Artificial
  probe
  misc_feature (1)..(25): SEQ ID NO: 1573; WAN024BE8; Start 28; Stop 52
aatgagtccagctacatcttcaact

SEQ ID NO: 298425 - DNA, 25 bp, Artificial
  probe
  misc_feature (1)..(25): SEQ ID NO: 1573; WAN024BE8; Start 158; Stop 182
tattgaacagcgaggttaccaagtc

SEQ ID NO: 298426 - DNA, 25 bp, Artificial
  probe
  misc_feature (1)..(25): SEQ ID NO: 1573; WAN024BE8; Start 152; Stop 176
ttagcgtattgaacagcgaggttac

SEQ ID NO: 298427 - DNA, 25 bp, Artificial
  probe
  misc_feature (1)..(25): SEQ ID NO: 1573; WAN024BE8; Start 241; Stop 265
tttataggttgttactccagcacat

SEQ ID NO: 298428 - DNA, 25 bp, Artificial
  probe
  misc_feature (1)..(25): SEQ ID NO: 1573; WAN024BE8; Start 240; Stop 264
ctttataggttgttactccagcaca

SEQ ID NO: 298429 - DNA, 25 bp, Artificial
  probe
  misc_feature (1)..(25): SEQ ID NO: 1573; WAN024BE8; Start 95; Stop 119
agggcaagtttgtcattgttgatat

SEQ ID NO: 298430 - DNA, 25 bp, Artificial
  probe
  misc_feature (1)..(25): SEQ ID NO: 1573; WAN024BE8; Start 157; Stop 181
gtattgaacagcgaggttaccaagt

SEQ ID NO: 298431 - DNA, 25 bp, Artificial
  probe
  misc_feature (1)..(25): SEQ ID NO: 1573; WAN024BE8; Start 94; Stop 118
aagggcaagtttgtcattgttgata

SEQ ID NO: 298432 - DNA, 25 bp, Artificial
  probe
  misc_feature (1)..(25): SEQ ID NO: 1573; WAN024BE8; Start 322; Stop 346
agcagttacgatacattgttcagcc

SEQ ID NO: 298433 - DNA, 25 bp, Artificial
  probe
  misc_feature (1)..(25): SEQ ID NO: 1573; WAN024BE8; Start 30; Stop 54
tgagtccagctacatcttcaacttc

SEQ ID NO: 298434 - DNA, 25 bp, Artificial
  probe
  misc_feature (1)..(25): SEQ ID NO: 1574; WAN024FQ6; Start 134; Stop 158
cttcgactaatagagatacggcttg

SEQ ID NO: 298435 - DNA, 25 bp, Artificial
  probe
  misc_feature (1)..(25): SEQ ID NO: 1574; WAN024FQ6; Start 130; Stop 154
ccttcttcgactaatagagatacgg

SEQ ID NO: 298436 - DNA, 25 bp, Artificial
  probe
  misc_feature (1)..(25): SEQ ID NO: 1574; WAN024FQ6; Start 131; Stop 155
cttcttcgactaatagagatacggc

SEQ ID NO: 298437 - DNA, 25 bp, Artificial
  probe
  misc_feature (1)..(25): SEQ ID NO: 1574; WAN024FQ6; Start 129; Stop 153
gccttcttcgactaatagagatacg

SEQ ID NO: 298438 - DNA, 25 bp, Artificial
  probe
  misc_feature (1)..(25): SEQ ID NO: 1574; WAN024FQ6; Start 128; Stop 152
cgccttcttcgactaatagagatac

SEQ ID NO: 298439 - DNA, 25 bp, Artificial
  probe
  misc_feature (1)..(25): SEQ ID NO: 1574; WAN024FQ6; Start 133; Stop 157
tcttcgactaatagagatacggctt

SEQ ID NO: 298440 - DNA, 25 bp, Artificial
  probe
  misc_feature (1)..(25): SEQ ID NO: 1574; WAN024FQ6; Start 132; Stop 156
ttcttcgactaatagagatacggct

SEQ ID NO: 298441 - DNA, 25 bp, Artificial
  probe
  misc_feature (1)..(25): SEQ ID NO: 1574; WAN024FQ6; Start 127; Stop 151
acgccttcttcgactaatagagata

SEQ ID NO: 298442 - DNA, 25 bp, Artificial
  probe
  misc_feature (1)..(25): SEQ ID NO: 1574; WAN024FQ6; Start 135; Stop 159
ttcgactaatagagatacggcttgg

SEQ ID NO: 298443 - DNA, 25 bp, Artificial
  probe
  misc_feature (1)..(25): SEQ ID NO: 1574; WAN024FQ6; Start 17; Stop 41
gaactttaccttgggatttgacaat

SEQ ID NO: 298444 - DNA, 25 bp, Artificial
  probe
  misc_feature (1)..(25): SEQ ID NO: 1574; WAN024FQ6; Start 25; Stop 49
ccttgggatttgacaatttcagtaa

SEQ ID NO: 298445 - DNA, 25 bp, Artificial
  probe
  misc_feature (1)..(25): SEQ ID NO: 1574; WAN024FQ6; Start 22; Stop 46
ttaccttgggatttgacaatttcag

SEQ ID NO: 298446 - DNA, 25 bp, Artificial
  probe
  misc_feature (1)..(25): SEQ ID NO: 1574; WAN024FQ6; Start 19; Stop 43
actttaccttgggatttgacaattt

SEQ ID NO: 298447 - DNA, 25 bp, Artificial
  probe
  misc_feature (1)..(25): SEQ ID NO: 1574; WAN024FQ6; Start 18; Stop 42
aactttaccttgggatttgacaatt

SEQ ID NO: 298448 - DNA, 25 bp, Artificial
  probe
  misc_feature (1)..(25): SEQ ID NO: 1574; WAN024FQ6; Start 126; Stop 150
gacgccttcttcgactaatagagat

SEQ ID NO: 298449 - DNA, 25 bp, Artificial
  probe
  misc_feature (1)..(25): SEQ ID NO: 1574; WAN024FQ6; Start 24; Stop 48
accttgggatttgacaatttcagta

SEQ ID NO: 298450 - DNA, 25 bp, Artificial
  probe
  misc_feature (1)..(25): SEQ ID NO: 1574; WAN024FQ6; Start 23; Stop 47
taccttgggatttgacaatttcagt

SEQ ID NO: 298451 - DNA, 25 bp, Artificial
  probe
  misc_feature (1)..(25): SEQ ID NO: 1574; WAN024FQ6; Start 21; Stop 45
tttaccttgggatttgacaatttca

SEQ ID NO: 298452 - DNA, 25 bp, Artificial
  probe
  misc_feature (1)..(25): SEQ ID NO: 1574; WAN024FQ6; Start 20; Stop 44
ctttaccttgggatttgacaatttc

SEQ ID NO: 298453 - DNA, 25 bp, Artificial
  probe
  misc_feature (1)..(25): SEQ ID NO: 1574; WAN024FQ6; Start 16; Stop 40
ggaactttaccttgggatttgacaa

SEQ ID NO: 298454 - DNA, 25 bp, Artificial
  probe
  misc_feature (1)..(25): SEQ ID NO: 1574; WAN024FQ6; Start 195; Stop 219
taaatctctttcactgggaagcctc

SEQ ID NO: 298455 - DNA, 25 bp, Artificial
  probe
  misc_feature (1)..(25): SEQ ID NO: 1574; WAN024FQ6; Start 194; Stop 218
ctaaatctctttcactgggaagcct

SEQ ID NO: 298456 - DNA, 25 bp, Artificial
  probe
  misc_feature (1)..(25): SEQ ID NO: 1574; WAN024FQ6; Start 26; Stop 50
cttgggatttgacaatttcagtaaa

SEQ ID NO: 298457 - DNA, 25 bp, Artificial
  probe
  misc_feature (1)..(25): SEQ ID NO: 1574; WAN024FQ6; Start 11; Stop 35
tagagggaactttaccttgggattt

SEQ ID NO: 298458 - DNA, 25 bp, Artificial
  probe
  misc_feature (1)..(25): SEQ ID NO: 1574; WAN024FQ6; Start 182; Stop 206
caaactgctcagctaaatctctttc

SEQ ID NO: 298459 - DNA, 25 bp, Artificial
  probe
  misc_feature (1)..(25): SEQ ID NO: 1574; WAN024FQ6; Start 125; Stop 149
agacgccttcttcgactaatagaga

SEQ ID NO: 298460 - DNA, 25 bp, Artificial
  probe
  misc_feature (1)..(25): SEQ ID NO: 1574; WAN024FQ6; Start 183; Stop 207
aaactgctcagctaaatctctttca

SEQ ID NO: 298461 - DNA, 25 bp, Artificial
  probe
  misc_feature (1)..(25): SEQ ID NO: 1574; WAN024FQ6; Start 122; Stop 146
ctaagacgccttcttcgactaatag

SEQ ID NO: 298462 - DNA, 25 bp, Artificial
  probe
  misc_feature (1)..(25): SEQ ID NO: 1574; WAN024FQ6; Start 123; Stop 147
taagacgccttcttcgactaataga

SEQ ID NO: 298463 - DNA, 25 bp, Artificial
  probe
  misc_feature (1)..(25): SEQ ID NO: 1574; WAN024FQ6; Start 121; Stop 145
tctaagacgccttcttcgactaata

SEQ ID NO: 298464 - DNA, 25 bp, Artificial
  probe
  misc_feature (1)..(25): SEQ ID NO: 1574; WAN024FQ6; Start 10; Stop 34
ctagagggaactttaccttgggatt

SEQ ID NO: 298465 - DNA, 25 bp, Artificial
  probe
  misc_feature (1)..(25): SEQ ID NO: 1574; WAN024FQ6; Start 184; Stop 208
aactgctcagctaaatctctttcac

SEQ ID NO: 298466 - DNA, 25 bp, Artificial
  probe
  misc_feature (1)..(25): SEQ ID NO: 1574; WAN024FQ6; Start 15; Stop 39
gggaactttaccttgggatttgaca

SEQ ID NO: 298467 - DNA, 25 bp, Artificial
  probe
  misc_feature (1)..(25): SEQ ID NO: 1575; WAN024CSF; Start 300; Stop 324
tagattgagcaccatccactaccat

SEQ ID NO: 298468 - DNA, 25 bp, Artificial
  probe
  misc_feature (1)..(25): SEQ ID NO: 1575; WAN024CSF; Start 268; Stop 292
caagtcctggacatcaatcttcata

SEQ ID NO: 298469 - DNA, 25 bp, Artificial
  probe
  misc_feature (1)..(25): SEQ ID NO: 1575; WAN024CSF; Start 269; Stop 293
aagtcctggacatcaatcttcatat

SEQ ID NO: 298470 - DNA, 25 bp, Artificial
  probe
  misc_feature (1)..(25): SEQ ID NO: 1575; WAN024CSF; Start 165; Stop 189
ctactggagacatttgctcaagata

SEQ ID NO: 298471 - DNA, 25 bp, Artificial
  probe
  misc_feature (1)..(25): SEQ ID NO: 1575; WAN024CSF; Start 169; Stop 193
tggagacatttgctcaagatacttt

SEQ ID NO: 298472 - DNA, 25 bp, Artificial
  probe
  misc_feature (1)..(25): SEQ ID NO: 1575; WAN024CSF; Start 166; Stop 190
tactggagacatttgctcaagatac

SEQ ID NO: 298473 - DNA, 25 bp, Artificial
  probe
  misc_feature (1)..(25): SEQ ID NO: 1575; WAN024CSF; Start 161; Stop 185
aattctactggagacatttgctcaa

SEQ ID NO: 298474 - DNA, 25 bp, Artificial
  probe
  misc_feature (1)..(25): SEQ ID NO: 1575; WAN024CSF; Start 168; Stop 192
ctggagacatttgctcaagatactt

SEQ ID NO: 298475 - DNA, 25 bp, Artificial
  probe
  misc_feature (1)..(25): SEQ ID NO: 1575; WAN024CSF; Start 162; Stop 186
attctactggagacatttgctcaag

SEQ ID NO: 298476 - DNA, 25 bp, Artificial
  probe
  misc_feature (1)..(25): SEQ ID NO: 1575; WAN024CSF; Start 160; Stop 184
aaattctactggagacatttgctca

SEQ ID NO: 298477 - DNA, 25 bp, Artificial
  probe
  misc_feature (1)..(25): SEQ ID NO: 1575; WAN024CSF; Start 164; Stop 188
tctactggagacatttgctcaagat

SEQ ID NO: 298478 - DNA, 25 bp, Artificial
  probe
  misc_feature (1)..(25): SEQ ID NO: 1575; WAN024CSF; Start 163; Stop 187
ttctactggagacatttgctcaaga

SEQ ID NO: 298479 - DNA, 25 bp, Artificial
  probe
  misc_feature (1)..(25): SEQ ID NO: 1575; WAN024CSF; Start 270; Stop 294
agtcctggacatcaatcttcatatg

SEQ ID NO: 298480 - DNA, 25 bp, Artificial
  probe
  misc_feature (1)..(25): SEQ ID NO: 1575; WAN024CSF; Start 167; Stop 191
actggagacatttgctcaagatact

SEQ ID NO: 298481 - DNA, 25 bp, Artificial
  probe
  misc_feature (1)..(25): SEQ ID NO: 1575; WAN024CSF; Start 54; Stop 78
caagtccaatagctcctgccatatt

SEQ ID NO: 298482 - DNA, 25 bp, Artificial
  probe
  misc_feature (1)..(25): SEQ ID NO: 1575; WAN024CSF; Start 267; Stop 291
ccaagtcctggacatcaatcttcat

SEQ ID NO: 298483 - DNA, 25 bp, Artificial
  probe
  misc_feature (1)..(25): SEQ ID NO: 1575; WAN024CSF; Start 297; Stop 321
gtgtagattgagcaccatccactac

SEQ ID NO: 298484 - DNA, 25 bp, Artificial
  probe
  misc_feature (1)..(25): SEQ ID NO: 1575; WAN024CSF; Start 55; Stop 79
aagtccaatagctcctgccatattt

SEQ ID NO: 298485 - DNA, 25 bp, Artificial
  probe
  misc_feature (1)..(25): SEQ ID NO: 1575; WAN024CSF; Start 130; Stop 154
ctcgtagacaaaatcaatcatctcg

SEQ ID NO: 298486 - DNA, 25 bp, Artificial
  probe
  misc_feature (1)..(25): SEQ ID NO: 1575; WAN024CSF; Start 129; Stop 153
gctcgtagacaaaatcaatcatctc

SEQ ID NO: 298487 - DNA, 25 bp, Artificial
  probe
  misc_feature (1)..(25): SEQ ID NO: 1575; WAN024CSF; Start 128; Stop 152
tgctcgtagacaaaatcaatcatct

SEQ ID NO: 298488 - DNA, 25 bp, Artificial
  probe
  misc_feature (1)..(25): SEQ ID NO: 1575; WAN024CSF; Start 127; Stop 151
ttgctcgtagacaaaatcaatcatc

SEQ ID NO: 298489 - DNA, 25 bp, Artificial
  probe
  misc_feature (1)..(25): SEQ ID NO: 1575; WAN024CSF; Start 170; Stop 194
ggagacatttgctcaagatactttt

SEQ ID NO: 298490 - DNA, 25 bp, Artificial
  probe
  misc_feature (1)..(25): SEQ ID NO: 1575; WAN024CSF; Start 172; Stop 196
agacatttgctcaagatacttttct

SEQ ID NO: 298491 - DNA, 25 bp, Artificial
  probe
  misc_feature (1)..(25): SEQ ID NO: 1575; WAN024CSF; Start 56; Stop 80
agtccaatagctcctgccatatttg

SEQ ID NO: 298492 - DNA, 25 bp, Artificial
  probe
  misc_feature (1)..(25): SEQ ID NO: 1575; WAN024CSF; Start 131; Stop 155
tcgtagacaaaatcaatcatctcgc

SEQ ID NO: 298493 - DNA, 25 bp, Artificial
  probe
  misc_feature (1)..(25): SEQ ID NO: 1575; WAN024CSF; Start 171; Stop 195
gagacatttgctcaagatacttttc

SEQ ID NO: 298494 - DNA, 25 bp, Artificial
  probe
  misc_feature (1)..(25): SEQ ID NO: 1575; WAN024CSF; Start 299; Stop 323
gtagattgagcaccatccactacca

SEQ ID NO: 298495 - DNA, 25 bp, Artificial
  probe
  misc_feature (1)..(25): SEQ ID NO: 1575; WAN024CSF; Start 298; Stop 322
tgtagattgagcaccatccactacc

SEQ ID NO: 298496 - DNA, 25 bp, Artificial
  probe
  misc_feature (1)..(25): SEQ ID NO: 1575; WAN024CSF; Start 140; Stop 164
aaatcaatcatctcgccgccaaatt

SEQ ID NO: 298497 - DNA, 25 bp, Artificial
  probe
  misc_feature (1)..(25): SEQ ID NO: 1575; WAN024CSF; Start 133; Stop 157
gtagacaaaatcaatcatctcgccg

SEQ ID NO: 298498 - DNA, 25 bp, Artificial
  probe
  misc_feature (1)..(25): SEQ ID NO: 1575; WAN024CSF; Start 132; Stop 156
cgtagacaaaatcaatcatctcgcc

SEQ ID NO: 298499 - DNA, 25 bp, Artificial
  probe
  misc_feature (1)..(25): SEQ ID NO: 1575; WAN024CSF; Start 155; Stop 179
ccgccaaattctactggagacattt

SEQ ID NO: 298500 - DNA, 25 bp, Artificial
  probe
  misc_feature (1)..(25): SEQ ID NO: 1576; WAN024DLP; Start 213; Stop 237
ggtattgataatagtagccagtgaa

SEQ ID NO: 298501 - DNA, 25 bp, Artificial
  probe
  misc_feature (1)..(25): SEQ ID NO: 1576; WAN024DLP; Start 42; Stop 66
tgtgaatcttaccataagtcaagtc

SEQ ID NO: 298502 - DNA, 25 bp, Artificial
  probe
  misc_feature (1)..(25): SEQ ID NO: 1576; WAN024DLP; Start 43; Stop 67
gtgaatcttaccataagtcaagtct

SEQ ID NO: 298503 - DNA, 25 bp, Artificial
  probe
  misc_feature (1)..(25): SEQ ID NO: 1576; WAN024DLP; Start 143; Stop 167
ctattccaagcagcaagagatttag

SEQ ID NO: 298504 - DNA, 25 bp, Artificial
  probe
  misc_feature (1)..(25): SEQ ID NO: 1576; WAN024DLP; Start 41; Stop 65
ttgtgaatcttaccataagtcaagt

SEQ ID NO: 298505 - DNA, 25 bp, Artificial
  probe
  misc_feature (1)..(25): SEQ ID NO: 1576; WAN024DLP; Start 212; Stop 236
tggtattgataatagtagccagtga

SEQ ID NO: 298506 - DNA, 25 bp, Artificial
  probe
  misc_feature (1)..(25): SEQ ID NO: 1576; WAN024DLP; Start 144; Stop 168
tattccaagcagcaagagatttagc

SEQ ID NO: 298507 - DNA, 25 bp, Artificial
  probe
  misc_feature (1)..(25): SEQ ID NO: 1576; WAN024DLP; Start 44; Stop 68
tgaatcttaccataagtcaagtctt

SEQ ID NO: 298508 - DNA, 25 bp, Artificial
  probe
  misc_feature (1)..(25): SEQ ID NO: 1576; WAN024DLP; Start 211; Stop 235
ttggtattgataatagtagccagtg

SEQ ID NO: 298509 - DNA, 25 bp, Artificial
  probe
  misc_feature (1)..(25): SEQ ID NO: 1576; WAN024DLP; Start 28; Stop 52
acgagtcttgaaattgtgaatctta

SEQ ID NO: 298510 - DNA, 25 bp, Artificial
  probe
  misc_feature (1)..(25): SEQ ID NO: 1576; WAN024DLP; Start 31; Stop 55
agtcttgaaattgtgaatcttacca

SEQ ID NO: 298511 - DNA, 25 bp, Artificial
  probe
  misc_feature (1)..(25): SEQ ID NO: 1576; WAN024DLP; Start 29; Stop 53
cgagtcttgaaattgtgaatcttac

SEQ ID NO: 298512 - DNA, 25 bp, Artificial
  probe
  misc_feature (1)..(25): SEQ ID NO: 1576; WAN024DLP; Start 30; Stop 54
gagtcttgaaattgtgaatcttacc

SEQ ID NO: 298513 - DNA, 25 bp, Artificial
  probe
  misc_feature (1)..(25): SEQ ID NO: 1576; WAN024DLP; Start 222; Stop 246
aatagtagccagtgaaatctgtgat

SEQ ID NO: 298514 - DNA, 25 bp, Artificial
  probe
  misc_feature (1)..(25): SEQ ID NO: 1576; WAN024DLP; Start 238; Stop 262
atctgtgattccgagtttgtttgtg

SEQ ID NO: 298515 - DNA, 25 bp, Artificial
  probe
  misc_feature (1)..(25): SEQ ID NO: 1576; WAN024DLP; Start 221; Stop 245
taatagtagccagtgaaatctgtga

SEQ ID NO: 298516 - DNA, 25 bp, Artificial
  probe
  misc_feature (1)..(25): SEQ ID NO: 1576; WAN024DLP; Start 40; Stop 64
attgtgaatcttaccataagtcaag

SEQ ID NO: 298517 - DNA, 25 bp, Artificial
  probe
  misc_feature (1)..(25): SEQ ID NO: 1576; WAN024DLP; Start 27; Stop 51
cacgagtcttgaaattgtgaatctt

SEQ ID NO: 298518 - DNA, 25 bp, Artificial
  probe
  misc_feature (1)..(25): SEQ ID NO: 1576; WAN024DLP; Start 45; Stop 69
gaatcttaccataagtcaagtcttg

SEQ ID NO: 298519 - DNA, 25 bp, Artificial
  probe
  misc_feature (1)..(25): SEQ ID NO: 1576; WAN024DLP; Start 153; Stop 177
cagcaagagatttagcgtaaggatc

SEQ ID NO: 298520 - DNA, 25 bp, Artificial
  probe
  misc_feature (1)..(25): SEQ ID NO: 1576; WAN024DLP; Start 32; Stop 56
gtcttgaaattgtgaatcttaccat

SEQ ID NO: 298521 - DNA, 25 bp, Artificial
  probe
  misc_feature (1)..(25): SEQ ID NO: 1576; WAN024DLP; Start 149; Stop 173
caagcagcaagagatttagcgtaag

SEQ ID NO: 298522 - DNA, 25 bp, Artificial
  probe
  misc_feature (1)..(25): SEQ ID NO: 1576; WAN024DLP; Start 217; Stop 241
ttgataatagtagccagtgaaatct

SEQ ID NO: 298523 - DNA, 25 bp, Artificial
  probe
  misc_feature (1)..(25): SEQ ID NO: 1576; WAN024DLP; Start 220; Stop 244
ataatagtagccagtgaaatctgtg

SEQ ID NO: 298524 - DNA, 25 bp, Artificial
  probe
  misc_feature (1)..(25): SEQ ID NO: 1576; WAN024DLP; Start 200; Stop 224
tgacgctcgatttggtattgataat

SEQ ID NO: 298525 - DNA, 25 bp, Artificial
  probe
  misc_feature (1)..(25): SEQ ID NO: 1576; WAN024DLP; Start 235; Stop 259
gaaatctgtgattccgagtttgttt

SEQ ID NO: 298526 - DNA, 25 bp, Artificial
  probe
  misc_feature (1)..(25): SEQ ID NO: 1576; WAN024DLP; Start 223; Stop 247
atagtagccagtgaaatctgtgatt

SEQ ID NO: 298527 - DNA, 25 bp, Artificial
  probe
  misc_feature (1)..(25): SEQ ID NO: 1576; WAN024DLP; Start 224; Stop 248
tagtagccagtgaaatctgtgattc

SEQ ID NO: 298528 - DNA, 25 bp, Artificial
  probe
  misc_feature (1)..(25): SEQ ID NO: 1576; WAN024DLP; Start 236; Stop 260
aaatctgtgattccgagtttgtttg

SEQ ID NO: 298529 - DNA, 25 bp, Artificial
  probe
  misc_feature (1)..(25): SEQ ID NO: 1576; WAN024DLP; Start 199; Stop 223
ttgacgctcgatttggtattgataa

SEQ ID NO: 298530 - DNA, 25 bp, Artificial
  probe
  misc_feature (1)..(25): SEQ ID NO: 1576; WAN024DLP; Start 39; Stop 63
aattgtgaatcttaccataagtcaa

SEQ ID NO: 298531 - DNA, 25 bp, Artificial
  probe
  misc_feature (1)..(25): SEQ ID NO: 1576; WAN024DLP; Start 219; Stop 243
gataatagtagccagtgaaatctgt

SEQ ID NO: 298532 - DNA, 25 bp, Artificial
  probe
  misc_feature (1)..(25): SEQ ID NO: 1576; WAN024DLP; Start 218; Stop 242
tgataatagtagccagtgaaatctg

SEQ ID NO: 298533 - DNA, 25 bp, Artificial
  probe
  misc_feature (1)..(25): SEQ ID NO: 1577; WAN024D76; Start 77; Stop 101
gtccacttagcattctcttcatctc

SEQ ID NO: 298534 - DNA, 25 bp, Artificial
  probe
  misc_feature (1)..(25): SEQ ID NO: 1577; WAN024D76; Start 76; Stop 100
agtccacttagcattctcttcatct

SEQ ID NO: 298535 - DNA, 25 bp, Artificial
  probe
  misc_feature (1)..(25): SEQ ID NO: 1577; WAN024D76; Start 75; Stop 99
cagtccacttagcattctcttcatc

SEQ ID NO: 298536 - DNA, 25 bp, Artificial
  probe
  misc_feature (1)..(25): SEQ ID NO: 1577; WAN024D76; Start 72; Stop 96
gttcagtccacttagcattctcttc

SEQ ID NO: 298537 - DNA, 25 bp, Artificial
  probe
  misc_feature (1)..(25): SEQ ID NO: 1577; WAN024D76; Start 74; Stop 98
tcagtccacttagcattctcttcat

SEQ ID NO: 298538 - DNA, 25 bp, Artificial
  probe
  misc_feature (1)..(25): SEQ ID NO: 1577; WAN024D76; Start 73; Stop 97
ttcagtccacttagcattctcttca

SEQ ID NO: 298539 - DNA, 25 bp, Artificial
  probe
  misc_feature (1)..(25): SEQ ID NO: 1577; WAN024D76; Start 78; Stop 102
tccacttagcattctcttcatctcc

SEQ ID NO: 298540 - DNA, 25 bp, Artificial
  probe
  misc_feature (1)..(25): SEQ ID NO: 1577; WAN024D76; Start 301; Stop 325
catctgaagcatgataatggtgata

SEQ ID NO: 298541 - DNA, 25 bp, Artificial
  probe
  misc_feature (1)..(25): SEQ ID NO: 1577; WAN024D76; Start 83; Stop 107
ttagcattctcttcatctcccatag

SEQ ID NO: 298542 - DNA, 25 bp, Artificial
  probe
  misc_feature (1)..(25): SEQ ID NO: 1577; WAN024D76; Start 82; Stop 106
cttagcattctcttcatctcccata

SEQ ID NO: 298543 - DNA, 25 bp, Artificial
  probe
  misc_feature (1)..(25): SEQ ID NO: 1577; WAN024D76; Start 71; Stop 95
cgttcagtccacttagcattctctt

SEQ ID NO: 298544 - DNA, 25 bp, Artificial
  probe
  misc_feature (1)..(25): SEQ ID NO: 1577; WAN024D76; Start 302; Stop 326
atctgaagcatgataatggtgatat

SEQ ID NO: 298545 - DNA, 25 bp, Artificial
  probe
  misc_feature (1)..(25): SEQ ID NO: 1577; WAN024D76; Start 315; Stop 339
taatggtgatatctgcttccttctc

SEQ ID NO: 298546 - DNA, 25 bp, Artificial
  probe
  misc_feature (1)..(25): SEQ ID NO: 1577; WAN024D76; Start 216; Stop 240
caaagataatatccgctcccaaatc

SEQ ID NO: 298547 - DNA, 25 bp, Artificial
  probe
  misc_feature (1)..(25): SEQ ID NO: 1577; WAN024D76; Start 314; Stop 338
ataatggtgatatctgcttccttct

SEQ ID NO: 298548 - DNA, 25 bp, Artificial
  probe
  misc_feature (1)..(25): SEQ ID NO: 1577; WAN024D76; Start 84; Stop 108
tagcattctcttcatctcccataga

SEQ ID NO: 298549 - DNA, 25 bp, Artificial
  probe
  misc_feature (1)..(25): SEQ ID NO: 1577; WAN024D76; Start 81; Stop 105
acttagcattctcttcatctcccat

SEQ ID NO: 298550 - DNA, 25 bp, Artificial
  probe
  misc_feature (1)..(25): SEQ ID NO: 1577; WAN024D76; Start 343; Stop 367
ccgttcaatttcaaccttcatctta

SEQ ID NO: 298551 - DNA, 25 bp, Artificial
  probe
  misc_feature (1)..(25): SEQ ID NO: 1577; WAN024D76; Start 215; Stop 239
ccaaagataatatccgctcccaaat

SEQ ID NO: 298552 - DNA, 25 bp, Artificial
  probe
  misc_feature (1)..(25): SEQ ID NO: 1577; WAN024D76; Start 316; Stop 340
aatggtgatatctgcttccttctct

SEQ ID NO: 298553 - DNA, 25 bp, Artificial
  probe
  misc_feature (1)..(25): SEQ ID NO: 1577; WAN024D76; Start 217; Stop 241
aaagataatatccgctcccaaatcg

SEQ ID NO: 298554 - DNA, 25 bp, Artificial
  probe
  misc_feature (1)..(25): SEQ ID NO: 1577; WAN024D76; Start 350; Stop 374
atttcaaccttcatcttatcttcgt

SEQ ID NO: 298555 - DNA, 25 bp, Artificial
  probe
  misc_feature (1)..(25): SEQ ID NO: 1577; WAN024D76; Start 112; Stop 136
aattcgttgattggaaatgaagttc

SEQ ID NO: 298556 - DNA, 25 bp, Artificial
  probe
  misc_feature (1)..(25): SEQ ID NO: 1577; WAN024D76; Start 352; Stop 376
ttcaaccttcatcttatcttcgttt

SEQ ID NO: 298557 - DNA, 25 bp, Artificial
  probe
  misc_feature (1)..(25): SEQ ID NO: 1577; WAN024D76; Start 351; Stop 375
tttcaaccttcatcttatcttcgtt

SEQ ID NO: 298558 - DNA, 25 bp, Artificial
  probe
  misc_feature (1)..(25): SEQ ID NO: 1577; WAN024D76; Start 312; Stop 336
tgataatggtgatatctgcttcctt

SEQ ID NO: 298559 - DNA, 25 bp, Artificial
  probe
  misc_feature (1)..(25): SEQ ID NO: 1577; WAN024D76; Start 311; Stop 335
atgataatggtgatatctgcttcct

SEQ ID NO: 298560 - DNA, 25 bp, Artificial
  probe
  misc_feature (1)..(25): SEQ ID NO: 1577; WAN024D76; Start 310; Stop 334
catgataatggtgatatctgcttcc

SEQ ID NO: 298561 - DNA, 25 bp, Artificial
  probe
  misc_feature (1)..(25): SEQ ID NO: 1577; WAN024D76; Start 214; Stop 238
tccaaagataatatccgctcccaaa

SEQ ID NO: 298562 - DNA, 25 bp, Artificial
  probe
  misc_feature (1)..(25): SEQ ID NO: 1577; WAN024D76; Start 317; Stop 341
atggtgatatctgcttccttctctg

SEQ ID NO: 298563 - DNA, 25 bp, Artificial
  probe
  misc_feature (1)..(25): SEQ ID NO: 1577; WAN024D76; Start 313; Stop 337
gataatggtgatatctgcttccttc

SEQ ID NO: 298564 - DNA, 25 bp, Artificial
  probe
  misc_feature (1)..(25): SEQ ID NO: 1577; WAN024D76; Start 80; Stop 104
cacttagcattctcttcatctccca

SEQ ID NO: 298565 - DNA, 25 bp, Artificial
  probe
  misc_feature (1)..(25): SEQ ID NO: 1577; WAN024D76; Start 344; Stop 368
cgttcaatttcaaccttcatcttat

SEQ ID NO: 298566 - DNA, 25 bp, Artificial
  probe
  misc_feature (1)..(25): SEQ ID NO: 1578; WAN024CP4; Start 345; Stop 369
tatagtaatgatagtggtcaccgtg

SEQ ID NO: 298567 - DNA, 25 bp, Artificial
  probe
  misc_feature (1)..(25): SEQ ID NO: 1578; WAN024CP4; Start 246; Stop 270
ccttgacttcattgacaatatcagc

SEQ ID NO: 298568 - DNA, 25 bp, Artificial
  probe
  misc_feature (1)..(25): SEQ ID NO: 1578; WAN024CP4; Start 247; Stop 271
cttgacttcattgacaatatcagcg

SEQ ID NO: 298569 - DNA, 25 bp, Artificial
  probe
  misc_feature (1)..(25): SEQ ID NO: 1578; WAN024CP4; Start 293; Stop 317
tccttcatcaagagttcttcactaa

SEQ ID NO: 298570 - DNA, 25 bp, Artificial
  probe
  misc_feature (1)..(25): SEQ ID NO: 1578; WAN024CP4; Start 346; Stop 370
atagtaatgatagtggtcaccgtgt

SEQ ID NO: 298571 - DNA, 25 bp, Artificial
  probe
  misc_feature (1)..(25): SEQ ID NO: 1578; WAN024CP4; Start 292; Stop 316
atccttcatcaagagttcttcacta

SEQ ID NO: 298572 - DNA, 25 bp, Artificial
  probe
  misc_feature (1)..(25): SEQ ID NO: 1578; WAN024CP4; Start 291; Stop 315
gatccttcatcaagagttcttcact

SEQ ID NO: 298573 - DNA, 25 bp, Artificial
  probe
  misc_feature (1)..(25): SEQ ID NO: 1578; WAN024CP4; Start 344; Stop 368
ttatagtaatgatagtggtcaccgt

SEQ ID NO: 298574 - DNA, 25 bp, Artificial
  probe
  misc_feature (1)..(25): SEQ ID NO: 1578; WAN024CP4; Start 248; Stop 272
ttgacttcattgacaatatcagcgt

SEQ ID NO: 298575 - DNA, 25 bp, Artificial
  probe
  misc_feature (1)..(25): SEQ ID NO: 1578; WAN024CP4; Start 251; Stop 275
acttcattgacaatatcagcgtctt

SEQ ID NO: 298576 - DNA, 25 bp, Artificial
  probe
  misc_feature (1)..(25): SEQ ID NO: 1578; WAN024CP4; Start 250; Stop 274
gacttcattgacaatatcagcgtct

SEQ ID NO: 298577 - DNA, 25 bp, Artificial
  probe
  misc_feature (1)..(25): SEQ ID NO: 1578; WAN024CP4; Start 249; Stop 273
tgacttcattgacaatatcagcgtc

SEQ ID NO: 298578 - DNA, 25 bp, Artificial
  probe
  misc_feature (1)..(25): SEQ ID NO: 1578; WAN024CP4; Start 231; Stop 255
tgatgatataaccacccttgacttc

SEQ ID NO: 298579 - DNA, 25 bp, Artificial
  probe
  misc_feature (1)..(25): SEQ ID NO: 1578; WAN024CP4; Start 229; Stop 253
cttgatgatataaccacccttgact

SEQ ID NO: 298580 - DNA, 25 bp, Artificial
  probe
  misc_feature (1)..(25): SEQ ID NO: 1578; WAN024CP4; Start 343; Stop 367
attatagtaatgatagtggtcaccg

SEQ ID NO: 298581 - DNA, 25 bp, Artificial
  probe
  misc_feature (1)..(25): SEQ ID NO: 1578; WAN024CP4; Start 230; Stop 254
ttgatgatataaccacccttgactt

SEQ ID NO: 298582 - DNA, 25 bp, Artificial
  probe
  misc_feature (1)..(25): SEQ ID NO: 1578; WAN024CP4; Start 269; Stop 293
gcgtctttaagttgatagtttggat

SEQ ID NO: 298583 - DNA, 25 bp, Artificial
  probe
  misc_feature (1)..(25): SEQ ID NO: 1578; WAN024CP4; Start 268; Stop 292
agcgtctttaagttgatagtttgga

SEQ ID NO: 298584 - DNA, 25 bp, Artificial
  probe
  misc_feature (1)..(25): SEQ ID NO: 1578; WAN024CP4; Start 267; Stop 291
cagcgtctttaagttgatagtttgg

SEQ ID NO: 298585 - DNA, 25 bp, Artificial
  probe
  misc_feature (1)..(25): SEQ ID NO: 1578; WAN024CP4; Start 236; Stop 260
atataaccacccttgacttcattga

SEQ ID NO: 298586 - DNA, 25 bp, Artificial
  probe
  misc_feature (1)..(25): SEQ ID NO: 1578; WAN024CP4; Start 237; Stop 261
tataaccacccttgacttcattgac

SEQ ID NO: 298587 - DNA, 25 bp, Artificial
  probe
  misc_feature (1)..(25): SEQ ID NO: 1578; WAN024CP4; Start 235; Stop 259
gatataaccacccttgacttcattg

SEQ ID NO: 298588 - DNA, 25 bp, Artificial
  probe
  misc_feature (1)..(25): SEQ ID NO: 1578; WAN024CP4; Start 314; Stop 338
ctaaagagggcatcataaggaactt

SEQ ID NO: 298589 - DNA, 25 bp, Artificial
  probe
  misc_feature (1)..(25): SEQ ID NO: 1578; WAN024CP4; Start 228; Stop 252
ccttgatgatataaccacccttgac

SEQ ID NO: 298590 - DNA, 25 bp, Artificial
  probe
  misc_feature (1)..(25): SEQ ID NO: 1578; WAN024CP4; Start 226; Stop 250
gaccttgatgatataaccacccttg

SEQ ID NO: 298591 - DNA, 25 bp, Artificial
  probe
  misc_feature (1)..(25): SEQ ID NO: 1578; WAN024CP4; Start 1; Stop 25
atgaggaacgatataagcattaccc

SEQ ID NO: 298592 - DNA, 25 bp, Artificial
  probe
  misc_feature (1)..(25): SEQ ID NO: 1578; WAN024CP4; Start 60; Stop 84
aaccatcatttgtcgtatatcgtcc

SEQ ID NO: 298593 - DNA, 25 bp, Artificial
  probe
  misc_feature (1)..(25): SEQ ID NO: 1578; WAN024CP4; Start 347; Stop 371
tagtaatgatagtggtcaccgtgtg

SEQ ID NO: 298594 - DNA, 25 bp, Artificial
  probe
  misc_feature (1)..(25): SEQ ID NO: 1578; WAN024CP4; Start 59; Stop 83
taaccatcatttgtcgtatatcgtc

SEQ ID NO: 298595 - DNA, 25 bp, Artificial
  probe
  misc_feature (1)..(25): SEQ ID NO: 1578; WAN024CP4; Start 313; Stop 337
actaaagagggcatcataaggaact

SEQ ID NO: 298596 - DNA, 25 bp, Artificial
  probe
  misc_feature (1)..(25): SEQ ID NO: 1578; WAN024CP4; Start 312; Stop 336
cactaaagagggcatcataaggaac

SEQ ID NO: 298597 - DNA, 25 bp, Artificial
  probe
  misc_feature (1)..(25): SEQ ID NO: 1578; WAN024CP4; Start 311; Stop 335
tcactaaagagggcatcataaggaa

SEQ ID NO: 298598 - DNA, 25 bp, Artificial
  probe
  misc_feature (1)..(25): SEQ ID NO: 1578; WAN024CP4; Start 310; Stop 334
ttcactaaagagggcatcataagga

SEQ ID NO: 298599 - DNA, 25 bp, Artificial
  probe
  misc_feature (1)..(25): SEQ ID NO: 1579; WAN024FLM; Start 786; Stop 810
aagcgttgatagtatagttcttagt

SEQ ID NO: 298600 - DNA, 25 bp, Artificial
  probe
  misc_feature (1)..(25): SEQ ID NO: 1579; WAN024FLM; Start 658; Stop 682
ttgttctgcttacttggttgtttag

SEQ ID NO: 298601 - DNA, 25 bp, Artificial
  probe
  misc_feature (1)..(25): SEQ ID NO: 1579; WAN024FLM; Start 536; Stop 560
agtttgttatagattcgtttgcgtc

SEQ ID NO: 298602 - DNA, 25 bp, Artificial
  probe
  misc_feature (1)..(25): SEQ ID NO: 1579; WAN024FLM; Start 535; Stop 559
aagtttgttatagattcgtttgcgt

SEQ ID NO: 298603 - DNA, 25 bp, Artificial
  probe
  misc_feature (1)..(25): SEQ ID NO: 1579; WAN024FLM; Start 311; Stop 335
cgcatttgattgaaggatttactga

SEQ ID NO: 298604 - DNA, 25 bp, Artificial
  probe
  misc_feature (1)..(25): SEQ ID NO: 1579; WAN024FLM; Start 310; Stop 334
tcgcatttgattgaaggatttactg

SEQ ID NO: 298605 - DNA, 25 bp, Artificial
  probe
  misc_feature (1)..(25): SEQ ID NO: 1579; WAN024FLM; Start 42; Stop 66
ttcttgtctgggtataatagcgatg

SEQ ID NO: 298606 - DNA, 25 bp, Artificial
  probe
  misc_feature (1)..(25): SEQ ID NO: 1579; WAN024FLM; Start 662; Stop 686
tctgcttacttggttgtttaggtat

SEQ ID NO: 298607 - DNA, 25 bp, Artificial
  probe
  misc_feature (1)..(25): SEQ ID NO: 1579; WAN024FLM; Start 661; Stop 685
ttctgcttacttggttgtttaggta

SEQ ID NO: 298608 - DNA, 25 bp, Artificial
  probe
  misc_feature (1)..(25): SEQ ID NO: 1579; WAN024FLM; Start 41; Stop 65
tttcttgtctgggtataatagcgat

SEQ ID NO: 298609 - DNA, 25 bp, Artificial
  probe
  misc_feature (1)..(25): SEQ ID NO: 1579; WAN024FLM; Start 40; Stop 64
atttcttgtctgggtataatagcga

SEQ ID NO: 298610 - DNA, 25 bp, Artificial
  probe
  misc_feature (1)..(25): SEQ ID NO: 1579; WAN024FLM; Start 945; Stop 969
tgtagctgttcttattggattgatt

SEQ ID NO: 298611 - DNA, 25 bp, Artificial
  probe
  misc_feature (1)..(25): SEQ ID NO: 1579; WAN024FLM; Start 944; Stop 968
ttgtagctgttcttattggattgat

SEQ ID NO: 298612 - DNA, 25 bp, Artificial
  probe
  misc_feature (1)..(25): SEQ ID NO: 1579; WAN024FLM; Start 657; Stop 681
attgttctgcttacttggttgttta

SEQ ID NO: 298613 - DNA, 25 bp, Artificial
  probe
  misc_feature (1)..(25): SEQ ID NO: 1579; WAN024FLM; Start 656; Stop 680
aattgttctgcttacttggttgttt

SEQ ID NO: 298614 - DNA, 25 bp, Artificial
  probe
  misc_feature (1)..(25): SEQ ID NO: 1579; WAN024FLM; Start 655; Stop 679
aaattgttctgcttacttggttgtt

SEQ ID NO: 298615 - DNA, 25 bp, Artificial
  probe
  misc_feature (1)..(25): SEQ ID NO: 1579; WAN024FLM; Start 5; Stop 29
ggaagcgatatgataatttggatgg

SEQ ID NO: 298616 - DNA, 25 bp, Artificial
  probe
  misc_feature (1)..(25): SEQ ID NO: 1579; WAN024FLM; Start 2; Stop 26
tgaggaagcgatatgataatttgga

SEQ ID NO: 298617 - DNA, 25 bp, Artificial
  probe
  misc_feature (1)..(25): SEQ ID NO: 1579; WAN024FLM; Start 663; Stop 687
ctgcttacttggttgtttaggtatt

SEQ ID NO: 298618 - DNA, 25 bp, Artificial
  probe
  misc_feature (1)..(25): SEQ ID NO: 1579; WAN024FLM; Start 99; Stop 123
tggttggatatttgaagtgttcgta

SEQ ID NO: 298619 - DNA, 25 bp, Artificial
  probe
  misc_feature (1)..(25): SEQ ID NO: 1579; WAN024FLM; Start 309; Stop 333
ttcgcatttgattgaaggatttact

SEQ ID NO: 298620 - DNA, 25 bp, Artificial
  probe
  misc_feature (1)..(25): SEQ ID NO: 1579; WAN024FLM; Start 654; Stop 678
taaattgttctgcttacttggttgt

SEQ ID NO: 298621 - DNA, 25 bp, Artificial
  probe
  misc_feature (1)..(25): SEQ ID NO: 1579; WAN024FLM; Start 33; Stop 57
acgagtaatttcttgtctgggtata

SEQ ID NO: 298622 - DNA, 25 bp, Artificial
  probe
  misc_feature (1)..(25): SEQ ID NO: 1579; WAN024FLM; Start 97; Stop 121
tatggttggatatttgaagtgttcg

SEQ ID NO: 298623 - DNA, 25 bp, Artificial
  probe
  misc_feature (1)..(25): SEQ ID NO: 1579; WAN024FLM; Start 32; Stop 56
tacgagtaatttcttgtctgggtat

SEQ ID NO: 298624 - DNA, 25 bp, Artificial
  probe
  misc_feature (1)..(25): SEQ ID NO: 1579; WAN024FLM; Start 6; Stop 30
gaagcgatatgataatttggatgga

SEQ ID NO: 298625 - DNA, 25 bp, Artificial
  probe
  misc_feature (1)..(25): SEQ ID NO: 1579; WAN024FLM; Start 4; Stop 28
aggaagcgatatgataatttggatg

SEQ ID NO: 298626 - DNA, 25 bp, Artificial
  probe
  misc_feature (1)..(25): SEQ ID NO: 1579; WAN024FLM; Start 1; Stop 25
atgaggaagcgatatgataatttgg

SEQ ID NO: 298627 - DNA, 25 bp, Artificial
  probe
  misc_feature (1)..(25): SEQ ID NO: 1579; WAN024FLM; Start 31; Stop 55
ttacgagtaatttcttgtctgggta

SEQ ID NO: 298628 - DNA, 25 bp, Artificial
  probe
  misc_feature (1)..(25): SEQ ID NO: 1579; WAN024FLM; Start 39; Stop 63
aatttcttgtctgggtataatagcg

SEQ ID NO: 298629 - DNA, 25 bp, Artificial
  probe
  misc_feature (1)..(25): SEQ ID NO: 1579; WAN024FLM; Start 98; Stop 122
atggttggatatttgaagtgttcgt

SEQ ID NO: 298630 - DNA, 25 bp, Artificial
  probe
  misc_feature (1)..(25): SEQ ID NO: 1579; WAN024FLM; Start 697; Stop 721
cattatctattcattcaaccttggt

SEQ ID NO: 298631 - DNA, 25 bp, Artificial
  probe
  misc_feature (1)..(25): SEQ ID NO: 1579; WAN024FLM; Start 660; Stop 684
gttctgcttacttggttgtttaggt

SEQ ID NO: 298632 - DNA, 25 bp, Artificial
  probe
  misc_feature (1)..(25): SEQ ID NO: 1580; WAN024GLG; Start 1; Stop 25
atgaggaatgacttgaacagttgcc

SEQ ID NO: 298633 - DNA, 25 bp, Artificial
  probe
  misc_feature (1)..(25): SEQ ID NO: 1580; WAN024GLG; Start 124; Stop 148
ttcatagtgacccaagtccaaatct

SEQ ID NO: 298634 - DNA, 25 bp, Artificial
  probe
  misc_feature (1)..(25): SEQ ID NO: 1580; WAN024GLG; Start 123; Stop 147
gttcatagtgacccaagtccaaatc

SEQ ID NO: 298635 - DNA, 25 bp, Artificial
  probe
  misc_feature (1)..(25): SEQ ID NO: 1580; WAN024GLG; Start 79; Stop 103
agttgtcacgttggaatatttgttg

SEQ ID NO: 298636 - DNA, 25 bp, Artificial
  probe
  misc_feature (1)..(25): SEQ ID NO: 1580; WAN024GLG; Start 78; Stop 102
cagttgtcacgttggaatatttgtt

SEQ ID NO: 298637 - DNA, 25 bp, Artificial
  probe
  misc_feature (1)..(25): SEQ ID NO: 1580; WAN024GLG; Start 87; Stop 111
cgttggaatatttgttgagattgat

SEQ ID NO: 298638 - DNA, 25 bp, Artificial
  probe
  misc_feature (1)..(25): SEQ ID NO: 1580; WAN024GLG; Start 85; Stop 109
cacgttggaatatttgttgagattg

SEQ ID NO: 298639 - DNA, 25 bp, Artificial
  probe
  misc_feature (1)..(25): SEQ ID NO: 1580; WAN024GLG; Start 86; Stop 110
acgttggaatatttgttgagattga

SEQ ID NO: 298640 - DNA, 25 bp, Artificial
  probe
  misc_feature (1)..(25): SEQ ID NO: 1580; WAN024GLG; Start 127; Stop 151
atagtgacccaagtccaaatctgtc

SEQ ID NO: 298641 - DNA, 25 bp, Artificial
  probe
  misc_feature (1)..(25): SEQ ID NO: 1580; WAN024GLG; Start 125; Stop 149
tcatagtgacccaagtccaaatctg

SEQ ID NO: 298642 - DNA, 25 bp, Artificial
  probe
  misc_feature (1)..(25): SEQ ID NO: 1580; WAN024GLG; Start 83; Stop 107
gtcacgttggaatatttgttgagat

SEQ ID NO: 298643 - DNA, 25 bp, Artificial
  probe
  misc_feature (1)..(25): SEQ ID NO: 1580; WAN024GLG; Start 81; Stop 105
ttgtcacgttggaatatttgttgag

SEQ ID NO: 298644 - DNA, 25 bp, Artificial
  probe
  misc_feature (1)..(25): SEQ ID NO: 1580; WAN024GLG; Start 80; Stop 104
gttgtcacgttggaatatttgttga

SEQ ID NO: 298645 - DNA, 25 bp, Artificial
  probe
  misc_feature (1)..(25): SEQ ID NO: 1580; WAN024GLG; Start 84; Stop 108
tcacgttggaatatttgttgagatt

SEQ ID NO: 298646 - DNA, 25 bp, Artificial
  probe
  misc_feature (1)..(25): SEQ ID NO: 1580; WAN024GLG; Start 82; Stop 106
tgtcacgttggaatatttgttgaga

SEQ ID NO: 298647 - DNA, 25 bp, Artificial
  probe
  misc_feature (1)..(25): SEQ ID NO: 1580; WAN024GLG; Start 126; Stop 150
catagtgacccaagtccaaatctgt

SEQ ID NO: 298648 - DNA, 25 bp, Artificial
  probe
  misc_feature (1)..(25): SEQ ID NO: 1580; WAN024GLG; Start 122; Stop 146
cgttcatagtgacccaagtccaaat

SEQ ID NO: 298649 - DNA, 25 bp, Artificial
  probe
  misc_feature (1)..(25): SEQ ID NO: 1580; WAN024GLG; Start 128; Stop 152
tagtgacccaagtccaaatctgtct

SEQ ID NO: 298650 - DNA, 25 bp, Artificial
  probe
  misc_feature (1)..(25): SEQ ID NO: 1580; WAN024GLG; Start 233; Stop 257
aacttttgaatggttactttgagac

SEQ ID NO: 298651 - DNA, 25 bp, Artificial
  probe
  misc_feature (1)..(25): SEQ ID NO: 1580; WAN024GLG; Start 77; Stop 101
ccagttgtcacgttggaatatttgt

SEQ ID NO: 298652 - DNA, 25 bp, Artificial
  probe
  misc_feature (1)..(25): SEQ ID NO: 1580; WAN024GLG; Start 234; Stop 258
acttttgaatggttactttgagacc

SEQ ID NO: 298653 - DNA, 25 bp, Artificial
  probe
  misc_feature (1)..(25): SEQ ID NO: 1580; WAN024GLG; Start 100; Stop 124
gttgagattgatatcgatgaaacgt

SEQ ID NO: 298654 - DNA, 25 bp, Artificial
  probe
  misc_feature (1)..(25): SEQ ID NO: 1580; WAN024GLG; Start 99; Stop 123
tgttgagattgatatcgatgaaacg

SEQ ID NO: 298655 - DNA, 25 bp, Artificial
  probe
  misc_feature (1)..(25): SEQ ID NO: 1580; WAN024GLG; Start 195; Stop 219
gactcatggttcccggatcaatatt

SEQ ID NO: 298656 - DNA, 25 bp, Artificial
  probe
  misc_feature (1)..(25): SEQ ID NO: 1580; WAN024GLG; Start 232; Stop 256
aaacttttgaatggttactttgaga

SEQ ID NO: 298657 - DNA, 25 bp, Artificial
  probe
  misc_feature (1)..(25): SEQ ID NO: 1580; WAN024GLG; Start 28; Stop 52
aaggtattctccacggcgttcttta

SEQ ID NO: 298658 - DNA, 25 bp, Artificial
  probe
  misc_feature (1)..(25): SEQ ID NO: 1580; WAN024GLG; Start 50; Stop 74
ttacgaagaacttcactgtaaattt

SEQ ID NO: 298659 - DNA, 25 bp, Artificial
  probe
  misc_feature (1)..(25): SEQ ID NO: 1580; WAN024GLG; Start 76; Stop 100
cccagttgtcacgttggaatatttg

SEQ ID NO: 298660 - DNA, 25 bp, Artificial
  probe
  misc_feature (1)..(25): SEQ ID NO: 1580; WAN024GLG; Start 75; Stop 99
tcccagttgtcacgttggaatattt

SEQ ID NO: 298661 - DNA, 25 bp, Artificial
  probe
  misc_feature (1)..(25): SEQ ID NO: 1580; WAN024GLG; Start 55; Stop 79
aagaacttcactgtaaattttccca

SEQ ID NO: 298662 - DNA, 25 bp, Artificial
  probe
  misc_feature (1)..(25): SEQ ID NO: 1580; WAN024GLG; Start 53; Stop 77
cgaagaacttcactgtaaattttcc

SEQ ID NO: 298663 - DNA, 25 bp, Artificial
  probe
  misc_feature (1)..(25): SEQ ID NO: 1580; WAN024GLG; Start 67; Stop 91
gtaaattttcccagttgtcacgttg

SEQ ID NO: 298664 - DNA, 25 bp, Artificial
  probe
  misc_feature (1)..(25): SEQ ID NO: 1580; WAN024GLG; Start 54; Stop 78
gaagaacttcactgtaaattttccc

SEQ ID NO: 298665 - DNA, 25 bp, Artificial
  probe
  misc_feature (1)..(25): SEQ ID NO: 1582; WAN024DVJ; Start 524; Stop 548
ttgttgaagaagttgaatattgtgc

SEQ ID NO: 298666 - DNA, 25 bp, Artificial
  probe
  misc_feature (1)..(25): SEQ ID NO: 1582; WAN024DVJ; Start 167; Stop 191
aagaatccgatattgtagtgatgga

SEQ ID NO: 298667 - DNA, 25 bp, Artificial
  probe
  misc_feature (1)..(25): SEQ ID NO: 1582; WAN024DVJ; Start 314; Stop 338
cagtattagcttgtctcagagaacc

SEQ ID NO: 298668 - DNA, 25 bp, Artificial
  probe
  misc_feature (1)..(25): SEQ ID NO: 1582; WAN024DVJ; Start 525; Stop 549
tgttgaagaagttgaatattgtgca

SEQ ID NO: 298669 - DNA, 25 bp, Artificial
  probe
  misc_feature (1)..(25): SEQ ID NO: 1582; WAN024DVJ; Start 317; Stop 341
tattagcttgtctcagagaaccact

SEQ ID NO: 298670 - DNA, 25 bp, Artificial
  probe
  misc_feature (1)..(25): SEQ ID NO: 1582; WAN024DVJ; Start 316; Stop 340
gtattagcttgtctcagagaaccac

SEQ ID NO: 298671 - DNA, 25 bp, Artificial
  probe
  misc_feature (1)..(25): SEQ ID NO: 1582; WAN024DVJ; Start 315; Stop 339
agtattagcttgtctcagagaacca

SEQ ID NO: 298672 - DNA, 25 bp, Artificial
  probe
  misc_feature (1)..(25): SEQ ID NO: 1582; WAN024DVJ; Start 287; Stop 311
ttatccatgctcatacaacttatgc

SEQ ID NO: 298673 - DNA, 25 bp, Artificial
  probe
  misc_feature (1)..(25): SEQ ID NO: 1582; WAN024DVJ; Start 60; Stop 84
agtagaaacagatttgacgaaagga

SEQ ID NO: 298674 - DNA, 25 bp, Artificial
  probe
  misc_feature (1)..(25): SEQ ID NO: 1582; WAN024DVJ; Start 62; Stop 86
tagaaacagatttgacgaaaggaac

SEQ ID NO: 298675 - DNA, 25 bp, Artificial
  probe
  misc_feature (1)..(25): SEQ ID NO: 1582; WAN024DVJ; Start 61; Stop 85
gtagaaacagatttgacgaaaggaa

SEQ ID NO: 298676 - DNA, 25 bp, Artificial
  probe
  misc_feature (1)..(25): SEQ ID NO: 1582; WAN024DVJ; Start 195; Stop 219
taatggaaatgttgtagagggagaa

SEQ ID NO: 298677 - DNA, 25 bp, Artificial
  probe
  misc_feature (1)..(25): SEQ ID NO: 1582; WAN024DVJ; Start 194; Stop 218
ttaatggaaatgttgtagagggaga

SEQ ID NO: 298678 - DNA, 25 bp, Artificial
  probe
  misc_feature (1)..(25): SEQ ID NO: 1582; WAN024DVJ; Start 313; Stop 337
acagtattagcttgtctcagagaac

SEQ ID NO: 298679 - DNA, 25 bp, Artificial
  probe
  misc_feature (1)..(25): SEQ ID NO: 1582; WAN024DVJ; Start 311; Stop 335
caacagtattagcttgtctcagaga

SEQ ID NO: 298680 - DNA, 25 bp, Artificial
  probe
  misc_feature (1)..(25): SEQ ID NO: 1582; WAN024DVJ; Start 64; Stop 88
gaaacagatttgacgaaaggaacag

SEQ ID NO: 298681 - DNA, 25 bp, Artificial
  probe
  misc_feature (1)..(25): SEQ ID NO: 1582; WAN024DVJ; Start 312; Stop 336
aacagtattagcttgtctcagagaa

SEQ ID NO: 298682 - DNA, 25 bp, Artificial
  probe
  misc_feature (1)..(25): SEQ ID NO: 1582; WAN024DVJ; Start 63; Stop 87
agaaacagatttgacgaaaggaaca

SEQ ID NO: 298683 - DNA, 25 bp, Artificial
  probe
  misc_feature (1)..(25): SEQ ID NO: 1582; WAN024DVJ; Start 59; Stop 83
tagtagaaacagatttgacgaaagg

SEQ ID NO: 298684 - DNA, 25 bp, Artificial
  probe
  misc_feature (1)..(25): SEQ ID NO: 1582; WAN024DVJ; Start 318; Stop 342
attagcttgtctcagagaaccactt

SEQ ID NO: 298685 - DNA, 25 bp, Artificial
  probe
  misc_feature (1)..(25): SEQ ID NO: 1582; WAN024DVJ; Start 196; Stop 220
aatggaaatgttgtagagggagaac

SEQ ID NO: 298686 - DNA, 25 bp, Artificial
  probe
  misc_feature (1)..(25): SEQ ID NO: 1582; WAN024DVJ; Start 57; Stop 81
gctagtagaaacagatttgacgaaa

SEQ ID NO: 298687 - DNA, 25 bp, Artificial
  probe
  misc_feature (1)..(25): SEQ ID NO: 1582; WAN024DVJ; Start 166; Stop 190
aaagaatccgatattgtagtgatgg

SEQ ID NO: 298688 - DNA, 25 bp, Artificial
  probe
  misc_feature (1)..(25): SEQ ID NO: 1582; WAN024DVJ; Start 526; Stop 550
gttgaagaagttgaatattgtgcaa

SEQ ID NO: 298689 - DNA, 25 bp, Artificial
  probe
  misc_feature (1)..(25): SEQ ID NO: 1582; WAN024DVJ; Start 307; Stop 331
tatgcaacagtattagcttgtctca

SEQ ID NO: 298690 - DNA, 25 bp, Artificial
  probe
  misc_feature (1)..(25): SEQ ID NO: 1582; WAN024DVJ; Start 301; Stop 325
acaacttatgcaacagtattagctt

SEQ ID NO: 298691 - DNA, 25 bp, Artificial
  probe
  misc_feature (1)..(25): SEQ ID NO: 1582; WAN024DVJ; Start 304; Stop 328
acttatgcaacagtattagcttgtc

SEQ ID NO: 298692 - DNA, 25 bp, Artificial
  probe
  misc_feature (1)..(25): SEQ ID NO: 1582; WAN024DVJ; Start 302; Stop 326
caacttatgcaacagtattagcttg

SEQ ID NO: 298693 - DNA, 25 bp, Artificial
  probe
  misc_feature (1)..(25): SEQ ID NO: 1582; WAN024DVJ; Start 310; Stop 334
gcaacagtattagcttgtctcagag

SEQ ID NO: 298694 - DNA, 25 bp, Artificial
  probe
  misc_feature (1)..(25): SEQ ID NO: 1582; WAN024DVJ; Start 306; Stop 330
ttatgcaacagtattagcttgtctc

SEQ ID NO: 298695 - DNA, 25 bp, Artificial
  probe
  misc_feature (1)..(25): SEQ ID NO: 1582; WAN024DVJ; Start 305; Stop 329
cttatgcaacagtattagcttgtct

SEQ ID NO: 298696 - DNA, 25 bp, Artificial
  probe
  misc_feature (1)..(25): SEQ ID NO: 1582; WAN024DVJ; Start 284; Stop 308
caattatccatgctcatacaactta

SEQ ID NO: 298697 - DNA, 25 bp, Artificial
  probe
  misc_feature (1)..(25): SEQ ID NO: 1582; WAN024DVJ; Start 303; Stop 327
aacttatgcaacagtattagcttgt

SEQ ID NO: 298698 - DNA, 25 bp, Artificial
  probe
  misc_feature (1)..(25): SEQ ID NO: 1583; WAN024CNE; Start 26; Stop 50
ttaccgtattgaccgacttcctact

SEQ ID NO: 298699 - DNA, 25 bp, Artificial
  probe
  misc_feature (1)..(25): SEQ ID NO: 1583; WAN024CNE; Start 25; Stop 49
gttaccgtattgaccgacttcctac

SEQ ID NO: 298700 - DNA, 25 bp, Artificial
  probe
  misc_feature (1)..(25): SEQ ID NO: 1583; WAN024CNE; Start 14; Stop 38
gctttatcttcgttaccgtattgac

SEQ ID NO: 298701 - DNA, 25 bp, Artificial
  probe
  misc_feature (1)..(25): SEQ ID NO: 1583; WAN024CNE; Start 12; Stop 36
ttgctttatcttcgttaccgtattg

SEQ ID NO: 298702 - DNA, 25 bp, Artificial
  probe
  misc_feature (1)..(25): SEQ ID NO: 1583; WAN024CNE; Start 15; Stop 39
ctttatcttcgttaccgtattgacc

SEQ ID NO: 298703 - DNA, 25 bp, Artificial
  probe
  misc_feature (1)..(25): SEQ ID NO: 1583; WAN024CNE; Start 13; Stop 37
tgctttatcttcgttaccgtattga

SEQ ID NO: 298704 - DNA, 25 bp, Artificial
  probe
  misc_feature (1)..(25): SEQ ID NO: 1583; WAN024CNE; Start 10; Stop 34
ctttgctttatcttcgttaccgtat

SEQ ID NO: 298705 - DNA, 25 bp, Artificial
  probe
  misc_feature (1)..(25): SEQ ID NO: 1583; WAN024CNE; Start 11; Stop 35
tttgctttatcttcgttaccgtatt

SEQ ID NO: 298706 - DNA, 25 bp, Artificial
  probe
  misc_feature (1)..(25): SEQ ID NO: 1583; WAN024CNE; Start 16; Stop 40
tttatcttcgttaccgtattgaccg

SEQ ID NO: 298707 - DNA, 25 bp, Artificial
  probe
  misc_feature (1)..(25): SEQ ID NO: 1583; WAN024CNE; Start 27; Stop 51
taccgtattgaccgacttcctactc

SEQ ID NO: 298708 - DNA, 25 bp, Artificial
  probe
  misc_feature (1)..(25): SEQ ID NO: 1583; WAN024CNE; Start 9; Stop 33
gctttgctttatcttcgttaccgta

SEQ ID NO: 298709 - DNA, 25 bp, Artificial
  probe
  misc_feature (1)..(25): SEQ ID NO: 1583; WAN024CNE; Start 57; Stop 81
ccttcctacaagaattcatacctca

SEQ ID NO: 298710 - DNA, 25 bp, Artificial
  probe
  misc_feature (1)..(25): SEQ ID NO: 1583; WAN024CNE; Start 56; Stop 80
accttcctacaagaattcatacctc

SEQ ID NO: 298711 - DNA, 25 bp, Artificial
  probe
  misc_feature (1)..(25): SEQ ID NO: 1583; WAN024CNE; Start 53; Stop 77
cgaaccttcctacaagaattcatac

SEQ ID NO: 298712 - DNA, 25 bp, Artificial
  probe
  misc_feature (1)..(25): SEQ ID NO: 1583; WAN024CNE; Start 17; Stop 41
ttatcttcgttaccgtattgaccga

SEQ ID NO: 298713 - DNA, 25 bp, Artificial
  probe
  misc_feature (1)..(25): SEQ ID NO: 1583; WAN024CNE; Start 55; Stop 79
aaccttcctacaagaattcatacct

SEQ ID NO: 298714 - DNA, 25 bp, Artificial
  probe
  misc_feature (1)..(25): SEQ ID NO: 1583; WAN024CNE; Start 54; Stop 78
gaaccttcctacaagaattcatacc

SEQ ID NO: 298715 - DNA, 25 bp, Artificial
  probe
  misc_feature (1)..(25): SEQ ID NO: 1583; WAN024CNE; Start 52; Stop 76
gcgaaccttcctacaagaattcata

SEQ ID NO: 298716 - DNA, 25 bp, Artificial
  probe
  misc_feature (1)..(25): SEQ ID NO: 1583; WAN024CNE; Start 18; Stop 42
tatcttcgttaccgtattgaccgac

SEQ ID NO: 298717 - DNA, 25 bp, Artificial
  probe
  misc_feature (1)..(25): SEQ ID NO: 1583; WAN024CNE; Start 7; Stop 31
ctgctttgctttatcttcgttaccg

SEQ ID NO: 298718 - DNA, 25 bp, Artificial
  probe
  misc_feature (1)..(25): SEQ ID NO: 1583; WAN024CNE; Start 58; Stop 82
cttcctacaagaattcatacctcaa

SEQ ID NO: 298719 - DNA, 25 bp, Artificial
  probe
  misc_feature (1)..(25): SEQ ID NO: 1583; WAN024CNE; Start 24; Stop 48
cgttaccgtattgaccgacttccta

SEQ ID NO: 298720 - DNA, 25 bp, Artificial
  probe
  misc_feature (1)..(25): SEQ ID NO: 1583; WAN024CNE; Start 6; Stop 30
gctgctttgctttatcttcgttacc

SEQ ID NO: 298721 - DNA, 25 bp, Artificial
  probe
  misc_feature (1)..(25): SEQ ID NO: 1583; WAN024CNE; Start 5; Stop 29
ggctgctttgctttatcttcgttac

SEQ ID NO: 298722 - DNA, 25 bp, Artificial
  probe
  misc_feature (1)..(25): SEQ ID NO: 1583; WAN024CNE; Start 4; Stop 28
aggctgctttgctttatcttcgtta

SEQ ID NO: 298723 - DNA, 25 bp, Artificial
  probe
  misc_feature (1)..(25): SEQ ID NO: 1583; WAN024CNE; Start 8; Stop 32
tgctttgctttatcttcgttaccgt

SEQ ID NO: 298724 - DNA, 25 bp, Artificial
  probe
  misc_feature (1)..(25): SEQ ID NO: 1583; WAN024CNE; Start 21; Stop 45
cttcgttaccgtattgaccgacttc

SEQ ID NO: 298725 - DNA, 25 bp, Artificial
  probe
  misc_feature (1)..(25): SEQ ID NO: 1583; WAN024CNE; Start 60; Stop 84
tcctacaagaattcatacctcaaag

SEQ ID NO: 298726 - DNA, 25 bp, Artificial
  probe
  misc_feature (1)..(25): SEQ ID NO: 1583; WAN024CNE; Start 19; Stop 43
atcttcgttaccgtattgaccgact

SEQ ID NO: 298727 - DNA, 25 bp, Artificial
  probe
  misc_feature (1)..(25): SEQ ID NO: 1583; WAN024CNE; Start 1; Stop 25
atgaggctgctttgctttatcttcg

SEQ ID NO: 298728 - DNA, 25 bp, Artificial
  probe
  misc_feature (1)..(25): SEQ ID NO: 1583; WAN024CNE; Start 65; Stop 89
caagaattcatacctcaaaggcttt

SEQ ID NO: 298729 - DNA, 25 bp, Artificial
  probe
  misc_feature (1)..(25): SEQ ID NO: 1583; WAN024CNE; Start 63; Stop 87
tacaagaattcatacctcaaaggct

SEQ ID NO: 298730 - DNA, 25 bp, Artificial
  probe
  misc_feature (1)..(25): SEQ ID NO: 1583; WAN024CNE; Start 62; Stop 86
ctacaagaattcatacctcaaaggc

SEQ ID NO: 298731 - DNA, 25 bp, Artificial
  probe
  misc_feature (1)..(25): SEQ ID NO: 1584; WAN024DMO; Start 426; Stop 450
aggaattaaggagaagcaagtagtc

SEQ ID NO: 298732 - DNA, 25 bp, Artificial
  probe
  misc_feature (1)..(25): SEQ ID NO: 1584; WAN024DMO; Start 424; Stop 448
tcaggaattaaggagaagcaagtag

SEQ ID NO: 298733 - DNA, 25 bp, Artificial
  probe
  misc_feature (1)..(25): SEQ ID NO: 1584; WAN024DMO; Start 425; Stop 449
caggaattaaggagaagcaagtagt

SEQ ID NO: 298734 - DNA, 25 bp, Artificial
  probe
  misc_feature (1)..(25): SEQ ID NO: 1584; WAN024DMO; Start 423; Stop 447
atcaggaattaaggagaagcaagta

SEQ ID NO: 298735 - DNA, 25 bp, Artificial
  probe
  misc_feature (1)..(25): SEQ ID NO: 1584; WAN024DMO; Start 422; Stop 446
tatcaggaattaaggagaagcaagt

SEQ ID NO: 298736 - DNA, 25 bp, Artificial
  probe
  misc_feature (1)..(25): SEQ ID NO: 1584; WAN024DMO; Start 421; Stop 445
ctatcaggaattaaggagaagcaag

SEQ ID NO: 298737 - DNA, 25 bp, Artificial
  probe
  misc_feature (1)..(25): SEQ ID NO: 1584; WAN024DMO; Start 438; Stop 462
gaagcaagtagtcggagagatagaa

SEQ ID NO: 298738 - DNA, 25 bp, Artificial
  probe
  misc_feature (1)..(25): SEQ ID NO: 1584; WAN024DMO; Start 428; Stop 452
gaattaaggagaagcaagtagtcgg

SEQ ID NO: 298739 - DNA, 25 bp, Artificial
  probe
  misc_feature (1)..(25): SEQ ID NO: 1584; WAN024DMO; Start 427; Stop 451
ggaattaaggagaagcaagtagtcg

SEQ ID NO: 298740 - DNA, 25 bp, Artificial
  probe
  misc_feature (1)..(25): SEQ ID NO: 1584; WAN024DMO; Start 415; Stop 439
cgctatctatcaggaattaaggaga

SEQ ID NO: 298741 - DNA, 25 bp, Artificial
  probe
  misc_feature (1)..(25): SEQ ID NO: 1584; WAN024DMO; Start 171; Stop 195
taagcagagaattgaatcagattgg

SEQ ID NO: 298742 - DNA, 25 bp, Artificial
  probe
  misc_feature (1)..(25): SEQ ID NO: 1584; WAN024DMO; Start 420; Stop 444
tctatcaggaattaaggagaagcaa

SEQ ID NO: 298743 - DNA, 25 bp, Artificial
  probe
  misc_feature (1)..(25): SEQ ID NO: 1584; WAN024DMO; Start 419; Stop 443
atctatcaggaattaaggagaagca

SEQ ID NO: 298744 - DNA, 25 bp, Artificial
  probe
  misc_feature (1)..(25): SEQ ID NO: 1584; WAN024DMO; Start 429; Stop 453
aattaaggagaagcaagtagtcgga

SEQ ID NO: 298745 - DNA, 25 bp, Artificial
  probe
  misc_feature (1)..(25): SEQ ID NO: 1584; WAN024DMO; Start 436; Stop 460
gagaagcaagtagtcggagagatag

SEQ ID NO: 298746 - DNA, 25 bp, Artificial
  probe
  misc_feature (1)..(25): SEQ ID NO: 1584; WAN024DMO; Start 430; Stop 454
attaaggagaagcaagtagtcggag

SEQ ID NO: 298747 - DNA, 25 bp, Artificial
  probe
  misc_feature (1)..(25): SEQ ID NO: 1584; WAN024DMO; Start 162; Stop 186
tgtgaatcataagcagagaattgaa

SEQ ID NO: 298748 - DNA, 25 bp, Artificial
  probe
  misc_feature (1)..(25): SEQ ID NO: 1584; WAN024DMO; Start 437; Stop 461
agaagcaagtagtcggagagataga

SEQ ID NO: 298749 - DNA, 25 bp, Artificial
  probe
  misc_feature (1)..(25): SEQ ID NO: 1584; WAN024DMO; Start 161; Stop 185
atgtgaatcataagcagagaattga

SEQ ID NO: 298750 - DNA, 25 bp, Artificial
  probe
  misc_feature (1)..(25): SEQ ID NO: 1584; WAN024DMO; Start 205; Stop 229
gaattaaggaagttggctgctgaag

SEQ ID NO: 298751 - DNA, 25 bp, Artificial
  probe
  misc_feature (1)..(25): SEQ ID NO: 1584; WAN024DMO; Start 160; Stop 184
catgtgaatcataagcagagaattg

SEQ ID NO: 298752 - DNA, 25 bp, Artificial
  probe
  misc_feature (1)..(25): SEQ ID NO: 1584; WAN024DMO; Start 159; Stop 183
tcatgtgaatcataagcagagaatt

SEQ ID NO: 298753 - DNA, 25 bp, Artificial
  probe
  misc_feature (1)..(25): SEQ ID NO: 1584; WAN024DMO; Start 168; Stop 192
tcataagcagagaattgaatcagat

SEQ ID NO: 298754 - DNA, 25 bp, Artificial
  probe
  misc_feature (1)..(25): SEQ ID NO: 1584; WAN024DMO; Start 167; Stop 191
atcataagcagagaattgaatcaga

SEQ ID NO: 298755 - DNA, 25 bp, Artificial
  probe
  misc_feature (1)..(25): SEQ ID NO: 1584; WAN024DMO; Start 158; Stop 182
ctcatgtgaatcataagcagagaat

SEQ ID NO: 298756 - DNA, 25 bp, Artificial
  probe
  misc_feature (1)..(25): SEQ ID NO: 1584; WAN024DMO; Start 431; Stop 455
ttaaggagaagcaagtagtcggaga

SEQ ID NO: 298757 - DNA, 25 bp, Artificial
  probe
  misc_feature (1)..(25): SEQ ID NO: 1584; WAN024DMO; Start 170; Stop 194
ataagcagagaattgaatcagattg

SEQ ID NO: 298758 - DNA, 25 bp, Artificial
  probe
  misc_feature (1)..(25): SEQ ID NO: 1584; WAN024DMO; Start 169; Stop 193
cataagcagagaattgaatcagatt

SEQ ID NO: 298759 - DNA, 25 bp, Artificial
  probe
  misc_feature (1)..(25): SEQ ID NO: 1584; WAN024DMO; Start 656; Stop 680
tggcaatagctgaattatctaacaa

SEQ ID NO: 298760 - DNA, 25 bp, Artificial
  probe
  misc_feature (1)..(25): SEQ ID NO: 1584; WAN024DMO; Start 655; Stop 679
ttggcaatagctgaattatctaaca

SEQ ID NO: 298761 - DNA, 25 bp, Artificial
  probe
  misc_feature (1)..(25): SEQ ID NO: 1584; WAN024DMO; Start 163; Stop 187
gtgaatcataagcagagaattgaat

SEQ ID NO: 298762 - DNA, 25 bp, Artificial
  probe
  misc_feature (1)..(25): SEQ ID NO: 1584; WAN024DMO; Start 442; Stop 466
caagtagtcggagagatagaaatca

SEQ ID NO: 298763 - DNA, 25 bp, Artificial
  probe
  misc_feature (1)..(25): SEQ ID NO: 1584; WAN024DMO; Start 441; Stop 465
gcaagtagtcggagagatagaaatc

SEQ ID NO: 298764 - DNA, 25 bp, Artificial
  probe
  misc_feature (1)..(25): SEQ ID NO: 1585; WAN024AW5; Start 343; Stop 367
ttgggctgtattgattggttatagt

SEQ ID NO: 298765 - DNA, 25 bp, Artificial
  probe
  misc_feature (1)..(25): SEQ ID NO: 1585; WAN024AW5; Start 342; Stop 366
gttgggctgtattgattggttatag

SEQ ID NO: 298766 - DNA, 25 bp, Artificial
  probe
  misc_feature (1)..(25): SEQ ID NO: 1585; WAN024AW5; Start 347; Stop 371
gctgtattgattggttatagtggga

SEQ ID NO: 298767 - DNA, 25 bp, Artificial
  probe
  misc_feature (1)..(25): SEQ ID NO: 1585; WAN024AW5; Start 344; Stop 368
tgggctgtattgattggttatagtg

SEQ ID NO: 298768 - DNA, 25 bp, Artificial
  probe
  misc_feature (1)..(25): SEQ ID NO: 1585; WAN024AW5; Start 341; Stop 365
ggttgggctgtattgattggttata

SEQ ID NO: 298769 - DNA, 25 bp, Artificial
  probe
  misc_feature (1)..(25): SEQ ID NO: 1585; WAN024AW5; Start 348; Stop 372
ctgtattgattggttatagtgggac

SEQ ID NO: 298770 - DNA, 25 bp, Artificial
  probe
  misc_feature (1)..(25): SEQ ID NO: 1585; WAN024AW5; Start 346; Stop 370
ggctgtattgattggttatagtggg

SEQ ID NO: 298771 - DNA, 25 bp, Artificial
  probe
  misc_feature (1)..(25): SEQ ID NO: 1585; WAN024AW5; Start 345; Stop 369
gggctgtattgattggttatagtgg

SEQ ID NO: 298772 - DNA, 25 bp, Artificial
  probe
  misc_feature (1)..(25): SEQ ID NO: 1585; WAN024AW5; Start 395; Stop 419
tatatagccctgttctttctggttc

SEQ ID NO: 298773 - DNA, 25 bp, Artificial
  probe
  misc_feature (1)..(25): SEQ ID NO: 1585; WAN024AW5; Start 188; Stop 212
atgattgtggttcttgttaagacag

SEQ ID NO: 298774 - DNA, 25 bp, Artificial
  probe
  misc_feature (1)..(25): SEQ ID NO: 1585; WAN024AW5; Start 394; Stop 418
ttatatagccctgttctttctggtt

SEQ ID NO: 298775 - DNA, 25 bp, Artificial
  probe
  misc_feature (1)..(25): SEQ ID NO: 1585; WAN024AW5; Start 393; Stop 417
tttatatagccctgttctttctggt

SEQ ID NO: 298776 - DNA, 25 bp, Artificial
  probe
  misc_feature (1)..(25): SEQ ID NO: 1585; WAN024AW5; Start 349; Stop 373
tgtattgattggttatagtgggact

SEQ ID NO: 298777 - DNA, 25 bp, Artificial
  probe
  misc_feature (1)..(25): SEQ ID NO: 1585; WAN024AW5; Start 189; Stop 213
tgattgtggttcttgttaagacagg

SEQ ID NO: 298778 - DNA, 25 bp, Artificial
  probe
  misc_feature (1)..(25): SEQ ID NO: 1585; WAN024AW5; Start 187; Stop 211
catgattgtggttcttgttaagaca

SEQ ID NO: 298779 - DNA, 25 bp, Artificial
  probe
  misc_feature (1)..(25): SEQ ID NO: 1585; WAN024AW5; Start 396; Stop 420
atatagccctgttctttctggttcc

SEQ ID NO: 298780 - DNA, 25 bp, Artificial
  probe
  misc_feature (1)..(25): SEQ ID NO: 1585; WAN024AW5; Start 392; Stop 416
atttatatagccctgttctttctgg

SEQ ID NO: 298781 - DNA, 25 bp, Artificial
  probe
  misc_feature (1)..(25): SEQ ID NO: 1585; WAN024AW5; Start 340; Stop 364
aggttgggctgtattgattggttat

SEQ ID NO: 298782 - DNA, 25 bp, Artificial
  probe
  misc_feature (1)..(25): SEQ ID NO: 1585; WAN024AW5; Start 339; Stop 363
aaggttgggctgtattgattggtta

SEQ ID NO: 298783 - DNA, 25 bp, Artificial
  probe
  misc_feature (1)..(25): SEQ ID NO: 1585; WAN024AW5; Start 357; Stop 381
ttggttatagtgggactaactttgc

SEQ ID NO: 298784 - DNA, 25 bp, Artificial
  probe
  misc_feature (1)..(25): SEQ ID NO: 1585; WAN024AW5; Start 216; Stop 240
atggttatctcttccgcattccaag

SEQ ID NO: 298785 - DNA, 25 bp, Artificial
  probe
  misc_feature (1)..(25): SEQ ID NO: 1585; WAN024AW5; Start 190; Stop 214
gattgtggttcttgttaagacaggc

SEQ ID NO: 298786 - DNA, 25 bp, Artificial
  probe
  misc_feature (1)..(25): SEQ ID NO: 1585; WAN024AW5; Start 371; Stop 395
actaactttgcagagctaggtattt

SEQ ID NO: 298787 - DNA, 25 bp, Artificial
  probe
  misc_feature (1)..(25): SEQ ID NO: 1585; WAN024AW5; Start 354; Stop 378
tgattggttatagtgggactaactt

SEQ ID NO: 298788 - DNA, 25 bp, Artificial
  probe
  misc_feature (1)..(25): SEQ ID NO: 1585; WAN024AW5; Start 353; Stop 377
ttgattggttatagtgggactaact

SEQ ID NO: 298789 - DNA, 25 bp, Artificial
  probe
  misc_feature (1)..(25): SEQ ID NO: 1585; WAN024AW5; Start 370; Stop 394
gactaactttgcagagctaggtatt

SEQ ID NO: 298790 - DNA, 25 bp, Artificial
  probe
  misc_feature (1)..(25): SEQ ID NO: 1585; WAN024AW5; Start 183; Stop 207
gagtcatgattgtggttcttgttaa

SEQ ID NO: 298791 - DNA, 25 bp, Artificial
  probe
  misc_feature (1)..(25): SEQ ID NO: 1585; WAN024AW5; Start 184; Stop 208
agtcatgattgtggttcttgttaag

SEQ ID NO: 298792 - DNA, 25 bp, Artificial
  probe
  misc_feature (1)..(25): SEQ ID NO: 1585; WAN024AW5; Start 182; Stop 206
ggagtcatgattgtggttcttgtta

SEQ ID NO: 298793 - DNA, 25 bp, Artificial
  probe
  misc_feature (1)..(25): SEQ ID NO: 1585; WAN024AW5; Start 356; Stop 380
attggttatagtgggactaactttg

SEQ ID NO: 298794 - DNA, 25 bp, Artificial
  probe
  misc_feature (1)..(25): SEQ ID NO: 1585; WAN024AW5; Start 355; Stop 379
gattggttatagtgggactaacttt

SEQ ID NO: 298795 - DNA, 25 bp, Artificial
  probe
  misc_feature (1)..(25): SEQ ID NO: 1585; WAN024AW5; Start 352; Stop 376
attgattggttatagtgggactaac

SEQ ID NO: 298796 - DNA, 25 bp, Artificial
  probe
  misc_feature (1)..(25): SEQ ID NO: 1585; WAN024AW5; Start 440; Stop 464
tatagaggattactgcaacatgctt

SEQ ID NO: 298797 - DNA, 25 bp, Artificial
  probe
  misc_feature (1)..(25): SEQ ID NO: 1586; WAN024GI8; Start 417; Stop 441
ttctgaagaggatgaacaagctatt

SEQ ID NO: 298798 - DNA, 25 bp, Artificial
  probe
  misc_feature (1)..(25): SEQ ID NO: 1586; WAN024GI8; Start 418; Stop 442
tctgaagaggatgaacaagctattc

SEQ ID NO: 298799 - DNA, 25 bp, Artificial
  probe
  misc_feature (1)..(25): SEQ ID NO: 1586; WAN024GI8; Start 390; Stop 414
agttattggacacagaaatggctat

SEQ ID NO: 298800 - DNA, 25 bp, Artificial
  probe
  misc_feature (1)..(25): SEQ ID NO: 1586; WAN024GI8; Start 388; Stop 412
atagttattggacacagaaatggct

SEQ ID NO: 298801 - DNA, 25 bp, Artificial
  probe
  misc_feature (1)..(25): SEQ ID NO: 1586; WAN024GI8; Start 387; Stop 411
gatagttattggacacagaaatggc

SEQ ID NO: 298802 - DNA, 25 bp, Artificial
  probe
  misc_feature (1)..(25): SEQ ID NO: 1586; WAN024GI8; Start 389; Stop 413
tagttattggacacagaaatggcta

SEQ ID NO: 298803 - DNA, 25 bp, Artificial
  probe
  misc_feature (1)..(25): SEQ ID NO: 1586; WAN024GI8; Start 391; Stop 415
gttattggacacagaaatggctatt

SEQ ID NO: 298804 - DNA, 25 bp, Artificial
  probe
  misc_feature (1)..(25): SEQ ID NO: 1586; WAN024GI8; Start 41; Stop 65
tgcttacgatgaatgaaacgataga

SEQ ID NO: 298805 - DNA, 25 bp, Artificial
  probe
  misc_feature (1)..(25): SEQ ID NO: 1586; WAN024GI8; Start 42; Stop 66
gcttacgatgaatgaaacgatagat

SEQ ID NO: 298806 - DNA, 25 bp, Artificial
  probe
  misc_feature (1)..(25): SEQ ID NO: 1586; WAN024GI8; Start 574; Stop 598
gatgtcttgtctggtcatatccaac

SEQ ID NO: 298807 - DNA, 25 bp, Artificial
  probe
  misc_feature (1)..(25): SEQ ID NO: 1586; WAN024GI8; Start 626; Stop 650
atttagagtggttattccgtgtagc

SEQ ID NO: 298808 - DNA, 25 bp, Artificial
  probe
  misc_feature (1)..(25): SEQ ID NO: 1586; WAN024GI8; Start 573; Stop 597
tgatgtcttgtctggtcatatccaa

SEQ ID NO: 298809 - DNA, 25 bp, Artificial
  probe
  misc_feature (1)..(25): SEQ ID NO: 1586; WAN024GI8; Start 572; Stop 596
ttgatgtcttgtctggtcatatcca

SEQ ID NO: 298810 - DNA, 25 bp, Artificial
  probe
  misc_feature (1)..(25): SEQ ID NO: 1586; WAN024GI8; Start 530; Stop 554
atagtggcgtcaattcggtatttat

SEQ ID NO: 298811 - DNA, 25 bp, Artificial
  probe
  misc_feature (1)..(25): SEQ ID NO: 1586; WAN024GI8; Start 432; Stop 456
acaagctattcaagaagatattcgt

SEQ ID NO: 298812 - DNA, 25 bp, Artificial
  probe
  misc_feature (1)..(25): SEQ ID NO: 1586; WAN024GI8; Start 386; Stop 410
tgatagttattggacacagaaatgg

SEQ ID NO: 298813 - DNA, 25 bp, Artificial
  probe
  misc_feature (1)..(25): SEQ ID NO: 1586; WAN024GI8; Start 529; Stop 553
gatagtggcgtcaattcggtattta

SEQ ID NO: 298814 - DNA, 25 bp, Artificial
  probe
  misc_feature (1)..(25): SEQ ID NO: 1586; WAN024GI8; Start 433; Stop 457
caagctattcaagaagatattcgtg

SEQ ID NO: 298815 - DNA, 25 bp, Artificial
  probe
  misc_feature (1)..(25): SEQ ID NO: 1586; WAN024GI8; Start 538; Stop 562
gtcaattcggtatttatgggagttg

SEQ ID NO: 298816 - DNA, 25 bp, Artificial
  probe
  misc_feature (1)..(25): SEQ ID NO: 1586; WAN024GI8; Start 537; Stop 561
cgtcaattcggtatttatgggagtt

SEQ ID NO: 298817 - DNA, 25 bp, Artificial
  probe
  misc_feature (1)..(25): SEQ ID NO: 1586; WAN024GI8; Start 531; Stop 555
tagtggcgtcaattcggtatttatg

SEQ ID NO: 298818 - DNA, 25 bp, Artificial
  probe
  misc_feature (1)..(25): SEQ ID NO: 1586; WAN024GI8; Start 625; Stop 649
aatttagagtggttattccgtgtag

SEQ ID NO: 298819 - DNA, 25 bp, Artificial
  probe
  misc_feature (1)..(25): SEQ ID NO: 1586; WAN024GI8; Start 571; Stop 595
tttgatgtcttgtctggtcatatcc

SEQ ID NO: 298820 - DNA, 25 bp, Artificial
  probe
  misc_feature (1)..(25): SEQ ID NO: 1586; WAN024GI8; Start 539; Stop 563
tcaattcggtatttatgggagttgg

SEQ ID NO: 298821 - DNA, 25 bp, Artificial
  probe
  misc_feature (1)..(25): SEQ ID NO: 1586; WAN024GI8; Start 522; Stop 546
atttatggatagtggcgtcaattcg

SEQ ID NO: 298822 - DNA, 25 bp, Artificial
  probe
  misc_feature (1)..(25): SEQ ID NO: 1586; WAN024GI8; Start 434; Stop 458
aagctattcaagaagatattcgtga

SEQ ID NO: 298823 - DNA, 25 bp, Artificial
  probe
  misc_feature (1)..(25): SEQ ID NO: 1586; WAN024GI8; Start 521; Stop 545
aatttatggatagtggcgtcaattc

SEQ ID NO: 298824 - DNA, 25 bp, Artificial
  probe
  misc_feature (1)..(25): SEQ ID NO: 1586; WAN024GI8; Start 548; Stop 572
tatttatgggagttggcggtagttt

SEQ ID NO: 298825 - DNA, 25 bp, Artificial
  probe
  misc_feature (1)..(25): SEQ ID NO: 1586; WAN024GI8; Start 525; Stop 549
tatggatagtggcgtcaattcggta

SEQ ID NO: 298826 - DNA, 25 bp, Artificial
  probe
  misc_feature (1)..(25): SEQ ID NO: 1586; WAN024GI8; Start 392; Stop 416
ttattggacacagaaatggctattt

SEQ ID NO: 298827 - DNA, 25 bp, Artificial
  probe
  misc_feature (1)..(25): SEQ ID NO: 1586; WAN024GI8; Start 587; Stop 611
gtcatatccaacgagcacctctatg

SEQ ID NO: 298828 - DNA, 25 bp, Artificial
  probe
  misc_feature (1)..(25): SEQ ID NO: 1586; WAN024GI8; Start 431; Stop 455
aacaagctattcaagaagatattcg

SEQ ID NO: 298829 - DNA, 25 bp, Artificial
  probe
  misc_feature (1)..(25): SEQ ID NO: 1586; WAN024GI8; Start 629; Stop 653
tagagtggttattccgtgtagctaa

SEQ ID NO: 298830 - DNA, 25 bp, Artificial
  probe
  misc_feature (1)..(25): SEQ ID NO: 1587; WAN024DHA; Start 756; Stop 780
ccgcaattctctccaatacaagatt

SEQ ID NO: 298831 - DNA, 25 bp, Artificial
  probe
  misc_feature (1)..(25): SEQ ID NO: 1587; WAN024DHA; Start 755; Stop 779
accgcaattctctccaatacaagat

SEQ ID NO: 298832 - DNA, 25 bp, Artificial
  probe
  misc_feature (1)..(25): SEQ ID NO: 1587; WAN024DHA; Start 779; Stop 803
ttgataaatgggaagagttgacagg

SEQ ID NO: 298833 - DNA, 25 bp, Artificial
  probe
  misc_feature (1)..(25): SEQ ID NO: 1587; WAN024DHA; Start 426; Stop 450
tacgattgaagcggttgagtatgac

SEQ ID NO: 298834 - DNA, 25 bp, Artificial
  probe
  misc_feature (1)..(25): SEQ ID NO: 1587; WAN024DHA; Start 422; Stop 446
gtgatacgattgaagcggttgagta

SEQ ID NO: 298835 - DNA, 25 bp, Artificial
  probe
  misc_feature (1)..(25): SEQ ID NO: 1587; WAN024DHA; Start 777; Stop 801
gattgataaatgggaagagttgaca

SEQ ID NO: 298836 - DNA, 25 bp, Artificial
  probe
  misc_feature (1)..(25): SEQ ID NO: 1587; WAN024DHA; Start 424; Stop 448
gatacgattgaagcggttgagtatg

SEQ ID NO: 298837 - DNA, 25 bp, Artificial
  probe
  misc_feature (1)..(25): SEQ ID NO: 1587; WAN024DHA; Start 684; Stop 708
tcaggaaatcattctctctctttgg

SEQ ID NO: 298838 - DNA, 25 bp, Artificial
  probe
  misc_feature (1)..(25): SEQ ID NO: 1587; WAN024DHA; Start 380; Stop 404
tgcttcaacaagacaaatacacttc

SEQ ID NO: 298839 - DNA, 25 bp, Artificial
  probe
  misc_feature (1)..(25): SEQ ID NO: 1587; WAN024DHA; Start 778; Stop 802
attgataaatgggaagagttgacag

SEQ ID NO: 298840 - DNA, 25 bp, Artificial
  probe
  misc_feature (1)..(25): SEQ ID NO: 1587; WAN024DHA; Start 502; Stop 526
catcaagccctatcagacttaatca

SEQ ID NO: 298841 - DNA, 25 bp, Artificial
  probe
  misc_feature (1)..(25): SEQ ID NO: 1587; WAN024DHA; Start 501; Stop 525
acatcaagccctatcagacttaatc

SEQ ID NO: 298842 - DNA, 25 bp, Artificial
  probe
  misc_feature (1)..(25): SEQ ID NO: 1587; WAN024DHA; Start 500; Stop 524
gacatcaagccctatcagacttaat

SEQ ID NO: 298843 - DNA, 25 bp, Artificial
  probe
  misc_feature (1)..(25): SEQ ID NO: 1587; WAN024DHA; Start 687; Stop 711
ggaaatcattctctctctttgggaa

SEQ ID NO: 298844 - DNA, 25 bp, Artificial
  probe
  misc_feature (1)..(25): SEQ ID NO: 1587; WAN024DHA; Start 504; Stop 528
tcaagccctatcagacttaatcaaa

SEQ ID NO: 298845 - DNA, 25 bp, Artificial
  probe
  misc_feature (1)..(25): SEQ ID NO: 1587; WAN024DHA; Start 505; Stop 529
caagccctatcagacttaatcaaag

SEQ ID NO: 298846 - DNA, 25 bp, Artificial
  probe
  misc_feature (1)..(25): SEQ ID NO: 1587; WAN024DHA; Start 503; Stop 527
atcaagccctatcagacttaatcaa

SEQ ID NO: 298847 - DNA, 25 bp, Artificial
  probe
  misc_feature (1)..(25): SEQ ID NO: 1587; WAN024DHA; Start 381; Stop 405
gcttcaacaagacaaatacacttct

SEQ ID NO: 298848 - DNA, 25 bp, Artificial
  probe
  misc_feature (1)..(25): SEQ ID NO: 1587; WAN024DHA; Start 776; Stop 800
agattgataaatgggaagagttgac

SEQ ID NO: 298849 - DNA, 25 bp, Artificial
  probe
  misc_feature (1)..(25): SEQ ID NO: 1587; WAN024DHA; Start 758; Stop 782
gcaattctctccaatacaagattga

SEQ ID NO: 298850 - DNA, 25 bp, Artificial
  probe
  misc_feature (1)..(25): SEQ ID NO: 1587; WAN024DHA; Start 757; Stop 781
cgcaattctctccaatacaagattg

SEQ ID NO: 298851 - DNA, 25 bp, Artificial
  probe
  misc_feature (1)..(25): SEQ ID NO: 1587; WAN024DHA; Start 375; Stop 399
tttcgtgcttcaacaagacaaatac

SEQ ID NO: 298852 - DNA, 25 bp, Artificial
  probe
  misc_feature (1)..(25): SEQ ID NO: 1587; WAN024DHA; Start 425; Stop 449
atacgattgaagcggttgagtatga

SEQ ID NO: 298853 - DNA, 25 bp, Artificial
  probe
  misc_feature (1)..(25): SEQ ID NO: 1587; WAN024DHA; Start 423; Stop 447
tgatacgattgaagcggttgagtat

SEQ ID NO: 298854 - DNA, 25 bp, Artificial
  probe
  misc_feature (1)..(25): SEQ ID NO: 1587; WAN024DHA; Start 506; Stop 530
aagccctatcagacttaatcaaagc

SEQ ID NO: 298855 - DNA, 25 bp, Artificial
  probe
  misc_feature (1)..(25): SEQ ID NO: 1587; WAN024DHA; Start 688; Stop 712
gaaatcattctctctctttgggaaa

SEQ ID NO: 298856 - DNA, 25 bp, Artificial
  probe
  misc_feature (1)..(25): SEQ ID NO: 1587; WAN024DHA; Start 686; Stop 710
aggaaatcattctctctctttggga

SEQ ID NO: 298857 - DNA, 25 bp, Artificial
  probe
  misc_feature (1)..(25): SEQ ID NO: 1587; WAN024DHA; Start 685; Stop 709
caggaaatcattctctctctttggg

SEQ ID NO: 298858 - DNA, 25 bp, Artificial
  probe
  misc_feature (1)..(25): SEQ ID NO: 1587; WAN024DHA; Start 10; Stop 34
aaagaactacaagactggtttcctg

SEQ ID NO: 298859 - DNA, 25 bp, Artificial
  probe
  misc_feature (1)..(25): SEQ ID NO: 1587; WAN024DHA; Start 683; Stop 707
ttcaggaaatcattctctctctttg

SEQ ID NO: 298860 - DNA, 25 bp, Artificial
  probe
  misc_feature (1)..(25): SEQ ID NO: 1587; WAN024DHA; Start 773; Stop 797
acaagattgataaatgggaagagtt

SEQ ID NO: 298861 - DNA, 25 bp, Artificial
  probe
  misc_feature (1)..(25): SEQ ID NO: 1587; WAN024DHA; Start 668; Stop 692
tggatcaagatcagattcaggaaat

SEQ ID NO: 298862 - DNA, 25 bp, Artificial
  probe
  misc_feature (1)..(25): SEQ ID NO: 1587; WAN024DHA; Start 382; Stop 406
cttcaacaagacaaatacacttctg

SEQ ID NO: 298863 - DNA, 25 bp, Artificial
  probe
  misc_feature (1)..(25): SEQ ID NO: 1588; WAN024GOC; Start 94; Stop 118
ccgttcattggcatcatagttatca

SEQ ID NO: 298864 - DNA, 25 bp, Artificial
  probe
  misc_feature (1)..(25): SEQ ID NO: 1588; WAN024GOC; Start 99; Stop 123
cattggcatcatagttatcaacgaa

SEQ ID NO: 298865 - DNA, 25 bp, Artificial
  probe
  misc_feature (1)..(25): SEQ ID NO: 1588; WAN024GOC; Start 97; Stop 121
ttcattggcatcatagttatcaacg

SEQ ID NO: 298866 - DNA, 25 bp, Artificial
  probe
  misc_feature (1)..(25): SEQ ID NO: 1588; WAN024GOC; Start 95; Stop 119
cgttcattggcatcatagttatcaa

SEQ ID NO: 298867 - DNA, 25 bp, Artificial
  probe
  misc_feature (1)..(25): SEQ ID NO: 1588; WAN024GOC; Start 98; Stop 122
tcattggcatcatagttatcaacga

SEQ ID NO: 298868 - DNA, 25 bp, Artificial
  probe
  misc_feature (1)..(25): SEQ ID NO: 1588; WAN024GOC; Start 96; Stop 120
gttcattggcatcatagttatcaac

SEQ ID NO: 298869 - DNA, 25 bp, Artificial
  probe
  misc_feature (1)..(25): SEQ ID NO: 1588; WAN024GOC; Start 390; Stop 414
ccaattcattcattccgtagagaat

SEQ ID NO: 298870 - DNA, 25 bp, Artificial
  probe
  misc_feature (1)..(25): SEQ ID NO: 1588; WAN024GOC; Start 103; Stop 127
ggcatcatagttatcaacgaaatca

SEQ ID NO: 298871 - DNA, 25 bp, Artificial
  probe
  misc_feature (1)..(25): SEQ ID NO: 1588; WAN024GOC; Start 102; Stop 126
tggcatcatagttatcaacgaaatc

SEQ ID NO: 298872 - DNA, 25 bp, Artificial
  probe
  misc_feature (1)..(25): SEQ ID NO: 1588; WAN024GOC; Start 290; Stop 314
atggcttcataaatagaggaatccc

SEQ ID NO: 298873 - DNA, 25 bp, Artificial
  probe
  misc_feature (1)..(25): SEQ ID NO: 1588; WAN024GOC; Start 389; Stop 413
cccaattcattcattccgtagagaa

SEQ ID NO: 298874 - DNA, 25 bp, Artificial
  probe
  misc_feature (1)..(25): SEQ ID NO: 1588; WAN024GOC; Start 101; Stop 125
ttggcatcatagttatcaacgaaat

SEQ ID NO: 298875 - DNA, 25 bp, Artificial
  probe
  misc_feature (1)..(25): SEQ ID NO: 1588; WAN024GOC; Start 100; Stop 124
attggcatcatagttatcaacgaaa

SEQ ID NO: 298876 - DNA, 25 bp, Artificial
  probe
  misc_feature (1)..(25): SEQ ID NO: 1588; WAN024GOC; Start 93; Stop 117
cccgttcattggcatcatagttatc

SEQ ID NO: 298877 - DNA, 25 bp, Artificial
  probe
  misc_feature (1)..(25): SEQ ID NO: 1588; WAN024GOC; Start 34; Stop 58
gataccagttgctccattaaccaaa

SEQ ID NO: 298878 - DNA, 25 bp, Artificial
  probe
  misc_feature (1)..(25): SEQ ID NO: 1588; WAN024GOC; Start 33; Stop 57
cgataccagttgctccattaaccaa

SEQ ID NO: 298879 - DNA, 25 bp, Artificial
  probe
  misc_feature (1)..(25): SEQ ID NO: 1588; WAN024GOC; Start 388; Stop 412
acccaattcattcattccgtagaga

SEQ ID NO: 298880 - DNA, 25 bp, Artificial
  probe
  misc_feature (1)..(25): SEQ ID NO: 1588; WAN024GOC; Start 387; Stop 411
cacccaattcattcattccgtagag

SEQ ID NO: 298881 - DNA, 25 bp, Artificial
  probe
  misc_feature (1)..(25): SEQ ID NO: 1588; WAN024GOC; Start 92; Stop 116
tcccgttcattggcatcatagttat

SEQ ID NO: 298882 - DNA, 25 bp, Artificial
  probe
  misc_feature (1)..(25): SEQ ID NO: 1588; WAN024GOC; Start 289; Stop 313
catggcttcataaatagaggaatcc

SEQ ID NO: 298883 - DNA, 25 bp, Artificial
  probe
  misc_feature (1)..(25): SEQ ID NO: 1588; WAN024GOC; Start 104; Stop 128
gcatcatagttatcaacgaaatcaa

SEQ ID NO: 298884 - DNA, 25 bp, Artificial
  probe
  misc_feature (1)..(25): SEQ ID NO: 1588; WAN024GOC; Start 91; Stop 115
ttcccgttcattggcatcatagtta

SEQ ID NO: 298885 - DNA, 25 bp, Artificial
  probe
  misc_feature (1)..(25): SEQ ID NO: 1588; WAN024GOC; Start 386; Stop 410
acacccaattcattcattccgtaga

SEQ ID NO: 298886 - DNA, 25 bp, Artificial
  probe
  misc_feature (1)..(25): SEQ ID NO: 1588; WAN024GOC; Start 385; Stop 409
cacacccaattcattcattccgtag

SEQ ID NO: 298887 - DNA, 25 bp, Artificial
  probe
  misc_feature (1)..(25): SEQ ID NO: 1588; WAN024GOC; Start 384; Stop 408
tcacacccaattcattcattccgta

SEQ ID NO: 298888 - DNA, 25 bp, Artificial
  probe
  misc_feature (1)..(25): SEQ ID NO: 1588; WAN024GOC; Start 240; Stop 264
gaccatctacaagcatgtaacggta

SEQ ID NO: 298889 - DNA, 25 bp, Artificial
  probe
  misc_feature (1)..(25): SEQ ID NO: 1588; WAN024GOC; Start 144; Stop 168
tatcacgaagcatttccagagcaat

SEQ ID NO: 298890 - DNA, 25 bp, Artificial
  probe
  misc_feature (1)..(25): SEQ ID NO: 1588; WAN024GOC; Start 143; Stop 167
atatcacgaagcatttccagagcaa

SEQ ID NO: 298891 - DNA, 25 bp, Artificial
  probe
  misc_feature (1)..(25): SEQ ID NO: 1588; WAN024GOC; Start 231; Stop 255
aattcccatgaccatctacaagcat

SEQ ID NO: 298892 - DNA, 25 bp, Artificial
  probe
  misc_feature (1)..(25): SEQ ID NO: 1588; WAN024GOC; Start 230; Stop 254
aaattcccatgaccatctacaagca

SEQ ID NO: 298893 - DNA, 25 bp, Artificial
  probe
  misc_feature (1)..(25): SEQ ID NO: 1588; WAN024GOC; Start 241; Stop 265
accatctacaagcatgtaacggtag

SEQ ID NO: 298894 - DNA, 25 bp, Artificial
  probe
  misc_feature (1)..(25): SEQ ID NO: 1588; WAN024GOC; Start 238; Stop 262
atgaccatctacaagcatgtaacgg

SEQ ID NO: 298895 - DNA, 25 bp, Artificial
  probe
  misc_feature (1)..(25): SEQ ID NO: 1588; WAN024GOC; Start 244; Stop 268
atctacaagcatgtaacggtagctc

SEQ ID NO: 298896 - DNA, 25 bp, Artificial
  probe
  misc_feature (1)..(25): SEQ ID NO: 1589; WAN024FVH; Start 683; Stop 707
cagtcttacaagagtatggtcaagt

SEQ ID NO: 298897 - DNA, 25 bp, Artificial
  probe
  misc_feature (1)..(25): SEQ ID NO: 1589; WAN024FVH; Start 685; Stop 709
gtcttacaagagtatggtcaagtct

SEQ ID NO: 298898 - DNA, 25 bp, Artificial
  probe
  misc_feature (1)..(25): SEQ ID NO: 1589; WAN024FVH; Start 684; Stop 708
agtcttacaagagtatggtcaagtc

SEQ ID NO: 298899 - DNA, 25 bp, Artificial
  probe
  misc_feature (1)..(25): SEQ ID NO: 1589; WAN024FVH; Start 682; Stop 706
tcagtcttacaagagtatggtcaag

SEQ ID NO: 298900 - DNA, 25 bp, Artificial
  probe
  misc_feature (1)..(25): SEQ ID NO: 1589; WAN024FVH; Start 462; Stop 486
agaaccttacatctactacatcctt

SEQ ID NO: 298901 - DNA, 25 bp, Artificial
  probe
  misc_feature (1)..(25): SEQ ID NO: 1589; WAN024FVH; Start 461; Stop 485
aagaaccttacatctactacatcct

SEQ ID NO: 298902 - DNA, 25 bp, Artificial
  probe
  misc_feature (1)..(25): SEQ ID NO: 1589; WAN024FVH; Start 671; Stop 695
atatcagtcgctcagtcttacaaga

SEQ ID NO: 298903 - DNA, 25 bp, Artificial
  probe
  misc_feature (1)..(25): SEQ ID NO: 1589; WAN024FVH; Start 681; Stop 705
ctcagtcttacaagagtatggtcaa

SEQ ID NO: 298904 - DNA, 25 bp, Artificial
  probe
  misc_feature (1)..(25): SEQ ID NO: 1589; WAN024FVH; Start 437; Stop 461
ctgaacaagaagctgagagtaagaa

SEQ ID NO: 298905 - DNA, 25 bp, Artificial
  probe
  misc_feature (1)..(25): SEQ ID NO: 1589; WAN024FVH; Start 672; Stop 696
tatcagtcgctcagtcttacaagag

SEQ ID NO: 298906 - DNA, 25 bp, Artificial
  probe
  misc_feature (1)..(25): SEQ ID NO: 1589; WAN024FVH; Start 680; Stop 704
gctcagtcttacaagagtatggtca

SEQ ID NO: 298907 - DNA, 25 bp, Artificial
  probe
  misc_feature (1)..(25): SEQ ID NO: 1589; WAN024FVH; Start 676; Stop 700
agtcgctcagtcttacaagagtatg

SEQ ID NO: 298908 - DNA, 25 bp, Artificial
  probe
  misc_feature (1)..(25): SEQ ID NO: 1589; WAN024FVH; Start 675; Stop 699
cagtcgctcagtcttacaagagtat

SEQ ID NO: 298909 - DNA, 25 bp, Artificial
  probe
  misc_feature (1)..(25): SEQ ID NO: 1589; WAN024FVH; Start 670; Stop 694
gatatcagtcgctcagtcttacaag

SEQ ID NO: 298910 - DNA, 25 bp, Artificial
  probe
  misc_feature (1)..(25): SEQ ID NO: 1589; WAN024FVH; Start 538; Stop 562
gaaatggaaacttctgaactctaca

SEQ ID NO: 298911 - DNA, 25 bp, Artificial
  probe
  misc_feature (1)..(25): SEQ ID NO: 1589; WAN024FVH; Start 537; Stop 561
tgaaatggaaacttctgaactctac

SEQ ID NO: 298912 - DNA, 25 bp, Artificial
  probe
  misc_feature (1)..(25): SEQ ID NO: 1589; WAN024FVH; Start 535; Stop 559
tttgaaatggaaacttctgaactct

SEQ ID NO: 298913 - DNA, 25 bp, Artificial
  probe
  misc_feature (1)..(25): SEQ ID NO: 1589; WAN024FVH; Start 376; Stop 400
gatatcgaagccattcaatctcttg

SEQ ID NO: 298914 - DNA, 25 bp, Artificial
  probe
  misc_feature (1)..(25): SEQ ID NO: 1589; WAN024FVH; Start 540; Stop 564
aatggaaacttctgaactctacaaa

SEQ ID NO: 298915 - DNA, 25 bp, Artificial
  probe
  misc_feature (1)..(25): SEQ ID NO: 1589; WAN024FVH; Start 539; Stop 563
aaatggaaacttctgaactctacaa

SEQ ID NO: 298916 - DNA, 25 bp, Artificial
  probe
  misc_feature (1)..(25): SEQ ID NO: 1589; WAN024FVH; Start 297; Stop 321
tatggaagaattggctcaaatgtct

SEQ ID NO: 298917 - DNA, 25 bp, Artificial
  probe
  misc_feature (1)..(25): SEQ ID NO: 1589; WAN024FVH; Start 296; Stop 320
atatggaagaattggctcaaatgtc

SEQ ID NO: 298918 - DNA, 25 bp, Artificial
  probe
  misc_feature (1)..(25): SEQ ID NO: 1589; WAN024FVH; Start 295; Stop 319
gatatggaagaattggctcaaatgt

SEQ ID NO: 298919 - DNA, 25 bp, Artificial
  probe
  misc_feature (1)..(25): SEQ ID NO: 1589; WAN024FVH; Start 375; Stop 399
tgatatcgaagccattcaatctctt

SEQ ID NO: 298920 - DNA, 25 bp, Artificial
  probe
  misc_feature (1)..(25): SEQ ID NO: 1589; WAN024FVH; Start 374; Stop 398
atgatatcgaagccattcaatctct

SEQ ID NO: 298921 - DNA, 25 bp, Artificial
  probe
  misc_feature (1)..(25): SEQ ID NO: 1589; WAN024FVH; Start 294; Stop 318
agatatggaagaattggctcaaatg

SEQ ID NO: 298922 - DNA, 25 bp, Artificial
  probe
  misc_feature (1)..(25): SEQ ID NO: 1589; WAN024FVH; Start 293; Stop 317
cagatatggaagaattggctcaaat

SEQ ID NO: 298923 - DNA, 25 bp, Artificial
  probe
  misc_feature (1)..(25): SEQ ID NO: 1589; WAN024FVH; Start 465; Stop 489
accttacatctactacatcctttct

SEQ ID NO: 298924 - DNA, 25 bp, Artificial
  probe
  misc_feature (1)..(25): SEQ ID NO: 1589; WAN024FVH; Start 373; Stop 397
gatgatatcgaagccattcaatctc

SEQ ID NO: 298925 - DNA, 25 bp, Artificial
  probe
  misc_feature (1)..(25): SEQ ID NO: 1589; WAN024FVH; Start 370; Stop 394
aaggatgatatcgaagccattcaat

SEQ ID NO: 298926 - DNA, 25 bp, Artificial
  probe
  misc_feature (1)..(25): SEQ ID NO: 1589; WAN024FVH; Start 271; Stop 295
tttgaagacttatcggatttgccag

SEQ ID NO: 298927 - DNA, 25 bp, Artificial
  probe
  misc_feature (1)..(25): SEQ ID NO: 1589; WAN024FVH; Start 61; Stop 85
tctttagaggatttgatggatcgtg

SEQ ID NO: 298928 - DNA, 25 bp, Artificial
  probe
  misc_feature (1)..(25): SEQ ID NO: 1589; WAN024FVH; Start 686; Stop 710
tcttacaagagtatggtcaagtctt

SEQ ID NO: 298929 - DNA, 25 bp, Artificial
  probe
  misc_feature (1)..(25): SEQ ID NO: 1590; WAN024CW8; Start 561; Stop 585
agattccattattaccagacgagtg

SEQ ID NO: 298930 - DNA, 25 bp, Artificial
  probe
  misc_feature (1)..(25): SEQ ID NO: 1590; WAN024CW8; Start 560; Stop 584
aagattccattattaccagacgagt

SEQ ID NO: 298931 - DNA, 25 bp, Artificial
  probe
  misc_feature (1)..(25): SEQ ID NO: 1590; WAN024CW8; Start 558; Stop 582
tgaagattccattattaccagacga

SEQ ID NO: 298932 - DNA, 25 bp, Artificial
  probe
  misc_feature (1)..(25): SEQ ID NO: 1590; WAN024CW8; Start 552; Stop 576
gcgtgatgaagattccattattacc

SEQ ID NO: 298933 - DNA, 25 bp, Artificial
  probe
  misc_feature (1)..(25): SEQ ID NO: 1590; WAN024CW8; Start 559; Stop 583
gaagattccattattaccagacgag

SEQ ID NO: 298934 - DNA, 25 bp, Artificial
  probe
  misc_feature (1)..(25): SEQ ID NO: 1590; WAN024CW8; Start 745; Stop 769
ggtagtctggaagatggtattcaac

SEQ ID NO: 298935 - DNA, 25 bp, Artificial
  probe
  misc_feature (1)..(25): SEQ ID NO: 1590; WAN024CW8; Start 553; Stop 577
cgtgatgaagattccattattacca

SEQ ID NO: 298936 - DNA, 25 bp, Artificial
  probe
  misc_feature (1)..(25): SEQ ID NO: 1590; WAN024CW8; Start 744; Stop 768
tggtagtctggaagatggtattcaa

SEQ ID NO: 298937 - DNA, 25 bp, Artificial
  probe
  misc_feature (1)..(25): SEQ ID NO: 1590; WAN024CW8; Start 372; Stop 396
tcacattgttaccagactagatagg

SEQ ID NO: 298938 - DNA, 25 bp, Artificial
  probe
  misc_feature (1)..(25): SEQ ID NO: 1590; WAN024CW8; Start 746; Stop 770
gtagtctggaagatggtattcaacg

SEQ ID NO: 298939 - DNA, 25 bp, Artificial
  probe
  misc_feature (1)..(25): SEQ ID NO: 1590; WAN024CW8; Start 557; Stop 581
atgaagattccattattaccagacg

SEQ ID NO: 298940 - DNA, 25 bp, Artificial
  probe
  misc_feature (1)..(25): SEQ ID NO: 1590; WAN024CW8; Start 301; Stop 325
aatcactctaataccattgccaatt

SEQ ID NO: 298941 - DNA, 25 bp, Artificial
  probe
  misc_feature (1)..(25): SEQ ID NO: 1590; WAN024CW8; Start 743; Stop 767
gtggtagtctggaagatggtattca

SEQ ID NO: 298942 - DNA, 25 bp, Artificial
  probe
  misc_feature (1)..(25): SEQ ID NO: 1590; WAN024CW8; Start 229; Stop 253
gatattctctatgaggatgaccact

SEQ ID NO: 298943 - DNA, 25 bp, Artificial
  probe
  misc_feature (1)..(25): SEQ ID NO: 1590; WAN024CW8; Start 228; Stop 252
agatattctctatgaggatgaccac

SEQ ID NO: 298944 - DNA, 25 bp, Artificial
  probe
  misc_feature (1)..(25): SEQ ID NO: 1590; WAN024CW8; Start 736; Stop 760
ttgtatggtggtagtctggaagatg

SEQ ID NO: 298945 - DNA, 25 bp, Artificial
  probe
  misc_feature (1)..(25): SEQ ID NO: 1590; WAN024CW8; Start 739; Stop 763
tatggtggtagtctggaagatggta

SEQ ID NO: 298946 - DNA, 25 bp, Artificial
  probe
  misc_feature (1)..(25): SEQ ID NO: 1590; WAN024CW8; Start 230; Stop 254
atattctctatgaggatgaccactt

SEQ ID NO: 298947 - DNA, 25 bp, Artificial
  probe
  misc_feature (1)..(25): SEQ ID NO: 1590; WAN024CW8; Start 370; Stop 394
gttcacattgttaccagactagata

SEQ ID NO: 298948 - DNA, 25 bp, Artificial
  probe
  misc_feature (1)..(25): SEQ ID NO: 1590; WAN024CW8; Start 742; Stop 766
ggtggtagtctggaagatggtattc

SEQ ID NO: 298949 - DNA, 25 bp, Artificial
  probe
  misc_feature (1)..(25): SEQ ID NO: 1590; WAN024CW8; Start 371; Stop 395
ttcacattgttaccagactagatag

SEQ ID NO: 298950 - DNA, 25 bp, Artificial
  probe
  misc_feature (1)..(25): SEQ ID NO: 1590; WAN024CW8; Start 554; Stop 578
gtgatgaagattccattattaccag

SEQ ID NO: 298951 - DNA, 25 bp, Artificial
  probe
  misc_feature (1)..(25): SEQ ID NO: 1590; WAN024CW8; Start 555; Stop 579
tgatgaagattccattattaccaga

SEQ ID NO: 298952 - DNA, 25 bp, Artificial
  probe
  misc_feature (1)..(25): SEQ ID NO: 1590; WAN024CW8; Start 369; Stop 393
ggttcacattgttaccagactagat

SEQ ID NO: 298953 - DNA, 25 bp, Artificial
  probe
  misc_feature (1)..(25): SEQ ID NO: 1590; WAN024CW8; Start 273; Stop 297
ctatggagtggcttctattcctagt

SEQ ID NO: 298954 - DNA, 25 bp, Artificial
  probe
  misc_feature (1)..(25): SEQ ID NO: 1590; WAN024CW8; Start 740; Stop 764
atggtggtagtctggaagatggtat

SEQ ID NO: 298955 - DNA, 25 bp, Artificial
  probe
  misc_feature (1)..(25): SEQ ID NO: 1590; WAN024CW8; Start 274; Stop 298
tatggagtggcttctattcctagtg

SEQ ID NO: 298956 - DNA, 25 bp, Artificial
  probe
  misc_feature (1)..(25): SEQ ID NO: 1590; WAN024CW8; Start 562; Stop 586
gattccattattaccagacgagtgg

SEQ ID NO: 298957 - DNA, 25 bp, Artificial
  probe
  misc_feature (1)..(25): SEQ ID NO: 1590; WAN024CW8; Start 258; Stop 282
agtcttgaataaaccctatggagtg

SEQ ID NO: 298958 - DNA, 25 bp, Artificial
  probe
  misc_feature (1)..(25): SEQ ID NO: 1590; WAN024CW8; Start 327; Stop 351
tatcaagggttactatgtcaagcaa

SEQ ID NO: 298959 - DNA, 25 bp, Artificial
  probe
  misc_feature (1)..(25): SEQ ID NO: 1590; WAN024CW8; Start 326; Stop 350
ttatcaagggttactatgtcaagca

SEQ ID NO: 298960 - DNA, 25 bp, Artificial
  probe
  misc_feature (1)..(25): SEQ ID NO: 1590; WAN024CW8; Start 741; Stop 765
tggtggtagtctggaagatggtatt

SEQ ID NO: 298961 - DNA, 25 bp, Artificial
  probe
  misc_feature (1)..(25): SEQ ID NO: 1590; WAN024CW8; Start 328; Stop 352
atcaagggttactatgtcaagcaaa

SEQ ID NO: 298962 - DNA, 25 bp, Artificial
  probe
  misc_feature (1)..(25): SEQ ID NO: 1591; WAN024DWQ; Start 1829; Stop 1853
tagaagaagagcaacaaggtatcat

SEQ ID NO: 298963 - DNA, 25 bp, Artificial
  probe
  misc_feature (1)..(25): SEQ ID NO: 1591; WAN024DWQ; Start 1830; Stop 1854
agaagaagagcaacaaggtatcatc

SEQ ID NO: 298964 - DNA, 25 bp, Artificial
  probe
  misc_feature (1)..(25): SEQ ID NO: 1591; WAN024DWQ; Start 1828; Stop 1852
ctagaagaagagcaacaaggtatca

SEQ ID NO: 298965 - DNA, 25 bp, Artificial
  probe
  misc_feature (1)..(25): SEQ ID NO: 1591; WAN024DWQ; Start 981; Stop 1005
gactattatcactggtggacacaac

SEQ ID NO: 298966 - DNA, 25 bp, Artificial
  probe
  misc_feature (1)..(25): SEQ ID NO: 1591; WAN024DWQ; Start 1831; Stop 1855
gaagaagagcaacaaggtatcatcg

SEQ ID NO: 298967 - DNA, 25 bp, Artificial
  probe
  misc_feature (1)..(25): SEQ ID NO: 1591; WAN024DWQ; Start 978; Stop 1002
cttgactattatcactggtggacac

SEQ ID NO: 298968 - DNA, 25 bp, Artificial
  probe
  misc_feature (1)..(25): SEQ ID NO: 1591; WAN024DWQ; Start 286; Stop 310
gatgactacttgatctccagtgaag

SEQ ID NO: 298969 - DNA, 25 bp, Artificial
  probe
  misc_feature (1)..(25): SEQ ID NO: 1591; WAN024DWQ; Start 980; Stop 1004
tgactattatcactggtggacacaa

SEQ ID NO: 298970 - DNA, 25 bp, Artificial
  probe
  misc_feature (1)..(25): SEQ ID NO: 1591; WAN024DWQ; Start 979; Stop 1003
ttgactattatcactggtggacaca

SEQ ID NO: 298971 - DNA, 25 bp, Artificial
  probe
  misc_feature (1)..(25): SEQ ID NO: 1591; WAN024DWQ; Start 1565; Stop 1589
gagtgattgatacaccattcgtaac

SEQ ID NO: 298972 - DNA, 25 bp, Artificial
  probe
  misc_feature (1)..(25): SEQ ID NO: 1591; WAN024DWQ; Start 1564; Stop 1588
ggagtgattgatacaccattcgtaa

SEQ ID NO: 298973 - DNA, 25 bp, Artificial
  probe
  misc_feature (1)..(25): SEQ ID NO: 1591; WAN024DWQ; Start 33; Stop 57
acatattatctcacatagtcactgg

SEQ ID NO: 298974 - DNA, 25 bp, Artificial
  probe
  misc_feature (1)..(25): SEQ ID NO: 1591; WAN024DWQ; Start 977; Stop 1001
ccttgactattatcactggtggaca

SEQ ID NO: 298975 - DNA, 25 bp, Artificial
  probe
  misc_feature (1)..(25): SEQ ID NO: 1591; WAN024DWQ; Start 802; Stop 826
gaatatgttcaagctgtagaaggtg

SEQ ID NO: 298976 - DNA, 25 bp, Artificial
  probe
  misc_feature (1)..(25): SEQ ID NO: 1591; WAN024DWQ; Start 1566; Stop 1590
agtgattgatacaccattcgtaacg

SEQ ID NO: 298977 - DNA, 25 bp, Artificial
  probe
  misc_feature (1)..(25): SEQ ID NO: 1591; WAN024DWQ; Start 2172; Stop 2196
attgaatgaatacgaaatccttggg

SEQ ID NO: 298978 - DNA, 25 bp, Artificial
  probe
  misc_feature (1)..(25): SEQ ID NO: 1591; WAN024DWQ; Start 2036; Stop 2060
ctgaaagtatctatgaggtggtgac

SEQ ID NO: 298979 - DNA, 25 bp, Artificial
  probe
  misc_feature (1)..(25): SEQ ID NO: 1591; WAN024DWQ; Start 2035; Stop 2059
tctgaaagtatctatgaggtggtga

SEQ ID NO: 298980 - DNA, 25 bp, Artificial
  probe
  misc_feature (1)..(25): SEQ ID NO: 1591; WAN024DWQ; Start 2034; Stop 2058
ttctgaaagtatctatgaggtggtg

SEQ ID NO: 298981 - DNA, 25 bp, Artificial
  probe
  misc_feature (1)..(25): SEQ ID NO: 1591; WAN024DWQ; Start 386; Stop 410
cagatacctttggaaatatgggaca

SEQ ID NO: 298982 - DNA, 25 bp, Artificial
  probe
  misc_feature (1)..(25): SEQ ID NO: 1591; WAN024DWQ; Start 2021; Stop 2045
gtccaagcaatgattctgaaagtat

SEQ ID NO: 298983 - DNA, 25 bp, Artificial
  probe
  misc_feature (1)..(25): SEQ ID NO: 1591; WAN024DWQ; Start 889; Stop 913
tacacacttgccaacacttcttcat

SEQ ID NO: 298984 - DNA, 25 bp, Artificial
  probe
  misc_feature (1)..(25): SEQ ID NO: 1591; WAN024DWQ; Start 803; Stop 827
aatatgttcaagctgtagaaggtgc

SEQ ID NO: 298985 - DNA, 25 bp, Artificial
  probe
  misc_feature (1)..(25): SEQ ID NO: 1591; WAN024DWQ; Start 2037; Stop 2061
tgaaagtatctatgaggtggtgaca

SEQ ID NO: 298986 - DNA, 25 bp, Artificial
  probe
  misc_feature (1)..(25): SEQ ID NO: 1591; WAN024DWQ; Start 2023; Stop 2047
ccaagcaatgattctgaaagtatct

SEQ ID NO: 298987 - DNA, 25 bp, Artificial
  probe
  misc_feature (1)..(25): SEQ ID NO: 1591; WAN024DWQ; Start 2022; Stop 2046
tccaagcaatgattctgaaagtatc

SEQ ID NO: 298988 - DNA, 25 bp, Artificial
  probe
  misc_feature (1)..(25): SEQ ID NO: 1591; WAN024DWQ; Start 287; Stop 311
atgactacttgatctccagtgaagc

SEQ ID NO: 298989 - DNA, 25 bp, Artificial
  probe
  misc_feature (1)..(25): SEQ ID NO: 1591; WAN024DWQ; Start 1221; Stop 1245
cattaacacaggcttgcatgataag

SEQ ID NO: 298990 - DNA, 25 bp, Artificial
  probe
  misc_feature (1)..(25): SEQ ID NO: 1591; WAN024DWQ; Start 491; Stop 515
aagtccttgaagatgagcagtttac

SEQ ID NO: 298991 - DNA, 25 bp, Artificial
  probe
  misc_feature (1)..(25): SEQ ID NO: 1591; WAN024DWQ; Start 2033; Stop 2057
attctgaaagtatctatgaggtggt

SEQ ID NO: 298992 - DNA, 25 bp, Artificial
  probe
  misc_feature (1)..(25): SEQ ID NO: 1591; WAN024DWQ; Start 1950; Stop 1974
cttcaagactcgctttactaacact

SEQ ID NO: 298993 - DNA, 25 bp, Artificial
  probe
  misc_feature (1)..(25): SEQ ID NO: 1591; WAN024DWQ; Start 285; Stop 309
ggatgactacttgatctccagtgaa

SEQ ID NO: 298994 - DNA, 25 bp, Artificial
  probe
  misc_feature (1)..(25): SEQ ID NO: 1591; WAN024DWQ; Start 277; Stop 301
atcttgcaggatgactacttgatct

SEQ ID NO: 298995 - DNA, 25 bp, Artificial
  probe
  misc_feature (1)..(25): SEQ ID NO: 1592; WAN024GMN; Start 906; Stop 930
aatctctatcgtcggaaccatcata

SEQ ID NO: 298996 - DNA, 25 bp, Artificial
  probe
  misc_feature (1)..(25): SEQ ID NO: 1592; WAN024GMN; Start 905; Stop 929
taatctctatcgtcggaaccatcat

SEQ ID NO: 298997 - DNA, 25 bp, Artificial
  probe
  misc_feature (1)..(25): SEQ ID NO: 1592; WAN024GMN; Start 1077; Stop 1101
gatggttatctactatggaactgcc

SEQ ID NO: 298998 - DNA, 25 bp, Artificial
  probe
  misc_feature (1)..(25): SEQ ID NO: 1592; WAN024GMN; Start 904; Stop 928
ttaatctctatcgtcggaaccatca

SEQ ID NO: 298999 - DNA, 25 bp, Artificial
  probe
  misc_feature (1)..(25): SEQ ID NO: 1592; WAN024GMN; Start 1076; Stop 1100
cgatggttatctactatggaactgc

SEQ ID NO: 299000 - DNA, 25 bp, Artificial
  probe
  misc_feature (1)..(25): SEQ ID NO: 1592; WAN024GMN; Start 627; Stop 651
caagatgattcaagtagaacctggt

SEQ ID NO: 299001 - DNA, 25 bp, Artificial
  probe
  misc_feature (1)..(25): SEQ ID NO: 1592; WAN024GMN; Start 626; Stop 650
tcaagatgattcaagtagaacctgg

SEQ ID NO: 299002 - DNA, 25 bp, Artificial
  probe
  misc_feature (1)..(25): SEQ ID NO: 1592; WAN024GMN; Start 298; Stop 322
atgattatcgcaggtatgagtccaa

SEQ ID NO: 299003 - DNA, 25 bp, Artificial
  probe
  misc_feature (1)..(25): SEQ ID NO: 1592; WAN024GMN; Start 290; Stop 314
agattgacatgattatcgcaggtat

SEQ ID NO: 299004 - DNA, 25 bp, Artificial
  probe
  misc_feature (1)..(25): SEQ ID NO: 1592; WAN024GMN; Start 289; Stop 313
aagattgacatgattatcgcaggta

SEQ ID NO: 299005 - DNA, 25 bp, Artificial
  probe
  misc_feature (1)..(25): SEQ ID NO: 1592; WAN024GMN; Start 288; Stop 312
taagattgacatgattatcgcaggt

SEQ ID NO: 299006 - DNA, 25 bp, Artificial
  probe
  misc_feature (1)..(25): SEQ ID NO: 1592; WAN024GMN; Start 287; Stop 311
gtaagattgacatgattatcgcagg

SEQ ID NO: 299007 - DNA, 25 bp, Artificial
  probe
  misc_feature (1)..(25): SEQ ID NO: 1592; WAN024GMN; Start 286; Stop 310
ggtaagattgacatgattatcgcag

SEQ ID NO: 299008 - DNA, 25 bp, Artificial
  probe
  misc_feature (1)..(25): SEQ ID NO: 1592; WAN024GMN; Start 284; Stop 308
ctggtaagattgacatgattatcgc

SEQ ID NO: 299009 - DNA, 25 bp, Artificial
  probe
  misc_feature (1)..(25): SEQ ID NO: 1592; WAN024GMN; Start 625; Stop 649
ttcaagatgattcaagtagaacctg

SEQ ID NO: 299010 - DNA, 25 bp, Artificial
  probe
  misc_feature (1)..(25): SEQ ID NO: 1592; WAN024GMN; Start 285; Stop 309
tggtaagattgacatgattatcgca

SEQ ID NO: 299011 - DNA, 25 bp, Artificial
  probe
  misc_feature (1)..(25): SEQ ID NO: 1592; WAN024GMN; Start 292; Stop 316
attgacatgattatcgcaggtatga

SEQ ID NO: 299012 - DNA, 25 bp, Artificial
  probe
  misc_feature (1)..(25): SEQ ID NO: 1592; WAN024GMN; Start 291; Stop 315
gattgacatgattatcgcaggtatg

SEQ ID NO: 299013 - DNA, 25 bp, Artificial
  probe
  misc_feature (1)..(25): SEQ ID NO: 1592; WAN024GMN; Start 926; Stop 950
tcataggtctcattattggacttgc

SEQ ID NO: 299014 - DNA, 25 bp, Artificial
  probe
  misc_feature (1)..(25): SEQ ID NO: 1592; WAN024GMN; Start 293; Stop 317
ttgacatgattatcgcaggtatgag

SEQ ID NO: 299015 - DNA, 25 bp, Artificial
  probe
  misc_feature (1)..(25): SEQ ID NO: 1592; WAN024GMN; Start 907; Stop 931
atctctatcgtcggaaccatcatag

SEQ ID NO: 299016 - DNA, 25 bp, Artificial
  probe
  misc_feature (1)..(25): SEQ ID NO: 1592; WAN024GMN; Start 628; Stop 652
aagatgattcaagtagaacctggtt

SEQ ID NO: 299017 - DNA, 25 bp, Artificial
  probe
  misc_feature (1)..(25): SEQ ID NO: 1592; WAN024GMN; Start 927; Stop 951
cataggtctcattattggacttgcc

SEQ ID NO: 299018 - DNA, 25 bp, Artificial
  probe
  misc_feature (1)..(25): SEQ ID NO: 1592; WAN024GMN; Start 803; Stop 827
ctacaacaactgaagagactagcag

SEQ ID NO: 299019 - DNA, 25 bp, Artificial
  probe
  misc_feature (1)..(25): SEQ ID NO: 1592; WAN024GMN; Start 299; Stop 323
tgattatcgcaggtatgagtccaac

SEQ ID NO: 299020 - DNA, 25 bp, Artificial
  probe
  misc_feature (1)..(25): SEQ ID NO: 1592; WAN024GMN; Start 800; Stop 824
aagctacaacaactgaagagactag

SEQ ID NO: 299021 - DNA, 25 bp, Artificial
  probe
  misc_feature (1)..(25): SEQ ID NO: 1592; WAN024GMN; Start 799; Stop 823
gaagctacaacaactgaagagacta

SEQ ID NO: 299022 - DNA, 25 bp, Artificial
  probe
  misc_feature (1)..(25): SEQ ID NO: 1592; WAN024GMN; Start 283; Stop 307
tctggtaagattgacatgattatcg

SEQ ID NO: 299023 - DNA, 25 bp, Artificial
  probe
  misc_feature (1)..(25): SEQ ID NO: 1592; WAN024GMN; Start 617; Stop 641
actctaagttcaagatgattcaagt

SEQ ID NO: 299024 - DNA, 25 bp, Artificial
  probe
  misc_feature (1)..(25): SEQ ID NO: 1592; WAN024GMN; Start 922; Stop 946
accatcataggtctcattattggac

SEQ ID NO: 299025 - DNA, 25 bp, Artificial
  probe
  misc_feature (1)..(25): SEQ ID NO: 1592; WAN024GMN; Start 918; Stop 942
cggaaccatcataggtctcattatt

SEQ ID NO: 299026 - DNA, 25 bp, Artificial
  probe
  misc_feature (1)..(25): SEQ ID NO: 1592; WAN024GMN; Start 923; Stop 947
ccatcataggtctcattattggact

SEQ ID NO: 299027 - DNA, 25 bp, Artificial
  probe
  misc_feature (1)..(25): SEQ ID NO: 1592; WAN024GMN; Start 294; Stop 318
tgacatgattatcgcaggtatgagt

SEQ ID NO: 299028 - DNA, 25 bp, Artificial
  probe
  misc_feature (1)..(25): SEQ ID NO: 1593; WAN024C4A; Start 573; Stop 597
aacttctcaatcaactacagccaat

SEQ ID NO: 299029 - DNA, 25 bp, Artificial
  probe
  misc_feature (1)..(25): SEQ ID NO: 1593; WAN024C4A; Start 1128; Stop 1152
tgttgcctataatcagtctgctatt

SEQ ID NO: 299030 - DNA, 25 bp, Artificial
  probe
  misc_feature (1)..(25): SEQ ID NO: 1593; WAN024C4A; Start 1058; Stop 1082
gaagtagtcgcagtgaagtcaatat

SEQ ID NO: 299031 - DNA, 25 bp, Artificial
  probe
  misc_feature (1)..(25): SEQ ID NO: 1593; WAN024C4A; Start 1129; Stop 1153
gttgcctataatcagtctgctattg

SEQ ID NO: 299032 - DNA, 25 bp, Artificial
  probe
  misc_feature (1)..(25): SEQ ID NO: 1593; WAN024C4A; Start 575; Stop 599
cttctcaatcaactacagccaatca

SEQ ID NO: 299033 - DNA, 25 bp, Artificial
  probe
  misc_feature (1)..(25): SEQ ID NO: 1593; WAN024C4A; Start 574; Stop 598
acttctcaatcaactacagccaatc

SEQ ID NO: 299034 - DNA, 25 bp, Artificial
  probe
  misc_feature (1)..(25): SEQ ID NO: 1593; WAN024C4A; Start 1127; Stop 1151
gtgttgcctataatcagtctgctat

SEQ ID NO: 299035 - DNA, 25 bp, Artificial
  probe
  misc_feature (1)..(25): SEQ ID NO: 1593; WAN024C4A; Start 1059; Stop 1083
aagtagtcgcagtgaagtcaatatg

SEQ ID NO: 299036 - DNA, 25 bp, Artificial
  probe
  misc_feature (1)..(25): SEQ ID NO: 1593; WAN024C4A; Start 821; Stop 845
ctattgtggatggtgtgttggatac

SEQ ID NO: 299037 - DNA, 25 bp, Artificial
  probe
  misc_feature (1)..(25): SEQ ID NO: 1593; WAN024C4A; Start 1057; Stop 1081
agaagtagtcgcagtgaagtcaata

SEQ ID NO: 299038 - DNA, 25 bp, Artificial
  probe
  misc_feature (1)..(25): SEQ ID NO: 1593; WAN024C4A; Start 1056; Stop 1080
tagaagtagtcgcagtgaagtcaat

SEQ ID NO: 299039 - DNA, 25 bp, Artificial
  probe
  misc_feature (1)..(25): SEQ ID NO: 1593; WAN024C4A; Start 1130; Stop 1154
ttgcctataatcagtctgctattga

SEQ ID NO: 299040 - DNA, 25 bp, Artificial
  probe
  misc_feature (1)..(25): SEQ ID NO: 1593; WAN024C4A; Start 918; Stop 942
agataaggctatcagtcttggtaag

SEQ ID NO: 299041 - DNA, 25 bp, Artificial
  probe
  misc_feature (1)..(25): SEQ ID NO: 1593; WAN024C4A; Start 913; Stop 937
gtgctagataaggctatcagtcttg

SEQ ID NO: 299042 - DNA, 25 bp, Artificial
  probe
  misc_feature (1)..(25): SEQ ID NO: 1593; WAN024C4A; Start 912; Stop 936
agtgctagataaggctatcagtctt

SEQ ID NO: 299043 - DNA, 25 bp, Artificial
  probe
  misc_feature (1)..(25): SEQ ID NO: 1593; WAN024C4A; Start 911; Stop 935
aagtgctagataaggctatcagtct

SEQ ID NO: 299044 - DNA, 25 bp, Artificial
  probe
  misc_feature (1)..(25): SEQ ID NO: 1593; WAN024C4A; Start 1122; Stop 1146
cagtcgtgttgcctataatcagtct

SEQ ID NO: 299045 - DNA, 25 bp, Artificial
  probe
  misc_feature (1)..(25): SEQ ID NO: 1593; WAN024C4A; Start 399; Stop 423
aatgactgaagaagtggaagaggag

SEQ ID NO: 299046 - DNA, 25 bp, Artificial
  probe
  misc_feature (1)..(25): SEQ ID NO: 1593; WAN024C4A; Start 77; Stop 101
taacagttggtcaagctattcgtaa

SEQ ID NO: 299047 - DNA, 25 bp, Artificial
  probe
  misc_feature (1)..(25): SEQ ID NO: 1593; WAN024C4A; Start 1055; Stop 1079
ctagaagtagtcgcagtgaagtcaa

SEQ ID NO: 299048 - DNA, 25 bp, Artificial
  probe
  misc_feature (1)..(25): SEQ ID NO: 1593; WAN024C4A; Start 916; Stop 940
ctagataaggctatcagtcttggta

SEQ ID NO: 299049 - DNA, 25 bp, Artificial
  probe
  misc_feature (1)..(25): SEQ ID NO: 1593; WAN024C4A; Start 76; Stop 100
ctaacagttggtcaagctattcgta

SEQ ID NO: 299050 - DNA, 25 bp, Artificial
  probe
  misc_feature (1)..(25): SEQ ID NO: 1593; WAN024C4A; Start 1060; Stop 1084
agtagtcgcagtgaagtcaatatgg

SEQ ID NO: 299051 - DNA, 25 bp, Artificial
  probe
  misc_feature (1)..(25): SEQ ID NO: 1593; WAN024C4A; Start 915; Stop 939
gctagataaggctatcagtcttggt

SEQ ID NO: 299052 - DNA, 25 bp, Artificial
  probe
  misc_feature (1)..(25): SEQ ID NO: 1593; WAN024C4A; Start 914; Stop 938
tgctagataaggctatcagtcttgg

SEQ ID NO: 299053 - DNA, 25 bp, Artificial
  probe
  misc_feature (1)..(25): SEQ ID NO: 1593; WAN024C4A; Start 1126; Stop 1150
cgtgttgcctataatcagtctgcta

SEQ ID NO: 299054 - DNA, 25 bp, Artificial
  probe
  misc_feature (1)..(25): SEQ ID NO: 1593; WAN024C4A; Start 1123; Stop 1147
agtcgtgttgcctataatcagtctg

SEQ ID NO: 299055 - DNA, 25 bp, Artificial
  probe
  misc_feature (1)..(25): SEQ ID NO: 1593; WAN024C4A; Start 917; Stop 941
tagataaggctatcagtcttggtaa

SEQ ID NO: 299056 - DNA, 25 bp, Artificial
  probe
  misc_feature (1)..(25): SEQ ID NO: 1593; WAN024C4A; Start 1227; Stop 1251
tggctatatcactggagaccaatat

SEQ ID NO: 299057 - DNA, 25 bp, Artificial
  probe
  misc_feature (1)..(25): SEQ ID NO: 1593; WAN024C4A; Start 706; Stop 730
ttacttgataagctggaaggtagtc

SEQ ID NO: 299058 - DNA, 25 bp, Artificial
  probe
  misc_feature (1)..(25): SEQ ID NO: 1593; WAN024C4A; Start 1228; Stop 1252
ggctatatcactggagaccaatata

SEQ ID NO: 299059 - DNA, 25 bp, Artificial
  probe
  misc_feature (1)..(25): SEQ ID NO: 1593; WAN024C4A; Start 820; Stop 844
gctattgtggatggtgtgttggata

SEQ ID NO: 299060 - DNA, 25 bp, Artificial
  probe
  misc_feature (1)..(25): SEQ ID NO: 1593; WAN024C4A; Start 1237; Stop 1261
actggagaccaatatatccttgaac

SEQ ID NO: 299061 - DNA, 25 bp, Artificial
  probe
  misc_feature (1)..(25): SEQ ID NO: 1594; WAN024GKD; Start 1022; Stop 1046
gtatctcaatctacggtcttcacat

SEQ ID NO: 299062 - DNA, 25 bp, Artificial
  probe
  misc_feature (1)..(25): SEQ ID NO: 1594; WAN024GKD; Start 1018; Stop 1042
aatggtatctcaatctacggtcttc

SEQ ID NO: 299063 - DNA, 25 bp, Artificial
  probe
  misc_feature (1)..(25): SEQ ID NO: 1594; WAN024GKD; Start 581; Stop 605
ttgatactgtcttgaacggttacta

SEQ ID NO: 299064 - DNA, 25 bp, Artificial
  probe
  misc_feature (1)..(25): SEQ ID NO: 1594; WAN024GKD; Start 584; Stop 608
atactgtcttgaacggttactatga

SEQ ID NO: 299065 - DNA, 25 bp, Artificial
  probe
  misc_feature (1)..(25): SEQ ID NO: 1594; WAN024GKD; Start 582; Stop 606
tgatactgtcttgaacggttactat

SEQ ID NO: 299066 - DNA, 25 bp, Artificial
  probe
  misc_feature (1)..(25): SEQ ID NO: 1594; WAN024GKD; Start 1019; Stop 1043
atggtatctcaatctacggtcttca

SEQ ID NO: 299067 - DNA, 25 bp, Artificial
  probe
  misc_feature (1)..(25): SEQ ID NO: 1594; WAN024GKD; Start 583; Stop 607
gatactgtcttgaacggttactatg

SEQ ID NO: 299068 - DNA, 25 bp, Artificial
  probe
  misc_feature (1)..(25): SEQ ID NO: 1594; WAN024GKD; Start 169; Stop 193
gctgaaggcttgttctattctgata

SEQ ID NO: 299069 - DNA, 25 bp, Artificial
  probe
  misc_feature (1)..(25): SEQ ID NO: 1594; WAN024GKD; Start 580; Stop 604
gttgatactgtcttgaacggttact

SEQ ID NO: 299070 - DNA, 25 bp, Artificial
  probe
  misc_feature (1)..(25): SEQ ID NO: 1594; WAN024GKD; Start 1021; Stop 1045
ggtatctcaatctacggtcttcaca

SEQ ID NO: 299071 - DNA, 25 bp, Artificial
  probe
  misc_feature (1)..(25): SEQ ID NO: 1594; WAN024GKD; Start 1020; Stop 1044
tggtatctcaatctacggtcttcac

SEQ ID NO: 299072 - DNA, 25 bp, Artificial
  probe
  misc_feature (1)..(25): SEQ ID NO: 1594; WAN024GKD; Start 170; Stop 194
ctgaaggcttgttctattctgataa

SEQ ID NO: 299073 - DNA, 25 bp, Artificial
  probe
  misc_feature (1)..(25): SEQ ID NO: 1594; WAN024GKD; Start 1023; Stop 1047
tatctcaatctacggtcttcacatg

SEQ ID NO: 299074 - DNA, 25 bp, Artificial
  probe
  misc_feature (1)..(25): SEQ ID NO: 1594; WAN024GKD; Start 1146; Stop 1170
tgacaaccatgaagtagcaattaag

SEQ ID NO: 299075 - DNA, 25 bp, Artificial
  probe
  misc_feature (1)..(25): SEQ ID NO: 1594; WAN024GKD; Start 1147; Stop 1171
gacaaccatgaagtagcaattaaga

SEQ ID NO: 299076 - DNA, 25 bp, Artificial
  probe
  misc_feature (1)..(25): SEQ ID NO: 1594; WAN024GKD; Start 633; Stop 657
gaagaacttggaagatcacaacatc

SEQ ID NO: 299077 - DNA, 25 bp, Artificial
  probe
  misc_feature (1)..(25): SEQ ID NO: 1594; WAN024GKD; Start 704; Stop 728
aagttgaacgcttgattactgacaa

SEQ ID NO: 299078 - DNA, 25 bp, Artificial
  probe
  misc_feature (1)..(25): SEQ ID NO: 1594; WAN024GKD; Start 585; Stop 609
tactgtcttgaacggttactatgac

SEQ ID NO: 299079 - DNA, 25 bp, Artificial
  probe
  misc_feature (1)..(25): SEQ ID NO: 1594; WAN024GKD; Start 1148; Stop 1172
acaaccatgaagtagcaattaagat

SEQ ID NO: 299080 - DNA, 25 bp, Artificial
  probe
  misc_feature (1)..(25): SEQ ID NO: 1594; WAN024GKD; Start 1145; Stop 1169
atgacaaccatgaagtagcaattaa

SEQ ID NO: 299081 - DNA, 25 bp, Artificial
  probe
  misc_feature (1)..(25): SEQ ID NO: 1594; WAN024GKD; Start 978; Stop 1002
ttgtggacatgaattggaaggaatc

SEQ ID NO: 299082 - DNA, 25 bp, Artificial
  probe
  misc_feature (1)..(25): SEQ ID NO: 1594; WAN024GKD; Start 168; Stop 192
tgctgaaggcttgttctattctgat

SEQ ID NO: 299083 - DNA, 25 bp, Artificial
  probe
  misc_feature (1)..(25): SEQ ID NO: 1594; WAN024GKD; Start 632; Stop 656
cgaagaacttggaagatcacaacat

SEQ ID NO: 299084 - DNA, 25 bp, Artificial
  probe
  misc_feature (1)..(25): SEQ ID NO: 1594; WAN024GKD; Start 977; Stop 1001
cttgtggacatgaattggaaggaat

SEQ ID NO: 299085 - DNA, 25 bp, Artificial
  probe
  misc_feature (1)..(25): SEQ ID NO: 1594; WAN024GKD; Start 1337; Stop 1361
catacaactacatcacaatggctgc

SEQ ID NO: 299086 - DNA, 25 bp, Artificial
  probe
  misc_feature (1)..(25): SEQ ID NO: 1594; WAN024GKD; Start 988; Stop 1012
gaattggaaggaatcggtgttcaag

SEQ ID NO: 299087 - DNA, 25 bp, Artificial
  probe
  misc_feature (1)..(25): SEQ ID NO: 1594; WAN024GKD; Start 268; Stop 292
gtagttacagcggaagttgaaggaa

SEQ ID NO: 299088 - DNA, 25 bp, Artificial
  probe
  misc_feature (1)..(25): SEQ ID NO: 1594; WAN024GKD; Start 266; Stop 290
aagtagttacagcggaagttgaagg

SEQ ID NO: 299089 - DNA, 25 bp, Artificial
  probe
  misc_feature (1)..(25): SEQ ID NO: 1594; WAN024GKD; Start 624; Stop 648
aatgatggcgaagaacttggaagat

SEQ ID NO: 299090 - DNA, 25 bp, Artificial
  probe
  misc_feature (1)..(25): SEQ ID NO: 1594; WAN024GKD; Start 1149; Stop 1173
caaccatgaagtagcaattaagatt

SEQ ID NO: 299091 - DNA, 25 bp, Artificial
  probe
  misc_feature (1)..(25): SEQ ID NO: 1594; WAN024GKD; Start 1024; Stop 1048
atctcaatctacggtcttcacatgg

SEQ ID NO: 299092 - DNA, 25 bp, Artificial
  probe
  misc_feature (1)..(25): SEQ ID NO: 1594; WAN024GKD; Start 1329; Stop 1353
caacaaaccatacaactacatcaca

SEQ ID NO: 299093 - DNA, 25 bp, Artificial
  probe
  misc_feature (1)..(25): SEQ ID NO: 1594; WAN024GKD; Start 1004; Stop 1028
gtgttcaaggttcaaatggtatctc

SEQ ID NO: 299094 - DNA, 25 bp, Artificial
  probe
  misc_feature (1)..(25): SEQ ID NO: 1595; WAN024AVL; Start 184; Stop 208
ctagatgtaggctgtggttatggtc

SEQ ID NO: 299095 - DNA, 25 bp, Artificial
  probe
  misc_feature (1)..(25): SEQ ID NO: 1595; WAN024AVL; Start 510; Stop 534
taagatggaagatgtgtttggcaat

SEQ ID NO: 299096 - DNA, 25 bp, Artificial
  probe
  misc_feature (1)..(25): SEQ ID NO: 1595; WAN024AVL; Start 252; Stop 276
catggttgatattaacactcgtgcc

SEQ ID NO: 299097 - DNA, 25 bp, Artificial
  probe
  misc_feature (1)..(25): SEQ ID NO: 1595; WAN024AVL; Start 509; Stop 533
ctaagatggaagatgtgtttggcaa

SEQ ID NO: 299098 - DNA, 25 bp, Artificial
  probe
  misc_feature (1)..(25): SEQ ID NO: 1595; WAN024AVL; Start 185; Stop 209
tagatgtaggctgtggttatggtcc

SEQ ID NO: 299099 - DNA, 25 bp, Artificial
  probe
  misc_feature (1)..(25): SEQ ID NO: 1595; WAN024AVL; Start 511; Stop 535
aagatggaagatgtgtttggcaatt

SEQ ID NO: 299100 - DNA, 25 bp, Artificial
  probe
  misc_feature (1)..(25): SEQ ID NO: 1595; WAN024AVL; Start 442; Stop 466
ttcttggaaattggtggagatttga

SEQ ID NO: 299101 - DNA, 25 bp, Artificial
  probe
  misc_feature (1)..(25): SEQ ID NO: 1595; WAN024AVL; Start 261; Stop 285
tattaacactcgtgccctggattta

SEQ ID NO: 299102 - DNA, 25 bp, Artificial
  probe
  misc_feature (1)..(25): SEQ ID NO: 1595; WAN024AVL; Start 443; Stop 467
tcttggaaattggtggagatttgac

SEQ ID NO: 299103 - DNA, 25 bp, Artificial
  probe
  misc_feature (1)..(25): SEQ ID NO: 1595; WAN024AVL; Start 134; Stop 158
gaagtcaactcttgctcaagtgtct

SEQ ID NO: 299104 - DNA, 25 bp, Artificial
  probe
  misc_feature (1)..(25): SEQ ID NO: 1595; WAN024AVL; Start 508; Stop 532
tctaagatggaagatgtgtttggca

SEQ ID NO: 299105 - DNA, 25 bp, Artificial
  probe
  misc_feature (1)..(25): SEQ ID NO: 1595; WAN024AVL; Start 260; Stop 284
atattaacactcgtgccctggattt

SEQ ID NO: 299106 - DNA, 25 bp, Artificial
  probe
  misc_feature (1)..(25): SEQ ID NO: 1595; WAN024AVL; Start 135; Stop 159
aagtcaactcttgctcaagtgtctg

SEQ ID NO: 299107 - DNA, 25 bp, Artificial
  probe
  misc_feature (1)..(25): SEQ ID NO: 1595; WAN024AVL; Start 337; Stop 361
aatatttatgcaagagttcaagggc

SEQ ID NO: 299108 - DNA, 25 bp, Artificial
  probe
  misc_feature (1)..(25): SEQ ID NO: 1595; WAN024AVL; Start 259; Stop 283
gatattaacactcgtgccctggatt

SEQ ID NO: 299109 - DNA, 25 bp, Artificial
  probe
  misc_feature (1)..(25): SEQ ID NO: 1595; WAN024AVL; Start 131; Stop 155
ttggaagtcaactcttgctcaagtg

SEQ ID NO: 299110 - DNA, 25 bp, Artificial
  probe
  misc_feature (1)..(25): SEQ ID NO: 1595; WAN024AVL; Start 190; Stop 214
gtaggctgtggttatggtccattag

SEQ ID NO: 299111 - DNA, 25 bp, Artificial
  probe
  misc_feature (1)..(25): SEQ ID NO: 1595; WAN024AVL; Start 201; Stop 225
ttatggtccattaggtttgtccttg

SEQ ID NO: 299112 - DNA, 25 bp, Artificial
  probe
  misc_feature (1)..(25): SEQ ID NO: 1595; WAN024AVL; Start 200; Stop 224
gttatggtccattaggtttgtcctt

SEQ ID NO: 299113 - DNA, 25 bp, Artificial
  probe
  misc_feature (1)..(25): SEQ ID NO: 1595; WAN024AVL; Start 262; Stop 286
attaacactcgtgccctggatttag

SEQ ID NO: 299114 - DNA, 25 bp, Artificial
  probe
  misc_feature (1)..(25): SEQ ID NO: 1595; WAN024AVL; Start 441; Stop 465
tttcttggaaattggtggagatttg

SEQ ID NO: 299115 - DNA, 25 bp, Artificial
  probe
  misc_feature (1)..(25): SEQ ID NO: 1595; WAN024AVL; Start 181; Stop 205
gtcctagatgtaggctgtggttatg

SEQ ID NO: 299116 - DNA, 25 bp, Artificial
  probe
  misc_feature (1)..(25): SEQ ID NO: 1595; WAN024AVL; Start 180; Stop 204
agtcctagatgtaggctgtggttat

SEQ ID NO: 299117 - DNA, 25 bp, Artificial
  probe
  misc_feature (1)..(25): SEQ ID NO: 1595; WAN024AVL; Start 129; Stop 153
ctttggaagtcaactcttgctcaag

SEQ ID NO: 299118 - DNA, 25 bp, Artificial
  probe
  misc_feature (1)..(25): SEQ ID NO: 1595; WAN024AVL; Start 49; Stop 73
catgagttgagagtggacttgttgg

SEQ ID NO: 299119 - DNA, 25 bp, Artificial
  probe
  misc_feature (1)..(25): SEQ ID NO: 1595; WAN024AVL; Start 338; Stop 362
atatttatgcaagagttcaagggcg

SEQ ID NO: 299120 - DNA, 25 bp, Artificial
  probe
  misc_feature (1)..(25): SEQ ID NO: 1595; WAN024AVL; Start 133; Stop 157
ggaagtcaactcttgctcaagtgtc

SEQ ID NO: 299121 - DNA, 25 bp, Artificial
  probe
  misc_feature (1)..(25): SEQ ID NO: 1595; WAN024AVL; Start 148; Stop 172
ctcaagtgtctggatgtcaaccaag

SEQ ID NO: 299122 - DNA, 25 bp, Artificial
  probe
  misc_feature (1)..(25): SEQ ID NO: 1595; WAN024AVL; Start 316; Stop 340
aaagcgacgatatttcaatctaata

SEQ ID NO: 299123 - DNA, 25 bp, Artificial
  probe
  misc_feature (1)..(25): SEQ ID NO: 1595; WAN024AVL; Start 313; Stop 337
gcaaaagcgacgatatttcaatcta

SEQ ID NO: 299124 - DNA, 25 bp, Artificial
  probe
  misc_feature (1)..(25): SEQ ID NO: 1595; WAN024AVL; Start 253; Stop 277
atggttgatattaacactcgtgccc

SEQ ID NO: 299125 - DNA, 25 bp, Artificial
  probe
  misc_feature (1)..(25): SEQ ID NO: 1595; WAN024AVL; Start 139; Stop 163
caactcttgctcaagtgtctggatg

SEQ ID NO: 299126 - DNA, 25 bp, Artificial
  probe
  misc_feature (1)..(25): SEQ ID NO: 1595; WAN024AVL; Start 138; Stop 162
tcaactcttgctcaagtgtctggat

SEQ ID NO: 299127 - DNA, 25 bp, Artificial
  probe
  misc_feature (1)..(25): SEQ ID NO: 1596; WAN024AVK; Start 338; Stop 362
acatctatgaacaagttgaaggaca

SEQ ID NO: 299128 - DNA, 25 bp, Artificial
  probe
  misc_feature (1)..(25): SEQ ID NO: 1596; WAN024AVK; Start 328; Stop 352
ttccagtccaacatctatgaacaag

SEQ ID NO: 299129 - DNA, 25 bp, Artificial
  probe
  misc_feature (1)..(25): SEQ ID NO: 1596; WAN024AVK; Start 339; Stop 363
catctatgaacaagttgaaggacat

SEQ ID NO: 299130 - DNA, 25 bp, Artificial
  probe
  misc_feature (1)..(25): SEQ ID NO: 1596; WAN024AVK; Start 337; Stop 361
aacatctatgaacaagttgaaggac

SEQ ID NO: 299131 - DNA, 25 bp, Artificial
  probe
  misc_feature (1)..(25): SEQ ID NO: 1596; WAN024AVK; Start 330; Stop 354
ccagtccaacatctatgaacaagtt

SEQ ID NO: 299132 - DNA, 25 bp, Artificial
  probe
  misc_feature (1)..(25): SEQ ID NO: 1596; WAN024AVK; Start 239; Stop 263
gagttcaggctactatggttgatat

SEQ ID NO: 299133 - DNA, 25 bp, Artificial
  probe
  misc_feature (1)..(25): SEQ ID NO: 1596; WAN024AVK; Start 135; Stop 159
aagtcaactattgctcaagtgtctt

SEQ ID NO: 299134 - DNA, 25 bp, Artificial
  probe
  misc_feature (1)..(25): SEQ ID NO: 1596; WAN024AVK; Start 329; Stop 353
tccagtccaacatctatgaacaagt

SEQ ID NO: 299135 - DNA, 25 bp, Artificial
  probe
  misc_feature (1)..(25): SEQ ID NO: 1596; WAN024AVK; Start 234; Stop 258
ttatggagttcaggctactatggtt

SEQ ID NO: 299136 - DNA, 25 bp, Artificial
  probe
  misc_feature (1)..(25): SEQ ID NO: 1596; WAN024AVK; Start 134; Stop 158
gaagtcaactattgctcaagtgtct

SEQ ID NO: 299137 - DNA, 25 bp, Artificial
  probe
  misc_feature (1)..(25): SEQ ID NO: 1596; WAN024AVK; Start 340; Stop 364
atctatgaacaagttgaaggacatt

SEQ ID NO: 299138 - DNA, 25 bp, Artificial
  probe
  misc_feature (1)..(25): SEQ ID NO: 1596; WAN024AVK; Start 238; Stop 262
ggagttcaggctactatggttgata

SEQ ID NO: 299139 - DNA, 25 bp, Artificial
  probe
  misc_feature (1)..(25): SEQ ID NO: 1596; WAN024AVK; Start 233; Stop 257
cttatggagttcaggctactatggt

SEQ ID NO: 299140 - DNA, 25 bp, Artificial
  probe
  misc_feature (1)..(25): SEQ ID NO: 1596; WAN024AVK; Start 131; Stop 155
ttggaagtcaactattgctcaagtg

SEQ ID NO: 299141 - DNA, 25 bp, Artificial
  probe
  misc_feature (1)..(25): SEQ ID NO: 1596; WAN024AVK; Start 235; Stop 259
tatggagttcaggctactatggttg

SEQ ID NO: 299142 - DNA, 25 bp, Artificial
  probe
  misc_feature (1)..(25): SEQ ID NO: 1596; WAN024AVK; Start 133; Stop 157
ggaagtcaactattgctcaagtgtc

SEQ ID NO: 299143 - DNA, 25 bp, Artificial
  probe
  misc_feature (1)..(25): SEQ ID NO: 1596; WAN024AVK; Start 227; Stop 251
ctaaggcttatggagttcaggctac

SEQ ID NO: 299144 - DNA, 25 bp, Artificial
  probe
  misc_feature (1)..(25): SEQ ID NO: 1596; WAN024AVK; Start 132; Stop 156
tggaagtcaactattgctcaagtgt

SEQ ID NO: 299145 - DNA, 25 bp, Artificial
  probe
  misc_feature (1)..(25): SEQ ID NO: 1596; WAN024AVK; Start 232; Stop 256
gcttatggagttcaggctactatgg

SEQ ID NO: 299146 - DNA, 25 bp, Artificial
  probe
  misc_feature (1)..(25): SEQ ID NO: 1596; WAN024AVK; Start 231; Stop 255
ggcttatggagttcaggctactatg

SEQ ID NO: 299147 - DNA, 25 bp, Artificial
  probe
  misc_feature (1)..(25): SEQ ID NO: 1596; WAN024AVK; Start 230; Stop 254
aggcttatggagttcaggctactat

SEQ ID NO: 299148 - DNA, 25 bp, Artificial
  probe
  misc_feature (1)..(25): SEQ ID NO: 1596; WAN024AVK; Start 517; Stop 541
gaggatgtgtttggtaattgtgaaa

SEQ ID NO: 299149 - DNA, 25 bp, Artificial
  probe
  misc_feature (1)..(25): SEQ ID NO: 1596; WAN024AVK; Start 511; Stop 535
aagatggaggatgtgtttggtaatt

SEQ ID NO: 299150 - DNA, 25 bp, Artificial
  probe
  misc_feature (1)..(25): SEQ ID NO: 1596; WAN024AVK; Start 522; Stop 546
tgtgtttggtaattgtgaaatcctt

SEQ ID NO: 299151 - DNA, 25 bp, Artificial
  probe
  misc_feature (1)..(25): SEQ ID NO: 1596; WAN024AVK; Start 327; Stop 351
tttccagtccaacatctatgaacaa

SEQ ID NO: 299152 - DNA, 25 bp, Artificial
  probe
  misc_feature (1)..(25): SEQ ID NO: 1596; WAN024AVK; Start 521; Stop 545
atgtgtttggtaattgtgaaatcct

SEQ ID NO: 299153 - DNA, 25 bp, Artificial
  probe
  misc_feature (1)..(25): SEQ ID NO: 1596; WAN024AVK; Start 518; Stop 542
aggatgtgtttggtaattgtgaaat

SEQ ID NO: 299154 - DNA, 25 bp, Artificial
  probe
  misc_feature (1)..(25): SEQ ID NO: 1596; WAN024AVK; Start 520; Stop 544
gatgtgtttggtaattgtgaaatcc

SEQ ID NO: 299155 - DNA, 25 bp, Artificial
  probe
  misc_feature (1)..(25): SEQ ID NO: 1596; WAN024AVK; Start 519; Stop 543
ggatgtgtttggtaattgtgaaatc

SEQ ID NO: 299156 - DNA, 25 bp, Artificial
  probe
  misc_feature (1)..(25): SEQ ID NO: 1596; WAN024AVK; Start 512; Stop 536
agatggaggatgtgtttggtaattg

SEQ ID NO: 299157 - DNA, 25 bp, Artificial
  probe
  misc_feature (1)..(25): SEQ ID NO: 1596; WAN024AVK; Start 229; Stop 253
aaggcttatggagttcaggctacta

SEQ ID NO: 299158 - DNA, 25 bp, Artificial
  probe
  misc_feature (1)..(25): SEQ ID NO: 1596; WAN024AVK; Start 129; Stop 153
ctttggaagtcaactattgctcaag

SEQ ID NO: 299159 - DNA, 25 bp, Artificial
  probe
  misc_feature (1)..(25): SEQ ID NO: 1596; WAN024AVK; Start 513; Stop 537
gatggaggatgtgtttggtaattgt

SEQ ID NO: 299160 - DNA, 25 bp, Artificial
  probe
  misc_feature (1)..(25): SEQ ID NO: 1597; WAN024FUS; Start 483; Stop 507
gacacgaactgactctattatggta

SEQ ID NO: 299161 - DNA, 25 bp, Artificial
  probe
  misc_feature (1)..(25): SEQ ID NO: 1597; WAN024FUS; Start 484; Stop 508
acacgaactgactctattatggtat

SEQ ID NO: 299162 - DNA, 25 bp, Artificial
  probe
  misc_feature (1)..(25): SEQ ID NO: 1597; WAN024FUS; Start 482; Stop 506
agacacgaactgactctattatggt

SEQ ID NO: 299163 - DNA, 25 bp, Artificial
  probe
  misc_feature (1)..(25): SEQ ID NO: 1597; WAN024FUS; Start 480; Stop 504
tgagacacgaactgactctattatg

SEQ ID NO: 299164 - DNA, 25 bp, Artificial
  probe
  misc_feature (1)..(25): SEQ ID NO: 1597; WAN024FUS; Start 478; Stop 502
gttgagacacgaactgactctatta

SEQ ID NO: 299165 - DNA, 25 bp, Artificial
  probe
  misc_feature (1)..(25): SEQ ID NO: 1597; WAN024FUS; Start 481; Stop 505
gagacacgaactgactctattatgg

SEQ ID NO: 299166 - DNA, 25 bp, Artificial
  probe
  misc_feature (1)..(25): SEQ ID NO: 1597; WAN024FUS; Start 485; Stop 509
cacgaactgactctattatggtatt

SEQ ID NO: 299167 - DNA, 25 bp, Artificial
  probe
  misc_feature (1)..(25): SEQ ID NO: 1597; WAN024FUS; Start 404; Stop 428
ttaatggtcaggacactagagatgg

SEQ ID NO: 299168 - DNA, 25 bp, Artificial
  probe
  misc_feature (1)..(25): SEQ ID NO: 1597; WAN024FUS; Start 479; Stop 503
ttgagacacgaactgactctattat

SEQ ID NO: 299169 - DNA, 25 bp, Artificial
  probe
  misc_feature (1)..(25): SEQ ID NO: 1597; WAN024FUS; Start 411; Stop 435
tcaggacactagagatggagttaat

SEQ ID NO: 299170 - DNA, 25 bp, Artificial
  probe
  misc_feature (1)..(25): SEQ ID NO: 1597; WAN024FUS; Start 28; Stop 52
catgagcagttgcgttatgattatt

SEQ ID NO: 299171 - DNA, 25 bp, Artificial
  probe
  misc_feature (1)..(25): SEQ ID NO: 1597; WAN024FUS; Start 410; Stop 434
gtcaggacactagagatggagttaa

SEQ ID NO: 299172 - DNA, 25 bp, Artificial
  probe
  misc_feature (1)..(25): SEQ ID NO: 1597; WAN024FUS; Start 412; Stop 436
caggacactagagatggagttaata

SEQ ID NO: 299173 - DNA, 25 bp, Artificial
  probe
  misc_feature (1)..(25): SEQ ID NO: 1597; WAN024FUS; Start 405; Stop 429
taatggtcaggacactagagatgga

SEQ ID NO: 299174 - DNA, 25 bp, Artificial
  probe
  misc_feature (1)..(25): SEQ ID NO: 1597; WAN024FUS; Start 477; Stop 501
tgttgagacacgaactgactctatt

SEQ ID NO: 299175 - DNA, 25 bp, Artificial
  probe
  misc_feature (1)..(25): SEQ ID NO: 1597; WAN024FUS; Start 413; Stop 437
aggacactagagatggagttaatat

SEQ ID NO: 299176 - DNA, 25 bp, Artificial
  probe
  misc_feature (1)..(25): SEQ ID NO: 1597; WAN024FUS; Start 1183; Stop 1207
tgggtagatgcctatgatgtttatg

SEQ ID NO: 299177 - DNA, 25 bp, Artificial
  probe
  misc_feature (1)..(25): SEQ ID NO: 1597; WAN024FUS; Start 1182; Stop 1206
ctgggtagatgcctatgatgtttat

SEQ ID NO: 299178 - DNA, 25 bp, Artificial
  probe
  misc_feature (1)..(25): SEQ ID NO: 1597; WAN024FUS; Start 1095; Stop 1119
ctatactttcctcctaacaaacggt

SEQ ID NO: 299179 - DNA, 25 bp, Artificial
  probe
  misc_feature (1)..(25): SEQ ID NO: 1597; WAN024FUS; Start 1092; Stop 1116
accctatactttcctcctaacaaac

SEQ ID NO: 299180 - DNA, 25 bp, Artificial
  probe
  misc_feature (1)..(25): SEQ ID NO: 1597; WAN024FUS; Start 845; Stop 869
gagatgatttatacgctaccgagac

SEQ ID NO: 299181 - DNA, 25 bp, Artificial
  probe
  misc_feature (1)..(25): SEQ ID NO: 1597; WAN024FUS; Start 1094; Stop 1118
cctatactttcctcctaacaaacgg

SEQ ID NO: 299182 - DNA, 25 bp, Artificial
  probe
  misc_feature (1)..(25): SEQ ID NO: 1597; WAN024FUS; Start 1093; Stop 1117
ccctatactttcctcctaacaaacg

SEQ ID NO: 299183 - DNA, 25 bp, Artificial
  probe
  misc_feature (1)..(25): SEQ ID NO: 1597; WAN024FUS; Start 1184; Stop 1208
gggtagatgcctatgatgtttatgg

SEQ ID NO: 299184 - DNA, 25 bp, Artificial
  probe
  misc_feature (1)..(25): SEQ ID NO: 1597; WAN024FUS; Start 1181; Stop 1205
actgggtagatgcctatgatgttta

SEQ ID NO: 299185 - DNA, 25 bp, Artificial
  probe
  misc_feature (1)..(25): SEQ ID NO: 1597; WAN024FUS; Start 847; Stop 871
gatgatttatacgctaccgagactg

SEQ ID NO: 299186 - DNA, 25 bp, Artificial
  probe
  misc_feature (1)..(25): SEQ ID NO: 1597; WAN024FUS; Start 846; Stop 870
agatgatttatacgctaccgagact

SEQ ID NO: 299187 - DNA, 25 bp, Artificial
  probe
  misc_feature (1)..(25): SEQ ID NO: 1597; WAN024FUS; Start 839; Stop 863
cagtcggagatgatttatacgctac

SEQ ID NO: 299188 - DNA, 25 bp, Artificial
  probe
  misc_feature (1)..(25): SEQ ID NO: 1597; WAN024FUS; Start 836; Stop 860
ctacagtcggagatgatttatacgc

SEQ ID NO: 299189 - DNA, 25 bp, Artificial
  probe
  misc_feature (1)..(25): SEQ ID NO: 1597; WAN024FUS; Start 835; Stop 859
gctacagtcggagatgatttatacg

SEQ ID NO: 299190 - DNA, 25 bp, Artificial
  probe
  misc_feature (1)..(25): SEQ ID NO: 1597; WAN024FUS; Start 1096; Stop 1120
tatactttcctcctaacaaacggtt

SEQ ID NO: 299191 - DNA, 25 bp, Artificial
  probe
  misc_feature (1)..(25): SEQ ID NO: 1597; WAN024FUS; Start 848; Stop 872
atgatttatacgctaccgagactga

SEQ ID NO: 299192 - DNA, 25 bp, Artificial
  probe
  misc_feature (1)..(25): SEQ ID NO: 1597; WAN024FUS; Start 838; Stop 862
acagtcggagatgatttatacgcta

SEQ ID NO: 299193 - DNA, 25 bp, Artificial
  probe
  misc_feature (1)..(25): SEQ ID NO: 1598; WAN024F3H; Start 759; Stop 783
tggtggtgctaatatcaagaagatt

SEQ ID NO: 299194 - DNA, 25 bp, Artificial
  probe
  misc_feature (1)..(25): SEQ ID NO: 1598; WAN024F3H; Start 758; Stop 782
gtggtggtgctaatatcaagaagat

SEQ ID NO: 299195 - DNA, 25 bp, Artificial
  probe
  misc_feature (1)..(25): SEQ ID NO: 1598; WAN024F3H; Start 447; Stop 471
tatctatgtcaaccttggtagcatc

SEQ ID NO: 299196 - DNA, 25 bp, Artificial
  probe
  misc_feature (1)..(25): SEQ ID NO: 1598; WAN024F3H; Start 174; Stop 198
ttatactgtccgtgaagttgttgat

SEQ ID NO: 299197 - DNA, 25 bp, Artificial
  probe
  misc_feature (1)..(25): SEQ ID NO: 1598; WAN024F3H; Start 446; Stop 470
ttatctatgtcaaccttggtagcat

SEQ ID NO: 299198 - DNA, 25 bp, Artificial
  probe
  misc_feature (1)..(25): SEQ ID NO: 1598; WAN024F3H; Start 175; Stop 199
tatactgtccgtgaagttgttgatg

SEQ ID NO: 299199 - DNA, 25 bp, Artificial
  probe
  misc_feature (1)..(25): SEQ ID NO: 1598; WAN024F3H; Start 760; Stop 784
ggtggtgctaatatcaagaagatta

SEQ ID NO: 299200 - DNA, 25 bp, Artificial
  probe
  misc_feature (1)..(25): SEQ ID NO: 1598; WAN024F3H; Start 63; Stop 87
agatatcatcgacgcagtagtagag

SEQ ID NO: 299201 - DNA, 25 bp, Artificial
  probe
  misc_feature (1)..(25): SEQ ID NO: 1598; WAN024F3H; Start 368; Stop 392
gtgccatcacttacaatacttacaa

SEQ ID NO: 299202 - DNA, 25 bp, Artificial
  probe
  misc_feature (1)..(25): SEQ ID NO: 1598; WAN024F3H; Start 64; Stop 88
gatatcatcgacgcagtagtagagt

SEQ ID NO: 299203 - DNA, 25 bp, Artificial
  probe
  misc_feature (1)..(25): SEQ ID NO: 1598; WAN024F3H; Start 367; Stop 391
cgtgccatcacttacaatacttaca

SEQ ID NO: 299204 - DNA, 25 bp, Artificial
  probe
  misc_feature (1)..(25): SEQ ID NO: 1598; WAN024F3H; Start 757; Stop 781
cgtggtggtgctaatatcaagaaga

SEQ ID NO: 299205 - DNA, 25 bp, Artificial
  probe
  misc_feature (1)..(25): SEQ ID NO: 1598; WAN024F3H; Start 65; Stop 89
atatcatcgacgcagtagtagagtc

SEQ ID NO: 299206 - DNA, 25 bp, Artificial
  probe
  misc_feature (1)..(25): SEQ ID NO: 1598; WAN024F3H; Start 761; Stop 785
gtggtgctaatatcaagaagattac

SEQ ID NO: 299207 - DNA, 25 bp, Artificial
  probe
  misc_feature (1)..(25): SEQ ID NO: 1598; WAN024F3H; Start 176; Stop 200
atactgtccgtgaagttgttgatga

SEQ ID NO: 299208 - DNA, 25 bp, Artificial
  probe
  misc_feature (1)..(25): SEQ ID NO: 1598; WAN024F3H; Start 762; Stop 786
tggtgctaatatcaagaagattact

SEQ ID NO: 299209 - DNA, 25 bp, Artificial
  probe
  misc_feature (1)..(25): SEQ ID NO: 1598; WAN024F3H; Start 448; Stop 472
atctatgtcaaccttggtagcatcg

SEQ ID NO: 299210 - DNA, 25 bp, Artificial
  probe
  misc_feature (1)..(25): SEQ ID NO: 1598; WAN024F3H; Start 239; Stop 263
ctcttgccattaattcagcttatga

SEQ ID NO: 299211 - DNA, 25 bp, Artificial
  probe
  misc_feature (1)..(25): SEQ ID NO: 1598; WAN024F3H; Start 177; Stop 201
tactgtccgtgaagttgttgatgaa

SEQ ID NO: 299212 - DNA, 25 bp, Artificial
  probe
  misc_feature (1)..(25): SEQ ID NO: 1598; WAN024F3H; Start 883; Stop 907
gaatttatctacaatgccatcgctc

SEQ ID NO: 299213 - DNA, 25 bp, Artificial
  probe
  misc_feature (1)..(25): SEQ ID NO: 1598; WAN024F3H; Start 881; Stop 905
ctgaatttatctacaatgccatcgc

SEQ ID NO: 299214 - DNA, 25 bp, Artificial
  probe
  misc_feature (1)..(25): SEQ ID NO: 1598; WAN024F3H; Start 880; Stop 904
gctgaatttatctacaatgccatcg

SEQ ID NO: 299215 - DNA, 25 bp, Artificial
  probe
  misc_feature (1)..(25): SEQ ID NO: 1598; WAN024F3H; Start 61; Stop 85
gaagatatcatcgacgcagtagtag

SEQ ID NO: 299216 - DNA, 25 bp, Artificial
  probe
  misc_feature (1)..(25): SEQ ID NO: 1598; WAN024F3H; Start 445; Stop 469
tttatctatgtcaaccttggtagca

SEQ ID NO: 299217 - DNA, 25 bp, Artificial
  probe
  misc_feature (1)..(25): SEQ ID NO: 1598; WAN024F3H; Start 882; Stop 906
tgaatttatctacaatgccatcgct

SEQ ID NO: 299218 - DNA, 25 bp, Artificial
  probe
  misc_feature (1)..(25): SEQ ID NO: 1598; WAN024F3H; Start 908; Stop 932
ctgctgaggttgaccaagttatctt

SEQ ID NO: 299219 - DNA, 25 bp, Artificial
  probe
  misc_feature (1)..(25): SEQ ID NO: 1598; WAN024F3H; Start 62; Stop 86
aagatatcatcgacgcagtagtaga

SEQ ID NO: 299220 - DNA, 25 bp, Artificial
  probe
  misc_feature (1)..(25): SEQ ID NO: 1598; WAN024F3H; Start 60; Stop 84
agaagatatcatcgacgcagtagta

SEQ ID NO: 299221 - DNA, 25 bp, Artificial
  probe
  misc_feature (1)..(25): SEQ ID NO: 1598; WAN024F3H; Start 438; Stop 462
caaccgctttatctatgtcaacctt

SEQ ID NO: 299222 - DNA, 25 bp, Artificial
  probe
  misc_feature (1)..(25): SEQ ID NO: 1598; WAN024F3H; Start 369; Stop 393
tgccatcacttacaatacttacaaa

SEQ ID NO: 299223 - DNA, 25 bp, Artificial
  probe
  misc_feature (1)..(25): SEQ ID NO: 1598; WAN024F3H; Start 442; Stop 466
cgctttatctatgtcaaccttggta

SEQ ID NO: 299224 - DNA, 25 bp, Artificial
  probe
  misc_feature (1)..(25): SEQ ID NO: 1598; WAN024F3H; Start 626; Stop 650
agcaagaaattccagaagtttatga

SEQ ID NO: 299225 - DNA, 25 bp, Artificial
  probe
  misc_feature (1)..(25): SEQ ID NO: 1598; WAN024F3H; Start 444; Stop 468
ctttatctatgtcaaccttggtagc

SEQ ID NO: 299226 - DNA, 25 bp, Artificial
  probe
  misc_feature (1)..(25): SEQ ID NO: 1599; WAN024DYL; Start 424; Stop 448
gtcattattcgctcaacagaagaag

SEQ ID NO: 299227 - DNA, 25 bp, Artificial
  probe
  misc_feature (1)..(25): SEQ ID NO: 1599; WAN024DYL; Start 423; Stop 447
agtcattattcgctcaacagaagaa

SEQ ID NO: 299228 - DNA, 25 bp, Artificial
  probe
  misc_feature (1)..(25): SEQ ID NO: 1599; WAN024DYL; Start 422; Stop 446
cagtcattattcgctcaacagaaga

SEQ ID NO: 299229 - DNA, 25 bp, Artificial
  probe
  misc_feature (1)..(25): SEQ ID NO: 1599; WAN024DYL; Start 124; Stop 148
tcttggacttatacttctgagaaca

SEQ ID NO: 299230 - DNA, 25 bp, Artificial
  probe
  misc_feature (1)..(25): SEQ ID NO: 1599; WAN024DYL; Start 421; Stop 445
ccagtcattattcgctcaacagaag

SEQ ID NO: 299231 - DNA, 25 bp, Artificial
  probe
  misc_feature (1)..(25): SEQ ID NO: 1599; WAN024DYL; Start 125; Stop 149
cttggacttatacttctgagaacat

SEQ ID NO: 299232 - DNA, 25 bp, Artificial
  probe
  misc_feature (1)..(25): SEQ ID NO: 1599; WAN024DYL; Start 383; Stop 407
tgttatcaggaatcttaacctcagt

SEQ ID NO: 299233 - DNA, 25 bp, Artificial
  probe
  misc_feature (1)..(25): SEQ ID NO: 1599; WAN024DYL; Start 381; Stop 405
tctgttatcaggaatcttaacctca

SEQ ID NO: 299234 - DNA, 25 bp, Artificial
  probe
  misc_feature (1)..(25): SEQ ID NO: 1599; WAN024DYL; Start 382; Stop 406
ctgttatcaggaatcttaacctcag

SEQ ID NO: 299235 - DNA, 25 bp, Artificial
  probe
  misc_feature (1)..(25): SEQ ID NO: 1599; WAN024DYL; Start 379; Stop 403
tctctgttatcaggaatcttaacct

SEQ ID NO: 299236 - DNA, 25 bp, Artificial
  probe
  misc_feature (1)..(25): SEQ ID NO: 1599; WAN024DYL; Start 345; Stop 369
gctcttctttgtagtcttcttaggt

SEQ ID NO: 299237 - DNA, 25 bp, Artificial
  probe
  misc_feature (1)..(25): SEQ ID NO: 1599; WAN024DYL; Start 344; Stop 368
tgctcttctttgtagtcttcttagg

SEQ ID NO: 299238 - DNA, 25 bp, Artificial
  probe
  misc_feature (1)..(25): SEQ ID NO: 1599; WAN024DYL; Start 380; Stop 404
ctctgttatcaggaatcttaacctc

SEQ ID NO: 299239 - DNA, 25 bp, Artificial
  probe
  misc_feature (1)..(25): SEQ ID NO: 1599; WAN024DYL; Start 378; Stop 402
ctctctgttatcaggaatcttaacc

SEQ ID NO: 299240 - DNA, 25 bp, Artificial
  probe
  misc_feature (1)..(25): SEQ ID NO: 1599; WAN024DYL; Start 680; Stop 704
atatgtatatgctgtcaagtgaggg

SEQ ID NO: 299241 - DNA, 25 bp, Artificial
  probe
  misc_feature (1)..(25): SEQ ID NO: 1599; WAN024DYL; Start 126; Stop 150
ttggacttatacttctgagaacatt

SEQ ID NO: 299242 - DNA, 25 bp, Artificial
  probe
  misc_feature (1)..(25): SEQ ID NO: 1599; WAN024DYL; Start 97; Stop 121
ttacctcatctaagtctatccctct

SEQ ID NO: 299243 - DNA, 25 bp, Artificial
  probe
  misc_feature (1)..(25): SEQ ID NO: 1599; WAN024DYL; Start 99; Stop 123
acctcatctaagtctatccctcttt

SEQ ID NO: 299244 - DNA, 25 bp, Artificial
  probe
  misc_feature (1)..(25): SEQ ID NO: 1599; WAN024DYL; Start 148; Stop 172
atttcccttatgccagcgattattt

SEQ ID NO: 299245 - DNA, 25 bp, Artificial
  probe
  misc_feature (1)..(25): SEQ ID NO: 1599; WAN024DYL; Start 98; Stop 122
tacctcatctaagtctatccctctt

SEQ ID NO: 299246 - DNA, 25 bp, Artificial
  probe
  misc_feature (1)..(25): SEQ ID NO: 1599; WAN024DYL; Start 372; Stop 396
tcaatactctctgttatcaggaatc

SEQ ID NO: 299247 - DNA, 25 bp, Artificial
  probe
  misc_feature (1)..(25): SEQ ID NO: 1599; WAN024DYL; Start 373; Stop 397
caatactctctgttatcaggaatct

SEQ ID NO: 299248 - DNA, 25 bp, Artificial
  probe
  misc_feature (1)..(25): SEQ ID NO: 1599; WAN024DYL; Start 162; Stop 186
agcgattatttccaccgttattctg

SEQ ID NO: 299249 - DNA, 25 bp, Artificial
  probe
  misc_feature (1)..(25): SEQ ID NO: 1599; WAN024DYL; Start 161; Stop 185
cagcgattatttccaccgttattct

SEQ ID NO: 299250 - DNA, 25 bp, Artificial
  probe
  misc_feature (1)..(25): SEQ ID NO: 1599; WAN024DYL; Start 377; Stop 401
actctctgttatcaggaatcttaac

SEQ ID NO: 299251 - DNA, 25 bp, Artificial
  probe
  misc_feature (1)..(25): SEQ ID NO: 1599; WAN024DYL; Start 343; Stop 367
atgctcttctttgtagtcttcttag

SEQ ID NO: 299252 - DNA, 25 bp, Artificial
  probe
  misc_feature (1)..(25): SEQ ID NO: 1599; WAN024DYL; Start 149; Stop 173
tttcccttatgccagcgattatttc

SEQ ID NO: 299253 - DNA, 25 bp, Artificial
  probe
  misc_feature (1)..(25): SEQ ID NO: 1599; WAN024DYL; Start 178; Stop 202
gttattctggtctttggtgctcttc

SEQ ID NO: 299254 - DNA, 25 bp, Artificial
  probe
  misc_feature (1)..(25): SEQ ID NO: 1599; WAN024DYL; Start 409; Stop 433
atcatggtgttgccagtcattattc

SEQ ID NO: 299255 - DNA, 25 bp, Artificial
  probe
  misc_feature (1)..(25): SEQ ID NO: 1599; WAN024DYL; Start 180; Stop 204
tattctggtctttggtgctcttctt

SEQ ID NO: 299256 - DNA, 25 bp, Artificial
  probe
  misc_feature (1)..(25): SEQ ID NO: 1599; WAN024DYL; Start 179; Stop 203
ttattctggtctttggtgctcttct

SEQ ID NO: 299257 - DNA, 25 bp, Artificial
  probe
  misc_feature (1)..(25): SEQ ID NO: 1599; WAN024DYL; Start 136; Stop 160
acttctgagaacatttcccttatgc

SEQ ID NO: 299258 - DNA, 25 bp, Artificial
  probe
  misc_feature (1)..(25): SEQ ID NO: 1599; WAN024DYL; Start 147; Stop 171
catttcccttatgccagcgattatt

SEQ ID NO: 299259 - DNA, 25 bp, Artificial
  probe
  misc_feature (1)..(25): SEQ ID NO: 1600; WAN024FY8; Start 183; Stop 207
tatatctgaagccgttatgaggttc

SEQ ID NO: 299260 - DNA, 25 bp, Artificial
  probe
  misc_feature (1)..(25): SEQ ID NO: 1600; WAN024FY8; Start 1015; Stop 1039
tcaggttgtataggagcaattatgg

SEQ ID NO: 299261 - DNA, 25 bp, Artificial
  probe
  misc_feature (1)..(25): SEQ ID NO: 1600; WAN024FY8; Start 182; Stop 206
atatatctgaagccgttatgaggtt

SEQ ID NO: 299262 - DNA, 25 bp, Artificial
  probe
  misc_feature (1)..(25): SEQ ID NO: 1600; WAN024FY8; Start 181; Stop 205
aatatatctgaagccgttatgaggt

SEQ ID NO: 299263 - DNA, 25 bp, Artificial
  probe
  misc_feature (1)..(25): SEQ ID NO: 1600; WAN024FY8; Start 882; Stop 906
acttctattgattatagcgagtggt

SEQ ID NO: 299264 - DNA, 25 bp, Artificial
  probe
  misc_feature (1)..(25): SEQ ID NO: 1600; WAN024FY8; Start 1014; Stop 1038
ttcaggttgtataggagcaattatg

SEQ ID NO: 299265 - DNA, 25 bp, Artificial
  probe
  misc_feature (1)..(25): SEQ ID NO: 1600; WAN024FY8; Start 191; Stop 215
aagccgttatgaggttcctaatgaa

SEQ ID NO: 299266 - DNA, 25 bp, Artificial
  probe
  misc_feature (1)..(25): SEQ ID NO: 1600; WAN024FY8; Start 184; Stop 208
atatctgaagccgttatgaggttcc

SEQ ID NO: 299267 - DNA, 25 bp, Artificial
  probe
  misc_feature (1)..(25): SEQ ID NO: 1600; WAN024FY8; Start 190; Stop 214
gaagccgttatgaggttcctaatga

SEQ ID NO: 299268 - DNA, 25 bp, Artificial
  probe
  misc_feature (1)..(25): SEQ ID NO: 1600; WAN024FY8; Start 188; Stop 212
ctgaagccgttatgaggttcctaat

SEQ ID NO: 299269 - DNA, 25 bp, Artificial
  probe
  misc_feature (1)..(25): SEQ ID NO: 1600; WAN024FY8; Start 942; Stop 966
gtttggtatttccttctattctgcg

SEQ ID NO: 299270 - DNA, 25 bp, Artificial
  probe
  misc_feature (1)..(25): SEQ ID NO: 1600; WAN024FY8; Start 621; Stop 645
atgggaaatggtttactatgctttg

SEQ ID NO: 299271 - DNA, 25 bp, Artificial
  probe
  misc_feature (1)..(25): SEQ ID NO: 1600; WAN024FY8; Start 619; Stop 643
caatgggaaatggtttactatgctt

SEQ ID NO: 299272 - DNA, 25 bp, Artificial
  probe
  misc_feature (1)..(25): SEQ ID NO: 1600; WAN024FY8; Start 943; Stop 967
tttggtatttccttctattctgcgt

SEQ ID NO: 299273 - DNA, 25 bp, Artificial
  probe
  misc_feature (1)..(25): SEQ ID NO: 1600; WAN024FY8; Start 504; Stop 528
gggattgttaggtttctttattgct

SEQ ID NO: 299274 - DNA, 25 bp, Artificial
  probe
  misc_feature (1)..(25): SEQ ID NO: 1600; WAN024FY8; Start 941; Stop 965
tgtttggtatttccttctattctgc

SEQ ID NO: 299275 - DNA, 25 bp, Artificial
  probe
  misc_feature (1)..(25): SEQ ID NO: 1600; WAN024FY8; Start 883; Stop 907
cttctattgattatagcgagtggta

SEQ ID NO: 299276 - DNA, 25 bp, Artificial
  probe
  misc_feature (1)..(25): SEQ ID NO: 1600; WAN024FY8; Start 618; Stop 642
acaatgggaaatggtttactatgct

SEQ ID NO: 299277 - DNA, 25 bp, Artificial
  probe
  misc_feature (1)..(25): SEQ ID NO: 1600; WAN024FY8; Start 617; Stop 641
tacaatgggaaatggtttactatgc

SEQ ID NO: 299278 - DNA, 25 bp, Artificial
  probe
  misc_feature (1)..(25): SEQ ID NO: 1600; WAN024FY8; Start 189; Stop 213
tgaagccgttatgaggttcctaatg

SEQ ID NO: 299279 - DNA, 25 bp, Artificial
  probe
  misc_feature (1)..(25): SEQ ID NO: 1600; WAN024FY8; Start 620; Stop 644
aatgggaaatggtttactatgcttt

SEQ ID NO: 299280 - DNA, 25 bp, Artificial
  probe
  misc_feature (1)..(25): SEQ ID NO: 1600; WAN024FY8; Start 898; Stop 922
gcgagtggtatcatattatttgtca

SEQ ID NO: 299281 - DNA, 25 bp, Artificial
  probe
  misc_feature (1)..(25): SEQ ID NO: 1600; WAN024FY8; Start 885; Stop 909
tctattgattatagcgagtggtatc

SEQ ID NO: 299282 - DNA, 25 bp, Artificial
  probe
  misc_feature (1)..(25): SEQ ID NO: 1600; WAN024FY8; Start 714; Stop 738
agtaggtatacaagctagtgcaatt

SEQ ID NO: 299283 - DNA, 25 bp, Artificial
  probe
  misc_feature (1)..(25): SEQ ID NO: 1600; WAN024FY8; Start 944; Stop 968
ttggtatttccttctattctgcgtg

SEQ ID NO: 299284 - DNA, 25 bp, Artificial
  probe
  misc_feature (1)..(25): SEQ ID NO: 1600; WAN024FY8; Start 897; Stop 921
agcgagtggtatcatattatttgtc

SEQ ID NO: 299285 - DNA, 25 bp, Artificial
  probe
  misc_feature (1)..(25): SEQ ID NO: 1600; WAN024FY8; Start 1267; Stop 1291
gcctgtctgctaatttatatggatt

SEQ ID NO: 299286 - DNA, 25 bp, Artificial
  probe
  misc_feature (1)..(25): SEQ ID NO: 1600; WAN024FY8; Start 202; Stop 226
aggttcctaatgaaagatggtgttt

SEQ ID NO: 299287 - DNA, 25 bp, Artificial
  probe
  misc_feature (1)..(25): SEQ ID NO: 1600; WAN024FY8; Start 194; Stop 218
ccgttatgaggttcctaatgaaaga

SEQ ID NO: 299288 - DNA, 25 bp, Artificial
  probe
  misc_feature (1)..(25): SEQ ID NO: 1600; WAN024FY8; Start 199; Stop 223
atgaggttcctaatgaaagatggtg

SEQ ID NO: 299289 - DNA, 25 bp, Artificial
  probe
  misc_feature (1)..(25): SEQ ID NO: 1600; WAN024FY8; Start 713; Stop 737
tagtaggtatacaagctagtgcaat

SEQ ID NO: 299290 - DNA, 25 bp, Artificial
  probe
  misc_feature (1)..(25): SEQ ID NO: 1600; WAN024FY8; Start 712; Stop 736
atagtaggtatacaagctagtgcaa

SEQ ID NO: 299291 - DNA, 25 bp, Artificial
  probe
  misc_feature (1)..(25): SEQ ID NO: 1600; WAN024FY8; Start 711; Stop 735
aatagtaggtatacaagctagtgca

SEQ ID NO: 299292 - DNA, 25 bp, Artificial
  probe
  misc_feature (1)..(25): SEQ ID NO: 1601; WAN024FU3; Start 244; Stop 268
aataccattgtccaactcatcttca

SEQ ID NO: 299293 - DNA, 25 bp, Artificial
  probe
  misc_feature (1)..(25): SEQ ID NO: 1601; WAN024FU3; Start 243; Stop 267
gaataccattgtccaactcatcttc

SEQ ID NO: 299294 - DNA, 25 bp, Artificial
  probe
  misc_feature (1)..(25): SEQ ID NO: 1601; WAN024FU3; Start 293; Stop 317
caagaatgttcaatcaaggtctctg

SEQ ID NO: 299295 - DNA, 25 bp, Artificial
  probe
  misc_feature (1)..(25): SEQ ID NO: 1601; WAN024FU3; Start 242; Stop 266
cgaataccattgtccaactcatctt

SEQ ID NO: 299296 - DNA, 25 bp, Artificial
  probe
  misc_feature (1)..(25): SEQ ID NO: 1601; WAN024FU3; Start 245; Stop 269
ataccattgtccaactcatcttcaa

SEQ ID NO: 299297 - DNA, 25 bp, Artificial
  probe
  misc_feature (1)..(25): SEQ ID NO: 1601; WAN024FU3; Start 447; Stop 471
caagaacaagtggatcaatcagaac

SEQ ID NO: 299298 - DNA, 25 bp, Artificial
  probe
  misc_feature (1)..(25): SEQ ID NO: 1601; WAN024FU3; Start 446; Stop 470
tcaagaacaagtggatcaatcagaa

SEQ ID NO: 299299 - DNA, 25 bp, Artificial
  probe
  misc_feature (1)..(25): SEQ ID NO: 1601; WAN024FU3; Start 445; Stop 469
ttcaagaacaagtggatcaatcaga

SEQ ID NO: 299300 - DNA, 25 bp, Artificial
  probe
  misc_feature (1)..(25): SEQ ID NO: 1601; WAN024FU3; Start 246; Stop 270
taccattgtccaactcatcttcaac

SEQ ID NO: 299301 - DNA, 25 bp, Artificial
  probe
  misc_feature (1)..(25): SEQ ID NO: 1601; WAN024FU3; Start 294; Stop 318
aagaatgttcaatcaaggtctctgc

SEQ ID NO: 299302 - DNA, 25 bp, Artificial
  probe
  misc_feature (1)..(25): SEQ ID NO: 1601; WAN024FU3; Start 292; Stop 316
acaagaatgttcaatcaaggtctct

SEQ ID NO: 299303 - DNA, 25 bp, Artificial
  probe
  misc_feature (1)..(25): SEQ ID NO: 1601; WAN024FU3; Start 283; Stop 307
cttcacctgacaagaatgttcaatc

SEQ ID NO: 299304 - DNA, 25 bp, Artificial
  probe
  misc_feature (1)..(25): SEQ ID NO: 1601; WAN024FU3; Start 286; Stop 310
cacctgacaagaatgttcaatcaag

SEQ ID NO: 299305 - DNA, 25 bp, Artificial
  probe
  misc_feature (1)..(25): SEQ ID NO: 1601; WAN024FU3; Start 448; Stop 472
aagaacaagtggatcaatcagaacc

SEQ ID NO: 299306 - DNA, 25 bp, Artificial
  probe
  misc_feature (1)..(25): SEQ ID NO: 1601; WAN024FU3; Start 285; Stop 309
tcacctgacaagaatgttcaatcaa

SEQ ID NO: 299307 - DNA, 25 bp, Artificial
  probe
  misc_feature (1)..(25): SEQ ID NO: 1601; WAN024FU3; Start 284; Stop 308
ttcacctgacaagaatgttcaatca

SEQ ID NO: 299308 - DNA, 25 bp, Artificial
  probe
  misc_feature (1)..(25): SEQ ID NO: 1601; WAN024FU3; Start 291; Stop 315
gacaagaatgttcaatcaaggtctc

SEQ ID NO: 299309 - DNA, 25 bp, Artificial
  probe
  misc_feature (1)..(25): SEQ ID NO: 1601; WAN024FU3; Start 289; Stop 313
ctgacaagaatgttcaatcaaggtc

SEQ ID NO: 299310 - DNA, 25 bp, Artificial
  probe
  misc_feature (1)..(25): SEQ ID NO: 1601; WAN024FU3; Start 241; Stop 265
acgaataccattgtccaactcatct

SEQ ID NO: 299311 - DNA, 25 bp, Artificial
  probe
  misc_feature (1)..(25): SEQ ID NO: 1601; WAN024FU3; Start 290; Stop 314
tgacaagaatgttcaatcaaggtct

SEQ ID NO: 299312 - DNA, 25 bp, Artificial
  probe
  misc_feature (1)..(25): SEQ ID NO: 1601; WAN024FU3; Start 256; Stop 280
caactcatcttcaaccaccatcttg

SEQ ID NO: 299313 - DNA, 25 bp, Artificial
  probe
  misc_feature (1)..(25): SEQ ID NO: 1601; WAN024FU3; Start 534; Stop 558
ttccaccgatagaagaatcaacctg

SEQ ID NO: 299314 - DNA, 25 bp, Artificial
  probe
  misc_feature (1)..(25): SEQ ID NO: 1601; WAN024FU3; Start 288; Stop 312
cctgacaagaatgttcaatcaaggt

SEQ ID NO: 299315 - DNA, 25 bp, Artificial
  probe
  misc_feature (1)..(25): SEQ ID NO: 1601; WAN024FU3; Start 287; Stop 311
acctgacaagaatgttcaatcaagg

SEQ ID NO: 299316 - DNA, 25 bp, Artificial
  probe
  misc_feature (1)..(25): SEQ ID NO: 1601; WAN024FU3; Start 249; Stop 273
cattgtccaactcatcttcaaccac

SEQ ID NO: 299317 - DNA, 25 bp, Artificial
  probe
  misc_feature (1)..(25): SEQ ID NO: 1601; WAN024FU3; Start 240; Stop 264
gacgaataccattgtccaactcatc

SEQ ID NO: 299318 - DNA, 25 bp, Artificial
  probe
  misc_feature (1)..(25): SEQ ID NO: 1601; WAN024FU3; Start 282; Stop 306
gcttcacctgacaagaatgttcaat

SEQ ID NO: 299319 - DNA, 25 bp, Artificial
  probe
  misc_feature (1)..(25): SEQ ID NO: 1601; WAN024FU3; Start 572; Stop 596
gtcggaatctgaacaaagtgaatac

SEQ ID NO: 299320 - DNA, 25 bp, Artificial
  probe
  misc_feature (1)..(25): SEQ ID NO: 1601; WAN024FU3; Start 571; Stop 595
agtcggaatctgaacaaagtgaata

SEQ ID NO: 299321 - DNA, 25 bp, Artificial
  probe
  misc_feature (1)..(25): SEQ ID NO: 1601; WAN024FU3; Start 570; Stop 594
tagtcggaatctgaacaaagtgaat

SEQ ID NO: 299322 - DNA, 25 bp, Artificial
  probe
  misc_feature (1)..(25): SEQ ID NO: 1601; WAN024FU3; Start 239; Stop 263
agacgaataccattgtccaactcat

SEQ ID NO: 299323 - DNA, 25 bp, Artificial
  probe
  misc_feature (1)..(25): SEQ ID NO: 1601; WAN024FU3; Start 255; Stop 279
ccaactcatcttcaaccaccatctt

SEQ ID NO: 299324 - DNA, 25 bp, Artificial
  probe
  misc_feature (1)..(25): SEQ ID NO: 1601; WAN024FU3; Start 541; Stop 565
gatagaagaatcaacctgagctgtc

SEQ ID NO: 299325 - DNA, 25 bp, Artificial
  probe
  misc_feature (1)..(25): SEQ ID NO: 1602; WAN024DB7; Start 1168; Stop 1192
attcaggcacggattattcatcata

SEQ ID NO: 299326 - DNA, 25 bp, Artificial
  probe
  misc_feature (1)..(25): SEQ ID NO: 1602; WAN024DB7; Start 1086; Stop 1110
tgttaatagtggtcgcaatctcatt

SEQ ID NO: 299327 - DNA, 25 bp, Artificial
  probe
  misc_feature (1)..(25): SEQ ID NO: 1602; WAN024DB7; Start 1180; Stop 1204
attattcatcatacgagacggtcag

SEQ ID NO: 299328 - DNA, 25 bp, Artificial
  probe
  misc_feature (1)..(25): SEQ ID NO: 1602; WAN024DB7; Start 1090; Stop 1114
aatagtggtcgcaatctcattatcg

SEQ ID NO: 299329 - DNA, 25 bp, Artificial
  probe
  misc_feature (1)..(25): SEQ ID NO: 1602; WAN024DB7; Start 1179; Stop 1203
gattattcatcatacgagacggtca

SEQ ID NO: 299330 - DNA, 25 bp, Artificial
  probe
  misc_feature (1)..(25): SEQ ID NO: 1602; WAN024DB7; Start 1169; Stop 1193
ttcaggcacggattattcatcatac

SEQ ID NO: 299331 - DNA, 25 bp, Artificial
  probe
  misc_feature (1)..(25): SEQ ID NO: 1602; WAN024DB7; Start 749; Stop 773
ttgataaggttatgtctcgtagtct

SEQ ID NO: 299332 - DNA, 25 bp, Artificial
  probe
  misc_feature (1)..(25): SEQ ID NO: 1602; WAN024DB7; Start 1082; Stop 1106
tagttgttaatagtggtcgcaatct

SEQ ID NO: 299333 - DNA, 25 bp, Artificial
  probe
  misc_feature (1)..(25): SEQ ID NO: 1602; WAN024DB7; Start 1085; Stop 1109
ttgttaatagtggtcgcaatctcat

SEQ ID NO: 299334 - DNA, 25 bp, Artificial
  probe
  misc_feature (1)..(25): SEQ ID NO: 1602; WAN024DB7; Start 1081; Stop 1105
ttagttgttaatagtggtcgcaatc

SEQ ID NO: 299335 - DNA, 25 bp, Artificial
  probe
  misc_feature (1)..(25): SEQ ID NO: 1602; WAN024DB7; Start 1178; Stop 1202
ggattattcatcatacgagacggtc

SEQ ID NO: 299336 - DNA, 25 bp, Artificial
  probe
  misc_feature (1)..(25): SEQ ID NO: 1602; WAN024DB7; Start 1087; Stop 1111
gttaatagtggtcgcaatctcatta

SEQ ID NO: 299337 - DNA, 25 bp, Artificial
  probe
  misc_feature (1)..(25): SEQ ID NO: 1602; WAN024DB7; Start 1175; Stop 1199
cacggattattcatcatacgagacg

SEQ ID NO: 299338 - DNA, 25 bp, Artificial
  probe
  misc_feature (1)..(25): SEQ ID NO: 1602; WAN024DB7; Start 1167; Stop 1191
cattcaggcacggattattcatcat

SEQ ID NO: 299339 - DNA, 25 bp, Artificial
  probe
  misc_feature (1)..(25): SEQ ID NO: 1602; WAN024DB7; Start 1137; Stop 1161
gcaggctgttcagatagatgatata

SEQ ID NO: 299340 - DNA, 25 bp, Artificial
  probe
  misc_feature (1)..(25): SEQ ID NO: 1602; WAN024DB7; Start 467; Stop 491
ggattcctgttctaagaagtaagca

SEQ ID NO: 299341 - DNA, 25 bp, Artificial
  probe
  misc_feature (1)..(25): SEQ ID NO: 1602; WAN024DB7; Start 1083; Stop 1107
agttgttaatagtggtcgcaatctc

SEQ ID NO: 299342 - DNA, 25 bp, Artificial
  probe
  misc_feature (1)..(25): SEQ ID NO: 1602; WAN024DB7; Start 1174; Stop 1198
gcacggattattcatcatacgagac

SEQ ID NO: 299343 - DNA, 25 bp, Artificial
  probe
  misc_feature (1)..(25): SEQ ID NO: 1602; WAN024DB7; Start 1089; Stop 1113
taatagtggtcgcaatctcattatc

SEQ ID NO: 299344 - DNA, 25 bp, Artificial
  probe
  misc_feature (1)..(25): SEQ ID NO: 1602; WAN024DB7; Start 1084; Stop 1108
gttgttaatagtggtcgcaatctca

SEQ ID NO: 299345 - DNA, 25 bp, Artificial
  probe
  misc_feature (1)..(25): SEQ ID NO: 1602; WAN024DB7; Start 750; Stop 774
tgataaggttatgtctcgtagtcta

SEQ ID NO: 299346 - DNA, 25 bp, Artificial
  probe
  misc_feature (1)..(25): SEQ ID NO: 1602; WAN024DB7; Start 470; Stop 494
ttcctgttctaagaagtaagcatga

SEQ ID NO: 299347 - DNA, 25 bp, Artificial
  probe
  misc_feature (1)..(25): SEQ ID NO: 1602; WAN024DB7; Start 748; Stop 772
attgataaggttatgtctcgtagtc

SEQ ID NO: 299348 - DNA, 25 bp, Artificial
  probe
  misc_feature (1)..(25): SEQ ID NO: 1602; WAN024DB7; Start 471; Stop 495
tcctgttctaagaagtaagcatgat

SEQ ID NO: 299349 - DNA, 25 bp, Artificial
  probe
  misc_feature (1)..(25): SEQ ID NO: 1602; WAN024DB7; Start 1088; Stop 1112
ttaatagtggtcgcaatctcattat

SEQ ID NO: 299350 - DNA, 25 bp, Artificial
  probe
  misc_feature (1)..(25): SEQ ID NO: 1602; WAN024DB7; Start 468; Stop 492
gattcctgttctaagaagtaagcat

SEQ ID NO: 299351 - DNA, 25 bp, Artificial
  probe
  misc_feature (1)..(25): SEQ ID NO: 1602; WAN024DB7; Start 634; Stop 658
ttggacttggttcgtaagaatcgta

SEQ ID NO: 299352 - DNA, 25 bp, Artificial
  probe
  misc_feature (1)..(25): SEQ ID NO: 1602; WAN024DB7; Start 83; Stop 107
atctaggagttagtgatggaacagc

SEQ ID NO: 299353 - DNA, 25 bp, Artificial
  probe
  misc_feature (1)..(25): SEQ ID NO: 1602; WAN024DB7; Start 469; Stop 493
attcctgttctaagaagtaagcatg

SEQ ID NO: 299354 - DNA, 25 bp, Artificial
  probe
  misc_feature (1)..(25): SEQ ID NO: 1602; WAN024DB7; Start 1177; Stop 1201
cggattattcatcatacgagacggt

SEQ ID NO: 299355 - DNA, 25 bp, Artificial
  probe
  misc_feature (1)..(25): SEQ ID NO: 1602; WAN024DB7; Start 1176; Stop 1200
acggattattcatcatacgagacgg

SEQ ID NO: 299356 - DNA, 25 bp, Artificial
  probe
  misc_feature (1)..(25): SEQ ID NO: 1602; WAN024DB7; Start 635; Stop 659
tggacttggttcgtaagaatcgtag

SEQ ID NO: 299357 - DNA, 25 bp, Artificial
  probe
  misc_feature (1)..(25): SEQ ID NO: 1602; WAN024DB7; Start 747; Stop 771
aattgataaggttatgtctcgtagt

SEQ ID NO: 299358 - DNA, 25 bp, Artificial
  probe
  misc_feature (1)..(25): SEQ ID NO: 1603; WAN024DVO; Start 606; Stop 630
ggaattactacctcatatcaagcca

SEQ ID NO: 299359 - DNA, 25 bp, Artificial
  probe
  misc_feature (1)..(25): SEQ ID NO: 1603; WAN024DVO; Start 1063; Stop 1087
gattatgtagtgtctctaattgcgg

SEQ ID NO: 299360 - DNA, 25 bp, Artificial
  probe
  misc_feature (1)..(25): SEQ ID NO: 1603; WAN024DVO; Start 607; Stop 631
gaattactacctcatatcaagccaa

SEQ ID NO: 299361 - DNA, 25 bp, Artificial
  probe
  misc_feature (1)..(25): SEQ ID NO: 1603; WAN024DVO; Start 1062; Stop 1086
agattatgtagtgtctctaattgcg

SEQ ID NO: 299362 - DNA, 25 bp, Artificial
  probe
  misc_feature (1)..(25): SEQ ID NO: 1603; WAN024DVO; Start 605; Stop 629
aggaattactacctcatatcaagcc

SEQ ID NO: 299363 - DNA, 25 bp, Artificial
  probe
  misc_feature (1)..(25): SEQ ID NO: 1603; WAN024DVO; Start 609; Stop 633
attactacctcatatcaagccaatt

SEQ ID NO: 299364 - DNA, 25 bp, Artificial
  probe
  misc_feature (1)..(25): SEQ ID NO: 1603; WAN024DVO; Start 608; Stop 632
aattactacctcatatcaagccaat

SEQ ID NO: 299365 - DNA, 25 bp, Artificial
  probe
  misc_feature (1)..(25): SEQ ID NO: 1603; WAN024DVO; Start 1198; Stop 1222
tggtcagtaagaagagacttagatt

SEQ ID NO: 299366 - DNA, 25 bp, Artificial
  probe
  misc_feature (1)..(25): SEQ ID NO: 1603; WAN024DVO; Start 1197; Stop 1221
ttggtcagtaagaagagacttagat

SEQ ID NO: 299367 - DNA, 25 bp, Artificial
  probe
  misc_feature (1)..(25): SEQ ID NO: 1603; WAN024DVO; Start 814; Stop 838
ttattagcggaaggacagaaagaaa

SEQ ID NO: 299368 - DNA, 25 bp, Artificial
  probe
  misc_feature (1)..(25): SEQ ID NO: 1603; WAN024DVO; Start 812; Stop 836
atttattagcggaaggacagaaaga

SEQ ID NO: 299369 - DNA, 25 bp, Artificial
  probe
  misc_feature (1)..(25): SEQ ID NO: 1603; WAN024DVO; Start 813; Stop 837
tttattagcggaaggacagaaagaa

SEQ ID NO: 299370 - DNA, 25 bp, Artificial
  probe
  misc_feature (1)..(25): SEQ ID NO: 1603; WAN024DVO; Start 898; Stop 922
atgtttgggctaatatcggtatctg

SEQ ID NO: 299371 - DNA, 25 bp, Artificial
  probe
  misc_feature (1)..(25): SEQ ID NO: 1603; WAN024DVO; Start 700; Stop 724
ttaatggttgatgtaaagcaggttg

SEQ ID NO: 299372 - DNA, 25 bp, Artificial
  probe
  misc_feature (1)..(25): SEQ ID NO: 1603; WAN024DVO; Start 895; Stop 919
ttgatgtttgggctaatatcggtat

SEQ ID NO: 299373 - DNA, 25 bp, Artificial
  probe
  misc_feature (1)..(25): SEQ ID NO: 1603; WAN024DVO; Start 894; Stop 918
attgatgtttgggctaatatcggta

SEQ ID NO: 299374 - DNA, 25 bp, Artificial
  probe
  misc_feature (1)..(25): SEQ ID NO: 1603; WAN024DVO; Start 799; Stop 823
ccaagaacttcctatttattagcgg

SEQ ID NO: 299375 - DNA, 25 bp, Artificial
  probe
  misc_feature (1)..(25): SEQ ID NO: 1603; WAN024DVO; Start 604; Stop 628
aaggaattactacctcatatcaagc

SEQ ID NO: 299376 - DNA, 25 bp, Artificial
  probe
  misc_feature (1)..(25): SEQ ID NO: 1603; WAN024DVO; Start 208; Stop 232
actgttaaacgagaaggaaaggata

SEQ ID NO: 299377 - DNA, 25 bp, Artificial
  probe
  misc_feature (1)..(25): SEQ ID NO: 1603; WAN024DVO; Start 900; Stop 924
gtttgggctaatatcggtatctgat

SEQ ID NO: 299378 - DNA, 25 bp, Artificial
  probe
  misc_feature (1)..(25): SEQ ID NO: 1603; WAN024DVO; Start 897; Stop 921
gatgtttgggctaatatcggtatct

SEQ ID NO: 299379 - DNA, 25 bp, Artificial
  probe
  misc_feature (1)..(25): SEQ ID NO: 1603; WAN024DVO; Start 896; Stop 920
tgatgtttgggctaatatcggtatc

SEQ ID NO: 299380 - DNA, 25 bp, Artificial
  probe
  misc_feature (1)..(25): SEQ ID NO: 1603; WAN024DVO; Start 691; Stop 715
atgcttggtttaatggttgatgtaa

SEQ ID NO: 299381 - DNA, 25 bp, Artificial
  probe
  misc_feature (1)..(25): SEQ ID NO: 1603; WAN024DVO; Start 689; Stop 713
atatgcttggtttaatggttgatgt

SEQ ID NO: 299382 - DNA, 25 bp, Artificial
  probe
  misc_feature (1)..(25): SEQ ID NO: 1603; WAN024DVO; Start 207; Stop 231
gactgttaaacgagaaggaaaggat

SEQ ID NO: 299383 - DNA, 25 bp, Artificial
  probe
  misc_feature (1)..(25): SEQ ID NO: 1603; WAN024DVO; Start 893; Stop 917
tattgatgtttgggctaatatcggt

SEQ ID NO: 299384 - DNA, 25 bp, Artificial
  probe
  misc_feature (1)..(25): SEQ ID NO: 1603; WAN024DVO; Start 892; Stop 916
gtattgatgtttgggctaatatcgg

SEQ ID NO: 299385 - DNA, 25 bp, Artificial
  probe
  misc_feature (1)..(25): SEQ ID NO: 1603; WAN024DVO; Start 64; Stop 88
gctcccttgataacttctccttatt

SEQ ID NO: 299386 - DNA, 25 bp, Artificial
  probe
  misc_feature (1)..(25): SEQ ID NO: 1603; WAN024DVO; Start 969; Stop 993
tagattgatttctgctatgtctccg

SEQ ID NO: 299387 - DNA, 25 bp, Artificial
  probe
  misc_feature (1)..(25): SEQ ID NO: 1603; WAN024DVO; Start 886; Stop 910
tctagtgtattgatgtttgggctaa

SEQ ID NO: 299388 - DNA, 25 bp, Artificial
  probe
  misc_feature (1)..(25): SEQ ID NO: 1603; WAN024DVO; Start 885; Stop 909
ttctagtgtattgatgtttgggcta

SEQ ID NO: 299389 - DNA, 25 bp, Artificial
  probe
  misc_feature (1)..(25): SEQ ID NO: 1603; WAN024DVO; Start 966; Stop 990
aggtagattgatttctgctatgtct

SEQ ID NO: 299390 - DNA, 25 bp, Artificial
  probe
  misc_feature (1)..(25): SEQ ID NO: 1603; WAN024DVO; Start 891; Stop 915
tgtattgatgtttgggctaatatcg

SEQ ID NO: 299391 - DNA, 25 bp, Artificial
  probe
  misc_feature (1)..(25): SEQ ID NO: 1604; WAN024GGO; Start 867; Stop 891
tgagttgattattcttgagacaggt

SEQ ID NO: 299392 - DNA, 25 bp, Artificial
  probe
  misc_feature (1)..(25): SEQ ID NO: 1604; WAN024GGO; Start 904; Stop 928
cctatcaatggacttcgtaagatgt

SEQ ID NO: 299393 - DNA, 25 bp, Artificial
  probe
  misc_feature (1)..(25): SEQ ID NO: 1604; WAN024GGO; Start 874; Stop 898
attattcttgagacaggtcgtatgg

SEQ ID NO: 299394 - DNA, 25 bp, Artificial
  probe
  misc_feature (1)..(25): SEQ ID NO: 1604; WAN024GGO; Start 871; Stop 895
ttgattattcttgagacaggtcgta

SEQ ID NO: 299395 - DNA, 25 bp, Artificial
  probe
  misc_feature (1)..(25): SEQ ID NO: 1604; WAN024GGO; Start 869; Stop 893
agttgattattcttgagacaggtcg

SEQ ID NO: 299396 - DNA, 25 bp, Artificial
  probe
  misc_feature (1)..(25): SEQ ID NO: 1604; WAN024GGO; Start 872; Stop 896
tgattattcttgagacaggtcgtat

SEQ ID NO: 299397 - DNA, 25 bp, Artificial
  probe
  misc_feature (1)..(25): SEQ ID NO: 1604; WAN024GGO; Start 870; Stop 894
gttgattattcttgagacaggtcgt

SEQ ID NO: 299398 - DNA, 25 bp, Artificial
  probe
  misc_feature (1)..(25): SEQ ID NO: 1604; WAN024GGO; Start 868; Stop 892
gagttgattattcttgagacaggtc

SEQ ID NO: 299399 - DNA, 25 bp, Artificial
  probe
  misc_feature (1)..(25): SEQ ID NO: 1604; WAN024GGO; Start 351; Stop 375
cattgatgagaatacggagattgat

SEQ ID NO: 299400 - DNA, 25 bp, Artificial
  probe
  misc_feature (1)..(25): SEQ ID NO: 1604; WAN024GGO; Start 873; Stop 897
gattattcttgagacaggtcgtatg

SEQ ID NO: 299401 - DNA, 25 bp, Artificial
  probe
  misc_feature (1)..(25): SEQ ID NO: 1604; WAN024GGO; Start 866; Stop 890
atgagttgattattcttgagacagg

SEQ ID NO: 299402 - DNA, 25 bp, Artificial
  probe
  misc_feature (1)..(25): SEQ ID NO: 1604; WAN024GGO; Start 1365; Stop 1389
taaggtcttgtcagaggatggaatt

SEQ ID NO: 299403 - DNA, 25 bp, Artificial
  probe
  misc_feature (1)..(25): SEQ ID NO: 1604; WAN024GGO; Start 352; Stop 376
attgatgagaatacggagattgatt

SEQ ID NO: 299404 - DNA, 25 bp, Artificial
  probe
  misc_feature (1)..(25): SEQ ID NO: 1604; WAN024GGO; Start 348; Stop 372
tgtcattgatgagaatacggagatt

SEQ ID NO: 299405 - DNA, 25 bp, Artificial
  probe
  misc_feature (1)..(25): SEQ ID NO: 1604; WAN024GGO; Start 1364; Stop 1388
gtaaggtcttgtcagaggatggaat

SEQ ID NO: 299406 - DNA, 25 bp, Artificial
  probe
  misc_feature (1)..(25): SEQ ID NO: 1604; WAN024GGO; Start 347; Stop 371
atgtcattgatgagaatacggagat

SEQ ID NO: 299407 - DNA, 25 bp, Artificial
  probe
  misc_feature (1)..(25): SEQ ID NO: 1604; WAN024GGO; Start 350; Stop 374
tcattgatgagaatacggagattga

SEQ ID NO: 299408 - DNA, 25 bp, Artificial
  probe
  misc_feature (1)..(25): SEQ ID NO: 1604; WAN024GGO; Start 349; Stop 373
gtcattgatgagaatacggagattg

SEQ ID NO: 299409 - DNA, 25 bp, Artificial
  probe
  misc_feature (1)..(25): SEQ ID NO: 1604; WAN024GGO; Start 906; Stop 930
tatcaatggacttcgtaagatgtcg

SEQ ID NO: 299410 - DNA, 25 bp, Artificial
  probe
  misc_feature (1)..(25): SEQ ID NO: 1604; WAN024GGO; Start 864; Stop 888
ccatgagttgattattcttgagaca

SEQ ID NO: 299411 - DNA, 25 bp, Artificial
  probe
  misc_feature (1)..(25): SEQ ID NO: 1604; WAN024GGO; Start 863; Stop 887
accatgagttgattattcttgagac

SEQ ID NO: 299412 - DNA, 25 bp, Artificial
  probe
  misc_feature (1)..(25): SEQ ID NO: 1604; WAN024GGO; Start 905; Stop 929
ctatcaatggacttcgtaagatgtc

SEQ ID NO: 299413 - DNA, 25 bp, Artificial
  probe
  misc_feature (1)..(25): SEQ ID NO: 1604; WAN024GGO; Start 862; Stop 886
gaccatgagttgattattcttgaga

SEQ ID NO: 299414 - DNA, 25 bp, Artificial
  probe
  misc_feature (1)..(25): SEQ ID NO: 1604; WAN024GGO; Start 346; Stop 370
catgtcattgatgagaatacggaga

SEQ ID NO: 299415 - DNA, 25 bp, Artificial
  probe
  misc_feature (1)..(25): SEQ ID NO: 1604; WAN024GGO; Start 343; Stop 367
ttccatgtcattgatgagaatacgg

SEQ ID NO: 299416 - DNA, 25 bp, Artificial
  probe
  misc_feature (1)..(25): SEQ ID NO: 1604; WAN024GGO; Start 861; Stop 885
agaccatgagttgattattcttgag

SEQ ID NO: 299417 - DNA, 25 bp, Artificial
  probe
  misc_feature (1)..(25): SEQ ID NO: 1604; WAN024GGO; Start 345; Stop 369
ccatgtcattgatgagaatacggag

SEQ ID NO: 299418 - DNA, 25 bp, Artificial
  probe
  misc_feature (1)..(25): SEQ ID NO: 1604; WAN024GGO; Start 857; Stop 881
ttgaagaccatgagttgattattct

SEQ ID NO: 299419 - DNA, 25 bp, Artificial
  probe
  misc_feature (1)..(25): SEQ ID NO: 1604; WAN024GGO; Start 610; Stop 634
agtgaaagtgaagttagggatgaaa

SEQ ID NO: 299420 - DNA, 25 bp, Artificial
  probe
  misc_feature (1)..(25): SEQ ID NO: 1604; WAN024GGO; Start 255; Stop 279
taaagttcctgtatttgggtctgag

SEQ ID NO: 299421 - DNA, 25 bp, Artificial
  probe
  misc_feature (1)..(25): SEQ ID NO: 1604; WAN024GGO; Start 254; Stop 278
ctaaagttcctgtatttgggtctga

SEQ ID NO: 299422 - DNA, 25 bp, Artificial
  probe
  misc_feature (1)..(25): SEQ ID NO: 1604; WAN024GGO; Start 687; Stop 711
cagtaatctttctcgtattcagcag

SEQ ID NO: 299423 - DNA, 25 bp, Artificial
  probe
  misc_feature (1)..(25): SEQ ID NO: 1604; WAN024GGO; Start 685; Stop 709
tccagtaatctttctcgtattcagc

SEQ ID NO: 299424 - DNA, 25 bp, Artificial
  probe
  misc_feature (1)..(25): SEQ ID NO: 1605; WAN024CZU; Start 437; Stop 461
atatgagtaccgatgttattccagg

SEQ ID NO: 299425 - DNA, 25 bp, Artificial
  probe
  misc_feature (1)..(25): SEQ ID NO: 1605; WAN024CZU; Start 446; Stop 470
ccgatgttattccaggtattactga

SEQ ID NO: 299426 - DNA, 25 bp, Artificial
  probe
  misc_feature (1)..(25): SEQ ID NO: 1605; WAN024CZU; Start 447; Stop 471
cgatgttattccaggtattactgaa

SEQ ID NO: 299427 - DNA, 25 bp, Artificial
  probe
  misc_feature (1)..(25): SEQ ID NO: 1605; WAN024CZU; Start 270; Stop 294
atctgaagatgctcattctacaatt

SEQ ID NO: 299428 - DNA, 25 bp, Artificial
  probe
  misc_feature (1)..(25): SEQ ID NO: 1605; WAN024CZU; Start 445; Stop 469
accgatgttattccaggtattactg

SEQ ID NO: 299429 - DNA, 25 bp, Artificial
  probe
  misc_feature (1)..(25): SEQ ID NO: 1605; WAN024CZU; Start 499; Stop 523
tacattgaaggaaagttaggattgc

SEQ ID NO: 299430 - DNA, 25 bp, Artificial
  probe
  misc_feature (1)..(25): SEQ ID NO: 1605; WAN024CZU; Start 436; Stop 460
tatatgagtaccgatgttattccag

SEQ ID NO: 299431 - DNA, 25 bp, Artificial
  probe
  misc_feature (1)..(25): SEQ ID NO: 1605; WAN024CZU; Start 438; Stop 462
tatgagtaccgatgttattccaggt

SEQ ID NO: 299432 - DNA, 25 bp, Artificial
  probe
  misc_feature (1)..(25): SEQ ID NO: 1605; WAN024CZU; Start 147; Stop 171
cttgttagtttctgagggcttaatt

SEQ ID NO: 299433 - DNA, 25 bp, Artificial
  probe
  misc_feature (1)..(25): SEQ ID NO: 1605; WAN024CZU; Start 269; Stop 293
tatctgaagatgctcattctacaat

SEQ ID NO: 299434 - DNA, 25 bp, Artificial
  probe
  misc_feature (1)..(25): SEQ ID NO: 1605; WAN024CZU; Start 268; Stop 292
atatctgaagatgctcattctacaa

SEQ ID NO: 299435 - DNA, 25 bp, Artificial
  probe
  misc_feature (1)..(25): SEQ ID NO: 1605; WAN024CZU; Start 267; Stop 291
aatatctgaagatgctcattctaca

SEQ ID NO: 299436 - DNA, 25 bp, Artificial
  probe
  misc_feature (1)..(25): SEQ ID NO: 1605; WAN024CZU; Start 618; Stop 642
agtagaacaagtggcttatttggat

SEQ ID NO: 299437 - DNA, 25 bp, Artificial
  probe
  misc_feature (1)..(25): SEQ ID NO: 1605; WAN024CZU; Start 616; Stop 640
gaagtagaacaagtggcttatttgg

SEQ ID NO: 299438 - DNA, 25 bp, Artificial
  probe
  misc_feature (1)..(25): SEQ ID NO: 1605; WAN024CZU; Start 617; Stop 641
aagtagaacaagtggcttatttgga

SEQ ID NO: 299439 - DNA, 25 bp, Artificial
  probe
  misc_feature (1)..(25): SEQ ID NO: 1605; WAN024CZU; Start 621; Stop 645
agaacaagtggcttatttggataac

SEQ ID NO: 299440 - DNA, 25 bp, Artificial
  probe
  misc_feature (1)..(25): SEQ ID NO: 1605; WAN024CZU; Start 615; Stop 639
tgaagtagaacaagtggcttatttg

SEQ ID NO: 299441 - DNA, 25 bp, Artificial
  probe
  misc_feature (1)..(25): SEQ ID NO: 1605; WAN024CZU; Start 610; Stop 634
gtatttgaagtagaacaagtggctt

SEQ ID NO: 299442 - DNA, 25 bp, Artificial
  probe
  misc_feature (1)..(25): SEQ ID NO: 1605; WAN024CZU; Start 148; Stop 172
ttgttagtttctgagggcttaattt

SEQ ID NO: 299443 - DNA, 25 bp, Artificial
  probe
  misc_feature (1)..(25): SEQ ID NO: 1605; WAN024CZU; Start 622; Stop 646
gaacaagtggcttatttggataacg

SEQ ID NO: 299444 - DNA, 25 bp, Artificial
  probe
  misc_feature (1)..(25): SEQ ID NO: 1605; WAN024CZU; Start 146; Stop 170
acttgttagtttctgagggcttaat

SEQ ID NO: 299445 - DNA, 25 bp, Artificial
  probe
  misc_feature (1)..(25): SEQ ID NO: 1605; WAN024CZU; Start 139; Stop 163
gctttagacttgttagtttctgagg

SEQ ID NO: 299446 - DNA, 25 bp, Artificial
  probe
  misc_feature (1)..(25): SEQ ID NO: 1605; WAN024CZU; Start 77; Stop 101
aattgcctgatgaaatgacattagc

SEQ ID NO: 299447 - DNA, 25 bp, Artificial
  probe
  misc_feature (1)..(25): SEQ ID NO: 1605; WAN024CZU; Start 609; Stop 633
ggtatttgaagtagaacaagtggct

SEQ ID NO: 299448 - DNA, 25 bp, Artificial
  probe
  misc_feature (1)..(25): SEQ ID NO: 1605; WAN024CZU; Start 145; Stop 169
gacttgttagtttctgagggcttaa

SEQ ID NO: 299449 - DNA, 25 bp, Artificial
  probe
  misc_feature (1)..(25): SEQ ID NO: 1605; WAN024CZU; Start 141; Stop 165
tttagacttgttagtttctgagggc

SEQ ID NO: 299450 - DNA, 25 bp, Artificial
  probe
  misc_feature (1)..(25): SEQ ID NO: 1605; WAN024CZU; Start 614; Stop 638
ttgaagtagaacaagtggcttattt

SEQ ID NO: 299451 - DNA, 25 bp, Artificial
  probe
  misc_feature (1)..(25): SEQ ID NO: 1605; WAN024CZU; Start 613; Stop 637
tttgaagtagaacaagtggcttatt

SEQ ID NO: 299452 - DNA, 25 bp, Artificial
  probe
  misc_feature (1)..(25): SEQ ID NO: 1605; WAN024CZU; Start 140; Stop 164
ctttagacttgttagtttctgaggg

SEQ ID NO: 299453 - DNA, 25 bp, Artificial
  probe
  misc_feature (1)..(25): SEQ ID NO: 1605; WAN024CZU; Start 619; Stop 643
gtagaacaagtggcttatttggata

SEQ ID NO: 299454 - DNA, 25 bp, Artificial
  probe
  misc_feature (1)..(25): SEQ ID NO: 1605; WAN024CZU; Start 435; Stop 459
ttatatgagtaccgatgttattcca

SEQ ID NO: 299455 - DNA, 25 bp, Artificial
  probe
  misc_feature (1)..(25): SEQ ID NO: 1605; WAN024CZU; Start 612; Stop 636
atttgaagtagaacaagtggcttat

SEQ ID NO: 299456 - DNA, 25 bp, Artificial
  probe
  misc_feature (1)..(25): SEQ ID NO: 1605; WAN024CZU; Start 403; Stop 427
attgacggtaaaccttatgttctgg

SEQ ID NO: 299457 - DNA, 25 bp, Artificial
  probe
  misc_feature (1)..(25): SEQ ID NO: 1606; WAN024B4J; Start 671; Stop 695
cagtgattgatgacgaagagatgta

SEQ ID NO: 299458 - DNA, 25 bp, Artificial
  probe
  misc_feature (1)..(25): SEQ ID NO: 1606; WAN024B4J; Start 1077; Stop 1101
cttgacagcctataagaatcttgga

SEQ ID NO: 299459 - DNA, 25 bp, Artificial
  probe
  misc_feature (1)..(25): SEQ ID NO: 1606; WAN024B4J; Start 672; Stop 696
agtgattgatgacgaagagatgtac

SEQ ID NO: 299460 - DNA, 25 bp, Artificial
  probe
  misc_feature (1)..(25): SEQ ID NO: 1606; WAN024B4J; Start 668; Stop 692
atccagtgattgatgacgaagagat

SEQ ID NO: 299461 - DNA, 25 bp, Artificial
  probe
  misc_feature (1)..(25): SEQ ID NO: 1606; WAN024B4J; Start 1078; Stop 1102
ttgacagcctataagaatcttggat

SEQ ID NO: 299462 - DNA, 25 bp, Artificial
  probe
  misc_feature (1)..(25): SEQ ID NO: 1606; WAN024B4J; Start 1103; Stop 1127
ttgatatgacgaactatcctaaggc

SEQ ID NO: 299463 - DNA, 25 bp, Artificial
  probe
  misc_feature (1)..(25): SEQ ID NO: 1606; WAN024B4J; Start 1177; Stop 1201
agcgatgaagaagtagactatatca

SEQ ID NO: 299464 - DNA, 25 bp, Artificial
  probe
  misc_feature (1)..(25): SEQ ID NO: 1606; WAN024B4J; Start 276; Stop 300
ctatacggcttcatgtagtgtcatt

SEQ ID NO: 299465 - DNA, 25 bp, Artificial
  probe
  misc_feature (1)..(25): SEQ ID NO: 1606; WAN024B4J; Start 277; Stop 301
tatacggcttcatgtagtgtcatta

SEQ ID NO: 299466 - DNA, 25 bp, Artificial
  probe
  misc_feature (1)..(25): SEQ ID NO: 1606; WAN024B4J; Start 278; Stop 302
atacggcttcatgtagtgtcattac

SEQ ID NO: 299467 - DNA, 25 bp, Artificial
  probe
  misc_feature (1)..(25): SEQ ID NO: 1606; WAN024B4J; Start 776; Stop 800
atatcgttacaccagcctataagtg

SEQ ID NO: 299468 - DNA, 25 bp, Artificial
  probe
  misc_feature (1)..(25): SEQ ID NO: 1606; WAN024B4J; Start 1176; Stop 1200
aagcgatgaagaagtagactatatc

SEQ ID NO: 299469 - DNA, 25 bp, Artificial
  probe
  misc_feature (1)..(25): SEQ ID NO: 1606; WAN024B4J; Start 669; Stop 693
tccagtgattgatgacgaagagatg

SEQ ID NO: 299470 - DNA, 25 bp, Artificial
  probe
  misc_feature (1)..(25): SEQ ID NO: 1606; WAN024B4J; Start 1172; Stop 1196
aattaagcgatgaagaagtagacta

SEQ ID NO: 299471 - DNA, 25 bp, Artificial
  probe
  misc_feature (1)..(25): SEQ ID NO: 1606; WAN024B4J; Start 670; Stop 694
ccagtgattgatgacgaagagatgt

SEQ ID NO: 299472 - DNA, 25 bp, Artificial
  probe
  misc_feature (1)..(25): SEQ ID NO: 1606; WAN024B4J; Start 1173; Stop 1197
attaagcgatgaagaagtagactat

SEQ ID NO: 299473 - DNA, 25 bp, Artificial
  probe
  misc_feature (1)..(25): SEQ ID NO: 1606; WAN024B4J; Start 1079; Stop 1103
tgacagcctataagaatcttggatt

SEQ ID NO: 299474 - DNA, 25 bp, Artificial
  probe
  misc_feature (1)..(25): SEQ ID NO: 1606; WAN024B4J; Start 791; Stop 815
cctataagtgcaacatgaccgatat

SEQ ID NO: 299475 - DNA, 25 bp, Artificial
  probe
  misc_feature (1)..(25): SEQ ID NO: 1606; WAN024B4J; Start 275; Stop 299
cctatacggcttcatgtagtgtcat

SEQ ID NO: 299476 - DNA, 25 bp, Artificial
  probe
  misc_feature (1)..(25): SEQ ID NO: 1606; WAN024B4J; Start 775; Stop 799
gatatcgttacaccagcctataagt

SEQ ID NO: 299477 - DNA, 25 bp, Artificial
  probe
  misc_feature (1)..(25): SEQ ID NO: 1606; WAN024B4J; Start 792; Stop 816
ctataagtgcaacatgaccgatatc

SEQ ID NO: 299478 - DNA, 25 bp, Artificial
  probe
  misc_feature (1)..(25): SEQ ID NO: 1606; WAN024B4J; Start 619; Stop 643
gttaagaactttacaacggcagaag

SEQ ID NO: 299479 - DNA, 25 bp, Artificial
  probe
  misc_feature (1)..(25): SEQ ID NO: 1606; WAN024B4J; Start 1157; Stop 1181
tccctcttcatactaaattaagcga

SEQ ID NO: 299480 - DNA, 25 bp, Artificial
  probe
  misc_feature (1)..(25): SEQ ID NO: 1606; WAN024B4J; Start 777; Stop 801
tatcgttacaccagcctataagtgc

SEQ ID NO: 299481 - DNA, 25 bp, Artificial
  probe
  misc_feature (1)..(25): SEQ ID NO: 1606; WAN024B4J; Start 1174; Stop 1198
ttaagcgatgaagaagtagactata

SEQ ID NO: 299482 - DNA, 25 bp, Artificial
  probe
  misc_feature (1)..(25): SEQ ID NO: 1606; WAN024B4J; Start 1156; Stop 1180
ctccctcttcatactaaattaagcg

SEQ ID NO: 299483 - DNA, 25 bp, Artificial
  probe
  misc_feature (1)..(25): SEQ ID NO: 1606; WAN024B4J; Start 1076; Stop 1100
tcttgacagcctataagaatcttgg

SEQ ID NO: 299484 - DNA, 25 bp, Artificial
  probe
  misc_feature (1)..(25): SEQ ID NO: 1606; WAN024B4J; Start 667; Stop 691
aatccagtgattgatgacgaagaga

SEQ ID NO: 299485 - DNA, 25 bp, Artificial
  probe
  misc_feature (1)..(25): SEQ ID NO: 1606; WAN024B4J; Start 1072; Stop 1096
cctctcttgacagcctataagaatc

SEQ ID NO: 299486 - DNA, 25 bp, Artificial
  probe
  misc_feature (1)..(25): SEQ ID NO: 1606; WAN024B4J; Start 1147; Stop 1171
gaaattaccctccctcttcatacta

SEQ ID NO: 299487 - DNA, 25 bp, Artificial
  probe
  misc_feature (1)..(25): SEQ ID NO: 1606; WAN024B4J; Start 1071; Stop 1095
tcctctcttgacagcctataagaat

SEQ ID NO: 299488 - DNA, 25 bp, Artificial
  probe
  misc_feature (1)..(25): SEQ ID NO: 1606; WAN024B4J; Start 793; Stop 817
tataagtgcaacatgaccgatatca

SEQ ID NO: 299489 - DNA, 25 bp, Artificial
  probe
  misc_feature (1)..(25): SEQ ID NO: 1606; WAN024B4J; Start 350; Stop 374
ttgagatggactatgacctgcttga

SEQ ID NO: 299490 - DNA, 25 bp, Artificial
  probe
  misc_feature (1)..(25): SEQ ID NO: 1607; WAN024CSS; Start 21; Stop 45
caatagagtagtcaccgatagtcac

SEQ ID NO: 299491 - DNA, 25 bp, Artificial
  probe
  misc_feature (1)..(25): SEQ ID NO: 1607; WAN024CSS; Start 20; Stop 44
tcaatagagtagtcaccgatagtca

SEQ ID NO: 299492 - DNA, 25 bp, Artificial
  probe
  misc_feature (1)..(25): SEQ ID NO: 1607; WAN024CSS; Start 18; Stop 42
gttcaatagagtagtcaccgatagt

SEQ ID NO: 299493 - DNA, 25 bp, Artificial
  probe
  misc_feature (1)..(25): SEQ ID NO: 1607; WAN024CSS; Start 19; Stop 43
ttcaatagagtagtcaccgatagtc

SEQ ID NO: 299494 - DNA, 25 bp, Artificial
  probe
  misc_feature (1)..(25): SEQ ID NO: 1607; WAN024CSS; Start 17; Stop 41
agttcaatagagtagtcaccgatag

SEQ ID NO: 299495 - DNA, 25 bp, Artificial
  probe
  misc_feature (1)..(25): SEQ ID NO: 1607; WAN024CSS; Start 16; Stop 40
aagttcaatagagtagtcaccgata

SEQ ID NO: 299496 - DNA, 25 bp, Artificial
  probe
  misc_feature (1)..(25): SEQ ID NO: 1607; WAN024CSS; Start 22; Stop 46
aatagagtagtcaccgatagtcacg

SEQ ID NO: 299497 - DNA, 25 bp, Artificial
  probe
  misc_feature (1)..(25): SEQ ID NO: 1607; WAN024CSS; Start 23; Stop 47
atagagtagtcaccgatagtcacga

SEQ ID NO: 299498 - DNA, 25 bp, Artificial
  probe
  misc_feature (1)..(25): SEQ ID NO: 1607; WAN024CSS; Start 233; Stop 257
aattcaacttcgttaagagatcctg

SEQ ID NO: 299499 - DNA, 25 bp, Artificial
  probe
  misc_feature (1)..(25): SEQ ID NO: 1607; WAN024CSS; Start 234; Stop 258
attcaacttcgttaagagatcctgc

SEQ ID NO: 299500 - DNA, 25 bp, Artificial
  probe
  misc_feature (1)..(25): SEQ ID NO: 1607; WAN024CSS; Start 91; Stop 115
tcccatttctttagcagtgtcaata

SEQ ID NO: 299501 - DNA, 25 bp, Artificial
  probe
  misc_feature (1)..(25): SEQ ID NO: 1607; WAN024CSS; Start 14; Stop 38
caaagttcaatagagtagtcaccga

SEQ ID NO: 299502 - DNA, 25 bp, Artificial
  probe
  misc_feature (1)..(25): SEQ ID NO: 1607; WAN024CSS; Start 99; Stop 123
ctttagcagtgtcaatatccgtttc

SEQ ID NO: 299503 - DNA, 25 bp, Artificial
  probe
  misc_feature (1)..(25): SEQ ID NO: 1607; WAN024CSS; Start 10; Stop 34
accacaaagttcaatagagtagtca

SEQ ID NO: 299504 - DNA, 25 bp, Artificial
  probe
  misc_feature (1)..(25): SEQ ID NO: 1607; WAN024CSS; Start 8; Stop 32
ccaccacaaagttcaatagagtagt

SEQ ID NO: 299505 - DNA, 25 bp, Artificial
  probe
  misc_feature (1)..(25): SEQ ID NO: 1607; WAN024CSS; Start 7; Stop 31
accaccacaaagttcaatagagtag

SEQ ID NO: 299506 - DNA, 25 bp, Artificial
  probe
  misc_feature (1)..(25): SEQ ID NO: 1607; WAN024CSS; Start 109; Stop 133
gtcaatatccgtttcaactgtcttc

SEQ ID NO: 299507 - DNA, 25 bp, Artificial
  probe
  misc_feature (1)..(25): SEQ ID NO: 1607; WAN024CSS; Start 15; Stop 39
aaagttcaatagagtagtcaccgat

SEQ ID NO: 299508 - DNA, 25 bp, Artificial
  probe
  misc_feature (1)..(25): SEQ ID NO: 1607; WAN024CSS; Start 98; Stop 122
tctttagcagtgtcaatatccgttt

SEQ ID NO: 299509 - DNA, 25 bp, Artificial
  probe
  misc_feature (1)..(25): SEQ ID NO: 1607; WAN024CSS; Start 97; Stop 121
ttctttagcagtgtcaatatccgtt

SEQ ID NO: 299510 - DNA, 25 bp, Artificial
  probe
  misc_feature (1)..(25): SEQ ID NO: 1607; WAN024CSS; Start 96; Stop 120
tttctttagcagtgtcaatatccgt

SEQ ID NO: 299511 - DNA, 25 bp, Artificial
  probe
  misc_feature (1)..(25): SEQ ID NO: 1607; WAN024CSS; Start 95; Stop 119
atttctttagcagtgtcaatatccg

SEQ ID NO: 299512 - DNA, 25 bp, Artificial
  probe
  misc_feature (1)..(25): SEQ ID NO: 1607; WAN024CSS; Start 13; Stop 37
acaaagttcaatagagtagtcaccg

SEQ ID NO: 299513 - DNA, 25 bp, Artificial
  probe
  misc_feature (1)..(25): SEQ ID NO: 1607; WAN024CSS; Start 12; Stop 36
cacaaagttcaatagagtagtcacc

SEQ ID NO: 299514 - DNA, 25 bp, Artificial
  probe
  misc_feature (1)..(25): SEQ ID NO: 1607; WAN024CSS; Start 11; Stop 35
ccacaaagttcaatagagtagtcac

SEQ ID NO: 299515 - DNA, 25 bp, Artificial
  probe
  misc_feature (1)..(25): SEQ ID NO: 1607; WAN024CSS; Start 9; Stop 33
caccacaaagttcaatagagtagtc

SEQ ID NO: 299516 - DNA, 25 bp, Artificial
  probe
  misc_feature (1)..(25): SEQ ID NO: 1607; WAN024CSS; Start 113; Stop 137
atatccgtttcaactgtcttcactt

SEQ ID NO: 299517 - DNA, 25 bp, Artificial
  probe
  misc_feature (1)..(25): SEQ ID NO: 1607; WAN024CSS; Start 112; Stop 136
aatatccgtttcaactgtcttcact

SEQ ID NO: 299518 - DNA, 25 bp, Artificial
  probe
  misc_feature (1)..(25): SEQ ID NO: 1607; WAN024CSS; Start 111; Stop 135
caatatccgtttcaactgtcttcac

SEQ ID NO: 299519 - DNA, 25 bp, Artificial
  probe
  misc_feature (1)..(25): SEQ ID NO: 1607; WAN024CSS; Start 110; Stop 134
tcaatatccgtttcaactgtcttca

SEQ ID NO: 299520 - DNA, 25 bp, Artificial
  probe
  misc_feature (1)..(25): SEQ ID NO: 1607; WAN024CSS; Start 92; Stop 116
cccatttctttagcagtgtcaatat

SEQ ID NO: 299521 - DNA, 25 bp, Artificial
  probe
  misc_feature (1)..(25): SEQ ID NO: 1607; WAN024CSS; Start 6; Stop 30
taccaccacaaagttcaatagagta

SEQ ID NO: 299522 - DNA, 25 bp, Artificial
  probe
  misc_feature (1)..(25): SEQ ID NO: 1607; WAN024CSS; Start 108; Stop 132
tgtcaatatccgtttcaactgtctt

SEQ ID NO: 299523 - DNA, 25 bp, Artificial
  probe
  misc_feature (1)..(25): SEQ ID NO: 1608; WAN0249EL; Start 1; Stop 25
atgagtaccttctttctaaacattt

SEQ ID NO: 299524 - DNA, 25 bp, Artificial
  probe
  misc_feature (1)..(25): SEQ ID NO: 1608; WAN0249EL; Start 2; Stop 26
tgagtaccttctttctaaacatttt

SEQ ID NO: 299525 - DNA, 25 bp, Artificial
  probe
  misc_feature (1)..(25): SEQ ID NO: 1609; WAN024FBL; Start 426; Stop 450
caacctctatgtgactacggattat

SEQ ID NO: 299526 - DNA, 25 bp, Artificial
  probe
  misc_feature (1)..(25): SEQ ID NO: 1609; WAN024FBL; Start 481; Stop 505
gaagaattaccagtgattgatgagc

SEQ ID NO: 299527 - DNA, 25 bp, Artificial
  probe
  misc_feature (1)..(25): SEQ ID NO: 1609; WAN024FBL; Start 427; Stop 451
aacctctatgtgactacggattatt

SEQ ID NO: 299528 - DNA, 25 bp, Artificial
  probe
  misc_feature (1)..(25): SEQ ID NO: 1609; WAN024FBL; Start 170; Stop 194
ttgagacaagtggtgcttatagatt

SEQ ID NO: 299529 - DNA, 25 bp, Artificial
  probe
  misc_feature (1)..(25): SEQ ID NO: 1609; WAN024FBL; Start 169; Stop 193
attgagacaagtggtgcttatagat

SEQ ID NO: 299530 - DNA, 25 bp, Artificial
  probe
  misc_feature (1)..(25): SEQ ID NO: 1609; WAN024FBL; Start 166; Stop 190
ttgattgagacaagtggtgcttata

SEQ ID NO: 299531 - DNA, 25 bp, Artificial
  probe
  misc_feature (1)..(25): SEQ ID NO: 1609; WAN024FBL; Start 168; Stop 192
gattgagacaagtggtgcttataga

SEQ ID NO: 299532 - DNA, 25 bp, Artificial
  probe
  misc_feature (1)..(25): SEQ ID NO: 1609; WAN024FBL; Start 425; Stop 449
ccaacctctatgtgactacggatta

SEQ ID NO: 299533 - DNA, 25 bp, Artificial
  probe
  misc_feature (1)..(25): SEQ ID NO: 1609; WAN024FBL; Start 171; Stop 195
tgagacaagtggtgcttatagattg

SEQ ID NO: 299534 - DNA, 25 bp, Artificial
  probe
  misc_feature (1)..(25): SEQ ID NO: 1609; WAN024FBL; Start 167; Stop 191
tgattgagacaagtggtgcttatag

SEQ ID NO: 299535 - DNA, 25 bp, Artificial
  probe
  misc_feature (1)..(25): SEQ ID NO: 1609; WAN024FBL; Start 480; Stop 504
agaagaattaccagtgattgatgag

SEQ ID NO: 299536 - DNA, 25 bp, Artificial
  probe
  misc_feature (1)..(25): SEQ ID NO: 1609; WAN024FBL; Start 172; Stop 196
gagacaagtggtgcttatagattgg

SEQ ID NO: 299537 - DNA, 25 bp, Artificial
  probe
  misc_feature (1)..(25): SEQ ID NO: 1609; WAN024FBL; Start 176; Stop 200
caagtggtgcttatagattggtgac

SEQ ID NO: 299538 - DNA, 25 bp, Artificial
  probe
  misc_feature (1)..(25): SEQ ID NO: 1609; WAN024FBL; Start 174; Stop 198
gacaagtggtgcttatagattggtg

SEQ ID NO: 299539 - DNA, 25 bp, Artificial
  probe
  misc_feature (1)..(25): SEQ ID NO: 1609; WAN024FBL; Start 173; Stop 197
agacaagtggtgcttatagattggt

SEQ ID NO: 299540 - DNA, 25 bp, Artificial
  probe
  misc_feature (1)..(25): SEQ ID NO: 1609; WAN024FBL; Start 175; Stop 199
acaagtggtgcttatagattggtga

SEQ ID NO: 299541 - DNA, 25 bp, Artificial
  probe
  misc_feature (1)..(25): SEQ ID NO: 1609; WAN024FBL; Start 484; Stop 508
gaattaccagtgattgatgagcttg

SEQ ID NO: 299542 - DNA, 25 bp, Artificial
  probe
  misc_feature (1)..(25): SEQ ID NO: 1609; WAN024FBL; Start 483; Stop 507
agaattaccagtgattgatgagctt

SEQ ID NO: 299543 - DNA, 25 bp, Artificial
  probe
  misc_feature (1)..(25): SEQ ID NO: 1609; WAN024FBL; Start 482; Stop 506
aagaattaccagtgattgatgagct

SEQ ID NO: 299544 - DNA, 25 bp, Artificial
  probe
  misc_feature (1)..(25): SEQ ID NO: 1609; WAN024FBL; Start 485; Stop 509
aattaccagtgattgatgagcttga

SEQ ID NO: 299545 - DNA, 25 bp, Artificial
  probe
  misc_feature (1)..(25): SEQ ID NO: 1609; WAN024FBL; Start 486; Stop 510
attaccagtgattgatgagcttgag

SEQ ID NO: 299546 - DNA, 25 bp, Artificial
  probe
  misc_feature (1)..(25): SEQ ID NO: 1609; WAN024FBL; Start 479; Stop 503
tagaagaattaccagtgattgatga

SEQ ID NO: 299547 - DNA, 25 bp, Artificial
  probe
  misc_feature (1)..(25): SEQ ID NO: 1609; WAN024FBL; Start 275; Stop 299
ttgagaccttgtccattattgccta

SEQ ID NO: 299548 - DNA, 25 bp, Artificial
  probe
  misc_feature (1)..(25): SEQ ID NO: 1609; WAN024FBL; Start 537; Stop 561
tggtgaaaggatagaagaagatgag

SEQ ID NO: 299549 - DNA, 25 bp, Artificial
  probe
  misc_feature (1)..(25): SEQ ID NO: 1609; WAN024FBL; Start 538; Stop 562
ggtgaaaggatagaagaagatgaga

SEQ ID NO: 299550 - DNA, 25 bp, Artificial
  probe
  misc_feature (1)..(25): SEQ ID NO: 1609; WAN024FBL; Start 488; Stop 512
taccagtgattgatgagcttgagat

SEQ ID NO: 299551 - DNA, 25 bp, Artificial
  probe
  misc_feature (1)..(25): SEQ ID NO: 1609; WAN024FBL; Start 536; Stop 560
ttggtgaaaggatagaagaagatga

SEQ ID NO: 299552 - DNA, 25 bp, Artificial
  probe
  misc_feature (1)..(25): SEQ ID NO: 1609; WAN024FBL; Start 428; Stop 452
acctctatgtgactacggattattt

SEQ ID NO: 299553 - DNA, 25 bp, Artificial
  probe
  misc_feature (1)..(25): SEQ ID NO: 1609; WAN024FBL; Start 490; Stop 514
ccagtgattgatgagcttgagattc

SEQ ID NO: 299554 - DNA, 25 bp, Artificial
  probe
  misc_feature (1)..(25): SEQ ID NO: 1609; WAN024FBL; Start 487; Stop 511
ttaccagtgattgatgagcttgaga

SEQ ID NO: 299555 - DNA, 25 bp, Artificial
  probe
  misc_feature (1)..(25): SEQ ID NO: 1609; WAN024FBL; Start 491; Stop 515
cagtgattgatgagcttgagattca

SEQ ID NO: 299556 - DNA, 25 bp, Artificial
  probe
  misc_feature (1)..(25): SEQ ID NO: 1609; WAN024FBL; Start 535; Stop 559
tttggtgaaaggatagaagaagatg

SEQ ID NO: 299557 - DNA, 25 bp, Artificial
  probe
  misc_feature (1)..(25): SEQ ID NO: 1609; WAN024FBL; Start 277; Stop 301
gagaccttgtccattattgcctaca

SEQ ID NO: 299558 - DNA, 25 bp, Artificial
  probe
  misc_feature (1)..(25): SEQ ID NO: 1610; WAN024EUB; Start 966; Stop 990
tgagcacttaggttatgaatacagt

SEQ ID NO: 299559 - DNA, 25 bp, Artificial
  probe
  misc_feature (1)..(25): SEQ ID NO: 1610; WAN024EUB; Start 965; Stop 989
atgagcacttaggttatgaatacag

SEQ ID NO: 299560 - DNA, 25 bp, Artificial
  probe
  misc_feature (1)..(25): SEQ ID NO: 1610; WAN024EUB; Start 964; Stop 988
tatgagcacttaggttatgaataca

SEQ ID NO: 299561 - DNA, 25 bp, Artificial
  probe
  misc_feature (1)..(25): SEQ ID NO: 1610; WAN024EUB; Start 839; Stop 863
taggaactctttctgtgaatatcgc

SEQ ID NO: 299562 - DNA, 25 bp, Artificial
  probe
  misc_feature (1)..(25): SEQ ID NO: 1610; WAN024EUB; Start 727; Stop 751
attaccgataaggctttgactatgc

SEQ ID NO: 299563 - DNA, 25 bp, Artificial
  probe
  misc_feature (1)..(25): SEQ ID NO: 1610; WAN024EUB; Start 733; Stop 757
gataaggctttgactatgctggatg

SEQ ID NO: 299564 - DNA, 25 bp, Artificial
  probe
  misc_feature (1)..(25): SEQ ID NO: 1610; WAN024EUB; Start 835; Stop 859
ggtctaggaactctttctgtgaata

SEQ ID NO: 299565 - DNA, 25 bp, Artificial
  probe
  misc_feature (1)..(25): SEQ ID NO: 1610; WAN024EUB; Start 726; Stop 750
tattaccgataaggctttgactatg

SEQ ID NO: 299566 - DNA, 25 bp, Artificial
  probe
  misc_feature (1)..(25): SEQ ID NO: 1610; WAN024EUB; Start 834; Stop 858
tggtctaggaactctttctgtgaat

SEQ ID NO: 299567 - DNA, 25 bp, Artificial
  probe
  misc_feature (1)..(25): SEQ ID NO: 1610; WAN024EUB; Start 728; Stop 752
ttaccgataaggctttgactatgct

SEQ ID NO: 299568 - DNA, 25 bp, Artificial
  probe
  misc_feature (1)..(25): SEQ ID NO: 1610; WAN024EUB; Start 838; Stop 862
ctaggaactctttctgtgaatatcg

SEQ ID NO: 299569 - DNA, 25 bp, Artificial
  probe
  misc_feature (1)..(25): SEQ ID NO: 1610; WAN024EUB; Start 833; Stop 857
ttggtctaggaactctttctgtgaa

SEQ ID NO: 299570 - DNA, 25 bp, Artificial
  probe
  misc_feature (1)..(25): SEQ ID NO: 1610; WAN024EUB; Start 734; Stop 758
ataaggctttgactatgctggatgt

SEQ ID NO: 299571 - DNA, 25 bp, Artificial
  probe
  misc_feature (1)..(25): SEQ ID NO: 1610; WAN024EUB; Start 735; Stop 759
taaggctttgactatgctggatgtt

SEQ ID NO: 299572 - DNA, 25 bp, Artificial
  probe
  misc_feature (1)..(25): SEQ ID NO: 1610; WAN024EUB; Start 963; Stop 987
atatgagcacttaggttatgaatac

SEQ ID NO: 299573 - DNA, 25 bp, Artificial
  probe
  misc_feature (1)..(25): SEQ ID NO: 1610; WAN024EUB; Start 729; Stop 753
taccgataaggctttgactatgctg

SEQ ID NO: 299574 - DNA, 25 bp, Artificial
  probe
  misc_feature (1)..(25): SEQ ID NO: 1610; WAN024EUB; Start 957; Stop 981
taaggcatatgagcacttaggttat

SEQ ID NO: 299575 - DNA, 25 bp, Artificial
  probe
  misc_feature (1)..(25): SEQ ID NO: 1610; WAN024EUB; Start 763; Stop 787
catgaaggtttggactatgtggatc

SEQ ID NO: 299576 - DNA, 25 bp, Artificial
  probe
  misc_feature (1)..(25): SEQ ID NO: 1610; WAN024EUB; Start 832; Stop 856
gttggtctaggaactctttctgtga

SEQ ID NO: 299577 - DNA, 25 bp, Artificial
  probe
  misc_feature (1)..(25): SEQ ID NO: 1610; WAN024EUB; Start 830; Stop 854
ctgttggtctaggaactctttctgt

SEQ ID NO: 299578 - DNA, 25 bp, Artificial
  probe
  misc_feature (1)..(25): SEQ ID NO: 1610; WAN024EUB; Start 889; Stop 913
atgtatgagccttacttgattcaaa

SEQ ID NO: 299579 - DNA, 25 bp, Artificial
  probe
  misc_feature (1)..(25): SEQ ID NO: 1610; WAN024EUB; Start 960; Stop 984
ggcatatgagcacttaggttatgaa

SEQ ID NO: 299580 - DNA, 25 bp, Artificial
  probe
  misc_feature (1)..(25): SEQ ID NO: 1610; WAN024EUB; Start 958; Stop 982
aaggcatatgagcacttaggttatg

SEQ ID NO: 299581 - DNA, 25 bp, Artificial
  probe
  misc_feature (1)..(25): SEQ ID NO: 1610; WAN024EUB; Start 831; Stop 855
tgttggtctaggaactctttctgtg

SEQ ID NO: 299582 - DNA, 25 bp, Artificial
  probe
  misc_feature (1)..(25): SEQ ID NO: 1610; WAN024EUB; Start 725; Stop 749
ttattaccgataaggctttgactat

SEQ ID NO: 299583 - DNA, 25 bp, Artificial
  probe
  misc_feature (1)..(25): SEQ ID NO: 1610; WAN024EUB; Start 836; Stop 860
gtctaggaactctttctgtgaatat

SEQ ID NO: 299584 - DNA, 25 bp, Artificial
  probe
  misc_feature (1)..(25): SEQ ID NO: 1610; WAN024EUB; Start 764; Stop 788
atgaaggtttggactatgtggatca

SEQ ID NO: 299585 - DNA, 25 bp, Artificial
  probe
  misc_feature (1)..(25): SEQ ID NO: 1610; WAN024EUB; Start 961; Stop 985
gcatatgagcacttaggttatgaat

SEQ ID NO: 299586 - DNA, 25 bp, Artificial
  probe
  misc_feature (1)..(25): SEQ ID NO: 1610; WAN024EUB; Start 732; Stop 756
cgataaggctttgactatgctggat

SEQ ID NO: 299587 - DNA, 25 bp, Artificial
  probe
  misc_feature (1)..(25): SEQ ID NO: 1610; WAN024EUB; Start 765; Stop 789
tgaaggtttggactatgtggatcaa

SEQ ID NO: 299588 - DNA, 25 bp, Artificial
  probe
  misc_feature (1)..(25): SEQ ID NO: 1610; WAN024EUB; Start 840; Stop 864
aggaactctttctgtgaatatcgcc

SEQ ID NO: 299589 - DNA, 25 bp, Artificial
  probe
  misc_feature (1)..(25): SEQ ID NO: 1610; WAN024EUB; Start 959; Stop 983
aggcatatgagcacttaggttatga

SEQ ID NO: 299590 - DNA, 25 bp, Artificial
  probe
  misc_feature (1)..(25): SEQ ID NO: 1610; WAN024EUB; Start 837; Stop 861
tctaggaactctttctgtgaatatc

SEQ ID NO: 299591 - DNA, 25 bp, Artificial
  probe
  misc_feature (1)..(25): SEQ ID NO: 1611; WAN024AWD; Start 451; Stop 475
atcaagtcaagtcagaataccgatt

SEQ ID NO: 299592 - DNA, 25 bp, Artificial
  probe
  misc_feature (1)..(25): SEQ ID NO: 1611; WAN024AWD; Start 449; Stop 473
atatcaagtcaagtcagaataccga

SEQ ID NO: 299593 - DNA, 25 bp, Artificial
  probe
  misc_feature (1)..(25): SEQ ID NO: 1611; WAN024AWD; Start 450; Stop 474
tatcaagtcaagtcagaataccgat

SEQ ID NO: 299594 - DNA, 25 bp, Artificial
  probe
  misc_feature (1)..(25): SEQ ID NO: 1611; WAN024AWD; Start 1237; Stop 1261
atgccgattgagactatgatagatt

SEQ ID NO: 299595 - DNA, 25 bp, Artificial
  probe
  misc_feature (1)..(25): SEQ ID NO: 1611; WAN024AWD; Start 1236; Stop 1260
tatgccgattgagactatgatagat

SEQ ID NO: 299596 - DNA, 25 bp, Artificial
  probe
  misc_feature (1)..(25): SEQ ID NO: 1611; WAN024AWD; Start 1235; Stop 1259
atatgccgattgagactatgataga

SEQ ID NO: 299597 - DNA, 25 bp, Artificial
  probe
  misc_feature (1)..(25): SEQ ID NO: 1611; WAN024AWD; Start 1040; Stop 1064
taggcaatgttcatcttgattcaga

SEQ ID NO: 299598 - DNA, 25 bp, Artificial
  probe
  misc_feature (1)..(25): SEQ ID NO: 1611; WAN024AWD; Start 1039; Stop 1063
gtaggcaatgttcatcttgattcag

SEQ ID NO: 299599 - DNA, 25 bp, Artificial
  probe
  misc_feature (1)..(25): SEQ ID NO: 1611; WAN024AWD; Start 1037; Stop 1061
ctgtaggcaatgttcatcttgattc

SEQ ID NO: 299600 - DNA, 25 bp, Artificial
  probe
  misc_feature (1)..(25): SEQ ID NO: 1611; WAN024AWD; Start 230; Stop 254
ttctgttggtgttctctatccttgt

SEQ ID NO: 299601 - DNA, 25 bp, Artificial
  probe
  misc_feature (1)..(25): SEQ ID NO: 1611; WAN024AWD; Start 1038; Stop 1062
tgtaggcaatgttcatcttgattca

SEQ ID NO: 299602 - DNA, 25 bp, Artificial
  probe
  misc_feature (1)..(25): SEQ ID NO: 1611; WAN024AWD; Start 1041; Stop 1065
aggcaatgttcatcttgattcagaa

SEQ ID NO: 299603 - DNA, 25 bp, Artificial
  probe
  misc_feature (1)..(25): SEQ ID NO: 1611; WAN024AWD; Start 36; Stop 60
agtgaagcgaagtgttaatatagtt

SEQ ID NO: 299604 - DNA, 25 bp, Artificial
  probe
  misc_feature (1)..(25): SEQ ID NO: 1611; WAN024AWD; Start 35; Stop 59
aagtgaagcgaagtgttaatatagt

SEQ ID NO: 299605 - DNA, 25 bp, Artificial
  probe
  misc_feature (1)..(25): SEQ ID NO: 1611; WAN024AWD; Start 137; Stop 161
atcttaatctagtggtaactgcgtt

SEQ ID NO: 299606 - DNA, 25 bp, Artificial
  probe
  misc_feature (1)..(25): SEQ ID NO: 1611; WAN024AWD; Start 231; Stop 255
tctgttggtgttctctatccttgtc

SEQ ID NO: 299607 - DNA, 25 bp, Artificial
  probe
  misc_feature (1)..(25): SEQ ID NO: 1611; WAN024AWD; Start 1234; Stop 1258
aatatgccgattgagactatgatag

SEQ ID NO: 299608 - DNA, 25 bp, Artificial
  probe
  misc_feature (1)..(25): SEQ ID NO: 1611; WAN024AWD; Start 704; Stop 728
cctatggtcctattagttcggtgtc

SEQ ID NO: 299609 - DNA, 25 bp, Artificial
  probe
  misc_feature (1)..(25): SEQ ID NO: 1611; WAN024AWD; Start 136; Stop 160
tatcttaatctagtggtaactgcgt

SEQ ID NO: 299610 - DNA, 25 bp, Artificial
  probe
  misc_feature (1)..(25): SEQ ID NO: 1611; WAN024AWD; Start 1036; Stop 1060
cctgtaggcaatgttcatcttgatt

SEQ ID NO: 299611 - DNA, 25 bp, Artificial
  probe
  misc_feature (1)..(25): SEQ ID NO: 1611; WAN024AWD; Start 233; Stop 257
tgttggtgttctctatccttgtcag

SEQ ID NO: 299612 - DNA, 25 bp, Artificial
  probe
  misc_feature (1)..(25): SEQ ID NO: 1611; WAN024AWD; Start 232; Stop 256
ctgttggtgttctctatccttgtca

SEQ ID NO: 299613 - DNA, 25 bp, Artificial
  probe
  misc_feature (1)..(25): SEQ ID NO: 1611; WAN024AWD; Start 922; Stop 946
aattactatgtgcgattgaacttca

SEQ ID NO: 299614 - DNA, 25 bp, Artificial
  probe
  misc_feature (1)..(25): SEQ ID NO: 1611; WAN024AWD; Start 705; Stop 729
ctatggtcctattagttcggtgtcg

SEQ ID NO: 299615 - DNA, 25 bp, Artificial
  probe
  misc_feature (1)..(25): SEQ ID NO: 1611; WAN024AWD; Start 686; Stop 710
atgttagtggaattgacacctatgg

SEQ ID NO: 299616 - DNA, 25 bp, Artificial
  probe
  misc_feature (1)..(25): SEQ ID NO: 1611; WAN024AWD; Start 682; Stop 706
atctatgttagtggaattgacacct

SEQ ID NO: 299617 - DNA, 25 bp, Artificial
  probe
  misc_feature (1)..(25): SEQ ID NO: 1611; WAN024AWD; Start 1049; Stop 1073
ttcatcttgattcagaacaggctct

SEQ ID NO: 299618 - DNA, 25 bp, Artificial
  probe
  misc_feature (1)..(25): SEQ ID NO: 1611; WAN024AWD; Start 876; Stop 900
tgattcgtccattcacaccttagaa

SEQ ID NO: 299619 - DNA, 25 bp, Artificial
  probe
  misc_feature (1)..(25): SEQ ID NO: 1611; WAN024AWD; Start 875; Stop 899
ttgattcgtccattcacaccttaga

SEQ ID NO: 299620 - DNA, 25 bp, Artificial
  probe
  misc_feature (1)..(25): SEQ ID NO: 1611; WAN024AWD; Start 874; Stop 898
gttgattcgtccattcacaccttag

SEQ ID NO: 299621 - DNA, 25 bp, Artificial
  probe
  misc_feature (1)..(25): SEQ ID NO: 1611; WAN024AWD; Start 683; Stop 707
tctatgttagtggaattgacaccta

SEQ ID NO: 299622 - DNA, 25 bp, Artificial
  probe
  misc_feature (1)..(25): SEQ ID NO: 1611; WAN024AWD; Start 569; Stop 593
atatcatcgagtcagagtatccaga

SEQ ID NO: 299623 - DNA, 25 bp, Artificial
  probe
  misc_feature (1)..(25): SEQ ID NO: 1611; WAN024AWD; Start 141; Stop 165
taatctagtggtaactgcgttagtc

SEQ ID NO: 299624 - DNA, 25 bp, Artificial
  probe
  misc_feature (1)..(25): SEQ ID NO: 1612; WAN024BFF; Start 195; Stop 219
aattaccattgacgacgatgtgatt

SEQ ID NO: 299625 - DNA, 25 bp, Artificial
  probe
  misc_feature (1)..(25): SEQ ID NO: 1612; WAN024BFF; Start 429; Stop 453
aaactacccttcacaactatctgga

SEQ ID NO: 299626 - DNA, 25 bp, Artificial
  probe
  misc_feature (1)..(25): SEQ ID NO: 1612; WAN024BFF; Start 196; Stop 220
attaccattgacgacgatgtgattt

SEQ ID NO: 299627 - DNA, 25 bp, Artificial
  probe
  misc_feature (1)..(25): SEQ ID NO: 1612; WAN024BFF; Start 430; Stop 454
aactacccttcacaactatctggag

SEQ ID NO: 299628 - DNA, 25 bp, Artificial
  probe
  misc_feature (1)..(25): SEQ ID NO: 1612; WAN024BFF; Start 194; Stop 218
aaattaccattgacgacgatgtgat

SEQ ID NO: 299629 - DNA, 25 bp, Artificial
  probe
  misc_feature (1)..(25): SEQ ID NO: 1612; WAN024BFF; Start 325; Stop 349
gagaatgtagcctttgcccttaaac

SEQ ID NO: 299630 - DNA, 25 bp, Artificial
  probe
  misc_feature (1)..(25): SEQ ID NO: 1612; WAN024BFF; Start 109; Stop 133
atctacggaatcgttggatattctg

SEQ ID NO: 299631 - DNA, 25 bp, Artificial
  probe
  misc_feature (1)..(25): SEQ ID NO: 1612; WAN024BFF; Start 108; Stop 132
tatctacggaatcgttggatattct

SEQ ID NO: 299632 - DNA, 25 bp, Artificial
  probe
  misc_feature (1)..(25): SEQ ID NO: 1612; WAN024BFF; Start 112; Stop 136
tacggaatcgttggatattctggag

SEQ ID NO: 299633 - DNA, 25 bp, Artificial
  probe
  misc_feature (1)..(25): SEQ ID NO: 1612; WAN024BFF; Start 111; Stop 135
ctacggaatcgttggatattctgga

SEQ ID NO: 299634 - DNA, 25 bp, Artificial
  probe
  misc_feature (1)..(25): SEQ ID NO: 1612; WAN024BFF; Start 110; Stop 134
tctacggaatcgttggatattctgg

SEQ ID NO: 299635 - DNA, 25 bp, Artificial
  probe
  misc_feature (1)..(25): SEQ ID NO: 1612; WAN024BFF; Start 116; Stop 140
gaatcgttggatattctggagcagg

SEQ ID NO: 299636 - DNA, 25 bp, Artificial
  probe
  misc_feature (1)..(25): SEQ ID NO: 1612; WAN024BFF; Start 115; Stop 139
ggaatcgttggatattctggagcag

SEQ ID NO: 299637 - DNA, 25 bp, Artificial
  probe
  misc_feature (1)..(25): SEQ ID NO: 1612; WAN024BFF; Start 107; Stop 131
atatctacggaatcgttggatattc

SEQ ID NO: 299638 - DNA, 25 bp, Artificial
  probe
  misc_feature (1)..(25): SEQ ID NO: 1612; WAN024BFF; Start 324; Stop 348
ggagaatgtagcctttgcccttaaa

SEQ ID NO: 299639 - DNA, 25 bp, Artificial
  probe
  misc_feature (1)..(25): SEQ ID NO: 1612; WAN024BFF; Start 327; Stop 351
gaatgtagcctttgcccttaaacac

SEQ ID NO: 299640 - DNA, 25 bp, Artificial
  probe
  misc_feature (1)..(25): SEQ ID NO: 1612; WAN024BFF; Start 326; Stop 350
agaatgtagcctttgcccttaaaca

SEQ ID NO: 299641 - DNA, 25 bp, Artificial
  probe
  misc_feature (1)..(25): SEQ ID NO: 1612; WAN024BFF; Start 18; Stop 42
caagttagatcagatcgatgtgact

SEQ ID NO: 299642 - DNA, 25 bp, Artificial
  probe
  misc_feature (1)..(25): SEQ ID NO: 1612; WAN024BFF; Start 17; Stop 41
tcaagttagatcagatcgatgtgac

SEQ ID NO: 299643 - DNA, 25 bp, Artificial
  probe
  misc_feature (1)..(25): SEQ ID NO: 1612; WAN024BFF; Start 16; Stop 40
atcaagttagatcagatcgatgtga

SEQ ID NO: 299644 - DNA, 25 bp, Artificial
  probe
  misc_feature (1)..(25): SEQ ID NO: 1612; WAN024BFF; Start 428; Stop 452
aaaactacccttcacaactatctgg

SEQ ID NO: 299645 - DNA, 25 bp, Artificial
  probe
  misc_feature (1)..(25): SEQ ID NO: 1612; WAN024BFF; Start 328; Stop 352
aatgtagcctttgcccttaaacact

SEQ ID NO: 299646 - DNA, 25 bp, Artificial
  probe
  misc_feature (1)..(25): SEQ ID NO: 1612; WAN024BFF; Start 105; Stop 129
ggatatctacggaatcgttggatat

SEQ ID NO: 299647 - DNA, 25 bp, Artificial
  probe
  misc_feature (1)..(25): SEQ ID NO: 1612; WAN024BFF; Start 363; Stop 387
caaggaagaaaagaaggctaaagta

SEQ ID NO: 299648 - DNA, 25 bp, Artificial
  probe
  misc_feature (1)..(25): SEQ ID NO: 1612; WAN024BFF; Start 427; Stop 451
gaaaactacccttcacaactatctg

SEQ ID NO: 299649 - DNA, 25 bp, Artificial
  probe
  misc_feature (1)..(25): SEQ ID NO: 1612; WAN024BFF; Start 43; Stop 67
tttcaccaaaagaagagaaccatca

SEQ ID NO: 299650 - DNA, 25 bp, Artificial
  probe
  misc_feature (1)..(25): SEQ ID NO: 1612; WAN024BFF; Start 364; Stop 388
aaggaagaaaagaaggctaaagtag

SEQ ID NO: 299651 - DNA, 25 bp, Artificial
  probe
  misc_feature (1)..(25): SEQ ID NO: 1612; WAN024BFF; Start 15; Stop 39
tatcaagttagatcagatcgatgtg

SEQ ID NO: 299652 - DNA, 25 bp, Artificial
  probe
  misc_feature (1)..(25): SEQ ID NO: 1612; WAN024BFF; Start 505; Stop 529
atcttgatttcagacgagtcaactt

SEQ ID NO: 299653 - DNA, 25 bp, Artificial
  probe
  misc_feature (1)..(25): SEQ ID NO: 1612; WAN024BFF; Start 504; Stop 528
aatcttgatttcagacgagtcaact

SEQ ID NO: 299654 - DNA, 25 bp, Artificial
  probe
  misc_feature (1)..(25): SEQ ID NO: 1612; WAN024BFF; Start 1015; Stop 1039
attcgtcaagcaggtgtacaactaa

SEQ ID NO: 299655 - DNA, 25 bp, Artificial
  probe
  misc_feature (1)..(25): SEQ ID NO: 1612; WAN024BFF; Start 197; Stop 221
ttaccattgacgacgatgtgatttt

SEQ ID NO: 299656 - DNA, 25 bp, Artificial
  probe
  misc_feature (1)..(25): SEQ ID NO: 1612; WAN024BFF; Start 507; Stop 531
cttgatttcagacgagtcaacttct

SEQ ID NO: 299657 - DNA, 25 bp, Artificial
  probe
  misc_feature (1)..(25): SEQ ID NO: 1613; WAN024F7G; Start 131; Stop 155
accacgtcagcttcacattatatat

SEQ ID NO: 299658 - DNA, 25 bp, Artificial
  probe
  misc_feature (1)..(25): SEQ ID NO: 1613; WAN024F7G; Start 130; Stop 154
aaccacgtcagcttcacattatata

SEQ ID NO: 299659 - DNA, 25 bp, Artificial
  probe
  misc_feature (1)..(25): SEQ ID NO: 1613; WAN024F7G; Start 132; Stop 156
ccacgtcagcttcacattatatatg

SEQ ID NO: 299660 - DNA, 25 bp, Artificial
  probe
  misc_feature (1)..(25): SEQ ID NO: 1613; WAN024F7G; Start 40; Stop 64
cttcacataagaactctagcttacc

SEQ ID NO: 299661 - DNA, 25 bp, Artificial
  probe
  misc_feature (1)..(25): SEQ ID NO: 1613; WAN024F7G; Start 37; Stop 61
actcttcacataagaactctagctt

SEQ ID NO: 299662 - DNA, 25 bp, Artificial
  probe
  misc_feature (1)..(25): SEQ ID NO: 1613; WAN024F7G; Start 36; Stop 60
aactcttcacataagaactctagct

SEQ ID NO: 299663 - DNA, 25 bp, Artificial
  probe
  misc_feature (1)..(25): SEQ ID NO: 1613; WAN024F7G; Start 129; Stop 153
aaaccacgtcagcttcacattatat

SEQ ID NO: 299664 - DNA, 25 bp, Artificial
  probe
  misc_feature (1)..(25): SEQ ID NO: 1613; WAN024F7G; Start 119; Stop 143
aaatctattcaaaccacgtcagctt

SEQ ID NO: 299665 - DNA, 25 bp, Artificial
  probe
  misc_feature (1)..(25): SEQ ID NO: 1613; WAN024F7G; Start 43; Stop 67
cacataagaactctagcttacccat

SEQ ID NO: 299666 - DNA, 25 bp, Artificial
  probe
  misc_feature (1)..(25): SEQ ID NO: 1613; WAN024F7G; Start 41; Stop 65
ttcacataagaactctagcttaccc

SEQ ID NO: 299667 - DNA, 25 bp, Artificial
  probe
  misc_feature (1)..(25): SEQ ID NO: 1613; WAN024F7G; Start 65; Stop 89
cattctatggaatcttgcattatcc

SEQ ID NO: 299668 - DNA, 25 bp, Artificial
  probe
  misc_feature (1)..(25): SEQ ID NO: 1613; WAN024F7G; Start 42; Stop 66
tcacataagaactctagcttaccca

SEQ ID NO: 299669 - DNA, 25 bp, Artificial
  probe
  misc_feature (1)..(25): SEQ ID NO: 1613; WAN024F7G; Start 44; Stop 68
acataagaactctagcttacccatt

SEQ ID NO: 299670 - DNA, 25 bp, Artificial
  probe
  misc_feature (1)..(25): SEQ ID NO: 1613; WAN024F7G; Start 128; Stop 152
caaaccacgtcagcttcacattata

SEQ ID NO: 299671 - DNA, 25 bp, Artificial
  probe
  misc_feature (1)..(25): SEQ ID NO: 1613; WAN024F7G; Start 120; Stop 144
aatctattcaaaccacgtcagcttc

SEQ ID NO: 299672 - DNA, 25 bp, Artificial
  probe
  misc_feature (1)..(25): SEQ ID NO: 1613; WAN024F7G; Start 28; Stop 52
tatgcccaaactcttcacataagaa

SEQ ID NO: 299673 - DNA, 25 bp, Artificial
  probe
  misc_feature (1)..(25): SEQ ID NO: 1613; WAN024F7G; Start 32; Stop 56
cccaaactcttcacataagaactct

SEQ ID NO: 299674 - DNA, 25 bp, Artificial
  probe
  misc_feature (1)..(25): SEQ ID NO: 1613; WAN024F7G; Start 39; Stop 63
tcttcacataagaactctagcttac

SEQ ID NO: 299675 - DNA, 25 bp, Artificial
  probe
  misc_feature (1)..(25): SEQ ID NO: 1613; WAN024F7G; Start 133; Stop 157
cacgtcagcttcacattatatatgt

SEQ ID NO: 299676 - DNA, 25 bp, Artificial
  probe
  misc_feature (1)..(25): SEQ ID NO: 1613; WAN024F7G; Start 45; Stop 69
cataagaactctagcttacccattc

SEQ ID NO: 299677 - DNA, 25 bp, Artificial
  probe
  misc_feature (1)..(25): SEQ ID NO: 1613; WAN024F7G; Start 135; Stop 159
cgtcagcttcacattatatatgttg

SEQ ID NO: 299678 - DNA, 25 bp, Artificial
  probe
  misc_feature (1)..(25): SEQ ID NO: 1613; WAN024F7G; Start 3; Stop 27
gagtagggaggaaaaggtaaaagtt

SEQ ID NO: 299679 - DNA, 25 bp, Artificial
  probe
  misc_feature (1)..(25): SEQ ID NO: 1613; WAN024F7G; Start 1; Stop 25
atgagtagggaggaaaaggtaaaag

SEQ ID NO: 299680 - DNA, 25 bp, Artificial
  probe
  misc_feature (1)..(25): SEQ ID NO: 1613; WAN024F7G; Start 4; Stop 28
agtagggaggaaaaggtaaaagttt

SEQ ID NO: 299681 - DNA, 25 bp, Artificial
  probe
  misc_feature (1)..(25): SEQ ID NO: 1613; WAN024F7G; Start 12; Stop 36
ggaaaaggtaaaagtttatgcccaa

SEQ ID NO: 299682 - DNA, 25 bp, Artificial
  probe
  misc_feature (1)..(25): SEQ ID NO: 1613; WAN024F7G; Start 10; Stop 34
gaggaaaaggtaaaagtttatgccc

SEQ ID NO: 299683 - DNA, 25 bp, Artificial
  probe
  misc_feature (1)..(25): SEQ ID NO: 1613; WAN024F7G; Start 9; Stop 33
ggaggaaaaggtaaaagtttatgcc

SEQ ID NO: 299684 - DNA, 25 bp, Artificial
  probe
  misc_feature (1)..(25): SEQ ID NO: 1613; WAN024F7G; Start 8; Stop 32
gggaggaaaaggtaaaagtttatgc

SEQ ID NO: 299685 - DNA, 25 bp, Artificial
  probe
  misc_feature (1)..(25): SEQ ID NO: 1613; WAN024F7G; Start 137; Stop 161
tcagcttcacattatatatgttggt

SEQ ID NO: 299686 - DNA, 25 bp, Artificial
  probe
  misc_feature (1)..(25): SEQ ID NO: 1613; WAN024F7G; Start 38; Stop 62
ctcttcacataagaactctagctta

SEQ ID NO: 299687 - DNA, 25 bp, Artificial
  probe
  misc_feature (1)..(25): SEQ ID NO: 1613; WAN024F7G; Start 11; Stop 35
aggaaaaggtaaaagtttatgccca

SEQ ID NO: 299688 - DNA, 25 bp, Artificial
  probe
  misc_feature (1)..(25): SEQ ID NO: 1613; WAN024F7G; Start 2; Stop 26
tgagtagggaggaaaaggtaaaagt

SEQ ID NO: 299689 - DNA, 25 bp, Artificial
  probe
  misc_feature (1)..(25): SEQ ID NO: 1613; WAN024F7G; Start 35; Stop 59
aaactcttcacataagaactctagc

SEQ ID NO: 299690 - DNA, 25 bp, Artificial
  probe
  misc_feature (1)..(25): SEQ ID NO: 1614; WAN024CJH; Start 39; Stop 63
aggaaatatggaagttgttggagaa

SEQ ID NO: 299691 - DNA, 25 bp, Artificial
  probe
  misc_feature (1)..(25): SEQ ID NO: 1614; WAN024CJH; Start 38; Stop 62
aaggaaatatggaagttgttggaga

SEQ ID NO: 299692 - DNA, 25 bp, Artificial
  probe
  misc_feature (1)..(25): SEQ ID NO: 1614; WAN024CJH; Start 40; Stop 64
ggaaatatggaagttgttggagaat

SEQ ID NO: 299693 - DNA, 25 bp, Artificial
  probe
  misc_feature (1)..(25): SEQ ID NO: 1614; WAN024CJH; Start 100; Stop 124
ggaattgtcggaagagagaaggaag

SEQ ID NO: 299694 - DNA, 25 bp, Artificial
  probe
  misc_feature (1)..(25): SEQ ID NO: 1614; WAN024CJH; Start 96; Stop 120
atttggaattgtcggaagagagaag

SEQ ID NO: 299695 - DNA, 25 bp, Artificial
  probe
  misc_feature (1)..(25): SEQ ID NO: 1614; WAN024CJH; Start 37; Stop 61
caaggaaatatggaagttgttggag

SEQ ID NO: 299696 - DNA, 25 bp, Artificial
  probe
  misc_feature (1)..(25): SEQ ID NO: 1614; WAN024CJH; Start 135; Stop 159
ccgtgacttaaatgatatggatgat

SEQ ID NO: 299697 - DNA, 25 bp, Artificial
  probe
  misc_feature (1)..(25): SEQ ID NO: 1614; WAN024CJH; Start 126; Stop 150
attgctaatccgtgacttaaatgat

SEQ ID NO: 299698 - DNA, 25 bp, Artificial
  probe
  misc_feature (1)..(25): SEQ ID NO: 1614; WAN024CJH; Start 36; Stop 60
tcaaggaaatatggaagttgttgga

SEQ ID NO: 299699 - DNA, 25 bp, Artificial
  probe
  misc_feature (1)..(25): SEQ ID NO: 1614; WAN024CJH; Start 35; Stop 59
ttcaaggaaatatggaagttgttgg

SEQ ID NO: 299700 - DNA, 25 bp, Artificial
  probe
  misc_feature (1)..(25): SEQ ID NO: 1614; WAN024CJH; Start 127; Stop 151
ttgctaatccgtgacttaaatgata

SEQ ID NO: 299701 - DNA, 25 bp, Artificial
  probe
  misc_feature (1)..(25): SEQ ID NO: 1614; WAN024CJH; Start 128; Stop 152
tgctaatccgtgacttaaatgatat

SEQ ID NO: 299702 - DNA, 25 bp, Artificial
  probe
  misc_feature (1)..(25): SEQ ID NO: 1614; WAN024CJH; Start 152; Stop 176
tggatgattatgctctttcaattca

SEQ ID NO: 299703 - DNA, 25 bp, Artificial
  probe
  misc_feature (1)..(25): SEQ ID NO: 1614; WAN024CJH; Start 95; Stop 119
aatttggaattgtcggaagagagaa

SEQ ID NO: 299704 - DNA, 25 bp, Artificial
  probe
  misc_feature (1)..(25): SEQ ID NO: 1614; WAN024CJH; Start 101; Stop 125
gaattgtcggaagagagaaggaagc

SEQ ID NO: 299705 - DNA, 25 bp, Artificial
  probe
  misc_feature (1)..(25): SEQ ID NO: 1614; WAN024CJH; Start 99; Stop 123
tggaattgtcggaagagagaaggaa

SEQ ID NO: 299706 - DNA, 25 bp, Artificial
  probe
  misc_feature (1)..(25): SEQ ID NO: 1614; WAN024CJH; Start 98; Stop 122
ttggaattgtcggaagagagaagga

SEQ ID NO: 299707 - DNA, 25 bp, Artificial
  probe
  misc_feature (1)..(25): SEQ ID NO: 1614; WAN024CJH; Start 129; Stop 153
gctaatccgtgacttaaatgatatg

SEQ ID NO: 299708 - DNA, 25 bp, Artificial
  probe
  misc_feature (1)..(25): SEQ ID NO: 1614; WAN024CJH; Start 41; Stop 65
gaaatatggaagttgttggagaatt

SEQ ID NO: 299709 - DNA, 25 bp, Artificial
  probe
  misc_feature (1)..(25): SEQ ID NO: 1614; WAN024CJH; Start 103; Stop 127
attgtcggaagagagaaggaagcat

SEQ ID NO: 299710 - DNA, 25 bp, Artificial
  probe
  misc_feature (1)..(25): SEQ ID NO: 1614; WAN024CJH; Start 134; Stop 158
tccgtgacttaaatgatatggatga

SEQ ID NO: 299711 - DNA, 25 bp, Artificial
  probe
  misc_feature (1)..(25): SEQ ID NO: 1614; WAN024CJH; Start 147; Stop 171
tgatatggatgattatgctctttca

SEQ ID NO: 299712 - DNA, 25 bp, Artificial
  probe
  misc_feature (1)..(25): SEQ ID NO: 1614; WAN024CJH; Start 228; Stop 252
tagacaagatttacaatccgcacta

SEQ ID NO: 299713 - DNA, 25 bp, Artificial
  probe
  misc_feature (1)..(25): SEQ ID NO: 1614; WAN024CJH; Start 153; Stop 177
ggatgattatgctctttcaattcaa

SEQ ID NO: 299714 - DNA, 25 bp, Artificial
  probe
  misc_feature (1)..(25): SEQ ID NO: 1614; WAN024CJH; Start 230; Stop 254
gacaagatttacaatccgcactaac

SEQ ID NO: 299715 - DNA, 25 bp, Artificial
  probe
  misc_feature (1)..(25): SEQ ID NO: 1614; WAN024CJH; Start 229; Stop 253
agacaagatttacaatccgcactaa

SEQ ID NO: 299716 - DNA, 25 bp, Artificial
  probe
  misc_feature (1)..(25): SEQ ID NO: 1614; WAN024CJH; Start 227; Stop 251
ttagacaagatttacaatccgcact

SEQ ID NO: 299717 - DNA, 25 bp, Artificial
  probe
  misc_feature (1)..(25): SEQ ID NO: 1614; WAN024CJH; Start 226; Stop 250
gttagacaagatttacaatccgcac

SEQ ID NO: 299718 - DNA, 25 bp, Artificial
  probe
  misc_feature (1)..(25): SEQ ID NO: 1614; WAN024CJH; Start 231; Stop 255
acaagatttacaatccgcactaact

SEQ ID NO: 299719 - DNA, 25 bp, Artificial
  probe
  misc_feature (1)..(25): SEQ ID NO: 1614; WAN024CJH; Start 130; Stop 154
ctaatccgtgacttaaatgatatgg

SEQ ID NO: 299720 - DNA, 25 bp, Artificial
  probe
  misc_feature (1)..(25): SEQ ID NO: 1614; WAN024CJH; Start 232; Stop 256
caagatttacaatccgcactaacta

SEQ ID NO: 299721 - DNA, 25 bp, Artificial
  probe
  misc_feature (1)..(25): SEQ ID NO: 1614; WAN024CJH; Start 225; Stop 249
tgttagacaagatttacaatccgca

SEQ ID NO: 299722 - DNA, 25 bp, Artificial
  probe
  misc_feature (1)..(25): SEQ ID NO: 1614; WAN024CJH; Start 104; Stop 128
ttgtcggaagagagaaggaagcatt

SEQ ID NO: 299723 - DNA, 25 bp, Artificial
  probe
  misc_feature (1)..(25): SEQ ID NO: 1615; WAN024A8N; Start 27; Stop 51
aaaactgaacaatttggttggggac

SEQ ID NO: 299724 - DNA, 25 bp, Artificial
  probe
  misc_feature (1)..(25): SEQ ID NO: 1615; WAN024A8N; Start 28; Stop 52
aaactgaacaatttggttggggaca

SEQ ID NO: 299725 - DNA, 25 bp, Artificial
  probe
  misc_feature (1)..(25): SEQ ID NO: 1615; WAN024A8N; Start 29; Stop 53
aactgaacaatttggttggggacag

SEQ ID NO: 299726 - DNA, 25 bp, Artificial
  probe
  misc_feature (1)..(25): SEQ ID NO: 1616; WAN024ET9; Start 23; Stop 47
ctaagattaaggtcaaggctggtaa

SEQ ID NO: 299727 - DNA, 25 bp, Artificial
  probe
  misc_feature (1)..(25): SEQ ID NO: 1616; WAN024ET9; Start 24; Stop 48
taagattaaggtcaaggctggtaat

SEQ ID NO: 299728 - DNA, 25 bp, Artificial
  probe
  misc_feature (1)..(25): SEQ ID NO: 1616; WAN024ET9; Start 25; Stop 49
aagattaaggtcaaggctggtaatg

SEQ ID NO: 299729 - DNA, 25 bp, Artificial
  probe
  misc_feature (1)..(25): SEQ ID NO: 1616; WAN024ET9; Start 848; Stop 872
ctaataagatggacatgcctgagag

SEQ ID NO: 299730 - DNA, 25 bp, Artificial
  probe
  misc_feature (1)..(25): SEQ ID NO: 1616; WAN024ET9; Start 849; Stop 873
taataagatggacatgcctgagagt

SEQ ID NO: 299731 - DNA, 25 bp, Artificial
  probe
  misc_feature (1)..(25): SEQ ID NO: 1616; WAN024ET9; Start 22; Stop 46
gctaagattaaggtcaaggctggta

SEQ ID NO: 299732 - DNA, 25 bp, Artificial
  probe
  misc_feature (1)..(25): SEQ ID NO: 1616; WAN024ET9; Start 533; Stop 557
gtgttattacctcagctaagcctaa

SEQ ID NO: 299733 - DNA, 25 bp, Artificial
  probe
  misc_feature (1)..(25): SEQ ID NO: 1616; WAN024ET9; Start 530; Stop 554
taagtgttattacctcagctaagcc

SEQ ID NO: 299734 - DNA, 25 bp, Artificial
  probe
  misc_feature (1)..(25): SEQ ID NO: 1616; WAN024ET9; Start 17; Stop 41
atacagctaagattaaggtcaaggc

SEQ ID NO: 299735 - DNA, 25 bp, Artificial
  probe
  misc_feature (1)..(25): SEQ ID NO: 1616; WAN024ET9; Start 532; Stop 556
agtgttattacctcagctaagccta

SEQ ID NO: 299736 - DNA, 25 bp, Artificial
  probe
  misc_feature (1)..(25): SEQ ID NO: 1616; WAN024ET9; Start 26; Stop 50
agattaaggtcaaggctggtaatgg

SEQ ID NO: 299737 - DNA, 25 bp, Artificial
  probe
  misc_feature (1)..(25): SEQ ID NO: 1616; WAN024ET9; Start 718; Stop 742
cgtgttatccttcacatcattgata

SEQ ID NO: 299738 - DNA, 25 bp, Artificial
  probe
  misc_feature (1)..(25): SEQ ID NO: 1616; WAN024ET9; Start 16; Stop 40
gatacagctaagattaaggtcaagg

SEQ ID NO: 299739 - DNA, 25 bp, Artificial
  probe
  misc_feature (1)..(25): SEQ ID NO: 1616; WAN024ET9; Start 27; Stop 51
gattaaggtcaaggctggtaatggt

SEQ ID NO: 299740 - DNA, 25 bp, Artificial
  probe
  misc_feature (1)..(25): SEQ ID NO: 1616; WAN024ET9; Start 531; Stop 555
aagtgttattacctcagctaagcct

SEQ ID NO: 299741 - DNA, 25 bp, Artificial
  probe
  misc_feature (1)..(25): SEQ ID NO: 1616; WAN024ET9; Start 529; Stop 553
ttaagtgttattacctcagctaagc

SEQ ID NO: 299742 - DNA, 25 bp, Artificial
  probe
  misc_feature (1)..(25): SEQ ID NO: 1616; WAN024ET9; Start 28; Stop 52
attaaggtcaaggctggtaatggtg

SEQ ID NO: 299743 - DNA, 25 bp, Artificial
  probe
  misc_feature (1)..(25): SEQ ID NO: 1616; WAN024ET9; Start 917; Stop 941
atgatgaatttgaagagttaccagc

SEQ ID NO: 299744 - DNA, 25 bp, Artificial
  probe
  misc_feature (1)..(25): SEQ ID NO: 1616; WAN024ET9; Start 564; Stop 588
tgcctaccactttaccactattgta

SEQ ID NO: 299745 - DNA, 25 bp, Artificial
  probe
  misc_feature (1)..(25): SEQ ID NO: 1616; WAN024ET9; Start 1091; Stop 1115
aagcctttgaaattagtcgtgatga

SEQ ID NO: 299746 - DNA, 25 bp, Artificial
  probe
  misc_feature (1)..(25): SEQ ID NO: 1616; WAN024ET9; Start 1090; Stop 1114
aaagcctttgaaattagtcgtgatg

SEQ ID NO: 299747 - DNA, 25 bp, Artificial
  probe
  misc_feature (1)..(25): SEQ ID NO: 1616; WAN024ET9; Start 15; Stop 39
agatacagctaagattaaggtcaag

SEQ ID NO: 299748 - DNA, 25 bp, Artificial
  probe
  misc_feature (1)..(25): SEQ ID NO: 1616; WAN024ET9; Start 1163; Stop 1187
atatgaccaactttgatcgtgatga

SEQ ID NO: 299749 - DNA, 25 bp, Artificial
  probe
  misc_feature (1)..(25): SEQ ID NO: 1616; WAN024ET9; Start 1162; Stop 1186
aatatgaccaactttgatcgtgatg

SEQ ID NO: 299750 - DNA, 25 bp, Artificial
  probe
  misc_feature (1)..(25): SEQ ID NO: 1616; WAN024ET9; Start 567; Stop 591
ctaccactttaccactattgtacca

SEQ ID NO: 299751 - DNA, 25 bp, Artificial
  probe
  misc_feature (1)..(25): SEQ ID NO: 1616; WAN024ET9; Start 566; Stop 590
cctaccactttaccactattgtacc

SEQ ID NO: 299752 - DNA, 25 bp, Artificial
  probe
  misc_feature (1)..(25): SEQ ID NO: 1616; WAN024ET9; Start 1164; Stop 1188
tatgaccaactttgatcgtgatgaa

SEQ ID NO: 299753 - DNA, 25 bp, Artificial
  probe
  misc_feature (1)..(25): SEQ ID NO: 1616; WAN024ET9; Start 1170; Stop 1194
caactttgatcgtgatgaatctgtc

SEQ ID NO: 299754 - DNA, 25 bp, Artificial
  probe
  misc_feature (1)..(25): SEQ ID NO: 1616; WAN024ET9; Start 850; Stop 874
aataagatggacatgcctgagagtc

SEQ ID NO: 299755 - DNA, 25 bp, Artificial
  probe
  misc_feature (1)..(25): SEQ ID NO: 1616; WAN024ET9; Start 565; Stop 589
gcctaccactttaccactattgtac

SEQ ID NO: 299756 - DNA, 25 bp, Artificial
  probe
  misc_feature (1)..(25): SEQ ID NO: 1616; WAN024ET9; Start 1165; Stop 1189
atgaccaactttgatcgtgatgaat

SEQ ID NO: 299757 - DNA, 25 bp, Artificial
  probe
  misc_feature (1)..(25): SEQ ID NO: 1616; WAN024ET9; Start 569; Stop 593
accactttaccactattgtaccaaa

SEQ ID NO: 299758 - DNA, 25 bp, Artificial
  probe
  misc_feature (1)..(25): SEQ ID NO: 1616; WAN024ET9; Start 1066; Stop 1090
tactatggatttgacgaagaagaaa

SEQ ID NO: 299759 - DNA, 25 bp, Artificial
  probe
  misc_feature (1)..(25): SEQ ID NO: 1617; WAN024D8S; Start 145; Stop 169
aaatacaatcccagtctctcgctct

SEQ ID NO: 299760 - DNA, 25 bp, Artificial
  probe
  misc_feature (1)..(25): SEQ ID NO: 1617; WAN024D8S; Start 9; Stop 33
taaaactataaggaggacgaaggtg

SEQ ID NO: 299761 - DNA, 25 bp, Artificial
  probe
  misc_feature (1)..(25): SEQ ID NO: 1617; WAN024D8S; Start 210; Stop 234
actattttgggaggaagaagatgaa

SEQ ID NO: 299762 - DNA, 25 bp, Artificial
  probe
  misc_feature (1)..(25): SEQ ID NO: 1617; WAN024D8S; Start 209; Stop 233
aactattttgggaggaagaagatga

SEQ ID NO: 299763 - DNA, 25 bp, Artificial
  probe
  misc_feature (1)..(25): SEQ ID NO: 1617; WAN024D8S; Start 8; Stop 32
ttaaaactataaggaggacgaaggt

SEQ ID NO: 299764 - DNA, 25 bp, Artificial
  probe
  misc_feature (1)..(25): SEQ ID NO: 1617; WAN024D8S; Start 211; Stop 235
ctattttgggaggaagaagatgaaa

SEQ ID NO: 299765 - DNA, 25 bp, Artificial
  probe
  misc_feature (1)..(25): SEQ ID NO: 1617; WAN024D8S; Start 208; Stop 232
caactattttgggaggaagaagatg

SEQ ID NO: 299766 - DNA, 25 bp, Artificial
  probe
  misc_feature (1)..(25): SEQ ID NO: 1617; WAN024D8S; Start 10; Stop 34
aaaactataaggaggacgaaggtgg

SEQ ID NO: 299767 - DNA, 25 bp, Artificial
  probe
  misc_feature (1)..(25): SEQ ID NO: 1617; WAN024D8S; Start 7; Stop 31
attaaaactataaggaggacgaagg

SEQ ID NO: 299768 - DNA, 25 bp, Artificial
  probe
  misc_feature (1)..(25): SEQ ID NO: 1617; WAN024D8S; Start 194; Stop 218
ggaaaaccctagaccaactattttg

SEQ ID NO: 299769 - DNA, 25 bp, Artificial
  probe
  misc_feature (1)..(25): SEQ ID NO: 1617; WAN024D8S; Start 212; Stop 236
tattttgggaggaagaagatgaaaa

SEQ ID NO: 299770 - DNA, 25 bp, Artificial
  probe
  misc_feature (1)..(25): SEQ ID NO: 1617; WAN024D8S; Start 146; Stop 170
aatacaatcccagtctctcgctctg

SEQ ID NO: 299771 - DNA, 25 bp, Artificial
  probe
  misc_feature (1)..(25): SEQ ID NO: 1617; WAN024D8S; Start 4; Stop 28
agtattaaaactataaggaggacga

SEQ ID NO: 299772 - DNA, 25 bp, Artificial
  probe
  misc_feature (1)..(25): SEQ ID NO: 1617; WAN024D8S; Start 193; Stop 217
gggaaaaccctagaccaactatttt

SEQ ID NO: 299773 - DNA, 25 bp, Artificial
  probe
  misc_feature (1)..(25): SEQ ID NO: 1617; WAN024D8S; Start 3; Stop 27
gagtattaaaactataaggaggacg

SEQ ID NO: 299774 - DNA, 25 bp, Artificial
  probe
  misc_feature (1)..(25): SEQ ID NO: 1617; WAN024D8S; Start 5; Stop 29
gtattaaaactataaggaggacgaa

SEQ ID NO: 299775 - DNA, 25 bp, Artificial
  probe
  misc_feature (1)..(25): SEQ ID NO: 1617; WAN024D8S; Start 45; Stop 69
aaaattaaaattagctcgggtagag

SEQ ID NO: 299776 - DNA, 25 bp, Artificial
  probe
  misc_feature (1)..(25): SEQ ID NO: 1617; WAN024D8S; Start 6; Stop 30
tattaaaactataaggaggacgaag

SEQ ID NO: 299777 - DNA, 25 bp, Artificial
  probe
  misc_feature (1)..(25): SEQ ID NO: 1617; WAN024D8S; Start 44; Stop 68
taaaattaaaattagctcgggtaga

SEQ ID NO: 299778 - DNA, 25 bp, Artificial
  probe
  misc_feature (1)..(25): SEQ ID NO: 1617; WAN024D8S; Start 178; Stop 202
atttgcagatgtttagggaaaaccc

SEQ ID NO: 299779 - DNA, 25 bp, Artificial
  probe
  misc_feature (1)..(25): SEQ ID NO: 1617; WAN024D8S; Start 2; Stop 26
tgagtattaaaactataaggaggac

SEQ ID NO: 299780 - DNA, 25 bp, Artificial
  probe
  misc_feature (1)..(25): SEQ ID NO: 1617; WAN024D8S; Start 195; Stop 219
gaaaaccctagaccaactattttgg

SEQ ID NO: 299781 - DNA, 25 bp, Artificial
  probe
  misc_feature (1)..(25): SEQ ID NO: 1617; WAN024D8S; Start 207; Stop 231
ccaactattttgggaggaagaagat

SEQ ID NO: 299782 - DNA, 25 bp, Artificial
  probe
  misc_feature (1)..(25): SEQ ID NO: 1617; WAN024D8S; Start 202; Stop 226
ctagaccaactattttgggaggaag

SEQ ID NO: 299783 - DNA, 25 bp, Artificial
  probe
  misc_feature (1)..(25): SEQ ID NO: 1617; WAN024D8S; Start 203; Stop 227
tagaccaactattttgggaggaaga

SEQ ID NO: 299784 - DNA, 25 bp, Artificial
  probe
  misc_feature (1)..(25): SEQ ID NO: 1617; WAN024D8S; Start 196; Stop 220
aaaaccctagaccaactattttggg

SEQ ID NO: 299785 - DNA, 25 bp, Artificial
  probe
  misc_feature (1)..(25): SEQ ID NO: 1617; WAN024D8S; Start 205; Stop 229
gaccaactattttgggaggaagaag

SEQ ID NO: 299786 - DNA, 25 bp, Artificial
  probe
  misc_feature (1)..(25): SEQ ID NO: 1617; WAN024D8S; Start 206; Stop 230
accaactattttgggaggaagaaga

SEQ ID NO: 299787 - DNA, 25 bp, Artificial
  probe
  misc_feature (1)..(25): SEQ ID NO: 1617; WAN024D8S; Start 204; Stop 228
agaccaactattttgggaggaagaa

SEQ ID NO: 299788 - DNA, 25 bp, Artificial
  probe
  misc_feature (1)..(25): SEQ ID NO: 1617; WAN024D8S; Start 197; Stop 221
aaaccctagaccaactattttggga

SEQ ID NO: 299789 - DNA, 25 bp, Artificial
  probe
  misc_feature (1)..(25): SEQ ID NO: 1617; WAN024D8S; Start 43; Stop 67
ttaaaattaaaattagctcgggtag

SEQ ID NO: 299790 - DNA, 25 bp, Artificial
  probe
  misc_feature (1)..(25): SEQ ID NO: 1617; WAN024D8S; Start 201; Stop 225
cctagaccaactattttgggaggaa

SEQ ID NO: 299791 - DNA, 25 bp, Artificial
  probe
  misc_feature (1)..(25): SEQ ID NO: 1617; WAN024D8S; Start 198; Stop 222
aaccctagaccaactattttgggag

SEQ ID NO: 299792 - DNA, 25 bp, Artificial
  probe
  misc_feature (1)..(25): SEQ ID NO: 1618; WAN024FXV; Start 242; Stop 266
atgagattatcagcgaatccttgac

SEQ ID NO: 299793 - DNA, 25 bp, Artificial
  probe
  misc_feature (1)..(25): SEQ ID NO: 1618; WAN024FXV; Start 535; Stop 559
atcaacaaatctgctcctttctacc

SEQ ID NO: 299794 - DNA, 25 bp, Artificial
  probe
  misc_feature (1)..(25): SEQ ID NO: 1618; WAN024FXV; Start 241; Stop 265
catgagattatcagcgaatccttga

SEQ ID NO: 299795 - DNA, 25 bp, Artificial
  probe
  misc_feature (1)..(25): SEQ ID NO: 1618; WAN024FXV; Start 537; Stop 561
caacaaatctgctcctttctacctc

SEQ ID NO: 299796 - DNA, 25 bp, Artificial
  probe
  misc_feature (1)..(25): SEQ ID NO: 1618; WAN024FXV; Start 536; Stop 560
tcaacaaatctgctcctttctacct

SEQ ID NO: 299797 - DNA, 25 bp, Artificial
  probe
  misc_feature (1)..(25): SEQ ID NO: 1618; WAN024FXV; Start 326; Stop 350
ccattaccaaggacggtatctatac

SEQ ID NO: 299798 - DNA, 25 bp, Artificial
  probe
  misc_feature (1)..(25): SEQ ID NO: 1618; WAN024FXV; Start 334; Stop 358
aaggacggtatctatactgcaaatc

SEQ ID NO: 299799 - DNA, 25 bp, Artificial
  probe
  misc_feature (1)..(25): SEQ ID NO: 1618; WAN024FXV; Start 538; Stop 562
aacaaatctgctcctttctacctcg

SEQ ID NO: 299800 - DNA, 25 bp, Artificial
  probe
  misc_feature (1)..(25): SEQ ID NO: 1618; WAN024FXV; Start 333; Stop 357
caaggacggtatctatactgcaaat

SEQ ID NO: 299801 - DNA, 25 bp, Artificial
  probe
  misc_feature (1)..(25): SEQ ID NO: 1618; WAN024FXV; Start 328; Stop 352
attaccaaggacggtatctatactg

SEQ ID NO: 299802 - DNA, 25 bp, Artificial
  probe
  misc_feature (1)..(25): SEQ ID NO: 1618; WAN024FXV; Start 327; Stop 351
cattaccaaggacggtatctatact

SEQ ID NO: 299803 - DNA, 25 bp, Artificial
  probe
  misc_feature (1)..(25): SEQ ID NO: 1618; WAN024FXV; Start 329; Stop 353
ttaccaaggacggtatctatactgc

SEQ ID NO: 299804 - DNA, 25 bp, Artificial
  probe
  misc_feature (1)..(25): SEQ ID NO: 1618; WAN024FXV; Start 325; Stop 349
gccattaccaaggacggtatctata

SEQ ID NO: 299805 - DNA, 25 bp, Artificial
  probe
  misc_feature (1)..(25): SEQ ID NO: 1618; WAN024FXV; Start 335; Stop 359
aggacggtatctatactgcaaatcg

SEQ ID NO: 299806 - DNA, 25 bp, Artificial
  probe
  misc_feature (1)..(25): SEQ ID NO: 1618; WAN024FXV; Start 332; Stop 356
ccaaggacggtatctatactgcaaa

SEQ ID NO: 299807 - DNA, 25 bp, Artificial
  probe
  misc_feature (1)..(25): SEQ ID NO: 1618; WAN024FXV; Start 541; Stop 565
aaatctgctcctttctacctcgaac

SEQ ID NO: 299808 - DNA, 25 bp, Artificial
  probe
  misc_feature (1)..(25): SEQ ID NO: 1618; WAN024FXV; Start 540; Stop 564
caaatctgctcctttctacctcgaa

SEQ ID NO: 299809 - DNA, 25 bp, Artificial
  probe
  misc_feature (1)..(25): SEQ ID NO: 1618; WAN024FXV; Start 331; Stop 355
accaaggacggtatctatactgcaa

SEQ ID NO: 299810 - DNA, 25 bp, Artificial
  probe
  misc_feature (1)..(25): SEQ ID NO: 1618; WAN024FXV; Start 542; Stop 566
aatctgctcctttctacctcgaact

SEQ ID NO: 299811 - DNA, 25 bp, Artificial
  probe
  misc_feature (1)..(25): SEQ ID NO: 1618; WAN024FXV; Start 324; Stop 348
tgccattaccaaggacggtatctat

SEQ ID NO: 299812 - DNA, 25 bp, Artificial
  probe
  misc_feature (1)..(25): SEQ ID NO: 1618; WAN024FXV; Start 323; Stop 347
atgccattaccaaggacggtatcta

SEQ ID NO: 299813 - DNA, 25 bp, Artificial
  probe
  misc_feature (1)..(25): SEQ ID NO: 1618; WAN024FXV; Start 330; Stop 354
taccaaggacggtatctatactgca

SEQ ID NO: 299814 - DNA, 25 bp, Artificial
  probe
  misc_feature (1)..(25): SEQ ID NO: 1618; WAN024FXV; Start 547; Stop 571
gctcctttctacctcgaactcctta

SEQ ID NO: 299815 - DNA, 25 bp, Artificial
  probe
  misc_feature (1)..(25): SEQ ID NO: 1618; WAN024FXV; Start 539; Stop 563
acaaatctgctcctttctacctcga

SEQ ID NO: 299816 - DNA, 25 bp, Artificial
  probe
  misc_feature (1)..(25): SEQ ID NO: 1618; WAN024FXV; Start 343; Stop 367
atctatactgcaaatcgcaatatcg

SEQ ID NO: 299817 - DNA, 25 bp, Artificial
  probe
  misc_feature (1)..(25): SEQ ID NO: 1618; WAN024FXV; Start 346; Stop 370
tatactgcaaatcgcaatatcggaa

SEQ ID NO: 299818 - DNA, 25 bp, Artificial
  probe
  misc_feature (1)..(25): SEQ ID NO: 1618; WAN024FXV; Start 340; Stop 364
ggtatctatactgcaaatcgcaata

SEQ ID NO: 299819 - DNA, 25 bp, Artificial
  probe
  misc_feature (1)..(25): SEQ ID NO: 1618; WAN024FXV; Start 345; Stop 369
ctatactgcaaatcgcaatatcgga

SEQ ID NO: 299820 - DNA, 25 bp, Artificial
  probe
  misc_feature (1)..(25): SEQ ID NO: 1618; WAN024FXV; Start 344; Stop 368
tctatactgcaaatcgcaatatcgg

SEQ ID NO: 299821 - DNA, 25 bp, Artificial
  probe
  misc_feature (1)..(25): SEQ ID NO: 1618; WAN024FXV; Start 336; Stop 360
ggacggtatctatactgcaaatcgc

SEQ ID NO: 299822 - DNA, 25 bp, Artificial
  probe
  misc_feature (1)..(25): SEQ ID NO: 1618; WAN024FXV; Start 339; Stop 363
cggtatctatactgcaaatcgcaat

SEQ ID NO: 299823 - DNA, 25 bp, Artificial
  probe
  misc_feature (1)..(25): SEQ ID NO: 1618; WAN024FXV; Start 543; Stop 567
atctgctcctttctacctcgaactc

SEQ ID NO: 299824 - DNA, 25 bp, Artificial
  probe
  misc_feature (1)..(25): SEQ ID NO: 1618; WAN024FXV; Start 372; Stop 396
atacactgtacacgaatcaaccctc

SEQ ID NO: 299825 - DNA, 25 bp, Artificial
  probe
  misc_feature (1)..(25): SEQ ID NO: 1619; WAN024FYZ; Start 570; Stop 594
actattaactggcgaactacttact

SEQ ID NO: 299826 - DNA, 25 bp, Artificial
  probe
  misc_feature (1)..(25): SEQ ID NO: 1619; WAN024FYZ; Start 573; Stop 597
attaactggcgaactacttactcta

SEQ ID NO: 299827 - DNA, 25 bp, Artificial
  probe
  misc_feature (1)..(25): SEQ ID NO: 1619; WAN024FYZ; Start 572; Stop 596
tattaactggcgaactacttactct

SEQ ID NO: 299828 - DNA, 25 bp, Artificial
  probe
  misc_feature (1)..(25): SEQ ID NO: 1619; WAN024FYZ; Start 574; Stop 598
ttaactggcgaactacttactctag

SEQ ID NO: 299829 - DNA, 25 bp, Artificial
  probe
  misc_feature (1)..(25): SEQ ID NO: 1619; WAN024FYZ; Start 571; Stop 595
ctattaactggcgaactacttactc

SEQ ID NO: 299830 - DNA, 25 bp, Artificial
  probe
  misc_feature (1)..(25): SEQ ID NO: 1619; WAN024FYZ; Start 569; Stop 593
aactattaactggcgaactacttac

SEQ ID NO: 299831 - DNA, 25 bp, Artificial
  probe
  misc_feature (1)..(25): SEQ ID NO: 1619; WAN024FYZ; Start 336; Stop 360
ggatggcatgacagtaagagaatta

SEQ ID NO: 299832 - DNA, 25 bp, Artificial
  probe
  misc_feature (1)..(25): SEQ ID NO: 1619; WAN024FYZ; Start 575; Stop 599
taactggcgaactacttactctagc

SEQ ID NO: 299833 - DNA, 25 bp, Artificial
  probe
  misc_feature (1)..(25): SEQ ID NO: 1619; WAN024FYZ; Start 606; Stop 630
gcaacaattaatagactggatggag

SEQ ID NO: 299834 - DNA, 25 bp, Artificial
  probe
  misc_feature (1)..(25): SEQ ID NO: 1619; WAN024FYZ; Start 608; Stop 632
aacaattaatagactggatggaggc

SEQ ID NO: 299835 - DNA, 25 bp, Artificial
  probe
  misc_feature (1)..(25): SEQ ID NO: 1619; WAN024FYZ; Start 338; Stop 362
atggcatgacagtaagagaattatg

SEQ ID NO: 299836 - DNA, 25 bp, Artificial
  probe
  misc_feature (1)..(25): SEQ ID NO: 1619; WAN024FYZ; Start 337; Stop 361
gatggcatgacagtaagagaattat

SEQ ID NO: 299837 - DNA, 25 bp, Artificial
  probe
  misc_feature (1)..(25): SEQ ID NO: 1619; WAN024FYZ; Start 607; Stop 631
caacaattaatagactggatggagg

SEQ ID NO: 299838 - DNA, 25 bp, Artificial
  probe
  misc_feature (1)..(25): SEQ ID NO: 1619; WAN024FYZ; Start 605; Stop 629
ggcaacaattaatagactggatgga

SEQ ID NO: 299839 - DNA, 25 bp, Artificial
  probe
  misc_feature (1)..(25): SEQ ID NO: 1619; WAN024FYZ; Start 614; Stop 638
taatagactggatggaggcggataa

SEQ ID NO: 299840 - DNA, 25 bp, Artificial
  probe
  misc_feature (1)..(25): SEQ ID NO: 1619; WAN024FYZ; Start 613; Stop 637
ttaatagactggatggaggcggata

SEQ ID NO: 299841 - DNA, 25 bp, Artificial
  probe
  misc_feature (1)..(25): SEQ ID NO: 1619; WAN024FYZ; Start 814; Stop 838
aatagacagatcgctgagataggtg

SEQ ID NO: 299842 - DNA, 25 bp, Artificial
  probe
  misc_feature (1)..(25): SEQ ID NO: 1619; WAN024FYZ; Start 345; Stop 369
gacagtaagagaattatgcagtgct

SEQ ID NO: 299843 - DNA, 25 bp, Artificial
  probe
  misc_feature (1)..(25): SEQ ID NO: 1619; WAN024FYZ; Start 567; Stop 591
caaactattaactggcgaactactt

SEQ ID NO: 299844 - DNA, 25 bp, Artificial
  probe
  misc_feature (1)..(25): SEQ ID NO: 1619; WAN024FYZ; Start 604; Stop 628
cggcaacaattaatagactggatgg

SEQ ID NO: 299845 - DNA, 25 bp, Artificial
  probe
  misc_feature (1)..(25): SEQ ID NO: 1619; WAN024FYZ; Start 344; Stop 368
tgacagtaagagaattatgcagtgc

SEQ ID NO: 299846 - DNA, 25 bp, Artificial
  probe
  misc_feature (1)..(25): SEQ ID NO: 1619; WAN024FYZ; Start 343; Stop 367
atgacagtaagagaattatgcagtg

SEQ ID NO: 299847 - DNA, 25 bp, Artificial
  probe
  misc_feature (1)..(25): SEQ ID NO: 1619; WAN024FYZ; Start 793; Stop 817
caggcaactatggatgaacgaaata

SEQ ID NO: 299848 - DNA, 25 bp, Artificial
  probe
  misc_feature (1)..(25): SEQ ID NO: 1619; WAN024FYZ; Start 342; Stop 366
catgacagtaagagaattatgcagt

SEQ ID NO: 299849 - DNA, 25 bp, Artificial
  probe
  misc_feature (1)..(25): SEQ ID NO: 1619; WAN024FYZ; Start 566; Stop 590
gcaaactattaactggcgaactact

SEQ ID NO: 299850 - DNA, 25 bp, Artificial
  probe
  misc_feature (1)..(25): SEQ ID NO: 1619; WAN024FYZ; Start 368; Stop 392
ctgccataaccatgagtgataacac

SEQ ID NO: 299851 - DNA, 25 bp, Artificial
  probe
  misc_feature (1)..(25): SEQ ID NO: 1619; WAN024FYZ; Start 609; Stop 633
acaattaatagactggatggaggcg

SEQ ID NO: 299852 - DNA, 25 bp, Artificial
  probe
  misc_feature (1)..(25): SEQ ID NO: 1619; WAN024FYZ; Start 279; Stop 303
acactattctcagaatgacttggtt

SEQ ID NO: 299853 - DNA, 25 bp, Artificial
  probe
  misc_feature (1)..(25): SEQ ID NO: 1619; WAN024FYZ; Start 280; Stop 304
cactattctcagaatgacttggttg

SEQ ID NO: 299854 - DNA, 25 bp, Artificial
  probe
  misc_feature (1)..(25): SEQ ID NO: 1619; WAN024FYZ; Start 281; Stop 305
actattctcagaatgacttggttga

SEQ ID NO: 299855 - DNA, 25 bp, Artificial
  probe
  misc_feature (1)..(25): SEQ ID NO: 1619; WAN024FYZ; Start 274; Stop 298
cgcatacactattctcagaatgact

SEQ ID NO: 299856 - DNA, 25 bp, Artificial
  probe
  misc_feature (1)..(25): SEQ ID NO: 1619; WAN024FYZ; Start 278; Stop 302
tacactattctcagaatgacttggt

SEQ ID NO: 299857 - DNA, 25 bp, Artificial
  probe
  misc_feature (1)..(25): SEQ ID NO: 1619; WAN024FYZ; Start 796; Stop 820
gcaactatggatgaacgaaatagac

SEQ ID NO: 299858 - DNA, 25 bp, Artificial
  probe
  misc_feature (1)..(25): SEQ ID NO: 1620; WAN024EYF; Start 1; Stop 25
atgagtattcgagtaattattgccg

SEQ ID NO: 299859 - DNA, 25 bp, Artificial
  probe
  misc_feature (1)..(25): SEQ ID NO: 1620; WAN024EYF; Start 738; Stop 762
gcttgtctatggattagaacactta

SEQ ID NO: 299860 - DNA, 25 bp, Artificial
  probe
  misc_feature (1)..(25): SEQ ID NO: 1620; WAN024EYF; Start 711; Stop 735
aattaaagaagttgtcaagcgtcat

SEQ ID NO: 299861 - DNA, 25 bp, Artificial
  probe
  misc_feature (1)..(25): SEQ ID NO: 1620; WAN024EYF; Start 710; Stop 734
gaattaaagaagttgtcaagcgtca

SEQ ID NO: 299862 - DNA, 25 bp, Artificial
  probe
  misc_feature (1)..(25): SEQ ID NO: 1620; WAN024EYF; Start 709; Stop 733
ggaattaaagaagttgtcaagcgtc

SEQ ID NO: 299863 - DNA, 25 bp, Artificial
  probe
  misc_feature (1)..(25): SEQ ID NO: 1620; WAN024EYF; Start 706; Stop 730
ttgggaattaaagaagttgtcaagc

SEQ ID NO: 299864 - DNA, 25 bp, Artificial
  probe
  misc_feature (1)..(25): SEQ ID NO: 1620; WAN024EYF; Start 736; Stop 760
gagcttgtctatggattagaacact

SEQ ID NO: 299865 - DNA, 25 bp, Artificial
  probe
  misc_feature (1)..(25): SEQ ID NO: 1620; WAN024EYF; Start 737; Stop 761
agcttgtctatggattagaacactt

SEQ ID NO: 299866 - DNA, 25 bp, Artificial
  probe
  misc_feature (1)..(25): SEQ ID NO: 1620; WAN024EYF; Start 735; Stop 759
tgagcttgtctatggattagaacac

SEQ ID NO: 299867 - DNA, 25 bp, Artificial
  probe
  misc_feature (1)..(25): SEQ ID NO: 1620; WAN024EYF; Start 734; Stop 758
atgagcttgtctatggattagaaca

SEQ ID NO: 299868 - DNA, 25 bp, Artificial
  probe
  misc_feature (1)..(25): SEQ ID NO: 1620; WAN024EYF; Start 733; Stop 757
catgagcttgtctatggattagaac

SEQ ID NO: 299869 - DNA, 25 bp, Artificial
  probe
  misc_feature (1)..(25): SEQ ID NO: 1620; WAN024EYF; Start 712; Stop 736
attaaagaagttgtcaagcgtcatg

SEQ ID NO: 299870 - DNA, 25 bp, Artificial
  probe
  misc_feature (1)..(25): SEQ ID NO: 1620; WAN024EYF; Start 665; Stop 689
atgactcctatgatcgcatctcctt

SEQ ID NO: 299871 - DNA, 25 bp, Artificial
  probe
  misc_feature (1)..(25): SEQ ID NO: 1620; WAN024EYF; Start 694; Stop 718
acaggagtcaatttgggaattaaag

SEQ ID NO: 299872 - DNA, 25 bp, Artificial
  probe
  misc_feature (1)..(25): SEQ ID NO: 1620; WAN024EYF; Start 695; Stop 719
caggagtcaatttgggaattaaaga

SEQ ID NO: 299873 - DNA, 25 bp, Artificial
  probe
  misc_feature (1)..(25): SEQ ID NO: 1620; WAN024EYF; Start 693; Stop 717
gacaggagtcaatttgggaattaaa

SEQ ID NO: 299874 - DNA, 25 bp, Artificial
  probe
  misc_feature (1)..(25): SEQ ID NO: 1620; WAN024EYF; Start 4; Stop 28
agtattcgagtaattattgccggtt

SEQ ID NO: 299875 - DNA, 25 bp, Artificial
  probe
  misc_feature (1)..(25): SEQ ID NO: 1620; WAN024EYF; Start 708; Stop 732
gggaattaaagaagttgtcaagcgt

SEQ ID NO: 299876 - DNA, 25 bp, Artificial
  probe
  misc_feature (1)..(25): SEQ ID NO: 1620; WAN024EYF; Start 707; Stop 731
tgggaattaaagaagttgtcaagcg

SEQ ID NO: 299877 - DNA, 25 bp, Artificial
  probe
  misc_feature (1)..(25): SEQ ID NO: 1620; WAN024EYF; Start 3; Stop 27
gagtattcgagtaattattgccggt

SEQ ID NO: 299878 - DNA, 25 bp, Artificial
  probe
  misc_feature (1)..(25): SEQ ID NO: 1620; WAN024EYF; Start 2; Stop 26
tgagtattcgagtaattattgccgg

SEQ ID NO: 299879 - DNA, 25 bp, Artificial
  probe
  misc_feature (1)..(25): SEQ ID NO: 1620; WAN024EYF; Start 705; Stop 729
tttgggaattaaagaagttgtcaag

SEQ ID NO: 299880 - DNA, 25 bp, Artificial
  probe
  misc_feature (1)..(25): SEQ ID NO: 1620; WAN024EYF; Start 696; Stop 720
aggagtcaatttgggaattaaagaa

SEQ ID NO: 299881 - DNA, 25 bp, Artificial
  probe
  misc_feature (1)..(25): SEQ ID NO: 1620; WAN024EYF; Start 697; Stop 721
ggagtcaatttgggaattaaagaag

SEQ ID NO: 299882 - DNA, 25 bp, Artificial
  probe
  misc_feature (1)..(25): SEQ ID NO: 1620; WAN024EYF; Start 666; Stop 690
tgactcctatgatcgcatctccttc

SEQ ID NO: 299883 - DNA, 25 bp, Artificial
  probe
  misc_feature (1)..(25): SEQ ID NO: 1620; WAN024EYF; Start 405; Stop 429
tttcccaaatgtggagattattgag

SEQ ID NO: 299884 - DNA, 25 bp, Artificial
  probe
  misc_feature (1)..(25): SEQ ID NO: 1620; WAN024EYF; Start 667; Stop 691
gactcctatgatcgcatctccttca

SEQ ID NO: 299885 - DNA, 25 bp, Artificial
  probe
  misc_feature (1)..(25): SEQ ID NO: 1620; WAN024EYF; Start 704; Stop 728
atttgggaattaaagaagttgtcaa

SEQ ID NO: 299886 - DNA, 25 bp, Artificial
  probe
  misc_feature (1)..(25): SEQ ID NO: 1620; WAN024EYF; Start 664; Stop 688
catgactcctatgatcgcatctcct

SEQ ID NO: 299887 - DNA, 25 bp, Artificial
  probe
  misc_feature (1)..(25): SEQ ID NO: 1620; WAN024EYF; Start 406; Stop 430
ttcccaaatgtggagattattgagc

SEQ ID NO: 299888 - DNA, 25 bp, Artificial
  probe
  misc_feature (1)..(25): SEQ ID NO: 1620; WAN024EYF; Start 404; Stop 428
atttcccaaatgtggagattattga

SEQ ID NO: 299889 - DNA, 25 bp, Artificial
  probe
  misc_feature (1)..(25): SEQ ID NO: 1620; WAN024EYF; Start 698; Stop 722
gagtcaatttgggaattaaagaagt

SEQ ID NO: 299890 - DNA, 25 bp, Artificial
  probe
  misc_feature (1)..(25): SEQ ID NO: 1620; WAN024EYF; Start 730; Stop 754
cgtcatgagcttgtctatggattag

SEQ ID NO: 299891 - DNA, 25 bp, Artificial
  probe
  misc_feature (1)..(25): SEQ ID NO: 1621; WAN024DCN; Start 77; Stop 101
aagaattaccagaagaagacacaga

SEQ ID NO: 299892 - DNA, 25 bp, Artificial
  probe
  misc_feature (1)..(25): SEQ ID NO: 1621; WAN024DCN; Start 78; Stop 102
agaattaccagaagaagacacagat

SEQ ID NO: 299893 - DNA, 25 bp, Artificial
  probe
  misc_feature (1)..(25): SEQ ID NO: 1621; WAN024DCN; Start 45; Stop 69
attatctcgccaagcaatcaataac

SEQ ID NO: 299894 - DNA, 25 bp, Artificial
  probe
  misc_feature (1)..(25): SEQ ID NO: 1621; WAN024DCN; Start 220; Stop 244
ctgatggagattctagtggatgaga

SEQ ID NO: 299895 - DNA, 25 bp, Artificial
  probe
  misc_feature (1)..(25): SEQ ID NO: 1621; WAN024DCN; Start 217; Stop 241
gaactgatggagattctagtggatg

SEQ ID NO: 299896 - DNA, 25 bp, Artificial
  probe
  misc_feature (1)..(25): SEQ ID NO: 1621; WAN024DCN; Start 218; Stop 242
aactgatggagattctagtggatga

SEQ ID NO: 299897 - DNA, 25 bp, Artificial
  probe
  misc_feature (1)..(25): SEQ ID NO: 1621; WAN024DCN; Start 216; Stop 240
tgaactgatggagattctagtggat

SEQ ID NO: 299898 - DNA, 25 bp, Artificial
  probe
  misc_feature (1)..(25): SEQ ID NO: 1621; WAN024DCN; Start 46; Stop 70
ttatctcgccaagcaatcaataacc

SEQ ID NO: 299899 - DNA, 25 bp, Artificial
  probe
  misc_feature (1)..(25): SEQ ID NO: 1621; WAN024DCN; Start 79; Stop 103
gaattaccagaagaagacacagata

SEQ ID NO: 299900 - DNA, 25 bp, Artificial
  probe
  misc_feature (1)..(25): SEQ ID NO: 1621; WAN024DCN; Start 38; Stop 62
tcttaggattatctcgccaagcaat

SEQ ID NO: 299901 - DNA, 25 bp, Artificial
  probe
  misc_feature (1)..(25): SEQ ID NO: 1621; WAN024DCN; Start 219; Stop 243
actgatggagattctagtggatgag

SEQ ID NO: 299902 - DNA, 25 bp, Artificial
  probe
  misc_feature (1)..(25): SEQ ID NO: 1621; WAN024DCN; Start 215; Stop 239
gtgaactgatggagattctagtgga

SEQ ID NO: 299903 - DNA, 25 bp, Artificial
  probe
  misc_feature (1)..(25): SEQ ID NO: 1621; WAN024DCN; Start 80; Stop 104
aattaccagaagaagacacagataa

SEQ ID NO: 299904 - DNA, 25 bp, Artificial
  probe
  misc_feature (1)..(25): SEQ ID NO: 1621; WAN024DCN; Start 44; Stop 68
gattatctcgccaagcaatcaataa

SEQ ID NO: 299905 - DNA, 25 bp, Artificial
  probe
  misc_feature (1)..(25): SEQ ID NO: 1621; WAN024DCN; Start 125; Stop 149
ttgttaccagaagtggcttgattaa

SEQ ID NO: 299906 - DNA, 25 bp, Artificial
  probe
  misc_feature (1)..(25): SEQ ID NO: 1621; WAN024DCN; Start 126; Stop 150
tgttaccagaagtggcttgattaag

SEQ ID NO: 299907 - DNA, 25 bp, Artificial
  probe
  misc_feature (1)..(25): SEQ ID NO: 1621; WAN024DCN; Start 34; Stop 58
gaggtcttaggattatctcgccaag

SEQ ID NO: 299908 - DNA, 25 bp, Artificial
  probe
  misc_feature (1)..(25): SEQ ID NO: 1621; WAN024DCN; Start 58; Stop 82
gcaatcaataaccgtgtcaaagaat

SEQ ID NO: 299909 - DNA, 25 bp, Artificial
  probe
  misc_feature (1)..(25): SEQ ID NO: 1621; WAN024DCN; Start 37; Stop 61
gtcttaggattatctcgccaagcaa

SEQ ID NO: 299910 - DNA, 25 bp, Artificial
  probe
  misc_feature (1)..(25): SEQ ID NO: 1621; WAN024DCN; Start 124; Stop 148
gttgttaccagaagtggcttgatta

SEQ ID NO: 299911 - DNA, 25 bp, Artificial
  probe
  misc_feature (1)..(25): SEQ ID NO: 1621; WAN024DCN; Start 356; Stop 380
aacaattagatcagcaacaacaatt

SEQ ID NO: 299912 - DNA, 25 bp, Artificial
  probe
  misc_feature (1)..(25): SEQ ID NO: 1621; WAN024DCN; Start 70; Stop 94
cgtgtcaaagaattaccagaagaag

SEQ ID NO: 299913 - DNA, 25 bp, Artificial
  probe
  misc_feature (1)..(25): SEQ ID NO: 1621; WAN024DCN; Start 65; Stop 89
ataaccgtgtcaaagaattaccaga

SEQ ID NO: 299914 - DNA, 25 bp, Artificial
  probe
  misc_feature (1)..(25): SEQ ID NO: 1621; WAN024DCN; Start 63; Stop 87
caataaccgtgtcaaagaattacca

SEQ ID NO: 299915 - DNA, 25 bp, Artificial
  probe
  misc_feature (1)..(25): SEQ ID NO: 1621; WAN024DCN; Start 43; Stop 67
ggattatctcgccaagcaatcaata

SEQ ID NO: 299916 - DNA, 25 bp, Artificial
  probe
  misc_feature (1)..(25): SEQ ID NO: 1621; WAN024DCN; Start 66; Stop 90
taaccgtgtcaaagaattaccagaa

SEQ ID NO: 299917 - DNA, 25 bp, Artificial
  probe
  misc_feature (1)..(25): SEQ ID NO: 1621; WAN024DCN; Start 64; Stop 88
aataaccgtgtcaaagaattaccag

SEQ ID NO: 299918 - DNA, 25 bp, Artificial
  probe
  misc_feature (1)..(25): SEQ ID NO: 1621; WAN024DCN; Start 62; Stop 86
tcaataaccgtgtcaaagaattacc

SEQ ID NO: 299919 - DNA, 25 bp, Artificial
  probe
  misc_feature (1)..(25): SEQ ID NO: 1621; WAN024DCN; Start 27; Stop 51
gattgcagaggtcttaggattatct

SEQ ID NO: 299920 - DNA, 25 bp, Artificial
  probe
  misc_feature (1)..(25): SEQ ID NO: 1621; WAN024DCN; Start 26; Stop 50
agattgcagaggtcttaggattatc

SEQ ID NO: 299921 - DNA, 25 bp, Artificial
  probe
  misc_feature (1)..(25): SEQ ID NO: 1621; WAN024DCN; Start 25; Stop 49
gagattgcagaggtcttaggattat

SEQ ID NO: 299922 - DNA, 25 bp, Artificial
  probe
  misc_feature (1)..(25): SEQ ID NO: 1621; WAN024DCN; Start 33; Stop 57
agaggtcttaggattatctcgccaa

SEQ ID NO: 299923 - DNA, 25 bp, Artificial
  probe
  misc_feature (1)..(25): SEQ ID NO: 1621; WAN024DCN; Start 24; Stop 48
tgagattgcagaggtcttaggatta

SEQ ID NO: 299924 - DNA, 25 bp, Artificial
  probe
  misc_feature (1)..(25): SEQ ID NO: 1622; WAN024FX6; Start 29; Stop 53
cgatgatgaacattgcttacaagaa

SEQ ID NO: 299925 - DNA, 25 bp, Artificial
  probe
  misc_feature (1)..(25): SEQ ID NO: 1622; WAN024FX6; Start 35; Stop 59
tgaacattgcttacaagaatagaga

SEQ ID NO: 299926 - DNA, 25 bp, Artificial
  probe
  misc_feature (1)..(25): SEQ ID NO: 1622; WAN024FX6; Start 30; Stop 54
gatgatgaacattgcttacaagaat

SEQ ID NO: 299927 - DNA, 25 bp, Artificial
  probe
  misc_feature (1)..(25): SEQ ID NO: 1622; WAN024FX6; Start 248; Stop 272
tagatgaattaatagccgtcaggag

SEQ ID NO: 299928 - DNA, 25 bp, Artificial
  probe
  misc_feature (1)..(25): SEQ ID NO: 1622; WAN024FX6; Start 32; Stop 56
tgatgaacattgcttacaagaatag

SEQ ID NO: 299929 - DNA, 25 bp, Artificial
  probe
  misc_feature (1)..(25): SEQ ID NO: 1622; WAN024FX6; Start 247; Stop 271
atagatgaattaatagccgtcagga

SEQ ID NO: 299930 - DNA, 25 bp, Artificial
  probe
  misc_feature (1)..(25): SEQ ID NO: 1622; WAN024FX6; Start 28; Stop 52
tcgatgatgaacattgcttacaaga

SEQ ID NO: 299931 - DNA, 25 bp, Artificial
  probe
  misc_feature (1)..(25): SEQ ID NO: 1622; WAN024FX6; Start 246; Stop 270
aatagatgaattaatagccgtcagg

SEQ ID NO: 299932 - DNA, 25 bp, Artificial
  probe
  misc_feature (1)..(25): SEQ ID NO: 1622; WAN024FX6; Start 34; Stop 58
atgaacattgcttacaagaatagag

SEQ ID NO: 299933 - DNA, 25 bp, Artificial
  probe
  misc_feature (1)..(25): SEQ ID NO: 1622; WAN024FX6; Start 33; Stop 57
gatgaacattgcttacaagaataga

SEQ ID NO: 299934 - DNA, 25 bp, Artificial
  probe
  misc_feature (1)..(25): SEQ ID NO: 1622; WAN024FX6; Start 36; Stop 60
gaacattgcttacaagaatagagat

SEQ ID NO: 299935 - DNA, 25 bp, Artificial
  probe
  misc_feature (1)..(25): SEQ ID NO: 1622; WAN024FX6; Start 31; Stop 55
atgatgaacattgcttacaagaata

SEQ ID NO: 299936 - DNA, 25 bp, Artificial
  probe
  misc_feature (1)..(25): SEQ ID NO: 1622; WAN024FX6; Start 242; Stop 266
agagaatagatgaattaatagccgt

SEQ ID NO: 299937 - DNA, 25 bp, Artificial
  probe
  misc_feature (1)..(25): SEQ ID NO: 1622; WAN024FX6; Start 244; Stop 268
agaatagatgaattaatagccgtca

SEQ ID NO: 299938 - DNA, 25 bp, Artificial
  probe
  misc_feature (1)..(25): SEQ ID NO: 1622; WAN024FX6; Start 37; Stop 61
aacattgcttacaagaatagagatt

SEQ ID NO: 299939 - DNA, 25 bp, Artificial
  probe
  misc_feature (1)..(25): SEQ ID NO: 1622; WAN024FX6; Start 243; Stop 267
gagaatagatgaattaatagccgtc

SEQ ID NO: 299940 - DNA, 25 bp, Artificial
  probe
  misc_feature (1)..(25): SEQ ID NO: 1622; WAN024FX6; Start 249; Stop 273
agatgaattaatagccgtcaggagc

SEQ ID NO: 299941 - DNA, 25 bp, Artificial
  probe
  misc_feature (1)..(25): SEQ ID NO: 1622; WAN024FX6; Start 245; Stop 269
gaatagatgaattaatagccgtcag

SEQ ID NO: 299942 - DNA, 25 bp, Artificial
  probe
  misc_feature (1)..(25): SEQ ID NO: 1622; WAN024FX6; Start 301; Stop 325
acccttagaattacaggaaaccaaa

SEQ ID NO: 299943 - DNA, 25 bp, Artificial
  probe
  misc_feature (1)..(25): SEQ ID NO: 1622; WAN024FX6; Start 300; Stop 324
aacccttagaattacaggaaaccaa

SEQ ID NO: 299944 - DNA, 25 bp, Artificial
  probe
  misc_feature (1)..(25): SEQ ID NO: 1622; WAN024FX6; Start 299; Stop 323
aaacccttagaattacaggaaacca

SEQ ID NO: 299945 - DNA, 25 bp, Artificial
  probe
  misc_feature (1)..(25): SEQ ID NO: 1622; WAN024FX6; Start 306; Stop 330
tagaattacaggaaaccaaagatga

SEQ ID NO: 299946 - DNA, 25 bp, Artificial
  probe
  misc_feature (1)..(25): SEQ ID NO: 1622; WAN024FX6; Start 302; Stop 326
cccttagaattacaggaaaccaaag

SEQ ID NO: 299947 - DNA, 25 bp, Artificial
  probe
  misc_feature (1)..(25): SEQ ID NO: 1622; WAN024FX6; Start 42; Stop 66
tgcttacaagaatagagatttgagt

SEQ ID NO: 299948 - DNA, 25 bp, Artificial
  probe
  misc_feature (1)..(25): SEQ ID NO: 1622; WAN024FX6; Start 43; Stop 67
gcttacaagaatagagatttgagtg

SEQ ID NO: 299949 - DNA, 25 bp, Artificial
  probe
  misc_feature (1)..(25): SEQ ID NO: 1622; WAN024FX6; Start 303; Stop 327
ccttagaattacaggaaaccaaaga

SEQ ID NO: 299950 - DNA, 25 bp, Artificial
  probe
  misc_feature (1)..(25): SEQ ID NO: 1622; WAN024FX6; Start 47; Stop 71
acaagaatagagatttgagtgatga

SEQ ID NO: 299951 - DNA, 25 bp, Artificial
  probe
  misc_feature (1)..(25): SEQ ID NO: 1622; WAN024FX6; Start 88; Stop 112
gctcatcagtttagagataaagaga

SEQ ID NO: 299952 - DNA, 25 bp, Artificial
  probe
  misc_feature (1)..(25): SEQ ID NO: 1622; WAN024FX6; Start 50; Stop 74
agaatagagatttgagtgatgaaga

SEQ ID NO: 299953 - DNA, 25 bp, Artificial
  probe
  misc_feature (1)..(25): SEQ ID NO: 1622; WAN024FX6; Start 305; Stop 329
ttagaattacaggaaaccaaagatg

SEQ ID NO: 299954 - DNA, 25 bp, Artificial
  probe
  misc_feature (1)..(25): SEQ ID NO: 1622; WAN024FX6; Start 149; Stop 173
tttcttgtaaggttgttggaataaa

SEQ ID NO: 299955 - DNA, 25 bp, Artificial
  probe
  misc_feature (1)..(25): SEQ ID NO: 1622; WAN024FX6; Start 241; Stop 265
aagagaatagatgaattaatagccg

SEQ ID NO: 299956 - DNA, 25 bp, Artificial
  probe
  misc_feature (1)..(25): SEQ ID NO: 1622; WAN024FX6; Start 80; Stop 104
aagaagaagctcatcagtttagaga

SEQ ID NO: 299957 - DNA, 25 bp, Artificial
  probe
  misc_feature (1)..(25): SEQ ID NO: 1623; WAN024GCN; Start 409; Stop 433
ttggatgctaagattgacgaagtag

SEQ ID NO: 299958 - DNA, 25 bp, Artificial
  probe
  misc_feature (1)..(25): SEQ ID NO: 1623; WAN024GCN; Start 403; Stop 427
tataccttggatgctaagattgacg

SEQ ID NO: 299959 - DNA, 25 bp, Artificial
  probe
  misc_feature (1)..(25): SEQ ID NO: 1623; WAN024GCN; Start 1058; Stop 1082
cgattattggtgctaatggtattgg

SEQ ID NO: 299960 - DNA, 25 bp, Artificial
  probe
  misc_feature (1)..(25): SEQ ID NO: 1623; WAN024GCN; Start 408; Stop 432
cttggatgctaagattgacgaagta

SEQ ID NO: 299961 - DNA, 25 bp, Artificial
  probe
  misc_feature (1)..(25): SEQ ID NO: 1623; WAN024GCN; Start 848; Stop 872
caactcgtaatatggctatgtctcg

SEQ ID NO: 299962 - DNA, 25 bp, Artificial
  probe
  misc_feature (1)..(25): SEQ ID NO: 1623; WAN024GCN; Start 1057; Stop 1081
gcgattattggtgctaatggtattg

SEQ ID NO: 299963 - DNA, 25 bp, Artificial
  probe
  misc_feature (1)..(25): SEQ ID NO: 1623; WAN024GCN; Start 1056; Stop 1080
tgcgattattggtgctaatggtatt

SEQ ID NO: 299964 - DNA, 25 bp, Artificial
  probe
  misc_feature (1)..(25): SEQ ID NO: 1623; WAN024GCN; Start 1055; Stop 1079
ttgcgattattggtgctaatggtat

SEQ ID NO: 299965 - DNA, 25 bp, Artificial
  probe
  misc_feature (1)..(25): SEQ ID NO: 1623; WAN024GCN; Start 849; Stop 873
aactcgtaatatggctatgtctcgt

SEQ ID NO: 299966 - DNA, 25 bp, Artificial
  probe
  misc_feature (1)..(25): SEQ ID NO: 1623; WAN024GCN; Start 847; Stop 871
gcaactcgtaatatggctatgtctc

SEQ ID NO: 299967 - DNA, 25 bp, Artificial
  probe
  misc_feature (1)..(25): SEQ ID NO: 1623; WAN024GCN; Start 402; Stop 426
ctataccttggatgctaagattgac

SEQ ID NO: 299968 - DNA, 25 bp, Artificial
  probe
  misc_feature (1)..(25): SEQ ID NO: 1623; WAN024GCN; Start 852; Stop 876
tcgtaatatggctatgtctcgtcaa

SEQ ID NO: 299969 - DNA, 25 bp, Artificial
  probe
  misc_feature (1)..(25): SEQ ID NO: 1623; WAN024GCN; Start 295; Stop 319
gctcgtatcaatgacctctatatga

SEQ ID NO: 299970 - DNA, 25 bp, Artificial
  probe
  misc_feature (1)..(25): SEQ ID NO: 1623; WAN024GCN; Start 1059; Stop 1083
gattattggtgctaatggtattgga

SEQ ID NO: 299971 - DNA, 25 bp, Artificial
  probe
  misc_feature (1)..(25): SEQ ID NO: 1623; WAN024GCN; Start 401; Stop 425
tctataccttggatgctaagattga

SEQ ID NO: 299972 - DNA, 25 bp, Artificial
  probe
  misc_feature (1)..(25): SEQ ID NO: 1623; WAN024GCN; Start 723; Stop 747
tgactactaccagttccaagaagtt

SEQ ID NO: 299973 - DNA, 25 bp, Artificial
  probe
  misc_feature (1)..(25): SEQ ID NO: 1623; WAN024GCN; Start 851; Stop 875
ctcgtaatatggctatgtctcgtca

SEQ ID NO: 299974 - DNA, 25 bp, Artificial
  probe
  misc_feature (1)..(25): SEQ ID NO: 1623; WAN024GCN; Start 850; Stop 874
actcgtaatatggctatgtctcgtc

SEQ ID NO: 299975 - DNA, 25 bp, Artificial
  probe
  misc_feature (1)..(25): SEQ ID NO: 1623; WAN024GCN; Start 404; Stop 428
ataccttggatgctaagattgacga

SEQ ID NO: 299976 - DNA, 25 bp, Artificial
  probe
  misc_feature (1)..(25): SEQ ID NO: 1623; WAN024GCN; Start 1060; Stop 1084
attattggtgctaatggtattggaa

SEQ ID NO: 299977 - DNA, 25 bp, Artificial
  probe
  misc_feature (1)..(25): SEQ ID NO: 1623; WAN024GCN; Start 1054; Stop 1078
gttgcgattattggtgctaatggta

SEQ ID NO: 299978 - DNA, 25 bp, Artificial
  probe
  misc_feature (1)..(25): SEQ ID NO: 1623; WAN024GCN; Start 405; Stop 429
taccttggatgctaagattgacgaa

SEQ ID NO: 299979 - DNA, 25 bp, Artificial
  probe
  misc_feature (1)..(25): SEQ ID NO: 1623; WAN024GCN; Start 400; Stop 424
ttctataccttggatgctaagattg

SEQ ID NO: 299980 - DNA, 25 bp, Artificial
  probe
  misc_feature (1)..(25): SEQ ID NO: 1623; WAN024GCN; Start 722; Stop 746
gtgactactaccagttccaagaagt

SEQ ID NO: 299981 - DNA, 25 bp, Artificial
  probe
  misc_feature (1)..(25): SEQ ID NO: 1623; WAN024GCN; Start 294; Stop 318
agctcgtatcaatgacctctatatg

SEQ ID NO: 299982 - DNA, 25 bp, Artificial
  probe
  misc_feature (1)..(25): SEQ ID NO: 1623; WAN024GCN; Start 292; Stop 316
gaagctcgtatcaatgacctctata

SEQ ID NO: 299983 - DNA, 25 bp, Artificial
  probe
  misc_feature (1)..(25): SEQ ID NO: 1623; WAN024GCN; Start 1051; Stop 1075
aaggttgcgattattggtgctaatg

SEQ ID NO: 299984 - DNA, 25 bp, Artificial
  probe
  misc_feature (1)..(25): SEQ ID NO: 1623; WAN024GCN; Start 343; Stop 367
gttgatgctctcatggaagaagtag

SEQ ID NO: 299985 - DNA, 25 bp, Artificial
  probe
  misc_feature (1)..(25): SEQ ID NO: 1623; WAN024GCN; Start 293; Stop 317
aagctcgtatcaatgacctctatat

SEQ ID NO: 299986 - DNA, 25 bp, Artificial
  probe
  misc_feature (1)..(25): SEQ ID NO: 1623; WAN024GCN; Start 1141; Stop 1165
gagcgtggagattatttagaacttg

SEQ ID NO: 299987 - DNA, 25 bp, Artificial
  probe
  misc_feature (1)..(25): SEQ ID NO: 1623; WAN024GCN; Start 394; Stop 418
cgtgatttctataccttggatgcta

SEQ ID NO: 299988 - DNA, 25 bp, Artificial
  probe
  misc_feature (1)..(25): SEQ ID NO: 1623; WAN024GCN; Start 391; Stop 415
agtcgtgatttctataccttggatg

SEQ ID NO: 299989 - DNA, 25 bp, Artificial
  probe
  misc_feature (1)..(25): SEQ ID NO: 1623; WAN024GCN; Start 390; Stop 414
gagtcgtgatttctataccttggat

SEQ ID NO: 299990 - DNA, 25 bp, Artificial
  probe
  misc_feature (1)..(25): SEQ ID NO: 1624; WAN024D2L; Start 393; Stop 417
aggttaccacaactacatcacatta

SEQ ID NO: 299991 - DNA, 25 bp, Artificial
  probe
  misc_feature (1)..(25): SEQ ID NO: 1624; WAN024D2L; Start 392; Stop 416
caggttaccacaactacatcacatt

SEQ ID NO: 299992 - DNA, 25 bp, Artificial
  probe
  misc_feature (1)..(25): SEQ ID NO: 1624; WAN024D2L; Start 394; Stop 418
ggttaccacaactacatcacattat

SEQ ID NO: 299993 - DNA, 25 bp, Artificial
  probe
  misc_feature (1)..(25): SEQ ID NO: 1624; WAN024D2L; Start 391; Stop 415
acaggttaccacaactacatcacat

SEQ ID NO: 299994 - DNA, 25 bp, Artificial
  probe
  misc_feature (1)..(25): SEQ ID NO: 1624; WAN024D2L; Start 390; Stop 414
aacaggttaccacaactacatcaca

SEQ ID NO: 299995 - DNA, 25 bp, Artificial
  probe
  misc_feature (1)..(25): SEQ ID NO: 1624; WAN024D2L; Start 398; Stop 422
accacaactacatcacattattgga

SEQ ID NO: 299996 - DNA, 25 bp, Artificial
  probe
  misc_feature (1)..(25): SEQ ID NO: 1624; WAN024D2L; Start 399; Stop 423
ccacaactacatcacattattggat

SEQ ID NO: 299997 - DNA, 25 bp, Artificial
  probe
  misc_feature (1)..(25): SEQ ID NO: 1624; WAN024D2L; Start 155; Stop 179
cggtaggttatttagaatcaggtca

SEQ ID NO: 299998 - DNA, 25 bp, Artificial
  probe
  misc_feature (1)..(25): SEQ ID NO: 1624; WAN024D2L; Start 154; Stop 178
acggtaggttatttagaatcaggtc

SEQ ID NO: 299999 - DNA, 25 bp, Artificial
  probe
  misc_feature (1)..(25): SEQ ID NO: 1624; WAN024D2L; Start 574; Stop 598
gaaatccatcgcacttatctctttg

SEQ ID NO: 300000 - DNA, 25 bp, Artificial
  probe
  misc_feature (1)..(25): SEQ ID NO: 1624; WAN024D2L; Start 288; Stop 312
ttggatagacgcagtacagaactac

SEQ ID NO: 300001 - DNA, 25 bp, Artificial
  probe
  misc_feature (1)..(25): SEQ ID NO: 1624; WAN024D2L; Start 395; Stop 419
gttaccacaactacatcacattatt

SEQ ID NO: 300002 - DNA, 25 bp, Artificial
  probe
  misc_feature (1)..(25): SEQ ID NO: 1624; WAN024D2L; Start 397; Stop 421
taccacaactacatcacattattgg

SEQ ID NO: 300003 - DNA, 25 bp, Artificial
  probe
  misc_feature (1)..(25): SEQ ID NO: 1624; WAN024D2L; Start 396; Stop 420
ttaccacaactacatcacattattg

SEQ ID NO: 300004 - DNA, 25 bp, Artificial
  probe
  misc_feature (1)..(25): SEQ ID NO: 1624; WAN024D2L; Start 573; Stop 597
agaaatccatcgcacttatctcttt

SEQ ID NO: 300005 - DNA, 25 bp, Artificial
  probe
  misc_feature (1)..(25): SEQ ID NO: 1624; WAN024D2L; Start 572; Stop 596
tagaaatccatcgcacttatctctt

SEQ ID NO: 300006 - DNA, 25 bp, Artificial
  probe
  misc_feature (1)..(25): SEQ ID NO: 1624; WAN024D2L; Start 571; Stop 595
ttagaaatccatcgcacttatctct

SEQ ID NO: 300007 - DNA, 25 bp, Artificial
  probe
  misc_feature (1)..(25): SEQ ID NO: 1624; WAN024D2L; Start 569; Stop 593
tcttagaaatccatcgcacttatct

SEQ ID NO: 300008 - DNA, 25 bp, Artificial
  probe
  misc_feature (1)..(25): SEQ ID NO: 1624; WAN024D2L; Start 159; Stop 183
aggttatttagaatcaggtcaggat

SEQ ID NO: 300009 - DNA, 25 bp, Artificial
  probe
  misc_feature (1)..(25): SEQ ID NO: 1624; WAN024D2L; Start 570; Stop 594
cttagaaatccatcgcacttatctc

SEQ ID NO: 300010 - DNA, 25 bp, Artificial
  probe
  misc_feature (1)..(25): SEQ ID NO: 1624; WAN024D2L; Start 497; Stop 521
acactatgaataggctctactttga

SEQ ID NO: 300011 - DNA, 25 bp, Artificial
  probe
  misc_feature (1)..(25): SEQ ID NO: 1624; WAN024D2L; Start 153; Stop 177
tacggtaggttatttagaatcaggt

SEQ ID NO: 300012 - DNA, 25 bp, Artificial
  probe
  misc_feature (1)..(25): SEQ ID NO: 1624; WAN024D2L; Start 494; Stop 518
ttaacactatgaataggctctactt

SEQ ID NO: 300013 - DNA, 25 bp, Artificial
  probe
  misc_feature (1)..(25): SEQ ID NO: 1624; WAN024D2L; Start 145; Stop 169
atgactgctacggtaggttatttag

SEQ ID NO: 300014 - DNA, 25 bp, Artificial
  probe
  misc_feature (1)..(25): SEQ ID NO: 1624; WAN024D2L; Start 147; Stop 171
gactgctacggtaggttatttagaa

SEQ ID NO: 300015 - DNA, 25 bp, Artificial
  probe
  misc_feature (1)..(25): SEQ ID NO: 1624; WAN024D2L; Start 144; Stop 168
aatgactgctacggtaggttattta

SEQ ID NO: 300016 - DNA, 25 bp, Artificial
  probe
  misc_feature (1)..(25): SEQ ID NO: 1624; WAN024D2L; Start 158; Stop 182
taggttatttagaatcaggtcagga

SEQ ID NO: 300017 - DNA, 25 bp, Artificial
  probe
  misc_feature (1)..(25): SEQ ID NO: 1624; WAN024D2L; Start 157; Stop 181
gtaggttatttagaatcaggtcagg

SEQ ID NO: 300018 - DNA, 25 bp, Artificial
  probe
  misc_feature (1)..(25): SEQ ID NO: 1624; WAN024D2L; Start 156; Stop 180
ggtaggttatttagaatcaggtcag

SEQ ID NO: 300019 - DNA, 25 bp, Artificial
  probe
  misc_feature (1)..(25): SEQ ID NO: 1624; WAN024D2L; Start 150; Stop 174
tgctacggtaggttatttagaatca

SEQ ID NO: 300020 - DNA, 25 bp, Artificial
  probe
  misc_feature (1)..(25): SEQ ID NO: 1624; WAN024D2L; Start 148; Stop 172
actgctacggtaggttatttagaat

SEQ ID NO: 300021 - DNA, 25 bp, Artificial
  probe
  misc_feature (1)..(25): SEQ ID NO: 1624; WAN024D2L; Start 146; Stop 170
tgactgctacggtaggttatttaga

SEQ ID NO: 300022 - DNA, 25 bp, Artificial
  probe
  misc_feature (1)..(25): SEQ ID NO: 1624; WAN024D2L; Start 346; Stop 370
cttatccagagacaaggcattgaaa

SEQ ID NO: 300023 - DNA, 25 bp, Artificial
  probe
  misc_feature (1)..(25): SEQ ID NO: 1625; WAN024F55; Start 387; Stop 411
gatgaatcgctgtatcaagagagaa

SEQ ID NO: 300024 - DNA, 25 bp, Artificial
  probe
  misc_feature (1)..(25): SEQ ID NO: 1625; WAN024F55; Start 388; Stop 412
atgaatcgctgtatcaagagagaac

SEQ ID NO: 300025 - DNA, 25 bp, Artificial
  probe
  misc_feature (1)..(25): SEQ ID NO: 1625; WAN024F55; Start 403; Stop 427
aagagagaacatactcgcttgattg

SEQ ID NO: 300026 - DNA, 25 bp, Artificial
  probe
  misc_feature (1)..(25): SEQ ID NO: 1625; WAN024F55; Start 391; Stop 415
aatcgctgtatcaagagagaacata

SEQ ID NO: 300027 - DNA, 25 bp, Artificial
  probe
  misc_feature (1)..(25): SEQ ID NO: 1625; WAN024F55; Start 390; Stop 414
gaatcgctgtatcaagagagaacat

SEQ ID NO: 300028 - DNA, 25 bp, Artificial
  probe
  misc_feature (1)..(25): SEQ ID NO: 1625; WAN024F55; Start 405; Stop 429
gagagaacatactcgcttgattgag

SEQ ID NO: 300029 - DNA, 25 bp, Artificial
  probe
  misc_feature (1)..(25): SEQ ID NO: 1625; WAN024F55; Start 398; Stop 422
gtatcaagagagaacatactcgctt

SEQ ID NO: 300030 - DNA, 25 bp, Artificial
  probe
  misc_feature (1)..(25): SEQ ID NO: 1625; WAN024F55; Start 392; Stop 416
atcgctgtatcaagagagaacatac

SEQ ID NO: 300031 - DNA, 25 bp, Artificial
  probe
  misc_feature (1)..(25): SEQ ID NO: 1625; WAN024F55; Start 404; Stop 428
agagagaacatactcgcttgattga

SEQ ID NO: 300032 - DNA, 25 bp, Artificial
  probe
  misc_feature (1)..(25): SEQ ID NO: 1625; WAN024F55; Start 396; Stop 420
ctgtatcaagagagaacatactcgc

SEQ ID NO: 300033 - DNA, 25 bp, Artificial
  probe
  misc_feature (1)..(25): SEQ ID NO: 1625; WAN024F55; Start 395; Stop 419
gctgtatcaagagagaacatactcg

SEQ ID NO: 300034 - DNA, 25 bp, Artificial
  probe
  misc_feature (1)..(25): SEQ ID NO: 1625; WAN024F55; Start 394; Stop 418
cgctgtatcaagagagaacatactc

SEQ ID NO: 300035 - DNA, 25 bp, Artificial
  probe
  misc_feature (1)..(25): SEQ ID NO: 1625; WAN024F55; Start 409; Stop 433
gaacatactcgcttgattgaggaag

SEQ ID NO: 300036 - DNA, 25 bp, Artificial
  probe
  misc_feature (1)..(25): SEQ ID NO: 1625; WAN024F55; Start 397; Stop 421
tgtatcaagagagaacatactcgct

SEQ ID NO: 300037 - DNA, 25 bp, Artificial
  probe
  misc_feature (1)..(25): SEQ ID NO: 1625; WAN024F55; Start 393; Stop 417
tcgctgtatcaagagagaacatact

SEQ ID NO: 300038 - DNA, 25 bp, Artificial
  probe
  misc_feature (1)..(25): SEQ ID NO: 1625; WAN024F55; Start 389; Stop 413
tgaatcgctgtatcaagagagaaca

SEQ ID NO: 300039 - DNA, 25 bp, Artificial
  probe
  misc_feature (1)..(25): SEQ ID NO: 1625; WAN024F55; Start 408; Stop 432
agaacatactcgcttgattgaggaa

SEQ ID NO: 300040 - DNA, 25 bp, Artificial
  probe
  misc_feature (1)..(25): SEQ ID NO: 1625; WAN024F55; Start 407; Stop 431
gagaacatactcgcttgattgagga

SEQ ID NO: 300041 - DNA, 25 bp, Artificial
  probe
  misc_feature (1)..(25): SEQ ID NO: 1625; WAN024F55; Start 406; Stop 430
agagaacatactcgcttgattgagg

SEQ ID NO: 300042 - DNA, 25 bp, Artificial
  probe
  misc_feature (1)..(25): SEQ ID NO: 1625; WAN024F55; Start 377; Stop 401
atgatatcgtgatgaatcgctgtat

SEQ ID NO: 300043 - DNA, 25 bp, Artificial
  probe
  misc_feature (1)..(25): SEQ ID NO: 1625; WAN024F55; Start 371; Stop 395
gatgtgatgatatcgtgatgaatcg

SEQ ID NO: 300044 - DNA, 25 bp, Artificial
  probe
  misc_feature (1)..(25): SEQ ID NO: 1625; WAN024F55; Start 369; Stop 393
tggatgtgatgatatcgtgatgaat

SEQ ID NO: 300045 - DNA, 25 bp, Artificial
  probe
  misc_feature (1)..(25): SEQ ID NO: 1625; WAN024F55; Start 333; Stop 357
tgaaagtttagaagcgaaagagatt

SEQ ID NO: 300046 - DNA, 25 bp, Artificial
  probe
  misc_feature (1)..(25): SEQ ID NO: 1625; WAN024F55; Start 332; Stop 356
ttgaaagtttagaagcgaaagagat

SEQ ID NO: 300047 - DNA, 25 bp, Artificial
  probe
  misc_feature (1)..(25): SEQ ID NO: 1625; WAN024F55; Start 331; Stop 355
cttgaaagtttagaagcgaaagaga

SEQ ID NO: 300048 - DNA, 25 bp, Artificial
  probe
  misc_feature (1)..(25): SEQ ID NO: 1625; WAN024F55; Start 370; Stop 394
ggatgtgatgatatcgtgatgaatc

SEQ ID NO: 300049 - DNA, 25 bp, Artificial
  probe
  misc_feature (1)..(25): SEQ ID NO: 1625; WAN024F55; Start 244; Stop 268
aatgtttatcgtcgcagtgaatttc

SEQ ID NO: 300050 - DNA, 25 bp, Artificial
  probe
  misc_feature (1)..(25): SEQ ID NO: 1625; WAN024F55; Start 376; Stop 400
gatgatatcgtgatgaatcgctgta

SEQ ID NO: 300051 - DNA, 25 bp, Artificial
  probe
  misc_feature (1)..(25): SEQ ID NO: 1625; WAN024F55; Start 368; Stop 392
gtggatgtgatgatatcgtgatgaa

SEQ ID NO: 300052 - DNA, 25 bp, Artificial
  probe
  misc_feature (1)..(25): SEQ ID NO: 1625; WAN024F55; Start 243; Stop 267
caatgtttatcgtcgcagtgaattt

SEQ ID NO: 300053 - DNA, 25 bp, Artificial
  probe
  misc_feature (1)..(25): SEQ ID NO: 1625; WAN024F55; Start 236; Stop 260
atattgtcaatgtttatcgtcgcag

SEQ ID NO: 300054 - DNA, 25 bp, Artificial
  probe
  misc_feature (1)..(25): SEQ ID NO: 1625; WAN024F55; Start 245; Stop 269
atgtttatcgtcgcagtgaatttct

SEQ ID NO: 300055 - DNA, 25 bp, Artificial
  probe
  misc_feature (1)..(25): SEQ ID NO: 1625; WAN024F55; Start 237; Stop 261
tattgtcaatgtttatcgtcgcagt

SEQ ID NO: 300056 - DNA, 25 bp, Artificial
  probe
  misc_feature (1)..(25): SEQ ID NO: 1626; WAN024CHP; Start 144; Stop 168
ttgtctggatagggatgttacttac

SEQ ID NO: 300057 - DNA, 25 bp, Artificial
  probe
  misc_feature (1)..(25): SEQ ID NO: 1626; WAN024CHP; Start 151; Stop 175
gatagggatgttacttacggagatt

SEQ ID NO: 300058 - DNA, 25 bp, Artificial
  probe
  misc_feature (1)..(25): SEQ ID NO: 1626; WAN024CHP; Start 143; Stop 167
cttgtctggatagggatgttactta

SEQ ID NO: 300059 - DNA, 25 bp, Artificial
  probe
  misc_feature (1)..(25): SEQ ID NO: 1626; WAN024CHP; Start 150; Stop 174
ggatagggatgttacttacggagat

SEQ ID NO: 300060 - DNA, 25 bp, Artificial
  probe
  misc_feature (1)..(25): SEQ ID NO: 1626; WAN024CHP; Start 152; Stop 176
atagggatgttacttacggagattt

SEQ ID NO: 300061 - DNA, 25 bp, Artificial
  probe
  misc_feature (1)..(25): SEQ ID NO: 1626; WAN024CHP; Start 190; Stop 214
ccatattatgtccctgaacgaattg

SEQ ID NO: 300062 - DNA, 25 bp, Artificial
  probe
  misc_feature (1)..(25): SEQ ID NO: 1626; WAN024CHP; Start 189; Stop 213
accatattatgtccctgaacgaatt

SEQ ID NO: 300063 - DNA, 25 bp, Artificial
  probe
  misc_feature (1)..(25): SEQ ID NO: 1626; WAN024CHP; Start 191; Stop 215
catattatgtccctgaacgaattgc

SEQ ID NO: 300064 - DNA, 25 bp, Artificial
  probe
  misc_feature (1)..(25): SEQ ID NO: 1626; WAN024CHP; Start 145; Stop 169
tgtctggatagggatgttacttacg

SEQ ID NO: 300065 - DNA, 25 bp, Artificial
  probe
  misc_feature (1)..(25): SEQ ID NO: 1626; WAN024CHP; Start 188; Stop 212
caccatattatgtccctgaacgaat

SEQ ID NO: 300066 - DNA, 25 bp, Artificial
  probe
  misc_feature (1)..(25): SEQ ID NO: 1626; WAN024CHP; Start 148; Stop 172
ctggatagggatgttacttacggag

SEQ ID NO: 300067 - DNA, 25 bp, Artificial
  probe
  misc_feature (1)..(25): SEQ ID NO: 1626; WAN024CHP; Start 149; Stop 173
tggatagggatgttacttacggaga

SEQ ID NO: 300068 - DNA, 25 bp, Artificial
  probe
  misc_feature (1)..(25): SEQ ID NO: 1626; WAN024CHP; Start 147; Stop 171
tctggatagggatgttacttacgga

SEQ ID NO: 300069 - DNA, 25 bp, Artificial
  probe
  misc_feature (1)..(25): SEQ ID NO: 1626; WAN024CHP; Start 146; Stop 170
gtctggatagggatgttacttacgg

SEQ ID NO: 300070 - DNA, 25 bp, Artificial
  probe
  misc_feature (1)..(25): SEQ ID NO: 1626; WAN024CHP; Start 142; Stop 166
gcttgtctggatagggatgttactt

SEQ ID NO: 300071 - DNA, 25 bp, Artificial
  probe
  misc_feature (1)..(25): SEQ ID NO: 1626; WAN024CHP; Start 139; Stop 163
cttgcttgtctggatagggatgtta

SEQ ID NO: 300072 - DNA, 25 bp, Artificial
  probe
  misc_feature (1)..(25): SEQ ID NO: 1626; WAN024CHP; Start 184; Stop 208
caagcaccatattatgtccctgaac

SEQ ID NO: 300073 - DNA, 25 bp, Artificial
  probe
  misc_feature (1)..(25): SEQ ID NO: 1626; WAN024CHP; Start 140; Stop 164
ttgcttgtctggatagggatgttac

SEQ ID NO: 300074 - DNA, 25 bp, Artificial
  probe
  misc_feature (1)..(25): SEQ ID NO: 1626; WAN024CHP; Start 237; Stop 261
tgtccgtattgaggaaattgatgat

SEQ ID NO: 300075 - DNA, 25 bp, Artificial
  probe
  misc_feature (1)..(25): SEQ ID NO: 1626; WAN024CHP; Start 236; Stop 260
gtgtccgtattgaggaaattgatga

SEQ ID NO: 300076 - DNA, 25 bp, Artificial
  probe
  misc_feature (1)..(25): SEQ ID NO: 1626; WAN024CHP; Start 238; Stop 262
gtccgtattgaggaaattgatgatc

SEQ ID NO: 300077 - DNA, 25 bp, Artificial
  probe
  misc_feature (1)..(25): SEQ ID NO: 1626; WAN024CHP; Start 22; Stop 46
atgaaatttgctgctgtctacttag

SEQ ID NO: 300078 - DNA, 25 bp, Artificial
  probe
  misc_feature (1)..(25): SEQ ID NO: 1626; WAN024CHP; Start 239; Stop 263
tccgtattgaggaaattgatgatcc

SEQ ID NO: 300079 - DNA, 25 bp, Artificial
  probe
  misc_feature (1)..(25): SEQ ID NO: 1626; WAN024CHP; Start 183; Stop 207
acaagcaccatattatgtccctgaa

SEQ ID NO: 300080 - DNA, 25 bp, Artificial
  probe
  misc_feature (1)..(25): SEQ ID NO: 1626; WAN024CHP; Start 192; Stop 216
atattatgtccctgaacgaattgca

SEQ ID NO: 300081 - DNA, 25 bp, Artificial
  probe
  misc_feature (1)..(25): SEQ ID NO: 1626; WAN024CHP; Start 20; Stop 44
atatgaaatttgctgctgtctactt

SEQ ID NO: 300082 - DNA, 25 bp, Artificial
  probe
  misc_feature (1)..(25): SEQ ID NO: 1626; WAN024CHP; Start 19; Stop 43
aatatgaaatttgctgctgtctact

SEQ ID NO: 300083 - DNA, 25 bp, Artificial
  probe
  misc_feature (1)..(25): SEQ ID NO: 1626; WAN024CHP; Start 141; Stop 165
tgcttgtctggatagggatgttact

SEQ ID NO: 300084 - DNA, 25 bp, Artificial
  probe
  misc_feature (1)..(25): SEQ ID NO: 1626; WAN024CHP; Start 21; Stop 45
tatgaaatttgctgctgtctactta

SEQ ID NO: 300085 - DNA, 25 bp, Artificial
  probe
  misc_feature (1)..(25): SEQ ID NO: 1626; WAN024CHP; Start 18; Stop 42
caatatgaaatttgctgctgtctac

SEQ ID NO: 300086 - DNA, 25 bp, Artificial
  probe
  misc_feature (1)..(25): SEQ ID NO: 1626; WAN024CHP; Start 235; Stop 259
ggtgtccgtattgaggaaattgatg

SEQ ID NO: 300087 - DNA, 25 bp, Artificial
  probe
  misc_feature (1)..(25): SEQ ID NO: 1626; WAN024CHP; Start 136; Stop 160
gttcttgcttgtctggatagggatg

SEQ ID NO: 300088 - DNA, 25 bp, Artificial
  probe
  misc_feature (1)..(25): SEQ ID NO: 1626; WAN024CHP; Start 187; Stop 211
gcaccatattatgtccctgaacgaa

SEQ ID NO: 300089 - DNA, 25 bp, Artificial
  probe
  misc_feature (1)..(25): SEQ ID NO: 1627; WAN024EWR; Start 16; Stop 40
ttagcacgaatcttagagcagaagg

SEQ ID NO: 300090 - DNA, 25 bp, Artificial
  probe
  misc_feature (1)..(25): SEQ ID NO: 1627; WAN024EWR; Start 616; Stop 640
ggtcgctattacatttctgaatctg

SEQ ID NO: 300091 - DNA, 25 bp, Artificial
  probe
  misc_feature (1)..(25): SEQ ID NO: 1627; WAN024EWR; Start 615; Stop 639
aggtcgctattacatttctgaatct

SEQ ID NO: 300092 - DNA, 25 bp, Artificial
  probe
  misc_feature (1)..(25): SEQ ID NO: 1627; WAN024EWR; Start 607; Stop 631
tttgaggaaggtcgctattacattt

SEQ ID NO: 300093 - DNA, 25 bp, Artificial
  probe
  misc_feature (1)..(25): SEQ ID NO: 1627; WAN024EWR; Start 617; Stop 641
gtcgctattacatttctgaatctgc

SEQ ID NO: 300094 - DNA, 25 bp, Artificial
  probe
  misc_feature (1)..(25): SEQ ID NO: 1627; WAN024EWR; Start 620; Stop 644
gctattacatttctgaatctgccat

SEQ ID NO: 300095 - DNA, 25 bp, Artificial
  probe
  misc_feature (1)..(25): SEQ ID NO: 1627; WAN024EWR; Start 273; Stop 297
taaagggcatttggattatctacgg

SEQ ID NO: 300096 - DNA, 25 bp, Artificial
  probe
  misc_feature (1)..(25): SEQ ID NO: 1627; WAN024EWR; Start 614; Stop 638
aaggtcgctattacatttctgaatc

SEQ ID NO: 300097 - DNA, 25 bp, Artificial
  probe
  misc_feature (1)..(25): SEQ ID NO: 1627; WAN024EWR; Start 602; Stop 626
cttactttgaggaaggtcgctatta

SEQ ID NO: 300098 - DNA, 25 bp, Artificial
  probe
  misc_feature (1)..(25): SEQ ID NO: 1627; WAN024EWR; Start 603; Stop 627
ttactttgaggaaggtcgctattac

SEQ ID NO: 300099 - DNA, 25 bp, Artificial
  probe
  misc_feature (1)..(25): SEQ ID NO: 1627; WAN024EWR; Start 272; Stop 296
ttaaagggcatttggattatctacg

SEQ ID NO: 300100 - DNA, 25 bp, Artificial
  probe
  misc_feature (1)..(25): SEQ ID NO: 1627; WAN024EWR; Start 613; Stop 637
gaaggtcgctattacatttctgaat

SEQ ID NO: 300101 - DNA, 25 bp, Artificial
  probe
  misc_feature (1)..(25): SEQ ID NO: 1627; WAN024EWR; Start 480; Stop 504
ggagactcacaatctagctgaacta

SEQ ID NO: 300102 - DNA, 25 bp, Artificial
  probe
  misc_feature (1)..(25): SEQ ID NO: 1627; WAN024EWR; Start 612; Stop 636
ggaaggtcgctattacatttctgaa

SEQ ID NO: 300103 - DNA, 25 bp, Artificial
  probe
  misc_feature (1)..(25): SEQ ID NO: 1627; WAN024EWR; Start 608; Stop 632
ttgaggaaggtcgctattacatttc

SEQ ID NO: 300104 - DNA, 25 bp, Artificial
  probe
  misc_feature (1)..(25): SEQ ID NO: 1627; WAN024EWR; Start 606; Stop 630
ctttgaggaaggtcgctattacatt

SEQ ID NO: 300105 - DNA, 25 bp, Artificial
  probe
  misc_feature (1)..(25): SEQ ID NO: 1627; WAN024EWR; Start 618; Stop 642
tcgctattacatttctgaatctgcc

SEQ ID NO: 300106 - DNA, 25 bp, Artificial
  probe
  misc_feature (1)..(25): SEQ ID NO: 1627; WAN024EWR; Start 15; Stop 39
tttagcacgaatcttagagcagaag

SEQ ID NO: 300107 - DNA, 25 bp, Artificial
  probe
  misc_feature (1)..(25): SEQ ID NO: 1627; WAN024EWR; Start 604; Stop 628
tactttgaggaaggtcgctattaca

SEQ ID NO: 300108 - DNA, 25 bp, Artificial
  probe
  misc_feature (1)..(25): SEQ ID NO: 1627; WAN024EWR; Start 619; Stop 643
cgctattacatttctgaatctgcca

SEQ ID NO: 300109 - DNA, 25 bp, Artificial
  probe
  misc_feature (1)..(25): SEQ ID NO: 1627; WAN024EWR; Start 610; Stop 634
gaggaaggtcgctattacatttctg

SEQ ID NO: 300110 - DNA, 25 bp, Artificial
  probe
  misc_feature (1)..(25): SEQ ID NO: 1627; WAN024EWR; Start 184; Stop 208
aatctcgatgtggatattgtgcaac

SEQ ID NO: 300111 - DNA, 25 bp, Artificial
  probe
  misc_feature (1)..(25): SEQ ID NO: 1627; WAN024EWR; Start 611; Stop 635
aggaaggtcgctattacatttctga

SEQ ID NO: 300112 - DNA, 25 bp, Artificial
  probe
  misc_feature (1)..(25): SEQ ID NO: 1627; WAN024EWR; Start 609; Stop 633
tgaggaaggtcgctattacatttct

SEQ ID NO: 300113 - DNA, 25 bp, Artificial
  probe
  misc_feature (1)..(25): SEQ ID NO: 1627; WAN024EWR; Start 279; Stop 303
gcatttggattatctacgggaaatt

SEQ ID NO: 300114 - DNA, 25 bp, Artificial
  probe
  misc_feature (1)..(25): SEQ ID NO: 1627; WAN024EWR; Start 605; Stop 629
actttgaggaaggtcgctattacat

SEQ ID NO: 300115 - DNA, 25 bp, Artificial
  probe
  misc_feature (1)..(25): SEQ ID NO: 1627; WAN024EWR; Start 481; Stop 505
gagactcacaatctagctgaactag

SEQ ID NO: 300116 - DNA, 25 bp, Artificial
  probe
  misc_feature (1)..(25): SEQ ID NO: 1627; WAN024EWR; Start 240; Stop 264
gatgatttcggtgttgacagatgag

SEQ ID NO: 300117 - DNA, 25 bp, Artificial
  probe
  misc_feature (1)..(25): SEQ ID NO: 1627; WAN024EWR; Start 278; Stop 302
ggcatttggattatctacgggaaat

SEQ ID NO: 300118 - DNA, 25 bp, Artificial
  probe
  misc_feature (1)..(25): SEQ ID NO: 1627; WAN024EWR; Start 300; Stop 324
aatttccagtcaggtagagattccg

SEQ ID NO: 300119 - DNA, 25 bp, Artificial
  probe
  misc_feature (1)..(25): SEQ ID NO: 1627; WAN024EWR; Start 323; Stop 347
cgacgctcaacaaagactttatcat

SEQ ID NO: 300120 - DNA, 25 bp, Artificial
  probe
  misc_feature (1)..(25): SEQ ID NO: 1627; WAN024EWR; Start 421; Stop 445
gaagaacgcctcaaggaactgtatg

SEQ ID NO: 300121 - DNA, 25 bp, Artificial
  probe
  misc_feature (1)..(25): SEQ ID NO: 1627; WAN024EWR; Start 425; Stop 449
aacgcctcaaggaactgtatgacta

SEQ ID NO: 300122 - DNA, 25 bp, Artificial
  probe
  misc_feature (1)..(25): SEQ ID NO: 1628; WAN024C7B; Start 369; Stop 393
aatcttggatgctgctaacaacact

SEQ ID NO: 300123 - DNA, 25 bp, Artificial
  probe
  misc_feature (1)..(25): SEQ ID NO: 1628; WAN024C7B; Start 296; Stop 320
ttggacttcgttggttggtaacaat

SEQ ID NO: 300124 - DNA, 25 bp, Artificial
  probe
  misc_feature (1)..(25): SEQ ID NO: 1628; WAN024C7B; Start 364; Stop 388
aaagaaatcttggatgctgctaaca

SEQ ID NO: 300125 - DNA, 25 bp, Artificial
  probe
  misc_feature (1)..(25): SEQ ID NO: 1628; WAN024C7B; Start 415; Stop 439
gaagatactcaccgtatggctgaag

SEQ ID NO: 300126 - DNA, 25 bp, Artificial
  probe
  misc_feature (1)..(25): SEQ ID NO: 1628; WAN024C7B; Start 365; Stop 389
aagaaatcttggatgctgctaacaa

SEQ ID NO: 300127 - DNA, 25 bp, Artificial
  probe
  misc_feature (1)..(25): SEQ ID NO: 1628; WAN024C7B; Start 366; Stop 390
agaaatcttggatgctgctaacaac

SEQ ID NO: 300128 - DNA, 25 bp, Artificial
  probe
  misc_feature (1)..(25): SEQ ID NO: 1628; WAN024C7B; Start 297; Stop 321
tggacttcgttggttggtaacaatc

SEQ ID NO: 300129 - DNA, 25 bp, Artificial
  probe
  misc_feature (1)..(25): SEQ ID NO: 1628; WAN024C7B; Start 367; Stop 391
gaaatcttggatgctgctaacaaca

SEQ ID NO: 300130 - DNA, 25 bp, Artificial
  probe
  misc_feature (1)..(25): SEQ ID NO: 1628; WAN024C7B; Start 370; Stop 394
atcttggatgctgctaacaacactg

SEQ ID NO: 300131 - DNA, 25 bp, Artificial
  probe
  misc_feature (1)..(25): SEQ ID NO: 1628; WAN024C7B; Start 295; Stop 319
cttggacttcgttggttggtaacaa

SEQ ID NO: 300132 - DNA, 25 bp, Artificial
  probe
  misc_feature (1)..(25): SEQ ID NO: 1628; WAN024C7B; Start 368; Stop 392
aaatcttggatgctgctaacaacac

SEQ ID NO: 300133 - DNA, 25 bp, Artificial
  probe
  misc_feature (1)..(25): SEQ ID NO: 1628; WAN024C7B; Start 414; Stop 438
tgaagatactcaccgtatggctgaa

SEQ ID NO: 300134 - DNA, 25 bp, Artificial
  probe
  misc_feature (1)..(25): SEQ ID NO: 1628; WAN024C7B; Start 89; Stop 113
ttatgcttgatggtaaacgtggtac

SEQ ID NO: 300135 - DNA, 25 bp, Artificial
  probe
  misc_feature (1)..(25): SEQ ID NO: 1628; WAN024C7B; Start 88; Stop 112
gttatgcttgatggtaaacgtggta

SEQ ID NO: 300136 - DNA, 25 bp, Artificial
  probe
  misc_feature (1)..(25): SEQ ID NO: 1628; WAN024C7B; Start 63; Stop 87
actagttactcgtcttatcaaccgc

SEQ ID NO: 300137 - DNA, 25 bp, Artificial
  probe
  misc_feature (1)..(25): SEQ ID NO: 1628; WAN024C7B; Start 293; Stop 317
cacttggacttcgttggttggtaac

SEQ ID NO: 300138 - DNA, 25 bp, Artificial
  probe
  misc_feature (1)..(25): SEQ ID NO: 1628; WAN024C7B; Start 298; Stop 322
ggacttcgttggttggtaacaatcg

SEQ ID NO: 300139 - DNA, 25 bp, Artificial
  probe
  misc_feature (1)..(25): SEQ ID NO: 1628; WAN024C7B; Start 292; Stop 316
acacttggacttcgttggttggtaa

SEQ ID NO: 300140 - DNA, 25 bp, Artificial
  probe
  misc_feature (1)..(25): SEQ ID NO: 1628; WAN024C7B; Start 452; Stop 476
tcgcacacttccgttggtaactaat

SEQ ID NO: 300141 - DNA, 25 bp, Artificial
  probe
  misc_feature (1)..(25): SEQ ID NO: 1628; WAN024C7B; Start 450; Stop 474
attcgcacacttccgttggtaacta

SEQ ID NO: 300142 - DNA, 25 bp, Artificial
  probe
  misc_feature (1)..(25): SEQ ID NO: 1628; WAN024C7B; Start 419; Stop 443
atactcaccgtatggctgaagctaa

SEQ ID NO: 300143 - DNA, 25 bp, Artificial
  probe
  misc_feature (1)..(25): SEQ ID NO: 1628; WAN024C7B; Start 294; Stop 318
acttggacttcgttggttggtaaca

SEQ ID NO: 300144 - DNA, 25 bp, Artificial
  probe
  misc_feature (1)..(25): SEQ ID NO: 1628; WAN024C7B; Start 291; Stop 315
aacacttggacttcgttggttggta

SEQ ID NO: 300145 - DNA, 25 bp, Artificial
  probe
  misc_feature (1)..(25): SEQ ID NO: 1628; WAN024C7B; Start 363; Stop 387
aaaagaaatcttggatgctgctaac

SEQ ID NO: 300146 - DNA, 25 bp, Artificial
  probe
  misc_feature (1)..(25): SEQ ID NO: 1628; WAN024C7B; Start 362; Stop 386
caaaagaaatcttggatgctgctaa

SEQ ID NO: 300147 - DNA, 25 bp, Artificial
  probe
  misc_feature (1)..(25): SEQ ID NO: 1628; WAN024C7B; Start 451; Stop 475
ttcgcacacttccgttggtaactaa

SEQ ID NO: 300148 - DNA, 25 bp, Artificial
  probe
  misc_feature (1)..(25): SEQ ID NO: 1628; WAN024C7B; Start 301; Stop 325
cttcgttggttggtaacaatcgctc

SEQ ID NO: 300149 - DNA, 25 bp, Artificial
  probe
  misc_feature (1)..(25): SEQ ID NO: 1628; WAN024C7B; Start 147; Stop 171
aatcaaagaagctactggcaacgat

SEQ ID NO: 300150 - DNA, 25 bp, Artificial
  probe
  misc_feature (1)..(25): SEQ ID NO: 1628; WAN024C7B; Start 145; Stop 169
caaatcaaagaagctactggcaacg

SEQ ID NO: 300151 - DNA, 25 bp, Artificial
  probe
  misc_feature (1)..(25): SEQ ID NO: 1628; WAN024C7B; Start 418; Stop 442
gatactcaccgtatggctgaagcta

SEQ ID NO: 300152 - DNA, 25 bp, Artificial
  probe
  misc_feature (1)..(25): SEQ ID NO: 1628; WAN024C7B; Start 146; Stop 170
aaatcaaagaagctactggcaacga

SEQ ID NO: 300153 - DNA, 25 bp, Artificial
  probe
  misc_feature (1)..(25): SEQ ID NO: 1628; WAN024C7B; Start 68; Stop 92
ttactcgtcttatcaaccgcgttat

SEQ ID NO: 300154 - DNA, 25 bp, Artificial
  probe
  misc_feature (1)..(25): SEQ ID NO: 1628; WAN024C7B; Start 420; Stop 444
tactcaccgtatggctgaagctaac

SEQ ID NO: 300155 - DNA, 25 bp, Artificial
  probe
  misc_feature (1)..(25): SEQ ID NO: 1629; WAN024FPE; Start 851; Stop 875
ttaatccgattcaggcttctattgg

SEQ ID NO: 300156 - DNA, 25 bp, Artificial
  probe
  misc_feature (1)..(25): SEQ ID NO: 1629; WAN024FPE; Start 962; Stop 986
gctcaagttgtcttctagtattggt

SEQ ID NO: 300157 - DNA, 25 bp, Artificial
  probe
  misc_feature (1)..(25): SEQ ID NO: 1629; WAN024FPE; Start 961; Stop 985
tgctcaagttgtcttctagtattgg

SEQ ID NO: 300158 - DNA, 25 bp, Artificial
  probe
  misc_feature (1)..(25): SEQ ID NO: 1629; WAN024FPE; Start 960; Stop 984
ttgctcaagttgtcttctagtattg

SEQ ID NO: 300159 - DNA, 25 bp, Artificial
  probe
  misc_feature (1)..(25): SEQ ID NO: 1629; WAN024FPE; Start 1323; Stop 1347
gcagacgatcttattaactgtaggt

SEQ ID NO: 300160 - DNA, 25 bp, Artificial
  probe
  misc_feature (1)..(25): SEQ ID NO: 1629; WAN024FPE; Start 1053; Stop 1077
agttggtatgttattcgttagacaa

SEQ ID NO: 300161 - DNA, 25 bp, Artificial
  probe
  misc_feature (1)..(25): SEQ ID NO: 1629; WAN024FPE; Start 694; Stop 718
aatgtatatgctacctctgttcgac

SEQ ID NO: 300162 - DNA, 25 bp, Artificial
  probe
  misc_feature (1)..(25): SEQ ID NO: 1629; WAN024FPE; Start 1283; Stop 1307
tacttagtcgtccactatcagagtt

SEQ ID NO: 300163 - DNA, 25 bp, Artificial
  probe
  misc_feature (1)..(25): SEQ ID NO: 1629; WAN024FPE; Start 963; Stop 987
ctcaagttgtcttctagtattggta

SEQ ID NO: 300164 - DNA, 25 bp, Artificial
  probe
  misc_feature (1)..(25): SEQ ID NO: 1629; WAN024FPE; Start 852; Stop 876
taatccgattcaggcttctattgga

SEQ ID NO: 300165 - DNA, 25 bp, Artificial
  probe
  misc_feature (1)..(25): SEQ ID NO: 1629; WAN024FPE; Start 1048; Stop 1072
gcaatagttggtatgttattcgtta

SEQ ID NO: 300166 - DNA, 25 bp, Artificial
  probe
  misc_feature (1)..(25): SEQ ID NO: 1629; WAN024FPE; Start 1411; Stop 1435
ctgttgtttgtagtggttattggat

SEQ ID NO: 300167 - DNA, 25 bp, Artificial
  probe
  misc_feature (1)..(25): SEQ ID NO: 1629; WAN024FPE; Start 355; Stop 379
gcagaagatttgaactatacagcat

SEQ ID NO: 300168 - DNA, 25 bp, Artificial
  probe
  misc_feature (1)..(25): SEQ ID NO: 1629; WAN024FPE; Start 772; Stop 796
ttaggaatagttatggttggtaagt

SEQ ID NO: 300169 - DNA, 25 bp, Artificial
  probe
  misc_feature (1)..(25): SEQ ID NO: 1629; WAN024FPE; Start 1412; Stop 1436
tgttgtttgtagtggttattggatt

SEQ ID NO: 300170 - DNA, 25 bp, Artificial
  probe
  misc_feature (1)..(25): SEQ ID NO: 1629; WAN024FPE; Start 1316; Stop 1340
gatggttgcagacgatcttattaac

SEQ ID NO: 300171 - DNA, 25 bp, Artificial
  probe
  misc_feature (1)..(25): SEQ ID NO: 1629; WAN024FPE; Start 1317; Stop 1341
atggttgcagacgatcttattaact

SEQ ID NO: 300172 - DNA, 25 bp, Artificial
  probe
  misc_feature (1)..(25): SEQ ID NO: 1629; WAN024FPE; Start 865; Stop 889
gcttctattggaaacctatctctgt

SEQ ID NO: 300173 - DNA, 25 bp, Artificial
  probe
  misc_feature (1)..(25): SEQ ID NO: 1629; WAN024FPE; Start 1282; Stop 1306
gtacttagtcgtccactatcagagt

SEQ ID NO: 300174 - DNA, 25 bp, Artificial
  probe
  misc_feature (1)..(25): SEQ ID NO: 1629; WAN024FPE; Start 45; Stop 69
agttggtactatcatatcgagtgtt

SEQ ID NO: 300175 - DNA, 25 bp, Artificial
  probe
  misc_feature (1)..(25): SEQ ID NO: 1629; WAN024FPE; Start 1341; Stop 1365
tgtaggtttatgtattgcgagttac

SEQ ID NO: 300176 - DNA, 25 bp, Artificial
  probe
  misc_feature (1)..(25): SEQ ID NO: 1629; WAN024FPE; Start 1324; Stop 1348
cagacgatcttattaactgtaggtt

SEQ ID NO: 300177 - DNA, 25 bp, Artificial
  probe
  misc_feature (1)..(25): SEQ ID NO: 1629; WAN024FPE; Start 864; Stop 888
ggcttctattggaaacctatctctg

SEQ ID NO: 300178 - DNA, 25 bp, Artificial
  probe
  misc_feature (1)..(25): SEQ ID NO: 1629; WAN024FPE; Start 1052; Stop 1076
tagttggtatgttattcgttagaca

SEQ ID NO: 300179 - DNA, 25 bp, Artificial
  probe
  misc_feature (1)..(25): SEQ ID NO: 1629; WAN024FPE; Start 1371; Stop 1395
atctcgattggttagagtgaatagt

SEQ ID NO: 300180 - DNA, 25 bp, Artificial
  probe
  misc_feature (1)..(25): SEQ ID NO: 1629; WAN024FPE; Start 1340; Stop 1364
ctgtaggtttatgtattgcgagtta

SEQ ID NO: 300181 - DNA, 25 bp, Artificial
  probe
  misc_feature (1)..(25): SEQ ID NO: 1629; WAN024FPE; Start 774; Stop 798
aggaatagttatggttggtaagtat

SEQ ID NO: 300182 - DNA, 25 bp, Artificial
  probe
  misc_feature (1)..(25): SEQ ID NO: 1629; WAN024FPE; Start 1047; Stop 1071
tgcaatagttggtatgttattcgtt

SEQ ID NO: 300183 - DNA, 25 bp, Artificial
  probe
  misc_feature (1)..(25): SEQ ID NO: 1629; WAN024FPE; Start 964; Stop 988
tcaagttgtcttctagtattggtaa

SEQ ID NO: 300184 - DNA, 25 bp, Artificial
  probe
  misc_feature (1)..(25): SEQ ID NO: 1629; WAN024FPE; Start 850; Stop 874
tttaatccgattcaggcttctattg

SEQ ID NO: 300185 - DNA, 25 bp, Artificial
  probe
  misc_feature (1)..(25): SEQ ID NO: 1629; WAN024FPE; Start 1342; Stop 1366
gtaggtttatgtattgcgagttact

SEQ ID NO: 300186 - DNA, 25 bp, Artificial
  probe
  misc_feature (1)..(25): SEQ ID NO: 1629; WAN024FPE; Start 853; Stop 877
aatccgattcaggcttctattggaa

SEQ ID NO: 300187 - DNA, 25 bp, Artificial
  probe
  misc_feature (1)..(25): SEQ ID NO: 1629; WAN024FPE; Start 1339; Stop 1363
actgtaggtttatgtattgcgagtt

SEQ ID NO: 300188 - DNA, 25 bp, Artificial
  probe
  misc_feature (1)..(25): SEQ ID NO: 1630; WAN024EUX; Start 209; Stop 233
atcagctctataataaggaaccaga

SEQ ID NO: 300189 - DNA, 25 bp, Artificial
  probe
  misc_feature (1)..(25): SEQ ID NO: 1630; WAN024EUX; Start 242; Stop 266
tcggacttattgaggacaatcttaa

SEQ ID NO: 300190 - DNA, 25 bp, Artificial
  probe
  misc_feature (1)..(25): SEQ ID NO: 1630; WAN024EUX; Start 241; Stop 265
ttcggacttattgaggacaatctta

SEQ ID NO: 300191 - DNA, 25 bp, Artificial
  probe
  misc_feature (1)..(25): SEQ ID NO: 1630; WAN024EUX; Start 202; Stop 226
caccactatcagctctataataagg

SEQ ID NO: 300192 - DNA, 25 bp, Artificial
  probe
  misc_feature (1)..(25): SEQ ID NO: 1630; WAN024EUX; Start 203; Stop 227
accactatcagctctataataagga

SEQ ID NO: 300193 - DNA, 25 bp, Artificial
  probe
  misc_feature (1)..(25): SEQ ID NO: 1630; WAN024EUX; Start 341; Stop 365
aactaccctattcaaacgccaaatt

SEQ ID NO: 300194 - DNA, 25 bp, Artificial
  probe
  misc_feature (1)..(25): SEQ ID NO: 1630; WAN024EUX; Start 189; Stop 213
agaagacttgaaacaccactatcag

SEQ ID NO: 300195 - DNA, 25 bp, Artificial
  probe
  misc_feature (1)..(25): SEQ ID NO: 1630; WAN024EUX; Start 187; Stop 211
tcagaagacttgaaacaccactatc

SEQ ID NO: 300196 - DNA, 25 bp, Artificial
  probe
  misc_feature (1)..(25): SEQ ID NO: 1630; WAN024EUX; Start 188; Stop 212
cagaagacttgaaacaccactatca

SEQ ID NO: 300197 - DNA, 25 bp, Artificial
  probe
  misc_feature (1)..(25): SEQ ID NO: 1630; WAN024EUX; Start 340; Stop 364
caactaccctattcaaacgccaaat

SEQ ID NO: 300198 - DNA, 25 bp, Artificial
  probe
  misc_feature (1)..(25): SEQ ID NO: 1630; WAN024EUX; Start 253; Stop 277
gaggacaatcttaagcaggttcatc

SEQ ID NO: 300199 - DNA, 25 bp, Artificial
  probe
  misc_feature (1)..(25): SEQ ID NO: 1630; WAN024EUX; Start 201; Stop 225
acaccactatcagctctataataag

SEQ ID NO: 300200 - DNA, 25 bp, Artificial
  probe
  misc_feature (1)..(25): SEQ ID NO: 1630; WAN024EUX; Start 342; Stop 366
actaccctattcaaacgccaaattg

SEQ ID NO: 300201 - DNA, 25 bp, Artificial
  probe
  misc_feature (1)..(25): SEQ ID NO: 1630; WAN024EUX; Start 190; Stop 214
gaagacttgaaacaccactatcagc

SEQ ID NO: 300202 - DNA, 25 bp, Artificial
  probe
  misc_feature (1)..(25): SEQ ID NO: 1630; WAN024EUX; Start 208; Stop 232
tatcagctctataataaggaaccag

SEQ ID NO: 300203 - DNA, 25 bp, Artificial
  probe
  misc_feature (1)..(25): SEQ ID NO: 1630; WAN024EUX; Start 207; Stop 231
ctatcagctctataataaggaacca

SEQ ID NO: 300204 - DNA, 25 bp, Artificial
  probe
  misc_feature (1)..(25): SEQ ID NO: 1630; WAN024EUX; Start 206; Stop 230
actatcagctctataataaggaacc

SEQ ID NO: 300205 - DNA, 25 bp, Artificial
  probe
  misc_feature (1)..(25): SEQ ID NO: 1630; WAN024EUX; Start 204; Stop 228
ccactatcagctctataataaggaa

SEQ ID NO: 300206 - DNA, 25 bp, Artificial
  probe
  misc_feature (1)..(25): SEQ ID NO: 1630; WAN024EUX; Start 339; Stop 363
tcaactaccctattcaaacgccaaa

SEQ ID NO: 300207 - DNA, 25 bp, Artificial
  probe
  misc_feature (1)..(25): SEQ ID NO: 1630; WAN024EUX; Start 338; Stop 362
ttcaactaccctattcaaacgccaa

SEQ ID NO: 300208 - DNA, 25 bp, Artificial
  probe
  misc_feature (1)..(25): SEQ ID NO: 1630; WAN024EUX; Start 200; Stop 224
aacaccactatcagctctataataa

SEQ ID NO: 300209 - DNA, 25 bp, Artificial
  probe
  misc_feature (1)..(25): SEQ ID NO: 1630; WAN024EUX; Start 252; Stop 276
tgaggacaatcttaagcaggttcat

SEQ ID NO: 300210 - DNA, 25 bp, Artificial
  probe
  misc_feature (1)..(25): SEQ ID NO: 1630; WAN024EUX; Start 195; Stop 219
cttgaaacaccactatcagctctat

SEQ ID NO: 300211 - DNA, 25 bp, Artificial
  probe
  misc_feature (1)..(25): SEQ ID NO: 1630; WAN024EUX; Start 197; Stop 221
tgaaacaccactatcagctctataa

SEQ ID NO: 300212 - DNA, 25 bp, Artificial
  probe
  misc_feature (1)..(25): SEQ ID NO: 1630; WAN024EUX; Start 196; Stop 220
ttgaaacaccactatcagctctata

SEQ ID NO: 300213 - DNA, 25 bp, Artificial
  probe
  misc_feature (1)..(25): SEQ ID NO: 1630; WAN024EUX; Start 251; Stop 275
ttgaggacaatcttaagcaggttca

SEQ ID NO: 300214 - DNA, 25 bp, Artificial
  probe
  misc_feature (1)..(25): SEQ ID NO: 1630; WAN024EUX; Start 240; Stop 264
tttcggacttattgaggacaatctt

SEQ ID NO: 300215 - DNA, 25 bp, Artificial
  probe
  misc_feature (1)..(25): SEQ ID NO: 1630; WAN024EUX; Start 337; Stop 361
cttcaactaccctattcaaacgcca

SEQ ID NO: 300216 - DNA, 25 bp, Artificial
  probe
  misc_feature (1)..(25): SEQ ID NO: 1630; WAN024EUX; Start 198; Stop 222
gaaacaccactatcagctctataat

SEQ ID NO: 300217 - DNA, 25 bp, Artificial
  probe
  misc_feature (1)..(25): SEQ ID NO: 1630; WAN024EUX; Start 249; Stop 273
tattgaggacaatcttaagcaggtt

SEQ ID NO: 300218 - DNA, 25 bp, Artificial
  probe
  misc_feature (1)..(25): SEQ ID NO: 1630; WAN024EUX; Start 248; Stop 272
ttattgaggacaatcttaagcaggt

SEQ ID NO: 300219 - DNA, 25 bp, Artificial
  probe
  misc_feature (1)..(25): SEQ ID NO: 1630; WAN024EUX; Start 247; Stop 271
cttattgaggacaatcttaagcagg

SEQ ID NO: 300220 - DNA, 25 bp, Artificial
  probe
  misc_feature (1)..(25): SEQ ID NO: 1630; WAN024EUX; Start 244; Stop 268
ggacttattgaggacaatcttaagc

SEQ ID NO: 300221 - DNA, 25 bp, Artificial
  probe
  misc_feature (1)..(25): SEQ ID NO: 1631; WAN024G9I; Start 683; Stop 707
ctatgtctatcaagcgtgagtatga

SEQ ID NO: 300222 - DNA, 25 bp, Artificial
  probe
  misc_feature (1)..(25): SEQ ID NO: 1631; WAN024G9I; Start 1154; Stop 1178
ctggagtgtataaccttgaggagtt

SEQ ID NO: 300223 - DNA, 25 bp, Artificial
  probe
  misc_feature (1)..(25): SEQ ID NO: 1631; WAN024G9I; Start 1156; Stop 1180
ggagtgtataaccttgaggagttag

SEQ ID NO: 300224 - DNA, 25 bp, Artificial
  probe
  misc_feature (1)..(25): SEQ ID NO: 1631; WAN024G9I; Start 1155; Stop 1179
tggagtgtataaccttgaggagtta

SEQ ID NO: 300225 - DNA, 25 bp, Artificial
  probe
  misc_feature (1)..(25): SEQ ID NO: 1631; WAN024G9I; Start 244; Stop 268
aatgtagctctgccttatcaagatt

SEQ ID NO: 300226 - DNA, 25 bp, Artificial
  probe
  misc_feature (1)..(25): SEQ ID NO: 1631; WAN024G9I; Start 1157; Stop 1181
gagtgtataaccttgaggagttaga

SEQ ID NO: 300227 - DNA, 25 bp, Artificial
  probe
  misc_feature (1)..(25): SEQ ID NO: 1631; WAN024G9I; Start 243; Stop 267
gaatgtagctctgccttatcaagat

SEQ ID NO: 300228 - DNA, 25 bp, Artificial
  probe
  misc_feature (1)..(25): SEQ ID NO: 1631; WAN024G9I; Start 182; Stop 206
atgctgacaaggttgaagaagtgat

SEQ ID NO: 300229 - DNA, 25 bp, Artificial
  probe
  misc_feature (1)..(25): SEQ ID NO: 1631; WAN024G9I; Start 1164; Stop 1188
taaccttgaggagttagatccagat

SEQ ID NO: 300230 - DNA, 25 bp, Artificial
  probe
  misc_feature (1)..(25): SEQ ID NO: 1631; WAN024G9I; Start 1163; Stop 1187
ataaccttgaggagttagatccaga

SEQ ID NO: 300231 - DNA, 25 bp, Artificial
  probe
  misc_feature (1)..(25): SEQ ID NO: 1631; WAN024G9I; Start 322; Stop 346
aactacgaagcagaagacacagaag

SEQ ID NO: 300232 - DNA, 25 bp, Artificial
  probe
  misc_feature (1)..(25): SEQ ID NO: 1631; WAN024G9I; Start 1172; Stop 1196
aggagttagatccagatccattcat

SEQ ID NO: 300233 - DNA, 25 bp, Artificial
  probe
  misc_feature (1)..(25): SEQ ID NO: 1631; WAN024G9I; Start 1169; Stop 1193
ttgaggagttagatccagatccatt

SEQ ID NO: 300234 - DNA, 25 bp, Artificial
  probe
  misc_feature (1)..(25): SEQ ID NO: 1631; WAN024G9I; Start 672; Stop 696
cgaagtcgaagctatgtctatcaag

SEQ ID NO: 300235 - DNA, 25 bp, Artificial
  probe
  misc_feature (1)..(25): SEQ ID NO: 1631; WAN024G9I; Start 185; Stop 209
ctgacaaggttgaagaagtgattgc

SEQ ID NO: 300236 - DNA, 25 bp, Artificial
  probe
  misc_feature (1)..(25): SEQ ID NO: 1631; WAN024G9I; Start 184; Stop 208
gctgacaaggttgaagaagtgattg

SEQ ID NO: 300237 - DNA, 25 bp, Artificial
  probe
  misc_feature (1)..(25): SEQ ID NO: 1631; WAN024G9I; Start 1161; Stop 1185
gtataaccttgaggagttagatcca

SEQ ID NO: 300238 - DNA, 25 bp, Artificial
  probe
  misc_feature (1)..(25): SEQ ID NO: 1631; WAN024G9I; Start 1160; Stop 1184
tgtataaccttgaggagttagatcc

SEQ ID NO: 300239 - DNA, 25 bp, Artificial
  probe
  misc_feature (1)..(25): SEQ ID NO: 1631; WAN024G9I; Start 62; Stop 86
gtcaagatagcgaaacatttacaga

SEQ ID NO: 300240 - DNA, 25 bp, Artificial
  probe
  misc_feature (1)..(25): SEQ ID NO: 1631; WAN024G9I; Start 183; Stop 207
tgctgacaaggttgaagaagtgatt

SEQ ID NO: 300241 - DNA, 25 bp, Artificial
  probe
  misc_feature (1)..(25): SEQ ID NO: 1631; WAN024G9I; Start 1173; Stop 1197
ggagttagatccagatccattcatg

SEQ ID NO: 300242 - DNA, 25 bp, Artificial
  probe
  misc_feature (1)..(25): SEQ ID NO: 1631; WAN024G9I; Start 1171; Stop 1195
gaggagttagatccagatccattca

SEQ ID NO: 300243 - DNA, 25 bp, Artificial
  probe
  misc_feature (1)..(25): SEQ ID NO: 1631; WAN024G9I; Start 1170; Stop 1194
tgaggagttagatccagatccattc

SEQ ID NO: 300244 - DNA, 25 bp, Artificial
  probe
  misc_feature (1)..(25): SEQ ID NO: 1631; WAN024G9I; Start 1168; Stop 1192
cttgaggagttagatccagatccat

SEQ ID NO: 300245 - DNA, 25 bp, Artificial
  probe
  misc_feature (1)..(25): SEQ ID NO: 1631; WAN024G9I; Start 1158; Stop 1182
agtgtataaccttgaggagttagat

SEQ ID NO: 300246 - DNA, 25 bp, Artificial
  probe
  misc_feature (1)..(25): SEQ ID NO: 1631; WAN024G9I; Start 64; Stop 88
caagatagcgaaacatttacagaga

SEQ ID NO: 300247 - DNA, 25 bp, Artificial
  probe
  misc_feature (1)..(25): SEQ ID NO: 1631; WAN024G9I; Start 63; Stop 87
tcaagatagcgaaacatttacagag

SEQ ID NO: 300248 - DNA, 25 bp, Artificial
  probe
  misc_feature (1)..(25): SEQ ID NO: 1631; WAN024G9I; Start 1162; Stop 1186
tataaccttgaggagttagatccag

SEQ ID NO: 300249 - DNA, 25 bp, Artificial
  probe
  misc_feature (1)..(25): SEQ ID NO: 1631; WAN024G9I; Start 1165; Stop 1189
aaccttgaggagttagatccagatc

SEQ ID NO: 300250 - DNA, 25 bp, Artificial
  probe
  misc_feature (1)..(25): SEQ ID NO: 1631; WAN024G9I; Start 321; Stop 345
caactacgaagcagaagacacagaa

SEQ ID NO: 300251 - DNA, 25 bp, Artificial
  probe
  misc_feature (1)..(25): SEQ ID NO: 1631; WAN024G9I; Start 870; Stop 894
tacggataccattaactttaacggc

SEQ ID NO: 300252 - DNA, 25 bp, Artificial
  probe
  misc_feature (1)..(25): SEQ ID NO: 1631; WAN024G9I; Start 431; Stop 455
atcaagagaaattcaaagaagcagg

SEQ ID NO: 300253 - DNA, 25 bp, Artificial
  probe
  misc_feature (1)..(25): SEQ ID NO: 1631; WAN024G9I; Start 423; Stop 447
gtgggcttatcaagagaaattcaaa

SEQ ID NO: 300254 - DNA, 25 bp, Artificial
  probe
  misc_feature (1)..(25): SEQ ID NO: 1632; WAN024D7D; Start 1444; Stop 1468
ctcgtagtcgctattattgtagtga

SEQ ID NO: 300255 - DNA, 25 bp, Artificial
  probe
  misc_feature (1)..(25): SEQ ID NO: 1632; WAN024D7D; Start 33; Stop 57
gccttcatcttacaccgtattattg

SEQ ID NO: 300256 - DNA, 25 bp, Artificial
  probe
  misc_feature (1)..(25): SEQ ID NO: 1632; WAN024D7D; Start 32; Stop 56
tgccttcatcttacaccgtattatt

SEQ ID NO: 300257 - DNA, 25 bp, Artificial
  probe
  misc_feature (1)..(25): SEQ ID NO: 1632; WAN024D7D; Start 914; Stop 938
atattgtcggttcatctacttctgc

SEQ ID NO: 300258 - DNA, 25 bp, Artificial
  probe
  misc_feature (1)..(25): SEQ ID NO: 1632; WAN024D7D; Start 31; Stop 55
atgccttcatcttacaccgtattat

SEQ ID NO: 300259 - DNA, 25 bp, Artificial
  probe
  misc_feature (1)..(25): SEQ ID NO: 1632; WAN024D7D; Start 1490; Stop 1514
gaaccttccttccattcctataact

SEQ ID NO: 300260 - DNA, 25 bp, Artificial
  probe
  misc_feature (1)..(25): SEQ ID NO: 1632; WAN024D7D; Start 321; Stop 345
tgcctctatcgtgaagaagtataag

SEQ ID NO: 300261 - DNA, 25 bp, Artificial
  probe
  misc_feature (1)..(25): SEQ ID NO: 1632; WAN024D7D; Start 318; Stop 342
gattgcctctatcgtgaagaagtat

SEQ ID NO: 300262 - DNA, 25 bp, Artificial
  probe
  misc_feature (1)..(25): SEQ ID NO: 1632; WAN024D7D; Start 1089; Stop 1113
gattgctcgtggtattcaagttatc

SEQ ID NO: 300263 - DNA, 25 bp, Artificial
  probe
  misc_feature (1)..(25): SEQ ID NO: 1632; WAN024D7D; Start 320; Stop 344
ttgcctctatcgtgaagaagtataa

SEQ ID NO: 300264 - DNA, 25 bp, Artificial
  probe
  misc_feature (1)..(25): SEQ ID NO: 1632; WAN024D7D; Start 1492; Stop 1516
accttccttccattcctataactaa

SEQ ID NO: 300265 - DNA, 25 bp, Artificial
  probe
  misc_feature (1)..(25): SEQ ID NO: 1632; WAN024D7D; Start 1491; Stop 1515
aaccttccttccattcctataacta

SEQ ID NO: 300266 - DNA, 25 bp, Artificial
  probe
  misc_feature (1)..(25): SEQ ID NO: 1632; WAN024D7D; Start 1091; Stop 1115
ttgctcgtggtattcaagttatcat

SEQ ID NO: 300267 - DNA, 25 bp, Artificial
  probe
  misc_feature (1)..(25): SEQ ID NO: 1632; WAN024D7D; Start 1090; Stop 1114
attgctcgtggtattcaagttatca

SEQ ID NO: 300268 - DNA, 25 bp, Artificial
  probe
  misc_feature (1)..(25): SEQ ID NO: 1632; WAN024D7D; Start 319; Stop 343
attgcctctatcgtgaagaagtata

SEQ ID NO: 300269 - DNA, 25 bp, Artificial
  probe
  misc_feature (1)..(25): SEQ ID NO: 1632; WAN024D7D; Start 1443; Stop 1467
actcgtagtcgctattattgtagtg

SEQ ID NO: 300270 - DNA, 25 bp, Artificial
  probe
  misc_feature (1)..(25): SEQ ID NO: 1632; WAN024D7D; Start 247; Stop 271
gtagccttcttcatccttatggttg

SEQ ID NO: 300271 - DNA, 25 bp, Artificial
  probe
  misc_feature (1)..(25): SEQ ID NO: 1632; WAN024D7D; Start 245; Stop 269
atgtagccttcttcatccttatggt

SEQ ID NO: 300272 - DNA, 25 bp, Artificial
  probe
  misc_feature (1)..(25): SEQ ID NO: 1632; WAN024D7D; Start 1442; Stop 1466
aactcgtagtcgctattattgtagt

SEQ ID NO: 300273 - DNA, 25 bp, Artificial
  probe
  misc_feature (1)..(25): SEQ ID NO: 1632; WAN024D7D; Start 246; Stop 270
tgtagccttcttcatccttatggtt

SEQ ID NO: 300274 - DNA, 25 bp, Artificial
  probe
  misc_feature (1)..(25): SEQ ID NO: 1632; WAN024D7D; Start 1447; Stop 1471
gtagtcgctattattgtagtgacca

SEQ ID NO: 300275 - DNA, 25 bp, Artificial
  probe
  misc_feature (1)..(25): SEQ ID NO: 1632; WAN024D7D; Start 1445; Stop 1469
tcgtagtcgctattattgtagtgac

SEQ ID NO: 300276 - DNA, 25 bp, Artificial
  probe
  misc_feature (1)..(25): SEQ ID NO: 1632; WAN024D7D; Start 1449; Stop 1473
agtcgctattattgtagtgaccatc

SEQ ID NO: 300277 - DNA, 25 bp, Artificial
  probe
  misc_feature (1)..(25): SEQ ID NO: 1632; WAN024D7D; Start 34; Stop 58
ccttcatcttacaccgtattattga

SEQ ID NO: 300278 - DNA, 25 bp, Artificial
  probe
  misc_feature (1)..(25): SEQ ID NO: 1632; WAN024D7D; Start 1092; Stop 1116
tgctcgtggtattcaagttatcatg

SEQ ID NO: 300279 - DNA, 25 bp, Artificial
  probe
  misc_feature (1)..(25): SEQ ID NO: 1632; WAN024D7D; Start 1448; Stop 1472
tagtcgctattattgtagtgaccat

SEQ ID NO: 300280 - DNA, 25 bp, Artificial
  probe
  misc_feature (1)..(25): SEQ ID NO: 1632; WAN024D7D; Start 1406; Stop 1430
gtatcaacattggtacttggtggaa

SEQ ID NO: 300281 - DNA, 25 bp, Artificial
  probe
  misc_feature (1)..(25): SEQ ID NO: 1632; WAN024D7D; Start 317; Stop 341
ggattgcctctatcgtgaagaagta

SEQ ID NO: 300282 - DNA, 25 bp, Artificial
  probe
  misc_feature (1)..(25): SEQ ID NO: 1632; WAN024D7D; Start 248; Stop 272
tagccttcttcatccttatggttgg

SEQ ID NO: 300283 - DNA, 25 bp, Artificial
  probe
  misc_feature (1)..(25): SEQ ID NO: 1632; WAN024D7D; Start 1446; Stop 1470
cgtagtcgctattattgtagtgacc

SEQ ID NO: 300284 - DNA, 25 bp, Artificial
  probe
  misc_feature (1)..(25): SEQ ID NO: 1632; WAN024D7D; Start 322; Stop 346
gcctctatcgtgaagaagtataagg

SEQ ID NO: 300285 - DNA, 25 bp, Artificial
  probe
  misc_feature (1)..(25): SEQ ID NO: 1632; WAN024D7D; Start 909; Stop 933
tggtaatattgtcggttcatctact

SEQ ID NO: 300286 - DNA, 25 bp, Artificial
  probe
  misc_feature (1)..(25): SEQ ID NO: 1632; WAN024D7D; Start 1450; Stop 1474
gtcgctattattgtagtgaccatcg

SEQ ID NO: 300287 - DNA, 25 bp, Artificial
  probe
  misc_feature (1)..(25): SEQ ID NO: 1633; WAN024G2E; Start 682; Stop 706
aacaatatcaaggaactggctcata

SEQ ID NO: 300288 - DNA, 25 bp, Artificial
  probe
  misc_feature (1)..(25): SEQ ID NO: 1633; WAN024G2E; Start 683; Stop 707
acaatatcaaggaactggctcatat

SEQ ID NO: 300289 - DNA, 25 bp, Artificial
  probe
  misc_feature (1)..(25): SEQ ID NO: 1633; WAN024G2E; Start 284; Stop 308
aatatcttggcaaggtggattcttc

SEQ ID NO: 300290 - DNA, 25 bp, Artificial
  probe
  misc_feature (1)..(25): SEQ ID NO: 1633; WAN024G2E; Start 566; Stop 590
aacaacgaatcctatctgaccttgg

SEQ ID NO: 300291 - DNA, 25 bp, Artificial
  probe
  misc_feature (1)..(25): SEQ ID NO: 1633; WAN024G2E; Start 681; Stop 705
aaacaatatcaaggaactggctcat

SEQ ID NO: 300292 - DNA, 25 bp, Artificial
  probe
  misc_feature (1)..(25): SEQ ID NO: 1633; WAN024G2E; Start 646; Stop 670
actaagaagatttaccttgggcatt

SEQ ID NO: 300293 - DNA, 25 bp, Artificial
  probe
  misc_feature (1)..(25): SEQ ID NO: 1633; WAN024G2E; Start 401; Stop 425
agttctatcgctttatgaaggatga

SEQ ID NO: 300294 - DNA, 25 bp, Artificial
  probe
  misc_feature (1)..(25): SEQ ID NO: 1633; WAN024G2E; Start 400; Stop 424
cagttctatcgctttatgaaggatg

SEQ ID NO: 300295 - DNA, 25 bp, Artificial
  probe
  misc_feature (1)..(25): SEQ ID NO: 1633; WAN024G2E; Start 785; Stop 809
ccgcaacaccattgacagagatata

SEQ ID NO: 300296 - DNA, 25 bp, Artificial
  probe
  misc_feature (1)..(25): SEQ ID NO: 1633; WAN024G2E; Start 564; Stop 588
caaacaacgaatcctatctgacctt

SEQ ID NO: 300297 - DNA, 25 bp, Artificial
  probe
  misc_feature (1)..(25): SEQ ID NO: 1633; WAN024G2E; Start 645; Stop 669
tactaagaagatttaccttgggcat

SEQ ID NO: 300298 - DNA, 25 bp, Artificial
  probe
  misc_feature (1)..(25): SEQ ID NO: 1633; WAN024G2E; Start 647; Stop 671
ctaagaagatttaccttgggcattt

SEQ ID NO: 300299 - DNA, 25 bp, Artificial
  probe
  misc_feature (1)..(25): SEQ ID NO: 1633; WAN024G2E; Start 746; Stop 770
tcggagtagactttaaggtttatga

SEQ ID NO: 300300 - DNA, 25 bp, Artificial
  probe
  misc_feature (1)..(25): SEQ ID NO: 1633; WAN024G2E; Start 650; Stop 674
agaagatttaccttgggcatttatc

SEQ ID NO: 300301 - DNA, 25 bp, Artificial
  probe
  misc_feature (1)..(25): SEQ ID NO: 1633; WAN024G2E; Start 399; Stop 423
gcagttctatcgctttatgaaggat

SEQ ID NO: 300302 - DNA, 25 bp, Artificial
  probe
  misc_feature (1)..(25): SEQ ID NO: 1633; WAN024G2E; Start 766; Stop 790
tatgatacctcaccagataccgcaa

SEQ ID NO: 300303 - DNA, 25 bp, Artificial
  probe
  misc_feature (1)..(25): SEQ ID NO: 1633; WAN024G2E; Start 765; Stop 789
ttatgatacctcaccagataccgca

SEQ ID NO: 300304 - DNA, 25 bp, Artificial
  probe
  misc_feature (1)..(25): SEQ ID NO: 1633; WAN024G2E; Start 649; Stop 673
aagaagatttaccttgggcatttat

SEQ ID NO: 300305 - DNA, 25 bp, Artificial
  probe
  misc_feature (1)..(25): SEQ ID NO: 1633; WAN024G2E; Start 763; Stop 787
gtttatgatacctcaccagataccg

SEQ ID NO: 300306 - DNA, 25 bp, Artificial
  probe
  misc_feature (1)..(25): SEQ ID NO: 1633; WAN024G2E; Start 560; Stop 584
gactcaaacaacgaatcctatctga

SEQ ID NO: 300307 - DNA, 25 bp, Artificial
  probe
  misc_feature (1)..(25): SEQ ID NO: 1633; WAN024G2E; Start 684; Stop 708
caatatcaaggaactggctcatatg

SEQ ID NO: 300308 - DNA, 25 bp, Artificial
  probe
  misc_feature (1)..(25): SEQ ID NO: 1633; WAN024G2E; Start 632; Stop 656
cgctaggaaatcgtactaagaagat

SEQ ID NO: 300309 - DNA, 25 bp, Artificial
  probe
  misc_feature (1)..(25): SEQ ID NO: 1633; WAN024G2E; Start 561; Stop 585
actcaaacaacgaatcctatctgac

SEQ ID NO: 300310 - DNA, 25 bp, Artificial
  probe
  misc_feature (1)..(25): SEQ ID NO: 1633; WAN024G2E; Start 565; Stop 589
aaacaacgaatcctatctgaccttg

SEQ ID NO: 300311 - DNA, 25 bp, Artificial
  probe
  misc_feature (1)..(25): SEQ ID NO: 1633; WAN024G2E; Start 449; Stop 473
atacaggttatgtcagtgaccgtat

SEQ ID NO: 300312 - DNA, 25 bp, Artificial
  probe
  misc_feature (1)..(25): SEQ ID NO: 1633; WAN024G2E; Start 644; Stop 668
gtactaagaagatttaccttgggca

SEQ ID NO: 300313 - DNA, 25 bp, Artificial
  probe
  misc_feature (1)..(25): SEQ ID NO: 1633; WAN024G2E; Start 642; Stop 666
tcgtactaagaagatttaccttggg

SEQ ID NO: 300314 - DNA, 25 bp, Artificial
  probe
  misc_feature (1)..(25): SEQ ID NO: 1633; WAN024G2E; Start 559; Stop 583
cgactcaaacaacgaatcctatctg

SEQ ID NO: 300315 - DNA, 25 bp, Artificial
  probe
  misc_feature (1)..(25): SEQ ID NO: 1633; WAN024G2E; Start 223; Stop 247
cgcaagtatggtatggatctttatg

SEQ ID NO: 300316 - DNA, 25 bp, Artificial
  probe
  misc_feature (1)..(25): SEQ ID NO: 1633; WAN024G2E; Start 222; Stop 246
tcgcaagtatggtatggatctttat

SEQ ID NO: 300317 - DNA, 25 bp, Artificial
  probe
  misc_feature (1)..(25): SEQ ID NO: 1633; WAN024G2E; Start 221; Stop 245
ctcgcaagtatggtatggatcttta

SEQ ID NO: 300318 - DNA, 25 bp, Artificial
  probe
  misc_feature (1)..(25): SEQ ID NO: 1633; WAN024G2E; Start 747; Stop 771
cggagtagactttaaggtttatgat

SEQ ID NO: 300319 - DNA, 25 bp, Artificial
  probe
  misc_feature (1)..(25): SEQ ID NO: 1633; WAN024G2E; Start 225; Stop 249
caagtatggtatggatctttatgcc

SEQ ID NO: 300320 - DNA, 25 bp, Artificial
  probe
  misc_feature (1)..(25): SEQ ID NO: 1634; WAN024CIA; Start 113; Stop 137
ttgatgacggttctacggataattc

SEQ ID NO: 300321 - DNA, 25 bp, Artificial
  probe
  misc_feature (1)..(25): SEQ ID NO: 1634; WAN024CIA; Start 110; Stop 134
tagttgatgacggttctacggataa

SEQ ID NO: 300322 - DNA, 25 bp, Artificial
  probe
  misc_feature (1)..(25): SEQ ID NO: 1634; WAN024CIA; Start 109; Stop 133
ttagttgatgacggttctacggata

SEQ ID NO: 300323 - DNA, 25 bp, Artificial
  probe
  misc_feature (1)..(25): SEQ ID NO: 1634; WAN024CIA; Start 112; Stop 136
gttgatgacggttctacggataatt

SEQ ID NO: 300324 - DNA, 25 bp, Artificial
  probe
  misc_feature (1)..(25): SEQ ID NO: 1634; WAN024CIA; Start 115; Stop 139
gatgacggttctacggataattctg

SEQ ID NO: 300325 - DNA, 25 bp, Artificial
  probe
  misc_feature (1)..(25): SEQ ID NO: 1634; WAN024CIA; Start 111; Stop 135
agttgatgacggttctacggataat

SEQ ID NO: 300326 - DNA, 25 bp, Artificial
  probe
  misc_feature (1)..(25): SEQ ID NO: 1634; WAN024CIA; Start 114; Stop 138
tgatgacggttctacggataattct

SEQ ID NO: 300327 - DNA, 25 bp, Artificial
  probe
  misc_feature (1)..(25): SEQ ID NO: 1634; WAN024CIA; Start 260; Stop 284
tcacgattgttgattcagatgatat

SEQ ID NO: 300328 - DNA, 25 bp, Artificial
  probe
  misc_feature (1)..(25): SEQ ID NO: 1634; WAN024CIA; Start 815; Stop 839
accatcaattaacagatactgagga

SEQ ID NO: 300329 - DNA, 25 bp, Artificial
  probe
  misc_feature (1)..(25): SEQ ID NO: 1634; WAN024CIA; Start 116; Stop 140
atgacggttctacggataattctgg

SEQ ID NO: 300330 - DNA, 25 bp, Artificial
  probe
  misc_feature (1)..(25): SEQ ID NO: 1634; WAN024CIA; Start 816; Stop 840
ccatcaattaacagatactgaggaa

SEQ ID NO: 300331 - DNA, 25 bp, Artificial
  probe
  misc_feature (1)..(25): SEQ ID NO: 1634; WAN024CIA; Start 445; Stop 469
attatgaaccgtcaagcaggagatt

SEQ ID NO: 300332 - DNA, 25 bp, Artificial
  probe
  misc_feature (1)..(25): SEQ ID NO: 1634; WAN024CIA; Start 444; Stop 468
aattatgaaccgtcaagcaggagat

SEQ ID NO: 300333 - DNA, 25 bp, Artificial
  probe
  misc_feature (1)..(25): SEQ ID NO: 1634; WAN024CIA; Start 67; Stop 91
gagcatattctgaagcaaacctatc

SEQ ID NO: 300334 - DNA, 25 bp, Artificial
  probe
  misc_feature (1)..(25): SEQ ID NO: 1634; WAN024CIA; Start 814; Stop 838
taccatcaattaacagatactgagg

SEQ ID NO: 300335 - DNA, 25 bp, Artificial
  probe
  misc_feature (1)..(25): SEQ ID NO: 1634; WAN024CIA; Start 487; Stop 511
gcctttatattgccgacatttaagt

SEQ ID NO: 300336 - DNA, 25 bp, Artificial
  probe
  misc_feature (1)..(25): SEQ ID NO: 1634; WAN024CIA; Start 639; Stop 663
gtatagaagacgttcaggaagcatc

SEQ ID NO: 300337 - DNA, 25 bp, Artificial
  probe
  misc_feature (1)..(25): SEQ ID NO: 1634; WAN024CIA; Start 66; Stop 90
cgagcatattctgaagcaaacctat

SEQ ID NO: 300338 - DNA, 25 bp, Artificial
  probe
  misc_feature (1)..(25): SEQ ID NO: 1634; WAN024CIA; Start 690; Stop 714
ggcaagagatattgttgaagtgttt

SEQ ID NO: 300339 - DNA, 25 bp, Artificial
  probe
  misc_feature (1)..(25): SEQ ID NO: 1634; WAN024CIA; Start 365; Stop 389
attatgacgaaagtgacgggaattt

SEQ ID NO: 300340 - DNA, 25 bp, Artificial
  probe
  misc_feature (1)..(25): SEQ ID NO: 1634; WAN024CIA; Start 640; Stop 664
tatagaagacgttcaggaagcatca

SEQ ID NO: 300341 - DNA, 25 bp, Artificial
  probe
  misc_feature (1)..(25): SEQ ID NO: 1634; WAN024CIA; Start 304; Stop 328
gaaactctttatcagcaagtccaag

SEQ ID NO: 300342 - DNA, 25 bp, Artificial
  probe
  misc_feature (1)..(25): SEQ ID NO: 1634; WAN024CIA; Start 69; Stop 93
gcatattctgaagcaaacctatcaa

SEQ ID NO: 300343 - DNA, 25 bp, Artificial
  probe
  misc_feature (1)..(25): SEQ ID NO: 1634; WAN024CIA; Start 68; Stop 92
agcatattctgaagcaaacctatca

SEQ ID NO: 300344 - DNA, 25 bp, Artificial
  probe
  misc_feature (1)..(25): SEQ ID NO: 1634; WAN024CIA; Start 301; Stop 325
attgaaactctttatcagcaagtcc

SEQ ID NO: 300345 - DNA, 25 bp, Artificial
  probe
  misc_feature (1)..(25): SEQ ID NO: 1634; WAN024CIA; Start 437; Stop 461
tacaagaaattatgaaccgtcaagc

SEQ ID NO: 300346 - DNA, 25 bp, Artificial
  probe
  misc_feature (1)..(25): SEQ ID NO: 1634; WAN024CIA; Start 337; Stop 361
gcagatgttgttatagggaattact

SEQ ID NO: 300347 - DNA, 25 bp, Artificial
  probe
  misc_feature (1)..(25): SEQ ID NO: 1634; WAN024CIA; Start 303; Stop 327
tgaaactctttatcagcaagtccaa

SEQ ID NO: 300348 - DNA, 25 bp, Artificial
  probe
  misc_feature (1)..(25): SEQ ID NO: 1634; WAN024CIA; Start 302; Stop 326
ttgaaactctttatcagcaagtcca

SEQ ID NO: 300349 - DNA, 25 bp, Artificial
  probe
  misc_feature (1)..(25): SEQ ID NO: 1634; WAN024CIA; Start 638; Stop 662
tgtatagaagacgttcaggaagcat

SEQ ID NO: 300350 - DNA, 25 bp, Artificial
  probe
  misc_feature (1)..(25): SEQ ID NO: 1634; WAN024CIA; Start 635; Stop 659
atctgtatagaagacgttcaggaag

SEQ ID NO: 300351 - DNA, 25 bp, Artificial
  probe
  misc_feature (1)..(25): SEQ ID NO: 1634; WAN024CIA; Start 108; Stop 132
tttagttgatgacggttctacggat

SEQ ID NO: 300352 - DNA, 25 bp, Artificial
  probe
  misc_feature (1)..(25): SEQ ID NO: 1634; WAN024CIA; Start 439; Stop 463
caagaaattatgaaccgtcaagcag

SEQ ID NO: 300353 - DNA, 25 bp, Artificial
  probe
  misc_feature (1)..(25): SEQ ID NO: 1635; WAN024C87; Start 329; Stop 353
tgattcaacagaccaacaagtatct

SEQ ID NO: 300354 - DNA, 25 bp, Artificial
  probe
  misc_feature (1)..(25): SEQ ID NO: 1635; WAN024C87; Start 330; Stop 354
gattcaacagaccaacaagtatctt

SEQ ID NO: 300355 - DNA, 25 bp, Artificial
  probe
  misc_feature (1)..(25): SEQ ID NO: 1635; WAN024C87; Start 325; Stop 349
gaattgattcaacagaccaacaagt

SEQ ID NO: 300356 - DNA, 25 bp, Artificial
  probe
  misc_feature (1)..(25): SEQ ID NO: 1635; WAN024C87; Start 324; Stop 348
agaattgattcaacagaccaacaag

SEQ ID NO: 300357 - DNA, 25 bp, Artificial
  probe
  misc_feature (1)..(25): SEQ ID NO: 1635; WAN024C87; Start 322; Stop 346
gaagaattgattcaacagaccaaca

SEQ ID NO: 300358 - DNA, 25 bp, Artificial
  probe
  misc_feature (1)..(25): SEQ ID NO: 1635; WAN024C87; Start 441; Stop 465
cttagcggttaatccaagtgttctc

SEQ ID NO: 300359 - DNA, 25 bp, Artificial
  probe
  misc_feature (1)..(25): SEQ ID NO: 1635; WAN024C87; Start 321; Stop 345
agaagaattgattcaacagaccaac

SEQ ID NO: 300360 - DNA, 25 bp, Artificial
  probe
  misc_feature (1)..(25): SEQ ID NO: 1635; WAN024C87; Start 323; Stop 347
aagaattgattcaacagaccaacaa

SEQ ID NO: 300361 - DNA, 25 bp, Artificial
  probe
  misc_feature (1)..(25): SEQ ID NO: 1635; WAN024C87; Start 328; Stop 352
ttgattcaacagaccaacaagtatc

SEQ ID NO: 300362 - DNA, 25 bp, Artificial
  probe
  misc_feature (1)..(25): SEQ ID NO: 1635; WAN024C87; Start 326; Stop 350
aattgattcaacagaccaacaagta

SEQ ID NO: 300363 - DNA, 25 bp, Artificial
  probe
  misc_feature (1)..(25): SEQ ID NO: 1635; WAN024C87; Start 320; Stop 344
aagaagaattgattcaacagaccaa

SEQ ID NO: 300364 - DNA, 25 bp, Artificial
  probe
  misc_feature (1)..(25): SEQ ID NO: 1635; WAN024C87; Start 447; Stop 471
ggttaatccaagtgttctcctcatg

SEQ ID NO: 300365 - DNA, 25 bp, Artificial
  probe
  misc_feature (1)..(25): SEQ ID NO: 1635; WAN024C87; Start 327; Stop 351
attgattcaacagaccaacaagtat

SEQ ID NO: 300366 - DNA, 25 bp, Artificial
  probe
  misc_feature (1)..(25): SEQ ID NO: 1635; WAN024C87; Start 446; Stop 470
cggttaatccaagtgttctcctcat

SEQ ID NO: 300367 - DNA, 25 bp, Artificial
  probe
  misc_feature (1)..(25): SEQ ID NO: 1635; WAN024C87; Start 442; Stop 466
ttagcggttaatccaagtgttctcc

SEQ ID NO: 300368 - DNA, 25 bp, Artificial
  probe
  misc_feature (1)..(25): SEQ ID NO: 1635; WAN024C87; Start 806; Stop 830
ttgaggagcaagctattcatgtaag

SEQ ID NO: 300369 - DNA, 25 bp, Artificial
  probe
  misc_feature (1)..(25): SEQ ID NO: 1635; WAN024C87; Start 42; Stop 66
cgatgtccctgttattgagaatttg

SEQ ID NO: 300370 - DNA, 25 bp, Artificial
  probe
  misc_feature (1)..(25): SEQ ID NO: 1635; WAN024C87; Start 41; Stop 65
acgatgtccctgttattgagaattt

SEQ ID NO: 300371 - DNA, 25 bp, Artificial
  probe
  misc_feature (1)..(25): SEQ ID NO: 1635; WAN024C87; Start 805; Stop 829
gttgaggagcaagctattcatgtaa

SEQ ID NO: 300372 - DNA, 25 bp, Artificial
  probe
  misc_feature (1)..(25): SEQ ID NO: 1635; WAN024C87; Start 440; Stop 464
ccttagcggttaatccaagtgttct

SEQ ID NO: 300373 - DNA, 25 bp, Artificial
  probe
  misc_feature (1)..(25): SEQ ID NO: 1635; WAN024C87; Start 604; Stop 628
gaccaaattgctgttatgaaagatg

SEQ ID NO: 300374 - DNA, 25 bp, Artificial
  probe
  misc_feature (1)..(25): SEQ ID NO: 1635; WAN024C87; Start 603; Stop 627
agaccaaattgctgttatgaaagat

SEQ ID NO: 300375 - DNA, 25 bp, Artificial
  probe
  misc_feature (1)..(25): SEQ ID NO: 1635; WAN024C87; Start 43; Stop 67
gatgtccctgttattgagaatttga

SEQ ID NO: 300376 - DNA, 25 bp, Artificial
  probe
  misc_feature (1)..(25): SEQ ID NO: 1635; WAN024C87; Start 678; Stop 702
taatgagtttgtggcaacctttatc

SEQ ID NO: 300377 - DNA, 25 bp, Artificial
  probe
  misc_feature (1)..(25): SEQ ID NO: 1635; WAN024C87; Start 677; Stop 701
ctaatgagtttgtggcaacctttat

SEQ ID NO: 300378 - DNA, 25 bp, Artificial
  probe
  misc_feature (1)..(25): SEQ ID NO: 1635; WAN024C87; Start 40; Stop 64
cacgatgtccctgttattgagaatt

SEQ ID NO: 300379 - DNA, 25 bp, Artificial
  probe
  misc_feature (1)..(25): SEQ ID NO: 1635; WAN024C87; Start 45; Stop 69
tgtccctgttattgagaatttgaac

SEQ ID NO: 300380 - DNA, 25 bp, Artificial
  probe
  misc_feature (1)..(25): SEQ ID NO: 1635; WAN024C87; Start 837; Stop 861
tcccgaagagtttatcaaagatgaa

SEQ ID NO: 300381 - DNA, 25 bp, Artificial
  probe
  misc_feature (1)..(25): SEQ ID NO: 1635; WAN024C87; Start 33; Stop 57
aatctaccacgatgtccctgttatt

SEQ ID NO: 300382 - DNA, 25 bp, Artificial
  probe
  misc_feature (1)..(25): SEQ ID NO: 1635; WAN024C87; Start 32; Stop 56
aaatctaccacgatgtccctgttat

SEQ ID NO: 300383 - DNA, 25 bp, Artificial
  probe
  misc_feature (1)..(25): SEQ ID NO: 1635; WAN024C87; Start 836; Stop 860
gtcccgaagagtttatcaaagatga

SEQ ID NO: 300384 - DNA, 25 bp, Artificial
  probe
  misc_feature (1)..(25): SEQ ID NO: 1635; WAN024C87; Start 44; Stop 68
atgtccctgttattgagaatttgaa

SEQ ID NO: 300385 - DNA, 25 bp, Artificial
  probe
  misc_feature (1)..(25): SEQ ID NO: 1635; WAN024C87; Start 448; Stop 472
gttaatccaagtgttctcctcatgg

SEQ ID NO: 300386 - DNA, 25 bp, Artificial
  probe
  misc_feature (1)..(25): SEQ ID NO: 1636; WAN024CLI; Start 64; Stop 88
cctgtctttcatgttctagtcattc

SEQ ID NO: 300387 - DNA, 25 bp, Artificial
  probe
  misc_feature (1)..(25): SEQ ID NO: 1636; WAN024CLI; Start 63; Stop 87
gcctgtctttcatgttctagtcatt

SEQ ID NO: 300388 - DNA, 25 bp, Artificial
  probe
  misc_feature (1)..(25): SEQ ID NO: 1636; WAN024CLI; Start 58; Stop 82
tttgtgcctgtctttcatgttctag

SEQ ID NO: 300389 - DNA, 25 bp, Artificial
  probe
  misc_feature (1)..(25): SEQ ID NO: 1636; WAN024CLI; Start 65; Stop 89
ctgtctttcatgttctagtcattct

SEQ ID NO: 300390 - DNA, 25 bp, Artificial
  probe
  misc_feature (1)..(25): SEQ ID NO: 1636; WAN024CLI; Start 66; Stop 90
tgtctttcatgttctagtcattctt

SEQ ID NO: 300391 - DNA, 25 bp, Artificial
  probe
  misc_feature (1)..(25): SEQ ID NO: 1636; WAN024CLI; Start 62; Stop 86
tgcctgtctttcatgttctagtcat

SEQ ID NO: 300392 - DNA, 25 bp, Artificial
  probe
  misc_feature (1)..(25): SEQ ID NO: 1636; WAN024CLI; Start 59; Stop 83
ttgtgcctgtctttcatgttctagt

SEQ ID NO: 300393 - DNA, 25 bp, Artificial
  probe
  misc_feature (1)..(25): SEQ ID NO: 1636; WAN024CLI; Start 61; Stop 85
gtgcctgtctttcatgttctagtca

SEQ ID NO: 300394 - DNA, 25 bp, Artificial
  probe
  misc_feature (1)..(25): SEQ ID NO: 1636; WAN024CLI; Start 60; Stop 84
tgtgcctgtctttcatgttctagtc

SEQ ID NO: 300395 - DNA, 25 bp, Artificial
  probe
  misc_feature (1)..(25): SEQ ID NO: 1636; WAN024CLI; Start 67; Stop 91
gtctttcatgttctagtcattcttt

SEQ ID NO: 300396 - DNA, 25 bp, Artificial
  probe
  misc_feature (1)..(25): SEQ ID NO: 1636; WAN024CLI; Start 55; Stop 79
aattttgtgcctgtctttcatgttc

SEQ ID NO: 300397 - DNA, 25 bp, Artificial
  probe
  misc_feature (1)..(25): SEQ ID NO: 1636; WAN024CLI; Start 57; Stop 81
ttttgtgcctgtctttcatgttcta

SEQ ID NO: 300398 - DNA, 25 bp, Artificial
  probe
  misc_feature (1)..(25): SEQ ID NO: 1636; WAN024CLI; Start 56; Stop 80
attttgtgcctgtctttcatgttct

SEQ ID NO: 300399 - DNA, 25 bp, Artificial
  probe
  misc_feature (1)..(25): SEQ ID NO: 1636; WAN024CLI; Start 70; Stop 94
tttcatgttctagtcattcttttgc

SEQ ID NO: 300400 - DNA, 25 bp, Artificial
  probe
  misc_feature (1)..(25): SEQ ID NO: 1636; WAN024CLI; Start 54; Stop 78
aaattttgtgcctgtctttcatgtt

SEQ ID NO: 300401 - DNA, 25 bp, Artificial
  probe
  misc_feature (1)..(25): SEQ ID NO: 1636; WAN024CLI; Start 71; Stop 95
ttcatgttctagtcattcttttgca

SEQ ID NO: 300402 - DNA, 25 bp, Artificial
  probe
  misc_feature (1)..(25): SEQ ID NO: 1636; WAN024CLI; Start 72; Stop 96
tcatgttctagtcattcttttgcat

SEQ ID NO: 300403 - DNA, 25 bp, Artificial
  probe
  misc_feature (1)..(25): SEQ ID NO: 1636; WAN024CLI; Start 69; Stop 93
ctttcatgttctagtcattcttttg

SEQ ID NO: 300404 - DNA, 25 bp, Artificial
  probe
  misc_feature (1)..(25): SEQ ID NO: 1636; WAN024CLI; Start 68; Stop 92
tctttcatgttctagtcattctttt

SEQ ID NO: 300405 - DNA, 25 bp, Artificial
  probe
  misc_feature (1)..(25): SEQ ID NO: 1636; WAN024CLI; Start 93; Stop 117
gcatgatagaatttatagcatgttg

SEQ ID NO: 300406 - DNA, 25 bp, Artificial
  probe
  misc_feature (1)..(25): SEQ ID NO: 1636; WAN024CLI; Start 75; Stop 99
tgttctagtcattcttttgcatgat

SEQ ID NO: 300407 - DNA, 25 bp, Artificial
  probe
  misc_feature (1)..(25): SEQ ID NO: 1636; WAN024CLI; Start 74; Stop 98
atgttctagtcattcttttgcatga

SEQ ID NO: 300408 - DNA, 25 bp, Artificial
  probe
  misc_feature (1)..(25): SEQ ID NO: 1636; WAN024CLI; Start 92; Stop 116
tgcatgatagaatttatagcatgtt

SEQ ID NO: 300409 - DNA, 25 bp, Artificial
  probe
  misc_feature (1)..(25): SEQ ID NO: 1636; WAN024CLI; Start 91; Stop 115
ttgcatgatagaatttatagcatgt

SEQ ID NO: 300410 - DNA, 25 bp, Artificial
  probe
  misc_feature (1)..(25): SEQ ID NO: 1636; WAN024CLI; Start 53; Stop 77
aaaattttgtgcctgtctttcatgt

SEQ ID NO: 300411 - DNA, 25 bp, Artificial
  probe
  misc_feature (1)..(25): SEQ ID NO: 1636; WAN024CLI; Start 78; Stop 102
tctagtcattcttttgcatgataga

SEQ ID NO: 300412 - DNA, 25 bp, Artificial
  probe
  misc_feature (1)..(25): SEQ ID NO: 1636; WAN024CLI; Start 73; Stop 97
catgttctagtcattcttttgcatg

SEQ ID NO: 300413 - DNA, 25 bp, Artificial
  probe
  misc_feature (1)..(25): SEQ ID NO: 1636; WAN024CLI; Start 76; Stop 100
gttctagtcattcttttgcatgata

SEQ ID NO: 300414 - DNA, 25 bp, Artificial
  probe
  misc_feature (1)..(25): SEQ ID NO: 1636; WAN024CLI; Start 79; Stop 103
ctagtcattcttttgcatgatagaa

SEQ ID NO: 300415 - DNA, 25 bp, Artificial
  probe
  misc_feature (1)..(25): SEQ ID NO: 1636; WAN024CLI; Start 77; Stop 101
ttctagtcattcttttgcatgatag

SEQ ID NO: 300416 - DNA, 25 bp, Artificial
  probe
  misc_feature (1)..(25): SEQ ID NO: 1636; WAN024CLI; Start 90; Stop 114
tttgcatgatagaatttatagcatg

SEQ ID NO: 300417 - DNA, 25 bp, Artificial
  probe
  misc_feature (1)..(25): SEQ ID NO: 1636; WAN024CLI; Start 87; Stop 111
tcttttgcatgatagaatttatagc

SEQ ID NO: 300418 - DNA, 25 bp, Artificial
  probe
  misc_feature (1)..(25): SEQ ID NO: 1636; WAN024CLI; Start 94; Stop 118
catgatagaatttatagcatgttga

SEQ ID NO: 300419 - DNA, 25 bp, Artificial
  probe
  misc_feature (1)..(25): SEQ ID NO: 1637; WAN024BFU; Start 555; Stop 579
tctggatattgcgattattgagtgg

SEQ ID NO: 300420 - DNA, 25 bp, Artificial
  probe
  misc_feature (1)..(25): SEQ ID NO: 1637; WAN024BFU; Start 554; Stop 578
atctggatattgcgattattgagtg

SEQ ID NO: 300421 - DNA, 25 bp, Artificial
  probe
  misc_feature (1)..(25): SEQ ID NO: 1637; WAN024BFU; Start 553; Stop 577
catctggatattgcgattattgagt

SEQ ID NO: 300422 - DNA, 25 bp, Artificial
  probe
  misc_feature (1)..(25): SEQ ID NO: 1637; WAN024BFU; Start 551; Stop 575
accatctggatattgcgattattga

SEQ ID NO: 300423 - DNA, 25 bp, Artificial
  probe
  misc_feature (1)..(25): SEQ ID NO: 1637; WAN024BFU; Start 552; Stop 576
ccatctggatattgcgattattgag

SEQ ID NO: 300424 - DNA, 25 bp, Artificial
  probe
  misc_feature (1)..(25): SEQ ID NO: 1637; WAN024BFU; Start 559; Stop 583
gatattgcgattattgagtggctga

SEQ ID NO: 300425 - DNA, 25 bp, Artificial
  probe
  misc_feature (1)..(25): SEQ ID NO: 1637; WAN024BFU; Start 550; Stop 574
aaccatctggatattgcgattattg

SEQ ID NO: 300426 - DNA, 25 bp, Artificial
  probe
  misc_feature (1)..(25): SEQ ID NO: 1637; WAN024BFU; Start 1689; Stop 1713
ggcaagtattgaaggtgatattgaa

SEQ ID NO: 300427 - DNA, 25 bp, Artificial
  probe
  misc_feature (1)..(25): SEQ ID NO: 1637; WAN024BFU; Start 560; Stop 584
atattgcgattattgagtggctgac

SEQ ID NO: 300428 - DNA, 25 bp, Artificial
  probe
  misc_feature (1)..(25): SEQ ID NO: 1637; WAN024BFU; Start 549; Stop 573
caaccatctggatattgcgattatt

SEQ ID NO: 300429 - DNA, 25 bp, Artificial
  probe
  misc_feature (1)..(25): SEQ ID NO: 1637; WAN024BFU; Start 301; Stop 325
cgtgagtatgaattgattatgctcg

SEQ ID NO: 300430 - DNA, 25 bp, Artificial
  probe
  misc_feature (1)..(25): SEQ ID NO: 1637; WAN024BFU; Start 299; Stop 323
ttcgtgagtatgaattgattatgct

SEQ ID NO: 300431 - DNA, 25 bp, Artificial
  probe
  misc_feature (1)..(25): SEQ ID NO: 1637; WAN024BFU; Start 205; Stop 229
cagattggttacttgactcaggatc

SEQ ID NO: 300432 - DNA, 25 bp, Artificial
  probe
  misc_feature (1)..(25): SEQ ID NO: 1637; WAN024BFU; Start 300; Stop 324
tcgtgagtatgaattgattatgctc

SEQ ID NO: 300433 - DNA, 25 bp, Artificial
  probe
  misc_feature (1)..(25): SEQ ID NO: 1637; WAN024BFU; Start 558; Stop 582
ggatattgcgattattgagtggctg

SEQ ID NO: 300434 - DNA, 25 bp, Artificial
  probe
  misc_feature (1)..(25): SEQ ID NO: 1637; WAN024BFU; Start 556; Stop 580
ctggatattgcgattattgagtggc

SEQ ID NO: 300435 - DNA, 25 bp, Artificial
  probe
  misc_feature (1)..(25): SEQ ID NO: 1637; WAN024BFU; Start 557; Stop 581
tggatattgcgattattgagtggct

SEQ ID NO: 300436 - DNA, 25 bp, Artificial
  probe
  misc_feature (1)..(25): SEQ ID NO: 1637; WAN024BFU; Start 1389; Stop 1413
cgagccaaccaatgacctagatatt

SEQ ID NO: 300437 - DNA, 25 bp, Artificial
  probe
  misc_feature (1)..(25): SEQ ID NO: 1637; WAN024BFU; Start 1552; Stop 1576
ggtcattacaccgactatcttgatg

SEQ ID NO: 300438 - DNA, 25 bp, Artificial
  probe
  misc_feature (1)..(25): SEQ ID NO: 1637; WAN024BFU; Start 1536; Stop 1560
gattcgtcctttctttggtcattac

SEQ ID NO: 300439 - DNA, 25 bp, Artificial
  probe
  misc_feature (1)..(25): SEQ ID NO: 1637; WAN024BFU; Start 548; Stop 572
ccaaccatctggatattgcgattat

SEQ ID NO: 300440 - DNA, 25 bp, Artificial
  probe
  misc_feature (1)..(25): SEQ ID NO: 1637; WAN024BFU; Start 145; Stop 169
ctttctggtgtttctggatttgatg

SEQ ID NO: 300441 - DNA, 25 bp, Artificial
  probe
  misc_feature (1)..(25): SEQ ID NO: 1637; WAN024BFU; Start 1537; Stop 1561
attcgtcctttctttggtcattaca

SEQ ID NO: 300442 - DNA, 25 bp, Artificial
  probe
  misc_feature (1)..(25): SEQ ID NO: 1637; WAN024BFU; Start 1551; Stop 1575
tggtcattacaccgactatcttgat

SEQ ID NO: 300443 - DNA, 25 bp, Artificial
  probe
  misc_feature (1)..(25): SEQ ID NO: 1637; WAN024BFU; Start 1728; Stop 1752
tatcgctgctattgaagaggaaatg

SEQ ID NO: 300444 - DNA, 25 bp, Artificial
  probe
  misc_feature (1)..(25): SEQ ID NO: 1637; WAN024BFU; Start 1727; Stop 1751
gtatcgctgctattgaagaggaaat

SEQ ID NO: 300445 - DNA, 25 bp, Artificial
  probe
  misc_feature (1)..(25): SEQ ID NO: 1637; WAN024BFU; Start 76; Stop 100
atccatgacttagacagaattggtt

SEQ ID NO: 300446 - DNA, 25 bp, Artificial
  probe
  misc_feature (1)..(25): SEQ ID NO: 1637; WAN024BFU; Start 85; Stop 109
ttagacagaattggtttaatcggtg

SEQ ID NO: 300447 - DNA, 25 bp, Artificial
  probe
  misc_feature (1)..(25): SEQ ID NO: 1637; WAN024BFU; Start 1550; Stop 1574
ttggtcattacaccgactatcttga

SEQ ID NO: 300448 - DNA, 25 bp, Artificial
  probe
  misc_feature (1)..(25): SEQ ID NO: 1637; WAN024BFU; Start 1535; Stop 1559
agattcgtcctttctttggtcatta

SEQ ID NO: 300449 - DNA, 25 bp, Artificial
  probe
  misc_feature (1)..(25): SEQ ID NO: 1637; WAN024BFU; Start 303; Stop 327
tgagtatgaattgattatgctcgac

SEQ ID NO: 300450 - DNA, 25 bp, Artificial
  probe
  misc_feature (1)..(25): SEQ ID NO: 1637; WAN024BFU; Start 302; Stop 326
gtgagtatgaattgattatgctcga

SEQ ID NO: 300451 - DNA, 25 bp, Artificial
  probe
  misc_feature (1)..(25): SEQ ID NO: 1637; WAN024BFU; Start 84; Stop 108
cttagacagaattggtttaatcggt

SEQ ID NO: 300452 - DNA, 25 bp, Artificial
  probe
  misc_feature (1)..(25): SEQ ID NO: 1638; WAN024GAY; Start 35; Stop 59
cggctaagacacaaactaagactaa

SEQ ID NO: 300453 - DNA, 25 bp, Artificial
  probe
  misc_feature (1)..(25): SEQ ID NO: 1638; WAN024GAY; Start 36; Stop 60
ggctaagacacaaactaagactaat

SEQ ID NO: 300454 - DNA, 25 bp, Artificial
  probe
  misc_feature (1)..(25): SEQ ID NO: 1638; WAN024GAY; Start 96; Stop 120
acaggatagtttggttacttatcgt

SEQ ID NO: 300455 - DNA, 25 bp, Artificial
  probe
  misc_feature (1)..(25): SEQ ID NO: 1638; WAN024GAY; Start 95; Stop 119
aacaggatagtttggttacttatcg

SEQ ID NO: 300456 - DNA, 25 bp, Artificial
  probe
  misc_feature (1)..(25): SEQ ID NO: 1638; WAN024GAY; Start 34; Stop 58
gcggctaagacacaaactaagacta

SEQ ID NO: 300457 - DNA, 25 bp, Artificial
  probe
  misc_feature (1)..(25): SEQ ID NO: 1638; WAN024GAY; Start 97; Stop 121
caggatagtttggttacttatcgta

SEQ ID NO: 300458 - DNA, 25 bp, Artificial
  probe
  misc_feature (1)..(25): SEQ ID NO: 1638; WAN024GAY; Start 37; Stop 61
gctaagacacaaactaagactaatt

SEQ ID NO: 300459 - DNA, 25 bp, Artificial
  probe
  misc_feature (1)..(25): SEQ ID NO: 1638; WAN024GAY; Start 98; Stop 122
aggatagtttggttacttatcgtaa

SEQ ID NO: 300460 - DNA, 25 bp, Artificial
  probe
  misc_feature (1)..(25): SEQ ID NO: 1638; WAN024GAY; Start 32; Stop 56
gagcggctaagacacaaactaagac

SEQ ID NO: 300461 - DNA, 25 bp, Artificial
  probe
  misc_feature (1)..(25): SEQ ID NO: 1638; WAN024GAY; Start 33; Stop 57
agcggctaagacacaaactaagact

SEQ ID NO: 300462 - DNA, 25 bp, Artificial
  probe
  misc_feature (1)..(25): SEQ ID NO: 1638; WAN024GAY; Start 94; Stop 118
aaacaggatagtttggttacttatc

SEQ ID NO: 300463 - DNA, 25 bp, Artificial
  probe
  misc_feature (1)..(25): SEQ ID NO: 1638; WAN024GAY; Start 31; Stop 55
ggagcggctaagacacaaactaaga

SEQ ID NO: 300464 - DNA, 25 bp, Artificial
  probe
  misc_feature (1)..(25): SEQ ID NO: 1638; WAN024GAY; Start 49; Stop 73
actaagactaattttggaaaaccag

SEQ ID NO: 300465 - DNA, 25 bp, Artificial
  probe
  misc_feature (1)..(25): SEQ ID NO: 1638; WAN024GAY; Start 38; Stop 62
ctaagacacaaactaagactaattt

SEQ ID NO: 300466 - DNA, 25 bp, Artificial
  probe
  misc_feature (1)..(25): SEQ ID NO: 1638; WAN024GAY; Start 53; Stop 77
agactaattttggaaaaccagattt

SEQ ID NO: 300467 - DNA, 25 bp, Artificial
  probe
  misc_feature (1)..(25): SEQ ID NO: 1638; WAN024GAY; Start 52; Stop 76
aagactaattttggaaaaccagatt

SEQ ID NO: 300468 - DNA, 25 bp, Artificial
  probe
  misc_feature (1)..(25): SEQ ID NO: 1638; WAN024GAY; Start 50; Stop 74
ctaagactaattttggaaaaccaga

SEQ ID NO: 300469 - DNA, 25 bp, Artificial
  probe
  misc_feature (1)..(25): SEQ ID NO: 1638; WAN024GAY; Start 26; Stop 50
ttaagggagcggctaagacacaaac

SEQ ID NO: 300470 - DNA, 25 bp, Artificial
  probe
  misc_feature (1)..(25): SEQ ID NO: 1638; WAN024GAY; Start 47; Stop 71
aaactaagactaattttggaaaacc

SEQ ID NO: 300471 - DNA, 25 bp, Artificial
  probe
  misc_feature (1)..(25): SEQ ID NO: 1638; WAN024GAY; Start 48; Stop 72
aactaagactaattttggaaaacca

SEQ ID NO: 300472 - DNA, 25 bp, Artificial
  probe
  misc_feature (1)..(25): SEQ ID NO: 1638; WAN024GAY; Start 42; Stop 66
gacacaaactaagactaattttgga

SEQ ID NO: 300473 - DNA, 25 bp, Artificial
  probe
  misc_feature (1)..(25): SEQ ID NO: 1638; WAN024GAY; Start 41; Stop 65
agacacaaactaagactaattttgg

SEQ ID NO: 300474 - DNA, 25 bp, Artificial
  probe
  misc_feature (1)..(25): SEQ ID NO: 1638; WAN024GAY; Start 54; Stop 78
gactaattttggaaaaccagatttt

SEQ ID NO: 300475 - DNA, 25 bp, Artificial
  probe
  misc_feature (1)..(25): SEQ ID NO: 1638; WAN024GAY; Start 51; Stop 75
taagactaattttggaaaaccagat

SEQ ID NO: 300476 - DNA, 25 bp, Artificial
  probe
  misc_feature (1)..(25): SEQ ID NO: 1638; WAN024GAY; Start 43; Stop 67
acacaaactaagactaattttggaa

SEQ ID NO: 300477 - DNA, 25 bp, Artificial
  probe
  misc_feature (1)..(25): SEQ ID NO: 1638; WAN024GAY; Start 6; Stop 30
tgcttatctcaaagaggcgcttaag

SEQ ID NO: 300478 - DNA, 25 bp, Artificial
  probe
  misc_feature (1)..(25): SEQ ID NO: 1638; WAN024GAY; Start 8; Stop 32
cttatctcaaagaggcgcttaaggg

SEQ ID NO: 300479 - DNA, 25 bp, Artificial
  probe
  misc_feature (1)..(25): SEQ ID NO: 1638; WAN024GAY; Start 5; Stop 29
gtgcttatctcaaagaggcgcttaa

SEQ ID NO: 300480 - DNA, 25 bp, Artificial
  probe
  misc_feature (1)..(25): SEQ ID NO: 1638; WAN024GAY; Start 9; Stop 33
ttatctcaaagaggcgcttaaggga

SEQ ID NO: 300481 - DNA, 25 bp, Artificial
  probe
  misc_feature (1)..(25): SEQ ID NO: 1638; WAN024GAY; Start 10; Stop 34
tatctcaaagaggcgcttaagggag

SEQ ID NO: 300482 - DNA, 25 bp, Artificial
  probe
  misc_feature (1)..(25): SEQ ID NO: 1638; WAN024GAY; Start 7; Stop 31
gcttatctcaaagaggcgcttaagg

SEQ ID NO: 300483 - DNA, 25 bp, Artificial
  probe
  misc_feature (1)..(25): SEQ ID NO: 1638; WAN024GAY; Start 25; Stop 49
cttaagggagcggctaagacacaaa

SEQ ID NO: 300484 - DNA, 25 bp, Artificial
  probe
  misc_feature (1)..(25): SEQ ID NO: 1638; WAN024GAY; Start 4; Stop 28
agtgcttatctcaaagaggcgctta

SEQ ID NO: 300485 - DNA, 25 bp, Artificial
  probe
  misc_feature (1)..(25): SEQ ID NO: 1639; WAN024GJW; Start 2; Stop 26
tgagtgtattggatgaagagtatct

SEQ ID NO: 300486 - DNA, 25 bp, Artificial
  probe
  misc_feature (1)..(25): SEQ ID NO: 1639; WAN024GJW; Start 1; Stop 25
atgagtgtattggatgaagagtatc

SEQ ID NO: 300487 - DNA, 25 bp, Artificial
  probe
  misc_feature (1)..(25): SEQ ID NO: 1639; WAN024GJW; Start 3; Stop 27
gagtgtattggatgaagagtatcta

SEQ ID NO: 300488 - DNA, 25 bp, Artificial
  probe
  misc_feature (1)..(25): SEQ ID NO: 1639; WAN024GJW; Start 4; Stop 28
agtgtattggatgaagagtatctaa

SEQ ID NO: 300489 - DNA, 25 bp, Artificial
  probe
  misc_feature (1)..(25): SEQ ID NO: 1639; WAN024GJW; Start 63; Stop 87
tcaagctgataactatagaacatca

SEQ ID NO: 300490 - DNA, 25 bp, Artificial
  probe
  misc_feature (1)..(25): SEQ ID NO: 1639; WAN024GJW; Start 5; Stop 29
gtgtattggatgaagagtatctaaa

SEQ ID NO: 300491 - DNA, 25 bp, Artificial
  probe
  misc_feature (1)..(25): SEQ ID NO: 1639; WAN024GJW; Start 64; Stop 88
caagctgataactatagaacatcaa

SEQ ID NO: 300492 - DNA, 25 bp, Artificial
  probe
  misc_feature (1)..(25): SEQ ID NO: 1639; WAN024GJW; Start 62; Stop 86
atcaagctgataactatagaacatc

SEQ ID NO: 300493 - DNA, 25 bp, Artificial
  probe
  misc_feature (1)..(25): SEQ ID NO: 1639; WAN024GJW; Start 61; Stop 85
aatcaagctgataactatagaacat

SEQ ID NO: 300494 - DNA, 25 bp, Artificial
  probe
  misc_feature (1)..(25): SEQ ID NO: 1639; WAN024GJW; Start 60; Stop 84
taatcaagctgataactatagaaca

SEQ ID NO: 300495 - DNA, 25 bp, Artificial
  probe
  misc_feature (1)..(25): SEQ ID NO: 1639; WAN024GJW; Start 58; Stop 82
tgtaatcaagctgataactatagaa

SEQ ID NO: 300496 - DNA, 25 bp, Artificial
  probe
  misc_feature (1)..(25): SEQ ID NO: 1639; WAN024GJW; Start 57; Stop 81
ttgtaatcaagctgataactataga

SEQ ID NO: 300497 - DNA, 25 bp, Artificial
  probe
  misc_feature (1)..(25): SEQ ID NO: 1639; WAN024GJW; Start 59; Stop 83
gtaatcaagctgataactatagaac

SEQ ID NO: 300498 - DNA, 25 bp, Artificial
  probe
  misc_feature (1)..(25): SEQ ID NO: 1639; WAN024GJW; Start 65; Stop 89
aagctgataactatagaacatcaaa

SEQ ID NO: 300499 - DNA, 25 bp, Artificial
  probe
  misc_feature (1)..(25): SEQ ID NO: 1639; WAN024GJW; Start 6; Stop 30
tgtattggatgaagagtatctaaaa

SEQ ID NO: 300500 - DNA, 25 bp, Artificial
  probe
  misc_feature (1)..(25): SEQ ID NO: 1639; WAN024GJW; Start 66; Stop 90
agctgataactatagaacatcaaaa

SEQ ID NO: 300501 - DNA, 25 bp, Artificial
  probe
  misc_feature (1)..(25): SEQ ID NO: 1639; WAN024GJW; Start 67; Stop 91
gctgataactatagaacatcaaaag

SEQ ID NO: 300502 - DNA, 25 bp, Artificial
  probe
  misc_feature (1)..(25): SEQ ID NO: 1640; WAN024CR2; Start 750; Stop 774
ggatatgactaactattgtgaagcg

SEQ ID NO: 300503 - DNA, 25 bp, Artificial
  probe
  misc_feature (1)..(25): SEQ ID NO: 1640; WAN024CR2; Start 749; Stop 773
cggatatgactaactattgtgaagc

SEQ ID NO: 300504 - DNA, 25 bp, Artificial
  probe
  misc_feature (1)..(25): SEQ ID NO: 1640; WAN024CR2; Start 1159; Stop 1183
ttagcagtagtattaggagaatcgg

SEQ ID NO: 300505 - DNA, 25 bp, Artificial
  probe
  misc_feature (1)..(25): SEQ ID NO: 1640; WAN024CR2; Start 1148; Stop 1172
aggttgaagagttagcagtagtatt

SEQ ID NO: 300506 - DNA, 25 bp, Artificial
  probe
  misc_feature (1)..(25): SEQ ID NO: 1640; WAN024CR2; Start 1147; Stop 1171
aaggttgaagagttagcagtagtat

SEQ ID NO: 300507 - DNA, 25 bp, Artificial
  probe
  misc_feature (1)..(25): SEQ ID NO: 1640; WAN024CR2; Start 746; Stop 770
tgacggatatgactaactattgtga

SEQ ID NO: 300508 - DNA, 25 bp, Artificial
  probe
  misc_feature (1)..(25): SEQ ID NO: 1640; WAN024CR2; Start 933; Stop 957
tgacataacacatccaattcctgat

SEQ ID NO: 300509 - DNA, 25 bp, Artificial
  probe
  misc_feature (1)..(25): SEQ ID NO: 1640; WAN024CR2; Start 917; Stop 941
taacaatgccagaagatgacataac

SEQ ID NO: 300510 - DNA, 25 bp, Artificial
  probe
  misc_feature (1)..(25): SEQ ID NO: 1640; WAN024CR2; Start 934; Stop 958
gacataacacatccaattcctgatt

SEQ ID NO: 300511 - DNA, 25 bp, Artificial
  probe
  misc_feature (1)..(25): SEQ ID NO: 1640; WAN024CR2; Start 932; Stop 956
atgacataacacatccaattcctga

SEQ ID NO: 300512 - DNA, 25 bp, Artificial
  probe
  misc_feature (1)..(25): SEQ ID NO: 1640; WAN024CR2; Start 921; Stop 945
aatgccagaagatgacataacacat

SEQ ID NO: 300513 - DNA, 25 bp, Artificial
  probe
  misc_feature (1)..(25): SEQ ID NO: 1640; WAN024CR2; Start 751; Stop 775
gatatgactaactattgtgaagcgt

SEQ ID NO: 300514 - DNA, 25 bp, Artificial
  probe
  misc_feature (1)..(25): SEQ ID NO: 1640; WAN024CR2; Start 249; Stop 273
atctgaggatatggttggtcgtatt

SEQ ID NO: 300515 - DNA, 25 bp, Artificial
  probe
  misc_feature (1)..(25): SEQ ID NO: 1640; WAN024CR2; Start 1160; Stop 1184
tagcagtagtattaggagaatcggc

SEQ ID NO: 300516 - DNA, 25 bp, Artificial
  probe
  misc_feature (1)..(25): SEQ ID NO: 1640; WAN024CR2; Start 233; Stop 257
cattagaattggctgtatctgagga

SEQ ID NO: 300517 - DNA, 25 bp, Artificial
  probe
  misc_feature (1)..(25): SEQ ID NO: 1640; WAN024CR2; Start 918; Stop 942
aacaatgccagaagatgacataaca

SEQ ID NO: 300518 - DNA, 25 bp, Artificial
  probe
  misc_feature (1)..(25): SEQ ID NO: 1640; WAN024CR2; Start 1100; Stop 1124
atgctccaactatgaatcaactgtt

SEQ ID NO: 300519 - DNA, 25 bp, Artificial
  probe
  misc_feature (1)..(25): SEQ ID NO: 1640; WAN024CR2; Start 234; Stop 258
attagaattggctgtatctgaggat

SEQ ID NO: 300520 - DNA, 25 bp, Artificial
  probe
  misc_feature (1)..(25): SEQ ID NO: 1640; WAN024CR2; Start 1158; Stop 1182
gttagcagtagtattaggagaatcg

SEQ ID NO: 300521 - DNA, 25 bp, Artificial
  probe
  misc_feature (1)..(25): SEQ ID NO: 1640; WAN024CR2; Start 916; Stop 940
ttaacaatgccagaagatgacataa

SEQ ID NO: 300522 - DNA, 25 bp, Artificial
  probe
  misc_feature (1)..(25): SEQ ID NO: 1640; WAN024CR2; Start 747; Stop 771
gacggatatgactaactattgtgaa

SEQ ID NO: 300523 - DNA, 25 bp, Artificial
  probe
  misc_feature (1)..(25): SEQ ID NO: 1640; WAN024CR2; Start 745; Stop 769
atgacggatatgactaactattgtg

SEQ ID NO: 300524 - DNA, 25 bp, Artificial
  probe
  misc_feature (1)..(25): SEQ ID NO: 1640; WAN024CR2; Start 1152; Stop 1176
tgaagagttagcagtagtattagga

SEQ ID NO: 300525 - DNA, 25 bp, Artificial
  probe
  misc_feature (1)..(25): SEQ ID NO: 1640; WAN024CR2; Start 1003; Stop 1027
ttgtataatcaaggttatcgtccac

SEQ ID NO: 300526 - DNA, 25 bp, Artificial
  probe
  misc_feature (1)..(25): SEQ ID NO: 1640; WAN024CR2; Start 1002; Stop 1026
gttgtataatcaaggttatcgtcca

SEQ ID NO: 300527 - DNA, 25 bp, Artificial
  probe
  misc_feature (1)..(25): SEQ ID NO: 1640; WAN024CR2; Start 748; Stop 772
acggatatgactaactattgtgaag

SEQ ID NO: 300528 - DNA, 25 bp, Artificial
  probe
  misc_feature (1)..(25): SEQ ID NO: 1640; WAN024CR2; Start 920; Stop 944
caatgccagaagatgacataacaca

SEQ ID NO: 300529 - DNA, 25 bp, Artificial
  probe
  misc_feature (1)..(25): SEQ ID NO: 1640; WAN024CR2; Start 919; Stop 943
acaatgccagaagatgacataacac

SEQ ID NO: 300530 - DNA, 25 bp, Artificial
  probe
  misc_feature (1)..(25): SEQ ID NO: 1640; WAN024CR2; Start 237; Stop 261
agaattggctgtatctgaggatatg

SEQ ID NO: 300531 - DNA, 25 bp, Artificial
  probe
  misc_feature (1)..(25): SEQ ID NO: 1640; WAN024CR2; Start 14; Stop 38
aagaatacagaactgctagtgaagt

SEQ ID NO: 300532 - DNA, 25 bp, Artificial
  probe
  misc_feature (1)..(25): SEQ ID NO: 1640; WAN024CR2; Start 248; Stop 272
tatctgaggatatggttggtcgtat

SEQ ID NO: 300533 - DNA, 25 bp, Artificial
  probe
  misc_feature (1)..(25): SEQ ID NO: 1640; WAN024CR2; Start 752; Stop 776
atatgactaactattgtgaagcgtt

SEQ ID NO: 300534 - DNA, 25 bp, Artificial
  probe
  misc_feature (1)..(25): SEQ ID NO: 1640; WAN024CR2; Start 1001; Stop 1025
agttgtataatcaaggttatcgtcc

SEQ ID NO: 300535 - DNA, 25 bp, Artificial
  probe
  misc_feature (1)..(25): SEQ ID NO: 1641; WAN024FNH; Start 135; Stop 159
atcttcttccttgcttacttctacg

SEQ ID NO: 300536 - DNA, 25 bp, Artificial
  probe
  misc_feature (1)..(25): SEQ ID NO: 1641; WAN024FNH; Start 137; Stop 161
cttcttccttgcttacttctacgag

SEQ ID NO: 300537 - DNA, 25 bp, Artificial
  probe
  misc_feature (1)..(25): SEQ ID NO: 1641; WAN024FNH; Start 136; Stop 160
tcttcttccttgcttacttctacga

SEQ ID NO: 300538 - DNA, 25 bp, Artificial
  probe
  misc_feature (1)..(25): SEQ ID NO: 1641; WAN024FNH; Start 134; Stop 158
aatcttcttccttgcttacttctac

SEQ ID NO: 300539 - DNA, 25 bp, Artificial
  probe
  misc_feature (1)..(25): SEQ ID NO: 1641; WAN024FNH; Start 138; Stop 162
ttcttccttgcttacttctacgaga

SEQ ID NO: 300540 - DNA, 25 bp, Artificial
  probe
  misc_feature (1)..(25): SEQ ID NO: 1641; WAN024FNH; Start 139; Stop 163
tcttccttgcttacttctacgagag

SEQ ID NO: 300541 - DNA, 25 bp, Artificial
  probe
  misc_feature (1)..(25): SEQ ID NO: 1641; WAN024FNH; Start 246; Stop 270
catcatcttatcaacacgagccttg

SEQ ID NO: 300542 - DNA, 25 bp, Artificial
  probe
  misc_feature (1)..(25): SEQ ID NO: 1641; WAN024FNH; Start 245; Stop 269
ccatcatcttatcaacacgagcctt

SEQ ID NO: 300543 - DNA, 25 bp, Artificial
  probe
  misc_feature (1)..(25): SEQ ID NO: 1641; WAN024FNH; Start 268; Stop 292
ttgataaagtccataacctctgctt

SEQ ID NO: 300544 - DNA, 25 bp, Artificial
  probe
  misc_feature (1)..(25): SEQ ID NO: 1641; WAN024FNH; Start 267; Stop 291
cttgataaagtccataacctctgct

SEQ ID NO: 300545 - DNA, 25 bp, Artificial
  probe
  misc_feature (1)..(25): SEQ ID NO: 1641; WAN024FNH; Start 236; Stop 260
gagtagagcccatcatcttatcaac

SEQ ID NO: 300546 - DNA, 25 bp, Artificial
  probe
  misc_feature (1)..(25): SEQ ID NO: 1641; WAN024FNH; Start 107; Stop 131
gagaaagtgattcaacagatggttt

SEQ ID NO: 300547 - DNA, 25 bp, Artificial
  probe
  misc_feature (1)..(25): SEQ ID NO: 1641; WAN024FNH; Start 177; Stop 201
caacatatctgccacaacaaagttt

SEQ ID NO: 300548 - DNA, 25 bp, Artificial
  probe
  misc_feature (1)..(25): SEQ ID NO: 1641; WAN024FNH; Start 32; Stop 56
tttcttggtcattctcaaatagtgc

SEQ ID NO: 300549 - DNA, 25 bp, Artificial
  probe
  misc_feature (1)..(25): SEQ ID NO: 1641; WAN024FNH; Start 33; Stop 57
ttcttggtcattctcaaatagtgct

SEQ ID NO: 300550 - DNA, 25 bp, Artificial
  probe
  misc_feature (1)..(25): SEQ ID NO: 1641; WAN024FNH; Start 238; Stop 262
gtagagcccatcatcttatcaacac

SEQ ID NO: 300551 - DNA, 25 bp, Artificial
  probe
  misc_feature (1)..(25): SEQ ID NO: 1641; WAN024FNH; Start 237; Stop 261
agtagagcccatcatcttatcaaca

SEQ ID NO: 300552 - DNA, 25 bp, Artificial
  probe
  misc_feature (1)..(25): SEQ ID NO: 1641; WAN024FNH; Start 266; Stop 290
ccttgataaagtccataacctctgc

SEQ ID NO: 300553 - DNA, 25 bp, Artificial
  probe
  misc_feature (1)..(25): SEQ ID NO: 1641; WAN024FNH; Start 265; Stop 289
gccttgataaagtccataacctctg

SEQ ID NO: 300554 - DNA, 25 bp, Artificial
  probe
  misc_feature (1)..(25): SEQ ID NO: 1641; WAN024FNH; Start 264; Stop 288
agccttgataaagtccataacctct

SEQ ID NO: 300555 - DNA, 25 bp, Artificial
  probe
  misc_feature (1)..(25): SEQ ID NO: 1641; WAN024FNH; Start 36; Stop 60
ttggtcattctcaaatagtgctgaa

SEQ ID NO: 300556 - DNA, 25 bp, Artificial
  probe
  misc_feature (1)..(25): SEQ ID NO: 1641; WAN024FNH; Start 34; Stop 58
tcttggtcattctcaaatagtgctg

SEQ ID NO: 300557 - DNA, 25 bp, Artificial
  probe
  misc_feature (1)..(25): SEQ ID NO: 1641; WAN024FNH; Start 235; Stop 259
ggagtagagcccatcatcttatcaa

SEQ ID NO: 300558 - DNA, 25 bp, Artificial
  probe
  misc_feature (1)..(25): SEQ ID NO: 1641; WAN024FNH; Start 35; Stop 59
cttggtcattctcaaatagtgctga

SEQ ID NO: 300559 - DNA, 25 bp, Artificial
  probe
  misc_feature (1)..(25): SEQ ID NO: 1641; WAN024FNH; Start 108; Stop 132
agaaagtgattcaacagatggttta

SEQ ID NO: 300560 - DNA, 25 bp, Artificial
  probe
  misc_feature (1)..(25): SEQ ID NO: 1641; WAN024FNH; Start 263; Stop 287
gagccttgataaagtccataacctc

SEQ ID NO: 300561 - DNA, 25 bp, Artificial
  probe
  misc_feature (1)..(25): SEQ ID NO: 1641; WAN024FNH; Start 106; Stop 130
cgagaaagtgattcaacagatggtt

SEQ ID NO: 300562 - DNA, 25 bp, Artificial
  probe
  misc_feature (1)..(25): SEQ ID NO: 1641; WAN024FNH; Start 260; Stop 284
cacgagccttgataaagtccataac

SEQ ID NO: 300563 - DNA, 25 bp, Artificial
  probe
  misc_feature (1)..(25): SEQ ID NO: 1641; WAN024FNH; Start 181; Stop 205
atatctgccacaacaaagtttgaac

SEQ ID NO: 300564 - DNA, 25 bp, Artificial
  probe
  misc_feature (1)..(25): SEQ ID NO: 1641; WAN024FNH; Start 180; Stop 204
catatctgccacaacaaagtttgaa

SEQ ID NO: 300565 - DNA, 25 bp, Artificial
  probe
  misc_feature (1)..(25): SEQ ID NO: 1641; WAN024FNH; Start 178; Stop 202
aacatatctgccacaacaaagtttg

SEQ ID NO: 300566 - DNA, 25 bp, Artificial
  probe
  misc_feature (1)..(25): SEQ ID NO: 1641; WAN024FNH; Start 174; Stop 198
ttccaacatatctgccacaacaaag

SEQ ID NO: 300567 - DNA, 25 bp, Artificial
  probe
  misc_feature (1)..(25): SEQ ID NO: 1641; WAN024FNH; Start 173; Stop 197
cttccaacatatctgccacaacaaa

SEQ ID NO: 300568 - DNA, 25 bp, Artificial
  probe
  misc_feature (1)..(25): SEQ ID NO: 1642; WAN024GIG; Start 158; Stop 182
atgcttatcagttcttgcttggtaa

SEQ ID NO: 300569 - DNA, 25 bp, Artificial
  probe
  misc_feature (1)..(25): SEQ ID NO: 1642; WAN024GIG; Start 157; Stop 181
gatgcttatcagttcttgcttggta

SEQ ID NO: 300570 - DNA, 25 bp, Artificial
  probe
  misc_feature (1)..(25): SEQ ID NO: 1642; WAN024GIG; Start 153; Stop 177
cttggatgcttatcagttcttgctt

SEQ ID NO: 300571 - DNA, 25 bp, Artificial
  probe
  misc_feature (1)..(25): SEQ ID NO: 1642; WAN024GIG; Start 154; Stop 178
ttggatgcttatcagttcttgcttg

SEQ ID NO: 300572 - DNA, 25 bp, Artificial
  probe
  misc_feature (1)..(25): SEQ ID NO: 1642; WAN024GIG; Start 161; Stop 185
cttatcagttcttgcttggtaagtt

SEQ ID NO: 300573 - DNA, 25 bp, Artificial
  probe
  misc_feature (1)..(25): SEQ ID NO: 1642; WAN024GIG; Start 160; Stop 184
gcttatcagttcttgcttggtaagt

SEQ ID NO: 300574 - DNA, 25 bp, Artificial
  probe
  misc_feature (1)..(25): SEQ ID NO: 1642; WAN024GIG; Start 159; Stop 183
tgcttatcagttcttgcttggtaag

SEQ ID NO: 300575 - DNA, 25 bp, Artificial
  probe
  misc_feature (1)..(25): SEQ ID NO: 1642; WAN024GIG; Start 166; Stop 190
cagttcttgcttggtaagtttgaaa

SEQ ID NO: 300576 - DNA, 25 bp, Artificial
  probe
  misc_feature (1)..(25): SEQ ID NO: 1642; WAN024GIG; Start 163; Stop 187
tatcagttcttgcttggtaagtttg

SEQ ID NO: 300577 - DNA, 25 bp, Artificial
  probe
  misc_feature (1)..(25): SEQ ID NO: 1642; WAN024GIG; Start 233; Stop 257
tgtttggtgagcgaaattattaact

SEQ ID NO: 300578 - DNA, 25 bp, Artificial
  probe
  misc_feature (1)..(25): SEQ ID NO: 1642; WAN024GIG; Start 162; Stop 186
ttatcagttcttgcttggtaagttt

SEQ ID NO: 300579 - DNA, 25 bp, Artificial
  probe
  misc_feature (1)..(25): SEQ ID NO: 1642; WAN024GIG; Start 231; Stop 255
cttgtttggtgagcgaaattattaa

SEQ ID NO: 300580 - DNA, 25 bp, Artificial
  probe
  misc_feature (1)..(25): SEQ ID NO: 1642; WAN024GIG; Start 232; Stop 256
ttgtttggtgagcgaaattattaac

SEQ ID NO: 300581 - DNA, 25 bp, Artificial
  probe
  misc_feature (1)..(25): SEQ ID NO: 1642; WAN024GIG; Start 164; Stop 188
atcagttcttgcttggtaagtttga

SEQ ID NO: 300582 - DNA, 25 bp, Artificial
  probe
  misc_feature (1)..(25): SEQ ID NO: 1642; WAN024GIG; Start 165; Stop 189
tcagttcttgcttggtaagtttgaa

SEQ ID NO: 300583 - DNA, 25 bp, Artificial
  probe
  misc_feature (1)..(25): SEQ ID NO: 1642; WAN024GIG; Start 156; Stop 180
ggatgcttatcagttcttgcttggt

SEQ ID NO: 300584 - DNA, 25 bp, Artificial
  probe
  misc_feature (1)..(25): SEQ ID NO: 1642; WAN024GIG; Start 155; Stop 179
tggatgcttatcagttcttgcttgg

SEQ ID NO: 300585 - DNA, 25 bp, Artificial
  probe
  misc_feature (1)..(25): SEQ ID NO: 1642; WAN024GIG; Start 150; Stop 174
tcgcttggatgcttatcagttcttg

SEQ ID NO: 300586 - DNA, 25 bp, Artificial
  probe
  misc_feature (1)..(25): SEQ ID NO: 1642; WAN024GIG; Start 149; Stop 173
gtcgcttggatgcttatcagttctt

SEQ ID NO: 300587 - DNA, 25 bp, Artificial
  probe
  misc_feature (1)..(25): SEQ ID NO: 1642; WAN024GIG; Start 152; Stop 176
gcttggatgcttatcagttcttgct

SEQ ID NO: 300588 - DNA, 25 bp, Artificial
  probe
  misc_feature (1)..(25): SEQ ID NO: 1642; WAN024GIG; Start 234; Stop 258
gtttggtgagcgaaattattaacta

SEQ ID NO: 300589 - DNA, 25 bp, Artificial
  probe
  misc_feature (1)..(25): SEQ ID NO: 1642; WAN024GIG; Start 147; Stop 171
gagtcgcttggatgcttatcagttc

SEQ ID NO: 300590 - DNA, 25 bp, Artificial
  probe
  misc_feature (1)..(25): SEQ ID NO: 1642; WAN024GIG; Start 5; Stop 29
gttacgaacaagaatttatgaagga

SEQ ID NO: 300591 - DNA, 25 bp, Artificial
  probe
  misc_feature (1)..(25): SEQ ID NO: 1642; WAN024GIG; Start 4; Stop 28
agttacgaacaagaatttatgaagg

SEQ ID NO: 300592 - DNA, 25 bp, Artificial
  probe
  misc_feature (1)..(25): SEQ ID NO: 1642; WAN024GIG; Start 235; Stop 259
tttggtgagcgaaattattaactaa

SEQ ID NO: 300593 - DNA, 25 bp, Artificial
  probe
  misc_feature (1)..(25): SEQ ID NO: 1642; WAN024GIG; Start 148; Stop 172
agtcgcttggatgcttatcagttct

SEQ ID NO: 300594 - DNA, 25 bp, Artificial
  probe
  misc_feature (1)..(25): SEQ ID NO: 1642; WAN024GIG; Start 146; Stop 170
agagtcgcttggatgcttatcagtt

SEQ ID NO: 300595 - DNA, 25 bp, Artificial
  probe
  misc_feature (1)..(25): SEQ ID NO: 1642; WAN024GIG; Start 91; Stop 115
aaagtttacgaagaagaccaggacg

SEQ ID NO: 300596 - DNA, 25 bp, Artificial
  probe
  misc_feature (1)..(25): SEQ ID NO: 1642; WAN024GIG; Start 8; Stop 32
acgaacaagaatttatgaaggaatt

SEQ ID NO: 300597 - DNA, 25 bp, Artificial
  probe
  misc_feature (1)..(25): SEQ ID NO: 1642; WAN024GIG; Start 6; Stop 30
ttacgaacaagaatttatgaaggaa

SEQ ID NO: 300598 - DNA, 25 bp, Artificial
  probe
  misc_feature (1)..(25): SEQ ID NO: 1642; WAN024GIG; Start 236; Stop 260
ttggtgagcgaaattattaactaat

SEQ ID NO: 300599 - DNA, 25 bp, Artificial
  probe
  misc_feature (1)..(25): SEQ ID NO: 1642; WAN024GIG; Start 230; Stop 254
gcttgtttggtgagcgaaattatta

SEQ ID NO: 300600 - DNA, 25 bp, Artificial
  probe
  misc_feature (1)..(25): SEQ ID NO: 1642; WAN024GIG; Start 2; Stop 26
tgagttacgaacaagaatttatgaa

SEQ ID NO: 300601 - DNA, 25 bp, Artificial
  probe
  misc_feature (1)..(25): SEQ ID NO: 1643; WAN024DHH; Start 125; Stop 149
atgatgatgtgaagaagataccagg

SEQ ID NO: 300602 - DNA, 25 bp, Artificial
  probe
  misc_feature (1)..(25): SEQ ID NO: 1643; WAN024DHH; Start 123; Stop 147
tgatgatgatgtgaagaagatacca

SEQ ID NO: 300603 - DNA, 25 bp, Artificial
  probe
  misc_feature (1)..(25): SEQ ID NO: 1643; WAN024DHH; Start 292; Stop 316
agaatcattgagtatatcgctggtt

SEQ ID NO: 300604 - DNA, 25 bp, Artificial
  probe
  misc_feature (1)..(25): SEQ ID NO: 1643; WAN024DHH; Start 291; Stop 315
aagaatcattgagtatatcgctggt

SEQ ID NO: 300605 - DNA, 25 bp, Artificial
  probe
  misc_feature (1)..(25): SEQ ID NO: 1643; WAN024DHH; Start 777; Stop 801
tattggagtaattgttggtgaagga

SEQ ID NO: 300606 - DNA, 25 bp, Artificial
  probe
  misc_feature (1)..(25): SEQ ID NO: 1643; WAN024DHH; Start 124; Stop 148
gatgatgatgtgaagaagataccag

SEQ ID NO: 300607 - DNA, 25 bp, Artificial
  probe
  misc_feature (1)..(25): SEQ ID NO: 1643; WAN024DHH; Start 778; Stop 802
attggagtaattgttggtgaaggat

SEQ ID NO: 300608 - DNA, 25 bp, Artificial
  probe
  misc_feature (1)..(25): SEQ ID NO: 1643; WAN024DHH; Start 776; Stop 800
ctattggagtaattgttggtgaagg

SEQ ID NO: 300609 - DNA, 25 bp, Artificial
  probe
  misc_feature (1)..(25): SEQ ID NO: 1643; WAN024DHH; Start 775; Stop 799
cctattggagtaattgttggtgaag

SEQ ID NO: 300610 - DNA, 25 bp, Artificial
  probe
  misc_feature (1)..(25): SEQ ID NO: 1643; WAN024DHH; Start 779; Stop 803
ttggagtaattgttggtgaaggatt

SEQ ID NO: 300611 - DNA, 25 bp, Artificial
  probe
  misc_feature (1)..(25): SEQ ID NO: 1643; WAN024DHH; Start 294; Stop 318
aatcattgagtatatcgctggttcc

SEQ ID NO: 300612 - DNA, 25 bp, Artificial
  probe
  misc_feature (1)..(25): SEQ ID NO: 1643; WAN024DHH; Start 293; Stop 317
gaatcattgagtatatcgctggttc

SEQ ID NO: 300613 - DNA, 25 bp, Artificial
  probe
  misc_feature (1)..(25): SEQ ID NO: 1643; WAN024DHH; Start 130; Stop 154
gatgtgaagaagataccaggtgtaa

SEQ ID NO: 300614 - DNA, 25 bp, Artificial
  probe
  misc_feature (1)..(25): SEQ ID NO: 1643; WAN024DHH; Start 780; Stop 804
tggagtaattgttggtgaaggatta

SEQ ID NO: 300615 - DNA, 25 bp, Artificial
  probe
  misc_feature (1)..(25): SEQ ID NO: 1643; WAN024DHH; Start 131; Stop 155
atgtgaagaagataccaggtgtaat

SEQ ID NO: 300616 - DNA, 25 bp, Artificial
  probe
  misc_feature (1)..(25): SEQ ID NO: 1643; WAN024DHH; Start 134; Stop 158
tgaagaagataccaggtgtaatagg

SEQ ID NO: 300617 - DNA, 25 bp, Artificial
  probe
  misc_feature (1)..(25): SEQ ID NO: 1643; WAN024DHH; Start 127; Stop 151
gatgatgtgaagaagataccaggtg

SEQ ID NO: 300618 - DNA, 25 bp, Artificial
  probe
  misc_feature (1)..(25): SEQ ID NO: 1643; WAN024DHH; Start 122; Stop 146
atgatgatgatgtgaagaagatacc

SEQ ID NO: 300619 - DNA, 25 bp, Artificial
  probe
  misc_feature (1)..(25): SEQ ID NO: 1643; WAN024DHH; Start 129; Stop 153
tgatgtgaagaagataccaggtgta

SEQ ID NO: 300620 - DNA, 25 bp, Artificial
  probe
  misc_feature (1)..(25): SEQ ID NO: 1643; WAN024DHH; Start 1739; Stop 1763
caccagtaattgtaacgaataccaa

SEQ ID NO: 300621 - DNA, 25 bp, Artificial
  probe
  misc_feature (1)..(25): SEQ ID NO: 1643; WAN024DHH; Start 132; Stop 156
tgtgaagaagataccaggtgtaata

SEQ ID NO: 300622 - DNA, 25 bp, Artificial
  probe
  misc_feature (1)..(25): SEQ ID NO: 1643; WAN024DHH; Start 126; Stop 150
tgatgatgtgaagaagataccaggt

SEQ ID NO: 300623 - DNA, 25 bp, Artificial
  probe
  misc_feature (1)..(25): SEQ ID NO: 1643; WAN024DHH; Start 118; Stop 142
gtcaatgatgatgatgtgaagaaga

SEQ ID NO: 300624 - DNA, 25 bp, Artificial
  probe
  misc_feature (1)..(25): SEQ ID NO: 1643; WAN024DHH; Start 117; Stop 141
agtcaatgatgatgatgtgaagaag

SEQ ID NO: 300625 - DNA, 25 bp, Artificial
  probe
  misc_feature (1)..(25): SEQ ID NO: 1643; WAN024DHH; Start 1466; Stop 1490
taattggagacggagtagcgattat

SEQ ID NO: 300626 - DNA, 25 bp, Artificial
  probe
  misc_feature (1)..(25): SEQ ID NO: 1643; WAN024DHH; Start 781; Stop 805
ggagtaattgttggtgaaggattat

SEQ ID NO: 300627 - DNA, 25 bp, Artificial
  probe
  misc_feature (1)..(25): SEQ ID NO: 1643; WAN024DHH; Start 128; Stop 152
atgatgtgaagaagataccaggtgt

SEQ ID NO: 300628 - DNA, 25 bp, Artificial
  probe
  misc_feature (1)..(25): SEQ ID NO: 1643; WAN024DHH; Start 1738; Stop 1762
acaccagtaattgtaacgaatacca

SEQ ID NO: 300629 - DNA, 25 bp, Artificial
  probe
  misc_feature (1)..(25): SEQ ID NO: 1643; WAN024DHH; Start 133; Stop 157
gtgaagaagataccaggtgtaatag

SEQ ID NO: 300630 - DNA, 25 bp, Artificial
  probe
  misc_feature (1)..(25): SEQ ID NO: 1643; WAN024DHH; Start 296; Stop 320
tcattgagtatatcgctggttccat

SEQ ID NO: 300631 - DNA, 25 bp, Artificial
  probe
  misc_feature (1)..(25): SEQ ID NO: 1643; WAN024DHH; Start 295; Stop 319
atcattgagtatatcgctggttcca

SEQ ID NO: 300632 - DNA, 25 bp, Artificial
  probe
  misc_feature (1)..(25): SEQ ID NO: 1643; WAN024DHH; Start 1465; Stop 1489
ctaattggagacggagtagcgatta

SEQ ID NO: 300633 - DNA, 25 bp, Artificial
  probe
  misc_feature (1)..(25): SEQ ID NO: 1643; WAN024DHH; Start 119; Stop 143
tcaatgatgatgatgtgaagaagat

SEQ ID NO: 300634 - DNA, 25 bp, Artificial
  probe
  misc_feature (1)..(25): SEQ ID NO: 1644; WAN024GHW; Start 420; Stop 444
gagttatgaaggtgaattgacagtg

SEQ ID NO: 300635 - DNA, 25 bp, Artificial
  probe
  misc_feature (1)..(25): SEQ ID NO: 1644; WAN024GHW; Start 77; Stop 101
taattgctcctccagtagttatgtc

SEQ ID NO: 300636 - DNA, 25 bp, Artificial
  probe
  misc_feature (1)..(25): SEQ ID NO: 1644; WAN024GHW; Start 76; Stop 100
ttaattgctcctccagtagttatgt

SEQ ID NO: 300637 - DNA, 25 bp, Artificial
  probe
  misc_feature (1)..(25): SEQ ID NO: 1644; WAN024GHW; Start 417; Stop 441
aacgagttatgaaggtgaattgaca

SEQ ID NO: 300638 - DNA, 25 bp, Artificial
  probe
  misc_feature (1)..(25): SEQ ID NO: 1644; WAN024GHW; Start 419; Stop 443
cgagttatgaaggtgaattgacagt

SEQ ID NO: 300639 - DNA, 25 bp, Artificial
  probe
  misc_feature (1)..(25): SEQ ID NO: 1644; WAN024GHW; Start 418; Stop 442
acgagttatgaaggtgaattgacag

SEQ ID NO: 300640 - DNA, 25 bp, Artificial
  probe
  misc_feature (1)..(25): SEQ ID NO: 1644; WAN024GHW; Start 78; Stop 102
aattgctcctccagtagttatgtct

SEQ ID NO: 300641 - DNA, 25 bp, Artificial
  probe
  misc_feature (1)..(25): SEQ ID NO: 1644; WAN024GHW; Start 1188; Stop 1212
gcaatactcgttcacaatgattagt

SEQ ID NO: 300642 - DNA, 25 bp, Artificial
  probe
  misc_feature (1)..(25): SEQ ID NO: 1644; WAN024GHW; Start 416; Stop 440
caacgagttatgaaggtgaattgac

SEQ ID NO: 300643 - DNA, 25 bp, Artificial
  probe
  misc_feature (1)..(25): SEQ ID NO: 1644; WAN024GHW; Start 1187; Stop 1211
agcaatactcgttcacaatgattag

SEQ ID NO: 300644 - DNA, 25 bp, Artificial
  probe
  misc_feature (1)..(25): SEQ ID NO: 1644; WAN024GHW; Start 421; Stop 445
agttatgaaggtgaattgacagtgc

SEQ ID NO: 300645 - DNA, 25 bp, Artificial
  probe
  misc_feature (1)..(25): SEQ ID NO: 1644; WAN024GHW; Start 248; Stop 272
atactgaggttaagattgctgatcg

SEQ ID NO: 300646 - DNA, 25 bp, Artificial
  probe
  misc_feature (1)..(25): SEQ ID NO: 1644; WAN024GHW; Start 1186; Stop 1210
gagcaatactcgttcacaatgatta

SEQ ID NO: 300647 - DNA, 25 bp, Artificial
  probe
  misc_feature (1)..(25): SEQ ID NO: 1644; WAN024GHW; Start 675; Stop 699
agttggatggaatagagtcatatct

SEQ ID NO: 300648 - DNA, 25 bp, Artificial
  probe
  misc_feature (1)..(25): SEQ ID NO: 1644; WAN024GHW; Start 85; Stop 109
cctccagtagttatgtctgtaatgt

SEQ ID NO: 300649 - DNA, 25 bp, Artificial
  probe
  misc_feature (1)..(25): SEQ ID NO: 1644; WAN024GHW; Start 247; Stop 271
aatactgaggttaagattgctgatc

SEQ ID NO: 300650 - DNA, 25 bp, Artificial
  probe
  misc_feature (1)..(25): SEQ ID NO: 1644; WAN024GHW; Start 84; Stop 108
tcctccagtagttatgtctgtaatg

SEQ ID NO: 300651 - DNA, 25 bp, Artificial
  probe
  misc_feature (1)..(25): SEQ ID NO: 1644; WAN024GHW; Start 83; Stop 107
ctcctccagtagttatgtctgtaat

SEQ ID NO: 300652 - DNA, 25 bp, Artificial
  probe
  misc_feature (1)..(25): SEQ ID NO: 1644; WAN024GHW; Start 677; Stop 701
ttggatggaatagagtcatatctca

SEQ ID NO: 300653 - DNA, 25 bp, Artificial
  probe
  misc_feature (1)..(25): SEQ ID NO: 1644; WAN024GHW; Start 674; Stop 698
aagttggatggaatagagtcatatc

SEQ ID NO: 300654 - DNA, 25 bp, Artificial
  probe
  misc_feature (1)..(25): SEQ ID NO: 1644; WAN024GHW; Start 415; Stop 439
gcaacgagttatgaaggtgaattga

SEQ ID NO: 300655 - DNA, 25 bp, Artificial
  probe
  misc_feature (1)..(25): SEQ ID NO: 1644; WAN024GHW; Start 1189; Stop 1213
caatactcgttcacaatgattagtc

SEQ ID NO: 300656 - DNA, 25 bp, Artificial
  probe
  misc_feature (1)..(25): SEQ ID NO: 1644; WAN024GHW; Start 678; Stop 702
tggatggaatagagtcatatctcat

SEQ ID NO: 300657 - DNA, 25 bp, Artificial
  probe
  misc_feature (1)..(25): SEQ ID NO: 1644; WAN024GHW; Start 676; Stop 700
gttggatggaatagagtcatatctc

SEQ ID NO: 300658 - DNA, 25 bp, Artificial
  probe
  misc_feature (1)..(25): SEQ ID NO: 1644; WAN024GHW; Start 1190; Stop 1214
aatactcgttcacaatgattagtct

SEQ ID NO: 300659 - DNA, 25 bp, Artificial
  probe
  misc_feature (1)..(25): SEQ ID NO: 1644; WAN024GHW; Start 82; Stop 106
gctcctccagtagttatgtctgtaa

SEQ ID NO: 300660 - DNA, 25 bp, Artificial
  probe
  misc_feature (1)..(25): SEQ ID NO: 1644; WAN024GHW; Start 246; Stop 270
taatactgaggttaagattgctgat

SEQ ID NO: 300661 - DNA, 25 bp, Artificial
  probe
  misc_feature (1)..(25): SEQ ID NO: 1644; WAN024GHW; Start 245; Stop 269
ttaatactgaggttaagattgctga

SEQ ID NO: 300662 - DNA, 25 bp, Artificial
  probe
  misc_feature (1)..(25): SEQ ID NO: 1644; WAN024GHW; Start 79; Stop 103
attgctcctccagtagttatgtctg

SEQ ID NO: 300663 - DNA, 25 bp, Artificial
  probe
  misc_feature (1)..(25): SEQ ID NO: 1644; WAN024GHW; Start 86; Stop 110
ctccagtagttatgtctgtaatgtt

SEQ ID NO: 300664 - DNA, 25 bp, Artificial
  probe
  misc_feature (1)..(25): SEQ ID NO: 1644; WAN024GHW; Start 424; Stop 448
tatgaaggtgaattgacagtgcgaa

SEQ ID NO: 300665 - DNA, 25 bp, Artificial
  probe
  misc_feature (1)..(25): SEQ ID NO: 1644; WAN024GHW; Start 423; Stop 447
ttatgaaggtgaattgacagtgcga

SEQ ID NO: 300666 - DNA, 25 bp, Artificial
  probe
  misc_feature (1)..(25): SEQ ID NO: 1644; WAN024GHW; Start 422; Stop 446
gttatgaaggtgaattgacagtgcg

SEQ ID NO: 300667 - DNA, 25 bp, Artificial
  probe
  misc_feature (1)..(25): SEQ ID NO: 1645; WAN024DI2; Start 226; Stop 250
ctctatgccttggtcttcttcttat

SEQ ID NO: 300668 - DNA, 25 bp, Artificial
  probe
  misc_feature (1)..(25): SEQ ID NO: 1645; WAN024DI2; Start 227; Stop 251
tctatgccttggtcttcttcttatt

SEQ ID NO: 300669 - DNA, 25 bp, Artificial
  probe
  misc_feature (1)..(25): SEQ ID NO: 1645; WAN024DI2; Start 225; Stop 249
actctatgccttggtcttcttctta

SEQ ID NO: 300670 - DNA, 25 bp, Artificial
  probe
  misc_feature (1)..(25): SEQ ID NO: 1645; WAN024DI2; Start 228; Stop 252
ctatgccttggtcttcttcttatta

SEQ ID NO: 300671 - DNA, 25 bp, Artificial
  probe
  misc_feature (1)..(25): SEQ ID NO: 1645; WAN024DI2; Start 229; Stop 253
tatgccttggtcttcttcttattaa

SEQ ID NO: 300672 - DNA, 25 bp, Artificial
  probe
  misc_feature (1)..(25): SEQ ID NO: 1645; WAN024DI2; Start 357; Stop 381
tattggtggtgtagcagctatgtta

SEQ ID NO: 300673 - DNA, 25 bp, Artificial
  probe
  misc_feature (1)..(25): SEQ ID NO: 1645; WAN024DI2; Start 224; Stop 248
gactctatgccttggtcttcttctt

SEQ ID NO: 300674 - DNA, 25 bp, Artificial
  probe
  misc_feature (1)..(25): SEQ ID NO: 1645; WAN024DI2; Start 212; Stop 236
atagtatcggtggactctatgcctt

SEQ ID NO: 300675 - DNA, 25 bp, Artificial
  probe
  misc_feature (1)..(25): SEQ ID NO: 1645; WAN024DI2; Start 211; Stop 235
aatagtatcggtggactctatgcct

SEQ ID NO: 300676 - DNA, 25 bp, Artificial
  probe
  misc_feature (1)..(25): SEQ ID NO: 1645; WAN024DI2; Start 206; Stop 230
taggaaatagtatcggtggactcta

SEQ ID NO: 300677 - DNA, 25 bp, Artificial
  probe
  misc_feature (1)..(25): SEQ ID NO: 1645; WAN024DI2; Start 198; Stop 222
gcgtattctaggaaatagtatcggt

SEQ ID NO: 300678 - DNA, 25 bp, Artificial
  probe
  misc_feature (1)..(25): SEQ ID NO: 1645; WAN024DI2; Start 202; Stop 226
attctaggaaatagtatcggtggac

SEQ ID NO: 300679 - DNA, 25 bp, Artificial
  probe
  misc_feature (1)..(25): SEQ ID NO: 1645; WAN024DI2; Start 359; Stop 383
ttggtggtgtagcagctatgttaat

SEQ ID NO: 300680 - DNA, 25 bp, Artificial
  probe
  misc_feature (1)..(25): SEQ ID NO: 1645; WAN024DI2; Start 358; Stop 382
attggtggtgtagcagctatgttaa

SEQ ID NO: 300681 - DNA, 25 bp, Artificial
  probe
  misc_feature (1)..(25): SEQ ID NO: 1645; WAN024DI2; Start 356; Stop 380
ttattggtggtgtagcagctatgtt

SEQ ID NO: 300682 - DNA, 25 bp, Artificial
  probe
  misc_feature (1)..(25): SEQ ID NO: 1645; WAN024DI2; Start 231; Stop 255
tgccttggtcttcttcttattaaat

SEQ ID NO: 300683 - DNA, 25 bp, Artificial
  probe
  misc_feature (1)..(25): SEQ ID NO: 1645; WAN024DI2; Start 230; Stop 254
atgccttggtcttcttcttattaaa

SEQ ID NO: 300684 - DNA, 25 bp, Artificial
  probe
  misc_feature (1)..(25): SEQ ID NO: 1645; WAN024DI2; Start 208; Stop 232
ggaaatagtatcggtggactctatg

SEQ ID NO: 300685 - DNA, 25 bp, Artificial
  probe
  misc_feature (1)..(25): SEQ ID NO: 1645; WAN024DI2; Start 207; Stop 231
aggaaatagtatcggtggactctat

SEQ ID NO: 300686 - DNA, 25 bp, Artificial
  probe
  misc_feature (1)..(25): SEQ ID NO: 1645; WAN024DI2; Start 203; Stop 227
ttctaggaaatagtatcggtggact

SEQ ID NO: 300687 - DNA, 25 bp, Artificial
  probe
  misc_feature (1)..(25): SEQ ID NO: 1645; WAN024DI2; Start 209; Stop 233
gaaatagtatcggtggactctatgc

SEQ ID NO: 300688 - DNA, 25 bp, Artificial
  probe
  misc_feature (1)..(25): SEQ ID NO: 1645; WAN024DI2; Start 205; Stop 229
ctaggaaatagtatcggtggactct

SEQ ID NO: 300689 - DNA, 25 bp, Artificial
  probe
  misc_feature (1)..(25): SEQ ID NO: 1645; WAN024DI2; Start 204; Stop 228
tctaggaaatagtatcggtggactc

SEQ ID NO: 300690 - DNA, 25 bp, Artificial
  probe
  misc_feature (1)..(25): SEQ ID NO: 1645; WAN024DI2; Start 300; Stop 324
aatctgcaccatgttaaccattatg

SEQ ID NO: 300691 - DNA, 25 bp, Artificial
  probe
  misc_feature (1)..(25): SEQ ID NO: 1645; WAN024DI2; Start 299; Stop 323
caatctgcaccatgttaaccattat

SEQ ID NO: 300692 - DNA, 25 bp, Artificial
  probe
  misc_feature (1)..(25): SEQ ID NO: 1645; WAN024DI2; Start 213; Stop 237
tagtatcggtggactctatgccttg

SEQ ID NO: 300693 - DNA, 25 bp, Artificial
  probe
  misc_feature (1)..(25): SEQ ID NO: 1645; WAN024DI2; Start 301; Stop 325
atctgcaccatgttaaccattatga

SEQ ID NO: 300694 - DNA, 25 bp, Artificial
  probe
  misc_feature (1)..(25): SEQ ID NO: 1645; WAN024DI2; Start 199; Stop 223
cgtattctaggaaatagtatcggtg

SEQ ID NO: 300695 - DNA, 25 bp, Artificial
  probe
  misc_feature (1)..(25): SEQ ID NO: 1645; WAN024DI2; Start 355; Stop 379
gttattggtggtgtagcagctatgt

SEQ ID NO: 300696 - DNA, 25 bp, Artificial
  probe
  misc_feature (1)..(25): SEQ ID NO: 1645; WAN024DI2; Start 292; Stop 316
gttgttccaatctgcaccatgttaa

SEQ ID NO: 300697 - DNA, 25 bp, Artificial
  probe
  misc_feature (1)..(25): SEQ ID NO: 1645; WAN024DI2; Start 328; Stop 352
aatgtagccatgaataacaaagcag

SEQ ID NO: 300698 - DNA, 25 bp, Artificial
  probe
  misc_feature (1)..(25): SEQ ID NO: 1645; WAN024DI2; Start 201; Stop 225
tattctaggaaatagtatcggtgga

SEQ ID NO: 300699 - DNA, 25 bp, Artificial
  probe
  misc_feature (1)..(25): SEQ ID NO: 1645; WAN024DI2; Start 200; Stop 224
gtattctaggaaatagtatcggtgg

SEQ ID NO: 300700 - DNA, 25 bp, Artificial
  probe
  misc_feature (1)..(25): SEQ ID NO: 1646; WAN024FLE; Start 148; Stop 172
gagttaggagatggtatggttcgta

SEQ ID NO: 300701 - DNA, 25 bp, Artificial
  probe
  misc_feature (1)..(25): SEQ ID NO: 1646; WAN024FLE; Start 145; Stop 169
ttggagttaggagatggtatggttc

SEQ ID NO: 300702 - DNA, 25 bp, Artificial
  probe
  misc_feature (1)..(25): SEQ ID NO: 1646; WAN024FLE; Start 144; Stop 168
cttggagttaggagatggtatggtt

SEQ ID NO: 300703 - DNA, 25 bp, Artificial
  probe
  misc_feature (1)..(25): SEQ ID NO: 1646; WAN024FLE; Start 151; Stop 175
ttaggagatggtatggttcgtacta

SEQ ID NO: 300704 - DNA, 25 bp, Artificial
  probe
  misc_feature (1)..(25): SEQ ID NO: 1646; WAN024FLE; Start 152; Stop 176
taggagatggtatggttcgtactat

SEQ ID NO: 300705 - DNA, 25 bp, Artificial
  probe
  misc_feature (1)..(25): SEQ ID NO: 1646; WAN024FLE; Start 494; Stop 518
tccaagaattgattcacaacattgc

SEQ ID NO: 300706 - DNA, 25 bp, Artificial
  probe
  misc_feature (1)..(25): SEQ ID NO: 1646; WAN024FLE; Start 366; Stop 390
tgatgagttgtctacctcttctgaa

SEQ ID NO: 300707 - DNA, 25 bp, Artificial
  probe
  misc_feature (1)..(25): SEQ ID NO: 1646; WAN024FLE; Start 365; Stop 389
ttgatgagttgtctacctcttctga

SEQ ID NO: 300708 - DNA, 25 bp, Artificial
  probe
  misc_feature (1)..(25): SEQ ID NO: 1646; WAN024FLE; Start 153; Stop 177
aggagatggtatggttcgtactatc

SEQ ID NO: 300709 - DNA, 25 bp, Artificial
  probe
  misc_feature (1)..(25): SEQ ID NO: 1646; WAN024FLE; Start 150; Stop 174
gttaggagatggtatggttcgtact

SEQ ID NO: 300710 - DNA, 25 bp, Artificial
  probe
  misc_feature (1)..(25): SEQ ID NO: 1646; WAN024FLE; Start 149; Stop 173
agttaggagatggtatggttcgtac

SEQ ID NO: 300711 - DNA, 25 bp, Artificial
  probe
  misc_feature (1)..(25): SEQ ID NO: 1646; WAN024FLE; Start 493; Stop 517
atccaagaattgattcacaacattg

SEQ ID NO: 300712 - DNA, 25 bp, Artificial
  probe
  misc_feature (1)..(25): SEQ ID NO: 1646; WAN024FLE; Start 495; Stop 519
ccaagaattgattcacaacattgcc

SEQ ID NO: 300713 - DNA, 25 bp, Artificial
  probe
  misc_feature (1)..(25): SEQ ID NO: 1646; WAN024FLE; Start 198; Stop 222
gttgactcgtggaatggaagtattg

SEQ ID NO: 300714 - DNA, 25 bp, Artificial
  probe
  misc_feature (1)..(25): SEQ ID NO: 1646; WAN024FLE; Start 1202; Stop 1226
gtcgtatccagttcttcttgtcaca

SEQ ID NO: 300715 - DNA, 25 bp, Artificial
  probe
  misc_feature (1)..(25): SEQ ID NO: 1646; WAN024FLE; Start 154; Stop 178
ggagatggtatggttcgtactatcg

SEQ ID NO: 300716 - DNA, 25 bp, Artificial
  probe
  misc_feature (1)..(25): SEQ ID NO: 1646; WAN024FLE; Start 1355; Stop 1379
gtgtaggttctatcgaagatgtgat

SEQ ID NO: 300717 - DNA, 25 bp, Artificial
  probe
  misc_feature (1)..(25): SEQ ID NO: 1646; WAN024FLE; Start 1358; Stop 1382
taggttctatcgaagatgtgattgc

SEQ ID NO: 300718 - DNA, 25 bp, Artificial
  probe
  misc_feature (1)..(25): SEQ ID NO: 1646; WAN024FLE; Start 1356; Stop 1380
tgtaggttctatcgaagatgtgatt

SEQ ID NO: 300719 - DNA, 25 bp, Artificial
  probe
  misc_feature (1)..(25): SEQ ID NO: 1646; WAN024FLE; Start 373; Stop 397
ttgtctacctcttctgaaatccttg

SEQ ID NO: 300720 - DNA, 25 bp, Artificial
  probe
  misc_feature (1)..(25): SEQ ID NO: 1646; WAN024FLE; Start 372; Stop 396
gttgtctacctcttctgaaatcctt

SEQ ID NO: 300721 - DNA, 25 bp, Artificial
  probe
  misc_feature (1)..(25): SEQ ID NO: 1646; WAN024FLE; Start 1357; Stop 1381
gtaggttctatcgaagatgtgattg

SEQ ID NO: 300722 - DNA, 25 bp, Artificial
  probe
  misc_feature (1)..(25): SEQ ID NO: 1646; WAN024FLE; Start 1203; Stop 1227
tcgtatccagttcttcttgtcacaa

SEQ ID NO: 300723 - DNA, 25 bp, Artificial
  probe
  misc_feature (1)..(25): SEQ ID NO: 1646; WAN024FLE; Start 576; Stop 600
gaatgacctttactgggaaatgaaa

SEQ ID NO: 300724 - DNA, 25 bp, Artificial
  probe
  misc_feature (1)..(25): SEQ ID NO: 1646; WAN024FLE; Start 746; Stop 770
ataatatcttccgtttcactcaggc

SEQ ID NO: 300725 - DNA, 25 bp, Artificial
  probe
  misc_feature (1)..(25): SEQ ID NO: 1646; WAN024FLE; Start 374; Stop 398
tgtctacctcttctgaaatccttga

SEQ ID NO: 300726 - DNA, 25 bp, Artificial
  probe
  misc_feature (1)..(25): SEQ ID NO: 1646; WAN024FLE; Start 371; Stop 395
agttgtctacctcttctgaaatcct

SEQ ID NO: 300727 - DNA, 25 bp, Artificial
  probe
  misc_feature (1)..(25): SEQ ID NO: 1646; WAN024FLE; Start 575; Stop 599
ggaatgacctttactgggaaatgaa

SEQ ID NO: 300728 - DNA, 25 bp, Artificial
  probe
  misc_feature (1)..(25): SEQ ID NO: 1646; WAN024FLE; Start 375; Stop 399
gtctacctcttctgaaatccttgaa

SEQ ID NO: 300729 - DNA, 25 bp, Artificial
  probe
  misc_feature (1)..(25): SEQ ID NO: 1646; WAN024FLE; Start 680; Stop 704
ttactggtttgacaatcgctgaata

SEQ ID NO: 300730 - DNA, 25 bp, Artificial
  probe
  misc_feature (1)..(25): SEQ ID NO: 1646; WAN024FLE; Start 378; Stop 402
tacctcttctgaaatccttgaaaca

SEQ ID NO: 300731 - DNA, 25 bp, Artificial
  probe
  misc_feature (1)..(25): SEQ ID NO: 1646; WAN024FLE; Start 140; Stop 164
tagccttggagttaggagatggtat

SEQ ID NO: 300732 - DNA, 25 bp, Artificial
  probe
  misc_feature (1)..(25): SEQ ID NO: 1646; WAN024FLE; Start 744; Stop 768
cgataatatcttccgtttcactcag

SEQ ID NO: 300733 - DNA, 25 bp, Artificial
  probe
  misc_feature (1)..(25): SEQ ID NO: 1647; WAN024FOC; Start 146; Stop 170
taattgttgttggaagttgttggac

SEQ ID NO: 300734 - DNA, 25 bp, Artificial
  probe
  misc_feature (1)..(25): SEQ ID NO: 1647; WAN024FOC; Start 144; Stop 168
cataattgttgttggaagttgttgg

SEQ ID NO: 300735 - DNA, 25 bp, Artificial
  probe
  misc_feature (1)..(25): SEQ ID NO: 1647; WAN024FOC; Start 145; Stop 169
ataattgttgttggaagttgttgga

SEQ ID NO: 300736 - DNA, 25 bp, Artificial
  probe
  misc_feature (1)..(25): SEQ ID NO: 1647; WAN024FOC; Start 143; Stop 167
acataattgttgttggaagttgttg

SEQ ID NO: 300737 - DNA, 25 bp, Artificial
  probe
  misc_feature (1)..(25): SEQ ID NO: 1647; WAN024FOC; Start 67; Stop 91
atcttgacacgattgatcttcacaa

SEQ ID NO: 300738 - DNA, 25 bp, Artificial
  probe
  misc_feature (1)..(25): SEQ ID NO: 1647; WAN024FOC; Start 302; Stop 326
atgattcattctaccatgcttctgc

SEQ ID NO: 300739 - DNA, 25 bp, Artificial
  probe
  misc_feature (1)..(25): SEQ ID NO: 1647; WAN024FOC; Start 147; Stop 171
aattgttgttggaagttgttggaca

SEQ ID NO: 300740 - DNA, 25 bp, Artificial
  probe
  misc_feature (1)..(25): SEQ ID NO: 1647; WAN024FOC; Start 285; Stop 309
aacatcctcttctgataatgattca

SEQ ID NO: 300741 - DNA, 25 bp, Artificial
  probe
  misc_feature (1)..(25): SEQ ID NO: 1647; WAN024FOC; Start 337; Stop 361
attatttgctacggtcagatacaga

SEQ ID NO: 300742 - DNA, 25 bp, Artificial
  probe
  misc_feature (1)..(25): SEQ ID NO: 1647; WAN024FOC; Start 66; Stop 90
aatcttgacacgattgatcttcaca

SEQ ID NO: 300743 - DNA, 25 bp, Artificial
  probe
  misc_feature (1)..(25): SEQ ID NO: 1647; WAN024FOC; Start 336; Stop 360
aattatttgctacggtcagatacag

SEQ ID NO: 300744 - DNA, 25 bp, Artificial
  probe
  misc_feature (1)..(25): SEQ ID NO: 1647; WAN024FOC; Start 320; Stop 344
cttctgccgtcaatgaaattatttg

SEQ ID NO: 300745 - DNA, 25 bp, Artificial
  probe
  misc_feature (1)..(25): SEQ ID NO: 1647; WAN024FOC; Start 319; Stop 343
gcttctgccgtcaatgaaattattt

SEQ ID NO: 300746 - DNA, 25 bp, Artificial
  probe
  misc_feature (1)..(25): SEQ ID NO: 1647; WAN024FOC; Start 168; Stop 192
gacaattctagggattccatcaaag

SEQ ID NO: 300747 - DNA, 25 bp, Artificial
  probe
  misc_feature (1)..(25): SEQ ID NO: 1647; WAN024FOC; Start 323; Stop 347
ctgccgtcaatgaaattatttgcta

SEQ ID NO: 300748 - DNA, 25 bp, Artificial
  probe
  misc_feature (1)..(25): SEQ ID NO: 1647; WAN024FOC; Start 286; Stop 310
acatcctcttctgataatgattcat

SEQ ID NO: 300749 - DNA, 25 bp, Artificial
  probe
  misc_feature (1)..(25): SEQ ID NO: 1647; WAN024FOC; Start 69; Stop 93
cttgacacgattgatcttcacaatg

SEQ ID NO: 300750 - DNA, 25 bp, Artificial
  probe
  misc_feature (1)..(25): SEQ ID NO: 1647; WAN024FOC; Start 68; Stop 92
tcttgacacgattgatcttcacaat

SEQ ID NO: 300751 - DNA, 25 bp, Artificial
  probe
  misc_feature (1)..(25): SEQ ID NO: 1647; WAN024FOC; Start 324; Stop 348
tgccgtcaatgaaattatttgctac

SEQ ID NO: 300752 - DNA, 25 bp, Artificial
  probe
  misc_feature (1)..(25): SEQ ID NO: 1647; WAN024FOC; Start 171; Stop 195
aattctagggattccatcaaagacc

SEQ ID NO: 300753 - DNA, 25 bp, Artificial
  probe
  misc_feature (1)..(25): SEQ ID NO: 1647; WAN024FOC; Start 335; Stop 359
aaattatttgctacggtcagataca

SEQ ID NO: 300754 - DNA, 25 bp, Artificial
  probe
  misc_feature (1)..(25): SEQ ID NO: 1647; WAN024FOC; Start 169; Stop 193
acaattctagggattccatcaaaga

SEQ ID NO: 300755 - DNA, 25 bp, Artificial
  probe
  misc_feature (1)..(25): SEQ ID NO: 1647; WAN024FOC; Start 328; Stop 352
gtcaatgaaattatttgctacggtc

SEQ ID NO: 300756 - DNA, 25 bp, Artificial
  probe
  misc_feature (1)..(25): SEQ ID NO: 1647; WAN024FOC; Start 329; Stop 353
tcaatgaaattatttgctacggtca

SEQ ID NO: 300757 - DNA, 25 bp, Artificial
  probe
  misc_feature (1)..(25): SEQ ID NO: 1647; WAN024FOC; Start 170; Stop 194
caattctagggattccatcaaagac

SEQ ID NO: 300758 - DNA, 25 bp, Artificial
  probe
  misc_feature (1)..(25): SEQ ID NO: 1647; WAN024FOC; Start 331; Stop 355
aatgaaattatttgctacggtcaga

SEQ ID NO: 300759 - DNA, 25 bp, Artificial
  probe
  misc_feature (1)..(25): SEQ ID NO: 1647; WAN024FOC; Start 330; Stop 354
caatgaaattatttgctacggtcag

SEQ ID NO: 300760 - DNA, 25 bp, Artificial
  probe
  misc_feature (1)..(25): SEQ ID NO: 1647; WAN024FOC; Start 321; Stop 345
ttctgccgtcaatgaaattatttgc

SEQ ID NO: 300761 - DNA, 25 bp, Artificial
  probe
  misc_feature (1)..(25): SEQ ID NO: 1647; WAN024FOC; Start 332; Stop 356
atgaaattatttgctacggtcagat

SEQ ID NO: 300762 - DNA, 25 bp, Artificial
  probe
  misc_feature (1)..(25): SEQ ID NO: 1647; WAN024FOC; Start 334; Stop 358
gaaattatttgctacggtcagatac

SEQ ID NO: 300763 - DNA, 25 bp, Artificial
  probe
  misc_feature (1)..(25): SEQ ID NO: 1647; WAN024FOC; Start 317; Stop 341
atgcttctgccgtcaatgaaattat

SEQ ID NO: 300764 - DNA, 25 bp, Artificial
  probe
  misc_feature (1)..(25): SEQ ID NO: 1647; WAN024FOC; Start 338; Stop 362
ttatttgctacggtcagatacagac

SEQ ID NO: 300765 - DNA, 25 bp, Artificial
  probe
  misc_feature (1)..(25): SEQ ID NO: 1647; WAN024FOC; Start 318; Stop 342
tgcttctgccgtcaatgaaattatt

SEQ ID NO: 300766 - DNA, 25 bp, Artificial
  probe
  misc_feature (1)..(25): SEQ ID NO: 1648; WAN024GGA; Start 14; Stop 38
ggcaattcaatcttctcttccttat

SEQ ID NO: 300767 - DNA, 25 bp, Artificial
  probe
  misc_feature (1)..(25): SEQ ID NO: 1648; WAN024GGA; Start 250; Stop 274
atccttatagacatggcaagaagtt

SEQ ID NO: 300768 - DNA, 25 bp, Artificial
  probe
  misc_feature (1)..(25): SEQ ID NO: 1648; WAN024GGA; Start 249; Stop 273
catccttatagacatggcaagaagt

SEQ ID NO: 300769 - DNA, 25 bp, Artificial
  probe
  misc_feature (1)..(25): SEQ ID NO: 1648; WAN024GGA; Start 248; Stop 272
gcatccttatagacatggcaagaag

SEQ ID NO: 300770 - DNA, 25 bp, Artificial
  probe
  misc_feature (1)..(25): SEQ ID NO: 1648; WAN024GGA; Start 13; Stop 37
gggcaattcaatcttctcttcctta

SEQ ID NO: 300771 - DNA, 25 bp, Artificial
  probe
  misc_feature (1)..(25): SEQ ID NO: 1648; WAN024GGA; Start 9; Stop 33
ttacgggcaattcaatcttctcttc

SEQ ID NO: 300772 - DNA, 25 bp, Artificial
  probe
  misc_feature (1)..(25): SEQ ID NO: 1648; WAN024GGA; Start 15; Stop 39
gcaattcaatcttctcttccttata

SEQ ID NO: 300773 - DNA, 25 bp, Artificial
  probe
  misc_feature (1)..(25): SEQ ID NO: 1648; WAN024GGA; Start 8; Stop 32
gttacgggcaattcaatcttctctt

SEQ ID NO: 300774 - DNA, 25 bp, Artificial
  probe
  misc_feature (1)..(25): SEQ ID NO: 1648; WAN024GGA; Start 251; Stop 275
tccttatagacatggcaagaagttt

SEQ ID NO: 300775 - DNA, 25 bp, Artificial
  probe
  misc_feature (1)..(25): SEQ ID NO: 1648; WAN024GGA; Start 241; Stop 265
agttcctgcatccttatagacatgg

SEQ ID NO: 300776 - DNA, 25 bp, Artificial
  probe
  misc_feature (1)..(25): SEQ ID NO: 1648; WAN024GGA; Start 240; Stop 264
cagttcctgcatccttatagacatg

SEQ ID NO: 300777 - DNA, 25 bp, Artificial
  probe
  misc_feature (1)..(25): SEQ ID NO: 1648; WAN024GGA; Start 253; Stop 277
cttatagacatggcaagaagtttgg

SEQ ID NO: 300778 - DNA, 25 bp, Artificial
  probe
  misc_feature (1)..(25): SEQ ID NO: 1648; WAN024GGA; Start 252; Stop 276
ccttatagacatggcaagaagtttg

SEQ ID NO: 300779 - DNA, 25 bp, Artificial
  probe
  misc_feature (1)..(25): SEQ ID NO: 1648; WAN024GGA; Start 34; Stop 58
cttataaatgcgaaggagattgagc

SEQ ID NO: 300780 - DNA, 25 bp, Artificial
  probe
  misc_feature (1)..(25): SEQ ID NO: 1648; WAN024GGA; Start 254; Stop 278
ttatagacatggcaagaagtttggt

SEQ ID NO: 300781 - DNA, 25 bp, Artificial
  probe
  misc_feature (1)..(25): SEQ ID NO: 1648; WAN024GGA; Start 81; Stop 105
catccaaatggcgagacttgataaa

SEQ ID NO: 300782 - DNA, 25 bp, Artificial
  probe
  misc_feature (1)..(25): SEQ ID NO: 1648; WAN024GGA; Start 6; Stop 30
ttgttacgggcaattcaatcttctc

SEQ ID NO: 300783 - DNA, 25 bp, Artificial
  probe
  misc_feature (1)..(25): SEQ ID NO: 1648; WAN024GGA; Start 255; Stop 279
tatagacatggcaagaagtttggtg

SEQ ID NO: 300784 - DNA, 25 bp, Artificial
  probe
  misc_feature (1)..(25): SEQ ID NO: 1648; WAN024GGA; Start 5; Stop 29
gttgttacgggcaattcaatcttct

SEQ ID NO: 300785 - DNA, 25 bp, Artificial
  probe
  misc_feature (1)..(25): SEQ ID NO: 1648; WAN024GGA; Start 4; Stop 28
agttgttacgggcaattcaatcttc

SEQ ID NO: 300786 - DNA, 25 bp, Artificial
  probe
  misc_feature (1)..(25): SEQ ID NO: 1648; WAN024GGA; Start 3; Stop 27
gagttgttacgggcaattcaatctt

SEQ ID NO: 300787 - DNA, 25 bp, Artificial
  probe
  misc_feature (1)..(25): SEQ ID NO: 1648; WAN024GGA; Start 1; Stop 25
atgagttgttacgggcaattcaatc

SEQ ID NO: 300788 - DNA, 25 bp, Artificial
  probe
  misc_feature (1)..(25): SEQ ID NO: 1648; WAN024GGA; Start 7; Stop 31
tgttacgggcaattcaatcttctct

SEQ ID NO: 300789 - DNA, 25 bp, Artificial
  probe
  misc_feature (1)..(25): SEQ ID NO: 1648; WAN024GGA; Start 21; Stop 45
caatcttctcttccttataaatgcg

SEQ ID NO: 300790 - DNA, 25 bp, Artificial
  probe
  misc_feature (1)..(25): SEQ ID NO: 1648; WAN024GGA; Start 22; Stop 46
aatcttctcttccttataaatgcga

SEQ ID NO: 300791 - DNA, 25 bp, Artificial
  probe
  misc_feature (1)..(25): SEQ ID NO: 1648; WAN024GGA; Start 23; Stop 47
atcttctcttccttataaatgcgaa

SEQ ID NO: 300792 - DNA, 25 bp, Artificial
  probe
  misc_feature (1)..(25): SEQ ID NO: 1648; WAN024GGA; Start 80; Stop 104
tcatccaaatggcgagacttgataa

SEQ ID NO: 300793 - DNA, 25 bp, Artificial
  probe
  misc_feature (1)..(25): SEQ ID NO: 1648; WAN024GGA; Start 10; Stop 34
tacgggcaattcaatcttctcttcc

SEQ ID NO: 300794 - DNA, 25 bp, Artificial
  probe
  misc_feature (1)..(25): SEQ ID NO: 1648; WAN024GGA; Start 204; Stop 228
ccaaacgcacttccatattgtcttg

SEQ ID NO: 300795 - DNA, 25 bp, Artificial
  probe
  misc_feature (1)..(25): SEQ ID NO: 1648; WAN024GGA; Start 203; Stop 227
tccaaacgcacttccatattgtctt

SEQ ID NO: 300796 - DNA, 25 bp, Artificial
  probe
  misc_feature (1)..(25): SEQ ID NO: 1648; WAN024GGA; Start 242; Stop 266
gttcctgcatccttatagacatggc

SEQ ID NO: 300797 - DNA, 25 bp, Artificial
  probe
  misc_feature (1)..(25): SEQ ID NO: 1648; WAN024GGA; Start 2; Stop 26
tgagttgttacgggcaattcaatct

SEQ ID NO: 300798 - DNA, 25 bp, Artificial
  probe
  misc_feature (1)..(25): SEQ ID NO: 1648; WAN024GGA; Start 12; Stop 36
cgggcaattcaatcttctcttcctt

SEQ ID NO: 300799 - DNA, 25 bp, Artificial
  probe
  misc_feature (1)..(25): SEQ ID NO: 1649; WAN024B6E; Start 135; Stop 159
agatactgacatacctaattgctgg

SEQ ID NO: 300800 - DNA, 25 bp, Artificial
  probe
  misc_feature (1)..(25): SEQ ID NO: 1649; WAN024B6E; Start 136; Stop 160
gatactgacatacctaattgctggc

SEQ ID NO: 300801 - DNA, 25 bp, Artificial
  probe
  misc_feature (1)..(25): SEQ ID NO: 1649; WAN024B6E; Start 137; Stop 161
atactgacatacctaattgctggct

SEQ ID NO: 300802 - DNA, 25 bp, Artificial
  probe
  misc_feature (1)..(25): SEQ ID NO: 1649; WAN024B6E; Start 134; Stop 158
cagatactgacatacctaattgctg

SEQ ID NO: 300803 - DNA, 25 bp, Artificial
  probe
  misc_feature (1)..(25): SEQ ID NO: 1649; WAN024B6E; Start 138; Stop 162
tactgacatacctaattgctggctg

SEQ ID NO: 300804 - DNA, 25 bp, Artificial
  probe
  misc_feature (1)..(25): SEQ ID NO: 1649; WAN024B6E; Start 115; Stop 139
tacaacagtgcctcaaattcagata

SEQ ID NO: 300805 - DNA, 25 bp, Artificial
  probe
  misc_feature (1)..(25): SEQ ID NO: 1649; WAN024B6E; Start 114; Stop 138
ttacaacagtgcctcaaattcagat

SEQ ID NO: 300806 - DNA, 25 bp, Artificial
  probe
  misc_feature (1)..(25): SEQ ID NO: 1649; WAN024B6E; Start 113; Stop 137
tttacaacagtgcctcaaattcaga

SEQ ID NO: 300807 - DNA, 25 bp, Artificial
  probe
  misc_feature (1)..(25): SEQ ID NO: 1649; WAN024B6E; Start 116; Stop 140
acaacagtgcctcaaattcagatac

SEQ ID NO: 300808 - DNA, 25 bp, Artificial
  probe
  misc_feature (1)..(25): SEQ ID NO: 1649; WAN024B6E; Start 117; Stop 141
caacagtgcctcaaattcagatact

SEQ ID NO: 300809 - DNA, 25 bp, Artificial
  probe
  misc_feature (1)..(25): SEQ ID NO: 1649; WAN024B6E; Start 164; Stop 188
caacctcagaagtcagaagaccttg

SEQ ID NO: 300810 - DNA, 25 bp, Artificial
  probe
  misc_feature (1)..(25): SEQ ID NO: 1649; WAN024B6E; Start 173; Stop 197
aagtcagaagaccttggcgtactat

SEQ ID NO: 300811 - DNA, 25 bp, Artificial
  probe
  misc_feature (1)..(25): SEQ ID NO: 1649; WAN024B6E; Start 183; Stop 207
accttggcgtactatgtctaggaag

SEQ ID NO: 300812 - DNA, 25 bp, Artificial
  probe
  misc_feature (1)..(25): SEQ ID NO: 1649; WAN024B6E; Start 182; Stop 206
gaccttggcgtactatgtctaggaa

SEQ ID NO: 300813 - DNA, 25 bp, Artificial
  probe
  misc_feature (1)..(25): SEQ ID NO: 1649; WAN024B6E; Start 165; Stop 189
aacctcagaagtcagaagaccttgg

SEQ ID NO: 300814 - DNA, 25 bp, Artificial
  probe
  misc_feature (1)..(25): SEQ ID NO: 1649; WAN024B6E; Start 133; Stop 157
tcagatactgacatacctaattgct

SEQ ID NO: 300815 - DNA, 25 bp, Artificial
  probe
  misc_feature (1)..(25): SEQ ID NO: 1649; WAN024B6E; Start 172; Stop 196
gaagtcagaagaccttggcgtacta

SEQ ID NO: 300816 - DNA, 25 bp, Artificial
  probe
  misc_feature (1)..(25): SEQ ID NO: 1649; WAN024B6E; Start 112; Stop 136
ttttacaacagtgcctcaaattcag

SEQ ID NO: 300817 - DNA, 25 bp, Artificial
  probe
  misc_feature (1)..(25): SEQ ID NO: 1649; WAN024B6E; Start 176; Stop 200
tcagaagaccttggcgtactatgtc

SEQ ID NO: 300818 - DNA, 25 bp, Artificial
  probe
  misc_feature (1)..(25): SEQ ID NO: 1649; WAN024B6E; Start 174; Stop 198
agtcagaagaccttggcgtactatg

SEQ ID NO: 300819 - DNA, 25 bp, Artificial
  probe
  misc_feature (1)..(25): SEQ ID NO: 1649; WAN024B6E; Start 139; Stop 163
actgacatacctaattgctggctgg

SEQ ID NO: 300820 - DNA, 25 bp, Artificial
  probe
  misc_feature (1)..(25): SEQ ID NO: 1649; WAN024B6E; Start 132; Stop 156
ttcagatactgacatacctaattgc

SEQ ID NO: 300821 - DNA, 25 bp, Artificial
  probe
  misc_feature (1)..(25): SEQ ID NO: 1649; WAN024B6E; Start 175; Stop 199
gtcagaagaccttggcgtactatgt

SEQ ID NO: 300822 - DNA, 25 bp, Artificial
  probe
  misc_feature (1)..(25): SEQ ID NO: 1649; WAN024B6E; Start 111; Stop 135
attttacaacagtgcctcaaattca

SEQ ID NO: 300823 - DNA, 25 bp, Artificial
  probe
  misc_feature (1)..(25): SEQ ID NO: 1649; WAN024B6E; Start 110; Stop 134
cattttacaacagtgcctcaaattc

SEQ ID NO: 300824 - DNA, 25 bp, Artificial
  probe
  misc_feature (1)..(25): SEQ ID NO: 1649; WAN024B6E; Start 109; Stop 133
ccattttacaacagtgcctcaaatt

SEQ ID NO: 300825 - DNA, 25 bp, Artificial
  probe
  misc_feature (1)..(25): SEQ ID NO: 1649; WAN024B6E; Start 220; Stop 244
ctttctgcccttccttcaactttcc

SEQ ID NO: 300826 - DNA, 25 bp, Artificial
  probe
  misc_feature (1)..(25): SEQ ID NO: 1649; WAN024B6E; Start 219; Stop 243
cctttctgcccttccttcaactttc

SEQ ID NO: 300827 - DNA, 25 bp, Artificial
  probe
  misc_feature (1)..(25): SEQ ID NO: 1649; WAN024B6E; Start 179; Stop 203
gaagaccttggcgtactatgtctag

SEQ ID NO: 300828 - DNA, 25 bp, Artificial
  probe
  misc_feature (1)..(25): SEQ ID NO: 1649; WAN024B6E; Start 163; Stop 187
gcaacctcagaagtcagaagacctt

SEQ ID NO: 300829 - DNA, 25 bp, Artificial
  probe
  misc_feature (1)..(25): SEQ ID NO: 1649; WAN024B6E; Start 100; Stop 124
attatggagccattttacaacagtg

SEQ ID NO: 300830 - DNA, 25 bp, Artificial
  probe
  misc_feature (1)..(25): SEQ ID NO: 1649; WAN024B6E; Start 178; Stop 202
agaagaccttggcgtactatgtcta

SEQ ID NO: 300831 - DNA, 25 bp, Artificial
  probe
  misc_feature (1)..(25): SEQ ID NO: 1649; WAN024B6E; Start 218; Stop 242
tcctttctgcccttccttcaacttt

SEQ ID NO: 300832 - DNA, 25 bp, Artificial
  probe
  misc_feature (1)..(25): SEQ ID NO: 1650; WAN024BFX; Start 216; Stop 240
taccaatatgtggctgctaactatt

SEQ ID NO: 300833 - DNA, 25 bp, Artificial
  probe
  misc_feature (1)..(25): SEQ ID NO: 1650; WAN024BFX; Start 214; Stop 238
aataccaatatgtggctgctaacta

SEQ ID NO: 300834 - DNA, 25 bp, Artificial
  probe
  misc_feature (1)..(25): SEQ ID NO: 1650; WAN024BFX; Start 215; Stop 239
ataccaatatgtggctgctaactat

SEQ ID NO: 300835 - DNA, 25 bp, Artificial
  probe
  misc_feature (1)..(25): SEQ ID NO: 1650; WAN024BFX; Start 341; Stop 365
agtagtagggagtttggtgtatgaa

SEQ ID NO: 300836 - DNA, 25 bp, Artificial
  probe
  misc_feature (1)..(25): SEQ ID NO: 1650; WAN024BFX; Start 222; Stop 246
tatgtggctgctaactatttgaaag

SEQ ID NO: 300837 - DNA, 25 bp, Artificial
  probe
  misc_feature (1)..(25): SEQ ID NO: 1650; WAN024BFX; Start 322; Stop 346
cggtagatatcctagatcgagtagt

SEQ ID NO: 300838 - DNA, 25 bp, Artificial
  probe
  misc_feature (1)..(25): SEQ ID NO: 1650; WAN024BFX; Start 321; Stop 345
acggtagatatcctagatcgagtag

SEQ ID NO: 300839 - DNA, 25 bp, Artificial
  probe
  misc_feature (1)..(25): SEQ ID NO: 1650; WAN024BFX; Start 320; Stop 344
cacggtagatatcctagatcgagta

SEQ ID NO: 300840 - DNA, 25 bp, Artificial
  probe
  misc_feature (1)..(25): SEQ ID NO: 1650; WAN024BFX; Start 256; Stop 280
cttatctaaaggaaaccgatttgcc

SEQ ID NO: 300841 - DNA, 25 bp, Artificial
  probe
  misc_feature (1)..(25): SEQ ID NO: 1650; WAN024BFX; Start 340; Stop 364
gagtagtagggagtttggtgtatga

SEQ ID NO: 300842 - DNA, 25 bp, Artificial
  probe
  misc_feature (1)..(25): SEQ ID NO: 1650; WAN024BFX; Start 255; Stop 279
tcttatctaaaggaaaccgatttgc

SEQ ID NO: 300843 - DNA, 25 bp, Artificial
  probe
  misc_feature (1)..(25): SEQ ID NO: 1650; WAN024BFX; Start 251; Stop 275
gcagtcttatctaaaggaaaccgat

SEQ ID NO: 300844 - DNA, 25 bp, Artificial
  probe
  misc_feature (1)..(25): SEQ ID NO: 1650; WAN024BFX; Start 342; Stop 366
gtagtagggagtttggtgtatgaac

SEQ ID NO: 300845 - DNA, 25 bp, Artificial
  probe
  misc_feature (1)..(25): SEQ ID NO: 1650; WAN024BFX; Start 221; Stop 245
atatgtggctgctaactatttgaaa

SEQ ID NO: 300846 - DNA, 25 bp, Artificial
  probe
  misc_feature (1)..(25): SEQ ID NO: 1650; WAN024BFX; Start 219; Stop 243
caatatgtggctgctaactatttga

SEQ ID NO: 300847 - DNA, 25 bp, Artificial
  probe
  misc_feature (1)..(25): SEQ ID NO: 1650; WAN024BFX; Start 108; Stop 132
ggtgcctgaaagaaataaactctat

SEQ ID NO: 300848 - DNA, 25 bp, Artificial
  probe
  misc_feature (1)..(25): SEQ ID NO: 1650; WAN024BFX; Start 2; Stop 26
tgagtttagcagatttacttgagga

SEQ ID NO: 300849 - DNA, 25 bp, Artificial
  probe
  misc_feature (1)..(25): SEQ ID NO: 1650; WAN024BFX; Start 318; Stop 342
gacacggtagatatcctagatcgag

SEQ ID NO: 300850 - DNA, 25 bp, Artificial
  probe
  misc_feature (1)..(25): SEQ ID NO: 1650; WAN024BFX; Start 107; Stop 131
cggtgcctgaaagaaataaactcta

SEQ ID NO: 300851 - DNA, 25 bp, Artificial
  probe
  misc_feature (1)..(25): SEQ ID NO: 1650; WAN024BFX; Start 220; Stop 244
aatatgtggctgctaactatttgaa

SEQ ID NO: 300852 - DNA, 25 bp, Artificial
  probe
  misc_feature (1)..(25): SEQ ID NO: 1650; WAN024BFX; Start 252; Stop 276
cagtcttatctaaaggaaaccgatt

SEQ ID NO: 300853 - DNA, 25 bp, Artificial
  probe
  misc_feature (1)..(25): SEQ ID NO: 1650; WAN024BFX; Start 4; Stop 28
agtttagcagatttacttgaggagc

SEQ ID NO: 300854 - DNA, 25 bp, Artificial
  probe
  misc_feature (1)..(25): SEQ ID NO: 1650; WAN024BFX; Start 3; Stop 27
gagtttagcagatttacttgaggag

SEQ ID NO: 300855 - DNA, 25 bp, Artificial
  probe
  misc_feature (1)..(25): SEQ ID NO: 1650; WAN024BFX; Start 102; Stop 126
tattgcggtgcctgaaagaaataaa

SEQ ID NO: 300856 - DNA, 25 bp, Artificial
  probe
  misc_feature (1)..(25): SEQ ID NO: 1650; WAN024BFX; Start 1; Stop 25
atgagtttagcagatttacttgagg

SEQ ID NO: 300857 - DNA, 25 bp, Artificial
  probe
  misc_feature (1)..(25): SEQ ID NO: 1650; WAN024BFX; Start 319; Stop 343
acacggtagatatcctagatcgagt

SEQ ID NO: 300858 - DNA, 25 bp, Artificial
  probe
  misc_feature (1)..(25): SEQ ID NO: 1650; WAN024BFX; Start 343; Stop 367
tagtagggagtttggtgtatgaaca

SEQ ID NO: 300859 - DNA, 25 bp, Artificial
  probe
  misc_feature (1)..(25): SEQ ID NO: 1650; WAN024BFX; Start 339; Stop 363
cgagtagtagggagtttggtgtatg

SEQ ID NO: 300860 - DNA, 25 bp, Artificial
  probe
  misc_feature (1)..(25): SEQ ID NO: 1650; WAN024BFX; Start 254; Stop 278
gtcttatctaaaggaaaccgatttg

SEQ ID NO: 300861 - DNA, 25 bp, Artificial
  probe
  misc_feature (1)..(25): SEQ ID NO: 1650; WAN024BFX; Start 253; Stop 277
agtcttatctaaaggaaaccgattt

SEQ ID NO: 300862 - DNA, 25 bp, Artificial
  probe
  misc_feature (1)..(25): SEQ ID NO: 1650; WAN024BFX; Start 258; Stop 282
tatctaaaggaaaccgatttgccta

SEQ ID NO: 300863 - DNA, 25 bp, Artificial
  probe
  misc_feature (1)..(25): SEQ ID NO: 1650; WAN024BFX; Start 259; Stop 283
atctaaaggaaaccgatttgcctaa

SEQ ID NO: 300864 - DNA, 25 bp, Artificial
  probe
  misc_feature (1)..(25): SEQ ID NO: 1650; WAN024BFX; Start 257; Stop 281
ttatctaaaggaaaccgatttgcct

SEQ ID NO: 300865 - DNA, 25 bp, Artificial
  probe
  misc_feature (1)..(25): SEQ ID NO: 1651; WAN024EYP; Start 222; Stop 246
tatcataatctccagcgagtttacc

SEQ ID NO: 300866 - DNA, 25 bp, Artificial
  probe
  misc_feature (1)..(25): SEQ ID NO: 1651; WAN024EYP; Start 221; Stop 245
atatcataatctccagcgagtttac

SEQ ID NO: 300867 - DNA, 25 bp, Artificial
  probe
  misc_feature (1)..(25): SEQ ID NO: 1651; WAN024EYP; Start 80; Stop 104
ttctgagtgaggacttccatacgac

SEQ ID NO: 300868 - DNA, 25 bp, Artificial
  probe
  misc_feature (1)..(25): SEQ ID NO: 1651; WAN024EYP; Start 223; Stop 247
atcataatctccagcgagtttaccc

SEQ ID NO: 300869 - DNA, 25 bp, Artificial
  probe
  misc_feature (1)..(25): SEQ ID NO: 1651; WAN024EYP; Start 79; Stop 103
tttctgagtgaggacttccatacga

SEQ ID NO: 300870 - DNA, 25 bp, Artificial
  probe
  misc_feature (1)..(25): SEQ ID NO: 1651; WAN024EYP; Start 226; Stop 250
ataatctccagcgagtttacccgta

SEQ ID NO: 300871 - DNA, 25 bp, Artificial
  probe
  misc_feature (1)..(25): SEQ ID NO: 1651; WAN024EYP; Start 3; Stop 27
gagtttcaaccacattgatgagttt

SEQ ID NO: 300872 - DNA, 25 bp, Artificial
  probe
  misc_feature (1)..(25): SEQ ID NO: 1651; WAN024EYP; Start 1; Stop 25
atgagtttcaaccacattgatgagt

SEQ ID NO: 300873 - DNA, 25 bp, Artificial
  probe
  misc_feature (1)..(25): SEQ ID NO: 1651; WAN024EYP; Start 2; Stop 26
tgagtttcaaccacattgatgagtt

SEQ ID NO: 300874 - DNA, 25 bp, Artificial
  probe
  misc_feature (1)..(25): SEQ ID NO: 1651; WAN024EYP; Start 227; Stop 251
taatctccagcgagtttacccgtag

SEQ ID NO: 300875 - DNA, 25 bp, Artificial
  probe
  misc_feature (1)..(25): SEQ ID NO: 1651; WAN024EYP; Start 78; Stop 102
ttttctgagtgaggacttccatacg

SEQ ID NO: 300876 - DNA, 25 bp, Artificial
  probe
  misc_feature (1)..(25): SEQ ID NO: 1651; WAN024EYP; Start 224; Stop 248
tcataatctccagcgagtttacccg

SEQ ID NO: 300877 - DNA, 25 bp, Artificial
  probe
  misc_feature (1)..(25): SEQ ID NO: 1651; WAN024EYP; Start 81; Stop 105
tctgagtgaggacttccatacgacc

SEQ ID NO: 300878 - DNA, 25 bp, Artificial
  probe
  misc_feature (1)..(25): SEQ ID NO: 1651; WAN024EYP; Start 225; Stop 249
cataatctccagcgagtttacccgt

SEQ ID NO: 300879 - DNA, 25 bp, Artificial
  probe
  misc_feature (1)..(25): SEQ ID NO: 1651; WAN024EYP; Start 42; Stop 66
cattgtgggcatagtcgatgaagac

SEQ ID NO: 300880 - DNA, 25 bp, Artificial
  probe
  misc_feature (1)..(25): SEQ ID NO: 1651; WAN024EYP; Start 4; Stop 28
agtttcaaccacattgatgagtttt

SEQ ID NO: 300881 - DNA, 25 bp, Artificial
  probe
  misc_feature (1)..(25): SEQ ID NO: 1651; WAN024EYP; Start 51; Stop 75
catagtcgatgaagaccttggctcc

SEQ ID NO: 300882 - DNA, 25 bp, Artificial
  probe
  misc_feature (1)..(25): SEQ ID NO: 1651; WAN024EYP; Start 195; Stop 219
cttggttgaagttgccaatgagttg

SEQ ID NO: 300883 - DNA, 25 bp, Artificial
  probe
  misc_feature (1)..(25): SEQ ID NO: 1651; WAN024EYP; Start 194; Stop 218
tcttggttgaagttgccaatgagtt

SEQ ID NO: 300884 - DNA, 25 bp, Artificial
  probe
  misc_feature (1)..(25): SEQ ID NO: 1651; WAN024EYP; Start 193; Stop 217
ttcttggttgaagttgccaatgagt

SEQ ID NO: 300885 - DNA, 25 bp, Artificial
  probe
  misc_feature (1)..(25): SEQ ID NO: 1651; WAN024EYP; Start 53; Stop 77
tagtcgatgaagaccttggctccat

SEQ ID NO: 300886 - DNA, 25 bp, Artificial
  probe
  misc_feature (1)..(25): SEQ ID NO: 1651; WAN024EYP; Start 52; Stop 76
atagtcgatgaagaccttggctcca

SEQ ID NO: 300887 - DNA, 25 bp, Artificial
  probe
  misc_feature (1)..(25): SEQ ID NO: 1651; WAN024EYP; Start 192; Stop 216
tttcttggttgaagttgccaatgag

SEQ ID NO: 300888 - DNA, 25 bp, Artificial
  probe
  misc_feature (1)..(25): SEQ ID NO: 1651; WAN024EYP; Start 184; Stop 208
aactgcattttcttggttgaagttg

SEQ ID NO: 300889 - DNA, 25 bp, Artificial
  probe
  misc_feature (1)..(25): SEQ ID NO: 1651; WAN024EYP; Start 43; Stop 67
attgtgggcatagtcgatgaagacc

SEQ ID NO: 300890 - DNA, 25 bp, Artificial
  probe
  misc_feature (1)..(25): SEQ ID NO: 1651; WAN024EYP; Start 41; Stop 65
ccattgtgggcatagtcgatgaaga

SEQ ID NO: 300891 - DNA, 25 bp, Artificial
  probe
  misc_feature (1)..(25): SEQ ID NO: 1651; WAN024EYP; Start 190; Stop 214
attttcttggttgaagttgccaatg

SEQ ID NO: 300892 - DNA, 25 bp, Artificial
  probe
  misc_feature (1)..(25): SEQ ID NO: 1651; WAN024EYP; Start 189; Stop 213
cattttcttggttgaagttgccaat

SEQ ID NO: 300893 - DNA, 25 bp, Artificial
  probe
  misc_feature (1)..(25): SEQ ID NO: 1651; WAN024EYP; Start 183; Stop 207
caactgcattttcttggttgaagtt

SEQ ID NO: 300894 - DNA, 25 bp, Artificial
  probe
  misc_feature (1)..(25): SEQ ID NO: 1651; WAN024EYP; Start 132; Stop 156
ttttgatgtcctcaagacttgctcc

SEQ ID NO: 300895 - DNA, 25 bp, Artificial
  probe
  misc_feature (1)..(25): SEQ ID NO: 1651; WAN024EYP; Start 55; Stop 79
gtcgatgaagaccttggctccattt

SEQ ID NO: 300896 - DNA, 25 bp, Artificial
  probe
  misc_feature (1)..(25): SEQ ID NO: 1651; WAN024EYP; Start 191; Stop 215
ttttcttggttgaagttgccaatga

SEQ ID NO: 300897 - DNA, 25 bp, Artificial
  probe
  misc_feature (1)..(25): SEQ ID NO: 1651; WAN024EYP; Start 56; Stop 80
tcgatgaagaccttggctccatttt

SEQ ID NO: 300898 - DNA, 25 bp, Artificial
  probe
  misc_feature (1)..(25): SEQ ID NO: 1652; WAN024FJA; Start 660; Stop 684
taataatgccgagacagctaatatc

SEQ ID NO: 300899 - DNA, 25 bp, Artificial
  probe
  misc_feature (1)..(25): SEQ ID NO: 1652; WAN024FJA; Start 659; Stop 683
ctaataatgccgagacagctaatat

SEQ ID NO: 300900 - DNA, 25 bp, Artificial
  probe
  misc_feature (1)..(25): SEQ ID NO: 1652; WAN024FJA; Start 189; Stop 213
aatcaaatctgaaattcgtcaccac

SEQ ID NO: 300901 - DNA, 25 bp, Artificial
  probe
  misc_feature (1)..(25): SEQ ID NO: 1652; WAN024FJA; Start 188; Stop 212
aaatcaaatctgaaattcgtcacca

SEQ ID NO: 300902 - DNA, 25 bp, Artificial
  probe
  misc_feature (1)..(25): SEQ ID NO: 1652; WAN024FJA; Start 319; Stop 343
gaaacaggtattgatgaggcgattt

SEQ ID NO: 300903 - DNA, 25 bp, Artificial
  probe
  misc_feature (1)..(25): SEQ ID NO: 1652; WAN024FJA; Start 187; Stop 211
gaaatcaaatctgaaattcgtcacc

SEQ ID NO: 300904 - DNA, 25 bp, Artificial
  probe
  misc_feature (1)..(25): SEQ ID NO: 1652; WAN024FJA; Start 431; Stop 455
agttggaaatcagttctgtttatct

SEQ ID NO: 300905 - DNA, 25 bp, Artificial
  probe
  misc_feature (1)..(25): SEQ ID NO: 1652; WAN024FJA; Start 186; Stop 210
tgaaatcaaatctgaaattcgtcac

SEQ ID NO: 300906 - DNA, 25 bp, Artificial
  probe
  misc_feature (1)..(25): SEQ ID NO: 1652; WAN024FJA; Start 434; Stop 458
tggaaatcagttctgtttatctgga

SEQ ID NO: 300907 - DNA, 25 bp, Artificial
  probe
  misc_feature (1)..(25): SEQ ID NO: 1652; WAN024FJA; Start 436; Stop 460
gaaatcagttctgtttatctggacc

SEQ ID NO: 300908 - DNA, 25 bp, Artificial
  probe
  misc_feature (1)..(25): SEQ ID NO: 1652; WAN024FJA; Start 435; Stop 459
ggaaatcagttctgtttatctggac

SEQ ID NO: 300909 - DNA, 25 bp, Artificial
  probe
  misc_feature (1)..(25): SEQ ID NO: 1652; WAN024FJA; Start 541; Stop 565
tatctccagcgagcagaagacatta

SEQ ID NO: 300910 - DNA, 25 bp, Artificial
  probe
  misc_feature (1)..(25): SEQ ID NO: 1652; WAN024FJA; Start 423; Stop 447
caagtaccagttggaaatcagttct

SEQ ID NO: 300911 - DNA, 25 bp, Artificial
  probe
  misc_feature (1)..(25): SEQ ID NO: 1652; WAN024FJA; Start 437; Stop 461
aaatcagttctgtttatctggacca

SEQ ID NO: 300912 - DNA, 25 bp, Artificial
  probe
  misc_feature (1)..(25): SEQ ID NO: 1652; WAN024FJA; Start 433; Stop 457
ttggaaatcagttctgtttatctgg

SEQ ID NO: 300913 - DNA, 25 bp, Artificial
  probe
  misc_feature (1)..(25): SEQ ID NO: 1652; WAN024FJA; Start 429; Stop 453
ccagttggaaatcagttctgtttat

SEQ ID NO: 300914 - DNA, 25 bp, Artificial
  probe
  misc_feature (1)..(25): SEQ ID NO: 1652; WAN024FJA; Start 428; Stop 452
accagttggaaatcagttctgttta

SEQ ID NO: 300915 - DNA, 25 bp, Artificial
  probe
  misc_feature (1)..(25): SEQ ID NO: 1652; WAN024FJA; Start 427; Stop 451
taccagttggaaatcagttctgttt

SEQ ID NO: 300916 - DNA, 25 bp, Artificial
  probe
  misc_feature (1)..(25): SEQ ID NO: 1652; WAN024FJA; Start 438; Stop 462
aatcagttctgtttatctggaccac

SEQ ID NO: 300917 - DNA, 25 bp, Artificial
  probe
  misc_feature (1)..(25): SEQ ID NO: 1652; WAN024FJA; Start 558; Stop 582
agacattatggacttcttgatagta

SEQ ID NO: 300918 - DNA, 25 bp, Artificial
  probe
  misc_feature (1)..(25): SEQ ID NO: 1652; WAN024FJA; Start 190; Stop 214
atcaaatctgaaattcgtcaccacc

SEQ ID NO: 300919 - DNA, 25 bp, Artificial
  probe
  misc_feature (1)..(25): SEQ ID NO: 1652; WAN024FJA; Start 658; Stop 682
gctaataatgccgagacagctaata

SEQ ID NO: 300920 - DNA, 25 bp, Artificial
  probe
  misc_feature (1)..(25): SEQ ID NO: 1652; WAN024FJA; Start 424; Stop 448
aagtaccagttggaaatcagttctg

SEQ ID NO: 300921 - DNA, 25 bp, Artificial
  probe
  misc_feature (1)..(25): SEQ ID NO: 1652; WAN024FJA; Start 432; Stop 456
gttggaaatcagttctgtttatctg

SEQ ID NO: 300922 - DNA, 25 bp, Artificial
  probe
  misc_feature (1)..(25): SEQ ID NO: 1652; WAN024FJA; Start 430; Stop 454
cagttggaaatcagttctgtttatc

SEQ ID NO: 300923 - DNA, 25 bp, Artificial
  probe
  misc_feature (1)..(25): SEQ ID NO: 1652; WAN024FJA; Start 661; Stop 685
aataatgccgagacagctaatatcg

SEQ ID NO: 300924 - DNA, 25 bp, Artificial
  probe
  misc_feature (1)..(25): SEQ ID NO: 1652; WAN024FJA; Start 426; Stop 450
gtaccagttggaaatcagttctgtt

SEQ ID NO: 300925 - DNA, 25 bp, Artificial
  probe
  misc_feature (1)..(25): SEQ ID NO: 1652; WAN024FJA; Start 193; Stop 217
aaatctgaaattcgtcaccaccaac

SEQ ID NO: 300926 - DNA, 25 bp, Artificial
  probe
  misc_feature (1)..(25): SEQ ID NO: 1652; WAN024FJA; Start 192; Stop 216
caaatctgaaattcgtcaccaccaa

SEQ ID NO: 300927 - DNA, 25 bp, Artificial
  probe
  misc_feature (1)..(25): SEQ ID NO: 1652; WAN024FJA; Start 185; Stop 209
atgaaatcaaatctgaaattcgtca

SEQ ID NO: 300928 - DNA, 25 bp, Artificial
  probe
  misc_feature (1)..(25): SEQ ID NO: 1652; WAN024FJA; Start 156; Stop 180
tcacctctatgagtcctttctccat

SEQ ID NO: 300929 - DNA, 25 bp, Artificial
  probe
  misc_feature (1)..(25): SEQ ID NO: 1652; WAN024FJA; Start 542; Stop 566
atctccagcgagcagaagacattat

SEQ ID NO: 300930 - DNA, 25 bp, Artificial
  probe
  misc_feature (1)..(25): SEQ ID NO: 1652; WAN024FJA; Start 557; Stop 581
aagacattatggacttcttgatagt

SEQ ID NO: 300931 - DNA, 25 bp, Artificial
  probe
  misc_feature (1)..(25): SEQ ID NO: 1653; WAN0249VC; Start 100; Stop 124
atattacactatattgaaagcgttt

SEQ ID NO: 300932 - DNA, 25 bp, Artificial
  probe
  misc_feature (1)..(25): SEQ ID NO: 1653; WAN0249VC; Start 39; Stop 63
agctgaaactactttcaaggacatt

SEQ ID NO: 300933 - DNA, 25 bp, Artificial
  probe
  misc_feature (1)..(25): SEQ ID NO: 1653; WAN0249VC; Start 40; Stop 64
gctgaaactactttcaaggacatta

SEQ ID NO: 300934 - DNA, 25 bp, Artificial
  probe
  misc_feature (1)..(25): SEQ ID NO: 1653; WAN0249VC; Start 103; Stop 127
ttacactatattgaaagcgttttaa

SEQ ID NO: 300935 - DNA, 25 bp, Artificial
  probe
  misc_feature (1)..(25): SEQ ID NO: 1653; WAN0249VC; Start 43; Stop 67
gaaactactttcaaggacattatta

SEQ ID NO: 300936 - DNA, 25 bp, Artificial
  probe
  misc_feature (1)..(25): SEQ ID NO: 1653; WAN0249VC; Start 102; Stop 126
attacactatattgaaagcgtttta

SEQ ID NO: 300937 - DNA, 25 bp, Artificial
  probe
  misc_feature (1)..(25): SEQ ID NO: 1653; WAN0249VC; Start 101; Stop 125
tattacactatattgaaagcgtttt

SEQ ID NO: 300938 - DNA, 25 bp, Artificial
  probe
  misc_feature (1)..(25): SEQ ID NO: 1653; WAN0249VC; Start 18; Stop 42
ttttatggactataaatgttcagct

SEQ ID NO: 300939 - DNA, 25 bp, Artificial
  probe
  misc_feature (1)..(25): SEQ ID NO: 1653; WAN0249VC; Start 104; Stop 128
tacactatattgaaagcgttttaaa

SEQ ID NO: 300940 - DNA, 25 bp, Artificial
  probe
  misc_feature (1)..(25): SEQ ID NO: 1653; WAN0249VC; Start 41; Stop 65
ctgaaactactttcaaggacattat

SEQ ID NO: 300941 - DNA, 25 bp, Artificial
  probe
  misc_feature (1)..(25): SEQ ID NO: 1653; WAN0249VC; Start 42; Stop 66
tgaaactactttcaaggacattatt

SEQ ID NO: 300942 - DNA, 25 bp, Artificial
  probe
  misc_feature (1)..(25): SEQ ID NO: 1653; WAN0249VC; Start 105; Stop 129
acactatattgaaagcgttttaaaa

SEQ ID NO: 300943 - DNA, 25 bp, Artificial
  probe
  misc_feature (1)..(25): SEQ ID NO: 1654; WAN024C8C; Start 202; Stop 226
atcacttcagttgacttagcaatct

SEQ ID NO: 300944 - DNA, 25 bp, Artificial
  probe
  misc_feature (1)..(25): SEQ ID NO: 1654; WAN024C8C; Start 201; Stop 225
catcacttcagttgacttagcaatc

SEQ ID NO: 300945 - DNA, 25 bp, Artificial
  probe
  misc_feature (1)..(25): SEQ ID NO: 1654; WAN024C8C; Start 208; Stop 232
tcagttgacttagcaatctcagtaa

SEQ ID NO: 300946 - DNA, 25 bp, Artificial
  probe
  misc_feature (1)..(25): SEQ ID NO: 1654; WAN024C8C; Start 207; Stop 231
ttcagttgacttagcaatctcagta

SEQ ID NO: 300947 - DNA, 25 bp, Artificial
  probe
  misc_feature (1)..(25): SEQ ID NO: 1654; WAN024C8C; Start 200; Stop 224
tcatcacttcagttgacttagcaat

SEQ ID NO: 300948 - DNA, 25 bp, Artificial
  probe
  misc_feature (1)..(25): SEQ ID NO: 1654; WAN024C8C; Start 199; Stop 223
ttcatcacttcagttgacttagcaa

SEQ ID NO: 300949 - DNA, 25 bp, Artificial
  probe
  misc_feature (1)..(25): SEQ ID NO: 1654; WAN024C8C; Start 206; Stop 230
cttcagttgacttagcaatctcagt

SEQ ID NO: 300950 - DNA, 25 bp, Artificial
  probe
  misc_feature (1)..(25): SEQ ID NO: 1654; WAN024C8C; Start 205; Stop 229
acttcagttgacttagcaatctcag

SEQ ID NO: 300951 - DNA, 25 bp, Artificial
  probe
  misc_feature (1)..(25): SEQ ID NO: 1654; WAN024C8C; Start 203; Stop 227
tcacttcagttgacttagcaatctc

SEQ ID NO: 300952 - DNA, 25 bp, Artificial
  probe
  misc_feature (1)..(25): SEQ ID NO: 1654; WAN024C8C; Start 204; Stop 228
cacttcagttgacttagcaatctca

SEQ ID NO: 300953 - DNA, 25 bp, Artificial
  probe
  misc_feature (1)..(25): SEQ ID NO: 1654; WAN024C8C; Start 209; Stop 233
cagttgacttagcaatctcagtaag

SEQ ID NO: 300954 - DNA, 25 bp, Artificial
  probe
  misc_feature (1)..(25): SEQ ID NO: 1654; WAN024C8C; Start 210; Stop 234
agttgacttagcaatctcagtaaga

SEQ ID NO: 300955 - DNA, 25 bp, Artificial
  probe
  misc_feature (1)..(25): SEQ ID NO: 1654; WAN024C8C; Start 168; Stop 192
aatacggtcgtcagattcagtatca

SEQ ID NO: 300956 - DNA, 25 bp, Artificial
  probe
  misc_feature (1)..(25): SEQ ID NO: 1654; WAN024C8C; Start 175; Stop 199
tcgtcagattcagtatcagcttctt

SEQ ID NO: 300957 - DNA, 25 bp, Artificial
  probe
  misc_feature (1)..(25): SEQ ID NO: 1654; WAN024C8C; Start 278; Stop 302
gccctaaagcatcttctggaataat

SEQ ID NO: 300958 - DNA, 25 bp, Artificial
  probe
  misc_feature (1)..(25): SEQ ID NO: 1654; WAN024C8C; Start 303; Stop 327
tgttccatttgtcaagatttcaagg

SEQ ID NO: 300959 - DNA, 25 bp, Artificial
  probe
  misc_feature (1)..(25): SEQ ID NO: 1654; WAN024C8C; Start 307; Stop 331
ccatttgtcaagatttcaagggtta

SEQ ID NO: 300960 - DNA, 25 bp, Artificial
  probe
  misc_feature (1)..(25): SEQ ID NO: 1654; WAN024C8C; Start 169; Stop 193
atacggtcgtcagattcagtatcag

SEQ ID NO: 300961 - DNA, 25 bp, Artificial
  probe
  misc_feature (1)..(25): SEQ ID NO: 1654; WAN024C8C; Start 197; Stop 221
ctttcatcacttcagttgacttagc

SEQ ID NO: 300962 - DNA, 25 bp, Artificial
  probe
  misc_feature (1)..(25): SEQ ID NO: 1654; WAN024C8C; Start 304; Stop 328
gttccatttgtcaagatttcaaggg

SEQ ID NO: 300963 - DNA, 25 bp, Artificial
  probe
  misc_feature (1)..(25): SEQ ID NO: 1654; WAN024C8C; Start 194; Stop 218
cttctttcatcacttcagttgactt

SEQ ID NO: 300964 - DNA, 25 bp, Artificial
  probe
  misc_feature (1)..(25): SEQ ID NO: 1654; WAN024C8C; Start 1; Stop 25
atgagtttgagtttcacttcttcca

SEQ ID NO: 300965 - DNA, 25 bp, Artificial
  probe
  misc_feature (1)..(25): SEQ ID NO: 1654; WAN024C8C; Start 198; Stop 222
tttcatcacttcagttgacttagca

SEQ ID NO: 300966 - DNA, 25 bp, Artificial
  probe
  misc_feature (1)..(25): SEQ ID NO: 1654; WAN024C8C; Start 135; Stop 159
agacaagtccagttcctcaatcgta

SEQ ID NO: 300967 - DNA, 25 bp, Artificial
  probe
  misc_feature (1)..(25): SEQ ID NO: 1654; WAN024C8C; Start 42; Stop 66
atttcgtactttcatcatctctgct

SEQ ID NO: 300968 - DNA, 25 bp, Artificial
  probe
  misc_feature (1)..(25): SEQ ID NO: 1654; WAN024C8C; Start 315; Stop 339
caagatttcaagggttaatttgtcg

SEQ ID NO: 300969 - DNA, 25 bp, Artificial
  probe
  misc_feature (1)..(25): SEQ ID NO: 1654; WAN024C8C; Start 306; Stop 330
tccatttgtcaagatttcaagggtt

SEQ ID NO: 300970 - DNA, 25 bp, Artificial
  probe
  misc_feature (1)..(25): SEQ ID NO: 1654; WAN024C8C; Start 305; Stop 329
ttccatttgtcaagatttcaagggt

SEQ ID NO: 300971 - DNA, 25 bp, Artificial
  probe
  misc_feature (1)..(25): SEQ ID NO: 1654; WAN024C8C; Start 2; Stop 26
tgagtttgagtttcacttcttccaa

SEQ ID NO: 300972 - DNA, 25 bp, Artificial
  probe
  misc_feature (1)..(25): SEQ ID NO: 1654; WAN024C8C; Start 43; Stop 67
tttcgtactttcatcatctctgctt

SEQ ID NO: 300973 - DNA, 25 bp, Artificial
  probe
  misc_feature (1)..(25): SEQ ID NO: 1654; WAN024C8C; Start 41; Stop 65
gatttcgtactttcatcatctctgc

SEQ ID NO: 300974 - DNA, 25 bp, Artificial
  probe
  misc_feature (1)..(25): SEQ ID NO: 1654; WAN024C8C; Start 279; Stop 303
ccctaaagcatcttctggaataatt

SEQ ID NO: 300975 - DNA, 25 bp, Artificial
  probe
  misc_feature (1)..(25): SEQ ID NO: 1654; WAN024C8C; Start 211; Stop 235
gttgacttagcaatctcagtaagat

SEQ ID NO: 300976 - DNA, 25 bp, Artificial
  probe
  misc_feature (1)..(25): SEQ ID NO: 1655; WAN024BH5; Start 7; Stop 31
ttgataccagtaagaccaacgagtc

SEQ ID NO: 300977 - DNA, 25 bp, Artificial
  probe
  misc_feature (1)..(25): SEQ ID NO: 1655; WAN024BH5; Start 147; Stop 171
accagagttacgttcttccttagta

SEQ ID NO: 300978 - DNA, 25 bp, Artificial
  probe
  misc_feature (1)..(25): SEQ ID NO: 1655; WAN024BH5; Start 1; Stop 25
atgagtttgataccagtaagaccaa

SEQ ID NO: 300979 - DNA, 25 bp, Artificial
  probe
  misc_feature (1)..(25): SEQ ID NO: 1655; WAN024BH5; Start 2; Stop 26
tgagtttgataccagtaagaccaac

SEQ ID NO: 300980 - DNA, 25 bp, Artificial
  probe
  misc_feature (1)..(25): SEQ ID NO: 1655; WAN024BH5; Start 146; Stop 170
aaccagagttacgttcttccttagt

SEQ ID NO: 300981 - DNA, 25 bp, Artificial
  probe
  misc_feature (1)..(25): SEQ ID NO: 1655; WAN024BH5; Start 5; Stop 29
gtttgataccagtaagaccaacgag

SEQ ID NO: 300982 - DNA, 25 bp, Artificial
  probe
  misc_feature (1)..(25): SEQ ID NO: 1655; WAN024BH5; Start 3; Stop 27
gagtttgataccagtaagaccaacg

SEQ ID NO: 300983 - DNA, 25 bp, Artificial
  probe
  misc_feature (1)..(25): SEQ ID NO: 1655; WAN024BH5; Start 114; Stop 138
gataaatgacaagcccatgatgatg

SEQ ID NO: 300984 - DNA, 25 bp, Artificial
  probe
  misc_feature (1)..(25): SEQ ID NO: 1655; WAN024BH5; Start 6; Stop 30
tttgataccagtaagaccaacgagt

SEQ ID NO: 300985 - DNA, 25 bp, Artificial
  probe
  misc_feature (1)..(25): SEQ ID NO: 1655; WAN024BH5; Start 4; Stop 28
agtttgataccagtaagaccaacga

SEQ ID NO: 300986 - DNA, 25 bp, Artificial
  probe
  misc_feature (1)..(25): SEQ ID NO: 1655; WAN024BH5; Start 113; Stop 137
tgataaatgacaagcccatgatgat

SEQ ID NO: 300987 - DNA, 25 bp, Artificial
  probe
  misc_feature (1)..(25): SEQ ID NO: 1655; WAN024BH5; Start 148; Stop 172
ccagagttacgttcttccttagtaa

SEQ ID NO: 300988 - DNA, 25 bp, Artificial
  probe
  misc_feature (1)..(25): SEQ ID NO: 1655; WAN024BH5; Start 112; Stop 136
gtgataaatgacaagcccatgatga

SEQ ID NO: 300989 - DNA, 25 bp, Artificial
  probe
  misc_feature (1)..(25): SEQ ID NO: 1655; WAN024BH5; Start 111; Stop 135
agtgataaatgacaagcccatgatg

SEQ ID NO: 300990 - DNA, 25 bp, Artificial
  probe
  misc_feature (1)..(25): SEQ ID NO: 1655; WAN024BH5; Start 110; Stop 134
cagtgataaatgacaagcccatgat

SEQ ID NO: 300991 - DNA, 25 bp, Artificial
  probe
  misc_feature (1)..(25): SEQ ID NO: 1655; WAN024BH5; Start 115; Stop 139
ataaatgacaagcccatgatgatgt

SEQ ID NO: 300992 - DNA, 25 bp, Artificial
  probe
  misc_feature (1)..(25): SEQ ID NO: 1655; WAN024BH5; Start 116; Stop 140
taaatgacaagcccatgatgatgtt

SEQ ID NO: 300993 - DNA, 25 bp, Artificial
  probe
  misc_feature (1)..(25): SEQ ID NO: 1655; WAN024BH5; Start 98; Stop 122
gaatcgctccctcagtgataaatga

SEQ ID NO: 300994 - DNA, 25 bp, Artificial
  probe
  misc_feature (1)..(25): SEQ ID NO: 1655; WAN024BH5; Start 252; Stop 276
tacagaaccacctgaagaaacagtt

SEQ ID NO: 300995 - DNA, 25 bp, Artificial
  probe
  misc_feature (1)..(25): SEQ ID NO: 1655; WAN024BH5; Start 9; Stop 33
gataccagtaagaccaacgagtcca

SEQ ID NO: 300996 - DNA, 25 bp, Artificial
  probe
  misc_feature (1)..(25): SEQ ID NO: 1655; WAN024BH5; Start 8; Stop 32
tgataccagtaagaccaacgagtcc

SEQ ID NO: 300997 - DNA, 25 bp, Artificial
  probe
  misc_feature (1)..(25): SEQ ID NO: 1655; WAN024BH5; Start 108; Stop 132
ctcagtgataaatgacaagcccatg

SEQ ID NO: 300998 - DNA, 25 bp, Artificial
  probe
  misc_feature (1)..(25): SEQ ID NO: 1655; WAN024BH5; Start 145; Stop 169
aaaccagagttacgttcttccttag

SEQ ID NO: 300999 - DNA, 25 bp, Artificial
  probe
  misc_feature (1)..(25): SEQ ID NO: 1655; WAN024BH5; Start 282; Stop 306
aagcgtacctgtaccaaagacataa

SEQ ID NO: 301000 - DNA, 25 bp, Artificial
  probe
  misc_feature (1)..(25): SEQ ID NO: 1655; WAN024BH5; Start 144; Stop 168
caaaccagagttacgttcttcctta

SEQ ID NO: 301001 - DNA, 25 bp, Artificial
  probe
  misc_feature (1)..(25): SEQ ID NO: 1655; WAN024BH5; Start 117; Stop 141
aaatgacaagcccatgatgatgttt

SEQ ID NO: 301002 - DNA, 25 bp, Artificial
  probe
  misc_feature (1)..(25): SEQ ID NO: 1655; WAN024BH5; Start 185; Stop 209
aaagaagagttgcgacaaagattgc

SEQ ID NO: 301003 - DNA, 25 bp, Artificial
  probe
  misc_feature (1)..(25): SEQ ID NO: 1655; WAN024BH5; Start 99; Stop 123
aatcgctccctcagtgataaatgac

SEQ ID NO: 301004 - DNA, 25 bp, Artificial
  probe
  misc_feature (1)..(25): SEQ ID NO: 1655; WAN024BH5; Start 139; Stop 163
tttgtcaaaccagagttacgttctt

SEQ ID NO: 301005 - DNA, 25 bp, Artificial
  probe
  misc_feature (1)..(25): SEQ ID NO: 1655; WAN024BH5; Start 251; Stop 275
ctacagaaccacctgaagaaacagt

SEQ ID NO: 301006 - DNA, 25 bp, Artificial
  probe
  misc_feature (1)..(25): SEQ ID NO: 1655; WAN024BH5; Start 109; Stop 133
tcagtgataaatgacaagcccatga

SEQ ID NO: 301007 - DNA, 25 bp, Artificial
  probe
  misc_feature (1)..(25): SEQ ID NO: 1655; WAN024BH5; Start 107; Stop 131
cctcagtgataaatgacaagcccat

SEQ ID NO: 301008 - DNA, 25 bp, Artificial
  probe
  misc_feature (1)..(25): SEQ ID NO: 1655; WAN024BH5; Start 10; Stop 34
ataccagtaagaccaacgagtccac

SEQ ID NO: 301009 - DNA, 25 bp, Artificial
  probe
  misc_feature (1)..(25): SEQ ID NO: 1656; WAN024D8U; Start 319; Stop 343
ttggttgtgaatatcaaggaatcag

SEQ ID NO: 301010 - DNA, 25 bp, Artificial
  probe
  misc_feature (1)..(25): SEQ ID NO: 1656; WAN024D8U; Start 320; Stop 344
tggttgtgaatatcaaggaatcagc

SEQ ID NO: 301011 - DNA, 25 bp, Artificial
  probe
  misc_feature (1)..(25): SEQ ID NO: 1656; WAN024D8U; Start 311; Stop 335
atgtcagcttggttgtgaatatcaa

SEQ ID NO: 301012 - DNA, 25 bp, Artificial
  probe
  misc_feature (1)..(25): SEQ ID NO: 1656; WAN024D8U; Start 321; Stop 345
ggttgtgaatatcaaggaatcagct

SEQ ID NO: 301013 - DNA, 25 bp, Artificial
  probe
  misc_feature (1)..(25): SEQ ID NO: 1656; WAN024D8U; Start 309; Stop 333
agatgtcagcttggttgtgaatatc

SEQ ID NO: 301014 - DNA, 25 bp, Artificial
  probe
  misc_feature (1)..(25): SEQ ID NO: 1656; WAN024D8U; Start 310; Stop 334
gatgtcagcttggttgtgaatatca

SEQ ID NO: 301015 - DNA, 25 bp, Artificial
  probe
  misc_feature (1)..(25): SEQ ID NO: 1656; WAN024D8U; Start 308; Stop 332
cagatgtcagcttggttgtgaatat

SEQ ID NO: 301016 - DNA, 25 bp, Artificial
  probe
  misc_feature (1)..(25): SEQ ID NO: 1656; WAN024D8U; Start 68; Stop 92
tccgtcgttctattgatttcttaaa

SEQ ID NO: 301017 - DNA, 25 bp, Artificial
  probe
  misc_feature (1)..(25): SEQ ID NO: 1656; WAN024D8U; Start 67; Stop 91
atccgtcgttctattgatttcttaa

SEQ ID NO: 301018 - DNA, 25 bp, Artificial
  probe
  misc_feature (1)..(25): SEQ ID NO: 1656; WAN024D8U; Start 122; Stop 146
aaacctttgtactagggatttctgg

SEQ ID NO: 301019 - DNA, 25 bp, Artificial
  probe
  misc_feature (1)..(25): SEQ ID NO: 1656; WAN024D8U; Start 499; Stop 523
atcacaggtttctttaccaagtttg

SEQ ID NO: 301020 - DNA, 25 bp, Artificial
  probe
  misc_feature (1)..(25): SEQ ID NO: 1656; WAN024D8U; Start 181; Stop 205
caattagctatggaagaactgcgag

SEQ ID NO: 301021 - DNA, 25 bp, Artificial
  probe
  misc_feature (1)..(25): SEQ ID NO: 1656; WAN024D8U; Start 541; Stop 565
attctccctctttaccgcctcaata

SEQ ID NO: 301022 - DNA, 25 bp, Artificial
  probe
  misc_feature (1)..(25): SEQ ID NO: 1656; WAN024D8U; Start 540; Stop 564
tattctccctctttaccgcctcaat

SEQ ID NO: 301023 - DNA, 25 bp, Artificial
  probe
  misc_feature (1)..(25): SEQ ID NO: 1656; WAN024D8U; Start 498; Stop 522
tatcacaggtttctttaccaagttt

SEQ ID NO: 301024 - DNA, 25 bp, Artificial
  probe
  misc_feature (1)..(25): SEQ ID NO: 1656; WAN024D8U; Start 539; Stop 563
atattctccctctttaccgcctcaa

SEQ ID NO: 301025 - DNA, 25 bp, Artificial
  probe
  misc_feature (1)..(25): SEQ ID NO: 1656; WAN024D8U; Start 317; Stop 341
gcttggttgtgaatatcaaggaatc

SEQ ID NO: 301026 - DNA, 25 bp, Artificial
  probe
  misc_feature (1)..(25): SEQ ID NO: 1656; WAN024D8U; Start 66; Stop 90
aatccgtcgttctattgatttctta

SEQ ID NO: 301027 - DNA, 25 bp, Artificial
  probe
  misc_feature (1)..(25): SEQ ID NO: 1656; WAN024D8U; Start 318; Stop 342
cttggttgtgaatatcaaggaatca

SEQ ID NO: 301028 - DNA, 25 bp, Artificial
  probe
  misc_feature (1)..(25): SEQ ID NO: 1656; WAN024D8U; Start 497; Stop 521
atatcacaggtttctttaccaagtt

SEQ ID NO: 301029 - DNA, 25 bp, Artificial
  probe
  misc_feature (1)..(25): SEQ ID NO: 1656; WAN024D8U; Start 496; Stop 520
aatatcacaggtttctttaccaagt

SEQ ID NO: 301030 - DNA, 25 bp, Artificial
  probe
  misc_feature (1)..(25): SEQ ID NO: 1656; WAN024D8U; Start 123; Stop 147
aacctttgtactagggatttctggg

SEQ ID NO: 301031 - DNA, 25 bp, Artificial
  probe
  misc_feature (1)..(25): SEQ ID NO: 1656; WAN024D8U; Start 542; Stop 566
ttctccctctttaccgcctcaataa

SEQ ID NO: 301032 - DNA, 25 bp, Artificial
  probe
  misc_feature (1)..(25): SEQ ID NO: 1656; WAN024D8U; Start 61; Stop 85
gaagaaatccgtcgttctattgatt

SEQ ID NO: 301033 - DNA, 25 bp, Artificial
  probe
  misc_feature (1)..(25): SEQ ID NO: 1656; WAN024D8U; Start 44; Stop 68
cagtgattgatgcccaggaagaaat

SEQ ID NO: 301034 - DNA, 25 bp, Artificial
  probe
  misc_feature (1)..(25): SEQ ID NO: 1656; WAN024D8U; Start 60; Stop 84
ggaagaaatccgtcgttctattgat

SEQ ID NO: 301035 - DNA, 25 bp, Artificial
  probe
  misc_feature (1)..(25): SEQ ID NO: 1656; WAN024D8U; Start 544; Stop 568
ctccctctttaccgcctcaataaac

SEQ ID NO: 301036 - DNA, 25 bp, Artificial
  probe
  misc_feature (1)..(25): SEQ ID NO: 1656; WAN024D8U; Start 538; Stop 562
gatattctccctctttaccgcctca

SEQ ID NO: 301037 - DNA, 25 bp, Artificial
  probe
  misc_feature (1)..(25): SEQ ID NO: 1656; WAN024D8U; Start 386; Stop 410
tttcagacttcaacaaggggaatat

SEQ ID NO: 301038 - DNA, 25 bp, Artificial
  probe
  misc_feature (1)..(25): SEQ ID NO: 1656; WAN024D8U; Start 543; Stop 567
tctccctctttaccgcctcaataaa

SEQ ID NO: 301039 - DNA, 25 bp, Artificial
  probe
  misc_feature (1)..(25): SEQ ID NO: 1656; WAN024D8U; Start 500; Stop 524
tcacaggtttctttaccaagtttgg

SEQ ID NO: 301040 - DNA, 25 bp, Artificial
  probe
  misc_feature (1)..(25): SEQ ID NO: 1656; WAN024D8U; Start 316; Stop 340
agcttggttgtgaatatcaaggaat

SEQ ID NO: 301041 - DNA, 25 bp, Artificial
  probe
  misc_feature (1)..(25): SEQ ID NO: 1656; WAN024D8U; Start 390; Stop 414
agacttcaacaaggggaatatcaag

SEQ ID NO: 301042 - DNA, 25 bp, Artificial
  probe
  misc_feature (1)..(25): SEQ ID NO: 1657; WAN024CTX; Start 110; Stop 134
ttcttctcagtattggcttggatag

SEQ ID NO: 301043 - DNA, 25 bp, Artificial
  probe
  misc_feature (1)..(25): SEQ ID NO: 1657; WAN024CTX; Start 109; Stop 133
cttcttctcagtattggcttggata

SEQ ID NO: 301044 - DNA, 25 bp, Artificial
  probe
  misc_feature (1)..(25): SEQ ID NO: 1657; WAN024CTX; Start 106; Stop 130
aatcttcttctcagtattggcttgg

SEQ ID NO: 301045 - DNA, 25 bp, Artificial
  probe
  misc_feature (1)..(25): SEQ ID NO: 1657; WAN024CTX; Start 112; Stop 136
cttctcagtattggcttggatagtg

SEQ ID NO: 301046 - DNA, 25 bp, Artificial
  probe
  misc_feature (1)..(25): SEQ ID NO: 1657; WAN024CTX; Start 111; Stop 135
tcttctcagtattggcttggatagt

SEQ ID NO: 301047 - DNA, 25 bp, Artificial
  probe
  misc_feature (1)..(25): SEQ ID NO: 1657; WAN024CTX; Start 117; Stop 141
cagtattggcttggatagtgagttc

SEQ ID NO: 301048 - DNA, 25 bp, Artificial
  probe
  misc_feature (1)..(25): SEQ ID NO: 1657; WAN024CTX; Start 108; Stop 132
tcttcttctcagtattggcttggat

SEQ ID NO: 301049 - DNA, 25 bp, Artificial
  probe
  misc_feature (1)..(25): SEQ ID NO: 1657; WAN024CTX; Start 107; Stop 131
atcttcttctcagtattggcttgga

SEQ ID NO: 301050 - DNA, 25 bp, Artificial
  probe
  misc_feature (1)..(25): SEQ ID NO: 1657; WAN024CTX; Start 118; Stop 142
agtattggcttggatagtgagttca

SEQ ID NO: 301051 - DNA, 25 bp, Artificial
  probe
  misc_feature (1)..(25): SEQ ID NO: 1657; WAN024CTX; Start 120; Stop 144
tattggcttggatagtgagttcaac

SEQ ID NO: 301052 - DNA, 25 bp, Artificial
  probe
  misc_feature (1)..(25): SEQ ID NO: 1657; WAN024CTX; Start 119; Stop 143
gtattggcttggatagtgagttcaa

SEQ ID NO: 301053 - DNA, 25 bp, Artificial
  probe
  misc_feature (1)..(25): SEQ ID NO: 1657; WAN024CTX; Start 113; Stop 137
ttctcagtattggcttggatagtga

SEQ ID NO: 301054 - DNA, 25 bp, Artificial
  probe
  misc_feature (1)..(25): SEQ ID NO: 1657; WAN024CTX; Start 116; Stop 140
tcagtattggcttggatagtgagtt

SEQ ID NO: 301055 - DNA, 25 bp, Artificial
  probe
  misc_feature (1)..(25): SEQ ID NO: 1657; WAN024CTX; Start 31; Stop 55
aactgttactgttgctggaagactt

SEQ ID NO: 301056 - DNA, 25 bp, Artificial
  probe
  misc_feature (1)..(25): SEQ ID NO: 1657; WAN024CTX; Start 236; Stop 260
tcaccacttgtagagaaggttactt

SEQ ID NO: 301057 - DNA, 25 bp, Artificial
  probe
  misc_feature (1)..(25): SEQ ID NO: 1657; WAN024CTX; Start 235; Stop 259
ttcaccacttgtagagaaggttact

SEQ ID NO: 301058 - DNA, 25 bp, Artificial
  probe
  misc_feature (1)..(25): SEQ ID NO: 1657; WAN024CTX; Start 160; Stop 184
ctcatattcagcgttcagagtgact

SEQ ID NO: 301059 - DNA, 25 bp, Artificial
  probe
  misc_feature (1)..(25): SEQ ID NO: 1657; WAN024CTX; Start 121; Stop 145
attggcttggatagtgagttcaact

SEQ ID NO: 301060 - DNA, 25 bp, Artificial
  probe
  misc_feature (1)..(25): SEQ ID NO: 1657; WAN024CTX; Start 105; Stop 129
caatcttcttctcagtattggcttg

SEQ ID NO: 301061 - DNA, 25 bp, Artificial
  probe
  misc_feature (1)..(25): SEQ ID NO: 1657; WAN024CTX; Start 122; Stop 146
ttggcttggatagtgagttcaactt

SEQ ID NO: 301062 - DNA, 25 bp, Artificial
  probe
  misc_feature (1)..(25): SEQ ID NO: 1657; WAN024CTX; Start 16; Stop 40
acctttgtcatactcaactgttact

SEQ ID NO: 301063 - DNA, 25 bp, Artificial
  probe
  misc_feature (1)..(25): SEQ ID NO: 1657; WAN024CTX; Start 13; Stop 37
gaaacctttgtcatactcaactgtt

SEQ ID NO: 301064 - DNA, 25 bp, Artificial
  probe
  misc_feature (1)..(25): SEQ ID NO: 1657; WAN024CTX; Start 17; Stop 41
cctttgtcatactcaactgttactg

SEQ ID NO: 301065 - DNA, 25 bp, Artificial
  probe
  misc_feature (1)..(25): SEQ ID NO: 1657; WAN024CTX; Start 32; Stop 56
actgttactgttgctggaagacttg

SEQ ID NO: 301066 - DNA, 25 bp, Artificial
  probe
  misc_feature (1)..(25): SEQ ID NO: 1657; WAN024CTX; Start 15; Stop 39
aacctttgtcatactcaactgttac

SEQ ID NO: 301067 - DNA, 25 bp, Artificial
  probe
  misc_feature (1)..(25): SEQ ID NO: 1657; WAN024CTX; Start 36; Stop 60
ttactgttgctggaagacttggttc

SEQ ID NO: 301068 - DNA, 25 bp, Artificial
  probe
  misc_feature (1)..(25): SEQ ID NO: 1657; WAN024CTX; Start 18; Stop 42
ctttgtcatactcaactgttactgt

SEQ ID NO: 301069 - DNA, 25 bp, Artificial
  probe
  misc_feature (1)..(25): SEQ ID NO: 1657; WAN024CTX; Start 104; Stop 128
gcaatcttcttctcagtattggctt

SEQ ID NO: 301070 - DNA, 25 bp, Artificial
  probe
  misc_feature (1)..(25): SEQ ID NO: 1657; WAN024CTX; Start 161; Stop 185
tcatattcagcgttcagagtgactg

SEQ ID NO: 301071 - DNA, 25 bp, Artificial
  probe
  misc_feature (1)..(25): SEQ ID NO: 1657; WAN024CTX; Start 12; Stop 36
ggaaacctttgtcatactcaactgt

SEQ ID NO: 301072 - DNA, 25 bp, Artificial
  probe
  misc_feature (1)..(25): SEQ ID NO: 1657; WAN024CTX; Start 35; Stop 59
gttactgttgctggaagacttggtt

SEQ ID NO: 301073 - DNA, 25 bp, Artificial
  probe
  misc_feature (1)..(25): SEQ ID NO: 1657; WAN024CTX; Start 19; Stop 43
tttgtcatactcaactgttactgtt

SEQ ID NO: 301074 - DNA, 25 bp, Artificial
  probe
  misc_feature (1)..(25): SEQ ID NO: 1657; WAN024CTX; Start 14; Stop 38
aaacctttgtcatactcaactgtta

SEQ ID NO: 301075 - DNA, 25 bp, Artificial
  probe
  misc_feature (1)..(25): SEQ ID NO: 1658; WAN024C7R; Start 2136; Stop 2160
caatgctgctaacaaggaagataag

SEQ ID NO: 301076 - DNA, 25 bp, Artificial
  probe
  misc_feature (1)..(25): SEQ ID NO: 1658; WAN024C7R; Start 799; Stop 823
ttagtagacgctatcacaagttcag

SEQ ID NO: 301077 - DNA, 25 bp, Artificial
  probe
  misc_feature (1)..(25): SEQ ID NO: 1658; WAN024C7R; Start 798; Stop 822
attagtagacgctatcacaagttca

SEQ ID NO: 301078 - DNA, 25 bp, Artificial
  probe
  misc_feature (1)..(25): SEQ ID NO: 1658; WAN024C7R; Start 264; Stop 288
atacgctatggatactggtaatgac

SEQ ID NO: 301079 - DNA, 25 bp, Artificial
  probe
  misc_feature (1)..(25): SEQ ID NO: 1658; WAN024C7R; Start 2135; Stop 2159
tcaatgctgctaacaaggaagataa

SEQ ID NO: 301080 - DNA, 25 bp, Artificial
  probe
  misc_feature (1)..(25): SEQ ID NO: 1658; WAN024C7R; Start 261; Stop 285
gcaatacgctatggatactggtaat

SEQ ID NO: 301081 - DNA, 25 bp, Artificial
  probe
  misc_feature (1)..(25): SEQ ID NO: 1658; WAN024C7R; Start 800; Stop 824
tagtagacgctatcacaagttcaga

SEQ ID NO: 301082 - DNA, 25 bp, Artificial
  probe
  misc_feature (1)..(25): SEQ ID NO: 1658; WAN024C7R; Start 263; Stop 287
aatacgctatggatactggtaatga

SEQ ID NO: 301083 - DNA, 25 bp, Artificial
  probe
  misc_feature (1)..(25): SEQ ID NO: 1658; WAN024C7R; Start 262; Stop 286
caatacgctatggatactggtaatg

SEQ ID NO: 301084 - DNA, 25 bp, Artificial
  probe
  misc_feature (1)..(25): SEQ ID NO: 1658; WAN024C7R; Start 2134; Stop 2158
gtcaatgctgctaacaaggaagata

SEQ ID NO: 301085 - DNA, 25 bp, Artificial
  probe
  misc_feature (1)..(25): SEQ ID NO: 1658; WAN024C7R; Start 797; Stop 821
aattagtagacgctatcacaagttc

SEQ ID NO: 301086 - DNA, 25 bp, Artificial
  probe
  misc_feature (1)..(25): SEQ ID NO: 1658; WAN024C7R; Start 796; Stop 820
gaattagtagacgctatcacaagtt

SEQ ID NO: 301087 - DNA, 25 bp, Artificial
  probe
  misc_feature (1)..(25): SEQ ID NO: 1658; WAN024C7R; Start 393; Stop 417
ctactacaagtggactcaatggatt

SEQ ID NO: 301088 - DNA, 25 bp, Artificial
  probe
  misc_feature (1)..(25): SEQ ID NO: 1658; WAN024C7R; Start 795; Stop 819
tgaattagtagacgctatcacaagt

SEQ ID NO: 301089 - DNA, 25 bp, Artificial
  probe
  misc_feature (1)..(25): SEQ ID NO: 1658; WAN024C7R; Start 392; Stop 416
actactacaagtggactcaatggat

SEQ ID NO: 301090 - DNA, 25 bp, Artificial
  probe
  misc_feature (1)..(25): SEQ ID NO: 1658; WAN024C7R; Start 2252; Stop 2276
caggtgagtcaatctcttatgtagc

SEQ ID NO: 301091 - DNA, 25 bp, Artificial
  probe
  misc_feature (1)..(25): SEQ ID NO: 1658; WAN024C7R; Start 787; Stop 811
cctgaacatgaattagtagacgcta

SEQ ID NO: 301092 - DNA, 25 bp, Artificial
  probe
  misc_feature (1)..(25): SEQ ID NO: 1658; WAN024C7R; Start 391; Stop 415
aactactacaagtggactcaatgga

SEQ ID NO: 301093 - DNA, 25 bp, Artificial
  probe
  misc_feature (1)..(25): SEQ ID NO: 1658; WAN024C7R; Start 2251; Stop 2275
acaggtgagtcaatctcttatgtag

SEQ ID NO: 301094 - DNA, 25 bp, Artificial
  probe
  misc_feature (1)..(25): SEQ ID NO: 1658; WAN024C7R; Start 801; Stop 825
agtagacgctatcacaagttcagag

SEQ ID NO: 301095 - DNA, 25 bp, Artificial
  probe
  misc_feature (1)..(25): SEQ ID NO: 1658; WAN024C7R; Start 781; Stop 805
ttggctcctgaacatgaattagtag

SEQ ID NO: 301096 - DNA, 25 bp, Artificial
  probe
  misc_feature (1)..(25): SEQ ID NO: 1658; WAN024C7R; Start 780; Stop 804
cttggctcctgaacatgaattagta

SEQ ID NO: 301097 - DNA, 25 bp, Artificial
  probe
  misc_feature (1)..(25): SEQ ID NO: 1658; WAN024C7R; Start 2250; Stop 2274
aacaggtgagtcaatctcttatgta

SEQ ID NO: 301098 - DNA, 25 bp, Artificial
  probe
  misc_feature (1)..(25): SEQ ID NO: 1658; WAN024C7R; Start 783; Stop 807
ggctcctgaacatgaattagtagac

SEQ ID NO: 301099 - DNA, 25 bp, Artificial
  probe
  misc_feature (1)..(25): SEQ ID NO: 1658; WAN024C7R; Start 794; Stop 818
atgaattagtagacgctatcacaag

SEQ ID NO: 301100 - DNA, 25 bp, Artificial
  probe
  misc_feature (1)..(25): SEQ ID NO: 1658; WAN024C7R; Start 782; Stop 806
tggctcctgaacatgaattagtaga

SEQ ID NO: 301101 - DNA, 25 bp, Artificial
  probe
  misc_feature (1)..(25): SEQ ID NO: 1658; WAN024C7R; Start 1133; Stop 1157
atgtcaattcagacttcctagatgg

SEQ ID NO: 301102 - DNA, 25 bp, Artificial
  probe
  misc_feature (1)..(25): SEQ ID NO: 1658; WAN024C7R; Start 785; Stop 809
ctcctgaacatgaattagtagacgc

SEQ ID NO: 301103 - DNA, 25 bp, Artificial
  probe
  misc_feature (1)..(25): SEQ ID NO: 1658; WAN024C7R; Start 784; Stop 808
gctcctgaacatgaattagtagacg

SEQ ID NO: 301104 - DNA, 25 bp, Artificial
  probe
  misc_feature (1)..(25): SEQ ID NO: 1658; WAN024C7R; Start 792; Stop 816
acatgaattagtagacgctatcaca

SEQ ID NO: 301105 - DNA, 25 bp, Artificial
  probe
  misc_feature (1)..(25): SEQ ID NO: 1658; WAN024C7R; Start 789; Stop 813
tgaacatgaattagtagacgctatc

SEQ ID NO: 301106 - DNA, 25 bp, Artificial
  probe
  misc_feature (1)..(25): SEQ ID NO: 1658; WAN024C7R; Start 788; Stop 812
ctgaacatgaattagtagacgctat

SEQ ID NO: 301107 - DNA, 25 bp, Artificial
  probe
  misc_feature (1)..(25): SEQ ID NO: 1658; WAN024C7R; Start 786; Stop 810
tcctgaacatgaattagtagacgct

SEQ ID NO: 301108 - DNA, 25 bp, Artificial
  probe
  misc_feature (1)..(25): SEQ ID NO: 1659; WAN024DCO; Start 97; Stop 121
tatcatacaggaaccattgcttctc

SEQ ID NO: 301109 - DNA, 25 bp, Artificial
  probe
  misc_feature (1)..(25): SEQ ID NO: 1659; WAN024DCO; Start 96; Stop 120
ctatcatacaggaaccattgcttct

SEQ ID NO: 301110 - DNA, 25 bp, Artificial
  probe
  misc_feature (1)..(25): SEQ ID NO: 1659; WAN024DCO; Start 463; Stop 487
aatgacaagatagaagcgattaagt

SEQ ID NO: 301111 - DNA, 25 bp, Artificial
  probe
  misc_feature (1)..(25): SEQ ID NO: 1659; WAN024DCO; Start 146; Stop 170
gaattggtaaggtcatgtctgctat

SEQ ID NO: 301112 - DNA, 25 bp, Artificial
  probe
  misc_feature (1)..(25): SEQ ID NO: 1659; WAN024DCO; Start 6; Stop 30
aataggaattattgctgctatgcca

SEQ ID NO: 301113 - DNA, 25 bp, Artificial
  probe
  misc_feature (1)..(25): SEQ ID NO: 1659; WAN024DCO; Start 465; Stop 489
tgacaagatagaagcgattaagtcc

SEQ ID NO: 301114 - DNA, 25 bp, Artificial
  probe
  misc_feature (1)..(25): SEQ ID NO: 1659; WAN024DCO; Start 147; Stop 171
aattggtaaggtcatgtctgctatg

SEQ ID NO: 301115 - DNA, 25 bp, Artificial
  probe
  misc_feature (1)..(25): SEQ ID NO: 1659; WAN024DCO; Start 99; Stop 123
tcatacaggaaccattgcttctcat

SEQ ID NO: 301116 - DNA, 25 bp, Artificial
  probe
  misc_feature (1)..(25): SEQ ID NO: 1659; WAN024DCO; Start 98; Stop 122
atcatacaggaaccattgcttctca

SEQ ID NO: 301117 - DNA, 25 bp, Artificial
  probe
  misc_feature (1)..(25): SEQ ID NO: 1659; WAN024DCO; Start 92; Stop 116
atacctatcatacaggaaccattgc

SEQ ID NO: 301118 - DNA, 25 bp, Artificial
  probe
  misc_feature (1)..(25): SEQ ID NO: 1659; WAN024DCO; Start 7; Stop 31
ataggaattattgctgctatgccag

SEQ ID NO: 301119 - DNA, 25 bp, Artificial
  probe
  misc_feature (1)..(25): SEQ ID NO: 1659; WAN024DCO; Start 89; Stop 113
ggaatacctatcatacaggaaccat

SEQ ID NO: 301120 - DNA, 25 bp, Artificial
  probe
  misc_feature (1)..(25): SEQ ID NO: 1659; WAN024DCO; Start 12; Stop 36
aattattgctgctatgccagaagaa

SEQ ID NO: 301121 - DNA, 25 bp, Artificial
  probe
  misc_feature (1)..(25): SEQ ID NO: 1659; WAN024DCO; Start 464; Stop 488
atgacaagatagaagcgattaagtc

SEQ ID NO: 301122 - DNA, 25 bp, Artificial
  probe
  misc_feature (1)..(25): SEQ ID NO: 1659; WAN024DCO; Start 93; Stop 117
tacctatcatacaggaaccattgct

SEQ ID NO: 301123 - DNA, 25 bp, Artificial
  probe
  misc_feature (1)..(25): SEQ ID NO: 1659; WAN024DCO; Start 95; Stop 119
cctatcatacaggaaccattgcttc

SEQ ID NO: 301124 - DNA, 25 bp, Artificial
  probe
  misc_feature (1)..(25): SEQ ID NO: 1659; WAN024DCO; Start 11; Stop 35
gaattattgctgctatgccagaaga

SEQ ID NO: 301125 - DNA, 25 bp, Artificial
  probe
  misc_feature (1)..(25): SEQ ID NO: 1659; WAN024DCO; Start 141; Stop 165
aagtggaattggtaaggtcatgtct

SEQ ID NO: 301126 - DNA, 25 bp, Artificial
  probe
  misc_feature (1)..(25): SEQ ID NO: 1659; WAN024DCO; Start 13; Stop 37
attattgctgctatgccagaagaac

SEQ ID NO: 301127 - DNA, 25 bp, Artificial
  probe
  misc_feature (1)..(25): SEQ ID NO: 1659; WAN024DCO; Start 100; Stop 124
catacaggaaccattgcttctcatg

SEQ ID NO: 301128 - DNA, 25 bp, Artificial
  probe
  misc_feature (1)..(25): SEQ ID NO: 1659; WAN024DCO; Start 8; Stop 32
taggaattattgctgctatgccaga

SEQ ID NO: 301129 - DNA, 25 bp, Artificial
  probe
  misc_feature (1)..(25): SEQ ID NO: 1659; WAN024DCO; Start 459; Stop 483
aggaaatgacaagatagaagcgatt

SEQ ID NO: 301130 - DNA, 25 bp, Artificial
  probe
  misc_feature (1)..(25): SEQ ID NO: 1659; WAN024DCO; Start 94; Stop 118
acctatcatacaggaaccattgctt

SEQ ID NO: 301131 - DNA, 25 bp, Artificial
  probe
  misc_feature (1)..(25): SEQ ID NO: 1659; WAN024DCO; Start 427; Stop 451
ggtttgattgctacaggagatagtt

SEQ ID NO: 301132 - DNA, 25 bp, Artificial
  probe
  misc_feature (1)..(25): SEQ ID NO: 1659; WAN024DCO; Start 425; Stop 449
ttggtttgattgctacaggagatag

SEQ ID NO: 301133 - DNA, 25 bp, Artificial
  probe
  misc_feature (1)..(25): SEQ ID NO: 1659; WAN024DCO; Start 470; Stop 494
agatagaagcgattaagtcccattt

SEQ ID NO: 301134 - DNA, 25 bp, Artificial
  probe
  misc_feature (1)..(25): SEQ ID NO: 1659; WAN024DCO; Start 469; Stop 493
aagatagaagcgattaagtcccatt

SEQ ID NO: 301135 - DNA, 25 bp, Artificial
  probe
  misc_feature (1)..(25): SEQ ID NO: 1659; WAN024DCO; Start 468; Stop 492
caagatagaagcgattaagtcccat

SEQ ID NO: 301136 - DNA, 25 bp, Artificial
  probe
  misc_feature (1)..(25): SEQ ID NO: 1659; WAN024DCO; Start 134; Stop 158
ttgtagaaagtggaattggtaaggt

SEQ ID NO: 301137 - DNA, 25 bp, Artificial
  probe
  misc_feature (1)..(25): SEQ ID NO: 1659; WAN024DCO; Start 458; Stop 482
caggaaatgacaagatagaagcgat

SEQ ID NO: 301138 - DNA, 25 bp, Artificial
  probe
  misc_feature (1)..(25): SEQ ID NO: 1659; WAN024DCO; Start 428; Stop 452
gtttgattgctacaggagatagttt

SEQ ID NO: 301139 - DNA, 25 bp, Artificial
  probe
  misc_feature (1)..(25): SEQ ID NO: 1659; WAN024DCO; Start 91; Stop 115
aatacctatcatacaggaaccattg

SEQ ID NO: 301140 - DNA, 25 bp, Artificial
  probe
  misc_feature (1)..(25): SEQ ID NO: 1659; WAN024DCO; Start 145; Stop 169
ggaattggtaaggtcatgtctgcta

SEQ ID NO: 301141 - DNA, 25 bp, Artificial
  probe
  misc_feature (1)..(25): SEQ ID NO: 1660; WAN024CQE; Start 27; Stop 51
tattgtgaccattatccaagagcga

SEQ ID NO: 301142 - DNA, 25 bp, Artificial
  probe
  misc_feature (1)..(25): SEQ ID NO: 1660; WAN024CQE; Start 26; Stop 50
gtattgtgaccattatccaagagcg

SEQ ID NO: 301143 - DNA, 25 bp, Artificial
  probe
  misc_feature (1)..(25): SEQ ID NO: 1660; WAN024CQE; Start 28; Stop 52
attgtgaccattatccaagagcgac

SEQ ID NO: 301144 - DNA, 25 bp, Artificial
  probe
  misc_feature (1)..(25): SEQ ID NO: 1660; WAN024CQE; Start 148; Stop 172
gatgaatttagtatcgaaatcagcg

SEQ ID NO: 301145 - DNA, 25 bp, Artificial
  probe
  misc_feature (1)..(25): SEQ ID NO: 1660; WAN024CQE; Start 65; Stop 89
ttgtcgtgacagaatccttgagtct

SEQ ID NO: 301146 - DNA, 25 bp, Artificial
  probe
  misc_feature (1)..(25): SEQ ID NO: 1660; WAN024CQE; Start 29; Stop 53
ttgtgaccattatccaagagcgaca

SEQ ID NO: 301147 - DNA, 25 bp, Artificial
  probe
  misc_feature (1)..(25): SEQ ID NO: 1660; WAN024CQE; Start 204; Stop 228
agatgtggttaaaatcattcaagga

SEQ ID NO: 301148 - DNA, 25 bp, Artificial
  probe
  misc_feature (1)..(25): SEQ ID NO: 1660; WAN024CQE; Start 201; Stop 225
aggagatgtggttaaaatcattcaa

SEQ ID NO: 301149 - DNA, 25 bp, Artificial
  probe
  misc_feature (1)..(25): SEQ ID NO: 1660; WAN024CQE; Start 203; Stop 227
gagatgtggttaaaatcattcaagg

SEQ ID NO: 301150 - DNA, 25 bp, Artificial
  probe
  misc_feature (1)..(25): SEQ ID NO: 1660; WAN024CQE; Start 202; Stop 226
ggagatgtggttaaaatcattcaag

SEQ ID NO: 301151 - DNA, 25 bp, Artificial
  probe
  misc_feature (1)..(25): SEQ ID NO: 1660; WAN024CQE; Start 149; Stop 173
atgaatttagtatcgaaatcagcga

SEQ ID NO: 301152 - DNA, 25 bp, Artificial
  probe
  misc_feature (1)..(25): SEQ ID NO: 1660; WAN024CQE; Start 205; Stop 229
gatgtggttaaaatcattcaaggaa

SEQ ID NO: 301153 - DNA, 25 bp, Artificial
  probe
  misc_feature (1)..(25): SEQ ID NO: 1660; WAN024CQE; Start 30; Stop 54
tgtgaccattatccaagagcgacag

SEQ ID NO: 301154 - DNA, 25 bp, Artificial
  probe
  misc_feature (1)..(25): SEQ ID NO: 1660; WAN024CQE; Start 63; Stop 87
ctttgtcgtgacagaatccttgagt

SEQ ID NO: 301155 - DNA, 25 bp, Artificial
  probe
  misc_feature (1)..(25): SEQ ID NO: 1660; WAN024CQE; Start 62; Stop 86
actttgtcgtgacagaatccttgag

SEQ ID NO: 301156 - DNA, 25 bp, Artificial
  probe
  misc_feature (1)..(25): SEQ ID NO: 1660; WAN024CQE; Start 200; Stop 224
taggagatgtggttaaaatcattca

SEQ ID NO: 301157 - DNA, 25 bp, Artificial
  probe
  misc_feature (1)..(25): SEQ ID NO: 1660; WAN024CQE; Start 64; Stop 88
tttgtcgtgacagaatccttgagtc

SEQ ID NO: 301158 - DNA, 25 bp, Artificial
  probe
  misc_feature (1)..(25): SEQ ID NO: 1660; WAN024CQE; Start 61; Stop 85
gactttgtcgtgacagaatccttga

SEQ ID NO: 301159 - DNA, 25 bp, Artificial
  probe
  misc_feature (1)..(25): SEQ ID NO: 1660; WAN024CQE; Start 207; Stop 231
tgtggttaaaatcattcaaggaaaa

SEQ ID NO: 301160 - DNA, 25 bp, Artificial
  probe
  misc_feature (1)..(25): SEQ ID NO: 1660; WAN024CQE; Start 199; Stop 223
gtaggagatgtggttaaaatcattc

SEQ ID NO: 301161 - DNA, 25 bp, Artificial
  probe
  misc_feature (1)..(25): SEQ ID NO: 1660; WAN024CQE; Start 56; Stop 80
gagaggactttgtcgtgacagaatc

SEQ ID NO: 301162 - DNA, 25 bp, Artificial
  probe
  misc_feature (1)..(25): SEQ ID NO: 1660; WAN024CQE; Start 206; Stop 230
atgtggttaaaatcattcaaggaaa

SEQ ID NO: 301163 - DNA, 25 bp, Artificial
  probe
  misc_feature (1)..(25): SEQ ID NO: 1660; WAN024CQE; Start 72; Stop 96
gacagaatccttgagtctgaaagac

SEQ ID NO: 301164 - DNA, 25 bp, Artificial
  probe
  misc_feature (1)..(25): SEQ ID NO: 1660; WAN024CQE; Start 71; Stop 95
tgacagaatccttgagtctgaaaga

SEQ ID NO: 301165 - DNA, 25 bp, Artificial
  probe
  misc_feature (1)..(25): SEQ ID NO: 1660; WAN024CQE; Start 70; Stop 94
gtgacagaatccttgagtctgaaag

SEQ ID NO: 301166 - DNA, 25 bp, Artificial
  probe
  misc_feature (1)..(25): SEQ ID NO: 1660; WAN024CQE; Start 68; Stop 92
tcgtgacagaatccttgagtctgaa

SEQ ID NO: 301167 - DNA, 25 bp, Artificial
  probe
  misc_feature (1)..(25): SEQ ID NO: 1660; WAN024CQE; Start 208; Stop 232
gtggttaaaatcattcaaggaaaat

SEQ ID NO: 301168 - DNA, 25 bp, Artificial
  probe
  misc_feature (1)..(25): SEQ ID NO: 1660; WAN024CQE; Start 60; Stop 84
ggactttgtcgtgacagaatccttg

SEQ ID NO: 301169 - DNA, 25 bp, Artificial
  probe
  misc_feature (1)..(25): SEQ ID NO: 1660; WAN024CQE; Start 74; Stop 98
cagaatccttgagtctgaaagacga

SEQ ID NO: 301170 - DNA, 25 bp, Artificial
  probe
  misc_feature (1)..(25): SEQ ID NO: 1660; WAN024CQE; Start 73; Stop 97
acagaatccttgagtctgaaagacg

SEQ ID NO: 301171 - DNA, 25 bp, Artificial
  probe
  misc_feature (1)..(25): SEQ ID NO: 1660; WAN024CQE; Start 36; Stop 60
cattatccaagagcgacagggagag

SEQ ID NO: 301172 - DNA, 25 bp, Artificial
  probe
  misc_feature (1)..(25): SEQ ID NO: 1660; WAN024CQE; Start 55; Stop 79
ggagaggactttgtcgtgacagaat

SEQ ID NO: 301173 - DNA, 25 bp, Artificial
  probe
  misc_feature (1)..(25): SEQ ID NO: 1660; WAN024CQE; Start 69; Stop 93
cgtgacagaatccttgagtctgaaa

SEQ ID NO: 301174 - DNA, 25 bp, Artificial
  probe
  misc_feature (1)..(25): SEQ ID NO: 1661; WAN024DY7; Start 1141; Stop 1165
ttgtggcagattatgaaggagtatt

SEQ ID NO: 301175 - DNA, 25 bp, Artificial
  probe
  misc_feature (1)..(25): SEQ ID NO: 1661; WAN024DY7; Start 1140; Stop 1164
attgtggcagattatgaaggagtat

SEQ ID NO: 301176 - DNA, 25 bp, Artificial
  probe
  misc_feature (1)..(25): SEQ ID NO: 1661; WAN024DY7; Start 1139; Stop 1163
aattgtggcagattatgaaggagta

SEQ ID NO: 301177 - DNA, 25 bp, Artificial
  probe
  misc_feature (1)..(25): SEQ ID NO: 1661; WAN024DY7; Start 1142; Stop 1166
tgtggcagattatgaaggagtattt

SEQ ID NO: 301178 - DNA, 25 bp, Artificial
  probe
  misc_feature (1)..(25): SEQ ID NO: 1661; WAN024DY7; Start 1056; Stop 1080
gtggaaacgataaatcaagcaacta

SEQ ID NO: 301179 - DNA, 25 bp, Artificial
  probe
  misc_feature (1)..(25): SEQ ID NO: 1661; WAN024DY7; Start 682; Stop 706
ttgtccctgagaataactatgaagc

SEQ ID NO: 301180 - DNA, 25 bp, Artificial
  probe
  misc_feature (1)..(25): SEQ ID NO: 1661; WAN024DY7; Start 1065; Stop 1089
ataaatcaagcaactatcgcaaact

SEQ ID NO: 301181 - DNA, 25 bp, Artificial
  probe
  misc_feature (1)..(25): SEQ ID NO: 1661; WAN024DY7; Start 677; Stop 701
acgatttgtccctgagaataactat

SEQ ID NO: 301182 - DNA, 25 bp, Artificial
  probe
  misc_feature (1)..(25): SEQ ID NO: 1661; WAN024DY7; Start 1054; Stop 1078
atgtggaaacgataaatcaagcaac

SEQ ID NO: 301183 - DNA, 25 bp, Artificial
  probe
  misc_feature (1)..(25): SEQ ID NO: 1661; WAN024DY7; Start 678; Stop 702
cgatttgtccctgagaataactatg

SEQ ID NO: 301184 - DNA, 25 bp, Artificial
  probe
  misc_feature (1)..(25): SEQ ID NO: 1661; WAN024DY7; Start 1053; Stop 1077
tatgtggaaacgataaatcaagcaa

SEQ ID NO: 301185 - DNA, 25 bp, Artificial
  probe
  misc_feature (1)..(25): SEQ ID NO: 1661; WAN024DY7; Start 1057; Stop 1081
tggaaacgataaatcaagcaactat

SEQ ID NO: 301186 - DNA, 25 bp, Artificial
  probe
  misc_feature (1)..(25): SEQ ID NO: 1661; WAN024DY7; Start 1067; Stop 1091
aaatcaagcaactatcgcaaactta

SEQ ID NO: 301187 - DNA, 25 bp, Artificial
  probe
  misc_feature (1)..(25): SEQ ID NO: 1661; WAN024DY7; Start 1066; Stop 1090
taaatcaagcaactatcgcaaactt

SEQ ID NO: 301188 - DNA, 25 bp, Artificial
  probe
  misc_feature (1)..(25): SEQ ID NO: 1661; WAN024DY7; Start 1052; Stop 1076
atatgtggaaacgataaatcaagca

SEQ ID NO: 301189 - DNA, 25 bp, Artificial
  probe
  misc_feature (1)..(25): SEQ ID NO: 1661; WAN024DY7; Start 1070; Stop 1094
tcaagcaactatcgcaaacttaaat

SEQ ID NO: 301190 - DNA, 25 bp, Artificial
  probe
  misc_feature (1)..(25): SEQ ID NO: 1661; WAN024DY7; Start 1069; Stop 1093
atcaagcaactatcgcaaacttaaa

SEQ ID NO: 301191 - DNA, 25 bp, Artificial
  probe
  misc_feature (1)..(25): SEQ ID NO: 1661; WAN024DY7; Start 1068; Stop 1092
aatcaagcaactatcgcaaacttaa

SEQ ID NO: 301192 - DNA, 25 bp, Artificial
  probe
  misc_feature (1)..(25): SEQ ID NO: 1661; WAN024DY7; Start 1138; Stop 1162
aaattgtggcagattatgaaggagt

SEQ ID NO: 301193 - DNA, 25 bp, Artificial
  probe
  misc_feature (1)..(25): SEQ ID NO: 1661; WAN024DY7; Start 1097; Stop 1121
taaatcaacccaaagaatcctctca

SEQ ID NO: 301194 - DNA, 25 bp, Artificial
  probe
  misc_feature (1)..(25): SEQ ID NO: 1661; WAN024DY7; Start 697; Stop 721
actatgaagctatgattcgtgaatt

SEQ ID NO: 301195 - DNA, 25 bp, Artificial
  probe
  misc_feature (1)..(25): SEQ ID NO: 1661; WAN024DY7; Start 696; Stop 720
aactatgaagctatgattcgtgaat

SEQ ID NO: 301196 - DNA, 25 bp, Artificial
  probe
  misc_feature (1)..(25): SEQ ID NO: 1661; WAN024DY7; Start 1098; Stop 1122
aaatcaacccaaagaatcctctcag

SEQ ID NO: 301197 - DNA, 25 bp, Artificial
  probe
  misc_feature (1)..(25): SEQ ID NO: 1661; WAN024DY7; Start 1071; Stop 1095
caagcaactatcgcaaacttaaatt

SEQ ID NO: 301198 - DNA, 25 bp, Artificial
  probe
  misc_feature (1)..(25): SEQ ID NO: 1661; WAN024DY7; Start 1055; Stop 1079
tgtggaaacgataaatcaagcaact

SEQ ID NO: 301199 - DNA, 25 bp, Artificial
  probe
  misc_feature (1)..(25): SEQ ID NO: 1661; WAN024DY7; Start 1096; Stop 1120
ttaaatcaacccaaagaatcctctc

SEQ ID NO: 301200 - DNA, 25 bp, Artificial
  probe
  misc_feature (1)..(25): SEQ ID NO: 1661; WAN024DY7; Start 681; Stop 705
tttgtccctgagaataactatgaag

SEQ ID NO: 301201 - DNA, 25 bp, Artificial
  probe
  misc_feature (1)..(25): SEQ ID NO: 1661; WAN024DY7; Start 1051; Stop 1075
aatatgtggaaacgataaatcaagc

SEQ ID NO: 301202 - DNA, 25 bp, Artificial
  probe
  misc_feature (1)..(25): SEQ ID NO: 1661; WAN024DY7; Start 695; Stop 719
taactatgaagctatgattcgtgaa

SEQ ID NO: 301203 - DNA, 25 bp, Artificial
  probe
  misc_feature (1)..(25): SEQ ID NO: 1661; WAN024DY7; Start 1100; Stop 1124
atcaacccaaagaatcctctcagat

SEQ ID NO: 301204 - DNA, 25 bp, Artificial
  probe
  misc_feature (1)..(25): SEQ ID NO: 1661; WAN024DY7; Start 687; Stop 711
cctgagaataactatgaagctatga

SEQ ID NO: 301205 - DNA, 25 bp, Artificial
  probe
  misc_feature (1)..(25): SEQ ID NO: 1661; WAN024DY7; Start 713; Stop 737
tcgtgaatttatcaaatcccagtct

SEQ ID NO: 301206 - DNA, 25 bp, Artificial
  probe
  misc_feature (1)..(25): SEQ ID NO: 1661; WAN024DY7; Start 712; Stop 736
ttcgtgaatttatcaaatcccagtc

SEQ ID NO: 301207 - DNA, 25 bp, Artificial
  probe
  misc_feature (1)..(25): SEQ ID NO: 1662; WAN024D5R; Start 460; Stop 484
gatgaacctatgaatgctttggatg

SEQ ID NO: 301208 - DNA, 25 bp, Artificial
  probe
  misc_feature (1)..(25): SEQ ID NO: 1662; WAN024D5R; Start 464; Stop 488
aacctatgaatgctttggatgagaa

SEQ ID NO: 301209 - DNA, 25 bp, Artificial
  probe
  misc_feature (1)..(25): SEQ ID NO: 1662; WAN024D5R; Start 461; Stop 485
atgaacctatgaatgctttggatga

SEQ ID NO: 301210 - DNA, 25 bp, Artificial
  probe
  misc_feature (1)..(25): SEQ ID NO: 1662; WAN024D5R; Start 463; Stop 487
gaacctatgaatgctttggatgaga

SEQ ID NO: 301211 - DNA, 25 bp, Artificial
  probe
  misc_feature (1)..(25): SEQ ID NO: 1662; WAN024D5R; Start 567; Stop 591
atcggaagatatttcagacctttgt

SEQ ID NO: 301212 - DNA, 25 bp, Artificial
  probe
  misc_feature (1)..(25): SEQ ID NO: 1662; WAN024D5R; Start 568; Stop 592
tcggaagatatttcagacctttgta

SEQ ID NO: 301213 - DNA, 25 bp, Artificial
  probe
  misc_feature (1)..(25): SEQ ID NO: 1662; WAN024D5R; Start 462; Stop 486
tgaacctatgaatgctttggatgag

SEQ ID NO: 301214 - DNA, 25 bp, Artificial
  probe
  misc_feature (1)..(25): SEQ ID NO: 1662; WAN024D5R; Start 459; Stop 483
cgatgaacctatgaatgctttggat

SEQ ID NO: 301215 - DNA, 25 bp, Artificial
  probe
  misc_feature (1)..(25): SEQ ID NO: 1662; WAN024D5R; Start 93; Stop 117
tggacttaaaggtgataatggatct

SEQ ID NO: 301216 - DNA, 25 bp, Artificial
  probe
  misc_feature (1)..(25): SEQ ID NO: 1662; WAN024D5R; Start 569; Stop 593
cggaagatatttcagacctttgtac

SEQ ID NO: 301217 - DNA, 25 bp, Artificial
  probe
  misc_feature (1)..(25): SEQ ID NO: 1662; WAN024D5R; Start 208; Stop 232
aatcattatattcaggatgcaggaa

SEQ ID NO: 301218 - DNA, 25 bp, Artificial
  probe
  misc_feature (1)..(25): SEQ ID NO: 1662; WAN024D5R; Start 92; Stop 116
atggacttaaaggtgataatggatc

SEQ ID NO: 301219 - DNA, 25 bp, Artificial
  probe
  misc_feature (1)..(25): SEQ ID NO: 1662; WAN024D5R; Start 566; Stop 590
tatcggaagatatttcagacctttg

SEQ ID NO: 301220 - DNA, 25 bp, Artificial
  probe
  misc_feature (1)..(25): SEQ ID NO: 1662; WAN024D5R; Start 450; Stop 474
actctttctcgatgaacctatgaat

SEQ ID NO: 301221 - DNA, 25 bp, Artificial
  probe
  misc_feature (1)..(25): SEQ ID NO: 1662; WAN024D5R; Start 440; Stop 464
ctccttctatactctttctcgatga

SEQ ID NO: 301222 - DNA, 25 bp, Artificial
  probe
  misc_feature (1)..(25): SEQ ID NO: 1662; WAN024D5R; Start 439; Stop 463
tctccttctatactctttctcgatg

SEQ ID NO: 301223 - DNA, 25 bp, Artificial
  probe
  misc_feature (1)..(25): SEQ ID NO: 1662; WAN024D5R; Start 455; Stop 479
ttctcgatgaacctatgaatgcttt

SEQ ID NO: 301224 - DNA, 25 bp, Artificial
  probe
  misc_feature (1)..(25): SEQ ID NO: 1662; WAN024D5R; Start 454; Stop 478
tttctcgatgaacctatgaatgctt

SEQ ID NO: 301225 - DNA, 25 bp, Artificial
  probe
  misc_feature (1)..(25): SEQ ID NO: 1662; WAN024D5R; Start 451; Stop 475
ctctttctcgatgaacctatgaatg

SEQ ID NO: 301226 - DNA, 25 bp, Artificial
  probe
  misc_feature (1)..(25): SEQ ID NO: 1662; WAN024D5R; Start 456; Stop 480
tctcgatgaacctatgaatgctttg

SEQ ID NO: 301227 - DNA, 25 bp, Artificial
  probe
  misc_feature (1)..(25): SEQ ID NO: 1662; WAN024D5R; Start 453; Stop 477
ctttctcgatgaacctatgaatgct

SEQ ID NO: 301228 - DNA, 25 bp, Artificial
  probe
  misc_feature (1)..(25): SEQ ID NO: 1662; WAN024D5R; Start 452; Stop 476
tctttctcgatgaacctatgaatgc

SEQ ID NO: 301229 - DNA, 25 bp, Artificial
  probe
  misc_feature (1)..(25): SEQ ID NO: 1662; WAN024D5R; Start 449; Stop 473
tactctttctcgatgaacctatgaa

SEQ ID NO: 301230 - DNA, 25 bp, Artificial
  probe
  misc_feature (1)..(25): SEQ ID NO: 1662; WAN024D5R; Start 90; Stop 114
ttatggacttaaaggtgataatgga

SEQ ID NO: 301231 - DNA, 25 bp, Artificial
  probe
  misc_feature (1)..(25): SEQ ID NO: 1662; WAN024D5R; Start 91; Stop 115
tatggacttaaaggtgataatggat

SEQ ID NO: 301232 - DNA, 25 bp, Artificial
  probe
  misc_feature (1)..(25): SEQ ID NO: 1662; WAN024D5R; Start 448; Stop 472
atactctttctcgatgaacctatga

SEQ ID NO: 301233 - DNA, 25 bp, Artificial
  probe
  misc_feature (1)..(25): SEQ ID NO: 1662; WAN024D5R; Start 444; Stop 468
ttctatactctttctcgatgaacct

SEQ ID NO: 301234 - DNA, 25 bp, Artificial
  probe
  misc_feature (1)..(25): SEQ ID NO: 1662; WAN024D5R; Start 210; Stop 234
tcattatattcaggatgcaggaatt

SEQ ID NO: 301235 - DNA, 25 bp, Artificial
  probe
  misc_feature (1)..(25): SEQ ID NO: 1662; WAN024D5R; Start 443; Stop 467
cttctatactctttctcgatgaacc

SEQ ID NO: 301236 - DNA, 25 bp, Artificial
  probe
  misc_feature (1)..(25): SEQ ID NO: 1662; WAN024D5R; Start 442; Stop 466
ccttctatactctttctcgatgaac

SEQ ID NO: 301237 - DNA, 25 bp, Artificial
  probe
  misc_feature (1)..(25): SEQ ID NO: 1662; WAN024D5R; Start 441; Stop 465
tccttctatactctttctcgatgaa

SEQ ID NO: 301238 - DNA, 25 bp, Artificial
  probe
  misc_feature (1)..(25): SEQ ID NO: 1662; WAN024D5R; Start 209; Stop 233
atcattatattcaggatgcaggaat

SEQ ID NO: 301239 - DNA, 25 bp, Artificial
  probe
  misc_feature (1)..(25): SEQ ID NO: 1662; WAN024D5R; Start 457; Stop 481
ctcgatgaacctatgaatgctttgg

SEQ ID NO: 301240 - DNA, 25 bp, Artificial
  probe
  misc_feature (1)..(25): SEQ ID NO: 1663; WAN024DI5; Start 502; Stop 526
agtgtgctggtatcaagagtctatc

SEQ ID NO: 301241 - DNA, 25 bp, Artificial
  probe
  misc_feature (1)..(25): SEQ ID NO: 1663; WAN024DI5; Start 504; Stop 528
tgtgctggtatcaagagtctatctg

SEQ ID NO: 301242 - DNA, 25 bp, Artificial
  probe
  misc_feature (1)..(25): SEQ ID NO: 1663; WAN024DI5; Start 503; Stop 527
gtgtgctggtatcaagagtctatct

SEQ ID NO: 301243 - DNA, 25 bp, Artificial
  probe
  misc_feature (1)..(25): SEQ ID NO: 1663; WAN024DI5; Start 505; Stop 529
gtgctggtatcaagagtctatctgg

SEQ ID NO: 301244 - DNA, 25 bp, Artificial
  probe
  misc_feature (1)..(25): SEQ ID NO: 1663; WAN024DI5; Start 126; Stop 150
cattcgaggagacttaccagattat

SEQ ID NO: 301245 - DNA, 25 bp, Artificial
  probe
  misc_feature (1)..(25): SEQ ID NO: 1663; WAN024DI5; Start 127; Stop 151
attcgaggagacttaccagattatt

SEQ ID NO: 301246 - DNA, 25 bp, Artificial
  probe
  misc_feature (1)..(25): SEQ ID NO: 1663; WAN024DI5; Start 501; Stop 525
cagtgtgctggtatcaagagtctat

SEQ ID NO: 301247 - DNA, 25 bp, Artificial
  probe
  misc_feature (1)..(25): SEQ ID NO: 1663; WAN024DI5; Start 130; Stop 154
cgaggagacttaccagattatttga

SEQ ID NO: 301248 - DNA, 25 bp, Artificial
  probe
  misc_feature (1)..(25): SEQ ID NO: 1663; WAN024DI5; Start 125; Stop 149
ccattcgaggagacttaccagatta

SEQ ID NO: 301249 - DNA, 25 bp, Artificial
  probe
  misc_feature (1)..(25): SEQ ID NO: 1663; WAN024DI5; Start 239; Stop 263
gtaagcgatggaagatagaaagttt

SEQ ID NO: 301250 - DNA, 25 bp, Artificial
  probe
  misc_feature (1)..(25): SEQ ID NO: 1663; WAN024DI5; Start 238; Stop 262
cgtaagcgatggaagatagaaagtt

SEQ ID NO: 301251 - DNA, 25 bp, Artificial
  probe
  misc_feature (1)..(25): SEQ ID NO: 1663; WAN024DI5; Start 132; Stop 156
aggagacttaccagattatttgact

SEQ ID NO: 301252 - DNA, 25 bp, Artificial
  probe
  misc_feature (1)..(25): SEQ ID NO: 1663; WAN024DI5; Start 512; Stop 536
tatcaagagtctatctgggagttca

SEQ ID NO: 301253 - DNA, 25 bp, Artificial
  probe
  misc_feature (1)..(25): SEQ ID NO: 1663; WAN024DI5; Start 511; Stop 535
gtatcaagagtctatctgggagttc

SEQ ID NO: 301254 - DNA, 25 bp, Artificial
  probe
  misc_feature (1)..(25): SEQ ID NO: 1663; WAN024DI5; Start 513; Stop 537
atcaagagtctatctgggagttcat

SEQ ID NO: 301255 - DNA, 25 bp, Artificial
  probe
  misc_feature (1)..(25): SEQ ID NO: 1663; WAN024DI5; Start 131; Stop 155
gaggagacttaccagattatttgac

SEQ ID NO: 301256 - DNA, 25 bp, Artificial
  probe
  misc_feature (1)..(25): SEQ ID NO: 1663; WAN024DI5; Start 516; Stop 540
aagagtctatctgggagttcattac

SEQ ID NO: 301257 - DNA, 25 bp, Artificial
  probe
  misc_feature (1)..(25): SEQ ID NO: 1663; WAN024DI5; Start 515; Stop 539
caagagtctatctgggagttcatta

SEQ ID NO: 301258 - DNA, 25 bp, Artificial
  probe
  misc_feature (1)..(25): SEQ ID NO: 1663; WAN024DI5; Start 514; Stop 538
tcaagagtctatctgggagttcatt

SEQ ID NO: 301259 - DNA, 25 bp, Artificial
  probe
  misc_feature (1)..(25): SEQ ID NO: 1663; WAN024DI5; Start 517; Stop 541
agagtctatctgggagttcattacc

SEQ ID NO: 301260 - DNA, 25 bp, Artificial
  probe
  misc_feature (1)..(25): SEQ ID NO: 1663; WAN024DI5; Start 510; Stop 534
ggtatcaagagtctatctgggagtt

SEQ ID NO: 301261 - DNA, 25 bp, Artificial
  probe
  misc_feature (1)..(25): SEQ ID NO: 1663; WAN024DI5; Start 508; Stop 532
ctggtatcaagagtctatctgggag

SEQ ID NO: 301262 - DNA, 25 bp, Artificial
  probe
  misc_feature (1)..(25): SEQ ID NO: 1663; WAN024DI5; Start 496; Stop 520
ctagtcagtgtgctggtatcaagag

SEQ ID NO: 301263 - DNA, 25 bp, Artificial
  probe
  misc_feature (1)..(25): SEQ ID NO: 1663; WAN024DI5; Start 240; Stop 264
taagcgatggaagatagaaagtttc

SEQ ID NO: 301264 - DNA, 25 bp, Artificial
  probe
  misc_feature (1)..(25): SEQ ID NO: 1663; WAN024DI5; Start 500; Stop 524
tcagtgtgctggtatcaagagtcta

SEQ ID NO: 301265 - DNA, 25 bp, Artificial
  probe
  misc_feature (1)..(25): SEQ ID NO: 1663; WAN024DI5; Start 509; Stop 533
tggtatcaagagtctatctgggagt

SEQ ID NO: 301266 - DNA, 25 bp, Artificial
  probe
  misc_feature (1)..(25): SEQ ID NO: 1663; WAN024DI5; Start 199; Stop 223
attatcacttgggttgtcattacag

SEQ ID NO: 301267 - DNA, 25 bp, Artificial
  probe
  misc_feature (1)..(25): SEQ ID NO: 1663; WAN024DI5; Start 198; Stop 222
gattatcacttgggttgtcattaca

SEQ ID NO: 301268 - DNA, 25 bp, Artificial
  probe
  misc_feature (1)..(25): SEQ ID NO: 1663; WAN024DI5; Start 497; Stop 521
tagtcagtgtgctggtatcaagagt

SEQ ID NO: 301269 - DNA, 25 bp, Artificial
  probe
  misc_feature (1)..(25): SEQ ID NO: 1663; WAN024DI5; Start 197; Stop 221
tgattatcacttgggttgtcattac

SEQ ID NO: 301270 - DNA, 25 bp, Artificial
  probe
  misc_feature (1)..(25): SEQ ID NO: 1663; WAN024DI5; Start 200; Stop 224
ttatcacttgggttgtcattacagc

SEQ ID NO: 301271 - DNA, 25 bp, Artificial
  probe
  misc_feature (1)..(25): SEQ ID NO: 1663; WAN024DI5; Start 133; Stop 157
ggagacttaccagattatttgacta

SEQ ID NO: 301272 - DNA, 25 bp, Artificial
  probe
  misc_feature (1)..(25): SEQ ID NO: 1663; WAN024DI5; Start 129; Stop 153
tcgaggagacttaccagattatttg

SEQ ID NO: 301273 - DNA, 25 bp, Artificial
  probe
  misc_feature (1)..(25): SEQ ID NO: 1664; WAN024B3H; Start 191; Stop 215
tgattgaacttgtccagacattgaa

SEQ ID NO: 301274 - DNA, 25 bp, Artificial
  probe
  misc_feature (1)..(25): SEQ ID NO: 1664; WAN024B3H; Start 190; Stop 214
ttgattgaacttgtccagacattga

SEQ ID NO: 301275 - DNA, 25 bp, Artificial
  probe
  misc_feature (1)..(25): SEQ ID NO: 1664; WAN024B3H; Start 661; Stop 685
gtaacagtcaatctaaatgctttcg

SEQ ID NO: 301276 - DNA, 25 bp, Artificial
  probe
  misc_feature (1)..(25): SEQ ID NO: 1664; WAN024B3H; Start 185; Stop 209
gatatttgattgaacttgtccagac

SEQ ID NO: 301277 - DNA, 25 bp, Artificial
  probe
  misc_feature (1)..(25): SEQ ID NO: 1664; WAN024B3H; Start 657; Stop 681
tgatgtaacagtcaatctaaatgct

SEQ ID NO: 301278 - DNA, 25 bp, Artificial
  probe
  misc_feature (1)..(25): SEQ ID NO: 1664; WAN024B3H; Start 660; Stop 684
tgtaacagtcaatctaaatgctttc

SEQ ID NO: 301279 - DNA, 25 bp, Artificial
  probe
  misc_feature (1)..(25): SEQ ID NO: 1664; WAN024B3H; Start 585; Stop 609
agtctttatcaatcttccaagtgaa

SEQ ID NO: 301280 - DNA, 25 bp, Artificial
  probe
  misc_feature (1)..(25): SEQ ID NO: 1664; WAN024B3H; Start 584; Stop 608
aagtctttatcaatcttccaagtga

SEQ ID NO: 301281 - DNA, 25 bp, Artificial
  probe
  misc_feature (1)..(25): SEQ ID NO: 1664; WAN024B3H; Start 658; Stop 682
gatgtaacagtcaatctaaatgctt

SEQ ID NO: 301282 - DNA, 25 bp, Artificial
  probe
  misc_feature (1)..(25): SEQ ID NO: 1664; WAN024B3H; Start 674; Stop 698
taaatgctttcgattgtatcttggc

SEQ ID NO: 301283 - DNA, 25 bp, Artificial
  probe
  misc_feature (1)..(25): SEQ ID NO: 1664; WAN024B3H; Start 663; Stop 687
aacagtcaatctaaatgctttcgat

SEQ ID NO: 301284 - DNA, 25 bp, Artificial
  probe
  misc_feature (1)..(25): SEQ ID NO: 1664; WAN024B3H; Start 192; Stop 216
gattgaacttgtccagacattgaaa

SEQ ID NO: 301285 - DNA, 25 bp, Artificial
  probe
  misc_feature (1)..(25): SEQ ID NO: 1664; WAN024B3H; Start 189; Stop 213
tttgattgaacttgtccagacattg

SEQ ID NO: 301286 - DNA, 25 bp, Artificial
  probe
  misc_feature (1)..(25): SEQ ID NO: 1664; WAN024B3H; Start 193; Stop 217
attgaacttgtccagacattgaaat

SEQ ID NO: 301287 - DNA, 25 bp, Artificial
  probe
  misc_feature (1)..(25): SEQ ID NO: 1664; WAN024B3H; Start 188; Stop 212
atttgattgaacttgtccagacatt

SEQ ID NO: 301288 - DNA, 25 bp, Artificial
  probe
  misc_feature (1)..(25): SEQ ID NO: 1664; WAN024B3H; Start 662; Stop 686
taacagtcaatctaaatgctttcga

SEQ ID NO: 301289 - DNA, 25 bp, Artificial
  probe
  misc_feature (1)..(25): SEQ ID NO: 1664; WAN024B3H; Start 112; Stop 136
gctattgtactttatatcctccact

SEQ ID NO: 301290 - DNA, 25 bp, Artificial
  probe
  misc_feature (1)..(25): SEQ ID NO: 1664; WAN024B3H; Start 575; Stop 599
tggtcgatgaagtctttatcaatct

SEQ ID NO: 301291 - DNA, 25 bp, Artificial
  probe
  misc_feature (1)..(25): SEQ ID NO: 1664; WAN024B3H; Start 574; Stop 598
gtggtcgatgaagtctttatcaatc

SEQ ID NO: 301292 - DNA, 25 bp, Artificial
  probe
  misc_feature (1)..(25): SEQ ID NO: 1664; WAN024B3H; Start 628; Stop 652
cttgtctctcagtttgaaacgatgg

SEQ ID NO: 301293 - DNA, 25 bp, Artificial
  probe
  misc_feature (1)..(25): SEQ ID NO: 1664; WAN024B3H; Start 194; Stop 218
ttgaacttgtccagacattgaaata

SEQ ID NO: 301294 - DNA, 25 bp, Artificial
  probe
  misc_feature (1)..(25): SEQ ID NO: 1664; WAN024B3H; Start 673; Stop 697
ctaaatgctttcgattgtatcttgg

SEQ ID NO: 301295 - DNA, 25 bp, Artificial
  probe
  misc_feature (1)..(25): SEQ ID NO: 1664; WAN024B3H; Start 586; Stop 610
gtctttatcaatcttccaagtgaaa

SEQ ID NO: 301296 - DNA, 25 bp, Artificial
  probe
  misc_feature (1)..(25): SEQ ID NO: 1664; WAN024B3H; Start 659; Stop 683
atgtaacagtcaatctaaatgcttt

SEQ ID NO: 301297 - DNA, 25 bp, Artificial
  probe
  misc_feature (1)..(25): SEQ ID NO: 1664; WAN024B3H; Start 573; Stop 597
ggtggtcgatgaagtctttatcaat

SEQ ID NO: 301298 - DNA, 25 bp, Artificial
  probe
  misc_feature (1)..(25): SEQ ID NO: 1664; WAN024B3H; Start 195; Stop 219
tgaacttgtccagacattgaaatat

SEQ ID NO: 301299 - DNA, 25 bp, Artificial
  probe
  misc_feature (1)..(25): SEQ ID NO: 1664; WAN024B3H; Start 187; Stop 211
tatttgattgaacttgtccagacat

SEQ ID NO: 301300 - DNA, 25 bp, Artificial
  probe
  misc_feature (1)..(25): SEQ ID NO: 1664; WAN024B3H; Start 186; Stop 210
atatttgattgaacttgtccagaca

SEQ ID NO: 301301 - DNA, 25 bp, Artificial
  probe
  misc_feature (1)..(25): SEQ ID NO: 1664; WAN024B3H; Start 576; Stop 600
ggtcgatgaagtctttatcaatctt

SEQ ID NO: 301302 - DNA, 25 bp, Artificial
  probe
  misc_feature (1)..(25): SEQ ID NO: 1664; WAN024B3H; Start 627; Stop 651
gcttgtctctcagtttgaaacgatg

SEQ ID NO: 301303 - DNA, 25 bp, Artificial
  probe
  misc_feature (1)..(25): SEQ ID NO: 1664; WAN024B3H; Start 572; Stop 596
aggtggtcgatgaagtctttatcaa

SEQ ID NO: 301304 - DNA, 25 bp, Artificial
  probe
  misc_feature (1)..(25): SEQ ID NO: 1664; WAN024B3H; Start 570; Stop 594
tgaggtggtcgatgaagtctttatc

SEQ ID NO: 301305 - DNA, 25 bp, Artificial
  probe
  misc_feature (1)..(25): SEQ ID NO: 1664; WAN024B3H; Start 111; Stop 135
agctattgtactttatatcctccac

SEQ ID NO: 301306 - DNA, 25 bp, Artificial
  probe
  misc_feature (1)..(25): SEQ ID NO: 1665; WAN024FC4; Start 679; Stop 703
cttaatctctggactatggatgctt

SEQ ID NO: 301307 - DNA, 25 bp, Artificial
  probe
  misc_feature (1)..(25): SEQ ID NO: 1665; WAN024FC4; Start 339; Stop 363
tctctggttaggaattattgcgatt

SEQ ID NO: 301308 - DNA, 25 bp, Artificial
  probe
  misc_feature (1)..(25): SEQ ID NO: 1665; WAN024FC4; Start 338; Stop 362
ttctctggttaggaattattgcgat

SEQ ID NO: 301309 - DNA, 25 bp, Artificial
  probe
  misc_feature (1)..(25): SEQ ID NO: 1665; WAN024FC4; Start 174; Stop 198
aatctccaatcgtgaagaagacaat

SEQ ID NO: 301310 - DNA, 25 bp, Artificial
  probe
  misc_feature (1)..(25): SEQ ID NO: 1665; WAN024FC4; Start 342; Stop 366
ctggttaggaattattgcgattact

SEQ ID NO: 301311 - DNA, 25 bp, Artificial
  probe
  misc_feature (1)..(25): SEQ ID NO: 1665; WAN024FC4; Start 341; Stop 365
tctggttaggaattattgcgattac

SEQ ID NO: 301312 - DNA, 25 bp, Artificial
  probe
  misc_feature (1)..(25): SEQ ID NO: 1665; WAN024FC4; Start 175; Stop 199
atctccaatcgtgaagaagacaatc

SEQ ID NO: 301313 - DNA, 25 bp, Artificial
  probe
  misc_feature (1)..(25): SEQ ID NO: 1665; WAN024FC4; Start 363; Stop 387
tactatcaatctgttagcgagtctg

SEQ ID NO: 301314 - DNA, 25 bp, Artificial
  probe
  misc_feature (1)..(25): SEQ ID NO: 1665; WAN024FC4; Start 340; Stop 364
ctctggttaggaattattgcgatta

SEQ ID NO: 301315 - DNA, 25 bp, Artificial
  probe
  misc_feature (1)..(25): SEQ ID NO: 1665; WAN024FC4; Start 875; Stop 899
aacggagttatgagcatcaacatta

SEQ ID NO: 301316 - DNA, 25 bp, Artificial
  probe
  misc_feature (1)..(25): SEQ ID NO: 1665; WAN024FC4; Start 179; Stop 203
ccaatcgtgaagaagacaatcagta

SEQ ID NO: 301317 - DNA, 25 bp, Artificial
  probe
  misc_feature (1)..(25): SEQ ID NO: 1665; WAN024FC4; Start 173; Stop 197
caatctccaatcgtgaagaagacaa

SEQ ID NO: 301318 - DNA, 25 bp, Artificial
  probe
  misc_feature (1)..(25): SEQ ID NO: 1665; WAN024FC4; Start 171; Stop 195
aacaatctccaatcgtgaagaagac

SEQ ID NO: 301319 - DNA, 25 bp, Artificial
  probe
  misc_feature (1)..(25): SEQ ID NO: 1665; WAN024FC4; Start 362; Stop 386
ttactatcaatctgttagcgagtct

SEQ ID NO: 301320 - DNA, 25 bp, Artificial
  probe
  misc_feature (1)..(25): SEQ ID NO: 1665; WAN024FC4; Start 365; Stop 389
ctatcaatctgttagcgagtctggt

SEQ ID NO: 301321 - DNA, 25 bp, Artificial
  probe
  misc_feature (1)..(25): SEQ ID NO: 1665; WAN024FC4; Start 678; Stop 702
gcttaatctctggactatggatgct

SEQ ID NO: 301322 - DNA, 25 bp, Artificial
  probe
  misc_feature (1)..(25): SEQ ID NO: 1665; WAN024FC4; Start 180; Stop 204
caatcgtgaagaagacaatcagtac

SEQ ID NO: 301323 - DNA, 25 bp, Artificial
  probe
  misc_feature (1)..(25): SEQ ID NO: 1665; WAN024FC4; Start 466; Stop 490
gttatcctgatggcgattgttcttc

SEQ ID NO: 301324 - DNA, 25 bp, Artificial
  probe
  misc_feature (1)..(25): SEQ ID NO: 1665; WAN024FC4; Start 181; Stop 205
aatcgtgaagaagacaatcagtaca

SEQ ID NO: 301325 - DNA, 25 bp, Artificial
  probe
  misc_feature (1)..(25): SEQ ID NO: 1665; WAN024FC4; Start 186; Stop 210
tgaagaagacaatcagtacaccttg

SEQ ID NO: 301326 - DNA, 25 bp, Artificial
  probe
  misc_feature (1)..(25): SEQ ID NO: 1665; WAN024FC4; Start 366; Stop 390
tatcaatctgttagcgagtctggtg

SEQ ID NO: 301327 - DNA, 25 bp, Artificial
  probe
  misc_feature (1)..(25): SEQ ID NO: 1665; WAN024FC4; Start 874; Stop 898
gaacggagttatgagcatcaacatt

SEQ ID NO: 301328 - DNA, 25 bp, Artificial
  probe
  misc_feature (1)..(25): SEQ ID NO: 1665; WAN024FC4; Start 361; Stop 385
attactatcaatctgttagcgagtc

SEQ ID NO: 301329 - DNA, 25 bp, Artificial
  probe
  misc_feature (1)..(25): SEQ ID NO: 1665; WAN024FC4; Start 343; Stop 367
tggttaggaattattgcgattacta

SEQ ID NO: 301330 - DNA, 25 bp, Artificial
  probe
  misc_feature (1)..(25): SEQ ID NO: 1665; WAN024FC4; Start 177; Stop 201
ctccaatcgtgaagaagacaatcag

SEQ ID NO: 301331 - DNA, 25 bp, Artificial
  probe
  misc_feature (1)..(25): SEQ ID NO: 1665; WAN024FC4; Start 187; Stop 211
gaagaagacaatcagtacaccttgg

SEQ ID NO: 301332 - DNA, 25 bp, Artificial
  probe
  misc_feature (1)..(25): SEQ ID NO: 1665; WAN024FC4; Start 364; Stop 388
actatcaatctgttagcgagtctgg

SEQ ID NO: 301333 - DNA, 25 bp, Artificial
  probe
  misc_feature (1)..(25): SEQ ID NO: 1665; WAN024FC4; Start 176; Stop 200
tctccaatcgtgaagaagacaatca

SEQ ID NO: 301334 - DNA, 25 bp, Artificial
  probe
  misc_feature (1)..(25): SEQ ID NO: 1665; WAN024FC4; Start 172; Stop 196
acaatctccaatcgtgaagaagaca

SEQ ID NO: 301335 - DNA, 25 bp, Artificial
  probe
  misc_feature (1)..(25): SEQ ID NO: 1665; WAN024FC4; Start 465; Stop 489
tgttatcctgatggcgattgttctt

SEQ ID NO: 301336 - DNA, 25 bp, Artificial
  probe
  misc_feature (1)..(25): SEQ ID NO: 1665; WAN024FC4; Start 337; Stop 361
attctctggttaggaattattgcga

SEQ ID NO: 301337 - DNA, 25 bp, Artificial
  probe
  misc_feature (1)..(25): SEQ ID NO: 1665; WAN024FC4; Start 336; Stop 360
gattctctggttaggaattattgcg

SEQ ID NO: 301338 - DNA, 25 bp, Artificial
  probe
  misc_feature (1)..(25): SEQ ID NO: 1665; WAN024FC4; Start 335; Stop 359
ggattctctggttaggaattattgc

SEQ ID NO: 301339 - DNA, 25 bp, Artificial
  probe
  misc_feature (1)..(25): SEQ ID NO: 1666; WAN024C5W; Start 356; Stop 380
caccgtcttgtatggctgaatataa

SEQ ID NO: 301340 - DNA, 25 bp, Artificial
  probe
  misc_feature (1)..(25): SEQ ID NO: 1666; WAN024C5W; Start 357; Stop 381
accgtcttgtatggctgaatataag

SEQ ID NO: 301341 - DNA, 25 bp, Artificial
  probe
  misc_feature (1)..(25): SEQ ID NO: 1666; WAN024C5W; Start 94; Stop 118
gataaggttattcggcagttagaac

SEQ ID NO: 301342 - DNA, 25 bp, Artificial
  probe
  misc_feature (1)..(25): SEQ ID NO: 1666; WAN024C5W; Start 520; Stop 544
tgcttgctcaatatccaactcttat

SEQ ID NO: 301343 - DNA, 25 bp, Artificial
  probe
  misc_feature (1)..(25): SEQ ID NO: 1666; WAN024C5W; Start 221; Stop 245
gagaactgtggttggcttatgaata

SEQ ID NO: 301344 - DNA, 25 bp, Artificial
  probe
  misc_feature (1)..(25): SEQ ID NO: 1666; WAN024C5W; Start 521; Stop 545
gcttgctcaatatccaactcttatt

SEQ ID NO: 301345 - DNA, 25 bp, Artificial
  probe
  misc_feature (1)..(25): SEQ ID NO: 1666; WAN024C5W; Start 236; Stop 260
cttatgaatacagtcaacaggatgc

SEQ ID NO: 301346 - DNA, 25 bp, Artificial
  probe
  misc_feature (1)..(25): SEQ ID NO: 1666; WAN024C5W; Start 235; Stop 259
gcttatgaatacagtcaacaggatg

SEQ ID NO: 301347 - DNA, 25 bp, Artificial
  probe
  misc_feature (1)..(25): SEQ ID NO: 1666; WAN024C5W; Start 222; Stop 246
agaactgtggttggcttatgaatac

SEQ ID NO: 301348 - DNA, 25 bp, Artificial
  probe
  misc_feature (1)..(25): SEQ ID NO: 1666; WAN024C5W; Start 300; Stop 324
ggatcgtgtcaataagagagtagaa

SEQ ID NO: 301349 - DNA, 25 bp, Artificial
  probe
  misc_feature (1)..(25): SEQ ID NO: 1666; WAN024C5W; Start 298; Stop 322
ctggatcgtgtcaataagagagtag

SEQ ID NO: 301350 - DNA, 25 bp, Artificial
  probe
  misc_feature (1)..(25): SEQ ID NO: 1666; WAN024C5W; Start 234; Stop 258
ggcttatgaatacagtcaacaggat

SEQ ID NO: 301351 - DNA, 25 bp, Artificial
  probe
  misc_feature (1)..(25): SEQ ID NO: 1666; WAN024C5W; Start 299; Stop 323
tggatcgtgtcaataagagagtaga

SEQ ID NO: 301352 - DNA, 25 bp, Artificial
  probe
  misc_feature (1)..(25): SEQ ID NO: 1666; WAN024C5W; Start 232; Stop 256
ttggcttatgaatacagtcaacagg

SEQ ID NO: 301353 - DNA, 25 bp, Artificial
  probe
  misc_feature (1)..(25): SEQ ID NO: 1666; WAN024C5W; Start 424; Stop 448
gcagataagttgattgaacgctatc

SEQ ID NO: 301354 - DNA, 25 bp, Artificial
  probe
  misc_feature (1)..(25): SEQ ID NO: 1666; WAN024C5W; Start 228; Stop 252
gtggttggcttatgaatacagtcaa

SEQ ID NO: 301355 - DNA, 25 bp, Artificial
  probe
  misc_feature (1)..(25): SEQ ID NO: 1666; WAN024C5W; Start 95; Stop 119
ataaggttattcggcagttagaact

SEQ ID NO: 301356 - DNA, 25 bp, Artificial
  probe
  misc_feature (1)..(25): SEQ ID NO: 1666; WAN024C5W; Start 297; Stop 321
cctggatcgtgtcaataagagagta

SEQ ID NO: 301357 - DNA, 25 bp, Artificial
  probe
  misc_feature (1)..(25): SEQ ID NO: 1666; WAN024C5W; Start 96; Stop 120
taaggttattcggcagttagaactc

SEQ ID NO: 301358 - DNA, 25 bp, Artificial
  probe
  misc_feature (1)..(25): SEQ ID NO: 1666; WAN024C5W; Start 108; Stop 132
gcagttagaactcaaccttgactat

SEQ ID NO: 301359 - DNA, 25 bp, Artificial
  probe
  misc_feature (1)..(25): SEQ ID NO: 1666; WAN024C5W; Start 233; Stop 257
tggcttatgaatacagtcaacagga

SEQ ID NO: 301360 - DNA, 25 bp, Artificial
  probe
  misc_feature (1)..(25): SEQ ID NO: 1666; WAN024C5W; Start 223; Stop 247
gaactgtggttggcttatgaataca

SEQ ID NO: 301361 - DNA, 25 bp, Artificial
  probe
  misc_feature (1)..(25): SEQ ID NO: 1666; WAN024C5W; Start 524; Stop 548
tgctcaatatccaactcttattctt

SEQ ID NO: 301362 - DNA, 25 bp, Artificial
  probe
  misc_feature (1)..(25): SEQ ID NO: 1666; WAN024C5W; Start 1103; Stop 1127
aaggagtggatgaaggcaatatctg

SEQ ID NO: 301363 - DNA, 25 bp, Artificial
  probe
  misc_feature (1)..(25): SEQ ID NO: 1666; WAN024C5W; Start 523; Stop 547
ttgctcaatatccaactcttattct

SEQ ID NO: 301364 - DNA, 25 bp, Artificial
  probe
  misc_feature (1)..(25): SEQ ID NO: 1666; WAN024C5W; Start 295; Stop 319
ttcctggatcgtgtcaataagagag

SEQ ID NO: 301365 - DNA, 25 bp, Artificial
  probe
  misc_feature (1)..(25): SEQ ID NO: 1666; WAN024C5W; Start 607; Stop 631
gcttcagctaataatgtaatccgtg

SEQ ID NO: 301366 - DNA, 25 bp, Artificial
  probe
  misc_feature (1)..(25): SEQ ID NO: 1666; WAN024C5W; Start 606; Stop 630
tgcttcagctaataatgtaatccgt

SEQ ID NO: 301367 - DNA, 25 bp, Artificial
  probe
  misc_feature (1)..(25): SEQ ID NO: 1666; WAN024C5W; Start 355; Stop 379
acaccgtcttgtatggctgaatata

SEQ ID NO: 301368 - DNA, 25 bp, Artificial
  probe
  misc_feature (1)..(25): SEQ ID NO: 1666; WAN024C5W; Start 605; Stop 629
atgcttcagctaataatgtaatccg

SEQ ID NO: 301369 - DNA, 25 bp, Artificial
  probe
  misc_feature (1)..(25): SEQ ID NO: 1666; WAN024C5W; Start 302; Stop 326
atcgtgtcaataagagagtagaatt

SEQ ID NO: 301370 - DNA, 25 bp, Artificial
  probe
  misc_feature (1)..(25): SEQ ID NO: 1666; WAN024C5W; Start 522; Stop 546
cttgctcaatatccaactcttattc

SEQ ID NO: 301371 - DNA, 25 bp, Artificial
  probe
  misc_feature (1)..(25): SEQ ID NO: 1666; WAN024C5W; Start 301; Stop 325
gatcgtgtcaataagagagtagaat

SEQ ID NO: 301372 - DNA, 25 bp, Artificial
  probe
  misc_feature (1)..(25): SEQ ID NO: 1667; WAN024CXZ; Start 617; Stop 641
atggtatgtatgagcacttgttgaa

SEQ ID NO: 301373 - DNA, 25 bp, Artificial
  probe
  misc_feature (1)..(25): SEQ ID NO: 1667; WAN024CXZ; Start 616; Stop 640
aatggtatgtatgagcacttgttga

SEQ ID NO: 301374 - DNA, 25 bp, Artificial
  probe
  misc_feature (1)..(25): SEQ ID NO: 1667; WAN024CXZ; Start 615; Stop 639
taatggtatgtatgagcacttgttg

SEQ ID NO: 301375 - DNA, 25 bp, Artificial
  probe
  misc_feature (1)..(25): SEQ ID NO: 1667; WAN024CXZ; Start 624; Stop 648
gtatgagcacttgttgaaggttatt

SEQ ID NO: 301376 - DNA, 25 bp, Artificial
  probe
  misc_feature (1)..(25): SEQ ID NO: 1667; WAN024CXZ; Start 623; Stop 647
tgtatgagcacttgttgaaggttat

SEQ ID NO: 301377 - DNA, 25 bp, Artificial
  probe
  misc_feature (1)..(25): SEQ ID NO: 1667; WAN024CXZ; Start 622; Stop 646
atgtatgagcacttgttgaaggtta

SEQ ID NO: 301378 - DNA, 25 bp, Artificial
  probe
  misc_feature (1)..(25): SEQ ID NO: 1667; WAN024CXZ; Start 621; Stop 645
tatgtatgagcacttgttgaaggtt

SEQ ID NO: 301379 - DNA, 25 bp, Artificial
  probe
  misc_feature (1)..(25): SEQ ID NO: 1667; WAN024CXZ; Start 59; Stop 83
gtggtgttggtctagtcattcatat

SEQ ID NO: 301380 - DNA, 25 bp, Artificial
  probe
  misc_feature (1)..(25): SEQ ID NO: 1667; WAN024CXZ; Start 620; Stop 644
gtatgtatgagcacttgttgaaggt

SEQ ID NO: 301381 - DNA, 25 bp, Artificial
  probe
  misc_feature (1)..(25): SEQ ID NO: 1667; WAN024CXZ; Start 618; Stop 642
tggtatgtatgagcacttgttgaag

SEQ ID NO: 301382 - DNA, 25 bp, Artificial
  probe
  misc_feature (1)..(25): SEQ ID NO: 1667; WAN024CXZ; Start 62; Stop 86
gtgttggtctagtcattcatatagc

SEQ ID NO: 301383 - DNA, 25 bp, Artificial
  probe
  misc_feature (1)..(25): SEQ ID NO: 1667; WAN024CXZ; Start 614; Stop 638
ttaatggtatgtatgagcacttgtt

SEQ ID NO: 301384 - DNA, 25 bp, Artificial
  probe
  misc_feature (1)..(25): SEQ ID NO: 1667; WAN024CXZ; Start 60; Stop 84
tggtgttggtctagtcattcatata

SEQ ID NO: 301385 - DNA, 25 bp, Artificial
  probe
  misc_feature (1)..(25): SEQ ID NO: 1667; WAN024CXZ; Start 833; Stop 857
agattgaccagatgagccacttatt

SEQ ID NO: 301386 - DNA, 25 bp, Artificial
  probe
  misc_feature (1)..(25): SEQ ID NO: 1667; WAN024CXZ; Start 829; Stop 853
aataagattgaccagatgagccact

SEQ ID NO: 301387 - DNA, 25 bp, Artificial
  probe
  misc_feature (1)..(25): SEQ ID NO: 1667; WAN024CXZ; Start 832; Stop 856
aagattgaccagatgagccacttat

SEQ ID NO: 301388 - DNA, 25 bp, Artificial
  probe
  misc_feature (1)..(25): SEQ ID NO: 1667; WAN024CXZ; Start 830; Stop 854
ataagattgaccagatgagccactt

SEQ ID NO: 301389 - DNA, 25 bp, Artificial
  probe
  misc_feature (1)..(25): SEQ ID NO: 1667; WAN024CXZ; Start 745; Stop 769
gccagtcttagaattatcctagaga

SEQ ID NO: 301390 - DNA, 25 bp, Artificial
  probe
  misc_feature (1)..(25): SEQ ID NO: 1667; WAN024CXZ; Start 744; Stop 768
agccagtcttagaattatcctagag

SEQ ID NO: 301391 - DNA, 25 bp, Artificial
  probe
  misc_feature (1)..(25): SEQ ID NO: 1667; WAN024CXZ; Start 619; Stop 643
ggtatgtatgagcacttgttgaagg

SEQ ID NO: 301392 - DNA, 25 bp, Artificial
  probe
  misc_feature (1)..(25): SEQ ID NO: 1667; WAN024CXZ; Start 61; Stop 85
ggtgttggtctagtcattcatatag

SEQ ID NO: 301393 - DNA, 25 bp, Artificial
  probe
  misc_feature (1)..(25): SEQ ID NO: 1667; WAN024CXZ; Start 324; Stop 348
cgtgatgttagatatgtctgttagt

SEQ ID NO: 301394 - DNA, 25 bp, Artificial
  probe
  misc_feature (1)..(25): SEQ ID NO: 1667; WAN024CXZ; Start 323; Stop 347
tcgtgatgttagatatgtctgttag

SEQ ID NO: 301395 - DNA, 25 bp, Artificial
  probe
  misc_feature (1)..(25): SEQ ID NO: 1667; WAN024CXZ; Start 58; Stop 82
ggtggtgttggtctagtcattcata

SEQ ID NO: 301396 - DNA, 25 bp, Artificial
  probe
  misc_feature (1)..(25): SEQ ID NO: 1667; WAN024CXZ; Start 1153; Stop 1177
ctaagtgaccaagaactagaacatt

SEQ ID NO: 301397 - DNA, 25 bp, Artificial
  probe
  misc_feature (1)..(25): SEQ ID NO: 1667; WAN024CXZ; Start 831; Stop 855
taagattgaccagatgagccactta

SEQ ID NO: 301398 - DNA, 25 bp, Artificial
  probe
  misc_feature (1)..(25): SEQ ID NO: 1667; WAN024CXZ; Start 224; Stop 248
ccttgaccatatctgctcaccttaa

SEQ ID NO: 301399 - DNA, 25 bp, Artificial
  probe
  misc_feature (1)..(25): SEQ ID NO: 1667; WAN024CXZ; Start 1151; Stop 1175
ctctaagtgaccaagaactagaaca

SEQ ID NO: 301400 - DNA, 25 bp, Artificial
  probe
  misc_feature (1)..(25): SEQ ID NO: 1667; WAN024CXZ; Start 1150; Stop 1174
cctctaagtgaccaagaactagaac

SEQ ID NO: 301401 - DNA, 25 bp, Artificial
  probe
  misc_feature (1)..(25): SEQ ID NO: 1667; WAN024CXZ; Start 63; Stop 87
tgttggtctagtcattcatatagct

SEQ ID NO: 301402 - DNA, 25 bp, Artificial
  probe
  misc_feature (1)..(25): SEQ ID NO: 1667; WAN024CXZ; Start 610; Stop 634
cagattaatggtatgtatgagcact

SEQ ID NO: 301403 - DNA, 25 bp, Artificial
  probe
  misc_feature (1)..(25): SEQ ID NO: 1667; WAN024CXZ; Start 1152; Stop 1176
tctaagtgaccaagaactagaacat

SEQ ID NO: 301404 - DNA, 25 bp, Artificial
  probe
  misc_feature (1)..(25): SEQ ID NO: 1667; WAN024CXZ; Start 963; Stop 987
agctcattcaataggtgttacaatt

SEQ ID NO: 301405 - DNA, 25 bp, Artificial
  probe
  misc_feature (1)..(25): SEQ ID NO: 1668; WAN024FWX; Start 155; Stop 179
agtataaggtaacgctgattgacat

SEQ ID NO: 301406 - DNA, 25 bp, Artificial
  probe
  misc_feature (1)..(25): SEQ ID NO: 1668; WAN024FWX; Start 1108; Stop 1132
ggagaggagaagttatatgagcaag

SEQ ID NO: 301407 - DNA, 25 bp, Artificial
  probe
  misc_feature (1)..(25): SEQ ID NO: 1668; WAN024FWX; Start 1109; Stop 1133
gagaggagaagttatatgagcaagt

SEQ ID NO: 301408 - DNA, 25 bp, Artificial
  probe
  misc_feature (1)..(25): SEQ ID NO: 1668; WAN024FWX; Start 156; Stop 180
gtataaggtaacgctgattgacatt

SEQ ID NO: 301409 - DNA, 25 bp, Artificial
  probe
  misc_feature (1)..(25): SEQ ID NO: 1668; WAN024FWX; Start 1107; Stop 1131
tggagaggagaagttatatgagcaa

SEQ ID NO: 301410 - DNA, 25 bp, Artificial
  probe
  misc_feature (1)..(25): SEQ ID NO: 1668; WAN024FWX; Start 1106; Stop 1130
ttggagaggagaagttatatgagca

SEQ ID NO: 301411 - DNA, 25 bp, Artificial
  probe
  misc_feature (1)..(25): SEQ ID NO: 1668; WAN024FWX; Start 1110; Stop 1134
agaggagaagttatatgagcaagtt

SEQ ID NO: 301412 - DNA, 25 bp, Artificial
  probe
  misc_feature (1)..(25): SEQ ID NO: 1668; WAN024FWX; Start 885; Stop 909
taactccgcacacaataccttacta

SEQ ID NO: 301413 - DNA, 25 bp, Artificial
  probe
  misc_feature (1)..(25): SEQ ID NO: 1668; WAN024FWX; Start 890; Stop 914
ccgcacacaataccttactagatat

SEQ ID NO: 301414 - DNA, 25 bp, Artificial
  probe
  misc_feature (1)..(25): SEQ ID NO: 1668; WAN024FWX; Start 1046; Stop 1070
tggaggctacatctgtaagtattct

SEQ ID NO: 301415 - DNA, 25 bp, Artificial
  probe
  misc_feature (1)..(25): SEQ ID NO: 1668; WAN024FWX; Start 889; Stop 913
tccgcacacaataccttactagata

SEQ ID NO: 301416 - DNA, 25 bp, Artificial
  probe
  misc_feature (1)..(25): SEQ ID NO: 1668; WAN024FWX; Start 1045; Stop 1069
atggaggctacatctgtaagtattc

SEQ ID NO: 301417 - DNA, 25 bp, Artificial
  probe
  misc_feature (1)..(25): SEQ ID NO: 1668; WAN024FWX; Start 1047; Stop 1071
ggaggctacatctgtaagtattctt

SEQ ID NO: 301418 - DNA, 25 bp, Artificial
  probe
  misc_feature (1)..(25): SEQ ID NO: 1668; WAN024FWX; Start 1112; Stop 1136
aggagaagttatatgagcaagttac

SEQ ID NO: 301419 - DNA, 25 bp, Artificial
  probe
  misc_feature (1)..(25): SEQ ID NO: 1668; WAN024FWX; Start 884; Stop 908
ttaactccgcacacaataccttact

SEQ ID NO: 301420 - DNA, 25 bp, Artificial
  probe
  misc_feature (1)..(25): SEQ ID NO: 1668; WAN024FWX; Start 99; Stop 123
ctccacagtaattaggctattcgta

SEQ ID NO: 301421 - DNA, 25 bp, Artificial
  probe
  misc_feature (1)..(25): SEQ ID NO: 1668; WAN024FWX; Start 1049; Stop 1073
aggctacatctgtaagtattcttct

SEQ ID NO: 301422 - DNA, 25 bp, Artificial
  probe
  misc_feature (1)..(25): SEQ ID NO: 1668; WAN024FWX; Start 150; Stop 174
ttcacagtataaggtaacgctgatt

SEQ ID NO: 301423 - DNA, 25 bp, Artificial
  probe
  misc_feature (1)..(25): SEQ ID NO: 1668; WAN024FWX; Start 97; Stop 121
ctctccacagtaattaggctattcg

SEQ ID NO: 301424 - DNA, 25 bp, Artificial
  probe
  misc_feature (1)..(25): SEQ ID NO: 1668; WAN024FWX; Start 1048; Stop 1072
gaggctacatctgtaagtattcttc

SEQ ID NO: 301425 - DNA, 25 bp, Artificial
  probe
  misc_feature (1)..(25): SEQ ID NO: 1668; WAN024FWX; Start 101; Stop 125
ccacagtaattaggctattcgtaac

SEQ ID NO: 301426 - DNA, 25 bp, Artificial
  probe
  misc_feature (1)..(25): SEQ ID NO: 1668; WAN024FWX; Start 100; Stop 124
tccacagtaattaggctattcgtaa

SEQ ID NO: 301427 - DNA, 25 bp, Artificial
  probe
  misc_feature (1)..(25): SEQ ID NO: 1668; WAN024FWX; Start 1111; Stop 1135
gaggagaagttatatgagcaagtta

SEQ ID NO: 301428 - DNA, 25 bp, Artificial
  probe
  misc_feature (1)..(25): SEQ ID NO: 1668; WAN024FWX; Start 154; Stop 178
cagtataaggtaacgctgattgaca

SEQ ID NO: 301429 - DNA, 25 bp, Artificial
  probe
  misc_feature (1)..(25): SEQ ID NO: 1668; WAN024FWX; Start 153; Stop 177
acagtataaggtaacgctgattgac

SEQ ID NO: 301430 - DNA, 25 bp, Artificial
  probe
  misc_feature (1)..(25): SEQ ID NO: 1668; WAN024FWX; Start 152; Stop 176
cacagtataaggtaacgctgattga

SEQ ID NO: 301431 - DNA, 25 bp, Artificial
  probe
  misc_feature (1)..(25): SEQ ID NO: 1668; WAN024FWX; Start 151; Stop 175
tcacagtataaggtaacgctgattg

SEQ ID NO: 301432 - DNA, 25 bp, Artificial
  probe
  misc_feature (1)..(25): SEQ ID NO: 1668; WAN024FWX; Start 888; Stop 912
ctccgcacacaataccttactagat

SEQ ID NO: 301433 - DNA, 25 bp, Artificial
  probe
  misc_feature (1)..(25): SEQ ID NO: 1668; WAN024FWX; Start 98; Stop 122
tctccacagtaattaggctattcgt

SEQ ID NO: 301434 - DNA, 25 bp, Artificial
  probe
  misc_feature (1)..(25): SEQ ID NO: 1668; WAN024FWX; Start 1113; Stop 1137
ggagaagttatatgagcaagttact

SEQ ID NO: 301435 - DNA, 25 bp, Artificial
  probe
  misc_feature (1)..(25): SEQ ID NO: 1668; WAN024FWX; Start 589; Stop 613
agtacagcgattatatgttatgtgc

SEQ ID NO: 301436 - DNA, 25 bp, Artificial
  probe
  misc_feature (1)..(25): SEQ ID NO: 1668; WAN024FWX; Start 96; Stop 120
actctccacagtaattaggctattc

SEQ ID NO: 301437 - DNA, 25 bp, Artificial
  probe
  misc_feature (1)..(25): SEQ ID NO: 1668; WAN024FWX; Start 904; Stop 928
ttactagatatacttgctcgaacgg

SEQ ID NO: 301438 - DNA, 25 bp, Artificial
  probe
  misc_feature (1)..(25): SEQ ID NO: 1669; WAN024ETQ; Start 211; Stop 235
attacgacaccagttctgattatga

SEQ ID NO: 301439 - DNA, 25 bp, Artificial
  probe
  misc_feature (1)..(25): SEQ ID NO: 1669; WAN024ETQ; Start 212; Stop 236
ttacgacaccagttctgattatgac

SEQ ID NO: 301440 - DNA, 25 bp, Artificial
  probe
  misc_feature (1)..(25): SEQ ID NO: 1669; WAN024ETQ; Start 210; Stop 234
aattacgacaccagttctgattatg

SEQ ID NO: 301441 - DNA, 25 bp, Artificial
  probe
  misc_feature (1)..(25): SEQ ID NO: 1669; WAN024ETQ; Start 208; Stop 232
ggaattacgacaccagttctgatta

SEQ ID NO: 301442 - DNA, 25 bp, Artificial
  probe
  misc_feature (1)..(25): SEQ ID NO: 1669; WAN024ETQ; Start 209; Stop 233
gaattacgacaccagttctgattat

SEQ ID NO: 301443 - DNA, 25 bp, Artificial
  probe
  misc_feature (1)..(25): SEQ ID NO: 1669; WAN024ETQ; Start 213; Stop 237
tacgacaccagttctgattatgact

SEQ ID NO: 301444 - DNA, 25 bp, Artificial
  probe
  misc_feature (1)..(25): SEQ ID NO: 1669; WAN024ETQ; Start 120; Stop 144
tgagagtggtgtctatgacttgatt

SEQ ID NO: 301445 - DNA, 25 bp, Artificial
  probe
  misc_feature (1)..(25): SEQ ID NO: 1669; WAN024ETQ; Start 222; Stop 246
agttctgattatgactgccaaggaa

SEQ ID NO: 301446 - DNA, 25 bp, Artificial
  probe
  misc_feature (1)..(25): SEQ ID NO: 1669; WAN024ETQ; Start 119; Stop 143
ctgagagtggtgtctatgacttgat

SEQ ID NO: 301447 - DNA, 25 bp, Artificial
  probe
  misc_feature (1)..(25): SEQ ID NO: 1669; WAN024ETQ; Start 425; Stop 449
aagttgaagatactcctgtcgaatt

SEQ ID NO: 301448 - DNA, 25 bp, Artificial
  probe
  misc_feature (1)..(25): SEQ ID NO: 1669; WAN024ETQ; Start 379; Stop 403
ttgacttatgggaatatcgtggtta

SEQ ID NO: 301449 - DNA, 25 bp, Artificial
  probe
  misc_feature (1)..(25): SEQ ID NO: 1669; WAN024ETQ; Start 285; Stop 309
ggatgattatctgaccaaacctttc

SEQ ID NO: 301450 - DNA, 25 bp, Artificial
  probe
  misc_feature (1)..(25): SEQ ID NO: 1669; WAN024ETQ; Start 378; Stop 402
cttgacttatgggaatatcgtggtt

SEQ ID NO: 301451 - DNA, 25 bp, Artificial
  probe
  misc_feature (1)..(25): SEQ ID NO: 1669; WAN024ETQ; Start 373; Stop 397
aacaccttgacttatgggaatatcg

SEQ ID NO: 301452 - DNA, 25 bp, Artificial
  probe
  misc_feature (1)..(25): SEQ ID NO: 1669; WAN024ETQ; Start 290; Stop 314
attatctgaccaaacctttctacct

SEQ ID NO: 301453 - DNA, 25 bp, Artificial
  probe
  misc_feature (1)..(25): SEQ ID NO: 1669; WAN024ETQ; Start 426; Stop 450
agttgaagatactcctgtcgaattg

SEQ ID NO: 301454 - DNA, 25 bp, Artificial
  probe
  misc_feature (1)..(25): SEQ ID NO: 1669; WAN024ETQ; Start 380; Stop 404
tgacttatgggaatatcgtggttaa

SEQ ID NO: 301455 - DNA, 25 bp, Artificial
  probe
  misc_feature (1)..(25): SEQ ID NO: 1669; WAN024ETQ; Start 289; Stop 313
gattatctgaccaaacctttctacc

SEQ ID NO: 301456 - DNA, 25 bp, Artificial
  probe
  misc_feature (1)..(25): SEQ ID NO: 1669; WAN024ETQ; Start 85; Stop 109
caggtatttgatggagaagaaggtc

SEQ ID NO: 301457 - DNA, 25 bp, Artificial
  probe
  misc_feature (1)..(25): SEQ ID NO: 1669; WAN024ETQ; Start 291; Stop 315
ttatctgaccaaacctttctaccta

SEQ ID NO: 301458 - DNA, 25 bp, Artificial
  probe
  misc_feature (1)..(25): SEQ ID NO: 1669; WAN024ETQ; Start 284; Stop 308
cggatgattatctgaccaaaccttt

SEQ ID NO: 301459 - DNA, 25 bp, Artificial
  probe
  misc_feature (1)..(25): SEQ ID NO: 1669; WAN024ETQ; Start 372; Stop 396
aaacaccttgacttatgggaatatc

SEQ ID NO: 301460 - DNA, 25 bp, Artificial
  probe
  misc_feature (1)..(25): SEQ ID NO: 1669; WAN024ETQ; Start 592; Stop 616
cgtaagaaattaaagggaaccactt

SEQ ID NO: 301461 - DNA, 25 bp, Artificial
  probe
  misc_feature (1)..(25): SEQ ID NO: 1669; WAN024ETQ; Start 591; Stop 615
ccgtaagaaattaaagggaaccact

SEQ ID NO: 301462 - DNA, 25 bp, Artificial
  probe
  misc_feature (1)..(25): SEQ ID NO: 1669; WAN024ETQ; Start 286; Stop 310
gatgattatctgaccaaacctttct

SEQ ID NO: 301463 - DNA, 25 bp, Artificial
  probe
  misc_feature (1)..(25): SEQ ID NO: 1669; WAN024ETQ; Start 224; Stop 248
ttctgattatgactgccaaggaaag

SEQ ID NO: 301464 - DNA, 25 bp, Artificial
  probe
  misc_feature (1)..(25): SEQ ID NO: 1669; WAN024ETQ; Start 86; Stop 110
aggtatttgatggagaagaaggtct

SEQ ID NO: 301465 - DNA, 25 bp, Artificial
  probe
  misc_feature (1)..(25): SEQ ID NO: 1669; WAN024ETQ; Start 292; Stop 316
tatctgaccaaacctttctacctag

SEQ ID NO: 301466 - DNA, 25 bp, Artificial
  probe
  misc_feature (1)..(25): SEQ ID NO: 1669; WAN024ETQ; Start 288; Stop 312
tgattatctgaccaaacctttctac

SEQ ID NO: 301467 - DNA, 25 bp, Artificial
  probe
  misc_feature (1)..(25): SEQ ID NO: 1669; WAN024ETQ; Start 374; Stop 398
acaccttgacttatgggaatatcgt

SEQ ID NO: 301468 - DNA, 25 bp, Artificial
  probe
  misc_feature (1)..(25): SEQ ID NO: 1669; WAN024ETQ; Start 428; Stop 452
ttgaagatactcctgtcgaattgct

SEQ ID NO: 301469 - DNA, 25 bp, Artificial
  probe
  misc_feature (1)..(25): SEQ ID NO: 1669; WAN024ETQ; Start 427; Stop 451
gttgaagatactcctgtcgaattgc

SEQ ID NO: 301470 - DNA, 25 bp, Artificial
  probe
  misc_feature (1)..(25): SEQ ID NO: 1669; WAN024ETQ; Start 421; Stop 445
gttaaagttgaagatactcctgtcg

SEQ ID NO: 301471 - DNA, 25 bp, Artificial
  probe
  misc_feature (1)..(25): SEQ ID NO: 1670; WAN024CGM; Start 167; Stop 191
aagaattactagatgccagactgac

SEQ ID NO: 301472 - DNA, 25 bp, Artificial
  probe
  misc_feature (1)..(25): SEQ ID NO: 1670; WAN024CGM; Start 270; Stop 294
agcacctattccacttaatactgat

SEQ ID NO: 301473 - DNA, 25 bp, Artificial
  probe
  misc_feature (1)..(25): SEQ ID NO: 1670; WAN024CGM; Start 423; Stop 447
cttgacgactggagtgtatagagat

SEQ ID NO: 301474 - DNA, 25 bp, Artificial
  probe
  misc_feature (1)..(25): SEQ ID NO: 1670; WAN024CGM; Start 169; Stop 193
gaattactagatgccagactgacag

SEQ ID NO: 301475 - DNA, 25 bp, Artificial
  probe
  misc_feature (1)..(25): SEQ ID NO: 1670; WAN024CGM; Start 267; Stop 291
tacagcacctattccacttaatact

SEQ ID NO: 301476 - DNA, 25 bp, Artificial
  probe
  misc_feature (1)..(25): SEQ ID NO: 1670; WAN024CGM; Start 424; Stop 448
ttgacgactggagtgtatagagatg

SEQ ID NO: 301477 - DNA, 25 bp, Artificial
  probe
  misc_feature (1)..(25): SEQ ID NO: 1670; WAN024CGM; Start 168; Stop 192
agaattactagatgccagactgaca

SEQ ID NO: 301478 - DNA, 25 bp, Artificial
  probe
  misc_feature (1)..(25): SEQ ID NO: 1670; WAN024CGM; Start 271; Stop 295
gcacctattccacttaatactgatt

SEQ ID NO: 301479 - DNA, 25 bp, Artificial
  probe
  misc_feature (1)..(25): SEQ ID NO: 1670; WAN024CGM; Start 266; Stop 290
ttacagcacctattccacttaatac

SEQ ID NO: 301480 - DNA, 25 bp, Artificial
  probe
  misc_feature (1)..(25): SEQ ID NO: 1670; WAN024CGM; Start 30; Stop 54
taagagtattcagagtatcattggc

SEQ ID NO: 301481 - DNA, 25 bp, Artificial
  probe
  misc_feature (1)..(25): SEQ ID NO: 1670; WAN024CGM; Start 269; Stop 293
cagcacctattccacttaatactga

SEQ ID NO: 301482 - DNA, 25 bp, Artificial
  probe
  misc_feature (1)..(25): SEQ ID NO: 1670; WAN024CGM; Start 268; Stop 292
acagcacctattccacttaatactg

SEQ ID NO: 301483 - DNA, 25 bp, Artificial
  probe
  misc_feature (1)..(25): SEQ ID NO: 1670; WAN024CGM; Start 425; Stop 449
tgacgactggagtgtatagagatgt

SEQ ID NO: 301484 - DNA, 25 bp, Artificial
  probe
  misc_feature (1)..(25): SEQ ID NO: 1670; WAN024CGM; Start 421; Stop 445
gacttgacgactggagtgtatagag

SEQ ID NO: 301485 - DNA, 25 bp, Artificial
  probe
  misc_feature (1)..(25): SEQ ID NO: 1670; WAN024CGM; Start 422; Stop 446
acttgacgactggagtgtatagaga

SEQ ID NO: 301486 - DNA, 25 bp, Artificial
  probe
  misc_feature (1)..(25): SEQ ID NO: 1670; WAN024CGM; Start 426; Stop 450
gacgactggagtgtatagagatgtc

SEQ ID NO: 301487 - DNA, 25 bp, Artificial
  probe
  misc_feature (1)..(25): SEQ ID NO: 1670; WAN024CGM; Start 171; Stop 195
attactagatgccagactgacagtt

SEQ ID NO: 301488 - DNA, 25 bp, Artificial
  probe
  misc_feature (1)..(25): SEQ ID NO: 1670; WAN024CGM; Start 170; Stop 194
aattactagatgccagactgacagt

SEQ ID NO: 301489 - DNA, 25 bp, Artificial
  probe
  misc_feature (1)..(25): SEQ ID NO: 1670; WAN024CGM; Start 401; Stop 425
tacacataaatgccctatacgactt

SEQ ID NO: 301490 - DNA, 25 bp, Artificial
  probe
  misc_feature (1)..(25): SEQ ID NO: 1670; WAN024CGM; Start 427; Stop 451
acgactggagtgtatagagatgtct

SEQ ID NO: 301491 - DNA, 25 bp, Artificial
  probe
  misc_feature (1)..(25): SEQ ID NO: 1670; WAN024CGM; Start 400; Stop 424
atacacataaatgccctatacgact

SEQ ID NO: 301492 - DNA, 25 bp, Artificial
  probe
  misc_feature (1)..(25): SEQ ID NO: 1670; WAN024CGM; Start 418; Stop 442
tacgacttgacgactggagtgtata

SEQ ID NO: 301493 - DNA, 25 bp, Artificial
  probe
  misc_feature (1)..(25): SEQ ID NO: 1670; WAN024CGM; Start 416; Stop 440
tatacgacttgacgactggagtgta

SEQ ID NO: 301494 - DNA, 25 bp, Artificial
  probe
  misc_feature (1)..(25): SEQ ID NO: 1670; WAN024CGM; Start 404; Stop 428
acataaatgccctatacgacttgac

SEQ ID NO: 301495 - DNA, 25 bp, Artificial
  probe
  misc_feature (1)..(25): SEQ ID NO: 1670; WAN024CGM; Start 403; Stop 427
cacataaatgccctatacgacttga

SEQ ID NO: 301496 - DNA, 25 bp, Artificial
  probe
  misc_feature (1)..(25): SEQ ID NO: 1670; WAN024CGM; Start 402; Stop 426
acacataaatgccctatacgacttg

SEQ ID NO: 301497 - DNA, 25 bp, Artificial
  probe
  misc_feature (1)..(25): SEQ ID NO: 1670; WAN024CGM; Start 399; Stop 423
catacacataaatgccctatacgac

SEQ ID NO: 301498 - DNA, 25 bp, Artificial
  probe
  misc_feature (1)..(25): SEQ ID NO: 1670; WAN024CGM; Start 428; Stop 452
cgactggagtgtatagagatgtctc

SEQ ID NO: 301499 - DNA, 25 bp, Artificial
  probe
  misc_feature (1)..(25): SEQ ID NO: 1670; WAN024CGM; Start 398; Stop 422
tcatacacataaatgccctatacga

SEQ ID NO: 301500 - DNA, 25 bp, Artificial
  probe
  misc_feature (1)..(25): SEQ ID NO: 1670; WAN024CGM; Start 397; Stop 421
ctcatacacataaatgccctatacg

SEQ ID NO: 301501 - DNA, 25 bp, Artificial
  probe
  misc_feature (1)..(25): SEQ ID NO: 1670; WAN024CGM; Start 166; Stop 190
aaagaattactagatgccagactga

SEQ ID NO: 301502 - DNA, 25 bp, Artificial
  probe
  misc_feature (1)..(25): SEQ ID NO: 1670; WAN024CGM; Start 209; Stop 233
ttgttcaaagacgctatcagataaa

SEQ ID NO: 301503 - DNA, 25 bp, Artificial
  probe
  misc_feature (1)..(25): SEQ ID NO: 1670; WAN024CGM; Start 350; Stop 374
atacagaaacctctatccaaaccca

SEQ ID NO: 301504 - DNA, 25 bp, Artificial
  probe
  misc_feature (1)..(25): SEQ ID NO: 1671; WAN024AZL; Start 519; Stop 543
ttgttcagcaagaggtattgatgac

SEQ ID NO: 301505 - DNA, 25 bp, Artificial
  probe
  misc_feature (1)..(25): SEQ ID NO: 1671; WAN024AZL; Start 12; Stop 36
tgaacgtgtacttgaattgattgaa

SEQ ID NO: 301506 - DNA, 25 bp, Artificial
  probe
  misc_feature (1)..(25): SEQ ID NO: 1671; WAN024AZL; Start 11; Stop 35
atgaacgtgtacttgaattgattga

SEQ ID NO: 301507 - DNA, 25 bp, Artificial
  probe
  misc_feature (1)..(25): SEQ ID NO: 1671; WAN024AZL; Start 10; Stop 34
gatgaacgtgtacttgaattgattg

SEQ ID NO: 301508 - DNA, 25 bp, Artificial
  probe
  misc_feature (1)..(25): SEQ ID NO: 1671; WAN024AZL; Start 612; Stop 636
aaccatcttactgattgatagttct

SEQ ID NO: 301509 - DNA, 25 bp, Artificial
  probe
  misc_feature (1)..(25): SEQ ID NO: 1671; WAN024AZL; Start 9; Stop 33
agatgaacgtgtacttgaattgatt

SEQ ID NO: 301510 - DNA, 25 bp, Artificial
  probe
  misc_feature (1)..(25): SEQ ID NO: 1671; WAN024AZL; Start 8; Stop 32
aagatgaacgtgtacttgaattgat

SEQ ID NO: 301511 - DNA, 25 bp, Artificial
  probe
  misc_feature (1)..(25): SEQ ID NO: 1671; WAN024AZL; Start 518; Stop 542
tttgttcagcaagaggtattgatga

SEQ ID NO: 301512 - DNA, 25 bp, Artificial
  probe
  misc_feature (1)..(25): SEQ ID NO: 1671; WAN024AZL; Start 591; Stop 615
tattattgacaaagcccatgaaacc

SEQ ID NO: 301513 - DNA, 25 bp, Artificial
  probe
  misc_feature (1)..(25): SEQ ID NO: 1671; WAN024AZL; Start 522; Stop 546
ttcagcaagaggtattgatgaccaa

SEQ ID NO: 301514 - DNA, 25 bp, Artificial
  probe
  misc_feature (1)..(25): SEQ ID NO: 1671; WAN024AZL; Start 380; Stop 404
cacaaaccctatctgaaactgttaa

SEQ ID NO: 301515 - DNA, 25 bp, Artificial
  probe
  misc_feature (1)..(25): SEQ ID NO: 1671; WAN024AZL; Start 605; Stop 629
cccatgaaaccatcttactgattga

SEQ ID NO: 301516 - DNA, 25 bp, Artificial
  probe
  misc_feature (1)..(25): SEQ ID NO: 1671; WAN024AZL; Start 322; Stop 346
tgtccctatctttctgaacttgata

SEQ ID NO: 301517 - DNA, 25 bp, Artificial
  probe
  misc_feature (1)..(25): SEQ ID NO: 1671; WAN024AZL; Start 606; Stop 630
ccatgaaaccatcttactgattgat

SEQ ID NO: 301518 - DNA, 25 bp, Artificial
  probe
  misc_feature (1)..(25): SEQ ID NO: 1671; WAN024AZL; Start 379; Stop 403
gcacaaaccctatctgaaactgtta

SEQ ID NO: 301519 - DNA, 25 bp, Artificial
  probe
  misc_feature (1)..(25): SEQ ID NO: 1671; WAN024AZL; Start 382; Stop 406
caaaccctatctgaaactgttaaag

SEQ ID NO: 301520 - DNA, 25 bp, Artificial
  probe
  misc_feature (1)..(25): SEQ ID NO: 1671; WAN024AZL; Start 523; Stop 547
tcagcaagaggtattgatgaccaat

SEQ ID NO: 301521 - DNA, 25 bp, Artificial
  probe
  misc_feature (1)..(25): SEQ ID NO: 1671; WAN024AZL; Start 613; Stop 637
accatcttactgattgatagttcta

SEQ ID NO: 301522 - DNA, 25 bp, Artificial
  probe
  misc_feature (1)..(25): SEQ ID NO: 1671; WAN024AZL; Start 592; Stop 616
attattgacaaagcccatgaaacca

SEQ ID NO: 301523 - DNA, 25 bp, Artificial
  probe
  misc_feature (1)..(25): SEQ ID NO: 1671; WAN024AZL; Start 416; Stop 440
aaatctttatcacatctggcgaggt

SEQ ID NO: 301524 - DNA, 25 bp, Artificial
  probe
  misc_feature (1)..(25): SEQ ID NO: 1671; WAN024AZL; Start 383; Stop 407
aaaccctatctgaaactgttaaaga

SEQ ID NO: 301525 - DNA, 25 bp, Artificial
  probe
  misc_feature (1)..(25): SEQ ID NO: 1671; WAN024AZL; Start 736; Stop 760
gaattatttgatggagaatgggttt

SEQ ID NO: 301526 - DNA, 25 bp, Artificial
  probe
  misc_feature (1)..(25): SEQ ID NO: 1671; WAN024AZL; Start 381; Stop 405
acaaaccctatctgaaactgttaaa

SEQ ID NO: 301527 - DNA, 25 bp, Artificial
  probe
  misc_feature (1)..(25): SEQ ID NO: 1671; WAN024AZL; Start 593; Stop 617
ttattgacaaagcccatgaaaccat

SEQ ID NO: 301528 - DNA, 25 bp, Artificial
  probe
  misc_feature (1)..(25): SEQ ID NO: 1671; WAN024AZL; Start 536; Stop 560
ttgatgaccaatatgtttatgaagc

SEQ ID NO: 301529 - DNA, 25 bp, Artificial
  probe
  misc_feature (1)..(25): SEQ ID NO: 1671; WAN024AZL; Start 174; Stop 198
gtcctctatgaacacaattgaactt

SEQ ID NO: 301530 - DNA, 25 bp, Artificial
  probe
  misc_feature (1)..(25): SEQ ID NO: 1671; WAN024AZL; Start 737; Stop 761
aattatttgatggagaatgggtttc

SEQ ID NO: 301531 - DNA, 25 bp, Artificial
  probe
  misc_feature (1)..(25): SEQ ID NO: 1671; WAN024AZL; Start 521; Stop 545
gttcagcaagaggtattgatgacca

SEQ ID NO: 301532 - DNA, 25 bp, Artificial
  probe
  misc_feature (1)..(25): SEQ ID NO: 1671; WAN024AZL; Start 520; Stop 544
tgttcagcaagaggtattgatgacc

SEQ ID NO: 301533 - DNA, 25 bp, Artificial
  probe
  misc_feature (1)..(25): SEQ ID NO: 1671; WAN024AZL; Start 392; Stop 416
ctgaaactgttaaagatagctccaa

SEQ ID NO: 301534 - DNA, 25 bp, Artificial
  probe
  misc_feature (1)..(25): SEQ ID NO: 1671; WAN024AZL; Start 590; Stop 614
atattattgacaaagcccatgaaac

SEQ ID NO: 301535 - DNA, 25 bp, Artificial
  probe
  misc_feature (1)..(25): SEQ ID NO: 1671; WAN024AZL; Start 587; Stop 611
agaatattattgacaaagcccatga

SEQ ID NO: 301536 - DNA, 25 bp, Artificial
  probe
  misc_feature (1)..(25): SEQ ID NO: 1671; WAN024AZL; Start 391; Stop 415
tctgaaactgttaaagatagctcca

SEQ ID NO: 301537 - DNA, 25 bp, Artificial
  probe
  misc_feature (1)..(25): SEQ ID NO: 1672; WAN024GJD; Start 5; Stop 29
taaacgaagaaataagcaaggaagc

SEQ ID NO: 301538 - DNA, 25 bp, Artificial
  probe
  misc_feature (1)..(25): SEQ ID NO: 1672; WAN024GJD; Start 37; Stop 61
gcagcacaaaccataatatcataca

SEQ ID NO: 301539 - DNA, 25 bp, Artificial
  probe
  misc_feature (1)..(25): SEQ ID NO: 1672; WAN024GJD; Start 34; Stop 58
caagcagcacaaaccataatatcat

SEQ ID NO: 301540 - DNA, 25 bp, Artificial
  probe
  misc_feature (1)..(25): SEQ ID NO: 1672; WAN024GJD; Start 36; Stop 60
agcagcacaaaccataatatcatac

SEQ ID NO: 301541 - DNA, 25 bp, Artificial
  probe
  misc_feature (1)..(25): SEQ ID NO: 1672; WAN024GJD; Start 32; Stop 56
gtcaagcagcacaaaccataatatc

SEQ ID NO: 301542 - DNA, 25 bp, Artificial
  probe
  misc_feature (1)..(25): SEQ ID NO: 1672; WAN024GJD; Start 33; Stop 57
tcaagcagcacaaaccataatatca

SEQ ID NO: 301543 - DNA, 25 bp, Artificial
  probe
  misc_feature (1)..(25): SEQ ID NO: 1672; WAN024GJD; Start 358; Stop 382
tttaagcaagtcatagccaaggaaa

SEQ ID NO: 301544 - DNA, 25 bp, Artificial
  probe
  misc_feature (1)..(25): SEQ ID NO: 1672; WAN024GJD; Start 153; Stop 177
aagtcttatgggcgatgaaatgaaa

SEQ ID NO: 301545 - DNA, 25 bp, Artificial
  probe
  misc_feature (1)..(25): SEQ ID NO: 1672; WAN024GJD; Start 152; Stop 176
aaagtcttatgggcgatgaaatgaa

SEQ ID NO: 301546 - DNA, 25 bp, Artificial
  probe
  misc_feature (1)..(25): SEQ ID NO: 1672; WAN024GJD; Start 2; Stop 26
tgataaacgaagaaataagcaagga

SEQ ID NO: 301547 - DNA, 25 bp, Artificial
  probe
  misc_feature (1)..(25): SEQ ID NO: 1672; WAN024GJD; Start 35; Stop 59
aagcagcacaaaccataatatcata

SEQ ID NO: 301548 - DNA, 25 bp, Artificial
  probe
  misc_feature (1)..(25): SEQ ID NO: 1672; WAN024GJD; Start 39; Stop 63
agcacaaaccataatatcatacaca

SEQ ID NO: 301549 - DNA, 25 bp, Artificial
  probe
  misc_feature (1)..(25): SEQ ID NO: 1672; WAN024GJD; Start 507; Stop 531
agatatgaccagagaaatcctaact

SEQ ID NO: 301550 - DNA, 25 bp, Artificial
  probe
  misc_feature (1)..(25): SEQ ID NO: 1672; WAN024GJD; Start 357; Stop 381
ctttaagcaagtcatagccaaggaa

SEQ ID NO: 301551 - DNA, 25 bp, Artificial
  probe
  misc_feature (1)..(25): SEQ ID NO: 1672; WAN024GJD; Start 38; Stop 62
cagcacaaaccataatatcatacac

SEQ ID NO: 301552 - DNA, 25 bp, Artificial
  probe
  misc_feature (1)..(25): SEQ ID NO: 1672; WAN024GJD; Start 6; Stop 30
aaacgaagaaataagcaaggaagca

SEQ ID NO: 301553 - DNA, 25 bp, Artificial
  probe
  misc_feature (1)..(25): SEQ ID NO: 1672; WAN024GJD; Start 1; Stop 25
atgataaacgaagaaataagcaagg

SEQ ID NO: 301554 - DNA, 25 bp, Artificial
  probe
  misc_feature (1)..(25): SEQ ID NO: 1672; WAN024GJD; Start 40; Stop 64
gcacaaaccataatatcatacacaa

SEQ ID NO: 301555 - DNA, 25 bp, Artificial
  probe
  misc_feature (1)..(25): SEQ ID NO: 1672; WAN024GJD; Start 10; Stop 34
gaagaaataagcaaggaagcaggtc

SEQ ID NO: 301556 - DNA, 25 bp, Artificial
  probe
  misc_feature (1)..(25): SEQ ID NO: 1672; WAN024GJD; Start 7; Stop 31
aacgaagaaataagcaaggaagcag

SEQ ID NO: 301557 - DNA, 25 bp, Artificial
  probe
  misc_feature (1)..(25): SEQ ID NO: 1672; WAN024GJD; Start 4; Stop 28
ataaacgaagaaataagcaaggaag

SEQ ID NO: 301558 - DNA, 25 bp, Artificial
  probe
  misc_feature (1)..(25): SEQ ID NO: 1672; WAN024GJD; Start 3; Stop 27
gataaacgaagaaataagcaaggaa

SEQ ID NO: 301559 - DNA, 25 bp, Artificial
  probe
  misc_feature (1)..(25): SEQ ID NO: 1672; WAN024GJD; Start 506; Stop 530
aagatatgaccagagaaatcctaac

SEQ ID NO: 301560 - DNA, 25 bp, Artificial
  probe
  misc_feature (1)..(25): SEQ ID NO: 1672; WAN024GJD; Start 13; Stop 37
gaaataagcaaggaagcaggtcaag

SEQ ID NO: 301561 - DNA, 25 bp, Artificial
  probe
  misc_feature (1)..(25): SEQ ID NO: 1672; WAN024GJD; Start 183; Stop 207
agacctctacaagaaaggacaacta

SEQ ID NO: 301562 - DNA, 25 bp, Artificial
  probe
  misc_feature (1)..(25): SEQ ID NO: 1672; WAN024GJD; Start 181; Stop 205
aaagacctctacaagaaaggacaac

SEQ ID NO: 301563 - DNA, 25 bp, Artificial
  probe
  misc_feature (1)..(25): SEQ ID NO: 1672; WAN024GJD; Start 265; Stop 289
cttggagtaagtttctcagtaatga

SEQ ID NO: 301564 - DNA, 25 bp, Artificial
  probe
  misc_feature (1)..(25): SEQ ID NO: 1672; WAN024GJD; Start 184; Stop 208
gacctctacaagaaaggacaactag

SEQ ID NO: 301565 - DNA, 25 bp, Artificial
  probe
  misc_feature (1)..(25): SEQ ID NO: 1672; WAN024GJD; Start 186; Stop 210
cctctacaagaaaggacaactagaa

SEQ ID NO: 301566 - DNA, 25 bp, Artificial
  probe
  misc_feature (1)..(25): SEQ ID NO: 1672; WAN024GJD; Start 215; Stop 239
taagcatagatcaaatcgacctcaa

SEQ ID NO: 301567 - DNA, 25 bp, Artificial
  probe
  misc_feature (1)..(25): SEQ ID NO: 1672; WAN024GJD; Start 222; Stop 246
agatcaaatcgacctcaaagactta

SEQ ID NO: 301568 - DNA, 25 bp, Artificial
  probe
  misc_feature (1)..(25): SEQ ID NO: 1672; WAN024GJD; Start 221; Stop 245
tagatcaaatcgacctcaaagactt

SEQ ID NO: 301569 - DNA, 25 bp, Artificial
  probe
  misc_feature (1)..(25): SEQ ID NO: 1672; WAN024GJD; Start 214; Stop 238
ataagcatagatcaaatcgacctca

SEQ ID NO: 301570 - DNA, 25 bp, Artificial
  probe
  misc_feature (1)..(25): SEQ ID NO: 1673; WAN024G97; Start 1; Stop 25
atgataaagaaaggaaagggctgtt

SEQ ID NO: 301571 - DNA, 25 bp, Artificial
  probe
  misc_feature (1)..(25): SEQ ID NO: 1673; WAN024G97; Start 2; Stop 26
tgataaagaaaggaaagggctgttt

SEQ ID NO: 301572 - DNA, 25 bp, Artificial
  probe
  misc_feature (1)..(25): SEQ ID NO: 1673; WAN024G97; Start 6; Stop 30
aaagaaaggaaagggctgttttatg

SEQ ID NO: 301573 - DNA, 25 bp, Artificial
  probe
  misc_feature (1)..(25): SEQ ID NO: 1673; WAN024G97; Start 3; Stop 27
gataaagaaaggaaagggctgtttt

SEQ ID NO: 301574 - DNA, 25 bp, Artificial
  probe
  misc_feature (1)..(25): SEQ ID NO: 1673; WAN024G97; Start 252; Stop 276
tgatggatttcacgtatgtaatgat

SEQ ID NO: 301575 - DNA, 25 bp, Artificial
  probe
  misc_feature (1)..(25): SEQ ID NO: 1673; WAN024G97; Start 7; Stop 31
aagaaaggaaagggctgttttatgg

SEQ ID NO: 301576 - DNA, 25 bp, Artificial
  probe
  misc_feature (1)..(25): SEQ ID NO: 1673; WAN024G97; Start 5; Stop 29
taaagaaaggaaagggctgttttat

SEQ ID NO: 301577 - DNA, 25 bp, Artificial
  probe
  misc_feature (1)..(25): SEQ ID NO: 1673; WAN024G97; Start 4; Stop 28
ataaagaaaggaaagggctgtttta

SEQ ID NO: 301578 - DNA, 25 bp, Artificial
  probe
  misc_feature (1)..(25): SEQ ID NO: 1673; WAN024G97; Start 253; Stop 277
gatggatttcacgtatgtaatgatt

SEQ ID NO: 301579 - DNA, 25 bp, Artificial
  probe
  misc_feature (1)..(25): SEQ ID NO: 1673; WAN024G97; Start 9; Stop 33
gaaaggaaagggctgttttatggac

SEQ ID NO: 301580 - DNA, 25 bp, Artificial
  probe
  misc_feature (1)..(25): SEQ ID NO: 1673; WAN024G97; Start 8; Stop 32
agaaaggaaagggctgttttatgga

SEQ ID NO: 301581 - DNA, 25 bp, Artificial
  probe
  misc_feature (1)..(25): SEQ ID NO: 1673; WAN024G97; Start 254; Stop 278
atggatttcacgtatgtaatgattt

SEQ ID NO: 301582 - DNA, 25 bp, Artificial
  probe
  misc_feature (1)..(25): SEQ ID NO: 1673; WAN024G97; Start 13; Stop 37
ggaaagggctgttttatggacaaaa

SEQ ID NO: 301583 - DNA, 25 bp, Artificial
  probe
  misc_feature (1)..(25): SEQ ID NO: 1673; WAN024G97; Start 12; Stop 36
aggaaagggctgttttatggacaaa

SEQ ID NO: 301584 - DNA, 25 bp, Artificial
  probe
  misc_feature (1)..(25): SEQ ID NO: 1673; WAN024G97; Start 11; Stop 35
aaggaaagggctgttttatggacaa

SEQ ID NO: 301585 - DNA, 25 bp, Artificial
  probe
  misc_feature (1)..(25): SEQ ID NO: 1673; WAN024G97; Start 10; Stop 34
aaaggaaagggctgttttatggaca

SEQ ID NO: 301586 - DNA, 25 bp, Artificial
  probe
  misc_feature (1)..(25): SEQ ID NO: 1673; WAN024G97; Start 41; Stop 65
aattatttgacgcgctggatgattt

SEQ ID NO: 301587 - DNA, 25 bp, Artificial
  probe
  misc_feature (1)..(25): SEQ ID NO: 1673; WAN024G97; Start 40; Stop 64
gaattatttgacgcgctggatgatt

SEQ ID NO: 301588 - DNA, 25 bp, Artificial
  probe
  misc_feature (1)..(25): SEQ ID NO: 1673; WAN024G97; Start 37; Stop 61
aaagaattatttgacgcgctggatg

SEQ ID NO: 301589 - DNA, 25 bp, Artificial
  probe
  misc_feature (1)..(25): SEQ ID NO: 1673; WAN024G97; Start 251; Stop 275
gtgatggatttcacgtatgtaatga

SEQ ID NO: 301590 - DNA, 25 bp, Artificial
  probe
  misc_feature (1)..(25): SEQ ID NO: 1673; WAN024G97; Start 255; Stop 279
tggatttcacgtatgtaatgatttt

SEQ ID NO: 301591 - DNA, 25 bp, Artificial
  probe
  misc_feature (1)..(25): SEQ ID NO: 1673; WAN024G97; Start 39; Stop 63
agaattatttgacgcgctggatgat

SEQ ID NO: 301592 - DNA, 25 bp, Artificial
  probe
  misc_feature (1)..(25): SEQ ID NO: 1673; WAN024G97; Start 38; Stop 62
aagaattatttgacgcgctggatga

SEQ ID NO: 301593 - DNA, 25 bp, Artificial
  probe
  misc_feature (1)..(25): SEQ ID NO: 1673; WAN024G97; Start 36; Stop 60
aaaagaattatttgacgcgctggat

SEQ ID NO: 301594 - DNA, 25 bp, Artificial
  probe
  misc_feature (1)..(25): SEQ ID NO: 1673; WAN024G97; Start 42; Stop 66
attatttgacgcgctggatgatttt

SEQ ID NO: 301595 - DNA, 25 bp, Artificial
  probe
  misc_feature (1)..(25): SEQ ID NO: 1673; WAN024G97; Start 277; Stop 301
ttttatggacaacgtcgagagcagg

SEQ ID NO: 301596 - DNA, 25 bp, Artificial
  probe
  misc_feature (1)..(25): SEQ ID NO: 1674; WAN024GLS; Start 819; Stop 843
ctataatgtaggtgtcggttcatct

SEQ ID NO: 301597 - DNA, 25 bp, Artificial
  probe
  misc_feature (1)..(25): SEQ ID NO: 1674; WAN024GLS; Start 821; Stop 845
ataatgtaggtgtcggttcatcttg

SEQ ID NO: 301598 - DNA, 25 bp, Artificial
  probe
  misc_feature (1)..(25): SEQ ID NO: 1674; WAN024GLS; Start 820; Stop 844
tataatgtaggtgtcggttcatctt

SEQ ID NO: 301599 - DNA, 25 bp, Artificial
  probe
  misc_feature (1)..(25): SEQ ID NO: 1674; WAN024GLS; Start 397; Stop 421
aacacagagcattcttataccttcc

SEQ ID NO: 301600 - DNA, 25 bp, Artificial
  probe
  misc_feature (1)..(25): SEQ ID NO: 1674; WAN024GLS; Start 399; Stop 423
cacagagcattcttataccttccac

SEQ ID NO: 301601 - DNA, 25 bp, Artificial
  probe
  misc_feature (1)..(25): SEQ ID NO: 1674; WAN024GLS; Start 398; Stop 422
acacagagcattcttataccttcca

SEQ ID NO: 301602 - DNA, 25 bp, Artificial
  probe
  misc_feature (1)..(25): SEQ ID NO: 1674; WAN024GLS; Start 532; Stop 556
gtagcgaccatcatagaagatcatc

SEQ ID NO: 301603 - DNA, 25 bp, Artificial
  probe
  misc_feature (1)..(25): SEQ ID NO: 1674; WAN024GLS; Start 294; Stop 318
tcaatacattgtcacgccagataat

SEQ ID NO: 301604 - DNA, 25 bp, Artificial
  probe
  misc_feature (1)..(25): SEQ ID NO: 1674; WAN024GLS; Start 293; Stop 317
atcaatacattgtcacgccagataa

SEQ ID NO: 301605 - DNA, 25 bp, Artificial
  probe
  misc_feature (1)..(25): SEQ ID NO: 1674; WAN024GLS; Start 292; Stop 316
aatcaatacattgtcacgccagata

SEQ ID NO: 301606 - DNA, 25 bp, Artificial
  probe
  misc_feature (1)..(25): SEQ ID NO: 1674; WAN024GLS; Start 533; Stop 557
tagcgaccatcatagaagatcatct

SEQ ID NO: 301607 - DNA, 25 bp, Artificial
  probe
  misc_feature (1)..(25): SEQ ID NO: 1674; WAN024GLS; Start 541; Stop 565
atcatagaagatcatctggtgaagg

SEQ ID NO: 301608 - DNA, 25 bp, Artificial
  probe
  misc_feature (1)..(25): SEQ ID NO: 1674; WAN024GLS; Start 540; Stop 564
catcatagaagatcatctggtgaag

SEQ ID NO: 301609 - DNA, 25 bp, Artificial
  probe
  misc_feature (1)..(25): SEQ ID NO: 1674; WAN024GLS; Start 822; Stop 846
taatgtaggtgtcggttcatcttgg

SEQ ID NO: 301610 - DNA, 25 bp, Artificial
  probe
  misc_feature (1)..(25): SEQ ID NO: 1674; WAN024GLS; Start 400; Stop 424
acagagcattcttataccttccacg

SEQ ID NO: 301611 - DNA, 25 bp, Artificial
  probe
  misc_feature (1)..(25): SEQ ID NO: 1674; WAN024GLS; Start 531; Stop 555
cgtagcgaccatcatagaagatcat

SEQ ID NO: 301612 - DNA, 25 bp, Artificial
  probe
  misc_feature (1)..(25): SEQ ID NO: 1674; WAN024GLS; Start 534; Stop 558
agcgaccatcatagaagatcatctg

SEQ ID NO: 301613 - DNA, 25 bp, Artificial
  probe
  misc_feature (1)..(25): SEQ ID NO: 1674; WAN024GLS; Start 539; Stop 563
ccatcatagaagatcatctggtgaa

SEQ ID NO: 301614 - DNA, 25 bp, Artificial
  probe
  misc_feature (1)..(25): SEQ ID NO: 1674; WAN024GLS; Start 90; Stop 114
tatgattggagtggctttagaagag

SEQ ID NO: 301615 - DNA, 25 bp, Artificial
  probe
  misc_feature (1)..(25): SEQ ID NO: 1674; WAN024GLS; Start 89; Stop 113
ctatgattggagtggctttagaaga

SEQ ID NO: 301616 - DNA, 25 bp, Artificial
  probe
  misc_feature (1)..(25): SEQ ID NO: 1674; WAN024GLS; Start 295; Stop 319
caatacattgtcacgccagataatg

SEQ ID NO: 301617 - DNA, 25 bp, Artificial
  probe
  misc_feature (1)..(25): SEQ ID NO: 1674; WAN024GLS; Start 103; Stop 127
gctttagaagagtctccaaccttaa

SEQ ID NO: 301618 - DNA, 25 bp, Artificial
  probe
  misc_feature (1)..(25): SEQ ID NO: 1674; WAN024GLS; Start 570; Stop 594
cattgatattctggatgtgcgtttc

SEQ ID NO: 301619 - DNA, 25 bp, Artificial
  probe
  misc_feature (1)..(25): SEQ ID NO: 1674; WAN024GLS; Start 144; Stop 168
gcacgatatcacgccttataatatt

SEQ ID NO: 301620 - DNA, 25 bp, Artificial
  probe
  misc_feature (1)..(25): SEQ ID NO: 1674; WAN024GLS; Start 396; Stop 420
aaacacagagcattcttataccttc

SEQ ID NO: 301621 - DNA, 25 bp, Artificial
  probe
  misc_feature (1)..(25): SEQ ID NO: 1674; WAN024GLS; Start 704; Stop 728
atcaggttgtctatggcaaatcatt

SEQ ID NO: 301622 - DNA, 25 bp, Artificial
  probe
  misc_feature (1)..(25): SEQ ID NO: 1674; WAN024GLS; Start 703; Stop 727
aatcaggttgtctatggcaaatcat

SEQ ID NO: 301623 - DNA, 25 bp, Artificial
  probe
  misc_feature (1)..(25): SEQ ID NO: 1674; WAN024GLS; Start 352; Stop 376
attgtagccattcgtgagatttctg

SEQ ID NO: 301624 - DNA, 25 bp, Artificial
  probe
  misc_feature (1)..(25): SEQ ID NO: 1674; WAN024GLS; Start 351; Stop 375
cattgtagccattcgtgagatttct

SEQ ID NO: 301625 - DNA, 25 bp, Artificial
  probe
  misc_feature (1)..(25): SEQ ID NO: 1674; WAN024GLS; Start 143; Stop 167
cgcacgatatcacgccttataatat

SEQ ID NO: 301626 - DNA, 25 bp, Artificial
  probe
  misc_feature (1)..(25): SEQ ID NO: 1674; WAN024GLS; Start 401; Stop 425
cagagcattcttataccttccacgg

SEQ ID NO: 301627 - DNA, 25 bp, Artificial
  probe
  misc_feature (1)..(25): SEQ ID NO: 1674; WAN024GLS; Start 702; Stop 726
aaatcaggttgtctatggcaaatca

SEQ ID NO: 301628 - DNA, 25 bp, Artificial
  probe
  misc_feature (1)..(25): SEQ ID NO: 1674; WAN024GLS; Start 705; Stop 729
tcaggttgtctatggcaaatcattt

SEQ ID NO: 301629 - DNA, 25 bp, Artificial
  probe
  misc_feature (1)..(25): SEQ ID NO: 1675; WAN024G7G; Start 91; Stop 115
aaagacaaactaagacagaaaggtt

SEQ ID NO: 301630 - DNA, 25 bp, Artificial
  probe
  misc_feature (1)..(25): SEQ ID NO: 1675; WAN024G7G; Start 90; Stop 114
taaagacaaactaagacagaaaggt

SEQ ID NO: 301631 - DNA, 25 bp, Artificial
  probe
  misc_feature (1)..(25): SEQ ID NO: 1675; WAN024G7G; Start 20; Stop 44
gatacatggaaagcagtggtaagac

SEQ ID NO: 301632 - DNA, 25 bp, Artificial
  probe
  misc_feature (1)..(25): SEQ ID NO: 1675; WAN024G7G; Start 19; Stop 43
agatacatggaaagcagtggtaaga

SEQ ID NO: 301633 - DNA, 25 bp, Artificial
  probe
  misc_feature (1)..(25): SEQ ID NO: 1675; WAN024G7G; Start 18; Stop 42
cagatacatggaaagcagtggtaag

SEQ ID NO: 301634 - DNA, 25 bp, Artificial
  probe
  misc_feature (1)..(25): SEQ ID NO: 1675; WAN024G7G; Start 28; Stop 52
gaaagcagtggtaagacctatcaaa

SEQ ID NO: 301635 - DNA, 25 bp, Artificial
  probe
  misc_feature (1)..(25): SEQ ID NO: 1675; WAN024G7G; Start 76; Stop 100
tggtatgaagaagataaagacaaac

SEQ ID NO: 301636 - DNA, 25 bp, Artificial
  probe
  misc_feature (1)..(25): SEQ ID NO: 1675; WAN024G7G; Start 89; Stop 113
ataaagacaaactaagacagaaagg

SEQ ID NO: 301637 - DNA, 25 bp, Artificial
  probe
  misc_feature (1)..(25): SEQ ID NO: 1675; WAN024G7G; Start 77; Stop 101
ggtatgaagaagataaagacaaact

SEQ ID NO: 301638 - DNA, 25 bp, Artificial
  probe
  misc_feature (1)..(25): SEQ ID NO: 1675; WAN024G7G; Start 25; Stop 49
atggaaagcagtggtaagacctatc

SEQ ID NO: 301639 - DNA, 25 bp, Artificial
  probe
  misc_feature (1)..(25): SEQ ID NO: 1675; WAN024G7G; Start 85; Stop 109
gaagataaagacaaactaagacaga

SEQ ID NO: 301640 - DNA, 25 bp, Artificial
  probe
  misc_feature (1)..(25): SEQ ID NO: 1675; WAN024G7G; Start 92; Stop 116
aagacaaactaagacagaaaggttt

SEQ ID NO: 301641 - DNA, 25 bp, Artificial
  probe
  misc_feature (1)..(25): SEQ ID NO: 1675; WAN024G7G; Start 27; Stop 51
ggaaagcagtggtaagacctatcaa

SEQ ID NO: 301642 - DNA, 25 bp, Artificial
  probe
  misc_feature (1)..(25): SEQ ID NO: 1675; WAN024G7G; Start 84; Stop 108
agaagataaagacaaactaagacag

SEQ ID NO: 301643 - DNA, 25 bp, Artificial
  probe
  misc_feature (1)..(25): SEQ ID NO: 1675; WAN024G7G; Start 127; Stop 151
atgaattatgatgtaggagaatctt

SEQ ID NO: 301644 - DNA, 25 bp, Artificial
  probe
  misc_feature (1)..(25): SEQ ID NO: 1675; WAN024G7G; Start 126; Stop 150
aatgaattatgatgtaggagaatct

SEQ ID NO: 301645 - DNA, 25 bp, Artificial
  probe
  misc_feature (1)..(25): SEQ ID NO: 1675; WAN024G7G; Start 38; Stop 62
gtaagacctatcaaaaccactatgt

SEQ ID NO: 301646 - DNA, 25 bp, Artificial
  probe
  misc_feature (1)..(25): SEQ ID NO: 1675; WAN024G7G; Start 93; Stop 117
agacaaactaagacagaaaggttta

SEQ ID NO: 301647 - DNA, 25 bp, Artificial
  probe
  misc_feature (1)..(25): SEQ ID NO: 1675; WAN024G7G; Start 24; Stop 48
catggaaagcagtggtaagacctat

SEQ ID NO: 301648 - DNA, 25 bp, Artificial
  probe
  misc_feature (1)..(25): SEQ ID NO: 1675; WAN024G7G; Start 75; Stop 99
atggtatgaagaagataaagacaaa

SEQ ID NO: 301649 - DNA, 25 bp, Artificial
  probe
  misc_feature (1)..(25): SEQ ID NO: 1675; WAN024G7G; Start 74; Stop 98
aatggtatgaagaagataaagacaa

SEQ ID NO: 301650 - DNA, 25 bp, Artificial
  probe
  misc_feature (1)..(25): SEQ ID NO: 1675; WAN024G7G; Start 73; Stop 97
aaatggtatgaagaagataaagaca

SEQ ID NO: 301651 - DNA, 25 bp, Artificial
  probe
  misc_feature (1)..(25): SEQ ID NO: 1675; WAN024G7G; Start 21; Stop 45
atacatggaaagcagtggtaagacc

SEQ ID NO: 301652 - DNA, 25 bp, Artificial
  probe
  misc_feature (1)..(25): SEQ ID NO: 1675; WAN024G7G; Start 17; Stop 41
ccagatacatggaaagcagtggtaa

SEQ ID NO: 301653 - DNA, 25 bp, Artificial
  probe
  misc_feature (1)..(25): SEQ ID NO: 1675; WAN024G7G; Start 87; Stop 111
agataaagacaaactaagacagaaa

SEQ ID NO: 301654 - DNA, 25 bp, Artificial
  probe
  misc_feature (1)..(25): SEQ ID NO: 1675; WAN024G7G; Start 86; Stop 110
aagataaagacaaactaagacagaa

SEQ ID NO: 301655 - DNA, 25 bp, Artificial
  probe
  misc_feature (1)..(25): SEQ ID NO: 1675; WAN024G7G; Start 83; Stop 107
aagaagataaagacaaactaagaca

SEQ ID NO: 301656 - DNA, 25 bp, Artificial
  probe
  misc_feature (1)..(25): SEQ ID NO: 1675; WAN024G7G; Start 43; Stop 67
acctatcaaaaccactatgtgacaa

SEQ ID NO: 301657 - DNA, 25 bp, Artificial
  probe
  misc_feature (1)..(25): SEQ ID NO: 1675; WAN024G7G; Start 88; Stop 112
gataaagacaaactaagacagaaag

SEQ ID NO: 301658 - DNA, 25 bp, Artificial
  probe
  misc_feature (1)..(25): SEQ ID NO: 1675; WAN024G7G; Start 41; Stop 65
agacctatcaaaaccactatgtgac

SEQ ID NO: 301659 - DNA, 25 bp, Artificial
  probe
  misc_feature (1)..(25): SEQ ID NO: 1675; WAN024G7G; Start 42; Stop 66
gacctatcaaaaccactatgtgaca

SEQ ID NO: 301660 - DNA, 25 bp, Artificial
  probe
  misc_feature (1)..(25): SEQ ID NO: 1675; WAN024G7G; Start 40; Stop 64
aagacctatcaaaaccactatgtga

SEQ ID NO: 301661 - DNA, 25 bp, Artificial
  probe
  misc_feature (1)..(25): SEQ ID NO: 1675; WAN024G7G; Start 26; Stop 50
tggaaagcagtggtaagacctatca

SEQ ID NO: 301662 - DNA, 25 bp, Artificial
  probe
  misc_feature (1)..(25): SEQ ID NO: 1676; WAN024C6N; Start 900; Stop 924
tcttgccttctcattgacagatatt

SEQ ID NO: 301663 - DNA, 25 bp, Artificial
  probe
  misc_feature (1)..(25): SEQ ID NO: 1676; WAN024C6N; Start 899; Stop 923
ttcttgccttctcattgacagatat

SEQ ID NO: 301664 - DNA, 25 bp, Artificial
  probe
  misc_feature (1)..(25): SEQ ID NO: 1676; WAN024C6N; Start 898; Stop 922
attcttgccttctcattgacagata

SEQ ID NO: 301665 - DNA, 25 bp, Artificial
  probe
  misc_feature (1)..(25): SEQ ID NO: 1676; WAN024C6N; Start 897; Stop 921
cattcttgccttctcattgacagat

SEQ ID NO: 301666 - DNA, 25 bp, Artificial
  probe
  misc_feature (1)..(25): SEQ ID NO: 1676; WAN024C6N; Start 1209; Stop 1233
tacagctccaatcttgattatcgtt

SEQ ID NO: 301667 - DNA, 25 bp, Artificial
  probe
  misc_feature (1)..(25): SEQ ID NO: 1676; WAN024C6N; Start 707; Stop 731
tctctatcttgacaacaactgttct

SEQ ID NO: 301668 - DNA, 25 bp, Artificial
  probe
  misc_feature (1)..(25): SEQ ID NO: 1676; WAN024C6N; Start 1208; Stop 1232
ctacagctccaatcttgattatcgt

SEQ ID NO: 301669 - DNA, 25 bp, Artificial
  probe
  misc_feature (1)..(25): SEQ ID NO: 1676; WAN024C6N; Start 1322; Stop 1346
gattcagctactctatcactcaagg

SEQ ID NO: 301670 - DNA, 25 bp, Artificial
  probe
  misc_feature (1)..(25): SEQ ID NO: 1676; WAN024C6N; Start 1321; Stop 1345
ggattcagctactctatcactcaag

SEQ ID NO: 301671 - DNA, 25 bp, Artificial
  probe
  misc_feature (1)..(25): SEQ ID NO: 1676; WAN024C6N; Start 710; Stop 734
ctatcttgacaacaactgttcttgc

SEQ ID NO: 301672 - DNA, 25 bp, Artificial
  probe
  misc_feature (1)..(25): SEQ ID NO: 1676; WAN024C6N; Start 706; Stop 730
ctctctatcttgacaacaactgttc

SEQ ID NO: 301673 - DNA, 25 bp, Artificial
  probe
  misc_feature (1)..(25): SEQ ID NO: 1676; WAN024C6N; Start 709; Stop 733
tctatcttgacaacaactgttcttg

SEQ ID NO: 301674 - DNA, 25 bp, Artificial
  probe
  misc_feature (1)..(25): SEQ ID NO: 1676; WAN024C6N; Start 713; Stop 737
tcttgacaacaactgttcttgctat

SEQ ID NO: 301675 - DNA, 25 bp, Artificial
  probe
  misc_feature (1)..(25): SEQ ID NO: 1676; WAN024C6N; Start 712; Stop 736
atcttgacaacaactgttcttgcta

SEQ ID NO: 301676 - DNA, 25 bp, Artificial
  probe
  misc_feature (1)..(25): SEQ ID NO: 1676; WAN024C6N; Start 711; Stop 735
tatcttgacaacaactgttcttgct

SEQ ID NO: 301677 - DNA, 25 bp, Artificial
  probe
  misc_feature (1)..(25): SEQ ID NO: 1676; WAN024C6N; Start 708; Stop 732
ctctatcttgacaacaactgttctt

SEQ ID NO: 301678 - DNA, 25 bp, Artificial
  probe
  misc_feature (1)..(25): SEQ ID NO: 1676; WAN024C6N; Start 1355; Stop 1379
ttggtttcttgacttacactttgac

SEQ ID NO: 301679 - DNA, 25 bp, Artificial
  probe
  misc_feature (1)..(25): SEQ ID NO: 1676; WAN024C6N; Start 1354; Stop 1378
gttggtttcttgacttacactttga

SEQ ID NO: 301680 - DNA, 25 bp, Artificial
  probe
  misc_feature (1)..(25): SEQ ID NO: 1676; WAN024C6N; Start 292; Stop 316
ctcaatgccttctttacctttacag

SEQ ID NO: 301681 - DNA, 25 bp, Artificial
  probe
  misc_feature (1)..(25): SEQ ID NO: 1676; WAN024C6N; Start 290; Stop 314
gactcaatgccttctttacctttac

SEQ ID NO: 301682 - DNA, 25 bp, Artificial
  probe
  misc_feature (1)..(25): SEQ ID NO: 1676; WAN024C6N; Start 252; Stop 276
ttatgctaacttaccttatgcccaa

SEQ ID NO: 301683 - DNA, 25 bp, Artificial
  probe
  misc_feature (1)..(25): SEQ ID NO: 1676; WAN024C6N; Start 251; Stop 275
tttatgctaacttaccttatgccca

SEQ ID NO: 301684 - DNA, 25 bp, Artificial
  probe
  misc_feature (1)..(25): SEQ ID NO: 1676; WAN024C6N; Start 156; Stop 180
aaacccacaaatactttcacaaaca

SEQ ID NO: 301685 - DNA, 25 bp, Artificial
  probe
  misc_feature (1)..(25): SEQ ID NO: 1676; WAN024C6N; Start 295; Stop 319
aatgccttctttacctttacagttg

SEQ ID NO: 301686 - DNA, 25 bp, Artificial
  probe
  misc_feature (1)..(25): SEQ ID NO: 1676; WAN024C6N; Start 294; Stop 318
caatgccttctttacctttacagtt

SEQ ID NO: 301687 - DNA, 25 bp, Artificial
  probe
  misc_feature (1)..(25): SEQ ID NO: 1676; WAN024C6N; Start 293; Stop 317
tcaatgccttctttacctttacagt

SEQ ID NO: 301688 - DNA, 25 bp, Artificial
  probe
  misc_feature (1)..(25): SEQ ID NO: 1676; WAN024C6N; Start 291; Stop 315
actcaatgccttctttacctttaca

SEQ ID NO: 301689 - DNA, 25 bp, Artificial
  probe
  misc_feature (1)..(25): SEQ ID NO: 1676; WAN024C6N; Start 157; Stop 181
aacccacaaatactttcacaaacag

SEQ ID NO: 301690 - DNA, 25 bp, Artificial
  probe
  misc_feature (1)..(25): SEQ ID NO: 1676; WAN024C6N; Start 1356; Stop 1380
tggtttcttgacttacactttgact

SEQ ID NO: 301691 - DNA, 25 bp, Artificial
  probe
  misc_feature (1)..(25): SEQ ID NO: 1676; WAN024C6N; Start 1223; Stop 1247
tgattatcgttgggattatgatgct

SEQ ID NO: 301692 - DNA, 25 bp, Artificial
  probe
  misc_feature (1)..(25): SEQ ID NO: 1676; WAN024C6N; Start 1225; Stop 1249
attatcgttgggattatgatgcttg

SEQ ID NO: 301693 - DNA, 25 bp, Artificial
  probe
  misc_feature (1)..(25): SEQ ID NO: 1676; WAN024C6N; Start 1222; Stop 1246
ttgattatcgttgggattatgatgc

SEQ ID NO: 301694 - DNA, 25 bp, Artificial
  probe
  misc_feature (1)..(25): SEQ ID NO: 1676; WAN024C6N; Start 289; Stop 313
ggactcaatgccttctttaccttta

SEQ ID NO: 301695 - DNA, 25 bp, Artificial
  probe
  misc_feature (1)..(25): SEQ ID NO: 1677; WAN024DB6; Start 203; Stop 227
cttatgctacctgttgctctcttaa

SEQ ID NO: 301696 - DNA, 25 bp, Artificial
  probe
  misc_feature (1)..(25): SEQ ID NO: 1677; WAN024DB6; Start 204; Stop 228
ttatgctacctgttgctctcttaac

SEQ ID NO: 301697 - DNA, 25 bp, Artificial
  probe
  misc_feature (1)..(25): SEQ ID NO: 1677; WAN024DB6; Start 198; Stop 222
ctatccttatgctacctgttgctct

SEQ ID NO: 301698 - DNA, 25 bp, Artificial
  probe
  misc_feature (1)..(25): SEQ ID NO: 1677; WAN024DB6; Start 837; Stop 861
ccaaggtgaagaaggaacttattaa

SEQ ID NO: 301699 - DNA, 25 bp, Artificial
  probe
  misc_feature (1)..(25): SEQ ID NO: 1677; WAN024DB6; Start 199; Stop 223
tatccttatgctacctgttgctctc

SEQ ID NO: 301700 - DNA, 25 bp, Artificial
  probe
  misc_feature (1)..(25): SEQ ID NO: 1677; WAN024DB6; Start 202; Stop 226
ccttatgctacctgttgctctctta

SEQ ID NO: 301701 - DNA, 25 bp, Artificial
  probe
  misc_feature (1)..(25): SEQ ID NO: 1677; WAN024DB6; Start 197; Stop 221
actatccttatgctacctgttgctc

SEQ ID NO: 301702 - DNA, 25 bp, Artificial
  probe
  misc_feature (1)..(25): SEQ ID NO: 1677; WAN024DB6; Start 196; Stop 220
gactatccttatgctacctgttgct

SEQ ID NO: 301703 - DNA, 25 bp, Artificial
  probe
  misc_feature (1)..(25): SEQ ID NO: 1677; WAN024DB6; Start 210; Stop 234
tacctgttgctctcttaacgatgaa

SEQ ID NO: 301704 - DNA, 25 bp, Artificial
  probe
  misc_feature (1)..(25): SEQ ID NO: 1677; WAN024DB6; Start 213; Stop 237
ctgttgctctcttaacgatgaagtg

SEQ ID NO: 301705 - DNA, 25 bp, Artificial
  probe
  misc_feature (1)..(25): SEQ ID NO: 1677; WAN024DB6; Start 838; Stop 862
caaggtgaagaaggaacttattaac

SEQ ID NO: 301706 - DNA, 25 bp, Artificial
  probe
  misc_feature (1)..(25): SEQ ID NO: 1677; WAN024DB6; Start 209; Stop 233
ctacctgttgctctcttaacgatga

SEQ ID NO: 301707 - DNA, 25 bp, Artificial
  probe
  misc_feature (1)..(25): SEQ ID NO: 1677; WAN024DB6; Start 839; Stop 863
aaggtgaagaaggaacttattaact

SEQ ID NO: 301708 - DNA, 25 bp, Artificial
  probe
  misc_feature (1)..(25): SEQ ID NO: 1677; WAN024DB6; Start 190; Stop 214
atgatggactatccttatgctacct

SEQ ID NO: 301709 - DNA, 25 bp, Artificial
  probe
  misc_feature (1)..(25): SEQ ID NO: 1677; WAN024DB6; Start 665; Stop 689
gtcttcgtgaaggaatggtcttaac

SEQ ID NO: 301710 - DNA, 25 bp, Artificial
  probe
  misc_feature (1)..(25): SEQ ID NO: 1677; WAN024DB6; Start 193; Stop 217
atggactatccttatgctacctgtt

SEQ ID NO: 301711 - DNA, 25 bp, Artificial
  probe
  misc_feature (1)..(25): SEQ ID NO: 1677; WAN024DB6; Start 205; Stop 229
tatgctacctgttgctctcttaacg

SEQ ID NO: 301712 - DNA, 25 bp, Artificial
  probe
  misc_feature (1)..(25): SEQ ID NO: 1677; WAN024DB6; Start 192; Stop 216
gatggactatccttatgctacctgt

SEQ ID NO: 301713 - DNA, 25 bp, Artificial
  probe
  misc_feature (1)..(25): SEQ ID NO: 1677; WAN024DB6; Start 191; Stop 215
tgatggactatccttatgctacctg

SEQ ID NO: 301714 - DNA, 25 bp, Artificial
  probe
  misc_feature (1)..(25): SEQ ID NO: 1677; WAN024DB6; Start 527; Stop 551
atatcggtgcggctattcaagaata

SEQ ID NO: 301715 - DNA, 25 bp, Artificial
  probe
  misc_feature (1)..(25): SEQ ID NO: 1677; WAN024DB6; Start 102; Stop 126
cgtagatatgtgggaagttgaagaa

SEQ ID NO: 301716 - DNA, 25 bp, Artificial
  probe
  misc_feature (1)..(25): SEQ ID NO: 1677; WAN024DB6; Start 189; Stop 213
catgatggactatccttatgctacc

SEQ ID NO: 301717 - DNA, 25 bp, Artificial
  probe
  misc_feature (1)..(25): SEQ ID NO: 1677; WAN024DB6; Start 61; Stop 85
gcaagtattcatataggcttacgtg

SEQ ID NO: 301718 - DNA, 25 bp, Artificial
  probe
  misc_feature (1)..(25): SEQ ID NO: 1677; WAN024DB6; Start 194; Stop 218
tggactatccttatgctacctgttg

SEQ ID NO: 301719 - DNA, 25 bp, Artificial
  probe
  misc_feature (1)..(25): SEQ ID NO: 1677; WAN024DB6; Start 627; Stop 651
aatggttcctaactatggtattgca

SEQ ID NO: 301720 - DNA, 25 bp, Artificial
  probe
  misc_feature (1)..(25): SEQ ID NO: 1677; WAN024DB6; Start 803; Stop 827
tcattacgaaagatggacctgttat

SEQ ID NO: 301721 - DNA, 25 bp, Artificial
  probe
  misc_feature (1)..(25): SEQ ID NO: 1677; WAN024DB6; Start 628; Stop 652
atggttcctaactatggtattgcag

SEQ ID NO: 301722 - DNA, 25 bp, Artificial
  probe
  misc_feature (1)..(25): SEQ ID NO: 1677; WAN024DB6; Start 804; Stop 828
cattacgaaagatggacctgttatc

SEQ ID NO: 301723 - DNA, 25 bp, Artificial
  probe
  misc_feature (1)..(25): SEQ ID NO: 1677; WAN024DB6; Start 706; Stop 730
aatacaggcgattgggaaattgata

SEQ ID NO: 301724 - DNA, 25 bp, Artificial
  probe
  misc_feature (1)..(25): SEQ ID NO: 1677; WAN024DB6; Start 713; Stop 737
gcgattgggaaattgatacagatat

SEQ ID NO: 301725 - DNA, 25 bp, Artificial
  probe
  misc_feature (1)..(25): SEQ ID NO: 1677; WAN024DB6; Start 626; Stop 650
caatggttcctaactatggtattgc

SEQ ID NO: 301726 - DNA, 25 bp, Artificial
  probe
  misc_feature (1)..(25): SEQ ID NO: 1677; WAN024DB6; Start 200; Stop 224
atccttatgctacctgttgctctct

SEQ ID NO: 301727 - DNA, 25 bp, Artificial
  probe
  misc_feature (1)..(25): SEQ ID NO: 1677; WAN024DB6; Start 212; Stop 236
cctgttgctctcttaacgatgaagt

SEQ ID NO: 301728 - DNA, 25 bp, Artificial
  probe
  misc_feature (1)..(25): SEQ ID NO: 1678; WAN024GEB; Start 173; Stop 197
tgcttgatgacttgtacttcctgag

SEQ ID NO: 301729 - DNA, 25 bp, Artificial
  probe
  misc_feature (1)..(25): SEQ ID NO: 1678; WAN024GEB; Start 172; Stop 196
ctgcttgatgacttgtacttcctga

SEQ ID NO: 301730 - DNA, 25 bp, Artificial
  probe
  misc_feature (1)..(25): SEQ ID NO: 1678; WAN024GEB; Start 168; Stop 192
tagcctgcttgatgacttgtacttc

SEQ ID NO: 301731 - DNA, 25 bp, Artificial
  probe
  misc_feature (1)..(25): SEQ ID NO: 1678; WAN024GEB; Start 48; Stop 72
ctacgatatagtcactgccgatttg

SEQ ID NO: 301732 - DNA, 25 bp, Artificial
  probe
  misc_feature (1)..(25): SEQ ID NO: 1678; WAN024GEB; Start 53; Stop 77
atatagtcactgccgatttgatagg

SEQ ID NO: 301733 - DNA, 25 bp, Artificial
  probe
  misc_feature (1)..(25): SEQ ID NO: 1678; WAN024GEB; Start 51; Stop 75
cgatatagtcactgccgatttgata

SEQ ID NO: 301734 - DNA, 25 bp, Artificial
  probe
  misc_feature (1)..(25): SEQ ID NO: 1678; WAN024GEB; Start 167; Stop 191
gtagcctgcttgatgacttgtactt

SEQ ID NO: 301735 - DNA, 25 bp, Artificial
  probe
  misc_feature (1)..(25): SEQ ID NO: 1678; WAN024GEB; Start 230; Stop 254
gctgtcttcttggcatagtgaatca

SEQ ID NO: 301736 - DNA, 25 bp, Artificial
  probe
  misc_feature (1)..(25): SEQ ID NO: 1678; WAN024GEB; Start 52; Stop 76
gatatagtcactgccgatttgatag

SEQ ID NO: 301737 - DNA, 25 bp, Artificial
  probe
  misc_feature (1)..(25): SEQ ID NO: 1678; WAN024GEB; Start 235; Stop 259
cttcttggcatagtgaatcacagac

SEQ ID NO: 301738 - DNA, 25 bp, Artificial
  probe
  misc_feature (1)..(25): SEQ ID NO: 1678; WAN024GEB; Start 234; Stop 258
tcttcttggcatagtgaatcacaga

SEQ ID NO: 301739 - DNA, 25 bp, Artificial
  probe
  misc_feature (1)..(25): SEQ ID NO: 1678; WAN024GEB; Start 233; Stop 257
gtcttcttggcatagtgaatcacag

SEQ ID NO: 301740 - DNA, 25 bp, Artificial
  probe
  misc_feature (1)..(25): SEQ ID NO: 1678; WAN024GEB; Start 231; Stop 255
ctgtcttcttggcatagtgaatcac

SEQ ID NO: 301741 - DNA, 25 bp, Artificial
  probe
  misc_feature (1)..(25): SEQ ID NO: 1678; WAN024GEB; Start 46; Stop 70
cactacgatatagtcactgccgatt

SEQ ID NO: 301742 - DNA, 25 bp, Artificial
  probe
  misc_feature (1)..(25): SEQ ID NO: 1678; WAN024GEB; Start 239; Stop 263
ttggcatagtgaatcacagactctt

SEQ ID NO: 301743 - DNA, 25 bp, Artificial
  probe
  misc_feature (1)..(25): SEQ ID NO: 1678; WAN024GEB; Start 236; Stop 260
ttcttggcatagtgaatcacagact

SEQ ID NO: 301744 - DNA, 25 bp, Artificial
  probe
  misc_feature (1)..(25): SEQ ID NO: 1678; WAN024GEB; Start 175; Stop 199
cttgatgacttgtacttcctgagcc

SEQ ID NO: 301745 - DNA, 25 bp, Artificial
  probe
  misc_feature (1)..(25): SEQ ID NO: 1678; WAN024GEB; Start 49; Stop 73
tacgatatagtcactgccgatttga

SEQ ID NO: 301746 - DNA, 25 bp, Artificial
  probe
  misc_feature (1)..(25): SEQ ID NO: 1678; WAN024GEB; Start 232; Stop 256
tgtcttcttggcatagtgaatcaca

SEQ ID NO: 301747 - DNA, 25 bp, Artificial
  probe
  misc_feature (1)..(25): SEQ ID NO: 1678; WAN024GEB; Start 171; Stop 195
cctgcttgatgacttgtacttcctg

SEQ ID NO: 301748 - DNA, 25 bp, Artificial
  probe
  misc_feature (1)..(25): SEQ ID NO: 1678; WAN024GEB; Start 243; Stop 267
catagtgaatcacagactcttgcag

SEQ ID NO: 301749 - DNA, 25 bp, Artificial
  probe
  misc_feature (1)..(25): SEQ ID NO: 1678; WAN024GEB; Start 238; Stop 262
cttggcatagtgaatcacagactct

SEQ ID NO: 301750 - DNA, 25 bp, Artificial
  probe
  misc_feature (1)..(25): SEQ ID NO: 1678; WAN024GEB; Start 237; Stop 261
tcttggcatagtgaatcacagactc

SEQ ID NO: 301751 - DNA, 25 bp, Artificial
  probe
  misc_feature (1)..(25): SEQ ID NO: 1678; WAN024GEB; Start 244; Stop 268
atagtgaatcacagactcttgcaga

SEQ ID NO: 301752 - DNA, 25 bp, Artificial
  probe
  misc_feature (1)..(25): SEQ ID NO: 1678; WAN024GEB; Start 50; Stop 74
acgatatagtcactgccgatttgat

SEQ ID NO: 301753 - DNA, 25 bp, Artificial
  probe
  misc_feature (1)..(25): SEQ ID NO: 1678; WAN024GEB; Start 229; Stop 253
agctgtcttcttggcatagtgaatc

SEQ ID NO: 301754 - DNA, 25 bp, Artificial
  probe
  misc_feature (1)..(25): SEQ ID NO: 1678; WAN024GEB; Start 240; Stop 264
tggcatagtgaatcacagactcttg

SEQ ID NO: 301755 - DNA, 25 bp, Artificial
  probe
  misc_feature (1)..(25): SEQ ID NO: 1678; WAN024GEB; Start 47; Stop 71
actacgatatagtcactgccgattt

SEQ ID NO: 301756 - DNA, 25 bp, Artificial
  probe
  misc_feature (1)..(25): SEQ ID NO: 1678; WAN024GEB; Start 245; Stop 269
tagtgaatcacagactcttgcagac

SEQ ID NO: 301757 - DNA, 25 bp, Artificial
  probe
  misc_feature (1)..(25): SEQ ID NO: 1678; WAN024GEB; Start 164; Stop 188
ttggtagcctgcttgatgacttgta

SEQ ID NO: 301758 - DNA, 25 bp, Artificial
  probe
  misc_feature (1)..(25): SEQ ID NO: 1678; WAN024GEB; Start 162; Stop 186
gattggtagcctgcttgatgacttg

SEQ ID NO: 301759 - DNA, 25 bp, Artificial
  probe
  misc_feature (1)..(25): SEQ ID NO: 1678; WAN024GEB; Start 259; Stop 283
ctcttgcagactggtttggatattt

SEQ ID NO: 301760 - DNA, 25 bp, Artificial
  probe
  misc_feature (1)..(25): SEQ ID NO: 1678; WAN024GEB; Start 156; Stop 180
aatctggattggtagcctgcttgat

SEQ ID NO: 301761 - DNA, 25 bp, Artificial
  probe
  misc_feature (1)..(25): SEQ ID NO: 1679; WAN024D6B; Start 2292; Stop 2316
tccagatattgagaagagtgtgatt

SEQ ID NO: 301762 - DNA, 25 bp, Artificial
  probe
  misc_feature (1)..(25): SEQ ID NO: 1679; WAN024D6B; Start 2291; Stop 2315
atccagatattgagaagagtgtgat

SEQ ID NO: 301763 - DNA, 25 bp, Artificial
  probe
  misc_feature (1)..(25): SEQ ID NO: 1679; WAN024D6B; Start 1692; Stop 1716
cttgttgactgaggttaaggagaag

SEQ ID NO: 301764 - DNA, 25 bp, Artificial
  probe
  misc_feature (1)..(25): SEQ ID NO: 1679; WAN024D6B; Start 562; Stop 586
atagaactatccttgacctgtgatt

SEQ ID NO: 301765 - DNA, 25 bp, Artificial
  probe
  misc_feature (1)..(25): SEQ ID NO: 1679; WAN024D6B; Start 1699; Stop 1723
actgaggttaaggagaagtctgatt

SEQ ID NO: 301766 - DNA, 25 bp, Artificial
  probe
  misc_feature (1)..(25): SEQ ID NO: 1679; WAN024D6B; Start 1685; Stop 1709
atgaggacttgttgactgaggttaa

SEQ ID NO: 301767 - DNA, 25 bp, Artificial
  probe
  misc_feature (1)..(25): SEQ ID NO: 1679; WAN024D6B; Start 2290; Stop 2314
tatccagatattgagaagagtgtga

SEQ ID NO: 301768 - DNA, 25 bp, Artificial
  probe
  misc_feature (1)..(25): SEQ ID NO: 1679; WAN024D6B; Start 271; Stop 295
gattacaatctggctaaggaactgg

SEQ ID NO: 301769 - DNA, 25 bp, Artificial
  probe
  misc_feature (1)..(25): SEQ ID NO: 1679; WAN024D6B; Start 1691; Stop 1715
acttgttgactgaggttaaggagaa

SEQ ID NO: 301770 - DNA, 25 bp, Artificial
  probe
  misc_feature (1)..(25): SEQ ID NO: 1679; WAN024D6B; Start 677; Stop 701
gagttaaggataatgatctgcggtt

SEQ ID NO: 301771 - DNA, 25 bp, Artificial
  probe
  misc_feature (1)..(25): SEQ ID NO: 1679; WAN024D6B; Start 1684; Stop 1708
gatgaggacttgttgactgaggtta

SEQ ID NO: 301772 - DNA, 25 bp, Artificial
  probe
  misc_feature (1)..(25): SEQ ID NO: 1679; WAN024D6B; Start 1330; Stop 1354
aatggttggttggttcatactcaag

SEQ ID NO: 301773 - DNA, 25 bp, Artificial
  probe
  misc_feature (1)..(25): SEQ ID NO: 1679; WAN024D6B; Start 1205; Stop 1229
cagcctatgttaccaatctcctaga

SEQ ID NO: 301774 - DNA, 25 bp, Artificial
  probe
  misc_feature (1)..(25): SEQ ID NO: 1679; WAN024D6B; Start 675; Stop 699
aagagttaaggataatgatctgcgg

SEQ ID NO: 301775 - DNA, 25 bp, Artificial
  probe
  misc_feature (1)..(25): SEQ ID NO: 1679; WAN024D6B; Start 674; Stop 698
gaagagttaaggataatgatctgcg

SEQ ID NO: 301776 - DNA, 25 bp, Artificial
  probe
  misc_feature (1)..(25): SEQ ID NO: 1679; WAN024D6B; Start 1073; Stop 1097
tattgattagttcgtccagagactg

SEQ ID NO: 301777 - DNA, 25 bp, Artificial
  probe
  misc_feature (1)..(25): SEQ ID NO: 1679; WAN024D6B; Start 561; Stop 585
tatagaactatccttgacctgtgat

SEQ ID NO: 301778 - DNA, 25 bp, Artificial
  probe
  misc_feature (1)..(25): SEQ ID NO: 1679; WAN024D6B; Start 1693; Stop 1717
ttgttgactgaggttaaggagaagt

SEQ ID NO: 301779 - DNA, 25 bp, Artificial
  probe
  misc_feature (1)..(25): SEQ ID NO: 1679; WAN024D6B; Start 2293; Stop 2317
ccagatattgagaagagtgtgatta

SEQ ID NO: 301780 - DNA, 25 bp, Artificial
  probe
  misc_feature (1)..(25): SEQ ID NO: 1679; WAN024D6B; Start 673; Stop 697
ggaagagttaaggataatgatctgc

SEQ ID NO: 301781 - DNA, 25 bp, Artificial
  probe
  misc_feature (1)..(25): SEQ ID NO: 1679; WAN024D6B; Start 1206; Stop 1230
agcctatgttaccaatctcctagag

SEQ ID NO: 301782 - DNA, 25 bp, Artificial
  probe
  misc_feature (1)..(25): SEQ ID NO: 1679; WAN024D6B; Start 1690; Stop 1714
gacttgttgactgaggttaaggaga

SEQ ID NO: 301783 - DNA, 25 bp, Artificial
  probe
  misc_feature (1)..(25): SEQ ID NO: 1679; WAN024D6B; Start 1072; Stop 1096
ttattgattagttcgtccagagact

SEQ ID NO: 301784 - DNA, 25 bp, Artificial
  probe
  misc_feature (1)..(25): SEQ ID NO: 1679; WAN024D6B; Start 2289; Stop 2313
ttatccagatattgagaagagtgtg

SEQ ID NO: 301785 - DNA, 25 bp, Artificial
  probe
  misc_feature (1)..(25): SEQ ID NO: 1679; WAN024D6B; Start 1204; Stop 1228
ccagcctatgttaccaatctcctag

SEQ ID NO: 301786 - DNA, 25 bp, Artificial
  probe
  misc_feature (1)..(25): SEQ ID NO: 1679; WAN024D6B; Start 676; Stop 700
agagttaaggataatgatctgcggt

SEQ ID NO: 301787 - DNA, 25 bp, Artificial
  probe
  misc_feature (1)..(25): SEQ ID NO: 1679; WAN024D6B; Start 1686; Stop 1710
tgaggacttgttgactgaggttaag

SEQ ID NO: 301788 - DNA, 25 bp, Artificial
  probe
  misc_feature (1)..(25): SEQ ID NO: 1679; WAN024D6B; Start 853; Stop 877
ttagagcaacaggtgatagacttgg

SEQ ID NO: 301789 - DNA, 25 bp, Artificial
  probe
  misc_feature (1)..(25): SEQ ID NO: 1679; WAN024D6B; Start 763; Stop 787
atatcaggagccagttatgccaatc

SEQ ID NO: 301790 - DNA, 25 bp, Artificial
  probe
  misc_feature (1)..(25): SEQ ID NO: 1679; WAN024D6B; Start 1768; Stop 1792
tggtatgaggaggaagagcagtatt

SEQ ID NO: 301791 - DNA, 25 bp, Artificial
  probe
  misc_feature (1)..(25): SEQ ID NO: 1679; WAN024D6B; Start 2378; Stop 2402
cagcagaaggtgatcttgttcaatt

SEQ ID NO: 301792 - DNA, 25 bp, Artificial
  probe
  misc_feature (1)..(25): SEQ ID NO: 1679; WAN024D6B; Start 2288; Stop 2312
cttatccagatattgagaagagtgt

SEQ ID NO: 301793 - DNA, 25 bp, Artificial
  probe
  misc_feature (1)..(25): SEQ ID NO: 1679; WAN024D6B; Start 629; Stop 653
aggagtgtaagttggatattactga

SEQ ID NO: 301794 - DNA, 25 bp, Artificial
  probe
  misc_feature (1)..(25): SEQ ID NO: 1680; WAN024CID; Start 42; Stop 66
agttatcagttgttacaccttcctc

SEQ ID NO: 301795 - DNA, 25 bp, Artificial
  probe
  misc_feature (1)..(25): SEQ ID NO: 1680; WAN024CID; Start 44; Stop 68
ttatcagttgttacaccttcctcat

SEQ ID NO: 301796 - DNA, 25 bp, Artificial
  probe
  misc_feature (1)..(25): SEQ ID NO: 1680; WAN024CID; Start 43; Stop 67
gttatcagttgttacaccttcctca

SEQ ID NO: 301797 - DNA, 25 bp, Artificial
  probe
  misc_feature (1)..(25): SEQ ID NO: 1680; WAN024CID; Start 41; Stop 65
aagttatcagttgttacaccttcct

SEQ ID NO: 301798 - DNA, 25 bp, Artificial
  probe
  misc_feature (1)..(25): SEQ ID NO: 1680; WAN024CID; Start 40; Stop 64
caagttatcagttgttacaccttcc

SEQ ID NO: 301799 - DNA, 25 bp, Artificial
  probe
  misc_feature (1)..(25): SEQ ID NO: 1680; WAN024CID; Start 35; Stop 59
atacgcaagttatcagttgttacac

SEQ ID NO: 301800 - DNA, 25 bp, Artificial
  probe
  misc_feature (1)..(25): SEQ ID NO: 1680; WAN024CID; Start 39; Stop 63
gcaagttatcagttgttacaccttc

SEQ ID NO: 301801 - DNA, 25 bp, Artificial
  probe
  misc_feature (1)..(25): SEQ ID NO: 1680; WAN024CID; Start 34; Stop 58
aatacgcaagttatcagttgttaca

SEQ ID NO: 301802 - DNA, 25 bp, Artificial
  probe
  misc_feature (1)..(25): SEQ ID NO: 1680; WAN024CID; Start 45; Stop 69
tatcagttgttacaccttcctcatg

SEQ ID NO: 301803 - DNA, 25 bp, Artificial
  probe
  misc_feature (1)..(25): SEQ ID NO: 1680; WAN024CID; Start 36; Stop 60
tacgcaagttatcagttgttacacc

SEQ ID NO: 301804 - DNA, 25 bp, Artificial
  probe
  misc_feature (1)..(25): SEQ ID NO: 1680; WAN024CID; Start 38; Stop 62
cgcaagttatcagttgttacacctt

SEQ ID NO: 301805 - DNA, 25 bp, Artificial
  probe
  misc_feature (1)..(25): SEQ ID NO: 1680; WAN024CID; Start 102; Stop 126
gatttacaaccataccattcccaat

SEQ ID NO: 301806 - DNA, 25 bp, Artificial
  probe
  misc_feature (1)..(25): SEQ ID NO: 1680; WAN024CID; Start 179; Stop 203
aatttcttaccgtcaatcacaatcg

SEQ ID NO: 301807 - DNA, 25 bp, Artificial
  probe
  misc_feature (1)..(25): SEQ ID NO: 1680; WAN024CID; Start 180; Stop 204
atttcttaccgtcaatcacaatcgt

SEQ ID NO: 301808 - DNA, 25 bp, Artificial
  probe
  misc_feature (1)..(25): SEQ ID NO: 1680; WAN024CID; Start 28; Stop 52
atcagaaatacgcaagttatcagtt

SEQ ID NO: 301809 - DNA, 25 bp, Artificial
  probe
  misc_feature (1)..(25): SEQ ID NO: 1680; WAN024CID; Start 37; Stop 61
acgcaagttatcagttgttacacct

SEQ ID NO: 301810 - DNA, 25 bp, Artificial
  probe
  misc_feature (1)..(25): SEQ ID NO: 1680; WAN024CID; Start 30; Stop 54
cagaaatacgcaagttatcagttgt

SEQ ID NO: 301811 - DNA, 25 bp, Artificial
  probe
  misc_feature (1)..(25): SEQ ID NO: 1680; WAN024CID; Start 29; Stop 53
tcagaaatacgcaagttatcagttg

SEQ ID NO: 301812 - DNA, 25 bp, Artificial
  probe
  misc_feature (1)..(25): SEQ ID NO: 1680; WAN024CID; Start 31; Stop 55
agaaatacgcaagttatcagttgtt

SEQ ID NO: 301813 - DNA, 25 bp, Artificial
  probe
  misc_feature (1)..(25): SEQ ID NO: 1680; WAN024CID; Start 26; Stop 50
cgatcagaaatacgcaagttatcag

SEQ ID NO: 301814 - DNA, 25 bp, Artificial
  probe
  misc_feature (1)..(25): SEQ ID NO: 1680; WAN024CID; Start 24; Stop 48
cacgatcagaaatacgcaagttatc

SEQ ID NO: 301815 - DNA, 25 bp, Artificial
  probe
  misc_feature (1)..(25): SEQ ID NO: 1680; WAN024CID; Start 27; Stop 51
gatcagaaatacgcaagttatcagt

SEQ ID NO: 301816 - DNA, 25 bp, Artificial
  probe
  misc_feature (1)..(25): SEQ ID NO: 1680; WAN024CID; Start 25; Stop 49
acgatcagaaatacgcaagttatca

SEQ ID NO: 301817 - DNA, 25 bp, Artificial
  probe
  misc_feature (1)..(25): SEQ ID NO: 1680; WAN024CID; Start 89; Stop 113
acaagagatttaggatttacaacca

SEQ ID NO: 301818 - DNA, 25 bp, Artificial
  probe
  misc_feature (1)..(25): SEQ ID NO: 1680; WAN024CID; Start 182; Stop 206
ttcttaccgtcaatcacaatcgtgt

SEQ ID NO: 301819 - DNA, 25 bp, Artificial
  probe
  misc_feature (1)..(25): SEQ ID NO: 1680; WAN024CID; Start 33; Stop 57
aaatacgcaagttatcagttgttac

SEQ ID NO: 301820 - DNA, 25 bp, Artificial
  probe
  misc_feature (1)..(25): SEQ ID NO: 1680; WAN024CID; Start 32; Stop 56
gaaatacgcaagttatcagttgtta

SEQ ID NO: 301821 - DNA, 25 bp, Artificial
  probe
  misc_feature (1)..(25): SEQ ID NO: 1680; WAN024CID; Start 94; Stop 118
agatttaggatttacaaccatacca

SEQ ID NO: 301822 - DNA, 25 bp, Artificial
  probe
  misc_feature (1)..(25): SEQ ID NO: 1680; WAN024CID; Start 99; Stop 123
taggatttacaaccataccattccc

SEQ ID NO: 301823 - DNA, 25 bp, Artificial
  probe
  misc_feature (1)..(25): SEQ ID NO: 1680; WAN024CID; Start 23; Stop 47
gcacgatcagaaatacgcaagttat

SEQ ID NO: 301824 - DNA, 25 bp, Artificial
  probe
  misc_feature (1)..(25): SEQ ID NO: 1680; WAN024CID; Start 101; Stop 125
ggatttacaaccataccattcccaa

SEQ ID NO: 301825 - DNA, 25 bp, Artificial
  probe
  misc_feature (1)..(25): SEQ ID NO: 1680; WAN024CID; Start 170; Stop 194
tgcaacttaaatttcttaccgtcaa

SEQ ID NO: 301826 - DNA, 25 bp, Artificial
  probe
  misc_feature (1)..(25): SEQ ID NO: 1680; WAN024CID; Start 169; Stop 193
gtgcaacttaaatttcttaccgtca

SEQ ID NO: 301827 - DNA, 25 bp, Artificial
  probe
  misc_feature (1)..(25): SEQ ID NO: 1681; WAN024GIS; Start 643; Stop 667
tttattcctatcttgggtggtatca

SEQ ID NO: 301828 - DNA, 25 bp, Artificial
  probe
  misc_feature (1)..(25): SEQ ID NO: 1681; WAN024GIS; Start 645; Stop 669
tattcctatcttgggtggtatcatt

SEQ ID NO: 301829 - DNA, 25 bp, Artificial
  probe
  misc_feature (1)..(25): SEQ ID NO: 1681; WAN024GIS; Start 644; Stop 668
ttattcctatcttgggtggtatcat

SEQ ID NO: 301830 - DNA, 25 bp, Artificial
  probe
  misc_feature (1)..(25): SEQ ID NO: 1681; WAN024GIS; Start 32; Stop 56
tgtatatggctgaacaagacttagc

SEQ ID NO: 301831 - DNA, 25 bp, Artificial
  probe
  misc_feature (1)..(25): SEQ ID NO: 1681; WAN024GIS; Start 749; Stop 773
gtgaagttcaatatcaagaagatgt

SEQ ID NO: 301832 - DNA, 25 bp, Artificial
  probe
  misc_feature (1)..(25): SEQ ID NO: 1681; WAN024GIS; Start 22; Stop 46
ataaggagtttgtatatggctgaac

SEQ ID NO: 301833 - DNA, 25 bp, Artificial
  probe
  misc_feature (1)..(25): SEQ ID NO: 1681; WAN024GIS; Start 23; Stop 47
taaggagtttgtatatggctgaaca

SEQ ID NO: 301834 - DNA, 25 bp, Artificial
  probe
  misc_feature (1)..(25): SEQ ID NO: 1681; WAN024GIS; Start 21; Stop 45
aataaggagtttgtatatggctgaa

SEQ ID NO: 301835 - DNA, 25 bp, Artificial
  probe
  misc_feature (1)..(25): SEQ ID NO: 1681; WAN024GIS; Start 20; Stop 44
aaataaggagtttgtatatggctga

SEQ ID NO: 301836 - DNA, 25 bp, Artificial
  probe
  misc_feature (1)..(25): SEQ ID NO: 1681; WAN024GIS; Start 373; Stop 397
atttatggttatgaggatctttggg

SEQ ID NO: 301837 - DNA, 25 bp, Artificial
  probe
  misc_feature (1)..(25): SEQ ID NO: 1681; WAN024GIS; Start 642; Stop 666
atttattcctatcttgggtggtatc

SEQ ID NO: 301838 - DNA, 25 bp, Artificial
  probe
  misc_feature (1)..(25): SEQ ID NO: 1681; WAN024GIS; Start 748; Stop 772
agtgaagttcaatatcaagaagatg

SEQ ID NO: 301839 - DNA, 25 bp, Artificial
  probe
  misc_feature (1)..(25): SEQ ID NO: 1681; WAN024GIS; Start 19; Stop 43
gaaataaggagtttgtatatggctg

SEQ ID NO: 301840 - DNA, 25 bp, Artificial
  probe
  misc_feature (1)..(25): SEQ ID NO: 1681; WAN024GIS; Start 751; Stop 775
gaagttcaatatcaagaagatgttg

SEQ ID NO: 301841 - DNA, 25 bp, Artificial
  probe
  misc_feature (1)..(25): SEQ ID NO: 1681; WAN024GIS; Start 18; Stop 42
agaaataaggagtttgtatatggct

SEQ ID NO: 301842 - DNA, 25 bp, Artificial
  probe
  misc_feature (1)..(25): SEQ ID NO: 1681; WAN024GIS; Start 429; Stop 453
aaataccctcttgctttatctaggc

SEQ ID NO: 301843 - DNA, 25 bp, Artificial
  probe
  misc_feature (1)..(25): SEQ ID NO: 1681; WAN024GIS; Start 247; Stop 271
ttattagcgagtgggacttctgttt

SEQ ID NO: 301844 - DNA, 25 bp, Artificial
  probe
  misc_feature (1)..(25): SEQ ID NO: 1681; WAN024GIS; Start 764; Stop 788
aagaagatgttgaaacaatccgaaa

SEQ ID NO: 301845 - DNA, 25 bp, Artificial
  probe
  misc_feature (1)..(25): SEQ ID NO: 1681; WAN024GIS; Start 763; Stop 787
caagaagatgttgaaacaatccgaa

SEQ ID NO: 301846 - DNA, 25 bp, Artificial
  probe
  misc_feature (1)..(25): SEQ ID NO: 1681; WAN024GIS; Start 33; Stop 57
gtatatggctgaacaagacttagct

SEQ ID NO: 301847 - DNA, 25 bp, Artificial
  probe
  misc_feature (1)..(25): SEQ ID NO: 1681; WAN024GIS; Start 750; Stop 774
tgaagttcaatatcaagaagatgtt

SEQ ID NO: 301848 - DNA, 25 bp, Artificial
  probe
  misc_feature (1)..(25): SEQ ID NO: 1681; WAN024GIS; Start 641; Stop 665
aatttattcctatcttgggtggtat

SEQ ID NO: 301849 - DNA, 25 bp, Artificial
  probe
  misc_feature (1)..(25): SEQ ID NO: 1681; WAN024GIS; Start 17; Stop 41
aagaaataaggagtttgtatatggc

SEQ ID NO: 301850 - DNA, 25 bp, Artificial
  probe
  misc_feature (1)..(25): SEQ ID NO: 1681; WAN024GIS; Start 351; Stop 375
attggctcaagaattaggttatatt

SEQ ID NO: 301851 - DNA, 25 bp, Artificial
  probe
  misc_feature (1)..(25): SEQ ID NO: 1681; WAN024GIS; Start 639; Stop 663
gaaatttattcctatcttgggtggt

SEQ ID NO: 301852 - DNA, 25 bp, Artificial
  probe
  misc_feature (1)..(25): SEQ ID NO: 1681; WAN024GIS; Start 31; Stop 55
ttgtatatggctgaacaagacttag

SEQ ID NO: 301853 - DNA, 25 bp, Artificial
  probe
  misc_feature (1)..(25): SEQ ID NO: 1681; WAN024GIS; Start 350; Stop 374
aattggctcaagaattaggttatat

SEQ ID NO: 301854 - DNA, 25 bp, Artificial
  probe
  misc_feature (1)..(25): SEQ ID NO: 1681; WAN024GIS; Start 430; Stop 454
aataccctcttgctttatctaggcg

SEQ ID NO: 301855 - DNA, 25 bp, Artificial
  probe
  misc_feature (1)..(25): SEQ ID NO: 1681; WAN024GIS; Start 424; Stop 448
gctcaaaataccctcttgctttatc

SEQ ID NO: 301856 - DNA, 25 bp, Artificial
  probe
  misc_feature (1)..(25): SEQ ID NO: 1681; WAN024GIS; Start 640; Stop 664
aaatttattcctatcttgggtggta

SEQ ID NO: 301857 - DNA, 25 bp, Artificial
  probe
  misc_feature (1)..(25): SEQ ID NO: 1681; WAN024GIS; Start 761; Stop 785
atcaagaagatgttgaaacaatccg

SEQ ID NO: 301858 - DNA, 25 bp, Artificial
  probe
  misc_feature (1)..(25): SEQ ID NO: 1681; WAN024GIS; Start 423; Stop 447
tgctcaaaataccctcttgctttat

SEQ ID NO: 301859 - DNA, 25 bp, Artificial
  probe
  misc_feature (1)..(25): SEQ ID NO: 1681; WAN024GIS; Start 422; Stop 446
atgctcaaaataccctcttgcttta

SEQ ID NO: 301860 - DNA, 25 bp, Artificial
  probe
  misc_feature (1)..(25): SEQ ID NO: 1682; WAN024B3D; Start 487; Stop 511
aagtatatcaacacagtagcacgaa

SEQ ID NO: 301861 - DNA, 25 bp, Artificial
  probe
  misc_feature (1)..(25): SEQ ID NO: 1682; WAN024B3D; Start 486; Stop 510
taagtatatcaacacagtagcacga

SEQ ID NO: 301862 - DNA, 25 bp, Artificial
  probe
  misc_feature (1)..(25): SEQ ID NO: 1682; WAN024B3D; Start 483; Stop 507
gcataagtatatcaacacagtagca

SEQ ID NO: 301863 - DNA, 25 bp, Artificial
  probe
  misc_feature (1)..(25): SEQ ID NO: 1682; WAN024B3D; Start 485; Stop 509
ataagtatatcaacacagtagcacg

SEQ ID NO: 301864 - DNA, 25 bp, Artificial
  probe
  misc_feature (1)..(25): SEQ ID NO: 1682; WAN024B3D; Start 388; Stop 412
gcaggaatagtagcaactcatctaa

SEQ ID NO: 301865 - DNA, 25 bp, Artificial
  probe
  misc_feature (1)..(25): SEQ ID NO: 1682; WAN024B3D; Start 230; Stop 254
tcattctattattgctggcatggtt

SEQ ID NO: 301866 - DNA, 25 bp, Artificial
  probe
  misc_feature (1)..(25): SEQ ID NO: 1682; WAN024B3D; Start 229; Stop 253
ttcattctattattgctggcatggt

SEQ ID NO: 301867 - DNA, 25 bp, Artificial
  probe
  misc_feature (1)..(25): SEQ ID NO: 1682; WAN024B3D; Start 581; Stop 605
catcaattacaggtattcctcaggt

SEQ ID NO: 301868 - DNA, 25 bp, Artificial
  probe
  misc_feature (1)..(25): SEQ ID NO: 1682; WAN024B3D; Start 580; Stop 604
acatcaattacaggtattcctcagg

SEQ ID NO: 301869 - DNA, 25 bp, Artificial
  probe
  misc_feature (1)..(25): SEQ ID NO: 1682; WAN024B3D; Start 582; Stop 606
atcaattacaggtattcctcaggtt

SEQ ID NO: 301870 - DNA, 25 bp, Artificial
  probe
  misc_feature (1)..(25): SEQ ID NO: 1682; WAN024B3D; Start 578; Stop 602
tgacatcaattacaggtattcctca

SEQ ID NO: 301871 - DNA, 25 bp, Artificial
  probe
  misc_feature (1)..(25): SEQ ID NO: 1682; WAN024B3D; Start 97; Stop 121
tatgttggaagaccgttatcctatc

SEQ ID NO: 301872 - DNA, 25 bp, Artificial
  probe
  misc_feature (1)..(25): SEQ ID NO: 1682; WAN024B3D; Start 579; Stop 603
gacatcaattacaggtattcctcag

SEQ ID NO: 301873 - DNA, 25 bp, Artificial
  probe
  misc_feature (1)..(25): SEQ ID NO: 1682; WAN024B3D; Start 96; Stop 120
ttatgttggaagaccgttatcctat

SEQ ID NO: 301874 - DNA, 25 bp, Artificial
  probe
  misc_feature (1)..(25): SEQ ID NO: 1682; WAN024B3D; Start 484; Stop 508
cataagtatatcaacacagtagcac

SEQ ID NO: 301875 - DNA, 25 bp, Artificial
  probe
  misc_feature (1)..(25): SEQ ID NO: 1682; WAN024B3D; Start 98; Stop 122
atgttggaagaccgttatcctatct

SEQ ID NO: 301876 - DNA, 25 bp, Artificial
  probe
  misc_feature (1)..(25): SEQ ID NO: 1682; WAN024B3D; Start 577; Stop 601
atgacatcaattacaggtattcctc

SEQ ID NO: 301877 - DNA, 25 bp, Artificial
  probe
  misc_feature (1)..(25): SEQ ID NO: 1682; WAN024B3D; Start 488; Stop 512
agtatatcaacacagtagcacgaaa

SEQ ID NO: 301878 - DNA, 25 bp, Artificial
  probe
  misc_feature (1)..(25): SEQ ID NO: 1682; WAN024B3D; Start 490; Stop 514
tatatcaacacagtagcacgaaatg

SEQ ID NO: 301879 - DNA, 25 bp, Artificial
  probe
  misc_feature (1)..(25): SEQ ID NO: 1682; WAN024B3D; Start 489; Stop 513
gtatatcaacacagtagcacgaaat

SEQ ID NO: 301880 - DNA, 25 bp, Artificial
  probe
  misc_feature (1)..(25): SEQ ID NO: 1682; WAN024B3D; Start 439; Stop 463
ggtgctttatctggaatttctttga

SEQ ID NO: 301881 - DNA, 25 bp, Artificial
  probe
  misc_feature (1)..(25): SEQ ID NO: 1682; WAN024B3D; Start 438; Stop 462
gggtgctttatctggaatttctttg

SEQ ID NO: 301882 - DNA, 25 bp, Artificial
  probe
  misc_feature (1)..(25): SEQ ID NO: 1682; WAN024B3D; Start 482; Stop 506
tgcataagtatatcaacacagtagc

SEQ ID NO: 301883 - DNA, 25 bp, Artificial
  probe
  misc_feature (1)..(25): SEQ ID NO: 1682; WAN024B3D; Start 437; Stop 461
tgggtgctttatctggaatttcttt

SEQ ID NO: 301884 - DNA, 25 bp, Artificial
  probe
  misc_feature (1)..(25): SEQ ID NO: 1682; WAN024B3D; Start 436; Stop 460
ttgggtgctttatctggaatttctt

SEQ ID NO: 301885 - DNA, 25 bp, Artificial
  probe
  misc_feature (1)..(25): SEQ ID NO: 1682; WAN024B3D; Start 435; Stop 459
tttgggtgctttatctggaatttct

SEQ ID NO: 301886 - DNA, 25 bp, Artificial
  probe
  misc_feature (1)..(25): SEQ ID NO: 1682; WAN024B3D; Start 186; Stop 210
ccctttgattcttggatttctgaca

SEQ ID NO: 301887 - DNA, 25 bp, Artificial
  probe
  misc_feature (1)..(25): SEQ ID NO: 1682; WAN024B3D; Start 187; Stop 211
cctttgattcttggatttctgacaa

SEQ ID NO: 301888 - DNA, 25 bp, Artificial
  probe
  misc_feature (1)..(25): SEQ ID NO: 1682; WAN024B3D; Start 192; Stop 216
gattcttggatttctgacaatgaca

SEQ ID NO: 301889 - DNA, 25 bp, Artificial
  probe
  misc_feature (1)..(25): SEQ ID NO: 1682; WAN024B3D; Start 191; Stop 215
tgattcttggatttctgacaatgac

SEQ ID NO: 301890 - DNA, 25 bp, Artificial
  probe
  misc_feature (1)..(25): SEQ ID NO: 1682; WAN024B3D; Start 503; Stop 527
tagcacgaaatgagtctgtcaataa

SEQ ID NO: 301891 - DNA, 25 bp, Artificial
  probe
  misc_feature (1)..(25): SEQ ID NO: 1682; WAN024B3D; Start 491; Stop 515
atatcaacacagtagcacgaaatga

SEQ ID NO: 301892 - DNA, 25 bp, Artificial
  probe
  misc_feature (1)..(25): SEQ ID NO: 1682; WAN024B3D; Start 193; Stop 217
attcttggatttctgacaatgacat

SEQ ID NO: 301893 - DNA, 25 bp, Artificial
  probe
  misc_feature (1)..(25): SEQ ID NO: 1683; WAN024AVN; Start 49; Stop 73
aagacagatatgaggcagggaatag

SEQ ID NO: 301894 - DNA, 25 bp, Artificial
  probe
  misc_feature (1)..(25): SEQ ID NO: 1683; WAN024AVN; Start 48; Stop 72
caagacagatatgaggcagggaata

SEQ ID NO: 301895 - DNA, 25 bp, Artificial
  probe
  misc_feature (1)..(25): SEQ ID NO: 1683; WAN024AVN; Start 117; Stop 141
tttctccgatcaagtctttctcttt

SEQ ID NO: 301896 - DNA, 25 bp, Artificial
  probe
  misc_feature (1)..(25): SEQ ID NO: 1683; WAN024AVN; Start 116; Stop 140
ctttctccgatcaagtctttctctt

SEQ ID NO: 301897 - DNA, 25 bp, Artificial
  probe
  misc_feature (1)..(25): SEQ ID NO: 1683; WAN024AVN; Start 51; Stop 75
gacagatatgaggcagggaatagac

SEQ ID NO: 301898 - DNA, 25 bp, Artificial
  probe
  misc_feature (1)..(25): SEQ ID NO: 1683; WAN024AVN; Start 50; Stop 74
agacagatatgaggcagggaataga

SEQ ID NO: 301899 - DNA, 25 bp, Artificial
  probe
  misc_feature (1)..(25): SEQ ID NO: 1683; WAN024AVN; Start 113; Stop 137
atcctttctccgatcaagtctttct

SEQ ID NO: 301900 - DNA, 25 bp, Artificial
  probe
  misc_feature (1)..(25): SEQ ID NO: 1683; WAN024AVN; Start 52; Stop 76
acagatatgaggcagggaatagact

SEQ ID NO: 301901 - DNA, 25 bp, Artificial
  probe
  misc_feature (1)..(25): SEQ ID NO: 1683; WAN024AVN; Start 38; Stop 62
ttgtttgtggcaagacagatatgag

SEQ ID NO: 301902 - DNA, 25 bp, Artificial
  probe
  misc_feature (1)..(25): SEQ ID NO: 1683; WAN024AVN; Start 53; Stop 77
cagatatgaggcagggaatagactc

SEQ ID NO: 301903 - DNA, 25 bp, Artificial
  probe
  misc_feature (1)..(25): SEQ ID NO: 1683; WAN024AVN; Start 115; Stop 139
cctttctccgatcaagtctttctct

SEQ ID NO: 301904 - DNA, 25 bp, Artificial
  probe
  misc_feature (1)..(25): SEQ ID NO: 1683; WAN024AVN; Start 114; Stop 138
tcctttctccgatcaagtctttctc

SEQ ID NO: 301905 - DNA, 25 bp, Artificial
  probe
  misc_feature (1)..(25): SEQ ID NO: 1683; WAN024AVN; Start 299; Stop 323
gcttttctatcactccccaaatact

SEQ ID NO: 301906 - DNA, 25 bp, Artificial
  probe
  misc_feature (1)..(25): SEQ ID NO: 1683; WAN024AVN; Start 202; Stop 226
ttatataaacgctttgagaacggaa

SEQ ID NO: 301907 - DNA, 25 bp, Artificial
  probe
  misc_feature (1)..(25): SEQ ID NO: 1683; WAN024AVN; Start 39; Stop 63
tgtttgtggcaagacagatatgagg

SEQ ID NO: 301908 - DNA, 25 bp, Artificial
  probe
  misc_feature (1)..(25): SEQ ID NO: 1683; WAN024AVN; Start 201; Stop 225
attatataaacgctttgagaacgga

SEQ ID NO: 301909 - DNA, 25 bp, Artificial
  probe
  misc_feature (1)..(25): SEQ ID NO: 1683; WAN024AVN; Start 298; Stop 322
ggcttttctatcactccccaaatac

SEQ ID NO: 301910 - DNA, 25 bp, Artificial
  probe
  misc_feature (1)..(25): SEQ ID NO: 1683; WAN024AVN; Start 179; Stop 203
gggatggtcaaggattttggatatt

SEQ ID NO: 301911 - DNA, 25 bp, Artificial
  probe
  misc_feature (1)..(25): SEQ ID NO: 1683; WAN024AVN; Start 112; Stop 136
gatcctttctccgatcaagtctttc

SEQ ID NO: 301912 - DNA, 25 bp, Artificial
  probe
  misc_feature (1)..(25): SEQ ID NO: 1683; WAN024AVN; Start 118; Stop 142
ttctccgatcaagtctttctctttt

SEQ ID NO: 301913 - DNA, 25 bp, Artificial
  probe
  misc_feature (1)..(25): SEQ ID NO: 1683; WAN024AVN; Start 180; Stop 204
ggatggtcaaggattttggatatta

SEQ ID NO: 301914 - DNA, 25 bp, Artificial
  probe
  misc_feature (1)..(25): SEQ ID NO: 1683; WAN024AVN; Start 125; Stop 149
atcaagtctttctcttttgtggtgg

SEQ ID NO: 301915 - DNA, 25 bp, Artificial
  probe
  misc_feature (1)..(25): SEQ ID NO: 1683; WAN024AVN; Start 124; Stop 148
gatcaagtctttctcttttgtggtg

SEQ ID NO: 301916 - DNA, 25 bp, Artificial
  probe
  misc_feature (1)..(25): SEQ ID NO: 1683; WAN024AVN; Start 178; Stop 202
tgggatggtcaaggattttggatat

SEQ ID NO: 301917 - DNA, 25 bp, Artificial
  probe
  misc_feature (1)..(25): SEQ ID NO: 1683; WAN024AVN; Start 119; Stop 143
tctccgatcaagtctttctcttttg

SEQ ID NO: 301918 - DNA, 25 bp, Artificial
  probe
  misc_feature (1)..(25): SEQ ID NO: 1683; WAN024AVN; Start 300; Stop 324
cttttctatcactccccaaatacta

SEQ ID NO: 301919 - DNA, 25 bp, Artificial
  probe
  misc_feature (1)..(25): SEQ ID NO: 1683; WAN024AVN; Start 120; Stop 144
ctccgatcaagtctttctcttttgt

SEQ ID NO: 301920 - DNA, 25 bp, Artificial
  probe
  misc_feature (1)..(25): SEQ ID NO: 1683; WAN024AVN; Start 6; Stop 30
aattcaactaagtgatttaggtcaa

SEQ ID NO: 301921 - DNA, 25 bp, Artificial
  probe
  misc_feature (1)..(25): SEQ ID NO: 1683; WAN024AVN; Start 121; Stop 145
tccgatcaagtctttctcttttgtg

SEQ ID NO: 301922 - DNA, 25 bp, Artificial
  probe
  misc_feature (1)..(25): SEQ ID NO: 1683; WAN024AVN; Start 123; Stop 147
cgatcaagtctttctcttttgtggt

SEQ ID NO: 301923 - DNA, 25 bp, Artificial
  probe
  misc_feature (1)..(25): SEQ ID NO: 1683; WAN024AVN; Start 200; Stop 224
tattatataaacgctttgagaacgg

SEQ ID NO: 301924 - DNA, 25 bp, Artificial
  probe
  misc_feature (1)..(25): SEQ ID NO: 1683; WAN024AVN; Start 238; Stop 262
tccagtacagaaaaggatgtcaaag

SEQ ID NO: 301925 - DNA, 25 bp, Artificial
  probe
  misc_feature (1)..(25): SEQ ID NO: 1683; WAN024AVN; Start 42; Stop 66
ttgtggcaagacagatatgaggcag

SEQ ID NO: 301926 - DNA, 25 bp, Artificial
  probe
  misc_feature (1)..(25): SEQ ID NO: 1684; WAN024CGF; Start 46; Stop 70
ggagcagttgttgaagtgttgtatg

SEQ ID NO: 301927 - DNA, 25 bp, Artificial
  probe
  misc_feature (1)..(25): SEQ ID NO: 1684; WAN024CGF; Start 50; Stop 74
cagttgttgaagtgttgtatgccag

SEQ ID NO: 301928 - DNA, 25 bp, Artificial
  probe
  misc_feature (1)..(25): SEQ ID NO: 1684; WAN024CGF; Start 45; Stop 69
tggagcagttgttgaagtgttgtat

SEQ ID NO: 301929 - DNA, 25 bp, Artificial
  probe
  misc_feature (1)..(25): SEQ ID NO: 1684; WAN024CGF; Start 103; Stop 127
tatgaagaactagctgcacaatacc

SEQ ID NO: 301930 - DNA, 25 bp, Artificial
  probe
  misc_feature (1)..(25): SEQ ID NO: 1684; WAN024CGF; Start 159; Stop 183
gctggatacggatttgaatacacta

SEQ ID NO: 301931 - DNA, 25 bp, Artificial
  probe
  misc_feature (1)..(25): SEQ ID NO: 1684; WAN024CGF; Start 102; Stop 126
atatgaagaactagctgcacaatac

SEQ ID NO: 301932 - DNA, 25 bp, Artificial
  probe
  misc_feature (1)..(25): SEQ ID NO: 1684; WAN024CGF; Start 52; Stop 76
gttgttgaagtgttgtatgccagtg

SEQ ID NO: 301933 - DNA, 25 bp, Artificial
  probe
  misc_feature (1)..(25): SEQ ID NO: 1684; WAN024CGF; Start 51; Stop 75
agttgttgaagtgttgtatgccagt

SEQ ID NO: 301934 - DNA, 25 bp, Artificial
  probe
  misc_feature (1)..(25): SEQ ID NO: 1684; WAN024CGF; Start 161; Stop 185
tggatacggatttgaatacactaga

SEQ ID NO: 301935 - DNA, 25 bp, Artificial
  probe
  misc_feature (1)..(25): SEQ ID NO: 1684; WAN024CGF; Start 184; Stop 208
gatcattacccgtctgtgtttattg

SEQ ID NO: 301936 - DNA, 25 bp, Artificial
  probe
  misc_feature (1)..(25): SEQ ID NO: 1684; WAN024CGF; Start 101; Stop 125
aatatgaagaactagctgcacaata

SEQ ID NO: 301937 - DNA, 25 bp, Artificial
  probe
  misc_feature (1)..(25): SEQ ID NO: 1684; WAN024CGF; Start 160; Stop 184
ctggatacggatttgaatacactag

SEQ ID NO: 301938 - DNA, 25 bp, Artificial
  probe
  misc_feature (1)..(25): SEQ ID NO: 1684; WAN024CGF; Start 77; Stop 101
ctgaccaagataaggtacaagctaa

SEQ ID NO: 301939 - DNA, 25 bp, Artificial
  probe
  misc_feature (1)..(25): SEQ ID NO: 1684; WAN024CGF; Start 183; Stop 207
agatcattacccgtctgtgtttatt

SEQ ID NO: 301940 - DNA, 25 bp, Artificial
  probe
  misc_feature (1)..(25): SEQ ID NO: 1684; WAN024CGF; Start 181; Stop 205
ctagatcattacccgtctgtgttta

SEQ ID NO: 301941 - DNA, 25 bp, Artificial
  probe
  misc_feature (1)..(25): SEQ ID NO: 1684; WAN024CGF; Start 175; Stop 199
aatacactagatcattacccgtctg

SEQ ID NO: 301942 - DNA, 25 bp, Artificial
  probe
  misc_feature (1)..(25): SEQ ID NO: 1684; WAN024CGF; Start 174; Stop 198
gaatacactagatcattacccgtct

SEQ ID NO: 301943 - DNA, 25 bp, Artificial
  probe
  misc_feature (1)..(25): SEQ ID NO: 1684; WAN024CGF; Start 182; Stop 206
tagatcattacccgtctgtgtttat

SEQ ID NO: 301944 - DNA, 25 bp, Artificial
  probe
  misc_feature (1)..(25): SEQ ID NO: 1684; WAN024CGF; Start 173; Stop 197
tgaatacactagatcattacccgtc

SEQ ID NO: 301945 - DNA, 25 bp, Artificial
  probe
  misc_feature (1)..(25): SEQ ID NO: 1684; WAN024CGF; Start 66; Stop 90
gtatgccagtgctgaccaagataag

SEQ ID NO: 301946 - DNA, 25 bp, Artificial
  probe
  misc_feature (1)..(25): SEQ ID NO: 1684; WAN024CGF; Start 172; Stop 196
ttgaatacactagatcattacccgt

SEQ ID NO: 301947 - DNA, 25 bp, Artificial
  probe
  misc_feature (1)..(25): SEQ ID NO: 1684; WAN024CGF; Start 73; Stop 97
agtgctgaccaagataaggtacaag

SEQ ID NO: 301948 - DNA, 25 bp, Artificial
  probe
  misc_feature (1)..(25): SEQ ID NO: 1684; WAN024CGF; Start 176; Stop 200
atacactagatcattacccgtctgt

SEQ ID NO: 301949 - DNA, 25 bp, Artificial
  probe
  misc_feature (1)..(25): SEQ ID NO: 1684; WAN024CGF; Start 162; Stop 186
ggatacggatttgaatacactagat

SEQ ID NO: 301950 - DNA, 25 bp, Artificial
  probe
  misc_feature (1)..(25): SEQ ID NO: 1684; WAN024CGF; Start 180; Stop 204
actagatcattacccgtctgtgttt

SEQ ID NO: 301951 - DNA, 25 bp, Artificial
  probe
  misc_feature (1)..(25): SEQ ID NO: 1684; WAN024CGF; Start 72; Stop 96
cagtgctgaccaagataaggtacaa

SEQ ID NO: 301952 - DNA, 25 bp, Artificial
  probe
  misc_feature (1)..(25): SEQ ID NO: 1684; WAN024CGF; Start 171; Stop 195
tttgaatacactagatcattacccg

SEQ ID NO: 301953 - DNA, 25 bp, Artificial
  probe
  misc_feature (1)..(25): SEQ ID NO: 1684; WAN024CGF; Start 166; Stop 190
acggatttgaatacactagatcatt

SEQ ID NO: 301954 - DNA, 25 bp, Artificial
  probe
  misc_feature (1)..(25): SEQ ID NO: 1684; WAN024CGF; Start 44; Stop 68
ctggagcagttgttgaagtgttgta

SEQ ID NO: 301955 - DNA, 25 bp, Artificial
  probe
  misc_feature (1)..(25): SEQ ID NO: 1684; WAN024CGF; Start 177; Stop 201
tacactagatcattacccgtctgtg

SEQ ID NO: 301956 - DNA, 25 bp, Artificial
  probe
  misc_feature (1)..(25): SEQ ID NO: 1684; WAN024CGF; Start 100; Stop 124
aaatatgaagaactagctgcacaat

SEQ ID NO: 301957 - DNA, 25 bp, Artificial
  probe
  misc_feature (1)..(25): SEQ ID NO: 1684; WAN024CGF; Start 98; Stop 122
ctaaatatgaagaactagctgcaca

SEQ ID NO: 301958 - DNA, 25 bp, Artificial
  probe
  misc_feature (1)..(25): SEQ ID NO: 1684; WAN024CGF; Start 158; Stop 182
cgctggatacggatttgaatacact

SEQ ID NO: 301959 - DNA, 25 bp, Artificial
  probe
  misc_feature (1)..(25): SEQ ID NO: 1685; WAN024CEU; Start 498; Stop 522
acaatcagtagtagacttcgttgaa

SEQ ID NO: 301960 - DNA, 25 bp, Artificial
  probe
  misc_feature (1)..(25): SEQ ID NO: 1685; WAN024CEU; Start 497; Stop 521
tacaatcagtagtagacttcgttga

SEQ ID NO: 301961 - DNA, 25 bp, Artificial
  probe
  misc_feature (1)..(25): SEQ ID NO: 1685; WAN024CEU; Start 589; Stop 613
atcttgcttcgttaccttccagtta

SEQ ID NO: 301962 - DNA, 25 bp, Artificial
  probe
  misc_feature (1)..(25): SEQ ID NO: 1685; WAN024CEU; Start 342; Stop 366
tatgactactaccttcttcgctcac

SEQ ID NO: 301963 - DNA, 25 bp, Artificial
  probe
  misc_feature (1)..(25): SEQ ID NO: 1685; WAN024CEU; Start 341; Stop 365
gtatgactactaccttcttcgctca

SEQ ID NO: 301964 - DNA, 25 bp, Artificial
  probe
  misc_feature (1)..(25): SEQ ID NO: 1685; WAN024CEU; Start 590; Stop 614
tcttgcttcgttaccttccagttaa

SEQ ID NO: 301965 - DNA, 25 bp, Artificial
  probe
  misc_feature (1)..(25): SEQ ID NO: 1685; WAN024CEU; Start 496; Stop 520
gtacaatcagtagtagacttcgttg

SEQ ID NO: 301966 - DNA, 25 bp, Artificial
  probe
  misc_feature (1)..(25): SEQ ID NO: 1685; WAN024CEU; Start 340; Stop 364
cgtatgactactaccttcttcgctc

SEQ ID NO: 301967 - DNA, 25 bp, Artificial
  probe
  misc_feature (1)..(25): SEQ ID NO: 1685; WAN024CEU; Start 588; Stop 612
aatcttgcttcgttaccttccagtt

SEQ ID NO: 301968 - DNA, 25 bp, Artificial
  probe
  misc_feature (1)..(25): SEQ ID NO: 1685; WAN024CEU; Start 339; Stop 363
tcgtatgactactaccttcttcgct

SEQ ID NO: 301969 - DNA, 25 bp, Artificial
  probe
  misc_feature (1)..(25): SEQ ID NO: 1685; WAN024CEU; Start 335; Stop 359
ttggtcgtatgactactaccttctt

SEQ ID NO: 301970 - DNA, 25 bp, Artificial
  probe
  misc_feature (1)..(25): SEQ ID NO: 1685; WAN024CEU; Start 332; Stop 356
ttcttggtcgtatgactactacctt

SEQ ID NO: 301971 - DNA, 25 bp, Artificial
  probe
  misc_feature (1)..(25): SEQ ID NO: 1685; WAN024CEU; Start 131; Stop 155
atgtgactactggtttacttatcgg

SEQ ID NO: 301972 - DNA, 25 bp, Artificial
  probe
  misc_feature (1)..(25): SEQ ID NO: 1685; WAN024CEU; Start 94; Stop 118
gtatttgctggtttcattactggtt

SEQ ID NO: 301973 - DNA, 25 bp, Artificial
  probe
  misc_feature (1)..(25): SEQ ID NO: 1685; WAN024CEU; Start 336; Stop 360
tggtcgtatgactactaccttcttc

SEQ ID NO: 301974 - DNA, 25 bp, Artificial
  probe
  misc_feature (1)..(25): SEQ ID NO: 1685; WAN024CEU; Start 334; Stop 358
cttggtcgtatgactactaccttct

SEQ ID NO: 301975 - DNA, 25 bp, Artificial
  probe
  misc_feature (1)..(25): SEQ ID NO: 1685; WAN024CEU; Start 333; Stop 357
tcttggtcgtatgactactaccttc

SEQ ID NO: 301976 - DNA, 25 bp, Artificial
  probe
  misc_feature (1)..(25): SEQ ID NO: 1685; WAN024CEU; Start 127; Stop 151
ggagatgtgactactggtttactta

SEQ ID NO: 301977 - DNA, 25 bp, Artificial
  probe
  misc_feature (1)..(25): SEQ ID NO: 1685; WAN024CEU; Start 96; Stop 120
atttgctggtttcattactggttta

SEQ ID NO: 301978 - DNA, 25 bp, Artificial
  probe
  misc_feature (1)..(25): SEQ ID NO: 1685; WAN024CEU; Start 95; Stop 119
tatttgctggtttcattactggttt

SEQ ID NO: 301979 - DNA, 25 bp, Artificial
  probe
  misc_feature (1)..(25): SEQ ID NO: 1685; WAN024CEU; Start 92; Stop 116
ctgtatttgctggtttcattactgg

SEQ ID NO: 301980 - DNA, 25 bp, Artificial
  probe
  misc_feature (1)..(25): SEQ ID NO: 1685; WAN024CEU; Start 91; Stop 115
cctgtatttgctggtttcattactg

SEQ ID NO: 301981 - DNA, 25 bp, Artificial
  probe
  misc_feature (1)..(25): SEQ ID NO: 1685; WAN024CEU; Start 97; Stop 121
tttgctggtttcattactggtttaa

SEQ ID NO: 301982 - DNA, 25 bp, Artificial
  probe
  misc_feature (1)..(25): SEQ ID NO: 1685; WAN024CEU; Start 136; Stop 160
actactggtttacttatcggtggta

SEQ ID NO: 301983 - DNA, 25 bp, Artificial
  probe
  misc_feature (1)..(25): SEQ ID NO: 1685; WAN024CEU; Start 616; Stop 640
cgtaaccttcactaccttgctatgg

SEQ ID NO: 301984 - DNA, 25 bp, Artificial
  probe
  misc_feature (1)..(25): SEQ ID NO: 1685; WAN024CEU; Start 331; Stop 355
gttcttggtcgtatgactactacct

SEQ ID NO: 301985 - DNA, 25 bp, Artificial
  probe
  misc_feature (1)..(25): SEQ ID NO: 1685; WAN024CEU; Start 133; Stop 157
gtgactactggtttacttatcggtg

SEQ ID NO: 301986 - DNA, 25 bp, Artificial
  probe
  misc_feature (1)..(25): SEQ ID NO: 1685; WAN024CEU; Start 93; Stop 117
tgtatttgctggtttcattactggt

SEQ ID NO: 301987 - DNA, 25 bp, Artificial
  probe
  misc_feature (1)..(25): SEQ ID NO: 1685; WAN024CEU; Start 703; Stop 727
gttgctggtatcgtaggtactcttc

SEQ ID NO: 301988 - DNA, 25 bp, Artificial
  probe
  misc_feature (1)..(25): SEQ ID NO: 1685; WAN024CEU; Start 130; Stop 154
gatgtgactactggtttacttatcg

SEQ ID NO: 301989 - DNA, 25 bp, Artificial
  probe
  misc_feature (1)..(25): SEQ ID NO: 1685; WAN024CEU; Start 132; Stop 156
tgtgactactggtttacttatcggt

SEQ ID NO: 301990 - DNA, 25 bp, Artificial
  probe
  misc_feature (1)..(25): SEQ ID NO: 1685; WAN024CEU; Start 100; Stop 124
gctggtttcattactggtttaatca

SEQ ID NO: 301991 - DNA, 25 bp, Artificial
  probe
  misc_feature (1)..(25): SEQ ID NO: 1685; WAN024CEU; Start 99; Stop 123
tgctggtttcattactggtttaatc

SEQ ID NO: 301992 - DNA, 25 bp, Artificial
  probe
  misc_feature (1)..(25): SEQ ID NO: 1686; WAN024F9W; Start 160; Stop 184
atggaccgagatcagtatatggatt

SEQ ID NO: 301993 - DNA, 25 bp, Artificial
  probe
  misc_feature (1)..(25): SEQ ID NO: 1686; WAN024F9W; Start 159; Stop 183
aatggaccgagatcagtatatggat

SEQ ID NO: 301994 - DNA, 25 bp, Artificial
  probe
  misc_feature (1)..(25): SEQ ID NO: 1686; WAN024F9W; Start 158; Stop 182
gaatggaccgagatcagtatatgga

SEQ ID NO: 301995 - DNA, 25 bp, Artificial
  probe
  misc_feature (1)..(25): SEQ ID NO: 1686; WAN024F9W; Start 4; Stop 28
atacagccagcaagtttagaagaat

SEQ ID NO: 301996 - DNA, 25 bp, Artificial
  probe
  misc_feature (1)..(25): SEQ ID NO: 1686; WAN024F9W; Start 157; Stop 181
cgaatggaccgagatcagtatatgg

SEQ ID NO: 301997 - DNA, 25 bp, Artificial
  probe
  misc_feature (1)..(25): SEQ ID NO: 1686; WAN024F9W; Start 133; Stop 157
accaatccagagttcacctttattc

SEQ ID NO: 301998 - DNA, 25 bp, Artificial
  probe
  misc_feature (1)..(25): SEQ ID NO: 1686; WAN024F9W; Start 132; Stop 156
gaccaatccagagttcacctttatt

SEQ ID NO: 301999 - DNA, 25 bp, Artificial
  probe
  misc_feature (1)..(25): SEQ ID NO: 1686; WAN024F9W; Start 96; Stop 120
tcgttatatttatcctgccttacca

SEQ ID NO: 302000 - DNA, 25 bp, Artificial
  probe
  misc_feature (1)..(25): SEQ ID NO: 1686; WAN024F9W; Start 7; Stop 31
cagccagcaagtttagaagaattag

SEQ ID NO: 302001 - DNA, 25 bp, Artificial
  probe
  misc_feature (1)..(25): SEQ ID NO: 1686; WAN024F9W; Start 10; Stop 34
ccagcaagtttagaagaattagcat

SEQ ID NO: 302002 - DNA, 25 bp, Artificial
  probe
  misc_feature (1)..(25): SEQ ID NO: 1686; WAN024F9W; Start 95; Stop 119
gtcgttatatttatcctgccttacc

SEQ ID NO: 302003 - DNA, 25 bp, Artificial
  probe
  misc_feature (1)..(25): SEQ ID NO: 1686; WAN024F9W; Start 6; Stop 30
acagccagcaagtttagaagaatta

SEQ ID NO: 302004 - DNA, 25 bp, Artificial
  probe
  misc_feature (1)..(25): SEQ ID NO: 1686; WAN024F9W; Start 5; Stop 29
tacagccagcaagtttagaagaatt

SEQ ID NO: 302005 - DNA, 25 bp, Artificial
  probe
  misc_feature (1)..(25): SEQ ID NO: 1686; WAN024F9W; Start 3; Stop 27
gatacagccagcaagtttagaagaa

SEQ ID NO: 302006 - DNA, 25 bp, Artificial
  probe
  misc_feature (1)..(25): SEQ ID NO: 1686; WAN024F9W; Start 1; Stop 25
atgatacagccagcaagtttagaag

SEQ ID NO: 302007 - DNA, 25 bp, Artificial
  probe
  misc_feature (1)..(25): SEQ ID NO: 1686; WAN024F9W; Start 91; Stop 115
gattgtcgttatatttatcctgcct

SEQ ID NO: 302008 - DNA, 25 bp, Artificial
  probe
  misc_feature (1)..(25): SEQ ID NO: 1686; WAN024F9W; Start 131; Stop 155
agaccaatccagagttcacctttat

SEQ ID NO: 302009 - DNA, 25 bp, Artificial
  probe
  misc_feature (1)..(25): SEQ ID NO: 1686; WAN024F9W; Start 94; Stop 118
tgtcgttatatttatcctgccttac

SEQ ID NO: 302010 - DNA, 25 bp, Artificial
  probe
  misc_feature (1)..(25): SEQ ID NO: 1686; WAN024F9W; Start 11; Stop 35
cagcaagtttagaagaattagcatc

SEQ ID NO: 302011 - DNA, 25 bp, Artificial
  probe
  misc_feature (1)..(25): SEQ ID NO: 1686; WAN024F9W; Start 92; Stop 116
attgtcgttatatttatcctgcctt

SEQ ID NO: 302012 - DNA, 25 bp, Artificial
  probe
  misc_feature (1)..(25): SEQ ID NO: 1686; WAN024F9W; Start 134; Stop 158
ccaatccagagttcacctttattcg

SEQ ID NO: 302013 - DNA, 25 bp, Artificial
  probe
  misc_feature (1)..(25): SEQ ID NO: 1686; WAN024F9W; Start 163; Stop 187
gaccgagatcagtatatggatttgg

SEQ ID NO: 302014 - DNA, 25 bp, Artificial
  probe
  misc_feature (1)..(25): SEQ ID NO: 1686; WAN024F9W; Start 162; Stop 186
ggaccgagatcagtatatggatttg

SEQ ID NO: 302015 - DNA, 25 bp, Artificial
  probe
  misc_feature (1)..(25): SEQ ID NO: 1686; WAN024F9W; Start 8; Stop 32
agccagcaagtttagaagaattagc

SEQ ID NO: 302016 - DNA, 25 bp, Artificial
  probe
  misc_feature (1)..(25): SEQ ID NO: 1686; WAN024F9W; Start 161; Stop 185
tggaccgagatcagtatatggattt

SEQ ID NO: 302017 - DNA, 25 bp, Artificial
  probe
  misc_feature (1)..(25): SEQ ID NO: 1686; WAN024F9W; Start 130; Stop 154
gagaccaatccagagttcaccttta

SEQ ID NO: 302018 - DNA, 25 bp, Artificial
  probe
  misc_feature (1)..(25): SEQ ID NO: 1686; WAN024F9W; Start 2; Stop 26
tgatacagccagcaagtttagaaga

SEQ ID NO: 302019 - DNA, 25 bp, Artificial
  probe
  misc_feature (1)..(25): SEQ ID NO: 1686; WAN024F9W; Start 12; Stop 36
agcaagtttagaagaattagcatct

SEQ ID NO: 302020 - DNA, 25 bp, Artificial
  probe
  misc_feature (1)..(25): SEQ ID NO: 1686; WAN024F9W; Start 9; Stop 33
gccagcaagtttagaagaattagca

SEQ ID NO: 302021 - DNA, 25 bp, Artificial
  probe
  misc_feature (1)..(25): SEQ ID NO: 1686; WAN024F9W; Start 103; Stop 127
atttatcctgccttaccagagattg

SEQ ID NO: 302022 - DNA, 25 bp, Artificial
  probe
  misc_feature (1)..(25): SEQ ID NO: 1686; WAN024F9W; Start 93; Stop 117
ttgtcgttatatttatcctgcctta

SEQ ID NO: 302023 - DNA, 25 bp, Artificial
  probe
  misc_feature (1)..(25): SEQ ID NO: 1686; WAN024F9W; Start 97; Stop 121
cgttatatttatcctgccttaccag

SEQ ID NO: 302024 - DNA, 25 bp, Artificial
  probe
  misc_feature (1)..(25): SEQ ID NO: 1686; WAN024F9W; Start 102; Stop 126
tatttatcctgccttaccagagatt

SEQ ID NO: 302025 - DNA, 25 bp, Artificial
  probe
  misc_feature (1)..(25): SEQ ID NO: 1687; WAN024DAX; Start 157; Stop 181
ggctatgaaccaatcctagaattaa

SEQ ID NO: 302026 - DNA, 25 bp, Artificial
  probe
  misc_feature (1)..(25): SEQ ID NO: 1687; WAN024DAX; Start 155; Stop 179
caggctatgaaccaatcctagaatt

SEQ ID NO: 302027 - DNA, 25 bp, Artificial
  probe
  misc_feature (1)..(25): SEQ ID NO: 1687; WAN024DAX; Start 156; Stop 180
aggctatgaaccaatcctagaatta

SEQ ID NO: 302028 - DNA, 25 bp, Artificial
  probe
  misc_feature (1)..(25): SEQ ID NO: 1687; WAN024DAX; Start 274; Stop 298
ttcttaggtatggcaaacttatcgg

SEQ ID NO: 302029 - DNA, 25 bp, Artificial
  probe
  misc_feature (1)..(25): SEQ ID NO: 1687; WAN024DAX; Start 177; Stop 201
attaaacgaagatgaaggtggctat

SEQ ID NO: 302030 - DNA, 25 bp, Artificial
  probe
  misc_feature (1)..(25): SEQ ID NO: 1687; WAN024DAX; Start 111; Stop 135
ttctacgcttgccattaactttatc

SEQ ID NO: 302031 - DNA, 25 bp, Artificial
  probe
  misc_feature (1)..(25): SEQ ID NO: 1687; WAN024DAX; Start 273; Stop 297
tttcttaggtatggcaaacttatcg

SEQ ID NO: 302032 - DNA, 25 bp, Artificial
  probe
  misc_feature (1)..(25): SEQ ID NO: 1687; WAN024DAX; Start 112; Stop 136
tctacgcttgccattaactttatca

SEQ ID NO: 302033 - DNA, 25 bp, Artificial
  probe
  misc_feature (1)..(25): SEQ ID NO: 1687; WAN024DAX; Start 110; Stop 134
tttctacgcttgccattaactttat

SEQ ID NO: 302034 - DNA, 25 bp, Artificial
  probe
  misc_feature (1)..(25): SEQ ID NO: 1687; WAN024DAX; Start 176; Stop 200
aattaaacgaagatgaaggtggcta

SEQ ID NO: 302035 - DNA, 25 bp, Artificial
  probe
  misc_feature (1)..(25): SEQ ID NO: 1687; WAN024DAX; Start 276; Stop 300
cttaggtatggcaaacttatcggag

SEQ ID NO: 302036 - DNA, 25 bp, Artificial
  probe
  misc_feature (1)..(25): SEQ ID NO: 1687; WAN024DAX; Start 109; Stop 133
gtttctacgcttgccattaacttta

SEQ ID NO: 302037 - DNA, 25 bp, Artificial
  probe
  misc_feature (1)..(25): SEQ ID NO: 1687; WAN024DAX; Start 178; Stop 202
ttaaacgaagatgaaggtggctatc

SEQ ID NO: 302038 - DNA, 25 bp, Artificial
  probe
  misc_feature (1)..(25): SEQ ID NO: 1687; WAN024DAX; Start 278; Stop 302
taggtatggcaaacttatcggagaa

SEQ ID NO: 302039 - DNA, 25 bp, Artificial
  probe
  misc_feature (1)..(25): SEQ ID NO: 1687; WAN024DAX; Start 277; Stop 301
ttaggtatggcaaacttatcggaga

SEQ ID NO: 302040 - DNA, 25 bp, Artificial
  probe
  misc_feature (1)..(25): SEQ ID NO: 1687; WAN024DAX; Start 275; Stop 299
tcttaggtatggcaaacttatcgga

SEQ ID NO: 302041 - DNA, 25 bp, Artificial
  probe
  misc_feature (1)..(25): SEQ ID NO: 1687; WAN024DAX; Start 237; Stop 261
ccagagagaaatgacccagttattc

SEQ ID NO: 302042 - DNA, 25 bp, Artificial
  probe
  misc_feature (1)..(25): SEQ ID NO: 1687; WAN024DAX; Start 113; Stop 137
ctacgcttgccattaactttatcaa

SEQ ID NO: 302043 - DNA, 25 bp, Artificial
  probe
  misc_feature (1)..(25): SEQ ID NO: 1687; WAN024DAX; Start 173; Stop 197
tagaattaaacgaagatgaaggtgg

SEQ ID NO: 302044 - DNA, 25 bp, Artificial
  probe
  misc_feature (1)..(25): SEQ ID NO: 1687; WAN024DAX; Start 236; Stop 260
accagagagaaatgacccagttatt

SEQ ID NO: 302045 - DNA, 25 bp, Artificial
  probe
  misc_feature (1)..(25): SEQ ID NO: 1687; WAN024DAX; Start 316; Stop 340
gtccaaaccagagttatcacagaaa

SEQ ID NO: 302046 - DNA, 25 bp, Artificial
  probe
  misc_feature (1)..(25): SEQ ID NO: 1687; WAN024DAX; Start 115; Stop 139
acgcttgccattaactttatcaatt

SEQ ID NO: 302047 - DNA, 25 bp, Artificial
  probe
  misc_feature (1)..(25): SEQ ID NO: 1687; WAN024DAX; Start 114; Stop 138
tacgcttgccattaactttatcaat

SEQ ID NO: 302048 - DNA, 25 bp, Artificial
  probe
  misc_feature (1)..(25): SEQ ID NO: 1687; WAN024DAX; Start 116; Stop 140
cgcttgccattaactttatcaattc

SEQ ID NO: 302049 - DNA, 25 bp, Artificial
  probe
  misc_feature (1)..(25): SEQ ID NO: 1687; WAN024DAX; Start 193; Stop 217
ggtggctatctgatggttgaaatac

SEQ ID NO: 302050 - DNA, 25 bp, Artificial
  probe
  misc_feature (1)..(25): SEQ ID NO: 1687; WAN024DAX; Start 192; Stop 216
aggtggctatctgatggttgaaata

SEQ ID NO: 302051 - DNA, 25 bp, Artificial
  probe
  misc_feature (1)..(25): SEQ ID NO: 1687; WAN024DAX; Start 187; Stop 211
gatgaaggtggctatctgatggttg

SEQ ID NO: 302052 - DNA, 25 bp, Artificial
  probe
  misc_feature (1)..(25): SEQ ID NO: 1687; WAN024DAX; Start 224; Stop 248
atcttccttcacaccagagagaaat

SEQ ID NO: 302053 - DNA, 25 bp, Artificial
  probe
  misc_feature (1)..(25): SEQ ID NO: 1687; WAN024DAX; Start 175; Stop 199
gaattaaacgaagatgaaggtggct

SEQ ID NO: 302054 - DNA, 25 bp, Artificial
  probe
  misc_feature (1)..(25): SEQ ID NO: 1687; WAN024DAX; Start 174; Stop 198
agaattaaacgaagatgaaggtggc

SEQ ID NO: 302055 - DNA, 25 bp, Artificial
  probe
  misc_feature (1)..(25): SEQ ID NO: 1687; WAN024DAX; Start 154; Stop 178
gcaggctatgaaccaatcctagaat

SEQ ID NO: 302056 - DNA, 25 bp, Artificial
  probe
  misc_feature (1)..(25): SEQ ID NO: 1687; WAN024DAX; Start 162; Stop 186
tgaaccaatcctagaattaaacgaa

SEQ ID NO: 302057 - DNA, 25 bp, Artificial
  probe
  misc_feature (1)..(25): SEQ ID NO: 1687; WAN024DAX; Start 235; Stop 259
caccagagagaaatgacccagttat

SEQ ID NO: 302058 - DNA, 25 bp, Artificial
  probe
  misc_feature (1)..(25): SEQ ID NO: 1688; WAN024AYS; Start 5; Stop 29
taccaagttttctagctcttgtcaa

SEQ ID NO: 302059 - DNA, 25 bp, Artificial
  probe
  misc_feature (1)..(25): SEQ ID NO: 1688; WAN024AYS; Start 4; Stop 28
ataccaagttttctagctcttgtca

SEQ ID NO: 302060 - DNA, 25 bp, Artificial
  probe
  misc_feature (1)..(25): SEQ ID NO: 1688; WAN024AYS; Start 2; Stop 26
tgataccaagttttctagctcttgt

SEQ ID NO: 302061 - DNA, 25 bp, Artificial
  probe
  misc_feature (1)..(25): SEQ ID NO: 1688; WAN024AYS; Start 3; Stop 27
gataccaagttttctagctcttgtc

SEQ ID NO: 302062 - DNA, 25 bp, Artificial
  probe
  misc_feature (1)..(25): SEQ ID NO: 1688; WAN024AYS; Start 10; Stop 34
agttttctagctcttgtcaagataa

SEQ ID NO: 302063 - DNA, 25 bp, Artificial
  probe
  misc_feature (1)..(25): SEQ ID NO: 1688; WAN024AYS; Start 9; Stop 33
aagttttctagctcttgtcaagata

SEQ ID NO: 302064 - DNA, 25 bp, Artificial
  probe
  misc_feature (1)..(25): SEQ ID NO: 1688; WAN024AYS; Start 6; Stop 30
accaagttttctagctcttgtcaag

SEQ ID NO: 302065 - DNA, 25 bp, Artificial
  probe
  misc_feature (1)..(25): SEQ ID NO: 1688; WAN024AYS; Start 1; Stop 25
atgataccaagttttctagctcttg

SEQ ID NO: 302066 - DNA, 25 bp, Artificial
  probe
  misc_feature (1)..(25): SEQ ID NO: 1688; WAN024AYS; Start 8; Stop 32
caagttttctagctcttgtcaagat

SEQ ID NO: 302067 - DNA, 25 bp, Artificial
  probe
  misc_feature (1)..(25): SEQ ID NO: 1688; WAN024AYS; Start 7; Stop 31
ccaagttttctagctcttgtcaaga

SEQ ID NO: 302068 - DNA, 25 bp, Artificial
  probe
  misc_feature (1)..(25): SEQ ID NO: 1688; WAN024AYS; Start 11; Stop 35
gttttctagctcttgtcaagataaa

SEQ ID NO: 302069 - DNA, 25 bp, Artificial
  probe
  misc_feature (1)..(25): SEQ ID NO: 1688; WAN024AYS; Start 12; Stop 36
ttttctagctcttgtcaagataaaa

SEQ ID NO: 302070 - DNA, 25 bp, Artificial
  probe
  misc_feature (1)..(25): SEQ ID NO: 1689; WAN024GIR; Start 2; Stop 26
tgataccacccaagataggaataaa

SEQ ID NO: 302071 - DNA, 25 bp, Artificial
  probe
  misc_feature (1)..(25): SEQ ID NO: 1689; WAN024GIR; Start 1; Stop 25
atgataccacccaagataggaataa

SEQ ID NO: 302072 - DNA, 25 bp, Artificial
  probe
  misc_feature (1)..(25): SEQ ID NO: 1689; WAN024GIR; Start 3; Stop 27
gataccacccaagataggaataaat

SEQ ID NO: 302073 - DNA, 25 bp, Artificial
  probe
  misc_feature (1)..(25): SEQ ID NO: 1689; WAN024GIR; Start 4; Stop 28
ataccacccaagataggaataaatt

SEQ ID NO: 302074 - DNA, 25 bp, Artificial
  probe
  misc_feature (1)..(25): SEQ ID NO: 1689; WAN024GIR; Start 6; Stop 30
accacccaagataggaataaatttc

SEQ ID NO: 302075 - DNA, 25 bp, Artificial
  probe
  misc_feature (1)..(25): SEQ ID NO: 1689; WAN024GIR; Start 5; Stop 29
taccacccaagataggaataaattt

SEQ ID NO: 302076 - DNA, 25 bp, Artificial
  probe
  misc_feature (1)..(25): SEQ ID NO: 1689; WAN024GIR; Start 142; Stop 166
ttcattacctgtttggcaattgtta

SEQ ID NO: 302077 - DNA, 25 bp, Artificial
  probe
  misc_feature (1)..(25): SEQ ID NO: 1689; WAN024GIR; Start 141; Stop 165
tttcattacctgtttggcaattgtt

SEQ ID NO: 302078 - DNA, 25 bp, Artificial
  probe
  misc_feature (1)..(25): SEQ ID NO: 1689; WAN024GIR; Start 143; Stop 167
tcattacctgtttggcaattgttat

SEQ ID NO: 302079 - DNA, 25 bp, Artificial
  probe
  misc_feature (1)..(25): SEQ ID NO: 1689; WAN024GIR; Start 201; Stop 225
cacccctaacattacgcctagataa

SEQ ID NO: 302080 - DNA, 25 bp, Artificial
  probe
  misc_feature (1)..(25): SEQ ID NO: 1689; WAN024GIR; Start 145; Stop 169
attacctgtttggcaattgttatac

SEQ ID NO: 302081 - DNA, 25 bp, Artificial
  probe
  misc_feature (1)..(25): SEQ ID NO: 1689; WAN024GIR; Start 144; Stop 168
cattacctgtttggcaattgttata

SEQ ID NO: 302082 - DNA, 25 bp, Artificial
  probe
  misc_feature (1)..(25): SEQ ID NO: 1689; WAN024GIR; Start 200; Stop 224
tcacccctaacattacgcctagata

SEQ ID NO: 302083 - DNA, 25 bp, Artificial
  probe
  misc_feature (1)..(25): SEQ ID NO: 1689; WAN024GIR; Start 197; Stop 221
cattcacccctaacattacgcctag

SEQ ID NO: 302084 - DNA, 25 bp, Artificial
  probe
  misc_feature (1)..(25): SEQ ID NO: 1689; WAN024GIR; Start 199; Stop 223
ttcacccctaacattacgcctagat

SEQ ID NO: 302085 - DNA, 25 bp, Artificial
  probe
  misc_feature (1)..(25): SEQ ID NO: 1689; WAN024GIR; Start 198; Stop 222
attcacccctaacattacgcctaga

SEQ ID NO: 302086 - DNA, 25 bp, Artificial
  probe
  misc_feature (1)..(25): SEQ ID NO: 1689; WAN024GIR; Start 8; Stop 32
cacccaagataggaataaatttccc

SEQ ID NO: 302087 - DNA, 25 bp, Artificial
  probe
  misc_feature (1)..(25): SEQ ID NO: 1689; WAN024GIR; Start 7; Stop 31
ccacccaagataggaataaatttcc

SEQ ID NO: 302088 - DNA, 25 bp, Artificial
  probe
  misc_feature (1)..(25): SEQ ID NO: 1689; WAN024GIR; Start 46; Stop 70
aaccctcccttggtaagattcacac

SEQ ID NO: 302089 - DNA, 25 bp, Artificial
  probe
  misc_feature (1)..(25): SEQ ID NO: 1689; WAN024GIR; Start 45; Stop 69
caaccctcccttggtaagattcaca

SEQ ID NO: 302090 - DNA, 25 bp, Artificial
  probe
  misc_feature (1)..(25): SEQ ID NO: 1689; WAN024GIR; Start 20; Stop 44
gaataaatttccccattcctttggc

SEQ ID NO: 302091 - DNA, 25 bp, Artificial
  probe
  misc_feature (1)..(25): SEQ ID NO: 1689; WAN024GIR; Start 140; Stop 164
ttttcattacctgtttggcaattgt

SEQ ID NO: 302092 - DNA, 25 bp, Artificial
  probe
  misc_feature (1)..(25): SEQ ID NO: 1689; WAN024GIR; Start 193; Stop 217
gttccattcacccctaacattacgc

SEQ ID NO: 302093 - DNA, 25 bp, Artificial
  probe
  misc_feature (1)..(25): SEQ ID NO: 1689; WAN024GIR; Start 196; Stop 220
ccattcacccctaacattacgccta

SEQ ID NO: 302094 - DNA, 25 bp, Artificial
  probe
  misc_feature (1)..(25): SEQ ID NO: 1689; WAN024GIR; Start 192; Stop 216
ggttccattcacccctaacattacg

SEQ ID NO: 302095 - DNA, 25 bp, Artificial
  probe
  misc_feature (1)..(25): SEQ ID NO: 1689; WAN024GIR; Start 191; Stop 215
cggttccattcacccctaacattac

SEQ ID NO: 302096 - DNA, 25 bp, Artificial
  probe
  misc_feature (1)..(25): SEQ ID NO: 1689; WAN024GIR; Start 21; Stop 45
aataaatttccccattcctttggcc

SEQ ID NO: 302097 - DNA, 25 bp, Artificial
  probe
  misc_feature (1)..(25): SEQ ID NO: 1689; WAN024GIR; Start 194; Stop 218
ttccattcacccctaacattacgcc

SEQ ID NO: 302098 - DNA, 25 bp, Artificial
  probe
  misc_feature (1)..(25): SEQ ID NO: 1689; WAN024GIR; Start 10; Stop 34
cccaagataggaataaatttcccca

SEQ ID NO: 302099 - DNA, 25 bp, Artificial
  probe
  misc_feature (1)..(25): SEQ ID NO: 1689; WAN024GIR; Start 9; Stop 33
acccaagataggaataaatttcccc

SEQ ID NO: 302100 - DNA, 25 bp, Artificial
  probe
  misc_feature (1)..(25): SEQ ID NO: 1689; WAN024GIR; Start 89; Stop 113
ttttcaaaatagggtaccaaagcgt

SEQ ID NO: 302101 - DNA, 25 bp, Artificial
  probe
  misc_feature (1)..(25): SEQ ID NO: 1689; WAN024GIR; Start 11; Stop 35
ccaagataggaataaatttccccat

SEQ ID NO: 302102 - DNA, 25 bp, Artificial
  probe
  misc_feature (1)..(25): SEQ ID NO: 1689; WAN024GIR; Start 90; Stop 114
tttcaaaatagggtaccaaagcgtc

SEQ ID NO: 302103 - DNA, 25 bp, Artificial
  probe
  misc_feature (1)..(25): SEQ ID NO: 1690; WAN024FDG; Start 194; Stop 218
ggatagttgtgtggatagagatagt

SEQ ID NO: 302104 - DNA, 25 bp, Artificial
  probe
  misc_feature (1)..(25): SEQ ID NO: 1690; WAN024FDG; Start 192; Stop 216
caggatagttgtgtggatagagata

SEQ ID NO: 302105 - DNA, 25 bp, Artificial
  probe
  misc_feature (1)..(25): SEQ ID NO: 1690; WAN024FDG; Start 199; Stop 223
gttgtgtggatagagatagtcttgg

SEQ ID NO: 302106 - DNA, 25 bp, Artificial
  probe
  misc_feature (1)..(25): SEQ ID NO: 1690; WAN024FDG; Start 198; Stop 222
agttgtgtggatagagatagtcttg

SEQ ID NO: 302107 - DNA, 25 bp, Artificial
  probe
  misc_feature (1)..(25): SEQ ID NO: 1690; WAN024FDG; Start 193; Stop 217
aggatagttgtgtggatagagatag

SEQ ID NO: 302108 - DNA, 25 bp, Artificial
  probe
  misc_feature (1)..(25): SEQ ID NO: 1690; WAN024FDG; Start 195; Stop 219
gatagttgtgtggatagagatagtc

SEQ ID NO: 302109 - DNA, 25 bp, Artificial
  probe
  misc_feature (1)..(25): SEQ ID NO: 1690; WAN024FDG; Start 197; Stop 221
tagttgtgtggatagagatagtctt

SEQ ID NO: 302110 - DNA, 25 bp, Artificial
  probe
  misc_feature (1)..(25): SEQ ID NO: 1690; WAN024FDG; Start 196; Stop 220
atagttgtgtggatagagatagtct

SEQ ID NO: 302111 - DNA, 25 bp, Artificial
  probe
  misc_feature (1)..(25): SEQ ID NO: 1690; WAN024FDG; Start 129; Stop 153
ctgcttggaaatagtgatgattacg

SEQ ID NO: 302112 - DNA, 25 bp, Artificial
  probe
  misc_feature (1)..(25): SEQ ID NO: 1690; WAN024FDG; Start 130; Stop 154
tgcttggaaatagtgatgattacga

SEQ ID NO: 302113 - DNA, 25 bp, Artificial
  probe
  misc_feature (1)..(25): SEQ ID NO: 1690; WAN024FDG; Start 191; Stop 215
ccaggatagttgtgtggatagagat

SEQ ID NO: 302114 - DNA, 25 bp, Artificial
  probe
  misc_feature (1)..(25): SEQ ID NO: 1690; WAN024FDG; Start 131; Stop 155
gcttggaaatagtgatgattacgaa

SEQ ID NO: 302115 - DNA, 25 bp, Artificial
  probe
  misc_feature (1)..(25): SEQ ID NO: 1690; WAN024FDG; Start 101; Stop 125
aaagcccgttcatatttaccagtat

SEQ ID NO: 302116 - DNA, 25 bp, Artificial
  probe
  misc_feature (1)..(25): SEQ ID NO: 1690; WAN024FDG; Start 104; Stop 128
gcccgttcatatttaccagtatctt

SEQ ID NO: 302117 - DNA, 25 bp, Artificial
  probe
  misc_feature (1)..(25): SEQ ID NO: 1690; WAN024FDG; Start 102; Stop 126
aagcccgttcatatttaccagtatc

SEQ ID NO: 302118 - DNA, 25 bp, Artificial
  probe
  misc_feature (1)..(25): SEQ ID NO: 1690; WAN024FDG; Start 125; Stop 149
tcttctgcttggaaatagtgatgat

SEQ ID NO: 302119 - DNA, 25 bp, Artificial
  probe
  misc_feature (1)..(25): SEQ ID NO: 1690; WAN024FDG; Start 124; Stop 148
atcttctgcttggaaatagtgatga

SEQ ID NO: 302120 - DNA, 25 bp, Artificial
  probe
  misc_feature (1)..(25): SEQ ID NO: 1690; WAN024FDG; Start 105; Stop 129
cccgttcatatttaccagtatcttc

SEQ ID NO: 302121 - DNA, 25 bp, Artificial
  probe
  misc_feature (1)..(25): SEQ ID NO: 1690; WAN024FDG; Start 121; Stop 145
agtatcttctgcttggaaatagtga

SEQ ID NO: 302122 - DNA, 25 bp, Artificial
  probe
  misc_feature (1)..(25): SEQ ID NO: 1690; WAN024FDG; Start 128; Stop 152
tctgcttggaaatagtgatgattac

SEQ ID NO: 302123 - DNA, 25 bp, Artificial
  probe
  misc_feature (1)..(25): SEQ ID NO: 1690; WAN024FDG; Start 126; Stop 150
cttctgcttggaaatagtgatgatt

SEQ ID NO: 302124 - DNA, 25 bp, Artificial
  probe
  misc_feature (1)..(25): SEQ ID NO: 1690; WAN024FDG; Start 100; Stop 124
caaagcccgttcatatttaccagta

SEQ ID NO: 302125 - DNA, 25 bp, Artificial
  probe
  misc_feature (1)..(25): SEQ ID NO: 1690; WAN024FDG; Start 103; Stop 127
agcccgttcatatttaccagtatct

SEQ ID NO: 302126 - DNA, 25 bp, Artificial
  probe
  misc_feature (1)..(25): SEQ ID NO: 1690; WAN024FDG; Start 123; Stop 147
tatcttctgcttggaaatagtgatg

SEQ ID NO: 302127 - DNA, 25 bp, Artificial
  probe
  misc_feature (1)..(25): SEQ ID NO: 1690; WAN024FDG; Start 122; Stop 146
gtatcttctgcttggaaatagtgat

SEQ ID NO: 302128 - DNA, 25 bp, Artificial
  probe
  misc_feature (1)..(25): SEQ ID NO: 1690; WAN024FDG; Start 200; Stop 224
ttgtgtggatagagatagtcttggg

SEQ ID NO: 302129 - DNA, 25 bp, Artificial
  probe
  misc_feature (1)..(25): SEQ ID NO: 1690; WAN024FDG; Start 205; Stop 229
tggatagagatagtcttgggcattc

SEQ ID NO: 302130 - DNA, 25 bp, Artificial
  probe
  misc_feature (1)..(25): SEQ ID NO: 1690; WAN024FDG; Start 106; Stop 130
ccgttcatatttaccagtatcttct

SEQ ID NO: 302131 - DNA, 25 bp, Artificial
  probe
  misc_feature (1)..(25): SEQ ID NO: 1690; WAN024FDG; Start 204; Stop 228
gtggatagagatagtcttgggcatt

SEQ ID NO: 302132 - DNA, 25 bp, Artificial
  probe
  misc_feature (1)..(25): SEQ ID NO: 1690; WAN024FDG; Start 127; Stop 151
ttctgcttggaaatagtgatgatta

SEQ ID NO: 302133 - DNA, 25 bp, Artificial
  probe
  misc_feature (1)..(25): SEQ ID NO: 1690; WAN024FDG; Start 120; Stop 144
cagtatcttctgcttggaaatagtg

SEQ ID NO: 302134 - DNA, 25 bp, Artificial
  probe
  misc_feature (1)..(25): SEQ ID NO: 1690; WAN024FDG; Start 178; Stop 202
cttgacccaatttccaggatagttg

SEQ ID NO: 302135 - DNA, 25 bp, Artificial
  probe
  misc_feature (1)..(25): SEQ ID NO: 1690; WAN024FDG; Start 167; Stop 191
agatagtcttgcttgacccaatttc

SEQ ID NO: 302136 - DNA, 25 bp, Artificial
  probe
  misc_feature (1)..(25): SEQ ID NO: 1691; WAN024FPQ; Start 13; Stop 37
aagattcattattgttggttcggtg

SEQ ID NO: 302137 - DNA, 25 bp, Artificial
  probe
  misc_feature (1)..(25): SEQ ID NO: 1691; WAN024FPQ; Start 602; Stop 626
ttcatcattatagtgcttcttggac

SEQ ID NO: 302138 - DNA, 25 bp, Artificial
  probe
  misc_feature (1)..(25): SEQ ID NO: 1691; WAN024FPQ; Start 603; Stop 627
tcatcattatagtgcttcttggact

SEQ ID NO: 302139 - DNA, 25 bp, Artificial
  probe
  misc_feature (1)..(25): SEQ ID NO: 1691; WAN024FPQ; Start 14; Stop 38
agattcattattgttggttcggtgg

SEQ ID NO: 302140 - DNA, 25 bp, Artificial
  probe
  misc_feature (1)..(25): SEQ ID NO: 1691; WAN024FPQ; Start 608; Stop 632
attatagtgcttcttggacttcctt

SEQ ID NO: 302141 - DNA, 25 bp, Artificial
  probe
  misc_feature (1)..(25): SEQ ID NO: 1691; WAN024FPQ; Start 607; Stop 631
cattatagtgcttcttggacttcct

SEQ ID NO: 302142 - DNA, 25 bp, Artificial
  probe
  misc_feature (1)..(25): SEQ ID NO: 1691; WAN024FPQ; Start 606; Stop 630
tcattatagtgcttcttggacttcc

SEQ ID NO: 302143 - DNA, 25 bp, Artificial
  probe
  misc_feature (1)..(25): SEQ ID NO: 1691; WAN024FPQ; Start 604; Stop 628
catcattatagtgcttcttggactt

SEQ ID NO: 302144 - DNA, 25 bp, Artificial
  probe
  misc_feature (1)..(25): SEQ ID NO: 1691; WAN024FPQ; Start 601; Stop 625
attcatcattatagtgcttcttgga

SEQ ID NO: 302145 - DNA, 25 bp, Artificial
  probe
  misc_feature (1)..(25): SEQ ID NO: 1691; WAN024FPQ; Start 605; Stop 629
atcattatagtgcttcttggacttc

SEQ ID NO: 302146 - DNA, 25 bp, Artificial
  probe
  misc_feature (1)..(25): SEQ ID NO: 1691; WAN024FPQ; Start 305; Stop 329
ttggagttcatcaagttaatcatct

SEQ ID NO: 302147 - DNA, 25 bp, Artificial
  probe
  misc_feature (1)..(25): SEQ ID NO: 1691; WAN024FPQ; Start 477; Stop 501
tggttatacttattctgactgtgtt

SEQ ID NO: 302148 - DNA, 25 bp, Artificial
  probe
  misc_feature (1)..(25): SEQ ID NO: 1691; WAN024FPQ; Start 476; Stop 500
ttggttatacttattctgactgtgt

SEQ ID NO: 302149 - DNA, 25 bp, Artificial
  probe
  misc_feature (1)..(25): SEQ ID NO: 1691; WAN024FPQ; Start 478; Stop 502
ggttatacttattctgactgtgttg

SEQ ID NO: 302150 - DNA, 25 bp, Artificial
  probe
  misc_feature (1)..(25): SEQ ID NO: 1691; WAN024FPQ; Start 475; Stop 499
cttggttatacttattctgactgtg

SEQ ID NO: 302151 - DNA, 25 bp, Artificial
  probe
  misc_feature (1)..(25): SEQ ID NO: 1691; WAN024FPQ; Start 472; Stop 496
cgtcttggttatacttattctgact

SEQ ID NO: 302152 - DNA, 25 bp, Artificial
  probe
  misc_feature (1)..(25): SEQ ID NO: 1691; WAN024FPQ; Start 474; Stop 498
tcttggttatacttattctgactgt

SEQ ID NO: 302153 - DNA, 25 bp, Artificial
  probe
  misc_feature (1)..(25): SEQ ID NO: 1691; WAN024FPQ; Start 12; Stop 36
aaagattcattattgttggttcggt

SEQ ID NO: 302154 - DNA, 25 bp, Artificial
  probe
  misc_feature (1)..(25): SEQ ID NO: 1691; WAN024FPQ; Start 15; Stop 39
gattcattattgttggttcggtggc

SEQ ID NO: 302155 - DNA, 25 bp, Artificial
  probe
  misc_feature (1)..(25): SEQ ID NO: 1691; WAN024FPQ; Start 298; Stop 322
gcattctttggagttcatcaagtta

SEQ ID NO: 302156 - DNA, 25 bp, Artificial
  probe
  misc_feature (1)..(25): SEQ ID NO: 1691; WAN024FPQ; Start 479; Stop 503
gttatacttattctgactgtgttgt

SEQ ID NO: 302157 - DNA, 25 bp, Artificial
  probe
  misc_feature (1)..(25): SEQ ID NO: 1691; WAN024FPQ; Start 297; Stop 321
agcattctttggagttcatcaagtt

SEQ ID NO: 302158 - DNA, 25 bp, Artificial
  probe
  misc_feature (1)..(25): SEQ ID NO: 1691; WAN024FPQ; Start 296; Stop 320
aagcattctttggagttcatcaagt

SEQ ID NO: 302159 - DNA, 25 bp, Artificial
  probe
  misc_feature (1)..(25): SEQ ID NO: 1691; WAN024FPQ; Start 600; Stop 624
tattcatcattatagtgcttcttgg

SEQ ID NO: 302160 - DNA, 25 bp, Artificial
  probe
  misc_feature (1)..(25): SEQ ID NO: 1691; WAN024FPQ; Start 16; Stop 40
attcattattgttggttcggtggca

SEQ ID NO: 302161 - DNA, 25 bp, Artificial
  probe
  misc_feature (1)..(25): SEQ ID NO: 1691; WAN024FPQ; Start 425; Stop 449
agaaagatgaattgttatgtcctga

SEQ ID NO: 302162 - DNA, 25 bp, Artificial
  probe
  misc_feature (1)..(25): SEQ ID NO: 1691; WAN024FPQ; Start 191; Stop 215
ttgtaagcgattatgcaagacttaa

SEQ ID NO: 302163 - DNA, 25 bp, Artificial
  probe
  misc_feature (1)..(25): SEQ ID NO: 1691; WAN024FPQ; Start 302; Stop 326
tctttggagttcatcaagttaatca

SEQ ID NO: 302164 - DNA, 25 bp, Artificial
  probe
  misc_feature (1)..(25): SEQ ID NO: 1691; WAN024FPQ; Start 428; Stop 452
aagatgaattgttatgtcctgaatt

SEQ ID NO: 302165 - DNA, 25 bp, Artificial
  probe
  misc_feature (1)..(25): SEQ ID NO: 1691; WAN024FPQ; Start 473; Stop 497
gtcttggttatacttattctgactg

SEQ ID NO: 302166 - DNA, 25 bp, Artificial
  probe
  misc_feature (1)..(25): SEQ ID NO: 1691; WAN024FPQ; Start 470; Stop 494
aacgtcttggttatacttattctga

SEQ ID NO: 302167 - DNA, 25 bp, Artificial
  probe
  misc_feature (1)..(25): SEQ ID NO: 1691; WAN024FPQ; Start 471; Stop 495
acgtcttggttatacttattctgac

SEQ ID NO: 302168 - DNA, 25 bp, Artificial
  probe
  misc_feature (1)..(25): SEQ ID NO: 1691; WAN024FPQ; Start 426; Stop 450
gaaagatgaattgttatgtcctgaa

SEQ ID NO: 302169 - DNA, 25 bp, Artificial
  probe
  misc_feature (1)..(25): SEQ ID NO: 1692; WAN024EY5; Start 115; Stop 139
ttgataggatatttgatggctgagg

SEQ ID NO: 302170 - DNA, 25 bp, Artificial
  probe
  misc_feature (1)..(25): SEQ ID NO: 1692; WAN024EY5; Start 114; Stop 138
gttgataggatatttgatggctgag

SEQ ID NO: 302171 - DNA, 25 bp, Artificial
  probe
  misc_feature (1)..(25): SEQ ID NO: 1692; WAN024EY5; Start 113; Stop 137
cgttgataggatatttgatggctga

SEQ ID NO: 302172 - DNA, 25 bp, Artificial
  probe
  misc_feature (1)..(25): SEQ ID NO: 1692; WAN024EY5; Start 178; Stop 202
atacgaatccaccaaccaaagatac

SEQ ID NO: 302173 - DNA, 25 bp, Artificial
  probe
  misc_feature (1)..(25): SEQ ID NO: 1692; WAN024EY5; Start 177; Stop 201
catacgaatccaccaaccaaagata

SEQ ID NO: 302174 - DNA, 25 bp, Artificial
  probe
  misc_feature (1)..(25): SEQ ID NO: 1692; WAN024EY5; Start 195; Stop 219
aaagatacggttggtaaagagttct

SEQ ID NO: 302175 - DNA, 25 bp, Artificial
  probe
  misc_feature (1)..(25): SEQ ID NO: 1692; WAN024EY5; Start 194; Stop 218
caaagatacggttggtaaagagttc

SEQ ID NO: 302176 - DNA, 25 bp, Artificial
  probe
  misc_feature (1)..(25): SEQ ID NO: 1692; WAN024EY5; Start 67; Stop 91
ctaccacttggaaacatgatgagag

SEQ ID NO: 302177 - DNA, 25 bp, Artificial
  probe
  misc_feature (1)..(25): SEQ ID NO: 1692; WAN024EY5; Start 116; Stop 140
tgataggatatttgatggctgaggc

SEQ ID NO: 302178 - DNA, 25 bp, Artificial
  probe
  misc_feature (1)..(25): SEQ ID NO: 1692; WAN024EY5; Start 68; Stop 92
taccacttggaaacatgatgagaga

SEQ ID NO: 302179 - DNA, 25 bp, Artificial
  probe
  misc_feature (1)..(25): SEQ ID NO: 1692; WAN024EY5; Start 176; Stop 200
acatacgaatccaccaaccaaagat

SEQ ID NO: 302180 - DNA, 25 bp, Artificial
  probe
  misc_feature (1)..(25): SEQ ID NO: 1692; WAN024EY5; Start 179; Stop 203
tacgaatccaccaaccaaagatacg

SEQ ID NO: 302181 - DNA, 25 bp, Artificial
  probe
  misc_feature (1)..(25): SEQ ID NO: 1692; WAN024EY5; Start 112; Stop 136
acgttgataggatatttgatggctg

SEQ ID NO: 302182 - DNA, 25 bp, Artificial
  probe
  misc_feature (1)..(25): SEQ ID NO: 1692; WAN024EY5; Start 69; Stop 93
accacttggaaacatgatgagagag

SEQ ID NO: 302183 - DNA, 25 bp, Artificial
  probe
  misc_feature (1)..(25): SEQ ID NO: 1692; WAN024EY5; Start 117; Stop 141
gataggatatttgatggctgaggcg

SEQ ID NO: 302184 - DNA, 25 bp, Artificial
  probe
  misc_feature (1)..(25): SEQ ID NO: 1692; WAN024EY5; Start 196; Stop 220
aagatacggttggtaaagagttctt

SEQ ID NO: 302185 - DNA, 25 bp, Artificial
  probe
  misc_feature (1)..(25): SEQ ID NO: 1692; WAN024EY5; Start 175; Stop 199
cacatacgaatccaccaaccaaaga

SEQ ID NO: 302186 - DNA, 25 bp, Artificial
  probe
  misc_feature (1)..(25): SEQ ID NO: 1692; WAN024EY5; Start 66; Stop 90
gctaccacttggaaacatgatgaga

SEQ ID NO: 302187 - DNA, 25 bp, Artificial
  probe
  misc_feature (1)..(25): SEQ ID NO: 1692; WAN024EY5; Start 229; Stop 253
ataaagatgaactgttttggcttgg

SEQ ID NO: 302188 - DNA, 25 bp, Artificial
  probe
  misc_feature (1)..(25): SEQ ID NO: 1692; WAN024EY5; Start 228; Stop 252
cataaagatgaactgttttggcttg

SEQ ID NO: 302189 - DNA, 25 bp, Artificial
  probe
  misc_feature (1)..(25): SEQ ID NO: 1692; WAN024EY5; Start 174; Stop 198
acacatacgaatccaccaaccaaag

SEQ ID NO: 302190 - DNA, 25 bp, Artificial
  probe
  misc_feature (1)..(25): SEQ ID NO: 1692; WAN024EY5; Start 197; Stop 221
agatacggttggtaaagagttcttt

SEQ ID NO: 302191 - DNA, 25 bp, Artificial
  probe
  misc_feature (1)..(25): SEQ ID NO: 1692; WAN024EY5; Start 223; Stop 247
tttgccataaagatgaactgttttg

SEQ ID NO: 302192 - DNA, 25 bp, Artificial
  probe
  misc_feature (1)..(25): SEQ ID NO: 1692; WAN024EY5; Start 230; Stop 254
taaagatgaactgttttggcttggt

SEQ ID NO: 302193 - DNA, 25 bp, Artificial
  probe
  misc_feature (1)..(25): SEQ ID NO: 1692; WAN024EY5; Start 173; Stop 197
cacacatacgaatccaccaaccaaa

SEQ ID NO: 302194 - DNA, 25 bp, Artificial
  probe
  misc_feature (1)..(25): SEQ ID NO: 1692; WAN024EY5; Start 222; Stop 246
ttttgccataaagatgaactgtttt

SEQ ID NO: 302195 - DNA, 25 bp, Artificial
  probe
  misc_feature (1)..(25): SEQ ID NO: 1692; WAN024EY5; Start 70; Stop 94
ccacttggaaacatgatgagagagc

SEQ ID NO: 302196 - DNA, 25 bp, Artificial
  probe
  misc_feature (1)..(25): SEQ ID NO: 1692; WAN024EY5; Start 65; Stop 89
ggctaccacttggaaacatgatgag

SEQ ID NO: 302197 - DNA, 25 bp, Artificial
  probe
  misc_feature (1)..(25): SEQ ID NO: 1692; WAN024EY5; Start 231; Stop 255
aaagatgaactgttttggcttggtc

SEQ ID NO: 302198 - DNA, 25 bp, Artificial
  probe
  misc_feature (1)..(25): SEQ ID NO: 1692; WAN024EY5; Start 227; Stop 251
ccataaagatgaactgttttggctt

SEQ ID NO: 302199 - DNA, 25 bp, Artificial
  probe
  misc_feature (1)..(25): SEQ ID NO: 1692; WAN024EY5; Start 224; Stop 248
ttgccataaagatgaactgttttgg

SEQ ID NO: 302200 - DNA, 25 bp, Artificial
  probe
  misc_feature (1)..(25): SEQ ID NO: 1692; WAN024EY5; Start 71; Stop 95
cacttggaaacatgatgagagagcg

SEQ ID NO: 302201 - DNA, 25 bp, Artificial
  probe
  misc_feature (1)..(25): SEQ ID NO: 1692; WAN024EY5; Start 110; Stop 134
gaacgttgataggatatttgatggc

SEQ ID NO: 302202 - DNA, 25 bp, Artificial
  probe
  misc_feature (1)..(25): SEQ ID NO: 1693; WAN024CBQ; Start 797; Stop 821
tctattatacaagttggttaaggca

SEQ ID NO: 302203 - DNA, 25 bp, Artificial
  probe
  misc_feature (1)..(25): SEQ ID NO: 1693; WAN024CBQ; Start 56; Stop 80
tagagttgcatgtcctagtgaataa

SEQ ID NO: 302204 - DNA, 25 bp, Artificial
  probe
  misc_feature (1)..(25): SEQ ID NO: 1693; WAN024CBQ; Start 293; Stop 317
aaagtttgtcgcctgatgatttaag

SEQ ID NO: 302205 - DNA, 25 bp, Artificial
  probe
  misc_feature (1)..(25): SEQ ID NO: 1693; WAN024CBQ; Start 295; Stop 319
agtttgtcgcctgatgatttaagat

SEQ ID NO: 302206 - DNA, 25 bp, Artificial
  probe
  misc_feature (1)..(25): SEQ ID NO: 1693; WAN024CBQ; Start 57; Stop 81
agagttgcatgtcctagtgaataac

SEQ ID NO: 302207 - DNA, 25 bp, Artificial
  probe
  misc_feature (1)..(25): SEQ ID NO: 1693; WAN024CBQ; Start 294; Stop 318
aagtttgtcgcctgatgatttaaga

SEQ ID NO: 302208 - DNA, 25 bp, Artificial
  probe
  misc_feature (1)..(25): SEQ ID NO: 1693; WAN024CBQ; Start 62; Stop 86
tgcatgtcctagtgaataacttact

SEQ ID NO: 302209 - DNA, 25 bp, Artificial
  probe
  misc_feature (1)..(25): SEQ ID NO: 1693; WAN024CBQ; Start 796; Stop 820
ttctattatacaagttggttaaggc

SEQ ID NO: 302210 - DNA, 25 bp, Artificial
  probe
  misc_feature (1)..(25): SEQ ID NO: 1693; WAN024CBQ; Start 798; Stop 822
ctattatacaagttggttaaggcaa

SEQ ID NO: 302211 - DNA, 25 bp, Artificial
  probe
  misc_feature (1)..(25): SEQ ID NO: 1693; WAN024CBQ; Start 583; Stop 607
ctgtatgatgcgatgaaccaatcca

SEQ ID NO: 302212 - DNA, 25 bp, Artificial
  probe
  misc_feature (1)..(25): SEQ ID NO: 1693; WAN024CBQ; Start 61; Stop 85
ttgcatgtcctagtgaataacttac

SEQ ID NO: 302213 - DNA, 25 bp, Artificial
  probe
  misc_feature (1)..(25): SEQ ID NO: 1693; WAN024CBQ; Start 60; Stop 84
gttgcatgtcctagtgaataactta

SEQ ID NO: 302214 - DNA, 25 bp, Artificial
  probe
  misc_feature (1)..(25): SEQ ID NO: 1693; WAN024CBQ; Start 296; Stop 320
gtttgtcgcctgatgatttaagatc

SEQ ID NO: 302215 - DNA, 25 bp, Artificial
  probe
  misc_feature (1)..(25): SEQ ID NO: 1693; WAN024CBQ; Start 584; Stop 608
tgtatgatgcgatgaaccaatccac

SEQ ID NO: 302216 - DNA, 25 bp, Artificial
  probe
  misc_feature (1)..(25): SEQ ID NO: 1693; WAN024CBQ; Start 168; Stop 192
agacatactatacgcattgaaagat

SEQ ID NO: 302217 - DNA, 25 bp, Artificial
  probe
  misc_feature (1)..(25): SEQ ID NO: 1693; WAN024CBQ; Start 656; Stop 680
aagattctcataacacccttctgtg

SEQ ID NO: 302218 - DNA, 25 bp, Artificial
  probe
  misc_feature (1)..(25): SEQ ID NO: 1693; WAN024CBQ; Start 63; Stop 87
gcatgtcctagtgaataacttacta

SEQ ID NO: 302219 - DNA, 25 bp, Artificial
  probe
  misc_feature (1)..(25): SEQ ID NO: 1693; WAN024CBQ; Start 55; Stop 79
ctagagttgcatgtcctagtgaata

SEQ ID NO: 302220 - DNA, 25 bp, Artificial
  probe
  misc_feature (1)..(25): SEQ ID NO: 1693; WAN024CBQ; Start 167; Stop 191
tagacatactatacgcattgaaaga

SEQ ID NO: 302221 - DNA, 25 bp, Artificial
  probe
  misc_feature (1)..(25): SEQ ID NO: 1693; WAN024CBQ; Start 169; Stop 193
gacatactatacgcattgaaagatt

SEQ ID NO: 302222 - DNA, 25 bp, Artificial
  probe
  misc_feature (1)..(25): SEQ ID NO: 1693; WAN024CBQ; Start 174; Stop 198
actatacgcattgaaagatttgtac

SEQ ID NO: 302223 - DNA, 25 bp, Artificial
  probe
  misc_feature (1)..(25): SEQ ID NO: 1693; WAN024CBQ; Start 557; Stop 581
gttattctgacttaatgtctcttca

SEQ ID NO: 302224 - DNA, 25 bp, Artificial
  probe
  misc_feature (1)..(25): SEQ ID NO: 1693; WAN024CBQ; Start 585; Stop 609
gtatgatgcgatgaaccaatccacc

SEQ ID NO: 302225 - DNA, 25 bp, Artificial
  probe
  misc_feature (1)..(25): SEQ ID NO: 1693; WAN024CBQ; Start 586; Stop 610
tatgatgcgatgaaccaatccacct

SEQ ID NO: 302226 - DNA, 25 bp, Artificial
  probe
  misc_feature (1)..(25): SEQ ID NO: 1693; WAN024CBQ; Start 556; Stop 580
agttattctgacttaatgtctcttc

SEQ ID NO: 302227 - DNA, 25 bp, Artificial
  probe
  misc_feature (1)..(25): SEQ ID NO: 1693; WAN024CBQ; Start 172; Stop 196
atactatacgcattgaaagatttgt

SEQ ID NO: 302228 - DNA, 25 bp, Artificial
  probe
  misc_feature (1)..(25): SEQ ID NO: 1693; WAN024CBQ; Start 170; Stop 194
acatactatacgcattgaaagattt

SEQ ID NO: 302229 - DNA, 25 bp, Artificial
  probe
  misc_feature (1)..(25): SEQ ID NO: 1693; WAN024CBQ; Start 166; Stop 190
ttagacatactatacgcattgaaag

SEQ ID NO: 302230 - DNA, 25 bp, Artificial
  probe
  misc_feature (1)..(25): SEQ ID NO: 1693; WAN024CBQ; Start 59; Stop 83
agttgcatgtcctagtgaataactt

SEQ ID NO: 302231 - DNA, 25 bp, Artificial
  probe
  misc_feature (1)..(25): SEQ ID NO: 1693; WAN024CBQ; Start 58; Stop 82
gagttgcatgtcctagtgaataact

SEQ ID NO: 302232 - DNA, 25 bp, Artificial
  probe
  misc_feature (1)..(25): SEQ ID NO: 1693; WAN024CBQ; Start 171; Stop 195
catactatacgcattgaaagatttg

SEQ ID NO: 302233 - DNA, 25 bp, Artificial
  probe
  misc_feature (1)..(25): SEQ ID NO: 1693; WAN024CBQ; Start 581; Stop 605
agctgtatgatgcgatgaaccaatc

SEQ ID NO: 302234 - DNA, 25 bp, Artificial
  probe
  misc_feature (1)..(25): SEQ ID NO: 1693; WAN024CBQ; Start 582; Stop 606
gctgtatgatgcgatgaaccaatcc

SEQ ID NO: 302235 - DNA, 25 bp, Artificial
  probe
  misc_feature (1)..(25): SEQ ID NO: 1694; WAN024EXX; Start 391; Stop 415
attagtcaactgtctggaggtcaat

SEQ ID NO: 302236 - DNA, 25 bp, Artificial
  probe
  misc_feature (1)..(25): SEQ ID NO: 1694; WAN024EXX; Start 392; Stop 416
ttagtcaactgtctggaggtcaatt

SEQ ID NO: 302237 - DNA, 25 bp, Artificial
  probe
  misc_feature (1)..(25): SEQ ID NO: 1694; WAN024EXX; Start 390; Stop 414
aattagtcaactgtctggaggtcaa

SEQ ID NO: 302238 - DNA, 25 bp, Artificial
  probe
  misc_feature (1)..(25): SEQ ID NO: 1694; WAN024EXX; Start 393; Stop 417
tagtcaactgtctggaggtcaattc

SEQ ID NO: 302239 - DNA, 25 bp, Artificial
  probe
  misc_feature (1)..(25): SEQ ID NO: 1694; WAN024EXX; Start 287; Stop 311
tatttccctctattcctctctttcg

SEQ ID NO: 302240 - DNA, 25 bp, Artificial
  probe
  misc_feature (1)..(25): SEQ ID NO: 1694; WAN024EXX; Start 197; Stop 221
aatccttacaccgaattgcctatgt

SEQ ID NO: 302241 - DNA, 25 bp, Artificial
  probe
  misc_feature (1)..(25): SEQ ID NO: 1694; WAN024EXX; Start 284; Stop 308
gactatttccctctattcctctctt

SEQ ID NO: 302242 - DNA, 25 bp, Artificial
  probe
  misc_feature (1)..(25): SEQ ID NO: 1694; WAN024EXX; Start 388; Stop 412
caaattagtcaactgtctggaggtc

SEQ ID NO: 302243 - DNA, 25 bp, Artificial
  probe
  misc_feature (1)..(25): SEQ ID NO: 1694; WAN024EXX; Start 386; Stop 410
gtcaaattagtcaactgtctggagg

SEQ ID NO: 302244 - DNA, 25 bp, Artificial
  probe
  misc_feature (1)..(25): SEQ ID NO: 1694; WAN024EXX; Start 198; Stop 222
atccttacaccgaattgcctatgtc

SEQ ID NO: 302245 - DNA, 25 bp, Artificial
  probe
  misc_feature (1)..(25): SEQ ID NO: 1694; WAN024EXX; Start 285; Stop 309
actatttccctctattcctctcttt

SEQ ID NO: 302246 - DNA, 25 bp, Artificial
  probe
  misc_feature (1)..(25): SEQ ID NO: 1694; WAN024EXX; Start 196; Stop 220
aaatccttacaccgaattgcctatg

SEQ ID NO: 302247 - DNA, 25 bp, Artificial
  probe
  misc_feature (1)..(25): SEQ ID NO: 1694; WAN024EXX; Start 243; Stop 267
ctacaactttcccatcaaggtcaag

SEQ ID NO: 302248 - DNA, 25 bp, Artificial
  probe
  misc_feature (1)..(25): SEQ ID NO: 1694; WAN024EXX; Start 389; Stop 413
aaattagtcaactgtctggaggtca

SEQ ID NO: 302249 - DNA, 25 bp, Artificial
  probe
  misc_feature (1)..(25): SEQ ID NO: 1694; WAN024EXX; Start 387; Stop 411
tcaaattagtcaactgtctggaggt

SEQ ID NO: 302250 - DNA, 25 bp, Artificial
  probe
  misc_feature (1)..(25): SEQ ID NO: 1694; WAN024EXX; Start 385; Stop 409
cgtcaaattagtcaactgtctggag

SEQ ID NO: 302251 - DNA, 25 bp, Artificial
  probe
  misc_feature (1)..(25): SEQ ID NO: 1694; WAN024EXX; Start 516; Stop 540
catgaatacgctgagagatttgaaa

SEQ ID NO: 302252 - DNA, 25 bp, Artificial
  probe
  misc_feature (1)..(25): SEQ ID NO: 1694; WAN024EXX; Start 286; Stop 310
ctatttccctctattcctctctttc

SEQ ID NO: 302253 - DNA, 25 bp, Artificial
  probe
  misc_feature (1)..(25): SEQ ID NO: 1694; WAN024EXX; Start 242; Stop 266
actacaactttcccatcaaggtcaa

SEQ ID NO: 302254 - DNA, 25 bp, Artificial
  probe
  misc_feature (1)..(25): SEQ ID NO: 1694; WAN024EXX; Start 494; Stop 518
actctgtcagtgaggaaatcatcat

SEQ ID NO: 302255 - DNA, 25 bp, Artificial
  probe
  misc_feature (1)..(25): SEQ ID NO: 1694; WAN024EXX; Start 278; Stop 302
cgttaggactatttccctctattcc

SEQ ID NO: 302256 - DNA, 25 bp, Artificial
  probe
  misc_feature (1)..(25): SEQ ID NO: 1694; WAN024EXX; Start 275; Stop 299
tctcgttaggactatttccctctat

SEQ ID NO: 302257 - DNA, 25 bp, Artificial
  probe
  misc_feature (1)..(25): SEQ ID NO: 1694; WAN024EXX; Start 283; Stop 307
ggactatttccctctattcctctct

SEQ ID NO: 302258 - DNA, 25 bp, Artificial
  probe
  misc_feature (1)..(25): SEQ ID NO: 1694; WAN024EXX; Start 274; Stop 298
gtctcgttaggactatttccctcta

SEQ ID NO: 302259 - DNA, 25 bp, Artificial
  probe
  misc_feature (1)..(25): SEQ ID NO: 1694; WAN024EXX; Start 236; Stop 260
atatcgactacaactttcccatcaa

SEQ ID NO: 302260 - DNA, 25 bp, Artificial
  probe
  misc_feature (1)..(25): SEQ ID NO: 1694; WAN024EXX; Start 235; Stop 259
aatatcgactacaactttcccatca

SEQ ID NO: 302261 - DNA, 25 bp, Artificial
  probe
  misc_feature (1)..(25): SEQ ID NO: 1694; WAN024EXX; Start 233; Stop 257
tcaatatcgactacaactttcccat

SEQ ID NO: 302262 - DNA, 25 bp, Artificial
  probe
  misc_feature (1)..(25): SEQ ID NO: 1694; WAN024EXX; Start 232; Stop 256
atcaatatcgactacaactttccca

SEQ ID NO: 302263 - DNA, 25 bp, Artificial
  probe
  misc_feature (1)..(25): SEQ ID NO: 1694; WAN024EXX; Start 234; Stop 258
caatatcgactacaactttcccatc

SEQ ID NO: 302264 - DNA, 25 bp, Artificial
  probe
  misc_feature (1)..(25): SEQ ID NO: 1694; WAN024EXX; Start 277; Stop 301
tcgttaggactatttccctctattc

SEQ ID NO: 302265 - DNA, 25 bp, Artificial
  probe
  misc_feature (1)..(25): SEQ ID NO: 1694; WAN024EXX; Start 276; Stop 300
ctcgttaggactatttccctctatt

SEQ ID NO: 302266 - DNA, 25 bp, Artificial
  probe
  misc_feature (1)..(25): SEQ ID NO: 1694; WAN024EXX; Start 288; Stop 312
atttccctctattcctctctttcga

SEQ ID NO: 302267 - DNA, 25 bp, Artificial
  probe
  misc_feature (1)..(25): SEQ ID NO: 1694; WAN024EXX; Start 268; Stop 292
gaatgcgtctcgttaggactatttc

SEQ ID NO: 302268 - DNA, 25 bp, Artificial
  probe
  misc_feature (1)..(25): SEQ ID NO: 1695; WAN024D9J; Start 302; Stop 326
cggagttagatgtgaccattattga

SEQ ID NO: 302269 - DNA, 25 bp, Artificial
  probe
  misc_feature (1)..(25): SEQ ID NO: 1695; WAN024D9J; Start 430; Stop 454
aagaacttccgtgctcaatatgatt

SEQ ID NO: 302270 - DNA, 25 bp, Artificial
  probe
  misc_feature (1)..(25): SEQ ID NO: 1695; WAN024D9J; Start 303; Stop 327
ggagttagatgtgaccattattgat

SEQ ID NO: 302271 - DNA, 25 bp, Artificial
  probe
  misc_feature (1)..(25): SEQ ID NO: 1695; WAN024D9J; Start 429; Stop 453
caagaacttccgtgctcaatatgat

SEQ ID NO: 302272 - DNA, 25 bp, Artificial
  probe
  misc_feature (1)..(25): SEQ ID NO: 1695; WAN024D9J; Start 483; Stop 507
gcaggtcctatctgaattgactatt

SEQ ID NO: 302273 - DNA, 25 bp, Artificial
  probe
  misc_feature (1)..(25): SEQ ID NO: 1695; WAN024D9J; Start 427; Stop 451
gacaagaacttccgtgctcaatatg

SEQ ID NO: 302274 - DNA, 25 bp, Artificial
  probe
  misc_feature (1)..(25): SEQ ID NO: 1695; WAN024D9J; Start 426; Stop 450
agacaagaacttccgtgctcaatat

SEQ ID NO: 302275 - DNA, 25 bp, Artificial
  probe
  misc_feature (1)..(25): SEQ ID NO: 1695; WAN024D9J; Start 120; Stop 144
ggtcgagtggaatgagaagattaat

SEQ ID NO: 302276 - DNA, 25 bp, Artificial
  probe
  misc_feature (1)..(25): SEQ ID NO: 1695; WAN024D9J; Start 425; Stop 449
aagacaagaacttccgtgctcaata

SEQ ID NO: 302277 - DNA, 25 bp, Artificial
  probe
  misc_feature (1)..(25): SEQ ID NO: 1695; WAN024D9J; Start 485; Stop 509
aggtcctatctgaattgactattcc

SEQ ID NO: 302278 - DNA, 25 bp, Artificial
  probe
  misc_feature (1)..(25): SEQ ID NO: 1695; WAN024D9J; Start 121; Stop 145
gtcgagtggaatgagaagattaatt

SEQ ID NO: 302279 - DNA, 25 bp, Artificial
  probe
  misc_feature (1)..(25): SEQ ID NO: 1695; WAN024D9J; Start 343; Stop 367
atcaacttcctacaactcttggctc

SEQ ID NO: 302280 - DNA, 25 bp, Artificial
  probe
  misc_feature (1)..(25): SEQ ID NO: 1695; WAN024D9J; Start 428; Stop 452
acaagaacttccgtgctcaatatga

SEQ ID NO: 302281 - DNA, 25 bp, Artificial
  probe
  misc_feature (1)..(25): SEQ ID NO: 1695; WAN024D9J; Start 119; Stop 143
tggtcgagtggaatgagaagattaa

SEQ ID NO: 302282 - DNA, 25 bp, Artificial
  probe
  misc_feature (1)..(25): SEQ ID NO: 1695; WAN024D9J; Start 118; Stop 142
ttggtcgagtggaatgagaagatta

SEQ ID NO: 302283 - DNA, 25 bp, Artificial
  probe
  misc_feature (1)..(25): SEQ ID NO: 1695; WAN024D9J; Start 152; Stop 176
cgattacggacaaggaagaagttta

SEQ ID NO: 302284 - DNA, 25 bp, Artificial
  probe
  misc_feature (1)..(25): SEQ ID NO: 1695; WAN024D9J; Start 342; Stop 366
catcaacttcctacaactcttggct

SEQ ID NO: 302285 - DNA, 25 bp, Artificial
  probe
  misc_feature (1)..(25): SEQ ID NO: 1695; WAN024D9J; Start 154; Stop 178
attacggacaaggaagaagtttatc

SEQ ID NO: 302286 - DNA, 25 bp, Artificial
  probe
  misc_feature (1)..(25): SEQ ID NO: 1695; WAN024D9J; Start 153; Stop 177
gattacggacaaggaagaagtttat

SEQ ID NO: 302287 - DNA, 25 bp, Artificial
  probe
  misc_feature (1)..(25): SEQ ID NO: 1695; WAN024D9J; Start 484; Stop 508
caggtcctatctgaattgactattc

SEQ ID NO: 302288 - DNA, 25 bp, Artificial
  probe
  misc_feature (1)..(25): SEQ ID NO: 1695; WAN024D9J; Start 156; Stop 180
tacggacaaggaagaagtttatctc

SEQ ID NO: 302289 - DNA, 25 bp, Artificial
  probe
  misc_feature (1)..(25): SEQ ID NO: 1695; WAN024D9J; Start 155; Stop 179
ttacggacaaggaagaagtttatct

SEQ ID NO: 302290 - DNA, 25 bp, Artificial
  probe
  misc_feature (1)..(25): SEQ ID NO: 1695; WAN024D9J; Start 158; Stop 182
cggacaaggaagaagtttatctcaa

SEQ ID NO: 302291 - DNA, 25 bp, Artificial
  probe
  misc_feature (1)..(25): SEQ ID NO: 1695; WAN024D9J; Start 306; Stop 330
gttagatgtgaccattattgattca

SEQ ID NO: 302292 - DNA, 25 bp, Artificial
  probe
  misc_feature (1)..(25): SEQ ID NO: 1695; WAN024D9J; Start 345; Stop 369
caacttcctacaactcttggctcaa

SEQ ID NO: 302293 - DNA, 25 bp, Artificial
  probe
  misc_feature (1)..(25): SEQ ID NO: 1695; WAN024D9J; Start 159; Stop 183
ggacaaggaagaagtttatctcaaa

SEQ ID NO: 302294 - DNA, 25 bp, Artificial
  probe
  misc_feature (1)..(25): SEQ ID NO: 1695; WAN024D9J; Start 305; Stop 329
agttagatgtgaccattattgattc

SEQ ID NO: 302295 - DNA, 25 bp, Artificial
  probe
  misc_feature (1)..(25): SEQ ID NO: 1695; WAN024D9J; Start 304; Stop 328
gagttagatgtgaccattattgatt

SEQ ID NO: 302296 - DNA, 25 bp, Artificial
  probe
  misc_feature (1)..(25): SEQ ID NO: 1695; WAN024D9J; Start 431; Stop 455
agaacttccgtgctcaatatgattt

SEQ ID NO: 302297 - DNA, 25 bp, Artificial
  probe
  misc_feature (1)..(25): SEQ ID NO: 1695; WAN024D9J; Start 680; Stop 704
aagaaacaccaaataaatatccacg

SEQ ID NO: 302298 - DNA, 25 bp, Artificial
  probe
  misc_feature (1)..(25): SEQ ID NO: 1695; WAN024D9J; Start 157; Stop 181
acggacaaggaagaagtttatctca

SEQ ID NO: 302299 - DNA, 25 bp, Artificial
  probe
  misc_feature (1)..(25): SEQ ID NO: 1695; WAN024D9J; Start 482; Stop 506
tgcaggtcctatctgaattgactat

SEQ ID NO: 302300 - DNA, 25 bp, Artificial
  probe
  misc_feature (1)..(25): SEQ ID NO: 1695; WAN024D9J; Start 481; Stop 505
atgcaggtcctatctgaattgacta

SEQ ID NO: 302301 - DNA, 25 bp, Artificial
  probe
  misc_feature (1)..(25): SEQ ID NO: 1696; WAN024FZ2; Start 58; Stop 82
attggctattctaggactgagatga

SEQ ID NO: 302302 - DNA, 25 bp, Artificial
  probe
  misc_feature (1)..(25): SEQ ID NO: 1696; WAN024FZ2; Start 59; Stop 83
ttggctattctaggactgagatgaa

SEQ ID NO: 302303 - DNA, 25 bp, Artificial
  probe
  misc_feature (1)..(25): SEQ ID NO: 1696; WAN024FZ2; Start 57; Stop 81
tattggctattctaggactgagatg

SEQ ID NO: 302304 - DNA, 25 bp, Artificial
  probe
  misc_feature (1)..(25): SEQ ID NO: 1696; WAN024FZ2; Start 55; Stop 79
catattggctattctaggactgaga

SEQ ID NO: 302305 - DNA, 25 bp, Artificial
  probe
  misc_feature (1)..(25): SEQ ID NO: 1696; WAN024FZ2; Start 54; Stop 78
tcatattggctattctaggactgag

SEQ ID NO: 302306 - DNA, 25 bp, Artificial
  probe
  misc_feature (1)..(25): SEQ ID NO: 1696; WAN024FZ2; Start 53; Stop 77
ttcatattggctattctaggactga

SEQ ID NO: 302307 - DNA, 25 bp, Artificial
  probe
  misc_feature (1)..(25): SEQ ID NO: 1696; WAN024FZ2; Start 56; Stop 80
atattggctattctaggactgagat

SEQ ID NO: 302308 - DNA, 25 bp, Artificial
  probe
  misc_feature (1)..(25): SEQ ID NO: 1696; WAN024FZ2; Start 52; Stop 76
attcatattggctattctaggactg

SEQ ID NO: 302309 - DNA, 25 bp, Artificial
  probe
  misc_feature (1)..(25): SEQ ID NO: 1696; WAN024FZ2; Start 40; Stop 64
actgtcgtttctattcatattggct

SEQ ID NO: 302310 - DNA, 25 bp, Artificial
  probe
  misc_feature (1)..(25): SEQ ID NO: 1696; WAN024FZ2; Start 39; Stop 63
tactgtcgtttctattcatattggc

SEQ ID NO: 302311 - DNA, 25 bp, Artificial
  probe
  misc_feature (1)..(25): SEQ ID NO: 1696; WAN024FZ2; Start 41; Stop 65
ctgtcgtttctattcatattggcta

SEQ ID NO: 302312 - DNA, 25 bp, Artificial
  probe
  misc_feature (1)..(25): SEQ ID NO: 1696; WAN024FZ2; Start 60; Stop 84
tggctattctaggactgagatgaaa

SEQ ID NO: 302313 - DNA, 25 bp, Artificial
  probe
  misc_feature (1)..(25): SEQ ID NO: 1696; WAN024FZ2; Start 42; Stop 66
tgtcgtttctattcatattggctat

SEQ ID NO: 302314 - DNA, 25 bp, Artificial
  probe
  misc_feature (1)..(25): SEQ ID NO: 1696; WAN024FZ2; Start 51; Stop 75
tattcatattggctattctaggact

SEQ ID NO: 302315 - DNA, 25 bp, Artificial
  probe
  misc_feature (1)..(25): SEQ ID NO: 1696; WAN024FZ2; Start 50; Stop 74
ctattcatattggctattctaggac

SEQ ID NO: 302316 - DNA, 25 bp, Artificial
  probe
  misc_feature (1)..(25): SEQ ID NO: 1696; WAN024FZ2; Start 38; Stop 62
ctactgtcgtttctattcatattgg

SEQ ID NO: 302317 - DNA, 25 bp, Artificial
  probe
  misc_feature (1)..(25): SEQ ID NO: 1696; WAN024FZ2; Start 27; Stop 51
cctagtattgactactgtcgtttct

SEQ ID NO: 302318 - DNA, 25 bp, Artificial
  probe
  misc_feature (1)..(25): SEQ ID NO: 1696; WAN024FZ2; Start 26; Stop 50
ccctagtattgactactgtcgtttc

SEQ ID NO: 302319 - DNA, 25 bp, Artificial
  probe
  misc_feature (1)..(25): SEQ ID NO: 1696; WAN024FZ2; Start 49; Stop 73
tctattcatattggctattctagga

SEQ ID NO: 302320 - DNA, 25 bp, Artificial
  probe
  misc_feature (1)..(25): SEQ ID NO: 1696; WAN024FZ2; Start 43; Stop 67
gtcgtttctattcatattggctatt

SEQ ID NO: 302321 - DNA, 25 bp, Artificial
  probe
  misc_feature (1)..(25): SEQ ID NO: 1696; WAN024FZ2; Start 16; Stop 40
ggaacagtagccctagtattgacta

SEQ ID NO: 302322 - DNA, 25 bp, Artificial
  probe
  misc_feature (1)..(25): SEQ ID NO: 1696; WAN024FZ2; Start 33; Stop 57
attgactactgtcgtttctattcat

SEQ ID NO: 302323 - DNA, 25 bp, Artificial
  probe
  misc_feature (1)..(25): SEQ ID NO: 1696; WAN024FZ2; Start 45; Stop 69
cgtttctattcatattggctattct

SEQ ID NO: 302324 - DNA, 25 bp, Artificial
  probe
  misc_feature (1)..(25): SEQ ID NO: 1696; WAN024FZ2; Start 44; Stop 68
tcgtttctattcatattggctattc

SEQ ID NO: 302325 - DNA, 25 bp, Artificial
  probe
  misc_feature (1)..(25): SEQ ID NO: 1696; WAN024FZ2; Start 12; Stop 36
gaacggaacagtagccctagtattg

SEQ ID NO: 302326 - DNA, 25 bp, Artificial
  probe
  misc_feature (1)..(25): SEQ ID NO: 1696; WAN024FZ2; Start 34; Stop 58
ttgactactgtcgtttctattcata

SEQ ID NO: 302327 - DNA, 25 bp, Artificial
  probe
  misc_feature (1)..(25): SEQ ID NO: 1696; WAN024FZ2; Start 32; Stop 56
tattgactactgtcgtttctattca

SEQ ID NO: 302328 - DNA, 25 bp, Artificial
  probe
  misc_feature (1)..(25): SEQ ID NO: 1696; WAN024FZ2; Start 17; Stop 41
gaacagtagccctagtattgactac

SEQ ID NO: 302329 - DNA, 25 bp, Artificial
  probe
  misc_feature (1)..(25): SEQ ID NO: 1696; WAN024FZ2; Start 37; Stop 61
actactgtcgtttctattcatattg

SEQ ID NO: 302330 - DNA, 25 bp, Artificial
  probe
  misc_feature (1)..(25): SEQ ID NO: 1696; WAN024FZ2; Start 13; Stop 37
aacggaacagtagccctagtattga

SEQ ID NO: 302331 - DNA, 25 bp, Artificial
  probe
  misc_feature (1)..(25): SEQ ID NO: 1696; WAN024FZ2; Start 35; Stop 59
tgactactgtcgtttctattcatat

SEQ ID NO: 302332 - DNA, 25 bp, Artificial
  probe
  misc_feature (1)..(25): SEQ ID NO: 1696; WAN024FZ2; Start 31; Stop 55
gtattgactactgtcgtttctattc

SEQ ID NO: 302333 - DNA, 25 bp, Artificial
  probe
  misc_feature (1)..(25): SEQ ID NO: 1696; WAN024FZ2; Start 23; Stop 47
tagccctagtattgactactgtcgt

SEQ ID NO: 302334 - DNA, 25 bp, Artificial
  probe
  misc_feature (1)..(25): SEQ ID NO: 1697; WAN024FXI; Start 279; Stop 303
atcaatgaggaatcaacttcaagga

SEQ ID NO: 302335 - DNA, 25 bp, Artificial
  probe
  misc_feature (1)..(25): SEQ ID NO: 1697; WAN024FXI; Start 280; Stop 304
tcaatgaggaatcaacttcaaggaa

SEQ ID NO: 302336 - DNA, 25 bp, Artificial
  probe
  misc_feature (1)..(25): SEQ ID NO: 1697; WAN024FXI; Start 278; Stop 302
aatcaatgaggaatcaacttcaagg

SEQ ID NO: 302337 - DNA, 25 bp, Artificial
  probe
  misc_feature (1)..(25): SEQ ID NO: 1697; WAN024FXI; Start 276; Stop 300
tcaatcaatgaggaatcaacttcaa

SEQ ID NO: 302338 - DNA, 25 bp, Artificial
  probe
  misc_feature (1)..(25): SEQ ID NO: 1697; WAN024FXI; Start 275; Stop 299
ttcaatcaatgaggaatcaacttca

SEQ ID NO: 302339 - DNA, 25 bp, Artificial
  probe
  misc_feature (1)..(25): SEQ ID NO: 1697; WAN024FXI; Start 277; Stop 301
caatcaatgaggaatcaacttcaag

SEQ ID NO: 302340 - DNA, 25 bp, Artificial
  probe
  misc_feature (1)..(25): SEQ ID NO: 1697; WAN024FXI; Start 113; Stop 137
ttcaacaagataccgatatagcata

SEQ ID NO: 302341 - DNA, 25 bp, Artificial
  probe
  misc_feature (1)..(25): SEQ ID NO: 1697; WAN024FXI; Start 114; Stop 138
tcaacaagataccgatatagcatat

SEQ ID NO: 302342 - DNA, 25 bp, Artificial
  probe
  misc_feature (1)..(25): SEQ ID NO: 1697; WAN024FXI; Start 557; Stop 581
ctattgtagcatcaagttggttaat

SEQ ID NO: 302343 - DNA, 25 bp, Artificial
  probe
  misc_feature (1)..(25): SEQ ID NO: 1697; WAN024FXI; Start 813; Stop 837
gaagcatatttcggcgtttcataaa

SEQ ID NO: 302344 - DNA, 25 bp, Artificial
  probe
  misc_feature (1)..(25): SEQ ID NO: 1697; WAN024FXI; Start 297; Stop 321
tcaaggaagagaaatcattgtgttg

SEQ ID NO: 302345 - DNA, 25 bp, Artificial
  probe
  misc_feature (1)..(25): SEQ ID NO: 1697; WAN024FXI; Start 824; Stop 848
cggcgtttcataaattaaatcatca

SEQ ID NO: 302346 - DNA, 25 bp, Artificial
  probe
  misc_feature (1)..(25): SEQ ID NO: 1697; WAN024FXI; Start 299; Stop 323
aaggaagagaaatcattgtgttgac

SEQ ID NO: 302347 - DNA, 25 bp, Artificial
  probe
  misc_feature (1)..(25): SEQ ID NO: 1697; WAN024FXI; Start 298; Stop 322
caaggaagagaaatcattgtgttga

SEQ ID NO: 302348 - DNA, 25 bp, Artificial
  probe
  misc_feature (1)..(25): SEQ ID NO: 1697; WAN024FXI; Start 296; Stop 320
ttcaaggaagagaaatcattgtgtt

SEQ ID NO: 302349 - DNA, 25 bp, Artificial
  probe
  misc_feature (1)..(25): SEQ ID NO: 1697; WAN024FXI; Start 823; Stop 847
tcggcgtttcataaattaaatcatc

SEQ ID NO: 302350 - DNA, 25 bp, Artificial
  probe
  misc_feature (1)..(25): SEQ ID NO: 1697; WAN024FXI; Start 821; Stop 845
tttcggcgtttcataaattaaatca

SEQ ID NO: 302351 - DNA, 25 bp, Artificial
  probe
  misc_feature (1)..(25): SEQ ID NO: 1697; WAN024FXI; Start 558; Stop 582
tattgtagcatcaagttggttaatt

SEQ ID NO: 302352 - DNA, 25 bp, Artificial
  probe
  misc_feature (1)..(25): SEQ ID NO: 1697; WAN024FXI; Start 112; Stop 136
tttcaacaagataccgatatagcat

SEQ ID NO: 302353 - DNA, 25 bp, Artificial
  probe
  misc_feature (1)..(25): SEQ ID NO: 1697; WAN024FXI; Start 274; Stop 298
attcaatcaatgaggaatcaacttc

SEQ ID NO: 302354 - DNA, 25 bp, Artificial
  probe
  misc_feature (1)..(25): SEQ ID NO: 1697; WAN024FXI; Start 815; Stop 839
agcatatttcggcgtttcataaatt

SEQ ID NO: 302355 - DNA, 25 bp, Artificial
  probe
  misc_feature (1)..(25): SEQ ID NO: 1697; WAN024FXI; Start 814; Stop 838
aagcatatttcggcgtttcataaat

SEQ ID NO: 302356 - DNA, 25 bp, Artificial
  probe
  misc_feature (1)..(25): SEQ ID NO: 1697; WAN024FXI; Start 301; Stop 325
ggaagagaaatcattgtgttgacag

SEQ ID NO: 302357 - DNA, 25 bp, Artificial
  probe
  misc_feature (1)..(25): SEQ ID NO: 1697; WAN024FXI; Start 302; Stop 326
gaagagaaatcattgtgttgacaga

SEQ ID NO: 302358 - DNA, 25 bp, Artificial
  probe
  misc_feature (1)..(25): SEQ ID NO: 1697; WAN024FXI; Start 222; Stop 246
gatttgttggtttcagggagaagag

SEQ ID NO: 302359 - DNA, 25 bp, Artificial
  probe
  misc_feature (1)..(25): SEQ ID NO: 1697; WAN024FXI; Start 300; Stop 324
aggaagagaaatcattgtgttgaca

SEQ ID NO: 302360 - DNA, 25 bp, Artificial
  probe
  misc_feature (1)..(25): SEQ ID NO: 1697; WAN024FXI; Start 822; Stop 846
ttcggcgtttcataaattaaatcat

SEQ ID NO: 302361 - DNA, 25 bp, Artificial
  probe
  misc_feature (1)..(25): SEQ ID NO: 1697; WAN024FXI; Start 163; Stop 187
catatttcgttgactggagatgagc

SEQ ID NO: 302362 - DNA, 25 bp, Artificial
  probe
  misc_feature (1)..(25): SEQ ID NO: 1697; WAN024FXI; Start 304; Stop 328
agagaaatcattgtgttgacagaaa

SEQ ID NO: 302363 - DNA, 25 bp, Artificial
  probe
  misc_feature (1)..(25): SEQ ID NO: 1697; WAN024FXI; Start 303; Stop 327
aagagaaatcattgtgttgacagaa

SEQ ID NO: 302364 - DNA, 25 bp, Artificial
  probe
  misc_feature (1)..(25): SEQ ID NO: 1697; WAN024FXI; Start 816; Stop 840
gcatatttcggcgtttcataaatta

SEQ ID NO: 302365 - DNA, 25 bp, Artificial
  probe
  misc_feature (1)..(25): SEQ ID NO: 1697; WAN024FXI; Start 271; Stop 295
tgtattcaatcaatgaggaatcaac

SEQ ID NO: 302366 - DNA, 25 bp, Artificial
  probe
  misc_feature (1)..(25): SEQ ID NO: 1697; WAN024FXI; Start 272; Stop 296
gtattcaatcaatgaggaatcaact

SEQ ID NO: 302367 - DNA, 25 bp, Artificial
  probe
  misc_feature (1)..(25): SEQ ID NO: 1698; WAN024AWY; Start 5; Stop 29
tagaaatcaagcgaattcaacaaca

SEQ ID NO: 302368 - DNA, 25 bp, Artificial
  probe
  misc_feature (1)..(25): SEQ ID NO: 1698; WAN024AWY; Start 6; Stop 30
agaaatcaagcgaattcaacaacag

SEQ ID NO: 302369 - DNA, 25 bp, Artificial
  probe
  misc_feature (1)..(25): SEQ ID NO: 1698; WAN024AWY; Start 4; Stop 28
atagaaatcaagcgaattcaacaac

SEQ ID NO: 302370 - DNA, 25 bp, Artificial
  probe
  misc_feature (1)..(25): SEQ ID NO: 1698; WAN024AWY; Start 3; Stop 27
gatagaaatcaagcgaattcaacaa

SEQ ID NO: 302371 - DNA, 25 bp, Artificial
  probe
  misc_feature (1)..(25): SEQ ID NO: 1698; WAN024AWY; Start 68; Stop 92
ctgtttacctagtcagtccttggac

SEQ ID NO: 302372 - DNA, 25 bp, Artificial
  probe
  misc_feature (1)..(25): SEQ ID NO: 1698; WAN024AWY; Start 7; Stop 31
gaaatcaagcgaattcaacaacagc

SEQ ID NO: 302373 - DNA, 25 bp, Artificial
  probe
  misc_feature (1)..(25): SEQ ID NO: 1698; WAN024AWY; Start 67; Stop 91
gctgtttacctagtcagtccttgga

SEQ ID NO: 302374 - DNA, 25 bp, Artificial
  probe
  misc_feature (1)..(25): SEQ ID NO: 1698; WAN024AWY; Start 38; Stop 62
tagctcaagccatctacgctgttat

SEQ ID NO: 302375 - DNA, 25 bp, Artificial
  probe
  misc_feature (1)..(25): SEQ ID NO: 1698; WAN024AWY; Start 9; Stop 33
aatcaagcgaattcaacaacagcct

SEQ ID NO: 302376 - DNA, 25 bp, Artificial
  probe
  misc_feature (1)..(25): SEQ ID NO: 1698; WAN024AWY; Start 16; Stop 40
cgaattcaacaacagcctgacctag

SEQ ID NO: 302377 - DNA, 25 bp, Artificial
  probe
  misc_feature (1)..(25): SEQ ID NO: 1698; WAN024AWY; Start 2; Stop 26
tgatagaaatcaagcgaattcaaca

SEQ ID NO: 302378 - DNA, 25 bp, Artificial
  probe
  misc_feature (1)..(25): SEQ ID NO: 1698; WAN024AWY; Start 17; Stop 41
gaattcaacaacagcctgacctagc

SEQ ID NO: 302379 - DNA, 25 bp, Artificial
  probe
  misc_feature (1)..(25): SEQ ID NO: 1698; WAN024AWY; Start 8; Stop 32
aaatcaagcgaattcaacaacagcc

SEQ ID NO: 302380 - DNA, 25 bp, Artificial
  probe
  misc_feature (1)..(25): SEQ ID NO: 1698; WAN024AWY; Start 66; Stop 90
agctgtttacctagtcagtccttgg

SEQ ID NO: 302381 - DNA, 25 bp, Artificial
  probe
  misc_feature (1)..(25): SEQ ID NO: 1698; WAN024AWY; Start 37; Stop 61
ctagctcaagccatctacgctgtta

SEQ ID NO: 302382 - DNA, 25 bp, Artificial
  probe
  misc_feature (1)..(25): SEQ ID NO: 1698; WAN024AWY; Start 1; Stop 25
atgatagaaatcaagcgaattcaac

SEQ ID NO: 302383 - DNA, 25 bp, Artificial
  probe
  misc_feature (1)..(25): SEQ ID NO: 1698; WAN024AWY; Start 10; Stop 34
atcaagcgaattcaacaacagcctg

SEQ ID NO: 302384 - DNA, 25 bp, Artificial
  probe
  misc_feature (1)..(25): SEQ ID NO: 1698; WAN024AWY; Start 18; Stop 42
aattcaacaacagcctgacctagct

SEQ ID NO: 302385 - DNA, 25 bp, Artificial
  probe
  misc_feature (1)..(25): SEQ ID NO: 1698; WAN024AWY; Start 72; Stop 96
ttacctagtcagtccttggactctg

SEQ ID NO: 302386 - DNA, 25 bp, Artificial
  probe
  misc_feature (1)..(25): SEQ ID NO: 1698; WAN024AWY; Start 19; Stop 43
attcaacaacagcctgacctagctc

SEQ ID NO: 302387 - DNA, 25 bp, Artificial
  probe
  misc_feature (1)..(25): SEQ ID NO: 1698; WAN024AWY; Start 39; Stop 63
agctcaagccatctacgctgttatg

SEQ ID NO: 302388 - DNA, 25 bp, Artificial
  probe
  misc_feature (1)..(25): SEQ ID NO: 1698; WAN024AWY; Start 70; Stop 94
gtttacctagtcagtccttggactc

SEQ ID NO: 302389 - DNA, 25 bp, Artificial
  probe
  misc_feature (1)..(25): SEQ ID NO: 1698; WAN024AWY; Start 71; Stop 95
tttacctagtcagtccttggactct

SEQ ID NO: 302390 - DNA, 25 bp, Artificial
  probe
  misc_feature (1)..(25): SEQ ID NO: 1698; WAN024AWY; Start 69; Stop 93
tgtttacctagtcagtccttggact

SEQ ID NO: 302391 - DNA, 25 bp, Artificial
  probe
  misc_feature (1)..(25): SEQ ID NO: 1698; WAN024AWY; Start 73; Stop 97
tacctagtcagtccttggactctgg

SEQ ID NO: 302392 - DNA, 25 bp, Artificial
  probe
  misc_feature (1)..(25): SEQ ID NO: 1698; WAN024AWY; Start 75; Stop 99
cctagtcagtccttggactctggag

SEQ ID NO: 302393 - DNA, 25 bp, Artificial
  probe
  misc_feature (1)..(25): SEQ ID NO: 1698; WAN024AWY; Start 81; Stop 105
cagtccttggactctggagcaaatc

SEQ ID NO: 302394 - DNA, 25 bp, Artificial
  probe
  misc_feature (1)..(25): SEQ ID NO: 1699; WAN024FVA; Start 727; Stop 751
gaggagaactactacaagcaacata

SEQ ID NO: 302395 - DNA, 25 bp, Artificial
  probe
  misc_feature (1)..(25): SEQ ID NO: 1699; WAN024FVA; Start 625; Stop 649
aatccacagtcattatctaagcgat

SEQ ID NO: 302396 - DNA, 25 bp, Artificial
  probe
  misc_feature (1)..(25): SEQ ID NO: 1699; WAN024FVA; Start 728; Stop 752
aggagaactactacaagcaacatat

SEQ ID NO: 302397 - DNA, 25 bp, Artificial
  probe
  misc_feature (1)..(25): SEQ ID NO: 1699; WAN024FVA; Start 624; Stop 648
taatccacagtcattatctaagcga

SEQ ID NO: 302398 - DNA, 25 bp, Artificial
  probe
  misc_feature (1)..(25): SEQ ID NO: 1699; WAN024FVA; Start 726; Stop 750
tgaggagaactactacaagcaacat

SEQ ID NO: 302399 - DNA, 25 bp, Artificial
  probe
  misc_feature (1)..(25): SEQ ID NO: 1699; WAN024FVA; Start 724; Stop 748
attgaggagaactactacaagcaac

SEQ ID NO: 302400 - DNA, 25 bp, Artificial
  probe
  misc_feature (1)..(25): SEQ ID NO: 1699; WAN024FVA; Start 723; Stop 747
aattgaggagaactactacaagcaa

SEQ ID NO: 302401 - DNA, 25 bp, Artificial
  probe
  misc_feature (1)..(25): SEQ ID NO: 1699; WAN024FVA; Start 143; Stop 167
ttcttgaacagtatggtgataatcc

SEQ ID NO: 302402 - DNA, 25 bp, Artificial
  probe
  misc_feature (1)..(25): SEQ ID NO: 1699; WAN024FVA; Start 530; Stop 554
cactaggagaagatatgtcattcgt

SEQ ID NO: 302403 - DNA, 25 bp, Artificial
  probe
  misc_feature (1)..(25): SEQ ID NO: 1699; WAN024FVA; Start 529; Stop 553
tcactaggagaagatatgtcattcg

SEQ ID NO: 302404 - DNA, 25 bp, Artificial
  probe
  misc_feature (1)..(25): SEQ ID NO: 1699; WAN024FVA; Start 374; Stop 398
acggtggtaatgataatagttcagc

SEQ ID NO: 302405 - DNA, 25 bp, Artificial
  probe
  misc_feature (1)..(25): SEQ ID NO: 1699; WAN024FVA; Start 623; Stop 647
ttaatccacagtcattatctaagcg

SEQ ID NO: 302406 - DNA, 25 bp, Artificial
  probe
  misc_feature (1)..(25): SEQ ID NO: 1699; WAN024FVA; Start 531; Stop 555
actaggagaagatatgtcattcgtt

SEQ ID NO: 302407 - DNA, 25 bp, Artificial
  probe
  misc_feature (1)..(25): SEQ ID NO: 1699; WAN024FVA; Start 527; Stop 551
tgtcactaggagaagatatgtcatt

SEQ ID NO: 302408 - DNA, 25 bp, Artificial
  probe
  misc_feature (1)..(25): SEQ ID NO: 1699; WAN024FVA; Start 525; Stop 549
aatgtcactaggagaagatatgtca

SEQ ID NO: 302409 - DNA, 25 bp, Artificial
  probe
  misc_feature (1)..(25): SEQ ID NO: 1699; WAN024FVA; Start 455; Stop 479
cgagaagtgcttgtgctaagttatt

SEQ ID NO: 302410 - DNA, 25 bp, Artificial
  probe
  misc_feature (1)..(25): SEQ ID NO: 1699; WAN024FVA; Start 628; Stop 652
ccacagtcattatctaagcgatatg

SEQ ID NO: 302411 - DNA, 25 bp, Artificial
  probe
  misc_feature (1)..(25): SEQ ID NO: 1699; WAN024FVA; Start 627; Stop 651
tccacagtcattatctaagcgatat

SEQ ID NO: 302412 - DNA, 25 bp, Artificial
  probe
  misc_feature (1)..(25): SEQ ID NO: 1699; WAN024FVA; Start 626; Stop 650
atccacagtcattatctaagcgata

SEQ ID NO: 302413 - DNA, 25 bp, Artificial
  probe
  misc_feature (1)..(25): SEQ ID NO: 1699; WAN024FVA; Start 725; Stop 749
ttgaggagaactactacaagcaaca

SEQ ID NO: 302414 - DNA, 25 bp, Artificial
  probe
  misc_feature (1)..(25): SEQ ID NO: 1699; WAN024FVA; Start 526; Stop 550
atgtcactaggagaagatatgtcat

SEQ ID NO: 302415 - DNA, 25 bp, Artificial
  probe
  misc_feature (1)..(25): SEQ ID NO: 1699; WAN024FVA; Start 364; Stop 388
acaacacaatacggtggtaatgata

SEQ ID NO: 302416 - DNA, 25 bp, Artificial
  probe
  misc_feature (1)..(25): SEQ ID NO: 1699; WAN024FVA; Start 363; Stop 387
tacaacacaatacggtggtaatgat

SEQ ID NO: 302417 - DNA, 25 bp, Artificial
  probe
  misc_feature (1)..(25): SEQ ID NO: 1699; WAN024FVA; Start 528; Stop 552
gtcactaggagaagatatgtcattc

SEQ ID NO: 302418 - DNA, 25 bp, Artificial
  probe
  misc_feature (1)..(25): SEQ ID NO: 1699; WAN024FVA; Start 365; Stop 389
caacacaatacggtggtaatgataa

SEQ ID NO: 302419 - DNA, 25 bp, Artificial
  probe
  misc_feature (1)..(25): SEQ ID NO: 1699; WAN024FVA; Start 629; Stop 653
cacagtcattatctaagcgatatgt

SEQ ID NO: 302420 - DNA, 25 bp, Artificial
  probe
  misc_feature (1)..(25): SEQ ID NO: 1699; WAN024FVA; Start 369; Stop 393
acaatacggtggtaatgataatagt

SEQ ID NO: 302421 - DNA, 25 bp, Artificial
  probe
  misc_feature (1)..(25): SEQ ID NO: 1699; WAN024FVA; Start 373; Stop 397
tacggtggtaatgataatagttcag

SEQ ID NO: 302422 - DNA, 25 bp, Artificial
  probe
  misc_feature (1)..(25): SEQ ID NO: 1699; WAN024FVA; Start 613; Stop 637
attcagaatgttaatccacagtcat

SEQ ID NO: 302423 - DNA, 25 bp, Artificial
  probe
  misc_feature (1)..(25): SEQ ID NO: 1699; WAN024FVA; Start 360; Stop 384
tagtacaacacaatacggtggtaat

SEQ ID NO: 302424 - DNA, 25 bp, Artificial
  probe
  misc_feature (1)..(25): SEQ ID NO: 1699; WAN024FVA; Start 359; Stop 383
ctagtacaacacaatacggtggtaa

SEQ ID NO: 302425 - DNA, 25 bp, Artificial
  probe
  misc_feature (1)..(25): SEQ ID NO: 1699; WAN024FVA; Start 366; Stop 390
aacacaatacggtggtaatgataat

SEQ ID NO: 302426 - DNA, 25 bp, Artificial
  probe
  misc_feature (1)..(25): SEQ ID NO: 1699; WAN024FVA; Start 622; Stop 646
gttaatccacagtcattatctaagc

SEQ ID NO: 302427 - DNA, 25 bp, Artificial
  probe
  misc_feature (1)..(25): SEQ ID NO: 1700; WAN024BE6; Start 101; Stop 125
agtattatgcttgttatcggtgtca

SEQ ID NO: 302428 - DNA, 25 bp, Artificial
  probe
  misc_feature (1)..(25): SEQ ID NO: 1700; WAN024BE6; Start 102; Stop 126
gtattatgcttgttatcggtgtcat

SEQ ID NO: 302429 - DNA, 25 bp, Artificial
  probe
  misc_feature (1)..(25): SEQ ID NO: 1700; WAN024BE6; Start 100; Stop 124
aagtattatgcttgttatcggtgtc

SEQ ID NO: 302430 - DNA, 25 bp, Artificial
  probe
  misc_feature (1)..(25): SEQ ID NO: 1700; WAN024BE6; Start 103; Stop 127
tattatgcttgttatcggtgtcatg

SEQ ID NO: 302431 - DNA, 25 bp, Artificial
  probe
  misc_feature (1)..(25): SEQ ID NO: 1700; WAN024BE6; Start 99; Stop 123
aaagtattatgcttgttatcggtgt

SEQ ID NO: 302432 - DNA, 25 bp, Artificial
  probe
  misc_feature (1)..(25): SEQ ID NO: 1700; WAN024BE6; Start 48; Stop 72
tcattaccatagcaagctggatatt

SEQ ID NO: 302433 - DNA, 25 bp, Artificial
  probe
  misc_feature (1)..(25): SEQ ID NO: 1700; WAN024BE6; Start 47; Stop 71
ttcattaccatagcaagctggatat

SEQ ID NO: 302434 - DNA, 25 bp, Artificial
  probe
  misc_feature (1)..(25): SEQ ID NO: 1700; WAN024BE6; Start 46; Stop 70
attcattaccatagcaagctggata

SEQ ID NO: 302435 - DNA, 25 bp, Artificial
  probe
  misc_feature (1)..(25): SEQ ID NO: 1700; WAN024BE6; Start 1; Stop 25
atgatagaggcacagggtttcttag

SEQ ID NO: 302436 - DNA, 25 bp, Artificial
  probe
  misc_feature (1)..(25): SEQ ID NO: 1700; WAN024BE6; Start 45; Stop 69
cattcattaccatagcaagctggat

SEQ ID NO: 302437 - DNA, 25 bp, Artificial
  probe
  misc_feature (1)..(25): SEQ ID NO: 1700; WAN024BE6; Start 13; Stop 37
cagggtttcttagtggataagcaaa

SEQ ID NO: 302438 - DNA, 25 bp, Artificial
  probe
  misc_feature (1)..(25): SEQ ID NO: 1700; WAN024BE6; Start 52; Stop 76
taccatagcaagctggatattattg

SEQ ID NO: 302439 - DNA, 25 bp, Artificial
  probe
  misc_feature (1)..(25): SEQ ID NO: 1700; WAN024BE6; Start 49; Stop 73
cattaccatagcaagctggatatta

SEQ ID NO: 302440 - DNA, 25 bp, Artificial
  probe
  misc_feature (1)..(25): SEQ ID NO: 1700; WAN024BE6; Start 12; Stop 36
acagggtttcttagtggataagcaa

SEQ ID NO: 302441 - DNA, 25 bp, Artificial
  probe
  misc_feature (1)..(25): SEQ ID NO: 1700; WAN024BE6; Start 51; Stop 75
ttaccatagcaagctggatattatt

SEQ ID NO: 302442 - DNA, 25 bp, Artificial
  probe
  misc_feature (1)..(25): SEQ ID NO: 1700; WAN024BE6; Start 110; Stop 134
cttgttatcggtgtcatgattcatt

SEQ ID NO: 302443 - DNA, 25 bp, Artificial
  probe
  misc_feature (1)..(25): SEQ ID NO: 1700; WAN024BE6; Start 106; Stop 130
tatgcttgttatcggtgtcatgatt

SEQ ID NO: 302444 - DNA, 25 bp, Artificial
  probe
  misc_feature (1)..(25): SEQ ID NO: 1700; WAN024BE6; Start 105; Stop 129
ttatgcttgttatcggtgtcatgat

SEQ ID NO: 302445 - DNA, 25 bp, Artificial
  probe
  misc_feature (1)..(25): SEQ ID NO: 1700; WAN024BE6; Start 104; Stop 128
attatgcttgttatcggtgtcatga

SEQ ID NO: 302446 - DNA, 25 bp, Artificial
  probe
  misc_feature (1)..(25): SEQ ID NO: 1700; WAN024BE6; Start 50; Stop 74
attaccatagcaagctggatattat

SEQ ID NO: 302447 - DNA, 25 bp, Artificial
  probe
  misc_feature (1)..(25): SEQ ID NO: 1700; WAN024BE6; Start 112; Stop 136
tgttatcggtgtcatgattcattag

SEQ ID NO: 302448 - DNA, 25 bp, Artificial
  probe
  misc_feature (1)..(25): SEQ ID NO: 1700; WAN024BE6; Start 63; Stop 87
gctggatattattgctttacaatgc

SEQ ID NO: 302449 - DNA, 25 bp, Artificial
  probe
  misc_feature (1)..(25): SEQ ID NO: 1700; WAN024BE6; Start 113; Stop 137
gttatcggtgtcatgattcattaga

SEQ ID NO: 302450 - DNA, 25 bp, Artificial
  probe
  misc_feature (1)..(25): SEQ ID NO: 1700; WAN024BE6; Start 2; Stop 26
tgatagaggcacagggtttcttagt

SEQ ID NO: 302451 - DNA, 25 bp, Artificial
  probe
  misc_feature (1)..(25): SEQ ID NO: 1700; WAN024BE6; Start 16; Stop 40
ggtttcttagtggataagcaaacaa

SEQ ID NO: 302452 - DNA, 25 bp, Artificial
  probe
  misc_feature (1)..(25): SEQ ID NO: 1700; WAN024BE6; Start 111; Stop 135
ttgttatcggtgtcatgattcatta

SEQ ID NO: 302453 - DNA, 25 bp, Artificial
  probe
  misc_feature (1)..(25): SEQ ID NO: 1700; WAN024BE6; Start 20; Stop 44
tcttagtggataagcaaacaagatg

SEQ ID NO: 302454 - DNA, 25 bp, Artificial
  probe
  misc_feature (1)..(25): SEQ ID NO: 1700; WAN024BE6; Start 181; Stop 205
aagcctattttatgtggtgtttgtc

SEQ ID NO: 302455 - DNA, 25 bp, Artificial
  probe
  misc_feature (1)..(25): SEQ ID NO: 1700; WAN024BE6; Start 14; Stop 38
agggtttcttagtggataagcaaac

SEQ ID NO: 302456 - DNA, 25 bp, Artificial
  probe
  misc_feature (1)..(25): SEQ ID NO: 1700; WAN024BE6; Start 109; Stop 133
gcttgttatcggtgtcatgattcat

SEQ ID NO: 302457 - DNA, 25 bp, Artificial
  probe
  misc_feature (1)..(25): SEQ ID NO: 1700; WAN024BE6; Start 107; Stop 131
atgcttgttatcggtgtcatgattc

SEQ ID NO: 302458 - DNA, 25 bp, Artificial
  probe
  misc_feature (1)..(25): SEQ ID NO: 1700; WAN024BE6; Start 182; Stop 206
agcctattttatgtggtgtttgtct

SEQ ID NO: 302459 - DNA, 25 bp, Artificial
  probe
  misc_feature (1)..(25): SEQ ID NO: 1700; WAN024BE6; Start 166; Stop 190
tctttgatacaggataagcctattt

SEQ ID NO: 302460 - DNA, 25 bp, Artificial
  probe
  misc_feature (1)..(25): SEQ ID NO: 1701; WAN024DX8; Start 349; Stop 373
gaagttgtggatgttgatgaggaat

SEQ ID NO: 302461 - DNA, 25 bp, Artificial
  probe
  misc_feature (1)..(25): SEQ ID NO: 1701; WAN024DX8; Start 350; Stop 374
aagttgtggatgttgatgaggaatg

SEQ ID NO: 302462 - DNA, 25 bp, Artificial
  probe
  misc_feature (1)..(25): SEQ ID NO: 1701; WAN024DX8; Start 348; Stop 372
ggaagttgtggatgttgatgaggaa

SEQ ID NO: 302463 - DNA, 25 bp, Artificial
  probe
  misc_feature (1)..(25): SEQ ID NO: 1701; WAN024DX8; Start 351; Stop 375
agttgtggatgttgatgaggaatgg

SEQ ID NO: 302464 - DNA, 25 bp, Artificial
  probe
  misc_feature (1)..(25): SEQ ID NO: 1701; WAN024DX8; Start 253; Stop 277
aaagagaaaggaaacgcagaaatgt

SEQ ID NO: 302465 - DNA, 25 bp, Artificial
  probe
  misc_feature (1)..(25): SEQ ID NO: 1701; WAN024DX8; Start 254; Stop 278
aagagaaaggaaacgcagaaatgtc

SEQ ID NO: 302466 - DNA, 25 bp, Artificial
  probe
  misc_feature (1)..(25): SEQ ID NO: 1701; WAN024DX8; Start 313; Stop 337
attataacgggagtgtatattgggc

SEQ ID NO: 302467 - DNA, 25 bp, Artificial
  probe
  misc_feature (1)..(25): SEQ ID NO: 1701; WAN024DX8; Start 263; Stop 287
gaaacgcagaaatgtcgagattatt

SEQ ID NO: 302468 - DNA, 25 bp, Artificial
  probe
  misc_feature (1)..(25): SEQ ID NO: 1701; WAN024DX8; Start 312; Stop 336
aattataacgggagtgtatattggg

SEQ ID NO: 302469 - DNA, 25 bp, Artificial
  probe
  misc_feature (1)..(25): SEQ ID NO: 1701; WAN024DX8; Start 262; Stop 286
ggaaacgcagaaatgtcgagattat

SEQ ID NO: 302470 - DNA, 25 bp, Artificial
  probe
  misc_feature (1)..(25): SEQ ID NO: 1701; WAN024DX8; Start 309; Stop 333
accaattataacgggagtgtatatt

SEQ ID NO: 302471 - DNA, 25 bp, Artificial
  probe
  misc_feature (1)..(25): SEQ ID NO: 1701; WAN024DX8; Start 308; Stop 332
aaccaattataacgggagtgtatat

SEQ ID NO: 302472 - DNA, 25 bp, Artificial
  probe
  misc_feature (1)..(25): SEQ ID NO: 1701; WAN024DX8; Start 251; Stop 275
gaaaagagaaaggaaacgcagaaat

SEQ ID NO: 302473 - DNA, 25 bp, Artificial
  probe
  misc_feature (1)..(25): SEQ ID NO: 1701; WAN024DX8; Start 252; Stop 276
aaaagagaaaggaaacgcagaaatg

SEQ ID NO: 302474 - DNA, 25 bp, Artificial
  probe
  misc_feature (1)..(25): SEQ ID NO: 1701; WAN024DX8; Start 345; Stop 369
ctgggaagttgtggatgttgatgag

SEQ ID NO: 302475 - DNA, 25 bp, Artificial
  probe
  misc_feature (1)..(25): SEQ ID NO: 1701; WAN024DX8; Start 261; Stop 285
aggaaacgcagaaatgtcgagatta

SEQ ID NO: 302476 - DNA, 25 bp, Artificial
  probe
  misc_feature (1)..(25): SEQ ID NO: 1701; WAN024DX8; Start 352; Stop 376
gttgtggatgttgatgaggaatggg

SEQ ID NO: 302477 - DNA, 25 bp, Artificial
  probe
  misc_feature (1)..(25): SEQ ID NO: 1701; WAN024DX8; Start 255; Stop 279
agagaaaggaaacgcagaaatgtcg

SEQ ID NO: 302478 - DNA, 25 bp, Artificial
  probe
  misc_feature (1)..(25): SEQ ID NO: 1701; WAN024DX8; Start 243; Stop 267
acttgagcgaaaagagaaaggaaac

SEQ ID NO: 302479 - DNA, 25 bp, Artificial
  probe
  misc_feature (1)..(25): SEQ ID NO: 1701; WAN024DX8; Start 340; Stop 364
gataactgggaagttgtggatgttg

SEQ ID NO: 302480 - DNA, 25 bp, Artificial
  probe
  misc_feature (1)..(25): SEQ ID NO: 1701; WAN024DX8; Start 339; Stop 363
agataactgggaagttgtggatgtt

SEQ ID NO: 302481 - DNA, 25 bp, Artificial
  probe
  misc_feature (1)..(25): SEQ ID NO: 1701; WAN024DX8; Start 314; Stop 338
ttataacgggagtgtatattgggcc

SEQ ID NO: 302482 - DNA, 25 bp, Artificial
  probe
  misc_feature (1)..(25): SEQ ID NO: 1701; WAN024DX8; Start 260; Stop 284
aaggaaacgcagaaatgtcgagatt

SEQ ID NO: 302483 - DNA, 25 bp, Artificial
  probe
  misc_feature (1)..(25): SEQ ID NO: 1701; WAN024DX8; Start 259; Stop 283
aaaggaaacgcagaaatgtcgagat

SEQ ID NO: 302484 - DNA, 25 bp, Artificial
  probe
  misc_feature (1)..(25): SEQ ID NO: 1701; WAN024DX8; Start 353; Stop 377
ttgtggatgttgatgaggaatgggt

SEQ ID NO: 302485 - DNA, 25 bp, Artificial
  probe
  misc_feature (1)..(25): SEQ ID NO: 1701; WAN024DX8; Start 323; Stop 347
gagtgtatattgggccagataactg

SEQ ID NO: 302486 - DNA, 25 bp, Artificial
  probe
  misc_feature (1)..(25): SEQ ID NO: 1701; WAN024DX8; Start 342; Stop 366
taactgggaagttgtggatgttgat

SEQ ID NO: 302487 - DNA, 25 bp, Artificial
  probe
  misc_feature (1)..(25): SEQ ID NO: 1701; WAN024DX8; Start 341; Stop 365
ataactgggaagttgtggatgttga

SEQ ID NO: 302488 - DNA, 25 bp, Artificial
  probe
  misc_feature (1)..(25): SEQ ID NO: 1701; WAN024DX8; Start 322; Stop 346
ggagtgtatattgggccagataact

SEQ ID NO: 302489 - DNA, 25 bp, Artificial
  probe
  misc_feature (1)..(25): SEQ ID NO: 1701; WAN024DX8; Start 250; Stop 274
cgaaaagagaaaggaaacgcagaaa

SEQ ID NO: 302490 - DNA, 25 bp, Artificial
  probe
  misc_feature (1)..(25): SEQ ID NO: 1701; WAN024DX8; Start 311; Stop 335
caattataacgggagtgtatattgg

SEQ ID NO: 302491 - DNA, 25 bp, Artificial
  probe
  misc_feature (1)..(25): SEQ ID NO: 1701; WAN024DX8; Start 310; Stop 334
ccaattataacgggagtgtatattg

SEQ ID NO: 302492 - DNA, 25 bp, Artificial
  probe
  misc_feature (1)..(25): SEQ ID NO: 1701; WAN024DX8; Start 338; Stop 362
cagataactgggaagttgtggatgt

SEQ ID NO: 302493 - DNA, 25 bp, Artificial
  probe
  misc_feature (1)..(25): SEQ ID NO: 1702; WAN024ETK; Start 682; Stop 706
tatgtagatgctggagtggatgata

SEQ ID NO: 302494 - DNA, 25 bp, Artificial
  probe
  misc_feature (1)..(25): SEQ ID NO: 1702; WAN024ETK; Start 686; Stop 710
tagatgctggagtggatgatattga

SEQ ID NO: 302495 - DNA, 25 bp, Artificial
  probe
  misc_feature (1)..(25): SEQ ID NO: 1702; WAN024ETK; Start 685; Stop 709
gtagatgctggagtggatgatattg

SEQ ID NO: 302496 - DNA, 25 bp, Artificial
  probe
  misc_feature (1)..(25): SEQ ID NO: 1702; WAN024ETK; Start 683; Stop 707
atgtagatgctggagtggatgatat

SEQ ID NO: 302497 - DNA, 25 bp, Artificial
  probe
  misc_feature (1)..(25): SEQ ID NO: 1702; WAN024ETK; Start 684; Stop 708
tgtagatgctggagtggatgatatt

SEQ ID NO: 302498 - DNA, 25 bp, Artificial
  probe
  misc_feature (1)..(25): SEQ ID NO: 1702; WAN024ETK; Start 681; Stop 705
ctatgtagatgctggagtggatgat

SEQ ID NO: 302499 - DNA, 25 bp, Artificial
  probe
  misc_feature (1)..(25): SEQ ID NO: 1702; WAN024ETK; Start 687; Stop 711
agatgctggagtggatgatattgaa

SEQ ID NO: 302500 - DNA, 25 bp, Artificial
  probe
  misc_feature (1)..(25): SEQ ID NO: 1702; WAN024ETK; Start 109; Stop 133
ttgacagaagaagaattggaatcta

SEQ ID NO: 302501 - DNA, 25 bp, Artificial
  probe
  misc_feature (1)..(25): SEQ ID NO: 1702; WAN024ETK; Start 644; Stop 668
atcgtctctatatcactgacttctt

SEQ ID NO: 302502 - DNA, 25 bp, Artificial
  probe
  misc_feature (1)..(25): SEQ ID NO: 1702; WAN024ETK; Start 643; Stop 667
gatcgtctctatatcactgacttct

SEQ ID NO: 302503 - DNA, 25 bp, Artificial
  probe
  misc_feature (1)..(25): SEQ ID NO: 1702; WAN024ETK; Start 512; Stop 536
atggacaagatgtagatattcctgt

SEQ ID NO: 302504 - DNA, 25 bp, Artificial
  probe
  misc_feature (1)..(25): SEQ ID NO: 1702; WAN024ETK; Start 112; Stop 136
acagaagaagaattggaatctatca

SEQ ID NO: 302505 - DNA, 25 bp, Artificial
  probe
  misc_feature (1)..(25): SEQ ID NO: 1702; WAN024ETK; Start 110; Stop 134
tgacagaagaagaattggaatctat

SEQ ID NO: 302506 - DNA, 25 bp, Artificial
  probe
  misc_feature (1)..(25): SEQ ID NO: 1702; WAN024ETK; Start 680; Stop 704
tctatgtagatgctggagtggatga

SEQ ID NO: 302507 - DNA, 25 bp, Artificial
  probe
  misc_feature (1)..(25): SEQ ID NO: 1702; WAN024ETK; Start 470; Stop 494
atgatatggaagctcttctcaactt

SEQ ID NO: 302508 - DNA, 25 bp, Artificial
  probe
  misc_feature (1)..(25): SEQ ID NO: 1702; WAN024ETK; Start 206; Stop 230
agatttacaagcgaactaaggaaga

SEQ ID NO: 302509 - DNA, 25 bp, Artificial
  probe
  misc_feature (1)..(25): SEQ ID NO: 1702; WAN024ETK; Start 205; Stop 229
cagatttacaagcgaactaaggaag

SEQ ID NO: 302510 - DNA, 25 bp, Artificial
  probe
  misc_feature (1)..(25): SEQ ID NO: 1702; WAN024ETK; Start 204; Stop 228
tcagatttacaagcgaactaaggaa

SEQ ID NO: 302511 - DNA, 25 bp, Artificial
  probe
  misc_feature (1)..(25): SEQ ID NO: 1702; WAN024ETK; Start 692; Stop 716
ctggagtggatgatattgaaagttg

SEQ ID NO: 302512 - DNA, 25 bp, Artificial
  probe
  misc_feature (1)..(25): SEQ ID NO: 1702; WAN024ETK; Start 207; Stop 231
gatttacaagcgaactaaggaagat

SEQ ID NO: 302513 - DNA, 25 bp, Artificial
  probe
  misc_feature (1)..(25): SEQ ID NO: 1702; WAN024ETK; Start 694; Stop 718
ggagtggatgatattgaaagttggt

SEQ ID NO: 302514 - DNA, 25 bp, Artificial
  probe
  misc_feature (1)..(25): SEQ ID NO: 1702; WAN024ETK; Start 693; Stop 717
tggagtggatgatattgaaagttgg

SEQ ID NO: 302515 - DNA, 25 bp, Artificial
  probe
  misc_feature (1)..(25): SEQ ID NO: 1702; WAN024ETK; Start 469; Stop 493
tatgatatggaagctcttctcaact

SEQ ID NO: 302516 - DNA, 25 bp, Artificial
  probe
  misc_feature (1)..(25): SEQ ID NO: 1702; WAN024ETK; Start 689; Stop 713
atgctggagtggatgatattgaaag

SEQ ID NO: 302517 - DNA, 25 bp, Artificial
  probe
  misc_feature (1)..(25): SEQ ID NO: 1702; WAN024ETK; Start 688; Stop 712
gatgctggagtggatgatattgaaa

SEQ ID NO: 302518 - DNA, 25 bp, Artificial
  probe
  misc_feature (1)..(25): SEQ ID NO: 1702; WAN024ETK; Start 203; Stop 227
ttcagatttacaagcgaactaagga

SEQ ID NO: 302519 - DNA, 25 bp, Artificial
  probe
  misc_feature (1)..(25): SEQ ID NO: 1702; WAN024ETK; Start 209; Stop 233
tttacaagcgaactaaggaagattt

SEQ ID NO: 302520 - DNA, 25 bp, Artificial
  probe
  misc_feature (1)..(25): SEQ ID NO: 1702; WAN024ETK; Start 117; Stop 141
agaagaattggaatctatcaagagt

SEQ ID NO: 302521 - DNA, 25 bp, Artificial
  probe
  misc_feature (1)..(25): SEQ ID NO: 1702; WAN024ETK; Start 111; Stop 135
gacagaagaagaattggaatctatc

SEQ ID NO: 302522 - DNA, 25 bp, Artificial
  probe
  misc_feature (1)..(25): SEQ ID NO: 1702; WAN024ETK; Start 468; Stop 492
ctatgatatggaagctcttctcaac

SEQ ID NO: 302523 - DNA, 25 bp, Artificial
  probe
  misc_feature (1)..(25): SEQ ID NO: 1702; WAN024ETK; Start 202; Stop 226
attcagatttacaagcgaactaagg

SEQ ID NO: 302524 - DNA, 25 bp, Artificial
  probe
  misc_feature (1)..(25): SEQ ID NO: 1702; WAN024ETK; Start 691; Stop 715
gctggagtggatgatattgaaagtt

SEQ ID NO: 302525 - DNA, 25 bp, Artificial
  probe
  misc_feature (1)..(25): SEQ ID NO: 1702; WAN024ETK; Start 208; Stop 232
atttacaagcgaactaaggaagatt

SEQ ID NO: 302526 - DNA, 25 bp, Artificial
  probe
  misc_feature (1)..(25): SEQ ID NO: 1703; WAN024BIG; Start 301; Stop 325
gatagtcgttatgccttgatagagt

SEQ ID NO: 302527 - DNA, 25 bp, Artificial
  probe
  misc_feature (1)..(25): SEQ ID NO: 1703; WAN024BIG; Start 300; Stop 324
tgatagtcgttatgccttgatagag

SEQ ID NO: 302528 - DNA, 25 bp, Artificial
  probe
  misc_feature (1)..(25): SEQ ID NO: 1703; WAN024BIG; Start 302; Stop 326
atagtcgttatgccttgatagagtt

SEQ ID NO: 302529 - DNA, 25 bp, Artificial
  probe
  misc_feature (1)..(25): SEQ ID NO: 1703; WAN024BIG; Start 299; Stop 323
atgatagtcgttatgccttgataga

SEQ ID NO: 302530 - DNA, 25 bp, Artificial
  probe
  misc_feature (1)..(25): SEQ ID NO: 1703; WAN024BIG; Start 298; Stop 322
aatgatagtcgttatgccttgatag

SEQ ID NO: 302531 - DNA, 25 bp, Artificial
  probe
  misc_feature (1)..(25): SEQ ID NO: 1703; WAN024BIG; Start 297; Stop 321
caatgatagtcgttatgccttgata

SEQ ID NO: 302532 - DNA, 25 bp, Artificial
  probe
  misc_feature (1)..(25): SEQ ID NO: 1703; WAN024BIG; Start 294; Stop 318
cctcaatgatagtcgttatgccttg

SEQ ID NO: 302533 - DNA, 25 bp, Artificial
  probe
  misc_feature (1)..(25): SEQ ID NO: 1703; WAN024BIG; Start 306; Stop 330
tcgttatgccttgatagagtttagt

SEQ ID NO: 302534 - DNA, 25 bp, Artificial
  probe
  misc_feature (1)..(25): SEQ ID NO: 1703; WAN024BIG; Start 304; Stop 328
agtcgttatgccttgatagagttta

SEQ ID NO: 302535 - DNA, 25 bp, Artificial
  probe
  misc_feature (1)..(25): SEQ ID NO: 1703; WAN024BIG; Start 303; Stop 327
tagtcgttatgccttgatagagttt

SEQ ID NO: 302536 - DNA, 25 bp, Artificial
  probe
  misc_feature (1)..(25): SEQ ID NO: 1703; WAN024BIG; Start 305; Stop 329
gtcgttatgccttgatagagtttag

SEQ ID NO: 302537 - DNA, 25 bp, Artificial
  probe
  misc_feature (1)..(25): SEQ ID NO: 1703; WAN024BIG; Start 307; Stop 331
cgttatgccttgatagagtttagta

SEQ ID NO: 302538 - DNA, 25 bp, Artificial
  probe
  misc_feature (1)..(25): SEQ ID NO: 1703; WAN024BIG; Start 313; Stop 337
gccttgatagagtttagtatgaaca

SEQ ID NO: 302539 - DNA, 25 bp, Artificial
  probe
  misc_feature (1)..(25): SEQ ID NO: 1703; WAN024BIG; Start 312; Stop 336
tgccttgatagagtttagtatgaac

SEQ ID NO: 302540 - DNA, 25 bp, Artificial
  probe
  misc_feature (1)..(25): SEQ ID NO: 1703; WAN024BIG; Start 296; Stop 320
tcaatgatagtcgttatgccttgat

SEQ ID NO: 302541 - DNA, 25 bp, Artificial
  probe
  misc_feature (1)..(25): SEQ ID NO: 1703; WAN024BIG; Start 295; Stop 319
ctcaatgatagtcgttatgccttga

SEQ ID NO: 302542 - DNA, 25 bp, Artificial
  probe
  misc_feature (1)..(25): SEQ ID NO: 1703; WAN024BIG; Start 471; Stop 495
ctgttacacgcaagtaaatagttca

SEQ ID NO: 302543 - DNA, 25 bp, Artificial
  probe
  misc_feature (1)..(25): SEQ ID NO: 1703; WAN024BIG; Start 311; Stop 335
atgccttgatagagtttagtatgaa

SEQ ID NO: 302544 - DNA, 25 bp, Artificial
  probe
  misc_feature (1)..(25): SEQ ID NO: 1703; WAN024BIG; Start 293; Stop 317
ccctcaatgatagtcgttatgcctt

SEQ ID NO: 302545 - DNA, 25 bp, Artificial
  probe
  misc_feature (1)..(25): SEQ ID NO: 1703; WAN024BIG; Start 470; Stop 494
gctgttacacgcaagtaaatagttc

SEQ ID NO: 302546 - DNA, 25 bp, Artificial
  probe
  misc_feature (1)..(25): SEQ ID NO: 1703; WAN024BIG; Start 373; Stop 397
atcttgatgttgggaattactccag

SEQ ID NO: 302547 - DNA, 25 bp, Artificial
  probe
  misc_feature (1)..(25): SEQ ID NO: 1703; WAN024BIG; Start 378; Stop 402
gatgttgggaattactccagtcatt

SEQ ID NO: 302548 - DNA, 25 bp, Artificial
  probe
  misc_feature (1)..(25): SEQ ID NO: 1703; WAN024BIG; Start 379; Stop 403
atgttgggaattactccagtcattg

SEQ ID NO: 302549 - DNA, 25 bp, Artificial
  probe
  misc_feature (1)..(25): SEQ ID NO: 1703; WAN024BIG; Start 372; Stop 396
gatcttgatgttgggaattactcca

SEQ ID NO: 302550 - DNA, 25 bp, Artificial
  probe
  misc_feature (1)..(25): SEQ ID NO: 1703; WAN024BIG; Start 375; Stop 399
cttgatgttgggaattactccagtc

SEQ ID NO: 302551 - DNA, 25 bp, Artificial
  probe
  misc_feature (1)..(25): SEQ ID NO: 1703; WAN024BIG; Start 374; Stop 398
tcttgatgttgggaattactccagt

SEQ ID NO: 302552 - DNA, 25 bp, Artificial
  probe
  misc_feature (1)..(25): SEQ ID NO: 1703; WAN024BIG; Start 386; Stop 410
gaattactccagtcattgcccacat

SEQ ID NO: 302553 - DNA, 25 bp, Artificial
  probe
  misc_feature (1)..(25): SEQ ID NO: 1703; WAN024BIG; Start 377; Stop 401
tgatgttgggaattactccagtcat

SEQ ID NO: 302554 - DNA, 25 bp, Artificial
  probe
  misc_feature (1)..(25): SEQ ID NO: 1703; WAN024BIG; Start 376; Stop 400
ttgatgttgggaattactccagtca

SEQ ID NO: 302555 - DNA, 25 bp, Artificial
  probe
  misc_feature (1)..(25): SEQ ID NO: 1703; WAN024BIG; Start 646; Stop 670
atcattgctaagaaatatggagcga

SEQ ID NO: 302556 - DNA, 25 bp, Artificial
  probe
  misc_feature (1)..(25): SEQ ID NO: 1703; WAN024BIG; Start 310; Stop 334
tatgccttgatagagtttagtatga

SEQ ID NO: 302557 - DNA, 25 bp, Artificial
  probe
  misc_feature (1)..(25): SEQ ID NO: 1703; WAN024BIG; Start 647; Stop 671
tcattgctaagaaatatggagcgaa

SEQ ID NO: 302558 - DNA, 25 bp, Artificial
  probe
  misc_feature (1)..(25): SEQ ID NO: 1703; WAN024BIG; Start 645; Stop 669
tatcattgctaagaaatatggagcg

SEQ ID NO: 302559 - DNA, 25 bp, Artificial
  probe
  misc_feature (1)..(25): SEQ ID NO: 1705; WAN024CGK; Start 203; Stop 227
gagtagttgctgaagtaataggagg

SEQ ID NO: 302560 - DNA, 25 bp, Artificial
  probe
  misc_feature (1)..(25): SEQ ID NO: 1705; WAN024CGK; Start 205; Stop 229
gtagttgctgaagtaataggaggac

SEQ ID NO: 302561 - DNA, 25 bp, Artificial
  probe
  misc_feature (1)..(25): SEQ ID NO: 1705; WAN024CGK; Start 204; Stop 228
agtagttgctgaagtaataggagga

SEQ ID NO: 302562 - DNA, 25 bp, Artificial
  probe
  misc_feature (1)..(25): SEQ ID NO: 1705; WAN024CGK; Start 201; Stop 225
gagagtagttgctgaagtaatagga

SEQ ID NO: 302563 - DNA, 25 bp, Artificial
  probe
  misc_feature (1)..(25): SEQ ID NO: 1705; WAN024CGK; Start 202; Stop 226
agagtagttgctgaagtaataggag

SEQ ID NO: 302564 - DNA, 25 bp, Artificial
  probe
  misc_feature (1)..(25): SEQ ID NO: 1705; WAN024CGK; Start 200; Stop 224
agagagtagttgctgaagtaatagg

SEQ ID NO: 302565 - DNA, 25 bp, Artificial
  probe
  misc_feature (1)..(25): SEQ ID NO: 1705; WAN024CGK; Start 219; Stop 243
aataggaggactagaagaacgagaa

SEQ ID NO: 302566 - DNA, 25 bp, Artificial
  probe
  misc_feature (1)..(25): SEQ ID NO: 1705; WAN024CGK; Start 131; Stop 155
atgaactaactagcacagaataccg

SEQ ID NO: 302567 - DNA, 25 bp, Artificial
  probe
  misc_feature (1)..(25): SEQ ID NO: 1705; WAN024CGK; Start 218; Stop 242
taataggaggactagaagaacgaga

SEQ ID NO: 302568 - DNA, 25 bp, Artificial
  probe
  misc_feature (1)..(25): SEQ ID NO: 1705; WAN024CGK; Start 217; Stop 241
gtaataggaggactagaagaacgag

SEQ ID NO: 302569 - DNA, 25 bp, Artificial
  probe
  misc_feature (1)..(25): SEQ ID NO: 1705; WAN024CGK; Start 220; Stop 244
ataggaggactagaagaacgagaag

SEQ ID NO: 302570 - DNA, 25 bp, Artificial
  probe
  misc_feature (1)..(25): SEQ ID NO: 1705; WAN024CGK; Start 207; Stop 231
agttgctgaagtaataggaggacta

SEQ ID NO: 302571 - DNA, 25 bp, Artificial
  probe
  misc_feature (1)..(25): SEQ ID NO: 1705; WAN024CGK; Start 206; Stop 230
tagttgctgaagtaataggaggact

SEQ ID NO: 302572 - DNA, 25 bp, Artificial
  probe
  misc_feature (1)..(25): SEQ ID NO: 1705; WAN024CGK; Start 210; Stop 234
tgctgaagtaataggaggactagaa

SEQ ID NO: 302573 - DNA, 25 bp, Artificial
  probe
  misc_feature (1)..(25): SEQ ID NO: 1705; WAN024CGK; Start 209; Stop 233
ttgctgaagtaataggaggactaga

SEQ ID NO: 302574 - DNA, 25 bp, Artificial
  probe
  misc_feature (1)..(25): SEQ ID NO: 1705; WAN024CGK; Start 208; Stop 232
gttgctgaagtaataggaggactag

SEQ ID NO: 302575 - DNA, 25 bp, Artificial
  probe
  misc_feature (1)..(25): SEQ ID NO: 1705; WAN024CGK; Start 216; Stop 240
agtaataggaggactagaagaacga

SEQ ID NO: 302576 - DNA, 25 bp, Artificial
  probe
  misc_feature (1)..(25): SEQ ID NO: 1705; WAN024CGK; Start 211; Stop 235
gctgaagtaataggaggactagaag

SEQ ID NO: 302577 - DNA, 25 bp, Artificial
  probe
  misc_feature (1)..(25): SEQ ID NO: 1705; WAN024CGK; Start 221; Stop 245
taggaggactagaagaacgagaaga

SEQ ID NO: 302578 - DNA, 25 bp, Artificial
  probe
  misc_feature (1)..(25): SEQ ID NO: 1705; WAN024CGK; Start 130; Stop 154
aatgaactaactagcacagaatacc

SEQ ID NO: 302579 - DNA, 25 bp, Artificial
  probe
  misc_feature (1)..(25): SEQ ID NO: 1705; WAN024CGK; Start 132; Stop 156
tgaactaactagcacagaataccgt

SEQ ID NO: 302580 - DNA, 25 bp, Artificial
  probe
  misc_feature (1)..(25): SEQ ID NO: 1705; WAN024CGK; Start 215; Stop 239
aagtaataggaggactagaagaacg

SEQ ID NO: 302581 - DNA, 25 bp, Artificial
  probe
  misc_feature (1)..(25): SEQ ID NO: 1705; WAN024CGK; Start 197; Stop 221
aacagagagtagttgctgaagtaat

SEQ ID NO: 302582 - DNA, 25 bp, Artificial
  probe
  misc_feature (1)..(25): SEQ ID NO: 1705; WAN024CGK; Start 234; Stop 258
agaacgagaagagtcttattacaga

SEQ ID NO: 302583 - DNA, 25 bp, Artificial
  probe
  misc_feature (1)..(25): SEQ ID NO: 1705; WAN024CGK; Start 461; Stop 485
cagattcatccttatatactcgtgg

SEQ ID NO: 302584 - DNA, 25 bp, Artificial
  probe
  misc_feature (1)..(25): SEQ ID NO: 1705; WAN024CGK; Start 198; Stop 222
acagagagtagttgctgaagtaata

SEQ ID NO: 302585 - DNA, 25 bp, Artificial
  probe
  misc_feature (1)..(25): SEQ ID NO: 1705; WAN024CGK; Start 474; Stop 498
atatactcgtggaatgatgattgat

SEQ ID NO: 302586 - DNA, 25 bp, Artificial
  probe
  misc_feature (1)..(25): SEQ ID NO: 1705; WAN024CGK; Start 235; Stop 259
gaacgagaagagtcttattacagaa

SEQ ID NO: 302587 - DNA, 25 bp, Artificial
  probe
  misc_feature (1)..(25): SEQ ID NO: 1705; WAN024CGK; Start 212; Stop 236
ctgaagtaataggaggactagaaga

SEQ ID NO: 302588 - DNA, 25 bp, Artificial
  probe
  misc_feature (1)..(25): SEQ ID NO: 1705; WAN024CGK; Start 199; Stop 223
cagagagtagttgctgaagtaatag

SEQ ID NO: 302589 - DNA, 25 bp, Artificial
  probe
  misc_feature (1)..(25): SEQ ID NO: 1705; WAN024CGK; Start 136; Stop 160
ctaactagcacagaataccgtgaac

SEQ ID NO: 302590 - DNA, 25 bp, Artificial
  probe
  misc_feature (1)..(25): SEQ ID NO: 1705; WAN024CGK; Start 133; Stop 157
gaactaactagcacagaataccgtg

SEQ ID NO: 302591 - DNA, 25 bp, Artificial
  probe
  misc_feature (1)..(25): SEQ ID NO: 1705; WAN024CGK; Start 470; Stop 494
ccttatatactcgtggaatgatgat

SEQ ID NO: 302592 - DNA, 25 bp, Artificial
  probe
  misc_feature (1)..(25): SEQ ID NO: 1706; WAN024CIM; Start 421; Stop 445
ggcacaatggatacgagtagattaa

SEQ ID NO: 302593 - DNA, 25 bp, Artificial
  probe
  misc_feature (1)..(25): SEQ ID NO: 1706; WAN024CIM; Start 420; Stop 444
tggcacaatggatacgagtagatta

SEQ ID NO: 302594 - DNA, 25 bp, Artificial
  probe
  misc_feature (1)..(25): SEQ ID NO: 1706; WAN024CIM; Start 419; Stop 443
atggcacaatggatacgagtagatt

SEQ ID NO: 302595 - DNA, 25 bp, Artificial
  probe
  misc_feature (1)..(25): SEQ ID NO: 1706; WAN024CIM; Start 418; Stop 442
aatggcacaatggatacgagtagat

SEQ ID NO: 302596 - DNA, 25 bp, Artificial
  probe
  misc_feature (1)..(25): SEQ ID NO: 1706; WAN024CIM; Start 559; Stop 583
ttctctaccttagtaacagatggcg

SEQ ID NO: 302597 - DNA, 25 bp, Artificial
  probe
  misc_feature (1)..(25): SEQ ID NO: 1706; WAN024CIM; Start 563; Stop 587
ctaccttagtaacagatggcgtgaa

SEQ ID NO: 302598 - DNA, 25 bp, Artificial
  probe
  misc_feature (1)..(25): SEQ ID NO: 1706; WAN024CIM; Start 422; Stop 446
gcacaatggatacgagtagattaat

SEQ ID NO: 302599 - DNA, 25 bp, Artificial
  probe
  misc_feature (1)..(25): SEQ ID NO: 1706; WAN024CIM; Start 383; Stop 407
ccatcatagagaataggaagaagaa

SEQ ID NO: 302600 - DNA, 25 bp, Artificial
  probe
  misc_feature (1)..(25): SEQ ID NO: 1706; WAN024CIM; Start 466; Stop 490
tcatgcttaacagttacttctgctt

SEQ ID NO: 302601 - DNA, 25 bp, Artificial
  probe
  misc_feature (1)..(25): SEQ ID NO: 1706; WAN024CIM; Start 465; Stop 489
ttcatgcttaacagttacttctgct

SEQ ID NO: 302602 - DNA, 25 bp, Artificial
  probe
  misc_feature (1)..(25): SEQ ID NO: 1706; WAN024CIM; Start 561; Stop 585
ctctaccttagtaacagatggcgtg

SEQ ID NO: 302603 - DNA, 25 bp, Artificial
  probe
  misc_feature (1)..(25): SEQ ID NO: 1706; WAN024CIM; Start 560; Stop 584
tctctaccttagtaacagatggcgt

SEQ ID NO: 302604 - DNA, 25 bp, Artificial
  probe
  misc_feature (1)..(25): SEQ ID NO: 1706; WAN024CIM; Start 60; Stop 84
aactccgacaaacatttctacaaag

SEQ ID NO: 302605 - DNA, 25 bp, Artificial
  probe
  misc_feature (1)..(25): SEQ ID NO: 1706; WAN024CIM; Start 59; Stop 83
caactccgacaaacatttctacaaa

SEQ ID NO: 302606 - DNA, 25 bp, Artificial
  probe
  misc_feature (1)..(25): SEQ ID NO: 1706; WAN024CIM; Start 96; Stop 120
gatactaaagaatggaacacctgct

SEQ ID NO: 302607 - DNA, 25 bp, Artificial
  probe
  misc_feature (1)..(25): SEQ ID NO: 1706; WAN024CIM; Start 95; Stop 119
agatactaaagaatggaacacctgc

SEQ ID NO: 302608 - DNA, 25 bp, Artificial
  probe
  misc_feature (1)..(25): SEQ ID NO: 1706; WAN024CIM; Start 562; Stop 586
tctaccttagtaacagatggcgtga

SEQ ID NO: 302609 - DNA, 25 bp, Artificial
  probe
  misc_feature (1)..(25): SEQ ID NO: 1706; WAN024CIM; Start 93; Stop 117
tgagatactaaagaatggaacacct

SEQ ID NO: 302610 - DNA, 25 bp, Artificial
  probe
  misc_feature (1)..(25): SEQ ID NO: 1706; WAN024CIM; Start 90; Stop 114
acctgagatactaaagaatggaaca

SEQ ID NO: 302611 - DNA, 25 bp, Artificial
  probe
  misc_feature (1)..(25): SEQ ID NO: 1706; WAN024CIM; Start 368; Stop 392
ctcctcccatatttcccatcataga

SEQ ID NO: 302612 - DNA, 25 bp, Artificial
  probe
  misc_feature (1)..(25): SEQ ID NO: 1706; WAN024CIM; Start 97; Stop 121
atactaaagaatggaacacctgctt

SEQ ID NO: 302613 - DNA, 25 bp, Artificial
  probe
  misc_feature (1)..(25): SEQ ID NO: 1706; WAN024CIM; Start 382; Stop 406
cccatcatagagaataggaagaaga

SEQ ID NO: 302614 - DNA, 25 bp, Artificial
  probe
  misc_feature (1)..(25): SEQ ID NO: 1706; WAN024CIM; Start 94; Stop 118
gagatactaaagaatggaacacctg

SEQ ID NO: 302615 - DNA, 25 bp, Artificial
  probe
  misc_feature (1)..(25): SEQ ID NO: 1706; WAN024CIM; Start 92; Stop 116
ctgagatactaaagaatggaacacc

SEQ ID NO: 302616 - DNA, 25 bp, Artificial
  probe
  misc_feature (1)..(25): SEQ ID NO: 1706; WAN024CIM; Start 91; Stop 115
cctgagatactaaagaatggaacac

SEQ ID NO: 302617 - DNA, 25 bp, Artificial
  probe
  misc_feature (1)..(25): SEQ ID NO: 1706; WAN024CIM; Start 558; Stop 582
tttctctaccttagtaacagatggc

SEQ ID NO: 302618 - DNA, 25 bp, Artificial
  probe
  misc_feature (1)..(25): SEQ ID NO: 1706; WAN024CIM; Start 98; Stop 122
tactaaagaatggaacacctgcttc

SEQ ID NO: 302619 - DNA, 25 bp, Artificial
  probe
  misc_feature (1)..(25): SEQ ID NO: 1706; WAN024CIM; Start 87; Stop 111
agaacctgagatactaaagaatgga

SEQ ID NO: 302620 - DNA, 25 bp, Artificial
  probe
  misc_feature (1)..(25): SEQ ID NO: 1706; WAN024CIM; Start 372; Stop 396
tcccatatttcccatcatagagaat

SEQ ID NO: 302621 - DNA, 25 bp, Artificial
  probe
  misc_feature (1)..(25): SEQ ID NO: 1706; WAN024CIM; Start 230; Stop 254
ttaagaactcaacaacttcaactag

SEQ ID NO: 302622 - DNA, 25 bp, Artificial
  probe
  misc_feature (1)..(25): SEQ ID NO: 1706; WAN024CIM; Start 89; Stop 113
aacctgagatactaaagaatggaac

SEQ ID NO: 302623 - DNA, 25 bp, Artificial
  probe
  misc_feature (1)..(25): SEQ ID NO: 1706; WAN024CIM; Start 58; Stop 82
ccaactccgacaaacatttctacaa

SEQ ID NO: 302624 - DNA, 25 bp, Artificial
  probe
  misc_feature (1)..(25): SEQ ID NO: 1706; WAN024CIM; Start 564; Stop 588
taccttagtaacagatggcgtgaaa

SEQ ID NO: 302625 - DNA, 25 bp, Artificial
  probe
  misc_feature (1)..(25): SEQ ID NO: 1707; WAN024G5R; Start 194; Stop 218
gattgacgagaatagatgtgacgag

SEQ ID NO: 302626 - DNA, 25 bp, Artificial
  probe
  misc_feature (1)..(25): SEQ ID NO: 1707; WAN024G5R; Start 193; Stop 217
ggattgacgagaatagatgtgacga

SEQ ID NO: 302627 - DNA, 25 bp, Artificial
  probe
  misc_feature (1)..(25): SEQ ID NO: 1707; WAN024G5R; Start 73; Stop 97
ccaatcatccagctatcattcctta

SEQ ID NO: 302628 - DNA, 25 bp, Artificial
  probe
  misc_feature (1)..(25): SEQ ID NO: 1707; WAN024G5R; Start 195; Stop 219
attgacgagaatagatgtgacgagc

SEQ ID NO: 302629 - DNA, 25 bp, Artificial
  probe
  misc_feature (1)..(25): SEQ ID NO: 1707; WAN024G5R; Start 100; Stop 124
aaagaaatagccagacaaagaatcc

SEQ ID NO: 302630 - DNA, 25 bp, Artificial
  probe
  misc_feature (1)..(25): SEQ ID NO: 1707; WAN024G5R; Start 74; Stop 98
caatcatccagctatcattccttat

SEQ ID NO: 302631 - DNA, 25 bp, Artificial
  probe
  misc_feature (1)..(25): SEQ ID NO: 1707; WAN024G5R; Start 189; Stop 213
aaagggattgacgagaatagatgtg

SEQ ID NO: 302632 - DNA, 25 bp, Artificial
  probe
  misc_feature (1)..(25): SEQ ID NO: 1707; WAN024G5R; Start 112; Stop 136
agacaaagaatcccacaaacaagat

SEQ ID NO: 302633 - DNA, 25 bp, Artificial
  probe
  misc_feature (1)..(25): SEQ ID NO: 1707; WAN024G5R; Start 92; Stop 116
tccttatgaaagaaatagccagaca

SEQ ID NO: 302634 - DNA, 25 bp, Artificial
  probe
  misc_feature (1)..(25): SEQ ID NO: 1707; WAN024G5R; Start 75; Stop 99
aatcatccagctatcattccttatg

SEQ ID NO: 302635 - DNA, 25 bp, Artificial
  probe
  misc_feature (1)..(25): SEQ ID NO: 1707; WAN024G5R; Start 101; Stop 125
aagaaatagccagacaaagaatccc

SEQ ID NO: 302636 - DNA, 25 bp, Artificial
  probe
  misc_feature (1)..(25): SEQ ID NO: 1707; WAN024G5R; Start 98; Stop 122
tgaaagaaatagccagacaaagaat

SEQ ID NO: 302637 - DNA, 25 bp, Artificial
  probe
  misc_feature (1)..(25): SEQ ID NO: 1707; WAN024G5R; Start 97; Stop 121
atgaaagaaatagccagacaaagaa

SEQ ID NO: 302638 - DNA, 25 bp, Artificial
  probe
  misc_feature (1)..(25): SEQ ID NO: 1707; WAN024G5R; Start 190; Stop 214
aagggattgacgagaatagatgtga

SEQ ID NO: 302639 - DNA, 25 bp, Artificial
  probe
  misc_feature (1)..(25): SEQ ID NO: 1707; WAN024G5R; Start 93; Stop 117
ccttatgaaagaaatagccagacaa

SEQ ID NO: 302640 - DNA, 25 bp, Artificial
  probe
  misc_feature (1)..(25): SEQ ID NO: 1707; WAN024G5R; Start 188; Stop 212
caaagggattgacgagaatagatgt

SEQ ID NO: 302641 - DNA, 25 bp, Artificial
  probe
  misc_feature (1)..(25): SEQ ID NO: 1707; WAN024G5R; Start 99; Stop 123
gaaagaaatagccagacaaagaatc

SEQ ID NO: 302642 - DNA, 25 bp, Artificial
  probe
  misc_feature (1)..(25): SEQ ID NO: 1707; WAN024G5R; Start 91; Stop 115
ttccttatgaaagaaatagccagac

SEQ ID NO: 302643 - DNA, 25 bp, Artificial
  probe
  misc_feature (1)..(25): SEQ ID NO: 1707; WAN024G5R; Start 111; Stop 135
cagacaaagaatcccacaaacaaga

SEQ ID NO: 302644 - DNA, 25 bp, Artificial
  probe
  misc_feature (1)..(25): SEQ ID NO: 1707; WAN024G5R; Start 187; Stop 211
ccaaagggattgacgagaatagatg

SEQ ID NO: 302645 - DNA, 25 bp, Artificial
  probe
  misc_feature (1)..(25): SEQ ID NO: 1707; WAN024G5R; Start 113; Stop 137
gacaaagaatcccacaaacaagatc

SEQ ID NO: 302646 - DNA, 25 bp, Artificial
  probe
  misc_feature (1)..(25): SEQ ID NO: 1707; WAN024G5R; Start 96; Stop 120
tatgaaagaaatagccagacaaaga

SEQ ID NO: 302647 - DNA, 25 bp, Artificial
  probe
  misc_feature (1)..(25): SEQ ID NO: 1707; WAN024G5R; Start 191; Stop 215
agggattgacgagaatagatgtgac

SEQ ID NO: 302648 - DNA, 25 bp, Artificial
  probe
  misc_feature (1)..(25): SEQ ID NO: 1707; WAN024G5R; Start 103; Stop 127
gaaatagccagacaaagaatcccac

SEQ ID NO: 302649 - DNA, 25 bp, Artificial
  probe
  misc_feature (1)..(25): SEQ ID NO: 1707; WAN024G5R; Start 102; Stop 126
agaaatagccagacaaagaatccca

SEQ ID NO: 302650 - DNA, 25 bp, Artificial
  probe
  misc_feature (1)..(25): SEQ ID NO: 1707; WAN024G5R; Start 90; Stop 114
attccttatgaaagaaatagccaga

SEQ ID NO: 302651 - DNA, 25 bp, Artificial
  probe
  misc_feature (1)..(25): SEQ ID NO: 1707; WAN024G5R; Start 89; Stop 113
cattccttatgaaagaaatagccag

SEQ ID NO: 302652 - DNA, 25 bp, Artificial
  probe
  misc_feature (1)..(25): SEQ ID NO: 1707; WAN024G5R; Start 110; Stop 134
ccagacaaagaatcccacaaacaag

SEQ ID NO: 302653 - DNA, 25 bp, Artificial
  probe
  misc_feature (1)..(25): SEQ ID NO: 1707; WAN024G5R; Start 106; Stop 130
atagccagacaaagaatcccacaaa

SEQ ID NO: 302654 - DNA, 25 bp, Artificial
  probe
  misc_feature (1)..(25): SEQ ID NO: 1707; WAN024G5R; Start 105; Stop 129
aatagccagacaaagaatcccacaa

SEQ ID NO: 302655 - DNA, 25 bp, Artificial
  probe
  misc_feature (1)..(25): SEQ ID NO: 1707; WAN024G5R; Start 104; Stop 128
aaatagccagacaaagaatcccaca

SEQ ID NO: 302656 - DNA, 25 bp, Artificial
  probe
  misc_feature (1)..(25): SEQ ID NO: 1707; WAN024G5R; Start 95; Stop 119
ttatgaaagaaatagccagacaaag

SEQ ID NO: 302657 - DNA, 25 bp, Artificial
  probe
  misc_feature (1)..(25): SEQ ID NO: 1707; WAN024G5R; Start 72; Stop 96
gccaatcatccagctatcattcctt

SEQ ID NO: 302658 - DNA, 25 bp, Artificial
  probe
  misc_feature (1)..(25): SEQ ID NO: 1708; WAN024CUI; Start 129; Stop 153
cattccaaccagagtattgatcatg

SEQ ID NO: 302659 - DNA, 25 bp, Artificial
  probe
  misc_feature (1)..(25): SEQ ID NO: 1708; WAN024CUI; Start 128; Stop 152
gcattccaaccagagtattgatcat

SEQ ID NO: 302660 - DNA, 25 bp, Artificial
  probe
  misc_feature (1)..(25): SEQ ID NO: 1708; WAN024CUI; Start 36; Stop 60
gatgagtttgagggctactggaaag

SEQ ID NO: 302661 - DNA, 25 bp, Artificial
  probe
  misc_feature (1)..(25): SEQ ID NO: 1708; WAN024CUI; Start 210; Stop 234
cacactcggggttaatttgacataa

SEQ ID NO: 302662 - DNA, 25 bp, Artificial
  probe
  misc_feature (1)..(25): SEQ ID NO: 1708; WAN024CUI; Start 130; Stop 154
attccaaccagagtattgatcatgg

SEQ ID NO: 302663 - DNA, 25 bp, Artificial
  probe
  misc_feature (1)..(25): SEQ ID NO: 1708; WAN024CUI; Start 37; Stop 61
atgagtttgagggctactggaaaga

SEQ ID NO: 302664 - DNA, 25 bp, Artificial
  probe
  misc_feature (1)..(25): SEQ ID NO: 1708; WAN024CUI; Start 209; Stop 233
tcacactcggggttaatttgacata

SEQ ID NO: 302665 - DNA, 25 bp, Artificial
  probe
  misc_feature (1)..(25): SEQ ID NO: 1708; WAN024CUI; Start 39; Stop 63
gagtttgagggctactggaaagact

SEQ ID NO: 302666 - DNA, 25 bp, Artificial
  probe
  misc_feature (1)..(25): SEQ ID NO: 1708; WAN024CUI; Start 127; Stop 151
cgcattccaaccagagtattgatca

SEQ ID NO: 302667 - DNA, 25 bp, Artificial
  probe
  misc_feature (1)..(25): SEQ ID NO: 1708; WAN024CUI; Start 40; Stop 64
agtttgagggctactggaaagactg

SEQ ID NO: 302668 - DNA, 25 bp, Artificial
  probe
  misc_feature (1)..(25): SEQ ID NO: 1708; WAN024CUI; Start 38; Stop 62
tgagtttgagggctactggaaagac

SEQ ID NO: 302669 - DNA, 25 bp, Artificial
  probe
  misc_feature (1)..(25): SEQ ID NO: 1708; WAN024CUI; Start 35; Stop 59
ggatgagtttgagggctactggaaa

SEQ ID NO: 302670 - DNA, 25 bp, Artificial
  probe
  misc_feature (1)..(25): SEQ ID NO: 1708; WAN024CUI; Start 141; Stop 165
agtattgatcatggtcaagccactt

SEQ ID NO: 302671 - DNA, 25 bp, Artificial
  probe
  misc_feature (1)..(25): SEQ ID NO: 1708; WAN024CUI; Start 1; Stop 25
atgataggcaggtctgttgtttggg

SEQ ID NO: 302672 - DNA, 25 bp, Artificial
  probe
  misc_feature (1)..(25): SEQ ID NO: 1708; WAN024CUI; Start 202; Stop 226
atatcggtcacactcggggttaatt

SEQ ID NO: 302673 - DNA, 25 bp, Artificial
  probe
  misc_feature (1)..(25): SEQ ID NO: 1708; WAN024CUI; Start 140; Stop 164
gagtattgatcatggtcaagccact

SEQ ID NO: 302674 - DNA, 25 bp, Artificial
  probe
  misc_feature (1)..(25): SEQ ID NO: 1708; WAN024CUI; Start 139; Stop 163
agagtattgatcatggtcaagccac

SEQ ID NO: 302675 - DNA, 25 bp, Artificial
  probe
  misc_feature (1)..(25): SEQ ID NO: 1708; WAN024CUI; Start 138; Stop 162
cagagtattgatcatggtcaagcca

SEQ ID NO: 302676 - DNA, 25 bp, Artificial
  probe
  misc_feature (1)..(25): SEQ ID NO: 1708; WAN024CUI; Start 203; Stop 227
tatcggtcacactcggggttaattt

SEQ ID NO: 302677 - DNA, 25 bp, Artificial
  probe
  misc_feature (1)..(25): SEQ ID NO: 1708; WAN024CUI; Start 142; Stop 166
gtattgatcatggtcaagccacttg

SEQ ID NO: 302678 - DNA, 25 bp, Artificial
  probe
  misc_feature (1)..(25): SEQ ID NO: 1708; WAN024CUI; Start 182; Stop 206
cagcttttgcgacagtaacgatatc

SEQ ID NO: 302679 - DNA, 25 bp, Artificial
  probe
  misc_feature (1)..(25): SEQ ID NO: 1708; WAN024CUI; Start 137; Stop 161
ccagagtattgatcatggtcaagcc

SEQ ID NO: 302680 - DNA, 25 bp, Artificial
  probe
  misc_feature (1)..(25): SEQ ID NO: 1708; WAN024CUI; Start 126; Stop 150
gcgcattccaaccagagtattgatc

SEQ ID NO: 302681 - DNA, 25 bp, Artificial
  probe
  misc_feature (1)..(25): SEQ ID NO: 1708; WAN024CUI; Start 135; Stop 159
aaccagagtattgatcatggtcaag

SEQ ID NO: 302682 - DNA, 25 bp, Artificial
  probe
  misc_feature (1)..(25): SEQ ID NO: 1708; WAN024CUI; Start 134; Stop 158
caaccagagtattgatcatggtcaa

SEQ ID NO: 302683 - DNA, 25 bp, Artificial
  probe
  misc_feature (1)..(25): SEQ ID NO: 1708; WAN024CUI; Start 125; Stop 149
agcgcattccaaccagagtattgat

SEQ ID NO: 302684 - DNA, 25 bp, Artificial
  probe
  misc_feature (1)..(25): SEQ ID NO: 1708; WAN024CUI; Start 131; Stop 155
ttccaaccagagtattgatcatggt

SEQ ID NO: 302685 - DNA, 25 bp, Artificial
  probe
  misc_feature (1)..(25): SEQ ID NO: 1708; WAN024CUI; Start 132; Stop 156
tccaaccagagtattgatcatggtc

SEQ ID NO: 302686 - DNA, 25 bp, Artificial
  probe
  misc_feature (1)..(25): SEQ ID NO: 1708; WAN024CUI; Start 124; Stop 148
aagcgcattccaaccagagtattga

SEQ ID NO: 302687 - DNA, 25 bp, Artificial
  probe
  misc_feature (1)..(25): SEQ ID NO: 1708; WAN024CUI; Start 143; Stop 167
tattgatcatggtcaagccacttgc

SEQ ID NO: 302688 - DNA, 25 bp, Artificial
  probe
  misc_feature (1)..(25): SEQ ID NO: 1708; WAN024CUI; Start 122; Stop 146
caaagcgcattccaaccagagtatt

SEQ ID NO: 302689 - DNA, 25 bp, Artificial
  probe
  misc_feature (1)..(25): SEQ ID NO: 1708; WAN024CUI; Start 201; Stop 225
gatatcggtcacactcggggttaat

SEQ ID NO: 302690 - DNA, 25 bp, Artificial
  probe
  misc_feature (1)..(25): SEQ ID NO: 1708; WAN024CUI; Start 133; Stop 157
ccaaccagagtattgatcatggtca

SEQ ID NO: 302691 - DNA, 25 bp, Artificial
  probe
  misc_feature (1)..(25): SEQ ID NO: 1709; WAN024CRZ; Start 619; Stop 643
ggttctactatcaatatggctggag

SEQ ID NO: 302692 - DNA, 25 bp, Artificial
  probe
  misc_feature (1)..(25): SEQ ID NO: 1709; WAN024CRZ; Start 616; Stop 640
ctcggttctactatcaatatggctg

SEQ ID NO: 302693 - DNA, 25 bp, Artificial
  probe
  misc_feature (1)..(25): SEQ ID NO: 1709; WAN024CRZ; Start 615; Stop 639
actcggttctactatcaatatggct

SEQ ID NO: 302694 - DNA, 25 bp, Artificial
  probe
  misc_feature (1)..(25): SEQ ID NO: 1709; WAN024CRZ; Start 614; Stop 638
cactcggttctactatcaatatggc

SEQ ID NO: 302695 - DNA, 25 bp, Artificial
  probe
  misc_feature (1)..(25): SEQ ID NO: 1709; WAN024CRZ; Start 894; Stop 918
ccttaactcttctacagatgtcctc

SEQ ID NO: 302696 - DNA, 25 bp, Artificial
  probe
  misc_feature (1)..(25): SEQ ID NO: 1709; WAN024CRZ; Start 620; Stop 644
gttctactatcaatatggctggagt

SEQ ID NO: 302697 - DNA, 25 bp, Artificial
  probe
  misc_feature (1)..(25): SEQ ID NO: 1709; WAN024CRZ; Start 895; Stop 919
cttaactcttctacagatgtcctct

SEQ ID NO: 302698 - DNA, 25 bp, Artificial
  probe
  misc_feature (1)..(25): SEQ ID NO: 1709; WAN024CRZ; Start 618; Stop 642
cggttctactatcaatatggctgga

SEQ ID NO: 302699 - DNA, 25 bp, Artificial
  probe
  misc_feature (1)..(25): SEQ ID NO: 1709; WAN024CRZ; Start 617; Stop 641
tcggttctactatcaatatggctgg

SEQ ID NO: 302700 - DNA, 25 bp, Artificial
  probe
  misc_feature (1)..(25): SEQ ID NO: 1709; WAN024CRZ; Start 896; Stop 920
ttaactcttctacagatgtcctctt

SEQ ID NO: 302701 - DNA, 25 bp, Artificial
  probe
  misc_feature (1)..(25): SEQ ID NO: 1709; WAN024CRZ; Start 613; Stop 637
ccactcggttctactatcaatatgg

SEQ ID NO: 302702 - DNA, 25 bp, Artificial
  probe
  misc_feature (1)..(25): SEQ ID NO: 1709; WAN024CRZ; Start 610; Stop 634
atcccactcggttctactatcaata

SEQ ID NO: 302703 - DNA, 25 bp, Artificial
  probe
  misc_feature (1)..(25): SEQ ID NO: 1709; WAN024CRZ; Start 609; Stop 633
tatcccactcggttctactatcaat

SEQ ID NO: 302704 - DNA, 25 bp, Artificial
  probe
  misc_feature (1)..(25): SEQ ID NO: 1709; WAN024CRZ; Start 605; Stop 629
tttctatcccactcggttctactat

SEQ ID NO: 302705 - DNA, 25 bp, Artificial
  probe
  misc_feature (1)..(25): SEQ ID NO: 1709; WAN024CRZ; Start 612; Stop 636
cccactcggttctactatcaatatg

SEQ ID NO: 302706 - DNA, 25 bp, Artificial
  probe
  misc_feature (1)..(25): SEQ ID NO: 1709; WAN024CRZ; Start 611; Stop 635
tcccactcggttctactatcaatat

SEQ ID NO: 302707 - DNA, 25 bp, Artificial
  probe
  misc_feature (1)..(25): SEQ ID NO: 1709; WAN024CRZ; Start 606; Stop 630
ttctatcccactcggttctactatc

SEQ ID NO: 302708 - DNA, 25 bp, Artificial
  probe
  misc_feature (1)..(25): SEQ ID NO: 1709; WAN024CRZ; Start 608; Stop 632
ctatcccactcggttctactatcaa

SEQ ID NO: 302709 - DNA, 25 bp, Artificial
  probe
  misc_feature (1)..(25): SEQ ID NO: 1709; WAN024CRZ; Start 594; Stop 618
tacctattctgtttctatcccactc

SEQ ID NO: 302710 - DNA, 25 bp, Artificial
  probe
  misc_feature (1)..(25): SEQ ID NO: 1709; WAN024CRZ; Start 604; Stop 628
gtttctatcccactcggttctacta

SEQ ID NO: 302711 - DNA, 25 bp, Artificial
  probe
  misc_feature (1)..(25): SEQ ID NO: 1709; WAN024CRZ; Start 813; Stop 837
cggtatttctaacgatattgccata

SEQ ID NO: 302712 - DNA, 25 bp, Artificial
  probe
  misc_feature (1)..(25): SEQ ID NO: 1709; WAN024CRZ; Start 598; Stop 622
tattctgtttctatcccactcggtt

SEQ ID NO: 302713 - DNA, 25 bp, Artificial
  probe
  misc_feature (1)..(25): SEQ ID NO: 1709; WAN024CRZ; Start 900; Stop 924
ctcttctacagatgtcctctttacc

SEQ ID NO: 302714 - DNA, 25 bp, Artificial
  probe
  misc_feature (1)..(25): SEQ ID NO: 1709; WAN024CRZ; Start 621; Stop 645
ttctactatcaatatggctggagta

SEQ ID NO: 302715 - DNA, 25 bp, Artificial
  probe
  misc_feature (1)..(25): SEQ ID NO: 1709; WAN024CRZ; Start 899; Stop 923
actcttctacagatgtcctctttac

SEQ ID NO: 302716 - DNA, 25 bp, Artificial
  probe
  misc_feature (1)..(25): SEQ ID NO: 1709; WAN024CRZ; Start 886; Stop 910
gaaacagcccttaactcttctacag

SEQ ID NO: 302717 - DNA, 25 bp, Artificial
  probe
  misc_feature (1)..(25): SEQ ID NO: 1709; WAN024CRZ; Start 607; Stop 631
tctatcccactcggttctactatca

SEQ ID NO: 302718 - DNA, 25 bp, Artificial
  probe
  misc_feature (1)..(25): SEQ ID NO: 1709; WAN024CRZ; Start 888; Stop 912
aacagcccttaactcttctacagat

SEQ ID NO: 302719 - DNA, 25 bp, Artificial
  probe
  misc_feature (1)..(25): SEQ ID NO: 1709; WAN024CRZ; Start 597; Stop 621
ctattctgtttctatcccactcggt

SEQ ID NO: 302720 - DNA, 25 bp, Artificial
  probe
  misc_feature (1)..(25): SEQ ID NO: 1709; WAN024CRZ; Start 595; Stop 619
acctattctgtttctatcccactcg

SEQ ID NO: 302721 - DNA, 25 bp, Artificial
  probe
  misc_feature (1)..(25): SEQ ID NO: 1709; WAN024CRZ; Start 593; Stop 617
atacctattctgtttctatcccact

SEQ ID NO: 302722 - DNA, 25 bp, Artificial
  probe
  misc_feature (1)..(25): SEQ ID NO: 1709; WAN024CRZ; Start 893; Stop 917
cccttaactcttctacagatgtcct

SEQ ID NO: 302723 - DNA, 25 bp, Artificial
  probe
  misc_feature (1)..(25): SEQ ID NO: 1709; WAN024CRZ; Start 884; Stop 908
gtgaaacagcccttaactcttctac

SEQ ID NO: 302724 - DNA, 25 bp, Artificial
  probe
  misc_feature (1)..(25): SEQ ID NO: 1710; WAN024FOT; Start 423; Stop 447
taatgttatcgcaggtcagaatgtt

SEQ ID NO: 302725 - DNA, 25 bp, Artificial
  probe
  misc_feature (1)..(25): SEQ ID NO: 1710; WAN024FOT; Start 422; Stop 446
ataatgttatcgcaggtcagaatgt

SEQ ID NO: 302726 - DNA, 25 bp, Artificial
  probe
  misc_feature (1)..(25): SEQ ID NO: 1710; WAN024FOT; Start 529; Stop 553
gtaggtgataattgttggattggtg

SEQ ID NO: 302727 - DNA, 25 bp, Artificial
  probe
  misc_feature (1)..(25): SEQ ID NO: 1710; WAN024FOT; Start 528; Stop 552
agtaggtgataattgttggattggt

SEQ ID NO: 302728 - DNA, 25 bp, Artificial
  probe
  misc_feature (1)..(25): SEQ ID NO: 1710; WAN024FOT; Start 527; Stop 551
cagtaggtgataattgttggattgg

SEQ ID NO: 302729 - DNA, 25 bp, Artificial
  probe
  misc_feature (1)..(25): SEQ ID NO: 1710; WAN024FOT; Start 530; Stop 554
taggtgataattgttggattggtgc

SEQ ID NO: 302730 - DNA, 25 bp, Artificial
  probe
  misc_feature (1)..(25): SEQ ID NO: 1710; WAN024FOT; Start 424; Stop 448
aatgttatcgcaggtcagaatgttc

SEQ ID NO: 302731 - DNA, 25 bp, Artificial
  probe
  misc_feature (1)..(25): SEQ ID NO: 1710; WAN024FOT; Start 535; Stop 559
gataattgttggattggtgctggat

SEQ ID NO: 302732 - DNA, 25 bp, Artificial
  probe
  misc_feature (1)..(25): SEQ ID NO: 1710; WAN024FOT; Start 526; Stop 550
tcagtaggtgataattgttggattg

SEQ ID NO: 302733 - DNA, 25 bp, Artificial
  probe
  misc_feature (1)..(25): SEQ ID NO: 1710; WAN024FOT; Start 536; Stop 560
ataattgttggattggtgctggatc

SEQ ID NO: 302734 - DNA, 25 bp, Artificial
  probe
  misc_feature (1)..(25): SEQ ID NO: 1710; WAN024FOT; Start 525; Stop 549
ttcagtaggtgataattgttggatt

SEQ ID NO: 302735 - DNA, 25 bp, Artificial
  probe
  misc_feature (1)..(25): SEQ ID NO: 1710; WAN024FOT; Start 421; Stop 445
gataatgttatcgcaggtcagaatg

SEQ ID NO: 302736 - DNA, 25 bp, Artificial
  probe
  misc_feature (1)..(25): SEQ ID NO: 1710; WAN024FOT; Start 420; Stop 444
tgataatgttatcgcaggtcagaat

SEQ ID NO: 302737 - DNA, 25 bp, Artificial
  probe
  misc_feature (1)..(25): SEQ ID NO: 1710; WAN024FOT; Start 414; Stop 438
aattggtgataatgttatcgcaggt

SEQ ID NO: 302738 - DNA, 25 bp, Artificial
  probe
  misc_feature (1)..(25): SEQ ID NO: 1710; WAN024FOT; Start 419; Stop 443
gtgataatgttatcgcaggtcagaa

SEQ ID NO: 302739 - DNA, 25 bp, Artificial
  probe
  misc_feature (1)..(25): SEQ ID NO: 1710; WAN024FOT; Start 415; Stop 439
attggtgataatgttatcgcaggtc

SEQ ID NO: 302740 - DNA, 25 bp, Artificial
  probe
  misc_feature (1)..(25): SEQ ID NO: 1710; WAN024FOT; Start 533; Stop 557
gtgataattgttggattggtgctgg

SEQ ID NO: 302741 - DNA, 25 bp, Artificial
  probe
  misc_feature (1)..(25): SEQ ID NO: 1710; WAN024FOT; Start 532; Stop 556
ggtgataattgttggattggtgctg

SEQ ID NO: 302742 - DNA, 25 bp, Artificial
  probe
  misc_feature (1)..(25): SEQ ID NO: 1710; WAN024FOT; Start 534; Stop 558
tgataattgttggattggtgctgga

SEQ ID NO: 302743 - DNA, 25 bp, Artificial
  probe
  misc_feature (1)..(25): SEQ ID NO: 1710; WAN024FOT; Start 531; Stop 555
aggtgataattgttggattggtgct

SEQ ID NO: 302744 - DNA, 25 bp, Artificial
  probe
  misc_feature (1)..(25): SEQ ID NO: 1710; WAN024FOT; Start 157; Stop 181
cgtttattcattggacaaggagttt

SEQ ID NO: 302745 - DNA, 25 bp, Artificial
  probe
  misc_feature (1)..(25): SEQ ID NO: 1710; WAN024FOT; Start 163; Stop 187
ttcattggacaaggagtttctatct

SEQ ID NO: 302746 - DNA, 25 bp, Artificial
  probe
  misc_feature (1)..(25): SEQ ID NO: 1710; WAN024FOT; Start 387; Stop 411
tttatttggttctgctggaggtatc

SEQ ID NO: 302747 - DNA, 25 bp, Artificial
  probe
  misc_feature (1)..(25): SEQ ID NO: 1710; WAN024FOT; Start 383; Stop 407
atagtttatttggttctgctggagg

SEQ ID NO: 302748 - DNA, 25 bp, Artificial
  probe
  misc_feature (1)..(25): SEQ ID NO: 1710; WAN024FOT; Start 537; Stop 561
taattgttggattggtgctggatct

SEQ ID NO: 302749 - DNA, 25 bp, Artificial
  probe
  misc_feature (1)..(25): SEQ ID NO: 1710; WAN024FOT; Start 172; Stop 196
caaggagtttctatcttagcaaagc

SEQ ID NO: 302750 - DNA, 25 bp, Artificial
  probe
  misc_feature (1)..(25): SEQ ID NO: 1710; WAN024FOT; Start 169; Stop 193
ggacaaggagtttctatcttagcaa

SEQ ID NO: 302751 - DNA, 25 bp, Artificial
  probe
  misc_feature (1)..(25): SEQ ID NO: 1710; WAN024FOT; Start 386; Stop 410
gtttatttggttctgctggaggtat

SEQ ID NO: 302752 - DNA, 25 bp, Artificial
  probe
  misc_feature (1)..(25): SEQ ID NO: 1710; WAN024FOT; Start 167; Stop 191
ttggacaaggagtttctatcttagc

SEQ ID NO: 302753 - DNA, 25 bp, Artificial
  probe
  misc_feature (1)..(25): SEQ ID NO: 1710; WAN024FOT; Start 164; Stop 188
tcattggacaaggagtttctatctt

SEQ ID NO: 302754 - DNA, 25 bp, Artificial
  probe
  misc_feature (1)..(25): SEQ ID NO: 1710; WAN024FOT; Start 175; Stop 199
ggagtttctatcttagcaaagcgta

SEQ ID NO: 302755 - DNA, 25 bp, Artificial
  probe
  misc_feature (1)..(25): SEQ ID NO: 1710; WAN024FOT; Start 176; Stop 200
gagtttctatcttagcaaagcgtaa

SEQ ID NO: 302756 - DNA, 25 bp, Artificial
  probe
  misc_feature (1)..(25): SEQ ID NO: 1710; WAN024FOT; Start 162; Stop 186
attcattggacaaggagtttctatc

SEQ ID NO: 302757 - DNA, 25 bp, Artificial
  probe
  misc_feature (1)..(25): SEQ ID NO: 1711; WAN024CX3; Start 670; Stop 694
gatgcttatgttgttgatgatggtt

SEQ ID NO: 302758 - DNA, 25 bp, Artificial
  probe
  misc_feature (1)..(25): SEQ ID NO: 1711; WAN024CX3; Start 674; Stop 698
cttatgttgttgatgatggttggac

SEQ ID NO: 302759 - DNA, 25 bp, Artificial
  probe
  misc_feature (1)..(25): SEQ ID NO: 1711; WAN024CX3; Start 671; Stop 695
atgcttatgttgttgatgatggttg

SEQ ID NO: 302760 - DNA, 25 bp, Artificial
  probe
  misc_feature (1)..(25): SEQ ID NO: 1711; WAN024CX3; Start 388; Stop 412
aacaaggtagatggtagacactatg

SEQ ID NO: 302761 - DNA, 25 bp, Artificial
  probe
  misc_feature (1)..(25): SEQ ID NO: 1711; WAN024CX3; Start 669; Stop 693
agatgcttatgttgttgatgatggt

SEQ ID NO: 302762 - DNA, 25 bp, Artificial
  probe
  misc_feature (1)..(25): SEQ ID NO: 1711; WAN024CX3; Start 668; Stop 692
tagatgcttatgttgttgatgatgg

SEQ ID NO: 302763 - DNA, 25 bp, Artificial
  probe
  misc_feature (1)..(25): SEQ ID NO: 1711; WAN024CX3; Start 834; Stop 858
cattatgagtgattggttagaagca

SEQ ID NO: 302764 - DNA, 25 bp, Artificial
  probe
  misc_feature (1)..(25): SEQ ID NO: 1711; WAN024CX3; Start 1727; Stop 1751
aagaagatgagatagaattggcacc

SEQ ID NO: 302765 - DNA, 25 bp, Artificial
  probe
  misc_feature (1)..(25): SEQ ID NO: 1711; WAN024CX3; Start 587; Stop 611
atatgaccgatattacagaggaagg

SEQ ID NO: 302766 - DNA, 25 bp, Artificial
  probe
  misc_feature (1)..(25): SEQ ID NO: 1711; WAN024CX3; Start 1726; Stop 1750
caagaagatgagatagaattggcac

SEQ ID NO: 302767 - DNA, 25 bp, Artificial
  probe
  misc_feature (1)..(25): SEQ ID NO: 1711; WAN024CX3; Start 1725; Stop 1749
tcaagaagatgagatagaattggca

SEQ ID NO: 302768 - DNA, 25 bp, Artificial
  probe
  misc_feature (1)..(25): SEQ ID NO: 1711; WAN024CX3; Start 1730; Stop 1754
aagatgagatagaattggcaccgta

SEQ ID NO: 302769 - DNA, 25 bp, Artificial
  probe
  misc_feature (1)..(25): SEQ ID NO: 1711; WAN024CX3; Start 673; Stop 697
gcttatgttgttgatgatggttgga

SEQ ID NO: 302770 - DNA, 25 bp, Artificial
  probe
  misc_feature (1)..(25): SEQ ID NO: 1711; WAN024CX3; Start 389; Stop 413
acaaggtagatggtagacactatgt

SEQ ID NO: 302771 - DNA, 25 bp, Artificial
  probe
  misc_feature (1)..(25): SEQ ID NO: 1711; WAN024CX3; Start 1751; Stop 1775
cgtactctatcgtgatactgaagaa

SEQ ID NO: 302772 - DNA, 25 bp, Artificial
  probe
  misc_feature (1)..(25): SEQ ID NO: 1711; WAN024CX3; Start 1724; Stop 1748
ttcaagaagatgagatagaattggc

SEQ ID NO: 302773 - DNA, 25 bp, Artificial
  probe
  misc_feature (1)..(25): SEQ ID NO: 1711; WAN024CX3; Start 672; Stop 696
tgcttatgttgttgatgatggttgg

SEQ ID NO: 302774 - DNA, 25 bp, Artificial
  probe
  misc_feature (1)..(25): SEQ ID NO: 1711; WAN024CX3; Start 675; Stop 699
ttatgttgttgatgatggttggaca

SEQ ID NO: 302775 - DNA, 25 bp, Artificial
  probe
  misc_feature (1)..(25): SEQ ID NO: 1711; WAN024CX3; Start 1749; Stop 1773
accgtactctatcgtgatactgaag

SEQ ID NO: 302776 - DNA, 25 bp, Artificial
  probe
  misc_feature (1)..(25): SEQ ID NO: 1711; WAN024CX3; Start 1750; Stop 1774
ccgtactctatcgtgatactgaaga

SEQ ID NO: 302777 - DNA, 25 bp, Artificial
  probe
  misc_feature (1)..(25): SEQ ID NO: 1711; WAN024CX3; Start 390; Stop 414
caaggtagatggtagacactatgta

SEQ ID NO: 302778 - DNA, 25 bp, Artificial
  probe
  misc_feature (1)..(25): SEQ ID NO: 1711; WAN024CX3; Start 837; Stop 861
tatgagtgattggttagaagcacat

SEQ ID NO: 302779 - DNA, 25 bp, Artificial
  probe
  misc_feature (1)..(25): SEQ ID NO: 1711; WAN024CX3; Start 836; Stop 860
ttatgagtgattggttagaagcaca

SEQ ID NO: 302780 - DNA, 25 bp, Artificial
  probe
  misc_feature (1)..(25): SEQ ID NO: 1711; WAN024CX3; Start 393; Stop 417
ggtagatggtagacactatgtatca

SEQ ID NO: 302781 - DNA, 25 bp, Artificial
  probe
  misc_feature (1)..(25): SEQ ID NO: 1711; WAN024CX3; Start 833; Stop 857
tcattatgagtgattggttagaagc

SEQ ID NO: 302782 - DNA, 25 bp, Artificial
  probe
  misc_feature (1)..(25): SEQ ID NO: 1711; WAN024CX3; Start 667; Stop 691
ttagatgcttatgttgttgatgatg

SEQ ID NO: 302783 - DNA, 25 bp, Artificial
  probe
  misc_feature (1)..(25): SEQ ID NO: 1711; WAN024CX3; Start 1590; Stop 1614
tggttataagtgtcacaatcagaag

SEQ ID NO: 302784 - DNA, 25 bp, Artificial
  probe
  misc_feature (1)..(25): SEQ ID NO: 1711; WAN024CX3; Start 835; Stop 859
attatgagtgattggttagaagcac

SEQ ID NO: 302785 - DNA, 25 bp, Artificial
  probe
  misc_feature (1)..(25): SEQ ID NO: 1711; WAN024CX3; Start 1591; Stop 1615
ggttataagtgtcacaatcagaaga

SEQ ID NO: 302786 - DNA, 25 bp, Artificial
  probe
  misc_feature (1)..(25): SEQ ID NO: 1711; WAN024CX3; Start 392; Stop 416
aggtagatggtagacactatgtatc

SEQ ID NO: 302787 - DNA, 25 bp, Artificial
  probe
  misc_feature (1)..(25): SEQ ID NO: 1711; WAN024CX3; Start 838; Stop 862
atgagtgattggttagaagcacatc

SEQ ID NO: 302788 - DNA, 25 bp, Artificial
  probe
  misc_feature (1)..(25): SEQ ID NO: 1711; WAN024CX3; Start 396; Stop 420
agatggtagacactatgtatcaaga

SEQ ID NO: 302789 - DNA, 25 bp, Artificial
  probe
  misc_feature (1)..(25): SEQ ID NO: 1711; WAN024CX3; Start 1728; Stop 1752
agaagatgagatagaattggcaccg

SEQ ID NO: 302790 - DNA, 25 bp, Artificial
  probe
  misc_feature (1)..(25): SEQ ID NO: 1712; WAN024ASD; Start 88; Stop 112
cgacaagacggttaagattaagaga

SEQ ID NO: 302791 - DNA, 25 bp, Artificial
  probe
  misc_feature (1)..(25): SEQ ID NO: 1712; WAN024ASD; Start 86; Stop 110
tacgacaagacggttaagattaaga

SEQ ID NO: 302792 - DNA, 25 bp, Artificial
  probe
  misc_feature (1)..(25): SEQ ID NO: 1712; WAN024ASD; Start 87; Stop 111
acgacaagacggttaagattaagag

SEQ ID NO: 302793 - DNA, 25 bp, Artificial
  probe
  misc_feature (1)..(25): SEQ ID NO: 1712; WAN024ASD; Start 91; Stop 115
caagacggttaagattaagagaacg

SEQ ID NO: 302794 - DNA, 25 bp, Artificial
  probe
  misc_feature (1)..(25): SEQ ID NO: 1712; WAN024ASD; Start 89; Stop 113
gacaagacggttaagattaagagaa

SEQ ID NO: 302795 - DNA, 25 bp, Artificial
  probe
  misc_feature (1)..(25): SEQ ID NO: 1712; WAN024ASD; Start 85; Stop 109
gtacgacaagacggttaagattaag

SEQ ID NO: 302796 - DNA, 25 bp, Artificial
  probe
  misc_feature (1)..(25): SEQ ID NO: 1712; WAN024ASD; Start 90; Stop 114
acaagacggttaagattaagagaac

SEQ ID NO: 302797 - DNA, 25 bp, Artificial
  probe
  misc_feature (1)..(25): SEQ ID NO: 1712; WAN024ASD; Start 190; Stop 214
taatacgccactactagacaagcaa

SEQ ID NO: 302798 - DNA, 25 bp, Artificial
  probe
  misc_feature (1)..(25): SEQ ID NO: 1712; WAN024ASD; Start 189; Stop 213
ttaatacgccactactagacaagca

SEQ ID NO: 302799 - DNA, 25 bp, Artificial
  probe
  misc_feature (1)..(25): SEQ ID NO: 1712; WAN024ASD; Start 84; Stop 108
tgtacgacaagacggttaagattaa

SEQ ID NO: 302800 - DNA, 25 bp, Artificial
  probe
  misc_feature (1)..(25): SEQ ID NO: 1712; WAN024ASD; Start 83; Stop 107
ctgtacgacaagacggttaagatta

SEQ ID NO: 302801 - DNA, 25 bp, Artificial
  probe
  misc_feature (1)..(25): SEQ ID NO: 1712; WAN024ASD; Start 180; Stop 204
acttctcatttaatacgccactact

SEQ ID NO: 302802 - DNA, 25 bp, Artificial
  probe
  misc_feature (1)..(25): SEQ ID NO: 1712; WAN024ASD; Start 179; Stop 203
cacttctcatttaatacgccactac

SEQ ID NO: 302803 - DNA, 25 bp, Artificial
  probe
  misc_feature (1)..(25): SEQ ID NO: 1712; WAN024ASD; Start 178; Stop 202
tcacttctcatttaatacgccacta

SEQ ID NO: 302804 - DNA, 25 bp, Artificial
  probe
  misc_feature (1)..(25): SEQ ID NO: 1712; WAN024ASD; Start 289; Stop 313
cgaccacagacctatttcttagtta

SEQ ID NO: 302805 - DNA, 25 bp, Artificial
  probe
  misc_feature (1)..(25): SEQ ID NO: 1712; WAN024ASD; Start 175; Stop 199
atgtcacttctcatttaatacgcca

SEQ ID NO: 302806 - DNA, 25 bp, Artificial
  probe
  misc_feature (1)..(25): SEQ ID NO: 1712; WAN024ASD; Start 177; Stop 201
gtcacttctcatttaatacgccact

SEQ ID NO: 302807 - DNA, 25 bp, Artificial
  probe
  misc_feature (1)..(25): SEQ ID NO: 1712; WAN024ASD; Start 188; Stop 212
tttaatacgccactactagacaagc

SEQ ID NO: 302808 - DNA, 25 bp, Artificial
  probe
  misc_feature (1)..(25): SEQ ID NO: 1712; WAN024ASD; Start 185; Stop 209
tcatttaatacgccactactagaca

SEQ ID NO: 302809 - DNA, 25 bp, Artificial
  probe
  misc_feature (1)..(25): SEQ ID NO: 1712; WAN024ASD; Start 176; Stop 200
tgtcacttctcatttaatacgccac

SEQ ID NO: 302810 - DNA, 25 bp, Artificial
  probe
  misc_feature (1)..(25): SEQ ID NO: 1712; WAN024ASD; Start 242; Stop 266
tcaattaacagtcacttacaatcaa

SEQ ID NO: 302811 - DNA, 25 bp, Artificial
  probe
  misc_feature (1)..(25): SEQ ID NO: 1712; WAN024ASD; Start 241; Stop 265
ttcaattaacagtcacttacaatca

SEQ ID NO: 302812 - DNA, 25 bp, Artificial
  probe
  misc_feature (1)..(25): SEQ ID NO: 1712; WAN024ASD; Start 184; Stop 208
ctcatttaatacgccactactagac

SEQ ID NO: 302813 - DNA, 25 bp, Artificial
  probe
  misc_feature (1)..(25): SEQ ID NO: 1712; WAN024ASD; Start 181; Stop 205
cttctcatttaatacgccactacta

SEQ ID NO: 302814 - DNA, 25 bp, Artificial
  probe
  misc_feature (1)..(25): SEQ ID NO: 1712; WAN024ASD; Start 186; Stop 210
catttaatacgccactactagacaa

SEQ ID NO: 302815 - DNA, 25 bp, Artificial
  probe
  misc_feature (1)..(25): SEQ ID NO: 1712; WAN024ASD; Start 187; Stop 211
atttaatacgccactactagacaag

SEQ ID NO: 302816 - DNA, 25 bp, Artificial
  probe
  misc_feature (1)..(25): SEQ ID NO: 1712; WAN024ASD; Start 183; Stop 207
tctcatttaatacgccactactaga

SEQ ID NO: 302817 - DNA, 25 bp, Artificial
  probe
  misc_feature (1)..(25): SEQ ID NO: 1712; WAN024ASD; Start 174; Stop 198
catgtcacttctcatttaatacgcc

SEQ ID NO: 302818 - DNA, 25 bp, Artificial
  probe
  misc_feature (1)..(25): SEQ ID NO: 1712; WAN024ASD; Start 182; Stop 206
ttctcatttaatacgccactactag

SEQ ID NO: 302819 - DNA, 25 bp, Artificial
  probe
  misc_feature (1)..(25): SEQ ID NO: 1712; WAN024ASD; Start 240; Stop 264
cttcaattaacagtcacttacaatc

SEQ ID NO: 302820 - DNA, 25 bp, Artificial
  probe
  misc_feature (1)..(25): SEQ ID NO: 1712; WAN024ASD; Start 290; Stop 314
gaccacagacctatttcttagttat

SEQ ID NO: 302821 - DNA, 25 bp, Artificial
  probe
  misc_feature (1)..(25): SEQ ID NO: 1712; WAN024ASD; Start 191; Stop 215
aatacgccactactagacaagcaaa

SEQ ID NO: 302822 - DNA, 25 bp, Artificial
  probe
  misc_feature (1)..(25): SEQ ID NO: 1712; WAN024ASD; Start 286; Stop 310
aagcgaccacagacctatttcttag

SEQ ID NO: 302823 - DNA, 25 bp, Artificial
  probe
  misc_feature (1)..(25): SEQ ID NO: 1713; WAN024EWB; Start 50; Stop 74
agccaatcttatctgacatagactg

SEQ ID NO: 302824 - DNA, 25 bp, Artificial
  probe
  misc_feature (1)..(25): SEQ ID NO: 1713; WAN024EWB; Start 49; Stop 73
aagccaatcttatctgacatagact

SEQ ID NO: 302825 - DNA, 25 bp, Artificial
  probe
  misc_feature (1)..(25): SEQ ID NO: 1713; WAN024EWB; Start 69; Stop 93
agactgtcaccttactaattccata

SEQ ID NO: 302826 - DNA, 25 bp, Artificial
  probe
  misc_feature (1)..(25): SEQ ID NO: 1713; WAN024EWB; Start 68; Stop 92
tagactgtcaccttactaattccat

SEQ ID NO: 302827 - DNA, 25 bp, Artificial
  probe
  misc_feature (1)..(25): SEQ ID NO: 1713; WAN024EWB; Start 67; Stop 91
atagactgtcaccttactaattcca

SEQ ID NO: 302828 - DNA, 25 bp, Artificial
  probe
  misc_feature (1)..(25): SEQ ID NO: 1713; WAN024EWB; Start 66; Stop 90
catagactgtcaccttactaattcc

SEQ ID NO: 302829 - DNA, 25 bp, Artificial
  probe
  misc_feature (1)..(25): SEQ ID NO: 1713; WAN024EWB; Start 160; Stop 184
gcacacaaccataacatcttcagaa

SEQ ID NO: 302830 - DNA, 25 bp, Artificial
  probe
  misc_feature (1)..(25): SEQ ID NO: 1713; WAN024EWB; Start 51; Stop 75
gccaatcttatctgacatagactgt

SEQ ID NO: 302831 - DNA, 25 bp, Artificial
  probe
  misc_feature (1)..(25): SEQ ID NO: 1713; WAN024EWB; Start 70; Stop 94
gactgtcaccttactaattccataa

SEQ ID NO: 302832 - DNA, 25 bp, Artificial
  probe
  misc_feature (1)..(25): SEQ ID NO: 1713; WAN024EWB; Start 34; Stop 58
aatgagcctgtgaataagccaatct

SEQ ID NO: 302833 - DNA, 25 bp, Artificial
  probe
  misc_feature (1)..(25): SEQ ID NO: 1713; WAN024EWB; Start 35; Stop 59
atgagcctgtgaataagccaatctt

SEQ ID NO: 302834 - DNA, 25 bp, Artificial
  probe
  misc_feature (1)..(25): SEQ ID NO: 1713; WAN024EWB; Start 161; Stop 185
cacacaaccataacatcttcagaaa

SEQ ID NO: 302835 - DNA, 25 bp, Artificial
  probe
  misc_feature (1)..(25): SEQ ID NO: 1713; WAN024EWB; Start 48; Stop 72
taagccaatcttatctgacatagac

SEQ ID NO: 302836 - DNA, 25 bp, Artificial
  probe
  misc_feature (1)..(25): SEQ ID NO: 1713; WAN024EWB; Start 36; Stop 60
tgagcctgtgaataagccaatctta

SEQ ID NO: 302837 - DNA, 25 bp, Artificial
  probe
  misc_feature (1)..(25): SEQ ID NO: 1713; WAN024EWB; Start 211; Stop 235
aatatctgctacgatttgttccttg

SEQ ID NO: 302838 - DNA, 25 bp, Artificial
  probe
  misc_feature (1)..(25): SEQ ID NO: 1713; WAN024EWB; Start 65; Stop 89
acatagactgtcaccttactaattc

SEQ ID NO: 302839 - DNA, 25 bp, Artificial
  probe
  misc_feature (1)..(25): SEQ ID NO: 1713; WAN024EWB; Start 212; Stop 236
atatctgctacgatttgttccttgg

SEQ ID NO: 302840 - DNA, 25 bp, Artificial
  probe
  misc_feature (1)..(25): SEQ ID NO: 1713; WAN024EWB; Start 209; Stop 233
tcaatatctgctacgatttgttcct

SEQ ID NO: 302841 - DNA, 25 bp, Artificial
  probe
  misc_feature (1)..(25): SEQ ID NO: 1713; WAN024EWB; Start 210; Stop 234
caatatctgctacgatttgttcctt

SEQ ID NO: 302842 - DNA, 25 bp, Artificial
  probe
  misc_feature (1)..(25): SEQ ID NO: 1713; WAN024EWB; Start 208; Stop 232
ttcaatatctgctacgatttgttcc

SEQ ID NO: 302843 - DNA, 25 bp, Artificial
  probe
  misc_feature (1)..(25): SEQ ID NO: 1713; WAN024EWB; Start 156; Stop 180
tctcgcacacaaccataacatcttc

SEQ ID NO: 302844 - DNA, 25 bp, Artificial
  probe
  misc_feature (1)..(25): SEQ ID NO: 1713; WAN024EWB; Start 33; Stop 57
aaatgagcctgtgaataagccaatc

SEQ ID NO: 302845 - DNA, 25 bp, Artificial
  probe
  misc_feature (1)..(25): SEQ ID NO: 1713; WAN024EWB; Start 32; Stop 56
caaatgagcctgtgaataagccaat

SEQ ID NO: 302846 - DNA, 25 bp, Artificial
  probe
  misc_feature (1)..(25): SEQ ID NO: 1713; WAN024EWB; Start 158; Stop 182
tcgcacacaaccataacatcttcag

SEQ ID NO: 302847 - DNA, 25 bp, Artificial
  probe
  misc_feature (1)..(25): SEQ ID NO: 1713; WAN024EWB; Start 157; Stop 181
ctcgcacacaaccataacatcttca

SEQ ID NO: 302848 - DNA, 25 bp, Artificial
  probe
  misc_feature (1)..(25): SEQ ID NO: 1713; WAN024EWB; Start 155; Stop 179
gtctcgcacacaaccataacatctt

SEQ ID NO: 302849 - DNA, 25 bp, Artificial
  probe
  misc_feature (1)..(25): SEQ ID NO: 1713; WAN024EWB; Start 159; Stop 183
cgcacacaaccataacatcttcaga

SEQ ID NO: 302850 - DNA, 25 bp, Artificial
  probe
  misc_feature (1)..(25): SEQ ID NO: 1713; WAN024EWB; Start 207; Stop 231
tttcaatatctgctacgatttgttc

SEQ ID NO: 302851 - DNA, 25 bp, Artificial
  probe
  misc_feature (1)..(25): SEQ ID NO: 1713; WAN024EWB; Start 71; Stop 95
actgtcaccttactaattccataaa

SEQ ID NO: 302852 - DNA, 25 bp, Artificial
  probe
  misc_feature (1)..(25): SEQ ID NO: 1713; WAN024EWB; Start 40; Stop 64
cctgtgaataagccaatcttatctg

SEQ ID NO: 302853 - DNA, 25 bp, Artificial
  probe
  misc_feature (1)..(25): SEQ ID NO: 1713; WAN024EWB; Start 27; Stop 51
cggatcaaatgagcctgtgaataag

SEQ ID NO: 302854 - DNA, 25 bp, Artificial
  probe
  misc_feature (1)..(25): SEQ ID NO: 1713; WAN024EWB; Start 39; Stop 63
gcctgtgaataagccaatcttatct

SEQ ID NO: 302855 - DNA, 25 bp, Artificial
  probe
  misc_feature (1)..(25): SEQ ID NO: 1713; WAN024EWB; Start 38; Stop 62
agcctgtgaataagccaatcttatc

SEQ ID NO: 302856 - DNA, 25 bp, Artificial
  probe
  misc_feature (1)..(25): SEQ ID NO: 1714; WAN024EWG; Start 33; Stop 57
gatgatagcacgaccaatagttgtt

SEQ ID NO: 302857 - DNA, 25 bp, Artificial
  probe
  misc_feature (1)..(25): SEQ ID NO: 1714; WAN024EWG; Start 27; Stop 51
tagaccgatgatagcacgaccaata

SEQ ID NO: 302858 - DNA, 25 bp, Artificial
  probe
  misc_feature (1)..(25): SEQ ID NO: 1714; WAN024EWG; Start 96; Stop 120
tcccttgttgataaagaagttagca

SEQ ID NO: 302859 - DNA, 25 bp, Artificial
  probe
  misc_feature (1)..(25): SEQ ID NO: 1714; WAN024EWG; Start 95; Stop 119
ctcccttgttgataaagaagttagc

SEQ ID NO: 302860 - DNA, 25 bp, Artificial
  probe
  misc_feature (1)..(25): SEQ ID NO: 1714; WAN024EWG; Start 97; Stop 121
cccttgttgataaagaagttagcat

SEQ ID NO: 302861 - DNA, 25 bp, Artificial
  probe
  misc_feature (1)..(25): SEQ ID NO: 1714; WAN024EWG; Start 134; Stop 158
caaacttcttacttccttcaccgaa

SEQ ID NO: 302862 - DNA, 25 bp, Artificial
  probe
  misc_feature (1)..(25): SEQ ID NO: 1714; WAN024EWG; Start 10; Stop 34
ccattacttgtatcatttagaccga

SEQ ID NO: 302863 - DNA, 25 bp, Artificial
  probe
  misc_feature (1)..(25): SEQ ID NO: 1714; WAN024EWG; Start 9; Stop 33
tccattacttgtatcatttagaccg

SEQ ID NO: 302864 - DNA, 25 bp, Artificial
  probe
  misc_feature (1)..(25): SEQ ID NO: 1714; WAN024EWG; Start 34; Stop 58
atgatagcacgaccaatagttgttt

SEQ ID NO: 302865 - DNA, 25 bp, Artificial
  probe
  misc_feature (1)..(25): SEQ ID NO: 1714; WAN024EWG; Start 191; Stop 215
tttcagacatttccttcctcctagt

SEQ ID NO: 302866 - DNA, 25 bp, Artificial
  probe
  misc_feature (1)..(25): SEQ ID NO: 1714; WAN024EWG; Start 32; Stop 56
cgatgatagcacgaccaatagttgt

SEQ ID NO: 302867 - DNA, 25 bp, Artificial
  probe
  misc_feature (1)..(25): SEQ ID NO: 1714; WAN024EWG; Start 132; Stop 156
gacaaacttcttacttccttcaccg

SEQ ID NO: 302868 - DNA, 25 bp, Artificial
  probe
  misc_feature (1)..(25): SEQ ID NO: 1714; WAN024EWG; Start 131; Stop 155
cgacaaacttcttacttccttcacc

SEQ ID NO: 302869 - DNA, 25 bp, Artificial
  probe
  misc_feature (1)..(25): SEQ ID NO: 1714; WAN024EWG; Start 88; Stop 112
aaagtttctcccttgttgataaaga

SEQ ID NO: 302870 - DNA, 25 bp, Artificial
  probe
  misc_feature (1)..(25): SEQ ID NO: 1714; WAN024EWG; Start 133; Stop 157
acaaacttcttacttccttcaccga

SEQ ID NO: 302871 - DNA, 25 bp, Artificial
  probe
  misc_feature (1)..(25): SEQ ID NO: 1714; WAN024EWG; Start 94; Stop 118
tctcccttgttgataaagaagttag

SEQ ID NO: 302872 - DNA, 25 bp, Artificial
  probe
  misc_feature (1)..(25): SEQ ID NO: 1714; WAN024EWG; Start 26; Stop 50
ttagaccgatgatagcacgaccaat

SEQ ID NO: 302873 - DNA, 25 bp, Artificial
  probe
  misc_feature (1)..(25): SEQ ID NO: 1714; WAN024EWG; Start 130; Stop 154
gcgacaaacttcttacttccttcac

SEQ ID NO: 302874 - DNA, 25 bp, Artificial
  probe
  misc_feature (1)..(25): SEQ ID NO: 1714; WAN024EWG; Start 87; Stop 111
gaaagtttctcccttgttgataaag

SEQ ID NO: 302875 - DNA, 25 bp, Artificial
  probe
  misc_feature (1)..(25): SEQ ID NO: 1714; WAN024EWG; Start 98; Stop 122
ccttgttgataaagaagttagcatt

SEQ ID NO: 302876 - DNA, 25 bp, Artificial
  probe
  misc_feature (1)..(25): SEQ ID NO: 1714; WAN024EWG; Start 31; Stop 55
ccgatgatagcacgaccaatagttg

SEQ ID NO: 302877 - DNA, 25 bp, Artificial
  probe
  misc_feature (1)..(25): SEQ ID NO: 1714; WAN024EWG; Start 30; Stop 54
accgatgatagcacgaccaatagtt

SEQ ID NO: 302878 - DNA, 25 bp, Artificial
  probe
  misc_feature (1)..(25): SEQ ID NO: 1714; WAN024EWG; Start 192; Stop 216
ttcagacatttccttcctcctagtc

SEQ ID NO: 302879 - DNA, 25 bp, Artificial
  probe
  misc_feature (1)..(25): SEQ ID NO: 1714; WAN024EWG; Start 28; Stop 52
agaccgatgatagcacgaccaatag

SEQ ID NO: 302880 - DNA, 25 bp, Artificial
  probe
  misc_feature (1)..(25): SEQ ID NO: 1714; WAN024EWG; Start 8; Stop 32
ctccattacttgtatcatttagacc

SEQ ID NO: 302881 - DNA, 25 bp, Artificial
  probe
  misc_feature (1)..(25): SEQ ID NO: 1714; WAN024EWG; Start 194; Stop 218
cagacatttccttcctcctagtcag

SEQ ID NO: 302882 - DNA, 25 bp, Artificial
  probe
  misc_feature (1)..(25): SEQ ID NO: 1714; WAN024EWG; Start 29; Stop 53
gaccgatgatagcacgaccaatagt

SEQ ID NO: 302883 - DNA, 25 bp, Artificial
  probe
  misc_feature (1)..(25): SEQ ID NO: 1714; WAN024EWG; Start 241; Stop 265
ttcacggatcttatcatggagattt

SEQ ID NO: 302884 - DNA, 25 bp, Artificial
  probe
  misc_feature (1)..(25): SEQ ID NO: 1714; WAN024EWG; Start 240; Stop 264
tttcacggatcttatcatggagatt

SEQ ID NO: 302885 - DNA, 25 bp, Artificial
  probe
  misc_feature (1)..(25): SEQ ID NO: 1714; WAN024EWG; Start 11; Stop 35
cattacttgtatcatttagaccgat

SEQ ID NO: 302886 - DNA, 25 bp, Artificial
  probe
  misc_feature (1)..(25): SEQ ID NO: 1714; WAN024EWG; Start 242; Stop 266
tcacggatcttatcatggagatttg

SEQ ID NO: 302887 - DNA, 25 bp, Artificial
  probe
  misc_feature (1)..(25): SEQ ID NO: 1714; WAN024EWG; Start 193; Stop 217
tcagacatttccttcctcctagtca

SEQ ID NO: 302888 - DNA, 25 bp, Artificial
  probe
  misc_feature (1)..(25): SEQ ID NO: 1714; WAN024EWG; Start 91; Stop 115
gtttctcccttgttgataaagaagt

SEQ ID NO: 302889 - DNA, 25 bp, Artificial
  probe
  misc_feature (1)..(25): SEQ ID NO: 1715; WAN024D5W; Start 124; Stop 148
aagctggataagattctgattgtga

SEQ ID NO: 302890 - DNA, 25 bp, Artificial
  probe
  misc_feature (1)..(25): SEQ ID NO: 1715; WAN024D5W; Start 127; Stop 151
ctggataagattctgattgtgagct

SEQ ID NO: 302891 - DNA, 25 bp, Artificial
  probe
  misc_feature (1)..(25): SEQ ID NO: 1715; WAN024D5W; Start 125; Stop 149
agctggataagattctgattgtgag

SEQ ID NO: 302892 - DNA, 25 bp, Artificial
  probe
  misc_feature (1)..(25): SEQ ID NO: 1715; WAN024D5W; Start 128; Stop 152
tggataagattctgattgtgagctt

SEQ ID NO: 302893 - DNA, 25 bp, Artificial
  probe
  misc_feature (1)..(25): SEQ ID NO: 1715; WAN024D5W; Start 129; Stop 153
ggataagattctgattgtgagcttg

SEQ ID NO: 302894 - DNA, 25 bp, Artificial
  probe
  misc_feature (1)..(25): SEQ ID NO: 1715; WAN024D5W; Start 123; Stop 147
taagctggataagattctgattgtg

SEQ ID NO: 302895 - DNA, 25 bp, Artificial
  probe
  misc_feature (1)..(25): SEQ ID NO: 1715; WAN024D5W; Start 130; Stop 154
gataagattctgattgtgagcttga

SEQ ID NO: 302896 - DNA, 25 bp, Artificial
  probe
  misc_feature (1)..(25): SEQ ID NO: 1715; WAN024D5W; Start 134; Stop 158
agattctgattgtgagcttgattat

SEQ ID NO: 302897 - DNA, 25 bp, Artificial
  probe
  misc_feature (1)..(25): SEQ ID NO: 1715; WAN024D5W; Start 133; Stop 157
aagattctgattgtgagcttgatta

SEQ ID NO: 302898 - DNA, 25 bp, Artificial
  probe
  misc_feature (1)..(25): SEQ ID NO: 1715; WAN024D5W; Start 132; Stop 156
taagattctgattgtgagcttgatt

SEQ ID NO: 302899 - DNA, 25 bp, Artificial
  probe
  misc_feature (1)..(25): SEQ ID NO: 1715; WAN024D5W; Start 131; Stop 155
ataagattctgattgtgagcttgat

SEQ ID NO: 302900 - DNA, 25 bp, Artificial
  probe
  misc_feature (1)..(25): SEQ ID NO: 1715; WAN024D5W; Start 122; Stop 146
ttaagctggataagattctgattgt

SEQ ID NO: 302901 - DNA, 25 bp, Artificial
  probe
  misc_feature (1)..(25): SEQ ID NO: 1715; WAN024D5W; Start 93; Stop 117
atttcttcacttatttgggattgtc

SEQ ID NO: 302902 - DNA, 25 bp, Artificial
  probe
  misc_feature (1)..(25): SEQ ID NO: 1715; WAN024D5W; Start 126; Stop 150
gctggataagattctgattgtgagc

SEQ ID NO: 302903 - DNA, 25 bp, Artificial
  probe
  misc_feature (1)..(25): SEQ ID NO: 1715; WAN024D5W; Start 94; Stop 118
tttcttcacttatttgggattgtcc

SEQ ID NO: 302904 - DNA, 25 bp, Artificial
  probe
  misc_feature (1)..(25): SEQ ID NO: 1715; WAN024D5W; Start 118; Stop 142
ccctttaagctggataagattctga

SEQ ID NO: 302905 - DNA, 25 bp, Artificial
  probe
  misc_feature (1)..(25): SEQ ID NO: 1715; WAN024D5W; Start 135; Stop 159
gattctgattgtgagcttgattata

SEQ ID NO: 302906 - DNA, 25 bp, Artificial
  probe
  misc_feature (1)..(25): SEQ ID NO: 1715; WAN024D5W; Start 144; Stop 168
tgtgagcttgattatatttcccatt

SEQ ID NO: 302907 - DNA, 25 bp, Artificial
  probe
  misc_feature (1)..(25): SEQ ID NO: 1715; WAN024D5W; Start 143; Stop 167
ttgtgagcttgattatatttcccat

SEQ ID NO: 302908 - DNA, 25 bp, Artificial
  probe
  misc_feature (1)..(25): SEQ ID NO: 1715; WAN024D5W; Start 142; Stop 166
attgtgagcttgattatatttccca

SEQ ID NO: 302909 - DNA, 25 bp, Artificial
  probe
  misc_feature (1)..(25): SEQ ID NO: 1715; WAN024D5W; Start 119; Stop 143
cctttaagctggataagattctgat

SEQ ID NO: 302910 - DNA, 25 bp, Artificial
  probe
  misc_feature (1)..(25): SEQ ID NO: 1715; WAN024D5W; Start 141; Stop 165
gattgtgagcttgattatatttccc

SEQ ID NO: 302911 - DNA, 25 bp, Artificial
  probe
  misc_feature (1)..(25): SEQ ID NO: 1715; WAN024D5W; Start 137; Stop 161
ttctgattgtgagcttgattatatt

SEQ ID NO: 302912 - DNA, 25 bp, Artificial
  probe
  misc_feature (1)..(25): SEQ ID NO: 1715; WAN024D5W; Start 2; Stop 26
tgatatttaaggcattcaagacaaa

SEQ ID NO: 302913 - DNA, 25 bp, Artificial
  probe
  misc_feature (1)..(25): SEQ ID NO: 1715; WAN024D5W; Start 136; Stop 160
attctgattgtgagcttgattatat

SEQ ID NO: 302914 - DNA, 25 bp, Artificial
  probe
  misc_feature (1)..(25): SEQ ID NO: 1715; WAN024D5W; Start 1; Stop 25
atgatatttaaggcattcaagacaa

SEQ ID NO: 302915 - DNA, 25 bp, Artificial
  probe
  misc_feature (1)..(25): SEQ ID NO: 1715; WAN024D5W; Start 92; Stop 116
tatttcttcacttatttgggattgt

SEQ ID NO: 302916 - DNA, 25 bp, Artificial
  probe
  misc_feature (1)..(25): SEQ ID NO: 1715; WAN024D5W; Start 140; Stop 164
tgattgtgagcttgattatatttcc

SEQ ID NO: 302917 - DNA, 25 bp, Artificial
  probe
  misc_feature (1)..(25): SEQ ID NO: 1715; WAN024D5W; Start 121; Stop 145
tttaagctggataagattctgattg

SEQ ID NO: 302918 - DNA, 25 bp, Artificial
  probe
  misc_feature (1)..(25): SEQ ID NO: 1715; WAN024D5W; Start 145; Stop 169
gtgagcttgattatatttcccatta

SEQ ID NO: 302919 - DNA, 25 bp, Artificial
  probe
  misc_feature (1)..(25): SEQ ID NO: 1715; WAN024D5W; Start 120; Stop 144
ctttaagctggataagattctgatt

SEQ ID NO: 302920 - DNA, 25 bp, Artificial
  probe
  misc_feature (1)..(25): SEQ ID NO: 1715; WAN024D5W; Start 138; Stop 162
tctgattgtgagcttgattatattt

SEQ ID NO: 302921 - DNA, 25 bp, Artificial
  probe
  misc_feature (1)..(25): SEQ ID NO: 1715; WAN024D5W; Start 91; Stop 115
ttatttcttcacttatttgggattg

SEQ ID NO: 302922 - DNA, 25 bp, Artificial
  probe
  misc_feature (1)..(25): SEQ ID NO: 1716; WAN024G9L; Start 19; Stop 43
gctaggttagacatagtatatcacg

SEQ ID NO: 302923 - DNA, 25 bp, Artificial
  probe
  misc_feature (1)..(25): SEQ ID NO: 1716; WAN024G9L; Start 20; Stop 44
ctaggttagacatagtatatcacgg

SEQ ID NO: 302924 - DNA, 25 bp, Artificial
  probe
  misc_feature (1)..(25): SEQ ID NO: 1716; WAN024G9L; Start 21; Stop 45
taggttagacatagtatatcacggg

SEQ ID NO: 302925 - DNA, 25 bp, Artificial
  probe
  misc_feature (1)..(25): SEQ ID NO: 1716; WAN024G9L; Start 18; Stop 42
tgctaggttagacatagtatatcac

SEQ ID NO: 302926 - DNA, 25 bp, Artificial
  probe
  misc_feature (1)..(25): SEQ ID NO: 1716; WAN024G9L; Start 11; Stop 35
ctctttctgctaggttagacatagt

SEQ ID NO: 302927 - DNA, 25 bp, Artificial
  probe
  misc_feature (1)..(25): SEQ ID NO: 1716; WAN024G9L; Start 75; Stop 99
gatttatcagaagcaatttacctcg

SEQ ID NO: 302928 - DNA, 25 bp, Artificial
  probe
  misc_feature (1)..(25): SEQ ID NO: 1716; WAN024G9L; Start 194; Stop 218
gagttactattgggcaaggatggta

SEQ ID NO: 302929 - DNA, 25 bp, Artificial
  probe
  misc_feature (1)..(25): SEQ ID NO: 1716; WAN024G9L; Start 17; Stop 41
ctgctaggttagacatagtatatca

SEQ ID NO: 302930 - DNA, 25 bp, Artificial
  probe
  misc_feature (1)..(25): SEQ ID NO: 1716; WAN024G9L; Start 10; Stop 34
cctctttctgctaggttagacatag

SEQ ID NO: 302931 - DNA, 25 bp, Artificial
  probe
  misc_feature (1)..(25): SEQ ID NO: 1716; WAN024G9L; Start 9; Stop 33
tcctctttctgctaggttagacata

SEQ ID NO: 302932 - DNA, 25 bp, Artificial
  probe
  misc_feature (1)..(25): SEQ ID NO: 1716; WAN024G9L; Start 12; Stop 36
tctttctgctaggttagacatagta

SEQ ID NO: 302933 - DNA, 25 bp, Artificial
  probe
  misc_feature (1)..(25): SEQ ID NO: 1716; WAN024G9L; Start 2; Stop 26
tgatatttcctctttctgctaggtt

SEQ ID NO: 302934 - DNA, 25 bp, Artificial
  probe
  misc_feature (1)..(25): SEQ ID NO: 1716; WAN024G9L; Start 1; Stop 25
atgatatttcctctttctgctaggt

SEQ ID NO: 302935 - DNA, 25 bp, Artificial
  probe
  misc_feature (1)..(25): SEQ ID NO: 1716; WAN024G9L; Start 79; Stop 103
tatcagaagcaatttacctcgacaa

SEQ ID NO: 302936 - DNA, 25 bp, Artificial
  probe
  misc_feature (1)..(25): SEQ ID NO: 1716; WAN024G9L; Start 78; Stop 102
ttatcagaagcaatttacctcgaca

SEQ ID NO: 302937 - DNA, 25 bp, Artificial
  probe
  misc_feature (1)..(25): SEQ ID NO: 1716; WAN024G9L; Start 8; Stop 32
ttcctctttctgctaggttagacat

SEQ ID NO: 302938 - DNA, 25 bp, Artificial
  probe
  misc_feature (1)..(25): SEQ ID NO: 1716; WAN024G9L; Start 195; Stop 219
agttactattgggcaaggatggtac

SEQ ID NO: 302939 - DNA, 25 bp, Artificial
  probe
  misc_feature (1)..(25): SEQ ID NO: 1716; WAN024G9L; Start 77; Stop 101
tttatcagaagcaatttacctcgac

SEQ ID NO: 302940 - DNA, 25 bp, Artificial
  probe
  misc_feature (1)..(25): SEQ ID NO: 1716; WAN024G9L; Start 198; Stop 222
tactattgggcaaggatggtacaaa

SEQ ID NO: 302941 - DNA, 25 bp, Artificial
  probe
  misc_feature (1)..(25): SEQ ID NO: 1716; WAN024G9L; Start 197; Stop 221
ttactattgggcaaggatggtacaa

SEQ ID NO: 302942 - DNA, 25 bp, Artificial
  probe
  misc_feature (1)..(25): SEQ ID NO: 1716; WAN024G9L; Start 7; Stop 31
tttcctctttctgctaggttagaca

SEQ ID NO: 302943 - DNA, 25 bp, Artificial
  probe
  misc_feature (1)..(25): SEQ ID NO: 1716; WAN024G9L; Start 16; Stop 40
tctgctaggttagacatagtatatc

SEQ ID NO: 302944 - DNA, 25 bp, Artificial
  probe
  misc_feature (1)..(25): SEQ ID NO: 1716; WAN024G9L; Start 80; Stop 104
atcagaagcaatttacctcgacaaa

SEQ ID NO: 302945 - DNA, 25 bp, Artificial
  probe
  misc_feature (1)..(25): SEQ ID NO: 1716; WAN024G9L; Start 196; Stop 220
gttactattgggcaaggatggtaca

SEQ ID NO: 302946 - DNA, 25 bp, Artificial
  probe
  misc_feature (1)..(25): SEQ ID NO: 1716; WAN024G9L; Start 76; Stop 100
atttatcagaagcaatttacctcga

SEQ ID NO: 302947 - DNA, 25 bp, Artificial
  probe
  misc_feature (1)..(25): SEQ ID NO: 1716; WAN024G9L; Start 81; Stop 105
tcagaagcaatttacctcgacaaag

SEQ ID NO: 302948 - DNA, 25 bp, Artificial
  probe
  misc_feature (1)..(25): SEQ ID NO: 1716; WAN024G9L; Start 13; Stop 37
ctttctgctaggttagacatagtat

SEQ ID NO: 302949 - DNA, 25 bp, Artificial
  probe
  misc_feature (1)..(25): SEQ ID NO: 1716; WAN024G9L; Start 82; Stop 106
cagaagcaatttacctcgacaaagt

SEQ ID NO: 302950 - DNA, 25 bp, Artificial
  probe
  misc_feature (1)..(25): SEQ ID NO: 1716; WAN024G9L; Start 15; Stop 39
ttctgctaggttagacatagtatat

SEQ ID NO: 302951 - DNA, 25 bp, Artificial
  probe
  misc_feature (1)..(25): SEQ ID NO: 1716; WAN024G9L; Start 74; Stop 98
tgatttatcagaagcaatttacctc

SEQ ID NO: 302952 - DNA, 25 bp, Artificial
  probe
  misc_feature (1)..(25): SEQ ID NO: 1716; WAN024G9L; Start 24; Stop 48
gttagacatagtatatcacggggag

SEQ ID NO: 302953 - DNA, 25 bp, Artificial
  probe
  misc_feature (1)..(25): SEQ ID NO: 1716; WAN024G9L; Start 25; Stop 49
ttagacatagtatatcacggggagg

SEQ ID NO: 302954 - DNA, 25 bp, Artificial
  probe
  misc_feature (1)..(25): SEQ ID NO: 1716; WAN024G9L; Start 23; Stop 47
ggttagacatagtatatcacgggga

SEQ ID NO: 302955 - DNA, 25 bp, Artificial
  probe
  misc_feature (1)..(25): SEQ ID NO: 1717; WAN024CG9; Start 356; Stop 380
acttcactaatatcatcgctgacaa

SEQ ID NO: 302956 - DNA, 25 bp, Artificial
  probe
  misc_feature (1)..(25): SEQ ID NO: 1717; WAN024CG9; Start 355; Stop 379
aacttcactaatatcatcgctgaca

SEQ ID NO: 302957 - DNA, 25 bp, Artificial
  probe
  misc_feature (1)..(25): SEQ ID NO: 1717; WAN024CG9; Start 357; Stop 381
cttcactaatatcatcgctgacaag

SEQ ID NO: 302958 - DNA, 25 bp, Artificial
  probe
  misc_feature (1)..(25): SEQ ID NO: 1717; WAN024CG9; Start 1180; Stop 1204
gaggcagattcagaagtaacatcac

SEQ ID NO: 302959 - DNA, 25 bp, Artificial
  probe
  misc_feature (1)..(25): SEQ ID NO: 1717; WAN024CG9; Start 358; Stop 382
ttcactaatatcatcgctgacaagg

SEQ ID NO: 302960 - DNA, 25 bp, Artificial
  probe
  misc_feature (1)..(25): SEQ ID NO: 1717; WAN024CG9; Start 1178; Stop 1202
ttgaggcagattcagaagtaacatc

SEQ ID NO: 302961 - DNA, 25 bp, Artificial
  probe
  misc_feature (1)..(25): SEQ ID NO: 1717; WAN024CG9; Start 1177; Stop 1201
cttgaggcagattcagaagtaacat

SEQ ID NO: 302962 - DNA, 25 bp, Artificial
  probe
  misc_feature (1)..(25): SEQ ID NO: 1717; WAN024CG9; Start 1176; Stop 1200
tcttgaggcagattcagaagtaaca

SEQ ID NO: 302963 - DNA, 25 bp, Artificial
  probe
  misc_feature (1)..(25): SEQ ID NO: 1717; WAN024CG9; Start 1279; Stop 1303
cgtcttggactaggtgattaactaa

SEQ ID NO: 302964 - DNA, 25 bp, Artificial
  probe
  misc_feature (1)..(25): SEQ ID NO: 1717; WAN024CG9; Start 1179; Stop 1203
tgaggcagattcagaagtaacatca

SEQ ID NO: 302965 - DNA, 25 bp, Artificial
  probe
  misc_feature (1)..(25): SEQ ID NO: 1717; WAN024CG9; Start 930; Stop 954
tatcatcacaccagatacgaccatt

SEQ ID NO: 302966 - DNA, 25 bp, Artificial
  probe
  misc_feature (1)..(25): SEQ ID NO: 1717; WAN024CG9; Start 1181; Stop 1205
aggcagattcagaagtaacatcacg

SEQ ID NO: 302967 - DNA, 25 bp, Artificial
  probe
  misc_feature (1)..(25): SEQ ID NO: 1717; WAN024CG9; Start 624; Stop 648
aatctctacacaagtccttcctcgt

SEQ ID NO: 302968 - DNA, 25 bp, Artificial
  probe
  misc_feature (1)..(25): SEQ ID NO: 1717; WAN024CG9; Start 1185; Stop 1209
agattcagaagtaacatcacgtctc

SEQ ID NO: 302969 - DNA, 25 bp, Artificial
  probe
  misc_feature (1)..(25): SEQ ID NO: 1717; WAN024CG9; Start 1186; Stop 1210
gattcagaagtaacatcacgtctca

SEQ ID NO: 302970 - DNA, 25 bp, Artificial
  probe
  misc_feature (1)..(25): SEQ ID NO: 1717; WAN024CG9; Start 1184; Stop 1208
cagattcagaagtaacatcacgtct

SEQ ID NO: 302971 - DNA, 25 bp, Artificial
  probe
  misc_feature (1)..(25): SEQ ID NO: 1717; WAN024CG9; Start 622; Stop 646
gaaatctctacacaagtccttcctc

SEQ ID NO: 302972 - DNA, 25 bp, Artificial
  probe
  misc_feature (1)..(25): SEQ ID NO: 1717; WAN024CG9; Start 620; Stop 644
aagaaatctctacacaagtccttcc

SEQ ID NO: 302973 - DNA, 25 bp, Artificial
  probe
  misc_feature (1)..(25): SEQ ID NO: 1717; WAN024CG9; Start 1187; Stop 1211
attcagaagtaacatcacgtctcac

SEQ ID NO: 302974 - DNA, 25 bp, Artificial
  probe
  misc_feature (1)..(25): SEQ ID NO: 1717; WAN024CG9; Start 619; Stop 643
caagaaatctctacacaagtccttc

SEQ ID NO: 302975 - DNA, 25 bp, Artificial
  probe
  misc_feature (1)..(25): SEQ ID NO: 1717; WAN024CG9; Start 572; Stop 596
caccatttgtagaggagtatgtctg

SEQ ID NO: 302976 - DNA, 25 bp, Artificial
  probe
  misc_feature (1)..(25): SEQ ID NO: 1717; WAN024CG9; Start 359; Stop 383
tcactaatatcatcgctgacaaggc

SEQ ID NO: 302977 - DNA, 25 bp, Artificial
  probe
  misc_feature (1)..(25): SEQ ID NO: 1717; WAN024CG9; Start 621; Stop 645
agaaatctctacacaagtccttcct

SEQ ID NO: 302978 - DNA, 25 bp, Artificial
  probe
  misc_feature (1)..(25): SEQ ID NO: 1717; WAN024CG9; Start 1280; Stop 1304
gtcttggactaggtgattaactaat

SEQ ID NO: 302979 - DNA, 25 bp, Artificial
  probe
  misc_feature (1)..(25): SEQ ID NO: 1717; WAN024CG9; Start 855; Stop 879
tggtcacatgattacggcttatgaa

SEQ ID NO: 302980 - DNA, 25 bp, Artificial
  probe
  misc_feature (1)..(25): SEQ ID NO: 1717; WAN024CG9; Start 354; Stop 378
aaacttcactaatatcatcgctgac

SEQ ID NO: 302981 - DNA, 25 bp, Artificial
  probe
  misc_feature (1)..(25): SEQ ID NO: 1717; WAN024CG9; Start 1166; Stop 1190
ttaaaccacttcttgaggcagattc

SEQ ID NO: 302982 - DNA, 25 bp, Artificial
  probe
  misc_feature (1)..(25): SEQ ID NO: 1717; WAN024CG9; Start 1175; Stop 1199
ttcttgaggcagattcagaagtaac

SEQ ID NO: 302983 - DNA, 25 bp, Artificial
  probe
  misc_feature (1)..(25): SEQ ID NO: 1717; WAN024CG9; Start 571; Stop 595
ccaccatttgtagaggagtatgtct

SEQ ID NO: 302984 - DNA, 25 bp, Artificial
  probe
  misc_feature (1)..(25): SEQ ID NO: 1717; WAN024CG9; Start 1278; Stop 1302
acgtcttggactaggtgattaacta

SEQ ID NO: 302985 - DNA, 25 bp, Artificial
  probe
  misc_feature (1)..(25): SEQ ID NO: 1717; WAN024CG9; Start 559; Stop 583
tttgccaatatcccaccatttgtag

SEQ ID NO: 302986 - DNA, 25 bp, Artificial
  probe
  misc_feature (1)..(25): SEQ ID NO: 1717; WAN024CG9; Start 558; Stop 582
ctttgccaatatcccaccatttgta

SEQ ID NO: 302987 - DNA, 25 bp, Artificial
  probe
  misc_feature (1)..(25): SEQ ID NO: 1717; WAN024CG9; Start 1183; Stop 1207
gcagattcagaagtaacatcacgtc

SEQ ID NO: 302988 - DNA, 25 bp, Artificial
  probe
  misc_feature (1)..(25): SEQ ID NO: 1718; WAN024FHC; Start 2329; Stop 2353
ttggtcatcgtatcggttctattag

SEQ ID NO: 302989 - DNA, 25 bp, Artificial
  probe
  misc_feature (1)..(25): SEQ ID NO: 1718; WAN024FHC; Start 2328; Stop 2352
cttggtcatcgtatcggttctatta

SEQ ID NO: 302990 - DNA, 25 bp, Artificial
  probe
  misc_feature (1)..(25): SEQ ID NO: 1718; WAN024FHC; Start 1949; Stop 1973
ttatccatcttcaacatcatcagca

SEQ ID NO: 302991 - DNA, 25 bp, Artificial
  probe
  misc_feature (1)..(25): SEQ ID NO: 1718; WAN024FHC; Start 1950; Stop 1974
tatccatcttcaacatcatcagcag

SEQ ID NO: 302992 - DNA, 25 bp, Artificial
  probe
  misc_feature (1)..(25): SEQ ID NO: 1718; WAN024FHC; Start 272; Stop 296
tgacagatgtgactatggataatgg

SEQ ID NO: 302993 - DNA, 25 bp, Artificial
  probe
  misc_feature (1)..(25): SEQ ID NO: 1718; WAN024FHC; Start 2326; Stop 2350
atcttggtcatcgtatcggttctat

SEQ ID NO: 302994 - DNA, 25 bp, Artificial
  probe
  misc_feature (1)..(25): SEQ ID NO: 1718; WAN024FHC; Start 2327; Stop 2351
tcttggtcatcgtatcggttctatt

SEQ ID NO: 302995 - DNA, 25 bp, Artificial
  probe
  misc_feature (1)..(25): SEQ ID NO: 1718; WAN024FHC; Start 211; Stop 235
gatcaagcagaccaagaagaactaa

SEQ ID NO: 302996 - DNA, 25 bp, Artificial
  probe
  misc_feature (1)..(25): SEQ ID NO: 1718; WAN024FHC; Start 271; Stop 295
ttgacagatgtgactatggataatg

SEQ ID NO: 302997 - DNA, 25 bp, Artificial
  probe
  misc_feature (1)..(25): SEQ ID NO: 1718; WAN024FHC; Start 1632; Stop 1656
taagcagagaatgttgatgacaatc

SEQ ID NO: 302998 - DNA, 25 bp, Artificial
  probe
  misc_feature (1)..(25): SEQ ID NO: 1718; WAN024FHC; Start 1634; Stop 1658
agcagagaatgttgatgacaatctt

SEQ ID NO: 302999 - DNA, 25 bp, Artificial
  probe
  misc_feature (1)..(25): SEQ ID NO: 1718; WAN024FHC; Start 1633; Stop 1657
aagcagagaatgttgatgacaatct

SEQ ID NO: 303000 - DNA, 25 bp, Artificial
  probe
  misc_feature (1)..(25): SEQ ID NO: 1718; WAN024FHC; Start 2330; Stop 2354
tggtcatcgtatcggttctattagc

SEQ ID NO: 303001 - DNA, 25 bp, Artificial
  probe
  misc_feature (1)..(25): SEQ ID NO: 1718; WAN024FHC; Start 2325; Stop 2349
catcttggtcatcgtatcggttcta

SEQ ID NO: 303002 - DNA, 25 bp, Artificial
  probe
  misc_feature (1)..(25): SEQ ID NO: 1718; WAN024FHC; Start 1627; Stop 1651
cgttataagcagagaatgttgatga

SEQ ID NO: 303003 - DNA, 25 bp, Artificial
  probe
  misc_feature (1)..(25): SEQ ID NO: 1718; WAN024FHC; Start 1626; Stop 1650
tcgttataagcagagaatgttgatg

SEQ ID NO: 303004 - DNA, 25 bp, Artificial
  probe
  misc_feature (1)..(25): SEQ ID NO: 1718; WAN024FHC; Start 1746; Stop 1770
aatccaacagtatcagatgcttgtc

SEQ ID NO: 303005 - DNA, 25 bp, Artificial
  probe
  misc_feature (1)..(25): SEQ ID NO: 1718; WAN024FHC; Start 2166; Stop 2190
caacacttatctggtctcattaagg

SEQ ID NO: 303006 - DNA, 25 bp, Artificial
  probe
  misc_feature (1)..(25): SEQ ID NO: 1718; WAN024FHC; Start 1631; Stop 1655
ataagcagagaatgttgatgacaat

SEQ ID NO: 303007 - DNA, 25 bp, Artificial
  probe
  misc_feature (1)..(25): SEQ ID NO: 1718; WAN024FHC; Start 192; Stop 216
catgtctaactatggcttggatcaa

SEQ ID NO: 303008 - DNA, 25 bp, Artificial
  probe
  misc_feature (1)..(25): SEQ ID NO: 1718; WAN024FHC; Start 190; Stop 214
gtcatgtctaactatggcttggatc

SEQ ID NO: 303009 - DNA, 25 bp, Artificial
  probe
  misc_feature (1)..(25): SEQ ID NO: 1718; WAN024FHC; Start 191; Stop 215
tcatgtctaactatggcttggatca

SEQ ID NO: 303010 - DNA, 25 bp, Artificial
  probe
  misc_feature (1)..(25): SEQ ID NO: 1718; WAN024FHC; Start 1988; Stop 2012
aagatggcatcgttattacagctaa

SEQ ID NO: 303011 - DNA, 25 bp, Artificial
  probe
  misc_feature (1)..(25): SEQ ID NO: 1718; WAN024FHC; Start 1747; Stop 1771
atccaacagtatcagatgcttgtct

SEQ ID NO: 303012 - DNA, 25 bp, Artificial
  probe
  misc_feature (1)..(25): SEQ ID NO: 1718; WAN024FHC; Start 1630; Stop 1654
tataagcagagaatgttgatgacaa

SEQ ID NO: 303013 - DNA, 25 bp, Artificial
  probe
  misc_feature (1)..(25): SEQ ID NO: 1718; WAN024FHC; Start 1625; Stop 1649
ttcgttataagcagagaatgttgat

SEQ ID NO: 303014 - DNA, 25 bp, Artificial
  probe
  misc_feature (1)..(25): SEQ ID NO: 1718; WAN024FHC; Start 189; Stop 213
agtcatgtctaactatggcttggat

SEQ ID NO: 303015 - DNA, 25 bp, Artificial
  probe
  misc_feature (1)..(25): SEQ ID NO: 1718; WAN024FHC; Start 210; Stop 234
ggatcaagcagaccaagaagaacta

SEQ ID NO: 303016 - DNA, 25 bp, Artificial
  probe
  misc_feature (1)..(25): SEQ ID NO: 1718; WAN024FHC; Start 2165; Stop 2189
ccaacacttatctggtctcattaag

SEQ ID NO: 303017 - DNA, 25 bp, Artificial
  probe
  misc_feature (1)..(25): SEQ ID NO: 1718; WAN024FHC; Start 2164; Stop 2188
gccaacacttatctggtctcattaa

SEQ ID NO: 303018 - DNA, 25 bp, Artificial
  probe
  misc_feature (1)..(25): SEQ ID NO: 1718; WAN024FHC; Start 1628; Stop 1652
gttataagcagagaatgttgatgac

SEQ ID NO: 303019 - DNA, 25 bp, Artificial
  probe
  misc_feature (1)..(25): SEQ ID NO: 1718; WAN024FHC; Start 1944; Stop 1968
tccctttatccatcttcaacatcat

SEQ ID NO: 303020 - DNA, 25 bp, Artificial
  probe
  misc_feature (1)..(25): SEQ ID NO: 1718; WAN024FHC; Start 1943; Stop 1967
ctccctttatccatcttcaacatca

SEQ ID NO: 303021 - DNA, 25 bp, Artificial
  probe
  misc_feature (1)..(25): SEQ ID NO: 1719; WAN024GLE; Start 253; Stop 277
gtaaggaagcaaggttgtatggata

SEQ ID NO: 303022 - DNA, 25 bp, Artificial
  probe
  misc_feature (1)..(25): SEQ ID NO: 1719; WAN024GLE; Start 255; Stop 279
aaggaagcaaggttgtatggatata

SEQ ID NO: 303023 - DNA, 25 bp, Artificial
  probe
  misc_feature (1)..(25): SEQ ID NO: 1719; WAN024GLE; Start 254; Stop 278
taaggaagcaaggttgtatggatat

SEQ ID NO: 303024 - DNA, 25 bp, Artificial
  probe
  misc_feature (1)..(25): SEQ ID NO: 1719; WAN024GLE; Start 248; Stop 272
ttgaggtaaggaagcaaggttgtat

SEQ ID NO: 303025 - DNA, 25 bp, Artificial
  probe
  misc_feature (1)..(25): SEQ ID NO: 1719; WAN024GLE; Start 256; Stop 280
aggaagcaaggttgtatggatatac

SEQ ID NO: 303026 - DNA, 25 bp, Artificial
  probe
  misc_feature (1)..(25): SEQ ID NO: 1719; WAN024GLE; Start 147; Stop 171
gctcttctgtacgaataaccaacat

SEQ ID NO: 303027 - DNA, 25 bp, Artificial
  probe
  misc_feature (1)..(25): SEQ ID NO: 1719; WAN024GLE; Start 252; Stop 276
ggtaaggaagcaaggttgtatggat

SEQ ID NO: 303028 - DNA, 25 bp, Artificial
  probe
  misc_feature (1)..(25): SEQ ID NO: 1719; WAN024GLE; Start 249; Stop 273
tgaggtaaggaagcaaggttgtatg

SEQ ID NO: 303029 - DNA, 25 bp, Artificial
  probe
  misc_feature (1)..(25): SEQ ID NO: 1719; WAN024GLE; Start 148; Stop 172
ctcttctgtacgaataaccaacata

SEQ ID NO: 303030 - DNA, 25 bp, Artificial
  probe
  misc_feature (1)..(25): SEQ ID NO: 1719; WAN024GLE; Start 63; Stop 87
gttcaacatccaacgattcgataac

SEQ ID NO: 303031 - DNA, 25 bp, Artificial
  probe
  misc_feature (1)..(25): SEQ ID NO: 1719; WAN024GLE; Start 250; Stop 274
gaggtaaggaagcaaggttgtatgg

SEQ ID NO: 303032 - DNA, 25 bp, Artificial
  probe
  misc_feature (1)..(25): SEQ ID NO: 1719; WAN024GLE; Start 38; Stop 62
aagttcagtggaatttggtaaaggt

SEQ ID NO: 303033 - DNA, 25 bp, Artificial
  probe
  misc_feature (1)..(25): SEQ ID NO: 1719; WAN024GLE; Start 149; Stop 173
tcttctgtacgaataaccaacatat

SEQ ID NO: 303034 - DNA, 25 bp, Artificial
  probe
  misc_feature (1)..(25): SEQ ID NO: 1719; WAN024GLE; Start 37; Stop 61
caagttcagtggaatttggtaaagg

SEQ ID NO: 303035 - DNA, 25 bp, Artificial
  probe
  misc_feature (1)..(25): SEQ ID NO: 1719; WAN024GLE; Start 41; Stop 65
ttcagtggaatttggtaaaggtgtt

SEQ ID NO: 303036 - DNA, 25 bp, Artificial
  probe
  misc_feature (1)..(25): SEQ ID NO: 1719; WAN024GLE; Start 62; Stop 86
tgttcaacatccaacgattcgataa

SEQ ID NO: 303037 - DNA, 25 bp, Artificial
  probe
  misc_feature (1)..(25): SEQ ID NO: 1719; WAN024GLE; Start 64; Stop 88
ttcaacatccaacgattcgataacg

SEQ ID NO: 303038 - DNA, 25 bp, Artificial
  probe
  misc_feature (1)..(25): SEQ ID NO: 1719; WAN024GLE; Start 45; Stop 69
gtggaatttggtaaaggtgttcaac

SEQ ID NO: 303039 - DNA, 25 bp, Artificial
  probe
  misc_feature (1)..(25): SEQ ID NO: 1719; WAN024GLE; Start 44; Stop 68
agtggaatttggtaaaggtgttcaa

SEQ ID NO: 303040 - DNA, 25 bp, Artificial
  probe
  misc_feature (1)..(25): SEQ ID NO: 1719; WAN024GLE; Start 36; Stop 60
gcaagttcagtggaatttggtaaag

SEQ ID NO: 303041 - DNA, 25 bp, Artificial
  probe
  misc_feature (1)..(25): SEQ ID NO: 1719; WAN024GLE; Start 42; Stop 66
tcagtggaatttggtaaaggtgttc

SEQ ID NO: 303042 - DNA, 25 bp, Artificial
  probe
  misc_feature (1)..(25): SEQ ID NO: 1719; WAN024GLE; Start 39; Stop 63
agttcagtggaatttggtaaaggtg

SEQ ID NO: 303043 - DNA, 25 bp, Artificial
  probe
  misc_feature (1)..(25): SEQ ID NO: 1719; WAN024GLE; Start 251; Stop 275
aggtaaggaagcaaggttgtatgga

SEQ ID NO: 303044 - DNA, 25 bp, Artificial
  probe
  misc_feature (1)..(25): SEQ ID NO: 1719; WAN024GLE; Start 43; Stop 67
cagtggaatttggtaaaggtgttca

SEQ ID NO: 303045 - DNA, 25 bp, Artificial
  probe
  misc_feature (1)..(25): SEQ ID NO: 1719; WAN024GLE; Start 40; Stop 64
gttcagtggaatttggtaaaggtgt

SEQ ID NO: 303046 - DNA, 25 bp, Artificial
  probe
  misc_feature (1)..(25): SEQ ID NO: 1719; WAN024GLE; Start 61; Stop 85
gtgttcaacatccaacgattcgata

SEQ ID NO: 303047 - DNA, 25 bp, Artificial
  probe
  misc_feature (1)..(25): SEQ ID NO: 1719; WAN024GLE; Start 150; Stop 174
cttctgtacgaataaccaacatatt

SEQ ID NO: 303048 - DNA, 25 bp, Artificial
  probe
  misc_feature (1)..(25): SEQ ID NO: 1719; WAN024GLE; Start 146; Stop 170
ggctcttctgtacgaataaccaaca

SEQ ID NO: 303049 - DNA, 25 bp, Artificial
  probe
  misc_feature (1)..(25): SEQ ID NO: 1719; WAN024GLE; Start 49; Stop 73
aatttggtaaaggtgttcaacatcc

SEQ ID NO: 303050 - DNA, 25 bp, Artificial
  probe
  misc_feature (1)..(25): SEQ ID NO: 1719; WAN024GLE; Start 47; Stop 71
ggaatttggtaaaggtgttcaacat

SEQ ID NO: 303051 - DNA, 25 bp, Artificial
  probe
  misc_feature (1)..(25): SEQ ID NO: 1719; WAN024GLE; Start 275; Stop 299
atatacatgacattatccgcaccca

SEQ ID NO: 303052 - DNA, 25 bp, Artificial
  probe
  misc_feature (1)..(25): SEQ ID NO: 1719; WAN024GLE; Start 144; Stop 168
ctggctcttctgtacgaataaccaa

SEQ ID NO: 303053 - DNA, 25 bp, Artificial
  probe
  misc_feature (1)..(25): SEQ ID NO: 1719; WAN024GLE; Start 197; Stop 221
aattctttgacagagtgttgggttg

SEQ ID NO: 303054 - DNA, 25 bp, Artificial
  probe
  misc_feature (1)..(25): SEQ ID NO: 1720; WAN024GIA; Start 712; Stop 736
cctagagaatatgaatgtggtgaac

SEQ ID NO: 303055 - DNA, 25 bp, Artificial
  probe
  misc_feature (1)..(25): SEQ ID NO: 1720; WAN024GIA; Start 711; Stop 735
tcctagagaatatgaatgtggtgaa

SEQ ID NO: 303056 - DNA, 25 bp, Artificial
  probe
  misc_feature (1)..(25): SEQ ID NO: 1720; WAN024GIA; Start 710; Stop 734
atcctagagaatatgaatgtggtga

SEQ ID NO: 303057 - DNA, 25 bp, Artificial
  probe
  misc_feature (1)..(25): SEQ ID NO: 1720; WAN024GIA; Start 715; Stop 739
agagaatatgaatgtggtgaacagg

SEQ ID NO: 303058 - DNA, 25 bp, Artificial
  probe
  misc_feature (1)..(25): SEQ ID NO: 1720; WAN024GIA; Start 716; Stop 740
gagaatatgaatgtggtgaacaggt

SEQ ID NO: 303059 - DNA, 25 bp, Artificial
  probe
  misc_feature (1)..(25): SEQ ID NO: 1720; WAN024GIA; Start 714; Stop 738
tagagaatatgaatgtggtgaacag

SEQ ID NO: 303060 - DNA, 25 bp, Artificial
  probe
  misc_feature (1)..(25): SEQ ID NO: 1720; WAN024GIA; Start 713; Stop 737
ctagagaatatgaatgtggtgaaca

SEQ ID NO: 303061 - DNA, 25 bp, Artificial
  probe
  misc_feature (1)..(25): SEQ ID NO: 1720; WAN024GIA; Start 14; Stop 38
gaatactaaaccacaatgccgtaat

SEQ ID NO: 303062 - DNA, 25 bp, Artificial
  probe
  misc_feature (1)..(25): SEQ ID NO: 1720; WAN024GIA; Start 709; Stop 733
tatcctagagaatatgaatgtggtg

SEQ ID NO: 303063 - DNA, 25 bp, Artificial
  probe
  misc_feature (1)..(25): SEQ ID NO: 1720; WAN024GIA; Start 15; Stop 39
aatactaaaccacaatgccgtaatt

SEQ ID NO: 303064 - DNA, 25 bp, Artificial
  probe
  misc_feature (1)..(25): SEQ ID NO: 1720; WAN024GIA; Start 802; Stop 826
atggctcatattcgtcgcttaacaa

SEQ ID NO: 303065 - DNA, 25 bp, Artificial
  probe
  misc_feature (1)..(25): SEQ ID NO: 1720; WAN024GIA; Start 799; Stop 823
ttgatggctcatattcgtcgcttaa

SEQ ID NO: 303066 - DNA, 25 bp, Artificial
  probe
  misc_feature (1)..(25): SEQ ID NO: 1720; WAN024GIA; Start 794; Stop 818
tttatttgatggctcatattcgtcg

SEQ ID NO: 303067 - DNA, 25 bp, Artificial
  probe
  misc_feature (1)..(25): SEQ ID NO: 1720; WAN024GIA; Start 13; Stop 37
cgaatactaaaccacaatgccgtaa

SEQ ID NO: 303068 - DNA, 25 bp, Artificial
  probe
  misc_feature (1)..(25): SEQ ID NO: 1720; WAN024GIA; Start 792; Stop 816
agtttatttgatggctcatattcgt

SEQ ID NO: 303069 - DNA, 25 bp, Artificial
  probe
  misc_feature (1)..(25): SEQ ID NO: 1720; WAN024GIA; Start 793; Stop 817
gtttatttgatggctcatattcgtc

SEQ ID NO: 303070 - DNA, 25 bp, Artificial
  probe
  misc_feature (1)..(25): SEQ ID NO: 1720; WAN024GIA; Start 801; Stop 825
gatggctcatattcgtcgcttaaca

SEQ ID NO: 303071 - DNA, 25 bp, Artificial
  probe
  misc_feature (1)..(25): SEQ ID NO: 1720; WAN024GIA; Start 800; Stop 824
tgatggctcatattcgtcgcttaac

SEQ ID NO: 303072 - DNA, 25 bp, Artificial
  probe
  misc_feature (1)..(25): SEQ ID NO: 1720; WAN024GIA; Start 795; Stop 819
ttatttgatggctcatattcgtcgc

SEQ ID NO: 303073 - DNA, 25 bp, Artificial
  probe
  misc_feature (1)..(25): SEQ ID NO: 1720; WAN024GIA; Start 10; Stop 34
aaacgaatactaaaccacaatgccg

SEQ ID NO: 303074 - DNA, 25 bp, Artificial
  probe
  misc_feature (1)..(25): SEQ ID NO: 1720; WAN024GIA; Start 772; Stop 796
ttgctgacttctagtgaattagttt

SEQ ID NO: 303075 - DNA, 25 bp, Artificial
  probe
  misc_feature (1)..(25): SEQ ID NO: 1720; WAN024GIA; Start 771; Stop 795
tttgctgacttctagtgaattagtt

SEQ ID NO: 303076 - DNA, 25 bp, Artificial
  probe
  misc_feature (1)..(25): SEQ ID NO: 1720; WAN024GIA; Start 708; Stop 732
atatcctagagaatatgaatgtggt

SEQ ID NO: 303077 - DNA, 25 bp, Artificial
  probe
  misc_feature (1)..(25): SEQ ID NO: 1720; WAN024GIA; Start 784; Stop 808
agtgaattagtttatttgatggctc

SEQ ID NO: 303078 - DNA, 25 bp, Artificial
  probe
  misc_feature (1)..(25): SEQ ID NO: 1720; WAN024GIA; Start 770; Stop 794
atttgctgacttctagtgaattagt

SEQ ID NO: 303079 - DNA, 25 bp, Artificial
  probe
  misc_feature (1)..(25): SEQ ID NO: 1720; WAN024GIA; Start 785; Stop 809
gtgaattagtttatttgatggctca

SEQ ID NO: 303080 - DNA, 25 bp, Artificial
  probe
  misc_feature (1)..(25): SEQ ID NO: 1720; WAN024GIA; Start 570; Stop 594
ttgtactgagtttaaccaagattct

SEQ ID NO: 303081 - DNA, 25 bp, Artificial
  probe
  misc_feature (1)..(25): SEQ ID NO: 1720; WAN024GIA; Start 796; Stop 820
tatttgatggctcatattcgtcgct

SEQ ID NO: 303082 - DNA, 25 bp, Artificial
  probe
  misc_feature (1)..(25): SEQ ID NO: 1720; WAN024GIA; Start 773; Stop 797
tgctgacttctagtgaattagttta

SEQ ID NO: 303083 - DNA, 25 bp, Artificial
  probe
  misc_feature (1)..(25): SEQ ID NO: 1720; WAN024GIA; Start 16; Stop 40
atactaaaccacaatgccgtaattg

SEQ ID NO: 303084 - DNA, 25 bp, Artificial
  probe
  misc_feature (1)..(25): SEQ ID NO: 1720; WAN024GIA; Start 571; Stop 595
tgtactgagtttaaccaagattcta

SEQ ID NO: 303085 - DNA, 25 bp, Artificial
  probe
  misc_feature (1)..(25): SEQ ID NO: 1720; WAN024GIA; Start 798; Stop 822
tttgatggctcatattcgtcgctta

SEQ ID NO: 303086 - DNA, 25 bp, Artificial
  probe
  misc_feature (1)..(25): SEQ ID NO: 1720; WAN024GIA; Start 791; Stop 815
tagtttatttgatggctcatattcg

SEQ ID NO: 303087 - DNA, 25 bp, Artificial
  probe
  misc_feature (1)..(25): SEQ ID NO: 1721; WAN024EXB; Start 912; Stop 936
gacatctattcctaaggttcaagcg

SEQ ID NO: 303088 - DNA, 25 bp, Artificial
  probe
  misc_feature (1)..(25): SEQ ID NO: 1721; WAN024EXB; Start 911; Stop 935
tgacatctattcctaaggttcaagc

SEQ ID NO: 303089 - DNA, 25 bp, Artificial
  probe
  misc_feature (1)..(25): SEQ ID NO: 1721; WAN024EXB; Start 211; Stop 235
cctcatatcgttcggataacagata

SEQ ID NO: 303090 - DNA, 25 bp, Artificial
  probe
  misc_feature (1)..(25): SEQ ID NO: 1721; WAN024EXB; Start 522; Stop 546
ctcagttcattacttgtcaccagag

SEQ ID NO: 303091 - DNA, 25 bp, Artificial
  probe
  misc_feature (1)..(25): SEQ ID NO: 1721; WAN024EXB; Start 899; Stop 923
ctcagagtaccttgacatctattcc

SEQ ID NO: 303092 - DNA, 25 bp, Artificial
  probe
  misc_feature (1)..(25): SEQ ID NO: 1721; WAN024EXB; Start 900; Stop 924
tcagagtaccttgacatctattcct

SEQ ID NO: 303093 - DNA, 25 bp, Artificial
  probe
  misc_feature (1)..(25): SEQ ID NO: 1721; WAN024EXB; Start 901; Stop 925
cagagtaccttgacatctattccta

SEQ ID NO: 303094 - DNA, 25 bp, Artificial
  probe
  misc_feature (1)..(25): SEQ ID NO: 1721; WAN024EXB; Start 734; Stop 758
atgttattatcaaggcaactgctaa

SEQ ID NO: 303095 - DNA, 25 bp, Artificial
  probe
  misc_feature (1)..(25): SEQ ID NO: 1721; WAN024EXB; Start 733; Stop 757
aatgttattatcaaggcaactgcta

SEQ ID NO: 303096 - DNA, 25 bp, Artificial
  probe
  misc_feature (1)..(25): SEQ ID NO: 1721; WAN024EXB; Start 898; Stop 922
tctcagagtaccttgacatctattc

SEQ ID NO: 303097 - DNA, 25 bp, Artificial
  probe
  misc_feature (1)..(25): SEQ ID NO: 1721; WAN024EXB; Start 897; Stop 921
ttctcagagtaccttgacatctatt

SEQ ID NO: 303098 - DNA, 25 bp, Artificial
  probe
  misc_feature (1)..(25): SEQ ID NO: 1721; WAN024EXB; Start 1398; Stop 1422
aattgaggaagaagagtcgaatgaa

SEQ ID NO: 303099 - DNA, 25 bp, Artificial
  probe
  misc_feature (1)..(25): SEQ ID NO: 1721; WAN024EXB; Start 902; Stop 926
agagtaccttgacatctattcctaa

SEQ ID NO: 303100 - DNA, 25 bp, Artificial
  probe
  misc_feature (1)..(25): SEQ ID NO: 1721; WAN024EXB; Start 210; Stop 234
tcctcatatcgttcggataacagat

SEQ ID NO: 303101 - DNA, 25 bp, Artificial
  probe
  misc_feature (1)..(25): SEQ ID NO: 1721; WAN024EXB; Start 903; Stop 927
gagtaccttgacatctattcctaag

SEQ ID NO: 303102 - DNA, 25 bp, Artificial
  probe
  misc_feature (1)..(25): SEQ ID NO: 1721; WAN024EXB; Start 296; Stop 320
aacgctatatcaaggaacattatcc

SEQ ID NO: 303103 - DNA, 25 bp, Artificial
  probe
  misc_feature (1)..(25): SEQ ID NO: 1721; WAN024EXB; Start 1175; Stop 1199
ttgagattggtgaggagaagacaga

SEQ ID NO: 303104 - DNA, 25 bp, Artificial
  probe
  misc_feature (1)..(25): SEQ ID NO: 1721; WAN024EXB; Start 292; Stop 316
ctcaaacgctatatcaaggaacatt

SEQ ID NO: 303105 - DNA, 25 bp, Artificial
  probe
  misc_feature (1)..(25): SEQ ID NO: 1721; WAN024EXB; Start 525; Stop 549
agttcattacttgtcaccagagcag

SEQ ID NO: 303106 - DNA, 25 bp, Artificial
  probe
  misc_feature (1)..(25): SEQ ID NO: 1721; WAN024EXB; Start 523; Stop 547
tcagttcattacttgtcaccagagc

SEQ ID NO: 303107 - DNA, 25 bp, Artificial
  probe
  misc_feature (1)..(25): SEQ ID NO: 1721; WAN024EXB; Start 521; Stop 545
gctcagttcattacttgtcaccaga

SEQ ID NO: 303108 - DNA, 25 bp, Artificial
  probe
  misc_feature (1)..(25): SEQ ID NO: 1721; WAN024EXB; Start 1018; Stop 1042
agatttaagatgcgttacctgattt

SEQ ID NO: 303109 - DNA, 25 bp, Artificial
  probe
  misc_feature (1)..(25): SEQ ID NO: 1721; WAN024EXB; Start 1014; Stop 1038
acatagatttaagatgcgttacctg

SEQ ID NO: 303110 - DNA, 25 bp, Artificial
  probe
  misc_feature (1)..(25): SEQ ID NO: 1721; WAN024EXB; Start 1176; Stop 1200
tgagattggtgaggagaagacagag

SEQ ID NO: 303111 - DNA, 25 bp, Artificial
  probe
  misc_feature (1)..(25): SEQ ID NO: 1721; WAN024EXB; Start 1015; Stop 1039
catagatttaagatgcgttacctga

SEQ ID NO: 303112 - DNA, 25 bp, Artificial
  probe
  misc_feature (1)..(25): SEQ ID NO: 1721; WAN024EXB; Start 293; Stop 317
tcaaacgctatatcaaggaacatta

SEQ ID NO: 303113 - DNA, 25 bp, Artificial
  probe
  misc_feature (1)..(25): SEQ ID NO: 1721; WAN024EXB; Start 524; Stop 548
cagttcattacttgtcaccagagca

SEQ ID NO: 303114 - DNA, 25 bp, Artificial
  probe
  misc_feature (1)..(25): SEQ ID NO: 1721; WAN024EXB; Start 1056; Stop 1080
tgtattggtggcagcttctcttatt

SEQ ID NO: 303115 - DNA, 25 bp, Artificial
  probe
  misc_feature (1)..(25): SEQ ID NO: 1721; WAN024EXB; Start 1055; Stop 1079
ttgtattggtggcagcttctcttat

SEQ ID NO: 303116 - DNA, 25 bp, Artificial
  probe
  misc_feature (1)..(25): SEQ ID NO: 1721; WAN024EXB; Start 732; Stop 756
aaatgttattatcaaggcaactgct

SEQ ID NO: 303117 - DNA, 25 bp, Artificial
  probe
  misc_feature (1)..(25): SEQ ID NO: 1721; WAN024EXB; Start 1013; Stop 1037
aacatagatttaagatgcgttacct

SEQ ID NO: 303118 - DNA, 25 bp, Artificial
  probe
  misc_feature (1)..(25): SEQ ID NO: 1721; WAN024EXB; Start 1017; Stop 1041
tagatttaagatgcgttacctgatt

SEQ ID NO: 303119 - DNA, 25 bp, Artificial
  probe
  misc_feature (1)..(25): SEQ ID NO: 1721; WAN024EXB; Start 199; Stop 223
gatctagaccatcctcatatcgttc

SEQ ID NO: 303120 - DNA, 25 bp, Artificial
  probe
  misc_feature (1)..(25): SEQ ID NO: 1723; WAN024FS2; Start 315; Stop 339
tatagcgtactccattgacataacc

SEQ ID NO: 303121 - DNA, 25 bp, Artificial
  probe
  misc_feature (1)..(25): SEQ ID NO: 1723; WAN024FS2; Start 320; Stop 344
cgtactccattgacataaccagatg

SEQ ID NO: 303122 - DNA, 25 bp, Artificial
  probe
  misc_feature (1)..(25): SEQ ID NO: 1723; WAN024FS2; Start 316; Stop 340
atagcgtactccattgacataacca

SEQ ID NO: 303123 - DNA, 25 bp, Artificial
  probe
  misc_feature (1)..(25): SEQ ID NO: 1723; WAN024FS2; Start 379; Stop 403
ccagtacatgagattatgacgactt

SEQ ID NO: 303124 - DNA, 25 bp, Artificial
  probe
  misc_feature (1)..(25): SEQ ID NO: 1723; WAN024FS2; Start 242; Stop 266
aggtgatcttctgtaatacaagcat

SEQ ID NO: 303125 - DNA, 25 bp, Artificial
  probe
  misc_feature (1)..(25): SEQ ID NO: 1723; WAN024FS2; Start 246; Stop 270
gatcttctgtaatacaagcattgcc

SEQ ID NO: 303126 - DNA, 25 bp, Artificial
  probe
  misc_feature (1)..(25): SEQ ID NO: 1723; WAN024FS2; Start 245; Stop 269
tgatcttctgtaatacaagcattgc

SEQ ID NO: 303127 - DNA, 25 bp, Artificial
  probe
  misc_feature (1)..(25): SEQ ID NO: 1723; WAN024FS2; Start 321; Stop 345
gtactccattgacataaccagatgc

SEQ ID NO: 303128 - DNA, 25 bp, Artificial
  probe
  misc_feature (1)..(25): SEQ ID NO: 1723; WAN024FS2; Start 314; Stop 338
ttatagcgtactccattgacataac

SEQ ID NO: 303129 - DNA, 25 bp, Artificial
  probe
  misc_feature (1)..(25): SEQ ID NO: 1723; WAN024FS2; Start 249; Stop 273
cttctgtaatacaagcattgccttc

SEQ ID NO: 303130 - DNA, 25 bp, Artificial
  probe
  misc_feature (1)..(25): SEQ ID NO: 1723; WAN024FS2; Start 247; Stop 271
atcttctgtaatacaagcattgcct

SEQ ID NO: 303131 - DNA, 25 bp, Artificial
  probe
  misc_feature (1)..(25): SEQ ID NO: 1723; WAN024FS2; Start 248; Stop 272
tcttctgtaatacaagcattgcctt

SEQ ID NO: 303132 - DNA, 25 bp, Artificial
  probe
  misc_feature (1)..(25): SEQ ID NO: 1723; WAN024FS2; Start 240; Stop 264
tcaggtgatcttctgtaatacaagc

SEQ ID NO: 303133 - DNA, 25 bp, Artificial
  probe
  misc_feature (1)..(25): SEQ ID NO: 1723; WAN024FS2; Start 237; Stop 261
gactcaggtgatcttctgtaataca

SEQ ID NO: 303134 - DNA, 25 bp, Artificial
  probe
  misc_feature (1)..(25): SEQ ID NO: 1723; WAN024FS2; Start 236; Stop 260
tgactcaggtgatcttctgtaatac

SEQ ID NO: 303135 - DNA, 25 bp, Artificial
  probe
  misc_feature (1)..(25): SEQ ID NO: 1723; WAN024FS2; Start 243; Stop 267
ggtgatcttctgtaatacaagcatt

SEQ ID NO: 303136 - DNA, 25 bp, Artificial
  probe
  misc_feature (1)..(25): SEQ ID NO: 1723; WAN024FS2; Start 322; Stop 346
tactccattgacataaccagatgcc

SEQ ID NO: 303137 - DNA, 25 bp, Artificial
  probe
  misc_feature (1)..(25): SEQ ID NO: 1723; WAN024FS2; Start 241; Stop 265
caggtgatcttctgtaatacaagca

SEQ ID NO: 303138 - DNA, 25 bp, Artificial
  probe
  misc_feature (1)..(25): SEQ ID NO: 1723; WAN024FS2; Start 255; Stop 279
taatacaagcattgccttcctcaac

SEQ ID NO: 303139 - DNA, 25 bp, Artificial
  probe
  misc_feature (1)..(25): SEQ ID NO: 1723; WAN024FS2; Start 254; Stop 278
gtaatacaagcattgccttcctcaa

SEQ ID NO: 303140 - DNA, 25 bp, Artificial
  probe
  misc_feature (1)..(25): SEQ ID NO: 1723; WAN024FS2; Start 238; Stop 262
actcaggtgatcttctgtaatacaa

SEQ ID NO: 303141 - DNA, 25 bp, Artificial
  probe
  misc_feature (1)..(25): SEQ ID NO: 1723; WAN024FS2; Start 317; Stop 341
tagcgtactccattgacataaccag

SEQ ID NO: 303142 - DNA, 25 bp, Artificial
  probe
  misc_feature (1)..(25): SEQ ID NO: 1723; WAN024FS2; Start 235; Stop 259
ttgactcaggtgatcttctgtaata

SEQ ID NO: 303143 - DNA, 25 bp, Artificial
  probe
  misc_feature (1)..(25): SEQ ID NO: 1723; WAN024FS2; Start 239; Stop 263
ctcaggtgatcttctgtaatacaag

SEQ ID NO: 303144 - DNA, 25 bp, Artificial
  probe
  misc_feature (1)..(25): SEQ ID NO: 1723; WAN024FS2; Start 360; Stop 384
catagtattcagcattgtcccagta

SEQ ID NO: 303145 - DNA, 25 bp, Artificial
  probe
  misc_feature (1)..(25): SEQ ID NO: 1723; WAN024FS2; Start 250; Stop 274
ttctgtaatacaagcattgccttcc

SEQ ID NO: 303146 - DNA, 25 bp, Artificial
  probe
  misc_feature (1)..(25): SEQ ID NO: 1723; WAN024FS2; Start 211; Stop 235
catttcttcttccatttgctccttt

SEQ ID NO: 303147 - DNA, 25 bp, Artificial
  probe
  misc_feature (1)..(25): SEQ ID NO: 1723; WAN024FS2; Start 244; Stop 268
gtgatcttctgtaatacaagcattg

SEQ ID NO: 303148 - DNA, 25 bp, Artificial
  probe
  misc_feature (1)..(25): SEQ ID NO: 1723; WAN024FS2; Start 120; Stop 144
caatttctccataaagtccagcaaa

SEQ ID NO: 303149 - DNA, 25 bp, Artificial
  probe
  misc_feature (1)..(25): SEQ ID NO: 1723; WAN024FS2; Start 252; Stop 276
ctgtaatacaagcattgccttcctc

SEQ ID NO: 303150 - DNA, 25 bp, Artificial
  probe
  misc_feature (1)..(25): SEQ ID NO: 1723; WAN024FS2; Start 210; Stop 234
acatttcttcttccatttgctcctt

SEQ ID NO: 303151 - DNA, 25 bp, Artificial
  probe
  misc_feature (1)..(25): SEQ ID NO: 1723; WAN024FS2; Start 209; Stop 233
aacatttcttcttccatttgctcct

SEQ ID NO: 303152 - DNA, 25 bp, Artificial
  probe
  misc_feature (1)..(25): SEQ ID NO: 1723; WAN024FS2; Start 357; Stop 381
taccatagtattcagcattgtccca

SEQ ID NO: 303153 - DNA, 25 bp, Artificial
  probe
  misc_feature (1)..(25): SEQ ID NO: 1724; WAN024DIQ; Start 265; Stop 289
aaggttaagttcaagaagcaagttg

SEQ ID NO: 303154 - DNA, 25 bp, Artificial
  probe
  misc_feature (1)..(25): SEQ ID NO: 1724; WAN024DIQ; Start 267; Stop 291
ggttaagttcaagaagcaagttgta

SEQ ID NO: 303155 - DNA, 25 bp, Artificial
  probe
  misc_feature (1)..(25): SEQ ID NO: 1724; WAN024DIQ; Start 266; Stop 290
aggttaagttcaagaagcaagttgt

SEQ ID NO: 303156 - DNA, 25 bp, Artificial
  probe
  misc_feature (1)..(25): SEQ ID NO: 1724; WAN024DIQ; Start 269; Stop 293
ttaagttcaagaagcaagttgtacc

SEQ ID NO: 303157 - DNA, 25 bp, Artificial
  probe
  misc_feature (1)..(25): SEQ ID NO: 1724; WAN024DIQ; Start 270; Stop 294
taagttcaagaagcaagttgtacca

SEQ ID NO: 303158 - DNA, 25 bp, Artificial
  probe
  misc_feature (1)..(25): SEQ ID NO: 1724; WAN024DIQ; Start 268; Stop 292
gttaagttcaagaagcaagttgtac

SEQ ID NO: 303159 - DNA, 25 bp, Artificial
  probe
  misc_feature (1)..(25): SEQ ID NO: 1724; WAN024DIQ; Start 271; Stop 295
aagttcaagaagcaagttgtaccag

SEQ ID NO: 303160 - DNA, 25 bp, Artificial
  probe
  misc_feature (1)..(25): SEQ ID NO: 1724; WAN024DIQ; Start 138; Stop 162
ccactttcctcaatacccagttatg

SEQ ID NO: 303161 - DNA, 25 bp, Artificial
  probe
  misc_feature (1)..(25): SEQ ID NO: 1724; WAN024DIQ; Start 41; Stop 65
gttatcctatgcttctagtggaccg

SEQ ID NO: 303162 - DNA, 25 bp, Artificial
  probe
  misc_feature (1)..(25): SEQ ID NO: 1724; WAN024DIQ; Start 40; Stop 64
cgttatcctatgcttctagtggacc

SEQ ID NO: 303163 - DNA, 25 bp, Artificial
  probe
  misc_feature (1)..(25): SEQ ID NO: 1724; WAN024DIQ; Start 39; Stop 63
ccgttatcctatgcttctagtggac

SEQ ID NO: 303164 - DNA, 25 bp, Artificial
  probe
  misc_feature (1)..(25): SEQ ID NO: 1724; WAN024DIQ; Start 37; Stop 61
caccgttatcctatgcttctagtgg

SEQ ID NO: 303165 - DNA, 25 bp, Artificial
  probe
  misc_feature (1)..(25): SEQ ID NO: 1724; WAN024DIQ; Start 36; Stop 60
ccaccgttatcctatgcttctagtg

SEQ ID NO: 303166 - DNA, 25 bp, Artificial
  probe
  misc_feature (1)..(25): SEQ ID NO: 1724; WAN024DIQ; Start 42; Stop 66
ttatcctatgcttctagtggaccgt

SEQ ID NO: 303167 - DNA, 25 bp, Artificial
  probe
  misc_feature (1)..(25): SEQ ID NO: 1724; WAN024DIQ; Start 38; Stop 62
accgttatcctatgcttctagtgga

SEQ ID NO: 303168 - DNA, 25 bp, Artificial
  probe
  misc_feature (1)..(25): SEQ ID NO: 1724; WAN024DIQ; Start 139; Stop 163
cactttcctcaatacccagttatgc

SEQ ID NO: 303169 - DNA, 25 bp, Artificial
  probe
  misc_feature (1)..(25): SEQ ID NO: 1724; WAN024DIQ; Start 81; Stop 105
cgaggataccattgttgctatcaaa

SEQ ID NO: 303170 - DNA, 25 bp, Artificial
  probe
  misc_feature (1)..(25): SEQ ID NO: 1724; WAN024DIQ; Start 272; Stop 296
agttcaagaagcaagttgtaccagg

SEQ ID NO: 303171 - DNA, 25 bp, Artificial
  probe
  misc_feature (1)..(25): SEQ ID NO: 1724; WAN024DIQ; Start 80; Stop 104
gcgaggataccattgttgctatcaa

SEQ ID NO: 303172 - DNA, 25 bp, Artificial
  probe
  misc_feature (1)..(25): SEQ ID NO: 1724; WAN024DIQ; Start 142; Stop 166
tttcctcaatacccagttatgccag

SEQ ID NO: 303173 - DNA, 25 bp, Artificial
  probe
  misc_feature (1)..(25): SEQ ID NO: 1724; WAN024DIQ; Start 141; Stop 165
ctttcctcaatacccagttatgcca

SEQ ID NO: 303174 - DNA, 25 bp, Artificial
  probe
  misc_feature (1)..(25): SEQ ID NO: 1724; WAN024DIQ; Start 140; Stop 164
actttcctcaatacccagttatgcc

SEQ ID NO: 303175 - DNA, 25 bp, Artificial
  probe
  misc_feature (1)..(25): SEQ ID NO: 1724; WAN024DIQ; Start 137; Stop 161
gccactttcctcaatacccagttat

SEQ ID NO: 303176 - DNA, 25 bp, Artificial
  probe
  misc_feature (1)..(25): SEQ ID NO: 1724; WAN024DIQ; Start 43; Stop 67
tatcctatgcttctagtggaccgtg

SEQ ID NO: 303177 - DNA, 25 bp, Artificial
  probe
  misc_feature (1)..(25): SEQ ID NO: 1724; WAN024DIQ; Start 47; Stop 71
ctatgcttctagtggaccgtgtctt

SEQ ID NO: 303178 - DNA, 25 bp, Artificial
  probe
  misc_feature (1)..(25): SEQ ID NO: 1724; WAN024DIQ; Start 5; Stop 29
tcgatattcaaggaatcaaagaagc

SEQ ID NO: 303179 - DNA, 25 bp, Artificial
  probe
  misc_feature (1)..(25): SEQ ID NO: 1724; WAN024DIQ; Start 205; Stop 229
gtgttggagttatcaaaacctgaaa

SEQ ID NO: 303180 - DNA, 25 bp, Artificial
  probe
  misc_feature (1)..(25): SEQ ID NO: 1724; WAN024DIQ; Start 78; Stop 102
gagcgaggataccattgttgctatc

SEQ ID NO: 303181 - DNA, 25 bp, Artificial
  probe
  misc_feature (1)..(25): SEQ ID NO: 1724; WAN024DIQ; Start 48; Stop 72
tatgcttctagtggaccgtgtcttg

SEQ ID NO: 303182 - DNA, 25 bp, Artificial
  probe
  misc_feature (1)..(25): SEQ ID NO: 1724; WAN024DIQ; Start 35; Stop 59
cccaccgttatcctatgcttctagt

SEQ ID NO: 303183 - DNA, 25 bp, Artificial
  probe
  misc_feature (1)..(25): SEQ ID NO: 1724; WAN024DIQ; Start 206; Stop 230
tgttggagttatcaaaacctgaaaa

SEQ ID NO: 303184 - DNA, 25 bp, Artificial
  probe
  misc_feature (1)..(25): SEQ ID NO: 1724; WAN024DIQ; Start 204; Stop 228
tgtgttggagttatcaaaacctgaa

SEQ ID NO: 303185 - DNA, 25 bp, Artificial
  probe
  misc_feature (1)..(25): SEQ ID NO: 1724; WAN024DIQ; Start 82; Stop 106
gaggataccattgttgctatcaaaa

SEQ ID NO: 303186 - DNA, 25 bp, Artificial
  probe
  misc_feature (1)..(25): SEQ ID NO: 1725; WAN024C9C; Start 42; Stop 66
tcagaagattaattatgaccgtgtc

SEQ ID NO: 303187 - DNA, 25 bp, Artificial
  probe
  misc_feature (1)..(25): SEQ ID NO: 1725; WAN024C9C; Start 41; Stop 65
atcagaagattaattatgaccgtgt

SEQ ID NO: 303188 - DNA, 25 bp, Artificial
  probe
  misc_feature (1)..(25): SEQ ID NO: 1725; WAN024C9C; Start 38; Stop 62
ccaatcagaagattaattatgaccg

SEQ ID NO: 303189 - DNA, 25 bp, Artificial
  probe
  misc_feature (1)..(25): SEQ ID NO: 1725; WAN024C9C; Start 40; Stop 64
aatcagaagattaattatgaccgtg

SEQ ID NO: 303190 - DNA, 25 bp, Artificial
  probe
  misc_feature (1)..(25): SEQ ID NO: 1725; WAN024C9C; Start 39; Stop 63
caatcagaagattaattatgaccgt

SEQ ID NO: 303191 - DNA, 25 bp, Artificial
  probe
  misc_feature (1)..(25): SEQ ID NO: 1725; WAN024C9C; Start 13; Stop 37
gaagaaattctgtgcaagatgaccc

SEQ ID NO: 303192 - DNA, 25 bp, Artificial
  probe
  misc_feature (1)..(25): SEQ ID NO: 1725; WAN024C9C; Start 43; Stop 67
cagaagattaattatgaccgtgtca

SEQ ID NO: 303193 - DNA, 25 bp, Artificial
  probe
  misc_feature (1)..(25): SEQ ID NO: 1725; WAN024C9C; Start 9; Stop 33
tgtagaagaaattctgtgcaagatg

SEQ ID NO: 303194 - DNA, 25 bp, Artificial
  probe
  misc_feature (1)..(25): SEQ ID NO: 1725; WAN024C9C; Start 6; Stop 30
cgatgtagaagaaattctgtgcaag

SEQ ID NO: 303195 - DNA, 25 bp, Artificial
  probe
  misc_feature (1)..(25): SEQ ID NO: 1725; WAN024C9C; Start 11; Stop 35
tagaagaaattctgtgcaagatgac

SEQ ID NO: 303196 - DNA, 25 bp, Artificial
  probe
  misc_feature (1)..(25): SEQ ID NO: 1725; WAN024C9C; Start 10; Stop 34
gtagaagaaattctgtgcaagatga

SEQ ID NO: 303197 - DNA, 25 bp, Artificial
  probe
  misc_feature (1)..(25): SEQ ID NO: 1725; WAN024C9C; Start 7; Stop 31
gatgtagaagaaattctgtgcaaga

SEQ ID NO: 303198 - DNA, 25 bp, Artificial
  probe
  misc_feature (1)..(25): SEQ ID NO: 1725; WAN024C9C; Start 5; Stop 29
tcgatgtagaagaaattctgtgcaa

SEQ ID NO: 303199 - DNA, 25 bp, Artificial
  probe
  misc_feature (1)..(25): SEQ ID NO: 1725; WAN024C9C; Start 37; Stop 61
cccaatcagaagattaattatgacc

SEQ ID NO: 303200 - DNA, 25 bp, Artificial
  probe
  misc_feature (1)..(25): SEQ ID NO: 1725; WAN024C9C; Start 71; Stop 95
agaaaatggtacaagcatgggaaaa

SEQ ID NO: 303201 - DNA, 25 bp, Artificial
  probe
  misc_feature (1)..(25): SEQ ID NO: 1725; WAN024C9C; Start 8; Stop 32
atgtagaagaaattctgtgcaagat

SEQ ID NO: 303202 - DNA, 25 bp, Artificial
  probe
  misc_feature (1)..(25): SEQ ID NO: 1725; WAN024C9C; Start 12; Stop 36
agaagaaattctgtgcaagatgacc

SEQ ID NO: 303203 - DNA, 25 bp, Artificial
  probe
  misc_feature (1)..(25): SEQ ID NO: 1725; WAN024C9C; Start 70; Stop 94
cagaaaatggtacaagcatgggaaa

SEQ ID NO: 303204 - DNA, 25 bp, Artificial
  probe
  misc_feature (1)..(25): SEQ ID NO: 1725; WAN024C9C; Start 3; Stop 27
gatcgatgtagaagaaattctgtgc

SEQ ID NO: 303205 - DNA, 25 bp, Artificial
  probe
  misc_feature (1)..(25): SEQ ID NO: 1725; WAN024C9C; Start 4; Stop 28
atcgatgtagaagaaattctgtgca

SEQ ID NO: 303206 - DNA, 25 bp, Artificial
  probe
  misc_feature (1)..(25): SEQ ID NO: 1725; WAN024C9C; Start 2; Stop 26
tgatcgatgtagaagaaattctgtg

SEQ ID NO: 303207 - DNA, 25 bp, Artificial
  probe
  misc_feature (1)..(25): SEQ ID NO: 1725; WAN024C9C; Start 36; Stop 60
ccccaatcagaagattaattatgac

SEQ ID NO: 303208 - DNA, 25 bp, Artificial
  probe
  misc_feature (1)..(25): SEQ ID NO: 1725; WAN024C9C; Start 1; Stop 25
atgatcgatgtagaagaaattctgt

SEQ ID NO: 303209 - DNA, 25 bp, Artificial
  probe
  misc_feature (1)..(25): SEQ ID NO: 1725; WAN024C9C; Start 61; Stop 85
cgtgtcatgcagaaaatggtacaag

SEQ ID NO: 303210 - DNA, 25 bp, Artificial
  probe
  misc_feature (1)..(25): SEQ ID NO: 1725; WAN024C9C; Start 62; Stop 86
gtgtcatgcagaaaatggtacaagc

SEQ ID NO: 303211 - DNA, 25 bp, Artificial
  probe
  misc_feature (1)..(25): SEQ ID NO: 1725; WAN024C9C; Start 69; Stop 93
gcagaaaatggtacaagcatgggaa

SEQ ID NO: 303212 - DNA, 25 bp, Artificial
  probe
  misc_feature (1)..(25): SEQ ID NO: 1725; WAN024C9C; Start 14; Stop 38
aagaaattctgtgcaagatgacccc

SEQ ID NO: 303213 - DNA, 25 bp, Artificial
  probe
  misc_feature (1)..(25): SEQ ID NO: 1725; WAN024C9C; Start 60; Stop 84
ccgtgtcatgcagaaaatggtacaa

SEQ ID NO: 303214 - DNA, 25 bp, Artificial
  probe
  misc_feature (1)..(25): SEQ ID NO: 1725; WAN024C9C; Start 63; Stop 87
tgtcatgcagaaaatggtacaagca

SEQ ID NO: 303215 - DNA, 25 bp, Artificial
  probe
  misc_feature (1)..(25): SEQ ID NO: 1725; WAN024C9C; Start 58; Stop 82
gaccgtgtcatgcagaaaatggtac

SEQ ID NO: 303216 - DNA, 25 bp, Artificial
  probe
  misc_feature (1)..(25): SEQ ID NO: 1725; WAN024C9C; Start 64; Stop 88
gtcatgcagaaaatggtacaagcat

SEQ ID NO: 303217 - DNA, 25 bp, Artificial
  probe
  misc_feature (1)..(25): SEQ ID NO: 1725; WAN024C9C; Start 59; Stop 83
accgtgtcatgcagaaaatggtaca

SEQ ID NO: 303218 - DNA, 25 bp, Artificial
  probe
  misc_feature (1)..(25): SEQ ID NO: 1725; WAN024C9C; Start 68; Stop 92
tgcagaaaatggtacaagcatggga

SEQ ID NO: 303219 - DNA, 25 bp, Artificial
  probe
  misc_feature (1)..(25): SEQ ID NO: 1726; WAN024CX8; Start 386; Stop 410
atagtattcaatcggctcagtcaat

SEQ ID NO: 303220 - DNA, 25 bp, Artificial
  probe
  misc_feature (1)..(25): SEQ ID NO: 1726; WAN024CX8; Start 226; Stop 250
ggattggaagatggcgattactata

SEQ ID NO: 303221 - DNA, 25 bp, Artificial
  probe
  misc_feature (1)..(25): SEQ ID NO: 1726; WAN024CX8; Start 229; Stop 253
ttggaagatggcgattactatatgg

SEQ ID NO: 303222 - DNA, 25 bp, Artificial
  probe
  misc_feature (1)..(25): SEQ ID NO: 1726; WAN024CX8; Start 231; Stop 255
ggaagatggcgattactatatggta

SEQ ID NO: 303223 - DNA, 25 bp, Artificial
  probe
  misc_feature (1)..(25): SEQ ID NO: 1726; WAN024CX8; Start 541; Stop 565
agtggattaacagagatacaaggag

SEQ ID NO: 303224 - DNA, 25 bp, Artificial
  probe
  misc_feature (1)..(25): SEQ ID NO: 1726; WAN024CX8; Start 385; Stop 409
gatagtattcaatcggctcagtcaa

SEQ ID NO: 303225 - DNA, 25 bp, Artificial
  probe
  misc_feature (1)..(25): SEQ ID NO: 1726; WAN024CX8; Start 387; Stop 411
tagtattcaatcggctcagtcaatt

SEQ ID NO: 303226 - DNA, 25 bp, Artificial
  probe
  misc_feature (1)..(25): SEQ ID NO: 1726; WAN024CX8; Start 617; Stop 641
acgcatatactacaggtgttgataa

SEQ ID NO: 303227 - DNA, 25 bp, Artificial
  probe
  misc_feature (1)..(25): SEQ ID NO: 1726; WAN024CX8; Start 539; Stop 563
caagtggattaacagagatacaagg

SEQ ID NO: 303228 - DNA, 25 bp, Artificial
  probe
  misc_feature (1)..(25): SEQ ID NO: 1726; WAN024CX8; Start 540; Stop 564
aagtggattaacagagatacaagga

SEQ ID NO: 303229 - DNA, 25 bp, Artificial
  probe
  misc_feature (1)..(25): SEQ ID NO: 1726; WAN024CX8; Start 230; Stop 254
tggaagatggcgattactatatggt

SEQ ID NO: 303230 - DNA, 25 bp, Artificial
  probe
  misc_feature (1)..(25): SEQ ID NO: 1726; WAN024CX8; Start 616; Stop 640
aacgcatatactacaggtgttgata

SEQ ID NO: 303231 - DNA, 25 bp, Artificial
  probe
  misc_feature (1)..(25): SEQ ID NO: 1726; WAN024CX8; Start 228; Stop 252
attggaagatggcgattactatatg

SEQ ID NO: 303232 - DNA, 25 bp, Artificial
  probe
  misc_feature (1)..(25): SEQ ID NO: 1726; WAN024CX8; Start 378; Stop 402
ttcaactgatagtattcaatcggct

SEQ ID NO: 303233 - DNA, 25 bp, Artificial
  probe
  misc_feature (1)..(25): SEQ ID NO: 1726; WAN024CX8; Start 537; Stop 561
gtcaagtggattaacagagatacaa

SEQ ID NO: 303234 - DNA, 25 bp, Artificial
  probe
  misc_feature (1)..(25): SEQ ID NO: 1726; WAN024CX8; Start 379; Stop 403
tcaactgatagtattcaatcggctc

SEQ ID NO: 303235 - DNA, 25 bp, Artificial
  probe
  misc_feature (1)..(25): SEQ ID NO: 1726; WAN024CX8; Start 232; Stop 256
gaagatggcgattactatatggtag

SEQ ID NO: 303236 - DNA, 25 bp, Artificial
  probe
  misc_feature (1)..(25): SEQ ID NO: 1726; WAN024CX8; Start 227; Stop 251
gattggaagatggcgattactatat

SEQ ID NO: 303237 - DNA, 25 bp, Artificial
  probe
  misc_feature (1)..(25): SEQ ID NO: 1726; WAN024CX8; Start 380; Stop 404
caactgatagtattcaatcggctca

SEQ ID NO: 303238 - DNA, 25 bp, Artificial
  probe
  misc_feature (1)..(25): SEQ ID NO: 1726; WAN024CX8; Start 377; Stop 401
attcaactgatagtattcaatcggc

SEQ ID NO: 303239 - DNA, 25 bp, Artificial
  probe
  misc_feature (1)..(25): SEQ ID NO: 1726; WAN024CX8; Start 744; Stop 768
tagattgacagcaggagttggttaa

SEQ ID NO: 303240 - DNA, 25 bp, Artificial
  probe
  misc_feature (1)..(25): SEQ ID NO: 1726; WAN024CX8; Start 538; Stop 562
tcaagtggattaacagagatacaag

SEQ ID NO: 303241 - DNA, 25 bp, Artificial
  probe
  misc_feature (1)..(25): SEQ ID NO: 1726; WAN024CX8; Start 532; Stop 556
ggattgtcaagtggattaacagaga

SEQ ID NO: 303242 - DNA, 25 bp, Artificial
  probe
  misc_feature (1)..(25): SEQ ID NO: 1726; WAN024CX8; Start 531; Stop 555
aggattgtcaagtggattaacagag

SEQ ID NO: 303243 - DNA, 25 bp, Artificial
  probe
  misc_feature (1)..(25): SEQ ID NO: 1726; WAN024CX8; Start 536; Stop 560
tgtcaagtggattaacagagataca

SEQ ID NO: 303244 - DNA, 25 bp, Artificial
  probe
  misc_feature (1)..(25): SEQ ID NO: 1726; WAN024CX8; Start 530; Stop 554
taggattgtcaagtggattaacaga

SEQ ID NO: 303245 - DNA, 25 bp, Artificial
  probe
  misc_feature (1)..(25): SEQ ID NO: 1726; WAN024CX8; Start 527; Stop 551
tgataggattgtcaagtggattaac

SEQ ID NO: 303246 - DNA, 25 bp, Artificial
  probe
  misc_feature (1)..(25): SEQ ID NO: 1726; WAN024CX8; Start 384; Stop 408
tgatagtattcaatcggctcagtca

SEQ ID NO: 303247 - DNA, 25 bp, Artificial
  probe
  misc_feature (1)..(25): SEQ ID NO: 1726; WAN024CX8; Start 533; Stop 557
gattgtcaagtggattaacagagat

SEQ ID NO: 303248 - DNA, 25 bp, Artificial
  probe
  misc_feature (1)..(25): SEQ ID NO: 1726; WAN024CX8; Start 535; Stop 559
ttgtcaagtggattaacagagatac

SEQ ID NO: 303249 - DNA, 25 bp, Artificial
  probe
  misc_feature (1)..(25): SEQ ID NO: 1726; WAN024CX8; Start 529; Stop 553
ataggattgtcaagtggattaacag

SEQ ID NO: 303250 - DNA, 25 bp, Artificial
  probe
  misc_feature (1)..(25): SEQ ID NO: 1726; WAN024CX8; Start 528; Stop 552
gataggattgtcaagtggattaaca

SEQ ID NO: 303251 - DNA, 25 bp, Artificial
  probe
  misc_feature (1)..(25): SEQ ID NO: 1726; WAN024CX8; Start 743; Stop 767
ctagattgacagcaggagttggtta

SEQ ID NO: 303252 - DNA, 25 bp, Artificial
  probe
  misc_feature (1)..(25): SEQ ID NO: 1727; WAN024CKA; Start 517; Stop 541
gtcattgatgctcttacaactactg

SEQ ID NO: 303253 - DNA, 25 bp, Artificial
  probe
  misc_feature (1)..(25): SEQ ID NO: 1727; WAN024CKA; Start 542; Stop 566
ttcaagaggattatacacacactca

SEQ ID NO: 303254 - DNA, 25 bp, Artificial
  probe
  misc_feature (1)..(25): SEQ ID NO: 1727; WAN024CKA; Start 1044; Stop 1068
taatggtgatgctagtcaacagatt

SEQ ID NO: 303255 - DNA, 25 bp, Artificial
  probe
  misc_feature (1)..(25): SEQ ID NO: 1727; WAN024CKA; Start 543; Stop 567
tcaagaggattatacacacactcat

SEQ ID NO: 303256 - DNA, 25 bp, Artificial
  probe
  misc_feature (1)..(25): SEQ ID NO: 1727; WAN024CKA; Start 541; Stop 565
gttcaagaggattatacacacactc

SEQ ID NO: 303257 - DNA, 25 bp, Artificial
  probe
  misc_feature (1)..(25): SEQ ID NO: 1727; WAN024CKA; Start 518; Stop 542
tcattgatgctcttacaactactgt

SEQ ID NO: 303258 - DNA, 25 bp, Artificial
  probe
  misc_feature (1)..(25): SEQ ID NO: 1727; WAN024CKA; Start 516; Stop 540
tgtcattgatgctcttacaactact

SEQ ID NO: 303259 - DNA, 25 bp, Artificial
  probe
  misc_feature (1)..(25): SEQ ID NO: 1727; WAN024CKA; Start 514; Stop 538
actgtcattgatgctcttacaacta

SEQ ID NO: 303260 - DNA, 25 bp, Artificial
  probe
  misc_feature (1)..(25): SEQ ID NO: 1727; WAN024CKA; Start 513; Stop 537
tactgtcattgatgctcttacaact

SEQ ID NO: 303261 - DNA, 25 bp, Artificial
  probe
  misc_feature (1)..(25): SEQ ID NO: 1727; WAN024CKA; Start 522; Stop 546
tgatgctcttacaactactgttcaa

SEQ ID NO: 303262 - DNA, 25 bp, Artificial
  probe
  misc_feature (1)..(25): SEQ ID NO: 1727; WAN024CKA; Start 521; Stop 545
ttgatgctcttacaactactgttca

SEQ ID NO: 303263 - DNA, 25 bp, Artificial
  probe
  misc_feature (1)..(25): SEQ ID NO: 1727; WAN024CKA; Start 515; Stop 539
ctgtcattgatgctcttacaactac

SEQ ID NO: 303264 - DNA, 25 bp, Artificial
  probe
  misc_feature (1)..(25): SEQ ID NO: 1727; WAN024CKA; Start 540; Stop 564
tgttcaagaggattatacacacact

SEQ ID NO: 303265 - DNA, 25 bp, Artificial
  probe
  misc_feature (1)..(25): SEQ ID NO: 1727; WAN024CKA; Start 538; Stop 562
actgttcaagaggattatacacaca

SEQ ID NO: 303266 - DNA, 25 bp, Artificial
  probe
  misc_feature (1)..(25): SEQ ID NO: 1727; WAN024CKA; Start 523; Stop 547
gatgctcttacaactactgttcaag

SEQ ID NO: 303267 - DNA, 25 bp, Artificial
  probe
  misc_feature (1)..(25): SEQ ID NO: 1727; WAN024CKA; Start 1043; Stop 1067
gtaatggtgatgctagtcaacagat

SEQ ID NO: 303268 - DNA, 25 bp, Artificial
  probe
  misc_feature (1)..(25): SEQ ID NO: 1727; WAN024CKA; Start 591; Stop 615
tctcatcttattgactgctcataga

SEQ ID NO: 303269 - DNA, 25 bp, Artificial
  probe
  misc_feature (1)..(25): SEQ ID NO: 1727; WAN024CKA; Start 539; Stop 563
ctgttcaagaggattatacacacac

SEQ ID NO: 303270 - DNA, 25 bp, Artificial
  probe
  misc_feature (1)..(25): SEQ ID NO: 1727; WAN024CKA; Start 519; Stop 543
cattgatgctcttacaactactgtt

SEQ ID NO: 303271 - DNA, 25 bp, Artificial
  probe
  misc_feature (1)..(25): SEQ ID NO: 1727; WAN024CKA; Start 512; Stop 536
atactgtcattgatgctcttacaac

SEQ ID NO: 303272 - DNA, 25 bp, Artificial
  probe
  misc_feature (1)..(25): SEQ ID NO: 1727; WAN024CKA; Start 589; Stop 613
cgtctcatcttattgactgctcata

SEQ ID NO: 303273 - DNA, 25 bp, Artificial
  probe
  misc_feature (1)..(25): SEQ ID NO: 1727; WAN024CKA; Start 520; Stop 544
attgatgctcttacaactactgttc

SEQ ID NO: 303274 - DNA, 25 bp, Artificial
  probe
  misc_feature (1)..(25): SEQ ID NO: 1727; WAN024CKA; Start 250; Stop 274
ttagagaaggaacaaccagatattg

SEQ ID NO: 303275 - DNA, 25 bp, Artificial
  probe
  misc_feature (1)..(25): SEQ ID NO: 1727; WAN024CKA; Start 586; Stop 610
aatcgtctcatcttattgactgctc

SEQ ID NO: 303276 - DNA, 25 bp, Artificial
  probe
  misc_feature (1)..(25): SEQ ID NO: 1727; WAN024CKA; Start 544; Stop 568
caagaggattatacacacactcatt

SEQ ID NO: 303277 - DNA, 25 bp, Artificial
  probe
  misc_feature (1)..(25): SEQ ID NO: 1727; WAN024CKA; Start 1045; Stop 1069
aatggtgatgctagtcaacagattg

SEQ ID NO: 303278 - DNA, 25 bp, Artificial
  probe
  misc_feature (1)..(25): SEQ ID NO: 1727; WAN024CKA; Start 590; Stop 614
gtctcatcttattgactgctcatag

SEQ ID NO: 303279 - DNA, 25 bp, Artificial
  probe
  misc_feature (1)..(25): SEQ ID NO: 1727; WAN024CKA; Start 529; Stop 553
cttacaactactgttcaagaggatt

SEQ ID NO: 303280 - DNA, 25 bp, Artificial
  probe
  misc_feature (1)..(25): SEQ ID NO: 1727; WAN024CKA; Start 511; Stop 535
aatactgtcattgatgctcttacaa

SEQ ID NO: 303281 - DNA, 25 bp, Artificial
  probe
  misc_feature (1)..(25): SEQ ID NO: 1727; WAN024CKA; Start 1038; Stop 1062
atacggtaatggtgatgctagtcaa

SEQ ID NO: 303282 - DNA, 25 bp, Artificial
  probe
  misc_feature (1)..(25): SEQ ID NO: 1727; WAN024CKA; Start 588; Stop 612
tcgtctcatcttattgactgctcat

SEQ ID NO: 303283 - DNA, 25 bp, Artificial
  probe
  misc_feature (1)..(25): SEQ ID NO: 1727; WAN024CKA; Start 587; Stop 611
atcgtctcatcttattgactgctca

SEQ ID NO: 303284 - DNA, 25 bp, Artificial
  probe
  misc_feature (1)..(25): SEQ ID NO: 1727; WAN024CKA; Start 537; Stop 561
tactgttcaagaggattatacacac

SEQ ID NO: 303285 - DNA, 25 bp, Artificial
  probe
  misc_feature (1)..(25): SEQ ID NO: 1728; WAN024FSQ; Start 815; Stop 839
ttaatgatattgttgaagcagtgga

SEQ ID NO: 303286 - DNA, 25 bp, Artificial
  probe
  misc_feature (1)..(25): SEQ ID NO: 1728; WAN024FSQ; Start 607; Stop 631
tatgttggaactatcagtcattggt

SEQ ID NO: 303287 - DNA, 25 bp, Artificial
  probe
  misc_feature (1)..(25): SEQ ID NO: 1728; WAN024FSQ; Start 816; Stop 840
taatgatattgttgaagcagtggat

SEQ ID NO: 303288 - DNA, 25 bp, Artificial
  probe
  misc_feature (1)..(25): SEQ ID NO: 1728; WAN024FSQ; Start 608; Stop 632
atgttggaactatcagtcattggtt

SEQ ID NO: 303289 - DNA, 25 bp, Artificial
  probe
  misc_feature (1)..(25): SEQ ID NO: 1728; WAN024FSQ; Start 94; Stop 118
gagatgctagttctgtatcgctatt

SEQ ID NO: 303290 - DNA, 25 bp, Artificial
  probe
  misc_feature (1)..(25): SEQ ID NO: 1728; WAN024FSQ; Start 95; Stop 119
agatgctagttctgtatcgctattg

SEQ ID NO: 303291 - DNA, 25 bp, Artificial
  probe
  misc_feature (1)..(25): SEQ ID NO: 1728; WAN024FSQ; Start 90; Stop 114
ttatgagatgctagttctgtatcgc

SEQ ID NO: 303292 - DNA, 25 bp, Artificial
  probe
  misc_feature (1)..(25): SEQ ID NO: 1728; WAN024FSQ; Start 98; Stop 122
tgctagttctgtatcgctattggta

SEQ ID NO: 303293 - DNA, 25 bp, Artificial
  probe
  misc_feature (1)..(25): SEQ ID NO: 1728; WAN024FSQ; Start 817; Stop 841
aatgatattgttgaagcagtggatc

SEQ ID NO: 303294 - DNA, 25 bp, Artificial
  probe
  misc_feature (1)..(25): SEQ ID NO: 1728; WAN024FSQ; Start 96; Stop 120
gatgctagttctgtatcgctattgg

SEQ ID NO: 303295 - DNA, 25 bp, Artificial
  probe
  misc_feature (1)..(25): SEQ ID NO: 1728; WAN024FSQ; Start 99; Stop 123
gctagttctgtatcgctattggtac

SEQ ID NO: 303296 - DNA, 25 bp, Artificial
  probe
  misc_feature (1)..(25): SEQ ID NO: 1728; WAN024FSQ; Start 93; Stop 117
tgagatgctagttctgtatcgctat

SEQ ID NO: 303297 - DNA, 25 bp, Artificial
  probe
  misc_feature (1)..(25): SEQ ID NO: 1728; WAN024FSQ; Start 92; Stop 116
atgagatgctagttctgtatcgcta

SEQ ID NO: 303298 - DNA, 25 bp, Artificial
  probe
  misc_feature (1)..(25): SEQ ID NO: 1728; WAN024FSQ; Start 91; Stop 115
tatgagatgctagttctgtatcgct

SEQ ID NO: 303299 - DNA, 25 bp, Artificial
  probe
  misc_feature (1)..(25): SEQ ID NO: 1728; WAN024FSQ; Start 606; Stop 630
atatgttggaactatcagtcattgg

SEQ ID NO: 303300 - DNA, 25 bp, Artificial
  probe
  misc_feature (1)..(25): SEQ ID NO: 1728; WAN024FSQ; Start 313; Stop 337
gcatctcttgtagacaattcagaac

SEQ ID NO: 303301 - DNA, 25 bp, Artificial
  probe
  misc_feature (1)..(25): SEQ ID NO: 1728; WAN024FSQ; Start 97; Stop 121
atgctagttctgtatcgctattggt

SEQ ID NO: 303302 - DNA, 25 bp, Artificial
  probe
  misc_feature (1)..(25): SEQ ID NO: 1728; WAN024FSQ; Start 352; Stop 376
gattgtatggattatcatgtggctt

SEQ ID NO: 303303 - DNA, 25 bp, Artificial
  probe
  misc_feature (1)..(25): SEQ ID NO: 1728; WAN024FSQ; Start 489; Stop 513
tgattataacttggaagagcaggtt

SEQ ID NO: 303304 - DNA, 25 bp, Artificial
  probe
  misc_feature (1)..(25): SEQ ID NO: 1728; WAN024FSQ; Start 709; Stop 733
gctgatattcctgaacatgatagaa

SEQ ID NO: 303305 - DNA, 25 bp, Artificial
  probe
  misc_feature (1)..(25): SEQ ID NO: 1728; WAN024FSQ; Start 708; Stop 732
agctgatattcctgaacatgataga

SEQ ID NO: 303306 - DNA, 25 bp, Artificial
  probe
  misc_feature (1)..(25): SEQ ID NO: 1728; WAN024FSQ; Start 314; Stop 338
catctcttgtagacaattcagaaca

SEQ ID NO: 303307 - DNA, 25 bp, Artificial
  probe
  misc_feature (1)..(25): SEQ ID NO: 1728; WAN024FSQ; Start 487; Stop 511
tctgattataacttggaagagcagg

SEQ ID NO: 303308 - DNA, 25 bp, Artificial
  probe
  misc_feature (1)..(25): SEQ ID NO: 1728; WAN024FSQ; Start 488; Stop 512
ctgattataacttggaagagcaggt

SEQ ID NO: 303309 - DNA, 25 bp, Artificial
  probe
  misc_feature (1)..(25): SEQ ID NO: 1728; WAN024FSQ; Start 416; Stop 440
tagaagagaaactggtcaatagagc

SEQ ID NO: 303310 - DNA, 25 bp, Artificial
  probe
  misc_feature (1)..(25): SEQ ID NO: 1728; WAN024FSQ; Start 208; Stop 232
ccgaaactaaagcaactgaatgata

SEQ ID NO: 303311 - DNA, 25 bp, Artificial
  probe
  misc_feature (1)..(25): SEQ ID NO: 1728; WAN024FSQ; Start 410; Stop 434
aggatttagaagagaaactggtcaa

SEQ ID NO: 303312 - DNA, 25 bp, Artificial
  probe
  misc_feature (1)..(25): SEQ ID NO: 1728; WAN024FSQ; Start 409; Stop 433
aaggatttagaagagaaactggtca

SEQ ID NO: 303313 - DNA, 25 bp, Artificial
  probe
  misc_feature (1)..(25): SEQ ID NO: 1728; WAN024FSQ; Start 753; Stop 777
accacacgagaagatttatcagtat

SEQ ID NO: 303314 - DNA, 25 bp, Artificial
  probe
  misc_feature (1)..(25): SEQ ID NO: 1728; WAN024FSQ; Start 707; Stop 731
aagctgatattcctgaacatgatag

SEQ ID NO: 303315 - DNA, 25 bp, Artificial
  probe
  misc_feature (1)..(25): SEQ ID NO: 1728; WAN024FSQ; Start 752; Stop 776
taccacacgagaagatttatcagta

SEQ ID NO: 303316 - DNA, 25 bp, Artificial
  probe
  misc_feature (1)..(25): SEQ ID NO: 1728; WAN024FSQ; Start 312; Stop 336
tgcatctcttgtagacaattcagaa

SEQ ID NO: 303317 - DNA, 25 bp, Artificial
  probe
  misc_feature (1)..(25): SEQ ID NO: 1728; WAN024FSQ; Start 311; Stop 335
ttgcatctcttgtagacaattcaga

SEQ ID NO: 303318 - DNA, 25 bp, Artificial
  probe
  misc_feature (1)..(25): SEQ ID NO: 1729; WAN024F7C; Start 14; Stop 38
cggatcgtttagaagctataggttt

SEQ ID NO: 303319 - DNA, 25 bp, Artificial
  probe
  misc_feature (1)..(25): SEQ ID NO: 1729; WAN024F7C; Start 9; Stop 33
aaccacggatcgtttagaagctata

SEQ ID NO: 303320 - DNA, 25 bp, Artificial
  probe
  misc_feature (1)..(25): SEQ ID NO: 1729; WAN024F7C; Start 13; Stop 37
acggatcgtttagaagctataggtt

SEQ ID NO: 303321 - DNA, 25 bp, Artificial
  probe
  misc_feature (1)..(25): SEQ ID NO: 1729; WAN024F7C; Start 15; Stop 39
ggatcgtttagaagctataggtttt

SEQ ID NO: 303322 - DNA, 25 bp, Artificial
  probe
  misc_feature (1)..(25): SEQ ID NO: 1729; WAN024F7C; Start 81; Stop 105
ctatctgcaacctcaaaccagtgtt

SEQ ID NO: 303323 - DNA, 25 bp, Artificial
  probe
  misc_feature (1)..(25): SEQ ID NO: 1729; WAN024F7C; Start 12; Stop 36
cacggatcgtttagaagctataggt

SEQ ID NO: 303324 - DNA, 25 bp, Artificial
  probe
  misc_feature (1)..(25): SEQ ID NO: 1729; WAN024F7C; Start 10; Stop 34
accacggatcgtttagaagctatag

SEQ ID NO: 303325 - DNA, 25 bp, Artificial
  probe
  misc_feature (1)..(25): SEQ ID NO: 1729; WAN024F7C; Start 8; Stop 32
aaaccacggatcgtttagaagctat

SEQ ID NO: 303326 - DNA, 25 bp, Artificial
  probe
  misc_feature (1)..(25): SEQ ID NO: 1729; WAN024F7C; Start 79; Stop 103
ctctatctgcaacctcaaaccagtg

SEQ ID NO: 303327 - DNA, 25 bp, Artificial
  probe
  misc_feature (1)..(25): SEQ ID NO: 1729; WAN024F7C; Start 82; Stop 106
tatctgcaacctcaaaccagtgttt

SEQ ID NO: 303328 - DNA, 25 bp, Artificial
  probe
  misc_feature (1)..(25): SEQ ID NO: 1729; WAN024F7C; Start 74; Stop 98
gtcagctctatctgcaacctcaaac

SEQ ID NO: 303329 - DNA, 25 bp, Artificial
  probe
  misc_feature (1)..(25): SEQ ID NO: 1729; WAN024F7C; Start 11; Stop 35
ccacggatcgtttagaagctatagg

SEQ ID NO: 303330 - DNA, 25 bp, Artificial
  probe
  misc_feature (1)..(25): SEQ ID NO: 1729; WAN024F7C; Start 31; Stop 55
ataggttttagtttcatactcttcg

SEQ ID NO: 303331 - DNA, 25 bp, Artificial
  probe
  misc_feature (1)..(25): SEQ ID NO: 1729; WAN024F7C; Start 18; Stop 42
tcgtttagaagctataggttttagt

SEQ ID NO: 303332 - DNA, 25 bp, Artificial
  probe
  misc_feature (1)..(25): SEQ ID NO: 1729; WAN024F7C; Start 32; Stop 56
taggttttagtttcatactcttcga

SEQ ID NO: 303333 - DNA, 25 bp, Artificial
  probe
  misc_feature (1)..(25): SEQ ID NO: 1729; WAN024F7C; Start 80; Stop 104
tctatctgcaacctcaaaccagtgt

SEQ ID NO: 303334 - DNA, 25 bp, Artificial
  probe
  misc_feature (1)..(25): SEQ ID NO: 1729; WAN024F7C; Start 4; Stop 28
atgaaaaccacggatcgtttagaag

SEQ ID NO: 303335 - DNA, 25 bp, Artificial
  probe
  misc_feature (1)..(25): SEQ ID NO: 1729; WAN024F7C; Start 3; Stop 27
gatgaaaaccacggatcgtttagaa

SEQ ID NO: 303336 - DNA, 25 bp, Artificial
  probe
  misc_feature (1)..(25): SEQ ID NO: 1729; WAN024F7C; Start 1; Stop 25
atgatgaaaaccacggatcgtttag

SEQ ID NO: 303337 - DNA, 25 bp, Artificial
  probe
  misc_feature (1)..(25): SEQ ID NO: 1729; WAN024F7C; Start 19; Stop 43
cgtttagaagctataggttttagtt

SEQ ID NO: 303338 - DNA, 25 bp, Artificial
  probe
  misc_feature (1)..(25): SEQ ID NO: 1729; WAN024F7C; Start 2; Stop 26
tgatgaaaaccacggatcgtttaga

SEQ ID NO: 303339 - DNA, 25 bp, Artificial
  probe
  misc_feature (1)..(25): SEQ ID NO: 1729; WAN024F7C; Start 17; Stop 41
atcgtttagaagctataggttttag

SEQ ID NO: 303340 - DNA, 25 bp, Artificial
  probe
  misc_feature (1)..(25): SEQ ID NO: 1729; WAN024F7C; Start 16; Stop 40
gatcgtttagaagctataggtttta

SEQ ID NO: 303341 - DNA, 25 bp, Artificial
  probe
  misc_feature (1)..(25): SEQ ID NO: 1729; WAN024F7C; Start 77; Stop 101
agctctatctgcaacctcaaaccag

SEQ ID NO: 303342 - DNA, 25 bp, Artificial
  probe
  misc_feature (1)..(25): SEQ ID NO: 1729; WAN024F7C; Start 75; Stop 99
tcagctctatctgcaacctcaaacc

SEQ ID NO: 303343 - DNA, 25 bp, Artificial
  probe
  misc_feature (1)..(25): SEQ ID NO: 1729; WAN024F7C; Start 78; Stop 102
gctctatctgcaacctcaaaccagt

SEQ ID NO: 303344 - DNA, 25 bp, Artificial
  probe
  misc_feature (1)..(25): SEQ ID NO: 1729; WAN024F7C; Start 76; Stop 100
cagctctatctgcaacctcaaacca

SEQ ID NO: 303345 - DNA, 25 bp, Artificial
  probe
  misc_feature (1)..(25): SEQ ID NO: 1729; WAN024F7C; Start 7; Stop 31
aaaaccacggatcgtttagaagcta

SEQ ID NO: 303346 - DNA, 25 bp, Artificial
  probe
  misc_feature (1)..(25): SEQ ID NO: 1729; WAN024F7C; Start 28; Stop 52
gctataggttttagtttcatactct

SEQ ID NO: 303347 - DNA, 25 bp, Artificial
  probe
  misc_feature (1)..(25): SEQ ID NO: 1729; WAN024F7C; Start 27; Stop 51
agctataggttttagtttcatactc

SEQ ID NO: 303348 - DNA, 25 bp, Artificial
  probe
  misc_feature (1)..(25): SEQ ID NO: 1729; WAN024F7C; Start 43; Stop 67
ttcatactcttcgaaaatctcttca

SEQ ID NO: 303349 - DNA, 25 bp, Artificial
  probe
  misc_feature (1)..(25): SEQ ID NO: 1729; WAN024F7C; Start 33; Stop 57
aggttttagtttcatactcttcgaa

SEQ ID NO: 303350 - DNA, 25 bp, Artificial
  probe
  misc_feature (1)..(25): SEQ ID NO: 1729; WAN024F7C; Start 22; Stop 46
ttagaagctataggttttagtttca

SEQ ID NO: 303351 - DNA, 25 bp, Artificial
  probe
  misc_feature (1)..(25): SEQ ID NO: 1730; WAN024FPH; Start 985; Stop 1009
attattctttcggctttctttgctt

SEQ ID NO: 303352 - DNA, 25 bp, Artificial
  probe
  misc_feature (1)..(25): SEQ ID NO: 1730; WAN024FPH; Start 996; Stop 1020
ggctttctttgcttcttcagtaata

SEQ ID NO: 303353 - DNA, 25 bp, Artificial
  probe
  misc_feature (1)..(25): SEQ ID NO: 1730; WAN024FPH; Start 986; Stop 1010
ttattctttcggctttctttgcttc

SEQ ID NO: 303354 - DNA, 25 bp, Artificial
  probe
  misc_feature (1)..(25): SEQ ID NO: 1730; WAN024FPH; Start 842; Stop 866
tgatttatgatactgtttggtctgc

SEQ ID NO: 303355 - DNA, 25 bp, Artificial
  probe
  misc_feature (1)..(25): SEQ ID NO: 1730; WAN024FPH; Start 451; Stop 475
ttatcttattatgccatgacagctt

SEQ ID NO: 303356 - DNA, 25 bp, Artificial
  probe
  misc_feature (1)..(25): SEQ ID NO: 1730; WAN024FPH; Start 984; Stop 1008
aattattctttcggctttctttgct

SEQ ID NO: 303357 - DNA, 25 bp, Artificial
  probe
  misc_feature (1)..(25): SEQ ID NO: 1730; WAN024FPH; Start 462; Stop 486
tgccatgacagcttatatgattaat

SEQ ID NO: 303358 - DNA, 25 bp, Artificial
  probe
  misc_feature (1)..(25): SEQ ID NO: 1730; WAN024FPH; Start 461; Stop 485
atgccatgacagcttatatgattaa

SEQ ID NO: 303359 - DNA, 25 bp, Artificial
  probe
  misc_feature (1)..(25): SEQ ID NO: 1730; WAN024FPH; Start 459; Stop 483
ttatgccatgacagcttatatgatt

SEQ ID NO: 303360 - DNA, 25 bp, Artificial
  probe
  misc_feature (1)..(25): SEQ ID NO: 1730; WAN024FPH; Start 453; Stop 477
atcttattatgccatgacagcttat

SEQ ID NO: 303361 - DNA, 25 bp, Artificial
  probe
  misc_feature (1)..(25): SEQ ID NO: 1730; WAN024FPH; Start 987; Stop 1011
tattctttcggctttctttgcttct

SEQ ID NO: 303362 - DNA, 25 bp, Artificial
  probe
  misc_feature (1)..(25): SEQ ID NO: 1730; WAN024FPH; Start 463; Stop 487
gccatgacagcttatatgattaatg

SEQ ID NO: 303363 - DNA, 25 bp, Artificial
  probe
  misc_feature (1)..(25): SEQ ID NO: 1730; WAN024FPH; Start 458; Stop 482
attatgccatgacagcttatatgat

SEQ ID NO: 303364 - DNA, 25 bp, Artificial
  probe
  misc_feature (1)..(25): SEQ ID NO: 1730; WAN024FPH; Start 274; Stop 298
ttcttcaattcctttctgattcgtc

SEQ ID NO: 303365 - DNA, 25 bp, Artificial
  probe
  misc_feature (1)..(25): SEQ ID NO: 1730; WAN024FPH; Start 1148; Stop 1172
ttacttattgttactacaggtggaa

SEQ ID NO: 303366 - DNA, 25 bp, Artificial
  probe
  misc_feature (1)..(25): SEQ ID NO: 1730; WAN024FPH; Start 273; Stop 297
tttcttcaattcctttctgattcgt

SEQ ID NO: 303367 - DNA, 25 bp, Artificial
  probe
  misc_feature (1)..(25): SEQ ID NO: 1730; WAN024FPH; Start 454; Stop 478
tcttattatgccatgacagcttata

SEQ ID NO: 303368 - DNA, 25 bp, Artificial
  probe
  misc_feature (1)..(25): SEQ ID NO: 1730; WAN024FPH; Start 452; Stop 476
tatcttattatgccatgacagctta

SEQ ID NO: 303369 - DNA, 25 bp, Artificial
  probe
  misc_feature (1)..(25): SEQ ID NO: 1730; WAN024FPH; Start 988; Stop 1012
attctttcggctttctttgcttctt

SEQ ID NO: 303370 - DNA, 25 bp, Artificial
  probe
  misc_feature (1)..(25): SEQ ID NO: 1730; WAN024FPH; Start 780; Stop 804
tggagagcgattgttgaacttcttc

SEQ ID NO: 303371 - DNA, 25 bp, Artificial
  probe
  misc_feature (1)..(25): SEQ ID NO: 1730; WAN024FPH; Start 275; Stop 299
tcttcaattcctttctgattcgtcc

SEQ ID NO: 303372 - DNA, 25 bp, Artificial
  probe
  misc_feature (1)..(25): SEQ ID NO: 1730; WAN024FPH; Start 460; Stop 484
tatgccatgacagcttatatgatta

SEQ ID NO: 303373 - DNA, 25 bp, Artificial
  probe
  misc_feature (1)..(25): SEQ ID NO: 1730; WAN024FPH; Start 457; Stop 481
tattatgccatgacagcttatatga

SEQ ID NO: 303374 - DNA, 25 bp, Artificial
  probe
  misc_feature (1)..(25): SEQ ID NO: 1730; WAN024FPH; Start 1153; Stop 1177
tattgttactacaggtggaaagtgc

SEQ ID NO: 303375 - DNA, 25 bp, Artificial
  probe
  misc_feature (1)..(25): SEQ ID NO: 1730; WAN024FPH; Start 276; Stop 300
cttcaattcctttctgattcgtcca

SEQ ID NO: 303376 - DNA, 25 bp, Artificial
  probe
  misc_feature (1)..(25): SEQ ID NO: 1730; WAN024FPH; Start 272; Stop 296
ctttcttcaattcctttctgattcg

SEQ ID NO: 303377 - DNA, 25 bp, Artificial
  probe
  misc_feature (1)..(25): SEQ ID NO: 1730; WAN024FPH; Start 995; Stop 1019
cggctttctttgcttcttcagtaat

SEQ ID NO: 303378 - DNA, 25 bp, Artificial
  probe
  misc_feature (1)..(25): SEQ ID NO: 1730; WAN024FPH; Start 514; Stop 538
atattggaggagcaactgacgtatt

SEQ ID NO: 303379 - DNA, 25 bp, Artificial
  probe
  misc_feature (1)..(25): SEQ ID NO: 1730; WAN024FPH; Start 513; Stop 537
aatattggaggagcaactgacgtat

SEQ ID NO: 303380 - DNA, 25 bp, Artificial
  probe
  misc_feature (1)..(25): SEQ ID NO: 1730; WAN024FPH; Start 997; Stop 1021
gctttctttgcttcttcagtaatat

SEQ ID NO: 303381 - DNA, 25 bp, Artificial
  probe
  misc_feature (1)..(25): SEQ ID NO: 1730; WAN024FPH; Start 1152; Stop 1176
ttattgttactacaggtggaaagtg

SEQ ID NO: 303382 - DNA, 25 bp, Artificial
  probe
  misc_feature (1)..(25): SEQ ID NO: 1730; WAN024FPH; Start 1151; Stop 1175
cttattgttactacaggtggaaagt

SEQ ID NO: 303383 - DNA, 25 bp, Artificial
  probe
  misc_feature (1)..(25): SEQ ID NO: 1730; WAN024FPH; Start 1150; Stop 1174
acttattgttactacaggtggaaag

SEQ ID NO: 303384 - DNA, 25 bp, Artificial
  probe
  misc_feature (1)..(25): SEQ ID NO: 1731; WAN024F8Y; Start 1187; Stop 1211
atgaatggaaggatgttaatcttgc

SEQ ID NO: 303385 - DNA, 25 bp, Artificial
  probe
  misc_feature (1)..(25): SEQ ID NO: 1731; WAN024F8Y; Start 1185; Stop 1209
ggatgaatggaaggatgttaatctt

SEQ ID NO: 303386 - DNA, 25 bp, Artificial
  probe
  misc_feature (1)..(25): SEQ ID NO: 1731; WAN024F8Y; Start 1186; Stop 1210
gatgaatggaaggatgttaatcttg

SEQ ID NO: 303387 - DNA, 25 bp, Artificial
  probe
  misc_feature (1)..(25): SEQ ID NO: 1731; WAN024F8Y; Start 859; Stop 883
cttgagaagagtatgaaggacaata

SEQ ID NO: 303388 - DNA, 25 bp, Artificial
  probe
  misc_feature (1)..(25): SEQ ID NO: 1731; WAN024F8Y; Start 1189; Stop 1213
gaatggaaggatgttaatcttgcag

SEQ ID NO: 303389 - DNA, 25 bp, Artificial
  probe
  misc_feature (1)..(25): SEQ ID NO: 1731; WAN024F8Y; Start 1184; Stop 1208
gggatgaatggaaggatgttaatct

SEQ ID NO: 303390 - DNA, 25 bp, Artificial
  probe
  misc_feature (1)..(25): SEQ ID NO: 1731; WAN024F8Y; Start 1190; Stop 1214
aatggaaggatgttaatcttgcaga

SEQ ID NO: 303391 - DNA, 25 bp, Artificial
  probe
  misc_feature (1)..(25): SEQ ID NO: 1731; WAN024F8Y; Start 1188; Stop 1212
tgaatggaaggatgttaatcttgca

SEQ ID NO: 303392 - DNA, 25 bp, Artificial
  probe
  misc_feature (1)..(25): SEQ ID NO: 1731; WAN024F8Y; Start 748; Stop 772
gttaaattgtcattctgggatggtc

SEQ ID NO: 303393 - DNA, 25 bp, Artificial
  probe
  misc_feature (1)..(25): SEQ ID NO: 1731; WAN024F8Y; Start 711; Stop 735
gaactactgggataaggacaatgtg

SEQ ID NO: 303394 - DNA, 25 bp, Artificial
  probe
  misc_feature (1)..(25): SEQ ID NO: 1731; WAN024F8Y; Start 749; Stop 773
ttaaattgtcattctgggatggtca

SEQ ID NO: 303395 - DNA, 25 bp, Artificial
  probe
  misc_feature (1)..(25): SEQ ID NO: 1731; WAN024F8Y; Start 747; Stop 771
agttaaattgtcattctgggatggt

SEQ ID NO: 303396 - DNA, 25 bp, Artificial
  probe
  misc_feature (1)..(25): SEQ ID NO: 1731; WAN024F8Y; Start 746; Stop 770
aagttaaattgtcattctgggatgg

SEQ ID NO: 303397 - DNA, 25 bp, Artificial
  probe
  misc_feature (1)..(25): SEQ ID NO: 1731; WAN024F8Y; Start 1581; Stop 1605
aacatatttagggtttgactcaggg

SEQ ID NO: 303398 - DNA, 25 bp, Artificial
  probe
  misc_feature (1)..(25): SEQ ID NO: 1731; WAN024F8Y; Start 860; Stop 884
ttgagaagagtatgaaggacaatat

SEQ ID NO: 303399 - DNA, 25 bp, Artificial
  probe
  misc_feature (1)..(25): SEQ ID NO: 1731; WAN024F8Y; Start 1356; Stop 1380
cgtccaatctatgaaacaatccttg

SEQ ID NO: 303400 - DNA, 25 bp, Artificial
  probe
  misc_feature (1)..(25): SEQ ID NO: 1731; WAN024F8Y; Start 1877; Stop 1901
acaaggcagtcactgtagatgaata

SEQ ID NO: 303401 - DNA, 25 bp, Artificial
  probe
  misc_feature (1)..(25): SEQ ID NO: 1731; WAN024F8Y; Start 750; Stop 774
taaattgtcattctgggatggtcaa

SEQ ID NO: 303402 - DNA, 25 bp, Artificial
  probe
  misc_feature (1)..(25): SEQ ID NO: 1731; WAN024F8Y; Start 1355; Stop 1379
gcgtccaatctatgaaacaatcctt

SEQ ID NO: 303403 - DNA, 25 bp, Artificial
  probe
  misc_feature (1)..(25): SEQ ID NO: 1731; WAN024F8Y; Start 511; Stop 535
cagtacactttgaacaaaccagaaa

SEQ ID NO: 303404 - DNA, 25 bp, Artificial
  probe
  misc_feature (1)..(25): SEQ ID NO: 1731; WAN024F8Y; Start 754; Stop 778
ttgtcattctgggatggtcaagata

SEQ ID NO: 303405 - DNA, 25 bp, Artificial
  probe
  misc_feature (1)..(25): SEQ ID NO: 1731; WAN024F8Y; Start 751; Stop 775
aaattgtcattctgggatggtcaag

SEQ ID NO: 303406 - DNA, 25 bp, Artificial
  probe
  misc_feature (1)..(25): SEQ ID NO: 1731; WAN024F8Y; Start 1749; Stop 1773
tattccaactacatctcgtacaggg

SEQ ID NO: 303407 - DNA, 25 bp, Artificial
  probe
  misc_feature (1)..(25): SEQ ID NO: 1731; WAN024F8Y; Start 861; Stop 885
tgagaagagtatgaaggacaatatt

SEQ ID NO: 303408 - DNA, 25 bp, Artificial
  probe
  misc_feature (1)..(25): SEQ ID NO: 1731; WAN024F8Y; Start 510; Stop 534
tcagtacactttgaacaaaccagaa

SEQ ID NO: 303409 - DNA, 25 bp, Artificial
  probe
  misc_feature (1)..(25): SEQ ID NO: 1731; WAN024F8Y; Start 710; Stop 734
cgaactactgggataaggacaatgt

SEQ ID NO: 303410 - DNA, 25 bp, Artificial
  probe
  misc_feature (1)..(25): SEQ ID NO: 1731; WAN024F8Y; Start 755; Stop 779
tgtcattctgggatggtcaagatac

SEQ ID NO: 303411 - DNA, 25 bp, Artificial
  probe
  misc_feature (1)..(25): SEQ ID NO: 1731; WAN024F8Y; Start 753; Stop 777
attgtcattctgggatggtcaagat

SEQ ID NO: 303412 - DNA, 25 bp, Artificial
  probe
  misc_feature (1)..(25): SEQ ID NO: 1731; WAN024F8Y; Start 745; Stop 769
aaagttaaattgtcattctgggatg

SEQ ID NO: 303413 - DNA, 25 bp, Artificial
  probe
  misc_feature (1)..(25): SEQ ID NO: 1731; WAN024F8Y; Start 1360; Stop 1384
caatctatgaaacaatccttggaag

SEQ ID NO: 303414 - DNA, 25 bp, Artificial
  probe
  misc_feature (1)..(25): SEQ ID NO: 1731; WAN024F8Y; Start 744; Stop 768
caaagttaaattgtcattctgggat

SEQ ID NO: 303415 - DNA, 25 bp, Artificial
  probe
  misc_feature (1)..(25): SEQ ID NO: 1731; WAN024F8Y; Start 1876; Stop 1900
gacaaggcagtcactgtagatgaat

SEQ ID NO: 303416 - DNA, 25 bp, Artificial
  probe
  misc_feature (1)..(25): SEQ ID NO: 1731; WAN024F8Y; Start 655; Stop 679
ccttatttgttgaaatccattgtga

SEQ ID NO: 303417 - DNA, 25 bp, Artificial
  probe
  misc_feature (1)..(25): SEQ ID NO: 1732; WAN024AWO; Start 212; Stop 236
gtagctatgttgagatagaagagga

SEQ ID NO: 303418 - DNA, 25 bp, Artificial
  probe
  misc_feature (1)..(25): SEQ ID NO: 1732; WAN024AWO; Start 211; Stop 235
agtagctatgttgagatagaagagg

SEQ ID NO: 303419 - DNA, 25 bp, Artificial
  probe
  misc_feature (1)..(25): SEQ ID NO: 1732; WAN024AWO; Start 213; Stop 237
tagctatgttgagatagaagaggaa

SEQ ID NO: 303420 - DNA, 25 bp, Artificial
  probe
  misc_feature (1)..(25): SEQ ID NO: 1732; WAN024AWO; Start 8; Stop 32
aaatccttgagggagtgaccgatat

SEQ ID NO: 303421 - DNA, 25 bp, Artificial
  probe
  misc_feature (1)..(25): SEQ ID NO: 1732; WAN024AWO; Start 9; Stop 33
aatccttgagggagtgaccgatatg

SEQ ID NO: 303422 - DNA, 25 bp, Artificial
  probe
  misc_feature (1)..(25): SEQ ID NO: 1732; WAN024AWO; Start 1; Stop 25
atgatgaaaatccttgagggagtga

SEQ ID NO: 303423 - DNA, 25 bp, Artificial
  probe
  misc_feature (1)..(25): SEQ ID NO: 1732; WAN024AWO; Start 2; Stop 26
tgatgaaaatccttgagggagtgac

SEQ ID NO: 303424 - DNA, 25 bp, Artificial
  probe
  misc_feature (1)..(25): SEQ ID NO: 1732; WAN024AWO; Start 3; Stop 27
gatgaaaatccttgagggagtgacc

SEQ ID NO: 303425 - DNA, 25 bp, Artificial
  probe
  misc_feature (1)..(25): SEQ ID NO: 1732; WAN024AWO; Start 10; Stop 34
atccttgagggagtgaccgatatgt

SEQ ID NO: 303426 - DNA, 25 bp, Artificial
  probe
  misc_feature (1)..(25): SEQ ID NO: 1732; WAN024AWO; Start 7; Stop 31
aaaatccttgagggagtgaccgata

SEQ ID NO: 303427 - DNA, 25 bp, Artificial
  probe
  misc_feature (1)..(25): SEQ ID NO: 1732; WAN024AWO; Start 735; Stop 759
gcgcaagcgatttgtcatcaatatc

SEQ ID NO: 303428 - DNA, 25 bp, Artificial
  probe
  misc_feature (1)..(25): SEQ ID NO: 1732; WAN024AWO; Start 6; Stop 30
gaaaatccttgagggagtgaccgat

SEQ ID NO: 303429 - DNA, 25 bp, Artificial
  probe
  misc_feature (1)..(25): SEQ ID NO: 1732; WAN024AWO; Start 4; Stop 28
atgaaaatccttgagggagtgaccg

SEQ ID NO: 303430 - DNA, 25 bp, Artificial
  probe
  misc_feature (1)..(25): SEQ ID NO: 1732; WAN024AWO; Start 734; Stop 758
cgcgcaagcgatttgtcatcaatat

SEQ ID NO: 303431 - DNA, 25 bp, Artificial
  probe
  misc_feature (1)..(25): SEQ ID NO: 1733; WAN024B4N; Start 134; Stop 158
ttaagccagaatatacgagtaccac

SEQ ID NO: 303432 - DNA, 25 bp, Artificial
  probe
  misc_feature (1)..(25): SEQ ID NO: 1733; WAN024B4N; Start 133; Stop 157
gttaagccagaatatacgagtacca

SEQ ID NO: 303433 - DNA, 25 bp, Artificial
  probe
  misc_feature (1)..(25): SEQ ID NO: 1733; WAN024B4N; Start 132; Stop 156
tgttaagccagaatatacgagtacc

SEQ ID NO: 303434 - DNA, 25 bp, Artificial
  probe
  misc_feature (1)..(25): SEQ ID NO: 1733; WAN024B4N; Start 131; Stop 155
ttgttaagccagaatatacgagtac

SEQ ID NO: 303435 - DNA, 25 bp, Artificial
  probe
  misc_feature (1)..(25): SEQ ID NO: 1733; WAN024B4N; Start 135; Stop 159
taagccagaatatacgagtaccacg

SEQ ID NO: 303436 - DNA, 25 bp, Artificial
  probe
  misc_feature (1)..(25): SEQ ID NO: 1733; WAN024B4N; Start 130; Stop 154
attgttaagccagaatatacgagta

SEQ ID NO: 303437 - DNA, 25 bp, Artificial
  probe
  misc_feature (1)..(25): SEQ ID NO: 1733; WAN024B4N; Start 129; Stop 153
tattgttaagccagaatatacgagt

SEQ ID NO: 303438 - DNA, 25 bp, Artificial
  probe
  misc_feature (1)..(25): SEQ ID NO: 1733; WAN024B4N; Start 128; Stop 152
ttattgttaagccagaatatacgag

SEQ ID NO: 303439 - DNA, 25 bp, Artificial
  probe
  misc_feature (1)..(25): SEQ ID NO: 1733; WAN024B4N; Start 357; Stop 381
tgacactcgtatcgtctcaatctct

SEQ ID NO: 303440 - DNA, 25 bp, Artificial
  probe
  misc_feature (1)..(25): SEQ ID NO: 1733; WAN024B4N; Start 127; Stop 151
tttattgttaagccagaatatacga

SEQ ID NO: 303441 - DNA, 25 bp, Artificial
  probe
  misc_feature (1)..(25): SEQ ID NO: 1733; WAN024B4N; Start 126; Stop 150
ttttattgttaagccagaatatacg

SEQ ID NO: 303442 - DNA, 25 bp, Artificial
  probe
  misc_feature (1)..(25): SEQ ID NO: 1734; WAN024FQO; Start 269; Stop 293
aagatgtattagagaaggttgtcac

SEQ ID NO: 303443 - DNA, 25 bp, Artificial
  probe
  misc_feature (1)..(25): SEQ ID NO: 1734; WAN024FQO; Start 267; Stop 291
ccaagatgtattagagaaggttgtc

SEQ ID NO: 303444 - DNA, 25 bp, Artificial
  probe
  misc_feature (1)..(25): SEQ ID NO: 1734; WAN024FQO; Start 272; Stop 296
atgtattagagaaggttgtcacaga

SEQ ID NO: 303445 - DNA, 25 bp, Artificial
  probe
  misc_feature (1)..(25): SEQ ID NO: 1734; WAN024FQO; Start 270; Stop 294
agatgtattagagaaggttgtcaca

SEQ ID NO: 303446 - DNA, 25 bp, Artificial
  probe
  misc_feature (1)..(25): SEQ ID NO: 1734; WAN024FQO; Start 273; Stop 297
tgtattagagaaggttgtcacagac

SEQ ID NO: 303447 - DNA, 25 bp, Artificial
  probe
  misc_feature (1)..(25): SEQ ID NO: 1734; WAN024FQO; Start 274; Stop 298
gtattagagaaggttgtcacagact

SEQ ID NO: 303448 - DNA, 25 bp, Artificial
  probe
  misc_feature (1)..(25): SEQ ID NO: 1734; WAN024FQO; Start 276; Stop 300
attagagaaggttgtcacagacttg

SEQ ID NO: 303449 - DNA, 25 bp, Artificial
  probe
  misc_feature (1)..(25): SEQ ID NO: 1734; WAN024FQO; Start 271; Stop 295
gatgtattagagaaggttgtcacag

SEQ ID NO: 303450 - DNA, 25 bp, Artificial
  probe
  misc_feature (1)..(25): SEQ ID NO: 1734; WAN024FQO; Start 268; Stop 292
caagatgtattagagaaggttgtca

SEQ ID NO: 303451 - DNA, 25 bp, Artificial
  probe
  misc_feature (1)..(25): SEQ ID NO: 1734; WAN024FQO; Start 275; Stop 299
tattagagaaggttgtcacagactt

SEQ ID NO: 303452 - DNA, 25 bp, Artificial
  probe
  misc_feature (1)..(25): SEQ ID NO: 1734; WAN024FQO; Start 570; Stop 594
ggtggtagttatggtcgttctcttg

SEQ ID NO: 303453 - DNA, 25 bp, Artificial
  probe
  misc_feature (1)..(25): SEQ ID NO: 1734; WAN024FQO; Start 159; Stop 183
gcgtatttatgtagtcaaccgtaac

SEQ ID NO: 303454 - DNA, 25 bp, Artificial
  probe
  misc_feature (1)..(25): SEQ ID NO: 1734; WAN024FQO; Start 160; Stop 184
cgtatttatgtagtcaaccgtaacc

SEQ ID NO: 303455 - DNA, 25 bp, Artificial
  probe
  misc_feature (1)..(25): SEQ ID NO: 1734; WAN024FQO; Start 73; Stop 97
attattgctttggttgctatcgtaa

SEQ ID NO: 303456 - DNA, 25 bp, Artificial
  probe
  misc_feature (1)..(25): SEQ ID NO: 1734; WAN024FQO; Start 72; Stop 96
gattattgctttggttgctatcgta

SEQ ID NO: 303457 - DNA, 25 bp, Artificial
  probe
  misc_feature (1)..(25): SEQ ID NO: 1734; WAN024FQO; Start 70; Stop 94
ttgattattgctttggttgctatcg

SEQ ID NO: 303458 - DNA, 25 bp, Artificial
  probe
  misc_feature (1)..(25): SEQ ID NO: 1734; WAN024FQO; Start 164; Stop 188
tttatgtagtcaaccgtaaccaagg

SEQ ID NO: 303459 - DNA, 25 bp, Artificial
  probe
  misc_feature (1)..(25): SEQ ID NO: 1734; WAN024FQO; Start 64; Stop 88
cggaaattgattattgctttggttg

SEQ ID NO: 303460 - DNA, 25 bp, Artificial
  probe
  misc_feature (1)..(25): SEQ ID NO: 1734; WAN024FQO; Start 58; Stop 82
tggaaacggaaattgattattgctt

SEQ ID NO: 303461 - DNA, 25 bp, Artificial
  probe
  misc_feature (1)..(25): SEQ ID NO: 1734; WAN024FQO; Start 53; Stop 77
ccttgtggaaacggaaattgattat

SEQ ID NO: 303462 - DNA, 25 bp, Artificial
  probe
  misc_feature (1)..(25): SEQ ID NO: 1734; WAN024FQO; Start 163; Stop 187
atttatgtagtcaaccgtaaccaag

SEQ ID NO: 303463 - DNA, 25 bp, Artificial
  probe
  misc_feature (1)..(25): SEQ ID NO: 1734; WAN024FQO; Start 65; Stop 89
ggaaattgattattgctttggttgc

SEQ ID NO: 303464 - DNA, 25 bp, Artificial
  probe
  misc_feature (1)..(25): SEQ ID NO: 1734; WAN024FQO; Start 63; Stop 87
acggaaattgattattgctttggtt

SEQ ID NO: 303465 - DNA, 25 bp, Artificial
  probe
  misc_feature (1)..(25): SEQ ID NO: 1734; WAN024FQO; Start 62; Stop 86
aacggaaattgattattgctttggt

SEQ ID NO: 303466 - DNA, 25 bp, Artificial
  probe
  misc_feature (1)..(25): SEQ ID NO: 1734; WAN024FQO; Start 48; Stop 72
aaataccttgtggaaacggaaattg

SEQ ID NO: 303467 - DNA, 25 bp, Artificial
  probe
  misc_feature (1)..(25): SEQ ID NO: 1734; WAN024FQO; Start 220; Stop 244
caggcaggttcatatcttgttaaag

SEQ ID NO: 303468 - DNA, 25 bp, Artificial
  probe
  misc_feature (1)..(25): SEQ ID NO: 1734; WAN024FQO; Start 57; Stop 81
gtggaaacggaaattgattattgct

SEQ ID NO: 303469 - DNA, 25 bp, Artificial
  probe
  misc_feature (1)..(25): SEQ ID NO: 1734; WAN024FQO; Start 66; Stop 90
gaaattgattattgctttggttgct

SEQ ID NO: 303470 - DNA, 25 bp, Artificial
  probe
  misc_feature (1)..(25): SEQ ID NO: 1734; WAN024FQO; Start 61; Stop 85
aaacggaaattgattattgctttgg

SEQ ID NO: 303471 - DNA, 25 bp, Artificial
  probe
  misc_feature (1)..(25): SEQ ID NO: 1734; WAN024FQO; Start 46; Stop 70
ttaaataccttgtggaaacggaaat

SEQ ID NO: 303472 - DNA, 25 bp, Artificial
  probe
  misc_feature (1)..(25): SEQ ID NO: 1734; WAN024FQO; Start 74; Stop 98
ttattgctttggttgctatcgtaac

SEQ ID NO: 303473 - DNA, 25 bp, Artificial
  probe
  misc_feature (1)..(25): SEQ ID NO: 1734; WAN024FQO; Start 45; Stop 69
gttaaataccttgtggaaacggaaa

SEQ ID NO: 303474 - DNA, 25 bp, Artificial
  probe
  misc_feature (1)..(25): SEQ ID NO: 1734; WAN024FQO; Start 42; Stop 66
attgttaaataccttgtggaaacgg

SEQ ID NO: 303475 - DNA, 25 bp, Artificial
  probe
  misc_feature (1)..(25): SEQ ID NO: 1735; WAN024COX; Start 381; Stop 405
agttaatgatcgagttcctgaagag

SEQ ID NO: 303476 - DNA, 25 bp, Artificial
  probe
  misc_feature (1)..(25): SEQ ID NO: 1735; WAN024COX; Start 170; Stop 194
tagtgaatcgcaatcaaggagacaa

SEQ ID NO: 303477 - DNA, 25 bp, Artificial
  probe
  misc_feature (1)..(25): SEQ ID NO: 1735; WAN024COX; Start 242; Stop 266
aagactaccgtgagattatcctttc

SEQ ID NO: 303478 - DNA, 25 bp, Artificial
  probe
  misc_feature (1)..(25): SEQ ID NO: 1735; WAN024COX; Start 380; Stop 404
cagttaatgatcgagttcctgaaga

SEQ ID NO: 303479 - DNA, 25 bp, Artificial
  probe
  misc_feature (1)..(25): SEQ ID NO: 1735; WAN024COX; Start 169; Stop 193
gtagtgaatcgcaatcaaggagaca

SEQ ID NO: 303480 - DNA, 25 bp, Artificial
  probe
  misc_feature (1)..(25): SEQ ID NO: 1735; WAN024COX; Start 243; Stop 267
agactaccgtgagattatcctttcg

SEQ ID NO: 303481 - DNA, 25 bp, Artificial
  probe
  misc_feature (1)..(25): SEQ ID NO: 1735; WAN024COX; Start 382; Stop 406
gttaatgatcgagttcctgaagagg

SEQ ID NO: 303482 - DNA, 25 bp, Artificial
  probe
  misc_feature (1)..(25): SEQ ID NO: 1735; WAN024COX; Start 171; Stop 195
agtgaatcgcaatcaaggagacaag

SEQ ID NO: 303483 - DNA, 25 bp, Artificial
  probe
  misc_feature (1)..(25): SEQ ID NO: 1735; WAN024COX; Start 168; Stop 192
cgtagtgaatcgcaatcaaggagac

SEQ ID NO: 303484 - DNA, 25 bp, Artificial
  probe
  misc_feature (1)..(25): SEQ ID NO: 1735; WAN024COX; Start 383; Stop 407
ttaatgatcgagttcctgaagaggc

SEQ ID NO: 303485 - DNA, 25 bp, Artificial
  probe
  misc_feature (1)..(25): SEQ ID NO: 1735; WAN024COX; Start 79; Stop 103
ttaatagtggcacttgtgacaggtg

SEQ ID NO: 303486 - DNA, 25 bp, Artificial
  probe
  misc_feature (1)..(25): SEQ ID NO: 1735; WAN024COX; Start 246; Stop 270
ctaccgtgagattatcctttcgcag

SEQ ID NO: 303487 - DNA, 25 bp, Artificial
  probe
  misc_feature (1)..(25): SEQ ID NO: 1735; WAN024COX; Start 244; Stop 268
gactaccgtgagattatcctttcgc

SEQ ID NO: 303488 - DNA, 25 bp, Artificial
  probe
  misc_feature (1)..(25): SEQ ID NO: 1735; WAN024COX; Start 241; Stop 265
aaagactaccgtgagattatccttt

SEQ ID NO: 303489 - DNA, 25 bp, Artificial
  probe
  misc_feature (1)..(25): SEQ ID NO: 1735; WAN024COX; Start 351; Stop 375
accagttgatacccgtattgtctct

SEQ ID NO: 303490 - DNA, 25 bp, Artificial
  probe
  misc_feature (1)..(25): SEQ ID NO: 1735; WAN024COX; Start 78; Stop 102
tttaatagtggcacttgtgacaggt

SEQ ID NO: 303491 - DNA, 25 bp, Artificial
  probe
  misc_feature (1)..(25): SEQ ID NO: 1735; WAN024COX; Start 55; Stop 79
ttgtggaaacgcaagctaatgattt

SEQ ID NO: 303492 - DNA, 25 bp, Artificial
  probe
  misc_feature (1)..(25): SEQ ID NO: 1735; WAN024COX; Start 240; Stop 264
aaaagactaccgtgagattatcctt

SEQ ID NO: 303493 - DNA, 25 bp, Artificial
  probe
  misc_feature (1)..(25): SEQ ID NO: 1735; WAN024COX; Start 239; Stop 263
taaaagactaccgtgagattatcct

SEQ ID NO: 303494 - DNA, 25 bp, Artificial
  probe
  misc_feature (1)..(25): SEQ ID NO: 1735; WAN024COX; Start 238; Stop 262
gtaaaagactaccgtgagattatcc

SEQ ID NO: 303495 - DNA, 25 bp, Artificial
  probe
  misc_feature (1)..(25): SEQ ID NO: 1735; WAN024COX; Start 245; Stop 269
actaccgtgagattatcctttcgca

SEQ ID NO: 303496 - DNA, 25 bp, Artificial
  probe
  misc_feature (1)..(25): SEQ ID NO: 1735; WAN024COX; Start 379; Stop 403
tcagttaatgatcgagttcctgaag

SEQ ID NO: 303497 - DNA, 25 bp, Artificial
  probe
  misc_feature (1)..(25): SEQ ID NO: 1735; WAN024COX; Start 384; Stop 408
taatgatcgagttcctgaagaggca

SEQ ID NO: 303498 - DNA, 25 bp, Artificial
  probe
  misc_feature (1)..(25): SEQ ID NO: 1735; WAN024COX; Start 529; Stop 553
attaaacgcaatacactaattggtt

SEQ ID NO: 303499 - DNA, 25 bp, Artificial
  probe
  misc_feature (1)..(25): SEQ ID NO: 1735; WAN024COX; Start 165; Stop 189
ttacgtagtgaatcgcaatcaagga

SEQ ID NO: 303500 - DNA, 25 bp, Artificial
  probe
  misc_feature (1)..(25): SEQ ID NO: 1735; WAN024COX; Start 530; Stop 554
ttaaacgcaatacactaattggttt

SEQ ID NO: 303501 - DNA, 25 bp, Artificial
  probe
  misc_feature (1)..(25): SEQ ID NO: 1735; WAN024COX; Start 415; Stop 439
atcgctaactctttgagagaagtag

SEQ ID NO: 303502 - DNA, 25 bp, Artificial
  probe
  misc_feature (1)..(25): SEQ ID NO: 1735; WAN024COX; Start 166; Stop 190
tacgtagtgaatcgcaatcaaggag

SEQ ID NO: 303503 - DNA, 25 bp, Artificial
  probe
  misc_feature (1)..(25): SEQ ID NO: 1735; WAN024COX; Start 163; Stop 187
atttacgtagtgaatcgcaatcaag

SEQ ID NO: 303504 - DNA, 25 bp, Artificial
  probe
  misc_feature (1)..(25): SEQ ID NO: 1735; WAN024COX; Start 161; Stop 185
gaatttacgtagtgaatcgcaatca

SEQ ID NO: 303505 - DNA, 25 bp, Artificial
  probe
  misc_feature (1)..(25): SEQ ID NO: 1735; WAN024COX; Start 162; Stop 186
aatttacgtagtgaatcgcaatcaa

SEQ ID NO: 303506 - DNA, 25 bp, Artificial
  probe
  misc_feature (1)..(25): SEQ ID NO: 1735; WAN024COX; Start 414; Stop 438
tatcgctaactctttgagagaagta

SEQ ID NO: 303507 - DNA, 25 bp, Artificial
  probe
  misc_feature (1)..(25): SEQ ID NO: 1735; WAN024COX; Start 58; Stop 82
tggaaacgcaagctaatgattttaa

SEQ ID NO: 303508 - DNA, 25 bp, Artificial
  probe
  misc_feature (1)..(25): SEQ ID NO: 1736; WAN024B4L; Start 367; Stop 391
atcgtctcaatctctgtcaaggata

SEQ ID NO: 303509 - DNA, 25 bp, Artificial
  probe
  misc_feature (1)..(25): SEQ ID NO: 1736; WAN024B4L; Start 366; Stop 390
tatcgtctcaatctctgtcaaggat

SEQ ID NO: 303510 - DNA, 25 bp, Artificial
  probe
  misc_feature (1)..(25): SEQ ID NO: 1736; WAN024B4L; Start 368; Stop 392
tcgtctcaatctctgtcaaggataa

SEQ ID NO: 303511 - DNA, 25 bp, Artificial
  probe
  misc_feature (1)..(25): SEQ ID NO: 1736; WAN024B4L; Start 365; Stop 389
gtatcgtctcaatctctgtcaagga

SEQ ID NO: 303512 - DNA, 25 bp, Artificial
  probe
  misc_feature (1)..(25): SEQ ID NO: 1736; WAN024B4L; Start 469; Stop 493
gtatctgatgtaacgacgcttgaag

SEQ ID NO: 303513 - DNA, 25 bp, Artificial
  probe
  misc_feature (1)..(25): SEQ ID NO: 1736; WAN024B4L; Start 363; Stop 387
tcgtatcgtctcaatctctgtcaag

SEQ ID NO: 303514 - DNA, 25 bp, Artificial
  probe
  misc_feature (1)..(25): SEQ ID NO: 1736; WAN024B4L; Start 468; Stop 492
agtatctgatgtaacgacgcttgaa

SEQ ID NO: 303515 - DNA, 25 bp, Artificial
  probe
  misc_feature (1)..(25): SEQ ID NO: 1736; WAN024B4L; Start 470; Stop 494
tatctgatgtaacgacgcttgaaga

SEQ ID NO: 303516 - DNA, 25 bp, Artificial
  probe
  misc_feature (1)..(25): SEQ ID NO: 1736; WAN024B4L; Start 467; Stop 491
gagtatctgatgtaacgacgcttga

SEQ ID NO: 303517 - DNA, 25 bp, Artificial
  probe
  misc_feature (1)..(25): SEQ ID NO: 1736; WAN024B4L; Start 364; Stop 388
cgtatcgtctcaatctctgtcaagg

SEQ ID NO: 303518 - DNA, 25 bp, Artificial
  probe
  misc_feature (1)..(25): SEQ ID NO: 1736; WAN024B4L; Start 471; Stop 495
atctgatgtaacgacgcttgaagaa

SEQ ID NO: 303519 - DNA, 25 bp, Artificial
  probe
  misc_feature (1)..(25): SEQ ID NO: 1736; WAN024B4L; Start 369; Stop 393
cgtctcaatctctgtcaaggataaa

SEQ ID NO: 303520 - DNA, 25 bp, Artificial
  probe
  misc_feature (1)..(25): SEQ ID NO: 1736; WAN024B4L; Start 472; Stop 496
tctgatgtaacgacgcttgaagaag

SEQ ID NO: 303521 - DNA, 25 bp, Artificial
  probe
  misc_feature (1)..(25): SEQ ID NO: 1736; WAN024B4L; Start 466; Stop 490
cgagtatctgatgtaacgacgcttg

SEQ ID NO: 303522 - DNA, 25 bp, Artificial
  probe
  misc_feature (1)..(25): SEQ ID NO: 1736; WAN024B4L; Start 656; Stop 680
cacttctaggagtcgttccagattt

SEQ ID NO: 303523 - DNA, 25 bp, Artificial
  probe
  misc_feature (1)..(25): SEQ ID NO: 1736; WAN024B4L; Start 655; Stop 679
ccacttctaggagtcgttccagatt

SEQ ID NO: 303524 - DNA, 25 bp, Artificial
  probe
  misc_feature (1)..(25): SEQ ID NO: 1736; WAN024B4L; Start 357; Stop 381
cgacactcgtatcgtctcaatctct

SEQ ID NO: 303525 - DNA, 25 bp, Artificial
  probe
  misc_feature (1)..(25): SEQ ID NO: 1736; WAN024B4L; Start 356; Stop 380
ccgacactcgtatcgtctcaatctc

SEQ ID NO: 303526 - DNA, 25 bp, Artificial
  probe
  misc_feature (1)..(25): SEQ ID NO: 1736; WAN024B4L; Start 579; Stop 603
aattactgttcttttgattgagttg

SEQ ID NO: 303527 - DNA, 25 bp, Artificial
  probe
  misc_feature (1)..(25): SEQ ID NO: 1736; WAN024B4L; Start 473; Stop 497
ctgatgtaacgacgcttgaagaagc

SEQ ID NO: 303528 - DNA, 25 bp, Artificial
  probe
  misc_feature (1)..(25): SEQ ID NO: 1736; WAN024B4L; Start 578; Stop 602
taattactgttcttttgattgagtt

SEQ ID NO: 303529 - DNA, 25 bp, Artificial
  probe
  misc_feature (1)..(25): SEQ ID NO: 1736; WAN024B4L; Start 465; Stop 489
gcgagtatctgatgtaacgacgctt

SEQ ID NO: 303530 - DNA, 25 bp, Artificial
  probe
  misc_feature (1)..(25): SEQ ID NO: 1736; WAN024B4L; Start 577; Stop 601
gtaattactgttcttttgattgagt

SEQ ID NO: 303531 - DNA, 25 bp, Artificial
  probe
  misc_feature (1)..(25): SEQ ID NO: 1737; WAN024DLY; Start 76; Stop 100
ggtgttggtatcgctttatttatgg

SEQ ID NO: 303532 - DNA, 25 bp, Artificial
  probe
  misc_feature (1)..(25): SEQ ID NO: 1737; WAN024DLY; Start 79; Stop 103
gttggtatcgctttatttatggcag

SEQ ID NO: 303533 - DNA, 25 bp, Artificial
  probe
  misc_feature (1)..(25): SEQ ID NO: 1737; WAN024DLY; Start 86; Stop 110
tcgctttatttatggcaggttatac

SEQ ID NO: 303534 - DNA, 25 bp, Artificial
  probe
  misc_feature (1)..(25): SEQ ID NO: 1737; WAN024DLY; Start 83; Stop 107
gtatcgctttatttatggcaggtta

SEQ ID NO: 303535 - DNA, 25 bp, Artificial
  probe
  misc_feature (1)..(25): SEQ ID NO: 1737; WAN024DLY; Start 77; Stop 101
gtgttggtatcgctttatttatggc

SEQ ID NO: 303536 - DNA, 25 bp, Artificial
  probe
  misc_feature (1)..(25): SEQ ID NO: 1737; WAN024DLY; Start 78; Stop 102
tgttggtatcgctttatttatggca

SEQ ID NO: 303537 - DNA, 25 bp, Artificial
  probe
  misc_feature (1)..(25): SEQ ID NO: 1737; WAN024DLY; Start 82; Stop 106
ggtatcgctttatttatggcaggtt

SEQ ID NO: 303538 - DNA, 25 bp, Artificial
  probe
  misc_feature (1)..(25): SEQ ID NO: 1737; WAN024DLY; Start 80; Stop 104
ttggtatcgctttatttatggcagg

SEQ ID NO: 303539 - DNA, 25 bp, Artificial
  probe
  misc_feature (1)..(25): SEQ ID NO: 1737; WAN024DLY; Start 85; Stop 109
atcgctttatttatggcaggttata

SEQ ID NO: 303540 - DNA, 25 bp, Artificial
  probe
  misc_feature (1)..(25): SEQ ID NO: 1737; WAN024DLY; Start 84; Stop 108
tatcgctttatttatggcaggttat

SEQ ID NO: 303541 - DNA, 25 bp, Artificial
  probe
  misc_feature (1)..(25): SEQ ID NO: 1737; WAN024DLY; Start 81; Stop 105
tggtatcgctttatttatggcaggt

SEQ ID NO: 303542 - DNA, 25 bp, Artificial
  probe
  misc_feature (1)..(25): SEQ ID NO: 1737; WAN024DLY; Start 87; Stop 111
cgctttatttatggcaggttatacc

SEQ ID NO: 303543 - DNA, 25 bp, Artificial
  probe
  misc_feature (1)..(25): SEQ ID NO: 1737; WAN024DLY; Start 88; Stop 112
gctttatttatggcaggttatacca

SEQ ID NO: 303544 - DNA, 25 bp, Artificial
  probe
  misc_feature (1)..(25): SEQ ID NO: 1737; WAN024DLY; Start 107; Stop 131
ataccattggaaaagaccttcgtaa

SEQ ID NO: 303545 - DNA, 25 bp, Artificial
  probe
  misc_feature (1)..(25): SEQ ID NO: 1737; WAN024DLY; Start 105; Stop 129
ttataccattggaaaagaccttcgt

SEQ ID NO: 303546 - DNA, 25 bp, Artificial
  probe
  misc_feature (1)..(25): SEQ ID NO: 1737; WAN024DLY; Start 104; Stop 128
gttataccattggaaaagaccttcg

SEQ ID NO: 303547 - DNA, 25 bp, Artificial
  probe
  misc_feature (1)..(25): SEQ ID NO: 1737; WAN024DLY; Start 108; Stop 132
taccattggaaaagaccttcgtaaa

SEQ ID NO: 303548 - DNA, 25 bp, Artificial
  probe
  misc_feature (1)..(25): SEQ ID NO: 1737; WAN024DLY; Start 106; Stop 130
tataccattggaaaagaccttcgta

SEQ ID NO: 303549 - DNA, 25 bp, Artificial
  probe
  misc_feature (1)..(25): SEQ ID NO: 1737; WAN024DLY; Start 109; Stop 133
accattggaaaagaccttcgtaaaa

SEQ ID NO: 303550 - DNA, 25 bp, Artificial
  probe
  misc_feature (1)..(25): SEQ ID NO: 1737; WAN024DLY; Start 103; Stop 127
ggttataccattggaaaagaccttc

SEQ ID NO: 303551 - DNA, 25 bp, Artificial
  probe
  misc_feature (1)..(25): SEQ ID NO: 1737; WAN024DLY; Start 95; Stop 119
ttatggcaggttataccattggaaa

SEQ ID NO: 303552 - DNA, 25 bp, Artificial
  probe
  misc_feature (1)..(25): SEQ ID NO: 1737; WAN024DLY; Start 94; Stop 118
tttatggcaggttataccattggaa

SEQ ID NO: 303553 - DNA, 25 bp, Artificial
  probe
  misc_feature (1)..(25): SEQ ID NO: 1737; WAN024DLY; Start 93; Stop 117
atttatggcaggttataccattgga

SEQ ID NO: 303554 - DNA, 25 bp, Artificial
  probe
  misc_feature (1)..(25): SEQ ID NO: 1737; WAN024DLY; Start 100; Stop 124
gcaggttataccattggaaaagacc

SEQ ID NO: 303555 - DNA, 25 bp, Artificial
  probe
  misc_feature (1)..(25): SEQ ID NO: 1737; WAN024DLY; Start 99; Stop 123
ggcaggttataccattggaaaagac

SEQ ID NO: 303556 - DNA, 25 bp, Artificial
  probe
  misc_feature (1)..(25): SEQ ID NO: 1737; WAN024DLY; Start 92; Stop 116
tatttatggcaggttataccattgg

SEQ ID NO: 303557 - DNA, 25 bp, Artificial
  probe
  misc_feature (1)..(25): SEQ ID NO: 1737; WAN024DLY; Start 98; Stop 122
tggcaggttataccattggaaaaga

SEQ ID NO: 303558 - DNA, 25 bp, Artificial
  probe
  misc_feature (1)..(25): SEQ ID NO: 1737; WAN024DLY; Start 38; Stop 62
ataaggaattgcaagaaatcaaggg

SEQ ID NO: 303559 - DNA, 25 bp, Artificial
  probe
  misc_feature (1)..(25): SEQ ID NO: 1737; WAN024DLY; Start 39; Stop 63
taaggaattgcaagaaatcaagggt

SEQ ID NO: 303560 - DNA, 25 bp, Artificial
  probe
  misc_feature (1)..(25): SEQ ID NO: 1737; WAN024DLY; Start 49; Stop 73
caagaaatcaagggtggctttggtg

SEQ ID NO: 303561 - DNA, 25 bp, Artificial
  probe
  misc_feature (1)..(25): SEQ ID NO: 1737; WAN024DLY; Start 37; Stop 61
aataaggaattgcaagaaatcaagg

SEQ ID NO: 303562 - DNA, 25 bp, Artificial
  probe
  misc_feature (1)..(25): SEQ ID NO: 1737; WAN024DLY; Start 50; Stop 74
aagaaatcaagggtggctttggtgt

SEQ ID NO: 303563 - DNA, 25 bp, Artificial
  probe
  misc_feature (1)..(25): SEQ ID NO: 1737; WAN024DLY; Start 40; Stop 64
aaggaattgcaagaaatcaagggtg

SEQ ID NO: 303564 - DNA, 25 bp, Artificial
  probe
  misc_feature (1)..(25): SEQ ID NO: 1738; WAN024DB3; Start 188; Stop 212
accttgagactctttctgatatgac

SEQ ID NO: 303565 - DNA, 25 bp, Artificial
  probe
  misc_feature (1)..(25): SEQ ID NO: 1738; WAN024DB3; Start 189; Stop 213
ccttgagactctttctgatatgacc

SEQ ID NO: 303566 - DNA, 25 bp, Artificial
  probe
  misc_feature (1)..(25): SEQ ID NO: 1738; WAN024DB3; Start 187; Stop 211
gaccttgagactctttctgatatga

SEQ ID NO: 303567 - DNA, 25 bp, Artificial
  probe
  misc_feature (1)..(25): SEQ ID NO: 1738; WAN024DB3; Start 186; Stop 210
ggaccttgagactctttctgatatg

SEQ ID NO: 303568 - DNA, 25 bp, Artificial
  probe
  misc_feature (1)..(25): SEQ ID NO: 1738; WAN024DB3; Start 185; Stop 209
aggaccttgagactctttctgatat

SEQ ID NO: 303569 - DNA, 25 bp, Artificial
  probe
  misc_feature (1)..(25): SEQ ID NO: 1738; WAN024DB3; Start 193; Stop 217
gagactctttctgatatgaccgttc

SEQ ID NO: 303570 - DNA, 25 bp, Artificial
  probe
  misc_feature (1)..(25): SEQ ID NO: 1738; WAN024DB3; Start 190; Stop 214
cttgagactctttctgatatgaccg

SEQ ID NO: 303571 - DNA, 25 bp, Artificial
  probe
  misc_feature (1)..(25): SEQ ID NO: 1738; WAN024DB3; Start 135; Stop 159
cgataagaaagttgtcagcattgat

SEQ ID NO: 303572 - DNA, 25 bp, Artificial
  probe
  misc_feature (1)..(25): SEQ ID NO: 1738; WAN024DB3; Start 196; Stop 220
actctttctgatatgaccgttcaag

SEQ ID NO: 303573 - DNA, 25 bp, Artificial
  probe
  misc_feature (1)..(25): SEQ ID NO: 1738; WAN024DB3; Start 195; Stop 219
gactctttctgatatgaccgttcaa

SEQ ID NO: 303574 - DNA, 25 bp, Artificial
  probe
  misc_feature (1)..(25): SEQ ID NO: 1738; WAN024DB3; Start 201; Stop 225
ttctgatatgaccgttcaagccatc

SEQ ID NO: 303575 - DNA, 25 bp, Artificial
  probe
  misc_feature (1)..(25): SEQ ID NO: 1738; WAN024DB3; Start 192; Stop 216
tgagactctttctgatatgaccgtt

SEQ ID NO: 303576 - DNA, 25 bp, Artificial
  probe
  misc_feature (1)..(25): SEQ ID NO: 1738; WAN024DB3; Start 191; Stop 215
ttgagactctttctgatatgaccgt

SEQ ID NO: 303577 - DNA, 25 bp, Artificial
  probe
  misc_feature (1)..(25): SEQ ID NO: 1738; WAN024DB3; Start 194; Stop 218
agactctttctgatatgaccgttca

SEQ ID NO: 303578 - DNA, 25 bp, Artificial
  probe
  misc_feature (1)..(25): SEQ ID NO: 1738; WAN024DB3; Start 206; Stop 230
atatgaccgttcaagccatcaactc

SEQ ID NO: 303579 - DNA, 25 bp, Artificial
  probe
  misc_feature (1)..(25): SEQ ID NO: 1738; WAN024DB3; Start 205; Stop 229
gatatgaccgttcaagccatcaact

SEQ ID NO: 303580 - DNA, 25 bp, Artificial
  probe
  misc_feature (1)..(25): SEQ ID NO: 1738; WAN024DB3; Start 184; Stop 208
gaggaccttgagactctttctgata

SEQ ID NO: 303581 - DNA, 25 bp, Artificial
  probe
  misc_feature (1)..(25): SEQ ID NO: 1738; WAN024DB3; Start 197; Stop 221
ctctttctgatatgaccgttcaagc

SEQ ID NO: 303582 - DNA, 25 bp, Artificial
  probe
  misc_feature (1)..(25): SEQ ID NO: 1738; WAN024DB3; Start 136; Stop 160
gataagaaagttgtcagcattgatt

SEQ ID NO: 303583 - DNA, 25 bp, Artificial
  probe
  misc_feature (1)..(25): SEQ ID NO: 1738; WAN024DB3; Start 134; Stop 158
gcgataagaaagttgtcagcattga

SEQ ID NO: 303584 - DNA, 25 bp, Artificial
  probe
  misc_feature (1)..(25): SEQ ID NO: 1738; WAN024DB3; Start 137; Stop 161
ataagaaagttgtcagcattgattt

SEQ ID NO: 303585 - DNA, 25 bp, Artificial
  probe
  misc_feature (1)..(25): SEQ ID NO: 1738; WAN024DB3; Start 200; Stop 224
tttctgatatgaccgttcaagccat

SEQ ID NO: 303586 - DNA, 25 bp, Artificial
  probe
  misc_feature (1)..(25): SEQ ID NO: 1738; WAN024DB3; Start 133; Stop 157
ggcgataagaaagttgtcagcattg

SEQ ID NO: 303587 - DNA, 25 bp, Artificial
  probe
  misc_feature (1)..(25): SEQ ID NO: 1738; WAN024DB3; Start 139; Stop 163
aagaaagttgtcagcattgatttca

SEQ ID NO: 303588 - DNA, 25 bp, Artificial
  probe
  misc_feature (1)..(25): SEQ ID NO: 1738; WAN024DB3; Start 279; Stop 303
cgctgggaaattacctttctaacta

SEQ ID NO: 303589 - DNA, 25 bp, Artificial
  probe
  misc_feature (1)..(25): SEQ ID NO: 1738; WAN024DB3; Start 140; Stop 164
agaaagttgtcagcattgatttcaa

SEQ ID NO: 303590 - DNA, 25 bp, Artificial
  probe
  misc_feature (1)..(25): SEQ ID NO: 1738; WAN024DB3; Start 198; Stop 222
tctttctgatatgaccgttcaagcc

SEQ ID NO: 303591 - DNA, 25 bp, Artificial
  probe
  misc_feature (1)..(25): SEQ ID NO: 1738; WAN024DB3; Start 132; Stop 156
tggcgataagaaagttgtcagcatt

SEQ ID NO: 303592 - DNA, 25 bp, Artificial
  probe
  misc_feature (1)..(25): SEQ ID NO: 1738; WAN024DB3; Start 207; Stop 231
tatgaccgttcaagccatcaactct

SEQ ID NO: 303593 - DNA, 25 bp, Artificial
  probe
  misc_feature (1)..(25): SEQ ID NO: 1738; WAN024DB3; Start 280; Stop 304
gctgggaaattacctttctaactaa

SEQ ID NO: 303594 - DNA, 25 bp, Artificial
  probe
  misc_feature (1)..(25): SEQ ID NO: 1738; WAN024DB3; Start 277; Stop 301
ttcgctgggaaattacctttctaac

SEQ ID NO: 303595 - DNA, 25 bp, Artificial
  probe
  misc_feature (1)..(25): SEQ ID NO: 1738; WAN024DB3; Start 199; Stop 223
ctttctgatatgaccgttcaagcca

SEQ ID NO: 303596 - DNA, 25 bp, Artificial
  probe
  misc_feature (1)..(25): SEQ ID NO: 1738; WAN024DB3; Start 138; Stop 162
taagaaagttgtcagcattgatttc

SEQ ID NO: 303597 - DNA, 25 bp, Artificial
  probe
  misc_feature (1)..(25): SEQ ID NO: 1739; WAN024DWW; Start 1265; Stop 1289
gcattgtgattggtcttgttcttat

SEQ ID NO: 303598 - DNA, 25 bp, Artificial
  probe
  misc_feature (1)..(25): SEQ ID NO: 1739; WAN024DWW; Start 307; Stop 331
gtgttcaatatcttaatcgctcgtt

SEQ ID NO: 303599 - DNA, 25 bp, Artificial
  probe
  misc_feature (1)..(25): SEQ ID NO: 1739; WAN024DWW; Start 304; Stop 328
atggtgttcaatatcttaatcgctc

SEQ ID NO: 303600 - DNA, 25 bp, Artificial
  probe
  misc_feature (1)..(25): SEQ ID NO: 1739; WAN024DWW; Start 306; Stop 330
ggtgttcaatatcttaatcgctcgt

SEQ ID NO: 303601 - DNA, 25 bp, Artificial
  probe
  misc_feature (1)..(25): SEQ ID NO: 1739; WAN024DWW; Start 305; Stop 329
tggtgttcaatatcttaatcgctcg

SEQ ID NO: 303602 - DNA, 25 bp, Artificial
  probe
  misc_feature (1)..(25): SEQ ID NO: 1739; WAN024DWW; Start 443; Stop 467
taggaggattagcactcggtattat

SEQ ID NO: 303603 - DNA, 25 bp, Artificial
  probe
  misc_feature (1)..(25): SEQ ID NO: 1739; WAN024DWW; Start 1264; Stop 1288
ggcattgtgattggtcttgttctta

SEQ ID NO: 303604 - DNA, 25 bp, Artificial
  probe
  misc_feature (1)..(25): SEQ ID NO: 1739; WAN024DWW; Start 738; Stop 762
aatcagtagtggtacaagtggtcta

SEQ ID NO: 303605 - DNA, 25 bp, Artificial
  probe
  misc_feature (1)..(25): SEQ ID NO: 1739; WAN024DWW; Start 445; Stop 469
ggaggattagcactcggtattatta

SEQ ID NO: 303606 - DNA, 25 bp, Artificial
  probe
  misc_feature (1)..(25): SEQ ID NO: 1739; WAN024DWW; Start 444; Stop 468
aggaggattagcactcggtattatt

SEQ ID NO: 303607 - DNA, 25 bp, Artificial
  probe
  misc_feature (1)..(25): SEQ ID NO: 1739; WAN024DWW; Start 301; Stop 325
ggcatggtgttcaatatcttaatcg

SEQ ID NO: 303608 - DNA, 25 bp, Artificial
  probe
  misc_feature (1)..(25): SEQ ID NO: 1739; WAN024DWW; Start 1266; Stop 1290
cattgtgattggtcttgttcttatt

SEQ ID NO: 303609 - DNA, 25 bp, Artificial
  probe
  misc_feature (1)..(25): SEQ ID NO: 1739; WAN024DWW; Start 739; Stop 763
atcagtagtggtacaagtggtctag

SEQ ID NO: 303610 - DNA, 25 bp, Artificial
  probe
  misc_feature (1)..(25): SEQ ID NO: 1739; WAN024DWW; Start 448; Stop 472
ggattagcactcggtattattatga

SEQ ID NO: 303611 - DNA, 25 bp, Artificial
  probe
  misc_feature (1)..(25): SEQ ID NO: 1739; WAN024DWW; Start 447; Stop 471
aggattagcactcggtattattatg

SEQ ID NO: 303612 - DNA, 25 bp, Artificial
  probe
  misc_feature (1)..(25): SEQ ID NO: 1739; WAN024DWW; Start 303; Stop 327
catggtgttcaatatcttaatcgct

SEQ ID NO: 303613 - DNA, 25 bp, Artificial
  probe
  misc_feature (1)..(25): SEQ ID NO: 1739; WAN024DWW; Start 299; Stop 323
caggcatggtgttcaatatcttaat

SEQ ID NO: 303614 - DNA, 25 bp, Artificial
  probe
  misc_feature (1)..(25): SEQ ID NO: 1739; WAN024DWW; Start 990; Stop 1014
aattatgattgcttcaggaacggtt

SEQ ID NO: 303615 - DNA, 25 bp, Artificial
  probe
  misc_feature (1)..(25): SEQ ID NO: 1739; WAN024DWW; Start 300; Stop 324
aggcatggtgttcaatatcttaatc

SEQ ID NO: 303616 - DNA, 25 bp, Artificial
  probe
  misc_feature (1)..(25): SEQ ID NO: 1739; WAN024DWW; Start 302; Stop 326
gcatggtgttcaatatcttaatcgc

SEQ ID NO: 303617 - DNA, 25 bp, Artificial
  probe
  misc_feature (1)..(25): SEQ ID NO: 1739; WAN024DWW; Start 442; Stop 466
ctaggaggattagcactcggtatta

SEQ ID NO: 303618 - DNA, 25 bp, Artificial
  probe
  misc_feature (1)..(25): SEQ ID NO: 1739; WAN024DWW; Start 741; Stop 765
cagtagtggtacaagtggtctagtt

SEQ ID NO: 303619 - DNA, 25 bp, Artificial
  probe
  misc_feature (1)..(25): SEQ ID NO: 1739; WAN024DWW; Start 436; Stop 460
atcttactaggaggattagcactcg

SEQ ID NO: 303620 - DNA, 25 bp, Artificial
  probe
  misc_feature (1)..(25): SEQ ID NO: 1739; WAN024DWW; Start 1000; Stop 1024
gcttcaggaacggttgttatcttac

SEQ ID NO: 303621 - DNA, 25 bp, Artificial
  probe
  misc_feature (1)..(25): SEQ ID NO: 1739; WAN024DWW; Start 991; Stop 1015
attatgattgcttcaggaacggttg

SEQ ID NO: 303622 - DNA, 25 bp, Artificial
  probe
  misc_feature (1)..(25): SEQ ID NO: 1739; WAN024DWW; Start 298; Stop 322
gcaggcatggtgttcaatatcttaa

SEQ ID NO: 303623 - DNA, 25 bp, Artificial
  probe
  misc_feature (1)..(25): SEQ ID NO: 1739; WAN024DWW; Start 999; Stop 1023
tgcttcaggaacggttgttatctta

SEQ ID NO: 303624 - DNA, 25 bp, Artificial
  probe
  misc_feature (1)..(25): SEQ ID NO: 1739; WAN024DWW; Start 867; Stop 891
ttcagagcgtcttgtacctaattca

SEQ ID NO: 303625 - DNA, 25 bp, Artificial
  probe
  misc_feature (1)..(25): SEQ ID NO: 1739; WAN024DWW; Start 440; Stop 464
tactaggaggattagcactcggtat

SEQ ID NO: 303626 - DNA, 25 bp, Artificial
  probe
  misc_feature (1)..(25): SEQ ID NO: 1739; WAN024DWW; Start 1012; Stop 1036
gttgttatcttaccaggtgttgtgc

SEQ ID NO: 303627 - DNA, 25 bp, Artificial
  probe
  misc_feature (1)..(25): SEQ ID NO: 1739; WAN024DWW; Start 868; Stop 892
tcagagcgtcttgtacctaattcaa

SEQ ID NO: 303628 - DNA, 25 bp, Artificial
  probe
  misc_feature (1)..(25): SEQ ID NO: 1739; WAN024DWW; Start 996; Stop 1020
gattgcttcaggaacggttgttatc

SEQ ID NO: 303629 - DNA, 25 bp, Artificial
  probe
  misc_feature (1)..(25): SEQ ID NO: 1739; WAN024DWW; Start 740; Stop 764
tcagtagtggtacaagtggtctagt

SEQ ID NO: 303630 - DNA, 25 bp, Artificial
  probe
  misc_feature (1)..(25): SEQ ID NO: 1740; WAN024DVT; Start 219; Stop 243
tattcttggagttacttccgctatg

SEQ ID NO: 303631 - DNA, 25 bp, Artificial
  probe
  misc_feature (1)..(25): SEQ ID NO: 1740; WAN024DVT; Start 218; Stop 242
ttattcttggagttacttccgctat

SEQ ID NO: 303632 - DNA, 25 bp, Artificial
  probe
  misc_feature (1)..(25): SEQ ID NO: 1740; WAN024DVT; Start 749; Stop 773
ttagtgttatggctattggagttat

SEQ ID NO: 303633 - DNA, 25 bp, Artificial
  probe
  misc_feature (1)..(25): SEQ ID NO: 1740; WAN024DVT; Start 76; Stop 100
aactatgagagaatgcagaacctag

SEQ ID NO: 303634 - DNA, 25 bp, Artificial
  probe
  misc_feature (1)..(25): SEQ ID NO: 1740; WAN024DVT; Start 75; Stop 99
gaactatgagagaatgcagaaccta

SEQ ID NO: 303635 - DNA, 25 bp, Artificial
  probe
  misc_feature (1)..(25): SEQ ID NO: 1740; WAN024DVT; Start 238; Stop 262
gctatggaagaacaagaaggaaatg

SEQ ID NO: 303636 - DNA, 25 bp, Artificial
  probe
  misc_feature (1)..(25): SEQ ID NO: 1740; WAN024DVT; Start 244; Stop 268
gaagaacaagaaggaaatgaaggtg

SEQ ID NO: 303637 - DNA, 25 bp, Artificial
  probe
  misc_feature (1)..(25): SEQ ID NO: 1740; WAN024DVT; Start 72; Stop 96
atggaactatgagagaatgcagaac

SEQ ID NO: 303638 - DNA, 25 bp, Artificial
  probe
  misc_feature (1)..(25): SEQ ID NO: 1740; WAN024DVT; Start 241; Stop 265
atggaagaacaagaaggaaatgaag

SEQ ID NO: 303639 - DNA, 25 bp, Artificial
  probe
  misc_feature (1)..(25): SEQ ID NO: 1740; WAN024DVT; Start 746; Stop 770
tctttagtgttatggctattggagt

SEQ ID NO: 303640 - DNA, 25 bp, Artificial
  probe
  misc_feature (1)..(25): SEQ ID NO: 1740; WAN024DVT; Start 134; Stop 158
aactatacccagacaaagattcagc

SEQ ID NO: 303641 - DNA, 25 bp, Artificial
  probe
  misc_feature (1)..(25): SEQ ID NO: 1740; WAN024DVT; Start 71; Stop 95
catggaactatgagagaatgcagaa

SEQ ID NO: 303642 - DNA, 25 bp, Artificial
  probe
  misc_feature (1)..(25): SEQ ID NO: 1740; WAN024DVT; Start 674; Stop 698
gatttatccctatggctttgacttt

SEQ ID NO: 303643 - DNA, 25 bp, Artificial
  probe
  misc_feature (1)..(25): SEQ ID NO: 1740; WAN024DVT; Start 243; Stop 267
ggaagaacaagaaggaaatgaaggt

SEQ ID NO: 303644 - DNA, 25 bp, Artificial
  probe
  misc_feature (1)..(25): SEQ ID NO: 1740; WAN024DVT; Start 242; Stop 266
tggaagaacaagaaggaaatgaagg

SEQ ID NO: 303645 - DNA, 25 bp, Artificial
  probe
  misc_feature (1)..(25): SEQ ID NO: 1740; WAN024DVT; Start 362; Stop 386
ttagtattggtgcgtcttattctaa

SEQ ID NO: 303646 - DNA, 25 bp, Artificial
  probe
  misc_feature (1)..(25): SEQ ID NO: 1740; WAN024DVT; Start 747; Stop 771
ctttagtgttatggctattggagtt

SEQ ID NO: 303647 - DNA, 25 bp, Artificial
  probe
  misc_feature (1)..(25): SEQ ID NO: 1740; WAN024DVT; Start 239; Stop 263
ctatggaagaacaagaaggaaatga

SEQ ID NO: 303648 - DNA, 25 bp, Artificial
  probe
  misc_feature (1)..(25): SEQ ID NO: 1740; WAN024DVT; Start 237; Stop 261
cgctatggaagaacaagaaggaaat

SEQ ID NO: 303649 - DNA, 25 bp, Artificial
  probe
  misc_feature (1)..(25): SEQ ID NO: 1740; WAN024DVT; Start 364; Stop 388
agtattggtgcgtcttattctaaag

SEQ ID NO: 303650 - DNA, 25 bp, Artificial
  probe
  misc_feature (1)..(25): SEQ ID NO: 1740; WAN024DVT; Start 133; Stop 157
aaactatacccagacaaagattcag

SEQ ID NO: 303651 - DNA, 25 bp, Artificial
  probe
  misc_feature (1)..(25): SEQ ID NO: 1740; WAN024DVT; Start 745; Stop 769
atctttagtgttatggctattggag

SEQ ID NO: 303652 - DNA, 25 bp, Artificial
  probe
  misc_feature (1)..(25): SEQ ID NO: 1740; WAN024DVT; Start 314; Stop 338
ctggtctaggagatagtttgttctg

SEQ ID NO: 303653 - DNA, 25 bp, Artificial
  probe
  misc_feature (1)..(25): SEQ ID NO: 1740; WAN024DVT; Start 240; Stop 264
tatggaagaacaagaaggaaatgaa

SEQ ID NO: 303654 - DNA, 25 bp, Artificial
  probe
  misc_feature (1)..(25): SEQ ID NO: 1740; WAN024DVT; Start 279; Stop 303
tactggtattaaagttggcttgatg

SEQ ID NO: 303655 - DNA, 25 bp, Artificial
  probe
  misc_feature (1)..(25): SEQ ID NO: 1740; WAN024DVT; Start 266; Stop 290
gtgcagcttcaattactggtattaa

SEQ ID NO: 303656 - DNA, 25 bp, Artificial
  probe
  misc_feature (1)..(25): SEQ ID NO: 1740; WAN024DVT; Start 245; Stop 269
aagaacaagaaggaaatgaaggtgc

SEQ ID NO: 303657 - DNA, 25 bp, Artificial
  probe
  misc_feature (1)..(25): SEQ ID NO: 1740; WAN024DVT; Start 280; Stop 304
actggtattaaagttggcttgatgg

SEQ ID NO: 303658 - DNA, 25 bp, Artificial
  probe
  misc_feature (1)..(25): SEQ ID NO: 1740; WAN024DVT; Start 220; Stop 244
attcttggagttacttccgctatgg

SEQ ID NO: 303659 - DNA, 25 bp, Artificial
  probe
  misc_feature (1)..(25): SEQ ID NO: 1740; WAN024DVT; Start 744; Stop 768
aatctttagtgttatggctattgga

SEQ ID NO: 303660 - DNA, 25 bp, Artificial
  probe
  misc_feature (1)..(25): SEQ ID NO: 1740; WAN024DVT; Start 315; Stop 339
tggtctaggagatagtttgttctgg

SEQ ID NO: 303661 - DNA, 25 bp, Artificial
  probe
  misc_feature (1)..(25): SEQ ID NO: 1740; WAN024DVT; Start 74; Stop 98
ggaactatgagagaatgcagaacct

SEQ ID NO: 303662 - DNA, 25 bp, Artificial
  probe
  misc_feature (1)..(25): SEQ ID NO: 1740; WAN024DVT; Start 281; Stop 305
ctggtattaaagttggcttgatggg

SEQ ID NO: 303663 - DNA, 25 bp, Artificial
  probe
  misc_feature (1)..(25): SEQ ID NO: 1741; WAN024GAB; Start 128; Stop 152
actacaacgatgatgctatttacca

SEQ ID NO: 303664 - DNA, 25 bp, Artificial
  probe
  misc_feature (1)..(25): SEQ ID NO: 1741; WAN024GAB; Start 378; Stop 402
gccttatttcctcggtaatctctat

SEQ ID NO: 303665 - DNA, 25 bp, Artificial
  probe
  misc_feature (1)..(25): SEQ ID NO: 1741; WAN024GAB; Start 375; Stop 399
aatgccttatttcctcggtaatctc

SEQ ID NO: 303666 - DNA, 25 bp, Artificial
  probe
  misc_feature (1)..(25): SEQ ID NO: 1741; WAN024GAB; Start 129; Stop 153
ctacaacgatgatgctatttaccaa

SEQ ID NO: 303667 - DNA, 25 bp, Artificial
  probe
  misc_feature (1)..(25): SEQ ID NO: 1741; WAN024GAB; Start 377; Stop 401
tgccttatttcctcggtaatctcta

SEQ ID NO: 303668 - DNA, 25 bp, Artificial
  probe
  misc_feature (1)..(25): SEQ ID NO: 1741; WAN024GAB; Start 130; Stop 154
tacaacgatgatgctatttaccaaa

SEQ ID NO: 303669 - DNA, 25 bp, Artificial
  probe
  misc_feature (1)..(25): SEQ ID NO: 1741; WAN024GAB; Start 376; Stop 400
atgccttatttcctcggtaatctct

SEQ ID NO: 303670 - DNA, 25 bp, Artificial
  probe
  misc_feature (1)..(25): SEQ ID NO: 1741; WAN024GAB; Start 127; Stop 151
tactacaacgatgatgctatttacc

SEQ ID NO: 303671 - DNA, 25 bp, Artificial
  probe
  misc_feature (1)..(25): SEQ ID NO: 1741; WAN024GAB; Start 374; Stop 398
aaatgccttatttcctcggtaatct

SEQ ID NO: 303672 - DNA, 25 bp, Artificial
  probe
  misc_feature (1)..(25): SEQ ID NO: 1741; WAN024GAB; Start 373; Stop 397
caaatgccttatttcctcggtaatc

SEQ ID NO: 303673 - DNA, 25 bp, Artificial
  probe
  misc_feature (1)..(25): SEQ ID NO: 1741; WAN024GAB; Start 368; Stop 392
gtaaacaaatgccttatttcctcgg

SEQ ID NO: 303674 - DNA, 25 bp, Artificial
  probe
  misc_feature (1)..(25): SEQ ID NO: 1741; WAN024GAB; Start 372; Stop 396
acaaatgccttatttcctcggtaat

SEQ ID NO: 303675 - DNA, 25 bp, Artificial
  probe
  misc_feature (1)..(25): SEQ ID NO: 1741; WAN024GAB; Start 371; Stop 395
aacaaatgccttatttcctcggtaa

SEQ ID NO: 303676 - DNA, 25 bp, Artificial
  probe
  misc_feature (1)..(25): SEQ ID NO: 1741; WAN024GAB; Start 370; Stop 394
aaacaaatgccttatttcctcggta

SEQ ID NO: 303677 - DNA, 25 bp, Artificial
  probe
  misc_feature (1)..(25): SEQ ID NO: 1741; WAN024GAB; Start 369; Stop 393
taaacaaatgccttatttcctcggt

SEQ ID NO: 303678 - DNA, 25 bp, Artificial
  probe
  misc_feature (1)..(25): SEQ ID NO: 1741; WAN024GAB; Start 367; Stop 391
cgtaaacaaatgccttatttcctcg

SEQ ID NO: 303679 - DNA, 25 bp, Artificial
  probe
  misc_feature (1)..(25): SEQ ID NO: 1741; WAN024GAB; Start 70; Stop 94
tttaccaaagtgattgctctcagtg

SEQ ID NO: 303680 - DNA, 25 bp, Artificial
  probe
  misc_feature (1)..(25): SEQ ID NO: 1741; WAN024GAB; Start 366; Stop 390
gcgtaaacaaatgccttatttcctc

SEQ ID NO: 303681 - DNA, 25 bp, Artificial
  probe
  misc_feature (1)..(25): SEQ ID NO: 1741; WAN024GAB; Start 379; Stop 403
ccttatttcctcggtaatctctatt

SEQ ID NO: 303682 - DNA, 25 bp, Artificial
  probe
  misc_feature (1)..(25): SEQ ID NO: 1741; WAN024GAB; Start 124; Stop 148
gattactacaacgatgatgctattt

SEQ ID NO: 303683 - DNA, 25 bp, Artificial
  probe
  misc_feature (1)..(25): SEQ ID NO: 1741; WAN024GAB; Start 155; Stop 179
actcgccagtagattatatttggaa

SEQ ID NO: 303684 - DNA, 25 bp, Artificial
  probe
  misc_feature (1)..(25): SEQ ID NO: 1741; WAN024GAB; Start 154; Stop 178
aactcgccagtagattatatttgga

SEQ ID NO: 303685 - DNA, 25 bp, Artificial
  probe
  misc_feature (1)..(25): SEQ ID NO: 1741; WAN024GAB; Start 157; Stop 181
tcgccagtagattatatttggaacc

SEQ ID NO: 303686 - DNA, 25 bp, Artificial
  probe
  misc_feature (1)..(25): SEQ ID NO: 1741; WAN024GAB; Start 156; Stop 180
ctcgccagtagattatatttggaac

SEQ ID NO: 303687 - DNA, 25 bp, Artificial
  probe
  misc_feature (1)..(25): SEQ ID NO: 1741; WAN024GAB; Start 158; Stop 182
cgccagtagattatatttggaacca

SEQ ID NO: 303688 - DNA, 25 bp, Artificial
  probe
  misc_feature (1)..(25): SEQ ID NO: 1741; WAN024GAB; Start 77; Stop 101
aagtgattgctctcagtggtgttta

SEQ ID NO: 303689 - DNA, 25 bp, Artificial
  probe
  misc_feature (1)..(25): SEQ ID NO: 1741; WAN024GAB; Start 30; Stop 54
ctatcatgcactcaatttcttcctc

SEQ ID NO: 303690 - DNA, 25 bp, Artificial
  probe
  misc_feature (1)..(25): SEQ ID NO: 1741; WAN024GAB; Start 153; Stop 177
aaactcgccagtagattatatttgg

SEQ ID NO: 303691 - DNA, 25 bp, Artificial
  probe
  misc_feature (1)..(25): SEQ ID NO: 1741; WAN024GAB; Start 31; Stop 55
tatcatgcactcaatttcttcctcc

SEQ ID NO: 303692 - DNA, 25 bp, Artificial
  probe
  misc_feature (1)..(25): SEQ ID NO: 1741; WAN024GAB; Start 29; Stop 53
cctatcatgcactcaatttcttcct

SEQ ID NO: 303693 - DNA, 25 bp, Artificial
  probe
  misc_feature (1)..(25): SEQ ID NO: 1741; WAN024GAB; Start 126; Stop 150
ttactacaacgatgatgctatttac

SEQ ID NO: 303694 - DNA, 25 bp, Artificial
  probe
  misc_feature (1)..(25): SEQ ID NO: 1741; WAN024GAB; Start 61; Stop 85
ccagatgtctttaccaaagtgattg

SEQ ID NO: 303695 - DNA, 25 bp, Artificial
  probe
  misc_feature (1)..(25): SEQ ID NO: 1741; WAN024GAB; Start 60; Stop 84
tccagatgtctttaccaaagtgatt

SEQ ID NO: 303696 - DNA, 25 bp, Artificial
  probe
  misc_feature (1)..(25): SEQ ID NO: 1742; WAN024CYO; Start 71; Stop 95
ctgatatagtagtcttagaagccga

SEQ ID NO: 303697 - DNA, 25 bp, Artificial
  probe
  misc_feature (1)..(25): SEQ ID NO: 1742; WAN024CYO; Start 70; Stop 94
tctgatatagtagtcttagaagccg

SEQ ID NO: 303698 - DNA, 25 bp, Artificial
  probe
  misc_feature (1)..(25): SEQ ID NO: 1742; WAN024CYO; Start 72; Stop 96
tgatatagtagtcttagaagccgat

SEQ ID NO: 303699 - DNA, 25 bp, Artificial
  probe
  misc_feature (1)..(25): SEQ ID NO: 1742; WAN024CYO; Start 23; Stop 47
tacggcatgtatatagagacttcct

SEQ ID NO: 303700 - DNA, 25 bp, Artificial
  probe
  misc_feature (1)..(25): SEQ ID NO: 1742; WAN024CYO; Start 22; Stop 46
ttacggcatgtatatagagacttcc

SEQ ID NO: 303701 - DNA, 25 bp, Artificial
  probe
  misc_feature (1)..(25): SEQ ID NO: 1742; WAN024CYO; Start 24; Stop 48
acggcatgtatatagagacttcctt

SEQ ID NO: 303702 - DNA, 25 bp, Artificial
  probe
  misc_feature (1)..(25): SEQ ID NO: 1742; WAN024CYO; Start 775; Stop 799
tgtgaattattctctgatgatggaa

SEQ ID NO: 303703 - DNA, 25 bp, Artificial
  probe
  misc_feature (1)..(25): SEQ ID NO: 1742; WAN024CYO; Start 774; Stop 798
atgtgaattattctctgatgatgga

SEQ ID NO: 303704 - DNA, 25 bp, Artificial
  probe
  misc_feature (1)..(25): SEQ ID NO: 1742; WAN024CYO; Start 73; Stop 97
gatatagtagtcttagaagccgatt

SEQ ID NO: 303705 - DNA, 25 bp, Artificial
  probe
  misc_feature (1)..(25): SEQ ID NO: 1742; WAN024CYO; Start 677; Stop 701
tcaaaccgataccagaacagataaa

SEQ ID NO: 303706 - DNA, 25 bp, Artificial
  probe
  misc_feature (1)..(25): SEQ ID NO: 1742; WAN024CYO; Start 145; Stop 169
cgttatgtgaatgttgggattatgg

SEQ ID NO: 303707 - DNA, 25 bp, Artificial
  probe
  misc_feature (1)..(25): SEQ ID NO: 1742; WAN024CYO; Start 144; Stop 168
ccgttatgtgaatgttgggattatg

SEQ ID NO: 303708 - DNA, 25 bp, Artificial
  probe
  misc_feature (1)..(25): SEQ ID NO: 1742; WAN024CYO; Start 21; Stop 45
attacggcatgtatatagagacttc

SEQ ID NO: 303709 - DNA, 25 bp, Artificial
  probe
  misc_feature (1)..(25): SEQ ID NO: 1742; WAN024CYO; Start 19; Stop 43
gaattacggcatgtatatagagact

SEQ ID NO: 303710 - DNA, 25 bp, Artificial
  probe
  misc_feature (1)..(25): SEQ ID NO: 1742; WAN024CYO; Start 18; Stop 42
agaattacggcatgtatatagagac

SEQ ID NO: 303711 - DNA, 25 bp, Artificial
  probe
  misc_feature (1)..(25): SEQ ID NO: 1742; WAN024CYO; Start 143; Stop 167
accgttatgtgaatgttgggattat

SEQ ID NO: 303712 - DNA, 25 bp, Artificial
  probe
  misc_feature (1)..(25): SEQ ID NO: 1742; WAN024CYO; Start 77; Stop 101
tagtagtcttagaagccgatttgtc

SEQ ID NO: 303713 - DNA, 25 bp, Artificial
  probe
  misc_feature (1)..(25): SEQ ID NO: 1742; WAN024CYO; Start 676; Stop 700
atcaaaccgataccagaacagataa

SEQ ID NO: 303714 - DNA, 25 bp, Artificial
  probe
  misc_feature (1)..(25): SEQ ID NO: 1742; WAN024CYO; Start 675; Stop 699
aatcaaaccgataccagaacagata

SEQ ID NO: 303715 - DNA, 25 bp, Artificial
  probe
  misc_feature (1)..(25): SEQ ID NO: 1742; WAN024CYO; Start 671; Stop 695
ttagaatcaaaccgataccagaaca

SEQ ID NO: 303716 - DNA, 25 bp, Artificial
  probe
  misc_feature (1)..(25): SEQ ID NO: 1742; WAN024CYO; Start 672; Stop 696
tagaatcaaaccgataccagaacag

SEQ ID NO: 303717 - DNA, 25 bp, Artificial
  probe
  misc_feature (1)..(25): SEQ ID NO: 1742; WAN024CYO; Start 155; Stop 179
atgttgggattatggaagcagaaat

SEQ ID NO: 303718 - DNA, 25 bp, Artificial
  probe
  misc_feature (1)..(25): SEQ ID NO: 1742; WAN024CYO; Start 745; Stop 769
aatcagataggtggaattggcagtg

SEQ ID NO: 303719 - DNA, 25 bp, Artificial
  probe
  misc_feature (1)..(25): SEQ ID NO: 1742; WAN024CYO; Start 76; Stop 100
atagtagtcttagaagccgatttgt

SEQ ID NO: 303720 - DNA, 25 bp, Artificial
  probe
  misc_feature (1)..(25): SEQ ID NO: 1742; WAN024CYO; Start 154; Stop 178
aatgttgggattatggaagcagaaa

SEQ ID NO: 303721 - DNA, 25 bp, Artificial
  probe
  misc_feature (1)..(25): SEQ ID NO: 1742; WAN024CYO; Start 146; Stop 170
gttatgtgaatgttgggattatgga

SEQ ID NO: 303722 - DNA, 25 bp, Artificial
  probe
  misc_feature (1)..(25): SEQ ID NO: 1742; WAN024CYO; Start 867; Stop 891
taatgagtatggtttgagtgaatcg

SEQ ID NO: 303723 - DNA, 25 bp, Artificial
  probe
  misc_feature (1)..(25): SEQ ID NO: 1742; WAN024CYO; Start 674; Stop 698
gaatcaaaccgataccagaacagat

SEQ ID NO: 303724 - DNA, 25 bp, Artificial
  probe
  misc_feature (1)..(25): SEQ ID NO: 1742; WAN024CYO; Start 670; Stop 694
tttagaatcaaaccgataccagaac

SEQ ID NO: 303725 - DNA, 25 bp, Artificial
  probe
  misc_feature (1)..(25): SEQ ID NO: 1742; WAN024CYO; Start 142; Stop 166
gaccgttatgtgaatgttgggatta

SEQ ID NO: 303726 - DNA, 25 bp, Artificial
  probe
  misc_feature (1)..(25): SEQ ID NO: 1742; WAN024CYO; Start 79; Stop 103
gtagtcttagaagccgatttgtcaa

SEQ ID NO: 303727 - DNA, 25 bp, Artificial
  probe
  misc_feature (1)..(25): SEQ ID NO: 1742; WAN024CYO; Start 148; Stop 172
tatgtgaatgttgggattatggaag

SEQ ID NO: 303728 - DNA, 25 bp, Artificial
  probe
  misc_feature (1)..(25): SEQ ID NO: 1742; WAN024CYO; Start 80; Stop 104
tagtcttagaagccgatttgtcaag

SEQ ID NO: 303729 - DNA, 25 bp, Artificial
  probe
  misc_feature (1)..(25): SEQ ID NO: 1743; WAN024CEW; Start 166; Stop 190
atgattcaagtaagtattcctgcca

SEQ ID NO: 303730 - DNA, 25 bp, Artificial
  probe
  misc_feature (1)..(25): SEQ ID NO: 1743; WAN024CEW; Start 167; Stop 191
tgattcaagtaagtattcctgccag

SEQ ID NO: 303731 - DNA, 25 bp, Artificial
  probe
  misc_feature (1)..(25): SEQ ID NO: 1743; WAN024CEW; Start 165; Stop 189
catgattcaagtaagtattcctgcc

SEQ ID NO: 303732 - DNA, 25 bp, Artificial
  probe
  misc_feature (1)..(25): SEQ ID NO: 1743; WAN024CEW; Start 163; Stop 187
cgcatgattcaagtaagtattcctg

SEQ ID NO: 303733 - DNA, 25 bp, Artificial
  probe
  misc_feature (1)..(25): SEQ ID NO: 1743; WAN024CEW; Start 161; Stop 185
gacgcatgattcaagtaagtattcc

SEQ ID NO: 303734 - DNA, 25 bp, Artificial
  probe
  misc_feature (1)..(25): SEQ ID NO: 1743; WAN024CEW; Start 160; Stop 184
ggacgcatgattcaagtaagtattc

SEQ ID NO: 303735 - DNA, 25 bp, Artificial
  probe
  misc_feature (1)..(25): SEQ ID NO: 1743; WAN024CEW; Start 162; Stop 186
acgcatgattcaagtaagtattcct

SEQ ID NO: 303736 - DNA, 25 bp, Artificial
  probe
  misc_feature (1)..(25): SEQ ID NO: 1743; WAN024CEW; Start 159; Stop 183
aggacgcatgattcaagtaagtatt

SEQ ID NO: 303737 - DNA, 25 bp, Artificial
  probe
  misc_feature (1)..(25): SEQ ID NO: 1743; WAN024CEW; Start 158; Stop 182
aaggacgcatgattcaagtaagtat

SEQ ID NO: 303738 - DNA, 25 bp, Artificial
  probe
  misc_feature (1)..(25): SEQ ID NO: 1743; WAN024CEW; Start 168; Stop 192
gattcaagtaagtattcctgccagc

SEQ ID NO: 303739 - DNA, 25 bp, Artificial
  probe
  misc_feature (1)..(25): SEQ ID NO: 1743; WAN024CEW; Start 157; Stop 181
caaggacgcatgattcaagtaagta

SEQ ID NO: 303740 - DNA, 25 bp, Artificial
  probe
  misc_feature (1)..(25): SEQ ID NO: 1743; WAN024CEW; Start 275; Stop 299
aaggagcagatgttgactggtatat

SEQ ID NO: 303741 - DNA, 25 bp, Artificial
  probe
  misc_feature (1)..(25): SEQ ID NO: 1743; WAN024CEW; Start 289; Stop 313
gactggtatatcaaggcagacgata

SEQ ID NO: 303742 - DNA, 25 bp, Artificial
  probe
  misc_feature (1)..(25): SEQ ID NO: 1743; WAN024CEW; Start 276; Stop 300
aggagcagatgttgactggtatatc

SEQ ID NO: 303743 - DNA, 25 bp, Artificial
  probe
  misc_feature (1)..(25): SEQ ID NO: 1743; WAN024CEW; Start 277; Stop 301
ggagcagatgttgactggtatatca

SEQ ID NO: 303744 - DNA, 25 bp, Artificial
  probe
  misc_feature (1)..(25): SEQ ID NO: 1743; WAN024CEW; Start 155; Stop 179
gacaaggacgcatgattcaagtaag

SEQ ID NO: 303745 - DNA, 25 bp, Artificial
  probe
  misc_feature (1)..(25): SEQ ID NO: 1743; WAN024CEW; Start 274; Stop 298
caaggagcagatgttgactggtata

SEQ ID NO: 303746 - DNA, 25 bp, Artificial
  probe
  misc_feature (1)..(25): SEQ ID NO: 1743; WAN024CEW; Start 360; Stop 384
aaagaaagaaccgacacaagacaaa

SEQ ID NO: 303747 - DNA, 25 bp, Artificial
  probe
  misc_feature (1)..(25): SEQ ID NO: 1743; WAN024CEW; Start 192; Stop 216
cgtgcctttgaaagagtttgattat

SEQ ID NO: 303748 - DNA, 25 bp, Artificial
  probe
  misc_feature (1)..(25): SEQ ID NO: 1743; WAN024CEW; Start 169; Stop 193
attcaagtaagtattcctgccagcg

SEQ ID NO: 303749 - DNA, 25 bp, Artificial
  probe
  misc_feature (1)..(25): SEQ ID NO: 1743; WAN024CEW; Start 156; Stop 180
acaaggacgcatgattcaagtaagt

SEQ ID NO: 303750 - DNA, 25 bp, Artificial
  probe
  misc_feature (1)..(25): SEQ ID NO: 1743; WAN024CEW; Start 3; Stop 27
gatgagattagcaaatggcattgta

SEQ ID NO: 303751 - DNA, 25 bp, Artificial
  probe
  misc_feature (1)..(25): SEQ ID NO: 1743; WAN024CEW; Start 1; Stop 25
atgatgagattagcaaatggcattg

SEQ ID NO: 303752 - DNA, 25 bp, Artificial
  probe
  misc_feature (1)..(25): SEQ ID NO: 1743; WAN024CEW; Start 323; Stop 347
caaaggattctagttcattcaaagc

SEQ ID NO: 303753 - DNA, 25 bp, Artificial
  probe
  misc_feature (1)..(25): SEQ ID NO: 1743; WAN024CEW; Start 5; Stop 29
tgagattagcaaatggcattgtatt

SEQ ID NO: 303754 - DNA, 25 bp, Artificial
  probe
  misc_feature (1)..(25): SEQ ID NO: 1743; WAN024CEW; Start 18; Stop 42
tggcattgtattagataaagacacg

SEQ ID NO: 303755 - DNA, 25 bp, Artificial
  probe
  misc_feature (1)..(25): SEQ ID NO: 1743; WAN024CEW; Start 4; Stop 28
atgagattagcaaatggcattgtat

SEQ ID NO: 303756 - DNA, 25 bp, Artificial
  probe
  misc_feature (1)..(25): SEQ ID NO: 1743; WAN024CEW; Start 121; Stop 145
atcaaggaacgtacctatgacttaa

SEQ ID NO: 303757 - DNA, 25 bp, Artificial
  probe
  misc_feature (1)..(25): SEQ ID NO: 1743; WAN024CEW; Start 120; Stop 144
aatcaaggaacgtacctatgactta

SEQ ID NO: 303758 - DNA, 25 bp, Artificial
  probe
  misc_feature (1)..(25): SEQ ID NO: 1743; WAN024CEW; Start 359; Stop 383
caaagaaagaaccgacacaagacaa

SEQ ID NO: 303759 - DNA, 25 bp, Artificial
  probe
  misc_feature (1)..(25): SEQ ID NO: 1743; WAN024CEW; Start 19; Stop 43
ggcattgtattagataaagacacga

SEQ ID NO: 303760 - DNA, 25 bp, Artificial
  probe
  misc_feature (1)..(25): SEQ ID NO: 1743; WAN024CEW; Start 319; Stop 343
ctgacaaaggattctagttcattca

SEQ ID NO: 303761 - DNA, 25 bp, Artificial
  probe
  misc_feature (1)..(25): SEQ ID NO: 1743; WAN024CEW; Start 2; Stop 26
tgatgagattagcaaatggcattgt

SEQ ID NO: 303762 - DNA, 25 bp, Artificial
  probe
  misc_feature (1)..(25): SEQ ID NO: 1744; WAN024FNW; Start 227; Stop 251
aagaagcggttagtattccagtaat

SEQ ID NO: 303763 - DNA, 25 bp, Artificial
  probe
  misc_feature (1)..(25): SEQ ID NO: 1744; WAN024FNW; Start 228; Stop 252
agaagcggttagtattccagtaatg

SEQ ID NO: 303764 - DNA, 25 bp, Artificial
  probe
  misc_feature (1)..(25): SEQ ID NO: 1744; WAN024FNW; Start 226; Stop 250
caagaagcggttagtattccagtaa

SEQ ID NO: 303765 - DNA, 25 bp, Artificial
  probe
  misc_feature (1)..(25): SEQ ID NO: 1744; WAN024FNW; Start 771; Stop 795
taaggctgtgactaacttccgtaat

SEQ ID NO: 303766 - DNA, 25 bp, Artificial
  probe
  misc_feature (1)..(25): SEQ ID NO: 1744; WAN024FNW; Start 770; Stop 794
ttaaggctgtgactaacttccgtaa

SEQ ID NO: 303767 - DNA, 25 bp, Artificial
  probe
  misc_feature (1)..(25): SEQ ID NO: 1744; WAN024FNW; Start 777; Stop 801
tgtgactaacttccgtaatcctcaa

SEQ ID NO: 303768 - DNA, 25 bp, Artificial
  probe
  misc_feature (1)..(25): SEQ ID NO: 1744; WAN024FNW; Start 222; Stop 246
aatccaagaagcggttagtattcca

SEQ ID NO: 303769 - DNA, 25 bp, Artificial
  probe
  misc_feature (1)..(25): SEQ ID NO: 1744; WAN024FNW; Start 225; Stop 249
ccaagaagcggttagtattccagta

SEQ ID NO: 303770 - DNA, 25 bp, Artificial
  probe
  misc_feature (1)..(25): SEQ ID NO: 1744; WAN024FNW; Start 776; Stop 800
ctgtgactaacttccgtaatcctca

SEQ ID NO: 303771 - DNA, 25 bp, Artificial
  probe
  misc_feature (1)..(25): SEQ ID NO: 1744; WAN024FNW; Start 765; Stop 789
cattgttaaggctgtgactaacttc

SEQ ID NO: 303772 - DNA, 25 bp, Artificial
  probe
  misc_feature (1)..(25): SEQ ID NO: 1744; WAN024FNW; Start 223; Stop 247
atccaagaagcggttagtattccag

SEQ ID NO: 303773 - DNA, 25 bp, Artificial
  probe
  misc_feature (1)..(25): SEQ ID NO: 1744; WAN024FNW; Start 309; Stop 333
tgattatatcgacgagagtgaagtt

SEQ ID NO: 303774 - DNA, 25 bp, Artificial
  probe
  misc_feature (1)..(25): SEQ ID NO: 1744; WAN024FNW; Start 308; Stop 332
ttgattatatcgacgagagtgaagt

SEQ ID NO: 303775 - DNA, 25 bp, Artificial
  probe
  misc_feature (1)..(25): SEQ ID NO: 1744; WAN024FNW; Start 766; Stop 790
attgttaaggctgtgactaacttcc

SEQ ID NO: 303776 - DNA, 25 bp, Artificial
  probe
  misc_feature (1)..(25): SEQ ID NO: 1744; WAN024FNW; Start 233; Stop 257
cggttagtattccagtaatggctaa

SEQ ID NO: 303777 - DNA, 25 bp, Artificial
  probe
  misc_feature (1)..(25): SEQ ID NO: 1744; WAN024FNW; Start 772; Stop 796
aaggctgtgactaacttccgtaatc

SEQ ID NO: 303778 - DNA, 25 bp, Artificial
  probe
  misc_feature (1)..(25): SEQ ID NO: 1744; WAN024FNW; Start 237; Stop 261
tagtattccagtaatggctaaggtc

SEQ ID NO: 303779 - DNA, 25 bp, Artificial
  probe
  misc_feature (1)..(25): SEQ ID NO: 1744; WAN024FNW; Start 764; Stop 788
ccattgttaaggctgtgactaactt

SEQ ID NO: 303780 - DNA, 25 bp, Artificial
  probe
  misc_feature (1)..(25): SEQ ID NO: 1744; WAN024FNW; Start 240; Stop 264
tattccagtaatggctaaggtcaga

SEQ ID NO: 303781 - DNA, 25 bp, Artificial
  probe
  misc_feature (1)..(25): SEQ ID NO: 1744; WAN024FNW; Start 239; Stop 263
gtattccagtaatggctaaggtcag

SEQ ID NO: 303782 - DNA, 25 bp, Artificial
  probe
  misc_feature (1)..(25): SEQ ID NO: 1744; WAN024FNW; Start 315; Stop 339
tatcgacgagagtgaagttctatct

SEQ ID NO: 303783 - DNA, 25 bp, Artificial
  probe
  misc_feature (1)..(25): SEQ ID NO: 1744; WAN024FNW; Start 314; Stop 338
atatcgacgagagtgaagttctatc

SEQ ID NO: 303784 - DNA, 25 bp, Artificial
  probe
  misc_feature (1)..(25): SEQ ID NO: 1744; WAN024FNW; Start 310; Stop 334
gattatatcgacgagagtgaagttc

SEQ ID NO: 303785 - DNA, 25 bp, Artificial
  probe
  misc_feature (1)..(25): SEQ ID NO: 1744; WAN024FNW; Start 238; Stop 262
agtattccagtaatggctaaggtca

SEQ ID NO: 303786 - DNA, 25 bp, Artificial
  probe
  misc_feature (1)..(25): SEQ ID NO: 1744; WAN024FNW; Start 782; Stop 806
ctaacttccgtaatcctcaaatcct

SEQ ID NO: 303787 - DNA, 25 bp, Artificial
  probe
  misc_feature (1)..(25): SEQ ID NO: 1744; WAN024FNW; Start 73; Stop 97
ggtgttattatggatgtgcagaatc

SEQ ID NO: 303788 - DNA, 25 bp, Artificial
  probe
  misc_feature (1)..(25): SEQ ID NO: 1744; WAN024FNW; Start 72; Stop 96
tggtgttattatggatgtgcagaat

SEQ ID NO: 303789 - DNA, 25 bp, Artificial
  probe
  misc_feature (1)..(25): SEQ ID NO: 1744; WAN024FNW; Start 781; Stop 805
actaacttccgtaatcctcaaatcc

SEQ ID NO: 303790 - DNA, 25 bp, Artificial
  probe
  misc_feature (1)..(25): SEQ ID NO: 1744; WAN024FNW; Start 311; Stop 335
attatatcgacgagagtgaagttct

SEQ ID NO: 303791 - DNA, 25 bp, Artificial
  probe
  misc_feature (1)..(25): SEQ ID NO: 1744; WAN024FNW; Start 236; Stop 260
ttagtattccagtaatggctaaggt

SEQ ID NO: 303792 - DNA, 25 bp, Artificial
  probe
  misc_feature (1)..(25): SEQ ID NO: 1744; WAN024FNW; Start 780; Stop 804
gactaacttccgtaatcctcaaatc

SEQ ID NO: 303793 - DNA, 25 bp, Artificial
  probe
  misc_feature (1)..(25): SEQ ID NO: 1744; WAN024FNW; Start 775; Stop 799
gctgtgactaacttccgtaatcctc

SEQ ID NO: 303794 - DNA, 25 bp, Artificial
  probe
  misc_feature (1)..(25): SEQ ID NO: 1744; WAN024FNW; Start 235; Stop 259
gttagtattccagtaatggctaagg

SEQ ID NO: 303795 - DNA, 25 bp, Artificial
  probe
  misc_feature (1)..(25): SEQ ID NO: 1745; WAN024AZB; Start 128; Stop 152
tcagtagacatttgagtcaggatat

SEQ ID NO: 303796 - DNA, 25 bp, Artificial
  probe
  misc_feature (1)..(25): SEQ ID NO: 1745; WAN024AZB; Start 127; Stop 151
atcagtagacatttgagtcaggata

SEQ ID NO: 303797 - DNA, 25 bp, Artificial
  probe
  misc_feature (1)..(25): SEQ ID NO: 1745; WAN024AZB; Start 126; Stop 150
tatcagtagacatttgagtcaggat

SEQ ID NO: 303798 - DNA, 25 bp, Artificial
  probe
  misc_feature (1)..(25): SEQ ID NO: 1745; WAN024AZB; Start 125; Stop 149
atatcagtagacatttgagtcagga

SEQ ID NO: 303799 - DNA, 25 bp, Artificial
  probe
  misc_feature (1)..(25): SEQ ID NO: 1745; WAN024AZB; Start 135; Stop 159
acatttgagtcaggatattatggaa

SEQ ID NO: 303800 - DNA, 25 bp, Artificial
  probe
  misc_feature (1)..(25): SEQ ID NO: 1745; WAN024AZB; Start 134; Stop 158
gacatttgagtcaggatattatgga

SEQ ID NO: 303801 - DNA, 25 bp, Artificial
  probe
  misc_feature (1)..(25): SEQ ID NO: 1745; WAN024AZB; Start 133; Stop 157
agacatttgagtcaggatattatgg

SEQ ID NO: 303802 - DNA, 25 bp, Artificial
  probe
  misc_feature (1)..(25): SEQ ID NO: 1745; WAN024AZB; Start 129; Stop 153
cagtagacatttgagtcaggatatt

SEQ ID NO: 303803 - DNA, 25 bp, Artificial
  probe
  misc_feature (1)..(25): SEQ ID NO: 1745; WAN024AZB; Start 102; Stop 126
actagaaatgaaactgatgagagat

SEQ ID NO: 303804 - DNA, 25 bp, Artificial
  probe
  misc_feature (1)..(25): SEQ ID NO: 1745; WAN024AZB; Start 18; Stop 42
aaatctcttcaaatacgtcagctca

SEQ ID NO: 303805 - DNA, 25 bp, Artificial
  probe
  misc_feature (1)..(25): SEQ ID NO: 1745; WAN024AZB; Start 19; Stop 43
aatctcttcaaatacgtcagctcag

SEQ ID NO: 303806 - DNA, 25 bp, Artificial
  probe
  misc_feature (1)..(25): SEQ ID NO: 1745; WAN024AZB; Start 101; Stop 125
tactagaaatgaaactgatgagaga

SEQ ID NO: 303807 - DNA, 25 bp, Artificial
  probe
  misc_feature (1)..(25): SEQ ID NO: 1745; WAN024AZB; Start 136; Stop 160
catttgagtcaggatattatggaaa

SEQ ID NO: 303808 - DNA, 25 bp, Artificial
  probe
  misc_feature (1)..(25): SEQ ID NO: 1745; WAN024AZB; Start 79; Stop 103
gcttccgagtttgattttcatttac

SEQ ID NO: 303809 - DNA, 25 bp, Artificial
  probe
  misc_feature (1)..(25): SEQ ID NO: 1745; WAN024AZB; Start 124; Stop 148
gatatcagtagacatttgagtcagg

SEQ ID NO: 303810 - DNA, 25 bp, Artificial
  probe
  misc_feature (1)..(25): SEQ ID NO: 1745; WAN024AZB; Start 100; Stop 124
ttactagaaatgaaactgatgagag

SEQ ID NO: 303811 - DNA, 25 bp, Artificial
  probe
  misc_feature (1)..(25): SEQ ID NO: 1745; WAN024AZB; Start 130; Stop 154
agtagacatttgagtcaggatatta

SEQ ID NO: 303812 - DNA, 25 bp, Artificial
  probe
  misc_feature (1)..(25): SEQ ID NO: 1745; WAN024AZB; Start 20; Stop 44
atctcttcaaatacgtcagctcagc

SEQ ID NO: 303813 - DNA, 25 bp, Artificial
  probe
  misc_feature (1)..(25): SEQ ID NO: 1745; WAN024AZB; Start 80; Stop 104
cttccgagtttgattttcatttact

SEQ ID NO: 303814 - DNA, 25 bp, Artificial
  probe
  misc_feature (1)..(25): SEQ ID NO: 1745; WAN024AZB; Start 120; Stop 144
gagagatatcagtagacatttgagt

SEQ ID NO: 303815 - DNA, 25 bp, Artificial
  probe
  misc_feature (1)..(25): SEQ ID NO: 1745; WAN024AZB; Start 119; Stop 143
tgagagatatcagtagacatttgag

SEQ ID NO: 303816 - DNA, 25 bp, Artificial
  probe
  misc_feature (1)..(25): SEQ ID NO: 1745; WAN024AZB; Start 123; Stop 147
agatatcagtagacatttgagtcag

SEQ ID NO: 303817 - DNA, 25 bp, Artificial
  probe
  misc_feature (1)..(25): SEQ ID NO: 1745; WAN024AZB; Start 122; Stop 146
gagatatcagtagacatttgagtca

SEQ ID NO: 303818 - DNA, 25 bp, Artificial
  probe
  misc_feature (1)..(25): SEQ ID NO: 1745; WAN024AZB; Start 103; Stop 127
ctagaaatgaaactgatgagagata

SEQ ID NO: 303819 - DNA, 25 bp, Artificial
  probe
  misc_feature (1)..(25): SEQ ID NO: 1745; WAN024AZB; Start 99; Stop 123
tttactagaaatgaaactgatgaga

SEQ ID NO: 303820 - DNA, 25 bp, Artificial
  probe
  misc_feature (1)..(25): SEQ ID NO: 1745; WAN024AZB; Start 121; Stop 145
agagatatcagtagacatttgagtc

SEQ ID NO: 303821 - DNA, 25 bp, Artificial
  probe
  misc_feature (1)..(25): SEQ ID NO: 1745; WAN024AZB; Start 75; Stop 99
gttagcttccgagtttgattttcat

SEQ ID NO: 303822 - DNA, 25 bp, Artificial
  probe
  misc_feature (1)..(25): SEQ ID NO: 1745; WAN024AZB; Start 17; Stop 41
aaaatctcttcaaatacgtcagctc

SEQ ID NO: 303823 - DNA, 25 bp, Artificial
  probe
  misc_feature (1)..(25): SEQ ID NO: 1745; WAN024AZB; Start 78; Stop 102
agcttccgagtttgattttcattta

SEQ ID NO: 303824 - DNA, 25 bp, Artificial
  probe
  misc_feature (1)..(25): SEQ ID NO: 1745; WAN024AZB; Start 77; Stop 101
tagcttccgagtttgattttcattt

SEQ ID NO: 303825 - DNA, 25 bp, Artificial
  probe
  misc_feature (1)..(25): SEQ ID NO: 1745; WAN024AZB; Start 76; Stop 100
ttagcttccgagtttgattttcatt

SEQ ID NO: 303826 - DNA, 25 bp, Artificial
  probe
  misc_feature (1)..(25): SEQ ID NO: 1745; WAN024AZB; Start 16; Stop 40
gaaaatctcttcaaatacgtcagct

SEQ ID NO: 303827 - DNA, 25 bp, Artificial
  probe
  misc_feature (1)..(25): SEQ ID NO: 1745; WAN024AZB; Start 140; Stop 164
tgagtcaggatattatggaaaatga

SEQ ID NO: 303828 - DNA, 25 bp, Artificial
  probe
  misc_feature (1)..(25): SEQ ID NO: 1746; WAN024EXU; Start 128; Stop 152
gtagaataatgaaacatcccacagc

SEQ ID NO: 303829 - DNA, 25 bp, Artificial
  probe
  misc_feature (1)..(25): SEQ ID NO: 1746; WAN024EXU; Start 127; Stop 151
cgtagaataatgaaacatcccacag

SEQ ID NO: 303830 - DNA, 25 bp, Artificial
  probe
  misc_feature (1)..(25): SEQ ID NO: 1746; WAN024EXU; Start 24; Stop 48
aaagacaatggctccgataaagaag

SEQ ID NO: 303831 - DNA, 25 bp, Artificial
  probe
  misc_feature (1)..(25): SEQ ID NO: 1746; WAN024EXU; Start 23; Stop 47
caaagacaatggctccgataaagaa

SEQ ID NO: 303832 - DNA, 25 bp, Artificial
  probe
  misc_feature (1)..(25): SEQ ID NO: 1746; WAN024EXU; Start 126; Stop 150
gcgtagaataatgaaacatcccaca

SEQ ID NO: 303833 - DNA, 25 bp, Artificial
  probe
  misc_feature (1)..(25): SEQ ID NO: 1746; WAN024EXU; Start 170; Stop 194
cgacaatagctgttatcaaggcatt

SEQ ID NO: 303834 - DNA, 25 bp, Artificial
  probe
  misc_feature (1)..(25): SEQ ID NO: 1746; WAN024EXU; Start 29; Stop 53
caatggctccgataaagaagtcaag

SEQ ID NO: 303835 - DNA, 25 bp, Artificial
  probe
  misc_feature (1)..(25): SEQ ID NO: 1746; WAN024EXU; Start 25; Stop 49
aagacaatggctccgataaagaagt

SEQ ID NO: 303836 - DNA, 25 bp, Artificial
  probe
  misc_feature (1)..(25): SEQ ID NO: 1746; WAN024EXU; Start 28; Stop 52
acaatggctccgataaagaagtcaa

SEQ ID NO: 303837 - DNA, 25 bp, Artificial
  probe
  misc_feature (1)..(25): SEQ ID NO: 1746; WAN024EXU; Start 129; Stop 153
tagaataatgaaacatcccacagct

SEQ ID NO: 303838 - DNA, 25 bp, Artificial
  probe
  misc_feature (1)..(25): SEQ ID NO: 1746; WAN024EXU; Start 169; Stop 193
acgacaatagctgttatcaaggcat

SEQ ID NO: 303839 - DNA, 25 bp, Artificial
  probe
  misc_feature (1)..(25): SEQ ID NO: 1746; WAN024EXU; Start 130; Stop 154
agaataatgaaacatcccacagctc

SEQ ID NO: 303840 - DNA, 25 bp, Artificial
  probe
  misc_feature (1)..(25): SEQ ID NO: 1746; WAN024EXU; Start 30; Stop 54
aatggctccgataaagaagtcaagg

SEQ ID NO: 303841 - DNA, 25 bp, Artificial
  probe
  misc_feature (1)..(25): SEQ ID NO: 1746; WAN024EXU; Start 226; Stop 250
ataaattctgcaatcataggtcacc

SEQ ID NO: 303842 - DNA, 25 bp, Artificial
  probe
  misc_feature (1)..(25): SEQ ID NO: 1746; WAN024EXU; Start 224; Stop 248
cgataaattctgcaatcataggtca

SEQ ID NO: 303843 - DNA, 25 bp, Artificial
  probe
  misc_feature (1)..(25): SEQ ID NO: 1746; WAN024EXU; Start 223; Stop 247
tcgataaattctgcaatcataggtc

SEQ ID NO: 303844 - DNA, 25 bp, Artificial
  probe
  misc_feature (1)..(25): SEQ ID NO: 1746; WAN024EXU; Start 171; Stop 195
gacaatagctgttatcaaggcattt

SEQ ID NO: 303845 - DNA, 25 bp, Artificial
  probe
  misc_feature (1)..(25): SEQ ID NO: 1746; WAN024EXU; Start 131; Stop 155
gaataatgaaacatcccacagctcc

SEQ ID NO: 303846 - DNA, 25 bp, Artificial
  probe
  misc_feature (1)..(25): SEQ ID NO: 1746; WAN024EXU; Start 168; Stop 192
gacgacaatagctgttatcaaggca

SEQ ID NO: 303847 - DNA, 25 bp, Artificial
  probe
  misc_feature (1)..(25): SEQ ID NO: 1746; WAN024EXU; Start 229; Stop 253
aattctgcaatcataggtcacctcc

SEQ ID NO: 303848 - DNA, 25 bp, Artificial
  probe
  misc_feature (1)..(25): SEQ ID NO: 1746; WAN024EXU; Start 26; Stop 50
agacaatggctccgataaagaagtc

SEQ ID NO: 303849 - DNA, 25 bp, Artificial
  probe
  misc_feature (1)..(25): SEQ ID NO: 1746; WAN024EXU; Start 225; Stop 249
gataaattctgcaatcataggtcac

SEQ ID NO: 303850 - DNA, 25 bp, Artificial
  probe
  misc_feature (1)..(25): SEQ ID NO: 1746; WAN024EXU; Start 227; Stop 251
taaattctgcaatcataggtcacct

SEQ ID NO: 303851 - DNA, 25 bp, Artificial
  probe
  misc_feature (1)..(25): SEQ ID NO: 1746; WAN024EXU; Start 27; Stop 51
gacaatggctccgataaagaagtca

SEQ ID NO: 303852 - DNA, 25 bp, Artificial
  probe
  misc_feature (1)..(25): SEQ ID NO: 1746; WAN024EXU; Start 132; Stop 156
aataatgaaacatcccacagctcca

SEQ ID NO: 303853 - DNA, 25 bp, Artificial
  probe
  misc_feature (1)..(25): SEQ ID NO: 1746; WAN024EXU; Start 75; Stop 99
tacacctggtaagacagcatgtgaa

SEQ ID NO: 303854 - DNA, 25 bp, Artificial
  probe
  misc_feature (1)..(25): SEQ ID NO: 1746; WAN024EXU; Start 228; Stop 252
aaattctgcaatcataggtcacctc

SEQ ID NO: 303855 - DNA, 25 bp, Artificial
  probe
  misc_feature (1)..(25): SEQ ID NO: 1746; WAN024EXU; Start 179; Stop 203
ctgttatcaaggcattttgtaggaa

SEQ ID NO: 303856 - DNA, 25 bp, Artificial
  probe
  misc_feature (1)..(25): SEQ ID NO: 1746; WAN024EXU; Start 166; Stop 190
ccgacgacaatagctgttatcaagg

SEQ ID NO: 303857 - DNA, 25 bp, Artificial
  probe
  misc_feature (1)..(25): SEQ ID NO: 1746; WAN024EXU; Start 20; Stop 44
atccaaagacaatggctccgataaa

SEQ ID NO: 303858 - DNA, 25 bp, Artificial
  probe
  misc_feature (1)..(25): SEQ ID NO: 1746; WAN024EXU; Start 19; Stop 43
aatccaaagacaatggctccgataa

SEQ ID NO: 303859 - DNA, 25 bp, Artificial
  probe
  misc_feature (1)..(25): SEQ ID NO: 1746; WAN024EXU; Start 180; Stop 204
tgttatcaaggcattttgtaggaaa

SEQ ID NO: 303860 - DNA, 25 bp, Artificial
  probe
  misc_feature (1)..(25): SEQ ID NO: 1746; WAN024EXU; Start 84; Stop 108
taagacagcatgtgaaatggcatct

SEQ ID NO: 303861 - DNA, 25 bp, Artificial
  probe
  misc_feature (1)..(25): SEQ ID NO: 1747; WAN024FOY; Start 8; Stop 32
ttaaggtaattgcgacagatatgga

SEQ ID NO: 303862 - DNA, 25 bp, Artificial
  probe
  misc_feature (1)..(25): SEQ ID NO: 1747; WAN024FOY; Start 9; Stop 33
taaggtaattgcgacagatatggat

SEQ ID NO: 303863 - DNA, 25 bp, Artificial
  probe
  misc_feature (1)..(25): SEQ ID NO: 1747; WAN024FOY; Start 10; Stop 34
aaggtaattgcgacagatatggatg

SEQ ID NO: 303864 - DNA, 25 bp, Artificial
  probe
  misc_feature (1)..(25): SEQ ID NO: 1747; WAN024FOY; Start 2; Stop 26
tgatgattaaggtaattgcgacaga

SEQ ID NO: 303865 - DNA, 25 bp, Artificial
  probe
  misc_feature (1)..(25): SEQ ID NO: 1747; WAN024FOY; Start 1; Stop 25
atgatgattaaggtaattgcgacag

SEQ ID NO: 303866 - DNA, 25 bp, Artificial
  probe
  misc_feature (1)..(25): SEQ ID NO: 1747; WAN024FOY; Start 3; Stop 27
gatgattaaggtaattgcgacagat

SEQ ID NO: 303867 - DNA, 25 bp, Artificial
  probe
  misc_feature (1)..(25): SEQ ID NO: 1747; WAN024FOY; Start 7; Stop 31
attaaggtaattgcgacagatatgg

SEQ ID NO: 303868 - DNA, 25 bp, Artificial
  probe
  misc_feature (1)..(25): SEQ ID NO: 1747; WAN024FOY; Start 5; Stop 29
tgattaaggtaattgcgacagatat

SEQ ID NO: 303869 - DNA, 25 bp, Artificial
  probe
  misc_feature (1)..(25): SEQ ID NO: 1747; WAN024FOY; Start 4; Stop 28
atgattaaggtaattgcgacagata

SEQ ID NO: 303870 - DNA, 25 bp, Artificial
  probe
  misc_feature (1)..(25): SEQ ID NO: 1747; WAN024FOY; Start 6; Stop 30
gattaaggtaattgcgacagatatg

SEQ ID NO: 303871 - DNA, 25 bp, Artificial
  probe
  misc_feature (1)..(25): SEQ ID NO: 1747; WAN024FOY; Start 11; Stop 35
aggtaattgcgacagatatggatgg

SEQ ID NO: 303872 - DNA, 25 bp, Artificial
  probe
  misc_feature (1)..(25): SEQ ID NO: 1747; WAN024FOY; Start 676; Stop 700
aatgatgttgaaatgcttgaaatgg

SEQ ID NO: 303873 - DNA, 25 bp, Artificial
  probe
  misc_feature (1)..(25): SEQ ID NO: 1747; WAN024FOY; Start 677; Stop 701
atgatgttgaaatgcttgaaatggc

SEQ ID NO: 303874 - DNA, 25 bp, Artificial
  probe
  misc_feature (1)..(25): SEQ ID NO: 1747; WAN024FOY; Start 431; Stop 455
atgaattaacatctgacctctttgg

SEQ ID NO: 303875 - DNA, 25 bp, Artificial
  probe
  misc_feature (1)..(25): SEQ ID NO: 1747; WAN024FOY; Start 679; Stop 703
gatgttgaaatgcttgaaatggctg

SEQ ID NO: 303876 - DNA, 25 bp, Artificial
  probe
  misc_feature (1)..(25): SEQ ID NO: 1747; WAN024FOY; Start 685; Stop 709
gaaatgcttgaaatggctggaattg

SEQ ID NO: 303877 - DNA, 25 bp, Artificial
  probe
  misc_feature (1)..(25): SEQ ID NO: 1747; WAN024FOY; Start 675; Stop 699
aaatgatgttgaaatgcttgaaatg

SEQ ID NO: 303878 - DNA, 25 bp, Artificial
  probe
  misc_feature (1)..(25): SEQ ID NO: 1747; WAN024FOY; Start 683; Stop 707
ttgaaatgcttgaaatggctggaat

SEQ ID NO: 303879 - DNA, 25 bp, Artificial
  probe
  misc_feature (1)..(25): SEQ ID NO: 1747; WAN024FOY; Start 678; Stop 702
tgatgttgaaatgcttgaaatggct

SEQ ID NO: 303880 - DNA, 25 bp, Artificial
  probe
  misc_feature (1)..(25): SEQ ID NO: 1747; WAN024FOY; Start 781; Stop 805
ggaggagtttatcaagtcttggaaa

SEQ ID NO: 303881 - DNA, 25 bp, Artificial
  probe
  misc_feature (1)..(25): SEQ ID NO: 1747; WAN024FOY; Start 555; Stop 579
cagtggctatggttgcattgatatc

SEQ ID NO: 303882 - DNA, 25 bp, Artificial
  probe
  misc_feature (1)..(25): SEQ ID NO: 1747; WAN024FOY; Start 684; Stop 708
tgaaatgcttgaaatggctggaatt

SEQ ID NO: 303883 - DNA, 25 bp, Artificial
  probe
  misc_feature (1)..(25): SEQ ID NO: 1747; WAN024FOY; Start 780; Stop 804
aggaggagtttatcaagtcttggaa

SEQ ID NO: 303884 - DNA, 25 bp, Artificial
  probe
  misc_feature (1)..(25): SEQ ID NO: 1747; WAN024FOY; Start 779; Stop 803
aaggaggagtttatcaagtcttgga

SEQ ID NO: 303885 - DNA, 25 bp, Artificial
  probe
  misc_feature (1)..(25): SEQ ID NO: 1747; WAN024FOY; Start 428; Stop 452
tggatgaattaacatctgacctctt

SEQ ID NO: 303886 - DNA, 25 bp, Artificial
  probe
  misc_feature (1)..(25): SEQ ID NO: 1747; WAN024FOY; Start 427; Stop 451
gtggatgaattaacatctgacctct

SEQ ID NO: 303887 - DNA, 25 bp, Artificial
  probe
  misc_feature (1)..(25): SEQ ID NO: 1747; WAN024FOY; Start 425; Stop 449
ttgtggatgaattaacatctgacct

SEQ ID NO: 303888 - DNA, 25 bp, Artificial
  probe
  misc_feature (1)..(25): SEQ ID NO: 1747; WAN024FOY; Start 426; Stop 450
tgtggatgaattaacatctgacctc

SEQ ID NO: 303889 - DNA, 25 bp, Artificial
  probe
  misc_feature (1)..(25): SEQ ID NO: 1747; WAN024FOY; Start 562; Stop 586
tatggttgcattgatatcctccaag

SEQ ID NO: 303890 - DNA, 25 bp, Artificial
  probe
  misc_feature (1)..(25): SEQ ID NO: 1747; WAN024FOY; Start 561; Stop 585
ctatggttgcattgatatcctccaa

SEQ ID NO: 303891 - DNA, 25 bp, Artificial
  probe
  misc_feature (1)..(25): SEQ ID NO: 1747; WAN024FOY; Start 433; Stop 457
gaattaacatctgacctctttggtg

SEQ ID NO: 303892 - DNA, 25 bp, Artificial
  probe
  misc_feature (1)..(25): SEQ ID NO: 1747; WAN024FOY; Start 432; Stop 456
tgaattaacatctgacctctttggt

SEQ ID NO: 303893 - DNA, 25 bp, Artificial
  probe
  misc_feature (1)..(25): SEQ ID NO: 1747; WAN024FOY; Start 776; Stop 800
gccaaggaggagtttatcaagtctt

SEQ ID NO: 303894 - DNA, 25 bp, Artificial
  probe
  misc_feature (1)..(25): SEQ ID NO: 1748; WAN024D49; Start 738; Stop 762
tctcattaacagtctagttggttgg

SEQ ID NO: 303895 - DNA, 25 bp, Artificial
  probe
  misc_feature (1)..(25): SEQ ID NO: 1748; WAN024D49; Start 739; Stop 763
ctcattaacagtctagttggttggt

SEQ ID NO: 303896 - DNA, 25 bp, Artificial
  probe
  misc_feature (1)..(25): SEQ ID NO: 1748; WAN024D49; Start 745; Stop 769
aacagtctagttggttggtatcaat

SEQ ID NO: 303897 - DNA, 25 bp, Artificial
  probe
  misc_feature (1)..(25): SEQ ID NO: 1748; WAN024D49; Start 743; Stop 767
ttaacagtctagttggttggtatca

SEQ ID NO: 303898 - DNA, 25 bp, Artificial
  probe
  misc_feature (1)..(25): SEQ ID NO: 1748; WAN024D49; Start 740; Stop 764
tcattaacagtctagttggttggta

SEQ ID NO: 303899 - DNA, 25 bp, Artificial
  probe
  misc_feature (1)..(25): SEQ ID NO: 1748; WAN024D49; Start 746; Stop 770
acagtctagttggttggtatcaatg

SEQ ID NO: 303900 - DNA, 25 bp, Artificial
  probe
  misc_feature (1)..(25): SEQ ID NO: 1748; WAN024D49; Start 744; Stop 768
taacagtctagttggttggtatcaa

SEQ ID NO: 303901 - DNA, 25 bp, Artificial
  probe
  misc_feature (1)..(25): SEQ ID NO: 1748; WAN024D49; Start 749; Stop 773
gtctagttggttggtatcaatggag

SEQ ID NO: 303902 - DNA, 25 bp, Artificial
  probe
  misc_feature (1)..(25): SEQ ID NO: 1748; WAN024D49; Start 748; Stop 772
agtctagttggttggtatcaatgga

SEQ ID NO: 303903 - DNA, 25 bp, Artificial
  probe
  misc_feature (1)..(25): SEQ ID NO: 1748; WAN024D49; Start 747; Stop 771
cagtctagttggttggtatcaatgg

SEQ ID NO: 303904 - DNA, 25 bp, Artificial
  probe
  misc_feature (1)..(25): SEQ ID NO: 1748; WAN024D49; Start 737; Stop 761
atctcattaacagtctagttggttg

SEQ ID NO: 303905 - DNA, 25 bp, Artificial
  probe
  misc_feature (1)..(25): SEQ ID NO: 1748; WAN024D49; Start 741; Stop 765
cattaacagtctagttggttggtat

SEQ ID NO: 303906 - DNA, 25 bp, Artificial
  probe
  misc_feature (1)..(25): SEQ ID NO: 1748; WAN024D49; Start 742; Stop 766
attaacagtctagttggttggtatc

SEQ ID NO: 303907 - DNA, 25 bp, Artificial
  probe
  misc_feature (1)..(25): SEQ ID NO: 1748; WAN024D49; Start 752; Stop 776
tagttggttggtatcaatggagcaa

SEQ ID NO: 303908 - DNA, 25 bp, Artificial
  probe
  misc_feature (1)..(25): SEQ ID NO: 1748; WAN024D49; Start 291; Stop 315
ggaaggtcgagcaagtaattatctt

SEQ ID NO: 303909 - DNA, 25 bp, Artificial
  probe
  misc_feature (1)..(25): SEQ ID NO: 1748; WAN024D49; Start 546; Stop 570
cttcatttatcagtctattggtgcc

SEQ ID NO: 303910 - DNA, 25 bp, Artificial
  probe
  misc_feature (1)..(25): SEQ ID NO: 1748; WAN024D49; Start 544; Stop 568
ggcttcatttatcagtctattggtg

SEQ ID NO: 303911 - DNA, 25 bp, Artificial
  probe
  misc_feature (1)..(25): SEQ ID NO: 1748; WAN024D49; Start 543; Stop 567
tggcttcatttatcagtctattggt

SEQ ID NO: 303912 - DNA, 25 bp, Artificial
  probe
  misc_feature (1)..(25): SEQ ID NO: 1748; WAN024D49; Start 228; Stop 252
tattgttgactggattgggatgatt

SEQ ID NO: 303913 - DNA, 25 bp, Artificial
  probe
  misc_feature (1)..(25): SEQ ID NO: 1748; WAN024D49; Start 545; Stop 569
gcttcatttatcagtctattggtgc

SEQ ID NO: 303914 - DNA, 25 bp, Artificial
  probe
  misc_feature (1)..(25): SEQ ID NO: 1748; WAN024D49; Start 427; Stop 451
gtttggatttatcaggcacagttta

SEQ ID NO: 303915 - DNA, 25 bp, Artificial
  probe
  misc_feature (1)..(25): SEQ ID NO: 1748; WAN024D49; Start 425; Stop 449
tagtttggatttatcaggcacagtt

SEQ ID NO: 303916 - DNA, 25 bp, Artificial
  probe
  misc_feature (1)..(25): SEQ ID NO: 1748; WAN024D49; Start 435; Stop 459
ttatcaggcacagtttaagaaggaa

SEQ ID NO: 303917 - DNA, 25 bp, Artificial
  probe
  misc_feature (1)..(25): SEQ ID NO: 1748; WAN024D49; Start 434; Stop 458
tttatcaggcacagtttaagaagga

SEQ ID NO: 303918 - DNA, 25 bp, Artificial
  probe
  misc_feature (1)..(25): SEQ ID NO: 1748; WAN024D49; Start 750; Stop 774
tctagttggttggtatcaatggagc

SEQ ID NO: 303919 - DNA, 25 bp, Artificial
  probe
  misc_feature (1)..(25): SEQ ID NO: 1748; WAN024D49; Start 436; Stop 460
tatcaggcacagtttaagaaggaaa

SEQ ID NO: 303920 - DNA, 25 bp, Artificial
  probe
  misc_feature (1)..(25): SEQ ID NO: 1748; WAN024D49; Start 430; Stop 454
tggatttatcaggcacagtttaaga

SEQ ID NO: 303921 - DNA, 25 bp, Artificial
  probe
  misc_feature (1)..(25): SEQ ID NO: 1748; WAN024D49; Start 506; Stop 530
agtatctttccattagtgtgctttg

SEQ ID NO: 303922 - DNA, 25 bp, Artificial
  probe
  misc_feature (1)..(25): SEQ ID NO: 1748; WAN024D49; Start 429; Stop 453
ttggatttatcaggcacagtttaag

SEQ ID NO: 303923 - DNA, 25 bp, Artificial
  probe
  misc_feature (1)..(25): SEQ ID NO: 1748; WAN024D49; Start 233; Stop 257
ttgactggattgggatgatttgtag

SEQ ID NO: 303924 - DNA, 25 bp, Artificial
  probe
  misc_feature (1)..(25): SEQ ID NO: 1748; WAN024D49; Start 227; Stop 251
gtattgttgactggattgggatgat

SEQ ID NO: 303925 - DNA, 25 bp, Artificial
  probe
  misc_feature (1)..(25): SEQ ID NO: 1748; WAN024D49; Start 542; Stop 566
ttggcttcatttatcagtctattgg

SEQ ID NO: 303926 - DNA, 25 bp, Artificial
  probe
  misc_feature (1)..(25): SEQ ID NO: 1748; WAN024D49; Start 229; Stop 253
attgttgactggattgggatgattt

SEQ ID NO: 303927 - DNA, 25 bp, Artificial
  probe
  misc_feature (1)..(25): SEQ ID NO: 1749; WAN024F7V; Start 80; Stop 104
ctgctacctctatcgtattggattc

SEQ ID NO: 303928 - DNA, 25 bp, Artificial
  probe
  misc_feature (1)..(25): SEQ ID NO: 1749; WAN024F7V; Start 440; Stop 464
ggtattcggtattgagtaattgtgg

SEQ ID NO: 303929 - DNA, 25 bp, Artificial
  probe
  misc_feature (1)..(25): SEQ ID NO: 1749; WAN024F7V; Start 79; Stop 103
actgctacctctatcgtattggatt

SEQ ID NO: 303930 - DNA, 25 bp, Artificial
  probe
  misc_feature (1)..(25): SEQ ID NO: 1749; WAN024F7V; Start 78; Stop 102
aactgctacctctatcgtattggat

SEQ ID NO: 303931 - DNA, 25 bp, Artificial
  probe
  misc_feature (1)..(25): SEQ ID NO: 1749; WAN024F7V; Start 441; Stop 465
gtattcggtattgagtaattgtggt

SEQ ID NO: 303932 - DNA, 25 bp, Artificial
  probe
  misc_feature (1)..(25): SEQ ID NO: 1749; WAN024F7V; Start 77; Stop 101
gaactgctacctctatcgtattgga

SEQ ID NO: 303933 - DNA, 25 bp, Artificial
  probe
  misc_feature (1)..(25): SEQ ID NO: 1749; WAN024F7V; Start 89; Stop 113
ctatcgtattggattcgcaaggatt

SEQ ID NO: 303934 - DNA, 25 bp, Artificial
  probe
  misc_feature (1)..(25): SEQ ID NO: 1749; WAN024F7V; Start 83; Stop 107
ctacctctatcgtattggattcgca

SEQ ID NO: 303935 - DNA, 25 bp, Artificial
  probe
  misc_feature (1)..(25): SEQ ID NO: 1749; WAN024F7V; Start 81; Stop 105
tgctacctctatcgtattggattcg

SEQ ID NO: 303936 - DNA, 25 bp, Artificial
  probe
  misc_feature (1)..(25): SEQ ID NO: 1749; WAN024F7V; Start 84; Stop 108
tacctctatcgtattggattcgcaa

SEQ ID NO: 303937 - DNA, 25 bp, Artificial
  probe
  misc_feature (1)..(25): SEQ ID NO: 1749; WAN024F7V; Start 88; Stop 112
tctatcgtattggattcgcaaggat

SEQ ID NO: 303938 - DNA, 25 bp, Artificial
  probe
  misc_feature (1)..(25): SEQ ID NO: 1749; WAN024F7V; Start 76; Stop 100
ggaactgctacctctatcgtattgg

SEQ ID NO: 303939 - DNA, 25 bp, Artificial
  probe
  misc_feature (1)..(25): SEQ ID NO: 1749; WAN024F7V; Start 376; Stop 400
tcagccttattattggatgaagatt

SEQ ID NO: 303940 - DNA, 25 bp, Artificial
  probe
  misc_feature (1)..(25): SEQ ID NO: 1749; WAN024F7V; Start 375; Stop 399
atcagccttattattggatgaagat

SEQ ID NO: 303941 - DNA, 25 bp, Artificial
  probe
  misc_feature (1)..(25): SEQ ID NO: 1749; WAN024F7V; Start 87; Stop 111
ctctatcgtattggattcgcaagga

SEQ ID NO: 303942 - DNA, 25 bp, Artificial
  probe
  misc_feature (1)..(25): SEQ ID NO: 1749; WAN024F7V; Start 85; Stop 109
acctctatcgtattggattcgcaag

SEQ ID NO: 303943 - DNA, 25 bp, Artificial
  probe
  misc_feature (1)..(25): SEQ ID NO: 1749; WAN024F7V; Start 208; Stop 232
ggagagtatcaaggaagtcagaaag

SEQ ID NO: 303944 - DNA, 25 bp, Artificial
  probe
  misc_feature (1)..(25): SEQ ID NO: 1749; WAN024F7V; Start 209; Stop 233
gagagtatcaaggaagtcagaaaga

SEQ ID NO: 303945 - DNA, 25 bp, Artificial
  probe
  misc_feature (1)..(25): SEQ ID NO: 1749; WAN024F7V; Start 439; Stop 463
gggtattcggtattgagtaattgtg

SEQ ID NO: 303946 - DNA, 25 bp, Artificial
  probe
  misc_feature (1)..(25): SEQ ID NO: 1749; WAN024F7V; Start 82; Stop 106
gctacctctatcgtattggattcgc

SEQ ID NO: 303947 - DNA, 25 bp, Artificial
  probe
  misc_feature (1)..(25): SEQ ID NO: 1749; WAN024F7V; Start 211; Stop 235
gagtatcaaggaagtcagaaagatg

SEQ ID NO: 303948 - DNA, 25 bp, Artificial
  probe
  misc_feature (1)..(25): SEQ ID NO: 1749; WAN024F7V; Start 210; Stop 234
agagtatcaaggaagtcagaaagat

SEQ ID NO: 303949 - DNA, 25 bp, Artificial
  probe
  misc_feature (1)..(25): SEQ ID NO: 1749; WAN024F7V; Start 374; Stop 398
tatcagccttattattggatgaaga

SEQ ID NO: 303950 - DNA, 25 bp, Artificial
  probe
  misc_feature (1)..(25): SEQ ID NO: 1749; WAN024F7V; Start 207; Stop 231
gggagagtatcaaggaagtcagaaa

SEQ ID NO: 303951 - DNA, 25 bp, Artificial
  probe
  misc_feature (1)..(25): SEQ ID NO: 1749; WAN024F7V; Start 91; Stop 115
atcgtattggattcgcaaggattta

SEQ ID NO: 303952 - DNA, 25 bp, Artificial
  probe
  misc_feature (1)..(25): SEQ ID NO: 1749; WAN024F7V; Start 90; Stop 114
tatcgtattggattcgcaaggattt

SEQ ID NO: 303953 - DNA, 25 bp, Artificial
  probe
  misc_feature (1)..(25): SEQ ID NO: 1749; WAN024F7V; Start 216; Stop 240
tcaaggaagtcagaaagatgagaaa

SEQ ID NO: 303954 - DNA, 25 bp, Artificial
  probe
  misc_feature (1)..(25): SEQ ID NO: 1749; WAN024F7V; Start 217; Stop 241
caaggaagtcagaaagatgagaaag

SEQ ID NO: 303955 - DNA, 25 bp, Artificial
  probe
  misc_feature (1)..(25): SEQ ID NO: 1749; WAN024F7V; Start 215; Stop 239
atcaaggaagtcagaaagatgagaa

SEQ ID NO: 303956 - DNA, 25 bp, Artificial
  probe
  misc_feature (1)..(25): SEQ ID NO: 1749; WAN024F7V; Start 202; Stop 226
gaattgggagagtatcaaggaagtc

SEQ ID NO: 303957 - DNA, 25 bp, Artificial
  probe
  misc_feature (1)..(25): SEQ ID NO: 1749; WAN024F7V; Start 200; Stop 224
tagaattgggagagtatcaaggaag

SEQ ID NO: 303958 - DNA, 25 bp, Artificial
  probe
  misc_feature (1)..(25): SEQ ID NO: 1749; WAN024F7V; Start 92; Stop 116
tcgtattggattcgcaaggatttaa

SEQ ID NO: 303959 - DNA, 25 bp, Artificial
  probe
  misc_feature (1)..(25): SEQ ID NO: 1749; WAN024F7V; Start 212; Stop 236
agtatcaaggaagtcagaaagatga

SEQ ID NO: 303960 - DNA, 25 bp, Artificial
  probe
  misc_feature (1)..(25): SEQ ID NO: 1750; WAN024G2W; Start 187; Stop 211
caggcacctaagtctgtcattgatt

SEQ ID NO: 303961 - DNA, 25 bp, Artificial
  probe
  misc_feature (1)..(25): SEQ ID NO: 1750; WAN024G2W; Start 143; Stop 167
atttgagtcaagggttgtcacttta

SEQ ID NO: 303962 - DNA, 25 bp, Artificial
  probe
  misc_feature (1)..(25): SEQ ID NO: 1750; WAN024G2W; Start 178; Stop 202
catcattaccaggcacctaagtctg

SEQ ID NO: 303963 - DNA, 25 bp, Artificial
  probe
  misc_feature (1)..(25): SEQ ID NO: 1750; WAN024G2W; Start 75; Stop 99
gagtcacctgtttcgtcttgctata

SEQ ID NO: 303964 - DNA, 25 bp, Artificial
  probe
  misc_feature (1)..(25): SEQ ID NO: 1750; WAN024G2W; Start 188; Stop 212
aggcacctaagtctgtcattgattt

SEQ ID NO: 303965 - DNA, 25 bp, Artificial
  probe
  misc_feature (1)..(25): SEQ ID NO: 1750; WAN024G2W; Start 142; Stop 166
aatttgagtcaagggttgtcacttt

SEQ ID NO: 303966 - DNA, 25 bp, Artificial
  probe
  misc_feature (1)..(25): SEQ ID NO: 1750; WAN024G2W; Start 79; Stop 103
cacctgtttcgtcttgctatacaaa

SEQ ID NO: 303967 - DNA, 25 bp, Artificial
  probe
  misc_feature (1)..(25): SEQ ID NO: 1750; WAN024G2W; Start 144; Stop 168
tttgagtcaagggttgtcactttac

SEQ ID NO: 303968 - DNA, 25 bp, Artificial
  probe
  misc_feature (1)..(25): SEQ ID NO: 1750; WAN024G2W; Start 182; Stop 206
attaccaggcacctaagtctgtcat

SEQ ID NO: 303969 - DNA, 25 bp, Artificial
  probe
  misc_feature (1)..(25): SEQ ID NO: 1750; WAN024G2W; Start 179; Stop 203
atcattaccaggcacctaagtctgt

SEQ ID NO: 303970 - DNA, 25 bp, Artificial
  probe
  misc_feature (1)..(25): SEQ ID NO: 1750; WAN024G2W; Start 76; Stop 100
agtcacctgtttcgtcttgctatac

SEQ ID NO: 303971 - DNA, 25 bp, Artificial
  probe
  misc_feature (1)..(25): SEQ ID NO: 1750; WAN024G2W; Start 141; Stop 165
caatttgagtcaagggttgtcactt

SEQ ID NO: 303972 - DNA, 25 bp, Artificial
  probe
  misc_feature (1)..(25): SEQ ID NO: 1750; WAN024G2W; Start 183; Stop 207
ttaccaggcacctaagtctgtcatt

SEQ ID NO: 303973 - DNA, 25 bp, Artificial
  probe
  misc_feature (1)..(25): SEQ ID NO: 1750; WAN024G2W; Start 78; Stop 102
tcacctgtttcgtcttgctatacaa

SEQ ID NO: 303974 - DNA, 25 bp, Artificial
  probe
  misc_feature (1)..(25): SEQ ID NO: 1750; WAN024G2W; Start 180; Stop 204
tcattaccaggcacctaagtctgtc

SEQ ID NO: 303975 - DNA, 25 bp, Artificial
  probe
  misc_feature (1)..(25): SEQ ID NO: 1750; WAN024G2W; Start 77; Stop 101
gtcacctgtttcgtcttgctataca

SEQ ID NO: 303976 - DNA, 25 bp, Artificial
  probe
  misc_feature (1)..(25): SEQ ID NO: 1750; WAN024G2W; Start 191; Stop 215
cacctaagtctgtcattgattttgg

SEQ ID NO: 303977 - DNA, 25 bp, Artificial
  probe
  misc_feature (1)..(25): SEQ ID NO: 1750; WAN024G2W; Start 193; Stop 217
cctaagtctgtcattgattttggtt

SEQ ID NO: 303978 - DNA, 25 bp, Artificial
  probe
  misc_feature (1)..(25): SEQ ID NO: 1750; WAN024G2W; Start 177; Stop 201
gcatcattaccaggcacctaagtct

SEQ ID NO: 303979 - DNA, 25 bp, Artificial
  probe
  misc_feature (1)..(25): SEQ ID NO: 1750; WAN024G2W; Start 190; Stop 214
gcacctaagtctgtcattgattttg

SEQ ID NO: 303980 - DNA, 25 bp, Artificial
  probe
  misc_feature (1)..(25): SEQ ID NO: 1750; WAN024G2W; Start 184; Stop 208
taccaggcacctaagtctgtcattg

SEQ ID NO: 303981 - DNA, 25 bp, Artificial
  probe
  misc_feature (1)..(25): SEQ ID NO: 1750; WAN024G2W; Start 181; Stop 205
cattaccaggcacctaagtctgtca

SEQ ID NO: 303982 - DNA, 25 bp, Artificial
  probe
  misc_feature (1)..(25): SEQ ID NO: 1750; WAN024G2W; Start 199; Stop 223
tctgtcattgattttggtttatgga

SEQ ID NO: 303983 - DNA, 25 bp, Artificial
  probe
  misc_feature (1)..(25): SEQ ID NO: 1750; WAN024G2W; Start 198; Stop 222
gtctgtcattgattttggtttatgg

SEQ ID NO: 303984 - DNA, 25 bp, Artificial
  probe
  misc_feature (1)..(25): SEQ ID NO: 1750; WAN024G2W; Start 149; Stop 173
gtcaagggttgtcactttacctcat

SEQ ID NO: 303985 - DNA, 25 bp, Artificial
  probe
  misc_feature (1)..(25): SEQ ID NO: 1750; WAN024G2W; Start 189; Stop 213
ggcacctaagtctgtcattgatttt

SEQ ID NO: 303986 - DNA, 25 bp, Artificial
  probe
  misc_feature (1)..(25): SEQ ID NO: 1750; WAN024G2W; Start 70; Stop 94
gagttgagtcacctgtttcgtcttg

SEQ ID NO: 303987 - DNA, 25 bp, Artificial
  probe
  misc_feature (1)..(25): SEQ ID NO: 1750; WAN024G2W; Start 186; Stop 210
ccaggcacctaagtctgtcattgat

SEQ ID NO: 303988 - DNA, 25 bp, Artificial
  probe
  misc_feature (1)..(25): SEQ ID NO: 1750; WAN024G2W; Start 81; Stop 105
cctgtttcgtcttgctatacaaaat

SEQ ID NO: 303989 - DNA, 25 bp, Artificial
  probe
  misc_feature (1)..(25): SEQ ID NO: 1750; WAN024G2W; Start 9; Stop 33
aaatgagtttcgagaaagggtggag

SEQ ID NO: 303990 - DNA, 25 bp, Artificial
  probe
  misc_feature (1)..(25): SEQ ID NO: 1750; WAN024G2W; Start 140; Stop 164
ccaatttgagtcaagggttgtcact

SEQ ID NO: 303991 - DNA, 25 bp, Artificial
  probe
  misc_feature (1)..(25): SEQ ID NO: 1750; WAN024G2W; Start 147; Stop 171
gagtcaagggttgtcactttacctc

SEQ ID NO: 303992 - DNA, 25 bp, Artificial
  probe
  misc_feature (1)..(25): SEQ ID NO: 1750; WAN024G2W; Start 80; Stop 104
acctgtttcgtcttgctatacaaaa

SEQ ID NO: 303993 - DNA, 25 bp, Artificial
  probe
  misc_feature (1)..(25): SEQ ID NO: 1751; WAN024D4S; Start 250; Stop 274
tatgaagacaaggttaatgctgcta

SEQ ID NO: 303994 - DNA, 25 bp, Artificial
  probe
  misc_feature (1)..(25): SEQ ID NO: 1751; WAN024D4S; Start 242; Stop 266
gtggaggatatgaagacaaggttaa

SEQ ID NO: 303995 - DNA, 25 bp, Artificial
  probe
  misc_feature (1)..(25): SEQ ID NO: 1751; WAN024D4S; Start 247; Stop 271
ggatatgaagacaaggttaatgctg

SEQ ID NO: 303996 - DNA, 25 bp, Artificial
  probe
  misc_feature (1)..(25): SEQ ID NO: 1751; WAN024D4S; Start 248; Stop 272
gatatgaagacaaggttaatgctgc

SEQ ID NO: 303997 - DNA, 25 bp, Artificial
  probe
  misc_feature (1)..(25): SEQ ID NO: 1751; WAN024D4S; Start 246; Stop 270
aggatatgaagacaaggttaatgct

SEQ ID NO: 303998 - DNA, 25 bp, Artificial
  probe
  misc_feature (1)..(25): SEQ ID NO: 1751; WAN024D4S; Start 251; Stop 275
atgaagacaaggttaatgctgctat

SEQ ID NO: 303999 - DNA, 25 bp, Artificial
  probe
  misc_feature (1)..(25): SEQ ID NO: 1751; WAN024D4S; Start 249; Stop 273
atatgaagacaaggttaatgctgct

SEQ ID NO: 304000 - DNA, 25 bp, Artificial
  probe
  misc_feature (1)..(25): SEQ ID NO: 1751; WAN024D4S; Start 245; Stop 269
gaggatatgaagacaaggttaatgc

SEQ ID NO: 304001 - DNA, 25 bp, Artificial
  probe
  misc_feature (1)..(25): SEQ ID NO: 1751; WAN024D4S; Start 218; Stop 242
agtatattcctcgtagtggtagtgg

SEQ ID NO: 304002 - DNA, 25 bp, Artificial
  probe
  misc_feature (1)..(25): SEQ ID NO: 1751; WAN024D4S; Start 252; Stop 276
tgaagacaaggttaatgctgctatt

SEQ ID NO: 304003 - DNA, 25 bp, Artificial
  probe
  misc_feature (1)..(25): SEQ ID NO: 1751; WAN024D4S; Start 220; Stop 244
tatattcctcgtagtggtagtggtg

SEQ ID NO: 304004 - DNA, 25 bp, Artificial
  probe
  misc_feature (1)..(25): SEQ ID NO: 1751; WAN024D4S; Start 219; Stop 243
gtatattcctcgtagtggtagtggt

SEQ ID NO: 304005 - DNA, 25 bp, Artificial
  probe
  misc_feature (1)..(25): SEQ ID NO: 1751; WAN024D4S; Start 243; Stop 267
tggaggatatgaagacaaggttaat

SEQ ID NO: 304006 - DNA, 25 bp, Artificial
  probe
  misc_feature (1)..(25): SEQ ID NO: 1751; WAN024D4S; Start 260; Stop 284
aggttaatgctgctattacgactaa

SEQ ID NO: 304007 - DNA, 25 bp, Artificial
  probe
  misc_feature (1)..(25): SEQ ID NO: 1751; WAN024D4S; Start 259; Stop 283
aaggttaatgctgctattacgacta

SEQ ID NO: 304008 - DNA, 25 bp, Artificial
  probe
  misc_feature (1)..(25): SEQ ID NO: 1751; WAN024D4S; Start 244; Stop 268
ggaggatatgaagacaaggttaatg

SEQ ID NO: 304009 - DNA, 25 bp, Artificial
  probe
  misc_feature (1)..(25): SEQ ID NO: 1751; WAN024D4S; Start 731; Stop 755
aagagagtgtagaagcagttcaatt

SEQ ID NO: 304010 - DNA, 25 bp, Artificial
  probe
  misc_feature (1)..(25): SEQ ID NO: 1751; WAN024D4S; Start 737; Stop 761
gtgtagaagcagttcaattcattca

SEQ ID NO: 304011 - DNA, 25 bp, Artificial
  probe
  misc_feature (1)..(25): SEQ ID NO: 1751; WAN024D4S; Start 734; Stop 758
agagtgtagaagcagttcaattcat

SEQ ID NO: 304012 - DNA, 25 bp, Artificial
  probe
  misc_feature (1)..(25): SEQ ID NO: 1751; WAN024D4S; Start 736; Stop 760
agtgtagaagcagttcaattcattc

SEQ ID NO: 304013 - DNA, 25 bp, Artificial
  probe
  misc_feature (1)..(25): SEQ ID NO: 1751; WAN024D4S; Start 735; Stop 759
gagtgtagaagcagttcaattcatt

SEQ ID NO: 304014 - DNA, 25 bp, Artificial
  probe
  misc_feature (1)..(25): SEQ ID NO: 1751; WAN024D4S; Start 732; Stop 756
agagagtgtagaagcagttcaattc

SEQ ID NO: 304015 - DNA, 25 bp, Artificial
  probe
  misc_feature (1)..(25): SEQ ID NO: 1751; WAN024D4S; Start 254; Stop 278
aagacaaggttaatgctgctattac

SEQ ID NO: 304016 - DNA, 25 bp, Artificial
  probe
  misc_feature (1)..(25): SEQ ID NO: 1751; WAN024D4S; Start 237; Stop 261
tagtggtggaggatatgaagacaag

SEQ ID NO: 304017 - DNA, 25 bp, Artificial
  probe
  misc_feature (1)..(25): SEQ ID NO: 1751; WAN024D4S; Start 738; Stop 762
tgtagaagcagttcaattcattcaa

SEQ ID NO: 304018 - DNA, 25 bp, Artificial
  probe
  misc_feature (1)..(25): SEQ ID NO: 1751; WAN024D4S; Start 733; Stop 757
gagagtgtagaagcagttcaattca

SEQ ID NO: 304019 - DNA, 25 bp, Artificial
  probe
  misc_feature (1)..(25): SEQ ID NO: 1751; WAN024D4S; Start 253; Stop 277
gaagacaaggttaatgctgctatta

SEQ ID NO: 304020 - DNA, 25 bp, Artificial
  probe
  misc_feature (1)..(25): SEQ ID NO: 1751; WAN024D4S; Start 261; Stop 285
ggttaatgctgctattacgactaat

SEQ ID NO: 304021 - DNA, 25 bp, Artificial
  probe
  misc_feature (1)..(25): SEQ ID NO: 1751; WAN024D4S; Start 241; Stop 265
ggtggaggatatgaagacaaggtta

SEQ ID NO: 304022 - DNA, 25 bp, Artificial
  probe
  misc_feature (1)..(25): SEQ ID NO: 1751; WAN024D4S; Start 236; Stop 260
gtagtggtggaggatatgaagacaa

SEQ ID NO: 304023 - DNA, 25 bp, Artificial
  probe
  misc_feature (1)..(25): SEQ ID NO: 1751; WAN024D4S; Start 773; Stop 797
aagaaggctatacaactgttagtcc

SEQ ID NO: 304024 - DNA, 25 bp, Artificial
  probe
  misc_feature (1)..(25): SEQ ID NO: 1751; WAN024D4S; Start 258; Stop 282
caaggttaatgctgctattacgact

SEQ ID NO: 304025 - DNA, 25 bp, Artificial
  probe
  misc_feature (1)..(25): SEQ ID NO: 1751; WAN024D4S; Start 256; Stop 280
gacaaggttaatgctgctattacga

SEQ ID NO: 304026 - DNA, 25 bp, Artificial
  probe
  misc_feature (1)..(25): SEQ ID NO: 1752; WAN024CEM; Start 88; Stop 112
aaggaacattatgaggaagtgacag

SEQ ID NO: 304027 - DNA, 25 bp, Artificial
  probe
  misc_feature (1)..(25): SEQ ID NO: 1752; WAN024CEM; Start 89; Stop 113
aggaacattatgaggaagtgacagg

SEQ ID NO: 304028 - DNA, 25 bp, Artificial
  probe
  misc_feature (1)..(25): SEQ ID NO: 1752; WAN024CEM; Start 57; Stop 81
acctgaagaataccaagcctacaag

SEQ ID NO: 304029 - DNA, 25 bp, Artificial
  probe
  misc_feature (1)..(25): SEQ ID NO: 1752; WAN024CEM; Start 64; Stop 88
gaataccaagcctacaaggagttaa

SEQ ID NO: 304030 - DNA, 25 bp, Artificial
  probe
  misc_feature (1)..(25): SEQ ID NO: 1752; WAN024CEM; Start 63; Stop 87
agaataccaagcctacaaggagtta

SEQ ID NO: 304031 - DNA, 25 bp, Artificial
  probe
  misc_feature (1)..(25): SEQ ID NO: 1752; WAN024CEM; Start 56; Stop 80
cacctgaagaataccaagcctacaa

SEQ ID NO: 304032 - DNA, 25 bp, Artificial
  probe
  misc_feature (1)..(25): SEQ ID NO: 1752; WAN024CEM; Start 54; Stop 78
aacacctgaagaataccaagcctac

SEQ ID NO: 304033 - DNA, 25 bp, Artificial
  probe
  misc_feature (1)..(25): SEQ ID NO: 1752; WAN024CEM; Start 62; Stop 86
aagaataccaagcctacaaggagtt

SEQ ID NO: 304034 - DNA, 25 bp, Artificial
  probe
  misc_feature (1)..(25): SEQ ID NO: 1752; WAN024CEM; Start 87; Stop 111
aaaggaacattatgaggaagtgaca

SEQ ID NO: 304035 - DNA, 25 bp, Artificial
  probe
  misc_feature (1)..(25): SEQ ID NO: 1752; WAN024CEM; Start 61; Stop 85
gaagaataccaagcctacaaggagt

SEQ ID NO: 304036 - DNA, 25 bp, Artificial
  probe
  misc_feature (1)..(25): SEQ ID NO: 1752; WAN024CEM; Start 60; Stop 84
tgaagaataccaagcctacaaggag

SEQ ID NO: 304037 - DNA, 25 bp, Artificial
  probe
  misc_feature (1)..(25): SEQ ID NO: 1752; WAN024CEM; Start 59; Stop 83
ctgaagaataccaagcctacaagga

SEQ ID NO: 304038 - DNA, 25 bp, Artificial
  probe
  misc_feature (1)..(25): SEQ ID NO: 1752; WAN024CEM; Start 150; Stop 174
attggaaatcgctcttcagaatcat

SEQ ID NO: 304039 - DNA, 25 bp, Artificial
  probe
  misc_feature (1)..(25): SEQ ID NO: 1752; WAN024CEM; Start 80; Stop 104
aggagttaaaggaacattatgagga

SEQ ID NO: 304040 - DNA, 25 bp, Artificial
  probe
  misc_feature (1)..(25): SEQ ID NO: 1752; WAN024CEM; Start 149; Stop 173
aattggaaatcgctcttcagaatca

SEQ ID NO: 304041 - DNA, 25 bp, Artificial
  probe
  misc_feature (1)..(25): SEQ ID NO: 1752; WAN024CEM; Start 86; Stop 110
taaaggaacattatgaggaagtgac

SEQ ID NO: 304042 - DNA, 25 bp, Artificial
  probe
  misc_feature (1)..(25): SEQ ID NO: 1752; WAN024CEM; Start 151; Stop 175
ttggaaatcgctcttcagaatcatc

SEQ ID NO: 304043 - DNA, 25 bp, Artificial
  probe
  misc_feature (1)..(25): SEQ ID NO: 1752; WAN024CEM; Start 53; Stop 77
aaacacctgaagaataccaagccta

SEQ ID NO: 304044 - DNA, 25 bp, Artificial
  probe
  misc_feature (1)..(25): SEQ ID NO: 1752; WAN024CEM; Start 81; Stop 105
ggagttaaaggaacattatgaggaa

SEQ ID NO: 304045 - DNA, 25 bp, Artificial
  probe
  misc_feature (1)..(25): SEQ ID NO: 1752; WAN024CEM; Start 79; Stop 103
aaggagttaaaggaacattatgagg

SEQ ID NO: 304046 - DNA, 25 bp, Artificial
  probe
  misc_feature (1)..(25): SEQ ID NO: 1752; WAN024CEM; Start 55; Stop 79
acacctgaagaataccaagcctaca

SEQ ID NO: 304047 - DNA, 25 bp, Artificial
  probe
  misc_feature (1)..(25): SEQ ID NO: 1752; WAN024CEM; Start 20; Stop 44
atcaattagaagaggctttggtaca

SEQ ID NO: 304048 - DNA, 25 bp, Artificial
  probe
  misc_feature (1)..(25): SEQ ID NO: 1752; WAN024CEM; Start 21; Stop 45
tcaattagaagaggctttggtacag

SEQ ID NO: 304049 - DNA, 25 bp, Artificial
  probe
  misc_feature (1)..(25): SEQ ID NO: 1752; WAN024CEM; Start 85; Stop 109
ttaaaggaacattatgaggaagtga

SEQ ID NO: 304050 - DNA, 25 bp, Artificial
  probe
  misc_feature (1)..(25): SEQ ID NO: 1752; WAN024CEM; Start 77; Stop 101
acaaggagttaaaggaacattatga

SEQ ID NO: 304051 - DNA, 25 bp, Artificial
  probe
  misc_feature (1)..(25): SEQ ID NO: 1752; WAN024CEM; Start 58; Stop 82
cctgaagaataccaagcctacaagg

SEQ ID NO: 304052 - DNA, 25 bp, Artificial
  probe
  misc_feature (1)..(25): SEQ ID NO: 1752; WAN024CEM; Start 13; Stop 37
acctattatcaattagaagaggctt

SEQ ID NO: 304053 - DNA, 25 bp, Artificial
  probe
  misc_feature (1)..(25): SEQ ID NO: 1752; WAN024CEM; Start 66; Stop 90
ataccaagcctacaaggagttaaag

SEQ ID NO: 304054 - DNA, 25 bp, Artificial
  probe
  misc_feature (1)..(25): SEQ ID NO: 1752; WAN024CEM; Start 65; Stop 89
aataccaagcctacaaggagttaaa

SEQ ID NO: 304055 - DNA, 25 bp, Artificial
  probe
  misc_feature (1)..(25): SEQ ID NO: 1752; WAN024CEM; Start 17; Stop 41
attatcaattagaagaggctttggt

SEQ ID NO: 304056 - DNA, 25 bp, Artificial
  probe
  misc_feature (1)..(25): SEQ ID NO: 1752; WAN024CEM; Start 22; Stop 46
caattagaagaggctttggtacagg

SEQ ID NO: 304057 - DNA, 25 bp, Artificial
  probe
  misc_feature (1)..(25): SEQ ID NO: 1752; WAN024CEM; Start 84; Stop 108
gttaaaggaacattatgaggaagtg

SEQ ID NO: 304058 - DNA, 25 bp, Artificial
  probe
  misc_feature (1)..(25): SEQ ID NO: 1752; WAN024CEM; Start 73; Stop 97
gcctacaaggagttaaaggaacatt

SEQ ID NO: 304059 - DNA, 25 bp, Artificial
  probe
  misc_feature (1)..(25): SEQ ID NO: 1753; WAN024DRC; Start 66; Stop 90
cgataaatggctaaacaaggacaaa

SEQ ID NO: 304060 - DNA, 25 bp, Artificial
  probe
  misc_feature (1)..(25): SEQ ID NO: 1753; WAN024DRC; Start 68; Stop 92
ataaatggctaaacaaggacaaact

SEQ ID NO: 304061 - DNA, 25 bp, Artificial
  probe
  misc_feature (1)..(25): SEQ ID NO: 1753; WAN024DRC; Start 67; Stop 91
gataaatggctaaacaaggacaaac

SEQ ID NO: 304062 - DNA, 25 bp, Artificial
  probe
  misc_feature (1)..(25): SEQ ID NO: 1753; WAN024DRC; Start 69; Stop 93
taaatggctaaacaaggacaaacta

SEQ ID NO: 304063 - DNA, 25 bp, Artificial
  probe
  misc_feature (1)..(25): SEQ ID NO: 1753; WAN024DRC; Start 62; Stop 86
tagtcgataaatggctaaacaagga

SEQ ID NO: 304064 - DNA, 25 bp, Artificial
  probe
  misc_feature (1)..(25): SEQ ID NO: 1753; WAN024DRC; Start 47; Stop 71
gtgtcgttcttcgtatagtcgataa

SEQ ID NO: 304065 - DNA, 25 bp, Artificial
  probe
  misc_feature (1)..(25): SEQ ID NO: 1753; WAN024DRC; Start 65; Stop 89
tcgataaatggctaaacaaggacaa

SEQ ID NO: 304066 - DNA, 25 bp, Artificial
  probe
  misc_feature (1)..(25): SEQ ID NO: 1753; WAN024DRC; Start 61; Stop 85
atagtcgataaatggctaaacaagg

SEQ ID NO: 304067 - DNA, 25 bp, Artificial
  probe
  misc_feature (1)..(25): SEQ ID NO: 1753; WAN024DRC; Start 58; Stop 82
cgtatagtcgataaatggctaaaca

SEQ ID NO: 304068 - DNA, 25 bp, Artificial
  probe
  misc_feature (1)..(25): SEQ ID NO: 1753; WAN024DRC; Start 46; Stop 70
ggtgtcgttcttcgtatagtcgata

SEQ ID NO: 304069 - DNA, 25 bp, Artificial
  probe
  misc_feature (1)..(25): SEQ ID NO: 1753; WAN024DRC; Start 63; Stop 87
agtcgataaatggctaaacaaggac

SEQ ID NO: 304070 - DNA, 25 bp, Artificial
  probe
  misc_feature (1)..(25): SEQ ID NO: 1753; WAN024DRC; Start 64; Stop 88
gtcgataaatggctaaacaaggaca

SEQ ID NO: 304071 - DNA, 25 bp, Artificial
  probe
  misc_feature (1)..(25): SEQ ID NO: 1753; WAN024DRC; Start 42; Stop 66
ggtcggtgtcgttcttcgtatagtc

SEQ ID NO: 304072 - DNA, 25 bp, Artificial
  probe
  misc_feature (1)..(25): SEQ ID NO: 1753; WAN024DRC; Start 53; Stop 77
ttcttcgtatagtcgataaatggct

SEQ ID NO: 304073 - DNA, 25 bp, Artificial
  probe
  misc_feature (1)..(25): SEQ ID NO: 1753; WAN024DRC; Start 52; Stop 76
gttcttcgtatagtcgataaatggc

SEQ ID NO: 304074 - DNA, 25 bp, Artificial
  probe
  misc_feature (1)..(25): SEQ ID NO: 1753; WAN024DRC; Start 51; Stop 75
cgttcttcgtatagtcgataaatgg

SEQ ID NO: 304075 - DNA, 25 bp, Artificial
  probe
  misc_feature (1)..(25): SEQ ID NO: 1753; WAN024DRC; Start 48; Stop 72
tgtcgttcttcgtatagtcgataaa

SEQ ID NO: 304076 - DNA, 25 bp, Artificial
  probe
  misc_feature (1)..(25): SEQ ID NO: 1753; WAN024DRC; Start 59; Stop 83
gtatagtcgataaatggctaaacaa

SEQ ID NO: 304077 - DNA, 25 bp, Artificial
  probe
  misc_feature (1)..(25): SEQ ID NO: 1753; WAN024DRC; Start 54; Stop 78
tcttcgtatagtcgataaatggcta

SEQ ID NO: 304078 - DNA, 25 bp, Artificial
  probe
  misc_feature (1)..(25): SEQ ID NO: 1753; WAN024DRC; Start 57; Stop 81
tcgtatagtcgataaatggctaaac

SEQ ID NO: 304079 - DNA, 25 bp, Artificial
  probe
  misc_feature (1)..(25): SEQ ID NO: 1753; WAN024DRC; Start 50; Stop 74
tcgttcttcgtatagtcgataaatg

SEQ ID NO: 304080 - DNA, 25 bp, Artificial
  probe
  misc_feature (1)..(25): SEQ ID NO: 1753; WAN024DRC; Start 49; Stop 73
gtcgttcttcgtatagtcgataaat

SEQ ID NO: 304081 - DNA, 25 bp, Artificial
  probe
  misc_feature (1)..(25): SEQ ID NO: 1753; WAN024DRC; Start 43; Stop 67
gtcggtgtcgttcttcgtatagtcg

SEQ ID NO: 304082 - DNA, 25 bp, Artificial
  probe
  misc_feature (1)..(25): SEQ ID NO: 1753; WAN024DRC; Start 40; Stop 64
gtggtcggtgtcgttcttcgtatag

SEQ ID NO: 304083 - DNA, 25 bp, Artificial
  probe
  misc_feature (1)..(25): SEQ ID NO: 1753; WAN024DRC; Start 60; Stop 84
tatagtcgataaatggctaaacaag

SEQ ID NO: 304084 - DNA, 25 bp, Artificial
  probe
  misc_feature (1)..(25): SEQ ID NO: 1753; WAN024DRC; Start 55; Stop 79
cttcgtatagtcgataaatggctaa

SEQ ID NO: 304085 - DNA, 25 bp, Artificial
  probe
  misc_feature (1)..(25): SEQ ID NO: 1753; WAN024DRC; Start 56; Stop 80
ttcgtatagtcgataaatggctaaa

SEQ ID NO: 304086 - DNA, 25 bp, Artificial
  probe
  misc_feature (1)..(25): SEQ ID NO: 1753; WAN024DRC; Start 45; Stop 69
cggtgtcgttcttcgtatagtcgat

SEQ ID NO: 304087 - DNA, 25 bp, Artificial
  probe
  misc_feature (1)..(25): SEQ ID NO: 1753; WAN024DRC; Start 2; Stop 26
tgatggaattagtactcaaaactat

SEQ ID NO: 304088 - DNA, 25 bp, Artificial
  probe
  misc_feature (1)..(25): SEQ ID NO: 1753; WAN024DRC; Start 1; Stop 25
atgatggaattagtactcaaaacta

SEQ ID NO: 304089 - DNA, 25 bp, Artificial
  probe
  misc_feature (1)..(25): SEQ ID NO: 1754; WAN024DDH; Start 475; Stop 499
gatggtcaaggaactattctcgtaa

SEQ ID NO: 304090 - DNA, 25 bp, Artificial
  probe
  misc_feature (1)..(25): SEQ ID NO: 1754; WAN024DDH; Start 476; Stop 500
atggtcaaggaactattctcgtaac

SEQ ID NO: 304091 - DNA, 25 bp, Artificial
  probe
  misc_feature (1)..(25): SEQ ID NO: 1754; WAN024DDH; Start 841; Stop 865
ggctacatctatgaagaaggagaag

SEQ ID NO: 304092 - DNA, 25 bp, Artificial
  probe
  misc_feature (1)..(25): SEQ ID NO: 1754; WAN024DDH; Start 840; Stop 864
aggctacatctatgaagaaggagaa

SEQ ID NO: 304093 - DNA, 25 bp, Artificial
  probe
  misc_feature (1)..(25): SEQ ID NO: 1754; WAN024DDH; Start 842; Stop 866
gctacatctatgaagaaggagaaga

SEQ ID NO: 304094 - DNA, 25 bp, Artificial
  probe
  misc_feature (1)..(25): SEQ ID NO: 1754; WAN024DDH; Start 478; Stop 502
ggtcaaggaactattctcgtaactg

SEQ ID NO: 304095 - DNA, 25 bp, Artificial
  probe
  misc_feature (1)..(25): SEQ ID NO: 1754; WAN024DDH; Start 479; Stop 503
gtcaaggaactattctcgtaactga

SEQ ID NO: 304096 - DNA, 25 bp, Artificial
  probe
  misc_feature (1)..(25): SEQ ID NO: 1754; WAN024DDH; Start 477; Stop 501
tggtcaaggaactattctcgtaact

SEQ ID NO: 304097 - DNA, 25 bp, Artificial
  probe
  misc_feature (1)..(25): SEQ ID NO: 1754; WAN024DDH; Start 839; Stop 863
caggctacatctatgaagaaggaga

SEQ ID NO: 304098 - DNA, 25 bp, Artificial
  probe
  misc_feature (1)..(25): SEQ ID NO: 1754; WAN024DDH; Start 480; Stop 504
tcaaggaactattctcgtaactgaa

SEQ ID NO: 304099 - DNA, 25 bp, Artificial
  probe
  misc_feature (1)..(25): SEQ ID NO: 1754; WAN024DDH; Start 471; Stop 495
tagcgatggtcaaggaactattctc

SEQ ID NO: 304100 - DNA, 25 bp, Artificial
  probe
  misc_feature (1)..(25): SEQ ID NO: 1754; WAN024DDH; Start 470; Stop 494
atagcgatggtcaaggaactattct

SEQ ID NO: 304101 - DNA, 25 bp, Artificial
  probe
  misc_feature (1)..(25): SEQ ID NO: 1754; WAN024DDH; Start 469; Stop 493
catagcgatggtcaaggaactattc

SEQ ID NO: 304102 - DNA, 25 bp, Artificial
  probe
  misc_feature (1)..(25): SEQ ID NO: 1754; WAN024DDH; Start 838; Stop 862
ccaggctacatctatgaagaaggag

SEQ ID NO: 304103 - DNA, 25 bp, Artificial
  probe
  misc_feature (1)..(25): SEQ ID NO: 1754; WAN024DDH; Start 767; Stop 791
aaggttgtcacttcaccattcataa

SEQ ID NO: 304104 - DNA, 25 bp, Artificial
  probe
  misc_feature (1)..(25): SEQ ID NO: 1754; WAN024DDH; Start 194; Stop 218
atctatctgaagcccaatcctatct

SEQ ID NO: 304105 - DNA, 25 bp, Artificial
  probe
  misc_feature (1)..(25): SEQ ID NO: 1754; WAN024DDH; Start 811; Stop 835
cgacaagttgtgacagaagaagatt

SEQ ID NO: 304106 - DNA, 25 bp, Artificial
  probe
  misc_feature (1)..(25): SEQ ID NO: 1754; WAN024DDH; Start 191; Stop 215
cctatctatctgaagcccaatccta

SEQ ID NO: 304107 - DNA, 25 bp, Artificial
  probe
  misc_feature (1)..(25): SEQ ID NO: 1754; WAN024DDH; Start 843; Stop 867
ctacatctatgaagaaggagaagaa

SEQ ID NO: 304108 - DNA, 25 bp, Artificial
  probe
  misc_feature (1)..(25): SEQ ID NO: 1754; WAN024DDH; Start 300; Stop 324
taaaggtaagaaattagccgtggat

SEQ ID NO: 304109 - DNA, 25 bp, Artificial
  probe
  misc_feature (1)..(25): SEQ ID NO: 1754; WAN024DDH; Start 299; Stop 323
ataaaggtaagaaattagccgtgga

SEQ ID NO: 304110 - DNA, 25 bp, Artificial
  probe
  misc_feature (1)..(25): SEQ ID NO: 1754; WAN024DDH; Start 298; Stop 322
gataaaggtaagaaattagccgtgg

SEQ ID NO: 304111 - DNA, 25 bp, Artificial
  probe
  misc_feature (1)..(25): SEQ ID NO: 1754; WAN024DDH; Start 772; Stop 796
tgtcacttcaccattcataaattgc

SEQ ID NO: 304112 - DNA, 25 bp, Artificial
  probe
  misc_feature (1)..(25): SEQ ID NO: 1754; WAN024DDH; Start 775; Stop 799
cacttcaccattcataaattgccta

SEQ ID NO: 304113 - DNA, 25 bp, Artificial
  probe
  misc_feature (1)..(25): SEQ ID NO: 1754; WAN024DDH; Start 778; Stop 802
ttcaccattcataaattgcctatcc

SEQ ID NO: 304114 - DNA, 25 bp, Artificial
  probe
  misc_feature (1)..(25): SEQ ID NO: 1754; WAN024DDH; Start 193; Stop 217
tatctatctgaagcccaatcctatc

SEQ ID NO: 304115 - DNA, 25 bp, Artificial
  probe
  misc_feature (1)..(25): SEQ ID NO: 1754; WAN024DDH; Start 192; Stop 216
ctatctatctgaagcccaatcctat

SEQ ID NO: 304116 - DNA, 25 bp, Artificial
  probe
  misc_feature (1)..(25): SEQ ID NO: 1754; WAN024DDH; Start 195; Stop 219
tctatctgaagcccaatcctatctt

SEQ ID NO: 304117 - DNA, 25 bp, Artificial
  probe
  misc_feature (1)..(25): SEQ ID NO: 1754; WAN024DDH; Start 301; Stop 325
aaaggtaagaaattagccgtggatt

SEQ ID NO: 304118 - DNA, 25 bp, Artificial
  probe
  misc_feature (1)..(25): SEQ ID NO: 1754; WAN024DDH; Start 297; Stop 321
tgataaaggtaagaaattagccgtg

SEQ ID NO: 304119 - DNA, 25 bp, Artificial
  probe
  misc_feature (1)..(25): SEQ ID NO: 1754; WAN024DDH; Start 781; Stop 805
accattcataaattgcctatccctg

SEQ ID NO: 304120 - DNA, 25 bp, Artificial
  probe
  misc_feature (1)..(25): SEQ ID NO: 1754; WAN024DDH; Start 780; Stop 804
caccattcataaattgcctatccct

SEQ ID NO: 304121 - DNA, 25 bp, Artificial
  probe
  misc_feature (1)..(25): SEQ ID NO: 1754; WAN024DDH; Start 779; Stop 803
tcaccattcataaattgcctatccc

SEQ ID NO: 304122 - DNA, 25 bp, Artificial
  probe
  misc_feature (1)..(25): SEQ ID NO: 1755; WAN024DV4; Start 418; Stop 442
ctgagagatggagtgattaaggatt

SEQ ID NO: 304123 - DNA, 25 bp, Artificial
  probe
  misc_feature (1)..(25): SEQ ID NO: 1755; WAN024DV4; Start 556; Stop 580
gagttgatggatatgctggatgaat

SEQ ID NO: 304124 - DNA, 25 bp, Artificial
  probe
  misc_feature (1)..(25): SEQ ID NO: 1755; WAN024DV4; Start 123; Stop 147
ctggtatgaagtgttggtaagtctc

SEQ ID NO: 304125 - DNA, 25 bp, Artificial
  probe
  misc_feature (1)..(25): SEQ ID NO: 1755; WAN024DV4; Start 559; Stop 583
ttgatggatatgctggatgaatctg

SEQ ID NO: 304126 - DNA, 25 bp, Artificial
  probe
  misc_feature (1)..(25): SEQ ID NO: 1755; WAN024DV4; Start 558; Stop 582
gttgatggatatgctggatgaatct

SEQ ID NO: 304127 - DNA, 25 bp, Artificial
  probe
  misc_feature (1)..(25): SEQ ID NO: 1755; WAN024DV4; Start 557; Stop 581
agttgatggatatgctggatgaatc

SEQ ID NO: 304128 - DNA, 25 bp, Artificial
  probe
  misc_feature (1)..(25): SEQ ID NO: 1755; WAN024DV4; Start 125; Stop 149
ggtatgaagtgttggtaagtctctt

SEQ ID NO: 304129 - DNA, 25 bp, Artificial
  probe
  misc_feature (1)..(25): SEQ ID NO: 1755; WAN024DV4; Start 124; Stop 148
tggtatgaagtgttggtaagtctct

SEQ ID NO: 304130 - DNA, 25 bp, Artificial
  probe
  misc_feature (1)..(25): SEQ ID NO: 1755; WAN024DV4; Start 561; Stop 585
gatggatatgctggatgaatctgtc

SEQ ID NO: 304131 - DNA, 25 bp, Artificial
  probe
  misc_feature (1)..(25): SEQ ID NO: 1755; WAN024DV4; Start 553; Stop 577
gatgagttgatggatatgctggatg

SEQ ID NO: 304132 - DNA, 25 bp, Artificial
  probe
  misc_feature (1)..(25): SEQ ID NO: 1755; WAN024DV4; Start 552; Stop 576
agatgagttgatggatatgctggat

SEQ ID NO: 304133 - DNA, 25 bp, Artificial
  probe
  misc_feature (1)..(25): SEQ ID NO: 1755; WAN024DV4; Start 554; Stop 578
atgagttgatggatatgctggatga

SEQ ID NO: 304134 - DNA, 25 bp, Artificial
  probe
  misc_feature (1)..(25): SEQ ID NO: 1755; WAN024DV4; Start 417; Stop 441
gctgagagatggagtgattaaggat

SEQ ID NO: 304135 - DNA, 25 bp, Artificial
  probe
  misc_feature (1)..(25): SEQ ID NO: 1755; WAN024DV4; Start 560; Stop 584
tgatggatatgctggatgaatctgt

SEQ ID NO: 304136 - DNA, 25 bp, Artificial
  probe
  misc_feature (1)..(25): SEQ ID NO: 1755; WAN024DV4; Start 1019; Stop 1043
ggtactatatcgcctatggactctt

SEQ ID NO: 304137 - DNA, 25 bp, Artificial
  probe
  misc_feature (1)..(25): SEQ ID NO: 1755; WAN024DV4; Start 555; Stop 579
tgagttgatggatatgctggatgaa

SEQ ID NO: 304138 - DNA, 25 bp, Artificial
  probe
  misc_feature (1)..(25): SEQ ID NO: 1755; WAN024DV4; Start 122; Stop 146
cctggtatgaagtgttggtaagtct

SEQ ID NO: 304139 - DNA, 25 bp, Artificial
  probe
  misc_feature (1)..(25): SEQ ID NO: 1755; WAN024DV4; Start 551; Stop 575
gagatgagttgatggatatgctgga

SEQ ID NO: 304140 - DNA, 25 bp, Artificial
  probe
  misc_feature (1)..(25): SEQ ID NO: 1755; WAN024DV4; Start 545; Stop 569
ctgagcgagatgagttgatggatat

SEQ ID NO: 304141 - DNA, 25 bp, Artificial
  probe
  misc_feature (1)..(25): SEQ ID NO: 1755; WAN024DV4; Start 1017; Stop 1041
ctggtactatatcgcctatggactc

SEQ ID NO: 304142 - DNA, 25 bp, Artificial
  probe
  misc_feature (1)..(25): SEQ ID NO: 1755; WAN024DV4; Start 1018; Stop 1042
tggtactatatcgcctatggactct

SEQ ID NO: 304143 - DNA, 25 bp, Artificial
  probe
  misc_feature (1)..(25): SEQ ID NO: 1755; WAN024DV4; Start 546; Stop 570
tgagcgagatgagttgatggatatg

SEQ ID NO: 304144 - DNA, 25 bp, Artificial
  probe
  misc_feature (1)..(25): SEQ ID NO: 1755; WAN024DV4; Start 946; Stop 970
aatcgtaatgtaacctcaagcatgg

SEQ ID NO: 304145 - DNA, 25 bp, Artificial
  probe
  misc_feature (1)..(25): SEQ ID NO: 1755; WAN024DV4; Start 1012; Stop 1036
gtgacctggtactatatcgcctatg

SEQ ID NO: 304146 - DNA, 25 bp, Artificial
  probe
  misc_feature (1)..(25): SEQ ID NO: 1755; WAN024DV4; Start 1182; Stop 1206
tgttgtcatgttgtcattcttaatc

SEQ ID NO: 304147 - DNA, 25 bp, Artificial
  probe
  misc_feature (1)..(25): SEQ ID NO: 1755; WAN024DV4; Start 679; Stop 703
tcaggtggcttctttaatctctatg

SEQ ID NO: 304148 - DNA, 25 bp, Artificial
  probe
  misc_feature (1)..(25): SEQ ID NO: 1755; WAN024DV4; Start 678; Stop 702
gtcaggtggcttctttaatctctat

SEQ ID NO: 304149 - DNA, 25 bp, Artificial
  probe
  misc_feature (1)..(25): SEQ ID NO: 1755; WAN024DV4; Start 302; Stop 326
ccctacttccgattatctttgtcaa

SEQ ID NO: 304150 - DNA, 25 bp, Artificial
  probe
  misc_feature (1)..(25): SEQ ID NO: 1755; WAN024DV4; Start 1022; Stop 1046
actatatcgcctatggactctttca

SEQ ID NO: 304151 - DNA, 25 bp, Artificial
  probe
  misc_feature (1)..(25): SEQ ID NO: 1755; WAN024DV4; Start 794; Stop 818
gaatccgtagccctatcaactttaa

SEQ ID NO: 304152 - DNA, 25 bp, Artificial
  probe
  misc_feature (1)..(25): SEQ ID NO: 1755; WAN024DV4; Start 300; Stop 324
gtccctacttccgattatctttgtc

SEQ ID NO: 304153 - DNA, 25 bp, Artificial
  probe
  misc_feature (1)..(25): SEQ ID NO: 1755; WAN024DV4; Start 298; Stop 322
ctgtccctacttccgattatctttg

SEQ ID NO: 304154 - DNA, 25 bp, Artificial
  probe
  misc_feature (1)..(25): SEQ ID NO: 1755; WAN024DV4; Start 297; Stop 321
tctgtccctacttccgattatcttt

SEQ ID NO: 304155 - DNA, 25 bp, Artificial
  probe
  misc_feature (1)..(25): SEQ ID NO: 1756; WAN024GNR; Start 68; Stop 92
caatcgctacaaagacagacaagac

SEQ ID NO: 304156 - DNA, 25 bp, Artificial
  probe
  misc_feature (1)..(25): SEQ ID NO: 1756; WAN024GNR; Start 171; Stop 195
gattcccaagagagcaaccaatact

SEQ ID NO: 304157 - DNA, 25 bp, Artificial
  probe
  misc_feature (1)..(25): SEQ ID NO: 1756; WAN024GNR; Start 30; Stop 54
tgaaaccttagaaatagacttgagt

SEQ ID NO: 304158 - DNA, 25 bp, Artificial
  probe
  misc_feature (1)..(25): SEQ ID NO: 1756; WAN024GNR; Start 36; Stop 60
cttagaaatagacttgagtccacca

SEQ ID NO: 304159 - DNA, 25 bp, Artificial
  probe
  misc_feature (1)..(25): SEQ ID NO: 1756; WAN024GNR; Start 35; Stop 59
ccttagaaatagacttgagtccacc

SEQ ID NO: 304160 - DNA, 25 bp, Artificial
  probe
  misc_feature (1)..(25): SEQ ID NO: 1756; WAN024GNR; Start 34; Stop 58
accttagaaatagacttgagtccac

SEQ ID NO: 304161 - DNA, 25 bp, Artificial
  probe
  misc_feature (1)..(25): SEQ ID NO: 1756; WAN024GNR; Start 40; Stop 64
gaaatagacttgagtccaccaaaga

SEQ ID NO: 304162 - DNA, 25 bp, Artificial
  probe
  misc_feature (1)..(25): SEQ ID NO: 1756; WAN024GNR; Start 39; Stop 63
agaaatagacttgagtccaccaaag

SEQ ID NO: 304163 - DNA, 25 bp, Artificial
  probe
  misc_feature (1)..(25): SEQ ID NO: 1756; WAN024GNR; Start 41; Stop 65
aaatagacttgagtccaccaaagac

SEQ ID NO: 304164 - DNA, 25 bp, Artificial
  probe
  misc_feature (1)..(25): SEQ ID NO: 1756; WAN024GNR; Start 38; Stop 62
tagaaatagacttgagtccaccaaa

SEQ ID NO: 304165 - DNA, 25 bp, Artificial
  probe
  misc_feature (1)..(25): SEQ ID NO: 1756; WAN024GNR; Start 37; Stop 61
ttagaaatagacttgagtccaccaa

SEQ ID NO: 304166 - DNA, 25 bp, Artificial
  probe
  misc_feature (1)..(25): SEQ ID NO: 1756; WAN024GNR; Start 33; Stop 57
aaccttagaaatagacttgagtcca

SEQ ID NO: 304167 - DNA, 25 bp, Artificial
  probe
  misc_feature (1)..(25): SEQ ID NO: 1756; WAN024GNR; Start 172; Stop 196
attcccaagagagcaaccaatactc

SEQ ID NO: 304168 - DNA, 25 bp, Artificial
  probe
  misc_feature (1)..(25): SEQ ID NO: 1756; WAN024GNR; Start 28; Stop 52
gttgaaaccttagaaatagacttga

SEQ ID NO: 304169 - DNA, 25 bp, Artificial
  probe
  misc_feature (1)..(25): SEQ ID NO: 1756; WAN024GNR; Start 74; Stop 98
ctacaaagacagacaagacgagagc

SEQ ID NO: 304170 - DNA, 25 bp, Artificial
  probe
  misc_feature (1)..(25): SEQ ID NO: 1756; WAN024GNR; Start 73; Stop 97
gctacaaagacagacaagacgagag

SEQ ID NO: 304171 - DNA, 25 bp, Artificial
  probe
  misc_feature (1)..(25): SEQ ID NO: 1756; WAN024GNR; Start 29; Stop 53
ttgaaaccttagaaatagacttgag

SEQ ID NO: 304172 - DNA, 25 bp, Artificial
  probe
  misc_feature (1)..(25): SEQ ID NO: 1756; WAN024GNR; Start 32; Stop 56
aaaccttagaaatagacttgagtcc

SEQ ID NO: 304173 - DNA, 25 bp, Artificial
  probe
  misc_feature (1)..(25): SEQ ID NO: 1756; WAN024GNR; Start 69; Stop 93
aatcgctacaaagacagacaagacg

SEQ ID NO: 304174 - DNA, 25 bp, Artificial
  probe
  misc_feature (1)..(25): SEQ ID NO: 1756; WAN024GNR; Start 27; Stop 51
agttgaaaccttagaaatagacttg

SEQ ID NO: 304175 - DNA, 25 bp, Artificial
  probe
  misc_feature (1)..(25): SEQ ID NO: 1756; WAN024GNR; Start 116; Stop 140
tcgtcgttgtattttggatagattc

SEQ ID NO: 304176 - DNA, 25 bp, Artificial
  probe
  misc_feature (1)..(25): SEQ ID NO: 1756; WAN024GNR; Start 117; Stop 141
cgtcgttgtattttggatagattct

SEQ ID NO: 304177 - DNA, 25 bp, Artificial
  probe
  misc_feature (1)..(25): SEQ ID NO: 1756; WAN024GNR; Start 67; Stop 91
gcaatcgctacaaagacagacaaga

SEQ ID NO: 304178 - DNA, 25 bp, Artificial
  probe
  misc_feature (1)..(25): SEQ ID NO: 1756; WAN024GNR; Start 22; Stop 46
acagtagttgaaaccttagaaatag

SEQ ID NO: 304179 - DNA, 25 bp, Artificial
  probe
  misc_feature (1)..(25): SEQ ID NO: 1756; WAN024GNR; Start 170; Stop 194
cgattcccaagagagcaaccaatac

SEQ ID NO: 304180 - DNA, 25 bp, Artificial
  probe
  misc_feature (1)..(25): SEQ ID NO: 1756; WAN024GNR; Start 115; Stop 139
atcgtcgttgtattttggatagatt

SEQ ID NO: 304181 - DNA, 25 bp, Artificial
  probe
  misc_feature (1)..(25): SEQ ID NO: 1756; WAN024GNR; Start 114; Stop 138
aatcgtcgttgtattttggatagat

SEQ ID NO: 304182 - DNA, 25 bp, Artificial
  probe
  misc_feature (1)..(25): SEQ ID NO: 1756; WAN024GNR; Start 24; Stop 48
agtagttgaaaccttagaaatagac

SEQ ID NO: 304183 - DNA, 25 bp, Artificial
  probe
  misc_feature (1)..(25): SEQ ID NO: 1756; WAN024GNR; Start 23; Stop 47
cagtagttgaaaccttagaaataga

SEQ ID NO: 304184 - DNA, 25 bp, Artificial
  probe
  misc_feature (1)..(25): SEQ ID NO: 1756; WAN024GNR; Start 118; Stop 142
gtcgttgtattttggatagattctg

SEQ ID NO: 304185 - DNA, 25 bp, Artificial
  probe
  misc_feature (1)..(25): SEQ ID NO: 1756; WAN024GNR; Start 31; Stop 55
gaaaccttagaaatagacttgagtc

SEQ ID NO: 304186 - DNA, 25 bp, Artificial
  probe
  misc_feature (1)..(25): SEQ ID NO: 1756; WAN024GNR; Start 113; Stop 137
aaatcgtcgttgtattttggataga

SEQ ID NO: 304187 - DNA, 25 bp, Artificial
  probe
  misc_feature (1)..(25): SEQ ID NO: 1756; WAN024GNR; Start 59; Stop 83
caaagactgcaatcgctacaaagac

SEQ ID NO: 304188 - DNA, 25 bp, Artificial
  probe
  misc_feature (1)..(25): SEQ ID NO: 1757; WAN024CGG-3; Start 87; Stop 111
aatcattgtggcaccttataacgat

SEQ ID NO: 304189 - DNA, 25 bp, Artificial
  probe
  misc_feature (1)..(25): SEQ ID NO: 1757; WAN024CGG-3; Start 756; Stop 780
gcactattctattgaagcctgtgat

SEQ ID NO: 304190 - DNA, 25 bp, Artificial
  probe
  misc_feature (1)..(25): SEQ ID NO: 1757; WAN024CGG-3; Start 662; Stop 686
aactcaacttgtctggaactctctg

SEQ ID NO: 304191 - DNA, 25 bp, Artificial
  probe
  misc_feature (1)..(25): SEQ ID NO: 1757; WAN024CGG-3; Start 757; Stop 781
cactattctattgaagcctgtgatt

SEQ ID NO: 304192 - DNA, 25 bp, Artificial
  probe
  misc_feature (1)..(25): SEQ ID NO: 1757; WAN024CGG-3; Start 88; Stop 112
atcattgtggcaccttataacgatg

SEQ ID NO: 304193 - DNA, 25 bp, Artificial
  probe
  misc_feature (1)..(25): SEQ ID NO: 1757; WAN024CGG-3; Start 571; Stop 595
aacaatatcctgtctaagaccatcg

SEQ ID NO: 304194 - DNA, 25 bp, Artificial
  probe
  misc_feature (1)..(25): SEQ ID NO: 1757; WAN024CGG-3; Start 574; Stop 598
aatatcctgtctaagaccatcgtac

SEQ ID NO: 304195 - DNA, 25 bp, Artificial
  probe
  misc_feature (1)..(25): SEQ ID NO: 1757; WAN024CGG-3; Start 573; Stop 597
caatatcctgtctaagaccatcgta

SEQ ID NO: 304196 - DNA, 25 bp, Artificial
  probe
  misc_feature (1)..(25): SEQ ID NO: 1757; WAN024CGG-3; Start 569; Stop 593
gcaacaatatcctgtctaagaccat

SEQ ID NO: 304197 - DNA, 25 bp, Artificial
  probe
  misc_feature (1)..(25): SEQ ID NO: 1757; WAN024CGG-3; Start 661; Stop 685
caactcaacttgtctggaactctct

SEQ ID NO: 304198 - DNA, 25 bp, Artificial
  probe
  misc_feature (1)..(25): SEQ ID NO: 1757; WAN024CGG-3; Start 743; Stop 767
cacataactctgggcactattctat

SEQ ID NO: 304199 - DNA, 25 bp, Artificial
  probe
  misc_feature (1)..(25): SEQ ID NO: 1757; WAN024CGG-3; Start 575; Stop 599
atatcctgtctaagaccatcgtacc

SEQ ID NO: 304200 - DNA, 25 bp, Artificial
  probe
  misc_feature (1)..(25): SEQ ID NO: 1757; WAN024CGG-3; Start 572; Stop 596
acaatatcctgtctaagaccatcgt

SEQ ID NO: 304201 - DNA, 25 bp, Artificial
  probe
  misc_feature (1)..(25): SEQ ID NO: 1757; WAN024CGG-3; Start 570; Stop 594
caacaatatcctgtctaagaccatc

SEQ ID NO: 304202 - DNA, 25 bp, Artificial
  probe
  misc_feature (1)..(25): SEQ ID NO: 1757; WAN024CGG-3; Start 744; Stop 768
acataactctgggcactattctatt

SEQ ID NO: 304203 - DNA, 25 bp, Artificial
  probe
  misc_feature (1)..(25): SEQ ID NO: 1757; WAN024CGG-3; Start 745; Stop 769
cataactctgggcactattctattg

SEQ ID NO: 304204 - DNA, 25 bp, Artificial
  probe
  misc_feature (1)..(25): SEQ ID NO: 1757; WAN024CGG-3; Start 762; Stop 786
ttctattgaagcctgtgatttctct

SEQ ID NO: 304205 - DNA, 25 bp, Artificial
  probe
  misc_feature (1)..(25): SEQ ID NO: 1757; WAN024CGG-3; Start 763; Stop 787
tctattgaagcctgtgatttctctc

SEQ ID NO: 304206 - DNA, 25 bp, Artificial
  probe
  misc_feature (1)..(25): SEQ ID NO: 1757; WAN024CGG-3; Start 748; Stop 772
aactctgggcactattctattgaag

SEQ ID NO: 304207 - DNA, 25 bp, Artificial
  probe
  misc_feature (1)..(25): SEQ ID NO: 1757; WAN024CGG-3; Start 559; Stop 583
aatatccaccgcaacaatatcctgt

SEQ ID NO: 304208 - DNA, 25 bp, Artificial
  probe
  misc_feature (1)..(25): SEQ ID NO: 1757; WAN024CGG-3; Start 746; Stop 770
ataactctgggcactattctattga

SEQ ID NO: 304209 - DNA, 25 bp, Artificial
  probe
  misc_feature (1)..(25): SEQ ID NO: 1757; WAN024CGG-3; Start 747; Stop 771
taactctgggcactattctattgaa

SEQ ID NO: 304210 - DNA, 25 bp, Artificial
  probe
  misc_feature (1)..(25): SEQ ID NO: 1757; WAN024CGG-3; Start 664; Stop 688
ctcaacttgtctggaactctctgtg

SEQ ID NO: 304211 - DNA, 25 bp, Artificial
  probe
  misc_feature (1)..(25): SEQ ID NO: 1757; WAN024CGG-3; Start 761; Stop 785
attctattgaagcctgtgatttctc

SEQ ID NO: 304212 - DNA, 25 bp, Artificial
  probe
  misc_feature (1)..(25): SEQ ID NO: 1757; WAN024CGG-3; Start 780; Stop 804
tttctctcagtttgacacccatatt

SEQ ID NO: 304213 - DNA, 25 bp, Artificial
  probe
  misc_feature (1)..(25): SEQ ID NO: 1757; WAN024CGG-3; Start 779; Stop 803
atttctctcagtttgacacccatat

SEQ ID NO: 304214 - DNA, 25 bp, Artificial
  probe
  misc_feature (1)..(25): SEQ ID NO: 1757; WAN024CGG-3; Start 781; Stop 805
ttctctcagtttgacacccatattc

SEQ ID NO: 304215 - DNA, 25 bp, Artificial
  probe
  misc_feature (1)..(25): SEQ ID NO: 1757; WAN024CGG-3; Start 778; Stop 802
gatttctctcagtttgacacccata

SEQ ID NO: 304216 - DNA, 25 bp, Artificial
  probe
  misc_feature (1)..(25): SEQ ID NO: 1757; WAN024CGG-3; Start 565; Stop 589
caccgcaacaatatcctgtctaaga

SEQ ID NO: 304217 - DNA, 25 bp, Artificial
  probe
  misc_feature (1)..(25): SEQ ID NO: 1757; WAN024CGG-3; Start 558; Stop 582
aaatatccaccgcaacaatatcctg

SEQ ID NO: 304218 - DNA, 25 bp, Artificial
  probe
  misc_feature (1)..(25): SEQ ID NO: 1757; WAN024CGG-3; Start 764; Stop 788
ctattgaagcctgtgatttctctca

SEQ ID NO: 304219 - DNA, 25 bp, Artificial
  probe
  misc_feature (1)..(25): SEQ ID NO: 1757; WAN024CGG-3; Start 560; Stop 584
atatccaccgcaacaatatcctgtc

SEQ ID NO: 304220 - DNA, 25 bp, Artificial
  probe
  misc_feature (1)..(25): SEQ ID NO: 1757; WAN024CGG-3; Start 89; Stop 113
tcattgtggcaccttataacgatgt

SEQ ID NO: 304221 - DNA, 25 bp, Artificial
  probe
  misc_feature (1)..(25): SEQ ID NO: 1758; WAN024DMV; Start 3; Stop 27
gatgggagatgggatgaaagaattt

SEQ ID NO: 304222 - DNA, 25 bp, Artificial
  probe
  misc_feature (1)..(25): SEQ ID NO: 1758; WAN024DMV; Start 1; Stop 25
atgatgggagatgggatgaaagaat

SEQ ID NO: 304223 - DNA, 25 bp, Artificial
  probe
  misc_feature (1)..(25): SEQ ID NO: 1758; WAN024DMV; Start 140; Stop 164
atacagaaacgagttcagcactaat

SEQ ID NO: 304224 - DNA, 25 bp, Artificial
  probe
  misc_feature (1)..(25): SEQ ID NO: 1758; WAN024DMV; Start 146; Stop 170
aaacgagttcagcactaatttcaag

SEQ ID NO: 304225 - DNA, 25 bp, Artificial
  probe
  misc_feature (1)..(25): SEQ ID NO: 1758; WAN024DMV; Start 150; Stop 174
gagttcagcactaatttcaagtcat

SEQ ID NO: 304226 - DNA, 25 bp, Artificial
  probe
  misc_feature (1)..(25): SEQ ID NO: 1758; WAN024DMV; Start 141; Stop 165
tacagaaacgagttcagcactaatt

SEQ ID NO: 304227 - DNA, 25 bp, Artificial
  probe
  misc_feature (1)..(25): SEQ ID NO: 1758; WAN024DMV; Start 84; Stop 108
ggtcttgctaggaacgagtttattt

SEQ ID NO: 304228 - DNA, 25 bp, Artificial
  probe
  misc_feature (1)..(25): SEQ ID NO: 1758; WAN024DMV; Start 139; Stop 163
gatacagaaacgagttcagcactaa

SEQ ID NO: 304229 - DNA, 25 bp, Artificial
  probe
  misc_feature (1)..(25): SEQ ID NO: 1758; WAN024DMV; Start 151; Stop 175
agttcagcactaatttcaagtcatt

SEQ ID NO: 304230 - DNA, 25 bp, Artificial
  probe
  misc_feature (1)..(25): SEQ ID NO: 1758; WAN024DMV; Start 2; Stop 26
tgatgggagatgggatgaaagaatt

SEQ ID NO: 304231 - DNA, 25 bp, Artificial
  probe
  misc_feature (1)..(25): SEQ ID NO: 1758; WAN024DMV; Start 147; Stop 171
aacgagttcagcactaatttcaagt

SEQ ID NO: 304232 - DNA, 25 bp, Artificial
  probe
  misc_feature (1)..(25): SEQ ID NO: 1758; WAN024DMV; Start 142; Stop 166
acagaaacgagttcagcactaattt

SEQ ID NO: 304233 - DNA, 25 bp, Artificial
  probe
  misc_feature (1)..(25): SEQ ID NO: 1758; WAN024DMV; Start 178; Stop 202
ttggatgagcaggatttatctgaaa

SEQ ID NO: 304234 - DNA, 25 bp, Artificial
  probe
  misc_feature (1)..(25): SEQ ID NO: 1758; WAN024DMV; Start 177; Stop 201
tttggatgagcaggatttatctgaa

SEQ ID NO: 304235 - DNA, 25 bp, Artificial
  probe
  misc_feature (1)..(25): SEQ ID NO: 1758; WAN024DMV; Start 176; Stop 200
atttggatgagcaggatttatctga

SEQ ID NO: 304236 - DNA, 25 bp, Artificial
  probe
  misc_feature (1)..(25): SEQ ID NO: 1758; WAN024DMV; Start 133; Stop 157
gtacaggatacagaaacgagttcag

SEQ ID NO: 304237 - DNA, 25 bp, Artificial
  probe
  misc_feature (1)..(25): SEQ ID NO: 1758; WAN024DMV; Start 174; Stop 198
ttatttggatgagcaggatttatct

SEQ ID NO: 304238 - DNA, 25 bp, Artificial
  probe
  misc_feature (1)..(25): SEQ ID NO: 1758; WAN024DMV; Start 149; Stop 173
cgagttcagcactaatttcaagtca

SEQ ID NO: 304239 - DNA, 25 bp, Artificial
  probe
  misc_feature (1)..(25): SEQ ID NO: 1758; WAN024DMV; Start 148; Stop 172
acgagttcagcactaatttcaagtc

SEQ ID NO: 304240 - DNA, 25 bp, Artificial
  probe
  misc_feature (1)..(25): SEQ ID NO: 1758; WAN024DMV; Start 175; Stop 199
tatttggatgagcaggatttatctg

SEQ ID NO: 304241 - DNA, 25 bp, Artificial
  probe
  misc_feature (1)..(25): SEQ ID NO: 1758; WAN024DMV; Start 134; Stop 158
tacaggatacagaaacgagttcagc

SEQ ID NO: 304242 - DNA, 25 bp, Artificial
  probe
  misc_feature (1)..(25): SEQ ID NO: 1758; WAN024DMV; Start 152; Stop 176
gttcagcactaatttcaagtcatta

SEQ ID NO: 304243 - DNA, 25 bp, Artificial
  probe
  misc_feature (1)..(25): SEQ ID NO: 1758; WAN024DMV; Start 172; Stop 196
cattatttggatgagcaggatttat

SEQ ID NO: 304244 - DNA, 25 bp, Artificial
  probe
  misc_feature (1)..(25): SEQ ID NO: 1758; WAN024DMV; Start 138; Stop 162
ggatacagaaacgagttcagcacta

SEQ ID NO: 304245 - DNA, 25 bp, Artificial
  probe
  misc_feature (1)..(25): SEQ ID NO: 1758; WAN024DMV; Start 173; Stop 197
attatttggatgagcaggatttatc

SEQ ID NO: 304246 - DNA, 25 bp, Artificial
  probe
  misc_feature (1)..(25): SEQ ID NO: 1758; WAN024DMV; Start 145; Stop 169
gaaacgagttcagcactaatttcaa

SEQ ID NO: 304247 - DNA, 25 bp, Artificial
  probe
  misc_feature (1)..(25): SEQ ID NO: 1758; WAN024DMV; Start 26; Stop 50
ttcaatttgagagaaagcagcgttt

SEQ ID NO: 304248 - DNA, 25 bp, Artificial
  probe
  misc_feature (1)..(25): SEQ ID NO: 1758; WAN024DMV; Start 143; Stop 167
cagaaacgagttcagcactaatttc

SEQ ID NO: 304249 - DNA, 25 bp, Artificial
  probe
  misc_feature (1)..(25): SEQ ID NO: 1758; WAN024DMV; Start 83; Stop 107
cggtcttgctaggaacgagtttatt

SEQ ID NO: 304250 - DNA, 25 bp, Artificial
  probe
  misc_feature (1)..(25): SEQ ID NO: 1758; WAN024DMV; Start 63; Stop 87
atatgcaataggagcttgttcggtc

SEQ ID NO: 304251 - DNA, 25 bp, Artificial
  probe
  misc_feature (1)..(25): SEQ ID NO: 1758; WAN024DMV; Start 4; Stop 28
atgggagatgggatgaaagaatttc

SEQ ID NO: 304252 - DNA, 25 bp, Artificial
  probe
  misc_feature (1)..(25): SEQ ID NO: 1758; WAN024DMV; Start 144; Stop 168
agaaacgagttcagcactaatttca

SEQ ID NO: 304253 - DNA, 25 bp, Artificial
  probe
  misc_feature (1)..(25): SEQ ID NO: 1758; WAN024DMV; Start 22; Stop 46
gaatttcaatttgagagaaagcagc

SEQ ID NO: 304254 - DNA, 25 bp, Artificial
  probe
  misc_feature (1)..(25): SEQ ID NO: 1759; WAN024BEQ; Start 97; Stop 121
cgccttaccgtatatatgttactga

SEQ ID NO: 304255 - DNA, 25 bp, Artificial
  probe
  misc_feature (1)..(25): SEQ ID NO: 1759; WAN024BEQ; Start 96; Stop 120
tcgccttaccgtatatatgttactg

SEQ ID NO: 304256 - DNA, 25 bp, Artificial
  probe
  misc_feature (1)..(25): SEQ ID NO: 1759; WAN024BEQ; Start 95; Stop 119
gtcgccttaccgtatatatgttact

SEQ ID NO: 304257 - DNA, 25 bp, Artificial
  probe
  misc_feature (1)..(25): SEQ ID NO: 1759; WAN024BEQ; Start 103; Stop 127
accgtatatatgttactgacttcgt

SEQ ID NO: 304258 - DNA, 25 bp, Artificial
  probe
  misc_feature (1)..(25): SEQ ID NO: 1759; WAN024BEQ; Start 94; Stop 118
cgtcgccttaccgtatatatgttac

SEQ ID NO: 304259 - DNA, 25 bp, Artificial
  probe
  misc_feature (1)..(25): SEQ ID NO: 1759; WAN024BEQ; Start 98; Stop 122
gccttaccgtatatatgttactgac

SEQ ID NO: 304260 - DNA, 25 bp, Artificial
  probe
  misc_feature (1)..(25): SEQ ID NO: 1759; WAN024BEQ; Start 102; Stop 126
taccgtatatatgttactgacttcg

SEQ ID NO: 304261 - DNA, 25 bp, Artificial
  probe
  misc_feature (1)..(25): SEQ ID NO: 1759; WAN024BEQ; Start 99; Stop 123
ccttaccgtatatatgttactgact

SEQ ID NO: 304262 - DNA, 25 bp, Artificial
  probe
  misc_feature (1)..(25): SEQ ID NO: 1759; WAN024BEQ; Start 93; Stop 117
gcgtcgccttaccgtatatatgtta

SEQ ID NO: 304263 - DNA, 25 bp, Artificial
  probe
  misc_feature (1)..(25): SEQ ID NO: 1759; WAN024BEQ; Start 47; Stop 71
ttcataatggattgatactcttcga

SEQ ID NO: 304264 - DNA, 25 bp, Artificial
  probe
  misc_feature (1)..(25): SEQ ID NO: 1759; WAN024BEQ; Start 46; Stop 70
tttcataatggattgatactcttcg

SEQ ID NO: 304265 - DNA, 25 bp, Artificial
  probe
  misc_feature (1)..(25): SEQ ID NO: 1759; WAN024BEQ; Start 92; Stop 116
agcgtcgccttaccgtatatatgtt

SEQ ID NO: 304266 - DNA, 25 bp, Artificial
  probe
  misc_feature (1)..(25): SEQ ID NO: 1759; WAN024BEQ; Start 101; Stop 125
ttaccgtatatatgttactgacttc

SEQ ID NO: 304267 - DNA, 25 bp, Artificial
  probe
  misc_feature (1)..(25): SEQ ID NO: 1759; WAN024BEQ; Start 100; Stop 124
cttaccgtatatatgttactgactt

SEQ ID NO: 304268 - DNA, 25 bp, Artificial
  probe
  misc_feature (1)..(25): SEQ ID NO: 1759; WAN024BEQ; Start 37; Stop 61
gggcaaaactttcataatggattga

SEQ ID NO: 304269 - DNA, 25 bp, Artificial
  probe
  misc_feature (1)..(25): SEQ ID NO: 1759; WAN024BEQ; Start 36; Stop 60
ggggcaaaactttcataatggattg

SEQ ID NO: 304270 - DNA, 25 bp, Artificial
  probe
  misc_feature (1)..(25): SEQ ID NO: 1759; WAN024BEQ; Start 90; Stop 114
tcagcgtcgccttaccgtatatatg

SEQ ID NO: 304271 - DNA, 25 bp, Artificial
  probe
  misc_feature (1)..(25): SEQ ID NO: 1759; WAN024BEQ; Start 38; Stop 62
ggcaaaactttcataatggattgat

SEQ ID NO: 304272 - DNA, 25 bp, Artificial
  probe
  misc_feature (1)..(25): SEQ ID NO: 1759; WAN024BEQ; Start 91; Stop 115
cagcgtcgccttaccgtatatatgt

SEQ ID NO: 304273 - DNA, 25 bp, Artificial
  probe
  misc_feature (1)..(25): SEQ ID NO: 1759; WAN024BEQ; Start 44; Stop 68
actttcataatggattgatactctt

SEQ ID NO: 304274 - DNA, 25 bp, Artificial
  probe
  misc_feature (1)..(25): SEQ ID NO: 1759; WAN024BEQ; Start 43; Stop 67
aactttcataatggattgatactct

SEQ ID NO: 304275 - DNA, 25 bp, Artificial
  probe
  misc_feature (1)..(25): SEQ ID NO: 1759; WAN024BEQ; Start 48; Stop 72
tcataatggattgatactcttcgaa

SEQ ID NO: 304276 - DNA, 25 bp, Artificial
  probe
  misc_feature (1)..(25): SEQ ID NO: 1759; WAN024BEQ; Start 204; Stop 228
tgagtatgaaataagatatgcacaa

SEQ ID NO: 304277 - DNA, 25 bp, Artificial
  probe
  misc_feature (1)..(25): SEQ ID NO: 1759; WAN024BEQ; Start 203; Stop 227
ttgagtatgaaataagatatgcaca

SEQ ID NO: 304278 - DNA, 25 bp, Artificial
  probe
  misc_feature (1)..(25): SEQ ID NO: 1759; WAN024BEQ; Start 45; Stop 69
ctttcataatggattgatactcttc

SEQ ID NO: 304279 - DNA, 25 bp, Artificial
  probe
  misc_feature (1)..(25): SEQ ID NO: 1759; WAN024BEQ; Start 42; Stop 66
aaactttcataatggattgatactc

SEQ ID NO: 304280 - DNA, 25 bp, Artificial
  probe
  misc_feature (1)..(25): SEQ ID NO: 1759; WAN024BEQ; Start 39; Stop 63
gcaaaactttcataatggattgata

SEQ ID NO: 304281 - DNA, 25 bp, Artificial
  probe
  misc_feature (1)..(25): SEQ ID NO: 1759; WAN024BEQ; Start 210; Stop 234
tgaaataagatatgcacaaattgat

SEQ ID NO: 304282 - DNA, 25 bp, Artificial
  probe
  misc_feature (1)..(25): SEQ ID NO: 1759; WAN024BEQ; Start 209; Stop 233
atgaaataagatatgcacaaattga

SEQ ID NO: 304283 - DNA, 25 bp, Artificial
  probe
  misc_feature (1)..(25): SEQ ID NO: 1759; WAN024BEQ; Start 205; Stop 229
gagtatgaaataagatatgcacaaa

SEQ ID NO: 304284 - DNA, 25 bp, Artificial
  probe
  misc_feature (1)..(25): SEQ ID NO: 1759; WAN024BEQ; Start 49; Stop 73
cataatggattgatactcttcgaaa

SEQ ID NO: 304285 - DNA, 25 bp, Artificial
  probe
  misc_feature (1)..(25): SEQ ID NO: 1759; WAN024BEQ; Start 202; Stop 226
attgagtatgaaataagatatgcac

SEQ ID NO: 304286 - DNA, 25 bp, Artificial
  probe
  misc_feature (1)..(25): SEQ ID NO: 1759; WAN024BEQ; Start 211; Stop 235
gaaataagatatgcacaaattgatc

SEQ ID NO: 304287 - DNA, 25 bp, Artificial
  probe
  misc_feature (1)..(25): SEQ ID NO: 1760; WAN024FF4; Start 118; Stop 142
aagatagcaggctctgtaataccta

SEQ ID NO: 304288 - DNA, 25 bp, Artificial
  probe
  misc_feature (1)..(25): SEQ ID NO: 1760; WAN024FF4; Start 119; Stop 143
agatagcaggctctgtaatacctag

SEQ ID NO: 304289 - DNA, 25 bp, Artificial
  probe
  misc_feature (1)..(25): SEQ ID NO: 1760; WAN024FF4; Start 10; Stop 34
ataccattaccagtaccagcaagtc

SEQ ID NO: 304290 - DNA, 25 bp, Artificial
  probe
  misc_feature (1)..(25): SEQ ID NO: 1760; WAN024FF4; Start 9; Stop 33
gataccattaccagtaccagcaagt

SEQ ID NO: 304291 - DNA, 25 bp, Artificial
  probe
  misc_feature (1)..(25): SEQ ID NO: 1760; WAN024FF4; Start 8; Stop 32
tgataccattaccagtaccagcaag

SEQ ID NO: 304292 - DNA, 25 bp, Artificial
  probe
  misc_feature (1)..(25): SEQ ID NO: 1760; WAN024FF4; Start 7; Stop 31
gtgataccattaccagtaccagcaa

SEQ ID NO: 304293 - DNA, 25 bp, Artificial
  probe
  misc_feature (1)..(25): SEQ ID NO: 1760; WAN024FF4; Start 117; Stop 141
gaagatagcaggctctgtaatacct

SEQ ID NO: 304294 - DNA, 25 bp, Artificial
  probe
  misc_feature (1)..(25): SEQ ID NO: 1760; WAN024FF4; Start 77; Stop 101
atgaaaggaagaatggtttacggaa

SEQ ID NO: 304295 - DNA, 25 bp, Artificial
  probe
  misc_feature (1)..(25): SEQ ID NO: 1760; WAN024FF4; Start 76; Stop 100
aatgaaaggaagaatggtttacgga

SEQ ID NO: 304296 - DNA, 25 bp, Artificial
  probe
  misc_feature (1)..(25): SEQ ID NO: 1760; WAN024FF4; Start 75; Stop 99
caatgaaaggaagaatggtttacgg

SEQ ID NO: 304297 - DNA, 25 bp, Artificial
  probe
  misc_feature (1)..(25): SEQ ID NO: 1760; WAN024FF4; Start 74; Stop 98
tcaatgaaaggaagaatggtttacg

SEQ ID NO: 304298 - DNA, 25 bp, Artificial
  probe
  misc_feature (1)..(25): SEQ ID NO: 1760; WAN024FF4; Start 70; Stop 94
gcaatcaatgaaaggaagaatggtt

SEQ ID NO: 304299 - DNA, 25 bp, Artificial
  probe
  misc_feature (1)..(25): SEQ ID NO: 1760; WAN024FF4; Start 68; Stop 92
cagcaatcaatgaaaggaagaatgg

SEQ ID NO: 304300 - DNA, 25 bp, Artificial
  probe
  misc_feature (1)..(25): SEQ ID NO: 1760; WAN024FF4; Start 67; Stop 91
ccagcaatcaatgaaaggaagaatg

SEQ ID NO: 304301 - DNA, 25 bp, Artificial
  probe
  misc_feature (1)..(25): SEQ ID NO: 1760; WAN024FF4; Start 78; Stop 102
tgaaaggaagaatggtttacggaag

SEQ ID NO: 304302 - DNA, 25 bp, Artificial
  probe
  misc_feature (1)..(25): SEQ ID NO: 1760; WAN024FF4; Start 22; Stop 46
gtaccagcaagtccaaggatagaag

SEQ ID NO: 304303 - DNA, 25 bp, Artificial
  probe
  misc_feature (1)..(25): SEQ ID NO: 1760; WAN024FF4; Start 69; Stop 93
agcaatcaatgaaaggaagaatggt

SEQ ID NO: 304304 - DNA, 25 bp, Artificial
  probe
  misc_feature (1)..(25): SEQ ID NO: 1760; WAN024FF4; Start 66; Stop 90
accagcaatcaatgaaaggaagaat

SEQ ID NO: 304305 - DNA, 25 bp, Artificial
  probe
  misc_feature (1)..(25): SEQ ID NO: 1760; WAN024FF4; Start 71; Stop 95
caatcaatgaaaggaagaatggttt

SEQ ID NO: 304306 - DNA, 25 bp, Artificial
  probe
  misc_feature (1)..(25): SEQ ID NO: 1760; WAN024FF4; Start 21; Stop 45
agtaccagcaagtccaaggatagaa

SEQ ID NO: 304307 - DNA, 25 bp, Artificial
  probe
  misc_feature (1)..(25): SEQ ID NO: 1760; WAN024FF4; Start 116; Stop 140
cgaagatagcaggctctgtaatacc

SEQ ID NO: 304308 - DNA, 25 bp, Artificial
  probe
  misc_feature (1)..(25): SEQ ID NO: 1760; WAN024FF4; Start 115; Stop 139
ccgaagatagcaggctctgtaatac

SEQ ID NO: 304309 - DNA, 25 bp, Artificial
  probe
  misc_feature (1)..(25): SEQ ID NO: 1760; WAN024FF4; Start 65; Stop 89
caccagcaatcaatgaaaggaagaa

SEQ ID NO: 304310 - DNA, 25 bp, Artificial
  probe
  misc_feature (1)..(25): SEQ ID NO: 1760; WAN024FF4; Start 79; Stop 103
gaaaggaagaatggtttacggaagc

SEQ ID NO: 304311 - DNA, 25 bp, Artificial
  probe
  misc_feature (1)..(25): SEQ ID NO: 1760; WAN024FF4; Start 73; Stop 97
atcaatgaaaggaagaatggtttac

SEQ ID NO: 304312 - DNA, 25 bp, Artificial
  probe
  misc_feature (1)..(25): SEQ ID NO: 1760; WAN024FF4; Start 14; Stop 38
cattaccagtaccagcaagtccaag

SEQ ID NO: 304313 - DNA, 25 bp, Artificial
  probe
  misc_feature (1)..(25): SEQ ID NO: 1760; WAN024FF4; Start 28; Stop 52
gcaagtccaaggatagaagccaatc

SEQ ID NO: 304314 - DNA, 25 bp, Artificial
  probe
  misc_feature (1)..(25): SEQ ID NO: 1760; WAN024FF4; Start 20; Stop 44
cagtaccagcaagtccaaggataga

SEQ ID NO: 304315 - DNA, 25 bp, Artificial
  probe
  misc_feature (1)..(25): SEQ ID NO: 1760; WAN024FF4; Start 11; Stop 35
taccattaccagtaccagcaagtcc

SEQ ID NO: 304316 - DNA, 25 bp, Artificial
  probe
  misc_feature (1)..(25): SEQ ID NO: 1760; WAN024FF4; Start 27; Stop 51
agcaagtccaaggatagaagccaat

SEQ ID NO: 304317 - DNA, 25 bp, Artificial
  probe
  misc_feature (1)..(25): SEQ ID NO: 1760; WAN024FF4; Start 72; Stop 96
aatcaatgaaaggaagaatggttta

SEQ ID NO: 304318 - DNA, 25 bp, Artificial
  probe
  misc_feature (1)..(25): SEQ ID NO: 1760; WAN024FF4; Start 23; Stop 47
taccagcaagtccaaggatagaagc

SEQ ID NO: 304319 - DNA, 25 bp, Artificial
  probe
  misc_feature (1)..(25): SEQ ID NO: 1760; WAN024FF4; Start 15; Stop 39
attaccagtaccagcaagtccaagg

SEQ ID NO: 304320 - DNA, 25 bp, Artificial
  probe
  misc_feature (1)..(25): SEQ ID NO: 1761; WAN024CEE; Start 1049; Stop 1073
ataaggataagactctggattctgt

SEQ ID NO: 304321 - DNA, 25 bp, Artificial
  probe
  misc_feature (1)..(25): SEQ ID NO: 1761; WAN024CEE; Start 213; Stop 237
ctttgtgatgatgttgctggtttat

SEQ ID NO: 304322 - DNA, 25 bp, Artificial
  probe
  misc_feature (1)..(25): SEQ ID NO: 1761; WAN024CEE; Start 214; Stop 238
tttgtgatgatgttgctggtttatc

SEQ ID NO: 304323 - DNA, 25 bp, Artificial
  probe
  misc_feature (1)..(25): SEQ ID NO: 1761; WAN024CEE; Start 921; Stop 945
actcattaaacacttatccaagggt

SEQ ID NO: 304324 - DNA, 25 bp, Artificial
  probe
  misc_feature (1)..(25): SEQ ID NO: 1761; WAN024CEE; Start 215; Stop 239
ttgtgatgatgttgctggtttatct

SEQ ID NO: 304325 - DNA, 25 bp, Artificial
  probe
  misc_feature (1)..(25): SEQ ID NO: 1761; WAN024CEE; Start 203; Stop 227
ttctactaggctttgtgatgatgtt

SEQ ID NO: 304326 - DNA, 25 bp, Artificial
  probe
  misc_feature (1)..(25): SEQ ID NO: 1761; WAN024CEE; Start 202; Stop 226
tttctactaggctttgtgatgatgt

SEQ ID NO: 304327 - DNA, 25 bp, Artificial
  probe
  misc_feature (1)..(25): SEQ ID NO: 1761; WAN024CEE; Start 1688; Stop 1712
gaattgccaatatgcctgtctttaa

SEQ ID NO: 304328 - DNA, 25 bp, Artificial
  probe
  misc_feature (1)..(25): SEQ ID NO: 1761; WAN024CEE; Start 204; Stop 228
tctactaggctttgtgatgatgttg

SEQ ID NO: 304329 - DNA, 25 bp, Artificial
  probe
  misc_feature (1)..(25): SEQ ID NO: 1761; WAN024CEE; Start 920; Stop 944
aactcattaaacacttatccaaggg

SEQ ID NO: 304330 - DNA, 25 bp, Artificial
  probe
  misc_feature (1)..(25): SEQ ID NO: 1761; WAN024CEE; Start 1048; Stop 1072
tataaggataagactctggattctg

SEQ ID NO: 304331 - DNA, 25 bp, Artificial
  probe
  misc_feature (1)..(25): SEQ ID NO: 1761; WAN024CEE; Start 1195; Stop 1219
atcccagataacgatagtacctttc

SEQ ID NO: 304332 - DNA, 25 bp, Artificial
  probe
  misc_feature (1)..(25): SEQ ID NO: 1761; WAN024CEE; Start 923; Stop 947
tcattaaacacttatccaagggtga

SEQ ID NO: 304333 - DNA, 25 bp, Artificial
  probe
  misc_feature (1)..(25): SEQ ID NO: 1761; WAN024CEE; Start 922; Stop 946
ctcattaaacacttatccaagggtg

SEQ ID NO: 304334 - DNA, 25 bp, Artificial
  probe
  misc_feature (1)..(25): SEQ ID NO: 1761; WAN024CEE; Start 1687; Stop 1711
cgaattgccaatatgcctgtcttta

SEQ ID NO: 304335 - DNA, 25 bp, Artificial
  probe
  misc_feature (1)..(25): SEQ ID NO: 1761; WAN024CEE; Start 924; Stop 948
cattaaacacttatccaagggtgaa

SEQ ID NO: 304336 - DNA, 25 bp, Artificial
  probe
  misc_feature (1)..(25): SEQ ID NO: 1761; WAN024CEE; Start 205; Stop 229
ctactaggctttgtgatgatgttgc

SEQ ID NO: 304337 - DNA, 25 bp, Artificial
  probe
  misc_feature (1)..(25): SEQ ID NO: 1761; WAN024CEE; Start 1689; Stop 1713
aattgccaatatgcctgtctttaaa

SEQ ID NO: 304338 - DNA, 25 bp, Artificial
  probe
  misc_feature (1)..(25): SEQ ID NO: 1761; WAN024CEE; Start 212; Stop 236
gctttgtgatgatgttgctggttta

SEQ ID NO: 304339 - DNA, 25 bp, Artificial
  probe
  misc_feature (1)..(25): SEQ ID NO: 1761; WAN024CEE; Start 206; Stop 230
tactaggctttgtgatgatgttgct

SEQ ID NO: 304340 - DNA, 25 bp, Artificial
  probe
  misc_feature (1)..(25): SEQ ID NO: 1761; WAN024CEE; Start 1540; Stop 1564
ttactcggtaaacaaaccattgatg

SEQ ID NO: 304341 - DNA, 25 bp, Artificial
  probe
  misc_feature (1)..(25): SEQ ID NO: 1761; WAN024CEE; Start 925; Stop 949
attaaacacttatccaagggtgaaa

SEQ ID NO: 304342 - DNA, 25 bp, Artificial
  probe
  misc_feature (1)..(25): SEQ ID NO: 1761; WAN024CEE; Start 565; Stop 589
ggctaccaagtaaaggtgttagatt

SEQ ID NO: 304343 - DNA, 25 bp, Artificial
  probe
  misc_feature (1)..(25): SEQ ID NO: 1761; WAN024CEE; Start 1541; Stop 1565
tactcggtaaacaaaccattgatgt

SEQ ID NO: 304344 - DNA, 25 bp, Artificial
  probe
  misc_feature (1)..(25): SEQ ID NO: 1761; WAN024CEE; Start 919; Stop 943
aaactcattaaacacttatccaagg

SEQ ID NO: 304345 - DNA, 25 bp, Artificial
  probe
  misc_feature (1)..(25): SEQ ID NO: 1761; WAN024CEE; Start 566; Stop 590
gctaccaagtaaaggtgttagattt

SEQ ID NO: 304346 - DNA, 25 bp, Artificial
  probe
  misc_feature (1)..(25): SEQ ID NO: 1761; WAN024CEE; Start 1194; Stop 1218
tatcccagataacgatagtaccttt

SEQ ID NO: 304347 - DNA, 25 bp, Artificial
  probe
  misc_feature (1)..(25): SEQ ID NO: 1761; WAN024CEE; Start 1088; Stop 1112
ctgctaaatttgccctcttcaatat

SEQ ID NO: 304348 - DNA, 25 bp, Artificial
  probe
  misc_feature (1)..(25): SEQ ID NO: 1761; WAN024CEE; Start 564; Stop 588
tggctaccaagtaaaggtgttagat

SEQ ID NO: 304349 - DNA, 25 bp, Artificial
  probe
  misc_feature (1)..(25): SEQ ID NO: 1761; WAN024CEE; Start 1655; Stop 1679
tcggaaatatgaaacggcatgaatg

SEQ ID NO: 304350 - DNA, 25 bp, Artificial
  probe
  misc_feature (1)..(25): SEQ ID NO: 1761; WAN024CEE; Start 1087; Stop 1111
actgctaaatttgccctcttcaata

SEQ ID NO: 304351 - DNA, 25 bp, Artificial
  probe
  misc_feature (1)..(25): SEQ ID NO: 1761; WAN024CEE; Start 1089; Stop 1113
tgctaaatttgccctcttcaatatt

SEQ ID NO: 304352 - DNA, 25 bp, Artificial
  probe
  misc_feature (1)..(25): SEQ ID NO: 1761; WAN024CEE; Start 1178; Stop 1202
caatggtttacttagttatcccaga

SEQ ID NO: 304353 - DNA, 25 bp, Artificial
  probe
  misc_feature (1)..(25): SEQ ID NO: 1762; WAN024FSC; Start 62; Stop 86
aaggactggtcataatattgtgttc

SEQ ID NO: 304354 - DNA, 25 bp, Artificial
  probe
  misc_feature (1)..(25): SEQ ID NO: 1762; WAN024FSC; Start 144; Stop 168
gctcggtgatagaaatagtgtaatc

SEQ ID NO: 304355 - DNA, 25 bp, Artificial
  probe
  misc_feature (1)..(25): SEQ ID NO: 1762; WAN024FSC; Start 63; Stop 87
aggactggtcataatattgtgttcc

SEQ ID NO: 304356 - DNA, 25 bp, Artificial
  probe
  misc_feature (1)..(25): SEQ ID NO: 1762; WAN024FSC; Start 65; Stop 89
gactggtcataatattgtgttccac

SEQ ID NO: 304357 - DNA, 25 bp, Artificial
  probe
  misc_feature (1)..(25): SEQ ID NO: 1762; WAN024FSC; Start 64; Stop 88
ggactggtcataatattgtgttcca

SEQ ID NO: 304358 - DNA, 25 bp, Artificial
  probe
  misc_feature (1)..(25): SEQ ID NO: 1762; WAN024FSC; Start 52; Stop 76
tttcttgttaaaggactggtcataa

SEQ ID NO: 304359 - DNA, 25 bp, Artificial
  probe
  misc_feature (1)..(25): SEQ ID NO: 1762; WAN024FSC; Start 53; Stop 77
ttcttgttaaaggactggtcataat

SEQ ID NO: 304360 - DNA, 25 bp, Artificial
  probe
  misc_feature (1)..(25): SEQ ID NO: 1762; WAN024FSC; Start 142; Stop 166
cagctcggtgatagaaatagtgtaa

SEQ ID NO: 304361 - DNA, 25 bp, Artificial
  probe
  misc_feature (1)..(25): SEQ ID NO: 1762; WAN024FSC; Start 143; Stop 167
agctcggtgatagaaatagtgtaat

SEQ ID NO: 304362 - DNA, 25 bp, Artificial
  probe
  misc_feature (1)..(25): SEQ ID NO: 1762; WAN024FSC; Start 139; Stop 163
gtacagctcggtgatagaaatagtg

SEQ ID NO: 304363 - DNA, 25 bp, Artificial
  probe
  misc_feature (1)..(25): SEQ ID NO: 1762; WAN024FSC; Start 61; Stop 85
aaaggactggtcataatattgtgtt

SEQ ID NO: 304364 - DNA, 25 bp, Artificial
  probe
  misc_feature (1)..(25): SEQ ID NO: 1762; WAN024FSC; Start 54; Stop 78
tcttgttaaaggactggtcataata

SEQ ID NO: 304365 - DNA, 25 bp, Artificial
  probe
  misc_feature (1)..(25): SEQ ID NO: 1762; WAN024FSC; Start 118; Stop 142
gccttagccttacgacatgatgtac

SEQ ID NO: 304366 - DNA, 25 bp, Artificial
  probe
  misc_feature (1)..(25): SEQ ID NO: 1762; WAN024FSC; Start 141; Stop 165
acagctcggtgatagaaatagtgta

SEQ ID NO: 304367 - DNA, 25 bp, Artificial
  probe
  misc_feature (1)..(25): SEQ ID NO: 1762; WAN024FSC; Start 140; Stop 164
tacagctcggtgatagaaatagtgt

SEQ ID NO: 304368 - DNA, 25 bp, Artificial
  probe
  misc_feature (1)..(25): SEQ ID NO: 1762; WAN024FSC; Start 60; Stop 84
taaaggactggtcataatattgtgt

SEQ ID NO: 304369 - DNA, 25 bp, Artificial
  probe
  misc_feature (1)..(25): SEQ ID NO: 1762; WAN024FSC; Start 120; Stop 144
cttagccttacgacatgatgtacag

SEQ ID NO: 304370 - DNA, 25 bp, Artificial
  probe
  misc_feature (1)..(25): SEQ ID NO: 1762; WAN024FSC; Start 133; Stop 157
catgatgtacagctcggtgatagaa

SEQ ID NO: 304371 - DNA, 25 bp, Artificial
  probe
  misc_feature (1)..(25): SEQ ID NO: 1762; WAN024FSC; Start 55; Stop 79
cttgttaaaggactggtcataatat

SEQ ID NO: 304372 - DNA, 25 bp, Artificial
  probe
  misc_feature (1)..(25): SEQ ID NO: 1762; WAN024FSC; Start 119; Stop 143
ccttagccttacgacatgatgtaca

SEQ ID NO: 304373 - DNA, 25 bp, Artificial
  probe
  misc_feature (1)..(25): SEQ ID NO: 1762; WAN024FSC; Start 59; Stop 83
ttaaaggactggtcataatattgtg

SEQ ID NO: 304374 - DNA, 25 bp, Artificial
  probe
  misc_feature (1)..(25): SEQ ID NO: 1762; WAN024FSC; Start 58; Stop 82
gttaaaggactggtcataatattgt

SEQ ID NO: 304375 - DNA, 25 bp, Artificial
  probe
  misc_feature (1)..(25): SEQ ID NO: 1762; WAN024FSC; Start 57; Stop 81
tgttaaaggactggtcataatattg

SEQ ID NO: 304376 - DNA, 25 bp, Artificial
  probe
  misc_feature (1)..(25): SEQ ID NO: 1762; WAN024FSC; Start 145; Stop 169
ctcggtgatagaaatagtgtaatca

SEQ ID NO: 304377 - DNA, 25 bp, Artificial
  probe
  misc_feature (1)..(25): SEQ ID NO: 1762; WAN024FSC; Start 137; Stop 161
atgtacagctcggtgatagaaatag

SEQ ID NO: 304378 - DNA, 25 bp, Artificial
  probe
  misc_feature (1)..(25): SEQ ID NO: 1762; WAN024FSC; Start 136; Stop 160
gatgtacagctcggtgatagaaata

SEQ ID NO: 304379 - DNA, 25 bp, Artificial
  probe
  misc_feature (1)..(25): SEQ ID NO: 1762; WAN024FSC; Start 51; Stop 75
ttttcttgttaaaggactggtcata

SEQ ID NO: 304380 - DNA, 25 bp, Artificial
  probe
  misc_feature (1)..(25): SEQ ID NO: 1762; WAN024FSC; Start 160; Stop 184
agtgtaatcatgcttttctcttctt

SEQ ID NO: 304381 - DNA, 25 bp, Artificial
  probe
  misc_feature (1)..(25): SEQ ID NO: 1762; WAN024FSC; Start 138; Stop 162
tgtacagctcggtgatagaaatagt

SEQ ID NO: 304382 - DNA, 25 bp, Artificial
  probe
  misc_feature (1)..(25): SEQ ID NO: 1762; WAN024FSC; Start 121; Stop 145
ttagccttacgacatgatgtacagc

SEQ ID NO: 304383 - DNA, 25 bp, Artificial
  probe
  misc_feature (1)..(25): SEQ ID NO: 1762; WAN024FSC; Start 66; Stop 90
actggtcataatattgtgttccaca

SEQ ID NO: 304384 - DNA, 25 bp, Artificial
  probe
  misc_feature (1)..(25): SEQ ID NO: 1762; WAN024FSC; Start 148; Stop 172
ggtgatagaaatagtgtaatcatgc

SEQ ID NO: 304385 - DNA, 25 bp, Artificial
  probe
  misc_feature (1)..(25): SEQ ID NO: 1762; WAN024FSC; Start 135; Stop 159
tgatgtacagctcggtgatagaaat

SEQ ID NO: 304386 - DNA, 25 bp, Artificial
  probe
  misc_feature (1)..(25): SEQ ID NO: 1763; WAN024CGX; Start 43; Stop 67
gtatcgtgcttgtcgtacttgatag

SEQ ID NO: 304387 - DNA, 25 bp, Artificial
  probe
  misc_feature (1)..(25): SEQ ID NO: 1763; WAN024CGX; Start 51; Stop 75
cttgtcgtacttgatagccaacatg

SEQ ID NO: 304388 - DNA, 25 bp, Artificial
  probe
  misc_feature (1)..(25): SEQ ID NO: 1763; WAN024CGX; Start 52; Stop 76
ttgtcgtacttgatagccaacatga

SEQ ID NO: 304389 - DNA, 25 bp, Artificial
  probe
  misc_feature (1)..(25): SEQ ID NO: 1763; WAN024CGX; Start 42; Stop 66
ggtatcgtgcttgtcgtacttgata

SEQ ID NO: 304390 - DNA, 25 bp, Artificial
  probe
  misc_feature (1)..(25): SEQ ID NO: 1763; WAN024CGX; Start 53; Stop 77
tgtcgtacttgatagccaacatgag

SEQ ID NO: 304391 - DNA, 25 bp, Artificial
  probe
  misc_feature (1)..(25): SEQ ID NO: 1763; WAN024CGX; Start 210; Stop 234
tttaatccgttcaacaacttcataa

SEQ ID NO: 304392 - DNA, 25 bp, Artificial
  probe
  misc_feature (1)..(25): SEQ ID NO: 1763; WAN024CGX; Start 39; Stop 63
gatggtatcgtgcttgtcgtacttg

SEQ ID NO: 304393 - DNA, 25 bp, Artificial
  probe
  misc_feature (1)..(25): SEQ ID NO: 1763; WAN024CGX; Start 128; Stop 152
cagtcttggaaaggtcaaacatacc

SEQ ID NO: 304394 - DNA, 25 bp, Artificial
  probe
  misc_feature (1)..(25): SEQ ID NO: 1763; WAN024CGX; Start 127; Stop 151
ccagtcttggaaaggtcaaacatac

SEQ ID NO: 304395 - DNA, 25 bp, Artificial
  probe
  misc_feature (1)..(25): SEQ ID NO: 1763; WAN024CGX; Start 57; Stop 81
gtacttgatagccaacatgagcttg

SEQ ID NO: 304396 - DNA, 25 bp, Artificial
  probe
  misc_feature (1)..(25): SEQ ID NO: 1763; WAN024CGX; Start 101; Stop 125
ctgaaatcaagacgggttctttaac

SEQ ID NO: 304397 - DNA, 25 bp, Artificial
  probe
  misc_feature (1)..(25): SEQ ID NO: 1763; WAN024CGX; Start 54; Stop 78
gtcgtacttgatagccaacatgagc

SEQ ID NO: 304398 - DNA, 25 bp, Artificial
  probe
  misc_feature (1)..(25): SEQ ID NO: 1763; WAN024CGX; Start 44; Stop 68
tatcgtgcttgtcgtacttgatagc

SEQ ID NO: 304399 - DNA, 25 bp, Artificial
  probe
  misc_feature (1)..(25): SEQ ID NO: 1763; WAN024CGX; Start 130; Stop 154
gtcttggaaaggtcaaacataccac

SEQ ID NO: 304400 - DNA, 25 bp, Artificial
  probe
  misc_feature (1)..(25): SEQ ID NO: 1763; WAN024CGX; Start 129; Stop 153
agtcttggaaaggtcaaacatacca

SEQ ID NO: 304401 - DNA, 25 bp, Artificial
  probe
  misc_feature (1)..(25): SEQ ID NO: 1763; WAN024CGX; Start 40; Stop 64
atggtatcgtgcttgtcgtacttga

SEQ ID NO: 304402 - DNA, 25 bp, Artificial
  probe
  misc_feature (1)..(25): SEQ ID NO: 1763; WAN024CGX; Start 41; Stop 65
tggtatcgtgcttgtcgtacttgat

SEQ ID NO: 304403 - DNA, 25 bp, Artificial
  probe
  misc_feature (1)..(25): SEQ ID NO: 1763; WAN024CGX; Start 100; Stop 124
cctgaaatcaagacgggttctttaa

SEQ ID NO: 304404 - DNA, 25 bp, Artificial
  probe
  misc_feature (1)..(25): SEQ ID NO: 1763; WAN024CGX; Start 135; Stop 159
ggaaaggtcaaacataccaccaaag

SEQ ID NO: 304405 - DNA, 25 bp, Artificial
  probe
  misc_feature (1)..(25): SEQ ID NO: 1763; WAN024CGX; Start 126; Stop 150
cccagtcttggaaaggtcaaacata

SEQ ID NO: 304406 - DNA, 25 bp, Artificial
  probe
  misc_feature (1)..(25): SEQ ID NO: 1763; WAN024CGX; Start 136; Stop 160
gaaaggtcaaacataccaccaaagc

SEQ ID NO: 304407 - DNA, 25 bp, Artificial
  probe
  misc_feature (1)..(25): SEQ ID NO: 1763; WAN024CGX; Start 134; Stop 158
tggaaaggtcaaacataccaccaaa

SEQ ID NO: 304408 - DNA, 25 bp, Artificial
  probe
  misc_feature (1)..(25): SEQ ID NO: 1763; WAN024CGX; Start 50; Stop 74
gcttgtcgtacttgatagccaacat

SEQ ID NO: 304409 - DNA, 25 bp, Artificial
  probe
  misc_feature (1)..(25): SEQ ID NO: 1763; WAN024CGX; Start 131; Stop 155
tcttggaaaggtcaaacataccacc

SEQ ID NO: 304410 - DNA, 25 bp, Artificial
  probe
  misc_feature (1)..(25): SEQ ID NO: 1763; WAN024CGX; Start 56; Stop 80
cgtacttgatagccaacatgagctt

SEQ ID NO: 304411 - DNA, 25 bp, Artificial
  probe
  misc_feature (1)..(25): SEQ ID NO: 1763; WAN024CGX; Start 132; Stop 156
cttggaaaggtcaaacataccacca

SEQ ID NO: 304412 - DNA, 25 bp, Artificial
  probe
  misc_feature (1)..(25): SEQ ID NO: 1763; WAN024CGX; Start 209; Stop 233
ttttaatccgttcaacaacttcata

SEQ ID NO: 304413 - DNA, 25 bp, Artificial
  probe
  misc_feature (1)..(25): SEQ ID NO: 1763; WAN024CGX; Start 48; Stop 72
gtgcttgtcgtacttgatagccaac

SEQ ID NO: 304414 - DNA, 25 bp, Artificial
  probe
  misc_feature (1)..(25): SEQ ID NO: 1763; WAN024CGX; Start 99; Stop 123
ccctgaaatcaagacgggttcttta

SEQ ID NO: 304415 - DNA, 25 bp, Artificial
  probe
  misc_feature (1)..(25): SEQ ID NO: 1763; WAN024CGX; Start 55; Stop 79
tcgtacttgatagccaacatgagct

SEQ ID NO: 304416 - DNA, 25 bp, Artificial
  probe
  misc_feature (1)..(25): SEQ ID NO: 1763; WAN024CGX; Start 137; Stop 161
aaaggtcaaacataccaccaaagcc

SEQ ID NO: 304417 - DNA, 25 bp, Artificial
  probe
  misc_feature (1)..(25): SEQ ID NO: 1763; WAN024CGX; Start 143; Stop 167
caaacataccaccaaagccaccaag

SEQ ID NO: 304418 - DNA, 25 bp, Artificial
  probe
  misc_feature (1)..(25): SEQ ID NO: 1763; WAN024CGX; Start 49; Stop 73
tgcttgtcgtacttgatagccaaca

SEQ ID NO: 304419 - DNA, 25 bp, Artificial
  probe
  misc_feature (1)..(25): SEQ ID NO: 1764; WAN024CAB; Start 465; Stop 489
aagcattattctggtaggacttgtt

SEQ ID NO: 304420 - DNA, 25 bp, Artificial
  probe
  misc_feature (1)..(25): SEQ ID NO: 1764; WAN024CAB; Start 464; Stop 488
taagcattattctggtaggacttgt

SEQ ID NO: 304421 - DNA, 25 bp, Artificial
  probe
  misc_feature (1)..(25): SEQ ID NO: 1764; WAN024CAB; Start 462; Stop 486
actaagcattattctggtaggactt

SEQ ID NO: 304422 - DNA, 25 bp, Artificial
  probe
  misc_feature (1)..(25): SEQ ID NO: 1764; WAN024CAB; Start 463; Stop 487
ctaagcattattctggtaggacttg

SEQ ID NO: 304423 - DNA, 25 bp, Artificial
  probe
  misc_feature (1)..(25): SEQ ID NO: 1764; WAN024CAB; Start 461; Stop 485
tactaagcattattctggtaggact

SEQ ID NO: 304424 - DNA, 25 bp, Artificial
  probe
  misc_feature (1)..(25): SEQ ID NO: 1764; WAN024CAB; Start 272; Stop 296
ttgtatcagagatgttgaagcagtt

SEQ ID NO: 304425 - DNA, 25 bp, Artificial
  probe
  misc_feature (1)..(25): SEQ ID NO: 1764; WAN024CAB; Start 347; Stop 371
ttcaagaacaaccactactgatagc

SEQ ID NO: 304426 - DNA, 25 bp, Artificial
  probe
  misc_feature (1)..(25): SEQ ID NO: 1764; WAN024CAB; Start 460; Stop 484
ttactaagcattattctggtaggac

SEQ ID NO: 304427 - DNA, 25 bp, Artificial
  probe
  misc_feature (1)..(25): SEQ ID NO: 1764; WAN024CAB; Start 630; Stop 654
aagcaacagcctctccttaatcatt

SEQ ID NO: 304428 - DNA, 25 bp, Artificial
  probe
  misc_feature (1)..(25): SEQ ID NO: 1764; WAN024CAB; Start 387; Stop 411
cattggacctctggtagaagaatta

SEQ ID NO: 304429 - DNA, 25 bp, Artificial
  probe
  misc_feature (1)..(25): SEQ ID NO: 1764; WAN024CAB; Start 629; Stop 653
taagcaacagcctctccttaatcat

SEQ ID NO: 304430 - DNA, 25 bp, Artificial
  probe
  misc_feature (1)..(25): SEQ ID NO: 1764; WAN024CAB; Start 389; Stop 413
ttggacctctggtagaagaattatt

SEQ ID NO: 304431 - DNA, 25 bp, Artificial
  probe
  misc_feature (1)..(25): SEQ ID NO: 1764; WAN024CAB; Start 349; Stop 373
caagaacaaccactactgatagctg

SEQ ID NO: 304432 - DNA, 25 bp, Artificial
  probe
  misc_feature (1)..(25): SEQ ID NO: 1764; WAN024CAB; Start 466; Stop 490
agcattattctggtaggacttgttt

SEQ ID NO: 304433 - DNA, 25 bp, Artificial
  probe
  misc_feature (1)..(25): SEQ ID NO: 1764; WAN024CAB; Start 388; Stop 412
attggacctctggtagaagaattat

SEQ ID NO: 304434 - DNA, 25 bp, Artificial
  probe
  misc_feature (1)..(25): SEQ ID NO: 1764; WAN024CAB; Start 386; Stop 410
tcattggacctctggtagaagaatt

SEQ ID NO: 304435 - DNA, 25 bp, Artificial
  probe
  misc_feature (1)..(25): SEQ ID NO: 1764; WAN024CAB; Start 342; Stop 366
tacctttcaagaacaaccactactg

SEQ ID NO: 304436 - DNA, 25 bp, Artificial
  probe
  misc_feature (1)..(25): SEQ ID NO: 1764; WAN024CAB; Start 226; Stop 250
ttaacaggatggctctttctcattc

SEQ ID NO: 304437 - DNA, 25 bp, Artificial
  probe
  misc_feature (1)..(25): SEQ ID NO: 1764; WAN024CAB; Start 225; Stop 249
cttaacaggatggctctttctcatt

SEQ ID NO: 304438 - DNA, 25 bp, Artificial
  probe
  misc_feature (1)..(25): SEQ ID NO: 1764; WAN024CAB; Start 348; Stop 372
tcaagaacaaccactactgatagct

SEQ ID NO: 304439 - DNA, 25 bp, Artificial
  probe
  misc_feature (1)..(25): SEQ ID NO: 1764; WAN024CAB; Start 385; Stop 409
gtcattggacctctggtagaagaat

SEQ ID NO: 304440 - DNA, 25 bp, Artificial
  probe
  misc_feature (1)..(25): SEQ ID NO: 1764; WAN024CAB; Start 274; Stop 298
gtatcagagatgttgaagcagtttg

SEQ ID NO: 304441 - DNA, 25 bp, Artificial
  probe
  misc_feature (1)..(25): SEQ ID NO: 1764; WAN024CAB; Start 275; Stop 299
tatcagagatgttgaagcagtttgt

SEQ ID NO: 304442 - DNA, 25 bp, Artificial
  probe
  misc_feature (1)..(25): SEQ ID NO: 1764; WAN024CAB; Start 273; Stop 297
tgtatcagagatgttgaagcagttt

SEQ ID NO: 304443 - DNA, 25 bp, Artificial
  probe
  misc_feature (1)..(25): SEQ ID NO: 1764; WAN024CAB; Start 271; Stop 295
tttgtatcagagatgttgaagcagt

SEQ ID NO: 304444 - DNA, 25 bp, Artificial
  probe
  misc_feature (1)..(25): SEQ ID NO: 1764; WAN024CAB; Start 270; Stop 294
atttgtatcagagatgttgaagcag

SEQ ID NO: 304445 - DNA, 25 bp, Artificial
  probe
  misc_feature (1)..(25): SEQ ID NO: 1764; WAN024CAB; Start 227; Stop 251
taacaggatggctctttctcattct

SEQ ID NO: 304446 - DNA, 25 bp, Artificial
  probe
  misc_feature (1)..(25): SEQ ID NO: 1764; WAN024CAB; Start 341; Stop 365
gtacctttcaagaacaaccactact

SEQ ID NO: 304447 - DNA, 25 bp, Artificial
  probe
  misc_feature (1)..(25): SEQ ID NO: 1764; WAN024CAB; Start 344; Stop 368
cctttcaagaacaaccactactgat

SEQ ID NO: 304448 - DNA, 25 bp, Artificial
  probe
  misc_feature (1)..(25): SEQ ID NO: 1764; WAN024CAB; Start 224; Stop 248
tcttaacaggatggctctttctcat

SEQ ID NO: 304449 - DNA, 25 bp, Artificial
  probe
  misc_feature (1)..(25): SEQ ID NO: 1764; WAN024CAB; Start 350; Stop 374
aagaacaaccactactgatagctgt

SEQ ID NO: 304450 - DNA, 25 bp, Artificial
  probe
  misc_feature (1)..(25): SEQ ID NO: 1764; WAN024CAB; Start 269; Stop 293
aatttgtatcagagatgttgaagca

SEQ ID NO: 304451 - DNA, 25 bp, Artificial
  probe
  misc_feature (1)..(25): SEQ ID NO: 1764; WAN024CAB; Start 242; Stop 266
ttctcattctgatgactgttgtctt

SEQ ID NO: 304452 - DNA, 25 bp, Artificial
  probe
  misc_feature (1)..(25): SEQ ID NO: 1765; WAN024FDF; Start 124; Stop 148
gcatcctcatctagttctattggaa

SEQ ID NO: 304453 - DNA, 25 bp, Artificial
  probe
  misc_feature (1)..(25): SEQ ID NO: 1765; WAN024FDF; Start 123; Stop 147
cgcatcctcatctagttctattgga

SEQ ID NO: 304454 - DNA, 25 bp, Artificial
  probe
  misc_feature (1)..(25): SEQ ID NO: 1765; WAN024FDF; Start 3; Stop 27
gatgtctaaggtgatgtggcgaatg

SEQ ID NO: 304455 - DNA, 25 bp, Artificial
  probe
  misc_feature (1)..(25): SEQ ID NO: 1765; WAN024FDF; Start 96; Stop 120
gtttgtagaggttgcgatgaaatcc

SEQ ID NO: 304456 - DNA, 25 bp, Artificial
  probe
  misc_feature (1)..(25): SEQ ID NO: 1765; WAN024FDF; Start 97; Stop 121
tttgtagaggttgcgatgaaatcca

SEQ ID NO: 304457 - DNA, 25 bp, Artificial
  probe
  misc_feature (1)..(25): SEQ ID NO: 1765; WAN024FDF; Start 95; Stop 119
cgtttgtagaggttgcgatgaaatc

SEQ ID NO: 304458 - DNA, 25 bp, Artificial
  probe
  misc_feature (1)..(25): SEQ ID NO: 1765; WAN024FDF; Start 2; Stop 26
tgatgtctaaggtgatgtggcgaat

SEQ ID NO: 304459 - DNA, 25 bp, Artificial
  probe
  misc_feature (1)..(25): SEQ ID NO: 1765; WAN024FDF; Start 1; Stop 25
atgatgtctaaggtgatgtggcgaa

SEQ ID NO: 304460 - DNA, 25 bp, Artificial
  probe
  misc_feature (1)..(25): SEQ ID NO: 1765; WAN024FDF; Start 160; Stop 184
cgttcagggttacttagagctatct

SEQ ID NO: 304461 - DNA, 25 bp, Artificial
  probe
  misc_feature (1)..(25): SEQ ID NO: 1765; WAN024FDF; Start 161; Stop 185
gttcagggttacttagagctatctg

SEQ ID NO: 304462 - DNA, 25 bp, Artificial
  probe
  misc_feature (1)..(25): SEQ ID NO: 1765; WAN024FDF; Start 98; Stop 122
ttgtagaggttgcgatgaaatccag

SEQ ID NO: 304463 - DNA, 25 bp, Artificial
  probe
  misc_feature (1)..(25): SEQ ID NO: 1765; WAN024FDF; Start 159; Stop 183
acgttcagggttacttagagctatc

SEQ ID NO: 304464 - DNA, 25 bp, Artificial
  probe
  misc_feature (1)..(25): SEQ ID NO: 1765; WAN024FDF; Start 125; Stop 149
catcctcatctagttctattggaaa

SEQ ID NO: 304465 - DNA, 25 bp, Artificial
  probe
  misc_feature (1)..(25): SEQ ID NO: 1765; WAN024FDF; Start 158; Stop 182
cacgttcagggttacttagagctat

SEQ ID NO: 304466 - DNA, 25 bp, Artificial
  probe
  misc_feature (1)..(25): SEQ ID NO: 1765; WAN024FDF; Start 162; Stop 186
ttcagggttacttagagctatctgc

SEQ ID NO: 304467 - DNA, 25 bp, Artificial
  probe
  misc_feature (1)..(25): SEQ ID NO: 1765; WAN024FDF; Start 207; Stop 231
gttagacagaggttccaactcgaaa

SEQ ID NO: 304468 - DNA, 25 bp, Artificial
  probe
  misc_feature (1)..(25): SEQ ID NO: 1765; WAN024FDF; Start 94; Stop 118
ccgtttgtagaggttgcgatgaaat

SEQ ID NO: 304469 - DNA, 25 bp, Artificial
  probe
  misc_feature (1)..(25): SEQ ID NO: 1765; WAN024FDF; Start 121; Stop 145
agcgcatcctcatctagttctattg

SEQ ID NO: 304470 - DNA, 25 bp, Artificial
  probe
  misc_feature (1)..(25): SEQ ID NO: 1765; WAN024FDF; Start 120; Stop 144
cagcgcatcctcatctagttctatt

SEQ ID NO: 304471 - DNA, 25 bp, Artificial
  probe
  misc_feature (1)..(25): SEQ ID NO: 1765; WAN024FDF; Start 206; Stop 230
ggttagacagaggttccaactcgaa

SEQ ID NO: 304472 - DNA, 25 bp, Artificial
  probe
  misc_feature (1)..(25): SEQ ID NO: 1765; WAN024FDF; Start 163; Stop 187
tcagggttacttagagctatctgca

SEQ ID NO: 304473 - DNA, 25 bp, Artificial
  probe
  misc_feature (1)..(25): SEQ ID NO: 1765; WAN024FDF; Start 137; Stop 161
gttctattggaaaatcaaaaccacg

SEQ ID NO: 304474 - DNA, 25 bp, Artificial
  probe
  misc_feature (1)..(25): SEQ ID NO: 1765; WAN024FDF; Start 157; Stop 181
ccacgttcagggttacttagagcta

SEQ ID NO: 304475 - DNA, 25 bp, Artificial
  probe
  misc_feature (1)..(25): SEQ ID NO: 1765; WAN024FDF; Start 122; Stop 146
gcgcatcctcatctagttctattgg

SEQ ID NO: 304476 - DNA, 25 bp, Artificial
  probe
  misc_feature (1)..(25): SEQ ID NO: 1765; WAN024FDF; Start 136; Stop 160
agttctattggaaaatcaaaaccac

SEQ ID NO: 304477 - DNA, 25 bp, Artificial
  probe
  misc_feature (1)..(25): SEQ ID NO: 1765; WAN024FDF; Start 203; Stop 227
cttggttagacagaggttccaactc

SEQ ID NO: 304478 - DNA, 25 bp, Artificial
  probe
  misc_feature (1)..(25): SEQ ID NO: 1765; WAN024FDF; Start 209; Stop 233
tagacagaggttccaactcgaaaat

SEQ ID NO: 304479 - DNA, 25 bp, Artificial
  probe
  misc_feature (1)..(25): SEQ ID NO: 1765; WAN024FDF; Start 93; Stop 117
tccgtttgtagaggttgcgatgaaa

SEQ ID NO: 304480 - DNA, 25 bp, Artificial
  probe
  misc_feature (1)..(25): SEQ ID NO: 1765; WAN024FDF; Start 201; Stop 225
gtcttggttagacagaggttccaac

SEQ ID NO: 304481 - DNA, 25 bp, Artificial
  probe
  misc_feature (1)..(25): SEQ ID NO: 1765; WAN024FDF; Start 128; Stop 152
cctcatctagttctattggaaaatc

SEQ ID NO: 304482 - DNA, 25 bp, Artificial
  probe
  misc_feature (1)..(25): SEQ ID NO: 1765; WAN024FDF; Start 61; Stop 85
aagtccagtgagttaaaggcagagc

SEQ ID NO: 304483 - DNA, 25 bp, Artificial
  probe
  misc_feature (1)..(25): SEQ ID NO: 1765; WAN024FDF; Start 208; Stop 232
ttagacagaggttccaactcgaaaa

SEQ ID NO: 304484 - DNA, 25 bp, Artificial
  probe
  misc_feature (1)..(25): SEQ ID NO: 1765; WAN024FDF; Start 202; Stop 226
tcttggttagacagaggttccaact

SEQ ID NO: 304485 - DNA, 25 bp, Artificial
  probe
  misc_feature (1)..(25): SEQ ID NO: 1766; WAN024CWW; Start 37; Stop 61
ttgctcacatcttatttcaaaccac

SEQ ID NO: 304486 - DNA, 25 bp, Artificial
  probe
  misc_feature (1)..(25): SEQ ID NO: 1766; WAN024CWW; Start 36; Stop 60
attgctcacatcttatttcaaacca

SEQ ID NO: 304487 - DNA, 25 bp, Artificial
  probe
  misc_feature (1)..(25): SEQ ID NO: 1766; WAN024CWW; Start 44; Stop 68
catcttatttcaaaccacgggactc

SEQ ID NO: 304488 - DNA, 25 bp, Artificial
  probe
  misc_feature (1)..(25): SEQ ID NO: 1766; WAN024CWW; Start 35; Stop 59
aattgctcacatcttatttcaaacc

SEQ ID NO: 304489 - DNA, 25 bp, Artificial
  probe
  misc_feature (1)..(25): SEQ ID NO: 1766; WAN024CWW; Start 40; Stop 64
ctcacatcttatttcaaaccacggg

SEQ ID NO: 304490 - DNA, 25 bp, Artificial
  probe
  misc_feature (1)..(25): SEQ ID NO: 1766; WAN024CWW; Start 38; Stop 62
tgctcacatcttatttcaaaccacg

SEQ ID NO: 304491 - DNA, 25 bp, Artificial
  probe
  misc_feature (1)..(25): SEQ ID NO: 1766; WAN024CWW; Start 42; Stop 66
cacatcttatttcaaaccacgggac

SEQ ID NO: 304492 - DNA, 25 bp, Artificial
  probe
  misc_feature (1)..(25): SEQ ID NO: 1766; WAN024CWW; Start 43; Stop 67
acatcttatttcaaaccacgggact

SEQ ID NO: 304493 - DNA, 25 bp, Artificial
  probe
  misc_feature (1)..(25): SEQ ID NO: 1766; WAN024CWW; Start 41; Stop 65
tcacatcttatttcaaaccacggga

SEQ ID NO: 304494 - DNA, 25 bp, Artificial
  probe
  misc_feature (1)..(25): SEQ ID NO: 1766; WAN024CWW; Start 118; Stop 142
gcctcaactacaggtgtaaactatt

SEQ ID NO: 304495 - DNA, 25 bp, Artificial
  probe
  misc_feature (1)..(25): SEQ ID NO: 1766; WAN024CWW; Start 39; Stop 63
gctcacatcttatttcaaaccacgg

SEQ ID NO: 304496 - DNA, 25 bp, Artificial
  probe
  misc_feature (1)..(25): SEQ ID NO: 1766; WAN024CWW; Start 4; Stop 28
atgtctagtaaggattctaaatgct

SEQ ID NO: 304497 - DNA, 25 bp, Artificial
  probe
  misc_feature (1)..(25): SEQ ID NO: 1766; WAN024CWW; Start 45; Stop 69
atcttatttcaaaccacgggactcc

SEQ ID NO: 304498 - DNA, 25 bp, Artificial
  probe
  misc_feature (1)..(25): SEQ ID NO: 1766; WAN024CWW; Start 3; Stop 27
gatgtctagtaaggattctaaatgc

SEQ ID NO: 304499 - DNA, 25 bp, Artificial
  probe
  misc_feature (1)..(25): SEQ ID NO: 1766; WAN024CWW; Start 119; Stop 143
cctcaactacaggtgtaaactatta

SEQ ID NO: 304500 - DNA, 25 bp, Artificial
  probe
  misc_feature (1)..(25): SEQ ID NO: 1766; WAN024CWW; Start 5; Stop 29
tgtctagtaaggattctaaatgcta

SEQ ID NO: 304501 - DNA, 25 bp, Artificial
  probe
  misc_feature (1)..(25): SEQ ID NO: 1766; WAN024CWW; Start 34; Stop 58
aaattgctcacatcttatttcaaac

SEQ ID NO: 304502 - DNA, 25 bp, Artificial
  probe
  misc_feature (1)..(25): SEQ ID NO: 1766; WAN024CWW; Start 122; Stop 146
caactacaggtgtaaactattatca

SEQ ID NO: 304503 - DNA, 25 bp, Artificial
  probe
  misc_feature (1)..(25): SEQ ID NO: 1766; WAN024CWW; Start 121; Stop 145
tcaactacaggtgtaaactattatc

SEQ ID NO: 304504 - DNA, 25 bp, Artificial
  probe
  misc_feature (1)..(25): SEQ ID NO: 1766; WAN024CWW; Start 120; Stop 144
ctcaactacaggtgtaaactattat

SEQ ID NO: 304505 - DNA, 25 bp, Artificial
  probe
  misc_feature (1)..(25): SEQ ID NO: 1766; WAN024CWW; Start 2; Stop 26
tgatgtctagtaaggattctaaatg

SEQ ID NO: 304506 - DNA, 25 bp, Artificial
  probe
  misc_feature (1)..(25): SEQ ID NO: 1766; WAN024CWW; Start 123; Stop 147
aactacaggtgtaaactattatcaa

SEQ ID NO: 304507 - DNA, 25 bp, Artificial
  probe
  misc_feature (1)..(25): SEQ ID NO: 1766; WAN024CWW; Start 124; Stop 148
actacaggtgtaaactattatcaat

SEQ ID NO: 304508 - DNA, 25 bp, Artificial
  probe
  misc_feature (1)..(25): SEQ ID NO: 1766; WAN024CWW; Start 1; Stop 25
atgatgtctagtaaggattctaaat

SEQ ID NO: 304509 - DNA, 25 bp, Artificial
  probe
  misc_feature (1)..(25): SEQ ID NO: 1766; WAN024CWW; Start 63; Stop 87
ggactcccacaagaaaggaaaatcc

SEQ ID NO: 304510 - DNA, 25 bp, Artificial
  probe
  misc_feature (1)..(25): SEQ ID NO: 1766; WAN024CWW; Start 66; Stop 90
ctcccacaagaaaggaaaatcctat

SEQ ID NO: 304511 - DNA, 25 bp, Artificial
  probe
  misc_feature (1)..(25): SEQ ID NO: 1766; WAN024CWW; Start 67; Stop 91
tcccacaagaaaggaaaatcctata

SEQ ID NO: 304512 - DNA, 25 bp, Artificial
  probe
  misc_feature (1)..(25): SEQ ID NO: 1766; WAN024CWW; Start 68; Stop 92
cccacaagaaaggaaaatcctataa

SEQ ID NO: 304513 - DNA, 25 bp, Artificial
  probe
  misc_feature (1)..(25): SEQ ID NO: 1766; WAN024CWW; Start 65; Stop 89
actcccacaagaaaggaaaatccta

SEQ ID NO: 304514 - DNA, 25 bp, Artificial
  probe
  misc_feature (1)..(25): SEQ ID NO: 1766; WAN024CWW; Start 46; Stop 70
tcttatttcaaaccacgggactccc

SEQ ID NO: 304515 - DNA, 25 bp, Artificial
  probe
  misc_feature (1)..(25): SEQ ID NO: 1766; WAN024CWW; Start 47; Stop 71
cttatttcaaaccacgggactccca

SEQ ID NO: 304516 - DNA, 25 bp, Artificial
  probe
  misc_feature (1)..(25): SEQ ID NO: 1766; WAN024CWW; Start 64; Stop 88
gactcccacaagaaaggaaaatcct

SEQ ID NO: 304517 - DNA, 25 bp, Artificial
  probe
  misc_feature (1)..(25): SEQ ID NO: 1766; WAN024CWW; Start 62; Stop 86
gggactcccacaagaaaggaaaatc

SEQ ID NO: 304518 - DNA, 25 bp, Artificial
  probe
  misc_feature (1)..(25): SEQ ID NO: 1767; WAN024ESM; Start 51; Stop 75
atattcactcgtaatcttggaagca

SEQ ID NO: 304519 - DNA, 25 bp, Artificial
  probe
  misc_feature (1)..(25): SEQ ID NO: 1767; WAN024ESM; Start 52; Stop 76
tattcactcgtaatcttggaagcaa

SEQ ID NO: 304520 - DNA, 25 bp, Artificial
  probe
  misc_feature (1)..(25): SEQ ID NO: 1767; WAN024ESM; Start 50; Stop 74
aatattcactcgtaatcttggaagc

SEQ ID NO: 304521 - DNA, 25 bp, Artificial
  probe
  misc_feature (1)..(25): SEQ ID NO: 1767; WAN024ESM; Start 53; Stop 77
attcactcgtaatcttggaagcaaa

SEQ ID NO: 304522 - DNA, 25 bp, Artificial
  probe
  misc_feature (1)..(25): SEQ ID NO: 1767; WAN024ESM; Start 14; Stop 38
cctctattgataccttgctcgacaa

SEQ ID NO: 304523 - DNA, 25 bp, Artificial
  probe
  misc_feature (1)..(25): SEQ ID NO: 1767; WAN024ESM; Start 175; Stop 199
gttacaattcacccagatccagaag

SEQ ID NO: 304524 - DNA, 25 bp, Artificial
  probe
  misc_feature (1)..(25): SEQ ID NO: 1767; WAN024ESM; Start 10; Stop 34
aaaccctctattgataccttgctcg

SEQ ID NO: 304525 - DNA, 25 bp, Artificial
  probe
  misc_feature (1)..(25): SEQ ID NO: 1767; WAN024ESM; Start 151; Stop 175
ttagaagaaatcgaatcaggaaacg

SEQ ID NO: 304526 - DNA, 25 bp, Artificial
  probe
  misc_feature (1)..(25): SEQ ID NO: 1767; WAN024ESM; Start 148; Stop 172
gctttagaagaaatcgaatcaggaa

SEQ ID NO: 304527 - DNA, 25 bp, Artificial
  probe
  misc_feature (1)..(25): SEQ ID NO: 1767; WAN024ESM; Start 152; Stop 176
tagaagaaatcgaatcaggaaacgt

SEQ ID NO: 304528 - DNA, 25 bp, Artificial
  probe
  misc_feature (1)..(25): SEQ ID NO: 1767; WAN024ESM; Start 176; Stop 200
ttacaattcacccagatccagaagg

SEQ ID NO: 304529 - DNA, 25 bp, Artificial
  probe
  misc_feature (1)..(25): SEQ ID NO: 1767; WAN024ESM; Start 147; Stop 171
cgctttagaagaaatcgaatcagga

SEQ ID NO: 304530 - DNA, 25 bp, Artificial
  probe
  misc_feature (1)..(25): SEQ ID NO: 1767; WAN024ESM; Start 174; Stop 198
cgttacaattcacccagatccagaa

SEQ ID NO: 304531 - DNA, 25 bp, Artificial
  probe
  misc_feature (1)..(25): SEQ ID NO: 1767; WAN024ESM; Start 243; Stop 267
ccgcaaagaagaagaagaaaagaaa

SEQ ID NO: 304532 - DNA, 25 bp, Artificial
  probe
  misc_feature (1)..(25): SEQ ID NO: 1767; WAN024ESM; Start 9; Stop 33
aaaaccctctattgataccttgctc

SEQ ID NO: 304533 - DNA, 25 bp, Artificial
  probe
  misc_feature (1)..(25): SEQ ID NO: 1767; WAN024ESM; Start 8; Stop 32
taaaaccctctattgataccttgct

SEQ ID NO: 304534 - DNA, 25 bp, Artificial
  probe
  misc_feature (1)..(25): SEQ ID NO: 1767; WAN024ESM; Start 244; Stop 268
cgcaaagaagaagaagaaaagaaaa

SEQ ID NO: 304535 - DNA, 25 bp, Artificial
  probe
  misc_feature (1)..(25): SEQ ID NO: 1767; WAN024ESM; Start 150; Stop 174
tttagaagaaatcgaatcaggaaac

SEQ ID NO: 304536 - DNA, 25 bp, Artificial
  probe
  misc_feature (1)..(25): SEQ ID NO: 1767; WAN024ESM; Start 7; Stop 31
ttaaaaccctctattgataccttgc

SEQ ID NO: 304537 - DNA, 25 bp, Artificial
  probe
  misc_feature (1)..(25): SEQ ID NO: 1767; WAN024ESM; Start 15; Stop 39
ctctattgataccttgctcgacaag

SEQ ID NO: 304538 - DNA, 25 bp, Artificial
  probe
  misc_feature (1)..(25): SEQ ID NO: 1767; WAN024ESM; Start 49; Stop 73
aaatattcactcgtaatcttggaag

SEQ ID NO: 304539 - DNA, 25 bp, Artificial
  probe
  misc_feature (1)..(25): SEQ ID NO: 1767; WAN024ESM; Start 149; Stop 173
ctttagaagaaatcgaatcaggaaa

SEQ ID NO: 304540 - DNA, 25 bp, Artificial
  probe
  misc_feature (1)..(25): SEQ ID NO: 1767; WAN024ESM; Start 54; Stop 78
ttcactcgtaatcttggaagcaaaa

SEQ ID NO: 304541 - DNA, 25 bp, Artificial
  probe
  misc_feature (1)..(25): SEQ ID NO: 1767; WAN024ESM; Start 179; Stop 203
caattcacccagatccagaaggaaa

SEQ ID NO: 304542 - DNA, 25 bp, Artificial
  probe
  misc_feature (1)..(25): SEQ ID NO: 1767; WAN024ESM; Start 11; Stop 35
aaccctctattgataccttgctcga

SEQ ID NO: 304543 - DNA, 25 bp, Artificial
  probe
  misc_feature (1)..(25): SEQ ID NO: 1767; WAN024ESM; Start 177; Stop 201
tacaattcacccagatccagaagga

SEQ ID NO: 304544 - DNA, 25 bp, Artificial
  probe
  misc_feature (1)..(25): SEQ ID NO: 1767; WAN024ESM; Start 255; Stop 279
agaagaaaagaaaatcaaagagcaa

SEQ ID NO: 304545 - DNA, 25 bp, Artificial
  probe
  misc_feature (1)..(25): SEQ ID NO: 1767; WAN024ESM; Start 254; Stop 278
aagaagaaaagaaaatcaaagagca

SEQ ID NO: 304546 - DNA, 25 bp, Artificial
  probe
  misc_feature (1)..(25): SEQ ID NO: 1767; WAN024ESM; Start 38; Stop 62
aggttccttcaaaatattcactcgt

SEQ ID NO: 304547 - DNA, 25 bp, Artificial
  probe
  misc_feature (1)..(25): SEQ ID NO: 1767; WAN024ESM; Start 55; Stop 79
tcactcgtaatcttggaagcaaaac

SEQ ID NO: 304548 - DNA, 25 bp, Artificial
  probe
  misc_feature (1)..(25): SEQ ID NO: 1767; WAN024ESM; Start 33; Stop 57
cgacaaggttccttcaaaatattca

SEQ ID NO: 304549 - DNA, 25 bp, Artificial
  probe
  misc_feature (1)..(25): SEQ ID NO: 1767; WAN024ESM; Start 39; Stop 63
ggttccttcaaaatattcactcgta

SEQ ID NO: 304550 - DNA, 25 bp, Artificial
  probe
  misc_feature (1)..(25): SEQ ID NO: 1767; WAN024ESM; Start 37; Stop 61
aaggttccttcaaaatattcactcg

SEQ ID NO: 304551 - DNA, 25 bp, Artificial
  probe
  misc_feature (1)..(25): SEQ ID NO: 1768; WAN024CK2; Start 112; Stop 136
tatatagaaggaaccacgacactgc

SEQ ID NO: 304552 - DNA, 25 bp, Artificial
  probe
  misc_feature (1)..(25): SEQ ID NO: 1768; WAN024CK2; Start 185; Stop 209
tatcctattcgagtgaagattgtgc

SEQ ID NO: 304553 - DNA, 25 bp, Artificial
  probe
  misc_feature (1)..(25): SEQ ID NO: 1768; WAN024CK2; Start 182; Stop 206
gcttatcctattcgagtgaagattg

SEQ ID NO: 304554 - DNA, 25 bp, Artificial
  probe
  misc_feature (1)..(25): SEQ ID NO: 1768; WAN024CK2; Start 181; Stop 205
agcttatcctattcgagtgaagatt

SEQ ID NO: 304555 - DNA, 25 bp, Artificial
  probe
  misc_feature (1)..(25): SEQ ID NO: 1768; WAN024CK2; Start 184; Stop 208
ttatcctattcgagtgaagattgtg

SEQ ID NO: 304556 - DNA, 25 bp, Artificial
  probe
  misc_feature (1)..(25): SEQ ID NO: 1768; WAN024CK2; Start 183; Stop 207
cttatcctattcgagtgaagattgt

SEQ ID NO: 304557 - DNA, 25 bp, Artificial
  probe
  misc_feature (1)..(25): SEQ ID NO: 1768; WAN024CK2; Start 189; Stop 213
ctattcgagtgaagattgtgcagag

SEQ ID NO: 304558 - DNA, 25 bp, Artificial
  probe
  misc_feature (1)..(25): SEQ ID NO: 1768; WAN024CK2; Start 190; Stop 214
tattcgagtgaagattgtgcagaga

SEQ ID NO: 304559 - DNA, 25 bp, Artificial
  probe
  misc_feature (1)..(25): SEQ ID NO: 1768; WAN024CK2; Start 186; Stop 210
atcctattcgagtgaagattgtgca

SEQ ID NO: 304560 - DNA, 25 bp, Artificial
  probe
  misc_feature (1)..(25): SEQ ID NO: 1768; WAN024CK2; Start 191; Stop 215
attcgagtgaagattgtgcagagat

SEQ ID NO: 304561 - DNA, 25 bp, Artificial
  probe
  misc_feature (1)..(25): SEQ ID NO: 1768; WAN024CK2; Start 192; Stop 216
ttcgagtgaagattgtgcagagatt

SEQ ID NO: 304562 - DNA, 25 bp, Artificial
  probe
  misc_feature (1)..(25): SEQ ID NO: 1768; WAN024CK2; Start 188; Stop 212
cctattcgagtgaagattgtgcaga

SEQ ID NO: 304563 - DNA, 25 bp, Artificial
  probe
  misc_feature (1)..(25): SEQ ID NO: 1768; WAN024CK2; Start 187; Stop 211
tcctattcgagtgaagattgtgcag

SEQ ID NO: 304564 - DNA, 25 bp, Artificial
  probe
  misc_feature (1)..(25): SEQ ID NO: 1768; WAN024CK2; Start 9; Stop 33
tgtaattgaagaagtcaaggatgaa

SEQ ID NO: 304565 - DNA, 25 bp, Artificial
  probe
  misc_feature (1)..(25): SEQ ID NO: 1768; WAN024CK2; Start 8; Stop 32
ttgtaattgaagaagtcaaggatga

SEQ ID NO: 304566 - DNA, 25 bp, Artificial
  probe
  misc_feature (1)..(25): SEQ ID NO: 1768; WAN024CK2; Start 93; Stop 117
cccagaaagcacacaagcctatata

SEQ ID NO: 304567 - DNA, 25 bp, Artificial
  probe
  misc_feature (1)..(25): SEQ ID NO: 1768; WAN024CK2; Start 111; Stop 135
ctatatagaaggaaccacgacactg

SEQ ID NO: 304568 - DNA, 25 bp, Artificial
  probe
  misc_feature (1)..(25): SEQ ID NO: 1768; WAN024CK2; Start 63; Stop 87
tttgaaggatttgccagaatggttt

SEQ ID NO: 304569 - DNA, 25 bp, Artificial
  probe
  misc_feature (1)..(25): SEQ ID NO: 1768; WAN024CK2; Start 1; Stop 25
atgatgtttgtaattgaagaagtca

SEQ ID NO: 304570 - DNA, 25 bp, Artificial
  probe
  misc_feature (1)..(25): SEQ ID NO: 1768; WAN024CK2; Start 77; Stop 101
cagaatggtttggaatcccagaaag

SEQ ID NO: 304571 - DNA, 25 bp, Artificial
  probe
  misc_feature (1)..(25): SEQ ID NO: 1768; WAN024CK2; Start 180; Stop 204
aagcttatcctattcgagtgaagat

SEQ ID NO: 304572 - DNA, 25 bp, Artificial
  probe
  misc_feature (1)..(25): SEQ ID NO: 1768; WAN024CK2; Start 113; Stop 137
atatagaaggaaccacgacactgca

SEQ ID NO: 304573 - DNA, 25 bp, Artificial
  probe
  misc_feature (1)..(25): SEQ ID NO: 1768; WAN024CK2; Start 64; Stop 88
ttgaaggatttgccagaatggtttg

SEQ ID NO: 304574 - DNA, 25 bp, Artificial
  probe
  misc_feature (1)..(25): SEQ ID NO: 1768; WAN024CK2; Start 104; Stop 128
cacaagcctatatagaaggaaccac

SEQ ID NO: 304575 - DNA, 25 bp, Artificial
  probe
  misc_feature (1)..(25): SEQ ID NO: 1768; WAN024CK2; Start 102; Stop 126
cacacaagcctatatagaaggaacc

SEQ ID NO: 304576 - DNA, 25 bp, Artificial
  probe
  misc_feature (1)..(25): SEQ ID NO: 1768; WAN024CK2; Start 103; Stop 127
acacaagcctatatagaaggaacca

SEQ ID NO: 304577 - DNA, 25 bp, Artificial
  probe
  misc_feature (1)..(25): SEQ ID NO: 1768; WAN024CK2; Start 110; Stop 134
cctatatagaaggaaccacgacact

SEQ ID NO: 304578 - DNA, 25 bp, Artificial
  probe
  misc_feature (1)..(25): SEQ ID NO: 1768; WAN024CK2; Start 114; Stop 138
tatagaaggaaccacgacactgcaa

SEQ ID NO: 304579 - DNA, 25 bp, Artificial
  probe
  misc_feature (1)..(25): SEQ ID NO: 1768; WAN024CK2; Start 101; Stop 125
gcacacaagcctatatagaaggaac

SEQ ID NO: 304580 - DNA, 25 bp, Artificial
  probe
  misc_feature (1)..(25): SEQ ID NO: 1768; WAN024CK2; Start 91; Stop 115
atcccagaaagcacacaagcctata

SEQ ID NO: 304581 - DNA, 25 bp, Artificial
  probe
  misc_feature (1)..(25): SEQ ID NO: 1768; WAN024CK2; Start 92; Stop 116
tcccagaaagcacacaagcctatat

SEQ ID NO: 304582 - DNA, 25 bp, Artificial
  probe
  misc_feature (1)..(25): SEQ ID NO: 1768; WAN024CK2; Start 100; Stop 124
agcacacaagcctatatagaaggaa

SEQ ID NO: 304583 - DNA, 25 bp, Artificial
  probe
  misc_feature (1)..(25): SEQ ID NO: 1768; WAN024CK2; Start 99; Stop 123
aagcacacaagcctatatagaagga

SEQ ID NO: 304584 - DNA, 25 bp, Artificial
  probe
  misc_feature (1)..(25): SEQ ID NO: 1769; WAN024G5X; Start 712; Stop 736
atcatctactgtattgtcggaagaa

SEQ ID NO: 304585 - DNA, 25 bp, Artificial
  probe
  misc_feature (1)..(25): SEQ ID NO: 1769; WAN024G5X; Start 711; Stop 735
aatcatctactgtattgtcggaaga

SEQ ID NO: 304586 - DNA, 25 bp, Artificial
  probe
  misc_feature (1)..(25): SEQ ID NO: 1769; WAN024G5X; Start 384; Stop 408
tacaactggcggaactgatattcta

SEQ ID NO: 304587 - DNA, 25 bp, Artificial
  probe
  misc_feature (1)..(25): SEQ ID NO: 1769; WAN024G5X; Start 626; Stop 650
aacttgctaaggcgattaatgatga

SEQ ID NO: 304588 - DNA, 25 bp, Artificial
  probe
  misc_feature (1)..(25): SEQ ID NO: 1769; WAN024G5X; Start 625; Stop 649
caacttgctaaggcgattaatgatg

SEQ ID NO: 304589 - DNA, 25 bp, Artificial
  probe
  misc_feature (1)..(25): SEQ ID NO: 1769; WAN024G5X; Start 393; Stop 417
cggaactgatattctagctcgtatt

SEQ ID NO: 304590 - DNA, 25 bp, Artificial
  probe
  misc_feature (1)..(25): SEQ ID NO: 1769; WAN024G5X; Start 627; Stop 651
acttgctaaggcgattaatgatgac

SEQ ID NO: 304591 - DNA, 25 bp, Artificial
  probe
  misc_feature (1)..(25): SEQ ID NO: 1769; WAN024G5X; Start 560; Stop 584
ttgatttgattggtgaaggaggata

SEQ ID NO: 304592 - DNA, 25 bp, Artificial
  probe
  misc_feature (1)..(25): SEQ ID NO: 1769; WAN024G5X; Start 558; Stop 582
tattgatttgattggtgaaggagga

SEQ ID NO: 304593 - DNA, 25 bp, Artificial
  probe
  misc_feature (1)..(25): SEQ ID NO: 1769; WAN024G5X; Start 551; Stop 575
ctcgtgttattgatttgattggtga

SEQ ID NO: 304594 - DNA, 25 bp, Artificial
  probe
  misc_feature (1)..(25): SEQ ID NO: 1769; WAN024G5X; Start 550; Stop 574
tctcgtgttattgatttgattggtg

SEQ ID NO: 304595 - DNA, 25 bp, Artificial
  probe
  misc_feature (1)..(25): SEQ ID NO: 1769; WAN024G5X; Start 561; Stop 585
tgatttgattggtgaaggaggatat

SEQ ID NO: 304596 - DNA, 25 bp, Artificial
  probe
  misc_feature (1)..(25): SEQ ID NO: 1769; WAN024G5X; Start 559; Stop 583
attgatttgattggtgaaggaggat

SEQ ID NO: 304597 - DNA, 25 bp, Artificial
  probe
  misc_feature (1)..(25): SEQ ID NO: 1769; WAN024G5X; Start 385; Stop 409
acaactggcggaactgatattctag

SEQ ID NO: 304598 - DNA, 25 bp, Artificial
  probe
  misc_feature (1)..(25): SEQ ID NO: 1769; WAN024G5X; Start 552; Stop 576
tcgtgttattgatttgattggtgaa

SEQ ID NO: 304599 - DNA, 25 bp, Artificial
  probe
  misc_feature (1)..(25): SEQ ID NO: 1769; WAN024G5X; Start 312; Stop 336
tttactaatcacagcccttatagcg

SEQ ID NO: 304600 - DNA, 25 bp, Artificial
  probe
  misc_feature (1)..(25): SEQ ID NO: 1769; WAN024G5X; Start 562; Stop 586
gatttgattggtgaaggaggatatg

SEQ ID NO: 304601 - DNA, 25 bp, Artificial
  probe
  misc_feature (1)..(25): SEQ ID NO: 1769; WAN024G5X; Start 394; Stop 418
ggaactgatattctagctcgtattc

SEQ ID NO: 304602 - DNA, 25 bp, Artificial
  probe
  misc_feature (1)..(25): SEQ ID NO: 1769; WAN024G5X; Start 624; Stop 648
ccaacttgctaaggcgattaatgat

SEQ ID NO: 304603 - DNA, 25 bp, Artificial
  probe
  misc_feature (1)..(25): SEQ ID NO: 1769; WAN024G5X; Start 557; Stop 581
ttattgatttgattggtgaaggagg

SEQ ID NO: 304604 - DNA, 25 bp, Artificial
  probe
  misc_feature (1)..(25): SEQ ID NO: 1769; WAN024G5X; Start 553; Stop 577
cgtgttattgatttgattggtgaag

SEQ ID NO: 304605 - DNA, 25 bp, Artificial
  probe
  misc_feature (1)..(25): SEQ ID NO: 1769; WAN024G5X; Start 549; Stop 573
ttctcgtgttattgatttgattggt

SEQ ID NO: 304606 - DNA, 25 bp, Artificial
  probe
  misc_feature (1)..(25): SEQ ID NO: 1769; WAN024G5X; Start 555; Stop 579
tgttattgatttgattggtgaagga

SEQ ID NO: 304607 - DNA, 25 bp, Artificial
  probe
  misc_feature (1)..(25): SEQ ID NO: 1769; WAN024G5X; Start 554; Stop 578
gtgttattgatttgattggtgaagg

SEQ ID NO: 304608 - DNA, 25 bp, Artificial
  probe
  misc_feature (1)..(25): SEQ ID NO: 1769; WAN024G5X; Start 563; Stop 587
atttgattggtgaaggaggatatgc

SEQ ID NO: 304609 - DNA, 25 bp, Artificial
  probe
  misc_feature (1)..(25): SEQ ID NO: 1769; WAN024G5X; Start 397; Stop 421
actgatattctagctcgtattctca

SEQ ID NO: 304610 - DNA, 25 bp, Artificial
  probe
  misc_feature (1)..(25): SEQ ID NO: 1769; WAN024G5X; Start 35; Stop 59
tactaggtgctgctatttatgcttt

SEQ ID NO: 304611 - DNA, 25 bp, Artificial
  probe
  misc_feature (1)..(25): SEQ ID NO: 1769; WAN024G5X; Start 34; Stop 58
ttactaggtgctgctatttatgctt

SEQ ID NO: 304612 - DNA, 25 bp, Artificial
  probe
  misc_feature (1)..(25): SEQ ID NO: 1769; WAN024G5X; Start 33; Stop 57
tttactaggtgctgctatttatgct

SEQ ID NO: 304613 - DNA, 25 bp, Artificial
  probe
  misc_feature (1)..(25): SEQ ID NO: 1769; WAN024G5X; Start 400; Stop 424
gatattctagctcgtattctcaaca

SEQ ID NO: 304614 - DNA, 25 bp, Artificial
  probe
  misc_feature (1)..(25): SEQ ID NO: 1769; WAN024G5X; Start 710; Stop 734
aaatcatctactgtattgtcggaag

SEQ ID NO: 304615 - DNA, 25 bp, Artificial
  probe
  misc_feature (1)..(25): SEQ ID NO: 1769; WAN024G5X; Start 628; Stop 652
cttgctaaggcgattaatgatgacc

SEQ ID NO: 304616 - DNA, 25 bp, Artificial
  probe
  misc_feature (1)..(25): SEQ ID NO: 1769; WAN024G5X; Start 383; Stop 407
gtacaactggcggaactgatattct

SEQ ID NO: 304617 - DNA, 25 bp, Artificial
  probe
  misc_feature (1)..(25): SEQ ID NO: 1770; WAN024CGS; Start 1266; Stop 1290
cgtcaaatcaaatggtattatcgtg

SEQ ID NO: 304618 - DNA, 25 bp, Artificial
  probe
  misc_feature (1)..(25): SEQ ID NO: 1770; WAN024CGS; Start 1436; Stop 1460
aagaaatcgccaaagcaggaattaa

SEQ ID NO: 304619 - DNA, 25 bp, Artificial
  probe
  misc_feature (1)..(25): SEQ ID NO: 1770; WAN024CGS; Start 577; Stop 601
attgcagaatacttcacagctcaag

SEQ ID NO: 304620 - DNA, 25 bp, Artificial
  probe
  misc_feature (1)..(25): SEQ ID NO: 1770; WAN024CGS; Start 576; Stop 600
gattgcagaatacttcacagctcaa

SEQ ID NO: 304621 - DNA, 25 bp, Artificial
  probe
  misc_feature (1)..(25): SEQ ID NO: 1770; WAN024CGS; Start 574; Stop 598
ttgattgcagaatacttcacagctc

SEQ ID NO: 304622 - DNA, 25 bp, Artificial
  probe
  misc_feature (1)..(25): SEQ ID NO: 1770; WAN024CGS; Start 1519; Stop 1543
aaatacggcttgactatggtcttta

SEQ ID NO: 304623 - DNA, 25 bp, Artificial
  probe
  misc_feature (1)..(25): SEQ ID NO: 1770; WAN024CGS; Start 1518; Stop 1542
taaatacggcttgactatggtcttt

SEQ ID NO: 304624 - DNA, 25 bp, Artificial
  probe
  misc_feature (1)..(25): SEQ ID NO: 1770; WAN024CGS; Start 1517; Stop 1541
ataaatacggcttgactatggtctt

SEQ ID NO: 304625 - DNA, 25 bp, Artificial
  probe
  misc_feature (1)..(25): SEQ ID NO: 1770; WAN024CGS; Start 1516; Stop 1540
gataaatacggcttgactatggtct

SEQ ID NO: 304626 - DNA, 25 bp, Artificial
  probe
  misc_feature (1)..(25): SEQ ID NO: 1770; WAN024CGS; Start 1002; Stop 1026
aatcatcattgcaccaagctatacg

SEQ ID NO: 304627 - DNA, 25 bp, Artificial
  probe
  misc_feature (1)..(25): SEQ ID NO: 1770; WAN024CGS; Start 1520; Stop 1544
aatacggcttgactatggtctttac

SEQ ID NO: 304628 - DNA, 25 bp, Artificial
  probe
  misc_feature (1)..(25): SEQ ID NO: 1770; WAN024CGS; Start 1437; Stop 1461
agaaatcgccaaagcaggaattaag

SEQ ID NO: 304629 - DNA, 25 bp, Artificial
  probe
  misc_feature (1)..(25): SEQ ID NO: 1770; WAN024CGS; Start 1435; Stop 1459
gaagaaatcgccaaagcaggaatta

SEQ ID NO: 304630 - DNA, 25 bp, Artificial
  probe
  misc_feature (1)..(25): SEQ ID NO: 1770; WAN024CGS; Start 1527; Stop 1551
cttgactatggtctttacaggtgtg

SEQ ID NO: 304631 - DNA, 25 bp, Artificial
  probe
  misc_feature (1)..(25): SEQ ID NO: 1770; WAN024CGS; Start 1515; Stop 1539
ggataaatacggcttgactatggtc

SEQ ID NO: 304632 - DNA, 25 bp, Artificial
  probe
  misc_feature (1)..(25): SEQ ID NO: 1770; WAN024CGS; Start 1528; Stop 1552
ttgactatggtctttacaggtgtga

SEQ ID NO: 304633 - DNA, 25 bp, Artificial
  probe
  misc_feature (1)..(25): SEQ ID NO: 1770; WAN024CGS; Start 1514; Stop 1538
cggataaatacggcttgactatggt

SEQ ID NO: 304634 - DNA, 25 bp, Artificial
  probe
  misc_feature (1)..(25): SEQ ID NO: 1770; WAN024CGS; Start 1530; Stop 1554
gactatggtctttacaggtgtgaga

SEQ ID NO: 304635 - DNA, 25 bp, Artificial
  probe
  misc_feature (1)..(25): SEQ ID NO: 1770; WAN024CGS; Start 1521; Stop 1545
atacggcttgactatggtctttaca

SEQ ID NO: 304636 - DNA, 25 bp, Artificial
  probe
  misc_feature (1)..(25): SEQ ID NO: 1770; WAN024CGS; Start 1529; Stop 1553
tgactatggtctttacaggtgtgag

SEQ ID NO: 304637 - DNA, 25 bp, Artificial
  probe
  misc_feature (1)..(25): SEQ ID NO: 1770; WAN024CGS; Start 1268; Stop 1292
tcaaatcaaatggtattatcgtgac

SEQ ID NO: 304638 - DNA, 25 bp, Artificial
  probe
  misc_feature (1)..(25): SEQ ID NO: 1770; WAN024CGS; Start 1267; Stop 1291
gtcaaatcaaatggtattatcgtga

SEQ ID NO: 304639 - DNA, 25 bp, Artificial
  probe
  misc_feature (1)..(25): SEQ ID NO: 1770; WAN024CGS; Start 9; Stop 33
aaaggagaatataatgactaaacgc

SEQ ID NO: 304640 - DNA, 25 bp, Artificial
  probe
  misc_feature (1)..(25): SEQ ID NO: 1770; WAN024CGS; Start 1254; Stop 1278
ggctatcaagtacgtcaaatcaaat

SEQ ID NO: 304641 - DNA, 25 bp, Artificial
  probe
  misc_feature (1)..(25): SEQ ID NO: 1770; WAN024CGS; Start 1253; Stop 1277
aggctatcaagtacgtcaaatcaaa

SEQ ID NO: 304642 - DNA, 25 bp, Artificial
  probe
  misc_feature (1)..(25): SEQ ID NO: 1770; WAN024CGS; Start 1252; Stop 1276
aaggctatcaagtacgtcaaatcaa

SEQ ID NO: 304643 - DNA, 25 bp, Artificial
  probe
  misc_feature (1)..(25): SEQ ID NO: 1770; WAN024CGS; Start 575; Stop 599
tgattgcagaatacttcacagctca

SEQ ID NO: 304644 - DNA, 25 bp, Artificial
  probe
  misc_feature (1)..(25): SEQ ID NO: 1770; WAN024CGS; Start 1251; Stop 1275
gaaggctatcaagtacgtcaaatca

SEQ ID NO: 304645 - DNA, 25 bp, Artificial
  probe
  misc_feature (1)..(25): SEQ ID NO: 1770; WAN024CGS; Start 1522; Stop 1546
tacggcttgactatggtctttacag

SEQ ID NO: 304646 - DNA, 25 bp, Artificial
  probe
  misc_feature (1)..(25): SEQ ID NO: 1770; WAN024CGS; Start 1269; Stop 1293
caaatcaaatggtattatcgtgacc

SEQ ID NO: 304647 - DNA, 25 bp, Artificial
  probe
  misc_feature (1)..(25): SEQ ID NO: 1770; WAN024CGS; Start 1255; Stop 1279
gctatcaagtacgtcaaatcaaatg

SEQ ID NO: 304648 - DNA, 25 bp, Artificial
  probe
  misc_feature (1)..(25): SEQ ID NO: 1770; WAN024CGS; Start 1001; Stop 1025
aaatcatcattgcaccaagctatac

SEQ ID NO: 304649 - DNA, 25 bp, Artificial
  probe
  misc_feature (1)..(25): SEQ ID NO: 1770; WAN024CGS; Start 1257; Stop 1281
tatcaagtacgtcaaatcaaatggt

SEQ ID NO: 304650 - DNA, 25 bp, Artificial
  probe
  misc_feature (1)..(25): SEQ ID NO: 1771; WAN024CK8; Start 546; Stop 570
aagtgtagaattggagttgctgtat

SEQ ID NO: 304651 - DNA, 25 bp, Artificial
  probe
  misc_feature (1)..(25): SEQ ID NO: 1771; WAN024CK8; Start 547; Stop 571
agtgtagaattggagttgctgtata

SEQ ID NO: 304652 - DNA, 25 bp, Artificial
  probe
  misc_feature (1)..(25): SEQ ID NO: 1771; WAN024CK8; Start 305; Stop 329
ttctactctcaagttctactcaagc

SEQ ID NO: 304653 - DNA, 25 bp, Artificial
  probe
  misc_feature (1)..(25): SEQ ID NO: 1771; WAN024CK8; Start 301; Stop 325
cctgttctactctcaagttctactc

SEQ ID NO: 304654 - DNA, 25 bp, Artificial
  probe
  misc_feature (1)..(25): SEQ ID NO: 1771; WAN024CK8; Start 300; Stop 324
tcctgttctactctcaagttctact

SEQ ID NO: 304655 - DNA, 25 bp, Artificial
  probe
  misc_feature (1)..(25): SEQ ID NO: 1771; WAN024CK8; Start 299; Stop 323
gtcctgttctactctcaagttctac

SEQ ID NO: 304656 - DNA, 25 bp, Artificial
  probe
  misc_feature (1)..(25): SEQ ID NO: 1771; WAN024CK8; Start 298; Stop 322
tgtcctgttctactctcaagttcta

SEQ ID NO: 304657 - DNA, 25 bp, Artificial
  probe
  misc_feature (1)..(25): SEQ ID NO: 1771; WAN024CK8; Start 556; Stop 580
ttggagttgctgtatattgatgatt

SEQ ID NO: 304658 - DNA, 25 bp, Artificial
  probe
  misc_feature (1)..(25): SEQ ID NO: 1771; WAN024CK8; Start 548; Stop 572
gtgtagaattggagttgctgtatat

SEQ ID NO: 304659 - DNA, 25 bp, Artificial
  probe
  misc_feature (1)..(25): SEQ ID NO: 1771; WAN024CK8; Start 1042; Stop 1066
ggtcaagagtatcctattctgaact

SEQ ID NO: 304660 - DNA, 25 bp, Artificial
  probe
  misc_feature (1)..(25): SEQ ID NO: 1771; WAN024CK8; Start 302; Stop 326
ctgttctactctcaagttctactca

SEQ ID NO: 304661 - DNA, 25 bp, Artificial
  probe
  misc_feature (1)..(25): SEQ ID NO: 1771; WAN024CK8; Start 554; Stop 578
aattggagttgctgtatattgatga

SEQ ID NO: 304662 - DNA, 25 bp, Artificial
  probe
  misc_feature (1)..(25): SEQ ID NO: 1771; WAN024CK8; Start 555; Stop 579
attggagttgctgtatattgatgat

SEQ ID NO: 304663 - DNA, 25 bp, Artificial
  probe
  misc_feature (1)..(25): SEQ ID NO: 1771; WAN024CK8; Start 545; Stop 569
caagtgtagaattggagttgctgta

SEQ ID NO: 304664 - DNA, 25 bp, Artificial
  probe
  misc_feature (1)..(25): SEQ ID NO: 1771; WAN024CK8; Start 297; Stop 321
ttgtcctgttctactctcaagttct

SEQ ID NO: 304665 - DNA, 25 bp, Artificial
  probe
  misc_feature (1)..(25): SEQ ID NO: 1771; WAN024CK8; Start 553; Stop 577
gaattggagttgctgtatattgatg

SEQ ID NO: 304666 - DNA, 25 bp, Artificial
  probe
  misc_feature (1)..(25): SEQ ID NO: 1771; WAN024CK8; Start 303; Stop 327
tgttctactctcaagttctactcaa

SEQ ID NO: 304667 - DNA, 25 bp, Artificial
  probe
  misc_feature (1)..(25): SEQ ID NO: 1771; WAN024CK8; Start 552; Stop 576
agaattggagttgctgtatattgat

SEQ ID NO: 304668 - DNA, 25 bp, Artificial
  probe
  misc_feature (1)..(25): SEQ ID NO: 1771; WAN024CK8; Start 549; Stop 573
tgtagaattggagttgctgtatatt

SEQ ID NO: 304669 - DNA, 25 bp, Artificial
  probe
  misc_feature (1)..(25): SEQ ID NO: 1771; WAN024CK8; Start 304; Stop 328
gttctactctcaagttctactcaag

SEQ ID NO: 304670 - DNA, 25 bp, Artificial
  probe
  misc_feature (1)..(25): SEQ ID NO: 1771; WAN024CK8; Start 551; Stop 575
tagaattggagttgctgtatattga

SEQ ID NO: 304671 - DNA, 25 bp, Artificial
  probe
  misc_feature (1)..(25): SEQ ID NO: 1771; WAN024CK8; Start 550; Stop 574
gtagaattggagttgctgtatattg

SEQ ID NO: 304672 - DNA, 25 bp, Artificial
  probe
  misc_feature (1)..(25): SEQ ID NO: 1771; WAN024CK8; Start 1043; Stop 1067
gtcaagagtatcctattctgaactt

SEQ ID NO: 304673 - DNA, 25 bp, Artificial
  probe
  misc_feature (1)..(25): SEQ ID NO: 1771; WAN024CK8; Start 310; Stop 334
ctctcaagttctactcaagctagtt

SEQ ID NO: 304674 - DNA, 25 bp, Artificial
  probe
  misc_feature (1)..(25): SEQ ID NO: 1771; WAN024CK8; Start 306; Stop 330
tctactctcaagttctactcaagct

SEQ ID NO: 304675 - DNA, 25 bp, Artificial
  probe
  misc_feature (1)..(25): SEQ ID NO: 1771; WAN024CK8; Start 431; Stop 455
tagtttaccgtttcccgaatcttta

SEQ ID NO: 304676 - DNA, 25 bp, Artificial
  probe
  misc_feature (1)..(25): SEQ ID NO: 1771; WAN024CK8; Start 309; Stop 333
actctcaagttctactcaagctagt

SEQ ID NO: 304677 - DNA, 25 bp, Artificial
  probe
  misc_feature (1)..(25): SEQ ID NO: 1771; WAN024CK8; Start 433; Stop 457
gtttaccgtttcccgaatctttatg

SEQ ID NO: 304678 - DNA, 25 bp, Artificial
  probe
  misc_feature (1)..(25): SEQ ID NO: 1771; WAN024CK8; Start 432; Stop 456
agtttaccgtttcccgaatctttat

SEQ ID NO: 304679 - DNA, 25 bp, Artificial
  probe
  misc_feature (1)..(25): SEQ ID NO: 1771; WAN024CK8; Start 209; Stop 233
atcgtccacagaatcctgatgaatt

SEQ ID NO: 304680 - DNA, 25 bp, Artificial
  probe
  misc_feature (1)..(25): SEQ ID NO: 1771; WAN024CK8; Start 208; Stop 232
aatcgtccacagaatcctgatgaat

SEQ ID NO: 304681 - DNA, 25 bp, Artificial
  probe
  misc_feature (1)..(25): SEQ ID NO: 1771; WAN024CK8; Start 1005; Stop 1029
tttaatacaagagcgtaggataggg

SEQ ID NO: 304682 - DNA, 25 bp, Artificial
  probe
  misc_feature (1)..(25): SEQ ID NO: 1771; WAN024CK8; Start 430; Stop 454
ttagtttaccgtttcccgaatcttt

SEQ ID NO: 304683 - DNA, 25 bp, Artificial
  probe
  misc_feature (1)..(25): SEQ ID NO: 1772; WAN024DH7; Start 1392; Stop 1416
tcttgctggatggtgaataactaat

SEQ ID NO: 304684 - DNA, 25 bp, Artificial
  probe
  misc_feature (1)..(25): SEQ ID NO: 1772; WAN024DH7; Start 1391; Stop 1415
ctcttgctggatggtgaataactaa

SEQ ID NO: 304685 - DNA, 25 bp, Artificial
  probe
  misc_feature (1)..(25): SEQ ID NO: 1772; WAN024DH7; Start 576; Stop 600
aactggactctaatatctacgatgc

SEQ ID NO: 304686 - DNA, 25 bp, Artificial
  probe
  misc_feature (1)..(25): SEQ ID NO: 1772; WAN024DH7; Start 83; Stop 107
gtcatcttcctgattattctcctca

SEQ ID NO: 304687 - DNA, 25 bp, Artificial
  probe
  misc_feature (1)..(25): SEQ ID NO: 1772; WAN024DH7; Start 82; Stop 106
tgtcatcttcctgattattctcctc

SEQ ID NO: 304688 - DNA, 25 bp, Artificial
  probe
  misc_feature (1)..(25): SEQ ID NO: 1772; WAN024DH7; Start 81; Stop 105
ttgtcatcttcctgattattctcct

SEQ ID NO: 304689 - DNA, 25 bp, Artificial
  probe
  misc_feature (1)..(25): SEQ ID NO: 1772; WAN024DH7; Start 1324; Stop 1348
cttggttctagtggttctcgttatg

SEQ ID NO: 304690 - DNA, 25 bp, Artificial
  probe
  misc_feature (1)..(25): SEQ ID NO: 1772; WAN024DH7; Start 84; Stop 108
tcatcttcctgattattctcctcat

SEQ ID NO: 304691 - DNA, 25 bp, Artificial
  probe
  misc_feature (1)..(25): SEQ ID NO: 1772; WAN024DH7; Start 78; Stop 102
cgattgtcatcttcctgattattct

SEQ ID NO: 304692 - DNA, 25 bp, Artificial
  probe
  misc_feature (1)..(25): SEQ ID NO: 1772; WAN024DH7; Start 80; Stop 104
attgtcatcttcctgattattctcc

SEQ ID NO: 304693 - DNA, 25 bp, Artificial
  probe
  misc_feature (1)..(25): SEQ ID NO: 1772; WAN024DH7; Start 742; Stop 766
ttatggatacacagaagacacagcc

SEQ ID NO: 304694 - DNA, 25 bp, Artificial
  probe
  misc_feature (1)..(25): SEQ ID NO: 1772; WAN024DH7; Start 86; Stop 110
atcttcctgattattctcctcatgg

SEQ ID NO: 304695 - DNA, 25 bp, Artificial
  probe
  misc_feature (1)..(25): SEQ ID NO: 1772; WAN024DH7; Start 1323; Stop 1347
ccttggttctagtggttctcgttat

SEQ ID NO: 304696 - DNA, 25 bp, Artificial
  probe
  misc_feature (1)..(25): SEQ ID NO: 1772; WAN024DH7; Start 492; Stop 516
acttaaccaacgacgacaaggataa

SEQ ID NO: 304697 - DNA, 25 bp, Artificial
  probe
  misc_feature (1)..(25): SEQ ID NO: 1772; WAN024DH7; Start 704; Stop 728
aacacagctattacagacattcaca

SEQ ID NO: 304698 - DNA, 25 bp, Artificial
  probe
  misc_feature (1)..(25): SEQ ID NO: 1772; WAN024DH7; Start 1325; Stop 1349
ttggttctagtggttctcgttatgg

SEQ ID NO: 304699 - DNA, 25 bp, Artificial
  probe
  misc_feature (1)..(25): SEQ ID NO: 1772; WAN024DH7; Start 706; Stop 730
cacagctattacagacattcacact

SEQ ID NO: 304700 - DNA, 25 bp, Artificial
  probe
  misc_feature (1)..(25): SEQ ID NO: 1772; WAN024DH7; Start 85; Stop 109
catcttcctgattattctcctcatg

SEQ ID NO: 304701 - DNA, 25 bp, Artificial
  probe
  misc_feature (1)..(25): SEQ ID NO: 1772; WAN024DH7; Start 179; Stop 203
aatatcaccaatagcttctccatgc

SEQ ID NO: 304702 - DNA, 25 bp, Artificial
  probe
  misc_feature (1)..(25): SEQ ID NO: 1772; WAN024DH7; Start 1079; Stop 1103
accgaatctatcttgattgctatcc

SEQ ID NO: 304703 - DNA, 25 bp, Artificial
  probe
  misc_feature (1)..(25): SEQ ID NO: 1772; WAN024DH7; Start 1077; Stop 1101
tcaccgaatctatcttgattgctat

SEQ ID NO: 304704 - DNA, 25 bp, Artificial
  probe
  misc_feature (1)..(25): SEQ ID NO: 1772; WAN024DH7; Start 406; Stop 430
aagtagcttgatgattacaggtgtc

SEQ ID NO: 304705 - DNA, 25 bp, Artificial
  probe
  misc_feature (1)..(25): SEQ ID NO: 1772; WAN024DH7; Start 405; Stop 429
gaagtagcttgatgattacaggtgt

SEQ ID NO: 304706 - DNA, 25 bp, Artificial
  probe
  misc_feature (1)..(25): SEQ ID NO: 1772; WAN024DH7; Start 402; Stop 426
ttggaagtagcttgatgattacagg

SEQ ID NO: 304707 - DNA, 25 bp, Artificial
  probe
  misc_feature (1)..(25): SEQ ID NO: 1772; WAN024DH7; Start 800; Stop 824
gacaagaacttggatgatgttatga

SEQ ID NO: 304708 - DNA, 25 bp, Artificial
  probe
  misc_feature (1)..(25): SEQ ID NO: 1772; WAN024DH7; Start 799; Stop 823
agacaagaacttggatgatgttatg

SEQ ID NO: 304709 - DNA, 25 bp, Artificial
  probe
  misc_feature (1)..(25): SEQ ID NO: 1772; WAN024DH7; Start 798; Stop 822
cagacaagaacttggatgatgttat

SEQ ID NO: 304710 - DNA, 25 bp, Artificial
  probe
  misc_feature (1)..(25): SEQ ID NO: 1772; WAN024DH7; Start 1078; Stop 1102
caccgaatctatcttgattgctatc

SEQ ID NO: 304711 - DNA, 25 bp, Artificial
  probe
  misc_feature (1)..(25): SEQ ID NO: 1772; WAN024DH7; Start 1067; Stop 1091
ggtcaattcatcaccgaatctatct

SEQ ID NO: 304712 - DNA, 25 bp, Artificial
  probe
  misc_feature (1)..(25): SEQ ID NO: 1772; WAN024DH7; Start 825; Stop 849
aagagttgaatggcatcagtggtat

SEQ ID NO: 304713 - DNA, 25 bp, Artificial
  probe
  misc_feature (1)..(25): SEQ ID NO: 1772; WAN024DH7; Start 705; Stop 729
acacagctattacagacattcacac

SEQ ID NO: 304714 - DNA, 25 bp, Artificial
  probe
  misc_feature (1)..(25): SEQ ID NO: 1772; WAN024DH7; Start 364; Stop 388
aaccaagaagaatctcactgctgat

SEQ ID NO: 304715 - DNA, 25 bp, Artificial
  probe
  misc_feature (1)..(25): SEQ ID NO: 1772; WAN024DH7; Start 1070; Stop 1094
caattcatcaccgaatctatcttga

SEQ ID NO: 304716 - DNA, 25 bp, Artificial
  probe
  misc_feature (1)..(25): SEQ ID NO: 1773; WAN024GHQ; Start 347; Stop 371
tagaagcacaacatattgagcgaat

SEQ ID NO: 304717 - DNA, 25 bp, Artificial
  probe
  misc_feature (1)..(25): SEQ ID NO: 1773; WAN024GHQ; Start 346; Stop 370
atagaagcacaacatattgagcgaa

SEQ ID NO: 304718 - DNA, 25 bp, Artificial
  probe
  misc_feature (1)..(25): SEQ ID NO: 1773; WAN024GHQ; Start 345; Stop 369
aatagaagcacaacatattgagcga

SEQ ID NO: 304719 - DNA, 25 bp, Artificial
  probe
  misc_feature (1)..(25): SEQ ID NO: 1773; WAN024GHQ; Start 348; Stop 372
agaagcacaacatattgagcgaatt

SEQ ID NO: 304720 - DNA, 25 bp, Artificial
  probe
  misc_feature (1)..(25): SEQ ID NO: 1773; WAN024GHQ; Start 417; Stop 441
taccaatatcagaggtgagcaagaa

SEQ ID NO: 304721 - DNA, 25 bp, Artificial
  probe
  misc_feature (1)..(25): SEQ ID NO: 1773; WAN024GHQ; Start 682; Stop 706
ggtttaatggaaatctggaagcaag

SEQ ID NO: 304722 - DNA, 25 bp, Artificial
  probe
  misc_feature (1)..(25): SEQ ID NO: 1773; WAN024GHQ; Start 681; Stop 705
aggtttaatggaaatctggaagcaa

SEQ ID NO: 304723 - DNA, 25 bp, Artificial
  probe
  misc_feature (1)..(25): SEQ ID NO: 1773; WAN024GHQ; Start 698; Stop 722
ggaagcaagacttaaacatcattca

SEQ ID NO: 304724 - DNA, 25 bp, Artificial
  probe
  misc_feature (1)..(25): SEQ ID NO: 1773; WAN024GHQ; Start 697; Stop 721
tggaagcaagacttaaacatcattc

SEQ ID NO: 304725 - DNA, 25 bp, Artificial
  probe
  misc_feature (1)..(25): SEQ ID NO: 1773; WAN024GHQ; Start 696; Stop 720
ctggaagcaagacttaaacatcatt

SEQ ID NO: 304726 - DNA, 25 bp, Artificial
  probe
  misc_feature (1)..(25): SEQ ID NO: 1773; WAN024GHQ; Start 390; Stop 414
cgatatggctatattccctgaacta

SEQ ID NO: 304727 - DNA, 25 bp, Artificial
  probe
  misc_feature (1)..(25): SEQ ID NO: 1773; WAN024GHQ; Start 691; Stop 715
gaaatctggaagcaagacttaaaca

SEQ ID NO: 304728 - DNA, 25 bp, Artificial
  probe
  misc_feature (1)..(25): SEQ ID NO: 1773; WAN024GHQ; Start 690; Stop 714
ggaaatctggaagcaagacttaaac

SEQ ID NO: 304729 - DNA, 25 bp, Artificial
  probe
  misc_feature (1)..(25): SEQ ID NO: 1773; WAN024GHQ; Start 687; Stop 711
aatggaaatctggaagcaagactta

SEQ ID NO: 304730 - DNA, 25 bp, Artificial
  probe
  misc_feature (1)..(25): SEQ ID NO: 1773; WAN024GHQ; Start 686; Stop 710
taatggaaatctggaagcaagactt

SEQ ID NO: 304731 - DNA, 25 bp, Artificial
  probe
  misc_feature (1)..(25): SEQ ID NO: 1773; WAN024GHQ; Start 684; Stop 708
tttaatggaaatctggaagcaagac

SEQ ID NO: 304732 - DNA, 25 bp, Artificial
  probe
  misc_feature (1)..(25): SEQ ID NO: 1773; WAN024GHQ; Start 683; Stop 707
gtttaatggaaatctggaagcaaga

SEQ ID NO: 304733 - DNA, 25 bp, Artificial
  probe
  misc_feature (1)..(25): SEQ ID NO: 1773; WAN024GHQ; Start 695; Stop 719
tctggaagcaagacttaaacatcat

SEQ ID NO: 304734 - DNA, 25 bp, Artificial
  probe
  misc_feature (1)..(25): SEQ ID NO: 1773; WAN024GHQ; Start 694; Stop 718
atctggaagcaagacttaaacatca

SEQ ID NO: 304735 - DNA, 25 bp, Artificial
  probe
  misc_feature (1)..(25): SEQ ID NO: 1773; WAN024GHQ; Start 693; Stop 717
aatctggaagcaagacttaaacatc

SEQ ID NO: 304736 - DNA, 25 bp, Artificial
  probe
  misc_feature (1)..(25): SEQ ID NO: 1773; WAN024GHQ; Start 688; Stop 712
atggaaatctggaagcaagacttaa

SEQ ID NO: 304737 - DNA, 25 bp, Artificial
  probe
  misc_feature (1)..(25): SEQ ID NO: 1773; WAN024GHQ; Start 685; Stop 709
ttaatggaaatctggaagcaagact

SEQ ID NO: 304738 - DNA, 25 bp, Artificial
  probe
  misc_feature (1)..(25): SEQ ID NO: 1773; WAN024GHQ; Start 416; Stop 440
ctaccaatatcagaggtgagcaaga

SEQ ID NO: 304739 - DNA, 25 bp, Artificial
  probe
  misc_feature (1)..(25): SEQ ID NO: 1773; WAN024GHQ; Start 689; Stop 713
tggaaatctggaagcaagacttaaa

SEQ ID NO: 304740 - DNA, 25 bp, Artificial
  probe
  misc_feature (1)..(25): SEQ ID NO: 1773; WAN024GHQ; Start 344; Stop 368
aaatagaagcacaacatattgagcg

SEQ ID NO: 304741 - DNA, 25 bp, Artificial
  probe
  misc_feature (1)..(25): SEQ ID NO: 1773; WAN024GHQ; Start 692; Stop 716
aaatctggaagcaagacttaaacat

SEQ ID NO: 304742 - DNA, 25 bp, Artificial
  probe
  misc_feature (1)..(25): SEQ ID NO: 1773; WAN024GHQ; Start 637; Stop 661
aatataccagatatcattgccttgc

SEQ ID NO: 304743 - DNA, 25 bp, Artificial
  probe
  misc_feature (1)..(25): SEQ ID NO: 1773; WAN024GHQ; Start 844; Stop 868
tttgaaagaggaacttggaatagcc

SEQ ID NO: 304744 - DNA, 25 bp, Artificial
  probe
  misc_feature (1)..(25): SEQ ID NO: 1773; WAN024GHQ; Start 343; Stop 367
caaatagaagcacaacatattgagc

SEQ ID NO: 304745 - DNA, 25 bp, Artificial
  probe
  misc_feature (1)..(25): SEQ ID NO: 1773; WAN024GHQ; Start 349; Stop 373
gaagcacaacatattgagcgaattt

SEQ ID NO: 304746 - DNA, 25 bp, Artificial
  probe
  misc_feature (1)..(25): SEQ ID NO: 1773; WAN024GHQ; Start 320; Stop 344
tagtaacttggaacgtcgctaatca

SEQ ID NO: 304747 - DNA, 25 bp, Artificial
  probe
  misc_feature (1)..(25): SEQ ID NO: 1773; WAN024GHQ; Start 389; Stop 413
ccgatatggctatattccctgaact

SEQ ID NO: 304748 - DNA, 25 bp, Artificial
  probe
  misc_feature (1)..(25): SEQ ID NO: 1773; WAN024GHQ; Start 501; Stop 525
tttcacttctccacctaccaatagt

SEQ ID NO: 304749 - DNA, 25 bp, Artificial
  probe
  misc_feature (1)..(25): SEQ ID NO: 1774; WAN024GHE; Start 617; Stop 641
gttggcatattgagtgttcagtcat

SEQ ID NO: 304750 - DNA, 25 bp, Artificial
  probe
  misc_feature (1)..(25): SEQ ID NO: 1774; WAN024GHE; Start 896; Stop 920
actaccgtaagcctatcaacttcac

SEQ ID NO: 304751 - DNA, 25 bp, Artificial
  probe
  misc_feature (1)..(25): SEQ ID NO: 1774; WAN024GHE; Start 895; Stop 919
cactaccgtaagcctatcaacttca

SEQ ID NO: 304752 - DNA, 25 bp, Artificial
  probe
  misc_feature (1)..(25): SEQ ID NO: 1774; WAN024GHE; Start 618; Stop 642
ttggcatattgagtgttcagtcatg

SEQ ID NO: 304753 - DNA, 25 bp, Artificial
  probe
  misc_feature (1)..(25): SEQ ID NO: 1774; WAN024GHE; Start 969; Stop 993
tacttacgaacaaccatttacagga

SEQ ID NO: 304754 - DNA, 25 bp, Artificial
  probe
  misc_feature (1)..(25): SEQ ID NO: 1774; WAN024GHE; Start 971; Stop 995
cttacgaacaaccatttacaggaaa

SEQ ID NO: 304755 - DNA, 25 bp, Artificial
  probe
  misc_feature (1)..(25): SEQ ID NO: 1774; WAN024GHE; Start 1281; Stop 1305
attggttactcaaggaattaagctc

SEQ ID NO: 304756 - DNA, 25 bp, Artificial
  probe
  misc_feature (1)..(25): SEQ ID NO: 1774; WAN024GHE; Start 970; Stop 994
acttacgaacaaccatttacaggaa

SEQ ID NO: 304757 - DNA, 25 bp, Artificial
  probe
  misc_feature (1)..(25): SEQ ID NO: 1774; WAN024GHE; Start 1195; Stop 1219
gatgcagagattgaagacttgattc

SEQ ID NO: 304758 - DNA, 25 bp, Artificial
  probe
  misc_feature (1)..(25): SEQ ID NO: 1774; WAN024GHE; Start 968; Stop 992
atacttacgaacaaccatttacagg

SEQ ID NO: 304759 - DNA, 25 bp, Artificial
  probe
  misc_feature (1)..(25): SEQ ID NO: 1774; WAN024GHE; Start 1194; Stop 1218
ggatgcagagattgaagacttgatt

SEQ ID NO: 304760 - DNA, 25 bp, Artificial
  probe
  misc_feature (1)..(25): SEQ ID NO: 1774; WAN024GHE; Start 622; Stop 646
catattgagtgttcagtcatgtcga

SEQ ID NO: 304761 - DNA, 25 bp, Artificial
  probe
  misc_feature (1)..(25): SEQ ID NO: 1774; WAN024GHE; Start 620; Stop 644
ggcatattgagtgttcagtcatgtc

SEQ ID NO: 304762 - DNA, 25 bp, Artificial
  probe
  misc_feature (1)..(25): SEQ ID NO: 1774; WAN024GHE; Start 1168; Stop 1192
ggaattgtctttgttgaggaagttt

SEQ ID NO: 304763 - DNA, 25 bp, Artificial
  probe
  misc_feature (1)..(25): SEQ ID NO: 1774; WAN024GHE; Start 1165; Stop 1189
tttggaattgtctttgttgaggaag

SEQ ID NO: 304764 - DNA, 25 bp, Artificial
  probe
  misc_feature (1)..(25): SEQ ID NO: 1774; WAN024GHE; Start 820; Stop 844
ggtaacttcattacggtacacgatg

SEQ ID NO: 304765 - DNA, 25 bp, Artificial
  probe
  misc_feature (1)..(25): SEQ ID NO: 1774; WAN024GHE; Start 1167; Stop 1191
tggaattgtctttgttgaggaagtt

SEQ ID NO: 304766 - DNA, 25 bp, Artificial
  probe
  misc_feature (1)..(25): SEQ ID NO: 1774; WAN024GHE; Start 1166; Stop 1190
ttggaattgtctttgttgaggaagt

SEQ ID NO: 304767 - DNA, 25 bp, Artificial
  probe
  misc_feature (1)..(25): SEQ ID NO: 1774; WAN024GHE; Start 1072; Stop 1096
ggtatcacagttgtctttgaaatgg

SEQ ID NO: 304768 - DNA, 25 bp, Artificial
  probe
  misc_feature (1)..(25): SEQ ID NO: 1774; WAN024GHE; Start 621; Stop 645
gcatattgagtgttcagtcatgtcg

SEQ ID NO: 304769 - DNA, 25 bp, Artificial
  probe
  misc_feature (1)..(25): SEQ ID NO: 1774; WAN024GHE; Start 1280; Stop 1304
aattggttactcaaggaattaagct

SEQ ID NO: 304770 - DNA, 25 bp, Artificial
  probe
  misc_feature (1)..(25): SEQ ID NO: 1774; WAN024GHE; Start 1099; Stop 1123
aaatggatcaactcagggaactatg

SEQ ID NO: 304771 - DNA, 25 bp, Artificial
  probe
  misc_feature (1)..(25): SEQ ID NO: 1774; WAN024GHE; Start 1098; Stop 1122
caaatggatcaactcagggaactat

SEQ ID NO: 304772 - DNA, 25 bp, Artificial
  probe
  misc_feature (1)..(25): SEQ ID NO: 1774; WAN024GHE; Start 1071; Stop 1095
cggtatcacagttgtctttgaaatg

SEQ ID NO: 304773 - DNA, 25 bp, Artificial
  probe
  misc_feature (1)..(25): SEQ ID NO: 1774; WAN024GHE; Start 341; Stop 365
tagtggagtttatggcagacatcat

SEQ ID NO: 304774 - DNA, 25 bp, Artificial
  probe
  misc_feature (1)..(25): SEQ ID NO: 1774; WAN024GHE; Start 1282; Stop 1306
ttggttactcaaggaattaagctcc

SEQ ID NO: 304775 - DNA, 25 bp, Artificial
  probe
  misc_feature (1)..(25): SEQ ID NO: 1774; WAN024GHE; Start 1073; Stop 1097
gtatcacagttgtctttgaaatggc

SEQ ID NO: 304776 - DNA, 25 bp, Artificial
  probe
  misc_feature (1)..(25): SEQ ID NO: 1774; WAN024GHE; Start 1070; Stop 1094
acggtatcacagttgtctttgaaat

SEQ ID NO: 304777 - DNA, 25 bp, Artificial
  probe
  misc_feature (1)..(25): SEQ ID NO: 1774; WAN024GHE; Start 894; Stop 918
gcactaccgtaagcctatcaacttc

SEQ ID NO: 304778 - DNA, 25 bp, Artificial
  probe
  misc_feature (1)..(25): SEQ ID NO: 1774; WAN024GHE; Start 619; Stop 643
tggcatattgagtgttcagtcatgt

SEQ ID NO: 304779 - DNA, 25 bp, Artificial
  probe
  misc_feature (1)..(25): SEQ ID NO: 1774; WAN024GHE; Start 1069; Stop 1093
aacggtatcacagttgtctttgaaa

SEQ ID NO: 304780 - DNA, 25 bp, Artificial
  probe
  misc_feature (1)..(25): SEQ ID NO: 1774; WAN024GHE; Start 1193; Stop 1217
tggatgcagagattgaagacttgat

SEQ ID NO: 304781 - DNA, 25 bp, Artificial
  probe
  misc_feature (1)..(25): SEQ ID NO: 1774; WAN024GHE; Start 822; Stop 846
taacttcattacggtacacgatgcc

SEQ ID NO: 304782 - DNA, 25 bp, Artificial
  probe
  misc_feature (1)..(25): SEQ ID NO: 1775; WAN024BGV; Start 114; Stop 138
catggtgaaagatgtaaacgaagac

SEQ ID NO: 304783 - DNA, 25 bp, Artificial
  probe
  misc_feature (1)..(25): SEQ ID NO: 1775; WAN024BGV; Start 85; Stop 109
cgtggttatgatgttcactgtgatg

SEQ ID NO: 304784 - DNA, 25 bp, Artificial
  probe
  misc_feature (1)..(25): SEQ ID NO: 1775; WAN024BGV; Start 113; Stop 137
tcatggtgaaagatgtaaacgaaga

SEQ ID NO: 304785 - DNA, 25 bp, Artificial
  probe
  misc_feature (1)..(25): SEQ ID NO: 1775; WAN024BGV; Start 112; Stop 136
gtcatggtgaaagatgtaaacgaag

SEQ ID NO: 304786 - DNA, 25 bp, Artificial
  probe
  misc_feature (1)..(25): SEQ ID NO: 1775; WAN024BGV; Start 111; Stop 135
agtcatggtgaaagatgtaaacgaa

SEQ ID NO: 304787 - DNA, 25 bp, Artificial
  probe
  misc_feature (1)..(25): SEQ ID NO: 1775; WAN024BGV; Start 70; Stop 94
gaagaactttcaaaccgtggttatg

SEQ ID NO: 304788 - DNA, 25 bp, Artificial
  probe
  misc_feature (1)..(25): SEQ ID NO: 1775; WAN024BGV; Start 69; Stop 93
agaagaactttcaaaccgtggttat

SEQ ID NO: 304789 - DNA, 25 bp, Artificial
  probe
  misc_feature (1)..(25): SEQ ID NO: 1775; WAN024BGV; Start 86; Stop 110
gtggttatgatgttcactgtgatgc

SEQ ID NO: 304790 - DNA, 25 bp, Artificial
  probe
  misc_feature (1)..(25): SEQ ID NO: 1775; WAN024BGV; Start 110; Stop 134
cagtcatggtgaaagatgtaaacga

SEQ ID NO: 304791 - DNA, 25 bp, Artificial
  probe
  misc_feature (1)..(25): SEQ ID NO: 1775; WAN024BGV; Start 76; Stop 100
ctttcaaaccgtggttatgatgttc

SEQ ID NO: 304792 - DNA, 25 bp, Artificial
  probe
  misc_feature (1)..(25): SEQ ID NO: 1775; WAN024BGV; Start 73; Stop 97
gaactttcaaaccgtggttatgatg

SEQ ID NO: 304793 - DNA, 25 bp, Artificial
  probe
  misc_feature (1)..(25): SEQ ID NO: 1775; WAN024BGV; Start 72; Stop 96
agaactttcaaaccgtggttatgat

SEQ ID NO: 304794 - DNA, 25 bp, Artificial
  probe
  misc_feature (1)..(25): SEQ ID NO: 1775; WAN024BGV; Start 71; Stop 95
aagaactttcaaaccgtggttatga

SEQ ID NO: 304795 - DNA, 25 bp, Artificial
  probe
  misc_feature (1)..(25): SEQ ID NO: 1775; WAN024BGV; Start 88; Stop 112
ggttatgatgttcactgtgatgcag

SEQ ID NO: 304796 - DNA, 25 bp, Artificial
  probe
  misc_feature (1)..(25): SEQ ID NO: 1775; WAN024BGV; Start 77; Stop 101
tttcaaaccgtggttatgatgttca

SEQ ID NO: 304797 - DNA, 25 bp, Artificial
  probe
  misc_feature (1)..(25): SEQ ID NO: 1775; WAN024BGV; Start 75; Stop 99
actttcaaaccgtggttatgatgtt

SEQ ID NO: 304798 - DNA, 25 bp, Artificial
  probe
  misc_feature (1)..(25): SEQ ID NO: 1775; WAN024BGV; Start 74; Stop 98
aactttcaaaccgtggttatgatgt

SEQ ID NO: 304799 - DNA, 25 bp, Artificial
  probe
  misc_feature (1)..(25): SEQ ID NO: 1775; WAN024BGV; Start 87; Stop 111
tggttatgatgttcactgtgatgca

SEQ ID NO: 304800 - DNA, 25 bp, Artificial
  probe
  misc_feature (1)..(25): SEQ ID NO: 1775; WAN024BGV; Start 84; Stop 108
ccgtggttatgatgttcactgtgat

SEQ ID NO: 304801 - DNA, 25 bp, Artificial
  probe
  misc_feature (1)..(25): SEQ ID NO: 1775; WAN024BGV; Start 107; Stop 131
atgcagtcatggtgaaagatgtaaa

SEQ ID NO: 304802 - DNA, 25 bp, Artificial
  probe
  misc_feature (1)..(25): SEQ ID NO: 1775; WAN024BGV; Start 106; Stop 130
gatgcagtcatggtgaaagatgtaa

SEQ ID NO: 304803 - DNA, 25 bp, Artificial
  probe
  misc_feature (1)..(25): SEQ ID NO: 1775; WAN024BGV; Start 155; Stop 179
atatctttacaccaatcgctgcaac

SEQ ID NO: 304804 - DNA, 25 bp, Artificial
  probe
  misc_feature (1)..(25): SEQ ID NO: 1775; WAN024BGV; Start 154; Stop 178
gatatctttacaccaatcgctgcaa

SEQ ID NO: 304805 - DNA, 25 bp, Artificial
  probe
  misc_feature (1)..(25): SEQ ID NO: 1775; WAN024BGV; Start 78; Stop 102
ttcaaaccgtggttatgatgttcac

SEQ ID NO: 304806 - DNA, 25 bp, Artificial
  probe
  misc_feature (1)..(25): SEQ ID NO: 1775; WAN024BGV; Start 109; Stop 133
gcagtcatggtgaaagatgtaaacg

SEQ ID NO: 304807 - DNA, 25 bp, Artificial
  probe
  misc_feature (1)..(25): SEQ ID NO: 1775; WAN024BGV; Start 108; Stop 132
tgcagtcatggtgaaagatgtaaac

SEQ ID NO: 304808 - DNA, 25 bp, Artificial
  probe
  misc_feature (1)..(25): SEQ ID NO: 1775; WAN024BGV; Start 82; Stop 106
aaccgtggttatgatgttcactgtg

SEQ ID NO: 304809 - DNA, 25 bp, Artificial
  probe
  misc_feature (1)..(25): SEQ ID NO: 1775; WAN024BGV; Start 105; Stop 129
tgatgcagtcatggtgaaagatgta

SEQ ID NO: 304810 - DNA, 25 bp, Artificial
  probe
  misc_feature (1)..(25): SEQ ID NO: 1775; WAN024BGV; Start 80; Stop 104
caaaccgtggttatgatgttcactg

SEQ ID NO: 304811 - DNA, 25 bp, Artificial
  probe
  misc_feature (1)..(25): SEQ ID NO: 1775; WAN024BGV; Start 79; Stop 103
tcaaaccgtggttatgatgttcact

SEQ ID NO: 304812 - DNA, 25 bp, Artificial
  probe
  misc_feature (1)..(25): SEQ ID NO: 1775; WAN024BGV; Start 156; Stop 180
tatctttacaccaatcgctgcaaca

SEQ ID NO: 304813 - DNA, 25 bp, Artificial
  probe
  misc_feature (1)..(25): SEQ ID NO: 1775; WAN024BGV; Start 81; Stop 105
aaaccgtggttatgatgttcactgt

SEQ ID NO: 304814 - DNA, 25 bp, Artificial
  probe
  misc_feature (1)..(25): SEQ ID NO: 1775; WAN024BGV; Start 83; Stop 107
accgtggttatgatgttcactgtga

SEQ ID NO: 304815 - DNA, 25 bp, Artificial
  probe
  misc_feature (1)..(25): SEQ ID NO: 1776; WAN024DSZ; Start 223; Stop 247
agtgtcaatgaagttctcaatctga

SEQ ID NO: 304816 - DNA, 25 bp, Artificial
  probe
  misc_feature (1)..(25): SEQ ID NO: 1776; WAN024DSZ; Start 224; Stop 248
gtgtcaatgaagttctcaatctgat

SEQ ID NO: 304817 - DNA, 25 bp, Artificial
  probe
  misc_feature (1)..(25): SEQ ID NO: 1776; WAN024DSZ; Start 222; Stop 246
gagtgtcaatgaagttctcaatctg

SEQ ID NO: 304818 - DNA, 25 bp, Artificial
  probe
  misc_feature (1)..(25): SEQ ID NO: 1776; WAN024DSZ; Start 307; Stop 331
gttggctacaaggaagacgatattc

SEQ ID NO: 304819 - DNA, 25 bp, Artificial
  probe
  misc_feature (1)..(25): SEQ ID NO: 1776; WAN024DSZ; Start 106; Stop 130
ggaattacgagagaagaattactgg

SEQ ID NO: 304820 - DNA, 25 bp, Artificial
  probe
  misc_feature (1)..(25): SEQ ID NO: 1776; WAN024DSZ; Start 225; Stop 249
tgtcaatgaagttctcaatctgatt

SEQ ID NO: 304821 - DNA, 25 bp, Artificial
  probe
  misc_feature (1)..(25): SEQ ID NO: 1776; WAN024DSZ; Start 306; Stop 330
agttggctacaaggaagacgatatt

SEQ ID NO: 304822 - DNA, 25 bp, Artificial
  probe
  misc_feature (1)..(25): SEQ ID NO: 1776; WAN024DSZ; Start 305; Stop 329
aagttggctacaaggaagacgatat

SEQ ID NO: 304823 - DNA, 25 bp, Artificial
  probe
  misc_feature (1)..(25): SEQ ID NO: 1776; WAN024DSZ; Start 107; Stop 131
gaattacgagagaagaattactgga

SEQ ID NO: 304824 - DNA, 25 bp, Artificial
  probe
  misc_feature (1)..(25): SEQ ID NO: 1776; WAN024DSZ; Start 105; Stop 129
aggaattacgagagaagaattactg

SEQ ID NO: 304825 - DNA, 25 bp, Artificial
  probe
  misc_feature (1)..(25): SEQ ID NO: 1776; WAN024DSZ; Start 101; Stop 125
aagaaggaattacgagagaagaatt

SEQ ID NO: 304826 - DNA, 25 bp, Artificial
  probe
  misc_feature (1)..(25): SEQ ID NO: 1776; WAN024DSZ; Start 231; Stop 255
tgaagttctcaatctgattatggaa

SEQ ID NO: 304827 - DNA, 25 bp, Artificial
  probe
  misc_feature (1)..(25): SEQ ID NO: 1776; WAN024DSZ; Start 304; Stop 328
caagttggctacaaggaagacgata

SEQ ID NO: 304828 - DNA, 25 bp, Artificial
  probe
  misc_feature (1)..(25): SEQ ID NO: 1776; WAN024DSZ; Start 201; Stop 225
tggagtggatattgaagatttgagt

SEQ ID NO: 304829 - DNA, 25 bp, Artificial
  probe
  misc_feature (1)..(25): SEQ ID NO: 1776; WAN024DSZ; Start 202; Stop 226
ggagtggatattgaagatttgagtg

SEQ ID NO: 304830 - DNA, 25 bp, Artificial
  probe
  misc_feature (1)..(25): SEQ ID NO: 1776; WAN024DSZ; Start 58; Stop 82
ctcaatgcccaccagttaagttata

SEQ ID NO: 304831 - DNA, 25 bp, Artificial
  probe
  misc_feature (1)..(25): SEQ ID NO: 1776; WAN024DSZ; Start 230; Stop 254
atgaagttctcaatctgattatgga

SEQ ID NO: 304832 - DNA, 25 bp, Artificial
  probe
  misc_feature (1)..(25): SEQ ID NO: 1776; WAN024DSZ; Start 244; Stop 268
ctgattatggaaacaccgagaattt

SEQ ID NO: 304833 - DNA, 25 bp, Artificial
  probe
  misc_feature (1)..(25): SEQ ID NO: 1776; WAN024DSZ; Start 198; Stop 222
ccttggagtggatattgaagatttg

SEQ ID NO: 304834 - DNA, 25 bp, Artificial
  probe
  misc_feature (1)..(25): SEQ ID NO: 1776; WAN024DSZ; Start 144; Stop 168
aacagataacggaatagccagcatc

SEQ ID NO: 304835 - DNA, 25 bp, Artificial
  probe
  misc_feature (1)..(25): SEQ ID NO: 1776; WAN024DSZ; Start 197; Stop 221
cccttggagtggatattgaagattt

SEQ ID NO: 304836 - DNA, 25 bp, Artificial
  probe
  misc_feature (1)..(25): SEQ ID NO: 1776; WAN024DSZ; Start 242; Stop 266
atctgattatggaaacaccgagaat

SEQ ID NO: 304837 - DNA, 25 bp, Artificial
  probe
  misc_feature (1)..(25): SEQ ID NO: 1776; WAN024DSZ; Start 108; Stop 132
aattacgagagaagaattactggat

SEQ ID NO: 304838 - DNA, 25 bp, Artificial
  probe
  misc_feature (1)..(25): SEQ ID NO: 1776; WAN024DSZ; Start 204; Stop 228
agtggatattgaagatttgagtgtc

SEQ ID NO: 304839 - DNA, 25 bp, Artificial
  probe
  misc_feature (1)..(25): SEQ ID NO: 1776; WAN024DSZ; Start 203; Stop 227
gagtggatattgaagatttgagtgt

SEQ ID NO: 304840 - DNA, 25 bp, Artificial
  probe
  misc_feature (1)..(25): SEQ ID NO: 1776; WAN024DSZ; Start 200; Stop 224
ttggagtggatattgaagatttgag

SEQ ID NO: 304841 - DNA, 25 bp, Artificial
  probe
  misc_feature (1)..(25): SEQ ID NO: 1776; WAN024DSZ; Start 243; Stop 267
tctgattatggaaacaccgagaatt

SEQ ID NO: 304842 - DNA, 25 bp, Artificial
  probe
  misc_feature (1)..(25): SEQ ID NO: 1776; WAN024DSZ; Start 104; Stop 128
aaggaattacgagagaagaattact

SEQ ID NO: 304843 - DNA, 25 bp, Artificial
  probe
  misc_feature (1)..(25): SEQ ID NO: 1776; WAN024DSZ; Start 268; Stop 292
ttaaagagcccaatccttgtagatg

SEQ ID NO: 304844 - DNA, 25 bp, Artificial
  probe
  misc_feature (1)..(25): SEQ ID NO: 1776; WAN024DSZ; Start 199; Stop 223
cttggagtggatattgaagatttga

SEQ ID NO: 304845 - DNA, 25 bp, Artificial
  probe
  misc_feature (1)..(25): SEQ ID NO: 1776; WAN024DSZ; Start 241; Stop 265
aatctgattatggaaacaccgagaa

SEQ ID NO: 304846 - DNA, 25 bp, Artificial
  probe
  misc_feature (1)..(25): SEQ ID NO: 1776; WAN024DSZ; Start 103; Stop 127
gaaggaattacgagagaagaattac

SEQ ID NO: 304847 - DNA, 25 bp, Artificial
  probe
  misc_feature (1)..(25): SEQ ID NO: 1776; WAN024DSZ; Start 102; Stop 126
agaaggaattacgagagaagaatta

SEQ ID NO: 304848 - DNA, 25 bp, Artificial
  probe
  misc_feature (1)..(25): SEQ ID NO: 1777; WAN024G9F; Start 626; Stop 650
agattgattcctcagagattatggc

SEQ ID NO: 304849 - DNA, 25 bp, Artificial
  probe
  misc_feature (1)..(25): SEQ ID NO: 1777; WAN024G9F; Start 276; Stop 300
cgaatacctctatgaccttgctgaa

SEQ ID NO: 304850 - DNA, 25 bp, Artificial
  probe
  misc_feature (1)..(25): SEQ ID NO: 1777; WAN024G9F; Start 625; Stop 649
aagattgattcctcagagattatgg

SEQ ID NO: 304851 - DNA, 25 bp, Artificial
  probe
  misc_feature (1)..(25): SEQ ID NO: 1777; WAN024G9F; Start 271; Stop 295
gacatcgaatacctctatgaccttg

SEQ ID NO: 304852 - DNA, 25 bp, Artificial
  probe
  misc_feature (1)..(25): SEQ ID NO: 1777; WAN024G9F; Start 270; Stop 294
tgacatcgaatacctctatgacctt

SEQ ID NO: 304853 - DNA, 25 bp, Artificial
  probe
  misc_feature (1)..(25): SEQ ID NO: 1777; WAN024G9F; Start 277; Stop 301
gaatacctctatgaccttgctgaaa

SEQ ID NO: 304854 - DNA, 25 bp, Artificial
  probe
  misc_feature (1)..(25): SEQ ID NO: 1777; WAN024G9F; Start 269; Stop 293
ctgacatcgaatacctctatgacct

SEQ ID NO: 304855 - DNA, 25 bp, Artificial
  probe
  misc_feature (1)..(25): SEQ ID NO: 1777; WAN024G9F; Start 622; Stop 646
ttgaagattgattcctcagagatta

SEQ ID NO: 304856 - DNA, 25 bp, Artificial
  probe
  misc_feature (1)..(25): SEQ ID NO: 1777; WAN024G9F; Start 623; Stop 647
tgaagattgattcctcagagattat

SEQ ID NO: 304857 - DNA, 25 bp, Artificial
  probe
  misc_feature (1)..(25): SEQ ID NO: 1777; WAN024G9F; Start 267; Stop 291
agctgacatcgaatacctctatgac

SEQ ID NO: 304858 - DNA, 25 bp, Artificial
  probe
  misc_feature (1)..(25): SEQ ID NO: 1777; WAN024G9F; Start 274; Stop 298
atcgaatacctctatgaccttgctg

SEQ ID NO: 304859 - DNA, 25 bp, Artificial
  probe
  misc_feature (1)..(25): SEQ ID NO: 1777; WAN024G9F; Start 624; Stop 648
gaagattgattcctcagagattatg

SEQ ID NO: 304860 - DNA, 25 bp, Artificial
  probe
  misc_feature (1)..(25): SEQ ID NO: 1777; WAN024G9F; Start 273; Stop 297
catcgaatacctctatgaccttgct

SEQ ID NO: 304861 - DNA, 25 bp, Artificial
  probe
  misc_feature (1)..(25): SEQ ID NO: 1777; WAN024G9F; Start 5; Stop 29
ttaaactactagccttggatatgga

SEQ ID NO: 304862 - DNA, 25 bp, Artificial
  probe
  misc_feature (1)..(25): SEQ ID NO: 1777; WAN024G9F; Start 272; Stop 296
acatcgaatacctctatgaccttgc

SEQ ID NO: 304863 - DNA, 25 bp, Artificial
  probe
  misc_feature (1)..(25): SEQ ID NO: 1777; WAN024G9F; Start 827; Stop 851
gacagaagttactgctatttgcttt

SEQ ID NO: 304864 - DNA, 25 bp, Artificial
  probe
  misc_feature (1)..(25): SEQ ID NO: 1777; WAN024G9F; Start 825; Stop 849
tagacagaagttactgctatttgct

SEQ ID NO: 304865 - DNA, 25 bp, Artificial
  probe
  misc_feature (1)..(25): SEQ ID NO: 1777; WAN024G9F; Start 100; Stop 124
aaaggtgtcaaactggttctctgta

SEQ ID NO: 304866 - DNA, 25 bp, Artificial
  probe
  misc_feature (1)..(25): SEQ ID NO: 1777; WAN024G9F; Start 826; Stop 850
agacagaagttactgctatttgctt

SEQ ID NO: 304867 - DNA, 25 bp, Artificial
  probe
  misc_feature (1)..(25): SEQ ID NO: 1777; WAN024G9F; Start 824; Stop 848
atagacagaagttactgctatttgc

SEQ ID NO: 304868 - DNA, 25 bp, Artificial
  probe
  misc_feature (1)..(25): SEQ ID NO: 1777; WAN024G9F; Start 621; Stop 645
tttgaagattgattcctcagagatt

SEQ ID NO: 304869 - DNA, 25 bp, Artificial
  probe
  misc_feature (1)..(25): SEQ ID NO: 1777; WAN024G9F; Start 268; Stop 292
gctgacatcgaatacctctatgacc

SEQ ID NO: 304870 - DNA, 25 bp, Artificial
  probe
  misc_feature (1)..(25): SEQ ID NO: 1777; WAN024G9F; Start 4; Stop 28
attaaactactagccttggatatgg

SEQ ID NO: 304871 - DNA, 25 bp, Artificial
  probe
  misc_feature (1)..(25): SEQ ID NO: 1777; WAN024G9F; Start 275; Stop 299
tcgaatacctctatgaccttgctga

SEQ ID NO: 304872 - DNA, 25 bp, Artificial
  probe
  misc_feature (1)..(25): SEQ ID NO: 1777; WAN024G9F; Start 627; Stop 651
gattgattcctcagagattatggcc

SEQ ID NO: 304873 - DNA, 25 bp, Artificial
  probe
  misc_feature (1)..(25): SEQ ID NO: 1777; WAN024G9F; Start 101; Stop 125
aaggtgtcaaactggttctctgtac

SEQ ID NO: 304874 - DNA, 25 bp, Artificial
  probe
  misc_feature (1)..(25): SEQ ID NO: 1777; WAN024G9F; Start 751; Stop 775
gttacctcaagcaacgaagaagacg

SEQ ID NO: 304875 - DNA, 25 bp, Artificial
  probe
  misc_feature (1)..(25): SEQ ID NO: 1777; WAN024G9F; Start 2; Stop 26
tgattaaactactagccttggatat

SEQ ID NO: 304876 - DNA, 25 bp, Artificial
  probe
  misc_feature (1)..(25): SEQ ID NO: 1777; WAN024G9F; Start 1; Stop 25
atgattaaactactagccttggata

SEQ ID NO: 304877 - DNA, 25 bp, Artificial
  probe
  misc_feature (1)..(25): SEQ ID NO: 1777; WAN024G9F; Start 469; Stop 493
ttaggaacaaaagaacaaacagacg

SEQ ID NO: 304878 - DNA, 25 bp, Artificial
  probe
  misc_feature (1)..(25): SEQ ID NO: 1777; WAN024G9F; Start 278; Stop 302
aatacctctatgaccttgctgaaaa

SEQ ID NO: 304879 - DNA, 25 bp, Artificial
  probe
  misc_feature (1)..(25): SEQ ID NO: 1777; WAN024G9F; Start 3; Stop 27
gattaaactactagccttggatatg

SEQ ID NO: 304880 - DNA, 25 bp, Artificial
  probe
  misc_feature (1)..(25): SEQ ID NO: 1777; WAN024G9F; Start 472; Stop 496
ggaacaaaagaacaaacagacgatt

SEQ ID NO: 304881 - DNA, 25 bp, Artificial
  probe
  misc_feature (1)..(25): SEQ ID NO: 1778; WAN024DMN; Start 121; Stop 145
ttgattagtagagaagaaggactgg

SEQ ID NO: 304882 - DNA, 25 bp, Artificial
  probe
  misc_feature (1)..(25): SEQ ID NO: 1778; WAN024DMN; Start 8; Stop 32
aagaattgtatgaagaagtccaagg

SEQ ID NO: 304883 - DNA, 25 bp, Artificial
  probe
  misc_feature (1)..(25): SEQ ID NO: 1778; WAN024DMN; Start 271; Stop 295
gagatcagtcatcgtataagtgagg

SEQ ID NO: 304884 - DNA, 25 bp, Artificial
  probe
  misc_feature (1)..(25): SEQ ID NO: 1778; WAN024DMN; Start 427; Stop 451
gtattaagagacttacgcattgtgt

SEQ ID NO: 304885 - DNA, 25 bp, Artificial
  probe
  misc_feature (1)..(25): SEQ ID NO: 1778; WAN024DMN; Start 426; Stop 450
agtattaagagacttacgcattgtg

SEQ ID NO: 304886 - DNA, 25 bp, Artificial
  probe
  misc_feature (1)..(25): SEQ ID NO: 1778; WAN024DMN; Start 425; Stop 449
gagtattaagagacttacgcattgt

SEQ ID NO: 304887 - DNA, 25 bp, Artificial
  probe
  misc_feature (1)..(25): SEQ ID NO: 1778; WAN024DMN; Start 298; Stop 322
ggtctctggctagatgattattatc

SEQ ID NO: 304888 - DNA, 25 bp, Artificial
  probe
  misc_feature (1)..(25): SEQ ID NO: 1778; WAN024DMN; Start 428; Stop 452
tattaagagacttacgcattgtgtt

SEQ ID NO: 304889 - DNA, 25 bp, Artificial
  probe
  misc_feature (1)..(25): SEQ ID NO: 1778; WAN024DMN; Start 424; Stop 448
agagtattaagagacttacgcattg

SEQ ID NO: 304890 - DNA, 25 bp, Artificial
  probe
  misc_feature (1)..(25): SEQ ID NO: 1778; WAN024DMN; Start 120; Stop 144
attgattagtagagaagaaggactg

SEQ ID NO: 304891 - DNA, 25 bp, Artificial
  probe
  misc_feature (1)..(25): SEQ ID NO: 1778; WAN024DMN; Start 242; Stop 266
acgataaagaaccctatgaagaagt

SEQ ID NO: 304892 - DNA, 25 bp, Artificial
  probe
  misc_feature (1)..(25): SEQ ID NO: 1778; WAN024DMN; Start 440; Stop 464
tacgcattgtgtttaaggagtttac

SEQ ID NO: 304893 - DNA, 25 bp, Artificial
  probe
  misc_feature (1)..(25): SEQ ID NO: 1778; WAN024DMN; Start 243; Stop 267
cgataaagaaccctatgaagaagtg

SEQ ID NO: 304894 - DNA, 25 bp, Artificial
  probe
  misc_feature (1)..(25): SEQ ID NO: 1778; WAN024DMN; Start 442; Stop 466
cgcattgtgtttaaggagtttacta

SEQ ID NO: 304895 - DNA, 25 bp, Artificial
  probe
  misc_feature (1)..(25): SEQ ID NO: 1778; WAN024DMN; Start 439; Stop 463
ttacgcattgtgtttaaggagttta

SEQ ID NO: 304896 - DNA, 25 bp, Artificial
  probe
  misc_feature (1)..(25): SEQ ID NO: 1778; WAN024DMN; Start 244; Stop 268
gataaagaaccctatgaagaagtgg

SEQ ID NO: 304897 - DNA, 25 bp, Artificial
  probe
  misc_feature (1)..(25): SEQ ID NO: 1778; WAN024DMN; Start 423; Stop 447
aagagtattaagagacttacgcatt

SEQ ID NO: 304898 - DNA, 25 bp, Artificial
  probe
  misc_feature (1)..(25): SEQ ID NO: 1778; WAN024DMN; Start 441; Stop 465
acgcattgtgtttaaggagtttact

SEQ ID NO: 304899 - DNA, 25 bp, Artificial
  probe
  misc_feature (1)..(25): SEQ ID NO: 1778; WAN024DMN; Start 9; Stop 33
agaattgtatgaagaagtccaaggg

SEQ ID NO: 304900 - DNA, 25 bp, Artificial
  probe
  misc_feature (1)..(25): SEQ ID NO: 1778; WAN024DMN; Start 117; Stop 141
tgaattgattagtagagaagaagga

SEQ ID NO: 304901 - DNA, 25 bp, Artificial
  probe
  misc_feature (1)..(25): SEQ ID NO: 1778; WAN024DMN; Start 366; Stop 390
agagaaacaagaagaactagaacgc

SEQ ID NO: 304902 - DNA, 25 bp, Artificial
  probe
  misc_feature (1)..(25): SEQ ID NO: 1778; WAN024DMN; Start 365; Stop 389
aagagaaacaagaagaactagaacg

SEQ ID NO: 304903 - DNA, 25 bp, Artificial
  probe
  misc_feature (1)..(25): SEQ ID NO: 1778; WAN024DMN; Start 118; Stop 142
gaattgattagtagagaagaaggac

SEQ ID NO: 304904 - DNA, 25 bp, Artificial
  probe
  misc_feature (1)..(25): SEQ ID NO: 1778; WAN024DMN; Start 413; Stop 437
gagggcgtcaaagagtattaagaga

SEQ ID NO: 304905 - DNA, 25 bp, Artificial
  probe
  misc_feature (1)..(25): SEQ ID NO: 1778; WAN024DMN; Start 432; Stop 456
aagagacttacgcattgtgtttaag

SEQ ID NO: 304906 - DNA, 25 bp, Artificial
  probe
  misc_feature (1)..(25): SEQ ID NO: 1778; WAN024DMN; Start 438; Stop 462
cttacgcattgtgtttaaggagttt

SEQ ID NO: 304907 - DNA, 25 bp, Artificial
  probe
  misc_feature (1)..(25): SEQ ID NO: 1778; WAN024DMN; Start 119; Stop 143
aattgattagtagagaagaaggact

SEQ ID NO: 304908 - DNA, 25 bp, Artificial
  probe
  misc_feature (1)..(25): SEQ ID NO: 1778; WAN024DMN; Start 241; Stop 265
tacgataaagaaccctatgaagaag

SEQ ID NO: 304909 - DNA, 25 bp, Artificial
  probe
  misc_feature (1)..(25): SEQ ID NO: 1778; WAN024DMN; Start 416; Stop 440
ggcgtcaaagagtattaagagactt

SEQ ID NO: 304910 - DNA, 25 bp, Artificial
  probe
  misc_feature (1)..(25): SEQ ID NO: 1778; WAN024DMN; Start 429; Stop 453
attaagagacttacgcattgtgttt

SEQ ID NO: 304911 - DNA, 25 bp, Artificial
  probe
  misc_feature (1)..(25): SEQ ID NO: 1778; WAN024DMN; Start 239; Stop 263
gatacgataaagaaccctatgaaga

SEQ ID NO: 304912 - DNA, 25 bp, Artificial
  probe
  misc_feature (1)..(25): SEQ ID NO: 1778; WAN024DMN; Start 238; Stop 262
agatacgataaagaaccctatgaag

SEQ ID NO: 304913 - DNA, 25 bp, Artificial
  probe
  misc_feature (1)..(25): SEQ ID NO: 1778; WAN024DMN; Start 437; Stop 461
acttacgcattgtgtttaaggagtt

SEQ ID NO: 304914 - DNA, 25 bp, Artificial
  probe
  misc_feature (1)..(25): SEQ ID NO: 1779; WAN024FVB; Start 328; Stop 352
aatgctgttcaagaatatgatgtcg

SEQ ID NO: 304915 - DNA, 25 bp, Artificial
  probe
  misc_feature (1)..(25): SEQ ID NO: 1779; WAN024FVB; Start 331; Stop 355
gctgttcaagaatatgatgtcgaag

SEQ ID NO: 304916 - DNA, 25 bp, Artificial
  probe
  misc_feature (1)..(25): SEQ ID NO: 1779; WAN024FVB; Start 329; Stop 353
atgctgttcaagaatatgatgtcga

SEQ ID NO: 304917 - DNA, 25 bp, Artificial
  probe
  misc_feature (1)..(25): SEQ ID NO: 1779; WAN024FVB; Start 327; Stop 351
taatgctgttcaagaatatgatgtc

SEQ ID NO: 304918 - DNA, 25 bp, Artificial
  probe
  misc_feature (1)..(25): SEQ ID NO: 1779; WAN024FVB; Start 332; Stop 356
ctgttcaagaatatgatgtcgaagt

SEQ ID NO: 304919 - DNA, 25 bp, Artificial
  probe
  misc_feature (1)..(25): SEQ ID NO: 1779; WAN024FVB; Start 330; Stop 354
tgctgttcaagaatatgatgtcgaa

SEQ ID NO: 304920 - DNA, 25 bp, Artificial
  probe
  misc_feature (1)..(25): SEQ ID NO: 1779; WAN024FVB; Start 9; Stop 33
agatatgtcctgtccagaaattagc

SEQ ID NO: 304921 - DNA, 25 bp, Artificial
  probe
  misc_feature (1)..(25): SEQ ID NO: 1779; WAN024FVB; Start 359; Stop 383
tatacagtgcgggatattatcgttc

SEQ ID NO: 304922 - DNA, 25 bp, Artificial
  probe
  misc_feature (1)..(25): SEQ ID NO: 1779; WAN024FVB; Start 335; Stop 359
ttcaagaatatgatgtcgaagttgt

SEQ ID NO: 304923 - DNA, 25 bp, Artificial
  probe
  misc_feature (1)..(25): SEQ ID NO: 1779; WAN024FVB; Start 333; Stop 357
tgttcaagaatatgatgtcgaagtt

SEQ ID NO: 304924 - DNA, 25 bp, Artificial
  probe
  misc_feature (1)..(25): SEQ ID NO: 1779; WAN024FVB; Start 2; Stop 26
tgattaaagatatgtcctgtccaga

SEQ ID NO: 304925 - DNA, 25 bp, Artificial
  probe
  misc_feature (1)..(25): SEQ ID NO: 1779; WAN024FVB; Start 334; Stop 358
gttcaagaatatgatgtcgaagttg

SEQ ID NO: 304926 - DNA, 25 bp, Artificial
  probe
  misc_feature (1)..(25): SEQ ID NO: 1779; WAN024FVB; Start 12; Stop 36
tatgtcctgtccagaaattagcgta

SEQ ID NO: 304927 - DNA, 25 bp, Artificial
  probe
  misc_feature (1)..(25): SEQ ID NO: 1779; WAN024FVB; Start 10; Stop 34
gatatgtcctgtccagaaattagcg

SEQ ID NO: 304928 - DNA, 25 bp, Artificial
  probe
  misc_feature (1)..(25): SEQ ID NO: 1779; WAN024FVB; Start 124; Stop 148
ttagtaaacgatggatcaacggatt

SEQ ID NO: 304929 - DNA, 25 bp, Artificial
  probe
  misc_feature (1)..(25): SEQ ID NO: 1779; WAN024FVB; Start 123; Stop 147
tttagtaaacgatggatcaacggat

SEQ ID NO: 304930 - DNA, 25 bp, Artificial
  probe
  misc_feature (1)..(25): SEQ ID NO: 1779; WAN024FVB; Start 125; Stop 149
tagtaaacgatggatcaacggattc

SEQ ID NO: 304931 - DNA, 25 bp, Artificial
  probe
  misc_feature (1)..(25): SEQ ID NO: 1779; WAN024FVB; Start 336; Stop 360
tcaagaatatgatgtcgaagttgta

SEQ ID NO: 304932 - DNA, 25 bp, Artificial
  probe
  misc_feature (1)..(25): SEQ ID NO: 1779; WAN024FVB; Start 326; Stop 350
ataatgctgttcaagaatatgatgt

SEQ ID NO: 304933 - DNA, 25 bp, Artificial
  probe
  misc_feature (1)..(25): SEQ ID NO: 1779; WAN024FVB; Start 275; Stop 299
cctttgtagattcagatgactatgt

SEQ ID NO: 304934 - DNA, 25 bp, Artificial
  probe
  misc_feature (1)..(25): SEQ ID NO: 1779; WAN024FVB; Start 274; Stop 298
acctttgtagattcagatgactatg

SEQ ID NO: 304935 - DNA, 25 bp, Artificial
  probe
  misc_feature (1)..(25): SEQ ID NO: 1779; WAN024FVB; Start 11; Stop 35
atatgtcctgtccagaaattagcgt

SEQ ID NO: 304936 - DNA, 25 bp, Artificial
  probe
  misc_feature (1)..(25): SEQ ID NO: 1779; WAN024FVB; Start 128; Stop 152
taaacgatggatcaacggattcttc

SEQ ID NO: 304937 - DNA, 25 bp, Artificial
  probe
  misc_feature (1)..(25): SEQ ID NO: 1779; WAN024FVB; Start 8; Stop 32
aagatatgtcctgtccagaaattag

SEQ ID NO: 304938 - DNA, 25 bp, Artificial
  probe
  misc_feature (1)..(25): SEQ ID NO: 1779; WAN024FVB; Start 3; Stop 27
gattaaagatatgtcctgtccagaa

SEQ ID NO: 304939 - DNA, 25 bp, Artificial
  probe
  misc_feature (1)..(25): SEQ ID NO: 1779; WAN024FVB; Start 1; Stop 25
atgattaaagatatgtcctgtccag

SEQ ID NO: 304940 - DNA, 25 bp, Artificial
  probe
  misc_feature (1)..(25): SEQ ID NO: 1779; WAN024FVB; Start 130; Stop 154
aacgatggatcaacggattcttctg

SEQ ID NO: 304941 - DNA, 25 bp, Artificial
  probe
  misc_feature (1)..(25): SEQ ID NO: 1779; WAN024FVB; Start 127; Stop 151
gtaaacgatggatcaacggattctt

SEQ ID NO: 304942 - DNA, 25 bp, Artificial
  probe
  misc_feature (1)..(25): SEQ ID NO: 1779; WAN024FVB; Start 13; Stop 37
atgtcctgtccagaaattagcgtaa

SEQ ID NO: 304943 - DNA, 25 bp, Artificial
  probe
  misc_feature (1)..(25): SEQ ID NO: 1779; WAN024FVB; Start 367; Stop 391
gcgggatattatcgttcctttagta

SEQ ID NO: 304944 - DNA, 25 bp, Artificial
  probe
  misc_feature (1)..(25): SEQ ID NO: 1779; WAN024FVB; Start 14; Stop 38
tgtcctgtccagaaattagcgtaat

SEQ ID NO: 304945 - DNA, 25 bp, Artificial
  probe
  misc_feature (1)..(25): SEQ ID NO: 1779; WAN024FVB; Start 7; Stop 31
aaagatatgtcctgtccagaaatta

SEQ ID NO: 304946 - DNA, 25 bp, Artificial
  probe
  misc_feature (1)..(25): SEQ ID NO: 1779; WAN024FVB; Start 6; Stop 30
taaagatatgtcctgtccagaaatt

SEQ ID NO: 304947 - DNA, 25 bp, Artificial
  probe
  misc_feature (1)..(25): SEQ ID NO: 1780; WAN024CKG; Start 435; Stop 459
ggaagattcggctaagtggttatat

SEQ ID NO: 304948 - DNA, 25 bp, Artificial
  probe
  misc_feature (1)..(25): SEQ ID NO: 1780; WAN024CKG; Start 437; Stop 461
aagattcggctaagtggttatatgg

SEQ ID NO: 304949 - DNA, 25 bp, Artificial
  probe
  misc_feature (1)..(25): SEQ ID NO: 1780; WAN024CKG; Start 436; Stop 460
gaagattcggctaagtggttatatg

SEQ ID NO: 304950 - DNA, 25 bp, Artificial
  probe
  misc_feature (1)..(25): SEQ ID NO: 1780; WAN024CKG; Start 439; Stop 463
gattcggctaagtggttatatggag

SEQ ID NO: 304951 - DNA, 25 bp, Artificial
  probe
  misc_feature (1)..(25): SEQ ID NO: 1780; WAN024CKG; Start 553; Stop 577
tgtcgtagagaattagatgtgtcaa

SEQ ID NO: 304952 - DNA, 25 bp, Artificial
  probe
  misc_feature (1)..(25): SEQ ID NO: 1780; WAN024CKG; Start 552; Stop 576
atgtcgtagagaattagatgtgtca

SEQ ID NO: 304953 - DNA, 25 bp, Artificial
  probe
  misc_feature (1)..(25): SEQ ID NO: 1780; WAN024CKG; Start 440; Stop 464
attcggctaagtggttatatggaga

SEQ ID NO: 304954 - DNA, 25 bp, Artificial
  probe
  misc_feature (1)..(25): SEQ ID NO: 1780; WAN024CKG; Start 438; Stop 462
agattcggctaagtggttatatgga

SEQ ID NO: 304955 - DNA, 25 bp, Artificial
  probe
  misc_feature (1)..(25): SEQ ID NO: 1780; WAN024CKG; Start 939; Stop 963
cttacctatcaacgaagagtctgtg

SEQ ID NO: 304956 - DNA, 25 bp, Artificial
  probe
  misc_feature (1)..(25): SEQ ID NO: 1780; WAN024CKG; Start 940; Stop 964
ttacctatcaacgaagagtctgtgt

SEQ ID NO: 304957 - DNA, 25 bp, Artificial
  probe
  misc_feature (1)..(25): SEQ ID NO: 1780; WAN024CKG; Start 895; Stop 919
gatacagtgacgcaagaagtagatg

SEQ ID NO: 304958 - DNA, 25 bp, Artificial
  probe
  misc_feature (1)..(25): SEQ ID NO: 1780; WAN024CKG; Start 894; Stop 918
agatacagtgacgcaagaagtagat

SEQ ID NO: 304959 - DNA, 25 bp, Artificial
  probe
  misc_feature (1)..(25): SEQ ID NO: 1780; WAN024CKG; Start 1028; Stop 1052
acagtatgacagatggactctatga

SEQ ID NO: 304960 - DNA, 25 bp, Artificial
  probe
  misc_feature (1)..(25): SEQ ID NO: 1780; WAN024CKG; Start 1027; Stop 1051
aacagtatgacagatggactctatg

SEQ ID NO: 304961 - DNA, 25 bp, Artificial
  probe
  misc_feature (1)..(25): SEQ ID NO: 1780; WAN024CKG; Start 937; Stop 961
tacttacctatcaacgaagagtctg

SEQ ID NO: 304962 - DNA, 25 bp, Artificial
  probe
  misc_feature (1)..(25): SEQ ID NO: 1780; WAN024CKG; Start 941; Stop 965
tacctatcaacgaagagtctgtgtt

SEQ ID NO: 304963 - DNA, 25 bp, Artificial
  probe
  misc_feature (1)..(25): SEQ ID NO: 1780; WAN024CKG; Start 1029; Stop 1053
cagtatgacagatggactctatgat

SEQ ID NO: 304964 - DNA, 25 bp, Artificial
  probe
  misc_feature (1)..(25): SEQ ID NO: 1780; WAN024CKG; Start 551; Stop 575
aatgtcgtagagaattagatgtgtc

SEQ ID NO: 304965 - DNA, 25 bp, Artificial
  probe
  misc_feature (1)..(25): SEQ ID NO: 1780; WAN024CKG; Start 443; Stop 467
cggctaagtggttatatggagagaa

SEQ ID NO: 304966 - DNA, 25 bp, Artificial
  probe
  misc_feature (1)..(25): SEQ ID NO: 1780; WAN024CKG; Start 441; Stop 465
ttcggctaagtggttatatggagag

SEQ ID NO: 304967 - DNA, 25 bp, Artificial
  probe
  misc_feature (1)..(25): SEQ ID NO: 1780; WAN024CKG; Start 1024; Stop 1048
aataacagtatgacagatggactct

SEQ ID NO: 304968 - DNA, 25 bp, Artificial
  probe
  misc_feature (1)..(25): SEQ ID NO: 1780; WAN024CKG; Start 938; Stop 962
acttacctatcaacgaagagtctgt

SEQ ID NO: 304969 - DNA, 25 bp, Artificial
  probe
  misc_feature (1)..(25): SEQ ID NO: 1780; WAN024CKG; Start 934; Stop 958
agttacttacctatcaacgaagagt

SEQ ID NO: 304970 - DNA, 25 bp, Artificial
  probe
  misc_feature (1)..(25): SEQ ID NO: 1780; WAN024CKG; Start 935; Stop 959
gttacttacctatcaacgaagagtc

SEQ ID NO: 304971 - DNA, 25 bp, Artificial
  probe
  misc_feature (1)..(25): SEQ ID NO: 1780; WAN024CKG; Start 936; Stop 960
ttacttacctatcaacgaagagtct

SEQ ID NO: 304972 - DNA, 25 bp, Artificial
  probe
  misc_feature (1)..(25): SEQ ID NO: 1780; WAN024CKG; Start 893; Stop 917
cagatacagtgacgcaagaagtaga

SEQ ID NO: 304973 - DNA, 25 bp, Artificial
  probe
  misc_feature (1)..(25): SEQ ID NO: 1780; WAN024CKG; Start 1026; Stop 1050
taacagtatgacagatggactctat

SEQ ID NO: 304974 - DNA, 25 bp, Artificial
  probe
  misc_feature (1)..(25): SEQ ID NO: 1780; WAN024CKG; Start 1025; Stop 1049
ataacagtatgacagatggactcta

SEQ ID NO: 304975 - DNA, 25 bp, Artificial
  probe
  misc_feature (1)..(25): SEQ ID NO: 1780; WAN024CKG; Start 442; Stop 466
tcggctaagtggttatatggagaga

SEQ ID NO: 304976 - DNA, 25 bp, Artificial
  probe
  misc_feature (1)..(25): SEQ ID NO: 1780; WAN024CKG; Start 892; Stop 916
tcagatacagtgacgcaagaagtag

SEQ ID NO: 304977 - DNA, 25 bp, Artificial
  probe
  misc_feature (1)..(25): SEQ ID NO: 1780; WAN024CKG; Start 896; Stop 920
atacagtgacgcaagaagtagatgt

SEQ ID NO: 304978 - DNA, 25 bp, Artificial
  probe
  misc_feature (1)..(25): SEQ ID NO: 1780; WAN024CKG; Start 1030; Stop 1054
agtatgacagatggactctatgata

SEQ ID NO: 304979 - DNA, 25 bp, Artificial
  probe
  misc_feature (1)..(25): SEQ ID NO: 1780; WAN024CKG; Start 682; Stop 706
ttactcctagttggtaatggtgagg

SEQ ID NO: 304980 - DNA, 25 bp, Artificial
  probe
  misc_feature (1)..(25): SEQ ID NO: 1781; WAN024CXT; Start 34; Stop 58
gaagtaacagaagcaattcgtgatt

SEQ ID NO: 304981 - DNA, 25 bp, Artificial
  probe
  misc_feature (1)..(25): SEQ ID NO: 1781; WAN024CXT; Start 32; Stop 56
tagaagtaacagaagcaattcgtga

SEQ ID NO: 304982 - DNA, 25 bp, Artificial
  probe
  misc_feature (1)..(25): SEQ ID NO: 1781; WAN024CXT; Start 41; Stop 65
cagaagcaattcgtgattatgtagt

SEQ ID NO: 304983 - DNA, 25 bp, Artificial
  probe
  misc_feature (1)..(25): SEQ ID NO: 1781; WAN024CXT; Start 33; Stop 57
agaagtaacagaagcaattcgtgat

SEQ ID NO: 304984 - DNA, 25 bp, Artificial
  probe
  misc_feature (1)..(25): SEQ ID NO: 1781; WAN024CXT; Start 31; Stop 55
ctagaagtaacagaagcaattcgtg

SEQ ID NO: 304985 - DNA, 25 bp, Artificial
  probe
  misc_feature (1)..(25): SEQ ID NO: 1781; WAN024CXT; Start 35; Stop 59
aagtaacagaagcaattcgtgatta

SEQ ID NO: 304986 - DNA, 25 bp, Artificial
  probe
  misc_feature (1)..(25): SEQ ID NO: 1781; WAN024CXT; Start 42; Stop 66
agaagcaattcgtgattatgtagtt

SEQ ID NO: 304987 - DNA, 25 bp, Artificial
  probe
  misc_feature (1)..(25): SEQ ID NO: 1781; WAN024CXT; Start 37; Stop 61
gtaacagaagcaattcgtgattatg

SEQ ID NO: 304988 - DNA, 25 bp, Artificial
  probe
  misc_feature (1)..(25): SEQ ID NO: 1781; WAN024CXT; Start 36; Stop 60
agtaacagaagcaattcgtgattat

SEQ ID NO: 304989 - DNA, 25 bp, Artificial
  probe
  misc_feature (1)..(25): SEQ ID NO: 1781; WAN024CXT; Start 30; Stop 54
cctagaagtaacagaagcaattcgt

SEQ ID NO: 304990 - DNA, 25 bp, Artificial
  probe
  misc_feature (1)..(25): SEQ ID NO: 1781; WAN024CXT; Start 29; Stop 53
acctagaagtaacagaagcaattcg

SEQ ID NO: 304991 - DNA, 25 bp, Artificial
  probe
  misc_feature (1)..(25): SEQ ID NO: 1781; WAN024CXT; Start 28; Stop 52
aacctagaagtaacagaagcaattc

SEQ ID NO: 304992 - DNA, 25 bp, Artificial
  probe
  misc_feature (1)..(25): SEQ ID NO: 1781; WAN024CXT; Start 40; Stop 64
acagaagcaattcgtgattatgtag

SEQ ID NO: 304993 - DNA, 25 bp, Artificial
  probe
  misc_feature (1)..(25): SEQ ID NO: 1781; WAN024CXT; Start 39; Stop 63
aacagaagcaattcgtgattatgta

SEQ ID NO: 304994 - DNA, 25 bp, Artificial
  probe
  misc_feature (1)..(25): SEQ ID NO: 1781; WAN024CXT; Start 38; Stop 62
taacagaagcaattcgtgattatgt

SEQ ID NO: 304995 - DNA, 25 bp, Artificial
  probe
  misc_feature (1)..(25): SEQ ID NO: 1781; WAN024CXT; Start 305; Stop 329
ataaggtagcaactggtcaattatt

SEQ ID NO: 304996 - DNA, 25 bp, Artificial
  probe
  misc_feature (1)..(25): SEQ ID NO: 1781; WAN024CXT; Start 304; Stop 328
aataaggtagcaactggtcaattat

SEQ ID NO: 304997 - DNA, 25 bp, Artificial
  probe
  misc_feature (1)..(25): SEQ ID NO: 1781; WAN024CXT; Start 463; Stop 487
tatgtggatgttgaagatcagacaa

SEQ ID NO: 304998 - DNA, 25 bp, Artificial
  probe
  misc_feature (1)..(25): SEQ ID NO: 1781; WAN024CXT; Start 198; Stop 222
cgcagaagatgtatctcaagatatg

SEQ ID NO: 304999 - DNA, 25 bp, Artificial
  probe
  misc_feature (1)..(25): SEQ ID NO: 1781; WAN024CXT; Start 171; Stop 195
gattccgcttggatctattactctc

SEQ ID NO: 305000 - DNA, 25 bp, Artificial
  probe
  misc_feature (1)..(25): SEQ ID NO: 1781; WAN024CXT; Start 167; Stop 191
taacgattccgcttggatctattac

SEQ ID NO: 305001 - DNA, 25 bp, Artificial
  probe
  misc_feature (1)..(25): SEQ ID NO: 1781; WAN024CXT; Start 166; Stop 190
gtaacgattccgcttggatctatta

SEQ ID NO: 305002 - DNA, 25 bp, Artificial
  probe
  misc_feature (1)..(25): SEQ ID NO: 1781; WAN024CXT; Start 515; Stop 539
gcgaaattggtttgttagaggttaa

SEQ ID NO: 305003 - DNA, 25 bp, Artificial
  probe
  misc_feature (1)..(25): SEQ ID NO: 1781; WAN024CXT; Start 326; Stop 350
tatttacagatgctttggtggaaga

SEQ ID NO: 305004 - DNA, 25 bp, Artificial
  probe
  misc_feature (1)..(25): SEQ ID NO: 1781; WAN024CXT; Start 325; Stop 349
ttatttacagatgctttggtggaag

SEQ ID NO: 305005 - DNA, 25 bp, Artificial
  probe
  misc_feature (1)..(25): SEQ ID NO: 1781; WAN024CXT; Start 324; Stop 348
attatttacagatgctttggtggaa

SEQ ID NO: 305006 - DNA, 25 bp, Artificial
  probe
  misc_feature (1)..(25): SEQ ID NO: 1781; WAN024CXT; Start 199; Stop 223
gcagaagatgtatctcaagatatgt

SEQ ID NO: 305007 - DNA, 25 bp, Artificial
  probe
  misc_feature (1)..(25): SEQ ID NO: 1781; WAN024CXT; Start 327; Stop 351
atttacagatgctttggtggaagat

SEQ ID NO: 305008 - DNA, 25 bp, Artificial
  probe
  misc_feature (1)..(25): SEQ ID NO: 1781; WAN024CXT; Start 309; Stop 333
ggtagcaactggtcaattatttaca

SEQ ID NO: 305009 - DNA, 25 bp, Artificial
  probe
  misc_feature (1)..(25): SEQ ID NO: 1781; WAN024CXT; Start 328; Stop 352
tttacagatgctttggtggaagatt

SEQ ID NO: 305010 - DNA, 25 bp, Artificial
  probe
  misc_feature (1)..(25): SEQ ID NO: 1781; WAN024CXT; Start 308; Stop 332
aggtagcaactggtcaattatttac

SEQ ID NO: 305011 - DNA, 25 bp, Artificial
  probe
  misc_feature (1)..(25): SEQ ID NO: 1781; WAN024CXT; Start 323; Stop 347
aattatttacagatgctttggtgga

SEQ ID NO: 305012 - DNA, 25 bp, Artificial
  probe
  misc_feature (1)..(25): SEQ ID NO: 1781; WAN024CXT; Start 45; Stop 69
agcaattcgtgattatgtagtttct

SEQ ID NO: 305013 - DNA, 25 bp, Artificial
  probe
  misc_feature (1)..(25): SEQ ID NO: 1782; WAN024FKK; Start 1010; Stop 1034
atggaatgattggtctgttcttagt

SEQ ID NO: 305014 - DNA, 25 bp, Artificial
  probe
  misc_feature (1)..(25): SEQ ID NO: 1782; WAN024FKK; Start 1007; Stop 1031
actatggaatgattggtctgttctt

SEQ ID NO: 305015 - DNA, 25 bp, Artificial
  probe
  misc_feature (1)..(25): SEQ ID NO: 1782; WAN024FKK; Start 1011; Stop 1035
tggaatgattggtctgttcttagta

SEQ ID NO: 305016 - DNA, 25 bp, Artificial
  probe
  misc_feature (1)..(25): SEQ ID NO: 1782; WAN024FKK; Start 942; Stop 966
caatgtgtatgtaattcggaatggt

SEQ ID NO: 305017 - DNA, 25 bp, Artificial
  probe
  misc_feature (1)..(25): SEQ ID NO: 1782; WAN024FKK; Start 943; Stop 967
aatgtgtatgtaattcggaatggtt

SEQ ID NO: 305018 - DNA, 25 bp, Artificial
  probe
  misc_feature (1)..(25): SEQ ID NO: 1782; WAN024FKK; Start 548; Stop 572
aatggttgagatatgtatgtgtgtt

SEQ ID NO: 305019 - DNA, 25 bp, Artificial
  probe
  misc_feature (1)..(25): SEQ ID NO: 1782; WAN024FKK; Start 602; Stop 626
agaagagaactgcgtatatattggt

SEQ ID NO: 305020 - DNA, 25 bp, Artificial
  probe
  misc_feature (1)..(25): SEQ ID NO: 1782; WAN024FKK; Start 606; Stop 630
gagaactgcgtatatattggtatcg

SEQ ID NO: 305021 - DNA, 25 bp, Artificial
  probe
  misc_feature (1)..(25): SEQ ID NO: 1782; WAN024FKK; Start 1016; Stop 1040
tgattggtctgttcttagtattgtt

SEQ ID NO: 305022 - DNA, 25 bp, Artificial
  probe
  misc_feature (1)..(25): SEQ ID NO: 1782; WAN024FKK; Start 1012; Stop 1036
ggaatgattggtctgttcttagtat

SEQ ID NO: 305023 - DNA, 25 bp, Artificial
  probe
  misc_feature (1)..(25): SEQ ID NO: 1782; WAN024FKK; Start 1009; Stop 1033
tatggaatgattggtctgttcttag

SEQ ID NO: 305024 - DNA, 25 bp, Artificial
  probe
  misc_feature (1)..(25): SEQ ID NO: 1782; WAN024FKK; Start 1008; Stop 1032
ctatggaatgattggtctgttctta

SEQ ID NO: 305025 - DNA, 25 bp, Artificial
  probe
  misc_feature (1)..(25): SEQ ID NO: 1782; WAN024FKK; Start 941; Stop 965
acaatgtgtatgtaattcggaatgg

SEQ ID NO: 305026 - DNA, 25 bp, Artificial
  probe
  misc_feature (1)..(25): SEQ ID NO: 1782; WAN024FKK; Start 1006; Stop 1030
gactatggaatgattggtctgttct

SEQ ID NO: 305027 - DNA, 25 bp, Artificial
  probe
  misc_feature (1)..(25): SEQ ID NO: 1782; WAN024FKK; Start 1015; Stop 1039
atgattggtctgttcttagtattgt

SEQ ID NO: 305028 - DNA, 25 bp, Artificial
  probe
  misc_feature (1)..(25): SEQ ID NO: 1782; WAN024FKK; Start 603; Stop 627
gaagagaactgcgtatatattggta

SEQ ID NO: 305029 - DNA, 25 bp, Artificial
  probe
  misc_feature (1)..(25): SEQ ID NO: 1782; WAN024FKK; Start 1005; Stop 1029
cgactatggaatgattggtctgttc

SEQ ID NO: 305030 - DNA, 25 bp, Artificial
  probe
  misc_feature (1)..(25): SEQ ID NO: 1782; WAN024FKK; Start 607; Stop 631
agaactgcgtatatattggtatcga

SEQ ID NO: 305031 - DNA, 25 bp, Artificial
  probe
  misc_feature (1)..(25): SEQ ID NO: 1782; WAN024FKK; Start 601; Stop 625
cagaagagaactgcgtatatattgg

SEQ ID NO: 305032 - DNA, 25 bp, Artificial
  probe
  misc_feature (1)..(25): SEQ ID NO: 1782; WAN024FKK; Start 605; Stop 629
agagaactgcgtatatattggtatc

SEQ ID NO: 305033 - DNA, 25 bp, Artificial
  probe
  misc_feature (1)..(25): SEQ ID NO: 1782; WAN024FKK; Start 1014; Stop 1038
aatgattggtctgttcttagtattg

SEQ ID NO: 305034 - DNA, 25 bp, Artificial
  probe
  misc_feature (1)..(25): SEQ ID NO: 1782; WAN024FKK; Start 990; Stop 1014
tatttcatttcttgccgactatgga

SEQ ID NO: 305035 - DNA, 25 bp, Artificial
  probe
  misc_feature (1)..(25): SEQ ID NO: 1782; WAN024FKK; Start 550; Stop 574
tggttgagatatgtatgtgtgtttc

SEQ ID NO: 305036 - DNA, 25 bp, Artificial
  probe
  misc_feature (1)..(25): SEQ ID NO: 1782; WAN024FKK; Start 989; Stop 1013
atatttcatttcttgccgactatgg

SEQ ID NO: 305037 - DNA, 25 bp, Artificial
  probe
  misc_feature (1)..(25): SEQ ID NO: 1782; WAN024FKK; Start 600; Stop 624
tcagaagagaactgcgtatatattg

SEQ ID NO: 305038 - DNA, 25 bp, Artificial
  probe
  misc_feature (1)..(25): SEQ ID NO: 1782; WAN024FKK; Start 996; Stop 1020
atttcttgccgactatggaatgatt

SEQ ID NO: 305039 - DNA, 25 bp, Artificial
  probe
  misc_feature (1)..(25): SEQ ID NO: 1782; WAN024FKK; Start 596; Stop 620
ttattcagaagagaactgcgtatat

SEQ ID NO: 305040 - DNA, 25 bp, Artificial
  probe
  misc_feature (1)..(25): SEQ ID NO: 1782; WAN024FKK; Start 817; Stop 841
agtttctcgctaaataatcgtgtaa

SEQ ID NO: 305041 - DNA, 25 bp, Artificial
  probe
  misc_feature (1)..(25): SEQ ID NO: 1782; WAN024FKK; Start 604; Stop 628
aagagaactgcgtatatattggtat

SEQ ID NO: 305042 - DNA, 25 bp, Artificial
  probe
  misc_feature (1)..(25): SEQ ID NO: 1782; WAN024FKK; Start 992; Stop 1016
tttcatttcttgccgactatggaat

SEQ ID NO: 305043 - DNA, 25 bp, Artificial
  probe
  misc_feature (1)..(25): SEQ ID NO: 1782; WAN024FKK; Start 991; Stop 1015
atttcatttcttgccgactatggaa

SEQ ID NO: 305044 - DNA, 25 bp, Artificial
  probe
  misc_feature (1)..(25): SEQ ID NO: 1782; WAN024FKK; Start 815; Stop 839
atagtttctcgctaaataatcgtgt

SEQ ID NO: 305045 - DNA, 25 bp, Artificial
  probe
  misc_feature (1)..(25): SEQ ID NO: 1782; WAN024FKK; Start 944; Stop 968
atgtgtatgtaattcggaatggttt

SEQ ID NO: 305046 - DNA, 25 bp, Artificial
  probe
  misc_feature (1)..(25): SEQ ID NO: 1783; WAN024D7O; Start 364; Stop 388
gcaaactattcagcacctacaaatt

SEQ ID NO: 305047 - DNA, 25 bp, Artificial
  probe
  misc_feature (1)..(25): SEQ ID NO: 1783; WAN024D7O; Start 240; Stop 264
tagttacgataaccagcaaggacaa

SEQ ID NO: 305048 - DNA, 25 bp, Artificial
  probe
  misc_feature (1)..(25): SEQ ID NO: 1783; WAN024D7O; Start 367; Stop 391
aactattcagcacctacaaattcag

SEQ ID NO: 305049 - DNA, 25 bp, Artificial
  probe
  misc_feature (1)..(25): SEQ ID NO: 1783; WAN024D7O; Start 366; Stop 390
aaactattcagcacctacaaattca

SEQ ID NO: 305050 - DNA, 25 bp, Artificial
  probe
  misc_feature (1)..(25): SEQ ID NO: 1783; WAN024D7O; Start 365; Stop 389
caaactattcagcacctacaaattc

SEQ ID NO: 305051 - DNA, 25 bp, Artificial
  probe
  misc_feature (1)..(25): SEQ ID NO: 1783; WAN024D7O; Start 368; Stop 392
actattcagcacctacaaattcagt

SEQ ID NO: 305052 - DNA, 25 bp, Artificial
  probe
  misc_feature (1)..(25): SEQ ID NO: 1783; WAN024D7O; Start 428; Stop 452
caacaaacccattggatatttcaga

SEQ ID NO: 305053 - DNA, 25 bp, Artificial
  probe
  misc_feature (1)..(25): SEQ ID NO: 1783; WAN024D7O; Start 369; Stop 393
ctattcagcacctacaaattcagta

SEQ ID NO: 305054 - DNA, 25 bp, Artificial
  probe
  misc_feature (1)..(25): SEQ ID NO: 1783; WAN024D7O; Start 433; Stop 457
aacccattggatatttcagatgatg

SEQ ID NO: 305055 - DNA, 25 bp, Artificial
  probe
  misc_feature (1)..(25): SEQ ID NO: 1783; WAN024D7O; Start 430; Stop 454
acaaacccattggatatttcagatg

SEQ ID NO: 305056 - DNA, 25 bp, Artificial
  probe
  misc_feature (1)..(25): SEQ ID NO: 1783; WAN024D7O; Start 434; Stop 458
acccattggatatttcagatgatga

SEQ ID NO: 305057 - DNA, 25 bp, Artificial
  probe
  misc_feature (1)..(25): SEQ ID NO: 1783; WAN024D7O; Start 431; Stop 455
caaacccattggatatttcagatga

SEQ ID NO: 305058 - DNA, 25 bp, Artificial
  probe
  misc_feature (1)..(25): SEQ ID NO: 1783; WAN024D7O; Start 239; Stop 263
gtagttacgataaccagcaaggaca

SEQ ID NO: 305059 - DNA, 25 bp, Artificial
  probe
  misc_feature (1)..(25): SEQ ID NO: 1783; WAN024D7O; Start 425; Stop 449
gagcaacaaacccattggatatttc

SEQ ID NO: 305060 - DNA, 25 bp, Artificial
  probe
  misc_feature (1)..(25): SEQ ID NO: 1783; WAN024D7O; Start 371; Stop 395
attcagcacctacaaattcagtacc

SEQ ID NO: 305061 - DNA, 25 bp, Artificial
  probe
  misc_feature (1)..(25): SEQ ID NO: 1783; WAN024D7O; Start 370; Stop 394
tattcagcacctacaaattcagtac

SEQ ID NO: 305062 - DNA, 25 bp, Artificial
  probe
  misc_feature (1)..(25): SEQ ID NO: 1783; WAN024D7O; Start 94; Stop 118
gcagtaaaccgtacatttaagagtc

SEQ ID NO: 305063 - DNA, 25 bp, Artificial
  probe
  misc_feature (1)..(25): SEQ ID NO: 1783; WAN024D7O; Start 429; Stop 453
aacaaacccattggatatttcagat

SEQ ID NO: 305064 - DNA, 25 bp, Artificial
  probe
  misc_feature (1)..(25): SEQ ID NO: 1783; WAN024D7O; Start 427; Stop 451
gcaacaaacccattggatatttcag

SEQ ID NO: 305065 - DNA, 25 bp, Artificial
  probe
  misc_feature (1)..(25): SEQ ID NO: 1783; WAN024D7O; Start 432; Stop 456
aaacccattggatatttcagatgat

SEQ ID NO: 305066 - DNA, 25 bp, Artificial
  probe
  misc_feature (1)..(25): SEQ ID NO: 1783; WAN024D7O; Start 378; Stop 402
acctacaaattcagtaccagacttt

SEQ ID NO: 305067 - DNA, 25 bp, Artificial
  probe
  misc_feature (1)..(25): SEQ ID NO: 1783; WAN024D7O; Start 377; Stop 401
cacctacaaattcagtaccagactt

SEQ ID NO: 305068 - DNA, 25 bp, Artificial
  probe
  misc_feature (1)..(25): SEQ ID NO: 1783; WAN024D7O; Start 426; Stop 450
agcaacaaacccattggatatttca

SEQ ID NO: 305069 - DNA, 25 bp, Artificial
  probe
  misc_feature (1)..(25): SEQ ID NO: 1783; WAN024D7O; Start 435; Stop 459
cccattggatatttcagatgatgat

SEQ ID NO: 305070 - DNA, 25 bp, Artificial
  probe
  misc_feature (1)..(25): SEQ ID NO: 1783; WAN024D7O; Start 222; Stop 246
aggtcgtatccagactcgtagttac

SEQ ID NO: 305071 - DNA, 25 bp, Artificial
  probe
  misc_feature (1)..(25): SEQ ID NO: 1783; WAN024D7O; Start 221; Stop 245
caggtcgtatccagactcgtagtta

SEQ ID NO: 305072 - DNA, 25 bp, Artificial
  probe
  misc_feature (1)..(25): SEQ ID NO: 1783; WAN024D7O; Start 95; Stop 119
cagtaaaccgtacatttaagagtca

SEQ ID NO: 305073 - DNA, 25 bp, Artificial
  probe
  misc_feature (1)..(25): SEQ ID NO: 1783; WAN024D7O; Start 10; Stop 34
aatgttgtacttgtagggcgtatga

SEQ ID NO: 305074 - DNA, 25 bp, Artificial
  probe
  misc_feature (1)..(25): SEQ ID NO: 1783; WAN024D7O; Start 424; Stop 448
ggagcaacaaacccattggatattt

SEQ ID NO: 305075 - DNA, 25 bp, Artificial
  probe
  misc_feature (1)..(25): SEQ ID NO: 1783; WAN024D7O; Start 372; Stop 396
ttcagcacctacaaattcagtacca

SEQ ID NO: 305076 - DNA, 25 bp, Artificial
  probe
  misc_feature (1)..(25): SEQ ID NO: 1783; WAN024D7O; Start 241; Stop 265
agttacgataaccagcaaggacaac

SEQ ID NO: 305077 - DNA, 25 bp, Artificial
  probe
  misc_feature (1)..(25): SEQ ID NO: 1783; WAN024D7O; Start 96; Stop 120
agtaaaccgtacatttaagagtcaa

SEQ ID NO: 305078 - DNA, 25 bp, Artificial
  probe
  misc_feature (1)..(25): SEQ ID NO: 1783; WAN024D7O; Start 9; Stop 33
caatgttgtacttgtagggcgtatg

SEQ ID NO: 305079 - DNA, 25 bp, Artificial
  probe
  misc_feature (1)..(25): SEQ ID NO: 1784; WAN024AJQ; Start 1; Stop 25
atgattaacagatactggtaggcga

SEQ ID NO: 305080 - DNA, 25 bp, Artificial
  probe
  misc_feature (1)..(25): SEQ ID NO: 1784; WAN024AJQ; Start 2; Stop 26
tgattaacagatactggtaggcgaa

SEQ ID NO: 305081 - DNA, 25 bp, Artificial
  probe
  misc_feature (1)..(25): SEQ ID NO: 1784; WAN024AJQ; Start 3; Stop 27
gattaacagatactggtaggcgaaa

SEQ ID NO: 305082 - DNA, 25 bp, Artificial
  probe
  misc_feature (1)..(25): SEQ ID NO: 1784; WAN024AJQ; Start 4; Stop 28
attaacagatactggtaggcgaaaa

SEQ ID NO: 305083 - DNA, 25 bp, Artificial
  probe
  misc_feature (1)..(25): SEQ ID NO: 1784; WAN024AJQ; Start 97; Stop 121
agcattttcaattactacacaatga

SEQ ID NO: 305084 - DNA, 25 bp, Artificial
  probe
  misc_feature (1)..(25): SEQ ID NO: 1784; WAN024AJQ; Start 93; Stop 117
tgtaagcattttcaattactacaca

SEQ ID NO: 305085 - DNA, 25 bp, Artificial
  probe
  misc_feature (1)..(25): SEQ ID NO: 1784; WAN024AJQ; Start 91; Stop 115
actgtaagcattttcaattactaca

SEQ ID NO: 305086 - DNA, 25 bp, Artificial
  probe
  misc_feature (1)..(25): SEQ ID NO: 1784; WAN024AJQ; Start 96; Stop 120
aagcattttcaattactacacaatg

SEQ ID NO: 305087 - DNA, 25 bp, Artificial
  probe
  misc_feature (1)..(25): SEQ ID NO: 1784; WAN024AJQ; Start 94; Stop 118
gtaagcattttcaattactacacaa

SEQ ID NO: 305088 - DNA, 25 bp, Artificial
  probe
  misc_feature (1)..(25): SEQ ID NO: 1784; WAN024AJQ; Start 92; Stop 116
ctgtaagcattttcaattactacac

SEQ ID NO: 305089 - DNA, 25 bp, Artificial
  probe
  misc_feature (1)..(25): SEQ ID NO: 1784; WAN024AJQ; Start 95; Stop 119
taagcattttcaattactacacaat

SEQ ID NO: 305090 - DNA, 25 bp, Artificial
  probe
  misc_feature (1)..(25): SEQ ID NO: 1784; WAN024AJQ; Start 98; Stop 122
gcattttcaattactacacaatgaa

SEQ ID NO: 305091 - DNA, 25 bp, Artificial
  probe
  misc_feature (1)..(25): SEQ ID NO: 1784; WAN024AJQ; Start 85; Stop 109
actagtactgtaagcattttcaatt

SEQ ID NO: 305092 - DNA, 25 bp, Artificial
  probe
  misc_feature (1)..(25): SEQ ID NO: 1784; WAN024AJQ; Start 90; Stop 114
tactgtaagcattttcaattactac

SEQ ID NO: 305093 - DNA, 25 bp, Artificial
  probe
  misc_feature (1)..(25): SEQ ID NO: 1784; WAN024AJQ; Start 78; Stop 102
ttgatatactagtactgtaagcatt

SEQ ID NO: 305094 - DNA, 25 bp, Artificial
  probe
  misc_feature (1)..(25): SEQ ID NO: 1784; WAN024AJQ; Start 89; Stop 113
gtactgtaagcattttcaattacta

SEQ ID NO: 305095 - DNA, 25 bp, Artificial
  probe
  misc_feature (1)..(25): SEQ ID NO: 1784; WAN024AJQ; Start 88; Stop 112
agtactgtaagcattttcaattact

SEQ ID NO: 305096 - DNA, 25 bp, Artificial
  probe
  misc_feature (1)..(25): SEQ ID NO: 1784; WAN024AJQ; Start 49; Stop 73
acgcaaacctttgcataagtgaatg

SEQ ID NO: 305097 - DNA, 25 bp, Artificial
  probe
  misc_feature (1)..(25): SEQ ID NO: 1784; WAN024AJQ; Start 86; Stop 110
ctagtactgtaagcattttcaatta

SEQ ID NO: 305098 - DNA, 25 bp, Artificial
  probe
  misc_feature (1)..(25): SEQ ID NO: 1784; WAN024AJQ; Start 79; Stop 103
tgatatactagtactgtaagcattt

SEQ ID NO: 305099 - DNA, 25 bp, Artificial
  probe
  misc_feature (1)..(25): SEQ ID NO: 1784; WAN024AJQ; Start 77; Stop 101
tttgatatactagtactgtaagcat

SEQ ID NO: 305100 - DNA, 25 bp, Artificial
  probe
  misc_feature (1)..(25): SEQ ID NO: 1784; WAN024AJQ; Start 87; Stop 111
tagtactgtaagcattttcaattac

SEQ ID NO: 305101 - DNA, 25 bp, Artificial
  probe
  misc_feature (1)..(25): SEQ ID NO: 1784; WAN024AJQ; Start 84; Stop 108
tactagtactgtaagcattttcaat

SEQ ID NO: 305102 - DNA, 25 bp, Artificial
  probe
  misc_feature (1)..(25): SEQ ID NO: 1784; WAN024AJQ; Start 83; Stop 107
atactagtactgtaagcattttcaa

SEQ ID NO: 305103 - DNA, 25 bp, Artificial
  probe
  misc_feature (1)..(25): SEQ ID NO: 1784; WAN024AJQ; Start 82; Stop 106
tatactagtactgtaagcattttca

SEQ ID NO: 305104 - DNA, 25 bp, Artificial
  probe
  misc_feature (1)..(25): SEQ ID NO: 1784; WAN024AJQ; Start 76; Stop 100
ttttgatatactagtactgtaagca

SEQ ID NO: 305105 - DNA, 25 bp, Artificial
  probe
  misc_feature (1)..(25): SEQ ID NO: 1785; WAN024DAT; Start 132; Stop 156
gaggctaatgtggtttgaagaaatt

SEQ ID NO: 305106 - DNA, 25 bp, Artificial
  probe
  misc_feature (1)..(25): SEQ ID NO: 1785; WAN024DAT; Start 131; Stop 155
cgaggctaatgtggtttgaagaaat

SEQ ID NO: 305107 - DNA, 25 bp, Artificial
  probe
  misc_feature (1)..(25): SEQ ID NO: 1785; WAN024DAT; Start 133; Stop 157
aggctaatgtggtttgaagaaattt

SEQ ID NO: 305108 - DNA, 25 bp, Artificial
  probe
  misc_feature (1)..(25): SEQ ID NO: 1785; WAN024DAT; Start 130; Stop 154
gcgaggctaatgtggtttgaagaaa

SEQ ID NO: 305109 - DNA, 25 bp, Artificial
  probe
  misc_feature (1)..(25): SEQ ID NO: 1785; WAN024DAT; Start 134; Stop 158
ggctaatgtggtttgaagaaatttt

SEQ ID NO: 305110 - DNA, 25 bp, Artificial
  probe
  misc_feature (1)..(25): SEQ ID NO: 1785; WAN024DAT; Start 137; Stop 161
taatgtggtttgaagaaattttcga

SEQ ID NO: 305111 - DNA, 25 bp, Artificial
  probe
  misc_feature (1)..(25): SEQ ID NO: 1785; WAN024DAT; Start 135; Stop 159
gctaatgtggtttgaagaaattttc

SEQ ID NO: 305112 - DNA, 25 bp, Artificial
  probe
  misc_feature (1)..(25): SEQ ID NO: 1785; WAN024DAT; Start 136; Stop 160
ctaatgtggtttgaagaaattttcg

SEQ ID NO: 305113 - DNA, 25 bp, Artificial
  probe
  misc_feature (1)..(25): SEQ ID NO: 1785; WAN024DAT; Start 140; Stop 164
tgtggtttgaagaaattttcgaaga

SEQ ID NO: 305114 - DNA, 25 bp, Artificial
  probe
  misc_feature (1)..(25): SEQ ID NO: 1785; WAN024DAT; Start 148; Stop 172
gaagaaattttcgaagagcgtgaat

SEQ ID NO: 305115 - DNA, 25 bp, Artificial
  probe
  misc_feature (1)..(25): SEQ ID NO: 1785; WAN024DAT; Start 142; Stop 166
tggtttgaagaaattttcgaagagc

SEQ ID NO: 305116 - DNA, 25 bp, Artificial
  probe
  misc_feature (1)..(25): SEQ ID NO: 1785; WAN024DAT; Start 149; Stop 173
aagaaattttcgaagagcgtgaatg

SEQ ID NO: 305117 - DNA, 25 bp, Artificial
  probe
  misc_feature (1)..(25): SEQ ID NO: 1785; WAN024DAT; Start 139; Stop 163
atgtggtttgaagaaattttcgaag

SEQ ID NO: 305118 - DNA, 25 bp, Artificial
  probe
  misc_feature (1)..(25): SEQ ID NO: 1785; WAN024DAT; Start 145; Stop 169
tttgaagaaattttcgaagagcgtg

SEQ ID NO: 305119 - DNA, 25 bp, Artificial
  probe
  misc_feature (1)..(25): SEQ ID NO: 1785; WAN024DAT; Start 144; Stop 168
gtttgaagaaattttcgaagagcgt

SEQ ID NO: 305120 - DNA, 25 bp, Artificial
  probe
  misc_feature (1)..(25): SEQ ID NO: 1785; WAN024DAT; Start 138; Stop 162
aatgtggtttgaagaaattttcgaa

SEQ ID NO: 305121 - DNA, 25 bp, Artificial
  probe
  misc_feature (1)..(25): SEQ ID NO: 1785; WAN024DAT; Start 150; Stop 174
agaaattttcgaagagcgtgaatga

SEQ ID NO: 305122 - DNA, 25 bp, Artificial
  probe
  misc_feature (1)..(25): SEQ ID NO: 1785; WAN024DAT; Start 147; Stop 171
tgaagaaattttcgaagagcgtgaa

SEQ ID NO: 305123 - DNA, 25 bp, Artificial
  probe
  misc_feature (1)..(25): SEQ ID NO: 1785; WAN024DAT; Start 146; Stop 170
ttgaagaaattttcgaagagcgtga

SEQ ID NO: 305124 - DNA, 25 bp, Artificial
  probe
  misc_feature (1)..(25): SEQ ID NO: 1785; WAN024DAT; Start 143; Stop 167
ggtttgaagaaattttcgaagagcg

SEQ ID NO: 305125 - DNA, 25 bp, Artificial
  probe
  misc_feature (1)..(25): SEQ ID NO: 1785; WAN024DAT; Start 20; Stop 44
ccaaattttcagaaaataacaaccc

SEQ ID NO: 305126 - DNA, 25 bp, Artificial
  probe
  misc_feature (1)..(25): SEQ ID NO: 1785; WAN024DAT; Start 19; Stop 43
accaaattttcagaaaataacaacc

SEQ ID NO: 305127 - DNA, 25 bp, Artificial
  probe
  misc_feature (1)..(25): SEQ ID NO: 1785; WAN024DAT; Start 21; Stop 45
caaattttcagaaaataacaaccct

SEQ ID NO: 305128 - DNA, 25 bp, Artificial
  probe
  misc_feature (1)..(25): SEQ ID NO: 1785; WAN024DAT; Start 24; Stop 48
attttcagaaaataacaaccctttt

SEQ ID NO: 305129 - DNA, 25 bp, Artificial
  probe
  misc_feature (1)..(25): SEQ ID NO: 1785; WAN024DAT; Start 23; Stop 47
aattttcagaaaataacaacccttt

SEQ ID NO: 305130 - DNA, 25 bp, Artificial
  probe
  misc_feature (1)..(25): SEQ ID NO: 1785; WAN024DAT; Start 22; Stop 46
aaattttcagaaaataacaaccctt

SEQ ID NO: 305131 - DNA, 25 bp, Artificial
  probe
  misc_feature (1)..(25): SEQ ID NO: 1785; WAN024DAT; Start 18; Stop 42
taccaaattttcagaaaataacaac

SEQ ID NO: 305132 - DNA, 25 bp, Artificial
  probe
  misc_feature (1)..(25): SEQ ID NO: 1786; WAN024FTI; Start 30; Stop 54
agggaggaatgttttgaataagaaa

SEQ ID NO: 305133 - DNA, 25 bp, Artificial
  probe
  misc_feature (1)..(25): SEQ ID NO: 1786; WAN024FTI; Start 29; Stop 53
tagggaggaatgttttgaataagaa

SEQ ID NO: 305134 - DNA, 25 bp, Artificial
  probe
  misc_feature (1)..(25): SEQ ID NO: 1786; WAN024FTI; Start 31; Stop 55
gggaggaatgttttgaataagaaat

SEQ ID NO: 305135 - DNA, 25 bp, Artificial
  probe
  misc_feature (1)..(25): SEQ ID NO: 1786; WAN024FTI; Start 28; Stop 52
atagggaggaatgttttgaataaga

SEQ ID NO: 305136 - DNA, 25 bp, Artificial
  probe
  misc_feature (1)..(25): SEQ ID NO: 1786; WAN024FTI; Start 117; Stop 141
aacgttaattcctataatgtgtgtg

SEQ ID NO: 305137 - DNA, 25 bp, Artificial
  probe
  misc_feature (1)..(25): SEQ ID NO: 1786; WAN024FTI; Start 170; Stop 194
ttagagttcgaaatagaatgatgca

SEQ ID NO: 305138 - DNA, 25 bp, Artificial
  probe
  misc_feature (1)..(25): SEQ ID NO: 1786; WAN024FTI; Start 27; Stop 51
tatagggaggaatgttttgaataag

SEQ ID NO: 305139 - DNA, 25 bp, Artificial
  probe
  misc_feature (1)..(25): SEQ ID NO: 1786; WAN024FTI; Start 169; Stop 193
tttagagttcgaaatagaatgatgc

SEQ ID NO: 305140 - DNA, 25 bp, Artificial
  probe
  misc_feature (1)..(25): SEQ ID NO: 1786; WAN024FTI; Start 26; Stop 50
atatagggaggaatgttttgaataa

SEQ ID NO: 305141 - DNA, 25 bp, Artificial
  probe
  misc_feature (1)..(25): SEQ ID NO: 1786; WAN024FTI; Start 116; Stop 140
aaacgttaattcctataatgtgtgt

SEQ ID NO: 305142 - DNA, 25 bp, Artificial
  probe
  misc_feature (1)..(25): SEQ ID NO: 1786; WAN024FTI; Start 32; Stop 56
ggaggaatgttttgaataagaaata

SEQ ID NO: 305143 - DNA, 25 bp, Artificial
  probe
  misc_feature (1)..(25): SEQ ID NO: 1786; WAN024FTI; Start 23; Stop 47
aatatatagggaggaatgttttgaa

SEQ ID NO: 305144 - DNA, 25 bp, Artificial
  probe
  misc_feature (1)..(25): SEQ ID NO: 1786; WAN024FTI; Start 22; Stop 46
aaatatatagggaggaatgttttga

SEQ ID NO: 305145 - DNA, 25 bp, Artificial
  probe
  misc_feature (1)..(25): SEQ ID NO: 1786; WAN024FTI; Start 24; Stop 48
atatatagggaggaatgttttgaat

SEQ ID NO: 305146 - DNA, 25 bp, Artificial
  probe
  misc_feature (1)..(25): SEQ ID NO: 1786; WAN024FTI; Start 21; Stop 45
aaaatatatagggaggaatgttttg

SEQ ID NO: 305147 - DNA, 25 bp, Artificial
  probe
  misc_feature (1)..(25): SEQ ID NO: 1786; WAN024FTI; Start 168; Stop 192
atttagagttcgaaatagaatgatg

SEQ ID NO: 305148 - DNA, 25 bp, Artificial
  probe
  misc_feature (1)..(25): SEQ ID NO: 1786; WAN024FTI; Start 115; Stop 139
aaaacgttaattcctataatgtgtg

SEQ ID NO: 305149 - DNA, 25 bp, Artificial
  probe
  misc_feature (1)..(25): SEQ ID NO: 1787; WAN024D8I; Start 330; Stop 354
attatctgaccaagaagcgactaag

SEQ ID NO: 305150 - DNA, 25 bp, Artificial
  probe
  misc_feature (1)..(25): SEQ ID NO: 1787; WAN024D8I; Start 329; Stop 353
aattatctgaccaagaagcgactaa

SEQ ID NO: 305151 - DNA, 25 bp, Artificial
  probe
  misc_feature (1)..(25): SEQ ID NO: 1787; WAN024D8I; Start 49; Stop 73
ttggatcatctggacttggatattc

SEQ ID NO: 305152 - DNA, 25 bp, Artificial
  probe
  misc_feature (1)..(25): SEQ ID NO: 1787; WAN024D8I; Start 48; Stop 72
cttggatcatctggacttggatatt

SEQ ID NO: 305153 - DNA, 25 bp, Artificial
  probe
  misc_feature (1)..(25): SEQ ID NO: 1787; WAN024D8I; Start 83; Stop 107
aagttgtagccttgattggttcttc

SEQ ID NO: 305154 - DNA, 25 bp, Artificial
  probe
  misc_feature (1)..(25): SEQ ID NO: 1787; WAN024D8I; Start 82; Stop 106
gaagttgtagccttgattggttctt

SEQ ID NO: 305155 - DNA, 25 bp, Artificial
  probe
  misc_feature (1)..(25): SEQ ID NO: 1787; WAN024D8I; Start 331; Stop 355
ttatctgaccaagaagcgactaaga

SEQ ID NO: 305156 - DNA, 25 bp, Artificial
  probe
  misc_feature (1)..(25): SEQ ID NO: 1787; WAN024D8I; Start 47; Stop 71
tcttggatcatctggacttggatat

SEQ ID NO: 305157 - DNA, 25 bp, Artificial
  probe
  misc_feature (1)..(25): SEQ ID NO: 1787; WAN024D8I; Start 50; Stop 74
tggatcatctggacttggatattca

SEQ ID NO: 305158 - DNA, 25 bp, Artificial
  probe
  misc_feature (1)..(25): SEQ ID NO: 1787; WAN024D8I; Start 160; Stop 184
gacagtggctctattcagattgatg

SEQ ID NO: 305159 - DNA, 25 bp, Artificial
  probe
  misc_feature (1)..(25): SEQ ID NO: 1787; WAN024D8I; Start 51; Stop 75
ggatcatctggacttggatattcaa

SEQ ID NO: 305160 - DNA, 25 bp, Artificial
  probe
  misc_feature (1)..(25): SEQ ID NO: 1787; WAN024D8I; Start 159; Stop 183
tgacagtggctctattcagattgat

SEQ ID NO: 305161 - DNA, 25 bp, Artificial
  probe
  misc_feature (1)..(25): SEQ ID NO: 1787; WAN024D8I; Start 348; Stop 372
gactaagattgccaaggaagagttg

SEQ ID NO: 305162 - DNA, 25 bp, Artificial
  probe
  misc_feature (1)..(25): SEQ ID NO: 1787; WAN024D8I; Start 163; Stop 187
agtggctctattcagattgatggtt

SEQ ID NO: 305163 - DNA, 25 bp, Artificial
  probe
  misc_feature (1)..(25): SEQ ID NO: 1787; WAN024D8I; Start 85; Stop 109
gttgtagccttgattggttcttcag

SEQ ID NO: 305164 - DNA, 25 bp, Artificial
  probe
  misc_feature (1)..(25): SEQ ID NO: 1787; WAN024D8I; Start 162; Stop 186
cagtggctctattcagattgatggt

SEQ ID NO: 305165 - DNA, 25 bp, Artificial
  probe
  misc_feature (1)..(25): SEQ ID NO: 1787; WAN024D8I; Start 161; Stop 185
acagtggctctattcagattgatgg

SEQ ID NO: 305166 - DNA, 25 bp, Artificial
  probe
  misc_feature (1)..(25): SEQ ID NO: 1787; WAN024D8I; Start 84; Stop 108
agttgtagccttgattggttcttca

SEQ ID NO: 305167 - DNA, 25 bp, Artificial
  probe
  misc_feature (1)..(25): SEQ ID NO: 1787; WAN024D8I; Start 399; Stop 423
aaaccattatcctcgccatttatca

SEQ ID NO: 305168 - DNA, 25 bp, Artificial
  probe
  misc_feature (1)..(25): SEQ ID NO: 1787; WAN024D8I; Start 334; Stop 358
tctgaccaagaagcgactaagattg

SEQ ID NO: 305169 - DNA, 25 bp, Artificial
  probe
  misc_feature (1)..(25): SEQ ID NO: 1787; WAN024D8I; Start 46; Stop 70
gtcttggatcatctggacttggata

SEQ ID NO: 305170 - DNA, 25 bp, Artificial
  probe
  misc_feature (1)..(25): SEQ ID NO: 1787; WAN024D8I; Start 291; Stop 315
acttgataatgtgaaagaaggcttg

SEQ ID NO: 305171 - DNA, 25 bp, Artificial
  probe
  misc_feature (1)..(25): SEQ ID NO: 1787; WAN024D8I; Start 400; Stop 424
aaccattatcctcgccatttatcag

SEQ ID NO: 305172 - DNA, 25 bp, Artificial
  probe
  misc_feature (1)..(25): SEQ ID NO: 1787; WAN024D8I; Start 292; Stop 316
cttgataatgtgaaagaaggcttgg

SEQ ID NO: 305173 - DNA, 25 bp, Artificial
  probe
  misc_feature (1)..(25): SEQ ID NO: 1787; WAN024D8I; Start 123; Stop 147
aacctttcttcgcagtctcaattat

SEQ ID NO: 305174 - DNA, 25 bp, Artificial
  probe
  misc_feature (1)..(25): SEQ ID NO: 1787; WAN024D8I; Start 295; Stop 319
gataatgtgaaagaaggcttggttg

SEQ ID NO: 305175 - DNA, 25 bp, Artificial
  probe
  misc_feature (1)..(25): SEQ ID NO: 1787; WAN024D8I; Start 125; Stop 149
cctttcttcgcagtctcaattatct

SEQ ID NO: 305176 - DNA, 25 bp, Artificial
  probe
  misc_feature (1)..(25): SEQ ID NO: 1787; WAN024D8I; Start 81; Stop 105
ggaagttgtagccttgattggttct

SEQ ID NO: 305177 - DNA, 25 bp, Artificial
  probe
  misc_feature (1)..(25): SEQ ID NO: 1787; WAN024D8I; Start 294; Stop 318
tgataatgtgaaagaaggcttggtt

SEQ ID NO: 305178 - DNA, 25 bp, Artificial
  probe
  misc_feature (1)..(25): SEQ ID NO: 1787; WAN024D8I; Start 293; Stop 317
ttgataatgtgaaagaaggcttggt

SEQ ID NO: 305179 - DNA, 25 bp, Artificial
  probe
  misc_feature (1)..(25): SEQ ID NO: 1787; WAN024D8I; Start 328; Stop 352
aaattatctgaccaagaagcgacta

SEQ ID NO: 305180 - DNA, 25 bp, Artificial
  probe
  misc_feature (1)..(25): SEQ ID NO: 1787; WAN024D8I; Start 124; Stop 148
acctttcttcgcagtctcaattatc

SEQ ID NO: 305181 - DNA, 25 bp, Artificial
  probe
  misc_feature (1)..(25): SEQ ID NO: 1787; WAN024D8I; Start 325; Stop 349
aagaaattatctgaccaagaagcga

SEQ ID NO: 305182 - DNA, 25 bp, Artificial
  probe
  misc_feature (1)..(25): SEQ ID NO: 1788; WAN024BGT; Start 65; Stop 89
tagaagaagaactttcaaaccgtgg

SEQ ID NO: 305183 - DNA, 25 bp, Artificial
  probe
  misc_feature (1)..(25): SEQ ID NO: 1788; WAN024BGT; Start 64; Stop 88
ctagaagaagaactttcaaaccgtg

SEQ ID NO: 305184 - DNA, 25 bp, Artificial
  probe
  misc_feature (1)..(25): SEQ ID NO: 1788; WAN024BGT; Start 67; Stop 91
gaagaagaactttcaaaccgtggtt

SEQ ID NO: 305185 - DNA, 25 bp, Artificial
  probe
  misc_feature (1)..(25): SEQ ID NO: 1788; WAN024BGT; Start 66; Stop 90
agaagaagaactttcaaaccgtggt

SEQ ID NO: 305186 - DNA, 25 bp, Artificial
  probe
  misc_feature (1)..(25): SEQ ID NO: 1788; WAN024BGT; Start 63; Stop 87
tctagaagaagaactttcaaaccgt

SEQ ID NO: 305187 - DNA, 25 bp, Artificial
  probe
  misc_feature (1)..(25): SEQ ID NO: 1788; WAN024BGT; Start 61; Stop 85
gctctagaagaagaactttcaaacc

SEQ ID NO: 305188 - DNA, 25 bp, Artificial
  probe
  misc_feature (1)..(25): SEQ ID NO: 1788; WAN024BGT; Start 62; Stop 86
ctctagaagaagaactttcaaaccg

SEQ ID NO: 305189 - DNA, 25 bp, Artificial
  probe
  misc_feature (1)..(25): SEQ ID NO: 1788; WAN024BGT; Start 60; Stop 84
tgctctagaagaagaactttcaaac

SEQ ID NO: 305190 - DNA, 25 bp, Artificial
  probe
  misc_feature (1)..(25): SEQ ID NO: 1788; WAN024BGT; Start 59; Stop 83
gtgctctagaagaagaactttcaaa

SEQ ID NO: 305191 - DNA, 25 bp, Artificial
  probe
  misc_feature (1)..(25): SEQ ID NO: 1788; WAN024BGT; Start 58; Stop 82
agtgctctagaagaagaactttcaa

SEQ ID NO: 305192 - DNA, 25 bp, Artificial
  probe
  misc_feature (1)..(25): SEQ ID NO: 1788; WAN024BGT; Start 43; Stop 67
agtcaccaaattaaaagtgctctag

SEQ ID NO: 305193 - DNA, 25 bp, Artificial
  probe
  misc_feature (1)..(25): SEQ ID NO: 1788; WAN024BGT; Start 209; Stop 233
ttatcgaagctgggccaatcttatt

SEQ ID NO: 305194 - DNA, 25 bp, Artificial
  probe
  misc_feature (1)..(25): SEQ ID NO: 1788; WAN024BGT; Start 210; Stop 234
tatcgaagctgggccaatcttattc

SEQ ID NO: 305195 - DNA, 25 bp, Artificial
  probe
  misc_feature (1)..(25): SEQ ID NO: 1788; WAN024BGT; Start 57; Stop 81
aagtgctctagaagaagaactttca

SEQ ID NO: 305196 - DNA, 25 bp, Artificial
  probe
  misc_feature (1)..(25): SEQ ID NO: 1788; WAN024BGT; Start 208; Stop 232
gttatcgaagctgggccaatcttat

SEQ ID NO: 305197 - DNA, 25 bp, Artificial
  probe
  misc_feature (1)..(25): SEQ ID NO: 1788; WAN024BGT; Start 47; Stop 71
accaaattaaaagtgctctagaaga

SEQ ID NO: 305198 - DNA, 25 bp, Artificial
  probe
  misc_feature (1)..(25): SEQ ID NO: 1788; WAN024BGT; Start 44; Stop 68
gtcaccaaattaaaagtgctctaga

SEQ ID NO: 305199 - DNA, 25 bp, Artificial
  probe
  misc_feature (1)..(25): SEQ ID NO: 1788; WAN024BGT; Start 207; Stop 231
agttatcgaagctgggccaatctta

SEQ ID NO: 305200 - DNA, 25 bp, Artificial
  probe
  misc_feature (1)..(25): SEQ ID NO: 1788; WAN024BGT; Start 45; Stop 69
tcaccaaattaaaagtgctctagaa

SEQ ID NO: 305201 - DNA, 25 bp, Artificial
  probe
  misc_feature (1)..(25): SEQ ID NO: 1788; WAN024BGT; Start 53; Stop 77
ttaaaagtgctctagaagaagaact

SEQ ID NO: 305202 - DNA, 25 bp, Artificial
  probe
  misc_feature (1)..(25): SEQ ID NO: 1788; WAN024BGT; Start 46; Stop 70
caccaaattaaaagtgctctagaag

SEQ ID NO: 305203 - DNA, 25 bp, Artificial
  probe
  misc_feature (1)..(25): SEQ ID NO: 1788; WAN024BGT; Start 48; Stop 72
ccaaattaaaagtgctctagaagaa

SEQ ID NO: 305204 - DNA, 25 bp, Artificial
  probe
  misc_feature (1)..(25): SEQ ID NO: 1788; WAN024BGT; Start 52; Stop 76
attaaaagtgctctagaagaagaac

SEQ ID NO: 305205 - DNA, 25 bp, Artificial
  probe
  misc_feature (1)..(25): SEQ ID NO: 1788; WAN024BGT; Start 49; Stop 73
caaattaaaagtgctctagaagaag

SEQ ID NO: 305206 - DNA, 25 bp, Artificial
  probe
  misc_feature (1)..(25): SEQ ID NO: 1788; WAN024BGT; Start 51; Stop 75
aattaaaagtgctctagaagaagaa

SEQ ID NO: 305207 - DNA, 25 bp, Artificial
  probe
  misc_feature (1)..(25): SEQ ID NO: 1788; WAN024BGT; Start 50; Stop 74
aaattaaaagtgctctagaagaaga

SEQ ID NO: 305208 - DNA, 25 bp, Artificial
  probe
  misc_feature (1)..(25): SEQ ID NO: 1788; WAN024BGT; Start 54; Stop 78
taaaagtgctctagaagaagaactt

SEQ ID NO: 305209 - DNA, 25 bp, Artificial
  probe
  misc_feature (1)..(25): SEQ ID NO: 1788; WAN024BGT; Start 56; Stop 80
aaagtgctctagaagaagaactttc

SEQ ID NO: 305210 - DNA, 25 bp, Artificial
  probe
  misc_feature (1)..(25): SEQ ID NO: 1788; WAN024BGT; Start 55; Stop 79
aaaagtgctctagaagaagaacttt

SEQ ID NO: 305211 - DNA, 25 bp, Artificial
  probe
  misc_feature (1)..(25): SEQ ID NO: 1789; WAN024CKT; Start 790; Stop 814
gttaatgttagtgaggtgaatgagc

SEQ ID NO: 305212 - DNA, 25 bp, Artificial
  probe
  misc_feature (1)..(25): SEQ ID NO: 1789; WAN024CKT; Start 792; Stop 816
taatgttagtgaggtgaatgagcag

SEQ ID NO: 305213 - DNA, 25 bp, Artificial
  probe
  misc_feature (1)..(25): SEQ ID NO: 1789; WAN024CKT; Start 791; Stop 815
ttaatgttagtgaggtgaatgagca

SEQ ID NO: 305214 - DNA, 25 bp, Artificial
  probe
  misc_feature (1)..(25): SEQ ID NO: 1789; WAN024CKT; Start 416; Stop 440
taacggagccagatgaacttaataa

SEQ ID NO: 305215 - DNA, 25 bp, Artificial
  probe
  misc_feature (1)..(25): SEQ ID NO: 1789; WAN024CKT; Start 417; Stop 441
aacggagccagatgaacttaataat

SEQ ID NO: 305216 - DNA, 25 bp, Artificial
  probe
  misc_feature (1)..(25): SEQ ID NO: 1789; WAN024CKT; Start 787; Stop 811
ccagttaatgttagtgaggtgaatg

SEQ ID NO: 305217 - DNA, 25 bp, Artificial
  probe
  misc_feature (1)..(25): SEQ ID NO: 1789; WAN024CKT; Start 415; Stop 439
gtaacggagccagatgaacttaata

SEQ ID NO: 305218 - DNA, 25 bp, Artificial
  probe
  misc_feature (1)..(25): SEQ ID NO: 1789; WAN024CKT; Start 420; Stop 444
ggagccagatgaacttaataatcgt

SEQ ID NO: 305219 - DNA, 25 bp, Artificial
  probe
  misc_feature (1)..(25): SEQ ID NO: 1789; WAN024CKT; Start 418; Stop 442
acggagccagatgaacttaataatc

SEQ ID NO: 305220 - DNA, 25 bp, Artificial
  probe
  misc_feature (1)..(25): SEQ ID NO: 1789; WAN024CKT; Start 827; Stop 851
cgttagacacatcaatatacaccaa

SEQ ID NO: 305221 - DNA, 25 bp, Artificial
  probe
  misc_feature (1)..(25): SEQ ID NO: 1789; WAN024CKT; Start 399; Stop 423
atctgttggaataagagtaacggag

SEQ ID NO: 305222 - DNA, 25 bp, Artificial
  probe
  misc_feature (1)..(25): SEQ ID NO: 1789; WAN024CKT; Start 398; Stop 422
aatctgttggaataagagtaacgga

SEQ ID NO: 305223 - DNA, 25 bp, Artificial
  probe
  misc_feature (1)..(25): SEQ ID NO: 1789; WAN024CKT; Start 397; Stop 421
gaatctgttggaataagagtaacgg

SEQ ID NO: 305224 - DNA, 25 bp, Artificial
  probe
  misc_feature (1)..(25): SEQ ID NO: 1789; WAN024CKT; Start 788; Stop 812
cagttaatgttagtgaggtgaatga

SEQ ID NO: 305225 - DNA, 25 bp, Artificial
  probe
  misc_feature (1)..(25): SEQ ID NO: 1789; WAN024CKT; Start 408; Stop 432
aataagagtaacggagccagatgaa

SEQ ID NO: 305226 - DNA, 25 bp, Artificial
  probe
  misc_feature (1)..(25): SEQ ID NO: 1789; WAN024CKT; Start 789; Stop 813
agttaatgttagtgaggtgaatgag

SEQ ID NO: 305227 - DNA, 25 bp, Artificial
  probe
  misc_feature (1)..(25): SEQ ID NO: 1789; WAN024CKT; Start 229; Stop 253
gatgtggcgtcattatctgaattag

SEQ ID NO: 305228 - DNA, 25 bp, Artificial
  probe
  misc_feature (1)..(25): SEQ ID NO: 1789; WAN024CKT; Start 230; Stop 254
atgtggcgtcattatctgaattaga

SEQ ID NO: 305229 - DNA, 25 bp, Artificial
  probe
  misc_feature (1)..(25): SEQ ID NO: 1789; WAN024CKT; Start 228; Stop 252
tgatgtggcgtcattatctgaatta

SEQ ID NO: 305230 - DNA, 25 bp, Artificial
  probe
  misc_feature (1)..(25): SEQ ID NO: 1789; WAN024CKT; Start 421; Stop 445
gagccagatgaacttaataatcgta

SEQ ID NO: 305231 - DNA, 25 bp, Artificial
  probe
  misc_feature (1)..(25): SEQ ID NO: 1789; WAN024CKT; Start 396; Stop 420
agaatctgttggaataagagtaacg

SEQ ID NO: 305232 - DNA, 25 bp, Artificial
  probe
  misc_feature (1)..(25): SEQ ID NO: 1789; WAN024CKT; Start 419; Stop 443
cggagccagatgaacttaataatcg

SEQ ID NO: 305233 - DNA, 25 bp, Artificial
  probe
  misc_feature (1)..(25): SEQ ID NO: 1789; WAN024CKT; Start 407; Stop 431
gaataagagtaacggagccagatga

SEQ ID NO: 305234 - DNA, 25 bp, Artificial
  probe
  misc_feature (1)..(25): SEQ ID NO: 1789; WAN024CKT; Start 227; Stop 251
ttgatgtggcgtcattatctgaatt

SEQ ID NO: 305235 - DNA, 25 bp, Artificial
  probe
  misc_feature (1)..(25): SEQ ID NO: 1789; WAN024CKT; Start 409; Stop 433
ataagagtaacggagccagatgaac

SEQ ID NO: 305236 - DNA, 25 bp, Artificial
  probe
  misc_feature (1)..(25): SEQ ID NO: 1789; WAN024CKT; Start 423; Stop 447
gccagatgaacttaataatcgtatg

SEQ ID NO: 305237 - DNA, 25 bp, Artificial
  probe
  misc_feature (1)..(25): SEQ ID NO: 1789; WAN024CKT; Start 723; Stop 747
tgtgactacaataatagaaccaggt

SEQ ID NO: 305238 - DNA, 25 bp, Artificial
  probe
  misc_feature (1)..(25): SEQ ID NO: 1789; WAN024CKT; Start 831; Stop 855
agacacatcaatatacaccaataca

SEQ ID NO: 305239 - DNA, 25 bp, Artificial
  probe
  misc_feature (1)..(25): SEQ ID NO: 1789; WAN024CKT; Start 422; Stop 446
agccagatgaacttaataatcgtat

SEQ ID NO: 305240 - DNA, 25 bp, Artificial
  probe
  misc_feature (1)..(25): SEQ ID NO: 1789; WAN024CKT; Start 226; Stop 250
gttgatgtggcgtcattatctgaat

SEQ ID NO: 305241 - DNA, 25 bp, Artificial
  probe
  misc_feature (1)..(25): SEQ ID NO: 1789; WAN024CKT; Start 414; Stop 438
agtaacggagccagatgaacttaat

SEQ ID NO: 305242 - DNA, 25 bp, Artificial
  probe
  misc_feature (1)..(25): SEQ ID NO: 1789; WAN024CKT; Start 722; Stop 746
ctgtgactacaataatagaaccagg

SEQ ID NO: 305243 - DNA, 25 bp, Artificial
  probe
  misc_feature (1)..(25): SEQ ID NO: 1789; WAN024CKT; Start 400; Stop 424
tctgttggaataagagtaacggagc

SEQ ID NO: 305244 - DNA, 25 bp, Artificial
  probe
  misc_feature (1)..(25): SEQ ID NO: 1790; WAN024FPD; Start 945; Stop 969
agagaatgtagatgatatgcgtgaa

SEQ ID NO: 305245 - DNA, 25 bp, Artificial
  probe
  misc_feature (1)..(25): SEQ ID NO: 1790; WAN024FPD; Start 944; Stop 968
aagagaatgtagatgatatgcgtga

SEQ ID NO: 305246 - DNA, 25 bp, Artificial
  probe
  misc_feature (1)..(25): SEQ ID NO: 1790; WAN024FPD; Start 14; Stop 38
tcggattaggttatattggattgcc

SEQ ID NO: 305247 - DNA, 25 bp, Artificial
  probe
  misc_feature (1)..(25): SEQ ID NO: 1790; WAN024FPD; Start 321; Stop 345
aggagcggttattattattgaatcg

SEQ ID NO: 305248 - DNA, 25 bp, Artificial
  probe
  misc_feature (1)..(25): SEQ ID NO: 1790; WAN024FPD; Start 972; Stop 996
tccaacgcttcagttattagaatct

SEQ ID NO: 305249 - DNA, 25 bp, Artificial
  probe
  misc_feature (1)..(25): SEQ ID NO: 1790; WAN024FPD; Start 971; Stop 995
ctccaacgcttcagttattagaatc

SEQ ID NO: 305250 - DNA, 25 bp, Artificial
  probe
  misc_feature (1)..(25): SEQ ID NO: 1790; WAN024FPD; Start 970; Stop 994
tctccaacgcttcagttattagaat

SEQ ID NO: 305251 - DNA, 25 bp, Artificial
  probe
  misc_feature (1)..(25): SEQ ID NO: 1790; WAN024FPD; Start 969; Stop 993
atctccaacgcttcagttattagaa

SEQ ID NO: 305252 - DNA, 25 bp, Artificial
  probe
  misc_feature (1)..(25): SEQ ID NO: 1790; WAN024FPD; Start 968; Stop 992
aatctccaacgcttcagttattaga

SEQ ID NO: 305253 - DNA, 25 bp, Artificial
  probe
  misc_feature (1)..(25): SEQ ID NO: 1790; WAN024FPD; Start 967; Stop 991
gaatctccaacgcttcagttattag

SEQ ID NO: 305254 - DNA, 25 bp, Artificial
  probe
  misc_feature (1)..(25): SEQ ID NO: 1790; WAN024FPD; Start 946; Stop 970
gagaatgtagatgatatgcgtgaat

SEQ ID NO: 305255 - DNA, 25 bp, Artificial
  probe
  misc_feature (1)..(25): SEQ ID NO: 1790; WAN024FPD; Start 947; Stop 971
agaatgtagatgatatgcgtgaatc

SEQ ID NO: 305256 - DNA, 25 bp, Artificial
  probe
  misc_feature (1)..(25): SEQ ID NO: 1790; WAN024FPD; Start 13; Stop 37
atcggattaggttatattggattgc

SEQ ID NO: 305257 - DNA, 25 bp, Artificial
  probe
  misc_feature (1)..(25): SEQ ID NO: 1790; WAN024FPD; Start 985; Stop 1009
ttattagaatctatgagccgccatc

SEQ ID NO: 305258 - DNA, 25 bp, Artificial
  probe
  misc_feature (1)..(25): SEQ ID NO: 1790; WAN024FPD; Start 984; Stop 1008
gttattagaatctatgagccgccat

SEQ ID NO: 305259 - DNA, 25 bp, Artificial
  probe
  misc_feature (1)..(25): SEQ ID NO: 1790; WAN024FPD; Start 778; Stop 802
ccttggttcttagttggagattatc

SEQ ID NO: 305260 - DNA, 25 bp, Artificial
  probe
  misc_feature (1)..(25): SEQ ID NO: 1790; WAN024FPD; Start 1105; Stop 1129
gatattgttgtactgttggttggtc

SEQ ID NO: 305261 - DNA, 25 bp, Artificial
  probe
  misc_feature (1)..(25): SEQ ID NO: 1790; WAN024FPD; Start 1103; Stop 1127
ttgatattgttgtactgttggttgg

SEQ ID NO: 305262 - DNA, 25 bp, Artificial
  probe
  misc_feature (1)..(25): SEQ ID NO: 1790; WAN024FPD; Start 982; Stop 1006
cagttattagaatctatgagccgcc

SEQ ID NO: 305263 - DNA, 25 bp, Artificial
  probe
  misc_feature (1)..(25): SEQ ID NO: 1790; WAN024FPD; Start 578; Stop 602
atattagaactgcggagatgaccaa

SEQ ID NO: 305264 - DNA, 25 bp, Artificial
  probe
  misc_feature (1)..(25): SEQ ID NO: 1790; WAN024FPD; Start 458; Stop 482
ggaatatggtctatgaattggtgaa

SEQ ID NO: 305265 - DNA, 25 bp, Artificial
  probe
  misc_feature (1)..(25): SEQ ID NO: 1790; WAN024FPD; Start 1107; Stop 1131
tattgttgtactgttggttggtcat

SEQ ID NO: 305266 - DNA, 25 bp, Artificial
  probe
  misc_feature (1)..(25): SEQ ID NO: 1790; WAN024FPD; Start 1106; Stop 1130
atattgttgtactgttggttggtca

SEQ ID NO: 305267 - DNA, 25 bp, Artificial
  probe
  misc_feature (1)..(25): SEQ ID NO: 1790; WAN024FPD; Start 1104; Stop 1128
tgatattgttgtactgttggttggt

SEQ ID NO: 305268 - DNA, 25 bp, Artificial
  probe
  misc_feature (1)..(25): SEQ ID NO: 1790; WAN024FPD; Start 576; Stop 600
agatattagaactgcggagatgacc

SEQ ID NO: 305269 - DNA, 25 bp, Artificial
  probe
  misc_feature (1)..(25): SEQ ID NO: 1790; WAN024FPD; Start 981; Stop 1005
tcagttattagaatctatgagccgc

SEQ ID NO: 305270 - DNA, 25 bp, Artificial
  probe
  misc_feature (1)..(25): SEQ ID NO: 1790; WAN024FPD; Start 983; Stop 1007
agttattagaatctatgagccgcca

SEQ ID NO: 305271 - DNA, 25 bp, Artificial
  probe
  misc_feature (1)..(25): SEQ ID NO: 1790; WAN024FPD; Start 986; Stop 1010
tattagaatctatgagccgccatct

SEQ ID NO: 305272 - DNA, 25 bp, Artificial
  probe
  misc_feature (1)..(25): SEQ ID NO: 1790; WAN024FPD; Start 1101; Stop 1125
tgttgatattgttgtactgttggtt

SEQ ID NO: 305273 - DNA, 25 bp, Artificial
  probe
  misc_feature (1)..(25): SEQ ID NO: 1790; WAN024FPD; Start 1102; Stop 1126
gttgatattgttgtactgttggttg

SEQ ID NO: 305274 - DNA, 25 bp, Artificial
  probe
  misc_feature (1)..(25): SEQ ID NO: 1790; WAN024FPD; Start 1100; Stop 1124
atgttgatattgttgtactgttggt

SEQ ID NO: 305275 - DNA, 25 bp, Artificial
  probe
  misc_feature (1)..(25): SEQ ID NO: 1790; WAN024FPD; Start 973; Stop 997
ccaacgcttcagttattagaatcta

SEQ ID NO: 305276 - DNA, 25 bp, Artificial
  probe
  misc_feature (1)..(25): SEQ ID NO: 1790; WAN024FPD; Start 817; Stop 841
gttattgaacattctatgcgaacaa

SEQ ID NO: 305277 - DNA, 25 bp, Artificial
  probe
  misc_feature (1)..(25): SEQ ID NO: 1791; WAN024GM2; Start 435; Stop 459
tggcttatcaatacctggacattat

SEQ ID NO: 305278 - DNA, 25 bp, Artificial
  probe
  misc_feature (1)..(25): SEQ ID NO: 1791; WAN024GM2; Start 434; Stop 458
ttggcttatcaatacctggacatta

SEQ ID NO: 305279 - DNA, 25 bp, Artificial
  probe
  misc_feature (1)..(25): SEQ ID NO: 1791; WAN024GM2; Start 112; Stop 136
ccagcaacaacgactaacatcataa

SEQ ID NO: 305280 - DNA, 25 bp, Artificial
  probe
  misc_feature (1)..(25): SEQ ID NO: 1791; WAN024GM2; Start 436; Stop 460
ggcttatcaatacctggacattata

SEQ ID NO: 305281 - DNA, 25 bp, Artificial
  probe
  misc_feature (1)..(25): SEQ ID NO: 1791; WAN024GM2; Start 111; Stop 135
tccagcaacaacgactaacatcata

SEQ ID NO: 305282 - DNA, 25 bp, Artificial
  probe
  misc_feature (1)..(25): SEQ ID NO: 1791; WAN024GM2; Start 362; Stop 386
tcaattccaccattaccaatatgat

SEQ ID NO: 305283 - DNA, 25 bp, Artificial
  probe
  misc_feature (1)..(25): SEQ ID NO: 1791; WAN024GM2; Start 361; Stop 385
atcaattccaccattaccaatatga

SEQ ID NO: 305284 - DNA, 25 bp, Artificial
  probe
  misc_feature (1)..(25): SEQ ID NO: 1791; WAN024GM2; Start 107; Stop 131
ttactccagcaacaacgactaacat

SEQ ID NO: 305285 - DNA, 25 bp, Artificial
  probe
  misc_feature (1)..(25): SEQ ID NO: 1791; WAN024GM2; Start 237; Stop 261
tattccgtatgttgttggaggtatt

SEQ ID NO: 305286 - DNA, 25 bp, Artificial
  probe
  misc_feature (1)..(25): SEQ ID NO: 1791; WAN024GM2; Start 236; Stop 260
atattccgtatgttgttggaggtat

SEQ ID NO: 305287 - DNA, 25 bp, Artificial
  probe
  misc_feature (1)..(25): SEQ ID NO: 1791; WAN024GM2; Start 238; Stop 262
attccgtatgttgttggaggtattg

SEQ ID NO: 305288 - DNA, 25 bp, Artificial
  probe
  misc_feature (1)..(25): SEQ ID NO: 1791; WAN024GM2; Start 360; Stop 384
aatcaattccaccattaccaatatg

SEQ ID NO: 305289 - DNA, 25 bp, Artificial
  probe
  misc_feature (1)..(25): SEQ ID NO: 1791; WAN024GM2; Start 104; Stop 128
gacttactccagcaacaacgactaa

SEQ ID NO: 305290 - DNA, 25 bp, Artificial
  probe
  misc_feature (1)..(25): SEQ ID NO: 1791; WAN024GM2; Start 113; Stop 137
cagcaacaacgactaacatcataaa

SEQ ID NO: 305291 - DNA, 25 bp, Artificial
  probe
  misc_feature (1)..(25): SEQ ID NO: 1791; WAN024GM2; Start 108; Stop 132
tactccagcaacaacgactaacatc

SEQ ID NO: 305292 - DNA, 25 bp, Artificial
  probe
  misc_feature (1)..(25): SEQ ID NO: 1791; WAN024GM2; Start 631; Stop 655
ctacacgctggattaggtatttaca

SEQ ID NO: 305293 - DNA, 25 bp, Artificial
  probe
  misc_feature (1)..(25): SEQ ID NO: 1791; WAN024GM2; Start 242; Stop 266
cgtatgttgttggaggtattgaaat

SEQ ID NO: 305294 - DNA, 25 bp, Artificial
  probe
  misc_feature (1)..(25): SEQ ID NO: 1791; WAN024GM2; Start 1129; Stop 1153
aacaaacatcgtggaagtataggag

SEQ ID NO: 305295 - DNA, 25 bp, Artificial
  probe
  misc_feature (1)..(25): SEQ ID NO: 1791; WAN024GM2; Start 632; Stop 656
tacacgctggattaggtatttacac

SEQ ID NO: 305296 - DNA, 25 bp, Artificial
  probe
  misc_feature (1)..(25): SEQ ID NO: 1791; WAN024GM2; Start 635; Stop 659
acgctggattaggtatttacacttc

SEQ ID NO: 305297 - DNA, 25 bp, Artificial
  probe
  misc_feature (1)..(25): SEQ ID NO: 1791; WAN024GM2; Start 1128; Stop 1152
caacaaacatcgtggaagtatagga

SEQ ID NO: 305298 - DNA, 25 bp, Artificial
  probe
  misc_feature (1)..(25): SEQ ID NO: 1791; WAN024GM2; Start 1120; Stop 1144
ttaccttacaacaaacatcgtggaa

SEQ ID NO: 305299 - DNA, 25 bp, Artificial
  probe
  misc_feature (1)..(25): SEQ ID NO: 1791; WAN024GM2; Start 162; Stop 186
atacgaaactggtgatgaatttagc

SEQ ID NO: 305300 - DNA, 25 bp, Artificial
  probe
  misc_feature (1)..(25): SEQ ID NO: 1791; WAN024GM2; Start 1119; Stop 1143
tttaccttacaacaaacatcgtgga

SEQ ID NO: 305301 - DNA, 25 bp, Artificial
  probe
  misc_feature (1)..(25): SEQ ID NO: 1791; WAN024GM2; Start 698; Stop 722
cttatatcggagaaattggacacac

SEQ ID NO: 305302 - DNA, 25 bp, Artificial
  probe
  misc_feature (1)..(25): SEQ ID NO: 1791; WAN024GM2; Start 697; Stop 721
ccttatatcggagaaattggacaca

SEQ ID NO: 305303 - DNA, 25 bp, Artificial
  probe
  misc_feature (1)..(25): SEQ ID NO: 1791; WAN024GM2; Start 634; Stop 658
cacgctggattaggtatttacactt

SEQ ID NO: 305304 - DNA, 25 bp, Artificial
  probe
  misc_feature (1)..(25): SEQ ID NO: 1791; WAN024GM2; Start 1124; Stop 1148
cttacaacaaacatcgtggaagtat

SEQ ID NO: 305305 - DNA, 25 bp, Artificial
  probe
  misc_feature (1)..(25): SEQ ID NO: 1791; WAN024GM2; Start 699; Stop 723
ttatatcggagaaattggacacacc

SEQ ID NO: 305306 - DNA, 25 bp, Artificial
  probe
  misc_feature (1)..(25): SEQ ID NO: 1791; WAN024GM2; Start 1127; Stop 1151
acaacaaacatcgtggaagtatagg

SEQ ID NO: 305307 - DNA, 25 bp, Artificial
  probe
  misc_feature (1)..(25): SEQ ID NO: 1791; WAN024GM2; Start 106; Stop 130
cttactccagcaacaacgactaaca

SEQ ID NO: 305308 - DNA, 25 bp, Artificial
  probe
  misc_feature (1)..(25): SEQ ID NO: 1791; WAN024GM2; Start 105; Stop 129
acttactccagcaacaacgactaac

SEQ ID NO: 305309 - DNA, 25 bp, Artificial
  probe
  misc_feature (1)..(25): SEQ ID NO: 1791; WAN024GM2; Start 230; Stop 254
cagataatattccgtatgttgttgg

SEQ ID NO: 305310 - DNA, 25 bp, Artificial
  probe
  misc_feature (1)..(25): SEQ ID NO: 1792; WAN024GB7; Start 362; Stop 386
gtctctaccttgcgattatcttctt

SEQ ID NO: 305311 - DNA, 25 bp, Artificial
  probe
  misc_feature (1)..(25): SEQ ID NO: 1792; WAN024GB7; Start 360; Stop 384
ctgtctctaccttgcgattatcttc

SEQ ID NO: 305312 - DNA, 25 bp, Artificial
  probe
  misc_feature (1)..(25): SEQ ID NO: 1792; WAN024GB7; Start 357; Stop 381
cttctgtctctaccttgcgattatc

SEQ ID NO: 305313 - DNA, 25 bp, Artificial
  probe
  misc_feature (1)..(25): SEQ ID NO: 1792; WAN024GB7; Start 356; Stop 380
tcttctgtctctaccttgcgattat

SEQ ID NO: 305314 - DNA, 25 bp, Artificial
  probe
  misc_feature (1)..(25): SEQ ID NO: 1792; WAN024GB7; Start 361; Stop 385
tgtctctaccttgcgattatcttct

SEQ ID NO: 305315 - DNA, 25 bp, Artificial
  probe
  misc_feature (1)..(25): SEQ ID NO: 1792; WAN024GB7; Start 359; Stop 383
tctgtctctaccttgcgattatctt

SEQ ID NO: 305316 - DNA, 25 bp, Artificial
  probe
  misc_feature (1)..(25): SEQ ID NO: 1792; WAN024GB7; Start 358; Stop 382
ttctgtctctaccttgcgattatct

SEQ ID NO: 305317 - DNA, 25 bp, Artificial
  probe
  misc_feature (1)..(25): SEQ ID NO: 1792; WAN024GB7; Start 355; Stop 379
atcttctgtctctaccttgcgatta

SEQ ID NO: 305318 - DNA, 25 bp, Artificial
  probe
  misc_feature (1)..(25): SEQ ID NO: 1792; WAN024GB7; Start 354; Stop 378
tatcttctgtctctaccttgcgatt

SEQ ID NO: 305319 - DNA, 25 bp, Artificial
  probe
  misc_feature (1)..(25): SEQ ID NO: 1792; WAN024GB7; Start 353; Stop 377
ctatcttctgtctctaccttgcgat

SEQ ID NO: 305320 - DNA, 25 bp, Artificial
  probe
  misc_feature (1)..(25): SEQ ID NO: 1792; WAN024GB7; Start 56; Stop 80
gtctctggattggacaagtattctt

SEQ ID NO: 305321 - DNA, 25 bp, Artificial
  probe
  misc_feature (1)..(25): SEQ ID NO: 1792; WAN024GB7; Start 545; Stop 569
tcattcgtcataaggacaatatagc

SEQ ID NO: 305322 - DNA, 25 bp, Artificial
  probe
  misc_feature (1)..(25): SEQ ID NO: 1792; WAN024GB7; Start 55; Stop 79
ggtctctggattggacaagtattct

SEQ ID NO: 305323 - DNA, 25 bp, Artificial
  probe
  misc_feature (1)..(25): SEQ ID NO: 1792; WAN024GB7; Start 390; Stop 414
agctctctatcttggcagtatgatt

SEQ ID NO: 305324 - DNA, 25 bp, Artificial
  probe
  misc_feature (1)..(25): SEQ ID NO: 1792; WAN024GB7; Start 364; Stop 388
ctctaccttgcgattatcttctttg

SEQ ID NO: 305325 - DNA, 25 bp, Artificial
  probe
  misc_feature (1)..(25): SEQ ID NO: 1792; WAN024GB7; Start 363; Stop 387
tctctaccttgcgattatcttcttt

SEQ ID NO: 305326 - DNA, 25 bp, Artificial
  probe
  misc_feature (1)..(25): SEQ ID NO: 1792; WAN024GB7; Start 367; Stop 391
taccttgcgattatcttctttggag

SEQ ID NO: 305327 - DNA, 25 bp, Artificial
  probe
  misc_feature (1)..(25): SEQ ID NO: 1792; WAN024GB7; Start 366; Stop 390
ctaccttgcgattatcttctttgga

SEQ ID NO: 305328 - DNA, 25 bp, Artificial
  probe
  misc_feature (1)..(25): SEQ ID NO: 1792; WAN024GB7; Start 365; Stop 389
tctaccttgcgattatcttctttgg

SEQ ID NO: 305329 - DNA, 25 bp, Artificial
  probe
  misc_feature (1)..(25): SEQ ID NO: 1792; WAN024GB7; Start 54; Stop 78
tggtctctggattggacaagtattc

SEQ ID NO: 305330 - DNA, 25 bp, Artificial
  probe
  misc_feature (1)..(25): SEQ ID NO: 1792; WAN024GB7; Start 53; Stop 77
ctggtctctggattggacaagtatt

SEQ ID NO: 305331 - DNA, 25 bp, Artificial
  probe
  misc_feature (1)..(25): SEQ ID NO: 1792; WAN024GB7; Start 391; Stop 415
gctctctatcttggcagtatgattt

SEQ ID NO: 305332 - DNA, 25 bp, Artificial
  probe
  misc_feature (1)..(25): SEQ ID NO: 1792; WAN024GB7; Start 59; Stop 83
tctggattggacaagtattctttca

SEQ ID NO: 305333 - DNA, 25 bp, Artificial
  probe
  misc_feature (1)..(25): SEQ ID NO: 1792; WAN024GB7; Start 394; Stop 418
ctctatcttggcagtatgatttcac

SEQ ID NO: 305334 - DNA, 25 bp, Artificial
  probe
  misc_feature (1)..(25): SEQ ID NO: 1792; WAN024GB7; Start 393; Stop 417
tctctatcttggcagtatgatttca

SEQ ID NO: 305335 - DNA, 25 bp, Artificial
  probe
  misc_feature (1)..(25): SEQ ID NO: 1792; WAN024GB7; Start 57; Stop 81
tctctggattggacaagtattcttt

SEQ ID NO: 305336 - DNA, 25 bp, Artificial
  probe
  misc_feature (1)..(25): SEQ ID NO: 1792; WAN024GB7; Start 550; Stop 574
cgtcataaggacaatatagctcgta

SEQ ID NO: 305337 - DNA, 25 bp, Artificial
  probe
  misc_feature (1)..(25): SEQ ID NO: 1792; WAN024GB7; Start 539; Stop 563
tgattatcattcgtcataaggacaa

SEQ ID NO: 305338 - DNA, 25 bp, Artificial
  probe
  misc_feature (1)..(25): SEQ ID NO: 1792; WAN024GB7; Start 538; Stop 562
ttgattatcattcgtcataaggaca

SEQ ID NO: 305339 - DNA, 25 bp, Artificial
  probe
  misc_feature (1)..(25): SEQ ID NO: 1792; WAN024GB7; Start 58; Stop 82
ctctggattggacaagtattctttc

SEQ ID NO: 305340 - DNA, 25 bp, Artificial
  probe
  misc_feature (1)..(25): SEQ ID NO: 1792; WAN024GB7; Start 548; Stop 572
ttcgtcataaggacaatatagctcg

SEQ ID NO: 305341 - DNA, 25 bp, Artificial
  probe
  misc_feature (1)..(25): SEQ ID NO: 1792; WAN024GB7; Start 392; Stop 416
ctctctatcttggcagtatgatttc

SEQ ID NO: 305342 - DNA, 25 bp, Artificial
  probe
  misc_feature (1)..(25): SEQ ID NO: 1792; WAN024GB7; Start 352; Stop 376
cctatcttctgtctctaccttgcga

SEQ ID NO: 305343 - DNA, 25 bp, Artificial
  probe
  misc_feature (1)..(25): SEQ ID NO: 1793; WAN024AWI; Start 1154; Stop 1178
aagatgctacttacttgtcaaacgc

SEQ ID NO: 305344 - DNA, 25 bp, Artificial
  probe
  misc_feature (1)..(25): SEQ ID NO: 1793; WAN024AWI; Start 1155; Stop 1179
agatgctacttacttgtcaaacgcc

SEQ ID NO: 305345 - DNA, 25 bp, Artificial
  probe
  misc_feature (1)..(25): SEQ ID NO: 1793; WAN024AWI; Start 1153; Stop 1177
caagatgctacttacttgtcaaacg

SEQ ID NO: 305346 - DNA, 25 bp, Artificial
  probe
  misc_feature (1)..(25): SEQ ID NO: 1793; WAN024AWI; Start 1156; Stop 1180
gatgctacttacttgtcaaacgccc

SEQ ID NO: 305347 - DNA, 25 bp, Artificial
  probe
  misc_feature (1)..(25): SEQ ID NO: 1793; WAN024AWI; Start 1152; Stop 1176
gcaagatgctacttacttgtcaaac

SEQ ID NO: 305348 - DNA, 25 bp, Artificial
  probe
  misc_feature (1)..(25): SEQ ID NO: 1793; WAN024AWI; Start 1160; Stop 1184
ctacttacttgtcaaacgcccgtca

SEQ ID NO: 305349 - DNA, 25 bp, Artificial
  probe
  misc_feature (1)..(25): SEQ ID NO: 1793; WAN024AWI; Start 1315; Stop 1339
gatgctgctccagatgaactcatca

SEQ ID NO: 305350 - DNA, 25 bp, Artificial
  probe
  misc_feature (1)..(25): SEQ ID NO: 1793; WAN024AWI; Start 1316; Stop 1340
atgctgctccagatgaactcatcac

SEQ ID NO: 305351 - DNA, 25 bp, Artificial
  probe
  misc_feature (1)..(25): SEQ ID NO: 1794; WAN024FSD; Start 280; Stop 304
attattattgatgccaagcgtatgc

SEQ ID NO: 305352 - DNA, 25 bp, Artificial
  probe
  misc_feature (1)..(25): SEQ ID NO: 1794; WAN024FSD; Start 343; Stop 367
cctcgtagttatcgtaagcaagaac

SEQ ID NO: 305353 - DNA, 25 bp, Artificial
  probe
  misc_feature (1)..(25): SEQ ID NO: 1794; WAN024FSD; Start 279; Stop 303
aattattattgatgccaagcgtatg

SEQ ID NO: 305354 - DNA, 25 bp, Artificial
  probe
  misc_feature (1)..(25): SEQ ID NO: 1794; WAN024FSD; Start 85; Stop 109
gaacacaatattatgaccagtcctt

SEQ ID NO: 305355 - DNA, 25 bp, Artificial
  probe
  misc_feature (1)..(25): SEQ ID NO: 1794; WAN024FSD; Start 376; Stop 400
gcaagaatgagagctggtattagtt

SEQ ID NO: 305356 - DNA, 25 bp, Artificial
  probe
  misc_feature (1)..(25): SEQ ID NO: 1794; WAN024FSD; Start 209; Stop 233
atgtagagagtatttcggtatcgga

SEQ ID NO: 305357 - DNA, 25 bp, Artificial
  probe
  misc_feature (1)..(25): SEQ ID NO: 1794; WAN024FSD; Start 208; Stop 232
gatgtagagagtatttcggtatcgg

SEQ ID NO: 305358 - DNA, 25 bp, Artificial
  probe
  misc_feature (1)..(25): SEQ ID NO: 1794; WAN024FSD; Start 207; Stop 231
tgatgtagagagtatttcggtatcg

SEQ ID NO: 305359 - DNA, 25 bp, Artificial
  probe
  misc_feature (1)..(25): SEQ ID NO: 1794; WAN024FSD; Start 3; Stop 27
gattacactatttctatcaccgagc

SEQ ID NO: 305360 - DNA, 25 bp, Artificial
  probe
  misc_feature (1)..(25): SEQ ID NO: 1794; WAN024FSD; Start 211; Stop 235
gtagagagtatttcggtatcggaat

SEQ ID NO: 305361 - DNA, 25 bp, Artificial
  probe
  misc_feature (1)..(25): SEQ ID NO: 1794; WAN024FSD; Start 277; Stop 301
ccaattattattgatgccaagcgta

SEQ ID NO: 305362 - DNA, 25 bp, Artificial
  probe
  misc_feature (1)..(25): SEQ ID NO: 1794; WAN024FSD; Start 272; Stop 296
gtcgtccaattattattgatgccaa

SEQ ID NO: 305363 - DNA, 25 bp, Artificial
  probe
  misc_feature (1)..(25): SEQ ID NO: 1794; WAN024FSD; Start 273; Stop 297
tcgtccaattattattgatgccaag

SEQ ID NO: 305364 - DNA, 25 bp, Artificial
  probe
  misc_feature (1)..(25): SEQ ID NO: 1794; WAN024FSD; Start 268; Stop 292
ttgcgtcgtccaattattattgatg

SEQ ID NO: 305365 - DNA, 25 bp, Artificial
  probe
  misc_feature (1)..(25): SEQ ID NO: 1794; WAN024FSD; Start 210; Stop 234
tgtagagagtatttcggtatcggaa

SEQ ID NO: 305366 - DNA, 25 bp, Artificial
  probe
  misc_feature (1)..(25): SEQ ID NO: 1794; WAN024FSD; Start 225; Stop 249
ggtatcggaattgcttcatttgatt

SEQ ID NO: 305367 - DNA, 25 bp, Artificial
  probe
  misc_feature (1)..(25): SEQ ID NO: 1794; WAN024FSD; Start 213; Stop 237
agagagtatttcggtatcggaattg

SEQ ID NO: 305368 - DNA, 25 bp, Artificial
  probe
  misc_feature (1)..(25): SEQ ID NO: 1794; WAN024FSD; Start 377; Stop 401
caagaatgagagctggtattagtta

SEQ ID NO: 305369 - DNA, 25 bp, Artificial
  probe
  misc_feature (1)..(25): SEQ ID NO: 1794; WAN024FSD; Start 84; Stop 108
ggaacacaatattatgaccagtcct

SEQ ID NO: 305370 - DNA, 25 bp, Artificial
  probe
  misc_feature (1)..(25): SEQ ID NO: 1794; WAN024FSD; Start 226; Stop 250
gtatcggaattgcttcatttgattg

SEQ ID NO: 305371 - DNA, 25 bp, Artificial
  probe
  misc_feature (1)..(25): SEQ ID NO: 1794; WAN024FSD; Start 314; Stop 338
ttaatgaagatgagattcgtgcttt

SEQ ID NO: 305372 - DNA, 25 bp, Artificial
  probe
  misc_feature (1)..(25): SEQ ID NO: 1794; WAN024FSD; Start 313; Stop 337
tttaatgaagatgagattcgtgctt

SEQ ID NO: 305373 - DNA, 25 bp, Artificial
  probe
  misc_feature (1)..(25): SEQ ID NO: 1794; WAN024FSD; Start 219; Stop 243
tatttcggtatcggaattgcttcat

SEQ ID NO: 305374 - DNA, 25 bp, Artificial
  probe
  misc_feature (1)..(25): SEQ ID NO: 1794; WAN024FSD; Start 244; Stop 268
ttgattgagcagtatcctagtcttt

SEQ ID NO: 305375 - DNA, 25 bp, Artificial
  probe
  misc_feature (1)..(25): SEQ ID NO: 1794; WAN024FSD; Start 243; Stop 267
tttgattgagcagtatcctagtctt

SEQ ID NO: 305376 - DNA, 25 bp, Artificial
  probe
  misc_feature (1)..(25): SEQ ID NO: 1794; WAN024FSD; Start 275; Stop 299
gtccaattattattgatgccaagcg

SEQ ID NO: 305377 - DNA, 25 bp, Artificial
  probe
  misc_feature (1)..(25): SEQ ID NO: 1794; WAN024FSD; Start 274; Stop 298
cgtccaattattattgatgccaagc

SEQ ID NO: 305378 - DNA, 25 bp, Artificial
  probe
  misc_feature (1)..(25): SEQ ID NO: 1794; WAN024FSD; Start 242; Stop 266
atttgattgagcagtatcctagtct

SEQ ID NO: 305379 - DNA, 25 bp, Artificial
  probe
  misc_feature (1)..(25): SEQ ID NO: 1794; WAN024FSD; Start 241; Stop 265
catttgattgagcagtatcctagtc

SEQ ID NO: 305380 - DNA, 25 bp, Artificial
  probe
  misc_feature (1)..(25): SEQ ID NO: 1794; WAN024FSD; Start 82; Stop 106
gtggaacacaatattatgaccagtc

SEQ ID NO: 305381 - DNA, 25 bp, Artificial
  probe
  misc_feature (1)..(25): SEQ ID NO: 1794; WAN024FSD; Start 228; Stop 252
atcggaattgcttcatttgattgag

SEQ ID NO: 305382 - DNA, 25 bp, Artificial
  probe
  misc_feature (1)..(25): SEQ ID NO: 1794; WAN024FSD; Start 212; Stop 236
tagagagtatttcggtatcggaatt

SEQ ID NO: 305383 - DNA, 25 bp, Artificial
  probe
  misc_feature (1)..(25): SEQ ID NO: 1794; WAN024FSD; Start 83; Stop 107
tggaacacaatattatgaccagtcc

SEQ ID NO: 305384 - DNA, 25 bp, Artificial
  probe
  misc_feature (1)..(25): SEQ ID NO: 1795; WAN024DE8; Start 716; Stop 740
atgatacggatacgactatgttgag

SEQ ID NO: 305385 - DNA, 25 bp, Artificial
  probe
  misc_feature (1)..(25): SEQ ID NO: 1795; WAN024DE8; Start 718; Stop 742
gatacggatacgactatgttgagac

SEQ ID NO: 305386 - DNA, 25 bp, Artificial
  probe
  misc_feature (1)..(25): SEQ ID NO: 1795; WAN024DE8; Start 715; Stop 739
aatgatacggatacgactatgttga

SEQ ID NO: 305387 - DNA, 25 bp, Artificial
  probe
  misc_feature (1)..(25): SEQ ID NO: 1795; WAN024DE8; Start 719; Stop 743
atacggatacgactatgttgagact

SEQ ID NO: 305388 - DNA, 25 bp, Artificial
  probe
  misc_feature (1)..(25): SEQ ID NO: 1795; WAN024DE8; Start 717; Stop 741
tgatacggatacgactatgttgaga

SEQ ID NO: 305389 - DNA, 25 bp, Artificial
  probe
  misc_feature (1)..(25): SEQ ID NO: 1795; WAN024DE8; Start 720; Stop 744
tacggatacgactatgttgagactt

SEQ ID NO: 305390 - DNA, 25 bp, Artificial
  probe
  misc_feature (1)..(25): SEQ ID NO: 1795; WAN024DE8; Start 881; Stop 905
acaattcaacctctaatgaccttct

SEQ ID NO: 305391 - DNA, 25 bp, Artificial
  probe
  misc_feature (1)..(25): SEQ ID NO: 1795; WAN024DE8; Start 802; Stop 826
tcgctgtctcaagataatgaagaag

SEQ ID NO: 305392 - DNA, 25 bp, Artificial
  probe
  misc_feature (1)..(25): SEQ ID NO: 1795; WAN024DE8; Start 801; Stop 825
ctcgctgtctcaagataatgaagaa

SEQ ID NO: 305393 - DNA, 25 bp, Artificial
  probe
  misc_feature (1)..(25): SEQ ID NO: 1795; WAN024DE8; Start 878; Stop 902
actacaattcaacctctaatgacct

SEQ ID NO: 305394 - DNA, 25 bp, Artificial
  probe
  misc_feature (1)..(25): SEQ ID NO: 1795; WAN024DE8; Start 877; Stop 901
gactacaattcaacctctaatgacc

SEQ ID NO: 305395 - DNA, 25 bp, Artificial
  probe
  misc_feature (1)..(25): SEQ ID NO: 1795; WAN024DE8; Start 884; Stop 908
attcaacctctaatgaccttcttgc

SEQ ID NO: 305396 - DNA, 25 bp, Artificial
  probe
  misc_feature (1)..(25): SEQ ID NO: 1795; WAN024DE8; Start 883; Stop 907
aattcaacctctaatgaccttcttg

SEQ ID NO: 305397 - DNA, 25 bp, Artificial
  probe
  misc_feature (1)..(25): SEQ ID NO: 1795; WAN024DE8; Start 882; Stop 906
caattcaacctctaatgaccttctt

SEQ ID NO: 305398 - DNA, 25 bp, Artificial
  probe
  misc_feature (1)..(25): SEQ ID NO: 1795; WAN024DE8; Start 1072; Stop 1096
gatgctgtaatctcaatgcctagtg

SEQ ID NO: 305399 - DNA, 25 bp, Artificial
  probe
  misc_feature (1)..(25): SEQ ID NO: 1795; WAN024DE8; Start 876; Stop 900
tgactacaattcaacctctaatgac

SEQ ID NO: 305400 - DNA, 25 bp, Artificial
  probe
  misc_feature (1)..(25): SEQ ID NO: 1795; WAN024DE8; Start 880; Stop 904
tacaattcaacctctaatgaccttc

SEQ ID NO: 305401 - DNA, 25 bp, Artificial
  probe
  misc_feature (1)..(25): SEQ ID NO: 1795; WAN024DE8; Start 879; Stop 903
ctacaattcaacctctaatgacctt

SEQ ID NO: 305402 - DNA, 25 bp, Artificial
  probe
  misc_feature (1)..(25): SEQ ID NO: 1795; WAN024DE8; Start 800; Stop 824
actcgctgtctcaagataatgaaga

SEQ ID NO: 305403 - DNA, 25 bp, Artificial
  probe
  misc_feature (1)..(25): SEQ ID NO: 1795; WAN024DE8; Start 721; Stop 745
acggatacgactatgttgagacttg

SEQ ID NO: 305404 - DNA, 25 bp, Artificial
  probe
  misc_feature (1)..(25): SEQ ID NO: 1795; WAN024DE8; Start 1079; Stop 1103
taatctcaatgcctagtggtgtgtt

SEQ ID NO: 305405 - DNA, 25 bp, Artificial
  probe
  misc_feature (1)..(25): SEQ ID NO: 1795; WAN024DE8; Start 799; Stop 823
gactcgctgtctcaagataatgaag

SEQ ID NO: 305406 - DNA, 25 bp, Artificial
  probe
  misc_feature (1)..(25): SEQ ID NO: 1795; WAN024DE8; Start 324; Stop 348
ttcacgatatatgcgagaagctatt

SEQ ID NO: 305407 - DNA, 25 bp, Artificial
  probe
  misc_feature (1)..(25): SEQ ID NO: 1795; WAN024DE8; Start 1071; Stop 1095
tgatgctgtaatctcaatgcctagt

SEQ ID NO: 305408 - DNA, 25 bp, Artificial
  probe
  misc_feature (1)..(25): SEQ ID NO: 1795; WAN024DE8; Start 1076; Stop 1100
ctgtaatctcaatgcctagtggtgt

SEQ ID NO: 305409 - DNA, 25 bp, Artificial
  probe
  misc_feature (1)..(25): SEQ ID NO: 1795; WAN024DE8; Start 1211; Stop 1235
tggatgataagcgacaaccgattag

SEQ ID NO: 305410 - DNA, 25 bp, Artificial
  probe
  misc_feature (1)..(25): SEQ ID NO: 1795; WAN024DE8; Start 1210; Stop 1234
ttggatgataagcgacaaccgatta

SEQ ID NO: 305411 - DNA, 25 bp, Artificial
  probe
  misc_feature (1)..(25): SEQ ID NO: 1795; WAN024DE8; Start 798; Stop 822
tgactcgctgtctcaagataatgaa

SEQ ID NO: 305412 - DNA, 25 bp, Artificial
  probe
  misc_feature (1)..(25): SEQ ID NO: 1795; WAN024DE8; Start 1124; Stop 1148
caactgccattctcatctttacaaa

SEQ ID NO: 305413 - DNA, 25 bp, Artificial
  probe
  misc_feature (1)..(25): SEQ ID NO: 1795; WAN024DE8; Start 1121; Stop 1145
tttcaactgccattctcatctttac

SEQ ID NO: 305414 - DNA, 25 bp, Artificial
  probe
  misc_feature (1)..(25): SEQ ID NO: 1795; WAN024DE8; Start 1078; Stop 1102
gtaatctcaatgcctagtggtgtgt

SEQ ID NO: 305415 - DNA, 25 bp, Artificial
  probe
  misc_feature (1)..(25): SEQ ID NO: 1795; WAN024DE8; Start 1077; Stop 1101
tgtaatctcaatgcctagtggtgtg

SEQ ID NO: 305416 - DNA, 25 bp, Artificial
  probe
  misc_feature (1)..(25): SEQ ID NO: 1795; WAN024DE8; Start 722; Stop 746
cggatacgactatgttgagacttgg

SEQ ID NO: 305417 - DNA, 25 bp, Artificial
  probe
  misc_feature (1)..(25): SEQ ID NO: 1796; WAN024C9O; Start 43; Stop 67
aatactgcatcgctaagaacaactt

SEQ ID NO: 305418 - DNA, 25 bp, Artificial
  probe
  misc_feature (1)..(25): SEQ ID NO: 1796; WAN024C9O; Start 148; Stop 172
gctttaactgctgatttgatagtga

SEQ ID NO: 305419 - DNA, 25 bp, Artificial
  probe
  misc_feature (1)..(25): SEQ ID NO: 1796; WAN024C9O; Start 12; Stop 36
aaacacaactgattcatttggttcg

SEQ ID NO: 305420 - DNA, 25 bp, Artificial
  probe
  misc_feature (1)..(25): SEQ ID NO: 1796; WAN024C9O; Start 155; Stop 179
ctgctgatttgatagtgataagaga

SEQ ID NO: 305421 - DNA, 25 bp, Artificial
  probe
  misc_feature (1)..(25): SEQ ID NO: 1796; WAN024C9O; Start 44; Stop 68
atactgcatcgctaagaacaacttg

SEQ ID NO: 305422 - DNA, 25 bp, Artificial
  probe
  misc_feature (1)..(25): SEQ ID NO: 1796; WAN024C9O; Start 154; Stop 178
actgctgatttgatagtgataagag

SEQ ID NO: 305423 - DNA, 25 bp, Artificial
  probe
  misc_feature (1)..(25): SEQ ID NO: 1796; WAN024C9O; Start 156; Stop 180
tgctgatttgatagtgataagagat

SEQ ID NO: 305424 - DNA, 25 bp, Artificial
  probe
  misc_feature (1)..(25): SEQ ID NO: 1796; WAN024C9O; Start 153; Stop 177
aactgctgatttgatagtgataaga

SEQ ID NO: 305425 - DNA, 25 bp, Artificial
  probe
  misc_feature (1)..(25): SEQ ID NO: 1796; WAN024C9O; Start 16; Stop 40
acaactgattcatttggttcgatac

SEQ ID NO: 305426 - DNA, 25 bp, Artificial
  probe
  misc_feature (1)..(25): SEQ ID NO: 1796; WAN024C9O; Start 15; Stop 39
cacaactgattcatttggttcgata

SEQ ID NO: 305427 - DNA, 25 bp, Artificial
  probe
  misc_feature (1)..(25): SEQ ID NO: 1796; WAN024C9O; Start 37; Stop 61
ataccaaatactgcatcgctaagaa

SEQ ID NO: 305428 - DNA, 25 bp, Artificial
  probe
  misc_feature (1)..(25): SEQ ID NO: 1796; WAN024C9O; Start 36; Stop 60
gataccaaatactgcatcgctaaga

SEQ ID NO: 305429 - DNA, 25 bp, Artificial
  probe
  misc_feature (1)..(25): SEQ ID NO: 1796; WAN024C9O; Start 42; Stop 66
aaatactgcatcgctaagaacaact

SEQ ID NO: 305430 - DNA, 25 bp, Artificial
  probe
  misc_feature (1)..(25): SEQ ID NO: 1796; WAN024C9O; Start 41; Stop 65
caaatactgcatcgctaagaacaac

SEQ ID NO: 305431 - DNA, 25 bp, Artificial
  probe
  misc_feature (1)..(25): SEQ ID NO: 1796; WAN024C9O; Start 149; Stop 173
ctttaactgctgatttgatagtgat

SEQ ID NO: 305432 - DNA, 25 bp, Artificial
  probe
  misc_feature (1)..(25): SEQ ID NO: 1796; WAN024C9O; Start 38; Stop 62
taccaaatactgcatcgctaagaac

SEQ ID NO: 305433 - DNA, 25 bp, Artificial
  probe
  misc_feature (1)..(25): SEQ ID NO: 1796; WAN024C9O; Start 83; Stop 107
cagtttggtcaaataatgttacgtt

SEQ ID NO: 305434 - DNA, 25 bp, Artificial
  probe
  misc_feature (1)..(25): SEQ ID NO: 1796; WAN024C9O; Start 14; Stop 38
acacaactgattcatttggttcgat

SEQ ID NO: 305435 - DNA, 25 bp, Artificial
  probe
  misc_feature (1)..(25): SEQ ID NO: 1796; WAN024C9O; Start 177; Stop 201
agatttcttagcacctggtacgtta

SEQ ID NO: 305436 - DNA, 25 bp, Artificial
  probe
  misc_feature (1)..(25): SEQ ID NO: 1796; WAN024C9O; Start 178; Stop 202
gatttcttagcacctggtacgttac

SEQ ID NO: 305437 - DNA, 25 bp, Artificial
  probe
  misc_feature (1)..(25): SEQ ID NO: 1796; WAN024C9O; Start 157; Stop 181
gctgatttgatagtgataagagatt

SEQ ID NO: 305438 - DNA, 25 bp, Artificial
  probe
  misc_feature (1)..(25): SEQ ID NO: 1796; WAN024C9O; Start 13; Stop 37
aacacaactgattcatttggttcga

SEQ ID NO: 305439 - DNA, 25 bp, Artificial
  probe
  misc_feature (1)..(25): SEQ ID NO: 1796; WAN024C9O; Start 114; Stop 138
tgtgactgatttcccctttctttat

SEQ ID NO: 305440 - DNA, 25 bp, Artificial
  probe
  misc_feature (1)..(25): SEQ ID NO: 1796; WAN024C9O; Start 113; Stop 137
ttgtgactgatttcccctttcttta

SEQ ID NO: 305441 - DNA, 25 bp, Artificial
  probe
  misc_feature (1)..(25): SEQ ID NO: 1796; WAN024C9O; Start 101; Stop 125
ttacgtttgccattgtgactgattt

SEQ ID NO: 305442 - DNA, 25 bp, Artificial
  probe
  misc_feature (1)..(25): SEQ ID NO: 1796; WAN024C9O; Start 40; Stop 64
ccaaatactgcatcgctaagaacaa

SEQ ID NO: 305443 - DNA, 25 bp, Artificial
  probe
  misc_feature (1)..(25): SEQ ID NO: 1796; WAN024C9O; Start 45; Stop 69
tactgcatcgctaagaacaacttgg

SEQ ID NO: 305444 - DNA, 25 bp, Artificial
  probe
  misc_feature (1)..(25): SEQ ID NO: 1796; WAN024C9O; Start 11; Stop 35
caaacacaactgattcatttggttc

SEQ ID NO: 305445 - DNA, 25 bp, Artificial
  probe
  misc_feature (1)..(25): SEQ ID NO: 1796; WAN024C9O; Start 10; Stop 34
tcaaacacaactgattcatttggtt

SEQ ID NO: 305446 - DNA, 25 bp, Artificial
  probe
  misc_feature (1)..(25): SEQ ID NO: 1796; WAN024C9O; Start 9; Stop 33
atcaaacacaactgattcatttggt

SEQ ID NO: 305447 - DNA, 25 bp, Artificial
  probe
  misc_feature (1)..(25): SEQ ID NO: 1796; WAN024C9O; Start 8; Stop 32
catcaaacacaactgattcatttgg

SEQ ID NO: 305448 - DNA, 25 bp, Artificial
  probe
  misc_feature (1)..(25): SEQ ID NO: 1796; WAN024C9O; Start 115; Stop 139
gtgactgatttcccctttctttatt

SEQ ID NO: 305449 - DNA, 25 bp, Artificial
  probe
  misc_feature (1)..(25): SEQ ID NO: 1796; WAN024C9O; Start 112; Stop 136
attgtgactgatttcccctttcttt

SEQ ID NO: 305450 - DNA, 25 bp, Artificial
  probe
  misc_feature (1)..(25): SEQ ID NO: 1797; WAN024BHY; Start 439; Stop 463
ttggagaatgagttagaggagtatt

SEQ ID NO: 305451 - DNA, 25 bp, Artificial
  probe
  misc_feature (1)..(25): SEQ ID NO: 1797; WAN024BHY; Start 526; Stop 550
tctggtaggagtgaggtatattatc

SEQ ID NO: 305452 - DNA, 25 bp, Artificial
  probe
  misc_feature (1)..(25): SEQ ID NO: 1797; WAN024BHY; Start 534; Stop 558
gagtgaggtatattatcctgaacgc

SEQ ID NO: 305453 - DNA, 25 bp, Artificial
  probe
  misc_feature (1)..(25): SEQ ID NO: 1797; WAN024BHY; Start 525; Stop 549
ttctggtaggagtgaggtatattat

SEQ ID NO: 305454 - DNA, 25 bp, Artificial
  probe
  misc_feature (1)..(25): SEQ ID NO: 1797; WAN024BHY; Start 536; Stop 560
gtgaggtatattatcctgaacgctg

SEQ ID NO: 305455 - DNA, 25 bp, Artificial
  probe
  misc_feature (1)..(25): SEQ ID NO: 1797; WAN024BHY; Start 535; Stop 559
agtgaggtatattatcctgaacgct

SEQ ID NO: 305456 - DNA, 25 bp, Artificial
  probe
  misc_feature (1)..(25): SEQ ID NO: 1797; WAN024BHY; Start 533; Stop 557
ggagtgaggtatattatcctgaacg

SEQ ID NO: 305457 - DNA, 25 bp, Artificial
  probe
  misc_feature (1)..(25): SEQ ID NO: 1797; WAN024BHY; Start 537; Stop 561
tgaggtatattatcctgaacgctgt

SEQ ID NO: 305458 - DNA, 25 bp, Artificial
  probe
  misc_feature (1)..(25): SEQ ID NO: 1797; WAN024BHY; Start 527; Stop 551
ctggtaggagtgaggtatattatcc

SEQ ID NO: 305459 - DNA, 25 bp, Artificial
  probe
  misc_feature (1)..(25): SEQ ID NO: 1797; WAN024BHY; Start 440; Stop 464
tggagaatgagttagaggagtattc

SEQ ID NO: 305460 - DNA, 25 bp, Artificial
  probe
  misc_feature (1)..(25): SEQ ID NO: 1797; WAN024BHY; Start 521; Stop 545
aagtttctggtaggagtgaggtata

SEQ ID NO: 305461 - DNA, 25 bp, Artificial
  probe
  misc_feature (1)..(25): SEQ ID NO: 1797; WAN024BHY; Start 522; Stop 546
agtttctggtaggagtgaggtatat

SEQ ID NO: 305462 - DNA, 25 bp, Artificial
  probe
  misc_feature (1)..(25): SEQ ID NO: 1797; WAN024BHY; Start 523; Stop 547
gtttctggtaggagtgaggtatatt

SEQ ID NO: 305463 - DNA, 25 bp, Artificial
  probe
  misc_feature (1)..(25): SEQ ID NO: 1797; WAN024BHY; Start 438; Stop 462
tttggagaatgagttagaggagtat

SEQ ID NO: 305464 - DNA, 25 bp, Artificial
  probe
  misc_feature (1)..(25): SEQ ID NO: 1797; WAN024BHY; Start 520; Stop 544
caagtttctggtaggagtgaggtat

SEQ ID NO: 305465 - DNA, 25 bp, Artificial
  probe
  misc_feature (1)..(25): SEQ ID NO: 1797; WAN024BHY; Start 454; Stop 478
gaggagtattctaaggaagaacagc

SEQ ID NO: 305466 - DNA, 25 bp, Artificial
  probe
  misc_feature (1)..(25): SEQ ID NO: 1797; WAN024BHY; Start 453; Stop 477
agaggagtattctaaggaagaacag

SEQ ID NO: 305467 - DNA, 25 bp, Artificial
  probe
  misc_feature (1)..(25): SEQ ID NO: 1797; WAN024BHY; Start 4; Stop 28
attaccatgagaggagagtttaagg

SEQ ID NO: 305468 - DNA, 25 bp, Artificial
  probe
  misc_feature (1)..(25): SEQ ID NO: 1797; WAN024BHY; Start 524; Stop 548
tttctggtaggagtgaggtatatta

SEQ ID NO: 305469 - DNA, 25 bp, Artificial
  probe
  misc_feature (1)..(25): SEQ ID NO: 1797; WAN024BHY; Start 2; Stop 26
tgattaccatgagaggagagtttaa

SEQ ID NO: 305470 - DNA, 25 bp, Artificial
  probe
  misc_feature (1)..(25): SEQ ID NO: 1797; WAN024BHY; Start 3; Stop 27
gattaccatgagaggagagtttaag

SEQ ID NO: 305471 - DNA, 25 bp, Artificial
  probe
  misc_feature (1)..(25): SEQ ID NO: 1797; WAN024BHY; Start 1; Stop 25
atgattaccatgagaggagagttta

SEQ ID NO: 305472 - DNA, 25 bp, Artificial
  probe
  misc_feature (1)..(25): SEQ ID NO: 1797; WAN024BHY; Start 452; Stop 476
tagaggagtattctaaggaagaaca

SEQ ID NO: 305473 - DNA, 25 bp, Artificial
  probe
  misc_feature (1)..(25): SEQ ID NO: 1797; WAN024BHY; Start 5; Stop 29
ttaccatgagaggagagtttaaggt

SEQ ID NO: 305474 - DNA, 25 bp, Artificial
  probe
  misc_feature (1)..(25): SEQ ID NO: 1797; WAN024BHY; Start 170; Stop 194
tattcttcacacaatatagagtggg

SEQ ID NO: 305475 - DNA, 25 bp, Artificial
  probe
  misc_feature (1)..(25): SEQ ID NO: 1797; WAN024BHY; Start 6; Stop 30
taccatgagaggagagtttaaggtg

SEQ ID NO: 305476 - DNA, 25 bp, Artificial
  probe
  misc_feature (1)..(25): SEQ ID NO: 1797; WAN024BHY; Start 436; Stop 460
attttggagaatgagttagaggagt

SEQ ID NO: 305477 - DNA, 25 bp, Artificial
  probe
  misc_feature (1)..(25): SEQ ID NO: 1797; WAN024BHY; Start 437; Stop 461
ttttggagaatgagttagaggagta

SEQ ID NO: 305478 - DNA, 25 bp, Artificial
  probe
  misc_feature (1)..(25): SEQ ID NO: 1797; WAN024BHY; Start 519; Stop 543
gcaagtttctggtaggagtgaggta

SEQ ID NO: 305479 - DNA, 25 bp, Artificial
  probe
  misc_feature (1)..(25): SEQ ID NO: 1797; WAN024BHY; Start 169; Stop 193
atattcttcacacaatatagagtgg

SEQ ID NO: 305480 - DNA, 25 bp, Artificial
  probe
  misc_feature (1)..(25): SEQ ID NO: 1797; WAN024BHY; Start 528; Stop 552
tggtaggagtgaggtatattatcct

SEQ ID NO: 305481 - DNA, 25 bp, Artificial
  probe
  misc_feature (1)..(25): SEQ ID NO: 1797; WAN024BHY; Start 529; Stop 553
ggtaggagtgaggtatattatcctg

SEQ ID NO: 305482 - DNA, 25 bp, Artificial
  probe
  misc_feature (1)..(25): SEQ ID NO: 1797; WAN024BHY; Start 532; Stop 556
aggagtgaggtatattatcctgaac

SEQ ID NO: 305483 - DNA, 25 bp, Artificial
  probe
  misc_feature (1)..(25): SEQ ID NO: 1798; WAN024AWS; Start 188; Stop 212
gattctcatcagtattggttcagga

SEQ ID NO: 305484 - DNA, 25 bp, Artificial
  probe
  misc_feature (1)..(25): SEQ ID NO: 1798; WAN024AWS; Start 190; Stop 214
ttctcatcagtattggttcaggatt

SEQ ID NO: 305485 - DNA, 25 bp, Artificial
  probe
  misc_feature (1)..(25): SEQ ID NO: 1798; WAN024AWS; Start 186; Stop 210
tggattctcatcagtattggttcag

SEQ ID NO: 305486 - DNA, 25 bp, Artificial
  probe
  misc_feature (1)..(25): SEQ ID NO: 1798; WAN024AWS; Start 189; Stop 213
attctcatcagtattggttcaggat

SEQ ID NO: 305487 - DNA, 25 bp, Artificial
  probe
  misc_feature (1)..(25): SEQ ID NO: 1798; WAN024AWS; Start 185; Stop 209
atggattctcatcagtattggttca

SEQ ID NO: 305488 - DNA, 25 bp, Artificial
  probe
  misc_feature (1)..(25): SEQ ID NO: 1798; WAN024AWS; Start 187; Stop 211
ggattctcatcagtattggttcagg

SEQ ID NO: 305489 - DNA, 25 bp, Artificial
  probe
  misc_feature (1)..(25): SEQ ID NO: 1798; WAN024AWS; Start 224; Stop 248
taccaatctatcagcgtcaaggaat

SEQ ID NO: 305490 - DNA, 25 bp, Artificial
  probe
  misc_feature (1)..(25): SEQ ID NO: 1798; WAN024AWS; Start 223; Stop 247
ttaccaatctatcagcgtcaaggaa

SEQ ID NO: 305491 - DNA, 25 bp, Artificial
  probe
  misc_feature (1)..(25): SEQ ID NO: 1798; WAN024AWS; Start 229; Stop 253
atctatcagcgtcaaggaattggta

SEQ ID NO: 305492 - DNA, 25 bp, Artificial
  probe
  misc_feature (1)..(25): SEQ ID NO: 1798; WAN024AWS; Start 225; Stop 249
accaatctatcagcgtcaaggaatt

SEQ ID NO: 305493 - DNA, 25 bp, Artificial
  probe
  misc_feature (1)..(25): SEQ ID NO: 1798; WAN024AWS; Start 230; Stop 254
tctatcagcgtcaaggaattggtag

SEQ ID NO: 305494 - DNA, 25 bp, Artificial
  probe
  misc_feature (1)..(25): SEQ ID NO: 1798; WAN024AWS; Start 228; Stop 252
aatctatcagcgtcaaggaattggt

SEQ ID NO: 305495 - DNA, 25 bp, Artificial
  probe
  misc_feature (1)..(25): SEQ ID NO: 1798; WAN024AWS; Start 231; Stop 255
ctatcagcgtcaaggaattggtagt

SEQ ID NO: 305496 - DNA, 25 bp, Artificial
  probe
  misc_feature (1)..(25): SEQ ID NO: 1798; WAN024AWS; Start 281; Stop 305
attacaaagatgcctatcaagtcca

SEQ ID NO: 305497 - DNA, 25 bp, Artificial
  probe
  misc_feature (1)..(25): SEQ ID NO: 1798; WAN024AWS; Start 191; Stop 215
tctcatcagtattggttcaggattt

SEQ ID NO: 305498 - DNA, 25 bp, Artificial
  probe
  misc_feature (1)..(25): SEQ ID NO: 1798; WAN024AWS; Start 382; Stop 406
tgtatagggatgacttggatgaatc

SEQ ID NO: 305499 - DNA, 25 bp, Artificial
  probe
  misc_feature (1)..(25): SEQ ID NO: 1798; WAN024AWS; Start 280; Stop 304
gattacaaagatgcctatcaagtcc

SEQ ID NO: 305500 - DNA, 25 bp, Artificial
  probe
  misc_feature (1)..(25): SEQ ID NO: 1798; WAN024AWS; Start 279; Stop 303
ggattacaaagatgcctatcaagtc

SEQ ID NO: 305501 - DNA, 25 bp, Artificial
  probe
  misc_feature (1)..(25): SEQ ID NO: 1798; WAN024AWS; Start 383; Stop 407
gtatagggatgacttggatgaatcg

SEQ ID NO: 305502 - DNA, 25 bp, Artificial
  probe
  misc_feature (1)..(25): SEQ ID NO: 1798; WAN024AWS; Start 381; Stop 405
ttgtatagggatgacttggatgaat

SEQ ID NO: 305503 - DNA, 25 bp, Artificial
  probe
  misc_feature (1)..(25): SEQ ID NO: 1798; WAN024AWS; Start 380; Stop 404
attgtatagggatgacttggatgaa

SEQ ID NO: 305504 - DNA, 25 bp, Artificial
  probe
  misc_feature (1)..(25): SEQ ID NO: 1798; WAN024AWS; Start 282; Stop 306
ttacaaagatgcctatcaagtccag

SEQ ID NO: 305505 - DNA, 25 bp, Artificial
  probe
  misc_feature (1)..(25): SEQ ID NO: 1798; WAN024AWS; Start 341; Stop 365
tctatcgttctatgggctttgaaat

SEQ ID NO: 305506 - DNA, 25 bp, Artificial
  probe
  misc_feature (1)..(25): SEQ ID NO: 1798; WAN024AWS; Start 385; Stop 409
atagggatgacttggatgaatcgta

SEQ ID NO: 305507 - DNA, 25 bp, Artificial
  probe
  misc_feature (1)..(25): SEQ ID NO: 1798; WAN024AWS; Start 384; Stop 408
tatagggatgacttggatgaatcgt

SEQ ID NO: 305508 - DNA, 25 bp, Artificial
  probe
  misc_feature (1)..(25): SEQ ID NO: 1798; WAN024AWS; Start 342; Stop 366
ctatcgttctatgggctttgaaatc

SEQ ID NO: 305509 - DNA, 25 bp, Artificial
  probe
  misc_feature (1)..(25): SEQ ID NO: 1798; WAN024AWS; Start 340; Stop 364
ttctatcgttctatgggctttgaaa

SEQ ID NO: 305510 - DNA, 25 bp, Artificial
  probe
  misc_feature (1)..(25): SEQ ID NO: 1798; WAN024AWS; Start 232; Stop 256
tatcagcgtcaaggaattggtagtg

SEQ ID NO: 305511 - DNA, 25 bp, Artificial
  probe
  misc_feature (1)..(25): SEQ ID NO: 1798; WAN024AWS; Start 339; Stop 363
cttctatcgttctatgggctttgaa

SEQ ID NO: 305512 - DNA, 25 bp, Artificial
  probe
  misc_feature (1)..(25): SEQ ID NO: 1798; WAN024AWS; Start 386; Stop 410
tagggatgacttggatgaatcgtaa

SEQ ID NO: 305513 - DNA, 25 bp, Artificial
  probe
  misc_feature (1)..(25): SEQ ID NO: 1798; WAN024AWS; Start 379; Stop 403
aattgtatagggatgacttggatga

SEQ ID NO: 305514 - DNA, 25 bp, Artificial
  probe
  misc_feature (1)..(25): SEQ ID NO: 1798; WAN024AWS; Start 197; Stop 221
cagtattggttcaggatttaatcgt

SEQ ID NO: 305515 - DNA, 25 bp, Artificial
  probe
  misc_feature (1)..(25): SEQ ID NO: 1798; WAN024AWS; Start 312; Stop 336
gacagaagagacagaaagaaccttg

SEQ ID NO: 305516 - DNA, 25 bp, Artificial
  probe
  misc_feature (1)..(25): SEQ ID NO: 1799; WAN024AWT; Start 73; Stop 97
acaaactatacccatcaaacagaga

SEQ ID NO: 305517 - DNA, 25 bp, Artificial
  probe
  misc_feature (1)..(25): SEQ ID NO: 1799; WAN024AWT; Start 71; Stop 95
ggacaaactatacccatcaaacaga

SEQ ID NO: 305518 - DNA, 25 bp, Artificial
  probe
  misc_feature (1)..(25): SEQ ID NO: 1799; WAN024AWT; Start 72; Stop 96
gacaaactatacccatcaaacagag

SEQ ID NO: 305519 - DNA, 25 bp, Artificial
  probe
  misc_feature (1)..(25): SEQ ID NO: 1799; WAN024AWT; Start 74; Stop 98
caaactatacccatcaaacagagat

SEQ ID NO: 305520 - DNA, 25 bp, Artificial
  probe
  misc_feature (1)..(25): SEQ ID NO: 1799; WAN024AWT; Start 68; Stop 92
gttggacaaactatacccatcaaac

SEQ ID NO: 305521 - DNA, 25 bp, Artificial
  probe
  misc_feature (1)..(25): SEQ ID NO: 1799; WAN024AWT; Start 69; Stop 93
ttggacaaactatacccatcaaaca

SEQ ID NO: 305522 - DNA, 25 bp, Artificial
  probe
  misc_feature (1)..(25): SEQ ID NO: 1799; WAN024AWT; Start 70; Stop 94
tggacaaactatacccatcaaacag

SEQ ID NO: 305523 - DNA, 25 bp, Artificial
  probe
  misc_feature (1)..(25): SEQ ID NO: 1799; WAN024AWT; Start 67; Stop 91
ggttggacaaactatacccatcaaa

SEQ ID NO: 305524 - DNA, 25 bp, Artificial
  probe
  misc_feature (1)..(25): SEQ ID NO: 1799; WAN024AWT; Start 167; Stop 191
tgattcgtttggttggagatggttt

SEQ ID NO: 305525 - DNA, 25 bp, Artificial
  probe
  misc_feature (1)..(25): SEQ ID NO: 1799; WAN024AWT; Start 166; Stop 190
ttgattcgtttggttggagatggtt

SEQ ID NO: 305526 - DNA, 25 bp, Artificial
  probe
  misc_feature (1)..(25): SEQ ID NO: 1799; WAN024AWT; Start 165; Stop 189
cttgattcgtttggttggagatggt

SEQ ID NO: 305527 - DNA, 25 bp, Artificial
  probe
  misc_feature (1)..(25): SEQ ID NO: 1799; WAN024AWT; Start 76; Stop 100
aactatacccatcaaacagagatgc

SEQ ID NO: 305528 - DNA, 25 bp, Artificial
  probe
  misc_feature (1)..(25): SEQ ID NO: 1799; WAN024AWT; Start 66; Stop 90
cggttggacaaactatacccatcaa

SEQ ID NO: 305529 - DNA, 25 bp, Artificial
  probe
  misc_feature (1)..(25): SEQ ID NO: 1799; WAN024AWT; Start 78; Stop 102
ctatacccatcaaacagagatgctg

SEQ ID NO: 305530 - DNA, 25 bp, Artificial
  probe
  misc_feature (1)..(25): SEQ ID NO: 1799; WAN024AWT; Start 77; Stop 101
actatacccatcaaacagagatgct

SEQ ID NO: 305531 - DNA, 25 bp, Artificial
  probe
  misc_feature (1)..(25): SEQ ID NO: 1799; WAN024AWT; Start 168; Stop 192
gattcgtttggttggagatggtttt

SEQ ID NO: 305532 - DNA, 25 bp, Artificial
  probe
  misc_feature (1)..(25): SEQ ID NO: 1799; WAN024AWT; Start 75; Stop 99
aaactatacccatcaaacagagatg

SEQ ID NO: 305533 - DNA, 25 bp, Artificial
  probe
  misc_feature (1)..(25): SEQ ID NO: 1799; WAN024AWT; Start 64; Stop 88
gtcggttggacaaactatacccatc

SEQ ID NO: 305534 - DNA, 25 bp, Artificial
  probe
  misc_feature (1)..(25): SEQ ID NO: 1799; WAN024AWT; Start 79; Stop 103
tatacccatcaaacagagatgctgg

SEQ ID NO: 305535 - DNA, 25 bp, Artificial
  probe
  misc_feature (1)..(25): SEQ ID NO: 1799; WAN024AWT; Start 65; Stop 89
tcggttggacaaactatacccatca

SEQ ID NO: 305536 - DNA, 25 bp, Artificial
  probe
  misc_feature (1)..(25): SEQ ID NO: 1799; WAN024AWT; Start 243; Stop 267
agggattggtagctccttgatgaaa

SEQ ID NO: 305537 - DNA, 25 bp, Artificial
  probe
  misc_feature (1)..(25): SEQ ID NO: 1799; WAN024AWT; Start 80; Stop 104
atacccatcaaacagagatgctgga

SEQ ID NO: 305538 - DNA, 25 bp, Artificial
  probe
  misc_feature (1)..(25): SEQ ID NO: 1799; WAN024AWT; Start 81; Stop 105
tacccatcaaacagagatgctggag

SEQ ID NO: 305539 - DNA, 25 bp, Artificial
  probe
  misc_feature (1)..(25): SEQ ID NO: 1799; WAN024AWT; Start 269; Stop 293
aggctttaggaaattttaaagaggc

SEQ ID NO: 305540 - DNA, 25 bp, Artificial
  probe
  misc_feature (1)..(25): SEQ ID NO: 1799; WAN024AWT; Start 242; Stop 266
aagggattggtagctccttgatgaa

SEQ ID NO: 305541 - DNA, 25 bp, Artificial
  probe
  misc_feature (1)..(25): SEQ ID NO: 1799; WAN024AWT; Start 63; Stop 87
tgtcggttggacaaactatacccat

SEQ ID NO: 305542 - DNA, 25 bp, Artificial
  probe
  misc_feature (1)..(25): SEQ ID NO: 1799; WAN024AWT; Start 201; Stop 225
ttttgtacaggatttgattgttttg

SEQ ID NO: 305543 - DNA, 25 bp, Artificial
  probe
  misc_feature (1)..(25): SEQ ID NO: 1799; WAN024AWT; Start 62; Stop 86
ctgtcggttggacaaactataccca

SEQ ID NO: 305544 - DNA, 25 bp, Artificial
  probe
  misc_feature (1)..(25): SEQ ID NO: 1799; WAN024AWT; Start 270; Stop 294
ggctttaggaaattttaaagaggcc

SEQ ID NO: 305545 - DNA, 25 bp, Artificial
  probe
  misc_feature (1)..(25): SEQ ID NO: 1799; WAN024AWT; Start 59; Stop 83
aggctgtcggttggacaaactatac

SEQ ID NO: 305546 - DNA, 25 bp, Artificial
  probe
  misc_feature (1)..(25): SEQ ID NO: 1799; WAN024AWT; Start 58; Stop 82
caggctgtcggttggacaaactata

SEQ ID NO: 305547 - DNA, 25 bp, Artificial
  probe
  misc_feature (1)..(25): SEQ ID NO: 1800; WAN024FOL; Start 32; Stop 56
tgacaacggaacaatatggtgtata

SEQ ID NO: 305548 - DNA, 25 bp, Artificial
  probe
  misc_feature (1)..(25): SEQ ID NO: 1800; WAN024FOL; Start 31; Stop 55
ttgacaacggaacaatatggtgtat

SEQ ID NO: 305549 - DNA, 25 bp, Artificial
  probe
  misc_feature (1)..(25): SEQ ID NO: 1800; WAN024FOL; Start 799; Stop 823
ttaattactctggtaggcattggtt

SEQ ID NO: 305550 - DNA, 25 bp, Artificial
  probe
  misc_feature (1)..(25): SEQ ID NO: 1800; WAN024FOL; Start 800; Stop 824
taattactctggtaggcattggttc

SEQ ID NO: 305551 - DNA, 25 bp, Artificial
  probe
  misc_feature (1)..(25): SEQ ID NO: 1800; WAN024FOL; Start 884; Stop 908
acgaagcaatatggattattcctcc

SEQ ID NO: 305552 - DNA, 25 bp, Artificial
  probe
  misc_feature (1)..(25): SEQ ID NO: 1800; WAN024FOL; Start 883; Stop 907
tacgaagcaatatggattattcctc

SEQ ID NO: 305553 - DNA, 25 bp, Artificial
  probe
  misc_feature (1)..(25): SEQ ID NO: 1800; WAN024FOL; Start 1060; Stop 1084
tatattgcggcaggctatacaactt

SEQ ID NO: 305554 - DNA, 25 bp, Artificial
  probe
  misc_feature (1)..(25): SEQ ID NO: 1800; WAN024FOL; Start 801; Stop 825
aattactctggtaggcattggttcg

SEQ ID NO: 305555 - DNA, 25 bp, Artificial
  probe
  misc_feature (1)..(25): SEQ ID NO: 1800; WAN024FOL; Start 1142; Stop 1166
atcagaatctttcgggtatccaaat

SEQ ID NO: 305556 - DNA, 25 bp, Artificial
  probe
  misc_feature (1)..(25): SEQ ID NO: 1800; WAN024FOL; Start 1140; Stop 1164
gtatcagaatctttcgggtatccaa

SEQ ID NO: 305557 - DNA, 25 bp, Artificial
  probe
  misc_feature (1)..(25): SEQ ID NO: 1800; WAN024FOL; Start 1141; Stop 1165
tatcagaatctttcgggtatccaaa

SEQ ID NO: 305558 - DNA, 25 bp, Artificial
  probe
  misc_feature (1)..(25): SEQ ID NO: 1800; WAN024FOL; Start 1143; Stop 1167
tcagaatctttcgggtatccaaatt

SEQ ID NO: 305559 - DNA, 25 bp, Artificial
  probe
  misc_feature (1)..(25): SEQ ID NO: 1800; WAN024FOL; Start 30; Stop 54
attgacaacggaacaatatggtgta

SEQ ID NO: 305560 - DNA, 25 bp, Artificial
  probe
  misc_feature (1)..(25): SEQ ID NO: 1800; WAN024FOL; Start 882; Stop 906
ttacgaagcaatatggattattcct

SEQ ID NO: 305561 - DNA, 25 bp, Artificial
  probe
  misc_feature (1)..(25): SEQ ID NO: 1800; WAN024FOL; Start 1139; Stop 1163
tgtatcagaatctttcgggtatcca

SEQ ID NO: 305562 - DNA, 25 bp, Artificial
  probe
  misc_feature (1)..(25): SEQ ID NO: 1800; WAN024FOL; Start 582; Stop 606
tcctcattatttatcgcaatcagtt

SEQ ID NO: 305563 - DNA, 25 bp, Artificial
  probe
  misc_feature (1)..(25): SEQ ID NO: 1800; WAN024FOL; Start 581; Stop 605
ttcctcattatttatcgcaatcagt

SEQ ID NO: 305564 - DNA, 25 bp, Artificial
  probe
  misc_feature (1)..(25): SEQ ID NO: 1800; WAN024FOL; Start 838; Stop 862
tctcttggaccagaaatcattcaat

SEQ ID NO: 305565 - DNA, 25 bp, Artificial
  probe
  misc_feature (1)..(25): SEQ ID NO: 1800; WAN024FOL; Start 839; Stop 863
ctcttggaccagaaatcattcaatt

SEQ ID NO: 305566 - DNA, 25 bp, Artificial
  probe
  misc_feature (1)..(25): SEQ ID NO: 1800; WAN024FOL; Start 184; Stop 208
ggactaacaacaacagttacagcta

SEQ ID NO: 305567 - DNA, 25 bp, Artificial
  probe
  misc_feature (1)..(25): SEQ ID NO: 1800; WAN024FOL; Start 34; Stop 58
acaacggaacaatatggtgtatact

SEQ ID NO: 305568 - DNA, 25 bp, Artificial
  probe
  misc_feature (1)..(25): SEQ ID NO: 1800; WAN024FOL; Start 185; Stop 209
gactaacaacaacagttacagctat

SEQ ID NO: 305569 - DNA, 25 bp, Artificial
  probe
  misc_feature (1)..(25): SEQ ID NO: 1800; WAN024FOL; Start 38; Stop 62
cggaacaatatggtgtatactctgt

SEQ ID NO: 305570 - DNA, 25 bp, Artificial
  probe
  misc_feature (1)..(25): SEQ ID NO: 1800; WAN024FOL; Start 37; Stop 61
acggaacaatatggtgtatactctg

SEQ ID NO: 305571 - DNA, 25 bp, Artificial
  probe
  misc_feature (1)..(25): SEQ ID NO: 1800; WAN024FOL; Start 33; Stop 57
gacaacggaacaatatggtgtatac

SEQ ID NO: 305572 - DNA, 25 bp, Artificial
  probe
  misc_feature (1)..(25): SEQ ID NO: 1800; WAN024FOL; Start 35; Stop 59
caacggaacaatatggtgtatactc

SEQ ID NO: 305573 - DNA, 25 bp, Artificial
  probe
  misc_feature (1)..(25): SEQ ID NO: 1800; WAN024FOL; Start 36; Stop 60
aacggaacaatatggtgtatactct

SEQ ID NO: 305574 - DNA, 25 bp, Artificial
  probe
  misc_feature (1)..(25): SEQ ID NO: 1800; WAN024FOL; Start 445; Stop 469
gaggctagagttatctcatttgtgt

SEQ ID NO: 305575 - DNA, 25 bp, Artificial
  probe
  misc_feature (1)..(25): SEQ ID NO: 1800; WAN024FOL; Start 446; Stop 470
aggctagagttatctcatttgtgtt

SEQ ID NO: 305576 - DNA, 25 bp, Artificial
  probe
  misc_feature (1)..(25): SEQ ID NO: 1800; WAN024FOL; Start 583; Stop 607
cctcattatttatcgcaatcagttt

SEQ ID NO: 305577 - DNA, 25 bp, Artificial
  probe
  misc_feature (1)..(25): SEQ ID NO: 1800; WAN024FOL; Start 798; Stop 822
tttaattactctggtaggcattggt

SEQ ID NO: 305578 - DNA, 25 bp, Artificial
  probe
  misc_feature (1)..(25): SEQ ID NO: 1800; WAN024FOL; Start 464; Stop 488
ttgtgttagttcaatcttgtatagg

SEQ ID NO: 305579 - DNA, 25 bp, Artificial
  probe
  misc_feature (1)..(25): SEQ ID NO: 1800; WAN024FOL; Start 444; Stop 468
ggaggctagagttatctcatttgtg

SEQ ID NO: 305580 - DNA, 25 bp, Artificial
  probe
  misc_feature (1)..(25): SEQ ID NO: 1801; WAN024CL9; Start 64; Stop 88
aaatatgaagaaagtgcgttcccag

SEQ ID NO: 305581 - DNA, 25 bp, Artificial
  probe
  misc_feature (1)..(25): SEQ ID NO: 1801; WAN024CL9; Start 20; Stop 44
aaattcatcccaatagtctttatcg

SEQ ID NO: 305582 - DNA, 25 bp, Artificial
  probe
  misc_feature (1)..(25): SEQ ID NO: 1801; WAN024CL9; Start 21; Stop 45
aattcatcccaatagtctttatcga

SEQ ID NO: 305583 - DNA, 25 bp, Artificial
  probe
  misc_feature (1)..(25): SEQ ID NO: 1801; WAN024CL9; Start 65; Stop 89
aatatgaagaaagtgcgttcccagg

SEQ ID NO: 305584 - DNA, 25 bp, Artificial
  probe
  misc_feature (1)..(25): SEQ ID NO: 1801; WAN024CL9; Start 63; Stop 87
aaaatatgaagaaagtgcgttccca

SEQ ID NO: 305585 - DNA, 25 bp, Artificial
  probe
  misc_feature (1)..(25): SEQ ID NO: 1801; WAN024CL9; Start 66; Stop 90
atatgaagaaagtgcgttcccagga

SEQ ID NO: 305586 - DNA, 25 bp, Artificial
  probe
  misc_feature (1)..(25): SEQ ID NO: 1801; WAN024CL9; Start 27; Stop 51
tcccaatagtctttatcgatggatt

SEQ ID NO: 305587 - DNA, 25 bp, Artificial
  probe
  misc_feature (1)..(25): SEQ ID NO: 1801; WAN024CL9; Start 22; Stop 46
attcatcccaatagtctttatcgat

SEQ ID NO: 305588 - DNA, 25 bp, Artificial
  probe
  misc_feature (1)..(25): SEQ ID NO: 1801; WAN024CL9; Start 28; Stop 52
cccaatagtctttatcgatggattc

SEQ ID NO: 305589 - DNA, 25 bp, Artificial
  probe
  misc_feature (1)..(25): SEQ ID NO: 1801; WAN024CL9; Start 101; Stop 125
cacttcgtcatactcaatttgagat

SEQ ID NO: 305590 - DNA, 25 bp, Artificial
  probe
  misc_feature (1)..(25): SEQ ID NO: 1801; WAN024CL9; Start 67; Stop 91
tatgaagaaagtgcgttcccaggac

SEQ ID NO: 305591 - DNA, 25 bp, Artificial
  probe
  misc_feature (1)..(25): SEQ ID NO: 1801; WAN024CL9; Start 29; Stop 53
ccaatagtctttatcgatggattca

SEQ ID NO: 305592 - DNA, 25 bp, Artificial
  probe
  misc_feature (1)..(25): SEQ ID NO: 1801; WAN024CL9; Start 100; Stop 124
gcacttcgtcatactcaatttgaga

SEQ ID NO: 305593 - DNA, 25 bp, Artificial
  probe
  misc_feature (1)..(25): SEQ ID NO: 1801; WAN024CL9; Start 30; Stop 54
caatagtctttatcgatggattcaa

SEQ ID NO: 305594 - DNA, 25 bp, Artificial
  probe
  misc_feature (1)..(25): SEQ ID NO: 1801; WAN024CL9; Start 104; Stop 128
ttcgtcatactcaatttgagatact

SEQ ID NO: 305595 - DNA, 25 bp, Artificial
  probe
  misc_feature (1)..(25): SEQ ID NO: 1801; WAN024CL9; Start 102; Stop 126
acttcgtcatactcaatttgagata

SEQ ID NO: 305596 - DNA, 25 bp, Artificial
  probe
  misc_feature (1)..(25): SEQ ID NO: 1801; WAN024CL9; Start 31; Stop 55
aatagtctttatcgatggattcaag

SEQ ID NO: 305597 - DNA, 25 bp, Artificial
  probe
  misc_feature (1)..(25): SEQ ID NO: 1801; WAN024CL9; Start 25; Stop 49
catcccaatagtctttatcgatgga

SEQ ID NO: 305598 - DNA, 25 bp, Artificial
  probe
  misc_feature (1)..(25): SEQ ID NO: 1801; WAN024CL9; Start 24; Stop 48
tcatcccaatagtctttatcgatgg

SEQ ID NO: 305599 - DNA, 25 bp, Artificial
  probe
  misc_feature (1)..(25): SEQ ID NO: 1801; WAN024CL9; Start 103; Stop 127
cttcgtcatactcaatttgagatac

SEQ ID NO: 305600 - DNA, 25 bp, Artificial
  probe
  misc_feature (1)..(25): SEQ ID NO: 1801; WAN024CL9; Start 34; Stop 58
agtctttatcgatggattcaagaat

SEQ ID NO: 305601 - DNA, 25 bp, Artificial
  probe
  misc_feature (1)..(25): SEQ ID NO: 1801; WAN024CL9; Start 99; Stop 123
cgcacttcgtcatactcaatttgag

SEQ ID NO: 305602 - DNA, 25 bp, Artificial
  probe
  misc_feature (1)..(25): SEQ ID NO: 1801; WAN024CL9; Start 23; Stop 47
ttcatcccaatagtctttatcgatg

SEQ ID NO: 305603 - DNA, 25 bp, Artificial
  probe
  misc_feature (1)..(25): SEQ ID NO: 1801; WAN024CL9; Start 33; Stop 57
tagtctttatcgatggattcaagaa

SEQ ID NO: 305604 - DNA, 25 bp, Artificial
  probe
  misc_feature (1)..(25): SEQ ID NO: 1801; WAN024CL9; Start 26; Stop 50
atcccaatagtctttatcgatggat

SEQ ID NO: 305605 - DNA, 25 bp, Artificial
  probe
  misc_feature (1)..(25): SEQ ID NO: 1801; WAN024CL9; Start 105; Stop 129
tcgtcatactcaatttgagatacta

SEQ ID NO: 305606 - DNA, 25 bp, Artificial
  probe
  misc_feature (1)..(25): SEQ ID NO: 1801; WAN024CL9; Start 32; Stop 56
atagtctttatcgatggattcaaga

SEQ ID NO: 305607 - DNA, 25 bp, Artificial
  probe
  misc_feature (1)..(25): SEQ ID NO: 1801; WAN024CL9; Start 19; Stop 43
aaaattcatcccaatagtctttatc

SEQ ID NO: 305608 - DNA, 25 bp, Artificial
  probe
  misc_feature (1)..(25): SEQ ID NO: 1801; WAN024CL9; Start 38; Stop 62
tttatcgatggattcaagaatatga

SEQ ID NO: 305609 - DNA, 25 bp, Artificial
  probe
  misc_feature (1)..(25): SEQ ID NO: 1801; WAN024CL9; Start 39; Stop 63
ttatcgatggattcaagaatatgaa

SEQ ID NO: 305610 - DNA, 25 bp, Artificial
  probe
  misc_feature (1)..(25): SEQ ID NO: 1801; WAN024CL9; Start 37; Stop 61
ctttatcgatggattcaagaatatg

SEQ ID NO: 305611 - DNA, 25 bp, Artificial
  probe
  misc_feature (1)..(25): SEQ ID NO: 1801; WAN024CL9; Start 106; Stop 130
cgtcatactcaatttgagatactaa

SEQ ID NO: 305612 - DNA, 25 bp, Artificial
  probe
  misc_feature (1)..(25): SEQ ID NO: 1801; WAN024CL9; Start 97; Stop 121
agcgcacttcgtcatactcaatttg

SEQ ID NO: 305613 - DNA, 25 bp, Artificial
  probe
  misc_feature (1)..(25): SEQ ID NO: 1802; WAN024DHE; Start 81; Stop 105
tgataatacggaagagcagttacag

SEQ ID NO: 305614 - DNA, 25 bp, Artificial
  probe
  misc_feature (1)..(25): SEQ ID NO: 1802; WAN024DHE; Start 80; Stop 104
atgataatacggaagagcagttaca

SEQ ID NO: 305615 - DNA, 25 bp, Artificial
  probe
  misc_feature (1)..(25): SEQ ID NO: 1802; WAN024DHE; Start 472; Stop 496
gtagatacggattggttactgagaa

SEQ ID NO: 305616 - DNA, 25 bp, Artificial
  probe
  misc_feature (1)..(25): SEQ ID NO: 1802; WAN024DHE; Start 82; Stop 106
gataatacggaagagcagttacagg

SEQ ID NO: 305617 - DNA, 25 bp, Artificial
  probe
  misc_feature (1)..(25): SEQ ID NO: 1802; WAN024DHE; Start 86; Stop 110
atacggaagagcagttacaggaata

SEQ ID NO: 305618 - DNA, 25 bp, Artificial
  probe
  misc_feature (1)..(25): SEQ ID NO: 1802; WAN024DHE; Start 83; Stop 107
ataatacggaagagcagttacagga

SEQ ID NO: 305619 - DNA, 25 bp, Artificial
  probe
  misc_feature (1)..(25): SEQ ID NO: 1802; WAN024DHE; Start 84; Stop 108
taatacggaagagcagttacaggaa

SEQ ID NO: 305620 - DNA, 25 bp, Artificial
  probe
  misc_feature (1)..(25): SEQ ID NO: 1802; WAN024DHE; Start 85; Stop 109
aatacggaagagcagttacaggaat

SEQ ID NO: 305621 - DNA, 25 bp, Artificial
  probe
  misc_feature (1)..(25): SEQ ID NO: 1802; WAN024DHE; Start 87; Stop 111
tacggaagagcagttacaggaatac

SEQ ID NO: 305622 - DNA, 25 bp, Artificial
  probe
  misc_feature (1)..(25): SEQ ID NO: 1802; WAN024DHE; Start 79; Stop 103
tatgataatacggaagagcagttac

SEQ ID NO: 305623 - DNA, 25 bp, Artificial
  probe
  misc_feature (1)..(25): SEQ ID NO: 1802; WAN024DHE; Start 471; Stop 495
agtagatacggattggttactgaga

SEQ ID NO: 305624 - DNA, 25 bp, Artificial
  probe
  misc_feature (1)..(25): SEQ ID NO: 1802; WAN024DHE; Start 470; Stop 494
aagtagatacggattggttactgag

SEQ ID NO: 305625 - DNA, 25 bp, Artificial
  probe
  misc_feature (1)..(25): SEQ ID NO: 1802; WAN024DHE; Start 89; Stop 113
cggaagagcagttacaggaatactt

SEQ ID NO: 305626 - DNA, 25 bp, Artificial
  probe
  misc_feature (1)..(25): SEQ ID NO: 1802; WAN024DHE; Start 477; Stop 501
tacggattggttactgagaaagaaa

SEQ ID NO: 305627 - DNA, 25 bp, Artificial
  probe
  misc_feature (1)..(25): SEQ ID NO: 1802; WAN024DHE; Start 475; Stop 499
gatacggattggttactgagaaaga

SEQ ID NO: 305628 - DNA, 25 bp, Artificial
  probe
  misc_feature (1)..(25): SEQ ID NO: 1802; WAN024DHE; Start 474; Stop 498
agatacggattggttactgagaaag

SEQ ID NO: 305629 - DNA, 25 bp, Artificial
  probe
  misc_feature (1)..(25): SEQ ID NO: 1802; WAN024DHE; Start 476; Stop 500
atacggattggttactgagaaagaa

SEQ ID NO: 305630 - DNA, 25 bp, Artificial
  probe
  misc_feature (1)..(25): SEQ ID NO: 1802; WAN024DHE; Start 478; Stop 502
acggattggttactgagaaagaaat

SEQ ID NO: 305631 - DNA, 25 bp, Artificial
  probe
  misc_feature (1)..(25): SEQ ID NO: 1802; WAN024DHE; Start 238; Stop 262
actgagagagaattagaggacgctt

SEQ ID NO: 305632 - DNA, 25 bp, Artificial
  probe
  misc_feature (1)..(25): SEQ ID NO: 1802; WAN024DHE; Start 237; Stop 261
aactgagagagaattagaggacgct

SEQ ID NO: 305633 - DNA, 25 bp, Artificial
  probe
  misc_feature (1)..(25): SEQ ID NO: 1802; WAN024DHE; Start 99; Stop 123
gttacaggaatactttgaagaggct

SEQ ID NO: 305634 - DNA, 25 bp, Artificial
  probe
  misc_feature (1)..(25): SEQ ID NO: 1802; WAN024DHE; Start 479; Stop 503
cggattggttactgagaaagaaatt

SEQ ID NO: 305635 - DNA, 25 bp, Artificial
  probe
  misc_feature (1)..(25): SEQ ID NO: 1802; WAN024DHE; Start 100; Stop 124
ttacaggaatactttgaagaggctt

SEQ ID NO: 305636 - DNA, 25 bp, Artificial
  probe
  misc_feature (1)..(25): SEQ ID NO: 1802; WAN024DHE; Start 102; Stop 126
acaggaatactttgaagaggcttat

SEQ ID NO: 305637 - DNA, 25 bp, Artificial
  probe
  misc_feature (1)..(25): SEQ ID NO: 1802; WAN024DHE; Start 473; Stop 497
tagatacggattggttactgagaaa

SEQ ID NO: 305638 - DNA, 25 bp, Artificial
  probe
  misc_feature (1)..(25): SEQ ID NO: 1802; WAN024DHE; Start 235; Stop 259
caaactgagagagaattagaggacg

SEQ ID NO: 305639 - DNA, 25 bp, Artificial
  probe
  misc_feature (1)..(25): SEQ ID NO: 1802; WAN024DHE; Start 154; Stop 178
ggaaatcctgactctgaaacctatt

SEQ ID NO: 305640 - DNA, 25 bp, Artificial
  probe
  misc_feature (1)..(25): SEQ ID NO: 1802; WAN024DHE; Start 101; Stop 125
tacaggaatactttgaagaggctta

SEQ ID NO: 305641 - DNA, 25 bp, Artificial
  probe
  misc_feature (1)..(25): SEQ ID NO: 1802; WAN024DHE; Start 10; Stop 34
aaagtagaaatggcagatgttgagg

SEQ ID NO: 305642 - DNA, 25 bp, Artificial
  probe
  misc_feature (1)..(25): SEQ ID NO: 1802; WAN024DHE; Start 95; Stop 119
agcagttacaggaatactttgaaga

SEQ ID NO: 305643 - DNA, 25 bp, Artificial
  probe
  misc_feature (1)..(25): SEQ ID NO: 1802; WAN024DHE; Start 93; Stop 117
agagcagttacaggaatactttgaa

SEQ ID NO: 305644 - DNA, 25 bp, Artificial
  probe
  misc_feature (1)..(25): SEQ ID NO: 1802; WAN024DHE; Start 92; Stop 116
aagagcagttacaggaatactttga

SEQ ID NO: 305645 - DNA, 25 bp, Artificial
  probe
  misc_feature (1)..(25): SEQ ID NO: 1802; WAN024DHE; Start 96; Stop 120
gcagttacaggaatactttgaagag

SEQ ID NO: 305646 - DNA, 25 bp, Artificial
  probe
  misc_feature (1)..(25): SEQ ID NO: 1803; WAN024FLK; Start 261; Stop 285
tccagattattgtgtgaattatgcg

SEQ ID NO: 305647 - DNA, 25 bp, Artificial
  probe
  misc_feature (1)..(25): SEQ ID NO: 1803; WAN024FLK; Start 260; Stop 284
atccagattattgtgtgaattatgc

SEQ ID NO: 305648 - DNA, 25 bp, Artificial
  probe
  misc_feature (1)..(25): SEQ ID NO: 1803; WAN024FLK; Start 71; Stop 95
ttcggagtaattcaatcagaactta

SEQ ID NO: 305649 - DNA, 25 bp, Artificial
  probe
  misc_feature (1)..(25): SEQ ID NO: 1803; WAN024FLK; Start 72; Stop 96
tcggagtaattcaatcagaacttat

SEQ ID NO: 305650 - DNA, 25 bp, Artificial
  probe
  misc_feature (1)..(25): SEQ ID NO: 1803; WAN024FLK; Start 558; Stop 582
ccagttgagcaagatattagataac

SEQ ID NO: 305651 - DNA, 25 bp, Artificial
  probe
  misc_feature (1)..(25): SEQ ID NO: 1803; WAN024FLK; Start 554; Stop 578
ctacccagttgagcaagatattaga

SEQ ID NO: 305652 - DNA, 25 bp, Artificial
  probe
  misc_feature (1)..(25): SEQ ID NO: 1803; WAN024FLK; Start 365; Stop 389
ttgtgaaattatgtgctgactttga

SEQ ID NO: 305653 - DNA, 25 bp, Artificial
  probe
  misc_feature (1)..(25): SEQ ID NO: 1803; WAN024FLK; Start 366; Stop 390
tgtgaaattatgtgctgactttgat

SEQ ID NO: 305654 - DNA, 25 bp, Artificial
  probe
  misc_feature (1)..(25): SEQ ID NO: 1803; WAN024FLK; Start 218; Stop 242
ctgaagagcttccgtatgagagtaa

SEQ ID NO: 305655 - DNA, 25 bp, Artificial
  probe
  misc_feature (1)..(25): SEQ ID NO: 1803; WAN024FLK; Start 563; Stop 587
tgagcaagatattagataactacga

SEQ ID NO: 305656 - DNA, 25 bp, Artificial
  probe
  misc_feature (1)..(25): SEQ ID NO: 1803; WAN024FLK; Start 556; Stop 580
acccagttgagcaagatattagata

SEQ ID NO: 305657 - DNA, 25 bp, Artificial
  probe
  misc_feature (1)..(25): SEQ ID NO: 1803; WAN024FLK; Start 555; Stop 579
tacccagttgagcaagatattagat

SEQ ID NO: 305658 - DNA, 25 bp, Artificial
  probe
  misc_feature (1)..(25): SEQ ID NO: 1803; WAN024FLK; Start 364; Stop 388
attgtgaaattatgtgctgactttg

SEQ ID NO: 305659 - DNA, 25 bp, Artificial
  probe
  misc_feature (1)..(25): SEQ ID NO: 1803; WAN024FLK; Start 553; Stop 577
actacccagttgagcaagatattag

SEQ ID NO: 305660 - DNA, 25 bp, Artificial
  probe
  misc_feature (1)..(25): SEQ ID NO: 1803; WAN024FLK; Start 367; Stop 391
gtgaaattatgtgctgactttgatt

SEQ ID NO: 305661 - DNA, 25 bp, Artificial
  probe
  misc_feature (1)..(25): SEQ ID NO: 1803; WAN024FLK; Start 538; Stop 562
tttgatgaactagaaactacccagt

SEQ ID NO: 305662 - DNA, 25 bp, Artificial
  probe
  misc_feature (1)..(25): SEQ ID NO: 1803; WAN024FLK; Start 557; Stop 581
cccagttgagcaagatattagataa

SEQ ID NO: 305663 - DNA, 25 bp, Artificial
  probe
  misc_feature (1)..(25): SEQ ID NO: 1803; WAN024FLK; Start 537; Stop 561
atttgatgaactagaaactacccag

SEQ ID NO: 305664 - DNA, 25 bp, Artificial
  probe
  misc_feature (1)..(25): SEQ ID NO: 1803; WAN024FLK; Start 151; Stop 175
ttgctaaagtttgtatcgttgaaat

SEQ ID NO: 305665 - DNA, 25 bp, Artificial
  probe
  misc_feature (1)..(25): SEQ ID NO: 1803; WAN024FLK; Start 150; Stop 174
attgctaaagtttgtatcgttgaaa

SEQ ID NO: 305666 - DNA, 25 bp, Artificial
  probe
  misc_feature (1)..(25): SEQ ID NO: 1803; WAN024FLK; Start 70; Stop 94
tttcggagtaattcaatcagaactt

SEQ ID NO: 305667 - DNA, 25 bp, Artificial
  probe
  misc_feature (1)..(25): SEQ ID NO: 1803; WAN024FLK; Start 217; Stop 241
tctgaagagcttccgtatgagagta

SEQ ID NO: 305668 - DNA, 25 bp, Artificial
  probe
  misc_feature (1)..(25): SEQ ID NO: 1803; WAN024FLK; Start 69; Stop 93
atttcggagtaattcaatcagaact

SEQ ID NO: 305669 - DNA, 25 bp, Artificial
  probe
  misc_feature (1)..(25): SEQ ID NO: 1803; WAN024FLK; Start 536; Stop 560
aatttgatgaactagaaactaccca

SEQ ID NO: 305670 - DNA, 25 bp, Artificial
  probe
  misc_feature (1)..(25): SEQ ID NO: 1803; WAN024FLK; Start 562; Stop 586
ttgagcaagatattagataactacg

SEQ ID NO: 305671 - DNA, 25 bp, Artificial
  probe
  misc_feature (1)..(25): SEQ ID NO: 1803; WAN024FLK; Start 221; Stop 245
aagagcttccgtatgagagtaaatt

SEQ ID NO: 305672 - DNA, 25 bp, Artificial
  probe
  misc_feature (1)..(25): SEQ ID NO: 1803; WAN024FLK; Start 220; Stop 244
gaagagcttccgtatgagagtaaat

SEQ ID NO: 305673 - DNA, 25 bp, Artificial
  probe
  misc_feature (1)..(25): SEQ ID NO: 1803; WAN024FLK; Start 73; Stop 97
cggagtaattcaatcagaacttata

SEQ ID NO: 305674 - DNA, 25 bp, Artificial
  probe
  misc_feature (1)..(25): SEQ ID NO: 1803; WAN024FLK; Start 363; Stop 387
tattgtgaaattatgtgctgacttt

SEQ ID NO: 305675 - DNA, 25 bp, Artificial
  probe
  misc_feature (1)..(25): SEQ ID NO: 1803; WAN024FLK; Start 224; Stop 248
agcttccgtatgagagtaaatttga

SEQ ID NO: 305676 - DNA, 25 bp, Artificial
  probe
  misc_feature (1)..(25): SEQ ID NO: 1803; WAN024FLK; Start 223; Stop 247
gagcttccgtatgagagtaaatttg

SEQ ID NO: 305677 - DNA, 25 bp, Artificial
  probe
  misc_feature (1)..(25): SEQ ID NO: 1803; WAN024FLK; Start 222; Stop 246
agagcttccgtatgagagtaaattt

SEQ ID NO: 305678 - DNA, 25 bp, Artificial
  probe
  misc_feature (1)..(25): SEQ ID NO: 1803; WAN024FLK; Start 152; Stop 176
tgctaaagtttgtatcgttgaaata

SEQ ID NO: 305679 - DNA, 25 bp, Artificial
  probe
  misc_feature (1)..(25): SEQ ID NO: 1804; WAN024C4G; Start 329; Stop 353
tggtgacttctatgctgtattctac

SEQ ID NO: 305680 - DNA, 25 bp, Artificial
  probe
  misc_feature (1)..(25): SEQ ID NO: 1804; WAN024C4G; Start 330; Stop 354
ggtgacttctatgctgtattctact

SEQ ID NO: 305681 - DNA, 25 bp, Artificial
  probe
  misc_feature (1)..(25): SEQ ID NO: 1804; WAN024C4G; Start 770; Stop 794
taccaccaatcattctattcgcatt

SEQ ID NO: 305682 - DNA, 25 bp, Artificial
  probe
  misc_feature (1)..(25): SEQ ID NO: 1804; WAN024C4G; Start 769; Stop 793
ttaccaccaatcattctattcgcat

SEQ ID NO: 305683 - DNA, 25 bp, Artificial
  probe
  misc_feature (1)..(25): SEQ ID NO: 1804; WAN024C4G; Start 768; Stop 792
attaccaccaatcattctattcgca

SEQ ID NO: 305684 - DNA, 25 bp, Artificial
  probe
  misc_feature (1)..(25): SEQ ID NO: 1804; WAN024C4G; Start 327; Stop 351
gttggtgacttctatgctgtattct

SEQ ID NO: 305685 - DNA, 25 bp, Artificial
  probe
  misc_feature (1)..(25): SEQ ID NO: 1804; WAN024C4G; Start 328; Stop 352
ttggtgacttctatgctgtattcta

SEQ ID NO: 305686 - DNA, 25 bp, Artificial
  probe
  misc_feature (1)..(25): SEQ ID NO: 1804; WAN024C4G; Start 451; Stop 475
tcttgtagtggaattgctatgagtt

SEQ ID NO: 305687 - DNA, 25 bp, Artificial
  probe
  misc_feature (1)..(25): SEQ ID NO: 1804; WAN024C4G; Start 431; Stop 455
ttgctctaattctggtctactcttg

SEQ ID NO: 305688 - DNA, 25 bp, Artificial
  probe
  misc_feature (1)..(25): SEQ ID NO: 1804; WAN024C4G; Start 430; Stop 454
gttgctctaattctggtctactctt

SEQ ID NO: 305689 - DNA, 25 bp, Artificial
  probe
  misc_feature (1)..(25): SEQ ID NO: 1804; WAN024C4G; Start 767; Stop 791
tattaccaccaatcattctattcgc

SEQ ID NO: 305690 - DNA, 25 bp, Artificial
  probe
  misc_feature (1)..(25): SEQ ID NO: 1804; WAN024C4G; Start 433; Stop 457
gctctaattctggtctactcttgta

SEQ ID NO: 305691 - DNA, 25 bp, Artificial
  probe
  misc_feature (1)..(25): SEQ ID NO: 1804; WAN024C4G; Start 432; Stop 456
tgctctaattctggtctactcttgt

SEQ ID NO: 305692 - DNA, 25 bp, Artificial
  probe
  misc_feature (1)..(25): SEQ ID NO: 1804; WAN024C4G; Start 331; Stop 355
gtgacttctatgctgtattctactc

SEQ ID NO: 305693 - DNA, 25 bp, Artificial
  probe
  misc_feature (1)..(25): SEQ ID NO: 1804; WAN024C4G; Start 332; Stop 356
tgacttctatgctgtattctactct

SEQ ID NO: 305694 - DNA, 25 bp, Artificial
  probe
  misc_feature (1)..(25): SEQ ID NO: 1804; WAN024C4G; Start 326; Stop 350
agttggtgacttctatgctgtattc

SEQ ID NO: 305695 - DNA, 25 bp, Artificial
  probe
  misc_feature (1)..(25): SEQ ID NO: 1804; WAN024C4G; Start 429; Stop 453
agttgctctaattctggtctactct

SEQ ID NO: 305696 - DNA, 25 bp, Artificial
  probe
  misc_feature (1)..(25): SEQ ID NO: 1804; WAN024C4G; Start 450; Stop 474
ctcttgtagtggaattgctatgagt

SEQ ID NO: 305697 - DNA, 25 bp, Artificial
  probe
  misc_feature (1)..(25): SEQ ID NO: 1804; WAN024C4G; Start 449; Stop 473
actcttgtagtggaattgctatgag

SEQ ID NO: 305698 - DNA, 25 bp, Artificial
  probe
  misc_feature (1)..(25): SEQ ID NO: 1804; WAN024C4G; Start 448; Stop 472
tactcttgtagtggaattgctatga

SEQ ID NO: 305699 - DNA, 25 bp, Artificial
  probe
  misc_feature (1)..(25): SEQ ID NO: 1804; WAN024C4G; Start 266; Stop 290
gcattgttatgatctccatgtcttc

SEQ ID NO: 305700 - DNA, 25 bp, Artificial
  probe
  misc_feature (1)..(25): SEQ ID NO: 1804; WAN024C4G; Start 265; Stop 289
agcattgttatgatctccatgtctt

SEQ ID NO: 305701 - DNA, 25 bp, Artificial
  probe
  misc_feature (1)..(25): SEQ ID NO: 1804; WAN024C4G; Start 264; Stop 288
tagcattgttatgatctccatgtct

SEQ ID NO: 305702 - DNA, 25 bp, Artificial
  probe
  misc_feature (1)..(25): SEQ ID NO: 1804; WAN024C4G; Start 428; Stop 452
cagttgctctaattctggtctactc

SEQ ID NO: 305703 - DNA, 25 bp, Artificial
  probe
  misc_feature (1)..(25): SEQ ID NO: 1804; WAN024C4G; Start 764; Stop 788
tcgtattaccaccaatcattctatt

SEQ ID NO: 305704 - DNA, 25 bp, Artificial
  probe
  misc_feature (1)..(25): SEQ ID NO: 1804; WAN024C4G; Start 762; Stop 786
aatcgtattaccaccaatcattcta

SEQ ID NO: 305705 - DNA, 25 bp, Artificial
  probe
  misc_feature (1)..(25): SEQ ID NO: 1804; WAN024C4G; Start 263; Stop 287
ttagcattgttatgatctccatgtc

SEQ ID NO: 305706 - DNA, 25 bp, Artificial
  probe
  misc_feature (1)..(25): SEQ ID NO: 1804; WAN024C4G; Start 766; Stop 790
gtattaccaccaatcattctattcg

SEQ ID NO: 305707 - DNA, 25 bp, Artificial
  probe
  misc_feature (1)..(25): SEQ ID NO: 1804; WAN024C4G; Start 765; Stop 789
cgtattaccaccaatcattctattc

SEQ ID NO: 305708 - DNA, 25 bp, Artificial
  probe
  misc_feature (1)..(25): SEQ ID NO: 1804; WAN024C4G; Start 763; Stop 787
atcgtattaccaccaatcattctat

SEQ ID NO: 305709 - DNA, 25 bp, Artificial
  probe
  misc_feature (1)..(25): SEQ ID NO: 1804; WAN024C4G; Start 761; Stop 785
taatcgtattaccaccaatcattct

SEQ ID NO: 305710 - DNA, 25 bp, Artificial
  probe
  misc_feature (1)..(25): SEQ ID NO: 1804; WAN024C4G; Start 267; Stop 291
cattgttatgatctccatgtcttca

SEQ ID NO: 305711 - DNA, 25 bp, Artificial
  probe
  misc_feature (1)..(25): SEQ ID NO: 1804; WAN024C4G; Start 262; Stop 286
attagcattgttatgatctccatgt

SEQ ID NO: 305712 - DNA, 25 bp, Artificial
  probe
  misc_feature (1)..(25): SEQ ID NO: 1805; WAN024FE9; Start 321; Stop 345
gtgttattcggactctatctgctat

SEQ ID NO: 305713 - DNA, 25 bp, Artificial
  probe
  misc_feature (1)..(25): SEQ ID NO: 1805; WAN024FE9; Start 325; Stop 349
tattcggactctatctgctatatgc

SEQ ID NO: 305714 - DNA, 25 bp, Artificial
  probe
  misc_feature (1)..(25): SEQ ID NO: 1805; WAN024FE9; Start 435; Stop 459
gacctaccagacagatgaagtattc

SEQ ID NO: 305715 - DNA, 25 bp, Artificial
  probe
  misc_feature (1)..(25): SEQ ID NO: 1805; WAN024FE9; Start 212; Stop 236
atatgttgaagattgcggagaagag

SEQ ID NO: 305716 - DNA, 25 bp, Artificial
  probe
  misc_feature (1)..(25): SEQ ID NO: 1805; WAN024FE9; Start 211; Stop 235
gatatgttgaagattgcggagaaga

SEQ ID NO: 305717 - DNA, 25 bp, Artificial
  probe
  misc_feature (1)..(25): SEQ ID NO: 1805; WAN024FE9; Start 436; Stop 460
acctaccagacagatgaagtattcc

SEQ ID NO: 305718 - DNA, 25 bp, Artificial
  probe
  misc_feature (1)..(25): SEQ ID NO: 1805; WAN024FE9; Start 322; Stop 346
tgttattcggactctatctgctata

SEQ ID NO: 305719 - DNA, 25 bp, Artificial
  probe
  misc_feature (1)..(25): SEQ ID NO: 1805; WAN024FE9; Start 434; Stop 458
cgacctaccagacagatgaagtatt

SEQ ID NO: 305720 - DNA, 25 bp, Artificial
  probe
  misc_feature (1)..(25): SEQ ID NO: 1805; WAN024FE9; Start 201; Stop 225
cttgagtgcggatatgttgaagatt

SEQ ID NO: 305721 - DNA, 25 bp, Artificial
  probe
  misc_feature (1)..(25): SEQ ID NO: 1805; WAN024FE9; Start 202; Stop 226
ttgagtgcggatatgttgaagattg

SEQ ID NO: 305722 - DNA, 25 bp, Artificial
  probe
  misc_feature (1)..(25): SEQ ID NO: 1805; WAN024FE9; Start 320; Stop 344
cgtgttattcggactctatctgcta

SEQ ID NO: 305723 - DNA, 25 bp, Artificial
  probe
  misc_feature (1)..(25): SEQ ID NO: 1805; WAN024FE9; Start 213; Stop 237
tatgttgaagattgcggagaagaga

SEQ ID NO: 305724 - DNA, 25 bp, Artificial
  probe
  misc_feature (1)..(25): SEQ ID NO: 1805; WAN024FE9; Start 210; Stop 234
ggatatgttgaagattgcggagaag

SEQ ID NO: 305725 - DNA, 25 bp, Artificial
  probe
  misc_feature (1)..(25): SEQ ID NO: 1805; WAN024FE9; Start 200; Stop 224
acttgagtgcggatatgttgaagat

SEQ ID NO: 305726 - DNA, 25 bp, Artificial
  probe
  misc_feature (1)..(25): SEQ ID NO: 1805; WAN024FE9; Start 324; Stop 348
ttattcggactctatctgctatatg

SEQ ID NO: 305727 - DNA, 25 bp, Artificial
  probe
  misc_feature (1)..(25): SEQ ID NO: 1805; WAN024FE9; Start 323; Stop 347
gttattcggactctatctgctatat

SEQ ID NO: 305728 - DNA, 25 bp, Artificial
  probe
  misc_feature (1)..(25): SEQ ID NO: 1805; WAN024FE9; Start 182; Stop 206
ttgatgtgactggacttgacttgag

SEQ ID NO: 305729 - DNA, 25 bp, Artificial
  probe
  misc_feature (1)..(25): SEQ ID NO: 1805; WAN024FE9; Start 197; Stop 221
ttgacttgagtgcggatatgttgaa

SEQ ID NO: 305730 - DNA, 25 bp, Artificial
  probe
  misc_feature (1)..(25): SEQ ID NO: 1805; WAN024FE9; Start 214; Stop 238
atgttgaagattgcggagaagagag

SEQ ID NO: 305731 - DNA, 25 bp, Artificial
  probe
  misc_feature (1)..(25): SEQ ID NO: 1805; WAN024FE9; Start 4; Stop 28
attatggcgacttatgaaacctttg

SEQ ID NO: 305732 - DNA, 25 bp, Artificial
  probe
  misc_feature (1)..(25): SEQ ID NO: 1805; WAN024FE9; Start 51; Stop 75
ggacgatagtttatacgacaaatgg

SEQ ID NO: 305733 - DNA, 25 bp, Artificial
  probe
  misc_feature (1)..(25): SEQ ID NO: 1805; WAN024FE9; Start 3; Stop 27
gattatggcgacttatgaaaccttt

SEQ ID NO: 305734 - DNA, 25 bp, Artificial
  probe
  misc_feature (1)..(25): SEQ ID NO: 1805; WAN024FE9; Start 1; Stop 25
atgattatggcgacttatgaaacct

SEQ ID NO: 305735 - DNA, 25 bp, Artificial
  probe
  misc_feature (1)..(25): SEQ ID NO: 1805; WAN024FE9; Start 2; Stop 26
tgattatggcgacttatgaaacctt

SEQ ID NO: 305736 - DNA, 25 bp, Artificial
  probe
  misc_feature (1)..(25): SEQ ID NO: 1805; WAN024FE9; Start 53; Stop 77
acgatagtttatacgacaaatggac

SEQ ID NO: 305737 - DNA, 25 bp, Artificial
  probe
  misc_feature (1)..(25): SEQ ID NO: 1805; WAN024FE9; Start 50; Stop 74
tggacgatagtttatacgacaaatg

SEQ ID NO: 305738 - DNA, 25 bp, Artificial
  probe
  misc_feature (1)..(25): SEQ ID NO: 1805; WAN024FE9; Start 449; Stop 473
atgaagtattccctggctattccta

SEQ ID NO: 305739 - DNA, 25 bp, Artificial
  probe
  misc_feature (1)..(25): SEQ ID NO: 1805; WAN024FE9; Start 343; Stop 367
tatatgcaggatgaggtggaagtag

SEQ ID NO: 305740 - DNA, 25 bp, Artificial
  probe
  misc_feature (1)..(25): SEQ ID NO: 1805; WAN024FE9; Start 342; Stop 366
ctatatgcaggatgaggtggaagta

SEQ ID NO: 305741 - DNA, 25 bp, Artificial
  probe
  misc_feature (1)..(25): SEQ ID NO: 1805; WAN024FE9; Start 199; Stop 223
gacttgagtgcggatatgttgaaga

SEQ ID NO: 305742 - DNA, 25 bp, Artificial
  probe
  misc_feature (1)..(25): SEQ ID NO: 1805; WAN024FE9; Start 602; Stop 626
tacatgaggagaggacctatgagat

SEQ ID NO: 305743 - DNA, 25 bp, Artificial
  probe
  misc_feature (1)..(25): SEQ ID NO: 1805; WAN024FE9; Start 598; Stop 622
gaagtacatgaggagaggacctatg

SEQ ID NO: 305744 - DNA, 25 bp, Artificial
  probe
  misc_feature (1)..(25): SEQ ID NO: 1805; WAN024FE9; Start 52; Stop 76
gacgatagtttatacgacaaatgga

SEQ ID NO: 305745 - DNA, 25 bp, Artificial
  probe
  misc_feature (1)..(25): SEQ ID NO: 1806; WAN024D5X; Start 269; Stop 293
taagcgttacccaagaatatgatga

SEQ ID NO: 305746 - DNA, 25 bp, Artificial
  probe
  misc_feature (1)..(25): SEQ ID NO: 1806; WAN024D5X; Start 270; Stop 294
aagcgttacccaagaatatgatgaa

SEQ ID NO: 305747 - DNA, 25 bp, Artificial
  probe
  misc_feature (1)..(25): SEQ ID NO: 1806; WAN024D5X; Start 371; Stop 395
ttccagaagatttacatcaacccaa

SEQ ID NO: 305748 - DNA, 25 bp, Artificial
  probe
  misc_feature (1)..(25): SEQ ID NO: 1806; WAN024D5X; Start 370; Stop 394
tttccagaagatttacatcaaccca

SEQ ID NO: 305749 - DNA, 25 bp, Artificial
  probe
  misc_feature (1)..(25): SEQ ID NO: 1806; WAN024D5X; Start 273; Stop 297
cgttacccaagaatatgatgaagag

SEQ ID NO: 305750 - DNA, 25 bp, Artificial
  probe
  misc_feature (1)..(25): SEQ ID NO: 1806; WAN024D5X; Start 372; Stop 396
tccagaagatttacatcaacccaag

SEQ ID NO: 305751 - DNA, 25 bp, Artificial
  probe
  misc_feature (1)..(25): SEQ ID NO: 1806; WAN024D5X; Start 272; Stop 296
gcgttacccaagaatatgatgaaga

SEQ ID NO: 305752 - DNA, 25 bp, Artificial
  probe
  misc_feature (1)..(25): SEQ ID NO: 1806; WAN024D5X; Start 271; Stop 295
agcgttacccaagaatatgatgaag

SEQ ID NO: 305753 - DNA, 25 bp, Artificial
  probe
  misc_feature (1)..(25): SEQ ID NO: 1806; WAN024D5X; Start 277; Stop 301
acccaagaatatgatgaagagaaag

SEQ ID NO: 305754 - DNA, 25 bp, Artificial
  probe
  misc_feature (1)..(25): SEQ ID NO: 1806; WAN024D5X; Start 16; Stop 40
attagccgtttaggaacttatgtgg

SEQ ID NO: 305755 - DNA, 25 bp, Artificial
  probe
  misc_feature (1)..(25): SEQ ID NO: 1806; WAN024D5X; Start 15; Stop 39
aattagccgtttaggaacttatgtg

SEQ ID NO: 305756 - DNA, 25 bp, Artificial
  probe
  misc_feature (1)..(25): SEQ ID NO: 1806; WAN024D5X; Start 399; Stop 423
tcgtataaatgatgaacctgtgaaa

SEQ ID NO: 305757 - DNA, 25 bp, Artificial
  probe
  misc_feature (1)..(25): SEQ ID NO: 1806; WAN024D5X; Start 22; Stop 46
cgtttaggaacttatgtgggagtaa

SEQ ID NO: 305758 - DNA, 25 bp, Artificial
  probe
  misc_feature (1)..(25): SEQ ID NO: 1806; WAN024D5X; Start 373; Stop 397
ccagaagatttacatcaacccaagg

SEQ ID NO: 305759 - DNA, 25 bp, Artificial
  probe
  misc_feature (1)..(25): SEQ ID NO: 1806; WAN024D5X; Start 278; Stop 302
cccaagaatatgatgaagagaaaga

SEQ ID NO: 305760 - DNA, 25 bp, Artificial
  probe
  misc_feature (1)..(25): SEQ ID NO: 1806; WAN024D5X; Start 398; Stop 422
ttcgtataaatgatgaacctgtgaa

SEQ ID NO: 305761 - DNA, 25 bp, Artificial
  probe
  misc_feature (1)..(25): SEQ ID NO: 1806; WAN024D5X; Start 14; Stop 38
aaattagccgtttaggaacttatgt

SEQ ID NO: 305762 - DNA, 25 bp, Artificial
  probe
  misc_feature (1)..(25): SEQ ID NO: 1806; WAN024D5X; Start 274; Stop 298
gttacccaagaatatgatgaagaga

SEQ ID NO: 305763 - DNA, 25 bp, Artificial
  probe
  misc_feature (1)..(25): SEQ ID NO: 1806; WAN024D5X; Start 23; Stop 47
gtttaggaacttatgtgggagtaaa

SEQ ID NO: 305764 - DNA, 25 bp, Artificial
  probe
  misc_feature (1)..(25): SEQ ID NO: 1806; WAN024D5X; Start 308; Stop 332
aattatacacagggaaagtggaaca

SEQ ID NO: 305765 - DNA, 25 bp, Artificial
  probe
  misc_feature (1)..(25): SEQ ID NO: 1806; WAN024D5X; Start 306; Stop 330
tgaattatacacagggaaagtggaa

SEQ ID NO: 305766 - DNA, 25 bp, Artificial
  probe
  misc_feature (1)..(25): SEQ ID NO: 1806; WAN024D5X; Start 305; Stop 329
ttgaattatacacagggaaagtgga

SEQ ID NO: 305767 - DNA, 25 bp, Artificial
  probe
  misc_feature (1)..(25): SEQ ID NO: 1806; WAN024D5X; Start 307; Stop 331
gaattatacacagggaaagtggaac

SEQ ID NO: 305768 - DNA, 25 bp, Artificial
  probe
  misc_feature (1)..(25): SEQ ID NO: 1806; WAN024D5X; Start 309; Stop 333
attatacacagggaaagtggaacag

SEQ ID NO: 305769 - DNA, 25 bp, Artificial
  probe
  misc_feature (1)..(25): SEQ ID NO: 1806; WAN024D5X; Start 21; Stop 45
ccgtttaggaacttatgtgggagta

SEQ ID NO: 305770 - DNA, 25 bp, Artificial
  probe
  misc_feature (1)..(25): SEQ ID NO: 1806; WAN024D5X; Start 268; Stop 292
gtaagcgttacccaagaatatgatg

SEQ ID NO: 305771 - DNA, 25 bp, Artificial
  probe
  misc_feature (1)..(25): SEQ ID NO: 1806; WAN024D5X; Start 267; Stop 291
tgtaagcgttacccaagaatatgat

SEQ ID NO: 305772 - DNA, 25 bp, Artificial
  probe
  misc_feature (1)..(25): SEQ ID NO: 1806; WAN024D5X; Start 266; Stop 290
atgtaagcgttacccaagaatatga

SEQ ID NO: 305773 - DNA, 25 bp, Artificial
  probe
  misc_feature (1)..(25): SEQ ID NO: 1806; WAN024D5X; Start 304; Stop 328
attgaattatacacagggaaagtgg

SEQ ID NO: 305774 - DNA, 25 bp, Artificial
  probe
  misc_feature (1)..(25): SEQ ID NO: 1806; WAN024D5X; Start 265; Stop 289
aatgtaagcgttacccaagaatatg

SEQ ID NO: 305775 - DNA, 25 bp, Artificial
  probe
  misc_feature (1)..(25): SEQ ID NO: 1806; WAN024D5X; Start 26; Stop 50
taggaacttatgtgggagtaaatcc

SEQ ID NO: 305776 - DNA, 25 bp, Artificial
  probe
  misc_feature (1)..(25): SEQ ID NO: 1806; WAN024D5X; Start 25; Stop 49
ttaggaacttatgtgggagtaaatc

SEQ ID NO: 305777 - DNA, 25 bp, Artificial
  probe
  misc_feature (1)..(25): SEQ ID NO: 1806; WAN024D5X; Start 390; Stop 414
acccaaggttcgtataaatgatgaa

SEQ ID NO: 305778 - DNA, 25 bp, Artificial
  probe
  misc_feature (1)..(25): SEQ ID NO: 1807; WAN024CIF; Start 97; Stop 121
cgtctgtataatcctctattgccat

SEQ ID NO: 305779 - DNA, 25 bp, Artificial
  probe
  misc_feature (1)..(25): SEQ ID NO: 1807; WAN024CIF; Start 95; Stop 119
ttcgtctgtataatcctctattgcc

SEQ ID NO: 305780 - DNA, 25 bp, Artificial
  probe
  misc_feature (1)..(25): SEQ ID NO: 1807; WAN024CIF; Start 94; Stop 118
gttcgtctgtataatcctctattgc

SEQ ID NO: 305781 - DNA, 25 bp, Artificial
  probe
  misc_feature (1)..(25): SEQ ID NO: 1807; WAN024CIF; Start 96; Stop 120
tcgtctgtataatcctctattgcca

SEQ ID NO: 305782 - DNA, 25 bp, Artificial
  probe
  misc_feature (1)..(25): SEQ ID NO: 1807; WAN024CIF; Start 103; Stop 127
tataatcctctattgccatctggtg

SEQ ID NO: 305783 - DNA, 25 bp, Artificial
  probe
  misc_feature (1)..(25): SEQ ID NO: 1807; WAN024CIF; Start 102; Stop 126
gtataatcctctattgccatctggt

SEQ ID NO: 305784 - DNA, 25 bp, Artificial
  probe
  misc_feature (1)..(25): SEQ ID NO: 1807; WAN024CIF; Start 101; Stop 125
tgtataatcctctattgccatctgg

SEQ ID NO: 305785 - DNA, 25 bp, Artificial
  probe
  misc_feature (1)..(25): SEQ ID NO: 1807; WAN024CIF; Start 90; Stop 114
aagtgttcgtctgtataatcctcta

SEQ ID NO: 305786 - DNA, 25 bp, Artificial
  probe
  misc_feature (1)..(25): SEQ ID NO: 1807; WAN024CIF; Start 100; Stop 124
ctgtataatcctctattgccatctg

SEQ ID NO: 305787 - DNA, 25 bp, Artificial
  probe
  misc_feature (1)..(25): SEQ ID NO: 1807; WAN024CIF; Start 99; Stop 123
tctgtataatcctctattgccatct

SEQ ID NO: 305788 - DNA, 25 bp, Artificial
  probe
  misc_feature (1)..(25): SEQ ID NO: 1807; WAN024CIF; Start 98; Stop 122
gtctgtataatcctctattgccatc

SEQ ID NO: 305789 - DNA, 25 bp, Artificial
  probe
  misc_feature (1)..(25): SEQ ID NO: 1807; WAN024CIF; Start 91; Stop 115
agtgttcgtctgtataatcctctat

SEQ ID NO: 305790 - DNA, 25 bp, Artificial
  probe
  misc_feature (1)..(25): SEQ ID NO: 1807; WAN024CIF; Start 104; Stop 128
ataatcctctattgccatctggtga

SEQ ID NO: 305791 - DNA, 25 bp, Artificial
  probe
  misc_feature (1)..(25): SEQ ID NO: 1807; WAN024CIF; Start 415; Stop 439
tctatcaaggagatcagaagtgttc

SEQ ID NO: 305792 - DNA, 25 bp, Artificial
  probe
  misc_feature (1)..(25): SEQ ID NO: 1807; WAN024CIF; Start 93; Stop 117
tgttcgtctgtataatcctctattg

SEQ ID NO: 305793 - DNA, 25 bp, Artificial
  probe
  misc_feature (1)..(25): SEQ ID NO: 1807; WAN024CIF; Start 92; Stop 116
gtgttcgtctgtataatcctctatt

SEQ ID NO: 305794 - DNA, 25 bp, Artificial
  probe
  misc_feature (1)..(25): SEQ ID NO: 1807; WAN024CIF; Start 9; Stop 33
tacacagagacagtctattcattgg

SEQ ID NO: 305795 - DNA, 25 bp, Artificial
  probe
  misc_feature (1)..(25): SEQ ID NO: 1807; WAN024CIF; Start 47; Stop 71
ggacttatatgtatggaacaactgt

SEQ ID NO: 305796 - DNA, 25 bp, Artificial
  probe
  misc_feature (1)..(25): SEQ ID NO: 1807; WAN024CIF; Start 105; Stop 129
taatcctctattgccatctggtgag

SEQ ID NO: 305797 - DNA, 25 bp, Artificial
  probe
  misc_feature (1)..(25): SEQ ID NO: 1807; WAN024CIF; Start 8; Stop 32
ttacacagagacagtctattcattg

SEQ ID NO: 305798 - DNA, 25 bp, Artificial
  probe
  misc_feature (1)..(25): SEQ ID NO: 1807; WAN024CIF; Start 205; Stop 229
aagcaggagtatcaactatcactgg

SEQ ID NO: 305799 - DNA, 25 bp, Artificial
  probe
  misc_feature (1)..(25): SEQ ID NO: 1807; WAN024CIF; Start 41; Stop 65
ttggtgggacttatatgtatggaac

SEQ ID NO: 305800 - DNA, 25 bp, Artificial
  probe
  misc_feature (1)..(25): SEQ ID NO: 1807; WAN024CIF; Start 40; Stop 64
gttggtgggacttatatgtatggaa

SEQ ID NO: 305801 - DNA, 25 bp, Artificial
  probe
  misc_feature (1)..(25): SEQ ID NO: 1807; WAN024CIF; Start 123; Stop 147
tggtgagattctaaagacttggttt

SEQ ID NO: 305802 - DNA, 25 bp, Artificial
  probe
  misc_feature (1)..(25): SEQ ID NO: 1807; WAN024CIF; Start 89; Stop 113
aaagtgttcgtctgtataatcctct

SEQ ID NO: 305803 - DNA, 25 bp, Artificial
  probe
  misc_feature (1)..(25): SEQ ID NO: 1807; WAN024CIF; Start 122; Stop 146
ctggtgagattctaaagacttggtt

SEQ ID NO: 305804 - DNA, 25 bp, Artificial
  probe
  misc_feature (1)..(25): SEQ ID NO: 1807; WAN024CIF; Start 207; Stop 231
gcaggagtatcaactatcactggtt

SEQ ID NO: 305805 - DNA, 25 bp, Artificial
  probe
  misc_feature (1)..(25): SEQ ID NO: 1807; WAN024CIF; Start 112; Stop 136
ctattgccatctggtgagattctaa

SEQ ID NO: 305806 - DNA, 25 bp, Artificial
  probe
  misc_feature (1)..(25): SEQ ID NO: 1807; WAN024CIF; Start 60; Stop 84
tggaacaactgtatcttattaccct

SEQ ID NO: 305807 - DNA, 25 bp, Artificial
  probe
  misc_feature (1)..(25): SEQ ID NO: 1807; WAN024CIF; Start 111; Stop 135
tctattgccatctggtgagattcta

SEQ ID NO: 305808 - DNA, 25 bp, Artificial
  probe
  misc_feature (1)..(25): SEQ ID NO: 1807; WAN024CIF; Start 61; Stop 85
ggaacaactgtatcttattaccctg

SEQ ID NO: 305809 - DNA, 25 bp, Artificial
  probe
  misc_feature (1)..(25): SEQ ID NO: 1807; WAN024CIF; Start 203; Stop 227
gaaagcaggagtatcaactatcact

SEQ ID NO: 305810 - DNA, 25 bp, Artificial
  probe
  misc_feature (1)..(25): SEQ ID NO: 1807; WAN024CIF; Start 202; Stop 226
agaaagcaggagtatcaactatcac

SEQ ID NO: 305811 - DNA, 25 bp, Artificial
  probe
  misc_feature (1)..(25): SEQ ID NO: 1808; WAN024DAV; Start 443; Stop 467
aagttatcattgttccacctgtaga

SEQ ID NO: 305812 - DNA, 25 bp, Artificial
  probe
  misc_feature (1)..(25): SEQ ID NO: 1808; WAN024DAV; Start 887; Stop 911
ctgatgaagaagtaactcggaattg

SEQ ID NO: 305813 - DNA, 25 bp, Artificial
  probe
  misc_feature (1)..(25): SEQ ID NO: 1808; WAN024DAV; Start 444; Stop 468
agttatcattgttccacctgtagaa

SEQ ID NO: 305814 - DNA, 25 bp, Artificial
  probe
  misc_feature (1)..(25): SEQ ID NO: 1808; WAN024DAV; Start 441; Stop 465
agaagttatcattgttccacctgta

SEQ ID NO: 305815 - DNA, 25 bp, Artificial
  probe
  misc_feature (1)..(25): SEQ ID NO: 1808; WAN024DAV; Start 448; Stop 472
atcattgttccacctgtagaagatg

SEQ ID NO: 305816 - DNA, 25 bp, Artificial
  probe
  misc_feature (1)..(25): SEQ ID NO: 1808; WAN024DAV; Start 446; Stop 470
ttatcattgttccacctgtagaaga

SEQ ID NO: 305817 - DNA, 25 bp, Artificial
  probe
  misc_feature (1)..(25): SEQ ID NO: 1808; WAN024DAV; Start 445; Stop 469
gttatcattgttccacctgtagaag

SEQ ID NO: 305818 - DNA, 25 bp, Artificial
  probe
  misc_feature (1)..(25): SEQ ID NO: 1808; WAN024DAV; Start 442; Stop 466
gaagttatcattgttccacctgtag

SEQ ID NO: 305819 - DNA, 25 bp, Artificial
  probe
  misc_feature (1)..(25): SEQ ID NO: 1808; WAN024DAV; Start 889; Stop 913
gatgaagaagtaactcggaattggt

SEQ ID NO: 305820 - DNA, 25 bp, Artificial
  probe
  misc_feature (1)..(25): SEQ ID NO: 1808; WAN024DAV; Start 888; Stop 912
tgatgaagaagtaactcggaattgg

SEQ ID NO: 305821 - DNA, 25 bp, Artificial
  probe
  misc_feature (1)..(25): SEQ ID NO: 1808; WAN024DAV; Start 440; Stop 464
gagaagttatcattgttccacctgt

SEQ ID NO: 305822 - DNA, 25 bp, Artificial
  probe
  misc_feature (1)..(25): SEQ ID NO: 1808; WAN024DAV; Start 447; Stop 471
tatcattgttccacctgtagaagat

SEQ ID NO: 305823 - DNA, 25 bp, Artificial
  probe
  misc_feature (1)..(25): SEQ ID NO: 1808; WAN024DAV; Start 293; Stop 317
ttagtagtcaattcgctagtctcac

SEQ ID NO: 305824 - DNA, 25 bp, Artificial
  probe
  misc_feature (1)..(25): SEQ ID NO: 1808; WAN024DAV; Start 886; Stop 910
gctgatgaagaagtaactcggaatt

SEQ ID NO: 305825 - DNA, 25 bp, Artificial
  probe
  misc_feature (1)..(25): SEQ ID NO: 1808; WAN024DAV; Start 451; Stop 475
attgttccacctgtagaagatgaga

SEQ ID NO: 305826 - DNA, 25 bp, Artificial
  probe
  misc_feature (1)..(25): SEQ ID NO: 1808; WAN024DAV; Start 450; Stop 474
cattgttccacctgtagaagatgag

SEQ ID NO: 305827 - DNA, 25 bp, Artificial
  probe
  misc_feature (1)..(25): SEQ ID NO: 1808; WAN024DAV; Start 452; Stop 476
ttgttccacctgtagaagatgagaa

SEQ ID NO: 305828 - DNA, 25 bp, Artificial
  probe
  misc_feature (1)..(25): SEQ ID NO: 1808; WAN024DAV; Start 294; Stop 318
tagtagtcaattcgctagtctcact

SEQ ID NO: 305829 - DNA, 25 bp, Artificial
  probe
  misc_feature (1)..(25): SEQ ID NO: 1808; WAN024DAV; Start 481; Stop 505
aagattagttcaactcgtatccgtc

SEQ ID NO: 305830 - DNA, 25 bp, Artificial
  probe
  misc_feature (1)..(25): SEQ ID NO: 1808; WAN024DAV; Start 260; Stop 284
gcgaaggtgtagaagaattatatct

SEQ ID NO: 305831 - DNA, 25 bp, Artificial
  probe
  misc_feature (1)..(25): SEQ ID NO: 1808; WAN024DAV; Start 484; Stop 508
attagttcaactcgtatccgtcaag

SEQ ID NO: 305832 - DNA, 25 bp, Artificial
  probe
  misc_feature (1)..(25): SEQ ID NO: 1808; WAN024DAV; Start 483; Stop 507
gattagttcaactcgtatccgtcaa

SEQ ID NO: 305833 - DNA, 25 bp, Artificial
  probe
  misc_feature (1)..(25): SEQ ID NO: 1808; WAN024DAV; Start 335; Stop 359
caacttatatcaaggctatgaatgc

SEQ ID NO: 305834 - DNA, 25 bp, Artificial
  probe
  misc_feature (1)..(25): SEQ ID NO: 1808; WAN024DAV; Start 334; Stop 358
gcaacttatatcaaggctatgaatg

SEQ ID NO: 305835 - DNA, 25 bp, Artificial
  probe
  misc_feature (1)..(25): SEQ ID NO: 1808; WAN024DAV; Start 482; Stop 506
agattagttcaactcgtatccgtca

SEQ ID NO: 305836 - DNA, 25 bp, Artificial
  probe
  misc_feature (1)..(25): SEQ ID NO: 1808; WAN024DAV; Start 637; Stop 661
ttagaccgtacttatatgccagcag

SEQ ID NO: 305837 - DNA, 25 bp, Artificial
  probe
  misc_feature (1)..(25): SEQ ID NO: 1808; WAN024DAV; Start 295; Stop 319
agtagtcaattcgctagtctcactg

SEQ ID NO: 305838 - DNA, 25 bp, Artificial
  probe
  misc_feature (1)..(25): SEQ ID NO: 1808; WAN024DAV; Start 885; Stop 909
ggctgatgaagaagtaactcggaat

SEQ ID NO: 305839 - DNA, 25 bp, Artificial
  probe
  misc_feature (1)..(25): SEQ ID NO: 1808; WAN024DAV; Start 439; Stop 463
ggagaagttatcattgttccacctg

SEQ ID NO: 305840 - DNA, 25 bp, Artificial
  probe
  misc_feature (1)..(25): SEQ ID NO: 1808; WAN024DAV; Start 514; Stop 538
ttagatggaaatgtgaaagaagcag

SEQ ID NO: 305841 - DNA, 25 bp, Artificial
  probe
  misc_feature (1)..(25): SEQ ID NO: 1808; WAN024DAV; Start 858; Stop 882
agttgaccaattagtggatcagtta

SEQ ID NO: 305842 - DNA, 25 bp, Artificial
  probe
  misc_feature (1)..(25): SEQ ID NO: 1808; WAN024DAV; Start 695; Stop 719
gacagaagtatcgtgctatggctag

SEQ ID NO: 305843 - DNA, 25 bp, Artificial
  probe
  misc_feature (1)..(25): SEQ ID NO: 1808; WAN024DAV; Start 690; Stop 714
tcaaagacagaagtatcgtgctatg

SEQ ID NO: 305844 - DNA, 25 bp, Artificial
  probe
  misc_feature (1)..(25): SEQ ID NO: 1809; WAN024FG4; Start 69; Stop 93
aatcatggttagttttcttggtaga

SEQ ID NO: 305845 - DNA, 25 bp, Artificial
  probe
  misc_feature (1)..(25): SEQ ID NO: 1809; WAN024FG4; Start 68; Stop 92
gaatcatggttagttttcttggtag

SEQ ID NO: 305846 - DNA, 25 bp, Artificial
  probe
  misc_feature (1)..(25): SEQ ID NO: 1809; WAN024FG4; Start 70; Stop 94
atcatggttagttttcttggtagaa

SEQ ID NO: 305847 - DNA, 25 bp, Artificial
  probe
  misc_feature (1)..(25): SEQ ID NO: 1809; WAN024FG4; Start 67; Stop 91
agaatcatggttagttttcttggta

SEQ ID NO: 305848 - DNA, 25 bp, Artificial
  probe
  misc_feature (1)..(25): SEQ ID NO: 1809; WAN024FG4; Start 66; Stop 90
tagaatcatggttagttttcttggt

SEQ ID NO: 305849 - DNA, 25 bp, Artificial
  probe
  misc_feature (1)..(25): SEQ ID NO: 1809; WAN024FG4; Start 65; Stop 89
ctagaatcatggttagttttcttgg

SEQ ID NO: 305850 - DNA, 25 bp, Artificial
  probe
  misc_feature (1)..(25): SEQ ID NO: 1809; WAN024FG4; Start 62; Stop 86
tcactagaatcatggttagttttct

SEQ ID NO: 305851 - DNA, 25 bp, Artificial
  probe
  misc_feature (1)..(25): SEQ ID NO: 1809; WAN024FG4; Start 61; Stop 85
ttcactagaatcatggttagttttc

SEQ ID NO: 305852 - DNA, 25 bp, Artificial
  probe
  misc_feature (1)..(25): SEQ ID NO: 1809; WAN024FG4; Start 64; Stop 88
actagaatcatggttagttttcttg

SEQ ID NO: 305853 - DNA, 25 bp, Artificial
  probe
  misc_feature (1)..(25): SEQ ID NO: 1809; WAN024FG4; Start 63; Stop 87
cactagaatcatggttagttttctt

SEQ ID NO: 305854 - DNA, 25 bp, Artificial
  probe
  misc_feature (1)..(25): SEQ ID NO: 1809; WAN024FG4; Start 60; Stop 84
tttcactagaatcatggttagtttt

SEQ ID NO: 305855 - DNA, 25 bp, Artificial
  probe
  misc_feature (1)..(25): SEQ ID NO: 1809; WAN024FG4; Start 59; Stop 83
ttttcactagaatcatggttagttt

SEQ ID NO: 305856 - DNA, 25 bp, Artificial
  probe
  misc_feature (1)..(25): SEQ ID NO: 1809; WAN024FG4; Start 71; Stop 95
tcatggttagttttcttggtagaaa

SEQ ID NO: 305857 - DNA, 25 bp, Artificial
  probe
  misc_feature (1)..(25): SEQ ID NO: 1809; WAN024FG4; Start 12; Stop 36
agcatgtttaaaacaagaaagtaaa

SEQ ID NO: 305858 - DNA, 25 bp, Artificial
  probe
  misc_feature (1)..(25): SEQ ID NO: 1809; WAN024FG4; Start 72; Stop 96
catggttagttttcttggtagaaat

SEQ ID NO: 305859 - DNA, 25 bp, Artificial
  probe
  misc_feature (1)..(25): SEQ ID NO: 1809; WAN024FG4; Start 11; Stop 35
tagcatgtttaaaacaagaaagtaa

SEQ ID NO: 305860 - DNA, 25 bp, Artificial
  probe
  misc_feature (1)..(25): SEQ ID NO: 1809; WAN024FG4; Start 13; Stop 37
gcatgtttaaaacaagaaagtaaat

SEQ ID NO: 305861 - DNA, 25 bp, Artificial
  probe
  misc_feature (1)..(25): SEQ ID NO: 1809; WAN024FG4; Start 10; Stop 34
atagcatgtttaaaacaagaaagta

SEQ ID NO: 305862 - DNA, 25 bp, Artificial
  probe
  misc_feature (1)..(25): SEQ ID NO: 1809; WAN024FG4; Start 9; Stop 33
tatagcatgtttaaaacaagaaagt

SEQ ID NO: 305863 - DNA, 25 bp, Artificial
  probe
  misc_feature (1)..(25): SEQ ID NO: 1809; WAN024FG4; Start 74; Stop 98
tggttagttttcttggtagaaatat

SEQ ID NO: 305864 - DNA, 25 bp, Artificial
  probe
  misc_feature (1)..(25): SEQ ID NO: 1809; WAN024FG4; Start 73; Stop 97
atggttagttttcttggtagaaata

SEQ ID NO: 305865 - DNA, 25 bp, Artificial
  probe
  misc_feature (1)..(25): SEQ ID NO: 1809; WAN024FG4; Start 75; Stop 99
ggttagttttcttggtagaaatatt

SEQ ID NO: 305866 - DNA, 25 bp, Artificial
  probe
  misc_feature (1)..(25): SEQ ID NO: 1809; WAN024FG4; Start 79; Stop 103
agttttcttggtagaaatattttga

SEQ ID NO: 305867 - DNA, 25 bp, Artificial
  probe
  misc_feature (1)..(25): SEQ ID NO: 1810; WAN024CQQ; Start 148; Stop 172
tgtatgacttatctagctgatggag

SEQ ID NO: 305868 - DNA, 25 bp, Artificial
  probe
  misc_feature (1)..(25): SEQ ID NO: 1810; WAN024CQQ; Start 147; Stop 171
ttgtatgacttatctagctgatgga

SEQ ID NO: 305869 - DNA, 25 bp, Artificial
  probe
  misc_feature (1)..(25): SEQ ID NO: 1810; WAN024CQQ; Start 151; Stop 175
atgacttatctagctgatggagttc

SEQ ID NO: 305870 - DNA, 25 bp, Artificial
  probe
  misc_feature (1)..(25): SEQ ID NO: 1810; WAN024CQQ; Start 149; Stop 173
gtatgacttatctagctgatggagt

SEQ ID NO: 305871 - DNA, 25 bp, Artificial
  probe
  misc_feature (1)..(25): SEQ ID NO: 1810; WAN024CQQ; Start 152; Stop 176
tgacttatctagctgatggagttcc

SEQ ID NO: 305872 - DNA, 25 bp, Artificial
  probe
  misc_feature (1)..(25): SEQ ID NO: 1810; WAN024CQQ; Start 150; Stop 174
tatgacttatctagctgatggagtt

SEQ ID NO: 305873 - DNA, 25 bp, Artificial
  probe
  misc_feature (1)..(25): SEQ ID NO: 1810; WAN024CQQ; Start 146; Stop 170
attgtatgacttatctagctgatgg

SEQ ID NO: 305874 - DNA, 25 bp, Artificial
  probe
  misc_feature (1)..(25): SEQ ID NO: 1810; WAN024CQQ; Start 154; Stop 178
acttatctagctgatggagttccag

SEQ ID NO: 305875 - DNA, 25 bp, Artificial
  probe
  misc_feature (1)..(25): SEQ ID NO: 1810; WAN024CQQ; Start 153; Stop 177
gacttatctagctgatggagttcca

SEQ ID NO: 305876 - DNA, 25 bp, Artificial
  probe
  misc_feature (1)..(25): SEQ ID NO: 1810; WAN024CQQ; Start 338; Stop 362
ttgaattgcttccagggaatatgtt

SEQ ID NO: 305877 - DNA, 25 bp, Artificial
  probe
  misc_feature (1)..(25): SEQ ID NO: 1810; WAN024CQQ; Start 335; Stop 359
ttgttgaattgcttccagggaatat

SEQ ID NO: 305878 - DNA, 25 bp, Artificial
  probe
  misc_feature (1)..(25): SEQ ID NO: 1810; WAN024CQQ; Start 334; Stop 358
attgttgaattgcttccagggaata

SEQ ID NO: 305879 - DNA, 25 bp, Artificial
  probe
  misc_feature (1)..(25): SEQ ID NO: 1810; WAN024CQQ; Start 339; Stop 363
tgaattgcttccagggaatatgttg

SEQ ID NO: 305880 - DNA, 25 bp, Artificial
  probe
  misc_feature (1)..(25): SEQ ID NO: 1810; WAN024CQQ; Start 337; Stop 361
gttgaattgcttccagggaatatgt

SEQ ID NO: 305881 - DNA, 25 bp, Artificial
  probe
  misc_feature (1)..(25): SEQ ID NO: 1810; WAN024CQQ; Start 336; Stop 360
tgttgaattgcttccagggaatatg

SEQ ID NO: 305882 - DNA, 25 bp, Artificial
  probe
  misc_feature (1)..(25): SEQ ID NO: 1810; WAN024CQQ; Start 161; Stop 185
tagctgatggagttccaggagatat

SEQ ID NO: 305883 - DNA, 25 bp, Artificial
  probe
  misc_feature (1)..(25): SEQ ID NO: 1810; WAN024CQQ; Start 155; Stop 179
cttatctagctgatggagttccagg

SEQ ID NO: 305884 - DNA, 25 bp, Artificial
  probe
  misc_feature (1)..(25): SEQ ID NO: 1810; WAN024CQQ; Start 89; Stop 113
atttgacagatttagttgatggaaa

SEQ ID NO: 305885 - DNA, 25 bp, Artificial
  probe
  misc_feature (1)..(25): SEQ ID NO: 1810; WAN024CQQ; Start 156; Stop 180
ttatctagctgatggagttccagga

SEQ ID NO: 305886 - DNA, 25 bp, Artificial
  probe
  misc_feature (1)..(25): SEQ ID NO: 1810; WAN024CQQ; Start 88; Stop 112
aatttgacagatttagttgatggaa

SEQ ID NO: 305887 - DNA, 25 bp, Artificial
  probe
  misc_feature (1)..(25): SEQ ID NO: 1810; WAN024CQQ; Start 142; Stop 166
gcaaattgtatgacttatctagctg

SEQ ID NO: 305888 - DNA, 25 bp, Artificial
  probe
  misc_feature (1)..(25): SEQ ID NO: 1810; WAN024CQQ; Start 333; Stop 357
aattgttgaattgcttccagggaat

SEQ ID NO: 305889 - DNA, 25 bp, Artificial
  probe
  misc_feature (1)..(25): SEQ ID NO: 1810; WAN024CQQ; Start 331; Stop 355
caaattgttgaattgcttccaggga

SEQ ID NO: 305890 - DNA, 25 bp, Artificial
  probe
  misc_feature (1)..(25): SEQ ID NO: 1810; WAN024CQQ; Start 332; Stop 356
aaattgttgaattgcttccagggaa

SEQ ID NO: 305891 - DNA, 25 bp, Artificial
  probe
  misc_feature (1)..(25): SEQ ID NO: 1810; WAN024CQQ; Start 287; Stop 311
ttagcgaagagaaggatattgcttt

SEQ ID NO: 305892 - DNA, 25 bp, Artificial
  probe
  misc_feature (1)..(25): SEQ ID NO: 1810; WAN024CQQ; Start 286; Stop 310
tttagcgaagagaaggatattgctt

SEQ ID NO: 305893 - DNA, 25 bp, Artificial
  probe
  misc_feature (1)..(25): SEQ ID NO: 1810; WAN024CQQ; Start 160; Stop 184
ctagctgatggagttccaggagata

SEQ ID NO: 305894 - DNA, 25 bp, Artificial
  probe
  misc_feature (1)..(25): SEQ ID NO: 1810; WAN024CQQ; Start 157; Stop 181
tatctagctgatggagttccaggag

SEQ ID NO: 305895 - DNA, 25 bp, Artificial
  probe
  misc_feature (1)..(25): SEQ ID NO: 1810; WAN024CQQ; Start 145; Stop 169
aattgtatgacttatctagctgatg

SEQ ID NO: 305896 - DNA, 25 bp, Artificial
  probe
  misc_feature (1)..(25): SEQ ID NO: 1810; WAN024CQQ; Start 141; Stop 165
tgcaaattgtatgacttatctagct

SEQ ID NO: 305897 - DNA, 25 bp, Artificial
  probe
  misc_feature (1)..(25): SEQ ID NO: 1810; WAN024CQQ; Start 162; Stop 186
agctgatggagttccaggagatatt

SEQ ID NO: 305898 - DNA, 25 bp, Artificial
  probe
  misc_feature (1)..(25): SEQ ID NO: 1810; WAN024CQQ; Start 115; Stop 139
attgatattgacggggaaaatgttt

SEQ ID NO: 305899 - DNA, 25 bp, Artificial
  probe
  misc_feature (1)..(25): SEQ ID NO: 1810; WAN024CQQ; Start 351; Stop 375
agggaatatgttggtgacttttgaa

SEQ ID NO: 305900 - DNA, 25 bp, Artificial
  probe
  misc_feature (1)..(25): SEQ ID NO: 1811; WAN024G5U; Start 1563; Stop 1587
ccttggagattacgactactatgtt

SEQ ID NO: 305901 - DNA, 25 bp, Artificial
  probe
  misc_feature (1)..(25): SEQ ID NO: 1811; WAN024G5U; Start 1159; Stop 1183
gctaatgttgaggttggttactatg

SEQ ID NO: 305902 - DNA, 25 bp, Artificial
  probe
  misc_feature (1)..(25): SEQ ID NO: 1811; WAN024G5U; Start 1566; Stop 1590
tggagattacgactactatgttgag

SEQ ID NO: 305903 - DNA, 25 bp, Artificial
  probe
  misc_feature (1)..(25): SEQ ID NO: 1811; WAN024G5U; Start 1562; Stop 1586
accttggagattacgactactatgt

SEQ ID NO: 305904 - DNA, 25 bp, Artificial
  probe
  misc_feature (1)..(25): SEQ ID NO: 1811; WAN024G5U; Start 1567; Stop 1591
ggagattacgactactatgttgaga

SEQ ID NO: 305905 - DNA, 25 bp, Artificial
  probe
  misc_feature (1)..(25): SEQ ID NO: 1811; WAN024G5U; Start 1158; Stop 1182
cgctaatgttgaggttggttactat

SEQ ID NO: 305906 - DNA, 25 bp, Artificial
  probe
  misc_feature (1)..(25): SEQ ID NO: 1811; WAN024G5U; Start 1565; Stop 1589
ttggagattacgactactatgttga

SEQ ID NO: 305907 - DNA, 25 bp, Artificial
  probe
  misc_feature (1)..(25): SEQ ID NO: 1811; WAN024G5U; Start 1561; Stop 1585
taccttggagattacgactactatg

SEQ ID NO: 305908 - DNA, 25 bp, Artificial
  probe
  misc_feature (1)..(25): SEQ ID NO: 1811; WAN024G5U; Start 1564; Stop 1588
cttggagattacgactactatgttg

SEQ ID NO: 305909 - DNA, 25 bp, Artificial
  probe
  misc_feature (1)..(25): SEQ ID NO: 1811; WAN024G5U; Start 1559; Stop 1583
tctaccttggagattacgactacta

SEQ ID NO: 305910 - DNA, 25 bp, Artificial
  probe
  misc_feature (1)..(25): SEQ ID NO: 1811; WAN024G5U; Start 1560; Stop 1584
ctaccttggagattacgactactat

SEQ ID NO: 305911 - DNA, 25 bp, Artificial
  probe
  misc_feature (1)..(25): SEQ ID NO: 1811; WAN024G5U; Start 1161; Stop 1185
taatgttgaggttggttactatgac

SEQ ID NO: 305912 - DNA, 25 bp, Artificial
  probe
  misc_feature (1)..(25): SEQ ID NO: 1811; WAN024G5U; Start 1160; Stop 1184
ctaatgttgaggttggttactatga

SEQ ID NO: 305913 - DNA, 25 bp, Artificial
  probe
  misc_feature (1)..(25): SEQ ID NO: 1811; WAN024G5U; Start 1534; Stop 1558
gaattgtctgagaatggttcaactc

SEQ ID NO: 305914 - DNA, 25 bp, Artificial
  probe
  misc_feature (1)..(25): SEQ ID NO: 1811; WAN024G5U; Start 1535; Stop 1559
aattgtctgagaatggttcaactct

SEQ ID NO: 305915 - DNA, 25 bp, Artificial
  probe
  misc_feature (1)..(25): SEQ ID NO: 1811; WAN024G5U; Start 1531; Stop 1555
ttggaattgtctgagaatggttcaa

SEQ ID NO: 305916 - DNA, 25 bp, Artificial
  probe
  misc_feature (1)..(25): SEQ ID NO: 1811; WAN024G5U; Start 1558; Stop 1582
ctctaccttggagattacgactact

SEQ ID NO: 305917 - DNA, 25 bp, Artificial
  probe
  misc_feature (1)..(25): SEQ ID NO: 1811; WAN024G5U; Start 1533; Stop 1557
ggaattgtctgagaatggttcaact

SEQ ID NO: 305918 - DNA, 25 bp, Artificial
  probe
  misc_feature (1)..(25): SEQ ID NO: 1811; WAN024G5U; Start 1532; Stop 1556
tggaattgtctgagaatggttcaac

SEQ ID NO: 305919 - DNA, 25 bp, Artificial
  probe
  misc_feature (1)..(25): SEQ ID NO: 1811; WAN024G5U; Start 1105; Stop 1129
atcaagtctattgtggaccagattc

SEQ ID NO: 305920 - DNA, 25 bp, Artificial
  probe
  misc_feature (1)..(25): SEQ ID NO: 1811; WAN024G5U; Start 1570; Stop 1594
gattacgactactatgttgagaaga

SEQ ID NO: 305921 - DNA, 25 bp, Artificial
  probe
  misc_feature (1)..(25): SEQ ID NO: 1811; WAN024G5U; Start 1568; Stop 1592
gagattacgactactatgttgagaa

SEQ ID NO: 305922 - DNA, 25 bp, Artificial
  probe
  misc_feature (1)..(25): SEQ ID NO: 1811; WAN024G5U; Start 1569; Stop 1593
agattacgactactatgttgagaag

SEQ ID NO: 305923 - DNA, 25 bp, Artificial
  probe
  misc_feature (1)..(25): SEQ ID NO: 1811; WAN024G5U; Start 1104; Stop 1128
tatcaagtctattgtggaccagatt

SEQ ID NO: 305924 - DNA, 25 bp, Artificial
  probe
  misc_feature (1)..(25): SEQ ID NO: 1811; WAN024G5U; Start 1103; Stop 1127
ttatcaagtctattgtggaccagat

SEQ ID NO: 305925 - DNA, 25 bp, Artificial
  probe
  misc_feature (1)..(25): SEQ ID NO: 1811; WAN024G5U; Start 1050; Stop 1074
taagatgaatgctgtcgctatcgtt

SEQ ID NO: 305926 - DNA, 25 bp, Artificial
  probe
  misc_feature (1)..(25): SEQ ID NO: 1811; WAN024G5U; Start 1046; Stop 1070
ttcgtaagatgaatgctgtcgctat

SEQ ID NO: 305927 - DNA, 25 bp, Artificial
  probe
  misc_feature (1)..(25): SEQ ID NO: 1811; WAN024G5U; Start 1571; Stop 1595
attacgactactatgttgagaagaa

SEQ ID NO: 305928 - DNA, 25 bp, Artificial
  probe
  misc_feature (1)..(25): SEQ ID NO: 1811; WAN024G5U; Start 1162; Stop 1186
aatgttgaggttggttactatgacc

SEQ ID NO: 305929 - DNA, 25 bp, Artificial
  probe
  misc_feature (1)..(25): SEQ ID NO: 1811; WAN024G5U; Start 330; Stop 354
aaagtctggtgaggatttggataaa

SEQ ID NO: 305930 - DNA, 25 bp, Artificial
  probe
  misc_feature (1)..(25): SEQ ID NO: 1811; WAN024G5U; Start 338; Stop 362
gtgaggatttggataaactgatgtc

SEQ ID NO: 305931 - DNA, 25 bp, Artificial
  probe
  misc_feature (1)..(25): SEQ ID NO: 1811; WAN024G5U; Start 1108; Stop 1132
aagtctattgtggaccagattcctt

SEQ ID NO: 305932 - DNA, 25 bp, Artificial
  probe
  misc_feature (1)..(25): SEQ ID NO: 1811; WAN024G5U; Start 335; Stop 359
ctggtgaggatttggataaactgat

SEQ ID NO: 305933 - DNA, 25 bp, Artificial
  probe
  misc_feature (1)..(25): SEQ ID NO: 1812; WAN024C8Z; Start 169; Stop 193
gttgttaaagcagttatcgttcgta

SEQ ID NO: 305934 - DNA, 25 bp, Artificial
  probe
  misc_feature (1)..(25): SEQ ID NO: 1812; WAN024C8Z; Start 170; Stop 194
ttgttaaagcagttatcgttcgtac

SEQ ID NO: 305935 - DNA, 25 bp, Artificial
  probe
  misc_feature (1)..(25): SEQ ID NO: 1812; WAN024C8Z; Start 181; Stop 205
gttatcgttcgtactaaatcaggtg

SEQ ID NO: 305936 - DNA, 25 bp, Artificial
  probe
  misc_feature (1)..(25): SEQ ID NO: 1812; WAN024C8Z; Start 61; Stop 85
actatcaaagttcttggtggttcag

SEQ ID NO: 305937 - DNA, 25 bp, Artificial
  probe
  misc_feature (1)..(25): SEQ ID NO: 1812; WAN024C8Z; Start 60; Stop 84
gactatcaaagttcttggtggttca

SEQ ID NO: 305938 - DNA, 25 bp, Artificial
  probe
  misc_feature (1)..(25): SEQ ID NO: 1812; WAN024C8Z; Start 59; Stop 83
tgactatcaaagttcttggtggttc

SEQ ID NO: 305939 - DNA, 25 bp, Artificial
  probe
  misc_feature (1)..(25): SEQ ID NO: 1812; WAN024C8Z; Start 182; Stop 206
ttatcgttcgtactaaatcaggtgc

SEQ ID NO: 305940 - DNA, 25 bp, Artificial
  probe
  misc_feature (1)..(25): SEQ ID NO: 1812; WAN024C8Z; Start 62; Stop 86
ctatcaaagttcttggtggttcagg

SEQ ID NO: 305941 - DNA, 25 bp, Artificial
  probe
  misc_feature (1)..(25): SEQ ID NO: 1812; WAN024C8Z; Start 248; Stop 272
cagcagttatcatccgtgaagacaa

SEQ ID NO: 305942 - DNA, 25 bp, Artificial
  probe
  misc_feature (1)..(25): SEQ ID NO: 1812; WAN024C8Z; Start 178; Stop 202
gcagttatcgttcgtactaaatcag

SEQ ID NO: 305943 - DNA, 25 bp, Artificial
  probe
  misc_feature (1)..(25): SEQ ID NO: 1812; WAN024C8Z; Start 177; Stop 201
agcagttatcgttcgtactaaatca

SEQ ID NO: 305944 - DNA, 25 bp, Artificial
  probe
  misc_feature (1)..(25): SEQ ID NO: 1812; WAN024C8Z; Start 180; Stop 204
agttatcgttcgtactaaatcaggt

SEQ ID NO: 305945 - DNA, 25 bp, Artificial
  probe
  misc_feature (1)..(25): SEQ ID NO: 1812; WAN024C8Z; Start 179; Stop 203
cagttatcgttcgtactaaatcagg

SEQ ID NO: 305946 - DNA, 25 bp, Artificial
  probe
  misc_feature (1)..(25): SEQ ID NO: 1812; WAN024C8Z; Start 171; Stop 195
tgttaaagcagttatcgttcgtact

SEQ ID NO: 305947 - DNA, 25 bp, Artificial
  probe
  misc_feature (1)..(25): SEQ ID NO: 1812; WAN024C8Z; Start 176; Stop 200
aagcagttatcgttcgtactaaatc

SEQ ID NO: 305948 - DNA, 25 bp, Artificial
  probe
  misc_feature (1)..(25): SEQ ID NO: 1812; WAN024C8Z; Start 63; Stop 87
tatcaaagttcttggtggttcagga

SEQ ID NO: 305949 - DNA, 25 bp, Artificial
  probe
  misc_feature (1)..(25): SEQ ID NO: 1812; WAN024C8Z; Start 183; Stop 207
tatcgttcgtactaaatcaggtgct

SEQ ID NO: 305950 - DNA, 25 bp, Artificial
  probe
  misc_feature (1)..(25): SEQ ID NO: 1812; WAN024C8Z; Start 172; Stop 196
gttaaagcagttatcgttcgtacta

SEQ ID NO: 305951 - DNA, 25 bp, Artificial
  probe
  misc_feature (1)..(25): SEQ ID NO: 1812; WAN024C8Z; Start 175; Stop 199
aaagcagttatcgttcgtactaaat

SEQ ID NO: 305952 - DNA, 25 bp, Artificial
  probe
  misc_feature (1)..(25): SEQ ID NO: 1812; WAN024C8Z; Start 168; Stop 192
cgttgttaaagcagttatcgttcgt

SEQ ID NO: 305953 - DNA, 25 bp, Artificial
  probe
  misc_feature (1)..(25): SEQ ID NO: 1812; WAN024C8Z; Start 174; Stop 198
taaagcagttatcgttcgtactaaa

SEQ ID NO: 305954 - DNA, 25 bp, Artificial
  probe
  misc_feature (1)..(25): SEQ ID NO: 1812; WAN024C8Z; Start 173; Stop 197
ttaaagcagttatcgttcgtactaa

SEQ ID NO: 305955 - DNA, 25 bp, Artificial
  probe
  misc_feature (1)..(25): SEQ ID NO: 1812; WAN024C8Z; Start 249; Stop 273
agcagttatcatccgtgaagacaaa

SEQ ID NO: 305956 - DNA, 25 bp, Artificial
  probe
  misc_feature (1)..(25): SEQ ID NO: 1812; WAN024C8Z; Start 161; Stop 185
aaggtgacgttgttaaagcagttat

SEQ ID NO: 305957 - DNA, 25 bp, Artificial
  probe
  misc_feature (1)..(25): SEQ ID NO: 1812; WAN024C8Z; Start 160; Stop 184
aaaggtgacgttgttaaagcagtta

SEQ ID NO: 305958 - DNA, 25 bp, Artificial
  probe
  misc_feature (1)..(25): SEQ ID NO: 1812; WAN024C8Z; Start 184; Stop 208
atcgttcgtactaaatcaggtgctc

SEQ ID NO: 305959 - DNA, 25 bp, Artificial
  probe
  misc_feature (1)..(25): SEQ ID NO: 1812; WAN024C8Z; Start 162; Stop 186
aggtgacgttgttaaagcagttatc

SEQ ID NO: 305960 - DNA, 25 bp, Artificial
  probe
  misc_feature (1)..(25): SEQ ID NO: 1812; WAN024C8Z; Start 64; Stop 88
atcaaagttcttggtggttcaggac

SEQ ID NO: 305961 - DNA, 25 bp, Artificial
  probe
  misc_feature (1)..(25): SEQ ID NO: 1812; WAN024C8Z; Start 50; Stop 74
gcgaaatcttgactatcaaagttct

SEQ ID NO: 305962 - DNA, 25 bp, Artificial
  probe
  misc_feature (1)..(25): SEQ ID NO: 1812; WAN024C8Z; Start 58; Stop 82
ttgactatcaaagttcttggtggtt

SEQ ID NO: 305963 - DNA, 25 bp, Artificial
  probe
  misc_feature (1)..(25): SEQ ID NO: 1812; WAN024C8Z; Start 56; Stop 80
tcttgactatcaaagttcttggtgg

SEQ ID NO: 305964 - DNA, 25 bp, Artificial
  probe
  misc_feature (1)..(25): SEQ ID NO: 1812; WAN024C8Z; Start 253; Stop 277
gttatcatccgtgaagacaaaactc

SEQ ID NO: 305965 - DNA, 25 bp, Artificial
  probe
  misc_feature (1)..(25): SEQ ID NO: 1812; WAN024C8Z; Start 57; Stop 81
cttgactatcaaagttcttggtggt

SEQ ID NO: 305966 - DNA, 25 bp, Artificial
  probe
  misc_feature (1)..(25): SEQ ID NO: 1813; WAN024FAX; Start 66; Stop 90
tttggagtttaggaagacatacagt

SEQ ID NO: 305967 - DNA, 25 bp, Artificial
  probe
  misc_feature (1)..(25): SEQ ID NO: 1813; WAN024FAX; Start 68; Stop 92
tggagtttaggaagacatacagtaa

SEQ ID NO: 305968 - DNA, 25 bp, Artificial
  probe
  misc_feature (1)..(25): SEQ ID NO: 1813; WAN024FAX; Start 67; Stop 91
ttggagtttaggaagacatacagta

SEQ ID NO: 305969 - DNA, 25 bp, Artificial
  probe
  misc_feature (1)..(25): SEQ ID NO: 1813; WAN024FAX; Start 65; Stop 89
ctttggagtttaggaagacatacag

SEQ ID NO: 305970 - DNA, 25 bp, Artificial
  probe
  misc_feature (1)..(25): SEQ ID NO: 1813; WAN024FAX; Start 64; Stop 88
actttggagtttaggaagacataca

SEQ ID NO: 305971 - DNA, 25 bp, Artificial
  probe
  misc_feature (1)..(25): SEQ ID NO: 1813; WAN024FAX; Start 92; Stop 116
aaatgaaatacggacggaacaatgt

SEQ ID NO: 305972 - DNA, 25 bp, Artificial
  probe
  misc_feature (1)..(25): SEQ ID NO: 1813; WAN024FAX; Start 96; Stop 120
gaaatacggacggaacaatgtgatt

SEQ ID NO: 305973 - DNA, 25 bp, Artificial
  probe
  misc_feature (1)..(25): SEQ ID NO: 1813; WAN024FAX; Start 93; Stop 117
aatgaaatacggacggaacaatgtg

SEQ ID NO: 305974 - DNA, 25 bp, Artificial
  probe
  misc_feature (1)..(25): SEQ ID NO: 1813; WAN024FAX; Start 19; Stop 43
cgaagtgtcaaagactacagtgaaa

SEQ ID NO: 305975 - DNA, 25 bp, Artificial
  probe
  misc_feature (1)..(25): SEQ ID NO: 1813; WAN024FAX; Start 97; Stop 121
aaatacggacggaacaatgtgattt

SEQ ID NO: 305976 - DNA, 25 bp, Artificial
  probe
  misc_feature (1)..(25): SEQ ID NO: 1813; WAN024FAX; Start 69; Stop 93
ggagtttaggaagacatacagtaaa

SEQ ID NO: 305977 - DNA, 25 bp, Artificial
  probe
  misc_feature (1)..(25): SEQ ID NO: 1813; WAN024FAX; Start 44; Stop 68
ataggaaatttgacgcagaaacttt

SEQ ID NO: 305978 - DNA, 25 bp, Artificial
  probe
  misc_feature (1)..(25): SEQ ID NO: 1813; WAN024FAX; Start 43; Stop 67
aataggaaatttgacgcagaaactt

SEQ ID NO: 305979 - DNA, 25 bp, Artificial
  probe
  misc_feature (1)..(25): SEQ ID NO: 1813; WAN024FAX; Start 45; Stop 69
taggaaatttgacgcagaaactttg

SEQ ID NO: 305980 - DNA, 25 bp, Artificial
  probe
  misc_feature (1)..(25): SEQ ID NO: 1813; WAN024FAX; Start 95; Stop 119
tgaaatacggacggaacaatgtgat

SEQ ID NO: 305981 - DNA, 25 bp, Artificial
  probe
  misc_feature (1)..(25): SEQ ID NO: 1813; WAN024FAX; Start 94; Stop 118
atgaaatacggacggaacaatgtga

SEQ ID NO: 305982 - DNA, 25 bp, Artificial
  probe
  misc_feature (1)..(25): SEQ ID NO: 1813; WAN024FAX; Start 48; Stop 72
gaaatttgacgcagaaactttggag

SEQ ID NO: 305983 - DNA, 25 bp, Artificial
  probe
  misc_feature (1)..(25): SEQ ID NO: 1813; WAN024FAX; Start 42; Stop 66
aaataggaaatttgacgcagaaact

SEQ ID NO: 305984 - DNA, 25 bp, Artificial
  probe
  misc_feature (1)..(25): SEQ ID NO: 1813; WAN024FAX; Start 89; Stop 113
gtaaaatgaaatacggacggaacaa

SEQ ID NO: 305985 - DNA, 25 bp, Artificial
  probe
  misc_feature (1)..(25): SEQ ID NO: 1813; WAN024FAX; Start 85; Stop 109
tacagtaaaatgaaatacggacgga

SEQ ID NO: 305986 - DNA, 25 bp, Artificial
  probe
  misc_feature (1)..(25): SEQ ID NO: 1813; WAN024FAX; Start 87; Stop 111
cagtaaaatgaaatacggacggaac

SEQ ID NO: 305987 - DNA, 25 bp, Artificial
  probe
  misc_feature (1)..(25): SEQ ID NO: 1813; WAN024FAX; Start 91; Stop 115
aaaatgaaatacggacggaacaatg

SEQ ID NO: 305988 - DNA, 25 bp, Artificial
  probe
  misc_feature (1)..(25): SEQ ID NO: 1813; WAN024FAX; Start 90; Stop 114
taaaatgaaatacggacggaacaat

SEQ ID NO: 305989 - DNA, 25 bp, Artificial
  probe
  misc_feature (1)..(25): SEQ ID NO: 1813; WAN024FAX; Start 84; Stop 108
atacagtaaaatgaaatacggacgg

SEQ ID NO: 305990 - DNA, 25 bp, Artificial
  probe
  misc_feature (1)..(25): SEQ ID NO: 1813; WAN024FAX; Start 88; Stop 112
agtaaaatgaaatacggacggaaca

SEQ ID NO: 305991 - DNA, 25 bp, Artificial
  probe
  misc_feature (1)..(25): SEQ ID NO: 1813; WAN024FAX; Start 86; Stop 110
acagtaaaatgaaatacggacggaa

SEQ ID NO: 305992 - DNA, 25 bp, Artificial
  probe
  misc_feature (1)..(25): SEQ ID NO: 1813; WAN024FAX; Start 18; Stop 42
tcgaagtgtcaaagactacagtgaa

SEQ ID NO: 305993 - DNA, 25 bp, Artificial
  probe
  misc_feature (1)..(25): SEQ ID NO: 1813; WAN024FAX; Start 49; Stop 73
aaatttgacgcagaaactttggagt

SEQ ID NO: 305994 - DNA, 25 bp, Artificial
  probe
  misc_feature (1)..(25): SEQ ID NO: 1813; WAN024FAX; Start 104; Stop 128
gacggaacaatgtgattttggaatt

SEQ ID NO: 305995 - DNA, 25 bp, Artificial
  probe
  misc_feature (1)..(25): SEQ ID NO: 1813; WAN024FAX; Start 98; Stop 122
aatacggacggaacaatgtgatttt

SEQ ID NO: 305996 - DNA, 25 bp, Artificial
  probe
  misc_feature (1)..(25): SEQ ID NO: 1813; WAN024FAX; Start 83; Stop 107
catacagtaaaatgaaatacggacg

SEQ ID NO: 305997 - DNA, 25 bp, Artificial
  probe
  misc_feature (1)..(25): SEQ ID NO: 1813; WAN024FAX; Start 63; Stop 87
aactttggagtttaggaagacatac

SEQ ID NO: 305998 - DNA, 25 bp, Artificial
  probe
  misc_feature (1)..(25): SEQ ID NO: 1813; WAN024FAX; Start 47; Stop 71
ggaaatttgacgcagaaactttgga

SEQ ID NO: 305999 - DNA, 25 bp, Artificial
  probe
  misc_feature (1)..(25): SEQ ID NO: 1814; WAN024DHC; Start 535; Stop 559
agagaagttgtggatagatatgtcg

SEQ ID NO: 306000 - DNA, 25 bp, Artificial
  probe
  misc_feature (1)..(25): SEQ ID NO: 1814; WAN024DHC; Start 533; Stop 557
cgagagaagttgtggatagatatgt

SEQ ID NO: 306001 - DNA, 25 bp, Artificial
  probe
  misc_feature (1)..(25): SEQ ID NO: 1814; WAN024DHC; Start 194; Stop 218
cagatgaccaagatgtagaagtgac

SEQ ID NO: 306002 - DNA, 25 bp, Artificial
  probe
  misc_feature (1)..(25): SEQ ID NO: 1814; WAN024DHC; Start 198; Stop 222
tgaccaagatgtagaagtgacgata

SEQ ID NO: 306003 - DNA, 25 bp, Artificial
  probe
  misc_feature (1)..(25): SEQ ID NO: 1814; WAN024DHC; Start 536; Stop 560
gagaagttgtggatagatatgtcgc

SEQ ID NO: 306004 - DNA, 25 bp, Artificial
  probe
  misc_feature (1)..(25): SEQ ID NO: 1814; WAN024DHC; Start 541; Stop 565
gttgtggatagatatgtcgctgaag

SEQ ID NO: 306005 - DNA, 25 bp, Artificial
  probe
  misc_feature (1)..(25): SEQ ID NO: 1814; WAN024DHC; Start 538; Stop 562
gaagttgtggatagatatgtcgctg

SEQ ID NO: 306006 - DNA, 25 bp, Artificial
  probe
  misc_feature (1)..(25): SEQ ID NO: 1814; WAN024DHC; Start 537; Stop 561
agaagttgtggatagatatgtcgct

SEQ ID NO: 306007 - DNA, 25 bp, Artificial
  probe
  misc_feature (1)..(25): SEQ ID NO: 1814; WAN024DHC; Start 197; Stop 221
atgaccaagatgtagaagtgacgat

SEQ ID NO: 306008 - DNA, 25 bp, Artificial
  probe
  misc_feature (1)..(25): SEQ ID NO: 1814; WAN024DHC; Start 540; Stop 564
agttgtggatagatatgtcgctgaa

SEQ ID NO: 306009 - DNA, 25 bp, Artificial
  probe
  misc_feature (1)..(25): SEQ ID NO: 1814; WAN024DHC; Start 539; Stop 563
aagttgtggatagatatgtcgctga

SEQ ID NO: 306010 - DNA, 25 bp, Artificial
  probe
  misc_feature (1)..(25): SEQ ID NO: 1814; WAN024DHC; Start 534; Stop 558
gagagaagttgtggatagatatgtc

SEQ ID NO: 306011 - DNA, 25 bp, Artificial
  probe
  misc_feature (1)..(25): SEQ ID NO: 1814; WAN024DHC; Start 460; Stop 484
ttgttagcagatagttcgtatcagg

SEQ ID NO: 306012 - DNA, 25 bp, Artificial
  probe
  misc_feature (1)..(25): SEQ ID NO: 1814; WAN024DHC; Start 461; Stop 485
tgttagcagatagttcgtatcagga

SEQ ID NO: 306013 - DNA, 25 bp, Artificial
  probe
  misc_feature (1)..(25): SEQ ID NO: 1814; WAN024DHC; Start 196; Stop 220
gatgaccaagatgtagaagtgacga

SEQ ID NO: 306014 - DNA, 25 bp, Artificial
  probe
  misc_feature (1)..(25): SEQ ID NO: 1814; WAN024DHC; Start 195; Stop 219
agatgaccaagatgtagaagtgacg

SEQ ID NO: 306015 - DNA, 25 bp, Artificial
  probe
  misc_feature (1)..(25): SEQ ID NO: 1814; WAN024DHC; Start 193; Stop 217
gcagatgaccaagatgtagaagtga

SEQ ID NO: 306016 - DNA, 25 bp, Artificial
  probe
  misc_feature (1)..(25): SEQ ID NO: 1814; WAN024DHC; Start 532; Stop 556
tcgagagaagttgtggatagatatg

SEQ ID NO: 306017 - DNA, 25 bp, Artificial
  probe
  misc_feature (1)..(25): SEQ ID NO: 1814; WAN024DHC; Start 529; Stop 553
gaatcgagagaagttgtggatagat

SEQ ID NO: 306018 - DNA, 25 bp, Artificial
  probe
  misc_feature (1)..(25): SEQ ID NO: 1814; WAN024DHC; Start 527; Stop 551
atgaatcgagagaagttgtggatag

SEQ ID NO: 306019 - DNA, 25 bp, Artificial
  probe
  misc_feature (1)..(25): SEQ ID NO: 1814; WAN024DHC; Start 526; Stop 550
catgaatcgagagaagttgtggata

SEQ ID NO: 306020 - DNA, 25 bp, Artificial
  probe
  misc_feature (1)..(25): SEQ ID NO: 1814; WAN024DHC; Start 375; Stop 399
actaatcgaggatgaagagacagaa

SEQ ID NO: 306021 - DNA, 25 bp, Artificial
  probe
  misc_feature (1)..(25): SEQ ID NO: 1814; WAN024DHC; Start 528; Stop 552
tgaatcgagagaagttgtggataga

SEQ ID NO: 306022 - DNA, 25 bp, Artificial
  probe
  misc_feature (1)..(25): SEQ ID NO: 1814; WAN024DHC; Start 190; Stop 214
tatgcagatgaccaagatgtagaag

SEQ ID NO: 306023 - DNA, 25 bp, Artificial
  probe
  misc_feature (1)..(25): SEQ ID NO: 1814; WAN024DHC; Start 189; Stop 213
ctatgcagatgaccaagatgtagaa

SEQ ID NO: 306024 - DNA, 25 bp, Artificial
  probe
  misc_feature (1)..(25): SEQ ID NO: 1814; WAN024DHC; Start 530; Stop 554
aatcgagagaagttgtggatagata

SEQ ID NO: 306025 - DNA, 25 bp, Artificial
  probe
  misc_feature (1)..(25): SEQ ID NO: 1814; WAN024DHC; Start 374; Stop 398
gactaatcgaggatgaagagacaga

SEQ ID NO: 306026 - DNA, 25 bp, Artificial
  probe
  misc_feature (1)..(25): SEQ ID NO: 1814; WAN024DHC; Start 531; Stop 555
atcgagagaagttgtggatagatat

SEQ ID NO: 306027 - DNA, 25 bp, Artificial
  probe
  misc_feature (1)..(25): SEQ ID NO: 1814; WAN024DHC; Start 548; Stop 572
atagatatgtcgctgaagctctgaa

SEQ ID NO: 306028 - DNA, 25 bp, Artificial
  probe
  misc_feature (1)..(25): SEQ ID NO: 1814; WAN024DHC; Start 3; Stop 27
gattcaagcaagaaacaagttaagc

SEQ ID NO: 306029 - DNA, 25 bp, Artificial
  probe
  misc_feature (1)..(25): SEQ ID NO: 1814; WAN024DHC; Start 840; Stop 864
ggtggtttatctgaatgagaaagga

SEQ ID NO: 306030 - DNA, 25 bp, Artificial
  probe
  misc_feature (1)..(25): SEQ ID NO: 1814; WAN024DHC; Start 839; Stop 863
aggtggtttatctgaatgagaaagg

SEQ ID NO: 306031 - DNA, 25 bp, Artificial
  probe
  misc_feature (1)..(25): SEQ ID NO: 1814; WAN024DHC; Start 542; Stop 566
ttgtggatagatatgtcgctgaagc

SEQ ID NO: 306032 - DNA, 25 bp, Artificial
  probe
  misc_feature (1)..(25): SEQ ID NO: 1815; WAN024B4H; Start 92; Stop 116
gaatccaatacgatagaggtagcag

SEQ ID NO: 306033 - DNA, 25 bp, Artificial
  probe
  misc_feature (1)..(25): SEQ ID NO: 1815; WAN024B4H; Start 94; Stop 118
atccaatacgatagaggtagcagtt

SEQ ID NO: 306034 - DNA, 25 bp, Artificial
  probe
  misc_feature (1)..(25): SEQ ID NO: 1815; WAN024B4H; Start 93; Stop 117
aatccaatacgatagaggtagcagt

SEQ ID NO: 306035 - DNA, 25 bp, Artificial
  probe
  misc_feature (1)..(25): SEQ ID NO: 1815; WAN024B4H; Start 95; Stop 119
tccaatacgatagaggtagcagttc

SEQ ID NO: 306036 - DNA, 25 bp, Artificial
  probe
  misc_feature (1)..(25): SEQ ID NO: 1815; WAN024B4H; Start 83; Stop 107
aatccttgcgaatccaatacgatag

SEQ ID NO: 306037 - DNA, 25 bp, Artificial
  probe
  misc_feature (1)..(25): SEQ ID NO: 1815; WAN024B4H; Start 91; Stop 115
cgaatccaatacgatagaggtagca

SEQ ID NO: 306038 - DNA, 25 bp, Artificial
  probe
  misc_feature (1)..(25): SEQ ID NO: 1815; WAN024B4H; Start 89; Stop 113
tgcgaatccaatacgatagaggtag

SEQ ID NO: 306039 - DNA, 25 bp, Artificial
  probe
  misc_feature (1)..(25): SEQ ID NO: 1815; WAN024B4H; Start 88; Stop 112
ttgcgaatccaatacgatagaggta

SEQ ID NO: 306040 - DNA, 25 bp, Artificial
  probe
  misc_feature (1)..(25): SEQ ID NO: 1815; WAN024B4H; Start 84; Stop 108
atccttgcgaatccaatacgataga

SEQ ID NO: 306041 - DNA, 25 bp, Artificial
  probe
  misc_feature (1)..(25): SEQ ID NO: 1815; WAN024B4H; Start 96; Stop 120
ccaatacgatagaggtagcagttcc

SEQ ID NO: 306042 - DNA, 25 bp, Artificial
  probe
  misc_feature (1)..(25): SEQ ID NO: 1815; WAN024B4H; Start 85; Stop 109
tccttgcgaatccaatacgatagag

SEQ ID NO: 306043 - DNA, 25 bp, Artificial
  probe
  misc_feature (1)..(25): SEQ ID NO: 1815; WAN024B4H; Start 87; Stop 111
cttgcgaatccaatacgatagaggt

SEQ ID NO: 306044 - DNA, 25 bp, Artificial
  probe
  misc_feature (1)..(25): SEQ ID NO: 1815; WAN024B4H; Start 90; Stop 114
gcgaatccaatacgatagaggtagc

SEQ ID NO: 306045 - DNA, 25 bp, Artificial
  probe
  misc_feature (1)..(25): SEQ ID NO: 1815; WAN024B4H; Start 176; Stop 200
ttcgtattagctggcatcatcttct

SEQ ID NO: 306046 - DNA, 25 bp, Artificial
  probe
  misc_feature (1)..(25): SEQ ID NO: 1815; WAN024B4H; Start 229; Stop 253
gtgcttcactctcttcctctatacg

SEQ ID NO: 306047 - DNA, 25 bp, Artificial
  probe
  misc_feature (1)..(25): SEQ ID NO: 1815; WAN024B4H; Start 82; Stop 106
aaatccttgcgaatccaatacgata

SEQ ID NO: 306048 - DNA, 25 bp, Artificial
  probe
  misc_feature (1)..(25): SEQ ID NO: 1815; WAN024B4H; Start 81; Stop 105
taaatccttgcgaatccaatacgat

SEQ ID NO: 306049 - DNA, 25 bp, Artificial
  probe
  misc_feature (1)..(25): SEQ ID NO: 1815; WAN024B4H; Start 273; Stop 297
aaggtcaaataaagagaaatcggat

SEQ ID NO: 306050 - DNA, 25 bp, Artificial
  probe
  misc_feature (1)..(25): SEQ ID NO: 1815; WAN024B4H; Start 80; Stop 104
ttaaatccttgcgaatccaatacga

SEQ ID NO: 306051 - DNA, 25 bp, Artificial
  probe
  misc_feature (1)..(25): SEQ ID NO: 1815; WAN024B4H; Start 177; Stop 201
tcgtattagctggcatcatcttctc

SEQ ID NO: 306052 - DNA, 25 bp, Artificial
  probe
  misc_feature (1)..(25): SEQ ID NO: 1815; WAN024B4H; Start 274; Stop 298
aggtcaaataaagagaaatcggatc

SEQ ID NO: 306053 - DNA, 25 bp, Artificial
  probe
  misc_feature (1)..(25): SEQ ID NO: 1815; WAN024B4H; Start 272; Stop 296
taaggtcaaataaagagaaatcgga

SEQ ID NO: 306054 - DNA, 25 bp, Artificial
  probe
  misc_feature (1)..(25): SEQ ID NO: 1815; WAN024B4H; Start 275; Stop 299
ggtcaaataaagagaaatcggatct

SEQ ID NO: 306055 - DNA, 25 bp, Artificial
  probe
  misc_feature (1)..(25): SEQ ID NO: 1815; WAN024B4H; Start 97; Stop 121
caatacgatagaggtagcagttccc

SEQ ID NO: 306056 - DNA, 25 bp, Artificial
  probe
  misc_feature (1)..(25): SEQ ID NO: 1815; WAN024B4H; Start 230; Stop 254
tgcttcactctcttcctctatacgt

SEQ ID NO: 306057 - DNA, 25 bp, Artificial
  probe
  misc_feature (1)..(25): SEQ ID NO: 1815; WAN024B4H; Start 171; Stop 195
taactttcgtattagctggcatcat

SEQ ID NO: 306058 - DNA, 25 bp, Artificial
  probe
  misc_feature (1)..(25): SEQ ID NO: 1815; WAN024B4H; Start 170; Stop 194
ataactttcgtattagctggcatca

SEQ ID NO: 306059 - DNA, 25 bp, Artificial
  probe
  misc_feature (1)..(25): SEQ ID NO: 1815; WAN024B4H; Start 232; Stop 256
cttcactctcttcctctatacgtgg

SEQ ID NO: 306060 - DNA, 25 bp, Artificial
  probe
  misc_feature (1)..(25): SEQ ID NO: 1815; WAN024B4H; Start 86; Stop 110
ccttgcgaatccaatacgatagagg

SEQ ID NO: 306061 - DNA, 25 bp, Artificial
  probe
  misc_feature (1)..(25): SEQ ID NO: 1815; WAN024B4H; Start 169; Stop 193
aataactttcgtattagctggcatc

SEQ ID NO: 306062 - DNA, 25 bp, Artificial
  probe
  misc_feature (1)..(25): SEQ ID NO: 1815; WAN024B4H; Start 271; Stop 295
ttaaggtcaaataaagagaaatcgg

SEQ ID NO: 306063 - DNA, 25 bp, Artificial
  probe
  misc_feature (1)..(25): SEQ ID NO: 1815; WAN024B4H; Start 79; Stop 103
tttaaatccttgcgaatccaatacg

SEQ ID NO: 306064 - DNA, 25 bp, Artificial
  probe
  misc_feature (1)..(25): SEQ ID NO: 1815; WAN024B4H; Start 174; Stop 198
ctttcgtattagctggcatcatctt

SEQ ID NO: 306065 - DNA, 25 bp, Artificial
  probe
  misc_feature (1)..(25): SEQ ID NO: 1816; WAN024CUA; Start 330; Stop 354
ctgtggtgtcctagctgatatagag

SEQ ID NO: 306066 - DNA, 25 bp, Artificial
  probe
  misc_feature (1)..(25): SEQ ID NO: 1816; WAN024CUA; Start 329; Stop 353
cctgtggtgtcctagctgatataga

SEQ ID NO: 306067 - DNA, 25 bp, Artificial
  probe
  misc_feature (1)..(25): SEQ ID NO: 1816; WAN024CUA; Start 484; Stop 508
agagggattccttatgaagaagtca

SEQ ID NO: 306068 - DNA, 25 bp, Artificial
  probe
  misc_feature (1)..(25): SEQ ID NO: 1816; WAN024CUA; Start 331; Stop 355
tgtggtgtcctagctgatatagagg

SEQ ID NO: 306069 - DNA, 25 bp, Artificial
  probe
  misc_feature (1)..(25): SEQ ID NO: 1816; WAN024CUA; Start 485; Stop 509
gagggattccttatgaagaagtcat

SEQ ID NO: 306070 - DNA, 25 bp, Artificial
  probe
  misc_feature (1)..(25): SEQ ID NO: 1816; WAN024CUA; Start 328; Stop 352
acctgtggtgtcctagctgatatag

SEQ ID NO: 306071 - DNA, 25 bp, Artificial
  probe
  misc_feature (1)..(25): SEQ ID NO: 1816; WAN024CUA; Start 327; Stop 351
gacctgtggtgtcctagctgatata

SEQ ID NO: 306072 - DNA, 25 bp, Artificial
  probe
  misc_feature (1)..(25): SEQ ID NO: 1816; WAN024CUA; Start 118; Stop 142
ttaggtgaggagattgaccgctatg

SEQ ID NO: 306073 - DNA, 25 bp, Artificial
  probe
  misc_feature (1)..(25): SEQ ID NO: 1816; WAN024CUA; Start 486; Stop 510
agggattccttatgaagaagtcatg

SEQ ID NO: 306074 - DNA, 25 bp, Artificial
  probe
  misc_feature (1)..(25): SEQ ID NO: 1816; WAN024CUA; Start 665; Stop 689
attctctagcggacttggaccagta

SEQ ID NO: 306075 - DNA, 25 bp, Artificial
  probe
  misc_feature (1)..(25): SEQ ID NO: 1816; WAN024CUA; Start 117; Stop 141
tttaggtgaggagattgaccgctat

SEQ ID NO: 306076 - DNA, 25 bp, Artificial
  probe
  misc_feature (1)..(25): SEQ ID NO: 1816; WAN024CUA; Start 333; Stop 357
tggtgtcctagctgatatagaggaa

SEQ ID NO: 306077 - DNA, 25 bp, Artificial
  probe
  misc_feature (1)..(25): SEQ ID NO: 1816; WAN024CUA; Start 349; Stop 373
atagaggaaaatgcctttctagtcc

SEQ ID NO: 306078 - DNA, 25 bp, Artificial
  probe
  misc_feature (1)..(25): SEQ ID NO: 1816; WAN024CUA; Start 343; Stop 367
gctgatatagaggaaaatgcctttc

SEQ ID NO: 306079 - DNA, 25 bp, Artificial
  probe
  misc_feature (1)..(25): SEQ ID NO: 1816; WAN024CUA; Start 342; Stop 366
agctgatatagaggaaaatgccttt

SEQ ID NO: 306080 - DNA, 25 bp, Artificial
  probe
  misc_feature (1)..(25): SEQ ID NO: 1816; WAN024CUA; Start 340; Stop 364
ctagctgatatagaggaaaatgcct

SEQ ID NO: 306081 - DNA, 25 bp, Artificial
  probe
  misc_feature (1)..(25): SEQ ID NO: 1816; WAN024CUA; Start 339; Stop 363
cctagctgatatagaggaaaatgcc

SEQ ID NO: 306082 - DNA, 25 bp, Artificial
  probe
  misc_feature (1)..(25): SEQ ID NO: 1816; WAN024CUA; Start 332; Stop 356
gtggtgtcctagctgatatagagga

SEQ ID NO: 306083 - DNA, 25 bp, Artificial
  probe
  misc_feature (1)..(25): SEQ ID NO: 1816; WAN024CUA; Start 341; Stop 365
tagctgatatagaggaaaatgcctt

SEQ ID NO: 306084 - DNA, 25 bp, Artificial
  probe
  misc_feature (1)..(25): SEQ ID NO: 1816; WAN024CUA; Start 426; Stop 450
tcgttatatggaaatgcagccagag

SEQ ID NO: 306085 - DNA, 25 bp, Artificial
  probe
  misc_feature (1)..(25): SEQ ID NO: 1816; WAN024CUA; Start 344; Stop 368
ctgatatagaggaaaatgcctttct

SEQ ID NO: 306086 - DNA, 25 bp, Artificial
  probe
  misc_feature (1)..(25): SEQ ID NO: 1816; WAN024CUA; Start 356; Stop 380
aaaatgcctttctagtccctgttcg

SEQ ID NO: 306087 - DNA, 25 bp, Artificial
  probe
  misc_feature (1)..(25): SEQ ID NO: 1816; WAN024CUA; Start 350; Stop 374
tagaggaaaatgcctttctagtccc

SEQ ID NO: 306088 - DNA, 25 bp, Artificial
  probe
  misc_feature (1)..(25): SEQ ID NO: 1816; WAN024CUA; Start 355; Stop 379
gaaaatgcctttctagtccctgttc

SEQ ID NO: 306089 - DNA, 25 bp, Artificial
  probe
  misc_feature (1)..(25): SEQ ID NO: 1816; WAN024CUA; Start 314; Stop 338
ttatctctactgggacctgtggtgt

SEQ ID NO: 306090 - DNA, 25 bp, Artificial
  probe
  misc_feature (1)..(25): SEQ ID NO: 1816; WAN024CUA; Start 334; Stop 358
ggtgtcctagctgatatagaggaaa

SEQ ID NO: 306091 - DNA, 25 bp, Artificial
  probe
  misc_feature (1)..(25): SEQ ID NO: 1816; WAN024CUA; Start 348; Stop 372
tatagaggaaaatgcctttctagtc

SEQ ID NO: 306092 - DNA, 25 bp, Artificial
  probe
  misc_feature (1)..(25): SEQ ID NO: 1816; WAN024CUA; Start 487; Stop 511
gggattccttatgaagaagtcatga

SEQ ID NO: 306093 - DNA, 25 bp, Artificial
  probe
  misc_feature (1)..(25): SEQ ID NO: 1816; WAN024CUA; Start 315; Stop 339
tatctctactgggacctgtggtgtc

SEQ ID NO: 306094 - DNA, 25 bp, Artificial
  probe
  misc_feature (1)..(25): SEQ ID NO: 1816; WAN024CUA; Start 633; Stop 657
ggttctctggggtgaattgttgttc

SEQ ID NO: 306095 - DNA, 25 bp, Artificial
  probe
  misc_feature (1)..(25): SEQ ID NO: 1816; WAN024CUA; Start 427; Stop 451
cgttatatggaaatgcagccagagg

SEQ ID NO: 306096 - DNA, 25 bp, Artificial
  probe
  misc_feature (1)..(25): SEQ ID NO: 1816; WAN024CUA; Start 347; Stop 371
atatagaggaaaatgcctttctagt

SEQ ID NO: 306097 - DNA, 25 bp, Artificial
  probe
  misc_feature (1)..(25): SEQ ID NO: 1816; WAN024CUA; Start 345; Stop 369
tgatatagaggaaaatgcctttcta

SEQ ID NO: 306098 - DNA, 25 bp, Artificial
  probe
  misc_feature (1)..(25): SEQ ID NO: 1817; WAN024CQC; Start 182; Stop 206
gaatcaatgatgacggactcagtta

SEQ ID NO: 306099 - DNA, 25 bp, Artificial
  probe
  misc_feature (1)..(25): SEQ ID NO: 1817; WAN024CQC; Start 183; Stop 207
aatcaatgatgacggactcagttac

SEQ ID NO: 306100 - DNA, 25 bp, Artificial
  probe
  misc_feature (1)..(25): SEQ ID NO: 1817; WAN024CQC; Start 185; Stop 209
tcaatgatgacggactcagttacat

SEQ ID NO: 306101 - DNA, 25 bp, Artificial
  probe
  misc_feature (1)..(25): SEQ ID NO: 1817; WAN024CQC; Start 184; Stop 208
atcaatgatgacggactcagttaca

SEQ ID NO: 306102 - DNA, 25 bp, Artificial
  probe
  misc_feature (1)..(25): SEQ ID NO: 1817; WAN024CQC; Start 197; Stop 221
gactcagttacatcgaagactatca

SEQ ID NO: 306103 - DNA, 25 bp, Artificial
  probe
  misc_feature (1)..(25): SEQ ID NO: 1817; WAN024CQC; Start 196; Stop 220
ggactcagttacatcgaagactatc

SEQ ID NO: 306104 - DNA, 25 bp, Artificial
  probe
  misc_feature (1)..(25): SEQ ID NO: 1817; WAN024CQC; Start 574; Stop 598
ccctatctgctcaatcaatttcaag

SEQ ID NO: 306105 - DNA, 25 bp, Artificial
  probe
  misc_feature (1)..(25): SEQ ID NO: 1817; WAN024CQC; Start 198; Stop 222
actcagttacatcgaagactatcat

SEQ ID NO: 306106 - DNA, 25 bp, Artificial
  probe
  misc_feature (1)..(25): SEQ ID NO: 1817; WAN024CQC; Start 199; Stop 223
ctcagttacatcgaagactatcatg

SEQ ID NO: 306107 - DNA, 25 bp, Artificial
  probe
  misc_feature (1)..(25): SEQ ID NO: 1817; WAN024CQC; Start 3; Stop 27
gattcagtctatcacgagtcaaggc

SEQ ID NO: 306108 - DNA, 25 bp, Artificial
  probe
  misc_feature (1)..(25): SEQ ID NO: 1817; WAN024CQC; Start 717; Stop 741
atttattgattccctagcagactgg

SEQ ID NO: 306109 - DNA, 25 bp, Artificial
  probe
  misc_feature (1)..(25): SEQ ID NO: 1817; WAN024CQC; Start 448; Stop 472
tttaatgagtgtgtcttctgccatc

SEQ ID NO: 306110 - DNA, 25 bp, Artificial
  probe
  misc_feature (1)..(25): SEQ ID NO: 1817; WAN024CQC; Start 716; Stop 740
aatttattgattccctagcagactg

SEQ ID NO: 306111 - DNA, 25 bp, Artificial
  probe
  misc_feature (1)..(25): SEQ ID NO: 1817; WAN024CQC; Start 449; Stop 473
ttaatgagtgtgtcttctgccatcg

SEQ ID NO: 306112 - DNA, 25 bp, Artificial
  probe
  misc_feature (1)..(25): SEQ ID NO: 1817; WAN024CQC; Start 195; Stop 219
cggactcagttacatcgaagactat

SEQ ID NO: 306113 - DNA, 25 bp, Artificial
  probe
  misc_feature (1)..(25): SEQ ID NO: 1817; WAN024CQC; Start 4; Stop 28
attcagtctatcacgagtcaaggct

SEQ ID NO: 306114 - DNA, 25 bp, Artificial
  probe
  misc_feature (1)..(25): SEQ ID NO: 1817; WAN024CQC; Start 1; Stop 25
atgattcagtctatcacgagtcaag

SEQ ID NO: 306115 - DNA, 25 bp, Artificial
  probe
  misc_feature (1)..(25): SEQ ID NO: 1817; WAN024CQC; Start 5; Stop 29
ttcagtctatcacgagtcaaggctt

SEQ ID NO: 306116 - DNA, 25 bp, Artificial
  probe
  misc_feature (1)..(25): SEQ ID NO: 1817; WAN024CQC; Start 181; Stop 205
cgaatcaatgatgacggactcagtt

SEQ ID NO: 306117 - DNA, 25 bp, Artificial
  probe
  misc_feature (1)..(25): SEQ ID NO: 1817; WAN024CQC; Start 235; Stop 259
tttcccaagattaatagtgacctct

SEQ ID NO: 306118 - DNA, 25 bp, Artificial
  probe
  misc_feature (1)..(25): SEQ ID NO: 1817; WAN024CQC; Start 2; Stop 26
tgattcagtctatcacgagtcaagg

SEQ ID NO: 306119 - DNA, 25 bp, Artificial
  probe
  misc_feature (1)..(25): SEQ ID NO: 1817; WAN024CQC; Start 364; Stop 388
ttgatggaagcaggcttggattatc

SEQ ID NO: 306120 - DNA, 25 bp, Artificial
  probe
  misc_feature (1)..(25): SEQ ID NO: 1817; WAN024CQC; Start 194; Stop 218
acggactcagttacatcgaagacta

SEQ ID NO: 306121 - DNA, 25 bp, Artificial
  probe
  misc_feature (1)..(25): SEQ ID NO: 1817; WAN024CQC; Start 203; Stop 227
gttacatcgaagactatcatgaggt

SEQ ID NO: 306122 - DNA, 25 bp, Artificial
  probe
  misc_feature (1)..(25): SEQ ID NO: 1817; WAN024CQC; Start 186; Stop 210
caatgatgacggactcagttacatc

SEQ ID NO: 306123 - DNA, 25 bp, Artificial
  probe
  misc_feature (1)..(25): SEQ ID NO: 1817; WAN024CQC; Start 363; Stop 387
gttgatggaagcaggcttggattat

SEQ ID NO: 306124 - DNA, 25 bp, Artificial
  probe
  misc_feature (1)..(25): SEQ ID NO: 1817; WAN024CQC; Start 202; Stop 226
agttacatcgaagactatcatgagg

SEQ ID NO: 306125 - DNA, 25 bp, Artificial
  probe
  misc_feature (1)..(25): SEQ ID NO: 1817; WAN024CQC; Start 683; Stop 707
aagagtacgttgggattcacctaaa

SEQ ID NO: 306126 - DNA, 25 bp, Artificial
  probe
  misc_feature (1)..(25): SEQ ID NO: 1817; WAN024CQC; Start 200; Stop 224
tcagttacatcgaagactatcatga

SEQ ID NO: 306127 - DNA, 25 bp, Artificial
  probe
  misc_feature (1)..(25): SEQ ID NO: 1817; WAN024CQC; Start 575; Stop 599
cctatctgctcaatcaatttcaagc

SEQ ID NO: 306128 - DNA, 25 bp, Artificial
  probe
  misc_feature (1)..(25): SEQ ID NO: 1817; WAN024CQC; Start 715; Stop 739
aaatttattgattccctagcagact

SEQ ID NO: 306129 - DNA, 25 bp, Artificial
  probe
  misc_feature (1)..(25): SEQ ID NO: 1817; WAN024CQC; Start 201; Stop 225
cagttacatcgaagactatcatgag

SEQ ID NO: 306130 - DNA, 25 bp, Artificial
  probe
  misc_feature (1)..(25): SEQ ID NO: 1817; WAN024CQC; Start 366; Stop 390
gatggaagcaggcttggattatcag

SEQ ID NO: 306131 - DNA, 25 bp, Artificial
  probe
  misc_feature (1)..(25): SEQ ID NO: 1818; WAN024CZZ; Start 1096; Stop 1120
gatattcacttactcacaacagcca

SEQ ID NO: 306132 - DNA, 25 bp, Artificial
  probe
  misc_feature (1)..(25): SEQ ID NO: 1818; WAN024CZZ; Start 1097; Stop 1121
atattcacttactcacaacagccac

SEQ ID NO: 306133 - DNA, 25 bp, Artificial
  probe
  misc_feature (1)..(25): SEQ ID NO: 1818; WAN024CZZ; Start 1169; Stop 1193
gttctctcattcaactctcacttcc

SEQ ID NO: 306134 - DNA, 25 bp, Artificial
  probe
  misc_feature (1)..(25): SEQ ID NO: 1818; WAN024CZZ; Start 1168; Stop 1192
ggttctctcattcaactctcacttc

SEQ ID NO: 306135 - DNA, 25 bp, Artificial
  probe
  misc_feature (1)..(25): SEQ ID NO: 1818; WAN024CZZ; Start 894; Stop 918
cttactaatgtctctagcggtcaag

SEQ ID NO: 306136 - DNA, 25 bp, Artificial
  probe
  misc_feature (1)..(25): SEQ ID NO: 1818; WAN024CZZ; Start 1094; Stop 1118
ttgatattcacttactcacaacagc

SEQ ID NO: 306137 - DNA, 25 bp, Artificial
  probe
  misc_feature (1)..(25): SEQ ID NO: 1818; WAN024CZZ; Start 616; Stop 640
aactcatccttgactattgaccaac

SEQ ID NO: 306138 - DNA, 25 bp, Artificial
  probe
  misc_feature (1)..(25): SEQ ID NO: 1818; WAN024CZZ; Start 1095; Stop 1119
tgatattcacttactcacaacagcc

SEQ ID NO: 306139 - DNA, 25 bp, Artificial
  probe
  misc_feature (1)..(25): SEQ ID NO: 1818; WAN024CZZ; Start 1167; Stop 1191
tggttctctcattcaactctcactt

SEQ ID NO: 306140 - DNA, 25 bp, Artificial
  probe
  misc_feature (1)..(25): SEQ ID NO: 1818; WAN024CZZ; Start 1059; Stop 1083
catcattgctatcatcagtgctcaa

SEQ ID NO: 306141 - DNA, 25 bp, Artificial
  probe
  misc_feature (1)..(25): SEQ ID NO: 1818; WAN024CZZ; Start 895; Stop 919
ttactaatgtctctagcggtcaagt

SEQ ID NO: 306142 - DNA, 25 bp, Artificial
  probe
  misc_feature (1)..(25): SEQ ID NO: 1818; WAN024CZZ; Start 1166; Stop 1190
ctggttctctcattcaactctcact

SEQ ID NO: 306143 - DNA, 25 bp, Artificial
  probe
  misc_feature (1)..(25): SEQ ID NO: 1818; WAN024CZZ; Start 896; Stop 920
tactaatgtctctagcggtcaagtc

SEQ ID NO: 306144 - DNA, 25 bp, Artificial
  probe
  misc_feature (1)..(25): SEQ ID NO: 1818; WAN024CZZ; Start 1281; Stop 1305
gattctcatccttctagcttcctta

SEQ ID NO: 306145 - DNA, 25 bp, Artificial
  probe
  misc_feature (1)..(25): SEQ ID NO: 1818; WAN024CZZ; Start 1282; Stop 1306
attctcatccttctagcttccttaa

SEQ ID NO: 306146 - DNA, 25 bp, Artificial
  probe
  misc_feature (1)..(25): SEQ ID NO: 1818; WAN024CZZ; Start 618; Stop 642
ctcatccttgactattgaccaacca

SEQ ID NO: 306147 - DNA, 25 bp, Artificial
  probe
  misc_feature (1)..(25): SEQ ID NO: 1818; WAN024CZZ; Start 617; Stop 641
actcatccttgactattgaccaacc

SEQ ID NO: 306148 - DNA, 25 bp, Artificial
  probe
  misc_feature (1)..(25): SEQ ID NO: 1818; WAN024CZZ; Start 1098; Stop 1122
tattcacttactcacaacagccacc

SEQ ID NO: 306149 - DNA, 25 bp, Artificial
  probe
  misc_feature (1)..(25): SEQ ID NO: 1818; WAN024CZZ; Start 898; Stop 922
ctaatgtctctagcggtcaagtcag

SEQ ID NO: 306150 - DNA, 25 bp, Artificial
  probe
  misc_feature (1)..(25): SEQ ID NO: 1818; WAN024CZZ; Start 537; Stop 561
ctttatcgtcagcattatctaccca

SEQ ID NO: 306151 - DNA, 25 bp, Artificial
  probe
  misc_feature (1)..(25): SEQ ID NO: 1818; WAN024CZZ; Start 536; Stop 560
tctttatcgtcagcattatctaccc

SEQ ID NO: 306152 - DNA, 25 bp, Artificial
  probe
  misc_feature (1)..(25): SEQ ID NO: 1818; WAN024CZZ; Start 1174; Stop 1198
ctcattcaactctcacttcccaata

SEQ ID NO: 306153 - DNA, 25 bp, Artificial
  probe
  misc_feature (1)..(25): SEQ ID NO: 1818; WAN024CZZ; Start 1175; Stop 1199
tcattcaactctcacttcccaatat

SEQ ID NO: 306154 - DNA, 25 bp, Artificial
  probe
  misc_feature (1)..(25): SEQ ID NO: 1818; WAN024CZZ; Start 527; Stop 551
gcaatcatatctttatcgtcagcat

SEQ ID NO: 306155 - DNA, 25 bp, Artificial
  probe
  misc_feature (1)..(25): SEQ ID NO: 1818; WAN024CZZ; Start 538; Stop 562
tttatcgtcagcattatctacccac

SEQ ID NO: 306156 - DNA, 25 bp, Artificial
  probe
  misc_feature (1)..(25): SEQ ID NO: 1818; WAN024CZZ; Start 1131; Stop 1155
cgctctatctactaatatctcaccc

SEQ ID NO: 306157 - DNA, 25 bp, Artificial
  probe
  misc_feature (1)..(25): SEQ ID NO: 1818; WAN024CZZ; Start 1052; Stop 1076
tctttcccatcattgctatcatcag

SEQ ID NO: 306158 - DNA, 25 bp, Artificial
  probe
  misc_feature (1)..(25): SEQ ID NO: 1818; WAN024CZZ; Start 1051; Stop 1075
ctctttcccatcattgctatcatca

SEQ ID NO: 306159 - DNA, 25 bp, Artificial
  probe
  misc_feature (1)..(25): SEQ ID NO: 1818; WAN024CZZ; Start 521; Stop 545
cacttggcaatcatatctttatcgt

SEQ ID NO: 306160 - DNA, 25 bp, Artificial
  probe
  misc_feature (1)..(25): SEQ ID NO: 1818; WAN024CZZ; Start 1058; Stop 1082
ccatcattgctatcatcagtgctca

SEQ ID NO: 306161 - DNA, 25 bp, Artificial
  probe
  misc_feature (1)..(25): SEQ ID NO: 1818; WAN024CZZ; Start 886; Stop 910
ggcatgagcttactaatgtctctag

SEQ ID NO: 306162 - DNA, 25 bp, Artificial
  probe
  misc_feature (1)..(25): SEQ ID NO: 1818; WAN024CZZ; Start 619; Stop 643
tcatccttgactattgaccaaccac

SEQ ID NO: 306163 - DNA, 25 bp, Artificial
  probe
  misc_feature (1)..(25): SEQ ID NO: 1818; WAN024CZZ; Start 1053; Stop 1077
ctttcccatcattgctatcatcagt

SEQ ID NO: 306164 - DNA, 25 bp, Artificial
  probe
  misc_feature (1)..(25): SEQ ID NO: 1819; WAN024DMS; Start 360; Stop 384
cgaacaatatccacgaatccaagaa

SEQ ID NO: 306165 - DNA, 25 bp, Artificial
  probe
  misc_feature (1)..(25): SEQ ID NO: 1819; WAN024DMS; Start 353; Stop 377
aagatagcgaacaatatccacgaat

SEQ ID NO: 306166 - DNA, 25 bp, Artificial
  probe
  misc_feature (1)..(25): SEQ ID NO: 1819; WAN024DMS; Start 354; Stop 378
agatagcgaacaatatccacgaatc

SEQ ID NO: 306167 - DNA, 25 bp, Artificial
  probe
  misc_feature (1)..(25): SEQ ID NO: 1819; WAN024DMS; Start 484; Stop 508
ttaacaggtgtccacttcgtattga

SEQ ID NO: 306168 - DNA, 25 bp, Artificial
  probe
  misc_feature (1)..(25): SEQ ID NO: 1819; WAN024DMS; Start 356; Stop 380
atagcgaacaatatccacgaatcca

SEQ ID NO: 306169 - DNA, 25 bp, Artificial
  probe
  misc_feature (1)..(25): SEQ ID NO: 1819; WAN024DMS; Start 745; Stop 769
tatcctgatacagatcgcttgattc

SEQ ID NO: 306170 - DNA, 25 bp, Artificial
  probe
  misc_feature (1)..(25): SEQ ID NO: 1819; WAN024DMS; Start 744; Stop 768
ctatcctgatacagatcgcttgatt

SEQ ID NO: 306171 - DNA, 25 bp, Artificial
  probe
  misc_feature (1)..(25): SEQ ID NO: 1819; WAN024DMS; Start 357; Stop 381
tagcgaacaatatccacgaatccaa

SEQ ID NO: 306172 - DNA, 25 bp, Artificial
  probe
  misc_feature (1)..(25): SEQ ID NO: 1819; WAN024DMS; Start 485; Stop 509
taacaggtgtccacttcgtattgag

SEQ ID NO: 306173 - DNA, 25 bp, Artificial
  probe
  misc_feature (1)..(25): SEQ ID NO: 1819; WAN024DMS; Start 355; Stop 379
gatagcgaacaatatccacgaatcc

SEQ ID NO: 306174 - DNA, 25 bp, Artificial
  probe
  misc_feature (1)..(25): SEQ ID NO: 1819; WAN024DMS; Start 743; Stop 767
actatcctgatacagatcgcttgat

SEQ ID NO: 306175 - DNA, 25 bp, Artificial
  probe
  misc_feature (1)..(25): SEQ ID NO: 1819; WAN024DMS; Start 751; Stop 775
gatacagatcgcttgattccaacag

SEQ ID NO: 306176 - DNA, 25 bp, Artificial
  probe
  misc_feature (1)..(25): SEQ ID NO: 1819; WAN024DMS; Start 742; Stop 766
aactatcctgatacagatcgcttga

SEQ ID NO: 306177 - DNA, 25 bp, Artificial
  probe
  misc_feature (1)..(25): SEQ ID NO: 1819; WAN024DMS; Start 601; Stop 625
gtcgtaattcctagccgttctctac

SEQ ID NO: 306178 - DNA, 25 bp, Artificial
  probe
  misc_feature (1)..(25): SEQ ID NO: 1819; WAN024DMS; Start 712; Stop 736
attagcttctatactcgtctcctag

SEQ ID NO: 306179 - DNA, 25 bp, Artificial
  probe
  misc_feature (1)..(25): SEQ ID NO: 1819; WAN024DMS; Start 678; Stop 702
tgccaataaccaaatcctctttaga

SEQ ID NO: 306180 - DNA, 25 bp, Artificial
  probe
  misc_feature (1)..(25): SEQ ID NO: 1819; WAN024DMS; Start 361; Stop 385
gaacaatatccacgaatccaagaaa

SEQ ID NO: 306181 - DNA, 25 bp, Artificial
  probe
  misc_feature (1)..(25): SEQ ID NO: 1819; WAN024DMS; Start 752; Stop 776
atacagatcgcttgattccaacaga

SEQ ID NO: 306182 - DNA, 25 bp, Artificial
  probe
  misc_feature (1)..(25): SEQ ID NO: 1819; WAN024DMS; Start 323; Stop 347
gtggcaaatcagaaattaccctaaa

SEQ ID NO: 306183 - DNA, 25 bp, Artificial
  probe
  misc_feature (1)..(25): SEQ ID NO: 1819; WAN024DMS; Start 679; Stop 703
gccaataaccaaatcctctttagaa

SEQ ID NO: 306184 - DNA, 25 bp, Artificial
  probe
  misc_feature (1)..(25): SEQ ID NO: 1819; WAN024DMS; Start 322; Stop 346
agtggcaaatcagaaattaccctaa

SEQ ID NO: 306185 - DNA, 25 bp, Artificial
  probe
  misc_feature (1)..(25): SEQ ID NO: 1819; WAN024DMS; Start 683; Stop 707
ataaccaaatcctctttagaagcga

SEQ ID NO: 306186 - DNA, 25 bp, Artificial
  probe
  misc_feature (1)..(25): SEQ ID NO: 1819; WAN024DMS; Start 684; Stop 708
taaccaaatcctctttagaagcgaa

SEQ ID NO: 306187 - DNA, 25 bp, Artificial
  probe
  misc_feature (1)..(25): SEQ ID NO: 1819; WAN024DMS; Start 385; Stop 409
atttcagcaagcactcctttaatac

SEQ ID NO: 306188 - DNA, 25 bp, Artificial
  probe
  misc_feature (1)..(25): SEQ ID NO: 1819; WAN024DMS; Start 362; Stop 386
aacaatatccacgaatccaagaaat

SEQ ID NO: 306189 - DNA, 25 bp, Artificial
  probe
  misc_feature (1)..(25): SEQ ID NO: 1819; WAN024DMS; Start 764; Stop 788
tgattccaacagactttaacactac

SEQ ID NO: 306190 - DNA, 25 bp, Artificial
  probe
  misc_feature (1)..(25): SEQ ID NO: 1819; WAN024DMS; Start 750; Stop 774
tgatacagatcgcttgattccaaca

SEQ ID NO: 306191 - DNA, 25 bp, Artificial
  probe
  misc_feature (1)..(25): SEQ ID NO: 1819; WAN024DMS; Start 749; Stop 773
ctgatacagatcgcttgattccaac

SEQ ID NO: 306192 - DNA, 25 bp, Artificial
  probe
  misc_feature (1)..(25): SEQ ID NO: 1819; WAN024DMS; Start 682; Stop 706
aataaccaaatcctctttagaagcg

SEQ ID NO: 306193 - DNA, 25 bp, Artificial
  probe
  misc_feature (1)..(25): SEQ ID NO: 1819; WAN024DMS; Start 317; Stop 341
taaccagtggcaaatcagaaattac

SEQ ID NO: 306194 - DNA, 25 bp, Artificial
  probe
  misc_feature (1)..(25): SEQ ID NO: 1819; WAN024DMS; Start 315; Stop 339
tttaaccagtggcaaatcagaaatt

SEQ ID NO: 306195 - DNA, 25 bp, Artificial
  probe
  misc_feature (1)..(25): SEQ ID NO: 1819; WAN024DMS; Start 867; Stop 891
tgtgaaacttgaaattaaggatggg

SEQ ID NO: 306196 - DNA, 25 bp, Artificial
  probe
  misc_feature (1)..(25): SEQ ID NO: 1819; WAN024DMS; Start 387; Stop 411
ttcagcaagcactcctttaatactt

SEQ ID NO: 306197 - DNA, 25 bp, Artificial
  probe
  misc_feature (1)..(25): SEQ ID NO: 1820; WAN024FE4; Start 130; Stop 154
caagttgcccagaagtctactaaga

SEQ ID NO: 306198 - DNA, 25 bp, Artificial
  probe
  misc_feature (1)..(25): SEQ ID NO: 1820; WAN024FE4; Start 129; Stop 153
ccaagttgcccagaagtctactaag

SEQ ID NO: 306199 - DNA, 25 bp, Artificial
  probe
  misc_feature (1)..(25): SEQ ID NO: 1820; WAN024FE4; Start 59; Stop 83
tcaagacatcttctgaaagttcttc

SEQ ID NO: 306200 - DNA, 25 bp, Artificial
  probe
  misc_feature (1)..(25): SEQ ID NO: 1820; WAN024FE4; Start 97; Stop 121
aagattggaccttgcatacgacatg

SEQ ID NO: 306201 - DNA, 25 bp, Artificial
  probe
  misc_feature (1)..(25): SEQ ID NO: 1820; WAN024FE4; Start 199; Stop 223
gcttttgccattgtatttctccttt

SEQ ID NO: 306202 - DNA, 25 bp, Artificial
  probe
  misc_feature (1)..(25): SEQ ID NO: 1820; WAN024FE4; Start 196; Stop 220
attgcttttgccattgtatttctcc

SEQ ID NO: 306203 - DNA, 25 bp, Artificial
  probe
  misc_feature (1)..(25): SEQ ID NO: 1820; WAN024FE4; Start 190; Stop 214
tctgtaattgcttttgccattgtat

SEQ ID NO: 306204 - DNA, 25 bp, Artificial
  probe
  misc_feature (1)..(25): SEQ ID NO: 1820; WAN024FE4; Start 189; Stop 213
atctgtaattgcttttgccattgta

SEQ ID NO: 306205 - DNA, 25 bp, Artificial
  probe
  misc_feature (1)..(25): SEQ ID NO: 1820; WAN024FE4; Start 174; Stop 198
ttgttcgaatgttgcatctgtaatt

SEQ ID NO: 306206 - DNA, 25 bp, Artificial
  probe
  misc_feature (1)..(25): SEQ ID NO: 1820; WAN024FE4; Start 173; Stop 197
cttgttcgaatgttgcatctgtaat

SEQ ID NO: 306207 - DNA, 25 bp, Artificial
  probe
  misc_feature (1)..(25): SEQ ID NO: 1820; WAN024FE4; Start 195; Stop 219
aattgcttttgccattgtatttctc

SEQ ID NO: 306208 - DNA, 25 bp, Artificial
  probe
  misc_feature (1)..(25): SEQ ID NO: 1820; WAN024FE4; Start 175; Stop 199
tgttcgaatgttgcatctgtaattg

SEQ ID NO: 306209 - DNA, 25 bp, Artificial
  probe
  misc_feature (1)..(25): SEQ ID NO: 1820; WAN024FE4; Start 191; Stop 215
ctgtaattgcttttgccattgtatt

SEQ ID NO: 306210 - DNA, 25 bp, Artificial
  probe
  misc_feature (1)..(25): SEQ ID NO: 1820; WAN024FE4; Start 200; Stop 224
cttttgccattgtatttctcctttt

SEQ ID NO: 306211 - DNA, 25 bp, Artificial
  probe
  misc_feature (1)..(25): SEQ ID NO: 1820; WAN024FE4; Start 188; Stop 212
catctgtaattgcttttgccattgt

SEQ ID NO: 306212 - DNA, 25 bp, Artificial
  probe
  misc_feature (1)..(25): SEQ ID NO: 1820; WAN024FE4; Start 178; Stop 202
tcgaatgttgcatctgtaattgctt

SEQ ID NO: 306213 - DNA, 25 bp, Artificial
  probe
  misc_feature (1)..(25): SEQ ID NO: 1820; WAN024FE4; Start 172; Stop 196
tcttgttcgaatgttgcatctgtaa

SEQ ID NO: 306214 - DNA, 25 bp, Artificial
  probe
  misc_feature (1)..(25): SEQ ID NO: 1820; WAN024FE4; Start 171; Stop 195
ttcttgttcgaatgttgcatctgta

SEQ ID NO: 306215 - DNA, 25 bp, Artificial
  probe
  misc_feature (1)..(25): SEQ ID NO: 1820; WAN024FE4; Start 128; Stop 152
accaagttgcccagaagtctactaa

SEQ ID NO: 306216 - DNA, 25 bp, Artificial
  probe
  misc_feature (1)..(25): SEQ ID NO: 1820; WAN024FE4; Start 60; Stop 84
caagacatcttctgaaagttcttca

SEQ ID NO: 306217 - DNA, 25 bp, Artificial
  probe
  misc_feature (1)..(25): SEQ ID NO: 1820; WAN024FE4; Start 192; Stop 216
tgtaattgcttttgccattgtattt

SEQ ID NO: 306218 - DNA, 25 bp, Artificial
  probe
  misc_feature (1)..(25): SEQ ID NO: 1820; WAN024FE4; Start 198; Stop 222
tgcttttgccattgtatttctcctt

SEQ ID NO: 306219 - DNA, 25 bp, Artificial
  probe
  misc_feature (1)..(25): SEQ ID NO: 1820; WAN024FE4; Start 197; Stop 221
ttgcttttgccattgtatttctcct

SEQ ID NO: 306220 - DNA, 25 bp, Artificial
  probe
  misc_feature (1)..(25): SEQ ID NO: 1820; WAN024FE4; Start 193; Stop 217
gtaattgcttttgccattgtatttc

SEQ ID NO: 306221 - DNA, 25 bp, Artificial
  probe
  misc_feature (1)..(25): SEQ ID NO: 1820; WAN024FE4; Start 58; Stop 82
ttcaagacatcttctgaaagttctt

SEQ ID NO: 306222 - DNA, 25 bp, Artificial
  probe
  misc_feature (1)..(25): SEQ ID NO: 1820; WAN024FE4; Start 194; Stop 218
taattgcttttgccattgtatttct

SEQ ID NO: 306223 - DNA, 25 bp, Artificial
  probe
  misc_feature (1)..(25): SEQ ID NO: 1820; WAN024FE4; Start 43; Stop 67
tccattttaacgattttcaagacat

SEQ ID NO: 306224 - DNA, 25 bp, Artificial
  probe
  misc_feature (1)..(25): SEQ ID NO: 1820; WAN024FE4; Start 50; Stop 74
taacgattttcaagacatcttctga

SEQ ID NO: 306225 - DNA, 25 bp, Artificial
  probe
  misc_feature (1)..(25): SEQ ID NO: 1820; WAN024FE4; Start 42; Stop 66
gtccattttaacgattttcaagaca

SEQ ID NO: 306226 - DNA, 25 bp, Artificial
  probe
  misc_feature (1)..(25): SEQ ID NO: 1820; WAN024FE4; Start 44; Stop 68
ccattttaacgattttcaagacatc

SEQ ID NO: 306227 - DNA, 25 bp, Artificial
  probe
  misc_feature (1)..(25): SEQ ID NO: 1820; WAN024FE4; Start 127; Stop 151
caccaagttgcccagaagtctacta

SEQ ID NO: 306228 - DNA, 25 bp, Artificial
  probe
  misc_feature (1)..(25): SEQ ID NO: 1820; WAN024FE4; Start 49; Stop 73
ttaacgattttcaagacatcttctg

SEQ ID NO: 306229 - DNA, 25 bp, Artificial
  probe
  misc_feature (1)..(25): SEQ ID NO: 1820; WAN024FE4; Start 179; Stop 203
cgaatgttgcatctgtaattgcttt

SEQ ID NO: 306230 - DNA, 25 bp, Artificial
  probe
  misc_feature (1)..(25): SEQ ID NO: 1821; WAN024CSG; Start 227; Stop 251
taacagcattgatagccttcatact

SEQ ID NO: 306231 - DNA, 25 bp, Artificial
  probe
  misc_feature (1)..(25): SEQ ID NO: 1821; WAN024CSG; Start 226; Stop 250
gtaacagcattgatagccttcatac

SEQ ID NO: 306232 - DNA, 25 bp, Artificial
  probe
  misc_feature (1)..(25): SEQ ID NO: 1821; WAN024CSG; Start 228; Stop 252
aacagcattgatagccttcatactt

SEQ ID NO: 306233 - DNA, 25 bp, Artificial
  probe
  misc_feature (1)..(25): SEQ ID NO: 1821; WAN024CSG; Start 225; Stop 249
ggtaacagcattgatagccttcata

SEQ ID NO: 306234 - DNA, 25 bp, Artificial
  probe
  misc_feature (1)..(25): SEQ ID NO: 1821; WAN024CSG; Start 222; Stop 246
gttggtaacagcattgatagccttc

SEQ ID NO: 306235 - DNA, 25 bp, Artificial
  probe
  misc_feature (1)..(25): SEQ ID NO: 1821; WAN024CSG; Start 224; Stop 248
tggtaacagcattgatagccttcat

SEQ ID NO: 306236 - DNA, 25 bp, Artificial
  probe
  misc_feature (1)..(25): SEQ ID NO: 1821; WAN024CSG; Start 223; Stop 247
ttggtaacagcattgatagccttca

SEQ ID NO: 306237 - DNA, 25 bp, Artificial
  probe
  misc_feature (1)..(25): SEQ ID NO: 1821; WAN024CSG; Start 21; Stop 45
ctcaaccaagccttcaacatccata

SEQ ID NO: 306238 - DNA, 25 bp, Artificial
  probe
  misc_feature (1)..(25): SEQ ID NO: 1821; WAN024CSG; Start 168; Stop 192
gatgtcaatgatttccaacttgtcc

SEQ ID NO: 306239 - DNA, 25 bp, Artificial
  probe
  misc_feature (1)..(25): SEQ ID NO: 1821; WAN024CSG; Start 230; Stop 254
cagcattgatagccttcatactttc

SEQ ID NO: 306240 - DNA, 25 bp, Artificial
  probe
  misc_feature (1)..(25): SEQ ID NO: 1821; WAN024CSG; Start 231; Stop 255
agcattgatagccttcatactttca

SEQ ID NO: 306241 - DNA, 25 bp, Artificial
  probe
  misc_feature (1)..(25): SEQ ID NO: 1821; WAN024CSG; Start 229; Stop 253
acagcattgatagccttcatacttt

SEQ ID NO: 306242 - DNA, 25 bp, Artificial
  probe
  misc_feature (1)..(25): SEQ ID NO: 1821; WAN024CSG; Start 22; Stop 46
tcaaccaagccttcaacatccatac

SEQ ID NO: 306243 - DNA, 25 bp, Artificial
  probe
  misc_feature (1)..(25): SEQ ID NO: 1821; WAN024CSG; Start 167; Stop 191
cgatgtcaatgatttccaacttgtc

SEQ ID NO: 306244 - DNA, 25 bp, Artificial
  probe
  misc_feature (1)..(25): SEQ ID NO: 1821; WAN024CSG; Start 170; Stop 194
tgtcaatgatttccaacttgtccat

SEQ ID NO: 306245 - DNA, 25 bp, Artificial
  probe
  misc_feature (1)..(25): SEQ ID NO: 1821; WAN024CSG; Start 169; Stop 193
atgtcaatgatttccaacttgtcca

SEQ ID NO: 306246 - DNA, 25 bp, Artificial
  probe
  misc_feature (1)..(25): SEQ ID NO: 1821; WAN024CSG; Start 171; Stop 195
gtcaatgatttccaacttgtccatg

SEQ ID NO: 306247 - DNA, 25 bp, Artificial
  probe
  misc_feature (1)..(25): SEQ ID NO: 1821; WAN024CSG; Start 107; Stop 131
aaatggtacaacagtcttcaaacgg

SEQ ID NO: 306248 - DNA, 25 bp, Artificial
  probe
  misc_feature (1)..(25): SEQ ID NO: 1821; WAN024CSG; Start 243; Stop 267
cttcatactttcaagggtttggctg

SEQ ID NO: 306249 - DNA, 25 bp, Artificial
  probe
  misc_feature (1)..(25): SEQ ID NO: 1821; WAN024CSG; Start 166; Stop 190
gcgatgtcaatgatttccaacttgt

SEQ ID NO: 306250 - DNA, 25 bp, Artificial
  probe
  misc_feature (1)..(25): SEQ ID NO: 1821; WAN024CSG; Start 217; Stop 241
ggagtgttggtaacagcattgatag

SEQ ID NO: 306251 - DNA, 25 bp, Artificial
  probe
  misc_feature (1)..(25): SEQ ID NO: 1821; WAN024CSG; Start 108; Stop 132
aatggtacaacagtcttcaaacggt

SEQ ID NO: 306252 - DNA, 25 bp, Artificial
  probe
  misc_feature (1)..(25): SEQ ID NO: 1821; WAN024CSG; Start 23; Stop 47
caaccaagccttcaacatccatacg

SEQ ID NO: 306253 - DNA, 25 bp, Artificial
  probe
  misc_feature (1)..(25): SEQ ID NO: 1821; WAN024CSG; Start 157; Stop 181
atttcctgggcgatgtcaatgattt

SEQ ID NO: 306254 - DNA, 25 bp, Artificial
  probe
  misc_feature (1)..(25): SEQ ID NO: 1821; WAN024CSG; Start 165; Stop 189
ggcgatgtcaatgatttccaacttg

SEQ ID NO: 306255 - DNA, 25 bp, Artificial
  probe
  misc_feature (1)..(25): SEQ ID NO: 1821; WAN024CSG; Start 109; Stop 133
atggtacaacagtcttcaaacggtt

SEQ ID NO: 306256 - DNA, 25 bp, Artificial
  probe
  misc_feature (1)..(25): SEQ ID NO: 1821; WAN024CSG; Start 218; Stop 242
gagtgttggtaacagcattgatagc

SEQ ID NO: 306257 - DNA, 25 bp, Artificial
  probe
  misc_feature (1)..(25): SEQ ID NO: 1821; WAN024CSG; Start 132; Stop 156
ttggattgaaatgtcaaaggtatcg

SEQ ID NO: 306258 - DNA, 25 bp, Artificial
  probe
  misc_feature (1)..(25): SEQ ID NO: 1821; WAN024CSG; Start 51; Stop 75
ttcgtactgctccgcattcttaatt

SEQ ID NO: 306259 - DNA, 25 bp, Artificial
  probe
  misc_feature (1)..(25): SEQ ID NO: 1821; WAN024CSG; Start 232; Stop 256
gcattgatagccttcatactttcaa

SEQ ID NO: 306260 - DNA, 25 bp, Artificial
  probe
  misc_feature (1)..(25): SEQ ID NO: 1821; WAN024CSG; Start 130; Stop 154
ggttggattgaaatgtcaaaggtat

SEQ ID NO: 306261 - DNA, 25 bp, Artificial
  probe
  misc_feature (1)..(25): SEQ ID NO: 1821; WAN024CSG; Start 244; Stop 268
ttcatactttcaagggtttggctgg

SEQ ID NO: 306262 - DNA, 25 bp, Artificial
  probe
  misc_feature (1)..(25): SEQ ID NO: 1821; WAN024CSG; Start 156; Stop 180
gatttcctgggcgatgtcaatgatt

SEQ ID NO: 306263 - DNA, 25 bp, Artificial
  probe
  misc_feature (1)..(25): SEQ ID NO: 1822; WAN024FUX; Start 102; Stop 126
tgagattgttgaatggaatgaggat

SEQ ID NO: 306264 - DNA, 25 bp, Artificial
  probe
  misc_feature (1)..(25): SEQ ID NO: 1822; WAN024FUX; Start 101; Stop 125
atgagattgttgaatggaatgagga

SEQ ID NO: 306265 - DNA, 25 bp, Artificial
  probe
  misc_feature (1)..(25): SEQ ID NO: 1822; WAN024FUX; Start 90; Stop 114
tatgccagactatgagattgttgaa

SEQ ID NO: 306266 - DNA, 25 bp, Artificial
  probe
  misc_feature (1)..(25): SEQ ID NO: 1822; WAN024FUX; Start 342; Stop 366
tgtatatgcttgtatgccagatgat

SEQ ID NO: 306267 - DNA, 25 bp, Artificial
  probe
  misc_feature (1)..(25): SEQ ID NO: 1822; WAN024FUX; Start 341; Stop 365
ttgtatatgcttgtatgccagatga

SEQ ID NO: 306268 - DNA, 25 bp, Artificial
  probe
  misc_feature (1)..(25): SEQ ID NO: 1822; WAN024FUX; Start 340; Stop 364
cttgtatatgcttgtatgccagatg

SEQ ID NO: 306269 - DNA, 25 bp, Artificial
  probe
  misc_feature (1)..(25): SEQ ID NO: 1822; WAN024FUX; Start 339; Stop 363
acttgtatatgcttgtatgccagat

SEQ ID NO: 306270 - DNA, 25 bp, Artificial
  probe
  misc_feature (1)..(25): SEQ ID NO: 1822; WAN024FUX; Start 91; Stop 115
atgccagactatgagattgttgaat

SEQ ID NO: 306271 - DNA, 25 bp, Artificial
  probe
  misc_feature (1)..(25): SEQ ID NO: 1822; WAN024FUX; Start 89; Stop 113
atatgccagactatgagattgttga

SEQ ID NO: 306272 - DNA, 25 bp, Artificial
  probe
  misc_feature (1)..(25): SEQ ID NO: 1822; WAN024FUX; Start 338; Stop 362
gacttgtatatgcttgtatgccaga

SEQ ID NO: 306273 - DNA, 25 bp, Artificial
  probe
  misc_feature (1)..(25): SEQ ID NO: 1822; WAN024FUX; Start 347; Stop 371
atgcttgtatgccagatgataagat

SEQ ID NO: 306274 - DNA, 25 bp, Artificial
  probe
  misc_feature (1)..(25): SEQ ID NO: 1822; WAN024FUX; Start 348; Stop 372
tgcttgtatgccagatgataagata

SEQ ID NO: 306275 - DNA, 25 bp, Artificial
  probe
  misc_feature (1)..(25): SEQ ID NO: 1822; WAN024FUX; Start 346; Stop 370
tatgcttgtatgccagatgataaga

SEQ ID NO: 306276 - DNA, 25 bp, Artificial
  probe
  misc_feature (1)..(25): SEQ ID NO: 1822; WAN024FUX; Start 573; Stop 597
ggaacggacgattagtattcatcat

SEQ ID NO: 306277 - DNA, 25 bp, Artificial
  probe
  misc_feature (1)..(25): SEQ ID NO: 1822; WAN024FUX; Start 333; Stop 357
tccaggacttgtatatgcttgtatg

SEQ ID NO: 306278 - DNA, 25 bp, Artificial
  probe
  misc_feature (1)..(25): SEQ ID NO: 1822; WAN024FUX; Start 100; Stop 124
tatgagattgttgaatggaatgagg

SEQ ID NO: 306279 - DNA, 25 bp, Artificial
  probe
  misc_feature (1)..(25): SEQ ID NO: 1822; WAN024FUX; Start 92; Stop 116
tgccagactatgagattgttgaatg

SEQ ID NO: 306280 - DNA, 25 bp, Artificial
  probe
  misc_feature (1)..(25): SEQ ID NO: 1822; WAN024FUX; Start 331; Stop 355
aatccaggacttgtatatgcttgta

SEQ ID NO: 306281 - DNA, 25 bp, Artificial
  probe
  misc_feature (1)..(25): SEQ ID NO: 1822; WAN024FUX; Start 95; Stop 119
cagactatgagattgttgaatggaa

SEQ ID NO: 306282 - DNA, 25 bp, Artificial
  probe
  misc_feature (1)..(25): SEQ ID NO: 1822; WAN024FUX; Start 350; Stop 374
cttgtatgccagatgataagatagc

SEQ ID NO: 306283 - DNA, 25 bp, Artificial
  probe
  misc_feature (1)..(25): SEQ ID NO: 1822; WAN024FUX; Start 349; Stop 373
gcttgtatgccagatgataagatag

SEQ ID NO: 306284 - DNA, 25 bp, Artificial
  probe
  misc_feature (1)..(25): SEQ ID NO: 1822; WAN024FUX; Start 574; Stop 598
gaacggacgattagtattcatcatt

SEQ ID NO: 306285 - DNA, 25 bp, Artificial
  probe
  misc_feature (1)..(25): SEQ ID NO: 1822; WAN024FUX; Start 332; Stop 356
atccaggacttgtatatgcttgtat

SEQ ID NO: 306286 - DNA, 25 bp, Artificial
  probe
  misc_feature (1)..(25): SEQ ID NO: 1822; WAN024FUX; Start 103; Stop 127
gagattgttgaatggaatgaggata

SEQ ID NO: 306287 - DNA, 25 bp, Artificial
  probe
  misc_feature (1)..(25): SEQ ID NO: 1822; WAN024FUX; Start 568; Stop 592
cttacggaacggacgattagtattc

SEQ ID NO: 306288 - DNA, 25 bp, Artificial
  probe
  misc_feature (1)..(25): SEQ ID NO: 1822; WAN024FUX; Start 345; Stop 369
atatgcttgtatgccagatgataag

SEQ ID NO: 306289 - DNA, 25 bp, Artificial
  probe
  misc_feature (1)..(25): SEQ ID NO: 1822; WAN024FUX; Start 337; Stop 361
ggacttgtatatgcttgtatgccag

SEQ ID NO: 306290 - DNA, 25 bp, Artificial
  probe
  misc_feature (1)..(25): SEQ ID NO: 1822; WAN024FUX; Start 335; Stop 359
caggacttgtatatgcttgtatgcc

SEQ ID NO: 306291 - DNA, 25 bp, Artificial
  probe
  misc_feature (1)..(25): SEQ ID NO: 1822; WAN024FUX; Start 334; Stop 358
ccaggacttgtatatgcttgtatgc

SEQ ID NO: 306292 - DNA, 25 bp, Artificial
  probe
  misc_feature (1)..(25): SEQ ID NO: 1822; WAN024FUX; Start 343; Stop 367
gtatatgcttgtatgccagatgata

SEQ ID NO: 306293 - DNA, 25 bp, Artificial
  probe
  misc_feature (1)..(25): SEQ ID NO: 1822; WAN024FUX; Start 88; Stop 112
tatatgccagactatgagattgttg

SEQ ID NO: 306294 - DNA, 25 bp, Artificial
  probe
  misc_feature (1)..(25): SEQ ID NO: 1822; WAN024FUX; Start 570; Stop 594
tacggaacggacgattagtattcat

SEQ ID NO: 306295 - DNA, 25 bp, Artificial
  probe
  misc_feature (1)..(25): SEQ ID NO: 1822; WAN024FUX; Start 104; Stop 128
agattgttgaatggaatgaggataa

SEQ ID NO: 306296 - DNA, 25 bp, Artificial
  probe
  misc_feature (1)..(25): SEQ ID NO: 1823; WAN024AVT; Start 2; Stop 26
tgattcctcacacagatattgttca

SEQ ID NO: 306297 - DNA, 25 bp, Artificial
  probe
  misc_feature (1)..(25): SEQ ID NO: 1823; WAN024AVT; Start 1; Stop 25
atgattcctcacacagatattgttc

SEQ ID NO: 306298 - DNA, 25 bp, Artificial
  probe
  misc_feature (1)..(25): SEQ ID NO: 1823; WAN024AVT; Start 92; Stop 116
cgccaggtaaggaagtagaagtatc

SEQ ID NO: 306299 - DNA, 25 bp, Artificial
  probe
  misc_feature (1)..(25): SEQ ID NO: 1823; WAN024AVT; Start 93; Stop 117
gccaggtaaggaagtagaagtatcc

SEQ ID NO: 306300 - DNA, 25 bp, Artificial
  probe
  misc_feature (1)..(25): SEQ ID NO: 1823; WAN024AVT; Start 131; Stop 155
tcatcaataattcaagttcaagtca

SEQ ID NO: 306301 - DNA, 25 bp, Artificial
  probe
  misc_feature (1)..(25): SEQ ID NO: 1823; WAN024AVT; Start 69; Stop 93
ggtgactttccataatatgattgcg

SEQ ID NO: 306302 - DNA, 25 bp, Artificial
  probe
  misc_feature (1)..(25): SEQ ID NO: 1823; WAN024AVT; Start 68; Stop 92
cggtgactttccataatatgattgc

SEQ ID NO: 306303 - DNA, 25 bp, Artificial
  probe
  misc_feature (1)..(25): SEQ ID NO: 1823; WAN024AVT; Start 112; Stop 136
gtatccttgctcttctttatcatca

SEQ ID NO: 306304 - DNA, 25 bp, Artificial
  probe
  misc_feature (1)..(25): SEQ ID NO: 1823; WAN024AVT; Start 111; Stop 135
agtatccttgctcttctttatcatc

SEQ ID NO: 306305 - DNA, 25 bp, Artificial
  probe
  misc_feature (1)..(25): SEQ ID NO: 1823; WAN024AVT; Start 41; Stop 65
aagtggtggttgttcgattagagaa

SEQ ID NO: 306306 - DNA, 25 bp, Artificial
  probe
  misc_feature (1)..(25): SEQ ID NO: 1823; WAN024AVT; Start 114; Stop 138
atccttgctcttctttatcatcaat

SEQ ID NO: 306307 - DNA, 25 bp, Artificial
  probe
  misc_feature (1)..(25): SEQ ID NO: 1823; WAN024AVT; Start 132; Stop 156
catcaataattcaagttcaagtcaa

SEQ ID NO: 306308 - DNA, 25 bp, Artificial
  probe
  misc_feature (1)..(25): SEQ ID NO: 1823; WAN024AVT; Start 110; Stop 134
aagtatccttgctcttctttatcat

SEQ ID NO: 306309 - DNA, 25 bp, Artificial
  probe
  misc_feature (1)..(25): SEQ ID NO: 1823; WAN024AVT; Start 102; Stop 126
ggaagtagaagtatccttgctcttc

SEQ ID NO: 306310 - DNA, 25 bp, Artificial
  probe
  misc_feature (1)..(25): SEQ ID NO: 1823; WAN024AVT; Start 150; Stop 174
aagtcaaacgaacattcttgctcag

SEQ ID NO: 306311 - DNA, 25 bp, Artificial
  probe
  misc_feature (1)..(25): SEQ ID NO: 1823; WAN024AVT; Start 135; Stop 159
caataattcaagttcaagtcaaacg

SEQ ID NO: 306312 - DNA, 25 bp, Artificial
  probe
  misc_feature (1)..(25): SEQ ID NO: 1823; WAN024AVT; Start 115; Stop 139
tccttgctcttctttatcatcaata

SEQ ID NO: 306313 - DNA, 25 bp, Artificial
  probe
  misc_feature (1)..(25): SEQ ID NO: 1823; WAN024AVT; Start 113; Stop 137
tatccttgctcttctttatcatcaa

SEQ ID NO: 306314 - DNA, 25 bp, Artificial
  probe
  misc_feature (1)..(25): SEQ ID NO: 1823; WAN024AVT; Start 137; Stop 161
ataattcaagttcaagtcaaacgaa

SEQ ID NO: 306315 - DNA, 25 bp, Artificial
  probe
  misc_feature (1)..(25): SEQ ID NO: 1823; WAN024AVT; Start 136; Stop 160
aataattcaagttcaagtcaaacga

SEQ ID NO: 306316 - DNA, 25 bp, Artificial
  probe
  misc_feature (1)..(25): SEQ ID NO: 1823; WAN024AVT; Start 152; Stop 176
gtcaaacgaacattcttgctcagtt

SEQ ID NO: 306317 - DNA, 25 bp, Artificial
  probe
  misc_feature (1)..(25): SEQ ID NO: 1823; WAN024AVT; Start 116; Stop 140
ccttgctcttctttatcatcaataa

SEQ ID NO: 306318 - DNA, 25 bp, Artificial
  probe
  misc_feature (1)..(25): SEQ ID NO: 1823; WAN024AVT; Start 130; Stop 154
atcatcaataattcaagttcaagtc

SEQ ID NO: 306319 - DNA, 25 bp, Artificial
  probe
  misc_feature (1)..(25): SEQ ID NO: 1823; WAN024AVT; Start 39; Stop 63
gaaagtggtggttgttcgattagag

SEQ ID NO: 306320 - DNA, 25 bp, Artificial
  probe
  misc_feature (1)..(25): SEQ ID NO: 1823; WAN024AVT; Start 40; Stop 64
aaagtggtggttgttcgattagaga

SEQ ID NO: 306321 - DNA, 25 bp, Artificial
  probe
  misc_feature (1)..(25): SEQ ID NO: 1823; WAN024AVT; Start 151; Stop 175
agtcaaacgaacattcttgctcagt

SEQ ID NO: 306322 - DNA, 25 bp, Artificial
  probe
  misc_feature (1)..(25): SEQ ID NO: 1823; WAN024AVT; Start 42; Stop 66
agtggtggttgttcgattagagaaa

SEQ ID NO: 306323 - DNA, 25 bp, Artificial
  probe
  misc_feature (1)..(25): SEQ ID NO: 1823; WAN024AVT; Start 43; Stop 67
gtggtggttgttcgattagagaaac

SEQ ID NO: 306324 - DNA, 25 bp, Artificial
  probe
  misc_feature (1)..(25): SEQ ID NO: 1823; WAN024AVT; Start 67; Stop 91
ccggtgactttccataatatgattg

SEQ ID NO: 306325 - DNA, 25 bp, Artificial
  probe
  misc_feature (1)..(25): SEQ ID NO: 1823; WAN024AVT; Start 134; Stop 158
tcaataattcaagttcaagtcaaac

SEQ ID NO: 306326 - DNA, 25 bp, Artificial
  probe
  misc_feature (1)..(25): SEQ ID NO: 1823; WAN024AVT; Start 80; Stop 104
ataatatgattgcgccaggtaagga

SEQ ID NO: 306327 - DNA, 25 bp, Artificial
  probe
  misc_feature (1)..(25): SEQ ID NO: 1823; WAN024AVT; Start 94; Stop 118
ccaggtaaggaagtagaagtatcct

SEQ ID NO: 306328 - DNA, 25 bp, Artificial
  probe
  misc_feature (1)..(25): SEQ ID NO: 1823; WAN024AVT; Start 101; Stop 125
aggaagtagaagtatccttgctctt

SEQ ID NO: 306329 - DNA, 25 bp, Artificial
  probe
  misc_feature (1)..(25): SEQ ID NO: 1824; WAN024DFK; Start 100; Stop 124
gttgaagacaatatggctaactctg

SEQ ID NO: 306330 - DNA, 25 bp, Artificial
  probe
  misc_feature (1)..(25): SEQ ID NO: 1824; WAN024DFK; Start 99; Stop 123
ggttgaagacaatatggctaactct

SEQ ID NO: 306331 - DNA, 25 bp, Artificial
  probe
  misc_feature (1)..(25): SEQ ID NO: 1824; WAN024DFK; Start 102; Stop 126
tgaagacaatatggctaactctgtt

SEQ ID NO: 306332 - DNA, 25 bp, Artificial
  probe
  misc_feature (1)..(25): SEQ ID NO: 1824; WAN024DFK; Start 101; Stop 125
ttgaagacaatatggctaactctgt

SEQ ID NO: 306333 - DNA, 25 bp, Artificial
  probe
  misc_feature (1)..(25): SEQ ID NO: 1824; WAN024DFK; Start 98; Stop 122
cggttgaagacaatatggctaactc

SEQ ID NO: 306334 - DNA, 25 bp, Artificial
  probe
  misc_feature (1)..(25): SEQ ID NO: 1824; WAN024DFK; Start 571; Stop 595
gccaacaattcattgaactaactaa

SEQ ID NO: 306335 - DNA, 25 bp, Artificial
  probe
  misc_feature (1)..(25): SEQ ID NO: 1824; WAN024DFK; Start 103; Stop 127
gaagacaatatggctaactctgtta

SEQ ID NO: 306336 - DNA, 25 bp, Artificial
  probe
  misc_feature (1)..(25): SEQ ID NO: 1824; WAN024DFK; Start 238; Stop 262
aactttatcaaggcagatgtccaaa

SEQ ID NO: 306337 - DNA, 25 bp, Artificial
  probe
  misc_feature (1)..(25): SEQ ID NO: 1824; WAN024DFK; Start 237; Stop 261
gaactttatcaaggcagatgtccaa

SEQ ID NO: 306338 - DNA, 25 bp, Artificial
  probe
  misc_feature (1)..(25): SEQ ID NO: 1824; WAN024DFK; Start 105; Stop 129
agacaatatggctaactctgttatt

SEQ ID NO: 306339 - DNA, 25 bp, Artificial
  probe
  misc_feature (1)..(25): SEQ ID NO: 1824; WAN024DFK; Start 104; Stop 128
aagacaatatggctaactctgttat

SEQ ID NO: 306340 - DNA, 25 bp, Artificial
  probe
  misc_feature (1)..(25): SEQ ID NO: 1824; WAN024DFK; Start 548; Stop 572
atggctttattgatgaaattatggc

SEQ ID NO: 306341 - DNA, 25 bp, Artificial
  probe
  misc_feature (1)..(25): SEQ ID NO: 1824; WAN024DFK; Start 239; Stop 263
actttatcaaggcagatgtccaaac

SEQ ID NO: 306342 - DNA, 25 bp, Artificial
  probe
  misc_feature (1)..(25): SEQ ID NO: 1824; WAN024DFK; Start 10; Stop 34
gtagttattgaacaaacaagccgtg

SEQ ID NO: 306343 - DNA, 25 bp, Artificial
  probe
  misc_feature (1)..(25): SEQ ID NO: 1824; WAN024DFK; Start 235; Stop 259
atgaactttatcaaggcagatgtcc

SEQ ID NO: 306344 - DNA, 25 bp, Artificial
  probe
  misc_feature (1)..(25): SEQ ID NO: 1824; WAN024DFK; Start 6; Stop 30
tcctgtagttattgaacaaacaagc

SEQ ID NO: 306345 - DNA, 25 bp, Artificial
  probe
  misc_feature (1)..(25): SEQ ID NO: 1824; WAN024DFK; Start 7; Stop 31
cctgtagttattgaacaaacaagcc

SEQ ID NO: 306346 - DNA, 25 bp, Artificial
  probe
  misc_feature (1)..(25): SEQ ID NO: 1824; WAN024DFK; Start 336; Stop 360
gcttccaaatgctgaatacatgatt

SEQ ID NO: 306347 - DNA, 25 bp, Artificial
  probe
  misc_feature (1)..(25): SEQ ID NO: 1824; WAN024DFK; Start 8; Stop 32
ctgtagttattgaacaaacaagccg

SEQ ID NO: 306348 - DNA, 25 bp, Artificial
  probe
  misc_feature (1)..(25): SEQ ID NO: 1824; WAN024DFK; Start 234; Stop 258
catgaactttatcaaggcagatgtc

SEQ ID NO: 306349 - DNA, 25 bp, Artificial
  probe
  misc_feature (1)..(25): SEQ ID NO: 1824; WAN024DFK; Start 231; Stop 255
taccatgaactttatcaaggcagat

SEQ ID NO: 306350 - DNA, 25 bp, Artificial
  probe
  misc_feature (1)..(25): SEQ ID NO: 1824; WAN024DFK; Start 230; Stop 254
ataccatgaactttatcaaggcaga

SEQ ID NO: 306351 - DNA, 25 bp, Artificial
  probe
  misc_feature (1)..(25): SEQ ID NO: 1824; WAN024DFK; Start 240; Stop 264
ctttatcaaggcagatgtccaaacc

SEQ ID NO: 306352 - DNA, 25 bp, Artificial
  probe
  misc_feature (1)..(25): SEQ ID NO: 1824; WAN024DFK; Start 9; Stop 33
tgtagttattgaacaaacaagccgt

SEQ ID NO: 306353 - DNA, 25 bp, Artificial
  probe
  misc_feature (1)..(25): SEQ ID NO: 1824; WAN024DFK; Start 11; Stop 35
tagttattgaacaaacaagccgtgg

SEQ ID NO: 306354 - DNA, 25 bp, Artificial
  probe
  misc_feature (1)..(25): SEQ ID NO: 1824; WAN024DFK; Start 335; Stop 359
tgcttccaaatgctgaatacatgat

SEQ ID NO: 306355 - DNA, 25 bp, Artificial
  probe
  misc_feature (1)..(25): SEQ ID NO: 1824; WAN024DFK; Start 334; Stop 358
atgcttccaaatgctgaatacatga

SEQ ID NO: 306356 - DNA, 25 bp, Artificial
  probe
  misc_feature (1)..(25): SEQ ID NO: 1824; WAN024DFK; Start 570; Stop 594
ggccaacaattcattgaactaacta

SEQ ID NO: 306357 - DNA, 25 bp, Artificial
  probe
  misc_feature (1)..(25): SEQ ID NO: 1824; WAN024DFK; Start 243; Stop 267
tatcaaggcagatgtccaaaccatt

SEQ ID NO: 306358 - DNA, 25 bp, Artificial
  probe
  misc_feature (1)..(25): SEQ ID NO: 1824; WAN024DFK; Start 242; Stop 266
ttatcaaggcagatgtccaaaccat

SEQ ID NO: 306359 - DNA, 25 bp, Artificial
  probe
  misc_feature (1)..(25): SEQ ID NO: 1824; WAN024DFK; Start 173; Stop 197
tttacctttatgtcaatacaccagg

SEQ ID NO: 306360 - DNA, 25 bp, Artificial
  probe
  misc_feature (1)..(25): SEQ ID NO: 1824; WAN024DFK; Start 332; Stop 356
tcatgcttccaaatgctgaatacat

SEQ ID NO: 306361 - DNA, 25 bp, Artificial
  probe
  misc_feature (1)..(25): SEQ ID NO: 1824; WAN024DFK; Start 233; Stop 257
ccatgaactttatcaaggcagatgt

SEQ ID NO: 306362 - DNA, 25 bp, Artificial
  probe
  misc_feature (1)..(25): SEQ ID NO: 1825; WAN024G9R; Start 149; Stop 173
tgtatatctggatgaagcaagtcaa

SEQ ID NO: 306363 - DNA, 25 bp, Artificial
  probe
  misc_feature (1)..(25): SEQ ID NO: 1825; WAN024G9R; Start 148; Stop 172
ttgtatatctggatgaagcaagtca

SEQ ID NO: 306364 - DNA, 25 bp, Artificial
  probe
  misc_feature (1)..(25): SEQ ID NO: 1825; WAN024G9R; Start 230; Stop 254
ctattccacttgtcatcggcttaac

SEQ ID NO: 306365 - DNA, 25 bp, Artificial
  probe
  misc_feature (1)..(25): SEQ ID NO: 1825; WAN024G9R; Start 147; Stop 171
attgtatatctggatgaagcaagtc

SEQ ID NO: 306366 - DNA, 25 bp, Artificial
  probe
  misc_feature (1)..(25): SEQ ID NO: 1825; WAN024G9R; Start 482; Stop 506
atatggaagtcatggaggctatcta

SEQ ID NO: 306367 - DNA, 25 bp, Artificial
  probe
  misc_feature (1)..(25): SEQ ID NO: 1825; WAN024G9R; Start 481; Stop 505
tatatggaagtcatggaggctatct

SEQ ID NO: 306368 - DNA, 25 bp, Artificial
  probe
  misc_feature (1)..(25): SEQ ID NO: 1825; WAN024G9R; Start 480; Stop 504
ctatatggaagtcatggaggctatc

SEQ ID NO: 306369 - DNA, 25 bp, Artificial
  probe
  misc_feature (1)..(25): SEQ ID NO: 1825; WAN024G9R; Start 231; Stop 255
tattccacttgtcatcggcttaact

SEQ ID NO: 306370 - DNA, 25 bp, Artificial
  probe
  misc_feature (1)..(25): SEQ ID NO: 1825; WAN024G9R; Start 606; Stop 630
cattatccactgtatcgcagattct

SEQ ID NO: 306371 - DNA, 25 bp, Artificial
  probe
  misc_feature (1)..(25): SEQ ID NO: 1825; WAN024G9R; Start 483; Stop 507
tatggaagtcatggaggctatctac

SEQ ID NO: 306372 - DNA, 25 bp, Artificial
  probe
  misc_feature (1)..(25): SEQ ID NO: 1825; WAN024G9R; Start 146; Stop 170
aattgtatatctggatgaagcaagt

SEQ ID NO: 306373 - DNA, 25 bp, Artificial
  probe
  misc_feature (1)..(25): SEQ ID NO: 1825; WAN024G9R; Start 479; Stop 503
actatatggaagtcatggaggctat

SEQ ID NO: 306374 - DNA, 25 bp, Artificial
  probe
  misc_feature (1)..(25): SEQ ID NO: 1825; WAN024G9R; Start 625; Stop 649
gattctggtgtctatggattgctga

SEQ ID NO: 306375 - DNA, 25 bp, Artificial
  probe
  misc_feature (1)..(25): SEQ ID NO: 1825; WAN024G9R; Start 478; Stop 502
aactatatggaagtcatggaggcta

SEQ ID NO: 306376 - DNA, 25 bp, Artificial
  probe
  misc_feature (1)..(25): SEQ ID NO: 1825; WAN024G9R; Start 624; Stop 648
agattctggtgtctatggattgctg

SEQ ID NO: 306377 - DNA, 25 bp, Artificial
  probe
  misc_feature (1)..(25): SEQ ID NO: 1825; WAN024G9R; Start 607; Stop 631
attatccactgtatcgcagattctg

SEQ ID NO: 306378 - DNA, 25 bp, Artificial
  probe
  misc_feature (1)..(25): SEQ ID NO: 1825; WAN024G9R; Start 232; Stop 256
attccacttgtcatcggcttaactt

SEQ ID NO: 306379 - DNA, 25 bp, Artificial
  probe
  misc_feature (1)..(25): SEQ ID NO: 1825; WAN024G9R; Start 79; Stop 103
atcaacatgcactattcctatctgg

SEQ ID NO: 306380 - DNA, 25 bp, Artificial
  probe
  misc_feature (1)..(25): SEQ ID NO: 1825; WAN024G9R; Start 605; Stop 629
gcattatccactgtatcgcagattc

SEQ ID NO: 306381 - DNA, 25 bp, Artificial
  probe
  misc_feature (1)..(25): SEQ ID NO: 1825; WAN024G9R; Start 34; Stop 58
gaactgactatttacctccatctgt

SEQ ID NO: 306382 - DNA, 25 bp, Artificial
  probe
  misc_feature (1)..(25): SEQ ID NO: 1825; WAN024G9R; Start 33; Stop 57
tgaactgactatttacctccatctg

SEQ ID NO: 306383 - DNA, 25 bp, Artificial
  probe
  misc_feature (1)..(25): SEQ ID NO: 1825; WAN024G9R; Start 77; Stop 101
acatcaacatgcactattcctatct

SEQ ID NO: 306384 - DNA, 25 bp, Artificial
  probe
  misc_feature (1)..(25): SEQ ID NO: 1825; WAN024G9R; Start 78; Stop 102
catcaacatgcactattcctatctg

SEQ ID NO: 306385 - DNA, 25 bp, Artificial
  probe
  misc_feature (1)..(25): SEQ ID NO: 1825; WAN024G9R; Start 32; Stop 56
ttgaactgactatttacctccatct

SEQ ID NO: 306386 - DNA, 25 bp, Artificial
  probe
  misc_feature (1)..(25): SEQ ID NO: 1825; WAN024G9R; Start 578; Stop 602
ccaatagtcaatttctgttccgatt

SEQ ID NO: 306387 - DNA, 25 bp, Artificial
  probe
  misc_feature (1)..(25): SEQ ID NO: 1825; WAN024G9R; Start 490; Stop 514
gtcatggaggctatctacgactatc

SEQ ID NO: 306388 - DNA, 25 bp, Artificial
  probe
  misc_feature (1)..(25): SEQ ID NO: 1825; WAN024G9R; Start 74; Stop 98
agtacatcaacatgcactattccta

SEQ ID NO: 306389 - DNA, 25 bp, Artificial
  probe
  misc_feature (1)..(25): SEQ ID NO: 1825; WAN024G9R; Start 709; Stop 733
gtcaatcactaccataaagaactca

SEQ ID NO: 306390 - DNA, 25 bp, Artificial
  probe
  misc_feature (1)..(25): SEQ ID NO: 1825; WAN024G9R; Start 70; Stop 94
aaccagtacatcaacatgcactatt

SEQ ID NO: 306391 - DNA, 25 bp, Artificial
  probe
  misc_feature (1)..(25): SEQ ID NO: 1825; WAN024G9R; Start 580; Stop 604
aatagtcaatttctgttccgattcg

SEQ ID NO: 306392 - DNA, 25 bp, Artificial
  probe
  misc_feature (1)..(25): SEQ ID NO: 1825; WAN024G9R; Start 229; Stop 253
gctattccacttgtcatcggcttaa

SEQ ID NO: 306393 - DNA, 25 bp, Artificial
  probe
  misc_feature (1)..(25): SEQ ID NO: 1825; WAN024G9R; Start 75; Stop 99
gtacatcaacatgcactattcctat

SEQ ID NO: 306394 - DNA, 25 bp, Artificial
  probe
  misc_feature (1)..(25): SEQ ID NO: 1825; WAN024G9R; Start 31; Stop 55
tttgaactgactatttacctccatc

SEQ ID NO: 306395 - DNA, 25 bp, Artificial
  probe
  misc_feature (1)..(25): SEQ ID NO: 1826; WAN024F2S; Start 121; Stop 145
aattctcacttgacgcttacctctc

SEQ ID NO: 306396 - DNA, 25 bp, Artificial
  probe
  misc_feature (1)..(25): SEQ ID NO: 1826; WAN024F2S; Start 75; Stop 99
tattatatttcagcaggttgttggc

SEQ ID NO: 306397 - DNA, 25 bp, Artificial
  probe
  misc_feature (1)..(25): SEQ ID NO: 1826; WAN024F2S; Start 183; Stop 207
gcccaaagacagatttcatatcaat

SEQ ID NO: 306398 - DNA, 25 bp, Artificial
  probe
  misc_feature (1)..(25): SEQ ID NO: 1826; WAN024F2S; Start 182; Stop 206
tgcccaaagacagatttcatatcaa

SEQ ID NO: 306399 - DNA, 25 bp, Artificial
  probe
  misc_feature (1)..(25): SEQ ID NO: 1826; WAN024F2S; Start 160; Stop 184
ataacccaaacaaacctttatctgc

SEQ ID NO: 306400 - DNA, 25 bp, Artificial
  probe
  misc_feature (1)..(25): SEQ ID NO: 1826; WAN024F2S; Start 120; Stop 144
caattctcacttgacgcttacctct

SEQ ID NO: 306401 - DNA, 25 bp, Artificial
  probe
  misc_feature (1)..(25): SEQ ID NO: 1826; WAN024F2S; Start 161; Stop 185
taacccaaacaaacctttatctgcc

SEQ ID NO: 306402 - DNA, 25 bp, Artificial
  probe
  misc_feature (1)..(25): SEQ ID NO: 1826; WAN024F2S; Start 151; Stop 175
acatctcttataacccaaacaaacc

SEQ ID NO: 306403 - DNA, 25 bp, Artificial
  probe
  misc_feature (1)..(25): SEQ ID NO: 1826; WAN024F2S; Start 152; Stop 176
catctcttataacccaaacaaacct

SEQ ID NO: 306404 - DNA, 25 bp, Artificial
  probe
  misc_feature (1)..(25): SEQ ID NO: 1826; WAN024F2S; Start 165; Stop 189
ccaaacaaacctttatctgcccaaa

SEQ ID NO: 306405 - DNA, 25 bp, Artificial
  probe
  misc_feature (1)..(25): SEQ ID NO: 1826; WAN024F2S; Start 181; Stop 205
ctgcccaaagacagatttcatatca

SEQ ID NO: 306406 - DNA, 25 bp, Artificial
  probe
  misc_feature (1)..(25): SEQ ID NO: 1826; WAN024F2S; Start 74; Stop 98
ttattatatttcagcaggttgttgg

SEQ ID NO: 306407 - DNA, 25 bp, Artificial
  probe
  misc_feature (1)..(25): SEQ ID NO: 1826; WAN024F2S; Start 122; Stop 146
attctcacttgacgcttacctctca

SEQ ID NO: 306408 - DNA, 25 bp, Artificial
  probe
  misc_feature (1)..(25): SEQ ID NO: 1826; WAN024F2S; Start 147; Stop 171
gatgacatctcttataacccaaaca

SEQ ID NO: 306409 - DNA, 25 bp, Artificial
  probe
  misc_feature (1)..(25): SEQ ID NO: 1826; WAN024F2S; Start 154; Stop 178
tctcttataacccaaacaaaccttt

SEQ ID NO: 306410 - DNA, 25 bp, Artificial
  probe
  misc_feature (1)..(25): SEQ ID NO: 1826; WAN024F2S; Start 149; Stop 173
tgacatctcttataacccaaacaaa

SEQ ID NO: 306411 - DNA, 25 bp, Artificial
  probe
  misc_feature (1)..(25): SEQ ID NO: 1826; WAN024F2S; Start 130; Stop 154
ttgacgcttacctctcagatgacat

SEQ ID NO: 306412 - DNA, 25 bp, Artificial
  probe
  misc_feature (1)..(25): SEQ ID NO: 1826; WAN024F2S; Start 153; Stop 177
atctcttataacccaaacaaacctt

SEQ ID NO: 306413 - DNA, 25 bp, Artificial
  probe
  misc_feature (1)..(25): SEQ ID NO: 1826; WAN024F2S; Start 150; Stop 174
gacatctcttataacccaaacaaac

SEQ ID NO: 306414 - DNA, 25 bp, Artificial
  probe
  misc_feature (1)..(25): SEQ ID NO: 1826; WAN024F2S; Start 148; Stop 172
atgacatctcttataacccaaacaa

SEQ ID NO: 306415 - DNA, 25 bp, Artificial
  probe
  misc_feature (1)..(25): SEQ ID NO: 1826; WAN024F2S; Start 136; Stop 160
cttacctctcagatgacatctctta

SEQ ID NO: 306416 - DNA, 25 bp, Artificial
  probe
  misc_feature (1)..(25): SEQ ID NO: 1826; WAN024F2S; Start 125; Stop 149
ctcacttgacgcttacctctcagat

SEQ ID NO: 306417 - DNA, 25 bp, Artificial
  probe
  misc_feature (1)..(25): SEQ ID NO: 1826; WAN024F2S; Start 159; Stop 183
tataacccaaacaaacctttatctg

SEQ ID NO: 306418 - DNA, 25 bp, Artificial
  probe
  misc_feature (1)..(25): SEQ ID NO: 1826; WAN024F2S; Start 135; Stop 159
gcttacctctcagatgacatctctt

SEQ ID NO: 306419 - DNA, 25 bp, Artificial
  probe
  misc_feature (1)..(25): SEQ ID NO: 1826; WAN024F2S; Start 71; Stop 95
ctcttattatatttcagcaggttgt

SEQ ID NO: 306420 - DNA, 25 bp, Artificial
  probe
  misc_feature (1)..(25): SEQ ID NO: 1826; WAN024F2S; Start 198; Stop 222
tcatatcaatcttacgtttagcgaa

SEQ ID NO: 306421 - DNA, 25 bp, Artificial
  probe
  misc_feature (1)..(25): SEQ ID NO: 1826; WAN024F2S; Start 197; Stop 221
ttcatatcaatcttacgtttagcga

SEQ ID NO: 306422 - DNA, 25 bp, Artificial
  probe
  misc_feature (1)..(25): SEQ ID NO: 1826; WAN024F2S; Start 139; Stop 163
acctctcagatgacatctcttataa

SEQ ID NO: 306423 - DNA, 25 bp, Artificial
  probe
  misc_feature (1)..(25): SEQ ID NO: 1826; WAN024F2S; Start 137; Stop 161
ttacctctcagatgacatctcttat

SEQ ID NO: 306424 - DNA, 25 bp, Artificial
  probe
  misc_feature (1)..(25): SEQ ID NO: 1826; WAN024F2S; Start 129; Stop 153
cttgacgcttacctctcagatgaca

SEQ ID NO: 306425 - DNA, 25 bp, Artificial
  probe
  misc_feature (1)..(25): SEQ ID NO: 1826; WAN024F2S; Start 128; Stop 152
acttgacgcttacctctcagatgac

SEQ ID NO: 306426 - DNA, 25 bp, Artificial
  probe
  misc_feature (1)..(25): SEQ ID NO: 1826; WAN024F2S; Start 127; Stop 151
cacttgacgcttacctctcagatga

SEQ ID NO: 306427 - DNA, 25 bp, Artificial
  probe
  misc_feature (1)..(25): SEQ ID NO: 1826; WAN024F2S; Start 126; Stop 150
tcacttgacgcttacctctcagatg

SEQ ID NO: 306428 - DNA, 25 bp, Artificial
  probe
  misc_feature (1)..(25): SEQ ID NO: 1827; WAN024GCC; Start 499; Stop 523
gtaactagcagtcgtcagattaact

SEQ ID NO: 306429 - DNA, 25 bp, Artificial
  probe
  misc_feature (1)..(25): SEQ ID NO: 1827; WAN024GCC; Start 500; Stop 524
taactagcagtcgtcagattaactt

SEQ ID NO: 306430 - DNA, 25 bp, Artificial
  probe
  misc_feature (1)..(25): SEQ ID NO: 1827; WAN024GCC; Start 501; Stop 525
aactagcagtcgtcagattaacttc

SEQ ID NO: 306431 - DNA, 25 bp, Artificial
  probe
  misc_feature (1)..(25): SEQ ID NO: 1827; WAN024GCC; Start 498; Stop 522
ggtaactagcagtcgtcagattaac

SEQ ID NO: 306432 - DNA, 25 bp, Artificial
  probe
  misc_feature (1)..(25): SEQ ID NO: 1827; WAN024GCC; Start 1042; Stop 1066
tatgactacgatcctgacatggtta

SEQ ID NO: 306433 - DNA, 25 bp, Artificial
  probe
  misc_feature (1)..(25): SEQ ID NO: 1827; WAN024GCC; Start 496; Stop 520
atggtaactagcagtcgtcagatta

SEQ ID NO: 306434 - DNA, 25 bp, Artificial
  probe
  misc_feature (1)..(25): SEQ ID NO: 1827; WAN024GCC; Start 502; Stop 526
actagcagtcgtcagattaacttct

SEQ ID NO: 306435 - DNA, 25 bp, Artificial
  probe
  misc_feature (1)..(25): SEQ ID NO: 1827; WAN024GCC; Start 497; Stop 521
tggtaactagcagtcgtcagattaa

SEQ ID NO: 306436 - DNA, 25 bp, Artificial
  probe
  misc_feature (1)..(25): SEQ ID NO: 1827; WAN024GCC; Start 4; Stop 28
attctctccttaacagtacatacct

SEQ ID NO: 306437 - DNA, 25 bp, Artificial
  probe
  misc_feature (1)..(25): SEQ ID NO: 1827; WAN024GCC; Start 401; Stop 425
tcaagacagactatattacgattgg

SEQ ID NO: 306438 - DNA, 25 bp, Artificial
  probe
  misc_feature (1)..(25): SEQ ID NO: 1827; WAN024GCC; Start 1041; Stop 1065
ttatgactacgatcctgacatggtt

SEQ ID NO: 306439 - DNA, 25 bp, Artificial
  probe
  misc_feature (1)..(25): SEQ ID NO: 1827; WAN024GCC; Start 3; Stop 27
gattctctccttaacagtacatacc

SEQ ID NO: 306440 - DNA, 25 bp, Artificial
  probe
  misc_feature (1)..(25): SEQ ID NO: 1827; WAN024GCC; Start 5; Stop 29
ttctctccttaacagtacataccta

SEQ ID NO: 306441 - DNA, 25 bp, Artificial
  probe
  misc_feature (1)..(25): SEQ ID NO: 1827; WAN024GCC; Start 6; Stop 30
tctctccttaacagtacatacctat

SEQ ID NO: 306442 - DNA, 25 bp, Artificial
  probe
  misc_feature (1)..(25): SEQ ID NO: 1827; WAN024GCC; Start 167; Stop 191
ctgctgaaagtattgaacaagttga

SEQ ID NO: 306443 - DNA, 25 bp, Artificial
  probe
  misc_feature (1)..(25): SEQ ID NO: 1827; WAN024GCC; Start 168; Stop 192
tgctgaaagtattgaacaagttgaa

SEQ ID NO: 306444 - DNA, 25 bp, Artificial
  probe
  misc_feature (1)..(25): SEQ ID NO: 1827; WAN024GCC; Start 2; Stop 26
tgattctctccttaacagtacatac

SEQ ID NO: 306445 - DNA, 25 bp, Artificial
  probe
  misc_feature (1)..(25): SEQ ID NO: 1827; WAN024GCC; Start 169; Stop 193
gctgaaagtattgaacaagttgaac

SEQ ID NO: 306446 - DNA, 25 bp, Artificial
  probe
  misc_feature (1)..(25): SEQ ID NO: 1827; WAN024GCC; Start 833; Stop 857
aattaacagaattggtggagcatgg

SEQ ID NO: 306447 - DNA, 25 bp, Artificial
  probe
  misc_feature (1)..(25): SEQ ID NO: 1827; WAN024GCC; Start 806; Stop 830
ccaacaatgaccttgatttgatgat

SEQ ID NO: 306448 - DNA, 25 bp, Artificial
  probe
  misc_feature (1)..(25): SEQ ID NO: 1827; WAN024GCC; Start 166; Stop 190
actgctgaaagtattgaacaagttg

SEQ ID NO: 306449 - DNA, 25 bp, Artificial
  probe
  misc_feature (1)..(25): SEQ ID NO: 1827; WAN024GCC; Start 164; Stop 188
caactgctgaaagtattgaacaagt

SEQ ID NO: 306450 - DNA, 25 bp, Artificial
  probe
  misc_feature (1)..(25): SEQ ID NO: 1827; WAN024GCC; Start 798; Stop 822
tatctttgccaacaatgaccttgat

SEQ ID NO: 306451 - DNA, 25 bp, Artificial
  probe
  misc_feature (1)..(25): SEQ ID NO: 1827; WAN024GCC; Start 797; Stop 821
atatctttgccaacaatgaccttga

SEQ ID NO: 306452 - DNA, 25 bp, Artificial
  probe
  misc_feature (1)..(25): SEQ ID NO: 1827; WAN024GCC; Start 796; Stop 820
catatctttgccaacaatgaccttg

SEQ ID NO: 306453 - DNA, 25 bp, Artificial
  probe
  misc_feature (1)..(25): SEQ ID NO: 1827; WAN024GCC; Start 402; Stop 426
caagacagactatattacgattggg

SEQ ID NO: 306454 - DNA, 25 bp, Artificial
  probe
  misc_feature (1)..(25): SEQ ID NO: 1827; WAN024GCC; Start 495; Stop 519
catggtaactagcagtcgtcagatt

SEQ ID NO: 306455 - DNA, 25 bp, Artificial
  probe
  misc_feature (1)..(25): SEQ ID NO: 1827; WAN024GCC; Start 7; Stop 31
ctctccttaacagtacatacctatt

SEQ ID NO: 306456 - DNA, 25 bp, Artificial
  probe
  misc_feature (1)..(25): SEQ ID NO: 1827; WAN024GCC; Start 829; Stop 853
atcaaattaacagaattggtggagc

SEQ ID NO: 306457 - DNA, 25 bp, Artificial
  probe
  misc_feature (1)..(25): SEQ ID NO: 1827; WAN024GCC; Start 831; Stop 855
caaattaacagaattggtggagcat

SEQ ID NO: 306458 - DNA, 25 bp, Artificial
  probe
  misc_feature (1)..(25): SEQ ID NO: 1827; WAN024GCC; Start 170; Stop 194
ctgaaagtattgaacaagttgaaca

SEQ ID NO: 306459 - DNA, 25 bp, Artificial
  probe
  misc_feature (1)..(25): SEQ ID NO: 1827; WAN024GCC; Start 750; Stop 774
tgatccagagagccactattccatt

SEQ ID NO: 306460 - DNA, 25 bp, Artificial
  probe
  misc_feature (1)..(25): SEQ ID NO: 1827; WAN024GCC; Start 351; Stop 375
ccaagatatgatggaccgtatcaag

SEQ ID NO: 306461 - DNA, 25 bp, Artificial
  probe
  misc_feature (1)..(25): SEQ ID NO: 1828; WAN024D6F; Start 1; Stop 25
atgattctctccttggtgtctttaa

SEQ ID NO: 306462 - DNA, 25 bp, Artificial
  probe
  misc_feature (1)..(25): SEQ ID NO: 1828; WAN024D6F; Start 7; Stop 31
ctctccttggtgtctttaagtgata

SEQ ID NO: 306463 - DNA, 25 bp, Artificial
  probe
  misc_feature (1)..(25): SEQ ID NO: 1828; WAN024D6F; Start 3; Stop 27
gattctctccttggtgtctttaagt

SEQ ID NO: 306464 - DNA, 25 bp, Artificial
  probe
  misc_feature (1)..(25): SEQ ID NO: 1828; WAN024D6F; Start 2; Stop 26
tgattctctccttggtgtctttaag

SEQ ID NO: 306465 - DNA, 25 bp, Artificial
  probe
  misc_feature (1)..(25): SEQ ID NO: 1828; WAN024D6F; Start 4; Stop 28
attctctccttggtgtctttaagtg

SEQ ID NO: 306466 - DNA, 25 bp, Artificial
  probe
  misc_feature (1)..(25): SEQ ID NO: 1828; WAN024D6F; Start 11; Stop 35
ccttggtgtctttaagtgatattcc

SEQ ID NO: 306467 - DNA, 25 bp, Artificial
  probe
  misc_feature (1)..(25): SEQ ID NO: 1828; WAN024D6F; Start 8; Stop 32
tctccttggtgtctttaagtgatat

SEQ ID NO: 306468 - DNA, 25 bp, Artificial
  probe
  misc_feature (1)..(25): SEQ ID NO: 1828; WAN024D6F; Start 6; Stop 30
tctctccttggtgtctttaagtgat

SEQ ID NO: 306469 - DNA, 25 bp, Artificial
  probe
  misc_feature (1)..(25): SEQ ID NO: 1828; WAN024D6F; Start 5; Stop 29
ttctctccttggtgtctttaagtga

SEQ ID NO: 306470 - DNA, 25 bp, Artificial
  probe
  misc_feature (1)..(25): SEQ ID NO: 1828; WAN024D6F; Start 10; Stop 34
tccttggtgtctttaagtgatattc

SEQ ID NO: 306471 - DNA, 25 bp, Artificial
  probe
  misc_feature (1)..(25): SEQ ID NO: 1828; WAN024D6F; Start 9; Stop 33
ctccttggtgtctttaagtgatatt

SEQ ID NO: 306472 - DNA, 25 bp, Artificial
  probe
  misc_feature (1)..(25): SEQ ID NO: 1828; WAN024D6F; Start 119; Stop 143
cccaagcatatcaagaaccgatttc

SEQ ID NO: 306473 - DNA, 25 bp, Artificial
  probe
  misc_feature (1)..(25): SEQ ID NO: 1828; WAN024D6F; Start 13; Stop 37
ttggtgtctttaagtgatattccac

SEQ ID NO: 306474 - DNA, 25 bp, Artificial
  probe
  misc_feature (1)..(25): SEQ ID NO: 1828; WAN024D6F; Start 12; Stop 36
cttggtgtctttaagtgatattcca

SEQ ID NO: 306475 - DNA, 25 bp, Artificial
  probe
  misc_feature (1)..(25): SEQ ID NO: 1828; WAN024D6F; Start 120; Stop 144
ccaagcatatcaagaaccgatttct

SEQ ID NO: 306476 - DNA, 25 bp, Artificial
  probe
  misc_feature (1)..(25): SEQ ID NO: 1828; WAN024D6F; Start 71; Stop 95
atctcatcccttcctatcgcatctg

SEQ ID NO: 306477 - DNA, 25 bp, Artificial
  probe
  misc_feature (1)..(25): SEQ ID NO: 1828; WAN024D6F; Start 70; Stop 94
catctcatcccttcctatcgcatct

SEQ ID NO: 306478 - DNA, 25 bp, Artificial
  probe
  misc_feature (1)..(25): SEQ ID NO: 1828; WAN024D6F; Start 69; Stop 93
acatctcatcccttcctatcgcatc

SEQ ID NO: 306479 - DNA, 25 bp, Artificial
  probe
  misc_feature (1)..(25): SEQ ID NO: 1828; WAN024D6F; Start 68; Stop 92
gacatctcatcccttcctatcgcat

SEQ ID NO: 306480 - DNA, 25 bp, Artificial
  probe
  misc_feature (1)..(25): SEQ ID NO: 1828; WAN024D6F; Start 43; Stop 67
cttcagggaactctcctcatcctag

SEQ ID NO: 306481 - DNA, 25 bp, Artificial
  probe
  misc_feature (1)..(25): SEQ ID NO: 1828; WAN024D6F; Start 26; Stop 50
gtgatattccacttttccttcaggg

SEQ ID NO: 306482 - DNA, 25 bp, Artificial
  probe
  misc_feature (1)..(25): SEQ ID NO: 1828; WAN024D6F; Start 27; Stop 51
tgatattccacttttccttcaggga

SEQ ID NO: 306483 - DNA, 25 bp, Artificial
  probe
  misc_feature (1)..(25): SEQ ID NO: 1828; WAN024D6F; Start 14; Stop 38
tggtgtctttaagtgatattccact

SEQ ID NO: 306484 - DNA, 25 bp, Artificial
  probe
  misc_feature (1)..(25): SEQ ID NO: 1828; WAN024D6F; Start 118; Stop 142
ccccaagcatatcaagaaccgattt

SEQ ID NO: 306485 - DNA, 25 bp, Artificial
  probe
  misc_feature (1)..(25): SEQ ID NO: 1828; WAN024D6F; Start 42; Stop 66
ccttcagggaactctcctcatccta

SEQ ID NO: 306486 - DNA, 25 bp, Artificial
  probe
  misc_feature (1)..(25): SEQ ID NO: 1828; WAN024D6F; Start 121; Stop 145
caagcatatcaagaaccgatttctt

SEQ ID NO: 306487 - DNA, 25 bp, Artificial
  probe
  misc_feature (1)..(25): SEQ ID NO: 1828; WAN024D6F; Start 122; Stop 146
aagcatatcaagaaccgatttcttt

SEQ ID NO: 306488 - DNA, 25 bp, Artificial
  probe
  misc_feature (1)..(25): SEQ ID NO: 1828; WAN024D6F; Start 93; Stop 117
ctgccaaagcctgaaaagagacttc

SEQ ID NO: 306489 - DNA, 25 bp, Artificial
  probe
  misc_feature (1)..(25): SEQ ID NO: 1828; WAN024D6F; Start 90; Stop 114
catctgccaaagcctgaaaagagac

SEQ ID NO: 306490 - DNA, 25 bp, Artificial
  probe
  misc_feature (1)..(25): SEQ ID NO: 1828; WAN024D6F; Start 28; Stop 52
gatattccacttttccttcagggaa

SEQ ID NO: 306491 - DNA, 25 bp, Artificial
  probe
  misc_feature (1)..(25): SEQ ID NO: 1828; WAN024D6F; Start 29; Stop 53
atattccacttttccttcagggaac

SEQ ID NO: 306492 - DNA, 25 bp, Artificial
  probe
  misc_feature (1)..(25): SEQ ID NO: 1828; WAN024D6F; Start 91; Stop 115
atctgccaaagcctgaaaagagact

SEQ ID NO: 306493 - DNA, 25 bp, Artificial
  probe
  misc_feature (1)..(25): SEQ ID NO: 1828; WAN024D6F; Start 39; Stop 63
tttccttcagggaactctcctcatc

SEQ ID NO: 306494 - DNA, 25 bp, Artificial
  probe
  misc_feature (1)..(25): SEQ ID NO: 1829; WAN024F2P; Start 701; Stop 725
atgcgacaaccaagagtattcatct

SEQ ID NO: 306495 - DNA, 25 bp, Artificial
  probe
  misc_feature (1)..(25): SEQ ID NO: 1829; WAN024F2P; Start 619; Stop 643
actaatgctgggaaatcaactatca

SEQ ID NO: 306496 - DNA, 25 bp, Artificial
  probe
  misc_feature (1)..(25): SEQ ID NO: 1829; WAN024F2P; Start 221; Stop 245
aagaaatcactactgtcatcgtcaa

SEQ ID NO: 306497 - DNA, 25 bp, Artificial
  probe
  misc_feature (1)..(25): SEQ ID NO: 1829; WAN024F2P; Start 612; Stop 636
tggttatactaatgctgggaaatca

SEQ ID NO: 306498 - DNA, 25 bp, Artificial
  probe
  misc_feature (1)..(25): SEQ ID NO: 1829; WAN024F2P; Start 608; Stop 632
tgattggttatactaatgctgggaa

SEQ ID NO: 306499 - DNA, 25 bp, Artificial
  probe
  misc_feature (1)..(25): SEQ ID NO: 1829; WAN024F2P; Start 607; Stop 631
ttgattggttatactaatgctggga

SEQ ID NO: 306500 - DNA, 25 bp, Artificial
  probe
  misc_feature (1)..(25): SEQ ID NO: 1829; WAN024F2P; Start 219; Stop 243
agaagaaatcactactgtcatcgtc

SEQ ID NO: 306501 - DNA, 25 bp, Artificial
  probe
  misc_feature (1)..(25): SEQ ID NO: 1829; WAN024F2P; Start 220; Stop 244
gaagaaatcactactgtcatcgtca

SEQ ID NO: 306502 - DNA, 25 bp, Artificial
  probe
  misc_feature (1)..(25): SEQ ID NO: 1829; WAN024F2P; Start 927; Stop 951
agatattcctcacttgacgctttat

SEQ ID NO: 306503 - DNA, 25 bp, Artificial
  probe
  misc_feature (1)..(25): SEQ ID NO: 1829; WAN024F2P; Start 949; Stop 973
tataataaagcggatttggtggagg

SEQ ID NO: 306504 - DNA, 25 bp, Artificial
  probe
  misc_feature (1)..(25): SEQ ID NO: 1829; WAN024F2P; Start 606; Stop 630
tttgattggttatactaatgctggg

SEQ ID NO: 306505 - DNA, 25 bp, Artificial
  probe
  misc_feature (1)..(25): SEQ ID NO: 1829; WAN024F2P; Start 222; Stop 246
agaaatcactactgtcatcgtcaac

SEQ ID NO: 306506 - DNA, 25 bp, Artificial
  probe
  misc_feature (1)..(25): SEQ ID NO: 1829; WAN024F2P; Start 926; Stop 950
aagatattcctcacttgacgcttta

SEQ ID NO: 306507 - DNA, 25 bp, Artificial
  probe
  misc_feature (1)..(25): SEQ ID NO: 1829; WAN024F2P; Start 613; Stop 637
ggttatactaatgctgggaaatcaa

SEQ ID NO: 306508 - DNA, 25 bp, Artificial
  probe
  misc_feature (1)..(25): SEQ ID NO: 1829; WAN024F2P; Start 611; Stop 635
ttggttatactaatgctgggaaatc

SEQ ID NO: 306509 - DNA, 25 bp, Artificial
  probe
  misc_feature (1)..(25): SEQ ID NO: 1829; WAN024F2P; Start 609; Stop 633
gattggttatactaatgctgggaaa

SEQ ID NO: 306510 - DNA, 25 bp, Artificial
  probe
  misc_feature (1)..(25): SEQ ID NO: 1829; WAN024F2P; Start 996; Stop 1020
atataccctcatttctgccaagtct

SEQ ID NO: 306511 - DNA, 25 bp, Artificial
  probe
  misc_feature (1)..(25): SEQ ID NO: 1829; WAN024F2P; Start 995; Stop 1019
catataccctcatttctgccaagtc

SEQ ID NO: 306512 - DNA, 25 bp, Artificial
  probe
  misc_feature (1)..(25): SEQ ID NO: 1829; WAN024F2P; Start 746; Stop 770
ctttgacagataccgttggctttat

SEQ ID NO: 306513 - DNA, 25 bp, Artificial
  probe
  misc_feature (1)..(25): SEQ ID NO: 1829; WAN024F2P; Start 620; Stop 644
ctaatgctgggaaatcaactatcat

SEQ ID NO: 306514 - DNA, 25 bp, Artificial
  probe
  misc_feature (1)..(25): SEQ ID NO: 1829; WAN024F2P; Start 603; Stop 627
tggtttgattggttatactaatgct

SEQ ID NO: 306515 - DNA, 25 bp, Artificial
  probe
  misc_feature (1)..(25): SEQ ID NO: 1829; WAN024F2P; Start 925; Stop 949
gaagatattcctcacttgacgcttt

SEQ ID NO: 306516 - DNA, 25 bp, Artificial
  probe
  misc_feature (1)..(25): SEQ ID NO: 1829; WAN024F2P; Start 660; Stop 684
taagacccagtatgaagcagatgag

SEQ ID NO: 306517 - DNA, 25 bp, Artificial
  probe
  misc_feature (1)..(25): SEQ ID NO: 1829; WAN024F2P; Start 618; Stop 642
tactaatgctgggaaatcaactatc

SEQ ID NO: 306518 - DNA, 25 bp, Artificial
  probe
  misc_feature (1)..(25): SEQ ID NO: 1829; WAN024F2P; Start 928; Stop 952
gatattcctcacttgacgctttata

SEQ ID NO: 306519 - DNA, 25 bp, Artificial
  probe
  misc_feature (1)..(25): SEQ ID NO: 1829; WAN024F2P; Start 699; Stop 723
ggatgcgacaaccaagagtattcat

SEQ ID NO: 306520 - DNA, 25 bp, Artificial
  probe
  misc_feature (1)..(25): SEQ ID NO: 1829; WAN024F2P; Start 652; Stop 676
ttgaccagtaagacccagtatgaag

SEQ ID NO: 306521 - DNA, 25 bp, Artificial
  probe
  misc_feature (1)..(25): SEQ ID NO: 1829; WAN024F2P; Start 605; Stop 629
gtttgattggttatactaatgctgg

SEQ ID NO: 306522 - DNA, 25 bp, Artificial
  probe
  misc_feature (1)..(25): SEQ ID NO: 1829; WAN024F2P; Start 604; Stop 628
ggtttgattggttatactaatgctg

SEQ ID NO: 306523 - DNA, 25 bp, Artificial
  probe
  misc_feature (1)..(25): SEQ ID NO: 1829; WAN024F2P; Start 1149; Stop 1173
ggaagaacgtgattatcaggaagac

SEQ ID NO: 306524 - DNA, 25 bp, Artificial
  probe
  misc_feature (1)..(25): SEQ ID NO: 1829; WAN024F2P; Start 702; Stop 726
tgcgacaaccaagagtattcatctg

SEQ ID NO: 306525 - DNA, 25 bp, Artificial
  probe
  misc_feature (1)..(25): SEQ ID NO: 1829; WAN024F2P; Start 659; Stop 683
gtaagacccagtatgaagcagatga

SEQ ID NO: 306526 - DNA, 25 bp, Artificial
  probe
  misc_feature (1)..(25): SEQ ID NO: 1829; WAN024F2P; Start 658; Stop 682
agtaagacccagtatgaagcagatg

SEQ ID NO: 306527 - DNA, 25 bp, Artificial
  probe
  misc_feature (1)..(25): SEQ ID NO: 1830; WAN024FL3; Start 462; Stop 486
ttcttcaatggaggtatatggtagc

SEQ ID NO: 306528 - DNA, 25 bp, Artificial
  probe
  misc_feature (1)..(25): SEQ ID NO: 1830; WAN024FL3; Start 851; Stop 875
aagagagtcatacaacaatagcaga

SEQ ID NO: 306529 - DNA, 25 bp, Artificial
  probe
  misc_feature (1)..(25): SEQ ID NO: 1830; WAN024FL3; Start 852; Stop 876
agagagtcatacaacaatagcagat

SEQ ID NO: 306530 - DNA, 25 bp, Artificial
  probe
  misc_feature (1)..(25): SEQ ID NO: 1830; WAN024FL3; Start 850; Stop 874
gaagagagtcatacaacaatagcag

SEQ ID NO: 306531 - DNA, 25 bp, Artificial
  probe
  misc_feature (1)..(25): SEQ ID NO: 1830; WAN024FL3; Start 1020; Stop 1044
ggtctctcttgtagatgcttatgat

SEQ ID NO: 306532 - DNA, 25 bp, Artificial
  probe
  misc_feature (1)..(25): SEQ ID NO: 1830; WAN024FL3; Start 885; Stop 909
aatggtaacttcgcaattctctcaa

SEQ ID NO: 306533 - DNA, 25 bp, Artificial
  probe
  misc_feature (1)..(25): SEQ ID NO: 1830; WAN024FL3; Start 148; Stop 172
gcttgtatcaatagagtccatcagt

SEQ ID NO: 306534 - DNA, 25 bp, Artificial
  probe
  misc_feature (1)..(25): SEQ ID NO: 1830; WAN024FL3; Start 316; Stop 340
attgactatatcattcacggagcaa

SEQ ID NO: 306535 - DNA, 25 bp, Artificial
  probe
  misc_feature (1)..(25): SEQ ID NO: 1830; WAN024FL3; Start 849; Stop 873
tgaagagagtcatacaacaatagca

SEQ ID NO: 306536 - DNA, 25 bp, Artificial
  probe
  misc_feature (1)..(25): SEQ ID NO: 1830; WAN024FL3; Start 147; Stop 171
ggcttgtatcaatagagtccatcag

SEQ ID NO: 306537 - DNA, 25 bp, Artificial
  probe
  misc_feature (1)..(25): SEQ ID NO: 1830; WAN024FL3; Start 315; Stop 339
tattgactatatcattcacggagca

SEQ ID NO: 306538 - DNA, 25 bp, Artificial
  probe
  misc_feature (1)..(25): SEQ ID NO: 1830; WAN024FL3; Start 317; Stop 341
ttgactatatcattcacggagcaag

SEQ ID NO: 306539 - DNA, 25 bp, Artificial
  probe
  misc_feature (1)..(25): SEQ ID NO: 1830; WAN024FL3; Start 1022; Stop 1046
tctctcttgtagatgcttatgatcg

SEQ ID NO: 306540 - DNA, 25 bp, Artificial
  probe
  misc_feature (1)..(25): SEQ ID NO: 1830; WAN024FL3; Start 853; Stop 877
gagagtcatacaacaatagcagata

SEQ ID NO: 306541 - DNA, 25 bp, Artificial
  probe
  misc_feature (1)..(25): SEQ ID NO: 1830; WAN024FL3; Start 314; Stop 338
ttattgactatatcattcacggagc

SEQ ID NO: 306542 - DNA, 25 bp, Artificial
  probe
  misc_feature (1)..(25): SEQ ID NO: 1830; WAN024FL3; Start 150; Stop 174
ttgtatcaatagagtccatcagttg

SEQ ID NO: 306543 - DNA, 25 bp, Artificial
  probe
  misc_feature (1)..(25): SEQ ID NO: 1830; WAN024FL3; Start 858; Stop 882
tcatacaacaatagcagatatggca

SEQ ID NO: 306544 - DNA, 25 bp, Artificial
  probe
  misc_feature (1)..(25): SEQ ID NO: 1830; WAN024FL3; Start 857; Stop 881
gtcatacaacaatagcagatatggc

SEQ ID NO: 306545 - DNA, 25 bp, Artificial
  probe
  misc_feature (1)..(25): SEQ ID NO: 1830; WAN024FL3; Start 859; Stop 883
catacaacaatagcagatatggcaa

SEQ ID NO: 306546 - DNA, 25 bp, Artificial
  probe
  misc_feature (1)..(25): SEQ ID NO: 1830; WAN024FL3; Start 149; Stop 173
cttgtatcaatagagtccatcagtt

SEQ ID NO: 306547 - DNA, 25 bp, Artificial
  probe
  misc_feature (1)..(25): SEQ ID NO: 1830; WAN024FL3; Start 1021; Stop 1045
gtctctcttgtagatgcttatgatc

SEQ ID NO: 306548 - DNA, 25 bp, Artificial
  probe
  misc_feature (1)..(25): SEQ ID NO: 1830; WAN024FL3; Start 464; Stop 488
cttcaatggaggtatatggtagctt

SEQ ID NO: 306549 - DNA, 25 bp, Artificial
  probe
  misc_feature (1)..(25): SEQ ID NO: 1830; WAN024FL3; Start 463; Stop 487
tcttcaatggaggtatatggtagct

SEQ ID NO: 306550 - DNA, 25 bp, Artificial
  probe
  misc_feature (1)..(25): SEQ ID NO: 1830; WAN024FL3; Start 373; Stop 397
ccagtagatacaattcgagtagctt

SEQ ID NO: 306551 - DNA, 25 bp, Artificial
  probe
  misc_feature (1)..(25): SEQ ID NO: 1830; WAN024FL3; Start 371; Stop 395
ttccagtagatacaattcgagtagc

SEQ ID NO: 306552 - DNA, 25 bp, Artificial
  probe
  misc_feature (1)..(25): SEQ ID NO: 1830; WAN024FL3; Start 1032; Stop 1056
agatgcttatgatcgaatgatgaga

SEQ ID NO: 306553 - DNA, 25 bp, Artificial
  probe
  misc_feature (1)..(25): SEQ ID NO: 1830; WAN024FL3; Start 372; Stop 396
tccagtagatacaattcgagtagct

SEQ ID NO: 306554 - DNA, 25 bp, Artificial
  probe
  misc_feature (1)..(25): SEQ ID NO: 1830; WAN024FL3; Start 854; Stop 878
agagtcatacaacaatagcagatat

SEQ ID NO: 306555 - DNA, 25 bp, Artificial
  probe
  misc_feature (1)..(25): SEQ ID NO: 1830; WAN024FL3; Start 1035; Stop 1059
tgcttatgatcgaatgatgagaagt

SEQ ID NO: 306556 - DNA, 25 bp, Artificial
  probe
  misc_feature (1)..(25): SEQ ID NO: 1830; WAN024FL3; Start 145; Stop 169
ttggcttgtatcaatagagtccatc

SEQ ID NO: 306557 - DNA, 25 bp, Artificial
  probe
  misc_feature (1)..(25): SEQ ID NO: 1830; WAN024FL3; Start 856; Stop 880
agtcatacaacaatagcagatatgg

SEQ ID NO: 306558 - DNA, 25 bp, Artificial
  probe
  misc_feature (1)..(25): SEQ ID NO: 1830; WAN024FL3; Start 1033; Stop 1057
gatgcttatgatcgaatgatgagaa

SEQ ID NO: 306559 - DNA, 25 bp, Artificial
  probe
  misc_feature (1)..(25): SEQ ID NO: 1830; WAN024FL3; Start 1023; Stop 1047
ctctcttgtagatgcttatgatcga

SEQ ID NO: 306560 - DNA, 25 bp, Artificial
  probe
  misc_feature (1)..(25): SEQ ID NO: 1831; WAN024CIH; Start 39; Stop 63
tcttgctttgattgtattggtaact

SEQ ID NO: 306561 - DNA, 25 bp, Artificial
  probe
  misc_feature (1)..(25): SEQ ID NO: 1831; WAN024CIH; Start 38; Stop 62
ctcttgctttgattgtattggtaac

SEQ ID NO: 306562 - DNA, 25 bp, Artificial
  probe
  misc_feature (1)..(25): SEQ ID NO: 1831; WAN024CIH; Start 37; Stop 61
tctcttgctttgattgtattggtaa

SEQ ID NO: 306563 - DNA, 25 bp, Artificial
  probe
  misc_feature (1)..(25): SEQ ID NO: 1831; WAN024CIH; Start 36; Stop 60
atctcttgctttgattgtattggta

SEQ ID NO: 306564 - DNA, 25 bp, Artificial
  probe
  misc_feature (1)..(25): SEQ ID NO: 1831; WAN024CIH; Start 35; Stop 59
tatctcttgctttgattgtattggt

SEQ ID NO: 306565 - DNA, 25 bp, Artificial
  probe
  misc_feature (1)..(25): SEQ ID NO: 1831; WAN024CIH; Start 161; Stop 185
ctttattggtgagtttggctttatt

SEQ ID NO: 306566 - DNA, 25 bp, Artificial
  probe
  misc_feature (1)..(25): SEQ ID NO: 1831; WAN024CIH; Start 160; Stop 184
actttattggtgagtttggctttat

SEQ ID NO: 306567 - DNA, 25 bp, Artificial
  probe
  misc_feature (1)..(25): SEQ ID NO: 1831; WAN024CIH; Start 25; Stop 49
gctattatcctatctcttgctttga

SEQ ID NO: 306568 - DNA, 25 bp, Artificial
  probe
  misc_feature (1)..(25): SEQ ID NO: 1831; WAN024CIH; Start 34; Stop 58
ctatctcttgctttgattgtattgg

SEQ ID NO: 306569 - DNA, 25 bp, Artificial
  probe
  misc_feature (1)..(25): SEQ ID NO: 1831; WAN024CIH; Start 33; Stop 57
cctatctcttgctttgattgtattg

SEQ ID NO: 306570 - DNA, 25 bp, Artificial
  probe
  misc_feature (1)..(25): SEQ ID NO: 1831; WAN024CIH; Start 32; Stop 56
tcctatctcttgctttgattgtatt

SEQ ID NO: 306571 - DNA, 25 bp, Artificial
  probe
  misc_feature (1)..(25): SEQ ID NO: 1831; WAN024CIH; Start 29; Stop 53
ttatcctatctcttgctttgattgt

SEQ ID NO: 306572 - DNA, 25 bp, Artificial
  probe
  misc_feature (1)..(25): SEQ ID NO: 1831; WAN024CIH; Start 162; Stop 186
tttattggtgagtttggctttattt

SEQ ID NO: 306573 - DNA, 25 bp, Artificial
  probe
  misc_feature (1)..(25): SEQ ID NO: 1831; WAN024CIH; Start 159; Stop 183
cactttattggtgagtttggcttta

SEQ ID NO: 306574 - DNA, 25 bp, Artificial
  probe
  misc_feature (1)..(25): SEQ ID NO: 1831; WAN024CIH; Start 31; Stop 55
atcctatctcttgctttgattgtat

SEQ ID NO: 306575 - DNA, 25 bp, Artificial
  probe
  misc_feature (1)..(25): SEQ ID NO: 1831; WAN024CIH; Start 40; Stop 64
cttgctttgattgtattggtaacta

SEQ ID NO: 306576 - DNA, 25 bp, Artificial
  probe
  misc_feature (1)..(25): SEQ ID NO: 1831; WAN024CIH; Start 30; Stop 54
tatcctatctcttgctttgattgta

SEQ ID NO: 306577 - DNA, 25 bp, Artificial
  probe
  misc_feature (1)..(25): SEQ ID NO: 1831; WAN024CIH; Start 41; Stop 65
ttgctttgattgtattggtaactat

SEQ ID NO: 306578 - DNA, 25 bp, Artificial
  probe
  misc_feature (1)..(25): SEQ ID NO: 1831; WAN024CIH; Start 28; Stop 52
attatcctatctcttgctttgattg

SEQ ID NO: 306579 - DNA, 25 bp, Artificial
  probe
  misc_feature (1)..(25): SEQ ID NO: 1831; WAN024CIH; Start 144; Stop 168
cttggtcaaggtgctcactttattg

SEQ ID NO: 306580 - DNA, 25 bp, Artificial
  probe
  misc_feature (1)..(25): SEQ ID NO: 1831; WAN024CIH; Start 93; Stop 117
catggatgccactagtaatattggt

SEQ ID NO: 306581 - DNA, 25 bp, Artificial
  probe
  misc_feature (1)..(25): SEQ ID NO: 1831; WAN024CIH; Start 63; Stop 87
tatacaaccccgtcaaaatcaacta

SEQ ID NO: 306582 - DNA, 25 bp, Artificial
  probe
  misc_feature (1)..(25): SEQ ID NO: 1831; WAN024CIH; Start 59; Stop 83
taactatacaaccccgtcaaaatca

SEQ ID NO: 306583 - DNA, 25 bp, Artificial
  probe
  misc_feature (1)..(25): SEQ ID NO: 1831; WAN024CIH; Start 95; Stop 119
tggatgccactagtaatattggtaa

SEQ ID NO: 306584 - DNA, 25 bp, Artificial
  probe
  misc_feature (1)..(25): SEQ ID NO: 1831; WAN024CIH; Start 64; Stop 88
atacaaccccgtcaaaatcaactat

SEQ ID NO: 306585 - DNA, 25 bp, Artificial
  probe
  misc_feature (1)..(25): SEQ ID NO: 1831; WAN024CIH; Start 58; Stop 82
gtaactatacaaccccgtcaaaatc

SEQ ID NO: 306586 - DNA, 25 bp, Artificial
  probe
  misc_feature (1)..(25): SEQ ID NO: 1831; WAN024CIH; Start 94; Stop 118
atggatgccactagtaatattggta

SEQ ID NO: 306587 - DNA, 25 bp, Artificial
  probe
  misc_feature (1)..(25): SEQ ID NO: 1831; WAN024CIH; Start 65; Stop 89
tacaaccccgtcaaaatcaactatt

SEQ ID NO: 306588 - DNA, 25 bp, Artificial
  probe
  misc_feature (1)..(25): SEQ ID NO: 1831; WAN024CIH; Start 60; Stop 84
aactatacaaccccgtcaaaatcaa

SEQ ID NO: 306589 - DNA, 25 bp, Artificial
  probe
  misc_feature (1)..(25): SEQ ID NO: 1831; WAN024CIH; Start 62; Stop 86
ctatacaaccccgtcaaaatcaact

SEQ ID NO: 306590 - DNA, 25 bp, Artificial
  probe
  misc_feature (1)..(25): SEQ ID NO: 1831; WAN024CIH; Start 61; Stop 85
actatacaaccccgtcaaaatcaac

SEQ ID NO: 306591 - DNA, 25 bp, Artificial
  probe
  misc_feature (1)..(25): SEQ ID NO: 1831; WAN024CIH; Start 42; Stop 66
tgctttgattgtattggtaactata

SEQ ID NO: 306592 - DNA, 25 bp, Artificial
  probe
  misc_feature (1)..(25): SEQ ID NO: 1831; WAN024CIH; Start 145; Stop 169
ttggtcaaggtgctcactttattgg

SEQ ID NO: 306593 - DNA, 25 bp, Artificial
  probe
  misc_feature (1)..(25): SEQ ID NO: 1832; WAN024DGD; Start 368; Stop 392
acctctcttatttggatttgaagca

SEQ ID NO: 306594 - DNA, 25 bp, Artificial
  probe
  misc_feature (1)..(25): SEQ ID NO: 1832; WAN024DGD; Start 367; Stop 391
aacctctcttatttggatttgaagc

SEQ ID NO: 306595 - DNA, 25 bp, Artificial
  probe
  misc_feature (1)..(25): SEQ ID NO: 1832; WAN024DGD; Start 403; Stop 427
gagttatcaggaggagaagcacaac

SEQ ID NO: 306596 - DNA, 25 bp, Artificial
  probe
  misc_feature (1)..(25): SEQ ID NO: 1832; WAN024DGD; Start 372; Stop 396
ctcttatttggatttgaagcaacct

SEQ ID NO: 306597 - DNA, 25 bp, Artificial
  probe
  misc_feature (1)..(25): SEQ ID NO: 1832; WAN024DGD; Start 371; Stop 395
tctcttatttggatttgaagcaacc

SEQ ID NO: 306598 - DNA, 25 bp, Artificial
  probe
  misc_feature (1)..(25): SEQ ID NO: 1832; WAN024DGD; Start 288; Stop 312
tctcaatctgggtttagttggtaaa

SEQ ID NO: 306599 - DNA, 25 bp, Artificial
  probe
  misc_feature (1)..(25): SEQ ID NO: 1832; WAN024DGD; Start 287; Stop 311
atctcaatctgggtttagttggtaa

SEQ ID NO: 306600 - DNA, 25 bp, Artificial
  probe
  misc_feature (1)..(25): SEQ ID NO: 1832; WAN024DGD; Start 286; Stop 310
aatctcaatctgggtttagttggta

SEQ ID NO: 306601 - DNA, 25 bp, Artificial
  probe
  misc_feature (1)..(25): SEQ ID NO: 1832; WAN024DGD; Start 369; Stop 393
cctctcttatttggatttgaagcaa

SEQ ID NO: 306602 - DNA, 25 bp, Artificial
  probe
  misc_feature (1)..(25): SEQ ID NO: 1832; WAN024DGD; Start 284; Stop 308
agaatctcaatctgggtttagttgg

SEQ ID NO: 306603 - DNA, 25 bp, Artificial
  probe
  misc_feature (1)..(25): SEQ ID NO: 1832; WAN024DGD; Start 285; Stop 309
gaatctcaatctgggtttagttggt

SEQ ID NO: 306604 - DNA, 25 bp, Artificial
  probe
  misc_feature (1)..(25): SEQ ID NO: 1832; WAN024DGD; Start 398; Stop 422
tatttgagttatcaggaggagaagc

SEQ ID NO: 306605 - DNA, 25 bp, Artificial
  probe
  misc_feature (1)..(25): SEQ ID NO: 1832; WAN024DGD; Start 380; Stop 404
tggatttgaagcaacctatatttga

SEQ ID NO: 306606 - DNA, 25 bp, Artificial
  probe
  misc_feature (1)..(25): SEQ ID NO: 1832; WAN024DGD; Start 370; Stop 394
ctctcttatttggatttgaagcaac

SEQ ID NO: 306607 - DNA, 25 bp, Artificial
  probe
  misc_feature (1)..(25): SEQ ID NO: 1832; WAN024DGD; Start 85; Stop 109
atttatgccttaatcggtacaagtg

SEQ ID NO: 306608 - DNA, 25 bp, Artificial
  probe
  misc_feature (1)..(25): SEQ ID NO: 1832; WAN024DGD; Start 599; Stop 623
aagtggatcaggtcattcgagttac

SEQ ID NO: 306609 - DNA, 25 bp, Artificial
  probe
  misc_feature (1)..(25): SEQ ID NO: 1832; WAN024DGD; Start 598; Stop 622
caagtggatcaggtcattcgagtta

SEQ ID NO: 306610 - DNA, 25 bp, Artificial
  probe
  misc_feature (1)..(25): SEQ ID NO: 1832; WAN024DGD; Start 373; Stop 397
tcttatttggatttgaagcaaccta

SEQ ID NO: 306611 - DNA, 25 bp, Artificial
  probe
  misc_feature (1)..(25): SEQ ID NO: 1832; WAN024DGD; Start 402; Stop 426
tgagttatcaggaggagaagcacaa

SEQ ID NO: 306612 - DNA, 25 bp, Artificial
  probe
  misc_feature (1)..(25): SEQ ID NO: 1832; WAN024DGD; Start 401; Stop 425
ttgagttatcaggaggagaagcaca

SEQ ID NO: 306613 - DNA, 25 bp, Artificial
  probe
  misc_feature (1)..(25): SEQ ID NO: 1832; WAN024DGD; Start 399; Stop 423
atttgagttatcaggaggagaagca

SEQ ID NO: 306614 - DNA, 25 bp, Artificial
  probe
  misc_feature (1)..(25): SEQ ID NO: 1832; WAN024DGD; Start 86; Stop 110
tttatgccttaatcggtacaagtgg

SEQ ID NO: 306615 - DNA, 25 bp, Artificial
  probe
  misc_feature (1)..(25): SEQ ID NO: 1832; WAN024DGD; Start 381; Stop 405
ggatttgaagcaacctatatttgag

SEQ ID NO: 306616 - DNA, 25 bp, Artificial
  probe
  misc_feature (1)..(25): SEQ ID NO: 1832; WAN024DGD; Start 84; Stop 108
aatttatgccttaatcggtacaagt

SEQ ID NO: 306617 - DNA, 25 bp, Artificial
  probe
  misc_feature (1)..(25): SEQ ID NO: 1832; WAN024DGD; Start 379; Stop 403
ttggatttgaagcaacctatatttg

SEQ ID NO: 306618 - DNA, 25 bp, Artificial
  probe
  misc_feature (1)..(25): SEQ ID NO: 1832; WAN024DGD; Start 278; Stop 302
tcaaagagaatctcaatctgggttt

SEQ ID NO: 306619 - DNA, 25 bp, Artificial
  probe
  misc_feature (1)..(25): SEQ ID NO: 1832; WAN024DGD; Start 272; Stop 296
aaaccgtcaaagagaatctcaatct

SEQ ID NO: 306620 - DNA, 25 bp, Artificial
  probe
  misc_feature (1)..(25): SEQ ID NO: 1832; WAN024DGD; Start 271; Stop 295
caaaccgtcaaagagaatctcaatc

SEQ ID NO: 306621 - DNA, 25 bp, Artificial
  probe
  misc_feature (1)..(25): SEQ ID NO: 1832; WAN024DGD; Start 283; Stop 307
gagaatctcaatctgggtttagttg

SEQ ID NO: 306622 - DNA, 25 bp, Artificial
  probe
  misc_feature (1)..(25): SEQ ID NO: 1832; WAN024DGD; Start 282; Stop 306
agagaatctcaatctgggtttagtt

SEQ ID NO: 306623 - DNA, 25 bp, Artificial
  probe
  misc_feature (1)..(25): SEQ ID NO: 1832; WAN024DGD; Start 281; Stop 305
aagagaatctcaatctgggtttagt

SEQ ID NO: 306624 - DNA, 25 bp, Artificial
  probe
  misc_feature (1)..(25): SEQ ID NO: 1832; WAN024DGD; Start 277; Stop 301
gtcaaagagaatctcaatctgggtt

SEQ ID NO: 306625 - DNA, 25 bp, Artificial
  probe
  misc_feature (1)..(25): SEQ ID NO: 1832; WAN024DGD; Start 374; Stop 398
cttatttggatttgaagcaacctat

SEQ ID NO: 306626 - DNA, 25 bp, Artificial
  probe
  misc_feature (1)..(25): SEQ ID NO: 1833; WAN024DGC; Start 550; Stop 574
aataggctaatcattatcgcaacac

SEQ ID NO: 306627 - DNA, 25 bp, Artificial
  probe
  misc_feature (1)..(25): SEQ ID NO: 1833; WAN024DGC; Start 553; Stop 577
aggctaatcattatcgcaacacata

SEQ ID NO: 306628 - DNA, 25 bp, Artificial
  probe
  misc_feature (1)..(25): SEQ ID NO: 1833; WAN024DGC; Start 552; Stop 576
taggctaatcattatcgcaacacat

SEQ ID NO: 306629 - DNA, 25 bp, Artificial
  probe
  misc_feature (1)..(25): SEQ ID NO: 1833; WAN024DGC; Start 551; Stop 575
ataggctaatcattatcgcaacaca

SEQ ID NO: 306630 - DNA, 25 bp, Artificial
  probe
  misc_feature (1)..(25): SEQ ID NO: 1833; WAN024DGC; Start 554; Stop 578
ggctaatcattatcgcaacacataa

SEQ ID NO: 306631 - DNA, 25 bp, Artificial
  probe
  misc_feature (1)..(25): SEQ ID NO: 1833; WAN024DGC; Start 88; Stop 112
tatgccttaattggttcaagtggta

SEQ ID NO: 306632 - DNA, 25 bp, Artificial
  probe
  misc_feature (1)..(25): SEQ ID NO: 1833; WAN024DGC; Start 85; Stop 109
gtctatgccttaattggttcaagtg

SEQ ID NO: 306633 - DNA, 25 bp, Artificial
  probe
  misc_feature (1)..(25): SEQ ID NO: 1833; WAN024DGC; Start 84; Stop 108
agtctatgccttaattggttcaagt

SEQ ID NO: 306634 - DNA, 25 bp, Artificial
  probe
  misc_feature (1)..(25): SEQ ID NO: 1833; WAN024DGC; Start 83; Stop 107
aagtctatgccttaattggttcaag

SEQ ID NO: 306635 - DNA, 25 bp, Artificial
  probe
  misc_feature (1)..(25): SEQ ID NO: 1833; WAN024DGC; Start 86; Stop 110
tctatgccttaattggttcaagtgg

SEQ ID NO: 306636 - DNA, 25 bp, Artificial
  probe
  misc_feature (1)..(25): SEQ ID NO: 1833; WAN024DGC; Start 89; Stop 113
atgccttaattggttcaagtggtag

SEQ ID NO: 306637 - DNA, 25 bp, Artificial
  probe
  misc_feature (1)..(25): SEQ ID NO: 1833; WAN024DGC; Start 87; Stop 111
ctatgccttaattggttcaagtggt

SEQ ID NO: 306638 - DNA, 25 bp, Artificial
  probe
  misc_feature (1)..(25): SEQ ID NO: 1833; WAN024DGC; Start 549; Stop 573
taataggctaatcattatcgcaaca

SEQ ID NO: 306639 - DNA, 25 bp, Artificial
  probe
  misc_feature (1)..(25): SEQ ID NO: 1833; WAN024DGC; Start 558; Stop 582
aatcattatcgcaacacataatccg

SEQ ID NO: 306640 - DNA, 25 bp, Artificial
  probe
  misc_feature (1)..(25): SEQ ID NO: 1833; WAN024DGC; Start 148; Stop 172
ttagaaccttatgatgggacgattt

SEQ ID NO: 306641 - DNA, 25 bp, Artificial
  probe
  misc_feature (1)..(25): SEQ ID NO: 1833; WAN024DGC; Start 147; Stop 171
attagaaccttatgatgggacgatt

SEQ ID NO: 306642 - DNA, 25 bp, Artificial
  probe
  misc_feature (1)..(25): SEQ ID NO: 1833; WAN024DGC; Start 142; Stop 166
gggaaattagaaccttatgatggga

SEQ ID NO: 306643 - DNA, 25 bp, Artificial
  probe
  misc_feature (1)..(25): SEQ ID NO: 1833; WAN024DGC; Start 145; Stop 169
aaattagaaccttatgatgggacga

SEQ ID NO: 306644 - DNA, 25 bp, Artificial
  probe
  misc_feature (1)..(25): SEQ ID NO: 1833; WAN024DGC; Start 141; Stop 165
tgggaaattagaaccttatgatggg

SEQ ID NO: 306645 - DNA, 25 bp, Artificial
  probe
  misc_feature (1)..(25): SEQ ID NO: 1833; WAN024DGC; Start 146; Stop 170
aattagaaccttatgatgggacgat

SEQ ID NO: 306646 - DNA, 25 bp, Artificial
  probe
  misc_feature (1)..(25): SEQ ID NO: 1833; WAN024DGC; Start 144; Stop 168
gaaattagaaccttatgatgggacg

SEQ ID NO: 306647 - DNA, 25 bp, Artificial
  probe
  misc_feature (1)..(25): SEQ ID NO: 1833; WAN024DGC; Start 94; Stop 118
ttaattggttcaagtggtagcggaa

SEQ ID NO: 306648 - DNA, 25 bp, Artificial
  probe
  misc_feature (1)..(25): SEQ ID NO: 1833; WAN024DGC; Start 143; Stop 167
ggaaattagaaccttatgatgggac

SEQ ID NO: 306649 - DNA, 25 bp, Artificial
  probe
  misc_feature (1)..(25): SEQ ID NO: 1833; WAN024DGC; Start 140; Stop 164
ttgggaaattagaaccttatgatgg

SEQ ID NO: 306650 - DNA, 25 bp, Artificial
  probe
  misc_feature (1)..(25): SEQ ID NO: 1833; WAN024DGC; Start 555; Stop 579
gctaatcattatcgcaacacataat

SEQ ID NO: 306651 - DNA, 25 bp, Artificial
  probe
  misc_feature (1)..(25): SEQ ID NO: 1833; WAN024DGC; Start 93; Stop 117
cttaattggttcaagtggtagcgga

SEQ ID NO: 306652 - DNA, 25 bp, Artificial
  probe
  misc_feature (1)..(25): SEQ ID NO: 1833; WAN024DGC; Start 82; Stop 106
aaagtctatgccttaattggttcaa

SEQ ID NO: 306653 - DNA, 25 bp, Artificial
  probe
  misc_feature (1)..(25): SEQ ID NO: 1833; WAN024DGC; Start 125; Stop 149
ccttgatgaacatgattgggaaatt

SEQ ID NO: 306654 - DNA, 25 bp, Artificial
  probe
  misc_feature (1)..(25): SEQ ID NO: 1833; WAN024DGC; Start 131; Stop 155
tgaacatgattgggaaattagaacc

SEQ ID NO: 306655 - DNA, 25 bp, Artificial
  probe
  misc_feature (1)..(25): SEQ ID NO: 1833; WAN024DGC; Start 132; Stop 156
gaacatgattgggaaattagaacct

SEQ ID NO: 306656 - DNA, 25 bp, Artificial
  probe
  misc_feature (1)..(25): SEQ ID NO: 1833; WAN024DGC; Start 124; Stop 148
accttgatgaacatgattgggaaat

SEQ ID NO: 306657 - DNA, 25 bp, Artificial
  probe
  misc_feature (1)..(25): SEQ ID NO: 1833; WAN024DGC; Start 123; Stop 147
aaccttgatgaacatgattgggaaa

SEQ ID NO: 306658 - DNA, 25 bp, Artificial
  probe
  misc_feature (1)..(25): SEQ ID NO: 1833; WAN024DGC; Start 133; Stop 157
aacatgattgggaaattagaacctt

SEQ ID NO: 306659 - DNA, 25 bp, Artificial
  probe
  misc_feature (1)..(25): SEQ ID NO: 1834; WAN024CIG; Start 664; Stop 688
ctctatgatgccattccaggtaata

SEQ ID NO: 306660 - DNA, 25 bp, Artificial
  probe
  misc_feature (1)..(25): SEQ ID NO: 1834; WAN024CIG; Start 667; Stop 691
tatgatgccattccaggtaatatgc

SEQ ID NO: 306661 - DNA, 25 bp, Artificial
  probe
  misc_feature (1)..(25): SEQ ID NO: 1834; WAN024CIG; Start 666; Stop 690
ctatgatgccattccaggtaatatg

SEQ ID NO: 306662 - DNA, 25 bp, Artificial
  probe
  misc_feature (1)..(25): SEQ ID NO: 1834; WAN024CIG; Start 665; Stop 689
tctatgatgccattccaggtaatat

SEQ ID NO: 306663 - DNA, 25 bp, Artificial
  probe
  misc_feature (1)..(25): SEQ ID NO: 1834; WAN024CIG; Start 663; Stop 687
tctctatgatgccattccaggtaat

SEQ ID NO: 306664 - DNA, 25 bp, Artificial
  probe
  misc_feature (1)..(25): SEQ ID NO: 1834; WAN024CIG; Start 214; Stop 238
ggagataatcagtctgcttgtattg

SEQ ID NO: 306665 - DNA, 25 bp, Artificial
  probe
  misc_feature (1)..(25): SEQ ID NO: 1834; WAN024CIG; Start 213; Stop 237
aggagataatcagtctgcttgtatt

SEQ ID NO: 306666 - DNA, 25 bp, Artificial
  probe
  misc_feature (1)..(25): SEQ ID NO: 1834; WAN024CIG; Start 853; Stop 877
gatgccttaatcttgaccaattcag

SEQ ID NO: 306667 - DNA, 25 bp, Artificial
  probe
  misc_feature (1)..(25): SEQ ID NO: 1834; WAN024CIG; Start 714; Stop 738
tgtgcgtactaagaagatcatcatt

SEQ ID NO: 306668 - DNA, 25 bp, Artificial
  probe
  misc_feature (1)..(25): SEQ ID NO: 1834; WAN024CIG; Start 854; Stop 878
atgccttaatcttgaccaattcaga

SEQ ID NO: 306669 - DNA, 25 bp, Artificial
  probe
  misc_feature (1)..(25): SEQ ID NO: 1834; WAN024CIG; Start 221; Stop 245
atcagtctgcttgtattgaagatgt

SEQ ID NO: 306670 - DNA, 25 bp, Artificial
  probe
  misc_feature (1)..(25): SEQ ID NO: 1834; WAN024CIG; Start 220; Stop 244
aatcagtctgcttgtattgaagatg

SEQ ID NO: 306671 - DNA, 25 bp, Artificial
  probe
  misc_feature (1)..(25): SEQ ID NO: 1834; WAN024CIG; Start 223; Stop 247
cagtctgcttgtattgaagatgtga

SEQ ID NO: 306672 - DNA, 25 bp, Artificial
  probe
  misc_feature (1)..(25): SEQ ID NO: 1834; WAN024CIG; Start 713; Stop 737
atgtgcgtactaagaagatcatcat

SEQ ID NO: 306673 - DNA, 25 bp, Artificial
  probe
  misc_feature (1)..(25): SEQ ID NO: 1834; WAN024CIG; Start 712; Stop 736
aatgtgcgtactaagaagatcatca

SEQ ID NO: 306674 - DNA, 25 bp, Artificial
  probe
  misc_feature (1)..(25): SEQ ID NO: 1834; WAN024CIG; Start 211; Stop 235
ttaggagataatcagtctgcttgta

SEQ ID NO: 306675 - DNA, 25 bp, Artificial
  probe
  misc_feature (1)..(25): SEQ ID NO: 1834; WAN024CIG; Start 715; Stop 739
gtgcgtactaagaagatcatcattc

SEQ ID NO: 306676 - DNA, 25 bp, Artificial
  probe
  misc_feature (1)..(25): SEQ ID NO: 1834; WAN024CIG; Start 717; Stop 741
gcgtactaagaagatcatcattcca

SEQ ID NO: 306677 - DNA, 25 bp, Artificial
  probe
  misc_feature (1)..(25): SEQ ID NO: 1834; WAN024CIG; Start 716; Stop 740
tgcgtactaagaagatcatcattcc

SEQ ID NO: 306678 - DNA, 25 bp, Artificial
  probe
  misc_feature (1)..(25): SEQ ID NO: 1834; WAN024CIG; Start 662; Stop 686
ctctctatgatgccattccaggtaa

SEQ ID NO: 306679 - DNA, 25 bp, Artificial
  probe
  misc_feature (1)..(25): SEQ ID NO: 1834; WAN024CIG; Start 222; Stop 246
tcagtctgcttgtattgaagatgtg

SEQ ID NO: 306680 - DNA, 25 bp, Artificial
  probe
  misc_feature (1)..(25): SEQ ID NO: 1834; WAN024CIG; Start 212; Stop 236
taggagataatcagtctgcttgtat

SEQ ID NO: 306681 - DNA, 25 bp, Artificial
  probe
  misc_feature (1)..(25): SEQ ID NO: 1834; WAN024CIG; Start 707; Stop 731
gtgataatgtgcgtactaagaagat

SEQ ID NO: 306682 - DNA, 25 bp, Artificial
  probe
  misc_feature (1)..(25): SEQ ID NO: 1834; WAN024CIG; Start 138; Stop 162
ctattatctaggttacgaggatgga

SEQ ID NO: 306683 - DNA, 25 bp, Artificial
  probe
  misc_feature (1)..(25): SEQ ID NO: 1834; WAN024CIG; Start 874; Stop 898
tcagatcagattgagcaagtagaag

SEQ ID NO: 306684 - DNA, 25 bp, Artificial
  probe
  misc_feature (1)..(25): SEQ ID NO: 1834; WAN024CIG; Start 873; Stop 897
ttcagatcagattgagcaagtagaa

SEQ ID NO: 306685 - DNA, 25 bp, Artificial
  probe
  misc_feature (1)..(25): SEQ ID NO: 1834; WAN024CIG; Start 706; Stop 730
agtgataatgtgcgtactaagaaga

SEQ ID NO: 306686 - DNA, 25 bp, Artificial
  probe
  misc_feature (1)..(25): SEQ ID NO: 1834; WAN024CIG; Start 872; Stop 896
attcagatcagattgagcaagtaga

SEQ ID NO: 306687 - DNA, 25 bp, Artificial
  probe
  misc_feature (1)..(25): SEQ ID NO: 1834; WAN024CIG; Start 709; Stop 733
gataatgtgcgtactaagaagatca

SEQ ID NO: 306688 - DNA, 25 bp, Artificial
  probe
  misc_feature (1)..(25): SEQ ID NO: 1834; WAN024CIG; Start 708; Stop 732
tgataatgtgcgtactaagaagatc

SEQ ID NO: 306689 - DNA, 25 bp, Artificial
  probe
  misc_feature (1)..(25): SEQ ID NO: 1834; WAN024CIG; Start 215; Stop 239
gagataatcagtctgcttgtattga

SEQ ID NO: 306690 - DNA, 25 bp, Artificial
  probe
  misc_feature (1)..(25): SEQ ID NO: 1834; WAN024CIG; Start 711; Stop 735
taatgtgcgtactaagaagatcatc

SEQ ID NO: 306691 - DNA, 25 bp, Artificial
  probe
  misc_feature (1)..(25): SEQ ID NO: 1834; WAN024CIG; Start 705; Stop 729
aagtgataatgtgcgtactaagaag

SEQ ID NO: 306692 - DNA, 25 bp, Artificial
  probe
  misc_feature (1)..(25): SEQ ID NO: 1835; WAN024F3N; Start 342; Stop 366
ccaattctacggaactgaagtgatc

SEQ ID NO: 306693 - DNA, 25 bp, Artificial
  probe
  misc_feature (1)..(25): SEQ ID NO: 1835; WAN024F3N; Start 343; Stop 367
caattctacggaactgaagtgatcg

SEQ ID NO: 306694 - DNA, 25 bp, Artificial
  probe
  misc_feature (1)..(25): SEQ ID NO: 1835; WAN024F3N; Start 339; Stop 363
aatccaattctacggaactgaagtg

SEQ ID NO: 306695 - DNA, 25 bp, Artificial
  probe
  misc_feature (1)..(25): SEQ ID NO: 1835; WAN024F3N; Start 415; Stop 439
ccatctatcaaaggtgctactgtta

SEQ ID NO: 306696 - DNA, 25 bp, Artificial
  probe
  misc_feature (1)..(25): SEQ ID NO: 1835; WAN024F3N; Start 416; Stop 440
catctatcaaaggtgctactgttac

SEQ ID NO: 306697 - DNA, 25 bp, Artificial
  probe
  misc_feature (1)..(25): SEQ ID NO: 1835; WAN024F3N; Start 375; Stop 399
cgttcctactactgttgagttgaca

SEQ ID NO: 306698 - DNA, 25 bp, Artificial
  probe
  misc_feature (1)..(25): SEQ ID NO: 1835; WAN024F3N; Start 301; Stop 325
aacgaattgctttacatccttgaaa

SEQ ID NO: 306699 - DNA, 25 bp, Artificial
  probe
  misc_feature (1)..(25): SEQ ID NO: 1835; WAN024F3N; Start 300; Stop 324
aaacgaattgctttacatccttgaa

SEQ ID NO: 306700 - DNA, 25 bp, Artificial
  probe
  misc_feature (1)..(25): SEQ ID NO: 1835; WAN024F3N; Start 417; Stop 441
atctatcaaaggtgctactgttaca

SEQ ID NO: 306701 - DNA, 25 bp, Artificial
  probe
  misc_feature (1)..(25): SEQ ID NO: 1835; WAN024F3N; Start 341; Stop 365
tccaattctacggaactgaagtgat

SEQ ID NO: 306702 - DNA, 25 bp, Artificial
  probe
  misc_feature (1)..(25): SEQ ID NO: 1835; WAN024F3N; Start 340; Stop 364
atccaattctacggaactgaagtga

SEQ ID NO: 306703 - DNA, 25 bp, Artificial
  probe
  misc_feature (1)..(25): SEQ ID NO: 1835; WAN024F3N; Start 274; Stop 298
tacgaaatccctgtagtcaatgttg

SEQ ID NO: 306704 - DNA, 25 bp, Artificial
  probe
  misc_feature (1)..(25): SEQ ID NO: 1835; WAN024F3N; Start 182; Stop 206
ttgaacaagctattatcgagactgt

SEQ ID NO: 306705 - DNA, 25 bp, Artificial
  probe
  misc_feature (1)..(25): SEQ ID NO: 1835; WAN024F3N; Start 183; Stop 207
tgaacaagctattatcgagactgtc

SEQ ID NO: 306706 - DNA, 25 bp, Artificial
  probe
  misc_feature (1)..(25): SEQ ID NO: 1835; WAN024F3N; Start 344; Stop 368
aattctacggaactgaagtgatcgg

SEQ ID NO: 306707 - DNA, 25 bp, Artificial
  probe
  misc_feature (1)..(25): SEQ ID NO: 1835; WAN024F3N; Start 374; Stop 398
ccgttcctactactgttgagttgac

SEQ ID NO: 306708 - DNA, 25 bp, Artificial
  probe
  misc_feature (1)..(25): SEQ ID NO: 1835; WAN024F3N; Start 403; Stop 427
gctgaaactcaaccatctatcaaag

SEQ ID NO: 306709 - DNA, 25 bp, Artificial
  probe
  misc_feature (1)..(25): SEQ ID NO: 1835; WAN024F3N; Start 404; Stop 428
ctgaaactcaaccatctatcaaagg

SEQ ID NO: 306710 - DNA, 25 bp, Artificial
  probe
  misc_feature (1)..(25): SEQ ID NO: 1835; WAN024F3N; Start 184; Stop 208
gaacaagctattatcgagactgtcc

SEQ ID NO: 306711 - DNA, 25 bp, Artificial
  probe
  misc_feature (1)..(25): SEQ ID NO: 1835; WAN024F3N; Start 402; Stop 426
tgctgaaactcaaccatctatcaaa

SEQ ID NO: 306712 - DNA, 25 bp, Artificial
  probe
  misc_feature (1)..(25): SEQ ID NO: 1835; WAN024F3N; Start 401; Stop 425
ttgctgaaactcaaccatctatcaa

SEQ ID NO: 306713 - DNA, 25 bp, Artificial
  probe
  misc_feature (1)..(25): SEQ ID NO: 1835; WAN024F3N; Start 138; Stop 162
tactggttctacatttgacacaagc

SEQ ID NO: 306714 - DNA, 25 bp, Artificial
  probe
  misc_feature (1)..(25): SEQ ID NO: 1835; WAN024F3N; Start 372; Stop 396
caccgttcctactactgttgagttg

SEQ ID NO: 306715 - DNA, 25 bp, Artificial
  probe
  misc_feature (1)..(25): SEQ ID NO: 1835; WAN024F3N; Start 137; Stop 161
gtactggttctacatttgacacaag

SEQ ID NO: 306716 - DNA, 25 bp, Artificial
  probe
  misc_feature (1)..(25): SEQ ID NO: 1835; WAN024F3N; Start 373; Stop 397
accgttcctactactgttgagttga

SEQ ID NO: 306717 - DNA, 25 bp, Artificial
  probe
  misc_feature (1)..(25): SEQ ID NO: 1835; WAN024F3N; Start 371; Stop 395
tcaccgttcctactactgttgagtt

SEQ ID NO: 306718 - DNA, 25 bp, Artificial
  probe
  misc_feature (1)..(25): SEQ ID NO: 1835; WAN024F3N; Start 277; Stop 301
gaaatccctgtagtcaatgttgaaa

SEQ ID NO: 306719 - DNA, 25 bp, Artificial
  probe
  misc_feature (1)..(25): SEQ ID NO: 1835; WAN024F3N; Start 462; Stop 486
gatggaaactggacttgtcgtaaac

SEQ ID NO: 306720 - DNA, 25 bp, Artificial
  probe
  misc_feature (1)..(25): SEQ ID NO: 1835; WAN024F3N; Start 136; Stop 160
cgtactggttctacatttgacacaa

SEQ ID NO: 306721 - DNA, 25 bp, Artificial
  probe
  misc_feature (1)..(25): SEQ ID NO: 1835; WAN024F3N; Start 276; Stop 300
cgaaatccctgtagtcaatgttgaa

SEQ ID NO: 306722 - DNA, 25 bp, Artificial
  probe
  misc_feature (1)..(25): SEQ ID NO: 1835; WAN024F3N; Start 428; Stop 452
gtgctactgttacaggttctggtaa

SEQ ID NO: 306723 - DNA, 25 bp, Artificial
  probe
  misc_feature (1)..(25): SEQ ID NO: 1835; WAN024F3N; Start 338; Stop 362
aaatccaattctacggaactgaagt

SEQ ID NO: 306724 - DNA, 25 bp, Artificial
  probe
  misc_feature (1)..(25): SEQ ID NO: 1835; WAN024F3N; Start 228; Stop 252
aatggatgacacagcatacttcatg

SEQ ID NO: 306725 - DNA, 25 bp, Artificial
  probe
  misc_feature (1)..(25): SEQ ID NO: 1836; WAN024FBZ; Start 216; Stop 240
acttcgtctttctactggttatgtt

SEQ ID NO: 306726 - DNA, 25 bp, Artificial
  probe
  misc_feature (1)..(25): SEQ ID NO: 1836; WAN024FBZ; Start 217; Stop 241
cttcgtctttctactggttatgttt

SEQ ID NO: 306727 - DNA, 25 bp, Artificial
  probe
  misc_feature (1)..(25): SEQ ID NO: 1836; WAN024FBZ; Start 201; Stop 225
ctatgatgagcgtgaacttcgtctt

SEQ ID NO: 306728 - DNA, 25 bp, Artificial
  probe
  misc_feature (1)..(25): SEQ ID NO: 1836; WAN024FBZ; Start 215; Stop 239
aacttcgtctttctactggttatgt

SEQ ID NO: 306729 - DNA, 25 bp, Artificial
  probe
  misc_feature (1)..(25): SEQ ID NO: 1836; WAN024FBZ; Start 213; Stop 237
tgaacttcgtctttctactggttat

SEQ ID NO: 306730 - DNA, 25 bp, Artificial
  probe
  misc_feature (1)..(25): SEQ ID NO: 1836; WAN024FBZ; Start 120; Stop 144
gacgaccatgctcaagatgattaac

SEQ ID NO: 306731 - DNA, 25 bp, Artificial
  probe
  misc_feature (1)..(25): SEQ ID NO: 1836; WAN024FBZ; Start 214; Stop 238
gaacttcgtctttctactggttatg

SEQ ID NO: 306732 - DNA, 25 bp, Artificial
  probe
  misc_feature (1)..(25): SEQ ID NO: 1836; WAN024FBZ; Start 212; Stop 236
gtgaacttcgtctttctactggtta

SEQ ID NO: 306733 - DNA, 25 bp, Artificial
  probe
  misc_feature (1)..(25): SEQ ID NO: 1836; WAN024FBZ; Start 197; Stop 221
aagactatgatgagcgtgaacttcg

SEQ ID NO: 306734 - DNA, 25 bp, Artificial
  probe
  misc_feature (1)..(25): SEQ ID NO: 1836; WAN024FBZ; Start 119; Stop 143
agacgaccatgctcaagatgattaa

SEQ ID NO: 306735 - DNA, 25 bp, Artificial
  probe
  misc_feature (1)..(25): SEQ ID NO: 1836; WAN024FBZ; Start 118; Stop 142
aagacgaccatgctcaagatgatta

SEQ ID NO: 306736 - DNA, 25 bp, Artificial
  probe
  misc_feature (1)..(25): SEQ ID NO: 1836; WAN024FBZ; Start 117; Stop 141
taagacgaccatgctcaagatgatt

SEQ ID NO: 306737 - DNA, 25 bp, Artificial
  probe
  misc_feature (1)..(25): SEQ ID NO: 1836; WAN024FBZ; Start 545; Stop 569
ataaagagtttgggatgacaacgat

SEQ ID NO: 306738 - DNA, 25 bp, Artificial
  probe
  misc_feature (1)..(25): SEQ ID NO: 1836; WAN024FBZ; Start 546; Stop 570
taaagagtttgggatgacaacgatt

SEQ ID NO: 306739 - DNA, 25 bp, Artificial
  probe
  misc_feature (1)..(25): SEQ ID NO: 1836; WAN024FBZ; Start 196; Stop 220
aaagactatgatgagcgtgaacttc

SEQ ID NO: 306740 - DNA, 25 bp, Artificial
  probe
  misc_feature (1)..(25): SEQ ID NO: 1836; WAN024FBZ; Start 195; Stop 219
caaagactatgatgagcgtgaactt

SEQ ID NO: 306741 - DNA, 25 bp, Artificial
  probe
  misc_feature (1)..(25): SEQ ID NO: 1836; WAN024FBZ; Start 544; Stop 568
cataaagagtttgggatgacaacga

SEQ ID NO: 306742 - DNA, 25 bp, Artificial
  probe
  misc_feature (1)..(25): SEQ ID NO: 1836; WAN024FBZ; Start 547; Stop 571
aaagagtttgggatgacaacgattt

SEQ ID NO: 306743 - DNA, 25 bp, Artificial
  probe
  misc_feature (1)..(25): SEQ ID NO: 1836; WAN024FBZ; Start 435; Stop 459
tattgtccgagctatgattggtcag

SEQ ID NO: 306744 - DNA, 25 bp, Artificial
  probe
  misc_feature (1)..(25): SEQ ID NO: 1836; WAN024FBZ; Start 116; Stop 140
gtaagacgaccatgctcaagatgat

SEQ ID NO: 306745 - DNA, 25 bp, Artificial
  probe
  misc_feature (1)..(25): SEQ ID NO: 1836; WAN024FBZ; Start 46; Stop 70
gtcttgagagatgtcaacttacaga

SEQ ID NO: 306746 - DNA, 25 bp, Artificial
  probe
  misc_feature (1)..(25): SEQ ID NO: 1836; WAN024FBZ; Start 42; Stop 66
ggatgtcttgagagatgtcaactta

SEQ ID NO: 306747 - DNA, 25 bp, Artificial
  probe
  misc_feature (1)..(25): SEQ ID NO: 1836; WAN024FBZ; Start 45; Stop 69
tgtcttgagagatgtcaacttacag

SEQ ID NO: 306748 - DNA, 25 bp, Artificial
  probe
  misc_feature (1)..(25): SEQ ID NO: 1836; WAN024FBZ; Start 44; Stop 68
atgtcttgagagatgtcaacttaca

SEQ ID NO: 306749 - DNA, 25 bp, Artificial
  probe
  misc_feature (1)..(25): SEQ ID NO: 1836; WAN024FBZ; Start 50; Stop 74
tgagagatgtcaacttacagattga

SEQ ID NO: 306750 - DNA, 25 bp, Artificial
  probe
  misc_feature (1)..(25): SEQ ID NO: 1836; WAN024FBZ; Start 47; Stop 71
tcttgagagatgtcaacttacagat

SEQ ID NO: 306751 - DNA, 25 bp, Artificial
  probe
  misc_feature (1)..(25): SEQ ID NO: 1836; WAN024FBZ; Start 43; Stop 67
gatgtcttgagagatgtcaacttac

SEQ ID NO: 306752 - DNA, 25 bp, Artificial
  probe
  misc_feature (1)..(25): SEQ ID NO: 1836; WAN024FBZ; Start 126; Stop 150
catgctcaagatgattaaccgtctt

SEQ ID NO: 306753 - DNA, 25 bp, Artificial
  probe
  misc_feature (1)..(25): SEQ ID NO: 1836; WAN024FBZ; Start 434; Stop 458
gtattgtccgagctatgattggtca

SEQ ID NO: 306754 - DNA, 25 bp, Artificial
  probe
  misc_feature (1)..(25): SEQ ID NO: 1836; WAN024FBZ; Start 125; Stop 149
ccatgctcaagatgattaaccgtct

SEQ ID NO: 306755 - DNA, 25 bp, Artificial
  probe
  misc_feature (1)..(25): SEQ ID NO: 1836; WAN024FBZ; Start 49; Stop 73
ttgagagatgtcaacttacagattg

SEQ ID NO: 306756 - DNA, 25 bp, Artificial
  probe
  misc_feature (1)..(25): SEQ ID NO: 1836; WAN024FBZ; Start 194; Stop 218
tcaaagactatgatgagcgtgaact

SEQ ID NO: 306757 - DNA, 25 bp, Artificial
  probe
  misc_feature (1)..(25): SEQ ID NO: 1836; WAN024FBZ; Start 48; Stop 72
cttgagagatgtcaacttacagatt

SEQ ID NO: 306758 - DNA, 25 bp, Artificial
  probe
  misc_feature (1)..(25): SEQ ID NO: 1837; WAN024AW2; Start 29; Stop 53
aatcagcaagagagtaccaggatac

SEQ ID NO: 306759 - DNA, 25 bp, Artificial
  probe
  misc_feature (1)..(25): SEQ ID NO: 1837; WAN024AW2; Start 28; Stop 52
caatcagcaagagagtaccaggata

SEQ ID NO: 306760 - DNA, 25 bp, Artificial
  probe
  misc_feature (1)..(25): SEQ ID NO: 1837; WAN024AW2; Start 134; Stop 158
tgtctgacttatcactagagaagaa

SEQ ID NO: 306761 - DNA, 25 bp, Artificial
  probe
  misc_feature (1)..(25): SEQ ID NO: 1837; WAN024AW2; Start 133; Stop 157
atgtctgacttatcactagagaaga

SEQ ID NO: 306762 - DNA, 25 bp, Artificial
  probe
  misc_feature (1)..(25): SEQ ID NO: 1837; WAN024AW2; Start 100; Stop 124
gcactctctgatgatacaaacaaag

SEQ ID NO: 306763 - DNA, 25 bp, Artificial
  probe
  misc_feature (1)..(25): SEQ ID NO: 1837; WAN024AW2; Start 237; Stop 261
ctacactggaacaataccaagtctg

SEQ ID NO: 306764 - DNA, 25 bp, Artificial
  probe
  misc_feature (1)..(25): SEQ ID NO: 1837; WAN024AW2; Start 132; Stop 156
catgtctgacttatcactagagaag

SEQ ID NO: 306765 - DNA, 25 bp, Artificial
  probe
  misc_feature (1)..(25): SEQ ID NO: 1837; WAN024AW2; Start 99; Stop 123
agcactctctgatgatacaaacaaa

SEQ ID NO: 306766 - DNA, 25 bp, Artificial
  probe
  misc_feature (1)..(25): SEQ ID NO: 1837; WAN024AW2; Start 19; Stop 43
ttaccatttcaatcagcaagagagt

SEQ ID NO: 306767 - DNA, 25 bp, Artificial
  probe
  misc_feature (1)..(25): SEQ ID NO: 1837; WAN024AW2; Start 18; Stop 42
tttaccatttcaatcagcaagagag

SEQ ID NO: 306768 - DNA, 25 bp, Artificial
  probe
  misc_feature (1)..(25): SEQ ID NO: 1837; WAN024AW2; Start 325; Stop 349
attagtattgaacttgtcgaggagg

SEQ ID NO: 306769 - DNA, 25 bp, Artificial
  probe
  misc_feature (1)..(25): SEQ ID NO: 1837; WAN024AW2; Start 20; Stop 44
taccatttcaatcagcaagagagta

SEQ ID NO: 306770 - DNA, 25 bp, Artificial
  probe
  misc_feature (1)..(25): SEQ ID NO: 1837; WAN024AW2; Start 238; Stop 262
tacactggaacaataccaagtctga

SEQ ID NO: 306771 - DNA, 25 bp, Artificial
  probe
  misc_feature (1)..(25): SEQ ID NO: 1837; WAN024AW2; Start 17; Stop 41
atttaccatttcaatcagcaagaga

SEQ ID NO: 306772 - DNA, 25 bp, Artificial
  probe
  misc_feature (1)..(25): SEQ ID NO: 1837; WAN024AW2; Start 284; Stop 308
aaactacaacaggtcacatcaattt

SEQ ID NO: 306773 - DNA, 25 bp, Artificial
  probe
  misc_feature (1)..(25): SEQ ID NO: 1837; WAN024AW2; Start 30; Stop 54
atcagcaagagagtaccaggataca

SEQ ID NO: 306774 - DNA, 25 bp, Artificial
  probe
  misc_feature (1)..(25): SEQ ID NO: 1837; WAN024AW2; Start 326; Stop 350
ttagtattgaacttgtcgaggaggt

SEQ ID NO: 306775 - DNA, 25 bp, Artificial
  probe
  misc_feature (1)..(25): SEQ ID NO: 1837; WAN024AW2; Start 285; Stop 309
aactacaacaggtcacatcaatttg

SEQ ID NO: 306776 - DNA, 25 bp, Artificial
  probe
  misc_feature (1)..(25): SEQ ID NO: 1837; WAN024AW2; Start 31; Stop 55
tcagcaagagagtaccaggatacaa

SEQ ID NO: 306777 - DNA, 25 bp, Artificial
  probe
  misc_feature (1)..(25): SEQ ID NO: 1837; WAN024AW2; Start 236; Stop 260
cctacactggaacaataccaagtct

SEQ ID NO: 306778 - DNA, 25 bp, Artificial
  probe
  misc_feature (1)..(25): SEQ ID NO: 1837; WAN024AW2; Start 235; Stop 259
tcctacactggaacaataccaagtc

SEQ ID NO: 306779 - DNA, 25 bp, Artificial
  probe
  misc_feature (1)..(25): SEQ ID NO: 1837; WAN024AW2; Start 36; Stop 60
aagagagtaccaggatacaaagatg

SEQ ID NO: 306780 - DNA, 25 bp, Artificial
  probe
  misc_feature (1)..(25): SEQ ID NO: 1837; WAN024AW2; Start 35; Stop 59
caagagagtaccaggatacaaagat

SEQ ID NO: 306781 - DNA, 25 bp, Artificial
  probe
  misc_feature (1)..(25): SEQ ID NO: 1837; WAN024AW2; Start 105; Stop 129
ctctgatgatacaaacaaagtaacg

SEQ ID NO: 306782 - DNA, 25 bp, Artificial
  probe
  misc_feature (1)..(25): SEQ ID NO: 1837; WAN024AW2; Start 101; Stop 125
cactctctgatgatacaaacaaagt

SEQ ID NO: 306783 - DNA, 25 bp, Artificial
  probe
  misc_feature (1)..(25): SEQ ID NO: 1837; WAN024AW2; Start 24; Stop 48
atttcaatcagcaagagagtaccag

SEQ ID NO: 306784 - DNA, 25 bp, Artificial
  probe
  misc_feature (1)..(25): SEQ ID NO: 1837; WAN024AW2; Start 6; Stop 30
tgaccgttcatatttaccatttcaa

SEQ ID NO: 306785 - DNA, 25 bp, Artificial
  probe
  misc_feature (1)..(25): SEQ ID NO: 1837; WAN024AW2; Start 5; Stop 29
ttgaccgttcatatttaccatttca

SEQ ID NO: 306786 - DNA, 25 bp, Artificial
  probe
  misc_feature (1)..(25): SEQ ID NO: 1837; WAN024AW2; Start 327; Stop 351
tagtattgaacttgtcgaggaggtg

SEQ ID NO: 306787 - DNA, 25 bp, Artificial
  probe
  misc_feature (1)..(25): SEQ ID NO: 1837; WAN024AW2; Start 23; Stop 47
catttcaatcagcaagagagtacca

SEQ ID NO: 306788 - DNA, 25 bp, Artificial
  probe
  misc_feature (1)..(25): SEQ ID NO: 1837; WAN024AW2; Start 21; Stop 45
accatttcaatcagcaagagagtac

SEQ ID NO: 306789 - DNA, 25 bp, Artificial
  probe
  misc_feature (1)..(25): SEQ ID NO: 1837; WAN024AW2; Start 2; Stop 26
tgattgaccgttcatatttaccatt

SEQ ID NO: 306790 - DNA, 25 bp, Artificial
  probe
  misc_feature (1)..(25): SEQ ID NO: 1837; WAN024AW2; Start 27; Stop 51
tcaatcagcaagagagtaccaggat

SEQ ID NO: 306791 - DNA, 25 bp, Artificial
  probe
  misc_feature (1)..(25): SEQ ID NO: 1838; WAN024DD3; Start 452; Stop 476
agcaagaactctatacggttgttat

SEQ ID NO: 306792 - DNA, 25 bp, Artificial
  probe
  misc_feature (1)..(25): SEQ ID NO: 1838; WAN024DD3; Start 451; Stop 475
aagcaagaactctatacggttgtta

SEQ ID NO: 306793 - DNA, 25 bp, Artificial
  probe
  misc_feature (1)..(25): SEQ ID NO: 1838; WAN024DD3; Start 450; Stop 474
taagcaagaactctatacggttgtt

SEQ ID NO: 306794 - DNA, 25 bp, Artificial
  probe
  misc_feature (1)..(25): SEQ ID NO: 1838; WAN024DD3; Start 449; Stop 473
ttaagcaagaactctatacggttgt

SEQ ID NO: 306795 - DNA, 25 bp, Artificial
  probe
  misc_feature (1)..(25): SEQ ID NO: 1838; WAN024DD3; Start 448; Stop 472
gttaagcaagaactctatacggttg

SEQ ID NO: 306796 - DNA, 25 bp, Artificial
  probe
  misc_feature (1)..(25): SEQ ID NO: 1838; WAN024DD3; Start 447; Stop 471
ggttaagcaagaactctatacggtt

SEQ ID NO: 306797 - DNA, 25 bp, Artificial
  probe
  misc_feature (1)..(25): SEQ ID NO: 1838; WAN024DD3; Start 453; Stop 477
gcaagaactctatacggttgttatc

SEQ ID NO: 306798 - DNA, 25 bp, Artificial
  probe
  misc_feature (1)..(25): SEQ ID NO: 1838; WAN024DD3; Start 454; Stop 478
caagaactctatacggttgttatcg

SEQ ID NO: 306799 - DNA, 25 bp, Artificial
  probe
  misc_feature (1)..(25): SEQ ID NO: 1838; WAN024DD3; Start 446; Stop 470
aggttaagcaagaactctatacggt

SEQ ID NO: 306800 - DNA, 25 bp, Artificial
  probe
  misc_feature (1)..(25): SEQ ID NO: 1838; WAN024DD3; Start 445; Stop 469
gaggttaagcaagaactctatacgg

SEQ ID NO: 306801 - DNA, 25 bp, Artificial
  probe
  misc_feature (1)..(25): SEQ ID NO: 1838; WAN024DD3; Start 444; Stop 468
cgaggttaagcaagaactctatacg

SEQ ID NO: 306802 - DNA, 25 bp, Artificial
  probe
  misc_feature (1)..(25): SEQ ID NO: 1838; WAN024DD3; Start 443; Stop 467
gcgaggttaagcaagaactctatac

SEQ ID NO: 306803 - DNA, 25 bp, Artificial
  probe
  misc_feature (1)..(25): SEQ ID NO: 1838; WAN024DD3; Start 378; Stop 402
ttatgttaagggaaatccgcaatct

SEQ ID NO: 306804 - DNA, 25 bp, Artificial
  probe
  misc_feature (1)..(25): SEQ ID NO: 1838; WAN024DD3; Start 379; Stop 403
tatgttaagggaaatccgcaatctc

SEQ ID NO: 306805 - DNA, 25 bp, Artificial
  probe
  misc_feature (1)..(25): SEQ ID NO: 1838; WAN024DD3; Start 304; Stop 328
aaagggattggtagtcatattgtga

SEQ ID NO: 306806 - DNA, 25 bp, Artificial
  probe
  misc_feature (1)..(25): SEQ ID NO: 1838; WAN024DD3; Start 377; Stop 401
cttatgttaagggaaatccgcaatc

SEQ ID NO: 306807 - DNA, 25 bp, Artificial
  probe
  misc_feature (1)..(25): SEQ ID NO: 1838; WAN024DD3; Start 371; Stop 395
gtttggcttatgttaagggaaatcc

SEQ ID NO: 306808 - DNA, 25 bp, Artificial
  probe
  misc_feature (1)..(25): SEQ ID NO: 1838; WAN024DD3; Start 370; Stop 394
cgtttggcttatgttaagggaaatc

SEQ ID NO: 306809 - DNA, 25 bp, Artificial
  probe
  misc_feature (1)..(25): SEQ ID NO: 1838; WAN024DD3; Start 372; Stop 396
tttggcttatgttaagggaaatccg

SEQ ID NO: 306810 - DNA, 25 bp, Artificial
  probe
  misc_feature (1)..(25): SEQ ID NO: 1838; WAN024DD3; Start 442; Stop 466
tgcgaggttaagcaagaactctata

SEQ ID NO: 306811 - DNA, 25 bp, Artificial
  probe
  misc_feature (1)..(25): SEQ ID NO: 1838; WAN024DD3; Start 380; Stop 404
atgttaagggaaatccgcaatctca

SEQ ID NO: 306812 - DNA, 25 bp, Artificial
  probe
  misc_feature (1)..(25): SEQ ID NO: 1838; WAN024DD3; Start 208; Stop 232
tctgaccttgtggctgttatggatt

SEQ ID NO: 306813 - DNA, 25 bp, Artificial
  probe
  misc_feature (1)..(25): SEQ ID NO: 1838; WAN024DD3; Start 376; Stop 400
gcttatgttaagggaaatccgcaat

SEQ ID NO: 306814 - DNA, 25 bp, Artificial
  probe
  misc_feature (1)..(25): SEQ ID NO: 1838; WAN024DD3; Start 441; Stop 465
atgcgaggttaagcaagaactctat

SEQ ID NO: 306815 - DNA, 25 bp, Artificial
  probe
  misc_feature (1)..(25): SEQ ID NO: 1838; WAN024DD3; Start 318; Stop 342
tcatattgtgacagaagcactagct

SEQ ID NO: 306816 - DNA, 25 bp, Artificial
  probe
  misc_feature (1)..(25): SEQ ID NO: 1838; WAN024DD3; Start 209; Stop 233
ctgaccttgtggctgttatggattt

SEQ ID NO: 306817 - DNA, 25 bp, Artificial
  probe
  misc_feature (1)..(25): SEQ ID NO: 1838; WAN024DD3; Start 381; Stop 405
tgttaagggaaatccgcaatctcag

SEQ ID NO: 306818 - DNA, 25 bp, Artificial
  probe
  misc_feature (1)..(25): SEQ ID NO: 1838; WAN024DD3; Start 217; Stop 241
gtggctgttatggattttgtctatg

SEQ ID NO: 306819 - DNA, 25 bp, Artificial
  probe
  misc_feature (1)..(25): SEQ ID NO: 1838; WAN024DD3; Start 216; Stop 240
tgtggctgttatggattttgtctat

SEQ ID NO: 306820 - DNA, 25 bp, Artificial
  probe
  misc_feature (1)..(25): SEQ ID NO: 1838; WAN024DD3; Start 215; Stop 239
ttgtggctgttatggattttgtcta

SEQ ID NO: 306821 - DNA, 25 bp, Artificial
  probe
  misc_feature (1)..(25): SEQ ID NO: 1838; WAN024DD3; Start 440; Stop 464
gatgcgaggttaagcaagaactcta

SEQ ID NO: 306822 - DNA, 25 bp, Artificial
  probe
  misc_feature (1)..(25): SEQ ID NO: 1838; WAN024DD3; Start 369; Stop 393
acgtttggcttatgttaagggaaat

SEQ ID NO: 306823 - DNA, 25 bp, Artificial
  probe
  misc_feature (1)..(25): SEQ ID NO: 1838; WAN024DD3; Start 218; Stop 242
tggctgttatggattttgtctatgc

SEQ ID NO: 306824 - DNA, 25 bp, Artificial
  probe
  misc_feature (1)..(25): SEQ ID NO: 1839; WAN024ERJ; Start 2; Stop 26
tgattgagattaagttcattccagt

SEQ ID NO: 306825 - DNA, 25 bp, Artificial
  probe
  misc_feature (1)..(25): SEQ ID NO: 1839; WAN024ERJ; Start 303; Stop 327
tggcatcatcacaattaaagaaact

SEQ ID NO: 306826 - DNA, 25 bp, Artificial
  probe
  misc_feature (1)..(25): SEQ ID NO: 1839; WAN024ERJ; Start 224; Stop 248
tacctgtgttgttgaatgaaagaac

SEQ ID NO: 306827 - DNA, 25 bp, Artificial
  probe
  misc_feature (1)..(25): SEQ ID NO: 1839; WAN024ERJ; Start 234; Stop 258
gttgaatgaaagaacacctgaaatg

SEQ ID NO: 306828 - DNA, 25 bp, Artificial
  probe
  misc_feature (1)..(25): SEQ ID NO: 1839; WAN024ERJ; Start 3; Stop 27
gattgagattaagttcattccagtt

SEQ ID NO: 306829 - DNA, 25 bp, Artificial
  probe
  misc_feature (1)..(25): SEQ ID NO: 1839; WAN024ERJ; Start 77; Stop 101
tgactggaagtaatacgctaaatga

SEQ ID NO: 306830 - DNA, 25 bp, Artificial
  probe
  misc_feature (1)..(25): SEQ ID NO: 1839; WAN024ERJ; Start 223; Stop 247
gtacctgtgttgttgaatgaaagaa

SEQ ID NO: 306831 - DNA, 25 bp, Artificial
  probe
  misc_feature (1)..(25): SEQ ID NO: 1839; WAN024ERJ; Start 221; Stop 245
ctgtacctgtgttgttgaatgaaag

SEQ ID NO: 306832 - DNA, 25 bp, Artificial
  probe
  misc_feature (1)..(25): SEQ ID NO: 1839; WAN024ERJ; Start 222; Stop 246
tgtacctgtgttgttgaatgaaaga

SEQ ID NO: 306833 - DNA, 25 bp, Artificial
  probe
  misc_feature (1)..(25): SEQ ID NO: 1839; WAN024ERJ; Start 125; Stop 149
tttcaccaaggttcatttgtaaagc

SEQ ID NO: 306834 - DNA, 25 bp, Artificial
  probe
  misc_feature (1)..(25): SEQ ID NO: 1839; WAN024ERJ; Start 76; Stop 100
atgactggaagtaatacgctaaatg

SEQ ID NO: 306835 - DNA, 25 bp, Artificial
  probe
  misc_feature (1)..(25): SEQ ID NO: 1839; WAN024ERJ; Start 302; Stop 326
ttggcatcatcacaattaaagaaac

SEQ ID NO: 306836 - DNA, 25 bp, Artificial
  probe
  misc_feature (1)..(25): SEQ ID NO: 1839; WAN024ERJ; Start 294; Stop 318
aactgtatttggcatcatcacaatt

SEQ ID NO: 306837 - DNA, 25 bp, Artificial
  probe
  misc_feature (1)..(25): SEQ ID NO: 1839; WAN024ERJ; Start 293; Stop 317
aaactgtatttggcatcatcacaat

SEQ ID NO: 306838 - DNA, 25 bp, Artificial
  probe
  misc_feature (1)..(25): SEQ ID NO: 1839; WAN024ERJ; Start 292; Stop 316
gaaactgtatttggcatcatcacaa

SEQ ID NO: 306839 - DNA, 25 bp, Artificial
  probe
  misc_feature (1)..(25): SEQ ID NO: 1839; WAN024ERJ; Start 235; Stop 259
ttgaatgaaagaacacctgaaatgt

SEQ ID NO: 306840 - DNA, 25 bp, Artificial
  probe
  misc_feature (1)..(25): SEQ ID NO: 1839; WAN024ERJ; Start 78; Stop 102
gactggaagtaatacgctaaatgat

SEQ ID NO: 306841 - DNA, 25 bp, Artificial
  probe
  misc_feature (1)..(25): SEQ ID NO: 1839; WAN024ERJ; Start 295; Stop 319
actgtatttggcatcatcacaatta

SEQ ID NO: 306842 - DNA, 25 bp, Artificial
  probe
  misc_feature (1)..(25): SEQ ID NO: 1839; WAN024ERJ; Start 291; Stop 315
agaaactgtatttggcatcatcaca

SEQ ID NO: 306843 - DNA, 25 bp, Artificial
  probe
  misc_feature (1)..(25): SEQ ID NO: 1839; WAN024ERJ; Start 31; Stop 55
ttgaataataatgctgaaacaaccc

SEQ ID NO: 306844 - DNA, 25 bp, Artificial
  probe
  misc_feature (1)..(25): SEQ ID NO: 1839; WAN024ERJ; Start 290; Stop 314
cagaaactgtatttggcatcatcac

SEQ ID NO: 306845 - DNA, 25 bp, Artificial
  probe
  misc_feature (1)..(25): SEQ ID NO: 1839; WAN024ERJ; Start 80; Stop 104
ctggaagtaatacgctaaatgatct

SEQ ID NO: 306846 - DNA, 25 bp, Artificial
  probe
  misc_feature (1)..(25): SEQ ID NO: 1839; WAN024ERJ; Start 304; Stop 328
ggcatcatcacaattaaagaaacta

SEQ ID NO: 306847 - DNA, 25 bp, Artificial
  probe
  misc_feature (1)..(25): SEQ ID NO: 1839; WAN024ERJ; Start 220; Stop 244
cctgtacctgtgttgttgaatgaaa

SEQ ID NO: 306848 - DNA, 25 bp, Artificial
  probe
  misc_feature (1)..(25): SEQ ID NO: 1839; WAN024ERJ; Start 301; Stop 325
tttggcatcatcacaattaaagaaa

SEQ ID NO: 306849 - DNA, 25 bp, Artificial
  probe
  misc_feature (1)..(25): SEQ ID NO: 1839; WAN024ERJ; Start 79; Stop 103
actggaagtaatacgctaaatgatc

SEQ ID NO: 306850 - DNA, 25 bp, Artificial
  probe
  misc_feature (1)..(25): SEQ ID NO: 1839; WAN024ERJ; Start 300; Stop 324
atttggcatcatcacaattaaagaa

SEQ ID NO: 306851 - DNA, 25 bp, Artificial
  probe
  misc_feature (1)..(25): SEQ ID NO: 1839; WAN024ERJ; Start 75; Stop 99
catgactggaagtaatacgctaaat

SEQ ID NO: 306852 - DNA, 25 bp, Artificial
  probe
  misc_feature (1)..(25): SEQ ID NO: 1839; WAN024ERJ; Start 296; Stop 320
ctgtatttggcatcatcacaattaa

SEQ ID NO: 306853 - DNA, 25 bp, Artificial
  probe
  misc_feature (1)..(25): SEQ ID NO: 1839; WAN024ERJ; Start 219; Stop 243
gcctgtacctgtgttgttgaatgaa

SEQ ID NO: 306854 - DNA, 25 bp, Artificial
  probe
  misc_feature (1)..(25): SEQ ID NO: 1839; WAN024ERJ; Start 297; Stop 321
tgtatttggcatcatcacaattaaa

SEQ ID NO: 306855 - DNA, 25 bp, Artificial
  probe
  misc_feature (1)..(25): SEQ ID NO: 1839; WAN024ERJ; Start 298; Stop 322
gtatttggcatcatcacaattaaag

SEQ ID NO: 306856 - DNA, 25 bp, Artificial
  probe
  misc_feature (1)..(25): SEQ ID NO: 1839; WAN024ERJ; Start 5; Stop 29
ttgagattaagttcattccagttat

SEQ ID NO: 306857 - DNA, 25 bp, Artificial
  probe
  misc_feature (1)..(25): SEQ ID NO: 1840; WAN024DTD; Start 145; Stop 169
ttgatagatggtgattatagcggac

SEQ ID NO: 306858 - DNA, 25 bp, Artificial
  probe
  misc_feature (1)..(25): SEQ ID NO: 1840; WAN024DTD; Start 156; Stop 180
tgattatagcggacggtatgagatt

SEQ ID NO: 306859 - DNA, 25 bp, Artificial
  probe
  misc_feature (1)..(25): SEQ ID NO: 1840; WAN024DTD; Start 228; Stop 252
aatccgtgaacatatctcttatctg

SEQ ID NO: 306860 - DNA, 25 bp, Artificial
  probe
  misc_feature (1)..(25): SEQ ID NO: 1840; WAN024DTD; Start 155; Stop 179
gtgattatagcggacggtatgagat

SEQ ID NO: 306861 - DNA, 25 bp, Artificial
  probe
  misc_feature (1)..(25): SEQ ID NO: 1840; WAN024DTD; Start 146; Stop 170
tgatagatggtgattatagcggacg

SEQ ID NO: 306862 - DNA, 25 bp, Artificial
  probe
  misc_feature (1)..(25): SEQ ID NO: 1840; WAN024DTD; Start 223; Stop 247
acaataatccgtgaacatatctctt

SEQ ID NO: 306863 - DNA, 25 bp, Artificial
  probe
  misc_feature (1)..(25): SEQ ID NO: 1840; WAN024DTD; Start 222; Stop 246
aacaataatccgtgaacatatctct

SEQ ID NO: 306864 - DNA, 25 bp, Artificial
  probe
  misc_feature (1)..(25): SEQ ID NO: 1840; WAN024DTD; Start 229; Stop 253
atccgtgaacatatctcttatctgt

SEQ ID NO: 306865 - DNA, 25 bp, Artificial
  probe
  misc_feature (1)..(25): SEQ ID NO: 1840; WAN024DTD; Start 149; Stop 173
tagatggtgattatagcggacggta

SEQ ID NO: 306866 - DNA, 25 bp, Artificial
  probe
  misc_feature (1)..(25): SEQ ID NO: 1840; WAN024DTD; Start 147; Stop 171
gatagatggtgattatagcggacgg

SEQ ID NO: 306867 - DNA, 25 bp, Artificial
  probe
  misc_feature (1)..(25): SEQ ID NO: 1840; WAN024DTD; Start 157; Stop 181
gattatagcggacggtatgagattt

SEQ ID NO: 306868 - DNA, 25 bp, Artificial
  probe
  misc_feature (1)..(25): SEQ ID NO: 1840; WAN024DTD; Start 50; Stop 74
tggataacttatctctcaggattga

SEQ ID NO: 306869 - DNA, 25 bp, Artificial
  probe
  misc_feature (1)..(25): SEQ ID NO: 1840; WAN024DTD; Start 144; Stop 168
tttgatagatggtgattatagcgga

SEQ ID NO: 306870 - DNA, 25 bp, Artificial
  probe
  misc_feature (1)..(25): SEQ ID NO: 1840; WAN024DTD; Start 143; Stop 167
gtttgatagatggtgattatagcgg

SEQ ID NO: 306871 - DNA, 25 bp, Artificial
  probe
  misc_feature (1)..(25): SEQ ID NO: 1840; WAN024DTD; Start 142; Stop 166
ggtttgatagatggtgattatagcg

SEQ ID NO: 306872 - DNA, 25 bp, Artificial
  probe
  misc_feature (1)..(25): SEQ ID NO: 1840; WAN024DTD; Start 218; Stop 242
cgcaaacaataatccgtgaacatat

SEQ ID NO: 306873 - DNA, 25 bp, Artificial
  probe
  misc_feature (1)..(25): SEQ ID NO: 1840; WAN024DTD; Start 151; Stop 175
gatggtgattatagcggacggtatg

SEQ ID NO: 306874 - DNA, 25 bp, Artificial
  probe
  misc_feature (1)..(25): SEQ ID NO: 1840; WAN024DTD; Start 219; Stop 243
gcaaacaataatccgtgaacatatc

SEQ ID NO: 306875 - DNA, 25 bp, Artificial
  probe
  misc_feature (1)..(25): SEQ ID NO: 1840; WAN024DTD; Start 141; Stop 165
gggtttgatagatggtgattatagc

SEQ ID NO: 306876 - DNA, 25 bp, Artificial
  probe
  misc_feature (1)..(25): SEQ ID NO: 1840; WAN024DTD; Start 308; Stop 332
cgctgaaatatgtgaaattgcctaa

SEQ ID NO: 306877 - DNA, 25 bp, Artificial
  probe
  misc_feature (1)..(25): SEQ ID NO: 1840; WAN024DTD; Start 150; Stop 174
agatggtgattatagcggacggtat

SEQ ID NO: 306878 - DNA, 25 bp, Artificial
  probe
  misc_feature (1)..(25): SEQ ID NO: 1840; WAN024DTD; Start 148; Stop 172
atagatggtgattatagcggacggt

SEQ ID NO: 306879 - DNA, 25 bp, Artificial
  probe
  misc_feature (1)..(25): SEQ ID NO: 1840; WAN024DTD; Start 309; Stop 333
gctgaaatatgtgaaattgcctaag

SEQ ID NO: 306880 - DNA, 25 bp, Artificial
  probe
  misc_feature (1)..(25): SEQ ID NO: 1840; WAN024DTD; Start 213; Stop 237
taagtcgcaaacaataatccgtgaa

SEQ ID NO: 306881 - DNA, 25 bp, Artificial
  probe
  misc_feature (1)..(25): SEQ ID NO: 1840; WAN024DTD; Start 227; Stop 251
taatccgtgaacatatctcttatct

SEQ ID NO: 306882 - DNA, 25 bp, Artificial
  probe
  misc_feature (1)..(25): SEQ ID NO: 1840; WAN024DTD; Start 217; Stop 241
tcgcaaacaataatccgtgaacata

SEQ ID NO: 306883 - DNA, 25 bp, Artificial
  probe
  misc_feature (1)..(25): SEQ ID NO: 1840; WAN024DTD; Start 152; Stop 176
atggtgattatagcggacggtatga

SEQ ID NO: 306884 - DNA, 25 bp, Artificial
  probe
  misc_feature (1)..(25): SEQ ID NO: 1840; WAN024DTD; Start 49; Stop 73
ttggataacttatctctcaggattg

SEQ ID NO: 306885 - DNA, 25 bp, Artificial
  probe
  misc_feature (1)..(25): SEQ ID NO: 1840; WAN024DTD; Start 186; Stop 210
tcagacaaatctagcggttaattct

SEQ ID NO: 306886 - DNA, 25 bp, Artificial
  probe
  misc_feature (1)..(25): SEQ ID NO: 1840; WAN024DTD; Start 185; Stop 209
gtcagacaaatctagcggttaattc

SEQ ID NO: 306887 - DNA, 25 bp, Artificial
  probe
  misc_feature (1)..(25): SEQ ID NO: 1840; WAN024DTD; Start 212; Stop 236
ctaagtcgcaaacaataatccgtga

SEQ ID NO: 306888 - DNA, 25 bp, Artificial
  probe
  misc_feature (1)..(25): SEQ ID NO: 1840; WAN024DTD; Start 319; Stop 343
gtgaaattgcctaagaaagacaagc

SEQ ID NO: 306889 - DNA, 25 bp, Artificial
  probe
  misc_feature (1)..(25): SEQ ID NO: 1840; WAN024DTD; Start 136; Stop 160
ttattgggtttgatagatggtgatt

SEQ ID NO: 306890 - DNA, 25 bp, Artificial
  probe
  misc_feature (1)..(25): SEQ ID NO: 1841; WAN024DLJ; Start 203; Stop 227
tcaacaactatcaagaatctccaca

SEQ ID NO: 306891 - DNA, 25 bp, Artificial
  probe
  misc_feature (1)..(25): SEQ ID NO: 1841; WAN024DLJ; Start 202; Stop 226
ctcaacaactatcaagaatctccac

SEQ ID NO: 306892 - DNA, 25 bp, Artificial
  probe
  misc_feature (1)..(25): SEQ ID NO: 1841; WAN024DLJ; Start 201; Stop 225
gctcaacaactatcaagaatctcca

SEQ ID NO: 306893 - DNA, 25 bp, Artificial
  probe
  misc_feature (1)..(25): SEQ ID NO: 1841; WAN024DLJ; Start 204; Stop 228
caacaactatcaagaatctccacat

SEQ ID NO: 306894 - DNA, 25 bp, Artificial
  probe
  misc_feature (1)..(25): SEQ ID NO: 1841; WAN024DLJ; Start 571; Stop 595
cgattgtatatgaagcaaggactct

SEQ ID NO: 306895 - DNA, 25 bp, Artificial
  probe
  misc_feature (1)..(25): SEQ ID NO: 1841; WAN024DLJ; Start 572; Stop 596
gattgtatatgaagcaaggactctt

SEQ ID NO: 306896 - DNA, 25 bp, Artificial
  probe
  misc_feature (1)..(25): SEQ ID NO: 1841; WAN024DLJ; Start 205; Stop 229
aacaactatcaagaatctccacata

SEQ ID NO: 306897 - DNA, 25 bp, Artificial
  probe
  misc_feature (1)..(25): SEQ ID NO: 1841; WAN024DLJ; Start 196; Stop 220
cacaagctcaacaactatcaagaat

SEQ ID NO: 306898 - DNA, 25 bp, Artificial
  probe
  misc_feature (1)..(25): SEQ ID NO: 1841; WAN024DLJ; Start 197; Stop 221
acaagctcaacaactatcaagaatc

SEQ ID NO: 306899 - DNA, 25 bp, Artificial
  probe
  misc_feature (1)..(25): SEQ ID NO: 1841; WAN024DLJ; Start 200; Stop 224
agctcaacaactatcaagaatctcc

SEQ ID NO: 306900 - DNA, 25 bp, Artificial
  probe
  misc_feature (1)..(25): SEQ ID NO: 1841; WAN024DLJ; Start 198; Stop 222
caagctcaacaactatcaagaatct

SEQ ID NO: 306901 - DNA, 25 bp, Artificial
  probe
  misc_feature (1)..(25): SEQ ID NO: 1841; WAN024DLJ; Start 206; Stop 230
acaactatcaagaatctccacatat

SEQ ID NO: 306902 - DNA, 25 bp, Artificial
  probe
  misc_feature (1)..(25): SEQ ID NO: 1841; WAN024DLJ; Start 199; Stop 223
aagctcaacaactatcaagaatctc

SEQ ID NO: 306903 - DNA, 25 bp, Artificial
  probe
  misc_feature (1)..(25): SEQ ID NO: 1841; WAN024DLJ; Start 574; Stop 598
ttgtatatgaagcaaggactcttaa

SEQ ID NO: 306904 - DNA, 25 bp, Artificial
  probe
  misc_feature (1)..(25): SEQ ID NO: 1841; WAN024DLJ; Start 570; Stop 594
tcgattgtatatgaagcaaggactc

SEQ ID NO: 306905 - DNA, 25 bp, Artificial
  probe
  misc_feature (1)..(25): SEQ ID NO: 1841; WAN024DLJ; Start 573; Stop 597
attgtatatgaagcaaggactctta

SEQ ID NO: 306906 - DNA, 25 bp, Artificial
  probe
  misc_feature (1)..(25): SEQ ID NO: 1841; WAN024DLJ; Start 450; Stop 474
gacctggtttgaactctatctcttt

SEQ ID NO: 306907 - DNA, 25 bp, Artificial
  probe
  misc_feature (1)..(25): SEQ ID NO: 1841; WAN024DLJ; Start 195; Stop 219
gcacaagctcaacaactatcaagaa

SEQ ID NO: 306908 - DNA, 25 bp, Artificial
  probe
  misc_feature (1)..(25): SEQ ID NO: 1841; WAN024DLJ; Start 208; Stop 232
aactatcaagaatctccacatatgc

SEQ ID NO: 306909 - DNA, 25 bp, Artificial
  probe
  misc_feature (1)..(25): SEQ ID NO: 1841; WAN024DLJ; Start 449; Stop 473
ggacctggtttgaactctatctctt

SEQ ID NO: 306910 - DNA, 25 bp, Artificial
  probe
  misc_feature (1)..(25): SEQ ID NO: 1841; WAN024DLJ; Start 447; Stop 471
ttggacctggtttgaactctatctc

SEQ ID NO: 306911 - DNA, 25 bp, Artificial
  probe
  misc_feature (1)..(25): SEQ ID NO: 1841; WAN024DLJ; Start 446; Stop 470
cttggacctggtttgaactctatct

SEQ ID NO: 306912 - DNA, 25 bp, Artificial
  probe
  misc_feature (1)..(25): SEQ ID NO: 1841; WAN024DLJ; Start 445; Stop 469
tcttggacctggtttgaactctatc

SEQ ID NO: 306913 - DNA, 25 bp, Artificial
  probe
  misc_feature (1)..(25): SEQ ID NO: 1841; WAN024DLJ; Start 89; Stop 113
taacagcttctcagttgtccaagtt

SEQ ID NO: 306914 - DNA, 25 bp, Artificial
  probe
  misc_feature (1)..(25): SEQ ID NO: 1841; WAN024DLJ; Start 575; Stop 599
tgtatatgaagcaaggactcttaaa

SEQ ID NO: 306915 - DNA, 25 bp, Artificial
  probe
  misc_feature (1)..(25): SEQ ID NO: 1841; WAN024DLJ; Start 88; Stop 112
ctaacagcttctcagttgtccaagt

SEQ ID NO: 306916 - DNA, 25 bp, Artificial
  probe
  misc_feature (1)..(25): SEQ ID NO: 1841; WAN024DLJ; Start 448; Stop 472
tggacctggtttgaactctatctct

SEQ ID NO: 306917 - DNA, 25 bp, Artificial
  probe
  misc_feature (1)..(25): SEQ ID NO: 1841; WAN024DLJ; Start 207; Stop 231
caactatcaagaatctccacatatg

SEQ ID NO: 306918 - DNA, 25 bp, Artificial
  probe
  misc_feature (1)..(25): SEQ ID NO: 1841; WAN024DLJ; Start 444; Stop 468
gtcttggacctggtttgaactctat

SEQ ID NO: 306919 - DNA, 25 bp, Artificial
  probe
  misc_feature (1)..(25): SEQ ID NO: 1841; WAN024DLJ; Start 569; Stop 593
atcgattgtatatgaagcaaggact

SEQ ID NO: 306920 - DNA, 25 bp, Artificial
  probe
  misc_feature (1)..(25): SEQ ID NO: 1841; WAN024DLJ; Start 194; Stop 218
ggcacaagctcaacaactatcaaga

SEQ ID NO: 306921 - DNA, 25 bp, Artificial
  probe
  misc_feature (1)..(25): SEQ ID NO: 1841; WAN024DLJ; Start 453; Stop 477
ctggtttgaactctatctcttttgc

SEQ ID NO: 306922 - DNA, 25 bp, Artificial
  probe
  misc_feature (1)..(25): SEQ ID NO: 1841; WAN024DLJ; Start 452; Stop 476
cctggtttgaactctatctcttttg

SEQ ID NO: 306923 - DNA, 25 bp, Artificial
  probe
  misc_feature (1)..(25): SEQ ID NO: 1842; WAN024C9F; Start 205; Stop 229
atgaagcagttgattgttacagatt

SEQ ID NO: 306924 - DNA, 25 bp, Artificial
  probe
  misc_feature (1)..(25): SEQ ID NO: 1842; WAN024C9F; Start 204; Stop 228
aatgaagcagttgattgttacagat

SEQ ID NO: 306925 - DNA, 25 bp, Artificial
  probe
  misc_feature (1)..(25): SEQ ID NO: 1842; WAN024C9F; Start 348; Stop 372
tgctaatatgcttctacatcatgtg

SEQ ID NO: 306926 - DNA, 25 bp, Artificial
  probe
  misc_feature (1)..(25): SEQ ID NO: 1842; WAN024C9F; Start 349; Stop 373
gctaatatgcttctacatcatgtga

SEQ ID NO: 306927 - DNA, 25 bp, Artificial
  probe
  misc_feature (1)..(25): SEQ ID NO: 1842; WAN024C9F; Start 253; Stop 277
acgaagtcagtgattggaaatagaa

SEQ ID NO: 306928 - DNA, 25 bp, Artificial
  probe
  misc_feature (1)..(25): SEQ ID NO: 1842; WAN024C9F; Start 252; Stop 276
aacgaagtcagtgattggaaataga

SEQ ID NO: 306929 - DNA, 25 bp, Artificial
  probe
  misc_feature (1)..(25): SEQ ID NO: 1842; WAN024C9F; Start 392; Stop 416
tctctgaggtgaatagggtcttaaa

SEQ ID NO: 306930 - DNA, 25 bp, Artificial
  probe
  misc_feature (1)..(25): SEQ ID NO: 1842; WAN024C9F; Start 737; Stop 761
aagaatatggtatgtttatcgctcg

SEQ ID NO: 306931 - DNA, 25 bp, Artificial
  probe
  misc_feature (1)..(25): SEQ ID NO: 1842; WAN024C9F; Start 254; Stop 278
cgaagtcagtgattggaaatagaaa

SEQ ID NO: 306932 - DNA, 25 bp, Artificial
  probe
  misc_feature (1)..(25): SEQ ID NO: 1842; WAN024C9F; Start 347; Stop 371
ttgctaatatgcttctacatcatgt

SEQ ID NO: 306933 - DNA, 25 bp, Artificial
  probe
  misc_feature (1)..(25): SEQ ID NO: 1842; WAN024C9F; Start 206; Stop 230
tgaagcagttgattgttacagattt

SEQ ID NO: 306934 - DNA, 25 bp, Artificial
  probe
  misc_feature (1)..(25): SEQ ID NO: 1842; WAN024C9F; Start 203; Stop 227
aaatgaagcagttgattgttacaga

SEQ ID NO: 306935 - DNA, 25 bp, Artificial
  probe
  misc_feature (1)..(25): SEQ ID NO: 1842; WAN024C9F; Start 251; Stop 275
caacgaagtcagtgattggaaatag

SEQ ID NO: 306936 - DNA, 25 bp, Artificial
  probe
  misc_feature (1)..(25): SEQ ID NO: 1842; WAN024C9F; Start 583; Stop 607
ctctatgatgatgagttacaggtaa

SEQ ID NO: 306937 - DNA, 25 bp, Artificial
  probe
  misc_feature (1)..(25): SEQ ID NO: 1842; WAN024C9F; Start 256; Stop 280
aagtcagtgattggaaatagaaaca

SEQ ID NO: 306938 - DNA, 25 bp, Artificial
  probe
  misc_feature (1)..(25): SEQ ID NO: 1842; WAN024C9F; Start 456; Stop 480
tggagttgtaaattatttggcaagt

SEQ ID NO: 306939 - DNA, 25 bp, Artificial
  probe
  misc_feature (1)..(25): SEQ ID NO: 1842; WAN024C9F; Start 250; Stop 274
tcaacgaagtcagtgattggaaata

SEQ ID NO: 306940 - DNA, 25 bp, Artificial
  probe
  misc_feature (1)..(25): SEQ ID NO: 1842; WAN024C9F; Start 656; Stop 680
cagaaataggttcactagaagagga

SEQ ID NO: 306941 - DNA, 25 bp, Artificial
  probe
  misc_feature (1)..(25): SEQ ID NO: 1842; WAN024C9F; Start 655; Stop 679
tcagaaataggttcactagaagagg

SEQ ID NO: 306942 - DNA, 25 bp, Artificial
  probe
  misc_feature (1)..(25): SEQ ID NO: 1842; WAN024C9F; Start 346; Stop 370
attgctaatatgcttctacatcatg

SEQ ID NO: 306943 - DNA, 25 bp, Artificial
  probe
  misc_feature (1)..(25): SEQ ID NO: 1842; WAN024C9F; Start 391; Stop 415
ctctctgaggtgaatagggtcttaa

SEQ ID NO: 306944 - DNA, 25 bp, Artificial
  probe
  misc_feature (1)..(25): SEQ ID NO: 1842; WAN024C9F; Start 255; Stop 279
gaagtcagtgattggaaatagaaac

SEQ ID NO: 306945 - DNA, 25 bp, Artificial
  probe
  misc_feature (1)..(25): SEQ ID NO: 1842; WAN024C9F; Start 155; Stop 179
gatgtggtacaggagaattgtggaa

SEQ ID NO: 306946 - DNA, 25 bp, Artificial
  probe
  misc_feature (1)..(25): SEQ ID NO: 1842; WAN024C9F; Start 619; Stop 643
gacctagttaaatacatccaatcgt

SEQ ID NO: 306947 - DNA, 25 bp, Artificial
  probe
  misc_feature (1)..(25): SEQ ID NO: 1842; WAN024C9F; Start 618; Stop 642
tgacctagttaaatacatccaatcg

SEQ ID NO: 306948 - DNA, 25 bp, Artificial
  probe
  misc_feature (1)..(25): SEQ ID NO: 1842; WAN024C9F; Start 566; Stop 590
actctgtcgatacattactctatga

SEQ ID NO: 306949 - DNA, 25 bp, Artificial
  probe
  misc_feature (1)..(25): SEQ ID NO: 1842; WAN024C9F; Start 257; Stop 281
agtcagtgattggaaatagaaacaa

SEQ ID NO: 306950 - DNA, 25 bp, Artificial
  probe
  misc_feature (1)..(25): SEQ ID NO: 1842; WAN024C9F; Start 657; Stop 681
agaaataggttcactagaagaggaa

SEQ ID NO: 306951 - DNA, 25 bp, Artificial
  probe
  misc_feature (1)..(25): SEQ ID NO: 1842; WAN024C9F; Start 457; Stop 481
ggagttgtaaattatttggcaagtt

SEQ ID NO: 306952 - DNA, 25 bp, Artificial
  probe
  misc_feature (1)..(25): SEQ ID NO: 1842; WAN024C9F; Start 120; Stop 144
ccaaatcactgatgaagtaaaggtt

SEQ ID NO: 306953 - DNA, 25 bp, Artificial
  probe
  misc_feature (1)..(25): SEQ ID NO: 1842; WAN024C9F; Start 352; Stop 376
aatatgcttctacatcatgtgaatg

SEQ ID NO: 306954 - DNA, 25 bp, Artificial
  probe
  misc_feature (1)..(25): SEQ ID NO: 1842; WAN024C9F; Start 390; Stop 414
tctctctgaggtgaatagggtctta

SEQ ID NO: 306955 - DNA, 25 bp, Artificial
  probe
  misc_feature (1)..(25): SEQ ID NO: 1842; WAN024C9F; Start 50; Stop 74
ttcgagtagaattgcataagaagta

SEQ ID NO: 306956 - DNA, 25 bp, Artificial
  probe
  misc_feature (1)..(25): SEQ ID NO: 1843; WAN024D2E; Start 516; Stop 540
ggaggttatgaatctcttggtggat

SEQ ID NO: 306957 - DNA, 25 bp, Artificial
  probe
  misc_feature (1)..(25): SEQ ID NO: 1843; WAN024D2E; Start 517; Stop 541
gaggttatgaatctcttggtggatt

SEQ ID NO: 306958 - DNA, 25 bp, Artificial
  probe
  misc_feature (1)..(25): SEQ ID NO: 1843; WAN024D2E; Start 514; Stop 538
gaggaggttatgaatctcttggtgg

SEQ ID NO: 306959 - DNA, 25 bp, Artificial
  probe
  misc_feature (1)..(25): SEQ ID NO: 1843; WAN024D2E; Start 85; Stop 109
gtttatgccttaatcggaaagagtg

SEQ ID NO: 306960 - DNA, 25 bp, Artificial
  probe
  misc_feature (1)..(25): SEQ ID NO: 1843; WAN024D2E; Start 515; Stop 539
aggaggttatgaatctcttggtgga

SEQ ID NO: 306961 - DNA, 25 bp, Artificial
  probe
  misc_feature (1)..(25): SEQ ID NO: 1843; WAN024D2E; Start 557; Stop 581
gaattatcatcattgcgacccataa

SEQ ID NO: 306962 - DNA, 25 bp, Artificial
  probe
  misc_feature (1)..(25): SEQ ID NO: 1843; WAN024D2E; Start 560; Stop 584
ttatcatcattgcgacccataatcc

SEQ ID NO: 306963 - DNA, 25 bp, Artificial
  probe
  misc_feature (1)..(25): SEQ ID NO: 1843; WAN024D2E; Start 86; Stop 110
tttatgccttaatcggaaagagtgg

SEQ ID NO: 306964 - DNA, 25 bp, Artificial
  probe
  misc_feature (1)..(25): SEQ ID NO: 1843; WAN024D2E; Start 84; Stop 108
ggtttatgccttaatcggaaagagt

SEQ ID NO: 306965 - DNA, 25 bp, Artificial
  probe
  misc_feature (1)..(25): SEQ ID NO: 1843; WAN024D2E; Start 556; Stop 580
cgaattatcatcattgcgacccata

SEQ ID NO: 306966 - DNA, 25 bp, Artificial
  probe
  misc_feature (1)..(25): SEQ ID NO: 1843; WAN024D2E; Start 88; Stop 112
tatgccttaatcggaaagagtggaa

SEQ ID NO: 306967 - DNA, 25 bp, Artificial
  probe
  misc_feature (1)..(25): SEQ ID NO: 1843; WAN024D2E; Start 87; Stop 111
ttatgccttaatcggaaagagtgga

SEQ ID NO: 306968 - DNA, 25 bp, Artificial
  probe
  misc_feature (1)..(25): SEQ ID NO: 1843; WAN024D2E; Start 83; Stop 107
aggtttatgccttaatcggaaagag

SEQ ID NO: 306969 - DNA, 25 bp, Artificial
  probe
  misc_feature (1)..(25): SEQ ID NO: 1843; WAN024D2E; Start 561; Stop 585
tatcatcattgcgacccataatccc

SEQ ID NO: 306970 - DNA, 25 bp, Artificial
  probe
  misc_feature (1)..(25): SEQ ID NO: 1843; WAN024D2E; Start 519; Stop 543
ggttatgaatctcttggtggatttg

SEQ ID NO: 306971 - DNA, 25 bp, Artificial
  probe
  misc_feature (1)..(25): SEQ ID NO: 1843; WAN024D2E; Start 518; Stop 542
aggttatgaatctcttggtggattt

SEQ ID NO: 306972 - DNA, 25 bp, Artificial
  probe
  misc_feature (1)..(25): SEQ ID NO: 1843; WAN024D2E; Start 523; Stop 547
atgaatctcttggtggatttgaaag

SEQ ID NO: 306973 - DNA, 25 bp, Artificial
  probe
  misc_feature (1)..(25): SEQ ID NO: 1843; WAN024D2E; Start 510; Stop 534
ttcagaggaggttatgaatctcttg

SEQ ID NO: 306974 - DNA, 25 bp, Artificial
  probe
  misc_feature (1)..(25): SEQ ID NO: 1843; WAN024D2E; Start 520; Stop 544
gttatgaatctcttggtggatttga

SEQ ID NO: 306975 - DNA, 25 bp, Artificial
  probe
  misc_feature (1)..(25): SEQ ID NO: 1843; WAN024D2E; Start 559; Stop 583
attatcatcattgcgacccataatc

SEQ ID NO: 306976 - DNA, 25 bp, Artificial
  probe
  misc_feature (1)..(25): SEQ ID NO: 1843; WAN024D2E; Start 558; Stop 582
aattatcatcattgcgacccataat

SEQ ID NO: 306977 - DNA, 25 bp, Artificial
  probe
  misc_feature (1)..(25): SEQ ID NO: 1843; WAN024D2E; Start 130; Stop 154
ctgaatatcttgggaaagctagaaa

SEQ ID NO: 306978 - DNA, 25 bp, Artificial
  probe
  misc_feature (1)..(25): SEQ ID NO: 1843; WAN024D2E; Start 89; Stop 113
atgccttaatcggaaagagtggaag

SEQ ID NO: 306979 - DNA, 25 bp, Artificial
  probe
  misc_feature (1)..(25): SEQ ID NO: 1843; WAN024D2E; Start 511; Stop 535
tcagaggaggttatgaatctcttgg

SEQ ID NO: 306980 - DNA, 25 bp, Artificial
  probe
  misc_feature (1)..(25): SEQ ID NO: 1843; WAN024D2E; Start 522; Stop 546
tatgaatctcttggtggatttgaaa

SEQ ID NO: 306981 - DNA, 25 bp, Artificial
  probe
  misc_feature (1)..(25): SEQ ID NO: 1843; WAN024D2E; Start 521; Stop 545
ttatgaatctcttggtggatttgaa

SEQ ID NO: 306982 - DNA, 25 bp, Artificial
  probe
  misc_feature (1)..(25): SEQ ID NO: 1843; WAN024D2E; Start 513; Stop 537
agaggaggttatgaatctcttggtg

SEQ ID NO: 306983 - DNA, 25 bp, Artificial
  probe
  misc_feature (1)..(25): SEQ ID NO: 1843; WAN024D2E; Start 512; Stop 536
cagaggaggttatgaatctcttggt

SEQ ID NO: 306984 - DNA, 25 bp, Artificial
  probe
  misc_feature (1)..(25): SEQ ID NO: 1843; WAN024D2E; Start 529; Stop 553
ctcttggtggatttgaaagatgaaa

SEQ ID NO: 306985 - DNA, 25 bp, Artificial
  probe
  misc_feature (1)..(25): SEQ ID NO: 1843; WAN024D2E; Start 528; Stop 552
tctcttggtggatttgaaagatgaa

SEQ ID NO: 306986 - DNA, 25 bp, Artificial
  probe
  misc_feature (1)..(25): SEQ ID NO: 1843; WAN024D2E; Start 527; Stop 551
atctcttggtggatttgaaagatga

SEQ ID NO: 306987 - DNA, 25 bp, Artificial
  probe
  misc_feature (1)..(25): SEQ ID NO: 1843; WAN024D2E; Start 524; Stop 548
tgaatctcttggtggatttgaaaga

SEQ ID NO: 306988 - DNA, 25 bp, Artificial
  probe
  misc_feature (1)..(25): SEQ ID NO: 1843; WAN024D2E; Start 526; Stop 550
aatctcttggtggatttgaaagatg

SEQ ID NO: 306989 - DNA, 25 bp, Artificial
  probe
  misc_feature (1)..(25): SEQ ID NO: 1844; WAN024AV7; Start 76; Stop 100
gaggtatcttgtcattcagtttctg

SEQ ID NO: 306990 - DNA, 25 bp, Artificial
  probe
  misc_feature (1)..(25): SEQ ID NO: 1844; WAN024AV7; Start 167; Stop 191
ccaatttattacgatttaagaaccg

SEQ ID NO: 306991 - DNA, 25 bp, Artificial
  probe
  misc_feature (1)..(25): SEQ ID NO: 1844; WAN024AV7; Start 166; Stop 190
cccaatttattacgatttaagaacc

SEQ ID NO: 306992 - DNA, 25 bp, Artificial
  probe
  misc_feature (1)..(25): SEQ ID NO: 1844; WAN024AV7; Start 163; Stop 187
tctcccaatttattacgatttaaga

SEQ ID NO: 306993 - DNA, 25 bp, Artificial
  probe
  misc_feature (1)..(25): SEQ ID NO: 1844; WAN024AV7; Start 77; Stop 101
aggtatcttgtcattcagtttctga

SEQ ID NO: 306994 - DNA, 25 bp, Artificial
  probe
  misc_feature (1)..(25): SEQ ID NO: 1844; WAN024AV7; Start 165; Stop 189
tcccaatttattacgatttaagaac

SEQ ID NO: 306995 - DNA, 25 bp, Artificial
  probe
  misc_feature (1)..(25): SEQ ID NO: 1844; WAN024AV7; Start 164; Stop 188
ctcccaatttattacgatttaagaa

SEQ ID NO: 306996 - DNA, 25 bp, Artificial
  probe
  misc_feature (1)..(25): SEQ ID NO: 1844; WAN024AV7; Start 162; Stop 186
atctcccaatttattacgatttaag

SEQ ID NO: 306997 - DNA, 25 bp, Artificial
  probe
  misc_feature (1)..(25): SEQ ID NO: 1844; WAN024AV7; Start 168; Stop 192
caatttattacgatttaagaaccgt

SEQ ID NO: 306998 - DNA, 25 bp, Artificial
  probe
  misc_feature (1)..(25): SEQ ID NO: 1844; WAN024AV7; Start 199; Stop 223
ctaagattaacggatttcgttgaga

SEQ ID NO: 306999 - DNA, 25 bp, Artificial
  probe
  misc_feature (1)..(25): SEQ ID NO: 1844; WAN024AV7; Start 198; Stop 222
tctaagattaacggatttcgttgag

SEQ ID NO: 307000 - DNA, 25 bp, Artificial
  probe
  misc_feature (1)..(25): SEQ ID NO: 1844; WAN024AV7; Start 200; Stop 224
taagattaacggatttcgttgagat

SEQ ID NO: 307001 - DNA, 25 bp, Artificial
  probe
  misc_feature (1)..(25): SEQ ID NO: 1844; WAN024AV7; Start 197; Stop 221
atctaagattaacggatttcgttga

SEQ ID NO: 307002 - DNA, 25 bp, Artificial
  probe
  misc_feature (1)..(25): SEQ ID NO: 1844; WAN024AV7; Start 196; Stop 220
aatctaagattaacggatttcgttg

SEQ ID NO: 307003 - DNA, 25 bp, Artificial
  probe
  misc_feature (1)..(25): SEQ ID NO: 1845; WAN024GFF; Start 269; Stop 293
cgagttacttctctcagttcatagg

SEQ ID NO: 307004 - DNA, 25 bp, Artificial
  probe
  misc_feature (1)..(25): SEQ ID NO: 1845; WAN024GFF; Start 272; Stop 296
gttacttctctcagttcataggcac

SEQ ID NO: 307005 - DNA, 25 bp, Artificial
  probe
  misc_feature (1)..(25): SEQ ID NO: 1845; WAN024GFF; Start 271; Stop 295
agttacttctctcagttcataggca

SEQ ID NO: 307006 - DNA, 25 bp, Artificial
  probe
  misc_feature (1)..(25): SEQ ID NO: 1845; WAN024GFF; Start 270; Stop 294
gagttacttctctcagttcataggc

SEQ ID NO: 307007 - DNA, 25 bp, Artificial
  probe
  misc_feature (1)..(25): SEQ ID NO: 1845; WAN024GFF; Start 268; Stop 292
gcgagttacttctctcagttcatag

SEQ ID NO: 307008 - DNA, 25 bp, Artificial
  probe
  misc_feature (1)..(25): SEQ ID NO: 1845; WAN024GFF; Start 273; Stop 297
ttacttctctcagttcataggcacc

SEQ ID NO: 307009 - DNA, 25 bp, Artificial
  probe
  misc_feature (1)..(25): SEQ ID NO: 1845; WAN024GFF; Start 267; Stop 291
ggcgagttacttctctcagttcata

SEQ ID NO: 307010 - DNA, 25 bp, Artificial
  probe
  misc_feature (1)..(25): SEQ ID NO: 1845; WAN024GFF; Start 263; Stop 287
aattggcgagttacttctctcagtt

SEQ ID NO: 307011 - DNA, 25 bp, Artificial
  probe
  misc_feature (1)..(25): SEQ ID NO: 1845; WAN024GFF; Start 344; Stop 368
atggtttctctcaaatccttcaaag

SEQ ID NO: 307012 - DNA, 25 bp, Artificial
  probe
  misc_feature (1)..(25): SEQ ID NO: 1845; WAN024GFF; Start 136; Stop 160
caaagtgttatagaggaaatgtgga

SEQ ID NO: 307013 - DNA, 25 bp, Artificial
  probe
  misc_feature (1)..(25): SEQ ID NO: 1845; WAN024GFF; Start 274; Stop 298
tacttctctcagttcataggcacca

SEQ ID NO: 307014 - DNA, 25 bp, Artificial
  probe
  misc_feature (1)..(25): SEQ ID NO: 1845; WAN024GFF; Start 264; Stop 288
attggcgagttacttctctcagttc

SEQ ID NO: 307015 - DNA, 25 bp, Artificial
  probe
  misc_feature (1)..(25): SEQ ID NO: 1845; WAN024GFF; Start 260; Stop 284
ttaaattggcgagttacttctctca

SEQ ID NO: 307016 - DNA, 25 bp, Artificial
  probe
  misc_feature (1)..(25): SEQ ID NO: 1845; WAN024GFF; Start 276; Stop 300
cttctctcagttcataggcaccaac

SEQ ID NO: 307017 - DNA, 25 bp, Artificial
  probe
  misc_feature (1)..(25): SEQ ID NO: 1845; WAN024GFF; Start 261; Stop 285
taaattggcgagttacttctctcag

SEQ ID NO: 307018 - DNA, 25 bp, Artificial
  probe
  misc_feature (1)..(25): SEQ ID NO: 1845; WAN024GFF; Start 258; Stop 282
cattaaattggcgagttacttctct

SEQ ID NO: 307019 - DNA, 25 bp, Artificial
  probe
  misc_feature (1)..(25): SEQ ID NO: 1845; WAN024GFF; Start 343; Stop 367
catggtttctctcaaatccttcaaa

SEQ ID NO: 307020 - DNA, 25 bp, Artificial
  probe
  misc_feature (1)..(25): SEQ ID NO: 1845; WAN024GFF; Start 259; Stop 283
attaaattggcgagttacttctctc

SEQ ID NO: 307021 - DNA, 25 bp, Artificial
  probe
  misc_feature (1)..(25): SEQ ID NO: 1845; WAN024GFF; Start 257; Stop 281
gcattaaattggcgagttacttctc

SEQ ID NO: 307022 - DNA, 25 bp, Artificial
  probe
  misc_feature (1)..(25): SEQ ID NO: 1845; WAN024GFF; Start 342; Stop 366
acatggtttctctcaaatccttcaa

SEQ ID NO: 307023 - DNA, 25 bp, Artificial
  probe
  misc_feature (1)..(25): SEQ ID NO: 1845; WAN024GFF; Start 1; Stop 25
atgattgatttcgtcagagagacaa

SEQ ID NO: 307024 - DNA, 25 bp, Artificial
  probe
  misc_feature (1)..(25): SEQ ID NO: 1845; WAN024GFF; Start 138; Stop 162
aagtgttatagaggaaatgtggatt

SEQ ID NO: 307025 - DNA, 25 bp, Artificial
  probe
  misc_feature (1)..(25): SEQ ID NO: 1845; WAN024GFF; Start 137; Stop 161
aaagtgttatagaggaaatgtggat

SEQ ID NO: 307026 - DNA, 25 bp, Artificial
  probe
  misc_feature (1)..(25): SEQ ID NO: 1845; WAN024GFF; Start 340; Stop 364
caacatggtttctctcaaatccttc

SEQ ID NO: 307027 - DNA, 25 bp, Artificial
  probe
  misc_feature (1)..(25): SEQ ID NO: 1845; WAN024GFF; Start 8; Stop 32
atttcgtcagagagacaaatcaagt

SEQ ID NO: 307028 - DNA, 25 bp, Artificial
  probe
  misc_feature (1)..(25): SEQ ID NO: 1845; WAN024GFF; Start 2; Stop 26
tgattgatttcgtcagagagacaaa

SEQ ID NO: 307029 - DNA, 25 bp, Artificial
  probe
  misc_feature (1)..(25): SEQ ID NO: 1845; WAN024GFF; Start 3; Stop 27
gattgatttcgtcagagagacaaat

SEQ ID NO: 307030 - DNA, 25 bp, Artificial
  probe
  misc_feature (1)..(25): SEQ ID NO: 1845; WAN024GFF; Start 341; Stop 365
aacatggtttctctcaaatccttca

SEQ ID NO: 307031 - DNA, 25 bp, Artificial
  probe
  misc_feature (1)..(25): SEQ ID NO: 1845; WAN024GFF; Start 9; Stop 33
tttcgtcagagagacaaatcaagtc

SEQ ID NO: 307032 - DNA, 25 bp, Artificial
  probe
  misc_feature (1)..(25): SEQ ID NO: 1845; WAN024GFF; Start 216; Stop 240
tacgaatagctaccatcaactgatc

SEQ ID NO: 307033 - DNA, 25 bp, Artificial
  probe
  misc_feature (1)..(25): SEQ ID NO: 1845; WAN024GFF; Start 215; Stop 239
ctacgaatagctaccatcaactgat

SEQ ID NO: 307034 - DNA, 25 bp, Artificial
  probe
  misc_feature (1)..(25): SEQ ID NO: 1845; WAN024GFF; Start 275; Stop 299
acttctctcagttcataggcaccaa

SEQ ID NO: 307035 - DNA, 25 bp, Artificial
  probe
  misc_feature (1)..(25): SEQ ID NO: 1845; WAN024GFF; Start 130; Stop 154
ggtgtccaaagtgttatagaggaaa

SEQ ID NO: 307036 - DNA, 25 bp, Artificial
  probe
  misc_feature (1)..(25): SEQ ID NO: 1846; WAN024EWU; Start 71; Stop 95
ttccagagcaatccattatcagttc

SEQ ID NO: 307037 - DNA, 25 bp, Artificial
  probe
  misc_feature (1)..(25): SEQ ID NO: 1846; WAN024EWU; Start 73; Stop 97
ccagagcaatccattatcagttcag

SEQ ID NO: 307038 - DNA, 25 bp, Artificial
  probe
  misc_feature (1)..(25): SEQ ID NO: 1846; WAN024EWU; Start 79; Stop 103
caatccattatcagttcagccagtc

SEQ ID NO: 307039 - DNA, 25 bp, Artificial
  probe
  misc_feature (1)..(25): SEQ ID NO: 1846; WAN024EWU; Start 72; Stop 96
tccagagcaatccattatcagttca

SEQ ID NO: 307040 - DNA, 25 bp, Artificial
  probe
  misc_feature (1)..(25): SEQ ID NO: 1846; WAN024EWU; Start 80; Stop 104
aatccattatcagttcagccagtca

SEQ ID NO: 307041 - DNA, 25 bp, Artificial
  probe
  misc_feature (1)..(25): SEQ ID NO: 1846; WAN024EWU; Start 74; Stop 98
cagagcaatccattatcagttcagc

SEQ ID NO: 307042 - DNA, 25 bp, Artificial
  probe
  misc_feature (1)..(25): SEQ ID NO: 1846; WAN024EWU; Start 81; Stop 105
atccattatcagttcagccagtcac

SEQ ID NO: 307043 - DNA, 25 bp, Artificial
  probe
  misc_feature (1)..(25): SEQ ID NO: 1846; WAN024EWU; Start 144; Stop 168
gattccgattctctcacaggtcttc

SEQ ID NO: 307044 - DNA, 25 bp, Artificial
  probe
  misc_feature (1)..(25): SEQ ID NO: 1846; WAN024EWU; Start 512; Stop 536
taacggagttactgatcttgattca

SEQ ID NO: 307045 - DNA, 25 bp, Artificial
  probe
  misc_feature (1)..(25): SEQ ID NO: 1846; WAN024EWU; Start 70; Stop 94
tttccagagcaatccattatcagtt

SEQ ID NO: 307046 - DNA, 25 bp, Artificial
  probe
  misc_feature (1)..(25): SEQ ID NO: 1846; WAN024EWU; Start 75; Stop 99
agagcaatccattatcagttcagcc

SEQ ID NO: 307047 - DNA, 25 bp, Artificial
  probe
  misc_feature (1)..(25): SEQ ID NO: 1846; WAN024EWU; Start 239; Stop 263
gactcctctttctgctttactcttg

SEQ ID NO: 307048 - DNA, 25 bp, Artificial
  probe
  misc_feature (1)..(25): SEQ ID NO: 1846; WAN024EWU; Start 133; Stop 157
cccttagatttgattccgattctct

SEQ ID NO: 307049 - DNA, 25 bp, Artificial
  probe
  misc_feature (1)..(25): SEQ ID NO: 1846; WAN024EWU; Start 132; Stop 156
tcccttagatttgattccgattctc

SEQ ID NO: 307050 - DNA, 25 bp, Artificial
  probe
  misc_feature (1)..(25): SEQ ID NO: 1846; WAN024EWU; Start 131; Stop 155
gtcccttagatttgattccgattct

SEQ ID NO: 307051 - DNA, 25 bp, Artificial
  probe
  misc_feature (1)..(25): SEQ ID NO: 1846; WAN024EWU; Start 77; Stop 101
agcaatccattatcagttcagccag

SEQ ID NO: 307052 - DNA, 25 bp, Artificial
  probe
  misc_feature (1)..(25): SEQ ID NO: 1846; WAN024EWU; Start 76; Stop 100
gagcaatccattatcagttcagcca

SEQ ID NO: 307053 - DNA, 25 bp, Artificial
  probe
  misc_feature (1)..(25): SEQ ID NO: 1846; WAN024EWU; Start 406; Stop 430
gtcatggtctccttcctcatacttg

SEQ ID NO: 307054 - DNA, 25 bp, Artificial
  probe
  misc_feature (1)..(25): SEQ ID NO: 1846; WAN024EWU; Start 134; Stop 158
ccttagatttgattccgattctctc

SEQ ID NO: 307055 - DNA, 25 bp, Artificial
  probe
  misc_feature (1)..(25): SEQ ID NO: 1846; WAN024EWU; Start 137; Stop 161
tagatttgattccgattctctcaca

SEQ ID NO: 307056 - DNA, 25 bp, Artificial
  probe
  misc_feature (1)..(25): SEQ ID NO: 1846; WAN024EWU; Start 147; Stop 171
tccgattctctcacaggtcttcaat

SEQ ID NO: 307057 - DNA, 25 bp, Artificial
  probe
  misc_feature (1)..(25): SEQ ID NO: 1846; WAN024EWU; Start 145; Stop 169
attccgattctctcacaggtcttca

SEQ ID NO: 307058 - DNA, 25 bp, Artificial
  probe
  misc_feature (1)..(25): SEQ ID NO: 1846; WAN024EWU; Start 130; Stop 154
cgtcccttagatttgattccgattc

SEQ ID NO: 307059 - DNA, 25 bp, Artificial
  probe
  misc_feature (1)..(25): SEQ ID NO: 1846; WAN024EWU; Start 138; Stop 162
agatttgattccgattctctcacag

SEQ ID NO: 307060 - DNA, 25 bp, Artificial
  probe
  misc_feature (1)..(25): SEQ ID NO: 1846; WAN024EWU; Start 41; Stop 65
cttcctttcttggtttggtcattga

SEQ ID NO: 307061 - DNA, 25 bp, Artificial
  probe
  misc_feature (1)..(25): SEQ ID NO: 1846; WAN024EWU; Start 78; Stop 102
gcaatccattatcagttcagccagt

SEQ ID NO: 307062 - DNA, 25 bp, Artificial
  probe
  misc_feature (1)..(25): SEQ ID NO: 1846; WAN024EWU; Start 146; Stop 170
ttccgattctctcacaggtcttcaa

SEQ ID NO: 307063 - DNA, 25 bp, Artificial
  probe
  misc_feature (1)..(25): SEQ ID NO: 1846; WAN024EWU; Start 136; Stop 160
ttagatttgattccgattctctcac

SEQ ID NO: 307064 - DNA, 25 bp, Artificial
  probe
  misc_feature (1)..(25): SEQ ID NO: 1846; WAN024EWU; Start 139; Stop 163
gatttgattccgattctctcacagg

SEQ ID NO: 307065 - DNA, 25 bp, Artificial
  probe
  misc_feature (1)..(25): SEQ ID NO: 1846; WAN024EWU; Start 135; Stop 159
cttagatttgattccgattctctca

SEQ ID NO: 307066 - DNA, 25 bp, Artificial
  probe
  misc_feature (1)..(25): SEQ ID NO: 1846; WAN024EWU; Start 143; Stop 167
tgattccgattctctcacaggtctt

SEQ ID NO: 307067 - DNA, 25 bp, Artificial
  probe
  misc_feature (1)..(25): SEQ ID NO: 1846; WAN024EWU; Start 142; Stop 166
ttgattccgattctctcacaggtct

SEQ ID NO: 307068 - DNA, 25 bp, Artificial
  probe
  misc_feature (1)..(25): SEQ ID NO: 1846; WAN024EWU; Start 240; Stop 264
actcctctttctgctttactcttgg

SEQ ID NO: 307069 - DNA, 25 bp, Artificial
  probe
  misc_feature (1)..(25): SEQ ID NO: 1847; WAN024EXW; Start 230; Stop 254
ctgccatcatcattacctacatcaa

SEQ ID NO: 307070 - DNA, 25 bp, Artificial
  probe
  misc_feature (1)..(25): SEQ ID NO: 1847; WAN024EXW; Start 633; Stop 657
tgcttatctgtatgctaatagtctg

SEQ ID NO: 307071 - DNA, 25 bp, Artificial
  probe
  misc_feature (1)..(25): SEQ ID NO: 1847; WAN024EXW; Start 634; Stop 658
gcttatctgtatgctaatagtctga

SEQ ID NO: 307072 - DNA, 25 bp, Artificial
  probe
  misc_feature (1)..(25): SEQ ID NO: 1847; WAN024EXW; Start 632; Stop 656
ctgcttatctgtatgctaatagtct

SEQ ID NO: 307073 - DNA, 25 bp, Artificial
  probe
  misc_feature (1)..(25): SEQ ID NO: 1847; WAN024EXW; Start 631; Stop 655
actgcttatctgtatgctaatagtc

SEQ ID NO: 307074 - DNA, 25 bp, Artificial
  probe
  misc_feature (1)..(25): SEQ ID NO: 1847; WAN024EXW; Start 629; Stop 653
caactgcttatctgtatgctaatag

SEQ ID NO: 307075 - DNA, 25 bp, Artificial
  probe
  misc_feature (1)..(25): SEQ ID NO: 1847; WAN024EXW; Start 582; Stop 606
aagtgtcggaactatcctgattgta

SEQ ID NO: 307076 - DNA, 25 bp, Artificial
  probe
  misc_feature (1)..(25): SEQ ID NO: 1847; WAN024EXW; Start 229; Stop 253
gctgccatcatcattacctacatca

SEQ ID NO: 307077 - DNA, 25 bp, Artificial
  probe
  misc_feature (1)..(25): SEQ ID NO: 1847; WAN024EXW; Start 731; Stop 755
ttaatgttgcggcaggttctagtat

SEQ ID NO: 307078 - DNA, 25 bp, Artificial
  probe
  misc_feature (1)..(25): SEQ ID NO: 1847; WAN024EXW; Start 227; Stop 251
tagctgccatcatcattacctacat

SEQ ID NO: 307079 - DNA, 25 bp, Artificial
  probe
  misc_feature (1)..(25): SEQ ID NO: 1847; WAN024EXW; Start 232; Stop 256
gccatcatcattacctacatcaaag

SEQ ID NO: 307080 - DNA, 25 bp, Artificial
  probe
  misc_feature (1)..(25): SEQ ID NO: 1847; WAN024EXW; Start 231; Stop 255
tgccatcatcattacctacatcaaa

SEQ ID NO: 307081 - DNA, 25 bp, Artificial
  probe
  misc_feature (1)..(25): SEQ ID NO: 1847; WAN024EXW; Start 630; Stop 654
aactgcttatctgtatgctaatagt

SEQ ID NO: 307082 - DNA, 25 bp, Artificial
  probe
  misc_feature (1)..(25): SEQ ID NO: 1847; WAN024EXW; Start 583; Stop 607
agtgtcggaactatcctgattgtag

SEQ ID NO: 307083 - DNA, 25 bp, Artificial
  probe
  misc_feature (1)..(25): SEQ ID NO: 1847; WAN024EXW; Start 516; Stop 540
gcctgtcaatttctatcactacctt

SEQ ID NO: 307084 - DNA, 25 bp, Artificial
  probe
  misc_feature (1)..(25): SEQ ID NO: 1847; WAN024EXW; Start 514; Stop 538
atgcctgtcaatttctatcactacc

SEQ ID NO: 307085 - DNA, 25 bp, Artificial
  probe
  misc_feature (1)..(25): SEQ ID NO: 1847; WAN024EXW; Start 480; Stop 504
ttcctttgatgaactcttggctaaa

SEQ ID NO: 307086 - DNA, 25 bp, Artificial
  probe
  misc_feature (1)..(25): SEQ ID NO: 1847; WAN024EXW; Start 513; Stop 537
aatgcctgtcaatttctatcactac

SEQ ID NO: 307087 - DNA, 25 bp, Artificial
  probe
  misc_feature (1)..(25): SEQ ID NO: 1847; WAN024EXW; Start 226; Stop 250
ctagctgccatcatcattacctaca

SEQ ID NO: 307088 - DNA, 25 bp, Artificial
  probe
  misc_feature (1)..(25): SEQ ID NO: 1847; WAN024EXW; Start 195; Stop 219
cttctttatcggagccattgtcttt

SEQ ID NO: 307089 - DNA, 25 bp, Artificial
  probe
  misc_feature (1)..(25): SEQ ID NO: 1847; WAN024EXW; Start 463; Stop 487
aagcaactcttgataacttcctttg

SEQ ID NO: 307090 - DNA, 25 bp, Artificial
  probe
  misc_feature (1)..(25): SEQ ID NO: 1847; WAN024EXW; Start 517; Stop 541
cctgtcaatttctatcactaccttc

SEQ ID NO: 307091 - DNA, 25 bp, Artificial
  probe
  misc_feature (1)..(25): SEQ ID NO: 1847; WAN024EXW; Start 479; Stop 503
cttcctttgatgaactcttggctaa

SEQ ID NO: 307092 - DNA, 25 bp, Artificial
  probe
  misc_feature (1)..(25): SEQ ID NO: 1847; WAN024EXW; Start 475; Stop 499
ataacttcctttgatgaactcttgg

SEQ ID NO: 307093 - DNA, 25 bp, Artificial
  probe
  misc_feature (1)..(25): SEQ ID NO: 1847; WAN024EXW; Start 465; Stop 489
gcaactcttgataacttcctttgat

SEQ ID NO: 307094 - DNA, 25 bp, Artificial
  probe
  misc_feature (1)..(25): SEQ ID NO: 1847; WAN024EXW; Start 464; Stop 488
agcaactcttgataacttcctttga

SEQ ID NO: 307095 - DNA, 25 bp, Artificial
  probe
  misc_feature (1)..(25): SEQ ID NO: 1847; WAN024EXW; Start 732; Stop 756
taatgttgcggcaggttctagtatc

SEQ ID NO: 307096 - DNA, 25 bp, Artificial
  probe
  misc_feature (1)..(25): SEQ ID NO: 1847; WAN024EXW; Start 299; Stop 323
tttcttctttcttagccctcggtat

SEQ ID NO: 307097 - DNA, 25 bp, Artificial
  probe
  misc_feature (1)..(25): SEQ ID NO: 1847; WAN024EXW; Start 476; Stop 500
taacttcctttgatgaactcttggc

SEQ ID NO: 307098 - DNA, 25 bp, Artificial
  probe
  misc_feature (1)..(25): SEQ ID NO: 1847; WAN024EXW; Start 196; Stop 220
ttctttatcggagccattgtctttg

SEQ ID NO: 307099 - DNA, 25 bp, Artificial
  probe
  misc_feature (1)..(25): SEQ ID NO: 1847; WAN024EXW; Start 515; Stop 539
tgcctgtcaatttctatcactacct

SEQ ID NO: 307100 - DNA, 25 bp, Artificial
  probe
  misc_feature (1)..(25): SEQ ID NO: 1847; WAN024EXW; Start 512; Stop 536
gaatgcctgtcaatttctatcacta

SEQ ID NO: 307101 - DNA, 25 bp, Artificial
  probe
  misc_feature (1)..(25): SEQ ID NO: 1847; WAN024EXW; Start 511; Stop 535
ggaatgcctgtcaatttctatcact

SEQ ID NO: 307102 - DNA, 25 bp, Artificial
  probe
  misc_feature (1)..(25): SEQ ID NO: 1848; WAN024DQY; Start 64; Stop 88
gctattcgtgggatattagatgtac

SEQ ID NO: 307103 - DNA, 25 bp, Artificial
  probe
  misc_feature (1)..(25): SEQ ID NO: 1848; WAN024DQY; Start 62; Stop 86
cagctattcgtgggatattagatgt

SEQ ID NO: 307104 - DNA, 25 bp, Artificial
  probe
  misc_feature (1)..(25): SEQ ID NO: 1848; WAN024DQY; Start 61; Stop 85
tcagctattcgtgggatattagatg

SEQ ID NO: 307105 - DNA, 25 bp, Artificial
  probe
  misc_feature (1)..(25): SEQ ID NO: 1848; WAN024DQY; Start 59; Stop 83
cttcagctattcgtgggatattaga

SEQ ID NO: 307106 - DNA, 25 bp, Artificial
  probe
  misc_feature (1)..(25): SEQ ID NO: 1848; WAN024DQY; Start 17; Stop 41
tgaaagaatcgggtttaaatgactg

SEQ ID NO: 307107 - DNA, 25 bp, Artificial
  probe
  misc_feature (1)..(25): SEQ ID NO: 1848; WAN024DQY; Start 18; Stop 42
gaaagaatcgggtttaaatgactgg

SEQ ID NO: 307108 - DNA, 25 bp, Artificial
  probe
  misc_feature (1)..(25): SEQ ID NO: 1848; WAN024DQY; Start 19; Stop 43
aaagaatcgggtttaaatgactgga

SEQ ID NO: 307109 - DNA, 25 bp, Artificial
  probe
  misc_feature (1)..(25): SEQ ID NO: 1848; WAN024DQY; Start 60; Stop 84
ttcagctattcgtgggatattagat

SEQ ID NO: 307110 - DNA, 25 bp, Artificial
  probe
  misc_feature (1)..(25): SEQ ID NO: 1848; WAN024DQY; Start 16; Stop 40
ttgaaagaatcgggtttaaatgact

SEQ ID NO: 307111 - DNA, 25 bp, Artificial
  probe
  misc_feature (1)..(25): SEQ ID NO: 1848; WAN024DQY; Start 9; Stop 33
atctggattgaaagaatcgggttta

SEQ ID NO: 307112 - DNA, 25 bp, Artificial
  probe
  misc_feature (1)..(25): SEQ ID NO: 1848; WAN024DQY; Start 10; Stop 34
tctggattgaaagaatcgggtttaa

SEQ ID NO: 307113 - DNA, 25 bp, Artificial
  probe
  misc_feature (1)..(25): SEQ ID NO: 1848; WAN024DQY; Start 58; Stop 82
gcttcagctattcgtgggatattag

SEQ ID NO: 307114 - DNA, 25 bp, Artificial
  probe
  misc_feature (1)..(25): SEQ ID NO: 1848; WAN024DQY; Start 63; Stop 87
agctattcgtgggatattagatgta

SEQ ID NO: 307115 - DNA, 25 bp, Artificial
  probe
  misc_feature (1)..(25): SEQ ID NO: 1848; WAN024DQY; Start 20; Stop 44
aagaatcgggtttaaatgactggac

SEQ ID NO: 307116 - DNA, 25 bp, Artificial
  probe
  misc_feature (1)..(25): SEQ ID NO: 1848; WAN024DQY; Start 15; Stop 39
attgaaagaatcgggtttaaatgac

SEQ ID NO: 307117 - DNA, 25 bp, Artificial
  probe
  misc_feature (1)..(25): SEQ ID NO: 1848; WAN024DQY; Start 1; Stop 25
atgattgcatctggattgaaagaat

SEQ ID NO: 307118 - DNA, 25 bp, Artificial
  probe
  misc_feature (1)..(25): SEQ ID NO: 1848; WAN024DQY; Start 22; Stop 46
gaatcgggtttaaatgactggactg

SEQ ID NO: 307119 - DNA, 25 bp, Artificial
  probe
  misc_feature (1)..(25): SEQ ID NO: 1848; WAN024DQY; Start 21; Stop 45
agaatcgggtttaaatgactggact

SEQ ID NO: 307120 - DNA, 25 bp, Artificial
  probe
  misc_feature (1)..(25): SEQ ID NO: 1848; WAN024DQY; Start 8; Stop 32
catctggattgaaagaatcgggttt

SEQ ID NO: 307121 - DNA, 25 bp, Artificial
  probe
  misc_feature (1)..(25): SEQ ID NO: 1848; WAN024DQY; Start 65; Stop 89
ctattcgtgggatattagatgtact

SEQ ID NO: 307122 - DNA, 25 bp, Artificial
  probe
  misc_feature (1)..(25): SEQ ID NO: 1848; WAN024DQY; Start 11; Stop 35
ctggattgaaagaatcgggtttaaa

SEQ ID NO: 307123 - DNA, 25 bp, Artificial
  probe
  misc_feature (1)..(25): SEQ ID NO: 1848; WAN024DQY; Start 12; Stop 36
tggattgaaagaatcgggtttaaat

SEQ ID NO: 307124 - DNA, 25 bp, Artificial
  probe
  misc_feature (1)..(25): SEQ ID NO: 1848; WAN024DQY; Start 69; Stop 93
tcgtgggatattagatgtacttatt

SEQ ID NO: 307125 - DNA, 25 bp, Artificial
  probe
  misc_feature (1)..(25): SEQ ID NO: 1848; WAN024DQY; Start 68; Stop 92
ttcgtgggatattagatgtacttat

SEQ ID NO: 307126 - DNA, 25 bp, Artificial
  probe
  misc_feature (1)..(25): SEQ ID NO: 1848; WAN024DQY; Start 67; Stop 91
attcgtgggatattagatgtactta

SEQ ID NO: 307127 - DNA, 25 bp, Artificial
  probe
  misc_feature (1)..(25): SEQ ID NO: 1848; WAN024DQY; Start 66; Stop 90
tattcgtgggatattagatgtactt

SEQ ID NO: 307128 - DNA, 25 bp, Artificial
  probe
  misc_feature (1)..(25): SEQ ID NO: 1848; WAN024DQY; Start 13; Stop 37
ggattgaaagaatcgggtttaaatg

SEQ ID NO: 307129 - DNA, 25 bp, Artificial
  probe
  misc_feature (1)..(25): SEQ ID NO: 1848; WAN024DQY; Start 33; Stop 57
aaatgactggactgcgaaaacttta

SEQ ID NO: 307130 - DNA, 25 bp, Artificial
  probe
  misc_feature (1)..(25): SEQ ID NO: 1848; WAN024DQY; Start 32; Stop 56
taaatgactggactgcgaaaacttt

SEQ ID NO: 307131 - DNA, 25 bp, Artificial
  probe
  misc_feature (1)..(25): SEQ ID NO: 1848; WAN024DQY; Start 2; Stop 26
tgattgcatctggattgaaagaatc

SEQ ID NO: 307132 - DNA, 25 bp, Artificial
  probe
  misc_feature (1)..(25): SEQ ID NO: 1848; WAN024DQY; Start 31; Stop 55
ttaaatgactggactgcgaaaactt

SEQ ID NO: 307133 - DNA, 25 bp, Artificial
  probe
  misc_feature (1)..(25): SEQ ID NO: 1848; WAN024DQY; Start 3; Stop 27
gattgcatctggattgaaagaatcg

SEQ ID NO: 307134 - DNA, 25 bp, Artificial
  probe
  misc_feature (1)..(25): SEQ ID NO: 1848; WAN024DQY; Start 34; Stop 58
aatgactggactgcgaaaactttag

SEQ ID NO: 307135 - DNA, 25 bp, Artificial
  probe
  misc_feature (1)..(25): SEQ ID NO: 1849; WAN024FBG; Start 180; Stop 204
gattggactcagagatattatggct

SEQ ID NO: 307136 - DNA, 25 bp, Artificial
  probe
  misc_feature (1)..(25): SEQ ID NO: 1849; WAN024FBG; Start 178; Stop 202
acgattggactcagagatattatgg

SEQ ID NO: 307137 - DNA, 25 bp, Artificial
  probe
  misc_feature (1)..(25): SEQ ID NO: 1849; WAN024FBG; Start 176; Stop 200
ggacgattggactcagagatattat

SEQ ID NO: 307138 - DNA, 25 bp, Artificial
  probe
  misc_feature (1)..(25): SEQ ID NO: 1849; WAN024FBG; Start 181; Stop 205
attggactcagagatattatggctt

SEQ ID NO: 307139 - DNA, 25 bp, Artificial
  probe
  misc_feature (1)..(25): SEQ ID NO: 1849; WAN024FBG; Start 179; Stop 203
cgattggactcagagatattatggc

SEQ ID NO: 307140 - DNA, 25 bp, Artificial
  probe
  misc_feature (1)..(25): SEQ ID NO: 1849; WAN024FBG; Start 182; Stop 206
ttggactcagagatattatggctta

SEQ ID NO: 307141 - DNA, 25 bp, Artificial
  probe
  misc_feature (1)..(25): SEQ ID NO: 1849; WAN024FBG; Start 177; Stop 201
gacgattggactcagagatattatg

SEQ ID NO: 307142 - DNA, 25 bp, Artificial
  probe
  misc_feature (1)..(25): SEQ ID NO: 1849; WAN024FBG; Start 183; Stop 207
tggactcagagatattatggcttat

SEQ ID NO: 307143 - DNA, 25 bp, Artificial
  probe
  misc_feature (1)..(25): SEQ ID NO: 1849; WAN024FBG; Start 203; Stop 227
cttatcagatggagcatgacttgag

SEQ ID NO: 307144 - DNA, 25 bp, Artificial
  probe
  misc_feature (1)..(25): SEQ ID NO: 1849; WAN024FBG; Start 184; Stop 208
ggactcagagatattatggcttatc

SEQ ID NO: 307145 - DNA, 25 bp, Artificial
  probe
  misc_feature (1)..(25): SEQ ID NO: 1849; WAN024FBG; Start 323; Stop 347
agctagtagatgagtccttcttacc

SEQ ID NO: 307146 - DNA, 25 bp, Artificial
  probe
  misc_feature (1)..(25): SEQ ID NO: 1849; WAN024FBG; Start 320; Stop 344
acaagctagtagatgagtccttctt

SEQ ID NO: 307147 - DNA, 25 bp, Artificial
  probe
  misc_feature (1)..(25): SEQ ID NO: 1849; WAN024FBG; Start 322; Stop 346
aagctagtagatgagtccttcttac

SEQ ID NO: 307148 - DNA, 25 bp, Artificial
  probe
  misc_feature (1)..(25): SEQ ID NO: 1849; WAN024FBG; Start 321; Stop 345
caagctagtagatgagtccttctta

SEQ ID NO: 307149 - DNA, 25 bp, Artificial
  probe
  misc_feature (1)..(25): SEQ ID NO: 1849; WAN024FBG; Start 319; Stop 343
cacaagctagtagatgagtccttct

SEQ ID NO: 307150 - DNA, 25 bp, Artificial
  probe
  misc_feature (1)..(25): SEQ ID NO: 1849; WAN024FBG; Start 192; Stop 216
agatattatggcttatcagatggag

SEQ ID NO: 307151 - DNA, 25 bp, Artificial
  probe
  misc_feature (1)..(25): SEQ ID NO: 1849; WAN024FBG; Start 191; Stop 215
gagatattatggcttatcagatgga

SEQ ID NO: 307152 - DNA, 25 bp, Artificial
  probe
  misc_feature (1)..(25): SEQ ID NO: 1849; WAN024FBG; Start 190; Stop 214
agagatattatggcttatcagatgg

SEQ ID NO: 307153 - DNA, 25 bp, Artificial
  probe
  misc_feature (1)..(25): SEQ ID NO: 1849; WAN024FBG; Start 186; Stop 210
actcagagatattatggcttatcag

SEQ ID NO: 307154 - DNA, 25 bp, Artificial
  probe
  misc_feature (1)..(25): SEQ ID NO: 1849; WAN024FBG; Start 185; Stop 209
gactcagagatattatggcttatca

SEQ ID NO: 307155 - DNA, 25 bp, Artificial
  probe
  misc_feature (1)..(25): SEQ ID NO: 1849; WAN024FBG; Start 175; Stop 199
gggacgattggactcagagatatta

SEQ ID NO: 307156 - DNA, 25 bp, Artificial
  probe
  misc_feature (1)..(25): SEQ ID NO: 1849; WAN024FBG; Start 195; Stop 219
tattatggcttatcagatggagcat

SEQ ID NO: 307157 - DNA, 25 bp, Artificial
  probe
  misc_feature (1)..(25): SEQ ID NO: 1849; WAN024FBG; Start 194; Stop 218
atattatggcttatcagatggagca

SEQ ID NO: 307158 - DNA, 25 bp, Artificial
  probe
  misc_feature (1)..(25): SEQ ID NO: 1849; WAN024FBG; Start 187; Stop 211
ctcagagatattatggcttatcaga

SEQ ID NO: 307159 - DNA, 25 bp, Artificial
  probe
  misc_feature (1)..(25): SEQ ID NO: 1849; WAN024FBG; Start 193; Stop 217
gatattatggcttatcagatggagc

SEQ ID NO: 307160 - DNA, 25 bp, Artificial
  probe
  misc_feature (1)..(25): SEQ ID NO: 1849; WAN024FBG; Start 435; Stop 459
taaggaatatgagattcgatgccaa

SEQ ID NO: 307161 - DNA, 25 bp, Artificial
  probe
  misc_feature (1)..(25): SEQ ID NO: 1849; WAN024FBG; Start 433; Stop 457
agtaaggaatatgagattcgatgcc

SEQ ID NO: 307162 - DNA, 25 bp, Artificial
  probe
  misc_feature (1)..(25): SEQ ID NO: 1849; WAN024FBG; Start 10; Stop 34
aaggagtttgagactttcttgttgg

SEQ ID NO: 307163 - DNA, 25 bp, Artificial
  probe
  misc_feature (1)..(25): SEQ ID NO: 1849; WAN024FBG; Start 434; Stop 458
gtaaggaatatgagattcgatgcca

SEQ ID NO: 307164 - DNA, 25 bp, Artificial
  probe
  misc_feature (1)..(25): SEQ ID NO: 1849; WAN024FBG; Start 196; Stop 220
attatggcttatcagatggagcatg

SEQ ID NO: 307165 - DNA, 25 bp, Artificial
  probe
  misc_feature (1)..(25): SEQ ID NO: 1849; WAN024FBG; Start 204; Stop 228
ttatcagatggagcatgacttgagc

SEQ ID NO: 307166 - DNA, 25 bp, Artificial
  probe
  misc_feature (1)..(25): SEQ ID NO: 1849; WAN024FBG; Start 314; Stop 338
tcttgcacaagctagtagatgagtc

SEQ ID NO: 307167 - DNA, 25 bp, Artificial
  probe
  misc_feature (1)..(25): SEQ ID NO: 1849; WAN024FBG; Start 284; Stop 308
ttgtttcgcctgatttcaccattac

SEQ ID NO: 307168 - DNA, 25 bp, Artificial
  probe
  misc_feature (1)..(25): SEQ ID NO: 1850; WAN024C3S; Start 802; Stop 826
gatatttacacgcctttgcttagac

SEQ ID NO: 307169 - DNA, 25 bp, Artificial
  probe
  misc_feature (1)..(25): SEQ ID NO: 1850; WAN024C3S; Start 801; Stop 825
agatatttacacgcctttgcttaga

SEQ ID NO: 307170 - DNA, 25 bp, Artificial
  probe
  misc_feature (1)..(25): SEQ ID NO: 1850; WAN024C3S; Start 800; Stop 824
cagatatttacacgcctttgcttag

SEQ ID NO: 307171 - DNA, 25 bp, Artificial
  probe
  misc_feature (1)..(25): SEQ ID NO: 1850; WAN024C3S; Start 120; Stop 144
ttctgacagctaccgtatctattca

SEQ ID NO: 307172 - DNA, 25 bp, Artificial
  probe
  misc_feature (1)..(25): SEQ ID NO: 1850; WAN024C3S; Start 596; Stop 620
aatgtgatttcttagtgggatggac

SEQ ID NO: 307173 - DNA, 25 bp, Artificial
  probe
  misc_feature (1)..(25): SEQ ID NO: 1850; WAN024C3S; Start 803; Stop 827
atatttacacgcctttgcttagaca

SEQ ID NO: 307174 - DNA, 25 bp, Artificial
  probe
  misc_feature (1)..(25): SEQ ID NO: 1850; WAN024C3S; Start 799; Stop 823
acagatatttacacgcctttgctta

SEQ ID NO: 307175 - DNA, 25 bp, Artificial
  probe
  misc_feature (1)..(25): SEQ ID NO: 1850; WAN024C3S; Start 798; Stop 822
tacagatatttacacgcctttgctt

SEQ ID NO: 307176 - DNA, 25 bp, Artificial
  probe
  misc_feature (1)..(25): SEQ ID NO: 1850; WAN024C3S; Start 595; Stop 619
gaatgtgatttcttagtgggatgga

SEQ ID NO: 307177 - DNA, 25 bp, Artificial
  probe
  misc_feature (1)..(25): SEQ ID NO: 1850; WAN024C3S; Start 147; Stop 171
tatgtttgatttcgcagtggactta

SEQ ID NO: 307178 - DNA, 25 bp, Artificial
  probe
  misc_feature (1)..(25): SEQ ID NO: 1850; WAN024C3S; Start 25; Stop 49
aaactctattgggcaggtgaatatg

SEQ ID NO: 307179 - DNA, 25 bp, Artificial
  probe
  misc_feature (1)..(25): SEQ ID NO: 1850; WAN024C3S; Start 804; Stop 828
tatttacacgcctttgcttagacag

SEQ ID NO: 307180 - DNA, 25 bp, Artificial
  probe
  misc_feature (1)..(25): SEQ ID NO: 1850; WAN024C3S; Start 146; Stop 170
atatgtttgatttcgcagtggactt

SEQ ID NO: 307181 - DNA, 25 bp, Artificial
  probe
  misc_feature (1)..(25): SEQ ID NO: 1850; WAN024C3S; Start 141; Stop 165
ttcagatatgtttgatttcgcagtg

SEQ ID NO: 307182 - DNA, 25 bp, Artificial
  probe
  misc_feature (1)..(25): SEQ ID NO: 1850; WAN024C3S; Start 148; Stop 172
atgtttgatttcgcagtggacttaa

SEQ ID NO: 307183 - DNA, 25 bp, Artificial
  probe
  misc_feature (1)..(25): SEQ ID NO: 1850; WAN024C3S; Start 795; Stop 819
gagtacagatatttacacgcctttg

SEQ ID NO: 307184 - DNA, 25 bp, Artificial
  probe
  misc_feature (1)..(25): SEQ ID NO: 1850; WAN024C3S; Start 794; Stop 818
tgagtacagatatttacacgccttt

SEQ ID NO: 307185 - DNA, 25 bp, Artificial
  probe
  misc_feature (1)..(25): SEQ ID NO: 1850; WAN024C3S; Start 793; Stop 817
ttgagtacagatatttacacgcctt

SEQ ID NO: 307186 - DNA, 25 bp, Artificial
  probe
  misc_feature (1)..(25): SEQ ID NO: 1850; WAN024C3S; Start 140; Stop 164
attcagatatgtttgatttcgcagt

SEQ ID NO: 307187 - DNA, 25 bp, Artificial
  probe
  misc_feature (1)..(25): SEQ ID NO: 1850; WAN024C3S; Start 792; Stop 816
cttgagtacagatatttacacgcct

SEQ ID NO: 307188 - DNA, 25 bp, Artificial
  probe
  misc_feature (1)..(25): SEQ ID NO: 1850; WAN024C3S; Start 789; Stop 813
aggcttgagtacagatatttacacg

SEQ ID NO: 307189 - DNA, 25 bp, Artificial
  probe
  misc_feature (1)..(25): SEQ ID NO: 1850; WAN024C3S; Start 144; Stop 168
agatatgtttgatttcgcagtggac

SEQ ID NO: 307190 - DNA, 25 bp, Artificial
  probe
  misc_feature (1)..(25): SEQ ID NO: 1850; WAN024C3S; Start 143; Stop 167
cagatatgtttgatttcgcagtgga

SEQ ID NO: 307191 - DNA, 25 bp, Artificial
  probe
  misc_feature (1)..(25): SEQ ID NO: 1850; WAN024C3S; Start 145; Stop 169
gatatgtttgatttcgcagtggact

SEQ ID NO: 307192 - DNA, 25 bp, Artificial
  probe
  misc_feature (1)..(25): SEQ ID NO: 1850; WAN024C3S; Start 979; Stop 1003
gaaaggataggacatgacgacaaat

SEQ ID NO: 307193 - DNA, 25 bp, Artificial
  probe
  misc_feature (1)..(25): SEQ ID NO: 1850; WAN024C3S; Start 980; Stop 1004
aaaggataggacatgacgacaaatc

SEQ ID NO: 307194 - DNA, 25 bp, Artificial
  probe
  misc_feature (1)..(25): SEQ ID NO: 1850; WAN024C3S; Start 797; Stop 821
gtacagatatttacacgcctttgct

SEQ ID NO: 307195 - DNA, 25 bp, Artificial
  probe
  misc_feature (1)..(25): SEQ ID NO: 1850; WAN024C3S; Start 796; Stop 820
agtacagatatttacacgcctttgc

SEQ ID NO: 307196 - DNA, 25 bp, Artificial
  probe
  misc_feature (1)..(25): SEQ ID NO: 1850; WAN024C3S; Start 788; Stop 812
aaggcttgagtacagatatttacac

SEQ ID NO: 307197 - DNA, 25 bp, Artificial
  probe
  misc_feature (1)..(25): SEQ ID NO: 1850; WAN024C3S; Start 142; Stop 166
tcagatatgtttgatttcgcagtgg

SEQ ID NO: 307198 - DNA, 25 bp, Artificial
  probe
  misc_feature (1)..(25): SEQ ID NO: 1850; WAN024C3S; Start 787; Stop 811
gaaggcttgagtacagatatttaca

SEQ ID NO: 307199 - DNA, 25 bp, Artificial
  probe
  misc_feature (1)..(25): SEQ ID NO: 1850; WAN024C3S; Start 597; Stop 621
atgtgatttcttagtgggatggacc

SEQ ID NO: 307200 - DNA, 25 bp, Artificial
  probe
  misc_feature (1)..(25): SEQ ID NO: 1850; WAN024C3S; Start 123; Stop 147
tgacagctaccgtatctattcagat

SEQ ID NO: 307201 - DNA, 25 bp, Artificial
  probe
  misc_feature (1)..(25): SEQ ID NO: 1851; WAN024AVG; Start 204; Stop 228
tcctgttgaagattatgaattgact

SEQ ID NO: 307202 - DNA, 25 bp, Artificial
  probe
  misc_feature (1)..(25): SEQ ID NO: 1851; WAN024AVG; Start 256; Stop 280
ggtgctaatctattatctcgactct

SEQ ID NO: 307203 - DNA, 25 bp, Artificial
  probe
  misc_feature (1)..(25): SEQ ID NO: 1851; WAN024AVG; Start 255; Stop 279
aggtgctaatctattatctcgactc

SEQ ID NO: 307204 - DNA, 25 bp, Artificial
  probe
  misc_feature (1)..(25): SEQ ID NO: 1851; WAN024AVG; Start 205; Stop 229
cctgttgaagattatgaattgactt

SEQ ID NO: 307205 - DNA, 25 bp, Artificial
  probe
  misc_feature (1)..(25): SEQ ID NO: 1851; WAN024AVG; Start 203; Stop 227
atcctgttgaagattatgaattgac

SEQ ID NO: 307206 - DNA, 25 bp, Artificial
  probe
  misc_feature (1)..(25): SEQ ID NO: 1851; WAN024AVG; Start 241; Stop 265
attgtgaaagaaagaggtgctaatc

SEQ ID NO: 307207 - DNA, 25 bp, Artificial
  probe
  misc_feature (1)..(25): SEQ ID NO: 1851; WAN024AVG; Start 238; Stop 262
gaaattgtgaaagaaagaggtgcta

SEQ ID NO: 307208 - DNA, 25 bp, Artificial
  probe
  misc_feature (1)..(25): SEQ ID NO: 1851; WAN024AVG; Start 254; Stop 278
gaggtgctaatctattatctcgact

SEQ ID NO: 307209 - DNA, 25 bp, Artificial
  probe
  misc_feature (1)..(25): SEQ ID NO: 1851; WAN024AVG; Start 253; Stop 277
agaggtgctaatctattatctcgac

SEQ ID NO: 307210 - DNA, 25 bp, Artificial
  probe
  misc_feature (1)..(25): SEQ ID NO: 1851; WAN024AVG; Start 239; Stop 263
aaattgtgaaagaaagaggtgctaa

SEQ ID NO: 307211 - DNA, 25 bp, Artificial
  probe
  misc_feature (1)..(25): SEQ ID NO: 1851; WAN024AVG; Start 236; Stop 260
ttgaaattgtgaaagaaagaggtgc

SEQ ID NO: 307212 - DNA, 25 bp, Artificial
  probe
  misc_feature (1)..(25): SEQ ID NO: 1851; WAN024AVG; Start 243; Stop 267
tgtgaaagaaagaggtgctaatcta

SEQ ID NO: 307213 - DNA, 25 bp, Artificial
  probe
  misc_feature (1)..(25): SEQ ID NO: 1851; WAN024AVG; Start 242; Stop 266
ttgtgaaagaaagaggtgctaatct

SEQ ID NO: 307214 - DNA, 25 bp, Artificial
  probe
  misc_feature (1)..(25): SEQ ID NO: 1851; WAN024AVG; Start 240; Stop 264
aattgtgaaagaaagaggtgctaat

SEQ ID NO: 307215 - DNA, 25 bp, Artificial
  probe
  misc_feature (1)..(25): SEQ ID NO: 1851; WAN024AVG; Start 252; Stop 276
aagaggtgctaatctattatctcga

SEQ ID NO: 307216 - DNA, 25 bp, Artificial
  probe
  misc_feature (1)..(25): SEQ ID NO: 1851; WAN024AVG; Start 237; Stop 261
tgaaattgtgaaagaaagaggtgct

SEQ ID NO: 307217 - DNA, 25 bp, Artificial
  probe
  misc_feature (1)..(25): SEQ ID NO: 1851; WAN024AVG; Start 235; Stop 259
attgaaattgtgaaagaaagaggtg

SEQ ID NO: 307218 - DNA, 25 bp, Artificial
  probe
  misc_feature (1)..(25): SEQ ID NO: 1851; WAN024AVG; Start 244; Stop 268
gtgaaagaaagaggtgctaatctat

SEQ ID NO: 307219 - DNA, 25 bp, Artificial
  probe
  misc_feature (1)..(25): SEQ ID NO: 1851; WAN024AVG; Start 197; Stop 221
tgctcaatcctgttgaagattatga

SEQ ID NO: 307220 - DNA, 25 bp, Artificial
  probe
  misc_feature (1)..(25): SEQ ID NO: 1851; WAN024AVG; Start 198; Stop 222
gctcaatcctgttgaagattatgaa

SEQ ID NO: 307221 - DNA, 25 bp, Artificial
  probe
  misc_feature (1)..(25): SEQ ID NO: 1851; WAN024AVG; Start 196; Stop 220
atgctcaatcctgttgaagattatg

SEQ ID NO: 307222 - DNA, 25 bp, Artificial
  probe
  misc_feature (1)..(25): SEQ ID NO: 1851; WAN024AVG; Start 234; Stop 258
aattgaaattgtgaaagaaagaggt

SEQ ID NO: 307223 - DNA, 25 bp, Artificial
  probe
  misc_feature (1)..(25): SEQ ID NO: 1851; WAN024AVG; Start 245; Stop 269
tgaaagaaagaggtgctaatctatt

SEQ ID NO: 307224 - DNA, 25 bp, Artificial
  probe
  misc_feature (1)..(25): SEQ ID NO: 1851; WAN024AVG; Start 195; Stop 219
aatgctcaatcctgttgaagattat

SEQ ID NO: 307225 - DNA, 25 bp, Artificial
  probe
  misc_feature (1)..(25): SEQ ID NO: 1851; WAN024AVG; Start 257; Stop 281
gtgctaatctattatctcgactcta

SEQ ID NO: 307226 - DNA, 25 bp, Artificial
  probe
  misc_feature (1)..(25): SEQ ID NO: 1851; WAN024AVG; Start 251; Stop 275
aaagaggtgctaatctattatctcg

SEQ ID NO: 307227 - DNA, 25 bp, Artificial
  probe
  misc_feature (1)..(25): SEQ ID NO: 1851; WAN024AVG; Start 233; Stop 257
aaattgaaattgtgaaagaaagagg

SEQ ID NO: 307228 - DNA, 25 bp, Artificial
  probe
  misc_feature (1)..(25): SEQ ID NO: 1851; WAN024AVG; Start 202; Stop 226
aatcctgttgaagattatgaattga

SEQ ID NO: 307229 - DNA, 25 bp, Artificial
  probe
  misc_feature (1)..(25): SEQ ID NO: 1851; WAN024AVG; Start 201; Stop 225
caatcctgttgaagattatgaattg

SEQ ID NO: 307230 - DNA, 25 bp, Artificial
  probe
  misc_feature (1)..(25): SEQ ID NO: 1851; WAN024AVG; Start 249; Stop 273
agaaagaggtgctaatctattatct

SEQ ID NO: 307231 - DNA, 25 bp, Artificial
  probe
  misc_feature (1)..(25): SEQ ID NO: 1851; WAN024AVG; Start 258; Stop 282
tgctaatctattatctcgactctat

SEQ ID NO: 307232 - DNA, 25 bp, Artificial
  probe
  misc_feature (1)..(25): SEQ ID NO: 1851; WAN024AVG; Start 199; Stop 223
ctcaatcctgttgaagattatgaat

SEQ ID NO: 307233 - DNA, 25 bp, Artificial
  probe
  misc_feature (1)..(25): SEQ ID NO: 1851; WAN024AVG; Start 194; Stop 218
aaatgctcaatcctgttgaagatta

SEQ ID NO: 307234 - DNA, 25 bp, Artificial
  probe
  misc_feature (1)..(25): SEQ ID NO: 1852; WAN024DK2; Start 78; Stop 102
cacaggatctattgctctaggtatg

SEQ ID NO: 307235 - DNA, 25 bp, Artificial
  probe
  misc_feature (1)..(25): SEQ ID NO: 1852; WAN024DK2; Start 77; Stop 101
acacaggatctattgctctaggtat

SEQ ID NO: 307236 - DNA, 25 bp, Artificial
  probe
  misc_feature (1)..(25): SEQ ID NO: 1852; WAN024DK2; Start 143; Stop 167
atggtattcgtataggagacttgcc

SEQ ID NO: 307237 - DNA, 25 bp, Artificial
  probe
  misc_feature (1)..(25): SEQ ID NO: 1852; WAN024DK2; Start 76; Stop 100
gacacaggatctattgctctaggta

SEQ ID NO: 307238 - DNA, 25 bp, Artificial
  probe
  misc_feature (1)..(25): SEQ ID NO: 1852; WAN024DK2; Start 88; Stop 112
attgctctaggtatgtatgttatgc

SEQ ID NO: 307239 - DNA, 25 bp, Artificial
  probe
  misc_feature (1)..(25): SEQ ID NO: 1852; WAN024DK2; Start 141; Stop 165
tcatggtattcgtataggagacttg

SEQ ID NO: 307240 - DNA, 25 bp, Artificial
  probe
  misc_feature (1)..(25): SEQ ID NO: 1852; WAN024DK2; Start 142; Stop 166
catggtattcgtataggagacttgc

SEQ ID NO: 307241 - DNA, 25 bp, Artificial
  probe
  misc_feature (1)..(25): SEQ ID NO: 1852; WAN024DK2; Start 80; Stop 104
caggatctattgctctaggtatgta

SEQ ID NO: 307242 - DNA, 25 bp, Artificial
  probe
  misc_feature (1)..(25): SEQ ID NO: 1852; WAN024DK2; Start 73; Stop 97
aaggacacaggatctattgctctag

SEQ ID NO: 307243 - DNA, 25 bp, Artificial
  probe
  misc_feature (1)..(25): SEQ ID NO: 1852; WAN024DK2; Start 79; Stop 103
acaggatctattgctctaggtatgt

SEQ ID NO: 307244 - DNA, 25 bp, Artificial
  probe
  misc_feature (1)..(25): SEQ ID NO: 1852; WAN024DK2; Start 136; Stop 160
cttgctcatggtattcgtataggag

SEQ ID NO: 307245 - DNA, 25 bp, Artificial
  probe
  misc_feature (1)..(25): SEQ ID NO: 1852; WAN024DK2; Start 140; Stop 164
ctcatggtattcgtataggagactt

SEQ ID NO: 307246 - DNA, 25 bp, Artificial
  probe
  misc_feature (1)..(25): SEQ ID NO: 1852; WAN024DK2; Start 137; Stop 161
ttgctcatggtattcgtataggaga

SEQ ID NO: 307247 - DNA, 25 bp, Artificial
  probe
  misc_feature (1)..(25): SEQ ID NO: 1852; WAN024DK2; Start 82; Stop 106
ggatctattgctctaggtatgtatg

SEQ ID NO: 307248 - DNA, 25 bp, Artificial
  probe
  misc_feature (1)..(25): SEQ ID NO: 1852; WAN024DK2; Start 139; Stop 163
gctcatggtattcgtataggagact

SEQ ID NO: 307249 - DNA, 25 bp, Artificial
  probe
  misc_feature (1)..(25): SEQ ID NO: 1852; WAN024DK2; Start 81; Stop 105
aggatctattgctctaggtatgtat

SEQ ID NO: 307250 - DNA, 25 bp, Artificial
  probe
  misc_feature (1)..(25): SEQ ID NO: 1852; WAN024DK2; Start 138; Stop 162
tgctcatggtattcgtataggagac

SEQ ID NO: 307251 - DNA, 25 bp, Artificial
  probe
  misc_feature (1)..(25): SEQ ID NO: 1852; WAN024DK2; Start 145; Stop 169
ggtattcgtataggagacttgcctt

SEQ ID NO: 307252 - DNA, 25 bp, Artificial
  probe
  misc_feature (1)..(25): SEQ ID NO: 1852; WAN024DK2; Start 61; Stop 85
gtagttaagacaaaggacacaggat

SEQ ID NO: 307253 - DNA, 25 bp, Artificial
  probe
  misc_feature (1)..(25): SEQ ID NO: 1852; WAN024DK2; Start 91; Stop 115
gctctaggtatgtatgttatgcaag

SEQ ID NO: 307254 - DNA, 25 bp, Artificial
  probe
  misc_feature (1)..(25): SEQ ID NO: 1852; WAN024DK2; Start 135; Stop 159
gcttgctcatggtattcgtatagga

SEQ ID NO: 307255 - DNA, 25 bp, Artificial
  probe
  misc_feature (1)..(25): SEQ ID NO: 1852; WAN024DK2; Start 115; Stop 139
gttattggtattgcattgtggcttg

SEQ ID NO: 307256 - DNA, 25 bp, Artificial
  probe
  misc_feature (1)..(25): SEQ ID NO: 1852; WAN024DK2; Start 133; Stop 157
tggcttgctcatggtattcgtatag

SEQ ID NO: 307257 - DNA, 25 bp, Artificial
  probe
  misc_feature (1)..(25): SEQ ID NO: 1852; WAN024DK2; Start 114; Stop 138
agttattggtattgcattgtggctt

SEQ ID NO: 307258 - DNA, 25 bp, Artificial
  probe
  misc_feature (1)..(25): SEQ ID NO: 1852; WAN024DK2; Start 113; Stop 137
aagttattggtattgcattgtggct

SEQ ID NO: 307259 - DNA, 25 bp, Artificial
  probe
  misc_feature (1)..(25): SEQ ID NO: 1852; WAN024DK2; Start 83; Stop 107
gatctattgctctaggtatgtatgt

SEQ ID NO: 307260 - DNA, 25 bp, Artificial
  probe
  misc_feature (1)..(25): SEQ ID NO: 1852; WAN024DK2; Start 74; Stop 98
aggacacaggatctattgctctagg

SEQ ID NO: 307261 - DNA, 25 bp, Artificial
  probe
  misc_feature (1)..(25): SEQ ID NO: 1852; WAN024DK2; Start 62; Stop 86
tagttaagacaaaggacacaggatc

SEQ ID NO: 307262 - DNA, 25 bp, Artificial
  probe
  misc_feature (1)..(25): SEQ ID NO: 1852; WAN024DK2; Start 132; Stop 156
gtggcttgctcatggtattcgtata

SEQ ID NO: 307263 - DNA, 25 bp, Artificial
  probe
  misc_feature (1)..(25): SEQ ID NO: 1852; WAN024DK2; Start 112; Stop 136
caagttattggtattgcattgtggc

SEQ ID NO: 307264 - DNA, 25 bp, Artificial
  probe
  misc_feature (1)..(25): SEQ ID NO: 1852; WAN024DK2; Start 144; Stop 168
tggtattcgtataggagacttgcct

SEQ ID NO: 307265 - DNA, 25 bp, Artificial
  probe
  misc_feature (1)..(25): SEQ ID NO: 1852; WAN024DK2; Start 72; Stop 96
aaaggacacaggatctattgctcta

SEQ ID NO: 307266 - DNA, 25 bp, Artificial
  probe
  misc_feature (1)..(25): SEQ ID NO: 1852; WAN024DK2; Start 64; Stop 88
gttaagacaaaggacacaggatcta

SEQ ID NO: 307267 - DNA, 25 bp, Artificial
  probe
  misc_feature (1)..(25): SEQ ID NO: 1853; WAN0249YH; Start 86; Stop 110
ctcagaaacaagaaatcacgctaag

SEQ ID NO: 307268 - DNA, 25 bp, Artificial
  probe
  misc_feature (1)..(25): SEQ ID NO: 1853; WAN0249YH; Start 2; Stop 26
tgattgtctcctttagtttattccg

SEQ ID NO: 307269 - DNA, 25 bp, Artificial
  probe
  misc_feature (1)..(25): SEQ ID NO: 1853; WAN0249YH; Start 3; Stop 27
gattgtctcctttagtttattccga

SEQ ID NO: 307270 - DNA, 25 bp, Artificial
  probe
  misc_feature (1)..(25): SEQ ID NO: 1853; WAN0249YH; Start 15; Stop 39
tagtttattccgatatgtgttaccg

SEQ ID NO: 307271 - DNA, 25 bp, Artificial
  probe
  misc_feature (1)..(25): SEQ ID NO: 1853; WAN0249YH; Start 56; Stop 80
accgaatactaaggaaagtcaaaca

SEQ ID NO: 307272 - DNA, 25 bp, Artificial
  probe
  misc_feature (1)..(25): SEQ ID NO: 1853; WAN0249YH; Start 57; Stop 81
ccgaatactaaggaaagtcaaacaa

SEQ ID NO: 307273 - DNA, 25 bp, Artificial
  probe
  misc_feature (1)..(25): SEQ ID NO: 1853; WAN0249YH; Start 4; Stop 28
attgtctcctttagtttattccgat

SEQ ID NO: 307274 - DNA, 25 bp, Artificial
  probe
  misc_feature (1)..(25): SEQ ID NO: 1853; WAN0249YH; Start 55; Stop 79
taccgaatactaaggaaagtcaaac

SEQ ID NO: 307275 - DNA, 25 bp, Artificial
  probe
  misc_feature (1)..(25): SEQ ID NO: 1853; WAN0249YH; Start 10; Stop 34
tcctttagtttattccgatatgtgt

SEQ ID NO: 307276 - DNA, 25 bp, Artificial
  probe
  misc_feature (1)..(25): SEQ ID NO: 1853; WAN0249YH; Start 5; Stop 29
ttgtctcctttagtttattccgata

SEQ ID NO: 307277 - DNA, 25 bp, Artificial
  probe
  misc_feature (1)..(25): SEQ ID NO: 1853; WAN0249YH; Start 9; Stop 33
ctcctttagtttattccgatatgtg

SEQ ID NO: 307278 - DNA, 25 bp, Artificial
  probe
  misc_feature (1)..(25): SEQ ID NO: 1853; WAN0249YH; Start 8; Stop 32
tctcctttagtttattccgatatgt

SEQ ID NO: 307279 - DNA, 25 bp, Artificial
  probe
  misc_feature (1)..(25): SEQ ID NO: 1853; WAN0249YH; Start 6; Stop 30
tgtctcctttagtttattccgatat

SEQ ID NO: 307280 - DNA, 25 bp, Artificial
  probe
  misc_feature (1)..(25): SEQ ID NO: 1853; WAN0249YH; Start 54; Stop 78
ataccgaatactaaggaaagtcaaa

SEQ ID NO: 307281 - DNA, 25 bp, Artificial
  probe
  misc_feature (1)..(25): SEQ ID NO: 1853; WAN0249YH; Start 58; Stop 82
cgaatactaaggaaagtcaaacaat

SEQ ID NO: 307282 - DNA, 25 bp, Artificial
  probe
  misc_feature (1)..(25): SEQ ID NO: 1853; WAN0249YH; Start 11; Stop 35
cctttagtttattccgatatgtgtt

SEQ ID NO: 307283 - DNA, 25 bp, Artificial
  probe
  misc_feature (1)..(25): SEQ ID NO: 1853; WAN0249YH; Start 7; Stop 31
gtctcctttagtttattccgatatg

SEQ ID NO: 307284 - DNA, 25 bp, Artificial
  probe
  misc_feature (1)..(25): SEQ ID NO: 1853; WAN0249YH; Start 1; Stop 25
atgattgtctcctttagtttattcc

SEQ ID NO: 307285 - DNA, 25 bp, Artificial
  probe
  misc_feature (1)..(25): SEQ ID NO: 1853; WAN0249YH; Start 14; Stop 38
ttagtttattccgatatgtgttacc

SEQ ID NO: 307286 - DNA, 25 bp, Artificial
  probe
  misc_feature (1)..(25): SEQ ID NO: 1853; WAN0249YH; Start 53; Stop 77
tataccgaatactaaggaaagtcaa

SEQ ID NO: 307287 - DNA, 25 bp, Artificial
  probe
  misc_feature (1)..(25): SEQ ID NO: 1853; WAN0249YH; Start 52; Stop 76
ttataccgaatactaaggaaagtca

SEQ ID NO: 307288 - DNA, 25 bp, Artificial
  probe
  misc_feature (1)..(25): SEQ ID NO: 1853; WAN0249YH; Start 60; Stop 84
aatactaaggaaagtcaaacaatgt

SEQ ID NO: 307289 - DNA, 25 bp, Artificial
  probe
  misc_feature (1)..(25): SEQ ID NO: 1853; WAN0249YH; Start 59; Stop 83
gaatactaaggaaagtcaaacaatg

SEQ ID NO: 307290 - DNA, 25 bp, Artificial
  probe
  misc_feature (1)..(25): SEQ ID NO: 1853; WAN0249YH; Start 50; Stop 74
gtttataccgaatactaaggaaagt

SEQ ID NO: 307291 - DNA, 25 bp, Artificial
  probe
  misc_feature (1)..(25): SEQ ID NO: 1853; WAN0249YH; Start 51; Stop 75
tttataccgaatactaaggaaagtc

SEQ ID NO: 307292 - DNA, 25 bp, Artificial
  probe
  misc_feature (1)..(25): SEQ ID NO: 1853; WAN0249YH; Start 49; Stop 73
agtttataccgaatactaaggaaag

SEQ ID NO: 307293 - DNA, 25 bp, Artificial
  probe
  misc_feature (1)..(25): SEQ ID NO: 1853; WAN0249YH; Start 13; Stop 37
tttagtttattccgatatgtgttac

SEQ ID NO: 307294 - DNA, 25 bp, Artificial
  probe
  misc_feature (1)..(25): SEQ ID NO: 1853; WAN0249YH; Start 12; Stop 36
ctttagtttattccgatatgtgtta

SEQ ID NO: 307295 - DNA, 25 bp, Artificial
  probe
  misc_feature (1)..(25): SEQ ID NO: 1853; WAN0249YH; Start 16; Stop 40
agtttattccgatatgtgttaccgg

SEQ ID NO: 307296 - DNA, 25 bp, Artificial
  probe
  misc_feature (1)..(25): SEQ ID NO: 1853; WAN0249YH; Start 48; Stop 72
tagtttataccgaatactaaggaaa

SEQ ID NO: 307297 - DNA, 25 bp, Artificial
  probe
  misc_feature (1)..(25): SEQ ID NO: 1854; WAN024G6L; Start 701; Stop 725
ctatcgttgtaggttctatcgctta

SEQ ID NO: 307298 - DNA, 25 bp, Artificial
  probe
  misc_feature (1)..(25): SEQ ID NO: 1854; WAN024G6L; Start 703; Stop 727
atcgttgtaggttctatcgcttatc

SEQ ID NO: 307299 - DNA, 25 bp, Artificial
  probe
  misc_feature (1)..(25): SEQ ID NO: 1854; WAN024G6L; Start 698; Stop 722
ttactatcgttgtaggttctatcgc

SEQ ID NO: 307300 - DNA, 25 bp, Artificial
  probe
  misc_feature (1)..(25): SEQ ID NO: 1854; WAN024G6L; Start 702; Stop 726
tatcgttgtaggttctatcgcttat

SEQ ID NO: 307301 - DNA, 25 bp, Artificial
  probe
  misc_feature (1)..(25): SEQ ID NO: 1854; WAN024G6L; Start 699; Stop 723
tactatcgttgtaggttctatcgct

SEQ ID NO: 307302 - DNA, 25 bp, Artificial
  probe
  misc_feature (1)..(25): SEQ ID NO: 1854; WAN024G6L; Start 694; Stop 718
ttggttactatcgttgtaggttcta

SEQ ID NO: 307303 - DNA, 25 bp, Artificial
  probe
  misc_feature (1)..(25): SEQ ID NO: 1854; WAN024G6L; Start 695; Stop 719
tggttactatcgttgtaggttctat

SEQ ID NO: 307304 - DNA, 25 bp, Artificial
  probe
  misc_feature (1)..(25): SEQ ID NO: 1854; WAN024G6L; Start 697; Stop 721
gttactatcgttgtaggttctatcg

SEQ ID NO: 307305 - DNA, 25 bp, Artificial
  probe
  misc_feature (1)..(25): SEQ ID NO: 1854; WAN024G6L; Start 704; Stop 728
tcgttgtaggttctatcgcttatca

SEQ ID NO: 307306 - DNA, 25 bp, Artificial
  probe
  misc_feature (1)..(25): SEQ ID NO: 1854; WAN024G6L; Start 700; Stop 724
actatcgttgtaggttctatcgctt

SEQ ID NO: 307307 - DNA, 25 bp, Artificial
  probe
  misc_feature (1)..(25): SEQ ID NO: 1854; WAN024G6L; Start 705; Stop 729
cgttgtaggttctatcgcttatcaa

SEQ ID NO: 307308 - DNA, 25 bp, Artificial
  probe
  misc_feature (1)..(25): SEQ ID NO: 1854; WAN024G6L; Start 696; Stop 720
ggttactatcgttgtaggttctatc

SEQ ID NO: 307309 - DNA, 25 bp, Artificial
  probe
  misc_feature (1)..(25): SEQ ID NO: 1854; WAN024G6L; Start 706; Stop 730
gttgtaggttctatcgcttatcaat

SEQ ID NO: 307310 - DNA, 25 bp, Artificial
  probe
  misc_feature (1)..(25): SEQ ID NO: 1854; WAN024G6L; Start 707; Stop 731
ttgtaggttctatcgcttatcaatt

SEQ ID NO: 307311 - DNA, 25 bp, Artificial
  probe
  misc_feature (1)..(25): SEQ ID NO: 1854; WAN024G6L; Start 275; Stop 299
cttcttgtcactcaatcatgctctt

SEQ ID NO: 307312 - DNA, 25 bp, Artificial
  probe
  misc_feature (1)..(25): SEQ ID NO: 1854; WAN024G6L; Start 475; Stop 499
gataatcctgatatggctagaagtt

SEQ ID NO: 307313 - DNA, 25 bp, Artificial
  probe
  misc_feature (1)..(25): SEQ ID NO: 1854; WAN024G6L; Start 276; Stop 300
ttcttgtcactcaatcatgctcttg

SEQ ID NO: 307314 - DNA, 25 bp, Artificial
  probe
  misc_feature (1)..(25): SEQ ID NO: 1854; WAN024G6L; Start 693; Stop 717
tttggttactatcgttgtaggttct

SEQ ID NO: 307315 - DNA, 25 bp, Artificial
  probe
  misc_feature (1)..(25): SEQ ID NO: 1854; WAN024G6L; Start 692; Stop 716
gtttggttactatcgttgtaggttc

SEQ ID NO: 307316 - DNA, 25 bp, Artificial
  probe
  misc_feature (1)..(25): SEQ ID NO: 1854; WAN024G6L; Start 441; Stop 465
cactaaactcggacaagcctatatt

SEQ ID NO: 307317 - DNA, 25 bp, Artificial
  probe
  misc_feature (1)..(25): SEQ ID NO: 1854; WAN024G6L; Start 474; Stop 498
ggataatcctgatatggctagaagt

SEQ ID NO: 307318 - DNA, 25 bp, Artificial
  probe
  misc_feature (1)..(25): SEQ ID NO: 1854; WAN024G6L; Start 767; Stop 791
caagttaccttcgtttatacagtgc

SEQ ID NO: 307319 - DNA, 25 bp, Artificial
  probe
  misc_feature (1)..(25): SEQ ID NO: 1854; WAN024G6L; Start 757; Stop 781
ggctttaatacaagttaccttcgtt

SEQ ID NO: 307320 - DNA, 25 bp, Artificial
  probe
  misc_feature (1)..(25): SEQ ID NO: 1854; WAN024G6L; Start 756; Stop 780
tggctttaatacaagttaccttcgt

SEQ ID NO: 307321 - DNA, 25 bp, Artificial
  probe
  misc_feature (1)..(25): SEQ ID NO: 1854; WAN024G6L; Start 691; Stop 715
cgtttggttactatcgttgtaggtt

SEQ ID NO: 307322 - DNA, 25 bp, Artificial
  probe
  misc_feature (1)..(25): SEQ ID NO: 1854; WAN024G6L; Start 766; Stop 790
acaagttaccttcgtttatacagtg

SEQ ID NO: 307323 - DNA, 25 bp, Artificial
  probe
  misc_feature (1)..(25): SEQ ID NO: 1854; WAN024G6L; Start 745; Stop 769
gttatcgcacttggctttaatacaa

SEQ ID NO: 307324 - DNA, 25 bp, Artificial
  probe
  misc_feature (1)..(25): SEQ ID NO: 1854; WAN024G6L; Start 274; Stop 298
acttcttgtcactcaatcatgctct

SEQ ID NO: 307325 - DNA, 25 bp, Artificial
  probe
  misc_feature (1)..(25): SEQ ID NO: 1854; WAN024G6L; Start 478; Stop 502
aatcctgatatggctagaagtttcg

SEQ ID NO: 307326 - DNA, 25 bp, Artificial
  probe
  misc_feature (1)..(25): SEQ ID NO: 1854; WAN024G6L; Start 440; Stop 464
acactaaactcggacaagcctatat

SEQ ID NO: 307327 - DNA, 25 bp, Artificial
  probe
  misc_feature (1)..(25): SEQ ID NO: 1854; WAN024G6L; Start 755; Stop 779
ttggctttaatacaagttaccttcg

SEQ ID NO: 307328 - DNA, 25 bp, Artificial
  probe
  misc_feature (1)..(25): SEQ ID NO: 1854; WAN024G6L; Start 442; Stop 466
actaaactcggacaagcctatattg

SEQ ID NO: 307329 - DNA, 25 bp, Artificial
  probe
  misc_feature (1)..(25): SEQ ID NO: 1854; WAN024G6L; Start 827; Stop 851
ttaagcaaacaatcttgaaaggagc

SEQ ID NO: 307330 - DNA, 25 bp, Artificial
  probe
  misc_feature (1)..(25): SEQ ID NO: 1855; WAN024EUJ; Start 215; Stop 239
tcgaaattacggagttctaactaat

SEQ ID NO: 307331 - DNA, 25 bp, Artificial
  probe
  misc_feature (1)..(25): SEQ ID NO: 1855; WAN024EUJ; Start 131; Stop 155
aagaaaatcgcccagagtacaatat

SEQ ID NO: 307332 - DNA, 25 bp, Artificial
  probe
  misc_feature (1)..(25): SEQ ID NO: 1855; WAN024EUJ; Start 132; Stop 156
agaaaatcgcccagagtacaatatc

SEQ ID NO: 307333 - DNA, 25 bp, Artificial
  probe
  misc_feature (1)..(25): SEQ ID NO: 1855; WAN024EUJ; Start 130; Stop 154
gaagaaaatcgcccagagtacaata

SEQ ID NO: 307334 - DNA, 25 bp, Artificial
  probe
  misc_feature (1)..(25): SEQ ID NO: 1855; WAN024EUJ; Start 175; Stop 199
tctgacaaattgctcgattacgaaa

SEQ ID NO: 307335 - DNA, 25 bp, Artificial
  probe
  misc_feature (1)..(25): SEQ ID NO: 1855; WAN024EUJ; Start 133; Stop 157
gaaaatcgcccagagtacaatatcg

SEQ ID NO: 307336 - DNA, 25 bp, Artificial
  probe
  misc_feature (1)..(25): SEQ ID NO: 1855; WAN024EUJ; Start 174; Stop 198
gtctgacaaattgctcgattacgaa

SEQ ID NO: 307337 - DNA, 25 bp, Artificial
  probe
  misc_feature (1)..(25): SEQ ID NO: 1855; WAN024EUJ; Start 19; Stop 43
tatcaagaaacaaaagaacgtagcc

SEQ ID NO: 307338 - DNA, 25 bp, Artificial
  probe
  misc_feature (1)..(25): SEQ ID NO: 1855; WAN024EUJ; Start 212; Stop 236
ccttcgaaattacggagttctaact

SEQ ID NO: 307339 - DNA, 25 bp, Artificial
  probe
  misc_feature (1)..(25): SEQ ID NO: 1855; WAN024EUJ; Start 18; Stop 42
ttatcaagaaacaaaagaacgtagc

SEQ ID NO: 307340 - DNA, 25 bp, Artificial
  probe
  misc_feature (1)..(25): SEQ ID NO: 1855; WAN024EUJ; Start 162; Stop 186
tatcgaactcttgtctgacaaattg

SEQ ID NO: 307341 - DNA, 25 bp, Artificial
  probe
  misc_feature (1)..(25): SEQ ID NO: 1855; WAN024EUJ; Start 171; Stop 195
cttgtctgacaaattgctcgattac

SEQ ID NO: 307342 - DNA, 25 bp, Artificial
  probe
  misc_feature (1)..(25): SEQ ID NO: 1855; WAN024EUJ; Start 170; Stop 194
tcttgtctgacaaattgctcgatta

SEQ ID NO: 307343 - DNA, 25 bp, Artificial
  probe
  misc_feature (1)..(25): SEQ ID NO: 1855; WAN024EUJ; Start 173; Stop 197
tgtctgacaaattgctcgattacga

SEQ ID NO: 307344 - DNA, 25 bp, Artificial
  probe
  misc_feature (1)..(25): SEQ ID NO: 1855; WAN024EUJ; Start 20; Stop 44
atcaagaaacaaaagaacgtagccc

SEQ ID NO: 307345 - DNA, 25 bp, Artificial
  probe
  misc_feature (1)..(25): SEQ ID NO: 1855; WAN024EUJ; Start 213; Stop 237
cttcgaaattacggagttctaacta

SEQ ID NO: 307346 - DNA, 25 bp, Artificial
  probe
  misc_feature (1)..(25): SEQ ID NO: 1855; WAN024EUJ; Start 161; Stop 185
atatcgaactcttgtctgacaaatt

SEQ ID NO: 307347 - DNA, 25 bp, Artificial
  probe
  misc_feature (1)..(25): SEQ ID NO: 1855; WAN024EUJ; Start 211; Stop 235
gccttcgaaattacggagttctaac

SEQ ID NO: 307348 - DNA, 25 bp, Artificial
  probe
  misc_feature (1)..(25): SEQ ID NO: 1855; WAN024EUJ; Start 214; Stop 238
ttcgaaattacggagttctaactaa

SEQ ID NO: 307349 - DNA, 25 bp, Artificial
  probe
  misc_feature (1)..(25): SEQ ID NO: 1855; WAN024EUJ; Start 169; Stop 193
ctcttgtctgacaaattgctcgatt

SEQ ID NO: 307350 - DNA, 25 bp, Artificial
  probe
  misc_feature (1)..(25): SEQ ID NO: 1855; WAN024EUJ; Start 176; Stop 200
ctgacaaattgctcgattacgaaaa

SEQ ID NO: 307351 - DNA, 25 bp, Artificial
  probe
  misc_feature (1)..(25): SEQ ID NO: 1855; WAN024EUJ; Start 163; Stop 187
atcgaactcttgtctgacaaattgc

SEQ ID NO: 307352 - DNA, 25 bp, Artificial
  probe
  misc_feature (1)..(25): SEQ ID NO: 1855; WAN024EUJ; Start 160; Stop 184
tatatcgaactcttgtctgacaaat

SEQ ID NO: 307353 - DNA, 25 bp, Artificial
  probe
  misc_feature (1)..(25): SEQ ID NO: 1855; WAN024EUJ; Start 172; Stop 196
ttgtctgacaaattgctcgattacg

SEQ ID NO: 307354 - DNA, 25 bp, Artificial
  probe
  misc_feature (1)..(25): SEQ ID NO: 1855; WAN024EUJ; Start 22; Stop 46
caagaaacaaaagaacgtagcccac

SEQ ID NO: 307355 - DNA, 25 bp, Artificial
  probe
  misc_feature (1)..(25): SEQ ID NO: 1855; WAN024EUJ; Start 21; Stop 45
tcaagaaacaaaagaacgtagccca

SEQ ID NO: 307356 - DNA, 25 bp, Artificial
  probe
  misc_feature (1)..(25): SEQ ID NO: 1855; WAN024EUJ; Start 166; Stop 190
gaactcttgtctgacaaattgctcg

SEQ ID NO: 307357 - DNA, 25 bp, Artificial
  probe
  misc_feature (1)..(25): SEQ ID NO: 1855; WAN024EUJ; Start 165; Stop 189
cgaactcttgtctgacaaattgctc

SEQ ID NO: 307358 - DNA, 25 bp, Artificial
  probe
  misc_feature (1)..(25): SEQ ID NO: 1855; WAN024EUJ; Start 168; Stop 192
actcttgtctgacaaattgctcgat

SEQ ID NO: 307359 - DNA, 25 bp, Artificial
  probe
  misc_feature (1)..(25): SEQ ID NO: 1855; WAN024EUJ; Start 134; Stop 158
aaaatcgcccagagtacaatatcga

SEQ ID NO: 307360 - DNA, 25 bp, Artificial
  probe
  misc_feature (1)..(25): SEQ ID NO: 1855; WAN024EUJ; Start 167; Stop 191
aactcttgtctgacaaattgctcga

SEQ ID NO: 307361 - DNA, 25 bp, Artificial
  probe
  misc_feature (1)..(25): SEQ ID NO: 1855; WAN024EUJ; Start 164; Stop 188
tcgaactcttgtctgacaaattgct

SEQ ID NO: 307362 - DNA, 25 bp, Artificial
  probe
  misc_feature (1)..(25): SEQ ID NO: 1855; WAN024EUJ; Start 17; Stop 41
tttatcaagaaacaaaagaacgtag

SEQ ID NO: 307363 - DNA, 25 bp, Artificial
  probe
  misc_feature (1)..(25): SEQ ID NO: 1856; WAN024GMR; Start 218; Stop 242
tcatcatacgaccaatctgctttat

SEQ ID NO: 307364 - DNA, 25 bp, Artificial
  probe
  misc_feature (1)..(25): SEQ ID NO: 1856; WAN024GMR; Start 217; Stop 241
ttcatcatacgaccaatctgcttta

SEQ ID NO: 307365 - DNA, 25 bp, Artificial
  probe
  misc_feature (1)..(25): SEQ ID NO: 1856; WAN024GMR; Start 219; Stop 243
catcatacgaccaatctgctttatt

SEQ ID NO: 307366 - DNA, 25 bp, Artificial
  probe
  misc_feature (1)..(25): SEQ ID NO: 1856; WAN024GMR; Start 216; Stop 240
tttcatcatacgaccaatctgcttt

SEQ ID NO: 307367 - DNA, 25 bp, Artificial
  probe
  misc_feature (1)..(25): SEQ ID NO: 1856; WAN024GMR; Start 220; Stop 244
atcatacgaccaatctgctttattt

SEQ ID NO: 307368 - DNA, 25 bp, Artificial
  probe
  misc_feature (1)..(25): SEQ ID NO: 1856; WAN024GMR; Start 125; Stop 149
gctatttgtgccaatttgaagaatt

SEQ ID NO: 307369 - DNA, 25 bp, Artificial
  probe
  misc_feature (1)..(25): SEQ ID NO: 1856; WAN024GMR; Start 89; Stop 113
tcaaacggagaatgaatttcaagac

SEQ ID NO: 307370 - DNA, 25 bp, Artificial
  probe
  misc_feature (1)..(25): SEQ ID NO: 1856; WAN024GMR; Start 88; Stop 112
ctcaaacggagaatgaatttcaaga

SEQ ID NO: 307371 - DNA, 25 bp, Artificial
  probe
  misc_feature (1)..(25): SEQ ID NO: 1856; WAN024GMR; Start 92; Stop 116
aacggagaatgaatttcaagacctt

SEQ ID NO: 307372 - DNA, 25 bp, Artificial
  probe
  misc_feature (1)..(25): SEQ ID NO: 1856; WAN024GMR; Start 91; Stop 115
aaacggagaatgaatttcaagacct

SEQ ID NO: 307373 - DNA, 25 bp, Artificial
  probe
  misc_feature (1)..(25): SEQ ID NO: 1856; WAN024GMR; Start 90; Stop 114
caaacggagaatgaatttcaagacc

SEQ ID NO: 307374 - DNA, 25 bp, Artificial
  probe
  misc_feature (1)..(25): SEQ ID NO: 1856; WAN024GMR; Start 93; Stop 117
acggagaatgaatttcaagaccttc

SEQ ID NO: 307375 - DNA, 25 bp, Artificial
  probe
  misc_feature (1)..(25): SEQ ID NO: 1856; WAN024GMR; Start 124; Stop 148
agctatttgtgccaatttgaagaat

SEQ ID NO: 307376 - DNA, 25 bp, Artificial
  probe
  misc_feature (1)..(25): SEQ ID NO: 1856; WAN024GMR; Start 55; Stop 79
tatataacgagcagatttagtcgca

SEQ ID NO: 307377 - DNA, 25 bp, Artificial
  probe
  misc_feature (1)..(25): SEQ ID NO: 1856; WAN024GMR; Start 102; Stop 126
gaatttcaagaccttcttctctagc

SEQ ID NO: 307378 - DNA, 25 bp, Artificial
  probe
  misc_feature (1)..(25): SEQ ID NO: 1856; WAN024GMR; Start 51; Stop 75
tcgctatataacgagcagatttagt

SEQ ID NO: 307379 - DNA, 25 bp, Artificial
  probe
  misc_feature (1)..(25): SEQ ID NO: 1856; WAN024GMR; Start 42; Stop 66
aaatccatttcgctatataacgagc

SEQ ID NO: 307380 - DNA, 25 bp, Artificial
  probe
  misc_feature (1)..(25): SEQ ID NO: 1856; WAN024GMR; Start 47; Stop 71
catttcgctatataacgagcagatt

SEQ ID NO: 307381 - DNA, 25 bp, Artificial
  probe
  misc_feature (1)..(25): SEQ ID NO: 1856; WAN024GMR; Start 43; Stop 67
aatccatttcgctatataacgagca

SEQ ID NO: 307382 - DNA, 25 bp, Artificial
  probe
  misc_feature (1)..(25): SEQ ID NO: 1856; WAN024GMR; Start 54; Stop 78
ctatataacgagcagatttagtcgc

SEQ ID NO: 307383 - DNA, 25 bp, Artificial
  probe
  misc_feature (1)..(25): SEQ ID NO: 1856; WAN024GMR; Start 53; Stop 77
gctatataacgagcagatttagtcg

SEQ ID NO: 307384 - DNA, 25 bp, Artificial
  probe
  misc_feature (1)..(25): SEQ ID NO: 1856; WAN024GMR; Start 52; Stop 76
cgctatataacgagcagatttagtc

SEQ ID NO: 307385 - DNA, 25 bp, Artificial
  probe
  misc_feature (1)..(25): SEQ ID NO: 1856; WAN024GMR; Start 159; Stop 183
tcatatgcaacctaccatcttcaaa

SEQ ID NO: 307386 - DNA, 25 bp, Artificial
  probe
  misc_feature (1)..(25): SEQ ID NO: 1856; WAN024GMR; Start 46; Stop 70
ccatttcgctatataacgagcagat

SEQ ID NO: 307387 - DNA, 25 bp, Artificial
  probe
  misc_feature (1)..(25): SEQ ID NO: 1856; WAN024GMR; Start 44; Stop 68
atccatttcgctatataacgagcag

SEQ ID NO: 307388 - DNA, 25 bp, Artificial
  probe
  misc_feature (1)..(25): SEQ ID NO: 1856; WAN024GMR; Start 95; Stop 119
ggagaatgaatttcaagaccttctt

SEQ ID NO: 307389 - DNA, 25 bp, Artificial
  probe
  misc_feature (1)..(25): SEQ ID NO: 1856; WAN024GMR; Start 56; Stop 80
atataacgagcagatttagtcgcac

SEQ ID NO: 307390 - DNA, 25 bp, Artificial
  probe
  misc_feature (1)..(25): SEQ ID NO: 1856; WAN024GMR; Start 94; Stop 118
cggagaatgaatttcaagaccttct

SEQ ID NO: 307391 - DNA, 25 bp, Artificial
  probe
  misc_feature (1)..(25): SEQ ID NO: 1856; WAN024GMR; Start 214; Stop 238
attttcatcatacgaccaatctgct

SEQ ID NO: 307392 - DNA, 25 bp, Artificial
  probe
  misc_feature (1)..(25): SEQ ID NO: 1856; WAN024GMR; Start 48; Stop 72
atttcgctatataacgagcagattt

SEQ ID NO: 307393 - DNA, 25 bp, Artificial
  probe
  misc_feature (1)..(25): SEQ ID NO: 1856; WAN024GMR; Start 221; Stop 245
tcatacgaccaatctgctttatttt

SEQ ID NO: 307394 - DNA, 25 bp, Artificial
  probe
  misc_feature (1)..(25): SEQ ID NO: 1856; WAN024GMR; Start 215; Stop 239
ttttcatcatacgaccaatctgctt

SEQ ID NO: 307395 - DNA, 25 bp, Artificial
  probe
  misc_feature (1)..(25): SEQ ID NO: 1856; WAN024GMR; Start 166; Stop 190
caacctaccatcttcaaaattagca

SEQ ID NO: 307396 - DNA, 25 bp, Artificial
  probe
  misc_feature (1)..(25): SEQ ID NO: 1857; WAN024E2E; Start 140; Stop 164
ctagaccacctgttacagatacacg

SEQ ID NO: 307397 - DNA, 25 bp, Artificial
  probe
  misc_feature (1)..(25): SEQ ID NO: 1857; WAN024E2E; Start 85; Stop 109
cctgcgataaaggtaaagacatcaa

SEQ ID NO: 307398 - DNA, 25 bp, Artificial
  probe
  misc_feature (1)..(25): SEQ ID NO: 1857; WAN024E2E; Start 70; Stop 94
tctgtaattccacgacctgcgataa

SEQ ID NO: 307399 - DNA, 25 bp, Artificial
  probe
  misc_feature (1)..(25): SEQ ID NO: 1857; WAN024E2E; Start 134; Stop 158
ctacatctagaccacctgttacaga

SEQ ID NO: 307400 - DNA, 25 bp, Artificial
  probe
  misc_feature (1)..(25): SEQ ID NO: 1857; WAN024E2E; Start 139; Stop 163
tctagaccacctgttacagatacac

SEQ ID NO: 307401 - DNA, 25 bp, Artificial
  probe
  misc_feature (1)..(25): SEQ ID NO: 1857; WAN024E2E; Start 129; Stop 153
agtatctacatctagaccacctgtt

SEQ ID NO: 307402 - DNA, 25 bp, Artificial
  probe
  misc_feature (1)..(25): SEQ ID NO: 1857; WAN024E2E; Start 127; Stop 151
agagtatctacatctagaccacctg

SEQ ID NO: 307403 - DNA, 25 bp, Artificial
  probe
  misc_feature (1)..(25): SEQ ID NO: 1857; WAN024E2E; Start 126; Stop 150
gagagtatctacatctagaccacct

SEQ ID NO: 307404 - DNA, 25 bp, Artificial
  probe
  misc_feature (1)..(25): SEQ ID NO: 1857; WAN024E2E; Start 125; Stop 149
tgagagtatctacatctagaccacc

SEQ ID NO: 307405 - DNA, 25 bp, Artificial
  probe
  misc_feature (1)..(25): SEQ ID NO: 1857; WAN024E2E; Start 132; Stop 156
atctacatctagaccacctgttaca

SEQ ID NO: 307406 - DNA, 25 bp, Artificial
  probe
  misc_feature (1)..(25): SEQ ID NO: 1857; WAN024E2E; Start 128; Stop 152
gagtatctacatctagaccacctgt

SEQ ID NO: 307407 - DNA, 25 bp, Artificial
  probe
  misc_feature (1)..(25): SEQ ID NO: 1857; WAN024E2E; Start 133; Stop 157
tctacatctagaccacctgttacag

SEQ ID NO: 307408 - DNA, 25 bp, Artificial
  probe
  misc_feature (1)..(25): SEQ ID NO: 1857; WAN024E2E; Start 69; Stop 93
ctctgtaattccacgacctgcgata

SEQ ID NO: 307409 - DNA, 25 bp, Artificial
  probe
  misc_feature (1)..(25): SEQ ID NO: 1857; WAN024E2E; Start 72; Stop 96
tgtaattccacgacctgcgataaag

SEQ ID NO: 307410 - DNA, 25 bp, Artificial
  probe
  misc_feature (1)..(25): SEQ ID NO: 1857; WAN024E2E; Start 71; Stop 95
ctgtaattccacgacctgcgataaa

SEQ ID NO: 307411 - DNA, 25 bp, Artificial
  probe
  misc_feature (1)..(25): SEQ ID NO: 1857; WAN024E2E; Start 131; Stop 155
tatctacatctagaccacctgttac

SEQ ID NO: 307412 - DNA, 25 bp, Artificial
  probe
  misc_feature (1)..(25): SEQ ID NO: 1857; WAN024E2E; Start 130; Stop 154
gtatctacatctagaccacctgtta

SEQ ID NO: 307413 - DNA, 25 bp, Artificial
  probe
  misc_feature (1)..(25): SEQ ID NO: 1857; WAN024E2E; Start 124; Stop 148
ttgagagtatctacatctagaccac

SEQ ID NO: 307414 - DNA, 25 bp, Artificial
  probe
  misc_feature (1)..(25): SEQ ID NO: 1857; WAN024E2E; Start 141; Stop 165
tagaccacctgttacagatacacgg

SEQ ID NO: 307415 - DNA, 25 bp, Artificial
  probe
  misc_feature (1)..(25): SEQ ID NO: 1857; WAN024E2E; Start 117; Stop 141
aaagagtttgagagtatctacatct

SEQ ID NO: 307416 - DNA, 25 bp, Artificial
  probe
  misc_feature (1)..(25): SEQ ID NO: 1857; WAN024E2E; Start 138; Stop 162
atctagaccacctgttacagataca

SEQ ID NO: 307417 - DNA, 25 bp, Artificial
  probe
  misc_feature (1)..(25): SEQ ID NO: 1857; WAN024E2E; Start 137; Stop 161
catctagaccacctgttacagatac

SEQ ID NO: 307418 - DNA, 25 bp, Artificial
  probe
  misc_feature (1)..(25): SEQ ID NO: 1857; WAN024E2E; Start 136; Stop 160
acatctagaccacctgttacagata

SEQ ID NO: 307419 - DNA, 25 bp, Artificial
  probe
  misc_feature (1)..(25): SEQ ID NO: 1857; WAN024E2E; Start 135; Stop 159
tacatctagaccacctgttacagat

SEQ ID NO: 307420 - DNA, 25 bp, Artificial
  probe
  misc_feature (1)..(25): SEQ ID NO: 1857; WAN024E2E; Start 12; Stop 36
ccaaattcgtttgatttcatccttg

SEQ ID NO: 307421 - DNA, 25 bp, Artificial
  probe
  misc_feature (1)..(25): SEQ ID NO: 1857; WAN024E2E; Start 224; Stop 248
cagcaagaagagcatcacgagattg

SEQ ID NO: 307422 - DNA, 25 bp, Artificial
  probe
  misc_feature (1)..(25): SEQ ID NO: 1857; WAN024E2E; Start 11; Stop 35
cccaaattcgtttgatttcatcctt

SEQ ID NO: 307423 - DNA, 25 bp, Artificial
  probe
  misc_feature (1)..(25): SEQ ID NO: 1857; WAN024E2E; Start 227; Stop 251
caagaagagcatcacgagattggtg

SEQ ID NO: 307424 - DNA, 25 bp, Artificial
  probe
  misc_feature (1)..(25): SEQ ID NO: 1857; WAN024E2E; Start 13; Stop 37
caaattcgtttgatttcatccttga

SEQ ID NO: 307425 - DNA, 25 bp, Artificial
  probe
  misc_feature (1)..(25): SEQ ID NO: 1857; WAN024E2E; Start 119; Stop 143
agagtttgagagtatctacatctag

SEQ ID NO: 307426 - DNA, 25 bp, Artificial
  probe
  misc_feature (1)..(25): SEQ ID NO: 1857; WAN024E2E; Start 16; Stop 40
attcgtttgatttcatccttgaagg

SEQ ID NO: 307427 - DNA, 25 bp, Artificial
  probe
  misc_feature (1)..(25): SEQ ID NO: 1857; WAN024E2E; Start 215; Stop 239
aagtttcaccagcaagaagagcatc

SEQ ID NO: 307428 - DNA, 25 bp, Artificial
  probe
  misc_feature (1)..(25): SEQ ID NO: 1857; WAN024E2E; Start 15; Stop 39
aattcgtttgatttcatccttgaag

SEQ ID NO: 307429 - DNA, 25 bp, Artificial
  probe
  misc_feature (1)..(25): SEQ ID NO: 1858; WAN024D9S; Start 219; Stop 243
aattgctatcatgctagaagacatt

SEQ ID NO: 307430 - DNA, 25 bp, Artificial
  probe
  misc_feature (1)..(25): SEQ ID NO: 1858; WAN024D9S; Start 304; Stop 328
aagttggataagcctaatctggaaa

SEQ ID NO: 307431 - DNA, 25 bp, Artificial
  probe
  misc_feature (1)..(25): SEQ ID NO: 1858; WAN024D9S; Start 303; Stop 327
aaagttggataagcctaatctggaa

SEQ ID NO: 307432 - DNA, 25 bp, Artificial
  probe
  misc_feature (1)..(25): SEQ ID NO: 1858; WAN024D9S; Start 373; Stop 397
gcctttgatgaactaagtgatgaag

SEQ ID NO: 307433 - DNA, 25 bp, Artificial
  probe
  misc_feature (1)..(25): SEQ ID NO: 1858; WAN024D9S; Start 374; Stop 398
cctttgatgaactaagtgatgaaga

SEQ ID NO: 307434 - DNA, 25 bp, Artificial
  probe
  misc_feature (1)..(25): SEQ ID NO: 1858; WAN024D9S; Start 217; Stop 241
gaaattgctatcatgctagaagaca

SEQ ID NO: 307435 - DNA, 25 bp, Artificial
  probe
  misc_feature (1)..(25): SEQ ID NO: 1858; WAN024D9S; Start 216; Stop 240
agaaattgctatcatgctagaagac

SEQ ID NO: 307436 - DNA, 25 bp, Artificial
  probe
  misc_feature (1)..(25): SEQ ID NO: 1858; WAN024D9S; Start 189; Stop 213
tggtggtgactttgtctataatgac

SEQ ID NO: 307437 - DNA, 25 bp, Artificial
  probe
  misc_feature (1)..(25): SEQ ID NO: 1858; WAN024D9S; Start 188; Stop 212
gtggtggtgactttgtctataatga

SEQ ID NO: 307438 - DNA, 25 bp, Artificial
  probe
  misc_feature (1)..(25): SEQ ID NO: 1858; WAN024D9S; Start 210; Stop 234
tgacctagaaattgctatcatgcta

SEQ ID NO: 307439 - DNA, 25 bp, Artificial
  probe
  misc_feature (1)..(25): SEQ ID NO: 1858; WAN024D9S; Start 599; Stop 623
taacacaattgcatggtactaaggt

SEQ ID NO: 307440 - DNA, 25 bp, Artificial
  probe
  misc_feature (1)..(25): SEQ ID NO: 1858; WAN024D9S; Start 598; Stop 622
gtaacacaattgcatggtactaagg

SEQ ID NO: 307441 - DNA, 25 bp, Artificial
  probe
  misc_feature (1)..(25): SEQ ID NO: 1858; WAN024D9S; Start 597; Stop 621
ggtaacacaattgcatggtactaag

SEQ ID NO: 307442 - DNA, 25 bp, Artificial
  probe
  misc_feature (1)..(25): SEQ ID NO: 1858; WAN024D9S; Start 218; Stop 242
aaattgctatcatgctagaagacat

SEQ ID NO: 307443 - DNA, 25 bp, Artificial
  probe
  misc_feature (1)..(25): SEQ ID NO: 1858; WAN024D9S; Start 191; Stop 215
gtggtgactttgtctataatgacct

SEQ ID NO: 307444 - DNA, 25 bp, Artificial
  probe
  misc_feature (1)..(25): SEQ ID NO: 1858; WAN024D9S; Start 187; Stop 211
cgtggtggtgactttgtctataatg

SEQ ID NO: 307445 - DNA, 25 bp, Artificial
  probe
  misc_feature (1)..(25): SEQ ID NO: 1858; WAN024D9S; Start 378; Stop 402
tgatgaactaagtgatgaagatcaa

SEQ ID NO: 307446 - DNA, 25 bp, Artificial
  probe
  misc_feature (1)..(25): SEQ ID NO: 1858; WAN024D9S; Start 377; Stop 401
ttgatgaactaagtgatgaagatca

SEQ ID NO: 307447 - DNA, 25 bp, Artificial
  probe
  misc_feature (1)..(25): SEQ ID NO: 1858; WAN024D9S; Start 600; Stop 624
aacacaattgcatggtactaaggtt

SEQ ID NO: 307448 - DNA, 25 bp, Artificial
  probe
  misc_feature (1)..(25): SEQ ID NO: 1858; WAN024D9S; Start 192; Stop 216
tggtgactttgtctataatgaccta

SEQ ID NO: 307449 - DNA, 25 bp, Artificial
  probe
  misc_feature (1)..(25): SEQ ID NO: 1858; WAN024D9S; Start 190; Stop 214
ggtggtgactttgtctataatgacc

SEQ ID NO: 307450 - DNA, 25 bp, Artificial
  probe
  misc_feature (1)..(25): SEQ ID NO: 1858; WAN024D9S; Start 346; Stop 370
aaaggaatggaaattgtctttcaca

SEQ ID NO: 307451 - DNA, 25 bp, Artificial
  probe
  misc_feature (1)..(25): SEQ ID NO: 1858; WAN024D9S; Start 215; Stop 239
tagaaattgctatcatgctagaaga

SEQ ID NO: 307452 - DNA, 25 bp, Artificial
  probe
  misc_feature (1)..(25): SEQ ID NO: 1858; WAN024D9S; Start 193; Stop 217
ggtgactttgtctataatgacctag

SEQ ID NO: 307453 - DNA, 25 bp, Artificial
  probe
  misc_feature (1)..(25): SEQ ID NO: 1858; WAN024D9S; Start 347; Stop 371
aaggaatggaaattgtctttcacat

SEQ ID NO: 307454 - DNA, 25 bp, Artificial
  probe
  misc_feature (1)..(25): SEQ ID NO: 1858; WAN024D9S; Start 375; Stop 399
ctttgatgaactaagtgatgaagat

SEQ ID NO: 307455 - DNA, 25 bp, Artificial
  probe
  misc_feature (1)..(25): SEQ ID NO: 1858; WAN024D9S; Start 601; Stop 625
acacaattgcatggtactaaggttg

SEQ ID NO: 307456 - DNA, 25 bp, Artificial
  probe
  misc_feature (1)..(25): SEQ ID NO: 1858; WAN024D9S; Start 212; Stop 236
acctagaaattgctatcatgctaga

SEQ ID NO: 307457 - DNA, 25 bp, Artificial
  probe
  misc_feature (1)..(25): SEQ ID NO: 1858; WAN024D9S; Start 211; Stop 235
gacctagaaattgctatcatgctag

SEQ ID NO: 307458 - DNA, 25 bp, Artificial
  probe
  misc_feature (1)..(25): SEQ ID NO: 1858; WAN024D9S; Start 348; Stop 372
aggaatggaaattgtctttcacatg

SEQ ID NO: 307459 - DNA, 25 bp, Artificial
  probe
  misc_feature (1)..(25): SEQ ID NO: 1858; WAN024D9S; Start 17; Stop 41
gtgctgaaaatgtgactttacttga

SEQ ID NO: 307460 - DNA, 25 bp, Artificial
  probe
  misc_feature (1)..(25): SEQ ID NO: 1858; WAN024D9S; Start 15; Stop 39
ttgtgctgaaaatgtgactttactt

SEQ ID NO: 307461 - DNA, 25 bp, Artificial
  probe
  misc_feature (1)..(25): SEQ ID NO: 1858; WAN024D9S; Start 14; Stop 38
tttgtgctgaaaatgtgactttact

SEQ ID NO: 307462 - DNA, 25 bp, Artificial
  probe
  misc_feature (1)..(25): SEQ ID NO: 1859; WAN024ETD; Start 456; Stop 480
ctctatccaacctattgaggctatt

SEQ ID NO: 307463 - DNA, 25 bp, Artificial
  probe
  misc_feature (1)..(25): SEQ ID NO: 1859; WAN024ETD; Start 450; Stop 474
aatcggctctatccaacctattgag

SEQ ID NO: 307464 - DNA, 25 bp, Artificial
  probe
  misc_feature (1)..(25): SEQ ID NO: 1859; WAN024ETD; Start 455; Stop 479
gctctatccaacctattgaggctat

SEQ ID NO: 307465 - DNA, 25 bp, Artificial
  probe
  misc_feature (1)..(25): SEQ ID NO: 1859; WAN024ETD; Start 925; Stop 949
cacgcctttgaagactatgatattt

SEQ ID NO: 307466 - DNA, 25 bp, Artificial
  probe
  misc_feature (1)..(25): SEQ ID NO: 1859; WAN024ETD; Start 446; Stop 470
atgaaatcggctctatccaacctat

SEQ ID NO: 307467 - DNA, 25 bp, Artificial
  probe
  misc_feature (1)..(25): SEQ ID NO: 1859; WAN024ETD; Start 441; Stop 465
gaacaatgaaatcggctctatccaa

SEQ ID NO: 307468 - DNA, 25 bp, Artificial
  probe
  misc_feature (1)..(25): SEQ ID NO: 1859; WAN024ETD; Start 924; Stop 948
tcacgcctttgaagactatgatatt

SEQ ID NO: 307469 - DNA, 25 bp, Artificial
  probe
  misc_feature (1)..(25): SEQ ID NO: 1859; WAN024ETD; Start 447; Stop 471
tgaaatcggctctatccaacctatt

SEQ ID NO: 307470 - DNA, 25 bp, Artificial
  probe
  misc_feature (1)..(25): SEQ ID NO: 1859; WAN024ETD; Start 445; Stop 469
aatgaaatcggctctatccaaccta

SEQ ID NO: 307471 - DNA, 25 bp, Artificial
  probe
  misc_feature (1)..(25): SEQ ID NO: 1859; WAN024ETD; Start 442; Stop 466
aacaatgaaatcggctctatccaac

SEQ ID NO: 307472 - DNA, 25 bp, Artificial
  probe
  misc_feature (1)..(25): SEQ ID NO: 1859; WAN024ETD; Start 438; Stop 462
tgtgaacaatgaaatcggctctatc

SEQ ID NO: 307473 - DNA, 25 bp, Artificial
  probe
  misc_feature (1)..(25): SEQ ID NO: 1859; WAN024ETD; Start 437; Stop 461
ctgtgaacaatgaaatcggctctat

SEQ ID NO: 307474 - DNA, 25 bp, Artificial
  probe
  misc_feature (1)..(25): SEQ ID NO: 1859; WAN024ETD; Start 448; Stop 472
gaaatcggctctatccaacctattg

SEQ ID NO: 307475 - DNA, 25 bp, Artificial
  probe
  misc_feature (1)..(25): SEQ ID NO: 1859; WAN024ETD; Start 439; Stop 463
gtgaacaatgaaatcggctctatcc

SEQ ID NO: 307476 - DNA, 25 bp, Artificial
  probe
  misc_feature (1)..(25): SEQ ID NO: 1859; WAN024ETD; Start 449; Stop 473
aaatcggctctatccaacctattga

SEQ ID NO: 307477 - DNA, 25 bp, Artificial
  probe
  misc_feature (1)..(25): SEQ ID NO: 1859; WAN024ETD; Start 460; Stop 484
atccaacctattgaggctatttcag

SEQ ID NO: 307478 - DNA, 25 bp, Artificial
  probe
  misc_feature (1)..(25): SEQ ID NO: 1859; WAN024ETD; Start 462; Stop 486
ccaacctattgaggctatttcagaa

SEQ ID NO: 307479 - DNA, 25 bp, Artificial
  probe
  misc_feature (1)..(25): SEQ ID NO: 1859; WAN024ETD; Start 440; Stop 464
tgaacaatgaaatcggctctatcca

SEQ ID NO: 307480 - DNA, 25 bp, Artificial
  probe
  misc_feature (1)..(25): SEQ ID NO: 1859; WAN024ETD; Start 459; Stop 483
tatccaacctattgaggctatttca

SEQ ID NO: 307481 - DNA, 25 bp, Artificial
  probe
  misc_feature (1)..(25): SEQ ID NO: 1859; WAN024ETD; Start 457; Stop 481
tctatccaacctattgaggctattt

SEQ ID NO: 307482 - DNA, 25 bp, Artificial
  probe
  misc_feature (1)..(25): SEQ ID NO: 1859; WAN024ETD; Start 463; Stop 487
caacctattgaggctatttcagaat

SEQ ID NO: 307483 - DNA, 25 bp, Artificial
  probe
  misc_feature (1)..(25): SEQ ID NO: 1859; WAN024ETD; Start 461; Stop 485
tccaacctattgaggctatttcaga

SEQ ID NO: 307484 - DNA, 25 bp, Artificial
  probe
  misc_feature (1)..(25): SEQ ID NO: 1859; WAN024ETD; Start 458; Stop 482
ctatccaacctattgaggctatttc

SEQ ID NO: 307485 - DNA, 25 bp, Artificial
  probe
  misc_feature (1)..(25): SEQ ID NO: 1859; WAN024ETD; Start 454; Stop 478
ggctctatccaacctattgaggcta

SEQ ID NO: 307486 - DNA, 25 bp, Artificial
  probe
  misc_feature (1)..(25): SEQ ID NO: 1859; WAN024ETD; Start 464; Stop 488
aacctattgaggctatttcagaatt

SEQ ID NO: 307487 - DNA, 25 bp, Artificial
  probe
  misc_feature (1)..(25): SEQ ID NO: 1859; WAN024ETD; Start 444; Stop 468
caatgaaatcggctctatccaacct

SEQ ID NO: 307488 - DNA, 25 bp, Artificial
  probe
  misc_feature (1)..(25): SEQ ID NO: 1859; WAN024ETD; Start 451; Stop 475
atcggctctatccaacctattgagg

SEQ ID NO: 307489 - DNA, 25 bp, Artificial
  probe
  misc_feature (1)..(25): SEQ ID NO: 1859; WAN024ETD; Start 443; Stop 467
acaatgaaatcggctctatccaacc

SEQ ID NO: 307490 - DNA, 25 bp, Artificial
  probe
  misc_feature (1)..(25): SEQ ID NO: 1859; WAN024ETD; Start 1070; Stop 1094
atgatatgagtcaggtcgagcagtt

SEQ ID NO: 307491 - DNA, 25 bp, Artificial
  probe
  misc_feature (1)..(25): SEQ ID NO: 1859; WAN024ETD; Start 1069; Stop 1093
aatgatatgagtcaggtcgagcagt

SEQ ID NO: 307492 - DNA, 25 bp, Artificial
  probe
  misc_feature (1)..(25): SEQ ID NO: 1859; WAN024ETD; Start 926; Stop 950
acgcctttgaagactatgatatttt

SEQ ID NO: 307493 - DNA, 25 bp, Artificial
  probe
  misc_feature (1)..(25): SEQ ID NO: 1859; WAN024ETD; Start 923; Stop 947
ttcacgcctttgaagactatgatat

SEQ ID NO: 307494 - DNA, 25 bp, Artificial
  probe
  misc_feature (1)..(25): SEQ ID NO: 1859; WAN024ETD; Start 148; Stop 172
caacagattgcagatttaatcggta

SEQ ID NO: 307495 - DNA, 25 bp, Artificial
  probe
  misc_feature (1)..(25): SEQ ID NO: 1860; WAN024GAG; Start 23; Stop 47
atccatccattgactatatcgttcg

SEQ ID NO: 307496 - DNA, 25 bp, Artificial
  probe
  misc_feature (1)..(25): SEQ ID NO: 1860; WAN024GAG; Start 641; Stop 665
ttattatctctatggctggtgatgg

SEQ ID NO: 307497 - DNA, 25 bp, Artificial
  probe
  misc_feature (1)..(25): SEQ ID NO: 1860; WAN024GAG; Start 77; Stop 101
atcgtatggacagtgatgataagtt

SEQ ID NO: 307498 - DNA, 25 bp, Artificial
  probe
  misc_feature (1)..(25): SEQ ID NO: 1860; WAN024GAG; Start 76; Stop 100
aatcgtatggacagtgatgataagt

SEQ ID NO: 307499 - DNA, 25 bp, Artificial
  probe
  misc_feature (1)..(25): SEQ ID NO: 1860; WAN024GAG; Start 25; Stop 49
ccatccattgactatatcgttcgtt

SEQ ID NO: 307500 - DNA, 25 bp, Artificial
  probe
  misc_feature (1)..(25): SEQ ID NO: 1860; WAN024GAG; Start 638; Stop 662
atgttattatctctatggctggtga

SEQ ID NO: 307501 - DNA, 25 bp, Artificial
  probe
  misc_feature (1)..(25): SEQ ID NO: 1860; WAN024GAG; Start 639; Stop 663
tgttattatctctatggctggtgat

SEQ ID NO: 307502 - DNA, 25 bp, Artificial
  probe
  misc_feature (1)..(25): SEQ ID NO: 1860; WAN024GAG; Start 640; Stop 664
gttattatctctatggctggtgatg

SEQ ID NO: 307503 - DNA, 25 bp, Artificial
  probe
  misc_feature (1)..(25): SEQ ID NO: 1860; WAN024GAG; Start 24; Stop 48
tccatccattgactatatcgttcgt

SEQ ID NO: 307504 - DNA, 25 bp, Artificial
  probe
  misc_feature (1)..(25): SEQ ID NO: 1860; WAN024GAG; Start 22; Stop 46
aatccatccattgactatatcgttc

SEQ ID NO: 307505 - DNA, 25 bp, Artificial
  probe
  misc_feature (1)..(25): SEQ ID NO: 1860; WAN024GAG; Start 637; Stop 661
aatgttattatctctatggctggtg

SEQ ID NO: 307506 - DNA, 25 bp, Artificial
  probe
  misc_feature (1)..(25): SEQ ID NO: 1860; WAN024GAG; Start 6; Stop 30
ttatacagtcacactcaatccatcc

SEQ ID NO: 307507 - DNA, 25 bp, Artificial
  probe
  misc_feature (1)..(25): SEQ ID NO: 1860; WAN024GAG; Start 7; Stop 31
tatacagtcacactcaatccatcca

SEQ ID NO: 307508 - DNA, 25 bp, Artificial
  probe
  misc_feature (1)..(25): SEQ ID NO: 1860; WAN024GAG; Start 8; Stop 32
atacagtcacactcaatccatccat

SEQ ID NO: 307509 - DNA, 25 bp, Artificial
  probe
  misc_feature (1)..(25): SEQ ID NO: 1860; WAN024GAG; Start 9; Stop 33
tacagtcacactcaatccatccatt

SEQ ID NO: 307510 - DNA, 25 bp, Artificial
  probe
  misc_feature (1)..(25): SEQ ID NO: 1860; WAN024GAG; Start 744; Stop 768
tgattctatggttgctggattcaca

SEQ ID NO: 307511 - DNA, 25 bp, Artificial
  probe
  misc_feature (1)..(25): SEQ ID NO: 1860; WAN024GAG; Start 745; Stop 769
gattctatggttgctggattcacag

SEQ ID NO: 307512 - DNA, 25 bp, Artificial
  probe
  misc_feature (1)..(25): SEQ ID NO: 1860; WAN024GAG; Start 741; Stop 765
tggtgattctatggttgctggattc

SEQ ID NO: 307513 - DNA, 25 bp, Artificial
  probe
  misc_feature (1)..(25): SEQ ID NO: 1860; WAN024GAG; Start 740; Stop 764
ctggtgattctatggttgctggatt

SEQ ID NO: 307514 - DNA, 25 bp, Artificial
  probe
  misc_feature (1)..(25): SEQ ID NO: 1860; WAN024GAG; Start 81; Stop 105
tatggacagtgatgataagtttgct

SEQ ID NO: 307515 - DNA, 25 bp, Artificial
  probe
  misc_feature (1)..(25): SEQ ID NO: 1860; WAN024GAG; Start 80; Stop 104
gtatggacagtgatgataagtttgc

SEQ ID NO: 307516 - DNA, 25 bp, Artificial
  probe
  misc_feature (1)..(25): SEQ ID NO: 1860; WAN024GAG; Start 79; Stop 103
cgtatggacagtgatgataagtttg

SEQ ID NO: 307517 - DNA, 25 bp, Artificial
  probe
  misc_feature (1)..(25): SEQ ID NO: 1860; WAN024GAG; Start 78; Stop 102
tcgtatggacagtgatgataagttt

SEQ ID NO: 307518 - DNA, 25 bp, Artificial
  probe
  misc_feature (1)..(25): SEQ ID NO: 1860; WAN024GAG; Start 701; Stop 725
ctaaaccaatcaaaggaacagtcaa

SEQ ID NO: 307519 - DNA, 25 bp, Artificial
  probe
  misc_feature (1)..(25): SEQ ID NO: 1860; WAN024GAG; Start 30; Stop 54
cattgactatatcgttcgtttggac

SEQ ID NO: 307520 - DNA, 25 bp, Artificial
  probe
  misc_feature (1)..(25): SEQ ID NO: 1860; WAN024GAG; Start 702; Stop 726
taaaccaatcaaaggaacagtcaaa

SEQ ID NO: 307521 - DNA, 25 bp, Artificial
  probe
  misc_feature (1)..(25): SEQ ID NO: 1860; WAN024GAG; Start 249; Stop 273
ggcagaagatactcgtatcaatgtt

SEQ ID NO: 307522 - DNA, 25 bp, Artificial
  probe
  misc_feature (1)..(25): SEQ ID NO: 1860; WAN024GAG; Start 27; Stop 51
atccattgactatatcgttcgtttg

SEQ ID NO: 307523 - DNA, 25 bp, Artificial
  probe
  misc_feature (1)..(25): SEQ ID NO: 1860; WAN024GAG; Start 26; Stop 50
catccattgactatatcgttcgttt

SEQ ID NO: 307524 - DNA, 25 bp, Artificial
  probe
  misc_feature (1)..(25): SEQ ID NO: 1860; WAN024GAG; Start 858; Stop 882
aacggcggaatttattaaagaaaca

SEQ ID NO: 307525 - DNA, 25 bp, Artificial
  probe
  misc_feature (1)..(25): SEQ ID NO: 1860; WAN024GAG; Start 859; Stop 883
acggcggaatttattaaagaaacat

SEQ ID NO: 307526 - DNA, 25 bp, Artificial
  probe
  misc_feature (1)..(25): SEQ ID NO: 1860; WAN024GAG; Start 857; Stop 881
caacggcggaatttattaaagaaac

SEQ ID NO: 307527 - DNA, 25 bp, Artificial
  probe
  misc_feature (1)..(25): SEQ ID NO: 1860; WAN024GAG; Start 201; Stop 225
cacagatactttagcagaggaagaa

SEQ ID NO: 307528 - DNA, 25 bp, Artificial
  probe
  misc_feature (1)..(25): SEQ ID NO: 1861; WAN024FZ6; Start 649; Stop 673
ctgaagattacaaccgtaacagatt

SEQ ID NO: 307529 - DNA, 25 bp, Artificial
  probe
  misc_feature (1)..(25): SEQ ID NO: 1861; WAN024FZ6; Start 658; Stop 682
acaaccgtaacagatttgaagattg

SEQ ID NO: 307530 - DNA, 25 bp, Artificial
  probe
  misc_feature (1)..(25): SEQ ID NO: 1861; WAN024FZ6; Start 535; Stop 559
atggacctttatggatctctttctg

SEQ ID NO: 307531 - DNA, 25 bp, Artificial
  probe
  misc_feature (1)..(25): SEQ ID NO: 1861; WAN024FZ6; Start 537; Stop 561
ggacctttatggatctctttctgat

SEQ ID NO: 307532 - DNA, 25 bp, Artificial
  probe
  misc_feature (1)..(25): SEQ ID NO: 1861; WAN024FZ6; Start 659; Stop 683
caaccgtaacagatttgaagattgc

SEQ ID NO: 307533 - DNA, 25 bp, Artificial
  probe
  misc_feature (1)..(25): SEQ ID NO: 1861; WAN024FZ6; Start 536; Stop 560
tggacctttatggatctctttctga

SEQ ID NO: 307534 - DNA, 25 bp, Artificial
  probe
  misc_feature (1)..(25): SEQ ID NO: 1861; WAN024FZ6; Start 657; Stop 681
tacaaccgtaacagatttgaagatt

SEQ ID NO: 307535 - DNA, 25 bp, Artificial
  probe
  misc_feature (1)..(25): SEQ ID NO: 1861; WAN024FZ6; Start 539; Stop 563
acctttatggatctctttctgatga

SEQ ID NO: 307536 - DNA, 25 bp, Artificial
  probe
  misc_feature (1)..(25): SEQ ID NO: 1861; WAN024FZ6; Start 646; Stop 670
aatctgaagattacaaccgtaacag

SEQ ID NO: 307537 - DNA, 25 bp, Artificial
  probe
  misc_feature (1)..(25): SEQ ID NO: 1861; WAN024FZ6; Start 538; Stop 562
gacctttatggatctctttctgatg

SEQ ID NO: 307538 - DNA, 25 bp, Artificial
  probe
  misc_feature (1)..(25): SEQ ID NO: 1861; WAN024FZ6; Start 534; Stop 558
catggacctttatggatctctttct

SEQ ID NO: 307539 - DNA, 25 bp, Artificial
  probe
  misc_feature (1)..(25): SEQ ID NO: 1861; WAN024FZ6; Start 533; Stop 557
tcatggacctttatggatctctttc

SEQ ID NO: 307540 - DNA, 25 bp, Artificial
  probe
  misc_feature (1)..(25): SEQ ID NO: 1861; WAN024FZ6; Start 531; Stop 555
cttcatggacctttatggatctctt

SEQ ID NO: 307541 - DNA, 25 bp, Artificial
  probe
  misc_feature (1)..(25): SEQ ID NO: 1861; WAN024FZ6; Start 532; Stop 556
ttcatggacctttatggatctcttt

SEQ ID NO: 307542 - DNA, 25 bp, Artificial
  probe
  misc_feature (1)..(25): SEQ ID NO: 1861; WAN024FZ6; Start 529; Stop 553
gacttcatggacctttatggatctc

SEQ ID NO: 307543 - DNA, 25 bp, Artificial
  probe
  misc_feature (1)..(25): SEQ ID NO: 1861; WAN024FZ6; Start 530; Stop 554
acttcatggacctttatggatctct

SEQ ID NO: 307544 - DNA, 25 bp, Artificial
  probe
  misc_feature (1)..(25): SEQ ID NO: 1861; WAN024FZ6; Start 305; Stop 329
ttactccagaggatatcgttgttac

SEQ ID NO: 307545 - DNA, 25 bp, Artificial
  probe
  misc_feature (1)..(25): SEQ ID NO: 1861; WAN024FZ6; Start 304; Stop 328
cttactccagaggatatcgttgtta

SEQ ID NO: 307546 - DNA, 25 bp, Artificial
  probe
  misc_feature (1)..(25): SEQ ID NO: 1861; WAN024FZ6; Start 540; Stop 564
cctttatggatctctttctgatgaa

SEQ ID NO: 307547 - DNA, 25 bp, Artificial
  probe
  misc_feature (1)..(25): SEQ ID NO: 1861; WAN024FZ6; Start 306; Stop 330
tactccagaggatatcgttgttacc

SEQ ID NO: 307548 - DNA, 25 bp, Artificial
  probe
  misc_feature (1)..(25): SEQ ID NO: 1861; WAN024FZ6; Start 528; Stop 552
ggacttcatggacctttatggatct

SEQ ID NO: 307549 - DNA, 25 bp, Artificial
  probe
  misc_feature (1)..(25): SEQ ID NO: 1861; WAN024FZ6; Start 656; Stop 680
ttacaaccgtaacagatttgaagat

SEQ ID NO: 307550 - DNA, 25 bp, Artificial
  probe
  misc_feature (1)..(25): SEQ ID NO: 1861; WAN024FZ6; Start 655; Stop 679
attacaaccgtaacagatttgaaga

SEQ ID NO: 307551 - DNA, 25 bp, Artificial
  probe
  misc_feature (1)..(25): SEQ ID NO: 1861; WAN024FZ6; Start 653; Stop 677
agattacaaccgtaacagatttgaa

SEQ ID NO: 307552 - DNA, 25 bp, Artificial
  probe
  misc_feature (1)..(25): SEQ ID NO: 1861; WAN024FZ6; Start 652; Stop 676
aagattacaaccgtaacagatttga

SEQ ID NO: 307553 - DNA, 25 bp, Artificial
  probe
  misc_feature (1)..(25): SEQ ID NO: 1861; WAN024FZ6; Start 650; Stop 674
tgaagattacaaccgtaacagattt

SEQ ID NO: 307554 - DNA, 25 bp, Artificial
  probe
  misc_feature (1)..(25): SEQ ID NO: 1861; WAN024FZ6; Start 654; Stop 678
gattacaaccgtaacagatttgaag

SEQ ID NO: 307555 - DNA, 25 bp, Artificial
  probe
  misc_feature (1)..(25): SEQ ID NO: 1861; WAN024FZ6; Start 651; Stop 675
gaagattacaaccgtaacagatttg

SEQ ID NO: 307556 - DNA, 25 bp, Artificial
  probe
  misc_feature (1)..(25): SEQ ID NO: 1861; WAN024FZ6; Start 660; Stop 684
aaccgtaacagatttgaagattgca

SEQ ID NO: 307557 - DNA, 25 bp, Artificial
  probe
  misc_feature (1)..(25): SEQ ID NO: 1861; WAN024FZ6; Start 431; Stop 455
atactatcgttgaaagtaccaatgg

SEQ ID NO: 307558 - DNA, 25 bp, Artificial
  probe
  misc_feature (1)..(25): SEQ ID NO: 1861; WAN024FZ6; Start 303; Stop 327
gcttactccagaggatatcgttgtt

SEQ ID NO: 307559 - DNA, 25 bp, Artificial
  probe
  misc_feature (1)..(25): SEQ ID NO: 1861; WAN024FZ6; Start 558; Stop 582
tgatgaagagaaggaaatcttgaca

SEQ ID NO: 307560 - DNA, 25 bp, Artificial
  probe
  misc_feature (1)..(25): SEQ ID NO: 1861; WAN024FZ6; Start 561; Stop 585
tgaagagaaggaaatcttgacagat

SEQ ID NO: 307561 - DNA, 25 bp, Artificial
  probe
  misc_feature (1)..(25): SEQ ID NO: 1862; WAN024D9X; Start 35; Stop 59
tgatgtctttatgggaaatggctta

SEQ ID NO: 307562 - DNA, 25 bp, Artificial
  probe
  misc_feature (1)..(25): SEQ ID NO: 1862; WAN024D9X; Start 83; Stop 107
aacagtatgatgctccctattatga

SEQ ID NO: 307563 - DNA, 25 bp, Artificial
  probe
  misc_feature (1)..(25): SEQ ID NO: 1862; WAN024D9X; Start 36; Stop 60
gatgtctttatgggaaatggcttat

SEQ ID NO: 307564 - DNA, 25 bp, Artificial
  probe
  misc_feature (1)..(25): SEQ ID NO: 1862; WAN024D9X; Start 34; Stop 58
ttgatgtctttatgggaaatggctt

SEQ ID NO: 307565 - DNA, 25 bp, Artificial
  probe
  misc_feature (1)..(25): SEQ ID NO: 1862; WAN024D9X; Start 33; Stop 57
tttgatgtctttatgggaaatggct

SEQ ID NO: 307566 - DNA, 25 bp, Artificial
  probe
  misc_feature (1)..(25): SEQ ID NO: 1862; WAN024D9X; Start 41; Stop 65
ctttatgggaaatggcttattcaca

SEQ ID NO: 307567 - DNA, 25 bp, Artificial
  probe
  misc_feature (1)..(25): SEQ ID NO: 1862; WAN024D9X; Start 84; Stop 108
acagtatgatgctccctattatgat

SEQ ID NO: 307568 - DNA, 25 bp, Artificial
  probe
  misc_feature (1)..(25): SEQ ID NO: 1862; WAN024D9X; Start 40; Stop 64
tctttatgggaaatggcttattcac

SEQ ID NO: 307569 - DNA, 25 bp, Artificial
  probe
  misc_feature (1)..(25): SEQ ID NO: 1862; WAN024D9X; Start 39; Stop 63
gtctttatgggaaatggcttattca

SEQ ID NO: 307570 - DNA, 25 bp, Artificial
  probe
  misc_feature (1)..(25): SEQ ID NO: 1862; WAN024D9X; Start 38; Stop 62
tgtctttatgggaaatggcttattc

SEQ ID NO: 307571 - DNA, 25 bp, Artificial
  probe
  misc_feature (1)..(25): SEQ ID NO: 1862; WAN024D9X; Start 299; Stop 323
ctggtattgggaaagttgctatgtt

SEQ ID NO: 307572 - DNA, 25 bp, Artificial
  probe
  misc_feature (1)..(25): SEQ ID NO: 1862; WAN024D9X; Start 85; Stop 109
cagtatgatgctccctattatgatg

SEQ ID NO: 307573 - DNA, 25 bp, Artificial
  probe
  misc_feature (1)..(25): SEQ ID NO: 1862; WAN024D9X; Start 37; Stop 61
atgtctttatgggaaatggcttatt

SEQ ID NO: 307574 - DNA, 25 bp, Artificial
  probe
  misc_feature (1)..(25): SEQ ID NO: 1862; WAN024D9X; Start 86; Stop 110
agtatgatgctccctattatgatga

SEQ ID NO: 307575 - DNA, 25 bp, Artificial
  probe
  misc_feature (1)..(25): SEQ ID NO: 1862; WAN024D9X; Start 300; Stop 324
tggtattgggaaagttgctatgttg

SEQ ID NO: 307576 - DNA, 25 bp, Artificial
  probe
  misc_feature (1)..(25): SEQ ID NO: 1862; WAN024D9X; Start 82; Stop 106
aaacagtatgatgctccctattatg

SEQ ID NO: 307577 - DNA, 25 bp, Artificial
  probe
  misc_feature (1)..(25): SEQ ID NO: 1862; WAN024D9X; Start 318; Stop 342
tatgttgcagtggatagataggacg

SEQ ID NO: 307578 - DNA, 25 bp, Artificial
  probe
  misc_feature (1)..(25): SEQ ID NO: 1862; WAN024D9X; Start 317; Stop 341
ctatgttgcagtggatagataggac

SEQ ID NO: 307579 - DNA, 25 bp, Artificial
  probe
  misc_feature (1)..(25): SEQ ID NO: 1862; WAN024D9X; Start 245; Stop 269
aaacaagatggatggaattgggaat

SEQ ID NO: 307580 - DNA, 25 bp, Artificial
  probe
  misc_feature (1)..(25): SEQ ID NO: 1862; WAN024D9X; Start 81; Stop 105
gaaacagtatgatgctccctattat

SEQ ID NO: 307581 - DNA, 25 bp, Artificial
  probe
  misc_feature (1)..(25): SEQ ID NO: 1862; WAN024D9X; Start 32; Stop 56
atttgatgtctttatgggaaatggc

SEQ ID NO: 307582 - DNA, 25 bp, Artificial
  probe
  misc_feature (1)..(25): SEQ ID NO: 1862; WAN024D9X; Start 252; Stop 276
atggatggaattgggaattggtatt

SEQ ID NO: 307583 - DNA, 25 bp, Artificial
  probe
  misc_feature (1)..(25): SEQ ID NO: 1862; WAN024D9X; Start 253; Stop 277
tggatggaattgggaattggtattt

SEQ ID NO: 307584 - DNA, 25 bp, Artificial
  probe
  misc_feature (1)..(25): SEQ ID NO: 1862; WAN024D9X; Start 342; Stop 366
gtttcaggattacttggagttggag

SEQ ID NO: 307585 - DNA, 25 bp, Artificial
  probe
  misc_feature (1)..(25): SEQ ID NO: 1862; WAN024D9X; Start 349; Stop 373
gattacttggagttggagcatctgg

SEQ ID NO: 307586 - DNA, 25 bp, Artificial
  probe
  misc_feature (1)..(25): SEQ ID NO: 1862; WAN024D9X; Start 348; Stop 372
ggattacttggagttggagcatctg

SEQ ID NO: 307587 - DNA, 25 bp, Artificial
  probe
  misc_feature (1)..(25): SEQ ID NO: 1862; WAN024D9X; Start 346; Stop 370
caggattacttggagttggagcatc

SEQ ID NO: 307588 - DNA, 25 bp, Artificial
  probe
  misc_feature (1)..(25): SEQ ID NO: 1862; WAN024D9X; Start 251; Stop 275
gatggatggaattgggaattggtat

SEQ ID NO: 307589 - DNA, 25 bp, Artificial
  probe
  misc_feature (1)..(25): SEQ ID NO: 1862; WAN024D9X; Start 246; Stop 270
aacaagatggatggaattgggaatt

SEQ ID NO: 307590 - DNA, 25 bp, Artificial
  probe
  misc_feature (1)..(25): SEQ ID NO: 1862; WAN024D9X; Start 254; Stop 278
ggatggaattgggaattggtattta

SEQ ID NO: 307591 - DNA, 25 bp, Artificial
  probe
  misc_feature (1)..(25): SEQ ID NO: 1862; WAN024D9X; Start 347; Stop 371
aggattacttggagttggagcatct

SEQ ID NO: 307592 - DNA, 25 bp, Artificial
  probe
  misc_feature (1)..(25): SEQ ID NO: 1862; WAN024D9X; Start 87; Stop 111
gtatgatgctccctattatgatgat

SEQ ID NO: 307593 - DNA, 25 bp, Artificial
  probe
  misc_feature (1)..(25): SEQ ID NO: 1862; WAN024D9X; Start 286; Stop 310
aaattctggaacactggtattggga

SEQ ID NO: 307594 - DNA, 25 bp, Artificial
  probe
  misc_feature (1)..(25): SEQ ID NO: 1863; WAN024EYB; Start 636; Stop 660
taagattcaagctatcaaggaggtg

SEQ ID NO: 307595 - DNA, 25 bp, Artificial
  probe
  misc_feature (1)..(25): SEQ ID NO: 1863; WAN024EYB; Start 635; Stop 659
ataagattcaagctatcaaggaggt

SEQ ID NO: 307596 - DNA, 25 bp, Artificial
  probe
  misc_feature (1)..(25): SEQ ID NO: 1863; WAN024EYB; Start 11; Stop 35
agagattagaattggtagcttcctt

SEQ ID NO: 307597 - DNA, 25 bp, Artificial
  probe
  misc_feature (1)..(25): SEQ ID NO: 1863; WAN024EYB; Start 10; Stop 34
aagagattagaattggtagcttcct

SEQ ID NO: 307598 - DNA, 25 bp, Artificial
  probe
  misc_feature (1)..(25): SEQ ID NO: 1863; WAN024EYB; Start 250; Stop 274
caagtgtctgtcattaccattgctg

SEQ ID NO: 307599 - DNA, 25 bp, Artificial
  probe
  misc_feature (1)..(25): SEQ ID NO: 1863; WAN024EYB; Start 247; Stop 271
gaccaagtgtctgtcattaccattg

SEQ ID NO: 307600 - DNA, 25 bp, Artificial
  probe
  misc_feature (1)..(25): SEQ ID NO: 1863; WAN024EYB; Start 523; Stop 547
aaagaagtcagtccagtatttgtcc

SEQ ID NO: 307601 - DNA, 25 bp, Artificial
  probe
  misc_feature (1)..(25): SEQ ID NO: 1863; WAN024EYB; Start 519; Stop 543
gtccaaagaagtcagtccagtattt

SEQ ID NO: 307602 - DNA, 25 bp, Artificial
  probe
  misc_feature (1)..(25): SEQ ID NO: 1863; WAN024EYB; Start 381; Stop 405
tatctggctacaggatcatggattc

SEQ ID NO: 307603 - DNA, 25 bp, Artificial
  probe
  misc_feature (1)..(25): SEQ ID NO: 1863; WAN024EYB; Start 380; Stop 404
gtatctggctacaggatcatggatt

SEQ ID NO: 307604 - DNA, 25 bp, Artificial
  probe
  misc_feature (1)..(25): SEQ ID NO: 1863; WAN024EYB; Start 69; Stop 93
aagtgaccatgcttatctgcctatc

SEQ ID NO: 307605 - DNA, 25 bp, Artificial
  probe
  misc_feature (1)..(25): SEQ ID NO: 1863; WAN024EYB; Start 68; Stop 92
gaagtgaccatgcttatctgcctat

SEQ ID NO: 307606 - DNA, 25 bp, Artificial
  probe
  misc_feature (1)..(25): SEQ ID NO: 1863; WAN024EYB; Start 634; Stop 658
gataagattcaagctatcaaggagg

SEQ ID NO: 307607 - DNA, 25 bp, Artificial
  probe
  misc_feature (1)..(25): SEQ ID NO: 1863; WAN024EYB; Start 524; Stop 548
aagaagtcagtccagtatttgtcca

SEQ ID NO: 307608 - DNA, 25 bp, Artificial
  probe
  misc_feature (1)..(25): SEQ ID NO: 1863; WAN024EYB; Start 518; Stop 542
tgtccaaagaagtcagtccagtatt

SEQ ID NO: 307609 - DNA, 25 bp, Artificial
  probe
  misc_feature (1)..(25): SEQ ID NO: 1863; WAN024EYB; Start 525; Stop 549
agaagtcagtccagtatttgtccaa

SEQ ID NO: 307610 - DNA, 25 bp, Artificial
  probe
  misc_feature (1)..(25): SEQ ID NO: 1863; WAN024EYB; Start 517; Stop 541
ttgtccaaagaagtcagtccagtat

SEQ ID NO: 307611 - DNA, 25 bp, Artificial
  probe
  misc_feature (1)..(25): SEQ ID NO: 1863; WAN024EYB; Start 81; Stop 105
ttatctgcctatcgagttggttgag

SEQ ID NO: 307612 - DNA, 25 bp, Artificial
  probe
  misc_feature (1)..(25): SEQ ID NO: 1863; WAN024EYB; Start 80; Stop 104
cttatctgcctatcgagttggttga

SEQ ID NO: 307613 - DNA, 25 bp, Artificial
  probe
  misc_feature (1)..(25): SEQ ID NO: 1863; WAN024EYB; Start 526; Stop 550
gaagtcagtccagtatttgtccaaa

SEQ ID NO: 307614 - DNA, 25 bp, Artificial
  probe
  misc_feature (1)..(25): SEQ ID NO: 1863; WAN024EYB; Start 391; Stop 415
caggatcatggattccagattgtag

SEQ ID NO: 307615 - DNA, 25 bp, Artificial
  probe
  misc_feature (1)..(25): SEQ ID NO: 1863; WAN024EYB; Start 388; Stop 412
ctacaggatcatggattccagattg

SEQ ID NO: 307616 - DNA, 25 bp, Artificial
  probe
  misc_feature (1)..(25): SEQ ID NO: 1863; WAN024EYB; Start 390; Stop 414
acaggatcatggattccagattgta

SEQ ID NO: 307617 - DNA, 25 bp, Artificial
  probe
  misc_feature (1)..(25): SEQ ID NO: 1863; WAN024EYB; Start 389; Stop 413
tacaggatcatggattccagattgt

SEQ ID NO: 307618 - DNA, 25 bp, Artificial
  probe
  misc_feature (1)..(25): SEQ ID NO: 1863; WAN024EYB; Start 249; Stop 273
ccaagtgtctgtcattaccattgct

SEQ ID NO: 307619 - DNA, 25 bp, Artificial
  probe
  misc_feature (1)..(25): SEQ ID NO: 1863; WAN024EYB; Start 394; Stop 418
gatcatggattccagattgtagcag

SEQ ID NO: 307620 - DNA, 25 bp, Artificial
  probe
  misc_feature (1)..(25): SEQ ID NO: 1863; WAN024EYB; Start 395; Stop 419
atcatggattccagattgtagcaga

SEQ ID NO: 307621 - DNA, 25 bp, Artificial
  probe
  misc_feature (1)..(25): SEQ ID NO: 1863; WAN024EYB; Start 633; Stop 657
agataagattcaagctatcaaggag

SEQ ID NO: 307622 - DNA, 25 bp, Artificial
  probe
  misc_feature (1)..(25): SEQ ID NO: 1863; WAN024EYB; Start 516; Stop 540
cttgtccaaagaagtcagtccagta

SEQ ID NO: 307623 - DNA, 25 bp, Artificial
  probe
  misc_feature (1)..(25): SEQ ID NO: 1863; WAN024EYB; Start 619; Stop 643
cgtcaagttctagtagataagattc

SEQ ID NO: 307624 - DNA, 25 bp, Artificial
  probe
  misc_feature (1)..(25): SEQ ID NO: 1863; WAN024EYB; Start 396; Stop 420
tcatggattccagattgtagcagaa

SEQ ID NO: 307625 - DNA, 25 bp, Artificial
  probe
  misc_feature (1)..(25): SEQ ID NO: 1863; WAN024EYB; Start 637; Stop 661
aagattcaagctatcaaggaggtgc

SEQ ID NO: 307626 - DNA, 25 bp, Artificial
  probe
  misc_feature (1)..(25): SEQ ID NO: 1863; WAN024EYB; Start 248; Stop 272
accaagtgtctgtcattaccattgc

SEQ ID NO: 307627 - DNA, 25 bp, Artificial
  probe
  misc_feature (1)..(25): SEQ ID NO: 1864; WAN024D3V; Start 310; Stop 334
gttgaactaacttcctcttgtggtt

SEQ ID NO: 307628 - DNA, 25 bp, Artificial
  probe
  misc_feature (1)..(25): SEQ ID NO: 1864; WAN024D3V; Start 164; Stop 188
tatccttgtcagtcttgtctgtatt

SEQ ID NO: 307629 - DNA, 25 bp, Artificial
  probe
  misc_feature (1)..(25): SEQ ID NO: 1864; WAN024D3V; Start 163; Stop 187
ttatccttgtcagtcttgtctgtat

SEQ ID NO: 307630 - DNA, 25 bp, Artificial
  probe
  misc_feature (1)..(25): SEQ ID NO: 1864; WAN024D3V; Start 37; Stop 61
cgtccagcatcaatagaaacaattt

SEQ ID NO: 307631 - DNA, 25 bp, Artificial
  probe
  misc_feature (1)..(25): SEQ ID NO: 1864; WAN024D3V; Start 194; Stop 218
ctttagaatcaacctctttcgcttc

SEQ ID NO: 307632 - DNA, 25 bp, Artificial
  probe
  misc_feature (1)..(25): SEQ ID NO: 1864; WAN024D3V; Start 193; Stop 217
tctttagaatcaacctctttcgctt

SEQ ID NO: 307633 - DNA, 25 bp, Artificial
  probe
  misc_feature (1)..(25): SEQ ID NO: 1864; WAN024D3V; Start 311; Stop 335
ttgaactaacttcctcttgtggttt

SEQ ID NO: 307634 - DNA, 25 bp, Artificial
  probe
  misc_feature (1)..(25): SEQ ID NO: 1864; WAN024D3V; Start 190; Stop 214
gactctttagaatcaacctctttcg

SEQ ID NO: 307635 - DNA, 25 bp, Artificial
  probe
  misc_feature (1)..(25): SEQ ID NO: 1864; WAN024D3V; Start 192; Stop 216
ctctttagaatcaacctctttcgct

SEQ ID NO: 307636 - DNA, 25 bp, Artificial
  probe
  misc_feature (1)..(25): SEQ ID NO: 1864; WAN024D3V; Start 191; Stop 215
actctttagaatcaacctctttcgc

SEQ ID NO: 307637 - DNA, 25 bp, Artificial
  probe
  misc_feature (1)..(25): SEQ ID NO: 1864; WAN024D3V; Start 159; Stop 183
tggtttatccttgtcagtcttgtct

SEQ ID NO: 307638 - DNA, 25 bp, Artificial
  probe
  misc_feature (1)..(25): SEQ ID NO: 1864; WAN024D3V; Start 292; Stop 316
tctgctttatcactaggagttgaac

SEQ ID NO: 307639 - DNA, 25 bp, Artificial
  probe
  misc_feature (1)..(25): SEQ ID NO: 1864; WAN024D3V; Start 165; Stop 189
atccttgtcagtcttgtctgtattt

SEQ ID NO: 307640 - DNA, 25 bp, Artificial
  probe
  misc_feature (1)..(25): SEQ ID NO: 1864; WAN024D3V; Start 293; Stop 317
ctgctttatcactaggagttgaact

SEQ ID NO: 307641 - DNA, 25 bp, Artificial
  probe
  misc_feature (1)..(25): SEQ ID NO: 1864; WAN024D3V; Start 189; Stop 213
tgactctttagaatcaacctctttc

SEQ ID NO: 307642 - DNA, 25 bp, Artificial
  probe
  misc_feature (1)..(25): SEQ ID NO: 1864; WAN024D3V; Start 162; Stop 186
tttatccttgtcagtcttgtctgta

SEQ ID NO: 307643 - DNA, 25 bp, Artificial
  probe
  misc_feature (1)..(25): SEQ ID NO: 1864; WAN024D3V; Start 167; Stop 191
ccttgtcagtcttgtctgtatttga

SEQ ID NO: 307644 - DNA, 25 bp, Artificial
  probe
  misc_feature (1)..(25): SEQ ID NO: 1864; WAN024D3V; Start 166; Stop 190
tccttgtcagtcttgtctgtatttg

SEQ ID NO: 307645 - DNA, 25 bp, Artificial
  probe
  misc_feature (1)..(25): SEQ ID NO: 1864; WAN024D3V; Start 161; Stop 185
gtttatccttgtcagtcttgtctgt

SEQ ID NO: 307646 - DNA, 25 bp, Artificial
  probe
  misc_feature (1)..(25): SEQ ID NO: 1864; WAN024D3V; Start 300; Stop 324
atcactaggagttgaactaacttcc

SEQ ID NO: 307647 - DNA, 25 bp, Artificial
  probe
  misc_feature (1)..(25): SEQ ID NO: 1864; WAN024D3V; Start 294; Stop 318
tgctttatcactaggagttgaacta

SEQ ID NO: 307648 - DNA, 25 bp, Artificial
  probe
  misc_feature (1)..(25): SEQ ID NO: 1864; WAN024D3V; Start 160; Stop 184
ggtttatccttgtcagtcttgtctg

SEQ ID NO: 307649 - DNA, 25 bp, Artificial
  probe
  misc_feature (1)..(25): SEQ ID NO: 1864; WAN024D3V; Start 158; Stop 182
ctggtttatccttgtcagtcttgtc

SEQ ID NO: 307650 - DNA, 25 bp, Artificial
  probe
  misc_feature (1)..(25): SEQ ID NO: 1864; WAN024D3V; Start 308; Stop 332
gagttgaactaacttcctcttgtgg

SEQ ID NO: 307651 - DNA, 25 bp, Artificial
  probe
  misc_feature (1)..(25): SEQ ID NO: 1864; WAN024D3V; Start 307; Stop 331
ggagttgaactaacttcctcttgtg

SEQ ID NO: 307652 - DNA, 25 bp, Artificial
  probe
  misc_feature (1)..(25): SEQ ID NO: 1864; WAN024D3V; Start 201; Stop 225
atcaacctctttcgcttcttccttt

SEQ ID NO: 307653 - DNA, 25 bp, Artificial
  probe
  misc_feature (1)..(25): SEQ ID NO: 1864; WAN024D3V; Start 200; Stop 224
aatcaacctctttcgcttcttcctt

SEQ ID NO: 307654 - DNA, 25 bp, Artificial
  probe
  misc_feature (1)..(25): SEQ ID NO: 1864; WAN024D3V; Start 348; Stop 372
tggaagactagctaccttatcagta

SEQ ID NO: 307655 - DNA, 25 bp, Artificial
  probe
  misc_feature (1)..(25): SEQ ID NO: 1864; WAN024D3V; Start 347; Stop 371
ttggaagactagctaccttatcagt

SEQ ID NO: 307656 - DNA, 25 bp, Artificial
  probe
  misc_feature (1)..(25): SEQ ID NO: 1864; WAN024D3V; Start 295; Stop 319
gctttatcactaggagttgaactaa

SEQ ID NO: 307657 - DNA, 25 bp, Artificial
  probe
  misc_feature (1)..(25): SEQ ID NO: 1864; WAN024D3V; Start 309; Stop 333
agttgaactaacttcctcttgtggt

SEQ ID NO: 307658 - DNA, 25 bp, Artificial
  probe
  misc_feature (1)..(25): SEQ ID NO: 1864; WAN024D3V; Start 32; Stop 56
atttacgtccagcatcaatagaaac

SEQ ID NO: 307659 - DNA, 25 bp, Artificial
  probe
  misc_feature (1)..(25): SEQ ID NO: 1864; WAN024D3V; Start 35; Stop 59
tacgtccagcatcaatagaaacaat

SEQ ID NO: 307660 - DNA, 25 bp, Artificial
  probe
  misc_feature (1)..(25): SEQ ID NO: 1865; WAN024F5M; Start 55; Stop 79
accacatcatcagccaagataatag

SEQ ID NO: 307661 - DNA, 25 bp, Artificial
  probe
  misc_feature (1)..(25): SEQ ID NO: 1865; WAN024F5M; Start 54; Stop 78
caccacatcatcagccaagataata

SEQ ID NO: 307662 - DNA, 25 bp, Artificial
  probe
  misc_feature (1)..(25): SEQ ID NO: 1865; WAN024F5M; Start 80; Stop 104
ctggaattaaggcaacgacactatt

SEQ ID NO: 307663 - DNA, 25 bp, Artificial
  probe
  misc_feature (1)..(25): SEQ ID NO: 1865; WAN024F5M; Start 56; Stop 80
ccacatcatcagccaagataatagc

SEQ ID NO: 307664 - DNA, 25 bp, Artificial
  probe
  misc_feature (1)..(25): SEQ ID NO: 1865; WAN024F5M; Start 53; Stop 77
tcaccacatcatcagccaagataat

SEQ ID NO: 307665 - DNA, 25 bp, Artificial
  probe
  misc_feature (1)..(25): SEQ ID NO: 1865; WAN024F5M; Start 72; Stop 96
gataatagctggaattaaggcaacg

SEQ ID NO: 307666 - DNA, 25 bp, Artificial
  probe
  misc_feature (1)..(25): SEQ ID NO: 1865; WAN024F5M; Start 73; Stop 97
ataatagctggaattaaggcaacga

SEQ ID NO: 307667 - DNA, 25 bp, Artificial
  probe
  misc_feature (1)..(25): SEQ ID NO: 1865; WAN024F5M; Start 71; Stop 95
agataatagctggaattaaggcaac

SEQ ID NO: 307668 - DNA, 25 bp, Artificial
  probe
  misc_feature (1)..(25): SEQ ID NO: 1865; WAN024F5M; Start 69; Stop 93
caagataatagctggaattaaggca

SEQ ID NO: 307669 - DNA, 25 bp, Artificial
  probe
  misc_feature (1)..(25): SEQ ID NO: 1865; WAN024F5M; Start 52; Stop 76
gtcaccacatcatcagccaagataa

SEQ ID NO: 307670 - DNA, 25 bp, Artificial
  probe
  misc_feature (1)..(25): SEQ ID NO: 1865; WAN024F5M; Start 74; Stop 98
taatagctggaattaaggcaacgac

SEQ ID NO: 307671 - DNA, 25 bp, Artificial
  probe
  misc_feature (1)..(25): SEQ ID NO: 1865; WAN024F5M; Start 81; Stop 105
tggaattaaggcaacgacactattt

SEQ ID NO: 307672 - DNA, 25 bp, Artificial
  probe
  misc_feature (1)..(25): SEQ ID NO: 1865; WAN024F5M; Start 11; Stop 35
caagactggctacatccgaaatatc

SEQ ID NO: 307673 - DNA, 25 bp, Artificial
  probe
  misc_feature (1)..(25): SEQ ID NO: 1865; WAN024F5M; Start 70; Stop 94
aagataatagctggaattaaggcaa

SEQ ID NO: 307674 - DNA, 25 bp, Artificial
  probe
  misc_feature (1)..(25): SEQ ID NO: 1865; WAN024F5M; Start 264; Stop 288
attggataaatcagagttgacgagt

SEQ ID NO: 307675 - DNA, 25 bp, Artificial
  probe
  misc_feature (1)..(25): SEQ ID NO: 1865; WAN024F5M; Start 265; Stop 289
ttggataaatcagagttgacgagtt

SEQ ID NO: 307676 - DNA, 25 bp, Artificial
  probe
  misc_feature (1)..(25): SEQ ID NO: 1865; WAN024F5M; Start 266; Stop 290
tggataaatcagagttgacgagtta

SEQ ID NO: 307677 - DNA, 25 bp, Artificial
  probe
  misc_feature (1)..(25): SEQ ID NO: 1865; WAN024F5M; Start 12; Stop 36
aagactggctacatccgaaatatct

SEQ ID NO: 307678 - DNA, 25 bp, Artificial
  probe
  misc_feature (1)..(25): SEQ ID NO: 1865; WAN024F5M; Start 267; Stop 291
ggataaatcagagttgacgagttag

SEQ ID NO: 307679 - DNA, 25 bp, Artificial
  probe
  misc_feature (1)..(25): SEQ ID NO: 1865; WAN024F5M; Start 10; Stop 34
acaagactggctacatccgaaatat

SEQ ID NO: 307680 - DNA, 25 bp, Artificial
  probe
  misc_feature (1)..(25): SEQ ID NO: 1865; WAN024F5M; Start 68; Stop 92
ccaagataatagctggaattaaggc

SEQ ID NO: 307681 - DNA, 25 bp, Artificial
  probe
  misc_feature (1)..(25): SEQ ID NO: 1865; WAN024F5M; Start 67; Stop 91
gccaagataatagctggaattaagg

SEQ ID NO: 307682 - DNA, 25 bp, Artificial
  probe
  misc_feature (1)..(25): SEQ ID NO: 1865; WAN024F5M; Start 79; Stop 103
gctggaattaaggcaacgacactat

SEQ ID NO: 307683 - DNA, 25 bp, Artificial
  probe
  misc_feature (1)..(25): SEQ ID NO: 1865; WAN024F5M; Start 43; Stop 67
caatccaaagtcaccacatcatcag

SEQ ID NO: 307684 - DNA, 25 bp, Artificial
  probe
  misc_feature (1)..(25): SEQ ID NO: 1865; WAN024F5M; Start 263; Stop 287
tattggataaatcagagttgacgag

SEQ ID NO: 307685 - DNA, 25 bp, Artificial
  probe
  misc_feature (1)..(25): SEQ ID NO: 1865; WAN024F5M; Start 51; Stop 75
agtcaccacatcatcagccaagata

SEQ ID NO: 307686 - DNA, 25 bp, Artificial
  probe
  misc_feature (1)..(25): SEQ ID NO: 1865; WAN024F5M; Start 13; Stop 37
agactggctacatccgaaatatctg

SEQ ID NO: 307687 - DNA, 25 bp, Artificial
  probe
  misc_feature (1)..(25): SEQ ID NO: 1865; WAN024F5M; Start 9; Stop 33
gacaagactggctacatccgaaata

SEQ ID NO: 307688 - DNA, 25 bp, Artificial
  probe
  misc_feature (1)..(25): SEQ ID NO: 1865; WAN024F5M; Start 262; Stop 286
ttattggataaatcagagttgacga

SEQ ID NO: 307689 - DNA, 25 bp, Artificial
  probe
  misc_feature (1)..(25): SEQ ID NO: 1865; WAN024F5M; Start 75; Stop 99
aatagctggaattaaggcaacgaca

SEQ ID NO: 307690 - DNA, 25 bp, Artificial
  probe
  misc_feature (1)..(25): SEQ ID NO: 1865; WAN024F5M; Start 57; Stop 81
cacatcatcagccaagataatagct

SEQ ID NO: 307691 - DNA, 25 bp, Artificial
  probe
  misc_feature (1)..(25): SEQ ID NO: 1865; WAN024F5M; Start 66; Stop 90
agccaagataatagctggaattaag

SEQ ID NO: 307692 - DNA, 25 bp, Artificial
  probe
  misc_feature (1)..(25): SEQ ID NO: 1865; WAN024F5M; Start 14; Stop 38
gactggctacatccgaaatatctgg

SEQ ID NO: 307693 - DNA, 25 bp, Artificial
  probe
  misc_feature (1)..(25): SEQ ID NO: 1866; WAN024FTO; Start 124; Stop 148
agttctggtgaattatgtaatcggt

SEQ ID NO: 307694 - DNA, 25 bp, Artificial
  probe
  misc_feature (1)..(25): SEQ ID NO: 1866; WAN024FTO; Start 685; Stop 709
gctgctgaacataatcgtagtatta

SEQ ID NO: 307695 - DNA, 25 bp, Artificial
  probe
  misc_feature (1)..(25): SEQ ID NO: 1866; WAN024FTO; Start 132; Stop 156
tgaattatgtaatcggtacgctgaa

SEQ ID NO: 307696 - DNA, 25 bp, Artificial
  probe
  misc_feature (1)..(25): SEQ ID NO: 1866; WAN024FTO; Start 127; Stop 151
tctggtgaattatgtaatcggtacg

SEQ ID NO: 307697 - DNA, 25 bp, Artificial
  probe
  misc_feature (1)..(25): SEQ ID NO: 1866; WAN024FTO; Start 125; Stop 149
gttctggtgaattatgtaatcggta

SEQ ID NO: 307698 - DNA, 25 bp, Artificial
  probe
  misc_feature (1)..(25): SEQ ID NO: 1866; WAN024FTO; Start 802; Stop 826
tcagatgtagaatccttactagcaa

SEQ ID NO: 307699 - DNA, 25 bp, Artificial
  probe
  misc_feature (1)..(25): SEQ ID NO: 1866; WAN024FTO; Start 123; Stop 147
tagttctggtgaattatgtaatcgg

SEQ ID NO: 307700 - DNA, 25 bp, Artificial
  probe
  misc_feature (1)..(25): SEQ ID NO: 1866; WAN024FTO; Start 801; Stop 825
atcagatgtagaatccttactagca

SEQ ID NO: 307701 - DNA, 25 bp, Artificial
  probe
  misc_feature (1)..(25): SEQ ID NO: 1866; WAN024FTO; Start 131; Stop 155
gtgaattatgtaatcggtacgctga

SEQ ID NO: 307702 - DNA, 25 bp, Artificial
  probe
  misc_feature (1)..(25): SEQ ID NO: 1866; WAN024FTO; Start 126; Stop 150
ttctggtgaattatgtaatcggtac

SEQ ID NO: 307703 - DNA, 25 bp, Artificial
  probe
  misc_feature (1)..(25): SEQ ID NO: 1866; WAN024FTO; Start 684; Stop 708
agctgctgaacataatcgtagtatt

SEQ ID NO: 307704 - DNA, 25 bp, Artificial
  probe
  misc_feature (1)..(25): SEQ ID NO: 1866; WAN024FTO; Start 683; Stop 707
aagctgctgaacataatcgtagtat

SEQ ID NO: 307705 - DNA, 25 bp, Artificial
  probe
  misc_feature (1)..(25): SEQ ID NO: 1866; WAN024FTO; Start 803; Stop 827
cagatgtagaatccttactagcaat

SEQ ID NO: 307706 - DNA, 25 bp, Artificial
  probe
  misc_feature (1)..(25): SEQ ID NO: 1866; WAN024FTO; Start 130; Stop 154
ggtgaattatgtaatcggtacgctg

SEQ ID NO: 307707 - DNA, 25 bp, Artificial
  probe
  misc_feature (1)..(25): SEQ ID NO: 1866; WAN024FTO; Start 128; Stop 152
ctggtgaattatgtaatcggtacgc

SEQ ID NO: 307708 - DNA, 25 bp, Artificial
  probe
  misc_feature (1)..(25): SEQ ID NO: 1866; WAN024FTO; Start 682; Stop 706
gaagctgctgaacataatcgtagta

SEQ ID NO: 307709 - DNA, 25 bp, Artificial
  probe
  misc_feature (1)..(25): SEQ ID NO: 1866; WAN024FTO; Start 102; Stop 126
agttaatgatggttcaacagatagt

SEQ ID NO: 307710 - DNA, 25 bp, Artificial
  probe
  misc_feature (1)..(25): SEQ ID NO: 1866; WAN024FTO; Start 129; Stop 153
tggtgaattatgtaatcggtacgct

SEQ ID NO: 307711 - DNA, 25 bp, Artificial
  probe
  misc_feature (1)..(25): SEQ ID NO: 1866; WAN024FTO; Start 800; Stop 824
aatcagatgtagaatccttactagc

SEQ ID NO: 307712 - DNA, 25 bp, Artificial
  probe
  misc_feature (1)..(25): SEQ ID NO: 1866; WAN024FTO; Start 794; Stop 818
ctgctgaatcagatgtagaatcctt

SEQ ID NO: 307713 - DNA, 25 bp, Artificial
  probe
  misc_feature (1)..(25): SEQ ID NO: 1866; WAN024FTO; Start 795; Stop 819
tgctgaatcagatgtagaatcctta

SEQ ID NO: 307714 - DNA, 25 bp, Artificial
  probe
  misc_feature (1)..(25): SEQ ID NO: 1866; WAN024FTO; Start 105; Stop 129
taatgatggttcaacagatagttct

SEQ ID NO: 307715 - DNA, 25 bp, Artificial
  probe
  misc_feature (1)..(25): SEQ ID NO: 1866; WAN024FTO; Start 680; Stop 704
ttgaagctgctgaacataatcgtag

SEQ ID NO: 307716 - DNA, 25 bp, Artificial
  probe
  misc_feature (1)..(25): SEQ ID NO: 1866; WAN024FTO; Start 831; Stop 855
gaagaaactgtcctcattgtattgg

SEQ ID NO: 307717 - DNA, 25 bp, Artificial
  probe
  misc_feature (1)..(25): SEQ ID NO: 1866; WAN024FTO; Start 796; Stop 820
gctgaatcagatgtagaatccttac

SEQ ID NO: 307718 - DNA, 25 bp, Artificial
  probe
  misc_feature (1)..(25): SEQ ID NO: 1866; WAN024FTO; Start 103; Stop 127
gttaatgatggttcaacagatagtt

SEQ ID NO: 307719 - DNA, 25 bp, Artificial
  probe
  misc_feature (1)..(25): SEQ ID NO: 1866; WAN024FTO; Start 804; Stop 828
agatgtagaatccttactagcaatt

SEQ ID NO: 307720 - DNA, 25 bp, Artificial
  probe
  misc_feature (1)..(25): SEQ ID NO: 1866; WAN024FTO; Start 632; Stop 656
cgggtagtatcgttcgttctaaatt

SEQ ID NO: 307721 - DNA, 25 bp, Artificial
  probe
  misc_feature (1)..(25): SEQ ID NO: 1866; WAN024FTO; Start 837; Stop 861
actgtcctcattgtattggagtgtt

SEQ ID NO: 307722 - DNA, 25 bp, Artificial
  probe
  misc_feature (1)..(25): SEQ ID NO: 1866; WAN024FTO; Start 836; Stop 860
aactgtcctcattgtattggagtgt

SEQ ID NO: 307723 - DNA, 25 bp, Artificial
  probe
  misc_feature (1)..(25): SEQ ID NO: 1866; WAN024FTO; Start 437; Stop 461
cattagaactgatgcttcaagataa

SEQ ID NO: 307724 - DNA, 25 bp, Artificial
  probe
  misc_feature (1)..(25): SEQ ID NO: 1866; WAN024FTO; Start 302; Stop 326
ttaagattcagcaaagatatgacgc

SEQ ID NO: 307725 - DNA, 25 bp, Artificial
  probe
  misc_feature (1)..(25): SEQ ID NO: 1866; WAN024FTO; Start 303; Stop 327
taagattcagcaaagatatgacgca

SEQ ID NO: 307726 - DNA, 25 bp, Artificial
  probe
  misc_feature (1)..(25): SEQ ID NO: 1867; WAN024F8C; Start 54; Stop 78
gattttggagggaagtaacattcac

SEQ ID NO: 307727 - DNA, 25 bp, Artificial
  probe
  misc_feature (1)..(25): SEQ ID NO: 1867; WAN024F8C; Start 68; Stop 92
gtaacattcacgtcttgccttccat

SEQ ID NO: 307728 - DNA, 25 bp, Artificial
  probe
  misc_feature (1)..(25): SEQ ID NO: 1867; WAN024F8C; Start 51; Stop 75
gacgattttggagggaagtaacatt

SEQ ID NO: 307729 - DNA, 25 bp, Artificial
  probe
  misc_feature (1)..(25): SEQ ID NO: 1867; WAN024F8C; Start 69; Stop 93
taacattcacgtcttgccttccatg

SEQ ID NO: 307730 - DNA, 25 bp, Artificial
  probe
  misc_feature (1)..(25): SEQ ID NO: 1867; WAN024F8C; Start 66; Stop 90
aagtaacattcacgtcttgccttcc

SEQ ID NO: 307731 - DNA, 25 bp, Artificial
  probe
  misc_feature (1)..(25): SEQ ID NO: 1867; WAN024F8C; Start 64; Stop 88
ggaagtaacattcacgtcttgcctt

SEQ ID NO: 307732 - DNA, 25 bp, Artificial
  probe
  misc_feature (1)..(25): SEQ ID NO: 1867; WAN024F8C; Start 53; Stop 77
cgattttggagggaagtaacattca

SEQ ID NO: 307733 - DNA, 25 bp, Artificial
  probe
  misc_feature (1)..(25): SEQ ID NO: 1867; WAN024F8C; Start 52; Stop 76
acgattttggagggaagtaacattc

SEQ ID NO: 307734 - DNA, 25 bp, Artificial
  probe
  misc_feature (1)..(25): SEQ ID NO: 1867; WAN024F8C; Start 55; Stop 79
attttggagggaagtaacattcacg

SEQ ID NO: 307735 - DNA, 25 bp, Artificial
  probe
  misc_feature (1)..(25): SEQ ID NO: 1867; WAN024F8C; Start 50; Stop 74
tgacgattttggagggaagtaacat

SEQ ID NO: 307736 - DNA, 25 bp, Artificial
  probe
  misc_feature (1)..(25): SEQ ID NO: 1867; WAN024F8C; Start 47; Stop 71
atgtgacgattttggagggaagtaa

SEQ ID NO: 307737 - DNA, 25 bp, Artificial
  probe
  misc_feature (1)..(25): SEQ ID NO: 1867; WAN024F8C; Start 46; Stop 70
aatgtgacgattttggagggaagta

SEQ ID NO: 307738 - DNA, 25 bp, Artificial
  probe
  misc_feature (1)..(25): SEQ ID NO: 1867; WAN024F8C; Start 65; Stop 89
gaagtaacattcacgtcttgccttc

SEQ ID NO: 307739 - DNA, 25 bp, Artificial
  probe
  misc_feature (1)..(25): SEQ ID NO: 1867; WAN024F8C; Start 57; Stop 81
tttggagggaagtaacattcacgtc

SEQ ID NO: 307740 - DNA, 25 bp, Artificial
  probe
  misc_feature (1)..(25): SEQ ID NO: 1867; WAN024F8C; Start 67; Stop 91
agtaacattcacgtcttgccttcca

SEQ ID NO: 307741 - DNA, 25 bp, Artificial
  probe
  misc_feature (1)..(25): SEQ ID NO: 1867; WAN024F8C; Start 60; Stop 84
ggagggaagtaacattcacgtcttg

SEQ ID NO: 307742 - DNA, 25 bp, Artificial
  probe
  misc_feature (1)..(25): SEQ ID NO: 1867; WAN024F8C; Start 49; Stop 73
gtgacgattttggagggaagtaaca

SEQ ID NO: 307743 - DNA, 25 bp, Artificial
  probe
  misc_feature (1)..(25): SEQ ID NO: 1867; WAN024F8C; Start 48; Stop 72
tgtgacgattttggagggaagtaac

SEQ ID NO: 307744 - DNA, 25 bp, Artificial
  probe
  misc_feature (1)..(25): SEQ ID NO: 1867; WAN024F8C; Start 59; Stop 83
tggagggaagtaacattcacgtctt

SEQ ID NO: 307745 - DNA, 25 bp, Artificial
  probe
  misc_feature (1)..(25): SEQ ID NO: 1867; WAN024F8C; Start 58; Stop 82
ttggagggaagtaacattcacgtct

SEQ ID NO: 307746 - DNA, 25 bp, Artificial
  probe
  misc_feature (1)..(25): SEQ ID NO: 1867; WAN024F8C; Start 4; Stop 28
atttgtcaatttatccgcgatatgc

SEQ ID NO: 307747 - DNA, 25 bp, Artificial
  probe
  misc_feature (1)..(25): SEQ ID NO: 1867; WAN024F8C; Start 2; Stop 26
tgatttgtcaatttatccgcgatat

SEQ ID NO: 307748 - DNA, 25 bp, Artificial
  probe
  misc_feature (1)..(25): SEQ ID NO: 1867; WAN024F8C; Start 1; Stop 25
atgatttgtcaatttatccgcgata

SEQ ID NO: 307749 - DNA, 25 bp, Artificial
  probe
  misc_feature (1)..(25): SEQ ID NO: 1867; WAN024F8C; Start 3; Stop 27
gatttgtcaatttatccgcgatatg

SEQ ID NO: 307750 - DNA, 25 bp, Artificial
  probe
  misc_feature (1)..(25): SEQ ID NO: 1867; WAN024F8C; Start 61; Stop 85
gagggaagtaacattcacgtcttgc

SEQ ID NO: 307751 - DNA, 25 bp, Artificial
  probe
  misc_feature (1)..(25): SEQ ID NO: 1867; WAN024F8C; Start 45; Stop 69
aaatgtgacgattttggagggaagt

SEQ ID NO: 307752 - DNA, 25 bp, Artificial
  probe
  misc_feature (1)..(25): SEQ ID NO: 1867; WAN024F8C; Start 5; Stop 29
tttgtcaatttatccgcgatatgct

SEQ ID NO: 307753 - DNA, 25 bp, Artificial
  probe
  misc_feature (1)..(25): SEQ ID NO: 1867; WAN024F8C; Start 6; Stop 30
ttgtcaatttatccgcgatatgctg

SEQ ID NO: 307754 - DNA, 25 bp, Artificial
  probe
  misc_feature (1)..(25): SEQ ID NO: 1867; WAN024F8C; Start 56; Stop 80
ttttggagggaagtaacattcacgt

SEQ ID NO: 307755 - DNA, 25 bp, Artificial
  probe
  misc_feature (1)..(25): SEQ ID NO: 1867; WAN024F8C; Start 11; Stop 35
aatttatccgcgatatgctggactt

SEQ ID NO: 307756 - DNA, 25 bp, Artificial
  probe
  misc_feature (1)..(25): SEQ ID NO: 1867; WAN024F8C; Start 44; Stop 68
aaaatgtgacgattttggagggaag

SEQ ID NO: 307757 - DNA, 25 bp, Artificial
  probe
  misc_feature (1)..(25): SEQ ID NO: 1867; WAN024F8C; Start 63; Stop 87
gggaagtaacattcacgtcttgcct

SEQ ID NO: 307758 - DNA, 25 bp, Artificial
  probe
  misc_feature (1)..(25): SEQ ID NO: 1867; WAN024F8C; Start 62; Stop 86
agggaagtaacattcacgtcttgcc

SEQ ID NO: 307759 - DNA, 25 bp, Artificial
  probe
  misc_feature (1)..(25): SEQ ID NO: 1868; WAN024CJR; Start 747; Stop 771
ctatgctggagaagacttagaagag

SEQ ID NO: 307760 - DNA, 25 bp, Artificial
  probe
  misc_feature (1)..(25): SEQ ID NO: 1868; WAN024CJR; Start 745; Stop 769
gactatgctggagaagacttagaag

SEQ ID NO: 307761 - DNA, 25 bp, Artificial
  probe
  misc_feature (1)..(25): SEQ ID NO: 1868; WAN024CJR; Start 746; Stop 770
actatgctggagaagacttagaaga

SEQ ID NO: 307762 - DNA, 25 bp, Artificial
  probe
  misc_feature (1)..(25): SEQ ID NO: 1868; WAN024CJR; Start 151; Stop 175
agtattgagtgtgctgattcttgtt

SEQ ID NO: 307763 - DNA, 25 bp, Artificial
  probe
  misc_feature (1)..(25): SEQ ID NO: 1868; WAN024CJR; Start 744; Stop 768
tgactatgctggagaagacttagaa

SEQ ID NO: 307764 - DNA, 25 bp, Artificial
  probe
  misc_feature (1)..(25): SEQ ID NO: 1868; WAN024CJR; Start 743; Stop 767
ttgactatgctggagaagacttaga

SEQ ID NO: 307765 - DNA, 25 bp, Artificial
  probe
  misc_feature (1)..(25): SEQ ID NO: 1868; WAN024CJR; Start 742; Stop 766
cttgactatgctggagaagacttag

SEQ ID NO: 307766 - DNA, 25 bp, Artificial
  probe
  misc_feature (1)..(25): SEQ ID NO: 1868; WAN024CJR; Start 267; Stop 291
acataagaggttagtgacttcagac

SEQ ID NO: 307767 - DNA, 25 bp, Artificial
  probe
  misc_feature (1)..(25): SEQ ID NO: 1868; WAN024CJR; Start 150; Stop 174
aagtattgagtgtgctgattcttgt

SEQ ID NO: 307768 - DNA, 25 bp, Artificial
  probe
  misc_feature (1)..(25): SEQ ID NO: 1868; WAN024CJR; Start 748; Stop 772
tatgctggagaagacttagaagagt

SEQ ID NO: 307769 - DNA, 25 bp, Artificial
  probe
  misc_feature (1)..(25): SEQ ID NO: 1868; WAN024CJR; Start 754; Stop 778
ggagaagacttagaagagtggacta

SEQ ID NO: 307770 - DNA, 25 bp, Artificial
  probe
  misc_feature (1)..(25): SEQ ID NO: 1868; WAN024CJR; Start 268; Stop 292
cataagaggttagtgacttcagact

SEQ ID NO: 307771 - DNA, 25 bp, Artificial
  probe
  misc_feature (1)..(25): SEQ ID NO: 1868; WAN024CJR; Start 302; Stop 326
atactacgactatagatgcagcgat

SEQ ID NO: 307772 - DNA, 25 bp, Artificial
  probe
  misc_feature (1)..(25): SEQ ID NO: 1868; WAN024CJR; Start 266; Stop 290
tacataagaggttagtgacttcaga

SEQ ID NO: 307773 - DNA, 25 bp, Artificial
  probe
  misc_feature (1)..(25): SEQ ID NO: 1868; WAN024CJR; Start 148; Stop 172
acaagtattgagtgtgctgattctt

SEQ ID NO: 307774 - DNA, 25 bp, Artificial
  probe
  misc_feature (1)..(25): SEQ ID NO: 1868; WAN024CJR; Start 147; Stop 171
aacaagtattgagtgtgctgattct

SEQ ID NO: 307775 - DNA, 25 bp, Artificial
  probe
  misc_feature (1)..(25): SEQ ID NO: 1868; WAN024CJR; Start 265; Stop 289
ctacataagaggttagtgacttcag

SEQ ID NO: 307776 - DNA, 25 bp, Artificial
  probe
  misc_feature (1)..(25): SEQ ID NO: 1868; WAN024CJR; Start 755; Stop 779
gagaagacttagaagagtggactaa

SEQ ID NO: 307777 - DNA, 25 bp, Artificial
  probe
  misc_feature (1)..(25): SEQ ID NO: 1868; WAN024CJR; Start 674; Stop 698
ttccaactcataataagagccaatt

SEQ ID NO: 307778 - DNA, 25 bp, Artificial
  probe
  misc_feature (1)..(25): SEQ ID NO: 1868; WAN024CJR; Start 752; Stop 776
ctggagaagacttagaagagtggac

SEQ ID NO: 307779 - DNA, 25 bp, Artificial
  probe
  misc_feature (1)..(25): SEQ ID NO: 1868; WAN024CJR; Start 749; Stop 773
atgctggagaagacttagaagagtg

SEQ ID NO: 307780 - DNA, 25 bp, Artificial
  probe
  misc_feature (1)..(25): SEQ ID NO: 1868; WAN024CJR; Start 673; Stop 697
attccaactcataataagagccaat

SEQ ID NO: 307781 - DNA, 25 bp, Artificial
  probe
  misc_feature (1)..(25): SEQ ID NO: 1868; WAN024CJR; Start 301; Stop 325
catactacgactatagatgcagcga

SEQ ID NO: 307782 - DNA, 25 bp, Artificial
  probe
  misc_feature (1)..(25): SEQ ID NO: 1868; WAN024CJR; Start 300; Stop 324
tcatactacgactatagatgcagcg

SEQ ID NO: 307783 - DNA, 25 bp, Artificial
  probe
  misc_feature (1)..(25): SEQ ID NO: 1868; WAN024CJR; Start 299; Stop 323
gtcatactacgactatagatgcagc

SEQ ID NO: 307784 - DNA, 25 bp, Artificial
  probe
  misc_feature (1)..(25): SEQ ID NO: 1868; WAN024CJR; Start 753; Stop 777
tggagaagacttagaagagtggact

SEQ ID NO: 307785 - DNA, 25 bp, Artificial
  probe
  misc_feature (1)..(25): SEQ ID NO: 1868; WAN024CJR; Start 274; Stop 298
aggttagtgacttcagactactgta

SEQ ID NO: 307786 - DNA, 25 bp, Artificial
  probe
  misc_feature (1)..(25): SEQ ID NO: 1868; WAN024CJR; Start 271; Stop 295
aagaggttagtgacttcagactact

SEQ ID NO: 307787 - DNA, 25 bp, Artificial
  probe
  misc_feature (1)..(25): SEQ ID NO: 1868; WAN024CJR; Start 275; Stop 299
ggttagtgacttcagactactgtag

SEQ ID NO: 307788 - DNA, 25 bp, Artificial
  probe
  misc_feature (1)..(25): SEQ ID NO: 1868; WAN024CJR; Start 458; Stop 482
ggtcaaatacaagttctggttatcg

SEQ ID NO: 307789 - DNA, 25 bp, Artificial
  probe
  misc_feature (1)..(25): SEQ ID NO: 1868; WAN024CJR; Start 272; Stop 296
agaggttagtgacttcagactactg

SEQ ID NO: 307790 - DNA, 25 bp, Artificial
  probe
  misc_feature (1)..(25): SEQ ID NO: 1868; WAN024CJR; Start 270; Stop 294
taagaggttagtgacttcagactac

SEQ ID NO: 307791 - DNA, 25 bp, Artificial
  probe
  misc_feature (1)..(25): SEQ ID NO: 1868; WAN024CJR; Start 152; Stop 176
gtattgagtgtgctgattcttgttt

SEQ ID NO: 307792 - DNA, 25 bp, Artificial
  probe
  misc_feature (1)..(25): SEQ ID NO: 1869; WAN024D2B; Start 47; Stop 71
ccttggatgagttgaagattgatac

SEQ ID NO: 307793 - DNA, 25 bp, Artificial
  probe
  misc_feature (1)..(25): SEQ ID NO: 1869; WAN024D2B; Start 50; Stop 74
tggatgagttgaagattgatactgt

SEQ ID NO: 307794 - DNA, 25 bp, Artificial
  probe
  misc_feature (1)..(25): SEQ ID NO: 1869; WAN024D2B; Start 51; Stop 75
ggatgagttgaagattgatactgtc

SEQ ID NO: 307795 - DNA, 25 bp, Artificial
  probe
  misc_feature (1)..(25): SEQ ID NO: 1869; WAN024D2B; Start 49; Stop 73
ttggatgagttgaagattgatactg

SEQ ID NO: 307796 - DNA, 25 bp, Artificial
  probe
  misc_feature (1)..(25): SEQ ID NO: 1869; WAN024D2B; Start 52; Stop 76
gatgagttgaagattgatactgtca

SEQ ID NO: 307797 - DNA, 25 bp, Artificial
  probe
  misc_feature (1)..(25): SEQ ID NO: 1869; WAN024D2B; Start 48; Stop 72
cttggatgagttgaagattgatact

SEQ ID NO: 307798 - DNA, 25 bp, Artificial
  probe
  misc_feature (1)..(25): SEQ ID NO: 1869; WAN024D2B; Start 151; Stop 175
gattctgttcttgctactggtttag

SEQ ID NO: 307799 - DNA, 25 bp, Artificial
  probe
  misc_feature (1)..(25): SEQ ID NO: 1869; WAN024D2B; Start 797; Stop 821
aagaatcggatgcagaattactcat

SEQ ID NO: 307800 - DNA, 25 bp, Artificial
  probe
  misc_feature (1)..(25): SEQ ID NO: 1869; WAN024D2B; Start 638; Stop 662
cagggattgaatggattatcgtttc

SEQ ID NO: 307801 - DNA, 25 bp, Artificial
  probe
  misc_feature (1)..(25): SEQ ID NO: 1869; WAN024D2B; Start 46; Stop 70
cccttggatgagttgaagattgata

SEQ ID NO: 307802 - DNA, 25 bp, Artificial
  probe
  misc_feature (1)..(25): SEQ ID NO: 1869; WAN024D2B; Start 775; Stop 799
atttcttcaggacttcttcacaaag

SEQ ID NO: 307803 - DNA, 25 bp, Artificial
  probe
  misc_feature (1)..(25): SEQ ID NO: 1869; WAN024D2B; Start 809; Stop 833
cagaattactcatcaaggcaaatgt

SEQ ID NO: 307804 - DNA, 25 bp, Artificial
  probe
  misc_feature (1)..(25): SEQ ID NO: 1869; WAN024D2B; Start 810; Stop 834
agaattactcatcaaggcaaatgtc

SEQ ID NO: 307805 - DNA, 25 bp, Artificial
  probe
  misc_feature (1)..(25): SEQ ID NO: 1869; WAN024D2B; Start 811; Stop 835
gaattactcatcaaggcaaatgtcc

SEQ ID NO: 307806 - DNA, 25 bp, Artificial
  probe
  misc_feature (1)..(25): SEQ ID NO: 1869; WAN024D2B; Start 774; Stop 798
aatttcttcaggacttcttcacaaa

SEQ ID NO: 307807 - DNA, 25 bp, Artificial
  probe
  misc_feature (1)..(25): SEQ ID NO: 1869; WAN024D2B; Start 773; Stop 797
gaatttcttcaggacttcttcacaa

SEQ ID NO: 307808 - DNA, 25 bp, Artificial
  probe
  misc_feature (1)..(25): SEQ ID NO: 1869; WAN024D2B; Start 771; Stop 795
aggaatttcttcaggacttcttcac

SEQ ID NO: 307809 - DNA, 25 bp, Artificial
  probe
  misc_feature (1)..(25): SEQ ID NO: 1869; WAN024D2B; Start 770; Stop 794
caggaatttcttcaggacttcttca

SEQ ID NO: 307810 - DNA, 25 bp, Artificial
  probe
  misc_feature (1)..(25): SEQ ID NO: 1869; WAN024D2B; Start 772; Stop 796
ggaatttcttcaggacttcttcaca

SEQ ID NO: 307811 - DNA, 25 bp, Artificial
  probe
  misc_feature (1)..(25): SEQ ID NO: 1869; WAN024D2B; Start 152; Stop 176
attctgttcttgctactggtttagt

SEQ ID NO: 307812 - DNA, 25 bp, Artificial
  probe
  misc_feature (1)..(25): SEQ ID NO: 1869; WAN024D2B; Start 808; Stop 832
gcagaattactcatcaaggcaaatg

SEQ ID NO: 307813 - DNA, 25 bp, Artificial
  probe
  misc_feature (1)..(25): SEQ ID NO: 1869; WAN024D2B; Start 575; Stop 599
ttggaagagaagtttctgaggattt

SEQ ID NO: 307814 - DNA, 25 bp, Artificial
  probe
  misc_feature (1)..(25): SEQ ID NO: 1869; WAN024D2B; Start 153; Stop 177
ttctgttcttgctactggtttagtg

SEQ ID NO: 307815 - DNA, 25 bp, Artificial
  probe
  misc_feature (1)..(25): SEQ ID NO: 1869; WAN024D2B; Start 637; Stop 661
gcagggattgaatggattatcgttt

SEQ ID NO: 307816 - DNA, 25 bp, Artificial
  probe
  misc_feature (1)..(25): SEQ ID NO: 1869; WAN024D2B; Start 574; Stop 598
cttggaagagaagtttctgaggatt

SEQ ID NO: 307817 - DNA, 25 bp, Artificial
  probe
  misc_feature (1)..(25): SEQ ID NO: 1869; WAN024D2B; Start 286; Stop 310
gacaaccaaacagaagttcttgaaa

SEQ ID NO: 307818 - DNA, 25 bp, Artificial
  probe
  misc_feature (1)..(25): SEQ ID NO: 1869; WAN024D2B; Start 69; Stop 93
tactgtcaatcgtgtggtggatgta

SEQ ID NO: 307819 - DNA, 25 bp, Artificial
  probe
  misc_feature (1)..(25): SEQ ID NO: 1869; WAN024D2B; Start 67; Stop 91
gatactgtcaatcgtgtggtggatg

SEQ ID NO: 307820 - DNA, 25 bp, Artificial
  probe
  misc_feature (1)..(25): SEQ ID NO: 1869; WAN024D2B; Start 573; Stop 597
tcttggaagagaagtttctgaggat

SEQ ID NO: 307821 - DNA, 25 bp, Artificial
  probe
  misc_feature (1)..(25): SEQ ID NO: 1869; WAN024D2B; Start 687; Stop 711
caaacatggtgacactttctacaag

SEQ ID NO: 307822 - DNA, 25 bp, Artificial
  probe
  misc_feature (1)..(25): SEQ ID NO: 1869; WAN024D2B; Start 285; Stop 309
agacaaccaaacagaagttcttgaa

SEQ ID NO: 307823 - DNA, 25 bp, Artificial
  probe
  misc_feature (1)..(25): SEQ ID NO: 1869; WAN024D2B; Start 769; Stop 793
gcaggaatttcttcaggacttcttc

SEQ ID NO: 307824 - DNA, 25 bp, Artificial
  probe
  misc_feature (1)..(25): SEQ ID NO: 1869; WAN024D2B; Start 284; Stop 308
gagacaaccaaacagaagttcttga

SEQ ID NO: 307825 - DNA, 25 bp, Artificial
  probe
  misc_feature (1)..(25): SEQ ID NO: 1870; WAN024CYN; Start 825; Stop 849
aagattaagtcaggaattggaggaa

SEQ ID NO: 307826 - DNA, 25 bp, Artificial
  probe
  misc_feature (1)..(25): SEQ ID NO: 1870; WAN024CYN; Start 439; Stop 463
gctattgttggagatggtgagttaa

SEQ ID NO: 307827 - DNA, 25 bp, Artificial
  probe
  misc_feature (1)..(25): SEQ ID NO: 1870; WAN024CYN; Start 494; Stop 518
ttgcttctcatcaacagttatccaa

SEQ ID NO: 307828 - DNA, 25 bp, Artificial
  probe
  misc_feature (1)..(25): SEQ ID NO: 1870; WAN024CYN; Start 495; Stop 519
tgcttctcatcaacagttatccaac

SEQ ID NO: 307829 - DNA, 25 bp, Artificial
  probe
  misc_feature (1)..(25): SEQ ID NO: 1870; WAN024CYN; Start 97; Stop 121
cattacggaggaagtctgtctatcg

SEQ ID NO: 307830 - DNA, 25 bp, Artificial
  probe
  misc_feature (1)..(25): SEQ ID NO: 1870; WAN024CYN; Start 96; Stop 120
acattacggaggaagtctgtctatc

SEQ ID NO: 307831 - DNA, 25 bp, Artificial
  probe
  misc_feature (1)..(25): SEQ ID NO: 1870; WAN024CYN; Start 225; Stop 249
accagctctatacagtacactctat

SEQ ID NO: 307832 - DNA, 25 bp, Artificial
  probe
  misc_feature (1)..(25): SEQ ID NO: 1870; WAN024CYN; Start 66; Stop 90
tcttagaacattgaatcatcttgga

SEQ ID NO: 307833 - DNA, 25 bp, Artificial
  probe
  misc_feature (1)..(25): SEQ ID NO: 1870; WAN024CYN; Start 224; Stop 248
gaccagctctatacagtacactcta

SEQ ID NO: 307834 - DNA, 25 bp, Artificial
  probe
  misc_feature (1)..(25): SEQ ID NO: 1870; WAN024CYN; Start 105; Stop 129
aggaagtctgtctatcgtagaagtt

SEQ ID NO: 307835 - DNA, 25 bp, Artificial
  probe
  misc_feature (1)..(25): SEQ ID NO: 1870; WAN024CYN; Start 65; Stop 89
ctcttagaacattgaatcatcttgg

SEQ ID NO: 307836 - DNA, 25 bp, Artificial
  probe
  misc_feature (1)..(25): SEQ ID NO: 1870; WAN024CYN; Start 104; Stop 128
gaggaagtctgtctatcgtagaagt

SEQ ID NO: 307837 - DNA, 25 bp, Artificial
  probe
  misc_feature (1)..(25): SEQ ID NO: 1870; WAN024CYN; Start 226; Stop 250
ccagctctatacagtacactctatt

SEQ ID NO: 307838 - DNA, 25 bp, Artificial
  probe
  misc_feature (1)..(25): SEQ ID NO: 1870; WAN024CYN; Start 80; Stop 104
atcatcttggattcggacattacgg

SEQ ID NO: 307839 - DNA, 25 bp, Artificial
  probe
  misc_feature (1)..(25): SEQ ID NO: 1870; WAN024CYN; Start 401; Stop 425
atggtcagagaataagaaagagtcc

SEQ ID NO: 307840 - DNA, 25 bp, Artificial
  probe
  misc_feature (1)..(25): SEQ ID NO: 1870; WAN024CYN; Start 148; Stop 172
gaaataatgccaatgactccagaaa

SEQ ID NO: 307841 - DNA, 25 bp, Artificial
  probe
  misc_feature (1)..(25): SEQ ID NO: 1870; WAN024CYN; Start 630; Stop 654
tagggtcaagggttcagatattaga

SEQ ID NO: 307842 - DNA, 25 bp, Artificial
  probe
  misc_feature (1)..(25): SEQ ID NO: 1870; WAN024CYN; Start 627; Stop 651
cattagggtcaagggttcagatatt

SEQ ID NO: 307843 - DNA, 25 bp, Artificial
  probe
  misc_feature (1)..(25): SEQ ID NO: 1870; WAN024CYN; Start 103; Stop 127
ggaggaagtctgtctatcgtagaag

SEQ ID NO: 307844 - DNA, 25 bp, Artificial
  probe
  misc_feature (1)..(25): SEQ ID NO: 1870; WAN024CYN; Start 443; Stop 467
ttgttggagatggtgagttaaatga

SEQ ID NO: 307845 - DNA, 25 bp, Artificial
  probe
  misc_feature (1)..(25): SEQ ID NO: 1870; WAN024CYN; Start 43; Stop 67
gcgactaacatccgattaaatactc

SEQ ID NO: 307846 - DNA, 25 bp, Artificial
  probe
  misc_feature (1)..(25): SEQ ID NO: 1870; WAN024CYN; Start 42; Stop 66
tgcgactaacatccgattaaatact

SEQ ID NO: 307847 - DNA, 25 bp, Artificial
  probe
  misc_feature (1)..(25): SEQ ID NO: 1870; WAN024CYN; Start 147; Stop 171
tgaaataatgccaatgactccagaa

SEQ ID NO: 307848 - DNA, 25 bp, Artificial
  probe
  misc_feature (1)..(25): SEQ ID NO: 1870; WAN024CYN; Start 41; Stop 65
ttgcgactaacatccgattaaatac

SEQ ID NO: 307849 - DNA, 25 bp, Artificial
  probe
  misc_feature (1)..(25): SEQ ID NO: 1870; WAN024CYN; Start 442; Stop 466
attgttggagatggtgagttaaatg

SEQ ID NO: 307850 - DNA, 25 bp, Artificial
  probe
  misc_feature (1)..(25): SEQ ID NO: 1870; WAN024CYN; Start 629; Stop 653
ttagggtcaagggttcagatattag

SEQ ID NO: 307851 - DNA, 25 bp, Artificial
  probe
  misc_feature (1)..(25): SEQ ID NO: 1870; WAN024CYN; Start 178; Stop 202
gcagcacgagatagagattatttca

SEQ ID NO: 307852 - DNA, 25 bp, Artificial
  probe
  misc_feature (1)..(25): SEQ ID NO: 1870; WAN024CYN; Start 149; Stop 173
aaataatgccaatgactccagaaat

SEQ ID NO: 307853 - DNA, 25 bp, Artificial
  probe
  misc_feature (1)..(25): SEQ ID NO: 1870; WAN024CYN; Start 828; Stop 852
attaagtcaggaattggaggaaaca

SEQ ID NO: 307854 - DNA, 25 bp, Artificial
  probe
  misc_feature (1)..(25): SEQ ID NO: 1870; WAN024CYN; Start 79; Stop 103
aatcatcttggattcggacattacg

SEQ ID NO: 307855 - DNA, 25 bp, Artificial
  probe
  misc_feature (1)..(25): SEQ ID NO: 1870; WAN024CYN; Start 827; Stop 851
gattaagtcaggaattggaggaaac

SEQ ID NO: 307856 - DNA, 25 bp, Artificial
  probe
  misc_feature (1)..(25): SEQ ID NO: 1870; WAN024CYN; Start 826; Stop 850
agattaagtcaggaattggaggaaa

SEQ ID NO: 307857 - DNA, 25 bp, Artificial
  probe
  misc_feature (1)..(25): SEQ ID NO: 1870; WAN024CYN; Start 824; Stop 848
aaagattaagtcaggaattggagga

SEQ ID NO: 307858 - DNA, 25 bp, Artificial
  probe
  misc_feature (1)..(25): SEQ ID NO: 1871; WAN024AVI; Start 88; Stop 112
aatggtaggtacgattgggaaatag

SEQ ID NO: 307859 - DNA, 25 bp, Artificial
  probe
  misc_feature (1)..(25): SEQ ID NO: 1871; WAN024AVI; Start 86; Stop 110
ctaatggtaggtacgattgggaaat

SEQ ID NO: 307860 - DNA, 25 bp, Artificial
  probe
  misc_feature (1)..(25): SEQ ID NO: 1871; WAN024AVI; Start 91; Stop 115
ggtaggtacgattgggaaatagaac

SEQ ID NO: 307861 - DNA, 25 bp, Artificial
  probe
  misc_feature (1)..(25): SEQ ID NO: 1871; WAN024AVI; Start 89; Stop 113
atggtaggtacgattgggaaataga

SEQ ID NO: 307862 - DNA, 25 bp, Artificial
  probe
  misc_feature (1)..(25): SEQ ID NO: 1871; WAN024AVI; Start 90; Stop 114
tggtaggtacgattgggaaatagaa

SEQ ID NO: 307863 - DNA, 25 bp, Artificial
  probe
  misc_feature (1)..(25): SEQ ID NO: 1871; WAN024AVI; Start 87; Stop 111
taatggtaggtacgattgggaaata

SEQ ID NO: 307864 - DNA, 25 bp, Artificial
  probe
  misc_feature (1)..(25): SEQ ID NO: 1871; WAN024AVI; Start 98; Stop 122
acgattgggaaatagaaccagtatt

SEQ ID NO: 307865 - DNA, 25 bp, Artificial
  probe
  misc_feature (1)..(25): SEQ ID NO: 1871; WAN024AVI; Start 104; Stop 128
gggaaatagaaccagtattaactct

SEQ ID NO: 307866 - DNA, 25 bp, Artificial
  probe
  misc_feature (1)..(25): SEQ ID NO: 1871; WAN024AVI; Start 97; Stop 121
tacgattgggaaatagaaccagtat

SEQ ID NO: 307867 - DNA, 25 bp, Artificial
  probe
  misc_feature (1)..(25): SEQ ID NO: 1871; WAN024AVI; Start 96; Stop 120
gtacgattgggaaatagaaccagta

SEQ ID NO: 307868 - DNA, 25 bp, Artificial
  probe
  misc_feature (1)..(25): SEQ ID NO: 1871; WAN024AVI; Start 92; Stop 116
gtaggtacgattgggaaatagaacc

SEQ ID NO: 307869 - DNA, 25 bp, Artificial
  probe
  misc_feature (1)..(25): SEQ ID NO: 1871; WAN024AVI; Start 93; Stop 117
taggtacgattgggaaatagaacca

SEQ ID NO: 307870 - DNA, 25 bp, Artificial
  probe
  misc_feature (1)..(25): SEQ ID NO: 1871; WAN024AVI; Start 99; Stop 123
cgattgggaaatagaaccagtatta

SEQ ID NO: 307871 - DNA, 25 bp, Artificial
  probe
  misc_feature (1)..(25): SEQ ID NO: 1871; WAN024AVI; Start 106; Stop 130
gaaatagaaccagtattaactctgc

SEQ ID NO: 307872 - DNA, 25 bp, Artificial
  probe
  misc_feature (1)..(25): SEQ ID NO: 1871; WAN024AVI; Start 103; Stop 127
tgggaaatagaaccagtattaactc

SEQ ID NO: 307873 - DNA, 25 bp, Artificial
  probe
  misc_feature (1)..(25): SEQ ID NO: 1871; WAN024AVI; Start 94; Stop 118
aggtacgattgggaaatagaaccag

SEQ ID NO: 307874 - DNA, 25 bp, Artificial
  probe
  misc_feature (1)..(25): SEQ ID NO: 1871; WAN024AVI; Start 81; Stop 105
aaatcctaatggtaggtacgattgg

SEQ ID NO: 307875 - DNA, 25 bp, Artificial
  probe
  misc_feature (1)..(25): SEQ ID NO: 1871; WAN024AVI; Start 102; Stop 126
ttgggaaatagaaccagtattaact

SEQ ID NO: 307876 - DNA, 25 bp, Artificial
  probe
  misc_feature (1)..(25): SEQ ID NO: 1871; WAN024AVI; Start 105; Stop 129
ggaaatagaaccagtattaactctg

SEQ ID NO: 307877 - DNA, 25 bp, Artificial
  probe
  misc_feature (1)..(25): SEQ ID NO: 1871; WAN024AVI; Start 95; Stop 119
ggtacgattgggaaatagaaccagt

SEQ ID NO: 307878 - DNA, 25 bp, Artificial
  probe
  misc_feature (1)..(25): SEQ ID NO: 1871; WAN024AVI; Start 82; Stop 106
aatcctaatggtaggtacgattggg

SEQ ID NO: 307879 - DNA, 25 bp, Artificial
  probe
  misc_feature (1)..(25): SEQ ID NO: 1871; WAN024AVI; Start 85; Stop 109
cctaatggtaggtacgattgggaaa

SEQ ID NO: 307880 - DNA, 25 bp, Artificial
  probe
  misc_feature (1)..(25): SEQ ID NO: 1871; WAN024AVI; Start 198; Stop 222
caaaggaagtgctgcgagattttaa

SEQ ID NO: 307881 - DNA, 25 bp, Artificial
  probe
  misc_feature (1)..(25): SEQ ID NO: 1871; WAN024AVI; Start 101; Stop 125
attgggaaatagaaccagtattaac

SEQ ID NO: 307882 - DNA, 25 bp, Artificial
  probe
  misc_feature (1)..(25): SEQ ID NO: 1871; WAN024AVI; Start 83; Stop 107
atcctaatggtaggtacgattggga

SEQ ID NO: 307883 - DNA, 25 bp, Artificial
  probe
  misc_feature (1)..(25): SEQ ID NO: 1871; WAN024AVI; Start 100; Stop 124
gattgggaaatagaaccagtattaa

SEQ ID NO: 307884 - DNA, 25 bp, Artificial
  probe
  misc_feature (1)..(25): SEQ ID NO: 1871; WAN024AVI; Start 84; Stop 108
tcctaatggtaggtacgattgggaa

SEQ ID NO: 307885 - DNA, 25 bp, Artificial
  probe
  misc_feature (1)..(25): SEQ ID NO: 1871; WAN024AVI; Start 80; Stop 104
aaaatcctaatggtaggtacgattg

SEQ ID NO: 307886 - DNA, 25 bp, Artificial
  probe
  misc_feature (1)..(25): SEQ ID NO: 1871; WAN024AVI; Start 197; Stop 221
gcaaaggaagtgctgcgagatttta

SEQ ID NO: 307887 - DNA, 25 bp, Artificial
  probe
  misc_feature (1)..(25): SEQ ID NO: 1872; WAN024DV5; Start 70; Stop 94
ttctcaatctccacaatcaactcaa

SEQ ID NO: 307888 - DNA, 25 bp, Artificial
  probe
  misc_feature (1)..(25): SEQ ID NO: 1872; WAN024DV5; Start 71; Stop 95
tctcaatctccacaatcaactcaac

SEQ ID NO: 307889 - DNA, 25 bp, Artificial
  probe
  misc_feature (1)..(25): SEQ ID NO: 1872; WAN024DV5; Start 69; Stop 93
gttctcaatctccacaatcaactca

SEQ ID NO: 307890 - DNA, 25 bp, Artificial
  probe
  misc_feature (1)..(25): SEQ ID NO: 1872; WAN024DV5; Start 72; Stop 96
ctcaatctccacaatcaactcaacc

SEQ ID NO: 307891 - DNA, 25 bp, Artificial
  probe
  misc_feature (1)..(25): SEQ ID NO: 1872; WAN024DV5; Start 68; Stop 92
ggttctcaatctccacaatcaactc

SEQ ID NO: 307892 - DNA, 25 bp, Artificial
  probe
  misc_feature (1)..(25): SEQ ID NO: 1872; WAN024DV5; Start 65; Stop 89
aacggttctcaatctccacaatcaa

SEQ ID NO: 307893 - DNA, 25 bp, Artificial
  probe
  misc_feature (1)..(25): SEQ ID NO: 1872; WAN024DV5; Start 7; Stop 31
ttattagctgtattccagtcgtcac

SEQ ID NO: 307894 - DNA, 25 bp, Artificial
  probe
  misc_feature (1)..(25): SEQ ID NO: 1872; WAN024DV5; Start 154; Stop 178
acatcttccataaacaactcatcaa

SEQ ID NO: 307895 - DNA, 25 bp, Artificial
  probe
  misc_feature (1)..(25): SEQ ID NO: 1872; WAN024DV5; Start 153; Stop 177
aacatcttccataaacaactcatca

SEQ ID NO: 307896 - DNA, 25 bp, Artificial
  probe
  misc_feature (1)..(25): SEQ ID NO: 1872; WAN024DV5; Start 75; Stop 99
aatctccacaatcaactcaaccgtt

SEQ ID NO: 307897 - DNA, 25 bp, Artificial
  probe
  misc_feature (1)..(25): SEQ ID NO: 1872; WAN024DV5; Start 103; Stop 127
atactatccaagacacctgcatcaa

SEQ ID NO: 307898 - DNA, 25 bp, Artificial
  probe
  misc_feature (1)..(25): SEQ ID NO: 1872; WAN024DV5; Start 73; Stop 97
tcaatctccacaatcaactcaaccg

SEQ ID NO: 307899 - DNA, 25 bp, Artificial
  probe
  misc_feature (1)..(25): SEQ ID NO: 1872; WAN024DV5; Start 67; Stop 91
cggttctcaatctccacaatcaact

SEQ ID NO: 307900 - DNA, 25 bp, Artificial
  probe
  misc_feature (1)..(25): SEQ ID NO: 1872; WAN024DV5; Start 147; Stop 171
gtcagaaacatcttccataaacaac

SEQ ID NO: 307901 - DNA, 25 bp, Artificial
  probe
  misc_feature (1)..(25): SEQ ID NO: 1872; WAN024DV5; Start 150; Stop 174
agaaacatcttccataaacaactca

SEQ ID NO: 307902 - DNA, 25 bp, Artificial
  probe
  misc_feature (1)..(25): SEQ ID NO: 1872; WAN024DV5; Start 148; Stop 172
tcagaaacatcttccataaacaact

SEQ ID NO: 307903 - DNA, 25 bp, Artificial
  probe
  misc_feature (1)..(25): SEQ ID NO: 1872; WAN024DV5; Start 85; Stop 109
atcaactcaaccgttcccatactat

SEQ ID NO: 307904 - DNA, 25 bp, Artificial
  probe
  misc_feature (1)..(25): SEQ ID NO: 1872; WAN024DV5; Start 76; Stop 100
atctccacaatcaactcaaccgttc

SEQ ID NO: 307905 - DNA, 25 bp, Artificial
  probe
  misc_feature (1)..(25): SEQ ID NO: 1872; WAN024DV5; Start 66; Stop 90
acggttctcaatctccacaatcaac

SEQ ID NO: 307906 - DNA, 25 bp, Artificial
  probe
  misc_feature (1)..(25): SEQ ID NO: 1872; WAN024DV5; Start 149; Stop 173
cagaaacatcttccataaacaactc

SEQ ID NO: 307907 - DNA, 25 bp, Artificial
  probe
  misc_feature (1)..(25): SEQ ID NO: 1872; WAN024DV5; Start 102; Stop 126
catactatccaagacacctgcatca

SEQ ID NO: 307908 - DNA, 25 bp, Artificial
  probe
  misc_feature (1)..(25): SEQ ID NO: 1872; WAN024DV5; Start 84; Stop 108
aatcaactcaaccgttcccatacta

SEQ ID NO: 307909 - DNA, 25 bp, Artificial
  probe
  misc_feature (1)..(25): SEQ ID NO: 1872; WAN024DV5; Start 131; Stop 155
gatcttcatccatcatgtcagaaac

SEQ ID NO: 307910 - DNA, 25 bp, Artificial
  probe
  misc_feature (1)..(25): SEQ ID NO: 1872; WAN024DV5; Start 74; Stop 98
caatctccacaatcaactcaaccgt

SEQ ID NO: 307911 - DNA, 25 bp, Artificial
  probe
  misc_feature (1)..(25): SEQ ID NO: 1872; WAN024DV5; Start 146; Stop 170
tgtcagaaacatcttccataaacaa

SEQ ID NO: 307912 - DNA, 25 bp, Artificial
  probe
  misc_feature (1)..(25): SEQ ID NO: 1872; WAN024DV5; Start 152; Stop 176
aaacatcttccataaacaactcatc

SEQ ID NO: 307913 - DNA, 25 bp, Artificial
  probe
  misc_feature (1)..(25): SEQ ID NO: 1872; WAN024DV5; Start 151; Stop 175
gaaacatcttccataaacaactcat

SEQ ID NO: 307914 - DNA, 25 bp, Artificial
  probe
  misc_feature (1)..(25): SEQ ID NO: 1872; WAN024DV5; Start 86; Stop 110
tcaactcaaccgttcccatactatc

SEQ ID NO: 307915 - DNA, 25 bp, Artificial
  probe
  misc_feature (1)..(25): SEQ ID NO: 1872; WAN024DV5; Start 155; Stop 179
catcttccataaacaactcatcaat

SEQ ID NO: 307916 - DNA, 25 bp, Artificial
  probe
  misc_feature (1)..(25): SEQ ID NO: 1872; WAN024DV5; Start 97; Stop 121
gttcccatactatccaagacacctg

SEQ ID NO: 307917 - DNA, 25 bp, Artificial
  probe
  misc_feature (1)..(25): SEQ ID NO: 1872; WAN024DV5; Start 132; Stop 156
atcttcatccatcatgtcagaaaca

SEQ ID NO: 307918 - DNA, 25 bp, Artificial
  probe
  misc_feature (1)..(25): SEQ ID NO: 1872; WAN024DV5; Start 8; Stop 32
tattagctgtattccagtcgtcacg

SEQ ID NO: 307919 - DNA, 25 bp, Artificial
  probe
  misc_feature (1)..(25): SEQ ID NO: 1872; WAN024DV5; Start 101; Stop 125
ccatactatccaagacacctgcatc

SEQ ID NO: 307920 - DNA, 25 bp, Artificial
  probe
  misc_feature (1)..(25): SEQ ID NO: 1873; WAN024FD7; Start 89; Stop 113
atgatgattccaagctgtatgaaga

SEQ ID NO: 307921 - DNA, 25 bp, Artificial
  probe
  misc_feature (1)..(25): SEQ ID NO: 1873; WAN024FD7; Start 91; Stop 115
gatgattccaagctgtatgaagaag

SEQ ID NO: 307922 - DNA, 25 bp, Artificial
  probe
  misc_feature (1)..(25): SEQ ID NO: 1873; WAN024FD7; Start 90; Stop 114
tgatgattccaagctgtatgaagaa

SEQ ID NO: 307923 - DNA, 25 bp, Artificial
  probe
  misc_feature (1)..(25): SEQ ID NO: 1873; WAN024FD7; Start 88; Stop 112
aatgatgattccaagctgtatgaag

SEQ ID NO: 307924 - DNA, 25 bp, Artificial
  probe
  misc_feature (1)..(25): SEQ ID NO: 1873; WAN024FD7; Start 296; Stop 320
atgggaaacagagcaatatcaactt

SEQ ID NO: 307925 - DNA, 25 bp, Artificial
  probe
  misc_feature (1)..(25): SEQ ID NO: 1873; WAN024FD7; Start 297; Stop 321
tgggaaacagagcaatatcaacttt

SEQ ID NO: 307926 - DNA, 25 bp, Artificial
  probe
  misc_feature (1)..(25): SEQ ID NO: 1873; WAN024FD7; Start 298; Stop 322
gggaaacagagcaatatcaactttg

SEQ ID NO: 307927 - DNA, 25 bp, Artificial
  probe
  misc_feature (1)..(25): SEQ ID NO: 1873; WAN024FD7; Start 390; Stop 414
gattgaggaaatgccagaagacttt

SEQ ID NO: 307928 - DNA, 25 bp, Artificial
  probe
  misc_feature (1)..(25): SEQ ID NO: 1873; WAN024FD7; Start 78; Stop 102
ggttctgagaaatgatgattccaag

SEQ ID NO: 307929 - DNA, 25 bp, Artificial
  probe
  misc_feature (1)..(25): SEQ ID NO: 1873; WAN024FD7; Start 77; Stop 101
aggttctgagaaatgatgattccaa

SEQ ID NO: 307930 - DNA, 25 bp, Artificial
  probe
  misc_feature (1)..(25): SEQ ID NO: 1873; WAN024FD7; Start 387; Stop 411
tttgattgaggaaatgccagaagac

SEQ ID NO: 307931 - DNA, 25 bp, Artificial
  probe
  misc_feature (1)..(25): SEQ ID NO: 1873; WAN024FD7; Start 79; Stop 103
gttctgagaaatgatgattccaagc

SEQ ID NO: 307932 - DNA, 25 bp, Artificial
  probe
  misc_feature (1)..(25): SEQ ID NO: 1873; WAN024FD7; Start 391; Stop 415
attgaggaaatgccagaagactttg

SEQ ID NO: 307933 - DNA, 25 bp, Artificial
  probe
  misc_feature (1)..(25): SEQ ID NO: 1873; WAN024FD7; Start 394; Stop 418
gaggaaatgccagaagactttgaag

SEQ ID NO: 307934 - DNA, 25 bp, Artificial
  probe
  misc_feature (1)..(25): SEQ ID NO: 1873; WAN024FD7; Start 299; Stop 323
ggaaacagagcaatatcaactttga

SEQ ID NO: 307935 - DNA, 25 bp, Artificial
  probe
  misc_feature (1)..(25): SEQ ID NO: 1873; WAN024FD7; Start 302; Stop 326
aacagagcaatatcaactttgaagc

SEQ ID NO: 307936 - DNA, 25 bp, Artificial
  probe
  misc_feature (1)..(25): SEQ ID NO: 1873; WAN024FD7; Start 295; Stop 319
catgggaaacagagcaatatcaact

SEQ ID NO: 307937 - DNA, 25 bp, Artificial
  probe
  misc_feature (1)..(25): SEQ ID NO: 1873; WAN024FD7; Start 388; Stop 412
ttgattgaggaaatgccagaagact

SEQ ID NO: 307938 - DNA, 25 bp, Artificial
  probe
  misc_feature (1)..(25): SEQ ID NO: 1873; WAN024FD7; Start 389; Stop 413
tgattgaggaaatgccagaagactt

SEQ ID NO: 307939 - DNA, 25 bp, Artificial
  probe
  misc_feature (1)..(25): SEQ ID NO: 1873; WAN024FD7; Start 76; Stop 100
caggttctgagaaatgatgattcca

SEQ ID NO: 307940 - DNA, 25 bp, Artificial
  probe
  misc_feature (1)..(25): SEQ ID NO: 1873; WAN024FD7; Start 520; Stop 544
gacggcttgtcttctattcggaatt

SEQ ID NO: 307941 - DNA, 25 bp, Artificial
  probe
  misc_feature (1)..(25): SEQ ID NO: 1873; WAN024FD7; Start 164; Stop 188
ttgatgctggaaagatggaagacat

SEQ ID NO: 307942 - DNA, 25 bp, Artificial
  probe
  misc_feature (1)..(25): SEQ ID NO: 1873; WAN024FD7; Start 83; Stop 107
tgagaaatgatgattccaagctgta

SEQ ID NO: 307943 - DNA, 25 bp, Artificial
  probe
  misc_feature (1)..(25): SEQ ID NO: 1873; WAN024FD7; Start 80; Stop 104
ttctgagaaatgatgattccaagct

SEQ ID NO: 307944 - DNA, 25 bp, Artificial
  probe
  misc_feature (1)..(25): SEQ ID NO: 1873; WAN024FD7; Start 86; Stop 110
gaaatgatgattccaagctgtatga

SEQ ID NO: 307945 - DNA, 25 bp, Artificial
  probe
  misc_feature (1)..(25): SEQ ID NO: 1873; WAN024FD7; Start 85; Stop 109
agaaatgatgattccaagctgtatg

SEQ ID NO: 307946 - DNA, 25 bp, Artificial
  probe
  misc_feature (1)..(25): SEQ ID NO: 1873; WAN024FD7; Start 393; Stop 417
tgaggaaatgccagaagactttgaa

SEQ ID NO: 307947 - DNA, 25 bp, Artificial
  probe
  misc_feature (1)..(25): SEQ ID NO: 1873; WAN024FD7; Start 392; Stop 416
ttgaggaaatgccagaagactttga

SEQ ID NO: 307948 - DNA, 25 bp, Artificial
  probe
  misc_feature (1)..(25): SEQ ID NO: 1873; WAN024FD7; Start 397; Stop 421
gaaatgccagaagactttgaagtga

SEQ ID NO: 307949 - DNA, 25 bp, Artificial
  probe
  misc_feature (1)..(25): SEQ ID NO: 1873; WAN024FD7; Start 301; Stop 325
aaacagagcaatatcaactttgaag

SEQ ID NO: 307950 - DNA, 25 bp, Artificial
  probe
  misc_feature (1)..(25): SEQ ID NO: 1873; WAN024FD7; Start 300; Stop 324
gaaacagagcaatatcaactttgaa

SEQ ID NO: 307951 - DNA, 25 bp, Artificial
  probe
  misc_feature (1)..(25): SEQ ID NO: 1873; WAN024FD7; Start 84; Stop 108
gagaaatgatgattccaagctgtat

SEQ ID NO: 307952 - DNA, 25 bp, Artificial
  probe
  misc_feature (1)..(25): SEQ ID NO: 1873; WAN024FD7; Start 87; Stop 111
aaatgatgattccaagctgtatgaa

SEQ ID NO: 307953 - DNA, 25 bp, Artificial
  probe
  misc_feature (1)..(25): SEQ ID NO: 1874; WAN024GJI; Start 48; Stop 72
tatactgagacgatgggctacaaag

SEQ ID NO: 307954 - DNA, 25 bp, Artificial
  probe
  misc_feature (1)..(25): SEQ ID NO: 1874; WAN024GJI; Start 47; Stop 71
ctatactgagacgatgggctacaaa

SEQ ID NO: 307955 - DNA, 25 bp, Artificial
  probe
  misc_feature (1)..(25): SEQ ID NO: 1874; WAN024GJI; Start 124; Stop 148
gtcaagacatcaagaccgctagtag

SEQ ID NO: 307956 - DNA, 25 bp, Artificial
  probe
  misc_feature (1)..(25): SEQ ID NO: 1874; WAN024GJI; Start 123; Stop 147
agtcaagacatcaagaccgctagta

SEQ ID NO: 307957 - DNA, 25 bp, Artificial
  probe
  misc_feature (1)..(25): SEQ ID NO: 1874; WAN024GJI; Start 49; Stop 73
atactgagacgatgggctacaaaga

SEQ ID NO: 307958 - DNA, 25 bp, Artificial
  probe
  misc_feature (1)..(25): SEQ ID NO: 1874; WAN024GJI; Start 54; Stop 78
gagacgatgggctacaaagagaatg

SEQ ID NO: 307959 - DNA, 25 bp, Artificial
  probe
  misc_feature (1)..(25): SEQ ID NO: 1874; WAN024GJI; Start 58; Stop 82
cgatgggctacaaagagaatggttt

SEQ ID NO: 307960 - DNA, 25 bp, Artificial
  probe
  misc_feature (1)..(25): SEQ ID NO: 1874; WAN024GJI; Start 62; Stop 86
gggctacaaagagaatggttttatc

SEQ ID NO: 307961 - DNA, 25 bp, Artificial
  probe
  misc_feature (1)..(25): SEQ ID NO: 1874; WAN024GJI; Start 61; Stop 85
tgggctacaaagagaatggttttat

SEQ ID NO: 307962 - DNA, 25 bp, Artificial
  probe
  misc_feature (1)..(25): SEQ ID NO: 1874; WAN024GJI; Start 60; Stop 84
atgggctacaaagagaatggtttta

SEQ ID NO: 307963 - DNA, 25 bp, Artificial
  probe
  misc_feature (1)..(25): SEQ ID NO: 1874; WAN024GJI; Start 168; Stop 192
aggagatttagttaaaagagcacga

SEQ ID NO: 307964 - DNA, 25 bp, Artificial
  probe
  misc_feature (1)..(25): SEQ ID NO: 1874; WAN024GJI; Start 167; Stop 191
caggagatttagttaaaagagcacg

SEQ ID NO: 307965 - DNA, 25 bp, Artificial
  probe
  misc_feature (1)..(25): SEQ ID NO: 1874; WAN024GJI; Start 170; Stop 194
gagatttagttaaaagagcacgagc

SEQ ID NO: 307966 - DNA, 25 bp, Artificial
  probe
  misc_feature (1)..(25): SEQ ID NO: 1874; WAN024GJI; Start 169; Stop 193
ggagatttagttaaaagagcacgag

SEQ ID NO: 307967 - DNA, 25 bp, Artificial
  probe
  misc_feature (1)..(25): SEQ ID NO: 1874; WAN024GJI; Start 117; Stop 141
tttctcagtcaagacatcaagaccg

SEQ ID NO: 307968 - DNA, 25 bp, Artificial
  probe
  misc_feature (1)..(25): SEQ ID NO: 1874; WAN024GJI; Start 63; Stop 87
ggctacaaagagaatggttttatca

SEQ ID NO: 307969 - DNA, 25 bp, Artificial
  probe
  misc_feature (1)..(25): SEQ ID NO: 1874; WAN024GJI; Start 53; Stop 77
tgagacgatgggctacaaagagaat

SEQ ID NO: 307970 - DNA, 25 bp, Artificial
  probe
  misc_feature (1)..(25): SEQ ID NO: 1874; WAN024GJI; Start 166; Stop 190
acaggagatttagttaaaagagcac

SEQ ID NO: 307971 - DNA, 25 bp, Artificial
  probe
  misc_feature (1)..(25): SEQ ID NO: 1874; WAN024GJI; Start 120; Stop 144
ctcagtcaagacatcaagaccgcta

SEQ ID NO: 307972 - DNA, 25 bp, Artificial
  probe
  misc_feature (1)..(25): SEQ ID NO: 1874; WAN024GJI; Start 50; Stop 74
tactgagacgatgggctacaaagag

SEQ ID NO: 307973 - DNA, 25 bp, Artificial
  probe
  misc_feature (1)..(25): SEQ ID NO: 1874; WAN024GJI; Start 121; Stop 145
tcagtcaagacatcaagaccgctag

SEQ ID NO: 307974 - DNA, 25 bp, Artificial
  probe
  misc_feature (1)..(25): SEQ ID NO: 1874; WAN024GJI; Start 59; Stop 83
gatgggctacaaagagaatggtttt

SEQ ID NO: 307975 - DNA, 25 bp, Artificial
  probe
  misc_feature (1)..(25): SEQ ID NO: 1874; WAN024GJI; Start 46; Stop 70
gctatactgagacgatgggctacaa

SEQ ID NO: 307976 - DNA, 25 bp, Artificial
  probe
  misc_feature (1)..(25): SEQ ID NO: 1874; WAN024GJI; Start 173; Stop 197
atttagttaaaagagcacgagcgag

SEQ ID NO: 307977 - DNA, 25 bp, Artificial
  probe
  misc_feature (1)..(25): SEQ ID NO: 1874; WAN024GJI; Start 172; Stop 196
gatttagttaaaagagcacgagcga

SEQ ID NO: 307978 - DNA, 25 bp, Artificial
  probe
  misc_feature (1)..(25): SEQ ID NO: 1874; WAN024GJI; Start 171; Stop 195
agatttagttaaaagagcacgagcg

SEQ ID NO: 307979 - DNA, 25 bp, Artificial
  probe
  misc_feature (1)..(25): SEQ ID NO: 1874; WAN024GJI; Start 64; Stop 88
gctacaaagagaatggttttatcag

SEQ ID NO: 307980 - DNA, 25 bp, Artificial
  probe
  misc_feature (1)..(25): SEQ ID NO: 1874; WAN024GJI; Start 165; Stop 189
aacaggagatttagttaaaagagca

SEQ ID NO: 307981 - DNA, 25 bp, Artificial
  probe
  misc_feature (1)..(25): SEQ ID NO: 1874; WAN024GJI; Start 122; Stop 146
cagtcaagacatcaagaccgctagt

SEQ ID NO: 307982 - DNA, 25 bp, Artificial
  probe
  misc_feature (1)..(25): SEQ ID NO: 1874; WAN024GJI; Start 116; Stop 140
ttttctcagtcaagacatcaagacc

SEQ ID NO: 307983 - DNA, 25 bp, Artificial
  probe
  misc_feature (1)..(25): SEQ ID NO: 1874; WAN024GJI; Start 52; Stop 76
ctgagacgatgggctacaaagagaa

SEQ ID NO: 307984 - DNA, 25 bp, Artificial
  probe
  misc_feature (1)..(25): SEQ ID NO: 1874; WAN024GJI; Start 3; Stop 27
gattttcccctggtcaagaacaatg

SEQ ID NO: 307985 - DNA, 25 bp, Artificial
  probe
  misc_feature (1)..(25): SEQ ID NO: 1874; WAN024GJI; Start 174; Stop 198
tttagttaaaagagcacgagcgaga

SEQ ID NO: 307986 - DNA, 25 bp, Artificial
  probe
  misc_feature (1)..(25): SEQ ID NO: 1875; WAN024G76; Start 66; Stop 90
caccgaaagacaccttgatatagac

SEQ ID NO: 307987 - DNA, 25 bp, Artificial
  probe
  misc_feature (1)..(25): SEQ ID NO: 1875; WAN024G76; Start 64; Stop 88
gacaccgaaagacaccttgatatag

SEQ ID NO: 307988 - DNA, 25 bp, Artificial
  probe
  misc_feature (1)..(25): SEQ ID NO: 1875; WAN024G76; Start 65; Stop 89
acaccgaaagacaccttgatataga

SEQ ID NO: 307989 - DNA, 25 bp, Artificial
  probe
  misc_feature (1)..(25): SEQ ID NO: 1875; WAN024G76; Start 74; Stop 98
gacaccttgatatagacgcccttat

SEQ ID NO: 307990 - DNA, 25 bp, Artificial
  probe
  misc_feature (1)..(25): SEQ ID NO: 1875; WAN024G76; Start 63; Stop 87
tgacaccgaaagacaccttgatata

SEQ ID NO: 307991 - DNA, 25 bp, Artificial
  probe
  misc_feature (1)..(25): SEQ ID NO: 1875; WAN024G76; Start 58; Stop 82
ctatttgacaccgaaagacaccttg

SEQ ID NO: 307992 - DNA, 25 bp, Artificial
  probe
  misc_feature (1)..(25): SEQ ID NO: 1875; WAN024G76; Start 67; Stop 91
accgaaagacaccttgatatagacg

SEQ ID NO: 307993 - DNA, 25 bp, Artificial
  probe
  misc_feature (1)..(25): SEQ ID NO: 1875; WAN024G76; Start 62; Stop 86
ttgacaccgaaagacaccttgatat

SEQ ID NO: 307994 - DNA, 25 bp, Artificial
  probe
  misc_feature (1)..(25): SEQ ID NO: 1875; WAN024G76; Start 57; Stop 81
tctatttgacaccgaaagacacctt

SEQ ID NO: 307995 - DNA, 25 bp, Artificial
  probe
  misc_feature (1)..(25): SEQ ID NO: 1875; WAN024G76; Start 75; Stop 99
acaccttgatatagacgcccttatc

SEQ ID NO: 307996 - DNA, 25 bp, Artificial
  probe
  misc_feature (1)..(25): SEQ ID NO: 1875; WAN024G76; Start 73; Stop 97
agacaccttgatatagacgccctta

SEQ ID NO: 307997 - DNA, 25 bp, Artificial
  probe
  misc_feature (1)..(25): SEQ ID NO: 1875; WAN024G76; Start 61; Stop 85
tttgacaccgaaagacaccttgata

SEQ ID NO: 307998 - DNA, 25 bp, Artificial
  probe
  misc_feature (1)..(25): SEQ ID NO: 1875; WAN024G76; Start 59; Stop 83
tatttgacaccgaaagacaccttga

SEQ ID NO: 307999 - DNA, 25 bp, Artificial
  probe
  misc_feature (1)..(25): SEQ ID NO: 1875; WAN024G76; Start 56; Stop 80
ctctatttgacaccgaaagacacct

SEQ ID NO: 308000 - DNA, 25 bp, Artificial
  probe
  misc_feature (1)..(25): SEQ ID NO: 1875; WAN024G76; Start 60; Stop 84
atttgacaccgaaagacaccttgat

SEQ ID NO: 308001 - DNA, 25 bp, Artificial
  probe
  misc_feature (1)..(25): SEQ ID NO: 1875; WAN024G76; Start 46; Stop 70
aataagaccgctctatttgacaccg

SEQ ID NO: 308002 - DNA, 25 bp, Artificial
  probe
  misc_feature (1)..(25): SEQ ID NO: 1875; WAN024G76; Start 70; Stop 94
gaaagacaccttgatatagacgccc

SEQ ID NO: 308003 - DNA, 25 bp, Artificial
  probe
  misc_feature (1)..(25): SEQ ID NO: 1875; WAN024G76; Start 72; Stop 96
aagacaccttgatatagacgccctt

SEQ ID NO: 308004 - DNA, 25 bp, Artificial
  probe
  misc_feature (1)..(25): SEQ ID NO: 1875; WAN024G76; Start 71; Stop 95
aaagacaccttgatatagacgccct

SEQ ID NO: 308005 - DNA, 25 bp, Artificial
  probe
  misc_feature (1)..(25): SEQ ID NO: 1875; WAN024G76; Start 45; Stop 69
aaataagaccgctctatttgacacc

SEQ ID NO: 308006 - DNA, 25 bp, Artificial
  probe
  misc_feature (1)..(25): SEQ ID NO: 1875; WAN024G76; Start 69; Stop 93
cgaaagacaccttgatatagacgcc

SEQ ID NO: 308007 - DNA, 25 bp, Artificial
  probe
  misc_feature (1)..(25): SEQ ID NO: 1875; WAN024G76; Start 68; Stop 92
ccgaaagacaccttgatatagacgc

SEQ ID NO: 308008 - DNA, 25 bp, Artificial
  probe
  misc_feature (1)..(25): SEQ ID NO: 1875; WAN024G76; Start 31; Stop 55
atagttgggaatgaaaataagaccg

SEQ ID NO: 308009 - DNA, 25 bp, Artificial
  probe
  misc_feature (1)..(25): SEQ ID NO: 1875; WAN024G76; Start 32; Stop 56
tagttgggaatgaaaataagaccgc

SEQ ID NO: 308010 - DNA, 25 bp, Artificial
  probe
  misc_feature (1)..(25): SEQ ID NO: 1875; WAN024G76; Start 37; Stop 61
gggaatgaaaataagaccgctctat

SEQ ID NO: 308011 - DNA, 25 bp, Artificial
  probe
  misc_feature (1)..(25): SEQ ID NO: 1875; WAN024G76; Start 38; Stop 62
ggaatgaaaataagaccgctctatt

SEQ ID NO: 308012 - DNA, 25 bp, Artificial
  probe
  misc_feature (1)..(25): SEQ ID NO: 1875; WAN024G76; Start 47; Stop 71
ataagaccgctctatttgacaccga

SEQ ID NO: 308013 - DNA, 25 bp, Artificial
  probe
  misc_feature (1)..(25): SEQ ID NO: 1875; WAN024G76; Start 48; Stop 72
taagaccgctctatttgacaccgaa

SEQ ID NO: 308014 - DNA, 25 bp, Artificial
  probe
  misc_feature (1)..(25): SEQ ID NO: 1875; WAN024G76; Start 36; Stop 60
tgggaatgaaaataagaccgctcta

SEQ ID NO: 308015 - DNA, 25 bp, Artificial
  probe
  misc_feature (1)..(25): SEQ ID NO: 1875; WAN024G76; Start 55; Stop 79
gctctatttgacaccgaaagacacc

SEQ ID NO: 308016 - DNA, 25 bp, Artificial
  probe
  misc_feature (1)..(25): SEQ ID NO: 1875; WAN024G76; Start 30; Stop 54
gatagttgggaatgaaaataagacc

SEQ ID NO: 308017 - DNA, 25 bp, Artificial
  probe
  misc_feature (1)..(25): SEQ ID NO: 1875; WAN024G76; Start 34; Stop 58
gttgggaatgaaaataagaccgctc

SEQ ID NO: 308018 - DNA, 25 bp, Artificial
  probe
  misc_feature (1)..(25): SEQ ID NO: 1875; WAN024G76; Start 35; Stop 59
ttgggaatgaaaataagaccgctct

SEQ ID NO: 308019 - DNA, 25 bp, Artificial
  probe
  misc_feature (1)..(25): SEQ ID NO: 1876; WAN024BDR; Start 338; Stop 362
tcagttacatatatctacggcaagg

SEQ ID NO: 308020 - DNA, 25 bp, Artificial
  probe
  misc_feature (1)..(25): SEQ ID NO: 1876; WAN024BDR; Start 336; Stop 360
agtcagttacatatatctacggcaa

SEQ ID NO: 308021 - DNA, 25 bp, Artificial
  probe
  misc_feature (1)..(25): SEQ ID NO: 1876; WAN024BDR; Start 335; Stop 359
aagtcagttacatatatctacggca

SEQ ID NO: 308022 - DNA, 25 bp, Artificial
  probe
  misc_feature (1)..(25): SEQ ID NO: 1876; WAN024BDR; Start 337; Stop 361
gtcagttacatatatctacggcaag

SEQ ID NO: 308023 - DNA, 25 bp, Artificial
  probe
  misc_feature (1)..(25): SEQ ID NO: 1876; WAN024BDR; Start 339; Stop 363
cagttacatatatctacggcaaggc

SEQ ID NO: 308024 - DNA, 25 bp, Artificial
  probe
  misc_feature (1)..(25): SEQ ID NO: 1876; WAN024BDR; Start 334; Stop 358
gaagtcagttacatatatctacggc

SEQ ID NO: 308025 - DNA, 25 bp, Artificial
  probe
  misc_feature (1)..(25): SEQ ID NO: 1876; WAN024BDR; Start 333; Stop 357
cgaagtcagttacatatatctacgg

SEQ ID NO: 308026 - DNA, 25 bp, Artificial
  probe
  misc_feature (1)..(25): SEQ ID NO: 1876; WAN024BDR; Start 332; Stop 356
acgaagtcagttacatatatctacg

SEQ ID NO: 308027 - DNA, 25 bp, Artificial
  probe
  misc_feature (1)..(25): SEQ ID NO: 1876; WAN024BDR; Start 342; Stop 366
ttacatatatctacggcaaggcgac

SEQ ID NO: 308028 - DNA, 25 bp, Artificial
  probe
  misc_feature (1)..(25): SEQ ID NO: 1876; WAN024BDR; Start 341; Stop 365
gttacatatatctacggcaaggcga

SEQ ID NO: 308029 - DNA, 25 bp, Artificial
  probe
  misc_feature (1)..(25): SEQ ID NO: 1876; WAN024BDR; Start 340; Stop 364
agttacatatatctacggcaaggcg

SEQ ID NO: 308030 - DNA, 25 bp, Artificial
  probe
  misc_feature (1)..(25): SEQ ID NO: 1876; WAN024BDR; Start 15; Stop 39
atttgctaacaattcatccaagttg

SEQ ID NO: 308031 - DNA, 25 bp, Artificial
  probe
  misc_feature (1)..(25): SEQ ID NO: 1876; WAN024BDR; Start 14; Stop 38
catttgctaacaattcatccaagtt

SEQ ID NO: 308032 - DNA, 25 bp, Artificial
  probe
  misc_feature (1)..(25): SEQ ID NO: 1876; WAN024BDR; Start 13; Stop 37
gcatttgctaacaattcatccaagt

SEQ ID NO: 308033 - DNA, 25 bp, Artificial
  probe
  misc_feature (1)..(25): SEQ ID NO: 1876; WAN024BDR; Start 12; Stop 36
ggcatttgctaacaattcatccaag

SEQ ID NO: 308034 - DNA, 25 bp, Artificial
  probe
  misc_feature (1)..(25): SEQ ID NO: 1876; WAN024BDR; Start 9; Stop 33
gttggcatttgctaacaattcatcc

SEQ ID NO: 308035 - DNA, 25 bp, Artificial
  probe
  misc_feature (1)..(25): SEQ ID NO: 1876; WAN024BDR; Start 20; Stop 44
ctaacaattcatccaagttgtctgg

SEQ ID NO: 308036 - DNA, 25 bp, Artificial
  probe
  misc_feature (1)..(25): SEQ ID NO: 1876; WAN024BDR; Start 17; Stop 41
ttgctaacaattcatccaagttgtc

SEQ ID NO: 308037 - DNA, 25 bp, Artificial
  probe
  misc_feature (1)..(25): SEQ ID NO: 1876; WAN024BDR; Start 24; Stop 48
caattcatccaagttgtctggtttg

SEQ ID NO: 308038 - DNA, 25 bp, Artificial
  probe
  misc_feature (1)..(25): SEQ ID NO: 1876; WAN024BDR; Start 21; Stop 45
taacaattcatccaagttgtctggt

SEQ ID NO: 308039 - DNA, 25 bp, Artificial
  probe
  misc_feature (1)..(25): SEQ ID NO: 1876; WAN024BDR; Start 19; Stop 43
gctaacaattcatccaagttgtctg

SEQ ID NO: 308040 - DNA, 25 bp, Artificial
  probe
  misc_feature (1)..(25): SEQ ID NO: 1876; WAN024BDR; Start 18; Stop 42
tgctaacaattcatccaagttgtct

SEQ ID NO: 308041 - DNA, 25 bp, Artificial
  probe
  misc_feature (1)..(25): SEQ ID NO: 1876; WAN024BDR; Start 25; Stop 49
aattcatccaagttgtctggtttgt

SEQ ID NO: 308042 - DNA, 25 bp, Artificial
  probe
  misc_feature (1)..(25): SEQ ID NO: 1876; WAN024BDR; Start 22; Stop 46
aacaattcatccaagttgtctggtt

SEQ ID NO: 308043 - DNA, 25 bp, Artificial
  probe
  misc_feature (1)..(25): SEQ ID NO: 1876; WAN024BDR; Start 26; Stop 50
attcatccaagttgtctggtttgtc

SEQ ID NO: 308044 - DNA, 25 bp, Artificial
  probe
  misc_feature (1)..(25): SEQ ID NO: 1876; WAN024BDR; Start 106; Stop 130
ctgttacctgtcaaatttccacaag

SEQ ID NO: 308045 - DNA, 25 bp, Artificial
  probe
  misc_feature (1)..(25): SEQ ID NO: 1876; WAN024BDR; Start 331; Stop 355
gacgaagtcagttacatatatctac

SEQ ID NO: 308046 - DNA, 25 bp, Artificial
  probe
  misc_feature (1)..(25): SEQ ID NO: 1876; WAN024BDR; Start 11; Stop 35
tggcatttgctaacaattcatccaa

SEQ ID NO: 308047 - DNA, 25 bp, Artificial
  probe
  misc_feature (1)..(25): SEQ ID NO: 1876; WAN024BDR; Start 10; Stop 34
ttggcatttgctaacaattcatcca

SEQ ID NO: 308048 - DNA, 25 bp, Artificial
  probe
  misc_feature (1)..(25): SEQ ID NO: 1876; WAN024BDR; Start 343; Stop 367
tacatatatctacggcaaggcgacg

SEQ ID NO: 308049 - DNA, 25 bp, Artificial
  probe
  misc_feature (1)..(25): SEQ ID NO: 1876; WAN024BDR; Start 43; Stop 67
ggtttgtcaccgatttggtacattt

SEQ ID NO: 308050 - DNA, 25 bp, Artificial
  probe
  misc_feature (1)..(25): SEQ ID NO: 1876; WAN024BDR; Start 103; Stop 127
ttgctgttacctgtcaaatttccac

SEQ ID NO: 308051 - DNA, 25 bp, Artificial
  probe
  misc_feature (1)..(25): SEQ ID NO: 1876; WAN024BDR; Start 109; Stop 133
ttacctgtcaaatttccacaagcag

SEQ ID NO: 308052 - DNA, 25 bp, Artificial
  probe
  misc_feature (1)..(25): SEQ ID NO: 1877; WAN024F9X; Start 565; Stop 589
gaattatcagaagaccaagttgtcg

SEQ ID NO: 308053 - DNA, 25 bp, Artificial
  probe
  misc_feature (1)..(25): SEQ ID NO: 1877; WAN024F9X; Start 563; Stop 587
ttgaattatcagaagaccaagttgt

SEQ ID NO: 308054 - DNA, 25 bp, Artificial
  probe
  misc_feature (1)..(25): SEQ ID NO: 1877; WAN024F9X; Start 564; Stop 588
tgaattatcagaagaccaagttgtc

SEQ ID NO: 308055 - DNA, 25 bp, Artificial
  probe
  misc_feature (1)..(25): SEQ ID NO: 1877; WAN024F9X; Start 566; Stop 590
aattatcagaagaccaagttgtcgg

SEQ ID NO: 308056 - DNA, 25 bp, Artificial
  probe
  misc_feature (1)..(25): SEQ ID NO: 1877; WAN024F9X; Start 567; Stop 591
attatcagaagaccaagttgtcgga

SEQ ID NO: 308057 - DNA, 25 bp, Artificial
  probe
  misc_feature (1)..(25): SEQ ID NO: 1877; WAN024F9X; Start 568; Stop 592
ttatcagaagaccaagttgtcggaa

SEQ ID NO: 308058 - DNA, 25 bp, Artificial
  probe
  misc_feature (1)..(25): SEQ ID NO: 1877; WAN024F9X; Start 558; Stop 582
ggtgcttgaattatcagaagaccaa

SEQ ID NO: 308059 - DNA, 25 bp, Artificial
  probe
  misc_feature (1)..(25): SEQ ID NO: 1877; WAN024F9X; Start 569; Stop 593
tatcagaagaccaagttgtcggaac

SEQ ID NO: 308060 - DNA, 25 bp, Artificial
  probe
  misc_feature (1)..(25): SEQ ID NO: 1877; WAN024F9X; Start 269; Stop 293
atgataaggaacctaagtttgttgt

SEQ ID NO: 308061 - DNA, 25 bp, Artificial
  probe
  misc_feature (1)..(25): SEQ ID NO: 1877; WAN024F9X; Start 26; Stop 50
atgtcggtgatgtccttatggtcat

SEQ ID NO: 308062 - DNA, 25 bp, Artificial
  probe
  misc_feature (1)..(25): SEQ ID NO: 1877; WAN024F9X; Start 268; Stop 292
aatgataaggaacctaagtttgttg

SEQ ID NO: 308063 - DNA, 25 bp, Artificial
  probe
  misc_feature (1)..(25): SEQ ID NO: 1877; WAN024F9X; Start 559; Stop 583
gtgcttgaattatcagaagaccaag

SEQ ID NO: 308064 - DNA, 25 bp, Artificial
  probe
  misc_feature (1)..(25): SEQ ID NO: 1877; WAN024F9X; Start 561; Stop 585
gcttgaattatcagaagaccaagtt

SEQ ID NO: 308065 - DNA, 25 bp, Artificial
  probe
  misc_feature (1)..(25): SEQ ID NO: 1877; WAN024F9X; Start 560; Stop 584
tgcttgaattatcagaagaccaagt

SEQ ID NO: 308066 - DNA, 25 bp, Artificial
  probe
  misc_feature (1)..(25): SEQ ID NO: 1877; WAN024F9X; Start 263; Stop 287
ttgttaatgataaggaacctaagtt

SEQ ID NO: 308067 - DNA, 25 bp, Artificial
  probe
  misc_feature (1)..(25): SEQ ID NO: 1877; WAN024F9X; Start 262; Stop 286
attgttaatgataaggaacctaagt

SEQ ID NO: 308068 - DNA, 25 bp, Artificial
  probe
  misc_feature (1)..(25): SEQ ID NO: 1877; WAN024F9X; Start 562; Stop 586
cttgaattatcagaagaccaagttg

SEQ ID NO: 308069 - DNA, 25 bp, Artificial
  probe
  misc_feature (1)..(25): SEQ ID NO: 1877; WAN024F9X; Start 241; Stop 265
gcggaaggttttacagaagaaattg

SEQ ID NO: 308070 - DNA, 25 bp, Artificial
  probe
  misc_feature (1)..(25): SEQ ID NO: 1877; WAN024F9X; Start 32; Stop 56
gtgatgtccttatggtcatcgtgaa

SEQ ID NO: 308071 - DNA, 25 bp, Artificial
  probe
  misc_feature (1)..(25): SEQ ID NO: 1877; WAN024F9X; Start 570; Stop 594
atcagaagaccaagttgtcggaaca

SEQ ID NO: 308072 - DNA, 25 bp, Artificial
  probe
  misc_feature (1)..(25): SEQ ID NO: 1877; WAN024F9X; Start 557; Stop 581
gggtgcttgaattatcagaagacca

SEQ ID NO: 308073 - DNA, 25 bp, Artificial
  probe
  misc_feature (1)..(25): SEQ ID NO: 1877; WAN024F9X; Start 242; Stop 266
cggaaggttttacagaagaaattgt

SEQ ID NO: 308074 - DNA, 25 bp, Artificial
  probe
  misc_feature (1)..(25): SEQ ID NO: 1877; WAN024F9X; Start 258; Stop 282
agaaattgttaatgataaggaacct

SEQ ID NO: 308075 - DNA, 25 bp, Artificial
  probe
  misc_feature (1)..(25): SEQ ID NO: 1877; WAN024F9X; Start 240; Stop 264
ggcggaaggttttacagaagaaatt

SEQ ID NO: 308076 - DNA, 25 bp, Artificial
  probe
  misc_feature (1)..(25): SEQ ID NO: 1877; WAN024F9X; Start 25; Stop 49
catgtcggtgatgtccttatggtca

SEQ ID NO: 308077 - DNA, 25 bp, Artificial
  probe
  misc_feature (1)..(25): SEQ ID NO: 1877; WAN024F9X; Start 267; Stop 291
taatgataaggaacctaagtttgtt

SEQ ID NO: 308078 - DNA, 25 bp, Artificial
  probe
  misc_feature (1)..(25): SEQ ID NO: 1877; WAN024F9X; Start 266; Stop 290
ttaatgataaggaacctaagtttgt

SEQ ID NO: 308079 - DNA, 25 bp, Artificial
  probe
  misc_feature (1)..(25): SEQ ID NO: 1877; WAN024F9X; Start 264; Stop 288
tgttaatgataaggaacctaagttt

SEQ ID NO: 308080 - DNA, 25 bp, Artificial
  probe
  misc_feature (1)..(25): SEQ ID NO: 1877; WAN024F9X; Start 243; Stop 267
ggaaggttttacagaagaaattgtt

SEQ ID NO: 308081 - DNA, 25 bp, Artificial
  probe
  misc_feature (1)..(25): SEQ ID NO: 1877; WAN024F9X; Start 239; Stop 263
aggcggaaggttttacagaagaaat

SEQ ID NO: 308082 - DNA, 25 bp, Artificial
  probe
  misc_feature (1)..(25): SEQ ID NO: 1877; WAN024F9X; Start 33; Stop 57
tgatgtccttatggtcatcgtgaaa

SEQ ID NO: 308083 - DNA, 25 bp, Artificial
  probe
  misc_feature (1)..(25): SEQ ID NO: 1877; WAN024F9X; Start 265; Stop 289
gttaatgataaggaacctaagtttg

SEQ ID NO: 308084 - DNA, 25 bp, Artificial
  probe
  misc_feature (1)..(25): SEQ ID NO: 1877; WAN024F9X; Start 261; Stop 285
aattgttaatgataaggaacctaag

SEQ ID NO: 308085 - DNA, 25 bp, Artificial
  probe
  misc_feature (1)..(25): SEQ ID NO: 1878; WAN024CNH; Start 32; Stop 56
taacgacagatagttcaagtatgcc

SEQ ID NO: 308086 - DNA, 25 bp, Artificial
  probe
  misc_feature (1)..(25): SEQ ID NO: 1878; WAN024CNH; Start 31; Stop 55
ttaacgacagatagttcaagtatgc

SEQ ID NO: 308087 - DNA, 25 bp, Artificial
  probe
  misc_feature (1)..(25): SEQ ID NO: 1878; WAN024CNH; Start 33; Stop 57
aacgacagatagttcaagtatgccg

SEQ ID NO: 308088 - DNA, 25 bp, Artificial
  probe
  misc_feature (1)..(25): SEQ ID NO: 1878; WAN024CNH; Start 37; Stop 61
acagatagttcaagtatgccggatt

SEQ ID NO: 308089 - DNA, 25 bp, Artificial
  probe
  misc_feature (1)..(25): SEQ ID NO: 1878; WAN024CNH; Start 36; Stop 60
gacagatagttcaagtatgccggat

SEQ ID NO: 308090 - DNA, 25 bp, Artificial
  probe
  misc_feature (1)..(25): SEQ ID NO: 1878; WAN024CNH; Start 30; Stop 54
tttaacgacagatagttcaagtatg

SEQ ID NO: 308091 - DNA, 25 bp, Artificial
  probe
  misc_feature (1)..(25): SEQ ID NO: 1878; WAN024CNH; Start 38; Stop 62
cagatagttcaagtatgccggattt

SEQ ID NO: 308092 - DNA, 25 bp, Artificial
  probe
  misc_feature (1)..(25): SEQ ID NO: 1878; WAN024CNH; Start 35; Stop 59
cgacagatagttcaagtatgccgga

SEQ ID NO: 308093 - DNA, 25 bp, Artificial
  probe
  misc_feature (1)..(25): SEQ ID NO: 1878; WAN024CNH; Start 39; Stop 63
agatagttcaagtatgccggatttt

SEQ ID NO: 308094 - DNA, 25 bp, Artificial
  probe
  misc_feature (1)..(25): SEQ ID NO: 1878; WAN024CNH; Start 34; Stop 58
acgacagatagttcaagtatgccgg

SEQ ID NO: 308095 - DNA, 25 bp, Artificial
  probe
  misc_feature (1)..(25): SEQ ID NO: 1878; WAN024CNH; Start 29; Stop 53
ttttaacgacagatagttcaagtat

SEQ ID NO: 308096 - DNA, 25 bp, Artificial
  probe
  misc_feature (1)..(25): SEQ ID NO: 1878; WAN024CNH; Start 7; Stop 31
tttcggtcttcgccatatcggtttt

SEQ ID NO: 308097 - DNA, 25 bp, Artificial
  probe
  misc_feature (1)..(25): SEQ ID NO: 1878; WAN024CNH; Start 6; Stop 30
ttttcggtcttcgccatatcggttt

SEQ ID NO: 308098 - DNA, 25 bp, Artificial
  probe
  misc_feature (1)..(25): SEQ ID NO: 1879; WAN024G7W; Start 1188; Stop 1212
ggctgtattagaagaagtgagaagt

SEQ ID NO: 308099 - DNA, 25 bp, Artificial
  probe
  misc_feature (1)..(25): SEQ ID NO: 1879; WAN024G7W; Start 1184; Stop 1208
atgaggctgtattagaagaagtgag

SEQ ID NO: 308100 - DNA, 25 bp, Artificial
  probe
  misc_feature (1)..(25): SEQ ID NO: 1879; WAN024G7W; Start 1187; Stop 1211
aggctgtattagaagaagtgagaag

SEQ ID NO: 308101 - DNA, 25 bp, Artificial
  probe
  misc_feature (1)..(25): SEQ ID NO: 1879; WAN024G7W; Start 1186; Stop 1210
gaggctgtattagaagaagtgagaa

SEQ ID NO: 308102 - DNA, 25 bp, Artificial
  probe
  misc_feature (1)..(25): SEQ ID NO: 1879; WAN024G7W; Start 1183; Stop 1207
aatgaggctgtattagaagaagtga

SEQ ID NO: 308103 - DNA, 25 bp, Artificial
  probe
  misc_feature (1)..(25): SEQ ID NO: 1879; WAN024G7W; Start 1185; Stop 1209
tgaggctgtattagaagaagtgaga

SEQ ID NO: 308104 - DNA, 25 bp, Artificial
  probe
  misc_feature (1)..(25): SEQ ID NO: 1879; WAN024G7W; Start 950; Stop 974
atctcttccttgttgatgtgactaa

SEQ ID NO: 308105 - DNA, 25 bp, Artificial
  probe
  misc_feature (1)..(25): SEQ ID NO: 1879; WAN024G7W; Start 1190; Stop 1214
ctgtattagaagaagtgagaagtgc

SEQ ID NO: 308106 - DNA, 25 bp, Artificial
  probe
  misc_feature (1)..(25): SEQ ID NO: 1879; WAN024G7W; Start 1189; Stop 1213
gctgtattagaagaagtgagaagtg

SEQ ID NO: 308107 - DNA, 25 bp, Artificial
  probe
  misc_feature (1)..(25): SEQ ID NO: 1879; WAN024G7W; Start 849; Stop 873
caaggaatatgctgccaatgtaatt

SEQ ID NO: 308108 - DNA, 25 bp, Artificial
  probe
  misc_feature (1)..(25): SEQ ID NO: 1879; WAN024G7W; Start 848; Stop 872
tcaaggaatatgctgccaatgtaat

SEQ ID NO: 308109 - DNA, 25 bp, Artificial
  probe
  misc_feature (1)..(25): SEQ ID NO: 1879; WAN024G7W; Start 186; Stop 210
ccgttattatggtggaactgatgta

SEQ ID NO: 308110 - DNA, 25 bp, Artificial
  probe
  misc_feature (1)..(25): SEQ ID NO: 1879; WAN024G7W; Start 187; Stop 211
cgttattatggtggaactgatgtag

SEQ ID NO: 308111 - DNA, 25 bp, Artificial
  probe
  misc_feature (1)..(25): SEQ ID NO: 1879; WAN024G7W; Start 847; Stop 871
ttcaaggaatatgctgccaatgtaa

SEQ ID NO: 308112 - DNA, 25 bp, Artificial
  probe
  misc_feature (1)..(25): SEQ ID NO: 1879; WAN024G7W; Start 192; Stop 216
ttatggtggaactgatgtagtagac

SEQ ID NO: 308113 - DNA, 25 bp, Artificial
  probe
  misc_feature (1)..(25): SEQ ID NO: 1879; WAN024G7W; Start 191; Stop 215
attatggtggaactgatgtagtaga

SEQ ID NO: 308114 - DNA, 25 bp, Artificial
  probe
  misc_feature (1)..(25): SEQ ID NO: 1879; WAN024G7W; Start 193; Stop 217
tatggtggaactgatgtagtagacg

SEQ ID NO: 308115 - DNA, 25 bp, Artificial
  probe
  misc_feature (1)..(25): SEQ ID NO: 1879; WAN024G7W; Start 31; Stop 55
tatgatgctgatctctggaatgcta

SEQ ID NO: 308116 - DNA, 25 bp, Artificial
  probe
  misc_feature (1)..(25): SEQ ID NO: 1879; WAN024G7W; Start 217; Stop 241
gttgtagagactcttgctattgaac

SEQ ID NO: 308117 - DNA, 25 bp, Artificial
  probe
  misc_feature (1)..(25): SEQ ID NO: 1879; WAN024G7W; Start 218; Stop 242
ttgtagagactcttgctattgaacg

SEQ ID NO: 308118 - DNA, 25 bp, Artificial
  probe
  misc_feature (1)..(25): SEQ ID NO: 1879; WAN024G7W; Start 216; Stop 240
cgttgtagagactcttgctattgaa

SEQ ID NO: 308119 - DNA, 25 bp, Artificial
  probe
  misc_feature (1)..(25): SEQ ID NO: 1879; WAN024G7W; Start 188; Stop 212
gttattatggtggaactgatgtagt

SEQ ID NO: 308120 - DNA, 25 bp, Artificial
  probe
  misc_feature (1)..(25): SEQ ID NO: 1879; WAN024G7W; Start 34; Stop 58
gatgctgatctctggaatgctattg

SEQ ID NO: 308121 - DNA, 25 bp, Artificial
  probe
  misc_feature (1)..(25): SEQ ID NO: 1879; WAN024G7W; Start 851; Stop 875
aggaatatgctgccaatgtaattaa

SEQ ID NO: 308122 - DNA, 25 bp, Artificial
  probe
  misc_feature (1)..(25): SEQ ID NO: 1879; WAN024G7W; Start 850; Stop 874
aaggaatatgctgccaatgtaatta

SEQ ID NO: 308123 - DNA, 25 bp, Artificial
  probe
  misc_feature (1)..(25): SEQ ID NO: 1879; WAN024G7W; Start 32; Stop 56
atgatgctgatctctggaatgctat

SEQ ID NO: 308124 - DNA, 25 bp, Artificial
  probe
  misc_feature (1)..(25): SEQ ID NO: 1879; WAN024G7W; Start 30; Stop 54
atatgatgctgatctctggaatgct

SEQ ID NO: 308125 - DNA, 25 bp, Artificial
  probe
  misc_feature (1)..(25): SEQ ID NO: 1879; WAN024G7W; Start 852; Stop 876
ggaatatgctgccaatgtaattaag

SEQ ID NO: 308126 - DNA, 25 bp, Artificial
  probe
  misc_feature (1)..(25): SEQ ID NO: 1879; WAN024G7W; Start 33; Stop 57
tgatgctgatctctggaatgctatt

SEQ ID NO: 308127 - DNA, 25 bp, Artificial
  probe
  misc_feature (1)..(25): SEQ ID NO: 1879; WAN024G7W; Start 857; Stop 881
atgctgccaatgtaattaagaacag

SEQ ID NO: 308128 - DNA, 25 bp, Artificial
  probe
  misc_feature (1)..(25): SEQ ID NO: 1879; WAN024G7W; Start 203; Stop 227
ctgatgtagtagacgttgtagagac

SEQ ID NO: 308129 - DNA, 25 bp, Artificial
  probe
  misc_feature (1)..(25): SEQ ID NO: 1879; WAN024G7W; Start 1191; Stop 1215
tgtattagaagaagtgagaagtgca

SEQ ID NO: 308130 - DNA, 25 bp, Artificial
  probe
  misc_feature (1)..(25): SEQ ID NO: 1879; WAN024G7W; Start 863; Stop 887
ccaatgtaattaagaacagcaaggc

SEQ ID NO: 308131 - DNA, 25 bp, Artificial
  probe
  misc_feature (1)..(25): SEQ ID NO: 1880; WAN024D62; Start 261; Stop 285
tatcaaagacgaggcagtagcattc

SEQ ID NO: 308132 - DNA, 25 bp, Artificial
  probe
  misc_feature (1)..(25): SEQ ID NO: 1880; WAN024D62; Start 132; Stop 156
taaagtctttctagttgttcaggaa

SEQ ID NO: 308133 - DNA, 25 bp, Artificial
  probe
  misc_feature (1)..(25): SEQ ID NO: 1880; WAN024D62; Start 131; Stop 155
ataaagtctttctagttgttcagga

SEQ ID NO: 308134 - DNA, 25 bp, Artificial
  probe
  misc_feature (1)..(25): SEQ ID NO: 1880; WAN024D62; Start 260; Stop 284
gtatcaaagacgaggcagtagcatt

SEQ ID NO: 308135 - DNA, 25 bp, Artificial
  probe
  misc_feature (1)..(25): SEQ ID NO: 1880; WAN024D62; Start 130; Stop 154
gataaagtctttctagttgttcagg

SEQ ID NO: 308136 - DNA, 25 bp, Artificial
  probe
  misc_feature (1)..(25): SEQ ID NO: 1880; WAN024D62; Start 133; Stop 157
aaagtctttctagttgttcaggaaa

SEQ ID NO: 308137 - DNA, 25 bp, Artificial
  probe
  misc_feature (1)..(25): SEQ ID NO: 1880; WAN024D62; Start 342; Stop 366
gggttatcacaattttgcgattttc

SEQ ID NO: 308138 - DNA, 25 bp, Artificial
  probe
  misc_feature (1)..(25): SEQ ID NO: 1880; WAN024D62; Start 341; Stop 365
tgggttatcacaattttgcgatttt

SEQ ID NO: 308139 - DNA, 25 bp, Artificial
  probe
  misc_feature (1)..(25): SEQ ID NO: 1880; WAN024D62; Start 343; Stop 367
ggttatcacaattttgcgattttct

SEQ ID NO: 308140 - DNA, 25 bp, Artificial
  probe
  misc_feature (1)..(25): SEQ ID NO: 1880; WAN024D62; Start 347; Stop 371
atcacaattttgcgattttcttccc

SEQ ID NO: 308141 - DNA, 25 bp, Artificial
  probe
  misc_feature (1)..(25): SEQ ID NO: 1880; WAN024D62; Start 346; Stop 370
tatcacaattttgcgattttcttcc

SEQ ID NO: 308142 - DNA, 25 bp, Artificial
  probe
  misc_feature (1)..(25): SEQ ID NO: 1880; WAN024D62; Start 340; Stop 364
ttgggttatcacaattttgcgattt

SEQ ID NO: 308143 - DNA, 25 bp, Artificial
  probe
  misc_feature (1)..(25): SEQ ID NO: 1880; WAN024D62; Start 349; Stop 373
cacaattttgcgattttcttcccag

SEQ ID NO: 308144 - DNA, 25 bp, Artificial
  probe
  misc_feature (1)..(25): SEQ ID NO: 1880; WAN024D62; Start 348; Stop 372
tcacaattttgcgattttcttccca

SEQ ID NO: 308145 - DNA, 25 bp, Artificial
  probe
  misc_feature (1)..(25): SEQ ID NO: 1880; WAN024D62; Start 344; Stop 368
gttatcacaattttgcgattttctt

SEQ ID NO: 308146 - DNA, 25 bp, Artificial
  probe
  misc_feature (1)..(25): SEQ ID NO: 1880; WAN024D62; Start 345; Stop 369
ttatcacaattttgcgattttcttc

SEQ ID NO: 308147 - DNA, 25 bp, Artificial
  probe
  misc_feature (1)..(25): SEQ ID NO: 1880; WAN024D62; Start 391; Stop 415
aatggttatgcaggcatggaagaaa

SEQ ID NO: 308148 - DNA, 25 bp, Artificial
  probe
  misc_feature (1)..(25): SEQ ID NO: 1880; WAN024D62; Start 390; Stop 414
aaatggttatgcaggcatggaagaa

SEQ ID NO: 308149 - DNA, 25 bp, Artificial
  probe
  misc_feature (1)..(25): SEQ ID NO: 1880; WAN024D62; Start 352; Stop 376
aattttgcgattttcttcccaggtg

SEQ ID NO: 308150 - DNA, 25 bp, Artificial
  probe
  misc_feature (1)..(25): SEQ ID NO: 1880; WAN024D62; Start 351; Stop 375
caattttgcgattttcttcccaggt

SEQ ID NO: 308151 - DNA, 25 bp, Artificial
  probe
  misc_feature (1)..(25): SEQ ID NO: 1880; WAN024D62; Start 350; Stop 374
acaattttgcgattttcttcccagg

SEQ ID NO: 308152 - DNA, 25 bp, Artificial
  probe
  misc_feature (1)..(25): SEQ ID NO: 1880; WAN024D62; Start 139; Stop 163
tttctagttgttcaggaaaatgtcc

SEQ ID NO: 308153 - DNA, 25 bp, Artificial
  probe
  misc_feature (1)..(25): SEQ ID NO: 1880; WAN024D62; Start 239; Stop 263
aatattcgagctacggttcacgtat

SEQ ID NO: 308154 - DNA, 25 bp, Artificial
  probe
  misc_feature (1)..(25): SEQ ID NO: 1880; WAN024D62; Start 137; Stop 161
tctttctagttgttcaggaaaatgt

SEQ ID NO: 308155 - DNA, 25 bp, Artificial
  probe
  misc_feature (1)..(25): SEQ ID NO: 1880; WAN024D62; Start 134; Stop 158
aagtctttctagttgttcaggaaaa

SEQ ID NO: 308156 - DNA, 25 bp, Artificial
  probe
  misc_feature (1)..(25): SEQ ID NO: 1880; WAN024D62; Start 138; Stop 162
ctttctagttgttcaggaaaatgtc

SEQ ID NO: 308157 - DNA, 25 bp, Artificial
  probe
  misc_feature (1)..(25): SEQ ID NO: 1880; WAN024D62; Start 136; Stop 160
gtctttctagttgttcaggaaaatg

SEQ ID NO: 308158 - DNA, 25 bp, Artificial
  probe
  misc_feature (1)..(25): SEQ ID NO: 1880; WAN024D62; Start 353; Stop 377
attttgcgattttcttcccaggtga

SEQ ID NO: 308159 - DNA, 25 bp, Artificial
  probe
  misc_feature (1)..(25): SEQ ID NO: 1880; WAN024D62; Start 389; Stop 413
caaatggttatgcaggcatggaaga

SEQ ID NO: 308160 - DNA, 25 bp, Artificial
  probe
  misc_feature (1)..(25): SEQ ID NO: 1880; WAN024D62; Start 135; Stop 159
agtctttctagttgttcaggaaaat

SEQ ID NO: 308161 - DNA, 25 bp, Artificial
  probe
  misc_feature (1)..(25): SEQ ID NO: 1880; WAN024D62; Start 240; Stop 264
atattcgagctacggttcacgtatc

SEQ ID NO: 308162 - DNA, 25 bp, Artificial
  probe
  misc_feature (1)..(25): SEQ ID NO: 1880; WAN024D62; Start 298; Stop 322
gacattggctttgttcattgtcatg

SEQ ID NO: 308163 - DNA, 25 bp, Artificial
  probe
  misc_feature (1)..(25): SEQ ID NO: 1880; WAN024D62; Start 354; Stop 378
ttttgcgattttcttcccaggtgag

SEQ ID NO: 308164 - DNA, 25 bp, Artificial
  probe
  misc_feature (1)..(25): SEQ ID NO: 1881; WAN024EW9; Start 138; Stop 162
cttggagttggtagatgagtatgag

SEQ ID NO: 308165 - DNA, 25 bp, Artificial
  probe
  misc_feature (1)..(25): SEQ ID NO: 1881; WAN024EW9; Start 395; Stop 419
cgctggaagatacctatgagattat

SEQ ID NO: 308166 - DNA, 25 bp, Artificial
  probe
  misc_feature (1)..(25): SEQ ID NO: 1881; WAN024EW9; Start 207; Stop 231
ttatacagaggaagttgaggcttac

SEQ ID NO: 308167 - DNA, 25 bp, Artificial
  probe
  misc_feature (1)..(25): SEQ ID NO: 1881; WAN024EW9; Start 206; Stop 230
cttatacagaggaagttgaggctta

SEQ ID NO: 308168 - DNA, 25 bp, Artificial
  probe
  misc_feature (1)..(25): SEQ ID NO: 1881; WAN024EW9; Start 137; Stop 161
ccttggagttggtagatgagtatga

SEQ ID NO: 308169 - DNA, 25 bp, Artificial
  probe
  misc_feature (1)..(25): SEQ ID NO: 1881; WAN024EW9; Start 208; Stop 232
tatacagaggaagttgaggcttact

SEQ ID NO: 308170 - DNA, 25 bp, Artificial
  probe
  misc_feature (1)..(25): SEQ ID NO: 1881; WAN024EW9; Start 139; Stop 163
ttggagttggtagatgagtatgagc

SEQ ID NO: 308171 - DNA, 25 bp, Artificial
  probe
  misc_feature (1)..(25): SEQ ID NO: 1881; WAN024EW9; Start 219; Stop 243
agttgaggcttacttgttggataag

SEQ ID NO: 308172 - DNA, 25 bp, Artificial
  probe
  misc_feature (1)..(25): SEQ ID NO: 1881; WAN024EW9; Start 141; Stop 165
ggagttggtagatgagtatgagcag

SEQ ID NO: 308173 - DNA, 25 bp, Artificial
  probe
  misc_feature (1)..(25): SEQ ID NO: 1881; WAN024EW9; Start 175; Stop 199
actattggttggcatcctacagaag

SEQ ID NO: 308174 - DNA, 25 bp, Artificial
  probe
  misc_feature (1)..(25): SEQ ID NO: 1881; WAN024EW9; Start 174; Stop 198
gactattggttggcatcctacagaa

SEQ ID NO: 308175 - DNA, 25 bp, Artificial
  probe
  misc_feature (1)..(25): SEQ ID NO: 1881; WAN024EW9; Start 406; Stop 430
acctatgagattatcaagagtgagg

SEQ ID NO: 308176 - DNA, 25 bp, Artificial
  probe
  misc_feature (1)..(25): SEQ ID NO: 1881; WAN024EW9; Start 342; Stop 366
gattcagctatctaaggacttggat

SEQ ID NO: 308177 - DNA, 25 bp, Artificial
  probe
  misc_feature (1)..(25): SEQ ID NO: 1881; WAN024EW9; Start 396; Stop 420
gctggaagatacctatgagattatc

SEQ ID NO: 308178 - DNA, 25 bp, Artificial
  probe
  misc_feature (1)..(25): SEQ ID NO: 1881; WAN024EW9; Start 343; Stop 367
attcagctatctaaggacttggatt

SEQ ID NO: 308179 - DNA, 25 bp, Artificial
  probe
  misc_feature (1)..(25): SEQ ID NO: 1881; WAN024EW9; Start 142; Stop 166
gagttggtagatgagtatgagcagc

SEQ ID NO: 308180 - DNA, 25 bp, Artificial
  probe
  misc_feature (1)..(25): SEQ ID NO: 1881; WAN024EW9; Start 140; Stop 164
tggagttggtagatgagtatgagca

SEQ ID NO: 308181 - DNA, 25 bp, Artificial
  probe
  misc_feature (1)..(25): SEQ ID NO: 1881; WAN024EW9; Start 136; Stop 160
gccttggagttggtagatgagtatg

SEQ ID NO: 308182 - DNA, 25 bp, Artificial
  probe
  misc_feature (1)..(25): SEQ ID NO: 1881; WAN024EW9; Start 148; Stop 172
gtagatgagtatgagcagctctatg

SEQ ID NO: 308183 - DNA, 25 bp, Artificial
  probe
  misc_feature (1)..(25): SEQ ID NO: 1881; WAN024EW9; Start 135; Stop 159
tgccttggagttggtagatgagtat

SEQ ID NO: 308184 - DNA, 25 bp, Artificial
  probe
  misc_feature (1)..(25): SEQ ID NO: 1881; WAN024EW9; Start 196; Stop 220
gaagctggtacttatacagaggaag

SEQ ID NO: 308185 - DNA, 25 bp, Artificial
  probe
  misc_feature (1)..(25): SEQ ID NO: 1881; WAN024EW9; Start 190; Stop 214
cctacagaagctggtacttatacag

SEQ ID NO: 308186 - DNA, 25 bp, Artificial
  probe
  misc_feature (1)..(25): SEQ ID NO: 1881; WAN024EW9; Start 189; Stop 213
tcctacagaagctggtacttataca

SEQ ID NO: 308187 - DNA, 25 bp, Artificial
  probe
  misc_feature (1)..(25): SEQ ID NO: 1881; WAN024EW9; Start 195; Stop 219
agaagctggtacttatacagaggaa

SEQ ID NO: 308188 - DNA, 25 bp, Artificial
  probe
  misc_feature (1)..(25): SEQ ID NO: 1881; WAN024EW9; Start 192; Stop 216
tacagaagctggtacttatacagag

SEQ ID NO: 308189 - DNA, 25 bp, Artificial
  probe
  misc_feature (1)..(25): SEQ ID NO: 1881; WAN024EW9; Start 191; Stop 215
ctacagaagctggtacttatacaga

SEQ ID NO: 308190 - DNA, 25 bp, Artificial
  probe
  misc_feature (1)..(25): SEQ ID NO: 1881; WAN024EW9; Start 188; Stop 212
atcctacagaagctggtacttatac

SEQ ID NO: 308191 - DNA, 25 bp, Artificial
  probe
  misc_feature (1)..(25): SEQ ID NO: 1881; WAN024EW9; Start 187; Stop 211
catcctacagaagctggtacttata

SEQ ID NO: 308192 - DNA, 25 bp, Artificial
  probe
  misc_feature (1)..(25): SEQ ID NO: 1881; WAN024EW9; Start 408; Stop 432
ctatgagattatcaagagtgagggc

SEQ ID NO: 308193 - DNA, 25 bp, Artificial
  probe
  misc_feature (1)..(25): SEQ ID NO: 1881; WAN024EW9; Start 194; Stop 218
cagaagctggtacttatacagagga

SEQ ID NO: 308194 - DNA, 25 bp, Artificial
  probe
  misc_feature (1)..(25): SEQ ID NO: 1881; WAN024EW9; Start 193; Stop 217
acagaagctggtacttatacagagg

SEQ ID NO: 308195 - DNA, 25 bp, Artificial
  probe
  misc_feature (1)..(25): SEQ ID NO: 1881; WAN024EW9; Start 487; Stop 511
gagaagtttgtggatcttggtatga

SEQ ID NO: 308196 - DNA, 25 bp, Artificial
  probe
  misc_feature (1)..(25): SEQ ID NO: 1881; WAN024EW9; Start 486; Stop 510
agagaagtttgtggatcttggtatg

SEQ ID NO: 308197 - DNA, 25 bp, Artificial
  probe
  misc_feature (1)..(25): SEQ ID NO: 1882; WAN024FOI; Start 171; Stop 195
gatgaataacctaatggaagaagcg

SEQ ID NO: 308198 - DNA, 25 bp, Artificial
  probe
  misc_feature (1)..(25): SEQ ID NO: 1882; WAN024FOI; Start 180; Stop 204
cctaatggaagaagcggatatagtt

SEQ ID NO: 308199 - DNA, 25 bp, Artificial
  probe
  misc_feature (1)..(25): SEQ ID NO: 1882; WAN024FOI; Start 178; Stop 202
aacctaatggaagaagcggatatag

SEQ ID NO: 308200 - DNA, 25 bp, Artificial
  probe
  misc_feature (1)..(25): SEQ ID NO: 1882; WAN024FOI; Start 175; Stop 199
aataacctaatggaagaagcggata

SEQ ID NO: 308201 - DNA, 25 bp, Artificial
  probe
  misc_feature (1)..(25): SEQ ID NO: 1882; WAN024FOI; Start 176; Stop 200
ataacctaatggaagaagcggatat

SEQ ID NO: 308202 - DNA, 25 bp, Artificial
  probe
  misc_feature (1)..(25): SEQ ID NO: 1882; WAN024FOI; Start 174; Stop 198
gaataacctaatggaagaagcggat

SEQ ID NO: 308203 - DNA, 25 bp, Artificial
  probe
  misc_feature (1)..(25): SEQ ID NO: 1882; WAN024FOI; Start 179; Stop 203
acctaatggaagaagcggatatagt

SEQ ID NO: 308204 - DNA, 25 bp, Artificial
  probe
  misc_feature (1)..(25): SEQ ID NO: 1882; WAN024FOI; Start 172; Stop 196
atgaataacctaatggaagaagcgg

SEQ ID NO: 308205 - DNA, 25 bp, Artificial
  probe
  misc_feature (1)..(25): SEQ ID NO: 1882; WAN024FOI; Start 177; Stop 201
taacctaatggaagaagcggatata

SEQ ID NO: 308206 - DNA, 25 bp, Artificial
  probe
  misc_feature (1)..(25): SEQ ID NO: 1882; WAN024FOI; Start 379; Stop 403
atccgagaatacctgaatccatcta

SEQ ID NO: 308207 - DNA, 25 bp, Artificial
  probe
  misc_feature (1)..(25): SEQ ID NO: 1882; WAN024FOI; Start 393; Stop 417
gaatccatctagtagtattgccgtt

SEQ ID NO: 308208 - DNA, 25 bp, Artificial
  probe
  misc_feature (1)..(25): SEQ ID NO: 1882; WAN024FOI; Start 390; Stop 414
cctgaatccatctagtagtattgcc

SEQ ID NO: 308209 - DNA, 25 bp, Artificial
  probe
  misc_feature (1)..(25): SEQ ID NO: 1882; WAN024FOI; Start 389; Stop 413
acctgaatccatctagtagtattgc

SEQ ID NO: 308210 - DNA, 25 bp, Artificial
  probe
  misc_feature (1)..(25): SEQ ID NO: 1882; WAN024FOI; Start 391; Stop 415
ctgaatccatctagtagtattgccg

SEQ ID NO: 308211 - DNA, 25 bp, Artificial
  probe
  misc_feature (1)..(25): SEQ ID NO: 1882; WAN024FOI; Start 170; Stop 194
agatgaataacctaatggaagaagc

SEQ ID NO: 308212 - DNA, 25 bp, Artificial
  probe
  misc_feature (1)..(25): SEQ ID NO: 1882; WAN024FOI; Start 395; Stop 419
atccatctagtagtattgccgttaa

SEQ ID NO: 308213 - DNA, 25 bp, Artificial
  probe
  misc_feature (1)..(25): SEQ ID NO: 1882; WAN024FOI; Start 394; Stop 418
aatccatctagtagtattgccgtta

SEQ ID NO: 308214 - DNA, 25 bp, Artificial
  probe
  misc_feature (1)..(25): SEQ ID NO: 1882; WAN024FOI; Start 378; Stop 402
aatccgagaatacctgaatccatct

SEQ ID NO: 308215 - DNA, 25 bp, Artificial
  probe
  misc_feature (1)..(25): SEQ ID NO: 1882; WAN024FOI; Start 392; Stop 416
tgaatccatctagtagtattgccgt

SEQ ID NO: 308216 - DNA, 25 bp, Artificial
  probe
  misc_feature (1)..(25): SEQ ID NO: 1882; WAN024FOI; Start 173; Stop 197
tgaataacctaatggaagaagcgga

SEQ ID NO: 308217 - DNA, 25 bp, Artificial
  probe
  misc_feature (1)..(25): SEQ ID NO: 1882; WAN024FOI; Start 380; Stop 404
tccgagaatacctgaatccatctag

SEQ ID NO: 308218 - DNA, 25 bp, Artificial
  probe
  misc_feature (1)..(25): SEQ ID NO: 1882; WAN024FOI; Start 382; Stop 406
cgagaatacctgaatccatctagta

SEQ ID NO: 308219 - DNA, 25 bp, Artificial
  probe
  misc_feature (1)..(25): SEQ ID NO: 1882; WAN024FOI; Start 381; Stop 405
ccgagaatacctgaatccatctagt

SEQ ID NO: 308220 - DNA, 25 bp, Artificial
  probe
  misc_feature (1)..(25): SEQ ID NO: 1882; WAN024FOI; Start 185; Stop 209
tggaagaagcggatatagttattac

SEQ ID NO: 308221 - DNA, 25 bp, Artificial
  probe
  misc_feature (1)..(25): SEQ ID NO: 1882; WAN024FOI; Start 183; Stop 207
aatggaagaagcggatatagttatt

SEQ ID NO: 308222 - DNA, 25 bp, Artificial
  probe
  misc_feature (1)..(25): SEQ ID NO: 1882; WAN024FOI; Start 181; Stop 205
ctaatggaagaagcggatatagtta

SEQ ID NO: 308223 - DNA, 25 bp, Artificial
  probe
  misc_feature (1)..(25): SEQ ID NO: 1882; WAN024FOI; Start 199; Stop 223
atagttattactcatggtggtcctg

SEQ ID NO: 308224 - DNA, 25 bp, Artificial
  probe
  misc_feature (1)..(25): SEQ ID NO: 1882; WAN024FOI; Start 295; Stop 319
catgtgaatgaccatcagttagatt

SEQ ID NO: 308225 - DNA, 25 bp, Artificial
  probe
  misc_feature (1)..(25): SEQ ID NO: 1882; WAN024FOI; Start 193; Stop 217
gcggatatagttattactcatggtg

SEQ ID NO: 308226 - DNA, 25 bp, Artificial
  probe
  misc_feature (1)..(25): SEQ ID NO: 1882; WAN024FOI; Start 165; Stop 189
tgatgagatgaataacctaatggaa

SEQ ID NO: 308227 - DNA, 25 bp, Artificial
  probe
  misc_feature (1)..(25): SEQ ID NO: 1882; WAN024FOI; Start 192; Stop 216
agcggatatagttattactcatggt

SEQ ID NO: 308228 - DNA, 25 bp, Artificial
  probe
  misc_feature (1)..(25): SEQ ID NO: 1882; WAN024FOI; Start 384; Stop 408
agaatacctgaatccatctagtagt

SEQ ID NO: 308229 - DNA, 25 bp, Artificial
  probe
  misc_feature (1)..(25): SEQ ID NO: 1882; WAN024FOI; Start 203; Stop 227
ttattactcatggtggtcctgctac

SEQ ID NO: 308230 - DNA, 25 bp, Artificial
  probe
  misc_feature (1)..(25): SEQ ID NO: 1883; WAN024FUJ; Start 132; Stop 156
agtgtattgtcaatggaagaatctg

SEQ ID NO: 308231 - DNA, 25 bp, Artificial
  probe
  misc_feature (1)..(25): SEQ ID NO: 1883; WAN024FUJ; Start 131; Stop 155
cagtgtattgtcaatggaagaatct

SEQ ID NO: 308232 - DNA, 25 bp, Artificial
  probe
  misc_feature (1)..(25): SEQ ID NO: 1883; WAN024FUJ; Start 119; Stop 143
cagattatgaaccagtgtattgtca

SEQ ID NO: 308233 - DNA, 25 bp, Artificial
  probe
  misc_feature (1)..(25): SEQ ID NO: 1883; WAN024FUJ; Start 118; Stop 142
tcagattatgaaccagtgtattgtc

SEQ ID NO: 308234 - DNA, 25 bp, Artificial
  probe
  misc_feature (1)..(25): SEQ ID NO: 1883; WAN024FUJ; Start 133; Stop 157
gtgtattgtcaatggaagaatctga

SEQ ID NO: 308235 - DNA, 25 bp, Artificial
  probe
  misc_feature (1)..(25): SEQ ID NO: 1883; WAN024FUJ; Start 120; Stop 144
agattatgaaccagtgtattgtcaa

SEQ ID NO: 308236 - DNA, 25 bp, Artificial
  probe
  misc_feature (1)..(25): SEQ ID NO: 1883; WAN024FUJ; Start 159; Stop 183
ttcttatgatgagatgaatcgctat

SEQ ID NO: 308237 - DNA, 25 bp, Artificial
  probe
  misc_feature (1)..(25): SEQ ID NO: 1883; WAN024FUJ; Start 256; Stop 280
ataccaatagttgttccgagattaa

SEQ ID NO: 308238 - DNA, 25 bp, Artificial
  probe
  misc_feature (1)..(25): SEQ ID NO: 1883; WAN024FUJ; Start 255; Stop 279
aataccaatagttgttccgagatta

SEQ ID NO: 308239 - DNA, 25 bp, Artificial
  probe
  misc_feature (1)..(25): SEQ ID NO: 1883; WAN024FUJ; Start 134; Stop 158
tgtattgtcaatggaagaatctgat

SEQ ID NO: 308240 - DNA, 25 bp, Artificial
  probe
  misc_feature (1)..(25): SEQ ID NO: 1883; WAN024FUJ; Start 130; Stop 154
ccagtgtattgtcaatggaagaatc

SEQ ID NO: 308241 - DNA, 25 bp, Artificial
  probe
  misc_feature (1)..(25): SEQ ID NO: 1883; WAN024FUJ; Start 124; Stop 148
tatgaaccagtgtattgtcaatgga

SEQ ID NO: 308242 - DNA, 25 bp, Artificial
  probe
  misc_feature (1)..(25): SEQ ID NO: 1883; WAN024FUJ; Start 129; Stop 153
accagtgtattgtcaatggaagaat

SEQ ID NO: 308243 - DNA, 25 bp, Artificial
  probe
  misc_feature (1)..(25): SEQ ID NO: 1883; WAN024FUJ; Start 128; Stop 152
aaccagtgtattgtcaatggaagaa

SEQ ID NO: 308244 - DNA, 25 bp, Artificial
  probe
  misc_feature (1)..(25): SEQ ID NO: 1883; WAN024FUJ; Start 125; Stop 149
atgaaccagtgtattgtcaatggaa

SEQ ID NO: 308245 - DNA, 25 bp, Artificial
  probe
  misc_feature (1)..(25): SEQ ID NO: 1883; WAN024FUJ; Start 123; Stop 147
ttatgaaccagtgtattgtcaatgg

SEQ ID NO: 308246 - DNA, 25 bp, Artificial
  probe
  misc_feature (1)..(25): SEQ ID NO: 1883; WAN024FUJ; Start 127; Stop 151
gaaccagtgtattgtcaatggaaga

SEQ ID NO: 308247 - DNA, 25 bp, Artificial
  probe
  misc_feature (1)..(25): SEQ ID NO: 1883; WAN024FUJ; Start 273; Stop 297
gagattaaagaagtttggtgagcat

SEQ ID NO: 308248 - DNA, 25 bp, Artificial
  probe
  misc_feature (1)..(25): SEQ ID NO: 1883; WAN024FUJ; Start 336; Stop 360
atccgaagggtatgaattatctctg

SEQ ID NO: 308249 - DNA, 25 bp, Artificial
  probe
  misc_feature (1)..(25): SEQ ID NO: 1883; WAN024FUJ; Start 126; Stop 150
tgaaccagtgtattgtcaatggaag

SEQ ID NO: 308250 - DNA, 25 bp, Artificial
  probe
  misc_feature (1)..(25): SEQ ID NO: 1883; WAN024FUJ; Start 338; Stop 362
ccgaagggtatgaattatctctgat

SEQ ID NO: 308251 - DNA, 25 bp, Artificial
  probe
  misc_feature (1)..(25): SEQ ID NO: 1883; WAN024FUJ; Start 337; Stop 361
tccgaagggtatgaattatctctga

SEQ ID NO: 308252 - DNA, 25 bp, Artificial
  probe
  misc_feature (1)..(25): SEQ ID NO: 1883; WAN024FUJ; Start 270; Stop 294
tccgagattaaagaagtttggtgag

SEQ ID NO: 308253 - DNA, 25 bp, Artificial
  probe
  misc_feature (1)..(25): SEQ ID NO: 1883; WAN024FUJ; Start 266; Stop 290
ttgttccgagattaaagaagtttgg

SEQ ID NO: 308254 - DNA, 25 bp, Artificial
  probe
  misc_feature (1)..(25): SEQ ID NO: 1883; WAN024FUJ; Start 269; Stop 293
ttccgagattaaagaagtttggtga

SEQ ID NO: 308255 - DNA, 25 bp, Artificial
  probe
  misc_feature (1)..(25): SEQ ID NO: 1883; WAN024FUJ; Start 268; Stop 292
gttccgagattaaagaagtttggtg

SEQ ID NO: 308256 - DNA, 25 bp, Artificial
  probe
  misc_feature (1)..(25): SEQ ID NO: 1883; WAN024FUJ; Start 267; Stop 291
tgttccgagattaaagaagtttggt

SEQ ID NO: 308257 - DNA, 25 bp, Artificial
  probe
  misc_feature (1)..(25): SEQ ID NO: 1883; WAN024FUJ; Start 122; Stop 146
attatgaaccagtgtattgtcaatg

SEQ ID NO: 308258 - DNA, 25 bp, Artificial
  probe
  misc_feature (1)..(25): SEQ ID NO: 1883; WAN024FUJ; Start 160; Stop 184
tcttatgatgagatgaatcgctata

SEQ ID NO: 308259 - DNA, 25 bp, Artificial
  probe
  misc_feature (1)..(25): SEQ ID NO: 1883; WAN024FUJ; Start 265; Stop 289
gttgttccgagattaaagaagtttg

SEQ ID NO: 308260 - DNA, 25 bp, Artificial
  probe
  misc_feature (1)..(25): SEQ ID NO: 1883; WAN024FUJ; Start 264; Stop 288
agttgttccgagattaaagaagttt

SEQ ID NO: 308261 - DNA, 25 bp, Artificial
  probe
  misc_feature (1)..(25): SEQ ID NO: 1883; WAN024FUJ; Start 258; Stop 282
accaatagttgttccgagattaaag

SEQ ID NO: 308262 - DNA, 25 bp, Artificial
  probe
  misc_feature (1)..(25): SEQ ID NO: 1883; WAN024FUJ; Start 135; Stop 159
gtattgtcaatggaagaatctgatt

SEQ ID NO: 308263 - DNA, 25 bp, Artificial
  probe
  misc_feature (1)..(25): SEQ ID NO: 1884; WAN024FUK; Start 256; Stop 280
agtccgataattgttccgagattaa

SEQ ID NO: 308264 - DNA, 25 bp, Artificial
  probe
  misc_feature (1)..(25): SEQ ID NO: 1884; WAN024FUK; Start 255; Stop 279
aagtccgataattgttccgagatta

SEQ ID NO: 308265 - DNA, 25 bp, Artificial
  probe
  misc_feature (1)..(25): SEQ ID NO: 1884; WAN024FUK; Start 466; Stop 490
attaatcagttgatggagacaggtg

SEQ ID NO: 308266 - DNA, 25 bp, Artificial
  probe
  misc_feature (1)..(25): SEQ ID NO: 1884; WAN024FUK; Start 478; Stop 502
atggagacaggtgacatcaagtatg

SEQ ID NO: 308267 - DNA, 25 bp, Artificial
  probe
  misc_feature (1)..(25): SEQ ID NO: 1884; WAN024FUK; Start 467; Stop 491
ttaatcagttgatggagacaggtga

SEQ ID NO: 308268 - DNA, 25 bp, Artificial
  probe
  misc_feature (1)..(25): SEQ ID NO: 1884; WAN024FUK; Start 296; Stop 320
atgtgaacgaccatcaacttgaatt

SEQ ID NO: 308269 - DNA, 25 bp, Artificial
  probe
  misc_feature (1)..(25): SEQ ID NO: 1884; WAN024FUK; Start 468; Stop 492
taatcagttgatggagacaggtgac

SEQ ID NO: 308270 - DNA, 25 bp, Artificial
  probe
  misc_feature (1)..(25): SEQ ID NO: 1884; WAN024FUK; Start 254; Stop 278
aaagtccgataattgttccgagatt

SEQ ID NO: 308271 - DNA, 25 bp, Artificial
  probe
  misc_feature (1)..(25): SEQ ID NO: 1884; WAN024FUK; Start 480; Stop 504
ggagacaggtgacatcaagtatgac

SEQ ID NO: 308272 - DNA, 25 bp, Artificial
  probe
  misc_feature (1)..(25): SEQ ID NO: 1884; WAN024FUK; Start 295; Stop 319
catgtgaacgaccatcaacttgaat

SEQ ID NO: 308273 - DNA, 25 bp, Artificial
  probe
  misc_feature (1)..(25): SEQ ID NO: 1884; WAN024FUK; Start 257; Stop 281
gtccgataattgttccgagattaaa

SEQ ID NO: 308274 - DNA, 25 bp, Artificial
  probe
  misc_feature (1)..(25): SEQ ID NO: 1884; WAN024FUK; Start 479; Stop 503
tggagacaggtgacatcaagtatga

SEQ ID NO: 308275 - DNA, 25 bp, Artificial
  probe
  misc_feature (1)..(25): SEQ ID NO: 1884; WAN024FUK; Start 300; Stop 324
gaacgaccatcaacttgaatttgtt

SEQ ID NO: 308276 - DNA, 25 bp, Artificial
  probe
  misc_feature (1)..(25): SEQ ID NO: 1884; WAN024FUK; Start 298; Stop 322
gtgaacgaccatcaacttgaatttg

SEQ ID NO: 308277 - DNA, 25 bp, Artificial
  probe
  misc_feature (1)..(25): SEQ ID NO: 1884; WAN024FUK; Start 299; Stop 323
tgaacgaccatcaacttgaatttgt

SEQ ID NO: 308278 - DNA, 25 bp, Artificial
  probe
  misc_feature (1)..(25): SEQ ID NO: 1884; WAN024FUK; Start 297; Stop 321
tgtgaacgaccatcaacttgaattt

SEQ ID NO: 308279 - DNA, 25 bp, Artificial
  probe
  misc_feature (1)..(25): SEQ ID NO: 1884; WAN024FUK; Start 319; Stop 343
tttgttgagaaagtgttaaatgtct

SEQ ID NO: 308280 - DNA, 25 bp, Artificial
  probe
  misc_feature (1)..(25): SEQ ID NO: 1884; WAN024FUK; Start 186; Stop 210
tgaggaagctgatacaatcattacc

SEQ ID NO: 308281 - DNA, 25 bp, Artificial
  probe
  misc_feature (1)..(25): SEQ ID NO: 1884; WAN024FUK; Start 470; Stop 494
atcagttgatggagacaggtgacat

SEQ ID NO: 308282 - DNA, 25 bp, Artificial
  probe
  misc_feature (1)..(25): SEQ ID NO: 1884; WAN024FUK; Start 185; Stop 209
ttgaggaagctgatacaatcattac

SEQ ID NO: 308283 - DNA, 25 bp, Artificial
  probe
  misc_feature (1)..(25): SEQ ID NO: 1884; WAN024FUK; Start 469; Stop 493
aatcagttgatggagacaggtgaca

SEQ ID NO: 308284 - DNA, 25 bp, Artificial
  probe
  misc_feature (1)..(25): SEQ ID NO: 1884; WAN024FUK; Start 477; Stop 501
gatggagacaggtgacatcaagtat

SEQ ID NO: 308285 - DNA, 25 bp, Artificial
  probe
  misc_feature (1)..(25): SEQ ID NO: 1884; WAN024FUK; Start 348; Stop 372
tttgacagtcatcactaacataagt

SEQ ID NO: 308286 - DNA, 25 bp, Artificial
  probe
  misc_feature (1)..(25): SEQ ID NO: 1884; WAN024FUK; Start 14; Stop 38
cagtaggtactcatgaacaacagtt

SEQ ID NO: 308287 - DNA, 25 bp, Artificial
  probe
  misc_feature (1)..(25): SEQ ID NO: 1884; WAN024FUK; Start 12; Stop 36
gacagtaggtactcatgaacaacag

SEQ ID NO: 308288 - DNA, 25 bp, Artificial
  probe
  misc_feature (1)..(25): SEQ ID NO: 1884; WAN024FUK; Start 10; Stop 34
gtgacagtaggtactcatgaacaac

SEQ ID NO: 308289 - DNA, 25 bp, Artificial
  probe
  misc_feature (1)..(25): SEQ ID NO: 1884; WAN024FUK; Start 184; Stop 208
attgaggaagctgatacaatcatta

SEQ ID NO: 308290 - DNA, 25 bp, Artificial
  probe
  misc_feature (1)..(25): SEQ ID NO: 1884; WAN024FUK; Start 183; Stop 207
tattgaggaagctgatacaatcatt

SEQ ID NO: 308291 - DNA, 25 bp, Artificial
  probe
  misc_feature (1)..(25): SEQ ID NO: 1884; WAN024FUK; Start 182; Stop 206
ttattgaggaagctgatacaatcat

SEQ ID NO: 308292 - DNA, 25 bp, Artificial
  probe
  misc_feature (1)..(25): SEQ ID NO: 1884; WAN024FUK; Start 320; Stop 344
ttgttgagaaagtgttaaatgtcta

SEQ ID NO: 308293 - DNA, 25 bp, Artificial
  probe
  misc_feature (1)..(25): SEQ ID NO: 1884; WAN024FUK; Start 13; Stop 37
acagtaggtactcatgaacaacagt

SEQ ID NO: 308294 - DNA, 25 bp, Artificial
  probe
  misc_feature (1)..(25): SEQ ID NO: 1884; WAN024FUK; Start 11; Stop 35
tgacagtaggtactcatgaacaaca

SEQ ID NO: 308295 - DNA, 25 bp, Artificial
  probe
  misc_feature (1)..(25): SEQ ID NO: 1884; WAN024FUK; Start 253; Stop 277
aaaagtccgataattgttccgagat

SEQ ID NO: 308296 - DNA, 25 bp, Artificial
  probe
  misc_feature (1)..(25): SEQ ID NO: 1885; WAN024FUH; Start 451; Stop 475
ttcaatgtggaaatcagtaaccttt

SEQ ID NO: 308297 - DNA, 25 bp, Artificial
  probe
  misc_feature (1)..(25): SEQ ID NO: 1885; WAN024FUH; Start 449; Stop 473
gtttcaatgtggaaatcagtaacct

SEQ ID NO: 308298 - DNA, 25 bp, Artificial
  probe
  misc_feature (1)..(25): SEQ ID NO: 1885; WAN024FUH; Start 450; Stop 474
tttcaatgtggaaatcagtaacctt

SEQ ID NO: 308299 - DNA, 25 bp, Artificial
  probe
  misc_feature (1)..(25): SEQ ID NO: 1885; WAN024FUH; Start 448; Stop 472
cgtttcaatgtggaaatcagtaacc

SEQ ID NO: 308300 - DNA, 25 bp, Artificial
  probe
  misc_feature (1)..(25): SEQ ID NO: 1885; WAN024FUH; Start 425; Stop 449
tgaataacgagagatttaatgtacg

SEQ ID NO: 308301 - DNA, 25 bp, Artificial
  probe
  misc_feature (1)..(25): SEQ ID NO: 1885; WAN024FUH; Start 437; Stop 461
gatttaatgtacgtttcaatgtgga

SEQ ID NO: 308302 - DNA, 25 bp, Artificial
  probe
  misc_feature (1)..(25): SEQ ID NO: 1885; WAN024FUH; Start 436; Stop 460
agatttaatgtacgtttcaatgtgg

SEQ ID NO: 308303 - DNA, 25 bp, Artificial
  probe
  misc_feature (1)..(25): SEQ ID NO: 1885; WAN024FUH; Start 188; Stop 212
aggaatcagatattatcattaccca

SEQ ID NO: 308304 - DNA, 25 bp, Artificial
  probe
  misc_feature (1)..(25): SEQ ID NO: 1885; WAN024FUH; Start 452; Stop 476
tcaatgtggaaatcagtaacctttt

SEQ ID NO: 308305 - DNA, 25 bp, Artificial
  probe
  misc_feature (1)..(25): SEQ ID NO: 1885; WAN024FUH; Start 283; Stop 307
aaatttggtgagcatgtaaatgatc

SEQ ID NO: 308306 - DNA, 25 bp, Artificial
  probe
  misc_feature (1)..(25): SEQ ID NO: 1885; WAN024FUH; Start 432; Stop 456
cgagagatttaatgtacgtttcaat

SEQ ID NO: 308307 - DNA, 25 bp, Artificial
  probe
  misc_feature (1)..(25): SEQ ID NO: 1885; WAN024FUH; Start 228; Stop 252
gtttatggcagttattgctaaaggt

SEQ ID NO: 308308 - DNA, 25 bp, Artificial
  probe
  misc_feature (1)..(25): SEQ ID NO: 1885; WAN024FUH; Start 438; Stop 462
atttaatgtacgtttcaatgtggaa

SEQ ID NO: 308309 - DNA, 25 bp, Artificial
  probe
  misc_feature (1)..(25): SEQ ID NO: 1885; WAN024FUH; Start 447; Stop 471
acgtttcaatgtggaaatcagtaac

SEQ ID NO: 308310 - DNA, 25 bp, Artificial
  probe
  misc_feature (1)..(25): SEQ ID NO: 1885; WAN024FUH; Start 443; Stop 467
atgtacgtttcaatgtggaaatcag

SEQ ID NO: 308311 - DNA, 25 bp, Artificial
  probe
  misc_feature (1)..(25): SEQ ID NO: 1885; WAN024FUH; Start 442; Stop 466
aatgtacgtttcaatgtggaaatca

SEQ ID NO: 308312 - DNA, 25 bp, Artificial
  probe
  misc_feature (1)..(25): SEQ ID NO: 1885; WAN024FUH; Start 445; Stop 469
gtacgtttcaatgtggaaatcagta

SEQ ID NO: 308313 - DNA, 25 bp, Artificial
  probe
  misc_feature (1)..(25): SEQ ID NO: 1885; WAN024FUH; Start 231; Stop 255
tatggcagttattgctaaaggtaaa

SEQ ID NO: 308314 - DNA, 25 bp, Artificial
  probe
  misc_feature (1)..(25): SEQ ID NO: 1885; WAN024FUH; Start 230; Stop 254
ttatggcagttattgctaaaggtaa

SEQ ID NO: 308315 - DNA, 25 bp, Artificial
  probe
  misc_feature (1)..(25): SEQ ID NO: 1885; WAN024FUH; Start 229; Stop 253
tttatggcagttattgctaaaggta

SEQ ID NO: 308316 - DNA, 25 bp, Artificial
  probe
  misc_feature (1)..(25): SEQ ID NO: 1885; WAN024FUH; Start 414; Stop 438
tgaaacttatttgaataacgagaga

SEQ ID NO: 308317 - DNA, 25 bp, Artificial
  probe
  misc_feature (1)..(25): SEQ ID NO: 1885; WAN024FUH; Start 435; Stop 459
gagatttaatgtacgtttcaatgtg

SEQ ID NO: 308318 - DNA, 25 bp, Artificial
  probe
  misc_feature (1)..(25): SEQ ID NO: 1885; WAN024FUH; Start 446; Stop 470
tacgtttcaatgtggaaatcagtaa

SEQ ID NO: 308319 - DNA, 25 bp, Artificial
  probe
  misc_feature (1)..(25): SEQ ID NO: 1885; WAN024FUH; Start 302; Stop 326
atgatcaccagatgcaatttgtaaa

SEQ ID NO: 308320 - DNA, 25 bp, Artificial
  probe
  misc_feature (1)..(25): SEQ ID NO: 1885; WAN024FUH; Start 301; Stop 325
aatgatcaccagatgcaatttgtaa

SEQ ID NO: 308321 - DNA, 25 bp, Artificial
  probe
  misc_feature (1)..(25): SEQ ID NO: 1885; WAN024FUH; Start 434; Stop 458
agagatttaatgtacgtttcaatgt

SEQ ID NO: 308322 - DNA, 25 bp, Artificial
  probe
  misc_feature (1)..(25): SEQ ID NO: 1885; WAN024FUH; Start 296; Stop 320
atgtaaatgatcaccagatgcaatt

SEQ ID NO: 308323 - DNA, 25 bp, Artificial
  probe
  misc_feature (1)..(25): SEQ ID NO: 1885; WAN024FUH; Start 295; Stop 319
catgtaaatgatcaccagatgcaat

SEQ ID NO: 308324 - DNA, 25 bp, Artificial
  probe
  misc_feature (1)..(25): SEQ ID NO: 1885; WAN024FUH; Start 444; Stop 468
tgtacgtttcaatgtggaaatcagt

SEQ ID NO: 308325 - DNA, 25 bp, Artificial
  probe
  misc_feature (1)..(25): SEQ ID NO: 1885; WAN024FUH; Start 189; Stop 213
ggaatcagatattatcattacccat

SEQ ID NO: 308326 - DNA, 25 bp, Artificial
  probe
  misc_feature (1)..(25): SEQ ID NO: 1885; WAN024FUH; Start 187; Stop 211
aaggaatcagatattatcattaccc

SEQ ID NO: 308327 - DNA, 25 bp, Artificial
  probe
  misc_feature (1)..(25): SEQ ID NO: 1885; WAN024FUH; Start 441; Stop 465
taatgtacgtttcaatgtggaaatc

SEQ ID NO: 308328 - DNA, 25 bp, Artificial
  probe
  misc_feature (1)..(25): SEQ ID NO: 1885; WAN024FUH; Start 300; Stop 324
aaatgatcaccagatgcaatttgta

SEQ ID NO: 308329 - DNA, 25 bp, Artificial
  probe
  misc_feature (1)..(25): SEQ ID NO: 1886; WAN024FUI; Start 14; Stop 38
ctgtaggtacacacgaacaacaatt

SEQ ID NO: 308330 - DNA, 25 bp, Artificial
  probe
  misc_feature (1)..(25): SEQ ID NO: 1886; WAN024FUI; Start 197; Stop 221
atattatcattactcatggtggacc

SEQ ID NO: 308331 - DNA, 25 bp, Artificial
  probe
  misc_feature (1)..(25): SEQ ID NO: 1886; WAN024FUI; Start 301; Stop 325
aatgaccatcagcttcaattcgtaa

SEQ ID NO: 308332 - DNA, 25 bp, Artificial
  probe
  misc_feature (1)..(25): SEQ ID NO: 1886; WAN024FUI; Start 199; Stop 223
attatcattactcatggtggaccag

SEQ ID NO: 308333 - DNA, 25 bp, Artificial
  probe
  misc_feature (1)..(25): SEQ ID NO: 1886; WAN024FUI; Start 13; Stop 37
actgtaggtacacacgaacaacaat

SEQ ID NO: 308334 - DNA, 25 bp, Artificial
  probe
  misc_feature (1)..(25): SEQ ID NO: 1886; WAN024FUI; Start 198; Stop 222
tattatcattactcatggtggacca

SEQ ID NO: 308335 - DNA, 25 bp, Artificial
  probe
  misc_feature (1)..(25): SEQ ID NO: 1886; WAN024FUI; Start 17; Stop 41
taggtacacacgaacaacaatttga

SEQ ID NO: 308336 - DNA, 25 bp, Artificial
  probe
  misc_feature (1)..(25): SEQ ID NO: 1886; WAN024FUI; Start 16; Stop 40
gtaggtacacacgaacaacaatttg

SEQ ID NO: 308337 - DNA, 25 bp, Artificial
  probe
  misc_feature (1)..(25): SEQ ID NO: 1886; WAN024FUI; Start 19; Stop 43
ggtacacacgaacaacaatttgatc

SEQ ID NO: 308338 - DNA, 25 bp, Artificial
  probe
  misc_feature (1)..(25): SEQ ID NO: 1886; WAN024FUI; Start 300; Stop 324
gaatgaccatcagcttcaattcgta

SEQ ID NO: 308339 - DNA, 25 bp, Artificial
  probe
  misc_feature (1)..(25): SEQ ID NO: 1886; WAN024FUI; Start 196; Stop 220
gatattatcattactcatggtggac

SEQ ID NO: 308340 - DNA, 25 bp, Artificial
  probe
  misc_feature (1)..(25): SEQ ID NO: 1886; WAN024FUI; Start 194; Stop 218
cagatattatcattactcatggtgg

SEQ ID NO: 308341 - DNA, 25 bp, Artificial
  probe
  misc_feature (1)..(25): SEQ ID NO: 1886; WAN024FUI; Start 18; Stop 42
aggtacacacgaacaacaatttgat

SEQ ID NO: 308342 - DNA, 25 bp, Artificial
  probe
  misc_feature (1)..(25): SEQ ID NO: 1886; WAN024FUI; Start 12; Stop 36
gactgtaggtacacacgaacaacaa

SEQ ID NO: 308343 - DNA, 25 bp, Artificial
  probe
  misc_feature (1)..(25): SEQ ID NO: 1886; WAN024FUI; Start 195; Stop 219
agatattatcattactcatggtgga

SEQ ID NO: 308344 - DNA, 25 bp, Artificial
  probe
  misc_feature (1)..(25): SEQ ID NO: 1886; WAN024FUI; Start 15; Stop 39
tgtaggtacacacgaacaacaattt

SEQ ID NO: 308345 - DNA, 25 bp, Artificial
  probe
  misc_feature (1)..(25): SEQ ID NO: 1886; WAN024FUI; Start 200; Stop 224
ttatcattactcatggtggaccagc

SEQ ID NO: 308346 - DNA, 25 bp, Artificial
  probe
  misc_feature (1)..(25): SEQ ID NO: 1886; WAN024FUI; Start 302; Stop 326
atgaccatcagcttcaattcgtaaa

SEQ ID NO: 308347 - DNA, 25 bp, Artificial
  probe
  misc_feature (1)..(25): SEQ ID NO: 1886; WAN024FUI; Start 296; Stop 320
atgtgaatgaccatcagcttcaatt

SEQ ID NO: 308348 - DNA, 25 bp, Artificial
  probe
  misc_feature (1)..(25): SEQ ID NO: 1886; WAN024FUI; Start 110; Stop 134
taggatattccagttatattccgaa

SEQ ID NO: 308349 - DNA, 25 bp, Artificial
  probe
  misc_feature (1)..(25): SEQ ID NO: 1886; WAN024FUI; Start 109; Stop 133
ataggatattccagttatattccga

SEQ ID NO: 308350 - DNA, 25 bp, Artificial
  probe
  misc_feature (1)..(25): SEQ ID NO: 1886; WAN024FUI; Start 10; Stop 34
gtgactgtaggtacacacgaacaac

SEQ ID NO: 308351 - DNA, 25 bp, Artificial
  probe
  misc_feature (1)..(25): SEQ ID NO: 1886; WAN024FUI; Start 297; Stop 321
tgtgaatgaccatcagcttcaattc

SEQ ID NO: 308352 - DNA, 25 bp, Artificial
  probe
  misc_feature (1)..(25): SEQ ID NO: 1886; WAN024FUI; Start 295; Stop 319
catgtgaatgaccatcagcttcaat

SEQ ID NO: 308353 - DNA, 25 bp, Artificial
  probe
  misc_feature (1)..(25): SEQ ID NO: 1886; WAN024FUI; Start 283; Stop 307
aaatttggagagcatgtgaatgacc

SEQ ID NO: 308354 - DNA, 25 bp, Artificial
  probe
  misc_feature (1)..(25): SEQ ID NO: 1886; WAN024FUI; Start 235; Stop 259
ggggttattgctaaaggaaaagttc

SEQ ID NO: 308355 - DNA, 25 bp, Artificial
  probe
  misc_feature (1)..(25): SEQ ID NO: 1886; WAN024FUI; Start 11; Stop 35
tgactgtaggtacacacgaacaaca

SEQ ID NO: 308356 - DNA, 25 bp, Artificial
  probe
  misc_feature (1)..(25): SEQ ID NO: 1886; WAN024FUI; Start 193; Stop 217
tcagatattatcattactcatggtg

SEQ ID NO: 308357 - DNA, 25 bp, Artificial
  probe
  misc_feature (1)..(25): SEQ ID NO: 1886; WAN024FUI; Start 20; Stop 44
gtacacacgaacaacaatttgatcg

SEQ ID NO: 308358 - DNA, 25 bp, Artificial
  probe
  misc_feature (1)..(25): SEQ ID NO: 1886; WAN024FUI; Start 111; Stop 135
aggatattccagttatattccgaaa

SEQ ID NO: 308359 - DNA, 25 bp, Artificial
  probe
  misc_feature (1)..(25): SEQ ID NO: 1886; WAN024FUI; Start 298; Stop 322
gtgaatgaccatcagcttcaattcg

SEQ ID NO: 308360 - DNA, 25 bp, Artificial
  probe
  misc_feature (1)..(25): SEQ ID NO: 1886; WAN024FUI; Start 251; Stop 275
gaaaagttccgatagttgttccgag

SEQ ID NO: 308361 - DNA, 25 bp, Artificial
  probe
  misc_feature (1)..(25): SEQ ID NO: 1886; WAN024FUI; Start 108; Stop 132
aataggatattccagttatattccg

SEQ ID NO: 308362 - DNA, 25 bp, Artificial
  probe
  misc_feature (1)..(25): SEQ ID NO: 1887; WAN024D67; Start 172; Stop 196
atagcgggtcttgatttatctgttt

SEQ ID NO: 308363 - DNA, 25 bp, Artificial
  probe
  misc_feature (1)..(25): SEQ ID NO: 1887; WAN024D67; Start 173; Stop 197
tagcgggtcttgatttatctgtttg

SEQ ID NO: 308364 - DNA, 25 bp, Artificial
  probe
  misc_feature (1)..(25): SEQ ID NO: 1887; WAN024D67; Start 165; Stop 189
tttacagatagcgggtcttgattta

SEQ ID NO: 308365 - DNA, 25 bp, Artificial
  probe
  misc_feature (1)..(25): SEQ ID NO: 1887; WAN024D67; Start 166; Stop 190
ttacagatagcgggtcttgatttat

SEQ ID NO: 308366 - DNA, 25 bp, Artificial
  probe
  misc_feature (1)..(25): SEQ ID NO: 1887; WAN024D67; Start 164; Stop 188
ctttacagatagcgggtcttgattt

SEQ ID NO: 308367 - DNA, 25 bp, Artificial
  probe
  misc_feature (1)..(25): SEQ ID NO: 1887; WAN024D67; Start 167; Stop 191
tacagatagcgggtcttgatttatc

SEQ ID NO: 308368 - DNA, 25 bp, Artificial
  probe
  misc_feature (1)..(25): SEQ ID NO: 1887; WAN024D67; Start 171; Stop 195
gatagcgggtcttgatttatctgtt

SEQ ID NO: 308369 - DNA, 25 bp, Artificial
  probe
  misc_feature (1)..(25): SEQ ID NO: 1887; WAN024D67; Start 31; Stop 55
gcagtggatatttactccctgattt

SEQ ID NO: 308370 - DNA, 25 bp, Artificial
  probe
  misc_feature (1)..(25): SEQ ID NO: 1887; WAN024D67; Start 163; Stop 187
cctttacagatagcgggtcttgatt

SEQ ID NO: 308371 - DNA, 25 bp, Artificial
  probe
  misc_feature (1)..(25): SEQ ID NO: 1887; WAN024D67; Start 176; Stop 200
cgggtcttgatttatctgtttgggt

SEQ ID NO: 308372 - DNA, 25 bp, Artificial
  probe
  misc_feature (1)..(25): SEQ ID NO: 1887; WAN024D67; Start 14; Stop 38
ttcgtatgatttataatgcagtgga

SEQ ID NO: 308373 - DNA, 25 bp, Artificial
  probe
  misc_feature (1)..(25): SEQ ID NO: 1887; WAN024D67; Start 15; Stop 39
tcgtatgatttataatgcagtggat

SEQ ID NO: 308374 - DNA, 25 bp, Artificial
  probe
  misc_feature (1)..(25): SEQ ID NO: 1887; WAN024D67; Start 174; Stop 198
agcgggtcttgatttatctgtttgg

SEQ ID NO: 308375 - DNA, 25 bp, Artificial
  probe
  misc_feature (1)..(25): SEQ ID NO: 1887; WAN024D67; Start 39; Stop 63
tatttactccctgattttggtagcc

SEQ ID NO: 308376 - DNA, 25 bp, Artificial
  probe
  misc_feature (1)..(25): SEQ ID NO: 1887; WAN024D67; Start 105; Stop 129
tttaggtcgttggattgtagcgttg

SEQ ID NO: 308377 - DNA, 25 bp, Artificial
  probe
  misc_feature (1)..(25): SEQ ID NO: 1887; WAN024D67; Start 104; Stop 128
gtttaggtcgttggattgtagcgtt

SEQ ID NO: 308378 - DNA, 25 bp, Artificial
  probe
  misc_feature (1)..(25): SEQ ID NO: 1887; WAN024D67; Start 27; Stop 51
taatgcagtggatatttactccctg

SEQ ID NO: 308379 - DNA, 25 bp, Artificial
  probe
  misc_feature (1)..(25): SEQ ID NO: 1887; WAN024D67; Start 26; Stop 50
ataatgcagtggatatttactccct

SEQ ID NO: 308380 - DNA, 25 bp, Artificial
  probe
  misc_feature (1)..(25): SEQ ID NO: 1887; WAN024D67; Start 38; Stop 62
atatttactccctgattttggtagc

SEQ ID NO: 308381 - DNA, 25 bp, Artificial
  probe
  misc_feature (1)..(25): SEQ ID NO: 1887; WAN024D67; Start 13; Stop 37
attcgtatgatttataatgcagtgg

SEQ ID NO: 308382 - DNA, 25 bp, Artificial
  probe
  misc_feature (1)..(25): SEQ ID NO: 1887; WAN024D67; Start 40; Stop 64
atttactccctgattttggtagcct

SEQ ID NO: 308383 - DNA, 25 bp, Artificial
  probe
  misc_feature (1)..(25): SEQ ID NO: 1887; WAN024D67; Start 29; Stop 53
atgcagtggatatttactccctgat

SEQ ID NO: 308384 - DNA, 25 bp, Artificial
  probe
  misc_feature (1)..(25): SEQ ID NO: 1887; WAN024D67; Start 41; Stop 65
tttactccctgattttggtagcctt

SEQ ID NO: 308385 - DNA, 25 bp, Artificial
  probe
  misc_feature (1)..(25): SEQ ID NO: 1887; WAN024D67; Start 30; Stop 54
tgcagtggatatttactccctgatt

SEQ ID NO: 308386 - DNA, 25 bp, Artificial
  probe
  misc_feature (1)..(25): SEQ ID NO: 1887; WAN024D67; Start 28; Stop 52
aatgcagtggatatttactccctga

SEQ ID NO: 308387 - DNA, 25 bp, Artificial
  probe
  misc_feature (1)..(25): SEQ ID NO: 1887; WAN024D67; Start 102; Stop 126
cagtttaggtcgttggattgtagcg

SEQ ID NO: 308388 - DNA, 25 bp, Artificial
  probe
  misc_feature (1)..(25): SEQ ID NO: 1887; WAN024D67; Start 42; Stop 66
ttactccctgattttggtagccttc

SEQ ID NO: 308389 - DNA, 25 bp, Artificial
  probe
  misc_feature (1)..(25): SEQ ID NO: 1887; WAN024D67; Start 25; Stop 49
tataatgcagtggatatttactccc

SEQ ID NO: 308390 - DNA, 25 bp, Artificial
  probe
  misc_feature (1)..(25): SEQ ID NO: 1887; WAN024D67; Start 175; Stop 199
gcgggtcttgatttatctgtttggg

SEQ ID NO: 308391 - DNA, 25 bp, Artificial
  probe
  misc_feature (1)..(25): SEQ ID NO: 1887; WAN024D67; Start 35; Stop 59
tggatatttactccctgattttggt

SEQ ID NO: 308392 - DNA, 25 bp, Artificial
  probe
  misc_feature (1)..(25): SEQ ID NO: 1887; WAN024D67; Start 106; Stop 130
ttaggtcgttggattgtagcgttgg

SEQ ID NO: 308393 - DNA, 25 bp, Artificial
  probe
  misc_feature (1)..(25): SEQ ID NO: 1887; WAN024D67; Start 34; Stop 58
gtggatatttactccctgattttgg

SEQ ID NO: 308394 - DNA, 25 bp, Artificial
  probe
  misc_feature (1)..(25): SEQ ID NO: 1887; WAN024D67; Start 16; Stop 40
cgtatgatttataatgcagtggata

SEQ ID NO: 308395 - DNA, 25 bp, Artificial
  probe
  misc_feature (1)..(25): SEQ ID NO: 1888; WAN024E2Q; Start 28; Stop 52
gttgatgaaatggaacaagtaggtt

SEQ ID NO: 308396 - DNA, 25 bp, Artificial
  probe
  misc_feature (1)..(25): SEQ ID NO: 1888; WAN024E2Q; Start 27; Stop 51
agttgatgaaatggaacaagtaggt

SEQ ID NO: 308397 - DNA, 25 bp, Artificial
  probe
  misc_feature (1)..(25): SEQ ID NO: 1888; WAN024E2Q; Start 29; Stop 53
ttgatgaaatggaacaagtaggttt

SEQ ID NO: 308398 - DNA, 25 bp, Artificial
  probe
  misc_feature (1)..(25): SEQ ID NO: 1888; WAN024E2Q; Start 20; Stop 44
ctcagttagttgatgaaatggaaca

SEQ ID NO: 308399 - DNA, 25 bp, Artificial
  probe
  misc_feature (1)..(25): SEQ ID NO: 1888; WAN024E2Q; Start 19; Stop 43
actcagttagttgatgaaatggaac

SEQ ID NO: 308400 - DNA, 25 bp, Artificial
  probe
  misc_feature (1)..(25): SEQ ID NO: 1888; WAN024E2Q; Start 26; Stop 50
tagttgatgaaatggaacaagtagg

SEQ ID NO: 308401 - DNA, 25 bp, Artificial
  probe
  misc_feature (1)..(25): SEQ ID NO: 1888; WAN024E2Q; Start 23; Stop 47
agttagttgatgaaatggaacaagt

SEQ ID NO: 308402 - DNA, 25 bp, Artificial
  probe
  misc_feature (1)..(25): SEQ ID NO: 1888; WAN024E2Q; Start 22; Stop 46
cagttagttgatgaaatggaacaag

SEQ ID NO: 308403 - DNA, 25 bp, Artificial
  probe
  misc_feature (1)..(25): SEQ ID NO: 1888; WAN024E2Q; Start 21; Stop 45
tcagttagttgatgaaatggaacaa

SEQ ID NO: 308404 - DNA, 25 bp, Artificial
  probe
  misc_feature (1)..(25): SEQ ID NO: 1888; WAN024E2Q; Start 61; Stop 85
tttgatgaatttggaaatgttggaa

SEQ ID NO: 308405 - DNA, 25 bp, Artificial
  probe
  misc_feature (1)..(25): SEQ ID NO: 1888; WAN024E2Q; Start 30; Stop 54
tgatgaaatggaacaagtaggttta

SEQ ID NO: 308406 - DNA, 25 bp, Artificial
  probe
  misc_feature (1)..(25): SEQ ID NO: 1888; WAN024E2Q; Start 62; Stop 86
ttgatgaatttggaaatgttggaat

SEQ ID NO: 308407 - DNA, 25 bp, Artificial
  probe
  misc_feature (1)..(25): SEQ ID NO: 1888; WAN024E2Q; Start 57; Stop 81
ccgatttgatgaatttggaaatgtt

SEQ ID NO: 308408 - DNA, 25 bp, Artificial
  probe
  misc_feature (1)..(25): SEQ ID NO: 1888; WAN024E2Q; Start 41; Stop 65
aacaagtaggtttaatccgatttga

SEQ ID NO: 308409 - DNA, 25 bp, Artificial
  probe
  misc_feature (1)..(25): SEQ ID NO: 1888; WAN024E2Q; Start 45; Stop 69
agtaggtttaatccgatttgatgaa

SEQ ID NO: 308410 - DNA, 25 bp, Artificial
  probe
  misc_feature (1)..(25): SEQ ID NO: 1888; WAN024E2Q; Start 44; Stop 68
aagtaggtttaatccgatttgatga

SEQ ID NO: 308411 - DNA, 25 bp, Artificial
  probe
  misc_feature (1)..(25): SEQ ID NO: 1888; WAN024E2Q; Start 42; Stop 66
acaagtaggtttaatccgatttgat

SEQ ID NO: 308412 - DNA, 25 bp, Artificial
  probe
  misc_feature (1)..(25): SEQ ID NO: 1888; WAN024E2Q; Start 40; Stop 64
gaacaagtaggtttaatccgatttg

SEQ ID NO: 308413 - DNA, 25 bp, Artificial
  probe
  misc_feature (1)..(25): SEQ ID NO: 1888; WAN024E2Q; Start 43; Stop 67
caagtaggtttaatccgatttgatg

SEQ ID NO: 308414 - DNA, 25 bp, Artificial
  probe
  misc_feature (1)..(25): SEQ ID NO: 1888; WAN024E2Q; Start 37; Stop 61
atggaacaagtaggtttaatccgat

SEQ ID NO: 308415 - DNA, 25 bp, Artificial
  probe
  misc_feature (1)..(25): SEQ ID NO: 1888; WAN024E2Q; Start 36; Stop 60
aatggaacaagtaggtttaatccga

SEQ ID NO: 308416 - DNA, 25 bp, Artificial
  probe
  misc_feature (1)..(25): SEQ ID NO: 1888; WAN024E2Q; Start 56; Stop 80
tccgatttgatgaatttggaaatgt

SEQ ID NO: 308417 - DNA, 25 bp, Artificial
  probe
  misc_feature (1)..(25): SEQ ID NO: 1888; WAN024E2Q; Start 38; Stop 62
tggaacaagtaggtttaatccgatt

SEQ ID NO: 308418 - DNA, 25 bp, Artificial
  probe
  misc_feature (1)..(25): SEQ ID NO: 1888; WAN024E2Q; Start 35; Stop 59
aaatggaacaagtaggtttaatccg

SEQ ID NO: 308419 - DNA, 25 bp, Artificial
  probe
  misc_feature (1)..(25): SEQ ID NO: 1888; WAN024E2Q; Start 58; Stop 82
cgatttgatgaatttggaaatgttg

SEQ ID NO: 308420 - DNA, 25 bp, Artificial
  probe
  misc_feature (1)..(25): SEQ ID NO: 1888; WAN024E2Q; Start 39; Stop 63
ggaacaagtaggtttaatccgattt

SEQ ID NO: 308421 - DNA, 25 bp, Artificial
  probe
  misc_feature (1)..(25): SEQ ID NO: 1888; WAN024E2Q; Start 63; Stop 87
tgatgaatttggaaatgttggaatt

SEQ ID NO: 308422 - DNA, 25 bp, Artificial
  probe
  misc_feature (1)..(25): SEQ ID NO: 1888; WAN024E2Q; Start 60; Stop 84
atttgatgaatttggaaatgttgga

SEQ ID NO: 308423 - DNA, 25 bp, Artificial
  probe
  misc_feature (1)..(25): SEQ ID NO: 1888; WAN024E2Q; Start 50; Stop 74
gtttaatccgatttgatgaatttgg

SEQ ID NO: 308424 - DNA, 25 bp, Artificial
  probe
  misc_feature (1)..(25): SEQ ID NO: 1888; WAN024E2Q; Start 49; Stop 73
ggtttaatccgatttgatgaatttg

SEQ ID NO: 308425 - DNA, 25 bp, Artificial
  probe
  misc_feature (1)..(25): SEQ ID NO: 1888; WAN024E2Q; Start 59; Stop 83
gatttgatgaatttggaaatgttgg

SEQ ID NO: 308426 - DNA, 25 bp, Artificial
  probe
  misc_feature (1)..(25): SEQ ID NO: 1888; WAN024E2Q; Start 55; Stop 79
atccgatttgatgaatttggaaatg

SEQ ID NO: 308427 - DNA, 25 bp, Artificial
  probe
  misc_feature (1)..(25): SEQ ID NO: 1888; WAN024E2Q; Start 33; Stop 57
tgaaatggaacaagtaggtttaatc

SEQ ID NO: 308428 - DNA, 25 bp, Artificial
  probe
  misc_feature (1)..(25): SEQ ID NO: 1889; WAN024EYQ; Start 71; Stop 95
gtcattaccactacaactacagcaa

SEQ ID NO: 308429 - DNA, 25 bp, Artificial
  probe
  misc_feature (1)..(25): SEQ ID NO: 1889; WAN024EYQ; Start 253; Stop 277
cctgtcatcattgtgaacgatataa

SEQ ID NO: 308430 - DNA, 25 bp, Artificial
  probe
  misc_feature (1)..(25): SEQ ID NO: 1889; WAN024EYQ; Start 68; Stop 92
aaggtcattaccactacaactacag

SEQ ID NO: 308431 - DNA, 25 bp, Artificial
  probe
  misc_feature (1)..(25): SEQ ID NO: 1889; WAN024EYQ; Start 67; Stop 91
caaggtcattaccactacaactaca

SEQ ID NO: 308432 - DNA, 25 bp, Artificial
  probe
  misc_feature (1)..(25): SEQ ID NO: 1889; WAN024EYQ; Start 66; Stop 90
ccaaggtcattaccactacaactac

SEQ ID NO: 308433 - DNA, 25 bp, Artificial
  probe
  misc_feature (1)..(25): SEQ ID NO: 1889; WAN024EYQ; Start 73; Stop 97
cattaccactacaactacagcaaag

SEQ ID NO: 308434 - DNA, 25 bp, Artificial
  probe
  misc_feature (1)..(25): SEQ ID NO: 1889; WAN024EYQ; Start 72; Stop 96
tcattaccactacaactacagcaaa

SEQ ID NO: 308435 - DNA, 25 bp, Artificial
  probe
  misc_feature (1)..(25): SEQ ID NO: 1889; WAN024EYQ; Start 65; Stop 89
accaaggtcattaccactacaacta

SEQ ID NO: 308436 - DNA, 25 bp, Artificial
  probe
  misc_feature (1)..(25): SEQ ID NO: 1889; WAN024EYQ; Start 1319; Stop 1343
tggctatcacaaatcacgaattaga

SEQ ID NO: 308437 - DNA, 25 bp, Artificial
  probe
  misc_feature (1)..(25): SEQ ID NO: 1889; WAN024EYQ; Start 1211; Stop 1235
atgaccctaactatgaagacccaat

SEQ ID NO: 308438 - DNA, 25 bp, Artificial
  probe
  misc_feature (1)..(25): SEQ ID NO: 1889; WAN024EYQ; Start 1318; Stop 1342
atggctatcacaaatcacgaattag

SEQ ID NO: 308439 - DNA, 25 bp, Artificial
  probe
  misc_feature (1)..(25): SEQ ID NO: 1889; WAN024EYQ; Start 1316; Stop 1340
caatggctatcacaaatcacgaatt

SEQ ID NO: 308440 - DNA, 25 bp, Artificial
  probe
  misc_feature (1)..(25): SEQ ID NO: 1889; WAN024EYQ; Start 716; Stop 740
tcatcattaacagtgacatggacca

SEQ ID NO: 308441 - DNA, 25 bp, Artificial
  probe
  misc_feature (1)..(25): SEQ ID NO: 1889; WAN024EYQ; Start 263; Stop 287
ttgtgaacgatataaagaaagccat

SEQ ID NO: 308442 - DNA, 25 bp, Artificial
  probe
  misc_feature (1)..(25): SEQ ID NO: 1889; WAN024EYQ; Start 262; Stop 286
attgtgaacgatataaagaaagcca

SEQ ID NO: 308443 - DNA, 25 bp, Artificial
  probe
  misc_feature (1)..(25): SEQ ID NO: 1889; WAN024EYQ; Start 261; Stop 285
cattgtgaacgatataaagaaagcc

SEQ ID NO: 308444 - DNA, 25 bp, Artificial
  probe
  misc_feature (1)..(25): SEQ ID NO: 1889; WAN024EYQ; Start 1320; Stop 1344
ggctatcacaaatcacgaattagat

SEQ ID NO: 308445 - DNA, 25 bp, Artificial
  probe
  misc_feature (1)..(25): SEQ ID NO: 1889; WAN024EYQ; Start 1317; Stop 1341
aatggctatcacaaatcacgaatta

SEQ ID NO: 308446 - DNA, 25 bp, Artificial
  probe
  misc_feature (1)..(25): SEQ ID NO: 1889; WAN024EYQ; Start 1382; Stop 1406
aaatcatccagggcaagaaagaatc

SEQ ID NO: 308447 - DNA, 25 bp, Artificial
  probe
  misc_feature (1)..(25): SEQ ID NO: 1889; WAN024EYQ; Start 1210; Stop 1234
gatgaccctaactatgaagacccaa

SEQ ID NO: 308448 - DNA, 25 bp, Artificial
  probe
  misc_feature (1)..(25): SEQ ID NO: 1889; WAN024EYQ; Start 664; Stop 688
tttgaagactatttctaccacaagc

SEQ ID NO: 308449 - DNA, 25 bp, Artificial
  probe
  misc_feature (1)..(25): SEQ ID NO: 1889; WAN024EYQ; Start 662; Stop 686
gctttgaagactatttctaccacaa

SEQ ID NO: 308450 - DNA, 25 bp, Artificial
  probe
  misc_feature (1)..(25): SEQ ID NO: 1889; WAN024EYQ; Start 74; Stop 98
attaccactacaactacagcaaagt

SEQ ID NO: 308451 - DNA, 25 bp, Artificial
  probe
  misc_feature (1)..(25): SEQ ID NO: 1889; WAN024EYQ; Start 252; Stop 276
ccctgtcatcattgtgaacgatata

SEQ ID NO: 308452 - DNA, 25 bp, Artificial
  probe
  misc_feature (1)..(25): SEQ ID NO: 1889; WAN024EYQ; Start 1205; Stop 1229
ctgctgatgaccctaactatgaaga

SEQ ID NO: 308453 - DNA, 25 bp, Artificial
  probe
  misc_feature (1)..(25): SEQ ID NO: 1889; WAN024EYQ; Start 444; Stop 468
tcttgatggcgagactttctttaag

SEQ ID NO: 308454 - DNA, 25 bp, Artificial
  probe
  misc_feature (1)..(25): SEQ ID NO: 1889; WAN024EYQ; Start 348; Stop 372
tactggtactaagggtaagacaaca

SEQ ID NO: 308455 - DNA, 25 bp, Artificial
  probe
  misc_feature (1)..(25): SEQ ID NO: 1889; WAN024EYQ; Start 847; Stop 871
ggtaaactcgctggagattatgata

SEQ ID NO: 308456 - DNA, 25 bp, Artificial
  probe
  misc_feature (1)..(25): SEQ ID NO: 1889; WAN024EYQ; Start 1212; Stop 1236
tgaccctaactatgaagacccaatg

SEQ ID NO: 308457 - DNA, 25 bp, Artificial
  probe
  misc_feature (1)..(25): SEQ ID NO: 1889; WAN024EYQ; Start 184; Stop 208
taccttctttctgctataacacaag

SEQ ID NO: 308458 - DNA, 25 bp, Artificial
  probe
  misc_feature (1)..(25): SEQ ID NO: 1889; WAN024EYQ; Start 665; Stop 689
ttgaagactatttctaccacaagcg

SEQ ID NO: 308459 - DNA, 25 bp, Artificial
  probe
  misc_feature (1)..(25): SEQ ID NO: 1889; WAN024EYQ; Start 69; Stop 93
aggtcattaccactacaactacagc

SEQ ID NO: 308460 - DNA, 25 bp, Artificial
  probe
  misc_feature (1)..(25): SEQ ID NO: 1889; WAN024EYQ; Start 1322; Stop 1346
ctatcacaaatcacgaattagatgc

SEQ ID NO: 308461 - DNA, 25 bp, Artificial
  probe
  misc_feature (1)..(25): SEQ ID NO: 1890; WAN024BII; Start 147; Stop 171
aactccagaagagaagatagcagaa

SEQ ID NO: 308462 - DNA, 25 bp, Artificial
  probe
  misc_feature (1)..(25): SEQ ID NO: 1890; WAN024BII; Start 143; Stop 167
ttgaaactccagaagagaagatagc

SEQ ID NO: 308463 - DNA, 25 bp, Artificial
  probe
  misc_feature (1)..(25): SEQ ID NO: 1890; WAN024BII; Start 556; Stop 580
tatttcttggagcgtgatttggttc

SEQ ID NO: 308464 - DNA, 25 bp, Artificial
  probe
  misc_feature (1)..(25): SEQ ID NO: 1890; WAN024BII; Start 145; Stop 169
gaaactccagaagagaagatagcag

SEQ ID NO: 308465 - DNA, 25 bp, Artificial
  probe
  misc_feature (1)..(25): SEQ ID NO: 1890; WAN024BII; Start 148; Stop 172
actccagaagagaagatagcagaaa

SEQ ID NO: 308466 - DNA, 25 bp, Artificial
  probe
  misc_feature (1)..(25): SEQ ID NO: 1890; WAN024BII; Start 146; Stop 170
aaactccagaagagaagatagcaga

SEQ ID NO: 308467 - DNA, 25 bp, Artificial
  probe
  misc_feature (1)..(25): SEQ ID NO: 1890; WAN024BII; Start 555; Stop 579
gtatttcttggagcgtgatttggtt

SEQ ID NO: 308468 - DNA, 25 bp, Artificial
  probe
  misc_feature (1)..(25): SEQ ID NO: 1890; WAN024BII; Start 144; Stop 168
tgaaactccagaagagaagatagca

SEQ ID NO: 308469 - DNA, 25 bp, Artificial
  probe
  misc_feature (1)..(25): SEQ ID NO: 1890; WAN024BII; Start 140; Stop 164
tgtttgaaactccagaagagaagat

SEQ ID NO: 308470 - DNA, 25 bp, Artificial
  probe
  misc_feature (1)..(25): SEQ ID NO: 1890; WAN024BII; Start 139; Stop 163
atgtttgaaactccagaagagaaga

SEQ ID NO: 308471 - DNA, 25 bp, Artificial
  probe
  misc_feature (1)..(25): SEQ ID NO: 1890; WAN024BII; Start 138; Stop 162
catgtttgaaactccagaagagaag

SEQ ID NO: 308472 - DNA, 25 bp, Artificial
  probe
  misc_feature (1)..(25): SEQ ID NO: 1890; WAN024BII; Start 553; Stop 577
cagtatttcttggagcgtgatttgg

SEQ ID NO: 308473 - DNA, 25 bp, Artificial
  probe
  misc_feature (1)..(25): SEQ ID NO: 1890; WAN024BII; Start 142; Stop 166
tttgaaactccagaagagaagatag

SEQ ID NO: 308474 - DNA, 25 bp, Artificial
  probe
  misc_feature (1)..(25): SEQ ID NO: 1890; WAN024BII; Start 141; Stop 165
gtttgaaactccagaagagaagata

SEQ ID NO: 308475 - DNA, 25 bp, Artificial
  probe
  misc_feature (1)..(25): SEQ ID NO: 1890; WAN024BII; Start 554; Stop 578
agtatttcttggagcgtgatttggt

SEQ ID NO: 308476 - DNA, 25 bp, Artificial
  probe
  misc_feature (1)..(25): SEQ ID NO: 1890; WAN024BII; Start 137; Stop 161
gcatgtttgaaactccagaagagaa

SEQ ID NO: 308477 - DNA, 25 bp, Artificial
  probe
  misc_feature (1)..(25): SEQ ID NO: 1890; WAN024BII; Start 151; Stop 175
ccagaagagaagatagcagaaaact

SEQ ID NO: 308478 - DNA, 25 bp, Artificial
  probe
  misc_feature (1)..(25): SEQ ID NO: 1890; WAN024BII; Start 150; Stop 174
tccagaagagaagatagcagaaaac

SEQ ID NO: 308479 - DNA, 25 bp, Artificial
  probe
  misc_feature (1)..(25): SEQ ID NO: 1890; WAN024BII; Start 152; Stop 176
cagaagagaagatagcagaaaactt

SEQ ID NO: 308480 - DNA, 25 bp, Artificial
  probe
  misc_feature (1)..(25): SEQ ID NO: 1890; WAN024BII; Start 558; Stop 582
tttcttggagcgtgatttggttcat

SEQ ID NO: 308481 - DNA, 25 bp, Artificial
  probe
  misc_feature (1)..(25): SEQ ID NO: 1890; WAN024BII; Start 557; Stop 581
atttcttggagcgtgatttggttca

SEQ ID NO: 308482 - DNA, 25 bp, Artificial
  probe
  misc_feature (1)..(25): SEQ ID NO: 1890; WAN024BII; Start 149; Stop 173
ctccagaagagaagatagcagaaaa

SEQ ID NO: 308483 - DNA, 25 bp, Artificial
  probe
  misc_feature (1)..(25): SEQ ID NO: 1890; WAN024BII; Start 153; Stop 177
agaagagaagatagcagaaaacttt

SEQ ID NO: 308484 - DNA, 25 bp, Artificial
  probe
  misc_feature (1)..(25): SEQ ID NO: 1890; WAN024BII; Start 136; Stop 160
ggcatgtttgaaactccagaagaga

SEQ ID NO: 308485 - DNA, 25 bp, Artificial
  probe
  misc_feature (1)..(25): SEQ ID NO: 1890; WAN024BII; Start 371; Stop 395
aaatattgatgttgggaattactcc

SEQ ID NO: 308486 - DNA, 25 bp, Artificial
  probe
  misc_feature (1)..(25): SEQ ID NO: 1890; WAN024BII; Start 488; Stop 512
atagttcacatgtcctcaaatccaa

SEQ ID NO: 308487 - DNA, 25 bp, Artificial
  probe
  misc_feature (1)..(25): SEQ ID NO: 1890; WAN024BII; Start 487; Stop 511
aatagttcacatgtcctcaaatcca

SEQ ID NO: 308488 - DNA, 25 bp, Artificial
  probe
  misc_feature (1)..(25): SEQ ID NO: 1890; WAN024BII; Start 133; Stop 157
aagggcatgtttgaaactccagaag

SEQ ID NO: 308489 - DNA, 25 bp, Artificial
  probe
  misc_feature (1)..(25): SEQ ID NO: 1890; WAN024BII; Start 489; Stop 513
tagttcacatgtcctcaaatccaaa

SEQ ID NO: 308490 - DNA, 25 bp, Artificial
  probe
  misc_feature (1)..(25): SEQ ID NO: 1890; WAN024BII; Start 486; Stop 510
aaatagttcacatgtcctcaaatcc

SEQ ID NO: 308491 - DNA, 25 bp, Artificial
  probe
  misc_feature (1)..(25): SEQ ID NO: 1890; WAN024BII; Start 493; Stop 517
tcacatgtcctcaaatccaaacttt

SEQ ID NO: 308492 - DNA, 25 bp, Artificial
  probe
  misc_feature (1)..(25): SEQ ID NO: 1890; WAN024BII; Start 492; Stop 516
ttcacatgtcctcaaatccaaactt

SEQ ID NO: 308493 - DNA, 25 bp, Artificial
  probe
  misc_feature (1)..(25): SEQ ID NO: 1890; WAN024BII; Start 132; Stop 156
caagggcatgtttgaaactccagaa

SEQ ID NO: 308494 - DNA, 25 bp, Artificial
  probe
  misc_feature (1)..(25): SEQ ID NO: 1891; WAN024CYD; Start 510; Stop 534
gagagacactgcttacctatcaatg

SEQ ID NO: 308495 - DNA, 25 bp, Artificial
  probe
  misc_feature (1)..(25): SEQ ID NO: 1891; WAN024CYD; Start 505; Stop 529
ttgatgagagacactgcttacctat

SEQ ID NO: 308496 - DNA, 25 bp, Artificial
  probe
  misc_feature (1)..(25): SEQ ID NO: 1891; WAN024CYD; Start 608; Stop 632
atgaatcggtagatatgacggagtt

SEQ ID NO: 308497 - DNA, 25 bp, Artificial
  probe
  misc_feature (1)..(25): SEQ ID NO: 1891; WAN024CYD; Start 607; Stop 631
aatgaatcggtagatatgacggagt

SEQ ID NO: 308498 - DNA, 25 bp, Artificial
  probe
  misc_feature (1)..(25): SEQ ID NO: 1891; WAN024CYD; Start 506; Stop 530
tgatgagagacactgcttacctatc

SEQ ID NO: 308499 - DNA, 25 bp, Artificial
  probe
  misc_feature (1)..(25): SEQ ID NO: 1891; WAN024CYD; Start 504; Stop 528
cttgatgagagacactgcttaccta

SEQ ID NO: 308500 - DNA, 25 bp, Artificial
  probe
  misc_feature (1)..(25): SEQ ID NO: 1891; WAN024CYD; Start 509; Stop 533
tgagagacactgcttacctatcaat

SEQ ID NO: 308501 - DNA, 25 bp, Artificial
  probe
  misc_feature (1)..(25): SEQ ID NO: 1891; WAN024CYD; Start 508; Stop 532
atgagagacactgcttacctatcaa

SEQ ID NO: 308502 - DNA, 25 bp, Artificial
  probe
  misc_feature (1)..(25): SEQ ID NO: 1891; WAN024CYD; Start 511; Stop 535
agagacactgcttacctatcaatgg

SEQ ID NO: 308503 - DNA, 25 bp, Artificial
  probe
  misc_feature (1)..(25): SEQ ID NO: 1891; WAN024CYD; Start 291; Stop 315
gtctccagatattcctcatgctatt

SEQ ID NO: 308504 - DNA, 25 bp, Artificial
  probe
  misc_feature (1)..(25): SEQ ID NO: 1891; WAN024CYD; Start 1425; Stop 1449
ttacacacttgaacttcctgaagat

SEQ ID NO: 308505 - DNA, 25 bp, Artificial
  probe
  misc_feature (1)..(25): SEQ ID NO: 1891; WAN024CYD; Start 290; Stop 314
tgtctccagatattcctcatgctat

SEQ ID NO: 308506 - DNA, 25 bp, Artificial
  probe
  misc_feature (1)..(25): SEQ ID NO: 1891; WAN024CYD; Start 1426; Stop 1450
tacacacttgaacttcctgaagatg

SEQ ID NO: 308507 - DNA, 25 bp, Artificial
  probe
  misc_feature (1)..(25): SEQ ID NO: 1891; WAN024CYD; Start 287; Stop 311
atatgtctccagatattcctcatgc

SEQ ID NO: 308508 - DNA, 25 bp, Artificial
  probe
  misc_feature (1)..(25): SEQ ID NO: 1891; WAN024CYD; Start 609; Stop 633
tgaatcggtagatatgacggagttc

SEQ ID NO: 308509 - DNA, 25 bp, Artificial
  probe
  misc_feature (1)..(25): SEQ ID NO: 1891; WAN024CYD; Start 507; Stop 531
gatgagagacactgcttacctatca

SEQ ID NO: 308510 - DNA, 25 bp, Artificial
  probe
  misc_feature (1)..(25): SEQ ID NO: 1891; WAN024CYD; Start 1463; Stop 1487
tagataatcgtacagatccaggatg

SEQ ID NO: 308511 - DNA, 25 bp, Artificial
  probe
  misc_feature (1)..(25): SEQ ID NO: 1891; WAN024CYD; Start 289; Stop 313
atgtctccagatattcctcatgcta

SEQ ID NO: 308512 - DNA, 25 bp, Artificial
  probe
  misc_feature (1)..(25): SEQ ID NO: 1891; WAN024CYD; Start 288; Stop 312
tatgtctccagatattcctcatgct

SEQ ID NO: 308513 - DNA, 25 bp, Artificial
  probe
  misc_feature (1)..(25): SEQ ID NO: 1891; WAN024CYD; Start 1424; Stop 1448
gttacacacttgaacttcctgaaga

SEQ ID NO: 308514 - DNA, 25 bp, Artificial
  probe
  misc_feature (1)..(25): SEQ ID NO: 1891; WAN024CYD; Start 610; Stop 634
gaatcggtagatatgacggagttca

SEQ ID NO: 308515 - DNA, 25 bp, Artificial
  probe
  misc_feature (1)..(25): SEQ ID NO: 1891; WAN024CYD; Start 1462; Stop 1486
ttagataatcgtacagatccaggat

SEQ ID NO: 308516 - DNA, 25 bp, Artificial
  probe
  misc_feature (1)..(25): SEQ ID NO: 1891; WAN024CYD; Start 611; Stop 635
aatcggtagatatgacggagttcac

SEQ ID NO: 308517 - DNA, 25 bp, Artificial
  probe
  misc_feature (1)..(25): SEQ ID NO: 1891; WAN024CYD; Start 1423; Stop 1447
ggttacacacttgaacttcctgaag

SEQ ID NO: 308518 - DNA, 25 bp, Artificial
  probe
  misc_feature (1)..(25): SEQ ID NO: 1891; WAN024CYD; Start 285; Stop 309
ggatatgtctccagatattcctcat

SEQ ID NO: 308519 - DNA, 25 bp, Artificial
  probe
  misc_feature (1)..(25): SEQ ID NO: 1891; WAN024CYD; Start 1428; Stop 1452
cacacttgaacttcctgaagatgtt

SEQ ID NO: 308520 - DNA, 25 bp, Artificial
  probe
  misc_feature (1)..(25): SEQ ID NO: 1891; WAN024CYD; Start 239; Stop 263
caacaattacagttacaccatgctg

SEQ ID NO: 308521 - DNA, 25 bp, Artificial
  probe
  misc_feature (1)..(25): SEQ ID NO: 1891; WAN024CYD; Start 286; Stop 310
gatatgtctccagatattcctcatg

SEQ ID NO: 308522 - DNA, 25 bp, Artificial
  probe
  misc_feature (1)..(25): SEQ ID NO: 1891; WAN024CYD; Start 1014; Stop 1038
actaaatggtgtgtctatgctcttt

SEQ ID NO: 308523 - DNA, 25 bp, Artificial
  probe
  misc_feature (1)..(25): SEQ ID NO: 1891; WAN024CYD; Start 1361; Stop 1385
cagtaacaatggtacgtctcaatct

SEQ ID NO: 308524 - DNA, 25 bp, Artificial
  probe
  misc_feature (1)..(25): SEQ ID NO: 1891; WAN024CYD; Start 606; Stop 630
aaatgaatcggtagatatgacggag

SEQ ID NO: 308525 - DNA, 25 bp, Artificial
  probe
  misc_feature (1)..(25): SEQ ID NO: 1891; WAN024CYD; Start 605; Stop 629
gaaatgaatcggtagatatgacgga

SEQ ID NO: 308526 - DNA, 25 bp, Artificial
  probe
  misc_feature (1)..(25): SEQ ID NO: 1891; WAN024CYD; Start 1422; Stop 1446
aggttacacacttgaacttcctgaa

SEQ ID NO: 308527 - DNA, 25 bp, Artificial
  probe
  misc_feature (1)..(25): SEQ ID NO: 1892; WAN024F8N; Start 496; Stop 520
cttgtcggattgaagattactggac

SEQ ID NO: 308528 - DNA, 25 bp, Artificial
  probe
  misc_feature (1)..(25): SEQ ID NO: 1892; WAN024F8N; Start 498; Stop 522
tgtcggattgaagattactggactt

SEQ ID NO: 308529 - DNA, 25 bp, Artificial
  probe
  misc_feature (1)..(25): SEQ ID NO: 1892; WAN024F8N; Start 497; Stop 521
ttgtcggattgaagattactggact

SEQ ID NO: 308530 - DNA, 25 bp, Artificial
  probe
  misc_feature (1)..(25): SEQ ID NO: 1892; WAN024F8N; Start 462; Stop 486
tttggtaatcggtttgtcattgatg

SEQ ID NO: 308531 - DNA, 25 bp, Artificial
  probe
  misc_feature (1)..(25): SEQ ID NO: 1892; WAN024F8N; Start 461; Stop 485
gtttggtaatcggtttgtcattgat

SEQ ID NO: 308532 - DNA, 25 bp, Artificial
  probe
  misc_feature (1)..(25): SEQ ID NO: 1892; WAN024F8N; Start 500; Stop 524
tcggattgaagattactggactttc

SEQ ID NO: 308533 - DNA, 25 bp, Artificial
  probe
  misc_feature (1)..(25): SEQ ID NO: 1892; WAN024F8N; Start 214; Stop 238
cgtttgtcatcttcagaacttgtaa

SEQ ID NO: 308534 - DNA, 25 bp, Artificial
  probe
  misc_feature (1)..(25): SEQ ID NO: 1892; WAN024F8N; Start 217; Stop 241
ttgtcatcttcagaacttgtaaact

SEQ ID NO: 308535 - DNA, 25 bp, Artificial
  probe
  misc_feature (1)..(25): SEQ ID NO: 1892; WAN024F8N; Start 363; Stop 387
ctttggtggtttcttgtttgaagtc

SEQ ID NO: 308536 - DNA, 25 bp, Artificial
  probe
  misc_feature (1)..(25): SEQ ID NO: 1892; WAN024F8N; Start 361; Stop 385
gtctttggtggtttcttgtttgaag

SEQ ID NO: 308537 - DNA, 25 bp, Artificial
  probe
  misc_feature (1)..(25): SEQ ID NO: 1892; WAN024F8N; Start 489; Stop 513
gatgattcttgtcggattgaagatt

SEQ ID NO: 308538 - DNA, 25 bp, Artificial
  probe
  misc_feature (1)..(25): SEQ ID NO: 1892; WAN024F8N; Start 8; Stop 32
aatttgttgctgagttaatcggtac

SEQ ID NO: 308539 - DNA, 25 bp, Artificial
  probe
  misc_feature (1)..(25): SEQ ID NO: 1892; WAN024F8N; Start 494; Stop 518
ttcttgtcggattgaagattactgg

SEQ ID NO: 308540 - DNA, 25 bp, Artificial
  probe
  misc_feature (1)..(25): SEQ ID NO: 1892; WAN024F8N; Start 493; Stop 517
attcttgtcggattgaagattactg

SEQ ID NO: 308541 - DNA, 25 bp, Artificial
  probe
  misc_feature (1)..(25): SEQ ID NO: 1892; WAN024F8N; Start 491; Stop 515
tgattcttgtcggattgaagattac

SEQ ID NO: 308542 - DNA, 25 bp, Artificial
  probe
  misc_feature (1)..(25): SEQ ID NO: 1892; WAN024F8N; Start 362; Stop 386
tctttggtggtttcttgtttgaagt

SEQ ID NO: 308543 - DNA, 25 bp, Artificial
  probe
  misc_feature (1)..(25): SEQ ID NO: 1892; WAN024F8N; Start 365; Stop 389
ttggtggtttcttgtttgaagtcat

SEQ ID NO: 308544 - DNA, 25 bp, Artificial
  probe
  misc_feature (1)..(25): SEQ ID NO: 1892; WAN024F8N; Start 492; Stop 516
gattcttgtcggattgaagattact

SEQ ID NO: 308545 - DNA, 25 bp, Artificial
  probe
  misc_feature (1)..(25): SEQ ID NO: 1892; WAN024F8N; Start 360; Stop 384
tgtctttggtggtttcttgtttgaa

SEQ ID NO: 308546 - DNA, 25 bp, Artificial
  probe
  misc_feature (1)..(25): SEQ ID NO: 1892; WAN024F8N; Start 488; Stop 512
cgatgattcttgtcggattgaagat

SEQ ID NO: 308547 - DNA, 25 bp, Artificial
  probe
  misc_feature (1)..(25): SEQ ID NO: 1892; WAN024F8N; Start 463; Stop 487
ttggtaatcggtttgtcattgatgg

SEQ ID NO: 308548 - DNA, 25 bp, Artificial
  probe
  misc_feature (1)..(25): SEQ ID NO: 1892; WAN024F8N; Start 458; Stop 482
ctggtttggtaatcggtttgtcatt

SEQ ID NO: 308549 - DNA, 25 bp, Artificial
  probe
  misc_feature (1)..(25): SEQ ID NO: 1892; WAN024F8N; Start 364; Stop 388
tttggtggtttcttgtttgaagtca

SEQ ID NO: 308550 - DNA, 25 bp, Artificial
  probe
  misc_feature (1)..(25): SEQ ID NO: 1892; WAN024F8N; Start 359; Stop 383
ctgtctttggtggtttcttgtttga

SEQ ID NO: 308551 - DNA, 25 bp, Artificial
  probe
  misc_feature (1)..(25): SEQ ID NO: 1892; WAN024F8N; Start 216; Stop 240
tttgtcatcttcagaacttgtaaac

SEQ ID NO: 308552 - DNA, 25 bp, Artificial
  probe
  misc_feature (1)..(25): SEQ ID NO: 1892; WAN024F8N; Start 495; Stop 519
tcttgtcggattgaagattactgga

SEQ ID NO: 308553 - DNA, 25 bp, Artificial
  probe
  misc_feature (1)..(25): SEQ ID NO: 1892; WAN024F8N; Start 460; Stop 484
ggtttggtaatcggtttgtcattga

SEQ ID NO: 308554 - DNA, 25 bp, Artificial
  probe
  misc_feature (1)..(25): SEQ ID NO: 1892; WAN024F8N; Start 218; Stop 242
tgtcatcttcagaacttgtaaacta

SEQ ID NO: 308555 - DNA, 25 bp, Artificial
  probe
  misc_feature (1)..(25): SEQ ID NO: 1892; WAN024F8N; Start 366; Stop 390
tggtggtttcttgtttgaagtcatc

SEQ ID NO: 308556 - DNA, 25 bp, Artificial
  probe
  misc_feature (1)..(25): SEQ ID NO: 1892; WAN024F8N; Start 499; Stop 523
gtcggattgaagattactggacttt

SEQ ID NO: 308557 - DNA, 25 bp, Artificial
  probe
  misc_feature (1)..(25): SEQ ID NO: 1892; WAN024F8N; Start 459; Stop 483
tggtttggtaatcggtttgtcattg

SEQ ID NO: 308558 - DNA, 25 bp, Artificial
  probe
  misc_feature (1)..(25): SEQ ID NO: 1892; WAN024F8N; Start 490; Stop 514
atgattcttgtcggattgaagatta

SEQ ID NO: 308559 - DNA, 25 bp, Artificial
  probe
  misc_feature (1)..(25): SEQ ID NO: 1892; WAN024F8N; Start 371; Stop 395
gtttcttgtttgaagtcatcgcaac

SEQ ID NO: 308560 - DNA, 25 bp, Artificial
  probe
  misc_feature (1)..(25): SEQ ID NO: 1893; WAN0249MT; Start 137; Stop 161
gatatactaacctaatcaaggagga

SEQ ID NO: 308561 - DNA, 25 bp, Artificial
  probe
  misc_feature (1)..(25): SEQ ID NO: 1893; WAN0249MT; Start 136; Stop 160
tgatatactaacctaatcaaggagg

SEQ ID NO: 308562 - DNA, 25 bp, Artificial
  probe
  misc_feature (1)..(25): SEQ ID NO: 1893; WAN0249MT; Start 138; Stop 162
atatactaacctaatcaaggaggat

SEQ ID NO: 308563 - DNA, 25 bp, Artificial
  probe
  misc_feature (1)..(25): SEQ ID NO: 1893; WAN0249MT; Start 139; Stop 163
tatactaacctaatcaaggaggatt

SEQ ID NO: 308564 - DNA, 25 bp, Artificial
  probe
  misc_feature (1)..(25): SEQ ID NO: 1893; WAN0249MT; Start 140; Stop 164
atactaacctaatcaaggaggattt

SEQ ID NO: 308565 - DNA, 25 bp, Artificial
  probe
  misc_feature (1)..(25): SEQ ID NO: 1893; WAN0249MT; Start 6; Stop 30
ttctcctttgactgtccgttaagcc

SEQ ID NO: 308566 - DNA, 25 bp, Artificial
  probe
  misc_feature (1)..(25): SEQ ID NO: 1893; WAN0249MT; Start 135; Stop 159
atgatatactaacctaatcaaggag

SEQ ID NO: 308567 - DNA, 25 bp, Artificial
  probe
  misc_feature (1)..(25): SEQ ID NO: 1893; WAN0249MT; Start 33; Stop 57
cttaacgtgtaatcgttttctttct

SEQ ID NO: 308568 - DNA, 25 bp, Artificial
  probe
  misc_feature (1)..(25): SEQ ID NO: 1893; WAN0249MT; Start 36; Stop 60
aacgtgtaatcgttttctttctatt

SEQ ID NO: 308569 - DNA, 25 bp, Artificial
  probe
  misc_feature (1)..(25): SEQ ID NO: 1893; WAN0249MT; Start 34; Stop 58
ttaacgtgtaatcgttttctttcta

SEQ ID NO: 308570 - DNA, 25 bp, Artificial
  probe
  misc_feature (1)..(25): SEQ ID NO: 1893; WAN0249MT; Start 35; Stop 59
taacgtgtaatcgttttctttctat

SEQ ID NO: 308571 - DNA, 25 bp, Artificial
  probe
  misc_feature (1)..(25): SEQ ID NO: 1894; WAN024CI7; Start 2128; Stop 2152
attatctgtccttctcatagtgcct

SEQ ID NO: 308572 - DNA, 25 bp, Artificial
  probe
  misc_feature (1)..(25): SEQ ID NO: 1894; WAN024CI7; Start 2127; Stop 2151
aattatctgtccttctcatagtgcc

SEQ ID NO: 308573 - DNA, 25 bp, Artificial
  probe
  misc_feature (1)..(25): SEQ ID NO: 1894; WAN024CI7; Start 1420; Stop 1444
ttgaaggagaagatggatgcttatt

SEQ ID NO: 308574 - DNA, 25 bp, Artificial
  probe
  misc_feature (1)..(25): SEQ ID NO: 1894; WAN024CI7; Start 2129; Stop 2153
ttatctgtccttctcatagtgcctt

SEQ ID NO: 308575 - DNA, 25 bp, Artificial
  probe
  misc_feature (1)..(25): SEQ ID NO: 1894; WAN024CI7; Start 1419; Stop 1443
gttgaaggagaagatggatgcttat

SEQ ID NO: 308576 - DNA, 25 bp, Artificial
  probe
  misc_feature (1)..(25): SEQ ID NO: 1894; WAN024CI7; Start 460; Stop 484
gaacgactaattgaacagagcattg

SEQ ID NO: 308577 - DNA, 25 bp, Artificial
  probe
  misc_feature (1)..(25): SEQ ID NO: 1894; WAN024CI7; Start 459; Stop 483
agaacgactaattgaacagagcatt

SEQ ID NO: 308578 - DNA, 25 bp, Artificial
  probe
  misc_feature (1)..(25): SEQ ID NO: 1894; WAN024CI7; Start 458; Stop 482
aagaacgactaattgaacagagcat

SEQ ID NO: 308579 - DNA, 25 bp, Artificial
  probe
  misc_feature (1)..(25): SEQ ID NO: 1894; WAN024CI7; Start 2123; Stop 2147
agcgaattatctgtccttctcatag

SEQ ID NO: 308580 - DNA, 25 bp, Artificial
  probe
  misc_feature (1)..(25): SEQ ID NO: 1894; WAN024CI7; Start 2120; Stop 2144
ttaagcgaattatctgtccttctca

SEQ ID NO: 308581 - DNA, 25 bp, Artificial
  probe
  misc_feature (1)..(25): SEQ ID NO: 1894; WAN024CI7; Start 1752; Stop 1776
ctaccaggattatgatgaagagttg

SEQ ID NO: 308582 - DNA, 25 bp, Artificial
  probe
  misc_feature (1)..(25): SEQ ID NO: 1894; WAN024CI7; Start 1454; Stop 1478
acctactgacttcaacatccgatat

SEQ ID NO: 308583 - DNA, 25 bp, Artificial
  probe
  misc_feature (1)..(25): SEQ ID NO: 1894; WAN024CI7; Start 2124; Stop 2148
gcgaattatctgtccttctcatagt

SEQ ID NO: 308584 - DNA, 25 bp, Artificial
  probe
  misc_feature (1)..(25): SEQ ID NO: 1894; WAN024CI7; Start 2122; Stop 2146
aagcgaattatctgtccttctcata

SEQ ID NO: 308585 - DNA, 25 bp, Artificial
  probe
  misc_feature (1)..(25): SEQ ID NO: 1894; WAN024CI7; Start 2121; Stop 2145
taagcgaattatctgtccttctcat

SEQ ID NO: 308586 - DNA, 25 bp, Artificial
  probe
  misc_feature (1)..(25): SEQ ID NO: 1894; WAN024CI7; Start 560; Stop 584
aagatgattggttagaactaggtcg

SEQ ID NO: 308587 - DNA, 25 bp, Artificial
  probe
  misc_feature (1)..(25): SEQ ID NO: 1894; WAN024CI7; Start 1453; Stop 1477
aacctactgacttcaacatccgata

SEQ ID NO: 308588 - DNA, 25 bp, Artificial
  probe
  misc_feature (1)..(25): SEQ ID NO: 1894; WAN024CI7; Start 2126; Stop 2150
gaattatctgtccttctcatagtgc

SEQ ID NO: 308589 - DNA, 25 bp, Artificial
  probe
  misc_feature (1)..(25): SEQ ID NO: 1894; WAN024CI7; Start 1449; Stop 1473
tatcaacctactgacttcaacatcc

SEQ ID NO: 308590 - DNA, 25 bp, Artificial
  probe
  misc_feature (1)..(25): SEQ ID NO: 1894; WAN024CI7; Start 485; Stop 509
ttacaatgaaggaagttgaagaagg

SEQ ID NO: 308591 - DNA, 25 bp, Artificial
  probe
  misc_feature (1)..(25): SEQ ID NO: 1894; WAN024CI7; Start 2125; Stop 2149
cgaattatctgtccttctcatagtg

SEQ ID NO: 308592 - DNA, 25 bp, Artificial
  probe
  misc_feature (1)..(25): SEQ ID NO: 1894; WAN024CI7; Start 2119; Stop 2143
attaagcgaattatctgtccttctc

SEQ ID NO: 308593 - DNA, 25 bp, Artificial
  probe
  misc_feature (1)..(25): SEQ ID NO: 1894; WAN024CI7; Start 1418; Stop 1442
agttgaaggagaagatggatgctta

SEQ ID NO: 308594 - DNA, 25 bp, Artificial
  probe
  misc_feature (1)..(25): SEQ ID NO: 1894; WAN024CI7; Start 486; Stop 510
tacaatgaaggaagttgaagaaggc

SEQ ID NO: 308595 - DNA, 25 bp, Artificial
  probe
  misc_feature (1)..(25): SEQ ID NO: 1894; WAN024CI7; Start 156; Stop 180
tcgcatgttaggtagtgagattatc

SEQ ID NO: 308596 - DNA, 25 bp, Artificial
  probe
  misc_feature (1)..(25): SEQ ID NO: 1894; WAN024CI7; Start 483; Stop 507
tgttacaatgaaggaagttgaagaa
